United States Patent Application Publication US 2005/0244851 A1 - sequence listing, part 51

SEQ ID NO: 1977923 - DNA, 25 bp, Homo sapien
tggcccgccactgcataaagactat

SEQ ID NO: 1977924 - DNA, 25 bp, Homo sapien
caagagtctccttacaggcaagttc

SEQ ID NO: 1977925 - DNA, 25 bp, Homo sapien
ctttctcttaaggttgggcgctgca

SEQ ID NO: 1977926 - DNA, 25 bp, Homo sapien
tgtatgtgcactgccttgcaagcat

SEQ ID NO: 1977927 - DNA, 25 bp, Homo sapien
cagaggcctcttgtatgtgcactgc

SEQ ID NO: 1977928 - DNA, 25 bp, Homo sapien
gcctcttgtatgtgcactgccttgc

SEQ ID NO: 1977929 - DNA, 25 bp, Homo sapien
gctttcagaggcctcttgtatgtgc

SEQ ID NO: 1977930 - DNA, 25 bp, Homo sapien
acaggggctctgcacagttcccagg

SEQ ID NO: 1977931 - DNA, 25 bp, Homo sapien
ggggctctgcacagttcccagggct

SEQ ID NO: 1977932 - DNA, 25 bp, Homo sapien
gttcccagggctcatggagtcactc

SEQ ID NO: 1977933 - DNA, 25 bp, Homo sapien
ggagacaggggctctgcacagttcc

SEQ ID NO: 1977934 - DNA, 25 bp, Homo sapien
cttccattgcaacatgtgagcagat

SEQ ID NO: 1977935 - DNA, 25 bp, Homo sapien
tcctcttccattgcaacatgtgagc

SEQ ID NO: 1977936 - DNA, 25 bp, Homo sapien
tatacatgtacggaatacttccttg

SEQ ID NO: 1977937 - DNA, 25 bp, Homo sapien
ttgcagcgggtctcagtcctcttcc

SEQ ID NO: 1977938 - DNA, 25 bp, Homo sapien
taacaaccaaaagggaggcagccat

SEQ ID NO: 1977939 - DNA, 25 bp, Homo sapien
ctgagtacaaagatgtgtctccctt

SEQ ID NO: 1977940 - DNA, 25 bp, Homo sapien
gatggcagcattcccgcatactcat

SEQ ID NO: 1977941 - DNA, 25 bp, Homo sapien
catacaggctgaaatgcattccctg

SEQ ID NO: 1977942 - DNA, 25 bp, Homo sapien
gcccttaaacctctcatgctgctga

SEQ ID NO: 1977943 - DNA, 25 bp, Homo sapien
gctgtcacacgctgattgttggcaa

SEQ ID NO: 1977944 - DNA, 25 bp, Homo sapien
caaacgagggtgtgactctgtgact

SEQ ID NO: 1977945 - DNA, 25 bp, Homo sapien
gttggcaaggtcaccgtccttagcc

SEQ ID NO: 1977946 - DNA, 25 bp, Homo sapien
catctacagtcccatcatcctaata

SEQ ID NO: 1977947 - DNA, 25 bp, Homo sapien
tggaaaaaggtgttctgccctgagg

SEQ ID NO: 1977948 - DNA, 25 bp, Homo sapien
catcctaatacttgaacggatttca

SEQ ID NO: 1977949 - DNA, 25 bp, Homo sapien
ggagatgggaacttttcctgcctgg

SEQ ID NO: 1977950 - DNA, 25 bp, Homo sapien
aatccacccgtatgctggtgctgca

SEQ ID NO: 1977951 - DNA, 25 bp, Homo sapien
tcttaaggcctgtgaacccaggtgc

SEQ ID NO: 1977952 - DNA, 25 bp, Homo sapien
gcatttcccagacctacatgcgtga

SEQ ID NO: 1977953 - DNA, 25 bp, Homo sapien
gcctgtcggcaggtcttctaacgca

SEQ ID NO: 1977954 - DNA, 25 bp, Homo sapien
acaggaaaccgccagaggcgcgcct

SEQ ID NO: 1977955 - DNA, 25 bp, Homo sapien
ccggacaggaaaccgccagaggcgc

SEQ ID NO: 1977956 - DNA, 25 bp, Homo sapien
cagcccggacaggaaaccgccagag

SEQ ID NO: 1977957 - DNA, 25 bp, Homo sapien
gaaaccgccagaggcgcgcctgctg

SEQ ID NO: 1977958 - DNA, 25 bp, Homo sapien
cagcgccccgctccccttgccgcac

SEQ ID NO: 1977959 - DNA, 25 bp, Homo sapien
cccacaggagccgccgtccagtccg

SEQ ID NO: 1977960 - DNA, 25 bp, Homo sapien
tgtccccagtggccttatttcccga

SEQ ID NO: 1977961 - DNA, 25 bp, Homo sapien
gcaaacccggccaagtgcccacagg

SEQ ID NO: 1977962 - DNA, 25 bp, Homo sapien
accagcaaacccggccaagtgccca

SEQ ID NO: 1977963 - DNA, 25 bp, Homo sapien
cagtcagccgtagccaggaacgccg

SEQ ID NO: 1977964 - DNA, 25 bp, Homo sapien
gccgtagccaggaacgccgccaggt

SEQ ID NO: 1977965 - DNA, 25 bp, Homo sapien
aggaacgccgccaggtccatctgcg

SEQ ID NO: 1977966 - DNA, 25 bp, Homo sapien
gccaggtccatctgcggggcactca

SEQ ID NO: 1977967 - DNA, 25 bp, Homo sapien
aggcacagacgagggcgggggtccg

SEQ ID NO: 1977968 - DNA, 25 bp, Homo sapien
caggcacagacgagggcgggggtcc

SEQ ID NO: 1977969 - DNA, 25 bp, Homo sapien
gcaggcacagacgagggcgggggtc

SEQ ID NO: 1977970 - DNA, 25 bp, Homo sapien
aaacgtatacggcggtccagctgct

SEQ ID NO: 1977971 - DNA, 25 bp, Homo sapien
ctggaatcagtggcaaacgtatacg

SEQ ID NO: 1977972 - DNA, 25 bp, Homo sapien
tgctcggagacgaagggtgggctca

SEQ ID NO: 1977973 - DNA, 25 bp, Homo sapien
tatacggcggtccagctgctcggag

SEQ ID NO: 1977974 - DNA, 25 bp, Homo sapien
tgtccaacacggccctttcctaaga

SEQ ID NO: 1977975 - DNA, 25 bp, Homo sapien
tccaacacggccctttcctaagata

SEQ ID NO: 1977976 - DNA, 25 bp, Homo sapien
cgagccccgcgtttgtccaacacgg

SEQ ID NO: 1977977 - DNA, 25 bp, Homo sapien
gagccccgcgtttgtccaacacggc

SEQ ID NO: 1977978 - DNA, 25 bp, Homo sapien
tccagtccacctattcacagggcag

SEQ ID NO: 1977979 - DNA, 25 bp, Homo sapien
cgtttggccagattgacaaggtgac

SEQ ID NO: 1977980 - DNA, 25 bp, Homo sapien
cacatctggtgagttagcatccttt

SEQ ID NO: 1977981 - DNA, 25 bp, Homo sapien
ggtacccttttcagcccagagtgtg

SEQ ID NO: 1977982 - DNA, 25 bp, Homo sapien
cagccgcggtgcggcgctgtctgaa

SEQ ID NO: 1977983 - DNA, 25 bp, Homo sapien
cggtgcggcgctgtctgaaggccac

SEQ ID NO: 1977984 - DNA, 25 bp, Homo sapien
gcccagccgcggtgcggcgctgtct

SEQ ID NO: 1977985 - DNA, 25 bp, Homo sapien
cgcggtgcggcgctgtctgaaggcc

SEQ ID NO: 1977986 - DNA, 25 bp, Homo sapien
cagtttcttctaggagacggctctt

SEQ ID NO: 1977987 - DNA, 25 bp, Homo sapien
tggagatgtgggaatgaatcatgct

SEQ ID NO: 1977988 - DNA, 25 bp, Homo sapien
ggcacattagtagaagcttacggga

SEQ ID NO: 1977989 - DNA, 25 bp, Homo sapien
gcttacgggatcatgtaaagataag

SEQ ID NO: 1977990 - DNA, 25 bp, Homo sapien
ccctgccagctctagaacttagaac

SEQ ID NO: 1977991 - DNA, 25 bp, Homo sapien
cttggaaacagaacacactaggaac

SEQ ID NO: 1977992 - DNA, 25 bp, Homo sapien
cagaacacactaggaactccaagag

SEQ ID NO: 1977993 - DNA, 25 bp, Homo sapien
taggaactccaagagtcacagggcg

SEQ ID NO: 1977994 - DNA, 25 bp, Homo sapien
ctccaagagtcacagggcgaagagc

SEQ ID NO: 1977995 - DNA, 25 bp, Homo sapien
cctgggagtttctgtgcgtgctacg

SEQ ID NO: 1977996 - DNA, 25 bp, Homo sapien
cttgccaaatcccagcgcatccagg

SEQ ID NO: 1977997 - DNA, 25 bp, Homo sapien
tgccaaatcccagcgcatccaggag

SEQ ID NO: 1977998 - DNA, 25 bp, Homo sapien
gagtttctgtgcgtgctacgtgtgc

SEQ ID NO: 1977999 - DNA, 25 bp, Homo sapien
tgattccttatgacagaccactcac

SEQ ID NO: 1978000 - DNA, 25 bp, Homo sapien
tgtcagaatcaaggaaagttacgct

SEQ ID NO: 1978001 - DNA, 25 bp, Homo sapien
cagtttgagcgcaatgatgaccata

SEQ ID NO: 1978002 - DNA, 25 bp, Homo sapien
aagttacgcttggtgtgtgttccta

SEQ ID NO: 1978003 - DNA, 25 bp, Homo sapien
gaagatcaatctcgtgctgcacata

SEQ ID NO: 1978004 - DNA, 25 bp, Homo sapien
tgaagcgatccctctggatgaagga

SEQ ID NO: 1978005 - DNA, 25 bp, Homo sapien
tgaaggacggcgctgtgaacctgtc

SEQ ID NO: 1978006 - DNA, 25 bp, Homo sapien
ccatctgctgttcagggtcccggag

SEQ ID NO: 1978007 - DNA, 25 bp, Homo sapien
ccttaggagaaaaagcgaactggct

SEQ ID NO: 1978008 - DNA, 25 bp, Homo sapien
tgttaggctacgtccccaaatatct

SEQ ID NO: 1978009 - DNA, 25 bp, Homo sapien
actgaacaacactgtgcgcaggagg

SEQ ID NO: 1978010 - DNA, 25 bp, Homo sapien
taaacactgtttgcggtcagaccag

SEQ ID NO: 1978011 - DNA, 25 bp, Homo sapien
ttcatgctatagtgaaaaaaatcta

SEQ ID NO: 1978012 - DNA, 25 bp, Homo sapien
tatttcatgctatagtgaaaaaaat

SEQ ID NO: 1978013 - DNA, 25 bp, Homo sapien
agaaattgcactgctggaggatgag

SEQ ID NO: 1978014 - DNA, 25 bp, Homo sapien
actgaagaaattgcactgctggagg

SEQ ID NO: 1978015 - DNA, 25 bp, Homo sapien
taagaagcgtctagtggcaaccaaa

SEQ ID NO: 1978016 - DNA, 25 bp, Homo sapien
aaaagtcagcggtatgcccaggagt

SEQ ID NO: 1978017 - DNA, 25 bp, Homo sapien
tatggacaacactcgaaaggatgcc

SEQ ID NO: 1978018 - DNA, 25 bp, Homo sapien
taagcatgagctgacaactggtgcc

SEQ ID NO: 1978019 - DNA, 25 bp, Homo sapien
tctaagaactacaccattgctcagg

SEQ ID NO: 1978020 - DNA, 25 bp, Homo sapien
tatggtttgaccacagcattaagaa

SEQ ID NO: 1978021 - DNA, 25 bp, Homo sapien
gtattgcaattacagaccttaggtc

SEQ ID NO: 1978022 - DNA, 25 bp, Homo sapien
aaaagaggcagatacgtgacaggtg

SEQ ID NO: 1978023 - DNA, 25 bp, Homo sapien
gcttagggattttcttagtcagcct

SEQ ID NO: 1978024 - DNA, 25 bp, Homo sapien
atacaaacagaggggacccaaagcg

SEQ ID NO: 1978025 - DNA, 25 bp, Homo sapien
aaagcgggtagccattgccggcttg

SEQ ID NO: 1978026 - DNA, 25 bp, Homo sapien
cgggtagccattgccggcttgaatg

SEQ ID NO: 1978027 - DNA, 25 bp, Homo sapien
tgagaaccctgtagaagcggtggcc

SEQ ID NO: 1978028 - DNA, 25 bp, Homo sapien
tacagtggcgttgtcagtaaggcac

SEQ ID NO: 1978029 - DNA, 25 bp, Homo sapien
cattgccccgttggtacaaactgag

SEQ ID NO: 1978030 - DNA, 25 bp, Homo sapien
aaacagcaagtgtggtgagaaccct

SEQ ID NO: 1978031 - DNA, 25 bp, Homo sapien
catttatgcgaggtgtgttgaccgg

SEQ ID NO: 1978032 - DNA, 25 bp, Homo sapien
tgagattcgcctgtgtaaaatgcac

SEQ ID NO: 1978033 - DNA, 25 bp, Homo sapien
tatactgagattacctacctcccag

SEQ ID NO: 1978034 - DNA, 25 bp, Homo sapien
tgagacagccttttgtacatacagc

SEQ ID NO: 1978035 - DNA, 25 bp, Homo sapien
cagctacctgagcagaacagggcct

SEQ ID NO: 1978036 - DNA, 25 bp, Homo sapien
gccacacaatgctatgagccctgtc

SEQ ID NO: 1978037 - DNA, 25 bp, Homo sapien
gatcgggatccatcattggagctgg

SEQ ID NO: 1978038 - DNA, 25 bp, Homo sapien
catccctggaccaataacagtcagc

SEQ ID NO: 1978039 - DNA, 25 bp, Homo sapien
gccttaagaggattggatgctctct

SEQ ID NO: 1978040 - DNA, 25 bp, Homo sapien
taagaaagggcagatggtatttcct

SEQ ID NO: 1978041 - DNA, 25 bp, Homo sapien
gtaacaagaagtccgcaaacagagc

SEQ ID NO: 1978042 - DNA, 25 bp, Homo sapien
gacaggtggcactaatctcgggcac

SEQ ID NO: 1978043 - DNA, 25 bp, Homo sapien
ttgaggactttcaacctgagatcag

SEQ ID NO: 1978044 - DNA, 25 bp, Homo sapien
tctactggggagtgaaagcgcctac

SEQ ID NO: 1978045 - DNA, 25 bp, Homo sapien
ctcgaaagctccatagttgaggact

SEQ ID NO: 1978046 - DNA, 25 bp, Homo sapien
tactgtactgaaactcgaaagctcc

SEQ ID NO: 1978047 - DNA, 25 bp, Homo sapien
ctgcgcggcgggaagcggcggcggc

SEQ ID NO: 1978048 - DNA, 25 bp, Homo sapien
ggaagcggcggcggcggctccagcg

SEQ ID NO: 1978049 - DNA, 25 bp, Homo sapien
aagcggcggcggcggctccagcgtc

SEQ ID NO: 1978050 - DNA, 25 bp, Homo sapien
cgggaagcggcggcggcggctccag

SEQ ID NO: 1978051 - DNA, 25 bp, Homo sapien
ctctgctgagtgacaccgccgtggc

SEQ ID NO: 1978052 - DNA, 25 bp, Homo sapien
agtgacaccgccgtggcatccgagg

SEQ ID NO: 1978053 - DNA, 25 bp, Homo sapien
tggcatccgaggagctgtggtccag

SEQ ID NO: 1978054 - DNA, 25 bp, Homo sapien
accgccgtggcatccgaggagctgt

SEQ ID NO: 1978055 - DNA, 25 bp, Homo sapien
gccggaactacgagtcccgacgtgc

SEQ ID NO: 1978056 - DNA, 25 bp, Homo sapien
cttcactgagcgggcactggaggtc

SEQ ID NO: 1978057 - DNA, 25 bp, Homo sapien
gcgcgcggcatgcagaagcttcact

SEQ ID NO: 1978058 - DNA, 25 bp, Homo sapien
tcacttccggaggtgcgagagtcac

SEQ ID NO: 1978059 - DNA, 25 bp, Homo sapien
aaacgcgattctgtttgcggaaacg

SEQ ID NO: 1978060 - DNA, 25 bp, Homo sapien
ccaaacgcgattctgtttgcggaaa

SEQ ID NO: 1978061 - DNA, 25 bp, Homo sapien
aacgcgattctgtttgcggaaacgg

SEQ ID NO: 1978062 - DNA, 25 bp, Homo sapien
cgcgattctgtttgcggaaacggcg

SEQ ID NO: 1978063 - DNA, 25 bp, Homo sapien
aatgcgaagtgagcccatgtcaggg

SEQ ID NO: 1978064 - DNA, 25 bp, Homo sapien
cacagggctaatgcgaagtgagccc

SEQ ID NO: 1978065 - DNA, 25 bp, Homo sapien
tagtgaagcacagggctaatgcgaa

SEQ ID NO: 1978066 - DNA, 25 bp, Homo sapien
ttgggtagtgaagcacagggctaat

SEQ ID NO: 1978067 - DNA, 25 bp, Homo sapien
tcaggtttccgaagcgccgctgaag

SEQ ID NO: 1978068 - DNA, 25 bp, Homo sapien
cgcgagctggagcagctcttcgagc

SEQ ID NO: 1978069 - DNA, 25 bp, Homo sapien
tggagcagctcttcgagctgcttct

SEQ ID NO: 1978070 - DNA, 25 bp, Homo sapien
tgaagacaaacctgcggaccccacg

SEQ ID NO: 1978071 - DNA, 25 bp, Homo sapien
gatttcgaggcttgaagttgtacag

SEQ ID NO: 1978072 - DNA, 25 bp, Homo sapien
gaaatgaggttggtggtgcctatct

SEQ ID NO: 1978073 - DNA, 25 bp, Homo sapien
tggtggtgcctatctgatttcgagg

SEQ ID NO: 1978074 - DNA, 25 bp, Homo sapien
ctgatttcgaggcttgaagttgtac

SEQ ID NO: 1978075 - DNA, 25 bp, Homo sapien
tgattacttgaattgatggtaaaac

SEQ ID NO: 1978076 - DNA, 25 bp, Homo sapien
ttatgattacttgaattgatggtaa

SEQ ID NO: 1978077 - DNA, 25 bp, Homo sapien
tatgattacttgaattgatggtaaa

SEQ ID NO: 1978078 - DNA, 25 bp, Homo sapien
attacttgaattgatggtaaaactt

SEQ ID NO: 1978079 - DNA, 25 bp, Homo sapien
agaattcactgacgcttttgcctgt

SEQ ID NO: 1978080 - DNA, 25 bp, Homo sapien
tggagtgtctttcccacaactagaa

SEQ ID NO: 1978081 - DNA, 25 bp, Homo sapien
tattttgagtgccatctccagtaga

SEQ ID NO: 1978082 - DNA, 25 bp, Homo sapien
gatttatcttttggaacatcctcag

SEQ ID NO: 1978083 - DNA, 25 bp, Homo sapien
ataaatgaaaatacactgaacatac

SEQ ID NO: 1978084 - DNA, 25 bp, Homo sapien
ttctattatgaataaatgaaaatac

SEQ ID NO: 1978085 - DNA, 25 bp, Homo sapien
gaataaatgaaaatacactgaacat

SEQ ID NO: 1978086 - DNA, 25 bp, Homo sapien
atgaataaatgaaaatacactgaac

SEQ ID NO: 1978087 - DNA, 25 bp, Homo sapien
aaaatacgactttgactacgcttct

SEQ ID NO: 1978088 - DNA, 25 bp, Homo sapien
tcctgaagttcattgtaatgggcag

SEQ ID NO: 1978089 - DNA, 25 bp, Homo sapien
cctgaagttcattgtaatgggcagc

SEQ ID NO: 1978090 - DNA, 25 bp, Homo sapien
tgactacgcttctccaaaccaactt

SEQ ID NO: 1978091 - DNA, 25 bp, Homo sapien
aacagtgatatcacgttttttcttc

SEQ ID NO: 1978092 - DNA, 25 bp, Homo sapien
caaactagcttgttaattcttcctt

SEQ ID NO: 1978093 - DNA, 25 bp, Homo sapien
caaatctccacctttaccacatccc

SEQ ID NO: 1978094 - DNA, 25 bp, Homo sapien
tatcacgttttttcttctgtcgtac

SEQ ID NO: 1978095 - DNA, 25 bp, Homo sapien
tgtttgacagaaacatcggcaatat

SEQ ID NO: 1978096 - DNA, 25 bp, Homo sapien
tgctgacactgtttgacagaaacat

SEQ ID NO: 1978097 - DNA, 25 bp, Homo sapien
aaatatattcactatcacgacgatt

SEQ ID NO: 1978098 - DNA, 25 bp, Homo sapien
tattcactatcacgacgatttttca

SEQ ID NO: 1978099 - DNA, 25 bp, Homo sapien
ctcaaatgagtaatgacagacaaac

SEQ ID NO: 1978100 - DNA, 25 bp, Homo sapien
cagcctgctcataagactcaaatga

SEQ ID NO: 1978101 - DNA, 25 bp, Homo sapien
tgggtcacgaaatttgtcaatcaga

SEQ ID NO: 1978102 - DNA, 25 bp, Homo sapien
gggctaagtctctcacacgcatttc

SEQ ID NO: 1978103 - DNA, 25 bp, Homo sapien
tgtttctgaagcttcaaggcgtctt

SEQ ID NO: 1978104 - DNA, 25 bp, Homo sapien
gttgaagtcatatttgcagccaaat

SEQ ID NO: 1978105 - DNA, 25 bp, Homo sapien
agaattcaggaacatccacaacacc

SEQ ID NO: 1978106 - DNA, 25 bp, Homo sapien
tcatttagcaatggaaaatagacca

SEQ ID NO: 1978107 - DNA, 25 bp, Homo sapien
acaagctgaaggcaactggttccct

SEQ ID NO: 1978108 - DNA, 25 bp, Homo sapien
gcccggccggatctttgatttatga

SEQ ID NO: 1978109 - DNA, 25 bp, Homo sapien
tatgagacctatggcaataatcccc

SEQ ID NO: 1978110 - DNA, 25 bp, Homo sapien
gcagtgtcaggcattttgtgccaca

SEQ ID NO: 1978111 - DNA, 25 bp, Homo sapien
gtagactagtttcatattgtacttc

SEQ ID NO: 1978112 - DNA, 25 bp, Homo sapien
ttttcttcgtagaattccagaaatg

SEQ ID NO: 1978113 - DNA, 25 bp, Homo sapien
caaggcctgcattcgttttaagagc

SEQ ID NO: 1978114 - DNA, 25 bp, Homo sapien
taatcttttcttcgtagaattccag

SEQ ID NO: 1978115 - DNA, 25 bp, Homo sapien
tagaactctcatttgcaggatatgg

SEQ ID NO: 1978116 - DNA, 25 bp, Homo sapien
ttagaactctcatttgcaggatatg

SEQ ID NO: 1978117 - DNA, 25 bp, Homo sapien
tcccattctgatttacttaaggttc

SEQ ID NO: 1978118 - DNA, 25 bp, Homo sapien
agcttcccattctgatttacttaag

SEQ ID NO: 1978119 - DNA, 25 bp, Homo sapien
tgtagcttcccattctgatttactt

SEQ ID NO: 1978120 - DNA, 25 bp, Homo sapien
ttgtagcttcccattctgatttact

SEQ ID NO: 1978121 - DNA, 25 bp, Homo sapien
ttaatctatgctgatgatatactca

SEQ ID NO: 1978122 - DNA, 25 bp, Homo sapien
taatctatgctgatgatatactcac

SEQ ID NO: 1978123 - DNA, 25 bp, Homo sapien
tggtcaatcaatgaggcaaacttca

SEQ ID NO: 1978124 - DNA, 25 bp, Homo sapien
tatttccgccatggaggaaagaccc

SEQ ID NO: 1978125 - DNA, 25 bp, Homo sapien
gctgcagacgggatggcaacaacaa

SEQ ID NO: 1978126 - DNA, 25 bp, Homo sapien
tctggtaaacacattgggaacattg

SEQ ID NO: 1978127 - DNA, 25 bp, Homo sapien
aagtctactccaatgaacacactgg

SEQ ID NO: 1978128 - DNA, 25 bp, Homo sapien
agaggccctaactctctctcttcaa

SEQ ID NO: 1978129 - DNA, 25 bp, Homo sapien
tgaaactagaagttggttcaggacg

SEQ ID NO: 1978130 - DNA, 25 bp, Homo sapien
ggtctgcaaagatcaaccagccaca

SEQ ID NO: 1978131 - DNA, 25 bp, Homo sapien
tggcaataccatatcaagcaagtct

SEQ ID NO: 1978132 - DNA, 25 bp, Homo sapien
tgtattagccccaagagctctctcc

SEQ ID NO: 1978133 - DNA, 25 bp, Homo sapien
gccacaaactttatcgaggtgcctt

SEQ ID NO: 1978134 - DNA, 25 bp, Homo sapien
gctcgcttcgggtttttatgtcaca

SEQ ID NO: 1978135 - DNA, 25 bp, Homo sapien
aaataaataagagttcagtttctca

SEQ ID NO: 1978136 - DNA, 25 bp, Homo sapien
gaaataaataagagttcagtttctc

SEQ ID NO: 1978137 - DNA, 25 bp, Homo sapien
aagagttcagtttctcatatgatta

SEQ ID NO: 1978138 - DNA, 25 bp, Homo sapien
aaataagagttcagtttctcatatg

SEQ ID NO: 1978139 - DNA, 25 bp, Homo sapien
ctgtttctcaaaggcaaacaccaag

SEQ ID NO: 1978140 - DNA, 25 bp, Homo sapien
tttctcaaaggcaaacaccaagtaa

SEQ ID NO: 1978141 - DNA, 25 bp, Homo sapien
gtttctcaaaggcaaacaccaagta

SEQ ID NO: 1978142 - DNA, 25 bp, Homo sapien
tgctgtttctcaaaggcaaacacca

SEQ ID NO: 1978143 - DNA, 25 bp, Homo sapien
gagtttctggcagcatcctgcacat

SEQ ID NO: 1978144 - DNA, 25 bp, Homo sapien
tttaaagacagaggtcccaactcat

SEQ ID NO: 1978145 - DNA, 25 bp, Homo sapien
ggcccctctgggactactgcctatg

SEQ ID NO: 1978146 - DNA, 25 bp, Homo sapien
aatttgtgcaggacagaacacggcc

SEQ ID NO: 1978147 - DNA, 25 bp, Homo sapien
cccaagttacccatggcgtggaaga

SEQ ID NO: 1978148 - DNA, 25 bp, Homo sapien
taacaatggctcctacggtgcaaag

SEQ ID NO: 1978149 - DNA, 25 bp, Homo sapien
gccaccagagtcagatgcagtatta

SEQ ID NO: 1978150 - DNA, 25 bp, Homo sapien
tgcatatgtgacaggaagacttcct

SEQ ID NO: 1978151 - DNA, 25 bp, Homo sapien
caggtctgggagtgccccacttcac

SEQ ID NO: 1978152 - DNA, 25 bp, Homo sapien
ggagtgccccacttcactgagcttg

SEQ ID NO: 1978153 - DNA, 25 bp, Homo sapien
acggtggaaagccatgcctccctca

SEQ ID NO: 1978154 - DNA, 25 bp, Homo sapien
ctggcccgacggtggaaagccatgc

SEQ ID NO: 1978155 - DNA, 25 bp, Homo sapien
cacggctcccacagaagtggttaaa

SEQ ID NO: 1978156 - DNA, 25 bp, Homo sapien
ttccgtcattcccaccaatagctgg

SEQ ID NO: 1978157 - DNA, 25 bp, Homo sapien
tctcaagtatattctaggcccaaag

SEQ ID NO: 1978158 - DNA, 25 bp, Homo sapien
tctccctgaacacaagccactagtg

SEQ ID NO: 1978159 - DNA, 25 bp, Homo sapien
tataacaagcacttggagggcaggc

SEQ ID NO: 1978160 - DNA, 25 bp, Homo sapien
tagttaacatctcaagctgcaggtg

SEQ ID NO: 1978161 - DNA, 25 bp, Homo sapien
tcaatatcgtggtgaggtgcaggca

SEQ ID NO: 1978162 - DNA, 25 bp, Homo sapien
gactttaggcctacatgggagcaga

SEQ ID NO: 1978163 - DNA, 25 bp, Homo sapien
ttagaactcaggatagtggtttccc

SEQ ID NO: 1978164 - DNA, 25 bp, Homo sapien
tgtctggatactcgactcaaaactg

SEQ ID NO: 1978165 - DNA, 25 bp, Homo sapien
cactttggctacactctcgtactgg

SEQ ID NO: 1978166 - DNA, 25 bp, Homo sapien
tgccgattgtatgcacgtgctccac

SEQ ID NO: 1978167 - DNA, 25 bp, Homo sapien
tgactggaaaacaataggtccctgg

SEQ ID NO: 1978168 - DNA, 25 bp, Homo sapien
aaaacaataggtccctggcctctgg

SEQ ID NO: 1978169 - DNA, 25 bp, Homo sapien
ctgtgactggaaaacaataggtccc

SEQ ID NO: 1978170 - DNA, 25 bp, Homo sapien
tggaaaacaataggtccctggcctc

SEQ ID NO: 1978171 - DNA, 25 bp, Homo sapien
attctcaatgaacttggaagtcctg

SEQ ID NO: 1978172 - DNA, 25 bp, Homo sapien
cctgagcaattcaacctgggcccaa

SEQ ID NO: 1978173 - DNA, 25 bp, Homo sapien
ctccttggtgaattctcaatgaact

SEQ ID NO: 1978174 - DNA, 25 bp, Homo sapien
tcctgtctaattccggggctccttg

SEQ ID NO: 1978175 - DNA, 25 bp, Homo sapien
gaagagccaccgagaaacagagcag

SEQ ID NO: 1978176 - DNA, 25 bp, Homo sapien
ggaagagccaccgagaaacagagca

SEQ ID NO: 1978177 - DNA, 25 bp, Homo sapien
tggaagagccaccgagaaacagagc

SEQ ID NO: 1978178 - DNA, 25 bp, Homo sapien
aagagccaccgagaaacagagcaga

SEQ ID NO: 1978179 - DNA, 25 bp, Homo sapien
aaagagaagggctgcgattgaccat

SEQ ID NO: 1978180 - DNA, 25 bp, Homo sapien
ttgaccatgtgaagttgaagttgcc

SEQ ID NO: 1978181 - DNA, 25 bp, Homo sapien
gaaggccgtggacatagaggtctca

SEQ ID NO: 1978182 - DNA, 25 bp, Homo sapien
aagaaagagtcatcagcagggcagt

SEQ ID NO: 1978183 - DNA, 25 bp, Homo sapien
gaaggctgcgcaaaaaactgcacaa

SEQ ID NO: 1978184 - DNA, 25 bp, Homo sapien
agtactgcatctagcccagccgtgg

SEQ ID NO: 1978185 - DNA, 25 bp, Homo sapien
ctgcccccagagaggaggtttgcag

SEQ ID NO: 1978186 - DNA, 25 bp, Homo sapien
ccagcgaaggtgaaggctgcgcaaa

SEQ ID NO: 1978187 - DNA, 25 bp, Homo sapien
agaaccaaggctgcaccagcgcagg

SEQ ID NO: 1978188 - DNA, 25 bp, Homo sapien
caggcgacgcctcccggtatctgaa

SEQ ID NO: 1978189 - DNA, 25 bp, Homo sapien
ctgcaccagcgcagggagtggccac

SEQ ID NO: 1978190 - DNA, 25 bp, Homo sapien
ggctgcctccgcatcgcctgccggg

SEQ ID NO: 1978191 - DNA, 25 bp, Homo sapien
tttacagcgaaacgaagcagaaaga

SEQ ID NO: 1978192 - DNA, 25 bp, Homo sapien
tgtcctcaggccgtttacagcgaaa

SEQ ID NO: 1978193 - DNA, 25 bp, Homo sapien
ggcgcaaacgtcagggagacctgct

SEQ ID NO: 1978194 - DNA, 25 bp, Homo sapien
cataacccagaatgtagcaaaagag

SEQ ID NO: 1978195 - DNA, 25 bp, Homo sapien
ctgtttcatagacgttctacaagaa

SEQ ID NO: 1978196 - DNA, 25 bp, Homo sapien
caagaagtcgcaggtagccatgagt

SEQ ID NO: 1978197 - DNA, 25 bp, Homo sapien
cgcaggtagccatgagttaagacac

SEQ ID NO: 1978198 - DNA, 25 bp, Homo sapien
gacgttctacaagaagtcgcaggta

SEQ ID NO: 1978199 - DNA, 25 bp, Homo sapien
tccacctgattccttgctcagggtt

SEQ ID NO: 1978200 - DNA, 25 bp, Homo sapien
tgcattggtgctacccctccacctg

SEQ ID NO: 1978201 - DNA, 25 bp, Homo sapien
cttgccctgcattggtgctacccct

SEQ ID NO: 1978202 - DNA, 25 bp, Homo sapien
tggaggatggggttctacccttctc

SEQ ID NO: 1978203 - DNA, 25 bp, Homo sapien
acaaagttagaacagtatccattgc

SEQ ID NO: 1978204 - DNA, 25 bp, Homo sapien
gatatcttgaggcagtggtcattaa

SEQ ID NO: 1978205 - DNA, 25 bp, Homo sapien
tatccattgcagatatcttgaggca

SEQ ID NO: 1978206 - DNA, 25 bp, Homo sapien
aagttagaacagtatccattgcaga

SEQ ID NO: 1978207 - DNA, 25 bp, Homo sapien
ggaatttgattcacctctgaaccaa

SEQ ID NO: 1978208 - DNA, 25 bp, Homo sapien
tgctgctgtgggattcattctaagc

SEQ ID NO: 1978209 - DNA, 25 bp, Homo sapien
tcattctaagcagtacagtcctctc

SEQ ID NO: 1978210 - DNA, 25 bp, Homo sapien
tattcttacacttgtctcagtctgg

SEQ ID NO: 1978211 - DNA, 25 bp, Homo sapien
ccagccttttcagtgatgttcataa

SEQ ID NO: 1978212 - DNA, 25 bp, Homo sapien
cacaggctgaacacttgaaagctgt

SEQ ID NO: 1978213 - DNA, 25 bp, Homo sapien
aactccacaggctgaacacttgaaa

SEQ ID NO: 1978214 - DNA, 25 bp, Homo sapien
cagccttttcagtgatgttcataaa

SEQ ID NO: 1978215 - DNA, 25 bp, Homo sapien
agaacaacataagtacacacgcccc

SEQ ID NO: 1978216 - DNA, 25 bp, Homo sapien
aggtgttcttgcattcagggtcggc

SEQ ID NO: 1978217 - DNA, 25 bp, Homo sapien
ggacaatgcctgctacaaacgatgc

SEQ ID NO: 1978218 - DNA, 25 bp, Homo sapien
caaacgatgcacacatcagagcagg

SEQ ID NO: 1978219 - DNA, 25 bp, Homo sapien
aaacagatactggtcttggccaggc

SEQ ID NO: 1978220 - DNA, 25 bp, Homo sapien
gctctgccaggtacgatgctaatca

SEQ ID NO: 1978221 - DNA, 25 bp, Homo sapien
caagtttctagttgcgtgtggatga

SEQ ID NO: 1978222 - DNA, 25 bp, Homo sapien
aatagggtctgcctaaactctagca

SEQ ID NO: 1978223 - DNA, 25 bp, Homo sapien
gggtcaaatctagctggacactgga

SEQ ID NO: 1978224 - DNA, 25 bp, Homo sapien
gaagagttcaccatgcaggatgctg

SEQ ID NO: 1978225 - DNA, 25 bp, Homo sapien
tgcacagagacaacccgtggagtca

SEQ ID NO: 1978226 - DNA, 25 bp, Homo sapien
tgaacacacacgatgacatgagcca

SEQ ID NO: 1978227 - DNA, 25 bp, Homo sapien
gacctggaagagtgcccctggacac

SEQ ID NO: 1978228 - DNA, 25 bp, Homo sapien
agacctggaagagtgcccctggaca

SEQ ID NO: 1978229 - DNA, 25 bp, Homo sapien
gaggttagcagcctaccaaagaaag

SEQ ID NO: 1978230 - DNA, 25 bp, Homo sapien
tgcatcagaggactgggctcggctc

SEQ ID NO: 1978231 - DNA, 25 bp, Homo sapien
gaaagacagcagctagcctagaacc

SEQ ID NO: 1978232 - DNA, 25 bp, Homo sapien
gaaatacacctcttgtcttggcagc

SEQ ID NO: 1978233 - DNA, 25 bp, Homo sapien
ttcaggttgagatccaagaaatgca

SEQ ID NO: 1978234 - DNA, 25 bp, Homo sapien
gttgagatccaagaaatgcaggtga

SEQ ID NO: 1978235 - DNA, 25 bp, Homo sapien
gaaaggttgccctctgtggcattca

SEQ ID NO: 1978236 - DNA, 25 bp, Homo sapien
tgtggcattcaggttgagatccaag

SEQ ID NO: 1978237 - DNA, 25 bp, Homo sapien
tacaggatgaagacaatgccgcagc

SEQ ID NO: 1978238 - DNA, 25 bp, Homo sapien
gccaggctgcacacgaagaagtaca

SEQ ID NO: 1978239 - DNA, 25 bp, Homo sapien
tcaatgtggcgcacaaaggcgtctg

SEQ ID NO: 1978240 - DNA, 25 bp, Homo sapien
catggatgccaccacggaaatgcag

SEQ ID NO: 1978241 - DNA, 25 bp, Homo sapien
gaaggcatatatgagagggtccatc

SEQ ID NO: 1978242 - DNA, 25 bp, Homo sapien
aggcatatatgagagggtccatcac

SEQ ID NO: 1978243 - DNA, 25 bp, Homo sapien
aaggcatatatgagagggtccatca

SEQ ID NO: 1978244 - DNA, 25 bp, Homo sapien
ggaaggcatatatgagagggtccat

SEQ ID NO: 1978245 - DNA, 25 bp, Homo sapien
tctgggaaagctgcaggcgatcctg

SEQ ID NO: 1978246 - DNA, 25 bp, Homo sapien
gcaggcgatcctgaaaccacggcag

SEQ ID NO: 1978247 - DNA, 25 bp, Homo sapien
gaaaccacggcagcaaataatctcc

SEQ ID NO: 1978248 - DNA, 25 bp, Homo sapien
gatcctgaaaccacggcagcaaata

SEQ ID NO: 1978249 - DNA, 25 bp, Homo sapien
accccttggctgtcgctttgtcata

SEQ ID NO: 1978250 - DNA, 25 bp, Homo sapien
aatgggatgctagcactcccgccta

SEQ ID NO: 1978251 - DNA, 25 bp, Homo sapien
aaaaatgggatgctagcactcccgc

SEQ ID NO: 1978252 - DNA, 25 bp, Homo sapien
tgtcataggtgagcaaacaaaggag

SEQ ID NO: 1978253 - DNA, 25 bp, Homo sapien
gtccccagagtggataagcaaccct

SEQ ID NO: 1978254 - DNA, 25 bp, Homo sapien
ggagcagtagaaaccataggacaca

SEQ ID NO: 1978255 - DNA, 25 bp, Homo sapien
tgagggtgctgtgcattccccgagc

SEQ ID NO: 1978256 - DNA, 25 bp, Homo sapien
taagaaattgtcatgactgtcccca

SEQ ID NO: 1978257 - DNA, 25 bp, Homo sapien
tatcacggttttcttcgcgtcacaa

SEQ ID NO: 1978258 - DNA, 25 bp, Homo sapien
ggcgtcgatatcacggttttcttcg

SEQ ID NO: 1978259 - DNA, 25 bp, Homo sapien
aagcaatcccacctggcgtcgatat

SEQ ID NO: 1978260 - DNA, 25 bp, Homo sapien
atcccacctggcgtcgatatcacgg

SEQ ID NO: 1978261 - DNA, 25 bp, Homo sapien
caaaccctatagtgctttacaaatt

SEQ ID NO: 1978262 - DNA, 25 bp, Homo sapien
cctctaatccgagcatttctttaaa

SEQ ID NO: 1978263 - DNA, 25 bp, Homo sapien
tcacacctctaatccgagcatttct

SEQ ID NO: 1978264 - DNA, 25 bp, Homo sapien
ataaaaagcaaaccctatagtgctt

SEQ ID NO: 1978265 - DNA, 25 bp, Homo sapien
cgatgaggttgcctgcatttaggaa

SEQ ID NO: 1978266 - DNA, 25 bp, Homo sapien
gtcaggcacgatgaggttgcctgca

SEQ ID NO: 1978267 - DNA, 25 bp, Homo sapien
tggtaacgccaagaagcagaaggtc

SEQ ID NO: 1978268 - DNA, 25 bp, Homo sapien
aggctttagtggtaacgccaagaag

SEQ ID NO: 1978269 - DNA, 25 bp, Homo sapien
ttctttgctggttgaaagtgactct

SEQ ID NO: 1978270 - DNA, 25 bp, Homo sapien
gttgagcaagagcaagtccccagcc

SEQ ID NO: 1978271 - DNA, 25 bp, Homo sapien
agttgagcaagagcaagtccccagc

SEQ ID NO: 1978272 - DNA, 25 bp, Homo sapien
aatgtataccaaagttgagcaagag

SEQ ID NO: 1978273 - DNA, 25 bp, Homo sapien
tggactccagctgatcgcacacaga

SEQ ID NO: 1978274 - DNA, 25 bp, Homo sapien
ggactccgctccgtgctgcattctt

SEQ ID NO: 1978275 - DNA, 25 bp, Homo sapien
ccatcgggcgggtgactgtgtctca

SEQ ID NO: 1978276 - DNA, 25 bp, Homo sapien
tgagagggcccattgattcactgtg

SEQ ID NO: 1978277 - DNA, 25 bp, Homo sapien
tttaaaatccgcgtctcagcgaggc

SEQ ID NO: 1978278 - DNA, 25 bp, Homo sapien
tctgttatgcgtcctgcggcgatgc

SEQ ID NO: 1978279 - DNA, 25 bp, Homo sapien
gcacataggtgcagggcggttttaa

SEQ ID NO: 1978280 - DNA, 25 bp, Homo sapien
gagcgccgcatggagaagtcccttt

SEQ ID NO: 1978281 - DNA, 25 bp, Homo sapien
gacaggtgtaggcagacactcctct

SEQ ID NO: 1978282 - DNA, 25 bp, Homo sapien
ccgttggtgccaattgacaggtgta

SEQ ID NO: 1978283 - DNA, 25 bp, Homo sapien
catcaaagtcacagggacaaggagt

SEQ ID NO: 1978284 - DNA, 25 bp, Homo sapien
gaccatgaccaggacacccgttggt

SEQ ID NO: 1978285 - DNA, 25 bp, Homo sapien
ccgccagtggcccacagatgtttaa

SEQ ID NO: 1978286 - DNA, 25 bp, Homo sapien
tacgagctaactgtacccaaagagc

SEQ ID NO: 1978287 - DNA, 25 bp, Homo sapien
ctgagcagctgagggtacgagctaa

SEQ ID NO: 1978288 - DNA, 25 bp, Homo sapien
gccagccagggaagttctattctct

SEQ ID NO: 1978289 - DNA, 25 bp, Homo sapien
atcagccggcgtggtgcccagactt

SEQ ID NO: 1978290 - DNA, 25 bp, Homo sapien
tcctttagaggaaagcagcgggacc

SEQ ID NO: 1978291 - DNA, 25 bp, Homo sapien
cccagatggtcatcagccggcgtgg

SEQ ID NO: 1978292 - DNA, 25 bp, Homo sapien
aggtggcgcctccctcaggattccg

SEQ ID NO: 1978293 - DNA, 25 bp, Homo sapien
tatagacaggtgtctgtcgcttagg

SEQ ID NO: 1978294 - DNA, 25 bp, Homo sapien
tgtctgtcgcttaggtagtccctga

SEQ ID NO: 1978295 - DNA, 25 bp, Homo sapien
tgaagatgctgtgactatagacagg

SEQ ID NO: 1978296 - DNA, 25 bp, Homo sapien
tcgcttaggtagtccctgacacacc

SEQ ID NO: 1978297 - DNA, 25 bp, Homo sapien
tcccgtgttccctgaggatccggca

SEQ ID NO: 1978298 - DNA, 25 bp, Homo sapien
tcctgaggattctcctggaaagaaa

SEQ ID NO: 1978299 - DNA, 25 bp, Homo sapien
aggagagtgctccatggagctctga

SEQ ID NO: 1978300 - DNA, 25 bp, Homo sapien
ctgagacgaagtcctgaggattctc

SEQ ID NO: 1978301 - DNA, 25 bp, Homo sapien
tattctttcggttgtgactccccac

SEQ ID NO: 1978302 - DNA, 25 bp, Homo sapien
gcagcttcggtctgggcatcaccga

SEQ ID NO: 1978303 - DNA, 25 bp, Homo sapien
tcttggttggattgcacatgggttc

SEQ ID NO: 1978304 - DNA, 25 bp, Homo sapien
acaagctgcaccagatgcatccggg

SEQ ID NO: 1978305 - DNA, 25 bp, Homo sapien
ctgaaatgatgagcggggagggaat

SEQ ID NO: 1978306 - DNA, 25 bp, Homo sapien
atgatgagcggggagggaatgggac

SEQ ID NO: 1978307 - DNA, 25 bp, Homo sapien
aatgatgagcggggagggaatggga

SEQ ID NO: 1978308 - DNA, 25 bp, Homo sapien
ttactgaaatgatgagcggggaggg

SEQ ID NO: 1978309 - DNA, 25 bp, Homo sapien
aaattcagaggaaactcagtgtctc

SEQ ID NO: 1978310 - DNA, 25 bp, Homo sapien
gttctccccagttgtctgccagaga

SEQ ID NO: 1978311 - DNA, 25 bp, Homo sapien
tcagtgtctcattcttacatctgtg

SEQ ID NO: 1978312 - DNA, 25 bp, Homo sapien
tttgtaataaaagcacctgttaatg

SEQ ID NO: 1978313 - DNA, 25 bp, Homo sapien
cattagtatatagagaactttctca

SEQ ID NO: 1978314 - DNA, 25 bp, Homo sapien
gctgttcccatcaccaacttgccaa

SEQ ID NO: 1978315 - DNA, 25 bp, Homo sapien
tttcacttctcaacatatcttggag

SEQ ID NO: 1978316 - DNA, 25 bp, Homo sapien
cctcccacgggtaatgatatttatt

SEQ ID NO: 1978317 - DNA, 25 bp, Homo sapien
ttgccgtcgagtttaagagtgtgac

SEQ ID NO: 1978318 - DNA, 25 bp, Homo sapien
atctccgagacccaagtgtcactac

SEQ ID NO: 1978319 - DNA, 25 bp, Homo sapien
cgagtttaagagtgtgactctcagc

SEQ ID NO: 1978320 - DNA, 25 bp, Homo sapien
cttgcttttgccgtcgagtttaaga

SEQ ID NO: 1978321 - DNA, 25 bp, Homo sapien
agacaggcccagcacgtcttgtact

SEQ ID NO: 1978322 - DNA, 25 bp, Homo sapien
ggagagggagttgggcatgagaaat

SEQ ID NO: 1978323 - DNA, 25 bp, Homo sapien
aatgcagctcctcttgtttggagac

SEQ ID NO: 1978324 - DNA, 25 bp, Homo sapien
caggcccagcacgtcttgtactgca

SEQ ID NO: 1978325 - DNA, 25 bp, Homo sapien
gacagacaagagaagttcagcaaac

SEQ ID NO: 1978326 - DNA, 25 bp, Homo sapien
caggtcatggacagacaagagaagt

SEQ ID NO: 1978327 - DNA, 25 bp, Homo sapien
agagaagttcagcaaacaccgcagc

SEQ ID NO: 1978328 - DNA, 25 bp, Homo sapien
gaagttcagcaaacaccgcagctgc

SEQ ID NO: 1978329 - DNA, 25 bp, Homo sapien
ttccagaacaggcaatgctttgccc

SEQ ID NO: 1978330 - DNA, 25 bp, Homo sapien
cagaacaggcaatgctttgccctca

SEQ ID NO: 1978331 - DNA, 25 bp, Homo sapien
tccagaacaggcaatgctttgccct

SEQ ID NO: 1978332 - DNA, 25 bp, Homo sapien
gaacaggcaatgctttgccctcagg

SEQ ID NO: 1978333 - DNA, 25 bp, Homo sapien
tacggtcatctggacgttctgcacg

SEQ ID NO: 1978334 - DNA, 25 bp, Homo sapien
gagaatctgatcgtcctgctggctg

SEQ ID NO: 1978335 - DNA, 25 bp, Homo sapien
ttcatatatgccttccggagcccag

SEQ ID NO: 1978336 - DNA, 25 bp, Homo sapien
ccatatctgatatgctgggcagcct

SEQ ID NO: 1978337 - DNA, 25 bp, Homo sapien
agtggggcggcaaagaataatcttt

SEQ ID NO: 1978338 - DNA, 25 bp, Homo sapien
aaagtggggcggcaaagaataatct

SEQ ID NO: 1978339 - DNA, 25 bp, Homo sapien
aagtggggcggcaaagaataatctt

SEQ ID NO: 1978340 - DNA, 25 bp, Homo sapien
gtgtgttcacgagaaggatgggagg

SEQ ID NO: 1978341 - DNA, 25 bp, Homo sapien
tttcatcaagggcaccgctgctgtt

SEQ ID NO: 1978342 - DNA, 25 bp, Homo sapien
ttcatcaagggcaccgctgctgttc

SEQ ID NO: 1978343 - DNA, 25 bp, Homo sapien
catcaagggcaccgctgctgttcat

SEQ ID NO: 1978344 - DNA, 25 bp, Homo sapien
tcatcaagggcaccgctgctgttca

SEQ ID NO: 1978345 - DNA, 25 bp, Homo sapien
gatcataggctgtgctcccaaattt

SEQ ID NO: 1978346 - DNA, 25 bp, Homo sapien
gacaagtccctagagtgaggccgtg

SEQ ID NO: 1978347 - DNA, 25 bp, Homo sapien
tccccgtggacttcagatcataggc

SEQ ID NO: 1978348 - DNA, 25 bp, Homo sapien
gaagtgtcttcctcgccacgtggtg

SEQ ID NO: 1978349 - DNA, 25 bp, Homo sapien
ccccatggatttataggattggcag

SEQ ID NO: 1978350 - DNA, 25 bp, Homo sapien
caaacgtgcagtagcaatgcttgat

SEQ ID NO: 1978351 - DNA, 25 bp, Homo sapien
atccacaaacgtgcagtagcaatgc

SEQ ID NO: 1978352 - DNA, 25 bp, Homo sapien
ttcagggctccccatggatttatag

SEQ ID NO: 1978353 - DNA, 25 bp, Homo sapien
taaaggccaccaattcgtgtcactg

SEQ ID NO: 1978354 - DNA, 25 bp, Homo sapien
tcacaaggcgggctctgctgtatcc

SEQ ID NO: 1978355 - DNA, 25 bp, Homo sapien
gcatgctgagcactcataaaggcca

SEQ ID NO: 1978356 - DNA, 25 bp, Homo sapien
catctggagaattaggtggtgccca

SEQ ID NO: 1978357 - DNA, 25 bp, Homo sapien
gaagagcaatccgagaaaacaccca

SEQ ID NO: 1978358 - DNA, 25 bp, Homo sapien
tggattacaggactgccctctagaa

SEQ ID NO: 1978359 - DNA, 25 bp, Homo sapien
ggaaagcggcacagtgttgctaact

SEQ ID NO: 1978360 - DNA, 25 bp, Homo sapien
gcctgaaagcccctggtaaacagta

SEQ ID NO: 1978361 - DNA, 25 bp, Homo sapien
cctcgctggctgatccaaggagcag

SEQ ID NO: 1978362 - DNA, 25 bp, Homo sapien
cgctggctgatccaaggagcagcat

SEQ ID NO: 1978363 - DNA, 25 bp, Homo sapien
ggcctcgctggctgatccaaggagc

SEQ ID NO: 1978364 - DNA, 25 bp, Homo sapien
tcgctggctgatccaaggagcagca

SEQ ID NO: 1978365 - DNA, 25 bp, Homo sapien
cagctctgcatttctgttgtaagtc

SEQ ID NO: 1978366 - DNA, 25 bp, Homo sapien
aaattcagccaacagctgtgtgtgg

SEQ ID NO: 1978367 - DNA, 25 bp, Homo sapien
tgtgtgtggattcctctgagtttcc

SEQ ID NO: 1978368 - DNA, 25 bp, Homo sapien
agtggaactctgtctgtgggtggct

SEQ ID NO: 1978369 - DNA, 25 bp, Homo sapien
tcactatgcaaggcattgaatcata

SEQ ID NO: 1978370 - DNA, 25 bp, Homo sapien
cactatgcaaggcattgaatcataa

SEQ ID NO: 1978371 - DNA, 25 bp, Homo sapien
atgcaaggcattgaatcataatttt

SEQ ID NO: 1978372 - DNA, 25 bp, Homo sapien
ctatgcaaggcattgaatcataatt

SEQ ID NO: 1978373 - DNA, 25 bp, Homo sapien
cagaagctgcctctgatgtttgagc

SEQ ID NO: 1978374 - DNA, 25 bp, Homo sapien
tcccgcctgtgtcctcagtatcata

SEQ ID NO: 1978375 - DNA, 25 bp, Homo sapien
gcctgtgtcctcagtatcatagaga

SEQ ID NO: 1978376 - DNA, 25 bp, Homo sapien
tccactcccgcctgtgtcctcagta

SEQ ID NO: 1978377 - DNA, 25 bp, Homo sapien
gtcctcagtatcatagagaatgaaa

SEQ ID NO: 1978378 - DNA, 25 bp, Homo sapien
ggcacaagaacccatctgtatttcc

SEQ ID NO: 1978379 - DNA, 25 bp, Homo sapien
gccatggcacaagaacccatctgta

SEQ ID NO: 1978380 - DNA, 25 bp, Homo sapien
tggggatcttagacaattggaaacc

SEQ ID NO: 1978381 - DNA, 25 bp, Homo sapien
gagtgagtaagcactggggatctta

SEQ ID NO: 1978382 - DNA, 25 bp, Homo sapien
gagtgccgatgaaaggctcctgctc

SEQ ID NO: 1978383 - DNA, 25 bp, Homo sapien
tgtttgcattcacgatgctcagctg

SEQ ID NO: 1978384 - DNA, 25 bp, Homo sapien
ggtctcgggctcactgctgtttgca

SEQ ID NO: 1978385 - DNA, 25 bp, Homo sapien
caccacaatggtagatctcgtacaa

SEQ ID NO: 1978386 - DNA, 25 bp, Homo sapien
attgagcaacgctcgtccatgggcc

SEQ ID NO: 1978387 - DNA, 25 bp, Homo sapien
ggaaccttgctggaacactctgcag

SEQ ID NO: 1978388 - DNA, 25 bp, Homo sapien
agtctgagctgggaaccttgctgga

SEQ ID NO: 1978389 - DNA, 25 bp, Homo sapien
tctgcagacattgagcaacgctcgt

SEQ ID NO: 1978390 - DNA, 25 bp, Homo sapien
gtgaatgatccctccagcgtctcca

SEQ ID NO: 1978391 - DNA, 25 bp, Homo sapien
ccagaccctgcgaataggctttctc

SEQ ID NO: 1978392 - DNA, 25 bp, Homo sapien
tgactgaatcatgtccccgtcaggg

SEQ ID NO: 1978393 - DNA, 25 bp, Homo sapien
tcacgttgtcctcacaaagacaggt

SEQ ID NO: 1978394 - DNA, 25 bp, Homo sapien
aagactcccagaccctgcgaatagg

SEQ ID NO: 1978395 - DNA, 25 bp, Homo sapien
cgtctggggggtgtgcccatcagct

SEQ ID NO: 1978396 - DNA, 25 bp, Homo sapien
cacccacccggccagctgccccatc

SEQ ID NO: 1978397 - DNA, 25 bp, Homo sapien
ccccgtctggggggtgtgcccatca

SEQ ID NO: 1978398 - DNA, 25 bp, Homo sapien
cccacccggccagctgccccatcca

SEQ ID NO: 1978399 - DNA, 25 bp, Homo sapien
cgtcgcacagaggtgttaattcagc

SEQ ID NO: 1978400 - DNA, 25 bp, Homo sapien
aaacccaaagccacgtcgcacagag

SEQ ID NO: 1978401 - DNA, 25 bp, Homo sapien
caagaatcagaatcgaataatcaaa

SEQ ID NO: 1978402 - DNA, 25 bp, Homo sapien
aagaggcggtgcacattctggccct

SEQ ID NO: 1978403 - DNA, 25 bp, Homo sapien
tgagctctaagcttccctttggcaa

SEQ ID NO: 1978404 - DNA, 25 bp, Homo sapien
tccactggtgggcaactgaacattc

SEQ ID NO: 1978405 - DNA, 25 bp, Homo sapien
caatggagtgtaaatgttggcttcc

SEQ ID NO: 1978406 - DNA, 25 bp, Homo sapien
ttcacactggcacaactggaacagt

SEQ ID NO: 1978407 - DNA, 25 bp, Homo sapien
ggtacctcacagctagaattcctcg

SEQ ID NO: 1978408 - DNA, 25 bp, Homo sapien
tctattatttgcagtcggtcttggt

SEQ ID NO: 1978409 - DNA, 25 bp, Homo sapien
tcttggtcaggttttactcttgcaa

SEQ ID NO: 1978410 - DNA, 25 bp, Homo sapien
gcacttagcctctgctgtctctgac

SEQ ID NO: 1978411 - DNA, 25 bp, Homo sapien
agtttgtggacagtgagttgtggac

SEQ ID NO: 1978412 - DNA, 25 bp, Homo sapien
gtttgtggacagtgagttgtggact

SEQ ID NO: 1978413 - DNA, 25 bp, Homo sapien
agcttctgaagggtcagtccagggc

SEQ ID NO: 1978414 - DNA, 25 bp, Homo sapien
caataacccgatgagaggcaaacac

SEQ ID NO: 1978415 - DNA, 25 bp, Homo sapien
gcctggcagcccatgaggcccaagg

SEQ ID NO: 1978416 - DNA, 25 bp, Homo sapien
gagcagcacggatttaagacccacg

SEQ ID NO: 1978417 - DNA, 25 bp, Homo sapien
caaggtgggtatacgcagcctggca

SEQ ID NO: 1978418 - DNA, 25 bp, Homo sapien
gtccactcctgagaagagagcagca

SEQ ID NO: 1978419 - DNA, 25 bp, Homo sapien
tttggctgaacatgcgtcaaatcca

SEQ ID NO: 1978420 - DNA, 25 bp, Homo sapien
ggctgaacatgcgtcaaatccacgg

SEQ ID NO: 1978421 - DNA, 25 bp, Homo sapien
aacatgcgtcaaatccacgggagca

SEQ ID NO: 1978422 - DNA, 25 bp, Homo sapien
gcgtcaaatccacgggagcatcaca

SEQ ID NO: 1978423 - DNA, 25 bp, Homo sapien
gcatctgtggaattaaggcatcttc

SEQ ID NO: 1978424 - DNA, 25 bp, Homo sapien
tctgctcccagtggatgaggattaa

SEQ ID NO: 1978425 - DNA, 25 bp, Homo sapien
tgctcccagtggatgaggattaaag

SEQ ID NO: 1978426 - DNA, 25 bp, Homo sapien
ctcccagtggatgaggattaaagaa

SEQ ID NO: 1978427 - DNA, 25 bp, Homo sapien
gtctgctcccagtggatgaggatta

SEQ ID NO: 1978428 - DNA, 25 bp, Homo sapien
cagggattgtttaggggacacatcg

SEQ ID NO: 1978429 - DNA, 25 bp, Homo sapien
ggataggacagcagggattgtttag

SEQ ID NO: 1978430 - DNA, 25 bp, Homo sapien
tgtttaggggacacatcggatgcat

SEQ ID NO: 1978431 - DNA, 25 bp, Homo sapien
agagggataggacagcagggattgt

SEQ ID NO: 1978432 - DNA, 25 bp, Homo sapien
caagacctgggttggggacagggag

SEQ ID NO: 1978433 - DNA, 25 bp, Homo sapien
agacctgggttggggacagggagcg

SEQ ID NO: 1978434 - DNA, 25 bp, Homo sapien
aagaggccatttggggggtcatcct

SEQ ID NO: 1978435 - DNA, 25 bp, Homo sapien
ctgtgacccagtgaaatgggcctgt

SEQ ID NO: 1978436 - DNA, 25 bp, Homo sapien
tcaagagtgacttatccagaccgat

SEQ ID NO: 1978437 - DNA, 25 bp, Homo sapien
tttccacactcaagagtgacttatc

SEQ ID NO: 1978438 - DNA, 25 bp, Homo sapien
gagtgacttatccagaccgatttta

SEQ ID NO: 1978439 - DNA, 25 bp, Homo sapien
tatccagaccgattttacctaagaa

SEQ ID NO: 1978440 - DNA, 25 bp, Homo sapien
catgtaggagtttcttttccctgag

SEQ ID NO: 1978441 - DNA, 25 bp, Homo sapien
acatgttgaattccccctcttggca

SEQ ID NO: 1978442 - DNA, 25 bp, Homo sapien
aggtttgtgccccaggaagtagtgt

SEQ ID NO: 1978443 - DNA, 25 bp, Homo sapien
cagtggacagcgtaggaccacctct

SEQ ID NO: 1978444 - DNA, 25 bp, Homo sapien
tgaggacaggaatagaactagctca

SEQ ID NO: 1978445 - DNA, 25 bp, Homo sapien
gaggacaggaatagaactagctcac

SEQ ID NO: 1978446 - DNA, 25 bp, Homo sapien
tcattcagctggagggtgttctgag

SEQ ID NO: 1978447 - DNA, 25 bp, Homo sapien
ttcagctggagggtgttctgaggac

SEQ ID NO: 1978448 - DNA, 25 bp, Homo sapien
aatctgttcacacaatgcatggtca

SEQ ID NO: 1978449 - DNA, 25 bp, Homo sapien
ctctacatagttccattccttgttt

SEQ ID NO: 1978450 - DNA, 25 bp, Homo sapien
gcatgttgtccagtgtactcacatc

SEQ ID NO: 1978451 - DNA, 25 bp, Homo sapien
gagtgtgccagctctctctacatag

SEQ ID NO: 1978452 - DNA, 25 bp, Homo sapien
aaggtgagtcgtggaccgagcatct

SEQ ID NO: 1978453 - DNA, 25 bp, Homo sapien
agctctacagaggattgcagtccct

SEQ ID NO: 1978454 - DNA, 25 bp, Homo sapien
gctctgcccggtaaccgtggatcct

SEQ ID NO: 1978455 - DNA, 25 bp, Homo sapien
ttgcaccgcagccatcacggctctg

SEQ ID NO: 1978456 - DNA, 25 bp, Homo sapien
catgaaggagccgactgctgtgtcc

SEQ ID NO: 1978457 - DNA, 25 bp, Homo sapien
ctcggcaagggtggctatactgaaa

SEQ ID NO: 1978458 - DNA, 25 bp, Homo sapien
tgtagctagtgattccgcaggctgc

SEQ ID NO: 1978459 - DNA, 25 bp, Homo sapien
cccatgagccagtgagcggtggaca

SEQ ID NO: 1978460 - DNA, 25 bp, Homo sapien
aagcagggctctgttgcgtgcaaga

SEQ ID NO: 1978461 - DNA, 25 bp, Homo sapien
aactgctggtttgtctttgcagagc

SEQ ID NO: 1978462 - DNA, 25 bp, Homo sapien
ggcaggtgtaccatgctgtcatggc

SEQ ID NO: 1978463 - DNA, 25 bp, Homo sapien
cattcctgcctcgattggggtgtgg

SEQ ID NO: 1978464 - DNA, 25 bp, Homo sapien
tcagggattaattggaggtttgtag

SEQ ID NO: 1978465 - DNA, 25 bp, Homo sapien
taattgggtacagttatgtagtcgc

SEQ ID NO: 1978466 - DNA, 25 bp, Homo sapien
taagcttgaatttcgtttcctccta

SEQ ID NO: 1978467 - DNA, 25 bp, Homo sapien
gaaaggcttgtataaggtgtgtgag

SEQ ID NO: 1978468 - DNA, 25 bp, Homo sapien
tgtgtggtattggcgctctgggtat

SEQ ID NO: 1978469 - DNA, 25 bp, Homo sapien
gtattggcgctctgggtatctcccc

SEQ ID NO: 1978470 - DNA, 25 bp, Homo sapien
tgtggtattggcgctctgggtatct

SEQ ID NO: 1978471 - DNA, 25 bp, Homo sapien
tggtattggcgctctgggtatctcc

SEQ ID NO: 1978472 - DNA, 25 bp, Homo sapien
tgcctttcacacctggcggtgcatc

SEQ ID NO: 1978473 - DNA, 25 bp, Homo sapien
ttgggctggattcctctaggagagg

SEQ ID NO: 1978474 - DNA, 25 bp, Homo sapien
ggtgcctttcacacctggcggtgca

SEQ ID NO: 1978475 - DNA, 25 bp, Homo sapien
aaggtgcctttcacacctggcggtg

SEQ ID NO: 1978476 - DNA, 25 bp, Homo sapien
gctcaggctcccttgagcctccaag

SEQ ID NO: 1978477 - DNA, 25 bp, Homo sapien
tcaggctcccttgagcctccaagag

SEQ ID NO: 1978478 - DNA, 25 bp, Homo sapien
tcccttgagcctccaagagccattc

SEQ ID NO: 1978479 - DNA, 25 bp, Homo sapien
cagaggctcaggctcccttgagcct

SEQ ID NO: 1978480 - DNA, 25 bp, Homo sapien
gatacatgacgaccagaaggcagtg

SEQ ID NO: 1978481 - DNA, 25 bp, Homo sapien
ctccgtgtacctccgtgtgtgtcac

SEQ ID NO: 1978482 - DNA, 25 bp, Homo sapien
ggctccgacagcgatacatgacgac

SEQ ID NO: 1978483 - DNA, 25 bp, Homo sapien
tgtgggggctccgacagcgatacat

SEQ ID NO: 1978484 - DNA, 25 bp, Homo sapien
cgtccttgtctgtagctctgaatca

SEQ ID NO: 1978485 - DNA, 25 bp, Homo sapien
tctgtagctctgaatcagggcccag

SEQ ID NO: 1978486 - DNA, 25 bp, Homo sapien
ttgtctgtagctctgaatcagggcc

SEQ ID NO: 1978487 - DNA, 25 bp, Homo sapien
agctctgaatcagggcccaggtgca

SEQ ID NO: 1978488 - DNA, 25 bp, Homo sapien
tgggccagttcaccgaattccagcc

SEQ ID NO: 1978489 - DNA, 25 bp, Homo sapien
aactcgacgcccatagccccaggag

SEQ ID NO: 1978490 - DNA, 25 bp, Homo sapien
ggacatctcggaggacagcgacact

SEQ ID NO: 1978491 - DNA, 25 bp, Homo sapien
cttggcgttttactctgcagcccag

SEQ ID NO: 1978492 - DNA, 25 bp, Homo sapien
acgaggacatctcggaggacagcga

SEQ ID NO: 1978493 - DNA, 25 bp, Homo sapien
gcgaccgcatccagcactttgatga

SEQ ID NO: 1978494 - DNA, 25 bp, Homo sapien
gatccagcagatgacggccaacttt

SEQ ID NO: 1978495 - DNA, 25 bp, Homo sapien
gacaggatcgcggagatcaacttca

SEQ ID NO: 1978496 - DNA, 25 bp, Homo sapien
tgaggagtttgcagaccatgacaac

SEQ ID NO: 1978497 - DNA, 25 bp, Homo sapien
ttgcagcgccccatttgacaggatc

SEQ ID NO: 1978498 - DNA, 25 bp, Homo sapien
gcatctcactagcaaaagggagagg

SEQ ID NO: 1978499 - DNA, 25 bp, Homo sapien
gagaactccaaagtcactccacctt

SEQ ID NO: 1978500 - DNA, 25 bp, Homo sapien
tccagacaagtctctgatggcatct

SEQ ID NO: 1978501 - DNA, 25 bp, Homo sapien
aagtcactccaccttgatgagagca

SEQ ID NO: 1978502 - DNA, 25 bp, Homo sapien
ccgagcataccctgcaagtgtgcag

SEQ ID NO: 1978503 - DNA, 25 bp, Homo sapien
ccccttggtgcatgcacggtgctgg

SEQ ID NO: 1978504 - DNA, 25 bp, Homo sapien
gtgctgggacgctgtcagacgctcc

SEQ ID NO: 1978505 - DNA, 25 bp, Homo sapien
acgggtgcccgagcataccctgcaa

SEQ ID NO: 1978506 - DNA, 25 bp, Homo sapien
cccctccggacacgcgactatgctg

SEQ ID NO: 1978507 - DNA, 25 bp, Homo sapien
ctgcttcaggccctcagatggactg

SEQ ID NO: 1978508 - DNA, 25 bp, Homo sapien
tcagatggactgaccacagtagcac

SEQ ID NO: 1978509 - DNA, 25 bp, Homo sapien
agatggactgaccacagtagcaccg

SEQ ID NO: 1978510 - DNA, 25 bp, Homo sapien
tggtgctccgaagccattagcgctg

SEQ ID NO: 1978511 - DNA, 25 bp, Homo sapien
agctggtgctccgaagccattagcg

SEQ ID NO: 1978512 - DNA, 25 bp, Homo sapien
tgctccgaagccattagcgctgcca

SEQ ID NO: 1978513 - DNA, 25 bp, Homo sapien
ggagctggtgctccgaagccattag

SEQ ID NO: 1978514 - DNA, 25 bp, Homo sapien
tgacagtgaaagaccccgcagccgt

SEQ ID NO: 1978515 - DNA, 25 bp, Homo sapien
ctgacagtgaaagaccccgcagccg

SEQ ID NO: 1978516 - DNA, 25 bp, Homo sapien
agtgaaagaccccgcagccgtctct

SEQ ID NO: 1978517 - DNA, 25 bp, Homo sapien
acagtgaaagaccccgcagccgtct

SEQ ID NO: 1978518 - DNA, 25 bp, Homo sapien
gcagatcgccaacgtactggtgcag

SEQ ID NO: 1978519 - DNA, 25 bp, Homo sapien
acgtactggtgcagaacctggagtg

SEQ ID NO: 1978520 - DNA, 25 bp, Homo sapien
cagatcgccaacgtactggtgcaga

SEQ ID NO: 1978521 - DNA, 25 bp, Homo sapien
atcgccaacgtactggtgcagaacc

SEQ ID NO: 1978522 - DNA, 25 bp, Homo sapien
tgggtgtgcgacacagctccacact

SEQ ID NO: 1978523 - DNA, 25 bp, Homo sapien
tgcgtgcaggactgcatgctctggt

SEQ ID NO: 1978524 - DNA, 25 bp, Homo sapien
cctcctactgggtggacagctgcaa

SEQ ID NO: 1978525 - DNA, 25 bp, Homo sapien
cactggtgatgctgcgtgcaggact

SEQ ID NO: 1978526 - DNA, 25 bp, Homo sapien
tcttttgctcctgccccgaacctgg

SEQ ID NO: 1978527 - DNA, 25 bp, Homo sapien
ttttgctcctgccccgaacctggtg

SEQ ID NO: 1978528 - DNA, 25 bp, Homo sapien
ttgctcctgccccgaacctggtgct

SEQ ID NO: 1978529 - DNA, 25 bp, Homo sapien
cttcttttgctcctgccccgaacct

SEQ ID NO: 1978530 - DNA, 25 bp, Homo sapien
gccctggaccttccctgaatctgtg

SEQ ID NO: 1978531 - DNA, 25 bp, Homo sapien
gaatctgtgctgacccagctttggc

SEQ ID NO: 1978532 - DNA, 25 bp, Homo sapien
ccctgaatctgtgctgacccagctt

SEQ ID NO: 1978533 - DNA, 25 bp, Homo sapien
tggcactgccatagcactggccctg

SEQ ID NO: 1978534 - DNA, 25 bp, Homo sapien
cagtttctggccagcttgggccaaa

SEQ ID NO: 1978535 - DNA, 25 bp, Homo sapien
agttgggagccaggcactatggtgt

SEQ ID NO: 1978536 - DNA, 25 bp, Homo sapien
gtggagttgggagccaggcactatg

SEQ ID NO: 1978537 - DNA, 25 bp, Homo sapien
ggcactatggtgtctccagcaccca

SEQ ID NO: 1978538 - DNA, 25 bp, Homo sapien
ctggagcacggcagacacagtgttt

SEQ ID NO: 1978539 - DNA, 25 bp, Homo sapien
actggagcacggcagacacagtgtt

SEQ ID NO: 1978540 - DNA, 25 bp, Homo sapien
tactggagcacggcagacacagtgt

SEQ ID NO: 1978541 - DNA, 25 bp, Homo sapien
catactggagcacggcagacacagt

SEQ ID NO: 1978542 - DNA, 25 bp, Homo sapien
gcgatcccaaatctattatctaatc

SEQ ID NO: 1978543 - DNA, 25 bp, Homo sapien
ctattatctaatccaaaatccgcga

SEQ ID NO: 1978544 - DNA, 25 bp, Homo sapien
tctattatctaatccaaaatccgcg

SEQ ID NO: 1978545 - DNA, 25 bp, Homo sapien
tattatctaatccaaaatccgcgat

SEQ ID NO: 1978546 - DNA, 25 bp, Homo sapien
ccagacagcgctccatctccgcagc

SEQ ID NO: 1978547 - DNA, 25 bp, Homo sapien
ccatctccgcagcgtcgcccttgac

SEQ ID NO: 1978548 - DNA, 25 bp, Homo sapien
acagcgctccatctccgcagcgtcg

SEQ ID NO: 1978549 - DNA, 25 bp, Homo sapien
catctccgcagcgtcgcccttgaca

SEQ ID NO: 1978550 - DNA, 25 bp, Homo sapien
gtcctgagagatagtagaatatgtc

SEQ ID NO: 1978551 - DNA, 25 bp, Homo sapien
caaggagattaagtcccaatattcc

SEQ ID NO: 1978552 - DNA, 25 bp, Homo sapien
ttgaatgggcagttaaaggttatct

SEQ ID NO: 1978553 - DNA, 25 bp, Homo sapien
taacaggtactcaggttatgtttga

SEQ ID NO: 1978554 - DNA, 25 bp, Homo sapien
attttctttgtcatagatatcaatc

SEQ ID NO: 1978555 - DNA, 25 bp, Homo sapien
tgtatcaaaggcgttctattttctt

SEQ ID NO: 1978556 - DNA, 25 bp, Homo sapien
tgaccactttcacatggccactggc

SEQ ID NO: 1978557 - DNA, 25 bp, Homo sapien
gcgttctattttctttgtcatagat

SEQ ID NO: 1978558 - DNA, 25 bp, Homo sapien
gcttcaatattttcaccatggaaaa

SEQ ID NO: 1978559 - DNA, 25 bp, Homo sapien
aatattttcaccatggaaaagcagt

SEQ ID NO: 1978560 - DNA, 25 bp, Homo sapien
tcaatattttcaccatggaaaagca

SEQ ID NO: 1978561 - DNA, 25 bp, Homo sapien
tattttcaccatggaaaagcagttt

SEQ ID NO: 1978562 - DNA, 25 bp, Homo sapien
tcctgggtatgggtagaacacaaac

SEQ ID NO: 1978563 - DNA, 25 bp, Homo sapien
gctaaggagtgccttgtctcaacac

SEQ ID NO: 1978564 - DNA, 25 bp, Homo sapien
taaactcaggctcaacctgggacta

SEQ ID NO: 1978565 - DNA, 25 bp, Homo sapien
tgctcaagctgaacttaaactcagg

SEQ ID NO: 1978566 - DNA, 25 bp, Homo sapien
cctgagtaaaggaagtactaaggtg

SEQ ID NO: 1978567 - DNA, 25 bp, Homo sapien
aactggagaatacacgccttctcta

SEQ ID NO: 1978568 - DNA, 25 bp, Homo sapien
gagaatacacgccttctctaaaggg

SEQ ID NO: 1978569 - DNA, 25 bp, Homo sapien
gcacaaaggaaggttgcctgagtaa

SEQ ID NO: 1978570 - DNA, 25 bp, Homo sapien
agaagtattataccccaagagaagg

SEQ ID NO: 1978571 - DNA, 25 bp, Homo sapien
gaaaatcttctctaaggtgctttga

SEQ ID NO: 1978572 - DNA, 25 bp, Homo sapien
acagttgccagagcttcccaatgca

SEQ ID NO: 1978573 - DNA, 25 bp, Homo sapien
gctttgatcacagcacttagcatgg

SEQ ID NO: 1978574 - DNA, 25 bp, Homo sapien
aacggcatgtgtacttgctttgttt

SEQ ID NO: 1978575 - DNA, 25 bp, Homo sapien
ctcagcctatcaacggcatgtgtac

SEQ ID NO: 1978576 - DNA, 25 bp, Homo sapien
ctctttcttgcaaattatagcgaat

SEQ ID NO: 1978577 - DNA, 25 bp, Homo sapien
catctcagcctatcaacggcatgtg

SEQ ID NO: 1978578 - DNA, 25 bp, Homo sapien
gatttagatgaagatttcgccattg

SEQ ID NO: 1978579 - DNA, 25 bp, Homo sapien
caacagagccagattgcatctccaa

SEQ ID NO: 1978580 - DNA, 25 bp, Homo sapien
gctgaggtcacttatctaaagtagg

SEQ ID NO: 1978581 - DNA, 25 bp, Homo sapien
ctttgtaaattatcaccaaggctga

SEQ ID NO: 1978582 - DNA, 25 bp, Homo sapien
agaaggatgttgacaatacccagtg

SEQ ID NO: 1978583 - DNA, 25 bp, Homo sapien
cccagtgagtcatagtgcacagcaa

SEQ ID NO: 1978584 - DNA, 25 bp, Homo sapien
tacccagtgagtcatagtgcacagc

SEQ ID NO: 1978585 - DNA, 25 bp, Homo sapien
ggatgttgacaatacccagtgagtc

SEQ ID NO: 1978586 - DNA, 25 bp, Homo sapien
tcaaacggcaagaaatagcgtaatc

SEQ ID NO: 1978587 - DNA, 25 bp, Homo sapien
cacacatgtcttgagtaaagacatt

SEQ ID NO: 1978588 - DNA, 25 bp, Homo sapien
cttgagtaaagacattaatactttg

SEQ ID NO: 1978589 - DNA, 25 bp, Homo sapien
tttgtcaaacggcaagaaatagcgt

SEQ ID NO: 1978590 - DNA, 25 bp, Homo sapien
gaatttatgtgccatccctaggcag

SEQ ID NO: 1978591 - DNA, 25 bp, Homo sapien
gctttctgaatttatgtgccatccc

SEQ ID NO: 1978592 - DNA, 25 bp, Homo sapien
tctgaatttatgtgccatccctagg

SEQ ID NO: 1978593 - DNA, 25 bp, Homo sapien
cagcagccatgcttatctgctctgt

SEQ ID NO: 1978594 - DNA, 25 bp, Homo sapien
tggtttgtcatttttaagtatcatc

SEQ ID NO: 1978595 - DNA, 25 bp, Homo sapien
tttaagtatcatctttttatgctcc

SEQ ID NO: 1978596 - DNA, 25 bp, Homo sapien
taagtatcatctttttatgctccaa

SEQ ID NO: 1978597 - DNA, 25 bp, Homo sapien
tttttaagtatcatctttttatgct

SEQ ID NO: 1978598 - DNA, 25 bp, Homo sapien
cttatcaagagtaggaccaccaaga

SEQ ID NO: 1978599 - DNA, 25 bp, Homo sapien
tttcttatcaagagtaggaccacca

SEQ ID NO: 1978600 - DNA, 25 bp, Homo sapien
tcttatcaagagtaggaccaccaag

SEQ ID NO: 1978601 - DNA, 25 bp, Homo sapien
ttcttatcaagagtaggaccaccaa

SEQ ID NO: 1978602 - DNA, 25 bp, Homo sapien
gcagattcatcagaacttccaacat

SEQ ID NO: 1978603 - DNA, 25 bp, Homo sapien
ctgactgcagattcatcagaacttc

SEQ ID NO: 1978604 - DNA, 25 bp, Homo sapien
tgactgcagattcatcagaacttcc

SEQ ID NO: 1978605 - DNA, 25 bp, Homo sapien
actgcagattcatcagaacttccaa

SEQ ID NO: 1978606 - DNA, 25 bp, Homo sapien
gagttcgtcatccaatgcagacaat

SEQ ID NO: 1978607 - DNA, 25 bp, Homo sapien
caagagttcgtcatccaatgcagac

SEQ ID NO: 1978608 - DNA, 25 bp, Homo sapien
aagagttcgtcatccaatgcagaca

SEQ ID NO: 1978609 - DNA, 25 bp, Homo sapien
tcaagagttcgtcatccaatgcaga

SEQ ID NO: 1978610 - DNA, 25 bp, Homo sapien
gctctgacactttctcggggacaca

SEQ ID NO: 1978611 - DNA, 25 bp, Homo sapien
tccatgggaaggtccacgtaaaggc

SEQ ID NO: 1978612 - DNA, 25 bp, Homo sapien
tctccttttccattgactattctgt

SEQ ID NO: 1978613 - DNA, 25 bp, Homo sapien
cgtaaaggctctgacactttctcgg

SEQ ID NO: 1978614 - DNA, 25 bp, Homo sapien
aaggaaggatgttttgcaggaggcc

SEQ ID NO: 1978615 - DNA, 25 bp, Homo sapien
caaggaaggatgttttgcaggaggc

SEQ ID NO: 1978616 - DNA, 25 bp, Homo sapien
ttcaaggaaggatgttttgcaggag

SEQ ID NO: 1978617 - DNA, 25 bp, Homo sapien
cttcaaggaaggatgttttgcagga

SEQ ID NO: 1978618 - DNA, 25 bp, Homo sapien
ttttgtactgctcctttcacagcag

SEQ ID NO: 1978619 - DNA, 25 bp, Homo sapien
gctctcaatgtctgtacattctttt

SEQ ID NO: 1978620 - DNA, 25 bp, Homo sapien
caggatcttccatttcagtgctagg

SEQ ID NO: 1978621 - DNA, 25 bp, Homo sapien
tcttttttgtactgctcctttcaca

SEQ ID NO: 1978622 - DNA, 25 bp, Homo sapien
catgattatccattaagacaaggtg

SEQ ID NO: 1978623 - DNA, 25 bp, Homo sapien
caaggcaaatgctcaatggttccca

SEQ ID NO: 1978624 - DNA, 25 bp, Homo sapien
cccattagtattgggtaaatcaaca

SEQ ID NO: 1978625 - DNA, 25 bp, Homo sapien
caaggtgatggaatgtgtgaataca

SEQ ID NO: 1978626 - DNA, 25 bp, Homo sapien
ctttcacgcctttgctgttcttcct

SEQ ID NO: 1978627 - DNA, 25 bp, Homo sapien
ttttcacttctttcacgcctttgct

SEQ ID NO: 1978628 - DNA, 25 bp, Homo sapien
ttcacttctttcacgcctttgctgt

SEQ ID NO: 1978629 - DNA, 25 bp, Homo sapien
ttctttcacgcctttgctgttcttc

SEQ ID NO: 1978630 - DNA, 25 bp, Homo sapien
gatgtcttttctgtcagaatgcatg

SEQ ID NO: 1978631 - DNA, 25 bp, Homo sapien
tcttttctgtcagaatgcatgttct

SEQ ID NO: 1978632 - DNA, 25 bp, Homo sapien
tctgtcagaatgcatgttctaaaat

SEQ ID NO: 1978633 - DNA, 25 bp, Homo sapien
tttctgtcagaatgcatgttctaaa

SEQ ID NO: 1978634 - DNA, 25 bp, Homo sapien
tatgacatatattttctgatagttg

SEQ ID NO: 1978635 - DNA, 25 bp, Homo sapien
tgtatgtattatttccttctatgac

SEQ ID NO: 1978636 - DNA, 25 bp, Homo sapien
catatattttctgatagttgtattt

SEQ ID NO: 1978637 - DNA, 25 bp, Homo sapien
tctgatagttgtattttttcacttt

SEQ ID NO: 1978638 - DNA, 25 bp, Homo sapien
tccttcagtttcttgggaaattgct

SEQ ID NO: 1978639 - DNA, 25 bp, Homo sapien
cagtttcttgggaaattgctgagga

SEQ ID NO: 1978640 - DNA, 25 bp, Homo sapien
ttcttgggaaattgctgaggatatg

SEQ ID NO: 1978641 - DNA, 25 bp, Homo sapien
tgaggatatgttttcccaatctttc

SEQ ID NO: 1978642 - DNA, 25 bp, Homo sapien
tcaagttgttttgcttcaacttctt

SEQ ID NO: 1978643 - DNA, 25 bp, Homo sapien
gagtatagcaatatctgtcttcaaa

SEQ ID NO: 1978644 - DNA, 25 bp, Homo sapien
gtgcatatttcctgtctgagtatag

SEQ ID NO: 1978645 - DNA, 25 bp, Homo sapien
tttcatccatcagatctttcacttc

SEQ ID NO: 1978646 - DNA, 25 bp, Homo sapien
agggcagcatttgtttctttagcaa

SEQ ID NO: 1978647 - DNA, 25 bp, Homo sapien
cagcagccagtctagactgataaga

SEQ ID NO: 1978648 - DNA, 25 bp, Homo sapien
gcagccagtctagactgataagatt

SEQ ID NO: 1978649 - DNA, 25 bp, Homo sapien
gccagtctagactgataagattcaa

SEQ ID NO: 1978650 - DNA, 25 bp, Homo sapien
cagccagtctagactgataagattc

SEQ ID NO: 1978651 - DNA, 25 bp, Homo sapien
gctctcgggggccggactccaccca

SEQ ID NO: 1978652 - DNA, 25 bp, Homo sapien
tctcgggggccggactccacccaca

SEQ ID NO: 1978653 - DNA, 25 bp, Homo sapien
caccaggatctgcacgtctttcttc

SEQ ID NO: 1978654 - DNA, 25 bp, Homo sapien
tctttcttcatgtcggtggctctcg

SEQ ID NO: 1978655 - DNA, 25 bp, Homo sapien
actatacagacgacattagcctgag

SEQ ID NO: 1978656 - DNA, 25 bp, Homo sapien
cactatacagacgacattagcctga

SEQ ID NO: 1978657 - DNA, 25 bp, Homo sapien
cttcccagacgatggtcagtagggc

SEQ ID NO: 1978658 - DNA, 25 bp, Homo sapien
acgatggtcagtagggcagaggtgc

SEQ ID NO: 1978659 - DNA, 25 bp, Homo sapien
gacgatggtcagtagggcagaggtg

SEQ ID NO: 1978660 - DNA, 25 bp, Homo sapien
cccagacgatggtcagtagggcaga

SEQ ID NO: 1978661 - DNA, 25 bp, Homo sapien
cctcacttcctcctagacagggcgg

SEQ ID NO: 1978662 - DNA, 25 bp, Homo sapien
cgctcctcacttcctcctagacagg

SEQ ID NO: 1978663 - DNA, 25 bp, Homo sapien
acttcctcctagacagggcggccag

SEQ ID NO: 1978664 - DNA, 25 bp, Homo sapien
gacagggtgaccgggcagaggcgct

SEQ ID NO: 1978665 - DNA, 25 bp, Homo sapien
ccagactatgggcggctgggcaaag

SEQ ID NO: 1978666 - DNA, 25 bp, Homo sapien
actatgggcggctgggcaaaggcgc

SEQ ID NO: 1978667 - DNA, 25 bp, Homo sapien
gactatgggcggctgggcaaaggcg

SEQ ID NO: 1978668 - DNA, 25 bp, Homo sapien
aggtgctcctcgtttcccagacagg

SEQ ID NO: 1978669 - DNA, 25 bp, Homo sapien
ggttttcctaggcagtgtttgtgtc

SEQ ID NO: 1978670 - DNA, 25 bp, Homo sapien
ggtaaagttatagattaacagcata

SEQ ID NO: 1978671 - DNA, 25 bp, Homo sapien
agttatagattaacagcataccaag

SEQ ID NO: 1978672 - DNA, 25 bp, Homo sapien
taaagttatagattaacagcatacc

SEQ ID NO: 1978673 - DNA, 25 bp, Homo sapien
gagagtatctcttgtcttacggaac

SEQ ID NO: 1978674 - DNA, 25 bp, Homo sapien
tgtttggcttaggtcgttttgtaca

SEQ ID NO: 1978675 - DNA, 25 bp, Homo sapien
ttctgagagtatctcttgtcttacg

SEQ ID NO: 1978676 - DNA, 25 bp, Homo sapien
tcgttttgtacagtttctaaagcca

SEQ ID NO: 1978677 - DNA, 25 bp, Homo sapien
tactgactttagcttctgcactttg

SEQ ID NO: 1978678 - DNA, 25 bp, Homo sapien
actgactttagcttctgcactttga

SEQ ID NO: 1978679 - DNA, 25 bp, Homo sapien
ctgactttagcttctgcactttgat

SEQ ID NO: 1978680 - DNA, 25 bp, Homo sapien
ttactgactttagcttctgcacttt

SEQ ID NO: 1978681 - DNA, 25 bp, Homo sapien
ctttctgatgaacatcaactagttg

SEQ ID NO: 1978682 - DNA, 25 bp, Homo sapien
tttatgatcctctttctgatgaaca

SEQ ID NO: 1978683 - DNA, 25 bp, Homo sapien
cctctttctgatgaacatcaactag

SEQ ID NO: 1978684 - DNA, 25 bp, Homo sapien
tatctctttatgatcctctttctga

SEQ ID NO: 1978685 - DNA, 25 bp, Homo sapien
caataaagcctctttggatattaat

SEQ ID NO: 1978686 - DNA, 25 bp, Homo sapien
gctttctgtctctcatattgaaaga

SEQ ID NO: 1978687 - DNA, 25 bp, Homo sapien
gtctctcatattgaaagagactttc

SEQ ID NO: 1978688 - DNA, 25 bp, Homo sapien
tctagcatgaggtctttctttctac

SEQ ID NO: 1978689 - DNA, 25 bp, Homo sapien
ctaccttaaaatatgactctgtgcc

SEQ ID NO: 1978690 - DNA, 25 bp, Homo sapien
actatctaccttaaaatatgactct

SEQ ID NO: 1978691 - DNA, 25 bp, Homo sapien
tatctaccttaaaatatgactctgt

SEQ ID NO: 1978692 - DNA, 25 bp, Homo sapien
tctaccttaaaatatgactctgtgc

SEQ ID NO: 1978693 - DNA, 25 bp, Homo sapien
acttaaagcaagatattacaagata

SEQ ID NO: 1978694 - DNA, 25 bp, Homo sapien
cttaaagcaagatattacaagatac

SEQ ID NO: 1978695 - DNA, 25 bp, Homo sapien
aaattaatgtgacaacatgatgtac

SEQ ID NO: 1978696 - DNA, 25 bp, Homo sapien
ttttaagggaatcagccacttcttg

SEQ ID NO: 1978697 - DNA, 25 bp, Homo sapien
tccagtggagactctaacatagtta

SEQ ID NO: 1978698 - DNA, 25 bp, Homo sapien
tgtgacaacatgatgtaccttccag

SEQ ID NO: 1978699 - DNA, 25 bp, Homo sapien
agagacaggctaaagacactgagct

SEQ ID NO: 1978700 - DNA, 25 bp, Homo sapien
tcctggatggaatagtacataactg

SEQ ID NO: 1978701 - DNA, 25 bp, Homo sapien
ctggatggaatagtacataactgac

SEQ ID NO: 1978702 - DNA, 25 bp, Homo sapien
cctggatggaatagtacataactga

SEQ ID NO: 1978703 - DNA, 25 bp, Homo sapien
ctcctggatggaatagtacataact

SEQ ID NO: 1978704 - DNA, 25 bp, Homo sapien
tcttatttgattcacattatactcc

SEQ ID NO: 1978705 - DNA, 25 bp, Homo sapien
tcacattatactccagtgatgatac

SEQ ID NO: 1978706 - DNA, 25 bp, Homo sapien
cattatactccagtgatgatactaa

SEQ ID NO: 1978707 - DNA, 25 bp, Homo sapien
ttgattcacattatactccagtgat

SEQ ID NO: 1978708 - DNA, 25 bp, Homo sapien
gtctccatggcaatcgatgtcttca

SEQ ID NO: 1978709 - DNA, 25 bp, Homo sapien
tccatggcaatcgatgtcttcattt

SEQ ID NO: 1978710 - DNA, 25 bp, Homo sapien
aagtctccatggcaatcgatgtctt

SEQ ID NO: 1978711 - DNA, 25 bp, Homo sapien
atttattgtcatttccaggagtttc

SEQ ID NO: 1978712 - DNA, 25 bp, Homo sapien
gtctttagccaaattgacatatttt

SEQ ID NO: 1978713 - DNA, 25 bp, Homo sapien
tcctgttgtactttattcatagata

SEQ ID NO: 1978714 - DNA, 25 bp, Homo sapien
ttttcacattcctgttgtactttat

SEQ ID NO: 1978715 - DNA, 25 bp, Homo sapien
ttccttctctgctgtaagatcatca

SEQ ID NO: 1978716 - DNA, 25 bp, Homo sapien
caatttatattcttgtagtttacta

SEQ ID NO: 1978717 - DNA, 25 bp, Homo sapien
ctagctccaatttatattcttgtag

SEQ ID NO: 1978718 - DNA, 25 bp, Homo sapien
gctccaatttatattcttgtagttt

SEQ ID NO: 1978719 - DNA, 25 bp, Homo sapien
gcattgccctttcatctagctccaa

SEQ ID NO: 1978720 - DNA, 25 bp, Homo sapien
tcatatttagtgaagccgtattatc

SEQ ID NO: 1978721 - DNA, 25 bp, Homo sapien
aattgttagcgttcaatgctgctgc

SEQ ID NO: 1978722 - DNA, 25 bp, Homo sapien
tttgacatggaattgttagcgttca

SEQ ID NO: 1978723 - DNA, 25 bp, Homo sapien
ttctaatttggttgtaacctcttca

SEQ ID NO: 1978724 - DNA, 25 bp, Homo sapien
agtaggaattcttacggtcattttg

SEQ ID NO: 1978725 - DNA, 25 bp, Homo sapien
tacggtcattttgggaatatattta

SEQ ID NO: 1978726 - DNA, 25 bp, Homo sapien
cggtcattttgggaatatatttact

SEQ ID NO: 1978727 - DNA, 25 bp, Homo sapien
tcattttgggaatatatttactgtt

SEQ ID NO: 1978728 - DNA, 25 bp, Homo sapien
aatttaggtggtacctctgtaggat

SEQ ID NO: 1978729 - DNA, 25 bp, Homo sapien
cattggtttgcttaggagagtggat

SEQ ID NO: 1978730 - DNA, 25 bp, Homo sapien
gattcttccaaaggcatattgaggg

SEQ ID NO: 1978731 - DNA, 25 bp, Homo sapien
ccgaggtttgcagtacagttgagcc

SEQ ID NO: 1978732 - DNA, 25 bp, Homo sapien
ttctctaattatttgttctacacag

SEQ ID NO: 1978733 - DNA, 25 bp, Homo sapien
tttgttctacacagtccagctccat

SEQ ID NO: 1978734 - DNA, 25 bp, Homo sapien
tatttgttctacacagtccagctcc

SEQ ID NO: 1978735 - DNA, 25 bp, Homo sapien
taattatttgttctacacagtccag

SEQ ID NO: 1978736 - DNA, 25 bp, Homo sapien
tctaccaaaaccctgagaacttgat

SEQ ID NO: 1978737 - DNA, 25 bp, Homo sapien
gaatcgtttcggtgtgctggctgac

SEQ ID NO: 1978738 - DNA, 25 bp, Homo sapien
gatgcctgtgttttctgagaatcgt

SEQ ID NO: 1978739 - DNA, 25 bp, Homo sapien
tgttttctgagaatcgtttcggtgt

SEQ ID NO: 1978740 - DNA, 25 bp, Homo sapien
gatggaggagataacataggttgat

SEQ ID NO: 1978741 - DNA, 25 bp, Homo sapien
tggaggagataacataggttgatac

SEQ ID NO: 1978742 - DNA, 25 bp, Homo sapien
tgtcaatatcatgggctttctgatg

SEQ ID NO: 1978743 - DNA, 25 bp, Homo sapien
tttatgtcaatatcatgggctttct

SEQ ID NO: 1978744 - DNA, 25 bp, Homo sapien
aaaatagatgggagcaagtgtccaa

SEQ ID NO: 1978745 - DNA, 25 bp, Homo sapien
cagtggattctagagaagaaaatag

SEQ ID NO: 1978746 - DNA, 25 bp, Homo sapien
gagaagaaaatagatgggagcaagt

SEQ ID NO: 1978747 - DNA, 25 bp, Homo sapien
aagaaaatagatgggagcaagtgtc

SEQ ID NO: 1978748 - DNA, 25 bp, Homo sapien
ctaaaaaaaatgactcattccaggg

SEQ ID NO: 1978749 - DNA, 25 bp, Homo sapien
ctgcttctaaaaaaaatgactcatt

SEQ ID NO: 1978750 - DNA, 25 bp, Homo sapien
tctaaaaaaaatgactcattccagg

SEQ ID NO: 1978751 - DNA, 25 bp, Homo sapien
gcttctaaaaaaaatgactcattcc

SEQ ID NO: 1978752 - DNA, 25 bp, Homo sapien
gtgagtacacgctggggagggctcg

SEQ ID NO: 1978753 - DNA, 25 bp, Homo sapien
accagtgagtacacgctggggaggg

SEQ ID NO: 1978754 - DNA, 25 bp, Homo sapien
ttggggaccagtgagtacacgctgg

SEQ ID NO: 1978755 - DNA, 25 bp, Homo sapien
acacgctggggagggctcgcctgtg

SEQ ID NO: 1978756 - DNA, 25 bp, Homo sapien
ctcagtggatgcggcagctgttctt

SEQ ID NO: 1978757 - DNA, 25 bp, Homo sapien
ggctacaggaagactaatccagaac

SEQ ID NO: 1978758 - DNA, 25 bp, Homo sapien
ggcactgcctggacacgccatctac

SEQ ID NO: 1978759 - DNA, 25 bp, Homo sapien
ctaaaggccctctgggcccatctca

SEQ ID NO: 1978760 - DNA, 25 bp, Homo sapien
acagtgaggtggcctggcactgcct

SEQ ID NO: 1978761 - DNA, 25 bp, Homo sapien
gggcccatctcaaaggagacagtga

SEQ ID NO: 1978762 - DNA, 25 bp, Homo sapien
tgtcctgggtggtcacggaggtgat

SEQ ID NO: 1978763 - DNA, 25 bp, Homo sapien
gggtggtcacggaggtgatgagaaa

SEQ ID NO: 1978764 - DNA, 25 bp, Homo sapien
gtcacggaggtgatgagaaaagatg

SEQ ID NO: 1978765 - DNA, 25 bp, Homo sapien
cacggaggtgatgagaaaagatgca

SEQ ID NO: 1978766 - DNA, 25 bp, Homo sapien
tcccgggtactgaaaagctgctccg

SEQ ID NO: 1978767 - DNA, 25 bp, Homo sapien
ccgagtgagtttgtcttgtcttggg

SEQ ID NO: 1978768 - DNA, 25 bp, Homo sapien
tgcacaggtcccgggtactgaaaag

SEQ ID NO: 1978769 - DNA, 25 bp, Homo sapien
acaggtcccgggtactgaaaagctg

SEQ ID NO: 1978770 - DNA, 25 bp, Homo sapien
gtgtggctccatttgcagcacattt

SEQ ID NO: 1978771 - DNA, 25 bp, Homo sapien
tgcagcacatttgttgcactgaggc

SEQ ID NO: 1978772 - DNA, 25 bp, Homo sapien
ctgatgcatggaatggagccccaaa

SEQ ID NO: 1978773 - DNA, 25 bp, Homo sapien
tgatgcatggaatggagccccaaag

SEQ ID NO: 1978774 - DNA, 25 bp, Homo sapien
tggcatccaagaagcccacggtgct

SEQ ID NO: 1978775 - DNA, 25 bp, Homo sapien
ttggcatccaagaagcccacggtgc

SEQ ID NO: 1978776 - DNA, 25 bp, Homo sapien
ctcttggcatccaagaagcccacgg

SEQ ID NO: 1978777 - DNA, 25 bp, Homo sapien
cagagtccttctcaagatggcctgt

SEQ ID NO: 1978778 - DNA, 25 bp, Homo sapien
tctcttcggtgctggtggggcgcat

SEQ ID NO: 1978779 - DNA, 25 bp, Homo sapien
gtggggcgcatcagaagtgacaaaa

SEQ ID NO: 1978780 - DNA, 25 bp, Homo sapien
gctggtggggcgcatcagaagtgac

SEQ ID NO: 1978781 - DNA, 25 bp, Homo sapien
gggcgcatcagaagtgacaaaaaat

SEQ ID NO: 1978782 - DNA, 25 bp, Homo sapien
ctgacagtgtggaagatctctatac

SEQ ID NO: 1978783 - DNA, 25 bp, Homo sapien
cagtgtggaagatctctatactgaa

SEQ ID NO: 1978784 - DNA, 25 bp, Homo sapien
agatctctatactgaagtgaatggc

SEQ ID NO: 1978785 - DNA, 25 bp, Homo sapien
tggaagatctctatactgaagtgaa

SEQ ID NO: 1978786 - DNA, 25 bp, Homo sapien
gcaccaacaggtccatggctgggtc

SEQ ID NO: 1978787 - DNA, 25 bp, Homo sapien
tggctgggtccaggtcctgcctgga

SEQ ID NO: 1978788 - DNA, 25 bp, Homo sapien
ctgagacagcaccaacaggtccatg

SEQ ID NO: 1978789 - DNA, 25 bp, Homo sapien
acagcaccaacaggtccatggctgg

SEQ ID NO: 1978790 - DNA, 25 bp, Homo sapien
tctgccacttgttgtctgctctccg

SEQ ID NO: 1978791 - DNA, 25 bp, Homo sapien
gcctctgcacgtctatcttcccttc

SEQ ID NO: 1978792 - DNA, 25 bp, Homo sapien
ttgttgtctgctctccgtgacttta

SEQ ID NO: 1978793 - DNA, 25 bp, Homo sapien
catcagcctctgcacgtctatcttc

SEQ ID NO: 1978794 - DNA, 25 bp, Homo sapien
caggttggctatgtagcaataacaa

SEQ ID NO: 1978795 - DNA, 25 bp, Homo sapien
gaagccctgtgctaatagccaacac

SEQ ID NO: 1978796 - DNA, 25 bp, Homo sapien
gatggtcctttatcaaggtgatggt

SEQ ID NO: 1978797 - DNA, 25 bp, Homo sapien
ttccacagcctgttaaggaatcaga

SEQ ID NO: 1978798 - DNA, 25 bp, Homo sapien
tcacatatacgaccacaggctgttc

SEQ ID NO: 1978799 - DNA, 25 bp, Homo sapien
caggctgttcgacacagacaggaca

SEQ ID NO: 1978800 - DNA, 25 bp, Homo sapien
cacgtctccacgttaagggcatcgt

SEQ ID NO: 1978801 - DNA, 25 bp, Homo sapien
taagcctggtgatcactgtccatcc

SEQ ID NO: 1978802 - DNA, 25 bp, Homo sapien
aaaagttgtcatgccccattttaca

SEQ ID NO: 1978803 - DNA, 25 bp, Homo sapien
gaagcctcccaatcataccagaatg

SEQ ID NO: 1978804 - DNA, 25 bp, Homo sapien
catacgggaagagtaggagcaagac

SEQ ID NO: 1978805 - DNA, 25 bp, Homo sapien
gaagatggtgcttaaacattggtga

SEQ ID NO: 1978806 - DNA, 25 bp, Homo sapien
tttgcagggtttatgccccacggct

SEQ ID NO: 1978807 - DNA, 25 bp, Homo sapien
tctcgggtctgcatgatggtggcct

SEQ ID NO: 1978808 - DNA, 25 bp, Homo sapien
tgagggctaggctcacaaggccttg

SEQ ID NO: 1978809 - DNA, 25 bp, Homo sapien
tagaagtttcatataaggctctgcc

SEQ ID NO: 1978810 - DNA, 25 bp, Homo sapien
tgtccacagggccttcaacatgcat

SEQ ID NO: 1978811 - DNA, 25 bp, Homo sapien
ctttgtcctgtcagaatctctgagc

SEQ ID NO: 1978812 - DNA, 25 bp, Homo sapien
gactgggccattgaacaccactggg

SEQ ID NO: 1978813 - DNA, 25 bp, Homo sapien
cagctgtccacagggccttcaacat

SEQ ID NO: 1978814 - DNA, 25 bp, Homo sapien
ctgacagactgggaagacctcttaa

SEQ ID NO: 1978815 - DNA, 25 bp, Homo sapien
gactgggaagacctcttaagtcctc

SEQ ID NO: 1978816 - DNA, 25 bp, Homo sapien
cagactgggaagacctcttaagtcc

SEQ ID NO: 1978817 - DNA, 25 bp, Homo sapien
gacagactgggaagacctcttaagt

SEQ ID NO: 1978818 - DNA, 25 bp, Homo sapien
catgaaatgtgcacacaggctgtcc

SEQ ID NO: 1978819 - DNA, 25 bp, Homo sapien
aagtgagggaacaggcaacgtggac

SEQ ID NO: 1978820 - DNA, 25 bp, Homo sapien
ccatcccatcctgctggacaggatg

SEQ ID NO: 1978821 - DNA, 25 bp, Homo sapien
aacaggcaacgtggacagcttggtt

SEQ ID NO: 1978822 - DNA, 25 bp, Homo sapien
catccgatctgacatttttgctctc

SEQ ID NO: 1978823 - DNA, 25 bp, Homo sapien
tagatttcttctagtcattaagcat

SEQ ID NO: 1978824 - DNA, 25 bp, Homo sapien
gaaacatgacaaagtaagctgagcc

SEQ ID NO: 1978825 - DNA, 25 bp, Homo sapien
agtcattaagcatgttgagccattt

SEQ ID NO: 1978826 - DNA, 25 bp, Homo sapien
atgctctggtgagataggccacagg

SEQ ID NO: 1978827 - DNA, 25 bp, Homo sapien
tacagatggaagaatgctctggtga

SEQ ID NO: 1978828 - DNA, 25 bp, Homo sapien
ctacagatggaagaatgctctggtg

SEQ ID NO: 1978829 - DNA, 25 bp, Homo sapien
agaatgctctggtgagataggccac

SEQ ID NO: 1978830 - DNA, 25 bp, Homo sapien
agtgggactcccttgtggagcagcc

SEQ ID NO: 1978831 - DNA, 25 bp, Homo sapien
tgtggtgcctacgttaccatctctg

SEQ ID NO: 1978832 - DNA, 25 bp, Homo sapien
ctgtggtgcctacgttaccatctct

SEQ ID NO: 1978833 - DNA, 25 bp, Homo sapien
tggtgcctacgttaccatctctgcc

SEQ ID NO: 1978834 - DNA, 25 bp, Homo sapien
gtggtgcctacgttaccatctctgc

SEQ ID NO: 1978835 - DNA, 25 bp, Homo sapien
gaaagaacaaaaggctcactgtccc

SEQ ID NO: 1978836 - DNA, 25 bp, Homo sapien
aagaacaaaaggctcactgtcccaa

SEQ ID NO: 1978837 - DNA, 25 bp, Homo sapien
caaaaggctcactgtcccaatggca

SEQ ID NO: 1978838 - DNA, 25 bp, Homo sapien
gaacaaaaggctcactgtcccaatg

SEQ ID NO: 1978839 - DNA, 25 bp, Homo sapien
gggacttcttgctgatttcctttac

SEQ ID NO: 1978840 - DNA, 25 bp, Homo sapien
gacttcttgctgatttcctttacgg

SEQ ID NO: 1978841 - DNA, 25 bp, Homo sapien
gccctcggattctccagccccatag

SEQ ID NO: 1978842 - DNA, 25 bp, Homo sapien
agaacgtgacatgtttctcagaatg

SEQ ID NO: 1978843 - DNA, 25 bp, Homo sapien
caggaccacattacacccagaaatg

SEQ ID NO: 1978844 - DNA, 25 bp, Homo sapien
ccacattacacccagaaatgggtgc

SEQ ID NO: 1978845 - DNA, 25 bp, Homo sapien
gaccacattacacccagaaatgggt

SEQ ID NO: 1978846 - DNA, 25 bp, Homo sapien
ggaccacattacacccagaaatggg

SEQ ID NO: 1978847 - DNA, 25 bp, Homo sapien
cttccatggcaaattaagataccgg

SEQ ID NO: 1978848 - DNA, 25 bp, Homo sapien
caccttccatggcaaattaagatac

SEQ ID NO: 1978849 - DNA, 25 bp, Homo sapien
agcaccttccatggcaaattaagat

SEQ ID NO: 1978850 - DNA, 25 bp, Homo sapien
ccatggcaaattaagataccggaga

SEQ ID NO: 1978851 - DNA, 25 bp, Homo sapien
tcatccaagcaggatccctcccttg

SEQ ID NO: 1978852 - DNA, 25 bp, Homo sapien
ctgagacagtccctgaagacttttc

SEQ ID NO: 1978853 - DNA, 25 bp, Homo sapien
gacagtccctgaagacttttcatcc

SEQ ID NO: 1978854 - DNA, 25 bp, Homo sapien
agtccctgaagacttttcatccaag

SEQ ID NO: 1978855 - DNA, 25 bp, Homo sapien
accaccgctggtactcatgaagatg

SEQ ID NO: 1978856 - DNA, 25 bp, Homo sapien
tggatggagagacccacaccgggac

SEQ ID NO: 1978857 - DNA, 25 bp, Homo sapien
acaagacctctgaacacattagctc

SEQ ID NO: 1978858 - DNA, 25 bp, Homo sapien
agacaagacctctgaacacattagc

SEQ ID NO: 1978859 - DNA, 25 bp, Homo sapien
gcccagtggctgtgctttcatatcc

SEQ ID NO: 1978860 - DNA, 25 bp, Homo sapien
ggcagccaagcaggcttggatctct

SEQ ID NO: 1978861 - DNA, 25 bp, Homo sapien
ttggacaccgcccatgcactgaggc

SEQ ID NO: 1978862 - DNA, 25 bp, Homo sapien
agcaggcttggatctcttggctgat

SEQ ID NO: 1978863 - DNA, 25 bp, Homo sapien
gcaccacgtgatggcatcactcctg

SEQ ID NO: 1978864 - DNA, 25 bp, Homo sapien
cgtgatggcatcactcctgggtgtc

SEQ ID NO: 1978865 - DNA, 25 bp, Homo sapien
aactcttgcaccacgtgatggcatc

SEQ ID NO: 1978866 - DNA, 25 bp, Homo sapien
ggtgtcttctgaggttgcataggat

SEQ ID NO: 1978867 - DNA, 25 bp, Homo sapien
tgacagtgcctccagcaatgagcag

SEQ ID NO: 1978868 - DNA, 25 bp, Homo sapien
aatgtcctgcctgatctgcaagtgt

SEQ ID NO: 1978869 - DNA, 25 bp, Homo sapien
cagtgcctccagcaatgagcaggaa

SEQ ID NO: 1978870 - DNA, 25 bp, Homo sapien
ctgatctgcaagtgtcagacccggg

SEQ ID NO: 1978871 - DNA, 25 bp, Homo sapien
ggttacagacaaggactgcaggtac

SEQ ID NO: 1978872 - DNA, 25 bp, Homo sapien
tggttacagacaaggactgcaggta

SEQ ID NO: 1978873 - DNA, 25 bp, Homo sapien
ttacagacaaggactgcaggtacag

SEQ ID NO: 1978874 - DNA, 25 bp, Homo sapien
gttacagacaaggactgcaggtaca

SEQ ID NO: 1978875 - DNA, 25 bp, Homo sapien
tctaaagagttggtcccaccatccc

SEQ ID NO: 1978876 - DNA, 25 bp, Homo sapien
tgtcattgctggttctaaagagttg

SEQ ID NO: 1978877 - DNA, 25 bp, Homo sapien
ccccaagtgggatctgtttgtcatt

SEQ ID NO: 1978878 - DNA, 25 bp, Homo sapien
ccagaggacccatgacacttaacat

SEQ ID NO: 1978879 - DNA, 25 bp, Homo sapien
agaccagctgaccgggctgccaaca

SEQ ID NO: 1978880 - DNA, 25 bp, Homo sapien
gtcatgaagcataaccagaccctga

SEQ ID NO: 1978881 - DNA, 25 bp, Homo sapien
acatcttagtagagatcccaggaga

SEQ ID NO: 1978882 - DNA, 25 bp, Homo sapien
gaccacaatgcaggtcatgaagcat

SEQ ID NO: 1978883 - DNA, 25 bp, Homo sapien
gcaaccccaggattgggagggcaaa

SEQ ID NO: 1978884 - DNA, 25 bp, Homo sapien
ggcaatttcgtgcagggtccatgga

SEQ ID NO: 1978885 - DNA, 25 bp, Homo sapien
ggagtggggataaaatctgacccaa

SEQ ID NO: 1978886 - DNA, 25 bp, Homo sapien
agcccctgaagcaaccccaggattg

SEQ ID NO: 1978887 - DNA, 25 bp, Homo sapien
tcccatggaacgtttcactgtgatc

SEQ ID NO: 1978888 - DNA, 25 bp, Homo sapien
cccatggaacgtttcactgtgatca

SEQ ID NO: 1978889 - DNA, 25 bp, Homo sapien
ttctgcagtcacgtggttaggaagg

SEQ ID NO: 1978890 - DNA, 25 bp, Homo sapien
ctgcagtcacgtggttaggaaggat

SEQ ID NO: 1978891 - DNA, 25 bp, Homo sapien
gaagccttacctgatatccctaaat

SEQ ID NO: 1978892 - DNA, 25 bp, Homo sapien
ggaagccttacctgatatccctaaa

SEQ ID NO: 1978893 - DNA, 25 bp, Homo sapien
tgcctggaactggaaaagtcccatt

SEQ ID NO: 1978894 - DNA, 25 bp, Homo sapien
tggaactggaaaagtcccatttcat

SEQ ID NO: 1978895 - DNA, 25 bp, Homo sapien
ctgcctggaactggaaaagtcccat

SEQ ID NO: 1978896 - DNA, 25 bp, Homo sapien
ctggaactggaaaagtcccatttca

SEQ ID NO: 1978897 - DNA, 25 bp, Homo sapien
tccccgttgctttcgttcctttgca

SEQ ID NO: 1978898 - DNA, 25 bp, Homo sapien
ccccgttgctttcgttcctttgcag

SEQ ID NO: 1978899 - DNA, 25 bp, Homo sapien
tgaggttccccgctggcgcgtccag

SEQ ID NO: 1978900 - DNA, 25 bp, Homo sapien
tgtagggtgaggttccccgctggcg

SEQ ID NO: 1978901 - DNA, 25 bp, Homo sapien
cccggctcggcgtcgggagcgcgct

SEQ ID NO: 1978902 - DNA, 25 bp, Homo sapien
cagacactgagatgcttgctaggag

SEQ ID NO: 1978903 - DNA, 25 bp, Homo sapien
ctgcagacactgagatgcttgctag

SEQ ID NO: 1978904 - DNA, 25 bp, Homo sapien
agacactgagatgcttgctaggagg

SEQ ID NO: 1978905 - DNA, 25 bp, Homo sapien
gcagacactgagatgcttgctagga

SEQ ID NO: 1978906 - DNA, 25 bp, Homo sapien
gcagaaaaatgggtaccacctggac

SEQ ID NO: 1978907 - DNA, 25 bp, Homo sapien
tgcgggcagaaaaatgggtaccacc

SEQ ID NO: 1978908 - DNA, 25 bp, Homo sapien
cgggcagaaaaatgggtaccacctg

SEQ ID NO: 1978909 - DNA, 25 bp, Homo sapien
ctgcgggcagaaaaatgggtaccac

SEQ ID NO: 1978910 - DNA, 25 bp, Homo sapien
tatatctgcatatctaggttctgaa

SEQ ID NO: 1978911 - DNA, 25 bp, Homo sapien
tctgcatatctaggttctgaaaagc

SEQ ID NO: 1978912 - DNA, 25 bp, Homo sapien
ctatatctgcatatctaggttctga

SEQ ID NO: 1978913 - DNA, 25 bp, Homo sapien
tatctgcatatctaggttctgaaaa

SEQ ID NO: 1978914 - DNA, 25 bp, Homo sapien
ttaacccgggagcaaagacacagca

SEQ ID NO: 1978915 - DNA, 25 bp, Homo sapien
cactccacaacagctccagagctgc

SEQ ID NO: 1978916 - DNA, 25 bp, Homo sapien
gtggaccaaacactggcagcttcag

SEQ ID NO: 1978917 - DNA, 25 bp, Homo sapien
cttagttcgttcactttgaagaatg

SEQ ID NO: 1978918 - DNA, 25 bp, Homo sapien
tgctgacaaatccttcttagttcgt

SEQ ID NO: 1978919 - DNA, 25 bp, Homo sapien
gacaaatccttcttagttcgttcac

SEQ ID NO: 1978920 - DNA, 25 bp, Homo sapien
tcttcatcccggaattggggtcatc

SEQ ID NO: 1978921 - DNA, 25 bp, Homo sapien
ccaggacttggaggaccgtctttct

SEQ ID NO: 1978922 - DNA, 25 bp, Homo sapien
catcccggaattggggtcatccttc

SEQ ID NO: 1978923 - DNA, 25 bp, Homo sapien
ttccatccagtaactagggggtatc

SEQ ID NO: 1978924 - DNA, 25 bp, Homo sapien
cacccaggacttgggagatgtctta

SEQ ID NO: 1978925 - DNA, 25 bp, Homo sapien
gacttgggagatgtcttatctaccc

SEQ ID NO: 1978926 - DNA, 25 bp, Homo sapien
atccttccctatgcggtccccagag

SEQ ID NO: 1978927 - DNA, 25 bp, Homo sapien
ggcatccttccctatgcggtcccca

SEQ ID NO: 1978928 - DNA, 25 bp, Homo sapien
tgccctgcgggctcacggtctgtga

SEQ ID NO: 1978929 - DNA, 25 bp, Homo sapien
aagccggtgacactgccctgcgggc

SEQ ID NO: 1978930 - DNA, 25 bp, Homo sapien
gctgctgcacaagccggtgacactg

SEQ ID NO: 1978931 - DNA, 25 bp, Homo sapien
gggctgctgcacaagccggtgacac

SEQ ID NO: 1978932 - DNA, 25 bp, Homo sapien
tccccctgtcctgccactctgtcat

SEQ ID NO: 1978933 - DNA, 25 bp, Homo sapien
aagctgagagtaagggaattgatct

SEQ ID NO: 1978934 - DNA, 25 bp, Homo sapien
taagggaattgatctctcaggcact

SEQ ID NO: 1978935 - DNA, 25 bp, Homo sapien
agagtaagggaattgatctctcagg

SEQ ID NO: 1978936 - DNA, 25 bp, Homo sapien
gctgtgcatggtcagtggagtcttc

SEQ ID NO: 1978937 - DNA, 25 bp, Homo sapien
tggaacaggctgatctgtgctgtgc

SEQ ID NO: 1978938 - DNA, 25 bp, Homo sapien
ccatttgcactgtcctctggaacag

SEQ ID NO: 1978939 - DNA, 25 bp, Homo sapien
ggtcgaagtcgcctctgttgctgca

SEQ ID NO: 1978940 - DNA, 25 bp, Homo sapien
catgccaccctattttatgctcttt

SEQ ID NO: 1978941 - DNA, 25 bp, Homo sapien
gacatgccaccctattttatgctct

SEQ ID NO: 1978942 - DNA, 25 bp, Homo sapien
atgccaccctattttatgctctttc

SEQ ID NO: 1978943 - DNA, 25 bp, Homo sapien
cgacatgccaccctattttatgctc

SEQ ID NO: 1978944 - DNA, 25 bp, Homo sapien
cgggcagggtcagggttggttgcag

SEQ ID NO: 1978945 - DNA, 25 bp, Homo sapien
gggtcagggttggttgcaggtggca

SEQ ID NO: 1978946 - DNA, 25 bp, Homo sapien
ggtgacgcgggcagggtcagggttg

SEQ ID NO: 1978947 - DNA, 25 bp, Homo sapien
tggtgacgcgggcagggtcagggtt

SEQ ID NO: 1978948 - DNA, 25 bp, Homo sapien
gtgccggcgccgggctctgtgcggg

SEQ ID NO: 1978949 - DNA, 25 bp, Homo sapien
cgccgggctctgtgcgggcgctggg

SEQ ID NO: 1978950 - DNA, 25 bp, Homo sapien
cggcgccgggctctgtgcgggcgct

SEQ ID NO: 1978951 - DNA, 25 bp, Homo sapien
cagagcgggttgtgccggcgccggg

SEQ ID NO: 1978952 - DNA, 25 bp, Homo sapien
gtttcgaggccgctggtgtcggcgg

SEQ ID NO: 1978953 - DNA, 25 bp, Homo sapien
ctagggtttcgaggccgctggtgtc

SEQ ID NO: 1978954 - DNA, 25 bp, Homo sapien
ttcgaggccgctggtgtcggcgggc

SEQ ID NO: 1978955 - DNA, 25 bp, Homo sapien
ctctagggtttcgaggccgctggtg

SEQ ID NO: 1978956 - DNA, 25 bp, Homo sapien
gaatccgctgaagggcaagttcccg

SEQ ID NO: 1978957 - DNA, 25 bp, Homo sapien
agcctccaggaatccgctgaagggc

SEQ ID NO: 1978958 - DNA, 25 bp, Homo sapien
tccaggaatccgctgaagggcaagt

SEQ ID NO: 1978959 - DNA, 25 bp, Homo sapien
aagttcccgctcttctacagctgtg

SEQ ID NO: 1978960 - DNA, 25 bp, Homo sapien
gggtcatttgcctgcgcccagatca

SEQ ID NO: 1978961 - DNA, 25 bp, Homo sapien
gcctgagggtcatttgcctgcgccc

SEQ ID NO: 1978962 - DNA, 25 bp, Homo sapien
tccggtcccagacggcctgagggtc

SEQ ID NO: 1978963 - DNA, 25 bp, Homo sapien
cagacggcctgagggtcatttgcct

SEQ ID NO: 1978964 - DNA, 25 bp, Homo sapien
tctgaggctgtctaaaggtggctga

SEQ ID NO: 1978965 - DNA, 25 bp, Homo sapien
gtctgaggctgtctaaaggtggctg

SEQ ID NO: 1978966 - DNA, 25 bp, Homo sapien
tgaggctgtctaaaggtggctgagt

SEQ ID NO: 1978967 - DNA, 25 bp, Homo sapien
ctgaggctgtctaaaggtggctgag

SEQ ID NO: 1978968 - DNA, 25 bp, Homo sapien
tgcaggcaaagtgcccggttgctct

SEQ ID NO: 1978969 - DNA, 25 bp, Homo sapien
ctgctgcggcgcccttgtacaggtg

SEQ ID NO: 1978970 - DNA, 25 bp, Homo sapien
cctggctcttggtggtgcaggcaaa

SEQ ID NO: 1978971 - DNA, 25 bp, Homo sapien
gttctcagtagacgccggcagggtt

SEQ ID NO: 1978972 - DNA, 25 bp, Homo sapien
agagttctgggacgcgggcactggg

SEQ ID NO: 1978973 - DNA, 25 bp, Homo sapien
gccaaggggactgcgccgagggcat

SEQ ID NO: 1978974 - DNA, 25 bp, Homo sapien
ccagagttctgggacgcgggcactg

SEQ ID NO: 1978975 - DNA, 25 bp, Homo sapien
cgccgagggcataggtttctgccct

SEQ ID NO: 1978976 - DNA, 25 bp, Homo sapien
tagggtccgctcttcctttgcctgc

SEQ ID NO: 1978977 - DNA, 25 bp, Homo sapien
agggtccgctcttcctttgcctgca

SEQ ID NO: 1978978 - DNA, 25 bp, Homo sapien
gggtccgctcttcctttgcctgcac

SEQ ID NO: 1978979 - DNA, 25 bp, Homo sapien
ctagggtccgctcttcctttgcctg

SEQ ID NO: 1978980 - DNA, 25 bp, Homo sapien
caggtggctgctgcagctgagccca

SEQ ID NO: 1978981 - DNA, 25 bp, Homo sapien
ctgcccgcgccatgtgcaggtggct

SEQ ID NO: 1978982 - DNA, 25 bp, Homo sapien
gtggctgctgcagctgagcccatca

SEQ ID NO: 1978983 - DNA, 25 bp, Homo sapien
tggctgctgcagctgagcccatcac

SEQ ID NO: 1978984 - DNA, 25 bp, Homo sapien
gagtcagttctttcttgccggagcc

SEQ ID NO: 1978985 - DNA, 25 bp, Homo sapien
tggttgaaagagttaccagcccttc

SEQ ID NO: 1978986 - DNA, 25 bp, Homo sapien
tgaaagagttaccagcccttccttg

SEQ ID NO: 1978987 - DNA, 25 bp, Homo sapien
aaagagttaccagcccttccttgat

SEQ ID NO: 1978988 - DNA, 25 bp, Homo sapien
ctgtggttgaaagagttaccagccc

SEQ ID NO: 1978989 - DNA, 25 bp, Homo sapien
tcttggtctagggcctggcaggact

SEQ ID NO: 1978990 - DNA, 25 bp, Homo sapien
tgaagccgggtcctcccatgccttt

SEQ ID NO: 1978991 - DNA, 25 bp, Homo sapien
cgatagcccacaggtcggtgaagcc

SEQ ID NO: 1978992 - DNA, 25 bp, Homo sapien
atgcgatagcccacaggtcggtgaa

SEQ ID NO: 1978993 - DNA, 25 bp, Homo sapien
catagtgaggatcttggaggagggt

SEQ ID NO: 1978994 - DNA, 25 bp, Homo sapien
tccttcggtgacttagtccagggcg

SEQ ID NO: 1978995 - DNA, 25 bp, Homo sapien
ccttcggtgacttagtccagggcgt

SEQ ID NO: 1978996 - DNA, 25 bp, Homo sapien
gtccttcggtgacttagtccagggc

SEQ ID NO: 1978997 - DNA, 25 bp, Homo sapien
ttcggtgacttagtccagggcgtac

SEQ ID NO: 1978998 - DNA, 25 bp, Homo sapien
ggctgggcggagattctctcctgca

SEQ ID NO: 1978999 - DNA, 25 bp, Homo sapien
gattctctcctgcaagagtccgcgg

SEQ ID NO: 1979000 - DNA, 25 bp, Homo sapien
acggctgggcggagattctctcctg

SEQ ID NO: 1979001 - DNA, 25 bp, Homo sapien
gcacggctgggcggagattctctcc

SEQ ID NO: 1979002 - DNA, 25 bp, Homo sapien
cccaaatgcaccagtacttatttca

SEQ ID NO: 1979003 - DNA, 25 bp, Homo sapien
aaatgcaccagtacttatttcagaa

SEQ ID NO: 1979004 - DNA, 25 bp, Homo sapien
caaatgcaccagtacttatttcaga

SEQ ID NO: 1979005 - DNA, 25 bp, Homo sapien
cttcccaaatgcaccagtacttatt

SEQ ID NO: 1979006 - DNA, 25 bp, Homo sapien
ttctcctcaaatggctcacagagcc

SEQ ID NO: 1979007 - DNA, 25 bp, Homo sapien
cattttctcctcaaatggctcacag

SEQ ID NO: 1979008 - DNA, 25 bp, Homo sapien
cctcaaatggctcacagagccactt

SEQ ID NO: 1979009 - DNA, 25 bp, Homo sapien
ccccattttctcctcaaatggctca

SEQ ID NO: 1979010 - DNA, 25 bp, Homo sapien
caggttagtgacagacttggtcccg

SEQ ID NO: 1979011 - DNA, 25 bp, Homo sapien
agtgacagacttggtcccgtgcttg

SEQ ID NO: 1979012 - DNA, 25 bp, Homo sapien
ggtcccgtgcttgtgttttctcatg

SEQ ID NO: 1979013 - DNA, 25 bp, Homo sapien
gacttggtcccgtgcttgtgttttc

SEQ ID NO: 1979014 - DNA, 25 bp, Homo sapien
catcaggccaaagactttcctccaa

SEQ ID NO: 1979015 - DNA, 25 bp, Homo sapien
tcaggccaaagactttcctccaaac

SEQ ID NO: 1979016 - DNA, 25 bp, Homo sapien
ccatcaggccaaagactttcctcca

SEQ ID NO: 1979017 - DNA, 25 bp, Homo sapien
caggccaaagactttcctccaaact

SEQ ID NO: 1979018 - DNA, 25 bp, Homo sapien
tcagccagcttgacgccgttgttcc

SEQ ID NO: 1979019 - DNA, 25 bp, Homo sapien
gtcagccagcttgacgccgttgttc

SEQ ID NO: 1979020 - DNA, 25 bp, Homo sapien
cagccagcttgacgccgttgttcct

SEQ ID NO: 1979021 - DNA, 25 bp, Homo sapien
catggcaacaaacgccagcggtttg

SEQ ID NO: 1979022 - DNA, 25 bp, Homo sapien
caccatggcaacaaacgccagcggt

SEQ ID NO: 1979023 - DNA, 25 bp, Homo sapien
gtcctggccgaaagtggcctcctcg

SEQ ID NO: 1979024 - DNA, 25 bp, Homo sapien
caacaaacgccagcggtttgtgggc

SEQ ID NO: 1979025 - DNA, 25 bp, Homo sapien
cactggggcccaacctctatgggag

SEQ ID NO: 1979026 - DNA, 25 bp, Homo sapien
tgccccaaccggcagcgagtgagtt

SEQ ID NO: 1979027 - DNA, 25 bp, Homo sapien
aagaactgatgtgccccaaccggca

SEQ ID NO: 1979028 - DNA, 25 bp, Homo sapien
ccggcagcgagtgagtttagtgtct

SEQ ID NO: 1979029 - DNA, 25 bp, Homo sapien
atggctgcgtcctgatgactgatgg

SEQ ID NO: 1979030 - DNA, 25 bp, Homo sapien
cacagcctgcatggctgcgtcctga

SEQ ID NO: 1979031 - DNA, 25 bp, Homo sapien
ctgcatggctgcgtcctgatgactg

SEQ ID NO: 1979032 - DNA, 25 bp, Homo sapien
ggttcccacagcctgcatggctgcg

SEQ ID NO: 1979033 - DNA, 25 bp, Homo sapien
gcacaagtctcagtgcaacaactgt

SEQ ID NO: 1979034 - DNA, 25 bp, Homo sapien
cacaagtctcagtgcaacaactgtt

SEQ ID NO: 1979035 - DNA, 25 bp, Homo sapien
gagtgatgttcgtggctggtccacc

SEQ ID NO: 1979036 - DNA, 25 bp, Homo sapien
gcgagtgatgttcgtggctggtcca

SEQ ID NO: 1979037 - DNA, 25 bp, Homo sapien
cgagtgatgttcgtggctggtccac

SEQ ID NO: 1979038 - DNA, 25 bp, Homo sapien
agtgatgttcgtggctggtccacct

SEQ ID NO: 1979039 - DNA, 25 bp, Homo sapien
aggaaaagcagatggcactggggcc

SEQ ID NO: 1979040 - DNA, 25 bp, Homo sapien
aaagcagatggcactggggccctac

SEQ ID NO: 1979041 - DNA, 25 bp, Homo sapien
gaaaagcagatggcactggggccct

SEQ ID NO: 1979042 - DNA, 25 bp, Homo sapien
ctgaggaaaagcagatggcactggg

SEQ ID NO: 1979043 - DNA, 25 bp, Homo sapien
ccctcaacgaagccgggatggccag

SEQ ID NO: 1979044 - DNA, 25 bp, Homo sapien
atctcaccccctcaacgaagccggg

SEQ ID NO: 1979045 - DNA, 25 bp, Homo sapien
agttggaccagccaccaatctcacc

SEQ ID NO: 1979046 - DNA, 25 bp, Homo sapien
ctgcaagggtgtgcctagagcagtt

SEQ ID NO: 1979047 - DNA, 25 bp, Homo sapien
tccgtcgagaagatctggacaagct

SEQ ID NO: 1979048 - DNA, 25 bp, Homo sapien
caagatgggcaagtggtgctgtcac

SEQ ID NO: 1979049 - DNA, 25 bp, Homo sapien
atgggcacttctggagaccacgacg

SEQ ID NO: 1979050 - DNA, 25 bp, Homo sapien
gcgccttcatggagccgaggtacca

SEQ ID NO: 1979051 - DNA, 25 bp, Homo sapien
tgcagcggcggccacccgcaacagc

SEQ ID NO: 1979052 - DNA, 25 bp, Homo sapien
ccaccactagtgtcttgggggcttt

SEQ ID NO: 1979053 - DNA, 25 bp, Homo sapien
ccagccccgattctgtggccccgag

SEQ ID NO: 1979054 - DNA, 25 bp, Homo sapien
tagcagcccagccccgattctgtgg

SEQ ID NO: 1979055 - DNA, 25 bp, Homo sapien
cagtaagtccaagtaacatgaattc

SEQ ID NO: 1979056 - DNA, 25 bp, Homo sapien
gaggacaggcacatgtcaatgagac

SEQ ID NO: 1979057 - DNA, 25 bp, Homo sapien
acaggcacatgtcaatgagacaggt

SEQ ID NO: 1979058 - DNA, 25 bp, Homo sapien
ggacaggcacatgtcaatgagacag

SEQ ID NO: 1979059 - DNA, 25 bp, Homo sapien
caaaggaggacaggcacatgtcaat

SEQ ID NO: 1979060 - DNA, 25 bp, Homo sapien
aaaagagatggtcttacgcagagca

SEQ ID NO: 1979061 - DNA, 25 bp, Homo sapien
ggtcttacgcagagcaaaaaagtcc

SEQ ID NO: 1979062 - DNA, 25 bp, Homo sapien
tcttacgcagagcaaaaaagtccat

SEQ ID NO: 1979063 - DNA, 25 bp, Homo sapien
atggtcttacgcagagcaaaaaagt

SEQ ID NO: 1979064 - DNA, 25 bp, Homo sapien
agtggagaggtttacatatggcaat

SEQ ID NO: 1979065 - DNA, 25 bp, Homo sapien
taattgttgaatagtggagaggttt

SEQ ID NO: 1979066 - DNA, 25 bp, Homo sapien
tctttggctcataattgttgaatag

SEQ ID NO: 1979067 - DNA, 25 bp, Homo sapien
gtggagaggtttacatatggcaata

SEQ ID NO: 1979068 - DNA, 25 bp, Homo sapien
agaaactgccacaagctcaacacac

SEQ ID NO: 1979069 - DNA, 25 bp, Homo sapien
ctgtccaacaagaaactgccacaag

SEQ ID NO: 1979070 - DNA, 25 bp, Homo sapien
gtccaacaagaaactgccacaagct

SEQ ID NO: 1979071 - DNA, 25 bp, Homo sapien
aaactgccacaagctcaacacacac

SEQ ID NO: 1979072 - DNA, 25 bp, Homo sapien
ctacaacattgggaacacagaaggg

SEQ ID NO: 1979073 - DNA, 25 bp, Homo sapien
aactaattggctcattgtatgtaga

SEQ ID NO: 1979074 - DNA, 25 bp, Homo sapien
tggctcattgtatgtagaaagccca

SEQ ID NO: 1979075 - DNA, 25 bp, Homo sapien
atagagggaaaaactaattggctca

SEQ ID NO: 1979076 - DNA, 25 bp, Homo sapien
aattttgtctaccaggaagtttgtg

SEQ ID NO: 1979077 - DNA, 25 bp, Homo sapien
tggatgaccaaaggaagatcacaga

SEQ ID NO: 1979078 - DNA, 25 bp, Homo sapien
tagaaagagccttggaggatcctgt

SEQ ID NO: 1979079 - DNA, 25 bp, Homo sapien
gatcctgtggaggagtagtccctga

SEQ ID NO: 1979080 - DNA, 25 bp, Homo sapien
gttttcccaagactgaaatactgaa

SEQ ID NO: 1979081 - DNA, 25 bp, Homo sapien
aaatactgaatattcagtttcttct

SEQ ID NO: 1979082 - DNA, 25 bp, Homo sapien
agcagttttcccaagactgaaatac

SEQ ID NO: 1979083 - DNA, 25 bp, Homo sapien
cacggagcagttttcccaagactga

SEQ ID NO: 1979084 - DNA, 25 bp, Homo sapien
ggtaaattgatacatcctattacag

SEQ ID NO: 1979085 - DNA, 25 bp, Homo sapien
gcaaaggccaacacatacaaaagac

SEQ ID NO: 1979086 - DNA, 25 bp, Homo sapien
caatgctagctacagaaatgcatca

SEQ ID NO: 1979087 - DNA, 25 bp, Homo sapien
gacattgacctattgaacatagtgt

SEQ ID NO: 1979088 - DNA, 25 bp, Homo sapien
ctccaatttcttctctttgtacctc

SEQ ID NO: 1979089 - DNA, 25 bp, Homo sapien
tcttctctttgtacctctgattcat

SEQ ID NO: 1979090 - DNA, 25 bp, Homo sapien
ccaatttcttctctttgtacctctg

SEQ ID NO: 1979091 - DNA, 25 bp, Homo sapien
tttcttctctttgtacctctgattc

SEQ ID NO: 1979092 - DNA, 25 bp, Homo sapien
tggagctcccttgaactagacagtc

SEQ ID NO: 1979093 - DNA, 25 bp, Homo sapien
aacaagaaaggttggagctcccttg

SEQ ID NO: 1979094 - DNA, 25 bp, Homo sapien
gctcccttgaactagacagtcccag

SEQ ID NO: 1979095 - DNA, 25 bp, Homo sapien
gaaaggttggagctcccttgaacta

SEQ ID NO: 1979096 - DNA, 25 bp, Homo sapien
aacacatacgtctataaatgacagg

SEQ ID NO: 1979097 - DNA, 25 bp, Homo sapien
gaggcaacacatacgtctataaatg

SEQ ID NO: 1979098 - DNA, 25 bp, Homo sapien
ggcaacacatacgtctataaatgac

SEQ ID NO: 1979099 - DNA, 25 bp, Homo sapien
aagaggcaacacatacgtctataaa

SEQ ID NO: 1979100 - DNA, 25 bp, Homo sapien
aggagcaccatttcactgccagtga

SEQ ID NO: 1979101 - DNA, 25 bp, Homo sapien
cgtgaatgccaactggctggtggta

SEQ ID NO: 1979102 - DNA, 25 bp, Homo sapien
caaaatggcagattaacgtgaatgc

SEQ ID NO: 1979103 - DNA, 25 bp, Homo sapien
ggaaatgaggacgagcacaacacat

SEQ ID NO: 1979104 - DNA, 25 bp, Homo sapien
gatgaagcccacaaaccaggaaatg

SEQ ID NO: 1979105 - DNA, 25 bp, Homo sapien
ttcgtcgctagaggaaggtcacaga

SEQ ID NO: 1979106 - DNA, 25 bp, Homo sapien
tcgtcgctagaggaaggtcacagaa

SEQ ID NO: 1979107 - DNA, 25 bp, Homo sapien
cgtcgctagaggaaggtcacagaaa

SEQ ID NO: 1979108 - DNA, 25 bp, Homo sapien
cttcgtcgctagaggaaggtcacag

SEQ ID NO: 1979109 - DNA, 25 bp, Homo sapien
ctgacaacataagtgtctatgcagg

SEQ ID NO: 1979110 - DNA, 25 bp, Homo sapien
gacaacataagtgtctatgcaggct

SEQ ID NO: 1979111 - DNA, 25 bp, Homo sapien
tgacaacataagtgtctatgcaggc

SEQ ID NO: 1979112 - DNA, 25 bp, Homo sapien
caacataagtgtctatgcaggctaa

SEQ ID NO: 1979113 - DNA, 25 bp, Homo sapien
gtattacagtgtaggagacaaccaa

SEQ ID NO: 1979114 - DNA, 25 bp, Homo sapien
agtattacagtgtaggagacaacca

SEQ ID NO: 1979115 - DNA, 25 bp, Homo sapien
cctaactgtaacaagtattacagtg

SEQ ID NO: 1979116 - DNA, 25 bp, Homo sapien
attcctaactgtaacaagtattaca

SEQ ID NO: 1979117 - DNA, 25 bp, Homo sapien
gataccgactcttcagttttgacat

SEQ ID NO: 1979118 - DNA, 25 bp, Homo sapien
gtagaatacagcaaggactttgtca

SEQ ID NO: 1979119 - DNA, 25 bp, Homo sapien
ataccgactcttcagttttgacata

SEQ ID NO: 1979120 - DNA, 25 bp, Homo sapien
aaggactttgtcaactgagtaactg

SEQ ID NO: 1979121 - DNA, 25 bp, Homo sapien
tttcttatgactacagaaacctgac

SEQ ID NO: 1979122 - DNA, 25 bp, Homo sapien
tctaggaaaagaacgtttcttatga

SEQ ID NO: 1979123 - DNA, 25 bp, Homo sapien
cgtttcttatgactacagaaacctg

SEQ ID NO: 1979124 - DNA, 25 bp, Homo sapien
aaaagaacgtttcttatgactacag

SEQ ID NO: 1979125 - DNA, 25 bp, Homo sapien
tgcagtcatccggttgcctgatgtc

SEQ ID NO: 1979126 - DNA, 25 bp, Homo sapien
ttcacaatacagataattaaattca

SEQ ID NO: 1979127 - DNA, 25 bp, Homo sapien
agtcatccggttgcctgatgtcttc

SEQ ID NO: 1979128 - DNA, 25 bp, Homo sapien
ctaaagtgcagtcatccggttgcct

SEQ ID NO: 1979129 - DNA, 25 bp, Homo sapien
ccacctcggcccgtggtacagcacc

SEQ ID NO: 1979130 - DNA, 25 bp, Homo sapien
cactcccacttctcggatcccagac

SEQ ID NO: 1979131 - DNA, 25 bp, Homo sapien
actgctgccacctcggcccgtggta

SEQ ID NO: 1979132 - DNA, 25 bp, Homo sapien
cacttctcggatcccagacttgctg

SEQ ID NO: 1979133 - DNA, 25 bp, Homo sapien
ttctgagcctactgaagcaggagct

SEQ ID NO: 1979134 - DNA, 25 bp, Homo sapien
gagtccggataacactgtctgaaca

SEQ ID NO: 1979135 - DNA, 25 bp, Homo sapien
ctgatgttgaggcagaactgaaaga

SEQ ID NO: 1979136 - DNA, 25 bp, Homo sapien
aactgaaagatgcagaggcagagtc

SEQ ID NO: 1979137 - DNA, 25 bp, Homo sapien
ccttctgctggtacttcaatttctg

SEQ ID NO: 1979138 - DNA, 25 bp, Homo sapien
tctgctggtactgttccatcattgc

SEQ ID NO: 1979139 - DNA, 25 bp, Homo sapien
atttctgctggtactgttccatcat

SEQ ID NO: 1979140 - DNA, 25 bp, Homo sapien
tcaatttctgctggtactgttccat

SEQ ID NO: 1979141 - DNA, 25 bp, Homo sapien
tggacagggtagacactaaaacttg

SEQ ID NO: 1979142 - DNA, 25 bp, Homo sapien
tgaatgttagaacggaaggcctcac

SEQ ID NO: 1979143 - DNA, 25 bp, Homo sapien
tactgaactactgaatgttagaacg

SEQ ID NO: 1979144 - DNA, 25 bp, Homo sapien
tatctacaaccaagtcctactgaac

SEQ ID NO: 1979145 - DNA, 25 bp, Homo sapien
tcaaccgtatctacaaccaagtcct

SEQ ID NO: 1979146 - DNA, 25 bp, Homo sapien
gacctcatcagctgtaattcggcct

SEQ ID NO: 1979147 - DNA, 25 bp, Homo sapien
catcagctgtaattcggccttcatt

SEQ ID NO: 1979148 - DNA, 25 bp, Homo sapien
tcatcagctgtaattcggccttcat

SEQ ID NO: 1979149 - DNA, 25 bp, Homo sapien
cctcatcagctgtaattcggccttc

SEQ ID NO: 1979150 - DNA, 25 bp, Homo sapien
tccttcaggatcagaaatcgaagcc

SEQ ID NO: 1979151 - DNA, 25 bp, Homo sapien
tcaggatcagaaatcgaagccccat

SEQ ID NO: 1979152 - DNA, 25 bp, Homo sapien
catcttcatattccttcaggatcag

SEQ ID NO: 1979153 - DNA, 25 bp, Homo sapien
tcatattccttcaggatcagaaatc

SEQ ID NO: 1979154 - DNA, 25 bp, Homo sapien
ctcatcttcaacggccagggtggac

SEQ ID NO: 1979155 - DNA, 25 bp, Homo sapien
cttcaacggccagggtggacactgt

SEQ ID NO: 1979156 - DNA, 25 bp, Homo sapien
ccagggtggacactgttacttgggc

SEQ ID NO: 1979157 - DNA, 25 bp, Homo sapien
aacggccagggtggacactgttact

SEQ ID NO: 1979158 - DNA, 25 bp, Homo sapien
catggactcaagagctgacatgagg

SEQ ID NO: 1979159 - DNA, 25 bp, Homo sapien
gagctgacatgaggaatgtcactac

SEQ ID NO: 1979160 - DNA, 25 bp, Homo sapien
ctcaagagctgacatgaggaatgtc

SEQ ID NO: 1979161 - DNA, 25 bp, Homo sapien
caagagctgacatgaggaatgtcac

SEQ ID NO: 1979162 - DNA, 25 bp, Homo sapien
ttctggaagcccctgtactatcaaa

SEQ ID NO: 1979163 - DNA, 25 bp, Homo sapien
ctggaagcccctgtactatcaaagc

SEQ ID NO: 1979164 - DNA, 25 bp, Homo sapien
gcatcttctcatatggtacaggtac

SEQ ID NO: 1979165 - DNA, 25 bp, Homo sapien
aaagctgactggtcttgtagcatct

SEQ ID NO: 1979166 - DNA, 25 bp, Homo sapien
aatcccagctgtgtactccaaaatc

SEQ ID NO: 1979167 - DNA, 25 bp, Homo sapien
ttccagggttgcaagatcataattc

SEQ ID NO: 1979168 - DNA, 25 bp, Homo sapien
cccagctgtgtactccaaaatccat

SEQ ID NO: 1979169 - DNA, 25 bp, Homo sapien
gaaatcccagctgtgtactccaaaa

SEQ ID NO: 1979170 - DNA, 25 bp, Homo sapien
ttcactatgccccaaagccgccagt

SEQ ID NO: 1979171 - DNA, 25 bp, Homo sapien
gtgtctggttgacaatgtctctgac

SEQ ID NO: 1979172 - DNA, 25 bp, Homo sapien
gacactaccgacagcttcactatgc

SEQ ID NO: 1979173 - DNA, 25 bp, Homo sapien
tgacaatgtctctgacactaccgac

SEQ ID NO: 1979174 - DNA, 25 bp, Homo sapien
acagctgccacttccagggaaatga

SEQ ID NO: 1979175 - DNA, 25 bp, Homo sapien
tgatataatcataatcaggatcttc

SEQ ID NO: 1979176 - DNA, 25 bp, Homo sapien
tcctttactgtcacagctgccactt

SEQ ID NO: 1979177 - DNA, 25 bp, Homo sapien
cttgaatgtgatataatcataatca

SEQ ID NO: 1979178 - DNA, 25 bp, Homo sapien
caccagggaatctttactatggaac

SEQ ID NO: 1979179 - DNA, 25 bp, Homo sapien
aaatatttgccggactcaacaggga

SEQ ID NO: 1979180 - DNA, 25 bp, Homo sapien
ggaacactctcctacctatgaagaa

SEQ ID NO: 1979181 - DNA, 25 bp, Homo sapien
aagccatgcagggtagtgtgcgcct

SEQ ID NO: 1979182 - DNA, 25 bp, Homo sapien
tttctgtgctgcttgagaggcctgg

SEQ ID NO: 1979183 - DNA, 25 bp, Homo sapien
ctgtgctgcttgagaggcctggaca

SEQ ID NO: 1979184 - DNA, 25 bp, Homo sapien
ggacagcccaataaccagctcattc

SEQ ID NO: 1979185 - DNA, 25 bp, Homo sapien
ctggacagcccaataaccagctcat

SEQ ID NO: 1979186 - DNA, 25 bp, Homo sapien
gctgtgcgggccttttcaactctct

SEQ ID NO: 1979187 - DNA, 25 bp, Homo sapien
catcctagatgatgaaacacaattc

SEQ ID NO: 1979188 - DNA, 25 bp, Homo sapien
agctgtgcgggccttttcaactctc

SEQ ID NO: 1979189 - DNA, 25 bp, Homo sapien
tatctgctgcatcctagatgatgaa

SEQ ID NO: 1979190 - DNA, 25 bp, Homo sapien
attttccattgcttgcaagaatctg

SEQ ID NO: 1979191 - DNA, 25 bp, Homo sapien
tttccattgcttgcaagaatctgac

SEQ ID NO: 1979192 - DNA, 25 bp, Homo sapien
taattttccattgcttgcaagaatc

SEQ ID NO: 1979193 - DNA, 25 bp, Homo sapien
ctaattttccattgcttgcaagaat

SEQ ID NO: 1979194 - DNA, 25 bp, Homo sapien
tcttcatgctcggtcataggctcaa

SEQ ID NO: 1979195 - DNA, 25 bp, Homo sapien
aaatcatattgtgtacttgagcgat

SEQ ID NO: 1979196 - DNA, 25 bp, Homo sapien
gagcgatgtcctttatagagtcttc

SEQ ID NO: 1979197 - DNA, 25 bp, Homo sapien
tcggtcataggctcaattgcatgtg

SEQ ID NO: 1979198 - DNA, 25 bp, Homo sapien
gctcgcgacctctgggccatgtata

SEQ ID NO: 1979199 - DNA, 25 bp, Homo sapien
gctgaggtcccaccgcctgatttag

SEQ ID NO: 1979200 - DNA, 25 bp, Homo sapien
aagtatccgccctgctgctggcacg

SEQ ID NO: 1979201 - DNA, 25 bp, Homo sapien
ccatgtatagttgccaggatgaggc

SEQ ID NO: 1979202 - DNA, 25 bp, Homo sapien
ggccgcgctccaccgggcaccgcgt

SEQ ID NO: 1979203 - DNA, 25 bp, Homo sapien
tcgacccgcgatccaggagctggac

SEQ ID NO: 1979204 - DNA, 25 bp, Homo sapien
agggccgcgctgagcgtcgattccc

SEQ ID NO: 1979205 - DNA, 25 bp, Homo sapien
aggctgaggagacacgcgccctggc

SEQ ID NO: 1979206 - DNA, 25 bp, Homo sapien
ccggctcgcactcgcccgtcttcag

SEQ ID NO: 1979207 - DNA, 25 bp, Homo sapien
ttcagttcccgcacccgccccaaca

SEQ ID NO: 1979208 - DNA, 25 bp, Homo sapien
aacaccagcagaaatttctgtatcg

SEQ ID NO: 1979209 - DNA, 25 bp, Homo sapien
ctcgccctcgcttcccgcttaccct

SEQ ID NO: 1979210 - DNA, 25 bp, Homo sapien
cagtgtagacccgttcgctgaaggg

SEQ ID NO: 1979211 - DNA, 25 bp, Homo sapien
tgccagcggcagctaagagcctctt

SEQ ID NO: 1979212 - DNA, 25 bp, Homo sapien
tgttcaggttgacgggcttcttccc

SEQ ID NO: 1979213 - DNA, 25 bp, Homo sapien
gatccccgaagtagatggtcccgta

SEQ ID NO: 1979214 - DNA, 25 bp, Homo sapien
caccactctgaaggggcgatcctcc

SEQ ID NO: 1979215 - DNA, 25 bp, Homo sapien
agaaggccaagacctcggggcccag

SEQ ID NO: 1979216 - DNA, 25 bp, Homo sapien
gggcccaggacggccgccccatcgc

SEQ ID NO: 1979217 - DNA, 25 bp, Homo sapien
cacctgctcccctcgtccccaggac

SEQ ID NO: 1979218 - DNA, 25 bp, Homo sapien
aaggagaaagcagctaaagcttggg

SEQ ID NO: 1979219 - DNA, 25 bp, Homo sapien
gagaaagcagctaaagcttggggtt

SEQ ID NO: 1979220 - DNA, 25 bp, Homo sapien
tttgtgaggggaagtgggagtgaag

SEQ ID NO: 1979221 - DNA, 25 bp, Homo sapien
gggttgattttaaggtggcctgtgc

SEQ ID NO: 1979222 - DNA, 25 bp, Homo sapien
ccttcgccatcaaggacattaagct

SEQ ID NO: 1979223 - DNA, 25 bp, Homo sapien
gtgtcctcccttcgccatcaaggac

SEQ ID NO: 1979224 - DNA, 25 bp, Homo sapien
cttcgccatcaaggacattaagctg

SEQ ID NO: 1979225 - DNA, 25 bp, Homo sapien
tcccttcgccatcaaggacattaag

SEQ ID NO: 1979226 - DNA, 25 bp, Homo sapien
tacataatttagatcagcaccagca

SEQ ID NO: 1979227 - DNA, 25 bp, Homo sapien
cataatttagatcagcaccagcatc

SEQ ID NO: 1979228 - DNA, 25 bp, Homo sapien
ctacataatttagatcagcaccagc

SEQ ID NO: 1979229 - DNA, 25 bp, Homo sapien
aatttagatcagcaccagcatctat

SEQ ID NO: 1979230 - DNA, 25 bp, Homo sapien
attttgaaaataacattggttaatg

SEQ ID NO: 1979231 - DNA, 25 bp, Homo sapien
gaaaataacattggttaatgtctac

SEQ ID NO: 1979232 - DNA, 25 bp, Homo sapien
tttgaaaataacattggttaatgtc

SEQ ID NO: 1979233 - DNA, 25 bp, Homo sapien
caaatattttgaaaataacattggt

SEQ ID NO: 1979234 - DNA, 25 bp, Homo sapien
catttagactcattaaatgcgtttg

SEQ ID NO: 1979235 - DNA, 25 bp, Homo sapien
gactcattaaatgcgtttgcatttg

SEQ ID NO: 1979236 - DNA, 25 bp, Homo sapien
cattaaatgcgtttgcatttgcatt

SEQ ID NO: 1979237 - DNA, 25 bp, Homo sapien
tcttttctgtatggccagtaaaagg

SEQ ID NO: 1979238 - DNA, 25 bp, Homo sapien
agttattccatgtatgtcttcagca

SEQ ID NO: 1979239 - DNA, 25 bp, Homo sapien
ctgatgagccttcacatatggcaag

SEQ ID NO: 1979240 - DNA, 25 bp, Homo sapien
ctctgatgagccttcacatatggca

SEQ ID NO: 1979241 - DNA, 25 bp, Homo sapien
aacgttctgcagttattccatgtat

SEQ ID NO: 1979242 - DNA, 25 bp, Homo sapien
tatatgtacccctgacaccagcaca

SEQ ID NO: 1979243 - DNA, 25 bp, Homo sapien
agggaccttgctaaccttcttgaca

SEQ ID NO: 1979244 - DNA, 25 bp, Homo sapien
taggtaattttcgtatatgttccaa

SEQ ID NO: 1979245 - DNA, 25 bp, Homo sapien
ttaggtaattttcgtatatgttcca

SEQ ID NO: 1979246 - DNA, 25 bp, Homo sapien
tatatgttccaaaagttgttgatga

SEQ ID NO: 1979247 - DNA, 25 bp, Homo sapien
atgttccaaaagttgttgatgaatg

SEQ ID NO: 1979248 - DNA, 25 bp, Homo sapien
caaactttccagatgttgctttccc

SEQ ID NO: 1979249 - DNA, 25 bp, Homo sapien
tcaaactttccagatgttgctttcc

SEQ ID NO: 1979250 - DNA, 25 bp, Homo sapien
tgaatataggctctacagaactcac

SEQ ID NO: 1979251 - DNA, 25 bp, Homo sapien
ctgaatataggctctacagaactca

SEQ ID NO: 1979252 - DNA, 25 bp, Homo sapien
aatataggctctacagaactcacat

SEQ ID NO: 1979253 - DNA, 25 bp, Homo sapien
ataggctctacagaactcacatcca

SEQ ID NO: 1979254 - DNA, 25 bp, Homo sapien
actgtgaattttcaatagtccgtgt

SEQ ID NO: 1979255 - DNA, 25 bp, Homo sapien
gaacttgagttttggatgggcgcgg

SEQ ID NO: 1979256 - DNA, 25 bp, Homo sapien
ccttgacaagatatgtttaatagaa

SEQ ID NO: 1979257 - DNA, 25 bp, Homo sapien
aatgtattccttgacaagatatgtt

SEQ ID NO: 1979258 - DNA, 25 bp, Homo sapien
aacttgagttttggatgggcgcggg

SEQ ID NO: 1979259 - DNA, 25 bp, Homo sapien
ttctattctgaacggcaaaaagcta

SEQ ID NO: 1979260 - DNA, 25 bp, Homo sapien
catacatagccactaaatagaaacc

SEQ ID NO: 1979261 - DNA, 25 bp, Homo sapien
ccttatttaactgggtttgcattga

SEQ ID NO: 1979262 - DNA, 25 bp, Homo sapien
tgtattaattacctcttgtgtggaa

SEQ ID NO: 1979263 - DNA, 25 bp, Homo sapien
agcatcaggtaaacacgtataattc

SEQ ID NO: 1979264 - DNA, 25 bp, Homo sapien
gatatgtagcatcaggtaaacacgt

SEQ ID NO: 1979265 - DNA, 25 bp, Homo sapien
aggtaaacacgtataattctgtgca

SEQ ID NO: 1979266 - DNA, 25 bp, Homo sapien
tatgtagcatcaggtaaacacgtat

SEQ ID NO: 1979267 - DNA, 25 bp, Homo sapien
ttggattctgatgggaacatctgat

SEQ ID NO: 1979268 - DNA, 25 bp, Homo sapien
cccagaatcccaagaatattcttca

SEQ ID NO: 1979269 - DNA, 25 bp, Homo sapien
tcatcttcctctcgtttggattctg

SEQ ID NO: 1979270 - DNA, 25 bp, Homo sapien
tcttcatcttcctctcgtttggatt

SEQ ID NO: 1979271 - DNA, 25 bp, Homo sapien
tcgaaggccgagaagtttgcataac

SEQ ID NO: 1979272 - DNA, 25 bp, Homo sapien
tgtcaattaacctctaatggtgttg

SEQ ID NO: 1979273 - DNA, 25 bp, Homo sapien
tggttgaaggcaacctgatctttac

SEQ ID NO: 1979274 - DNA, 25 bp, Homo sapien
aagactaacctttgatgtaccacag

SEQ ID NO: 1979275 - DNA, 25 bp, Homo sapien
tctttgcagaactctcaaagagact

SEQ ID NO: 1979276 - DNA, 25 bp, Homo sapien
aaggcagatggcttctcaggaagct

SEQ ID NO: 1979277 - DNA, 25 bp, Homo sapien
gaaggcagatggcttctcaggaagc

SEQ ID NO: 1979278 - DNA, 25 bp, Homo sapien
ttgaaggcagatggcttctcaggaa

SEQ ID NO: 1979279 - DNA, 25 bp, Homo sapien
cttgaaggcagatggcttctcagga

SEQ ID NO: 1979280 - DNA, 25 bp, Homo sapien
cattcttcaattcaaaggctttatt

SEQ ID NO: 1979281 - DNA, 25 bp, Homo sapien
gctttatttggaacagtcttttgca

SEQ ID NO: 1979282 - DNA, 25 bp, Homo sapien
tgctctcaatgtttgttcattcttc

SEQ ID NO: 1979283 - DNA, 25 bp, Homo sapien
aggctttatttggaacagtcttttg

SEQ ID NO: 1979284 - DNA, 25 bp, Homo sapien
ctccatcagaattgaaacctaaaaa

SEQ ID NO: 1979285 - DNA, 25 bp, Homo sapien
actccatcagaattgaaacctaaaa

SEQ ID NO: 1979286 - DNA, 25 bp, Homo sapien
ttcttcatcgtccttttgtttggat

SEQ ID NO: 1979287 - DNA, 25 bp, Homo sapien
cccaagaattttcttcatcgtcctt

SEQ ID NO: 1979288 - DNA, 25 bp, Homo sapien
ccttttgtttggattctgatgggaa

SEQ ID NO: 1979289 - DNA, 25 bp, Homo sapien
catcgtccttttgtttggattctga

SEQ ID NO: 1979290 - DNA, 25 bp, Homo sapien
aatacacatccttctgtgaaaccgt

SEQ ID NO: 1979291 - DNA, 25 bp, Homo sapien
cacttaaggtatcgaattctttttg

SEQ ID NO: 1979292 - DNA, 25 bp, Homo sapien
agctttgggtaaatacacatccttc

SEQ ID NO: 1979293 - DNA, 25 bp, Homo sapien
tctgtgaaaccgtctcacagggact

SEQ ID NO: 1979294 - DNA, 25 bp, Homo sapien
cgtacaatgtgaatatgaagatgaa

SEQ ID NO: 1979295 - DNA, 25 bp, Homo sapien
cttcagaagaccatctttaacagga

SEQ ID NO: 1979296 - DNA, 25 bp, Homo sapien
agaagaccatctttaacaggagact

SEQ ID NO: 1979297 - DNA, 25 bp, Homo sapien
cagaagaccatctttaacaggagac

SEQ ID NO: 1979298 - DNA, 25 bp, Homo sapien
tcagaagaccatctttaacaggaga

SEQ ID NO: 1979299 - DNA, 25 bp, Homo sapien
gctttgaatgtttctctgtccttta

SEQ ID NO: 1979300 - DNA, 25 bp, Homo sapien
tctaaggctttatttggaagagaaa

SEQ ID NO: 1979301 - DNA, 25 bp, Homo sapien
tctctgtcctttaattctaaggctt

SEQ ID NO: 1979302 - DNA, 25 bp, Homo sapien
agagaaactttccttccacaggtag

SEQ ID NO: 1979303 - DNA, 25 bp, Homo sapien
tttctctgtcctttaattctaaggc

SEQ ID NO: 1979304 - DNA, 25 bp, Homo sapien
tctaaggctttatttggaagagaaa

SEQ ID NO: 1979305 - DNA, 25 bp, Homo sapien
agagaaactttccttccacaggtag

SEQ ID NO: 1979306 - DNA, 25 bp, Homo sapien
tggaagagaaactttccttccacag

SEQ ID NO: 1979307 - DNA, 25 bp, Homo sapien
agaagaccatcattatcaggagact

SEQ ID NO: 1979308 - DNA, 25 bp, Homo sapien
cagaagaccatcattatcaggagac

SEQ ID NO: 1979309 - DNA, 25 bp, Homo sapien
cttcagaagaccatcattatcagga

SEQ ID NO: 1979310 - DNA, 25 bp, Homo sapien
tcagaagaccatcattatcaggaga

SEQ ID NO: 1979311 - DNA, 25 bp, Homo sapien
tctaaagctttatttggaagagaaa

SEQ ID NO: 1979312 - DNA, 25 bp, Homo sapien
gctttgaatgtttctctgtccttca

SEQ ID NO: 1979313 - DNA, 25 bp, Homo sapien
agagaaactttccttccacaggtag

SEQ ID NO: 1979314 - DNA, 25 bp, Homo sapien
tctgtccttcaattctaaagcttta

SEQ ID NO: 1979315 - DNA, 25 bp, Homo sapien
ttttctaaatccctatttcttatgc

SEQ ID NO: 1979316 - DNA, 25 bp, Homo sapien
tttctaaatccctatttcttatgct

SEQ ID NO: 1979317 - DNA, 25 bp, Homo sapien
tctaaatccctatttcttatgcttg

SEQ ID NO: 1979318 - DNA, 25 bp, Homo sapien
ttctaaatccctatttcttatgctt

SEQ ID NO: 1979319 - DNA, 25 bp, Homo sapien
catcattctgtaagagagtctcaag

SEQ ID NO: 1979320 - DNA, 25 bp, Homo sapien
atcattctgtaagagagtctcaagg

SEQ ID NO: 1979321 - DNA, 25 bp, Homo sapien
gcttcccaccagtgagaaagacagg

SEQ ID NO: 1979322 - DNA, 25 bp, Homo sapien
tctctggtatgttttggcactggaa

SEQ ID NO: 1979323 - DNA, 25 bp, Homo sapien
ccaaatttctaaccatacccgatct

SEQ ID NO: 1979324 - DNA, 25 bp, Homo sapien
aaatagaacacagctctccatggtc

SEQ ID NO: 1979325 - DNA, 25 bp, Homo sapien
tacaatgtgaatatgaagatgagtc

SEQ ID NO: 1979326 - DNA, 25 bp, Homo sapien
atgtgaatatgaagatgagtcctca

SEQ ID NO: 1979327 - DNA, 25 bp, Homo sapien
cgtacaatgtgaatatgaagatgag

SEQ ID NO: 1979328 - DNA, 25 bp, Homo sapien
caatgtgaatatgaagatgagtcct

SEQ ID NO: 1979329 - DNA, 25 bp, Homo sapien
tctaaggctttatttggaagagaaa

SEQ ID NO: 1979330 - DNA, 25 bp, Homo sapien
tttctctgtcctttaattctaaggc

SEQ ID NO: 1979331 - DNA, 25 bp, Homo sapien
agagaaactttccttccacaggtag

SEQ ID NO: 1979332 - DNA, 25 bp, Homo sapien
tggaagagaaactttccttccacag

SEQ ID NO: 1979333 - DNA, 25 bp, Homo sapien
tctctgtcctttaattctaaggctt

SEQ ID NO: 1979334 - DNA, 25 bp, Homo sapien
tctaaggctttatttggaagagaaa

SEQ ID NO: 1979335 - DNA, 25 bp, Homo sapien
agagaaactttccttacacaggtag

SEQ ID NO: 1979336 - DNA, 25 bp, Homo sapien
taatgtttctctgtcctttaattct

SEQ ID NO: 1979337 - DNA, 25 bp, Homo sapien
ttctatagtcaatccgttagaaatg

SEQ ID NO: 1979338 - DNA, 25 bp, Homo sapien
acttctatagtcaatccgttagaaa

SEQ ID NO: 1979339 - DNA, 25 bp, Homo sapien
tatagtcaatccgttagaaatgaaa

SEQ ID NO: 1979340 - DNA, 25 bp, Homo sapien
tctatagtcaatccgttagaaatga

SEQ ID NO: 1979341 - DNA, 25 bp, Homo sapien
catccttttgtttggattctgatgg

SEQ ID NO: 1979342 - DNA, 25 bp, Homo sapien
tcatcatccttttgtttggattctg

SEQ ID NO: 1979343 - DNA, 25 bp, Homo sapien
ttggattctgatgggaacatctgag

SEQ ID NO: 1979344 - DNA, 25 bp, Homo sapien
cttttgtttggattctgatgggaac

SEQ ID NO: 1979345 - DNA, 25 bp, Homo sapien
ttctttttgatgtgtagccttgggt

SEQ ID NO: 1979346 - DNA, 25 bp, Homo sapien
aaatagaacacagctctccatggtc

SEQ ID NO: 1979347 - DNA, 25 bp, Homo sapien
ccaaatttctaaccatacccgatct

SEQ ID NO: 1979348 - DNA, 25 bp, Homo sapien
gcttcccaccagtgagaaagacagg

SEQ ID NO: 1979349 - DNA, 25 bp, Homo sapien
tctctggtatgttttggcactggaa

SEQ ID NO: 1979350 - DNA, 25 bp, Homo sapien
ctcatgggttctcacattctcctgc

SEQ ID NO: 1979351 - DNA, 25 bp, Homo sapien
tgctttgaatgtttctctgtccttc

SEQ ID NO: 1979352 - DNA, 25 bp, Homo sapien
gagaaattttcattccacaggtagg

SEQ ID NO: 1979353 - DNA, 25 bp, Homo sapien
ctaaggctttatttggaagagaaat

SEQ ID NO: 1979354 - DNA, 25 bp, Homo sapien
tctgtccttcaattctaaggcttta

SEQ ID NO: 1979355 - DNA, 25 bp, Homo sapien
tgaatgtggactctacagaactcac

SEQ ID NO: 1979356 - DNA, 25 bp, Homo sapien
aatgtggactctacagaactcacat

SEQ ID NO: 1979357 - DNA, 25 bp, Homo sapien
ctgaatgtggactctacagaactca

SEQ ID NO: 1979358 - DNA, 25 bp, Homo sapien
gtggactctacagaactcacatcct

SEQ ID NO: 1979359 - DNA, 25 bp, Homo sapien
aatagtgaccgccaatataattggc

SEQ ID NO: 1979360 - DNA, 25 bp, Homo sapien
tacttaatggctgacataacttttg

SEQ ID NO: 1979361 - DNA, 25 bp, Homo sapien
tcttagttccataaaaaatagtgac

SEQ ID NO: 1979362 - DNA, 25 bp, Homo sapien
catccaatgaacactcactcttagt

SEQ ID NO: 1979363 - DNA, 25 bp, Homo sapien
gtagactgtgaattttcagtagtcg

SEQ ID NO: 1979364 - DNA, 25 bp, Homo sapien
gactgtgaattttcagtagtcggtt

SEQ ID NO: 1979365 - DNA, 25 bp, Homo sapien
ttcagtagtcggtttgccaaaaaga

SEQ ID NO: 1979366 - DNA, 25 bp, Homo sapien
tgaattttcagtagtcggtttgcca

SEQ ID NO: 1979367 - DNA, 25 bp, Homo sapien
acttggggtgaaacctgcattcttc

SEQ ID NO: 1979368 - DNA, 25 bp, Homo sapien
tattaagagtctctgcttccagaac

SEQ ID NO: 1979369 - DNA, 25 bp, Homo sapien
tatgcttattaagagtctctgcttc

SEQ ID NO: 1979370 - DNA, 25 bp, Homo sapien
tttacttggggtgaaacctgcattc

SEQ ID NO: 1979371 - DNA, 25 bp, Homo sapien
ggagctcgttcaataatgccaatat

SEQ ID NO: 1979372 - DNA, 25 bp, Homo sapien
gctcgttcaataatgccaatatcac

SEQ ID NO: 1979373 - DNA, 25 bp, Homo sapien
gttcaataatgccaatatcacgttc

SEQ ID NO: 1979374 - DNA, 25 bp, Homo sapien
ttgtggagctcgttcaataatgcca

SEQ ID NO: 1979375 - DNA, 25 bp, Homo sapien
ctcagaatctgaagttgattttgta

SEQ ID NO: 1979376 - DNA, 25 bp, Homo sapien
tctattttgccatttgttgtcttta

SEQ ID NO: 1979377 - DNA, 25 bp, Homo sapien
ctcaaagtgagaaggcttttcagga

SEQ ID NO: 1979378 - DNA, 25 bp, Homo sapien
aaagtgagaaggcttttcaggagac

SEQ ID NO: 1979379 - DNA, 25 bp, Homo sapien
tcaaagtgagaaggcttttcaggag

SEQ ID NO: 1979380 - DNA, 25 bp, Homo sapien
aagtgagaaggcttttcaggagact

SEQ ID NO: 1979381 - DNA, 25 bp, Homo sapien
ctgctctcaatgtttgtttattctt

SEQ ID NO: 1979382 - DNA, 25 bp, Homo sapien
cagagttttgcatttcagtggcagg

SEQ ID NO: 1979383 - DNA, 25 bp, Homo sapien
ttattcttccattctaagcctttat

SEQ ID NO: 1979384 - DNA, 25 bp, Homo sapien
cattctaagcctttatttggaacag

SEQ ID NO: 1979385 - DNA, 25 bp, Homo sapien
ccaagatttttgatagggtagttga

SEQ ID NO: 1979386 - DNA, 25 bp, Homo sapien
ttcctctttcacaagaaggaagtgc

SEQ ID NO: 1979387 - DNA, 25 bp, Homo sapien
caagaaggaagtgcatccaagattt

SEQ ID NO: 1979388 - DNA, 25 bp, Homo sapien
tgctgtaatttgttcacagttatct

SEQ ID NO: 1979389 - DNA, 25 bp, Homo sapien
ttttatttctttcgcttctgacagt

SEQ ID NO: 1979390 - DNA, 25 bp, Homo sapien
tcccatttagctttttggttctcta

SEQ ID NO: 1979391 - DNA, 25 bp, Homo sapien
ctttcgcttctgacagttccttttg

SEQ ID NO: 1979392 - DNA, 25 bp, Homo sapien
cgcttctgacagttccttttgtagt

SEQ ID NO: 1979393 - DNA, 25 bp, Homo sapien
ttaaacatacttatcttaaaattca

SEQ ID NO: 1979394 - DNA, 25 bp, Homo sapien
ctgccattaaacatacttatcttaa

SEQ ID NO: 1979395 - DNA, 25 bp, Homo sapien
taaacatacttatcttaaaattcat

SEQ ID NO: 1979396 - DNA, 25 bp, Homo sapien
tgccattaaacatacttatcttaaa

SEQ ID NO: 1979397 - DNA, 25 bp, Homo sapien
caattctatatcttgtattctgaga

SEQ ID NO: 1979398 - DNA, 25 bp, Homo sapien
ttcaattctatatcttgtattctga

SEQ ID NO: 1979399 - DNA, 25 bp, Homo sapien
tcaattctatatcttgtattctgag

SEQ ID NO: 1979400 - DNA, 25 bp, Homo sapien
aattctatatcttgtattctgagag

SEQ ID NO: 1979401 - DNA, 25 bp, Homo sapien
taaatggttaccataattgaatacc

SEQ ID NO: 1979402 - DNA, 25 bp, Homo sapien
tcttggttttttcttgatgtgacac

SEQ ID NO: 1979403 - DNA, 25 bp, Homo sapien
tagaagtcagcatcgtgttctctgc

SEQ ID NO: 1979404 - DNA, 25 bp, Homo sapien
ttaagctgctctctatactgagatg

SEQ ID NO: 1979405 - DNA, 25 bp, Homo sapien
tctgaatggacgacacacaatctgg

SEQ ID NO: 1979406 - DNA, 25 bp, Homo sapien
acgacacacaatctgggaactgagg

SEQ ID NO: 1979407 - DNA, 25 bp, Homo sapien
cctggctgcccttcgtctggtaggt

SEQ ID NO: 1979408 - DNA, 25 bp, Homo sapien
tgaggagtgcctctgaatggacgac

SEQ ID NO: 1979409 - DNA, 25 bp, Homo sapien
atgtgggaggcgaggagcacctctg

SEQ ID NO: 1979410 - DNA, 25 bp, Homo sapien
aagcgcctcttcacggatgacacac

SEQ ID NO: 1979411 - DNA, 25 bp, Homo sapien
ctctggctgccaatcatctgggagg

SEQ ID NO: 1979412 - DNA, 25 bp, Homo sapien
ccggtctggcagttgagcgcctctg

SEQ ID NO: 1979413 - DNA, 25 bp, Homo sapien
cgcccggtctggcagttgagcgcct

SEQ ID NO: 1979414 - DNA, 25 bp, Homo sapien
gttcctctggctggccgcccggtct

SEQ ID NO: 1979415 - DNA, 25 bp, Homo sapien
gagtggcatttctcggccgccccat

SEQ ID NO: 1979416 - DNA, 25 bp, Homo sapien
ctgggaggtgaggagtgcctccctc

SEQ ID NO: 1979417 - DNA, 25 bp, Homo sapien
tgcctccctccagctgcccatcatc

SEQ ID NO: 1979418 - DNA, 25 bp, Homo sapien
cggtcgccccatctgggaggtgagg

SEQ ID NO: 1979419 - DNA, 25 bp, Homo sapien
cctccctccagctgcccatcatctg

SEQ ID NO: 1979420 - DNA, 25 bp, Homo sapien
tctgcccggccaccctgtctgggtt

SEQ ID NO: 1979421 - DNA, 25 bp, Homo sapien
ggccaccctgtctgggttgtgagga

SEQ ID NO: 1979422 - DNA, 25 bp, Homo sapien
gcccggccaccctgtctgggttgtg

SEQ ID NO: 1979423 - DNA, 25 bp, Homo sapien
ccggccaccctgtctgggttgtgag

SEQ ID NO: 1979424 - DNA, 25 bp, Homo sapien
gcatggatgacacaccatctgggaa

SEQ ID NO: 1979425 - DNA, 25 bp, Homo sapien
aggagcgcctctgcccagccgcccc

SEQ ID NO: 1979426 - DNA, 25 bp, Homo sapien
ctgcatggatgacacaccatctggg

SEQ ID NO: 1979427 - DNA, 25 bp, Homo sapien
gtgaggagcgcctctgcccagccgc

SEQ ID NO: 1979428 - DNA, 25 bp, Homo sapien
gctgccccgtctgggaagtgaggag

SEQ ID NO: 1979429 - DNA, 25 bp, Homo sapien
ccagctgccccgtctgggaagtgag

SEQ ID NO: 1979430 - DNA, 25 bp, Homo sapien
cccagctgccccgtctgggaagtga

SEQ ID NO: 1979431 - DNA, 25 bp, Homo sapien
tgcccagctgccccgtctgggaagt

SEQ ID NO: 1979432 - DNA, 25 bp, Homo sapien
gagcacctctgcctgaccgccaccc

SEQ ID NO: 1979433 - DNA, 25 bp, Homo sapien
cccgtctgggttgtgaggagcacct

SEQ ID NO: 1979434 - DNA, 25 bp, Homo sapien
ggttgtgaggagcacctctgcctga

SEQ ID NO: 1979435 - DNA, 25 bp, Homo sapien
ccccgtctgggttgtgaggagcacc

SEQ ID NO: 1979436 - DNA, 25 bp, Homo sapien
tctattcagtggagcatttcagcca

SEQ ID NO: 1979437 - DNA, 25 bp, Homo sapien
tctttaagaagactaacgctaggcc

SEQ ID NO: 1979438 - DNA, 25 bp, Homo sapien
tatgaaattcttgcactggctgggt

SEQ ID NO: 1979439 - DNA, 25 bp, Homo sapien
gtcagtctggaggtaacgacttccc

SEQ ID NO: 1979440 - DNA, 25 bp, Homo sapien
taccattcagggatctcgaggtggc

SEQ ID NO: 1979441 - DNA, 25 bp, Homo sapien
ttgatttcatgtcccgcatccaggg

SEQ ID NO: 1979442 - DNA, 25 bp, Homo sapien
taggctcaggatgaaagcttcccgt

SEQ ID NO: 1979443 - DNA, 25 bp, Homo sapien
taatctgcttactgctgtcggtggg

SEQ ID NO: 1979444 - DNA, 25 bp, Homo sapien
gctggtcccgacctctgttgattgg

SEQ ID NO: 1979445 - DNA, 25 bp, Homo sapien
tgttaaatagtccttgcatcccagg

SEQ ID NO: 1979446 - DNA, 25 bp, Homo sapien
aagaggctttgcaaaaagacggcgg

SEQ ID NO: 1979447 - DNA, 25 bp, Homo sapien
gaattcatctagtcctgggcttctc

SEQ ID NO: 1979448 - DNA, 25 bp, Homo sapien
gacactcgatagtgtccacaaccca

SEQ ID NO: 1979449 - DNA, 25 bp, Homo sapien
tgaacgcccggggtactgcacccaa

SEQ ID NO: 1979450 - DNA, 25 bp, Homo sapien
acaagcttagcccccagattgtgcc

SEQ ID NO: 1979451 - DNA, 25 bp, Homo sapien
catccctgccacgggtgttgcagca

SEQ ID NO: 1979452 - DNA, 25 bp, Homo sapien
gccgtgaaaactctgtgcaccctct

SEQ ID NO: 1979453 - DNA, 25 bp, Homo sapien
tgcgctccaacacgagcagaagttg

SEQ ID NO: 1979454 - DNA, 25 bp, Homo sapien
gagcagaagttgttcaccctctaga

SEQ ID NO: 1979455 - DNA, 25 bp, Homo sapien
gccgggtaaccatggtgggtgcgaa

SEQ ID NO: 1979456 - DNA, 25 bp, Homo sapien
ggggagcaagaatagcagaaactca

SEQ ID NO: 1979457 - DNA, 25 bp, Homo sapien
aaactcagacccagccagtcctccc

SEQ ID NO: 1979458 - DNA, 25 bp, Homo sapien
gagcaagaatagcagaaactcagac

SEQ ID NO: 1979459 - DNA, 25 bp, Homo sapien
ctggggagcaagaatagcagaaact

SEQ ID NO: 1979460 - DNA, 25 bp, Homo sapien
gactggagacaccacagtgcccggg

SEQ ID NO: 1979461 - DNA, 25 bp, Homo sapien
tggggactggagacaccacagtgcc

SEQ ID NO: 1979462 - DNA, 25 bp, Homo sapien
ggagacaccacagtgcccggggctc

SEQ ID NO: 1979463 - DNA, 25 bp, Homo sapien
gggactggagacaccacagtgcccg

SEQ ID NO: 1979464 - DNA, 25 bp, Homo sapien
cctctcctcctagaccaagctggcc

SEQ ID NO: 1979465 - DNA, 25 bp, Homo sapien
tcctagaccaagctggcctcctgac

SEQ ID NO: 1979466 - DNA, 25 bp, Homo sapien
ccagttttggcgaaggctctcacac

SEQ ID NO: 1979467 - DNA, 25 bp, Homo sapien
agttttggcgaaggctctcacaccc

SEQ ID NO: 1979468 - DNA, 25 bp, Homo sapien
gatacaagtgataccggtctaagcc

SEQ ID NO: 1979469 - DNA, 25 bp, Homo sapien
gaaggtcaaatcaactggtccagga

SEQ ID NO: 1979470 - DNA, 25 bp, Homo sapien
cattagcactgacgccaaaggaacc

SEQ ID NO: 1979471 - DNA, 25 bp, Homo sapien
tggagtctactcaacaagaggcgac

SEQ ID NO: 1979472 - DNA, 25 bp, Homo sapien
tgccaagagcgtgggaattggtatg

SEQ ID NO: 1979473 - DNA, 25 bp, Homo sapien
ctgccaagagcgtgggaattggtat

SEQ ID NO: 1979474 - DNA, 25 bp, Homo sapien
cccatcagcctagtaagctccaggg

SEQ ID NO: 1979475 - DNA, 25 bp, Homo sapien
cctctggtgcattctttgtccccat

SEQ ID NO: 1979476 - DNA, 25 bp, Homo sapien
ggcacagagtacgaggctgcactcc

SEQ ID NO: 1979477 - DNA, 25 bp, Homo sapien
ctgcactccttgacctttctatgct

SEQ ID NO: 1979478 - DNA, 25 bp, Homo sapien
caccccttctattcccgaacgcttg

SEQ ID NO: 1979479 - DNA, 25 bp, Homo sapien
ccttctattcccgaacgcttggcag

SEQ ID NO: 1979480 - DNA, 25 bp, Homo sapien
ctgagatgtctccattctaggggca

SEQ ID NO: 1979481 - DNA, 25 bp, Homo sapien
tctattcccgaacgcttggcagggt

SEQ ID NO: 1979482 - DNA, 25 bp, Homo sapien
tcctcctgacatggccatgtagctt

SEQ ID NO: 1979483 - DNA, 25 bp, Homo sapien
ctcctgacatggccatgtagcttct

SEQ ID NO: 1979484 - DNA, 25 bp, Homo sapien
cctgacatggccatgtagcttctca

SEQ ID NO: 1979485 - DNA, 25 bp, Homo sapien
tgacatggccatgtagcttctcagc

SEQ ID NO: 1979486 - DNA, 25 bp, Homo sapien
tcctggacccatagatctgaaagca

SEQ ID NO: 1979487 - DNA, 25 bp, Homo sapien
gtaggccccagactaaactctccag

SEQ ID NO: 1979488 - DNA, 25 bp, Homo sapien
cagaacaatggtactgctcctgtgg

SEQ ID NO: 1979489 - DNA, 25 bp, Homo sapien
gcctggtgctcacgattgagacata

SEQ ID NO: 1979490 - DNA, 25 bp, Homo sapien
tgggctaacagggtcacgaacagat

SEQ ID NO: 1979491 - DNA, 25 bp, Homo sapien
ggctaacagggtcacgaacagatca

SEQ ID NO: 1979492 - DNA, 25 bp, Homo sapien
acagggtcacgaacagatcaggaac

SEQ ID NO: 1979493 - DNA, 25 bp, Homo sapien
taacagggtcacgaacagatcagga

SEQ ID NO: 1979494 - DNA, 25 bp, Homo sapien
aagcatcagccctgttattcggatg

SEQ ID NO: 1979495 - DNA, 25 bp, Homo sapien
ttattcggatgatggagtttgcaga

SEQ ID NO: 1979496 - DNA, 25 bp, Homo sapien
cagccctgttattcggatgatggag

SEQ ID NO: 1979497 - DNA, 25 bp, Homo sapien
gactttctgtttgccctcctcttgc

SEQ ID NO: 1979498 - DNA, 25 bp, Homo sapien
tacagtctgtttcccacgaagcaag

SEQ ID NO: 1979499 - DNA, 25 bp, Homo sapien
tacaggctgcctaatccaagtcata

SEQ ID NO: 1979500 - DNA, 25 bp, Homo sapien
cataaactgggattctacagggtct

SEQ ID NO: 1979501 - DNA, 25 bp, Homo sapien
catgaggtgcaatcaaggtgtagcc

SEQ ID NO: 1979502 - DNA, 25 bp, Homo sapien
gtaacttcaaaggactaattctgga

SEQ ID NO: 1979503 - DNA, 25 bp, Homo sapien
tatgcctcagctaaatggacacaca

SEQ ID NO: 1979504 - DNA, 25 bp, Homo sapien
aacagcccacgttcttcctatggca

SEQ ID NO: 1979505 - DNA, 25 bp, Homo sapien
tatataaagaaccagttccagcagg

SEQ ID NO: 1979506 - DNA, 25 bp, Homo sapien
tattcccagagctcagtataatgcc

SEQ ID NO: 1979507 - DNA, 25 bp, Homo sapien
gagttgaatcagctgacctctaagg

SEQ ID NO: 1979508 - DNA, 25 bp, Homo sapien
cacaatcatgggctttgaactgtaa

SEQ ID NO: 1979509 - DNA, 25 bp, Homo sapien
cagatgttctgctagttataccaaa

SEQ ID NO: 1979510 - DNA, 25 bp, Homo sapien
tctctagtgtgtaagggtgacatcc

SEQ ID NO: 1979511 - DNA, 25 bp, Homo sapien
cagacgataaacaatagggaagcta

SEQ ID NO: 1979512 - DNA, 25 bp, Homo sapien
tatgtgaggcaacggatacactgta

SEQ ID NO: 1979513 - DNA, 25 bp, Homo sapien
tgctggcaaggctaaatggtcaatg

SEQ ID NO: 1979514 - DNA, 25 bp, Homo sapien
ttatttactagcaagccttcagagg

SEQ ID NO: 1979515 - DNA, 25 bp, Homo sapien
aggggaagtgttgccttggcccctg

SEQ ID NO: 1979516 - DNA, 25 bp, Homo sapien
tactagcaagccttcagagggtgaa

SEQ ID NO: 1979517 - DNA, 25 bp, Homo sapien
atttactagcaagccttcagagggt

SEQ ID NO: 1979518 - DNA, 25 bp, Homo sapien
tagtggtccctgatgtaacgtgcat

SEQ ID NO: 1979519 - DNA, 25 bp, Homo sapien
gaattaaagaccttcagagatcaac

SEQ ID NO: 1979520 - DNA, 25 bp, Homo sapien
aggctggaggagaacgttctctgtc

SEQ ID NO: 1979521 - DNA, 25 bp, Homo sapien
ggagaacgttctctgtctacataga

SEQ ID NO: 1979522 - DNA, 25 bp, Homo sapien
gaagaatactacctagaggcttcat

SEQ ID NO: 1979523 - DNA, 25 bp, Homo sapien
tatatttatctgacatatgttgaaa

SEQ ID NO: 1979524 - DNA, 25 bp, Homo sapien
ggagatttaactgagttggactcta

SEQ ID NO: 1979525 - DNA, 25 bp, Homo sapien
taggtctttgccaggtctagaggag

SEQ ID NO: 1979526 - DNA, 25 bp, Homo sapien
catggatgaaacagaccctttggca

SEQ ID NO: 1979527 - DNA, 25 bp, Homo sapien
cagaccctttggcactaagatgcca

SEQ ID NO: 1979528 - DNA, 25 bp, Homo sapien
atagacatcccttcatggatgaaac

SEQ ID NO: 1979529 - DNA, 25 bp, Homo sapien
taacattaaaatagacatcccttca

SEQ ID NO: 1979530 - DNA, 25 bp, Homo sapien
agtctgacccagaggaggccgtgtc

SEQ ID NO: 1979531 - DNA, 25 bp, Homo sapien
agtgcatctttgtcaaagtctgacc

SEQ ID NO: 1979532 - DNA, 25 bp, Homo sapien
taagggctgtgctaatttcagtgca

SEQ ID NO: 1979533 - DNA, 25 bp, Homo sapien
tgtgctaatttcagtgcatctttgt

SEQ ID NO: 1979534 - DNA, 25 bp, Homo sapien
gatatacacttgacatcatctgatt

SEQ ID NO: 1979535 - DNA, 25 bp, Homo sapien
gatttagagaagttactgggtccag

SEQ ID NO: 1979536 - DNA, 25 bp, Homo sapien
tcttcccccacactagatttagaga

SEQ ID NO: 1979537 - DNA, 25 bp, Homo sapien
accagtggttgcctgccatagaaca

SEQ ID NO: 1979538 - DNA, 25 bp, Homo sapien
gaatgaccttcatctctcagacagc

SEQ ID NO: 1979539 - DNA, 25 bp, Homo sapien
atgcctaggcactcacctcatacta

SEQ ID NO: 1979540 - DNA, 25 bp, Homo sapien
acatggcaatgcctaggcactcacc

SEQ ID NO: 1979541 - DNA, 25 bp, Homo sapien
ctctcagacagcgtctacatggcaa

SEQ ID NO: 1979542 - DNA, 25 bp, Homo sapien
tctttttacaagaacaccttgctca

SEQ ID NO: 1979543 - DNA, 25 bp, Homo sapien
ttctttttacaagaacaccttgctc

SEQ ID NO: 1979544 - DNA, 25 bp, Homo sapien
ggagacttccccagcaaaattagcc

SEQ ID NO: 1979545 - DNA, 25 bp, Homo sapien
gagacttccccagcaaaattagcca

SEQ ID NO: 1979546 - DNA, 25 bp, Homo sapien
gtggcagagggaatcaagagcagcc

SEQ ID NO: 1979547 - DNA, 25 bp, Homo sapien
gagggcagtcaaaagagctacacct

SEQ ID NO: 1979548 - DNA, 25 bp, Homo sapien
gggcagtcaaaagagctacaccttc

SEQ ID NO: 1979549 - DNA, 25 bp, Homo sapien
ggcagagggaatcaagagcagccca

SEQ ID NO: 1979550 - DNA, 25 bp, Homo sapien
tacagaaaagtaagttgggtatcaa

SEQ ID NO: 1979551 - DNA, 25 bp, Homo sapien
ggttgatttaggagctatgtggcac

SEQ ID NO: 1979552 - DNA, 25 bp, Homo sapien
gagctatgtggcactcttcatacag

SEQ ID NO: 1979553 - DNA, 25 bp, Homo sapien
tgggtatcaaagtcacctggccagc

SEQ ID NO: 1979554 - DNA, 25 bp, Homo sapien
acagtggttcagtgccttgtttact

SEQ ID NO: 1979555 - DNA, 25 bp, Homo sapien
accaaggacagtggttcagtgcctt

SEQ ID NO: 1979556 - DNA, 25 bp, Homo sapien
caaggacagtggttcagtgccttgt

SEQ ID NO: 1979557 - DNA, 25 bp, Homo sapien
ggacagtggttcagtgccttgttta

SEQ ID NO: 1979558 - DNA, 25 bp, Homo sapien
gcacttgcacttggtaacttgtcaa

SEQ ID NO: 1979559 - DNA, 25 bp, Homo sapien
tccacaaaaagcacccacaagatag

SEQ ID NO: 1979560 - DNA, 25 bp, Homo sapien
caagataggccccactgacgaagga

SEQ ID NO: 1979561 - DNA, 25 bp, Homo sapien
cactgacgaaggagttcccatggtg

SEQ ID NO: 1979562 - DNA, 25 bp, Homo sapien
taagaatttatgaagcaatctgtcc

SEQ ID NO: 1979563 - DNA, 25 bp, Homo sapien
ggagcttgaatgctggtgcacttaa

SEQ ID NO: 1979564 - DNA, 25 bp, Homo sapien
caaatagtcttagccacacaacgaa

SEQ ID NO: 1979565 - DNA, 25 bp, Homo sapien
taagctgttagttccaaatacgttc

SEQ ID NO: 1979566 - DNA, 25 bp, Homo sapien
gaaccaaaagccagctctgtgccag

SEQ ID NO: 1979567 - DNA, 25 bp, Homo sapien
aaaagccagctctgtgccagcgtct

SEQ ID NO: 1979568 - DNA, 25 bp, Homo sapien
gcatgcctgcactccaggaaccaaa

SEQ ID NO: 1979569 - DNA, 25 bp, Homo sapien
atgcctgcactccaggaaccaaaag

SEQ ID NO: 1979570 - DNA, 25 bp, Homo sapien
caatggctgtgctaatcaggtctga

SEQ ID NO: 1979571 - DNA, 25 bp, Homo sapien
gaggaaagtgtcctagcagcacagg

SEQ ID NO: 1979572 - DNA, 25 bp, Homo sapien
cctgagagcgcagtcctgtctgtga

SEQ ID NO: 1979573 - DNA, 25 bp, Homo sapien
catgctataatgctcaaacaggagg

SEQ ID NO: 1979574 - DNA, 25 bp, Homo sapien
cagacgatgagtaagatggattcaa

SEQ ID NO: 1979575 - DNA, 25 bp, Homo sapien
gagacagacgatgagtaagatggat

SEQ ID NO: 1979576 - DNA, 25 bp, Homo sapien
caagagacagacgatgagtaagatg

SEQ ID NO: 1979577 - DNA, 25 bp, Homo sapien
gagacaagagacagacgatgagtaa

SEQ ID NO: 1979578 - DNA, 25 bp, Homo sapien
agggagctaaggtgtttcacagaaa

SEQ ID NO: 1979579 - DNA, 25 bp, Homo sapien
actggggaatcagccagggagctaa

SEQ ID NO: 1979580 - DNA, 25 bp, Homo sapien
gccactggggaatcagccagggagc

SEQ ID NO: 1979581 - DNA, 25 bp, Homo sapien
gggaatcagccagggagctaaggtg

SEQ ID NO: 1979582 - DNA, 25 bp, Homo sapien
gtactgggcttctagcctgtccttc

SEQ ID NO: 1979583 - DNA, 25 bp, Homo sapien
agctcaaaggctgcccaagacctgg

SEQ ID NO: 1979584 - DNA, 25 bp, Homo sapien
gcagggacagctcaaaggctgccca

SEQ ID NO: 1979585 - DNA, 25 bp, Homo sapien
ccttgtactgggcttctagcctgtc

SEQ ID NO: 1979586 - DNA, 25 bp, Homo sapien
ctctggaccttggctgcccagtgtc

SEQ ID NO: 1979587 - DNA, 25 bp, Homo sapien
gcatctctggaccttggctgcccag

SEQ ID NO: 1979588 - DNA, 25 bp, Homo sapien
aggcttccacggtccaagcagccat

SEQ ID NO: 1979589 - DNA, 25 bp, Homo sapien
aagcagccattgtgacttctgccct

SEQ ID NO: 1979590 - DNA, 25 bp, Homo sapien
ggtccaagcagccattgtgacttct

SEQ ID NO: 1979591 - DNA, 25 bp, Homo sapien
cacggtccaagcagccattgtgact

SEQ ID NO: 1979592 - DNA, 25 bp, Homo sapien
cagggcagcagctatttccggccta

SEQ ID NO: 1979593 - DNA, 25 bp, Homo sapien
caccactgggatgtgagacgtgcag

SEQ ID NO: 1979594 - DNA, 25 bp, Homo sapien
tccggcctacgcattttcagatgag

SEQ ID NO: 1979595 - DNA, 25 bp, Homo sapien
caatgccagtcccatgtctacaagg

SEQ ID NO: 1979596 - DNA, 25 bp, Homo sapien
tgccacaactttaacgaccaaattc

SEQ ID NO: 1979597 - DNA, 25 bp, Homo sapien
gctcgtctagagctggatcttgact

SEQ ID NO: 1979598 - DNA, 25 bp, Homo sapien
tcctgtgggctcgtctagagctgga

SEQ ID NO: 1979599 - DNA, 25 bp, Homo sapien
cctgctatctgggtgtgtcccttag

SEQ ID NO: 1979600 - DNA, 25 bp, Homo sapien
tgcactgctgccgtgtgactgggaa

SEQ ID NO: 1979601 - DNA, 25 bp, Homo sapien
tgtggaagtaagtgacccagtaccc

SEQ ID NO: 1979602 - DNA, 25 bp, Homo sapien
tatcacgacgtttttgggaggcgct

SEQ ID NO: 1979603 - DNA, 25 bp, Homo sapien
tgatcctgtcctgagtatagccacc

SEQ ID NO: 1979604 - DNA, 25 bp, Homo sapien
tttgggcaggggccccttccgctgc

SEQ ID NO: 1979605 - DNA, 25 bp, Homo sapien
ctgaaaaagcaggtgggatccgagc

SEQ ID NO: 1979606 - DNA, 25 bp, Homo sapien
gaaaaagcaggtgggatccgagctc

SEQ ID NO: 1979607 - DNA, 25 bp, Homo sapien
ggggccgacttagccaagcctgctg

SEQ ID NO: 1979608 - DNA, 25 bp, Homo sapien
ctttctgtgctctgggggccgactt

SEQ ID NO: 1979609 - DNA, 25 bp, Homo sapien
cctgacattgaggggagatggtttc

SEQ ID NO: 1979610 - DNA, 25 bp, Homo sapien
agatggtttctcctgagaaggtggg

SEQ ID NO: 1979611 - DNA, 25 bp, Homo sapien
attgaggggagatggtttctcctga

SEQ ID NO: 1979612 - DNA, 25 bp, Homo sapien
gggagatggtttctcctgagaaggt

SEQ ID NO: 1979613 - DNA, 25 bp, Homo sapien
gatttctcagagtgaaagtcccggg

SEQ ID NO: 1979614 - DNA, 25 bp, Homo sapien
cttccacggtaaaggatttctcaga

SEQ ID NO: 1979615 - DNA, 25 bp, Homo sapien
ttctcagagtgaaagtcccggggtg

SEQ ID NO: 1979616 - DNA, 25 bp, Homo sapien
ctcagagtgaaagtcccggggtgca

SEQ ID NO: 1979617 - DNA, 25 bp, Homo sapien
ttttctaggtcaggccgtctctgca

SEQ ID NO: 1979618 - DNA, 25 bp, Homo sapien
ggcaggatttgacccagggctgata

SEQ ID NO: 1979619 - DNA, 25 bp, Homo sapien
cactgtgatcgcacatgagggaaat

SEQ ID NO: 1979620 - DNA, 25 bp, Homo sapien
ccagggctgataccatttttctagg

SEQ ID NO: 1979621 - DNA, 25 bp, Homo sapien
cacctcttggtgtaggtaacactct

SEQ ID NO: 1979622 - DNA, 25 bp, Homo sapien
taggtaacactctcatcatccctga

SEQ ID NO: 1979623 - DNA, 25 bp, Homo sapien
tgtaggtaacactctcatcatccct

SEQ ID NO: 1979624 - DNA, 25 bp, Homo sapien
cttggtgtaggtaacactctcatca

SEQ ID NO: 1979625 - DNA, 25 bp, Homo sapien
tcttttggacatataactacacgct

SEQ ID NO: 1979626 - DNA, 25 bp, Homo sapien
ccaagagacaagtggcaggtcgagc

SEQ ID NO: 1979627 - DNA, 25 bp, Homo sapien
ggtccagctgatatgttcaccctca

SEQ ID NO: 1979628 - DNA, 25 bp, Homo sapien
ccaccagcttggctgaagtaggtga

SEQ ID NO: 1979629 - DNA, 25 bp, Homo sapien
aattgattgagctggaatgcatcgc

SEQ ID NO: 1979630 - DNA, 25 bp, Homo sapien
aatgcatcgcataacttggcctccc

SEQ ID NO: 1979631 - DNA, 25 bp, Homo sapien
gggcccatctccagaaattgattga

SEQ ID NO: 1979632 - DNA, 25 bp, Homo sapien
catcacgaagtggtagcagagccaa

SEQ ID NO: 1979633 - DNA, 25 bp, Homo sapien
gaagtacctgaggtgctccctcgct

SEQ ID NO: 1979634 - DNA, 25 bp, Homo sapien
tgtacctcttcttgatggttaaggg

SEQ ID NO: 1979635 - DNA, 25 bp, Homo sapien
tcttgatggttaagggagaaggaaa

SEQ ID NO: 1979636 - DNA, 25 bp, Homo sapien
cctcgctggctctttgtacctcttc

SEQ ID NO: 1979637 - DNA, 25 bp, Homo sapien
ggacttattatgtatcttcatgttc

SEQ ID NO: 1979638 - DNA, 25 bp, Homo sapien
taactattgtatgggacttattatg

SEQ ID NO: 1979639 - DNA, 25 bp, Homo sapien
tcttcatgttctactgttcccacct

SEQ ID NO: 1979640 - DNA, 25 bp, Homo sapien
cctgttggtgacttattattaacta

SEQ ID NO: 1979641 - DNA, 25 bp, Homo sapien
tgtccacagcgctgtcagatgccga

SEQ ID NO: 1979642 - DNA, 25 bp, Homo sapien
agatgccgaccaaaccctgctttgg

SEQ ID NO: 1979643 - DNA, 25 bp, Homo sapien
tgtcagatccaaggagagccgctgg

SEQ ID NO: 1979644 - DNA, 25 bp, Homo sapien
tgaggtggttcgtctggtagcctcc

SEQ ID NO: 1979645 - DNA, 25 bp, Homo sapien
acaaacaatttctgaatgctcctca

SEQ ID NO: 1979646 - DNA, 25 bp, Homo sapien
caatgcctccaattgtacagcataa

SEQ ID NO: 1979647 - DNA, 25 bp, Homo sapien
tatcatgcgatattcagtgtggtag

SEQ ID NO: 1979648 - DNA, 25 bp, Homo sapien
ttggcacaacttcatctagatcact

SEQ ID NO: 1979649 - DNA, 25 bp, Homo sapien
tagatcactttcaggatatcatgcg

SEQ ID NO: 1979650 - DNA, 25 bp, Homo sapien
ctgggaagtgtggaatccagcaggt

SEQ ID NO: 1979651 - DNA, 25 bp, Homo sapien
ggaagtgtggaatccagcaggtcat

SEQ ID NO: 1979652 - DNA, 25 bp, Homo sapien
tgggaagtgtggaatccagcaggtc

SEQ ID NO: 1979653 - DNA, 25 bp, Homo sapien
gggaagtgtggaatccagcaggtca

SEQ ID NO: 1979654 - DNA, 25 bp, Homo sapien
ctctgcgatgactgcctggcggtgg

SEQ ID NO: 1979655 - DNA, 25 bp, Homo sapien
cctggcggtggctgttacgtgattc

SEQ ID NO: 1979656 - DNA, 25 bp, Homo sapien
tgcgatgactgcctggcggtggctg

SEQ ID NO: 1979657 - DNA, 25 bp, Homo sapien
ctggcggtggctgttacgtgattcc

SEQ ID NO: 1979658 - DNA, 25 bp, Homo sapien
ggcttgactggtgggcaaagctgag

SEQ ID NO: 1979659 - DNA, 25 bp, Homo sapien
ttgactggtgggcaaagctgagtgt

SEQ ID NO: 1979660 - DNA, 25 bp, Homo sapien
gggcttgactggtgggcaaagctga

SEQ ID NO: 1979661 - DNA, 25 bp, Homo sapien
cttgactggtgggcaaagctgagtg

SEQ ID NO: 1979662 - DNA, 25 bp, Homo sapien
gaagtggtttcttcaggtgaccaga

SEQ ID NO: 1979663 - DNA, 25 bp, Homo sapien
cagatgcctgaccatactcttgagc

SEQ ID NO: 1979664 - DNA, 25 bp, Homo sapien
cagaccaaagtgagttgctggacac

SEQ ID NO: 1979665 - DNA, 25 bp, Homo sapien
gatgcctgaccatactcttgagcag

SEQ ID NO: 1979666 - DNA, 25 bp, Homo sapien
cagcaatagacacacttagaaatag

SEQ ID NO: 1979667 - DNA, 25 bp, Homo sapien
tcgggcatttcaaacactgtcctgg

SEQ ID NO: 1979668 - DNA, 25 bp, Homo sapien
ttcgggcatttcaaacactgtcctg

SEQ ID NO: 1979669 - DNA, 25 bp, Homo sapien
ccttcgggcatttcaaacactgtcc

SEQ ID NO: 1979670 - DNA, 25 bp, Homo sapien
cgggcatttcaaacactgtcctgga

SEQ ID NO: 1979671 - DNA, 25 bp, Homo sapien
ctgcacagtccggtgttttgataga

SEQ ID NO: 1979672 - DNA, 25 bp, Homo sapien
cagtccggtgttttgatagagcaac

SEQ ID NO: 1979673 - DNA, 25 bp, Homo sapien
gcaactctctcgatattcttctcta

SEQ ID NO: 1979674 - DNA, 25 bp, Homo sapien
tgttttgatagagcaactctctcga

SEQ ID NO: 1979675 - DNA, 25 bp, Homo sapien
taaacttggccagggcagaagatgg

SEQ ID NO: 1979676 - DNA, 25 bp, Homo sapien
cataaacttggccagggcagaagat

SEQ ID NO: 1979677 - DNA, 25 bp, Homo sapien
agaagatggctgaaggtcaaagtag

SEQ ID NO: 1979678 - DNA, 25 bp, Homo sapien
ggcagaagatggctgaaggtcaaag

SEQ ID NO: 1979679 - DNA, 25 bp, Homo sapien
ccacctgaccgtggctccatgtgaa

SEQ ID NO: 1979680 - DNA, 25 bp, Homo sapien
gatctcatcccgagggaatccacgt

SEQ ID NO: 1979681 - DNA, 25 bp, Homo sapien
tggacccattgagctggcagcgtgc

SEQ ID NO: 1979682 - DNA, 25 bp, Homo sapien
tttatgggaccgaagaccacctgac

SEQ ID NO: 1979683 - DNA, 25 bp, Homo sapien
cccatggtgtgtaaagctgtggttg

SEQ ID NO: 1979684 - DNA, 25 bp, Homo sapien
gatcccatggtgtgtaaagctgtgg

SEQ ID NO: 1979685 - DNA, 25 bp, Homo sapien
gagatcccatggtgtgtaaagctgt

SEQ ID NO: 1979686 - DNA, 25 bp, Homo sapien
gctggagatcccatggtgtgtaaag

SEQ ID NO: 1979687 - DNA, 25 bp, Homo sapien
aggatgtgcagctttgtacttggtg

SEQ ID NO: 1979688 - DNA, 25 bp, Homo sapien
cattgaccgagagcttggaatttcc

SEQ ID NO: 1979689 - DNA, 25 bp, Homo sapien
catcctcagcttggaagaccgggag

SEQ ID NO: 1979690 - DNA, 25 bp, Homo sapien
cagcactgtagggtggcttatctct

SEQ ID NO: 1979691 - DNA, 25 bp, Homo sapien
tttcctgtccttgatgccacaagca

SEQ ID NO: 1979692 - DNA, 25 bp, Homo sapien
ttttggctgggagacgcagtcatcc

SEQ ID NO: 1979693 - DNA, 25 bp, Homo sapien
tatcagagtggtcttctggccggca

SEQ ID NO: 1979694 - DNA, 25 bp, Homo sapien
cagatgtagtcatccaccgatctct

SEQ ID NO: 1979695 - DNA, 25 bp, Homo sapien
ttttggccaggagatgcagtcatcc

SEQ ID NO: 1979696 - DNA, 25 bp, Homo sapien
gcaattctgaactatggcgctataa

SEQ ID NO: 1979697 - DNA, 25 bp, Homo sapien
tagataggttgctggcaccacactg

SEQ ID NO: 1979698 - DNA, 25 bp, Homo sapien
tataaagtctagtgcaatccctgct

SEQ ID NO: 1979699 - DNA, 25 bp, Homo sapien
catggagaccatagggctcagagag

SEQ ID NO: 1979700 - DNA, 25 bp, Homo sapien
agacactgccgcttcactgccagat

SEQ ID NO: 1979701 - DNA, 25 bp, Homo sapien
cagacactgccgcttcactgccaga

SEQ ID NO: 1979702 - DNA, 25 bp, Homo sapien
gagcagacactgccgcttcactgcc

SEQ ID NO: 1979703 - DNA, 25 bp, Homo sapien
ctgagcagacactgccgcttcactg

SEQ ID NO: 1979704 - DNA, 25 bp, Homo sapien
accagtgtctacaggctgtggccca

SEQ ID NO: 1979705 - DNA, 25 bp, Homo sapien
caaagctctaagcagattccaccag

SEQ ID NO: 1979706 - DNA, 25 bp, Homo sapien
catagcttggctctgggaattctct

SEQ ID NO: 1979707 - DNA, 25 bp, Homo sapien
ctgtggcccaaagccgtgcagctga

SEQ ID NO: 1979708 - DNA, 25 bp, Homo sapien
gaaggcagggacctactgaggaaca

SEQ ID NO: 1979709 - DNA, 25 bp, Homo sapien
cagcactgtggctcagaaaaccatg

SEQ ID NO: 1979710 - DNA, 25 bp, Homo sapien
tgggctcagccaactaggttctcaa

SEQ ID NO: 1979711 - DNA, 25 bp, Homo sapien
ccggacagcaacgaagaagagaggt

SEQ ID NO: 1979712 - DNA, 25 bp, Homo sapien
tctggatggagcctgcctggttgcc

SEQ ID NO: 1979713 - DNA, 25 bp, Homo sapien
tattctgaggactcccctgaaggca

SEQ ID NO: 1979714 - DNA, 25 bp, Homo sapien
tcgtggaggtctccactgctcagac

SEQ ID NO: 1979715 - DNA, 25 bp, Homo sapien
aaggcagctcaggtgcagcagtttc

SEQ ID NO: 1979716 - DNA, 25 bp, Homo sapien
tcctcgtggcaatccaggtgctggt

SEQ ID NO: 1979717 - DNA, 25 bp, Homo sapien
aatgctcaggtttgacccagacaca

SEQ ID NO: 1979718 - DNA, 25 bp, Homo sapien
gagtaagcattgaaaccggaagccc

SEQ ID NO: 1979719 - DNA, 25 bp, Homo sapien
caccaggagtgcagcttcataaaca

SEQ ID NO: 1979720 - DNA, 25 bp, Homo sapien
tgaggccagggtgtctacacttcgg

SEQ ID NO: 1979721 - DNA, 25 bp, Homo sapien
gtcagagagtacagactccgccagc

SEQ ID NO: 1979722 - DNA, 25 bp, Homo sapien
gaaattccaacaattgactgcagcc

SEQ ID NO: 1979723 - DNA, 25 bp, Homo sapien
tccgccagcgctcagtttcaaagaa

SEQ ID NO: 1979724 - DNA, 25 bp, Homo sapien
cacacccaatgctaagtacaaagaa

SEQ ID NO: 1979725 - DNA, 25 bp, Homo sapien
aacacacccaatgctaagtacaaag

SEQ ID NO: 1979726 - DNA, 25 bp, Homo sapien
acacacccaatgctaagtacaaaga

SEQ ID NO: 1979727 - DNA, 25 bp, Homo sapien
acacccaatgctaagtacaaagaaa

SEQ ID NO: 1979728 - DNA, 25 bp, Homo sapien
tctgctctggccacgttcacctctc

SEQ ID NO: 1979729 - DNA, 25 bp, Homo sapien
gtataaccctgctgattcgttttgt

SEQ ID NO: 1979730 - DNA, 25 bp, Homo sapien
ttcagcaagcactgtataaccctgc

SEQ ID NO: 1979731 - DNA, 25 bp, Homo sapien
gcaagcactgtataaccctgctgat

SEQ ID NO: 1979732 - DNA, 25 bp, Homo sapien
gggaaagctgctctgttctgattgc

SEQ ID NO: 1979733 - DNA, 25 bp, Homo sapien
taaaaatggcccttcactgcgctct

SEQ ID NO: 1979734 - DNA, 25 bp, Homo sapien
tctactccgatgaccaacgtctgct

SEQ ID NO: 1979735 - DNA, 25 bp, Homo sapien
gcagctgtctctactccgatgacca

SEQ ID NO: 1979736 - DNA, 25 bp, Homo sapien
ttgttcaaaagagcactgtgcaggt

SEQ ID NO: 1979737 - DNA, 25 bp, Homo sapien
agacacgaaagggaagctggttcct

SEQ ID NO: 1979738 - DNA, 25 bp, Homo sapien
ctgtgcaggtgaacgttattatccc

SEQ ID NO: 1979739 - DNA, 25 bp, Homo sapien
cctaaattcagacaggcagcacctg

SEQ ID NO: 1979740 - DNA, 25 bp, Homo sapien
gatattggagagacaccttctgcca

SEQ ID NO: 1979741 - DNA, 25 bp, Homo sapien
tcttggagttaggaaccaccactgg

SEQ ID NO: 1979742 - DNA, 25 bp, Homo sapien
tatcctggtagtttcacggctgcag

SEQ ID NO: 1979743 - DNA, 25 bp, Homo sapien
caccactggttagaggaagtagctc

SEQ ID NO: 1979744 - DNA, 25 bp, Homo sapien
gtgaacttagattcggtctgtgctc

SEQ ID NO: 1979745 - DNA, 25 bp, Homo sapien
atgtgaacttagattcggtctgtgc

SEQ ID NO: 1979746 - DNA, 25 bp, Homo sapien
tgtgaacttagattcggtctgtgct

SEQ ID NO: 1979747 - DNA, 25 bp, Homo sapien
gagagtaggctcctcgtcttgctcc

SEQ ID NO: 1979748 - DNA, 25 bp, Homo sapien
taggctcctcgtcttgctccagttc

SEQ ID NO: 1979749 - DNA, 25 bp, Homo sapien
gagtaggctcctcgtcttgctccag

SEQ ID NO: 1979750 - DNA, 25 bp, Homo sapien
gtggtgagagtaggctcctcgtctt

SEQ ID NO: 1979751 - DNA, 25 bp, Homo sapien
gcggagtggcaagcccgacatggag

SEQ ID NO: 1979752 - DNA, 25 bp, Homo sapien
aagttagccaaggtagcgctggcag

SEQ ID NO: 1979753 - DNA, 25 bp, Homo sapien
gtgcaagttagccaaggtagcgctg

SEQ ID NO: 1979754 - DNA, 25 bp, Homo sapien
gtggccgcccctggcgcggagtggc

SEQ ID NO: 1979755 - DNA, 25 bp, Homo sapien
cggaaaataccgtgagcgtgacgtc

SEQ ID NO: 1979756 - DNA, 25 bp, Homo sapien
cttcggaaaataccgtgagcgtgac

SEQ ID NO: 1979757 - DNA, 25 bp, Homo sapien
gaggacttcggaaaataccgtgagc

SEQ ID NO: 1979758 - DNA, 25 bp, Homo sapien
gaaaataccgtgagcgtgacgtcct

SEQ ID NO: 1979759 - DNA, 25 bp, Homo sapien
gtggtgcctccaggcgccgtgtcca

SEQ ID NO: 1979760 - DNA, 25 bp, Homo sapien
cagtcaccagtggtgcctccaggcg

SEQ ID NO: 1979761 - DNA, 25 bp, Homo sapien
aaggggcagagtccatcctcaggct

SEQ ID NO: 1979762 - DNA, 25 bp, Homo sapien
tccacagggagctctagccccggca

SEQ ID NO: 1979763 - DNA, 25 bp, Homo sapien
actcccaatgtactagcagatatca

SEQ ID NO: 1979764 - DNA, 25 bp, Homo sapien
taaaactcccaatgtactagcagat

SEQ ID NO: 1979765 - DNA, 25 bp, Homo sapien
aaaactcccaatgtactagcagata

SEQ ID NO: 1979766 - DNA, 25 bp, Homo sapien
tcccaatgtactagcagatatcatt

SEQ ID NO: 1979767 - DNA, 25 bp, Homo sapien
tttgatggcacccaagtgaagacac

SEQ ID NO: 1979768 - DNA, 25 bp, Homo sapien
ccaagtgaagacaccaaacaataac

SEQ ID NO: 1979769 - DNA, 25 bp, Homo sapien
aaaatcccataagttctggtacatt

SEQ ID NO: 1979770 - DNA, 25 bp, Homo sapien
tggcacccaagtgaagacaccaaac

SEQ ID NO: 1979771 - DNA, 25 bp, Homo sapien
ctgaatccattggaagagctccgca

SEQ ID NO: 1979772 - DNA, 25 bp, Homo sapien
ccttttcagtgacagctaaaatcca

SEQ ID NO: 1979773 - DNA, 25 bp, Homo sapien
taaatttaatctccacttgtgactc

SEQ ID NO: 1979774 - DNA, 25 bp, Homo sapien
cattggaagagctccgcatcatttc

SEQ ID NO: 1979775 - DNA, 25 bp, Homo sapien
cttgctgcagctgcattttctctct

SEQ ID NO: 1979776 - DNA, 25 bp, Homo sapien
tctctcttgatggtagtcttgatca

SEQ ID NO: 1979777 - DNA, 25 bp, Homo sapien
gatggtagtcttgatcaagatccct

SEQ ID NO: 1979778 - DNA, 25 bp, Homo sapien
tgatcaagatcccttttacaataac

SEQ ID NO: 1979779 - DNA, 25 bp, Homo sapien
cttggtgaatgaatgttgaaagtgg

SEQ ID NO: 1979780 - DNA, 25 bp, Homo sapien
gaatgaatgttgaaagtggaattgt

SEQ ID NO: 1979781 - DNA, 25 bp, Homo sapien
tggtgaatgaatgttgaaagtggaa

SEQ ID NO: 1979782 - DNA, 25 bp, Homo sapien
gtgaatgaatgttgaaagtggaatt

SEQ ID NO: 1979783 - DNA, 25 bp, Homo sapien
cgcgtatggtacaccagagatggtg

SEQ ID NO: 1979784 - DNA, 25 bp, Homo sapien
acaggcttacgcgtatggtacacca

SEQ ID NO: 1979785 - DNA, 25 bp, Homo sapien
ccttgcctaacagatagggcccagg

SEQ ID NO: 1979786 - DNA, 25 bp, Homo sapien
ttctgctaccttgcctaacagatag

SEQ ID NO: 1979787 - DNA, 25 bp, Homo sapien
ttaattgtccatctgccatttgagg

SEQ ID NO: 1979788 - DNA, 25 bp, Homo sapien
tgtccatctgccatttgaggatttt

SEQ ID NO: 1979789 - DNA, 25 bp, Homo sapien
tttgtgtagccatgatggtgacttc

SEQ ID NO: 1979790 - DNA, 25 bp, Homo sapien
tggtgacttcagctgatgcctctgt

SEQ ID NO: 1979791 - DNA, 25 bp, Homo sapien
gttgggttcatagtgaaggctctgc

SEQ ID NO: 1979792 - DNA, 25 bp, Homo sapien
tggccacctttagttgggttcatag

SEQ ID NO: 1979793 - DNA, 25 bp, Homo sapien
attgtaagttatattcagacacctg

SEQ ID NO: 1979794 - DNA, 25 bp, Homo sapien
tcccgagcctatatcctgccagaat

SEQ ID NO: 1979795 - DNA, 25 bp, Homo sapien
tcttacgtggatggcagcaagcaaa

SEQ ID NO: 1979796 - DNA, 25 bp, Homo sapien
atcttacgtggatggcagcaagcaa

SEQ ID NO: 1979797 - DNA, 25 bp, Homo sapien
ttacgtggatggcagcaagcaaaaa

SEQ ID NO: 1979798 - DNA, 25 bp, Homo sapien
acgtggatggcagcaagcaaaaaag

SEQ ID NO: 1979799 - DNA, 25 bp, Homo sapien
tcacagtgactgtgcaacattgtac

SEQ ID NO: 1979800 - DNA, 25 bp, Homo sapien
ctcacagtgactgtgcaacattgta

SEQ ID NO: 1979801 - DNA, 25 bp, Homo sapien
cacagtgactgtgcaacattgtact

SEQ ID NO: 1979802 - DNA, 25 bp, Homo sapien
gaccctgcccgtgggttcatctatt

SEQ ID NO: 1979803 - DNA, 25 bp, Homo sapien
ttgctcgaccctgcccgtgggttca

SEQ ID NO: 1979804 - DNA, 25 bp, Homo sapien
tcgaccctgcccgtgggttcatcta

SEQ ID NO: 1979805 - DNA, 25 bp, Homo sapien
cagagttgctcgaccctgcccgtgg

SEQ ID NO: 1979806 - DNA, 25 bp, Homo sapien
taatgcatcgcgaagcttacctaga

SEQ ID NO: 1979807 - DNA, 25 bp, Homo sapien
gacaaggagtttacacaggtcagcc

SEQ ID NO: 1979808 - DNA, 25 bp, Homo sapien
cattattgtatagaatcctcaggac

SEQ ID NO: 1979809 - DNA, 25 bp, Homo sapien
tctaagtgtgctaaactagctggcc

SEQ ID NO: 1979810 - DNA, 25 bp, Homo sapien
tcccgcggacgcaactttttgctgc

SEQ ID NO: 1979811 - DNA, 25 bp, Homo sapien
cactattttgctcccgcggacgcaa

SEQ ID NO: 1979812 - DNA, 25 bp, Homo sapien
cggacgcaactttttgctgccgccg

SEQ ID NO: 1979813 - DNA, 25 bp, Homo sapien
ttgctcccgcggacgcaactttttg

SEQ ID NO: 1979814 - DNA, 25 bp, Homo sapien
acatctgggttcttagctgcactga

SEQ ID NO: 1979815 - DNA, 25 bp, Homo sapien
gctcttgtcggacaattaaggggtc

SEQ ID NO: 1979816 - DNA, 25 bp, Homo sapien
tacttcagccctaataatttgcttc

SEQ ID NO: 1979817 - DNA, 25 bp, Homo sapien
cttcagccctaataatttgcttcct

SEQ ID NO: 1979818 - DNA, 25 bp, Homo sapien
ctcttgtcggacaattaaggggtct

SEQ ID NO: 1979819 - DNA, 25 bp, Homo sapien
gtcatcttcattggcagcctgtgcg

SEQ ID NO: 1979820 - DNA, 25 bp, Homo sapien
tttgctcccagccgtcacggctttt

SEQ ID NO: 1979821 - DNA, 25 bp, Homo sapien
tttttgctcccagccgtcacggctt

SEQ ID NO: 1979822 - DNA, 25 bp, Homo sapien
ttgcgtcttttcgccccctactctg

SEQ ID NO: 1979823 - DNA, 25 bp, Homo sapien
cgcgactttttccacggccgccgcg

SEQ ID NO: 1979824 - DNA, 25 bp, Homo sapien
aaatccaaccatagcagaccctgtg

SEQ ID NO: 1979825 - DNA, 25 bp, Homo sapien
tctgctacagcaatggggatatggg

SEQ ID NO: 1979826 - DNA, 25 bp, Homo sapien
gggatatgggccacactaacttgta

SEQ ID NO: 1979827 - DNA, 25 bp, Homo sapien
taaagtttgaactcaactctcatga

SEQ ID NO: 1979828 - DNA, 25 bp, Homo sapien
acaatctcttcacctgctaccacca

SEQ ID NO: 1979829 - DNA, 25 bp, Homo sapien
ctttaaaggaatcagcacaatctct

SEQ ID NO: 1979830 - DNA, 25 bp, Homo sapien
tgctaccaccacaaacacaggtaga

SEQ ID NO: 1979831 - DNA, 25 bp, Homo sapien
caggcatgcagaaaatgtccaccca

SEQ ID NO: 1979832 - DNA, 25 bp, Homo sapien
cagggtttctgtagttctgtaacat

SEQ ID NO: 1979833 - DNA, 25 bp, Homo sapien
tcaaccaagaagacagggtttctgt

SEQ ID NO: 1979834 - DNA, 25 bp, Homo sapien
tattgacactcctccagacagaatt

SEQ ID NO: 1979835 - DNA, 25 bp, Homo sapien
gagcagcatccaggtattgacactc

SEQ ID NO: 1979836 - DNA, 25 bp, Homo sapien
aattaggaattctatattgaagtta

SEQ ID NO: 1979837 - DNA, 25 bp, Homo sapien
agggtaaattaggaattctatattg

SEQ ID NO: 1979838 - DNA, 25 bp, Homo sapien
taggaattctatattgaagttattc

SEQ ID NO: 1979839 - DNA, 25 bp, Homo sapien
aaattaggaattctatattgaagtt

SEQ ID NO: 1979840 - DNA, 25 bp, Homo sapien
gtgcttcatactccatggctttttt

SEQ ID NO: 1979841 - DNA, 25 bp, Homo sapien
ttcatactccatggcttttttcttt

SEQ ID NO: 1979842 - DNA, 25 bp, Homo sapien
gcttcatactccatggcttttttct

SEQ ID NO: 1979843 - DNA, 25 bp, Homo sapien
tgggtgcttcatactccatggcttt

SEQ ID NO: 1979844 - DNA, 25 bp, Homo sapien
atgtcttctcctaagtctatttgaa

SEQ ID NO: 1979845 - DNA, 25 bp, Homo sapien
ttctctcatgtatagtaagacctga

SEQ ID NO: 1979846 - DNA, 25 bp, Homo sapien
ctgatgttgtcttaggtgtgagaac

SEQ ID NO: 1979847 - DNA, 25 bp, Homo sapien
tcatgtatagtaagacctgaagact

SEQ ID NO: 1979848 - DNA, 25 bp, Homo sapien
atctgatgttgtcttaggtgtgaga

SEQ ID NO: 1979849 - DNA, 25 bp, Homo sapien
cttgaagattgtttaaaggctttat

SEQ ID NO: 1979850 - DNA, 25 bp, Homo sapien
gaagattgtttaaaggctttatcac

SEQ ID NO: 1979851 - DNA, 25 bp, Homo sapien
tgaagattgtttaaaggctttatca

SEQ ID NO: 1979852 - DNA, 25 bp, Homo sapien
ttgaagattgtttaaaggctttatc

SEQ ID NO: 1979853 - DNA, 25 bp, Homo sapien
cacttgtaggttgtatctccaatat

SEQ ID NO: 1979854 - DNA, 25 bp, Homo sapien
tcacacttgtaggttgtatctccaa

SEQ ID NO: 1979855 - DNA, 25 bp, Homo sapien
cacacttgtaggttgtatctccaat

SEQ ID NO: 1979856 - DNA, 25 bp, Homo sapien
cttcacacttgtaggttgtatctcc

SEQ ID NO: 1979857 - DNA, 25 bp, Homo sapien
gaatagtaaaaagctttgccacatt

SEQ ID NO: 1979858 - DNA, 25 bp, Homo sapien
ggaatagtaaaaagctttgccacat

SEQ ID NO: 1979859 - DNA, 25 bp, Homo sapien
ctgaggaatagtaaaaagctttgcc

SEQ ID NO: 1979860 - DNA, 25 bp, Homo sapien
gaggaatagtaaaaagctttgccac

SEQ ID NO: 1979861 - DNA, 25 bp, Homo sapien
tgaactatgttatgttgagtaaggc

SEQ ID NO: 1979862 - DNA, 25 bp, Homo sapien
caaagactgcttacaagctttgcca

SEQ ID NO: 1979863 - DNA, 25 bp, Homo sapien
cttgacatcttagtgcttctctcca

SEQ ID NO: 1979864 - DNA, 25 bp, Homo sapien
cagtatgaactatcatattcagtaa

SEQ ID NO: 1979865 - DNA, 25 bp, Homo sapien
gatgcattcttgacatcttagtgct

SEQ ID NO: 1979866 - DNA, 25 bp, Homo sapien
ctttgatgcattcttgacatcttag

SEQ ID NO: 1979867 - DNA, 25 bp, Homo sapien
tttgaggaacagtaaaacgctttgc

SEQ ID NO: 1979868 - DNA, 25 bp, Homo sapien
ttgaggaacagtaaaacgctttgcc

SEQ ID NO: 1979869 - DNA, 25 bp, Homo sapien
gtcttatatatagtaagatttgaag

SEQ ID NO: 1979870 - DNA, 25 bp, Homo sapien
tgaattgtcttatatatagtaagat

SEQ ID NO: 1979871 - DNA, 25 bp, Homo sapien
tctaaagacttcttaaaagctttgc

SEQ ID NO: 1979872 - DNA, 25 bp, Homo sapien
ttcttgacatttgtagtgtttctct

SEQ ID NO: 1979873 - DNA, 25 bp, Homo sapien
cacattcttgacatttgtagtgttt

SEQ ID NO: 1979874 - DNA, 25 bp, Homo sapien
gacatttgtagtgtttctcttcagc

SEQ ID NO: 1979875 - DNA, 25 bp, Homo sapien
ctccactatgaattatcttatatac

SEQ ID NO: 1979876 - DNA, 25 bp, Homo sapien
tctccactatgaattatcttatata

SEQ ID NO: 1979877 - DNA, 25 bp, Homo sapien
tttgtaggattcctctccactatga

SEQ ID NO: 1979878 - DNA, 25 bp, Homo sapien
catttgtaggattcctctccactat

SEQ ID NO: 1979879 - DNA, 25 bp, Homo sapien
acatttgtaggattcctctccacta

SEQ ID NO: 1979880 - DNA, 25 bp, Homo sapien
tgtaggattcctctccactatgact

SEQ ID NO: 1979881 - DNA, 25 bp, Homo sapien
cacatttatggattcctctccagta

SEQ ID NO: 1979882 - DNA, 25 bp, Homo sapien
gaggcctgaagactgcttaaaaagc

SEQ ID NO: 1979883 - DNA, 25 bp, Homo sapien
tgatgtatagtaagctcagaggacc

SEQ ID NO: 1979884 - DNA, 25 bp, Homo sapien
ccggtaaaaggctttgcaacattct

SEQ ID NO: 1979885 - DNA, 25 bp, Homo sapien
ttgccacggtcttctgatttgtatg

SEQ ID NO: 1979886 - DNA, 25 bp, Homo sapien
gccacggtcttctgatttgtatgat

SEQ ID NO: 1979887 - DNA, 25 bp, Homo sapien
ttttgccacggtcttctgatttgta

SEQ ID NO: 1979888 - DNA, 25 bp, Homo sapien
tgccacggtcttctgatttgtatga

SEQ ID NO: 1979889 - DNA, 25 bp, Homo sapien
attttattaatctcctggattcact

SEQ ID NO: 1979890 - DNA, 25 bp, Homo sapien
tgatattagggggtcgatttttaga

SEQ ID NO: 1979891 - DNA, 25 bp, Homo sapien
ttattttattaatctcctggattca

SEQ ID NO: 1979892 - DNA, 25 bp, Homo sapien
ttcctctgtcagtctagctagtggt

SEQ ID NO: 1979893 - DNA, 25 bp, Homo sapien
tataaaccagtaatattgtcactta

SEQ ID NO: 1979894 - DNA, 25 bp, Homo sapien
gaagcctggcaacacaataggtctg

SEQ ID NO: 1979895 - DNA, 25 bp, Homo sapien
gctccattacaatcctacaggacca

SEQ ID NO: 1979896 - DNA, 25 bp, Homo sapien
ctgtaagtaattatatgttctagaa

SEQ ID NO: 1979897 - DNA, 25 bp, Homo sapien
cctcttctctgtgctccagagcaga

SEQ ID NO: 1979898 - DNA, 25 bp, Homo sapien
ttctctgtgctccagagcagatcat

SEQ ID NO: 1979899 - DNA, 25 bp, Homo sapien
tcttctctgtgctccagagcagatc

SEQ ID NO: 1979900 - DNA, 25 bp, Homo sapien
tgttggagcctgccctcttctctgt

SEQ ID NO: 1979901 - DNA, 25 bp, Homo sapien
cttccttaagaccactcaatgttgg

SEQ ID NO: 1979902 - DNA, 25 bp, Homo sapien
cttaagaccactcaatgttggcccc

SEQ ID NO: 1979903 - DNA, 25 bp, Homo sapien
tccttaagaccactcaatgttggcc

SEQ ID NO: 1979904 - DNA, 25 bp, Homo sapien
taagaccactcaatgttggccccat

SEQ ID NO: 1979905 - DNA, 25 bp, Homo sapien
cttttccaccataggtctcaaagcg

SEQ ID NO: 1979906 - DNA, 25 bp, Homo sapien
ttgtcagaatgtttctgtatagttt

SEQ ID NO: 1979907 - DNA, 25 bp, Homo sapien
tttccaccataggtctcaaagcgct

SEQ ID NO: 1979908 - DNA, 25 bp, Homo sapien
ccaccataggtctcaaagcgctcca

SEQ ID NO: 1979909 - DNA, 25 bp, Homo sapien
agaagtgttcaactctgtgagatga

SEQ ID NO: 1979910 - DNA, 25 bp, Homo sapien
aagaagtgttcaactctgtgagatg

SEQ ID NO: 1979911 - DNA, 25 bp, Homo sapien
gatcagctcatggaaggagtaaaga

SEQ ID NO: 1979912 - DNA, 25 bp, Homo sapien
gatatcacttgaacttcagtgccct

SEQ ID NO: 1979913 - DNA, 25 bp, Homo sapien
gtgccctcactgtagaatttaaaag

SEQ ID NO: 1979914 - DNA, 25 bp, Homo sapien
cagtcgtgatagaacagagttttcc

SEQ ID NO: 1979915 - DNA, 25 bp, Homo sapien
cagggttaagattgctgtttttctg

SEQ ID NO: 1979916 - DNA, 25 bp, Homo sapien
ggctgtttctttgacacaaatatca

SEQ ID NO: 1979917 - DNA, 25 bp, Homo sapien
tcacaggcttcagggttaagattgc

SEQ ID NO: 1979918 - DNA, 25 bp, Homo sapien
acaggctgtttctttgacacaaata

SEQ ID NO: 1979919 - DNA, 25 bp, Homo sapien
catctggttttgttcgtgcttcccc

SEQ ID NO: 1979920 - DNA, 25 bp, Homo sapien
tgcaaatcagtctttccggaaagtg

SEQ ID NO: 1979921 - DNA, 25 bp, Homo sapien
gaacgctttctacaagatccactgc

SEQ ID NO: 1979922 - DNA, 25 bp, Homo sapien
ccggaaagtggtcaaaaatacatct

SEQ ID NO: 1979923 - DNA, 25 bp, Homo sapien
tcccttatggcccttcactctacat

SEQ ID NO: 1979924 - DNA, 25 bp, Homo sapien
tcatctacatggagtcacagtatac

SEQ ID NO: 1979925 - DNA, 25 bp, Homo sapien
tcacctgtcctagaatttcatctac

SEQ ID NO: 1979926 - DNA, 25 bp, Homo sapien
cacctggccattaagctataatttc

SEQ ID NO: 1979927 - DNA, 25 bp, Homo sapien
catctgttgatgatatacatataac

SEQ ID NO: 1979928 - DNA, 25 bp, Homo sapien
atggcatcatagaatgtgtgacctt

SEQ ID NO: 1979929 - DNA, 25 bp, Homo sapien
caaaataggatccattaagctgccc

SEQ ID NO: 1979930 - DNA, 25 bp, Homo sapien
tgtctctgaatttacccgttctgga

SEQ ID NO: 1979931 - DNA, 25 bp, Homo sapien
gaaacactgcatgagaacttctgta

SEQ ID NO: 1979932 - DNA, 25 bp, Homo sapien
taggtaacagctaacaagtctctca

SEQ ID NO: 1979933 - DNA, 25 bp, Homo sapien
ggagggcagttaaaattcacatcaa

SEQ ID NO: 1979934 - DNA, 25 bp, Homo sapien
taataccagcgaatataggtaacag

SEQ ID NO: 1979935 - DNA, 25 bp, Homo sapien
gatgatcgttatctctacatggtga

SEQ ID NO: 1979936 - DNA, 25 bp, Homo sapien
catgcctggtggagatcttgtaaac

SEQ ID NO: 1979937 - DNA, 25 bp, Homo sapien
catggtgatggaatacatgcctggt

SEQ ID NO: 1979938 - DNA, 25 bp, Homo sapien
tgggcacgattctatactgcagaag

SEQ ID NO: 1979939 - DNA, 25 bp, Homo sapien
actgcatccgcctccgttttaactg

SEQ ID NO: 1979940 - DNA, 25 bp, Homo sapien
aactgttcctgagtacaatttggtg

SEQ ID NO: 1979941 - DNA, 25 bp, Homo sapien
caattgtgttgtttctaccttgagc

SEQ ID NO: 1979942 - DNA, 25 bp, Homo sapien
tatctgttcgaatcccttctttcgg

SEQ ID NO: 1979943 - DNA, 25 bp, Homo sapien
gcaggcgcagatatgagtgtccagt

SEQ ID NO: 1979944 - DNA, 25 bp, Homo sapien
tatcaggatgtaaaccccacccatt

SEQ ID NO: 1979945 - DNA, 25 bp, Homo sapien
ttataagtctaggagcatctgtcca

SEQ ID NO: 1979946 - DNA, 25 bp, Homo sapien
gattttcacgcttcaaaccaaggca

SEQ ID NO: 1979947 - DNA, 25 bp, Homo sapien
tttagatataatgtacccatatctg

SEQ ID NO: 1979948 - DNA, 25 bp, Homo sapien
aataatggtgtgctgatgagcatag

SEQ ID NO: 1979949 - DNA, 25 bp, Homo sapien
tcaaatagaatctctaattgatctg

SEQ ID NO: 1979950 - DNA, 25 bp, Homo sapien
attgatctgaccaatttagatataa

SEQ ID NO: 1979951 - DNA, 25 bp, Homo sapien
tacagagtaatttatctggcacctc

SEQ ID NO: 1979952 - DNA, 25 bp, Homo sapien
cctcaagccgctcataaattcataa

SEQ ID NO: 1979953 - DNA, 25 bp, Homo sapien
tatttattgtcgtctctaagtacag

SEQ ID NO: 1979954 - DNA, 25 bp, Homo sapien
taatctagctgtgcgttattgacgt

SEQ ID NO: 1979955 - DNA, 25 bp, Homo sapien
cagcagcaacatgtcgactggggac

SEQ ID NO: 1979956 - DNA, 25 bp, Homo sapien
ggtaagagggcattgtcacagcagc

SEQ ID NO: 1979957 - DNA, 25 bp, Homo sapien
atggacaacctgctgcgggatccca

SEQ ID NO: 1979958 - DNA, 25 bp, Homo sapien
tgagactcgatttgaaaaaatggac

SEQ ID NO: 1979959 - DNA, 25 bp, Homo sapien
tggtgaccctgaggttccggctcct

SEQ ID NO: 1979960 - DNA, 25 bp, Homo sapien
cctggtgaccctgaggttccggctc

SEQ ID NO: 1979961 - DNA, 25 bp, Homo sapien
ggtgaccctgaggttccggctcctc

SEQ ID NO: 1979962 - DNA, 25 bp, Homo sapien
cacctggtgaccctgaggttccggc

SEQ ID NO: 1979963 - DNA, 25 bp, Homo sapien
agcacctcgccggagcgacgaggct

SEQ ID NO: 1979964 - DNA, 25 bp, Homo sapien
tctggagagcggaggtcccctcagt

SEQ ID NO: 1979965 - DNA, 25 bp, Homo sapien
gactttgggcgtccgagcggctgtg

SEQ ID NO: 1979966 - DNA, 25 bp, Homo sapien
gggcccgctagactgaagcacctcg

SEQ ID NO: 1979967 - DNA, 25 bp, Homo sapien
gcaacataatgttcacggttctctg

SEQ ID NO: 1979968 - DNA, 25 bp, Homo sapien
gctggagccaagaaaagtcgctgca

SEQ ID NO: 1979969 - DNA, 25 bp, Homo sapien
cacatgacttaaaatgctggagcca

SEQ ID NO: 1979970 - DNA, 25 bp, Homo sapien
cagaagataactagtgatgtgtcac

SEQ ID NO: 1979971 - DNA, 25 bp, Homo sapien
cacaagtgttaccttggcaaaactg

SEQ ID NO: 1979972 - DNA, 25 bp, Homo sapien
tgccccacaagtgttaccttggcaa

SEQ ID NO: 1979973 - DNA, 25 bp, Homo sapien
catcaagggaatgtgtactgtccaa

SEQ ID NO: 1979974 - DNA, 25 bp, Homo sapien
agacatcaagggaatgtgtactgtc

SEQ ID NO: 1979975 - DNA, 25 bp, Homo sapien
agaggagaggcacccgatatatgtt

SEQ ID NO: 1979976 - DNA, 25 bp, Homo sapien
ggaaagaggagaggcacccgatata

SEQ ID NO: 1979977 - DNA, 25 bp, Homo sapien
aaagaggagaggcacccgatatatg

SEQ ID NO: 1979978 - DNA, 25 bp, Homo sapien
ctagtaattcgccaaaatgacgaac

SEQ ID NO: 1979979 - DNA, 25 bp, Homo sapien
ctgcgcctggctgaataaaaatatt

SEQ ID NO: 1979980 - DNA, 25 bp, Homo sapien
gttagccagaatggtcttgatttcc

SEQ ID NO: 1979981 - DNA, 25 bp, Homo sapien
aatggtcttgatttcctgacctcgt

SEQ ID NO: 1979982 - DNA, 25 bp, Homo sapien
ttttagtgcagacaggtttcaccgt

SEQ ID NO: 1979983 - DNA, 25 bp, Homo sapien
tgacgtctaacaccacacctccact

SEQ ID NO: 1979984 - DNA, 25 bp, Homo sapien
cgtctaacaccacacctccactcca

SEQ ID NO: 1979985 - DNA, 25 bp, Homo sapien
aatgacgtctaacaccacacctcca

SEQ ID NO: 1979986 - DNA, 25 bp, Homo sapien
cttcaatgacgtctaacaccacacc

SEQ ID NO: 1979987 - DNA, 25 bp, Homo sapien
aggccacacttggaaagatcacctt

SEQ ID NO: 1979988 - DNA, 25 bp, Homo sapien
ccagttgtccacacggctttattcc

SEQ ID NO: 1979989 - DNA, 25 bp, Homo sapien
tgatatgaggtagggctccagttgt

SEQ ID NO: 1979990 - DNA, 25 bp, Homo sapien
ttccactagaatgtacgctacatga

SEQ ID NO: 1979991 - DNA, 25 bp, Homo sapien
aatgtacgctacatgaaggcaagga

SEQ ID NO: 1979992 - DNA, 25 bp, Homo sapien
caatcttttacctctcatagtttac

SEQ ID NO: 1979993 - DNA, 25 bp, Homo sapien
cctctactcccaagtcttaaagata

SEQ ID NO: 1979994 - DNA, 25 bp, Homo sapien
gatgagcagacgttcctaatgtgaa

SEQ ID NO: 1979995 - DNA, 25 bp, Homo sapien
ctctttatagtgtctttgatgagca

SEQ ID NO: 1979996 - DNA, 25 bp, Homo sapien
ggccctagcggggcgcgagggcaga

SEQ ID NO: 1979997 - DNA, 25 bp, Homo sapien
tccgaggtgctagcgccgccggcgg

SEQ ID NO: 1979998 - DNA, 25 bp, Homo sapien
gcccgactccgaggtgctagcgccg

SEQ ID NO: 1979999 - DNA, 25 bp, Homo sapien
gccgcccgactccgaggtgctagcg

SEQ ID NO: 1980000 - DNA, 25 bp, Homo sapien
gcccaaaggctgcaggtactttaca

SEQ ID NO: 1980001 - DNA, 25 bp, Homo sapien
tcagcccggtgtttggcctctatca

SEQ ID NO: 1980002 - DNA, 25 bp, Homo sapien
tcccttaatttagaccatacgcagt

SEQ ID NO: 1980003 - DNA, 25 bp, Homo sapien
tagccacacaaggtgacatgagagg

SEQ ID NO: 1980004 - DNA, 25 bp, Homo sapien
tggccaagataaaacaactgaagct

SEQ ID NO: 1980005 - DNA, 25 bp, Homo sapien
cagaggtcagatttaacttggccaa

SEQ ID NO: 1980006 - DNA, 25 bp, Homo sapien
taacaacagtacctggacagaggtc

SEQ ID NO: 1980007 - DNA, 25 bp, Homo sapien
gaaggcagataccactagtaagcag

SEQ ID NO: 1980008 - DNA, 25 bp, Homo sapien
aactaagtgagttgctgctagtcat

SEQ ID NO: 1980009 - DNA, 25 bp, Homo sapien
cttagaactaagtgagttgctgcta

SEQ ID NO: 1980010 - DNA, 25 bp, Homo sapien
gaactaagtgagttgctgctagtca

SEQ ID NO: 1980011 - DNA, 25 bp, Homo sapien
tagaactaagtgagttgctgctagt

SEQ ID NO: 1980012 - DNA, 25 bp, Homo sapien
taatacgttcgatgcctcatgaaca

SEQ ID NO: 1980013 - DNA, 25 bp, Homo sapien
gggtaaacaccatacagatgtctgg

SEQ ID NO: 1980014 - DNA, 25 bp, Homo sapien
ggtaatctcccatgcaacagtatct

SEQ ID NO: 1980015 - DNA, 25 bp, Homo sapien
tgttaatttcctgcccattggtgta

SEQ ID NO: 1980016 - DNA, 25 bp, Homo sapien
aatgtcaccagagagcttcaagtag

SEQ ID NO: 1980017 - DNA, 25 bp, Homo sapien
tgataatcctaacagcgcaggcagc

SEQ ID NO: 1980018 - DNA, 25 bp, Homo sapien
gaataattaaggttgcctggcagcc

SEQ ID NO: 1980019 - DNA, 25 bp, Homo sapien
tacaccctgggcttatagtatctgg

SEQ ID NO: 1980020 - DNA, 25 bp, Homo sapien
aaataacgtgcttgaggctgcctca

SEQ ID NO: 1980021 - DNA, 25 bp, Homo sapien
tgccaaccagttattacagctaagg

SEQ ID NO: 1980022 - DNA, 25 bp, Homo sapien
gagccaagtgagatgtatgccaacc

SEQ ID NO: 1980023 - DNA, 25 bp, Homo sapien
gccctggtgattaaaagatgaactg

SEQ ID NO: 1980024 - DNA, 25 bp, Homo sapien
ttgcagcttcctctaaactccttca

SEQ ID NO: 1980025 - DNA, 25 bp, Homo sapien
cttgcagcttcctctaaactccttc

SEQ ID NO: 1980026 - DNA, 25 bp, Homo sapien
tgcagcttcctctaaactccttcat

SEQ ID NO: 1980027 - DNA, 25 bp, Homo sapien
aacttattgtataatgagtttgcaa

SEQ ID NO: 1980028 - DNA, 25 bp, Homo sapien
ttaacattgtataactttagatagg

SEQ ID NO: 1980029 - DNA, 25 bp, Homo sapien
caatcacaaacttattgtataatga

SEQ ID NO: 1980030 - DNA, 25 bp, Homo sapien
taacattgtataactttagataggg

SEQ ID NO: 1980031 - DNA, 25 bp, Homo sapien
tgttggccagactggtctcctgacc

SEQ ID NO: 1980032 - DNA, 25 bp, Homo sapien
ttggccagactggtctcctgacctc

SEQ ID NO: 1980033 - DNA, 25 bp, Homo sapien
ggccagactggtctcctgacctcag

SEQ ID NO: 1980034 - DNA, 25 bp, Homo sapien
gccagactggtctcctgacctcagg

SEQ ID NO: 1980035 - DNA, 25 bp, Homo sapien
cctgtaccttcacaacaagtcagca

SEQ ID NO: 1980036 - DNA, 25 bp, Homo sapien
caagtcagcatgaccatattctctg

SEQ ID NO: 1980037 - DNA, 25 bp, Homo sapien
gtgagctaccgcaacaggccctagt

SEQ ID NO: 1980038 - DNA, 25 bp, Homo sapien
ccatatagtattgagcagtgtggcc

SEQ ID NO: 1980039 - DNA, 25 bp, Homo sapien
ccaacagagcaattgacagctgacc

SEQ ID NO: 1980040 - DNA, 25 bp, Homo sapien
agccaacagagcaattgacagctga

SEQ ID NO: 1980041 - DNA, 25 bp, Homo sapien
gccaacagagcaattgacagctgac

SEQ ID NO: 1980042 - DNA, 25 bp, Homo sapien
accaaaggccatttgagacttcctg

SEQ ID NO: 1980043 - DNA, 25 bp, Homo sapien
aaccaaaggccatttgagacttcct

SEQ ID NO: 1980044 - DNA, 25 bp, Homo sapien
cctgtgagtacttgccacttccatg

SEQ ID NO: 1980045 - DNA, 25 bp, Homo sapien
gtacttgccacttccatgggtggga

SEQ ID NO: 1980046 - DNA, 25 bp, Homo sapien
caaactcaggtattaaggtttctga

SEQ ID NO: 1980047 - DNA, 25 bp, Homo sapien
ttaaagctgatatacaaactcaggt

SEQ ID NO: 1980048 - DNA, 25 bp, Homo sapien
ggaggaggaatttcttgaaacagaa

SEQ ID NO: 1980049 - DNA, 25 bp, Homo sapien
tactccttgaatgtcatggatgtaa

SEQ ID NO: 1980050 - DNA, 25 bp, Homo sapien
cctcaggtataaagcaaaatagcca

SEQ ID NO: 1980051 - DNA, 25 bp, Homo sapien
tcaggtataaagcaaaatagccatt

SEQ ID NO: 1980052 - DNA, 25 bp, Homo sapien
ctcaggtataaagcaaaatagccat

SEQ ID NO: 1980053 - DNA, 25 bp, Homo sapien
tttcataattatgttcatttgcttt

SEQ ID NO: 1980054 - DNA, 25 bp, Homo sapien
tatttcataattatgttcatttgct

SEQ ID NO: 1980055 - DNA, 25 bp, Homo sapien
ctatttcataattatgttcatttgc

SEQ ID NO: 1980056 - DNA, 25 bp, Homo sapien
atttcataattatgttcatttgctt

SEQ ID NO: 1980057 - DNA, 25 bp, Homo sapien
tccaatcagatgcaggaacactctg

SEQ ID NO: 1980058 - DNA, 25 bp, Homo sapien
gaacactctgtactcaagatttggg

SEQ ID NO: 1980059 - DNA, 25 bp, Homo sapien
taaaccccagggctgtaccatttca

SEQ ID NO: 1980060 - DNA, 25 bp, Homo sapien
gccttgggtctgcaataccttagaa

SEQ ID NO: 1980061 - DNA, 25 bp, Homo sapien
cagtcatgattaagttgggcagtca

SEQ ID NO: 1980062 - DNA, 25 bp, Homo sapien
aatcacagtcatgattaagttgggc

SEQ ID NO: 1980063 - DNA, 25 bp, Homo sapien
caacacttcagggagtctgttgcct

SEQ ID NO: 1980064 - DNA, 25 bp, Homo sapien
tgggcagtcaacacttcagggagtc

SEQ ID NO: 1980065 - DNA, 25 bp, Homo sapien
aggctgcctgttttacccacatcac

SEQ ID NO: 1980066 - DNA, 25 bp, Homo sapien
gggatagaggctgcctgttttaccc

SEQ ID NO: 1980067 - DNA, 25 bp, Homo sapien
tcaccggggatagaggctgcctgtt

SEQ ID NO: 1980068 - DNA, 25 bp, Homo sapien
gaggctgcctgttttacccacatca

SEQ ID NO: 1980069 - DNA, 25 bp, Homo sapien
cactactacatctgagggaggcttc

SEQ ID NO: 1980070 - DNA, 25 bp, Homo sapien
agagcttcctcaaatcgagcagatt

SEQ ID NO: 1980071 - DNA, 25 bp, Homo sapien
ttctatggagttgtggagagcttcc

SEQ ID NO: 1980072 - DNA, 25 bp, Homo sapien
aaattggccgtggtaccacactact

SEQ ID NO: 1980073 - DNA, 25 bp, Homo sapien
catctgtagtgcaagatccttctgg

SEQ ID NO: 1980074 - DNA, 25 bp, Homo sapien
ccattttgagtgtagcggtttacca

SEQ ID NO: 1980075 - DNA, 25 bp, Homo sapien
tttgtgaatagggaattggtgggct

SEQ ID NO: 1980076 - DNA, 25 bp, Homo sapien
tagggaattggtgggctgtttgaat

SEQ ID NO: 1980077 - DNA, 25 bp, Homo sapien
gcagggaaaactttacagaaccagc

SEQ ID NO: 1980078 - DNA, 25 bp, Homo sapien
tatctccaacttgaaggttacagag

SEQ ID NO: 1980079 - DNA, 25 bp, Homo sapien
tgaaatgttgctctaaaaccagagc

SEQ ID NO: 1980080 - DNA, 25 bp, Homo sapien
tcaaagcagtatttggaggcctaaa

SEQ ID NO: 1980081 - DNA, 25 bp, Homo sapien
cccaccaggaggaatcctgctggga

SEQ ID NO: 1980082 - DNA, 25 bp, Homo sapien
catctggtagaaatcgcttgtccac

SEQ ID NO: 1980083 - DNA, 25 bp, Homo sapien
catacacagtgataccaaacgcaaa

SEQ ID NO: 1980084 - DNA, 25 bp, Homo sapien
caaactaggatgtgttcaggcagat

SEQ ID NO: 1980085 - DNA, 25 bp, Homo sapien
tccgtgaaatatcgaaatcctcttt

SEQ ID NO: 1980086 - DNA, 25 bp, Homo sapien
tctccacagccgatacaatttccag

SEQ ID NO: 1980087 - DNA, 25 bp, Homo sapien
tctttggctgagtggtgagcttcaa

SEQ ID NO: 1980088 - DNA, 25 bp, Homo sapien
gagcttctgactaggtagtacttta

SEQ ID NO: 1980089 - DNA, 25 bp, Homo sapien
cagataagaggtcctttagacagta

SEQ ID NO: 1980090 - DNA, 25 bp, Homo sapien
cagcagataagaggtcctttagaca

SEQ ID NO: 1980091 - DNA, 25 bp, Homo sapien
ataagaggtcctttagacagtacac

SEQ ID NO: 1980092 - DNA, 25 bp, Homo sapien
ctttccagcagataagaggtccttt

SEQ ID NO: 1980093 - DNA, 25 bp, Homo sapien
aagcagaggattgtcggcttctaca

SEQ ID NO: 1980094 - DNA, 25 bp, Homo sapien
aagagcttggcttaatagagtggca

SEQ ID NO: 1980095 - DNA, 25 bp, Homo sapien
gatttgtatccattagttgtcccat

SEQ ID NO: 1980096 - DNA, 25 bp, Homo sapien
cagttgacgacactgaagagcttgg

SEQ ID NO: 1980097 - DNA, 25 bp, Homo sapien
aaagtcttccctacaacctgcaaag

SEQ ID NO: 1980098 - DNA, 25 bp, Homo sapien
aggtcctgagctccacttaaattga

SEQ ID NO: 1980099 - DNA, 25 bp, Homo sapien
cacaacattgttattccgggtcagg

SEQ ID NO: 1980100 - DNA, 25 bp, Homo sapien
caaagataaagccagtggtttcaca

SEQ ID NO: 1980101 - DNA, 25 bp, Homo sapien
tcgtggtgacaaagagtaattccct

SEQ ID NO: 1980102 - DNA, 25 bp, Homo sapien
ctcctgatgcatagctaggtcgtgg

SEQ ID NO: 1980103 - DNA, 25 bp, Homo sapien
gagtggagctggatgcactgccctt

SEQ ID NO: 1980104 - DNA, 25 bp, Homo sapien
agagtaattccctgtgtgggctgga

SEQ ID NO: 1980105 - DNA, 25 bp, Homo sapien
gtgacccaggataccatccccggtg

SEQ ID NO: 1980106 - DNA, 25 bp, Homo sapien
ttgaaagagggcgaactgtagggac

SEQ ID NO: 1980107 - DNA, 25 bp, Homo sapien
tagggacaggtacaactaagccagg

SEQ ID NO: 1980108 - DNA, 25 bp, Homo sapien
ccaggataccatccccggtgtcgtt

SEQ ID NO: 1980109 - DNA, 25 bp, Homo sapien
attccagttagtggggtctgtggaa

SEQ ID NO: 1980110 - DNA, 25 bp, Homo sapien
acaattacagtttcccctgcaggaa

SEQ ID NO: 1980111 - DNA, 25 bp, Homo sapien
ctatcagaattactggtctaactcc

SEQ ID NO: 1980112 - DNA, 25 bp, Homo sapien
atcagaattactggtctaactcctg

SEQ ID NO: 1980113 - DNA, 25 bp, Homo sapien
tcagaaattggctgccggtcaaccc

SEQ ID NO: 1980114 - DNA, 25 bp, Homo sapien
agaggactcacaacaatgtcaccaa

SEQ ID NO: 1980115 - DNA, 25 bp, Homo sapien
ccagccgcacaagatactgtatcgt

SEQ ID NO: 1980116 - DNA, 25 bp, Homo sapien
tccatagaaatagggtaaagtgcca

SEQ ID NO: 1980117 - DNA, 25 bp, Homo sapien
ggatttgctgatttcattatctact

SEQ ID NO: 1980118 - DNA, 25 bp, Homo sapien
actgagccgctgaagtattaaaaat

SEQ ID NO: 1980119 - DNA, 25 bp, Homo sapien
tctctgatacctctaagtaactgag

SEQ ID NO: 1980120 - DNA, 25 bp, Homo sapien
agtgaagaggtatggttccttctga

SEQ ID NO: 1980121 - DNA, 25 bp, Homo sapien
tggcaattaatctagcaagccaggg

SEQ ID NO: 1980122 - DNA, 25 bp, Homo sapien
tctggcagcctttgatagtgtctca

SEQ ID NO: 1980123 - DNA, 25 bp, Homo sapien
aagagttctgggtcacaaccacatg

SEQ ID NO: 1980124 - DNA, 25 bp, Homo sapien
aaccaagtcttgagatacgctggca

SEQ ID NO: 1980125 - DNA, 25 bp, Homo sapien
gccagagctcgggactggtgctgac

SEQ ID NO: 1980126 - DNA, 25 bp, Homo sapien
tgccagagctcgggactggtgctga

SEQ ID NO: 1980127 - DNA, 25 bp, Homo sapien
gtggtgagcatgctctctgccagag

SEQ ID NO: 1980128 - DNA, 25 bp, Homo sapien
ttgtggtgagcatgctctctgccag

SEQ ID NO: 1980129 - DNA, 25 bp, Homo sapien
cctgtgataagctcataactaattt

SEQ ID NO: 1980130 - DNA, 25 bp, Homo sapien
caggaaactgacctttcctgtgata

SEQ ID NO: 1980131 - DNA, 25 bp, Homo sapien
tcctgtgataagctcataactaatt

SEQ ID NO: 1980132 - DNA, 25 bp, Homo sapien
gaaactgacctttcctgtgataagc

SEQ ID NO: 1980133 - DNA, 25 bp, Homo sapien
ggctgccagtgttgccaaatcttac

SEQ ID NO: 1980134 - DNA, 25 bp, Homo sapien
catttcaaatgaaagatcagctggc

SEQ ID NO: 1980135 - DNA, 25 bp, Homo sapien
gtaccaatgggccttcctctagacc

SEQ ID NO: 1980136 - DNA, 25 bp, Homo sapien
cctgtggtgttagtgacaaaatact

SEQ ID NO: 1980137 - DNA, 25 bp, Homo sapien
tcgaaaggggtaaccacactgtctc

SEQ ID NO: 1980138 - DNA, 25 bp, Homo sapien
tccagcagcttgtctaggtcatcgc

SEQ ID NO: 1980139 - DNA, 25 bp, Homo sapien
gcattttttccagcagcttgtctag

SEQ ID NO: 1980140 - DNA, 25 bp, Homo sapien
ttcattaaggtctccatcgaaaggg

SEQ ID NO: 1980141 - DNA, 25 bp, Homo sapien
tacaatgtctgtcccaaggactgac

SEQ ID NO: 1980142 - DNA, 25 bp, Homo sapien
tgtgacttgaagaatcctcaaaacc

SEQ ID NO: 1980143 - DNA, 25 bp, Homo sapien
gccacatgggaaagcatttttaatt

SEQ ID NO: 1980144 - DNA, 25 bp, Homo sapien
cctcaaaacccttagaatgacttag

SEQ ID NO: 1980145 - DNA, 25 bp, Homo sapien
tgtgttttacaagtcagacaggaag

SEQ ID NO: 1980146 - DNA, 25 bp, Homo sapien
gtgtgttttacaagtcagacaggaa

SEQ ID NO: 1980147 - DNA, 25 bp, Homo sapien
gtgttttacaagtcagacaggaagt

SEQ ID NO: 1980148 - DNA, 25 bp, Homo sapien
tgttttacaagtcagacaggaagtg

SEQ ID NO: 1980149 - DNA, 25 bp, Homo sapien
gccatgctacttttattgcctgaga

SEQ ID NO: 1980150 - DNA, 25 bp, Homo sapien
cactttgagcccctgaagcttgttg

SEQ ID NO: 1980151 - DNA, 25 bp, Homo sapien
cattcctgtcaatcagtgaattggg

SEQ ID NO: 1980152 - DNA, 25 bp, Homo sapien
tgaacccaaatgaatccagtcttaa

SEQ ID NO: 1980153 - DNA, 25 bp, Homo sapien
gacatagccagctggccactcagca

SEQ ID NO: 1980154 - DNA, 25 bp, Homo sapien
tagccagctggccactcagcaggtg

SEQ ID NO: 1980155 - DNA, 25 bp, Homo sapien
gccagctggccactcagcaggtgac

SEQ ID NO: 1980156 - DNA, 25 bp, Homo sapien
catagccagctggccactcagcagg

SEQ ID NO: 1980157 - DNA, 25 bp, Homo sapien
tgacctagcaggtctaggtggttgt

SEQ ID NO: 1980158 - DNA, 25 bp, Homo sapien
ctggactatctgaagacacctgact

SEQ ID NO: 1980159 - DNA, 25 bp, Homo sapien
agtgctgtgacctagcaggtctagg

SEQ ID NO: 1980160 - DNA, 25 bp, Homo sapien
cagctccagtgctgatgcctggact

SEQ ID NO: 1980161 - DNA, 25 bp, Homo sapien
tgataaatgtggaaggtttcattat

SEQ ID NO: 1980162 - DNA, 25 bp, Homo sapien
taaatgtggaaggtttcattatcta

SEQ ID NO: 1980163 - DNA, 25 bp, Homo sapien
ctgcggttgataaatgtggaaggtt

SEQ ID NO: 1980164 - DNA, 25 bp, Homo sapien
cggttgataaatgtggaaggtttca

SEQ ID NO: 1980165 - DNA, 25 bp, Homo sapien
tccgctgaagagtttgctgaaccaa

SEQ ID NO: 1980166 - DNA, 25 bp, Homo sapien
tgaagtgaccgaggtccaggctctg

SEQ ID NO: 1980167 - DNA, 25 bp, Homo sapien
aacacctccgatctgggaacaatga

SEQ ID NO: 1980168 - DNA, 25 bp, Homo sapien
ggctgccactgtccgctatagcaca

SEQ ID NO: 1980169 - DNA, 25 bp, Homo sapien
cagggccatcctcgccttgagaaaa

SEQ ID NO: 1980170 - DNA, 25 bp, Homo sapien
caacaatttacccttgaccttgagg

SEQ ID NO: 1980171 - DNA, 25 bp, Homo sapien
tgaagctggatctaggtgggctcct

SEQ ID NO: 1980172 - DNA, 25 bp, Homo sapien
taatgtgctagatggccaagaatcc

SEQ ID NO: 1980173 - DNA, 25 bp, Homo sapien
caggtgccatgatgtgtttgctcaa

SEQ ID NO: 1980174 - DNA, 25 bp, Homo sapien
tgcactgtcaaccagacacttggga

SEQ ID NO: 1980175 - DNA, 25 bp, Homo sapien
aatctggctactgcttggtgtgacc

SEQ ID NO: 1980176 - DNA, 25 bp, Homo sapien
gatttcgtcacttcaaacaggtgcc

SEQ ID NO: 1980177 - DNA, 25 bp, Homo sapien
gagaatgggagagagaaccaactaa

SEQ ID NO: 1980178 - DNA, 25 bp, Homo sapien
ggagtgaaatggagtccatgacagc

SEQ ID NO: 1980179 - DNA, 25 bp, Homo sapien
ggagagagaaccaactaaacaatca

SEQ ID NO: 1980180 - DNA, 25 bp, Homo sapien
gtgaaatggagtccatgacagccac

SEQ ID NO: 1980181 - DNA, 25 bp, Homo sapien
gaaaacaggatattaccattgctca

SEQ ID NO: 1980182 - DNA, 25 bp, Homo sapien
tactccctgacatgatgcaatgagg

SEQ ID NO: 1980183 - DNA, 25 bp, Homo sapien
ctacaataaattgcaggcaagatcc

SEQ ID NO: 1980184 - DNA, 25 bp, Homo sapien
caaactcctactagtaaatgtaggg

SEQ ID NO: 1980185 - DNA, 25 bp, Homo sapien
ctgtttcactctcctcataaaaact

SEQ ID NO: 1980186 - DNA, 25 bp, Homo sapien
cattgtctagacgaacaacatattt

SEQ ID NO: 1980187 - DNA, 25 bp, Homo sapien
ttggtttgaatctcattgtctagac

SEQ ID NO: 1980188 - DNA, 25 bp, Homo sapien
tcactctcctcataaaaacttcaaa

SEQ ID NO: 1980189 - DNA, 25 bp, Homo sapien
tgtcatgaactagcacaaacagtgt

SEQ ID NO: 1980190 - DNA, 25 bp, Homo sapien
ctagcacaaacagtgtgtacgggtt

SEQ ID NO: 1980191 - DNA, 25 bp, Homo sapien
catgggagttgtcatgaactagcac

SEQ ID NO: 1980192 - DNA, 25 bp, Homo sapien
ctcgttagttccacatgggagttgt

SEQ ID NO: 1980193 - DNA, 25 bp, Homo sapien
tccatttgctcactctgaaccaatc

SEQ ID NO: 1980194 - DNA, 25 bp, Homo sapien
catttgctcactctgaaccaatcac

SEQ ID NO: 1980195 - DNA, 25 bp, Homo sapien
tattcctgtagaagggagactccat

SEQ ID NO: 1980196 - DNA, 25 bp, Homo sapien
taggtaacaattattcctgtagaag

SEQ ID NO: 1980197 - DNA, 25 bp, Homo sapien
ccaccacactgagttcctactggtg

SEQ ID NO: 1980198 - DNA, 25 bp, Homo sapien
gacccaccacactgagttcctactg

SEQ ID NO: 1980199 - DNA, 25 bp, Homo sapien
ccacactgagttcctactggtgcca

SEQ ID NO: 1980200 - DNA, 25 bp, Homo sapien
tgtggggtcagacccaccacactga

SEQ ID NO: 1980201 - DNA, 25 bp, Homo sapien
atgtgacaaagagcctgaaatgaca

SEQ ID NO: 1980202 - DNA, 25 bp, Homo sapien
tatgtgacaaagagcctgaaatgac

SEQ ID NO: 1980203 - DNA, 25 bp, Homo sapien
ctatgtgacaaagagcctgaaatga

SEQ ID NO: 1980204 - DNA, 25 bp, Homo sapien
ccagtgaacctcattgctagagcta

SEQ ID NO: 1980205 - DNA, 25 bp, Homo sapien
tgctagagctaatgcgggactgttg

SEQ ID NO: 1980206 - DNA, 25 bp, Homo sapien
tctgcagagtgtatgggaaggagct

SEQ ID NO: 1980207 - DNA, 25 bp, Homo sapien
gcaccaggaggttgaaagcttccag

SEQ ID NO: 1980208 - DNA, 25 bp, Homo sapien
catctcagaagtgggctcgtgatcc

SEQ ID NO: 1980209 - DNA, 25 bp, Homo sapien
tcgtcacatctcagaagtgggctcg

SEQ ID NO: 1980210 - DNA, 25 bp, Homo sapien
tctccaagagtgtgttcaccatttt

SEQ ID NO: 1980211 - DNA, 25 bp, Homo sapien
ttcaaaagtctcgtcacatctcaga

SEQ ID NO: 1980212 - DNA, 25 bp, Homo sapien
cctttgcacgtcatctgcaagggct

SEQ ID NO: 1980213 - DNA, 25 bp, Homo sapien
tctgcaagggctccatcaaacaccc

SEQ ID NO: 1980214 - DNA, 25 bp, Homo sapien
ggctattttagatctgcaagtacag

SEQ ID NO: 1980215 - DNA, 25 bp, Homo sapien
ccccgtagcactgacacaaaaggct

SEQ ID NO: 1980216 - DNA, 25 bp, Homo sapien
atcagggcctcagagtactgctgga

SEQ ID NO: 1980217 - DNA, 25 bp, Homo sapien
tgatgaggtcatccataatgctgag

SEQ ID NO: 1980218 - DNA, 25 bp, Homo sapien
tgagaagatagcagcggacgaccat

SEQ ID NO: 1980219 - DNA, 25 bp, Homo sapien
catggtggtgagagccatcagggcc

SEQ ID NO: 1980220 - DNA, 25 bp, Homo sapien
taatcgcgccacaaagtgagttgca

SEQ ID NO: 1980221 - DNA, 25 bp, Homo sapien
gtttgtcgcgcacctcctgtagccg

SEQ ID NO: 1980222 - DNA, 25 bp, Homo sapien
ttgcaacactgagttcggtggccgg

SEQ ID NO: 1980223 - DNA, 25 bp, Homo sapien
tgatctcaaaccgatactgcagacc

SEQ ID NO: 1980224 - DNA, 25 bp, Homo sapien
cttatacgtacttgttgcctggcag

SEQ ID NO: 1980225 - DNA, 25 bp, Homo sapien
tgtcactgccttgagaagtcgtaac

SEQ ID NO: 1980226 - DNA, 25 bp, Homo sapien
gcagccagaatatgggacactctta

SEQ ID NO: 1980227 - DNA, 25 bp, Homo sapien
cagtcttgcttacgatgtgaacatc

SEQ ID NO: 1980228 - DNA, 25 bp, Homo sapien
cttggtatgtccgagggatccactc

SEQ ID NO: 1980229 - DNA, 25 bp, Homo sapien
ggtttctccaagaggatctttgcca

SEQ ID NO: 1980230 - DNA, 25 bp, Homo sapien
tatcacaatacaaggtagaccgtct

SEQ ID NO: 1980231 - DNA, 25 bp, Homo sapien
ggatccactcttctggttcatttcc

SEQ ID NO: 1980232 - DNA, 25 bp, Homo sapien
aacaaaagtaattgtgttgttggtg

SEQ ID NO: 1980233 - DNA, 25 bp, Homo sapien
aaaagtaattgtgttgttggtgagt

SEQ ID NO: 1980234 - DNA, 25 bp, Homo sapien
ctgaacaaaagtaattgtgttgttg

SEQ ID NO: 1980235 - DNA, 25 bp, Homo sapien
caaaagtaattgtgttgttggtgag

SEQ ID NO: 1980236 - DNA, 25 bp, Homo sapien
ccaaggccgtgcgagttaaatagct

SEQ ID NO: 1980237 - DNA, 25 bp, Homo sapien
gcagctcatcggagtcattctcact

SEQ ID NO: 1980238 - DNA, 25 bp, Homo sapien
gcaacagtgggtccccggatgacct

SEQ ID NO: 1980239 - DNA, 25 bp, Homo sapien
taaccggaggtcacagtacttcaaa

SEQ ID NO: 1980240 - DNA, 25 bp, Homo sapien
cagcagctctgttactgatctaggg

SEQ ID NO: 1980241 - DNA, 25 bp, Homo sapien
gatctagggtgtggaagcagacaaa

SEQ ID NO: 1980242 - DNA, 25 bp, Homo sapien
ctcagttggtttggccaatggcagc

SEQ ID NO: 1980243 - DNA, 25 bp, Homo sapien
gggtgaaccacctttctctactgtg

SEQ ID NO: 1980244 - DNA, 25 bp, Homo sapien
tgtccttgttcaggagtggccgcag

SEQ ID NO: 1980245 - DNA, 25 bp, Homo sapien
tggcagcttgccactcttctgggag

SEQ ID NO: 1980246 - DNA, 25 bp, Homo sapien
caggagactgtaggccgctttggat

SEQ ID NO: 1980247 - DNA, 25 bp, Homo sapien
cgggtccagctggttgctatagtca

SEQ ID NO: 1980248 - DNA, 25 bp, Homo sapien
catcatacacgtccacctccaggag

SEQ ID NO: 1980249 - DNA, 25 bp, Homo sapien
gcctgatgagcatgcggaagaggat

SEQ ID NO: 1980250 - DNA, 25 bp, Homo sapien
tgtaaataggagcccgtctttccca

SEQ ID NO: 1980251 - DNA, 25 bp, Homo sapien
gaggatcctgaggaactgtaaatag

SEQ ID NO: 1980252 - DNA, 25 bp, Homo sapien
ggcattttactgaagctctcgatgt

SEQ ID NO: 1980253 - DNA, 25 bp, Homo sapien
caaactgtacttggggtcatgcaca

SEQ ID NO: 1980254 - DNA, 25 bp, Homo sapien
tatacaccaggctcatcaaactgta

SEQ ID NO: 1980255 - DNA, 25 bp, Homo sapien
ctgaagctctcgatgtcaggccagg

SEQ ID NO: 1980256 - DNA, 25 bp, Homo sapien
ggtgttataggctgcatatttggtc

SEQ ID NO: 1980257 - DNA, 25 bp, Homo sapien
cacagtggtgaaaggtgttataggc

SEQ ID NO: 1980258 - DNA, 25 bp, Homo sapien
ggtgaagtccatgtactggcggcac

SEQ ID NO: 1980259 - DNA, 25 bp, Homo sapien
ggtcagcattatggatacagtttcc

SEQ ID NO: 1980260 - DNA, 25 bp, Homo sapien
aatgtgggaatatactacttagtac

SEQ ID NO: 1980261 - DNA, 25 bp, Homo sapien
gcaactagaatcgaagtaggtttcc

SEQ ID NO: 1980262 - DNA, 25 bp, Homo sapien
caattttcatcagcaactagaatcg

SEQ ID NO: 1980263 - DNA, 25 bp, Homo sapien
tcccttaattctagtttattctgcc

SEQ ID NO: 1980264 - DNA, 25 bp, Homo sapien
tgaaatagagctgaacctcttctcc

SEQ ID NO: 1980265 - DNA, 25 bp, Homo sapien
gaatgatgaaatagagctgaacctc

SEQ ID NO: 1980266 - DNA, 25 bp, Homo sapien
tagagctgaacctcttctcccagca

SEQ ID NO: 1980267 - DNA, 25 bp, Homo sapien
tgggaatgatgaaatagagctgaac

SEQ ID NO: 1980268 - DNA, 25 bp, Homo sapien
ccagtacttgcggtacagaggcatc

SEQ ID NO: 1980269 - DNA, 25 bp, Homo sapien
tgatgccctccatggcgtggaaaag

SEQ ID NO: 1980270 - DNA, 25 bp, Homo sapien
tgctcatgtcgaccactggaaggag

SEQ ID NO: 1980271 - DNA, 25 bp, Homo sapien
cattattgaacatgccgggaagcac

SEQ ID NO: 1980272 - DNA, 25 bp, Homo sapien
ggaatctgaaagtttcatgccaggg

SEQ ID NO: 1980273 - DNA, 25 bp, Homo sapien
gacaatttctagaggcaggggaatc

SEQ ID NO: 1980274 - DNA, 25 bp, Homo sapien
aatggagctcagtttatcttcgaag

SEQ ID NO: 1980275 - DNA, 25 bp, Homo sapien
cagtttatcttcgaagcccttctcc

SEQ ID NO: 1980276 - DNA, 25 bp, Homo sapien
gcagatgggccaaactgtttagaac

SEQ ID NO: 1980277 - DNA, 25 bp, Homo sapien
gaactgcagcgcaagaagtgtccag

SEQ ID NO: 1980278 - DNA, 25 bp, Homo sapien
gaagagcgcagctctaaaacactgg

SEQ ID NO: 1980279 - DNA, 25 bp, Homo sapien
ttggcactgaggcaccgacagaagc

SEQ ID NO: 1980280 - DNA, 25 bp, Homo sapien
aaaatgggaacaagcagctcctgac

SEQ ID NO: 1980281 - DNA, 25 bp, Homo sapien
tttaaaatgggaacaagcagctcct

SEQ ID NO: 1980282 - DNA, 25 bp, Homo sapien
cctttaaaatgggaacaagcagctc

SEQ ID NO: 1980283 - DNA, 25 bp, Homo sapien
tccctttaaaatgggaacaagcagc

SEQ ID NO: 1980284 - DNA, 25 bp, Homo sapien
tcatgacgatgaaaggccagacaca

SEQ ID NO: 1980285 - DNA, 25 bp, Homo sapien
gacacactggcgtttaatgcctagc

SEQ ID NO: 1980286 - DNA, 25 bp, Homo sapien
gatggctcctgaacactgtgaatgt

SEQ ID NO: 1980287 - DNA, 25 bp, Homo sapien
tctaggttgtgatatgatagctcct

SEQ ID NO: 1980288 - DNA, 25 bp, Homo sapien
tcaatgtgctgcaagacagtcttca

SEQ ID NO: 1980289 - DNA, 25 bp, Homo sapien
tactggaaactcctacttccatggg

SEQ ID NO: 1980290 - DNA, 25 bp, Homo sapien
gaatgaaatcatgcacgtgacacct

SEQ ID NO: 1980291 - DNA, 25 bp, Homo sapien
ccatttctgtatgcccaagattgca

SEQ ID NO: 1980292 - DNA, 25 bp, Homo sapien
agatgagcaggccactactgtttgt

SEQ ID NO: 1980293 - DNA, 25 bp, Homo sapien
gaagttattaaagcggcagatgagc

SEQ ID NO: 1980294 - DNA, 25 bp, Homo sapien
tgataaagtccctttgccctccaac

SEQ ID NO: 1980295 - DNA, 25 bp, Homo sapien
taaagtcagcatcttcacagaaata

SEQ ID NO: 1980296 - DNA, 25 bp, Homo sapien
ccagtagtgtgtgttcactgtcggg

SEQ ID NO: 1980297 - DNA, 25 bp, Homo sapien
ggactcctgaagttatggatggctt

SEQ ID NO: 1980298 - DNA, 25 bp, Homo sapien
tgtcgggagcacagatgtattgaag

SEQ ID NO: 1980299 - DNA, 25 bp, Homo sapien
gaagagtttatatgaggcgtgctga

SEQ ID NO: 1980300 - DNA, 25 bp, Homo sapien
tttcttaagatcagcacctacaaaa

SEQ ID NO: 1980301 - DNA, 25 bp, Homo sapien
ctgaaaaacaccccttcacagttga

SEQ ID NO: 1980302 - DNA, 25 bp, Homo sapien
tcttaagatcagcacctacaaaaga

SEQ ID NO: 1980303 - DNA, 25 bp, Homo sapien
tacaaaaggagtccactgaaaaaca

SEQ ID NO: 1980304 - DNA, 25 bp, Homo sapien
cagtttgaaactcgtcccggaggcg

SEQ ID NO: 1980305 - DNA, 25 bp, Homo sapien
tcttggcagatgacacacagtgtag

SEQ ID NO: 1980306 - DNA, 25 bp, Homo sapien
tagctctaagcggacaattgtttgg

SEQ ID NO: 1980307 - DNA, 25 bp, Homo sapien
aattgtttggcgcaaggaacttctg

SEQ ID NO: 1980308 - DNA, 25 bp, Homo sapien
tagtaaacttctaactcctgtggaa

SEQ ID NO: 1980309 - DNA, 25 bp, Homo sapien
gctaggagaagatgcataaatgcac

SEQ ID NO: 1980310 - DNA, 25 bp, Homo sapien
gaaactgagggttcaggcctcaaac

SEQ ID NO: 1980311 - DNA, 25 bp, Homo sapien
taaatcttaaactaacactgcacag

SEQ ID NO: 1980312 - DNA, 25 bp, Homo sapien
tacagtaataacacgggtgccccat

SEQ ID NO: 1980313 - DNA, 25 bp, Homo sapien
cagagtgcagccctaactaatggag

SEQ ID NO: 1980314 - DNA, 25 bp, Homo sapien
taaagcatatataaggcaggtcctc

SEQ ID NO: 1980315 - DNA, 25 bp, Homo sapien
tgtgtgggcctagcgaatccattca

SEQ ID NO: 1980316 - DNA, 25 bp, Homo sapien
gctttggaatgtatagtggaacacc

SEQ ID NO: 1980317 - DNA, 25 bp, Homo sapien
gatgttgcagcagtcagtttcacag

SEQ ID NO: 1980318 - DNA, 25 bp, Homo sapien
tatttattgcccttcctgagggtcc

SEQ ID NO: 1980319 - DNA, 25 bp, Homo sapien
taatagtcttttcaaggcagctgct

SEQ ID NO: 1980320 - DNA, 25 bp, Homo sapien
cacctggccctagcttttgatactg

SEQ ID NO: 1980321 - DNA, 25 bp, Homo sapien
gactgttctagtcaatcctggtctc

SEQ ID NO: 1980322 - DNA, 25 bp, Homo sapien
cctggccctagcttttgatactgtc

SEQ ID NO: 1980323 - DNA, 25 bp, Homo sapien
gggcttgagactgttctagtcaatc

SEQ ID NO: 1980324 - DNA, 25 bp, Homo sapien
caagcattaggaaaggtaccctcct

SEQ ID NO: 1980325 - DNA, 25 bp, Homo sapien
acttggcacacctaggctgttaaca

SEQ ID NO: 1980326 - DNA, 25 bp, Homo sapien
aaagtatggatgactcggtatctgc

SEQ ID NO: 1980327 - DNA, 25 bp, Homo sapien
tcttggagagctgtaaatgacaagc

SEQ ID NO: 1980328 - DNA, 25 bp, Homo sapien
gattaataatctgataacaattgga

SEQ ID NO: 1980329 - DNA, 25 bp, Homo sapien
tgaactactacgcttggccaaaatt

SEQ ID NO: 1980330 - DNA, 25 bp, Homo sapien
gcttggctgacaccatttggggaaa

SEQ ID NO: 1980331 - DNA, 25 bp, Homo sapien
aattggaaatggctaaaagtcgtat

SEQ ID NO: 1980332 - DNA, 25 bp, Homo sapien
gattatataattatgcaggcattga

SEQ ID NO: 1980333 - DNA, 25 bp, Homo sapien
gctggttaaattagaggcaagctaa

SEQ ID NO: 1980334 - DNA, 25 bp, Homo sapien
gcaagctaatctaccattacagctc

SEQ ID NO: 1980335 - DNA, 25 bp, Homo sapien
tattcagtcctaataattgctggtt

SEQ ID NO: 1980336 - DNA, 25 bp, Homo sapien
ggcgtgaaccacagcgccggcccct

SEQ ID NO: 1980337 - DNA, 25 bp, Homo sapien
cggagttttgctcttacagcccagg

SEQ ID NO: 1980338 - DNA, 25 bp, Homo sapien
gcccctgctagagtgcagcggcgca

SEQ ID NO: 1980339 - DNA, 25 bp, Homo sapien
ttgcccctgctagagtgcagcggcg

SEQ ID NO: 1980340 - DNA, 25 bp, Homo sapien
taagattcacacaaaaactcagagg

SEQ ID NO: 1980341 - DNA, 25 bp, Homo sapien
tcctttagacatttatggcagcacg

SEQ ID NO: 1980342 - DNA, 25 bp, Homo sapien
tatgtaggactccaagtagcttttg

SEQ ID NO: 1980343 - DNA, 25 bp, Homo sapien
taagagcattctgttaacccagcca

SEQ ID NO: 1980344 - DNA, 25 bp, Homo sapien
agttcccagcactgccgcgagggct

SEQ ID NO: 1980345 - DNA, 25 bp, Homo sapien
tcataaggggtcgtgaccgccgacg

SEQ ID NO: 1980346 - DNA, 25 bp, Homo sapien
gagccccgaggtggcgcgcagccat

SEQ ID NO: 1980347 - DNA, 25 bp, Homo sapien
ttgctgggcggtcgaagttcataag

SEQ ID NO: 1980348 - DNA, 25 bp, Homo sapien
cctgatacccggatgtgaggcgatc

SEQ ID NO: 1980349 - DNA, 25 bp, Homo sapien
tccgccaggcaaaaggaaggtacgc

SEQ ID NO: 1980350 - DNA, 25 bp, Homo sapien
ggtaactcccatctgacgagcgagg

SEQ ID NO: 1980351 - DNA, 25 bp, Homo sapien
ccccttcagggagcggacagttctc

SEQ ID NO: 1980352 - DNA, 25 bp, Homo sapien
tggcggccatcttcgtcttctgggc

SEQ ID NO: 1980353 - DNA, 25 bp, Homo sapien
gggtgaaaaactgcgtgacacgcag

SEQ ID NO: 1980354 - DNA, 25 bp, Homo sapien
ctgaagaggagcgttgcgcaagcgc

SEQ ID NO: 1980355 - DNA, 25 bp, Homo sapien
tcttctgggcacgtcagctgagccg

SEQ ID NO: 1980356 - DNA, 25 bp, Homo sapien
ctgccaggcgaccacccgcggaggc

SEQ ID NO: 1980357 - DNA, 25 bp, Homo sapien
cgcggaggcgcgcgcgctaggcctc

SEQ ID NO: 1980358 - DNA, 25 bp, Homo sapien
cgctaggcctcccaccgcgcctgcg

SEQ ID NO: 1980359 - DNA, 25 bp, Homo sapien
cgcgcgctaggcctcccaccgcgcc

SEQ ID NO: 1980360 - DNA, 25 bp, Homo sapien
gaacgacaagcggccgccgctaggg

SEQ ID NO: 1980361 - DNA, 25 bp, Homo sapien
gacaagcggccgccgctagggggcg

SEQ ID NO: 1980362 - DNA, 25 bp, Homo sapien
caagcggccgccgctagggggcgcc

SEQ ID NO: 1980363 - DNA, 25 bp, Homo sapien
aggaacgacaagcggccgccgctag

SEQ ID NO: 1980364 - DNA, 25 bp, Homo sapien
cattggctcatatggaagaccaaag

SEQ ID NO: 1980365 - DNA, 25 bp, Homo sapien
cagttgcgacaaatttccaaggtaa

SEQ ID NO: 1980366 - DNA, 25 bp, Homo sapien
ggcacttggattatacatcgcagac

SEQ ID NO: 1980367 - DNA, 25 bp, Homo sapien
agaagcagccaaaacctacatggca

SEQ ID NO: 1980368 - DNA, 25 bp, Homo sapien
actccaggggctccggacgtcaaga

SEQ ID NO: 1980369 - DNA, 25 bp, Homo sapien
actgcaggcgcatggcggaaacgcc

SEQ ID NO: 1980370 - DNA, 25 bp, Homo sapien
ctggaggttgccttgcgacggctga

SEQ ID NO: 1980371 - DNA, 25 bp, Homo sapien
cggctgagggtatcgagggctggtc

SEQ ID NO: 1980372 - DNA, 25 bp, Homo sapien
actgcagtatgaatggccggaagcg

SEQ ID NO: 1980373 - DNA, 25 bp, Homo sapien
ctgcagtatgaatggccggaagcgc

SEQ ID NO: 1980374 - DNA, 25 bp, Homo sapien
gactgcagtatgaatggccggaagc

SEQ ID NO: 1980375 - DNA, 25 bp, Homo sapien
cgactgcagtatgaatggccggaag

SEQ ID NO: 1980376 - DNA, 25 bp, Homo sapien
ggtccgacagcacacagaatccttc

SEQ ID NO: 1980377 - DNA, 25 bp, Homo sapien
tctgggtccgacagcacacagaatc

SEQ ID NO: 1980378 - DNA, 25 bp, Homo sapien
tagcggcgccgtcaccctctgggtc

SEQ ID NO: 1980379 - DNA, 25 bp, Homo sapien
ctgggtccgacagcacacagaatcc

SEQ ID NO: 1980380 - DNA, 25 bp, Homo sapien
tcttcaattcaatggttacagtttc

SEQ ID NO: 1980381 - DNA, 25 bp, Homo sapien
tcaatggttacagtttcatgactca

SEQ ID NO: 1980382 - DNA, 25 bp, Homo sapien
ctgtgattgttccatggacctgtgt

SEQ ID NO: 1980383 - DNA, 25 bp, Homo sapien
tccatggacctgtgttccgttcttc

SEQ ID NO: 1980384 - DNA, 25 bp, Homo sapien
atgcagcaagccatggaagaaccct

SEQ ID NO: 1980385 - DNA, 25 bp, Homo sapien
tggaagaaccctgactgggctttag

SEQ ID NO: 1980386 - DNA, 25 bp, Homo sapien
agaagtgaatgcagcaagccatgga

SEQ ID NO: 1980387 - DNA, 25 bp, Homo sapien
agaaccctgactgggctttaggctc

SEQ ID NO: 1980388 - DNA, 25 bp, Homo sapien
cgaatgttatttcctcgaatactca

SEQ ID NO: 1980389 - DNA, 25 bp, Homo sapien
tggtagaataaaataccgaatgtta

SEQ ID NO: 1980390 - DNA, 25 bp, Homo sapien
cgaatactcagcgtttccagctgta

SEQ ID NO: 1980391 - DNA, 25 bp, Homo sapien
agctgtacaggttctctgttcttca

SEQ ID NO: 1980392 - DNA, 25 bp, Homo sapien
cttagatttcaccttaggttcaaca

SEQ ID NO: 1980393 - DNA, 25 bp, Homo sapien
ttagatttcaccttaggttcaacat

SEQ ID NO: 1980394 - DNA, 25 bp, Homo sapien
aatgggccaaattgaccacacttac

SEQ ID NO: 1980395 - DNA, 25 bp, Homo sapien
tcgaacttccgagttcaggcgatct

SEQ ID NO: 1980396 - DNA, 25 bp, Homo sapien
gaacttccgagttcaggcgatctgc

SEQ ID NO: 1980397 - DNA, 25 bp, Homo sapien
atgggccaaattgaccacacttacc

SEQ ID NO: 1980398 - DNA, 25 bp, Homo sapien
tgagatcttgtctcttaccaaacaa

SEQ ID NO: 1980399 - DNA, 25 bp, Homo sapien
ggaggccaacgcagaagacagcctg

SEQ ID NO: 1980400 - DNA, 25 bp, Homo sapien
gatcttgtctcttaccaaacaaaca

SEQ ID NO: 1980401 - DNA, 25 bp, Homo sapien
ggccaacgcagaagacagcctgaag

SEQ ID NO: 1980402 - DNA, 25 bp, Homo sapien
tcaattctctcctgcaccaatgtta

SEQ ID NO: 1980403 - DNA, 25 bp, Homo sapien
caattctctcctgcaccaatgttac

SEQ ID NO: 1980404 - DNA, 25 bp, Homo sapien
tatcgcctaggaccccctcttcctc

SEQ ID NO: 1980405 - DNA, 25 bp, Homo sapien
catatgactttgaaatcttgagaga

SEQ ID NO: 1980406 - DNA, 25 bp, Homo sapien
atatgactttgaaatcttgagagac

SEQ ID NO: 1980407 - DNA, 25 bp, Homo sapien
gtaatttcgtgaatgtggaggaaac

SEQ ID NO: 1980408 - DNA, 25 bp, Homo sapien
aatgcttagctctcactgtggtaat

SEQ ID NO: 1980409 - DNA, 25 bp, Homo sapien
aaactgcccagtagaaatgcttagc

SEQ ID NO: 1980410 - DNA, 25 bp, Homo sapien
taaaactttgatatactaaatagac

SEQ ID NO: 1980411 - DNA, 25 bp, Homo sapien
cagacggtaccctactcttgtggca

SEQ ID NO: 1980412 - DNA, 25 bp, Homo sapien
taaatcttcaactatgcagctgggc

SEQ ID NO: 1980413 - DNA, 25 bp, Homo sapien
tagaactgtagcctaactggacgtg

SEQ ID NO: 1980414 - DNA, 25 bp, Homo sapien
caggtacctaagactccgtggagta

SEQ ID NO: 1980415 - DNA, 25 bp, Homo sapien
gaaaatacagatttaagccacccac

SEQ ID NO: 1980416 - DNA, 25 bp, Homo sapien
tacttcgtagtaagctttacaaaga

SEQ ID NO: 1980417 - DNA, 25 bp, Homo sapien
tccttagcatataaatacttcgtag

SEQ ID NO: 1980418 - DNA, 25 bp, Homo sapien
cgatctttgcagaaaatttctttac

SEQ ID NO: 1980419 - DNA, 25 bp, Homo sapien
tcacagatccacaagaatttcacat

SEQ ID NO: 1980420 - DNA, 25 bp, Homo sapien
cagatatacttttaatgcctttaga

SEQ ID NO: 1980421 - DNA, 25 bp, Homo sapien
gaattgtttgctgactacattaatc

SEQ ID NO: 1980422 - DNA, 25 bp, Homo sapien
caaaatactaagttatgctcacata

SEQ ID NO: 1980423 - DNA, 25 bp, Homo sapien
tattttagcttctagaattccatgg

SEQ ID NO: 1980424 - DNA, 25 bp, Homo sapien
ccagatgcatcagacttacccgaga

SEQ ID NO: 1980425 - DNA, 25 bp, Homo sapien
tcagacttacccgagaggttcccca

SEQ ID NO: 1980426 - DNA, 25 bp, Homo sapien
tctagaattccatggctgattttca

SEQ ID NO: 1980427 - DNA, 25 bp, Homo sapien
caaggagcagacatggaagtgactc

SEQ ID NO: 1980428 - DNA, 25 bp, Homo sapien
cttcagaatagaagtcggattcaga

SEQ ID NO: 1980429 - DNA, 25 bp, Homo sapien
gattcagattgtgcagaaatataca

SEQ ID NO: 1980430 - DNA, 25 bp, Homo sapien
ggccagattaatctcgaatttctga

SEQ ID NO: 1980431 - DNA, 25 bp, Homo sapien
cttctcacaccaggatttttctccg

SEQ ID NO: 1980432 - DNA, 25 bp, Homo sapien
caccttctctatgcacaccttgtct

SEQ ID NO: 1980433 - DNA, 25 bp, Homo sapien
ggtaagtaacaggtgacaccttctc

SEQ ID NO: 1980434 - DNA, 25 bp, Homo sapien
tctccgacagaaggtaagtaacagg

SEQ ID NO: 1980435 - DNA, 25 bp, Homo sapien
taacacgttgagagaaccatgtaca

SEQ ID NO: 1980436 - DNA, 25 bp, Homo sapien
tggctagttatctcctaaacacagg

SEQ ID NO: 1980437 - DNA, 25 bp, Homo sapien
gggaagagtggagccagacacatct

SEQ ID NO: 1980438 - DNA, 25 bp, Homo sapien
gaagatgtacttgtagactccctca

SEQ ID NO: 1980439 - DNA, 25 bp, Homo sapien
ggatcgtgtcttcaagcaatttgtg

SEQ ID NO: 1980440 - DNA, 25 bp, Homo sapien
ggacatgaactctcttaacatgtag

SEQ ID NO: 1980441 - DNA, 25 bp, Homo sapien
tgcaagccatggttgagcatggaca

SEQ ID NO: 1980442 - DNA, 25 bp, Homo sapien
catgtagttctttgggtgcattttg

SEQ ID NO: 1980443 - DNA, 25 bp, Homo sapien
aaggctgccctaaggtgtgattgtg

SEQ ID NO: 1980444 - DNA, 25 bp, Homo sapien
ctgccctaaggtgtgattgtgtcac

SEQ ID NO: 1980445 - DNA, 25 bp, Homo sapien
ggccgggtgcaacggctgtaatctc

SEQ ID NO: 1980446 - DNA, 25 bp, Homo sapien
aaaggccgggtgcaacggctgtaat

SEQ ID NO: 1980447 - DNA, 25 bp, Homo sapien
gggccaccaaaactaggactctaga

SEQ ID NO: 1980448 - DNA, 25 bp, Homo sapien
ggactctagaatgaaccctttgcag

SEQ ID NO: 1980449 - DNA, 25 bp, Homo sapien
aagacgtattccacctgcttggtca

SEQ ID NO: 1980450 - DNA, 25 bp, Homo sapien
tctgacctcccatcaaagagtaggg

SEQ ID NO: 1980451 - DNA, 25 bp, Homo sapien
ttacagaaataatcacttattgctc

SEQ ID NO: 1980452 - DNA, 25 bp, Homo sapien
tacagaaataatcacttattgctct

SEQ ID NO: 1980453 - DNA, 25 bp, Homo sapien
gttacagaaataatcacttattgct

SEQ ID NO: 1980454 - DNA, 25 bp, Homo sapien
attcctgacgcactcccagccatcc

SEQ ID NO: 1980455 - DNA, 25 bp, Homo sapien
tgattcctgacgcactcccagccat

SEQ ID NO: 1980456 - DNA, 25 bp, Homo sapien
ttctgattcctgacgcactcccagc

SEQ ID NO: 1980457 - DNA, 25 bp, Homo sapien
ccttctgattcctgacgcactccca

SEQ ID NO: 1980458 - DNA, 25 bp, Homo sapien
ggctgtctctttgagaggactataa

SEQ ID NO: 1980459 - DNA, 25 bp, Homo sapien
aactacgggtctctgtgactgcgga

SEQ ID NO: 1980460 - DNA, 25 bp, Homo sapien
tgtctgaagcccatgaagtcgattg

SEQ ID NO: 1980461 - DNA, 25 bp, Homo sapien
attaaatgcggttgattgaatgaac

SEQ ID NO: 1980462 - DNA, 25 bp, Homo sapien
tgctctggttaagttggagacacgt

SEQ ID NO: 1980463 - DNA, 25 bp, Homo sapien
aggtatttgtattggtcttgcccca

SEQ ID NO: 1980464 - DNA, 25 bp, Homo sapien
ggtctttttgttagtgccaactcta

SEQ ID NO: 1980465 - DNA, 25 bp, Homo sapien
gcatcaagccttccttgcatgttca

SEQ ID NO: 1980466 - DNA, 25 bp, Homo sapien
aatcttcgtgcatgttgagtctgaa

SEQ ID NO: 1980467 - DNA, 25 bp, Homo sapien
ggtagaacattacagggcagctgcc

SEQ ID NO: 1980468 - DNA, 25 bp, Homo sapien
ttaatcttcgtgcatgttgagtctg

SEQ ID NO: 1980469 - DNA, 25 bp, Homo sapien
gagtctgaagtactggtagaacatt

SEQ ID NO: 1980470 - DNA, 25 bp, Homo sapien
caggattgggcagtttatcagctgt

SEQ ID NO: 1980471 - DNA, 25 bp, Homo sapien
ggattgggcagtttatcagctgtgc

SEQ ID NO: 1980472 - DNA, 25 bp, Homo sapien
ctgtactcgagaggagtttcctttc

SEQ ID NO: 1980473 - DNA, 25 bp, Homo sapien
tatcagctgtgcagttaagggagag

SEQ ID NO: 1980474 - DNA, 25 bp, Homo sapien
gctggacagggcaattagcaggatt

SEQ ID NO: 1980475 - DNA, 25 bp, Homo sapien
gacagggcaattagcaggattgaga

SEQ ID NO: 1980476 - DNA, 25 bp, Homo sapien
caattagcaggattgagaacagctg

SEQ ID NO: 1980477 - DNA, 25 bp, Homo sapien
agcaggctggacagggcaattagca

SEQ ID NO: 1980478 - DNA, 25 bp, Homo sapien
gcccgagtaacagaatttaaccaga

SEQ ID NO: 1980479 - DNA, 25 bp, Homo sapien
taatgggtcccaagttctgtaggct

SEQ ID NO: 1980480 - DNA, 25 bp, Homo sapien
ttctgggtgattctttaatgggtcc

SEQ ID NO: 1980481 - DNA, 25 bp, Homo sapien
tgccagttgcattactagcccgagt

SEQ ID NO: 1980482 - DNA, 25 bp, Homo sapien
aaaggaatgaagtcggctgggcata

SEQ ID NO: 1980483 - DNA, 25 bp, Homo sapien
tccatatcctggaatactattccac

SEQ ID NO: 1980484 - DNA, 25 bp, Homo sapien
gcaaaatgtgatagctccatatcct

SEQ ID NO: 1980485 - DNA, 25 bp, Homo sapien
gtagaaacaacccagatattcatca

SEQ ID NO: 1980486 - DNA, 25 bp, Homo sapien
ttctaccctctcaacccagcttttc

SEQ ID NO: 1980487 - DNA, 25 bp, Homo sapien
tcaacccagcttttcctgactctgg

SEQ ID NO: 1980488 - DNA, 25 bp, Homo sapien
ctgactctgggaagaactgggaaga

SEQ ID NO: 1980489 - DNA, 25 bp, Homo sapien
tttcctgactctgggaagaactggg

SEQ ID NO: 1980490 - DNA, 25 bp, Homo sapien
caggtgcggggccttaaccagcgct

SEQ ID NO: 1980491 - DNA, 25 bp, Homo sapien
cgcagagcggaatcgttcaaggtca

SEQ ID NO: 1980492 - DNA, 25 bp, Homo sapien
actgctagtttagggacacccgccg

SEQ ID NO: 1980493 - DNA, 25 bp, Homo sapien
ttaaccagcgctgccgatccgtcag

SEQ ID NO: 1980494 - DNA, 25 bp, Homo sapien
tacactatcttgtcctctcgggaac

SEQ ID NO: 1980495 - DNA, 25 bp, Homo sapien
agagccagagcgtgaaaattacttc

SEQ ID NO: 1980496 - DNA, 25 bp, Homo sapien
ggtgctgcagccaaccaccaagttg

SEQ ID NO: 1980497 - DNA, 25 bp, Homo sapien
caagttgcaatgaccaaatcggagc

SEQ ID NO: 1980498 - DNA, 25 bp, Homo sapien
cacaacgtggaaggcgaccccagta

SEQ ID NO: 1980499 - DNA, 25 bp, Homo sapien
gaaggcgaccccagtaggttgcctc

SEQ ID NO: 1980500 - DNA, 25 bp, Homo sapien
cgaccccagtaggttgcctctgctg

SEQ ID NO: 1980501 - DNA, 25 bp, Homo sapien
ccagtaggttgcctctgctggctcg

SEQ ID NO: 1980502 - DNA, 25 bp, Homo sapien
tggtgagctagtgtggtttcttttt

SEQ ID NO: 1980503 - DNA, 25 bp, Homo sapien
attctataagtgcatccattgtttc

SEQ ID NO: 1980504 - DNA, 25 bp, Homo sapien
tctataagtgcatccattgtttcct

SEQ ID NO: 1980505 - DNA, 25 bp, Homo sapien
cattctataagtgcatccattgttt

SEQ ID NO: 1980506 - DNA, 25 bp, Homo sapien
ttctataagtgcatccattgtttcc

SEQ ID NO: 1980507 - DNA, 25 bp, Homo sapien
tattgatgcgtaagaactcagccaa

SEQ ID NO: 1980508 - DNA, 25 bp, Homo sapien
caaggaaggtgcctgaacttgaacc

SEQ ID NO: 1980509 - DNA, 25 bp, Homo sapien
gtaactcacccaagatagttggcca

SEQ ID NO: 1980510 - DNA, 25 bp, Homo sapien
tcataaccctcccaatgggtcggga

SEQ ID NO: 1980511 - DNA, 25 bp, Homo sapien
ggctcacacctttattccctcagga

SEQ ID NO: 1980512 - DNA, 25 bp, Homo sapien
gtagccagctcccacctacttcagg

SEQ ID NO: 1980513 - DNA, 25 bp, Homo sapien
tctctactgaatgggtgccaaaact

SEQ ID NO: 1980514 - DNA, 25 bp, Homo sapien
tcaggtgtgggtacacacgccggta

SEQ ID NO: 1980515 - DNA, 25 bp, Homo sapien
taggagggggatcctcggcaataat

SEQ ID NO: 1980516 - DNA, 25 bp, Homo sapien
cgccgtacccaaggccggagcggca

SEQ ID NO: 1980517 - DNA, 25 bp, Homo sapien
tctaggagggggatcctcggcaata

SEQ ID NO: 1980518 - DNA, 25 bp, Homo sapien
caccttctcagagtgtctaggaggg

SEQ ID NO: 1980519 - DNA, 25 bp, Homo sapien
gcgctccgccccgccacagagtccc

SEQ ID NO: 1980520 - DNA, 25 bp, Homo sapien
cgctccgccccgccacagagtccca

SEQ ID NO: 1980521 - DNA, 25 bp, Homo sapien
gctccgccccgccacagagtcccag

SEQ ID NO: 1980522 - DNA, 25 bp, Homo sapien
gacggccgcaaggaaaccacgctct

SEQ ID NO: 1980523 - DNA, 25 bp, Homo sapien
gcgacggccgcaaggaaaccacgct

SEQ ID NO: 1980524 - DNA, 25 bp, Homo sapien
ctacagcgacggccgcaaggaaacc

SEQ ID NO: 1980525 - DNA, 25 bp, Homo sapien
cagcgacggccgcaaggaaaccacg

SEQ ID NO: 1980526 - DNA, 25 bp, Homo sapien
gactctcccgcttcctccgggctcc

SEQ ID NO: 1980527 - DNA, 25 bp, Homo sapien
gcggcggcggagagcgggcagaggg

SEQ ID NO: 1980528 - DNA, 25 bp, Homo sapien
ggcggagagcgggcagaggggaggg

SEQ ID NO: 1980529 - DNA, 25 bp, Homo sapien
tgggcggggactctcccgcttcctc

SEQ ID NO: 1980530 - DNA, 25 bp, Homo sapien
cgccccccgctcggagtggagggcg

SEQ ID NO: 1980531 - DNA, 25 bp, Homo sapien
gtccccgcggagcccaaagccgctg

SEQ ID NO: 1980532 - DNA, 25 bp, Homo sapien
cccgctcggagtggagggcggcccg

SEQ ID NO: 1980533 - DNA, 25 bp, Homo sapien
cgcgccccccgctcggagtggaggg

SEQ ID NO: 1980534 - DNA, 25 bp, Homo sapien
cgggccggactctaggcgtcggcgg

SEQ ID NO: 1980535 - DNA, 25 bp, Homo sapien
ccgggccggactctaggcgtcggcg

SEQ ID NO: 1980536 - DNA, 25 bp, Homo sapien
gggctctcgaagctccggacggtgc

SEQ ID NO: 1980537 - DNA, 25 bp, Homo sapien
ccaggatgcggaggtcgtaagcccc

SEQ ID NO: 1980538 - DNA, 25 bp, Homo sapien
gcagctgtgccgttgtcccacacta

SEQ ID NO: 1980539 - DNA, 25 bp, Homo sapien
gtccgggccgcgcactacccgagcg

SEQ ID NO: 1980540 - DNA, 25 bp, Homo sapien
tcggaacctagaattcctttggcgc

SEQ ID NO: 1980541 - DNA, 25 bp, Homo sapien
tcttcccggtgctttgtgtcttcca

SEQ ID NO: 1980542 - DNA, 25 bp, Homo sapien
ggacctgtgtctgttctcttcccgg

SEQ ID NO: 1980543 - DNA, 25 bp, Homo sapien
gcttattagataggcctctccagac

SEQ ID NO: 1980544 - DNA, 25 bp, Homo sapien
gccccttggcaattataaacggtca

SEQ ID NO: 1980545 - DNA, 25 bp, Homo sapien
tccacaaatccgaggtaccaaggcc

SEQ ID NO: 1980546 - DNA, 25 bp, Homo sapien
ggtcagctgagcaccatatggcaaa

SEQ ID NO: 1980547 - DNA, 25 bp, Homo sapien
tgacatcaccttactgagacggacg

SEQ ID NO: 1980548 - DNA, 25 bp, Homo sapien
ggttgctggcggcaggtatcacaca

SEQ ID NO: 1980549 - DNA, 25 bp, Homo sapien
cacttccatcgaatgccaatgattg

SEQ ID NO: 1980550 - DNA, 25 bp, Homo sapien
gtagtaattcggtaaaagcgatgtc

SEQ ID NO: 1980551 - DNA, 25 bp, Homo sapien
taatttgtacactctgcacacttcc

SEQ ID NO: 1980552 - DNA, 25 bp, Homo sapien
ttcccctacgtccatttcctccatc

SEQ ID NO: 1980553 - DNA, 25 bp, Homo sapien
ctgtaatcttcttagatttcctacg

SEQ ID NO: 1980554 - DNA, 25 bp, Homo sapien
cctacgtccatttcctccatcttga

SEQ ID NO: 1980555 - DNA, 25 bp, Homo sapien
aatcttcttagatttcctacgagac

SEQ ID NO: 1980556 - DNA, 25 bp, Homo sapien
aattgttgaagttgggtatgagtgc

SEQ ID NO: 1980557 - DNA, 25 bp, Homo sapien
atgagtgcatgggaatttattatac

SEQ ID NO: 1980558 - DNA, 25 bp, Homo sapien
gaatactataaagaatcaattggcc

SEQ ID NO: 1980559 - DNA, 25 bp, Homo sapien
caaacagctttaaaagactaacacg

SEQ ID NO: 1980560 - DNA, 25 bp, Homo sapien
cctgtgtaacaggatcatgaaaaat

SEQ ID NO: 1980561 - DNA, 25 bp, Homo sapien
aaaatacttatttgccaaatatgtc

SEQ ID NO: 1980562 - DNA, 25 bp, Homo sapien
tctagcaacctgtgtaacaggatca

SEQ ID NO: 1980563 - DNA, 25 bp, Homo sapien
catttcatctagcaacctgtgtaac

SEQ ID NO: 1980564 - DNA, 25 bp, Homo sapien
aaggttcttagcaccattatcccag

SEQ ID NO: 1980565 - DNA, 25 bp, Homo sapien
ttatcccagaggacatatgctgcgc

SEQ ID NO: 1980566 - DNA, 25 bp, Homo sapien
gccaactctgtaaaggttcttagca

SEQ ID NO: 1980567 - DNA, 25 bp, Homo sapien
tatgtgggcttgatgcactccagtc

SEQ ID NO: 1980568 - DNA, 25 bp, Homo sapien
cctgctatggctcttcactacttac

SEQ ID NO: 1980569 - DNA, 25 bp, Homo sapien
cacctgctatggctcttcactactt

SEQ ID NO: 1980570 - DNA, 25 bp, Homo sapien
acctgctatggctcttcactactta

SEQ ID NO: 1980571 - DNA, 25 bp, Homo sapien
ttcacctgctatggctcttcactac

SEQ ID NO: 1980572 - DNA, 25 bp, Homo sapien
tgaatacggaatgtattcaaaatga

SEQ ID NO: 1980573 - DNA, 25 bp, Homo sapien
aattctttgaatacggaatgtattc

SEQ ID NO: 1980574 - DNA, 25 bp, Homo sapien
cactgggatacttcctccattccta

SEQ ID NO: 1980575 - DNA, 25 bp, Homo sapien
atacggaatgtattcaaaatgaaaa

SEQ ID NO: 1980576 - DNA, 25 bp, Homo sapien
aaagaacctcccttggcatcctgga

SEQ ID NO: 1980577 - DNA, 25 bp, Homo sapien
gggcagtgatctctgtagaaagaac

SEQ ID NO: 1980578 - DNA, 25 bp, Homo sapien
agaaagaacctcccttggcatcctg

SEQ ID NO: 1980579 - DNA, 25 bp, Homo sapien
gcagtgatctctgtagaaagaacct

SEQ ID NO: 1980580 - DNA, 25 bp, Homo sapien
gaggtcgagatctatatttaccagg

SEQ ID NO: 1980581 - DNA, 25 bp, Homo sapien
tattgccacttggatactgtactac

SEQ ID NO: 1980582 - DNA, 25 bp, Homo sapien
caaagactgtacaatttcgaggtcg

SEQ ID NO: 1980583 - DNA, 25 bp, Homo sapien
tcatcaatgccacaaacagttccag

SEQ ID NO: 1980584 - DNA, 25 bp, Homo sapien
tataagagagtcatgtaccgacacc

SEQ ID NO: 1980585 - DNA, 25 bp, Homo sapien
ggaaatactgccatctattgtgggt

SEQ ID NO: 1980586 - DNA, 25 bp, Homo sapien
tgggagaaaggcatacaacagattc

SEQ ID NO: 1980587 - DNA, 25 bp, Homo sapien
gaacaaagattgctgggaaccacca

SEQ ID NO: 1980588 - DNA, 25 bp, Homo sapien
caccgccccagcacctcctttttat

SEQ ID NO: 1980589 - DNA, 25 bp, Homo sapien
cgccccagcacctcctttttataat

SEQ ID NO: 1980590 - DNA, 25 bp, Homo sapien
gtgaaccaccgccccagcacctcct

SEQ ID NO: 1980591 - DNA, 25 bp, Homo sapien
ggtgtgaaccaccgccccagcacct

SEQ ID NO: 1980592 - DNA, 25 bp, Homo sapien
gagcagcatctccacttcggacaat

SEQ ID NO: 1980593 - DNA, 25 bp, Homo sapien
gaagtttaattcgttccaggtcata

SEQ ID NO: 1980594 - DNA, 25 bp, Homo sapien
ccacttgaaactgcgaggtgcctcc

SEQ ID NO: 1980595 - DNA, 25 bp, Homo sapien
ctttagtgagaacagcaggattgaa

SEQ ID NO: 1980596 - DNA, 25 bp, Homo sapien
agttccatcctttctgactttagca

SEQ ID NO: 1980597 - DNA, 25 bp, Homo sapien
ccacgtctggcctgatatactttca

SEQ ID NO: 1980598 - DNA, 25 bp, Homo sapien
ggaatttaaccatgatcccttctaa

SEQ ID NO: 1980599 - DNA, 25 bp, Homo sapien
tttctcctcaaagtgaggctctgcc

SEQ ID NO: 1980600 - DNA, 25 bp, Homo sapien
tcatttttctgcacgtatctttctg

SEQ ID NO: 1980601 - DNA, 25 bp, Homo sapien
ttttctgcacgtatctttctgatat

SEQ ID NO: 1980602 - DNA, 25 bp, Homo sapien
tttttctgcacgtatctttctgata

SEQ ID NO: 1980603 - DNA, 25 bp, Homo sapien
catttttctgcacgtatctttctga

SEQ ID NO: 1980604 - DNA, 25 bp, Homo sapien
agttccccacgccacaggcaacctg

SEQ ID NO: 1980605 - DNA, 25 bp, Homo sapien
atccacactacacccagagctcttg

SEQ ID NO: 1980606 - DNA, 25 bp, Homo sapien
ggtcacatccttgccgaacttagtg

SEQ ID NO: 1980607 - DNA, 25 bp, Homo sapien
tagtgcagacatccacactacaccc

SEQ ID NO: 1980608 - DNA, 25 bp, Homo sapien
gaaactgctgctggattgtatgtcc

SEQ ID NO: 1980609 - DNA, 25 bp, Homo sapien
tttaaatcactgtctgaataaatct

SEQ ID NO: 1980610 - DNA, 25 bp, Homo sapien
gatgttccacaaacttccaccttta

SEQ ID NO: 1980611 - DNA, 25 bp, Homo sapien
cagatgcattgctaatggctgatcc

SEQ ID NO: 1980612 - DNA, 25 bp, Homo sapien
aaatcttccactttagcaacatctc

SEQ ID NO: 1980613 - DNA, 25 bp, Homo sapien
tctggtcttttaagcaaatcttcca

SEQ ID NO: 1980614 - DNA, 25 bp, Homo sapien
aactaattcttcattgaggtcacca

SEQ ID NO: 1980615 - DNA, 25 bp, Homo sapien
cattgaggtcaccagattcttgggt

SEQ ID NO: 1980616 - DNA, 25 bp, Homo sapien
tctgcttcgacatccacgttttgct

SEQ ID NO: 1980617 - DNA, 25 bp, Homo sapien
tagcagcttgcatagctgtgtggcc

SEQ ID NO: 1980618 - DNA, 25 bp, Homo sapien
aaaatgtcaacatgtccattctgac

SEQ ID NO: 1980619 - DNA, 25 bp, Homo sapien
cgacatccacgttttgcttcaaaag

SEQ ID NO: 1980620 - DNA, 25 bp, Homo sapien
tgtgaatcagtgcatttggccgata

SEQ ID NO: 1980621 - DNA, 25 bp, Homo sapien
cacttctacaaaccgcacctgctta

SEQ ID NO: 1980622 - DNA, 25 bp, Homo sapien
tacaaaccgcacctgcttataatga

SEQ ID NO: 1980623 - DNA, 25 bp, Homo sapien
aaaccgcacctgcttataatgaatt

SEQ ID NO: 1980624 - DNA, 25 bp, Homo sapien
agtccttgatgcctttacctatacg

SEQ ID NO: 1980625 - DNA, 25 bp, Homo sapien
gacaaagtctagtattgttccctac

SEQ ID NO: 1980626 - DNA, 25 bp, Homo sapien
agtccatctagccaaaaaatttggg

SEQ ID NO: 1980627 - DNA, 25 bp, Homo sapien
gagtccacggcagatccaaaattag

SEQ ID NO: 1980628 - DNA, 25 bp, Homo sapien
gtatccttgccctgttcttataaga

SEQ ID NO: 1980629 - DNA, 25 bp, Homo sapien
tctggtcaattggaaagattatgca

SEQ ID NO: 1980630 - DNA, 25 bp, Homo sapien
gaactggtaaaagcaggtatccttg

SEQ ID NO: 1980631 - DNA, 25 bp, Homo sapien
tgaggtaattccctactattccaag

SEQ ID NO: 1980632 - DNA, 25 bp, Homo sapien
tacatatgaatatctagttgcccaa

SEQ ID NO: 1980633 - DNA, 25 bp, Homo sapien
tatatcgcacttttagatctttcag

SEQ ID NO: 1980634 - DNA, 25 bp, Homo sapien
ccaccctaatggctgtaaggcagta

SEQ ID NO: 1980635 - DNA, 25 bp, Homo sapien
gaatcactgccagatacaatgctgt

SEQ ID NO: 1980636 - DNA, 25 bp, Homo sapien
ttgtgattcaccttccattaaaaaa

SEQ ID NO: 1980637 - DNA, 25 bp, Homo sapien
gaaaatcactactgaaacacttaat

SEQ ID NO: 1980638 - DNA, 25 bp, Homo sapien
aaaaactgatatgtttgtcaaaagg

SEQ ID NO: 1980639 - DNA, 25 bp, Homo sapien
taatgcaggctgtcaataatttaca

SEQ ID NO: 1980640 - DNA, 25 bp, Homo sapien
ctgcatggtgaactgctctatcacc

SEQ ID NO: 1980641 - DNA, 25 bp, Homo sapien
tgtttcgagcattcaaatcagcact

SEQ ID NO: 1980642 - DNA, 25 bp, Homo sapien
tatgaagtggtgtctgtcggcgctt

SEQ ID NO: 1980643 - DNA, 25 bp, Homo sapien
gatgtagtacttctataacagcgcc

SEQ ID NO: 1980644 - DNA, 25 bp, Homo sapien
ctgcaggatgtgtttctttaaaggt

SEQ ID NO: 1980645 - DNA, 25 bp, Homo sapien
tgcaggatgtgtttctttaaaggtt

SEQ ID NO: 1980646 - DNA, 25 bp, Homo sapien
tatcccaggatattacacattggag

SEQ ID NO: 1980647 - DNA, 25 bp, Homo sapien
gaaaaaatgatatcccaggatatta

SEQ ID NO: 1980648 - DNA, 25 bp, Homo sapien
aaaaatgatatcccaggatattaca

SEQ ID NO: 1980649 - DNA, 25 bp, Homo sapien
gatatcccaggatattacacattgg

SEQ ID NO: 1980650 - DNA, 25 bp, Homo sapien
cccaccaccatgcccagctaatttt

SEQ ID NO: 1980651 - DNA, 25 bp, Homo sapien
cctccactttccggtttcaagcgat

SEQ ID NO: 1980652 - DNA, 25 bp, Homo sapien
ccaccaccatgcccagctaattttt

SEQ ID NO: 1980653 - DNA, 25 bp, Homo sapien
tgcaacctccactttccggtttcaa

SEQ ID NO: 1980654 - DNA, 25 bp, Homo sapien
gtttgtgatggtaacatctgctcca

SEQ ID NO: 1980655 - DNA, 25 bp, Homo sapien
tgggatttccccttagtgcagcatg

SEQ ID NO: 1980656 - DNA, 25 bp, Homo sapien
aaagaactgctaggatatcatcacg

SEQ ID NO: 1980657 - DNA, 25 bp, Homo sapien
gcatgatgcagagcattaaatccat

SEQ ID NO: 1980658 - DNA, 25 bp, Homo sapien
gaccactcctccatttcaaaatgaa

SEQ ID NO: 1980659 - DNA, 25 bp, Homo sapien
tctcaactcctgaccactcctccat

SEQ ID NO: 1980660 - DNA, 25 bp, Homo sapien
tttcaaaatgaacatcattctctaa

SEQ ID NO: 1980661 - DNA, 25 bp, Homo sapien
tcacacattctcaactcctgaccac

SEQ ID NO: 1980662 - DNA, 25 bp, Homo sapien
gcatgacactaagcttacaggtaac

SEQ ID NO: 1980663 - DNA, 25 bp, Homo sapien
ggtaacagagcaccataaggcctgt

SEQ ID NO: 1980664 - DNA, 25 bp, Homo sapien
taaggcctgtacttttaaggatgct

SEQ ID NO: 1980665 - DNA, 25 bp, Homo sapien
cgaacaatcaagatgagatggctgc

SEQ ID NO: 1980666 - DNA, 25 bp, Homo sapien
tggtaatttagatagtaaaacacgc

SEQ ID NO: 1980667 - DNA, 25 bp, Homo sapien
ggtaatttagatagtaaaacacgca

SEQ ID NO: 1980668 - DNA, 25 bp, Homo sapien
gtaatttagatagtaaaacacgcat

SEQ ID NO: 1980669 - DNA, 25 bp, Homo sapien
cacttctacgtgattattaagggca

SEQ ID NO: 1980670 - DNA, 25 bp, Homo sapien
gttcagccacttctacgtgattatt

SEQ ID NO: 1980671 - DNA, 25 bp, Homo sapien
aaggcagtataaccatcatctttct

SEQ ID NO: 1980672 - DNA, 25 bp, Homo sapien
tctacgtgattattaagggcagcca

SEQ ID NO: 1980673 - DNA, 25 bp, Homo sapien
aagtagtattcattgcataggtgca

SEQ ID NO: 1980674 - DNA, 25 bp, Homo sapien
tttctcacataaatgtgcacaatgg

SEQ ID NO: 1980675 - DNA, 25 bp, Homo sapien
taggtgcaccacaatttgcacaatt

SEQ ID NO: 1980676 - DNA, 25 bp, Homo sapien
tgtctatttctcacataaatgtgca

SEQ ID NO: 1980677 - DNA, 25 bp, Homo sapien
tagggcagtttgttggttcacattc

SEQ ID NO: 1980678 - DNA, 25 bp, Homo sapien
ctaacaatctgggtatgctgtcgtt

SEQ ID NO: 1980679 - DNA, 25 bp, Homo sapien
gctgtcgttcaacagcaaggtgtag

SEQ ID NO: 1980680 - DNA, 25 bp, Homo sapien
tctggatatccaggtttgcattacc

SEQ ID NO: 1980681 - DNA, 25 bp, Homo sapien
catcttgcatatcttggagctgacg

SEQ ID NO: 1980682 - DNA, 25 bp, Homo sapien
gctgacgtagctgagacaaagtgtg

SEQ ID NO: 1980683 - DNA, 25 bp, Homo sapien
cgtgtttttggatggctcccaggca

SEQ ID NO: 1980684 - DNA, 25 bp, Homo sapien
aatatcaagcttggcacctgcacgg

SEQ ID NO: 1980685 - DNA, 25 bp, Homo sapien
gctttgcagagattcggatcaggac

SEQ ID NO: 1980686 - DNA, 25 bp, Homo sapien
tgctcaggtcagcaccattggctgc

SEQ ID NO: 1980687 - DNA, 25 bp, Homo sapien
gattgacccttcttatttcgaatgc

SEQ ID NO: 1980688 - DNA, 25 bp, Homo sapien
gacagagatcaagtggcgattgacc

SEQ ID NO: 1980689 - DNA, 25 bp, Homo sapien
tagaaggactccgagaacccacttg

SEQ ID NO: 1980690 - DNA, 25 bp, Homo sapien
tacagatgaggcatttcttgacacg

SEQ ID NO: 1980691 - DNA, 25 bp, Homo sapien
ctttgtcctggattgaacctgttct

SEQ ID NO: 1980692 - DNA, 25 bp, Homo sapien
gaacaggtagcaatatgtccacatg

SEQ ID NO: 1980693 - DNA, 25 bp, Homo sapien
tagcttaacaggcacttatttctat

SEQ ID NO: 1980694 - DNA, 25 bp, Homo sapien
tcacatctttatataccctagctta

SEQ ID NO: 1980695 - DNA, 25 bp, Homo sapien
ctctgtaagaaaacacctaggcaca

SEQ ID NO: 1980696 - DNA, 25 bp, Homo sapien
gaaaaagaggttacagcacagtgac

SEQ ID NO: 1980697 - DNA, 25 bp, Homo sapien
tcttgtcagagcataccacacattc

SEQ ID NO: 1980698 - DNA, 25 bp, Homo sapien
gtggccacagggttgaaaaagaaca

SEQ ID NO: 1980699 - DNA, 25 bp, Homo sapien
ttgtcagagcataccacacattctt

SEQ ID NO: 1980700 - DNA, 25 bp, Homo sapien
acatgtggccacagggttgaaaaag

SEQ ID NO: 1980701 - DNA, 25 bp, Homo sapien
ggaaacagctgacgttctagtacag

SEQ ID NO: 1980702 - DNA, 25 bp, Homo sapien
tcaacttttttatgagttatccaaa

SEQ ID NO: 1980703 - DNA, 25 bp, Homo sapien
gaaatagaaggtactcgaggcccat

SEQ ID NO: 1980704 - DNA, 25 bp, Homo sapien
gaaggtactcgaggcccatcaactt

SEQ ID NO: 1980705 - DNA, 25 bp, Homo sapien
gccagaaattacagccccagaaatg

SEQ ID NO: 1980706 - DNA, 25 bp, Homo sapien
acagtgtatgaacttgaacaagggc

SEQ ID NO: 1980707 - DNA, 25 bp, Homo sapien
catatgtgaacaaaggcgagactaa

SEQ ID NO: 1980708 - DNA, 25 bp, Homo sapien
ctaggcggaggacacgagaatcact

SEQ ID NO: 1980709 - DNA, 25 bp, Homo sapien
caaagagcagaatgtcgtcgtgaaa

SEQ ID NO: 1980710 - DNA, 25 bp, Homo sapien
taaaaagtgtcagcacgaccaatgg

SEQ ID NO: 1980711 - DNA, 25 bp, Homo sapien
cagtgtttgacgcaccatcataggc

SEQ ID NO: 1980712 - DNA, 25 bp, Homo sapien
tccagagatgctatctagaggcact

SEQ ID NO: 1980713 - DNA, 25 bp, Homo sapien
ctgatgtggacaaagtagggcctac

SEQ ID NO: 1980714 - DNA, 25 bp, Homo sapien
gacgctcggttatacaagtgcacta

SEQ ID NO: 1980715 - DNA, 25 bp, Homo sapien
aaacataaatgggtctgacgctcgg

SEQ ID NO: 1980716 - DNA, 25 bp, Homo sapien
tgcactaggtaggagccaacgttaa

SEQ ID NO: 1980717 - DNA, 25 bp, Homo sapien
cataatgaaaggcactcttcgttca

SEQ ID NO: 1980718 - DNA, 25 bp, Homo sapien
cacactttttcatcaggttagcaca

SEQ ID NO: 1980719 - DNA, 25 bp, Homo sapien
gttcaactactgctcgacactgcac

SEQ ID NO: 1980720 - DNA, 25 bp, Homo sapien
tcagtggcatcttctgaacttttcc

SEQ ID NO: 1980721 - DNA, 25 bp, Homo sapien
tcagccagagcacaatccagacaca

SEQ ID NO: 1980722 - DNA, 25 bp, Homo sapien
ggttttccaaggctctacgtgcttc

SEQ ID NO: 1980723 - DNA, 25 bp, Homo sapien
gaaacagtttgcacattaatttcta

SEQ ID NO: 1980724 - DNA, 25 bp, Homo sapien
cctttggcaagctcatcaatacatt

SEQ ID NO: 1980725 - DNA, 25 bp, Homo sapien
gacattggtattatccttgtccttt

SEQ ID NO: 1980726 - DNA, 25 bp, Homo sapien
tggtattatccttgtccttttgtaa

SEQ ID NO: 1980727 - DNA, 25 bp, Homo sapien
attggtattatccttgtccttttgt

SEQ ID NO: 1980728 - DNA, 25 bp, Homo sapien
attatccttgtccttttgtaatact

SEQ ID NO: 1980729 - DNA, 25 bp, Homo sapien
tcactgtttacatgaaatcattatt

SEQ ID NO: 1980730 - DNA, 25 bp, Homo sapien
cactgtttacatgaaatcattatta

SEQ ID NO: 1980731 - DNA, 25 bp, Homo sapien
actgtttacatgaaatcattattac

SEQ ID NO: 1980732 - DNA, 25 bp, Homo sapien
tctccacagagttgacaggttccgt

SEQ ID NO: 1980733 - DNA, 25 bp, Homo sapien
gccttgcgacagataggacattcac

SEQ ID NO: 1980734 - DNA, 25 bp, Homo sapien
ttcagacgatctagacacacagggc

SEQ ID NO: 1980735 - DNA, 25 bp, Homo sapien
gaatccttcgttcaatagccttgcg

SEQ ID NO: 1980736 - DNA, 25 bp, Homo sapien
gacataattgtttgacctgcctctt

SEQ ID NO: 1980737 - DNA, 25 bp, Homo sapien
gagaacctgttatcaactcactgtg

SEQ ID NO: 1980738 - DNA, 25 bp, Homo sapien
ccacgatgaaatgaaggataactga

SEQ ID NO: 1980739 - DNA, 25 bp, Homo sapien
gaacttccaactagatcaaaagcct

SEQ ID NO: 1980740 - DNA, 25 bp, Homo sapien
taagaaaggcaactgttagtggcca

SEQ ID NO: 1980741 - DNA, 25 bp, Homo sapien
tagctaatgagcagggtaacgaacc

SEQ ID NO: 1980742 - DNA, 25 bp, Homo sapien
aacagcgtcggtggccccttattag

SEQ ID NO: 1980743 - DNA, 25 bp, Homo sapien
gggcaatgtcatttcactggtcaga

SEQ ID NO: 1980744 - DNA, 25 bp, Homo sapien
tatagattgcagacaaaatggcacg

SEQ ID NO: 1980745 - DNA, 25 bp, Homo sapien
tctggtaacagtgtcacggccataa

SEQ ID NO: 1980746 - DNA, 25 bp, Homo sapien
atagcaaactgtggcctcgatctcc

SEQ ID NO: 1980747 - DNA, 25 bp, Homo sapien
taatgatacacgtgcactaaagacc

SEQ ID NO: 1980748 - DNA, 25 bp, Homo sapien
tagaatgacataaacatactgaaca

SEQ ID NO: 1980749 - DNA, 25 bp, Homo sapien
tgagtcaattgaactgctatcattg

SEQ ID NO: 1980750 - DNA, 25 bp, Homo sapien
gaatttgctgcatttagaatgacat

SEQ ID NO: 1980751 - DNA, 25 bp, Homo sapien
atccaatattgaaagctaaagaatt

SEQ ID NO: 1980752 - DNA, 25 bp, Homo sapien
agcttagctcttactaagcattctt

SEQ ID NO: 1980753 - DNA, 25 bp, Homo sapien
tttattaacgataaatgtttgcatt

SEQ ID NO: 1980754 - DNA, 25 bp, Homo sapien
tttaaaagcttagctcttactaagc

SEQ ID NO: 1980755 - DNA, 25 bp, Homo sapien
tattaacgataaatgtttgcattac

SEQ ID NO: 1980756 - DNA, 25 bp, Homo sapien
gagccttctagatgtggacacttat

SEQ ID NO: 1980757 - DNA, 25 bp, Homo sapien
tggagctagatgacctctcaataac

SEQ ID NO: 1980758 - DNA, 25 bp, Homo sapien
tctttggccctttagatagaggtac

SEQ ID NO: 1980759 - DNA, 25 bp, Homo sapien
ctgtaaacaactgcaatgagagcct

SEQ ID NO: 1980760 - DNA, 25 bp, Homo sapien
ggaatgttgtgccagaagactatca

SEQ ID NO: 1980761 - DNA, 25 bp, Homo sapien
ttgggaatgttgtgccagaagacta

SEQ ID NO: 1980762 - DNA, 25 bp, Homo sapien
aatgttgtgccagaagactatcaaa

SEQ ID NO: 1980763 - DNA, 25 bp, Homo sapien
tgttgtgccagaagactatcaaata

SEQ ID NO: 1980764 - DNA, 25 bp, Homo sapien
ccatgctaatctctgtatctttcca

SEQ ID NO: 1980765 - DNA, 25 bp, Homo sapien
catgctaatctctgtatctttccaa

SEQ ID NO: 1980766 - DNA, 25 bp, Homo sapien
ttttagtgtatgtgctgctgaagcg

SEQ ID NO: 1980767 - DNA, 25 bp, Homo sapien
tgtatgtgctgctgaagcgagcacc

SEQ ID NO: 1980768 - DNA, 25 bp, Homo sapien
cttgacagtggcctccagacgcagg

SEQ ID NO: 1980769 - DNA, 25 bp, Homo sapien
cagcttgacagtggcctccagacgc

SEQ ID NO: 1980770 - DNA, 25 bp, Homo sapien
cttgtcctttcagcttgacagtggc

SEQ ID NO: 1980771 - DNA, 25 bp, Homo sapien
gtcctttcagcttgacagtggcctc

SEQ ID NO: 1980772 - DNA, 25 bp, Homo sapien
tttttaccagcatcaaaaatgagtg

SEQ ID NO: 1980773 - DNA, 25 bp, Homo sapien
accagcatcaaaaatgagtgaaagg

SEQ ID NO: 1980774 - DNA, 25 bp, Homo sapien
tttaccagcatcaaaaatgagtgaa

SEQ ID NO: 1980775 - DNA, 25 bp, Homo sapien
tctttttaccagcatcaaaaatgag

SEQ ID NO: 1980776 - DNA, 25 bp, Homo sapien
gctgccgctaagatggagcctggaa

SEQ ID NO: 1980777 - DNA, 25 bp, Homo sapien
gcctggaaggtggatttgccaccaa

SEQ ID NO: 1980778 - DNA, 25 bp, Homo sapien
caccaagacttggacgaggacctgg

SEQ ID NO: 1980779 - DNA, 25 bp, Homo sapien
agtggacgctccaaaaaagccagca

SEQ ID NO: 1980780 - DNA, 25 bp, Homo sapien
gagggaggagaacccacagagtgtg

SEQ ID NO: 1980781 - DNA, 25 bp, Homo sapien
agggaggagaacccacagagtgtgt

SEQ ID NO: 1980782 - DNA, 25 bp, Homo sapien
ctctctgagggagctccacttgggc

SEQ ID NO: 1980783 - DNA, 25 bp, Homo sapien
cctctctgagggagctccacttggg

SEQ ID NO: 1980784 - DNA, 25 bp, Homo sapien
gaagtctaagttctgtgttaaagag

SEQ ID NO: 1980785 - DNA, 25 bp, Homo sapien
ctaagttctgtgttaaagagtaaag

SEQ ID NO: 1980786 - DNA, 25 bp, Homo sapien
agtctaagttctgtgttaaagagta

SEQ ID NO: 1980787 - DNA, 25 bp, Homo sapien
ctgaagtctaagttctgtgttaaag

SEQ ID NO: 1980788 - DNA, 25 bp, Homo sapien
aaggatcacctgagccgaggaggtt

SEQ ID NO: 1980789 - DNA, 25 bp, Homo sapien
acctgagccgaggaggttgagactg

SEQ ID NO: 1980790 - DNA, 25 bp, Homo sapien
ttgaggaggccgagataggtgaatc

SEQ ID NO: 1980791 - DNA, 25 bp, Homo sapien
tgaggaggccgagataggtgaatca

SEQ ID NO: 1980792 - DNA, 25 bp, Homo sapien
gaagaacctggtcataatggttcat

SEQ ID NO: 1980793 - DNA, 25 bp, Homo sapien
ttaaatggacactcagccatatgga

SEQ ID NO: 1980794 - DNA, 25 bp, Homo sapien
gaactggctctggatgcttaaatgg

SEQ ID NO: 1980795 - DNA, 25 bp, Homo sapien
actggctctggatgcttaaatggac

SEQ ID NO: 1980796 - DNA, 25 bp, Homo sapien
aaataatgttcaaggagtttttcag

SEQ ID NO: 1980797 - DNA, 25 bp, Homo sapien
cgaatgaggataccaccatcactat

SEQ ID NO: 1980798 - DNA, 25 bp, Homo sapien
tcagacgaatgaggataccaccatc

SEQ ID NO: 1980799 - DNA, 25 bp, Homo sapien
ccagcttgttctagcttcagacgaa

SEQ ID NO: 1980800 - DNA, 25 bp, Homo sapien
ctagcttcagacgaatgaggatacc

SEQ ID NO: 1980801 - DNA, 25 bp, Homo sapien
tgagtcccacatgtctcctaaatcc

SEQ ID NO: 1980802 - DNA, 25 bp, Homo sapien
atgaggaatgaggcacttccctgga

SEQ ID NO: 1980803 - DNA, 25 bp, Homo sapien
agctggaccaagagcggtggccaaa

SEQ ID NO: 1980804 - DNA, 25 bp, Homo sapien
ctctgagcggggaagttggccagct

SEQ ID NO: 1980805 - DNA, 25 bp, Homo sapien
tcaaggacacttagatgaggaatga

SEQ ID NO: 1980806 - DNA, 25 bp, Homo sapien
gtgtttgagtcagcccttgaaccgg

SEQ ID NO: 1980807 - DNA, 25 bp, Homo sapien
aatatggcatgccatttcagccagt

SEQ ID NO: 1980808 - DNA, 25 bp, Homo sapien
gttctttctacgtctctggagcctt

SEQ ID NO: 1980809 - DNA, 25 bp, Homo sapien
gagccttcagccattaaaacaggta

SEQ ID NO: 1980810 - DNA, 25 bp, Homo sapien
gacactgtctgaccctccagtgctg

SEQ ID NO: 1980811 - DNA, 25 bp, Homo sapien
tctgcaaactgcaaaggataaaaag

SEQ ID NO: 1980812 - DNA, 25 bp, Homo sapien
caccagcctcgctgcacttccattc

SEQ ID NO: 1980813 - DNA, 25 bp, Homo sapien
tgctgcatcctctgcaaactgcaaa

SEQ ID NO: 1980814 - DNA, 25 bp, Homo sapien
gcccctctgatgtctacaggactca

SEQ ID NO: 1980815 - DNA, 25 bp, Homo sapien
tcatatcctcagctcggccaatggg

SEQ ID NO: 1980816 - DNA, 25 bp, Homo sapien
tgcagcgtcgaagcccctctgatgt

SEQ ID NO: 1980817 - DNA, 25 bp, Homo sapien
tccatgatgtgatcgaggccagcag

SEQ ID NO: 1980818 - DNA, 25 bp, Homo sapien
tacttgggcttgataggtattgtcc

SEQ ID NO: 1980819 - DNA, 25 bp, Homo sapien
tgttacttgggcttgataggtattg

SEQ ID NO: 1980820 - DNA, 25 bp, Homo sapien
tgggcttgataggtattgtcccagc

SEQ ID NO: 1980821 - DNA, 25 bp, Homo sapien
tgataggtattgtcccagcgctttt

SEQ ID NO: 1980822 - DNA, 25 bp, Homo sapien
aaacacaaaacgaagcagcaaacac

SEQ ID NO: 1980823 - DNA, 25 bp, Homo sapien
tgtgtgtagggtcggaaggaggaac

SEQ ID NO: 1980824 - DNA, 25 bp, Homo sapien
tgtagggtcggaaggaggaacagga

SEQ ID NO: 1980825 - DNA, 25 bp, Homo sapien
gaatccagttggaagatgtgtgtag

SEQ ID NO: 1980826 - DNA, 25 bp, Homo sapien
gttggagatgtacagtgagatatga

SEQ ID NO: 1980827 - DNA, 25 bp, Homo sapien
ggagttggagatgtacagtgagata

SEQ ID NO: 1980828 - DNA, 25 bp, Homo sapien
caggagttggagatgtacagtgaga

SEQ ID NO: 1980829 - DNA, 25 bp, Homo sapien
gagttggagatgtacagtgagatat

SEQ ID NO: 1980830 - DNA, 25 bp, Homo sapien
tcggaagccttggtagtgcctgtct

SEQ ID NO: 1980831 - DNA, 25 bp, Homo sapien
cagcaaacattggtggcgacagtaa

SEQ ID NO: 1980832 - DNA, 25 bp, Homo sapien
caaatgagacctgggatgccgtgca

SEQ ID NO: 1980833 - DNA, 25 bp, Homo sapien
tggatggctcccacctgagcgctgg

SEQ ID NO: 1980834 - DNA, 25 bp, Homo sapien
aggccagtgtgggcagatggtttga

SEQ ID NO: 1980835 - DNA, 25 bp, Homo sapien
ccagtgtgggcagatggtttgagcc

SEQ ID NO: 1980836 - DNA, 25 bp, Homo sapien
ggcagatggtttgagcccaagaatt

SEQ ID NO: 1980837 - DNA, 25 bp, Homo sapien
ggaggccagtgtgggcagatggttt

SEQ ID NO: 1980838 - DNA, 25 bp, Homo sapien
ggacgggggccagattagtcccata

SEQ ID NO: 1980839 - DNA, 25 bp, Homo sapien
agacccttgcagacactcacagtct

SEQ ID NO: 1980840 - DNA, 25 bp, Homo sapien
gggccagattagtcccatagcctct

SEQ ID NO: 1980841 - DNA, 25 bp, Homo sapien
atagcctctccaccggccgctgctt

SEQ ID NO: 1980842 - DNA, 25 bp, Homo sapien
tctcctcgttctcaatttggcttca

SEQ ID NO: 1980843 - DNA, 25 bp, Homo sapien
ttcaaatgacggctggctcatcttt

SEQ ID NO: 1980844 - DNA, 25 bp, Homo sapien
ctccttatctgcggccttagcatct

SEQ ID NO: 1980845 - DNA, 25 bp, Homo sapien
tctgcggccttagcatcttcttttc

SEQ ID NO: 1980846 - DNA, 25 bp, Homo sapien
gcactttccagtaaaaagcagaaag

SEQ ID NO: 1980847 - DNA, 25 bp, Homo sapien
ggcactttccagtaaaaagcagaaa

SEQ ID NO: 1980848 - DNA, 25 bp, Homo sapien
gggcactttccagtaaaaagcagaa

SEQ ID NO: 1980849 - DNA, 25 bp, Homo sapien
ggggcactttccagtaaaaagcaga

SEQ ID NO: 1980850 - DNA, 25 bp, Homo sapien
gaccatctgcagaacgtatcgcaga

SEQ ID NO: 1980851 - DNA, 25 bp, Homo sapien
catttggaagactgggccacacagg

SEQ ID NO: 1980852 - DNA, 25 bp, Homo sapien
ctgaagaggtgcatttggaagactg

SEQ ID NO: 1980853 - DNA, 25 bp, Homo sapien
aacgtatcgcagaggagcaggatca

SEQ ID NO: 1980854 - DNA, 25 bp, Homo sapien
tctttgccagcttaccaatgactag

SEQ ID NO: 1980855 - DNA, 25 bp, Homo sapien
tacagaatcgtgaacaaaagcagag

SEQ ID NO: 1980856 - DNA, 25 bp, Homo sapien
gctgatgtgtctggccatgctctgg

SEQ ID NO: 1980857 - DNA, 25 bp, Homo sapien
tacaagcctcttgtgctggcaggct

SEQ ID NO: 1980858 - DNA, 25 bp, Homo sapien
aagtctgactgtggaacggagcctg

SEQ ID NO: 1980859 - DNA, 25 bp, Homo sapien
gcgttaacaacttctgaggccggag

SEQ ID NO: 1980860 - DNA, 25 bp, Homo sapien
ttctcataaaggacaccccaacagc

SEQ ID NO: 1980861 - DNA, 25 bp, Homo sapien
gaaaacttgccatttcgcagcaccg

SEQ ID NO: 1980862 - DNA, 25 bp, Homo sapien
ttttgggcagtttaaggcaatctga

SEQ ID NO: 1980863 - DNA, 25 bp, Homo sapien
tgggcaacatagacagattctcatc

SEQ ID NO: 1980864 - DNA, 25 bp, Homo sapien
gcagcagcgatatgttgaggtttta

SEQ ID NO: 1980865 - DNA, 25 bp, Homo sapien
catcggcgtgcatgtttagttctgg

SEQ ID NO: 1980866 - DNA, 25 bp, Homo sapien
tcatctcggtcaatccattgttcga

SEQ ID NO: 1980867 - DNA, 25 bp, Homo sapien
taagatgacctcttgtacaggtctc

SEQ ID NO: 1980868 - DNA, 25 bp, Homo sapien
ccaaacgtttcttgaatccatccca

SEQ ID NO: 1980869 - DNA, 25 bp, Homo sapien
catctctatctctgctgcattggct

SEQ ID NO: 1980870 - DNA, 25 bp, Homo sapien
tcatgtgaatcactaggctcctccc

SEQ ID NO: 1980871 - DNA, 25 bp, Homo sapien
caggctcaggtcctatcctataagg

SEQ ID NO: 1980872 - DNA, 25 bp, Homo sapien
tgccctgtttgttacgtatgccctg

SEQ ID NO: 1980873 - DNA, 25 bp, Homo sapien
gggatcacacgtttacctgccattt

SEQ ID NO: 1980874 - DNA, 25 bp, Homo sapien
tccatctgttaaatctaggattttc

SEQ ID NO: 1980875 - DNA, 25 bp, Homo sapien
aaaatagggactaggacaagatcaa

SEQ ID NO: 1980876 - DNA, 25 bp, Homo sapien
tagggactaggacaagatcaatttc

SEQ ID NO: 1980877 - DNA, 25 bp, Homo sapien
gactaggacaagatcaatttcctct

SEQ ID NO: 1980878 - DNA, 25 bp, Homo sapien
tgaaggtcggtctcctagaaagcgt

SEQ ID NO: 1980879 - DNA, 25 bp, Homo sapien
gaaaggatttcttccgacagacgtg

SEQ ID NO: 1980880 - DNA, 25 bp, Homo sapien
tggtgagacctcgtagctaagcgtt

SEQ ID NO: 1980881 - DNA, 25 bp, Homo sapien
gctgccgagggagactttaggacaa

SEQ ID NO: 1980882 - DNA, 25 bp, Homo sapien
tcttactgctctgccggaaaactgc

SEQ ID NO: 1980883 - DNA, 25 bp, Homo sapien
tggactcaccgagccctaaacaaac

SEQ ID NO: 1980884 - DNA, 25 bp, Homo sapien
gcctgggctcctgattggactcacc

SEQ ID NO: 1980885 - DNA, 25 bp, Homo sapien
aaacaaacagcgctcgccgaagggt

SEQ ID NO: 1980886 - DNA, 25 bp, Homo sapien
ttcgcgtaaggaaggcaacctgtcc

SEQ ID NO: 1980887 - DNA, 25 bp, Homo sapien
aatttaagtagctgtgcgtgtcggc

SEQ ID NO: 1980888 - DNA, 25 bp, Homo sapien
ccagcagaggcaatgcggagagctt

SEQ ID NO: 1980889 - DNA, 25 bp, Homo sapien
agagaaatgcaactcggcccaggga

SEQ ID NO: 1980890 - DNA, 25 bp, Homo sapien
ctccctcaaaggcaccgctccggtc

SEQ ID NO: 1980891 - DNA, 25 bp, Homo sapien
gagacttctcaaagatcctatttct

SEQ ID NO: 1980892 - DNA, 25 bp, Homo sapien
tgccccgggcgtggagatcaataag

SEQ ID NO: 1980893 - DNA, 25 bp, Homo sapien
cctggaagggctgggataccagccc

SEQ ID NO: 1980894 - DNA, 25 bp, Homo sapien
gcaccagccgccgtcagtcaaggcc

SEQ ID NO: 1980895 - DNA, 25 bp, Homo sapien
caccagccgccgtcagtcaaggcca

SEQ ID NO: 1980896 - DNA, 25 bp, Homo sapien
accagccgccgtcagtcaaggccat

SEQ ID NO: 1980897 - DNA, 25 bp, Homo sapien
aagcaccagccgccgtcagtcaagg

SEQ ID NO: 1980898 - DNA, 25 bp, Homo sapien
agggctcccgcgctggaaaggctct

SEQ ID NO: 1980899 - DNA, 25 bp, Homo sapien
ttggtcgaggtcagtgaacagcagc

SEQ ID NO: 1980900 - DNA, 25 bp, Homo sapien
aagtcctcccagctcgacaggttgc

SEQ ID NO: 1980901 - DNA, 25 bp, Homo sapien
tgcgaagcgtaggaactgagcagca

SEQ ID NO: 1980902 - DNA, 25 bp, Homo sapien
ggagagagcggcgagggtctggtac

SEQ ID NO: 1980903 - DNA, 25 bp, Homo sapien
ctggagagagcggcgagggtctggt

SEQ ID NO: 1980904 - DNA, 25 bp, Homo sapien
gagagagcggcgagggtctggtaca

SEQ ID NO: 1980905 - DNA, 25 bp, Homo sapien
agagagcggcgagggtctggtacat

SEQ ID NO: 1980906 - DNA, 25 bp, Homo sapien
gggcgcgccgtcgtaggcggccgga

SEQ ID NO: 1980907 - DNA, 25 bp, Homo sapien
ggcgcgccgtcgtaggcggccggac

SEQ ID NO: 1980908 - DNA, 25 bp, Homo sapien
cgggcgcgccgtcgtaggcggccgg

SEQ ID NO: 1980909 - DNA, 25 bp, Homo sapien
cacgcgggtggtgggcacgtagacc

SEQ ID NO: 1980910 - DNA, 25 bp, Homo sapien
tggtgggcacgtagaccggggagct

SEQ ID NO: 1980911 - DNA, 25 bp, Homo sapien
acccacgcgggtggtgggcacgtag

SEQ ID NO: 1980912 - DNA, 25 bp, Homo sapien
tgggcacgtagaccggggagctggc

SEQ ID NO: 1980913 - DNA, 25 bp, Homo sapien
actgcccgacccctgcaggtggtac

SEQ ID NO: 1980914 - DNA, 25 bp, Homo sapien
gcccgcgtggttggctggcccactg

SEQ ID NO: 1980915 - DNA, 25 bp, Homo sapien
ggtggtacggtaggccgggcagcat

SEQ ID NO: 1980916 - DNA, 25 bp, Homo sapien
ccgcccgcgtggttggctggcccac

SEQ ID NO: 1980917 - DNA, 25 bp, Homo sapien
gagagtaggggaagcgcgccgagac

SEQ ID NO: 1980918 - DNA, 25 bp, Homo sapien
gggaagcgcgccgagacgtgcgccg

SEQ ID NO: 1980919 - DNA, 25 bp, Homo sapien
agagtaggggaagcgcgccgagacg

SEQ ID NO: 1980920 - DNA, 25 bp, Homo sapien
taggggaagcgcgccgagacgtgcg

SEQ ID NO: 1980921 - DNA, 25 bp, Homo sapien
cgcggcgccgttggccatgggcggg

SEQ ID NO: 1980922 - DNA, 25 bp, Homo sapien
gctcccgcgcggcgccgttggccat

SEQ ID NO: 1980923 - DNA, 25 bp, Homo sapien
ccgacagcgagctgtactggggctc

SEQ ID NO: 1980924 - DNA, 25 bp, Homo sapien
ctcgcggccgcccatggccgccagg

SEQ ID NO: 1980925 - DNA, 25 bp, Homo sapien
tcagtggcgcccccacgtagggcga

SEQ ID NO: 1980926 - DNA, 25 bp, Homo sapien
cacgtagggcgagtaggggctcgga

SEQ ID NO: 1980927 - DNA, 25 bp, Homo sapien
tgcagcaccggggtctcgaagggtc

SEQ ID NO: 1980928 - DNA, 25 bp, Homo sapien
tcgaagggtccggcgggccaggcag

SEQ ID NO: 1980929 - DNA, 25 bp, Homo sapien
cgctaccggactctgggttacccag

SEQ ID NO: 1980930 - DNA, 25 bp, Homo sapien
gcacccggacgagaaagtcctgaaa

SEQ ID NO: 1980931 - DNA, 25 bp, Homo sapien
aacagggcccgagtggagcagctgc

SEQ ID NO: 1980932 - DNA, 25 bp, Homo sapien
gcctcagcgctaccggactctgggt

SEQ ID NO: 1980933 - DNA, 25 bp, Homo sapien
cacgcaccctttggagagttaaact

SEQ ID NO: 1980934 - DNA, 25 bp, Homo sapien
cgtttttccccaatagcagatgcca

SEQ ID NO: 1980935 - DNA, 25 bp, Homo sapien
tgggagaggagacgccaactagctt

SEQ ID NO: 1980936 - DNA, 25 bp, Homo sapien
tccccaaggcacgaaggtacagatg

SEQ ID NO: 1980937 - DNA, 25 bp, Homo sapien
caccaaggacgcagaatgttgcatc

SEQ ID NO: 1980938 - DNA, 25 bp, Homo sapien
tgacaatagcgttttcacggtttac

SEQ ID NO: 1980939 - DNA, 25 bp, Homo sapien
cccctaatggctcccagatacagga

SEQ ID NO: 1980940 - DNA, 25 bp, Homo sapien
gagaaaaacagcctaacagggctcc

SEQ ID NO: 1980941 - DNA, 25 bp, Homo sapien
tgtcctaaaggtagcgtcgaggctc

SEQ ID NO: 1980942 - DNA, 25 bp, Homo sapien
ctcccacgagaagcacagacctggg

SEQ ID NO: 1980943 - DNA, 25 bp, Homo sapien
ctaaggaatcctggcccctaggact

SEQ ID NO: 1980944 - DNA, 25 bp, Homo sapien
gcatttccagcgtgtcttttgcgga

SEQ ID NO: 1980945 - DNA, 25 bp, Homo sapien
ttgcagcagaagcaaaaagagggaa

SEQ ID NO: 1980946 - DNA, 25 bp, Homo sapien
ctttgcagcagaagcaaaaagaggg

SEQ ID NO: 1980947 - DNA, 25 bp, Homo sapien
tttgcagcagaagcaaaaagaggga

SEQ ID NO: 1980948 - DNA, 25 bp, Homo sapien
cagtgcaaatctcaacagggtcccc

SEQ ID NO: 1980949 - DNA, 25 bp, Homo sapien
cacgggtccctatgcagaggtaagg

SEQ ID NO: 1980950 - DNA, 25 bp, Homo sapien
aggtaaggatgagagccctgactct

SEQ ID NO: 1980951 - DNA, 25 bp, Homo sapien
ccaaacacgggtccctatgcagagg

SEQ ID NO: 1980952 - DNA, 25 bp, Homo sapien
aataagcttcacacccaaccattac

SEQ ID NO: 1980953 - DNA, 25 bp, Homo sapien
gaactccccgactgacaaaataagc

SEQ ID NO: 1980954 - DNA, 25 bp, Homo sapien
tgacaaaataagcttcacacccaac

SEQ ID NO: 1980955 - DNA, 25 bp, Homo sapien
aacacccttgcacattccctacgga

SEQ ID NO: 1980956 - DNA, 25 bp, Homo sapien
gaccagttactgtaaacatcaaaag

SEQ ID NO: 1980957 - DNA, 25 bp, Homo sapien
tgtgtcaagaaataggcagagctgc

SEQ ID NO: 1980958 - DNA, 25 bp, Homo sapien
gactctctcagccatatgaaatgct

SEQ ID NO: 1980959 - DNA, 25 bp, Homo sapien
aacctggagatcaggctaaggtgtg

SEQ ID NO: 1980960 - DNA, 25 bp, Homo sapien
taactgtggtgtgcccagaagatga

SEQ ID NO: 1980961 - DNA, 25 bp, Homo sapien
tctacagaaaattcctctaactgtg

SEQ ID NO: 1980962 - DNA, 25 bp, Homo sapien
aaattcctctaactgtggtgtgccc

SEQ ID NO: 1980963 - DNA, 25 bp, Homo sapien
actgtggtgtgcccagaagatgaaa

SEQ ID NO: 1980964 - DNA, 25 bp, Homo sapien
cctccaaattgtgcgggttgatcaa

SEQ ID NO: 1980965 - DNA, 25 bp, Homo sapien
catagtgtgggtttccagaagcctc

SEQ ID NO: 1980966 - DNA, 25 bp, Homo sapien
tctatgcaaaagctgggtgttccca

SEQ ID NO: 1980967 - DNA, 25 bp, Homo sapien
gaaatctagctaggaagctggcctc

SEQ ID NO: 1980968 - DNA, 25 bp, Homo sapien
aaagctgtaagatataaaagctggg

SEQ ID NO: 1980969 - DNA, 25 bp, Homo sapien
agctataatcctgtaagtgactaaa

SEQ ID NO: 1980970 - DNA, 25 bp, Homo sapien
taatcctgtaagtgactaaaaagga

SEQ ID NO: 1980971 - DNA, 25 bp, Homo sapien
aaacccaccaggcagctataatcct

SEQ ID NO: 1980972 - DNA, 25 bp, Homo sapien
aagtattttctacatctgccacccg

SEQ ID NO: 1980973 - DNA, 25 bp, Homo sapien
gctgtcccggagcttttaaagactg

SEQ ID NO: 1980974 - DNA, 25 bp, Homo sapien
aaagtactattcttaggcacctacg

SEQ ID NO: 1980975 - DNA, 25 bp, Homo sapien
tacagtacgtcgttgccaaacccga

SEQ ID NO: 1980976 - DNA, 25 bp, Homo sapien
cacgcgcttctgcggcttgatgagg

SEQ ID NO: 1980977 - DNA, 25 bp, Homo sapien
ttcatcttgctgtagagcccgcagg

SEQ ID NO: 1980978 - DNA, 25 bp, Homo sapien
agttcacgcactcgcggctctcgga

SEQ ID NO: 1980979 - DNA, 25 bp, Homo sapien
ccacagcggcgtctggatggagccg

SEQ ID NO: 1980980 - DNA, 25 bp, Homo sapien
ggacgcccaaggcaggccgagccag

SEQ ID NO: 1980981 - DNA, 25 bp, Homo sapien
gacgcccaaggcaggccgagccagg

SEQ ID NO: 1980982 - DNA, 25 bp, Homo sapien
ggtgggaccgcagcggccgcacctg

SEQ ID NO: 1980983 - DNA, 25 bp, Homo sapien
tgggaccgcagcggccgcacctgtc

SEQ ID NO: 1980984 - DNA, 25 bp, Homo sapien
agggtgggaccgcagcggccgcacc

SEQ ID NO: 1980985 - DNA, 25 bp, Homo sapien
ctagggtgggaccgcagcggccgca

SEQ ID NO: 1980986 - DNA, 25 bp, Homo sapien
gggtaacttctacttgggcgccagc

SEQ ID NO: 1980987 - DNA, 25 bp, Homo sapien
gtcatcccctgcgcgtaaacatggg

SEQ ID NO: 1980988 - DNA, 25 bp, Homo sapien
cgggacaggatggtaccgctgggtc

SEQ ID NO: 1980989 - DNA, 25 bp, Homo sapien
tgggcgttggaacagccgggacagg

SEQ ID NO: 1980990 - DNA, 25 bp, Homo sapien
caagggacaggaaggttcactttat

SEQ ID NO: 1980991 - DNA, 25 bp, Homo sapien
tcaactgcagatcataagtgaagcc

SEQ ID NO: 1980992 - DNA, 25 bp, Homo sapien
tgtgaaatcagtaaacaagggacag

SEQ ID NO: 1980993 - DNA, 25 bp, Homo sapien
gtgaagccagtcctcataaacatgt

SEQ ID NO: 1980994 - DNA, 25 bp, Homo sapien
tagttgtggtgtgacagttggcaca

SEQ ID NO: 1980995 - DNA, 25 bp, Homo sapien
tggtgtgacagttggcacaggacaa

SEQ ID NO: 1980996 - DNA, 25 bp, Homo sapien
gacagttggcacaggacaatccaag

SEQ ID NO: 1980997 - DNA, 25 bp, Homo sapien
aggacaatccaagccgccgtgatga

SEQ ID NO: 1980998 - DNA, 25 bp, Homo sapien
agagtccacaagcattgcacacggg

SEQ ID NO: 1980999 - DNA, 25 bp, Homo sapien
tgtagagtccacaagcattgcacac

SEQ ID NO: 1981000 - DNA, 25 bp, Homo sapien
tagagtccacaagcattgcacacgg

SEQ ID NO: 1981001 - DNA, 25 bp, Homo sapien
tcatgtagagtccacaagcattgca

SEQ ID NO: 1981002 - DNA, 25 bp, Homo sapien
caaatttttcacttgagtatctttc

SEQ ID NO: 1981003 - DNA, 25 bp, Homo sapien
attcaaatttttcacttgagtatct

SEQ ID NO: 1981004 - DNA, 25 bp, Homo sapien
ctgatatcacatacaaaccagatac

SEQ ID NO: 1981005 - DNA, 25 bp, Homo sapien
tatcacatacaaaccagatactaaa

SEQ ID NO: 1981006 - DNA, 25 bp, Homo sapien
tttttcatagcaagtggtctgggca

SEQ ID NO: 1981007 - DNA, 25 bp, Homo sapien
ttttcatagcaagtggtctgggcac

SEQ ID NO: 1981008 - DNA, 25 bp, Homo sapien
ggaagtatttttgctgcaatcatct

SEQ ID NO: 1981009 - DNA, 25 bp, Homo sapien
ggtggaagttggagtcatgggaatg

SEQ ID NO: 1981010 - DNA, 25 bp, Homo sapien
tttttgctgcaatcatctgagttag

SEQ ID NO: 1981011 - DNA, 25 bp, Homo sapien
ttgctgcaatcatctgagttagaag

SEQ ID NO: 1981012 - DNA, 25 bp, Homo sapien
tgctagtaactcttctggcagacac

SEQ ID NO: 1981013 - DNA, 25 bp, Homo sapien
tcgaagattcatttagcaataacct

SEQ ID NO: 1981014 - DNA, 25 bp, Homo sapien
ttcagagcaatctaagccagatttc

SEQ ID NO: 1981015 - DNA, 25 bp, Homo sapien
ggaattcgttttcttcgaagattca

SEQ ID NO: 1981016 - DNA, 25 bp, Homo sapien
gactgtgtgatccttcccagagcag

SEQ ID NO: 1981017 - DNA, 25 bp, Homo sapien
aagactttgatggtgatcacatgcc

SEQ ID NO: 1981018 - DNA, 25 bp, Homo sapien
gcaacacagccgagaaaaggaaacc

SEQ ID NO: 1981019 - DNA, 25 bp, Homo sapien
aaaacatgggttcttcggcttgtgg

SEQ ID NO: 1981020 - DNA, 25 bp, Homo sapien
ccaagagtcctgctatcaaagggca

SEQ ID NO: 1981021 - DNA, 25 bp, Homo sapien
gagccatccagaagtttagacccta

SEQ ID NO: 1981022 - DNA, 25 bp, Homo sapien
gctccgcaaaggaagccaaccgttg

SEQ ID NO: 1981023 - DNA, 25 bp, Homo sapien
ggtacacccaccttacagaaggcag

SEQ ID NO: 1981024 - DNA, 25 bp, Homo sapien
gagactgacgcctatgtagagccca

SEQ ID NO: 1981025 - DNA, 25 bp, Homo sapien
tgagctcgctgttctcgggattggt

SEQ ID NO: 1981026 - DNA, 25 bp, Homo sapien
ccatcttgacccgaatacttgagct

SEQ ID NO: 1981027 - DNA, 25 bp, Homo sapien
aatccggtcgcacggaggacgtgac

SEQ ID NO: 1981028 - DNA, 25 bp, Homo sapien
tcaatattccatagcaggcaaggcc

SEQ ID NO: 1981029 - DNA, 25 bp, Homo sapien
cagagatgtgtaccaaatggcctca

SEQ ID NO: 1981030 - DNA, 25 bp, Homo sapien
gatttaacactgattgctgcaacgc

SEQ ID NO: 1981031 - DNA, 25 bp, Homo sapien
gaatcacgttctgtcagcgcagtcg

SEQ ID NO: 1981032 - DNA, 25 bp, Homo sapien
gagtagtaactaaccccatgtgtca

SEQ ID NO: 1981033 - DNA, 25 bp, Homo sapien
gacttcaaggcacgttgcaaaagga

SEQ ID NO: 1981034 - DNA, 25 bp, Homo sapien
aaaactgtccccaatgcacatggag

SEQ ID NO: 1981035 - DNA, 25 bp, Homo sapien
gaaatcgccctgttcgtgggccaga

SEQ ID NO: 1981036 - DNA, 25 bp, Homo sapien
aagcagccagacctgtaggtaccac

SEQ ID NO: 1981037 - DNA, 25 bp, Homo sapien
tagagctcccaagcaacagaagata

SEQ ID NO: 1981038 - DNA, 25 bp, Homo sapien
ccagaaggtcataagcgaagtggcc

SEQ ID NO: 1981039 - DNA, 25 bp, Homo sapien
gacttgctagtatttcaacccagaa

SEQ ID NO: 1981040 - DNA, 25 bp, Homo sapien
tgtaaacacagatagaagggaactt

SEQ ID NO: 1981041 - DNA, 25 bp, Homo sapien
tgccccaaagctataggatatgtag

SEQ ID NO: 1981042 - DNA, 25 bp, Homo sapien
gggaacttctagaccccaactgcca

SEQ ID NO: 1981043 - DNA, 25 bp, Homo sapien
gattattttgacagacagaccactg

SEQ ID NO: 1981044 - DNA, 25 bp, Homo sapien
taggaaaatatgttcgacttcgctc

SEQ ID NO: 1981045 - DNA, 25 bp, Homo sapien
gggctgctttccttaacatgcgaag

SEQ ID NO: 1981046 - DNA, 25 bp, Homo sapien
attacacatggctcctaatcatagg

SEQ ID NO: 1981047 - DNA, 25 bp, Homo sapien
caagatcagaatgtttgacaccaga

SEQ ID NO: 1981048 - DNA, 25 bp, Homo sapien
tctgcaaagctagtggtaaaacaaa

SEQ ID NO: 1981049 - DNA, 25 bp, Homo sapien
aaagtgaagcaatcacaagctgtaa

SEQ ID NO: 1981050 - DNA, 25 bp, Homo sapien
acaagtctctgcaaagctagtggta

SEQ ID NO: 1981051 - DNA, 25 bp, Homo sapien
ccaaaaaagtgaagcaatcacaagc

SEQ ID NO: 1981052 - DNA, 25 bp, Homo sapien
tggtatgatcatggccacaatcaaa

SEQ ID NO: 1981053 - DNA, 25 bp, Homo sapien
gactaattcaagatgtaccacatga

SEQ ID NO: 1981054 - DNA, 25 bp, Homo sapien
acaatcaaatcagtgtctccgccag

SEQ ID NO: 1981055 - DNA, 25 bp, Homo sapien
gatgatttgatgtacgtatacgtgg

SEQ ID NO: 1981056 - DNA, 25 bp, Homo sapien
gaggaatccgctcagaggagatggg

SEQ ID NO: 1981057 - DNA, 25 bp, Homo sapien
ccagcccttggttaaaatcagccct

SEQ ID NO: 1981058 - DNA, 25 bp, Homo sapien
agctgctgtggaggaatccgctcag

SEQ ID NO: 1981059 - DNA, 25 bp, Homo sapien
cagcccttggttaaaatcagccctg

SEQ ID NO: 1981060 - DNA, 25 bp, Homo sapien
cacgaagctgtttgactccgtttca

SEQ ID NO: 1981061 - DNA, 25 bp, Homo sapien
caccagaggtctgggtcgcagacac

SEQ ID NO: 1981062 - DNA, 25 bp, Homo sapien
tgactccgtttcaagagcccaagga

SEQ ID NO: 1981063 - DNA, 25 bp, Homo sapien
gtctgggtcgcagacacgaagctgt

SEQ ID NO: 1981064 - DNA, 25 bp, Homo sapien
caggaaatcgttctacaatatccct

SEQ ID NO: 1981065 - DNA, 25 bp, Homo sapien
agaacacaggaaatcgttctacaat

SEQ ID NO: 1981066 - DNA, 25 bp, Homo sapien
cctctggaagagggatattggcctc

SEQ ID NO: 1981067 - DNA, 25 bp, Homo sapien
acacaggaaatcgttctacaatatc

SEQ ID NO: 1981068 - DNA, 25 bp, Homo sapien
cacttgataagtattaacgcgtagg

SEQ ID NO: 1981069 - DNA, 25 bp, Homo sapien
acacttgataagtattaacgcgtag

SEQ ID NO: 1981070 - DNA, 25 bp, Homo sapien
cttgataagtattaacgcgtaggga

SEQ ID NO: 1981071 - DNA, 25 bp, Homo sapien
tgataagtattaacgcgtagggaaa

SEQ ID NO: 1981072 - DNA, 25 bp, Homo sapien
ccagggctgtcctgtgttagcagag

SEQ ID NO: 1981073 - DNA, 25 bp, Homo sapien
gagcccttgaaagagctaccacagg

SEQ ID NO: 1981074 - DNA, 25 bp, Homo sapien
tataaagtccctataagccaaggtc

SEQ ID NO: 1981075 - DNA, 25 bp, Homo sapien
ggcatattaactgccccagggactg

SEQ ID NO: 1981076 - DNA, 25 bp, Homo sapien
cagatgttcaggaggagtccaaggg

SEQ ID NO: 1981077 - DNA, 25 bp, Homo sapien
gatgttcaggaggagtccaagggac

SEQ ID NO: 1981078 - DNA, 25 bp, Homo sapien
agatgttcaggaggagtccaaggga

SEQ ID NO: 1981079 - DNA, 25 bp, Homo sapien
atgttcaggaggagtccaagggaca

SEQ ID NO: 1981080 - DNA, 25 bp, Homo sapien
tgacccaatgttatgttttatactt

SEQ ID NO: 1981081 - DNA, 25 bp, Homo sapien
ttgacccaatgttatgttttatact

SEQ ID NO: 1981082 - DNA, 25 bp, Homo sapien
gagggtccatttcttcggaacttca

SEQ ID NO: 1981083 - DNA, 25 bp, Homo sapien
tgagggtccatttcttcggaacttc

SEQ ID NO: 1981084 - DNA, 25 bp, Homo sapien
actggcatgcgagtccttctctgag

SEQ ID NO: 1981085 - DNA, 25 bp, Homo sapien
taataagctactggcatgcgagtcc

SEQ ID NO: 1981086 - DNA, 25 bp, Homo sapien
cagaggacagctggacgattaagcc

SEQ ID NO: 1981087 - DNA, 25 bp, Homo sapien
cagcacgtctttgtctatttgcgaa

SEQ ID NO: 1981088 - DNA, 25 bp, Homo sapien
tgggtggtccaggtaaaacatggca

SEQ ID NO: 1981089 - DNA, 25 bp, Homo sapien
gaacttggcacacgatccactggct

SEQ ID NO: 1981090 - DNA, 25 bp, Homo sapien
aactaggaccagaagagctggccag

SEQ ID NO: 1981091 - DNA, 25 bp, Homo sapien
aaaggagaactaggaccagaagagc

SEQ ID NO: 1981092 - DNA, 25 bp, Homo sapien
cctgagtgatggaggcaccacagct

SEQ ID NO: 1981093 - DNA, 25 bp, Homo sapien
gtgacacaaaggagaactaggacca

SEQ ID NO: 1981094 - DNA, 25 bp, Homo sapien
gcacacctcacacaactgtgtgaaa

SEQ ID NO: 1981095 - DNA, 25 bp, Homo sapien
agatgggtaagtgtcgacgtcataa

SEQ ID NO: 1981096 - DNA, 25 bp, Homo sapien
gggtaagtgtcgacgtcataacaag

SEQ ID NO: 1981097 - DNA, 25 bp, Homo sapien
cacacctcacacaactgtgtgaaaa

SEQ ID NO: 1981098 - DNA, 25 bp, Homo sapien
aaaagccagcagtttggcaaccaag

SEQ ID NO: 1981099 - DNA, 25 bp, Homo sapien
tttggcaaccaagggcagaacggct

SEQ ID NO: 1981100 - DNA, 25 bp, Homo sapien
gtgcccacaccaaaagccagcagtt

SEQ ID NO: 1981101 - DNA, 25 bp, Homo sapien
agcagtttggcaaccaagggcagaa

SEQ ID NO: 1981102 - DNA, 25 bp, Homo sapien
ttaacggagacctcgagtcgctgca

SEQ ID NO: 1981103 - DNA, 25 bp, Homo sapien
ccacttatcacatgagcacactgaa

SEQ ID NO: 1981104 - DNA, 25 bp, Homo sapien
agtcgctgcagaggcgtggtgcaca

SEQ ID NO: 1981105 - DNA, 25 bp, Homo sapien
cgctttcctggcatccggtctgggc

SEQ ID NO: 1981106 - DNA, 25 bp, Homo sapien
ttgagagggtcatggatgcagctgt

SEQ ID NO: 1981107 - DNA, 25 bp, Homo sapien
cccgctctccagagggttgttgaga

SEQ ID NO: 1981108 - DNA, 25 bp, Homo sapien
tcctcacagtccctaataaattatt

SEQ ID NO: 1981109 - DNA, 25 bp, Homo sapien
ctagagcacccgctctccagagggt

SEQ ID NO: 1981110 - DNA, 25 bp, Homo sapien
gatccttaatgagcccatggtaggg

SEQ ID NO: 1981111 - DNA, 25 bp, Homo sapien
ctggggtccgtggatccttaatgag

SEQ ID NO: 1981112 - DNA, 25 bp, Homo sapien
ccttaatgagcccatggtagggctc

SEQ ID NO: 1981113 - DNA, 25 bp, Homo sapien
ggatccttaatgagcccatggtagg

SEQ ID NO: 1981114 - DNA, 25 bp, Homo sapien
gctggtgctggttctcagtgccact

SEQ ID NO: 1981115 - DNA, 25 bp, Homo sapien
ggttctcagtgccactgccactggt

SEQ ID NO: 1981116 - DNA, 25 bp, Homo sapien
ctactcaaggtgtggctggtgctgg

SEQ ID NO: 1981117 - DNA, 25 bp, Homo sapien
ggtgctggttctcagtgccactgcc

SEQ ID NO: 1981118 - DNA, 25 bp, Homo sapien
gtggatggcacctttgcatggctcc

SEQ ID NO: 1981119 - DNA, 25 bp, Homo sapien
tgtggatggcacctttgcatggctc

SEQ ID NO: 1981120 - DNA, 25 bp, Homo sapien
ctgggcccacgtggattcctccagc

SEQ ID NO: 1981121 - DNA, 25 bp, Homo sapien
tctgtggatggcacctttgcatggc

SEQ ID NO: 1981122 - DNA, 25 bp, Homo sapien
atgaggaattctcttcaaaggtttt

SEQ ID NO: 1981123 - DNA, 25 bp, Homo sapien
taaatgaggaattctcttcaaaggt

SEQ ID NO: 1981124 - DNA, 25 bp, Homo sapien
tccttttcccagttgctgccatttt

SEQ ID NO: 1981125 - DNA, 25 bp, Homo sapien
caggatgcatggagcagcacgtggc

SEQ ID NO: 1981126 - DNA, 25 bp, Homo sapien
gctgatctggctgatccattttctc

SEQ ID NO: 1981127 - DNA, 25 bp, Homo sapien
tttggctgatctggctgatccattt

SEQ ID NO: 1981128 - DNA, 25 bp, Homo sapien
tttttggctgatctggctgatccat

SEQ ID NO: 1981129 - DNA, 25 bp, Homo sapien
tggctgatctggctgatccattttc

SEQ ID NO: 1981130 - DNA, 25 bp, Homo sapien
ctcagtaggaggctgcccccagatg

SEQ ID NO: 1981131 - DNA, 25 bp, Homo sapien
tgcttctagtggccatttcccagtg

SEQ ID NO: 1981132 - DNA, 25 bp, Homo sapien
cagtaggaggctgcccccagatgcc

SEQ ID NO: 1981133 - DNA, 25 bp, Homo sapien
gcttctagtggccatttcccagtgc

SEQ ID NO: 1981134 - DNA, 25 bp, Homo sapien
cttcttctgtctgtaagttgaagta

SEQ ID NO: 1981135 - DNA, 25 bp, Homo sapien
gtttgctcatatcttgaaacaaatg

SEQ ID NO: 1981136 - DNA, 25 bp, Homo sapien
gtagtgtttgctcatatcttgaaac

SEQ ID NO: 1981137 - DNA, 25 bp, Homo sapien
ttctgtctgtaagttgaagtagtgt

SEQ ID NO: 1981138 - DNA, 25 bp, Homo sapien
tagagaaggacactgtgtgcggtca

SEQ ID NO: 1981139 - DNA, 25 bp, Homo sapien
acccatagagaaggacactgtgtgc

SEQ ID NO: 1981140 - DNA, 25 bp, Homo sapien
aggacactgtgtgcggtcactgaag

SEQ ID NO: 1981141 - DNA, 25 bp, Homo sapien
ctgtgtgcggtcactgaagttttct

SEQ ID NO: 1981142 - DNA, 25 bp, Homo sapien
gaatatagcggtgtcggttccaaaa

SEQ ID NO: 1981143 - DNA, 25 bp, Homo sapien
aagaatatagcggtgtcggttccaa

SEQ ID NO: 1981144 - DNA, 25 bp, Homo sapien
atagcggtgtcggttccaaaagctt

SEQ ID NO: 1981145 - DNA, 25 bp, Homo sapien
atatagcggtgtcggttccaaaagc

SEQ ID NO: 1981146 - DNA, 25 bp, Homo sapien
ttattccgcgtgtaacttgatctcc

SEQ ID NO: 1981147 - DNA, 25 bp, Homo sapien
ccttttgtagaacatcaagagggaa

SEQ ID NO: 1981148 - DNA, 25 bp, Homo sapien
ttccatggagcacttattccgcgtg

SEQ ID NO: 1981149 - DNA, 25 bp, Homo sapien
gagggaaataaactatggtgtatgt

SEQ ID NO: 1981150 - DNA, 25 bp, Homo sapien
tgatgctctctatgggaatttcaaa

SEQ ID NO: 1981151 - DNA, 25 bp, Homo sapien
caggcctggagttgcgtgatgctct

SEQ ID NO: 1981152 - DNA, 25 bp, Homo sapien
ggtgctattccatgatgattaagag

SEQ ID NO: 1981153 - DNA, 25 bp, Homo sapien
tccatgatgattaagagtaagaaga

SEQ ID NO: 1981154 - DNA, 25 bp, Homo sapien
ggaaccactcagatctctctacaat

SEQ ID NO: 1981155 - DNA, 25 bp, Homo sapien
cactatcagcttgaggtggtgaaac

SEQ ID NO: 1981156 - DNA, 25 bp, Homo sapien
agaggaacaccggttcatggtcaca

SEQ ID NO: 1981157 - DNA, 25 bp, Homo sapien
tcacattccgtacatctgcttgatg

SEQ ID NO: 1981158 - DNA, 25 bp, Homo sapien
gggcaccaatgtagtttggaaccat

SEQ ID NO: 1981159 - DNA, 25 bp, Homo sapien
tggcctgggcaccaatgtagtttgg

SEQ ID NO: 1981160 - DNA, 25 bp, Homo sapien
cctgggcaccaatgtagtttggaac

SEQ ID NO: 1981161 - DNA, 25 bp, Homo sapien
ctggcctgggcaccaatgtagtttg

SEQ ID NO: 1981162 - DNA, 25 bp, Homo sapien
caggaggcaaacaactgtgactgcc

SEQ ID NO: 1981163 - DNA, 25 bp, Homo sapien
ggaggcaaacaactgtgactgccac

SEQ ID NO: 1981164 - DNA, 25 bp, Homo sapien
acaggaggcaaacaactgtgactgc

SEQ ID NO: 1981165 - DNA, 25 bp, Homo sapien
aggcaaacaactgtgactgccacat

SEQ ID NO: 1981166 - DNA, 25 bp, Homo sapien
tgacacagagccctcgggattggcc

SEQ ID NO: 1981167 - DNA, 25 bp, Homo sapien
gattggccgggttccagagtatgac

SEQ ID NO: 1981168 - DNA, 25 bp, Homo sapien
gagtatgaccaacatgcatatcttc

SEQ ID NO: 1981169 - DNA, 25 bp, Homo sapien
tgaatgtttttgtggcatgatgaca

SEQ ID NO: 1981170 - DNA, 25 bp, Homo sapien
cttgcagttttgccactggtcacac

SEQ ID NO: 1981171 - DNA, 25 bp, Homo sapien
gtcacactggtgcttgtacccagca

SEQ ID NO: 1981172 - DNA, 25 bp, Homo sapien
tcaagaacaggtctggaatccaaga

SEQ ID NO: 1981173 - DNA, 25 bp, Homo sapien
gacatttctgcgttggctcagcctc

SEQ ID NO: 1981174 - DNA, 25 bp, Homo sapien
actgaggtgttaaagagggcacagc

SEQ ID NO: 1981175 - DNA, 25 bp, Homo sapien
ctgaggtgttaaagagggcacagct

SEQ ID NO: 1981176 - DNA, 25 bp, Homo sapien
cctcttgaggcccatgtggggatga

SEQ ID NO: 1981177 - DNA, 25 bp, Homo sapien
tgatcagcagttcccttaagaaggg

SEQ ID NO: 1981178 - DNA, 25 bp, Homo sapien
tactccatggtggtgaactaaacat

SEQ ID NO: 1981179 - DNA, 25 bp, Homo sapien
tttccctgaagtacacaacaatgag

SEQ ID NO: 1981180 - DNA, 25 bp, Homo sapien
catggttggcttaaactacccagga

SEQ ID NO: 1981181 - DNA, 25 bp, Homo sapien
tagatttatctcacggatatgccag

SEQ ID NO: 1981182 - DNA, 25 bp, Homo sapien
gggttttagtgtctttgacctatgc

SEQ ID NO: 1981183 - DNA, 25 bp, Homo sapien
gacctatgctcaatgaatcctcttg

SEQ ID NO: 1981184 - DNA, 25 bp, Homo sapien
aaaacagtaggcagtatattggtca

SEQ ID NO: 1981185 - DNA, 25 bp, Homo sapien
cacttcatcatcctctggggctctg

SEQ ID NO: 1981186 - DNA, 25 bp, Homo sapien
cttcatcatcctctggggctctgct

SEQ ID NO: 1981187 - DNA, 25 bp, Homo sapien
catcctctggggctctgctgctcat

SEQ ID NO: 1981188 - DNA, 25 bp, Homo sapien
atcatcctctggggctctgctgctc

SEQ ID NO: 1981189 - DNA, 25 bp, Homo sapien
tttgtagtagccacgatgggaattg

SEQ ID NO: 1981190 - DNA, 25 bp, Homo sapien
tgtagtagccacgatgggaattgtc

SEQ ID NO: 1981191 - DNA, 25 bp, Homo sapien
ttcgtttgtagtagccacgatggga

SEQ ID NO: 1981192 - DNA, 25 bp, Homo sapien
tagtagccacgatgggaattgtcat

SEQ ID NO: 1981193 - DNA, 25 bp, Homo sapien
cttggttctcctcccggctactatt

SEQ ID NO: 1981194 - DNA, 25 bp, Homo sapien
gaatttcttgcaaaatcaccatcct

SEQ ID NO: 1981195 - DNA, 25 bp, Homo sapien
tcttgcaaaatcaccatccttggtt

SEQ ID NO: 1981196 - DNA, 25 bp, Homo sapien
gctactatttggaggccgccattca

SEQ ID NO: 1981197 - DNA, 25 bp, Homo sapien
tgctgaccagaagaacaccttttcc

SEQ ID NO: 1981198 - DNA, 25 bp, Homo sapien
ggtgcagttcctttgctgcccgaga

SEQ ID NO: 1981199 - DNA, 25 bp, Homo sapien
gagcccatttggatttgctgaccag

SEQ ID NO: 1981200 - DNA, 25 bp, Homo sapien
gagatgctgtcctccacaattggta

SEQ ID NO: 1981201 - DNA, 25 bp, Homo sapien
tacactctcaccaacagtgtatagt

SEQ ID NO: 1981202 - DNA, 25 bp, Homo sapien
ctctcaccaacagtgtatagtgttc

SEQ ID NO: 1981203 - DNA, 25 bp, Homo sapien
cactctcaccaacagtgtatagtgt

SEQ ID NO: 1981204 - DNA, 25 bp, Homo sapien
actctcaccaacagtgtatagtgtt

SEQ ID NO: 1981205 - DNA, 25 bp, Homo sapien
cagatatctgcacaagatgggctgc

SEQ ID NO: 1981206 - DNA, 25 bp, Homo sapien
ctgggattgcagatatctgcacaag

SEQ ID NO: 1981207 - DNA, 25 bp, Homo sapien
tgcagatatctgcacaagatgggct

SEQ ID NO: 1981208 - DNA, 25 bp, Homo sapien
gattgcagatatctgcacaagatgg

SEQ ID NO: 1981209 - DNA, 25 bp, Homo sapien
tgtctgggccagtctttggaaggca

SEQ ID NO: 1981210 - DNA, 25 bp, Homo sapien
ttagaattaggattcagcattccac

SEQ ID NO: 1981211 - DNA, 25 bp, Homo sapien
ccccggaagtgataaaggccatgtt

SEQ ID NO: 1981212 - DNA, 25 bp, Homo sapien
aggccatgttaagtaatccttctgc

SEQ ID NO: 1981213 - DNA, 25 bp, Homo sapien
atacaatttaactgctctgagagcc

SEQ ID NO: 1981214 - DNA, 25 bp, Homo sapien
tctcatcccgtgtttccatggaaga

SEQ ID NO: 1981215 - DNA, 25 bp, Homo sapien
aatgaaacggaatgaggtctctgtc

SEQ ID NO: 1981216 - DNA, 25 bp, Homo sapien
caggatttcactagagttgccaaaa

SEQ ID NO: 1981217 - DNA, 25 bp, Homo sapien
taaggcataagagacgctgtctaca

SEQ ID NO: 1981218 - DNA, 25 bp, Homo sapien
tatagcacttggacgacactaagac

SEQ ID NO: 1981219 - DNA, 25 bp, Homo sapien
tacagtcctatagaaatgttaaccg

SEQ ID NO: 1981220 - DNA, 25 bp, Homo sapien
accttttggcaaacatacagtccta

SEQ ID NO: 1981221 - DNA, 25 bp, Homo sapien
gacgctgataatgtgctaaaggtga

SEQ ID NO: 1981222 - DNA, 25 bp, Homo sapien
tactactattaatcattggacgctg

SEQ ID NO: 1981223 - DNA, 25 bp, Homo sapien
actactactattaatcattggacgc

SEQ ID NO: 1981224 - DNA, 25 bp, Homo sapien
aatcattggacgctgataatgtgct

SEQ ID NO: 1981225 - DNA, 25 bp, Homo sapien
gttttctgaaacatccaagaagtac

SEQ ID NO: 1981226 - DNA, 25 bp, Homo sapien
gattcttgtagttgttttctgaaac

SEQ ID NO: 1981227 - DNA, 25 bp, Homo sapien
tcagaggacagtcctcaaaatgaaa

SEQ ID NO: 1981228 - DNA, 25 bp, Homo sapien
cagaggacagtcctcaaaatgaaaa

SEQ ID NO: 1981229 - DNA, 25 bp, Homo sapien
gtatctcctatttgctttcatcaga

SEQ ID NO: 1981230 - DNA, 25 bp, Homo sapien
tctcctatttgctttcatcagagat

SEQ ID NO: 1981231 - DNA, 25 bp, Homo sapien
ttgttccatgggtatgtatctccta

SEQ ID NO: 1981232 - DNA, 25 bp, Homo sapien
gttccatgggtatgtatctcctatt

SEQ ID NO: 1981233 - DNA, 25 bp, Homo sapien
ctttgacttccgtattcttcattct

SEQ ID NO: 1981234 - DNA, 25 bp, Homo sapien
tcagtgatgacgtcctatcagggac

SEQ ID NO: 1981235 - DNA, 25 bp, Homo sapien
tgcttagtgtcaaggtaactctccc

SEQ ID NO: 1981236 - DNA, 25 bp, Homo sapien
gcagcatatgggcaaatactgccag

SEQ ID NO: 1981237 - DNA, 25 bp, Homo sapien
actgccagccaatgattcagtgatg

SEQ ID NO: 1981238 - DNA, 25 bp, Homo sapien
cgaaattggagtacttctagaaggt

SEQ ID NO: 1981239 - DNA, 25 bp, Homo sapien
gacacttgtgtaagacgtgggctct

SEQ ID NO: 1981240 - DNA, 25 bp, Homo sapien
cacttgtgtaagacgtgggctctca

SEQ ID NO: 1981241 - DNA, 25 bp, Homo sapien
gtaagacgtgggctctcaaaacagc

SEQ ID NO: 1981242 - DNA, 25 bp, Homo sapien
tgtgtaagacgtgggctctcaaaac

SEQ ID NO: 1981243 - DNA, 25 bp, Homo sapien
ttggatgctcttcttcatgactcct

SEQ ID NO: 1981244 - DNA, 25 bp, Homo sapien
tgtttggatgctcttcttcatgact

SEQ ID NO: 1981245 - DNA, 25 bp, Homo sapien
tcgccaatgcacagatgtaaactat

SEQ ID NO: 1981246 - DNA, 25 bp, Homo sapien
ttcatgactcctcgccaatgcacag

SEQ ID NO: 1981247 - DNA, 25 bp, Homo sapien
taaatagaatatgcatgtggtatgc

SEQ ID NO: 1981248 - DNA, 25 bp, Homo sapien
tatgcacgggaactcttggagacca

SEQ ID NO: 1981249 - DNA, 25 bp, Homo sapien
tctggtgttgctcccacacaatggg

SEQ ID NO: 1981250 - DNA, 25 bp, Homo sapien
cattttctctcggtggatggatttt

SEQ ID NO: 1981251 - DNA, 25 bp, Homo sapien
agtcattccccaaaacaagcccatc

SEQ ID NO: 1981252 - DNA, 25 bp, Homo sapien
catctttcttaattcccagggcaaa

SEQ ID NO: 1981253 - DNA, 25 bp, Homo sapien
aactccatgttcatatctgatggca

SEQ ID NO: 1981254 - DNA, 25 bp, Homo sapien
aaaatccctgcaggaaagtcattcc

SEQ ID NO: 1981255 - DNA, 25 bp, Homo sapien
tgggtagtaagcagggcacgtggat

SEQ ID NO: 1981256 - DNA, 25 bp, Homo sapien
ctgagtacgtaacttcttttcccag

SEQ ID NO: 1981257 - DNA, 25 bp, Homo sapien
gtagcaacacgctgatgccctgcag

SEQ ID NO: 1981258 - DNA, 25 bp, Homo sapien
ccaggctctcagaagtagcaacacg

SEQ ID NO: 1981259 - DNA, 25 bp, Homo sapien
gtttggggatctggaactgaattct

SEQ ID NO: 1981260 - DNA, 25 bp, Homo sapien
tgtttggggatctggaactgaattc

SEQ ID NO: 1981261 - DNA, 25 bp, Homo sapien
gaaaagtgcaccaactttaggtgaa

SEQ ID NO: 1981262 - DNA, 25 bp, Homo sapien
aggccccctcgtacagatctctgtg

SEQ ID NO: 1981263 - DNA, 25 bp, Homo sapien
caccaactttaggtgaatgcctcat

SEQ ID NO: 1981264 - DNA, 25 bp, Homo sapien
tgtttgctccccgaggaaaagtgca

SEQ ID NO: 1981265 - DNA, 25 bp, Homo sapien
ggccatccagtaggaaaatccagtg

SEQ ID NO: 1981266 - DNA, 25 bp, Homo sapien
ggggtcagctctgggtaccagaaaa

SEQ ID NO: 1981267 - DNA, 25 bp, Homo sapien
cagtgtaggtaccatccgaggaagg

SEQ ID NO: 1981268 - DNA, 25 bp, Homo sapien
cttgaacaactctgatcttggccat

SEQ ID NO: 1981269 - DNA, 25 bp, Homo sapien
gtgaactcacagacccctgaagctc

SEQ ID NO: 1981270 - DNA, 25 bp, Homo sapien
tgaatgtcacagaggtgttccatga

SEQ ID NO: 1981271 - DNA, 25 bp, Homo sapien
acttgtgatgagaccgtggtagtca

SEQ ID NO: 1981272 - DNA, 25 bp, Homo sapien
cagattacaagaggatcaaaggccc

SEQ ID NO: 1981273 - DNA, 25 bp, Homo sapien
gctgcacaaaagctggaactatgca

SEQ ID NO: 1981274 - DNA, 25 bp, Homo sapien
atttccttcccctggccagcaagtg

SEQ ID NO: 1981275 - DNA, 25 bp, Homo sapien
tcccctatccccaaacatgagagct

SEQ ID NO: 1981276 - DNA, 25 bp, Homo sapien
ccagcaagtgcctcagggatagggc

SEQ ID NO: 1981277 - DNA, 25 bp, Homo sapien
tcccctttgtccccaagttcattca

SEQ ID NO: 1981278 - DNA, 25 bp, Homo sapien
ttcttttccatctagtttgtgaggt

SEQ ID NO: 1981279 - DNA, 25 bp, Homo sapien
ttccatctagtttgtgaggtttccc

SEQ ID NO: 1981280 - DNA, 25 bp, Homo sapien
ttttccatctagtttgtgaggtttc

SEQ ID NO: 1981281 - DNA, 25 bp, Homo sapien
tcttttccatctagtttgtgaggtt

SEQ ID NO: 1981282 - DNA, 25 bp, Homo sapien
tggaaaaggagctctcatgcccaaa

SEQ ID NO: 1981283 - DNA, 25 bp, Homo sapien
ttttggaaaaggagctctcatgccc

SEQ ID NO: 1981284 - DNA, 25 bp, Homo sapien
ctttttggaaaaggagctctcatgc

SEQ ID NO: 1981285 - DNA, 25 bp, Homo sapien
aaaaggagctctcatgcccaaattc

SEQ ID NO: 1981286 - DNA, 25 bp, Homo sapien
ttgcaagccattcctaattcaactg

SEQ ID NO: 1981287 - DNA, 25 bp, Homo sapien
tcttccatccctactaacatttttg

SEQ ID NO: 1981288 - DNA, 25 bp, Homo sapien
ttttgaatattaatcactcctcgtc

SEQ ID NO: 1981289 - DNA, 25 bp, Homo sapien
tattaatcactcctcgtctccaaca

SEQ ID NO: 1981290 - DNA, 25 bp, Homo sapien
ggagtagtgaagtcaacatttgaat

SEQ ID NO: 1981291 - DNA, 25 bp, Homo sapien
gaagtcaacatttgaattatctgtg

SEQ ID NO: 1981292 - DNA, 25 bp, Homo sapien
tagtgaagtcaacatttgaattatc

SEQ ID NO: 1981293 - DNA, 25 bp, Homo sapien
ctggagtagtgaagtcaacatttga

SEQ ID NO: 1981294 - DNA, 25 bp, Homo sapien
ggttatgggccaaagattgtttaca

SEQ ID NO: 1981295 - DNA, 25 bp, Homo sapien
tgttctcgctcagaactgctttgac

SEQ ID NO: 1981296 - DNA, 25 bp, Homo sapien
gacaggtaatgcaaaagaactagag

SEQ ID NO: 1981297 - DNA, 25 bp, Homo sapien
taatgcacgggttacttcacccatc

SEQ ID NO: 1981298 - DNA, 25 bp, Homo sapien
ctgattggggctatgtccagggcca

SEQ ID NO: 1981299 - DNA, 25 bp, Homo sapien
gtgttgccaaccattcagtgaagaa

SEQ ID NO: 1981300 - DNA, 25 bp, Homo sapien
cagtgaagaatgcattagtgttgcc

SEQ ID NO: 1981301 - DNA, 25 bp, Homo sapien
tagtgttgccatgggaatgttatct

SEQ ID NO: 1981302 - DNA, 25 bp, Homo sapien
caaatccaatttcctccgcccattt

SEQ ID NO: 1981303 - DNA, 25 bp, Homo sapien
ttgccaaatccaatttcctccgccc

SEQ ID NO: 1981304 - DNA, 25 bp, Homo sapien
ccttggtatcttgtggtaggtgacc

SEQ ID NO: 1981305 - DNA, 25 bp, Homo sapien
ttccttggtatcttgtggtaggtga

SEQ ID NO: 1981306 - DNA, 25 bp, Homo sapien
ccccttactgcaaatgtcccattca

SEQ ID NO: 1981307 - DNA, 25 bp, Homo sapien
accccttactgcaaatgtcccattc

SEQ ID NO: 1981308 - DNA, 25 bp, Homo sapien
cccttactgcaaatgtcccattcag

SEQ ID NO: 1981309 - DNA, 25 bp, Homo sapien
ccttactgcaaatgtcccattcagt

SEQ ID NO: 1981310 - DNA, 25 bp, Homo sapien
tcagagagacttggcccaagctgcc

SEQ ID NO: 1981311 - DNA, 25 bp, Homo sapien
ttcagagagacttggcccaagctgc

SEQ ID NO: 1981312 - DNA, 25 bp, Homo sapien
aggcagctcgagtgtggccccacat

SEQ ID NO: 1981313 - DNA, 25 bp, Homo sapien
ccaagctgccaaaggggttgactga

SEQ ID NO: 1981314 - DNA, 25 bp, Homo sapien
tcagaatgtttcacttcctagagtt

SEQ ID NO: 1981315 - DNA, 25 bp, Homo sapien
acttcctagagttgcctgaactgtg

SEQ ID NO: 1981316 - DNA, 25 bp, Homo sapien
ttcctagagttgcctgaactgtgac

SEQ ID NO: 1981317 - DNA, 25 bp, Homo sapien
cagaatgtttcacttcctagagttg

SEQ ID NO: 1981318 - DNA, 25 bp, Homo sapien
gggtttaatctatgagtccatcgga

SEQ ID NO: 1981319 - DNA, 25 bp, Homo sapien
taatctatgagtccatcggagctgc

SEQ ID NO: 1981320 - DNA, 25 bp, Homo sapien
gattggccataggaggggtttaatc

SEQ ID NO: 1981321 - DNA, 25 bp, Homo sapien
tggtgggccctctcatcttcaacag

SEQ ID NO: 1981322 - DNA, 25 bp, Homo sapien
aaatgtgcgtttccattattatcag

SEQ ID NO: 1981323 - DNA, 25 bp, Homo sapien
ggcatgtccatgacttgcaacgtct

SEQ ID NO: 1981324 - DNA, 25 bp, Homo sapien
tggcctgggcatgtccatgacttgc

SEQ ID NO: 1981325 - DNA, 25 bp, Homo sapien
gacttgcaacgtctcaaaatgtgcg

SEQ ID NO: 1981326 - DNA, 25 bp, Homo sapien
agcaaagcaccgtccaacaggcagc

SEQ ID NO: 1981327 - DNA, 25 bp, Homo sapien
caaagcaccgtccaacaggcagcac

SEQ ID NO: 1981328 - DNA, 25 bp, Homo sapien
aagcaaagcaccgtccaacaggcag

SEQ ID NO: 1981329 - DNA, 25 bp, Homo sapien
caagcaaagcaccgtccaacaggca

SEQ ID NO: 1981330 - DNA, 25 bp, Homo sapien
tgtgatctgactgatttcgccctct

SEQ ID NO: 1981331 - DNA, 25 bp, Homo sapien
cactggtaccataaagaggattgtc

SEQ ID NO: 1981332 - DNA, 25 bp, Homo sapien
aagaggattgtctaacatcgctcat

SEQ ID NO: 1981333 - DNA, 25 bp, Homo sapien
ggcccttaaagccactgtcccactg

SEQ ID NO: 1981334 - DNA, 25 bp, Homo sapien
tctgggtccaggaggtttgtcatgt

SEQ ID NO: 1981335 - DNA, 25 bp, Homo sapien
tctgcctttgggataaagctatgtg

SEQ ID NO: 1981336 - DNA, 25 bp, Homo sapien
tccaggcctagggatggattcccag

SEQ ID NO: 1981337 - DNA, 25 bp, Homo sapien
gcttgatcccaggaaaggcgagtga

SEQ ID NO: 1981338 - DNA, 25 bp, Homo sapien
tctgcatatttgacggtatctgttt

SEQ ID NO: 1981339 - DNA, 25 bp, Homo sapien
tatttgacggtatctgtttcagagg

SEQ ID NO: 1981340 - DNA, 25 bp, Homo sapien
gcatatttgacggtatctgtttcag

SEQ ID NO: 1981341 - DNA, 25 bp, Homo sapien
gacggtatctgtttcagaggatccc

SEQ ID NO: 1981342 - DNA, 25 bp, Homo sapien
cacgacccgcagcagcaggacattg

SEQ ID NO: 1981343 - DNA, 25 bp, Homo sapien
acgacccgcagcagcaggacattgg

SEQ ID NO: 1981344 - DNA, 25 bp, Homo sapien
gacccgcagcagcaggacattggcc

SEQ ID NO: 1981345 - DNA, 25 bp, Homo sapien
ccgcagcagcaggacattggccagg

SEQ ID NO: 1981346 - DNA, 25 bp, Homo sapien
tcccaggctgcgcaggagacaggct

SEQ ID NO: 1981347 - DNA, 25 bp, Homo sapien
cagcgcggctgcagataagttaatg

SEQ ID NO: 1981348 - DNA, 25 bp, Homo sapien
ggctgcagataagttaatgtacaca

SEQ ID NO: 1981349 - DNA, 25 bp, Homo sapien
taatgtacacagagaggatgtaaat

SEQ ID NO: 1981350 - DNA, 25 bp, Homo sapien
ggagcggagcgccgggcgtcggcgt

SEQ ID NO: 1981351 - DNA, 25 bp, Homo sapien
cttctcagggaagaccgcgggtgtc

SEQ ID NO: 1981352 - DNA, 25 bp, Homo sapien
tcagggaagaggatctggcccgcgc

SEQ ID NO: 1981353 - DNA, 25 bp, Homo sapien
aaaagggccagacctcttctcaggg

SEQ ID NO: 1981354 - DNA, 25 bp, Homo sapien
attagttgggcgctgtggcgcgtac

SEQ ID NO: 1981355 - DNA, 25 bp, Homo sapien
aagttctggaaatagatgctgggga

SEQ ID NO: 1981356 - DNA, 25 bp, Homo sapien
ggggatagttgctcaattatgtgaa

SEQ ID NO: 1981357 - DNA, 25 bp, Homo sapien
ggtaggggagaatgagaaattatta

SEQ ID NO: 1981358 - DNA, 25 bp, Homo sapien
ctgggcagggaaagaggatcaccat

SEQ ID NO: 1981359 - DNA, 25 bp, Homo sapien
tgcttcttggcaccaagagctgtgg

SEQ ID NO: 1981360 - DNA, 25 bp, Homo sapien
gatgcttcttggcaccaagagctgt

SEQ ID NO: 1981361 - DNA, 25 bp, Homo sapien
tcagatgcttcttggcaccaagagc

SEQ ID NO: 1981362 - DNA, 25 bp, Homo sapien
cagatgcttcttggcaccaagagct

SEQ ID NO: 1981363 - DNA, 25 bp, Homo sapien
aacacaccggtcaatgtattcggca

SEQ ID NO: 1981364 - DNA, 25 bp, Homo sapien
agcctgtggagactggtgtatgggt

SEQ ID NO: 1981365 - DNA, 25 bp, Homo sapien
ggtcaatgtattcggcatccaatgc

SEQ ID NO: 1981366 - DNA, 25 bp, Homo sapien
tatgggtggcaagcaaacacaccgg

SEQ ID NO: 1981367 - DNA, 25 bp, Homo sapien
tgtcagtgcatacctaagtctgttc

SEQ ID NO: 1981368 - DNA, 25 bp, Homo sapien
atctcctgtcagtgcatacctaagt

SEQ ID NO: 1981369 - DNA, 25 bp, Homo sapien
tgcggatcttctttgcttcatctcc

SEQ ID NO: 1981370 - DNA, 25 bp, Homo sapien
atgaactgctgcatgcggatcttct

SEQ ID NO: 1981371 - DNA, 25 bp, Homo sapien
agtggcataggttatatcagtcaag

SEQ ID NO: 1981372 - DNA, 25 bp, Homo sapien
gtggcataggttatatcagtcaaga

SEQ ID NO: 1981373 - DNA, 25 bp, Homo sapien
tggcataggttatatcagtcaagac

SEQ ID NO: 1981374 - DNA, 25 bp, Homo sapien
gaataacttggcctcctcgggtgta

SEQ ID NO: 1981375 - DNA, 25 bp, Homo sapien
ataggtgacccctggtgtcacagat

SEQ ID NO: 1981376 - DNA, 25 bp, Homo sapien
taggtgacccctggtgtcacagatc

SEQ ID NO: 1981377 - DNA, 25 bp, Homo sapien
aataggtgacccctggtgtcacaga

SEQ ID NO: 1981378 - DNA, 25 bp, Homo sapien
ggccagggcagcagatggtgccagc

SEQ ID NO: 1981379 - DNA, 25 bp, Homo sapien
ccagggcagcagatggtgccagcat

SEQ ID NO: 1981380 - DNA, 25 bp, Homo sapien
agggccagggcagcagatggtgcca

SEQ ID NO: 1981381 - DNA, 25 bp, Homo sapien
cttgatgagggccagggcagcagat

SEQ ID NO: 1981382 - DNA, 25 bp, Homo sapien
tgattgcaccaatccttcccaggtt

SEQ ID NO: 1981383 - DNA, 25 bp, Homo sapien
tgaaccacatcgaaaaatccaggat

SEQ ID NO: 1981384 - DNA, 25 bp, Homo sapien
ccagtctccaagtcagtctgaacga

SEQ ID NO: 1981385 - DNA, 25 bp, Homo sapien
tctctgttggtgattgcaccaatcc

SEQ ID NO: 1981386 - DNA, 25 bp, Homo sapien
tgacgtgtgggaatgcagccctttg

SEQ ID NO: 1981387 - DNA, 25 bp, Homo sapien
ggtggccttggtcacggattggctt

SEQ ID NO: 1981388 - DNA, 25 bp, Homo sapien
ctcatccgtcaggatctgctctgga

SEQ ID NO: 1981389 - DNA, 25 bp, Homo sapien
tcagtcctttcggttgaagcacaag

SEQ ID NO: 1981390 - DNA, 25 bp, Homo sapien
cagggtgacccaaggtctctgaaag

SEQ ID NO: 1981391 - DNA, 25 bp, Homo sapien
aatctgtcacctttcattgagcgct

SEQ ID NO: 1981392 - DNA, 25 bp, Homo sapien
tttttaagtgtgagagacatttcct

SEQ ID NO: 1981393 - DNA, 25 bp, Homo sapien
attgagcgctctgcccgtcatgggc

SEQ ID NO: 1981394 - DNA, 25 bp, Homo sapien
tagggcactatggaagattacacca

SEQ ID NO: 1981395 - DNA, 25 bp, Homo sapien
taaatagggaaataagtctgactcc

SEQ ID NO: 1981396 - DNA, 25 bp, Homo sapien
aaatcaaatgggtggctgcttctac

SEQ ID NO: 1981397 - DNA, 25 bp, Homo sapien
aacactcttagcacccgaggttgtc

SEQ ID NO: 1981398 - DNA, 25 bp, Homo sapien
taggaattgccgcattctcaaggat

SEQ ID NO: 1981399 - DNA, 25 bp, Homo sapien
gtagcaatgtaaaatttccgtaggc

SEQ ID NO: 1981400 - DNA, 25 bp, Homo sapien
gatagcctatcacagtctttgtagc

SEQ ID NO: 1981401 - DNA, 25 bp, Homo sapien
gacctcatggttaggaattgccgca

SEQ ID NO: 1981402 - DNA, 25 bp, Homo sapien
atatagaacgcttcgcaaatctgca

SEQ ID NO: 1981403 - DNA, 25 bp, Homo sapien
aatatagaacgcttcgcaaatctgc

SEQ ID NO: 1981404 - DNA, 25 bp, Homo sapien
ttgaataatcttgccgatgagaagc

SEQ ID NO: 1981405 - DNA, 25 bp, Homo sapien
caggtgtccagtatctctcccttca

SEQ ID NO: 1981406 - DNA, 25 bp, Homo sapien
tgaaaggaaaactgccgctttggtg

SEQ ID NO: 1981407 - DNA, 25 bp, Homo sapien
caattggatcagtgttttcctggag

SEQ ID NO: 1981408 - DNA, 25 bp, Homo sapien
catttccacactgggtcagctttgc

SEQ ID NO: 1981409 - DNA, 25 bp, Homo sapien
cacactgggtcagctttgcccctga

SEQ ID NO: 1981410 - DNA, 25 bp, Homo sapien
tgggtcagctttgcccctgacagag

SEQ ID NO: 1981411 - DNA, 25 bp, Homo sapien
ggcatttccacactgggtcagcttt

SEQ ID NO: 1981412 - DNA, 25 bp, Homo sapien
tgattttctgactcaccccaataga

SEQ ID NO: 1981413 - DNA, 25 bp, Homo sapien
ccaatagatctgtctggtctctgac

SEQ ID NO: 1981414 - DNA, 25 bp, Homo sapien
gtgggaccttccgtgattttctgac

SEQ ID NO: 1981415 - DNA, 25 bp, Homo sapien
gactcaccccaatagatctgtctgg

SEQ ID NO: 1981416 - DNA, 25 bp, Homo sapien
tggcatggtataatggctttgagtc

SEQ ID NO: 1981417 - DNA, 25 bp, Homo sapien
ggaattaccagctgcactgccctta

SEQ ID NO: 1981418 - DNA, 25 bp, Homo sapien
gaccacttgactacaaaacttctgc

SEQ ID NO: 1981419 - DNA, 25 bp, Homo sapien
cattcccttgtctttgaccacttga

SEQ ID NO: 1981420 - DNA, 25 bp, Homo sapien
acaggaaactgggagagagacacca

SEQ ID NO: 1981421 - DNA, 25 bp, Homo sapien
caggaccagaccaccagcagtcaca

SEQ ID NO: 1981422 - DNA, 25 bp, Homo sapien
accagaccaccagcagtcacagagg

SEQ ID NO: 1981423 - DNA, 25 bp, Homo sapien
aggaccagaccaccagcagtcacag

SEQ ID NO: 1981424 - DNA, 25 bp, Homo sapien
gaccagaccaccagcagtcacagag

SEQ ID NO: 1981425 - DNA, 25 bp, Homo sapien
aaggtgttctgggtcacccttcagg

SEQ ID NO: 1981426 - DNA, 25 bp, Homo sapien
taaggtgttctgggtcacccttcag

SEQ ID NO: 1981427 - DNA, 25 bp, Homo sapien
ctaaggtgttctgggtcacccttca

SEQ ID NO: 1981428 - DNA, 25 bp, Homo sapien
ccatagtcaggccagtactgtctgt

SEQ ID NO: 1981429 - DNA, 25 bp, Homo sapien
tttcccaccttcatgtagatttctg

SEQ ID NO: 1981430 - DNA, 25 bp, Homo sapien
tgtattttaggaccttcccttgctc

SEQ ID NO: 1981431 - DNA, 25 bp, Homo sapien
ttcatgtagatttctgttttcagga

SEQ ID NO: 1981432 - DNA, 25 bp, Homo sapien
agatggcttccctgtattatcagca

SEQ ID NO: 1981433 - DNA, 25 bp, Homo sapien
ctattcagatggcttccctgtatta

SEQ ID NO: 1981434 - DNA, 25 bp, Homo sapien
ttcagatggcttccctgtattatca

SEQ ID NO: 1981435 - DNA, 25 bp, Homo sapien
ggcttccctgtattatcagcatgac

SEQ ID NO: 1981436 - DNA, 25 bp, Homo sapien
ctatacatgcagagcttgctgcgtg

SEQ ID NO: 1981437 - DNA, 25 bp, Homo sapien
ttaacaataatgcaagctggttggc

SEQ ID NO: 1981438 - DNA, 25 bp, Homo sapien
caataatgcaagctggttggcactt

SEQ ID NO: 1981439 - DNA, 25 bp, Homo sapien
gcttgctgcgtgtttttatttaaca

SEQ ID NO: 1981440 - DNA, 25 bp, Homo sapien
gggccagctgaaaggcctcttttat

SEQ ID NO: 1981441 - DNA, 25 bp, Homo sapien
aaggcctcttttataggcagaagcc

SEQ ID NO: 1981442 - DNA, 25 bp, Homo sapien
ctgggccagctgaaaggcctctttt

SEQ ID NO: 1981443 - DNA, 25 bp, Homo sapien
aggcctcttttataggcagaagcct

SEQ ID NO: 1981444 - DNA, 25 bp, Homo sapien
tccttaagccttagagaagccttac

SEQ ID NO: 1981445 - DNA, 25 bp, Homo sapien
cagtgactggatccttaatgcctaa

SEQ ID NO: 1981446 - DNA, 25 bp, Homo sapien
gttttcatgcacttgtcactgaacg

SEQ ID NO: 1981447 - DNA, 25 bp, Homo sapien
tattgcttcccaaccagaatcgtcg

SEQ ID NO: 1981448 - DNA, 25 bp, Homo sapien
ggaaagcttctgtcacttggtgagt

SEQ ID NO: 1981449 - DNA, 25 bp, Homo sapien
ggtgagtctctcttgtcagctgaag

SEQ ID NO: 1981450 - DNA, 25 bp, Homo sapien
cagctgaaggagataccttcttgtc

SEQ ID NO: 1981451 - DNA, 25 bp, Homo sapien
atcccatgggactgttcctccatgg

SEQ ID NO: 1981452 - DNA, 25 bp, Homo sapien
atttgtttttatggctgtatagtac

SEQ ID NO: 1981453 - DNA, 25 bp, Homo sapien
tccagctccacccatgttcctacaa

SEQ ID NO: 1981454 - DNA, 25 bp, Homo sapien
gctccacccatgttcctacaaagga

SEQ ID NO: 1981455 - DNA, 25 bp, Homo sapien
ctcatttgtttttatggctgtatag

SEQ ID NO: 1981456 - DNA, 25 bp, Homo sapien
gctgaaagacctccattagttcttt

SEQ ID NO: 1981457 - DNA, 25 bp, Homo sapien
tatgggctgagtaataaagatccag

SEQ ID NO: 1981458 - DNA, 25 bp, Homo sapien
cattagttctttatgggctgagtaa

SEQ ID NO: 1981459 - DNA, 25 bp, Homo sapien
gggctgagtaataaagatccagatc

SEQ ID NO: 1981460 - DNA, 25 bp, Homo sapien
gtatgggactggattaatgtcacct

SEQ ID NO: 1981461 - DNA, 25 bp, Homo sapien
gaacaacagtatgggactggattaa

SEQ ID NO: 1981462 - DNA, 25 bp, Homo sapien
caacagtatgggactggattaatgt

SEQ ID NO: 1981463 - DNA, 25 bp, Homo sapien
caaagaacaacagtatgggactgga

SEQ ID NO: 1981464 - DNA, 25 bp, Homo sapien
gaaatggcgaggtgtcatagtctct

SEQ ID NO: 1981465 - DNA, 25 bp, Homo sapien
acaagaggaaatggcgaggtgtcat

SEQ ID NO: 1981466 - DNA, 25 bp, Homo sapien
tgcagtcaatccaatcacctttgct

SEQ ID NO: 1981467 - DNA, 25 bp, Homo sapien
ctgtttatggacaagaggaaatggc

SEQ ID NO: 1981468 - DNA, 25 bp, Homo sapien
tccctttctatgattaacctttggc

SEQ ID NO: 1981469 - DNA, 25 bp, Homo sapien
tttcttggagatggaaaccaatccc

SEQ ID NO: 1981470 - DNA, 25 bp, Homo sapien
ctttggccgtaaaagttcttgcaat

SEQ ID NO: 1981471 - DNA, 25 bp, Homo sapien
tatggtccatccaggaacatgtcat

SEQ ID NO: 1981472 - DNA, 25 bp, Homo sapien
catcccaattgccagacacctggtt

SEQ ID NO: 1981473 - DNA, 25 bp, Homo sapien
gaaggagggcatcccggttgaccat

SEQ ID NO: 1981474 - DNA, 25 bp, Homo sapien
cttgcagaaggagggcatcccggtt

SEQ ID NO: 1981475 - DNA, 25 bp, Homo sapien
acagtcatgtagcacccgcccttcc

SEQ ID NO: 1981476 - DNA, 25 bp, Homo sapien
atagcattgctgaggacaaatgtcc

SEQ ID NO: 1981477 - DNA, 25 bp, Homo sapien
tgaatagcattgctgaggacaaatg

SEQ ID NO: 1981478 - DNA, 25 bp, Homo sapien
aatttgaatagcattgctgaggaca

SEQ ID NO: 1981479 - DNA, 25 bp, Homo sapien
cagcttttcggttaatttgaatagc

SEQ ID NO: 1981480 - DNA, 25 bp, Homo sapien
gattttgttgtggcaaaagggccca

SEQ ID NO: 1981481 - DNA, 25 bp, Homo sapien
tcctgggactttgttggctgtccag

SEQ ID NO: 1981482 - DNA, 25 bp, Homo sapien
gacccatcacctgagaattttcacc

SEQ ID NO: 1981483 - DNA, 25 bp, Homo sapien
tggctgtccaggtgccacactgaga

SEQ ID NO: 1981484 - DNA, 25 bp, Homo sapien
cagtttacatcatagttaagtggaa

SEQ ID NO: 1981485 - DNA, 25 bp, Homo sapien
tgagaggaaataggctcagtaggta

SEQ ID NO: 1981486 - DNA, 25 bp, Homo sapien
gaataaggcaaactaaatacatctg

SEQ ID NO: 1981487 - DNA, 25 bp, Homo sapien
tcagtaggtacttctggatcttcat

SEQ ID NO: 1981488 - DNA, 25 bp, Homo sapien
catccgttctggttggtgagaggca

SEQ ID NO: 1981489 - DNA, 25 bp, Homo sapien
tagtcaagacactcataagcacctg

SEQ ID NO: 1981490 - DNA, 25 bp, Homo sapien
tgtgtgtcaaaccttccttgctggc

SEQ ID NO: 1981491 - DNA, 25 bp, Homo sapien
taagcacctgccatagatttagcat

SEQ ID NO: 1981492 - DNA, 25 bp, Homo sapien
tggttcaatggtaggtatttttaca

SEQ ID NO: 1981493 - DNA, 25 bp, Homo sapien
ctccaggaagagccttgaaccttgt

SEQ ID NO: 1981494 - DNA, 25 bp, Homo sapien
tccaggaagagccttgaaccttgta

SEQ ID NO: 1981495 - DNA, 25 bp, Homo sapien
ttttacaactgcttttgacatcagt

SEQ ID NO: 1981496 - DNA, 25 bp, Homo sapien
ataatatcagccctaaatacaacaa

SEQ ID NO: 1981497 - DNA, 25 bp, Homo sapien
ttgccatttccctttatggctataa

SEQ ID NO: 1981498 - DNA, 25 bp, Homo sapien
ccctttatggctataatatcagccc

SEQ ID NO: 1981499 - DNA, 25 bp, Homo sapien
catttccctttatggctataatatc

SEQ ID NO: 1981500 - DNA, 25 bp, Homo sapien
tatgatgtcaagaacaccctgcact

SEQ ID NO: 1981501 - DNA, 25 bp, Homo sapien
tgatgtcaagaacaccctgcactcc

SEQ ID NO: 1981502 - DNA, 25 bp, Homo sapien
ccctgtatgatgtcaagaacaccct

SEQ ID NO: 1981503 - DNA, 25 bp, Homo sapien
tgtatgatgtcaagaacaccctgca

SEQ ID NO: 1981504 - DNA, 25 bp, Homo sapien
catgcccttggttaagttcctcacg

SEQ ID NO: 1981505 - DNA, 25 bp, Homo sapien
gaagacctgagatgtaaggtttccc

SEQ ID NO: 1981506 - DNA, 25 bp, Homo sapien
aatcagtaggaccatccctgaagca

SEQ ID NO: 1981507 - DNA, 25 bp, Homo sapien
tctcaacgtggacgcccagtgttaa

SEQ ID NO: 1981508 - DNA, 25 bp, Homo sapien
ctcatacagtaaggctgatgggatc

SEQ ID NO: 1981509 - DNA, 25 bp, Homo sapien
ggctgatgggatccatccttgttga

SEQ ID NO: 1981510 - DNA, 25 bp, Homo sapien
aggttttctcatacagtaaggctga

SEQ ID NO: 1981511 - DNA, 25 bp, Homo sapien
ttttggccagggatcaggttttctc

SEQ ID NO: 1981512 - DNA, 25 bp, Homo sapien
tttccactagtctgcttggctttgc

SEQ ID NO: 1981513 - DNA, 25 bp, Homo sapien
tagcttagccttgaggagcgagatt

SEQ ID NO: 1981514 - DNA, 25 bp, Homo sapien
gcttggctttgcttgatctagctta

SEQ ID NO: 1981515 - DNA, 25 bp, Homo sapien
gaggagcgagattgatattccccac

SEQ ID NO: 1981516 - DNA, 25 bp, Homo sapien
taagctatatactgagtgcaatgga

SEQ ID NO: 1981517 - DNA, 25 bp, Homo sapien
gcctttcatttaactggctgggcag

SEQ ID NO: 1981518 - DNA, 25 bp, Homo sapien
gagttctgctgcatctaagctatat

SEQ ID NO: 1981519 - DNA, 25 bp, Homo sapien
gaccacactggtttgctagacacta

SEQ ID NO: 1981520 - DNA, 25 bp, Homo sapien
ttcatgcagaactgcctagaagtag

SEQ ID NO: 1981521 - DNA, 25 bp, Homo sapien
aattcatgcagaactgcctagaagt

SEQ ID NO: 1981522 - DNA, 25 bp, Homo sapien
tcatgcagaactgcctagaagtagg

SEQ ID NO: 1981523 - DNA, 25 bp, Homo sapien
catgcagaactgcctagaagtagga

SEQ ID NO: 1981524 - DNA, 25 bp, Homo sapien
ggatttcatcatattggccaggctt

SEQ ID NO: 1981525 - DNA, 25 bp, Homo sapien
gatttcatcatattggccaggcttg

SEQ ID NO: 1981526 - DNA, 25 bp, Homo sapien
tctcgaacacctgaccttgtgatct

SEQ ID NO: 1981527 - DNA, 25 bp, Homo sapien
taatttgcccgatttaggaactatc

SEQ ID NO: 1981528 - DNA, 25 bp, Homo sapien
gattagtctcgtgtagcctggccaa

SEQ ID NO: 1981529 - DNA, 25 bp, Homo sapien
gatggtgccaagattccagattgag

SEQ ID NO: 1981530 - DNA, 25 bp, Homo sapien
tgatcttcactctagctacattgga

SEQ ID NO: 1981531 - DNA, 25 bp, Homo sapien
taccatcaacctcttctacggcaat

SEQ ID NO: 1981532 - DNA, 25 bp, Homo sapien
ccatcaacctcttctacggcaatat

SEQ ID NO: 1981533 - DNA, 25 bp, Homo sapien
tcaacctcttctacggcaatatcct

SEQ ID NO: 1981534 - DNA, 25 bp, Homo sapien
catcaacctcttctacggcaatatc

SEQ ID NO: 1981535 - DNA, 25 bp, Homo sapien
agctgccgggagctacccgaagagt

SEQ ID NO: 1981536 - DNA, 25 bp, Homo sapien
ttctgaattgcgctggggaaagctc

SEQ ID NO: 1981537 - DNA, 25 bp, Homo sapien
gggaaagctcaagccgttctgttgg

SEQ ID NO: 1981538 - DNA, 25 bp, Homo sapien
ggcgaccgccacagcatttctgaat

SEQ ID NO: 1981539 - DNA, 25 bp, Homo sapien
gtcacgcgggagttccacttgcgtc

SEQ ID NO: 1981540 - DNA, 25 bp, Homo sapien
gagtgccaaatcctcggtgggaaag

SEQ ID NO: 1981541 - DNA, 25 bp, Homo sapien
gctgtgaaaggacggctgctcgctt

SEQ ID NO: 1981542 - DNA, 25 bp, Homo sapien
gattgcctcgggattcgcgaaagcc

SEQ ID NO: 1981543 - DNA, 25 bp, Homo sapien
aagggaagcgagcactttctgaggc

SEQ ID NO: 1981544 - DNA, 25 bp, Homo sapien
agacacaaccccagagccgggagcc

SEQ ID NO: 1981545 - DNA, 25 bp, Homo sapien
gccaagcacgcagctccagaccaga

SEQ ID NO: 1981546 - DNA, 25 bp, Homo sapien
gaagcagtcgctccgacccagagct

SEQ ID NO: 1981547 - DNA, 25 bp, Homo sapien
ggagcccttcgccaagcacgcagct

SEQ ID NO: 1981548 - DNA, 25 bp, Homo sapien
cttggcggcgaaaggcgcttcctca

SEQ ID NO: 1981549 - DNA, 25 bp, Homo sapien
cgggagacccagaagtagtactgag

SEQ ID NO: 1981550 - DNA, 25 bp, Homo sapien
tccaccaccaccgagtgtagcccgg

SEQ ID NO: 1981551 - DNA, 25 bp, Homo sapien
tagtactgaggtagcgctcgtcctc

SEQ ID NO: 1981552 - DNA, 25 bp, Homo sapien
aaaacctccgaagcgcgcgcgcgag

SEQ ID NO: 1981553 - DNA, 25 bp, Homo sapien
ctggccaaaaaacctccgaagcgcg

SEQ ID NO: 1981554 - DNA, 25 bp, Homo sapien
cgcgcgcgagccgcagtcggcgcat

SEQ ID NO: 1981555 - DNA, 25 bp, Homo sapien
gcgcgcgcgagccgcagtcggcgca

SEQ ID NO: 1981556 - DNA, 25 bp, Homo sapien
cacaggtattctcacacgggtaagg

SEQ ID NO: 1981557 - DNA, 25 bp, Homo sapien
gtcctcttatgggcggagcagagca

SEQ ID NO: 1981558 - DNA, 25 bp, Homo sapien
taaggcgagaggcacatttcatcac

SEQ ID NO: 1981559 - DNA, 25 bp, Homo sapien
gggacttgaacaaactgcacgggac

SEQ ID NO: 1981560 - DNA, 25 bp, Homo sapien
tattccttagtataaaccactacac

SEQ ID NO: 1981561 - DNA, 25 bp, Homo sapien
tccttagtataaaccactacactgc

SEQ ID NO: 1981562 - DNA, 25 bp, Homo sapien
agtataaaccactacactgcaggtg

SEQ ID NO: 1981563 - DNA, 25 bp, Homo sapien
tgtgtattccttagtataaaccact

SEQ ID NO: 1981564 - DNA, 25 bp, Homo sapien
caatctctcagaacgtcacgtctta

SEQ ID NO: 1981565 - DNA, 25 bp, Homo sapien
caatgaaccgttattcgaggcacga

SEQ ID NO: 1981566 - DNA, 25 bp, Homo sapien
catctctctctgcaatgaaccgtta

SEQ ID NO: 1981567 - DNA, 25 bp, Homo sapien
gaggcacgacgacaatgtacatttt

SEQ ID NO: 1981568 - DNA, 25 bp, Homo sapien
caaactgattgtttcctgctaacca

SEQ ID NO: 1981569 - DNA, 25 bp, Homo sapien
tgtttcctgctaaccatttcctgag

SEQ ID NO: 1981570 - DNA, 25 bp, Homo sapien
cctgctaaccatttcctgaggtctc

SEQ ID NO: 1981571 - DNA, 25 bp, Homo sapien
aaagcaaactgattgtttcctgcta

SEQ ID NO: 1981572 - DNA, 25 bp, Homo sapien
ttatagaggtatcaagtcgtctttg

SEQ ID NO: 1981573 - DNA, 25 bp, Homo sapien
cattatagaggtatcaagtcgtctt

SEQ ID NO: 1981574 - DNA, 25 bp, Homo sapien
tacattatagaggtatcaagtcgtc

SEQ ID NO: 1981575 - DNA, 25 bp, Homo sapien
ctgttacattatagaggtatcaagt

SEQ ID NO: 1981576 - DNA, 25 bp, Homo sapien
gctccacacttctacttgcttaata

SEQ ID NO: 1981577 - DNA, 25 bp, Homo sapien
taatatgctccacacttctacttgc

SEQ ID NO: 1981578 - DNA, 25 bp, Homo sapien
tatgctccacacttctacttgctta

SEQ ID NO: 1981579 - DNA, 25 bp, Homo sapien
cttgcttaatatgctccacacttct

SEQ ID NO: 1981580 - DNA, 25 bp, Homo sapien
agtcactagatgtatctgcagagtt

SEQ ID NO: 1981581 - DNA, 25 bp, Homo sapien
tgtacttctctatcatgacattctt

SEQ ID NO: 1981582 - DNA, 25 bp, Homo sapien
gatgtatctgcagagttagggcttc

SEQ ID NO: 1981583 - DNA, 25 bp, Homo sapien
ccacagctgcttcccgagatgttca

SEQ ID NO: 1981584 - DNA, 25 bp, Homo sapien
agaaaaggtattacttctacaacag

SEQ ID NO: 1981585 - DNA, 25 bp, Homo sapien
tcaaatgctccactattaagtcaca

SEQ ID NO: 1981586 - DNA, 25 bp, Homo sapien
gtcaaatgctccactattaagtcac

SEQ ID NO: 1981587 - DNA, 25 bp, Homo sapien
agattcgttcctgttttagcttggt

SEQ ID NO: 1981588 - DNA, 25 bp, Homo sapien
aagattcgttcctgttttagcttgg

SEQ ID NO: 1981589 - DNA, 25 bp, Homo sapien
tctaaaactttaatggtttcatgaa

SEQ ID NO: 1981590 - DNA, 25 bp, Homo sapien
ttcatgaaggactttctgctgttcc

SEQ ID NO: 1981591 - DNA, 25 bp, Homo sapien
gaattcttctagtctttgtgcatct

SEQ ID NO: 1981592 - DNA, 25 bp, Homo sapien
tgttccctcagctgttgatttttgg

SEQ ID NO: 1981593 - DNA, 25 bp, Homo sapien
tgatgtgatctcagaattaatgaaa

SEQ ID NO: 1981594 - DNA, 25 bp, Homo sapien
gaattagaacattgctacccttgag

SEQ ID NO: 1981595 - DNA, 25 bp, Homo sapien
tacccttgagcttccactacatcaa

SEQ ID NO: 1981596 - DNA, 25 bp, Homo sapien
tattcattcaaaggtgagagaaggc

SEQ ID NO: 1981597 - DNA, 25 bp, Homo sapien
cagtgttaacctcataggagtggga

SEQ ID NO: 1981598 - DNA, 25 bp, Homo sapien
gaagatccctagactccctcaaagt

SEQ ID NO: 1981599 - DNA, 25 bp, Homo sapien
acaggttcaggccatcatgctcagc

SEQ ID NO: 1981600 - DNA, 25 bp, Homo sapien
tagcaggtaggtagtttataggtcc

SEQ ID NO: 1981601 - DNA, 25 bp, Homo sapien
agtggtcaagacctatgttcctggc

SEQ ID NO: 1981602 - DNA, 25 bp, Homo sapien
taaaggctgagagagatatgttccc

SEQ ID NO: 1981603 - DNA, 25 bp, Homo sapien
gaatgccaaaggattcagccctaag

SEQ ID NO: 1981604 - DNA, 25 bp, Homo sapien
tctcagctagacagcctagacatgg

SEQ ID NO: 1981605 - DNA, 25 bp, Homo sapien
tgttcttcagttactgcacagcgat

SEQ ID NO: 1981606 - DNA, 25 bp, Homo sapien
gcgatcacataagcctgctcttaac

SEQ ID NO: 1981607 - DNA, 25 bp, Homo sapien
ttctgctgccggatattttcaaact

SEQ ID NO: 1981608 - DNA, 25 bp, Homo sapien
tgttttttccgcatatgttcttcag

SEQ ID NO: 1981609 - DNA, 25 bp, Homo sapien
taataaatgaagaaaggaaactcac

SEQ ID NO: 1981610 - DNA, 25 bp, Homo sapien
ataataaatgaagaaaggaaactca

SEQ ID NO: 1981611 - DNA, 25 bp, Homo sapien
tacctctgggagcagaataaagcta

SEQ ID NO: 1981612 - DNA, 25 bp, Homo sapien
tcttgcttgaataaccacagggtag

SEQ ID NO: 1981613 - DNA, 25 bp, Homo sapien
aaatccaggtaatggtcaccaaaag

SEQ ID NO: 1981614 - DNA, 25 bp, Homo sapien
ggacctggacagatatgtatcagac

SEQ ID NO: 1981615 - DNA, 25 bp, Homo sapien
tgaagtcaacaggtaatggcaaagt

SEQ ID NO: 1981616 - DNA, 25 bp, Homo sapien
gacagtaagcttgaggatgaatgcc

SEQ ID NO: 1981617 - DNA, 25 bp, Homo sapien
tatgcacagcatatctaccaaagtg

SEQ ID NO: 1981618 - DNA, 25 bp, Homo sapien
gactggaacagtaacagggaatgcc

SEQ ID NO: 1981619 - DNA, 25 bp, Homo sapien
tcctgtagagtattcctttcattca

SEQ ID NO: 1981620 - DNA, 25 bp, Homo sapien
tgggatctttggttaaccgatgaat

SEQ ID NO: 1981621 - DNA, 25 bp, Homo sapien
gaatataagttctaagaggatggga

SEQ ID NO: 1981622 - DNA, 25 bp, Homo sapien
tattgctcacctgttagaatataag

SEQ ID NO: 1981623 - DNA, 25 bp, Homo sapien
ggttaaccgatgaatcacaagagcc

SEQ ID NO: 1981624 - DNA, 25 bp, Homo sapien
cacagagtgctccaatttagtatgt

SEQ ID NO: 1981625 - DNA, 25 bp, Homo sapien
gaatctggaataacgtcttcctcac

SEQ ID NO: 1981626 - DNA, 25 bp, Homo sapien
gaaggctgttatcggtgaatctgga

SEQ ID NO: 1981627 - DNA, 25 bp, Homo sapien
tcttcgtagccggttaacgccagaa

SEQ ID NO: 1981628 - DNA, 25 bp, Homo sapien
taagtgtcagctactagaatttcat

SEQ ID NO: 1981629 - DNA, 25 bp, Homo sapien
cattttcattaggattatgttgtgg

SEQ ID NO: 1981630 - DNA, 25 bp, Homo sapien
tggatgagttgaagacttggaaact

SEQ ID NO: 1981631 - DNA, 25 bp, Homo sapien
gagattgactttggtcataagtgtc

SEQ ID NO: 1981632 - DNA, 25 bp, Homo sapien
gtaaagtaatctcagtatcttgctt

SEQ ID NO: 1981633 - DNA, 25 bp, Homo sapien
cttgtaaagtaatctcagtatcttg

SEQ ID NO: 1981634 - DNA, 25 bp, Homo sapien
taaacttgtaaagtaatctcagtat

SEQ ID NO: 1981635 - DNA, 25 bp, Homo sapien
aaagtaatctcagtatcttgcttac

SEQ ID NO: 1981636 - DNA, 25 bp, Homo sapien
aaagatgacttatcaggggtatagc

SEQ ID NO: 1981637 - DNA, 25 bp, Homo sapien
taaattaaaagatgacttatcaggg

SEQ ID NO: 1981638 - DNA, 25 bp, Homo sapien
gatgacttatcaggggtatagctgc

SEQ ID NO: 1981639 - DNA, 25 bp, Homo sapien
ctaaattaaaagatgacttatcagg

SEQ ID NO: 1981640 - DNA, 25 bp, Homo sapien
ttcttgaacaccaagtccaagtgtt

SEQ ID NO: 1981641 - DNA, 25 bp, Homo sapien
agattcttcttgaacaccaagtcca

SEQ ID NO: 1981642 - DNA, 25 bp, Homo sapien
aacaccaagtccaagtgtttcagca

SEQ ID NO: 1981643 - DNA, 25 bp, Homo sapien
tcttcttgaacaccaagtccaagtg

SEQ ID NO: 1981644 - DNA, 25 bp, Homo sapien
taaaaagggatgaagtactgatata

SEQ ID NO: 1981645 - DNA, 25 bp, Homo sapien
ttaaaaagggatgaagtactgatat

SEQ ID NO: 1981646 - DNA, 25 bp, Homo sapien
cttaaaaagggatgaagtactgata

SEQ ID NO: 1981647 - DNA, 25 bp, Homo sapien
aaaagggatgaagtactgatatatg

SEQ ID NO: 1981648 - DNA, 25 bp, Homo sapien
tccttccagacagtggtagagctca

SEQ ID NO: 1981649 - DNA, 25 bp, Homo sapien
ccttccagacagtggtagagctcat

SEQ ID NO: 1981650 - DNA, 25 bp, Homo sapien
tttccttccagacagtggtagagct

SEQ ID NO: 1981651 - DNA, 25 bp, Homo sapien
cttccagacagtggtagagctcatc

SEQ ID NO: 1981652 - DNA, 25 bp, Homo sapien
tagaggtagctccaaatacaggaga

SEQ ID NO: 1981653 - DNA, 25 bp, Homo sapien
cactcgagtaggtaattcttcttga

SEQ ID NO: 1981654 - DNA, 25 bp, Homo sapien
ccacttttgatactagaggtagctc

SEQ ID NO: 1981655 - DNA, 25 bp, Homo sapien
tccaaatacaggagatgacactcga

SEQ ID NO: 1981656 - DNA, 25 bp, Homo sapien
tgttcggcctcccaatgatttcagg

SEQ ID NO: 1981657 - DNA, 25 bp, Homo sapien
ggtttatccatcacacagtctccat

SEQ ID NO: 1981658 - DNA, 25 bp, Homo sapien
gatgtgtgaaaagggcactatcttc

SEQ ID NO: 1981659 - DNA, 25 bp, Homo sapien
tcagacagatccagaggtttatcca

SEQ ID NO: 1981660 - DNA, 25 bp, Homo sapien
caacgtgcagttgccatctgaggcc

SEQ ID NO: 1981661 - DNA, 25 bp, Homo sapien
tgggcaacgtgcagttgccatctga

SEQ ID NO: 1981662 - DNA, 25 bp, Homo sapien
gtgcagttgccatctgaggccttac

SEQ ID NO: 1981663 - DNA, 25 bp, Homo sapien
ctttgggcaacgtgcagttgccatc

SEQ ID NO: 1981664 - DNA, 25 bp, Homo sapien
gagagcatttattcaagggctgaag

SEQ ID NO: 1981665 - DNA, 25 bp, Homo sapien
tattcaagggctgaaggatgatgca

SEQ ID NO: 1981666 - DNA, 25 bp, Homo sapien
aaggatgatgcattcctgtgaacag

SEQ ID NO: 1981667 - DNA, 25 bp, Homo sapien
gatgcattcctgtgaacagggctcc

SEQ ID NO: 1981668 - DNA, 25 bp, Homo sapien
tggacgtagaggaattttaaagaca

SEQ ID NO: 1981669 - DNA, 25 bp, Homo sapien
caaactttcacgtggacgtagagga

SEQ ID NO: 1981670 - DNA, 25 bp, Homo sapien
tcacgtggacgtagaggaattttaa

SEQ ID NO: 1981671 - DNA, 25 bp, Homo sapien
agtctccaaactttcacgtggacgt

SEQ ID NO: 1981672 - DNA, 25 bp, Homo sapien
gaaatcacaagcaatcattttaatc

SEQ ID NO: 1981673 - DNA, 25 bp, Homo sapien
ctaaatgaaatcacaagcaatcatt

SEQ ID NO: 1981674 - DNA, 25 bp, Homo sapien
tcattttaatcaaaatccttgaaca

SEQ ID NO: 1981675 - DNA, 25 bp, Homo sapien
tcaaaatccttgaacatttaacaca

SEQ ID NO: 1981676 - DNA, 25 bp, Homo sapien
ttattggctcatgagaaccagcact

SEQ ID NO: 1981677 - DNA, 25 bp, Homo sapien
tttattggctcatgagaaccagcac

SEQ ID NO: 1981678 - DNA, 25 bp, Homo sapien
ttttattggctcatgagaaccagca

SEQ ID NO: 1981679 - DNA, 25 bp, Homo sapien
tctattacagtaacatccattttat

SEQ ID NO: 1981680 - DNA, 25 bp, Homo sapien
actgagaaaggtctgctcccggatc

SEQ ID NO: 1981681 - DNA, 25 bp, Homo sapien
tatactgagaaaggtctgctcccgg

SEQ ID NO: 1981682 - DNA, 25 bp, Homo sapien
tgtatctattacagtaacatccatt

SEQ ID NO: 1981683 - DNA, 25 bp, Homo sapien
actgtctctcctcctaattttgact

SEQ ID NO: 1981684 - DNA, 25 bp, Homo sapien
aagagaacggtttcactaaccaatg

SEQ ID NO: 1981685 - DNA, 25 bp, Homo sapien
gagaacggtttcactaaccaatgta

SEQ ID NO: 1981686 - DNA, 25 bp, Homo sapien
ctctcctcctaattttgactgactg

SEQ ID NO: 1981687 - DNA, 25 bp, Homo sapien
tttgacacggaaaatgaaaaattca

SEQ ID NO: 1981688 - DNA, 25 bp, Homo sapien
tcttcattagcatctggtagtttag

SEQ ID NO: 1981689 - DNA, 25 bp, Homo sapien
aatgccatatttgacacggaaaatg

SEQ ID NO: 1981690 - DNA, 25 bp, Homo sapien
tgtaatgaagtagcaaaaaagtatt

SEQ ID NO: 1981691 - DNA, 25 bp, Homo sapien
taatatgtagaccatcatgaaactg

SEQ ID NO: 1981692 - DNA, 25 bp, Homo sapien
ataagcaagcttttgcttaatatgt

SEQ ID NO: 1981693 - DNA, 25 bp, Homo sapien
gcttaatatgtagaccatcatgaaa

SEQ ID NO: 1981694 - DNA, 25 bp, Homo sapien
tgtagaccatcatgaaactgtagta

SEQ ID NO: 1981695 - DNA, 25 bp, Homo sapien
gctgcttgggagaaactgtctgcca

SEQ ID NO: 1981696 - DNA, 25 bp, Homo sapien
tcttcatgtgttgtccgatcaaaca

SEQ ID NO: 1981697 - DNA, 25 bp, Homo sapien
gccaaacaggattcatactcttcat

SEQ ID NO: 1981698 - DNA, 25 bp, Homo sapien
tctttgtggcagtagacaattcctc

SEQ ID NO: 1981699 - DNA, 25 bp, Homo sapien
ggatcatacctcagaactccaatac

SEQ ID NO: 1981700 - DNA, 25 bp, Homo sapien
ttgaagtgggccagttcactgctcc

SEQ ID NO: 1981701 - DNA, 25 bp, Homo sapien
tccttgagcaacttagtggtctcct

SEQ ID NO: 1981702 - DNA, 25 bp, Homo sapien
gcaattcataggcaccgcaccacta

SEQ ID NO: 1981703 - DNA, 25 bp, Homo sapien
tcacctttaaaatacggctccacaa

SEQ ID NO: 1981704 - DNA, 25 bp, Homo sapien
gctccacaaacgctttctgcttgac

SEQ ID NO: 1981705 - DNA, 25 bp, Homo sapien
catcacctttaaaatacggctccac

SEQ ID NO: 1981706 - DNA, 25 bp, Homo sapien
ccacaaacgctttctgcttgacttt

SEQ ID NO: 1981707 - DNA, 25 bp, Homo sapien
acagcagattgagcataattcttca

SEQ ID NO: 1981708 - DNA, 25 bp, Homo sapien
atatcagtacttgccatttgctttg

SEQ ID NO: 1981709 - DNA, 25 bp, Homo sapien
cagtacttgccatttgctttgcact

SEQ ID NO: 1981710 - DNA, 25 bp, Homo sapien
ctaaagcacaggcacagcagattga

SEQ ID NO: 1981711 - DNA, 25 bp, Homo sapien
cttttttccgaaccacctcaatatg

SEQ ID NO: 1981712 - DNA, 25 bp, Homo sapien
aggaaaattttgcaagctagtctct

SEQ ID NO: 1981713 - DNA, 25 bp, Homo sapien
ccttacacgtgtgcccaagcagttt

SEQ ID NO: 1981714 - DNA, 25 bp, Homo sapien
cgaaccacctcaatatgaggaaaat

SEQ ID NO: 1981715 - DNA, 25 bp, Homo sapien
tggaatgtagcggaatcggtgtctt

SEQ ID NO: 1981716 - DNA, 25 bp, Homo sapien
ccaacttcccaaaaattctctggtg

SEQ ID NO: 1981717 - DNA, 25 bp, Homo sapien
atcggtgtcttgagcaggaagccaa

SEQ ID NO: 1981718 - DNA, 25 bp, Homo sapien
tgttgggtggaatgtagcggaatcg

SEQ ID NO: 1981719 - DNA, 25 bp, Homo sapien
aagacgaatcaggtacagtagtgag

SEQ ID NO: 1981720 - DNA, 25 bp, Homo sapien
ataactaattgcctctggaccagct

SEQ ID NO: 1981721 - DNA, 25 bp, Homo sapien
cagttcaatctgtaattgaatgatc

SEQ ID NO: 1981722 - DNA, 25 bp, Homo sapien
tcaactgagataactaattgcctct

SEQ ID NO: 1981723 - DNA, 25 bp, Homo sapien
ccaaatggttacatatatcatctca

SEQ ID NO: 1981724 - DNA, 25 bp, Homo sapien
taaacttagaagactgtatgtgcaa

SEQ ID NO: 1981725 - DNA, 25 bp, Homo sapien
tgattcttctgattattagctgtgt

SEQ ID NO: 1981726 - DNA, 25 bp, Homo sapien
gatgattgatctcactatttagcat

SEQ ID NO: 1981727 - DNA, 25 bp, Homo sapien
ctttttggacgaggacaaggatcaa

SEQ ID NO: 1981728 - DNA, 25 bp, Homo sapien
ggatcaagatcttccttaatataac

SEQ ID NO: 1981729 - DNA, 25 bp, Homo sapien
ttggacgaggacaaggatcaagatc

SEQ ID NO: 1981730 - DNA, 25 bp, Homo sapien
ggacgaggacaaggatcaagatctt

SEQ ID NO: 1981731 - DNA, 25 bp, Homo sapien
tggagaaaatattgcgttgtaaggc

SEQ ID NO: 1981732 - DNA, 25 bp, Homo sapien
aaatattgcgttgtaaggctgacgt

SEQ ID NO: 1981733 - DNA, 25 bp, Homo sapien
gaaaatattgcgttgtaaggctgac

SEQ ID NO: 1981734 - DNA, 25 bp, Homo sapien
agaaaatattgcgttgtaaggctga

SEQ ID NO: 1981735 - DNA, 25 bp, Homo sapien
tttataaatccatttacagaagatc

SEQ ID NO: 1981736 - DNA, 25 bp, Homo sapien
gtaaaaactcttaagttagagtgca

SEQ ID NO: 1981737 - DNA, 25 bp, Homo sapien
tgtattaggtatcactacataaagt

SEQ ID NO: 1981738 - DNA, 25 bp, Homo sapien
agtgcaaaatgaaagcgccttattg

SEQ ID NO: 1981739 - DNA, 25 bp, Homo sapien
gtcactgctcaatgtaaataccaag

SEQ ID NO: 1981740 - DNA, 25 bp, Homo sapien
gacctagagaagagcaattgatgaa

SEQ ID NO: 1981741 - DNA, 25 bp, Homo sapien
aatctgtaatgattaacatgaagtc

SEQ ID NO: 1981742 - DNA, 25 bp, Homo sapien
aaatactagacactgatatgaccta

SEQ ID NO: 1981743 - DNA, 25 bp, Homo sapien
ggagattatctgactaccagcagag

SEQ ID NO: 1981744 - DNA, 25 bp, Homo sapien
tccctgaggccactatggagctgca

SEQ ID NO: 1981745 - DNA, 25 bp, Homo sapien
tcagaatcatagagccaaacaaggt

SEQ ID NO: 1981746 - DNA, 25 bp, Homo sapien
caggaagtggccagtcaatgataac

SEQ ID NO: 1981747 - DNA, 25 bp, Homo sapien
cgcttttttggaggccttgaggaga

SEQ ID NO: 1981748 - DNA, 25 bp, Homo sapien
ctgccgaggttcaaagcccacggtt

SEQ ID NO: 1981749 - DNA, 25 bp, Homo sapien
taaggtctgcgcctcaggaaaattg

SEQ ID NO: 1981750 - DNA, 25 bp, Homo sapien
tggcttcctgtgaatggcgcccctg

SEQ ID NO: 1981751 - DNA, 25 bp, Homo sapien
cacaaatgcgcaacctgaagcagag

SEQ ID NO: 1981752 - DNA, 25 bp, Homo sapien
tccacaaatgcgcaacctgaagcag

SEQ ID NO: 1981753 - DNA, 25 bp, Homo sapien
ggttccacaaatgcgcaacctgaag

SEQ ID NO: 1981754 - DNA, 25 bp, Homo sapien
tggttccacaaatgcgcaacctgaa

SEQ ID NO: 1981755 - DNA, 25 bp, Homo sapien
tcaaaggaggctgtaactctctctt

SEQ ID NO: 1981756 - DNA, 25 bp, Homo sapien
gggcccatgaccgatgacaataacg

SEQ ID NO: 1981757 - DNA, 25 bp, Homo sapien
ccgatgacaataacgtcaaaggagg

SEQ ID NO: 1981758 - DNA, 25 bp, Homo sapien
aattcaatgacacatatgatcggca

SEQ ID NO: 1981759 - DNA, 25 bp, Homo sapien
tatgaagggtcagttcccggaatgt

SEQ ID NO: 1981760 - DNA, 25 bp, Homo sapien
taaactctaatgagatacagctttc

SEQ ID NO: 1981761 - DNA, 25 bp, Homo sapien
gactccacctctttcgtaatacagg

SEQ ID NO: 1981762 - DNA, 25 bp, Homo sapien
tgtgtatagacttaagaggcaagga

SEQ ID NO: 1981763 - DNA, 25 bp, Homo sapien
gcccctgatggattcccacctttgt

SEQ ID NO: 1981764 - DNA, 25 bp, Homo sapien
ctatgcctaaatcaggctccctctg

SEQ ID NO: 1981765 - DNA, 25 bp, Homo sapien
cgactttctccctatgcctaaatca

SEQ ID NO: 1981766 - DNA, 25 bp, Homo sapien
ggcccctgatggattcccacctttg

SEQ ID NO: 1981767 - DNA, 25 bp, Homo sapien
cttgtccataatcacactccctttg

SEQ ID NO: 1981768 - DNA, 25 bp, Homo sapien
acttccaacagtgagtggctgagaa

SEQ ID NO: 1981769 - DNA, 25 bp, Homo sapien
gacacataacttccaacagtgagtg

SEQ ID NO: 1981770 - DNA, 25 bp, Homo sapien
cataacttccaacagtgagtggctg

SEQ ID NO: 1981771 - DNA, 25 bp, Homo sapien
ggtgacacataacttccaacagtga

SEQ ID NO: 1981772 - DNA, 25 bp, Homo sapien
tcagctggactagttagtgggccat

SEQ ID NO: 1981773 - DNA, 25 bp, Homo sapien
accttcgctgcccacgtagatgagc

SEQ ID NO: 1981774 - DNA, 25 bp, Homo sapien
tctgggggaaacatcaccactttgc

SEQ ID NO: 1981775 - DNA, 25 bp, Homo sapien
tttgcctgccactgggcagttcagc

SEQ ID NO: 1981776 - DNA, 25 bp, Homo sapien
gcctgtgtgcatgaacctccggatg

SEQ ID NO: 1981777 - DNA, 25 bp, Homo sapien
cctgtgtgcatgaacctccggatgc

SEQ ID NO: 1981778 - DNA, 25 bp, Homo sapien
ggcctgtgtgcatgaacctccggat

SEQ ID NO: 1981779 - DNA, 25 bp, Homo sapien
agcagcccctgatactgtcgtatca

SEQ ID NO: 1981780 - DNA, 25 bp, Homo sapien
tgatactgtcgtatcataggcccag

SEQ ID NO: 1981781 - DNA, 25 bp, Homo sapien
cataggcccagacaggattcttttt

SEQ ID NO: 1981782 - DNA, 25 bp, Homo sapien
tgtcgtatcataggcccagacagga

SEQ ID NO: 1981783 - DNA, 25 bp, Homo sapien
agaaaatgccaaggggacatggtgt

SEQ ID NO: 1981784 - DNA, 25 bp, Homo sapien
aaaatgccaaggggacatggtgtcc

SEQ ID NO: 1981785 - DNA, 25 bp, Homo sapien
tcctcttcctgcccgagaacctgcc

SEQ ID NO: 1981786 - DNA, 25 bp, Homo sapien
aaatgccaaggggacatggtgtccc

SEQ ID NO: 1981787 - DNA, 25 bp, Homo sapien
tttgtagattatgatctcttctccc

SEQ ID NO: 1981788 - DNA, 25 bp, Homo sapien
actgggaccaatgtggacagttacc

SEQ ID NO: 1981789 - DNA, 25 bp, Homo sapien
tgtggacagttaccctgtcgtttat

SEQ ID NO: 1981790 - DNA, 25 bp, Homo sapien
tcttctccctcataaactgggacca

SEQ ID NO: 1981791 - DNA, 25 bp, Homo sapien
tctacaggacggttatgtggagcgt

SEQ ID NO: 1981792 - DNA, 25 bp, Homo sapien
cagagttttggactgcgagcgagtt

SEQ ID NO: 1981793 - DNA, 25 bp, Homo sapien
ctcctgggagagttgtgggtctaca

SEQ ID NO: 1981794 - DNA, 25 bp, Homo sapien
gagcgagttacttggaccccgcaag

SEQ ID NO: 1981795 - DNA, 25 bp, Homo sapien
gcctcgctacctagctcggctagtt

SEQ ID NO: 1981796 - DNA, 25 bp, Homo sapien
attgtgtccgtctgcggcgggattt

SEQ ID NO: 1981797 - DNA, 25 bp, Homo sapien
tagctcggctagttcggctcgctgg

SEQ ID NO: 1981798 - DNA, 25 bp, Homo sapien
gatttccgcgatgcccggagaagcg

SEQ ID NO: 1981799 - DNA, 25 bp, Homo sapien
cagccggccgtccagcgagatgttg

SEQ ID NO: 1981800 - DNA, 25 bp, Homo sapien
gcggcggctgctgcaatccgctggc

SEQ ID NO: 1981801 - DNA, 25 bp, Homo sapien
cgccgcgggtccatgcgcggcttcc

SEQ ID NO: 1981802 - DNA, 25 bp, Homo sapien
actccgcgtcctgcggcggcagccg

SEQ ID NO: 1981803 - DNA, 25 bp, Homo sapien
gagcaagctgaaccgagtcctcgcg

SEQ ID NO: 1981804 - DNA, 25 bp, Homo sapien
ctcggcagcggcgagcaagctgaac

SEQ ID NO: 1981805 - DNA, 25 bp, Homo sapien
gcccggcgcggcgagcgcgatgcag

SEQ ID NO: 1981806 - DNA, 25 bp, Homo sapien
cagcggcgagcaagctgaaccgagt

SEQ ID NO: 1981807 - DNA, 25 bp, Homo sapien
gggccggacacggtcgcatggccgc

SEQ ID NO: 1981808 - DNA, 25 bp, Homo sapien
acacggtcgcatggccgccaggaat

SEQ ID NO: 1981809 - DNA, 25 bp, Homo sapien
gccaggaatcaagggcggcagcgac

SEQ ID NO: 1981810 - DNA, 25 bp, Homo sapien
cgcatggccgccaggaatcaagggc

SEQ ID NO: 1981811 - DNA, 25 bp, Homo sapien
tgcagttgggcacaggcggcgagag

SEQ ID NO: 1981812 - DNA, 25 bp, Homo sapien
ctgcagttgggcacaggcggcgaga

SEQ ID NO: 1981813 - DNA, 25 bp, Homo sapien
ggcacctgcacgctgataaaggcat

SEQ ID NO: 1981814 - DNA, 25 bp, Homo sapien
tagttctgcgaagtcggcctggaga

SEQ ID NO: 1981815 - DNA, 25 bp, Homo sapien
gctccagggagcagtagttctgcga

SEQ ID NO: 1981816 - DNA, 25 bp, Homo sapien
agtgaacgagttgaggcgtccccga

SEQ ID NO: 1981817 - DNA, 25 bp, Homo sapien
ttgggtgcgcgtcgcatcccggata

SEQ ID NO: 1981818 - DNA, 25 bp, Homo sapien
gtgcgcgtcgcatcccggatactca

SEQ ID NO: 1981819 - DNA, 25 bp, Homo sapien
gcgggacgcagggttgggtgcgcgt

SEQ ID NO: 1981820 - DNA, 25 bp, Homo sapien
cgcagggttgggtgcgcgtcgcatc

SEQ ID NO: 1981821 - DNA, 25 bp, Homo sapien
tcgtgcaaacacgtgtaaccccgca

SEQ ID NO: 1981822 - DNA, 25 bp, Homo sapien
tgtcccgtagcccagagaccgcggg

SEQ ID NO: 1981823 - DNA, 25 bp, Homo sapien
acaagcgcggtgctcctctgcgaat

SEQ ID NO: 1981824 - DNA, 25 bp, Homo sapien
tgggagcaacccgtgtcccgtagcc

SEQ ID NO: 1981825 - DNA, 25 bp, Homo sapien
aagagtgcgcctccgggtctggacc

SEQ ID NO: 1981826 - DNA, 25 bp, Homo sapien
tctcgtgtggggaggctcggacgcc

SEQ ID NO: 1981827 - DNA, 25 bp, Homo sapien
tcaggaagtttgtgatctcgtgtgg

SEQ ID NO: 1981828 - DNA, 25 bp, Homo sapien
gtttcaggaagtttgtgatctcgtg

SEQ ID NO: 1981829 - DNA, 25 bp, Homo sapien
agcaggccacaggaccgagacacgt

SEQ ID NO: 1981830 - DNA, 25 bp, Homo sapien
gttggattatccacacgtccccagg

SEQ ID NO: 1981831 - DNA, 25 bp, Homo sapien
cccaaccgctgagttccataaggaa

SEQ ID NO: 1981832 - DNA, 25 bp, Homo sapien
gacacgtggaatggtggacccagaa

SEQ ID NO: 1981833 - DNA, 25 bp, Homo sapien
actgactccagcccataggtcttaa

SEQ ID NO: 1981834 - DNA, 25 bp, Homo sapien
tgactgactccagcccataggtctt

SEQ ID NO: 1981835 - DNA, 25 bp, Homo sapien
actccagcccataggtcttaaacag

SEQ ID NO: 1981836 - DNA, 25 bp, Homo sapien
tgactccagcccataggtcttaaac

SEQ ID NO: 1981837 - DNA, 25 bp, Homo sapien
tgctctgatttcactactactgatg

SEQ ID NO: 1981838 - DNA, 25 bp, Homo sapien
tattttggcaatagaaattgtcacg

SEQ ID NO: 1981839 - DNA, 25 bp, Homo sapien
aatagaaattgtcacgattccagcg

SEQ ID NO: 1981840 - DNA, 25 bp, Homo sapien
aattgtcacgattccagcgtaagca

SEQ ID NO: 1981841 - DNA, 25 bp, Homo sapien
gaatgagggctatagctctgataac

SEQ ID NO: 1981842 - DNA, 25 bp, Homo sapien
gctgcgggaccctccaagtagggca

SEQ ID NO: 1981843 - DNA, 25 bp, Homo sapien
tctgataacgagtgacaaaagttgg

SEQ ID NO: 1981844 - DNA, 25 bp, Homo sapien
gggtcttctcaaattgtctctggag

SEQ ID NO: 1981845 - DNA, 25 bp, Homo sapien
atgtgtgtgcagaatcgacatagaa

SEQ ID NO: 1981846 - DNA, 25 bp, Homo sapien
catagaagtccctgctgacccaatg

SEQ ID NO: 1981847 - DNA, 25 bp, Homo sapien
tgctgacccaatgccaaatgggatc

SEQ ID NO: 1981848 - DNA, 25 bp, Homo sapien
tcgacatagaagtccctgctgaccc

SEQ ID NO: 1981849 - DNA, 25 bp, Homo sapien
catttatctctgaacaaggccacac

SEQ ID NO: 1981850 - DNA, 25 bp, Homo sapien
ggaatgggcactgggccccatttat

SEQ ID NO: 1981851 - DNA, 25 bp, Homo sapien
ccccatttatctctgaacaaggcca

SEQ ID NO: 1981852 - DNA, 25 bp, Homo sapien
tatctctgaacaaggccacacttgc

SEQ ID NO: 1981853 - DNA, 25 bp, Homo sapien
cgtcttaaaccaagcatccaatgtg

SEQ ID NO: 1981854 - DNA, 25 bp, Homo sapien
tttgccacagtgcacccaccgtgag

SEQ ID NO: 1981855 - DNA, 25 bp, Homo sapien
tcctactgcaggaatggtggcccct

SEQ ID NO: 1981856 - DNA, 25 bp, Homo sapien
atctccaggacaatcactgctccta

SEQ ID NO: 1981857 - DNA, 25 bp, Homo sapien
agtaaaaattttggatgagtacagg

SEQ ID NO: 1981858 - DNA, 25 bp, Homo sapien
aaaaattttggatgagtacaggttg

SEQ ID NO: 1981859 - DNA, 25 bp, Homo sapien
aattttggatgagtacaggttgatt

SEQ ID NO: 1981860 - DNA, 25 bp, Homo sapien
tttggatgagtacaggttgatttat

SEQ ID NO: 1981861 - DNA, 25 bp, Homo sapien
tcagcaggaagctctcgcctaaagg

SEQ ID NO: 1981862 - DNA, 25 bp, Homo sapien
caggccaacaggatcaaggctgtcc

SEQ ID NO: 1981863 - DNA, 25 bp, Homo sapien
ccaccaatggcagggaacattcaag

SEQ ID NO: 1981864 - DNA, 25 bp, Homo sapien
tgtcggtggattactcaagagcttc

SEQ ID NO: 1981865 - DNA, 25 bp, Homo sapien
ttttatgagtcattcaaacaccagg

SEQ ID NO: 1981866 - DNA, 25 bp, Homo sapien
ggcagaggcttcagaccactccaaa

SEQ ID NO: 1981867 - DNA, 25 bp, Homo sapien
gcttcagaccactccaaactcattt

SEQ ID NO: 1981868 - DNA, 25 bp, Homo sapien
ttatgagtcattcaaacaccaggaa

SEQ ID NO: 1981869 - DNA, 25 bp, Homo sapien
gggaaaatcagcatatattcttgca

SEQ ID NO: 1981870 - DNA, 25 bp, Homo sapien
ggaaaatcagcatatattcttgcat

SEQ ID NO: 1981871 - DNA, 25 bp, Homo sapien
tatttcgctgacatgagtgtgtaca

SEQ ID NO: 1981872 - DNA, 25 bp, Homo sapien
gattcctagttgaggtgaccaaggc

SEQ ID NO: 1981873 - DNA, 25 bp, Homo sapien
cacccaacacacagattcctagttg

SEQ ID NO: 1981874 - DNA, 25 bp, Homo sapien
cccaaaatggacactcatggcactt

SEQ ID NO: 1981875 - DNA, 25 bp, Homo sapien
ttacactccaaatcaccatcctatg

SEQ ID NO: 1981876 - DNA, 25 bp, Homo sapien
tatttataaattgcccaacgtggag

SEQ ID NO: 1981877 - DNA, 25 bp, Homo sapien
aattgcccaacgtggagaatagcaa

SEQ ID NO: 1981878 - DNA, 25 bp, Homo sapien
cactgaacctggctgttattactat

SEQ ID NO: 1981879 - DNA, 25 bp, Homo sapien
attacctacatatgagtattcagtc

SEQ ID NO: 1981880 - DNA, 25 bp, Homo sapien
cactgtcactatcattacctacata

SEQ ID NO: 1981881 - DNA, 25 bp, Homo sapien
ctgtcactatcattacctacatatg

SEQ ID NO: 1981882 - DNA, 25 bp, Homo sapien
actgtcactatcattacctacatat

SEQ ID NO: 1981883 - DNA, 25 bp, Homo sapien
aatctgggagttaaaactgcattgc

SEQ ID NO: 1981884 - DNA, 25 bp, Homo sapien
cagaactgatcagacatttgtgcaa

SEQ ID NO: 1981885 - DNA, 25 bp, Homo sapien
aaatctgggagttaaaactgcattg

SEQ ID NO: 1981886 - DNA, 25 bp, Homo sapien
atctgggagttaaaactgcattgca

SEQ ID NO: 1981887 - DNA, 25 bp, Homo sapien
ccaaggaagatctctgggagatgag

SEQ ID NO: 1981888 - DNA, 25 bp, Homo sapien
cggagaggggcgttctcctcaatat

SEQ ID NO: 1981889 - DNA, 25 bp, Homo sapien
tcctcaatatcttccagggtctcca

SEQ ID NO: 1981890 - DNA, 25 bp, Homo sapien
tctccaaggaagatctctgggagat

SEQ ID NO: 1981891 - DNA, 25 bp, Homo sapien
gacatcgtggttacctcctgaggag

SEQ ID NO: 1981892 - DNA, 25 bp, Homo sapien
tttacaaaatgaagaggcgccacgg

SEQ ID NO: 1981893 - DNA, 25 bp, Homo sapien
tgagtgcactctcgtccatgagggc

SEQ ID NO: 1981894 - DNA, 25 bp, Homo sapien
gactgtacctactgtgtgactgcac

SEQ ID NO: 1981895 - DNA, 25 bp, Homo sapien
ctcctcccgatgccctccctgctgc

SEQ ID NO: 1981896 - DNA, 25 bp, Homo sapien
ctcgctgagtatgtggaccaaggcc

SEQ ID NO: 1981897 - DNA, 25 bp, Homo sapien
tgttcttcatgcaggcggagcctac

SEQ ID NO: 1981898 - DNA, 25 bp, Homo sapien
gacaaagttcacagttgccggacac

SEQ ID NO: 1981899 - DNA, 25 bp, Homo sapien
gagtaacacttgttcccaggccgcg

SEQ ID NO: 1981900 - DNA, 25 bp, Homo sapien
gggcttctcaacgttattcatggat

SEQ ID NO: 1981901 - DNA, 25 bp, Homo sapien
agtggccacgttgttccaaggacca

SEQ ID NO: 1981902 - DNA, 25 bp, Homo sapien
ctagtagcctctcgaaactccaggg

SEQ ID NO: 1981903 - DNA, 25 bp, Homo sapien
tgttccaaggaccatggcttctagt

SEQ ID NO: 1981904 - DNA, 25 bp, Homo sapien
cagtattctgtgaacgctggtacaa

SEQ ID NO: 1981905 - DNA, 25 bp, Homo sapien
gtgcccagccaatatgagaacctta

SEQ ID NO: 1981906 - DNA, 25 bp, Homo sapien
taccacaaggctgaggaccagtctg

SEQ ID NO: 1981907 - DNA, 25 bp, Homo sapien
gccctgcctgggaattcctgaagag

SEQ ID NO: 1981908 - DNA, 25 bp, Homo sapien
cagagaaggcttcagcgatcagcca

SEQ ID NO: 1981909 - DNA, 25 bp, Homo sapien
taagagaattgtggcgttggcaaca

SEQ ID NO: 1981910 - DNA, 25 bp, Homo sapien
ctcaggttggcaggttaagcgaaga

SEQ ID NO: 1981911 - DNA, 25 bp, Homo sapien
ccaaggaactggaataccgggcgct

SEQ ID NO: 1981912 - DNA, 25 bp, Homo sapien
cgccagcacagacgaaggatggcct

SEQ ID NO: 1981913 - DNA, 25 bp, Homo sapien
ctgacgccagcacagacgaaggatg

SEQ ID NO: 1981914 - DNA, 25 bp, Homo sapien
gcacagacgaaggatggcctgagtt

SEQ ID NO: 1981915 - DNA, 25 bp, Homo sapien
ccagcacagacgaaggatggcctga

SEQ ID NO: 1981916 - DNA, 25 bp, Homo sapien
atctgcaggccactcaaagttccca

SEQ ID NO: 1981917 - DNA, 25 bp, Homo sapien
gacccagaactccaaacagcctcat

SEQ ID NO: 1981918 - DNA, 25 bp, Homo sapien
tccagaatgactgctcgaatctgca

SEQ ID NO: 1981919 - DNA, 25 bp, Homo sapien
tgctcgaatctgcaggccactcaaa

SEQ ID NO: 1981920 - DNA, 25 bp, Homo sapien
acatgggtgcctgtgacctgattct

SEQ ID NO: 1981921 - DNA, 25 bp, Homo sapien
aggggctgtgacttttcgattttgg

SEQ ID NO: 1981922 - DNA, 25 bp, Homo sapien
gacctgattcttgactctaaagaaa

SEQ ID NO: 1981923 - DNA, 25 bp, Homo sapien
catttagtagatgcttcctgtggct

SEQ ID NO: 1981924 - DNA, 25 bp, Homo sapien
ctgccattcctggtatcgtgttgcc

SEQ ID NO: 1981925 - DNA, 25 bp, Homo sapien
cctggtatcgtgttgccgcatgttc

SEQ ID NO: 1981926 - DNA, 25 bp, Homo sapien
cgtgttgccgcatgttcttgataaa

SEQ ID NO: 1981927 - DNA, 25 bp, Homo sapien
ccattcctggtatcgtgttgccgca

SEQ ID NO: 1981928 - DNA, 25 bp, Homo sapien
aaaagtgtgggcttgcgtttgctga

SEQ ID NO: 1981929 - DNA, 25 bp, Homo sapien
gatcctgctcatcttaaaagtgtgg

SEQ ID NO: 1981930 - DNA, 25 bp, Homo sapien
cagccgcttctgtgtgaatgtagta

SEQ ID NO: 1981931 - DNA, 25 bp, Homo sapien
tcgccttagagagcattcattattc

SEQ ID NO: 1981932 - DNA, 25 bp, Homo sapien
tgcattcctctctcgaaaggctggg

SEQ ID NO: 1981933 - DNA, 25 bp, Homo sapien
attcctctctcgaaaggctgggtca

SEQ ID NO: 1981934 - DNA, 25 bp, Homo sapien
gcattcctctctcgaaaggctgggt

SEQ ID NO: 1981935 - DNA, 25 bp, Homo sapien
ctgcattcctctctcgaaaggctgg

SEQ ID NO: 1981936 - DNA, 25 bp, Homo sapien
atctggcccgcagactgagagcctg

SEQ ID NO: 1981937 - DNA, 25 bp, Homo sapien
gctgtgctcatcaggggtcccaagg

SEQ ID NO: 1981938 - DNA, 25 bp, Homo sapien
tgccagcgttttcagggtcagaaga

SEQ ID NO: 1981939 - DNA, 25 bp, Homo sapien
ggtcagaagagcaaatcagccgtgg

SEQ ID NO: 1981940 - DNA, 25 bp, Homo sapien
agaggctccctgttcatttcttgag

SEQ ID NO: 1981941 - DNA, 25 bp, Homo sapien
ggcctctatcacacggtcagcaggt

SEQ ID NO: 1981942 - DNA, 25 bp, Homo sapien
ggggcctctatcacacggtcagcag

SEQ ID NO: 1981943 - DNA, 25 bp, Homo sapien
aggctccctgttcatttcttgagct

SEQ ID NO: 1981944 - DNA, 25 bp, Homo sapien
gcttccgccacttagtgccaggtga

SEQ ID NO: 1981945 - DNA, 25 bp, Homo sapien
cgatggtgagacttgtgagcagctc

SEQ ID NO: 1981946 - DNA, 25 bp, Homo sapien
aaggataaagatgcttcctgccgcc

SEQ ID NO: 1981947 - DNA, 25 bp, Homo sapien
taagaactgatcataaacaccgatg

SEQ ID NO: 1981948 - DNA, 25 bp, Homo sapien
tgagcttttcagtcgcaaacccgta

SEQ ID NO: 1981949 - DNA, 25 bp, Homo sapien
gaacagacgaatcagcagcgtgaga

SEQ ID NO: 1981950 - DNA, 25 bp, Homo sapien
cgaattgctcagtctcatgtaggtc

SEQ ID NO: 1981951 - DNA, 25 bp, Homo sapien
caaacccgtacacaagcgcgaggta

SEQ ID NO: 1981952 - DNA, 25 bp, Homo sapien
acttgggtactgtcgcgatacggca

SEQ ID NO: 1981953 - DNA, 25 bp, Homo sapien
actgtcgcgatacggcagcactgaa

SEQ ID NO: 1981954 - DNA, 25 bp, Homo sapien
gggtactgtcgcgatacggcagcac

SEQ ID NO: 1981955 - DNA, 25 bp, Homo sapien
ccgacttgggtactgtcgcgatacg

SEQ ID NO: 1981956 - DNA, 25 bp, Homo sapien
cccagagaactacaaagcatgcatg

SEQ ID NO: 1981957 - DNA, 25 bp, Homo sapien
tacattggtgtgagatcttttcacc

SEQ ID NO: 1981958 - DNA, 25 bp, Homo sapien
tccagtgtacaaatactgaatttgc

SEQ ID NO: 1981959 - DNA, 25 bp, Homo sapien
atggccacattatgtacattggtgt

SEQ ID NO: 1981960 - DNA, 25 bp, Homo sapien
gagctgcccgaaaacatctctctgg

SEQ ID NO: 1981961 - DNA, 25 bp, Homo sapien
ggtccttaaacctccgagctgcagg

SEQ ID NO: 1981962 - DNA, 25 bp, Homo sapien
taggtcagtcaaagagagctgcccg

SEQ ID NO: 1981963 - DNA, 25 bp, Homo sapien
taattttgtcaaggaatgagcctgc

SEQ ID NO: 1981964 - DNA, 25 bp, Homo sapien
tgccacttgggcagttgctaagcct

SEQ ID NO: 1981965 - DNA, 25 bp, Homo sapien
tgaaacgagtgagcgcatataaagc

SEQ ID NO: 1981966 - DNA, 25 bp, Homo sapien
taaaatggtaatactggcacctgcc

SEQ ID NO: 1981967 - DNA, 25 bp, Homo sapien
ccccaaaggcgcgatcatgaaggga

SEQ ID NO: 1981968 - DNA, 25 bp, Homo sapien
gaacttctggcaagcctaaggtggg

SEQ ID NO: 1981969 - DNA, 25 bp, Homo sapien
tggtttctgtctgtcctggaaatcc

SEQ ID NO: 1981970 - DNA, 25 bp, Homo sapien
gggtatggctgtaagtgggtcctgg

SEQ ID NO: 1981971 - DNA, 25 bp, Homo sapien
tccatgggaagagccccagggtatg

SEQ ID NO: 1981972 - DNA, 25 bp, Homo sapien
gctggtttggagatgttcagacaac

SEQ ID NO: 1981973 - DNA, 25 bp, Homo sapien
cgtgctctagaagctcctgggctgg

SEQ ID NO: 1981974 - DNA, 25 bp, Homo sapien
cagtgggtcgtgctctagaagctcc

SEQ ID NO: 1981975 - DNA, 25 bp, Homo sapien
ggctggcaagttggaactcagaatg

SEQ ID NO: 1981976 - DNA, 25 bp, Homo sapien
tggcaagttggaactcagaatgcat

SEQ ID NO: 1981977 - DNA, 25 bp, Homo sapien
aaatggacccaagcggatgacctca

SEQ ID NO: 1981978 - DNA, 25 bp, Homo sapien
gaagacgctgttctctgtgtcgcaa

SEQ ID NO: 1981979 - DNA, 25 bp, Homo sapien
taagagattacacatgggccggaag

SEQ ID NO: 1981980 - DNA, 25 bp, Homo sapien
tagcttaagagtcccgtttgttgcc

SEQ ID NO: 1981981 - DNA, 25 bp, Homo sapien
gccaagcagcagttataccgttaag

SEQ ID NO: 1981982 - DNA, 25 bp, Homo sapien
gctgacatttaaaactggcccacgg

SEQ ID NO: 1981983 - DNA, 25 bp, Homo sapien
ttaatcataaaacggccgactctgg

SEQ ID NO: 1981984 - DNA, 25 bp, Homo sapien
cctcagggagcatgatcaatgaact

SEQ ID NO: 1981985 - DNA, 25 bp, Homo sapien
tagagaatgtcgaactgcagctgaa

SEQ ID NO: 1981986 - DNA, 25 bp, Homo sapien
actctgaatggtggagattcgctcc

SEQ ID NO: 1981987 - DNA, 25 bp, Homo sapien
tcttttggaagcctagaacgttgga

SEQ ID NO: 1981988 - DNA, 25 bp, Homo sapien
taagggctctgatcaatgttgctgg

SEQ ID NO: 1981989 - DNA, 25 bp, Homo sapien
ctggatggagggaccatattcaggg

SEQ ID NO: 1981990 - DNA, 25 bp, Homo sapien
tccagtgcctgttagtcaaaggcac

SEQ ID NO: 1981991 - DNA, 25 bp, Homo sapien
acatccagtgcctgttagtcaaagg

SEQ ID NO: 1981992 - DNA, 25 bp, Homo sapien
agtgcctgttagtcaaaggcacctc

SEQ ID NO: 1981993 - DNA, 25 bp, Homo sapien
gaagctgatggtttacagacatccc

SEQ ID NO: 1981994 - DNA, 25 bp, Homo sapien
gcgcttgccagtgatgccttgttgc

SEQ ID NO: 1981995 - DNA, 25 bp, Homo sapien
gttgtccctcttcgggcgcttgcca

SEQ ID NO: 1981996 - DNA, 25 bp, Homo sapien
tccaactgaacagaaagcctgaaga

SEQ ID NO: 1981997 - DNA, 25 bp, Homo sapien
gccatgaggatgcttactccatgag

SEQ ID NO: 1981998 - DNA, 25 bp, Homo sapien
catgaggatgcttactccatgagac

SEQ ID NO: 1981999 - DNA, 25 bp, Homo sapien
gatgcttactccatgagacaacaca

SEQ ID NO: 1982000 - DNA, 25 bp, Homo sapien
tactccatgagacaacacagtcaca

SEQ ID NO: 1982001 - DNA, 25 bp, Homo sapien
tcaaactcactgcaccagttgattg

SEQ ID NO: 1982002 - DNA, 25 bp, Homo sapien
tgtcttcctccgtccaacttcaagt

SEQ ID NO: 1982003 - DNA, 25 bp, Homo sapien
cagttgattgtcttcctccgtccaa

SEQ ID NO: 1982004 - DNA, 25 bp, Homo sapien
ccttccagaccaatgatctctttca

SEQ ID NO: 1982005 - DNA, 25 bp, Homo sapien
catttgtgggtaacagaaattgggt

SEQ ID NO: 1982006 - DNA, 25 bp, Homo sapien
cgcttgcccggcctatggagaggct

SEQ ID NO: 1982007 - DNA, 25 bp, Homo sapien
ctgcggtggctcaggttacggaact

SEQ ID NO: 1982008 - DNA, 25 bp, Homo sapien
tatttctccgggctccaaaggcatt

SEQ ID NO: 1982009 - DNA, 25 bp, Homo sapien
cgtatgaatacaaatcagagcggcc

SEQ ID NO: 1982010 - DNA, 25 bp, Homo sapien
cagctgcgaacgatcagaggtggcc

SEQ ID NO: 1982011 - DNA, 25 bp, Homo sapien
cagatcaaatttggagacgcctgtg

SEQ ID NO: 1982012 - DNA, 25 bp, Homo sapien
gatttggtgcgaatacttccaggca

SEQ ID NO: 1982013 - DNA, 25 bp, Homo sapien
gatcagaacgcgtttgtgtttgcca

SEQ ID NO: 1982014 - DNA, 25 bp, Homo sapien
tttgggtcatagtccataaagtctc

SEQ ID NO: 1982015 - DNA, 25 bp, Homo sapien
ccactgggggtcatccaagagattt

SEQ ID NO: 1982016 - DNA, 25 bp, Homo sapien
tccataaagtctcccaggtcactac

SEQ ID NO: 1982017 - DNA, 25 bp, Homo sapien
gcaggcctggccaatcgactgttct

SEQ ID NO: 1982018 - DNA, 25 bp, Homo sapien
gcttgccgcaagagtcagggcaagt

SEQ ID NO: 1982019 - DNA, 25 bp, Homo sapien
tcggcccagagaaagcgcccagggc

SEQ ID NO: 1982020 - DNA, 25 bp, Homo sapien
caatcgactgttctgaaagtgcagc

SEQ ID NO: 1982021 - DNA, 25 bp, Homo sapien
ttggaattctaatagtgctgttaac

SEQ ID NO: 1982022 - DNA, 25 bp, Homo sapien
tgttggaattctaatagtgctgtta

SEQ ID NO: 1982023 - DNA, 25 bp, Homo sapien
gttggaattctaatagtgctgttaa

SEQ ID NO: 1982024 - DNA, 25 bp, Homo sapien
gtgttggaattctaatagtgctgtt

SEQ ID NO: 1982025 - DNA, 25 bp, Homo sapien
tgcagccgctgcaagccttggttcc

SEQ ID NO: 1982026 - DNA, 25 bp, Homo sapien
tgacctactgccagccctagtgctg

SEQ ID NO: 1982027 - DNA, 25 bp, Homo sapien
tgcaccccaggagctagctgtaaga

SEQ ID NO: 1982028 - DNA, 25 bp, Homo sapien
ggcaggtatgcagccgctgcaagcc

SEQ ID NO: 1982029 - DNA, 25 bp, Homo sapien
ctaagcagatgtgagcttgccgtac

SEQ ID NO: 1982030 - DNA, 25 bp, Homo sapien
aacaaagtcttgacttgtcatgaga

SEQ ID NO: 1982031 - DNA, 25 bp, Homo sapien
aagtcttgacttgtcatgagaagag

SEQ ID NO: 1982032 - DNA, 25 bp, Homo sapien
caaagtcttgacttgtcatgagaag

SEQ ID NO: 1982033 - DNA, 25 bp, Homo sapien
tcttgacttgtcatgagaagaggga

SEQ ID NO: 1982034 - DNA, 25 bp, Homo sapien
tgggatacacaactgccacagcgga

SEQ ID NO: 1982035 - DNA, 25 bp, Homo sapien
gccccacactgttcagagtatggaa

SEQ ID NO: 1982036 - DNA, 25 bp, Homo sapien
gatgacagtcctcgatgtcctctca

SEQ ID NO: 1982037 - DNA, 25 bp, Homo sapien
gaaactggacggatcactctgagcc

SEQ ID NO: 1982038 - DNA, 25 bp, Homo sapien
gagacaggccgcttctactcttcct

SEQ ID NO: 1982039 - DNA, 25 bp, Homo sapien
tgagcaggctcaagtaaagtcatct

SEQ ID NO: 1982040 - DNA, 25 bp, Homo sapien
atcctgctgcttaacgatcatgtgg

SEQ ID NO: 1982041 - DNA, 25 bp, Homo sapien
catgaggtttgcaatgatgtgagca

SEQ ID NO: 1982042 - DNA, 25 bp, Homo sapien
gcctacatgccataatcttaatcag

SEQ ID NO: 1982043 - DNA, 25 bp, Homo sapien
ccggcctacatgccataatcttaat

SEQ ID NO: 1982044 - DNA, 25 bp, Homo sapien
tacatgccataatcttaatcagtca

SEQ ID NO: 1982045 - DNA, 25 bp, Homo sapien
catgccataatcttaatcagtcaaa

SEQ ID NO: 1982046 - DNA, 25 bp, Homo sapien
tgagcaacgggaaaacttgcattgg

SEQ ID NO: 1982047 - DNA, 25 bp, Homo sapien
acaacaagggctcggcggaatccag

SEQ ID NO: 1982048 - DNA, 25 bp, Homo sapien
ttgcattggagctacaacaagggct

SEQ ID NO: 1982049 - DNA, 25 bp, Homo sapien
aactcccaaagccatgagcaacggg

SEQ ID NO: 1982050 - DNA, 25 bp, Homo sapien
cgttcatgtccttcttgagatccga

SEQ ID NO: 1982051 - DNA, 25 bp, Homo sapien
cgagggcttcacgtagtcaatcact

SEQ ID NO: 1982052 - DNA, 25 bp, Homo sapien
cagcttaatgtgaggaaacttctcc

SEQ ID NO: 1982053 - DNA, 25 bp, Homo sapien
gagtgtcagcttaatgtgaggaaac

SEQ ID NO: 1982054 - DNA, 25 bp, Homo sapien
ccccttgagggcgagcttttcaaag

SEQ ID NO: 1982055 - DNA, 25 bp, Homo sapien
aagcttccgcatctctcgtttcaga

SEQ ID NO: 1982056 - DNA, 25 bp, Homo sapien
cttttcaaagtagacgaaggccatg

SEQ ID NO: 1982057 - DNA, 25 bp, Homo sapien
ttttggctgctaacagcacacatgc

SEQ ID NO: 1982058 - DNA, 25 bp, Homo sapien
gtcacatgtgtagccaattgcagca

SEQ ID NO: 1982059 - DNA, 25 bp, Homo sapien
tgtgtatctaaacagggctgagcct

SEQ ID NO: 1982060 - DNA, 25 bp, Homo sapien
taaagcaaaccggtggtggctcacg

SEQ ID NO: 1982061 - DNA, 25 bp, Homo sapien
gatctaagtcctcgggaagtctcca

SEQ ID NO: 1982062 - DNA, 25 bp, Homo sapien
caaggccactaacaccgggaattca

SEQ ID NO: 1982063 - DNA, 25 bp, Homo sapien
caagtggagggcgaattccaaggcc

SEQ ID NO: 1982064 - DNA, 25 bp, Homo sapien
ggcatgacttcgtgctcgggcaagt

SEQ ID NO: 1982065 - DNA, 25 bp, Homo sapien
tcagttctcgcctgttcagccggaa

SEQ ID NO: 1982066 - DNA, 25 bp, Homo sapien
caaactgtctggtaccgagagagca

SEQ ID NO: 1982067 - DNA, 25 bp, Homo sapien
taattgttgaaggtcagcctgaccc

SEQ ID NO: 1982068 - DNA, 25 bp, Homo sapien
taaaatcttgcatgaacagccctgg

SEQ ID NO: 1982069 - DNA, 25 bp, Homo sapien
tggtgacatgcctcatacagactgt

SEQ ID NO: 1982070 - DNA, 25 bp, Homo sapien
gagacacacgtctacacaaacgcat

SEQ ID NO: 1982071 - DNA, 25 bp, Homo sapien
aaaggtgactggtgagacacacgtc

SEQ ID NO: 1982072 - DNA, 25 bp, Homo sapien
caaggggatcagcaatgcagggcaa

SEQ ID NO: 1982073 - DNA, 25 bp, Homo sapien
tagaatcagtgtgcgcaaggggatc

SEQ ID NO: 1982074 - DNA, 25 bp, Homo sapien
tctgctaacgaaagctgcagaccct

SEQ ID NO: 1982075 - DNA, 25 bp, Homo sapien
gtgaagctccgaatctgtgacctca

SEQ ID NO: 1982076 - DNA, 25 bp, Homo sapien
gcagaccctcggttcggttccatcg

SEQ ID NO: 1982077 - DNA, 25 bp, Homo sapien
ctccatcctccaagactgtcaagaa

SEQ ID NO: 1982078 - DNA, 25 bp, Homo sapien
tcaaggctcactagaggagtcccgg

SEQ ID NO: 1982079 - DNA, 25 bp, Homo sapien
tcatggacgtgcaaaaggagacctc

SEQ ID NO: 1982080 - DNA, 25 bp, Homo sapien
gaaaaggaatcaggcagaaccggct

SEQ ID NO: 1982081 - DNA, 25 bp, Homo sapien
gatgcaaggtgacagaccccatgtg

SEQ ID NO: 1982082 - DNA, 25 bp, Homo sapien
tccaggtgagttggccaggcgacct

SEQ ID NO: 1982083 - DNA, 25 bp, Homo sapien
ggagagtgagagaatccaacaagct

SEQ ID NO: 1982084 - DNA, 25 bp, Homo sapien
agagaatccaacaagctgctctgca

SEQ ID NO: 1982085 - DNA, 25 bp, Homo sapien
gctccaagggccacgtttgagggca

SEQ ID NO: 1982086 - DNA, 25 bp, Homo sapien
agcccctcatcagcgaaccaggagt

SEQ ID NO: 1982087 - DNA, 25 bp, Homo sapien
tgtggtctgttggtcggatgctctg

SEQ ID NO: 1982088 - DNA, 25 bp, Homo sapien
aggagtcactccctgagcttcggcg

SEQ ID NO: 1982089 - DNA, 25 bp, Homo sapien
ctcatcagcgaaccaggagtcactc

SEQ ID NO: 1982090 - DNA, 25 bp, Homo sapien
gcagatgcggtttagggcagagtgt

SEQ ID NO: 1982091 - DNA, 25 bp, Homo sapien
catgcagatgcggtttagggcagag

SEQ ID NO: 1982092 - DNA, 25 bp, Homo sapien
cagatgcggtttagggcagagtgtg

SEQ ID NO: 1982093 - DNA, 25 bp, Homo sapien
tgcagatgcggtttagggcagagtg

SEQ ID NO: 1982094 - DNA, 25 bp, Homo sapien
caggaatgaggtgaggccacatcgc

SEQ ID NO: 1982095 - DNA, 25 bp, Homo sapien
ggccacatcgcgtctcacaaaactg

SEQ ID NO: 1982096 - DNA, 25 bp, Homo sapien
tgcccccggttcctcaagtcagcag

SEQ ID NO: 1982097 - DNA, 25 bp, Homo sapien
atgaggtgaggccacatcgcgtctc

SEQ ID NO: 1982098 - DNA, 25 bp, Homo sapien
ggcttggcagtgtgtcatagacacc

SEQ ID NO: 1982099 - DNA, 25 bp, Homo sapien
tctgagctgaacttgagaggagcgt

SEQ ID NO: 1982100 - DNA, 25 bp, Homo sapien
aggaagcgcccgttcagaagagcct

SEQ ID NO: 1982101 - DNA, 25 bp, Homo sapien
gaagagcctatagagtctgagctga

SEQ ID NO: 1982102 - DNA, 25 bp, Homo sapien
acagaacaagagctagaggagtgtc

SEQ ID NO: 1982103 - DNA, 25 bp, Homo sapien
cacagaacaagagctagaggagtgt

SEQ ID NO: 1982104 - DNA, 25 bp, Homo sapien
tgcactgagttgtcctcgaggcaaa

SEQ ID NO: 1982105 - DNA, 25 bp, Homo sapien
gcactgagttgtcctcgaggcaaaa

SEQ ID NO: 1982106 - DNA, 25 bp, Homo sapien
cactgggtgctggtctttgttacag

SEQ ID NO: 1982107 - DNA, 25 bp, Homo sapien
tctgctttgtctaggagggctgttc

SEQ ID NO: 1982108 - DNA, 25 bp, Homo sapien
tatcctggaaagtgattacaatcag

SEQ ID NO: 1982109 - DNA, 25 bp, Homo sapien
cagatacagattggatgcccactgg

SEQ ID NO: 1982110 - DNA, 25 bp, Homo sapien
ggagatggaaccagggttctgtccc

SEQ ID NO: 1982111 - DNA, 25 bp, Homo sapien
ttctgcggcttgcacaaggctccct

SEQ ID NO: 1982112 - DNA, 25 bp, Homo sapien
ccaagccattctgcggcttgcacaa

SEQ ID NO: 1982113 - DNA, 25 bp, Homo sapien
gccaagccattctgcggcttgcaca

SEQ ID NO: 1982114 - DNA, 25 bp, Homo sapien
gccattctgcggcttgcacaaggct

SEQ ID NO: 1982115 - DNA, 25 bp, Homo sapien
agctccggatcctcggacccaacag

SEQ ID NO: 1982116 - DNA, 25 bp, Homo sapien
cggatcctcggacccaacagcaaac

SEQ ID NO: 1982117 - DNA, 25 bp, Homo sapien
tccggatcctcggacccaacagcaa

SEQ ID NO: 1982118 - DNA, 25 bp, Homo sapien
gcagctccggatcctcggacccaac

SEQ ID NO: 1982119 - DNA, 25 bp, Homo sapien
gaggaagatcccagacggtccatga

SEQ ID NO: 1982120 - DNA, 25 bp, Homo sapien
cgctgtcttcggaggaagatcccag

SEQ ID NO: 1982121 - DNA, 25 bp, Homo sapien
ggtccatgacttgttcagaccccat

SEQ ID NO: 1982122 - DNA, 25 bp, Homo sapien
tcagcccagacgctgtcttcggagg

SEQ ID NO: 1982123 - DNA, 25 bp, Homo sapien
ggagaggacaccattcttttcactg

SEQ ID NO: 1982124 - DNA, 25 bp, Homo sapien
ctgagagacaatgtcaggagaggac

SEQ ID NO: 1982125 - DNA, 25 bp, Homo sapien
tgagagacaatgtcaggagaggaca

SEQ ID NO: 1982126 - DNA, 25 bp, Homo sapien
gaggacaccattcttttcactgggt

SEQ ID NO: 1982127 - DNA, 25 bp, Homo sapien
caggcaatggcatgttcagataggt

SEQ ID NO: 1982128 - DNA, 25 bp, Homo sapien
tgatttgtgactcttcctgaaggcc

SEQ ID NO: 1982129 - DNA, 25 bp, Homo sapien
gaactatcactctgcgtgtttccag

SEQ ID NO: 1982130 - DNA, 25 bp, Homo sapien
tccagaacccgcagccactgtttgt

SEQ ID NO: 1982131 - DNA, 25 bp, Homo sapien
gggccattcagggtgacccatgagt

SEQ ID NO: 1982132 - DNA, 25 bp, Homo sapien
cactctgccaggtatcagagagttt

SEQ ID NO: 1982133 - DNA, 25 bp, Homo sapien
caggtatcagagagtttgggccatt

SEQ ID NO: 1982134 - DNA, 25 bp, Homo sapien
atgagtcctccgcaagcagggagcc

SEQ ID NO: 1982135 - DNA, 25 bp, Homo sapien
gccacctgcgtacgagcattttaaa

SEQ ID NO: 1982136 - DNA, 25 bp, Homo sapien
tttgcccaccctcaggttaagctgg

SEQ ID NO: 1982137 - DNA, 25 bp, Homo sapien
taaaaccctattcctggtcaggcgc

SEQ ID NO: 1982138 - DNA, 25 bp, Homo sapien
taaattgacagacgtaacagtgcgc

SEQ ID NO: 1982139 - DNA, 25 bp, Homo sapien
tgctggttttctcagagcggaagag

SEQ ID NO: 1982140 - DNA, 25 bp, Homo sapien
tgtacacctgtgtacgagcccctgg

SEQ ID NO: 1982141 - DNA, 25 bp, Homo sapien
tgctgcgggagaacagcttgtacac

SEQ ID NO: 1982142 - DNA, 25 bp, Homo sapien
gctcctgaacaagacggtcaagaga

SEQ ID NO: 1982143 - DNA, 25 bp, Homo sapien
cctgagacacctttctggaatttcc

SEQ ID NO: 1982144 - DNA, 25 bp, Homo sapien
ttgagagatgtggaggtaacctctt

SEQ ID NO: 1982145 - DNA, 25 bp, Homo sapien
gatgtggaggtaacctcttccctct

SEQ ID NO: 1982146 - DNA, 25 bp, Homo sapien
tcctgagacacctttctggaatttc

SEQ ID NO: 1982147 - DNA, 25 bp, Homo sapien
ggttcacacactctcttggtgctgg

SEQ ID NO: 1982148 - DNA, 25 bp, Homo sapien
acattccaagtgtggacagagcggg

SEQ ID NO: 1982149 - DNA, 25 bp, Homo sapien
ggaagactggaagccagaaacatct

SEQ ID NO: 1982150 - DNA, 25 bp, Homo sapien
catggaagctgttttgacctgcagg

SEQ ID NO: 1982151 - DNA, 25 bp, Homo sapien
tctgagatggtaatgcgtgacgatg

SEQ ID NO: 1982152 - DNA, 25 bp, Homo sapien
catgtttatatcctatcatgagaat

SEQ ID NO: 1982153 - DNA, 25 bp, Homo sapien
tgcgtgacgatgaggttcataaaca

SEQ ID NO: 1982154 - DNA, 25 bp, Homo sapien
atggtaatgcgtgacgatgaggttc

SEQ ID NO: 1982155 - DNA, 25 bp, Homo sapien
gaaatacatctccattggcaccgtc

SEQ ID NO: 1982156 - DNA, 25 bp, Homo sapien
caagtccaagaaatacatctccatt

SEQ ID NO: 1982157 - DNA, 25 bp, Homo sapien
cagcacagccaacatccatcagtgg

SEQ ID NO: 1982158 - DNA, 25 bp, Homo sapien
cagccaacatccatcagtgggatgg

SEQ ID NO: 1982159 - DNA, 25 bp, Homo sapien
gccaggaatcatgcggccacactca

SEQ ID NO: 1982160 - DNA, 25 bp, Homo sapien
ctgccaggaatcatgcggccacact

SEQ ID NO: 1982161 - DNA, 25 bp, Homo sapien
gaatcatgcggccacactcaagccc

SEQ ID NO: 1982162 - DNA, 25 bp, Homo sapien
aggaatcatgcggccacactcaagc

SEQ ID NO: 1982163 - DNA, 25 bp, Homo sapien
tcagtgaccaccagaaacatggcag

SEQ ID NO: 1982164 - DNA, 25 bp, Homo sapien
tgcacaatcagcaaatcacattttg

SEQ ID NO: 1982165 - DNA, 25 bp, Homo sapien
accaggcatattgctggtcccccag

SEQ ID NO: 1982166 - DNA, 25 bp, Homo sapien
gcattttggagatggctgcacaatc

SEQ ID NO: 1982167 - DNA, 25 bp, Homo sapien
tgctagtttttgaatttgtttgttc

SEQ ID NO: 1982168 - DNA, 25 bp, Homo sapien
gaatttgtttgttcttgcttttcca

SEQ ID NO: 1982169 - DNA, 25 bp, Homo sapien
tgaatttgtttgttcttgcttttcc

SEQ ID NO: 1982170 - DNA, 25 bp, Homo sapien
attatgatgttagggtgttgatttt

SEQ ID NO: 1982171 - DNA, 25 bp, Homo sapien
tggtttcctggtcagagtttgaatt

SEQ ID NO: 1982172 - DNA, 25 bp, Homo sapien
atgcaaatggcgtggtttcctggtc

SEQ ID NO: 1982173 - DNA, 25 bp, Homo sapien
tgtggaaatgcaaatggcgtggttt

SEQ ID NO: 1982174 - DNA, 25 bp, Homo sapien
gtggtttcctggtcagagtttgaat

SEQ ID NO: 1982175 - DNA, 25 bp, Homo sapien
tgcagcccaaccatccggagagctg

SEQ ID NO: 1982176 - DNA, 25 bp, Homo sapien
tccggagagctgaatgccaggcgtc

SEQ ID NO: 1982177 - DNA, 25 bp, Homo sapien
tgcagctccgcagagcgagccggct

SEQ ID NO: 1982178 - DNA, 25 bp, Homo sapien
tgtcagggtgcaccttagggacacc

SEQ ID NO: 1982179 - DNA, 25 bp, Homo sapien
ctcctctcgtgtgggtgctgcttga

SEQ ID NO: 1982180 - DNA, 25 bp, Homo sapien
ctgtgatggtggtaagcagtctccc

SEQ ID NO: 1982181 - DNA, 25 bp, Homo sapien
ggtgcttgtgtctggaccccccgtg

SEQ ID NO: 1982182 - DNA, 25 bp, Homo sapien
cttgtgtctggaccccccgtgcttt

SEQ ID NO: 1982183 - DNA, 25 bp, Homo sapien
agtttcagtgatgcagtcagcagtt

SEQ ID NO: 1982184 - DNA, 25 bp, Homo sapien
gttgctacctgtgccttgccttctg

SEQ ID NO: 1982185 - DNA, 25 bp, Homo sapien
gatgcagtcagcagttgctacctgt

SEQ ID NO: 1982186 - DNA, 25 bp, Homo sapien
tcagtgatgcagtcagcagttgcta

SEQ ID NO: 1982187 - DNA, 25 bp, Homo sapien
tgcctacactgggtgccagcatgtt

SEQ ID NO: 1982188 - DNA, 25 bp, Homo sapien
atgtcattgtgcctacactgggtgc

SEQ ID NO: 1982189 - DNA, 25 bp, Homo sapien
tttcagtggtgccagaggagaatcg

SEQ ID NO: 1982190 - DNA, 25 bp, Homo sapien
agtgactcagaaggatgtttcagtg

SEQ ID NO: 1982191 - DNA, 25 bp, Homo sapien
ttttggaaatagttgcagcacaggc

SEQ ID NO: 1982192 - DNA, 25 bp, Homo sapien
tgttggtccacactcctgaatagcc

SEQ ID NO: 1982193 - DNA, 25 bp, Homo sapien
ctgctgtgccctcgcccttgttggt

SEQ ID NO: 1982194 - DNA, 25 bp, Homo sapien
gaagcatttggagctccctttgctt

SEQ ID NO: 1982195 - DNA, 25 bp, Homo sapien
tatgatcagtattggagctgcgcac

SEQ ID NO: 1982196 - DNA, 25 bp, Homo sapien
tcagagtttatgatcagtattggag

SEQ ID NO: 1982197 - DNA, 25 bp, Homo sapien
tgatcagtattggagctgcgcacca

SEQ ID NO: 1982198 - DNA, 25 bp, Homo sapien
gtttatgatcagtattggagctgcg

SEQ ID NO: 1982199 - DNA, 25 bp, Homo sapien
catttccatgaagcttcacgtcttc

SEQ ID NO: 1982200 - DNA, 25 bp, Homo sapien
cacatttccatgaagcttcacgtct

SEQ ID NO: 1982201 - DNA, 25 bp, Homo sapien
gaacacatttccatgaagcttcacg

SEQ ID NO: 1982202 - DNA, 25 bp, Homo sapien
aacacatttccatgaagcttcacgt

SEQ ID NO: 1982203 - DNA, 25 bp, Homo sapien
agccccaccctcatgaccaccagtg

SEQ ID NO: 1982204 - DNA, 25 bp, Homo sapien
ccaccctcatgaccaccagtgcctg

SEQ ID NO: 1982205 - DNA, 25 bp, Homo sapien
tggagcactgctgcctcccttttca

SEQ ID NO: 1982206 - DNA, 25 bp, Homo sapien
ttcagccccaccctcatgaccacca

SEQ ID NO: 1982207 - DNA, 25 bp, Homo sapien
gatatgatagaaagactgacccagg

SEQ ID NO: 1982208 - DNA, 25 bp, Homo sapien
ttggagggctacatctgaacacaca

SEQ ID NO: 1982209 - DNA, 25 bp, Homo sapien
tgacccaggttgaaccccagaattg

SEQ ID NO: 1982210 - DNA, 25 bp, Homo sapien
caaagcatgtgtggtatcccgatat

SEQ ID NO: 1982211 - DNA, 25 bp, Homo sapien
gcgtcctggacttcccattcctgta

SEQ ID NO: 1982212 - DNA, 25 bp, Homo sapien
tgtatgctttctgtgctgtccgctg

SEQ ID NO: 1982213 - DNA, 25 bp, Homo sapien
ctgtacttctacagattccatggta

SEQ ID NO: 1982214 - DNA, 25 bp, Homo sapien
gccaggtaatcgtaagctcactcat

SEQ ID NO: 1982215 - DNA, 25 bp, Homo sapien
cccattggctttctcgcaaacctcc

SEQ ID NO: 1982216 - DNA, 25 bp, Homo sapien
tcaatgactggatgtgtggctcttc

SEQ ID NO: 1982217 - DNA, 25 bp, Homo sapien
ttggctttctcgcaaacctcctgtc

SEQ ID NO: 1982218 - DNA, 25 bp, Homo sapien
cattggctttctcgcaaacctcctg

SEQ ID NO: 1982219 - DNA, 25 bp, Homo sapien
gattttgtgtgtccccggacaggcc

SEQ ID NO: 1982220 - DNA, 25 bp, Homo sapien
gcagtcgtgcttttgggagccttta

SEQ ID NO: 1982221 - DNA, 25 bp, Homo sapien
tgtgacactcgtagggaaaaggacc

SEQ ID NO: 1982222 - DNA, 25 bp, Homo sapien
ggactgactgcgttatcatagagga

SEQ ID NO: 1982223 - DNA, 25 bp, Homo sapien
cactggattccatttgccttgcact

SEQ ID NO: 1982224 - DNA, 25 bp, Homo sapien
tgagcattgatgacaggttttctga

SEQ ID NO: 1982225 - DNA, 25 bp, Homo sapien
gttttgggacccttgcttggcactg

SEQ ID NO: 1982226 - DNA, 25 bp, Homo sapien
gagggaaccaaggaactgatgtacg

SEQ ID NO: 1982227 - DNA, 25 bp, Homo sapien
tatagaagaaaaatctgtgtcaccc

SEQ ID NO: 1982228 - DNA, 25 bp, Homo sapien
catttcctctatcaaatatagaaga

SEQ ID NO: 1982229 - DNA, 25 bp, Homo sapien
aaaatctgtgtcaccctctgctaac

SEQ ID NO: 1982230 - DNA, 25 bp, Homo sapien
ctgttcatttcctctatcaaatata

SEQ ID NO: 1982231 - DNA, 25 bp, Homo sapien
tctgatgatacagctaggagccttg

SEQ ID NO: 1982232 - DNA, 25 bp, Homo sapien
ttctgatgatacagctaggagcctt

SEQ ID NO: 1982233 - DNA, 25 bp, Homo sapien
gtgacggtaggactgagggttagaa

SEQ ID NO: 1982234 - DNA, 25 bp, Homo sapien
caggccagagcctgtagatgagggt

SEQ ID NO: 1982235 - DNA, 25 bp, Homo sapien
ttagaaagtccttcagggatgtttc

SEQ ID NO: 1982236 - DNA, 25 bp, Homo sapien
tagaaagtccttcagggatgtttcc

SEQ ID NO: 1982237 - DNA, 25 bp, Homo sapien
tcatccacacccattgtgccagcca

SEQ ID NO: 1982238 - DNA, 25 bp, Homo sapien
gtctgcctcttcagggtttccctgg

SEQ ID NO: 1982239 - DNA, 25 bp, Homo sapien
catgccacatactttctggaaaatc

SEQ ID NO: 1982240 - DNA, 25 bp, Homo sapien
ttcttaggagcctctgtcctcatgc

SEQ ID NO: 1982241 - DNA, 25 bp, Homo sapien
agccatttcctgcatgcagtaggtg

SEQ ID NO: 1982242 - DNA, 25 bp, Homo sapien
cagcttgttcaagactttttcgaag

SEQ ID NO: 1982243 - DNA, 25 bp, Homo sapien
gttcaagactttttcgaagaacaca

SEQ ID NO: 1982244 - DNA, 25 bp, Homo sapien
gtaataatgacaccagcttgttcaa

SEQ ID NO: 1982245 - DNA, 25 bp, Homo sapien
tttttgtttggcccatgccagttca

SEQ ID NO: 1982246 - DNA, 25 bp, Homo sapien
ttttgtttggcccatgccagttcat

SEQ ID NO: 1982247 - DNA, 25 bp, Homo sapien
gctttttgtttggcccatgccagtt

SEQ ID NO: 1982248 - DNA, 25 bp, Homo sapien
ctgctttttgtttggcccatgccag

SEQ ID NO: 1982249 - DNA, 25 bp, Homo sapien
tcccattccccggagaagatggatc

SEQ ID NO: 1982250 - DNA, 25 bp, Homo sapien
ccttcctcattatgttccacccatg

SEQ ID NO: 1982251 - DNA, 25 bp, Homo sapien
tccccggagaagatggatccgctct

SEQ ID NO: 1982252 - DNA, 25 bp, Homo sapien
aagatggatccgctctctcctctgg

SEQ ID NO: 1982253 - DNA, 25 bp, Homo sapien
gtgtggcctgtgaatacctctctac

SEQ ID NO: 1982254 - DNA, 25 bp, Homo sapien
agtgtggcctgtgaatacctctcta

SEQ ID NO: 1982255 - DNA, 25 bp, Homo sapien
cttccatgagcacaatattcactca

SEQ ID NO: 1982256 - DNA, 25 bp, Homo sapien
tgatcttggtccttcctaatggctt

SEQ ID NO: 1982257 - DNA, 25 bp, Homo sapien
ggtccttcctaatggcttgtccttg

SEQ ID NO: 1982258 - DNA, 25 bp, Homo sapien
ccatgagcacaatattcactcaaca

SEQ ID NO: 1982259 - DNA, 25 bp, Homo sapien
cttgggctgattcgggcctgcttgc

SEQ ID NO: 1982260 - DNA, 25 bp, Homo sapien
ctgcttgcccagctttcctacactg

SEQ ID NO: 1982261 - DNA, 25 bp, Homo sapien
gaatatttgatgttaagcatgtgcc

SEQ ID NO: 1982262 - DNA, 25 bp, Homo sapien
caatcttgatgaagtgtgagttgga

SEQ ID NO: 1982263 - DNA, 25 bp, Homo sapien
cacaatgagtttatgcagcaagtaa

SEQ ID NO: 1982264 - DNA, 25 bp, Homo sapien
ctgtgatgctgctattaatgataat

SEQ ID NO: 1982265 - DNA, 25 bp, Homo sapien
gctattaatgataattctcagcacc

SEQ ID NO: 1982266 - DNA, 25 bp, Homo sapien
gcaccttgtaagttgctgtaagtat

SEQ ID NO: 1982267 - DNA, 25 bp, Homo sapien
gacttcggagaacacaagcaccggg

SEQ ID NO: 1982268 - DNA, 25 bp, Homo sapien
gaaagacagccgtcacactgacagc

SEQ ID NO: 1982269 - DNA, 25 bp, Homo sapien
tgcccctgagggagatgacttcgga

SEQ ID NO: 1982270 - DNA, 25 bp, Homo sapien
catgagtgtgtgttgctttggccct

SEQ ID NO: 1982271 - DNA, 25 bp, Homo sapien
ctctctggaaaagaaccatcgacaa

SEQ ID NO: 1982272 - DNA, 25 bp, Homo sapien
gaaaagaaccatcgacaaacagcat

SEQ ID NO: 1982273 - DNA, 25 bp, Homo sapien
ttcctctctggaaaagaaccatcga

SEQ ID NO: 1982274 - DNA, 25 bp, Homo sapien
tctggaaaagaaccatcgacaaaca

SEQ ID NO: 1982275 - DNA, 25 bp, Homo sapien
taggatttgccagcctgtactgtcc

SEQ ID NO: 1982276 - DNA, 25 bp, Homo sapien
gaaacaggatttttgggctggccat

SEQ ID NO: 1982277 - DNA, 25 bp, Homo sapien
gaacctcctccgtgtgtgggatgct

SEQ ID NO: 1982278 - DNA, 25 bp, Homo sapien
cgatggagatggagagcgaacctcc

SEQ ID NO: 1982279 - DNA, 25 bp, Homo sapien
gcttaagagtgatggtttccccgtg

SEQ ID NO: 1982280 - DNA, 25 bp, Homo sapien
ttgtccaagtccatcaataggtttt

SEQ ID NO: 1982281 - DNA, 25 bp, Homo sapien
gtccaagtccatcaataggttttct

SEQ ID NO: 1982282 - DNA, 25 bp, Homo sapien
aagagtgatggtttccccgtgtgtg

SEQ ID NO: 1982283 - DNA, 25 bp, Homo sapien
ttggcaccccaaaaattgccgctgg

SEQ ID NO: 1982284 - DNA, 25 bp, Homo sapien
gatctaaactagattagactagtgg

SEQ ID NO: 1982285 - DNA, 25 bp, Homo sapien
cagaaaacggcaggtttatagaggg

SEQ ID NO: 1982286 - DNA, 25 bp, Homo sapien
ataaacaaactaggctctctctgtt

SEQ ID NO: 1982287 - DNA, 25 bp, Homo sapien
ggtcacgttgcctgtgtcgggcagg

SEQ ID NO: 1982288 - DNA, 25 bp, Homo sapien
agaagcaagcatcagctggctgtcg

SEQ ID NO: 1982289 - DNA, 25 bp, Homo sapien
tgtcgcttggggtcacgttgcctgt

SEQ ID NO: 1982290 - DNA, 25 bp, Homo sapien
gcaagcatcagctggctgtcgcttg

SEQ ID NO: 1982291 - DNA, 25 bp, Homo sapien
tagctcctccttaaggcacctttcc

SEQ ID NO: 1982292 - DNA, 25 bp, Homo sapien
ctaggacagtcgcttgcaattggcc

SEQ ID NO: 1982293 - DNA, 25 bp, Homo sapien
agtcgcttgcaattggccgcacgcc

SEQ ID NO: 1982294 - DNA, 25 bp, Homo sapien
gcacgcccctagctcctccttaagg

SEQ ID NO: 1982295 - DNA, 25 bp, Homo sapien
gccgaggagacaggcgggacacggg

SEQ ID NO: 1982296 - DNA, 25 bp, Homo sapien
gacacgggcgactggctgctgatgc

SEQ ID NO: 1982297 - DNA, 25 bp, Homo sapien
gcaggctccgccgaggagacaggcg

SEQ ID NO: 1982298 - DNA, 25 bp, Homo sapien
ggcagcaggctccgccgaggagaca

SEQ ID NO: 1982299 - DNA, 25 bp, Homo sapien
ctgggtccccaggccgctgccgtcc

SEQ ID NO: 1982300 - DNA, 25 bp, Homo sapien
tcaggcgatgccactcctaccagat

SEQ ID NO: 1982301 - DNA, 25 bp, Homo sapien
gctcaggcgatgccactcctaccag

SEQ ID NO: 1982302 - DNA, 25 bp, Homo sapien
gcgatgccactcctaccagatccat

SEQ ID NO: 1982303 - DNA, 25 bp, Homo sapien
tagtactccagtctcgtctgccact

SEQ ID NO: 1982304 - DNA, 25 bp, Homo sapien
tttccgagagatccagcccgtgtga

SEQ ID NO: 1982305 - DNA, 25 bp, Homo sapien
actcaaggtggcctttgggagatcc

SEQ ID NO: 1982306 - DNA, 25 bp, Homo sapien
ccgtgtgaccaaggctagtactcca

SEQ ID NO: 1982307 - DNA, 25 bp, Homo sapien
aagatcgtgcttgtttcccctccag

SEQ ID NO: 1982308 - DNA, 25 bp, Homo sapien
gggtgtgtaagccagtcctgctcaa

SEQ ID NO: 1982309 - DNA, 25 bp, Homo sapien
tcccctccagtatcatcagggtgtg

SEQ ID NO: 1982310 - DNA, 25 bp, Homo sapien
gccagtgaaaaacaagatcgtgctt

SEQ ID NO: 1982311 - DNA, 25 bp, Homo sapien
agcagcggggaggttgtatatcaac

SEQ ID NO: 1982312 - DNA, 25 bp, Homo sapien
gcagcggggaggttgtatatcaact

SEQ ID NO: 1982313 - DNA, 25 bp, Homo sapien
tatcccctaaaattctttgtccata

SEQ ID NO: 1982314 - DNA, 25 bp, Homo sapien
aatcctctcttcttggaatatcccc

SEQ ID NO: 1982315 - DNA, 25 bp, Homo sapien
tctcttcttggaatatcccctaaaa

SEQ ID NO: 1982316 - DNA, 25 bp, Homo sapien
tctttgtccataatagtagttcagc

SEQ ID NO: 1982317 - DNA, 25 bp, Homo sapien
gaacaagatattgtattttgaggaa

SEQ ID NO: 1982318 - DNA, 25 bp, Homo sapien
caagatattgtattttgaggaatag

SEQ ID NO: 1982319 - DNA, 25 bp, Homo sapien
agaacaagatattgtattttgagga

SEQ ID NO: 1982320 - DNA, 25 bp, Homo sapien
aacaagatattgtattttgaggaat

SEQ ID NO: 1982321 - DNA, 25 bp, Homo sapien
tcaggaaaaacggcagcttcttctt

SEQ ID NO: 1982322 - DNA, 25 bp, Homo sapien
ttctaactgcaattctttggccagc

SEQ ID NO: 1982323 - DNA, 25 bp, Homo sapien
cttcttctaactgcaattctttggc

SEQ ID NO: 1982324 - DNA, 25 bp, Homo sapien
aattctttggccagctgttcactca

SEQ ID NO: 1982325 - DNA, 25 bp, Homo sapien
caactaggattaagagaactgggag

SEQ ID NO: 1982326 - DNA, 25 bp, Homo sapien
tgcacctgtgggagtaccaactagg

SEQ ID NO: 1982327 - DNA, 25 bp, Homo sapien
ccaattatgagagtaggaggtgcct

SEQ ID NO: 1982328 - DNA, 25 bp, Homo sapien
tagccttaagaccaatggcatgcac

SEQ ID NO: 1982329 - DNA, 25 bp, Homo sapien
caaaataaggcaatataaactaatg

SEQ ID NO: 1982330 - DNA, 25 bp, Homo sapien
aaataaggcaatataaactaatgta

SEQ ID NO: 1982331 - DNA, 25 bp, Homo sapien
taaggcaatataaactaatgtaatg

SEQ ID NO: 1982332 - DNA, 25 bp, Homo sapien
aataaggcaatataaactaatgtaa

SEQ ID NO: 1982333 - DNA, 25 bp, Homo sapien
ttctccagtaataaatggtccttca

SEQ ID NO: 1982334 - DNA, 25 bp, Homo sapien
ccagtaataaatggtccttcagcaa

SEQ ID NO: 1982335 - DNA, 25 bp, Homo sapien
ctggaagtatcaatgttttctccag

SEQ ID NO: 1982336 - DNA, 25 bp, Homo sapien
tccagtaataaatggtccttcagca

SEQ ID NO: 1982337 - DNA, 25 bp, Homo sapien
tttcttcacgcctaagctgtgcatc

SEQ ID NO: 1982338 - DNA, 25 bp, Homo sapien
tcacgcctaagctgtgcatcatatt

SEQ ID NO: 1982339 - DNA, 25 bp, Homo sapien
gcctaagctgtgcatcatattctct

SEQ ID NO: 1982340 - DNA, 25 bp, Homo sapien
gctgtgcatcatattctctgtcata

SEQ ID NO: 1982341 - DNA, 25 bp, Homo sapien
tctaccactcaatgaagttgtcaca

SEQ ID NO: 1982342 - DNA, 25 bp, Homo sapien
ttacttaggagcacattatgagtgt

SEQ ID NO: 1982343 - DNA, 25 bp, Homo sapien
tatgagtgttttctaccactcaatg

SEQ ID NO: 1982344 - DNA, 25 bp, Homo sapien
cttaagaagcaaaaatagttgaaga

SEQ ID NO: 1982345 - DNA, 25 bp, Homo sapien
tcatcacgagtatcctgccagtcaa

SEQ ID NO: 1982346 - DNA, 25 bp, Homo sapien
ctggtctgtagggatcatcacgagt

SEQ ID NO: 1982347 - DNA, 25 bp, Homo sapien
tgtagggatcatcacgagtatcctg

SEQ ID NO: 1982348 - DNA, 25 bp, Homo sapien
tcacgagtatcctgccagtcaacct

SEQ ID NO: 1982349 - DNA, 25 bp, Homo sapien
ctgctgcccccagaaagtaaaaact

SEQ ID NO: 1982350 - DNA, 25 bp, Homo sapien
tattctgctgcccccagaaagtaaa

SEQ ID NO: 1982351 - DNA, 25 bp, Homo sapien
ttctgctgcccccagaaagtaaaaa

SEQ ID NO: 1982352 - DNA, 25 bp, Homo sapien
ctctattctgctgcccccagaaagt

SEQ ID NO: 1982353 - DNA, 25 bp, Homo sapien
catgtttggtggtgatatcttttcc

SEQ ID NO: 1982354 - DNA, 25 bp, Homo sapien
atgtttggtggtgatatcttttcct

SEQ ID NO: 1982355 - DNA, 25 bp, Homo sapien
tgcaattcagttaggtagccactag

SEQ ID NO: 1982356 - DNA, 25 bp, Homo sapien
tatagcagactatgttcacaccatg

SEQ ID NO: 1982357 - DNA, 25 bp, Homo sapien
aaactaaggtctttcggcatgtgca

SEQ ID NO: 1982358 - DNA, 25 bp, Homo sapien
caatattgaactgtgaaggctacac

SEQ ID NO: 1982359 - DNA, 25 bp, Homo sapien
catgtaggcgggcacttcgacgttc

SEQ ID NO: 1982360 - DNA, 25 bp, Homo sapien
ttttctcatgtaggcgggcacttcg

SEQ ID NO: 1982361 - DNA, 25 bp, Homo sapien
taggcgggcacttcgacgttcttct

SEQ ID NO: 1982362 - DNA, 25 bp, Homo sapien
gcacttcgacgttcttctgagtagg

SEQ ID NO: 1982363 - DNA, 25 bp, Homo sapien
accacagtggctggatttatttaca

SEQ ID NO: 1982364 - DNA, 25 bp, Homo sapien
ttaaaaagccaatctcatgaaaaaa

SEQ ID NO: 1982365 - DNA, 25 bp, Homo sapien
cacctcacctggcttatttacattt

SEQ ID NO: 1982366 - DNA, 25 bp, Homo sapien
tgagctggggatcattatgttgcct

SEQ ID NO: 1982367 - DNA, 25 bp, Homo sapien
cataagtaaacgtgtcttaggatca

SEQ ID NO: 1982368 - DNA, 25 bp, Homo sapien
tatgcatgaaagacaacagactcct

SEQ ID NO: 1982369 - DNA, 25 bp, Homo sapien
gtgtcttaggatcaactgctttttc

SEQ ID NO: 1982370 - DNA, 25 bp, Homo sapien
ctccctccatatgcatgaaagacaa

SEQ ID NO: 1982371 - DNA, 25 bp, Homo sapien
atggtatcatattttgctcatttac

SEQ ID NO: 1982372 - DNA, 25 bp, Homo sapien
catatcatggtatcatattttgctc

SEQ ID NO: 1982373 - DNA, 25 bp, Homo sapien
tatcatggtatcatattttgctcat

SEQ ID NO: 1982374 - DNA, 25 bp, Homo sapien
catggtatcatattttgctcattta

SEQ ID NO: 1982375 - DNA, 25 bp, Homo sapien
gagtacctggtacttgacagctgct

SEQ ID NO: 1982376 - DNA, 25 bp, Homo sapien
tattccattagaccagagaccttcc

SEQ ID NO: 1982377 - DNA, 25 bp, Homo sapien
tttaaccacatagtaggtgaggccc

SEQ ID NO: 1982378 - DNA, 25 bp, Homo sapien
caaaaatgccatacaagagatccct

SEQ ID NO: 1982379 - DNA, 25 bp, Homo sapien
tgcccacatgcggatgatcttacgt

SEQ ID NO: 1982380 - DNA, 25 bp, Homo sapien
gtcacgattcttaaattcattaagg

SEQ ID NO: 1982381 - DNA, 25 bp, Homo sapien
tacgtggatttagtttactgaagcg

SEQ ID NO: 1982382 - DNA, 25 bp, Homo sapien
tactgaagcgatctttaaacctgaa

SEQ ID NO: 1982383 - DNA, 25 bp, Homo sapien
tgaatcgaggttatacacctggcct

SEQ ID NO: 1982384 - DNA, 25 bp, Homo sapien
ctaattggatgctggaagttttact

SEQ ID NO: 1982385 - DNA, 25 bp, Homo sapien
gatatatgataaagtgtctaaggca

SEQ ID NO: 1982386 - DNA, 25 bp, Homo sapien
tatttacccaagattacgtctagca

SEQ ID NO: 1982387 - DNA, 25 bp, Homo sapien
gggaactctcagtagaagaattttg

SEQ ID NO: 1982388 - DNA, 25 bp, Homo sapien
ctctcagtagaagaattttgtaact

SEQ ID NO: 1982389 - DNA, 25 bp, Homo sapien
ctggcttattttggtggggaactct

SEQ ID NO: 1982390 - DNA, 25 bp, Homo sapien
tttggtggggaactctcagtagaag

SEQ ID NO: 1982391 - DNA, 25 bp, Homo sapien
aactgttggacaaggaattccagct

SEQ ID NO: 1982392 - DNA, 25 bp, Homo sapien
cagtagtacaactgttggacaagga

SEQ ID NO: 1982393 - DNA, 25 bp, Homo sapien
agtacaactgttggacaaggaattc

SEQ ID NO: 1982394 - DNA, 25 bp, Homo sapien
gtttcttcagtagtacaactgttgg

SEQ ID NO: 1982395 - DNA, 25 bp, Homo sapien
cagcatgttatactcactgaggtca

SEQ ID NO: 1982396 - DNA, 25 bp, Homo sapien
ggtcagcatggacaagcgtacattc

SEQ ID NO: 1982397 - DNA, 25 bp, Homo sapien
ctttccagcatgccacagcatgtta

SEQ ID NO: 1982398 - DNA, 25 bp, Homo sapien
cattcatgatataactgccgcatca

SEQ ID NO: 1982399 - DNA, 25 bp, Homo sapien
gaacatgaactgatgtatttacatt

SEQ ID NO: 1982400 - DNA, 25 bp, Homo sapien
ttcaatacagaacatgaactgatgt

SEQ ID NO: 1982401 - DNA, 25 bp, Homo sapien
atacagaacatgaactgatgtattt

SEQ ID NO: 1982402 - DNA, 25 bp, Homo sapien
ctatttcaatacagaacatgaactg

SEQ ID NO: 1982403 - DNA, 25 bp, Homo sapien
tgactgactgacatcgatcaaccag

SEQ ID NO: 1982404 - DNA, 25 bp, Homo sapien
aactccaggccgtgagggtgggtag

SEQ ID NO: 1982405 - DNA, 25 bp, Homo sapien
ggtgggtaggttctactgactgact

SEQ ID NO: 1982406 - DNA, 25 bp, Homo sapien
acaagaactccaggccgtgagggtg

SEQ ID NO: 1982407 - DNA, 25 bp, Homo sapien
atatccttgtcctgaaagcagcccg

SEQ ID NO: 1982408 - DNA, 25 bp, Homo sapien
aaggcatattggtttacacgtctac

SEQ ID NO: 1982409 - DNA, 25 bp, Homo sapien
tacctggcaccccttgaacatttta

SEQ ID NO: 1982410 - DNA, 25 bp, Homo sapien
cctcttacttatcttaggagtgaga

SEQ ID NO: 1982411 - DNA, 25 bp, Homo sapien
taaaaatttcaagcaggctcagagg

SEQ ID NO: 1982412 - DNA, 25 bp, Homo sapien
cacagtaatttcaactcaaaggcag

SEQ ID NO: 1982413 - DNA, 25 bp, Homo sapien
gcttccaagctggactatactcagg

SEQ ID NO: 1982414 - DNA, 25 bp, Homo sapien
aaaaagacttggatgcatgcacgtg

SEQ ID NO: 1982415 - DNA, 25 bp, Homo sapien
cagcttcattatctgctgtgatgtt

SEQ ID NO: 1982416 - DNA, 25 bp, Homo sapien
tctgctgtgatgtttaagcctgaaa

SEQ ID NO: 1982417 - DNA, 25 bp, Homo sapien
acagcattgaagagttctcgttcac

SEQ ID NO: 1982418 - DNA, 25 bp, Homo sapien
gcagggaccacatgttactattttt

SEQ ID NO: 1982419 - DNA, 25 bp, Homo sapien
tagccttaggctaggcccagcttac

SEQ ID NO: 1982420 - DNA, 25 bp, Homo sapien
tacttactgagcaactgtattgtgc

SEQ ID NO: 1982421 - DNA, 25 bp, Homo sapien
ggaacagactcagtaatcactctct

SEQ ID NO: 1982422 - DNA, 25 bp, Homo sapien
tattcatcatatagtagtggtgggt

SEQ ID NO: 1982423 - DNA, 25 bp, Homo sapien
ctattcatcatatagtagtggtggg

SEQ ID NO: 1982424 - DNA, 25 bp, Homo sapien
agtcacccataacttcatttgctat

SEQ ID NO: 1982425 - DNA, 25 bp, Homo sapien
aaagcacagaagcaccattgcccac

SEQ ID NO: 1982426 - DNA, 25 bp, Homo sapien
aagcacagaagcaccattgcccact

SEQ ID NO: 1982427 - DNA, 25 bp, Homo sapien
atttgctattggcagctgacaatca

SEQ ID NO: 1982428 - DNA, 25 bp, Homo sapien
gtgacattttattctctcaatgctg

SEQ ID NO: 1982429 - DNA, 25 bp, Homo sapien
ggtgtccagcacgtactaaaaacta

SEQ ID NO: 1982430 - DNA, 25 bp, Homo sapien
ggaaagacgcaacacaaaacaggga

SEQ ID NO: 1982431 - DNA, 25 bp, Homo sapien
tactaagagtaaggccagatagctc

SEQ ID NO: 1982432 - DNA, 25 bp, Homo sapien
tagaatcacggccacagtctggaaa

SEQ ID NO: 1982433 - DNA, 25 bp, Homo sapien
tggccctgcctaccaaaggattgga

SEQ ID NO: 1982434 - DNA, 25 bp, Homo sapien
gctgcattagcaggagagtcccatg

SEQ ID NO: 1982435 - DNA, 25 bp, Homo sapien
tcccatgctgagacaggaattggct

SEQ ID NO: 1982436 - DNA, 25 bp, Homo sapien
tcttgctgatttaagggcgctggcc

SEQ ID NO: 1982437 - DNA, 25 bp, Homo sapien
ctggtctgatcattgcttccgttct

SEQ ID NO: 1982438 - DNA, 25 bp, Homo sapien
gttctcagaacattctttctgtgga

SEQ ID NO: 1982439 - DNA, 25 bp, Homo sapien
tgatcattgcttccgttctcagaac

SEQ ID NO: 1982440 - DNA, 25 bp, Homo sapien
tccgttctcagaacattctttctgt

SEQ ID NO: 1982441 - DNA, 25 bp, Homo sapien
tatggtctttttatgacaccaggca

SEQ ID NO: 1982442 - DNA, 25 bp, Homo sapien
taagagccaggcttgattgttgtgc

SEQ ID NO: 1982443 - DNA, 25 bp, Homo sapien
gattgttgtgcagttcgccttgggt

SEQ ID NO: 1982444 - DNA, 25 bp, Homo sapien
gaattcagtttggttgactctggca

SEQ ID NO: 1982445 - DNA, 25 bp, Homo sapien
ccagagtggagcaggatgcgcggtg

SEQ ID NO: 1982446 - DNA, 25 bp, Homo sapien
cccgggggcggtcgccagagtggag

SEQ ID NO: 1982447 - DNA, 25 bp, Homo sapien
tggagcccggcccggactgtagcgg

SEQ ID NO: 1982448 - DNA, 25 bp, Homo sapien
gagcccggcccggactgtagcggcg

SEQ ID NO: 1982449 - DNA, 25 bp, Homo sapien
cgctcgcacagctccagatagtagt

SEQ ID NO: 1982450 - DNA, 25 bp, Homo sapien
aagacgcagttgacagggttcgcct

SEQ ID NO: 1982451 - DNA, 25 bp, Homo sapien
ttggcctcatcgaagaagacgcagt

SEQ ID NO: 1982452 - DNA, 25 bp, Homo sapien
ggttcgccttctcgaactgcaccgg

SEQ ID NO: 1982453 - DNA, 25 bp, Homo sapien
gcctttaactaccacgccagtagct

SEQ ID NO: 1982454 - DNA, 25 bp, Homo sapien
cagtagctccaccagatcgaacagc

SEQ ID NO: 1982455 - DNA, 25 bp, Homo sapien
atctgggcctttaactaccacgcca

SEQ ID NO: 1982456 - DNA, 25 bp, Homo sapien
taaatgagatgggattcctatcatc

SEQ ID NO: 1982457 - DNA, 25 bp, Homo sapien
ctttgaggtcctctgaacagccaat

SEQ ID NO: 1982458 - DNA, 25 bp, Homo sapien
gaggtcctctgaacagccaatatct

SEQ ID NO: 1982459 - DNA, 25 bp, Homo sapien
tgaggtcctctgaacagccaatatc

SEQ ID NO: 1982460 - DNA, 25 bp, Homo sapien
ggtcctctgaacagccaatatctta

SEQ ID NO: 1982461 - DNA, 25 bp, Homo sapien
gcaatggtgaacatttacacgggct

SEQ ID NO: 1982462 - DNA, 25 bp, Homo sapien
gaaactaacagaggattctgcctgt

SEQ ID NO: 1982463 - DNA, 25 bp, Homo sapien
cattcctcaagcagctgatgtcaga

SEQ ID NO: 1982464 - DNA, 25 bp, Homo sapien
tctactctacaaacggcaatggtga

SEQ ID NO: 1982465 - DNA, 25 bp, Homo sapien
tcctgtgtgtattccagctgggaat

SEQ ID NO: 1982466 - DNA, 25 bp, Homo sapien
cctgtgtgtattccagctgggaatt

SEQ ID NO: 1982467 - DNA, 25 bp, Homo sapien
ttatgaagacaatttcagttgaact

SEQ ID NO: 1982468 - DNA, 25 bp, Homo sapien
gaatcctagaatgttggcattctta

SEQ ID NO: 1982469 - DNA, 25 bp, Homo sapien
gattccttgatctgttatgaagaca

SEQ ID NO: 1982470 - DNA, 25 bp, Homo sapien
ctggtaaaattcgattccttgatct

SEQ ID NO: 1982471 - DNA, 25 bp, Homo sapien
agattgtggctcttcaagagtttca

SEQ ID NO: 1982472 - DNA, 25 bp, Homo sapien
tagacagcaagatcacggcgctctc

SEQ ID NO: 1982473 - DNA, 25 bp, Homo sapien
gtaccaattcacattgagattgtgg

SEQ ID NO: 1982474 - DNA, 25 bp, Homo sapien
gacattctccaggaccgtggtagac

SEQ ID NO: 1982475 - DNA, 25 bp, Homo sapien
tccaggagctgacgggtatacagag

SEQ ID NO: 1982476 - DNA, 25 bp, Homo sapien
tcagagcggtgacgttacggctaga

SEQ ID NO: 1982477 - DNA, 25 bp, Homo sapien
tagaggaacctgtccctaacgtgcc

SEQ ID NO: 1982478 - DNA, 25 bp, Homo sapien
cattccctgtgtaaaaccaacaagg

SEQ ID NO: 1982479 - DNA, 25 bp, Homo sapien
ggcgcagctggtaattcaatctcaa

SEQ ID NO: 1982480 - DNA, 25 bp, Homo sapien
gtttagttgacttaggcgcagctgg

SEQ ID NO: 1982481 - DNA, 25 bp, Homo sapien
ggtagccattgcgatgtctctttcg

SEQ ID NO: 1982482 - DNA, 25 bp, Homo sapien
tcaaatttgggcagcttcgacatag

SEQ ID NO: 1982483 - DNA, 25 bp, Homo sapien
aatggagtattttgctgccaacaag

SEQ ID NO: 1982484 - DNA, 25 bp, Homo sapien
gacataaatcacatctggccattca

SEQ ID NO: 1982485 - DNA, 25 bp, Homo sapien
ctaggctttggcgatcttccctcac

SEQ ID NO: 1982486 - DNA, 25 bp, Homo sapien
tctaaatggcatcacggttaagtaa

SEQ ID NO: 1982487 - DNA, 25 bp, Homo sapien
gaatgatgcctcaagaagagaacat

SEQ ID NO: 1982488 - DNA, 25 bp, Homo sapien
atagaggaccacctccgctcctgtg

SEQ ID NO: 1982489 - DNA, 25 bp, Homo sapien
ggtagatgatagaggaccacctccg

SEQ ID NO: 1982490 - DNA, 25 bp, Homo sapien
tcctgtgctgttggaggtccgagaa

SEQ ID NO: 1982491 - DNA, 25 bp, Homo sapien
aaaaacagatcaacaagctgcagtt

SEQ ID NO: 1982492 - DNA, 25 bp, Homo sapien
aacttcaatatgtgcatctttttac

SEQ ID NO: 1982493 - DNA, 25 bp, Homo sapien
tgtccaccacgttcagggcaaactt

SEQ ID NO: 1982494 - DNA, 25 bp, Homo sapien
tgcacgactaccaggttgtccacca

SEQ ID NO: 1982495 - DNA, 25 bp, Homo sapien
ctctgtatcctgatgatgcacgact

SEQ ID NO: 1982496 - DNA, 25 bp, Homo sapien
cttaactttggtagaaacgcagaca

SEQ ID NO: 1982497 - DNA, 25 bp, Homo sapien
taactttggtagaaacgcagacagc

SEQ ID NO: 1982498 - DNA, 25 bp, Homo sapien
aactttggtagaaacgcagacagct

SEQ ID NO: 1982499 - DNA, 25 bp, Homo sapien
ctttggtagaaacgcagacagcttg

SEQ ID NO: 1982500 - DNA, 25 bp, Homo sapien
ggtccacacggcctcaaaaccatta

SEQ ID NO: 1982501 - DNA, 25 bp, Homo sapien
tcacgtgtcacagagttagcgtcac

SEQ ID NO: 1982502 - DNA, 25 bp, Homo sapien
catgctcacaattgcaacagagagt

SEQ ID NO: 1982503 - DNA, 25 bp, Homo sapien
tactcgtggaatggagcggattccc

SEQ ID NO: 1982504 - DNA, 25 bp, Homo sapien
catggtttgcccagttgctttcatt

SEQ ID NO: 1982505 - DNA, 25 bp, Homo sapien
aaagacaagactgaggccaaaatca

SEQ ID NO: 1982506 - DNA, 25 bp, Homo sapien
gactgaggccaaaatcaatcatggt

SEQ ID NO: 1982507 - DNA, 25 bp, Homo sapien
aatcaatcatggtttgcccagttgc

SEQ ID NO: 1982508 - DNA, 25 bp, Homo sapien
aaactctccccgtaacttgatatcg

SEQ ID NO: 1982509 - DNA, 25 bp, Homo sapien
gatctgatagggctggatcgatcga

SEQ ID NO: 1982510 - DNA, 25 bp, Homo sapien
tggatcgatcgagcgggaagcacgg

SEQ ID NO: 1982511 - DNA, 25 bp, Homo sapien
aacttgatatcgaatattaccgatg

SEQ ID NO: 1982512 - DNA, 25 bp, Homo sapien
gactgtcagtcccaaagaatgcaat

SEQ ID NO: 1982513 - DNA, 25 bp, Homo sapien
tttgggtaagcctaagagccacagc

SEQ ID NO: 1982514 - DNA, 25 bp, Homo sapien
aaactatccattctaaagctcaggg

SEQ ID NO: 1982515 - DNA, 25 bp, Homo sapien
tcagcgttacagagctaaggcaaac

SEQ ID NO: 1982516 - DNA, 25 bp, Homo sapien
tgggcaagacacacggatgcatcaa

SEQ ID NO: 1982517 - DNA, 25 bp, Homo sapien
taactggtcctgtaccaccggaaca

SEQ ID NO: 1982518 - DNA, 25 bp, Homo sapien
cacgggctgttactgtgaccaggcc

SEQ ID NO: 1982519 - DNA, 25 bp, Homo sapien
ctcctattgatctctgcacgggctg

SEQ ID NO: 1982520 - DNA, 25 bp, Homo sapien
catgtcaaggcttcaatcactgtgg

SEQ ID NO: 1982521 - DNA, 25 bp, Homo sapien
gaaatgaactgttccgtctcactga

SEQ ID NO: 1982522 - DNA, 25 bp, Homo sapien
gcaacgatgcagtcagaaaatgctg

SEQ ID NO: 1982523 - DNA, 25 bp, Homo sapien
tcaaatacccagatcatccacggag

SEQ ID NO: 1982524 - DNA, 25 bp, Homo sapien
gactggctggtcacggcagcaggac

SEQ ID NO: 1982525 - DNA, 25 bp, Homo sapien
gagactggctggtcacggcagcagg

SEQ ID NO: 1982526 - DNA, 25 bp, Homo sapien
aggagactggctggtcacggcagca

SEQ ID NO: 1982527 - DNA, 25 bp, Homo sapien
caggagactggctggtcacggcagc

SEQ ID NO: 1982528 - DNA, 25 bp, Homo sapien
gatgtcaggttgaaagacaatccaa

SEQ ID NO: 1982529 - DNA, 25 bp, Homo sapien
ttggcttgcgctgataatgatgtca

SEQ ID NO: 1982530 - DNA, 25 bp, Homo sapien
tgataatgatgtcaggttgaaagac

SEQ ID NO: 1982531 - DNA, 25 bp, Homo sapien
tgcgctgataatgatgtcaggttga

SEQ ID NO: 1982532 - DNA, 25 bp, Homo sapien
ctggattttaagaggcagcaaataa

SEQ ID NO: 1982533 - DNA, 25 bp, Homo sapien
atgatgcaaaccgtaacaaaagccc

SEQ ID NO: 1982534 - DNA, 25 bp, Homo sapien
aaagtggttcccctaaacatctgcg

SEQ ID NO: 1982535 - DNA, 25 bp, Homo sapien
cgggtggcaggtggtgataaaaagc

SEQ ID NO: 1982536 - DNA, 25 bp, Homo sapien
agacaggatgaccatcttgcattcc

SEQ ID NO: 1982537 - DNA, 25 bp, Homo sapien
cctttgtctggtaagagatttacta

SEQ ID NO: 1982538 - DNA, 25 bp, Homo sapien
ctatgggctcaagtttcacttggag

SEQ ID NO: 1982539 - DNA, 25 bp, Homo sapien
taagagatttactatgggctcaagt

SEQ ID NO: 1982540 - DNA, 25 bp, Homo sapien
catatgcagtgagtggcttggattt

SEQ ID NO: 1982541 - DNA, 25 bp, Homo sapien
tgtgtgcccactttcattcagaacc

SEQ ID NO: 1982542 - DNA, 25 bp, Homo sapien
tgtagcccacatcccgataaaaagt

SEQ ID NO: 1982543 - DNA, 25 bp, Homo sapien
ggctgtgggtcacagacaagacaca

SEQ ID NO: 1982544 - DNA, 25 bp, Homo sapien
aactctgctcggcatccaggtactt

SEQ ID NO: 1982545 - DNA, 25 bp, Homo sapien
actcatggttgagtttatcaaaaac

SEQ ID NO: 1982546 - DNA, 25 bp, Homo sapien
aaaaacagtggctatcacgggcagc

SEQ ID NO: 1982547 - DNA, 25 bp, Homo sapien
cacgggcagcgatgctctgtctgac

SEQ ID NO: 1982548 - DNA, 25 bp, Homo sapien
tccagcaccgcctgggtccgcaccg

SEQ ID NO: 1982549 - DNA, 25 bp, Homo sapien
tacacatctgactggtccagcaccg

SEQ ID NO: 1982550 - DNA, 25 bp, Homo sapien
gagcgggctgcttcggctctgccct

SEQ ID NO: 1982551 - DNA, 25 bp, Homo sapien
ttgaggagcgggctgcttcggctct

SEQ ID NO: 1982552 - DNA, 25 bp, Homo sapien
caagtgactctaatcacatgaagtc

SEQ ID NO: 1982553 - DNA, 25 bp, Homo sapien
tctaatcacttcaagtgactctaat

SEQ ID NO: 1982554 - DNA, 25 bp, Homo sapien
gtgactctaatcacatgaagtctcc

SEQ ID NO: 1982555 - DNA, 25 bp, Homo sapien
cacttcaagtgactctaatcacatg

SEQ ID NO: 1982556 - DNA, 25 bp, Homo sapien
tcagcattagaagccaaactaccag

SEQ ID NO: 1982557 - DNA, 25 bp, Homo sapien
tcaacaattatgctttaggcctcag

SEQ ID NO: 1982558 - DNA, 25 bp, Homo sapien
tggttttgcacacatcgctccagaa

SEQ ID NO: 1982559 - DNA, 25 bp, Homo sapien
ccaacgaggtgcaaaagaggctgca

SEQ ID NO: 1982560 - DNA, 25 bp, Homo sapien
aacgaatgtattccatcagcacggc

SEQ ID NO: 1982561 - DNA, 25 bp, Homo sapien
ctgtactgcaatctgaaactggtta

SEQ ID NO: 1982562 - DNA, 25 bp, Homo sapien
tcagcacggctatcacaaatttatg

SEQ ID NO: 1982563 - DNA, 25 bp, Homo sapien
ctatcacaaatttatgaggcatctc

SEQ ID NO: 1982564 - DNA, 25 bp, Homo sapien
ttgggcccagatgatttgaaggtac

SEQ ID NO: 1982565 - DNA, 25 bp, Homo sapien
tttcgtcatgcaggtaaagacccca

SEQ ID NO: 1982566 - DNA, 25 bp, Homo sapien
cattcagctacaacagactagaggc

SEQ ID NO: 1982567 - DNA, 25 bp, Homo sapien
cccaaggactggctattctaaccaa

SEQ ID NO: 1982568 - DNA, 25 bp, Homo sapien
aagggttttgataacaagttcatgt

SEQ ID NO: 1982569 - DNA, 25 bp, Homo sapien
agggttttgataacaagttcatgta

SEQ ID NO: 1982570 - DNA, 25 bp, Homo sapien
ctgaggacgtggtactgcaggaact

SEQ ID NO: 1982571 - DNA, 25 bp, Homo sapien
ggtttggagtcgctgaggacgtggt

SEQ ID NO: 1982572 - DNA, 25 bp, Homo sapien
gaggatagaaactctctagggataa

SEQ ID NO: 1982573 - DNA, 25 bp, Homo sapien
tctctagggataacagcagacaagc

SEQ ID NO: 1982574 - DNA, 25 bp, Homo sapien
cagagatagctgatgagcaggagga

SEQ ID NO: 1982575 - DNA, 25 bp, Homo sapien
tagctgatgagcaggaggatagaaa

SEQ ID NO: 1982576 - DNA, 25 bp, Homo sapien
cagtaagggagagaagtccaggtca

SEQ ID NO: 1982577 - DNA, 25 bp, Homo sapien
acagagttagtttccatagtctaaa

SEQ ID NO: 1982578 - DNA, 25 bp, Homo sapien
aggaacagagttagtttccatagtc

SEQ ID NO: 1982579 - DNA, 25 bp, Homo sapien
ctagcagtaagggagagaagtccag

SEQ ID NO: 1982580 - DNA, 25 bp, Homo sapien
tgccccggataaaccttaaggcagc

SEQ ID NO: 1982581 - DNA, 25 bp, Homo sapien
tggtgtttggaaaggagaacttcta

SEQ ID NO: 1982582 - DNA, 25 bp, Homo sapien
tgttgtcatggccaccaatgccccg

SEQ ID NO: 1982583 - DNA, 25 bp, Homo sapien
ctaaaaattttcgtgcagaaatgtt

SEQ ID NO: 1982584 - DNA, 25 bp, Homo sapien
ggctccctcgcaaacgctggtttcg

SEQ ID NO: 1982585 - DNA, 25 bp, Homo sapien
caaacgctggtttcgctgttcaaaa

SEQ ID NO: 1982586 - DNA, 25 bp, Homo sapien
tggtgtgaaattggggctccctcgc

SEQ ID NO: 1982587 - DNA, 25 bp, Homo sapien
aaaagcggaatattgtatagaaaag

SEQ ID NO: 1982588 - DNA, 25 bp, Homo sapien
cctctgctactctttgaggctatgg

SEQ ID NO: 1982589 - DNA, 25 bp, Homo sapien
gctactctttgaggctatggttacc

SEQ ID NO: 1982590 - DNA, 25 bp, Homo sapien
gtgccctctgctactctttgaggct

SEQ ID NO: 1982591 - DNA, 25 bp, Homo sapien
ctctttgaggctatggttaccccaa

SEQ ID NO: 1982592 - DNA, 25 bp, Homo sapien
atttaattgccagttagatgtggca

SEQ ID NO: 1982593 - DNA, 25 bp, Homo sapien
tcgtaggtgtgtctactgggtttta

SEQ ID NO: 1982594 - DNA, 25 bp, Homo sapien
gccagttagatgtggcatgaaatga

SEQ ID NO: 1982595 - DNA, 25 bp, Homo sapien
gggacaaagaaagcatctcgtaggt

SEQ ID NO: 1982596 - DNA, 25 bp, Homo sapien
tgtaggcctcattagagcttggtct

SEQ ID NO: 1982597 - DNA, 25 bp, Homo sapien
taggcctcattagagcttggtctcc

SEQ ID NO: 1982598 - DNA, 25 bp, Homo sapien
tgttgtaggcctcattagagcttgg

SEQ ID NO: 1982599 - DNA, 25 bp, Homo sapien
cagaatgttgtaggcctcattagag

SEQ ID NO: 1982600 - DNA, 25 bp, Homo sapien
atgcaataaattaactttgtacaca

SEQ ID NO: 1982601 - DNA, 25 bp, Homo sapien
tgcaataaattaactttgtacacat

SEQ ID NO: 1982602 - DNA, 25 bp, Homo sapien
tgacagttgaggttgtagatacact

SEQ ID NO: 1982603 - DNA, 25 bp, Homo sapien
tatttttagtgacagttgaggttgt

SEQ ID NO: 1982604 - DNA, 25 bp, Homo sapien
taagccatcccacaagttctatacc

SEQ ID NO: 1982605 - DNA, 25 bp, Homo sapien
tctccttttaggagtaagccatccc

SEQ ID NO: 1982606 - DNA, 25 bp, Homo sapien
catcggcaaggccaagttgaacacc

SEQ ID NO: 1982607 - DNA, 25 bp, Homo sapien
ttgaacaccggatggtgccaaccat

SEQ ID NO: 1982608 - DNA, 25 bp, Homo sapien
aacgtagcgcctgtgaactcaggaa

SEQ ID NO: 1982609 - DNA, 25 bp, Homo sapien
ttggcagcagctttgaacgtagcgc

SEQ ID NO: 1982610 - DNA, 25 bp, Homo sapien
gatgtttcccaaaggagtctgacca

SEQ ID NO: 1982611 - DNA, 25 bp, Homo sapien
gaacagtacctgaccatcattgacg

SEQ ID NO: 1982612 - DNA, 25 bp, Homo sapien
gagagcgagctttaatgaggcctcc

SEQ ID NO: 1982613 - DNA, 25 bp, Homo sapien
tgagtcttgtagacagccagcaagg

SEQ ID NO: 1982614 - DNA, 25 bp, Homo sapien
cagtagcttgaacaatatggaggcc

SEQ ID NO: 1982615 - DNA, 25 bp, Homo sapien
ccaaagactgtacggaaaggtgtgt

SEQ ID NO: 1982616 - DNA, 25 bp, Homo sapien
tctagatgagattacccatagcagg

SEQ ID NO: 1982617 - DNA, 25 bp, Homo sapien
tatggaggccttcttactgtaggga

SEQ ID NO: 1982618 - DNA, 25 bp, Homo sapien
caggttccccatggacgtgcgttgt

SEQ ID NO: 1982619 - DNA, 25 bp, Homo sapien
cagaagccggtcatttacaaatggt

SEQ ID NO: 1982620 - DNA, 25 bp, Homo sapien
acccagaagccggtcatttacaaat

SEQ ID NO: 1982621 - DNA, 25 bp, Homo sapien
ccccatggacgtgcgttgtgtgatg

SEQ ID NO: 1982622 - DNA, 25 bp, Homo sapien
gcagcagatcttgtcccatgagggc

SEQ ID NO: 1982623 - DNA, 25 bp, Homo sapien
ggccacacttttaaagagccctgga

SEQ ID NO: 1982624 - DNA, 25 bp, Homo sapien
cacagaatgtgccatagctatccgc

SEQ ID NO: 1982625 - DNA, 25 bp, Homo sapien
ctaagtaggatagtgagagacacac

SEQ ID NO: 1982626 - DNA, 25 bp, Homo sapien
agcatgcaccattgccctctgtggg

SEQ ID NO: 1982627 - DNA, 25 bp, Homo sapien
gaggcacttcactgggaatcagaat

SEQ ID NO: 1982628 - DNA, 25 bp, Homo sapien
taatttagagcacaagtgggctgcc

SEQ ID NO: 1982629 - DNA, 25 bp, Homo sapien
gcaaccacaatagggaaagaggcac

SEQ ID NO: 1982630 - DNA, 25 bp, Homo sapien
atccatagcaatagtattcataata

SEQ ID NO: 1982631 - DNA, 25 bp, Homo sapien
cttgaacataaagatccatagcaat

SEQ ID NO: 1982632 - DNA, 25 bp, Homo sapien
ttgaacataaagatccatagcaata

SEQ ID NO: 1982633 - DNA, 25 bp, Homo sapien
cgcctggccgatgcagtcattttta

SEQ ID NO: 1982634 - DNA, 25 bp, Homo sapien
aaccatgcttgtctttcttcaaaaa

SEQ ID NO: 1982635 - DNA, 25 bp, Homo sapien
ccgcgcctggccgatgcagtcattt

SEQ ID NO: 1982636 - DNA, 25 bp, Homo sapien
tttaaaaccatgcttgtctttcttc

SEQ ID NO: 1982637 - DNA, 25 bp, Homo sapien
ccagaaggcatgtttgatcgtggct

SEQ ID NO: 1982638 - DNA, 25 bp, Homo sapien
aaagccaatcgtgcccactgaaggg

SEQ ID NO: 1982639 - DNA, 25 bp, Homo sapien
tataagaaccatttcgtccagaagg

SEQ ID NO: 1982640 - DNA, 25 bp, Homo sapien
tggcctgagcttagtttgacccgca

SEQ ID NO: 1982641 - DNA, 25 bp, Homo sapien
tgtaaagtaaggatactcacttggc

SEQ ID NO: 1982642 - DNA, 25 bp, Homo sapien
caggtcccctgatctaaggacttct

SEQ ID NO: 1982643 - DNA, 25 bp, Homo sapien
tcccctgatctaaggacttcttgta

SEQ ID NO: 1982644 - DNA, 25 bp, Homo sapien
aagtaaggatactcacttggcccat

SEQ ID NO: 1982645 - DNA, 25 bp, Homo sapien
gctcaggtcaaagccagaaaagcca

SEQ ID NO: 1982646 - DNA, 25 bp, Homo sapien
cgctcaggtcaaagccagaaaagcc

SEQ ID NO: 1982647 - DNA, 25 bp, Homo sapien
aggtcaaagccagaaaagccacctg

SEQ ID NO: 1982648 - DNA, 25 bp, Homo sapien
tcaggtcaaagccagaaaagccacc

SEQ ID NO: 1982649 - DNA, 25 bp, Homo sapien
ctggagcgggcaccagccggatcag

SEQ ID NO: 1982650 - DNA, 25 bp, Homo sapien
gcgggcaccagccggatcaggaact

SEQ ID NO: 1982651 - DNA, 25 bp, Homo sapien
gagcgggcaccagccggatcaggaa

SEQ ID NO: 1982652 - DNA, 25 bp, Homo sapien
tggagcgggcaccagccggatcagg

SEQ ID NO: 1982653 - DNA, 25 bp, Homo sapien
gcccgcggcgtgggggtggcctctc

SEQ ID NO: 1982654 - DNA, 25 bp, Homo sapien
agccggggatatgggcggcgccggg

SEQ ID NO: 1982655 - DNA, 25 bp, Homo sapien
cggacctgcagcgccaggactagcg

SEQ ID NO: 1982656 - DNA, 25 bp, Homo sapien
cgcctgagccgtccgcagaggggct

SEQ ID NO: 1982657 - DNA, 25 bp, Homo sapien
ccaggactagcgcagccggggatat

SEQ ID NO: 1982658 - DNA, 25 bp, Homo sapien
ggcgtcggcggcagtactggcccca

SEQ ID NO: 1982659 - DNA, 25 bp, Homo sapien
cggcgtcggcggcagtactggcccc

SEQ ID NO: 1982660 - DNA, 25 bp, Homo sapien
cgtcggcggcagtactggccccagt

SEQ ID NO: 1982661 - DNA, 25 bp, Homo sapien
tcggcggcagtactggccccagtgc

SEQ ID NO: 1982662 - DNA, 25 bp, Homo sapien
gcggtcgccccgcaggctggcagca

SEQ ID NO: 1982663 - DNA, 25 bp, Homo sapien
cgggatcccgagcggtcgccccgca

SEQ ID NO: 1982664 - DNA, 25 bp, Homo sapien
atcccgagcggtcgccccgcaggct

SEQ ID NO: 1982665 - DNA, 25 bp, Homo sapien
cgagcggtcgccccgcaggctggca

SEQ ID NO: 1982666 - DNA, 25 bp, Homo sapien
gaccaacttgcagtagagctcgggc

SEQ ID NO: 1982667 - DNA, 25 bp, Homo sapien
cccgaccaacttgcagtagagctcg

SEQ ID NO: 1982668 - DNA, 25 bp, Homo sapien
gtggcggtggcccaaatcctcgccg

SEQ ID NO: 1982669 - DNA, 25 bp, Homo sapien
caacttgcagtagagctcgggctgg

SEQ ID NO: 1982670 - DNA, 25 bp, Homo sapien
acctgctcttagcatttctatcaga

SEQ ID NO: 1982671 - DNA, 25 bp, Homo sapien
tcacctgctcttagcatttctatca

SEQ ID NO: 1982672 - DNA, 25 bp, Homo sapien
ctatcagaaaattttactttaacag

SEQ ID NO: 1982673 - DNA, 25 bp, Homo sapien
cagaaaattttactttaacagctat

SEQ ID NO: 1982674 - DNA, 25 bp, Homo sapien
gggtggaagatgacatctctaatgt

SEQ ID NO: 1982675 - DNA, 25 bp, Homo sapien
tggaagatgacatctctaatgtgcc

SEQ ID NO: 1982676 - DNA, 25 bp, Homo sapien
gaagatgacatctctaatgtgcctg

SEQ ID NO: 1982677 - DNA, 25 bp, Homo sapien
gatgacatctctaatgtgcctggtt

SEQ ID NO: 1982678 - DNA, 25 bp, Homo sapien
cggcccacgacacggcgactccaga

SEQ ID NO: 1982679 - DNA, 25 bp, Homo sapien
gcccacgacacggcgactccagagg

SEQ ID NO: 1982680 - DNA, 25 bp, Homo sapien
cacgacacggcgactccagaggcag

SEQ ID NO: 1982681 - DNA, 25 bp, Homo sapien
ggcggcccacgacacggcgactcca

SEQ ID NO: 1982682 - DNA, 25 bp, Homo sapien
gagaagtcagtattaattcagtaag

SEQ ID NO: 1982683 - DNA, 25 bp, Homo sapien
gacaaggcttgccaggtacatggag

SEQ ID NO: 1982684 - DNA, 25 bp, Homo sapien
ctttgagggcaagcattgagagaca

SEQ ID NO: 1982685 - DNA, 25 bp, Homo sapien
tgtgaataccagcactgagaagtca

SEQ ID NO: 1982686 - DNA, 25 bp, Homo sapien
cctctgtgcaattctgtgtgcggca

SEQ ID NO: 1982687 - DNA, 25 bp, Homo sapien
taagtggcagtgagcacaaacaggg

SEQ ID NO: 1982688 - DNA, 25 bp, Homo sapien
tcccagtggtgcatcaaggatccaa

SEQ ID NO: 1982689 - DNA, 25 bp, Homo sapien
tggccaatggcggtagatattccat

SEQ ID NO: 1982690 - DNA, 25 bp, Homo sapien
caacgttcagatccatcgatggcat

SEQ ID NO: 1982691 - DNA, 25 bp, Homo sapien
tgccccagatccaaggtgaggttga

SEQ ID NO: 1982692 - DNA, 25 bp, Homo sapien
gggtcttcagaattgcaatagtcac

SEQ ID NO: 1982693 - DNA, 25 bp, Homo sapien
tgactctgttgtactgtgtgcctga

SEQ ID NO: 1982694 - DNA, 25 bp, Homo sapien
caaagcttcctagattccaaagatt

SEQ ID NO: 1982695 - DNA, 25 bp, Homo sapien
agcttcctagattccaaagattctc

SEQ ID NO: 1982696 - DNA, 25 bp, Homo sapien
aacaaagcttcctagattccaaaga

SEQ ID NO: 1982697 - DNA, 25 bp, Homo sapien
gaacaaagcttcctagattccaaag

SEQ ID NO: 1982698 - DNA, 25 bp, Homo sapien
tacaccttccgatctcacgggagag

SEQ ID NO: 1982699 - DNA, 25 bp, Homo sapien
catagggagcccatagaatagaact

SEQ ID NO: 1982700 - DNA, 25 bp, Homo sapien
tagaactctggagtttggattctgg

SEQ ID NO: 1982701 - DNA, 25 bp, Homo sapien
cagagtgtatatgtagatcccacca

SEQ ID NO: 1982702 - DNA, 25 bp, Homo sapien
ctcctcatgtttttctctatacctc

SEQ ID NO: 1982703 - DNA, 25 bp, Homo sapien
cctcatgtttttctctatacctcac

SEQ ID NO: 1982704 - DNA, 25 bp, Homo sapien
tcctcatgtttttctctatacctca

SEQ ID NO: 1982705 - DNA, 25 bp, Homo sapien
tctggattgggctgtgtccacccgg

SEQ ID NO: 1982706 - DNA, 25 bp, Homo sapien
cagaaagactgggtcaaaaccaaga

SEQ ID NO: 1982707 - DNA, 25 bp, Homo sapien
gactgggtcaaaaccaagagccatc

SEQ ID NO: 1982708 - DNA, 25 bp, Homo sapien
ccagctgagtcaccctccttagtga

SEQ ID NO: 1982709 - DNA, 25 bp, Homo sapien
ggtgcctattaatccactaactgag

SEQ ID NO: 1982710 - DNA, 25 bp, Homo sapien
aactgagtcagtccccttttattgg

SEQ ID NO: 1982711 - DNA, 25 bp, Homo sapien
agcctaagctcattaacagggagag

SEQ ID NO: 1982712 - DNA, 25 bp, Homo sapien
cacatgttgtgtcgataaagaccat

SEQ ID NO: 1982713 - DNA, 25 bp, Homo sapien
atacttggtgtaggaggtggctcaa

SEQ ID NO: 1982714 - DNA, 25 bp, Homo sapien
tggctcaagggatggtgagagtctg

SEQ ID NO: 1982715 - DNA, 25 bp, Homo sapien
gctcaagggatggtgagagtctgcc

SEQ ID NO: 1982716 - DNA, 25 bp, Homo sapien
gagctcccaggatacttggtgtagg

SEQ ID NO: 1982717 - DNA, 25 bp, Homo sapien
tgccatgactgcacaccagtttgtg

SEQ ID NO: 1982718 - DNA, 25 bp, Homo sapien
tcctgcctgtgaagtgtatgtcttc

SEQ ID NO: 1982719 - DNA, 25 bp, Homo sapien
agtacagtatatttgtgcaggtcta

SEQ ID NO: 1982720 - DNA, 25 bp, Homo sapien
tgaaattacaccatgccaacagctg

SEQ ID NO: 1982721 - DNA, 25 bp, Homo sapien
catacccaagaaagccaatttctgt

SEQ ID NO: 1982722 - DNA, 25 bp, Homo sapien
gttccgcgagggattgctgcacaga

SEQ ID NO: 1982723 - DNA, 25 bp, Homo sapien
gcacagactgattttgcagcaccca

SEQ ID NO: 1982724 - DNA, 25 bp, Homo sapien
gcagcacccatgtgaacatacccaa

SEQ ID NO: 1982725 - DNA, 25 bp, Homo sapien
tacaggttgagatagagccaatgcg

SEQ ID NO: 1982726 - DNA, 25 bp, Homo sapien
ccaatgcgagggagtttgatgctga

SEQ ID NO: 1982727 - DNA, 25 bp, Homo sapien
caaacagctacaggttgagatagag

SEQ ID NO: 1982728 - DNA, 25 bp, Homo sapien
agtttgatgctgaaaacctgcgcac

SEQ ID NO: 1982729 - DNA, 25 bp, Homo sapien
tggcgtaaaacaggacagctcaaag

SEQ ID NO: 1982730 - DNA, 25 bp, Homo sapien
gatgtcagaacttcccttgagttcc

SEQ ID NO: 1982731 - DNA, 25 bp, Homo sapien
cccaggtgaactcttggatcaggat

SEQ ID NO: 1982732 - DNA, 25 bp, Homo sapien
atcccaggtgaactcttggatcagg

SEQ ID NO: 1982733 - DNA, 25 bp, Homo sapien
tgagggcgatgctgagagtcagcca

SEQ ID NO: 1982734 - DNA, 25 bp, Homo sapien
ggccagggcagggccggtaacctgc

SEQ ID NO: 1982735 - DNA, 25 bp, Homo sapien
ctgcagcaggaatcctctgagccaa

SEQ ID NO: 1982736 - DNA, 25 bp, Homo sapien
ctgagccaatgctgctgtgggccag

SEQ ID NO: 1982737 - DNA, 25 bp, Homo sapien
cctctgagccaatgctgctgtgggc

SEQ ID NO: 1982738 - DNA, 25 bp, Homo sapien
ctagaatgcacgtggccttgtgaat

SEQ ID NO: 1982739 - DNA, 25 bp, Homo sapien
gcacgtggccttgtgaatacaaaac

SEQ ID NO: 1982740 - DNA, 25 bp, Homo sapien
caaaacacgcactcagtcttctggc

SEQ ID NO: 1982741 - DNA, 25 bp, Homo sapien
tgtgaatacaaaacacgcactcagt

SEQ ID NO: 1982742 - DNA, 25 bp, Homo sapien
agttgtcgtaccgtggtctggggtg

SEQ ID NO: 1982743 - DNA, 25 bp, Homo sapien
tctgaacactatatcccttaatttg

SEQ ID NO: 1982744 - DNA, 25 bp, Homo sapien
cctttgctttctgaacactatatcc

SEQ ID NO: 1982745 - DNA, 25 bp, Homo sapien
atatcccttaatttggtagttgtcg

SEQ ID NO: 1982746 - DNA, 25 bp, Homo sapien
ccatttgatggagtggtagcactcc

SEQ ID NO: 1982747 - DNA, 25 bp, Homo sapien
agcagccatttgatggagtggtagc

SEQ ID NO: 1982748 - DNA, 25 bp, Homo sapien
cagccatttgatggagtggtagcac

SEQ ID NO: 1982749 - DNA, 25 bp, Homo sapien
gccatttgatggagtggtagcactc

SEQ ID NO: 1982750 - DNA, 25 bp, Homo sapien
tgcttccaaagtctacagatctttc

SEQ ID NO: 1982751 - DNA, 25 bp, Homo sapien
gatcagggcgaggagaatttgcaaa

SEQ ID NO: 1982752 - DNA, 25 bp, Homo sapien
tttccaagacccaaagatcagggcg

SEQ ID NO: 1982753 - DNA, 25 bp, Homo sapien
attaaaatataggccacatggaaga

SEQ ID NO: 1982754 - DNA, 25 bp, Homo sapien
caatacgggaatattcagtaacaca

SEQ ID NO: 1982755 - DNA, 25 bp, Homo sapien
agtacatcatcatcccgggtgacag

SEQ ID NO: 1982756 - DNA, 25 bp, Homo sapien
aagtacatcatcatcccgggtgaca

SEQ ID NO: 1982757 - DNA, 25 bp, Homo sapien
caaaggtacaatacgggaatattca

SEQ ID NO: 1982758 - DNA, 25 bp, Homo sapien
gacagttggatctcgctgggctttg

SEQ ID NO: 1982759 - DNA, 25 bp, Homo sapien
tgttgccttggtaaactccctcagg

SEQ ID NO: 1982760 - DNA, 25 bp, Homo sapien
ggttctaagaaaacgcaagcggatg

SEQ ID NO: 1982761 - DNA, 25 bp, Homo sapien
tggacgaccgtttatcaaggacacc

SEQ ID NO: 1982762 - DNA, 25 bp, Homo sapien
tgaattcgcaaggacaagagggttt

SEQ ID NO: 1982763 - DNA, 25 bp, Homo sapien
gaatgtgaggactgtagaacaatct

SEQ ID NO: 1982764 - DNA, 25 bp, Homo sapien
tgttgttgagtgtggctgccttaaa

SEQ ID NO: 1982765 - DNA, 25 bp, Homo sapien
cattgaggccatgctgccagtgaga

SEQ ID NO: 1982766 - DNA, 25 bp, Homo sapien
caatatgttggaggcctctgcagtg

SEQ ID NO: 1982767 - DNA, 25 bp, Homo sapien
ccaatatgttggaggcctctgcagt

SEQ ID NO: 1982768 - DNA, 25 bp, Homo sapien
tccaatatgttggaggcctctgcag

SEQ ID NO: 1982769 - DNA, 25 bp, Homo sapien
ctccaatatgttggaggcctctgca

SEQ ID NO: 1982770 - DNA, 25 bp, Homo sapien
aaacacactgcccaccaatgctgat

SEQ ID NO: 1982771 - DNA, 25 bp, Homo sapien
acacactgcccaccaatgctgatgt

SEQ ID NO: 1982772 - DNA, 25 bp, Homo sapien
ttcaggattgtttatattgcacact

SEQ ID NO: 1982773 - DNA, 25 bp, Homo sapien
gattgtttatattgcacacttcagc

SEQ ID NO: 1982774 - DNA, 25 bp, Homo sapien
acagaagattcgatggatgagcccc

SEQ ID NO: 1982775 - DNA, 25 bp, Homo sapien
tggtgtgattccgtcttgcgcagct

SEQ ID NO: 1982776 - DNA, 25 bp, Homo sapien
gattcaaaaccattgtccagccctg

SEQ ID NO: 1982777 - DNA, 25 bp, Homo sapien
tgtggagcaggagtcgttcctcttt

SEQ ID NO: 1982778 - DNA, 25 bp, Homo sapien
gtgggcgaagtgcatctcagttatt

SEQ ID NO: 1982779 - DNA, 25 bp, Homo sapien
gtggtgctggcattcacaccgaaac

SEQ ID NO: 1982780 - DNA, 25 bp, Homo sapien
gtgtggtgctggcattcacaccgaa

SEQ ID NO: 1982781 - DNA, 25 bp, Homo sapien
tgtgcagcagcgatcacacgtctcc

SEQ ID NO: 1982782 - DNA, 25 bp, Homo sapien
taccctgtgcagcagcgatcacacg

SEQ ID NO: 1982783 - DNA, 25 bp, Homo sapien
gctgccgctcaacatctggatcata

SEQ ID NO: 1982784 - DNA, 25 bp, Homo sapien
ctgggtattcaagcttgcctgctgc

SEQ ID NO: 1982785 - DNA, 25 bp, Homo sapien
tccaccagcatagatgccctgggta

SEQ ID NO: 1982786 - DNA, 25 bp, Homo sapien
ctgacagttaatgcagacccctcca

SEQ ID NO: 1982787 - DNA, 25 bp, Homo sapien
gacaacacatccactttgatttaaa

SEQ ID NO: 1982788 - DNA, 25 bp, Homo sapien
cactttgatttaaatagtgcctcac

SEQ ID NO: 1982789 - DNA, 25 bp, Homo sapien
tgaatactcattccccatgacaaca

SEQ ID NO: 1982790 - DNA, 25 bp, Homo sapien
gagcagagcttactgaatactcatt

SEQ ID NO: 1982791 - DNA, 25 bp, Homo sapien
gactgttctcgtagcctcattcaga

SEQ ID NO: 1982792 - DNA, 25 bp, Homo sapien
tgaatcgcacagtttaacccaaggg

SEQ ID NO: 1982793 - DNA, 25 bp, Homo sapien
taggcagctctttccagttcatggt

SEQ ID NO: 1982794 - DNA, 25 bp, Homo sapien
taatgaagcacctgacatgtgagtg

SEQ ID NO: 1982795 - DNA, 25 bp, Homo sapien
ggcatccactggaaccccataaggg

SEQ ID NO: 1982796 - DNA, 25 bp, Homo sapien
cactgttcacagtttactccagctg

SEQ ID NO: 1982797 - DNA, 25 bp, Homo sapien
gcggtaatagcccttagcacactgt

SEQ ID NO: 1982798 - DNA, 25 bp, Homo sapien
cataagggcggtaatagcccttagc

SEQ ID NO: 1982799 - DNA, 25 bp, Homo sapien
aaagagactgtgtaagtgactgagg

SEQ ID NO: 1982800 - DNA, 25 bp, Homo sapien
agcacaactaatactctgaagagag

SEQ ID NO: 1982801 - DNA, 25 bp, Homo sapien
gttagcctgatgacttcgctgaggc

SEQ ID NO: 1982802 - DNA, 25 bp, Homo sapien
ctgaggtcacatagcgagcacaact

SEQ ID NO: 1982803 - DNA, 25 bp, Homo sapien
aggcttgcactggagtaaggcatag

SEQ ID NO: 1982804 - DNA, 25 bp, Homo sapien
ttgcaaccaaaaacgattatcgggc

SEQ ID NO: 1982805 - DNA, 25 bp, Homo sapien
tataagaagattgtcgacctcccac

SEQ ID NO: 1982806 - DNA, 25 bp, Homo sapien
tatcgggcacgattatcaggcttgc

SEQ ID NO: 1982807 - DNA, 25 bp, Homo sapien
acagccatccgcatgctcagggtca

SEQ ID NO: 1982808 - DNA, 25 bp, Homo sapien
cgcatgctcagggtcacagctgcag

SEQ ID NO: 1982809 - DNA, 25 bp, Homo sapien
ctgttcacagccatccgcatgctca

SEQ ID NO: 1982810 - DNA, 25 bp, Homo sapien
gcatgctcagggtcacagctgcagg

SEQ ID NO: 1982811 - DNA, 25 bp, Homo sapien
tgtctccgtggaaatttggcttgca

SEQ ID NO: 1982812 - DNA, 25 bp, Homo sapien
ggcttgcagtgacagcggcctgaac

SEQ ID NO: 1982813 - DNA, 25 bp, Homo sapien
ttctcacagttgtctccgtggaaat

SEQ ID NO: 1982814 - DNA, 25 bp, Homo sapien
ccgtggaaatttggcttgcagtgac

SEQ ID NO: 1982815 - DNA, 25 bp, Homo sapien
aatgggaaattgtagtatccaattg

SEQ ID NO: 1982816 - DNA, 25 bp, Homo sapien
aaatgggaaattgtagtatccaatt

SEQ ID NO: 1982817 - DNA, 25 bp, Homo sapien
tgggaaattgtagtatccaattgca

SEQ ID NO: 1982818 - DNA, 25 bp, Homo sapien
atgggaaattgtagtatccaattgc

SEQ ID NO: 1982819 - DNA, 25 bp, Homo sapien
cagctactggatcttctgaacttgg

SEQ ID NO: 1982820 - DNA, 25 bp, Homo sapien
tctccagctactggatcttctgaac

SEQ ID NO: 1982821 - DNA, 25 bp, Homo sapien
tctgaacttggtgtagaaacaggaa

SEQ ID NO: 1982822 - DNA, 25 bp, Homo sapien
tggatcttctgaacttggtgtagaa

SEQ ID NO: 1982823 - DNA, 25 bp, Homo sapien
cgtgatgggtttatgtaagaaactc

SEQ ID NO: 1982824 - DNA, 25 bp, Homo sapien
ccgtgatgggtttatgtaagaaact

SEQ ID NO: 1982825 - DNA, 25 bp, Homo sapien
acatgactggcactacctcctcccc

SEQ ID NO: 1982826 - DNA, 25 bp, Homo sapien
ttcctttggtgcaggcgtgcccttc

SEQ ID NO: 1982827 - DNA, 25 bp, Homo sapien
tccgatggtgcccagtcgtgggctg

SEQ ID NO: 1982828 - DNA, 25 bp, Homo sapien
gagatgtgagcatgagtccgatggt

SEQ ID NO: 1982829 - DNA, 25 bp, Homo sapien
ctgagttactatgttgctgtagagc

SEQ ID NO: 1982830 - DNA, 25 bp, Homo sapien
tactatgttgctgtagagcctgaac

SEQ ID NO: 1982831 - DNA, 25 bp, Homo sapien
gccaaggagagctcttcagaaacca

SEQ ID NO: 1982832 - DNA, 25 bp, Homo sapien
gttactatgttgctgtagagcctga

SEQ ID NO: 1982833 - DNA, 25 bp, Homo sapien
aaccagagcggcaggtatcacatcg

SEQ ID NO: 1982834 - DNA, 25 bp, Homo sapien
tagggaatgagtagaaaccagagcg

SEQ ID NO: 1982835 - DNA, 25 bp, Homo sapien
tccgtgggcatcacatatttcaggg

SEQ ID NO: 1982836 - DNA, 25 bp, Homo sapien
tatttcagggagaacaccttccaga

SEQ ID NO: 1982837 - DNA, 25 bp, Homo sapien
atccccccttcagcgacccttgccg

SEQ ID NO: 1982838 - DNA, 25 bp, Homo sapien
ccccttcagcgacccttgccgggat

SEQ ID NO: 1982839 - DNA, 25 bp, Homo sapien
cttccatccccccttcagcgaccct

SEQ ID NO: 1982840 - DNA, 25 bp, Homo sapien
ccttcagcgacccttgccgggatgg

SEQ ID NO: 1982841 - DNA, 25 bp, Homo sapien
gcattgagtgcatacctgccatgct

SEQ ID NO: 1982842 - DNA, 25 bp, Homo sapien
ccatgctctagggaccggaccagac

SEQ ID NO: 1982843 - DNA, 25 bp, Homo sapien
tagggaccggaccagacacttcctc

SEQ ID NO: 1982844 - DNA, 25 bp, Homo sapien
agcattgagtgcatacctgccatgc

SEQ ID NO: 1982845 - DNA, 25 bp, Homo sapien
ttatagtgtctgaagtggtgtttta

SEQ ID NO: 1982846 - DNA, 25 bp, Homo sapien
tctttttatagtgtctgaagtggtg

SEQ ID NO: 1982847 - DNA, 25 bp, Homo sapien
tgatcctggactgataatcttctcc

SEQ ID NO: 1982848 - DNA, 25 bp, Homo sapien
ctgccttgatcctggactgataatc

SEQ ID NO: 1982849 - DNA, 25 bp, Homo sapien
gtagatggccaccttttcactgggt

SEQ ID NO: 1982850 - DNA, 25 bp, Homo sapien
aggtgctggctggttcagtttctgc

SEQ ID NO: 1982851 - DNA, 25 bp, Homo sapien
tggttcagtttctgctgagggcctg

SEQ ID NO: 1982852 - DNA, 25 bp, Homo sapien
tagatggccaccttttcactgggtc

SEQ ID NO: 1982853 - DNA, 25 bp, Homo sapien
ttcacccaccggggccagaagcatg

SEQ ID NO: 1982854 - DNA, 25 bp, Homo sapien
aggcttgatagtcttttccctctca

SEQ ID NO: 1982855 - DNA, 25 bp, Homo sapien
ctctgagaggcttgatagtcttttc

SEQ ID NO: 1982856 - DNA, 25 bp, Homo sapien
gagaggcttgatagtcttttccctc

SEQ ID NO: 1982857 - DNA, 25 bp, Homo sapien
taaatctacagaaaatccttagcct

SEQ ID NO: 1982858 - DNA, 25 bp, Homo sapien
aaagccagccatcagttccacagta

SEQ ID NO: 1982859 - DNA, 25 bp, Homo sapien
tacttatcacttctctggcactggg

SEQ ID NO: 1982860 - DNA, 25 bp, Homo sapien
cttgatcttcagtcaaagccaaaag

SEQ ID NO: 1982861 - DNA, 25 bp, Homo sapien
tcatgagcgaagcaacactatatag

SEQ ID NO: 1982862 - DNA, 25 bp, Homo sapien
caaacagagctccttagtgcttgag

SEQ ID NO: 1982863 - DNA, 25 bp, Homo sapien
tgcccatgatcttgtagaaaggccg

SEQ ID NO: 1982864 - DNA, 25 bp, Homo sapien
gcttgagggatgctcttattgccca

SEQ ID NO: 1982865 - DNA, 25 bp, Homo sapien
gtgactacacactggcaaaaaggaa

SEQ ID NO: 1982866 - DNA, 25 bp, Homo sapien
gctgggaagtctagcaaattctgac

SEQ ID NO: 1982867 - DNA, 25 bp, Homo sapien
gctgccatcaagttggaaaacctaa

SEQ ID NO: 1982868 - DNA, 25 bp, Homo sapien
gcaaggcgggtgtggttaccataat

SEQ ID NO: 1982869 - DNA, 25 bp, Homo sapien
tggtaggatccaagggctgaacacc

SEQ ID NO: 1982870 - DNA, 25 bp, Homo sapien
ggtaggatccaagggctgaacacca

SEQ ID NO: 1982871 - DNA, 25 bp, Homo sapien
ctggtaggatccaagggctgaacac

SEQ ID NO: 1982872 - DNA, 25 bp, Homo sapien
gatccaagggctgaacaccagcagg

SEQ ID NO: 1982873 - DNA, 25 bp, Homo sapien
tgagagacacctgtcacaccgctgt

SEQ ID NO: 1982874 - DNA, 25 bp, Homo sapien
ggggaaatcataagctcctgagaga

SEQ ID NO: 1982875 - DNA, 25 bp, Homo sapien
tcctgtaactcctggccgacattca

SEQ ID NO: 1982876 - DNA, 25 bp, Homo sapien
agtgggggaaatcataagctcctga

SEQ ID NO: 1982877 - DNA, 25 bp, Homo sapien
gttagaaacattacagtgctgccag

SEQ ID NO: 1982878 - DNA, 25 bp, Homo sapien
tcctgctaagcctgctggcaagtgg

SEQ ID NO: 1982879 - DNA, 25 bp, Homo sapien
gtgctgccagcattagcaccacaag

SEQ ID NO: 1982880 - DNA, 25 bp, Homo sapien
ggctgaagtacgatgacacggtccc

SEQ ID NO: 1982881 - DNA, 25 bp, Homo sapien
ccctcaaggaaacctggtctccaga

SEQ ID NO: 1982882 - DNA, 25 bp, Homo sapien
caacttccaccctcaaggaaacctg

SEQ ID NO: 1982883 - DNA, 25 bp, Homo sapien
tccaccctcaaggaaacctggtctc

SEQ ID NO: 1982884 - DNA, 25 bp, Homo sapien
ctctgactgcctgctgcaacttcca

SEQ ID NO: 1982885 - DNA, 25 bp, Homo sapien
tggtaccagctgggtcacaagcact

SEQ ID NO: 1982886 - DNA, 25 bp, Homo sapien
atggtaccagctgggtcacaagcac

SEQ ID NO: 1982887 - DNA, 25 bp, Homo sapien
gatggtaccagctgggtcacaagca

SEQ ID NO: 1982888 - DNA, 25 bp, Homo sapien
tgatggtaccagctgggtcacaagc

SEQ ID NO: 1982889 - DNA, 25 bp, Homo sapien
ttgacatcttggaattaagacatgt

SEQ ID NO: 1982890 - DNA, 25 bp, Homo sapien
ttggaattaagacatgttttcaaac

SEQ ID NO: 1982891 - DNA, 25 bp, Homo sapien
tcaaacaaacatttgacatcttgga

SEQ ID NO: 1982892 - DNA, 25 bp, Homo sapien
acatttgacatcttggaattaagac

SEQ ID NO: 1982893 - DNA, 25 bp, Homo sapien
tccaatataacagtttgcagcggct

SEQ ID NO: 1982894 - DNA, 25 bp, Homo sapien
tttgcagcggctacaagtaggacct

SEQ ID NO: 1982895 - DNA, 25 bp, Homo sapien
gaccttcaacatgaagcttgcattg

SEQ ID NO: 1982896 - DNA, 25 bp, Homo sapien
ggctacaagtaggaccttcaacatg

SEQ ID NO: 1982897 - DNA, 25 bp, Homo sapien
gagacacaaaagacagttcctggct

SEQ ID NO: 1982898 - DNA, 25 bp, Homo sapien
tgtggagataagagagcatccttga

SEQ ID NO: 1982899 - DNA, 25 bp, Homo sapien
ggagacacaaaagacagttcctggc

SEQ ID NO: 1982900 - DNA, 25 bp, Homo sapien
gttcccgccttatggcacttgcatt

SEQ ID NO: 1982901 - DNA, 25 bp, Homo sapien
tccagttccactcactgttcccgcc

SEQ ID NO: 1982902 - DNA, 25 bp, Homo sapien
gttccactcactgttcccgccttat

SEQ ID NO: 1982903 - DNA, 25 bp, Homo sapien
cactgttcccgccttatggcacttg

SEQ ID NO: 1982904 - DNA, 25 bp, Homo sapien
cgcaggaatcgccacccacatggga

SEQ ID NO: 1982905 - DNA, 25 bp, Homo sapien
tcttcacaggtgtcgcaggaatcgc

SEQ ID NO: 1982906 - DNA, 25 bp, Homo sapien
gcaaaatatccatcttcacaggtgt

SEQ ID NO: 1982907 - DNA, 25 bp, Homo sapien
tttccaaagcaaaatatccatcttc

SEQ ID NO: 1982908 - DNA, 25 bp, Homo sapien
atggaggacaatgccccaccaatgt

SEQ ID NO: 1982909 - DNA, 25 bp, Homo sapien
gcacatggaggacaatgccccacca

SEQ ID NO: 1982910 - DNA, 25 bp, Homo sapien
cactgcacatggaggacaatgcccc

SEQ ID NO: 1982911 - DNA, 25 bp, Homo sapien
aggacaatgccccaccaatgtcaca

SEQ ID NO: 1982912 - DNA, 25 bp, Homo sapien
acgacatgctctcggcactggcaca

SEQ ID NO: 1982913 - DNA, 25 bp, Homo sapien
ccacgacatgctctcggcactggca

SEQ ID NO: 1982914 - DNA, 25 bp, Homo sapien
ctttcccacgacatgctctcggcac

SEQ ID NO: 1982915 - DNA, 25 bp, Homo sapien
tcccacgacatgctctcggcactgg

SEQ ID NO: 1982916 - DNA, 25 bp, Homo sapien
agctctcgtcttgcccacctggttt

SEQ ID NO: 1982917 - DNA, 25 bp, Homo sapien
gagcgggcctatctgtgggctcctc

SEQ ID NO: 1982918 - DNA, 25 bp, Homo sapien
tcctgctccaacttgcacatggaag

SEQ ID NO: 1982919 - DNA, 25 bp, Homo sapien
gaagttgagccctgagaacccactt

SEQ ID NO: 1982920 - DNA, 25 bp, Homo sapien
tgggaaatagtagttgttttcaggc

SEQ ID NO: 1982921 - DNA, 25 bp, Homo sapien
ctgggaaatagtagttgttttcagg

SEQ ID NO: 1982922 - DNA, 25 bp, Homo sapien
gctgccgtcttcaatctcatacttc

SEQ ID NO: 1982923 - DNA, 25 bp, Homo sapien
ctgaggtcatttgggcatatcctct

SEQ ID NO: 1982924 - DNA, 25 bp, Homo sapien
gcggatcaaatccaaatcgaaggtc

SEQ ID NO: 1982925 - DNA, 25 bp, Homo sapien
tctctcccattaggtgtgctgccgt

SEQ ID NO: 1982926 - DNA, 25 bp, Homo sapien
tcagaataacacgaaacaaggagcc

SEQ ID NO: 1982927 - DNA, 25 bp, Homo sapien
tcagttccagggttaacgtatctca

SEQ ID NO: 1982928 - DNA, 25 bp, Homo sapien
agccacttgacttccctacattcaa

SEQ ID NO: 1982929 - DNA, 25 bp, Homo sapien
agttatatggccagatactgcttca

SEQ ID NO: 1982930 - DNA, 25 bp, Homo sapien
gattgaaaatgggtctgcaaaacca

SEQ ID NO: 1982931 - DNA, 25 bp, Homo sapien
gctggctccttactcggcaggaaga

SEQ ID NO: 1982932 - DNA, 25 bp, Homo sapien
taatacaagcaacccatattcctgg

SEQ ID NO: 1982933 - DNA, 25 bp, Homo sapien
gaaggactccttctgccttaataca

SEQ ID NO: 1982934 - DNA, 25 bp, Homo sapien
caacgtaaattcagctaagcagctc

SEQ ID NO: 1982935 - DNA, 25 bp, Homo sapien
gattgacagcccctagccgtcctga

SEQ ID NO: 1982936 - DNA, 25 bp, Homo sapien
gcctgtcccaagaaacgagaggaag

SEQ ID NO: 1982937 - DNA, 25 bp, Homo sapien
aaacgagaggaagaacatgttccac

SEQ ID NO: 1982938 - DNA, 25 bp, Homo sapien
gtcctgcgtaggcacatggttctgt

SEQ ID NO: 1982939 - DNA, 25 bp, Homo sapien
gggaggtcctgcgtaggcacatggt

SEQ ID NO: 1982940 - DNA, 25 bp, Homo sapien
gaggtcctgcgtaggcacatggttc

SEQ ID NO: 1982941 - DNA, 25 bp, Homo sapien
tgcgtaggcacatggttctgtgact

SEQ ID NO: 1982942 - DNA, 25 bp, Homo sapien
tgagacacctcatgaaagcttgcat

SEQ ID NO: 1982943 - DNA, 25 bp, Homo sapien
catgctgtcgttgtgatcctgagac

SEQ ID NO: 1982944 - DNA, 25 bp, Homo sapien
cattaaaggctcctaatttagagga

SEQ ID NO: 1982945 - DNA, 25 bp, Homo sapien
acaagtaagacatagaggaagataa

SEQ ID NO: 1982946 - DNA, 25 bp, Homo sapien
tgaggtccaccatgacagggtgtgc

SEQ ID NO: 1982947 - DNA, 25 bp, Homo sapien
gcctcactgccacgggtcttggctc

SEQ ID NO: 1982948 - DNA, 25 bp, Homo sapien
cccatcaagcaggaagtgtctggcc

SEQ ID NO: 1982949 - DNA, 25 bp, Homo sapien
caagcaggaagtgtctggcctcaca

SEQ ID NO: 1982950 - DNA, 25 bp, Homo sapien
gatgtagaagttccggattctgagc

SEQ ID NO: 1982951 - DNA, 25 bp, Homo sapien
tagaagttccggattctgagctcaa

SEQ ID NO: 1982952 - DNA, 25 bp, Homo sapien
gggatgtagaagttccggattctga

SEQ ID NO: 1982953 - DNA, 25 bp, Homo sapien
ccaggggatgtagaagttccggatt

SEQ ID NO: 1982954 - DNA, 25 bp, Homo sapien
tgcctccgtggaatactcgaccaca

SEQ ID NO: 1982955 - DNA, 25 bp, Homo sapien
tggcctgccagaacagacccggagc

SEQ ID NO: 1982956 - DNA, 25 bp, Homo sapien
caaccacgtagtggccaacctgtgg

SEQ ID NO: 1982957 - DNA, 25 bp, Homo sapien
gacccggagctcttcacattcacat

SEQ ID NO: 1982958 - DNA, 25 bp, Homo sapien
tgtagttgcagctgtaaatgttcac

SEQ ID NO: 1982959 - DNA, 25 bp, Homo sapien
ctgtagttgcagctgtaaatgttca

SEQ ID NO: 1982960 - DNA, 25 bp, Homo sapien
catgtggaaacaccccttgtgctga

SEQ ID NO: 1982961 - DNA, 25 bp, Homo sapien
taatacaatgttcaaggccatggcc

SEQ ID NO: 1982962 - DNA, 25 bp, Homo sapien
cctttgaggtgagagcagtgagttc

SEQ ID NO: 1982963 - DNA, 25 bp, Homo sapien
tgttgcaaaggtaggtgtgcacccc

SEQ ID NO: 1982964 - DNA, 25 bp, Homo sapien
gggccccagggtcagtaactgcaga

SEQ ID NO: 1982965 - DNA, 25 bp, Homo sapien
aagggccccagggtcagtaactgca

SEQ ID NO: 1982966 - DNA, 25 bp, Homo sapien
ggccccagggtcagtaactgcagat

SEQ ID NO: 1982967 - DNA, 25 bp, Homo sapien
ccccagggtcagtaactgcagatct

SEQ ID NO: 1982968 - DNA, 25 bp, Homo sapien
cctggcttgatgaagtactaggttt

SEQ ID NO: 1982969 - DNA, 25 bp, Homo sapien
ctggcttgatgaagtactaggttta

SEQ ID NO: 1982970 - DNA, 25 bp, Homo sapien
caatcacagcactccggcagagaac

SEQ ID NO: 1982971 - DNA, 25 bp, Homo sapien
aatcacagcactccggcagagaaca

SEQ ID NO: 1982972 - DNA, 25 bp, Homo sapien
atggcgatgcggctcatgtgatcaa

SEQ ID NO: 1982973 - DNA, 25 bp, Homo sapien
gatgcggctcatgtgatcaatcaca

SEQ ID NO: 1982974 - DNA, 25 bp, Homo sapien
cttgagctgaatgtctgcatctgcc

SEQ ID NO: 1982975 - DNA, 25 bp, Homo sapien
cagaaggaatcgggccatgtgtccc

SEQ ID NO: 1982976 - DNA, 25 bp, Homo sapien
ttgagctgaatgtctgcatctgcca

SEQ ID NO: 1982977 - DNA, 25 bp, Homo sapien
aggaatcgggccatgtgtcccttga

SEQ ID NO: 1982978 - DNA, 25 bp, Homo sapien
aagaggcaagtcaggttctagatgg

SEQ ID NO: 1982979 - DNA, 25 bp, Homo sapien
ttataggagtaatacaaccccagcc

SEQ ID NO: 1982980 - DNA, 25 bp, Homo sapien
ttcaatgggcaaaacagaagcatac

SEQ ID NO: 1982981 - DNA, 25 bp, Homo sapien
ggcaattcttcacagattataggag

SEQ ID NO: 1982982 - DNA, 25 bp, Homo sapien
aaatcgcccataactggcaatgcag

SEQ ID NO: 1982983 - DNA, 25 bp, Homo sapien
ctgagaattcttcaataggtatgat

SEQ ID NO: 1982984 - DNA, 25 bp, Homo sapien
caatgcagtggacttgtggtctcac

SEQ ID NO: 1982985 - DNA, 25 bp, Homo sapien
caataggtatgatacaaacttgatg

SEQ ID NO: 1982986 - DNA, 25 bp, Homo sapien
cttagaacatccaaaattaatgctg

SEQ ID NO: 1982987 - DNA, 25 bp, Homo sapien
tcaacagaaggtgacgactgctggg

SEQ ID NO: 1982988 - DNA, 25 bp, Homo sapien
tggaggagtttcatgggccaaggag

SEQ ID NO: 1982989 - DNA, 25 bp, Homo sapien
ggaagaacatcaacagaaggtgacg

SEQ ID NO: 1982990 - DNA, 25 bp, Homo sapien
tttttgatgtttgcccactgacagc

SEQ ID NO: 1982991 - DNA, 25 bp, Homo sapien
ttttgagggctaaaagctggagccc

SEQ ID NO: 1982992 - DNA, 25 bp, Homo sapien
ccaggcaggtcttaagctcacggtc

SEQ ID NO: 1982993 - DNA, 25 bp, Homo sapien
ctcccaccatgaaaacgagtgtttt

SEQ ID NO: 1982994 - DNA, 25 bp, Homo sapien
caggtgtggtacacgtcctctcagg

SEQ ID NO: 1982995 - DNA, 25 bp, Homo sapien
taaaaatggatgacaaagacgtatc

SEQ ID NO: 1982996 - DNA, 25 bp, Homo sapien
gacaaagacgtatcggcccaggtgt

SEQ ID NO: 1982997 - DNA, 25 bp, Homo sapien
acgtcgggtgcgctgcttggtaaaa

SEQ ID NO: 1982998 - DNA, 25 bp, Homo sapien
cgtggccacccgccatccaccgaca

SEQ ID NO: 1982999 - DNA, 25 bp, Homo sapien
gtggccacccgccatccaccgacac

SEQ ID NO: 1983000 - DNA, 25 bp, Homo sapien
cccgtggccacccgccatccaccga

SEQ ID NO: 1983001 - DNA, 25 bp, Homo sapien
ccgtggccacccgccatccaccgac

SEQ ID NO: 1983002 - DNA, 25 bp, Homo sapien
actcaatctggccttcggcaatcac

SEQ ID NO: 1983003 - DNA, 25 bp, Homo sapien
agcacatgggggcaaaaagaggcat

SEQ ID NO: 1983004 - DNA, 25 bp, Homo sapien
acttgatcccggcagccaagcacat

SEQ ID NO: 1983005 - DNA, 25 bp, Homo sapien
cacagttgcggccacttcaggctct

SEQ ID NO: 1983006 - DNA, 25 bp, Homo sapien
cgatgggcacggaagatgtatccaa

SEQ ID NO: 1983007 - DNA, 25 bp, Homo sapien
cacagtggagagaatagaatcgatg

SEQ ID NO: 1983008 - DNA, 25 bp, Homo sapien
ggctcggtgtcaaatcggaaggaac

SEQ ID NO: 1983009 - DNA, 25 bp, Homo sapien
tcaaatcggaaggaacgccaacaca

SEQ ID NO: 1983010 - DNA, 25 bp, Homo sapien
ggtgataaactcgagtgacttgtcc

SEQ ID NO: 1983011 - DNA, 25 bp, Homo sapien
tttccacaattggtgataaactcga

SEQ ID NO: 1983012 - DNA, 25 bp, Homo sapien
ttctgcaggcaccactagaacacgg

SEQ ID NO: 1983013 - DNA, 25 bp, Homo sapien
caattggtgataaactcgagtgact

SEQ ID NO: 1983014 - DNA, 25 bp, Homo sapien
gttgcacagcgggtgcactgccgcc

SEQ ID NO: 1983015 - DNA, 25 bp, Homo sapien
tgggaatccgtagtggcctgttgca

SEQ ID NO: 1983016 - DNA, 25 bp, Homo sapien
agggacctggcggaattcttacaga

SEQ ID NO: 1983017 - DNA, 25 bp, Homo sapien
cactgccgcccgatgacgttgggct

SEQ ID NO: 1983018 - DNA, 25 bp, Homo sapien
tgccaagtgcataggccacacagca

SEQ ID NO: 1983019 - DNA, 25 bp, Homo sapien
gccaagtgcataggccacacagcag

SEQ ID NO: 1983020 - DNA, 25 bp, Homo sapien
gggataaagaaataccatgtgaggg

SEQ ID NO: 1983021 - DNA, 25 bp, Homo sapien
atgtgagggtcaaaggccgcctggg

SEQ ID NO: 1983022 - DNA, 25 bp, Homo sapien
tctgaaaggcccatttcttggagtc

SEQ ID NO: 1983023 - DNA, 25 bp, Homo sapien
tcttggagtcaagaccaaccacacc

SEQ ID NO: 1983024 - DNA, 25 bp, Homo sapien
gtgcccctcctggaacagttgcagc

SEQ ID NO: 1983025 - DNA, 25 bp, Homo sapien
ctgtcccggtcacactccggcatgg

SEQ ID NO: 1983026 - DNA, 25 bp, Homo sapien
tgcagccttcgcagccggccatggg

SEQ ID NO: 1983027 - DNA, 25 bp, Homo sapien
gaatgagtgtgtctcacacacctca

SEQ ID NO: 1983028 - DNA, 25 bp, Homo sapien
ccacattccaatgcagcctctgaat

SEQ ID NO: 1983029 - DNA, 25 bp, Homo sapien
agtcctgctgagatcaggcttgtca

SEQ ID NO: 1983030 - DNA, 25 bp, Homo sapien
aaccatgtgacaccggcctccacat

SEQ ID NO: 1983031 - DNA, 25 bp, Homo sapien
aggcttgtcacctggaaccatgtga

SEQ ID NO: 1983032 - DNA, 25 bp, Homo sapien
taggagccatacgctttctctggcc

SEQ ID NO: 1983033 - DNA, 25 bp, Homo sapien
aggagccatacgctttctctggccc

SEQ ID NO: 1983034 - DNA, 25 bp, Homo sapien
ctaggagccatacgctttctctggc

SEQ ID NO: 1983035 - DNA, 25 bp, Homo sapien
gagccatacgctttctctggcccct

SEQ ID NO: 1983036 - DNA, 25 bp, Homo sapien
actgtcactcttggttagaacaggt

SEQ ID NO: 1983037 - DNA, 25 bp, Homo sapien
ccccaccagatcacaaacatgtgtg

SEQ ID NO: 1983038 - DNA, 25 bp, Homo sapien
gatcacaaacatgtgtgccttccac

SEQ ID NO: 1983039 - DNA, 25 bp, Homo sapien
cactcttggttagaacaggtgcccc

SEQ ID NO: 1983040 - DNA, 25 bp, Homo sapien
tgagtctgtacttttaacacaaaaa

SEQ ID NO: 1983041 - DNA, 25 bp, Homo sapien
gcgatctctgtggactcgtagaagg

SEQ ID NO: 1983042 - DNA, 25 bp, Homo sapien
tccttgcattctttgagtctgtact

SEQ ID NO: 1983043 - DNA, 25 bp, Homo sapien
aatgagatgatgaggcgatctctgt

SEQ ID NO: 1983044 - DNA, 25 bp, Homo sapien
ggctcccgcagatggcccataagtg

SEQ ID NO: 1983045 - DNA, 25 bp, Homo sapien
gaacagagcgggagatcactcagtg

SEQ ID NO: 1983046 - DNA, 25 bp, Homo sapien
tagaagttgggatgcgcattccaga

SEQ ID NO: 1983047 - DNA, 25 bp, Homo sapien
tcctgacctgagctttaaagggcag

SEQ ID NO: 1983048 - DNA, 25 bp, Homo sapien
catggatgaccgtcgtagatgggtc

SEQ ID NO: 1983049 - DNA, 25 bp, Homo sapien
cactaggtgttgagggcgcaagaag

SEQ ID NO: 1983050 - DNA, 25 bp, Homo sapien
agatgggtcaggcttagcactaggt

SEQ ID NO: 1983051 - DNA, 25 bp, Homo sapien
taggtcattgaccaatggccattgt

SEQ ID NO: 1983052 - DNA, 25 bp, Homo sapien
gtaaaacccggaagcacatcggtca

SEQ ID NO: 1983053 - DNA, 25 bp, Homo sapien
gccgccctgtgattctgggcttgca

SEQ ID NO: 1983054 - DNA, 25 bp, Homo sapien
gaggcaagccccggtccctgggtca

SEQ ID NO: 1983055 - DNA, 25 bp, Homo sapien
tcccatctctgttgcaattgcaggg

SEQ ID NO: 1983056 - DNA, 25 bp, Homo sapien
ggaatgagccttctcgacacacatt

SEQ ID NO: 1983057 - DNA, 25 bp, Homo sapien
tagtccttcgcttatgtgagctgtg

SEQ ID NO: 1983058 - DNA, 25 bp, Homo sapien
ccttgagattggctgggtccaaatg

SEQ ID NO: 1983059 - DNA, 25 bp, Homo sapien
gaaacagctggtacaacccttgaga

SEQ ID NO: 1983060 - DNA, 25 bp, Homo sapien
gaagcaagggatggaaacgtcttgg

SEQ ID NO: 1983061 - DNA, 25 bp, Homo sapien
agaagcaagggatggaaacgtcttg

SEQ ID NO: 1983062 - DNA, 25 bp, Homo sapien
aggtgccagcccagcatatccacaa

SEQ ID NO: 1983063 - DNA, 25 bp, Homo sapien
tcctggagatccgccaccatactgt

SEQ ID NO: 1983064 - DNA, 25 bp, Homo sapien
ggtaggaggtgggtgcgacccagga

SEQ ID NO: 1983065 - DNA, 25 bp, Homo sapien
ctgtggatggttgcgggcagctcct

SEQ ID NO: 1983066 - DNA, 25 bp, Homo sapien
tgtacatccggcttcttttccagaa

SEQ ID NO: 1983067 - DNA, 25 bp, Homo sapien
gcaagccaaaggacttggcttggta

SEQ ID NO: 1983068 - DNA, 25 bp, Homo sapien
taagtgaggtaaccaccatatgaag

SEQ ID NO: 1983069 - DNA, 25 bp, Homo sapien
tgtcgccaggcaagccaaaggactt

SEQ ID NO: 1983070 - DNA, 25 bp, Homo sapien
actcgtccatgatgcagccggtctg

SEQ ID NO: 1983071 - DNA, 25 bp, Homo sapien
tcgtccatgatgcagccggtctggc

SEQ ID NO: 1983072 - DNA, 25 bp, Homo sapien
gtgcactcgtccatgatgcagccgg

SEQ ID NO: 1983073 - DNA, 25 bp, Homo sapien
gtccatgatgcagccggtctggccg

SEQ ID NO: 1983074 - DNA, 25 bp, Homo sapien
tcagggtgagcctttgagtctctgt

SEQ ID NO: 1983075 - DNA, 25 bp, Homo sapien
agtagaggccttggatgcgcacatc

SEQ ID NO: 1983076 - DNA, 25 bp, Homo sapien
ctgacaagagtcaccagcgtaggca

SEQ ID NO: 1983077 - DNA, 25 bp, Homo sapien
tctgccagtctagacagcactgtca

SEQ ID NO: 1983078 - DNA, 25 bp, Homo sapien
tgcagacgccctaaatcacaggctg

SEQ ID NO: 1983079 - DNA, 25 bp, Homo sapien
gccctaaatcacaggctgagtcacg

SEQ ID NO: 1983080 - DNA, 25 bp, Homo sapien
ctgagtcacgggcagggaacacgcc

SEQ ID NO: 1983081 - DNA, 25 bp, Homo sapien
taaatcacaggctgagtcacgggca

SEQ ID NO: 1983082 - DNA, 25 bp, Homo sapien
gtcagcctgtgccagagcgcacata

SEQ ID NO: 1983083 - DNA, 25 bp, Homo sapien
gcaggtaagcgcaccgctctgtaat

SEQ ID NO: 1983084 - DNA, 25 bp, Homo sapien
taaacttcacacatgagtcagcctg

SEQ ID NO: 1983085 - DNA, 25 bp, Homo sapien
gcgcacataacagtcccgcaggtaa

SEQ ID NO: 1983086 - DNA, 25 bp, Homo sapien
cccgggcctgcctgactcaggtgag

SEQ ID NO: 1983087 - DNA, 25 bp, Homo sapien
ctgcctgactcaggtgaggaaggct

SEQ ID NO: 1983088 - DNA, 25 bp, Homo sapien
ctgactcaggtgaggaaggctgtct

SEQ ID NO: 1983089 - DNA, 25 bp, Homo sapien
ccttcctgctcagtgcccgggcctg

SEQ ID NO: 1983090 - DNA, 25 bp, Homo sapien
cccggttcctggacgtccgctggct

SEQ ID NO: 1983091 - DNA, 25 bp, Homo sapien
gttcctggacgtccgctggctgcgc

SEQ ID NO: 1983092 - DNA, 25 bp, Homo sapien
cggttcctggacgtccgctggctgc

SEQ ID NO: 1983093 - DNA, 25 bp, Homo sapien
gctggctgcgcaggaacctctgcct

SEQ ID NO: 1983094 - DNA, 25 bp, Homo sapien
tggctgggtctaaactccacataac

SEQ ID NO: 1983095 - DNA, 25 bp, Homo sapien
aactcgcttgcagttgactttgacc

SEQ ID NO: 1983096 - DNA, 25 bp, Homo sapien
agttgactttgaccgggaggctgaa

SEQ ID NO: 1983097 - DNA, 25 bp, Homo sapien
gggctgccccaaagatccacagcca

SEQ ID NO: 1983098 - DNA, 25 bp, Homo sapien
ttgaatgtccgttgcaattgcaggg

SEQ ID NO: 1983099 - DNA, 25 bp, Homo sapien
aacacatatgcctgagccatcctgg

SEQ ID NO: 1983100 - DNA, 25 bp, Homo sapien
tacaagcctttatgatcccgatagt

SEQ ID NO: 1983101 - DNA, 25 bp, Homo sapien
ttgcagggaacacaccgtccggtat

SEQ ID NO: 1983102 - DNA, 25 bp, Homo sapien
caggatccgtggacggcgttgccat

SEQ ID NO: 1983103 - DNA, 25 bp, Homo sapien
tcctggcagcgttcacagtgctctc

SEQ ID NO: 1983104 - DNA, 25 bp, Homo sapien
cgtggacggcgttgccatagtagcc

SEQ ID NO: 1983105 - DNA, 25 bp, Homo sapien
gctctcccgcggtgttgtgctgaca

SEQ ID NO: 1983106 - DNA, 25 bp, Homo sapien
acagaattgtacaaacaccaccaca

SEQ ID NO: 1983107 - DNA, 25 bp, Homo sapien
cagaccctttggtaatcacttccca

SEQ ID NO: 1983108 - DNA, 25 bp, Homo sapien
catgcaattcatcatgtaaactgta

SEQ ID NO: 1983109 - DNA, 25 bp, Homo sapien
gctggattacaaggtaatttttgca

SEQ ID NO: 1983110 - DNA, 25 bp, Homo sapien
gtgtacccagctttgcaggagcacc

SEQ ID NO: 1983111 - DNA, 25 bp, Homo sapien
gctttgcaggagcaccgcacgtctc

SEQ ID NO: 1983112 - DNA, 25 bp, Homo sapien
ccagctttgcaggagcaccgcacgt

SEQ ID NO: 1983113 - DNA, 25 bp, Homo sapien
tacccagctttgcaggagcaccgca

SEQ ID NO: 1983114 - DNA, 25 bp, Homo sapien
gattcccgaaatatcccggtgcaca

SEQ ID NO: 1983115 - DNA, 25 bp, Homo sapien
gcatggttggcagctacctccgaat

SEQ ID NO: 1983116 - DNA, 25 bp, Homo sapien
ggttggcagctacctccgaatttct

SEQ ID NO: 1983117 - DNA, 25 bp, Homo sapien
tggcagctacctccgaatttctggg

SEQ ID NO: 1983118 - DNA, 25 bp, Homo sapien
tgcagggctgctatctttgggttct

SEQ ID NO: 1983119 - DNA, 25 bp, Homo sapien
ttctgcagggctgctatctttgggt

SEQ ID NO: 1983120 - DNA, 25 bp, Homo sapien
gggctgctatctttgggttcttggt

SEQ ID NO: 1983121 - DNA, 25 bp, Homo sapien
cagggctgctatctttgggttcttg

SEQ ID NO: 1983122 - DNA, 25 bp, Homo sapien
ctgtaggggccacaatcaaaggcaa

SEQ ID NO: 1983123 - DNA, 25 bp, Homo sapien
ggggccacaatcaaaggcaaatgtg

SEQ ID NO: 1983124 - DNA, 25 bp, Homo sapien
taggggccacaatcaaaggcaaatg

SEQ ID NO: 1983125 - DNA, 25 bp, Homo sapien
tgtaggggccacaatcaaaggcaaa

SEQ ID NO: 1983126 - DNA, 25 bp, Homo sapien
tgaccaggcggagctgctcgcccat

SEQ ID NO: 1983127 - DNA, 25 bp, Homo sapien
tgagacttgaccaggcggagctgct

SEQ ID NO: 1983128 - DNA, 25 bp, Homo sapien
caggtcgttcaggagggtcatcaca

SEQ ID NO: 1983129 - DNA, 25 bp, Homo sapien
tgtgcctcatctgctccagaagccc

SEQ ID NO: 1983130 - DNA, 25 bp, Homo sapien
caacagaaccacagggaactcagag

SEQ ID NO: 1983131 - DNA, 25 bp, Homo sapien
gttaacctgacaacactaaaagcag

SEQ ID NO: 1983132 - DNA, 25 bp, Homo sapien
tatggctacttgaatgaaggaatca

SEQ ID NO: 1983133 - DNA, 25 bp, Homo sapien
gaatctattcaaagaatctcgtcca

SEQ ID NO: 1983134 - DNA, 25 bp, Homo sapien
aatcagtcagttctctttccaggcc

SEQ ID NO: 1983135 - DNA, 25 bp, Homo sapien
ttgaaatggcagaacggtagttgag

SEQ ID NO: 1983136 - DNA, 25 bp, Homo sapien
ggccttctatttttgatccatgatt

SEQ ID NO: 1983137 - DNA, 25 bp, Homo sapien
ggcagaacggtagttgagcaactga

SEQ ID NO: 1983138 - DNA, 25 bp, Homo sapien
gttgtttaatgtttgtgcttttctg

SEQ ID NO: 1983139 - DNA, 25 bp, Homo sapien
attgttgtttaatgtttgtgctttt

SEQ ID NO: 1983140 - DNA, 25 bp, Homo sapien
cattgttgtttaatgtttgtgcttt

SEQ ID NO: 1983141 - DNA, 25 bp, Homo sapien
ttgtttaatgtttgtgcttttctgg

SEQ ID NO: 1983142 - DNA, 25 bp, Homo sapien
gtgcacattccggatgacattttta

SEQ ID NO: 1983143 - DNA, 25 bp, Homo sapien
tgcacattccggatgacatttttaa

SEQ ID NO: 1983144 - DNA, 25 bp, Homo sapien
ttcacatccagttcttttgcgcttt

SEQ ID NO: 1983145 - DNA, 25 bp, Homo sapien
catccagttcttttgcgctttgtgt

SEQ ID NO: 1983146 - DNA, 25 bp, Homo sapien
ggaaaagtcacctgaaggcacgttg

SEQ ID NO: 1983147 - DNA, 25 bp, Homo sapien
cctgaaggcacgttgtttccctctc

SEQ ID NO: 1983148 - DNA, 25 bp, Homo sapien
cagttccctcatcatgcgctgggct

SEQ ID NO: 1983149 - DNA, 25 bp, Homo sapien
caaagttcctgttccgcagttccct

SEQ ID NO: 1983150 - DNA, 25 bp, Homo sapien
tctacagcccgttggtaacctggga

SEQ ID NO: 1983151 - DNA, 25 bp, Homo sapien
taatattcgctgaaaccatgaggcc

SEQ ID NO: 1983152 - DNA, 25 bp, Homo sapien
catgaggccttccacctataacggg

SEQ ID NO: 1983153 - DNA, 25 bp, Homo sapien
gggaactctacattgcactctgcac

SEQ ID NO: 1983154 - DNA, 25 bp, Homo sapien
tgccaggtccttatccggttcagca

SEQ ID NO: 1983155 - DNA, 25 bp, Homo sapien
ccggatactgttagcaagcccattg

SEQ ID NO: 1983156 - DNA, 25 bp, Homo sapien
ttcatttaaagaatcccggatactg

SEQ ID NO: 1983157 - DNA, 25 bp, Homo sapien
gccgagcacgaaggtcactgagttt

SEQ ID NO: 1983158 - DNA, 25 bp, Homo sapien
tacttggtgaaatcactctgcaggg

SEQ ID NO: 1983159 - DNA, 25 bp, Homo sapien
tctgcagtggttagatacttggtga

SEQ ID NO: 1983160 - DNA, 25 bp, Homo sapien
gctgcagcgcaatgttggtttgcaa

SEQ ID NO: 1983161 - DNA, 25 bp, Homo sapien
tggtttgcaacaaagatgagtctgc

SEQ ID NO: 1983162 - DNA, 25 bp, Homo sapien
gctcttgtaaggaccgcgcgtgctt

SEQ ID NO: 1983163 - DNA, 25 bp, Homo sapien
gcttcatttaaactggcagctaatt

SEQ ID NO: 1983164 - DNA, 25 bp, Homo sapien
ctgctttgccagctcttgtaaggac

SEQ ID NO: 1983165 - DNA, 25 bp, Homo sapien
cctccacaagggatgttttgccagc

SEQ ID NO: 1983166 - DNA, 25 bp, Homo sapien
cattgaggatgttctcgtaggcggt

SEQ ID NO: 1983167 - DNA, 25 bp, Homo sapien
cgtcctcggccgctttgatggcatt

SEQ ID NO: 1983168 - DNA, 25 bp, Homo sapien
aggcggtggcggcatccacagcaca

SEQ ID NO: 1983169 - DNA, 25 bp, Homo sapien
cggccgctttgatggcattgaggat

SEQ ID NO: 1983170 - DNA, 25 bp, Homo sapien
atttaacagtttatcactgttggaa

SEQ ID NO: 1983171 - DNA, 25 bp, Homo sapien
taacagtttatcactgttggaactc

SEQ ID NO: 1983172 - DNA, 25 bp, Homo sapien
tttaacagtttatcactgttggaac

SEQ ID NO: 1983173 - DNA, 25 bp, Homo sapien
ttaacagtttatcactgttggaact

SEQ ID NO: 1983174 - DNA, 25 bp, Homo sapien
tgaagtagccagtgtctgcacagca

SEQ ID NO: 1983175 - DNA, 25 bp, Homo sapien
tccagttacagaggtcagcagcaaa

SEQ ID NO: 1983176 - DNA, 25 bp, Homo sapien
cagagccttgtggtaatgccttgga

SEQ ID NO: 1983177 - DNA, 25 bp, Homo sapien
ggcttcaattacgattccaggactg

SEQ ID NO: 1983178 - DNA, 25 bp, Homo sapien
ttctgaactgtcacaatattcaggg

SEQ ID NO: 1983179 - DNA, 25 bp, Homo sapien
tcacaatattcagggtttgctgtag

SEQ ID NO: 1983180 - DNA, 25 bp, Homo sapien
catgaagaccatctcggagagttgt

SEQ ID NO: 1983181 - DNA, 25 bp, Homo sapien
gagattggtgtctatcacttctttc

SEQ ID NO: 1983182 - DNA, 25 bp, Homo sapien
tacaatggattaggaagatgctgac

SEQ ID NO: 1983183 - DNA, 25 bp, Homo sapien
gaggtataagtatctaaaacgttca

SEQ ID NO: 1983184 - DNA, 25 bp, Homo sapien
cgttcaacaaaagaagccaaccgag

SEQ ID NO: 1983185 - DNA, 25 bp, Homo sapien
tgcacacacagatagggaggtataa

SEQ ID NO: 1983186 - DNA, 25 bp, Homo sapien
tgtgtcctcccataggtgtccttaa

SEQ ID NO: 1983187 - DNA, 25 bp, Homo sapien
catctgtgatgtcgttggcctttct

SEQ ID NO: 1983188 - DNA, 25 bp, Homo sapien
tgcatcagtcagagcctttttgaag

SEQ ID NO: 1983189 - DNA, 25 bp, Homo sapien
tggcctttctgaccatgctctttgc

SEQ ID NO: 1983190 - DNA, 25 bp, Homo sapien
caatggagagaatggctaagatgtc

SEQ ID NO: 1983191 - DNA, 25 bp, Homo sapien
tccaactagcaggatatctatacgc

SEQ ID NO: 1983192 - DNA, 25 bp, Homo sapien
tgagatcagactttaccagggaaga

SEQ ID NO: 1983193 - DNA, 25 bp, Homo sapien
gaatatatcctgtatcaggtggagc

SEQ ID NO: 1983194 - DNA, 25 bp, Homo sapien
agatcaggtagtttgttggttaact

SEQ ID NO: 1983195 - DNA, 25 bp, Homo sapien
aattagttctcgtattctgtccatg

SEQ ID NO: 1983196 - DNA, 25 bp, Homo sapien
tcttgcgccaaagatcaggtagttt

SEQ ID NO: 1983197 - DNA, 25 bp, Homo sapien
tggttgatactttcaatcttgcgcc

SEQ ID NO: 1983198 - DNA, 25 bp, Homo sapien
gacagagatgtatatcctttcaaat

SEQ ID NO: 1983199 - DNA, 25 bp, Homo sapien
caggtcatttggcagtcggacttcg

SEQ ID NO: 1983200 - DNA, 25 bp, Homo sapien
ttttctcttgagttgggcctttgga

SEQ ID NO: 1983201 - DNA, 25 bp, Homo sapien
ttatttccaaggtacatcacaaaca

SEQ ID NO: 1983202 - DNA, 25 bp, Homo sapien
atctctccatcccacaggcttgagg

SEQ ID NO: 1983203 - DNA, 25 bp, Homo sapien
cataatctctccatcccacaggctt

SEQ ID NO: 1983204 - DNA, 25 bp, Homo sapien
ccatcccacaggcttgaggaaggat

SEQ ID NO: 1983205 - DNA, 25 bp, Homo sapien
tcccacaggcttgaggaaggatctg

SEQ ID NO: 1983206 - DNA, 25 bp, Homo sapien
tctgaaatttcacccgatccataac

SEQ ID NO: 1983207 - DNA, 25 bp, Homo sapien
tgccatgccgatgtagtcccgggag

SEQ ID NO: 1983208 - DNA, 25 bp, Homo sapien
cacttggagttcagcctcacggtcc

SEQ ID NO: 1983209 - DNA, 25 bp, Homo sapien
cttggtcaagatctggtccacttgg

SEQ ID NO: 1983210 - DNA, 25 bp, Homo sapien
tctggtttactggatgtggctcctt

SEQ ID NO: 1983211 - DNA, 25 bp, Homo sapien
taccatccatgtcatagactccggg

SEQ ID NO: 1983212 - DNA, 25 bp, Homo sapien
gctcctttggtgtaattaagccttg

SEQ ID NO: 1983213 - DNA, 25 bp, Homo sapien
tcaggtgggtaacctccaacataaa

SEQ ID NO: 1983214 - DNA, 25 bp, Homo sapien
cttctacaaggctccacttcagttg

SEQ ID NO: 1983215 - DNA, 25 bp, Homo sapien
ttcaatacaacctttgtatggaggg

SEQ ID NO: 1983216 - DNA, 25 bp, Homo sapien
tggagggaaacttagtcgactggga

SEQ ID NO: 1983217 - DNA, 25 bp, Homo sapien
ttttgaagttgtacaagctcagaac

SEQ ID NO: 1983218 - DNA, 25 bp, Homo sapien
tatccacggtggtctgaattgtctg

SEQ ID NO: 1983219 - DNA, 25 bp, Homo sapien
tgcaaagaacagcaagcctctatcc

SEQ ID NO: 1983220 - DNA, 25 bp, Homo sapien
agcatgtggttgagttggaactcga

SEQ ID NO: 1983221 - DNA, 25 bp, Homo sapien
gcatagcccgtaccttcaaaataat

SEQ ID NO: 1983222 - DNA, 25 bp, Homo sapien
ctatatttagagatatgaagcgatc

SEQ ID NO: 1983223 - DNA, 25 bp, Homo sapien
tctatatttagagatatgaagcgat

SEQ ID NO: 1983224 - DNA, 25 bp, Homo sapien
ctctgccgttgtttatggcgtctcc

SEQ ID NO: 1983225 - DNA, 25 bp, Homo sapien
ctctcttttggtagctctgaattca

SEQ ID NO: 1983226 - DNA, 25 bp, Homo sapien
tgccgttgtttatggcgtctccaac

SEQ ID NO: 1983227 - DNA, 25 bp, Homo sapien
gtttatggcgtctccaactcctctc

SEQ ID NO: 1983228 - DNA, 25 bp, Homo sapien
cttcaccatcaattatagtgttttg

SEQ ID NO: 1983229 - DNA, 25 bp, Homo sapien
gttttgaacgtccacatttatccac

SEQ ID NO: 1983230 - DNA, 25 bp, Homo sapien
gtccacatttatccacatacgcttt

SEQ ID NO: 1983231 - DNA, 25 bp, Homo sapien
caattatagtgttttgaacgtccac

SEQ ID NO: 1983232 - DNA, 25 bp, Homo sapien
ctttccctgattgcaattggaattc

SEQ ID NO: 1983233 - DNA, 25 bp, Homo sapien
ttccctgattgcaattggaattcct

SEQ ID NO: 1983234 - DNA, 25 bp, Homo sapien
tttccctgattgcaattggaattcc

SEQ ID NO: 1983235 - DNA, 25 bp, Homo sapien
cattcaatctaacgacaccactggt

SEQ ID NO: 1983236 - DNA, 25 bp, Homo sapien
ttcaaatttttcatgcagcctcgga

SEQ ID NO: 1983237 - DNA, 25 bp, Homo sapien
cagtcttccgagcactttttggtta

SEQ ID NO: 1983238 - DNA, 25 bp, Homo sapien
ggttactcccacagtatcattcaat

SEQ ID NO: 1983239 - DNA, 25 bp, Homo sapien
tatgccactgggttgaaaggtctga

SEQ ID NO: 1983240 - DNA, 25 bp, Homo sapien
ggtcagtaggtggtaagcccaaatc

SEQ ID NO: 1983241 - DNA, 25 bp, Homo sapien
ggtctgaaatccaaatgaggcctgg

SEQ ID NO: 1983242 - DNA, 25 bp, Homo sapien
gtctgatgatctaataatatgccac

SEQ ID NO: 1983243 - DNA, 25 bp, Homo sapien
tccatatacgtctgtggagatttaa

SEQ ID NO: 1983244 - DNA, 25 bp, Homo sapien
gctatcgctggtgctcaattcaatg

SEQ ID NO: 1983245 - DNA, 25 bp, Homo sapien
ttaaaaattgggctgccgctatcgc

SEQ ID NO: 1983246 - DNA, 25 bp, Homo sapien
tacataatgcagtaaaccatccata

SEQ ID NO: 1983247 - DNA, 25 bp, Homo sapien
tgtgagggtcattcatgtcattaca

SEQ ID NO: 1983248 - DNA, 25 bp, Homo sapien
gctctgacagaagtattattccact

SEQ ID NO: 1983249 - DNA, 25 bp, Homo sapien
gacaccagaaaattccattaaacga

SEQ ID NO: 1983250 - DNA, 25 bp, Homo sapien
gaagaaggacaagacttattagtga

SEQ ID NO: 1983251 - DNA, 25 bp, Homo sapien
gctggtcatcgatgagaagccgtag

SEQ ID NO: 1983252 - DNA, 25 bp, Homo sapien
gccttttgctatttctcagaagctg

SEQ ID NO: 1983253 - DNA, 25 bp, Homo sapien
gacaaaaacattgctaatacaaccc

SEQ ID NO: 1983254 - DNA, 25 bp, Homo sapien
gagactgccgggaacttgaaatgtg

SEQ ID NO: 1983255 - DNA, 25 bp, Homo sapien
acaaagctgactttgttaactggac

SEQ ID NO: 1983256 - DNA, 25 bp, Homo sapien
tgaaagactgtggtatgcgggtctc

SEQ ID NO: 1983257 - DNA, 25 bp, Homo sapien
taactggaccaaagagatacccttc

SEQ ID NO: 1983258 - DNA, 25 bp, Homo sapien
ccaaggttacatgctaacgctgctc

SEQ ID NO: 1983259 - DNA, 25 bp, Homo sapien
tcttatggtcatggttcctagggaa

SEQ ID NO: 1983260 - DNA, 25 bp, Homo sapien
taagctgttgctaacaacccctggg

SEQ ID NO: 1983261 - DNA, 25 bp, Homo sapien
taatatcacctctagaagccggcga

SEQ ID NO: 1983262 - DNA, 25 bp, Homo sapien
cgaggagcccaagaaacctttattg

SEQ ID NO: 1983263 - DNA, 25 bp, Homo sapien
ctggttgatacgaaaagtcttggtc

SEQ ID NO: 1983264 - DNA, 25 bp, Homo sapien
ggtagaacctttaagcaacattaga

SEQ ID NO: 1983265 - DNA, 25 bp, Homo sapien
tcccagggacacatctctcttgaga

SEQ ID NO: 1983266 - DNA, 25 bp, Homo sapien
tcaaatctaggacttcaggactcag

SEQ ID NO: 1983267 - DNA, 25 bp, Homo sapien
tggcttgaagagcacattctttgtg

SEQ ID NO: 1983268 - DNA, 25 bp, Homo sapien
gaagagcacattctttgtgcttaag

SEQ ID NO: 1983269 - DNA, 25 bp, Homo sapien
cacattctttgtgcttaagtttgaa

SEQ ID NO: 1983270 - DNA, 25 bp, Homo sapien
catgatgtggcttgaagagcacatt

SEQ ID NO: 1983271 - DNA, 25 bp, Homo sapien
cattcccactgttcaccaggctctc

SEQ ID NO: 1983272 - DNA, 25 bp, Homo sapien
tccattcccactgttcaccaggctc

SEQ ID NO: 1983273 - DNA, 25 bp, Homo sapien
tctccattcccactgttcaccaggc

SEQ ID NO: 1983274 - DNA, 25 bp, Homo sapien
tcccactgttcaccaggctctcggg

SEQ ID NO: 1983275 - DNA, 25 bp, Homo sapien
tagaactttcctacaccaaaccatc

SEQ ID NO: 1983276 - DNA, 25 bp, Homo sapien
cctagatgattacggtagcttgcca

SEQ ID NO: 1983277 - DNA, 25 bp, Homo sapien
tacaggactcctttcaatgacgtta

SEQ ID NO: 1983278 - DNA, 25 bp, Homo sapien
agccccgactcttttgcctagatga

SEQ ID NO: 1983279 - DNA, 25 bp, Homo sapien
gaagaactgcagtgtcgcttgaggg

SEQ ID NO: 1983280 - DNA, 25 bp, Homo sapien
agcatttggccagcggcaccgagac

SEQ ID NO: 1983281 - DNA, 25 bp, Homo sapien
tccaccactgagcattggaagaact

SEQ ID NO: 1983282 - DNA, 25 bp, Homo sapien
ccagcatttggccagcggcaccgag

SEQ ID NO: 1983283 - DNA, 25 bp, Homo sapien
gagcaagcatcttgccacaccttca

SEQ ID NO: 1983284 - DNA, 25 bp, Homo sapien
ggaagtggtgagcaagcatcttgcc

SEQ ID NO: 1983285 - DNA, 25 bp, Homo sapien
cttgggaagtggtgagcaagcatct

SEQ ID NO: 1983286 - DNA, 25 bp, Homo sapien
gaggccactggtgtgtcctgcaaca

SEQ ID NO: 1983287 - DNA, 25 bp, Homo sapien
ggaagcttgaatagcaagtggctgg

SEQ ID NO: 1983288 - DNA, 25 bp, Homo sapien
gaagcttgaatagcaagtggctggt

SEQ ID NO: 1983289 - DNA, 25 bp, Homo sapien
agaccagacgtccttttgaaagata

SEQ ID NO: 1983290 - DNA, 25 bp, Homo sapien
tgtccccagtgcaaagaccagacgt

SEQ ID NO: 1983291 - DNA, 25 bp, Homo sapien
tgaaagataaagagccataaaggag

SEQ ID NO: 1983292 - DNA, 25 bp, Homo sapien
ttagtgcccgtgtgaaacaccagtc

SEQ ID NO: 1983293 - DNA, 25 bp, Homo sapien
tggaggtgatcccaggtaaactggc

SEQ ID NO: 1983294 - DNA, 25 bp, Homo sapien
gtttccctgatggaggtgatcccag

SEQ ID NO: 1983295 - DNA, 25 bp, Homo sapien
taaactggcgctctgatgctgatgg

SEQ ID NO: 1983296 - DNA, 25 bp, Homo sapien
gatcccaggtaaactggcgctctga

SEQ ID NO: 1983297 - DNA, 25 bp, Homo sapien
tacgtttttgcattccctggaggag

SEQ ID NO: 1983298 - DNA, 25 bp, Homo sapien
gaagccaatagattcaggtttagga

SEQ ID NO: 1983299 - DNA, 25 bp, Homo sapien
agtggcagagaagctctatcttcac

SEQ ID NO: 1983300 - DNA, 25 bp, Homo sapien
gcaaagatggtgaaaatggcacaaa

SEQ ID NO: 1983301 - DNA, 25 bp, Homo sapien
acactgatcggatgtggcctgctcc

SEQ ID NO: 1983302 - DNA, 25 bp, Homo sapien
tgctcctgaaaaggatatgtgggag

SEQ ID NO: 1983303 - DNA, 25 bp, Homo sapien
ccctcaggttgaaagaaggctgcaa

SEQ ID NO: 1983304 - DNA, 25 bp, Homo sapien
ccatgagatggtttataccctcagg

SEQ ID NO: 1983305 - DNA, 25 bp, Homo sapien
ccaagacgacatgacctccttcttc

SEQ ID NO: 1983306 - DNA, 25 bp, Homo sapien
gcaggaagacaccccgaagcttgaa

SEQ ID NO: 1983307 - DNA, 25 bp, Homo sapien
caggaagacaccccgaagcttgaag

SEQ ID NO: 1983308 - DNA, 25 bp, Homo sapien
agacgacatgacctccttcttcaga

SEQ ID NO: 1983309 - DNA, 25 bp, Homo sapien
aaattctggccccaacaatacagag

SEQ ID NO: 1983310 - DNA, 25 bp, Homo sapien
agcttaaattctggccccaacaata

SEQ ID NO: 1983311 - DNA, 25 bp, Homo sapien
acaagcttaaattctggccccaaca

SEQ ID NO: 1983312 - DNA, 25 bp, Homo sapien
taaattctggccccaacaatacaga

SEQ ID NO: 1983313 - DNA, 25 bp, Homo sapien
tgcctccaggtaaacacataagtgc

SEQ ID NO: 1983314 - DNA, 25 bp, Homo sapien
gggctgacttccgatgtgtattagg

SEQ ID NO: 1983315 - DNA, 25 bp, Homo sapien
tgacttccgatgtgtattaggatcc

SEQ ID NO: 1983316 - DNA, 25 bp, Homo sapien
cacataagtgcttcccgggctgact

SEQ ID NO: 1983317 - DNA, 25 bp, Homo sapien
tgtgaccgacgttgaggtcccacct

SEQ ID NO: 1983318 - DNA, 25 bp, Homo sapien
ctgccaccgagtgccactgtccatc

SEQ ID NO: 1983319 - DNA, 25 bp, Homo sapien
gagactgctttggtgtgaccgacgt

SEQ ID NO: 1983320 - DNA, 25 bp, Homo sapien
tttggtgtgaccgacgttgaggtcc

SEQ ID NO: 1983321 - DNA, 25 bp, Homo sapien
agctgtgtagctactgtctgtgtcc

SEQ ID NO: 1983322 - DNA, 25 bp, Homo sapien
tctgtccagctgtgtagctactgtc

SEQ ID NO: 1983323 - DNA, 25 bp, Homo sapien
tgtgtagctactgtctgtgtccagt

SEQ ID NO: 1983324 - DNA, 25 bp, Homo sapien
tgtccagctgtgtagctactgtctg

SEQ ID NO: 1983325 - DNA, 25 bp, Homo sapien
gaatgatttccacacagggatcctc

SEQ ID NO: 1983326 - DNA, 25 bp, Homo sapien
gggatcctcagtgtcgtcaaattgg

SEQ ID NO: 1983327 - DNA, 25 bp, Homo sapien
tcctcagacagccaaagaatgattt

SEQ ID NO: 1983328 - DNA, 25 bp, Homo sapien
ttactggtcaggacaaccattcaga

SEQ ID NO: 1983329 - DNA, 25 bp, Homo sapien
tcctgagtgaagaatgatctcgagc

SEQ ID NO: 1983330 - DNA, 25 bp, Homo sapien
gaggtgcattgggtaatcagtgctt

SEQ ID NO: 1983331 - DNA, 25 bp, Homo sapien
tagattcgctattaaacctgtctgg

SEQ ID NO: 1983332 - DNA, 25 bp, Homo sapien
gatgggtatccatggtcagaattca

SEQ ID NO: 1983333 - DNA, 25 bp, Homo sapien
ggactacactgcattttttaattcc

SEQ ID NO: 1983334 - DNA, 25 bp, Homo sapien
tccataaattataatcctttaacat

SEQ ID NO: 1983335 - DNA, 25 bp, Homo sapien
tataatcctttaacatatatgaaag

SEQ ID NO: 1983336 - DNA, 25 bp, Homo sapien
tttaaggactacactgcatttttta

SEQ ID NO: 1983337 - DNA, 25 bp, Homo sapien
aagagcaacactgtgcttgctgaac

SEQ ID NO: 1983338 - DNA, 25 bp, Homo sapien
caacactgtgcttgctgaactggag

SEQ ID NO: 1983339 - DNA, 25 bp, Homo sapien
ttgaaagagcaacactgtgcttgct

SEQ ID NO: 1983340 - DNA, 25 bp, Homo sapien
actgtgcttgctgaactggagaaac

SEQ ID NO: 1983341 - DNA, 25 bp, Homo sapien
gggtccagcgtgcaccattccttgc

SEQ ID NO: 1983342 - DNA, 25 bp, Homo sapien
cgtgcaccattccttgctgcaggac

SEQ ID NO: 1983343 - DNA, 25 bp, Homo sapien
cagcgtgcaccattccttgctgcag

SEQ ID NO: 1983344 - DNA, 25 bp, Homo sapien
ttctgtggcagaaaccagccacagt

SEQ ID NO: 1983345 - DNA, 25 bp, Homo sapien
tcttctaccagaggcaagcattttc

SEQ ID NO: 1983346 - DNA, 25 bp, Homo sapien
accccttgcagggtagaccttgctc

SEQ ID NO: 1983347 - DNA, 25 bp, Homo sapien
cccttgcagggtagaccttgctcag

SEQ ID NO: 1983348 - DNA, 25 bp, Homo sapien
gctcttctaccagaggcaagcattt

SEQ ID NO: 1983349 - DNA, 25 bp, Homo sapien
tattcatcctatttttttgaaccga

SEQ ID NO: 1983350 - DNA, 25 bp, Homo sapien
gtaaggtatcatggccatgaaagct

SEQ ID NO: 1983351 - DNA, 25 bp, Homo sapien
gttttttatgtaaggtatcatggcc

SEQ ID NO: 1983352 - DNA, 25 bp, Homo sapien
tgttgcgctagccaatactaagtct

SEQ ID NO: 1983353 - DNA, 25 bp, Homo sapien
gaatcctgcctctgttgtagcaaaa

SEQ ID NO: 1983354 - DNA, 25 bp, Homo sapien
tgtggttaacctatatgcgtaagca

SEQ ID NO: 1983355 - DNA, 25 bp, Homo sapien
tcagaacctgcttacataactgtgg

SEQ ID NO: 1983356 - DNA, 25 bp, Homo sapien
caggatagttgcttctaaagaggct

SEQ ID NO: 1983357 - DNA, 25 bp, Homo sapien
ctgcttccccacagggtgagggctg

SEQ ID NO: 1983358 - DNA, 25 bp, Homo sapien
ttctctctgccactatctgcagatg

SEQ ID NO: 1983359 - DNA, 25 bp, Homo sapien
ctctgccactatctgcagatgctgc

SEQ ID NO: 1983360 - DNA, 25 bp, Homo sapien
tgagggctgagagctgggcttaggc

SEQ ID NO: 1983361 - DNA, 25 bp, Homo sapien
tcaggcacaagggctctctgtgcct

SEQ ID NO: 1983362 - DNA, 25 bp, Homo sapien
ctaggcaaagaggagccaacgagaa

SEQ ID NO: 1983363 - DNA, 25 bp, Homo sapien
tctaggcaaagaggagccaacgaga

SEQ ID NO: 1983364 - DNA, 25 bp, Homo sapien
cctctaggcaaagaggagccaacga

SEQ ID NO: 1983365 - DNA, 25 bp, Homo sapien
gctgctgtagagagtcagggacaaa

SEQ ID NO: 1983366 - DNA, 25 bp, Homo sapien
tgtagagagtcagggacaaaactgg

SEQ ID NO: 1983367 - DNA, 25 bp, Homo sapien
tctgctgctgtagagagtcagggac

SEQ ID NO: 1983368 - DNA, 25 bp, Homo sapien
tgttctgctgctgtagagagtcagg

SEQ ID NO: 1983369 - DNA, 25 bp, Homo sapien
taggcaggtgtttactagagatcat

SEQ ID NO: 1983370 - DNA, 25 bp, Homo sapien
gagtgcagtaatggtttaggcaggt

SEQ ID NO: 1983371 - DNA, 25 bp, Homo sapien
tttaggcaggtgtttactagagatc

SEQ ID NO: 1983372 - DNA, 25 bp, Homo sapien
tgcagtaatggtttaggcaggtgtt

SEQ ID NO: 1983373 - DNA, 25 bp, Homo sapien
tagttggcattgacacctgccccgg

SEQ ID NO: 1983374 - DNA, 25 bp, Homo sapien
tctccactcgataaaaatgtcaggt

SEQ ID NO: 1983375 - DNA, 25 bp, Homo sapien
aagagaacacgtggactagtaatac

SEQ ID NO: 1983376 - DNA, 25 bp, Homo sapien
cctgccccggattcacattgcaagg

SEQ ID NO: 1983377 - DNA, 25 bp, Homo sapien
ggaaccatttgcccagatccctgaa

SEQ ID NO: 1983378 - DNA, 25 bp, Homo sapien
tgtggaaccatttgcccagatccct

SEQ ID NO: 1983379 - DNA, 25 bp, Homo sapien
tctgtggaaccatttgcccagatcc

SEQ ID NO: 1983380 - DNA, 25 bp, Homo sapien
gtggaaccatttgcccagatccctg

SEQ ID NO: 1983381 - DNA, 25 bp, Homo sapien
gccgcggggattactcagcagcacc

SEQ ID NO: 1983382 - DNA, 25 bp, Homo sapien
actgctcggacacacgcacgcgaga

SEQ ID NO: 1983383 - DNA, 25 bp, Homo sapien
gaatccgtttccgggtgtctctcac

SEQ ID NO: 1983384 - DNA, 25 bp, Homo sapien
ccgaggcgagatcgggagcagctgc

SEQ ID NO: 1983385 - DNA, 25 bp, Homo sapien
agtctccgtcgtcccgccgccgcgg

SEQ ID NO: 1983386 - DNA, 25 bp, Homo sapien
gtccgagtctccgtcgtcccgccgc

SEQ ID NO: 1983387 - DNA, 25 bp, Homo sapien
cgccgctgccgcgtccgagtctccg

SEQ ID NO: 1983388 - DNA, 25 bp, Homo sapien
tgccgcgtccgagtctccgtcgtcc

SEQ ID NO: 1983389 - DNA, 25 bp, Homo sapien
aaaagctggtccgactccctgaagc

SEQ ID NO: 1983390 - DNA, 25 bp, Homo sapien
gtccgactccctgaagccgttgttg

SEQ ID NO: 1983391 - DNA, 25 bp, Homo sapien
aagccgttgttgagcagcatgttga

SEQ ID NO: 1983392 - DNA, 25 bp, Homo sapien
cagcatgttgatgccggccagggcc

SEQ ID NO: 1983393 - DNA, 25 bp, Homo sapien
gctgctgcctcaaatctcatccggt

SEQ ID NO: 1983394 - DNA, 25 bp, Homo sapien
agagtcacgacaagcccgggtccca

SEQ ID NO: 1983395 - DNA, 25 bp, Homo sapien
agagaggagcctaccggcaccgggc

SEQ ID NO: 1983396 - DNA, 25 bp, Homo sapien
ggcagcacgcgagccagagtcacga

SEQ ID NO: 1983397 - DNA, 25 bp, Homo sapien
gcagagccatgcgaggcgcgaggag

SEQ ID NO: 1983398 - DNA, 25 bp, Homo sapien
gcgtctggaattgcacaatgttgca

SEQ ID NO: 1983399 - DNA, 25 bp, Homo sapien
attgcacaatgttgcagagccatgc

SEQ ID NO: 1983400 - DNA, 25 bp, Homo sapien
tcaaacaataaaagcgtctggaatt

SEQ ID NO: 1983401 - DNA, 25 bp, Homo sapien
gaacacacgtgttttcctaccattc

SEQ ID NO: 1983402 - DNA, 25 bp, Homo sapien
ttttaaattcctgcacggcaaagca

SEQ ID NO: 1983403 - DNA, 25 bp, Homo sapien
gactgagtttgcagaagacaaggca

SEQ ID NO: 1983404 - DNA, 25 bp, Homo sapien
tcttaataaataacgcctgcttgaa

SEQ ID NO: 1983405 - DNA, 25 bp, Homo sapien
ggagagagttttccaaccactcata

SEQ ID NO: 1983406 - DNA, 25 bp, Homo sapien
aagtatctttgaaggggcatctctc

SEQ ID NO: 1983407 - DNA, 25 bp, Homo sapien
agttttccaaccactcatatactgc

SEQ ID NO: 1983408 - DNA, 25 bp, Homo sapien
tctttgaaggggcatctctctgctg

SEQ ID NO: 1983409 - DNA, 25 bp, Homo sapien
tcccaactcctcattcaactgattc

SEQ ID NO: 1983410 - DNA, 25 bp, Homo sapien
ctcccaactcctcattcaactgatt

SEQ ID NO: 1983411 - DNA, 25 bp, Homo sapien
gcgctgaggttttctcagaagtcaa

SEQ ID NO: 1983412 - DNA, 25 bp, Homo sapien
gctgaggttttctcagaagtcaaaa

SEQ ID NO: 1983413 - DNA, 25 bp, Homo sapien
tcttacaagcgcctttgagtttctc

SEQ ID NO: 1983414 - DNA, 25 bp, Homo sapien
aagcgctgaggttttctcagaagtc

SEQ ID NO: 1983415 - DNA, 25 bp, Homo sapien
caagaatctgacatggttttaggca

SEQ ID NO: 1983416 - DNA, 25 bp, Homo sapien
tctctgcatctgtggactctcctat

SEQ ID NO: 1983417 - DNA, 25 bp, Homo sapien
cccaagaatctgacatggttttagg

SEQ ID NO: 1983418 - DNA, 25 bp, Homo sapien
tctcctatcgtctccaggagcaagg

SEQ ID NO: 1983419 - DNA, 25 bp, Homo sapien
tcagacagtgtaatagttgggggaa

SEQ ID NO: 1983420 - DNA, 25 bp, Homo sapien
ttcagacagtgtaatagttggggga

SEQ ID NO: 1983421 - DNA, 25 bp, Homo sapien
aatctttaatgaatatttaattagg

SEQ ID NO: 1983422 - DNA, 25 bp, Homo sapien
gaatctttaatgaatatttaattag

SEQ ID NO: 1983423 - DNA, 25 bp, Homo sapien
tgagtccttcgtagcctcttccagt

SEQ ID NO: 1983424 - DNA, 25 bp, Homo sapien
tgccacacagccatctacttttctg

SEQ ID NO: 1983425 - DNA, 25 bp, Homo sapien
tgtactttcttgacactctctcttc

SEQ ID NO: 1983426 - DNA, 25 bp, Homo sapien
ggcagttttgaagtagatcaattca

SEQ ID NO: 1983427 - DNA, 25 bp, Homo sapien
gggctttatcctacacaagactggg

SEQ ID NO: 1983428 - DNA, 25 bp, Homo sapien
ggccacatcacaggacatcggaggc

SEQ ID NO: 1983429 - DNA, 25 bp, Homo sapien
gcacaactagcatggaagggacaag

SEQ ID NO: 1983430 - DNA, 25 bp, Homo sapien
tgggagccacagagcgtctaaagct

SEQ ID NO: 1983431 - DNA, 25 bp, Homo sapien
gaattccaacatgctactttatttt

SEQ ID NO: 1983432 - DNA, 25 bp, Homo sapien
gatgcgggtgagcataatttgcaag

SEQ ID NO: 1983433 - DNA, 25 bp, Homo sapien
ttaggcctaaataaagatgcgggtg

SEQ ID NO: 1983434 - DNA, 25 bp, Homo sapien
gggtgagcataatttgcaagacaga

SEQ ID NO: 1983435 - DNA, 25 bp, Homo sapien
taatgtggaaaaaagtcagtagccc

SEQ ID NO: 1983436 - DNA, 25 bp, Homo sapien
tcaaaaatagattgggatccacgtg

SEQ ID NO: 1983437 - DNA, 25 bp, Homo sapien
tccttcaacaactgtaggcctggaa

SEQ ID NO: 1983438 - DNA, 25 bp, Homo sapien
gatccacgtggttgacagctgaagc

SEQ ID NO: 1983439 - DNA, 25 bp, Homo sapien
ggaagtctctgaagaaacatgtcgc

SEQ ID NO: 1983440 - DNA, 25 bp, Homo sapien
gggaagtctctgaagaaacatgtcg

SEQ ID NO: 1983441 - DNA, 25 bp, Homo sapien
atggctccttaccacccaagtggaa

SEQ ID NO: 1983442 - DNA, 25 bp, Homo sapien
ccaatggctccttaccacccaagtg

SEQ ID NO: 1983443 - DNA, 25 bp, Homo sapien
tgccaatggctccttaccacccaag

SEQ ID NO: 1983444 - DNA, 25 bp, Homo sapien
aatggctccttaccacccaagtgga

SEQ ID NO: 1983445 - DNA, 25 bp, Homo sapien
gactcccgattcaaatcctagaaag

SEQ ID NO: 1983446 - DNA, 25 bp, Homo sapien
ttcagactcccgattcaaatcctag

SEQ ID NO: 1983447 - DNA, 25 bp, Homo sapien
tcaaatcctagaaagagtctgactt

SEQ ID NO: 1983448 - DNA, 25 bp, Homo sapien
cccgattcaaatcctagaaagagtc

SEQ ID NO: 1983449 - DNA, 25 bp, Homo sapien
aatgcaactgccaggctctgagccc

SEQ ID NO: 1983450 - DNA, 25 bp, Homo sapien
tggccttcgctagcatggcttctca

SEQ ID NO: 1983451 - DNA, 25 bp, Homo sapien
tccaagcaggttctctggtccaggt

SEQ ID NO: 1983452 - DNA, 25 bp, Homo sapien
caagctcctggccttcgctagcatg

SEQ ID NO: 1983453 - DNA, 25 bp, Homo sapien
agcggtgcaccctggagacacttca

SEQ ID NO: 1983454 - DNA, 25 bp, Homo sapien
ggagacacttcaccatgccactggt

SEQ ID NO: 1983455 - DNA, 25 bp, Homo sapien
acttcaccatgccactggtccttga

SEQ ID NO: 1983456 - DNA, 25 bp, Homo sapien
ctaaactgccgcaaaagcggtgcac

SEQ ID NO: 1983457 - DNA, 25 bp, Homo sapien
gacaggcttgctacactgagcctgc

SEQ ID NO: 1983458 - DNA, 25 bp, Homo sapien
caggcttgctacactgagcctgccc

SEQ ID NO: 1983459 - DNA, 25 bp, Homo sapien
acaggcttgctacactgagcctgcc

SEQ ID NO: 1983460 - DNA, 25 bp, Homo sapien
aggcttgctacactgagcctgccca

SEQ ID NO: 1983461 - DNA, 25 bp, Homo sapien
ctccaccttggtcctcacctctcat

SEQ ID NO: 1983462 - DNA, 25 bp, Homo sapien
ctcctgtgttcctgctctatgttct

SEQ ID NO: 1983463 - DNA, 25 bp, Homo sapien
tccttgttcctgtcacaccaacctc

SEQ ID NO: 1983464 - DNA, 25 bp, Homo sapien
tgttcctgctctatgttcttccctt

SEQ ID NO: 1983465 - DNA, 25 bp, Homo sapien
tagactagcaaggtctcagtggtgc

SEQ ID NO: 1983466 - DNA, 25 bp, Homo sapien
tggcccggagactctacattctaac

SEQ ID NO: 1983467 - DNA, 25 bp, Homo sapien
aatggtgctgatgccaatggtctcc

SEQ ID NO: 1983468 - DNA, 25 bp, Homo sapien
tgaaggcctgctctgttaaactgaa

SEQ ID NO: 1983469 - DNA, 25 bp, Homo sapien
atatatatcaatgttggccatgcac

SEQ ID NO: 1983470 - DNA, 25 bp, Homo sapien
gtctaagaatgacatcttatgattt

SEQ ID NO: 1983471 - DNA, 25 bp, Homo sapien
tatatcaatgttggccatgcacggt

SEQ ID NO: 1983472 - DNA, 25 bp, Homo sapien
tacacattaaagttgaataactggg

SEQ ID NO: 1983473 - DNA, 25 bp, Homo sapien
aatgccctcaatgggtacttgatga

SEQ ID NO: 1983474 - DNA, 25 bp, Homo sapien
cagaatgccctcaatgggtacttga

SEQ ID NO: 1983475 - DNA, 25 bp, Homo sapien
aactcacacccgcacagtgcctacc

SEQ ID NO: 1983476 - DNA, 25 bp, Homo sapien
acccagaatgccctcaatgggtact

SEQ ID NO: 1983477 - DNA, 25 bp, Homo sapien
gcctctagcctaggtccaaagggtg

SEQ ID NO: 1983478 - DNA, 25 bp, Homo sapien
gcctaggtccaaagggtgctggttc

SEQ ID NO: 1983479 - DNA, 25 bp, Homo sapien
ttcctgctcggcctctagcctaggt

SEQ ID NO: 1983480 - DNA, 25 bp, Homo sapien
ctggtccctcgggtcgggctggatc

SEQ ID NO: 1983481 - DNA, 25 bp, Homo sapien
cttgggtgtgagggttcccgcctgg

SEQ ID NO: 1983482 - DNA, 25 bp, Homo sapien
gcttgggtgtgagggttcccgcctg

SEQ ID NO: 1983483 - DNA, 25 bp, Homo sapien
ccaaggaaaacggtcagaccctgag

SEQ ID NO: 1983484 - DNA, 25 bp, Homo sapien
gagttaggactacccagtctaatta

SEQ ID NO: 1983485 - DNA, 25 bp, Homo sapien
aaatgctttcttgagttaggactac

SEQ ID NO: 1983486 - DNA, 25 bp, Homo sapien
gaaaacggtcagaccctgagtcctc

SEQ ID NO: 1983487 - DNA, 25 bp, Homo sapien
caggcattggcgactgggggctggc

SEQ ID NO: 1983488 - DNA, 25 bp, Homo sapien
gggctggcagccacaaccctctcag

SEQ ID NO: 1983489 - DNA, 25 bp, Homo sapien
tcagagccccaaatggtgtccaggc

SEQ ID NO: 1983490 - DNA, 25 bp, Homo sapien
gtgtccaggcaccagccagccaggc

SEQ ID NO: 1983491 - DNA, 25 bp, Homo sapien
ggattccgtcgtgttgtccaagctg

SEQ ID NO: 1983492 - DNA, 25 bp, Homo sapien
aatgcaggggtgtcccttagaacct

SEQ ID NO: 1983493 - DNA, 25 bp, Homo sapien
atttcactttttagcctctctctgg

SEQ ID NO: 1983494 - DNA, 25 bp, Homo sapien
tagaacctaggagttttaagcagga

SEQ ID NO: 1983495 - DNA, 25 bp, Homo sapien
caggcaggggatgggaagacttttg

SEQ ID NO: 1983496 - DNA, 25 bp, Homo sapien
tgggaagacttttggggccagtcga

SEQ ID NO: 1983497 - DNA, 25 bp, Homo sapien
ttggggccagtcgactctgggtttc

SEQ ID NO: 1983498 - DNA, 25 bp, Homo sapien
acttttggggccagtcgactctggg

SEQ ID NO: 1983499 - DNA, 25 bp, Homo sapien
tcgtaatacgctggctggtgctgag

SEQ ID NO: 1983500 - DNA, 25 bp, Homo sapien
gctgagaagccatgaaattcaccaa

SEQ ID NO: 1983501 - DNA, 25 bp, Homo sapien
tgatatggccttgcatcttatcagc

SEQ ID NO: 1983502 - DNA, 25 bp, Homo sapien
tcttatcagcaaaaagacttcgtaa

SEQ ID NO: 1983503 - DNA, 25 bp, Homo sapien
cactgtggcaacaatcaatggataa

SEQ ID NO: 1983504 - DNA, 25 bp, Homo sapien
tgtcccaatttcacaggagacctga

SEQ ID NO: 1983505 - DNA, 25 bp, Homo sapien
tctctaacttgaatacactgtggca

SEQ ID NO: 1983506 - DNA, 25 bp, Homo sapien
tacttgtggttcctgggctatcggc

SEQ ID NO: 1983507 - DNA, 25 bp, Homo sapien
ttttatgcacatatagttgtcatta

SEQ ID NO: 1983508 - DNA, 25 bp, Homo sapien
tttaacagtggtttaattttatgca

SEQ ID NO: 1983509 - DNA, 25 bp, Homo sapien
ctctaatgaatttaacagtggttta

SEQ ID NO: 1983510 - DNA, 25 bp, Homo sapien
acagtggtttaattttatgcacata

SEQ ID NO: 1983511 - DNA, 25 bp, Homo sapien
acaaactaatataccattcaaccca

SEQ ID NO: 1983512 - DNA, 25 bp, Homo sapien
gctgccatgcaggacatgactttgc

SEQ ID NO: 1983513 - DNA, 25 bp, Homo sapien
tggggggatggtaatgaataagcct

SEQ ID NO: 1983514 - DNA, 25 bp, Homo sapien
aactaatataccattcaacccagga

SEQ ID NO: 1983515 - DNA, 25 bp, Homo sapien
aatctgacagtacatccctattgtg

SEQ ID NO: 1983516 - DNA, 25 bp, Homo sapien
caaatgggtactgttatgctaaggc

SEQ ID NO: 1983517 - DNA, 25 bp, Homo sapien
tataataccagagcagaactagtcc

SEQ ID NO: 1983518 - DNA, 25 bp, Homo sapien
gctgctgggtcatagtacgtgagaa

SEQ ID NO: 1983519 - DNA, 25 bp, Homo sapien
tggaaatgttcccaaagagtacgaa

SEQ ID NO: 1983520 - DNA, 25 bp, Homo sapien
caaaattgatacctataaggtgagg

SEQ ID NO: 1983521 - DNA, 25 bp, Homo sapien
ggctgagtataagcattagaaccca

SEQ ID NO: 1983522 - DNA, 25 bp, Homo sapien
gcatctgcatcctaatcagttgtgg

SEQ ID NO: 1983523 - DNA, 25 bp, Homo sapien
gaatgcctcgctaagagtcagccat

SEQ ID NO: 1983524 - DNA, 25 bp, Homo sapien
aatcatctgattttgttgtaaggca

SEQ ID NO: 1983525 - DNA, 25 bp, Homo sapien
gaaagagaaggtgcacacttacatg

SEQ ID NO: 1983526 - DNA, 25 bp, Homo sapien
tattatgcaaatactatatggtcac

SEQ ID NO: 1983527 - DNA, 25 bp, Homo sapien
aaactgacaaagctggctccaaaac

SEQ ID NO: 1983528 - DNA, 25 bp, Homo sapien
caaaaaactgacaaagctggctcca

SEQ ID NO: 1983529 - DNA, 25 bp, Homo sapien
actgacaaagctggctccaaaactc

SEQ ID NO: 1983530 - DNA, 25 bp, Homo sapien
tgacaaagctggctccaaaactcat

SEQ ID NO: 1983531 - DNA, 25 bp, Homo sapien
tttaagtcatcacatgccaactgca

SEQ ID NO: 1983532 - DNA, 25 bp, Homo sapien
tcctatgacaatctcatgacactct

SEQ ID NO: 1983533 - DNA, 25 bp, Homo sapien
ttataatggcaatggctggtgagag

SEQ ID NO: 1983534 - DNA, 25 bp, Homo sapien
aaaccaagcaagcaacaaatttgca

SEQ ID NO: 1983535 - DNA, 25 bp, Homo sapien
taaacgccaagtcagccacattaag

SEQ ID NO: 1983536 - DNA, 25 bp, Homo sapien
aggtaaacctggcagtcagctatga

SEQ ID NO: 1983537 - DNA, 25 bp, Homo sapien
tctgaagccgatcaaccatagaggg

SEQ ID NO: 1983538 - DNA, 25 bp, Homo sapien
tcagctatgattatctgcctctgaa

SEQ ID NO: 1983539 - DNA, 25 bp, Homo sapien
cctctgaagccgatcaaccatagag

SEQ ID NO: 1983540 - DNA, 25 bp, Homo sapien
ttcctggcccaagactttgaaggac

SEQ ID NO: 1983541 - DNA, 25 bp, Homo sapien
gatttagttttcaccagtcagccca

SEQ ID NO: 1983542 - DNA, 25 bp, Homo sapien
caaaagatgatttagttttcaccag

SEQ ID NO: 1983543 - DNA, 25 bp, Homo sapien
agtcagcccactgcctcgttatctt

SEQ ID NO: 1983544 - DNA, 25 bp, Homo sapien
tgcagcatcagaagtcaaggactct

SEQ ID NO: 1983545 - DNA, 25 bp, Homo sapien
agaaagcccctgtaggcggtctcca

SEQ ID NO: 1983546 - DNA, 25 bp, Homo sapien
cagcacctttcagtctgttcagaga

SEQ ID NO: 1983547 - DNA, 25 bp, Homo sapien
tgcatacatcagtgaagaaagcccc

SEQ ID NO: 1983548 - DNA, 25 bp, Homo sapien
gctaaaggggccttcatgtccttac

SEQ ID NO: 1983549 - DNA, 25 bp, Homo sapien
agctaaaggggccttcatgtcctta

SEQ ID NO: 1983550 - DNA, 25 bp, Homo sapien
tagctaaaggggccttcatgtcctt

SEQ ID NO: 1983551 - DNA, 25 bp, Homo sapien
gtagctaaaggggccttcatgtcct

SEQ ID NO: 1983552 - DNA, 25 bp, Homo sapien
ctctagtcgttgtatccgtcccttg

SEQ ID NO: 1983553 - DNA, 25 bp, Homo sapien
aaaaacgggcggactacagtatgat

SEQ ID NO: 1983554 - DNA, 25 bp, Homo sapien
tagtcgttgtatccgtcccttgaaa

SEQ ID NO: 1983555 - DNA, 25 bp, Homo sapien
cagtatgataccagagcagagctaa

SEQ ID NO: 1983556 - DNA, 25 bp, Homo sapien
gagatttgatcatcggaggctttat

SEQ ID NO: 1983557 - DNA, 25 bp, Homo sapien
aagaacaaaatgctccggggccctg

SEQ ID NO: 1983558 - DNA, 25 bp, Homo sapien
tgagaatcagagatttgatcatcgg

SEQ ID NO: 1983559 - DNA, 25 bp, Homo sapien
cctgggacattctggctcgttttaa

SEQ ID NO: 1983560 - DNA, 25 bp, Homo sapien
ccctacttcgcccacatcttccgaa

SEQ ID NO: 1983561 - DNA, 25 bp, Homo sapien
acatcttccgaacagaaggtaactg

SEQ ID NO: 1983562 - DNA, 25 bp, Homo sapien
acttcgcccacatcttccgaacaga

SEQ ID NO: 1983563 - DNA, 25 bp, Homo sapien
ccacatcttccgaacagaaggtaac

SEQ ID NO: 1983564 - DNA, 25 bp, Homo sapien
ctcactgggcaagcacaggaagttg

SEQ ID NO: 1983565 - DNA, 25 bp, Homo sapien
gagaagtagactccaaaggccagcg

SEQ ID NO: 1983566 - DNA, 25 bp, Homo sapien
gcttgaagccctcttagatccctgt

SEQ ID NO: 1983567 - DNA, 25 bp, Homo sapien
ggttctggagtgagacaacccaggc

SEQ ID NO: 1983568 - DNA, 25 bp, Homo sapien
tgggaagagcaatgaaacgctgctg

SEQ ID NO: 1983569 - DNA, 25 bp, Homo sapien
ctgggaagagcaatgaaacgctgct

SEQ ID NO: 1983570 - DNA, 25 bp, Homo sapien
acacaagtgggcagagaaggttcga

SEQ ID NO: 1983571 - DNA, 25 bp, Homo sapien
ggatcagctgtaaggacaacacaag

SEQ ID NO: 1983572 - DNA, 25 bp, Homo sapien
gctaggtactgtattcacacattca

SEQ ID NO: 1983573 - DNA, 25 bp, Homo sapien
cccagcaatgtagtaagtcacatgg

SEQ ID NO: 1983574 - DNA, 25 bp, Homo sapien
gccatattctccatgatcccccggg

SEQ ID NO: 1983575 - DNA, 25 bp, Homo sapien
catattctccatgatcccccggggt

SEQ ID NO: 1983576 - DNA, 25 bp, Homo sapien
tattctccatgatcccccggggtct

SEQ ID NO: 1983577 - DNA, 25 bp, Homo sapien
atattctccatgatcccccggggtc

SEQ ID NO: 1983578 - DNA, 25 bp, Homo sapien
tccactgtgacaatgctcctgtcca

SEQ ID NO: 1983579 - DNA, 25 bp, Homo sapien
tcctctcatcgaaaaaggccaattt

SEQ ID NO: 1983580 - DNA, 25 bp, Homo sapien
gatttaccactacaatcctgaagac

SEQ ID NO: 1983581 - DNA, 25 bp, Homo sapien
cttcaaggaactgtaataggagatg

SEQ ID NO: 1983582 - DNA, 25 bp, Homo sapien
cataagacatcaacttgaaaagagc

SEQ ID NO: 1983583 - DNA, 25 bp, Homo sapien
catggtggcagaccatctacacaga

SEQ ID NO: 1983584 - DNA, 25 bp, Homo sapien
tacgaagggccaagacgatgttgaa

SEQ ID NO: 1983585 - DNA, 25 bp, Homo sapien
ctgcatttaaatggaagcaagaaca

SEQ ID NO: 1983586 - DNA, 25 bp, Homo sapien
caaggcttaaagaggtgaagggcca

SEQ ID NO: 1983587 - DNA, 25 bp, Homo sapien
tgagcttctgccaggcggaggacaa

SEQ ID NO: 1983588 - DNA, 25 bp, Homo sapien
taaactgggccaagataccactggg

SEQ ID NO: 1983589 - DNA, 25 bp, Homo sapien
caaactgcctgacgtgaaagcaacc

SEQ ID NO: 1983590 - DNA, 25 bp, Homo sapien
gctggttaaacatagcatacctgca

SEQ ID NO: 1983591 - DNA, 25 bp, Homo sapien
tcacaggctacagtataaataggaa

SEQ ID NO: 1983592 - DNA, 25 bp, Homo sapien
ttatctagcctactgcttcccaaag

SEQ ID NO: 1983593 - DNA, 25 bp, Homo sapien
tgttctaccgaacgcttccagtctc

SEQ ID NO: 1983594 - DNA, 25 bp, Homo sapien
ctgctttcttcataaccgaattcca

SEQ ID NO: 1983595 - DNA, 25 bp, Homo sapien
tgctttcttcataaccgaattccat

SEQ ID NO: 1983596 - DNA, 25 bp, Homo sapien
tgggatttcgcactgaatgggaaga

SEQ ID NO: 1983597 - DNA, 25 bp, Homo sapien
cagggagtcaggatgatgtgaccat

SEQ ID NO: 1983598 - DNA, 25 bp, Homo sapien
cagatatgttagagcagactgcagg

SEQ ID NO: 1983599 - DNA, 25 bp, Homo sapien
tataagaaagtgactctccaatgtg

SEQ ID NO: 1983600 - DNA, 25 bp, Homo sapien
ttacatcaattcactaaactctgtg

SEQ ID NO: 1983601 - DNA, 25 bp, Homo sapien
acgtgtaggtggtgcacttggaggc

SEQ ID NO: 1983602 - DNA, 25 bp, Homo sapien
tgagacctctggaagaacgtgtagg

SEQ ID NO: 1983603 - DNA, 25 bp, Homo sapien
gtgattccagcccattttaatttgg

SEQ ID NO: 1983604 - DNA, 25 bp, Homo sapien
cagcctgtgactcgggaacactgta

SEQ ID NO: 1983605 - DNA, 25 bp, Homo sapien
tcaccgtttatgaatgctgaccagg

SEQ ID NO: 1983606 - DNA, 25 bp, Homo sapien
gaaacaagggcaccaatgagtcagc

SEQ ID NO: 1983607 - DNA, 25 bp, Homo sapien
tgactcattaaccaaggcccagctg

SEQ ID NO: 1983608 - DNA, 25 bp, Homo sapien
ccgccgctgaagatgtcactcaggg

SEQ ID NO: 1983609 - DNA, 25 bp, Homo sapien
gccacaagtacccaagaggagcagc

SEQ ID NO: 1983610 - DNA, 25 bp, Homo sapien
aatacatttcgttttcccgccgctg

SEQ ID NO: 1983611 - DNA, 25 bp, Homo sapien
atgccacaagtacccaagaggagca

SEQ ID NO: 1983612 - DNA, 25 bp, Homo sapien
actctcaaatgtccgctctacttac

SEQ ID NO: 1983613 - DNA, 25 bp, Homo sapien
acccagcaaactctcaaatgtccgc

SEQ ID NO: 1983614 - DNA, 25 bp, Homo sapien
caaactctcaaatgtccgctctact

SEQ ID NO: 1983615 - DNA, 25 bp, Homo sapien
cagcaaactctcaaatgtccgctct

SEQ ID NO: 1983616 - DNA, 25 bp, Homo sapien
tccttgctcaggtggtaagggctca

SEQ ID NO: 1983617 - DNA, 25 bp, Homo sapien
ctctccttgctcaggtggtaagggc

SEQ ID NO: 1983618 - DNA, 25 bp, Homo sapien
ctcaggtggtaagggctcagctcgc

SEQ ID NO: 1983619 - DNA, 25 bp, Homo sapien
gtaagggctcagctcgcgccgcctt

SEQ ID NO: 1983620 - DNA, 25 bp, Homo sapien
gaaagatgtcaaggcactgttgatt

SEQ ID NO: 1983621 - DNA, 25 bp, Homo sapien
tctggtctactgcaagttccaaagc

SEQ ID NO: 1983622 - DNA, 25 bp, Homo sapien
cagacagacatgttgaatttctctc

SEQ ID NO: 1983623 - DNA, 25 bp, Homo sapien
gcagtgtggaaagatgtcaaggcac

SEQ ID NO: 1983624 - DNA, 25 bp, Homo sapien
ctacttcttaacaagaggctggaca

SEQ ID NO: 1983625 - DNA, 25 bp, Homo sapien
gatcagagttttagtgcagtcagca

SEQ ID NO: 1983626 - DNA, 25 bp, Homo sapien
tgtgctacgggaataactgaagtcc

SEQ ID NO: 1983627 - DNA, 25 bp, Homo sapien
gcagctaacatgtatggagggcctt

SEQ ID NO: 1983628 - DNA, 25 bp, Homo sapien
tggtgactgtctctccagtaaggga

SEQ ID NO: 1983629 - DNA, 25 bp, Homo sapien
gcatccttgaaattgagctctatca

SEQ ID NO: 1983630 - DNA, 25 bp, Homo sapien
cataatagcactgggaccacctgga

SEQ ID NO: 1983631 - DNA, 25 bp, Homo sapien
ctgcagtcaagtaggcataatagca

SEQ ID NO: 1983632 - DNA, 25 bp, Homo sapien
atgcatccttgaaattgagctctat

SEQ ID NO: 1983633 - DNA, 25 bp, Homo sapien
agggtccaagaattgaggctcggag

SEQ ID NO: 1983634 - DNA, 25 bp, Homo sapien
gataggctaccatcggcagagccca

SEQ ID NO: 1983635 - DNA, 25 bp, Homo sapien
tccaagaattgaggctcggagagag

SEQ ID NO: 1983636 - DNA, 25 bp, Homo sapien
caggataggctaccatcggcagagc

SEQ ID NO: 1983637 - DNA, 25 bp, Homo sapien
agtcacctatcccaggcgtgcacgt

SEQ ID NO: 1983638 - DNA, 25 bp, Homo sapien
cgtactcgcatttgggcatggtcaa

SEQ ID NO: 1983639 - DNA, 25 bp, Homo sapien
tggtcaagcagtcacctatcccagg

SEQ ID NO: 1983640 - DNA, 25 bp, Homo sapien
aagtaggttggtcccgtactcgcat

SEQ ID NO: 1983641 - DNA, 25 bp, Homo sapien
tggcctcttgtactcgtgatatgcc

SEQ ID NO: 1983642 - DNA, 25 bp, Homo sapien
caccatattggcctcttgtactcgt

SEQ ID NO: 1983643 - DNA, 25 bp, Homo sapien
ccatattggcctcttgtactcgtga

SEQ ID NO: 1983644 - DNA, 25 bp, Homo sapien
tattggcctcttgtactcgtgatat

SEQ ID NO: 1983645 - DNA, 25 bp, Homo sapien
gtaaggagctaggagaagtcgagcg

SEQ ID NO: 1983646 - DNA, 25 bp, Homo sapien
taaggagctaggagaagtcgagcgg

SEQ ID NO: 1983647 - DNA, 25 bp, Homo sapien
ggagctaggagaagtcgagcggagt

SEQ ID NO: 1983648 - DNA, 25 bp, Homo sapien
aaggagctaggagaagtcgagcgga

SEQ ID NO: 1983649 - DNA, 25 bp, Homo sapien
gggtcccacaagctgcaatgtatgt

SEQ ID NO: 1983650 - DNA, 25 bp, Homo sapien
tgcaatgtatgtagtgataggagta

SEQ ID NO: 1983651 - DNA, 25 bp, Homo sapien
gagtagtcagggtaggagaaccaaa

SEQ ID NO: 1983652 - DNA, 25 bp, Homo sapien
tgtatgtagtgataggagtagtcag

SEQ ID NO: 1983653 - DNA, 25 bp, Homo sapien
ttaaagactattccacaatgggctg

SEQ ID NO: 1983654 - DNA, 25 bp, Homo sapien
ggatacctgaagtgatgatacttga

SEQ ID NO: 1983655 - DNA, 25 bp, Homo sapien
aaaatgccataagggatacctgaag

SEQ ID NO: 1983656 - DNA, 25 bp, Homo sapien
tatgtttaaagactattccacaatg

SEQ ID NO: 1983657 - DNA, 25 bp, Homo sapien
caccgagaactgttcaatctgattg

SEQ ID NO: 1983658 - DNA, 25 bp, Homo sapien
tccttttgaagagtttctgaacttc

SEQ ID NO: 1983659 - DNA, 25 bp, Homo sapien
ctttttcaccgagaactgttcaatc

SEQ ID NO: 1983660 - DNA, 25 bp, Homo sapien
ttctttaaagacaatctgtgcccca

SEQ ID NO: 1983661 - DNA, 25 bp, Homo sapien
caacacttcaatagacgccaacaca

SEQ ID NO: 1983662 - DNA, 25 bp, Homo sapien
aatagacgccaacacacagagcgct

SEQ ID NO: 1983663 - DNA, 25 bp, Homo sapien
cgccaacacacagagcgctttggtt

SEQ ID NO: 1983664 - DNA, 25 bp, Homo sapien
ggaacagtttggaagagctttccac

SEQ ID NO: 1983665 - DNA, 25 bp, Homo sapien
tgtgtccagtagacagttttgggtt

SEQ ID NO: 1983666 - DNA, 25 bp, Homo sapien
gaatgccgcactgacagaagaagcc

SEQ ID NO: 1983667 - DNA, 25 bp, Homo sapien
tgacagaagaagccagtgtgtccag

SEQ ID NO: 1983668 - DNA, 25 bp, Homo sapien
aaactgaagaatgccgcactgacag

SEQ ID NO: 1983669 - DNA, 25 bp, Homo sapien
tatgtggctcaatggatcatgctat

SEQ ID NO: 1983670 - DNA, 25 bp, Homo sapien
cactgtcaatactaatttcttggga

SEQ ID NO: 1983671 - DNA, 25 bp, Homo sapien
gcaggatctccctcttgtcatttag

SEQ ID NO: 1983672 - DNA, 25 bp, Homo sapien
ggaatattatgtctacactgtcaat

SEQ ID NO: 1983673 - DNA, 25 bp, Homo sapien
tcgagggttacagactgggagcact

SEQ ID NO: 1983674 - DNA, 25 bp, Homo sapien
ctttaatccaacaacagatgagtca

SEQ ID NO: 1983675 - DNA, 25 bp, Homo sapien
tagacatttgtgtatggcaccaaga

SEQ ID NO: 1983676 - DNA, 25 bp, Homo sapien
ttgtgtatggcaccaagaagcaaat

SEQ ID NO: 1983677 - DNA, 25 bp, Homo sapien
tcctagacatttgtgtatggcacca

SEQ ID NO: 1983678 - DNA, 25 bp, Homo sapien
aattggataaagtttatagtgggag

SEQ ID NO: 1983679 - DNA, 25 bp, Homo sapien
tcacaagcatatacgtaggtgttcg

SEQ ID NO: 1983680 - DNA, 25 bp, Homo sapien
aagcatatacgtaggtgttcgtgac

SEQ ID NO: 1983681 - DNA, 25 bp, Homo sapien
ttcttattcacaagcatatacgtag

SEQ ID NO: 1983682 - DNA, 25 bp, Homo sapien
gactgtatcttgctagcacataagc

SEQ ID NO: 1983683 - DNA, 25 bp, Homo sapien
cacacaaggtaactatgatctcgac

SEQ ID NO: 1983684 - DNA, 25 bp, Homo sapien
tgatctcgacatgcgtcttgactgt

SEQ ID NO: 1983685 - DNA, 25 bp, Homo sapien
tcctttacatgctgcctgatgtgca

SEQ ID NO: 1983686 - DNA, 25 bp, Homo sapien
cggctgaacatataagttattctga

SEQ ID NO: 1983687 - DNA, 25 bp, Homo sapien
gttattctgacgacacaattcatct

SEQ ID NO: 1983688 - DNA, 25 bp, Homo sapien
ctggtttgtctaatagaagacagcc

SEQ ID NO: 1983689 - DNA, 25 bp, Homo sapien
agacagccaagttcataacaggcat

SEQ ID NO: 1983690 - DNA, 25 bp, Homo sapien
tgtacacaattatagcacagaagca

SEQ ID NO: 1983691 - DNA, 25 bp, Homo sapien
ggaaggaattgcctaacaacgcatt

SEQ ID NO: 1983692 - DNA, 25 bp, Homo sapien
ggtgctttgtgcttgcccacttcca

SEQ ID NO: 1983693 - DNA, 25 bp, Homo sapien
gcctggttgtgtagtaggtgatacc

SEQ ID NO: 1983694 - DNA, 25 bp, Homo sapien
cactgtagacatagcaatgagtcaa

SEQ ID NO: 1983695 - DNA, 25 bp, Homo sapien
aatggtataataggaggctatgtta

SEQ ID NO: 1983696 - DNA, 25 bp, Homo sapien
ttatatatacgcaggcagaaaatgg

SEQ ID NO: 1983697 - DNA, 25 bp, Homo sapien
gagtcaactgttcattcaagtataa

SEQ ID NO: 1983698 - DNA, 25 bp, Homo sapien
ttgaagaagtagagctctgcctctt

SEQ ID NO: 1983699 - DNA, 25 bp, Homo sapien
tgaagaagtagagctctgcctcttc

SEQ ID NO: 1983700 - DNA, 25 bp, Homo sapien
cttgaagaagtagagctctgcctct

SEQ ID NO: 1983701 - DNA, 25 bp, Homo sapien
gggccactggagaaaggtagattca

SEQ ID NO: 1983702 - DNA, 25 bp, Homo sapien
tgtaatgtcccttaaaactcaagag

SEQ ID NO: 1983703 - DNA, 25 bp, Homo sapien
tcaagagctcactgattcaattggt

SEQ ID NO: 1983704 - DNA, 25 bp, Homo sapien
cacccaaagactaagagtgtttcta

SEQ ID NO: 1983705 - DNA, 25 bp, Homo sapien
gcatggatgcggacatgcaatctgt

SEQ ID NO: 1983706 - DNA, 25 bp, Homo sapien
caaagtcgtagccagagaaatcctc

SEQ ID NO: 1983707 - DNA, 25 bp, Homo sapien
tctgttttcaaagtcgtagccagag

SEQ ID NO: 1983708 - DNA, 25 bp, Homo sapien
gatgcggacatgcaatctgttttca

SEQ ID NO: 1983709 - DNA, 25 bp, Homo sapien
tccctggcacaggtggttttcagaa

SEQ ID NO: 1983710 - DNA, 25 bp, Homo sapien
actaaaacgtttgagcaaggtcact

SEQ ID NO: 1983711 - DNA, 25 bp, Homo sapien
tatgtcagcttaactgggaaaatgt

SEQ ID NO: 1983712 - DNA, 25 bp, Homo sapien
ctacatgtttaaaagaggagatctt

SEQ ID NO: 1983713 - DNA, 25 bp, Homo sapien
tcagatatgtgcttaaggtaggtgt

SEQ ID NO: 1983714 - DNA, 25 bp, Homo sapien
gctatgtcatgatattgttaataat

SEQ ID NO: 1983715 - DNA, 25 bp, Homo sapien
taattttacaggtacctcatcatgt

SEQ ID NO: 1983716 - DNA, 25 bp, Homo sapien
gtaggtgttcctacaggatcttggg

SEQ ID NO: 1983717 - DNA, 25 bp, Homo sapien
taatagattagcaaaagagtcacac

SEQ ID NO: 1983718 - DNA, 25 bp, Homo sapien
caataaaagtcagttggtggtcagg

SEQ ID NO: 1983719 - DNA, 25 bp, Homo sapien
tctgtagacaatctggagatgacta

SEQ ID NO: 1983720 - DNA, 25 bp, Homo sapien
gagtgtccatcgctttgaaacattc

SEQ ID NO: 1983721 - DNA, 25 bp, Homo sapien
caggttggataagtcacggcacgca

SEQ ID NO: 1983722 - DNA, 25 bp, Homo sapien
caacctaatgggacagtgtactcac

SEQ ID NO: 1983723 - DNA, 25 bp, Homo sapien
cctacaggatggtgttgcaaaacgc

SEQ ID NO: 1983724 - DNA, 25 bp, Homo sapien
tgagagcctccaaaataggacaggg

SEQ ID NO: 1983725 - DNA, 25 bp, Homo sapien
tgtgggtgtggcctctgcatacctc

SEQ ID NO: 1983726 - DNA, 25 bp, Homo sapien
aagtccatggttgtgggtgtggcct

SEQ ID NO: 1983727 - DNA, 25 bp, Homo sapien
cctatggaagtccatggttgtgggt

SEQ ID NO: 1983728 - DNA, 25 bp, Homo sapien
cctctgcatacctctcgtatttcat

SEQ ID NO: 1983729 - DNA, 25 bp, Homo sapien
ggaatgggagttcagcatgaatcca

SEQ ID NO: 1983730 - DNA, 25 bp, Homo sapien
tgaataattgtatgcaacagagcac

SEQ ID NO: 1983731 - DNA, 25 bp, Homo sapien
tgtgaaactcgcctgtggaatggga

SEQ ID NO: 1983732 - DNA, 25 bp, Homo sapien
gccacgttgtagacacacagtgaat

SEQ ID NO: 1983733 - DNA, 25 bp, Homo sapien
ggagccgaaagcgacaaaggccatg

SEQ ID NO: 1983734 - DNA, 25 bp, Homo sapien
aagctccgcaccactcaaggaggcg

SEQ ID NO: 1983735 - DNA, 25 bp, Homo sapien
gagacttggcgcttgcgagcgtttt

SEQ ID NO: 1983736 - DNA, 25 bp, Homo sapien
gagcgtttttatagccccgcaggca

SEQ ID NO: 1983737 - DNA, 25 bp, Homo sapien
ctcgttgcccccttgccggcggctc

SEQ ID NO: 1983738 - DNA, 25 bp, Homo sapien
aagagcttcctcgttgcccccttgc

SEQ ID NO: 1983739 - DNA, 25 bp, Homo sapien
gcttcctcgttgcccccttgccggc

SEQ ID NO: 1983740 - DNA, 25 bp, Homo sapien
gagcttcctcgttgcccccttgccg

SEQ ID NO: 1983741 - DNA, 25 bp, Homo sapien
tgagacataatggtctccgaggccg

SEQ ID NO: 1983742 - DNA, 25 bp, Homo sapien
tccctgagacataatggtctccgag

SEQ ID NO: 1983743 - DNA, 25 bp, Homo sapien
agacataatggtctccgaggccgca

SEQ ID NO: 1983744 - DNA, 25 bp, Homo sapien
ataatggtctccgaggccgcagggt

SEQ ID NO: 1983745 - DNA, 25 bp, Homo sapien
cgaggcctcagattcggcagctggc

SEQ ID NO: 1983746 - DNA, 25 bp, Homo sapien
cctcagattcggcagctggccgtct

SEQ ID NO: 1983747 - DNA, 25 bp, Homo sapien
agattcggcagctggccgtctggtc

SEQ ID NO: 1983748 - DNA, 25 bp, Homo sapien
tggtcgccgcactccccggtgtggg

SEQ ID NO: 1983749 - DNA, 25 bp, Homo sapien
tgccagcggggacttcggagccata

SEQ ID NO: 1983750 - DNA, 25 bp, Homo sapien
ccccgctgtgtcagtgctcgttttg

SEQ ID NO: 1983751 - DNA, 25 bp, Homo sapien
tgtcagtgctcgttttgcgctaggt

SEQ ID NO: 1983752 - DNA, 25 bp, Homo sapien
ttcggagccataggtaaccgcactc

SEQ ID NO: 1983753 - DNA, 25 bp, Homo sapien
tagatagaccgttttgaaagtggct

SEQ ID NO: 1983754 - DNA, 25 bp, Homo sapien
aagtgagtagatagaccgttttgaa

SEQ ID NO: 1983755 - DNA, 25 bp, Homo sapien
tgagtagatagaccgttttgaaagt

SEQ ID NO: 1983756 - DNA, 25 bp, Homo sapien
ccaaagtgagtagatagaccgtttt

SEQ ID NO: 1983757 - DNA, 25 bp, Homo sapien
catagggtacgacaagtctgggctt

SEQ ID NO: 1983758 - DNA, 25 bp, Homo sapien
aaactggttgatgtttgatgggttg

SEQ ID NO: 1983759 - DNA, 25 bp, Homo sapien
gagaacagctctgctaattccctcg

SEQ ID NO: 1983760 - DNA, 25 bp, Homo sapien
taattccctcgagcagagtcttgag

SEQ ID NO: 1983761 - DNA, 25 bp, Homo sapien
ctgatgaaattgtttaaccagatct

SEQ ID NO: 1983762 - DNA, 25 bp, Homo sapien
attgtttaaccagatcttttatatc

SEQ ID NO: 1983763 - DNA, 25 bp, Homo sapien
tgaaattgtttaaccagatctttta

SEQ ID NO: 1983764 - DNA, 25 bp, Homo sapien
ttgtttaaccagatcttttatatcc

SEQ ID NO: 1983765 - DNA, 25 bp, Homo sapien
tgacacgttgtaaaggctctgattg

SEQ ID NO: 1983766 - DNA, 25 bp, Homo sapien
cactaaacggttctgatctctcgac

SEQ ID NO: 1983767 - DNA, 25 bp, Homo sapien
gatagtgcactacgtatacctcaaa

SEQ ID NO: 1983768 - DNA, 25 bp, Homo sapien
tcaagctttactccacacatgagga

SEQ ID NO: 1983769 - DNA, 25 bp, Homo sapien
accatgcccctgcttataaacttct

SEQ ID NO: 1983770 - DNA, 25 bp, Homo sapien
ttgtagagtaggcaatgcattcttc

SEQ ID NO: 1983771 - DNA, 25 bp, Homo sapien
ttaaaggatatattccctgggtata

SEQ ID NO: 1983772 - DNA, 25 bp, Homo sapien
gggtatatattaattctaggctggc

SEQ ID NO: 1983773 - DNA, 25 bp, Homo sapien
cagagactataaagtaggtggttta

SEQ ID NO: 1983774 - DNA, 25 bp, Homo sapien
cctccttgcccttccatccattctt

SEQ ID NO: 1983775 - DNA, 25 bp, Homo sapien
cccttccatccattctttcttcatt

SEQ ID NO: 1983776 - DNA, 25 bp, Homo sapien
cattcaacaaacattagttgcacca

SEQ ID NO: 1983777 - DNA, 25 bp, Homo sapien
tctggaagtcccctgctaaacaaaa

SEQ ID NO: 1983778 - DNA, 25 bp, Homo sapien
caatttaccagggaatgtatgatat

SEQ ID NO: 1983779 - DNA, 25 bp, Homo sapien
caggttcatggtacctgaaattacg

SEQ ID NO: 1983780 - DNA, 25 bp, Homo sapien
ggtacctgaaattacgtctagaaga

SEQ ID NO: 1983781 - DNA, 25 bp, Homo sapien
ggtactttagattctacagatgttt

SEQ ID NO: 1983782 - DNA, 25 bp, Homo sapien
aggtactttagattctacagatgtt

SEQ ID NO: 1983783 - DNA, 25 bp, Homo sapien
agaaagaccaccaactgcttccgtt

SEQ ID NO: 1983784 - DNA, 25 bp, Homo sapien
tggctggtttggaagaaagaccacc

SEQ ID NO: 1983785 - DNA, 25 bp, Homo sapien
gtcagctgggacgtaggcaaactct

SEQ ID NO: 1983786 - DNA, 25 bp, Homo sapien
cattgtcctcgtctgtgtctgtaga

SEQ ID NO: 1983787 - DNA, 25 bp, Homo sapien
catccaggagttgtgcaggtacctc

SEQ ID NO: 1983788 - DNA, 25 bp, Homo sapien
gggactaactcgtggtgactgctca

SEQ ID NO: 1983789 - DNA, 25 bp, Homo sapien
tcacaggcacatcgttatagacaga

SEQ ID NO: 1983790 - DNA, 25 bp, Homo sapien
gattttttagacatgccagaggtgg

SEQ ID NO: 1983791 - DNA, 25 bp, Homo sapien
ctggtgcagtaaggccttctggagc

SEQ ID NO: 1983792 - DNA, 25 bp, Homo sapien
gggccactagatgactttacagatg

SEQ ID NO: 1983793 - DNA, 25 bp, Homo sapien
caatttctggtgcagtaaggccttc

SEQ ID NO: 1983794 - DNA, 25 bp, Homo sapien
tgttgattccccttctggttcaatt

SEQ ID NO: 1983795 - DNA, 25 bp, Homo sapien
aaggaagccaattacgtgaactgca

SEQ ID NO: 1983796 - DNA, 25 bp, Homo sapien
gaaggtgagcagaccaaatgccata

SEQ ID NO: 1983797 - DNA, 25 bp, Homo sapien
ggttggctcatgcacgtcccttctg

SEQ ID NO: 1983798 - DNA, 25 bp, Homo sapien
tgctgttcaagtgccgcaagtgccg

SEQ ID NO: 1983799 - DNA, 25 bp, Homo sapien
tttagacgtggcttctataggctcc

SEQ ID NO: 1983800 - DNA, 25 bp, Homo sapien
taggctcctcgcagacgaaactggt

SEQ ID NO: 1983801 - DNA, 25 bp, Homo sapien
tagtgatatgtaccgtagagcatgc

SEQ ID NO: 1983802 - DNA, 25 bp, Homo sapien
gacactacagttgtggctgaagaag

SEQ ID NO: 1983803 - DNA, 25 bp, Homo sapien
tgactgtgaaacgacagcatgtcca

SEQ ID NO: 1983804 - DNA, 25 bp, Homo sapien
ggtgtcgcccatcacataagttgga

SEQ ID NO: 1983805 - DNA, 25 bp, Homo sapien
caggaacagcaatgggcacttgcat

SEQ ID NO: 1983806 - DNA, 25 bp, Homo sapien
tagaacatggtggtggttgtcctcg

SEQ ID NO: 1983807 - DNA, 25 bp, Homo sapien
gatcctgaactttttttagctacat

SEQ ID NO: 1983808 - DNA, 25 bp, Homo sapien
tgctttgcgacgtttgtgagcagta

SEQ ID NO: 1983809 - DNA, 25 bp, Homo sapien
agtcacggttacctccccagcaata

SEQ ID NO: 1983810 - DNA, 25 bp, Homo sapien
tgagcagtagtcacggttacctccc

SEQ ID NO: 1983811 - DNA, 25 bp, Homo sapien
aaatatctaaatctccaggtcaaga

SEQ ID NO: 1983812 - DNA, 25 bp, Homo sapien
caggaagttagagtataccccaact

SEQ ID NO: 1983813 - DNA, 25 bp, Homo sapien
gaagttggagacagtaaccccagga

SEQ ID NO: 1983814 - DNA, 25 bp, Homo sapien
taaaacgcgcgtgtgttaaggccta

SEQ ID NO: 1983815 - DNA, 25 bp, Homo sapien
taaaggtaggcctgtgtcagcaccc

SEQ ID NO: 1983816 - DNA, 25 bp, Homo sapien
tgtggcctacttcgctgtctctgga

SEQ ID NO: 1983817 - DNA, 25 bp, Homo sapien
tgagcctgaacaccctacctaatag

SEQ ID NO: 1983818 - DNA, 25 bp, Homo sapien
ggcttcttctcatactcaggtgtca

SEQ ID NO: 1983819 - DNA, 25 bp, Homo sapien
tgcatgaagtttattgatacattac

SEQ ID NO: 1983820 - DNA, 25 bp, Homo sapien
acactggtggcagactcctccctga

SEQ ID NO: 1983821 - DNA, 25 bp, Homo sapien
tgttgacccagacagcgtcatttct

SEQ ID NO: 1983822 - DNA, 25 bp, Homo sapien
tattgatacattacactggtggcag

SEQ ID NO: 1983823 - DNA, 25 bp, Homo sapien
tcaagtggaactacctggttagaaa

SEQ ID NO: 1983824 - DNA, 25 bp, Homo sapien
tgcagaatcaagtggaactacctgg

SEQ ID NO: 1983825 - DNA, 25 bp, Homo sapien
ctggttagaaaatttgttactagat

SEQ ID NO: 1983826 - DNA, 25 bp, Homo sapien
gaatcaagtggaactacctggttag

SEQ ID NO: 1983827 - DNA, 25 bp, Homo sapien
tgcatttcacccaacaaaagcaggg

SEQ ID NO: 1983828 - DNA, 25 bp, Homo sapien
tgttaaatgcttccacttccagtgg

SEQ ID NO: 1983829 - DNA, 25 bp, Homo sapien
tatagaggtaagagaacactgctgg

SEQ ID NO: 1983830 - DNA, 25 bp, Homo sapien
gaaaaaacactcatgagataactgc

SEQ ID NO: 1983831 - DNA, 25 bp, Homo sapien
cattggcttcaagcccctggaaagc

SEQ ID NO: 1983832 - DNA, 25 bp, Homo sapien
gtcattggcttcaagcccctggaaa

SEQ ID NO: 1983833 - DNA, 25 bp, Homo sapien
tcattggcttcaagcccctggaaag

SEQ ID NO: 1983834 - DNA, 25 bp, Homo sapien
gcccacactgtggttcagtaaacac

SEQ ID NO: 1983835 - DNA, 25 bp, Homo sapien
tctcattggttgcactgaggtgccc

SEQ ID NO: 1983836 - DNA, 25 bp, Homo sapien
tgcctgcgtgtctttcactctggcc

SEQ ID NO: 1983837 - DNA, 25 bp, Homo sapien
actccgtggcgccttcctttctgcc

SEQ ID NO: 1983838 - DNA, 25 bp, Homo sapien
gttctttgggcactgtctgctgtag

SEQ ID NO: 1983839 - DNA, 25 bp, Homo sapien
gaaatattgttctttgggcactgtc

SEQ ID NO: 1983840 - DNA, 25 bp, Homo sapien
ggagatcacctagcttttggaaata

SEQ ID NO: 1983841 - DNA, 25 bp, Homo sapien
tctgctgaggttcataggagacaaa

SEQ ID NO: 1983842 - DNA, 25 bp, Homo sapien
tttctgcctggagtaacactgccat

SEQ ID NO: 1983843 - DNA, 25 bp, Homo sapien
aacaccattcgggaattctctcttc

SEQ ID NO: 1983844 - DNA, 25 bp, Homo sapien
catccaacaccattcgggaattctc

SEQ ID NO: 1983845 - DNA, 25 bp, Homo sapien
gctgctctcgtctgttcttatttct

SEQ ID NO: 1983846 - DNA, 25 bp, Homo sapien
atcttcgtatcatttcaatgtttag

SEQ ID NO: 1983847 - DNA, 25 bp, Homo sapien
aatcttcgtatcatttcaatgttta

SEQ ID NO: 1983848 - DNA, 25 bp, Homo sapien
tcttcgtatcatttcaatgtttagt

SEQ ID NO: 1983849 - DNA, 25 bp, Homo sapien
tgcaagtgcagatactctccatgct

SEQ ID NO: 1983850 - DNA, 25 bp, Homo sapien
tgattcaagactgtctgttggaccc

SEQ ID NO: 1983851 - DNA, 25 bp, Homo sapien
ggctttgctcgccactatgacaggg

SEQ ID NO: 1983852 - DNA, 25 bp, Homo sapien
ccagttggtgtactctgcaagtgca

SEQ ID NO: 1983853 - DNA, 25 bp, Homo sapien
tctattcttgagtggtagaagaatg

SEQ ID NO: 1983854 - DNA, 25 bp, Homo sapien
ggtagaagaatgaccctcatcccct

SEQ ID NO: 1983855 - DNA, 25 bp, Homo sapien
ttctattcttgagtggtagaagaat

SEQ ID NO: 1983856 - DNA, 25 bp, Homo sapien
tttctattcttgagtggtagaagaa

SEQ ID NO: 1983857 - DNA, 25 bp, Homo sapien
aagaatacgagaagtgcatgagcgg

SEQ ID NO: 1983858 - DNA, 25 bp, Homo sapien
tgcatgagcggattaaggagagaaa

SEQ ID NO: 1983859 - DNA, 25 bp, Homo sapien
catccgctcttcagaggccgctgaa

SEQ ID NO: 1983860 - DNA, 25 bp, Homo sapien
ggccgctgaaattccaagaatacga

SEQ ID NO: 1983861 - DNA, 25 bp, Homo sapien
taggtgggtgtatttgcagctcggt

SEQ ID NO: 1983862 - DNA, 25 bp, Homo sapien
atcggctcgcctcggctcgactgga

SEQ ID NO: 1983863 - DNA, 25 bp, Homo sapien
tgcgaggagcgcagggtggagcgcg

SEQ ID NO: 1983864 - DNA, 25 bp, Homo sapien
agcgcattcgcgctggagcttgcga

SEQ ID NO: 1983865 - DNA, 25 bp, Homo sapien
caggctgcgcaaaggtgacttaggg

SEQ ID NO: 1983866 - DNA, 25 bp, Homo sapien
ctgcgcaaaggtgacttagggagac

SEQ ID NO: 1983867 - DNA, 25 bp, Homo sapien
gctgcgcaaaggtgacttagggaga

SEQ ID NO: 1983868 - DNA, 25 bp, Homo sapien
gggcaggctgcgcaaaggtgactta

SEQ ID NO: 1983869 - DNA, 25 bp, Homo sapien
cacggtagtaggattaataccgttg

SEQ ID NO: 1983870 - DNA, 25 bp, Homo sapien
tgttttccttgttgctcagtgtccc

SEQ ID NO: 1983871 - DNA, 25 bp, Homo sapien
ttttccttgttgctcagtgtcccaa

SEQ ID NO: 1983872 - DNA, 25 bp, Homo sapien
ataccgttgttttccttgttgctca

SEQ ID NO: 1983873 - DNA, 25 bp, Homo sapien
ggcctgcacccgtctctggccttct

SEQ ID NO: 1983874 - DNA, 25 bp, Homo sapien
tgcacccgtctctggccttctgtct

SEQ ID NO: 1983875 - DNA, 25 bp, Homo sapien
ctgtagtcccctcagatctccttcc

SEQ ID NO: 1983876 - DNA, 25 bp, Homo sapien
gtcccctcagatctccttccactct

SEQ ID NO: 1983877 - DNA, 25 bp, Homo sapien
tgtgcaggctttcatgccttctatt

SEQ ID NO: 1983878 - DNA, 25 bp, Homo sapien
ttttgcttatttgaggatgtactga

SEQ ID NO: 1983879 - DNA, 25 bp, Homo sapien
tacataatcgaggttttcataggag

SEQ ID NO: 1983880 - DNA, 25 bp, Homo sapien
tactgatatgatctacataatcgag

SEQ ID NO: 1983881 - DNA, 25 bp, Homo sapien
aggttacaataagccgagattactc

SEQ ID NO: 1983882 - DNA, 25 bp, Homo sapien
ttacaataagccgagattactccac

SEQ ID NO: 1983883 - DNA, 25 bp, Homo sapien
acaataagccgagattactccactg

SEQ ID NO: 1983884 - DNA, 25 bp, Homo sapien
tgaaggttacaataagccgagatta

SEQ ID NO: 1983885 - DNA, 25 bp, Homo sapien
atatacacagttcgcaatagggttc

SEQ ID NO: 1983886 - DNA, 25 bp, Homo sapien
taaatccctcatatacacagttcgc

SEQ ID NO: 1983887 - DNA, 25 bp, Homo sapien
tcctgttgtagggtatagacctttc

SEQ ID NO: 1983888 - DNA, 25 bp, Homo sapien
tatagacctttctaggagaaggctc

SEQ ID NO: 1983889 - DNA, 25 bp, Homo sapien
cttccgagattagctgagattgggt

SEQ ID NO: 1983890 - DNA, 25 bp, Homo sapien
ggccaatttatggaaaggtctattc

SEQ ID NO: 1983891 - DNA, 25 bp, Homo sapien
catagcttgtcagtagactggctcc

SEQ ID NO: 1983892 - DNA, 25 bp, Homo sapien
catgcctggccaatgctgtgaatct

SEQ ID NO: 1983893 - DNA, 25 bp, Homo sapien
cacagacctataagaaatgagggaa

SEQ ID NO: 1983894 - DNA, 25 bp, Homo sapien
gctttaaaggagtctggtgcagtct

SEQ ID NO: 1983895 - DNA, 25 bp, Homo sapien
cagtggccttcttctatttgccaaa

SEQ ID NO: 1983896 - DNA, 25 bp, Homo sapien
tgcctgtctgaattccactggagat

SEQ ID NO: 1983897 - DNA, 25 bp, Homo sapien
tactcttggagctcgtcagtggcct

SEQ ID NO: 1983898 - DNA, 25 bp, Homo sapien
taatatcctaaaagtgaagctgtta

SEQ ID NO: 1983899 - DNA, 25 bp, Homo sapien
ctaatatcctaaaagtgaagctgtt

SEQ ID NO: 1983900 - DNA, 25 bp, Homo sapien
aatatcctaaaagtgaagctgttac

SEQ ID NO: 1983901 - DNA, 25 bp, Homo sapien
tgtagtacagctatcaccactgtcc

SEQ ID NO: 1983902 - DNA, 25 bp, Homo sapien
atacattcacattgtagtacagcta

SEQ ID NO: 1983903 - DNA, 25 bp, Homo sapien
tctgttcctgttaaacattactccc

SEQ ID NO: 1983904 - DNA, 25 bp, Homo sapien
aactctgttcctgttaaacattact

SEQ ID NO: 1983905 - DNA, 25 bp, Homo sapien
cgtgccttctcggtactttcgtgtg

SEQ ID NO: 1983906 - DNA, 25 bp, Homo sapien
gctgcgtgccttctcggtactttcg

SEQ ID NO: 1983907 - DNA, 25 bp, Homo sapien
tcagctgcgtgccttctcggtactt

SEQ ID NO: 1983908 - DNA, 25 bp, Homo sapien
ccttctcggtactttcgtgtgtcca

SEQ ID NO: 1983909 - DNA, 25 bp, Homo sapien
gccagagttggtgacgaccacttcc

SEQ ID NO: 1983910 - DNA, 25 bp, Homo sapien
agtgccagccagagttggtgacgac

SEQ ID NO: 1983911 - DNA, 25 bp, Homo sapien
acgttacgcgggctcgagcgtcctc

SEQ ID NO: 1983912 - DNA, 25 bp, Homo sapien
ccggagacagacgttacgcgggctc

SEQ ID NO: 1983913 - DNA, 25 bp, Homo sapien
gacttcagactattaacccaggact

SEQ ID NO: 1983914 - DNA, 25 bp, Homo sapien
tgtagtctccgggtaaggcctgcca

SEQ ID NO: 1983915 - DNA, 25 bp, Homo sapien
cactggctcacacgggcggttcctt

SEQ ID NO: 1983916 - DNA, 25 bp, Homo sapien
tattgcttaatgacagacttcagac

SEQ ID NO: 1983917 - DNA, 25 bp, Homo sapien
gtgggagaactgcttgagcctgaga

SEQ ID NO: 1983918 - DNA, 25 bp, Homo sapien
tgggcatggtggctcgcgccagtag

SEQ ID NO: 1983919 - DNA, 25 bp, Homo sapien
ccagctacttgggaggctgaggtgg

SEQ ID NO: 1983920 - DNA, 25 bp, Homo sapien
ggttgaggctgcagtgagccatgat

SEQ ID NO: 1983921 - DNA, 25 bp, Homo sapien
ggccccgcattcttaatgttggaaa

SEQ ID NO: 1983922 - DNA, 25 bp, Homo sapien
tgcactgtgaagtagtgacctgcct

SEQ ID NO: 1983923 - DNA, 25 bp, Homo sapien
tggaaagttcccagccacagacagg

SEQ ID NO: 1983924 - DNA, 25 bp, Homo sapien
tctggctttaggcttgaggttgaac

SEQ ID NO: 1983925 - DNA, 25 bp, Homo sapien
tgccaggtccggagcgcgggggcgg

SEQ ID NO: 1983926 - DNA, 25 bp, Homo sapien
ctgccaggtccggagcgcgggggcg

SEQ ID NO: 1983927 - DNA, 25 bp, Homo sapien
ctgcggctgcgagccgagagctggc

SEQ ID NO: 1983928 - DNA, 25 bp, Homo sapien
gcgctgcggctgcgagccgagagct

SEQ ID NO: 1983929 - DNA, 25 bp, Homo sapien
cctctggtcgctccctgcgtccccc

SEQ ID NO: 1983930 - DNA, 25 bp, Homo sapien
tgcctctggtcgctccctgcgtccc

SEQ ID NO: 1983931 - DNA, 25 bp, Homo sapien
gcctctggtcgctccctgcgtcccc

SEQ ID NO: 1983932 - DNA, 25 bp, Homo sapien
gctaggcgctactgcaatgactgga

SEQ ID NO: 1983933 - DNA, 25 bp, Homo sapien
ccagagctgcttagtcgcgtgttaa

SEQ ID NO: 1983934 - DNA, 25 bp, Homo sapien
tatgatcgcccacgtgaacaaggca

SEQ ID NO: 1983935 - DNA, 25 bp, Homo sapien
taatggttgacgaggacaccgtccg

SEQ ID NO: 1983936 - DNA, 25 bp, Homo sapien
gtccatttggggtcatctatatcgt

SEQ ID NO: 1983937 - DNA, 25 bp, Homo sapien
tgaaagatggctgcaaggaaggggg

SEQ ID NO: 1983938 - DNA, 25 bp, Homo sapien
agatggctgcaaggaagggggaaaa

SEQ ID NO: 1983939 - DNA, 25 bp, Homo sapien
ctgaaagatggctgcaaggaagggg

SEQ ID NO: 1983940 - DNA, 25 bp, Homo sapien
aaagatggctgcaaggaagggggaa

SEQ ID NO: 1983941 - DNA, 25 bp, Homo sapien
gactggaactatcaattaatgtatg

SEQ ID NO: 1983942 - DNA, 25 bp, Homo sapien
gcccatgtgtttaatcattgagaaa

SEQ ID NO: 1983943 - DNA, 25 bp, Homo sapien
ttaaaagcattggattagaaagact

SEQ ID NO: 1983944 - DNA, 25 bp, Homo sapien
cagaagtcaacaatatagttcatac

SEQ ID NO: 1983945 - DNA, 25 bp, Homo sapien
ctgggtattcattcggcagcatcac

SEQ ID NO: 1983946 - DNA, 25 bp, Homo sapien
ttcaactggtagataggtggagctg

SEQ ID NO: 1983947 - DNA, 25 bp, Homo sapien
caactggtagataggtggagctgta

SEQ ID NO: 1983948 - DNA, 25 bp, Homo sapien
tcaactggtagataggtggagctgt

SEQ ID NO: 1983949 - DNA, 25 bp, Homo sapien
aactggtagataggtggagctgtac

SEQ ID NO: 1983950 - DNA, 25 bp, Homo sapien
taagaagatggttcgtcaacatcaa

SEQ ID NO: 1983951 - DNA, 25 bp, Homo sapien
aagatggttcgtcaacatcaacggg

SEQ ID NO: 1983952 - DNA, 25 bp, Homo sapien
agaagatggttcgtcaacatcaacg

SEQ ID NO: 1983953 - DNA, 25 bp, Homo sapien
ctaagaagatggttcgtcaacatca

SEQ ID NO: 1983954 - DNA, 25 bp, Homo sapien
aatcactggtctacaatcagaccgg

SEQ ID NO: 1983955 - DNA, 25 bp, Homo sapien
cactggtctacaatcagaccggcct

SEQ ID NO: 1983956 - DNA, 25 bp, Homo sapien
ccaatcactggtctacaatcagacc

SEQ ID NO: 1983957 - DNA, 25 bp, Homo sapien
caattactggttataaaccaatcac

SEQ ID NO: 1983958 - DNA, 25 bp, Homo sapien
caaggctatttgataaatccgcacg

SEQ ID NO: 1983959 - DNA, 25 bp, Homo sapien
ggctatttgataaatccgcacgttc

SEQ ID NO: 1983960 - DNA, 25 bp, Homo sapien
cctcaaggctatttgataaatccgc

SEQ ID NO: 1983961 - DNA, 25 bp, Homo sapien
tatttgataaatccgcacgttcttg

SEQ ID NO: 1983962 - DNA, 25 bp, Homo sapien
tgagatttttgtataagaacatctc

SEQ ID NO: 1983963 - DNA, 25 bp, Homo sapien
tgtataagaacatctcttattttct

SEQ ID NO: 1983964 - DNA, 25 bp, Homo sapien
caggtaaagaatactttcaccgata

SEQ ID NO: 1983965 - DNA, 25 bp, Homo sapien
tattttctccacccacaggtaaaga

SEQ ID NO: 1983966 - DNA, 25 bp, Homo sapien
gacaagaccctagacagaatgggac

SEQ ID NO: 1983967 - DNA, 25 bp, Homo sapien
tgggacagcccaaggtttcataaca

SEQ ID NO: 1983968 - DNA, 25 bp, Homo sapien
caatgtagaatcctagacaagaccc

SEQ ID NO: 1983969 - DNA, 25 bp, Homo sapien
tacagtggagacatttggcgaacac

SEQ ID NO: 1983970 - DNA, 25 bp, Homo sapien
tcaaaatccaatgctttaagcgaac

SEQ ID NO: 1983971 - DNA, 25 bp, Homo sapien
taagcgaactttccggctgacatgc

SEQ ID NO: 1983972 - DNA, 25 bp, Homo sapien
aatgctttaagcgaactttccggct

SEQ ID NO: 1983973 - DNA, 25 bp, Homo sapien
tccaatgctttaagcgaactttccg

SEQ ID NO: 1983974 - DNA, 25 bp, Homo sapien
gctactactacctgcctcacttagg

SEQ ID NO: 1983975 - DNA, 25 bp, Homo sapien
gacttaatcgtcctggctactacta

SEQ ID NO: 1983976 - DNA, 25 bp, Homo sapien
tatgaactactgaccaattgatagt

SEQ ID NO: 1983977 - DNA, 25 bp, Homo sapien
gatgttttacaccttccctctgata

SEQ ID NO: 1983978 - DNA, 25 bp, Homo sapien
agtacttcttcggtctgtaatagga

SEQ ID NO: 1983979 - DNA, 25 bp, Homo sapien
gtacttcttcggtctgtaataggaa

SEQ ID NO: 1983980 - DNA, 25 bp, Homo sapien
tcaatcggaggtaattcttctactt

SEQ ID NO: 1983981 - DNA, 25 bp, Homo sapien
catgatcaatcggaggtaattcttc

SEQ ID NO: 1983982 - DNA, 25 bp, Homo sapien
ttgtgggtggcactagctattttct

SEQ ID NO: 1983983 - DNA, 25 bp, Homo sapien
agatgttgtgggtggcactagctat

SEQ ID NO: 1983984 - DNA, 25 bp, Homo sapien
catagatgttgtgggtggcactagc

SEQ ID NO: 1983985 - DNA, 25 bp, Homo sapien
taggcatagatgttgtgggtggcac

SEQ ID NO: 1983986 - DNA, 25 bp, Homo sapien
tcagttatgttaccttacagcagtc

SEQ ID NO: 1983987 - DNA, 25 bp, Homo sapien
tcttagggccctaccaatggtatca

SEQ ID NO: 1983988 - DNA, 25 bp, Homo sapien
cagttacagtatgccatctggtgga

SEQ ID NO: 1983989 - DNA, 25 bp, Homo sapien
taagcttggcaaataagtgctagag

SEQ ID NO: 1983990 - DNA, 25 bp, Homo sapien
caatcctgtaagaaggtctgtttat

SEQ ID NO: 1983991 - DNA, 25 bp, Homo sapien
ccatcatcctcacaatcctgtaaga

SEQ ID NO: 1983992 - DNA, 25 bp, Homo sapien
catcatcctcacaatcctgtaagaa

SEQ ID NO: 1983993 - DNA, 25 bp, Homo sapien
gaggcatcaatatccctggtgctat

SEQ ID NO: 1983994 - DNA, 25 bp, Homo sapien
taggcagcattttaccactaggcca

SEQ ID NO: 1983995 - DNA, 25 bp, Homo sapien
tgcccttaatgtgaagcccaccagt

SEQ ID NO: 1983996 - DNA, 25 bp, Homo sapien
ccagaacagctaagtttaggcagca

SEQ ID NO: 1983997 - DNA, 25 bp, Homo sapien
tgatactaccaccatgacattcttc

SEQ ID NO: 1983998 - DNA, 25 bp, Homo sapien
aaagcgatctggtcctagcagaatc

SEQ ID NO: 1983999 - DNA, 25 bp, Homo sapien
cacagttgttgatatgtttaaagcg

SEQ ID NO: 1984000 - DNA, 25 bp, Homo sapien
cgtgatactaccaccatgacattct

SEQ ID NO: 1984001 - DNA, 25 bp, Homo sapien
taagtgatcggtccaaagtcacgtg

SEQ ID NO: 1984002 - DNA, 25 bp, Homo sapien
cactgtttagagtctaggtctccag

SEQ ID NO: 1984003 - DNA, 25 bp, Homo sapien
ccaggcagtgatgagaaattctcta

SEQ ID NO: 1984004 - DNA, 25 bp, Homo sapien
tctagatgtagtacgaagagccact

SEQ ID NO: 1984005 - DNA, 25 bp, Homo sapien
ttcccaaagccttagatgactcctc

SEQ ID NO: 1984006 - DNA, 25 bp, Homo sapien
ctttcccaaagccttagatgactcc

SEQ ID NO: 1984007 - DNA, 25 bp, Homo sapien
tttcccaaagccttagatgactcct

SEQ ID NO: 1984008 - DNA, 25 bp, Homo sapien
taatgttcattcctcttcttgtctt

SEQ ID NO: 1984009 - DNA, 25 bp, Homo sapien
ttaatgttcattcctcttcttgtct

SEQ ID NO: 1984010 - DNA, 25 bp, Homo sapien
gttcattcctcttcttgtcttttct

SEQ ID NO: 1984011 - DNA, 25 bp, Homo sapien
cattcctcttcttgtcttttcttac

SEQ ID NO: 1984012 - DNA, 25 bp, Homo sapien
gacagttaattcaggtactgccctg

SEQ ID NO: 1984013 - DNA, 25 bp, Homo sapien
gaatctcgatgacaagaaatcaggt

SEQ ID NO: 1984014 - DNA, 25 bp, Homo sapien
taagcagtcaaggatactctctctg

SEQ ID NO: 1984015 - DNA, 25 bp, Homo sapien
gctgaactggctgacttaagcagtc

SEQ ID NO: 1984016 - DNA, 25 bp, Homo sapien
ttaatccattactcaatgatgaaca

SEQ ID NO: 1984017 - DNA, 25 bp, Homo sapien
actgcagatggatactcctggattt

SEQ ID NO: 1984018 - DNA, 25 bp, Homo sapien
tttcacttaatccattactcaatga

SEQ ID NO: 1984019 - DNA, 25 bp, Homo sapien
aactgcagatggatactcctggatt

SEQ ID NO: 1984020 - DNA, 25 bp, Homo sapien
aaaaaggtcattctctgatggctcc

SEQ ID NO: 1984021 - DNA, 25 bp, Homo sapien
aaatcttggaactgagaaagccgtc

SEQ ID NO: 1984022 - DNA, 25 bp, Homo sapien
gaatgtcccatttgccacagcctaa

SEQ ID NO: 1984023 - DNA, 25 bp, Homo sapien
ggtgtaatagcacatgcctgtctgt

SEQ ID NO: 1984024 - DNA, 25 bp, Homo sapien
tgatataattctcttcagaaaggct

SEQ ID NO: 1984025 - DNA, 25 bp, Homo sapien
tccaaacagcatccgcttcatacta

SEQ ID NO: 1984026 - DNA, 25 bp, Homo sapien
taatggctatctctggatagtggaa

SEQ ID NO: 1984027 - DNA, 25 bp, Homo sapien
catacttttgatgcagcttctgcaa

SEQ ID NO: 1984028 - DNA, 25 bp, Homo sapien
aatgatgaagaaggtcaaattagca

SEQ ID NO: 1984029 - DNA, 25 bp, Homo sapien
agtatgttttctaatcacataccta

SEQ ID NO: 1984030 - DNA, 25 bp, Homo sapien
tagcaaattaatccagccagacaat

SEQ ID NO: 1984031 - DNA, 25 bp, Homo sapien
gccagacaattctgacaagtatgtt

SEQ ID NO: 1984032 - DNA, 25 bp, Homo sapien
aaattgattgtgctattagtatctg

SEQ ID NO: 1984033 - DNA, 25 bp, Homo sapien
gtaacacgagtgcttagtgataaat

SEQ ID NO: 1984034 - DNA, 25 bp, Homo sapien
cgagtgcttagtgataaattgattg

SEQ ID NO: 1984035 - DNA, 25 bp, Homo sapien
aacacgagtgcttagtgataaattg

SEQ ID NO: 1984036 - DNA, 25 bp, Homo sapien
gtcagagatggccaagttaagaaaa

SEQ ID NO: 1984037 - DNA, 25 bp, Homo sapien
ataactacttcgatgtctaaggttt

SEQ ID NO: 1984038 - DNA, 25 bp, Homo sapien
aataactacttcgatgtctaaggtt

SEQ ID NO: 1984039 - DNA, 25 bp, Homo sapien
gtccggtatagctagtactagaatt

SEQ ID NO: 1984040 - DNA, 25 bp, Homo sapien
tagattctccgcagagggccagttc

SEQ ID NO: 1984041 - DNA, 25 bp, Homo sapien
caacttgggtgccacaaatttagat

SEQ ID NO: 1984042 - DNA, 25 bp, Homo sapien
gcctgagaaattagcaacttgggtg

SEQ ID NO: 1984043 - DNA, 25 bp, Homo sapien
cagtagtgagccaaaatacacagat

SEQ ID NO: 1984044 - DNA, 25 bp, Homo sapien
aaaatcccattcgaacagcgtgtga

SEQ ID NO: 1984045 - DNA, 25 bp, Homo sapien
cagatgctgtacataacagatagtc

SEQ ID NO: 1984046 - DNA, 25 bp, Homo sapien
gtatcgatcatagctgatgaggaca

SEQ ID NO: 1984047 - DNA, 25 bp, Homo sapien
accacagtattgctcaatcttcagg

SEQ ID NO: 1984048 - DNA, 25 bp, Homo sapien
cacagtattgctcaatcttcaggct

SEQ ID NO: 1984049 - DNA, 25 bp, Homo sapien
tattgctcaatcttcaggctgagca

SEQ ID NO: 1984050 - DNA, 25 bp, Homo sapien
cagtattgctcaatcttcaggctga

SEQ ID NO: 1984051 - DNA, 25 bp, Homo sapien
ccaaacggccaccatcagagtaaca

SEQ ID NO: 1984052 - DNA, 25 bp, Homo sapien
ctctgaaactagaatcattggccca

SEQ ID NO: 1984053 - DNA, 25 bp, Homo sapien
tcttcaagaccccagtatgttgagt

SEQ ID NO: 1984054 - DNA, 25 bp, Homo sapien
tcattggcccattcactaagaaggc

SEQ ID NO: 1984055 - DNA, 25 bp, Homo sapien
aaaaaatccaggttcacattcacta

SEQ ID NO: 1984056 - DNA, 25 bp, Homo sapien
aaaatccaggttcacattcactacc

SEQ ID NO: 1984057 - DNA, 25 bp, Homo sapien
gaaaaaaatccaggttcacattcac

SEQ ID NO: 1984058 - DNA, 25 bp, Homo sapien
cgaaaaaaatccaggttcacattca

SEQ ID NO: 1984059 - DNA, 25 bp, Homo sapien
gcttccacaggctccaataaatatt

SEQ ID NO: 1984060 - DNA, 25 bp, Homo sapien
catgttgaaataagcgactaagatg

SEQ ID NO: 1984061 - DNA, 25 bp, Homo sapien
gagatgatcacgcttccacaggctc

SEQ ID NO: 1984062 - DNA, 25 bp, Homo sapien
gatgactgggatcacgaattccaag

SEQ ID NO: 1984063 - DNA, 25 bp, Homo sapien
cacagatgttggaagagacagcagt

SEQ ID NO: 1984064 - DNA, 25 bp, Homo sapien
cagatgttggaagagacagcagtca

SEQ ID NO: 1984065 - DNA, 25 bp, Homo sapien
ccacagatgttggaagagacagcag

SEQ ID NO: 1984066 - DNA, 25 bp, Homo sapien
tccacagatgttggaagagacagca

SEQ ID NO: 1984067 - DNA, 25 bp, Homo sapien
gtattgctattcatcttggttcttg

SEQ ID NO: 1984068 - DNA, 25 bp, Homo sapien
aggatgcaggaacttctgtcgatgc

SEQ ID NO: 1984069 - DNA, 25 bp, Homo sapien
aaaggatgcaggaacttctgtcgat

SEQ ID NO: 1984070 - DNA, 25 bp, Homo sapien
ccattttggaagcaattgtattgct

SEQ ID NO: 1984071 - DNA, 25 bp, Homo sapien
tgaacagagaatatggagcccagca

SEQ ID NO: 1984072 - DNA, 25 bp, Homo sapien
ttaagaagatactgaccgactgtgt

SEQ ID NO: 1984073 - DNA, 25 bp, Homo sapien
ggctaatctcctggctctaagcagt

SEQ ID NO: 1984074 - DNA, 25 bp, Homo sapien
caaaaacccctaagagaatggccag

SEQ ID NO: 1984075 - DNA, 25 bp, Homo sapien
tatgattgcattactacgctccagc

SEQ ID NO: 1984076 - DNA, 25 bp, Homo sapien
tgtgaatcgtcagcaaagtataacc

SEQ ID NO: 1984077 - DNA, 25 bp, Homo sapien
gcggcgccacaaccagctacttgtt

SEQ ID NO: 1984078 - DNA, 25 bp, Homo sapien
caccaaacggtgtaagaactgcaaa

SEQ ID NO: 1984079 - DNA, 25 bp, Homo sapien
ttttacttgtagagtaggggttgca

SEQ ID NO: 1984080 - DNA, 25 bp, Homo sapien
ttacttgtagagtaggggttgcaat

SEQ ID NO: 1984081 - DNA, 25 bp, Homo sapien
gggagaaaccggcacatgaaaaggc

SEQ ID NO: 1984082 - DNA, 25 bp, Homo sapien
gggttgcaatctggatgtcaaaagg

SEQ ID NO: 1984083 - DNA, 25 bp, Homo sapien
gctgggttccttgcatcatggacaa

SEQ ID NO: 1984084 - DNA, 25 bp, Homo sapien
ccatctgggttgtcaaaatgctggg

SEQ ID NO: 1984085 - DNA, 25 bp, Homo sapien
tggaccttctgggtgggaagcctca

SEQ ID NO: 1984086 - DNA, 25 bp, Homo sapien
gaatgcagtggttatgcaggcctcc

SEQ ID NO: 1984087 - DNA, 25 bp, Homo sapien
gcagcccacaaaaccccatgatttc

SEQ ID NO: 1984088 - DNA, 25 bp, Homo sapien
tccacaatcatttgacccatgtcca

SEQ ID NO: 1984089 - DNA, 25 bp, Homo sapien
attgaaagctaagcggccctggcag

SEQ ID NO: 1984090 - DNA, 25 bp, Homo sapien
agctaaattgaaagctaagcggccc

SEQ ID NO: 1984091 - DNA, 25 bp, Homo sapien
gagctgtggcagcttacttattagg

SEQ ID NO: 1984092 - DNA, 25 bp, Homo sapien
gagaaataattaggctctgccagca

SEQ ID NO: 1984093 - DNA, 25 bp, Homo sapien
cactggctggttatagagggacatg

SEQ ID NO: 1984094 - DNA, 25 bp, Homo sapien
ccaggacctgtctgctctacgtttc

SEQ ID NO: 1984095 - DNA, 25 bp, Homo sapien
accttgcagggcaccagaaagttca

SEQ ID NO: 1984096 - DNA, 25 bp, Homo sapien
gaaatcctacagcagaaatgtccac

SEQ ID NO: 1984097 - DNA, 25 bp, Homo sapien
gttcacaacacagaaaggttttatg

SEQ ID NO: 1984098 - DNA, 25 bp, Homo sapien
actctggagcaagcccttatgtgta

SEQ ID NO: 1984099 - DNA, 25 bp, Homo sapien
tttgctgtcatatattagactttat

SEQ ID NO: 1984100 - DNA, 25 bp, Homo sapien
gtcacactcttttgctgtcatatat

SEQ ID NO: 1984101 - DNA, 25 bp, Homo sapien
taaatgtaccattcgattattattg

SEQ ID NO: 1984102 - DNA, 25 bp, Homo sapien
gtaggtgcatagtaggtatatacat

SEQ ID NO: 1984103 - DNA, 25 bp, Homo sapien
cctgctgagccatcgtgtatcctta

SEQ ID NO: 1984104 - DNA, 25 bp, Homo sapien
tctgttgtcgttggaatcagaagcc

SEQ ID NO: 1984105 - DNA, 25 bp, Homo sapien
cgtgtatccttatttgggtctggtc

SEQ ID NO: 1984106 - DNA, 25 bp, Homo sapien
taacatatgattgtccaaccaaagg

SEQ ID NO: 1984107 - DNA, 25 bp, Homo sapien
gaaaatcctgcatcacggacttcag

SEQ ID NO: 1984108 - DNA, 25 bp, Homo sapien
ttcgcaagcggtggagtgaaaatcc

SEQ ID NO: 1984109 - DNA, 25 bp, Homo sapien
gtggcgatggcagcgtggaacagca

SEQ ID NO: 1984110 - DNA, 25 bp, Homo sapien
cccaagacggtgtgtgcgggagggc

SEQ ID NO: 1984111 - DNA, 25 bp, Homo sapien
ttacagactttgtgctgatgcccca

SEQ ID NO: 1984112 - DNA, 25 bp, Homo sapien
ttcaagcctttgaagcccacaccag

SEQ ID NO: 1984113 - DNA, 25 bp, Homo sapien
tctgccactgggatatccttcaagc

SEQ ID NO: 1984114 - DNA, 25 bp, Homo sapien
agccttggggactttacagactttg

SEQ ID NO: 1984115 - DNA, 25 bp, Homo sapien
catatggcttgaggttttgtttgca

SEQ ID NO: 1984116 - DNA, 25 bp, Homo sapien
tcatatggcttgaggttttgtttgc

SEQ ID NO: 1984117 - DNA, 25 bp, Homo sapien
tatggcttgaggttttgtttgcatt

SEQ ID NO: 1984118 - DNA, 25 bp, Homo sapien
atggcttgaggttttgtttgcatta

SEQ ID NO: 1984119 - DNA, 25 bp, Homo sapien
gttccgtggcctgaatgtattctca

SEQ ID NO: 1984120 - DNA, 25 bp, Homo sapien
cttattccgggagtgaatgctgtga

SEQ ID NO: 1984121 - DNA, 25 bp, Homo sapien
tccaacttcatagtagcagctagcc

SEQ ID NO: 1984122 - DNA, 25 bp, Homo sapien
gggcctctctgaaatgtacagtcac

SEQ ID NO: 1984123 - DNA, 25 bp, Homo sapien
aaattgataaacctggggcaaggag

SEQ ID NO: 1984124 - DNA, 25 bp, Homo sapien
ggttttctgcatatagttcagcaag

SEQ ID NO: 1984125 - DNA, 25 bp, Homo sapien
ttctgcatatagttcagcaagagct

SEQ ID NO: 1984126 - DNA, 25 bp, Homo sapien
cagtgaaattgataaacctggggca

SEQ ID NO: 1984127 - DNA, 25 bp, Homo sapien
tggcaaagtagttgccaactgggtt

SEQ ID NO: 1984128 - DNA, 25 bp, Homo sapien
tgccaactgggtttaaagtgatttg

SEQ ID NO: 1984129 - DNA, 25 bp, Homo sapien
ccataattggcaaagtagttgccaa

SEQ ID NO: 1984130 - DNA, 25 bp, Homo sapien
tagttgccaactgggtttaaagtga

SEQ ID NO: 1984131 - DNA, 25 bp, Homo sapien
cttgcctttcatccagcctgcagtg

SEQ ID NO: 1984132 - DNA, 25 bp, Homo sapien
ttgcctttcatccagcctgcagtgt

SEQ ID NO: 1984133 - DNA, 25 bp, Homo sapien
ctttcatccagcctgcagtgtgact

SEQ ID NO: 1984134 - DNA, 25 bp, Homo sapien
tcatccagcctgcagtgtgactcat

SEQ ID NO: 1984135 - DNA, 25 bp, Homo sapien
catccctttggtgcaactgctgaaa

SEQ ID NO: 1984136 - DNA, 25 bp, Homo sapien
gtaaatgccacatgacaacatccct

SEQ ID NO: 1984137 - DNA, 25 bp, Homo sapien
ggaagcatcccaaatgagcgcaggg

SEQ ID NO: 1984138 - DNA, 25 bp, Homo sapien
tgagcgcagggttccctccagtggt

SEQ ID NO: 1984139 - DNA, 25 bp, Homo sapien
cggaagcaaacgcaagctggtaggt

SEQ ID NO: 1984140 - DNA, 25 bp, Homo sapien
ggagcagaggacaattcacactgcc

SEQ ID NO: 1984141 - DNA, 25 bp, Homo sapien
tcacactgcccagacatgtcggaag

SEQ ID NO: 1984142 - DNA, 25 bp, Homo sapien
tgctactaactttggagaccaggga

SEQ ID NO: 1984143 - DNA, 25 bp, Homo sapien
ccaatgatgaaagccgattcacagg

SEQ ID NO: 1984144 - DNA, 25 bp, Homo sapien
tgtggtgcccagacgaacaagtaga

SEQ ID NO: 1984145 - DNA, 25 bp, Homo sapien
cacgccttcacggtggtgggcagct

SEQ ID NO: 1984146 - DNA, 25 bp, Homo sapien
tgtcctttattacccgagagtggcg

SEQ ID NO: 1984147 - DNA, 25 bp, Homo sapien
cttattaatgctctgctcccttgga

SEQ ID NO: 1984148 - DNA, 25 bp, Homo sapien
ttcttgtttattatcactgaccatt

SEQ ID NO: 1984149 - DNA, 25 bp, Homo sapien
tgctcccttggaaatccctccttct

SEQ ID NO: 1984150 - DNA, 25 bp, Homo sapien
tattatcactgaccatttgaagatg

SEQ ID NO: 1984151 - DNA, 25 bp, Homo sapien
gacttgcattaatcagtcctgctgc

SEQ ID NO: 1984152 - DNA, 25 bp, Homo sapien
actgggacgcagtttgtattccaca

SEQ ID NO: 1984153 - DNA, 25 bp, Homo sapien
tagcaggttcttccatatccataat

SEQ ID NO: 1984154 - DNA, 25 bp, Homo sapien
taccctcagaagacaattgacttgc

SEQ ID NO: 1984155 - DNA, 25 bp, Homo sapien
gtctttgtaacccattatccccgca

SEQ ID NO: 1984156 - DNA, 25 bp, Homo sapien
catatcatcagagatcactggaggg

SEQ ID NO: 1984157 - DNA, 25 bp, Homo sapien
gcttgctcccctaattctattcctg

SEQ ID NO: 1984158 - DNA, 25 bp, Homo sapien
tattcctgaaactggaacacccctc

SEQ ID NO: 1984159 - DNA, 25 bp, Homo sapien
tctcattgtagcttcttgcacaagt

SEQ ID NO: 1984160 - DNA, 25 bp, Homo sapien
tacatgcttccgaagtgcttcctgg

SEQ ID NO: 1984161 - DNA, 25 bp, Homo sapien
ttccagctttatgggtgctagggcc

SEQ ID NO: 1984162 - DNA, 25 bp, Homo sapien
atgaagctctcagcgctagcacaga

SEQ ID NO: 1984163 - DNA, 25 bp, Homo sapien
aagtgaccgcatctggaagcatcgc

SEQ ID NO: 1984164 - DNA, 25 bp, Homo sapien
tctgttaccacagcgatgaggtgct

SEQ ID NO: 1984165 - DNA, 25 bp, Homo sapien
tctcggttaactgcaaaaggacaag

SEQ ID NO: 1984166 - DNA, 25 bp, Homo sapien
aagtctctgaggcaaaatccggaag

SEQ ID NO: 1984167 - DNA, 25 bp, Homo sapien
cacccagatgtgattctacatttct

SEQ ID NO: 1984168 - DNA, 25 bp, Homo sapien
ctgtctgtaggtaataatgcagccg

SEQ ID NO: 1984169 - DNA, 25 bp, Homo sapien
tgcagctgttctggtgggagtttca

SEQ ID NO: 1984170 - DNA, 25 bp, Homo sapien
gcgtcacacacccagatgtgattct

SEQ ID NO: 1984171 - DNA, 25 bp, Homo sapien
aggaatgttcgatgattctgcttgc

SEQ ID NO: 1984172 - DNA, 25 bp, Homo sapien
cccagtgttgatcatgtggaactcg

SEQ ID NO: 1984173 - DNA, 25 bp, Homo sapien
tcgtacacaggagccccatcaaatg

SEQ ID NO: 1984174 - DNA, 25 bp, Homo sapien
aatgttcgatgattctgcttgcagg

SEQ ID NO: 1984175 - DNA, 25 bp, Homo sapien
tcagaatatatgtactcacgaagta

SEQ ID NO: 1984176 - DNA, 25 bp, Homo sapien
cccaactacaactttcttcagaata

SEQ ID NO: 1984177 - DNA, 25 bp, Homo sapien
catttggatgctcacagatcttcac

SEQ ID NO: 1984178 - DNA, 25 bp, Homo sapien
cacgaagtagtgcagattagccata

SEQ ID NO: 1984179 - DNA, 25 bp, Homo sapien
atggtacagttcagctttattacag

SEQ ID NO: 1984180 - DNA, 25 bp, Homo sapien
cagcagtgccaatgttataccatat

SEQ ID NO: 1984181 - DNA, 25 bp, Homo sapien
tataccatatcacagtatgaccatg

SEQ ID NO: 1984182 - DNA, 25 bp, Homo sapien
gctttattacagaacaaatcactaa

SEQ ID NO: 1984183 - DNA, 25 bp, Homo sapien
cgcagaatggaccacacaaatcctg

SEQ ID NO: 1984184 - DNA, 25 bp, Homo sapien
tcctgtgactccactcaagactcca

SEQ ID NO: 1984185 - DNA, 25 bp, Homo sapien
gactccactcaagactccatcatca

SEQ ID NO: 1984186 - DNA, 25 bp, Homo sapien
ctatgaccgcagaatggaccacaca

SEQ ID NO: 1984187 - DNA, 25 bp, Homo sapien
tttcggttcaccagacagcagctgc

SEQ ID NO: 1984188 - DNA, 25 bp, Homo sapien
cccgtttcggttcaccagacagcag

SEQ ID NO: 1984189 - DNA, 25 bp, Homo sapien
gaatgccccgtttcggttcaccaga

SEQ ID NO: 1984190 - DNA, 25 bp, Homo sapien
tgtgaatgccccgtttcggttcacc

SEQ ID NO: 1984191 - DNA, 25 bp, Homo sapien
cttggttttgaagttatgccatcca

SEQ ID NO: 1984192 - DNA, 25 bp, Homo sapien
ggttttgaagttatgccatccaaga

SEQ ID NO: 1984193 - DNA, 25 bp, Homo sapien
tggttttgaagttatgccatccaag

SEQ ID NO: 1984194 - DNA, 25 bp, Homo sapien
gttttgaagttatgccatccaagat

SEQ ID NO: 1984195 - DNA, 25 bp, Homo sapien
cacagctgacgtgataaggatgctg

SEQ ID NO: 1984196 - DNA, 25 bp, Homo sapien
ccgggagagcggtagaatcctttat

SEQ ID NO: 1984197 - DNA, 25 bp, Homo sapien
gaatcctttatacacttcacagtct

SEQ ID NO: 1984198 - DNA, 25 bp, Homo sapien
ggagagcggtagaatcctttataca

SEQ ID NO: 1984199 - DNA, 25 bp, Homo sapien
cctttatacacttcacagtctcaca

SEQ ID NO: 1984200 - DNA, 25 bp, Homo sapien
ccttgcctgtaagtccaggacagag

SEQ ID NO: 1984201 - DNA, 25 bp, Homo sapien
tcttcccttgcctgtaagtccagga

SEQ ID NO: 1984202 - DNA, 25 bp, Homo sapien
catcaaaaccaacatgcatcccatg

SEQ ID NO: 1984203 - DNA, 25 bp, Homo sapien
ggcatcaaaaccaacatgcatccca

SEQ ID NO: 1984204 - DNA, 25 bp, Homo sapien
tggcaaaaggtagcacatggcaaga

SEQ ID NO: 1984205 - DNA, 25 bp, Homo sapien
ttcttgccccttcataacatggcaa

SEQ ID NO: 1984206 - DNA, 25 bp, Homo sapien
caaaaggtagcacatggcaagaggg

SEQ ID NO: 1984207 - DNA, 25 bp, Homo sapien
ccttcataacatggcaaaaggtagc

SEQ ID NO: 1984208 - DNA, 25 bp, Homo sapien
tctatttgccactcaatcctcacca

SEQ ID NO: 1984209 - DNA, 25 bp, Homo sapien
ctctatttgccactcaatcctcacc

SEQ ID NO: 1984210 - DNA, 25 bp, Homo sapien
ctatttgccactcaatcctcaccat

SEQ ID NO: 1984211 - DNA, 25 bp, Homo sapien
ttggcttgtgaagggatatatttct

SEQ ID NO: 1984212 - DNA, 25 bp, Homo sapien
gacatattaaataccagagcctggg

SEQ ID NO: 1984213 - DNA, 25 bp, Homo sapien
ggacagcccgtaaatcagcttgtag

SEQ ID NO: 1984214 - DNA, 25 bp, Homo sapien
tcaggaaattggaaacgccccagaa

SEQ ID NO: 1984215 - DNA, 25 bp, Homo sapien
ttaccattcacttctactccacgga

SEQ ID NO: 1984216 - DNA, 25 bp, Homo sapien
tcctcaggctttcagactcaggctg

SEQ ID NO: 1984217 - DNA, 25 bp, Homo sapien
cagcttgccaaccagagatcttggg

SEQ ID NO: 1984218 - DNA, 25 bp, Homo sapien
ggaaatgctaccctcttgaaggcag

SEQ ID NO: 1984219 - DNA, 25 bp, Homo sapien
taatgctccagcaaagaagtgacac

SEQ ID NO: 1984220 - DNA, 25 bp, Homo sapien
atgattgtgaaggtagcacaaaaag

SEQ ID NO: 1984221 - DNA, 25 bp, Homo sapien
gaatgattgtgaaggtagcacaaaa

SEQ ID NO: 1984222 - DNA, 25 bp, Homo sapien
gtggaatgattgtgaaggtagcaca

SEQ ID NO: 1984223 - DNA, 25 bp, Homo sapien
gggtggaatgattgtgaaggtagca

SEQ ID NO: 1984224 - DNA, 25 bp, Homo sapien
gatggagccattagaccccagatct

SEQ ID NO: 1984225 - DNA, 25 bp, Homo sapien
atataggtggttatggatggagcca

SEQ ID NO: 1984226 - DNA, 25 bp, Homo sapien
gacagcttccacgtcaacacactgt

SEQ ID NO: 1984227 - DNA, 25 bp, Homo sapien
ttctgagccctgacagcttccacgt

SEQ ID NO: 1984228 - DNA, 25 bp, Homo sapien
tcagggcagaaggaagacctccatg

SEQ ID NO: 1984229 - DNA, 25 bp, Homo sapien
taatttccctatgatcagggcagaa

SEQ ID NO: 1984230 - DNA, 25 bp, Homo sapien
tgatcagggcagaaggaagacctcc

SEQ ID NO: 1984231 - DNA, 25 bp, Homo sapien
gctttaatttccctatgatcagggc

SEQ ID NO: 1984232 - DNA, 25 bp, Homo sapien
acgacaaccataaggaaatagttat

SEQ ID NO: 1984233 - DNA, 25 bp, Homo sapien
ctatcacgacaaccataaggaaata

SEQ ID NO: 1984234 - DNA, 25 bp, Homo sapien
tatcacgacaaccataaggaaatag

SEQ ID NO: 1984235 - DNA, 25 bp, Homo sapien
tcacgacaaccataaggaaatagtt

SEQ ID NO: 1984236 - DNA, 25 bp, Homo sapien
aatcctctcaccgatatccaacatg

SEQ ID NO: 1984237 - DNA, 25 bp, Homo sapien
tctggtttgcctcgtccaatcctct

SEQ ID NO: 1984238 - DNA, 25 bp, Homo sapien
tgctgcttgagagaagcgtgttgct

SEQ ID NO: 1984239 - DNA, 25 bp, Homo sapien
gcgtgttgctaaaaggattatggcc

SEQ ID NO: 1984240 - DNA, 25 bp, Homo sapien
agagttttctcagcttcaaccttct

SEQ ID NO: 1984241 - DNA, 25 bp, Homo sapien
tttctcagcttcaaccttctctgtc

SEQ ID NO: 1984242 - DNA, 25 bp, Homo sapien
gaagagttttctcagcttcaacctt

SEQ ID NO: 1984243 - DNA, 25 bp, Homo sapien
gttttctcagcttcaaccttctctg

SEQ ID NO: 1984244 - DNA, 25 bp, Homo sapien
gcacatctgtatgtccagattccag

SEQ ID NO: 1984245 - DNA, 25 bp, Homo sapien
tgcacatctgtatgtccagattcca

SEQ ID NO: 1984246 - DNA, 25 bp, Homo sapien
gcctgaggcagacaatgacactttg

SEQ ID NO: 1984247 - DNA, 25 bp, Homo sapien
tctggattgcagaacaacgtgtgta

SEQ ID NO: 1984248 - DNA, 25 bp, Homo sapien
ttttggctagtggaatgggtcccat

SEQ ID NO: 1984249 - DNA, 25 bp, Homo sapien
caatgattatattccctcaccaggg

SEQ ID NO: 1984250 - DNA, 25 bp, Homo sapien
ccggatgtgcccaaggagccgtaag

SEQ ID NO: 1984251 - DNA, 25 bp, Homo sapien
cagaaagttcttgcctgtctgaagg

SEQ ID NO: 1984252 - DNA, 25 bp, Homo sapien
ggtttaacatccacccataggtctg

SEQ ID NO: 1984253 - DNA, 25 bp, Homo sapien
gccagcctccaagatttgtggttta

SEQ ID NO: 1984254 - DNA, 25 bp, Homo sapien
gcagaagctggtgaatagtgctccg

SEQ ID NO: 1984255 - DNA, 25 bp, Homo sapien
tcgagggggcgtacaatctgcatta

SEQ ID NO: 1984256 - DNA, 25 bp, Homo sapien
ctgcattacaatatgtgctccgatg

SEQ ID NO: 1984257 - DNA, 25 bp, Homo sapien
ggtgaatagtgctccgactctcgag

SEQ ID NO: 1984258 - DNA, 25 bp, Homo sapien
ttttaaaccagatctgacagcctac

SEQ ID NO: 1984259 - DNA, 25 bp, Homo sapien
aacttcctgtcaaatctcaccagag

SEQ ID NO: 1984260 - DNA, 25 bp, Homo sapien
tctgcctctcatgtccttgatgtag

SEQ ID NO: 1984261 - DNA, 25 bp, Homo sapien
tcaaatctcaccagagacaactgca

SEQ ID NO: 1984262 - DNA, 25 bp, Homo sapien
gccaagatgggcctaatagacatga

SEQ ID NO: 1984263 - DNA, 25 bp, Homo sapien
tccaggctccttgtaagcagtgttc

SEQ ID NO: 1984264 - DNA, 25 bp, Homo sapien
ggaggtttcaatactgctgcctgct

SEQ ID NO: 1984265 - DNA, 25 bp, Homo sapien
tgttctcaatcgtgactgtgcatca

SEQ ID NO: 1984266 - DNA, 25 bp, Homo sapien
ccaaaggctgggctaatctaatgca

SEQ ID NO: 1984267 - DNA, 25 bp, Homo sapien
taagaggcgggagcagagcttttac

SEQ ID NO: 1984268 - DNA, 25 bp, Homo sapien
ccaggatccacatgacagttacaga

SEQ ID NO: 1984269 - DNA, 25 bp, Homo sapien
tctaatgcatcaggttaagaggcgg

SEQ ID NO: 1984270 - DNA, 25 bp, Homo sapien
ggagggtgtggcctcgcttgactcc

SEQ ID NO: 1984271 - DNA, 25 bp, Homo sapien
ggtgtggcctcgcttgactcctcct

SEQ ID NO: 1984272 - DNA, 25 bp, Homo sapien
agggtgtggcctcgcttgactcctc

SEQ ID NO: 1984273 - DNA, 25 bp, Homo sapien
gtggagggtgtggcctcgcttgact

SEQ ID NO: 1984274 - DNA, 25 bp, Homo sapien
ctggctttgactgttcctgcataaa

SEQ ID NO: 1984275 - DNA, 25 bp, Homo sapien
ttgactgttcctgcataaatgaggg

SEQ ID NO: 1984276 - DNA, 25 bp, Homo sapien
gctttgactgttcctgcataaatga

SEQ ID NO: 1984277 - DNA, 25 bp, Homo sapien
tgactgttcctgcataaatgaggga

SEQ ID NO: 1984278 - DNA, 25 bp, Homo sapien
ccacttggcttctgctatatctgag

SEQ ID NO: 1984279 - DNA, 25 bp, Homo sapien
tatatctgagtcactttcggcagct

SEQ ID NO: 1984280 - DNA, 25 bp, Homo sapien
ttctctgtattctccgtgtttctct

SEQ ID NO: 1984281 - DNA, 25 bp, Homo sapien
tgtattctccgtgtttctcttctct

SEQ ID NO: 1984282 - DNA, 25 bp, Homo sapien
taaatgtatactactgagaaggagc

SEQ ID NO: 1984283 - DNA, 25 bp, Homo sapien
gagccccttggtatcaagaagtgtt

SEQ ID NO: 1984284 - DNA, 25 bp, Homo sapien
gcttttctggaccaaataagatccc

SEQ ID NO: 1984285 - DNA, 25 bp, Homo sapien
tttctgagacctgatatctcgagac

SEQ ID NO: 1984286 - DNA, 25 bp, Homo sapien
gagaacgaggttgggctctctccct

SEQ ID NO: 1984287 - DNA, 25 bp, Homo sapien
aaatgttactgctcccctcaaggtg

SEQ ID NO: 1984288 - DNA, 25 bp, Homo sapien
caaatggatgcggttcttgttccca

SEQ ID NO: 1984289 - DNA, 25 bp, Homo sapien
gcactgaactagacccagggtaggg

SEQ ID NO: 1984290 - DNA, 25 bp, Homo sapien
ttgcattgcactttccattggaagg

SEQ ID NO: 1984291 - DNA, 25 bp, Homo sapien
gcattgcactttccattggaagggc

SEQ ID NO: 1984292 - DNA, 25 bp, Homo sapien
tgcattgcactttccattggaaggg

SEQ ID NO: 1984293 - DNA, 25 bp, Homo sapien
cattcaattgtgagggctacacgat

SEQ ID NO: 1984294 - DNA, 25 bp, Homo sapien
ccagtgtgatcacggagcctggaca

SEQ ID NO: 1984295 - DNA, 25 bp, Homo sapien
caaagtccagggacatgaacattca

SEQ ID NO: 1984296 - DNA, 25 bp, Homo sapien
taaccaaattgttgcacccagtgtg

SEQ ID NO: 1984297 - DNA, 25 bp, Homo sapien
taaccatcatcacccatcttggtga

SEQ ID NO: 1984298 - DNA, 25 bp, Homo sapien
ttaaccatcatcacccatcttggtg

SEQ ID NO: 1984299 - DNA, 25 bp, Homo sapien
tctgtcttgtgcttggactgtgagg

SEQ ID NO: 1984300 - DNA, 25 bp, Homo sapien
acaaaagatgggcattgccttacaa

SEQ ID NO: 1984301 - DNA, 25 bp, Homo sapien
gcattgccttacaaacaaaggaact

SEQ ID NO: 1984302 - DNA, 25 bp, Homo sapien
ggaacttttcgtttctgtcttgtgc

SEQ ID NO: 1984303 - DNA, 25 bp, Homo sapien
gtctgcattgaaaaccggccctggc

SEQ ID NO: 1984304 - DNA, 25 bp, Homo sapien
tgccgtggctggaaacatgcgcttc

SEQ ID NO: 1984305 - DNA, 25 bp, Homo sapien
gggaatccttccgatacacagcaag

SEQ ID NO: 1984306 - DNA, 25 bp, Homo sapien
tgaaaagtgatacatgccagccctt

SEQ ID NO: 1984307 - DNA, 25 bp, Homo sapien
ccaggagccctctgccttacaaacc

SEQ ID NO: 1984308 - DNA, 25 bp, Homo sapien
tggcagagtggaacacagtcttccc

SEQ ID NO: 1984309 - DNA, 25 bp, Homo sapien
cccaggagccctctgccttacaaac

SEQ ID NO: 1984310 - DNA, 25 bp, Homo sapien
gcagagtggaacacagtcttcccag

SEQ ID NO: 1984311 - DNA, 25 bp, Homo sapien
tccctggggctatcctccacgagag

SEQ ID NO: 1984312 - DNA, 25 bp, Homo sapien
tgctgtggaacttaagccttctcct

SEQ ID NO: 1984313 - DNA, 25 bp, Homo sapien
tgtggaacttaagccttctcctgtc

SEQ ID NO: 1984314 - DNA, 25 bp, Homo sapien
ttgactgttgcctccgtgctctgtc

SEQ ID NO: 1984315 - DNA, 25 bp, Homo sapien
ggattcaaagcacacgccaaagcta

SEQ ID NO: 1984316 - DNA, 25 bp, Homo sapien
ggtcagccttggtggattcagcaag

SEQ ID NO: 1984317 - DNA, 25 bp, Homo sapien
tgcttttcaccactattgctgccgc

SEQ ID NO: 1984318 - DNA, 25 bp, Homo sapien
gctaggagactcatacttcttgctt

SEQ ID NO: 1984319 - DNA, 25 bp, Homo sapien
cctgtctgttctccggtctggctct

SEQ ID NO: 1984320 - DNA, 25 bp, Homo sapien
tgacactgcctgcatcgtttactgc

SEQ ID NO: 1984321 - DNA, 25 bp, Homo sapien
ggtctggctctctttagcccagaaa

SEQ ID NO: 1984322 - DNA, 25 bp, Homo sapien
ttactgctggaaatcgtcttttctc

SEQ ID NO: 1984323 - DNA, 25 bp, Homo sapien
agagaagtgggtctgagatcctgcc

SEQ ID NO: 1984324 - DNA, 25 bp, Homo sapien
ggggcattgacagtgttcacgtctg

SEQ ID NO: 1984325 - DNA, 25 bp, Homo sapien
tagttggggcattgacagtgttcac

SEQ ID NO: 1984326 - DNA, 25 bp, Homo sapien
tagtagttggggcattgacagtgtt

SEQ ID NO: 1984327 - DNA, 25 bp, Homo sapien
gatccactgcaatttgcatctcacc

SEQ ID NO: 1984328 - DNA, 25 bp, Homo sapien
cactgcaatttgcatctcaccatat

SEQ ID NO: 1984329 - DNA, 25 bp, Homo sapien
ccatactctttgcttcaaccttctc

SEQ ID NO: 1984330 - DNA, 25 bp, Homo sapien
atcttgatccactgcaatttgcatc

SEQ ID NO: 1984331 - DNA, 25 bp, Homo sapien
ctgcttcatctgagaagatcttcat

SEQ ID NO: 1984332 - DNA, 25 bp, Homo sapien
ggctgcttgaagtcttggtttacaa

SEQ ID NO: 1984333 - DNA, 25 bp, Homo sapien
tctggctgcttgaagtcttggttta

SEQ ID NO: 1984334 - DNA, 25 bp, Homo sapien
tgactcaactcagtgtcatctggct

SEQ ID NO: 1984335 - DNA, 25 bp, Homo sapien
tgcttgaagtcttggtttacaataa

SEQ ID NO: 1984336 - DNA, 25 bp, Homo sapien
gtaatgtgaccagggacgcttcact

SEQ ID NO: 1984337 - DNA, 25 bp, Homo sapien
caactcccaaagtaatgtgaccagg

SEQ ID NO: 1984338 - DNA, 25 bp, Homo sapien
gcttcactcgtttcttttctactgc

SEQ ID NO: 1984339 - DNA, 25 bp, Homo sapien
tgtttggcctgctgttaccaactcc

SEQ ID NO: 1984340 - DNA, 25 bp, Homo sapien
acaccgacggtgctttatgaatgat

SEQ ID NO: 1984341 - DNA, 25 bp, Homo sapien
ctacaccgacggtgctttatgaatg

SEQ ID NO: 1984342 - DNA, 25 bp, Homo sapien
ccgacggtgctttatgaatgataat

SEQ ID NO: 1984343 - DNA, 25 bp, Homo sapien
caccgacggtgctttatgaatgata

SEQ ID NO: 1984344 - DNA, 25 bp, Homo sapien
aatggagacagtttacacatataga

SEQ ID NO: 1984345 - DNA, 25 bp, Homo sapien
ggaatggagacagtttacacatata

SEQ ID NO: 1984346 - DNA, 25 bp, Homo sapien
ggagacagtttacacatatagatgt

SEQ ID NO: 1984347 - DNA, 25 bp, Homo sapien
tggagacagtttacacatatagatg

SEQ ID NO: 1984348 - DNA, 25 bp, Homo sapien
agtggcacccattggatttagtaga

SEQ ID NO: 1984349 - DNA, 25 bp, Homo sapien
ggtcaaaaacattggatgctgccca

SEQ ID NO: 1984350 - DNA, 25 bp, Homo sapien
agtgactggtgactttgactttgca

SEQ ID NO: 1984351 - DNA, 25 bp, Homo sapien
ggaaggaatggtcaaaaacattgga

SEQ ID NO: 1984352 - DNA, 25 bp, Homo sapien
gaagagaggccatatgagagcttca

SEQ ID NO: 1984353 - DNA, 25 bp, Homo sapien
tcactcgacagatggtaagtcaggg

SEQ ID NO: 1984354 - DNA, 25 bp, Homo sapien
tctgcttaattgttcctccacatag

SEQ ID NO: 1984355 - DNA, 25 bp, Homo sapien
tcagggaccacattctgcttaattg

SEQ ID NO: 1984356 - DNA, 25 bp, Homo sapien
agcagagttggtgccctgataggag

SEQ ID NO: 1984357 - DNA, 25 bp, Homo sapien
ttggtgccctgataggagccctgct

SEQ ID NO: 1984358 - DNA, 25 bp, Homo sapien
gtgccctgataggagccctgctgct

SEQ ID NO: 1984359 - DNA, 25 bp, Homo sapien
tagattggggtgtaatatcaataac

SEQ ID NO: 1984360 - DNA, 25 bp, Homo sapien
tgcatttgttcagccagcatggcaa

SEQ ID NO: 1984361 - DNA, 25 bp, Homo sapien
tctgctgcatttgttcagccagcat

SEQ ID NO: 1984362 - DNA, 25 bp, Homo sapien
ctgcatttgttcagccagcatggca

SEQ ID NO: 1984363 - DNA, 25 bp, Homo sapien
tgctgcatttgttcagccagcatgg

SEQ ID NO: 1984364 - DNA, 25 bp, Homo sapien
caatccccattgttcctcaggaagc

SEQ ID NO: 1984365 - DNA, 25 bp, Homo sapien
gaagcagccgcgtagttagcaccat

SEQ ID NO: 1984366 - DNA, 25 bp, Homo sapien
gttcctcaggaagcagccgcgtagt

SEQ ID NO: 1984367 - DNA, 25 bp, Homo sapien
catcacagagggtacagtccaatcc

SEQ ID NO: 1984368 - DNA, 25 bp, Homo sapien
cctaattgcaggatactaaagcccc

SEQ ID NO: 1984369 - DNA, 25 bp, Homo sapien
ttgagactatctttggctttcggtg

SEQ ID NO: 1984370 - DNA, 25 bp, Homo sapien
tggctttcggtgaaatgcacttgcc

SEQ ID NO: 1984371 - DNA, 25 bp, Homo sapien
gatagagtccagttctctttgagac

SEQ ID NO: 1984372 - DNA, 25 bp, Homo sapien
tctcctcattcagcacctcggtgag

SEQ ID NO: 1984373 - DNA, 25 bp, Homo sapien
ttctcctcattcagcacctcggtga

SEQ ID NO: 1984374 - DNA, 25 bp, Homo sapien
tgacagtggttaagagatcattctc

SEQ ID NO: 1984375 - DNA, 25 bp, Homo sapien
gtggttaagagatcattctcctcat

SEQ ID NO: 1984376 - DNA, 25 bp, Homo sapien
tggatgtcagcatctagatgcctca

SEQ ID NO: 1984377 - DNA, 25 bp, Homo sapien
cagcatctagatgcctcaggaccag

SEQ ID NO: 1984378 - DNA, 25 bp, Homo sapien
aatccctgttttaggtcctccatga

SEQ ID NO: 1984379 - DNA, 25 bp, Homo sapien
gcatggttaggtgctgcctttctgc

SEQ ID NO: 1984380 - DNA, 25 bp, Homo sapien
cttgaggtaactcccagtcggtctc

SEQ ID NO: 1984381 - DNA, 25 bp, Homo sapien
gtaactcccagtcggtctccagctt

SEQ ID NO: 1984382 - DNA, 25 bp, Homo sapien
gagcattttggtcttgaggtaactc

SEQ ID NO: 1984383 - DNA, 25 bp, Homo sapien
agaaaggagcattttggtcttgagg

SEQ ID NO: 1984384 - DNA, 25 bp, Homo sapien
atgaggcttgctttggcatctgagc

SEQ ID NO: 1984385 - DNA, 25 bp, Homo sapien
tttgctgtaaatctcgctttgggtc

SEQ ID NO: 1984386 - DNA, 25 bp, Homo sapien
gatctgtcccgaggcttcgaatctt

SEQ ID NO: 1984387 - DNA, 25 bp, Homo sapien
tgtgcccctcttcaactgcaatgag

SEQ ID NO: 1984388 - DNA, 25 bp, Homo sapien
cactacgtataagatggtgtggtgc

SEQ ID NO: 1984389 - DNA, 25 bp, Homo sapien
tcatgtttggattctattggccctc

SEQ ID NO: 1984390 - DNA, 25 bp, Homo sapien
gggaggagaggacccctcactgtcc

SEQ ID NO: 1984391 - DNA, 25 bp, Homo sapien
tggaggcggcaccaaacatcgtcta

SEQ ID NO: 1984392 - DNA, 25 bp, Homo sapien
tccccgatgatgacacgggaggttt

SEQ ID NO: 1984393 - DNA, 25 bp, Homo sapien
ggcccagagctccccgatgatgaca

SEQ ID NO: 1984394 - DNA, 25 bp, Homo sapien
agagctccccgatgatgacacggga

SEQ ID NO: 1984395 - DNA, 25 bp, Homo sapien
ccagagctccccgatgatgacacgg

SEQ ID NO: 1984396 - DNA, 25 bp, Homo sapien
tctctctgacgggttcgtggctccc

SEQ ID NO: 1984397 - DNA, 25 bp, Homo sapien
tctgacgggttcgtggctccctgag

SEQ ID NO: 1984398 - DNA, 25 bp, Homo sapien
tgccctctctctgacgggttcgtgg

SEQ ID NO: 1984399 - DNA, 25 bp, Homo sapien
ctggtgccctctctctgacgggttc

SEQ ID NO: 1984400 - DNA, 25 bp, Homo sapien
tgggagattctagcatcatcaaccc

SEQ ID NO: 1984401 - DNA, 25 bp, Homo sapien
gaatcaatcactcccgagagcaaaa

SEQ ID NO: 1984402 - DNA, 25 bp, Homo sapien
agcaaaatccatggcgtgtactctt

SEQ ID NO: 1984403 - DNA, 25 bp, Homo sapien
tcatcaacccttccatgcatgttgg

SEQ ID NO: 1984404 - DNA, 25 bp, Homo sapien
ttaattgcctcccatggtatcactt

SEQ ID NO: 1984405 - DNA, 25 bp, Homo sapien
attgcctcccatggtatcacttcta

SEQ ID NO: 1984406 - DNA, 25 bp, Homo sapien
cctcccatggtatcacttctaaaag

SEQ ID NO: 1984407 - DNA, 25 bp, Homo sapien
tgcctcccatggtatcacttctaaa

SEQ ID NO: 1984408 - DNA, 25 bp, Homo sapien
tggtgccgaggcacttgtttccagg

SEQ ID NO: 1984409 - DNA, 25 bp, Homo sapien
gggttagtgggtcaactgcggctcc

SEQ ID NO: 1984410 - DNA, 25 bp, Homo sapien
gaccaggaaaattcccatggtgccg

SEQ ID NO: 1984411 - DNA, 25 bp, Homo sapien
caaagggaccctgctcataatatcc

SEQ ID NO: 1984412 - DNA, 25 bp, Homo sapien
tctttgaatggtccatctgctacct

SEQ ID NO: 1984413 - DNA, 25 bp, Homo sapien
tttgaatggtccatctgctacctta

SEQ ID NO: 1984414 - DNA, 25 bp, Homo sapien
gtctttgaatggtccatctgctacc

SEQ ID NO: 1984415 - DNA, 25 bp, Homo sapien
tgaatggtccatctgctaccttaga

SEQ ID NO: 1984416 - DNA, 25 bp, Homo sapien
actttttcaagagttacaggcataa

SEQ ID NO: 1984417 - DNA, 25 bp, Homo sapien
tttcaagagttacaggcataacact

SEQ ID NO: 1984418 - DNA, 25 bp, Homo sapien
ttacaggcataacacttaggaataa

SEQ ID NO: 1984419 - DNA, 25 bp, Homo sapien
aagagttacaggcataacacttagg

SEQ ID NO: 1984420 - DNA, 25 bp, Homo sapien
caatcgacttgcttgagccagcaga

SEQ ID NO: 1984421 - DNA, 25 bp, Homo sapien
gctactccgacagccaatcgacttg

SEQ ID NO: 1984422 - DNA, 25 bp, Homo sapien
cacactcaggccctggcaagggtct

SEQ ID NO: 1984423 - DNA, 25 bp, Homo sapien
caggaacgaggcaaagacgagctac

SEQ ID NO: 1984424 - DNA, 25 bp, Homo sapien
gacagcagtgtgagtgatggccttc

SEQ ID NO: 1984425 - DNA, 25 bp, Homo sapien
aaggaactgataaatactgcctgtc

SEQ ID NO: 1984426 - DNA, 25 bp, Homo sapien
tgcatgaaatagtccactctggtaa

SEQ ID NO: 1984427 - DNA, 25 bp, Homo sapien
actgataaatactgcctgtctctgc

SEQ ID NO: 1984428 - DNA, 25 bp, Homo sapien
ggtaatgacatgacagacggtctct

SEQ ID NO: 1984429 - DNA, 25 bp, Homo sapien
tgcgttcccatgtagatgtctatag

SEQ ID NO: 1984430 - DNA, 25 bp, Homo sapien
ctcatgcataatgccctggaaggag

SEQ ID NO: 1984431 - DNA, 25 bp, Homo sapien
tgtgtccttgtcctttcgtgtccag

SEQ ID NO: 1984432 - DNA, 25 bp, Homo sapien
gcagacccactaaggtggcaggcac

SEQ ID NO: 1984433 - DNA, 25 bp, Homo sapien
cagacccactaaggtggcaggcact

SEQ ID NO: 1984434 - DNA, 25 bp, Homo sapien
aggcactgaggatgtatatttagca

SEQ ID NO: 1984435 - DNA, 25 bp, Homo sapien
tgcagacccactaaggtggcaggca

SEQ ID NO: 1984436 - DNA, 25 bp, Homo sapien
gagagaatttgatactgacagactg

SEQ ID NO: 1984437 - DNA, 25 bp, Homo sapien
cacagagcagacataatcccagatt

SEQ ID NO: 1984438 - DNA, 25 bp, Homo sapien
tcttaaatctactcaccacagagca

SEQ ID NO: 1984439 - DNA, 25 bp, Homo sapien
gtaaatcaacactatatgctcccca

SEQ ID NO: 1984440 - DNA, 25 bp, Homo sapien
tcatctgatcacatggatttctatt

SEQ ID NO: 1984441 - DNA, 25 bp, Homo sapien
tgcggagcacaacaccatatccata

SEQ ID NO: 1984442 - DNA, 25 bp, Homo sapien
tttcagatctgtcaagacacccgga

SEQ ID NO: 1984443 - DNA, 25 bp, Homo sapien
gacacccggatagttcatctgatca

SEQ ID NO: 1984444 - DNA, 25 bp, Homo sapien
tgcaggttcccattcctgctcatcg

SEQ ID NO: 1984445 - DNA, 25 bp, Homo sapien
cattcctgctcatcgcgggctgcat

SEQ ID NO: 1984446 - DNA, 25 bp, Homo sapien
caatgtgttgcagattccaggagat

SEQ ID NO: 1984447 - DNA, 25 bp, Homo sapien
cttctgatagagcagcaatgtgttg

SEQ ID NO: 1984448 - DNA, 25 bp, Homo sapien
gaagggttcctgtgagagccactcc

SEQ ID NO: 1984449 - DNA, 25 bp, Homo sapien
ggatcctctatgcttggacgggaca

SEQ ID NO: 1984450 - DNA, 25 bp, Homo sapien
cccagaggtcttggccaatcaggat

SEQ ID NO: 1984451 - DNA, 25 bp, Homo sapien
gacacaccatgtgattcgcctcggg

SEQ ID NO: 1984452 - DNA, 25 bp, Homo sapien
tgaattgggcaggattcctcttggc

SEQ ID NO: 1984453 - DNA, 25 bp, Homo sapien
tgtgctgggtacatatacgattgct

SEQ ID NO: 1984454 - DNA, 25 bp, Homo sapien
tacgattgctttgtgctcatccagc

SEQ ID NO: 1984455 - DNA, 25 bp, Homo sapien
tacatatacgattgctttgtgctca

SEQ ID NO: 1984456 - DNA, 25 bp, Homo sapien
ctaggatctgtattccccagggaaa

SEQ ID NO: 1984457 - DNA, 25 bp, Homo sapien
gagtgagacaaagcatctttccttg

SEQ ID NO: 1984458 - DNA, 25 bp, Homo sapien
gacaaagcatctttccttgatgtct

SEQ ID NO: 1984459 - DNA, 25 bp, Homo sapien
aagtgtggagtgagacaaagcatct

SEQ ID NO: 1984460 - DNA, 25 bp, Homo sapien
tccttgatgtcttccagaaagatca

SEQ ID NO: 1984461 - DNA, 25 bp, Homo sapien
ctgaagtaggtcagggagtagataa

SEQ ID NO: 1984462 - DNA, 25 bp, Homo sapien
cagggagtagataatcttgtccttt

SEQ ID NO: 1984463 - DNA, 25 bp, Homo sapien
taagcttatgcagtcgctgaagtag

SEQ ID NO: 1984464 - DNA, 25 bp, Homo sapien
ctaagcttatgcagtcgctgaagta

SEQ ID NO: 1984465 - DNA, 25 bp, Homo sapien
gacactgtcgaaccttctcagttcg

SEQ ID NO: 1984466 - DNA, 25 bp, Homo sapien
ctgagaacagagattcgctgagaag

SEQ ID NO: 1984467 - DNA, 25 bp, Homo sapien
cttctgacactgtcgaaccttctca

SEQ ID NO: 1984468 - DNA, 25 bp, Homo sapien
agaacagagattcgctgagaagcca

SEQ ID NO: 1984469 - DNA, 25 bp, Homo sapien
ctgtctcaaagagagttggaatctg

SEQ ID NO: 1984470 - DNA, 25 bp, Homo sapien
tgtatagtttctgacattcaccttt

SEQ ID NO: 1984471 - DNA, 25 bp, Homo sapien
tctcaaagagagttggaatctgtgt

SEQ ID NO: 1984472 - DNA, 25 bp, Homo sapien
tcacttgtatcgtttgtatagtttc

SEQ ID NO: 1984473 - DNA, 25 bp, Homo sapien
tcagcttgtaaacggtaccagaaag

SEQ ID NO: 1984474 - DNA, 25 bp, Homo sapien
gcttctagaagtgttttcagcttgt

SEQ ID NO: 1984475 - DNA, 25 bp, Homo sapien
tgttttcagcttgtaaacggtacca

SEQ ID NO: 1984476 - DNA, 25 bp, Homo sapien
ctagaagtgttttcagcttgtaaac

SEQ ID NO: 1984477 - DNA, 25 bp, Homo sapien
ctctcttcatcacccttcctgccag

SEQ ID NO: 1984478 - DNA, 25 bp, Homo sapien
ttcttgaagggagtcattattattc

SEQ ID NO: 1984479 - DNA, 25 bp, Homo sapien
ccagagccttcttgaagggagtcat

SEQ ID NO: 1984480 - DNA, 25 bp, Homo sapien
tcctgccagagccttcttgaaggga

SEQ ID NO: 1984481 - DNA, 25 bp, Homo sapien
agagacaattatctacaaagtgtgt

SEQ ID NO: 1984482 - DNA, 25 bp, Homo sapien
caaagtgtgtaatatcatcaggggg

SEQ ID NO: 1984483 - DNA, 25 bp, Homo sapien
tggctgcattcctgttttggacaag

SEQ ID NO: 1984484 - DNA, 25 bp, Homo sapien
gaagagttggtatcttttagattgc

SEQ ID NO: 1984485 - DNA, 25 bp, Homo sapien
ggggcacaagcaggctctttggaat

SEQ ID NO: 1984486 - DNA, 25 bp, Homo sapien
ccaaattgagtccagttgcggtcat

SEQ ID NO: 1984487 - DNA, 25 bp, Homo sapien
gtcaggggtacaccacccaaattga

SEQ ID NO: 1984488 - DNA, 25 bp, Homo sapien
cacaagcaggctctttggaatttgc

SEQ ID NO: 1984489 - DNA, 25 bp, Homo sapien
tacagagccactaggcaaggaatgg

SEQ ID NO: 1984490 - DNA, 25 bp, Homo sapien
tagtgcacgtgccagctatatgccg

SEQ ID NO: 1984491 - DNA, 25 bp, Homo sapien
tctgacgggtaggatgtagacagct

SEQ ID NO: 1984492 - DNA, 25 bp, Homo sapien
catggccactcgaggcagaggctgt

SEQ ID NO: 1984493 - DNA, 25 bp, Homo sapien
cacttatgtgctgacgggaaaactc

SEQ ID NO: 1984494 - DNA, 25 bp, Homo sapien
acaagaggccctcacttatgtgctg

SEQ ID NO: 1984495 - DNA, 25 bp, Homo sapien
gcaggtaagcatgcaaaagagggag

SEQ ID NO: 1984496 - DNA, 25 bp, Homo sapien
gaaaactcagccaacgtgaagggca

SEQ ID NO: 1984497 - DNA, 25 bp, Homo sapien
ctcttcagcactatggcccaaacat

SEQ ID NO: 1984498 - DNA, 25 bp, Homo sapien
cttcagcactatggcccaaacatac

SEQ ID NO: 1984499 - DNA, 25 bp, Homo sapien
actatggcccaaacatacattttca

SEQ ID NO: 1984500 - DNA, 25 bp, Homo sapien
agcactatggcccaaacatacattt

SEQ ID NO: 1984501 - DNA, 25 bp, Homo sapien
taaagcgccccatcgctttctgggt

SEQ ID NO: 1984502 - DNA, 25 bp, Homo sapien
cgtggaatgggttctgcatgtcttt

SEQ ID NO: 1984503 - DNA, 25 bp, Homo sapien
tgggtccggctcaggcatgcgtgga

SEQ ID NO: 1984504 - DNA, 25 bp, Homo sapien
ttaaagcgccccatcgctttctggg

SEQ ID NO: 1984505 - DNA, 25 bp, Homo sapien
ctttattgagatgtcacaacagatt

SEQ ID NO: 1984506 - DNA, 25 bp, Homo sapien
tgtcacaacagattctcacagcctg

SEQ ID NO: 1984507 - DNA, 25 bp, Homo sapien
ctcacagcctgcaaagggaaagact

SEQ ID NO: 1984508 - DNA, 25 bp, Homo sapien
tgataatattatgacaagcaagaca

SEQ ID NO: 1984509 - DNA, 25 bp, Homo sapien
tctgtccagatagtatctgagctcc

SEQ ID NO: 1984510 - DNA, 25 bp, Homo sapien
gaggtagcagatacaaagcctgctg

SEQ ID NO: 1984511 - DNA, 25 bp, Homo sapien
acaaagcctgctgaaatctgtccag

SEQ ID NO: 1984512 - DNA, 25 bp, Homo sapien
caggaaaactgtggcgctgagaggt

SEQ ID NO: 1984513 - DNA, 25 bp, Homo sapien
tccactttgctcgtggacagtattt

SEQ ID NO: 1984514 - DNA, 25 bp, Homo sapien
cttccactttgctcgtggacagtat

SEQ ID NO: 1984515 - DNA, 25 bp, Homo sapien
ttccactttgctcgtggacagtatt

SEQ ID NO: 1984516 - DNA, 25 bp, Homo sapien
tcccacatttgagcaaaagtgagtc

SEQ ID NO: 1984517 - DNA, 25 bp, Homo sapien
agaatagatgcatggagcgtgtgag

SEQ ID NO: 1984518 - DNA, 25 bp, Homo sapien
gagaagaatagatgcatggagcgtg

SEQ ID NO: 1984519 - DNA, 25 bp, Homo sapien
aagaatagatgcatggagcgtgtga

SEQ ID NO: 1984520 - DNA, 25 bp, Homo sapien
ctgagaagaatagatgcatggagcg

SEQ ID NO: 1984521 - DNA, 25 bp, Homo sapien
gaacggctggcatctggattaccca

SEQ ID NO: 1984522 - DNA, 25 bp, Homo sapien
agccacagaataagggaacggctgg

SEQ ID NO: 1984523 - DNA, 25 bp, Homo sapien
tctggattacccacagcaaacggca

SEQ ID NO: 1984524 - DNA, 25 bp, Homo sapien
taagggaacggctggcatctggatt

SEQ ID NO: 1984525 - DNA, 25 bp, Homo sapien
caggggacgagtcctgtctctggcc

SEQ ID NO: 1984526 - DNA, 25 bp, Homo sapien
taaaacaggggacgagtcctgtctc

SEQ ID NO: 1984527 - DNA, 25 bp, Homo sapien
tgactggcctgacactcagtgaaaa

SEQ ID NO: 1984528 - DNA, 25 bp, Homo sapien
cctgtctctggcctgactggcctga

SEQ ID NO: 1984529 - DNA, 25 bp, Homo sapien
tttcctctcccgagtatgaacagca

SEQ ID NO: 1984530 - DNA, 25 bp, Homo sapien
cgagtatgaacagcactggcttctc

SEQ ID NO: 1984531 - DNA, 25 bp, Homo sapien
catttttcctctcccgagtatgaac

SEQ ID NO: 1984532 - DNA, 25 bp, Homo sapien
tctcccgagtatgaacagcactggc

SEQ ID NO: 1984533 - DNA, 25 bp, Homo sapien
agactgagggtgatgcgctgtgaca

SEQ ID NO: 1984534 - DNA, 25 bp, Homo sapien
ttccatgaacaaggggctcttgctc

SEQ ID NO: 1984535 - DNA, 25 bp, Homo sapien
tgcgctgtgacatgtgagacttggc

SEQ ID NO: 1984536 - DNA, 25 bp, Homo sapien
gtgatgcgctgtgacatgtgagact

SEQ ID NO: 1984537 - DNA, 25 bp, Homo sapien
tatctcagggcaaccgcggatgttg

SEQ ID NO: 1984538 - DNA, 25 bp, Homo sapien
gttgatttcgggctctctctttgtg

SEQ ID NO: 1984539 - DNA, 25 bp, Homo sapien
gcggaacgatgggtgatgctatctc

SEQ ID NO: 1984540 - DNA, 25 bp, Homo sapien
caaccgcggatgttgatttcgggct

SEQ ID NO: 1984541 - DNA, 25 bp, Homo sapien
ggctgagtacttaaatggcaatcaa

SEQ ID NO: 1984542 - DNA, 25 bp, Homo sapien
tagcatcttgaattcccagctgcgg

SEQ ID NO: 1984543 - DNA, 25 bp, Homo sapien
ggacttctgcctaagtatagcatct

SEQ ID NO: 1984544 - DNA, 25 bp, Homo sapien
cagctgcggcggctatgaaaaacag

SEQ ID NO: 1984545 - DNA, 25 bp, Homo sapien
aaggttgaattccatcttgtgctca

SEQ ID NO: 1984546 - DNA, 25 bp, Homo sapien
tgctcacatcctgaatgagccagtt

SEQ ID NO: 1984547 - DNA, 25 bp, Homo sapien
ttaaaggttgaattccatcttgtgc

SEQ ID NO: 1984548 - DNA, 25 bp, Homo sapien
gagccagtttgcaggcaagctcagt

SEQ ID NO: 1984549 - DNA, 25 bp, Homo sapien
tctgccagattcctctgtaatgaag

SEQ ID NO: 1984550 - DNA, 25 bp, Homo sapien
ctctgccagattcctctgtaatgaa

SEQ ID NO: 1984551 - DNA, 25 bp, Homo sapien
catctctgccagattcctctgtaat

SEQ ID NO: 1984552 - DNA, 25 bp, Homo sapien
aaccatctctgccagattcctctgt

SEQ ID NO: 1984553 - DNA, 25 bp, Homo sapien
gaacttttgcgcaccggatagaccc

SEQ ID NO: 1984554 - DNA, 25 bp, Homo sapien
ccacagctggataaggcccgtatat

SEQ ID NO: 1984555 - DNA, 25 bp, Homo sapien
cagttagtgcaagtacagtctctca

SEQ ID NO: 1984556 - DNA, 25 bp, Homo sapien
tataaagacaagtggacttgggccc

SEQ ID NO: 1984557 - DNA, 25 bp, Homo sapien
cataatggtctgcattcattaataa

SEQ ID NO: 1984558 - DNA, 25 bp, Homo sapien
agtatatgcttctgggaacggggaa

SEQ ID NO: 1984559 - DNA, 25 bp, Homo sapien
ccagactcataatggtctgcattca

SEQ ID NO: 1984560 - DNA, 25 bp, Homo sapien
gactcataatggtctgcattcatta

SEQ ID NO: 1984561 - DNA, 25 bp, Homo sapien
ttgtactctaatagctgttaggagc

SEQ ID NO: 1984562 - DNA, 25 bp, Homo sapien
gaggactaggtagaatgcggtatat

SEQ ID NO: 1984563 - DNA, 25 bp, Homo sapien
tatgtcagtctgatcccggagggtt

SEQ ID NO: 1984564 - DNA, 25 bp, Homo sapien
ccttgagaatgccttcacaaagaaa

SEQ ID NO: 1984565 - DNA, 25 bp, Homo sapien
atttctgcatgtgactgggctcgcc

SEQ ID NO: 1984566 - DNA, 25 bp, Homo sapien
taagcaaactcacaggagcaacagg

SEQ ID NO: 1984567 - DNA, 25 bp, Homo sapien
ttgtgacagaagtaaagagcccggt

SEQ ID NO: 1984568 - DNA, 25 bp, Homo sapien
tgggctcgccaaaccgctttgaatg

SEQ ID NO: 1984569 - DNA, 25 bp, Homo sapien
tattcagagctgtctcctaacccgg

SEQ ID NO: 1984570 - DNA, 25 bp, Homo sapien
cctaacccgggctgatgaccgcatt

SEQ ID NO: 1984571 - DNA, 25 bp, Homo sapien
tcagtgtttgctgtgtaggctttcc

SEQ ID NO: 1984572 - DNA, 25 bp, Homo sapien
tttccttgccatgtgacccttgtat

SEQ ID NO: 1984573 - DNA, 25 bp, Homo sapien
tgtggaaagccatctcccgcagact

SEQ ID NO: 1984574 - DNA, 25 bp, Homo sapien
atctcccgcagactggcactgaagt

SEQ ID NO: 1984575 - DNA, 25 bp, Homo sapien
tctcgggctgattgaataactcctg

SEQ ID NO: 1984576 - DNA, 25 bp, Homo sapien
tgaagtgagctttaaaccaccattt

SEQ ID NO: 1984577 - DNA, 25 bp, Homo sapien
ccagccctgctgataatgagaagtt

SEQ ID NO: 1984578 - DNA, 25 bp, Homo sapien
taacagtggcaatatcagtggcttt

SEQ ID NO: 1984579 - DNA, 25 bp, Homo sapien
acagtggcaatatcagtggctttgc

SEQ ID NO: 1984580 - DNA, 25 bp, Homo sapien
cagccctgctgataatgagaagttc

SEQ ID NO: 1984581 - DNA, 25 bp, Homo sapien
gacaccttatagttgtaacctgctg

SEQ ID NO: 1984582 - DNA, 25 bp, Homo sapien
taattatatagtggtaacgtagttg

SEQ ID NO: 1984583 - DNA, 25 bp, Homo sapien
agtggtaacgtagttggctgcttga

SEQ ID NO: 1984584 - DNA, 25 bp, Homo sapien
ttgacaccttatagttgtaacctgc

SEQ ID NO: 1984585 - DNA, 25 bp, Homo sapien
gttggtgggacagtataatcttgga

SEQ ID NO: 1984586 - DNA, 25 bp, Homo sapien
attcgggaagcctgaattctggtgc

SEQ ID NO: 1984587 - DNA, 25 bp, Homo sapien
gctggccatgaccataaggcttttc

SEQ ID NO: 1984588 - DNA, 25 bp, Homo sapien
gtgctggccatgaccataaggcttt

SEQ ID NO: 1984589 - DNA, 25 bp, Homo sapien
agttttgcagttagacacgaacagg

SEQ ID NO: 1984590 - DNA, 25 bp, Homo sapien
ttgtgtttactggtctgtcttgggc

SEQ ID NO: 1984591 - DNA, 25 bp, Homo sapien
tgtgtttactggtctgtcttgggca

SEQ ID NO: 1984592 - DNA, 25 bp, Homo sapien
aagaagtgcaaccaagttttgcagt

SEQ ID NO: 1984593 - DNA, 25 bp, Homo sapien
cttggggatgatagggtagagccag

SEQ ID NO: 1984594 - DNA, 25 bp, Homo sapien
ggtagagccagatgaaggcatttga

SEQ ID NO: 1984595 - DNA, 25 bp, Homo sapien
gggtagagccagatgaaggcatttg

SEQ ID NO: 1984596 - DNA, 25 bp, Homo sapien
tggggatgatagggtagagccagat

SEQ ID NO: 1984597 - DNA, 25 bp, Homo sapien
cattagcatttgcttaacaagcaca

SEQ ID NO: 1984598 - DNA, 25 bp, Homo sapien
caaaaacctaaatagcactaaagca

SEQ ID NO: 1984599 - DNA, 25 bp, Homo sapien
cagattgtcttgtagtaaatcacca

SEQ ID NO: 1984600 - DNA, 25 bp, Homo sapien
ctaaagcattctgatacaacattag

SEQ ID NO: 1984601 - DNA, 25 bp, Homo sapien
atgttcccagtactcccgtttcaca

SEQ ID NO: 1984602 - DNA, 25 bp, Homo sapien
tgtgatgaagatccttttcccagaa

SEQ ID NO: 1984603 - DNA, 25 bp, Homo sapien
gtttcacaccatcactcaagtagct

SEQ ID NO: 1984604 - DNA, 25 bp, Homo sapien
ttctgactttgggatctcttgtgcc

SEQ ID NO: 1984605 - DNA, 25 bp, Homo sapien
gaataggttccactctcagatcggg

SEQ ID NO: 1984606 - DNA, 25 bp, Homo sapien
tatgctcccgtttggcatctgtatg

SEQ ID NO: 1984607 - DNA, 25 bp, Homo sapien
tatgtttccagatcggggctttgtc

SEQ ID NO: 1984608 - DNA, 25 bp, Homo sapien
gggcagacggtagaatttatgctcc

SEQ ID NO: 1984609 - DNA, 25 bp, Homo sapien
aaaagagtgtagtaatattcctgat

SEQ ID NO: 1984610 - DNA, 25 bp, Homo sapien
ttataggccgccagcagtaagacag

SEQ ID NO: 1984611 - DNA, 25 bp, Homo sapien
caggaattgcatcagctggctggtt

SEQ ID NO: 1984612 - DNA, 25 bp, Homo sapien
ggctggttttgtgtctcagctgtca

SEQ ID NO: 1984613 - DNA, 25 bp, Homo sapien
gatttgtgtccaagtaattcccagg

SEQ ID NO: 1984614 - DNA, 25 bp, Homo sapien
gaggctggccaaactgaagacatct

SEQ ID NO: 1984615 - DNA, 25 bp, Homo sapien
tataggccatcgatctaactgagca

SEQ ID NO: 1984616 - DNA, 25 bp, Homo sapien
tggagtgaaaagctgcaaccgctgc

SEQ ID NO: 1984617 - DNA, 25 bp, Homo sapien
tttgccgcttagcttgtctctgaag

SEQ ID NO: 1984618 - DNA, 25 bp, Homo sapien
tgaaagcagaatgttaagcaggcct

SEQ ID NO: 1984619 - DNA, 25 bp, Homo sapien
tttcttgaagaagcgagagtgcctt

SEQ ID NO: 1984620 - DNA, 25 bp, Homo sapien
ctgcttcttgagaggaatcaggtga

SEQ ID NO: 1984621 - DNA, 25 bp, Homo sapien
agagacagagaggtctatggcacta

SEQ ID NO: 1984622 - DNA, 25 bp, Homo sapien
aggtctatggcactaacaagggata

SEQ ID NO: 1984623 - DNA, 25 bp, Homo sapien
tctagatacctaatgatgaattttc

SEQ ID NO: 1984624 - DNA, 25 bp, Homo sapien
cagagaggtctatggcactaacaag

SEQ ID NO: 1984625 - DNA, 25 bp, Homo sapien
ccaggtggcagagtctcatgagcac

SEQ ID NO: 1984626 - DNA, 25 bp, Homo sapien
aggtggcagagtctcatgagcacca

SEQ ID NO: 1984627 - DNA, 25 bp, Homo sapien
ggtggcagagtctcatgagcaccat

SEQ ID NO: 1984628 - DNA, 25 bp, Homo sapien
caggtggcagagtctcatgagcacc

SEQ ID NO: 1984629 - DNA, 25 bp, Homo sapien
tctgtggagacatccgcagtgcagt

SEQ ID NO: 1984630 - DNA, 25 bp, Homo sapien
agttcggtcctgacagcatctgtga

SEQ ID NO: 1984631 - DNA, 25 bp, Homo sapien
cacacgagaagagtttgatccaaag

SEQ ID NO: 1984632 - DNA, 25 bp, Homo sapien
gatgctgtctgtattcacacgagaa

SEQ ID NO: 1984633 - DNA, 25 bp, Homo sapien
gtgtagagattagcagcttcgggcc

SEQ ID NO: 1984634 - DNA, 25 bp, Homo sapien
tttagaactggtgtagagattagca

SEQ ID NO: 1984635 - DNA, 25 bp, Homo sapien
agattagcagcttcgggccacagca

SEQ ID NO: 1984636 - DNA, 25 bp, Homo sapien
actggtgtagagattagcagcttcg

SEQ ID NO: 1984637 - DNA, 25 bp, Homo sapien
ttccctgtgttctttagcatcctca

SEQ ID NO: 1984638 - DNA, 25 bp, Homo sapien
ttctttagcatcctcaactgtttta

SEQ ID NO: 1984639 - DNA, 25 bp, Homo sapien
ctcttttcatgctttcgtggtttca

SEQ ID NO: 1984640 - DNA, 25 bp, Homo sapien
tttacagagtgtctcttttcatgct

SEQ ID NO: 1984641 - DNA, 25 bp, Homo sapien
ttctcaccacgggaatgtacaaagt

SEQ ID NO: 1984642 - DNA, 25 bp, Homo sapien
tctcaccacgggaatgtacaaagtg

SEQ ID NO: 1984643 - DNA, 25 bp, Homo sapien
ccattgtgtccataaaaagtggcat

SEQ ID NO: 1984644 - DNA, 25 bp, Homo sapien
catgaaccttaaaagtagctgccaa

SEQ ID NO: 1984645 - DNA, 25 bp, Homo sapien
aaagtagctgccaacaaccattccc

SEQ ID NO: 1984646 - DNA, 25 bp, Homo sapien
tctatatgtacttcccaaataacgt

SEQ ID NO: 1984647 - DNA, 25 bp, Homo sapien
ctttagccatgaaatgggcactgtg

SEQ ID NO: 1984648 - DNA, 25 bp, Homo sapien
catggtgttaccacaggcgttctgt

SEQ ID NO: 1984649 - DNA, 25 bp, Homo sapien
tgggcactgtgtacatggtgttacc

SEQ ID NO: 1984650 - DNA, 25 bp, Homo sapien
ccacaggcgttctgttccaattgca

SEQ ID NO: 1984651 - DNA, 25 bp, Homo sapien
caaatgatttcagctgctcaggcat

SEQ ID NO: 1984652 - DNA, 25 bp, Homo sapien
gggattgagagtaccaaatgatttc

SEQ ID NO: 1984653 - DNA, 25 bp, Homo sapien
taccaaatgatttcagctgctcagg

SEQ ID NO: 1984654 - DNA, 25 bp, Homo sapien
tgagagtaccaaatgatttcagctg

SEQ ID NO: 1984655 - DNA, 25 bp, Homo sapien
gacatgcttccatcagaaagcaagt

SEQ ID NO: 1984656 - DNA, 25 bp, Homo sapien
tcacgactacttggacatctttaga

SEQ ID NO: 1984657 - DNA, 25 bp, Homo sapien
tcctgccctgtcacgactacttgga

SEQ ID NO: 1984658 - DNA, 25 bp, Homo sapien
tggacatctttagacatgcttccat

SEQ ID NO: 1984659 - DNA, 25 bp, Homo sapien
agcagttccaacagcgcaaacagtg

SEQ ID NO: 1984660 - DNA, 25 bp, Homo sapien
acagagggagcttgatttctctgtc

SEQ ID NO: 1984661 - DNA, 25 bp, Homo sapien
cagggctctgtcagagttatgggca

SEQ ID NO: 1984662 - DNA, 25 bp, Homo sapien
acagggattgaattactgaagactt

SEQ ID NO: 1984663 - DNA, 25 bp, Homo sapien
tcttttatgcgagtgaccttttcat

SEQ ID NO: 1984664 - DNA, 25 bp, Homo sapien
cctcttttatgcgagtgaccttttc

SEQ ID NO: 1984665 - DNA, 25 bp, Homo sapien
cttttatgcgagtgaccttttcatc

SEQ ID NO: 1984666 - DNA, 25 bp, Homo sapien
ctcttttatgcgagtgaccttttca

SEQ ID NO: 1984667 - DNA, 25 bp, Homo sapien
tcttttgttccattagcacatgcat

SEQ ID NO: 1984668 - DNA, 25 bp, Homo sapien
aattgattttggcagtcaaagactg

SEQ ID NO: 1984669 - DNA, 25 bp, Homo sapien
gctctgattttaatcataacacata

SEQ ID NO: 1984670 - DNA, 25 bp, Homo sapien
acgatcattacttctcttgctctga

SEQ ID NO: 1984671 - DNA, 25 bp, Homo sapien
gccttgggaatggttggctacaaag

SEQ ID NO: 1984672 - DNA, 25 bp, Homo sapien
tgcacagttcaaataatgtgtgagg

SEQ ID NO: 1984673 - DNA, 25 bp, Homo sapien
tgaggataatcaggaagtgactgca

SEQ ID NO: 1984674 - DNA, 25 bp, Homo sapien
aatgtgtgatgaggaaaaggtgtcc

SEQ ID NO: 1984675 - DNA, 25 bp, Homo sapien
gtggctctaattgctgccagtttat

SEQ ID NO: 1984676 - DNA, 25 bp, Homo sapien
cattatggggtttattgtggctcta

SEQ ID NO: 1984677 - DNA, 25 bp, Homo sapien
ggagatgtaaatttagagcgttggg

SEQ ID NO: 1984678 - DNA, 25 bp, Homo sapien
ctggtgataaatagactttcgaggg

SEQ ID NO: 1984679 - DNA, 25 bp, Homo sapien
cacagcgagtattgggagtaaacac

SEQ ID NO: 1984680 - DNA, 25 bp, Homo sapien
tcagatgtagaacagatgtaggcag

SEQ ID NO: 1984681 - DNA, 25 bp, Homo sapien
ggctggtaagtgctcaggtcacagc

SEQ ID NO: 1984682 - DNA, 25 bp, Homo sapien
gagtaaacaccaggttccacgccag

SEQ ID NO: 1984683 - DNA, 25 bp, Homo sapien
cgtaagtaacattgctccatgctgc

SEQ ID NO: 1984684 - DNA, 25 bp, Homo sapien
taatactgagttctatcaggctgtc

SEQ ID NO: 1984685 - DNA, 25 bp, Homo sapien
catgctgcatgttatggtttgtgtg

SEQ ID NO: 1984686 - DNA, 25 bp, Homo sapien
cttgttgaaagggagctgtgcgcct

SEQ ID NO: 1984687 - DNA, 25 bp, Homo sapien
tgttggcgaccggtacaacacagag

SEQ ID NO: 1984688 - DNA, 25 bp, Homo sapien
gttggcgaccggtacaacacagagg

SEQ ID NO: 1984689 - DNA, 25 bp, Homo sapien
tcttgaggaacactgcagacatcat

SEQ ID NO: 1984690 - DNA, 25 bp, Homo sapien
ggtccatttgcaccagattattctt

SEQ ID NO: 1984691 - DNA, 25 bp, Homo sapien
ttggggtccatttgcaccagattat

SEQ ID NO: 1984692 - DNA, 25 bp, Homo sapien
atttgcaccagattattctttttat

SEQ ID NO: 1984693 - DNA, 25 bp, Homo sapien
ggggtccatttgcaccagattattc

SEQ ID NO: 1984694 - DNA, 25 bp, Homo sapien
ttaatccgcctgtgattaccactgg

SEQ ID NO: 1984695 - DNA, 25 bp, Homo sapien
aaccaatcaggcaccctttaatccg

SEQ ID NO: 1984696 - DNA, 25 bp, Homo sapien
gttttgttgccttcaaaagccaaca

SEQ ID NO: 1984697 - DNA, 25 bp, Homo sapien
caagcatgaaatttcttctaacccc

SEQ ID NO: 1984698 - DNA, 25 bp, Homo sapien
gccaagattgcaaggtatctcacag

SEQ ID NO: 1984699 - DNA, 25 bp, Homo sapien
tggcagctctgtatggggcagccgt

SEQ ID NO: 1984700 - DNA, 25 bp, Homo sapien
gcctgtggcccggtaggcctcagtt

SEQ ID NO: 1984701 - DNA, 25 bp, Homo sapien
gctctcaggatggcgcctgtggccc

SEQ ID NO: 1984702 - DNA, 25 bp, Homo sapien
tcacagagatagcagggaacgcttg

SEQ ID NO: 1984703 - DNA, 25 bp, Homo sapien
tagcagggaacgcttgccaatgaca

SEQ ID NO: 1984704 - DNA, 25 bp, Homo sapien
tgccttatagatctcaggatggagc

SEQ ID NO: 1984705 - DNA, 25 bp, Homo sapien
tcagtttgagaaccgcacatttgct

SEQ ID NO: 1984706 - DNA, 25 bp, Homo sapien
cctttcatcagagaagcacattcca

SEQ ID NO: 1984707 - DNA, 25 bp, Homo sapien
ctcttgggacctgagcatttaacaa

SEQ ID NO: 1984708 - DNA, 25 bp, Homo sapien
cctgagcatttaacaattcaccttt

SEQ ID NO: 1984709 - DNA, 25 bp, Homo sapien
aattcacctttcatcagagaagcac

SEQ ID NO: 1984710 - DNA, 25 bp, Homo sapien
tccgtgttagatttagattcagcac

SEQ ID NO: 1984711 - DNA, 25 bp, Homo sapien
gcatcttgtaaacagctcggtgtag

SEQ ID NO: 1984712 - DNA, 25 bp, Homo sapien
tcagcacattcagttcgcaatatgc

SEQ ID NO: 1984713 - DNA, 25 bp, Homo sapien
cagggtgtttgaagtccgtgttaga

SEQ ID NO: 1984714 - DNA, 25 bp, Homo sapien
ccttatttggaaggtctcagtggac

SEQ ID NO: 1984715 - DNA, 25 bp, Homo sapien
gacatgagttggtcccttggaagag

SEQ ID NO: 1984716 - DNA, 25 bp, Homo sapien
gggtaggcagttttgcaagcagaaa

SEQ ID NO: 1984717 - DNA, 25 bp, Homo sapien
tattgactgcctactctgtggaaaa

SEQ ID NO: 1984718 - DNA, 25 bp, Homo sapien
gaagacgttgacacctctgagccta

SEQ ID NO: 1984719 - DNA, 25 bp, Homo sapien
cacaacagtcacgatgggagcgaag

SEQ ID NO: 1984720 - DNA, 25 bp, Homo sapien
taagtgcattttctgcggtgagtcc

SEQ ID NO: 1984721 - DNA, 25 bp, Homo sapien
tgggacttccgcaacgaaactgact

SEQ ID NO: 1984722 - DNA, 25 bp, Homo sapien
tatataccttgcttctaaggaagaa

SEQ ID NO: 1984723 - DNA, 25 bp, Homo sapien
ttttcttgaaagattcaagagggcc

SEQ ID NO: 1984724 - DNA, 25 bp, Homo sapien
cagaataactgctttgggctcagat

SEQ ID NO: 1984725 - DNA, 25 bp, Homo sapien
ctctgcgtgctggttgaaatgctac

SEQ ID NO: 1984726 - DNA, 25 bp, Homo sapien
ccataaataaattaccagggctgtt

SEQ ID NO: 1984727 - DNA, 25 bp, Homo sapien
gcatgcaagcgtacacataccgtgt

SEQ ID NO: 1984728 - DNA, 25 bp, Homo sapien
tgaactggcttggatgttatcatca

SEQ ID NO: 1984729 - DNA, 25 bp, Homo sapien
taaagtatcttggatggaggcaaag

SEQ ID NO: 1984730 - DNA, 25 bp, Homo sapien
ttcagaactcagtccaatggcatgc

SEQ ID NO: 1984731 - DNA, 25 bp, Homo sapien
taaccacctgtccttctgtgagatg

SEQ ID NO: 1984732 - DNA, 25 bp, Homo sapien
gagatgctctacaccttgttctgcc

SEQ ID NO: 1984733 - DNA, 25 bp, Homo sapien
tttgccatggccgtcttcagaactc

SEQ ID NO: 1984734 - DNA, 25 bp, Homo sapien
gagttgtcatagctccctttgggcc

SEQ ID NO: 1984735 - DNA, 25 bp, Homo sapien
tgtagagagttgtcatagctccctt

SEQ ID NO: 1984736 - DNA, 25 bp, Homo sapien
ccctttgggcctaatcctatcactg

SEQ ID NO: 1984737 - DNA, 25 bp, Homo sapien
cactgtgattcatgttgggcaagct

SEQ ID NO: 1984738 - DNA, 25 bp, Homo sapien
gctccaaaggcagctgatcccctca

SEQ ID NO: 1984739 - DNA, 25 bp, Homo sapien
ctggctccaaaggcagctgatcccc

SEQ ID NO: 1984740 - DNA, 25 bp, Homo sapien
ctccaaaggcagctgatcccctcat

SEQ ID NO: 1984741 - DNA, 25 bp, Homo sapien
tggctccaaaggcagctgatcccct

SEQ ID NO: 1984742 - DNA, 25 bp, Homo sapien
ccaaacactgaactatgttattctg

SEQ ID NO: 1984743 - DNA, 25 bp, Homo sapien
ttggccagccggatggagtgccgct

SEQ ID NO: 1984744 - DNA, 25 bp, Homo sapien
ctatgttattctgacaccgggtgct

SEQ ID NO: 1984745 - DNA, 25 bp, Homo sapien
cttgggtgtgaaggactagcctgca

SEQ ID NO: 1984746 - DNA, 25 bp, Homo sapien
gagctccccaggggaagctttatcc

SEQ ID NO: 1984747 - DNA, 25 bp, Homo sapien
caggggaagctttatccacaccagg

SEQ ID NO: 1984748 - DNA, 25 bp, Homo sapien
aggggaagctttatccacaccagga

SEQ ID NO: 1984749 - DNA, 25 bp, Homo sapien
cccaggggaagctttatccacacca

SEQ ID NO: 1984750 - DNA, 25 bp, Homo sapien
tatcgactctctcatcagtgccaga

SEQ ID NO: 1984751 - DNA, 25 bp, Homo sapien
cacgtctggctcagggtgaagtgcc

SEQ ID NO: 1984752 - DNA, 25 bp, Homo sapien
aatttccatcctgttgccacggcag

SEQ ID NO: 1984753 - DNA, 25 bp, Homo sapien
agtgattttgcccagacacgtctgg

SEQ ID NO: 1984754 - DNA, 25 bp, Homo sapien
aacaaaaactcctctgacagtcctg

SEQ ID NO: 1984755 - DNA, 25 bp, Homo sapien
tcctgtaataagtacactctgaaac

SEQ ID NO: 1984756 - DNA, 25 bp, Homo sapien
gtacactctgaaactagcaaattat

SEQ ID NO: 1984757 - DNA, 25 bp, Homo sapien
tctgaaactagcaaattatctgtaa

SEQ ID NO: 1984758 - DNA, 25 bp, Homo sapien
tgcagaaaattgagttttgtagaca

SEQ ID NO: 1984759 - DNA, 25 bp, Homo sapien
tttgtagacattacctaactcttga

SEQ ID NO: 1984760 - DNA, 25 bp, Homo sapien
ccgggatcaataacatttcgctgct

SEQ ID NO: 1984761 - DNA, 25 bp, Homo sapien
tcttgatttgtcacaccgggatcaa

SEQ ID NO: 1984762 - DNA, 25 bp, Homo sapien
tccgttgtccaaggtgtatccatgt

SEQ ID NO: 1984763 - DNA, 25 bp, Homo sapien
tctttgctggatttccacgtgggaa

SEQ ID NO: 1984764 - DNA, 25 bp, Homo sapien
tactgcgcccaggatgtccgttgtc

SEQ ID NO: 1984765 - DNA, 25 bp, Homo sapien
ctgtttggcaaggagccaacgctgc

SEQ ID NO: 1984766 - DNA, 25 bp, Homo sapien
ctgcatcaagatgtttatacatggg

SEQ ID NO: 1984767 - DNA, 25 bp, Homo sapien
tccttctgcatcaagatgtttatac

SEQ ID NO: 1984768 - DNA, 25 bp, Homo sapien
gatgtttatacatggggacagatgc

SEQ ID NO: 1984769 - DNA, 25 bp, Homo sapien
gggacagatgcagaggatgacaaac

SEQ ID NO: 1984770 - DNA, 25 bp, Homo sapien
ggaaaaaacgatactagataatcca

SEQ ID NO: 1984771 - DNA, 25 bp, Homo sapien
tattgggaaaaaacgatactagata

SEQ ID NO: 1984772 - DNA, 25 bp, Homo sapien
tgcttctttactggtgtgcatgtcg

SEQ ID NO: 1984773 - DNA, 25 bp, Homo sapien
gtatgcctcagagtgctgccacaca

SEQ ID NO: 1984774 - DNA, 25 bp, Homo sapien
ttttcccatggagaaactgttttga

SEQ ID NO: 1984775 - DNA, 25 bp, Homo sapien
ggactctgtgctttatccaccttca

SEQ ID NO: 1984776 - DNA, 25 bp, Homo sapien
gggcagaactgcagtctaggactct

SEQ ID NO: 1984777 - DNA, 25 bp, Homo sapien
tttaaattcccaatatgggcagacc

SEQ ID NO: 1984778 - DNA, 25 bp, Homo sapien
ttctccaagattcttaatttccctg

SEQ ID NO: 1984779 - DNA, 25 bp, Homo sapien
tttcctctcattccggtcctttctc

SEQ ID NO: 1984780 - DNA, 25 bp, Homo sapien
aatttcattcagccccatttgcatc

SEQ ID NO: 1984781 - DNA, 25 bp, Homo sapien
caagattcttaatttccctgtccat

SEQ ID NO: 1984782 - DNA, 25 bp, Homo sapien
gatggagaggcactagattgtaaga

SEQ ID NO: 1984783 - DNA, 25 bp, Homo sapien
agattgtaagaagaggccggaagac

SEQ ID NO: 1984784 - DNA, 25 bp, Homo sapien
caagactgaagatggagaggcacta

SEQ ID NO: 1984785 - DNA, 25 bp, Homo sapien
gaggcactagattgtaagaagaggc

SEQ ID NO: 1984786 - DNA, 25 bp, Homo sapien
tctttggtcttcaaggaccgtgata

SEQ ID NO: 1984787 - DNA, 25 bp, Homo sapien
aattggcatgttctccttgataaca

SEQ ID NO: 1984788 - DNA, 25 bp, Homo sapien
ttggtcttcaaggaccgtgatagac

SEQ ID NO: 1984789 - DNA, 25 bp, Homo sapien
attcacaattggcatgttctccttg

SEQ ID NO: 1984790 - DNA, 25 bp, Homo sapien
gattaaggcactttaccatcctgaa

SEQ ID NO: 1984791 - DNA, 25 bp, Homo sapien
cactggcagattaaggcactttacc

SEQ ID NO: 1984792 - DNA, 25 bp, Homo sapien
tcatatttcccactggcagattaag

SEQ ID NO: 1984793 - DNA, 25 bp, Homo sapien
atttcccactggcagattaaggcac

SEQ ID NO: 1984794 - DNA, 25 bp, Homo sapien
caagagatttgcttgggtggagccc

SEQ ID NO: 1984795 - DNA, 25 bp, Homo sapien
ggtaataccacactgcctgtattaa

SEQ ID NO: 1984796 - DNA, 25 bp, Homo sapien
agtgatggttgtgcctgcaaagact

SEQ ID NO: 1984797 - DNA, 25 bp, Homo sapien
ctttgggctgactagcccctggtaa

SEQ ID NO: 1984798 - DNA, 25 bp, Homo sapien
atgtcttcttggaagggtctccaat

SEQ ID NO: 1984799 - DNA, 25 bp, Homo sapien
ctagccttctcttcagtattttgat

SEQ ID NO: 1984800 - DNA, 25 bp, Homo sapien
aaatgtgttgtaggagtgttctgag

SEQ ID NO: 1984801 - DNA, 25 bp, Homo sapien
tgttctgagtatgcggattgtccat

SEQ ID NO: 1984802 - DNA, 25 bp, Homo sapien
tcatgcacgtaggattttatgggca

SEQ ID NO: 1984803 - DNA, 25 bp, Homo sapien
cgctgggcaggtttgataagtcgaa

SEQ ID NO: 1984804 - DNA, 25 bp, Homo sapien
tatgggcagtaaagggaatccgtca

SEQ ID NO: 1984805 - DNA, 25 bp, Homo sapien
tcagttgacggtattcgctgggcag

SEQ ID NO: 1984806 - DNA, 25 bp, Homo sapien
taacgctgagcgaagtaccaggaca

SEQ ID NO: 1984807 - DNA, 25 bp, Homo sapien
gaagcttctgaaaccccgtgaagga

SEQ ID NO: 1984808 - DNA, 25 bp, Homo sapien
cagggcctgaaagatccaagtgtcg

SEQ ID NO: 1984809 - DNA, 25 bp, Homo sapien
cctgtccggtggaaagggctccaag

SEQ ID NO: 1984810 - DNA, 25 bp, Homo sapien
cctcgcagattggaacgcttgcttt

SEQ ID NO: 1984811 - DNA, 25 bp, Homo sapien
cccccggccgctgtgcatttttgaa

SEQ ID NO: 1984812 - DNA, 25 bp, Homo sapien
gagggcctcgcagattggaacgctt

SEQ ID NO: 1984813 - DNA, 25 bp, Homo sapien
tgaactcgatgaacggagccctcac

SEQ ID NO: 1984814 - DNA, 25 bp, Homo sapien
cactgtgggtagcggagcgagggct

SEQ ID NO: 1984815 - DNA, 25 bp, Homo sapien
actgtgggtagcggagcgagggctg

SEQ ID NO: 1984816 - DNA, 25 bp, Homo sapien
ctgtgggtagcggagcgagggctgc

SEQ ID NO: 1984817 - DNA, 25 bp, Homo sapien
tcactgtgggtagcggagcgagggc

SEQ ID NO: 1984818 - DNA, 25 bp, Homo sapien
agggggacctttccactttcagatg

SEQ ID NO: 1984819 - DNA, 25 bp, Homo sapien
gggggacctttccactttcagatgc

SEQ ID NO: 1984820 - DNA, 25 bp, Homo sapien
gggacctttccactttcagatgctc

SEQ ID NO: 1984821 - DNA, 25 bp, Homo sapien
ggggacctttccactttcagatgct

SEQ ID NO: 1984822 - DNA, 25 bp, Homo sapien
gagatgatggctttggcttcatggg

SEQ ID NO: 1984823 - DNA, 25 bp, Homo sapien
tcttgcctttggcaggttcatacag

SEQ ID NO: 1984824 - DNA, 25 bp, Homo sapien
tgcctttggcaggttcatacagaaa

SEQ ID NO: 1984825 - DNA, 25 bp, Homo sapien
cttgcctttggcaggttcatacaga

SEQ ID NO: 1984826 - DNA, 25 bp, Homo sapien
cctttggcaggttcatacagaaact

SEQ ID NO: 1984827 - DNA, 25 bp, Homo sapien
cactatgagcttggcctttcactgc

SEQ ID NO: 1984828 - DNA, 25 bp, Homo sapien
tcttgacgcttcactatgagcttgg

SEQ ID NO: 1984829 - DNA, 25 bp, Homo sapien
tgctgtagaaatggttccatccgaa

SEQ ID NO: 1984830 - DNA, 25 bp, Homo sapien
tggttccatccgaaactattcttga

SEQ ID NO: 1984831 - DNA, 25 bp, Homo sapien
tatggaaaccaggtaggatggttgt

SEQ ID NO: 1984832 - DNA, 25 bp, Homo sapien
caggtaggatggttgtttctcagtg

SEQ ID NO: 1984833 - DNA, 25 bp, Homo sapien
gatatggaaaccaggtaggatggtt

SEQ ID NO: 1984834 - DNA, 25 bp, Homo sapien
gatggttgtttctcagtgaggtacc

SEQ ID NO: 1984835 - DNA, 25 bp, Homo sapien
gctgaacactctaatgaactaaggc

SEQ ID NO: 1984836 - DNA, 25 bp, Homo sapien
cataatcagagtgggatcaatagct

SEQ ID NO: 1984837 - DNA, 25 bp, Homo sapien
tggtaacacttctgataacctcccg

SEQ ID NO: 1984838 - DNA, 25 bp, Homo sapien
aagtgacatcattcatcgctacagg

SEQ ID NO: 1984839 - DNA, 25 bp, Homo sapien
gctgccttttcccatcagccctcct

SEQ ID NO: 1984840 - DNA, 25 bp, Homo sapien
cttgtgaacagaactgtctaaatct

SEQ ID NO: 1984841 - DNA, 25 bp, Homo sapien
cagaactgtctaaatctgctctctg

SEQ ID NO: 1984842 - DNA, 25 bp, Homo sapien
gaacagaactgtctaaatctgctct

SEQ ID NO: 1984843 - DNA, 25 bp, Homo sapien
cagcggaaagtgtagcttgttctaa

SEQ ID NO: 1984844 - DNA, 25 bp, Homo sapien
gaaggtgcacgtgggtcaggaaaag

SEQ ID NO: 1984845 - DNA, 25 bp, Homo sapien
gagactgagttctgtctccattgca

SEQ ID NO: 1984846 - DNA, 25 bp, Homo sapien
gagagtctagcacgtcttagtcctg

SEQ ID NO: 1984847 - DNA, 25 bp, Homo sapien
ctttgctccgagtggagcaggcaag

SEQ ID NO: 1984848 - DNA, 25 bp, Homo sapien
gctccgagtggagcaggcaagcact

SEQ ID NO: 1984849 - DNA, 25 bp, Homo sapien
ttgctccgagtggagcaggcaagca

SEQ ID NO: 1984850 - DNA, 25 bp, Homo sapien
tccgagtggagcaggcaagcacttg

SEQ ID NO: 1984851 - DNA, 25 bp, Homo sapien
accagcaaagccagtggatgggctg

SEQ ID NO: 1984852 - DNA, 25 bp, Homo sapien
tccccactgactgagtgacaaggcc

SEQ ID NO: 1984853 - DNA, 25 bp, Homo sapien
gactgagtgacaaggccaccagcaa

SEQ ID NO: 1984854 - DNA, 25 bp, Homo sapien
ttgctgctcccgcaaccccaagtcc

SEQ ID NO: 1984855 - DNA, 25 bp, Homo sapien
ttcttgtgcggacaacaagggcagt

SEQ ID NO: 1984856 - DNA, 25 bp, Homo sapien
aaacgtctttctctgggaatctgca

SEQ ID NO: 1984857 - DNA, 25 bp, Homo sapien
taaggtagccaaacccagcttcctc

SEQ ID NO: 1984858 - DNA, 25 bp, Homo sapien
tgcaaaatcgaaatttaaggtagcc

SEQ ID NO: 1984859 - DNA, 25 bp, Homo sapien
ctgcatctgtaacctatggtgacca

SEQ ID NO: 1984860 - DNA, 25 bp, Homo sapien
tcacttctgcaatgtgcatcctaat

SEQ ID NO: 1984861 - DNA, 25 bp, Homo sapien
ctgtaacctatggtgaccagggagg

SEQ ID NO: 1984862 - DNA, 25 bp, Homo sapien
tgcatcctaattagcatcctggccc

SEQ ID NO: 1984863 - DNA, 25 bp, Homo sapien
gatggcagaattaaccttccttcct

SEQ ID NO: 1984864 - DNA, 25 bp, Homo sapien
atctggatggtccatggaacgggct

SEQ ID NO: 1984865 - DNA, 25 bp, Homo sapien
tagtgggaatctggatggtccatgg

SEQ ID NO: 1984866 - DNA, 25 bp, Homo sapien
tggtccatggaacgggctgatggca

SEQ ID NO: 1984867 - DNA, 25 bp, Homo sapien
agctgggggatcaggccacgtgcag

SEQ ID NO: 1984868 - DNA, 25 bp, Homo sapien
gaggacagtggtgtgcaccccagtc

SEQ ID NO: 1984869 - DNA, 25 bp, Homo sapien
tctttttcacgctgacagcagagtc

SEQ ID NO: 1984870 - DNA, 25 bp, Homo sapien
cccatcgcatgctgttgaacttgtg

SEQ ID NO: 1984871 - DNA, 25 bp, Homo sapien
ctgttcagtggcctcagtccagttt

SEQ ID NO: 1984872 - DNA, 25 bp, Homo sapien
ggcactttgtgcaaccaagaggcag

SEQ ID NO: 1984873 - DNA, 25 bp, Homo sapien
gatgtctggctatataactttttgg

SEQ ID NO: 1984874 - DNA, 25 bp, Homo sapien
caagaggcagatctatgaattgaat

SEQ ID NO: 1984875 - DNA, 25 bp, Homo sapien
ttggttgattccaaactgtagattt

SEQ ID NO: 1984876 - DNA, 25 bp, Homo sapien
ctgatctgtagcactttggttgatt

SEQ ID NO: 1984877 - DNA, 25 bp, Homo sapien
gatctgtagcactttggttgattcc

SEQ ID NO: 1984878 - DNA, 25 bp, Homo sapien
atctgtagcactttggttgattcca

SEQ ID NO: 1984879 - DNA, 25 bp, Homo sapien
ttccttcctatcagccacaattcga

SEQ ID NO: 1984880 - DNA, 25 bp, Homo sapien
tgttgattacatgctctaactgcca

SEQ ID NO: 1984881 - DNA, 25 bp, Homo sapien
gccacaattcgactgccttttttca

SEQ ID NO: 1984882 - DNA, 25 bp, Homo sapien
ctttgtagatgcagacttgttgatt

SEQ ID NO: 1984883 - DNA, 25 bp, Homo sapien
cccaaaggactgggtactgccagag

SEQ ID NO: 1984884 - DNA, 25 bp, Homo sapien
tgagtctcaaaatctgctaaacaaa

SEQ ID NO: 1984885 - DNA, 25 bp, Homo sapien
gagaccatctgagtctcaaaatctg

SEQ ID NO: 1984886 - DNA, 25 bp, Homo sapien
gccagagcattggttgagaccatct

SEQ ID NO: 1984887 - DNA, 25 bp, Homo sapien
ggtataagctctcttcagttggaga

SEQ ID NO: 1984888 - DNA, 25 bp, Homo sapien
ctaacaaattggtataagctctctt

SEQ ID NO: 1984889 - DNA, 25 bp, Homo sapien
tggagacccaaaggagcctgctgct

SEQ ID NO: 1984890 - DNA, 25 bp, Homo sapien
ccaaaggagcctgctgctccaatag

SEQ ID NO: 1984891 - DNA, 25 bp, Homo sapien
cacacacttgtgagaactttaccgg

SEQ ID NO: 1984892 - DNA, 25 bp, Homo sapien
ggaccataaattggcatctgtcaga

SEQ ID NO: 1984893 - DNA, 25 bp, Homo sapien
gagagtcaagacataaattggacca

SEQ ID NO: 1984894 - DNA, 25 bp, Homo sapien
tgcttggccttcgtatgagagtcaa

SEQ ID NO: 1984895 - DNA, 25 bp, Homo sapien
cactggaccatacatgagattgtaa

SEQ ID NO: 1984896 - DNA, 25 bp, Homo sapien
aaatccatggctctaggcttaaggc

SEQ ID NO: 1984897 - DNA, 25 bp, Homo sapien
ccatgtgtccttttcgtgatgttca

SEQ ID NO: 1984898 - DNA, 25 bp, Homo sapien
tataatctctccaagttgacatcca

SEQ ID NO: 1984899 - DNA, 25 bp, Homo sapien
ctgctaccttcccacggcagccaat

SEQ ID NO: 1984900 - DNA, 25 bp, Homo sapien
ctaccttcccacggcagccaatggc

SEQ ID NO: 1984901 - DNA, 25 bp, Homo sapien
accttcccacggcagccaatggcag

SEQ ID NO: 1984902 - DNA, 25 bp, Homo sapien
tgctaccttcccacggcagccaatg

SEQ ID NO: 1984903 - DNA, 25 bp, Homo sapien
gcttcttgaaactgggtagcgagtc

SEQ ID NO: 1984904 - DNA, 25 bp, Homo sapien
tcaaacagtctacagccggagactg

SEQ ID NO: 1984905 - DNA, 25 bp, Homo sapien
cggagactgtctgcccatcatgctt

SEQ ID NO: 1984906 - DNA, 25 bp, Homo sapien
actgggtagcgagtcctgccttgaa

SEQ ID NO: 1984907 - DNA, 25 bp, Homo sapien
ctagcacggaggtgggtaagctgtc

SEQ ID NO: 1984908 - DNA, 25 bp, Homo sapien
tctgctcatttctgaagtttgccac

SEQ ID NO: 1984909 - DNA, 25 bp, Homo sapien
aggtgggtaagctgtctgctcattt

SEQ ID NO: 1984910 - DNA, 25 bp, Homo sapien
cacggaggtgggtaagctgtctgct

SEQ ID NO: 1984911 - DNA, 25 bp, Homo sapien
taggactaagattccaccagatggc

SEQ ID NO: 1984912 - DNA, 25 bp, Homo sapien
acgaaacatcgtgccttgtcttagg

SEQ ID NO: 1984913 - DNA, 25 bp, Homo sapien
cacgaaacatcgtgccttgtcttag

SEQ ID NO: 1984914 - DNA, 25 bp, Homo sapien
gccttgtcttaggactaagattcca

SEQ ID NO: 1984915 - DNA, 25 bp, Homo sapien
actgtcggagtaggttgcaggaagc

SEQ ID NO: 1984916 - DNA, 25 bp, Homo sapien
tcggagtaggttgcaggaagcatgg

SEQ ID NO: 1984917 - DNA, 25 bp, Homo sapien
tgtcggagtaggttgcaggaagcat

SEQ ID NO: 1984918 - DNA, 25 bp, Homo sapien
tcactgtcggagtaggttgcaggaa

SEQ ID NO: 1984919 - DNA, 25 bp, Homo sapien
gttggttgaggcattcagccctggt

SEQ ID NO: 1984920 - DNA, 25 bp, Homo sapien
cgaaagttaacgatataagcatgct

SEQ ID NO: 1984921 - DNA, 25 bp, Homo sapien
ccgtgataccttgtttaaactgctg

SEQ ID NO: 1984922 - DNA, 25 bp, Homo sapien
cagccctggtaaataactctcttga

SEQ ID NO: 1984923 - DNA, 25 bp, Homo sapien
cttcacagtgcaaaaccattgccct

SEQ ID NO: 1984924 - DNA, 25 bp, Homo sapien
agtaatggagcaagacagccgcagc

SEQ ID NO: 1984925 - DNA, 25 bp, Homo sapien
tttacagagaacattgacctgctgc

SEQ ID NO: 1984926 - DNA, 25 bp, Homo sapien
cactcttgctcatcataggaagtaa

SEQ ID NO: 1984927 - DNA, 25 bp, Homo sapien
tatgcagatcgatgtactgggcagg

SEQ ID NO: 1984928 - DNA, 25 bp, Homo sapien
tgcattgacaatatgcagatcgatg

SEQ ID NO: 1984929 - DNA, 25 bp, Homo sapien
ggaggatgagttgaagtaaagctca

SEQ ID NO: 1984930 - DNA, 25 bp, Homo sapien
gttgaagtaaagctcaagatctggg

SEQ ID NO: 1984931 - DNA, 25 bp, Homo sapien
tgcagtactatgaattccctgtgag

SEQ ID NO: 1984932 - DNA, 25 bp, Homo sapien
gagtccaggtgagaagcattaaacg

SEQ ID NO: 1984933 - DNA, 25 bp, Homo sapien
gggctagtgccacatctgcagtact

SEQ ID NO: 1984934 - DNA, 25 bp, Homo sapien
cattaaacgtatgtggttcttcctc

SEQ ID NO: 1984935 - DNA, 25 bp, Homo sapien
catcagatgactctgttggcctgaa

SEQ ID NO: 1984936 - DNA, 25 bp, Homo sapien
gtgatttacctactacttcaaacca

SEQ ID NO: 1984937 - DNA, 25 bp, Homo sapien
gtcctgcagtgatttacctactact

SEQ ID NO: 1984938 - DNA, 25 bp, Homo sapien
agatgactctgttggcctgaagagc

SEQ ID NO: 1984939 - DNA, 25 bp, Homo sapien
gttgatctcccctggtgatagcaat

SEQ ID NO: 1984940 - DNA, 25 bp, Homo sapien
cccctggtgatagcaatctgccttt

SEQ ID NO: 1984941 - DNA, 25 bp, Homo sapien
gtcttgaatagccagctgtgagtct

SEQ ID NO: 1984942 - DNA, 25 bp, Homo sapien
tcttgaatagccagctgtgagtctt

SEQ ID NO: 1984943 - DNA, 25 bp, Homo sapien
atgacttataaaattcatccctcat

SEQ ID NO: 1984944 - DNA, 25 bp, Homo sapien
atacatagtcaaaaaggctgcaagc

SEQ ID NO: 1984945 - DNA, 25 bp, Homo sapien
tagtgcgtgtggcatataaactcac

SEQ ID NO: 1984946 - DNA, 25 bp, Homo sapien
gaataaggcaggtttccattgccag

SEQ ID NO: 1984947 - DNA, 25 bp, Homo sapien
tattgatgccgtgcccagtttagga

SEQ ID NO: 1984948 - DNA, 25 bp, Homo sapien
ctactctcaacgcagcatgcaagct

SEQ ID NO: 1984949 - DNA, 25 bp, Homo sapien
aatcttctttacattacctgaggcc

SEQ ID NO: 1984950 - DNA, 25 bp, Homo sapien
tactctcaacgcagcatgcaagctg

SEQ ID NO: 1984951 - DNA, 25 bp, Homo sapien
gctgttagcaatcttctttacatta

SEQ ID NO: 1984952 - DNA, 25 bp, Homo sapien
tagatatgacctctgtactcagcgg

SEQ ID NO: 1984953 - DNA, 25 bp, Homo sapien
tgtactcagcggacaactgggcaaa

SEQ ID NO: 1984954 - DNA, 25 bp, Homo sapien
cctctgtactcagcggacaactggg

SEQ ID NO: 1984955 - DNA, 25 bp, Homo sapien
tatgacctctgtactcagcggacaa

SEQ ID NO: 1984956 - DNA, 25 bp, Homo sapien
cagttgacaggggacatgcatttga

SEQ ID NO: 1984957 - DNA, 25 bp, Homo sapien
cacagcagttgctcagttgacaggg

SEQ ID NO: 1984958 - DNA, 25 bp, Homo sapien
gaaaccacagcagttgctcagttga

SEQ ID NO: 1984959 - DNA, 25 bp, Homo sapien
tttgaaaccacagcagttgctcagt

SEQ ID NO: 1984960 - DNA, 25 bp, Homo sapien
ggcagggagctcttcatcaaccagg

SEQ ID NO: 1984961 - DNA, 25 bp, Homo sapien
cagggagctcttcatcaaccagggc

SEQ ID NO: 1984962 - DNA, 25 bp, Homo sapien
aaggcagggagctcttcatcaacca

SEQ ID NO: 1984963 - DNA, 25 bp, Homo sapien
tgaaggcagggagctcttcatcaac

SEQ ID NO: 1984964 - DNA, 25 bp, Homo sapien
gatctcttatggtatgaatagcccc

SEQ ID NO: 1984965 - DNA, 25 bp, Homo sapien
ggaacaggtgctcctattgctgagt

SEQ ID NO: 1984966 - DNA, 25 bp, Homo sapien
gctaaatgccttgtacaagcctggt

SEQ ID NO: 1984967 - DNA, 25 bp, Homo sapien
aatcttaacatccacgcagcctgaa

SEQ ID NO: 1984968 - DNA, 25 bp, Homo sapien
catttgtccagcacacatgtgtggt

SEQ ID NO: 1984969 - DNA, 25 bp, Homo sapien
gagatgccagcgcatttgtccagca

SEQ ID NO: 1984970 - DNA, 25 bp, Homo sapien
tctctgcacacgccggagatgccag

SEQ ID NO: 1984971 - DNA, 25 bp, Homo sapien
ttccagttgcttccctaatgggcca

SEQ ID NO: 1984972 - DNA, 25 bp, Homo sapien
gataaatctaatccacctgacccaa

SEQ ID NO: 1984973 - DNA, 25 bp, Homo sapien
caattaacagtagacgaagaggatg

SEQ ID NO: 1984974 - DNA, 25 bp, Homo sapien
gacccaacaccattatcccttccac

SEQ ID NO: 1984975 - DNA, 25 bp, Homo sapien
aaagggcgtcttttgcaattaacag

SEQ ID NO: 1984976 - DNA, 25 bp, Homo sapien
gagaagatgtgaatccccttcaccc

SEQ ID NO: 1984977 - DNA, 25 bp, Homo sapien
ttgggcagctttaccggagggcaaa

SEQ ID NO: 1984978 - DNA, 25 bp, Homo sapien
ctctcttccgtgtgttttgctagca

SEQ ID NO: 1984979 - DNA, 25 bp, Homo sapien
taccggagggcaaaacagagaagat

SEQ ID NO: 1984980 - DNA, 25 bp, Homo sapien
cagagcaaatcaggccttccactca

SEQ ID NO: 1984981 - DNA, 25 bp, Homo sapien
atgcacattccaccatccagtaagg

SEQ ID NO: 1984982 - DNA, 25 bp, Homo sapien
tcaactcttgccatttaagctggaa

SEQ ID NO: 1984983 - DNA, 25 bp, Homo sapien
ggaaggacttctgcgcacagagcaa

SEQ ID NO: 1984984 - DNA, 25 bp, Homo sapien
gcctcattaggcaatctcaatgcag

SEQ ID NO: 1984985 - DNA, 25 bp, Homo sapien
gaaaagcgtttggtccagctatctg

SEQ ID NO: 1984986 - DNA, 25 bp, Homo sapien
tatctgaggagttccactaattgcc

SEQ ID NO: 1984987 - DNA, 25 bp, Homo sapien
tacatcagtgcaactcttgggtata

SEQ ID NO: 1984988 - DNA, 25 bp, Homo sapien
atgccaaagaggtaatgtctagctg

SEQ ID NO: 1984989 - DNA, 25 bp, Homo sapien
gccaaagaggtaatgtctagctgga

SEQ ID NO: 1984990 - DNA, 25 bp, Homo sapien
tgccaaagaggtaatgtctagctgg

SEQ ID NO: 1984991 - DNA, 25 bp, Homo sapien
gtcttcacatcaagtccagtgagga

SEQ ID NO: 1984992 - DNA, 25 bp, Homo sapien
aggaaaaattcaggaggatcatttg

SEQ ID NO: 1984993 - DNA, 25 bp, Homo sapien
gaacatgtgatactaagtgtgccac

SEQ ID NO: 1984994 - DNA, 25 bp, Homo sapien
ccacactggtgtgatgtgatagtaa

SEQ ID NO: 1984995 - DNA, 25 bp, Homo sapien
ccttcttatgatactggtgaattac

SEQ ID NO: 1984996 - DNA, 25 bp, Homo sapien
tggatggatagacaggaacgttatt

SEQ ID NO: 1984997 - DNA, 25 bp, Homo sapien
gatagacaggaacgttattcttgga

SEQ ID NO: 1984998 - DNA, 25 bp, Homo sapien
tattcttggaatttgttgacaacat

SEQ ID NO: 1984999 - DNA, 25 bp, Homo sapien
tggggctcaatattcacggaggttg

SEQ ID NO: 1985000 - DNA, 25 bp, Homo sapien
caatattcacggaggttgcagaatc

SEQ ID NO: 1985001 - DNA, 25 bp, Homo sapien
gcaaaactgagcgtagcagaacaat

SEQ ID NO: 1985002 - DNA, 25 bp, Homo sapien
catcaatctccatggaaaagaaggc

SEQ ID NO: 1985003 - DNA, 25 bp, Homo sapien
tgctgcagggtggagtgttaccatc

SEQ ID NO: 1985004 - DNA, 25 bp, Homo sapien
gctgcagggtggagtgttaccatca

SEQ ID NO: 1985005 - DNA, 25 bp, Homo sapien
aaatgctgcagggtggagtgttacc

SEQ ID NO: 1985006 - DNA, 25 bp, Homo sapien
cccaaatgctgcagggtggagtgtt

SEQ ID NO: 1985007 - DNA, 25 bp, Homo sapien
tgttattgcccatttgctgactgaa

SEQ ID NO: 1985008 - DNA, 25 bp, Homo sapien
tatacaactgctcactatcccaaga

SEQ ID NO: 1985009 - DNA, 25 bp, Homo sapien
aagtccctccacagttctcggattg

SEQ ID NO: 1985010 - DNA, 25 bp, Homo sapien
gctcagctaaccaagtggtggcaga

SEQ ID NO: 1985011 - DNA, 25 bp, Homo sapien
gaccactctcgcaggctctatcttg

SEQ ID NO: 1985012 - DNA, 25 bp, Homo sapien
accactctcgcaggctctatcttga

SEQ ID NO: 1985013 - DNA, 25 bp, Homo sapien
ccactctcgcaggctctatcttgaa

SEQ ID NO: 1985014 - DNA, 25 bp, Homo sapien
tgcttgtgtttcttagaattccttt

SEQ ID NO: 1985015 - DNA, 25 bp, Homo sapien
gaattcctttcaaataagctactta

SEQ ID NO: 1985016 - DNA, 25 bp, Homo sapien
cttgtgtttcttagaattcctttca

SEQ ID NO: 1985017 - DNA, 25 bp, Homo sapien
ttcttagaattcctttcaaataagc

SEQ ID NO: 1985018 - DNA, 25 bp, Homo sapien
tcctgattctgtgtcttacgctcat

SEQ ID NO: 1985019 - DNA, 25 bp, Homo sapien
ttttcctgattctgtgtcttacgct

SEQ ID NO: 1985020 - DNA, 25 bp, Homo sapien
ttaaatgggcttttcctgattctgt

SEQ ID NO: 1985021 - DNA, 25 bp, Homo sapien
aatgggcttttcctgattctgtgtc

SEQ ID NO: 1985022 - DNA, 25 bp, Homo sapien
cctttggcccataggcaatcacagt

SEQ ID NO: 1985023 - DNA, 25 bp, Homo sapien
caaagcagagggatccctttggccc

SEQ ID NO: 1985024 - DNA, 25 bp, Homo sapien
cacagttaaaagtgtgagggagtca

SEQ ID NO: 1985025 - DNA, 25 bp, Homo sapien
ccctcaactcatggcgggattggaa

SEQ ID NO: 1985026 - DNA, 25 bp, Homo sapien
tctaagtttctcacaggaaagaggc

SEQ ID NO: 1985027 - DNA, 25 bp, Homo sapien
taatgcagcaattcactaaggactg

SEQ ID NO: 1985028 - DNA, 25 bp, Homo sapien
tacaaaatatttgcgagtgctcctg

SEQ ID NO: 1985029 - DNA, 25 bp, Homo sapien
gaactacacttgtcagaagaactga

SEQ ID NO: 1985030 - DNA, 25 bp, Homo sapien
ggcaatgactgccttattaatgcag

SEQ ID NO: 1985031 - DNA, 25 bp, Homo sapien
gacgttagggagaatatcgacaaat

SEQ ID NO: 1985032 - DNA, 25 bp, Homo sapien
cagctgtgacatgggcctgttcgga

SEQ ID NO: 1985033 - DNA, 25 bp, Homo sapien
tgatgactgacacctgattccggag

SEQ ID NO: 1985034 - DNA, 25 bp, Homo sapien
aatgatgttgtgagtcacctgagcc

SEQ ID NO: 1985035 - DNA, 25 bp, Homo sapien
tagtcatgagatgcagtggtatgct

SEQ ID NO: 1985036 - DNA, 25 bp, Homo sapien
ttttatagtcatgagatgcagtggt

SEQ ID NO: 1985037 - DNA, 25 bp, Homo sapien
tatagtcatgagatgcagtggtatg

SEQ ID NO: 1985038 - DNA, 25 bp, Homo sapien
tttatagtcatgagatgcagtggta

SEQ ID NO: 1985039 - DNA, 25 bp, Homo sapien
aatttgactcagaggctccatgcat

SEQ ID NO: 1985040 - DNA, 25 bp, Homo sapien
tccaatttgactcagaggctccatg

SEQ ID NO: 1985041 - DNA, 25 bp, Homo sapien
tgtccaatttgactcagaggctcca

SEQ ID NO: 1985042 - DNA, 25 bp, Homo sapien
cttctgtccaatttgactcagaggc

SEQ ID NO: 1985043 - DNA, 25 bp, Homo sapien
ggcagtcatctcctaagttgctaca

SEQ ID NO: 1985044 - DNA, 25 bp, Homo sapien
ctacaaagttggctgttagggacat

SEQ ID NO: 1985045 - DNA, 25 bp, Homo sapien
ctaacacggcgaaagtaagcagcaa

SEQ ID NO: 1985046 - DNA, 25 bp, Homo sapien
aaatggttgctgatgggcacggccc

SEQ ID NO: 1985047 - DNA, 25 bp, Homo sapien
ctgcaagttgggaatgtagttgctc

SEQ ID NO: 1985048 - DNA, 25 bp, Homo sapien
attctcactgttgaactgcaagttg

SEQ ID NO: 1985049 - DNA, 25 bp, Homo sapien
gctgttttggagaactagagcttct

SEQ ID NO: 1985050 - DNA, 25 bp, Homo sapien
tccatccagttggagctgttttgga

SEQ ID NO: 1985051 - DNA, 25 bp, Homo sapien
gctttggtttttccttgacatccag

SEQ ID NO: 1985052 - DNA, 25 bp, Homo sapien
tttggtttttccttgacatccagcc

SEQ ID NO: 1985053 - DNA, 25 bp, Homo sapien
tggtttttccttgacatccagccat

SEQ ID NO: 1985054 - DNA, 25 bp, Homo sapien
ctgctttggtttttccttgacatcc

SEQ ID NO: 1985055 - DNA, 25 bp, Homo sapien
tatgggacttcactctctggttaac

SEQ ID NO: 1985056 - DNA, 25 bp, Homo sapien
aactctggtctatgggacttcactc

SEQ ID NO: 1985057 - DNA, 25 bp, Homo sapien
ttgccctttcaaggctctaacaatg

SEQ ID NO: 1985058 - DNA, 25 bp, Homo sapien
acaatgaactctggtctatgggact

SEQ ID NO: 1985059 - DNA, 25 bp, Homo sapien
cagcagcagttgtgtctacaaatgc

SEQ ID NO: 1985060 - DNA, 25 bp, Homo sapien
tattgcccgaacaaagaggtgcatt

SEQ ID NO: 1985061 - DNA, 25 bp, Homo sapien
ttttagtggagaacaatagtcgctc

SEQ ID NO: 1985062 - DNA, 25 bp, Homo sapien
agccaccaggcgtgctattgcccga

SEQ ID NO: 1985063 - DNA, 25 bp, Homo sapien
ctctgtcactactggccggctgcca

SEQ ID NO: 1985064 - DNA, 25 bp, Homo sapien
ttgccgagggaatgtcactgtcctg

SEQ ID NO: 1985065 - DNA, 25 bp, Homo sapien
tgtcctgcctgtgtaacagggctgg

SEQ ID NO: 1985066 - DNA, 25 bp, Homo sapien
gtgctccttgccgagggaatgtcac

SEQ ID NO: 1985067 - DNA, 25 bp, Homo sapien
gaggagccataaggcaaagtatttt

SEQ ID NO: 1985068 - DNA, 25 bp, Homo sapien
gcagatgtatgtaggtgacgataga

SEQ ID NO: 1985069 - DNA, 25 bp, Homo sapien
tgaatgttctgcctgaggaatggcc

SEQ ID NO: 1985070 - DNA, 25 bp, Homo sapien
ttcaaagatcttaggaggagccata

SEQ ID NO: 1985071 - DNA, 25 bp, Homo sapien
cagattttccgtgtcatcactaaga

SEQ ID NO: 1985072 - DNA, 25 bp, Homo sapien
taagtgttcctgttatgatgcagaa

SEQ ID NO: 1985073 - DNA, 25 bp, Homo sapien
cattgacagaatggctgaagtgttc

SEQ ID NO: 1985074 - DNA, 25 bp, Homo sapien
catcttccacagtgcgaactgcttg

SEQ ID NO: 1985075 - DNA, 25 bp, Homo sapien
ttgttccagtagttgctcaagcgtg

SEQ ID NO: 1985076 - DNA, 25 bp, Homo sapien
cctggcctgcaaaatcttgcacagc

SEQ ID NO: 1985077 - DNA, 25 bp, Homo sapien
taataagttgagttccaatgaattg

SEQ ID NO: 1985078 - DNA, 25 bp, Homo sapien
tggcctgcaaaatcttgcacagctt

SEQ ID NO: 1985079 - DNA, 25 bp, Homo sapien
tggtgggtacgtggctttgctcatc

SEQ ID NO: 1985080 - DNA, 25 bp, Homo sapien
tttgctttggcttatactgcctgtg

SEQ ID NO: 1985081 - DNA, 25 bp, Homo sapien
cctgggttttagcaaatgcgtgggt

SEQ ID NO: 1985082 - DNA, 25 bp, Homo sapien
ggtgaaacagccagttgctaatatc

SEQ ID NO: 1985083 - DNA, 25 bp, Homo sapien
tcactacccacaggggtgaggtctt

SEQ ID NO: 1985084 - DNA, 25 bp, Homo sapien
tgtcccagggtctaccgttatgtaa

SEQ ID NO: 1985085 - DNA, 25 bp, Homo sapien
catctactgtcccagggtctaccgt

SEQ ID NO: 1985086 - DNA, 25 bp, Homo sapien
actgagctttcatctactgtcccag

SEQ ID NO: 1985087 - DNA, 25 bp, Homo sapien
acttctcaggaaggttgatcaacaa

SEQ ID NO: 1985088 - DNA, 25 bp, Homo sapien
aacttctcaggaaggttgatcaaca

SEQ ID NO: 1985089 - DNA, 25 bp, Homo sapien
caggaaggttgatcaacaaagataa

SEQ ID NO: 1985090 - DNA, 25 bp, Homo sapien
tctcaggaaggttgatcaacaaaga

SEQ ID NO: 1985091 - DNA, 25 bp, Homo sapien
gtttctagataagtctaacctgatt

SEQ ID NO: 1985092 - DNA, 25 bp, Homo sapien
cttcccccagtttctagataagtct

SEQ ID NO: 1985093 - DNA, 25 bp, Homo sapien
ttcgttgtctggcacgtcctttttg

SEQ ID NO: 1985094 - DNA, 25 bp, Homo sapien
tgtctggcacgtcctttttgtttta

SEQ ID NO: 1985095 - DNA, 25 bp, Homo sapien
gagctgcgaagctgccaaaacagta

SEQ ID NO: 1985096 - DNA, 25 bp, Homo sapien
tgaacttgccgtgctgaaaaatggc

SEQ ID NO: 1985097 - DNA, 25 bp, Homo sapien
tcttggaacagctagaggagccagc

SEQ ID NO: 1985098 - DNA, 25 bp, Homo sapien
gagctcgccaaaggagtcagtccca

SEQ ID NO: 1985099 - DNA, 25 bp, Homo sapien
aagccaacaataatgcagtttgaaa

SEQ ID NO: 1985100 - DNA, 25 bp, Homo sapien
catctggtcagatttactaatgaat

SEQ ID NO: 1985101 - DNA, 25 bp, Homo sapien
gaaaaaagcgtgatgtaattgtgtc

SEQ ID NO: 1985102 - DNA, 25 bp, Homo sapien
gagaatagcagcttaggattcctga

SEQ ID NO: 1985103 - DNA, 25 bp, Homo sapien
aatgcaatgaacctctggttctctg

SEQ ID NO: 1985104 - DNA, 25 bp, Homo sapien
ggaaatgcaatgaacctctggttct

SEQ ID NO: 1985105 - DNA, 25 bp, Homo sapien
atgcaatgaacctctggttctctgt

SEQ ID NO: 1985106 - DNA, 25 bp, Homo sapien
gaaatgcaatgaacctctggttctc

SEQ ID NO: 1985107 - DNA, 25 bp, Homo sapien
tgcaatgtatgtcatcaaagtggcc

SEQ ID NO: 1985108 - DNA, 25 bp, Homo sapien
gactgttaaggggactatgttttgc

SEQ ID NO: 1985109 - DNA, 25 bp, Homo sapien
tgcaatgggcattctctgaatatcc

SEQ ID NO: 1985110 - DNA, 25 bp, Homo sapien
ctgaatatcctttgaatggacaaat

SEQ ID NO: 1985111 - DNA, 25 bp, Homo sapien
aatcatttagctgtgcagatccacg

SEQ ID NO: 1985112 - DNA, 25 bp, Homo sapien
tcctttgacttctaaactgggtgat

SEQ ID NO: 1985113 - DNA, 25 bp, Homo sapien
tgtgcagatccacgactgtgccgac

SEQ ID NO: 1985114 - DNA, 25 bp, Homo sapien
tggattactaaaagccacgagtgca

SEQ ID NO: 1985115 - DNA, 25 bp, Homo sapien
ttactaaaggaattcatgcatcttg

SEQ ID NO: 1985116 - DNA, 25 bp, Homo sapien
tgtacaataccatacagccctctgc

SEQ ID NO: 1985117 - DNA, 25 bp, Homo sapien
agcagatccgttactaaaggaattc

SEQ ID NO: 1985118 - DNA, 25 bp, Homo sapien
aaaactgtacaataccatacagccc

SEQ ID NO: 1985119 - DNA, 25 bp, Homo sapien
ttttatcacttctatttagctcttt

SEQ ID NO: 1985120 - DNA, 25 bp, Homo sapien
ctctttctttggtgaagcaaggata

SEQ ID NO: 1985121 - DNA, 25 bp, Homo sapien
gctccattgctggtgttttatcact

SEQ ID NO: 1985122 - DNA, 25 bp, Homo sapien
tagctctttctttggtgaagcaagg

SEQ ID NO: 1985123 - DNA, 25 bp, Homo sapien
ggggagccagcagggagattgtcca

SEQ ID NO: 1985124 - DNA, 25 bp, Homo sapien
ttgaggaagggcacagggatgctcc

SEQ ID NO: 1985125 - DNA, 25 bp, Homo sapien
ggcacagggatgctcccagggaggg

SEQ ID NO: 1985126 - DNA, 25 bp, Homo sapien
gggagccagcagggagattgtccat

SEQ ID NO: 1985127 - DNA, 25 bp, Homo sapien
tccttgcaaagaggccagaggtcac

SEQ ID NO: 1985128 - DNA, 25 bp, Homo sapien
ggctgctaacggagaagcctttctg

SEQ ID NO: 1985129 - DNA, 25 bp, Homo sapien
aggtcacctggctgctaacggagaa

SEQ ID NO: 1985130 - DNA, 25 bp, Homo sapien
gagtccttgcaaagaggccagaggt

SEQ ID NO: 1985131 - DNA, 25 bp, Homo sapien
gattctctttttgcttacagtcctt

SEQ ID NO: 1985132 - DNA, 25 bp, Homo sapien
ttacagtcctttgtgtgcaggcatc

SEQ ID NO: 1985133 - DNA, 25 bp, Homo sapien
gcttacagtcctttgtgtgcaggca

SEQ ID NO: 1985134 - DNA, 25 bp, Homo sapien
gcagagctgagcagattctcttttt

SEQ ID NO: 1985135 - DNA, 25 bp, Homo sapien
tcttcgcggatcttcaacaaatgtg

SEQ ID NO: 1985136 - DNA, 25 bp, Homo sapien
tctgctgccgcactttcaccggtat

SEQ ID NO: 1985137 - DNA, 25 bp, Homo sapien
tgcttcctcgctagccaggtttccg

SEQ ID NO: 1985138 - DNA, 25 bp, Homo sapien
gcctggatggctgcattctgctgcc

SEQ ID NO: 1985139 - DNA, 25 bp, Homo sapien
catagaacgtatgcaaggcagcagt

SEQ ID NO: 1985140 - DNA, 25 bp, Homo sapien
ggagcagagcaaagccatagaacgt

SEQ ID NO: 1985141 - DNA, 25 bp, Homo sapien
cagcagtgaccagcaaagggtgaca

SEQ ID NO: 1985142 - DNA, 25 bp, Homo sapien
tgggtgtaaaccagaaatctgcagg

SEQ ID NO: 1985143 - DNA, 25 bp, Homo sapien
ttggcagcatcatgccagccagcag

SEQ ID NO: 1985144 - DNA, 25 bp, Homo sapien
tggcagcatcatgccagccagcagg

SEQ ID NO: 1985145 - DNA, 25 bp, Homo sapien
tgtccattggcagcatcatgccagc

SEQ ID NO: 1985146 - DNA, 25 bp, Homo sapien
ccattggcagcatcatgccagccag

SEQ ID NO: 1985147 - DNA, 25 bp, Homo sapien
ggtgggtgtccatgtcgcttcttgt

SEQ ID NO: 1985148 - DNA, 25 bp, Homo sapien
gccttgcagcatctacaattgccat

SEQ ID NO: 1985149 - DNA, 25 bp, Homo sapien
gctgccttgcagcatctacaattgc

SEQ ID NO: 1985150 - DNA, 25 bp, Homo sapien
gggtgtccatgtcgcttcttgtttt

SEQ ID NO: 1985151 - DNA, 25 bp, Homo sapien
ggcttgccttgtgagccgctatcaa

SEQ ID NO: 1985152 - DNA, 25 bp, Homo sapien
cctgagcattgtgtgcagtggaaca

SEQ ID NO: 1985153 - DNA, 25 bp, Homo sapien
cagttcccaagtgaaaggacacttc

SEQ ID NO: 1985154 - DNA, 25 bp, Homo sapien
ttccatttttgtatggtgaggccag

SEQ ID NO: 1985155 - DNA, 25 bp, Homo sapien
ggtaatctggagcaggtagacttgc

SEQ ID NO: 1985156 - DNA, 25 bp, Homo sapien
ccgttgagttccaagctcacaccag

SEQ ID NO: 1985157 - DNA, 25 bp, Homo sapien
caacccagcacaccttggtaatctg

SEQ ID NO: 1985158 - DNA, 25 bp, Homo sapien
tcacaccaggttgtactggcctggg

SEQ ID NO: 1985159 - DNA, 25 bp, Homo sapien
gaattctgaacaaaaccgacatcag

SEQ ID NO: 1985160 - DNA, 25 bp, Homo sapien
cagcagaaatatcataactcttggc

SEQ ID NO: 1985161 - DNA, 25 bp, Homo sapien
ccgacatcagttaaagttgcttctg

SEQ ID NO: 1985162 - DNA, 25 bp, Homo sapien
ttgccccgggcaaacttttcactga

SEQ ID NO: 1985163 - DNA, 25 bp, Homo sapien
tttctagattcaagactacatcgtc

SEQ ID NO: 1985164 - DNA, 25 bp, Homo sapien
aacaagttccacacccgaatgagag

SEQ ID NO: 1985165 - DNA, 25 bp, Homo sapien
ttctctggtaaacagacttaaagtg

SEQ ID NO: 1985166 - DNA, 25 bp, Homo sapien
acacccgaatgagagtggcactcct

SEQ ID NO: 1985167 - DNA, 25 bp, Homo sapien
gcagcttgagctccggccagattct

SEQ ID NO: 1985168 - DNA, 25 bp, Homo sapien
cagagaactggtaaaaccctgagca

SEQ ID NO: 1985169 - DNA, 25 bp, Homo sapien
gtctactattatgtccttcatccca

SEQ ID NO: 1985170 - DNA, 25 bp, Homo sapien
tcttccctttcatcgacttgtctct

SEQ ID NO: 1985171 - DNA, 25 bp, Homo sapien
tatcctcttgaggtatttaggttca

SEQ ID NO: 1985172 - DNA, 25 bp, Homo sapien
tgaggtatttaggttcaaagaatcc

SEQ ID NO: 1985173 - DNA, 25 bp, Homo sapien
tccattgtcagctgatatcctcttg

SEQ ID NO: 1985174 - DNA, 25 bp, Homo sapien
ctgccagcatgggaactccattgtc

SEQ ID NO: 1985175 - DNA, 25 bp, Homo sapien
tttccaagaatgtctggctcttctt

SEQ ID NO: 1985176 - DNA, 25 bp, Homo sapien
tccaagaatgtctggctcttctttc

SEQ ID NO: 1985177 - DNA, 25 bp, Homo sapien
ccaagaatgtctggctcttctttca

SEQ ID NO: 1985178 - DNA, 25 bp, Homo sapien
actttccaagaatgtctggctcttc

SEQ ID NO: 1985179 - DNA, 25 bp, Homo sapien
gttttgtctgtggtcagacctccgc

SEQ ID NO: 1985180 - DNA, 25 bp, Homo sapien
ttgtctgtggtcagacctccgctgg

SEQ ID NO: 1985181 - DNA, 25 bp, Homo sapien
tttgtctgtggtcagacctccgctg

SEQ ID NO: 1985182 - DNA, 25 bp, Homo sapien
ttttgtctgtggtcagacctccgct

SEQ ID NO: 1985183 - DNA, 25 bp, Homo sapien
tctgccgtagactctggtctctggt

SEQ ID NO: 1985184 - DNA, 25 bp, Homo sapien
gctatcacgagtaaagtctttatga

SEQ ID NO: 1985185 - DNA, 25 bp, Homo sapien
cagaaatctgggctatagctatcac

SEQ ID NO: 1985186 - DNA, 25 bp, Homo sapien
tcgccatctgccgtagactctggtc

SEQ ID NO: 1985187 - DNA, 25 bp, Homo sapien
gaagagtaagtttcttttgcaggaa

SEQ ID NO: 1985188 - DNA, 25 bp, Homo sapien
tgcaggaatgctcagatctaccaga

SEQ ID NO: 1985189 - DNA, 25 bp, Homo sapien
taacaaatgtggtagaagataattt

SEQ ID NO: 1985190 - DNA, 25 bp, Homo sapien
gagagttactgttccaaaaaactga

SEQ ID NO: 1985191 - DNA, 25 bp, Homo sapien
aagcctcagctggagttgcgttggg

SEQ ID NO: 1985192 - DNA, 25 bp, Homo sapien
gagtcgggaagccaactgtgtgcat

SEQ ID NO: 1985193 - DNA, 25 bp, Homo sapien
tttgccactgtaggtattcagcccg

SEQ ID NO: 1985194 - DNA, 25 bp, Homo sapien
cagcccgaatcaggcctagctgcag

SEQ ID NO: 1985195 - DNA, 25 bp, Homo sapien
gcttctctgtaaccagtgtgggcca

SEQ ID NO: 1985196 - DNA, 25 bp, Homo sapien
tactgcaacaatgcccgagagcttc

SEQ ID NO: 1985197 - DNA, 25 bp, Homo sapien
ggactggttgcttgctttgacagaa

SEQ ID NO: 1985198 - DNA, 25 bp, Homo sapien
tgtccacgaccttgccataaaattc

SEQ ID NO: 1985199 - DNA, 25 bp, Homo sapien
tactgggatcctctgtacccggcaa

SEQ ID NO: 1985200 - DNA, 25 bp, Homo sapien
tagctaacagtactaggtctgcctg

SEQ ID NO: 1985201 - DNA, 25 bp, Homo sapien
agtaagtctaatctgagcagccggg

SEQ ID NO: 1985202 - DNA, 25 bp, Homo sapien
catggtatttgaagcgacgtgcccc

SEQ ID NO: 1985203 - DNA, 25 bp, Homo sapien
tatttgagactgtcctgtgcctgat

SEQ ID NO: 1985204 - DNA, 25 bp, Homo sapien
tgaaaacatctagcccaaaggtaag

SEQ ID NO: 1985205 - DNA, 25 bp, Homo sapien
gcaccgaggttgcattctagataac

SEQ ID NO: 1985206 - DNA, 25 bp, Homo sapien
tagctaaattcagggagattgcgtg

SEQ ID NO: 1985207 - DNA, 25 bp, Homo sapien
gtagccagtatctattagcagccat

SEQ ID NO: 1985208 - DNA, 25 bp, Homo sapien
tccagtagccagtatctattagcag

SEQ ID NO: 1985209 - DNA, 25 bp, Homo sapien
cagtagccagtatctattagcagcc

SEQ ID NO: 1985210 - DNA, 25 bp, Homo sapien
attccagtagccagtatctattagc

SEQ ID NO: 1985211 - DNA, 25 bp, Homo sapien
catgtcccttcgtgctgcttcatca

SEQ ID NO: 1985212 - DNA, 25 bp, Homo sapien
tcatgtcccttcgtgctgcttcatc

SEQ ID NO: 1985213 - DNA, 25 bp, Homo sapien
ggaaacagcttgctgatctcgtgta

SEQ ID NO: 1985214 - DNA, 25 bp, Homo sapien
aaatgtataaccatgacttgccatt

SEQ ID NO: 1985215 - DNA, 25 bp, Homo sapien
catgatcttatgactgtgatgttcc

SEQ ID NO: 1985216 - DNA, 25 bp, Homo sapien
ttgaaagttgcagggagcccaaaac

SEQ ID NO: 1985217 - DNA, 25 bp, Homo sapien
cgataggccttatgaggattcctca

SEQ ID NO: 1985218 - DNA, 25 bp, Homo sapien
taatgattacggttatcagcaaccg

SEQ ID NO: 1985219 - DNA, 25 bp, Homo sapien
agcaaccgtcgtatcctgaacaagg

SEQ ID NO: 1985220 - DNA, 25 bp, Homo sapien
cacaacattactacgaaggaggtat

SEQ ID NO: 1985221 - DNA, 25 bp, Homo sapien
aatgatagcactcattaaatactat

SEQ ID NO: 1985222 - DNA, 25 bp, Homo sapien
ttctttctcaaagatatatcttgga

SEQ ID NO: 1985223 - DNA, 25 bp, Homo sapien
gatttgccatctttagctactgaaa

SEQ ID NO: 1985224 - DNA, 25 bp, Homo sapien
gtactactttgggtttgatttgcca

SEQ ID NO: 1985225 - DNA, 25 bp, Homo sapien
gattatttctgctaagggttattaa

SEQ ID NO: 1985226 - DNA, 25 bp, Homo sapien
taaagctataaatggtcctgtaagc

SEQ ID NO: 1985227 - DNA, 25 bp, Homo sapien
caagtagaacttgccgtgtaccctg

SEQ ID NO: 1985228 - DNA, 25 bp, Homo sapien
tcaagtaaggtgaaggaacacatgc

SEQ ID NO: 1985229 - DNA, 25 bp, Homo sapien
gaacaccaaggactacaaaaagcca

SEQ ID NO: 1985230 - DNA, 25 bp, Homo sapien
gaacacatgcttagagctgtggaac

SEQ ID NO: 1985231 - DNA, 25 bp, Homo sapien
cggactgcggactgaaaatttttca

SEQ ID NO: 1985232 - DNA, 25 bp, Homo sapien
ccttatacgagggaaaatgatttgg

SEQ ID NO: 1985233 - DNA, 25 bp, Homo sapien
taatttccccatgatggttgtcctg

SEQ ID NO: 1985234 - DNA, 25 bp, Homo sapien
tgtcctgttatatgagggaatagcc

SEQ ID NO: 1985235 - DNA, 25 bp, Homo sapien
gaagtcggtgcgctggtcgccgccc

SEQ ID NO: 1985236 - DNA, 25 bp, Homo sapien
gggaagtcggtgcgctggtcgccgc

SEQ ID NO: 1985237 - DNA, 25 bp, Homo sapien
gaggggaagtcggtgcgctggtcgc

SEQ ID NO: 1985238 - DNA, 25 bp, Homo sapien
aagtcggtgcgctggtcgccgccct

SEQ ID NO: 1985239 - DNA, 25 bp, Homo sapien
ccagggtgaaggacactgatgccca

SEQ ID NO: 1985240 - DNA, 25 bp, Homo sapien
tgccaccactaaaataggttctgaa

SEQ ID NO: 1985241 - DNA, 25 bp, Homo sapien
ttgtcttgccaccactaaaataggt

SEQ ID NO: 1985242 - DNA, 25 bp, Homo sapien
gacactgatgcccatttgtttcctc

SEQ ID NO: 1985243 - DNA, 25 bp, Homo sapien
aacacagcgtgctaccgcccggaag

SEQ ID NO: 1985244 - DNA, 25 bp, Homo sapien
gccgccaacacagcgtgctaccgcc

SEQ ID NO: 1985245 - DNA, 25 bp, Homo sapien
gagccgccgccaacacagcgtgcta

SEQ ID NO: 1985246 - DNA, 25 bp, Homo sapien
gccaacacagcgtgctaccgcccgg

SEQ ID NO: 1985247 - DNA, 25 bp, Homo sapien
tcgccctgtcatatcgagacgccat

SEQ ID NO: 1985248 - DNA, 25 bp, Homo sapien
gaagacagtgatcgccctgtcatat

SEQ ID NO: 1985249 - DNA, 25 bp, Homo sapien
cagtgatcgccctgtcatatcgaga

SEQ ID NO: 1985250 - DNA, 25 bp, Homo sapien
gagaagacagtgatcgccctgtcat

SEQ ID NO: 1985251 - DNA, 25 bp, Homo sapien
cacaagaatcgtgaacaatcagaga

SEQ ID NO: 1985252 - DNA, 25 bp, Homo sapien
ggccacaagaatcgtgaacaatcag

SEQ ID NO: 1985253 - DNA, 25 bp, Homo sapien
aagaatcgtgaacaatcagagaaac

SEQ ID NO: 1985254 - DNA, 25 bp, Homo sapien
ttttcaaatgtgcagacatccatgc

SEQ ID NO: 1985255 - DNA, 25 bp, Homo sapien
catggtcatcaagggcacaaatttt

SEQ ID NO: 1985256 - DNA, 25 bp, Homo sapien
acagttctttcatcttgaagcttgg

SEQ ID NO: 1985257 - DNA, 25 bp, Homo sapien
caaaagccatgcagacatggtcatc

SEQ ID NO: 1985258 - DNA, 25 bp, Homo sapien
tctaccccaagaacaactatattgg

SEQ ID NO: 1985259 - DNA, 25 bp, Homo sapien
gtagaaagctaaaaacactacatgc

SEQ ID NO: 1985260 - DNA, 25 bp, Homo sapien
tatcttattgagcaaggtgtgtttc

SEQ ID NO: 1985261 - DNA, 25 bp, Homo sapien
tttaaggtataaaggcaggctgttg

SEQ ID NO: 1985262 - DNA, 25 bp, Homo sapien
gaaagagtcatcagggatttattac

SEQ ID NO: 1985263 - DNA, 25 bp, Homo sapien
tggcactccacacgggctctgttta

SEQ ID NO: 1985264 - DNA, 25 bp, Homo sapien
tatgtattctacagtgactgggtcc

SEQ ID NO: 1985265 - DNA, 25 bp, Homo sapien
gctttaaagttgctatgaagcgagt

SEQ ID NO: 1985266 - DNA, 25 bp, Homo sapien
gactgggtcctcaaccgtaagctta

SEQ ID NO: 1985267 - DNA, 25 bp, Homo sapien
ggatctgtctgatacaatcttgaga

SEQ ID NO: 1985268 - DNA, 25 bp, Homo sapien
gatacaatcttgagataccatcatc

SEQ ID NO: 1985269 - DNA, 25 bp, Homo sapien
taccaaaaggtcttcgtccattgct

SEQ ID NO: 1985270 - DNA, 25 bp, Homo sapien
tccaagcatgataagtaccagaagg

SEQ ID NO: 1985271 - DNA, 25 bp, Homo sapien
aagtattaataaattcatgactcac

SEQ ID NO: 1985272 - DNA, 25 bp, Homo sapien
aaaaagtattaataaattcatgact

SEQ ID NO: 1985273 - DNA, 25 bp, Homo sapien
aaagtattaataaattcatgactca

SEQ ID NO: 1985274 - DNA, 25 bp, Homo sapien
ctaaaaaagtattaataaattcatg

SEQ ID NO: 1985275 - DNA, 25 bp, Homo sapien
agtatagattcatagtttagggtgc

SEQ ID NO: 1985276 - DNA, 25 bp, Homo sapien
gattcatagtttagggtgctctgac

SEQ ID NO: 1985277 - DNA, 25 bp, Homo sapien
tagcacatgagtatagattcatagt

SEQ ID NO: 1985278 - DNA, 25 bp, Homo sapien
catagtttagggtgctctgactctc

SEQ ID NO: 1985279 - DNA, 25 bp, Homo sapien
cacgtgtatgcaagcgagtgcgccg

SEQ ID NO: 1985280 - DNA, 25 bp, Homo sapien
tcagaccaagatgatcaacaaaatt

SEQ ID NO: 1985281 - DNA, 25 bp, Homo sapien
tgcgccgtgcttatatcctcctgtc

SEQ ID NO: 1985282 - DNA, 25 bp, Homo sapien
tcagtggggtatccacgtgtatgca

SEQ ID NO: 1985283 - DNA, 25 bp, Homo sapien
tgagggatgatggttgcttgaacca

SEQ ID NO: 1985284 - DNA, 25 bp, Homo sapien
ccaaagggttgcatgtagtaagaaa

SEQ ID NO: 1985285 - DNA, 25 bp, Homo sapien
gcaggaaaaccaattataagttcaa

SEQ ID NO: 1985286 - DNA, 25 bp, Homo sapien
tataaggccacacatggtttatttg

SEQ ID NO: 1985287 - DNA, 25 bp, Homo sapien
taaacttctgccagaatacccaggt

SEQ ID NO: 1985288 - DNA, 25 bp, Homo sapien
cttctgccagaatacccaggtgttc

SEQ ID NO: 1985289 - DNA, 25 bp, Homo sapien
ttctgccagaatacccaggtgttct

SEQ ID NO: 1985290 - DNA, 25 bp, Homo sapien
aacttctgccagaatacccaggtgt

SEQ ID NO: 1985291 - DNA, 25 bp, Homo sapien
tgctatggcatcttctgtgtaattc

SEQ ID NO: 1985292 - DNA, 25 bp, Homo sapien
gaaattctcgaacagttttagcact

SEQ ID NO: 1985293 - DNA, 25 bp, Homo sapien
tagcacttcggcctattgcatttgc

SEQ ID NO: 1985294 - DNA, 25 bp, Homo sapien
tgctaacttgatagcttcactgtca

SEQ ID NO: 1985295 - DNA, 25 bp, Homo sapien
tttcttcttattatagcaagttcaa

SEQ ID NO: 1985296 - DNA, 25 bp, Homo sapien
ttatagcaagttcaatgttttttcc

SEQ ID NO: 1985297 - DNA, 25 bp, Homo sapien
tgttttttccaccagactggacaac

SEQ ID NO: 1985298 - DNA, 25 bp, Homo sapien
atgttttttccaccagactggacaa

SEQ ID NO: 1985299 - DNA, 25 bp, Homo sapien
cagatcaccgttatataataattac

SEQ ID NO: 1985300 - DNA, 25 bp, Homo sapien
gacaaatggaattgacagacttgct

SEQ ID NO: 1985301 - DNA, 25 bp, Homo sapien
tattgattaagttcactcagtgttt

SEQ ID NO: 1985302 - DNA, 25 bp, Homo sapien
ggatgcagttcatggcactccaaaa

SEQ ID NO: 1985303 - DNA, 25 bp, Homo sapien
catataattcaacttcttttgcact

SEQ ID NO: 1985304 - DNA, 25 bp, Homo sapien
tctatttcagttacatataattcaa

SEQ ID NO: 1985305 - DNA, 25 bp, Homo sapien
aattcaacttcttttgcactaaaca

SEQ ID NO: 1985306 - DNA, 25 bp, Homo sapien
tataattcaacttcttttgcactaa

SEQ ID NO: 1985307 - DNA, 25 bp, Homo sapien
ttgattttttcttctctgcttcttc

SEQ ID NO: 1985308 - DNA, 25 bp, Homo sapien
ttagacagatttctttgattttttc

SEQ ID NO: 1985309 - DNA, 25 bp, Homo sapien
tagacagatttctttgattttttct

SEQ ID NO: 1985310 - DNA, 25 bp, Homo sapien
attttttcttctctgcttcttcctt

SEQ ID NO: 1985311 - DNA, 25 bp, Homo sapien
tatagagtctcaggcttatgtggaa

SEQ ID NO: 1985312 - DNA, 25 bp, Homo sapien
gaatagctatgtccttaactgacag

SEQ ID NO: 1985313 - DNA, 25 bp, Homo sapien
cacaagtactgcatgtaatgctgca

SEQ ID NO: 1985314 - DNA, 25 bp, Homo sapien
aatttcactaaacaacctcaggcag

SEQ ID NO: 1985315 - DNA, 25 bp, Homo sapien
tcctgttaagatgcccttagaagct

SEQ ID NO: 1985316 - DNA, 25 bp, Homo sapien
gtaacaaaccgaacacactggacat

SEQ ID NO: 1985317 - DNA, 25 bp, Homo sapien
taaactcactgtaggaattaagcac

SEQ ID NO: 1985318 - DNA, 25 bp, Homo sapien
cctcttgtggaccatttggattaaa

SEQ ID NO: 1985319 - DNA, 25 bp, Homo sapien
ttcgaaattcattgcctcaggttca

SEQ ID NO: 1985320 - DNA, 25 bp, Homo sapien
gccttcgaaattcattgcctcaggt

SEQ ID NO: 1985321 - DNA, 25 bp, Homo sapien
tcgaaattcattgcctcaggttcaa

SEQ ID NO: 1985322 - DNA, 25 bp, Homo sapien
cttcgaaattcattgcctcaggttc

SEQ ID NO: 1985323 - DNA, 25 bp, Homo sapien
catcttcctccacagatactaagtg

SEQ ID NO: 1985324 - DNA, 25 bp, Homo sapien
ttaagagtttcacatcctcctcttc

SEQ ID NO: 1985325 - DNA, 25 bp, Homo sapien
ctaagtgctgtccactaatatacac

SEQ ID NO: 1985326 - DNA, 25 bp, Homo sapien
agtgctgtccactaatatacactgg

SEQ ID NO: 1985327 - DNA, 25 bp, Homo sapien
tccagggcagattgctttccagata

SEQ ID NO: 1985328 - DNA, 25 bp, Homo sapien
agggcagattgctttccagatatac

SEQ ID NO: 1985329 - DNA, 25 bp, Homo sapien
ccagggcagattgctttccagatat

SEQ ID NO: 1985330 - DNA, 25 bp, Homo sapien
ctccagggcagattgctttccagat

SEQ ID NO: 1985331 - DNA, 25 bp, Homo sapien
tcttttttgtggaatcttgcttcca

SEQ ID NO: 1985332 - DNA, 25 bp, Homo sapien
cttttttgtggaatcttgcttccac

SEQ ID NO: 1985333 - DNA, 25 bp, Homo sapien
ttcaagaggcttcctccgctgccag

SEQ ID NO: 1985334 - DNA, 25 bp, Homo sapien
tattttcttcaagaggcttcctccg

SEQ ID NO: 1985335 - DNA, 25 bp, Homo sapien
tcaagaggcttcctccgctgccaga

SEQ ID NO: 1985336 - DNA, 25 bp, Homo sapien
ttcttcaagaggcttcctccgctgc

SEQ ID NO: 1985337 - DNA, 25 bp, Homo sapien
atttctaaggttgctagggttgcca

SEQ ID NO: 1985338 - DNA, 25 bp, Homo sapien
catttctaaggttgctagggttgcc

SEQ ID NO: 1985339 - DNA, 25 bp, Homo sapien
ggagccgcgcccgtgacgtcactgg

SEQ ID NO: 1985340 - DNA, 25 bp, Homo sapien
tatagccacgcggagacctcgcgca

SEQ ID NO: 1985341 - DNA, 25 bp, Homo sapien
atccggccgcgtgattggccaagga

SEQ ID NO: 1985342 - DNA, 25 bp, Homo sapien
tccccgggatccggccgcgtgattg

SEQ ID NO: 1985343 - DNA, 25 bp, Homo sapien
cccgccgcgcggccacgccagccat

SEQ ID NO: 1985344 - DNA, 25 bp, Homo sapien
gagcctggacttgcggctcccggaa

SEQ ID NO: 1985345 - DNA, 25 bp, Homo sapien
acctctcgcagcttcctcagcggcg

SEQ ID NO: 1985346 - DNA, 25 bp, Homo sapien
ctcagcggcgctcacacgtgcgctg

SEQ ID NO: 1985347 - DNA, 25 bp, Homo sapien
ggaaggtcgtcgctcacacctcgag

SEQ ID NO: 1985348 - DNA, 25 bp, Homo sapien
gcagcgaagtcagtgacgggcgccc

SEQ ID NO: 1985349 - DNA, 25 bp, Homo sapien
agcagcgaagtcagtgacgggcgcc

SEQ ID NO: 1985350 - DNA, 25 bp, Homo sapien
cagcagcgaagtcagtgacgggcgc

SEQ ID NO: 1985351 - DNA, 25 bp, Homo sapien
cagcgaagtcagtgacgggcgcccg

SEQ ID NO: 1985352 - DNA, 25 bp, Homo sapien
ctgcggttccgggagcagaggtgag

SEQ ID NO: 1985353 - DNA, 25 bp, Homo sapien
tggcgcgcggcagccgactccggtg

SEQ ID NO: 1985354 - DNA, 25 bp, Homo sapien
tccggtgcggttcgggttccacagc

SEQ ID NO: 1985355 - DNA, 25 bp, Homo sapien
cagcggcagctttggcgctgcggtt

SEQ ID NO: 1985356 - DNA, 25 bp, Homo sapien
tgacaggagccttagtcacggcgcc

SEQ ID NO: 1985357 - DNA, 25 bp, Homo sapien
caaattagcaggaaactggattgtc

SEQ ID NO: 1985358 - DNA, 25 bp, Homo sapien
ggctttcacggcgactatctgagga

SEQ ID NO: 1985359 - DNA, 25 bp, Homo sapien
ggcgctgaccggagccactttggtc

SEQ ID NO: 1985360 - DNA, 25 bp, Homo sapien
ttatgaaatgttcccgtggctcagt

SEQ ID NO: 1985361 - DNA, 25 bp, Homo sapien
ttttttaggagcaatctggagctgc

SEQ ID NO: 1985362 - DNA, 25 bp, Homo sapien
caatctggagctgcgaattttcccg

SEQ ID NO: 1985363 - DNA, 25 bp, Homo sapien
gagctgcgaattttcccgtcgccgc

SEQ ID NO: 1985364 - DNA, 25 bp, Homo sapien
caaaaagaatatgttaactgtaaag

SEQ ID NO: 1985365 - DNA, 25 bp, Homo sapien
gaatatgttaactgtaaagtcaaga

SEQ ID NO: 1985366 - DNA, 25 bp, Homo sapien
cacaaaaagaatatgttaactgtaa

SEQ ID NO: 1985367 - DNA, 25 bp, Homo sapien
aaagaatatgttaactgtaaagtca

SEQ ID NO: 1985368 - DNA, 25 bp, Homo sapien
agcaaattttcactcttgacagttc

SEQ ID NO: 1985369 - DNA, 25 bp, Homo sapien
cagcaaattttcactcttgacagtt

SEQ ID NO: 1985370 - DNA, 25 bp, Homo sapien
aaattttcactcttgacagttcttt

SEQ ID NO: 1985371 - DNA, 25 bp, Homo sapien
gcaaattttcactcttgacagttct

SEQ ID NO: 1985372 - DNA, 25 bp, Homo sapien
tgatctgaatggaagttctctgact

SEQ ID NO: 1985373 - DNA, 25 bp, Homo sapien
ttggtgtcaagctgatctgaatgga

SEQ ID NO: 1985374 - DNA, 25 bp, Homo sapien
ggtgtcaagctgatctgaatggaag

SEQ ID NO: 1985375 - DNA, 25 bp, Homo sapien
caagctgatctgaatggaagttctc

SEQ ID NO: 1985376 - DNA, 25 bp, Homo sapien
aataagaaagcagctgccgagaagc

SEQ ID NO: 1985377 - DNA, 25 bp, Homo sapien
gatcatctataaaggccgttttggg

SEQ ID NO: 1985378 - DNA, 25 bp, Homo sapien
caagccttgctgcagcaataagaaa

SEQ ID NO: 1985379 - DNA, 25 bp, Homo sapien
acagaagacatgttgtgggatcatc

SEQ ID NO: 1985380 - DNA, 25 bp, Homo sapien
cggctcttgttacagtttgctgagg

SEQ ID NO: 1985381 - DNA, 25 bp, Homo sapien
tttgactgtttgaggattcgctggt

SEQ ID NO: 1985382 - DNA, 25 bp, Homo sapien
ggtactgctggccttgaggttatgt

SEQ ID NO: 1985383 - DNA, 25 bp, Homo sapien
aggttatgttacttgtggtctcggc

SEQ ID NO: 1985384 - DNA, 25 bp, Homo sapien
aaaattaaagcagaactggtcaagt

SEQ ID NO: 1985385 - DNA, 25 bp, Homo sapien
ttaaaattaaagcagaactggtcaa

SEQ ID NO: 1985386 - DNA, 25 bp, Homo sapien
ttaaagcagaactggtcaagtgcag

SEQ ID NO: 1985387 - DNA, 25 bp, Homo sapien
attaaagcagaactggtcaagtgca

SEQ ID NO: 1985388 - DNA, 25 bp, Homo sapien
gagtggctattattgacagatacag

SEQ ID NO: 1985389 - DNA, 25 bp, Homo sapien
tatttctaaggtggcaactgattca

SEQ ID NO: 1985390 - DNA, 25 bp, Homo sapien
tataaacctaactggtcagctgccc

SEQ ID NO: 1985391 - DNA, 25 bp, Homo sapien
gaaaatgactgtttcaggacctaga

SEQ ID NO: 1985392 - DNA, 25 bp, Homo sapien
ttttaacaggtgtcactgccacttt

SEQ ID NO: 1985393 - DNA, 25 bp, Homo sapien
tcttgattaattgtgagctagagtt

SEQ ID NO: 1985394 - DNA, 25 bp, Homo sapien
cagtggttaccacagtagttcctat

SEQ ID NO: 1985395 - DNA, 25 bp, Homo sapien
tactgaggaaggcttcggaacagtg

SEQ ID NO: 1985396 - DNA, 25 bp, Homo sapien
acttaatacactgaagtaaaactgg

SEQ ID NO: 1985397 - DNA, 25 bp, Homo sapien
aacacatggctattaggcagatttg

SEQ ID NO: 1985398 - DNA, 25 bp, Homo sapien
gatactgcaacacatggctattagg

SEQ ID NO: 1985399 - DNA, 25 bp, Homo sapien
aactggtattccaagaatgtacacc

SEQ ID NO: 1985400 - DNA, 25 bp, Homo sapien
gaagtagtgtaatggagttccttca

SEQ ID NO: 1985401 - DNA, 25 bp, Homo sapien
agaagtagtgtaatggagttccttc

SEQ ID NO: 1985402 - DNA, 25 bp, Homo sapien
aagtagtgtaatggagttccttcag

SEQ ID NO: 1985403 - DNA, 25 bp, Homo sapien
agtagtgtaatggagttccttcagt

SEQ ID NO: 1985404 - DNA, 25 bp, Homo sapien
gattaatctgaacagctgctgagtt

SEQ ID NO: 1985405 - DNA, 25 bp, Homo sapien
ggcttcagggtagttacagtattca

SEQ ID NO: 1985406 - DNA, 25 bp, Homo sapien
tattcaatggctttccaggagtaac

SEQ ID NO: 1985407 - DNA, 25 bp, Homo sapien
ttctctgctttaagattgggctcat

SEQ ID NO: 1985408 - DNA, 25 bp, Homo sapien
tagttttattaacattgcaaggaag

SEQ ID NO: 1985409 - DNA, 25 bp, Homo sapien
tacatgctagttttattaacattgc

SEQ ID NO: 1985410 - DNA, 25 bp, Homo sapien
gctagttttattaacattgcaagga

SEQ ID NO: 1985411 - DNA, 25 bp, Homo sapien
tccactacatgctagttttattaac

SEQ ID NO: 1985412 - DNA, 25 bp, Homo sapien
aaattcttctgcttcgatttttgca

SEQ ID NO: 1985413 - DNA, 25 bp, Homo sapien
agttcaacatacagtttcctagtaa

SEQ ID NO: 1985414 - DNA, 25 bp, Homo sapien
ggtgaagacttgagttcaacataca

SEQ ID NO: 1985415 - DNA, 25 bp, Homo sapien
tacagtttcctagtaaattcttctg

SEQ ID NO: 1985416 - DNA, 25 bp, Homo sapien
gaagttgtcgtaaggcaaccacgct

SEQ ID NO: 1985417 - DNA, 25 bp, Homo sapien
aggcagaagttgtcgtaaggcaacc

SEQ ID NO: 1985418 - DNA, 25 bp, Homo sapien
ggcagaagttgtcgtaaggcaacca

SEQ ID NO: 1985419 - DNA, 25 bp, Homo sapien
cagaagttgtcgtaaggcaaccacg

SEQ ID NO: 1985420 - DNA, 25 bp, Homo sapien
gaactggagtcccaataacaggctt

SEQ ID NO: 1985421 - DNA, 25 bp, Homo sapien
tgaagcaaaccagttccagctgttg

SEQ ID NO: 1985422 - DNA, 25 bp, Homo sapien
tgaagtgtcacaactccagcttttg

SEQ ID NO: 1985423 - DNA, 25 bp, Homo sapien
tagttgtcaccacaggagaagttgt

SEQ ID NO: 1985424 - DNA, 25 bp, Homo sapien
ggtgttcactggcatcgtcttctgt

SEQ ID NO: 1985425 - DNA, 25 bp, Homo sapien
ttgtggtcacttgtttttcattgcc

SEQ ID NO: 1985426 - DNA, 25 bp, Homo sapien
ggaatgtgaaattgtggtcacttgt

SEQ ID NO: 1985427 - DNA, 25 bp, Homo sapien
gactagtaggtattatggtgttcac

SEQ ID NO: 1985428 - DNA, 25 bp, Homo sapien
ctatttttctgagtaggagatgctt

SEQ ID NO: 1985429 - DNA, 25 bp, Homo sapien
taggagatgcttgaagtgacagaat

SEQ ID NO: 1985430 - DNA, 25 bp, Homo sapien
gaagcatgatgttacattctctttt

SEQ ID NO: 1985431 - DNA, 25 bp, Homo sapien
gcagagtaatttgctttagaatgga

SEQ ID NO: 1985432 - DNA, 25 bp, Homo sapien
tgatcggcatgatgattacacaggt

SEQ ID NO: 1985433 - DNA, 25 bp, Homo sapien
gatggacgtaagaacagtagctgcc

SEQ ID NO: 1985434 - DNA, 25 bp, Homo sapien
aaaaagtctgatgcaaaagggtaca

SEQ ID NO: 1985435 - DNA, 25 bp, Homo sapien
caaaaatgatctatcgtgatggacg

SEQ ID NO: 1985436 - DNA, 25 bp, Homo sapien
tttaatatacgcatataaaagtaga

SEQ ID NO: 1985437 - DNA, 25 bp, Homo sapien
gatgaacttcatccaaccaagagat

SEQ ID NO: 1985438 - DNA, 25 bp, Homo sapien
cagaacacgacagaaaaaaagaccg

SEQ ID NO: 1985439 - DNA, 25 bp, Homo sapien
tttaccagcagatgaacttcatcca

SEQ ID NO: 1985440 - DNA, 25 bp, Homo sapien
taaggttgacccctgccatagaagt

SEQ ID NO: 1985441 - DNA, 25 bp, Homo sapien
atggttcatctttacatgactgaat

SEQ ID NO: 1985442 - DNA, 25 bp, Homo sapien
cattaaggttgacccctgccataga

SEQ ID NO: 1985443 - DNA, 25 bp, Homo sapien
tttcttcattaaggttgacccctgc

SEQ ID NO: 1985444 - DNA, 25 bp, Homo sapien
tcgtagtcgttcctgtgttgcttgg

SEQ ID NO: 1985445 - DNA, 25 bp, Homo sapien
gaaggcctcgtagtcgttcctgtgt

SEQ ID NO: 1985446 - DNA, 25 bp, Homo sapien
tttctagaaggcctcgtagtcgttc

SEQ ID NO: 1985447 - DNA, 25 bp, Homo sapien
acagcatcagagttaagttctgtaa

SEQ ID NO: 1985448 - DNA, 25 bp, Homo sapien
tctccaattgatccagcttttcaag

SEQ ID NO: 1985449 - DNA, 25 bp, Homo sapien
ccaattgatccagcttttcaagaaa

SEQ ID NO: 1985450 - DNA, 25 bp, Homo sapien
cctggtatcactacacaggatgtaa

SEQ ID NO: 1985451 - DNA, 25 bp, Homo sapien
tgtgacctggtatcactacacagga

SEQ ID NO: 1985452 - DNA, 25 bp, Homo sapien
gacaaggctgtggtgctccatatcc

SEQ ID NO: 1985453 - DNA, 25 bp, Homo sapien
cagcacagtgacaaggctgtggtgc

SEQ ID NO: 1985454 - DNA, 25 bp, Homo sapien
aaggctgtggtgctccatatcctta

SEQ ID NO: 1985455 - DNA, 25 bp, Homo sapien
acagtgacaaggctgtggtgctcca

SEQ ID NO: 1985456 - DNA, 25 bp, Homo sapien
acgatgtcagtcaggtccagttgag

SEQ ID NO: 1985457 - DNA, 25 bp, Homo sapien
tgctgcagttctagcctggaggaag

SEQ ID NO: 1985458 - DNA, 25 bp, Homo sapien
tccagttgaggcatgacgttgttct

SEQ ID NO: 1985459 - DNA, 25 bp, Homo sapien
tactgaaaatgatgctaacgatgtc

SEQ ID NO: 1985460 - DNA, 25 bp, Homo sapien
ctcaatccagtctagctgcactccc

SEQ ID NO: 1985461 - DNA, 25 bp, Homo sapien
ctttctgctttaatctcagctgttc

SEQ ID NO: 1985462 - DNA, 25 bp, Homo sapien
tttctgctttaatctcagctgttct

SEQ ID NO: 1985463 - DNA, 25 bp, Homo sapien
tcagatttacaaaacgaacaattac

SEQ ID NO: 1985464 - DNA, 25 bp, Homo sapien
gtatcagatttacaaaacgaacaat

SEQ ID NO: 1985465 - DNA, 25 bp, Homo sapien
atcagatttacaaaacgaacaatta

SEQ ID NO: 1985466 - DNA, 25 bp, Homo sapien
tatcagatttacaaaacgaacaatt

SEQ ID NO: 1985467 - DNA, 25 bp, Homo sapien
catccgataataaatccaagtggaa

SEQ ID NO: 1985468 - DNA, 25 bp, Homo sapien
tctccctcaccatccgataataaat

SEQ ID NO: 1985469 - DNA, 25 bp, Homo sapien
ctcaccatccgataataaatccaag

SEQ ID NO: 1985470 - DNA, 25 bp, Homo sapien
accatccgataataaatccaagtgg

SEQ ID NO: 1985471 - DNA, 25 bp, Homo sapien
tcaaagatatgagataaccagagac

SEQ ID NO: 1985472 - DNA, 25 bp, Homo sapien
tttcaaagatatgagataaccagag

SEQ ID NO: 1985473 - DNA, 25 bp, Homo sapien
ttcaaagatatgagataaccagaga

SEQ ID NO: 1985474 - DNA, 25 bp, Homo sapien
ctttcaaagatatgagataaccaga

SEQ ID NO: 1985475 - DNA, 25 bp, Homo sapien
gcttgcacactcagtaaaggctttg

SEQ ID NO: 1985476 - DNA, 25 bp, Homo sapien
tggttgccaagacaaggacttatca

SEQ ID NO: 1985477 - DNA, 25 bp, Homo sapien
catgatgtttagtatggcttgcaca

SEQ ID NO: 1985478 - DNA, 25 bp, Homo sapien
gatggaggtatgactacagtagaca

SEQ ID NO: 1985479 - DNA, 25 bp, Homo sapien
tagctgcaagagctgtgagattagc

SEQ ID NO: 1985480 - DNA, 25 bp, Homo sapien
tcctaagccctccaagttgctggaa

SEQ ID NO: 1985481 - DNA, 25 bp, Homo sapien
cgcacaccaccacgcgctgcctttt

SEQ ID NO: 1985482 - DNA, 25 bp, Homo sapien
ccctcctaagccctccaagttgctg

SEQ ID NO: 1985483 - DNA, 25 bp, Homo sapien
cctccctcctaagccctccaagttg

SEQ ID NO: 1985484 - DNA, 25 bp, Homo sapien
gattgtatagatttgctccagcaac

SEQ ID NO: 1985485 - DNA, 25 bp, Homo sapien
gggaatgtaataagaatcaccactc

SEQ ID NO: 1985486 - DNA, 25 bp, Homo sapien
tctgcataccaaaagtcagggattg

SEQ ID NO: 1985487 - DNA, 25 bp, Homo sapien
cagaaaagaagtgtatgccagatca

SEQ ID NO: 1985488 - DNA, 25 bp, Homo sapien
gaaccatgtgtttggagtcacccaa

SEQ ID NO: 1985489 - DNA, 25 bp, Homo sapien
gattatttcctatggccaagctgac

SEQ ID NO: 1985490 - DNA, 25 bp, Homo sapien
tcagctaggatatcaagtgtcccca

SEQ ID NO: 1985491 - DNA, 25 bp, Homo sapien
taccccaggtctagcctaggtgcaa

SEQ ID NO: 1985492 - DNA, 25 bp, Homo sapien
tacagaactgaatggtggcaaacac

SEQ ID NO: 1985493 - DNA, 25 bp, Homo sapien
aaaggacatctttatgaacccagtg

SEQ ID NO: 1985494 - DNA, 25 bp, Homo sapien
caagaactgtgctaggcggcataag

SEQ ID NO: 1985495 - DNA, 25 bp, Homo sapien
gaacccagtggcttcgggaatcctg

SEQ ID NO: 1985496 - DNA, 25 bp, Homo sapien
tttcaaagctgtatgcatacataaa

SEQ ID NO: 1985497 - DNA, 25 bp, Homo sapien
tcaaagctgtatgcatacataaaaa

SEQ ID NO: 1985498 - DNA, 25 bp, Homo sapien
ttcaaagctgtatgcatacataaaa

SEQ ID NO: 1985499 - DNA, 25 bp, Homo sapien
gatttcaaagctgtatgcatacata

SEQ ID NO: 1985500 - DNA, 25 bp, Homo sapien
cagaagcaagaaggttgtcttttaa

SEQ ID NO: 1985501 - DNA, 25 bp, Homo sapien
cccagaagcaagaaggttgtctttt

SEQ ID NO: 1985502 - DNA, 25 bp, Homo sapien
ccagaagcaagaaggttgtctttta

SEQ ID NO: 1985503 - DNA, 25 bp, Homo sapien
gaatacttcatctcccgttcctgtt

SEQ ID NO: 1985504 - DNA, 25 bp, Homo sapien
gctcgagaatacttcatctcccgtt

SEQ ID NO: 1985505 - DNA, 25 bp, Homo sapien
ttcttggacgatgcaactgtttggt

SEQ ID NO: 1985506 - DNA, 25 bp, Homo sapien
ggcagattctcgtgattcttggacg

SEQ ID NO: 1985507 - DNA, 25 bp, Homo sapien
tatggccataacagtcccaatggga

SEQ ID NO: 1985508 - DNA, 25 bp, Homo sapien
gaatctgagtctgtaagagtcccat

SEQ ID NO: 1985509 - DNA, 25 bp, Homo sapien
gaagcagagaattagcaaccccagg

SEQ ID NO: 1985510 - DNA, 25 bp, Homo sapien
tcagtttgaaagcaacgccctaacg

SEQ ID NO: 1985511 - DNA, 25 bp, Homo sapien
agtgttcagctgtatgatgatcaac

SEQ ID NO: 1985512 - DNA, 25 bp, Homo sapien
gttcagctgtatgatgatcaacact

SEQ ID NO: 1985513 - DNA, 25 bp, Homo sapien
tgttcagctgtatgatgatcaacac

SEQ ID NO: 1985514 - DNA, 25 bp, Homo sapien
ccagtgttcagctgtatgatgatca

SEQ ID NO: 1985515 - DNA, 25 bp, Homo sapien
gagcacctgagtcaagggagtttga

SEQ ID NO: 1985516 - DNA, 25 bp, Homo sapien
aggagcacctgagtcaagggagttt

SEQ ID NO: 1985517 - DNA, 25 bp, Homo sapien
gtcaagggagtttgagatacatgtt

SEQ ID NO: 1985518 - DNA, 25 bp, Homo sapien
caggagcacctgagtcaagggagtt

SEQ ID NO: 1985519 - DNA, 25 bp, Homo sapien
gctgccaccaactgtcaggaggaca

SEQ ID NO: 1985520 - DNA, 25 bp, Homo sapien
cttccagactttccgctccagagga

SEQ ID NO: 1985521 - DNA, 25 bp, Homo sapien
tgcctgtgactcaaagggtggcctg

SEQ ID NO: 1985522 - DNA, 25 bp, Homo sapien
cttggggtcccgctgacttccagac

SEQ ID NO: 1985523 - DNA, 25 bp, Homo sapien
tgtggcttccacaaggccagcttaa

SEQ ID NO: 1985524 - DNA, 25 bp, Homo sapien
ttccacaaggccagcttaaagggcc

SEQ ID NO: 1985525 - DNA, 25 bp, Homo sapien
gcttaaagggcctcctgtgctcagt

SEQ ID NO: 1985526 - DNA, 25 bp, Homo sapien
aggccagcttaaagggcctcctgtg

SEQ ID NO: 1985527 - DNA, 25 bp, Homo sapien
tggaccgtgactgccacaccggcag

SEQ ID NO: 1985528 - DNA, 25 bp, Homo sapien
ggcctgacacgtggcctgtgcgcca

SEQ ID NO: 1985529 - DNA, 25 bp, Homo sapien
gaccacgtttctgagctgtgagaag

SEQ ID NO: 1985530 - DNA, 25 bp, Homo sapien
cacgctgaggtggagaatgaatgta

SEQ ID NO: 1985531 - DNA, 25 bp, Homo sapien
ctgtgggtcctccagtcaaatcaca

SEQ ID NO: 1985532 - DNA, 25 bp, Homo sapien
gctgtgggtcctccagtcaaatcac

SEQ ID NO: 1985533 - DNA, 25 bp, Homo sapien
tgtgggtcctccagtcaaatcacag

SEQ ID NO: 1985534 - DNA, 25 bp, Homo sapien
gggagaaacacgtgcgcccgttagc

SEQ ID NO: 1985535 - DNA, 25 bp, Homo sapien
gtgcgcccgttagctgtgacatgga

SEQ ID NO: 1985536 - DNA, 25 bp, Homo sapien
actctccactatccaggtgggggag

SEQ ID NO: 1985537 - DNA, 25 bp, Homo sapien
acacgtgcgcccgttagctgtgaca

SEQ ID NO: 1985538 - DNA, 25 bp, Homo sapien
tcttttaataaaatgggcacatatt

SEQ ID NO: 1985539 - DNA, 25 bp, Homo sapien
gctgcattgtaagaggcctttcttt

SEQ ID NO: 1985540 - DNA, 25 bp, Homo sapien
gcattgtaagaggcctttcttttaa

SEQ ID NO: 1985541 - DNA, 25 bp, Homo sapien
cagctgcattgtaagaggcctttct

SEQ ID NO: 1985542 - DNA, 25 bp, Homo sapien
tatgtgtgaactgtgcgtgtggcca

SEQ ID NO: 1985543 - DNA, 25 bp, Homo sapien
ccattggataaagggtgatgtatgt

SEQ ID NO: 1985544 - DNA, 25 bp, Homo sapien
gggaaatctctgactccattggata

SEQ ID NO: 1985545 - DNA, 25 bp, Homo sapien
aggagtggagaaggacaaccagagg

SEQ ID NO: 1985546 - DNA, 25 bp, Homo sapien
caggagtaagaaaagacttctcttt

SEQ ID NO: 1985547 - DNA, 25 bp, Homo sapien
gcatgacctgggccctgggaacaac

SEQ ID NO: 1985548 - DNA, 25 bp, Homo sapien
accaaggacccctgggtccaagcag

SEQ ID NO: 1985549 - DNA, 25 bp, Homo sapien
tgacctgggccctgggaacaaccaa

SEQ ID NO: 1985550 - DNA, 25 bp, Homo sapien
agggcatgacctgggccctgggaac

SEQ ID NO: 1985551 - DNA, 25 bp, Homo sapien
ttggaaatgagagtctctggagata

SEQ ID NO: 1985552 - DNA, 25 bp, Homo sapien
tcttgggtcccgagcaggttggaaa

SEQ ID NO: 1985553 - DNA, 25 bp, Homo sapien
gggtaacttcataagctccactctt

SEQ ID NO: 1985554 - DNA, 25 bp, Homo sapien
ctgaacaactgagccttcttgggtc

SEQ ID NO: 1985555 - DNA, 25 bp, Homo sapien
actggaatgtgtagaagactccatg

SEQ ID NO: 1985556 - DNA, 25 bp, Homo sapien
gtagaagactccatggaagactcaa

SEQ ID NO: 1985557 - DNA, 25 bp, Homo sapien
tgtgtagaagactccatggaagact

SEQ ID NO: 1985558 - DNA, 25 bp, Homo sapien
gaatgtgtagaagactccatggaag

SEQ ID NO: 1985559 - DNA, 25 bp, Homo sapien
gccctccgacctcatgggattggca

SEQ ID NO: 1985560 - DNA, 25 bp, Homo sapien
cgtggtgttctctcgcgaggctgct

SEQ ID NO: 1985561 - DNA, 25 bp, Homo sapien
tttctgaaggccctccgacctcatg

SEQ ID NO: 1985562 - DNA, 25 bp, Homo sapien
ccctgaagccactatcataacgtgg

SEQ ID NO: 1985563 - DNA, 25 bp, Homo sapien
tcagagcctgcacagcgggctgtgc

SEQ ID NO: 1985564 - DNA, 25 bp, Homo sapien
ttcctttgtattgggcataaaggga

SEQ ID NO: 1985565 - DNA, 25 bp, Homo sapien
tgtgctatgcttgtgctggaggaga

SEQ ID NO: 1985566 - DNA, 25 bp, Homo sapien
ttcttcctttgtattgggcataaag

SEQ ID NO: 1985567 - DNA, 25 bp, Homo sapien
ccagttccagctccacaaatatttg

SEQ ID NO: 1985568 - DNA, 25 bp, Homo sapien
atatgatagtgaagcccagttccag

SEQ ID NO: 1985569 - DNA, 25 bp, Homo sapien
gaatttgcgcgttatcaatcacctg

SEQ ID NO: 1985570 - DNA, 25 bp, Homo sapien
taggaattcgggatcctaccagccc

SEQ ID NO: 1985571 - DNA, 25 bp, Homo sapien
cacacagaggtctacatttagaata

SEQ ID NO: 1985572 - DNA, 25 bp, Homo sapien
acacagaggtctacatttagaataa

SEQ ID NO: 1985573 - DNA, 25 bp, Homo sapien
ccatgtgtctagcagcttcatgctc

SEQ ID NO: 1985574 - DNA, 25 bp, Homo sapien
tgcctccggggccacttggtggaaa

SEQ ID NO: 1985575 - DNA, 25 bp, Homo sapien
gaaatctcccatgtgtctagcagct

SEQ ID NO: 1985576 - DNA, 25 bp, Homo sapien
tctcccatgtgtctagcagcttcat

SEQ ID NO: 1985577 - DNA, 25 bp, Homo sapien
tgttgcccatctcctagacaagtgg

SEQ ID NO: 1985578 - DNA, 25 bp, Homo sapien
cctgacagagagagtgggattgccc

SEQ ID NO: 1985579 - DNA, 25 bp, Homo sapien
tccggaggtggtcttcaaatgcaac

SEQ ID NO: 1985580 - DNA, 25 bp, Homo sapien
gttcacaggtgtggagcagacccag

SEQ ID NO: 1985581 - DNA, 25 bp, Homo sapien
aggtagttcatcctccgagatgccc

SEQ ID NO: 1985582 - DNA, 25 bp, Homo sapien
tccaggtagttcatcctccgagatg

SEQ ID NO: 1985583 - DNA, 25 bp, Homo sapien
gctccaggtagttcatcctccgaga

SEQ ID NO: 1985584 - DNA, 25 bp, Homo sapien
caggtagttcatcctccgagatgcc

SEQ ID NO: 1985585 - DNA, 25 bp, Homo sapien
ggtgcctttgctgccctaacagctc

SEQ ID NO: 1985586 - DNA, 25 bp, Homo sapien
gacaaggagcttgctactgtcacgc

SEQ ID NO: 1985587 - DNA, 25 bp, Homo sapien
tgtcctccactaaggagaaaggcat

SEQ ID NO: 1985588 - DNA, 25 bp, Homo sapien
tctttaccagattaagcagccccat

SEQ ID NO: 1985589 - DNA, 25 bp, Homo sapien
gttgttaacgtttcaccaggtctgc

SEQ ID NO: 1985590 - DNA, 25 bp, Homo sapien
tacaagtaagggcatgcactcttca

SEQ ID NO: 1985591 - DNA, 25 bp, Homo sapien
cacttggattcatcagttgttaacg

SEQ ID NO: 1985592 - DNA, 25 bp, Homo sapien
cctgcgtatcgtttctgctgagcta

SEQ ID NO: 1985593 - DNA, 25 bp, Homo sapien
caccccaggtgtgaatgtctttttc

SEQ ID NO: 1985594 - DNA, 25 bp, Homo sapien
tctcaccccaggtgtgaatgtcttt

SEQ ID NO: 1985595 - DNA, 25 bp, Homo sapien
tcaccccaggtgtgaatgtcttttt

SEQ ID NO: 1985596 - DNA, 25 bp, Homo sapien
ttctcaccccaggtgtgaatgtctt

SEQ ID NO: 1985597 - DNA, 25 bp, Homo sapien
gaatcacagaaggtgggcagatact

SEQ ID NO: 1985598 - DNA, 25 bp, Homo sapien
ttaggaaccattggagaatcacaga

SEQ ID NO: 1985599 - DNA, 25 bp, Homo sapien
ggcagatactcatttagggagtctg

SEQ ID NO: 1985600 - DNA, 25 bp, Homo sapien
tgcaggcttgactgtccgggaacag

SEQ ID NO: 1985601 - DNA, 25 bp, Homo sapien
catggtttccgctgtgggtttccgg

SEQ ID NO: 1985602 - DNA, 25 bp, Homo sapien
tcttcagtatgttgggcacttggct

SEQ ID NO: 1985603 - DNA, 25 bp, Homo sapien
catcttcttcagtatgttgggcact

SEQ ID NO: 1985604 - DNA, 25 bp, Homo sapien
ggctttgctgatactagggcgacca

SEQ ID NO: 1985605 - DNA, 25 bp, Homo sapien
tgggcccctctcaacatggtaagtg

SEQ ID NO: 1985606 - DNA, 25 bp, Homo sapien
tctgttggttgaacagccacacggc

SEQ ID NO: 1985607 - DNA, 25 bp, Homo sapien
cagttctctaaaagcctgggccccg

SEQ ID NO: 1985608 - DNA, 25 bp, Homo sapien
aatgtcctagatggctcacccagat

SEQ ID NO: 1985609 - DNA, 25 bp, Homo sapien
tccttgttagaattgctccagttca

SEQ ID NO: 1985610 - DNA, 25 bp, Homo sapien
taaatgtagtttgtacagaagtcac

SEQ ID NO: 1985611 - DNA, 25 bp, Homo sapien
cagaagtcacacttttttgtccacc

SEQ ID NO: 1985612 - DNA, 25 bp, Homo sapien
tctgctgctttcctacaatttttca

SEQ ID NO: 1985613 - DNA, 25 bp, Homo sapien
caagtcctggacgtaaaatcgaata

SEQ ID NO: 1985614 - DNA, 25 bp, Homo sapien
cagcgaatacgtccttcggcgggaa

SEQ ID NO: 1985615 - DNA, 25 bp, Homo sapien
tagactcgtcccagttcagcgaata

SEQ ID NO: 1985616 - DNA, 25 bp, Homo sapien
gatttgaaatcgtgggctcctgtgg

SEQ ID NO: 1985617 - DNA, 25 bp, Homo sapien
aaaggtggtgagatgtaaacgcgtc

SEQ ID NO: 1985618 - DNA, 25 bp, Homo sapien
gatgtaaacgcgtcaccatgcagta

SEQ ID NO: 1985619 - DNA, 25 bp, Homo sapien
gtgagatgtaaacgcgtcaccatgc

SEQ ID NO: 1985620 - DNA, 25 bp, Homo sapien
cgcgtcaccatgcagtaccatgggc

SEQ ID NO: 1985621 - DNA, 25 bp, Homo sapien
tggattcagcaaacttcctttgcca

SEQ ID NO: 1985622 - DNA, 25 bp, Homo sapien
aactgctggattcagcaaacttcct

SEQ ID NO: 1985623 - DNA, 25 bp, Homo sapien
cttgcacaactgctggattcagcaa

SEQ ID NO: 1985624 - DNA, 25 bp, Homo sapien
gctggattcagcaaacttcctttgc

SEQ ID NO: 1985625 - DNA, 25 bp, Homo sapien
tttctctgtttctgatcacaggaac

SEQ ID NO: 1985626 - DNA, 25 bp, Homo sapien
tatgtccagatcctgtaagggaagt

SEQ ID NO: 1985627 - DNA, 25 bp, Homo sapien
catgcattcatgtagggtaatgtcg

SEQ ID NO: 1985628 - DNA, 25 bp, Homo sapien
tgtcgggaaacagggcatttctctg

SEQ ID NO: 1985629 - DNA, 25 bp, Homo sapien
ccatgctgaatgaggtcacagtcta

SEQ ID NO: 1985630 - DNA, 25 bp, Homo sapien
tattacagactctgccgcgctgtga

SEQ ID NO: 1985631 - DNA, 25 bp, Homo sapien
aatctgttcattttcgcctgagcac

SEQ ID NO: 1985632 - DNA, 25 bp, Homo sapien
tgagcaccctcaggcaggatagaga

SEQ ID NO: 1985633 - DNA, 25 bp, Homo sapien
tgcctgagcaatgcgcagaaatcga

SEQ ID NO: 1985634 - DNA, 25 bp, Homo sapien
tgtgacggcacatccaagtcccttg

SEQ ID NO: 1985635 - DNA, 25 bp, Homo sapien
tccggagggagttttatcacagagc

SEQ ID NO: 1985636 - DNA, 25 bp, Homo sapien
gttcttcgtctgtattccggaggga

SEQ ID NO: 1985637 - DNA, 25 bp, Homo sapien
cagtgtacttggatagctttgatca

SEQ ID NO: 1985638 - DNA, 25 bp, Homo sapien
aggaaacacaggcagtgtacttgga

SEQ ID NO: 1985639 - DNA, 25 bp, Homo sapien
tgtgcagggcgacttcaggaaacac

SEQ ID NO: 1985640 - DNA, 25 bp, Homo sapien
ctttgctgttgttcgcatcttcccc

SEQ ID NO: 1985641 - DNA, 25 bp, Homo sapien
tgaggacaaagatcccagtgaatgc

SEQ ID NO: 1985642 - DNA, 25 bp, Homo sapien
tgtaactaagaactggacagcccaa

SEQ ID NO: 1985643 - DNA, 25 bp, Homo sapien
cagctgcaggcactattggtccaaa

SEQ ID NO: 1985644 - DNA, 25 bp, Homo sapien
gaatgccagatgtcacctaggtcca

SEQ ID NO: 1985645 - DNA, 25 bp, Homo sapien
tcaaccactatcctctccaaaatat

SEQ ID NO: 1985646 - DNA, 25 bp, Homo sapien
ccaagaaacaaatctcctgtgctaa

SEQ ID NO: 1985647 - DNA, 25 bp, Homo sapien
agaaacaaatctcctgtgctaatac

SEQ ID NO: 1985648 - DNA, 25 bp, Homo sapien
tcctctccaaaatattccaagaaac

SEQ ID NO: 1985649 - DNA, 25 bp, Homo sapien
cacgctcaacagcatcgcgggcatt

SEQ ID NO: 1985650 - DNA, 25 bp, Homo sapien
atcgcgggcattggcaccaagctgg

SEQ ID NO: 1985651 - DNA, 25 bp, Homo sapien
tacaccaaccactgcatcggcgccg

SEQ ID NO: 1985652 - DNA, 25 bp, Homo sapien
tgcatcggcgccgtctccatcgcca

SEQ ID NO: 1985653 - DNA, 25 bp, Homo sapien
gctaggcactcggatgcagatgctc

SEQ ID NO: 1985654 - DNA, 25 bp, Homo sapien
ctaggcactcggatgcagatgctct

SEQ ID NO: 1985655 - DNA, 25 bp, Homo sapien
ttgctaggcactcggatgcagatgc

SEQ ID NO: 1985656 - DNA, 25 bp, Homo sapien
tgcagatgctctccaaggcggccaa

SEQ ID NO: 1985657 - DNA, 25 bp, Homo sapien
gaacttgccccgcatgtatgagacg

SEQ ID NO: 1985658 - DNA, 25 bp, Homo sapien
tgtgacctggtacgagaacaaagcc

SEQ ID NO: 1985659 - DNA, 25 bp, Homo sapien
catggacgaggacggtcgcaagttc

SEQ ID NO: 1985660 - DNA, 25 bp, Homo sapien
tatgagacgggcaccgagttctgcc

SEQ ID NO: 1985661 - DNA, 25 bp, Homo sapien
ctccggggggcaatgagggggcagt

SEQ ID NO: 1985662 - DNA, 25 bp, Homo sapien
gtttcccgcggcagcacccgcggcc

SEQ ID NO: 1985663 - DNA, 25 bp, Homo sapien
cgggtttcccgcggcagcacccgcg

SEQ ID NO: 1985664 - DNA, 25 bp, Homo sapien
cggggggcaatgagggggcagtgga

SEQ ID NO: 1985665 - DNA, 25 bp, Homo sapien
ctccgctccgctccgggcggcccca

SEQ ID NO: 1985666 - DNA, 25 bp, Homo sapien
tccgctccgctccgggcggccccag

SEQ ID NO: 1985667 - DNA, 25 bp, Homo sapien
ccgctccgctccgggcggccccaga

SEQ ID NO: 1985668 - DNA, 25 bp, Homo sapien
cgctccgctccgggcggccccagac

SEQ ID NO: 1985669 - DNA, 25 bp, Homo sapien
gggcgtgtttcgctcctttgcaaga

SEQ ID NO: 1985670 - DNA, 25 bp, Homo sapien
tccaccctgctcattaacctgcctg

SEQ ID NO: 1985671 - DNA, 25 bp, Homo sapien
ctttgcaagagtcggaaagggagtt

SEQ ID NO: 1985672 - DNA, 25 bp, Homo sapien
aaagggagttgggagccgcgcggct

SEQ ID NO: 1985673 - DNA, 25 bp, Homo sapien
caaactttgagtgagagtgcgctcc

SEQ ID NO: 1985674 - DNA, 25 bp, Homo sapien
ggtcggccgagacacaagttcgctt

SEQ ID NO: 1985675 - DNA, 25 bp, Homo sapien
gaggtaaattcgaggacgcacccga

SEQ ID NO: 1985676 - DNA, 25 bp, Homo sapien
aagttaggatgcagcacgagctccg

SEQ ID NO: 1985677 - DNA, 25 bp, Homo sapien
ttctggaaataagttgacgtcaact

SEQ ID NO: 1985678 - DNA, 25 bp, Homo sapien
ggggatattttgtcctgggagcaca

SEQ ID NO: 1985679 - DNA, 25 bp, Homo sapien
tgacttttgccagtagagacctgcc

SEQ ID NO: 1985680 - DNA, 25 bp, Homo sapien
caactgggagctgttttgggttgct

SEQ ID NO: 1985681 - DNA, 25 bp, Homo sapien
ggtctctaagacagtataaaatgca

SEQ ID NO: 1985682 - DNA, 25 bp, Homo sapien
aagtggcctggatgcaataaaccaa

SEQ ID NO: 1985683 - DNA, 25 bp, Homo sapien
aaaattcatttgtccaagtggcctg

SEQ ID NO: 1985684 - DNA, 25 bp, Homo sapien
tacagcatagtttgtgacatatacc

SEQ ID NO: 1985685 - DNA, 25 bp, Homo sapien
tattcagataaacccatgtgcccct

SEQ ID NO: 1985686 - DNA, 25 bp, Homo sapien
gatgccctggctctgcaaacttagg

SEQ ID NO: 1985687 - DNA, 25 bp, Homo sapien
ccttccatcaggtgcaaagcctgga

SEQ ID NO: 1985688 - DNA, 25 bp, Homo sapien
taatgtaaaaacctaggcccacagc

SEQ ID NO: 1985689 - DNA, 25 bp, Homo sapien
gaaatagaactgaaaggtcctggcc

SEQ ID NO: 1985690 - DNA, 25 bp, Homo sapien
aaatggcatgtgattgaattcacag

SEQ ID NO: 1985691 - DNA, 25 bp, Homo sapien
tttgggtggttttctctaggcagtg

SEQ ID NO: 1985692 - DNA, 25 bp, Homo sapien
cagaaagtatgtgtgccctagagtc

SEQ ID NO: 1985693 - DNA, 25 bp, Homo sapien
cagaaggtcgctgctttcgaccctc

SEQ ID NO: 1985694 - DNA, 25 bp, Homo sapien
gcagaaggtcgctgctttcgaccct

SEQ ID NO: 1985695 - DNA, 25 bp, Homo sapien
ggcctggccattgcgtcctgcagca

SEQ ID NO: 1985696 - DNA, 25 bp, Homo sapien
caaaagggcctggccattgcgtcct

SEQ ID NO: 1985697 - DNA, 25 bp, Homo sapien
caagttacactggagaaaattgctc

SEQ ID NO: 1985698 - DNA, 25 bp, Homo sapien
caccgtgaaagtcaatgtgtctgga

SEQ ID NO: 1985699 - DNA, 25 bp, Homo sapien
gctgagattcgggtgttcaaacctg

SEQ ID NO: 1985700 - DNA, 25 bp, Homo sapien
tctccaggtgggctaatttccaagt

SEQ ID NO: 1985701 - DNA, 25 bp, Homo sapien
cttttgagcagtttagtacgtattg

SEQ ID NO: 1985702 - DNA, 25 bp, Homo sapien
cgtattgcaatttctgcaggaaggt

SEQ ID NO: 1985703 - DNA, 25 bp, Homo sapien
gtttagtacgtattgcaatttctgc

SEQ ID NO: 1985704 - DNA, 25 bp, Homo sapien
tgagcagtttagtacgtattgcaat

SEQ ID NO: 1985705 - DNA, 25 bp, Homo sapien
tgtgtatgtacagtatggaggtctg

SEQ ID NO: 1985706 - DNA, 25 bp, Homo sapien
tctgtgtatgtacagtatggaggtc

SEQ ID NO: 1985707 - DNA, 25 bp, Homo sapien
aggtctgttgcttccaccctctcct

SEQ ID NO: 1985708 - DNA, 25 bp, Homo sapien
tatgtacagtatggaggtctgttgc

SEQ ID NO: 1985709 - DNA, 25 bp, Homo sapien
gagaatcaagactgccacctgggct

SEQ ID NO: 1985710 - DNA, 25 bp, Homo sapien
ccaaaagagaatcaagactgccacc

SEQ ID NO: 1985711 - DNA, 25 bp, Homo sapien
ctaaaaactgctagccaaaagagaa

SEQ ID NO: 1985712 - DNA, 25 bp, Homo sapien
aaagagaatcaagactgccacctgg

SEQ ID NO: 1985713 - DNA, 25 bp, Homo sapien
atgacttatcccagaccactgccac

SEQ ID NO: 1985714 - DNA, 25 bp, Homo sapien
tcccagaccactgccacaaactggc

SEQ ID NO: 1985715 - DNA, 25 bp, Homo sapien
cagaccactgccacaaactggccag

SEQ ID NO: 1985716 - DNA, 25 bp, Homo sapien
ttatcccagaccactgccacaaact

SEQ ID NO: 1985717 - DNA, 25 bp, Homo sapien
gctggttcatgttttccacagaccc

SEQ ID NO: 1985718 - DNA, 25 bp, Homo sapien
catgttttccacagacccacggccc

SEQ ID NO: 1985719 - DNA, 25 bp, Homo sapien
gacccacggccctcattgccagtta

SEQ ID NO: 1985720 - DNA, 25 bp, Homo sapien
ctgcaacagctggttcatgttttcc

SEQ ID NO: 1985721 - DNA, 25 bp, Homo sapien
aaaataatgtcaaagctggattctt

SEQ ID NO: 1985722 - DNA, 25 bp, Homo sapien
ccgacaaaataatgtcaaagctgga

SEQ ID NO: 1985723 - DNA, 25 bp, Homo sapien
tcaaagctggattctttgtgggcag

SEQ ID NO: 1985724 - DNA, 25 bp, Homo sapien
acaaaataatgtcaaagctggattc

SEQ ID NO: 1985725 - DNA, 25 bp, Homo sapien
cagcactgtgcagagtggtgcttcc

SEQ ID NO: 1985726 - DNA, 25 bp, Homo sapien
ggctctttcagaaaaagacatccac

SEQ ID NO: 1985727 - DNA, 25 bp, Homo sapien
tggctctttcagaaaaagacatcca

SEQ ID NO: 1985728 - DNA, 25 bp, Homo sapien
cttccacaagaccagaaagagtcag

SEQ ID NO: 1985729 - DNA, 25 bp, Homo sapien
tgctgtcttcactttgctattgtta

SEQ ID NO: 1985730 - DNA, 25 bp, Homo sapien
cagggtgaacacagcttagatgctg

SEQ ID NO: 1985731 - DNA, 25 bp, Homo sapien
tattgttatctacagctgtctctac

SEQ ID NO: 1985732 - DNA, 25 bp, Homo sapien
actttcatgaccaaggtgttctcga

SEQ ID NO: 1985733 - DNA, 25 bp, Homo sapien
tgttctcgaacagactgtatttcct

SEQ ID NO: 1985734 - DNA, 25 bp, Homo sapien
tgctttttgcctgtgatctgaacaa

SEQ ID NO: 1985735 - DNA, 25 bp, Homo sapien
catgaccaaggtgttctcgaacaga

SEQ ID NO: 1985736 - DNA, 25 bp, Homo sapien
gagaagacttcttggtgatggaaaa

SEQ ID NO: 1985737 - DNA, 25 bp, Homo sapien
agaagacttcttggtgatggaaaac

SEQ ID NO: 1985738 - DNA, 25 bp, Homo sapien
tggtgatggaaaacttaagctgact

SEQ ID NO: 1985739 - DNA, 25 bp, Homo sapien
tgatggaaaacttaagctgactaga

SEQ ID NO: 1985740 - DNA, 25 bp, Homo sapien
catatcgttggctgagagggtccac

SEQ ID NO: 1985741 - DNA, 25 bp, Homo sapien
caaggccacaggtgcagttcttaca

SEQ ID NO: 1985742 - DNA, 25 bp, Homo sapien
gccacaggtgcagttcttacaggcc

SEQ ID NO: 1985743 - DNA, 25 bp, Homo sapien
gagtcaatgagatccatgctgtcgt

SEQ ID NO: 1985744 - DNA, 25 bp, Homo sapien
aacccatcccgtgctgagtaaccgg

SEQ ID NO: 1985745 - DNA, 25 bp, Homo sapien
agacaccgtggtgggatttgaggga

SEQ ID NO: 1985746 - DNA, 25 bp, Homo sapien
gaagaaacccatcccgtgctgagta

SEQ ID NO: 1985747 - DNA, 25 bp, Homo sapien
cgtgctgagtaaccgggccccataa

SEQ ID NO: 1985748 - DNA, 25 bp, Homo sapien
tctctttacaagacatgcagaatct

SEQ ID NO: 1985749 - DNA, 25 bp, Homo sapien
aatccaggtctcttaaatccacaca

SEQ ID NO: 1985750 - DNA, 25 bp, Homo sapien
gtgacactaagttcctccaatggtc

SEQ ID NO: 1985751 - DNA, 25 bp, Homo sapien
agttcctccaatggtccaaactgag

SEQ ID NO: 1985752 - DNA, 25 bp, Homo sapien
ttcttgccgatggatttccttcttc

SEQ ID NO: 1985753 - DNA, 25 bp, Homo sapien
tgccgatggatttccttcttcaaaa

SEQ ID NO: 1985754 - DNA, 25 bp, Homo sapien
ttgccgatggatttccttcttcaaa

SEQ ID NO: 1985755 - DNA, 25 bp, Homo sapien
tcttgccgatggatttccttcttca

SEQ ID NO: 1985756 - DNA, 25 bp, Homo sapien
cttgatttgcggttctctgaggaca

SEQ ID NO: 1985757 - DNA, 25 bp, Homo sapien
tggatttgcagcacatcgagtcgtg

SEQ ID NO: 1985758 - DNA, 25 bp, Homo sapien
caaaggctctagtccacttggcagg

SEQ ID NO: 1985759 - DNA, 25 bp, Homo sapien
gaatgcacctagttcctgaagcaaa

SEQ ID NO: 1985760 - DNA, 25 bp, Homo sapien
aactcacacgtgaatttgaatttca

SEQ ID NO: 1985761 - DNA, 25 bp, Homo sapien
ttcagcaaatgcaaactcacacgtg

SEQ ID NO: 1985762 - DNA, 25 bp, Homo sapien
gcaaatgcaaactcacacgtgaatt

SEQ ID NO: 1985763 - DNA, 25 bp, Homo sapien
gcaaactcacacgtgaatttgaatt

SEQ ID NO: 1985764 - DNA, 25 bp, Homo sapien
tggaaccaatttaactctcctgcag

SEQ ID NO: 1985765 - DNA, 25 bp, Homo sapien
gcagaggccacagaaagcacgtgag

SEQ ID NO: 1985766 - DNA, 25 bp, Homo sapien
cagaaagcacgtgaggaccatcaaa

SEQ ID NO: 1985767 - DNA, 25 bp, Homo sapien
ttctggaaccaatttaactctcctg

SEQ ID NO: 1985768 - DNA, 25 bp, Homo sapien
actgaaaggacgccaggcttcttag

SEQ ID NO: 1985769 - DNA, 25 bp, Homo sapien
ctgaaaggacgccaggcttcttagt

SEQ ID NO: 1985770 - DNA, 25 bp, Homo sapien
gaacggaggctgttgcatgcaggac

SEQ ID NO: 1985771 - DNA, 25 bp, Homo sapien
ggaacggaggctgttgcatgcagga

SEQ ID NO: 1985772 - DNA, 25 bp, Homo sapien
gaggcaaagaaggaacggaggctgt

SEQ ID NO: 1985773 - DNA, 25 bp, Homo sapien
aaagaaggaacggaggctgttgcat

SEQ ID NO: 1985774 - DNA, 25 bp, Homo sapien
gtgggcatctccagacatctgtaga

SEQ ID NO: 1985775 - DNA, 25 bp, Homo sapien
ctgggccgcagtcccgtgggcatct

SEQ ID NO: 1985776 - DNA, 25 bp, Homo sapien
caagaccgagagctccctaagtctc

SEQ ID NO: 1985777 - DNA, 25 bp, Homo sapien
accgagagctccctaagtctccagg

SEQ ID NO: 1985778 - DNA, 25 bp, Homo sapien
ttgcactctaggctccggcttctcc

SEQ ID NO: 1985779 - DNA, 25 bp, Homo sapien
tccggcttctccagacttctttgct

SEQ ID NO: 1985780 - DNA, 25 bp, Homo sapien
tctccagacttctttgctcccagat

SEQ ID NO: 1985781 - DNA, 25 bp, Homo sapien
tgcactctaggctccggcttctcca

SEQ ID NO: 1985782 - DNA, 25 bp, Homo sapien
ggatctagatcccacgataccatcc

SEQ ID NO: 1985783 - DNA, 25 bp, Homo sapien
gatctagatcccacgataccatcca

SEQ ID NO: 1985784 - DNA, 25 bp, Homo sapien
ctgggatcttggctactctctcgga

SEQ ID NO: 1985785 - DNA, 25 bp, Homo sapien
ctgcttctgggatcttggctactct

SEQ ID NO: 1985786 - DNA, 25 bp, Homo sapien
cagtctgcctttgtgctttcgaaca

SEQ ID NO: 1985787 - DNA, 25 bp, Homo sapien
caacttgcgaactgtcgcgggtaga

SEQ ID NO: 1985788 - DNA, 25 bp, Homo sapien
ggctttgtacgtggagaatggcaca

SEQ ID NO: 1985789 - DNA, 25 bp, Homo sapien
ctaagttagcaaagtcgcaaatggg

SEQ ID NO: 1985790 - DNA, 25 bp, Homo sapien
gcacatgctccggattagaagtctc

SEQ ID NO: 1985791 - DNA, 25 bp, Homo sapien
cacagcacatgctccggattagaag

SEQ ID NO: 1985792 - DNA, 25 bp, Homo sapien
acagcacatgctccggattagaagt

SEQ ID NO: 1985793 - DNA, 25 bp, Homo sapien
cagcacatgctccggattagaagtc

SEQ ID NO: 1985794 - DNA, 25 bp, Homo sapien
cggttctcggctttcttcctccagt

SEQ ID NO: 1985795 - DNA, 25 bp, Homo sapien
gggctgccgctcccggttctcggct

SEQ ID NO: 1985796 - DNA, 25 bp, Homo sapien
ccggggctgccgctcccggttctcg

SEQ ID NO: 1985797 - DNA, 25 bp, Homo sapien
tgccgctcccggttctcggctttct

SEQ ID NO: 1985798 - DNA, 25 bp, Homo sapien
gccgcggcgggcgactaggaatccg

SEQ ID NO: 1985799 - DNA, 25 bp, Homo sapien
cactcgcacacacgccgcccgccgc

SEQ ID NO: 1985800 - DNA, 25 bp, Homo sapien
gcccgccgcggcgggcgactaggaa

SEQ ID NO: 1985801 - DNA, 25 bp, Homo sapien
caggcatggggcgagagcgcggcac

SEQ ID NO: 1985802 - DNA, 25 bp, Homo sapien
tttctgttggcattgcagcagttgc

SEQ ID NO: 1985803 - DNA, 25 bp, Homo sapien
ccttcccttttctgttggcattgca

SEQ ID NO: 1985804 - DNA, 25 bp, Homo sapien
tcccttttctgttggcattgcagca

SEQ ID NO: 1985805 - DNA, 25 bp, Homo sapien
ttttctgttggcattgcagcagttg

SEQ ID NO: 1985806 - DNA, 25 bp, Homo sapien
ccatggtcacagacttggattacat

SEQ ID NO: 1985807 - DNA, 25 bp, Homo sapien
aatccatggtcacagacttggatta

SEQ ID NO: 1985808 - DNA, 25 bp, Homo sapien
atggtcacagacttggattacatgg

SEQ ID NO: 1985809 - DNA, 25 bp, Homo sapien
tccatggtcacagacttggattaca

SEQ ID NO: 1985810 - DNA, 25 bp, Homo sapien
ccatgtggaggtgcacaaggtctga

SEQ ID NO: 1985811 - DNA, 25 bp, Homo sapien
ggaggtgcacaaggtctgaatgcct

SEQ ID NO: 1985812 - DNA, 25 bp, Homo sapien
gtggaggtgcacaaggtctgaatgc

SEQ ID NO: 1985813 - DNA, 25 bp, Homo sapien
atgtggaggtgcacaaggtctgaat

SEQ ID NO: 1985814 - DNA, 25 bp, Homo sapien
ttagctgtccttggagtgaataaaa

SEQ ID NO: 1985815 - DNA, 25 bp, Homo sapien
gctgctttccatgttattctaccct

SEQ ID NO: 1985816 - DNA, 25 bp, Homo sapien
aaagctgctttccatgttattctac

SEQ ID NO: 1985817 - DNA, 25 bp, Homo sapien
ctgtccttggagtgaataaaagctg

SEQ ID NO: 1985818 - DNA, 25 bp, Homo sapien
tctccacacgtgtgaaaccggctgt

SEQ ID NO: 1985819 - DNA, 25 bp, Homo sapien
tcctgtgactgccatttgccactga

SEQ ID NO: 1985820 - DNA, 25 bp, Homo sapien
catttctaagactgtacgttccaag

SEQ ID NO: 1985821 - DNA, 25 bp, Homo sapien
caatgaaaccgatttgaaaccagga

SEQ ID NO: 1985822 - DNA, 25 bp, Homo sapien
caatggcagcaagggtatatttaaa

SEQ ID NO: 1985823 - DNA, 25 bp, Homo sapien
gacagttgaggcagagttgaatttc

SEQ ID NO: 1985824 - DNA, 25 bp, Homo sapien
gagagcttacttcttcctaggtagc

SEQ ID NO: 1985825 - DNA, 25 bp, Homo sapien
gcctgttgaaaatactttacccagc

SEQ ID NO: 1985826 - DNA, 25 bp, Homo sapien
gatacgtagtgtcctactagagcca

SEQ ID NO: 1985827 - DNA, 25 bp, Homo sapien
gtagttataccagctaaccagaagt

SEQ ID NO: 1985828 - DNA, 25 bp, Homo sapien
tgtcacggcattgatctgcaagcca

SEQ ID NO: 1985829 - DNA, 25 bp, Homo sapien
tgcaagccagaacccgatacgtagt

SEQ ID NO: 1985830 - DNA, 25 bp, Homo sapien
cagaggacttccaatgcaatggaga

SEQ ID NO: 1985831 - DNA, 25 bp, Homo sapien
tatagatgtcagctcggaggacagg

SEQ ID NO: 1985832 - DNA, 25 bp, Homo sapien
tgccttgaagtggaggagtacacat

SEQ ID NO: 1985833 - DNA, 25 bp, Homo sapien
tcctgttcagctgaaagaagagggc

SEQ ID NO: 1985834 - DNA, 25 bp, Homo sapien
aaatttgacaatcaatctaacccag

SEQ ID NO: 1985835 - DNA, 25 bp, Homo sapien
aaaataattgccagtacaccccaga

SEQ ID NO: 1985836 - DNA, 25 bp, Homo sapien
ccagagcagggcaaaaacaactgaa

SEQ ID NO: 1985837 - DNA, 25 bp, Homo sapien
ccagtacacgtgactaaaaatcact

SEQ ID NO: 1985838 - DNA, 25 bp, Homo sapien
cagggaaggtgtgagctaggggtaa

SEQ ID NO: 1985839 - DNA, 25 bp, Homo sapien
tttgtactatcccgactctctccat

SEQ ID NO: 1985840 - DNA, 25 bp, Homo sapien
tgtgagctaggggtaacccgctttg

SEQ ID NO: 1985841 - DNA, 25 bp, Homo sapien
acccgctttgtactatcccgactct

SEQ ID NO: 1985842 - DNA, 25 bp, Homo sapien
cagttgctcctctaagtggtgagta

SEQ ID NO: 1985843 - DNA, 25 bp, Homo sapien
cctctaagtggtgagtaagccacct

SEQ ID NO: 1985844 - DNA, 25 bp, Homo sapien
ccagttgctcctctaagtggtgagt

SEQ ID NO: 1985845 - DNA, 25 bp, Homo sapien
tgctcctctaagtggtgagtaagcc

SEQ ID NO: 1985846 - DNA, 25 bp, Homo sapien
cagcaaacccatgaaattgccaaat

SEQ ID NO: 1985847 - DNA, 25 bp, Homo sapien
aaattgccaaatgaggccccctgtc

SEQ ID NO: 1985848 - DNA, 25 bp, Homo sapien
gaaattgccaaatgaggccccctgt

SEQ ID NO: 1985849 - DNA, 25 bp, Homo sapien
aattgccaaatgaggccccctgtcc

SEQ ID NO: 1985850 - DNA, 25 bp, Homo sapien
catcaaaggccaatggagacctcca

SEQ ID NO: 1985851 - DNA, 25 bp, Homo sapien
ctcatcaaaggccaatggagacctc

SEQ ID NO: 1985852 - DNA, 25 bp, Homo sapien
atgttctcatcaaaggccaatggag

SEQ ID NO: 1985853 - DNA, 25 bp, Homo sapien
gagacctccattggagggttccagg

SEQ ID NO: 1985854 - DNA, 25 bp, Homo sapien
aaacattcagctaacacaaggccag

SEQ ID NO: 1985855 - DNA, 25 bp, Homo sapien
tagccagtgccctttaaattacaag

SEQ ID NO: 1985856 - DNA, 25 bp, Homo sapien
ttggcaactgtctcccgttcctggg

SEQ ID NO: 1985857 - DNA, 25 bp, Homo sapien
cagttgaccttgaagcaatggcacc

SEQ ID NO: 1985858 - DNA, 25 bp, Homo sapien
ttaacataagcatacctggtatcac

SEQ ID NO: 1985859 - DNA, 25 bp, Homo sapien
taacataagcatacctggtatcacc

SEQ ID NO: 1985860 - DNA, 25 bp, Homo sapien
cataagcatacctggtatcacctgg

SEQ ID NO: 1985861 - DNA, 25 bp, Homo sapien
acataagcatacctggtatcacctg

SEQ ID NO: 1985862 - DNA, 25 bp, Homo sapien
tctaaactaatatgttctgtttctc

SEQ ID NO: 1985863 - DNA, 25 bp, Homo sapien
gaactggtatccaagttgaacctgg

SEQ ID NO: 1985864 - DNA, 25 bp, Homo sapien
tgtgcatatatgtctaaactaatat

SEQ ID NO: 1985865 - DNA, 25 bp, Homo sapien
atgcttttaagcctttaaattacag

SEQ ID NO: 1985866 - DNA, 25 bp, Homo sapien
aggtgttagaggccactgtgcacag

SEQ ID NO: 1985867 - DNA, 25 bp, Homo sapien
caggtgttagaggccactgtgcaca

SEQ ID NO: 1985868 - DNA, 25 bp, Homo sapien
gtcaggtgttagaggccactgtgca

SEQ ID NO: 1985869 - DNA, 25 bp, Homo sapien
tcaggtgttagaggccactgtgcac

SEQ ID NO: 1985870 - DNA, 25 bp, Homo sapien
cagccatccgaggtaattccttcct

SEQ ID NO: 1985871 - DNA, 25 bp, Homo sapien
cccattggcaaagccctggagcctt

SEQ ID NO: 1985872 - DNA, 25 bp, Homo sapien
ttcattagttctccgctccagccat

SEQ ID NO: 1985873 - DNA, 25 bp, Homo sapien
tccacagattttccggccagatgcc

SEQ ID NO: 1985874 - DNA, 25 bp, Homo sapien
attaaggatagtccttttcatgatt

SEQ ID NO: 1985875 - DNA, 25 bp, Homo sapien
tattaaggatagtccttttcatgat

SEQ ID NO: 1985876 - DNA, 25 bp, Homo sapien
tccatattaaggatagtccttttca

SEQ ID NO: 1985877 - DNA, 25 bp, Homo sapien
catattaaggatagtccttttcatg

SEQ ID NO: 1985878 - DNA, 25 bp, Homo sapien
tctgcaattactggtaacagtgcat

SEQ ID NO: 1985879 - DNA, 25 bp, Homo sapien
tgccagcaaagaaaaatcggtgact

SEQ ID NO: 1985880 - DNA, 25 bp, Homo sapien
tgtctgacagattgtcagaaggagg

SEQ ID NO: 1985881 - DNA, 25 bp, Homo sapien
aatggtttctgcaattactggtaac

SEQ ID NO: 1985882 - DNA, 25 bp, Homo sapien
tttttcttcggtatagaaatgctac

SEQ ID NO: 1985883 - DNA, 25 bp, Homo sapien
ctaggtattcaatttcatatgtggc

SEQ ID NO: 1985884 - DNA, 25 bp, Homo sapien
gagaactttcactgctttggataag

SEQ ID NO: 1985885 - DNA, 25 bp, Homo sapien
tgattgttttagctagggttaccag

SEQ ID NO: 1985886 - DNA, 25 bp, Homo sapien
ttgatctttacattatcgctgaatc

SEQ ID NO: 1985887 - DNA, 25 bp, Homo sapien
cattcttcgagtcagccattttgct

SEQ ID NO: 1985888 - DNA, 25 bp, Homo sapien
caataagatcgtggttttccaggac

SEQ ID NO: 1985889 - DNA, 25 bp, Homo sapien
gctgaatcctctactacttttgtcc

SEQ ID NO: 1985890 - DNA, 25 bp, Homo sapien
ataaattccaacttcattacttcca

SEQ ID NO: 1985891 - DNA, 25 bp, Homo sapien
tcattggaataatccataaattcca

SEQ ID NO: 1985892 - DNA, 25 bp, Homo sapien
taaattccaacttcattacttccac

SEQ ID NO: 1985893 - DNA, 25 bp, Homo sapien
gaataatccataaattccaacttca

SEQ ID NO: 1985894 - DNA, 25 bp, Homo sapien
aggcaacaggactcatgtaggtgac

SEQ ID NO: 1985895 - DNA, 25 bp, Homo sapien
ttgtatccacaataaaggcaacagg

SEQ ID NO: 1985896 - DNA, 25 bp, Homo sapien
acttccaccttttgtaagtgaatca

SEQ ID NO: 1985897 - DNA, 25 bp, Homo sapien
tattctccattgtatccacaataaa

SEQ ID NO: 1985898 - DNA, 25 bp, Homo sapien
cagcttccgagggtctgcagacagg

SEQ ID NO: 1985899 - DNA, 25 bp, Homo sapien
gcagcatgatgcaaaactatagagt

SEQ ID NO: 1985900 - DNA, 25 bp, Homo sapien
acttccactagagccggaacagcag

SEQ ID NO: 1985901 - DNA, 25 bp, Homo sapien
tgttcaccctaatggaaagaagagt

SEQ ID NO: 1985902 - DNA, 25 bp, Homo sapien
tagaattcctttcagggatggctgc

SEQ ID NO: 1985903 - DNA, 25 bp, Homo sapien
tttttgcaggtgcaacaaatatatc

SEQ ID NO: 1985904 - DNA, 25 bp, Homo sapien
ttgagaaagagtttgtggaattgat

SEQ ID NO: 1985905 - DNA, 25 bp, Homo sapien
tttgcaggtgcaacaaatatatcta

SEQ ID NO: 1985906 - DNA, 25 bp, Homo sapien
tttaggtgtgtctctcccgcgtggt

SEQ ID NO: 1985907 - DNA, 25 bp, Homo sapien
tgcatagtttaggtgtgtctctccc

SEQ ID NO: 1985908 - DNA, 25 bp, Homo sapien
taggtctgtctctcccgcgtagttt

SEQ ID NO: 1985909 - DNA, 25 bp, Homo sapien
tagtttaggtgtgtctctcccgcgt

SEQ ID NO: 1985910 - DNA, 25 bp, Homo sapien
taggcgcatctctcccacgtggttt

SEQ ID NO: 1985911 - DNA, 25 bp, Homo sapien
gtgtctcttccgcatggtttaggca

SEQ ID NO: 1985912 - DNA, 25 bp, Homo sapien
gcacgtctctctcgcatggtttagg

SEQ ID NO: 1985913 - DNA, 25 bp, Homo sapien
taccccatgtggtttaggcgcatct

SEQ ID NO: 1985914 - DNA, 25 bp, Homo sapien
ataatctgtttatccaggggattca

SEQ ID NO: 1985915 - DNA, 25 bp, Homo sapien
gataatctgtttatccaggggattc

SEQ ID NO: 1985916 - DNA, 25 bp, Homo sapien
tgttgacaccaacctcacgttacga

SEQ ID NO: 1985917 - DNA, 25 bp, Homo sapien
tagaaggcctctgattgcagcatgt

SEQ ID NO: 1985918 - DNA, 25 bp, Homo sapien
gggcacagacaaccttatcaaacaa

SEQ ID NO: 1985919 - DNA, 25 bp, Homo sapien
aatggtaagatgaatcctagaaggc

SEQ ID NO: 1985920 - DNA, 25 bp, Homo sapien
gaagtgcatagtgctgctcccagga

SEQ ID NO: 1985921 - DNA, 25 bp, Homo sapien
tctatcgccttgtggatggcaccaa

SEQ ID NO: 1985922 - DNA, 25 bp, Homo sapien
aggctctgccagtaaaaagtaatga

SEQ ID NO: 1985923 - DNA, 25 bp, Homo sapien
tatccaagtgtattaggagactggg

SEQ ID NO: 1985924 - DNA, 25 bp, Homo sapien
tgtcactttttagcgttaatggcag

SEQ ID NO: 1985925 - DNA, 25 bp, Homo sapien
cagtgagataatggaccactattaa

SEQ ID NO: 1985926 - DNA, 25 bp, Homo sapien
ggaccactattaaacctgattctct

SEQ ID NO: 1985927 - DNA, 25 bp, Homo sapien
caagcatggttccaactctgtgtca

SEQ ID NO: 1985928 - DNA, 25 bp, Homo sapien
tgtcttcagtatgactagaagatcg

SEQ ID NO: 1985929 - DNA, 25 bp, Homo sapien
gaagatcgcactgaaagcagacaag

SEQ ID NO: 1985930 - DNA, 25 bp, Homo sapien
acaagactccttagaactgtcctca

SEQ ID NO: 1985931 - DNA, 25 bp, Homo sapien
tatgactagaagatcgcactgaaag

SEQ ID NO: 1985932 - DNA, 25 bp, Homo sapien
taaatactctccatacttcttggct

SEQ ID NO: 1985933 - DNA, 25 bp, Homo sapien
gtggtcctctgcaattagattctct

SEQ ID NO: 1985934 - DNA, 25 bp, Homo sapien
tggtcctctgcaattagattctctg

SEQ ID NO: 1985935 - DNA, 25 bp, Homo sapien
agattctctggtaaatactctccat

SEQ ID NO: 1985936 - DNA, 25 bp, Homo sapien
ttttcctctagagagtatgatgtcg

SEQ ID NO: 1985937 - DNA, 25 bp, Homo sapien
tgccccattgcaaccatcgtttttg

SEQ ID NO: 1985938 - DNA, 25 bp, Homo sapien
gcaaccatcgtttttgtctctttac

SEQ ID NO: 1985939 - DNA, 25 bp, Homo sapien
tgatgtcgttgtcatcccacctggg

SEQ ID NO: 1985940 - DNA, 25 bp, Homo sapien
ggggcaaaagaagcaaatctaattg

SEQ ID NO: 1985941 - DNA, 25 bp, Homo sapien
ggcaaaagaagcaaatctaattgtg

SEQ ID NO: 1985942 - DNA, 25 bp, Homo sapien
gcaaaagaagcaaatctaattgtgt

SEQ ID NO: 1985943 - DNA, 25 bp, Homo sapien
gggcaaaagaagcaaatctaattgt

SEQ ID NO: 1985944 - DNA, 25 bp, Homo sapien
tcctggagtggatgaagctgagtgt

SEQ ID NO: 1985945 - DNA, 25 bp, Homo sapien
gattcagtacatcaacaaacccgct

SEQ ID NO: 1985946 - DNA, 25 bp, Homo sapien
gaaagtaatgtgtccgattcagtac

SEQ ID NO: 1985947 - DNA, 25 bp, Homo sapien
tgttcagctagaaagtaatgtgtcc

SEQ ID NO: 1985948 - DNA, 25 bp, Homo sapien
tttccttcattatcgcattctgcat

SEQ ID NO: 1985949 - DNA, 25 bp, Homo sapien
attatcgcattctgcatacaaagcc

SEQ ID NO: 1985950 - DNA, 25 bp, Homo sapien
acaatcgtgtgggaaatttctgccc

SEQ ID NO: 1985951 - DNA, 25 bp, Homo sapien
agccacagacaatcgtgtgggaaat

SEQ ID NO: 1985952 - DNA, 25 bp, Homo sapien
tgctacaccaaacataaaaacctgg

SEQ ID NO: 1985953 - DNA, 25 bp, Homo sapien
actaccccaccaaagcagtccgcct

SEQ ID NO: 1985954 - DNA, 25 bp, Homo sapien
aaagcagtccgcctggatctgaatc

SEQ ID NO: 1985955 - DNA, 25 bp, Homo sapien
ctgctacaccaaacataaaaacctg

SEQ ID NO: 1985956 - DNA, 25 bp, Homo sapien
tattaagggacatggattccaggcc

SEQ ID NO: 1985957 - DNA, 25 bp, Homo sapien
gaaatgtaagccagcaacttcaatg

SEQ ID NO: 1985958 - DNA, 25 bp, Homo sapien
taagacaataccacaagggaggaag

SEQ ID NO: 1985959 - DNA, 25 bp, Homo sapien
gggcacagctaatccagatttggaa

SEQ ID NO: 1985960 - DNA, 25 bp, Homo sapien
agccaggatcgtgccactgtattcc

SEQ ID NO: 1985961 - DNA, 25 bp, Homo sapien
agcctgggcaacagggtgagacacc

SEQ ID NO: 1985962 - DNA, 25 bp, Homo sapien
tgagccaggatcgtgccactgtatt

SEQ ID NO: 1985963 - DNA, 25 bp, Homo sapien
cctgggcaacagggtgagacaccat

SEQ ID NO: 1985964 - DNA, 25 bp, Homo sapien
attcttcccaattgtcctcagggtc

SEQ ID NO: 1985965 - DNA, 25 bp, Homo sapien
agggtctgttggaaatgcagtcgca

SEQ ID NO: 1985966 - DNA, 25 bp, Homo sapien
tctcataactatgccatcagcttct

SEQ ID NO: 1985967 - DNA, 25 bp, Homo sapien
gaaatgcagtcgcagtcttcacccc

SEQ ID NO: 1985968 - DNA, 25 bp, Homo sapien
taaaaactgcttatcatatagaaat

SEQ ID NO: 1985969 - DNA, 25 bp, Homo sapien
ctaaaaactgcttatcatatagaaa

SEQ ID NO: 1985970 - DNA, 25 bp, Homo sapien
aaactgcttatcatatagaaattgc

SEQ ID NO: 1985971 - DNA, 25 bp, Homo sapien
ctgcttatcatatagaaattgctca

SEQ ID NO: 1985972 - DNA, 25 bp, Homo sapien
cccagtatcagagtttgagaatcag

SEQ ID NO: 1985973 - DNA, 25 bp, Homo sapien
aatcagagggctgatattttggcat

SEQ ID NO: 1985974 - DNA, 25 bp, Homo sapien
ttcccagtatcagagtttgagaatc

SEQ ID NO: 1985975 - DNA, 25 bp, Homo sapien
cttttcccagtatcagagtttgaga

SEQ ID NO: 1985976 - DNA, 25 bp, Homo sapien
agttgtacagatactgaagacttcc

SEQ ID NO: 1985977 - DNA, 25 bp, Homo sapien
aaaaggtcaggatcagtgcaaccta

SEQ ID NO: 1985978 - DNA, 25 bp, Homo sapien
aggatcagtgcaacctatacttgcc

SEQ ID NO: 1985979 - DNA, 25 bp, Homo sapien
cttgggagtaaagttgtacagatac

SEQ ID NO: 1985980 - DNA, 25 bp, Homo sapien
aggtgcccctctgcgatcctcccat

SEQ ID NO: 1985981 - DNA, 25 bp, Homo sapien
ggttcttttgcaaattggtctatgc

SEQ ID NO: 1985982 - DNA, 25 bp, Homo sapien
tcagggcgggcaactggaaatacct

SEQ ID NO: 1985983 - DNA, 25 bp, Homo sapien
cattctgaaacagttcagggcgggc

SEQ ID NO: 1985984 - DNA, 25 bp, Homo sapien
tatgcacgtgtagattcctccaggt

SEQ ID NO: 1985985 - DNA, 25 bp, Homo sapien
aatacttcttgggtgaacgtgttgc

SEQ ID NO: 1985986 - DNA, 25 bp, Homo sapien
gagacttgtcagagtcgtttgcccc

SEQ ID NO: 1985987 - DNA, 25 bp, Homo sapien
ttattaattcttccagctgaggtaa

SEQ ID NO: 1985988 - DNA, 25 bp, Homo sapien
gggtgaacgtgttgcttattaattc

SEQ ID NO: 1985989 - DNA, 25 bp, Homo sapien
tcaacagatgggagccacttatggc

SEQ ID NO: 1985990 - DNA, 25 bp, Homo sapien
ggatgtgaaagaaagtgccagccga

SEQ ID NO: 1985991 - DNA, 25 bp, Homo sapien
cacttggctggcagagtacgcttta

SEQ ID NO: 1985992 - DNA, 25 bp, Homo sapien
gatcatatgggagtttgaaacagcc

SEQ ID NO: 1985993 - DNA, 25 bp, Homo sapien
gatgccagaagtccggggagccttg

SEQ ID NO: 1985994 - DNA, 25 bp, Homo sapien
aacaccctgaaaagccgactggatc

SEQ ID NO: 1985995 - DNA, 25 bp, Homo sapien
cacaatggggattgtaaaataaagg

SEQ ID NO: 1985996 - DNA, 25 bp, Homo sapien
ggtggagttgagatccacaatgggg

SEQ ID NO: 1985997 - DNA, 25 bp, Homo sapien
caaatgactgttcattgcaggaaat

SEQ ID NO: 1985998 - DNA, 25 bp, Homo sapien
cagagccccaaatgactgttcattg

SEQ ID NO: 1985999 - DNA, 25 bp, Homo sapien
gtttataccaattgtcagagcccca

SEQ ID NO: 1986000 - DNA, 25 bp, Homo sapien
tcctccagggtttataccaattgtc

SEQ ID NO: 1986001 - DNA, 25 bp, Homo sapien
gccttttcataagcaatagcttcct

SEQ ID NO: 1986002 - DNA, 25 bp, Homo sapien
tttcctcgtcctgtgccttttcata

SEQ ID NO: 1986003 - DNA, 25 bp, Homo sapien
gtcattggccccttgagctatttcc

SEQ ID NO: 1986004 - DNA, 25 bp, Homo sapien
gacttctttgagtccctgttcccca

SEQ ID NO: 1986005 - DNA, 25 bp, Homo sapien
ttcagcctgcacttgtgctgtccag

SEQ ID NO: 1986006 - DNA, 25 bp, Homo sapien
gatgtcatgaatgctggactccctc

SEQ ID NO: 1986007 - DNA, 25 bp, Homo sapien
cttccttatttggacagatgtcatg

SEQ ID NO: 1986008 - DNA, 25 bp, Homo sapien
tgtgtcttgggttcttctccagtgc

SEQ ID NO: 1986009 - DNA, 25 bp, Homo sapien
gcttatatagttaaaacatatcccc

SEQ ID NO: 1986010 - DNA, 25 bp, Homo sapien
tttattagcaaaggcttatatagtt

SEQ ID NO: 1986011 - DNA, 25 bp, Homo sapien
gcaaaggcttatatagttaaaacat

SEQ ID NO: 1986012 - DNA, 25 bp, Homo sapien
acatatccccctaaatttcattccg

SEQ ID NO: 1986013 - DNA, 25 bp, Homo sapien
tttgggacaaacgtactgagatagc

SEQ ID NO: 1986014 - DNA, 25 bp, Homo sapien
gcatctcaaggcatcgctcgataaa

SEQ ID NO: 1986015 - DNA, 25 bp, Homo sapien
ccgtaattcacttagcctctgggct

SEQ ID NO: 1986016 - DNA, 25 bp, Homo sapien
gcaattgatagctctctttgggaca

SEQ ID NO: 1986017 - DNA, 25 bp, Homo sapien
ccttaactcgacagatgatttttgc

SEQ ID NO: 1986018 - DNA, 25 bp, Homo sapien
ttaactcgacagatgatttttgctg

SEQ ID NO: 1986019 - DNA, 25 bp, Homo sapien
actcgacagatgatttttgctgttg

SEQ ID NO: 1986020 - DNA, 25 bp, Homo sapien
taactcgacagatgatttttgctgt

SEQ ID NO: 1986021 - DNA, 25 bp, Homo sapien
tagatgtatactccctgcagcaggc

SEQ ID NO: 1986022 - DNA, 25 bp, Homo sapien
ccataaaagggcctggcaaagtaca

SEQ ID NO: 1986023 - DNA, 25 bp, Homo sapien
taggacttgctattgtatttgaccc

SEQ ID NO: 1986024 - DNA, 25 bp, Homo sapien
aagagtaggcatgctgaacttctca

SEQ ID NO: 1986025 - DNA, 25 bp, Homo sapien
aagtacaatttaccaggtccatgcc

SEQ ID NO: 1986026 - DNA, 25 bp, Homo sapien
aattgcaagtacaatttaccaggtc

SEQ ID NO: 1986027 - DNA, 25 bp, Homo sapien
gcggaaattaccctgcagttataat

SEQ ID NO: 1986028 - DNA, 25 bp, Homo sapien
tctatattatacaccctatctgcgg

SEQ ID NO: 1986029 - DNA, 25 bp, Homo sapien
gagctttcgtcctcaatttgccaaa

SEQ ID NO: 1986030 - DNA, 25 bp, Homo sapien
ctttcgtcctcaatttgccaaatgg

SEQ ID NO: 1986031 - DNA, 25 bp, Homo sapien
aattgttagagctttcgtcctcaat

SEQ ID NO: 1986032 - DNA, 25 bp, Homo sapien
aaaggaaatataggctatatcttgc

SEQ ID NO: 1986033 - DNA, 25 bp, Homo sapien
gaaccactgggttactgtcttctgt

SEQ ID NO: 1986034 - DNA, 25 bp, Homo sapien
ttaaagatatggtatccaccatgtg

SEQ ID NO: 1986035 - DNA, 25 bp, Homo sapien
cgggttactgagagcattaaagata

SEQ ID NO: 1986036 - DNA, 25 bp, Homo sapien
caccatgtgtgctctatagatagga

SEQ ID NO: 1986037 - DNA, 25 bp, Homo sapien
atcttgcatctcgccgtcttttaag

SEQ ID NO: 1986038 - DNA, 25 bp, Homo sapien
catctcgccgtcttttaagcttgtg

SEQ ID NO: 1986039 - DNA, 25 bp, Homo sapien
ttgcatctcgccgtcttttaagctt

SEQ ID NO: 1986040 - DNA, 25 bp, Homo sapien
tctcgccgtcttttaagcttgtgtt

SEQ ID NO: 1986041 - DNA, 25 bp, Homo sapien
gcacaggcaaggctttatgcagggc

SEQ ID NO: 1986042 - DNA, 25 bp, Homo sapien
tccgcacaggcaaggctttatgcag

SEQ ID NO: 1986043 - DNA, 25 bp, Homo sapien
gctgcctccgcacaggcaaggcttt

SEQ ID NO: 1986044 - DNA, 25 bp, Homo sapien
cctccgcacaggcaaggctttatgc

SEQ ID NO: 1986045 - DNA, 25 bp, Homo sapien
tacacaaagcgtgctctaaagtgct

SEQ ID NO: 1986046 - DNA, 25 bp, Homo sapien
acacaaagcgtgctctaaagtgctg

SEQ ID NO: 1986047 - DNA, 25 bp, Homo sapien
ttacacaaagcgtgctctaaagtgc

SEQ ID NO: 1986048 - DNA, 25 bp, Homo sapien
agcccagtcatctctaggagcacac

SEQ ID NO: 1986049 - DNA, 25 bp, Homo sapien
gcccagtcatctctaggagcacact

SEQ ID NO: 1986050 - DNA, 25 bp, Homo sapien
tggtttgtaagcagttcttatgcct

SEQ ID NO: 1986051 - DNA, 25 bp, Homo sapien
ttgtaagcagttcttatgcctgtca

SEQ ID NO: 1986052 - DNA, 25 bp, Homo sapien
tctgaagggccagtttttgtatctc

SEQ ID NO: 1986053 - DNA, 25 bp, Homo sapien
ggctctctttgcctaagcgtcctag

SEQ ID NO: 1986054 - DNA, 25 bp, Homo sapien
tactcgctgtgctcataatggctct

SEQ ID NO: 1986055 - DNA, 25 bp, Homo sapien
tgtctggagctcacagtactcgctg

SEQ ID NO: 1986056 - DNA, 25 bp, Homo sapien
agatggagagtcagccctgccaagg

SEQ ID NO: 1986057 - DNA, 25 bp, Homo sapien
tatgccggatggcagaccccagggc

SEQ ID NO: 1986058 - DNA, 25 bp, Homo sapien
agccctgccaaggcagatggccgac

SEQ ID NO: 1986059 - DNA, 25 bp, Homo sapien
ggagtgcagatggagagtcagccct

SEQ ID NO: 1986060 - DNA, 25 bp, Homo sapien
ccaggagtctcacttgaataaccaa

SEQ ID NO: 1986061 - DNA, 25 bp, Homo sapien
ggactataccaggagtctcacttga

SEQ ID NO: 1986062 - DNA, 25 bp, Homo sapien
tctctcccaactggactataccagg

SEQ ID NO: 1986063 - DNA, 25 bp, Homo sapien
caactggactataccaggagtctca

SEQ ID NO: 1986064 - DNA, 25 bp, Homo sapien
ataatcatatactccattcccccag

SEQ ID NO: 1986065 - DNA, 25 bp, Homo sapien
aatcatatactccattcccccaggg

SEQ ID NO: 1986066 - DNA, 25 bp, Homo sapien
catatactccattcccccagggccc

SEQ ID NO: 1986067 - DNA, 25 bp, Homo sapien
atcatatactccattcccccagggc

SEQ ID NO: 1986068 - DNA, 25 bp, Homo sapien
cacgtgatattttggtgtgtccatc

SEQ ID NO: 1986069 - DNA, 25 bp, Homo sapien
acagtgcagttctgcgtagtaagga

SEQ ID NO: 1986070 - DNA, 25 bp, Homo sapien
agagttgtcacgtgatattttggtg

SEQ ID NO: 1986071 - DNA, 25 bp, Homo sapien
ggtgtgtccatcaatgtgtgacagt

SEQ ID NO: 1986072 - DNA, 25 bp, Homo sapien
taaatccaaagcgaaaatgagcgac

SEQ ID NO: 1986073 - DNA, 25 bp, Homo sapien
tagatctggcactagagcagtcagt

SEQ ID NO: 1986074 - DNA, 25 bp, Homo sapien
tagtcttcaactgtggctgcatgcc

SEQ ID NO: 1986075 - DNA, 25 bp, Homo sapien
gctgtcgcagctacattgggactga

SEQ ID NO: 1986076 - DNA, 25 bp, Homo sapien
caaaggtcagaagcttgttcagctg

SEQ ID NO: 1986077 - DNA, 25 bp, Homo sapien
ctggactgtctgatgcaaaggtcag

SEQ ID NO: 1986078 - DNA, 25 bp, Homo sapien
tgtctgatgcaaaggtcagaagctt

SEQ ID NO: 1986079 - DNA, 25 bp, Homo sapien
tgatgcaaaggtcagaagcttgttc

SEQ ID NO: 1986080 - DNA, 25 bp, Homo sapien
gctgtcccctgcttttgcccgatac

SEQ ID NO: 1986081 - DNA, 25 bp, Homo sapien
catggatgtcaaattgcttaaagtc

SEQ ID NO: 1986082 - DNA, 25 bp, Homo sapien
tgcccgataccccagaagtgaagga

SEQ ID NO: 1986083 - DNA, 25 bp, Homo sapien
gtcaaattgcttaaagtcttctgaa

SEQ ID NO: 1986084 - DNA, 25 bp, Homo sapien
actgagaaaagacgtagaggataag

SEQ ID NO: 1986085 - DNA, 25 bp, Homo sapien
tgatggagttgcgtttcaccagaac

SEQ ID NO: 1986086 - DNA, 25 bp, Homo sapien
gtgttgatggagttgcgtttcacca

SEQ ID NO: 1986087 - DNA, 25 bp, Homo sapien
ctgagaaaagacgtagaggataaga

SEQ ID NO: 1986088 - DNA, 25 bp, Homo sapien
attaggtgatcactgtaggggttta

SEQ ID NO: 1986089 - DNA, 25 bp, Homo sapien
atattaggtgatcactgtaggggtt

SEQ ID NO: 1986090 - DNA, 25 bp, Homo sapien
ttaggtgatcactgtaggggtttac

SEQ ID NO: 1986091 - DNA, 25 bp, Homo sapien
tattaggtgatcactgtaggggttt

SEQ ID NO: 1986092 - DNA, 25 bp, Homo sapien
caccaagccaatgatgggaaaactt

SEQ ID NO: 1986093 - DNA, 25 bp, Homo sapien
gggacaccaagccaatgatgggaaa

SEQ ID NO: 1986094 - DNA, 25 bp, Homo sapien
caagccaatgatgggaaaacttagc

SEQ ID NO: 1986095 - DNA, 25 bp, Homo sapien
tcaggggacaccaagccaatgatgg

SEQ ID NO: 1986096 - DNA, 25 bp, Homo sapien
gggtgcctcctttgcgtcagtctca

SEQ ID NO: 1986097 - DNA, 25 bp, Homo sapien
aaactccgcgacctggctcaggctc

SEQ ID NO: 1986098 - DNA, 25 bp, Homo sapien
tgctgccagtctgtcgggtcctcca

SEQ ID NO: 1986099 - DNA, 25 bp, Homo sapien
tgtgtggcagaaagacgagcatctc

SEQ ID NO: 1986100 - DNA, 25 bp, Homo sapien
caggattccggggtcagacccctct

SEQ ID NO: 1986101 - DNA, 25 bp, Homo sapien
tggactccaggattccggggtcaga

SEQ ID NO: 1986102 - DNA, 25 bp, Homo sapien
cctggactccaggattccggggtca

SEQ ID NO: 1986103 - DNA, 25 bp, Homo sapien
gactccaggattccggggtcagacc

SEQ ID NO: 1986104 - DNA, 25 bp, Homo sapien
gaagacttgcccaacttaacgtgaa

SEQ ID NO: 1986105 - DNA, 25 bp, Homo sapien
tccaaggcaccggaacatagtgtct

SEQ ID NO: 1986106 - DNA, 25 bp, Homo sapien
gactgaacaggccaagcttcgtgag

SEQ ID NO: 1986107 - DNA, 25 bp, Homo sapien
tagatcgacttctggtaatcaggcc

SEQ ID NO: 1986108 - DNA, 25 bp, Homo sapien
tgcagcacctgtgataactcattat

SEQ ID NO: 1986109 - DNA, 25 bp, Homo sapien
ctacctaaggtagccatggtatcta

SEQ ID NO: 1986110 - DNA, 25 bp, Homo sapien
catggctaactagtggctgttgaac

SEQ ID NO: 1986111 - DNA, 25 bp, Homo sapien
tatagtcgtttgtgtatgcagcacc

SEQ ID NO: 1986112 - DNA, 25 bp, Homo sapien
aactgccaggtcagaggcatggcag

SEQ ID NO: 1986113 - DNA, 25 bp, Homo sapien
tgccaggtcagaggcatggcagccc

SEQ ID NO: 1986114 - DNA, 25 bp, Homo sapien
ggcagccctgaattggctggttttt

SEQ ID NO: 1986115 - DNA, 25 bp, Homo sapien
attggctggtttttaggctgcttgg

SEQ ID NO: 1986116 - DNA, 25 bp, Homo sapien
aaatgatgattcaggctcagtttag

SEQ ID NO: 1986117 - DNA, 25 bp, Homo sapien
cacttggtgtttgaccaatagcctc

SEQ ID NO: 1986118 - DNA, 25 bp, Homo sapien
tagcctctttttaccatgcactctg

SEQ ID NO: 1986119 - DNA, 25 bp, Homo sapien
gaccaatagcctctttttaccatgc

SEQ ID NO: 1986120 - DNA, 25 bp, Homo sapien
cctgatcttttagacacttggtgtt

SEQ ID NO: 1986121 - DNA, 25 bp, Homo sapien
cacgtatactctggatctctttgaa

SEQ ID NO: 1986122 - DNA, 25 bp, Homo sapien
tcacgtatactctggatctctttga

SEQ ID NO: 1986123 - DNA, 25 bp, Homo sapien
caaacatgtagtaatttagggccct

SEQ ID NO: 1986124 - DNA, 25 bp, Homo sapien
tggaaagacatcagtccaaggcaca

SEQ ID NO: 1986125 - DNA, 25 bp, Homo sapien
tagggccctagagatccactttcca

SEQ ID NO: 1986126 - DNA, 25 bp, Homo sapien
tgtctctcccttgactgggcagtga

SEQ ID NO: 1986127 - DNA, 25 bp, Homo sapien
gaaaattttgccaggtcgacgtcag

SEQ ID NO: 1986128 - DNA, 25 bp, Homo sapien
gattccactggaaacctgtcttcag

SEQ ID NO: 1986129 - DNA, 25 bp, Homo sapien
ggtcattcacttggatatcgcaggg

SEQ ID NO: 1986130 - DNA, 25 bp, Homo sapien
gacgtcagactgctaattccatagg

SEQ ID NO: 1986131 - DNA, 25 bp, Homo sapien
gtgactgctgtgttgagtcagagtt

SEQ ID NO: 1986132 - DNA, 25 bp, Homo sapien
tactctgaatatggtagcagctccc

SEQ ID NO: 1986133 - DNA, 25 bp, Homo sapien
aatatggtagcagctccctttgagg

SEQ ID NO: 1986134 - DNA, 25 bp, Homo sapien
ctgctgtgttgagtcagagttttcc

SEQ ID NO: 1986135 - DNA, 25 bp, Homo sapien
taacatatccccagtttcagagaga

SEQ ID NO: 1986136 - DNA, 25 bp, Homo sapien
tattcctgtcataagtagtaagtcc

SEQ ID NO: 1986137 - DNA, 25 bp, Homo sapien
gagctaatattaccagaatcctggg

SEQ ID NO: 1986138 - DNA, 25 bp, Homo sapien
actgcccatcttcacccggtttatg

SEQ ID NO: 1986139 - DNA, 25 bp, Homo sapien
gattttagcccataagatccatgtc

SEQ ID NO: 1986140 - DNA, 25 bp, Homo sapien
taattccatgttgcataagctacca

SEQ ID NO: 1986141 - DNA, 25 bp, Homo sapien
tatgaagaagggtataggcactacc

SEQ ID NO: 1986142 - DNA, 25 bp, Homo sapien
ggcactacccattatatccatgtaa

SEQ ID NO: 1986143 - DNA, 25 bp, Homo sapien
ctgactgcttgaggaaagctggcat

SEQ ID NO: 1986144 - DNA, 25 bp, Homo sapien
tgctgactgcttgaggaaagctggc

SEQ ID NO: 1986145 - DNA, 25 bp, Homo sapien
ctgctgactgcttgaggaaagctgg

SEQ ID NO: 1986146 - DNA, 25 bp, Homo sapien
gctgactgcttgaggaaagctggca

SEQ ID NO: 1986147 - DNA, 25 bp, Homo sapien
ttgggctctcagattatggacttta

SEQ ID NO: 1986148 - DNA, 25 bp, Homo sapien
tgggctctcagattatggactttac

SEQ ID NO: 1986149 - DNA, 25 bp, Homo sapien
aacagactagttgtgggtaacacag

SEQ ID NO: 1986150 - DNA, 25 bp, Homo sapien
ttcccaaatatattcaccaacttag

SEQ ID NO: 1986151 - DNA, 25 bp, Homo sapien
gtcaacagactagttgtgggtaaca

SEQ ID NO: 1986152 - DNA, 25 bp, Homo sapien
tagtcaacagactagttgtgggtaa

SEQ ID NO: 1986153 - DNA, 25 bp, Homo sapien
catagagtcaccttcctgtctgtct

SEQ ID NO: 1986154 - DNA, 25 bp, Homo sapien
ccatagagtcaccttcctgtctgtc

SEQ ID NO: 1986155 - DNA, 25 bp, Homo sapien
agtttatcgctgatgtcttccatag

SEQ ID NO: 1986156 - DNA, 25 bp, Homo sapien
tccttcctagtttatcgctgatgtc

SEQ ID NO: 1986157 - DNA, 25 bp, Homo sapien
ttcaggtaacaggatgcacattcat

SEQ ID NO: 1986158 - DNA, 25 bp, Homo sapien
cttcaggtaacaggatgcacattca

SEQ ID NO: 1986159 - DNA, 25 bp, Homo sapien
tcaggtaacaggatgcacattcata

SEQ ID NO: 1986160 - DNA, 25 bp, Homo sapien
aaggctcagggctaccctaacaaga

SEQ ID NO: 1986161 - DNA, 25 bp, Homo sapien
gagcctgaacaggtctgagtaagcc

SEQ ID NO: 1986162 - DNA, 25 bp, Homo sapien
cctgttggttgtcatagatactctg

SEQ ID NO: 1986163 - DNA, 25 bp, Homo sapien
tcttggagacctgttggttgtcata

SEQ ID NO: 1986164 - DNA, 25 bp, Homo sapien
gtccttagcagtaccttcagcacag

SEQ ID NO: 1986165 - DNA, 25 bp, Homo sapien
catgtaatgcacctagaactgctca

SEQ ID NO: 1986166 - DNA, 25 bp, Homo sapien
gaaaacagataagcccaaaacatgt

SEQ ID NO: 1986167 - DNA, 25 bp, Homo sapien
tataatgcaggacgggactaaaatc

SEQ ID NO: 1986168 - DNA, 25 bp, Homo sapien
cagatgaaccacgtagaattgggct

SEQ ID NO: 1986169 - DNA, 25 bp, Homo sapien
tagattcagttaagtcaggagcaga

SEQ ID NO: 1986170 - DNA, 25 bp, Homo sapien
catggtaccctatgctcagagcaag

SEQ ID NO: 1986171 - DNA, 25 bp, Homo sapien
tggcagacaaaccaagcaggcagtc

SEQ ID NO: 1986172 - DNA, 25 bp, Homo sapien
caagttgaacctagtggcaccatca

SEQ ID NO: 1986173 - DNA, 25 bp, Homo sapien
aacattcagagagtgtccacctgcc

SEQ ID NO: 1986174 - DNA, 25 bp, Homo sapien
tcccacctgatcagcagtgtctggt

SEQ ID NO: 1986175 - DNA, 25 bp, Homo sapien
gcaagaccatcagcctccaagttga

SEQ ID NO: 1986176 - DNA, 25 bp, Homo sapien
aaaggtcatcctctccactgtgttt

SEQ ID NO: 1986177 - DNA, 25 bp, Homo sapien
taaaaggtcatcctctccactgtgt

SEQ ID NO: 1986178 - DNA, 25 bp, Homo sapien
ttaaaaggtcatcctctccactgtg

SEQ ID NO: 1986179 - DNA, 25 bp, Homo sapien
aggtcatcctctccactgtgtttct

SEQ ID NO: 1986180 - DNA, 25 bp, Homo sapien
ggatttgcactatacccagagctga

SEQ ID NO: 1986181 - DNA, 25 bp, Homo sapien
tcttgagtgatggtgcaggcttccc

SEQ ID NO: 1986182 - DNA, 25 bp, Homo sapien
ccttgagacaccgtaatgggtggtg

SEQ ID NO: 1986183 - DNA, 25 bp, Homo sapien
cctgcttgggtctgcccttgagaca

SEQ ID NO: 1986184 - DNA, 25 bp, Homo sapien
ttgtttctctgccagccctttgagt

SEQ ID NO: 1986185 - DNA, 25 bp, Homo sapien
ctctttgatgttgtttctctgccag

SEQ ID NO: 1986186 - DNA, 25 bp, Homo sapien
tgatgttgtttctctgccagccctt

SEQ ID NO: 1986187 - DNA, 25 bp, Homo sapien
tttgatgttgtttctctgccagccc

SEQ ID NO: 1986188 - DNA, 25 bp, Homo sapien
ctccctttttgggagcctctggctt

SEQ ID NO: 1986189 - DNA, 25 bp, Homo sapien
gatgatgttagatgagtttctgttc

SEQ ID NO: 1986190 - DNA, 25 bp, Homo sapien
atgatgttagatgagtttctgttct

SEQ ID NO: 1986191 - DNA, 25 bp, Homo sapien
ttctcttcggtaacttttccatctc

SEQ ID NO: 1986192 - DNA, 25 bp, Homo sapien
ctcttcggtaacttttccatctcct

SEQ ID NO: 1986193 - DNA, 25 bp, Homo sapien
ttctgcaatgccaaaattgttgaca

SEQ ID NO: 1986194 - DNA, 25 bp, Homo sapien
tcttctgcaatgccaaaattgttga

SEQ ID NO: 1986195 - DNA, 25 bp, Homo sapien
tctgcaatgccaaaattgttgacac

SEQ ID NO: 1986196 - DNA, 25 bp, Homo sapien
cttctgcaatgccaaaattgttgac

SEQ ID NO: 1986197 - DNA, 25 bp, Homo sapien
gcctgcttgctaattactatcgtat

SEQ ID NO: 1986198 - DNA, 25 bp, Homo sapien
tatcgtatatagctagtccaaggcc

SEQ ID NO: 1986199 - DNA, 25 bp, Homo sapien
cactggagctctgcgaagttcgtgc

SEQ ID NO: 1986200 - DNA, 25 bp, Homo sapien
tgagtcctacataccttccattaag

SEQ ID NO: 1986201 - DNA, 25 bp, Homo sapien
gggactccaaggtcatccattttac

SEQ ID NO: 1986202 - DNA, 25 bp, Homo sapien
gatttgtgtagtggtcctctctccc

SEQ ID NO: 1986203 - DNA, 25 bp, Homo sapien
tcttgaaactattgttaacagggaa

SEQ ID NO: 1986204 - DNA, 25 bp, Homo sapien
aagatggtgacctctctgcgtttcc

SEQ ID NO: 1986205 - DNA, 25 bp, Homo sapien
caaggttcccgctatctgaatacaa

SEQ ID NO: 1986206 - DNA, 25 bp, Homo sapien
tgtcacagtgacaaggttcccgcta

SEQ ID NO: 1986207 - DNA, 25 bp, Homo sapien
tcacaaacgcagcatttcacggaga

SEQ ID NO: 1986208 - DNA, 25 bp, Homo sapien
gcatttcacggagacacagtgtcac

SEQ ID NO: 1986209 - DNA, 25 bp, Homo sapien
taaaagtgattatgatcagcagcca

SEQ ID NO: 1986210 - DNA, 25 bp, Homo sapien
tattatgccccagtagttcagtcta

SEQ ID NO: 1986211 - DNA, 25 bp, Homo sapien
cgttgcagtcaagctataaaagtga

SEQ ID NO: 1986212 - DNA, 25 bp, Homo sapien
gttcagtctaatttggtccccttca

SEQ ID NO: 1986213 - DNA, 25 bp, Homo sapien
cattaaataagcttgtgtctcgttc

SEQ ID NO: 1986214 - DNA, 25 bp, Homo sapien
tcccaagacttgagacatttccagc

SEQ ID NO: 1986215 - DNA, 25 bp, Homo sapien
taaatacttcttcacttaatgtccc

SEQ ID NO: 1986216 - DNA, 25 bp, Homo sapien
caaaagacctatattcaagtccaca

SEQ ID NO: 1986217 - DNA, 25 bp, Homo sapien
atcgccagctgggtactttggtcct

SEQ ID NO: 1986218 - DNA, 25 bp, Homo sapien
tggtccttggtggaagcatccagct

SEQ ID NO: 1986219 - DNA, 25 bp, Homo sapien
aagcatccagctcaggtgtgtgagt

SEQ ID NO: 1986220 - DNA, 25 bp, Homo sapien
tcaggtgtgtgagtactgaggctgt

SEQ ID NO: 1986221 - DNA, 25 bp, Homo sapien
tgtgatgggacagccaatttccgcc

SEQ ID NO: 1986222 - DNA, 25 bp, Homo sapien
aggctgtgatgggacagccaatttc

SEQ ID NO: 1986223 - DNA, 25 bp, Homo sapien
gctgtgatgggacagccaatttccg

SEQ ID NO: 1986224 - DNA, 25 bp, Homo sapien
gaaggctgtgatgggacagccaatt

SEQ ID NO: 1986225 - DNA, 25 bp, Homo sapien
ggtaaagttgctaatgaagaccagc

SEQ ID NO: 1986226 - DNA, 25 bp, Homo sapien
ccagctgatggcaagttgttgattg

SEQ ID NO: 1986227 - DNA, 25 bp, Homo sapien
catggtaaagttgctaatgaagacc

SEQ ID NO: 1986228 - DNA, 25 bp, Homo sapien
aatgaagaccagctgatggcaagtt

SEQ ID NO: 1986229 - DNA, 25 bp, Homo sapien
taaaagacatgaaatagtcatgact

SEQ ID NO: 1986230 - DNA, 25 bp, Homo sapien
cagcctttgccgttacacacgatat

SEQ ID NO: 1986231 - DNA, 25 bp, Homo sapien
ccttatggacacttattgaaatccc

SEQ ID NO: 1986232 - DNA, 25 bp, Homo sapien
aatcccactcaatataaaagacatg

SEQ ID NO: 1986233 - DNA, 25 bp, Homo sapien
tctcattgtttgaaatccatactca

SEQ ID NO: 1986234 - DNA, 25 bp, Homo sapien
ttctcattgtttgaaatccatactc

SEQ ID NO: 1986235 - DNA, 25 bp, Homo sapien
ctcattgtttgaaatccatactcac

SEQ ID NO: 1986236 - DNA, 25 bp, Homo sapien
tttacattgcatatcgtctttctta

SEQ ID NO: 1986237 - DNA, 25 bp, Homo sapien
cataaagctcatttgattgatggca

SEQ ID NO: 1986238 - DNA, 25 bp, Homo sapien
gattgatggcataaaattacactgt

SEQ ID NO: 1986239 - DNA, 25 bp, Homo sapien
ttgctgccatagtcagtgtatccac

SEQ ID NO: 1986240 - DNA, 25 bp, Homo sapien
acttcagagctgaaacgttgaatga

SEQ ID NO: 1986241 - DNA, 25 bp, Homo sapien
tgaaagcctttgtgtggcggagggc

SEQ ID NO: 1986242 - DNA, 25 bp, Homo sapien
gcagctccatcgagagacttcagag

SEQ ID NO: 1986243 - DNA, 25 bp, Homo sapien
gctgaaacgttgaatgaaagccttt

SEQ ID NO: 1986244 - DNA, 25 bp, Homo sapien
gtggaatcaacttcatgtaaatgac

SEQ ID NO: 1986245 - DNA, 25 bp, Homo sapien
tttgctgtggaatcaacttcatgta

SEQ ID NO: 1986246 - DNA, 25 bp, Homo sapien
ccattgtgtcactccataaagcctg

SEQ ID NO: 1986247 - DNA, 25 bp, Homo sapien
actccataaagcctgtgcaagcagg

SEQ ID NO: 1986248 - DNA, 25 bp, Homo sapien
ctctccctgcttccttatttttata

SEQ ID NO: 1986249 - DNA, 25 bp, Homo sapien
tccctgcttccttatttttatatta

SEQ ID NO: 1986250 - DNA, 25 bp, Homo sapien
tgtgtgcctctccctgcttccttat

SEQ ID NO: 1986251 - DNA, 25 bp, Homo sapien
tgtgcctctccctgcttccttattt

SEQ ID NO: 1986252 - DNA, 25 bp, Homo sapien
ttagtttgggcccacataatccagg

SEQ ID NO: 1986253 - DNA, 25 bp, Homo sapien
ttatcagggctctattcaactcaac

SEQ ID NO: 1986254 - DNA, 25 bp, Homo sapien
tcactgaccgcagtcaataaaggct

SEQ ID NO: 1986255 - DNA, 25 bp, Homo sapien
aagccagcaagagagcatcattctg

SEQ ID NO: 1986256 - DNA, 25 bp, Homo sapien
acatcctgtcctcttttgatccctt

SEQ ID NO: 1986257 - DNA, 25 bp, Homo sapien
gaatcataatttcactccaggacat

SEQ ID NO: 1986258 - DNA, 25 bp, Homo sapien
ccaggacatagaagctgctacatcc

SEQ ID NO: 1986259 - DNA, 25 bp, Homo sapien
ctgaatcataatttcactccaggac

SEQ ID NO: 1986260 - DNA, 25 bp, Homo sapien
gataacacaaactctggtgtgacct

SEQ ID NO: 1986261 - DNA, 25 bp, Homo sapien
tcttcataggataacacaaactctg

SEQ ID NO: 1986262 - DNA, 25 bp, Homo sapien
aaacagctgcctatatatttttgtg

SEQ ID NO: 1986263 - DNA, 25 bp, Homo sapien
cttggaaagagtggacacaaacagc

SEQ ID NO: 1986264 - DNA, 25 bp, Homo sapien
tgtctttctctactacgagctgcaa

SEQ ID NO: 1986265 - DNA, 25 bp, Homo sapien
ttctctactacgagctgcaatgccc

SEQ ID NO: 1986266 - DNA, 25 bp, Homo sapien
tagatctgtctttctctactacgag

SEQ ID NO: 1986267 - DNA, 25 bp, Homo sapien
tgatggtattagatctgtctttctc

SEQ ID NO: 1986268 - DNA, 25 bp, Homo sapien
ttcctataggtggaaactccaaatg

SEQ ID NO: 1986269 - DNA, 25 bp, Homo sapien
gaattgcctcaaaccgttgtccctg

SEQ ID NO: 1986270 - DNA, 25 bp, Homo sapien
tttataatgtgtccagaaaacgcca

SEQ ID NO: 1986271 - DNA, 25 bp, Homo sapien
cgccaaagtgcttaaggctctgaca

SEQ ID NO: 1986272 - DNA, 25 bp, Homo sapien
cttgttgttaagtctccgttctctt

SEQ ID NO: 1986273 - DNA, 25 bp, Homo sapien
ccttgttgttaagtctccgttctct

SEQ ID NO: 1986274 - DNA, 25 bp, Homo sapien
catcggaatgaagggacataatagg

SEQ ID NO: 1986275 - DNA, 25 bp, Homo sapien
cttgtcatcggaatgaagggacata

SEQ ID NO: 1986276 - DNA, 25 bp, Homo sapien
atgaggcatatgtctgggtctactg

SEQ ID NO: 1986277 - DNA, 25 bp, Homo sapien
gccagctggaccggcccacagttgt

SEQ ID NO: 1986278 - DNA, 25 bp, Homo sapien
tcgagtcatatacccacacggcaaa

SEQ ID NO: 1986279 - DNA, 25 bp, Homo sapien
caatgagggtcacgtaagagcctgt

SEQ ID NO: 1986280 - DNA, 25 bp, Homo sapien
gagcagtaggctgttctgacccaat

SEQ ID NO: 1986281 - DNA, 25 bp, Homo sapien
gatgaagtagccctcggcaggcttg

SEQ ID NO: 1986282 - DNA, 25 bp, Homo sapien
ctcttaaagatgacatgacttcaga

SEQ ID NO: 1986283 - DNA, 25 bp, Homo sapien
tctgttagaactttgaagggtggag

SEQ ID NO: 1986284 - DNA, 25 bp, Homo sapien
tggcttcccctacggctcttgtgtg

SEQ ID NO: 1986285 - DNA, 25 bp, Homo sapien
ctaaagagctttgagacgatgggca

SEQ ID NO: 1986286 - DNA, 25 bp, Homo sapien
ggcccttttactagacgcatctgga

SEQ ID NO: 1986287 - DNA, 25 bp, Homo sapien
caacaagaaatatcgagcacccaat

SEQ ID NO: 1986288 - DNA, 25 bp, Homo sapien
caggtagtgcctcctctagtgagct

SEQ ID NO: 1986289 - DNA, 25 bp, Homo sapien
cacccaatatatgcagatactgaga

SEQ ID NO: 1986290 - DNA, 25 bp, Homo sapien
tgactctaatgagttctctaatagc

SEQ ID NO: 1986291 - DNA, 25 bp, Homo sapien
ctctaatgagttctctaatagcatt

SEQ ID NO: 1986292 - DNA, 25 bp, Homo sapien
gactctaatgagttctctaatagca

SEQ ID NO: 1986293 - DNA, 25 bp, Homo sapien
taatgagttctctaatagcattgct

SEQ ID NO: 1986294 - DNA, 25 bp, Homo sapien
ttatcttaaagtctgctttctcctt

SEQ ID NO: 1986295 - DNA, 25 bp, Homo sapien
atcttaaagtctgctttctccttac

SEQ ID NO: 1986296 - DNA, 25 bp, Homo sapien
tgaatgttgtctctcttaagaatga

SEQ ID NO: 1986297 - DNA, 25 bp, Homo sapien
tatcttaaagtctgctttctcctta

SEQ ID NO: 1986298 - DNA, 25 bp, Homo sapien
gctgggctgagctattcggaatagc

SEQ ID NO: 1986299 - DNA, 25 bp, Homo sapien
agattgaagtctcccgcaggcactg

SEQ ID NO: 1986300 - DNA, 25 bp, Homo sapien
ccaatctgaggaatgtgtcgcagct

SEQ ID NO: 1986301 - DNA, 25 bp, Homo sapien
agttgaaatatctggccagcagctc

SEQ ID NO: 1986302 - DNA, 25 bp, Homo sapien
agtaaaaaagtgttgtgcccatggg

SEQ ID NO: 1986303 - DNA, 25 bp, Homo sapien
agctccagggctatcaattctttgg

SEQ ID NO: 1986304 - DNA, 25 bp, Homo sapien
tggatgttaccaccagtgctagatc

SEQ ID NO: 1986305 - DNA, 25 bp, Homo sapien
agttgcccgctcctaagtcctctat

SEQ ID NO: 1986306 - DNA, 25 bp, Homo sapien
aaggaaaccggatgcagaagggatt

SEQ ID NO: 1986307 - DNA, 25 bp, Homo sapien
gagtaacatggaaggaaaccggatg

SEQ ID NO: 1986308 - DNA, 25 bp, Homo sapien
actggagacaacagggaagcaccca

SEQ ID NO: 1986309 - DNA, 25 bp, Homo sapien
gcacccaggcattctatgcaaggga

SEQ ID NO: 1986310 - DNA, 25 bp, Homo sapien
ggcattgccataaaggcctctccaa

SEQ ID NO: 1986311 - DNA, 25 bp, Homo sapien
acaatggcattgccataaaggcctc

SEQ ID NO: 1986312 - DNA, 25 bp, Homo sapien
aatggcattgccataaaggcctctc

SEQ ID NO: 1986313 - DNA, 25 bp, Homo sapien
tggcattgccataaaggcctctcca

SEQ ID NO: 1986314 - DNA, 25 bp, Homo sapien
caaagaaaggttcctgtcattcgat

SEQ ID NO: 1986315 - DNA, 25 bp, Homo sapien
caggagagttgcaggaacacaattc

SEQ ID NO: 1986316 - DNA, 25 bp, Homo sapien
aggagcttcaaaggagacccaggag

SEQ ID NO: 1986317 - DNA, 25 bp, Homo sapien
tcattcgatatctttgaagcagaag

SEQ ID NO: 1986318 - DNA, 25 bp, Homo sapien
gaagaaagaccatttgaagaggcat

SEQ ID NO: 1986319 - DNA, 25 bp, Homo sapien
gaaagaccatttgaagaggcatcaa

SEQ ID NO: 1986320 - DNA, 25 bp, Homo sapien
gaccatttgaagaggcatcaaatgg

SEQ ID NO: 1986321 - DNA, 25 bp, Homo sapien
ctgagtacagaagaaagaccatttg

SEQ ID NO: 1986322 - DNA, 25 bp, Homo sapien
caggagagtcatcttatggcagaca

SEQ ID NO: 1986323 - DNA, 25 bp, Homo sapien
tcaaggcgtgtctctggaggaagat

SEQ ID NO: 1986324 - DNA, 25 bp, Homo sapien
aagatttccaaatgcgcagctattc

SEQ ID NO: 1986325 - DNA, 25 bp, Homo sapien
gaagattgatcttgacacgccattc

SEQ ID NO: 1986326 - DNA, 25 bp, Homo sapien
ggcatcgagctctccatgtccatga

SEQ ID NO: 1986327 - DNA, 25 bp, Homo sapien
tcgtggcatcgagctctccatgtcc

SEQ ID NO: 1986328 - DNA, 25 bp, Homo sapien
gggtcgtggcatcgagctctccatg

SEQ ID NO: 1986329 - DNA, 25 bp, Homo sapien
tggcatcgagctctccatgtccatg

SEQ ID NO: 1986330 - DNA, 25 bp, Homo sapien
catggatgtcggcaggagttacatg

SEQ ID NO: 1986331 - DNA, 25 bp, Homo sapien
ctttaaaaaggacatggatgtcggc

SEQ ID NO: 1986332 - DNA, 25 bp, Homo sapien
aaaaaggacatggatgtcggcagga

SEQ ID NO: 1986333 - DNA, 25 bp, Homo sapien
ggatgtcggcaggagttacatgaaa

SEQ ID NO: 1986334 - DNA, 25 bp, Homo sapien
cagagttatcatacttgacgcattt

SEQ ID NO: 1986335 - DNA, 25 bp, Homo sapien
gttctccagagttatcatacttgac

SEQ ID NO: 1986336 - DNA, 25 bp, Homo sapien
tcattcttcactacggttctccaga

SEQ ID NO: 1986337 - DNA, 25 bp, Homo sapien
tcttcactacggttctccagagtta

SEQ ID NO: 1986338 - DNA, 25 bp, Homo sapien
cagagtcactgaacaaaattcataa

SEQ ID NO: 1986339 - DNA, 25 bp, Homo sapien
tatcagctgtggcactcagagtcac

SEQ ID NO: 1986340 - DNA, 25 bp, Homo sapien
tgtaggttgataacagtccagctcc

SEQ ID NO: 1986341 - DNA, 25 bp, Homo sapien
tgtggatggctgaatccagcacatg

SEQ ID NO: 1986342 - DNA, 25 bp, Homo sapien
tcagggtcttaagcttctctggggt

SEQ ID NO: 1986343 - DNA, 25 bp, Homo sapien
ggagcgatggcagggatggttctct

SEQ ID NO: 1986344 - DNA, 25 bp, Homo sapien
cgagaagaagggagcgatggcaggg

SEQ ID NO: 1986345 - DNA, 25 bp, Homo sapien
gaggagacgagaagaagggagcgat

SEQ ID NO: 1986346 - DNA, 25 bp, Homo sapien
ccttctctgaaactgctttctctgc

SEQ ID NO: 1986347 - DNA, 25 bp, Homo sapien
ttctctgaaactgctttctctgcct

SEQ ID NO: 1986348 - DNA, 25 bp, Homo sapien
ttccttctctgaaactgctttctct

SEQ ID NO: 1986349 - DNA, 25 bp, Homo sapien
ttccccattaattccttctctgaaa

SEQ ID NO: 1986350 - DNA, 25 bp, Homo sapien
tttctcttatctctgaatcttctcc

SEQ ID NO: 1986351 - DNA, 25 bp, Homo sapien
cctctgtttctattaaagcaatcgc

SEQ ID NO: 1986352 - DNA, 25 bp, Homo sapien
ctgtttctattaaagcaatcgccat

SEQ ID NO: 1986353 - DNA, 25 bp, Homo sapien
cccctctgtttctattaaagcaatc

SEQ ID NO: 1986354 - DNA, 25 bp, Homo sapien
ggaacatggaaaacttccacctctg

SEQ ID NO: 1986355 - DNA, 25 bp, Homo sapien
ctctttctggcacgggaacatggaa

SEQ ID NO: 1986356 - DNA, 25 bp, Homo sapien
ggcacgggaacatggaaaacttcca

SEQ ID NO: 1986357 - DNA, 25 bp, Homo sapien
agttcctctttctggcacgggaaca

SEQ ID NO: 1986358 - DNA, 25 bp, Homo sapien
acagcactgttgctcccgtggcaat

SEQ ID NO: 1986359 - DNA, 25 bp, Homo sapien
tggctgcctctagcttgatttcagc

SEQ ID NO: 1986360 - DNA, 25 bp, Homo sapien
ctcagtggcagattgttaaataaca

SEQ ID NO: 1986361 - DNA, 25 bp, Homo sapien
tcttatgtaccaagttcctcatcca

SEQ ID NO: 1986362 - DNA, 25 bp, Homo sapien
aggagccttttcatgctcttgaggg

SEQ ID NO: 1986363 - DNA, 25 bp, Homo sapien
ttaaagtctggcgtgctcaactctg

SEQ ID NO: 1986364 - DNA, 25 bp, Homo sapien
agaggagccttttcatgctcttgag

SEQ ID NO: 1986365 - DNA, 25 bp, Homo sapien
aaagtctggcgtgctcaactctgtc

SEQ ID NO: 1986366 - DNA, 25 bp, Homo sapien
tctcagcttcatcaagcccaaggcc

SEQ ID NO: 1986367 - DNA, 25 bp, Homo sapien
caggcacgcagatctttaaagtaac

SEQ ID NO: 1986368 - DNA, 25 bp, Homo sapien
ctctcagcttcatcaagcccaaggc

SEQ ID NO: 1986369 - DNA, 25 bp, Homo sapien
aggcacgcagatctttaaagtaaca

SEQ ID NO: 1986370 - DNA, 25 bp, Homo sapien
ggtgccatttttgcaagcagtctac

SEQ ID NO: 1986371 - DNA, 25 bp, Homo sapien
gagctacaggccagctaggcagcct

SEQ ID NO: 1986372 - DNA, 25 bp, Homo sapien
ccaatgtaggtaaggcacatgtcac

SEQ ID NO: 1986373 - DNA, 25 bp, Homo sapien
tcatgcatctgtcgggagctacagg

SEQ ID NO: 1986374 - DNA, 25 bp, Homo sapien
tatgggctgttcaagcttctgctcc

SEQ ID NO: 1986375 - DNA, 25 bp, Homo sapien
taatagattcatggtcctatgggct

SEQ ID NO: 1986376 - DNA, 25 bp, Homo sapien
caaatcttcacgtggtcggcgggag

SEQ ID NO: 1986377 - DNA, 25 bp, Homo sapien
tggaaaggtactacacactctagat

SEQ ID NO: 1986378 - DNA, 25 bp, Homo sapien
cttcataaggcaaagaagacccaga

SEQ ID NO: 1986379 - DNA, 25 bp, Homo sapien
tatactattaatgcagggtaggaaa

SEQ ID NO: 1986380 - DNA, 25 bp, Homo sapien
cgggcaattttgagatgtaatgcat

SEQ ID NO: 1986381 - DNA, 25 bp, Homo sapien
cacttgtccaacatgtggctgtcaa

SEQ ID NO: 1986382 - DNA, 25 bp, Homo sapien
tcatgcagccgtagctatcctgaaa

SEQ ID NO: 1986383 - DNA, 25 bp, Homo sapien
cagagacgcaaggtggtttaaggtc

SEQ ID NO: 1986384 - DNA, 25 bp, Homo sapien
tctcgcttcgggtgacaaaggtcat

SEQ ID NO: 1986385 - DNA, 25 bp, Homo sapien
cccagtgctgtgtaatgcatatggc

SEQ ID NO: 1986386 - DNA, 25 bp, Homo sapien
ctttctggtgaactctagggtgaca

SEQ ID NO: 1986387 - DNA, 25 bp, Homo sapien
tcggtatcctcaaaacaacattgct

SEQ ID NO: 1986388 - DNA, 25 bp, Homo sapien
caacattgcttctttaccgccctga

SEQ ID NO: 1986389 - DNA, 25 bp, Homo sapien
gcacttgaaagggttttgcctcact

SEQ ID NO: 1986390 - DNA, 25 bp, Homo sapien
ctttgttcattgtgggtgttcagta

SEQ ID NO: 1986391 - DNA, 25 bp, Homo sapien
taagtaggtatttgccatacacaga

SEQ ID NO: 1986392 - DNA, 25 bp, Homo sapien
tttaatgcggccaactatttctgaa

SEQ ID NO: 1986393 - DNA, 25 bp, Homo sapien
tgggtgttcagtaaaggcattttta

SEQ ID NO: 1986394 - DNA, 25 bp, Homo sapien
tactgccggttgataaatggagttt

SEQ ID NO: 1986395 - DNA, 25 bp, Homo sapien
tccatgaggaaaggctgacacaggg

SEQ ID NO: 1986396 - DNA, 25 bp, Homo sapien
gggaggcattgccagcctgctatta

SEQ ID NO: 1986397 - DNA, 25 bp, Homo sapien
ttagcttagaccaacagccagggga

SEQ ID NO: 1986398 - DNA, 25 bp, Homo sapien
tctttcttgtcttcaatgttcaatg

SEQ ID NO: 1986399 - DNA, 25 bp, Homo sapien
ctcttgtctttcttgtcttcaatgt

SEQ ID NO: 1986400 - DNA, 25 bp, Homo sapien
tgttcaatgttctccttttgtcttc

SEQ ID NO: 1986401 - DNA, 25 bp, Homo sapien
ttcaatgttcaatgttctccttttg

SEQ ID NO: 1986402 - DNA, 25 bp, Homo sapien
aagaaaattcagacttgcattcatt

SEQ ID NO: 1986403 - DNA, 25 bp, Homo sapien
aaaattcagacttgcattcattcaa

SEQ ID NO: 1986404 - DNA, 25 bp, Homo sapien
ttcattcaaacttgtggaattaaac

SEQ ID NO: 1986405 - DNA, 25 bp, Homo sapien
gcattcattcaaacttgtggaatta

SEQ ID NO: 1986406 - DNA, 25 bp, Homo sapien
aaggggaagctttcataggaagcct

SEQ ID NO: 1986407 - DNA, 25 bp, Homo sapien
tgaagaaaggggaagctttcatagg

SEQ ID NO: 1986408 - DNA, 25 bp, Homo sapien
gaagctttcataggaagccttccac

SEQ ID NO: 1986409 - DNA, 25 bp, Homo sapien
gctttcataggaagccttccacgca

SEQ ID NO: 1986410 - DNA, 25 bp, Homo sapien
ggctttcacggccatcttcttcacc

SEQ ID NO: 1986411 - DNA, 25 bp, Homo sapien
ttgtggctttcacggccatcttctt

SEQ ID NO: 1986412 - DNA, 25 bp, Homo sapien
gctttcacggccatcttcttcacct

SEQ ID NO: 1986413 - DNA, 25 bp, Homo sapien
accttgtggctttcacggccatctt

SEQ ID NO: 1986414 - DNA, 25 bp, Homo sapien
taccagaatataaatgatacacctc

SEQ ID NO: 1986415 - DNA, 25 bp, Homo sapien
gacactggtggcactactaagtgtg

SEQ ID NO: 1986416 - DNA, 25 bp, Homo sapien
aatgatacacctctgaccccagcgt

SEQ ID NO: 1986417 - DNA, 25 bp, Homo sapien
gcctgacactggtggcactactaag

SEQ ID NO: 1986418 - DNA, 25 bp, Homo sapien
tggctggagaccattaacaaacagg

SEQ ID NO: 1986419 - DNA, 25 bp, Homo sapien
cagtgctcaggtatacagtttatta

SEQ ID NO: 1986420 - DNA, 25 bp, Homo sapien
tacttatatgaaaaaccgtcttcca

SEQ ID NO: 1986421 - DNA, 25 bp, Homo sapien
cacagtaggagttacagtaggaatt

SEQ ID NO: 1986422 - DNA, 25 bp, Homo sapien
tagccgatatctcactttccctggg

SEQ ID NO: 1986423 - DNA, 25 bp, Homo sapien
ggttgggcccatatttgaaactagc

SEQ ID NO: 1986424 - DNA, 25 bp, Homo sapien
tcagggtgaatgtacaatatagccg

SEQ ID NO: 1986425 - DNA, 25 bp, Homo sapien
cacacagggctgttagcggttgaac

SEQ ID NO: 1986426 - DNA, 25 bp, Homo sapien
gctgacggtcagtattccagttata

SEQ ID NO: 1986427 - DNA, 25 bp, Homo sapien
gttttgctgacggtcagtattccag

SEQ ID NO: 1986428 - DNA, 25 bp, Homo sapien
gacggtcagtattccagttataaaa

SEQ ID NO: 1986429 - DNA, 25 bp, Homo sapien
tctctgttttgctgacggtcagtat

SEQ ID NO: 1986430 - DNA, 25 bp, Homo sapien
ttttgaaatgcactcacctttgctg

SEQ ID NO: 1986431 - DNA, 25 bp, Homo sapien
cttttgaaatgcactcacctttgct

SEQ ID NO: 1986432 - DNA, 25 bp, Homo sapien
agcttttgaaatgcactcacctttg

SEQ ID NO: 1986433 - DNA, 25 bp, Homo sapien
gcttttgaaatgcactcacctttgc

SEQ ID NO: 1986434 - DNA, 25 bp, Homo sapien
gaaatagccatatcgcaaccatcgg

SEQ ID NO: 1986435 - DNA, 25 bp, Homo sapien
aagtttcctctctcgcagaaggtag

SEQ ID NO: 1986436 - DNA, 25 bp, Homo sapien
ccatcggcagttattttggcgcaca

SEQ ID NO: 1986437 - DNA, 25 bp, Homo sapien
gcacatagtacatgcccatagcacg

SEQ ID NO: 1986438 - DNA, 25 bp, Homo sapien
ctccttgtcaagtggaccatctggg

SEQ ID NO: 1986439 - DNA, 25 bp, Homo sapien
agctatttcagtgctagatgagtcc

SEQ ID NO: 1986440 - DNA, 25 bp, Homo sapien
gggagagctatttcagtgctagatg

SEQ ID NO: 1986441 - DNA, 25 bp, Homo sapien
aggcctctccttgtcaagtggacca

SEQ ID NO: 1986442 - DNA, 25 bp, Homo sapien
caacaacttttcaaatggttattat

SEQ ID NO: 1986443 - DNA, 25 bp, Homo sapien
cttttcaaatggttattatcagaga

SEQ ID NO: 1986444 - DNA, 25 bp, Homo sapien
tcaaatggttattatcagagagcat

SEQ ID NO: 1986445 - DNA, 25 bp, Homo sapien
acaacttttcaaatggttattatca

SEQ ID NO: 1986446 - DNA, 25 bp, Homo sapien
cattattccaacagtagagttgtag

SEQ ID NO: 1986447 - DNA, 25 bp, Homo sapien
cagattcagcttgactataatagaa

SEQ ID NO: 1986448 - DNA, 25 bp, Homo sapien
cctttgtacaattcagattcagctt

SEQ ID NO: 1986449 - DNA, 25 bp, Homo sapien
tagcagcttttcagtggcacctaat

SEQ ID NO: 1986450 - DNA, 25 bp, Homo sapien
gaccttctgactagtacgcacctgc

SEQ ID NO: 1986451 - DNA, 25 bp, Homo sapien
agagtgaccttctgactagtacgca

SEQ ID NO: 1986452 - DNA, 25 bp, Homo sapien
gtgaccttctgactagtacgcacct

SEQ ID NO: 1986453 - DNA, 25 bp, Homo sapien
ccttctgactagtacgcacctgcat

SEQ ID NO: 1986454 - DNA, 25 bp, Homo sapien
ggcatattattgctacctttagggt

SEQ ID NO: 1986455 - DNA, 25 bp, Homo sapien
taaaagtcgcataaacctcgtcatt

SEQ ID NO: 1986456 - DNA, 25 bp, Homo sapien
gatggaactatcctaggcatattat

SEQ ID NO: 1986457 - DNA, 25 bp, Homo sapien
gagtaattgtatcattaaaagtcgc

SEQ ID NO: 1986458 - DNA, 25 bp, Homo sapien
cttgctgcattgtagaggatacaag

SEQ ID NO: 1986459 - DNA, 25 bp, Homo sapien
catgacctgaaggaactagtgggac

SEQ ID NO: 1986460 - DNA, 25 bp, Homo sapien
agtgggacagatagttaacaagtgc

SEQ ID NO: 1986461 - DNA, 25 bp, Homo sapien
gatacaagtgtttaacagagtccat

SEQ ID NO: 1986462 - DNA, 25 bp, Homo sapien
cattaaccgtaacatcaatttttgt

SEQ ID NO: 1986463 - DNA, 25 bp, Homo sapien
tcaggggcttgttggcttgcctctg

SEQ ID NO: 1986464 - DNA, 25 bp, Homo sapien
ccattaaccgtaacatcaatttttg

SEQ ID NO: 1986465 - DNA, 25 bp, Homo sapien
ttattagatgtctgaatactctccg

SEQ ID NO: 1986466 - DNA, 25 bp, Homo sapien
actccttggcttgttcgttcatcta

SEQ ID NO: 1986467 - DNA, 25 bp, Homo sapien
atactctccgaagctttattggaca

SEQ ID NO: 1986468 - DNA, 25 bp, Homo sapien
tgttcgttcatctagcaagcattta

SEQ ID NO: 1986469 - DNA, 25 bp, Homo sapien
ctgcctgtgtccccttttctggatg

SEQ ID NO: 1986470 - DNA, 25 bp, Homo sapien
cctgtgtccccttttctggatgcat

SEQ ID NO: 1986471 - DNA, 25 bp, Homo sapien
gcctgtgtccccttttctggatgca

SEQ ID NO: 1986472 - DNA, 25 bp, Homo sapien
tgcctgtgtccccttttctggatgc

SEQ ID NO: 1986473 - DNA, 25 bp, Homo sapien
gggaatagcacctcatactgttggg

SEQ ID NO: 1986474 - DNA, 25 bp, Homo sapien
acacgttaaggcataaaagcatgtc

SEQ ID NO: 1986475 - DNA, 25 bp, Homo sapien
tactgttgggtttccacttggatcc

SEQ ID NO: 1986476 - DNA, 25 bp, Homo sapien
acttggatccagacacgttaaggca

SEQ ID NO: 1986477 - DNA, 25 bp, Homo sapien
aactgtactggataatgtttgtctt

SEQ ID NO: 1986478 - DNA, 25 bp, Homo sapien
actgtactggataatgtttgtcttc

SEQ ID NO: 1986479 - DNA, 25 bp, Homo sapien
cgtcatacactccatattctgtggt

SEQ ID NO: 1986480 - DNA, 25 bp, Homo sapien
catattctgtggtcacaccaactaa

SEQ ID NO: 1986481 - DNA, 25 bp, Homo sapien
tattctgtggtcacaccaactaatt

SEQ ID NO: 1986482 - DNA, 25 bp, Homo sapien
catacactccatattctgtggtcac

SEQ ID NO: 1986483 - DNA, 25 bp, Homo sapien
gcctgtatgccttgtttgcttgcca

SEQ ID NO: 1986484 - DNA, 25 bp, Homo sapien
cttattgttttgagtccacagattt

SEQ ID NO: 1986485 - DNA, 25 bp, Homo sapien
cttcagtaagagaattaggatacac

SEQ ID NO: 1986486 - DNA, 25 bp, Homo sapien
taggatacactcttgcaaagcctgt

SEQ ID NO: 1986487 - DNA, 25 bp, Homo sapien
gttgtagtgtgcctaaggtcatggc

SEQ ID NO: 1986488 - DNA, 25 bp, Homo sapien
ctaaggtcatggcatattaataaca

SEQ ID NO: 1986489 - DNA, 25 bp, Homo sapien
caggttgagtctaaggttgtagtgt

SEQ ID NO: 1986490 - DNA, 25 bp, Homo sapien
ggcagcctacaatttagatggagaa

SEQ ID NO: 1986491 - DNA, 25 bp, Homo sapien
ttgaagactcctgccactccaaggt

SEQ ID NO: 1986492 - DNA, 25 bp, Homo sapien
tcttggagatcactggaacatgact

SEQ ID NO: 1986493 - DNA, 25 bp, Homo sapien
tgtaggcaagaaacgttctcctccc

SEQ ID NO: 1986494 - DNA, 25 bp, Homo sapien
gagctagcgctctgagtaacgccag

SEQ ID NO: 1986495 - DNA, 25 bp, Homo sapien
agtaggagacagttgccctggccca

SEQ ID NO: 1986496 - DNA, 25 bp, Homo sapien
tctctgagcaagataccaggaacca

SEQ ID NO: 1986497 - DNA, 25 bp, Homo sapien
tcttggaaaattggaaagctggccc

SEQ ID NO: 1986498 - DNA, 25 bp, Homo sapien
gccctggtatcaggaatttctctga

SEQ ID NO: 1986499 - DNA, 25 bp, Homo sapien
ctttccaatggattgtatagtaacc

SEQ ID NO: 1986500 - DNA, 25 bp, Homo sapien
ccaatggattgtatagtaacctttt

SEQ ID NO: 1986501 - DNA, 25 bp, Homo sapien
gaactttccaatggattgtatagta

SEQ ID NO: 1986502 - DNA, 25 bp, Homo sapien
gttttgaactttccaatggattgta

SEQ ID NO: 1986503 - DNA, 25 bp, Homo sapien
tattaagctccccatatggtggtcc

SEQ ID NO: 1986504 - DNA, 25 bp, Homo sapien
ctattcacacattcgttttggctct

SEQ ID NO: 1986505 - DNA, 25 bp, Homo sapien
tatggtggtcctttgccaggctgtg

SEQ ID NO: 1986506 - DNA, 25 bp, Homo sapien
ggctctttattaagctccccatatg

SEQ ID NO: 1986507 - DNA, 25 bp, Homo sapien
cacctgctgtgcacaaataccatag

SEQ ID NO: 1986508 - DNA, 25 bp, Homo sapien
tatgttgactttgctaatagcgtaa

SEQ ID NO: 1986509 - DNA, 25 bp, Homo sapien
cactctttaccatggagtccaataa

SEQ ID NO: 1986510 - DNA, 25 bp, Homo sapien
caaaagccagtatgtaataatgagt

SEQ ID NO: 1986511 - DNA, 25 bp, Homo sapien
tgaatccgtaactgctcctgtggga

SEQ ID NO: 1986512 - DNA, 25 bp, Homo sapien
cattgcgccacgataaggaaagtat

SEQ ID NO: 1986513 - DNA, 25 bp, Homo sapien
tataaattcccaagccactcagaag

SEQ ID NO: 1986514 - DNA, 25 bp, Homo sapien
ggctgcgtcccaatttcagataggg

SEQ ID NO: 1986515 - DNA, 25 bp, Homo sapien
agagcccaaatcctctcccgcaggg

SEQ ID NO: 1986516 - DNA, 25 bp, Homo sapien
gcagccatgcgcacatctggatgcg

SEQ ID NO: 1986517 - DNA, 25 bp, Homo sapien
ttctgcatctcagctaggcttggtg

SEQ ID NO: 1986518 - DNA, 25 bp, Homo sapien
ctgtcttctgcatctcagctaggct

SEQ ID NO: 1986519 - DNA, 25 bp, Homo sapien
gcagtctggattattgtgttcgcac

SEQ ID NO: 1986520 - DNA, 25 bp, Homo sapien
ctgtccactgtggagggccctttcc

SEQ ID NO: 1986521 - DNA, 25 bp, Homo sapien
tcacataatgctgagtccacggagc

SEQ ID NO: 1986522 - DNA, 25 bp, Homo sapien
tctgatcgagccttttgggcacctt

SEQ ID NO: 1986523 - DNA, 25 bp, Homo sapien
gaccctgttggaatcgtaactccta

SEQ ID NO: 1986524 - DNA, 25 bp, Homo sapien
tcacctcatagcatgttctaccata

SEQ ID NO: 1986525 - DNA, 25 bp, Homo sapien
catatattggctgactttagagtcc

SEQ ID NO: 1986526 - DNA, 25 bp, Homo sapien
gtaactcctaactctggatgcttcc

SEQ ID NO: 1986527 - DNA, 25 bp, Homo sapien
cctgaacgcccccatttgaaacgtg

SEQ ID NO: 1986528 - DNA, 25 bp, Homo sapien
atttgaaacgtgacccccgtctgct

SEQ ID NO: 1986529 - DNA, 25 bp, Homo sapien
aaacccgcatactctactaccctga

SEQ ID NO: 1986530 - DNA, 25 bp, Homo sapien
tctgctccgtgccttccatcgctgg

SEQ ID NO: 1986531 - DNA, 25 bp, Homo sapien
gactgtttaattgcacagctgcctg

SEQ ID NO: 1986532 - DNA, 25 bp, Homo sapien
gctgcctgggccattatctaatgat

SEQ ID NO: 1986533 - DNA, 25 bp, Homo sapien
gaatgccacgggcacttctggaact

SEQ ID NO: 1986534 - DNA, 25 bp, Homo sapien
cattttgagtataagcgtgttgcag

SEQ ID NO: 1986535 - DNA, 25 bp, Homo sapien
acaatgttatttggaccaacttctt

SEQ ID NO: 1986536 - DNA, 25 bp, Homo sapien
gggcctaagcaataatgctccttat

SEQ ID NO: 1986537 - DNA, 25 bp, Homo sapien
tatttggaccaacttctttttgatc

SEQ ID NO: 1986538 - DNA, 25 bp, Homo sapien
gccttggcctttgagtattcagtaa

SEQ ID NO: 1986539 - DNA, 25 bp, Homo sapien
gatgatgacaaccctgtagaggaga

SEQ ID NO: 1986540 - DNA, 25 bp, Homo sapien
gagggttgagtgtaatggtaccata

SEQ ID NO: 1986541 - DNA, 25 bp, Homo sapien
catattggttgatgccagtacagca

SEQ ID NO: 1986542 - DNA, 25 bp, Homo sapien
gaatgcttttaacatgatgatgaca

SEQ ID NO: 1986543 - DNA, 25 bp, Homo sapien
tctttctcccttcccccactcgcca

SEQ ID NO: 1986544 - DNA, 25 bp, Homo sapien
ctttctcccttcccccactcgccat

SEQ ID NO: 1986545 - DNA, 25 bp, Homo sapien
taatctctactaagaggctcctccg

SEQ ID NO: 1986546 - DNA, 25 bp, Homo sapien
cgtacttttcataccctcgggagag

SEQ ID NO: 1986547 - DNA, 25 bp, Homo sapien
cgaaaagtgcggacgcagctcggaa

SEQ ID NO: 1986548 - DNA, 25 bp, Homo sapien
agaggtgctctactgccagctggca

SEQ ID NO: 1986549 - DNA, 25 bp, Homo sapien
acaggacaggaactagtcccatggt

SEQ ID NO: 1986550 - DNA, 25 bp, Homo sapien
aggacaggaactagtcccatggtgc

SEQ ID NO: 1986551 - DNA, 25 bp, Homo sapien
ttacaggacaggaactagtcccatg

SEQ ID NO: 1986552 - DNA, 25 bp, Homo sapien
gacaggaactagtcccatggtgcag

SEQ ID NO: 1986553 - DNA, 25 bp, Homo sapien
aggacatgaagcacgggaggcccat

SEQ ID NO: 1986554 - DNA, 25 bp, Homo sapien
gcacgggaggcccatcattaacttc

SEQ ID NO: 1986555 - DNA, 25 bp, Homo sapien
cgggaggcccatcattaacttcaga

SEQ ID NO: 1986556 - DNA, 25 bp, Homo sapien
tgaagcacgggaggcccatcattaa

SEQ ID NO: 1986557 - DNA, 25 bp, Homo sapien
cccatcgtttcttttctcatgcact

SEQ ID NO: 1986558 - DNA, 25 bp, Homo sapien
tagctgtgctaaagccagcttgtcc

SEQ ID NO: 1986559 - DNA, 25 bp, Homo sapien
tgtgccatagctgtgctaaagccag

SEQ ID NO: 1986560 - DNA, 25 bp, Homo sapien
catcgtttcttttctcatgcactct

SEQ ID NO: 1986561 - DNA, 25 bp, Homo sapien
tgatgtggttgtctgagggcctatt

SEQ ID NO: 1986562 - DNA, 25 bp, Homo sapien
caccagttaatatcaaccatttctc

SEQ ID NO: 1986563 - DNA, 25 bp, Homo sapien
actgccttacaccagttaatatcaa

SEQ ID NO: 1986564 - DNA, 25 bp, Homo sapien
gccttacaccagttaatatcaacca

SEQ ID NO: 1986565 - DNA, 25 bp, Homo sapien
tctctgttaaaattgaagggctcca

SEQ ID NO: 1986566 - DNA, 25 bp, Homo sapien
ccatgcgttgaattagttatagaga

SEQ ID NO: 1986567 - DNA, 25 bp, Homo sapien
caggttggagaaagatccacttgtt

SEQ ID NO: 1986568 - DNA, 25 bp, Homo sapien
ccacttgttcaaaattacccatata

SEQ ID NO: 1986569 - DNA, 25 bp, Homo sapien
tggttttgtggctcccaactcatcc

SEQ ID NO: 1986570 - DNA, 25 bp, Homo sapien
tttgtggctcccaactcatcctgtc

SEQ ID NO: 1986571 - DNA, 25 bp, Homo sapien
cttggtttctgaggagatgtactgg

SEQ ID NO: 1986572 - DNA, 25 bp, Homo sapien
tgagctttggttttgtggctcccaa

SEQ ID NO: 1986573 - DNA, 25 bp, Homo sapien
gactctcttgagacaggcgataaag

SEQ ID NO: 1986574 - DNA, 25 bp, Homo sapien
gacttgctaagagcagagttgactc

SEQ ID NO: 1986575 - DNA, 25 bp, Homo sapien
gatgaaaaggttcagatggccagtt

SEQ ID NO: 1986576 - DNA, 25 bp, Homo sapien
tccagcagagacttgctaagagcag

SEQ ID NO: 1986577 - DNA, 25 bp, Homo sapien
caggcaatgccctcatataggacaa

SEQ ID NO: 1986578 - DNA, 25 bp, Homo sapien
gacacagctacttcgtgacagggaa

SEQ ID NO: 1986579 - DNA, 25 bp, Homo sapien
gactagcaatagcagagaaccatga

SEQ ID NO: 1986580 - DNA, 25 bp, Homo sapien
tagccttcaatgcagggacacagct

SEQ ID NO: 1986581 - DNA, 25 bp, Homo sapien
agagtgaggccctatatattagtct

SEQ ID NO: 1986582 - DNA, 25 bp, Homo sapien
tgaggccctatatattagtctgttc

SEQ ID NO: 1986583 - DNA, 25 bp, Homo sapien
agtgaggccctatatattagtctgt

SEQ ID NO: 1986584 - DNA, 25 bp, Homo sapien
cggttctagaggctgtacaagaggc

SEQ ID NO: 1986585 - DNA, 25 bp, Homo sapien
taaatcttccagcaaattgtcggca

SEQ ID NO: 1986586 - DNA, 25 bp, Homo sapien
caatatgtgactgctatgatcccac

SEQ ID NO: 1986587 - DNA, 25 bp, Homo sapien
aaaagattgtccaatatgtgactgc

SEQ ID NO: 1986588 - DNA, 25 bp, Homo sapien
ggcagtgtgatgtcggatactcata

SEQ ID NO: 1986589 - DNA, 25 bp, Homo sapien
ctatggtgagttggaaattgaatcc

SEQ ID NO: 1986590 - DNA, 25 bp, Homo sapien
ggtcacaaaattagtctatggtgag

SEQ ID NO: 1986591 - DNA, 25 bp, Homo sapien
tttacaggttagaaagtcaaagcac

SEQ ID NO: 1986592 - DNA, 25 bp, Homo sapien
tatgagctaggtacaataattgtcc

SEQ ID NO: 1986593 - DNA, 25 bp, Homo sapien
ttccatccacagagttccatgatca

SEQ ID NO: 1986594 - DNA, 25 bp, Homo sapien
catatcaatgagctcagtggttctc

SEQ ID NO: 1986595 - DNA, 25 bp, Homo sapien
tccctctggagtcccttccatccac

SEQ ID NO: 1986596 - DNA, 25 bp, Homo sapien
cacagagttccatgatcaatgatca

SEQ ID NO: 1986597 - DNA, 25 bp, Homo sapien
caatttcccatgtgaacaggaactt

SEQ ID NO: 1986598 - DNA, 25 bp, Homo sapien
cttgactcgggttcaggatgttaaa

SEQ ID NO: 1986599 - DNA, 25 bp, Homo sapien
gagctttcaaccttgtgggccaaga

SEQ ID NO: 1986600 - DNA, 25 bp, Homo sapien
tccttaaaaccccttctgtcagagc

SEQ ID NO: 1986601 - DNA, 25 bp, Homo sapien
tggcgcaccacgagactatatctca

SEQ ID NO: 1986602 - DNA, 25 bp, Homo sapien
ctatatctcacacctggctcggagg

SEQ ID NO: 1986603 - DNA, 25 bp, Homo sapien
tcagaccggcttaaaaaatggcgca

SEQ ID NO: 1986604 - DNA, 25 bp, Homo sapien
aatggcgcaccacgagactatatct

SEQ ID NO: 1986605 - DNA, 25 bp, Homo sapien
catctgtcatctggctcttcaatcc

SEQ ID NO: 1986606 - DNA, 25 bp, Homo sapien
tgaattgtcttctatatagcgttac

SEQ ID NO: 1986607 - DNA, 25 bp, Homo sapien
ggctcttcaatcctcttccatgcag

SEQ ID NO: 1986608 - DNA, 25 bp, Homo sapien
ctgctcagcaaaaggatagtccacc

SEQ ID NO: 1986609 - DNA, 25 bp, Homo sapien
caggagtcttgggtcttctgccagc

SEQ ID NO: 1986610 - DNA, 25 bp, Homo sapien
taataaatcttttgtctctgatcca

SEQ ID NO: 1986611 - DNA, 25 bp, Homo sapien
tctctgatccaggagtcttgggtct

SEQ ID NO: 1986612 - DNA, 25 bp, Homo sapien
gctgtgagtaataaatcttttgtct

SEQ ID NO: 1986613 - DNA, 25 bp, Homo sapien
cctggagtggagacaccgaattcca

SEQ ID NO: 1986614 - DNA, 25 bp, Homo sapien
ttcagtcattccaagcaaccaggtt

SEQ ID NO: 1986615 - DNA, 25 bp, Homo sapien
gctaatgcccctcataacctggagt

SEQ ID NO: 1986616 - DNA, 25 bp, Homo sapien
taaggtgtcctctcttgctacaata

SEQ ID NO: 1986617 - DNA, 25 bp, Homo sapien
cctagaagtctgtgagattggagaa

SEQ ID NO: 1986618 - DNA, 25 bp, Homo sapien
aaggccagcactaccacttttctgt

SEQ ID NO: 1986619 - DNA, 25 bp, Homo sapien
tgagcaatagtttcacaatctagcc

SEQ ID NO: 1986620 - DNA, 25 bp, Homo sapien
tgtgggcccaggataatcaggaagc

SEQ ID NO: 1986621 - DNA, 25 bp, Homo sapien
cgagatggaaagcaactgggccctt

SEQ ID NO: 1986622 - DNA, 25 bp, Homo sapien
tactggagagtcttctaggatgctc

SEQ ID NO: 1986623 - DNA, 25 bp, Homo sapien
tacttccagcaacagacacaggttt

SEQ ID NO: 1986624 - DNA, 25 bp, Homo sapien
taacctaaaagacatcctactggag

SEQ ID NO: 1986625 - DNA, 25 bp, Homo sapien
taggcacgttgattctagcccagga

SEQ ID NO: 1986626 - DNA, 25 bp, Homo sapien
agctgtctgtcttttcgatcaaggg

SEQ ID NO: 1986627 - DNA, 25 bp, Homo sapien
tacttgagcaaggaagctctttggg

SEQ ID NO: 1986628 - DNA, 25 bp, Homo sapien
caagggtccaagtgtcaagggtcca

SEQ ID NO: 1986629 - DNA, 25 bp, Homo sapien
tgttcctgcaagagggatattcaca

SEQ ID NO: 1986630 - DNA, 25 bp, Homo sapien
tacagtagacagatcctggctccag

SEQ ID NO: 1986631 - DNA, 25 bp, Homo sapien
cgaatacagtagacagatcctggct

SEQ ID NO: 1986632 - DNA, 25 bp, Homo sapien
tatcacgaatacagtagacagatcc

SEQ ID NO: 1986633 - DNA, 25 bp, Homo sapien
ggagtattcccaaggctattgacat

SEQ ID NO: 1986634 - DNA, 25 bp, Homo sapien
caccaagatttccatgattgccgca

SEQ ID NO: 1986635 - DNA, 25 bp, Homo sapien
caggtttcctactgccttcaactgg

SEQ ID NO: 1986636 - DNA, 25 bp, Homo sapien
tgtaactgatgtaaacagcctaggt

SEQ ID NO: 1986637 - DNA, 25 bp, Homo sapien
caggtgccgcttggaaaggtgctca

SEQ ID NO: 1986638 - DNA, 25 bp, Homo sapien
ttgttttttgacaggtgccgcttgg

SEQ ID NO: 1986639 - DNA, 25 bp, Homo sapien
gaaaggtgctcactcatcatggcag

SEQ ID NO: 1986640 - DNA, 25 bp, Homo sapien
gccgcttggaaaggtgctcactcat

SEQ ID NO: 1986641 - DNA, 25 bp, Homo sapien
ctttgtcggggattcttgtgaaaat

SEQ ID NO: 1986642 - DNA, 25 bp, Homo sapien
aattcaataacattccttttgatta

SEQ ID NO: 1986643 - DNA, 25 bp, Homo sapien
ttgtcggggattcttgtgaaaattc

SEQ ID NO: 1986644 - DNA, 25 bp, Homo sapien
catagccaagagtgtctatatctga

SEQ ID NO: 1986645 - DNA, 25 bp, Homo sapien
tacaagaattagcagatcattaaga

SEQ ID NO: 1986646 - DNA, 25 bp, Homo sapien
tagtcagtgccagaccaaagagtaa

SEQ ID NO: 1986647 - DNA, 25 bp, Homo sapien
aaacatcattactttcttgccctgt

SEQ ID NO: 1986648 - DNA, 25 bp, Homo sapien
tgtcacaggaacctcaaatatcggt

SEQ ID NO: 1986649 - DNA, 25 bp, Homo sapien
caacttagcacatccagttggctga

SEQ ID NO: 1986650 - DNA, 25 bp, Homo sapien
gacattagctcttgtgcaacttagc

SEQ ID NO: 1986651 - DNA, 25 bp, Homo sapien
ttctggctcatctaaaacttcttca

SEQ ID NO: 1986652 - DNA, 25 bp, Homo sapien
tttgagtcatagtgcttttcattgc

SEQ ID NO: 1986653 - DNA, 25 bp, Homo sapien
atttgagtcatagtgcttttcattg

SEQ ID NO: 1986654 - DNA, 25 bp, Homo sapien
tgagtcatagtgcttttcattgctg

SEQ ID NO: 1986655 - DNA, 25 bp, Homo sapien
gagtcatagtgcttttcattgctgt

SEQ ID NO: 1986656 - DNA, 25 bp, Homo sapien
gtaagtgaactagtactcctcagga

SEQ ID NO: 1986657 - DNA, 25 bp, Homo sapien
taagtgaactagtactcctcaggat

SEQ ID NO: 1986658 - DNA, 25 bp, Homo sapien
taactaatataagtttagcaactga

SEQ ID NO: 1986659 - DNA, 25 bp, Homo sapien
gattaggctgaactcgagcctcaac

SEQ ID NO: 1986660 - DNA, 25 bp, Homo sapien
taagtttagcaactgaatgagatac

SEQ ID NO: 1986661 - DNA, 25 bp, Homo sapien
tttgatggattaggctgaactcgag

SEQ ID NO: 1986662 - DNA, 25 bp, Homo sapien
ctctcaattcttcattgggaagcaa

SEQ ID NO: 1986663 - DNA, 25 bp, Homo sapien
tatatttgatgacacttgaaacaga

SEQ ID NO: 1986664 - DNA, 25 bp, Homo sapien
tgatatatttgatgacacttgaaac

SEQ ID NO: 1986665 - DNA, 25 bp, Homo sapien
atatatttgatgacacttgaaacag

SEQ ID NO: 1986666 - DNA, 25 bp, Homo sapien
gatatatttgatgacacttgaaaca

SEQ ID NO: 1986667 - DNA, 25 bp, Homo sapien
agccattttcggatggtgatgcggt

SEQ ID NO: 1986668 - DNA, 25 bp, Homo sapien
tactgtagtcggctgtttcagagtt

SEQ ID NO: 1986669 - DNA, 25 bp, Homo sapien
caatgcagatgttgtattcgggaca

SEQ ID NO: 1986670 - DNA, 25 bp, Homo sapien
tccaatctcctagatatgtccagca

SEQ ID NO: 1986671 - DNA, 25 bp, Homo sapien
cgctggttcacaatgtcaggattct

SEQ ID NO: 1986672 - DNA, 25 bp, Homo sapien
cttgttggcgctggttcacaatgtc

SEQ ID NO: 1986673 - DNA, 25 bp, Homo sapien
tgttggcgctggttcacaatgtcag

SEQ ID NO: 1986674 - DNA, 25 bp, Homo sapien
ttggcgctggttcacaatgtcagga

SEQ ID NO: 1986675 - DNA, 25 bp, Homo sapien
tgtccccagattgttcatgaccctc

SEQ ID NO: 1986676 - DNA, 25 bp, Homo sapien
ccagattgttcatgaccctctcctg

SEQ ID NO: 1986677 - DNA, 25 bp, Homo sapien
ccatgtccccagattgttcatgacc

SEQ ID NO: 1986678 - DNA, 25 bp, Homo sapien
tgttcatgaccctctcctgaatctt

SEQ ID NO: 1986679 - DNA, 25 bp, Homo sapien
ttgatgtactgcagggtgtatcaac

SEQ ID NO: 1986680 - DNA, 25 bp, Homo sapien
gtaatatgtatatgggttgatgtac

SEQ ID NO: 1986681 - DNA, 25 bp, Homo sapien
gatgtactgcagggtgtatcaacac

SEQ ID NO: 1986682 - DNA, 25 bp, Homo sapien
aatatgtatatgggttgatgtactg

SEQ ID NO: 1986683 - DNA, 25 bp, Homo sapien
catgagaggttttcaatttcagcct

SEQ ID NO: 1986684 - DNA, 25 bp, Homo sapien
ccatgagaggttttcaatttcagcc

SEQ ID NO: 1986685 - DNA, 25 bp, Homo sapien
cagcctgctggtattcaaacagctc

SEQ ID NO: 1986686 - DNA, 25 bp, Homo sapien
tcctgctcagcctgctggtattcaa

SEQ ID NO: 1986687 - DNA, 25 bp, Homo sapien
tcctccactgctcggctacatgcat

SEQ ID NO: 1986688 - DNA, 25 bp, Homo sapien
actgctcggctacatgcatctggtt

SEQ ID NO: 1986689 - DNA, 25 bp, Homo sapien
tccactgctcggctacatgcatctg

SEQ ID NO: 1986690 - DNA, 25 bp, Homo sapien
gttctcctccactgctcggctacat

SEQ ID NO: 1986691 - DNA, 25 bp, Homo sapien
gccacaagagcctaagtgttctgtt

SEQ ID NO: 1986692 - DNA, 25 bp, Homo sapien
ggctctggccacaagagcctaagtg

SEQ ID NO: 1986693 - DNA, 25 bp, Homo sapien
gagcctaagtgttctgttctagcca

SEQ ID NO: 1986694 - DNA, 25 bp, Homo sapien
cacacttaggctctggccacaagag

SEQ ID NO: 1986695 - DNA, 25 bp, Homo sapien
agcttatagtgacagaatcattggg

SEQ ID NO: 1986696 - DNA, 25 bp, Homo sapien
ccttcgggaatgaaggaccggcttg

SEQ ID NO: 1986697 - DNA, 25 bp, Homo sapien
ctgagggggtacagcatgcttagtt

SEQ ID NO: 1986698 - DNA, 25 bp, Homo sapien
agagtctgcctgaccattgttcacg

SEQ ID NO: 1986699 - DNA, 25 bp, Homo sapien
ctaagctttttccacctcctcactc

SEQ ID NO: 1986700 - DNA, 25 bp, Homo sapien
aagctttttccacctcctcactcac

SEQ ID NO: 1986701 - DNA, 25 bp, Homo sapien
taagctttttccacctcctcactca

SEQ ID NO: 1986702 - DNA, 25 bp, Homo sapien
tcacaagggtcccatatctctgggc

SEQ ID NO: 1986703 - DNA, 25 bp, Homo sapien
acaagggtcccatatctctgggctg

SEQ ID NO: 1986704 - DNA, 25 bp, Homo sapien
gagaggacaacagatcccacactgg

SEQ ID NO: 1986705 - DNA, 25 bp, Homo sapien
gggaaaatgtggagaggacaacaga

SEQ ID NO: 1986706 - DNA, 25 bp, Homo sapien
atcgcccccggttgatgcattcttc

SEQ ID NO: 1986707 - DNA, 25 bp, Homo sapien
catcctccaaatcgcccccggttga

SEQ ID NO: 1986708 - DNA, 25 bp, Homo sapien
tcaaaacatttgtcaggatggattt

SEQ ID NO: 1986709 - DNA, 25 bp, Homo sapien
tccaaatcgcccccggttgatgcat

SEQ ID NO: 1986710 - DNA, 25 bp, Homo sapien
taaagaatcctcatgcagcaaagtt

SEQ ID NO: 1986711 - DNA, 25 bp, Homo sapien
cagccatggcatgtggagttaatta

SEQ ID NO: 1986712 - DNA, 25 bp, Homo sapien
tgcaatgccatgtagcacaaactat

SEQ ID NO: 1986713 - DNA, 25 bp, Homo sapien
tactctgggcattgagacactgagc

SEQ ID NO: 1986714 - DNA, 25 bp, Homo sapien
tgaggataacccagcaaccttaacc

SEQ ID NO: 1986715 - DNA, 25 bp, Homo sapien
aactaatgaggataacccagcaacc

SEQ ID NO: 1986716 - DNA, 25 bp, Homo sapien
tggtggacaggaactaatgaggata

SEQ ID NO: 1986717 - DNA, 25 bp, Homo sapien
tctttctggtggacaggaactaatg

SEQ ID NO: 1986718 - DNA, 25 bp, Homo sapien
tagatgtgctatcaaaaactgttgg

SEQ ID NO: 1986719 - DNA, 25 bp, Homo sapien
gatgcacctgtctatagtcttgtcc

SEQ ID NO: 1986720 - DNA, 25 bp, Homo sapien
taggttccaggtttgatgtcaacac

SEQ ID NO: 1986721 - DNA, 25 bp, Homo sapien
gagcttactgtatgtagtgcctggc

SEQ ID NO: 1986722 - DNA, 25 bp, Homo sapien
cattaagactattggttatgtattc

SEQ ID NO: 1986723 - DNA, 25 bp, Homo sapien
ttttacattaagactattggttatg

SEQ ID NO: 1986724 - DNA, 25 bp, Homo sapien
tacattaagactattggttatgtat

SEQ ID NO: 1986725 - DNA, 25 bp, Homo sapien
agactattggttatgtattctattt

SEQ ID NO: 1986726 - DNA, 25 bp, Homo sapien
gacactgaagaataataccatggtt

SEQ ID NO: 1986727 - DNA, 25 bp, Homo sapien
aggtggacactgaagaataatacca

SEQ ID NO: 1986728 - DNA, 25 bp, Homo sapien
gaataataccatggttattgctaca

SEQ ID NO: 1986729 - DNA, 25 bp, Homo sapien
aataccatggttattgctacattcc

SEQ ID NO: 1986730 - DNA, 25 bp, Homo sapien
cagtaatttcgaggtccgtgattcc

SEQ ID NO: 1986731 - DNA, 25 bp, Homo sapien
cccttggttggaatgtgtagacact

SEQ ID NO: 1986732 - DNA, 25 bp, Homo sapien
tagaacccttggttggaatgtgtag

SEQ ID NO: 1986733 - DNA, 25 bp, Homo sapien
ttcgaggtccgtgattccactggga

SEQ ID NO: 1986734 - DNA, 25 bp, Homo sapien
cgtccggcacccacaactctttaag

SEQ ID NO: 1986735 - DNA, 25 bp, Homo sapien
acaacgtccggcacccacaactctt

SEQ ID NO: 1986736 - DNA, 25 bp, Homo sapien
ttactctccataagtcatagacttg

SEQ ID NO: 1986737 - DNA, 25 bp, Homo sapien
ctctccataagtcatagacttggga

SEQ ID NO: 1986738 - DNA, 25 bp, Homo sapien
tcacattgtgcttggcttgcactgg

SEQ ID NO: 1986739 - DNA, 25 bp, Homo sapien
tatgagtctgtttgtggttgatgtc

SEQ ID NO: 1986740 - DNA, 25 bp, Homo sapien
tgagtcacattgtgcttggcttgca

SEQ ID NO: 1986741 - DNA, 25 bp, Homo sapien
ttgtgcttggcttgcactggttcag

SEQ ID NO: 1986742 - DNA, 25 bp, Homo sapien
tttccagatttaatagtctgttccc

SEQ ID NO: 1986743 - DNA, 25 bp, Homo sapien
ccagatttaatagtctgttcccaga

SEQ ID NO: 1986744 - DNA, 25 bp, Homo sapien
gatttaatagtctgttcccagattt

SEQ ID NO: 1986745 - DNA, 25 bp, Homo sapien
taatagtctgttcccagatttcaaa

SEQ ID NO: 1986746 - DNA, 25 bp, Homo sapien
ctgcaatagtgacatctggctcttt

SEQ ID NO: 1986747 - DNA, 25 bp, Homo sapien
tgcaatagtgacatctggctctttg

SEQ ID NO: 1986748 - DNA, 25 bp, Homo sapien
cccacatctggatagaatgcctgga

SEQ ID NO: 1986749 - DNA, 25 bp, Homo sapien
gtttgaccaaaacaagtagctccca

SEQ ID NO: 1986750 - DNA, 25 bp, Homo sapien
gagacaaagcttgtagaagttgaca

SEQ ID NO: 1986751 - DNA, 25 bp, Homo sapien
ctaccatggtaatctcaaagggatc

SEQ ID NO: 1986752 - DNA, 25 bp, Homo sapien
cttcctgaagtgtaattgatggata

SEQ ID NO: 1986753 - DNA, 25 bp, Homo sapien
taattgatggataaagtacattcat

SEQ ID NO: 1986754 - DNA, 25 bp, Homo sapien
gcacttcctgaagtgtaattgatgg

SEQ ID NO: 1986755 - DNA, 25 bp, Homo sapien
tgaagtgtaattgatggataaagta

SEQ ID NO: 1986756 - DNA, 25 bp, Homo sapien
ctaacatgatgctttagagctcttc

SEQ ID NO: 1986757 - DNA, 25 bp, Homo sapien
cactgacaacagcaacttgaaggaa

SEQ ID NO: 1986758 - DNA, 25 bp, Homo sapien
ttgaaggaagctgaccacaactata

SEQ ID NO: 1986759 - DNA, 25 bp, Homo sapien
tgtgtccttccataacactgacaac

SEQ ID NO: 1986760 - DNA, 25 bp, Homo sapien
actcagaaacttcgctgttagaaga

SEQ ID NO: 1986761 - DNA, 25 bp, Homo sapien
tagaagaaccattaggacagccttt

SEQ ID NO: 1986762 - DNA, 25 bp, Homo sapien
tggtgattccacagcactcagaaac

SEQ ID NO: 1986763 - DNA, 25 bp, Homo sapien
catggtgattccacagcactcagaa

SEQ ID NO: 1986764 - DNA, 25 bp, Homo sapien
tggagtacggtgcattatgaaaatt

SEQ ID NO: 1986765 - DNA, 25 bp, Homo sapien
atggagtacggtgcattatgaaaat

SEQ ID NO: 1986766 - DNA, 25 bp, Homo sapien
tatggagtacggtgcattatgaaaa

SEQ ID NO: 1986767 - DNA, 25 bp, Homo sapien
ctatggagtacggtgcattatgaaa

SEQ ID NO: 1986768 - DNA, 25 bp, Homo sapien
tgattcattcaggctgacggctgcc

SEQ ID NO: 1986769 - DNA, 25 bp, Homo sapien
gacattgtgaacgtccaaaagtaga

SEQ ID NO: 1986770 - DNA, 25 bp, Homo sapien
aaatgcagacattgtgaacgtccaa

SEQ ID NO: 1986771 - DNA, 25 bp, Homo sapien
atgattcattcaggctgacggctgc

SEQ ID NO: 1986772 - DNA, 25 bp, Homo sapien
gtttaatacccttgctctggtgaag

SEQ ID NO: 1986773 - DNA, 25 bp, Homo sapien
tgtatggagccttggagatccttga

SEQ ID NO: 1986774 - DNA, 25 bp, Homo sapien
tggtgaagaatctgaaagccatgca

SEQ ID NO: 1986775 - DNA, 25 bp, Homo sapien
tagggaatacaaatgaactctgaag

SEQ ID NO: 1986776 - DNA, 25 bp, Homo sapien
ccattgtagatttcacaagaaatct

SEQ ID NO: 1986777 - DNA, 25 bp, Homo sapien
tcaactccattgtagatttcacaag

SEQ ID NO: 1986778 - DNA, 25 bp, Homo sapien
tcttcaactccattgtagatttcac

SEQ ID NO: 1986779 - DNA, 25 bp, Homo sapien
actccattgtagatttcacaagaaa

SEQ ID NO: 1986780 - DNA, 25 bp, Homo sapien
tctgttacacatgctttgctaaatg

SEQ ID NO: 1986781 - DNA, 25 bp, Homo sapien
cacatgctttgctaaatgtcttatc

SEQ ID NO: 1986782 - DNA, 25 bp, Homo sapien
aatgtcttatcttcctttacaaagt

SEQ ID NO: 1986783 - DNA, 25 bp, Homo sapien
gtcttatcttcctttacaaagtcca

SEQ ID NO: 1986784 - DNA, 25 bp, Homo sapien
cagattgctgctcatccgaagatag

SEQ ID NO: 1986785 - DNA, 25 bp, Homo sapien
gagaattatgatgcgtggcaatgac

SEQ ID NO: 1986786 - DNA, 25 bp, Homo sapien
gagctgtggcttggaccagattgct

SEQ ID NO: 1986787 - DNA, 25 bp, Homo sapien
gatttctgataagctcagagaagat

SEQ ID NO: 1986788 - DNA, 25 bp, Homo sapien
ggacgggctcattcttacaagtctt

SEQ ID NO: 1986789 - DNA, 25 bp, Homo sapien
tcacctctcttcttatagaagactg

SEQ ID NO: 1986790 - DNA, 25 bp, Homo sapien
cttctcacctctcttcttatagaag

SEQ ID NO: 1986791 - DNA, 25 bp, Homo sapien
gtggacgggctcattcttacaagtc

SEQ ID NO: 1986792 - DNA, 25 bp, Homo sapien
tttgctcttatgagctcctggtttg

SEQ ID NO: 1986793 - DNA, 25 bp, Homo sapien
gctcctggtttgctctgtaacaccc

SEQ ID NO: 1986794 - DNA, 25 bp, Homo sapien
aggattctgatttgctcttatgagc

SEQ ID NO: 1986795 - DNA, 25 bp, Homo sapien
ctgagtaggattctgatttgctctt

SEQ ID NO: 1986796 - DNA, 25 bp, Homo sapien
ttcatcaacatcctgacaggacgcc

SEQ ID NO: 1986797 - DNA, 25 bp, Homo sapien
ttcatcaacaccctgaaagatggcc

SEQ ID NO: 1986798 - DNA, 25 bp, Homo sapien
gaaagatggccaaattactaccata

SEQ ID NO: 1986799 - DNA, 25 bp, Homo sapien
tgacaggacgcctcttcatcaacac

SEQ ID NO: 1986800 - DNA, 25 bp, Homo sapien
gatgctgccagtagagtgtcaggtc

SEQ ID NO: 1986801 - DNA, 25 bp, Homo sapien
ttcttaataacaggggtaggcactg

SEQ ID NO: 1986802 - DNA, 25 bp, Homo sapien
gccagtagagtgtcaggtcttgata

SEQ ID NO: 1986803 - DNA, 25 bp, Homo sapien
ctgagtgcagagtgtgatgctgcca

SEQ ID NO: 1986804 - DNA, 25 bp, Homo sapien
atccccatcatagaaatcgttgagc

SEQ ID NO: 1986805 - DNA, 25 bp, Homo sapien
ccccatcatagaaatcgttgagctg

SEQ ID NO: 1986806 - DNA, 25 bp, Homo sapien
tccccatcatagaaatcgttgagct

SEQ ID NO: 1986807 - DNA, 25 bp, Homo sapien
aatgtcccaaataactccgtgaagc

SEQ ID NO: 1986808 - DNA, 25 bp, Homo sapien
cagtacatcaatccctggtgaacgg

SEQ ID NO: 1986809 - DNA, 25 bp, Homo sapien
gagtgacaggatttccatattgaca

SEQ ID NO: 1986810 - DNA, 25 bp, Homo sapien
tggtgaacggccatcttctaatacc

SEQ ID NO: 1986811 - DNA, 25 bp, Homo sapien
catagtggcatgataaaacagtgtg

SEQ ID NO: 1986812 - DNA, 25 bp, Homo sapien
tatgtaggagtcataaaatgcagcg

SEQ ID NO: 1986813 - DNA, 25 bp, Homo sapien
agtctatctggcttcaaatgctgga

SEQ ID NO: 1986814 - DNA, 25 bp, Homo sapien
cactagtagtgtgaccatagggaaa

SEQ ID NO: 1986815 - DNA, 25 bp, Homo sapien
tcaggaaacagtaacgggaaggtca

SEQ ID NO: 1986816 - DNA, 25 bp, Homo sapien
aaggtcagtaggatgggtgttaact

SEQ ID NO: 1986817 - DNA, 25 bp, Homo sapien
ctgctggtgtgaagtttggaagtgg

SEQ ID NO: 1986818 - DNA, 25 bp, Homo sapien
ggtgttaactcgtgatgttgctgct

SEQ ID NO: 1986819 - DNA, 25 bp, Homo sapien
acaaactaggagagccttctggact

SEQ ID NO: 1986820 - DNA, 25 bp, Homo sapien
gagccttctggacttcatcagcaat

SEQ ID NO: 1986821 - DNA, 25 bp, Homo sapien
gacaaactaggagagccttctggac

SEQ ID NO: 1986822 - DNA, 25 bp, Homo sapien
gcagacaaactaggagagccttctg

SEQ ID NO: 1986823 - DNA, 25 bp, Homo sapien
aaatgtcctacagttgagcgactca

SEQ ID NO: 1986824 - DNA, 25 bp, Homo sapien
ctgaacatcaccagtgaaatgtcct

SEQ ID NO: 1986825 - DNA, 25 bp, Homo sapien
ccagtgaaatgtcctacagttgagc

SEQ ID NO: 1986826 - DNA, 25 bp, Homo sapien
catcaccagtgaaatgtcctacagt

SEQ ID NO: 1986827 - DNA, 25 bp, Homo sapien
caagagctgtatctcaaggtacaaa

SEQ ID NO: 1986828 - DNA, 25 bp, Homo sapien
ggactgcaagagctgtatctcaagg

SEQ ID NO: 1986829 - DNA, 25 bp, Homo sapien
ctgcaagagctgtatctcaaggtac

SEQ ID NO: 1986830 - DNA, 25 bp, Homo sapien
tcaaggtacaaatgtggggcctgag

SEQ ID NO: 1986831 - DNA, 25 bp, Homo sapien
gaagaactggtgttgatccaaaaaa

SEQ ID NO: 1986832 - DNA, 25 bp, Homo sapien
tcatcacttagggtaatgtgcctgc

SEQ ID NO: 1986833 - DNA, 25 bp, Homo sapien
actccaagatgtggtgggattgaag

SEQ ID NO: 1986834 - DNA, 25 bp, Homo sapien
acgctgtgtagtgccgtgaacctca

SEQ ID NO: 1986835 - DNA, 25 bp, Homo sapien
ttactggcccatgaggctaccacca

SEQ ID NO: 1986836 - DNA, 25 bp, Homo sapien
taggatggacttgacaattaaggca

SEQ ID NO: 1986837 - DNA, 25 bp, Homo sapien
aatagtacatatcttggtgacagat

SEQ ID NO: 1986838 - DNA, 25 bp, Homo sapien
gacaattaaggcatctgcttgctgg

SEQ ID NO: 1986839 - DNA, 25 bp, Homo sapien
tttcttctccattgactgtatgtct

SEQ ID NO: 1986840 - DNA, 25 bp, Homo sapien
tcaatgagtagtcactttttccttc

SEQ ID NO: 1986841 - DNA, 25 bp, Homo sapien
aagtttcttctccattgactgtatg

SEQ ID NO: 1986842 - DNA, 25 bp, Homo sapien
caagtttcttctccattgactgtat

SEQ ID NO: 1986843 - DNA, 25 bp, Homo sapien
tagtaactgccccatgaaagccttt

SEQ ID NO: 1986844 - DNA, 25 bp, Homo sapien
ccaactgctgcaaactgcgaggaga

SEQ ID NO: 1986845 - DNA, 25 bp, Homo sapien
gagagctctcttgtcctgatatcat

SEQ ID NO: 1986846 - DNA, 25 bp, Homo sapien
ctgcgaggagaaacgggaccaagtt

SEQ ID NO: 1986847 - DNA, 25 bp, Homo sapien
tcatttggattctagcttaaggggc

SEQ ID NO: 1986848 - DNA, 25 bp, Homo sapien
cttccatgggcagtggccatcactc

SEQ ID NO: 1986849 - DNA, 25 bp, Homo sapien
atgggcagtggccatcactctccaa

SEQ ID NO: 1986850 - DNA, 25 bp, Homo sapien
atttccccccgctggctgtaacaca

SEQ ID NO: 1986851 - DNA, 25 bp, Homo sapien
gagaagtccaacatcaaggcacagg

SEQ ID NO: 1986852 - DNA, 25 bp, Homo sapien
gattgtctggtgaaggctgccctct

SEQ ID NO: 1986853 - DNA, 25 bp, Homo sapien
gtggcaggtttgattgtctggtgaa

SEQ ID NO: 1986854 - DNA, 25 bp, Homo sapien
gcacaggcaggtggcaggtttgatt

SEQ ID NO: 1986855 - DNA, 25 bp, Homo sapien
tttataaagatcagtaaggctcaga

SEQ ID NO: 1986856 - DNA, 25 bp, Homo sapien
tttagaagttggatctttataaaga

SEQ ID NO: 1986857 - DNA, 25 bp, Homo sapien
tctttataaagatcagtaaggctca

SEQ ID NO: 1986858 - DNA, 25 bp, Homo sapien
tagaagttggatctttataaagatc

SEQ ID NO: 1986859 - DNA, 25 bp, Homo sapien
gatggctttgtcaaacttgtatttg

SEQ ID NO: 1986860 - DNA, 25 bp, Homo sapien
gcatcgagcataaggagttggagaa

SEQ ID NO: 1986861 - DNA, 25 bp, Homo sapien
agggcttcaatgctgagcatcgagc

SEQ ID NO: 1986862 - DNA, 25 bp, Homo sapien
tgggtgatttacctctgccatgtaa

SEQ ID NO: 1986863 - DNA, 25 bp, Homo sapien
gatgacttgggattctttccagctt

SEQ ID NO: 1986864 - DNA, 25 bp, Homo sapien
tccaggggcagatgacttgggattc

SEQ ID NO: 1986865 - DNA, 25 bp, Homo sapien
ttttggaatattctttcaatgacca

SEQ ID NO: 1986866 - DNA, 25 bp, Homo sapien
ccagctttactcttcttagtcttat

SEQ ID NO: 1986867 - DNA, 25 bp, Homo sapien
tcatgtgtccattcactccctgggc

SEQ ID NO: 1986868 - DNA, 25 bp, Homo sapien
ggctatgttgtatttctgcttcatg

SEQ ID NO: 1986869 - DNA, 25 bp, Homo sapien
tccctgggctacaacatgatcatct

SEQ ID NO: 1986870 - DNA, 25 bp, Homo sapien
gaggagtctctgttactttggagga

SEQ ID NO: 1986871 - DNA, 25 bp, Homo sapien
aagtggtattactcttgggatgagg

SEQ ID NO: 1986872 - DNA, 25 bp, Homo sapien
cagcagtggtgggtatctgttttgt

SEQ ID NO: 1986873 - DNA, 25 bp, Homo sapien
gtggtgggtatctgttttgtattcc

SEQ ID NO: 1986874 - DNA, 25 bp, Homo sapien
ctaagtggtattactcttgggatga

SEQ ID NO: 1986875 - DNA, 25 bp, Homo sapien
cacaggagagtgtcagattgtagtt

SEQ ID NO: 1986876 - DNA, 25 bp, Homo sapien
cctccacagtaaatggagtggaaat

SEQ ID NO: 1986877 - DNA, 25 bp, Homo sapien
aaactgtgcacagcggtttgtcctc

SEQ ID NO: 1986878 - DNA, 25 bp, Homo sapien
gaaggttatcctctgcaggacgaac

SEQ ID NO: 1986879 - DNA, 25 bp, Homo sapien
atttcctgataatatagttgaccgc

SEQ ID NO: 1986880 - DNA, 25 bp, Homo sapien
ctatgaatcctttcttcagaatacg

SEQ ID NO: 1986881 - DNA, 25 bp, Homo sapien
tagttgaccgctttctatgaatcct

SEQ ID NO: 1986882 - DNA, 25 bp, Homo sapien
tgaaattgtcccatgtggaaacatg

SEQ ID NO: 1986883 - DNA, 25 bp, Homo sapien
cttctggatagaaaagacagcgaaa

SEQ ID NO: 1986884 - DNA, 25 bp, Homo sapien
aaaagatggcatctgagcaagaagg

SEQ ID NO: 1986885 - DNA, 25 bp, Homo sapien
ctgctgataagtgcaaaagctaaaa

SEQ ID NO: 1986886 - DNA, 25 bp, Homo sapien
ggatagaaaagacagcgaaacggga

SEQ ID NO: 1986887 - DNA, 25 bp, Homo sapien
aatgactgggtatataacaccagga

SEQ ID NO: 1986888 - DNA, 25 bp, Homo sapien
tatacagttgctcatacgtggtcga

SEQ ID NO: 1986889 - DNA, 25 bp, Homo sapien
ccattttgctctagttgggagatcc

SEQ ID NO: 1986890 - DNA, 25 bp, Homo sapien
ggtcgaatttcagatcatgggataa

SEQ ID NO: 1986891 - DNA, 25 bp, Homo sapien
ttatggctgcatagtcagagtgaac

SEQ ID NO: 1986892 - DNA, 25 bp, Homo sapien
agctcttccatgtcctgccaaagga

SEQ ID NO: 1986893 - DNA, 25 bp, Homo sapien
ggctgcatagtcagagtgaacagac

SEQ ID NO: 1986894 - DNA, 25 bp, Homo sapien
cagctcttccatgtcctgccaaagg

SEQ ID NO: 1986895 - DNA, 25 bp, Homo sapien
ccatcacttaggtattaagcccaca

SEQ ID NO: 1986896 - DNA, 25 bp, Homo sapien
tattaagcccacattcattagctat

SEQ ID NO: 1986897 - DNA, 25 bp, Homo sapien
catcacttaggtattaagcccacat

SEQ ID NO: 1986898 - DNA, 25 bp, Homo sapien
agcccacattcattagctatttatc

SEQ ID NO: 1986899 - DNA, 25 bp, Homo sapien
gaagaatgtattaccaaccagttta

SEQ ID NO: 1986900 - DNA, 25 bp, Homo sapien
gggccttttcccattatctagaatg

SEQ ID NO: 1986901 - DNA, 25 bp, Homo sapien
ctgactcatcccaggtaagaaagtt

SEQ ID NO: 1986902 - DNA, 25 bp, Homo sapien
taccaagctgtctacatggtgctat

SEQ ID NO: 1986903 - DNA, 25 bp, Homo sapien
cttcctcaatggctctgttcagata

SEQ ID NO: 1986904 - DNA, 25 bp, Homo sapien
tcagatagccaccaaatttctccat

SEQ ID NO: 1986905 - DNA, 25 bp, Homo sapien
aatggctctgttcagatagccacca

SEQ ID NO: 1986906 - DNA, 25 bp, Homo sapien
tagctcctcagtatctagtataact

SEQ ID NO: 1986907 - DNA, 25 bp, Homo sapien
ggtggcttccctctaagccagcgtg

SEQ ID NO: 1986908 - DNA, 25 bp, Homo sapien
gccaggctttcatactccagaaact

SEQ ID NO: 1986909 - DNA, 25 bp, Homo sapien
gacaaagcacacgaaattctggtgg

SEQ ID NO: 1986910 - DNA, 25 bp, Homo sapien
cgtgctcatacctccaaaagaggtg

SEQ ID NO: 1986911 - DNA, 25 bp, Homo sapien
tggacagtccatacaattctaggag

SEQ ID NO: 1986912 - DNA, 25 bp, Homo sapien
gaagtatcaattgtctaccaaggaa

SEQ ID NO: 1986913 - DNA, 25 bp, Homo sapien
gctttgacagttgagcccatagtca

SEQ ID NO: 1986914 - DNA, 25 bp, Homo sapien
ccaaggaaggcttgttgtaatgaca

SEQ ID NO: 1986915 - DNA, 25 bp, Homo sapien
tctattcggtcattcagagctctca

SEQ ID NO: 1986916 - DNA, 25 bp, Homo sapien
tagcccggaaggctacagtaggttc

SEQ ID NO: 1986917 - DNA, 25 bp, Homo sapien
cttagcccggaaggctacagtaggt

SEQ ID NO: 1986918 - DNA, 25 bp, Homo sapien
tacagtaggttctattcggtcattc

SEQ ID NO: 1986919 - DNA, 25 bp, Homo sapien
tacaatgaatgaacgtgggtgcctg

SEQ ID NO: 1986920 - DNA, 25 bp, Homo sapien
ccacaaccaccattgcctccaagcc

SEQ ID NO: 1986921 - DNA, 25 bp, Homo sapien
tcaagacaatcagtgtacaatgaat

SEQ ID NO: 1986922 - DNA, 25 bp, Homo sapien
agttgcagattcaagacaatcagtg

SEQ ID NO: 1986923 - DNA, 25 bp, Homo sapien
cacttgagacttggcgcaagccatg

SEQ ID NO: 1986924 - DNA, 25 bp, Homo sapien
caagccatgggctgacaaccttctc

SEQ ID NO: 1986925 - DNA, 25 bp, Homo sapien
aagacacagcaacacttgagacttg

SEQ ID NO: 1986926 - DNA, 25 bp, Homo sapien
tggcgcaagccatgggctgacaacc

SEQ ID NO: 1986927 - DNA, 25 bp, Homo sapien
aaagtaatacattcttagattcttc

SEQ ID NO: 1986928 - DNA, 25 bp, Homo sapien
tcaaaagtaatacattcttagattc

SEQ ID NO: 1986929 - DNA, 25 bp, Homo sapien
agtaatacattcttagattcttcca

SEQ ID NO: 1986930 - DNA, 25 bp, Homo sapien
gtaatacattcttagattcttccat

SEQ ID NO: 1986931 - DNA, 25 bp, Homo sapien
gccgagactccaaaaacacttggaa

SEQ ID NO: 1986932 - DNA, 25 bp, Homo sapien
ctgtcaaaagccgagactccaaaaa

SEQ ID NO: 1986933 - DNA, 25 bp, Homo sapien
ccagcttgaaatgtgggttcattgt

SEQ ID NO: 1986934 - DNA, 25 bp, Homo sapien
accagcttgaaatgtgggttcattg

SEQ ID NO: 1986935 - DNA, 25 bp, Homo sapien
tgggatcatctgatatacagcaaag

SEQ ID NO: 1986936 - DNA, 25 bp, Homo sapien
cctcctcttgacagtagcattggga

SEQ ID NO: 1986937 - DNA, 25 bp, Homo sapien
tctggagcaaatttgagtatctggc

SEQ ID NO: 1986938 - DNA, 25 bp, Homo sapien
gagtatctggccatacctcctcttg

SEQ ID NO: 1986939 - DNA, 25 bp, Homo sapien
gaaatcttcagtgtattgcttaaag

SEQ ID NO: 1986940 - DNA, 25 bp, Homo sapien
tgaaatcttcagtgtattgcttaaa

SEQ ID NO: 1986941 - DNA, 25 bp, Homo sapien
ggctccttccttcacatcgataaat

SEQ ID NO: 1986942 - DNA, 25 bp, Homo sapien
cagtttaggagctattgaaatggct

SEQ ID NO: 1986943 - DNA, 25 bp, Homo sapien
tgaataataaaccatctccaaagac

SEQ ID NO: 1986944 - DNA, 25 bp, Homo sapien
ttaagtgaataataaaccatctcca

SEQ ID NO: 1986945 - DNA, 25 bp, Homo sapien
tttttctctgatgcagtctctgact

SEQ ID NO: 1986946 - DNA, 25 bp, Homo sapien
ttttgtatgccagtttttctctgat

SEQ ID NO: 1986947 - DNA, 25 bp, Homo sapien
cttttgtatgccagtttttctctga

SEQ ID NO: 1986948 - DNA, 25 bp, Homo sapien
ttctctgatgcagtctctgacttcc

SEQ ID NO: 1986949 - DNA, 25 bp, Homo sapien
tggctcagtccaattttgccttcag

SEQ ID NO: 1986950 - DNA, 25 bp, Homo sapien
ctctgctgggaccactcttattatt

SEQ ID NO: 1986951 - DNA, 25 bp, Homo sapien
ttcatctggctcagtccaattttgc

SEQ ID NO: 1986952 - DNA, 25 bp, Homo sapien
cagggccgtgagcatattatcagtc

SEQ ID NO: 1986953 - DNA, 25 bp, Homo sapien
gctacgtaatcctggacaagttaaa

SEQ ID NO: 1986954 - DNA, 25 bp, Homo sapien
aatccatcttggtcatgtagctacg

SEQ ID NO: 1986955 - DNA, 25 bp, Homo sapien
tggccttggcatcctaagaccaggt

SEQ ID NO: 1986956 - DNA, 25 bp, Homo sapien
aataaagaaagccattggccttggc

SEQ ID NO: 1986957 - DNA, 25 bp, Homo sapien
catgtggaggatgaggcatggagac

SEQ ID NO: 1986958 - DNA, 25 bp, Homo sapien
gacagctgtgcaaaacttccatgcc

SEQ ID NO: 1986959 - DNA, 25 bp, Homo sapien
gatacagatgtaaagacatgtggag

SEQ ID NO: 1986960 - DNA, 25 bp, Homo sapien
tccatgcccttcctgagtgcaccac

SEQ ID NO: 1986961 - DNA, 25 bp, Homo sapien
cataggaggagctcagggaagtctc

SEQ ID NO: 1986962 - DNA, 25 bp, Homo sapien
aggaggagctcagggaagtctccat

SEQ ID NO: 1986963 - DNA, 25 bp, Homo sapien
ggggatctccataggaggagctcag

SEQ ID NO: 1986964 - DNA, 25 bp, Homo sapien
tccataggaggagctcagggaagtc

SEQ ID NO: 1986965 - DNA, 25 bp, Homo sapien
gcctaacttctctaagtaatgtcca

SEQ ID NO: 1986966 - DNA, 25 bp, Homo sapien
tgtgtatcccttcaggcctaacttc

SEQ ID NO: 1986967 - DNA, 25 bp, Homo sapien
gtaatgtccatcgtacagccttctc

SEQ ID NO: 1986968 - DNA, 25 bp, Homo sapien
caataacagtggctgtgtatccctt

SEQ ID NO: 1986969 - DNA, 25 bp, Homo sapien
acgtttgataacattaggactgaag

SEQ ID NO: 1986970 - DNA, 25 bp, Homo sapien
tgtgttacgtttgataacattagga

SEQ ID NO: 1986971 - DNA, 25 bp, Homo sapien
ctttcatcaaatgtgttacgtttga

SEQ ID NO: 1986972 - DNA, 25 bp, Homo sapien
tcaaatgtgttacgtttgataacat

SEQ ID NO: 1986973 - DNA, 25 bp, Homo sapien
tcatactgaacataatctgacatta

SEQ ID NO: 1986974 - DNA, 25 bp, Homo sapien
tactgaacataatctgacattatca

SEQ ID NO: 1986975 - DNA, 25 bp, Homo sapien
atactgaacataatctgacattatc

SEQ ID NO: 1986976 - DNA, 25 bp, Homo sapien
actgaacataatctgacattatcat

SEQ ID NO: 1986977 - DNA, 25 bp, Homo sapien
tccaagatttcttgcaccttcaaac

SEQ ID NO: 1986978 - DNA, 25 bp, Homo sapien
caagatttcttgcaccttcaaacac

SEQ ID NO: 1986979 - DNA, 25 bp, Homo sapien
attccaagatttcttgcaccttcaa

SEQ ID NO: 1986980 - DNA, 25 bp, Homo sapien
agatttcttgcaccttcaaacacat

SEQ ID NO: 1986981 - DNA, 25 bp, Homo sapien
tatttcaggggctacatacatgatg

SEQ ID NO: 1986982 - DNA, 25 bp, Homo sapien
ggctacatacatgatgtctacgcct

SEQ ID NO: 1986983 - DNA, 25 bp, Homo sapien
caggggctacatacatgatgtctac

SEQ ID NO: 1986984 - DNA, 25 bp, Homo sapien
cactctatttcaggggctacataca

SEQ ID NO: 1986985 - DNA, 25 bp, Homo sapien
aagtttcctcttggatactaagact

SEQ ID NO: 1986986 - DNA, 25 bp, Homo sapien
cataaccaggagcaagcactgaaag

SEQ ID NO: 1986987 - DNA, 25 bp, Homo sapien
gacttccttacatgaatcagtctac

SEQ ID NO: 1986988 - DNA, 25 bp, Homo sapien
gaagcgtctgcgtgtcatgttttgc

SEQ ID NO: 1986989 - DNA, 25 bp, Homo sapien
tcttgttcttctgcctttaccacga

SEQ ID NO: 1986990 - DNA, 25 bp, Homo sapien
tgacatttttcatgtaactctgcct

SEQ ID NO: 1986991 - DNA, 25 bp, Homo sapien
cacgagggcattccagtgatagcca

SEQ ID NO: 1986992 - DNA, 25 bp, Homo sapien
tttcatgtaactctgcctttccatc

SEQ ID NO: 1986993 - DNA, 25 bp, Homo sapien
ctgtctagcattaattccctgggct

SEQ ID NO: 1986994 - DNA, 25 bp, Homo sapien
tgccgtttcaaatccacattccagc

SEQ ID NO: 1986995 - DNA, 25 bp, Homo sapien
tgtagataggtccatttatgtcctc

SEQ ID NO: 1986996 - DNA, 25 bp, Homo sapien
cagtatcttccagatgccgtttcaa

SEQ ID NO: 1986997 - DNA, 25 bp, Homo sapien
tgttttgtttcatgcgttcctctag

SEQ ID NO: 1986998 - DNA, 25 bp, Homo sapien
gcaaactgcatgaatcagatcaaca

SEQ ID NO: 1986999 - DNA, 25 bp, Homo sapien
ttcagtaatcaaggtgtagtggcaa

SEQ ID NO: 1987000 - DNA, 25 bp, Homo sapien
cagtaatcaaggtgtagtggcaaaa

SEQ ID NO: 1987001 - DNA, 25 bp, Homo sapien
cattaacttgcttttcgtccacaat

SEQ ID NO: 1987002 - DNA, 25 bp, Homo sapien
gcttttcaaagctgtcgttactatg

SEQ ID NO: 1987003 - DNA, 25 bp, Homo sapien
aagctgtcgttactatgccatggag

SEQ ID NO: 1987004 - DNA, 25 bp, Homo sapien
tttcaaagctgtcgttactatgcca

SEQ ID NO: 1987005 - DNA, 25 bp, Homo sapien
caaagctgtcgttactatgccatgg

SEQ ID NO: 1987006 - DNA, 25 bp, Homo sapien
gttctacagcaaagcaaactcttaa

SEQ ID NO: 1987007 - DNA, 25 bp, Homo sapien
gaataatgtgcccataatgtgacat

SEQ ID NO: 1987008 - DNA, 25 bp, Homo sapien
gatgatcactcataagttctacagc

SEQ ID NO: 1987009 - DNA, 25 bp, Homo sapien
ctttgtggtaatgggaatcaaactc

SEQ ID NO: 1987010 - DNA, 25 bp, Homo sapien
cattgatgatatctaacacatattc

SEQ ID NO: 1987011 - DNA, 25 bp, Homo sapien
ctcattgatgatatctaacacatat

SEQ ID NO: 1987012 - DNA, 25 bp, Homo sapien
tgatgatatctaacacatattccat

SEQ ID NO: 1987013 - DNA, 25 bp, Homo sapien
ttgatgatatctaacacatattcca

SEQ ID NO: 1987014 - DNA, 25 bp, Homo sapien
tttatgctgcatggctcttgatagc

SEQ ID NO: 1987015 - DNA, 25 bp, Homo sapien
gatagcaggaatcatagttatttcc

SEQ ID NO: 1987016 - DNA, 25 bp, Homo sapien
gccctttatgctgcatggctcttga

SEQ ID NO: 1987017 - DNA, 25 bp, Homo sapien
ttctcttgccctttatgctgcatgg

SEQ ID NO: 1987018 - DNA, 25 bp, Homo sapien
tacgagttgatacctgtttatttaa

SEQ ID NO: 1987019 - DNA, 25 bp, Homo sapien
ttgatggttttctgaacgtacaaga

SEQ ID NO: 1987020 - DNA, 25 bp, Homo sapien
tctgaacgtacaagaatacgagttg

SEQ ID NO: 1987021 - DNA, 25 bp, Homo sapien
gtacaagaatacgagttgatacctg

SEQ ID NO: 1987022 - DNA, 25 bp, Homo sapien
ctaatggtagtagaagtagtagtag

SEQ ID NO: 1987023 - DNA, 25 bp, Homo sapien
tagtagtatttcacactatcttcaa

SEQ ID NO: 1987024 - DNA, 25 bp, Homo sapien
tatcttcaaaactgagtgttcttgc

SEQ ID NO: 1987025 - DNA, 25 bp, Homo sapien
taatggtagtagaagtagtagtagt

SEQ ID NO: 1987026 - DNA, 25 bp, Homo sapien
ttcaatctggacatcatcatcatag

SEQ ID NO: 1987027 - DNA, 25 bp, Homo sapien
tcaatctggacatcatcatcatagt

SEQ ID NO: 1987028 - DNA, 25 bp, Homo sapien
atcatcatcatagtcgtcttttctc

SEQ ID NO: 1987029 - DNA, 25 bp, Homo sapien
atcatcatagtcgtcttttctctct

SEQ ID NO: 1987030 - DNA, 25 bp, Homo sapien
tcagctttccccgtcttcattggtt

SEQ ID NO: 1987031 - DNA, 25 bp, Homo sapien
tcttcattggttttctcaactctat

SEQ ID NO: 1987032 - DNA, 25 bp, Homo sapien
ttccccgtcttcattggttttctca

SEQ ID NO: 1987033 - DNA, 25 bp, Homo sapien
ttcattggttttctcaactctatac

SEQ ID NO: 1987034 - DNA, 25 bp, Homo sapien
gaacatctcatgagtgtagggagga

SEQ ID NO: 1987035 - DNA, 25 bp, Homo sapien
ctgatgtgagctttgttcaactgaa

SEQ ID NO: 1987036 - DNA, 25 bp, Homo sapien
agaacatctcatgagtgtagggagg

SEQ ID NO: 1987037 - DNA, 25 bp, Homo sapien
attcatgtcctgatgtgagctttgt

SEQ ID NO: 1987038 - DNA, 25 bp, Homo sapien
tatgctatatagtacatcactgaat

SEQ ID NO: 1987039 - DNA, 25 bp, Homo sapien
gaatacctaaatggctcttttcagc

SEQ ID NO: 1987040 - DNA, 25 bp, Homo sapien
ggacctttagtctactgaattagaa

SEQ ID NO: 1987041 - DNA, 25 bp, Homo sapien
taataaattataccccaagatgtac

SEQ ID NO: 1987042 - DNA, 25 bp, Homo sapien
ctccctccacaatttgaaggagttt

SEQ ID NO: 1987043 - DNA, 25 bp, Homo sapien
tatgtagagggggaaattcctcctg

SEQ ID NO: 1987044 - DNA, 25 bp, Homo sapien
atgtagagggggaaattcctcctgc

SEQ ID NO: 1987045 - DNA, 25 bp, Homo sapien
tccacaatttgaaggagttttctgg

SEQ ID NO: 1987046 - DNA, 25 bp, Homo sapien
gaagtcctggtaatcaactttcaaa

SEQ ID NO: 1987047 - DNA, 25 bp, Homo sapien
ggtaatcaactttcaaacccattgc

SEQ ID NO: 1987048 - DNA, 25 bp, Homo sapien
ttccacaggagtgaagtcctggtaa

SEQ ID NO: 1987049 - DNA, 25 bp, Homo sapien
aaacccattgctttttcaactgcta

SEQ ID NO: 1987050 - DNA, 25 bp, Homo sapien
ctttaaggactgtgtttcccaactg

SEQ ID NO: 1987051 - DNA, 25 bp, Homo sapien
gattcatcctttaaggactgtgttt

SEQ ID NO: 1987052 - DNA, 25 bp, Homo sapien
catcctttaaggactgtgtttccca

SEQ ID NO: 1987053 - DNA, 25 bp, Homo sapien
tttaaggactgtgtttcccaactga

SEQ ID NO: 1987054 - DNA, 25 bp, Homo sapien
tatatggtatcacataatctctgcc

SEQ ID NO: 1987055 - DNA, 25 bp, Homo sapien
tttttatagacattctgctggtata

SEQ ID NO: 1987056 - DNA, 25 bp, Homo sapien
cattctgctggtatatggtatcaca

SEQ ID NO: 1987057 - DNA, 25 bp, Homo sapien
ggtatcacataatctctgcccttct

SEQ ID NO: 1987058 - DNA, 25 bp, Homo sapien
ttcattatgccttatttctgaaaag

SEQ ID NO: 1987059 - DNA, 25 bp, Homo sapien
gatttcattatgccttatttctgaa

SEQ ID NO: 1987060 - DNA, 25 bp, Homo sapien
cagatttcattatgccttatttctg

SEQ ID NO: 1987061 - DNA, 25 bp, Homo sapien
tttcattatgccttatttctgaaaa

SEQ ID NO: 1987062 - DNA, 25 bp, Homo sapien
ttaatctctgctgcaccggttccct

SEQ ID NO: 1987063 - DNA, 25 bp, Homo sapien
taatctctgctgcaccggttccctt

SEQ ID NO: 1987064 - DNA, 25 bp, Homo sapien
tctctgctgcaccggttcccttcca

SEQ ID NO: 1987065 - DNA, 25 bp, Homo sapien
aatctctgctgcaccggttcccttc

SEQ ID NO: 1987066 - DNA, 25 bp, Homo sapien
taaagagtcatttctacgtttctta

SEQ ID NO: 1987067 - DNA, 25 bp, Homo sapien
acaagtgctttcttagaactggcaa

SEQ ID NO: 1987068 - DNA, 25 bp, Homo sapien
ggcaatttcgtgatgtaaagagtca

SEQ ID NO: 1987069 - DNA, 25 bp, Homo sapien
gaactggcaatttcgtgatgtaaag

SEQ ID NO: 1987070 - DNA, 25 bp, Homo sapien
ccattgttatctgagtaccttccat

SEQ ID NO: 1987071 - DNA, 25 bp, Homo sapien
attgtactctatgtgaagaatctcc

SEQ ID NO: 1987072 - DNA, 25 bp, Homo sapien
tgattgtactctatgtgaagaatct

SEQ ID NO: 1987073 - DNA, 25 bp, Homo sapien
tttccattgttatctgagtaccttc

SEQ ID NO: 1987074 - DNA, 25 bp, Homo sapien
caggtggagcatccaaaatttggca

SEQ ID NO: 1987075 - DNA, 25 bp, Homo sapien
gacccatctgctgttcaaatttgac

SEQ ID NO: 1987076 - DNA, 25 bp, Homo sapien
cagaagttcaagtggcagacccatc

SEQ ID NO: 1987077 - DNA, 25 bp, Homo sapien
gaattggggcccatatttactggca

SEQ ID NO: 1987078 - DNA, 25 bp, Homo sapien
catttagggtgaagccaaagaccca

SEQ ID NO: 1987079 - DNA, 25 bp, Homo sapien
gagttgaaagggctcatggatcata

SEQ ID NO: 1987080 - DNA, 25 bp, Homo sapien
catggatcatagtccatttagggtg

SEQ ID NO: 1987081 - DNA, 25 bp, Homo sapien
tatttcacaaactgagagttgaaag

SEQ ID NO: 1987082 - DNA, 25 bp, Homo sapien
cctatccgtccttttgctctaatca

SEQ ID NO: 1987083 - DNA, 25 bp, Homo sapien
gggtcaaaggataatctgagtggtt

SEQ ID NO: 1987084 - DNA, 25 bp, Homo sapien
tctgagtggttacctatccgtcctt

SEQ ID NO: 1987085 - DNA, 25 bp, Homo sapien
gataatctgagtggttacctatccg

SEQ ID NO: 1987086 - DNA, 25 bp, Homo sapien
aagatgcctgcagtgatttgtgaca

SEQ ID NO: 1987087 - DNA, 25 bp, Homo sapien
ctcgtagtccgttatctctagaaag

SEQ ID NO: 1987088 - DNA, 25 bp, Homo sapien
acacatctgtatgactgaacttcca

SEQ ID NO: 1987089 - DNA, 25 bp, Homo sapien
tgtgacatagaatcttccctgctct

SEQ ID NO: 1987090 - DNA, 25 bp, Homo sapien
ctggatgtgatcttgctgtggtgtc

SEQ ID NO: 1987091 - DNA, 25 bp, Homo sapien
gatgtgatcttgctgtggtgtctcc

SEQ ID NO: 1987092 - DNA, 25 bp, Homo sapien
tatgtgtggctggatgtgatcttgc

SEQ ID NO: 1987093 - DNA, 25 bp, Homo sapien
tggtatgtgtggctggatgtgatct

SEQ ID NO: 1987094 - DNA, 25 bp, Homo sapien
ctgtagggttgtggccaagtggaaa

SEQ ID NO: 1987095 - DNA, 25 bp, Homo sapien
tgtagggttgtggccaagtggaaag

SEQ ID NO: 1987096 - DNA, 25 bp, Homo sapien
ggttgtggccaagtggaaagggatg

SEQ ID NO: 1987097 - DNA, 25 bp, Homo sapien
tgtggccaagtggaaagggatgagg

SEQ ID NO: 1987098 - DNA, 25 bp, Homo sapien
cagcaaatctcagtttagcccttgc

SEQ ID NO: 1987099 - DNA, 25 bp, Homo sapien
agcaaatctcagtttagcccttgcc

SEQ ID NO: 1987100 - DNA, 25 bp, Homo sapien
aacagcaaatctcagtttagccctt

SEQ ID NO: 1987101 - DNA, 25 bp, Homo sapien
acagcaaatctcagtttagcccttg

SEQ ID NO: 1987102 - DNA, 25 bp, Homo sapien
ttggtagaggtcagcagggtttaga

SEQ ID NO: 1987103 - DNA, 25 bp, Homo sapien
tctgattggtagaggtcagcagggt

SEQ ID NO: 1987104 - DNA, 25 bp, Homo sapien
gattggtagaggtcagcagggttta

SEQ ID NO: 1987105 - DNA, 25 bp, Homo sapien
atattctgattggtagaggtcagca

SEQ ID NO: 1987106 - DNA, 25 bp, Homo sapien
ctttggatttataacgtaagctggc

SEQ ID NO: 1987107 - DNA, 25 bp, Homo sapien
tactgaataaatcttgctcaattgc

SEQ ID NO: 1987108 - DNA, 25 bp, Homo sapien
aaaacattaagctcttcacacttca

SEQ ID NO: 1987109 - DNA, 25 bp, Homo sapien
tcaattgccctaaaacattaagctc

SEQ ID NO: 1987110 - DNA, 25 bp, Homo sapien
caaaagcgaaacaccataaaacact

SEQ ID NO: 1987111 - DNA, 25 bp, Homo sapien
aaagcgaaacaccataaaacactca

SEQ ID NO: 1987112 - DNA, 25 bp, Homo sapien
aagcgaaacaccataaaacactcac

SEQ ID NO: 1987113 - DNA, 25 bp, Homo sapien
tcaaaagcgaaacaccataaaacac

SEQ ID NO: 1987114 - DNA, 25 bp, Homo sapien
cgaactgctttttgtcctgatacca

SEQ ID NO: 1987115 - DNA, 25 bp, Homo sapien
aatatcttctcatccttgttatctg

SEQ ID NO: 1987116 - DNA, 25 bp, Homo sapien
ctcatctccatgaatgttgcacttg

SEQ ID NO: 1987117 - DNA, 25 bp, Homo sapien
gcacttgctgttatttcctcaaata

SEQ ID NO: 1987118 - DNA, 25 bp, Homo sapien
gagctcttgccttccggggcattgg

SEQ ID NO: 1987119 - DNA, 25 bp, Homo sapien
ccatgagctcttgccttccggggca

SEQ ID NO: 1987120 - DNA, 25 bp, Homo sapien
tcatcttatgctcagaccatgagct

SEQ ID NO: 1987121 - DNA, 25 bp, Homo sapien
catcttatgctcagaccatgagctc

SEQ ID NO: 1987122 - DNA, 25 bp, Homo sapien
cagggtttttgcttttgttgttcat

SEQ ID NO: 1987123 - DNA, 25 bp, Homo sapien
gctggcagagctggcagtaaagtta

SEQ ID NO: 1987124 - DNA, 25 bp, Homo sapien
atttcctcagatgcacccaattttg

SEQ ID NO: 1987125 - DNA, 25 bp, Homo sapien
ggcactggagttccttcaaccctta

SEQ ID NO: 1987126 - DNA, 25 bp, Homo sapien
taagaaatagtcgttctttcggata

SEQ ID NO: 1987127 - DNA, 25 bp, Homo sapien
cgttctttcggataccatttgacaa

SEQ ID NO: 1987128 - DNA, 25 bp, Homo sapien
catttgacaaatggcactggagttc

SEQ ID NO: 1987129 - DNA, 25 bp, Homo sapien
tgacgggaggagatttcacttggct

SEQ ID NO: 1987130 - DNA, 25 bp, Homo sapien
gattttgcctctgacgggaggagat

SEQ ID NO: 1987131 - DNA, 25 bp, Homo sapien
tgcctctgacgggaggagatttcac

SEQ ID NO: 1987132 - DNA, 25 bp, Homo sapien
cgggaggagatttcacttggctcat

SEQ ID NO: 1987133 - DNA, 25 bp, Homo sapien
gcaagagtcattgtgaagaagagca

SEQ ID NO: 1987134 - DNA, 25 bp, Homo sapien
cagtttttacgggtaatgtgtctga

SEQ ID NO: 1987135 - DNA, 25 bp, Homo sapien
gtattacggctgataaaggtactgc

SEQ ID NO: 1987136 - DNA, 25 bp, Homo sapien
gcagtggtgttgatctcttctcact

SEQ ID NO: 1987137 - DNA, 25 bp, Homo sapien
tgacttttgctaagaggtattggcg

SEQ ID NO: 1987138 - DNA, 25 bp, Homo sapien
ggtattggcggaagtatgtattctc

SEQ ID NO: 1987139 - DNA, 25 bp, Homo sapien
tgtctaggacttatccaagaaagaa

SEQ ID NO: 1987140 - DNA, 25 bp, Homo sapien
tattctctgaggtatgaatgtctag

SEQ ID NO: 1987141 - DNA, 25 bp, Homo sapien
ttctacgcagttagaatctcccagc

SEQ ID NO: 1987142 - DNA, 25 bp, Homo sapien
atgttccacaggtctaaggatgatg

SEQ ID NO: 1987143 - DNA, 25 bp, Homo sapien
tccacaggtctaaggatgatgaaaa

SEQ ID NO: 1987144 - DNA, 25 bp, Homo sapien
gaaaatctccatttctacgcagtta

SEQ ID NO: 1987145 - DNA, 25 bp, Homo sapien
taagtccagttgaaagcgtaagtct

SEQ ID NO: 1987146 - DNA, 25 bp, Homo sapien
gaccaacctcacaaactggcgagac

SEQ ID NO: 1987147 - DNA, 25 bp, Homo sapien
aatggacaatgggaatgacctgcag

SEQ ID NO: 1987148 - DNA, 25 bp, Homo sapien
tgcagttctagctaccgaagaggct

SEQ ID NO: 1987149 - DNA, 25 bp, Homo sapien
ctcttcctggaaagcggagccccat

SEQ ID NO: 1987150 - DNA, 25 bp, Homo sapien
ccagccttattacccgtgtagccaa

SEQ ID NO: 1987151 - DNA, 25 bp, Homo sapien
tataccagccttattacccgtgtag

SEQ ID NO: 1987152 - DNA, 25 bp, Homo sapien
cttattacccgtgtagccaacagca

SEQ ID NO: 1987153 - DNA, 25 bp, Homo sapien
gccttattacccgtgtagccaacag

SEQ ID NO: 1987154 - DNA, 25 bp, Homo sapien
ccatggccagctaatttttgtgttt

SEQ ID NO: 1987155 - DNA, 25 bp, Homo sapien
ggacgacaggcactcgccaccatgg

SEQ ID NO: 1987156 - DNA, 25 bp, Homo sapien
cctcatccctgaggaatctgagcct

SEQ ID NO: 1987157 - DNA, 25 bp, Homo sapien
gtggcatgactttgatcctcatccc

SEQ ID NO: 1987158 - DNA, 25 bp, Homo sapien
tcctcatccctgaggaatctgagcc

SEQ ID NO: 1987159 - DNA, 25 bp, Homo sapien
ctcatccctgaggaatctgagcctc

SEQ ID NO: 1987160 - DNA, 25 bp, Homo sapien
tcgtctgctgaatggtataacgtac

SEQ ID NO: 1987161 - DNA, 25 bp, Homo sapien
cgtacacatgcctcatatcactgta

SEQ ID NO: 1987162 - DNA, 25 bp, Homo sapien
tgttatatagccagcttttaaagac

SEQ ID NO: 1987163 - DNA, 25 bp, Homo sapien
tttcacacaagaatgcacctttctt

SEQ ID NO: 1987164 - DNA, 25 bp, Homo sapien
ttaaatacagtatcccataggagca

SEQ ID NO: 1987165 - DNA, 25 bp, Homo sapien
tgttggatttggtcccccacggata

SEQ ID NO: 1987166 - DNA, 25 bp, Homo sapien
catggtaaaagtctgttggatttgg

SEQ ID NO: 1987167 - DNA, 25 bp, Homo sapien
ccccacggatacaaattgtctttca

SEQ ID NO: 1987168 - DNA, 25 bp, Homo sapien
ctggttttcgcagttcctttgcact

SEQ ID NO: 1987169 - DNA, 25 bp, Homo sapien
gcagttcctttgcactgtcgtttag

SEQ ID NO: 1987170 - DNA, 25 bp, Homo sapien
tttgcactgtcgtttagtgactcca

SEQ ID NO: 1987171 - DNA, 25 bp, Homo sapien
ttttcgcagttcctttgcactgtcg

SEQ ID NO: 1987172 - DNA, 25 bp, Homo sapien
actattccatccacatgattaggag

SEQ ID NO: 1987173 - DNA, 25 bp, Homo sapien
tccacatgattaggagtgtttatgt

SEQ ID NO: 1987174 - DNA, 25 bp, Homo sapien
gcacctgagccttccgtggcatcgt

SEQ ID NO: 1987175 - DNA, 25 bp, Homo sapien
atgcacctgagccttccgtggcatc

SEQ ID NO: 1987176 - DNA, 25 bp, Homo sapien
cgtatcttctcagcctctttttttt

SEQ ID NO: 1987177 - DNA, 25 bp, Homo sapien
ctcaaccacatgacagggctgccct

SEQ ID NO: 1987178 - DNA, 25 bp, Homo sapien
ctgcccggaggcctaaaacccattg

SEQ ID NO: 1987179 - DNA, 25 bp, Homo sapien
tctgccactgtggttcccaaaagat

SEQ ID NO: 1987180 - DNA, 25 bp, Homo sapien
ggcttaagcaccaggatttctgctg

SEQ ID NO: 1987181 - DNA, 25 bp, Homo sapien
tcaattcaggcaagctgctatcaca

SEQ ID NO: 1987182 - DNA, 25 bp, Homo sapien
aagtgaagtataataagtccctgga

SEQ ID NO: 1987183 - DNA, 25 bp, Homo sapien
ggcaagctgctatcacagctctaaa

SEQ ID NO: 1987184 - DNA, 25 bp, Homo sapien
cctggatatcttccttggagcattc

SEQ ID NO: 1987185 - DNA, 25 bp, Homo sapien
cactgtaatcaccagttgatcttgt

SEQ ID NO: 1987186 - DNA, 25 bp, Homo sapien
ggtcacactgtaatcaccagttgat

SEQ ID NO: 1987187 - DNA, 25 bp, Homo sapien
tgggtcacactgtaatcaccagttg

SEQ ID NO: 1987188 - DNA, 25 bp, Homo sapien
cacactgtaatcaccagttgatctt

SEQ ID NO: 1987189 - DNA, 25 bp, Homo sapien
tgtgatgaacttggttctaaattca

SEQ ID NO: 1987190 - DNA, 25 bp, Homo sapien
caatctctaagtggatgtgatgaac

SEQ ID NO: 1987191 - DNA, 25 bp, Homo sapien
tggagaagcaatctctaagtggatg

SEQ ID NO: 1987192 - DNA, 25 bp, Homo sapien
agggatgattggagaagcaatctct

SEQ ID NO: 1987193 - DNA, 25 bp, Homo sapien
ccgtaagttgtagggaccacagaag

SEQ ID NO: 1987194 - DNA, 25 bp, Homo sapien
tatttgatggcacactggtagaccc

SEQ ID NO: 1987195 - DNA, 25 bp, Homo sapien
catgctgctctcagaaaaccgtaag

SEQ ID NO: 1987196 - DNA, 25 bp, Homo sapien
actggtagaccctgtagtgccaccc

SEQ ID NO: 1987197 - DNA, 25 bp, Homo sapien
acattttgtcggcattgctatgccc

SEQ ID NO: 1987198 - DNA, 25 bp, Homo sapien
gatatttatgatgctttcccctgct

SEQ ID NO: 1987199 - DNA, 25 bp, Homo sapien
cataaggtcttactttctccatgaa

SEQ ID NO: 1987200 - DNA, 25 bp, Homo sapien
tgaatccttctagatggcagaacct

SEQ ID NO: 1987201 - DNA, 25 bp, Homo sapien
agaggtgccaggtagcctctcaccc

SEQ ID NO: 1987202 - DNA, 25 bp, Homo sapien
caggtagcctctcacccctttttct

SEQ ID NO: 1987203 - DNA, 25 bp, Homo sapien
aggagaggtgccaggtagcctctca

SEQ ID NO: 1987204 - DNA, 25 bp, Homo sapien
tgccaggtagcctctcacccctttt

SEQ ID NO: 1987205 - DNA, 25 bp, Homo sapien
catgctgttgttttgattgctgagg

SEQ ID NO: 1987206 - DNA, 25 bp, Homo sapien
attgctgaggttggtcacaaagttc

SEQ ID NO: 1987207 - DNA, 25 bp, Homo sapien
cttcatgctgttgttttgattgctg

SEQ ID NO: 1987208 - DNA, 25 bp, Homo sapien
gaggttggtcacaaagttcagtgac

SEQ ID NO: 1987209 - DNA, 25 bp, Homo sapien
ccattcattcctttactgctatttc

SEQ ID NO: 1987210 - DNA, 25 bp, Homo sapien
tcattcctttactgctatttcctcc

SEQ ID NO: 1987211 - DNA, 25 bp, Homo sapien
tcaatttccattcattcctttactg

SEQ ID NO: 1987212 - DNA, 25 bp, Homo sapien
atttccattcattcctttactgcta

SEQ ID NO: 1987213 - DNA, 25 bp, Homo sapien
tgatccgcccgcctatgttattctt

SEQ ID NO: 1987214 - DNA, 25 bp, Homo sapien
tctgtctgtctgaaatgcctttgcc

SEQ ID NO: 1987215 - DNA, 25 bp, Homo sapien
tgaaatgcctttgcctcaacatcat

SEQ ID NO: 1987216 - DNA, 25 bp, Homo sapien
gttattctttgatcaccttgctctg

SEQ ID NO: 1987217 - DNA, 25 bp, Homo sapien
ggtccctttgtaatctgactttcaa

SEQ ID NO: 1987218 - DNA, 25 bp, Homo sapien
tttgtaatctgactttcaactccat

SEQ ID NO: 1987219 - DNA, 25 bp, Homo sapien
cctttgtaatctgactttcaactcc

SEQ ID NO: 1987220 - DNA, 25 bp, Homo sapien
ccttggtccctttgtaatctgactt

SEQ ID NO: 1987221 - DNA, 25 bp, Homo sapien
aagtgattcaggcttcattagagaa

SEQ ID NO: 1987222 - DNA, 25 bp, Homo sapien
ttagagaaatgccacccgaagggtc

SEQ ID NO: 1987223 - DNA, 25 bp, Homo sapien
gtgattcaggcttcattagagaaat

SEQ ID NO: 1987224 - DNA, 25 bp, Homo sapien
atgccacccgaagggtctctttcaa

SEQ ID NO: 1987225 - DNA, 25 bp, Homo sapien
aagcaacaagaatccttcaatataa

SEQ ID NO: 1987226 - DNA, 25 bp, Homo sapien
attatccacactatgtctagagcag

SEQ ID NO: 1987227 - DNA, 25 bp, Homo sapien
tctagagcagtacaacagccacttc

SEQ ID NO: 1987228 - DNA, 25 bp, Homo sapien
gccacttctgctgatttcggtatct

SEQ ID NO: 1987229 - DNA, 25 bp, Homo sapien
ggtatctctcgccttcaattgagac

SEQ ID NO: 1987230 - DNA, 25 bp, Homo sapien
ggaattctgatactcatgatagaag

SEQ ID NO: 1987231 - DNA, 25 bp, Homo sapien
taggtcccgtgaaatcattgtgttg

SEQ ID NO: 1987232 - DNA, 25 bp, Homo sapien
cttggagggtccagtaggtcccgtg

SEQ ID NO: 1987233 - DNA, 25 bp, Homo sapien
tgtgttgattgcgaaaacaaattcc

SEQ ID NO: 1987234 - DNA, 25 bp, Homo sapien
cctagcgaggctacactaaaggcaa

SEQ ID NO: 1987235 - DNA, 25 bp, Homo sapien
gggaattatatccagacatctttcc

SEQ ID NO: 1987236 - DNA, 25 bp, Homo sapien
ggcaatacgctgttttactggttct

SEQ ID NO: 1987237 - DNA, 25 bp, Homo sapien
cagacatctttcctagcgaggctac

SEQ ID NO: 1987238 - DNA, 25 bp, Homo sapien
ctacgaattgtcaaggcgaattgcc

SEQ ID NO: 1987239 - DNA, 25 bp, Homo sapien
tcttcaatccgacatctagtaagga

SEQ ID NO: 1987240 - DNA, 25 bp, Homo sapien
tcaaggcgaattgccttctttgtat

SEQ ID NO: 1987241 - DNA, 25 bp, Homo sapien
ctagtaaggaatcgacttacaaact

SEQ ID NO: 1987242 - DNA, 25 bp, Homo sapien
gggctcatgtcttcaagaaagatcc

SEQ ID NO: 1987243 - DNA, 25 bp, Homo sapien
gaaagggcaggaaaactttcagatc

SEQ ID NO: 1987244 - DNA, 25 bp, Homo sapien
tcttcaagaaagatccaggaaaggg

SEQ ID NO: 1987245 - DNA, 25 bp, Homo sapien
aagaaagatccaggaaagggcagga

SEQ ID NO: 1987246 - DNA, 25 bp, Homo sapien
ctggctgtagttcttggaaaggcca

SEQ ID NO: 1987247 - DNA, 25 bp, Homo sapien
gccaatgaatgcgacatgcaggcat

SEQ ID NO: 1987248 - DNA, 25 bp, Homo sapien
gctgtagttcttggaaaggccaatg

SEQ ID NO: 1987249 - DNA, 25 bp, Homo sapien
ggaaaggccaatgaatgcgacatgc

SEQ ID NO: 1987250 - DNA, 25 bp, Homo sapien
gatgccagataaggagcctgctttc

SEQ ID NO: 1987251 - DNA, 25 bp, Homo sapien
gctcagatgccagataaggagcctg

SEQ ID NO: 1987252 - DNA, 25 bp, Homo sapien
catggtactcaagcaagctcagatg

SEQ ID NO: 1987253 - DNA, 25 bp, Homo sapien
atactcccatggcatggtactcaag

SEQ ID NO: 1987254 - DNA, 25 bp, Homo sapien
gcctcatggcaaagcgagctatcct

SEQ ID NO: 1987255 - DNA, 25 bp, Homo sapien
ctcaaatttgaatgcctcatggcaa

SEQ ID NO: 1987256 - DNA, 25 bp, Homo sapien
tcatggcaaagcgagctatcctttt

SEQ ID NO: 1987257 - DNA, 25 bp, Homo sapien
gcaaagcgagctatccttttcccag

SEQ ID NO: 1987258 - DNA, 25 bp, Homo sapien
cgtttggggtttatgaggagagact

SEQ ID NO: 1987259 - DNA, 25 bp, Homo sapien
tttggggtttatgaggagagacttc

SEQ ID NO: 1987260 - DNA, 25 bp, Homo sapien
aggcgtttggggtttatgaggagag

SEQ ID NO: 1987261 - DNA, 25 bp, Homo sapien
gcgtttggggtttatgaggagagac

SEQ ID NO: 1987262 - DNA, 25 bp, Homo sapien
gtttcacaaagtttgcgtgttatcc

SEQ ID NO: 1987263 - DNA, 25 bp, Homo sapien
cacaaagtttgcgtgttatccctgt

SEQ ID NO: 1987264 - DNA, 25 bp, Homo sapien
aaatgtttcacaaagtttgcgtgtt

SEQ ID NO: 1987265 - DNA, 25 bp, Homo sapien
aaagtttgcgtgttatccctgtgca

SEQ ID NO: 1987266 - DNA, 25 bp, Homo sapien
gatgctctgagaacacgggagactt

SEQ ID NO: 1987267 - DNA, 25 bp, Homo sapien
ttcgagtctacggaaacctgccgcc

SEQ ID NO: 1987268 - DNA, 25 bp, Homo sapien
tgccgcccaggacgaaatcctctag

SEQ ID NO: 1987269 - DNA, 25 bp, Homo sapien
gtttcattccgcacgcccagaaagg

SEQ ID NO: 1987270 - DNA, 25 bp, Homo sapien
caagcggtccacccccgccagccac

SEQ ID NO: 1987271 - DNA, 25 bp, Homo sapien
ccaagcggtccacccccgccagcca

SEQ ID NO: 1987272 - DNA, 25 bp, Homo sapien
gcggtccacccccgccagccaccca

SEQ ID NO: 1987273 - DNA, 25 bp, Homo sapien
gattgttggaattctgagtcgcgct

SEQ ID NO: 1987274 - DNA, 25 bp, Homo sapien
gattcacgcttctccccaggtggtg

SEQ ID NO: 1987275 - DNA, 25 bp, Homo sapien
cgcggctcagatcaatgctgcgggt

SEQ ID NO: 1987276 - DNA, 25 bp, Homo sapien
aaacgtgtgtttgcgggtcgactct

SEQ ID NO: 1987277 - DNA, 25 bp, Homo sapien
ccggcgctccgtgcgcggagccgtc

SEQ ID NO: 1987278 - DNA, 25 bp, Homo sapien
gccccggcgctccgtgcgcggagcc

SEQ ID NO: 1987279 - DNA, 25 bp, Homo sapien
cccggcgctccgtgcgcggagccgt

SEQ ID NO: 1987280 - DNA, 25 bp, Homo sapien
ggcgctccgtgcgcggagccgtctg

SEQ ID NO: 1987281 - DNA, 25 bp, Homo sapien
ctgcacctcggcaggtctcgctctc

SEQ ID NO: 1987282 - DNA, 25 bp, Homo sapien
acctcggcaggtctcgctctcggca

SEQ ID NO: 1987283 - DNA, 25 bp, Homo sapien
cctcggcaggtctcgctctcggcac

SEQ ID NO: 1987284 - DNA, 25 bp, Homo sapien
gcacctcggcaggtctcgctctcgg

SEQ ID NO: 1987285 - DNA, 25 bp, Homo sapien
aattgttgtttcaggcattatgcag

SEQ ID NO: 1987286 - DNA, 25 bp, Homo sapien
catcgttgttaattacatgtggccc

SEQ ID NO: 1987287 - DNA, 25 bp, Homo sapien
caggcattatgcagtcatcgttgtt

SEQ ID NO: 1987288 - DNA, 25 bp, Homo sapien
ttaattacatgtggcccgataacac

SEQ ID NO: 1987289 - DNA, 25 bp, Homo sapien
tcaggtggggtaacaggtaatgctc

SEQ ID NO: 1987290 - DNA, 25 bp, Homo sapien
tccagaaggcagcaactgtttggca

SEQ ID NO: 1987291 - DNA, 25 bp, Homo sapien
cagcaggtggaacaagtgactgtcc

SEQ ID NO: 1987292 - DNA, 25 bp, Homo sapien
tagaactagaaaggtcaacagcagg

SEQ ID NO: 1987293 - DNA, 25 bp, Homo sapien
tgaaaattatgtttgcgactgtcac

SEQ ID NO: 1987294 - DNA, 25 bp, Homo sapien
taggtacctggctaagatcagactg

SEQ ID NO: 1987295 - DNA, 25 bp, Homo sapien
gatcagactgcatattgcctaaaga

SEQ ID NO: 1987296 - DNA, 25 bp, Homo sapien
taattgcacgaacctacttgtagcc

SEQ ID NO: 1987297 - DNA, 25 bp, Homo sapien
catgagagtcatacagagcggtcca

SEQ ID NO: 1987298 - DNA, 25 bp, Homo sapien
ttcctagggccattgtaagtcactt

SEQ ID NO: 1987299 - DNA, 25 bp, Homo sapien
tttcctagggccattgtaagtcact

SEQ ID NO: 1987300 - DNA, 25 bp, Homo sapien
tgagagtcatacagagcggtccacc

SEQ ID NO: 1987301 - DNA, 25 bp, Homo sapien
tctgtgttaacaacaagaatggtgt

SEQ ID NO: 1987302 - DNA, 25 bp, Homo sapien
agttctgtaatgcaaggatgcagtt

SEQ ID NO: 1987303 - DNA, 25 bp, Homo sapien
ttttgccattgaaactgtagaacta

SEQ ID NO: 1987304 - DNA, 25 bp, Homo sapien
taaaatatagggatcttgaaggctc

SEQ ID NO: 1987305 - DNA, 25 bp, Homo sapien
tcaggaatcaaaaacggaggtcagg

SEQ ID NO: 1987306 - DNA, 25 bp, Homo sapien
ccatagttgggtatgcaggattcac

SEQ ID NO: 1987307 - DNA, 25 bp, Homo sapien
aactgtgggcgcttctgctcaggga

SEQ ID NO: 1987308 - DNA, 25 bp, Homo sapien
gacaactgcagatacacttactcgg

SEQ ID NO: 1987309 - DNA, 25 bp, Homo sapien
actgcaataagactgctggttattt

SEQ ID NO: 1987310 - DNA, 25 bp, Homo sapien
ctgctgtggacagttacactttcct

SEQ ID NO: 1987311 - DNA, 25 bp, Homo sapien
tatttcaatatcttaaacatgagag

SEQ ID NO: 1987312 - DNA, 25 bp, Homo sapien
catcaaactgtcctaaagcccaact

SEQ ID NO: 1987313 - DNA, 25 bp, Homo sapien
ttctaggccccaggattcttggcta

SEQ ID NO: 1987314 - DNA, 25 bp, Homo sapien
tgttgtttcctaactgatgtcctgt

SEQ ID NO: 1987315 - DNA, 25 bp, Homo sapien
ttcctaactgatgtcctgtcctcca

SEQ ID NO: 1987316 - DNA, 25 bp, Homo sapien
gccccaggattcttggctaaacatc

SEQ ID NO: 1987317 - DNA, 25 bp, Homo sapien
tgagtgaaataaaacgaatataaga

SEQ ID NO: 1987318 - DNA, 25 bp, Homo sapien
aagaaaaaggcatatgaattgtatc

SEQ ID NO: 1987319 - DNA, 25 bp, Homo sapien
ctagtgaggatgacctttgagtgaa

SEQ ID NO: 1987320 - DNA, 25 bp, Homo sapien
tgaattgtatctccataaagttggt

SEQ ID NO: 1987321 - DNA, 25 bp, Homo sapien
gagggggcattgagttgaagtagag

SEQ ID NO: 1987322 - DNA, 25 bp, Homo sapien
ttcccacatgggaaagtcggggaca

SEQ ID NO: 1987323 - DNA, 25 bp, Homo sapien
tgcacatggaagattcaagtgcttt

SEQ ID NO: 1987324 - DNA, 25 bp, Homo sapien
cacatgggaaagtcggggacagctc

SEQ ID NO: 1987325 - DNA, 25 bp, Homo sapien
tgtgcacatggaagattcaagtgct

SEQ ID NO: 1987326 - DNA, 25 bp, Homo sapien
aatatgcattttgatcatcagctgt

SEQ ID NO: 1987327 - DNA, 25 bp, Homo sapien
tgcattttgatcatcagctgttaaa

SEQ ID NO: 1987328 - DNA, 25 bp, Homo sapien
ttttgatcatcagctgttaaaattt

SEQ ID NO: 1987329 - DNA, 25 bp, Homo sapien
cattttgatcatcagctgttaaaat

SEQ ID NO: 1987330 - DNA, 25 bp, Homo sapien
tactggcagatatgcgtacacggac

SEQ ID NO: 1987331 - DNA, 25 bp, Homo sapien
tcggcttggcgaagtaagttccact

SEQ ID NO: 1987332 - DNA, 25 bp, Homo sapien
tagggctgtcacaacaaactgagtg

SEQ ID NO: 1987333 - DNA, 25 bp, Homo sapien
actgattatattcgcttagggaccc

SEQ ID NO: 1987334 - DNA, 25 bp, Homo sapien
atagtaaactcaaatgttctgttct

SEQ ID NO: 1987335 - DNA, 25 bp, Homo sapien
tttgaagcgtaatatatagtaaact

SEQ ID NO: 1987336 - DNA, 25 bp, Homo sapien
cttgacacttgttaccgaaaactat

SEQ ID NO: 1987337 - DNA, 25 bp, Homo sapien
catgatgaaccttgacacttgttac

SEQ ID NO: 1987338 - DNA, 25 bp, Homo sapien
tgataaagtcatactctgatgggtg

SEQ ID NO: 1987339 - DNA, 25 bp, Homo sapien
agtcatactctgatgggtgatcatc

SEQ ID NO: 1987340 - DNA, 25 bp, Homo sapien
taaagtcatactctgatgggtgatc

SEQ ID NO: 1987341 - DNA, 25 bp, Homo sapien
aaagtcatactctgatgggtgatca

SEQ ID NO: 1987342 - DNA, 25 bp, Homo sapien
cagttgactgtgtttcgcttgagca

SEQ ID NO: 1987343 - DNA, 25 bp, Homo sapien
gagtgacaccggagcagttgactgt

SEQ ID NO: 1987344 - DNA, 25 bp, Homo sapien
tcaggccacttgaggagcgagtgac

SEQ ID NO: 1987345 - DNA, 25 bp, Homo sapien
cttgagcaagcacaagcaaggttgc

SEQ ID NO: 1987346 - DNA, 25 bp, Homo sapien
tattctctttacaatcagactaaag

SEQ ID NO: 1987347 - DNA, 25 bp, Homo sapien
tacaatcagactaaagcacacttca

SEQ ID NO: 1987348 - DNA, 25 bp, Homo sapien
ttctctttacaatcagactaaagca

SEQ ID NO: 1987349 - DNA, 25 bp, Homo sapien
cagactaaagcacacttcatcaagc

SEQ ID NO: 1987350 - DNA, 25 bp, Homo sapien
ggtgcctttatctgtaacaagggcc

SEQ ID NO: 1987351 - DNA, 25 bp, Homo sapien
gcttgtggtgcctttatctgtaaca

SEQ ID NO: 1987352 - DNA, 25 bp, Homo sapien
ttatctgtaacaagggccacagcat

SEQ ID NO: 1987353 - DNA, 25 bp, Homo sapien
gcctttatctgtaacaagggccaca

SEQ ID NO: 1987354 - DNA, 25 bp, Homo sapien
tctatggctgttgtcaggactgctt

SEQ ID NO: 1987355 - DNA, 25 bp, Homo sapien
ctaggctaataagcacctcttttct

SEQ ID NO: 1987356 - DNA, 25 bp, Homo sapien
ttttgtctatggctgttgtcaggac

SEQ ID NO: 1987357 - DNA, 25 bp, Homo sapien
tgttgtcaggactgctttacttcct

SEQ ID NO: 1987358 - DNA, 25 bp, Homo sapien
tactggtctggcttatagattgtca

SEQ ID NO: 1987359 - DNA, 25 bp, Homo sapien
taggaacatggcagtgacagatgac

SEQ ID NO: 1987360 - DNA, 25 bp, Homo sapien
gctgttgcagagttaaagactataa

SEQ ID NO: 1987361 - DNA, 25 bp, Homo sapien
gactataaagaggttgtcacatttc

SEQ ID NO: 1987362 - DNA, 25 bp, Homo sapien
tccgttctctgttcgttttggcaaa

SEQ ID NO: 1987363 - DNA, 25 bp, Homo sapien
actaagagtttactttgcatccatg

SEQ ID NO: 1987364 - DNA, 25 bp, Homo sapien
gggtagttctgctttgcctctccgt

SEQ ID NO: 1987365 - DNA, 25 bp, Homo sapien
caagcctgttctacccatgggcaaa

SEQ ID NO: 1987366 - DNA, 25 bp, Homo sapien
gaaggtgatacatatcgccgatatt

SEQ ID NO: 1987367 - DNA, 25 bp, Homo sapien
caggtgtaacatattatctcaaggt

SEQ ID NO: 1987368 - DNA, 25 bp, Homo sapien
gatatttatgttctaggccaccagc

SEQ ID NO: 1987369 - DNA, 25 bp, Homo sapien
tttgatcacaacatagccagcatta

SEQ ID NO: 1987370 - DNA, 25 bp, Homo sapien
ttactgaatgttttcagtggcaggc

SEQ ID NO: 1987371 - DNA, 25 bp, Homo sapien
tactgaatgttttcagtggcaggct

SEQ ID NO: 1987372 - DNA, 25 bp, Homo sapien
tttactgaatgttttcagtggcagg

SEQ ID NO: 1987373 - DNA, 25 bp, Homo sapien
ctttactgaatgttttcagtggcag

SEQ ID NO: 1987374 - DNA, 25 bp, Homo sapien
cctccagctgaaaagcgactcttga

SEQ ID NO: 1987375 - DNA, 25 bp, Homo sapien
tccagctgaaaagcgactcttgatg

SEQ ID NO: 1987376 - DNA, 25 bp, Homo sapien
cagctgaaaagcgactcttgatggg

SEQ ID NO: 1987377 - DNA, 25 bp, Homo sapien
gctgaaaagcgactcttgatggggc

SEQ ID NO: 1987378 - DNA, 25 bp, Homo sapien
tgaaggtacgtataaccagtctgga

SEQ ID NO: 1987379 - DNA, 25 bp, Homo sapien
gtacgtataaccagtctggatcccc

SEQ ID NO: 1987380 - DNA, 25 bp, Homo sapien
aagatcatcattgctcccaggtaaa

SEQ ID NO: 1987381 - DNA, 25 bp, Homo sapien
gaaggactgaaggtacgtataacca

SEQ ID NO: 1987382 - DNA, 25 bp, Homo sapien
ttctcccactcagctggtgtctgat

SEQ ID NO: 1987383 - DNA, 25 bp, Homo sapien
catccaagaccaagggagttttgtt

SEQ ID NO: 1987384 - DNA, 25 bp, Homo sapien
tctcccactcagctggtgtctgatt

SEQ ID NO: 1987385 - DNA, 25 bp, Homo sapien
attgcaactactctgaagaaactcc

SEQ ID NO: 1987386 - DNA, 25 bp, Homo sapien
gcattgcaactactctgaagaaact

SEQ ID NO: 1987387 - DNA, 25 bp, Homo sapien
cagcattgcaactactctgaagaaa

SEQ ID NO: 1987388 - DNA, 25 bp, Homo sapien
acagcattgcaactactctgaagaa

SEQ ID NO: 1987389 - DNA, 25 bp, Homo sapien
ctggattcggaattcactgttaact

SEQ ID NO: 1987390 - DNA, 25 bp, Homo sapien
ttcaccttcacgacaggctgctgcg

SEQ ID NO: 1987391 - DNA, 25 bp, Homo sapien
tttggcgattgggttcctctttgag

SEQ ID NO: 1987392 - DNA, 25 bp, Homo sapien
ggctgctgcgaacttgatccattca

SEQ ID NO: 1987393 - DNA, 25 bp, Homo sapien
cattcacgtttctgccttcggattg

SEQ ID NO: 1987394 - DNA, 25 bp, Homo sapien
tccagagatgcggtatgtaacttgc

SEQ ID NO: 1987395 - DNA, 25 bp, Homo sapien
taatgacaaagatcccatatggtgg

SEQ ID NO: 1987396 - DNA, 25 bp, Homo sapien
gagtgacctctcgatcaactatgga

SEQ ID NO: 1987397 - DNA, 25 bp, Homo sapien
tggtttgcagcacaatctgagtgaa

SEQ ID NO: 1987398 - DNA, 25 bp, Homo sapien
ttgagttcagagctcggcagtagat

SEQ ID NO: 1987399 - DNA, 25 bp, Homo sapien
aatcttggcccattgagttcagagc

SEQ ID NO: 1987400 - DNA, 25 bp, Homo sapien
cctctctaaatcttggcccattgag

SEQ ID NO: 1987401 - DNA, 25 bp, Homo sapien
ggcccattgagttcagagctcggca

SEQ ID NO: 1987402 - DNA, 25 bp, Homo sapien
ggttcttgtcttataatcttgaagg

SEQ ID NO: 1987403 - DNA, 25 bp, Homo sapien
gagttcaaattgttcggttcatctg

SEQ ID NO: 1987404 - DNA, 25 bp, Homo sapien
tcatcgttcgaatttctccagtatt

SEQ ID NO: 1987405 - DNA, 25 bp, Homo sapien
tctgcgtcagtagcattgagtatca

SEQ ID NO: 1987406 - DNA, 25 bp, Homo sapien
tatcacacttgacgtagacagcctt

SEQ ID NO: 1987407 - DNA, 25 bp, Homo sapien
aaatacatattacaggcaatatcac

SEQ ID NO: 1987408 - DNA, 25 bp, Homo sapien
tattacaggcaatatcacacttgac

SEQ ID NO: 1987409 - DNA, 25 bp, Homo sapien
ttgacgtagacagcctttactttgt

SEQ ID NO: 1987410 - DNA, 25 bp, Homo sapien
gacatcgaggattttaatgttgcac

SEQ ID NO: 1987411 - DNA, 25 bp, Homo sapien
tcacattccgctgacatgccatctg

SEQ ID NO: 1987412 - DNA, 25 bp, Homo sapien
tgaagactgttccatgtaagggata

SEQ ID NO: 1987413 - DNA, 25 bp, Homo sapien
gccatctcggtcagagcctcttaca

SEQ ID NO: 1987414 - DNA, 25 bp, Homo sapien
tatttagaaaagatatctgtggttt

SEQ ID NO: 1987415 - DNA, 25 bp, Homo sapien
tctacatttgggttgtatgtcaata

SEQ ID NO: 1987416 - DNA, 25 bp, Homo sapien
gagaactacagtaggcttatactgg

SEQ ID NO: 1987417 - DNA, 25 bp, Homo sapien
ctgtaagcagaattgttcgtatatg

SEQ ID NO: 1987418 - DNA, 25 bp, Homo sapien
tcaattactctaatctcgagcaaat

SEQ ID NO: 1987419 - DNA, 25 bp, Homo sapien
tactgccatccagttagctgagaac

SEQ ID NO: 1987420 - DNA, 25 bp, Homo sapien
tactctaatctcgagcaaatttgaa

SEQ ID NO: 1987421 - DNA, 25 bp, Homo sapien
aagaaaattactgccatccagttag

SEQ ID NO: 1987422 - DNA, 25 bp, Homo sapien
tctgcatagcttcataatctaaggg

SEQ ID NO: 1987423 - DNA, 25 bp, Homo sapien
tgacaccaatactgagttgcagact

SEQ ID NO: 1987424 - DNA, 25 bp, Homo sapien
catttgatcccatattaccagttac

SEQ ID NO: 1987425 - DNA, 25 bp, Homo sapien
tttgaacctggacgaaacactgggc

SEQ ID NO: 1987426 - DNA, 25 bp, Homo sapien
ctaacagtcgttgaaggtctacctg

SEQ ID NO: 1987427 - DNA, 25 bp, Homo sapien
cagtcgttgaaggtctacctgtgtc

SEQ ID NO: 1987428 - DNA, 25 bp, Homo sapien
cgttgaaggtctacctgtgtccagg

SEQ ID NO: 1987429 - DNA, 25 bp, Homo sapien
tcgttgaaggtctacctgtgtccag

SEQ ID NO: 1987430 - DNA, 25 bp, Homo sapien
tcctccgagcatattgtactgttcc

SEQ ID NO: 1987431 - DNA, 25 bp, Homo sapien
tcttgaatcaacagctagcaggtca

SEQ ID NO: 1987432 - DNA, 25 bp, Homo sapien
tctatagagagaatcgttccttggt

SEQ ID NO: 1987433 - DNA, 25 bp, Homo sapien
agcaggtcagctggattatttccca

SEQ ID NO: 1987434 - DNA, 25 bp, Homo sapien
catagttagtggaagaagtactttc

SEQ ID NO: 1987435 - DNA, 25 bp, Homo sapien
gaagaatatacttggctagagtcag

SEQ ID NO: 1987436 - DNA, 25 bp, Homo sapien
cggctctgtattagtcctgtcgtca

SEQ ID NO: 1987437 - DNA, 25 bp, Homo sapien
tgtaccagtgcaagttctttgaaga

SEQ ID NO: 1987438 - DNA, 25 bp, Homo sapien
aatgccagcaggaccaaaatgtaca

SEQ ID NO: 1987439 - DNA, 25 bp, Homo sapien
caatgccagcaggaccaaaatgtac

SEQ ID NO: 1987440 - DNA, 25 bp, Homo sapien
gtccaatgccagcaggaccaaaatg

SEQ ID NO: 1987441 - DNA, 25 bp, Homo sapien
ggagtccaatgccagcaggaccaaa

SEQ ID NO: 1987442 - DNA, 25 bp, Homo sapien
aaagccagctgcactacgaggagca

SEQ ID NO: 1987443 - DNA, 25 bp, Homo sapien
tccatctgaacattcgggaacaggc

SEQ ID NO: 1987444 - DNA, 25 bp, Homo sapien
ggtccttctactgcccatgaatgaa

SEQ ID NO: 1987445 - DNA, 25 bp, Homo sapien
gagcacctccacaatcacaacagat

SEQ ID NO: 1987446 - DNA, 25 bp, Homo sapien
tctccattagctttctcagcacaaa

SEQ ID NO: 1987447 - DNA, 25 bp, Homo sapien
tagactgtgagtgatggcggccatc

SEQ ID NO: 1987448 - DNA, 25 bp, Homo sapien
aaatcttccctggttacttccatct

SEQ ID NO: 1987449 - DNA, 25 bp, Homo sapien
cagcacaaaaaacagcatagactgt

SEQ ID NO: 1987450 - DNA, 25 bp, Homo sapien
ttgcgttatcaggtggtatttgtgg

SEQ ID NO: 1987451 - DNA, 25 bp, Homo sapien
tatatttgcgttatcaggtggtatt

SEQ ID NO: 1987452 - DNA, 25 bp, Homo sapien
tgcattcaattatatttgcgttatc

SEQ ID NO: 1987453 - DNA, 25 bp, Homo sapien
tcaattatatttgcgttatcaggtg

SEQ ID NO: 1987454 - DNA, 25 bp, Homo sapien
taactccctctgttagttcaaatcc

SEQ ID NO: 1987455 - DNA, 25 bp, Homo sapien
ctgacagaagtagctttccatgaaa

SEQ ID NO: 1987456 - DNA, 25 bp, Homo sapien
tcttcttaatgttccagagtattct

SEQ ID NO: 1987457 - DNA, 25 bp, Homo sapien
tctgccaccatactcatttgtataa

SEQ ID NO: 1987458 - DNA, 25 bp, Homo sapien
cagtgacattaccatagcccagagg

SEQ ID NO: 1987459 - DNA, 25 bp, Homo sapien
taggtcccagggtatccaagaagct

SEQ ID NO: 1987460 - DNA, 25 bp, Homo sapien
ttaggatgcagtacaccaggtcccg

SEQ ID NO: 1987461 - DNA, 25 bp, Homo sapien
acaacgggctctgtttcctgaggaa

SEQ ID NO: 1987462 - DNA, 25 bp, Homo sapien
tccatgcaaatcagcgccagagatt

SEQ ID NO: 1987463 - DNA, 25 bp, Homo sapien
gcaaatcagcgccagagattgggcc

SEQ ID NO: 1987464 - DNA, 25 bp, Homo sapien
aatcagcgccagagattgggccgac

SEQ ID NO: 1987465 - DNA, 25 bp, Homo sapien
tcagcgccagagattgggccgacca

SEQ ID NO: 1987466 - DNA, 25 bp, Homo sapien
tataacattcgacccatctcgcaag

SEQ ID NO: 1987467 - DNA, 25 bp, Homo sapien
tcagactacctatcatgccggaagt

SEQ ID NO: 1987468 - DNA, 25 bp, Homo sapien
gactagagcttggtgctattaccct

SEQ ID NO: 1987469 - DNA, 25 bp, Homo sapien
cattgtgggcattggctaactcggg

SEQ ID NO: 1987470 - DNA, 25 bp, Homo sapien
acttatgccagctccactcagggca

SEQ ID NO: 1987471 - DNA, 25 bp, Homo sapien
accgctgatcccagtggtgccacta

SEQ ID NO: 1987472 - DNA, 25 bp, Homo sapien
gggcaccgctcccagcacccatgct

SEQ ID NO: 1987473 - DNA, 25 bp, Homo sapien
ccaagctgctcaggccaatgccacc

SEQ ID NO: 1987474 - DNA, 25 bp, Homo sapien
aactcctcatgtggccaatgctggc

SEQ ID NO: 1987475 - DNA, 25 bp, Homo sapien
tttgtgattcgacttcgagctgtgc

SEQ ID NO: 1987476 - DNA, 25 bp, Homo sapien
gattcgacttcgagctgtgctaggg

SEQ ID NO: 1987477 - DNA, 25 bp, Homo sapien
atggtcagaggaactcctcatgtgg

SEQ ID NO: 1987478 - DNA, 25 bp, Homo sapien
acttgctatattgcacggtactata

SEQ ID NO: 1987479 - DNA, 25 bp, Homo sapien
cttgctatattgcacggtactatac

SEQ ID NO: 1987480 - DNA, 25 bp, Homo sapien
agatggactacaggccactcaggca

SEQ ID NO: 1987481 - DNA, 25 bp, Homo sapien
tatgaatgctaaggagagctctccc

SEQ ID NO: 1987482 - DNA, 25 bp, Homo sapien
cagggcatctggcacacattttaga

SEQ ID NO: 1987483 - DNA, 25 bp, Homo sapien
tcctagatgacctgagcacgaagtt

SEQ ID NO: 1987484 - DNA, 25 bp, Homo sapien
tcaccagtaagcaatattcgtcaag

SEQ ID NO: 1987485 - DNA, 25 bp, Homo sapien
gcttgatggcttgtggacttgacta

SEQ ID NO: 1987486 - DNA, 25 bp, Homo sapien
taaaggttcctggttgattcctgca

SEQ ID NO: 1987487 - DNA, 25 bp, Homo sapien
gaagaaacctcatcctattgccact

SEQ ID NO: 1987488 - DNA, 25 bp, Homo sapien
gaaagattacccatccttaatgtgg

SEQ ID NO: 1987489 - DNA, 25 bp, Homo sapien
tatcagatgtcttaagaaaagcttg

SEQ ID NO: 1987490 - DNA, 25 bp, Homo sapien
cagagcaaaatagctctaggttcag

SEQ ID NO: 1987491 - DNA, 25 bp, Homo sapien
tgtggtcagctaccattccctttaa

SEQ ID NO: 1987492 - DNA, 25 bp, Homo sapien
cagagagtaggttcctcagtacaca

SEQ ID NO: 1987493 - DNA, 25 bp, Homo sapien
gggctaaccacctggtcaaggctgg

SEQ ID NO: 1987494 - DNA, 25 bp, Homo sapien
gataaccaagcaagaaactagcacc

SEQ ID NO: 1987495 - DNA, 25 bp, Homo sapien
tgtgttaaacaccaccagagatgaa

SEQ ID NO: 1987496 - DNA, 25 bp, Homo sapien
gagtgaataccatttgcaaaagcca

SEQ ID NO: 1987497 - DNA, 25 bp, Homo sapien
aaggatgctgccatataaaagtgag

SEQ ID NO: 1987498 - DNA, 25 bp, Homo sapien
cactgcttggtataactatttggaa

SEQ ID NO: 1987499 - DNA, 25 bp, Homo sapien
actccacgaggagaaggactttatc

SEQ ID NO: 1987500 - DNA, 25 bp, Homo sapien
tatgctttgagacacccttttagga

SEQ ID NO: 1987501 - DNA, 25 bp, Homo sapien
agaaagatatgctttgagacaccct

SEQ ID NO: 1987502 - DNA, 25 bp, Homo sapien
agatatgctttgagacaccctttta

SEQ ID NO: 1987503 - DNA, 25 bp, Homo sapien
acacccttttaggagggcatgggtg

SEQ ID NO: 1987504 - DNA, 25 bp, Homo sapien
atcctgtgagattcaatttgagccc

SEQ ID NO: 1987505 - DNA, 25 bp, Homo sapien
tcaatttgagccctcgtcttctcag

SEQ ID NO: 1987506 - DNA, 25 bp, Homo sapien
gggtttctcttgcacgcaaatcctg

SEQ ID NO: 1987507 - DNA, 25 bp, Homo sapien
cgtcttctcagttccgaattctgct

SEQ ID NO: 1987508 - DNA, 25 bp, Homo sapien
caaaaggcaaatgtttctgaagaag

SEQ ID NO: 1987509 - DNA, 25 bp, Homo sapien
tgtttctgaagaagagccaatccat

SEQ ID NO: 1987510 - DNA, 25 bp, Homo sapien
gaatgatcaaaaggcaaatgtttct

SEQ ID NO: 1987511 - DNA, 25 bp, Homo sapien
cattagaatgatcaaaaggcaaatg

SEQ ID NO: 1987512 - DNA, 25 bp, Homo sapien
tatctctttctagggtaggatattt

SEQ ID NO: 1987513 - DNA, 25 bp, Homo sapien
cctcccagaattggcaatagtttgt

SEQ ID NO: 1987514 - DNA, 25 bp, Homo sapien
caatagtttgttgattggccaactg

SEQ ID NO: 1987515 - DNA, 25 bp, Homo sapien
tggccaactggaactttgttcttct

SEQ ID NO: 1987516 - DNA, 25 bp, Homo sapien
tcggctcccgcactgctcttgaagt

SEQ ID NO: 1987517 - DNA, 25 bp, Homo sapien
gccctttggcagtgttcggctcccg

SEQ ID NO: 1987518 - DNA, 25 bp, Homo sapien
cactgttgtcacgttcccttttgag

SEQ ID NO: 1987519 - DNA, 25 bp, Homo sapien
tcactgtgcctcttggacaatgacg

SEQ ID NO: 1987520 - DNA, 25 bp, Homo sapien
tagccagtcagaactttgtttacag

SEQ ID NO: 1987521 - DNA, 25 bp, Homo sapien
gagatgtagctgacacaaagtacct

SEQ ID NO: 1987522 - DNA, 25 bp, Homo sapien
gaactttgtttacagtgctctttgc

SEQ ID NO: 1987523 - DNA, 25 bp, Homo sapien
cttttgctggttagccagtcagaac

SEQ ID NO: 1987524 - DNA, 25 bp, Homo sapien
gtttggaagtcatccgcatatgtag

SEQ ID NO: 1987525 - DNA, 25 bp, Homo sapien
cgcatatgtaggaccaacttattaa

SEQ ID NO: 1987526 - DNA, 25 bp, Homo sapien
ccttttgaagtaagtagtcagtttg

SEQ ID NO: 1987527 - DNA, 25 bp, Homo sapien
aagtaagtagtcagtttggaagtca

SEQ ID NO: 1987528 - DNA, 25 bp, Homo sapien
gaacaaggagcttgacctgcaagtg

SEQ ID NO: 1987529 - DNA, 25 bp, Homo sapien
ctgcaagtggctgtgagcaatcagt

SEQ ID NO: 1987530 - DNA, 25 bp, Homo sapien
acaaggagcttgacctgcaagtggc

SEQ ID NO: 1987531 - DNA, 25 bp, Homo sapien
aaggagcttgacctgcaagtggctg

SEQ ID NO: 1987532 - DNA, 25 bp, Homo sapien
ctcaacaataaattcactgtttact

SEQ ID NO: 1987533 - DNA, 25 bp, Homo sapien
caacaataaattcactgtttacttc

SEQ ID NO: 1987534 - DNA, 25 bp, Homo sapien
aaattcactgtttacttccatcacc

SEQ ID NO: 1987535 - DNA, 25 bp, Homo sapien
attcactgtttacttccatcaccac

SEQ ID NO: 1987536 - DNA, 25 bp, Homo sapien
tctccttctcgacaggctgcggcaa

SEQ ID NO: 1987537 - DNA, 25 bp, Homo sapien
acaggctgcggcaaacttgatccac

SEQ ID NO: 1987538 - DNA, 25 bp, Homo sapien
tgtcctctccttctcgacaggctgc

SEQ ID NO: 1987539 - DNA, 25 bp, Homo sapien
aacttgatccactcccgcttttgtc

SEQ ID NO: 1987540 - DNA, 25 bp, Homo sapien
tctggttcgattcgcagtctgatcg

SEQ ID NO: 1987541 - DNA, 25 bp, Homo sapien
ccccagtgcgaggattaatggtgaa

SEQ ID NO: 1987542 - DNA, 25 bp, Homo sapien
tcaatccctactccagaaatccggt

SEQ ID NO: 1987543 - DNA, 25 bp, Homo sapien
ccatatggtggtcgatcaatcccta

SEQ ID NO: 1987544 - DNA, 25 bp, Homo sapien
tcaagaggcctttctaaatcttcac

SEQ ID NO: 1987545 - DNA, 25 bp, Homo sapien
cgtgaattcagagcccggcaataga

SEQ ID NO: 1987546 - DNA, 25 bp, Homo sapien
aactttgactctaagctcaagaggc

SEQ ID NO: 1987547 - DNA, 25 bp, Homo sapien
cactttgcgaaaagactggagcgtt

SEQ ID NO: 1987548 - DNA, 25 bp, Homo sapien
ggacatggtgcagacttctccagtg

SEQ ID NO: 1987549 - DNA, 25 bp, Homo sapien
tctccagtgtacctattcagaatga

SEQ ID NO: 1987550 - DNA, 25 bp, Homo sapien
cctgagagacgatcttgtaggcaat

SEQ ID NO: 1987551 - DNA, 25 bp, Homo sapien
ttcagaatgaacatgggtgcacctg

SEQ ID NO: 1987552 - DNA, 25 bp, Homo sapien
cacaaccaggttgtacatactgtgt

SEQ ID NO: 1987553 - DNA, 25 bp, Homo sapien
aaaccttgattctacagtcacactc

SEQ ID NO: 1987554 - DNA, 25 bp, Homo sapien
cacactcagaagacagtccatctgc

SEQ ID NO: 1987555 - DNA, 25 bp, Homo sapien
ttatcgttgacgtctaaaaccttga

SEQ ID NO: 1987556 - DNA, 25 bp, Homo sapien
gagagaattaaatattgagccaacc

SEQ ID NO: 1987557 - DNA, 25 bp, Homo sapien
caattctcttcaatactggctgagt

SEQ ID NO: 1987558 - DNA, 25 bp, Homo sapien
tgtggatctgtttgaatatcgaacc

SEQ ID NO: 1987559 - DNA, 25 bp, Homo sapien
tgcttgtaatcgtatcagttccgaa

SEQ ID NO: 1987560 - DNA, 25 bp, Homo sapien
aaaatattgcagatccttatactgt

SEQ ID NO: 1987561 - DNA, 25 bp, Homo sapien
aaatattgcagatccttatactgta

SEQ ID NO: 1987562 - DNA, 25 bp, Homo sapien
aatattgcagatccttatactgtac

SEQ ID NO: 1987563 - DNA, 25 bp, Homo sapien
gaaaatattgcagatccttatactg

SEQ ID NO: 1987564 - DNA, 25 bp, Homo sapien
cagaaggcacattacataagtcaga

SEQ ID NO: 1987565 - DNA, 25 bp, Homo sapien
gcacattacataagtcagatagtac

SEQ ID NO: 1987566 - DNA, 25 bp, Homo sapien
ttgttatcacagaaggcacattaca

SEQ ID NO: 1987567 - DNA, 25 bp, Homo sapien
tatcacagaaggcacattacataag

SEQ ID NO: 1987568 - DNA, 25 bp, Homo sapien
tttaactccgatactaagctgaatg

SEQ ID NO: 1987569 - DNA, 25 bp, Homo sapien
tctatggctgtatatgtgccaagca

SEQ ID NO: 1987570 - DNA, 25 bp, Homo sapien
gggtttcctgtgtccaaatctatgg

SEQ ID NO: 1987571 - DNA, 25 bp, Homo sapien
aagcaacggagtagtgaaaatcagc

SEQ ID NO: 1987572 - DNA, 25 bp, Homo sapien
ttacaaccaacatatattagcgcat

SEQ ID NO: 1987573 - DNA, 25 bp, Homo sapien
tagcgcatgctacatgaattaacac

SEQ ID NO: 1987574 - DNA, 25 bp, Homo sapien
acatgaattaacactggatagaacc

SEQ ID NO: 1987575 - DNA, 25 bp, Homo sapien
ctggatagaaccatagaacatgaag

SEQ ID NO: 1987576 - DNA, 25 bp, Homo sapien
ggcttgtgatatcctctgttcagtg

SEQ ID NO: 1987577 - DNA, 25 bp, Homo sapien
taaagtgcttgacctcactggaaga

SEQ ID NO: 1987578 - DNA, 25 bp, Homo sapien
gtgactatctggatcttgttacaga

SEQ ID NO: 1987579 - DNA, 25 bp, Homo sapien
ggaagaagatctggtctctaccagg

SEQ ID NO: 1987580 - DNA, 25 bp, Homo sapien
tctgctgtgtatatcccattgataa

SEQ ID NO: 1987581 - DNA, 25 bp, Homo sapien
ctctgctgtgtatatcccattgata

SEQ ID NO: 1987582 - DNA, 25 bp, Homo sapien
taaccagctgcctgcatcatgccct

SEQ ID NO: 1987583 - DNA, 25 bp, Homo sapien
tgcctgcatcatgccctatgatata

SEQ ID NO: 1987584 - DNA, 25 bp, Homo sapien
cacagaaagtaaacggagacccata

SEQ ID NO: 1987585 - DNA, 25 bp, Homo sapien
cacatgtcagctattcctggtggct

SEQ ID NO: 1987586 - DNA, 25 bp, Homo sapien
caatacatatggttcctgtagctgt

SEQ ID NO: 1987587 - DNA, 25 bp, Homo sapien
caataatcattgatatcaggaacct

SEQ ID NO: 1987588 - DNA, 25 bp, Homo sapien
caggcacatgtggttgtcatcgcaa

SEQ ID NO: 1987589 - DNA, 25 bp, Homo sapien
aatcagtagcaggatgcccagaacc

SEQ ID NO: 1987590 - DNA, 25 bp, Homo sapien
gaaactccagcttggtcttcagtga

SEQ ID NO: 1987591 - DNA, 25 bp, Homo sapien
gcttagccgtaaggattgccgaggt

SEQ ID NO: 1987592 - DNA, 25 bp, Homo sapien
tcaattctccaagactgcatcactc

SEQ ID NO: 1987593 - DNA, 25 bp, Homo sapien
gcacaggagcaaatcttgttcccag

SEQ ID NO: 1987594 - DNA, 25 bp, Homo sapien
tgtcctcgggatgggccccttcaat

SEQ ID NO: 1987595 - DNA, 25 bp, Homo sapien
tgtttgcagcaacacaggagcagca

SEQ ID NO: 1987596 - DNA, 25 bp, Homo sapien
gaatccatccgatcctgggtatttg

SEQ ID NO: 1987597 - DNA, 25 bp, Homo sapien
cagaggaatccatccgatcctgggt

SEQ ID NO: 1987598 - DNA, 25 bp, Homo sapien
ccatccgatcctgggtatttgaggc

SEQ ID NO: 1987599 - DNA, 25 bp, Homo sapien
cgatcctgggtatttgaggctgtca

SEQ ID NO: 1987600 - DNA, 25 bp, Homo sapien
tgttggtttaacagcgctggagttg

SEQ ID NO: 1987601 - DNA, 25 bp, Homo sapien
gcagcgcgcatctgcctaaaacgct

SEQ ID NO: 1987602 - DNA, 25 bp, Homo sapien
accacccggcaaggcgtaggcgcta

SEQ ID NO: 1987603 - DNA, 25 bp, Homo sapien
ccggcaaggcgtaggcgctaaaaag

SEQ ID NO: 1987604 - DNA, 25 bp, Homo sapien
cgtgcccccggctgcataggtgttg

SEQ ID NO: 1987605 - DNA, 25 bp, Homo sapien
gctgcataggtgttggtgtagattt

SEQ ID NO: 1987606 - DNA, 25 bp, Homo sapien
tgtgttgagctccactcccgataca

SEQ ID NO: 1987607 - DNA, 25 bp, Homo sapien
ccccggctgcataggtgttggtgta

SEQ ID NO: 1987608 - DNA, 25 bp, Homo sapien
ccatgaggccaacggctgtccccat

SEQ ID NO: 1987609 - DNA, 25 bp, Homo sapien
gcggccatgaggccaacggctgtcc

SEQ ID NO: 1987610 - DNA, 25 bp, Homo sapien
ggccatgaggccaacggctgtcccc

SEQ ID NO: 1987611 - DNA, 25 bp, Homo sapien
atgaggccaacggctgtccccatac

SEQ ID NO: 1987612 - DNA, 25 bp, Homo sapien
cgtcagcgtagtcccgcagggttcc

SEQ ID NO: 1987613 - DNA, 25 bp, Homo sapien
tgcgtcagcgtagtcccgcagggtt

SEQ ID NO: 1987614 - DNA, 25 bp, Homo sapien
cagcgtagtcccgcagggttcccat

SEQ ID NO: 1987615 - DNA, 25 bp, Homo sapien
ctgcgtcagcgtagtcccgcagggt

SEQ ID NO: 1987616 - DNA, 25 bp, Homo sapien
ccgagaagtagctgtccaagaaagc

SEQ ID NO: 1987617 - DNA, 25 bp, Homo sapien
aagtagctgtccaagaaagccatgt

SEQ ID NO: 1987618 - DNA, 25 bp, Homo sapien
ctgtccaagaaagccatgttgatgt

SEQ ID NO: 1987619 - DNA, 25 bp, Homo sapien
ctccgagaagtagctgtccaagaaa

SEQ ID NO: 1987620 - DNA, 25 bp, Homo sapien
caagcagtcattggctggtcgacct

SEQ ID NO: 1987621 - DNA, 25 bp, Homo sapien
ggaccacgggttcagatgctgccat

SEQ ID NO: 1987622 - DNA, 25 bp, Homo sapien
caataatatccccatggaccacggg

SEQ ID NO: 1987623 - DNA, 25 bp, Homo sapien
tagacaggtgccattactgcttcgg

SEQ ID NO: 1987624 - DNA, 25 bp, Homo sapien
tacaagattggttctacaggcctca

SEQ ID NO: 1987625 - DNA, 25 bp, Homo sapien
gattacaaggtgcaaggtctccaca

SEQ ID NO: 1987626 - DNA, 25 bp, Homo sapien
gaaagctctacgattcaggtcaatg

SEQ ID NO: 1987627 - DNA, 25 bp, Homo sapien
tgtatattcacagagccaagactag

SEQ ID NO: 1987628 - DNA, 25 bp, Homo sapien
aatagcctccattgtctattatgtc

SEQ ID NO: 1987629 - DNA, 25 bp, Homo sapien
aaagctatatcacatgatgctgagg

SEQ ID NO: 1987630 - DNA, 25 bp, Homo sapien
tagaatcaaggaatacatgcgcagg

SEQ ID NO: 1987631 - DNA, 25 bp, Homo sapien
gaccgaactcgtcacttaggtagtg

SEQ ID NO: 1987632 - DNA, 25 bp, Homo sapien
catcctgtccaagggataaaacaag

SEQ ID NO: 1987633 - DNA, 25 bp, Homo sapien
tctgagttaaaatgtcagttgtcac

SEQ ID NO: 1987634 - DNA, 25 bp, Homo sapien
gtcacagtaccttctttcttgccaa

SEQ ID NO: 1987635 - DNA, 25 bp, Homo sapien
cttccatcctgtccaagggataaaa

SEQ ID NO: 1987636 - DNA, 25 bp, Homo sapien
acggaaaccataattcccaagccag

SEQ ID NO: 1987637 - DNA, 25 bp, Homo sapien
tccacggaaaccataattcccaagc

SEQ ID NO: 1987638 - DNA, 25 bp, Homo sapien
aaccataattcccaagccagtgaga

SEQ ID NO: 1987639 - DNA, 25 bp, Homo sapien
caagccagtgagattatctgtggtc

SEQ ID NO: 1987640 - DNA, 25 bp, Homo sapien
gataagggactggtctacccttgca

SEQ ID NO: 1987641 - DNA, 25 bp, Homo sapien
ccagagggataagggactggtctac

SEQ ID NO: 1987642 - DNA, 25 bp, Homo sapien
tggtctacccttgcatggcctgcca

SEQ ID NO: 1987643 - DNA, 25 bp, Homo sapien
tggcctgccagtgttgaggacaaag

SEQ ID NO: 1987644 - DNA, 25 bp, Homo sapien
gcctgtcatgtcgtatagggaactg

SEQ ID NO: 1987645 - DNA, 25 bp, Homo sapien
tctaaaaagatcacggcttccactg

SEQ ID NO: 1987646 - DNA, 25 bp, Homo sapien
tgtccagtttgtccctcacttagca

SEQ ID NO: 1987647 - DNA, 25 bp, Homo sapien
tcatgtcgtatagggaactgcctga

SEQ ID NO: 1987648 - DNA, 25 bp, Homo sapien
ctgtacaggatgattgtagaaagca

SEQ ID NO: 1987649 - DNA, 25 bp, Homo sapien
gacaaatctcatcgtgctgtccgta

SEQ ID NO: 1987650 - DNA, 25 bp, Homo sapien
atcgtgctgtccgtaggcatttggg

SEQ ID NO: 1987651 - DNA, 25 bp, Homo sapien
gaaagcaacgacaaatctcatcgtg

SEQ ID NO: 1987652 - DNA, 25 bp, Homo sapien
tatattaagagcaaatgcagacttg

SEQ ID NO: 1987653 - DNA, 25 bp, Homo sapien
tgatgcaggctggttccatttcttg

SEQ ID NO: 1987654 - DNA, 25 bp, Homo sapien
tgaaataccatctagggattcttgg

SEQ ID NO: 1987655 - DNA, 25 bp, Homo sapien
cacaggttaaggatttcactggtaa

SEQ ID NO: 1987656 - DNA, 25 bp, Homo sapien
tgatttccctggtgaaaaagtccaa

SEQ ID NO: 1987657 - DNA, 25 bp, Homo sapien
cagccgtctgcagttgatgtctaag

SEQ ID NO: 1987658 - DNA, 25 bp, Homo sapien
cagttgatgtctaagaaaagccctc

SEQ ID NO: 1987659 - DNA, 25 bp, Homo sapien
aagtgagccgctgcttctatcctgc

SEQ ID NO: 1987660 - DNA, 25 bp, Homo sapien
tggccagagcccctgtagttctggg

SEQ ID NO: 1987661 - DNA, 25 bp, Homo sapien
acgaagatggccagagcccctgtag

SEQ ID NO: 1987662 - DNA, 25 bp, Homo sapien
ccagagcccctgtagttctggggaa

SEQ ID NO: 1987663 - DNA, 25 bp, Homo sapien
agagcccctgtagttctggggaaga

SEQ ID NO: 1987664 - DNA, 25 bp, Homo sapien
atttcaaagtgttgatttccactgc

SEQ ID NO: 1987665 - DNA, 25 bp, Homo sapien
cagggaagtttgtgattattaggaa

SEQ ID NO: 1987666 - DNA, 25 bp, Homo sapien
agaaggaaattggtaatcttcacga

SEQ ID NO: 1987667 - DNA, 25 bp, Homo sapien
actgcactccttttagaatttataa

SEQ ID NO: 1987668 - DNA, 25 bp, Homo sapien
tgattttaattctgcgattttttac

SEQ ID NO: 1987669 - DNA, 25 bp, Homo sapien
tgtcaggtatcaagcccaggcgtgt

SEQ ID NO: 1987670 - DNA, 25 bp, Homo sapien
caggcgtgtagagttcttagctata

SEQ ID NO: 1987671 - DNA, 25 bp, Homo sapien
acttttaaaagcgtgtcaggtatca

SEQ ID NO: 1987672 - DNA, 25 bp, Homo sapien
cattggcttggacataggggttatc

SEQ ID NO: 1987673 - DNA, 25 bp, Homo sapien
gcatggcccctaacttcctgagctt

SEQ ID NO: 1987674 - DNA, 25 bp, Homo sapien
gggttatcagaccacctggggttca

SEQ ID NO: 1987675 - DNA, 25 bp, Homo sapien
tcatggcaatactatcccgacagcc

SEQ ID NO: 1987676 - DNA, 25 bp, Homo sapien
gcattttcaaccatgagtcctttcc

SEQ ID NO: 1987677 - DNA, 25 bp, Homo sapien
caaactgtttcggatttggtggact

SEQ ID NO: 1987678 - DNA, 25 bp, Homo sapien
tcatagcagtgttggatgacaaact

SEQ ID NO: 1987679 - DNA, 25 bp, Homo sapien
tggtggactacaaaacacaatggtt

SEQ ID NO: 1987680 - DNA, 25 bp, Homo sapien
tagtttcggtatcagctgctactcc

SEQ ID NO: 1987681 - DNA, 25 bp, Homo sapien
gattatcggatgaatctggtcggaa

SEQ ID NO: 1987682 - DNA, 25 bp, Homo sapien
taatggccataataggatagcgacc

SEQ ID NO: 1987683 - DNA, 25 bp, Homo sapien
gatagcgaccgcagtagcctaactc

SEQ ID NO: 1987684 - DNA, 25 bp, Homo sapien
ctggctgctttatacaccgttcctg

SEQ ID NO: 1987685 - DNA, 25 bp, Homo sapien
tggctgctttatacaccgttcctgg

SEQ ID NO: 1987686 - DNA, 25 bp, Homo sapien
gctgctttatacaccgttcctggaa

SEQ ID NO: 1987687 - DNA, 25 bp, Homo sapien
ggctgctttatacaccgttcctgga

SEQ ID NO: 1987688 - DNA, 25 bp, Homo sapien
ctctattcgcaattctccatgaacc

SEQ ID NO: 1987689 - DNA, 25 bp, Homo sapien
aattctccatgaaccaatatgacca

SEQ ID NO: 1987690 - DNA, 25 bp, Homo sapien
tattcgcaattctccatgaaccaat

SEQ ID NO: 1987691 - DNA, 25 bp, Homo sapien
tcgcaattctccatgaaccaatatg

SEQ ID NO: 1987692 - DNA, 25 bp, Homo sapien
cttatgtaaaaagggattccatttg

SEQ ID NO: 1987693 - DNA, 25 bp, Homo sapien
cttcttcatcatattgacctttagt

SEQ ID NO: 1987694 - DNA, 25 bp, Homo sapien
gtttggcaaatttcacccattcacg

SEQ ID NO: 1987695 - DNA, 25 bp, Homo sapien
tggcaaatttcacccattcacgttt

SEQ ID NO: 1987696 - DNA, 25 bp, Homo sapien
caaatttcacccattcacgtttttg

SEQ ID NO: 1987697 - DNA, 25 bp, Homo sapien
gggtttggcaaatttcacccattca

SEQ ID NO: 1987698 - DNA, 25 bp, Homo sapien
ttttctgggttgcttggtaatctga

SEQ ID NO: 1987699 - DNA, 25 bp, Homo sapien
tcctcccggtcgactatagctgtta

SEQ ID NO: 1987700 - DNA, 25 bp, Homo sapien
tcccactccagagattcggtaggtg

SEQ ID NO: 1987701 - DNA, 25 bp, Homo sapien
ccaaaaggcggctgatcgattccca

SEQ ID NO: 1987702 - DNA, 25 bp, Homo sapien
tgggcatttagagcccgacatgtga

SEQ ID NO: 1987703 - DNA, 25 bp, Homo sapien
gaaaatactggaggattatcattaa

SEQ ID NO: 1987704 - DNA, 25 bp, Homo sapien
tagtccttgggcatttagagcccga

SEQ ID NO: 1987705 - DNA, 25 bp, Homo sapien
aagtggtttctctacatctagtcct

SEQ ID NO: 1987706 - DNA, 25 bp, Homo sapien
ggcatttagtatcatcaccagtgag

SEQ ID NO: 1987707 - DNA, 25 bp, Homo sapien
gagaattggtcaaagtacggacttc

SEQ ID NO: 1987708 - DNA, 25 bp, Homo sapien
ttctgcttaggaggaacatgggtgt

SEQ ID NO: 1987709 - DNA, 25 bp, Homo sapien
gctggttcctgagagacaattttga

SEQ ID NO: 1987710 - DNA, 25 bp, Homo sapien
gtctctaaacattgggaagttatcg

SEQ ID NO: 1987711 - DNA, 25 bp, Homo sapien
taaacattgggaagttatcgttgac

SEQ ID NO: 1987712 - DNA, 25 bp, Homo sapien
ctgagagtctctaaacattgggaag

SEQ ID NO: 1987713 - DNA, 25 bp, Homo sapien
cattgggaagttatcgttgacatct

SEQ ID NO: 1987714 - DNA, 25 bp, Homo sapien
tcattagttctaggatcagtttgta

SEQ ID NO: 1987715 - DNA, 25 bp, Homo sapien
ccaaatctgttacttgaaatcgaag

SEQ ID NO: 1987716 - DNA, 25 bp, Homo sapien
gaaatatactgcaagccaattatct

SEQ ID NO: 1987717 - DNA, 25 bp, Homo sapien
aagccaattatctgtgtactcttca

SEQ ID NO: 1987718 - DNA, 25 bp, Homo sapien
atcactgcactcttgcctagatgac

SEQ ID NO: 1987719 - DNA, 25 bp, Homo sapien
gcacatgatgcggaccctgctactc

SEQ ID NO: 1987720 - DNA, 25 bp, Homo sapien
acatgatgcggaccctgctactcag

SEQ ID NO: 1987721 - DNA, 25 bp, Homo sapien
atgatgcggaccctgctactcagga

SEQ ID NO: 1987722 - DNA, 25 bp, Homo sapien
tcttggaagcaggacggaatgcaat

SEQ ID NO: 1987723 - DNA, 25 bp, Homo sapien
tgaactcggtatcgagagataactg

SEQ ID NO: 1987724 - DNA, 25 bp, Homo sapien
tcatcgatggcttgatatgttccca

SEQ ID NO: 1987725 - DNA, 25 bp, Homo sapien
gcagctttgttagtgtcctcatcga

SEQ ID NO: 1987726 - DNA, 25 bp, Homo sapien
catctatggccagaacctcagctgt

SEQ ID NO: 1987727 - DNA, 25 bp, Homo sapien
accatcgttacgtcccatgacatat

SEQ ID NO: 1987728 - DNA, 25 bp, Homo sapien
aactatgaaagtagaatctcggttc

SEQ ID NO: 1987729 - DNA, 25 bp, Homo sapien
gaatcaatcattaggtatccaccat

SEQ ID NO: 1987730 - DNA, 25 bp, Homo sapien
tattattcagtgttctagcggagac

SEQ ID NO: 1987731 - DNA, 25 bp, Homo sapien
ggttgtgatactccatacggcaggc

SEQ ID NO: 1987732 - DNA, 25 bp, Homo sapien
tacggcaggcaactttacaggttga

SEQ ID NO: 1987733 - DNA, 25 bp, Homo sapien
tagcggagacaaccacggaaggtga

SEQ ID NO: 1987734 - DNA, 25 bp, Homo sapien
tagcagagttagttgccacaaacaa

SEQ ID NO: 1987735 - DNA, 25 bp, Homo sapien
caaatcaacagtaggacgaagtgtc

SEQ ID NO: 1987736 - DNA, 25 bp, Homo sapien
tggacttcatcatcccacggtggaa

SEQ ID NO: 1987737 - DNA, 25 bp, Homo sapien
caagtgggtaaatctgtctacacct

SEQ ID NO: 1987738 - DNA, 25 bp, Homo sapien
cagggagatgtggtatactccagga

SEQ ID NO: 1987739 - DNA, 25 bp, Homo sapien
tgttctgactgtctgtaagtaccag

SEQ ID NO: 1987740 - DNA, 25 bp, Homo sapien
tgtctgtaagtaccagggagatgtg

SEQ ID NO: 1987741 - DNA, 25 bp, Homo sapien
ggtatactccaggaggtatctgttc

SEQ ID NO: 1987742 - DNA, 25 bp, Homo sapien
tcccagggcttgtggttgggtaaga

SEQ ID NO: 1987743 - DNA, 25 bp, Homo sapien
gttgggtaagaagttccacagatgc

SEQ ID NO: 1987744 - DNA, 25 bp, Homo sapien
ctgagtgcggcctgccatacctggt

SEQ ID NO: 1987745 - DNA, 25 bp, Homo sapien
cagtgtcaagctgcgtggcatctca

SEQ ID NO: 1987746 - DNA, 25 bp, Homo sapien
aggagcagcaggccgatggcggcag

SEQ ID NO: 1987747 - DNA, 25 bp, Homo sapien
agcagcaggagaccaaggagcagca

SEQ ID NO: 1987748 - DNA, 25 bp, Homo sapien
gcagcaggagaccaaggagcagcag

SEQ ID NO: 1987749 - DNA, 25 bp, Homo sapien
agcagcaggccgatggcggcaggcc

SEQ ID NO: 1987750 - DNA, 25 bp, Homo sapien
gcctccgaagtcagattctagggtt

SEQ ID NO: 1987751 - DNA, 25 bp, Homo sapien
cattctcatgtgaactgaccaagag

SEQ ID NO: 1987752 - DNA, 25 bp, Homo sapien
gggtttaagcatgcagcctccgaag

SEQ ID NO: 1987753 - DNA, 25 bp, Homo sapien
taatgttgggcatgtaatatcatcc

SEQ ID NO: 1987754 - DNA, 25 bp, Homo sapien
cacttgactaatttaggaactattt

SEQ ID NO: 1987755 - DNA, 25 bp, Homo sapien
cagaacacttgactaatttaggaac

SEQ ID NO: 1987756 - DNA, 25 bp, Homo sapien
aacaaaacatcagaacacttgacta

SEQ ID NO: 1987757 - DNA, 25 bp, Homo sapien
catcagaacacttgactaatttagg

SEQ ID NO: 1987758 - DNA, 25 bp, Homo sapien
ctgccccacagtcacaggtcaacag

SEQ ID NO: 1987759 - DNA, 25 bp, Homo sapien
tcaggatgggctccttcaattcccc

SEQ ID NO: 1987760 - DNA, 25 bp, Homo sapien
atgaattgttccttctgagccatca

SEQ ID NO: 1987761 - DNA, 25 bp, Homo sapien
ggaactgggataaaaccacctgtca

SEQ ID NO: 1987762 - DNA, 25 bp, Homo sapien
taaaagtgaaccagatttcagagca

SEQ ID NO: 1987763 - DNA, 25 bp, Homo sapien
tatagtgacatgtggccctttgcaa

SEQ ID NO: 1987764 - DNA, 25 bp, Homo sapien
actgaaggtcaagaaatctctttgc

SEQ ID NO: 1987765 - DNA, 25 bp, Homo sapien
tctttcagcgataaccatttctgtg

SEQ ID NO: 1987766 - DNA, 25 bp, Homo sapien
ttggctgttacaggaggcacacaaa

SEQ ID NO: 1987767 - DNA, 25 bp, Homo sapien
catgaaatcggctccattggctgtt

SEQ ID NO: 1987768 - DNA, 25 bp, Homo sapien
cattggctgttacaggaggcacaca

SEQ ID NO: 1987769 - DNA, 25 bp, Homo sapien
atgaaatcggctccattggctgtta

SEQ ID NO: 1987770 - DNA, 25 bp, Homo sapien
taacagctcctgacatgtgcacaca

SEQ ID NO: 1987771 - DNA, 25 bp, Homo sapien
tatttaccacttaactcaccattgc

SEQ ID NO: 1987772 - DNA, 25 bp, Homo sapien
atttcagtggtaacagctcctgaca

SEQ ID NO: 1987773 - DNA, 25 bp, Homo sapien
tcctgacatgtgcacacagatgcaa

SEQ ID NO: 1987774 - DNA, 25 bp, Homo sapien
gatgtgcacatgagactttaactga

SEQ ID NO: 1987775 - DNA, 25 bp, Homo sapien
tatgactagaggtgataacatccca

SEQ ID NO: 1987776 - DNA, 25 bp, Homo sapien
cacaaaggagggcatataaacgggt

SEQ ID NO: 1987777 - DNA, 25 bp, Homo sapien
taagcagtcctatgagctcagtatg

SEQ ID NO: 1987778 - DNA, 25 bp, Homo sapien
tggctgctccaagcttagtggtcat

SEQ ID NO: 1987779 - DNA, 25 bp, Homo sapien
tgccctgaggaacagatgccaactc

SEQ ID NO: 1987780 - DNA, 25 bp, Homo sapien
gacactgtccctgttgcaaagcctg

SEQ ID NO: 1987781 - DNA, 25 bp, Homo sapien
tccagtggctgctccgaatcctgaa

SEQ ID NO: 1987782 - DNA, 25 bp, Homo sapien
tcttcctccgcacaggcaaatgctt

SEQ ID NO: 1987783 - DNA, 25 bp, Homo sapien
gtcatccaggtcatcagcaataaaa

SEQ ID NO: 1987784 - DNA, 25 bp, Homo sapien
ggtccaagtgagtccaagaagctgt

SEQ ID NO: 1987785 - DNA, 25 bp, Homo sapien
catagatcaacaagcagtcatttgc

SEQ ID NO: 1987786 - DNA, 25 bp, Homo sapien
ctggcacttaacaaatcctgtctgc

SEQ ID NO: 1987787 - DNA, 25 bp, Homo sapien
tctgctggacttctatgggatggcc

SEQ ID NO: 1987788 - DNA, 25 bp, Homo sapien
gacttcctgacaaagtctggcactt

SEQ ID NO: 1987789 - DNA, 25 bp, Homo sapien
ggatggccacaggattcaatcccat

SEQ ID NO: 1987790 - DNA, 25 bp, Homo sapien
ggaaacagctggctggacagaccca

SEQ ID NO: 1987791 - DNA, 25 bp, Homo sapien
ggacagacccagaggtggacaaagc

SEQ ID NO: 1987792 - DNA, 25 bp, Homo sapien
acccagaggtggacaaagcagaagc

SEQ ID NO: 1987793 - DNA, 25 bp, Homo sapien
cagagggtcagggatggaaacagct

SEQ ID NO: 1987794 - DNA, 25 bp, Homo sapien
gaaccagaagccgagtaagtctccg

SEQ ID NO: 1987795 - DNA, 25 bp, Homo sapien
catattagacgggagcaaggatcct

SEQ ID NO: 1987796 - DNA, 25 bp, Homo sapien
tatgtgaccctcgtagctgcgttgg

SEQ ID NO: 1987797 - DNA, 25 bp, Homo sapien
tgggccagctaggttgccaggaaca

SEQ ID NO: 1987798 - DNA, 25 bp, Homo sapien
tattctagtcattggcccgttttgc

SEQ ID NO: 1987799 - DNA, 25 bp, Homo sapien
tctatgggcaaaagggtgaatatct

SEQ ID NO: 1987800 - DNA, 25 bp, Homo sapien
tattagcccaatacagtgagctttg

SEQ ID NO: 1987801 - DNA, 25 bp, Homo sapien
tactgagacgtgtaggaaggagctc

SEQ ID NO: 1987802 - DNA, 25 bp, Homo sapien
ttctccagctgctctagcacctgac

SEQ ID NO: 1987803 - DNA, 25 bp, Homo sapien
ctgtggaagcacaggctgcctgcac

SEQ ID NO: 1987804 - DNA, 25 bp, Homo sapien
tccagctgctctagcacctgacttc

SEQ ID NO: 1987805 - DNA, 25 bp, Homo sapien
tgtggaagcacaggctgcctgcact

SEQ ID NO: 1987806 - DNA, 25 bp, Homo sapien
gatctagcttctcccacctaagatg

SEQ ID NO: 1987807 - DNA, 25 bp, Homo sapien
aaagccttgttgcagcagcaccccc

SEQ ID NO: 1987808 - DNA, 25 bp, Homo sapien
gctgcacaggatctagcttctccca

SEQ ID NO: 1987809 - DNA, 25 bp, Homo sapien
ggctgctgcacaggatctagcttct

SEQ ID NO: 1987810 - DNA, 25 bp, Homo sapien
tactatagcatggtttccactacag

SEQ ID NO: 1987811 - DNA, 25 bp, Homo sapien
agctgcatgtgctctagactgtaga

SEQ ID NO: 1987812 - DNA, 25 bp, Homo sapien
gctttgaggatcctgaatacacctt

SEQ ID NO: 1987813 - DNA, 25 bp, Homo sapien
tccactacagtttaacaatgcagca

SEQ ID NO: 1987814 - DNA, 25 bp, Homo sapien
ccgattttgtcactttcgttccttg

SEQ ID NO: 1987815 - DNA, 25 bp, Homo sapien
gagtttcagagggaaaccatcacac

SEQ ID NO: 1987816 - DNA, 25 bp, Homo sapien
tccttgcagggggaaccaaggaaga

SEQ ID NO: 1987817 - DNA, 25 bp, Homo sapien
tggagaacacggctgttcttcctct

SEQ ID NO: 1987818 - DNA, 25 bp, Homo sapien
tgaagtggaggagttcagacgccag

SEQ ID NO: 1987819 - DNA, 25 bp, Homo sapien
taagactgccgggacagggtgaagt

SEQ ID NO: 1987820 - DNA, 25 bp, Homo sapien
agcccaacccaaaggcgcggctcca

SEQ ID NO: 1987821 - DNA, 25 bp, Homo sapien
tggccgccgcgagaaaatggagccg

SEQ ID NO: 1987822 - DNA, 25 bp, Homo sapien
ccaggtgtggccgccgcgagaaaat

SEQ ID NO: 1987823 - DNA, 25 bp, Homo sapien
aaaggcgcggctccaggtgtggccg

SEQ ID NO: 1987824 - DNA, 25 bp, Homo sapien
cgagcgcgcactcggctcctccctg

SEQ ID NO: 1987825 - DNA, 25 bp, Homo sapien
gccccgagcgcgcactcggctcctc

SEQ ID NO: 1987826 - DNA, 25 bp, Homo sapien
gcgcgcactcggctcctccctggcc

SEQ ID NO: 1987827 - DNA, 25 bp, Homo sapien
ctgccccgagcgcgcactcggctcc

SEQ ID NO: 1987828 - DNA, 25 bp, Homo sapien
gcagcagggcgtacgcgcgtcccgg

SEQ ID NO: 1987829 - DNA, 25 bp, Homo sapien
cagcagggcgtacgcgcgtcccggg

SEQ ID NO: 1987830 - DNA, 25 bp, Homo sapien
aagcagcagggcgtacgcgcgtccc

SEQ ID NO: 1987831 - DNA, 25 bp, Homo sapien
gagaagcagcagggcgtacgcgcgt

SEQ ID NO: 1987832 - DNA, 25 bp, Homo sapien
gcggtggctcccctgtcccgcttgc

SEQ ID NO: 1987833 - DNA, 25 bp, Homo sapien
ggtggctcccctgtcccgcttgcgg

SEQ ID NO: 1987834 - DNA, 25 bp, Homo sapien
ccggcggtggctcccctgtcccgct

SEQ ID NO: 1987835 - DNA, 25 bp, Homo sapien
tggctcccctgtcccgcttgcggca

SEQ ID NO: 1987836 - DNA, 25 bp, Homo sapien
gcaggtaacgcgcacaagggcggcg

SEQ ID NO: 1987837 - DNA, 25 bp, Homo sapien
aagggcggcgggcaagtctggtcgc

SEQ ID NO: 1987838 - DNA, 25 bp, Homo sapien
ttccgaagccccaggtcggatctcg

SEQ ID NO: 1987839 - DNA, 25 bp, Homo sapien
aagtctggtcgcgaggtctagacct

SEQ ID NO: 1987840 - DNA, 25 bp, Homo sapien
gaatacaagtatgttcctggtttcc

SEQ ID NO: 1987841 - DNA, 25 bp, Homo sapien
ctaagaatacaagtatgttcctggt

SEQ ID NO: 1987842 - DNA, 25 bp, Homo sapien
tccccagttcactggcttgtgtcgg

SEQ ID NO: 1987843 - DNA, 25 bp, Homo sapien
tcactggcttgtgtcggcggctaga

SEQ ID NO: 1987844 - DNA, 25 bp, Homo sapien
tgatgtctcctagtaatatatgtac

SEQ ID NO: 1987845 - DNA, 25 bp, Homo sapien
tatatgtactgtgtccccccctctg

SEQ ID NO: 1987846 - DNA, 25 bp, Homo sapien
atcgtgctaggccagataaaaaggg

SEQ ID NO: 1987847 - DNA, 25 bp, Homo sapien
cgtctgcccatcgtgctaggccaga

SEQ ID NO: 1987848 - DNA, 25 bp, Homo sapien
ggcaattccaaggtctaaagtggga

SEQ ID NO: 1987849 - DNA, 25 bp, Homo sapien
tttttaccattagatggcactggcc

SEQ ID NO: 1987850 - DNA, 25 bp, Homo sapien
ggaagcaggcgtttcattggtctca

SEQ ID NO: 1987851 - DNA, 25 bp, Homo sapien
ggcaaactgcaggaactaccagaaa

SEQ ID NO: 1987852 - DNA, 25 bp, Homo sapien
ttaattcactggactctgtctttgg

SEQ ID NO: 1987853 - DNA, 25 bp, Homo sapien
tcagttgtttgccttttcccatctg

SEQ ID NO: 1987854 - DNA, 25 bp, Homo sapien
tggactctgtctttggtgtagcttt

SEQ ID NO: 1987855 - DNA, 25 bp, Homo sapien
ttatgcattaattcactggactctg

SEQ ID NO: 1987856 - DNA, 25 bp, Homo sapien
ctgtaagtgaagtccacttccaacg

SEQ ID NO: 1987857 - DNA, 25 bp, Homo sapien
gtccacttccaacgttaaagcagat

SEQ ID NO: 1987858 - DNA, 25 bp, Homo sapien
tgtaagtgaagtccacttccaacgt

SEQ ID NO: 1987859 - DNA, 25 bp, Homo sapien
tgaagtccacttccaacgttaaagc

SEQ ID NO: 1987860 - DNA, 25 bp, Homo sapien
gcttttgccgcactaaatgaggatg

SEQ ID NO: 1987861 - DNA, 25 bp, Homo sapien
ggcggtgatccaggcgcgcttttgc

SEQ ID NO: 1987862 - DNA, 25 bp, Homo sapien
tgccgcactaaatgaggatgtttag

SEQ ID NO: 1987863 - DNA, 25 bp, Homo sapien
caggcgcgcttttgccgcactaaat

SEQ ID NO: 1987864 - DNA, 25 bp, Homo sapien
gaatgctggtaacattcagttctcc

SEQ ID NO: 1987865 - DNA, 25 bp, Homo sapien
tttcttctgcaagatcagaatgtat

SEQ ID NO: 1987866 - DNA, 25 bp, Homo sapien
tggtgtttcttctcgatcaagaatg

SEQ ID NO: 1987867 - DNA, 25 bp, Homo sapien
ttctcgatcaagaatgctggtaaca

SEQ ID NO: 1987868 - DNA, 25 bp, Homo sapien
cattgatatcaagaaccttaatgcg

SEQ ID NO: 1987869 - DNA, 25 bp, Homo sapien
gaacactggttcgttgtcattgata

SEQ ID NO: 1987870 - DNA, 25 bp, Homo sapien
tcaactcttcaacagacccaacaaa

SEQ ID NO: 1987871 - DNA, 25 bp, Homo sapien
acaaagacatcctgtgtgaacactg

SEQ ID NO: 1987872 - DNA, 25 bp, Homo sapien
gatacgattctataggaaattttcg

SEQ ID NO: 1987873 - DNA, 25 bp, Homo sapien
ttttcgaattcagggtattgggctc

SEQ ID NO: 1987874 - DNA, 25 bp, Homo sapien
gataagcaggctccagagatacgat

SEQ ID NO: 1987875 - DNA, 25 bp, Homo sapien
ctttatttaggtagaacactggagg

SEQ ID NO: 1987876 - DNA, 25 bp, Homo sapien
gacagcacatccctaaaagagagta

SEQ ID NO: 1987877 - DNA, 25 bp, Homo sapien
gtcacatggcccatattggacagca

SEQ ID NO: 1987878 - DNA, 25 bp, Homo sapien
tacagcacattacaatttgggccag

SEQ ID NO: 1987879 - DNA, 25 bp, Homo sapien
tacacattcaacgtgcatacagcac

SEQ ID NO: 1987880 - DNA, 25 bp, Homo sapien
cattgacatccaaaatacgaatctg

SEQ ID NO: 1987881 - DNA, 25 bp, Homo sapien
tttacaggtttgtctgtaacttctc

SEQ ID NO: 1987882 - DNA, 25 bp, Homo sapien
tgtaacttctccattgccatctctt

SEQ ID NO: 1987883 - DNA, 25 bp, Homo sapien
tactacaggtatattgtcattgaca

SEQ ID NO: 1987884 - DNA, 25 bp, Homo sapien
tttaattaggactgaaatataaata

SEQ ID NO: 1987885 - DNA, 25 bp, Homo sapien
taaataaataggtacagttattaga

SEQ ID NO: 1987886 - DNA, 25 bp, Homo sapien
taaataggtacagttattagaagaa

SEQ ID NO: 1987887 - DNA, 25 bp, Homo sapien
cagttattagaagaataatagttac

SEQ ID NO: 1987888 - DNA, 25 bp, Homo sapien
cacaattccttcgttagtttgagca

SEQ ID NO: 1987889 - DNA, 25 bp, Homo sapien
tgccagccaattatcagaacctatt

SEQ ID NO: 1987890 - DNA, 25 bp, Homo sapien
catcgaacacttttatgcgcgtaac

SEQ ID NO: 1987891 - DNA, 25 bp, Homo sapien
gcgcgtaacttctacgttgacttga

SEQ ID NO: 1987892 - DNA, 25 bp, Homo sapien
taacataaattgagatgacgctgct

SEQ ID NO: 1987893 - DNA, 25 bp, Homo sapien
tattagcgacaataacactgaagtc

SEQ ID NO: 1987894 - DNA, 25 bp, Homo sapien
gcatgggctggtagtccagtgtcct

SEQ ID NO: 1987895 - DNA, 25 bp, Homo sapien
tcctaatcgacttgtgaaaagctgc

SEQ ID NO: 1987896 - DNA, 25 bp, Homo sapien
tgatatggccacaatctttacagtg

SEQ ID NO: 1987897 - DNA, 25 bp, Homo sapien
gccattttgaacatatctagattca

SEQ ID NO: 1987898 - DNA, 25 bp, Homo sapien
ttcagatgtgacagaatccacagag

SEQ ID NO: 1987899 - DNA, 25 bp, Homo sapien
gaatccacagagatccaattatctc

SEQ ID NO: 1987900 - DNA, 25 bp, Homo sapien
caatgacggagaaactgaaagggcc

SEQ ID NO: 1987901 - DNA, 25 bp, Homo sapien
gggccactgtttgggtgtccatcca

SEQ ID NO: 1987902 - DNA, 25 bp, Homo sapien
tgcacaggctctatcagtgtgggac

SEQ ID NO: 1987903 - DNA, 25 bp, Homo sapien
caggtcctctgcagtaacattcaca

SEQ ID NO: 1987904 - DNA, 25 bp, Homo sapien
tgagtgtaaggacctgcttttcagg

SEQ ID NO: 1987905 - DNA, 25 bp, Homo sapien
caggagcagaaaggccaaaatcatg

SEQ ID NO: 1987906 - DNA, 25 bp, Homo sapien
ggagtcatgctgtgcttccctgcag

SEQ ID NO: 1987907 - DNA, 25 bp, Homo sapien
tgagcgcaattgctgcgggtcccag

SEQ ID NO: 1987908 - DNA, 25 bp, Homo sapien
gcatctctatggtgccaggtatggg

SEQ ID NO: 1987909 - DNA, 25 bp, Homo sapien
gcgccctttccgcaatggcacatca

SEQ ID NO: 1987910 - DNA, 25 bp, Homo sapien
aatggcacatcagcagtaaaagtgg

SEQ ID NO: 1987911 - DNA, 25 bp, Homo sapien
tcattattccaaggatgcagcatct

SEQ ID NO: 1987912 - DNA, 25 bp, Homo sapien
gctacttcctttcatcgtggcttcc

SEQ ID NO: 1987913 - DNA, 25 bp, Homo sapien
tcctttcatcgtggcttccttggcc

SEQ ID NO: 1987914 - DNA, 25 bp, Homo sapien
ttccatccatctcggacatctcatg

SEQ ID NO: 1987915 - DNA, 25 bp, Homo sapien
tgttgccctttgacaatggaagcag

SEQ ID NO: 1987916 - DNA, 25 bp, Homo sapien
ggtagctctaccagaaagcaggctt

SEQ ID NO: 1987917 - DNA, 25 bp, Homo sapien
cggtcttcgtggtttcagtggtcat

SEQ ID NO: 1987918 - DNA, 25 bp, Homo sapien
cagtggtcatgatagcgcctgtggc

SEQ ID NO: 1987919 - DNA, 25 bp, Homo sapien
tgatagcgcctgtggcccctgtaaa

SEQ ID NO: 1987920 - DNA, 25 bp, Homo sapien
ctgagctccggccatgtctctggaa

SEQ ID NO: 1987921 - DNA, 25 bp, Homo sapien
ctgcctgagctccggccatgtctct

SEQ ID NO: 1987922 - DNA, 25 bp, Homo sapien
attcttcgttcagtgcaacagcagc

SEQ ID NO: 1987923 - DNA, 25 bp, Homo sapien
ttcttcgttcagtgcaacagcagct

SEQ ID NO: 1987924 - DNA, 25 bp, Homo sapien
tcttcctcagtgtaagaggccgctt

SEQ ID NO: 1987925 - DNA, 25 bp, Homo sapien
gaataaaccagaaggcaatctttgg

SEQ ID NO: 1987926 - DNA, 25 bp, Homo sapien
ctgagaataaaccagaaggcaatct

SEQ ID NO: 1987927 - DNA, 25 bp, Homo sapien
cttcctcagtgtaagaggccgcttt

SEQ ID NO: 1987928 - DNA, 25 bp, Homo sapien
caccgtggtgttcctagccgtcata

SEQ ID NO: 1987929 - DNA, 25 bp, Homo sapien
tgacccaggcaaacttcagctagtg

SEQ ID NO: 1987930 - DNA, 25 bp, Homo sapien
gaagctggagcatacaccctctctg

SEQ ID NO: 1987931 - DNA, 25 bp, Homo sapien
ttttgcgcctgcctagaagacacag

SEQ ID NO: 1987932 - DNA, 25 bp, Homo sapien
gacggctgatgaactaggtactctg

SEQ ID NO: 1987933 - DNA, 25 bp, Homo sapien
taatacggtaggcaaagagacccag

SEQ ID NO: 1987934 - DNA, 25 bp, Homo sapien
tagtcactgctaattaaactctggg

SEQ ID NO: 1987935 - DNA, 25 bp, Homo sapien
taaaatactcctggaagcagagaca

SEQ ID NO: 1987936 - DNA, 25 bp, Homo sapien
cacccctggccagtataatgctatt

SEQ ID NO: 1987937 - DNA, 25 bp, Homo sapien
agactatacagtatgtacgtgcaca

SEQ ID NO: 1987938 - DNA, 25 bp, Homo sapien
cctggccagtataatgctattttta

SEQ ID NO: 1987939 - DNA, 25 bp, Homo sapien
accacccctggccagtataatgcta

SEQ ID NO: 1987940 - DNA, 25 bp, Homo sapien
caccaggttggcctggctgatctca

SEQ ID NO: 1987941 - DNA, 25 bp, Homo sapien
accaggttggcctggctgatctcaa

SEQ ID NO: 1987942 - DNA, 25 bp, Homo sapien
tccaaggctgctcaaggtggaagct

SEQ ID NO: 1987943 - DNA, 25 bp, Homo sapien
tctagatgatggaagagtaacctcc

SEQ ID NO: 1987944 - DNA, 25 bp, Homo sapien
ttggcacccatgttaggcactgagg

SEQ ID NO: 1987945 - DNA, 25 bp, Homo sapien
tacacagcagtgaaataggcctagt

SEQ ID NO: 1987946 - DNA, 25 bp, Homo sapien
ggcactctccctaacaaactgagtt

SEQ ID NO: 1987947 - DNA, 25 bp, Homo sapien
caaactgagttatattccttgtaaa

SEQ ID NO: 1987948 - DNA, 25 bp, Homo sapien
aaacacctgcctttaaggcactctc

SEQ ID NO: 1987949 - DNA, 25 bp, Homo sapien
tattgcaagcagatctaattaaata

SEQ ID NO: 1987950 - DNA, 25 bp, Homo sapien
gatcaaccagaattagctccatgtg

SEQ ID NO: 1987951 - DNA, 25 bp, Homo sapien
catgagacattccagtttaccggca

SEQ ID NO: 1987952 - DNA, 25 bp, Homo sapien
taccggcagtgtcgactagaatatg

SEQ ID NO: 1987953 - DNA, 25 bp, Homo sapien
ttttgagaaatagcagacgcaggag

SEQ ID NO: 1987954 - DNA, 25 bp, Homo sapien
ggtgggtagatctattccaggttcc

SEQ ID NO: 1987955 - DNA, 25 bp, Homo sapien
caggttcccttgcaattaccaaaag

SEQ ID NO: 1987956 - DNA, 25 bp, Homo sapien
cttgcaactgacacacaagtttaga

SEQ ID NO: 1987957 - DNA, 25 bp, Homo sapien
accttgcaactgacacacaagttta

SEQ ID NO: 1987958 - DNA, 25 bp, Homo sapien
tgcaactgacacacaagtttagaaa

SEQ ID NO: 1987959 - DNA, 25 bp, Homo sapien
aagtggaccaataaaccttgcaact

SEQ ID NO: 1987960 - DNA, 25 bp, Homo sapien
gtataggtgtgccacagttgcatga

SEQ ID NO: 1987961 - DNA, 25 bp, Homo sapien
tgtgtataggtgtgccacagttgca

SEQ ID NO: 1987962 - DNA, 25 bp, Homo sapien
ctgtgtataggtgtgccacagttgc

SEQ ID NO: 1987963 - DNA, 25 bp, Homo sapien
taggtgtgccacagttgcatgaacc

SEQ ID NO: 1987964 - DNA, 25 bp, Homo sapien
aattggagtcatcagaccttgtctg

SEQ ID NO: 1987965 - DNA, 25 bp, Homo sapien
tatgcggggaagtccaataattgga

SEQ ID NO: 1987966 - DNA, 25 bp, Homo sapien
cctggggcttgagatagaggtttct

SEQ ID NO: 1987967 - DNA, 25 bp, Homo sapien
ggtggaacagtttcaggagctaaca

SEQ ID NO: 1987968 - DNA, 25 bp, Homo sapien
ctagaaatcactagaaagtggaaga

SEQ ID NO: 1987969 - DNA, 25 bp, Homo sapien
agaggtgatgggaatagagccatac

SEQ ID NO: 1987970 - DNA, 25 bp, Homo sapien
gaagagaagaggtgatgggaataga

SEQ ID NO: 1987971 - DNA, 25 bp, Homo sapien
atcactagaaagtggaagagaagag

SEQ ID NO: 1987972 - DNA, 25 bp, Homo sapien
ggaagcatgcttggggccctggtac

SEQ ID NO: 1987973 - DNA, 25 bp, Homo sapien
aagcatgcttggggccctggtacac

SEQ ID NO: 1987974 - DNA, 25 bp, Homo sapien
ctagtggggaacaggaagcatgctt

SEQ ID NO: 1987975 - DNA, 25 bp, Homo sapien
catgcttggggccctggtacaccat

SEQ ID NO: 1987976 - DNA, 25 bp, Homo sapien
ctggaaggaacctcctcgcctcctc

SEQ ID NO: 1987977 - DNA, 25 bp, Homo sapien
cccacggcagtctgagcaggaatgg

SEQ ID NO: 1987978 - DNA, 25 bp, Homo sapien
gcccacggcagtctgagcaggaatg

SEQ ID NO: 1987979 - DNA, 25 bp, Homo sapien
ggcccacggcagtctgagcaggaat

SEQ ID NO: 1987980 - DNA, 25 bp, Homo sapien
ctcgcgggaggagtctgcactgtgc

SEQ ID NO: 1987981 - DNA, 25 bp, Homo sapien
cgggaggagtctgcactgtgcctgc

SEQ ID NO: 1987982 - DNA, 25 bp, Homo sapien
cgcgggaggagtctgcactgtgcct

SEQ ID NO: 1987983 - DNA, 25 bp, Homo sapien
ctgagctcgcgggaggagtctgcac

SEQ ID NO: 1987984 - DNA, 25 bp, Homo sapien
gccaaatcggagattaagatccaaa

SEQ ID NO: 1987985 - DNA, 25 bp, Homo sapien
tgagcagcttttagagccaaatcgg

SEQ ID NO: 1987986 - DNA, 25 bp, Homo sapien
ttgacggcagccagactgtgccctg

SEQ ID NO: 1987987 - DNA, 25 bp, Homo sapien
tctggaaaccctctcctgctagata

SEQ ID NO: 1987988 - DNA, 25 bp, Homo sapien
ctgcagctagcagcatgccacctga

SEQ ID NO: 1987989 - DNA, 25 bp, Homo sapien
ttcataaatggggaacctggattct

SEQ ID NO: 1987990 - DNA, 25 bp, Homo sapien
acctggattctggactgcagctagc

SEQ ID NO: 1987991 - DNA, 25 bp, Homo sapien
gactgtgtgttcataaatggggaac

SEQ ID NO: 1987992 - DNA, 25 bp, Homo sapien
taatgtcaacaatagtaatctgggt

SEQ ID NO: 1987993 - DNA, 25 bp, Homo sapien
tgtaatgtcaacaatagtaatctgg

SEQ ID NO: 1987994 - DNA, 25 bp, Homo sapien
aatgtcaacaatagtaatctgggtg

SEQ ID NO: 1987995 - DNA, 25 bp, Homo sapien
tgtcaacaatagtaatctgggtggg

SEQ ID NO: 1987996 - DNA, 25 bp, Homo sapien
tctgactgcaaacctgctgattctg

SEQ ID NO: 1987997 - DNA, 25 bp, Homo sapien
cctgagctaggctgcttatccctgc

SEQ ID NO: 1987998 - DNA, 25 bp, Homo sapien
ttgacttagtcaacaaagagagaat

SEQ ID NO: 1987999 - DNA, 25 bp, Homo sapien
gggcttttatactcacttctcctga

SEQ ID NO: 1988000 - DNA, 25 bp, Homo sapien
ggaggagcagacgatgagaagccat

SEQ ID NO: 1988001 - DNA, 25 bp, Homo sapien
cacaaataccagtccagcaaggcag

SEQ ID NO: 1988002 - DNA, 25 bp, Homo sapien
ctcagacacaaataccagtccagca

SEQ ID NO: 1988003 - DNA, 25 bp, Homo sapien
agaggaggagcagacgatgagaagc

SEQ ID NO: 1988004 - DNA, 25 bp, Homo sapien
tgatggcaggactgcctcggacagc

SEQ ID NO: 1988005 - DNA, 25 bp, Homo sapien
catctagaactttgaccatcagagg

SEQ ID NO: 1988006 - DNA, 25 bp, Homo sapien
acatgcacggccacattgatggcag

SEQ ID NO: 1988007 - DNA, 25 bp, Homo sapien
gcagcctttctgaacacatgcacgg

SEQ ID NO: 1988008 - DNA, 25 bp, Homo sapien
caaaccacagctagaggagaggagt

SEQ ID NO: 1988009 - DNA, 25 bp, Homo sapien
tcctgtgggagggttctttggcaac

SEQ ID NO: 1988010 - DNA, 25 bp, Homo sapien
tgttctgtgacccaaaagggttgca

SEQ ID NO: 1988011 - DNA, 25 bp, Homo sapien
cctggtcacttcctagctaagcaaa

SEQ ID NO: 1988012 - DNA, 25 bp, Homo sapien
ctctgcatgctcatggaatggggag

SEQ ID NO: 1988013 - DNA, 25 bp, Homo sapien
agatttggtgtctatttccactttg

SEQ ID NO: 1988014 - DNA, 25 bp, Homo sapien
tgctcatggaatggggagatgccaa

SEQ ID NO: 1988015 - DNA, 25 bp, Homo sapien
gatgccaagtgccttccagtaagat

SEQ ID NO: 1988016 - DNA, 25 bp, Homo sapien
ctccgagaagccagatgtgttttgg

SEQ ID NO: 1988017 - DNA, 25 bp, Homo sapien
tcttgttacatacactctacgtggg

SEQ ID NO: 1988018 - DNA, 25 bp, Homo sapien
gaatcacttgtccagacctccgaga

SEQ ID NO: 1988019 - DNA, 25 bp, Homo sapien
caaaacaaccctcgaaggtctgtat

SEQ ID NO: 1988020 - DNA, 25 bp, Homo sapien
tataattgtgtctgccacatggtgt

SEQ ID NO: 1988021 - DNA, 25 bp, Homo sapien
ttgtgtctgccacatggtgtatgct

SEQ ID NO: 1988022 - DNA, 25 bp, Homo sapien
tatggaaaacacttataattgtgtc

SEQ ID NO: 1988023 - DNA, 25 bp, Homo sapien
cacttataattgtgtctgccacatg

SEQ ID NO: 1988024 - DNA, 25 bp, Homo sapien
catagcagaactgagggcaaaccca

SEQ ID NO: 1988025 - DNA, 25 bp, Homo sapien
tctcttgttgacttgtgggccccag

SEQ ID NO: 1988026 - DNA, 25 bp, Homo sapien
catgtgggcagtatgtcagtgaacc

SEQ ID NO: 1988027 - DNA, 25 bp, Homo sapien
ccagcctgggccttaattgtaaaca

SEQ ID NO: 1988028 - DNA, 25 bp, Homo sapien
tatggtgacattgaccttcagccca

SEQ ID NO: 1988029 - DNA, 25 bp, Homo sapien
gaggtttggacacactctgcataaa

SEQ ID NO: 1988030 - DNA, 25 bp, Homo sapien
gaatatctgcgactcaggtgctggg

SEQ ID NO: 1988031 - DNA, 25 bp, Homo sapien
aaaaggatctgagtgagccatacca

SEQ ID NO: 1988032 - DNA, 25 bp, Homo sapien
catttccaccagagcccgaaaaacg

SEQ ID NO: 1988033 - DNA, 25 bp, Homo sapien
gagcccgaaaaacgtgacagatgac

SEQ ID NO: 1988034 - DNA, 25 bp, Homo sapien
catgactgaccaccggaagtccagt

SEQ ID NO: 1988035 - DNA, 25 bp, Homo sapien
gacagatgacacacatgactgacca

SEQ ID NO: 1988036 - DNA, 25 bp, Homo sapien
cggagtcgttggctgtgaataccac

SEQ ID NO: 1988037 - DNA, 25 bp, Homo sapien
cattccttgggattggtgacgacag

SEQ ID NO: 1988038 - DNA, 25 bp, Homo sapien
ccttgggattggtgacgacagccgt

SEQ ID NO: 1988039 - DNA, 25 bp, Homo sapien
cgacagccgtggtggaataggagta

SEQ ID NO: 1988040 - DNA, 25 bp, Homo sapien
tcaggtccactggaggagaagtccc

SEQ ID NO: 1988041 - DNA, 25 bp, Homo sapien
ggttacatgaaatcccatccctcgt

SEQ ID NO: 1988042 - DNA, 25 bp, Homo sapien
gcatatgaggtgaaaacactgcttt

SEQ ID NO: 1988043 - DNA, 25 bp, Homo sapien
gcctggacttctaacatagcatatg

SEQ ID NO: 1988044 - DNA, 25 bp, Homo sapien
ctgcagatcatatttaatacgtgct

SEQ ID NO: 1988045 - DNA, 25 bp, Homo sapien
tggatctctcctagcgttctgccca

SEQ ID NO: 1988046 - DNA, 25 bp, Homo sapien
tctgcccagatactttctagaattc

SEQ ID NO: 1988047 - DNA, 25 bp, Homo sapien
gctttgcttgcaagacaatggaaat

SEQ ID NO: 1988048 - DNA, 25 bp, Homo sapien
aggacataagcagaagatactaaca

SEQ ID NO: 1988049 - DNA, 25 bp, Homo sapien
ctccaaagatcaagtgccaccaaca

SEQ ID NO: 1988050 - DNA, 25 bp, Homo sapien
tcacccataacaatggccacgaaag

SEQ ID NO: 1988051 - DNA, 25 bp, Homo sapien
cacagaacaacaaagacctaaaggt

SEQ ID NO: 1988052 - DNA, 25 bp, Homo sapien
ttggaggctatggagcatcttgaca

SEQ ID NO: 1988053 - DNA, 25 bp, Homo sapien
tggtcgctgactgtcctctgcccat

SEQ ID NO: 1988054 - DNA, 25 bp, Homo sapien
cataaaggggaatgtgttgtctggt

SEQ ID NO: 1988055 - DNA, 25 bp, Homo sapien
ttttggaggctatggagcatcttga

SEQ ID NO: 1988056 - DNA, 25 bp, Homo sapien
tgtctgcctccctaatgcaacgtca

SEQ ID NO: 1988057 - DNA, 25 bp, Homo sapien
ggcaaacattacaaccttgagctag

SEQ ID NO: 1988058 - DNA, 25 bp, Homo sapien
ttcacaaggtagaaagtccagacag

SEQ ID NO: 1988059 - DNA, 25 bp, Homo sapien
ccagacaggtaaatgggatcagagc

SEQ ID NO: 1988060 - DNA, 25 bp, Homo sapien
tgctgaccacacgtgctcatttcca

SEQ ID NO: 1988061 - DNA, 25 bp, Homo sapien
gctgaccacacgtgctcatttccat

SEQ ID NO: 1988062 - DNA, 25 bp, Homo sapien
caggcaaggcgctgactctctgtga

SEQ ID NO: 1988063 - DNA, 25 bp, Homo sapien
taccctagcaatgcctggatccagg

SEQ ID NO: 1988064 - DNA, 25 bp, Homo sapien
actctctgtgagggtcccaaatccc

SEQ ID NO: 1988065 - DNA, 25 bp, Homo sapien
tttacagacgaatcccaggcaaggc

SEQ ID NO: 1988066 - DNA, 25 bp, Homo sapien
tggttaccgcagagagggtgtgagt

SEQ ID NO: 1988067 - DNA, 25 bp, Homo sapien
cagacgaggggcatagcttctttgc

SEQ ID NO: 1988068 - DNA, 25 bp, Homo sapien
gggcctcgtctggttaccgcagaga

SEQ ID NO: 1988069 - DNA, 25 bp, Homo sapien
gcatagcttctttgctggtgcccct

SEQ ID NO: 1988070 - DNA, 25 bp, Homo sapien
gctgtaaacatgtacttcagaagga

SEQ ID NO: 1988071 - DNA, 25 bp, Homo sapien
ttttctccagcacgtatttctcagc

SEQ ID NO: 1988072 - DNA, 25 bp, Homo sapien
tcctttgcaaacgttgattgtctgt

SEQ ID NO: 1988073 - DNA, 25 bp, Homo sapien
gataattgttcttctgcaatagacc

SEQ ID NO: 1988074 - DNA, 25 bp, Homo sapien
caagtatgccggttgagagaactaa

SEQ ID NO: 1988075 - DNA, 25 bp, Homo sapien
cagtggagatagttaattctttgct

SEQ ID NO: 1988076 - DNA, 25 bp, Homo sapien
tccttatatacccttttgccagcca

SEQ ID NO: 1988077 - DNA, 25 bp, Homo sapien
gaaaggcttctacataaatgcactg

SEQ ID NO: 1988078 - DNA, 25 bp, Homo sapien
ccagcagtaagtgcccctcagtata

SEQ ID NO: 1988079 - DNA, 25 bp, Homo sapien
agccattggcgctgaagcccagcag

SEQ ID NO: 1988080 - DNA, 25 bp, Homo sapien
cacagttgttttgattcgggaattc

SEQ ID NO: 1988081 - DNA, 25 bp, Homo sapien
tcgggaattccttgaatatgccagc

SEQ ID NO: 1988082 - DNA, 25 bp, Homo sapien
gatattaatatcccgattttcagtt

SEQ ID NO: 1988083 - DNA, 25 bp, Homo sapien
tgggaggatattaatatcccgattt

SEQ ID NO: 1988084 - DNA, 25 bp, Homo sapien
ggaggatattaatatcccgattttc

SEQ ID NO: 1988085 - DNA, 25 bp, Homo sapien
aggatattaatatcccgattttcag

SEQ ID NO: 1988086 - DNA, 25 bp, Homo sapien
aaagggccactgaatttggtgcaga

SEQ ID NO: 1988087 - DNA, 25 bp, Homo sapien
caaagtagactcttgagaagtgcgt

SEQ ID NO: 1988088 - DNA, 25 bp, Homo sapien
tgcagaaaacgaatggagaacacag

SEQ ID NO: 1988089 - DNA, 25 bp, Homo sapien
gaacacagcaagcacgaattcagta

SEQ ID NO: 1988090 - DNA, 25 bp, Homo sapien
tatgttataatgttcctgattaagc

SEQ ID NO: 1988091 - DNA, 25 bp, Homo sapien
taatgtgtagtctccttttgaatat

SEQ ID NO: 1988092 - DNA, 25 bp, Homo sapien
aaacagtgcttaagagagcaattaa

SEQ ID NO: 1988093 - DNA, 25 bp, Homo sapien
tgttcctgattaagccagtcctttt

SEQ ID NO: 1988094 - DNA, 25 bp, Homo sapien
gcagcggtttggaacacccctggct

SEQ ID NO: 1988095 - DNA, 25 bp, Homo sapien
ggggattccctggtgtactttcaca

SEQ ID NO: 1988096 - DNA, 25 bp, Homo sapien
tgtgccatagtggaggggattccct

SEQ ID NO: 1988097 - DNA, 25 bp, Homo sapien
tgctctgtggatgctagtagcagca

SEQ ID NO: 1988098 - DNA, 25 bp, Homo sapien
ccaagcacttctttggaattggacc

SEQ ID NO: 1988099 - DNA, 25 bp, Homo sapien
cagtcttgcaggtggcgtgagtctc

SEQ ID NO: 1988100 - DNA, 25 bp, Homo sapien
tgatacccagcctggaacctttgcc

SEQ ID NO: 1988101 - DNA, 25 bp, Homo sapien
gatgccctgtgaaatttgtaactgg

SEQ ID NO: 1988102 - DNA, 25 bp, Homo sapien
tgataaggtccagtgagaattagta

SEQ ID NO: 1988103 - DNA, 25 bp, Homo sapien
tttaagtgataaggtccagtgagaa

SEQ ID NO: 1988104 - DNA, 25 bp, Homo sapien
agtgagaattagtaggggatccatc

SEQ ID NO: 1988105 - DNA, 25 bp, Homo sapien
taagtgataaggtccagtgagaatt

SEQ ID NO: 1988106 - DNA, 25 bp, Homo sapien
ttaggatgtatgaacgtgtggtcac

SEQ ID NO: 1988107 - DNA, 25 bp, Homo sapien
agactacttcctgcttaaccccttg

SEQ ID NO: 1988108 - DNA, 25 bp, Homo sapien
tacgctcaacggtacaggtaagact

SEQ ID NO: 1988109 - DNA, 25 bp, Homo sapien
tcccctaagcgtcctggtagattat

SEQ ID NO: 1988110 - DNA, 25 bp, Homo sapien
gacgatttcggcagtcagtgctcaa

SEQ ID NO: 1988111 - DNA, 25 bp, Homo sapien
ctatatccctggacgatttcggcag

SEQ ID NO: 1988112 - DNA, 25 bp, Homo sapien
cctggacgatttcggcagtcagtgc

SEQ ID NO: 1988113 - DNA, 25 bp, Homo sapien
ttctgccctcactccgcctgggcat

SEQ ID NO: 1988114 - DNA, 25 bp, Homo sapien
ctgtccgccacccacactgtctttt

SEQ ID NO: 1988115 - DNA, 25 bp, Homo sapien
agagcccttgcgtttgcccccctgt

SEQ ID NO: 1988116 - DNA, 25 bp, Homo sapien
ctaacccgtcctgtggaaagcctgt

SEQ ID NO: 1988117 - DNA, 25 bp, Homo sapien
atctctgatggttctagctgtggct

SEQ ID NO: 1988118 - DNA, 25 bp, Homo sapien
aaagcctgtttctcacaggttgtcc

SEQ ID NO: 1988119 - DNA, 25 bp, Homo sapien
aagatgtctgtgctcaggcggatga

SEQ ID NO: 1988120 - DNA, 25 bp, Homo sapien
cagcgcaggctgttatccgatgtta

SEQ ID NO: 1988121 - DNA, 25 bp, Homo sapien
tctgtacttcatctatgtggcccca

SEQ ID NO: 1988122 - DNA, 25 bp, Homo sapien
gatgatgcgggtttccaatcgctct

SEQ ID NO: 1988123 - DNA, 25 bp, Homo sapien
ggtacaatgtatccggggctcgcaa

SEQ ID NO: 1988124 - DNA, 25 bp, Homo sapien
agggtacaatgtatccggggctcgc

SEQ ID NO: 1988125 - DNA, 25 bp, Homo sapien
tgtatccggggctcgcaacgcgtcc

SEQ ID NO: 1988126 - DNA, 25 bp, Homo sapien
aatgtatccggggctcgcaacgcgt

SEQ ID NO: 1988127 - DNA, 25 bp, Homo sapien
tcgaggattttggaaggaaattcca

SEQ ID NO: 1988128 - DNA, 25 bp, Homo sapien
gaaggcaagtcctggtataagggac

SEQ ID NO: 1988129 - DNA, 25 bp, Homo sapien
tccaggtcggaaatacaccttgttc

SEQ ID NO: 1988130 - DNA, 25 bp, Homo sapien
tataagggacgcacataggtccgcg

SEQ ID NO: 1988131 - DNA, 25 bp, Homo sapien
gtccgcgccacatcctgacactgtt

SEQ ID NO: 1988132 - DNA, 25 bp, Homo sapien
tgaatacagcgaggatgacccaggg

SEQ ID NO: 1988133 - DNA, 25 bp, Homo sapien
aataatggcagtaaggcatcccgcc

SEQ ID NO: 1988134 - DNA, 25 bp, Homo sapien
tcagggacgatctatggcatgcgca

SEQ ID NO: 1988135 - DNA, 25 bp, Homo sapien
catttgaacgaagggtagaccacgg

SEQ ID NO: 1988136 - DNA, 25 bp, Homo sapien
tttgaaaaagccaaccttgcctgag

SEQ ID NO: 1988137 - DNA, 25 bp, Homo sapien
ggtctaccactaggtcagcaaaggt

SEQ ID NO: 1988138 - DNA, 25 bp, Homo sapien
aatggctgcaccgactaggcttgtt

SEQ ID NO: 1988139 - DNA, 25 bp, Homo sapien
taatcagtcttaacaagtaccgtgg

SEQ ID NO: 1988140 - DNA, 25 bp, Homo sapien
tattttaccatgctcacaagcaaat

SEQ ID NO: 1988141 - DNA, 25 bp, Homo sapien
aacacagtgtatattgttcatcctc

SEQ ID NO: 1988142 - DNA, 25 bp, Homo sapien
gcaatctgtgtatacttcttattaa

SEQ ID NO: 1988143 - DNA, 25 bp, Homo sapien
cactcagtcagcacagactaagtaa

SEQ ID NO: 1988144 - DNA, 25 bp, Homo sapien
tatctgtaccacaacattttggaat

SEQ ID NO: 1988145 - DNA, 25 bp, Homo sapien
tctgtaccacaacattttggaatta

SEQ ID NO: 1988146 - DNA, 25 bp, Homo sapien
ctgtaccacaacattttggaattac

SEQ ID NO: 1988147 - DNA, 25 bp, Homo sapien
agtatctgtaccacaacattttgga

SEQ ID NO: 1988148 - DNA, 25 bp, Homo sapien
tgtagtaagggcactgaagtaggct

SEQ ID NO: 1988149 - DNA, 25 bp, Homo sapien
gaagtaggctgataacatctgggct

SEQ ID NO: 1988150 - DNA, 25 bp, Homo sapien
taccaaccccaaagggatgttgtga

SEQ ID NO: 1988151 - DNA, 25 bp, Homo sapien
gagttcaggcactttgagattagta

SEQ ID NO: 1988152 - DNA, 25 bp, Homo sapien
cagtggctattgtttggcagctcag

SEQ ID NO: 1988153 - DNA, 25 bp, Homo sapien
tccagtcagtggctattgtttggca

SEQ ID NO: 1988154 - DNA, 25 bp, Homo sapien
ccagtcggcctaggatttgctggcc

SEQ ID NO: 1988155 - DNA, 25 bp, Homo sapien
ctggcttctttttccagtcggccta

SEQ ID NO: 1988156 - DNA, 25 bp, Homo sapien
tcaatctttcatctttgcttctcct

SEQ ID NO: 1988157 - DNA, 25 bp, Homo sapien
tgcttctccttgtctgccctcccac

SEQ ID NO: 1988158 - DNA, 25 bp, Homo sapien
tttgcttctccttgtctgccctccc

SEQ ID NO: 1988159 - DNA, 25 bp, Homo sapien
catctttgcttctccttgtctgccc

SEQ ID NO: 1988160 - DNA, 25 bp, Homo sapien
ttagagctccccttggatacatcct

SEQ ID NO: 1988161 - DNA, 25 bp, Homo sapien
caggctcccgcaccttgggcttcat

SEQ ID NO: 1988162 - DNA, 25 bp, Homo sapien
gagctccccttggatacatcctcag

SEQ ID NO: 1988163 - DNA, 25 bp, Homo sapien
agctccccttggatacatcctcagg

SEQ ID NO: 1988164 - DNA, 25 bp, Homo sapien
ttttctccccagatctatctaatct

SEQ ID NO: 1988165 - DNA, 25 bp, Homo sapien
tattcgaaaacctgaggatggcctc

SEQ ID NO: 1988166 - DNA, 25 bp, Homo sapien
cccagatctatctaatcttttctta

SEQ ID NO: 1988167 - DNA, 25 bp, Homo sapien
ttcatttattcgaaaacctgaggat

SEQ ID NO: 1988168 - DNA, 25 bp, Homo sapien
gaaatcaaattcagaaggagcataa

SEQ ID NO: 1988169 - DNA, 25 bp, Homo sapien
agatgatgttcgctgcttagcggca

SEQ ID NO: 1988170 - DNA, 25 bp, Homo sapien
gaaggagcataacaccaccaaaagc

SEQ ID NO: 1988171 - DNA, 25 bp, Homo sapien
cggcattcttaatttggaattggaa

SEQ ID NO: 1988172 - DNA, 25 bp, Homo sapien
aaaaactcttaccttgagagcttgt

SEQ ID NO: 1988173 - DNA, 25 bp, Homo sapien
gccgcgcactgagcaggagccatta

SEQ ID NO: 1988174 - DNA, 25 bp, Homo sapien
ccgggacaagacaagcgctggcgcc

SEQ ID NO: 1988175 - DNA, 25 bp, Homo sapien
caggagccattagggcagccccgag

SEQ ID NO: 1988176 - DNA, 25 bp, Homo sapien
agacgcagccgggacaagacaagcg

SEQ ID NO: 1988177 - DNA, 25 bp, Homo sapien
tgggagacttctgtgccgagtcagc

SEQ ID NO: 1988178 - DNA, 25 bp, Homo sapien
gagttagctcatggcggcgattcgc

SEQ ID NO: 1988179 - DNA, 25 bp, Homo sapien
gtaatcaaagctctcccgggtctgc

SEQ ID NO: 1988180 - DNA, 25 bp, Homo sapien
tgatcccagtctagcattgcaacca

SEQ ID NO: 1988181 - DNA, 25 bp, Homo sapien
tgggcgaaacagtaaagttccttgc

SEQ ID NO: 1988182 - DNA, 25 bp, Homo sapien
ggcaagcctttgatgctgagctaga

SEQ ID NO: 1988183 - DNA, 25 bp, Homo sapien
tatccatacttgaatctaaataccc

SEQ ID NO: 1988184 - DNA, 25 bp, Homo sapien
gaggttttgatacaaatcggtatgg

SEQ ID NO: 1988185 - DNA, 25 bp, Homo sapien
gagttccaacaacaaccttggcaag

SEQ ID NO: 1988186 - DNA, 25 bp, Homo sapien
actggatctcttcagtggtttctgg

SEQ ID NO: 1988187 - DNA, 25 bp, Homo sapien
ctgtgaaggcagagctggggcctcc

SEQ ID NO: 1988188 - DNA, 25 bp, Homo sapien
tgtgaaggcagagctggggcctcca

SEQ ID NO: 1988189 - DNA, 25 bp, Homo sapien
gtgaaggcagagctggggcctccag

SEQ ID NO: 1988190 - DNA, 25 bp, Homo sapien
tctgctctgttgaagagtggacccc

SEQ ID NO: 1988191 - DNA, 25 bp, Homo sapien
taggatctcttcaaaggcaggtagc

SEQ ID NO: 1988192 - DNA, 25 bp, Homo sapien
caggtagctgctgtgctggagcctt

SEQ ID NO: 1988193 - DNA, 25 bp, Homo sapien
gagttaccgtaagctccacgtccac

SEQ ID NO: 1988194 - DNA, 25 bp, Homo sapien
ataattgggttgaggaagagcccac

SEQ ID NO: 1988195 - DNA, 25 bp, Homo sapien
cacctctttggagtgttctggaggc

SEQ ID NO: 1988196 - DNA, 25 bp, Homo sapien
agctgggggctataattgggttgag

SEQ ID NO: 1988197 - DNA, 25 bp, Homo sapien
tcctggcttgttgtaagtttcttac

SEQ ID NO: 1988198 - DNA, 25 bp, Homo sapien
ggctgctttatgactggagatggtt

SEQ ID NO: 1988199 - DNA, 25 bp, Homo sapien
gctgctttatgactggagatggttt

SEQ ID NO: 1988200 - DNA, 25 bp, Homo sapien
tattcagccatctagaacatcggga

SEQ ID NO: 1988201 - DNA, 25 bp, Homo sapien
cactggtgctatgcaagggagcagc

SEQ ID NO: 1988202 - DNA, 25 bp, Homo sapien
agcagggctgcgaggacatattcca

SEQ ID NO: 1988203 - DNA, 25 bp, Homo sapien
gaatgccaaacttcgggttgaccag

SEQ ID NO: 1988204 - DNA, 25 bp, Homo sapien
gaatgttggccatccttcaaaccag

SEQ ID NO: 1988205 - DNA, 25 bp, Homo sapien
taattttctcggtgcaagaccaagg

SEQ ID NO: 1988206 - DNA, 25 bp, Homo sapien
caattaatgggcatctgtcagctgt

SEQ ID NO: 1988207 - DNA, 25 bp, Homo sapien
caaggtacaacattcattggagcgg

SEQ ID NO: 1988208 - DNA, 25 bp, Homo sapien
agtcaaattgtgtcccaagttcgca

SEQ ID NO: 1988209 - DNA, 25 bp, Homo sapien
gcaggaattctggtctctttctcag

SEQ ID NO: 1988210 - DNA, 25 bp, Homo sapien
cattatcccattaacggtcatcatc

SEQ ID NO: 1988211 - DNA, 25 bp, Homo sapien
tcactcccgggcaaattcttgattt

SEQ ID NO: 1988212 - DNA, 25 bp, Homo sapien
gaaagtacattgttatcttgcacag

SEQ ID NO: 1988213 - DNA, 25 bp, Homo sapien
gacttttgacttgtggtcaagaaaa

SEQ ID NO: 1988214 - DNA, 25 bp, Homo sapien
cgtgttattataggtgttggatttc

SEQ ID NO: 1988215 - DNA, 25 bp, Homo sapien
taagaaatacagaggcgtgttatta

SEQ ID NO: 1988216 - DNA, 25 bp, Homo sapien
cagcagcaccagtgaggaatggagc

SEQ ID NO: 1988217 - DNA, 25 bp, Homo sapien
tcggctttgccacttcaagtcggct

SEQ ID NO: 1988218 - DNA, 25 bp, Homo sapien
tccaaagaacggtccattgtcggct

SEQ ID NO: 1988219 - DNA, 25 bp, Homo sapien
gatattggaatttgagcagctcaaa

SEQ ID NO: 1988220 - DNA, 25 bp, Homo sapien
ggatatgctcaacttcgatgtcaca

SEQ ID NO: 1988221 - DNA, 25 bp, Homo sapien
gatgtcacatttcgcctggcatcag

SEQ ID NO: 1988222 - DNA, 25 bp, Homo sapien
ccctgatttacatggactcctgaag

SEQ ID NO: 1988223 - DNA, 25 bp, Homo sapien
tcctgaagttaggaaggatatgctc

SEQ ID NO: 1988224 - DNA, 25 bp, Homo sapien
aggttgaccagttgaactactcctt

SEQ ID NO: 1988225 - DNA, 25 bp, Homo sapien
gaaaagtactctctggtgactgagt

SEQ ID NO: 1988226 - DNA, 25 bp, Homo sapien
gcttcccagaaaagtactctctggt

SEQ ID NO: 1988227 - DNA, 25 bp, Homo sapien
tactctctggtgactgagtttctca

SEQ ID NO: 1988228 - DNA, 25 bp, Homo sapien
cccagaaaagtactctctggtgact

SEQ ID NO: 1988229 - DNA, 25 bp, Homo sapien
ctggcaggtaacaggcttctctttg

SEQ ID NO: 1988230 - DNA, 25 bp, Homo sapien
tcatccaccaggatactcacagccg

SEQ ID NO: 1988231 - DNA, 25 bp, Homo sapien
gccactggcaggtaacaggcttctc

SEQ ID NO: 1988232 - DNA, 25 bp, Homo sapien
ctcacagccgtcctggttgttcttg

SEQ ID NO: 1988233 - DNA, 25 bp, Homo sapien
aatgagttgccggtaaaattgttca

SEQ ID NO: 1988234 - DNA, 25 bp, Homo sapien
taaaattgttcagccctgtcttctc

SEQ ID NO: 1988235 - DNA, 25 bp, Homo sapien
aaagggacactctcatcttggctgt

SEQ ID NO: 1988236 - DNA, 25 bp, Homo sapien
ggcactttgaagatgattttccatg

SEQ ID NO: 1988237 - DNA, 25 bp, Homo sapien
tatttaaaccactcagctgaatatt

SEQ ID NO: 1988238 - DNA, 25 bp, Homo sapien
acagtggtatctcatatttaaacca

SEQ ID NO: 1988239 - DNA, 25 bp, Homo sapien
acaagaatgaggaggcataatcaca

SEQ ID NO: 1988240 - DNA, 25 bp, Homo sapien
ccactcagctgaatattaaattgaa

SEQ ID NO: 1988241 - DNA, 25 bp, Homo sapien
tcggagcagactgcaccaaagtggg

SEQ ID NO: 1988242 - DNA, 25 bp, Homo sapien
ttcttgagagtttagggccatgggc

SEQ ID NO: 1988243 - DNA, 25 bp, Homo sapien
caatctcggcactaatcggagcaga

SEQ ID NO: 1988244 - DNA, 25 bp, Homo sapien
tctggatcttaagtgggtctctggc

SEQ ID NO: 1988245 - DNA, 25 bp, Homo sapien
caaagtctaagtctgctgttacaac

SEQ ID NO: 1988246 - DNA, 25 bp, Homo sapien
caggatatcagcatatttgtgcacc

SEQ ID NO: 1988247 - DNA, 25 bp, Homo sapien
caaagcacgttggactgagaatact

SEQ ID NO: 1988248 - DNA, 25 bp, Homo sapien
ggcagtactcctgttaagccattag

SEQ ID NO: 1988249 - DNA, 25 bp, Homo sapien
gtttagctgccatgagcataaattg

SEQ ID NO: 1988250 - DNA, 25 bp, Homo sapien
gcttttgaacatgtgctagtcacca

SEQ ID NO: 1988251 - DNA, 25 bp, Homo sapien
cctgtttgtggttcattagattagc

SEQ ID NO: 1988252 - DNA, 25 bp, Homo sapien
ctgaggtacaggtagcagtctgact

SEQ ID NO: 1988253 - DNA, 25 bp, Homo sapien
aatactgaaggatgggccgggcgcg

SEQ ID NO: 1988254 - DNA, 25 bp, Homo sapien
agaaatactgaaggatgggccgggc

SEQ ID NO: 1988255 - DNA, 25 bp, Homo sapien
gaaatactgaaggatgggccgggcg

SEQ ID NO: 1988256 - DNA, 25 bp, Homo sapien
aaatactgaaggatgggccgggcgc

SEQ ID NO: 1988257 - DNA, 25 bp, Homo sapien
ttaatcatccatttcatcaaaaaag

SEQ ID NO: 1988258 - DNA, 25 bp, Homo sapien
catttaatcatccatttcatcaaaa

SEQ ID NO: 1988259 - DNA, 25 bp, Homo sapien
agaatcatttaatcatccatttcat

SEQ ID NO: 1988260 - DNA, 25 bp, Homo sapien
gaatcatttaatcatccatttcatc

SEQ ID NO: 1988261 - DNA, 25 bp, Homo sapien
tttaaccagatatgagtggctcagt

SEQ ID NO: 1988262 - DNA, 25 bp, Homo sapien
tatagggaatgctgtgcacaaaatt

SEQ ID NO: 1988263 - DNA, 25 bp, Homo sapien
gaagttcacgtaaacattcattcag

SEQ ID NO: 1988264 - DNA, 25 bp, Homo sapien
aacctcttgggatagtgctaccaca

SEQ ID NO: 1988265 - DNA, 25 bp, Homo sapien
tttactgaagtgtaacataagtaca

SEQ ID NO: 1988266 - DNA, 25 bp, Homo sapien
acaaactgaggaacactccaaacca

SEQ ID NO: 1988267 - DNA, 25 bp, Homo sapien
tgtattcagtataatttagaagtct

SEQ ID NO: 1988268 - DNA, 25 bp, Homo sapien
tactgaagtgtaacataagtacaga

SEQ ID NO: 1988269 - DNA, 25 bp, Homo sapien
agtgcagtggccacccgccacctcg

SEQ ID NO: 1988270 - DNA, 25 bp, Homo sapien
gtgcagtggccacccgccacctcgc

SEQ ID NO: 1988271 - DNA, 25 bp, Homo sapien
gagtgcagtggccacccgccacctc

SEQ ID NO: 1988272 - DNA, 25 bp, Homo sapien
ggagtgcagtggccacccgccacct

SEQ ID NO: 1988273 - DNA, 25 bp, Homo sapien
cacaggaagcataggactcttgaat

SEQ ID NO: 1988274 - DNA, 25 bp, Homo sapien
tgagccatcctatgccttactgcag

SEQ ID NO: 1988275 - DNA, 25 bp, Homo sapien
tgcaaatatagacgctgaacaggtc

SEQ ID NO: 1988276 - DNA, 25 bp, Homo sapien
catggctatgggtgactgtcgctca

SEQ ID NO: 1988277 - DNA, 25 bp, Homo sapien
tgacagacgaccagcggatggttag

SEQ ID NO: 1988278 - DNA, 25 bp, Homo sapien
gctcagccgggtacgattggctcat

SEQ ID NO: 1988279 - DNA, 25 bp, Homo sapien
tatttagcctaattacctaatgaca

SEQ ID NO: 1988280 - DNA, 25 bp, Homo sapien
tttgaaaattaatagctcagccggg

SEQ ID NO: 1988281 - DNA, 25 bp, Homo sapien
ttcacttctttcattagttgggcag

SEQ ID NO: 1988282 - DNA, 25 bp, Homo sapien
tatacttcttgcctttgaacaaagc

SEQ ID NO: 1988283 - DNA, 25 bp, Homo sapien
acaaagcagatgcttgcttgtttca

SEQ ID NO: 1988284 - DNA, 25 bp, Homo sapien
ctggttaatttgtctctatttgaga

SEQ ID NO: 1988285 - DNA, 25 bp, Homo sapien
cttgtgcttaagtttcctgaatagc

SEQ ID NO: 1988286 - DNA, 25 bp, Homo sapien
tattactattgctttctggttctct

SEQ ID NO: 1988287 - DNA, 25 bp, Homo sapien
agatacttgtttaataactggcatt

SEQ ID NO: 1988288 - DNA, 25 bp, Homo sapien
atgcccgaccatacccatctaattt

SEQ ID NO: 1988289 - DNA, 25 bp, Homo sapien
cttctaaggtacaatagtatgccgc

SEQ ID NO: 1988290 - DNA, 25 bp, Homo sapien
tagttcagataatcgagagtcactg

SEQ ID NO: 1988291 - DNA, 25 bp, Homo sapien
gccaagttcctatgcttagttcaga

SEQ ID NO: 1988292 - DNA, 25 bp, Homo sapien
agtatgccgcttggtagtagtcaaa

SEQ ID NO: 1988293 - DNA, 25 bp, Homo sapien
agcctctgtgcttcctgagttccag

SEQ ID NO: 1988294 - DNA, 25 bp, Homo sapien
cctctgtgcttcctgagttccagcg

SEQ ID NO: 1988295 - DNA, 25 bp, Homo sapien
tgcagcctctgtgcttcctgagttc

SEQ ID NO: 1988296 - DNA, 25 bp, Homo sapien
cagcctctgtgcttcctgagttcca

SEQ ID NO: 1988297 - DNA, 25 bp, Homo sapien
tcagatcggtcatttaaagctgcta

SEQ ID NO: 1988298 - DNA, 25 bp, Homo sapien
taattggaaagacacattgatggag

SEQ ID NO: 1988299 - DNA, 25 bp, Homo sapien
tatgttggccatgaagactgagaat

SEQ ID NO: 1988300 - DNA, 25 bp, Homo sapien
cctcataagcttaacagtgccgtgt

SEQ ID NO: 1988301 - DNA, 25 bp, Homo sapien
ttttgaattcttgaaaaacattgtg

SEQ ID NO: 1988302 - DNA, 25 bp, Homo sapien
tgaattcttgaaaaacattgtgtga

SEQ ID NO: 1988303 - DNA, 25 bp, Homo sapien
aaaaacattgtgtgatccttgtgca

SEQ ID NO: 1988304 - DNA, 25 bp, Homo sapien
ttcttgaaaaacattgtgtgatcct

SEQ ID NO: 1988305 - DNA, 25 bp, Homo sapien
tacaatcagtgcaggagctaatccc

SEQ ID NO: 1988306 - DNA, 25 bp, Homo sapien
gaaagccggttcaggacagtacaca

SEQ ID NO: 1988307 - DNA, 25 bp, Homo sapien
ttaacacagtcacgtgagggacgcg

SEQ ID NO: 1988308 - DNA, 25 bp, Homo sapien
tgtttctaggctccagtgcgttcgg

SEQ ID NO: 1988309 - DNA, 25 bp, Homo sapien
atgactgccaatctgatcagcacga

SEQ ID NO: 1988310 - DNA, 25 bp, Homo sapien
cccatgactgccaatctgatcagca

SEQ ID NO: 1988311 - DNA, 25 bp, Homo sapien
aatctgatcagcacgatgtcagctt

SEQ ID NO: 1988312 - DNA, 25 bp, Homo sapien
ctgatcagcacgatgtcagcttggg

SEQ ID NO: 1988313 - DNA, 25 bp, Homo sapien
ccctttgcctcattggccaagaaat

SEQ ID NO: 1988314 - DNA, 25 bp, Homo sapien
tccctttgcctcattggccaagaaa

SEQ ID NO: 1988315 - DNA, 25 bp, Homo sapien
cctttgcctcattggccaagaaatc

SEQ ID NO: 1988316 - DNA, 25 bp, Homo sapien
ttgaggtcttggcaccgtcttgtgg

SEQ ID NO: 1988317 - DNA, 25 bp, Homo sapien
caatgtccaacaatggtatcagttt

SEQ ID NO: 1988318 - DNA, 25 bp, Homo sapien
tccaacaatggtatcagttttttga

SEQ ID NO: 1988319 - DNA, 25 bp, Homo sapien
ccttgaggtcttggcaccgtcttgt

SEQ ID NO: 1988320 - DNA, 25 bp, Homo sapien
tcctggcgtgagcaatgaaccatac

SEQ ID NO: 1988321 - DNA, 25 bp, Homo sapien
cctcctggcgtgagcaatgaaccat

SEQ ID NO: 1988322 - DNA, 25 bp, Homo sapien
agcagggttcctacttttgcagcaa

SEQ ID NO: 1988323 - DNA, 25 bp, Homo sapien
gcagggttcctacttttgcagcaac

SEQ ID NO: 1988324 - DNA, 25 bp, Homo sapien
tgacgggtatgccatactccagggc

SEQ ID NO: 1988325 - DNA, 25 bp, Homo sapien
tgagggtgacgggtatgccatactc

SEQ ID NO: 1988326 - DNA, 25 bp, Homo sapien
agcaaagacggcttctccaatgagg

SEQ ID NO: 1988327 - DNA, 25 bp, Homo sapien
gagatgacaggcaccaagcaaagac

SEQ ID NO: 1988328 - DNA, 25 bp, Homo sapien
gatgatcttggaagcatagagggac

SEQ ID NO: 1988329 - DNA, 25 bp, Homo sapien
atacacttctaataatgcagccccc

SEQ ID NO: 1988330 - DNA, 25 bp, Homo sapien
ggttctgggtttcgatcaaacgcat

SEQ ID NO: 1988331 - DNA, 25 bp, Homo sapien
tccacatcagggcaatatcaccata

SEQ ID NO: 1988332 - DNA, 25 bp, Homo sapien
tgaggttctgggtttcgatcaaacg

SEQ ID NO: 1988333 - DNA, 25 bp, Homo sapien
aagagtcctagtggttttcaacagc

SEQ ID NO: 1988334 - DNA, 25 bp, Homo sapien
ccaagagtcctagtggttttcaaca

SEQ ID NO: 1988335 - DNA, 25 bp, Homo sapien
caagagtcctagtggttttcaacag

SEQ ID NO: 1988336 - DNA, 25 bp, Homo sapien
caccaagagtcctagtggttttcaa

SEQ ID NO: 1988337 - DNA, 25 bp, Homo sapien
tcgtgtctgtacttgtcatagaagg

SEQ ID NO: 1988338 - DNA, 25 bp, Homo sapien
gatgatacactgccaccgtggcctg

SEQ ID NO: 1988339 - DNA, 25 bp, Homo sapien
ggaagcatctcgtgtctgtacttgt

SEQ ID NO: 1988340 - DNA, 25 bp, Homo sapien
gcatctcgtgtctgtacttgtcata

SEQ ID NO: 1988341 - DNA, 25 bp, Homo sapien
ttccaattgatcagagtgcacaaag

SEQ ID NO: 1988342 - DNA, 25 bp, Homo sapien
agtgcacaaagacccttcccgtctg

SEQ ID NO: 1988343 - DNA, 25 bp, Homo sapien
aattgatcagagtgcacaaagaccc

SEQ ID NO: 1988344 - DNA, 25 bp, Homo sapien
atcagagtgcacaaagacccttccc

SEQ ID NO: 1988345 - DNA, 25 bp, Homo sapien
tgggccatgcactcggagcctgtct

SEQ ID NO: 1988346 - DNA, 25 bp, Homo sapien
gggccatgcactcggagcctgtctt

SEQ ID NO: 1988347 - DNA, 25 bp, Homo sapien
caaagatgatctcacggcactgctg

SEQ ID NO: 1988348 - DNA, 25 bp, Homo sapien
ggccatgcactcggagcctgtcttg

SEQ ID NO: 1988349 - DNA, 25 bp, Homo sapien
cattcctcatctttgaggagggcca

SEQ ID NO: 1988350 - DNA, 25 bp, Homo sapien
attcctcatctttgaggagggccac

SEQ ID NO: 1988351 - DNA, 25 bp, Homo sapien
tcattcctcatctttgaggagggcc

SEQ ID NO: 1988352 - DNA, 25 bp, Homo sapien
ttctttgctctcctggctggacttc

SEQ ID NO: 1988353 - DNA, 25 bp, Homo sapien
tgttctttgctctcctggctggact

SEQ ID NO: 1988354 - DNA, 25 bp, Homo sapien
tctttgctctcctggctggacttcc

SEQ ID NO: 1988355 - DNA, 25 bp, Homo sapien
tttgctctcctggctggacttccat

SEQ ID NO: 1988356 - DNA, 25 bp, Homo sapien
atggccaatgactgccccttccgag

SEQ ID NO: 1988357 - DNA, 25 bp, Homo sapien
gccccttccgagacagcccaagaag

SEQ ID NO: 1988358 - DNA, 25 bp, Homo sapien
tgtgctccccgtaacctctacatgg

SEQ ID NO: 1988359 - DNA, 25 bp, Homo sapien
ctgggtctttttccggttctcagca

SEQ ID NO: 1988360 - DNA, 25 bp, Homo sapien
taatgataatcagagaacagccgct

SEQ ID NO: 1988361 - DNA, 25 bp, Homo sapien
tgaggcagcagtaaaccttccaagc

SEQ ID NO: 1988362 - DNA, 25 bp, Homo sapien
cactgtcagaagttaagtgcgggcg

SEQ ID NO: 1988363 - DNA, 25 bp, Homo sapien
tgagatcttcggcaagccgcctagg

SEQ ID NO: 1988364 - DNA, 25 bp, Homo sapien
cagtcgaaggacgtgacgggcaact

SEQ ID NO: 1988365 - DNA, 25 bp, Homo sapien
gtgtaacacctcaaggcacacggcg

SEQ ID NO: 1988366 - DNA, 25 bp, Homo sapien
ggtccggacaggctggtgtaacacc

SEQ ID NO: 1988367 - DNA, 25 bp, Homo sapien
gccgatttgccgctgtcggtgctca

SEQ ID NO: 1988368 - DNA, 25 bp, Homo sapien
gcagcccgttctaccgtgttcagcg

SEQ ID NO: 1988369 - DNA, 25 bp, Homo sapien
tctggagttccgcacctgggcttcg

SEQ ID NO: 1988370 - DNA, 25 bp, Homo sapien
ttgcgggagcccctgccttgtagct

SEQ ID NO: 1988371 - DNA, 25 bp, Homo sapien
ggcgagcgctggttctccagccaag

SEQ ID NO: 1988372 - DNA, 25 bp, Homo sapien
gaaagacactttgcacagatccttg

SEQ ID NO: 1988373 - DNA, 25 bp, Homo sapien
caactgtggaaagtcactcggaagc

SEQ ID NO: 1988374 - DNA, 25 bp, Homo sapien
tttgcttaagacgagcctctgtggg

SEQ ID NO: 1988375 - DNA, 25 bp, Homo sapien
tgtgggcattctgggaacacgtgca

SEQ ID NO: 1988376 - DNA, 25 bp, Homo sapien
tcagagtagtgtagcaacgtgccaa

SEQ ID NO: 1988377 - DNA, 25 bp, Homo sapien
aacgtgccaagtttatgcagccaca

SEQ ID NO: 1988378 - DNA, 25 bp, Homo sapien
aatgtgcctgtataaccaggaggcc

SEQ ID NO: 1988379 - DNA, 25 bp, Homo sapien
ccaggaggcctgatataatgaatgt

SEQ ID NO: 1988380 - DNA, 25 bp, Homo sapien
ctggcccccaataattggttaccag

SEQ ID NO: 1988381 - DNA, 25 bp, Homo sapien
gcccccaataattggttaccagcat

SEQ ID NO: 1988382 - DNA, 25 bp, Homo sapien
ggcccccaataattggttaccagca

SEQ ID NO: 1988383 - DNA, 25 bp, Homo sapien
tggcccccaataattggttaccagc

SEQ ID NO: 1988384 - DNA, 25 bp, Homo sapien
cccagcaagacttctttagaatcac

SEQ ID NO: 1988385 - DNA, 25 bp, Homo sapien
tcccagcaagacttctttagaatca

SEQ ID NO: 1988386 - DNA, 25 bp, Homo sapien
ctggtagcaatacaggaacggcaga

SEQ ID NO: 1988387 - DNA, 25 bp, Homo sapien
tggtagcaatacaggaacggcagaa

SEQ ID NO: 1988388 - DNA, 25 bp, Homo sapien
ggtagcaatacaggaacggcagaat

SEQ ID NO: 1988389 - DNA, 25 bp, Homo sapien
gcgcagttcttatactctgatttca

SEQ ID NO: 1988390 - DNA, 25 bp, Homo sapien
gcaataaggacaggtccacttgttg

SEQ ID NO: 1988391 - DNA, 25 bp, Homo sapien
cttctgaaggaagatatgcccggca

SEQ ID NO: 1988392 - DNA, 25 bp, Homo sapien
cagggtgtcacactcagcgcagttc

SEQ ID NO: 1988393 - DNA, 25 bp, Homo sapien
gaatttggttcttctaaaaagcata

SEQ ID NO: 1988394 - DNA, 25 bp, Homo sapien
ttagaagatccaactgttaagttct

SEQ ID NO: 1988395 - DNA, 25 bp, Homo sapien
agaagatccaactgttaagttcttg

SEQ ID NO: 1988396 - DNA, 25 bp, Homo sapien
ctaaaaagcatatacggccgggcgc

SEQ ID NO: 1988397 - DNA, 25 bp, Homo sapien
tgttaaaaaagggctcaatgaaagc

SEQ ID NO: 1988398 - DNA, 25 bp, Homo sapien
tctcctcaagttcttgtagtggtcc

SEQ ID NO: 1988399 - DNA, 25 bp, Homo sapien
gctgtctcctcaagttcttgtagtg

SEQ ID NO: 1988400 - DNA, 25 bp, Homo sapien
tgtacttctgacaagtccgaatatg

SEQ ID NO: 1988401 - DNA, 25 bp, Homo sapien
gaatatgtgccctcatttcactgag

SEQ ID NO: 1988402 - DNA, 25 bp, Homo sapien
tccgatctgtgatgagtaatacaat

SEQ ID NO: 1988403 - DNA, 25 bp, Homo sapien
taatacaatgatccagcaagctgtc

SEQ ID NO: 1988404 - DNA, 25 bp, Homo sapien
gcctccgttccgatctgtgatgagt

SEQ ID NO: 1988405 - DNA, 25 bp, Homo sapien
atacagttccctctgacaaaaggga

SEQ ID NO: 1988406 - DNA, 25 bp, Homo sapien
catgttacagccattccaagatgca

SEQ ID NO: 1988407 - DNA, 25 bp, Homo sapien
tcagttgccaagtactatgtatgca

SEQ ID NO: 1988408 - DNA, 25 bp, Homo sapien
tggacactccgctctatctgtggct

SEQ ID NO: 1988409 - DNA, 25 bp, Homo sapien
tggcttagattaacctccacagcaa

SEQ ID NO: 1988410 - DNA, 25 bp, Homo sapien
ttgaattccatttctaaagtctgtg

SEQ ID NO: 1988411 - DNA, 25 bp, Homo sapien
aaacaaagtgtgactaacttgcaga

SEQ ID NO: 1988412 - DNA, 25 bp, Homo sapien
ggtattaaacggcaaagtggacaga

SEQ ID NO: 1988413 - DNA, 25 bp, Homo sapien
tgtcttattaaactgccactgaagc

SEQ ID NO: 1988414 - DNA, 25 bp, Homo sapien
gctgcttggattctcatcgggtatt

SEQ ID NO: 1988415 - DNA, 25 bp, Homo sapien
ggtaagcttaacaagacagcatgaa

SEQ ID NO: 1988416 - DNA, 25 bp, Homo sapien
cacttggatcggaaaggtaagctta

SEQ ID NO: 1988417 - DNA, 25 bp, Homo sapien
tcggaaaggtaagcttaacaagaca

SEQ ID NO: 1988418 - DNA, 25 bp, Homo sapien
aattttattcacttggatcggaaag

SEQ ID NO: 1988419 - DNA, 25 bp, Homo sapien
gattcacatattcaagaagtgaccg

SEQ ID NO: 1988420 - DNA, 25 bp, Homo sapien
gaagtgaccggtctaagactcttcg

SEQ ID NO: 1988421 - DNA, 25 bp, Homo sapien
ttatgtggtgttcgagtgattcaca

SEQ ID NO: 1988422 - DNA, 25 bp, Homo sapien
gactcttcggataagagcttcctca

SEQ ID NO: 1988423 - DNA, 25 bp, Homo sapien
tctaatttgcaaaccgagatcctcc

SEQ ID NO: 1988424 - DNA, 25 bp, Homo sapien
gtttcacagagaccagtgttggcca

SEQ ID NO: 1988425 - DNA, 25 bp, Homo sapien
ttatcgtgcctaaccatgatggtag

SEQ ID NO: 1988426 - DNA, 25 bp, Homo sapien
taaatggtgcaattcagtggtccct

SEQ ID NO: 1988427 - DNA, 25 bp, Homo sapien
cctggaggtctctaaggaggtctgc

SEQ ID NO: 1988428 - DNA, 25 bp, Homo sapien
aaagtgccttttgtatcgctctgaa

SEQ ID NO: 1988429 - DNA, 25 bp, Homo sapien
caaaataattcaggcgaccagcacc

SEQ ID NO: 1988430 - DNA, 25 bp, Homo sapien
ctaaaagggaggatatgaggctcac

SEQ ID NO: 1988431 - DNA, 25 bp, Homo sapien
cagtcatgtcaaactcccagcgaag

SEQ ID NO: 1988432 - DNA, 25 bp, Homo sapien
tctagtacagttatggagacattac

SEQ ID NO: 1988433 - DNA, 25 bp, Homo sapien
cagcgaagagcttttcaaacagaag

SEQ ID NO: 1988434 - DNA, 25 bp, Homo sapien
tagtggtgaatacttgcaatccaaa

SEQ ID NO: 1988435 - DNA, 25 bp, Homo sapien
taaaacgttttatcttgcagaactg

SEQ ID NO: 1988436 - DNA, 25 bp, Homo sapien
ttaaaaccagcatgcctcaaggcgg

SEQ ID NO: 1988437 - DNA, 25 bp, Homo sapien
gacagtagcgttatctatagtcacc

SEQ ID NO: 1988438 - DNA, 25 bp, Homo sapien
tatagtcaccttgttacgcaacaga

SEQ ID NO: 1988439 - DNA, 25 bp, Homo sapien
ttcacgtgttcgtagagacccggcc

SEQ ID NO: 1988440 - DNA, 25 bp, Homo sapien
tgaagtgcggcctgtatagcaaccg

SEQ ID NO: 1988441 - DNA, 25 bp, Homo sapien
gtgcgctgtgcttatcggcccctaa

SEQ ID NO: 1988442 - DNA, 25 bp, Homo sapien
gcgttgtggacggagctgcttttcc

SEQ ID NO: 1988443 - DNA, 25 bp, Homo sapien
aaacaaggcgatggcgacagcggca

SEQ ID NO: 1988444 - DNA, 25 bp, Homo sapien
cggcagcggccgaggtgacggtggc

SEQ ID NO: 1988445 - DNA, 25 bp, Homo sapien
cggccgaggtgacggtggcggcccg

SEQ ID NO: 1988446 - DNA, 25 bp, Homo sapien
atggggaaacaaggcgatggcgaca

SEQ ID NO: 1988447 - DNA, 25 bp, Homo sapien
tcatcttcggtgtaggacgtggccg

SEQ ID NO: 1988448 - DNA, 25 bp, Homo sapien
aaatcatcttcggtgtaggacgtgg

SEQ ID NO: 1988449 - DNA, 25 bp, Homo sapien
atcttcggtgtaggacgtggccgca

SEQ ID NO: 1988450 - DNA, 25 bp, Homo sapien
acgtggccgcagagaggtcctcggc

SEQ ID NO: 1988451 - DNA, 25 bp, Homo sapien
aggctccaagatccctgcaattcct

SEQ ID NO: 1988452 - DNA, 25 bp, Homo sapien
tccctgcaattcctcccgggcctgg

SEQ ID NO: 1988453 - DNA, 25 bp, Homo sapien
cctggcggagacgacaggggcctcc

SEQ ID NO: 1988454 - DNA, 25 bp, Homo sapien
aacaaaaaggctccaagatccctgc

SEQ ID NO: 1988455 - DNA, 25 bp, Homo sapien
cccgcgcgagcaccgccggccgctt

SEQ ID NO: 1988456 - DNA, 25 bp, Homo sapien
cttgaaagcagggcaggtcgcgggg

SEQ ID NO: 1988457 - DNA, 25 bp, Homo sapien
accgccggccgcttttgacactcga

SEQ ID NO: 1988458 - DNA, 25 bp, Homo sapien
ttttgacactcgacaccccagcctt

SEQ ID NO: 1988459 - DNA, 25 bp, Homo sapien
gaagagctcttggaccgaggggacg

SEQ ID NO: 1988460 - DNA, 25 bp, Homo sapien
aagagctcttggaccgaggggacgg

SEQ ID NO: 1988461 - DNA, 25 bp, Homo sapien
cacatagtggactggaaacgaaaca

SEQ ID NO: 1988462 - DNA, 25 bp, Homo sapien
ctagatccctctaacacatagtgga

SEQ ID NO: 1988463 - DNA, 25 bp, Homo sapien
tggaaacgaaacaaaacgctctcga

SEQ ID NO: 1988464 - DNA, 25 bp, Homo sapien
cgaaacaaaacgctctcgagggtgt

SEQ ID NO: 1988465 - DNA, 25 bp, Homo sapien
cgaaaatcctgtcagttttaagaga

SEQ ID NO: 1988466 - DNA, 25 bp, Homo sapien
tcaatgcccgaaaatcctgtcagtt

SEQ ID NO: 1988467 - DNA, 25 bp, Homo sapien
tgcccgaaaatcctgtcagttttaa

SEQ ID NO: 1988468 - DNA, 25 bp, Homo sapien
aatcctgtcagttttaagagaccag

SEQ ID NO: 1988469 - DNA, 25 bp, Homo sapien
aatcatcacactatgaaccgcaaaa

SEQ ID NO: 1988470 - DNA, 25 bp, Homo sapien
tcatcacactatgaaccgcaaaagg

SEQ ID NO: 1988471 - DNA, 25 bp, Homo sapien
tcacactatgaaccgcaaaaggatc

SEQ ID NO: 1988472 - DNA, 25 bp, Homo sapien
ctcaatcatcacactatgaaccgca

SEQ ID NO: 1988473 - DNA, 25 bp, Homo sapien
tgcagtcaggaaacattttctacag

SEQ ID NO: 1988474 - DNA, 25 bp, Homo sapien
agtcaggaaacattttctacagaaa

SEQ ID NO: 1988475 - DNA, 25 bp, Homo sapien
cagtcaggaaacattttctacagaa

SEQ ID NO: 1988476 - DNA, 25 bp, Homo sapien
gcagtcaggaaacattttctacaga

SEQ ID NO: 1988477 - DNA, 25 bp, Homo sapien
agcatctgcagctaccagaaaactt

SEQ ID NO: 1988478 - DNA, 25 bp, Homo sapien
atctgcagctaccagaaaacttcct

SEQ ID NO: 1988479 - DNA, 25 bp, Homo sapien
gcatctgcagctaccagaaaacttc

SEQ ID NO: 1988480 - DNA, 25 bp, Homo sapien
catctgcagctaccagaaaacttcc

SEQ ID NO: 1988481 - DNA, 25 bp, Homo sapien
tacaagatttgtaatgatgtctcat

SEQ ID NO: 1988482 - DNA, 25 bp, Homo sapien
ctgttccctactgaatcttgagaga

SEQ ID NO: 1988483 - DNA, 25 bp, Homo sapien
gaaacaccatattcatcctgatact

SEQ ID NO: 1988484 - DNA, 25 bp, Homo sapien
gatgtctcatgcgatagaatttaat

SEQ ID NO: 1988485 - DNA, 25 bp, Homo sapien
tcccagatgagagcttacgtgtgcc

SEQ ID NO: 1988486 - DNA, 25 bp, Homo sapien
caaatgggcaggagctcacatagag

SEQ ID NO: 1988487 - DNA, 25 bp, Homo sapien
taaaccacaagtgcattttggccat

SEQ ID NO: 1988488 - DNA, 25 bp, Homo sapien
tgcatctaggagtgtacggttcaaa

SEQ ID NO: 1988489 - DNA, 25 bp, Homo sapien
gggaggtcgatgttgtagtgagctg

SEQ ID NO: 1988490 - DNA, 25 bp, Homo sapien
taaaaataaacatttctggccaggc

SEQ ID NO: 1988491 - DNA, 25 bp, Homo sapien
gcctgggagacgagcaaaactctgt

SEQ ID NO: 1988492 - DNA, 25 bp, Homo sapien
aaataaacatttctggccaggcgtg

SEQ ID NO: 1988493 - DNA, 25 bp, Homo sapien
gaatggccttagtaaaattagcact

SEQ ID NO: 1988494 - DNA, 25 bp, Homo sapien
tattatgagaaactaccccacacca

SEQ ID NO: 1988495 - DNA, 25 bp, Homo sapien
actgtatgagcctactgacatccag

SEQ ID NO: 1988496 - DNA, 25 bp, Homo sapien
tccagttactaacgtttacagagtc

SEQ ID NO: 1988497 - DNA, 25 bp, Homo sapien
aagaagcagacaaaactatgggaga

SEQ ID NO: 1988498 - DNA, 25 bp, Homo sapien
gatctacgctaaaaaactatagtaa

SEQ ID NO: 1988499 - DNA, 25 bp, Homo sapien
ggtgcctgctatttaacactgaata

SEQ ID NO: 1988500 - DNA, 25 bp, Homo sapien
tataggtgtattcccactaaaatca

SEQ ID NO: 1988501 - DNA, 25 bp, Homo sapien
tatcatgcctgctcatttagcccag

SEQ ID NO: 1988502 - DNA, 25 bp, Homo sapien
tagtcatccttgtatcatgcctagg

SEQ ID NO: 1988503 - DNA, 25 bp, Homo sapien
gtagctgggtctatcggccatgcca

SEQ ID NO: 1988504 - DNA, 25 bp, Homo sapien
cgatcgcggctaattgcaaactcct

SEQ ID NO: 1988505 - DNA, 25 bp, Homo sapien
gaagactattaaactactatttgta

SEQ ID NO: 1988506 - DNA, 25 bp, Homo sapien
agtcaaattatggagagtgcactta

SEQ ID NO: 1988507 - DNA, 25 bp, Homo sapien
tatggagagtgcacttattaaggga

SEQ ID NO: 1988508 - DNA, 25 bp, Homo sapien
tgcacttattaagggagtggttaca

SEQ ID NO: 1988509 - DNA, 25 bp, Homo sapien
ttatcagatgtggatgtttcactcc

SEQ ID NO: 1988510 - DNA, 25 bp, Homo sapien
tgtgttatcagatgtggatgtttca

SEQ ID NO: 1988511 - DNA, 25 bp, Homo sapien
agatgtggatgtttcactcctattg

SEQ ID NO: 1988512 - DNA, 25 bp, Homo sapien
tgttatcagatgtggatgtttcact

SEQ ID NO: 1988513 - DNA, 25 bp, Homo sapien
ccagtaaacgctgtctggtaaaatt

SEQ ID NO: 1988514 - DNA, 25 bp, Homo sapien
cacttaaaagtaggatgaccagaag

SEQ ID NO: 1988515 - DNA, 25 bp, Homo sapien
gaaataggtgattactgttacagtg

SEQ ID NO: 1988516 - DNA, 25 bp, Homo sapien
tgttacagtgatccagtaaacgctg

SEQ ID NO: 1988517 - DNA, 25 bp, Homo sapien
ctccccaaggaagagacacacaaat

SEQ ID NO: 1988518 - DNA, 25 bp, Homo sapien
cccaaggaagagacacacaaatagg

SEQ ID NO: 1988519 - DNA, 25 bp, Homo sapien
ggaagagacacacaaataggacatg

SEQ ID NO: 1988520 - DNA, 25 bp, Homo sapien
gaagagacacacaaataggacatgt

SEQ ID NO: 1988521 - DNA, 25 bp, Homo sapien
actaacgaaatttctggtaatctgg

SEQ ID NO: 1988522 - DNA, 25 bp, Homo sapien
gatttagatgactaacgaaatttct

SEQ ID NO: 1988523 - DNA, 25 bp, Homo sapien
gatgactaacgaaatttctggtaat

SEQ ID NO: 1988524 - DNA, 25 bp, Homo sapien
tttagatgactaacgaaatttctgg

SEQ ID NO: 1988525 - DNA, 25 bp, Homo sapien
ctctgcttacctaaactggaaaaca

SEQ ID NO: 1988526 - DNA, 25 bp, Homo sapien
caagccctgcctagattacctactt

SEQ ID NO: 1988527 - DNA, 25 bp, Homo sapien
gctaaagcaataaagcgcacctaaa

SEQ ID NO: 1988528 - DNA, 25 bp, Homo sapien
caaatagccattctttgtcaggact

SEQ ID NO: 1988529 - DNA, 25 bp, Homo sapien
tcaacagcagtttggtattgggttt

SEQ ID NO: 1988530 - DNA, 25 bp, Homo sapien
caacagcagtttggtattgggtttc

SEQ ID NO: 1988531 - DNA, 25 bp, Homo sapien
ttcaacagcagtttggtattgggtt

SEQ ID NO: 1988532 - DNA, 25 bp, Homo sapien
tgtagtttcccccttaaagatggca

SEQ ID NO: 1988533 - DNA, 25 bp, Homo sapien
ggcacttgcaggtacaaagatgcag

SEQ ID NO: 1988534 - DNA, 25 bp, Homo sapien
cacttgcaggtacaaagatgcagag

SEQ ID NO: 1988535 - DNA, 25 bp, Homo sapien
gatggcacttgcaggtacaaagatg

SEQ ID NO: 1988536 - DNA, 25 bp, Homo sapien
ttgttaggttatatcaatcacatcg

SEQ ID NO: 1988537 - DNA, 25 bp, Homo sapien
gttaggttatatcaatcacatcgtt

SEQ ID NO: 1988538 - DNA, 25 bp, Homo sapien
tgttaggttatatcaatcacatcgt

SEQ ID NO: 1988539 - DNA, 25 bp, Homo sapien
tttgttaggttatatcaatcacatc

SEQ ID NO: 1988540 - DNA, 25 bp, Homo sapien
aaaaagctgatatgtgagacacaca

SEQ ID NO: 1988541 - DNA, 25 bp, Homo sapien
gagacacacaagactatcaatgata

SEQ ID NO: 1988542 - DNA, 25 bp, Homo sapien
tagctttcctaagtggtattgtgaa

SEQ ID NO: 1988543 - DNA, 25 bp, Homo sapien
taaagtctatccctattcccaatgc

SEQ ID NO: 1988544 - DNA, 25 bp, Homo sapien
aacatccaggccgaggtagggcacg

SEQ ID NO: 1988545 - DNA, 25 bp, Homo sapien
tgcaaccgcttttgtttctattggt

SEQ ID NO: 1988546 - DNA, 25 bp, Homo sapien
catgatttgagggagcctaacaaaa

SEQ ID NO: 1988547 - DNA, 25 bp, Homo sapien
gcttcagatcctatcccagaaaata

SEQ ID NO: 1988548 - DNA, 25 bp, Homo sapien
ggtcaggagttcagtttcgacaaac

SEQ ID NO: 1988549 - DNA, 25 bp, Homo sapien
tctatgaagaggtaagtacaggcta

SEQ ID NO: 1988550 - DNA, 25 bp, Homo sapien
cataaggacaactaagcttggatgg

SEQ ID NO: 1988551 - DNA, 25 bp, Homo sapien
attttctcttagacaccaaattgga

SEQ ID NO: 1988552 - DNA, 25 bp, Homo sapien
tgtgggataggcaattttaccatca

SEQ ID NO: 1988553 - DNA, 25 bp, Homo sapien
atttcagatctgaggaccagaagcc

SEQ ID NO: 1988554 - DNA, 25 bp, Homo sapien
acatttcagatctgaggaccagaag

SEQ ID NO: 1988555 - DNA, 25 bp, Homo sapien
tcacaaattggcccaaaaactgcat

SEQ ID NO: 1988556 - DNA, 25 bp, Homo sapien
tgttcctgaagtgggagggggtcca

SEQ ID NO: 1988557 - DNA, 25 bp, Homo sapien
ttaagcattcgctgtgcctcgcagt

SEQ ID NO: 1988558 - DNA, 25 bp, Homo sapien
gggggtccatggcattgtttaagca

SEQ ID NO: 1988559 - DNA, 25 bp, Homo sapien
gagactccgctacaatgtgttcctg

SEQ ID NO: 1988560 - DNA, 25 bp, Homo sapien
ccttctgagaaaactactagaataa

SEQ ID NO: 1988561 - DNA, 25 bp, Homo sapien
tcaagtttaaccactagcaggtggc

SEQ ID NO: 1988562 - DNA, 25 bp, Homo sapien
caacactgtgcatcatcttgcttct

SEQ ID NO: 1988563 - DNA, 25 bp, Homo sapien
gcttctcctctactgcattgacttt

SEQ ID NO: 1988564 - DNA, 25 bp, Homo sapien
agggtaggccagcaggctaaagacc

SEQ ID NO: 1988565 - DNA, 25 bp, Homo sapien
gggtaggccagcaggctaaagaccc

SEQ ID NO: 1988566 - DNA, 25 bp, Homo sapien
cagggtaggccagcaggctaaagac

SEQ ID NO: 1988567 - DNA, 25 bp, Homo sapien
ccagttgaaagtagctaactatgac

SEQ ID NO: 1988568 - DNA, 25 bp, Homo sapien
gttgaaagtagctaactatgacatt

SEQ ID NO: 1988569 - DNA, 25 bp, Homo sapien
cttccagttgaaagtagctaactat

SEQ ID NO: 1988570 - DNA, 25 bp, Homo sapien
tgaaagtagctaactatgacattca

SEQ ID NO: 1988571 - DNA, 25 bp, Homo sapien
agccagaaatcacgagaagagcatc

SEQ ID NO: 1988572 - DNA, 25 bp, Homo sapien
gccagaaatcacgagaagagcatcc

SEQ ID NO: 1988573 - DNA, 25 bp, Homo sapien
ccagaaatcacgagaagagcatcca

SEQ ID NO: 1988574 - DNA, 25 bp, Homo sapien
caagccagaaatcacgagaagagca

SEQ ID NO: 1988575 - DNA, 25 bp, Homo sapien
caaaaaattgaacattatgtttata

SEQ ID NO: 1988576 - DNA, 25 bp, Homo sapien
ttgaacattatgtttataaaaggag

SEQ ID NO: 1988577 - DNA, 25 bp, Homo sapien
aattgaacattatgtttataaaagg

SEQ ID NO: 1988578 - DNA, 25 bp, Homo sapien
gaacattatgtttataaaaggagaa

SEQ ID NO: 1988579 - DNA, 25 bp, Homo sapien
tcaaatatgtcctggtccattccgc

SEQ ID NO: 1988580 - DNA, 25 bp, Homo sapien
tatgtcctggtccattccgccatct

SEQ ID NO: 1988581 - DNA, 25 bp, Homo sapien
aaatatgtcctggtccattccgcca

SEQ ID NO: 1988582 - DNA, 25 bp, Homo sapien
atatcaaatatgtcctggtccattc

SEQ ID NO: 1988583 - DNA, 25 bp, Homo sapien
tgtcaccctcaaaaagatccagtcc

SEQ ID NO: 1988584 - DNA, 25 bp, Homo sapien
aagtctgatgtcaccctcaaaaaga

SEQ ID NO: 1988585 - DNA, 25 bp, Homo sapien
tctgatgtcaccctcaaaaagatcc

SEQ ID NO: 1988586 - DNA, 25 bp, Homo sapien
tgatgtcaccctcaaaaagatccag

SEQ ID NO: 1988587 - DNA, 25 bp, Homo sapien
tatgaggccatctatacttttctcc

SEQ ID NO: 1988588 - DNA, 25 bp, Homo sapien
tacttttctccaatgatggaatttc

SEQ ID NO: 1988589 - DNA, 25 bp, Homo sapien
tctatacttttctccaatgatggaa

SEQ ID NO: 1988590 - DNA, 25 bp, Homo sapien
catatggaatggtatgaggccatct

SEQ ID NO: 1988591 - DNA, 25 bp, Homo sapien
catggccagcgtcttggagcagttc

SEQ ID NO: 1988592 - DNA, 25 bp, Homo sapien
gagcagttcaaaggcatcaatggca

SEQ ID NO: 1988593 - DNA, 25 bp, Homo sapien
ttcattcctctcagccaaaaagact

SEQ ID NO: 1988594 - DNA, 25 bp, Homo sapien
tcctctcagccaaaaagacttggag

SEQ ID NO: 1988595 - DNA, 25 bp, Homo sapien
tggccgtggccctgcggcgcgccat

SEQ ID NO: 1988596 - DNA, 25 bp, Homo sapien
ccctgcggcgcgccatgcatgagat

SEQ ID NO: 1988597 - DNA, 25 bp, Homo sapien
cgtggccctgcggcgcgccatgcat

SEQ ID NO: 1988598 - DNA, 25 bp, Homo sapien
tggccctgcggcgcgccatgcatga

SEQ ID NO: 1988599 - DNA, 25 bp, Homo sapien
gctctgagtacctcaagtgcctgac

SEQ ID NO: 1988600 - DNA, 25 bp, Homo sapien
gagagctctgagtacctcaagtgcc

SEQ ID NO: 1988601 - DNA, 25 bp, Homo sapien
gagctctgagtacctcaagtgcctg

SEQ ID NO: 1988602 - DNA, 25 bp, Homo sapien
aggagagctctgagtacctcaagtg

SEQ ID NO: 1988603 - DNA, 25 bp, Homo sapien
tcacctcggtctatgagagcaaagc

SEQ ID NO: 1988604 - DNA, 25 bp, Homo sapien
tgctggacaacatcaggcgggtgct

SEQ ID NO: 1988605 - DNA, 25 bp, Homo sapien
aaagctgagtttccggtcggccctg

SEQ ID NO: 1988606 - DNA, 25 bp, Homo sapien
tacatcatgggcaagtacgcagagg

SEQ ID NO: 1988607 - DNA, 25 bp, Homo sapien
tcaatacatgttttaaggcgataac

SEQ ID NO: 1988608 - DNA, 25 bp, Homo sapien
tcaaatgcattgaggataactccct

SEQ ID NO: 1988609 - DNA, 25 bp, Homo sapien
tttaaggcgataacgttcaaatgca

SEQ ID NO: 1988610 - DNA, 25 bp, Homo sapien
gcattgaggataactcccttagcat

SEQ ID NO: 1988611 - DNA, 25 bp, Homo sapien
acagtttgccccgatggaaagttct

SEQ ID NO: 1988612 - DNA, 25 bp, Homo sapien
ccaacccgcctatttcctactgaag

SEQ ID NO: 1988613 - DNA, 25 bp, Homo sapien
tgttgctattcggtcacagtttgcc

SEQ ID NO: 1988614 - DNA, 25 bp, Homo sapien
cccgatggaaagttcttgcttccca

SEQ ID NO: 1988615 - DNA, 25 bp, Homo sapien
tcagaacgcgactgctcatgccaga

SEQ ID NO: 1988616 - DNA, 25 bp, Homo sapien
atagtcatcccggtcagaacgcgac

SEQ ID NO: 1988617 - DNA, 25 bp, Homo sapien
tcatcccggtcagaacgcgactgct

SEQ ID NO: 1988618 - DNA, 25 bp, Homo sapien
tcccggtcagaacgcgactgctcat

SEQ ID NO: 1988619 - DNA, 25 bp, Homo sapien
gacagaattctgtcccacattatcc

SEQ ID NO: 1988620 - DNA, 25 bp, Homo sapien
acagaattctgtcccacattatcct

SEQ ID NO: 1988621 - DNA, 25 bp, Homo sapien
agaattctgtcccacattatcctga

SEQ ID NO: 1988622 - DNA, 25 bp, Homo sapien
gaattctgtcccacattatcctgac

SEQ ID NO: 1988623 - DNA, 25 bp, Homo sapien
tactgaagtgtaatcatagggaaca

SEQ ID NO: 1988624 - DNA, 25 bp, Homo sapien
gattcaactttaggagatcagagtc

SEQ ID NO: 1988625 - DNA, 25 bp, Homo sapien
tcagggaatctgatatatcgtcact

SEQ ID NO: 1988626 - DNA, 25 bp, Homo sapien
tcgttggccgatcacatcctcaaag

SEQ ID NO: 1988627 - DNA, 25 bp, Homo sapien
aactttggatcatgccacacacatt

SEQ ID NO: 1988628 - DNA, 25 bp, Homo sapien
gaacctgtgaaacccgttgccagtc

SEQ ID NO: 1988629 - DNA, 25 bp, Homo sapien
agttcaaaactgcacgagtccataa

SEQ ID NO: 1988630 - DNA, 25 bp, Homo sapien
cgttgccagtcagcattatctcctg

SEQ ID NO: 1988631 - DNA, 25 bp, Homo sapien
ggctgcaggtcaagcccaaacagca

SEQ ID NO: 1988632 - DNA, 25 bp, Homo sapien
aagatgctacagagggttgttcccc

SEQ ID NO: 1988633 - DNA, 25 bp, Homo sapien
gattctacatgggacacctttcaag

SEQ ID NO: 1988634 - DNA, 25 bp, Homo sapien
caaacagcagggctaaaaggtagat

SEQ ID NO: 1988635 - DNA, 25 bp, Homo sapien
tacagagctgctatcgaaatgcatg

SEQ ID NO: 1988636 - DNA, 25 bp, Homo sapien
gtctgcagaatactccctgatatag

SEQ ID NO: 1988637 - DNA, 25 bp, Homo sapien
tagggtacagcgttctactttccag

SEQ ID NO: 1988638 - DNA, 25 bp, Homo sapien
cacaagggttaaattgccatccaca

SEQ ID NO: 1988639 - DNA, 25 bp, Homo sapien
tccctgcattagtcacatgggctag

SEQ ID NO: 1988640 - DNA, 25 bp, Homo sapien
aaggacatggccactgtaattgatc

SEQ ID NO: 1988641 - DNA, 25 bp, Homo sapien
tatacagagttccatttgggctgcc

SEQ ID NO: 1988642 - DNA, 25 bp, Homo sapien
tgagggcaccgtgtttccgaaagat

SEQ ID NO: 1988643 - DNA, 25 bp, Homo sapien
aatgggtctgtagttatactccgct

SEQ ID NO: 1988644 - DNA, 25 bp, Homo sapien
tgtagttatactccgctgattggac

SEQ ID NO: 1988645 - DNA, 25 bp, Homo sapien
cggtggtcataaatgggtctgtagt

SEQ ID NO: 1988646 - DNA, 25 bp, Homo sapien
gttatactccgctgattggacatac

SEQ ID NO: 1988647 - DNA, 25 bp, Homo sapien
agaacccaacatctgagggcctctc

SEQ ID NO: 1988648 - DNA, 25 bp, Homo sapien
cccagtgacgtgaacaaggtagcat

SEQ ID NO: 1988649 - DNA, 25 bp, Homo sapien
ccccatttcaaacgctgaattattt

SEQ ID NO: 1988650 - DNA, 25 bp, Homo sapien
aaggtagcatgagttagaagaaccc

SEQ ID NO: 1988651 - DNA, 25 bp, Homo sapien
cccaccaacacttgaatgcacctgc

SEQ ID NO: 1988652 - DNA, 25 bp, Homo sapien
caccaacacttgaatgcacctgctc

SEQ ID NO: 1988653 - DNA, 25 bp, Homo sapien
tcccaccaacacttgaatgcacctg

SEQ ID NO: 1988654 - DNA, 25 bp, Homo sapien
tcccactttagaaggcctgtcccag

SEQ ID NO: 1988655 - DNA, 25 bp, Homo sapien
tataaaggcactggttccatagccc

SEQ ID NO: 1988656 - DNA, 25 bp, Homo sapien
gttccattagagaacaaagccactg

SEQ ID NO: 1988657 - DNA, 25 bp, Homo sapien
cttccactgtcagtaggatataaac

SEQ ID NO: 1988658 - DNA, 25 bp, Homo sapien
cactaggggctggtgttagctggat

SEQ ID NO: 1988659 - DNA, 25 bp, Homo sapien
tgagcagaggtcttgaacactaggg

SEQ ID NO: 1988660 - DNA, 25 bp, Homo sapien
tgtgtagagttgaggtgagatatgt

SEQ ID NO: 1988661 - DNA, 25 bp, Homo sapien
tcgaacagtgcagacaccgtcattt

SEQ ID NO: 1988662 - DNA, 25 bp, Homo sapien
aaatttggtcgatttgagctcatcc

SEQ ID NO: 1988663 - DNA, 25 bp, Homo sapien
tcttcctggtgcaatagacactgac

SEQ ID NO: 1988664 - DNA, 25 bp, Homo sapien
ggtggagcctctcttttcacacctt

SEQ ID NO: 1988665 - DNA, 25 bp, Homo sapien
aacacagcaacagtagatgaaacag

SEQ ID NO: 1988666 - DNA, 25 bp, Homo sapien
tggtctccatttcgagccctggctt

SEQ ID NO: 1988667 - DNA, 25 bp, Homo sapien
gagccctggcttttcgggcccacat

SEQ ID NO: 1988668 - DNA, 25 bp, Homo sapien
catttcgagccctggcttttcgggc

SEQ ID NO: 1988669 - DNA, 25 bp, Homo sapien
ttttcgggcccacattattcagatg

SEQ ID NO: 1988670 - DNA, 25 bp, Homo sapien
cattagctggccatattgtcgagtt

SEQ ID NO: 1988671 - DNA, 25 bp, Homo sapien
tatccacttttagaagaatgaggtg

SEQ ID NO: 1988672 - DNA, 25 bp, Homo sapien
cacttaggcgaaatccatgatgaag

SEQ ID NO: 1988673 - DNA, 25 bp, Homo sapien
gactttgaccaaaatagtgatttat

SEQ ID NO: 1988674 - DNA, 25 bp, Homo sapien
taaaccaagctcatgtaccaaaggg

SEQ ID NO: 1988675 - DNA, 25 bp, Homo sapien
gattcctgagatccaaaacttggag

SEQ ID NO: 1988676 - DNA, 25 bp, Homo sapien
ttctagtgggtttctaaggaatcac

SEQ ID NO: 1988677 - DNA, 25 bp, Homo sapien
gctgattacagtcgtatgctcaaac

SEQ ID NO: 1988678 - DNA, 25 bp, Homo sapien
gtacccattgtaagtactgggccat

SEQ ID NO: 1988679 - DNA, 25 bp, Homo sapien
tcctggtacccattgtaagtactgg

SEQ ID NO: 1988680 - DNA, 25 bp, Homo sapien
ctggtactcctggtacccattgtaa

SEQ ID NO: 1988681 - DNA, 25 bp, Homo sapien
gtactcctggtacccattgtaagta

SEQ ID NO: 1988682 - DNA, 25 bp, Homo sapien
gttttggtggtagagcattgatttg

SEQ ID NO: 1988683 - DNA, 25 bp, Homo sapien
ttgatttgattgggctctgcttggt

SEQ ID NO: 1988684 - DNA, 25 bp, Homo sapien
catttaccaccttaaagatctccat

SEQ ID NO: 1988685 - DNA, 25 bp, Homo sapien
ctgcttggtcatttaccaccttaaa

SEQ ID NO: 1988686 - DNA, 25 bp, Homo sapien
tgaattttgaaacctggaaattagc

SEQ ID NO: 1988687 - DNA, 25 bp, Homo sapien
ctttgtatcctacactgtcactata

SEQ ID NO: 1988688 - DNA, 25 bp, Homo sapien
tcctttgtatcctacactgtcacta

SEQ ID NO: 1988689 - DNA, 25 bp, Homo sapien
attcctttgtatcctacactgtcac

SEQ ID NO: 1988690 - DNA, 25 bp, Homo sapien
cctttgtatcctacactgtcactat

SEQ ID NO: 1988691 - DNA, 25 bp, Homo sapien
cagctagctcattgtggtggtttaa

SEQ ID NO: 1988692 - DNA, 25 bp, Homo sapien
gcattggagaaattctgtcggtctc

SEQ ID NO: 1988693 - DNA, 25 bp, Homo sapien
tactcagacttagcccaaatttcac

SEQ ID NO: 1988694 - DNA, 25 bp, Homo sapien
ctgtaatctgattagatctgccggg

SEQ ID NO: 1988695 - DNA, 25 bp, Homo sapien
tctcattgtgatagccagaaacaag

SEQ ID NO: 1988696 - DNA, 25 bp, Homo sapien
ccaggctgcttgagcaagaagaata

SEQ ID NO: 1988697 - DNA, 25 bp, Homo sapien
taaaaggcctagagtgcaaattatg

SEQ ID NO: 1988698 - DNA, 25 bp, Homo sapien
tccttcaaagaacctagcgaactgt

SEQ ID NO: 1988699 - DNA, 25 bp, Homo sapien
atgaccgaggtgcacacagtgccct

SEQ ID NO: 1988700 - DNA, 25 bp, Homo sapien
gattccagatgtgcggacagcccat

SEQ ID NO: 1988701 - DNA, 25 bp, Homo sapien
ccagtgaggcggcagcataacttgc

SEQ ID NO: 1988702 - DNA, 25 bp, Homo sapien
ccctcttgaataggaaggtcagcca

SEQ ID NO: 1988703 - DNA, 25 bp, Homo sapien
ttttgcatgtaatactcccatgatg

SEQ ID NO: 1988704 - DNA, 25 bp, Homo sapien
tgttgaattataattctccggttta

SEQ ID NO: 1988705 - DNA, 25 bp, Homo sapien
ggtttttgcatgtaatactcccatg

SEQ ID NO: 1988706 - DNA, 25 bp, Homo sapien
gcatgtaatactcccatgatgtctg

SEQ ID NO: 1988707 - DNA, 25 bp, Homo sapien
ttaagtttgagtttaagcccactca

SEQ ID NO: 1988708 - DNA, 25 bp, Homo sapien
taagtttgagtttaagcccactcac

SEQ ID NO: 1988709 - DNA, 25 bp, Homo sapien
tgaagaattaagtttgagtttaagc

SEQ ID NO: 1988710 - DNA, 25 bp, Homo sapien
gaagctcaatcttatttgggttcat

SEQ ID NO: 1988711 - DNA, 25 bp, Homo sapien
cttatttgggttcatcactgaaaac

SEQ ID NO: 1988712 - DNA, 25 bp, Homo sapien
ctgtctcttgaagctcaatcttatt

SEQ ID NO: 1988713 - DNA, 25 bp, Homo sapien
catcactgaaaacttagaacaaatc

SEQ ID NO: 1988714 - DNA, 25 bp, Homo sapien
aagctgtgtcctctcggctctcatg

SEQ ID NO: 1988715 - DNA, 25 bp, Homo sapien
ggcctaaccattattcaggagcatc

SEQ ID NO: 1988716 - DNA, 25 bp, Homo sapien
taccctagacaaaagacgccaggca

SEQ ID NO: 1988717 - DNA, 25 bp, Homo sapien
tccaagcaggagttatagttaccct

SEQ ID NO: 1988718 - DNA, 25 bp, Homo sapien
tatctgatgaatggtaccagtgttt

SEQ ID NO: 1988719 - DNA, 25 bp, Homo sapien
tctatctgatgaatggtaccagtgt

SEQ ID NO: 1988720 - DNA, 25 bp, Homo sapien
aaatttctatctgatgaatggtacc

SEQ ID NO: 1988721 - DNA, 25 bp, Homo sapien
atttctatctgatgaatggtaccag

SEQ ID NO: 1988722 - DNA, 25 bp, Homo sapien
gcccctaccgggtgatcttaggaca

SEQ ID NO: 1988723 - DNA, 25 bp, Homo sapien
catgaatcccaatatatagaagagt

SEQ ID NO: 1988724 - DNA, 25 bp, Homo sapien
actatggaattactaggctagatgc

SEQ ID NO: 1988725 - DNA, 25 bp, Homo sapien
cagttttacagggaaggtaacagat

SEQ ID NO: 1988726 - DNA, 25 bp, Homo sapien
tgtgtgctgcggaacaacaagatcc

SEQ ID NO: 1988727 - DNA, 25 bp, Homo sapien
ttcagatgcaagagggcgaacacac

SEQ ID NO: 1988728 - DNA, 25 bp, Homo sapien
tcgacatcgatgagtattcacgggc

SEQ ID NO: 1988729 - DNA, 25 bp, Homo sapien
tgtgaacatccagaccaagacggtg

SEQ ID NO: 1988730 - DNA, 25 bp, Homo sapien
aataagccaccagagtaaatacagt

SEQ ID NO: 1988731 - DNA, 25 bp, Homo sapien
taggaagtgcactcaacactcagtt

SEQ ID NO: 1988732 - DNA, 25 bp, Homo sapien
ggtcgctaagataaatggcctgaaa

SEQ ID NO: 1988733 - DNA, 25 bp, Homo sapien
aaagggatgactctttaggaagtgc

SEQ ID NO: 1988734 - DNA, 25 bp, Homo sapien
gtcagaataaacacaagtcagggct

SEQ ID NO: 1988735 - DNA, 25 bp, Homo sapien
catactttttgagtcagaataaaca

SEQ ID NO: 1988736 - DNA, 25 bp, Homo sapien
ccacatactttttgagtcagaataa

SEQ ID NO: 1988737 - DNA, 25 bp, Homo sapien
caagtcagggcttttgttatcagat

SEQ ID NO: 1988738 - DNA, 25 bp, Homo sapien
taccgtagtttattcagtcagcctc

SEQ ID NO: 1988739 - DNA, 25 bp, Homo sapien
cctagatgtaggattgctggatgga

SEQ ID NO: 1988740 - DNA, 25 bp, Homo sapien
tttgcatagtaccaggaagtgtgtg

SEQ ID NO: 1988741 - DNA, 25 bp, Homo sapien
gcattccttggattcattattctca

SEQ ID NO: 1988742 - DNA, 25 bp, Homo sapien
gactgccactggtgatggcgaacag

SEQ ID NO: 1988743 - DNA, 25 bp, Homo sapien
tgatggcgaacagtgaggcacacat

SEQ ID NO: 1988744 - DNA, 25 bp, Homo sapien
catgctgactgccactggtgatggc

SEQ ID NO: 1988745 - DNA, 25 bp, Homo sapien
gtgaggcacacatcatgcggagctg

SEQ ID NO: 1988746 - DNA, 25 bp, Homo sapien
actgccatgctgaagggatggcaga

SEQ ID NO: 1988747 - DNA, 25 bp, Homo sapien
tacacaaagtagactgccatgctga

SEQ ID NO: 1988748 - DNA, 25 bp, Homo sapien
ttgatacacaaagtagactgccatg

SEQ ID NO: 1988749 - DNA, 25 bp, Homo sapien
gctgaagggatggcagacagtaaaa

SEQ ID NO: 1988750 - DNA, 25 bp, Homo sapien
ttgtacggtggcagcgtagctttag

SEQ ID NO: 1988751 - DNA, 25 bp, Homo sapien
ctgtagttgtacggtggcagcgtag

SEQ ID NO: 1988752 - DNA, 25 bp, Homo sapien
tagttgtacggtggcagcgtagctt

SEQ ID NO: 1988753 - DNA, 25 bp, Homo sapien
gttgtacggtggcagcgtagcttta

SEQ ID NO: 1988754 - DNA, 25 bp, Homo sapien
ttctaaatacttccataaggcgtag

SEQ ID NO: 1988755 - DNA, 25 bp, Homo sapien
gaagcataagcaccatagtactgaa

SEQ ID NO: 1988756 - DNA, 25 bp, Homo sapien
cacactctgtgtacgcagtttggct

SEQ ID NO: 1988757 - DNA, 25 bp, Homo sapien
gaaaattcctagacacctcagcttt

SEQ ID NO: 1988758 - DNA, 25 bp, Homo sapien
aaatgcccctaccaatgacagcttc

SEQ ID NO: 1988759 - DNA, 25 bp, Homo sapien
acaccagtgccaaatgcccctacca

SEQ ID NO: 1988760 - DNA, 25 bp, Homo sapien
tactacgtttaatcccgacagtgtc

SEQ ID NO: 1988761 - DNA, 25 bp, Homo sapien
cgtcagatggtgtggtaggagacac

SEQ ID NO: 1988762 - DNA, 25 bp, Homo sapien
ctttaagagcttagaaacaacaggt

SEQ ID NO: 1988763 - DNA, 25 bp, Homo sapien
catctctgaagcctcaagtgccaag

SEQ ID NO: 1988764 - DNA, 25 bp, Homo sapien
ggatgaatatcagagatacagggag

SEQ ID NO: 1988765 - DNA, 25 bp, Homo sapien
tttgggatgaatatcagagatacag

SEQ ID NO: 1988766 - DNA, 25 bp, Homo sapien
tgggatgaatatcagagatacaggg

SEQ ID NO: 1988767 - DNA, 25 bp, Homo sapien
gggatgaatatcagagatacaggga

SEQ ID NO: 1988768 - DNA, 25 bp, Homo sapien
gctgcatttgatctagttatcccat

SEQ ID NO: 1988769 - DNA, 25 bp, Homo sapien
tagtagttgcacattgatgacctaa

SEQ ID NO: 1988770 - DNA, 25 bp, Homo sapien
taaatgcccaacaaatatggatgtg

SEQ ID NO: 1988771 - DNA, 25 bp, Homo sapien
tcttggataactgaatgattctgga

SEQ ID NO: 1988772 - DNA, 25 bp, Homo sapien
gagatggaacttatcagatgaattc

SEQ ID NO: 1988773 - DNA, 25 bp, Homo sapien
gggaagtaatacctctgtgtaggag

SEQ ID NO: 1988774 - DNA, 25 bp, Homo sapien
aatacctctgtgtaggagatggaac

SEQ ID NO: 1988775 - DNA, 25 bp, Homo sapien
ttttcacaaataacaatgacatcta

SEQ ID NO: 1988776 - DNA, 25 bp, Homo sapien
cattccctggactcgagcaaatgtc

SEQ ID NO: 1988777 - DNA, 25 bp, Homo sapien
tgcttcctgccaaggtgtaaatcag

SEQ ID NO: 1988778 - DNA, 25 bp, Homo sapien
tgacagtttacaagcccacacgata

SEQ ID NO: 1988779 - DNA, 25 bp, Homo sapien
gaatcagggatccatttttaacagc

SEQ ID NO: 1988780 - DNA, 25 bp, Homo sapien
ccaggtgtcgctggccacgggatgc

SEQ ID NO: 1988781 - DNA, 25 bp, Homo sapien
aaggaacaggattccctgctcaggc

SEQ ID NO: 1988782 - DNA, 25 bp, Homo sapien
ggcaggatgctcttgccgccccagg

SEQ ID NO: 1988783 - DNA, 25 bp, Homo sapien
caggatgctcttgccgccccaggtg

SEQ ID NO: 1988784 - DNA, 25 bp, Homo sapien
ttccttctctcataatcacaggtgt

SEQ ID NO: 1988785 - DNA, 25 bp, Homo sapien
cataatcacaggtgtggtcttcaca

SEQ ID NO: 1988786 - DNA, 25 bp, Homo sapien
gtgttcccagctgtgatcttcttaa

SEQ ID NO: 1988787 - DNA, 25 bp, Homo sapien
ccagctgtgatcttcttaatctggt

SEQ ID NO: 1988788 - DNA, 25 bp, Homo sapien
ggaagcacacaagccgggtgtgctc

SEQ ID NO: 1988789 - DNA, 25 bp, Homo sapien
acaagccgggtgtgctctccgaaag

SEQ ID NO: 1988790 - DNA, 25 bp, Homo sapien
tggggaaggcgtcatgggaagcaca

SEQ ID NO: 1988791 - DNA, 25 bp, Homo sapien
gctctccgaaagggtcccctgtgaa

SEQ ID NO: 1988792 - DNA, 25 bp, Homo sapien
tgatgactgaaaatcataagctgta

SEQ ID NO: 1988793 - DNA, 25 bp, Homo sapien
aatcataagctgtaaggctttgtct

SEQ ID NO: 1988794 - DNA, 25 bp, Homo sapien
atcataagctgtaaggctttgtctc

SEQ ID NO: 1988795 - DNA, 25 bp, Homo sapien
tcctgtgaaggtgcttggcttctcc

SEQ ID NO: 1988796 - DNA, 25 bp, Homo sapien
tctccctggcttgcttagaattggg

SEQ ID NO: 1988797 - DNA, 25 bp, Homo sapien
tgggactgaaccgtgtctgccatcc

SEQ ID NO: 1988798 - DNA, 25 bp, Homo sapien
catggttcgtatgtgtctccctggc

SEQ ID NO: 1988799 - DNA, 25 bp, Homo sapien
gacatatgccgacatgaagtaattg

SEQ ID NO: 1988800 - DNA, 25 bp, Homo sapien
aagcctttccgcacctttcaaagca

SEQ ID NO: 1988801 - DNA, 25 bp, Homo sapien
ccgcacctttcaaagcagcatatgg

SEQ ID NO: 1988802 - DNA, 25 bp, Homo sapien
ggaatcattgtccaaattcatgatg

SEQ ID NO: 1988803 - DNA, 25 bp, Homo sapien
tacaattctgacctcttgccccatt

SEQ ID NO: 1988804 - DNA, 25 bp, Homo sapien
tattacaattctgacctcttgcccc

SEQ ID NO: 1988805 - DNA, 25 bp, Homo sapien
ctctgtattacaattctgacctctt

SEQ ID NO: 1988806 - DNA, 25 bp, Homo sapien
ctgtattacaattctgacctcttgc

SEQ ID NO: 1988807 - DNA, 25 bp, Homo sapien
gaatgctagaccttggatgacacag

SEQ ID NO: 1988808 - DNA, 25 bp, Homo sapien
gaacacgttctctgtgatgcctggc

SEQ ID NO: 1988809 - DNA, 25 bp, Homo sapien
gggtagtgcctcactcgcccaataa

SEQ ID NO: 1988810 - DNA, 25 bp, Homo sapien
tgtcttcacgtttggcagctgggta

SEQ ID NO: 1988811 - DNA, 25 bp, Homo sapien
gaatcacttgcctttgtgagtcact

SEQ ID NO: 1988812 - DNA, 25 bp, Homo sapien
tttcttaggcttggaatcacttgcc

SEQ ID NO: 1988813 - DNA, 25 bp, Homo sapien
ctgttaaccctgacccatttctgta

SEQ ID NO: 1988814 - DNA, 25 bp, Homo sapien
tatccagggaagtcttgtgctggct

SEQ ID NO: 1988815 - DNA, 25 bp, Homo sapien
ccctggagcctcagaggggacagct

SEQ ID NO: 1988816 - DNA, 25 bp, Homo sapien
ctgggaagagattccaggggagccc

SEQ ID NO: 1988817 - DNA, 25 bp, Homo sapien
tcagtaaatttctgggaagagattc

SEQ ID NO: 1988818 - DNA, 25 bp, Homo sapien
ggaagagattccaggggagcccctg

SEQ ID NO: 1988819 - DNA, 25 bp, Homo sapien
ttggtggcattaaagaagacactga

SEQ ID NO: 1988820 - DNA, 25 bp, Homo sapien
tagaaaagccctgtcaaagcaagag

SEQ ID NO: 1988821 - DNA, 25 bp, Homo sapien
gaggtggatgcagctatgaatgcaa

SEQ ID NO: 1988822 - DNA, 25 bp, Homo sapien
aatcatgactgaccgaggcagtggc

SEQ ID NO: 1988823 - DNA, 25 bp, Homo sapien
aactctgaaattcttgtgaggagag

SEQ ID NO: 1988824 - DNA, 25 bp, Homo sapien
ctgaaattcttgtgaggagagcgct

SEQ ID NO: 1988825 - DNA, 25 bp, Homo sapien
tcttgtgaggagagcgctcatctaa

SEQ ID NO: 1988826 - DNA, 25 bp, Homo sapien
tgaggagagcgctcatctaaaacct

SEQ ID NO: 1988827 - DNA, 25 bp, Homo sapien
agctctcaggattctgtagctggaa

SEQ ID NO: 1988828 - DNA, 25 bp, Homo sapien
tcttgagctctcaggattctgtagc

SEQ ID NO: 1988829 - DNA, 25 bp, Homo sapien
ggagtagtatcttgagctctcagga

SEQ ID NO: 1988830 - DNA, 25 bp, Homo sapien
gcacccagcacggagtagtatcttg

SEQ ID NO: 1988831 - DNA, 25 bp, Homo sapien
tcagttactgtttggaggttgtgcc

SEQ ID NO: 1988832 - DNA, 25 bp, Homo sapien
tgatgacactcaccacggctggatt

SEQ ID NO: 1988833 - DNA, 25 bp, Homo sapien
tatggatacaggacaatcagggcca

SEQ ID NO: 1988834 - DNA, 25 bp, Homo sapien
gagcctgctgggatgatgtatacag

SEQ ID NO: 1988835 - DNA, 25 bp, Homo sapien
gagctgccggttctaggaagactca

SEQ ID NO: 1988836 - DNA, 25 bp, Homo sapien
ctgccggttctaggaagactcataa

SEQ ID NO: 1988837 - DNA, 25 bp, Homo sapien
gctgccggttctaggaagactcata

SEQ ID NO: 1988838 - DNA, 25 bp, Homo sapien
tgagctgccggttctaggaagactc

SEQ ID NO: 1988839 - DNA, 25 bp, Homo sapien
cttctgcagctttatcatttactgg

SEQ ID NO: 1988840 - DNA, 25 bp, Homo sapien
tgtgctcagaggcttctgcagcttt

SEQ ID NO: 1988841 - DNA, 25 bp, Homo sapien
ctgcagctttatcatttactggcct

SEQ ID NO: 1988842 - DNA, 25 bp, Homo sapien
gctcagaggcttctgcagctttatc

SEQ ID NO: 1988843 - DNA, 25 bp, Homo sapien
tgagctcgctcggcaattcccgggc

SEQ ID NO: 1988844 - DNA, 25 bp, Homo sapien
gagctcgctcggcaattcccgggct

SEQ ID NO: 1988845 - DNA, 25 bp, Homo sapien
agctcgctcggcaattcccgggctc

SEQ ID NO: 1988846 - DNA, 25 bp, Homo sapien
ctgagctcgctcggcaattcccggg

SEQ ID NO: 1988847 - DNA, 25 bp, Homo sapien
gaccgaatggccaccttcctgtatg

SEQ ID NO: 1988848 - DNA, 25 bp, Homo sapien
ccgttgggctgtggtactcttctga

SEQ ID NO: 1988849 - DNA, 25 bp, Homo sapien
gagtcatttccagctccgatggtag

SEQ ID NO: 1988850 - DNA, 25 bp, Homo sapien
ccaaagctgagactgttgggagtca

SEQ ID NO: 1988851 - DNA, 25 bp, Homo sapien
gaggcaaatgtggaacaccacgtcc

SEQ ID NO: 1988852 - DNA, 25 bp, Homo sapien
tgcgagcagccaagaggtgcgattc

SEQ ID NO: 1988853 - DNA, 25 bp, Homo sapien
aactgcctgagttggaggtccacag

SEQ ID NO: 1988854 - DNA, 25 bp, Homo sapien
taagggccttcaattcagcctggcg

SEQ ID NO: 1988855 - DNA, 25 bp, Homo sapien
ggccatacatctgcacgacttgagg

SEQ ID NO: 1988856 - DNA, 25 bp, Homo sapien
cgacttgaggagggggtggaccagg

SEQ ID NO: 1988857 - DNA, 25 bp, Homo sapien
ccatacatctgcacgacttgaggag

SEQ ID NO: 1988858 - DNA, 25 bp, Homo sapien
atacatctgcacgacttgaggaggg

SEQ ID NO: 1988859 - DNA, 25 bp, Homo sapien
gggggaagatctagggcaacaccca

SEQ ID NO: 1988860 - DNA, 25 bp, Homo sapien
ctaggagggggaagatctagggcaa

SEQ ID NO: 1988861 - DNA, 25 bp, Homo sapien
ggagggggaagatctagggcaacac

SEQ ID NO: 1988862 - DNA, 25 bp, Homo sapien
ggggaagatctagggcaacacccac

SEQ ID NO: 1988863 - DNA, 25 bp, Homo sapien
tcatcatgacctcgctgggcaattt

SEQ ID NO: 1988864 - DNA, 25 bp, Homo sapien
catgacctcgctgggcaatttcagg

SEQ ID NO: 1988865 - DNA, 25 bp, Homo sapien
tcatcatcatgacctcgctgggcaa

SEQ ID NO: 1988866 - DNA, 25 bp, Homo sapien
atcatgacctcgctgggcaatttca

SEQ ID NO: 1988867 - DNA, 25 bp, Homo sapien
catcatgcttatcttgatccacgtc

SEQ ID NO: 1988868 - DNA, 25 bp, Homo sapien
catcagtactgtcatcatgcttatc

SEQ ID NO: 1988869 - DNA, 25 bp, Homo sapien
acgtcctcaggatagccatcatctt

SEQ ID NO: 1988870 - DNA, 25 bp, Homo sapien
gatccacgtcctcaggatagccatc

SEQ ID NO: 1988871 - DNA, 25 bp, Homo sapien
tctttttttcattgttgtctctccc

SEQ ID NO: 1988872 - DNA, 25 bp, Homo sapien
caccatcatcatggcgcacactttc

SEQ ID NO: 1988873 - DNA, 25 bp, Homo sapien
ttttttcattgttgtctctcccacc

SEQ ID NO: 1988874 - DNA, 25 bp, Homo sapien
tcattgttgtctctcccaccatcat

SEQ ID NO: 1988875 - DNA, 25 bp, Homo sapien
tttttcttccttgattttccaggca

SEQ ID NO: 1988876 - DNA, 25 bp, Homo sapien
ttttcttccttgattttccaggcat

SEQ ID NO: 1988877 - DNA, 25 bp, Homo sapien
tttcttccttgattttccaggcata

SEQ ID NO: 1988878 - DNA, 25 bp, Homo sapien
ttcttccttgattttccaggcatat

SEQ ID NO: 1988879 - DNA, 25 bp, Homo sapien
cttgaagaggagtcagttccttcat

SEQ ID NO: 1988880 - DNA, 25 bp, Homo sapien
cgtggcttgaagaggagtcagttcc

SEQ ID NO: 1988881 - DNA, 25 bp, Homo sapien
tggcttgaagaggagtcagttcctt

SEQ ID NO: 1988882 - DNA, 25 bp, Homo sapien
ggcttgaagaggagtcagttccttc

SEQ ID NO: 1988883 - DNA, 25 bp, Homo sapien
ccgtccctcctcagggatttcttga

SEQ ID NO: 1988884 - DNA, 25 bp, Homo sapien
cgtccctcctcagggatttcttgac

SEQ ID NO: 1988885 - DNA, 25 bp, Homo sapien
cccgtccctcctcagggatttcttg

SEQ ID NO: 1988886 - DNA, 25 bp, Homo sapien
gaatgcagttcctcttgattgtgtt

SEQ ID NO: 1988887 - DNA, 25 bp, Homo sapien
atcagaatgcagttcctcttgattg

SEQ ID NO: 1988888 - DNA, 25 bp, Homo sapien
aatgcagttcctcttgattgtgttt

SEQ ID NO: 1988889 - DNA, 25 bp, Homo sapien
cagaatgcagttcctcttgattgtg

SEQ ID NO: 1988890 - DNA, 25 bp, Homo sapien
gaggccgtaatggtgaagcatggga

SEQ ID NO: 1988891 - DNA, 25 bp, Homo sapien
ttcataggtggcctaggaggccgta

SEQ ID NO: 1988892 - DNA, 25 bp, Homo sapien
ggttcataggtggcctaggaggccg

SEQ ID NO: 1988893 - DNA, 25 bp, Homo sapien
tccagggggaaggttcataggtggc

SEQ ID NO: 1988894 - DNA, 25 bp, Homo sapien
ggtaaaggccgagtcctggcattcc

SEQ ID NO: 1988895 - DNA, 25 bp, Homo sapien
gggcagacttggaggtagacgtggg

SEQ ID NO: 1988896 - DNA, 25 bp, Homo sapien
cagggggcagacttggaggtagacg

SEQ ID NO: 1988897 - DNA, 25 bp, Homo sapien
tcagggtaaaggccgagtcctggca

SEQ ID NO: 1988898 - DNA, 25 bp, Homo sapien
agtatatttgctcttgtatttggta

SEQ ID NO: 1988899 - DNA, 25 bp, Homo sapien
aagctgggtgcatcgtgccaggaca

SEQ ID NO: 1988900 - DNA, 25 bp, Homo sapien
gcaagtatatttgctcttgtatttg

SEQ ID NO: 1988901 - DNA, 25 bp, Homo sapien
ggtaccaaagctgggtgcatcgtgc

SEQ ID NO: 1988902 - DNA, 25 bp, Homo sapien
gaatcaagccgggtggggcacttaa

SEQ ID NO: 1988903 - DNA, 25 bp, Homo sapien
ggcacttaaaatctcagggttcagc

SEQ ID NO: 1988904 - DNA, 25 bp, Homo sapien
tggggcacttaaaatctcagggttc

SEQ ID NO: 1988905 - DNA, 25 bp, Homo sapien
cttaaaatctcagggttcagcaagg

SEQ ID NO: 1988906 - DNA, 25 bp, Homo sapien
cacttgtattatctaccttggatcg

SEQ ID NO: 1988907 - DNA, 25 bp, Homo sapien
tagtgatctgtggtttggcagtgac

SEQ ID NO: 1988908 - DNA, 25 bp, Homo sapien
gctgcacttgtattatctaccttgg

SEQ ID NO: 1988909 - DNA, 25 bp, Homo sapien
tggctgcacttgtattatctacctt

SEQ ID NO: 1988910 - DNA, 25 bp, Homo sapien
catttgactctagacaaaaataaac

SEQ ID NO: 1988911 - DNA, 25 bp, Homo sapien
tgcccacagcacataagaatagagt

SEQ ID NO: 1988912 - DNA, 25 bp, Homo sapien
ccctgttggtagtgagaggcattca

SEQ ID NO: 1988913 - DNA, 25 bp, Homo sapien
aataccctctttaatgtgcagcaaa

SEQ ID NO: 1988914 - DNA, 25 bp, Homo sapien
tttttacttctagatagttgtggaa

SEQ ID NO: 1988915 - DNA, 25 bp, Homo sapien
gatagttgtggaataagaagttgtt

SEQ ID NO: 1988916 - DNA, 25 bp, Homo sapien
tttttctccatgcagcactggaaag

SEQ ID NO: 1988917 - DNA, 25 bp, Homo sapien
gtggttgtagattgcgttttttctc

SEQ ID NO: 1988918 - DNA, 25 bp, Homo sapien
gtagctaggtcccaaatatccacgg

SEQ ID NO: 1988919 - DNA, 25 bp, Homo sapien
tctaccatcagaaaagtgggtctca

SEQ ID NO: 1988920 - DNA, 25 bp, Homo sapien
ggcatgaggatccaggccctgttac

SEQ ID NO: 1988921 - DNA, 25 bp, Homo sapien
gcaacccagagaagacgatctacca

SEQ ID NO: 1988922 - DNA, 25 bp, Homo sapien
gaaatccatcgccaacaacaaagca

SEQ ID NO: 1988923 - DNA, 25 bp, Homo sapien
gcaaaggcagtagcactcccactta

SEQ ID NO: 1988924 - DNA, 25 bp, Homo sapien
ggcagtagcactcccacttatctct

SEQ ID NO: 1988925 - DNA, 25 bp, Homo sapien
aaagccatttgtctatgtccagcct

SEQ ID NO: 1988926 - DNA, 25 bp, Homo sapien
agctgggggaagaatatagttgccc

SEQ ID NO: 1988927 - DNA, 25 bp, Homo sapien
ctgggggaagaatatagttgcccat

SEQ ID NO: 1988928 - DNA, 25 bp, Homo sapien
cgcaacgtccattgatattcaggaa

SEQ ID NO: 1988929 - DNA, 25 bp, Homo sapien
ctccgcaacgtccattgatattcag

SEQ ID NO: 1988930 - DNA, 25 bp, Homo sapien
tattcatggagctcttcttcctcac

SEQ ID NO: 1988931 - DNA, 25 bp, Homo sapien
ttattcatggagctcttcttcctca

SEQ ID NO: 1988932 - DNA, 25 bp, Homo sapien
agcctttgccttcacgagacttaga

SEQ ID NO: 1988933 - DNA, 25 bp, Homo sapien
tgaggtttgggtgattcatggcact

SEQ ID NO: 1988934 - DNA, 25 bp, Homo sapien
tcaggcagcacaactacaatatgtc

SEQ ID NO: 1988935 - DNA, 25 bp, Homo sapien
gaatgcatcatcagcacggttgtcc

SEQ ID NO: 1988936 - DNA, 25 bp, Homo sapien
tcctggggctgctggactcaatggc

SEQ ID NO: 1988937 - DNA, 25 bp, Homo sapien
cagaaacgtccagccacagtaatgt

SEQ ID NO: 1988938 - DNA, 25 bp, Homo sapien
ccacagtaatgtgcttcttcctggg

SEQ ID NO: 1988939 - DNA, 25 bp, Homo sapien
ctggggctgctggactcaatggcca

SEQ ID NO: 1988940 - DNA, 25 bp, Homo sapien
tgttttaagtcagccggcaccaatg

SEQ ID NO: 1988941 - DNA, 25 bp, Homo sapien
gctgacatctacaagttctcctgtg

SEQ ID NO: 1988942 - DNA, 25 bp, Homo sapien
tgagaattgagaacacgtgacgatc

SEQ ID NO: 1988943 - DNA, 25 bp, Homo sapien
gcattggtcatcttgttaacagtcc

SEQ ID NO: 1988944 - DNA, 25 bp, Homo sapien
ctttgcacagaactggtgatgcctg

SEQ ID NO: 1988945 - DNA, 25 bp, Homo sapien
ctctctctgaagttaatcgaagcct

SEQ ID NO: 1988946 - DNA, 25 bp, Homo sapien
acagaactggtgatgcctgcagctc

SEQ ID NO: 1988947 - DNA, 25 bp, Homo sapien
tctctgaagttaatcgaagcctcat

SEQ ID NO: 1988948 - DNA, 25 bp, Homo sapien
ggacatatgagtgaacctgcatcgc

SEQ ID NO: 1988949 - DNA, 25 bp, Homo sapien
tcaaaacaggacatatgagtgaacc

SEQ ID NO: 1988950 - DNA, 25 bp, Homo sapien
aacctgcatcgctgagagaattctg

SEQ ID NO: 1988951 - DNA, 25 bp, Homo sapien
caaagatcaaatgtggctttctcca

SEQ ID NO: 1988952 - DNA, 25 bp, Homo sapien
acagaacttacaagagccacaggag

SEQ ID NO: 1988953 - DNA, 25 bp, Homo sapien
ggagccaattatagcacctgacaga

SEQ ID NO: 1988954 - DNA, 25 bp, Homo sapien
tcaatgtggccaaccaaaaggacaa

SEQ ID NO: 1988955 - DNA, 25 bp, Homo sapien
ccttcgggtgcctctagacacttga

SEQ ID NO: 1988956 - DNA, 25 bp, Homo sapien
tgatccgtgtcaaggaataagttcc

SEQ ID NO: 1988957 - DNA, 25 bp, Homo sapien
ggaataagttccctgcctgaacatg

SEQ ID NO: 1988958 - DNA, 25 bp, Homo sapien
aataagttccctgcctgaacatgca

SEQ ID NO: 1988959 - DNA, 25 bp, Homo sapien
tgctctgttgatccgtgtcaaggaa

SEQ ID NO: 1988960 - DNA, 25 bp, Homo sapien
ctgtctgtctccatcattcatctcc

SEQ ID NO: 1988961 - DNA, 25 bp, Homo sapien
ctgtcactttcacagtggctgatgg

SEQ ID NO: 1988962 - DNA, 25 bp, Homo sapien
cacagtggctgatggatcacagttg

SEQ ID NO: 1988963 - DNA, 25 bp, Homo sapien
ctttcacagtggctgatggatcaca

SEQ ID NO: 1988964 - DNA, 25 bp, Homo sapien
tctctccaacctgaaatcttaagtg

SEQ ID NO: 1988965 - DNA, 25 bp, Homo sapien
tgaaatcttaagtgtcatccctgac

SEQ ID NO: 1988966 - DNA, 25 bp, Homo sapien
ccataagcgctgtcactatgatctt

SEQ ID NO: 1988967 - DNA, 25 bp, Homo sapien
cctcaactgaccataagcgctgtca

SEQ ID NO: 1988968 - DNA, 25 bp, Homo sapien
cttctttcttgaggcagactactgt

SEQ ID NO: 1988969 - DNA, 25 bp, Homo sapien
tgaggcagactactgtatttctgac

SEQ ID NO: 1988970 - DNA, 25 bp, Homo sapien
accactagtctgagtttccttccca

SEQ ID NO: 1988971 - DNA, 25 bp, Homo sapien
tgggtgaccactagtctgagtttcc

SEQ ID NO: 1988972 - DNA, 25 bp, Homo sapien
tccatttgatgaaaccaacgtgaag

SEQ ID NO: 1988973 - DNA, 25 bp, Homo sapien
ccatttgatgaaaccaacgtgaaga

SEQ ID NO: 1988974 - DNA, 25 bp, Homo sapien
aatggtaaggatgatgggtataaac

SEQ ID NO: 1988975 - DNA, 25 bp, Homo sapien
aatcttttgacatgattaattttac

SEQ ID NO: 1988976 - DNA, 25 bp, Homo sapien
ttttctattataatgcctctgagca

SEQ ID NO: 1988977 - DNA, 25 bp, Homo sapien
taatgcttttgtcttgttgtaatgg

SEQ ID NO: 1988978 - DNA, 25 bp, Homo sapien
gacctctgggtgagaagaatagtca

SEQ ID NO: 1988979 - DNA, 25 bp, Homo sapien
aggacctctgggtgagaagaatagt

SEQ ID NO: 1988980 - DNA, 25 bp, Homo sapien
acctctgggtgagaagaatagtcat

SEQ ID NO: 1988981 - DNA, 25 bp, Homo sapien
ggaggacctctgggtgagaagaata

SEQ ID NO: 1988982 - DNA, 25 bp, Homo sapien
caaggggagattacccaaaatcatc

SEQ ID NO: 1988983 - DNA, 25 bp, Homo sapien
gattacccaaaatcatcaagctcat

SEQ ID NO: 1988984 - DNA, 25 bp, Homo sapien
gggagattacccaaaatcatcaagc

SEQ ID NO: 1988985 - DNA, 25 bp, Homo sapien
tccaaggggagattacccaaaatca

SEQ ID NO: 1988986 - DNA, 25 bp, Homo sapien
gcatgtgtacaaataattctgatac

SEQ ID NO: 1988987 - DNA, 25 bp, Homo sapien
ccttctttagacataagctgtggta

SEQ ID NO: 1988988 - DNA, 25 bp, Homo sapien
ttctgataccttctttagacataag

SEQ ID NO: 1988989 - DNA, 25 bp, Homo sapien
ctccagagaacagcatgtgtacaaa

SEQ ID NO: 1988990 - DNA, 25 bp, Homo sapien
cccacggatgacatttaacttgatc

SEQ ID NO: 1988991 - DNA, 25 bp, Homo sapien
taacttgatcccatccagataggag

SEQ ID NO: 1988992 - DNA, 25 bp, Homo sapien
gaggagtcacaaagatcagaaagct

SEQ ID NO: 1988993 - DNA, 25 bp, Homo sapien
gggtcctgtgtctggttgttattta

SEQ ID NO: 1988994 - DNA, 25 bp, Homo sapien
aatggttgtttagttcactgtctct

SEQ ID NO: 1988995 - DNA, 25 bp, Homo sapien
caaaatggttgtttagttcactgtc

SEQ ID NO: 1988996 - DNA, 25 bp, Homo sapien
cactgtctctgtaactaacattcat

SEQ ID NO: 1988997 - DNA, 25 bp, Homo sapien
ggttgtttagttcactgtctctgta

SEQ ID NO: 1988998 - DNA, 25 bp, Homo sapien
ttccctgggtgattaaagagttggc

SEQ ID NO: 1988999 - DNA, 25 bp, Homo sapien
gtggagaatggcttataataatgat

SEQ ID NO: 1989000 - DNA, 25 bp, Homo sapien
tctttgagtggagaatggcttataa

SEQ ID NO: 1989001 - DNA, 25 bp, Homo sapien
tagccctgtgctactaattgtacca

SEQ ID NO: 1989002 - DNA, 25 bp, Homo sapien
tgccaggcggactgggaatcacagt

SEQ ID NO: 1989003 - DNA, 25 bp, Homo sapien
ccatcaggtcgagtgtgctggccag

SEQ ID NO: 1989004 - DNA, 25 bp, Homo sapien
ctcttgatgggtgggtagtcactcc

SEQ ID NO: 1989005 - DNA, 25 bp, Homo sapien
cacagtcacggttaatagcagcgaa

SEQ ID NO: 1989006 - DNA, 25 bp, Homo sapien
caaaattaacactgcaagctgccat

SEQ ID NO: 1989007 - DNA, 25 bp, Homo sapien
tgtcacaaccgccacttccatgagt

SEQ ID NO: 1989008 - DNA, 25 bp, Homo sapien
caactgcagtctggcggcatgtgga

SEQ ID NO: 1989009 - DNA, 25 bp, Homo sapien
cacacagagtggttatttgggctaa

SEQ ID NO: 1989010 - DNA, 25 bp, Homo sapien
aagcactgcccctttgtagaaaaca

SEQ ID NO: 1989011 - DNA, 25 bp, Homo sapien
gcctgagtcgcttagagatttacct

SEQ ID NO: 1989012 - DNA, 25 bp, Homo sapien
gctagctagcccttgaatcatgtca

SEQ ID NO: 1989013 - DNA, 25 bp, Homo sapien
tctaaatcagggtggagaatcacca

SEQ ID NO: 1989014 - DNA, 25 bp, Homo sapien
aatttggttcatcttcacaaagtag

SEQ ID NO: 1989015 - DNA, 25 bp, Homo sapien
caatttggttcatcttcacaaagta

SEQ ID NO: 1989016 - DNA, 25 bp, Homo sapien
atttgggctaaattggttccctatg

SEQ ID NO: 1989017 - DNA, 25 bp, Homo sapien
cacagttagttcagcttctcttaat

SEQ ID NO: 1989018 - DNA, 25 bp, Homo sapien
attaaacctgtaaagctctgctgga

SEQ ID NO: 1989019 - DNA, 25 bp, Homo sapien
ggttccctatgttaagagcttctaa

SEQ ID NO: 1989020 - DNA, 25 bp, Homo sapien
tcctccgaaagagcctcacagtttc

SEQ ID NO: 1989021 - DNA, 25 bp, Homo sapien
ccgaaagagcctcacagtttcccca

SEQ ID NO: 1989022 - DNA, 25 bp, Homo sapien
gttcctccgaaagagcctcacagtt

SEQ ID NO: 1989023 - DNA, 25 bp, Homo sapien
cagttcctccgaaagagcctcacag

SEQ ID NO: 1989024 - DNA, 25 bp, Homo sapien
aagaatctgatacttctgcagtagg

SEQ ID NO: 1989025 - DNA, 25 bp, Homo sapien
ccacatcatttgaaggatatgtagt

SEQ ID NO: 1989026 - DNA, 25 bp, Homo sapien
catggatgctgcaagaatctgatac

SEQ ID NO: 1989027 - DNA, 25 bp, Homo sapien
cactgaatgcttacaagtgtcatgg

SEQ ID NO: 1989028 - DNA, 25 bp, Homo sapien
tccagatgtccgtgctgtggctgga

SEQ ID NO: 1989029 - DNA, 25 bp, Homo sapien
gagatgcgcgccctgctggactcgc

SEQ ID NO: 1989030 - DNA, 25 bp, Homo sapien
gtgctgctgctcaacttcgaggaga

SEQ ID NO: 1989031 - DNA, 25 bp, Homo sapien
gcagtatgcgcctgacctcatgaag

SEQ ID NO: 1989032 - DNA, 25 bp, Homo sapien
agccgccactttgccgtcgctgctg

SEQ ID NO: 1989033 - DNA, 25 bp, Homo sapien
gcatggacacgagcccacgaggtgc

SEQ ID NO: 1989034 - DNA, 25 bp, Homo sapien
gtcggtcgcctctgagctttcaggg

SEQ ID NO: 1989035 - DNA, 25 bp, Homo sapien
tttcccttcatctggcccggcatgg

SEQ ID NO: 1989036 - DNA, 25 bp, Homo sapien
ggatgcaagcagagggtccctttct

SEQ ID NO: 1989037 - DNA, 25 bp, Homo sapien
gcgcgcgggcgggatgcaagcagag

SEQ ID NO: 1989038 - DNA, 25 bp, Homo sapien
ggcgcgcgggcgggatgcaagcaga

SEQ ID NO: 1989039 - DNA, 25 bp, Homo sapien
gcagagggtccctttctgctcagcc

SEQ ID NO: 1989040 - DNA, 25 bp, Homo sapien
taaagtgagtcgaaaggagcccagt

SEQ ID NO: 1989041 - DNA, 25 bp, Homo sapien
gagcccagtccggtataaataggaa

SEQ ID NO: 1989042 - DNA, 25 bp, Homo sapien
tataaataggaagccggcgatccag

SEQ ID NO: 1989043 - DNA, 25 bp, Homo sapien
ctggaacgggatggtaaagtgagtc

SEQ ID NO: 1989044 - DNA, 25 bp, Homo sapien
cttaagtgagccttgactttgcagc

SEQ ID NO: 1989045 - DNA, 25 bp, Homo sapien
caggtaagtttctggccttgtgtct

SEQ ID NO: 1989046 - DNA, 25 bp, Homo sapien
ccttgtgtctgccttgtgtgtattt

SEQ ID NO: 1989047 - DNA, 25 bp, Homo sapien
gggtagttgtatggcaaacgctcat

SEQ ID NO: 1989048 - DNA, 25 bp, Homo sapien
agccataattttgcgagtctctcca

SEQ ID NO: 1989049 - DNA, 25 bp, Homo sapien
gccccaggcccaaggataatgatgt

SEQ ID NO: 1989050 - DNA, 25 bp, Homo sapien
ggtagcataatttgtcacacgtaca

SEQ ID NO: 1989051 - DNA, 25 bp, Homo sapien
tactggccaagcacgaccgtttctc

SEQ ID NO: 1989052 - DNA, 25 bp, Homo sapien
gctaagaaaaaagctggtcacagaa

SEQ ID NO: 1989053 - DNA, 25 bp, Homo sapien
gtcatctctgtgagacagctactca

SEQ ID NO: 1989054 - DNA, 25 bp, Homo sapien
aattagcagtttcagctcagcagcg

SEQ ID NO: 1989055 - DNA, 25 bp, Homo sapien
gacagctactcattcatccagatca

SEQ ID NO: 1989056 - DNA, 25 bp, Homo sapien
taagtgtgactatcccatgtgcacg

SEQ ID NO: 1989057 - DNA, 25 bp, Homo sapien
gaatgcagcatctcaacaggatctg

SEQ ID NO: 1989058 - DNA, 25 bp, Homo sapien
cattgacaaccgaaatgcagggcta

SEQ ID NO: 1989059 - DNA, 25 bp, Homo sapien
gaaattgcggctgggtttcctagca

SEQ ID NO: 1989060 - DNA, 25 bp, Homo sapien
acaaggtcgcttctggcacattcca

SEQ ID NO: 1989061 - DNA, 25 bp, Homo sapien
gctaatgacttgaaacagcagccat

SEQ ID NO: 1989062 - DNA, 25 bp, Homo sapien
tagactcagaattggcacaaggtcg

SEQ ID NO: 1989063 - DNA, 25 bp, Homo sapien
ttacaaggccagctcacattcaagg

SEQ ID NO: 1989064 - DNA, 25 bp, Homo sapien
gataggttctacaattatcccattc

SEQ ID NO: 1989065 - DNA, 25 bp, Homo sapien
ggtcacaccgatagaaagtggcaga

SEQ ID NO: 1989066 - DNA, 25 bp, Homo sapien
ccgtaagatccgttgagataggttc

SEQ ID NO: 1989067 - DNA, 25 bp, Homo sapien
ctgggtgattgtggctataggtaaa

SEQ ID NO: 1989068 - DNA, 25 bp, Homo sapien
cacaaccaccattggtgcatggcta

SEQ ID NO: 1989069 - DNA, 25 bp, Homo sapien
gtatcttgaacatttcacaaccaca

SEQ ID NO: 1989070 - DNA, 25 bp, Homo sapien
gtgtttattgggatggttctccatc

SEQ ID NO: 1989071 - DNA, 25 bp, Homo sapien
aatctgtatgtcctgctttttcgcc

SEQ ID NO: 1989072 - DNA, 25 bp, Homo sapien
taagttaagatcatttgtggacatc

SEQ ID NO: 1989073 - DNA, 25 bp, Homo sapien
cttaggaaactagacggtgatgagg

SEQ ID NO: 1989074 - DNA, 25 bp, Homo sapien
gcccggccaatagtcgtctttcaag

SEQ ID NO: 1989075 - DNA, 25 bp, Homo sapien
atttgtggacatcatggcttttgtt

SEQ ID NO: 1989076 - DNA, 25 bp, Homo sapien
gcttgtcgaatgttttcgtcctggc

SEQ ID NO: 1989077 - DNA, 25 bp, Homo sapien
ctaagttctacttgtattgcaggtg

SEQ ID NO: 1989078 - DNA, 25 bp, Homo sapien
gattttttggctgttgcttgtcgaa

SEQ ID NO: 1989079 - DNA, 25 bp, Homo sapien
cgaatgttttcgtcctggctgtgtc

SEQ ID NO: 1989080 - DNA, 25 bp, Homo sapien
ttacaaaaagtctctgtgcttgcac

SEQ ID NO: 1989081 - DNA, 25 bp, Homo sapien
gcaatgattatgatctcagccagat

SEQ ID NO: 1989082 - DNA, 25 bp, Homo sapien
ggccaagtaccgatcagcaatgatt

SEQ ID NO: 1989083 - DNA, 25 bp, Homo sapien
tgcttgcacggaactttgcaggagg

SEQ ID NO: 1989084 - DNA, 25 bp, Homo sapien
tacaatctggacacctacccatagg

SEQ ID NO: 1989085 - DNA, 25 bp, Homo sapien
cccataggatagtgtgaggtgaaac

SEQ ID NO: 1989086 - DNA, 25 bp, Homo sapien
aaatgctgaagatcctatgagagtc

SEQ ID NO: 1989087 - DNA, 25 bp, Homo sapien
gaggtgaaacttggtgagtccacat

SEQ ID NO: 1989088 - DNA, 25 bp, Homo sapien
gagcatcctaacaaaagctgccctt

SEQ ID NO: 1989089 - DNA, 25 bp, Homo sapien
ctggagaggacttagagcatcctaa

SEQ ID NO: 1989090 - DNA, 25 bp, Homo sapien
ggacttagagcatcctaacaaaagc

SEQ ID NO: 1989091 - DNA, 25 bp, Homo sapien
ggagaggacttagagcatcctaaca

SEQ ID NO: 1989092 - DNA, 25 bp, Homo sapien
ttccaaagaggacattttctttcat

SEQ ID NO: 1989093 - DNA, 25 bp, Homo sapien
tttccaaagaggacattttctttca

SEQ ID NO: 1989094 - DNA, 25 bp, Homo sapien
ccctaaattcaacaacggtctctgg

SEQ ID NO: 1989095 - DNA, 25 bp, Homo sapien
atgagtgaaacctggagttggagca

SEQ ID NO: 1989096 - DNA, 25 bp, Homo sapien
caacaattgtctttgctctatttaa

SEQ ID NO: 1989097 - DNA, 25 bp, Homo sapien
accctaaattcaacaacggtctctg

SEQ ID NO: 1989098 - DNA, 25 bp, Homo sapien
taatgcactgataagcactgcagcc

SEQ ID NO: 1989099 - DNA, 25 bp, Homo sapien
tcatacactgaacgacagacagcat

SEQ ID NO: 1989100 - DNA, 25 bp, Homo sapien
tctggacctccaatagtttgaaccc

SEQ ID NO: 1989101 - DNA, 25 bp, Homo sapien
cagacagcatgttgtaccttgcatc

SEQ ID NO: 1989102 - DNA, 25 bp, Homo sapien
tagggtgaagctcagaaccagaagt

SEQ ID NO: 1989103 - DNA, 25 bp, Homo sapien
gcacgaggagagttagggtgaagct

SEQ ID NO: 1989104 - DNA, 25 bp, Homo sapien
gagagttagggtgaagctcagaacc

SEQ ID NO: 1989105 - DNA, 25 bp, Homo sapien
tcatcctaccgttctcagctcaagg

SEQ ID NO: 1989106 - DNA, 25 bp, Homo sapien
ctttgtaagcctaagatatttcatc

SEQ ID NO: 1989107 - DNA, 25 bp, Homo sapien
tggagcatttcaatagcctctgaac

SEQ ID NO: 1989108 - DNA, 25 bp, Homo sapien
tgatcaaaactctccaaagacctgt

SEQ ID NO: 1989109 - DNA, 25 bp, Homo sapien
ggatgaaacctgaagtctttgccac

SEQ ID NO: 1989110 - DNA, 25 bp, Homo sapien
caaattgctcagtgttacaaaacac

SEQ ID NO: 1989111 - DNA, 25 bp, Homo sapien
tgtggagctggacttattcccaggc

SEQ ID NO: 1989112 - DNA, 25 bp, Homo sapien
cacattcattggtgctggactctca

SEQ ID NO: 1989113 - DNA, 25 bp, Homo sapien
tcctgcctcctaggcactgcagagt

SEQ ID NO: 1989114 - DNA, 25 bp, Homo sapien
tgaggtcacacatagagctaatgcc

SEQ ID NO: 1989115 - DNA, 25 bp, Homo sapien
ccacatagagagactgtaacagctt

SEQ ID NO: 1989116 - DNA, 25 bp, Homo sapien
tacagtgagtagctatttcaacccc

SEQ ID NO: 1989117 - DNA, 25 bp, Homo sapien
ggttcatgatcccaaacttatgtcg

SEQ ID NO: 1989118 - DNA, 25 bp, Homo sapien
gacatgtgacttataactgccagaa

SEQ ID NO: 1989119 - DNA, 25 bp, Homo sapien
gaaaatctgtcacatgacatgtgac

SEQ ID NO: 1989120 - DNA, 25 bp, Homo sapien
tgccagaagagctcactagtgatta

SEQ ID NO: 1989121 - DNA, 25 bp, Homo sapien
agtgattacagcgtggccaaaggaa

SEQ ID NO: 1989122 - DNA, 25 bp, Homo sapien
gtaaaggaatgactgaagtagttgc

SEQ ID NO: 1989123 - DNA, 25 bp, Homo sapien
gcagtaaaggaatgactgaagtagt

SEQ ID NO: 1989124 - DNA, 25 bp, Homo sapien
cacgggcagtaaaggaatgactgaa

SEQ ID NO: 1989125 - DNA, 25 bp, Homo sapien
atggtgtcacgggcagtaaaggaat

SEQ ID NO: 1989126 - DNA, 25 bp, Homo sapien
ttgctttcctttcaataaaccgctg

SEQ ID NO: 1989127 - DNA, 25 bp, Homo sapien
tgcttctggacatttgctttccttt

SEQ ID NO: 1989128 - DNA, 25 bp, Homo sapien
tgctttcctttcaataaaccgctgt

SEQ ID NO: 1989129 - DNA, 25 bp, Homo sapien
gtttttgcttctggacatttgcttt

SEQ ID NO: 1989130 - DNA, 25 bp, Homo sapien
ggatccctgatctgtaaaccattgg

SEQ ID NO: 1989131 - DNA, 25 bp, Homo sapien
gggcagaatctttcacacgtcacaa

SEQ ID NO: 1989132 - DNA, 25 bp, Homo sapien
tctcgaacatgcagtcacattgcgt

SEQ ID NO: 1989133 - DNA, 25 bp, Homo sapien
ccgaggatttccagttggtgagcac

SEQ ID NO: 1989134 - DNA, 25 bp, Homo sapien
gcttggagtcacagtgggccttcct

SEQ ID NO: 1989135 - DNA, 25 bp, Homo sapien
cagggaggtgggaccgcttggagtc

SEQ ID NO: 1989136 - DNA, 25 bp, Homo sapien
gaacccatcaaaagccgtcagaaaa

SEQ ID NO: 1989137 - DNA, 25 bp, Homo sapien
catcaaaagccgtcagaaaaagaga

SEQ ID NO: 1989138 - DNA, 25 bp, Homo sapien
catgtttcactttgaggagtccaaa

SEQ ID NO: 1989139 - DNA, 25 bp, Homo sapien
cttcctctgtttataaccttgaata

SEQ ID NO: 1989140 - DNA, 25 bp, Homo sapien
cttcctccaggatatgacacttcca

SEQ ID NO: 1989141 - DNA, 25 bp, Homo sapien
tgacaaggaaactagcttgcctctt

SEQ ID NO: 1989142 - DNA, 25 bp, Homo sapien
ctgacctttggggtattcactgatg

SEQ ID NO: 1989143 - DNA, 25 bp, Homo sapien
tacttggtgacaatacagttgtggc

SEQ ID NO: 1989144 - DNA, 25 bp, Homo sapien
tgagtgagagcatggtgactacttg

SEQ ID NO: 1989145 - DNA, 25 bp, Homo sapien
caggcagaagacgaaccacagcggc

SEQ ID NO: 1989146 - DNA, 25 bp, Homo sapien
tggcattcccccggacatgaccagg

SEQ ID NO: 1989147 - DNA, 25 bp, Homo sapien
ctggcattcccccggacatgaccag

SEQ ID NO: 1989148 - DNA, 25 bp, Homo sapien
tgagctctcagtggtaaagaaacgt

SEQ ID NO: 1989149 - DNA, 25 bp, Homo sapien
gctctcagtggtaaagaaacgtttc

SEQ ID NO: 1989150 - DNA, 25 bp, Homo sapien
cttttatgaagtctaccctgagctc

SEQ ID NO: 1989151 - DNA, 25 bp, Homo sapien
atgaagtctaccctgagctctcagt

SEQ ID NO: 1989152 - DNA, 25 bp, Homo sapien
tctgtatctcttgtgcttgtcctcc

SEQ ID NO: 1989153 - DNA, 25 bp, Homo sapien
tctatcctcgtacagaggtactgca

SEQ ID NO: 1989154 - DNA, 25 bp, Homo sapien
tgcagtttccagaacttgcctgctc

SEQ ID NO: 1989155 - DNA, 25 bp, Homo sapien
tttcattggtgacgatgactgctct

SEQ ID NO: 1989156 - DNA, 25 bp, Homo sapien
gatgatgttcctaacattacgtctc

SEQ ID NO: 1989157 - DNA, 25 bp, Homo sapien
tcatctacagggcttacgatgatgt

SEQ ID NO: 1989158 - DNA, 25 bp, Homo sapien
gggcttacgatgatgttcctaacat

SEQ ID NO: 1989159 - DNA, 25 bp, Homo sapien
tacagggcttacgatgatgttccta

SEQ ID NO: 1989160 - DNA, 25 bp, Homo sapien
ttattttatagctaacacagtctta

SEQ ID NO: 1989161 - DNA, 25 bp, Homo sapien
tattttatagctaacacagtcttac

SEQ ID NO: 1989162 - DNA, 25 bp, Homo sapien
ctgatttcagagcagctatggtagc

SEQ ID NO: 1989163 - DNA, 25 bp, Homo sapien
ctctgatttcagagcagctatggta

SEQ ID NO: 1989164 - DNA, 25 bp, Homo sapien
tctgatttcagagcagctatggtag

SEQ ID NO: 1989165 - DNA, 25 bp, Homo sapien
gacgtatatatcttggatgtattcc

SEQ ID NO: 1989166 - DNA, 25 bp, Homo sapien
gatgtattccataagagttgctctc

SEQ ID NO: 1989167 - DNA, 25 bp, Homo sapien
tgagccttgtcagatggggtcttct

SEQ ID NO: 1989168 - DNA, 25 bp, Homo sapien
agatggggtcttcttataattccac

SEQ ID NO: 1989169 - DNA, 25 bp, Homo sapien
agaagctctgagtcaattcccatgc

SEQ ID NO: 1989170 - DNA, 25 bp, Homo sapien
ctaaagggtaactgagctgatggac

SEQ ID NO: 1989171 - DNA, 25 bp, Homo sapien
cactttaggaatgatcatctgaagc

SEQ ID NO: 1989172 - DNA, 25 bp, Homo sapien
gctgatggactaagttttttgatga

SEQ ID NO: 1989173 - DNA, 25 bp, Homo sapien
tctcttagaattgtaaatagcttct

SEQ ID NO: 1989174 - DNA, 25 bp, Homo sapien
cttcggactctttcaagacagccat

SEQ ID NO: 1989175 - DNA, 25 bp, Homo sapien
ctcttagaattgtaaatagcttctt

SEQ ID NO: 1989176 - DNA, 25 bp, Homo sapien
tcttcggactctttcaagacagcca

SEQ ID NO: 1989177 - DNA, 25 bp, Homo sapien
cttcctatctgcattaagatcatga

SEQ ID NO: 1989178 - DNA, 25 bp, Homo sapien
tctgcattaagatcatgacattctg

SEQ ID NO: 1989179 - DNA, 25 bp, Homo sapien
cattaagatcatgacattctgagct

SEQ ID NO: 1989180 - DNA, 25 bp, Homo sapien
tctccataccacttctcacatgcat

SEQ ID NO: 1989181 - DNA, 25 bp, Homo sapien
catctctccatagcatagattagcc

SEQ ID NO: 1989182 - DNA, 25 bp, Homo sapien
tctccatagcatagattagcctttg

SEQ ID NO: 1989183 - DNA, 25 bp, Homo sapien
tccatagcatagattagcctttggg

SEQ ID NO: 1989184 - DNA, 25 bp, Homo sapien
tagcctttggggtattctatggcct

SEQ ID NO: 1989185 - DNA, 25 bp, Homo sapien
ggtatttgtacatccggtgtagaac

SEQ ID NO: 1989186 - DNA, 25 bp, Homo sapien
tagtagtagctttcagtgggagcag

SEQ ID NO: 1989187 - DNA, 25 bp, Homo sapien
tccggtgtagaacaattccagtgtt

SEQ ID NO: 1989188 - DNA, 25 bp, Homo sapien
gatgctcaaagccaatcggcctagt

SEQ ID NO: 1989189 - DNA, 25 bp, Homo sapien
tacaggcgcctaagtcaacacttcc

SEQ ID NO: 1989190 - DNA, 25 bp, Homo sapien
gcaagaccaattgtaccttcaagga

SEQ ID NO: 1989191 - DNA, 25 bp, Homo sapien
gtttctcacattctgccaagtccat

SEQ ID NO: 1989192 - DNA, 25 bp, Homo sapien
tattaccagatgtcttacaggcgcc

SEQ ID NO: 1989193 - DNA, 25 bp, Homo sapien
gcaggaaccagatcagcttagttca

SEQ ID NO: 1989194 - DNA, 25 bp, Homo sapien
agagcaggaaccagatcagcttagt

SEQ ID NO: 1989195 - DNA, 25 bp, Homo sapien
cagcttagttcatccctgaaccctc

SEQ ID NO: 1989196 - DNA, 25 bp, Homo sapien
cattgctgacagctaaaatgaactc

SEQ ID NO: 1989197 - DNA, 25 bp, Homo sapien
gaaagatgcttagatactccattgc

SEQ ID NO: 1989198 - DNA, 25 bp, Homo sapien
catcctgccggcaatgttgcataca

SEQ ID NO: 1989199 - DNA, 25 bp, Homo sapien
gttttccagtggaagacagccagac

SEQ ID NO: 1989200 - DNA, 25 bp, Homo sapien
ctgccaggacataaaggctgttctg

SEQ ID NO: 1989201 - DNA, 25 bp, Homo sapien
aaatttgcctgtccccagtttctga

SEQ ID NO: 1989202 - DNA, 25 bp, Homo sapien
acacttctcaagcaggactcggtag

SEQ ID NO: 1989203 - DNA, 25 bp, Homo sapien
taagcacagtgccaacgaaggaagc

SEQ ID NO: 1989204 - DNA, 25 bp, Homo sapien
ttcagttcagagtcaatctccctga

SEQ ID NO: 1989205 - DNA, 25 bp, Homo sapien
tcagttcagagtcaatctccctgaa

SEQ ID NO: 1989206 - DNA, 25 bp, Homo sapien
cttcagttcagagtcaatctccctg

SEQ ID NO: 1989207 - DNA, 25 bp, Homo sapien
tcacctattctctgttcatttttaa

SEQ ID NO: 1989208 - DNA, 25 bp, Homo sapien
tttaatgtaacacagctgatctatt

SEQ ID NO: 1989209 - DNA, 25 bp, Homo sapien
ttctcacctattctctgttcatttt

SEQ ID NO: 1989210 - DNA, 25 bp, Homo sapien
tgtaacacagctgatctattccttt

SEQ ID NO: 1989211 - DNA, 25 bp, Homo sapien
tctgctctgagactgacccaaatcg

SEQ ID NO: 1989212 - DNA, 25 bp, Homo sapien
tctcggaaatacttgcctgtaacaa

SEQ ID NO: 1989213 - DNA, 25 bp, Homo sapien
cagagagaagttttatgacacacag

SEQ ID NO: 1989214 - DNA, 25 bp, Homo sapien
aatatttggcatctccgggcagaaa

SEQ ID NO: 1989215 - DNA, 25 bp, Homo sapien
gaaaatccaatgtgttcccaacatt

SEQ ID NO: 1989216 - DNA, 25 bp, Homo sapien
gaaaaaagtgccattccagatatca

SEQ ID NO: 1989217 - DNA, 25 bp, Homo sapien
gagagtcaatttcatttccggtgga

SEQ ID NO: 1989218 - DNA, 25 bp, Homo sapien
ggcacatgttgatcaagaaatagag

SEQ ID NO: 1989219 - DNA, 25 bp, Homo sapien
ttgtccatggatcattagtcaagtc

SEQ ID NO: 1989220 - DNA, 25 bp, Homo sapien
tcattttgtccatggatcattagtc

SEQ ID NO: 1989221 - DNA, 25 bp, Homo sapien
catggatcattagtcaagtcctttg

SEQ ID NO: 1989222 - DNA, 25 bp, Homo sapien
cattagtcaagtcctttgtggtaag

SEQ ID NO: 1989223 - DNA, 25 bp, Homo sapien
taattggacattcacctgtttgcca

SEQ ID NO: 1989224 - DNA, 25 bp, Homo sapien
cagtgtaattggacattcacctgtt

SEQ ID NO: 1989225 - DNA, 25 bp, Homo sapien
aacagtgtaattggacattcacctg

SEQ ID NO: 1989226 - DNA, 25 bp, Homo sapien
gtgtaattggacattcacctgtttg

SEQ ID NO: 1989227 - DNA, 25 bp, Homo sapien
ctcctataaaggagaatgtaatggt

SEQ ID NO: 1989228 - DNA, 25 bp, Homo sapien
gatggcacatgcgaaaacgatggtt

SEQ ID NO: 1989229 - DNA, 25 bp, Homo sapien
aacacatcttaggtttcttccagac

SEQ ID NO: 1989230 - DNA, 25 bp, Homo sapien
catagagaaatcactcttccttggg

SEQ ID NO: 1989231 - DNA, 25 bp, Homo sapien
tctcttgttaagtctgcgcctccac

SEQ ID NO: 1989232 - DNA, 25 bp, Homo sapien
attttctcttgttaagtctgcgcct

SEQ ID NO: 1989233 - DNA, 25 bp, Homo sapien
cttgttaagtctgcgcctccacaga

SEQ ID NO: 1989234 - DNA, 25 bp, Homo sapien
taagtctgcgcctccacagactttt

SEQ ID NO: 1989235 - DNA, 25 bp, Homo sapien
gcatcttttaaacacccatgagcca

SEQ ID NO: 1989236 - DNA, 25 bp, Homo sapien
aaagcatcttttaaacacccatgag

SEQ ID NO: 1989237 - DNA, 25 bp, Homo sapien
catcttttaaacacccatgagccat

SEQ ID NO: 1989238 - DNA, 25 bp, Homo sapien
tcaaagcatcttttaaacacccatg

SEQ ID NO: 1989239 - DNA, 25 bp, Homo sapien
cctggccccaacatccttgagttta

SEQ ID NO: 1989240 - DNA, 25 bp, Homo sapien
ggaaatataatattatcttggtcca

SEQ ID NO: 1989241 - DNA, 25 bp, Homo sapien
caacatccttgagtttaattaaagg

SEQ ID NO: 1989242 - DNA, 25 bp, Homo sapien
gagcaacggtgcctggccccaacat

SEQ ID NO: 1989243 - DNA, 25 bp, Homo sapien
ttcaatggcccagtagctacaacta

SEQ ID NO: 1989244 - DNA, 25 bp, Homo sapien
taaaactgtgtagtcctatagctga

SEQ ID NO: 1989245 - DNA, 25 bp, Homo sapien
ctatcttgtcagcaatatgaggacc

SEQ ID NO: 1989246 - DNA, 25 bp, Homo sapien
gacctgaatcagtcatgtcatacca

SEQ ID NO: 1989247 - DNA, 25 bp, Homo sapien
tgcaggcttccgctcattgaggaga

SEQ ID NO: 1989248 - DNA, 25 bp, Homo sapien
tagtaagccagcaactttagtcgct

SEQ ID NO: 1989249 - DNA, 25 bp, Homo sapien
tgctgagagctcattactcggctcc

SEQ ID NO: 1989250 - DNA, 25 bp, Homo sapien
catagaggcctgagtatatttcgcc

SEQ ID NO: 1989251 - DNA, 25 bp, Homo sapien
attaagtcagcaattgtagtcgatc

SEQ ID NO: 1989252 - DNA, 25 bp, Homo sapien
cttattaagtcagcaattgtagtcg

SEQ ID NO: 1989253 - DNA, 25 bp, Homo sapien
tgtcttattaagtcagcaattgtag

SEQ ID NO: 1989254 - DNA, 25 bp, Homo sapien
ctgttatgtcttattaagtcagcaa

SEQ ID NO: 1989255 - DNA, 25 bp, Homo sapien
tcagggcattttaggttggaagtac

SEQ ID NO: 1989256 - DNA, 25 bp, Homo sapien
gacatgaagatcagggcattttagg

SEQ ID NO: 1989257 - DNA, 25 bp, Homo sapien
aaagggacatgaagatcagggcatt

SEQ ID NO: 1989258 - DNA, 25 bp, Homo sapien
gggacatgaagatcagggcatttta

SEQ ID NO: 1989259 - DNA, 25 bp, Homo sapien
cgctttgggcactgagccaacctca

SEQ ID NO: 1989260 - DNA, 25 bp, Homo sapien
atctgaaagcactggagcatcccat

SEQ ID NO: 1989261 - DNA, 25 bp, Homo sapien
gtggaaggctcatctgaaagcactg

SEQ ID NO: 1989262 - DNA, 25 bp, Homo sapien
tcctggtcattgactgtgacagtgg

SEQ ID NO: 1989263 - DNA, 25 bp, Homo sapien
tccagagcttattctgttcctggtc

SEQ ID NO: 1989264 - DNA, 25 bp, Homo sapien
aaattcatagaataagcaaaatgtc

SEQ ID NO: 1989265 - DNA, 25 bp, Homo sapien
taatctctatttgtccagctttagg

SEQ ID NO: 1989266 - DNA, 25 bp, Homo sapien
tatttgtccagctttagggtggaaa

SEQ ID NO: 1989267 - DNA, 25 bp, Homo sapien
agggaaggacatttagacattcctt

SEQ ID NO: 1989268 - DNA, 25 bp, Homo sapien
ctaggctatgttgcaatcattggca

SEQ ID NO: 1989269 - DNA, 25 bp, Homo sapien
cccggaatcaggactcacaggtcct

SEQ ID NO: 1989270 - DNA, 25 bp, Homo sapien
gacaagtgctgaactgttgttccaa

SEQ ID NO: 1989271 - DNA, 25 bp, Homo sapien
ccagcagccatgagaccaacatttg

SEQ ID NO: 1989272 - DNA, 25 bp, Homo sapien
aaagattcccatggccccggaatca

SEQ ID NO: 1989273 - DNA, 25 bp, Homo sapien
tgcacaagcctttgtatacacaaac

SEQ ID NO: 1989274 - DNA, 25 bp, Homo sapien
tatacacaaacagtttataaacgct

SEQ ID NO: 1989275 - DNA, 25 bp, Homo sapien
ttacttgtttgcacaagcctttgta

SEQ ID NO: 1989276 - DNA, 25 bp, Homo sapien
tataaacgctactgctattttgata

SEQ ID NO: 1989277 - DNA, 25 bp, Homo sapien
ctgtctgatagcctgttaagcttga

SEQ ID NO: 1989278 - DNA, 25 bp, Homo sapien
taagcttgataagaggaagtacgta

SEQ ID NO: 1989279 - DNA, 25 bp, Homo sapien
gaagtacgtatttcttgctagtaga

SEQ ID NO: 1989280 - DNA, 25 bp, Homo sapien
tgctagtagaacatatcagagacaa

SEQ ID NO: 1989281 - DNA, 25 bp, Homo sapien
gcatgatcagcattaattccaaggg

SEQ ID NO: 1989282 - DNA, 25 bp, Homo sapien
ctcattgaacagaatgttgtcgcat

SEQ ID NO: 1989283 - DNA, 25 bp, Homo sapien
gaatgttgtcgcatgatcagcatta

SEQ ID NO: 1989284 - DNA, 25 bp, Homo sapien
tgaacagaatgttgtcgcatgatca

SEQ ID NO: 1989285 - DNA, 25 bp, Homo sapien
aagggttttctatatccctctctga

SEQ ID NO: 1989286 - DNA, 25 bp, Homo sapien
taatcttaatactgtgcccttttct

SEQ ID NO: 1989287 - DNA, 25 bp, Homo sapien
tttctctaatcttaatactgtgccc

SEQ ID NO: 1989288 - DNA, 25 bp, Homo sapien
agggttttctatatccctctctgag

SEQ ID NO: 1989289 - DNA, 25 bp, Homo sapien
gaccatcaaaataaggagattcttt

SEQ ID NO: 1989290 - DNA, 25 bp, Homo sapien
actgcaaatcttgaccatcaaaata

SEQ ID NO: 1989291 - DNA, 25 bp, Homo sapien
aactgcaaatcttgaccatcaaaat

SEQ ID NO: 1989292 - DNA, 25 bp, Homo sapien
ggatgttccatagccatgtctgaag

SEQ ID NO: 1989293 - DNA, 25 bp, Homo sapien
caggatgttccatagccatgtctga

SEQ ID NO: 1989294 - DNA, 25 bp, Homo sapien
tcaggatgttccatagccatgtctg

SEQ ID NO: 1989295 - DNA, 25 bp, Homo sapien
ttttcaggatgttccatagccatgt

SEQ ID NO: 1989296 - DNA, 25 bp, Homo sapien
cactgtaagaaatggctctgatgaa

SEQ ID NO: 1989297 - DNA, 25 bp, Homo sapien
gagggtcactgtaagaaatggctct

SEQ ID NO: 1989298 - DNA, 25 bp, Homo sapien
ttgagggtcactgtaagaaatggct

SEQ ID NO: 1989299 - DNA, 25 bp, Homo sapien
gggtcactgtaagaaatggctctga

SEQ ID NO: 1989300 - DNA, 25 bp, Homo sapien
gaaggacagtcacggcagaagcttt

SEQ ID NO: 1989301 - DNA, 25 bp, Homo sapien
gaaagttccagacgaacccaggaca

SEQ ID NO: 1989302 - DNA, 25 bp, Homo sapien
taccaagtgttctcatcaatgcaag

SEQ ID NO: 1989303 - DNA, 25 bp, Homo sapien
tagccatgataagcgcttttcaagg

SEQ ID NO: 1989304 - DNA, 25 bp, Homo sapien
ccacaaaccaatgaactggatgaga

SEQ ID NO: 1989305 - DNA, 25 bp, Homo sapien
ttaaccacaaaccaatgaactggat

SEQ ID NO: 1989306 - DNA, 25 bp, Homo sapien
taaccacaaaccaatgaactggatg

SEQ ID NO: 1989307 - DNA, 25 bp, Homo sapien
accacaaaccaatgaactggatgag

SEQ ID NO: 1989308 - DNA, 25 bp, Homo sapien
tgggagaaggcggagcgggggcggc

SEQ ID NO: 1989309 - DNA, 25 bp, Homo sapien
ctgggagaaggcggagcgggggcgg

SEQ ID NO: 1989310 - DNA, 25 bp, Homo sapien
aaggcggagcgggggcggcctggag

SEQ ID NO: 1989311 - DNA, 25 bp, Homo sapien
gcggagcgggggcggcctggagcgc

SEQ ID NO: 1989312 - DNA, 25 bp, Homo sapien
caagaaagaaagaggtcctgcggtc

SEQ ID NO: 1989313 - DNA, 25 bp, Homo sapien
cccgaaggtggacgaagtctgtgat

SEQ ID NO: 1989314 - DNA, 25 bp, Homo sapien
tctaacctcactgctgtacgaaggg

SEQ ID NO: 1989315 - DNA, 25 bp, Homo sapien
tggttgtatcatcccaagtggcaag

SEQ ID NO: 1989316 - DNA, 25 bp, Homo sapien
caggacacgcctggcacagggttgt

SEQ ID NO: 1989317 - DNA, 25 bp, Homo sapien
cacattccaggtacggacttgctgg

SEQ ID NO: 1989318 - DNA, 25 bp, Homo sapien
caatagtgtaagacacgactgtcct

SEQ ID NO: 1989319 - DNA, 25 bp, Homo sapien
gctgatttaaccttggcaggcaatt

SEQ ID NO: 1989320 - DNA, 25 bp, Homo sapien
cagccttgcataactctcagctgtg

SEQ ID NO: 1989321 - DNA, 25 bp, Homo sapien
agccttgcataactctcagctgtgt

SEQ ID NO: 1989322 - DNA, 25 bp, Homo sapien
aggcagttaaggaattagaggctct

SEQ ID NO: 1989323 - DNA, 25 bp, Homo sapien
caataaattagtaaggcagttaagg

SEQ ID NO: 1989324 - DNA, 25 bp, Homo sapien
cttttggtgagtagtggtagtatga

SEQ ID NO: 1989325 - DNA, 25 bp, Homo sapien
gaattagaggctctaccagtacact

SEQ ID NO: 1989326 - DNA, 25 bp, Homo sapien
tcccggtagtaagcaggtatttctc

SEQ ID NO: 1989327 - DNA, 25 bp, Homo sapien
caggtatttctctgagtgcagtttc

SEQ ID NO: 1989328 - DNA, 25 bp, Homo sapien
gaagtcatgattcccggtagtaagc

SEQ ID NO: 1989329 - DNA, 25 bp, Homo sapien
ctggaaccctggaatcttcttggtc

SEQ ID NO: 1989330 - DNA, 25 bp, Homo sapien
atcattaaaatagccgaaaactgcc

SEQ ID NO: 1989331 - DNA, 25 bp, Homo sapien
tagtggaaggcgaagtttgttgttc

SEQ ID NO: 1989332 - DNA, 25 bp, Homo sapien
taatgaactgtaccgggattgaatg

SEQ ID NO: 1989333 - DNA, 25 bp, Homo sapien
taggtcttctcttatatgtagtgga

SEQ ID NO: 1989334 - DNA, 25 bp, Homo sapien
cattgatggttctgatgatgacgtg

SEQ ID NO: 1989335 - DNA, 25 bp, Homo sapien
tgtctttcatgtttgcatctcattg

SEQ ID NO: 1989336 - DNA, 25 bp, Homo sapien
gcccaggtgcggtccttcttcttcc

SEQ ID NO: 1989337 - DNA, 25 bp, Homo sapien
gcgggcagcctcggcccaggtgcgg

SEQ ID NO: 1989338 - DNA, 25 bp, Homo sapien
tagtacttgattgccactccacgga

SEQ ID NO: 1989339 - DNA, 25 bp, Homo sapien
ctaatagtacttgattgccactcca

SEQ ID NO: 1989340 - DNA, 25 bp, Homo sapien
ttttcagaagccttgcacatcccca

SEQ ID NO: 1989341 - DNA, 25 bp, Homo sapien
tccacggaacctgaataatgcattt

SEQ ID NO: 1989342 - DNA, 25 bp, Homo sapien
ttaaatggcaatgcgcaaagtaaca

SEQ ID NO: 1989343 - DNA, 25 bp, Homo sapien
aatggcaatgcgcaaagtaacacaa

SEQ ID NO: 1989344 - DNA, 25 bp, Homo sapien
tggcaatgcgcaaagtaacacaact

SEQ ID NO: 1989345 - DNA, 25 bp, Homo sapien
atattaaatggcaatgcgcaaagta

SEQ ID NO: 1989346 - DNA, 25 bp, Homo sapien
ttaaagtcaaagccccagctcgaca

SEQ ID NO: 1989347 - DNA, 25 bp, Homo sapien
agatcgtttcacaatggtttaaact

SEQ ID NO: 1989348 - DNA, 25 bp, Homo sapien
taaagtcaaagccccagctcgacat

SEQ ID NO: 1989349 - DNA, 25 bp, Homo sapien
cgtttcacaatggtttaaactgtat

SEQ ID NO: 1989350 - DNA, 25 bp, Homo sapien
gctttccccatctgaactgcctacg

SEQ ID NO: 1989351 - DNA, 25 bp, Homo sapien
catctgaactgcctacgactagcac

SEQ ID NO: 1989352 - DNA, 25 bp, Homo sapien
ccccatctgaactgcctacgactag

SEQ ID NO: 1989353 - DNA, 25 bp, Homo sapien
tttccccatctgaactgcctacgac

SEQ ID NO: 1989354 - DNA, 25 bp, Homo sapien
tcttcctgagtacaggcccctcagc

SEQ ID NO: 1989355 - DNA, 25 bp, Homo sapien
tgtttctcttcctgagtacaggccc

SEQ ID NO: 1989356 - DNA, 25 bp, Homo sapien
gtttctcttcctgagtacaggcccc

SEQ ID NO: 1989357 - DNA, 25 bp, Homo sapien
ttctcttcctgagtacaggcccctc

SEQ ID NO: 1989358 - DNA, 25 bp, Homo sapien
tgctgtcattggtgagttggggtgt

SEQ ID NO: 1989359 - DNA, 25 bp, Homo sapien
tctgaatgacttccaatatctgctt

SEQ ID NO: 1989360 - DNA, 25 bp, Homo sapien
gacttccaatatctgctttgctgtc

SEQ ID NO: 1989361 - DNA, 25 bp, Homo sapien
atgacttccaatatctgctttgctg

SEQ ID NO: 1989362 - DNA, 25 bp, Homo sapien
taagacatatatttcctaaggctgt

SEQ ID NO: 1989363 - DNA, 25 bp, Homo sapien
taagctgttaagacgtactgctcag

SEQ ID NO: 1989364 - DNA, 25 bp, Homo sapien
gaagagttcaccctgctagatgccg

SEQ ID NO: 1989365 - DNA, 25 bp, Homo sapien
gttgctttcatacctgctaagataa

SEQ ID NO: 1989366 - DNA, 25 bp, Homo sapien
tgccaaccttaatctgggctttctg

SEQ ID NO: 1989367 - DNA, 25 bp, Homo sapien
gaaacggacactgccaaccttaatc

SEQ ID NO: 1989368 - DNA, 25 bp, Homo sapien
cactgccaaccttaatctgggcttt

SEQ ID NO: 1989369 - DNA, 25 bp, Homo sapien
cggacactgccaaccttaatctggg

SEQ ID NO: 1989370 - DNA, 25 bp, Homo sapien
aatctgagccagtcacagtcccttc

SEQ ID NO: 1989371 - DNA, 25 bp, Homo sapien
gagccagtcacagtcccttccttgt

SEQ ID NO: 1989372 - DNA, 25 bp, Homo sapien
gggaatctgagccagtcacagtccc

SEQ ID NO: 1989373 - DNA, 25 bp, Homo sapien
tgagccagtcacagtcccttccttg

SEQ ID NO: 1989374 - DNA, 25 bp, Homo sapien
ctgagctcaatggctctctccacca

SEQ ID NO: 1989375 - DNA, 25 bp, Homo sapien
ttactgagctcaatggctctctcca

SEQ ID NO: 1989376 - DNA, 25 bp, Homo sapien
tactgagctcaatggctctctccac

SEQ ID NO: 1989377 - DNA, 25 bp, Homo sapien
actgagctcaatggctctctccacc

SEQ ID NO: 1989378 - DNA, 25 bp, Homo sapien
ctggtgctgcctgttaaggttgttg

SEQ ID NO: 1989379 - DNA, 25 bp, Homo sapien
tgttgaggtgatcccaaatggaaaa

SEQ ID NO: 1989380 - DNA, 25 bp, Homo sapien
gaggtgatcccaaatggaaaatagt

SEQ ID NO: 1989381 - DNA, 25 bp, Homo sapien
ttgaggtgatcccaaatggaaaata

SEQ ID NO: 1989382 - DNA, 25 bp, Homo sapien
ggaggaagatccttcatacacacca

SEQ ID NO: 1989383 - DNA, 25 bp, Homo sapien
ctaatataatcatcatggaaagttg

SEQ ID NO: 1989384 - DNA, 25 bp, Homo sapien
tataatcatcatggaaagttgtccc

SEQ ID NO: 1989385 - DNA, 25 bp, Homo sapien
acaccaacgctgtctccaagccatg

SEQ ID NO: 1989386 - DNA, 25 bp, Homo sapien
catgaccaacacgaaagcagctgag

SEQ ID NO: 1989387 - DNA, 25 bp, Homo sapien
gaccaacacgaaagcagctgaggct

SEQ ID NO: 1989388 - DNA, 25 bp, Homo sapien
tgaccaacacgaaagcagctgaggc

SEQ ID NO: 1989389 - DNA, 25 bp, Homo sapien
ctcatgaccaacacgaaagcagctg

SEQ ID NO: 1989390 - DNA, 25 bp, Homo sapien
ctagttcaagcattcggttcagcat

SEQ ID NO: 1989391 - DNA, 25 bp, Homo sapien
cagccactcctgctagttcaagcat

SEQ ID NO: 1989392 - DNA, 25 bp, Homo sapien
ggaaggaatgaacggaaccactcca

SEQ ID NO: 1989393 - DNA, 25 bp, Homo sapien
gaacggaaccactccaatgcaatcc

SEQ ID NO: 1989394 - DNA, 25 bp, Homo sapien
cattcagacaggctaatggagaggt

SEQ ID NO: 1989395 - DNA, 25 bp, Homo sapien
ttcagacaggctaatggagaggttc

SEQ ID NO: 1989396 - DNA, 25 bp, Homo sapien
tgcattcagacaggctaatggagag

SEQ ID NO: 1989397 - DNA, 25 bp, Homo sapien
attcagacaggctaatggagaggtt

SEQ ID NO: 1989398 - DNA, 25 bp, Homo sapien
tgttccatcccctattcgagtgtta

SEQ ID NO: 1989399 - DNA, 25 bp, Homo sapien
gactttccagggattttgaagaatg

SEQ ID NO: 1989400 - DNA, 25 bp, Homo sapien
agagcatagaggcctgactttccag

SEQ ID NO: 1989401 - DNA, 25 bp, Homo sapien
ccctattcgagtgttagtgtgaagc

SEQ ID NO: 1989402 - DNA, 25 bp, Homo sapien
gatttatggagaagatgtattagca

SEQ ID NO: 1989403 - DNA, 25 bp, Homo sapien
tgatttatggagaagatgtattagc

SEQ ID NO: 1989404 - DNA, 25 bp, Homo sapien
atttatggagaagatgtattagcaa

SEQ ID NO: 1989405 - DNA, 25 bp, Homo sapien
gatgatttatggagaagatgtatta

SEQ ID NO: 1989406 - DNA, 25 bp, Homo sapien
atctgctgggcatgacgactcctct

SEQ ID NO: 1989407 - DNA, 25 bp, Homo sapien
taaatccaacgtgccatctgctggg

SEQ ID NO: 1989408 - DNA, 25 bp, Homo sapien
ggccatatctgtaccatccaattca

SEQ ID NO: 1989409 - DNA, 25 bp, Homo sapien
ccatgggcatttgcctcggccatat

SEQ ID NO: 1989410 - DNA, 25 bp, Homo sapien
accacaacaattggggggatactca

SEQ ID NO: 1989411 - DNA, 25 bp, Homo sapien
agccagggttccaccattaccacaa

SEQ ID NO: 1989412 - DNA, 25 bp, Homo sapien
tctaatcacaaagaccagccagggt

SEQ ID NO: 1989413 - DNA, 25 bp, Homo sapien
ttccaccattaccacaacaattggg

SEQ ID NO: 1989414 - DNA, 25 bp, Homo sapien
tctcctcaaacggacagacttctga

SEQ ID NO: 1989415 - DNA, 25 bp, Homo sapien
ctttagttctcctcaaacggacaga

SEQ ID NO: 1989416 - DNA, 25 bp, Homo sapien
gagactttaacactgaaatggtttg

SEQ ID NO: 1989417 - DNA, 25 bp, Homo sapien
tagttctcctcaaacggacagactt

SEQ ID NO: 1989418 - DNA, 25 bp, Homo sapien
tgaatctcgagtggaagatgcttca

SEQ ID NO: 1989419 - DNA, 25 bp, Homo sapien
ttagtaaggcttgaatctcgagtgg

SEQ ID NO: 1989420 - DNA, 25 bp, Homo sapien
ggcttgaatctcgagtggaagatgc

SEQ ID NO: 1989421 - DNA, 25 bp, Homo sapien
ctgtttaagagcctttttggtgtgc

SEQ ID NO: 1989422 - DNA, 25 bp, Homo sapien
ctaatcctggatctggtaaaggtca

SEQ ID NO: 1989423 - DNA, 25 bp, Homo sapien
tctggtaaaggtcatcaatgggtgg

SEQ ID NO: 1989424 - DNA, 25 bp, Homo sapien
ggaacagtcttgtttaccatcattg

SEQ ID NO: 1989425 - DNA, 25 bp, Homo sapien
tgctcatcagacacctttaatggtg

SEQ ID NO: 1989426 - DNA, 25 bp, Homo sapien
gaaggcgaatccgactgctcatcag

SEQ ID NO: 1989427 - DNA, 25 bp, Homo sapien
gtcaaaacaacacgaggaacagtct

SEQ ID NO: 1989428 - DNA, 25 bp, Homo sapien
tttccagtgggagatttttgcccat

SEQ ID NO: 1989429 - DNA, 25 bp, Homo sapien
tttctttatctgaactgtctgcttc

SEQ ID NO: 1989430 - DNA, 25 bp, Homo sapien
ctttatctgaactgtctgcttcacc

SEQ ID NO: 1989431 - DNA, 25 bp, Homo sapien
ttttccagtgggagatttttgccca

SEQ ID NO: 1989432 - DNA, 25 bp, Homo sapien
tgctaaggcccaagtgaaactcagg

SEQ ID NO: 1989433 - DNA, 25 bp, Homo sapien
ccttgcacagggtgaatatcttgca

SEQ ID NO: 1989434 - DNA, 25 bp, Homo sapien
taggctacactccttagatgctaag

SEQ ID NO: 1989435 - DNA, 25 bp, Homo sapien
actgaagagtgttgagagaacatac

SEQ ID NO: 1989436 - DNA, 25 bp, Homo sapien
tgacagagtacatatctaaaggcag

SEQ ID NO: 1989437 - DNA, 25 bp, Homo sapien
ggtaaggacacaatacttgacagag

SEQ ID NO: 1989438 - DNA, 25 bp, Homo sapien
cctgaaaagagaatgataaatgtgt

SEQ ID NO: 1989439 - DNA, 25 bp, Homo sapien
aaatgaatcagtacgcaacgccctc

SEQ ID NO: 1989440 - DNA, 25 bp, Homo sapien
gccctcaagttagtgttgacaagaa

SEQ ID NO: 1989441 - DNA, 25 bp, Homo sapien
ttctatgtcaatgtcctcagctttg

SEQ ID NO: 1989442 - DNA, 25 bp, Homo sapien
ctgaggtaaggaagcaaacgtatgt

SEQ ID NO: 1989443 - DNA, 25 bp, Homo sapien
tttattaatgccctcaagttagtgt

SEQ ID NO: 1989444 - DNA, 25 bp, Homo sapien
aatggctttgtattacagacacagg

SEQ ID NO: 1989445 - DNA, 25 bp, Homo sapien
tggctttgtattacagacacaggga

SEQ ID NO: 1989446 - DNA, 25 bp, Homo sapien
aaagtaatggtcttattacatcaca

SEQ ID NO: 1989447 - DNA, 25 bp, Homo sapien
tattacatcacagctccattcaaaa

SEQ ID NO: 1989448 - DNA, 25 bp, Homo sapien
caagataaatgcgaaactcagctcc

SEQ ID NO: 1989449 - DNA, 25 bp, Homo sapien
catttgggtccagagtaggaggccc

SEQ ID NO: 1989450 - DNA, 25 bp, Homo sapien
gatgtaatactggaatgaacccgtt

SEQ ID NO: 1989451 - DNA, 25 bp, Homo sapien
caaaaagattgccttaacagctggc

SEQ ID NO: 1989452 - DNA, 25 bp, Homo sapien
aattacatttcaaacacacacttac

SEQ ID NO: 1989453 - DNA, 25 bp, Homo sapien
accagtaagtgacttaggcaagaag

SEQ ID NO: 1989454 - DNA, 25 bp, Homo sapien
taatggatcttctaagtacttttag

SEQ ID NO: 1989455 - DNA, 25 bp, Homo sapien
tcagactcagcgaaaaagccaaagt

SEQ ID NO: 1989456 - DNA, 25 bp, Homo sapien
ctctccagagtgaaagatatgtcca

SEQ ID NO: 1989457 - DNA, 25 bp, Homo sapien
tcctataaggacaggtaaccatccc

SEQ ID NO: 1989458 - DNA, 25 bp, Homo sapien
tattacaggccaatctccacttgat

SEQ ID NO: 1989459 - DNA, 25 bp, Homo sapien
ccaggtatgctggtaaatatcctat

SEQ ID NO: 1989460 - DNA, 25 bp, Homo sapien
catcctgacaaggagctaggggtca

SEQ ID NO: 1989461 - DNA, 25 bp, Homo sapien
tgtacatcctgacaaggagctaggg

SEQ ID NO: 1989462 - DNA, 25 bp, Homo sapien
atcctgacaaggagctaggggtcat

SEQ ID NO: 1989463 - DNA, 25 bp, Homo sapien
tacatcctgacaaggagctaggggt

SEQ ID NO: 1989464 - DNA, 25 bp, Homo sapien
ttgatgtatagggaacgagaatctg

SEQ ID NO: 1989465 - DNA, 25 bp, Homo sapien
ctccttgatgtatagggaacgagaa

SEQ ID NO: 1989466 - DNA, 25 bp, Homo sapien
ccttgatgtatagggaacgagaatc

SEQ ID NO: 1989467 - DNA, 25 bp, Homo sapien
tgatgtatagggaacgagaatctgg

SEQ ID NO: 1989468 - DNA, 25 bp, Homo sapien
gagctgaagtactgaggcgtaaaat

SEQ ID NO: 1989469 - DNA, 25 bp, Homo sapien
ccacccttgtgctgcatatgcaaag

SEQ ID NO: 1989470 - DNA, 25 bp, Homo sapien
tctgccagtcgctgtttccaccctt

SEQ ID NO: 1989471 - DNA, 25 bp, Homo sapien
ggcgtaaaattccatcacttcccat

SEQ ID NO: 1989472 - DNA, 25 bp, Homo sapien
tactccaatatgtcacataataata

SEQ ID NO: 1989473 - DNA, 25 bp, Homo sapien
ccaatatgtcacataataatagaaa

SEQ ID NO: 1989474 - DNA, 25 bp, Homo sapien
ctccaatatgtcacataataataga

SEQ ID NO: 1989475 - DNA, 25 bp, Homo sapien
tgtactccaatatgtcacataataa

SEQ ID NO: 1989476 - DNA, 25 bp, Homo sapien
aaatgctaatgtattgaataaatgt

SEQ ID NO: 1989477 - DNA, 25 bp, Homo sapien
aatgctaatgtattgaataaatgtg

SEQ ID NO: 1989478 - DNA, 25 bp, Homo sapien
cttgccttatccgcaactgcatttc

SEQ ID NO: 1989479 - DNA, 25 bp, Homo sapien
tgccttatccgcaactgcatttctg

SEQ ID NO: 1989480 - DNA, 25 bp, Homo sapien
ttctccataaaacctctcaaagaat

SEQ ID NO: 1989481 - DNA, 25 bp, Homo sapien
ttgccttatccgcaactgcatttct

SEQ ID NO: 1989482 - DNA, 25 bp, Homo sapien
gaaggccagaagtcccacatgaaga

SEQ ID NO: 1989483 - DNA, 25 bp, Homo sapien
tggttagactttcagcctcctcaga

SEQ ID NO: 1989484 - DNA, 25 bp, Homo sapien
gaactactttgagctccagcgttgt

SEQ ID NO: 1989485 - DNA, 25 bp, Homo sapien
caaagagtagcacagaaaccaggct

SEQ ID NO: 1989486 - DNA, 25 bp, Homo sapien
tcttctgctgggaggtaaggttctc

SEQ ID NO: 1989487 - DNA, 25 bp, Homo sapien
aacaaaatgttgtctcaagggaggc

SEQ ID NO: 1989488 - DNA, 25 bp, Homo sapien
tcttcagacggaaatgcttcaggag

SEQ ID NO: 1989489 - DNA, 25 bp, Homo sapien
tttacaggtttgctgactcagggtc

SEQ ID NO: 1989490 - DNA, 25 bp, Homo sapien
ttaaatatccttaagcaagagctct

SEQ ID NO: 1989491 - DNA, 25 bp, Homo sapien
caaactgcttgtgaagtctctgttc

SEQ ID NO: 1989492 - DNA, 25 bp, Homo sapien
ataagcttttgacagactggcatgt

SEQ ID NO: 1989493 - DNA, 25 bp, Homo sapien
caagagctcttaagaccaaacatca

SEQ ID NO: 1989494 - DNA, 25 bp, Homo sapien
cagagacaatgctcgctgcagcagc

SEQ ID NO: 1989495 - DNA, 25 bp, Homo sapien
gctcttgattataaaaggtggccca

SEQ ID NO: 1989496 - DNA, 25 bp, Homo sapien
ccgggccttgatatctgcgagggtc

SEQ ID NO: 1989497 - DNA, 25 bp, Homo sapien
tgctagtggatgctcgagactcagg

SEQ ID NO: 1989498 - DNA, 25 bp, Homo sapien
tgatgccggaactgatgacacaagg

SEQ ID NO: 1989499 - DNA, 25 bp, Homo sapien
tcatttggagtggtgccagagtccc

SEQ ID NO: 1989500 - DNA, 25 bp, Homo sapien
tccagtaaacattgcgacggtcggg

SEQ ID NO: 1989501 - DNA, 25 bp, Homo sapien
ttctcggagacttgtgcaggtggcc

SEQ ID NO: 1989502 - DNA, 25 bp, Homo sapien
ggctaaccttagctggtgaggtgct

SEQ ID NO: 1989503 - DNA, 25 bp, Homo sapien
gcatattgggggataacatgttggc

SEQ ID NO: 1989504 - DNA, 25 bp, Homo sapien
tctttcatgggcatattgggggata

SEQ ID NO: 1989505 - DNA, 25 bp, Homo sapien
taacatgttggctaaccttagctgg

SEQ ID NO: 1989506 - DNA, 25 bp, Homo sapien
tgtttggcattgtgtgtgcagtgcc

SEQ ID NO: 1989507 - DNA, 25 bp, Homo sapien
tggcattgtgtgtgcagtgcctccc

SEQ ID NO: 1989508 - DNA, 25 bp, Homo sapien
gctttgtttggcattgtgtgtgcag

SEQ ID NO: 1989509 - DNA, 25 bp, Homo sapien
tagtgctttgtttggcattgtgtgt

SEQ ID NO: 1989510 - DNA, 25 bp, Homo sapien
gagaggtggaggtagcggaggtggt

SEQ ID NO: 1989511 - DNA, 25 bp, Homo sapien
ggagaggtggaggtagcggaggtgg

SEQ ID NO: 1989512 - DNA, 25 bp, Homo sapien
taactggaggttgtttttgatcaga

SEQ ID NO: 1989513 - DNA, 25 bp, Homo sapien
ccatggtaactggaggttgtttttg

SEQ ID NO: 1989514 - DNA, 25 bp, Homo sapien
actaagtctcttagtggtttccatg

SEQ ID NO: 1989515 - DNA, 25 bp, Homo sapien
ctgtggccaactaagtctcttagtg

SEQ ID NO: 1989516 - DNA, 25 bp, Homo sapien
ttttatattgctacatatgcccgtg

SEQ ID NO: 1989517 - DNA, 25 bp, Homo sapien
ttatattgctacatatgcccgtgga

SEQ ID NO: 1989518 - DNA, 25 bp, Homo sapien
gaggttccgattttatattgctaca

SEQ ID NO: 1989519 - DNA, 25 bp, Homo sapien
gaaagaggttccgattttatattgc

SEQ ID NO: 1989520 - DNA, 25 bp, Homo sapien
aatctgcactttttagcgcgaatgc

SEQ ID NO: 1989521 - DNA, 25 bp, Homo sapien
aactcgtgctaccaaagtgtattgt

SEQ ID NO: 1989522 - DNA, 25 bp, Homo sapien
gatgctgcccttttgaaactcgtgc

SEQ ID NO: 1989523 - DNA, 25 bp, Homo sapien
cattttctgagcagctaattgggta

SEQ ID NO: 1989524 - DNA, 25 bp, Homo sapien
ctgagcgttctgaccagacaagcct

SEQ ID NO: 1989525 - DNA, 25 bp, Homo sapien
tctgaccagacaagcctgtggcagg

SEQ ID NO: 1989526 - DNA, 25 bp, Homo sapien
cagacaagcctgtggcaggattgga

SEQ ID NO: 1989527 - DNA, 25 bp, Homo sapien
caagcctgtggcaggattggagcca

SEQ ID NO: 1989528 - DNA, 25 bp, Homo sapien
tcatggctttcagccggcaagagca

SEQ ID NO: 1989529 - DNA, 25 bp, Homo sapien
cacaaagttttgaaggacctatgca

SEQ ID NO: 1989530 - DNA, 25 bp, Homo sapien
gacctatgcagtcgtcatggcagaa

SEQ ID NO: 1989531 - DNA, 25 bp, Homo sapien
tgctgtcggcaaagttctgaacggg

SEQ ID NO: 1989532 - DNA, 25 bp, Homo sapien
ccgtgtggaaaagggatactgcatc

SEQ ID NO: 1989533 - DNA, 25 bp, Homo sapien
catagaggaaaggtacctgctccaa

SEQ ID NO: 1989534 - DNA, 25 bp, Homo sapien
caaagctaggaatggcaactgaaca

SEQ ID NO: 1989535 - DNA, 25 bp, Homo sapien
tattatcaggtgtcaaaggcctaga

SEQ ID NO: 1989536 - DNA, 25 bp, Homo sapien
tcttcaaactagaccttcgcaggga

SEQ ID NO: 1989537 - DNA, 25 bp, Homo sapien
gggacttcattacaccacggaggaa

SEQ ID NO: 1989538 - DNA, 25 bp, Homo sapien
tacagacgatgctaccctaggcttg

SEQ ID NO: 1989539 - DNA, 25 bp, Homo sapien
tctatgtaggttcagggccttcgcc

SEQ ID NO: 1989540 - DNA, 25 bp, Homo sapien
tctgcctctgcatgggaagtctctc

SEQ ID NO: 1989541 - DNA, 25 bp, Homo sapien
cacttgacatggtcccacaccttca

SEQ ID NO: 1989542 - DNA, 25 bp, Homo sapien
tgttgtccacttgacatggtcccac

SEQ ID NO: 1989543 - DNA, 25 bp, Homo sapien
acttgttgtccacttgacatggtcc

SEQ ID NO: 1989544 - DNA, 25 bp, Homo sapien
tgctggtcctgagggatgtccaact

SEQ ID NO: 1989545 - DNA, 25 bp, Homo sapien
caactctaatttgacttcatccaca

SEQ ID NO: 1989546 - DNA, 25 bp, Homo sapien
gagggatgtccaactctaatttgac

SEQ ID NO: 1989547 - DNA, 25 bp, Homo sapien
ctgatgaactgcagccggctgtctt

SEQ ID NO: 1989548 - DNA, 25 bp, Homo sapien
aacctgtaaggcaacattcatgagt

SEQ ID NO: 1989549 - DNA, 25 bp, Homo sapien
gggttttccagtcttctgtattcag

SEQ ID NO: 1989550 - DNA, 25 bp, Homo sapien
tcagaacaaccatagtagatcacca

SEQ ID NO: 1989551 - DNA, 25 bp, Homo sapien
aatcctccaaaatctgcttccctag

SEQ ID NO: 1989552 - DNA, 25 bp, Homo sapien
gtgttacagactgacagctcccttc

SEQ ID NO: 1989553 - DNA, 25 bp, Homo sapien
agtgttacagactgacagctccctt

SEQ ID NO: 1989554 - DNA, 25 bp, Homo sapien
tgttacagactgacagctcccttcc

SEQ ID NO: 1989555 - DNA, 25 bp, Homo sapien
cactgaagctcatgttgctcaaatg

SEQ ID NO: 1989556 - DNA, 25 bp, Homo sapien
aagctcatgttgctcaaatgttcct

SEQ ID NO: 1989557 - DNA, 25 bp, Homo sapien
ccactgaagctcatgttgctcaaat

SEQ ID NO: 1989558 - DNA, 25 bp, Homo sapien
ctgaagctcatgttgctcaaatgtt

SEQ ID NO: 1989559 - DNA, 25 bp, Homo sapien
aaatgtagagtttctggtgtggcat

SEQ ID NO: 1989560 - DNA, 25 bp, Homo sapien
tattgagggctgtaaattctagact

SEQ ID NO: 1989561 - DNA, 25 bp, Homo sapien
aaccctgcgcgtggaaggtttagct

SEQ ID NO: 1989562 - DNA, 25 bp, Homo sapien
catagctccttgaaccatgttgtta

SEQ ID NO: 1989563 - DNA, 25 bp, Homo sapien
gaaagatgaatagtcaaggctggcc

SEQ ID NO: 1989564 - DNA, 25 bp, Homo sapien
cctggcatgtttactcctgtgtcag

SEQ ID NO: 1989565 - DNA, 25 bp, Homo sapien
gcccaaaagaacagaggatcaaata

SEQ ID NO: 1989566 - DNA, 25 bp, Homo sapien
taacacaagtatgggagttctgtaa

SEQ ID NO: 1989567 - DNA, 25 bp, Homo sapien
gctcccttctcatagcctggcatgt

SEQ ID NO: 1989568 - DNA, 25 bp, Homo sapien
caatatgtgtggactgtaagtccct

SEQ ID NO: 1989569 - DNA, 25 bp, Homo sapien
gaactctctttggtacaatatggat

SEQ ID NO: 1989570 - DNA, 25 bp, Homo sapien
aaatccagttctgaatagtaactgc

SEQ ID NO: 1989571 - DNA, 25 bp, Homo sapien
gctttcatgtagcttttgattgtac

SEQ ID NO: 1989572 - DNA, 25 bp, Homo sapien
gtttcaaagttccagtagtctccat

SEQ ID NO: 1989573 - DNA, 25 bp, Homo sapien
tgggtaaccccaagctctaatgaaa

SEQ ID NO: 1989574 - DNA, 25 bp, Homo sapien
ccattaagggaggataccagttgtc

SEQ ID NO: 1989575 - DNA, 25 bp, Homo sapien
tttctgtgataaccgtttccctgtg

SEQ ID NO: 1989576 - DNA, 25 bp, Homo sapien
aaataaatgcaggtaactcatcaaa

SEQ ID NO: 1989577 - DNA, 25 bp, Homo sapien
ccaaataaatgcaggtaactcatca

SEQ ID NO: 1989578 - DNA, 25 bp, Homo sapien
caaataaatgcaggtaactcatcaa

SEQ ID NO: 1989579 - DNA, 25 bp, Homo sapien
gcttctctgggtactcagctgaata

SEQ ID NO: 1989580 - DNA, 25 bp, Homo sapien
cttctctgggtactcagctgaatat

SEQ ID NO: 1989581 - DNA, 25 bp, Homo sapien
tgcttctctgggtactcagctgaat

SEQ ID NO: 1989582 - DNA, 25 bp, Homo sapien
gtgcttctctgggtactcagctgaa

SEQ ID NO: 1989583 - DNA, 25 bp, Homo sapien
tgtaaggaactctcagcggatgcag

SEQ ID NO: 1989584 - DNA, 25 bp, Homo sapien
gcacctggatgtagatgactgaatg

SEQ ID NO: 1989585 - DNA, 25 bp, Homo sapien
gatgcagctgcaacttacaatgaac

SEQ ID NO: 1989586 - DNA, 25 bp, Homo sapien
tagagctgctcgttcctgattgccg

SEQ ID NO: 1989587 - DNA, 25 bp, Homo sapien
ctgagctctccactcacaaggagga

SEQ ID NO: 1989588 - DNA, 25 bp, Homo sapien
ttctggttagtctcttgttcccaac

SEQ ID NO: 1989589 - DNA, 25 bp, Homo sapien
gtttctggttagtctcttgttccca

SEQ ID NO: 1989590 - DNA, 25 bp, Homo sapien
tgtttctggttagtctcttgttccc

SEQ ID NO: 1989591 - DNA, 25 bp, Homo sapien
atgtttctggttagtctcttgttcc

SEQ ID NO: 1989592 - DNA, 25 bp, Homo sapien
gaatagatgtagatgatatagattc

SEQ ID NO: 1989593 - DNA, 25 bp, Homo sapien
tagatgtagatgatatagattccat

SEQ ID NO: 1989594 - DNA, 25 bp, Homo sapien
ccataaagtcctgttcgctctcagc

SEQ ID NO: 1989595 - DNA, 25 bp, Homo sapien
tgaaagaatagatgtagatgatata

SEQ ID NO: 1989596 - DNA, 25 bp, Homo sapien
gttctctcctagattctctcgtagc

SEQ ID NO: 1989597 - DNA, 25 bp, Homo sapien
aagttctctcctagattctctcgta

SEQ ID NO: 1989598 - DNA, 25 bp, Homo sapien
tctctcctagattctctcgtagcat

SEQ ID NO: 1989599 - DNA, 25 bp, Homo sapien
ctgtaccaggaaaaagttctctcct

SEQ ID NO: 1989600 - DNA, 25 bp, Homo sapien
ggctgctgtccatttggctttattt

SEQ ID NO: 1989601 - DNA, 25 bp, Homo sapien
tttggctttatttcccatagtctga

SEQ ID NO: 1989602 - DNA, 25 bp, Homo sapien
ggctttatttcccatagtctgatca

SEQ ID NO: 1989603 - DNA, 25 bp, Homo sapien
ctttatttcccatagtctgatcact

SEQ ID NO: 1989604 - DNA, 25 bp, Homo sapien
taagatttacatggagtgtagcctc

SEQ ID NO: 1989605 - DNA, 25 bp, Homo sapien
cttgaccgtgtctctaatgtcatga

SEQ ID NO: 1989606 - DNA, 25 bp, Homo sapien
ctaatgtcatgacttgcagtaagat

SEQ ID NO: 1989607 - DNA, 25 bp, Homo sapien
tttgttcaactgtgataaacatgac

SEQ ID NO: 1989608 - DNA, 25 bp, Homo sapien
gagcccatctttgaactcggacgca

SEQ ID NO: 1989609 - DNA, 25 bp, Homo sapien
aactcggacgcataggaggagctca

SEQ ID NO: 1989610 - DNA, 25 bp, Homo sapien
aattaaggagcccatctttgaactc

SEQ ID NO: 1989611 - DNA, 25 bp, Homo sapien
catctttgaactcggacgcatagga

SEQ ID NO: 1989612 - DNA, 25 bp, Homo sapien
aacagcaacccgagctctcttttgc

SEQ ID NO: 1989613 - DNA, 25 bp, Homo sapien
gtagaaacagcaacccgagctctct

SEQ ID NO: 1989614 - DNA, 25 bp, Homo sapien
gacgtccaacatttgtccttgttcc

SEQ ID NO: 1989615 - DNA, 25 bp, Homo sapien
gaagtgagagggcagacgtccaaca

SEQ ID NO: 1989616 - DNA, 25 bp, Homo sapien
ggacgtcagcgggagaaaagccttg

SEQ ID NO: 1989617 - DNA, 25 bp, Homo sapien
tcgggtgaagcggacgcagatctca

SEQ ID NO: 1989618 - DNA, 25 bp, Homo sapien
cccagcactctgggtactggtggcg

SEQ ID NO: 1989619 - DNA, 25 bp, Homo sapien
tgccgcggcaactgtgatgtctgag

SEQ ID NO: 1989620 - DNA, 25 bp, Homo sapien
caatgatacatagattcacaagcat

SEQ ID NO: 1989621 - DNA, 25 bp, Homo sapien
tagttagctaacaatcattcaatga

SEQ ID NO: 1989622 - DNA, 25 bp, Homo sapien
tctttgccataggtgctagttagct

SEQ ID NO: 1989623 - DNA, 25 bp, Homo sapien
gcattttctctagttaaaggttatc

SEQ ID NO: 1989624 - DNA, 25 bp, Homo sapien
gaagagtggtaactacaggatgaaa

SEQ ID NO: 1989625 - DNA, 25 bp, Homo sapien
agcaacattgctgagcccgaaggac

SEQ ID NO: 1989626 - DNA, 25 bp, Homo sapien
cccaatggaatgctagtcagccata

SEQ ID NO: 1989627 - DNA, 25 bp, Homo sapien
gatatgatatcatcctaagtgtcga

SEQ ID NO: 1989628 - DNA, 25 bp, Homo sapien
agctgcttgaggtttgagggttcac

SEQ ID NO: 1989629 - DNA, 25 bp, Homo sapien
gtaagagatgctttgctcctgatgt

SEQ ID NO: 1989630 - DNA, 25 bp, Homo sapien
tcacggctggctttgctgtcagtaa

SEQ ID NO: 1989631 - DNA, 25 bp, Homo sapien
cctgatgttgcagtaatccactgct

SEQ ID NO: 1989632 - DNA, 25 bp, Homo sapien
taggtccctctaactgtcagatagc

SEQ ID NO: 1989633 - DNA, 25 bp, Homo sapien
tagcttcacgtggatattggtacaa

SEQ ID NO: 1989634 - DNA, 25 bp, Homo sapien
gatttgactacacccactatatgtg

SEQ ID NO: 1989635 - DNA, 25 bp, Homo sapien
tctcctttagcatgtggcactacta

SEQ ID NO: 1989636 - DNA, 25 bp, Homo sapien
tacgtgcctgtcaagaccacggtga

SEQ ID NO: 1989637 - DNA, 25 bp, Homo sapien
ttctgggtcaaatcgaagggcttcc

SEQ ID NO: 1989638 - DNA, 25 bp, Homo sapien
gaacggatcgtccagctcctcaatg

SEQ ID NO: 1989639 - DNA, 25 bp, Homo sapien
gagctccacggacaacgccaaattt

SEQ ID NO: 1989640 - DNA, 25 bp, Homo sapien
tagggaccaccccaattcaatattg

SEQ ID NO: 1989641 - DNA, 25 bp, Homo sapien
taatttctgggacttaactcgtaga

SEQ ID NO: 1989642 - DNA, 25 bp, Homo sapien
tatcctgtagaactatggccaaatc

SEQ ID NO: 1989643 - DNA, 25 bp, Homo sapien
tcgtagaatctacatacagggctgg

SEQ ID NO: 1989644 - DNA, 25 bp, Homo sapien
tcagcagaaaccagaggagtcctgt

SEQ ID NO: 1989645 - DNA, 25 bp, Homo sapien
cagcagaaaccagaggagtcctgtc

SEQ ID NO: 1989646 - DNA, 25 bp, Homo sapien
agcagaaaccagaggagtcctgtct

SEQ ID NO: 1989647 - DNA, 25 bp, Homo sapien
gaactgcaaactgtgaccaagcaag

SEQ ID NO: 1989648 - DNA, 25 bp, Homo sapien
caaaggttttcaagcatctgtatcc

SEQ ID NO: 1989649 - DNA, 25 bp, Homo sapien
tgaaacctcccgtgtgaactgcaaa

SEQ ID NO: 1989650 - DNA, 25 bp, Homo sapien
ggaactcatatttggctactcagag

SEQ ID NO: 1989651 - DNA, 25 bp, Homo sapien
cagccgccgcgcgaggaggatggga

SEQ ID NO: 1989652 - DNA, 25 bp, Homo sapien
ccgccgcgcgaggaggatgggaact

SEQ ID NO: 1989653 - DNA, 25 bp, Homo sapien
aggatgggaactcccctatttccag

SEQ ID NO: 1989654 - DNA, 25 bp, Homo sapien
gagtagaataaagaggagcggccgc

SEQ ID NO: 1989655 - DNA, 25 bp, Homo sapien
actggtcgggccgttttcctggcag

SEQ ID NO: 1989656 - DNA, 25 bp, Homo sapien
aaggtgggctcggacgcagcccagg

SEQ ID NO: 1989657 - DNA, 25 bp, Homo sapien
gcggtgggcgcaaacatcccgcttt

SEQ ID NO: 1989658 - DNA, 25 bp, Homo sapien
atttagtctgggagacgacgacgag

SEQ ID NO: 1989659 - DNA, 25 bp, Homo sapien
cactgcccccgggatccctaaatgg

SEQ ID NO: 1989660 - DNA, 25 bp, Homo sapien
gacgtcagcgcccagccgtctccac

SEQ ID NO: 1989661 - DNA, 25 bp, Homo sapien
aatgggacaattctgcccgtgacgt

SEQ ID NO: 1989662 - DNA, 25 bp, Homo sapien
cgggcccgctgctacctccttctgc

SEQ ID NO: 1989663 - DNA, 25 bp, Homo sapien
tccatggaaaccctgctggagtcgt

SEQ ID NO: 1989664 - DNA, 25 bp, Homo sapien
ctgtttttaggctagacccagagga

SEQ ID NO: 1989665 - DNA, 25 bp, Homo sapien
catggaaaccctgctggagtcgtcc

SEQ ID NO: 1989666 - DNA, 25 bp, Homo sapien
tagacccagaggaatctccatggaa

SEQ ID NO: 1989667 - DNA, 25 bp, Homo sapien
ctccaataagcagtaattaggtcct

SEQ ID NO: 1989668 - DNA, 25 bp, Homo sapien
ttcacccgggactcaagagggatgg

SEQ ID NO: 1989669 - DNA, 25 bp, Homo sapien
ttaggtcctgagctaatggtgtcag

SEQ ID NO: 1989670 - DNA, 25 bp, Homo sapien
tcttgcaagttaatgagaattcacc

SEQ ID NO: 1989671 - DNA, 25 bp, Homo sapien
tcaaattgtaggttgccagtcattc

SEQ ID NO: 1989672 - DNA, 25 bp, Homo sapien
catgtcaatgtaaagtgtatggctt

SEQ ID NO: 1989673 - DNA, 25 bp, Homo sapien
taaggtaaaaggagcagtgtagtca

SEQ ID NO: 1989674 - DNA, 25 bp, Homo sapien
tatggcttactacaagacagggcta

SEQ ID NO: 1989675 - DNA, 25 bp, Homo sapien
gaccgatcagcattaggattattac

SEQ ID NO: 1989676 - DNA, 25 bp, Homo sapien
ccttgggtgaagaccgatcagcatt

SEQ ID NO: 1989677 - DNA, 25 bp, Homo sapien
agggctgggttcacataaatatatg

SEQ ID NO: 1989678 - DNA, 25 bp, Homo sapien
ggattattactaaagaagagcaggg

SEQ ID NO: 1989679 - DNA, 25 bp, Homo sapien
cactaatactaccttctgcttgatc

SEQ ID NO: 1989680 - DNA, 25 bp, Homo sapien
tgatcaattctgctgatgggagact

SEQ ID NO: 1989681 - DNA, 25 bp, Homo sapien
gctgatgggagactctgattcattc

SEQ ID NO: 1989682 - DNA, 25 bp, Homo sapien
tcaagctcactaatactaccttctg

SEQ ID NO: 1989683 - DNA, 25 bp, Homo sapien
cttctaactgggcaaatatagatgc

SEQ ID NO: 1989684 - DNA, 25 bp, Homo sapien
gggcaaatatagatgctgtccagtt

SEQ ID NO: 1989685 - DNA, 25 bp, Homo sapien
ggtgaacagcgatttttctttgaaa

SEQ ID NO: 1989686 - DNA, 25 bp, Homo sapien
agtttggtgaacagcgatttttctt

SEQ ID NO: 1989687 - DNA, 25 bp, Homo sapien
ctctagtgactatcaggatgaggcc

SEQ ID NO: 1989688 - DNA, 25 bp, Homo sapien
tcctgtagtggtgaagaaatttacc

SEQ ID NO: 1989689 - DNA, 25 bp, Homo sapien
ggccataaaccccatgaatttctaa

SEQ ID NO: 1989690 - DNA, 25 bp, Homo sapien
aactctagctcctgtcatgtttgga

SEQ ID NO: 1989691 - DNA, 25 bp, Homo sapien
ccagcttcctgaccaacagcttgct

SEQ ID NO: 1989692 - DNA, 25 bp, Homo sapien
cccagcttcctgaccaacagcttgc

SEQ ID NO: 1989693 - DNA, 25 bp, Homo sapien
gcttcctgaccaacagcttgctcac

SEQ ID NO: 1989694 - DNA, 25 bp, Homo sapien
agcttcctgaccaacagcttgctca

SEQ ID NO: 1989695 - DNA, 25 bp, Homo sapien
actggtttaatgatactcccagagc

SEQ ID NO: 1989696 - DNA, 25 bp, Homo sapien
gtttaatgatactcccagagctttc

SEQ ID NO: 1989697 - DNA, 25 bp, Homo sapien
gtggccaccgttcccctcttgtcca

SEQ ID NO: 1989698 - DNA, 25 bp, Homo sapien
cttgtggccaccgttcccctcttgt

SEQ ID NO: 1989699 - DNA, 25 bp, Homo sapien
tgaagaccaggtggaacctgtccgg

SEQ ID NO: 1989700 - DNA, 25 bp, Homo sapien
ctggacccaagagtgaagaccaggt

SEQ ID NO: 1989701 - DNA, 25 bp, Homo sapien
gagtgaagaccaggtggaacctgtc

SEQ ID NO: 1989702 - DNA, 25 bp, Homo sapien
ccaagagtgaagaccaggtggaacc

SEQ ID NO: 1989703 - DNA, 25 bp, Homo sapien
ttttggttcatgcagttggagccac

SEQ ID NO: 1989704 - DNA, 25 bp, Homo sapien
tattttggttcatgcagttggagcc

SEQ ID NO: 1989705 - DNA, 25 bp, Homo sapien
attttggttcatgcagttggagcca

SEQ ID NO: 1989706 - DNA, 25 bp, Homo sapien
ttattttggttcatgcagttggagc

SEQ ID NO: 1989707 - DNA, 25 bp, Homo sapien
ctgcgtcattctccctctggaaaac

SEQ ID NO: 1989708 - DNA, 25 bp, Homo sapien
tctgcgtcattctccctctggaaaa

SEQ ID NO: 1989709 - DNA, 25 bp, Homo sapien
ccacatggtggcgctctggttgtgc

SEQ ID NO: 1989710 - DNA, 25 bp, Homo sapien
ttactgcaggcctgtaaataagaag

SEQ ID NO: 1989711 - DNA, 25 bp, Homo sapien
cttgaggggtacaactgggtaattg

SEQ ID NO: 1989712 - DNA, 25 bp, Homo sapien
gattactgcaggcctgtaaataaga

SEQ ID NO: 1989713 - DNA, 25 bp, Homo sapien
tgaaggcacctgcagtagggattac

SEQ ID NO: 1989714 - DNA, 25 bp, Homo sapien
tacaagccatctggggcttaagatg

SEQ ID NO: 1989715 - DNA, 25 bp, Homo sapien
ccatctggggcttaagatgacccat

SEQ ID NO: 1989716 - DNA, 25 bp, Homo sapien
cttacaagccatctggggcttaaga

SEQ ID NO: 1989717 - DNA, 25 bp, Homo sapien
agccatctggggcttaagatgaccc

SEQ ID NO: 1989718 - DNA, 25 bp, Homo sapien
gtttactggggattcatcctcaggg

SEQ ID NO: 1989719 - DNA, 25 bp, Homo sapien
aggcactctttcagtaaaaccagtc

SEQ ID NO: 1989720 - DNA, 25 bp, Homo sapien
gggcttgaggcactctttcagtaaa

SEQ ID NO: 1989721 - DNA, 25 bp, Homo sapien
ggattggatcttgtttactggggat

SEQ ID NO: 1989722 - DNA, 25 bp, Homo sapien
ttggattataaccagggtcccacac

SEQ ID NO: 1989723 - DNA, 25 bp, Homo sapien
tttggattataaccagggtcccaca

SEQ ID NO: 1989724 - DNA, 25 bp, Homo sapien
acactggcagcaagatggaaaacat

SEQ ID NO: 1989725 - DNA, 25 bp, Homo sapien
gggtcccacactggcagcaagatgg

SEQ ID NO: 1989726 - DNA, 25 bp, Homo sapien
gtgccccaaatcatctgcctccatc

SEQ ID NO: 1989727 - DNA, 25 bp, Homo sapien
agtgccccaaatcatctgcctccat

SEQ ID NO: 1989728 - DNA, 25 bp, Homo sapien
ggagcagctttttctactccctgaa

SEQ ID NO: 1989729 - DNA, 25 bp, Homo sapien
agattttagcatttcagggactttc

SEQ ID NO: 1989730 - DNA, 25 bp, Homo sapien
tctccaaaggtggtctcttctttcc

SEQ ID NO: 1989731 - DNA, 25 bp, Homo sapien
gagtgatctaaagttggcaaagcca

SEQ ID NO: 1989732 - DNA, 25 bp, Homo sapien
tctttcctcttaaacaaagagtgag

SEQ ID NO: 1989733 - DNA, 25 bp, Homo sapien
cttggactccttattttccaggatc

SEQ ID NO: 1989734 - DNA, 25 bp, Homo sapien
tctcttggactccttattttccagg

SEQ ID NO: 1989735 - DNA, 25 bp, Homo sapien
tcttggactccttattttccaggat

SEQ ID NO: 1989736 - DNA, 25 bp, Homo sapien
ctcttggactccttattttccagga

SEQ ID NO: 1989737 - DNA, 25 bp, Homo sapien
ctggcagtttatgtttatgatatcc

SEQ ID NO: 1989738 - DNA, 25 bp, Homo sapien
acttcaggccaaaattccatgggac

SEQ ID NO: 1989739 - DNA, 25 bp, Homo sapien
ttcaggccaaaattccatgggacac

SEQ ID NO: 1989740 - DNA, 25 bp, Homo sapien
tcaggccaaaattccatgggacact

SEQ ID NO: 1989741 - DNA, 25 bp, Homo sapien
cttcaggccaaaattccatgggaca

SEQ ID NO: 1989742 - DNA, 25 bp, Homo sapien
tctcttataagggccattttttgct

SEQ ID NO: 1989743 - DNA, 25 bp, Homo sapien
tctccctacacctgccgtcgttctg

SEQ ID NO: 1989744 - DNA, 25 bp, Homo sapien
cctacacctgccgtcgttctggctt

SEQ ID NO: 1989745 - DNA, 25 bp, Homo sapien
tacacctgccgtcgttctggctttc

SEQ ID NO: 1989746 - DNA, 25 bp, Homo sapien
tgaacccaatgtatgtctgcatgct

SEQ ID NO: 1989747 - DNA, 25 bp, Homo sapien
tactaccaaactgaacaattacctg

SEQ ID NO: 1989748 - DNA, 25 bp, Homo sapien
ggaatctgctgaagattacatggag

SEQ ID NO: 1989749 - DNA, 25 bp, Homo sapien
ttacctgagcagatttggacccttc

SEQ ID NO: 1989750 - DNA, 25 bp, Homo sapien
tttgagcctggagtaggagccgctt

SEQ ID NO: 1989751 - DNA, 25 bp, Homo sapien
tccgctgccagagttgtgggtcatg

SEQ ID NO: 1989752 - DNA, 25 bp, Homo sapien
aatggacgggcgcttcagtcactga

SEQ ID NO: 1989753 - DNA, 25 bp, Homo sapien
tgactcgccaaactcttagaaggtg

SEQ ID NO: 1989754 - DNA, 25 bp, Homo sapien
cttctcacgtgtcattcctgcacaa

SEQ ID NO: 1989755 - DNA, 25 bp, Homo sapien
tgtcattcctgcacaaatatgtggc

SEQ ID NO: 1989756 - DNA, 25 bp, Homo sapien
tcattcctgcacaaatatgtggctt

SEQ ID NO: 1989757 - DNA, 25 bp, Homo sapien
cacgtgtcattcctgcacaaatatg

SEQ ID NO: 1989758 - DNA, 25 bp, Homo sapien
cagaatgacgctcagtatacagtac

SEQ ID NO: 1989759 - DNA, 25 bp, Homo sapien
tctcagggactgtgtgataaatcaa

SEQ ID NO: 1989760 - DNA, 25 bp, Homo sapien
gagataatgatatgcaagcctcaca

SEQ ID NO: 1989761 - DNA, 25 bp, Homo sapien
cagcagtaagattctgagccaggta

SEQ ID NO: 1989762 - DNA, 25 bp, Homo sapien
tggaacaattcctgaatcaacttaa

SEQ ID NO: 1989763 - DNA, 25 bp, Homo sapien
gaaatattaggagtaattctacaca

SEQ ID NO: 1989764 - DNA, 25 bp, Homo sapien
gatagcactaaagaccatgcagaca

SEQ ID NO: 1989765 - DNA, 25 bp, Homo sapien
ggaatgaaacatgggatagcactaa

SEQ ID NO: 1989766 - DNA, 25 bp, Homo sapien
gcctgtggtccatgaatcctacaat

SEQ ID NO: 1989767 - DNA, 25 bp, Homo sapien
tgtggtccatgaatcctacaatgat

SEQ ID NO: 1989768 - DNA, 25 bp, Homo sapien
tggtccatgaatcctacaatgatgg

SEQ ID NO: 1989769 - DNA, 25 bp, Homo sapien
ccatgaatcctacaatgatggactg

SEQ ID NO: 1989770 - DNA, 25 bp, Homo sapien
cacatttctggttgttaccgtcagc

SEQ ID NO: 1989771 - DNA, 25 bp, Homo sapien
gaatgccttactcatgctgatccta

SEQ ID NO: 1989772 - DNA, 25 bp, Homo sapien
tcagtctctataagcttaatgtggc

SEQ ID NO: 1989773 - DNA, 25 bp, Homo sapien
cacacaaggccatttaagtgggaaa

SEQ ID NO: 1989774 - DNA, 25 bp, Homo sapien
gacagcatttgttggttacgagaaa

SEQ ID NO: 1989775 - DNA, 25 bp, Homo sapien
ggatgccccacaatacaatcgaata

SEQ ID NO: 1989776 - DNA, 25 bp, Homo sapien
atttattacagcgatcaggatgccc

SEQ ID NO: 1989777 - DNA, 25 bp, Homo sapien
tccacaagcacgtcatgatcctaag

SEQ ID NO: 1989778 - DNA, 25 bp, Homo sapien
ttgataatgaaatagtgagtctact

SEQ ID NO: 1989779 - DNA, 25 bp, Homo sapien
taatgaaatagtgagtctacttttg

SEQ ID NO: 1989780 - DNA, 25 bp, Homo sapien
ccccactctctgcattttgataatg

SEQ ID NO: 1989781 - DNA, 25 bp, Homo sapien
cactctctgcattttgataatgaaa

SEQ ID NO: 1989782 - DNA, 25 bp, Homo sapien
taaaatttcactgattctacgaacc

SEQ ID NO: 1989783 - DNA, 25 bp, Homo sapien
gtgtgctgtcttactcctggaccat

SEQ ID NO: 1989784 - DNA, 25 bp, Homo sapien
tgcattaagagatcagtgtgctgtc

SEQ ID NO: 1989785 - DNA, 25 bp, Homo sapien
taggaagatcattcctacccaaaga

SEQ ID NO: 1989786 - DNA, 25 bp, Homo sapien
cagtgcctttaaagtcccattgtgt

SEQ ID NO: 1989787 - DNA, 25 bp, Homo sapien
ttggttgtccagcacatcatgtctg

SEQ ID NO: 1989788 - DNA, 25 bp, Homo sapien
tagactgtcataaagggtaaccttg

SEQ ID NO: 1989789 - DNA, 25 bp, Homo sapien
cccattgtgttctcaccgctgaaga

SEQ ID NO: 1989790 - DNA, 25 bp, Homo sapien
ggcctttgtcagaagtgggttacta

SEQ ID NO: 1989791 - DNA, 25 bp, Homo sapien
gagattcaattctggaagctaggaa

SEQ ID NO: 1989792 - DNA, 25 bp, Homo sapien
ctgggaggcatgctaagtgaaacac

SEQ ID NO: 1989793 - DNA, 25 bp, Homo sapien
ccacaggagggaatggatcaccaca

SEQ ID NO: 1989794 - DNA, 25 bp, Homo sapien
aggtaccacagattagaatactgag

SEQ ID NO: 1989795 - DNA, 25 bp, Homo sapien
gccttaacacactttcaacagttgc

SEQ ID NO: 1989796 - DNA, 25 bp, Homo sapien
ctttcaacagttgcaagtggacagg

SEQ ID NO: 1989797 - DNA, 25 bp, Homo sapien
tgcaagtggacaggtaccacagatt

SEQ ID NO: 1989798 - DNA, 25 bp, Homo sapien
gagtttcccgctcaaaaggcgttga

SEQ ID NO: 1989799 - DNA, 25 bp, Homo sapien
tatgtcatccccaaaaagctatgag

SEQ ID NO: 1989800 - DNA, 25 bp, Homo sapien
gagttagaagaaataccagtgtccc

SEQ ID NO: 1989801 - DNA, 25 bp, Homo sapien
tcactcgttagagggccttgctgct

SEQ ID NO: 1989802 - DNA, 25 bp, Homo sapien
aaatcagttttactcgtctatacaa

SEQ ID NO: 1989803 - DNA, 25 bp, Homo sapien
tttactcgtctatacaaactttctg

SEQ ID NO: 1989804 - DNA, 25 bp, Homo sapien
cgtctatacaaactttctggatcat

SEQ ID NO: 1989805 - DNA, 25 bp, Homo sapien
tactcgtctatacaaactttctgga

SEQ ID NO: 1989806 - DNA, 25 bp, Homo sapien
ccatgtgtatgaagaacctggtcac

SEQ ID NO: 1989807 - DNA, 25 bp, Homo sapien
caggccttagctgatctgtgagaca

SEQ ID NO: 1989808 - DNA, 25 bp, Homo sapien
tattagcaccgttctgtggatggca

SEQ ID NO: 1989809 - DNA, 25 bp, Homo sapien
taagggattaggacaggcagtattc

SEQ ID NO: 1989810 - DNA, 25 bp, Homo sapien
gaaaaagaatgttctctgattggca

SEQ ID NO: 1989811 - DNA, 25 bp, Homo sapien
agagctatgagtatgaaatccagcc

SEQ ID NO: 1989812 - DNA, 25 bp, Homo sapien
ccagaacatatgtgaattctaagca

SEQ ID NO: 1989813 - DNA, 25 bp, Homo sapien
cctagaacatgcacaccatgatctc

SEQ ID NO: 1989814 - DNA, 25 bp, Homo sapien
aaattctagggagagctatgagtat

SEQ ID NO: 1989815 - DNA, 25 bp, Homo sapien
tagggacaaataatactgcacagcc

SEQ ID NO: 1989816 - DNA, 25 bp, Homo sapien
aatgtcttagtactggatataggcc

SEQ ID NO: 1989817 - DNA, 25 bp, Homo sapien
gagtcaaaatcaacttctgagagtg

SEQ ID NO: 1989818 - DNA, 25 bp, Homo sapien
cagagagaatggaaagcacgggatt

SEQ ID NO: 1989819 - DNA, 25 bp, Homo sapien
cattgtgctatttaacattctggac

SEQ ID NO: 1989820 - DNA, 25 bp, Homo sapien
gctttctttgtagcaccacactgtg

SEQ ID NO: 1989821 - DNA, 25 bp, Homo sapien
gttgtgcctcattgacattttccca

SEQ ID NO: 1989822 - DNA, 25 bp, Homo sapien
aatatgtcagttttcccactctatg

SEQ ID NO: 1989823 - DNA, 25 bp, Homo sapien
tcaccttgttctgttacgttagtta

SEQ ID NO: 1989824 - DNA, 25 bp, Homo sapien
tcagtacttggtacttcaccttgtt

SEQ ID NO: 1989825 - DNA, 25 bp, Homo sapien
tgttacgttagttatggagacagct

SEQ ID NO: 1989826 - DNA, 25 bp, Homo sapien
gttctgttacgttagttatggagac

SEQ ID NO: 1989827 - DNA, 25 bp, Homo sapien
tgcaagtacttccagcacttcctct

SEQ ID NO: 1989828 - DNA, 25 bp, Homo sapien
tctgcaagtacttccagcacttcct

SEQ ID NO: 1989829 - DNA, 25 bp, Homo sapien
cttctgcaagtacttccagcacttc

SEQ ID NO: 1989830 - DNA, 25 bp, Homo sapien
ctgctgcttctgcaagtacttccag

SEQ ID NO: 1989831 - DNA, 25 bp, Homo sapien
aatgaccagtttgtaactctcaaag

SEQ ID NO: 1989832 - DNA, 25 bp, Homo sapien
tgcctcttctcaggtattaaaggtg

SEQ ID NO: 1989833 - DNA, 25 bp, Homo sapien
tggttgctggcaacctgttgcgtct

SEQ ID NO: 1989834 - DNA, 25 bp, Homo sapien
caggtattaaaggtgtaatgaccag

SEQ ID NO: 1989835 - DNA, 25 bp, Homo sapien
cacacctttggtcagtgagcttatc

SEQ ID NO: 1989836 - DNA, 25 bp, Homo sapien
cccagctggtaatgtgactccagga

SEQ ID NO: 1989837 - DNA, 25 bp, Homo sapien
ggagcagaccctaaagccttacaaa

SEQ ID NO: 1989838 - DNA, 25 bp, Homo sapien
gactccaggagcatgtgagtccaca

SEQ ID NO: 1989839 - DNA, 25 bp, Homo sapien
ggtcctgcactctaacgctcagagg

SEQ ID NO: 1989840 - DNA, 25 bp, Homo sapien
taatagtatctgagagccaaacgga

SEQ ID NO: 1989841 - DNA, 25 bp, Homo sapien
atttgagtgacccagctaattggcc

SEQ ID NO: 1989842 - DNA, 25 bp, Homo sapien
ggagagtatccttgtaacacttaca

SEQ ID NO: 1989843 - DNA, 25 bp, Homo sapien
ttgtgcaatagcagccgttttgcag

SEQ ID NO: 1989844 - DNA, 25 bp, Homo sapien
gccgttttgcagatatatcaatccc

SEQ ID NO: 1989845 - DNA, 25 bp, Homo sapien
tatcaatcccaagatcataatcttc

SEQ ID NO: 1989846 - DNA, 25 bp, Homo sapien
tgcagatatatcaatcccaagatca

SEQ ID NO: 1989847 - DNA, 25 bp, Homo sapien
ctacaaccacatacaaactgaagtc

SEQ ID NO: 1989848 - DNA, 25 bp, Homo sapien
cacagcttggaatttgaaggcaaac

SEQ ID NO: 1989849 - DNA, 25 bp, Homo sapien
ggtggctatgtgacaggaaaaagca

SEQ ID NO: 1989850 - DNA, 25 bp, Homo sapien
tcctatgctttggatcacgtatagc

SEQ ID NO: 1989851 - DNA, 25 bp, Homo sapien
tgagtaaatgcatagtacggagctg

SEQ ID NO: 1989852 - DNA, 25 bp, Homo sapien
caagtattttagatgtgtaatctgt

SEQ ID NO: 1989853 - DNA, 25 bp, Homo sapien
aaacatactattcacccatcaggtt

SEQ ID NO: 1989854 - DNA, 25 bp, Homo sapien
tatgtaaatcttggaatcctgcagg

SEQ ID NO: 1989855 - DNA, 25 bp, Homo sapien
cttgtgaacttgcaccatattaaaa

SEQ ID NO: 1989856 - DNA, 25 bp, Homo sapien
ccttgtgaacttgcaccatattaaa

SEQ ID NO: 1989857 - DNA, 25 bp, Homo sapien
tattctttgaaatggcagttgatta

SEQ ID NO: 1989858 - DNA, 25 bp, Homo sapien
gaaatggcagttgattatggcactt

SEQ ID NO: 1989859 - DNA, 25 bp, Homo sapien
cttcccaagcacttcatccaaggat

SEQ ID NO: 1989860 - DNA, 25 bp, Homo sapien
catccaaggattggtaaatcctatt

SEQ ID NO: 1989861 - DNA, 25 bp, Homo sapien
tgttttgtgatcaccaacacttcct

SEQ ID NO: 1989862 - DNA, 25 bp, Homo sapien
ctgttttgtgatcaccaacacttcc

SEQ ID NO: 1989863 - DNA, 25 bp, Homo sapien
cctgttttgtgatcaccaacacttc

SEQ ID NO: 1989864 - DNA, 25 bp, Homo sapien
gaaatgcctgatgtactctaaaagc

SEQ ID NO: 1989865 - DNA, 25 bp, Homo sapien
agatgtaggagtgacagagtgactc

SEQ ID NO: 1989866 - DNA, 25 bp, Homo sapien
ggagaaatgcctgatgtactctaaa

SEQ ID NO: 1989867 - DNA, 25 bp, Homo sapien
agtgaccaagatgagatgtaggagt

SEQ ID NO: 1989868 - DNA, 25 bp, Homo sapien
cacctcatcatgtggtccgttacca

SEQ ID NO: 1989869 - DNA, 25 bp, Homo sapien
ttcattcttccccttgtgctcaaca

SEQ ID NO: 1989870 - DNA, 25 bp, Homo sapien
tcctctgaagtactacatatgctga

SEQ ID NO: 1989871 - DNA, 25 bp, Homo sapien
aaactatagtatttgaccttacaca

SEQ ID NO: 1989872 - DNA, 25 bp, Homo sapien
ccttttctatcataagttctatatt

SEQ ID NO: 1989873 - DNA, 25 bp, Homo sapien
ctttcactactttcatagatccata

SEQ ID NO: 1989874 - DNA, 25 bp, Homo sapien
ccatattttatactggaattgccaa

SEQ ID NO: 1989875 - DNA, 25 bp, Homo sapien
ttgtctttgaggtcatccttttcta

SEQ ID NO: 1989876 - DNA, 25 bp, Homo sapien
tttatgaccaagaccatactccacc

SEQ ID NO: 1989877 - DNA, 25 bp, Homo sapien
ttatgaccaagaccatactccacct

SEQ ID NO: 1989878 - DNA, 25 bp, Homo sapien
tatgaccaagaccatactccacctc

SEQ ID NO: 1989879 - DNA, 25 bp, Homo sapien
gtcacacactcagacgtcctgttct

SEQ ID NO: 1989880 - DNA, 25 bp, Homo sapien
acacactcagacgtcctgttctctt

SEQ ID NO: 1989881 - DNA, 25 bp, Homo sapien
ttcctcagagcggggttctgaagga

SEQ ID NO: 1989882 - DNA, 25 bp, Homo sapien
tcagtcacacactcagacgtcctgt

SEQ ID NO: 1989883 - DNA, 25 bp, Homo sapien
tcacgcgctgtcctctatcagacat

SEQ ID NO: 1989884 - DNA, 25 bp, Homo sapien
gtcacgcgctgtcctctatcagaca

SEQ ID NO: 1989885 - DNA, 25 bp, Homo sapien
cgtcacgcgctgtcctctatcagac

SEQ ID NO: 1989886 - DNA, 25 bp, Homo sapien
acgcgctgtcctctatcagacatcc

SEQ ID NO: 1989887 - DNA, 25 bp, Homo sapien
caaaactcttgggattgggagatcc

SEQ ID NO: 1989888 - DNA, 25 bp, Homo sapien
caaaaggactaataagcagaaggct

SEQ ID NO: 1989889 - DNA, 25 bp, Homo sapien
caatcatgcttgtgatgtgccagta

SEQ ID NO: 1989890 - DNA, 25 bp, Homo sapien
gaaggctaagtgtcccagagtgaac

SEQ ID NO: 1989891 - DNA, 25 bp, Homo sapien
gtgtgctttctgaggagtctagctc

SEQ ID NO: 1989892 - DNA, 25 bp, Homo sapien
ctgaggagtctagctctggatgata

SEQ ID NO: 1989893 - DNA, 25 bp, Homo sapien
gtctagctctggatgatattctcca

SEQ ID NO: 1989894 - DNA, 25 bp, Homo sapien
ggagtctagctctggatgatattct

SEQ ID NO: 1989895 - DNA, 25 bp, Homo sapien
cagtgaagaggtggcaattttgatt

SEQ ID NO: 1989896 - DNA, 25 bp, Homo sapien
gtgaagaggtggcaattttgattcg

SEQ ID NO: 1989897 - DNA, 25 bp, Homo sapien
gcttgagataaacacagtgaagagg

SEQ ID NO: 1989898 - DNA, 25 bp, Homo sapien
ctgcttgagataaacacagtgaaga

SEQ ID NO: 1989899 - DNA, 25 bp, Homo sapien
caaaggctaaggtggaacagtgaag

SEQ ID NO: 1989900 - DNA, 25 bp, Homo sapien
tgatgcgctcctcatgcactaggaa

SEQ ID NO: 1989901 - DNA, 25 bp, Homo sapien
cgctcctcatgcactaggaaccaga

SEQ ID NO: 1989902 - DNA, 25 bp, Homo sapien
gaagacagtgatgcgctcctcatgc

SEQ ID NO: 1989903 - DNA, 25 bp, Homo sapien
tgtcttctttctgccatggtatttc

SEQ ID NO: 1989904 - DNA, 25 bp, Homo sapien
tcctcttttcccactatcttcaatc

SEQ ID NO: 1989905 - DNA, 25 bp, Homo sapien
tcatctctgcaaacagctgtcttct

SEQ ID NO: 1989906 - DNA, 25 bp, Homo sapien
ctgcaaacagctgtcttctttctgc

SEQ ID NO: 1989907 - DNA, 25 bp, Homo sapien
tgttcattcaaacaaccaatcaacc

SEQ ID NO: 1989908 - DNA, 25 bp, Homo sapien
aaccaacaaatcaacgaaccagtct

SEQ ID NO: 1989909 - DNA, 25 bp, Homo sapien
tgtttacactgttatcaacagcagt

SEQ ID NO: 1989910 - DNA, 25 bp, Homo sapien
caacgaaccagtcttatctaacttt

SEQ ID NO: 1989911 - DNA, 25 bp, Homo sapien
ctcctcaagcctcttgtacccatgt

SEQ ID NO: 1989912 - DNA, 25 bp, Homo sapien
tctcctcaagcctcttgtacccatg

SEQ ID NO: 1989913 - DNA, 25 bp, Homo sapien
gtctcctcaagcctcttgtacccat

SEQ ID NO: 1989914 - DNA, 25 bp, Homo sapien
cgtctcctcaagcctcttgtaccca

SEQ ID NO: 1989915 - DNA, 25 bp, Homo sapien
tcatactaatacagtgggggatggc

SEQ ID NO: 1989916 - DNA, 25 bp, Homo sapien
taatggatagtggttgttttctgaa

SEQ ID NO: 1989917 - DNA, 25 bp, Homo sapien
ggaatataattcgttaaatctggtg

SEQ ID NO: 1989918 - DNA, 25 bp, Homo sapien
tggtgattcaactgatctaagtgat

SEQ ID NO: 1989919 - DNA, 25 bp, Homo sapien
gccttccaggatactactagacgcc

SEQ ID NO: 1989920 - DNA, 25 bp, Homo sapien
taactgtattgtgacccagtccaca

SEQ ID NO: 1989921 - DNA, 25 bp, Homo sapien
aggtccacaaacagagccttccagg

SEQ ID NO: 1989922 - DNA, 25 bp, Homo sapien
tagacgccttcctccaagttgatag

SEQ ID NO: 1989923 - DNA, 25 bp, Homo sapien
aaatacggcaaaggtgcacttctcc

SEQ ID NO: 1989924 - DNA, 25 bp, Homo sapien
gggaaatacggcaaaggtgcacttc

SEQ ID NO: 1989925 - DNA, 25 bp, Homo sapien
actgactgctctctcctgtcgtatc

SEQ ID NO: 1989926 - DNA, 25 bp, Homo sapien
tatcactgtgtggacttaactgacc

SEQ ID NO: 1989927 - DNA, 25 bp, Homo sapien
tgagcacagtaaccctggcacctct

SEQ ID NO: 1989928 - DNA, 25 bp, Homo sapien
tctgcactttcctctgattgaagtc

SEQ ID NO: 1989929 - DNA, 25 bp, Homo sapien
cctctgagcacagtaaccctggcac

SEQ ID NO: 1989930 - DNA, 25 bp, Homo sapien
ggcacctctgcactttcctctgatt

SEQ ID NO: 1989931 - DNA, 25 bp, Homo sapien
tctgaacaaacctaagcttgcatgc

SEQ ID NO: 1989932 - DNA, 25 bp, Homo sapien
taagcttgcatgctgttctgtaggt

SEQ ID NO: 1989933 - DNA, 25 bp, Homo sapien
taggtggagagtcggatgcgatcca

SEQ ID NO: 1989934 - DNA, 25 bp, Homo sapien
aaacctaagcttgcatgctgttctg

SEQ ID NO: 1989935 - DNA, 25 bp, Homo sapien
tgtggatgatgtggaacagacatct

SEQ ID NO: 1989936 - DNA, 25 bp, Homo sapien
ggagcatggactgggaacttgagca

SEQ ID NO: 1989937 - DNA, 25 bp, Homo sapien
ggatgatgtggaacagacatctggg

SEQ ID NO: 1989938 - DNA, 25 bp, Homo sapien
ctagttcctggttgtggatgatgtg

SEQ ID NO: 1989939 - DNA, 25 bp, Homo sapien
caggttgttcagagcattttcccgc

SEQ ID NO: 1989940 - DNA, 25 bp, Homo sapien
gagagcacagcctctaagcgggaca

SEQ ID NO: 1989941 - DNA, 25 bp, Homo sapien
ggcatccgtttgttgagctggtaaa

SEQ ID NO: 1989942 - DNA, 25 bp, Homo sapien
gatggactgctccacatggatttgg

SEQ ID NO: 1989943 - DNA, 25 bp, Homo sapien
agaggaacagacattcagagggtgc

SEQ ID NO: 1989944 - DNA, 25 bp, Homo sapien
gagaggaacagacattcagagggtg

SEQ ID NO: 1989945 - DNA, 25 bp, Homo sapien
gctgtgcgaaggtaagtctggctct

SEQ ID NO: 1989946 - DNA, 25 bp, Homo sapien
tgacttgccaacgagcagagagaaa

SEQ ID NO: 1989947 - DNA, 25 bp, Homo sapien
tacagtctgcagtaagcatcctggt

SEQ ID NO: 1989948 - DNA, 25 bp, Homo sapien
tacatcccagtaaaggaggcatcaa

SEQ ID NO: 1989949 - DNA, 25 bp, Homo sapien
acagaggagcggaaggctcctggca

SEQ ID NO: 1989950 - DNA, 25 bp, Homo sapien
cattaaaggtcctttgaagacttca

SEQ ID NO: 1989951 - DNA, 25 bp, Homo sapien
caagaggtgacagaagaagctgctg

SEQ ID NO: 1989952 - DNA, 25 bp, Homo sapien
tctcagcccctggtcttatttctga

SEQ ID NO: 1989953 - DNA, 25 bp, Homo sapien
aaccatcatttcctacccacaagcc

SEQ ID NO: 1989954 - DNA, 25 bp, Homo sapien
atttcctacccacaagccaactgtg

SEQ ID NO: 1989955 - DNA, 25 bp, Homo sapien
gccaactgtgcttatgtgatatatt

SEQ ID NO: 1989956 - DNA, 25 bp, Homo sapien
tacccacaagccaactgtgcttatg

SEQ ID NO: 1989957 - DNA, 25 bp, Homo sapien
aaatactgaaattttaccatggcct

SEQ ID NO: 1989958 - DNA, 25 bp, Homo sapien
tactgaaattttaccatggccttcc

SEQ ID NO: 1989959 - DNA, 25 bp, Homo sapien
tttgacagcaaatactgaaatttta

SEQ ID NO: 1989960 - DNA, 25 bp, Homo sapien
tgacagcaaatactgaaattttacc

SEQ ID NO: 1989961 - DNA, 25 bp, Homo sapien
ctccacacaatgtggctaaagccat

SEQ ID NO: 1989962 - DNA, 25 bp, Homo sapien
atcttccctccacacaatgtggcta

SEQ ID NO: 1989963 - DNA, 25 bp, Homo sapien
atcttaatttgtccatgatcttccc

SEQ ID NO: 1989964 - DNA, 25 bp, Homo sapien
cttaatttgtccatgatcttccctc

SEQ ID NO: 1989965 - DNA, 25 bp, Homo sapien
tggagtcagaaatcattgagaaaat

SEQ ID NO: 1989966 - DNA, 25 bp, Homo sapien
gagtcagaaatcattgagaaaatat

SEQ ID NO: 1989967 - DNA, 25 bp, Homo sapien
ctggagtcagaaatcattgagaaaa

SEQ ID NO: 1989968 - DNA, 25 bp, Homo sapien
ggagtcagaaatcattgagaaaata

SEQ ID NO: 1989969 - DNA, 25 bp, Homo sapien
tgaaggaccttcaaaaactgccgtg

SEQ ID NO: 1989970 - DNA, 25 bp, Homo sapien
aacttcccgaaggaattggtcatat

SEQ ID NO: 1989971 - DNA, 25 bp, Homo sapien
tgccgtgggtagtttgagaacttcc

SEQ ID NO: 1989972 - DNA, 25 bp, Homo sapien
ggtcatatcgtccataaaccatcac

SEQ ID NO: 1989973 - DNA, 25 bp, Homo sapien
gtgtgaaaagagactaacacagaag

SEQ ID NO: 1989974 - DNA, 25 bp, Homo sapien
aggcggaactgtgagtctgttaaac

SEQ ID NO: 1989975 - DNA, 25 bp, Homo sapien
aagtttcctgaggcggaactgtgag

SEQ ID NO: 1989976 - DNA, 25 bp, Homo sapien
agtgtgaaaagagactaacacagaa

SEQ ID NO: 1989977 - DNA, 25 bp, Homo sapien
tgtgtagtgagcatttgttgtatgc

SEQ ID NO: 1989978 - DNA, 25 bp, Homo sapien
tgtatgcattttatggggcagggat

SEQ ID NO: 1989979 - DNA, 25 bp, Homo sapien
tatgcattttatggggcagggatat

SEQ ID NO: 1989980 - DNA, 25 bp, Homo sapien
gtgtagtgagcatttgttgtatgca

SEQ ID NO: 1989981 - DNA, 25 bp, Homo sapien
tttccacatttgctagtcgatgcag

SEQ ID NO: 1989982 - DNA, 25 bp, Homo sapien
aggcaaccagaccagacactgcggg

SEQ ID NO: 1989983 - DNA, 25 bp, Homo sapien
ggaggatctgacataagcgtgtcca

SEQ ID NO: 1989984 - DNA, 25 bp, Homo sapien
tcgatgcagaagaggcaaccagacc

SEQ ID NO: 1989985 - DNA, 25 bp, Homo sapien
tgctatgagaaccaccggcatgtcc

SEQ ID NO: 1989986 - DNA, 25 bp, Homo sapien
ccatgacgtgtactctttcatttgg

SEQ ID NO: 1989987 - DNA, 25 bp, Homo sapien
tgacactgttggcatcggtagcgaa

SEQ ID NO: 1989988 - DNA, 25 bp, Homo sapien
catcggtagcgaaatcccatcatac

SEQ ID NO: 1989989 - DNA, 25 bp, Homo sapien
gaataagtaagagcacgcagtaggg

SEQ ID NO: 1989990 - DNA, 25 bp, Homo sapien
gactgaatactagacctgggatgga

SEQ ID NO: 1989991 - DNA, 25 bp, Homo sapien
aatctcaggaagctacactgggttc

SEQ ID NO: 1989992 - DNA, 25 bp, Homo sapien
gtaagtttgccctttaattctgcca

SEQ ID NO: 1989993 - DNA, 25 bp, Homo sapien
gtaagattatgttccagaaggtcct

SEQ ID NO: 1989994 - DNA, 25 bp, Homo sapien
aagattatgttccagaaggtccttg

SEQ ID NO: 1989995 - DNA, 25 bp, Homo sapien
tgtgaatgtaagattatgttccaga

SEQ ID NO: 1989996 - DNA, 25 bp, Homo sapien
gaatgtaagattatgttccagaagg

SEQ ID NO: 1989997 - DNA, 25 bp, Homo sapien
ggaaaagagtttccgaacaagctgc

SEQ ID NO: 1989998 - DNA, 25 bp, Homo sapien
gtctggaagtttgctcaatgctcgg

SEQ ID NO: 1989999 - DNA, 25 bp, Homo sapien
aagagtttccgaacaagctgcctcc

SEQ ID NO: 1990000 - DNA, 25 bp, Homo sapien
gctcaatgctcggaaaagagtttcc

SEQ ID NO: 1990001 - DNA, 25 bp, Homo sapien
gtgcaaaggttcacggctggaagca

SEQ ID NO: 1990002 - DNA, 25 bp, Homo sapien
ttaatgcattagtcagcttcttagc

SEQ ID NO: 1990003 - DNA, 25 bp, Homo sapien
aaaggttcacggctggaagcacagc

SEQ ID NO: 1990004 - DNA, 25 bp, Homo sapien
cagctcagggacttgcttaatgcat

SEQ ID NO: 1990005 - DNA, 25 bp, Homo sapien
cgatgtgagccaagttgagtggctt

SEQ ID NO: 1990006 - DNA, 25 bp, Homo sapien
gtgagccaagttgagtggcttctca

SEQ ID NO: 1990007 - DNA, 25 bp, Homo sapien
acgatgtgagccaagttgagtggct

SEQ ID NO: 1990008 - DNA, 25 bp, Homo sapien
tttagaatagttaaatgagcaatgc

SEQ ID NO: 1990009 - DNA, 25 bp, Homo sapien
catttcaatggccttgatgtgccta

SEQ ID NO: 1990010 - DNA, 25 bp, Homo sapien
tctactcatgacaatagcatttgaa

SEQ ID NO: 1990011 - DNA, 25 bp, Homo sapien
tgtaaatgattaaggcttaatacca

SEQ ID NO: 1990012 - DNA, 25 bp, Homo sapien
tgtgctataattcccaatgtccaga

SEQ ID NO: 1990013 - DNA, 25 bp, Homo sapien
tctatgggtgtaactgatgtggact

SEQ ID NO: 1990014 - DNA, 25 bp, Homo sapien
caatattgccaatgcttgcacccca

SEQ ID NO: 1990015 - DNA, 25 bp, Homo sapien
tcatcagtacaggacagaggatgcc

SEQ ID NO: 1990016 - DNA, 25 bp, Homo sapien
ttcacttaaacatgtacatcatgga

SEQ ID NO: 1990017 - DNA, 25 bp, Homo sapien
gttcaacatcaaattttatatccat

SEQ ID NO: 1990018 - DNA, 25 bp, Homo sapien
ctatgtaaggacatacagttatcct

SEQ ID NO: 1990019 - DNA, 25 bp, Homo sapien
tatatccatgagctctataatgttc

SEQ ID NO: 1990020 - DNA, 25 bp, Homo sapien
tatttgtatcttataatgcttttgc

SEQ ID NO: 1990021 - DNA, 25 bp, Homo sapien
aacttgttacatagtcagactgtgc

SEQ ID NO: 1990022 - DNA, 25 bp, Homo sapien
catttaagttgtggccaggtatggt

SEQ ID NO: 1990023 - DNA, 25 bp, Homo sapien
tttctaatgtattgataaagcattt

SEQ ID NO: 1990024 - DNA, 25 bp, Homo sapien
ggcagcgaagaattgaacagaatag

SEQ ID NO: 1990025 - DNA, 25 bp, Homo sapien
gaacagaatagagaccgttaatcat

SEQ ID NO: 1990026 - DNA, 25 bp, Homo sapien
cttttggcagcgaagaattgaacag

SEQ ID NO: 1990027 - DNA, 25 bp, Homo sapien
tgaacagaatagagaccgttaatca

SEQ ID NO: 1990028 - DNA, 25 bp, Homo sapien
cattgtagctttgcaaagagttgaa

SEQ ID NO: 1990029 - DNA, 25 bp, Homo sapien
tctgccttgagttgaacactagcac

SEQ ID NO: 1990030 - DNA, 25 bp, Homo sapien
tgatatataagggagcaacgcaagg

SEQ ID NO: 1990031 - DNA, 25 bp, Homo sapien
ggatgaagccaaaacaacagctact

SEQ ID NO: 1990032 - DNA, 25 bp, Homo sapien
aacagagtgggagaacagggtgtcg

SEQ ID NO: 1990033 - DNA, 25 bp, Homo sapien
cagagtgggagaacagggtgtcgtt

SEQ ID NO: 1990034 - DNA, 25 bp, Homo sapien
ggaacagagtgggagaacagggtgt

SEQ ID NO: 1990035 - DNA, 25 bp, Homo sapien
agtgggagaacagggtgtcgttcat

SEQ ID NO: 1990036 - DNA, 25 bp, Homo sapien
gacgcatccaccaaaagcaccgtcc

SEQ ID NO: 1990037 - DNA, 25 bp, Homo sapien
gcatccaccaaaagcaccgtccgag

SEQ ID NO: 1990038 - DNA, 25 bp, Homo sapien
ctagacgcatccaccaaaagcaccg

SEQ ID NO: 1990039 - DNA, 25 bp, Homo sapien
tagacgcatccaccaaaagcaccgt

SEQ ID NO: 1990040 - DNA, 25 bp, Homo sapien
tttattgaacagcaccctcaaaaca

SEQ ID NO: 1990041 - DNA, 25 bp, Homo sapien
gaacagctcaaagtattataggaat

SEQ ID NO: 1990042 - DNA, 25 bp, Homo sapien
gaaaccgtaggccaatctctgtggt

SEQ ID NO: 1990043 - DNA, 25 bp, Homo sapien
cacaactgtggttcacagagaacat

SEQ ID NO: 1990044 - DNA, 25 bp, Homo sapien
cagccacagggctggatgcacttat

SEQ ID NO: 1990045 - DNA, 25 bp, Homo sapien
tacgtacagctttatgagggaatgc

SEQ ID NO: 1990046 - DNA, 25 bp, Homo sapien
cgtgcaccgtgatcaagctgattta

SEQ ID NO: 1990047 - DNA, 25 bp, Homo sapien
ggctggatgcacttattccctcagg

SEQ ID NO: 1990048 - DNA, 25 bp, Homo sapien
taagaacagggaatgcgacagatga

SEQ ID NO: 1990049 - DNA, 25 bp, Homo sapien
cgacagatgatgctggtaaccagag

SEQ ID NO: 1990050 - DNA, 25 bp, Homo sapien
tcaagtacagagctagaaaagatgt

SEQ ID NO: 1990051 - DNA, 25 bp, Homo sapien
tcaaagtggtatgcttgtgaagggc

SEQ ID NO: 1990052 - DNA, 25 bp, Homo sapien
aaactgtgaaacctgcccatcaggg

SEQ ID NO: 1990053 - DNA, 25 bp, Homo sapien
cagggacaacctctcatgctgaaca

SEQ ID NO: 1990054 - DNA, 25 bp, Homo sapien
caaacagccgaataattgcacaggg

SEQ ID NO: 1990055 - DNA, 25 bp, Homo sapien
ccagactttgtctactgaagcagat

SEQ ID NO: 1990056 - DNA, 25 bp, Homo sapien
ggaaagccaagaagagcgtaaacac

SEQ ID NO: 1990057 - DNA, 25 bp, Homo sapien
ctagttaataagatgggaaagccaa

SEQ ID NO: 1990058 - DNA, 25 bp, Homo sapien
gaagagcgtaaacacggcaatgcat

SEQ ID NO: 1990059 - DNA, 25 bp, Homo sapien
caagaagagcgtaaacacggcaatg

SEQ ID NO: 1990060 - DNA, 25 bp, Homo sapien
gcagtttgttctgctctacttcact

SEQ ID NO: 1990061 - DNA, 25 bp, Homo sapien
agtttgttctgctctacttcactgt

SEQ ID NO: 1990062 - DNA, 25 bp, Homo sapien
catacaacccgatgagaacatgttc

SEQ ID NO: 1990063 - DNA, 25 bp, Homo sapien
gaacatgttcatcagctagcctgtc

SEQ ID NO: 1990064 - DNA, 25 bp, Homo sapien
tctgccacattcaggctgtactgta

SEQ ID NO: 1990065 - DNA, 25 bp, Homo sapien
gggttgttccggagcatgttgacat

SEQ ID NO: 1990066 - DNA, 25 bp, Homo sapien
gacaccttgaaagtgactttgtcag

SEQ ID NO: 1990067 - DNA, 25 bp, Homo sapien
gaacatgatatctttgacaccttga

SEQ ID NO: 1990068 - DNA, 25 bp, Homo sapien
gacgtcaaactaccccacaaagaga

SEQ ID NO: 1990069 - DNA, 25 bp, Homo sapien
caacacagtgttttgcggataaccc

SEQ ID NO: 1990070 - DNA, 25 bp, Homo sapien
tattgtaaagacaccctcttatgcc

SEQ ID NO: 1990071 - DNA, 25 bp, Homo sapien
ggttattgtggtatgtatcagttca

SEQ ID NO: 1990072 - DNA, 25 bp, Homo sapien
tatacttacggctcttccttaaaga

SEQ ID NO: 1990073 - DNA, 25 bp, Homo sapien
gaaactagttcctctcattcataaa

SEQ ID NO: 1990074 - DNA, 25 bp, Homo sapien
caagcaagccaattaccatgtgaat

SEQ ID NO: 1990075 - DNA, 25 bp, Homo sapien
gatccccactggtagagccttcaga

SEQ ID NO: 1990076 - DNA, 25 bp, Homo sapien
tcccctttaggatgggctagactta

SEQ ID NO: 1990077 - DNA, 25 bp, Homo sapien
gaaagacctaggtgatgagaaaccc

SEQ ID NO: 1990078 - DNA, 25 bp, Homo sapien
gccttgccgcatacctggcaattag

SEQ ID NO: 1990079 - DNA, 25 bp, Homo sapien
ttcatcaagccggtttgaactctca

SEQ ID NO: 1990080 - DNA, 25 bp, Homo sapien
caagccggtttgaactctcaagcat

SEQ ID NO: 1990081 - DNA, 25 bp, Homo sapien
ccgcatacctggcaattagcctgtg

SEQ ID NO: 1990082 - DNA, 25 bp, Homo sapien
tactcagctaatcatactattctta

SEQ ID NO: 1990083 - DNA, 25 bp, Homo sapien
aatgaccgttctatctcctttctaa

SEQ ID NO: 1990084 - DNA, 25 bp, Homo sapien
tcctttctaaccaagtgtcatctta

SEQ ID NO: 1990085 - DNA, 25 bp, Homo sapien
tactaatcatgatttactcagctaa

SEQ ID NO: 1990086 - DNA, 25 bp, Homo sapien
gactggtatacatgcagtcacagct

SEQ ID NO: 1990087 - DNA, 25 bp, Homo sapien
cagtacattttagaaattcctccac

SEQ ID NO: 1990088 - DNA, 25 bp, Homo sapien
tgcaatcagctttaacgactggtat

SEQ ID NO: 1990089 - DNA, 25 bp, Homo sapien
gctttctttgccttacagtacattt

SEQ ID NO: 1990090 - DNA, 25 bp, Homo sapien
aatatgtagtttataagatttcata

SEQ ID NO: 1990091 - DNA, 25 bp, Homo sapien
aagatttcatattgagaatgtgaac

SEQ ID NO: 1990092 - DNA, 25 bp, Homo sapien
ttataagatttcatattgagaatgt

SEQ ID NO: 1990093 - DNA, 25 bp, Homo sapien
tgtagtttataagatttcatattga

SEQ ID NO: 1990094 - DNA, 25 bp, Homo sapien
gctgcttattcgcatcgatggtgaa

SEQ ID NO: 1990095 - DNA, 25 bp, Homo sapien
cgcatcgatggtgaaagagatgtca

SEQ ID NO: 1990096 - DNA, 25 bp, Homo sapien
ctttgctgcttattcgcatcgatgg

SEQ ID NO: 1990097 - DNA, 25 bp, Homo sapien
tattcgcatcgatggtgaaagagat

SEQ ID NO: 1990098 - DNA, 25 bp, Homo sapien
tgcagtagtattacctaaaggagct

SEQ ID NO: 1990099 - DNA, 25 bp, Homo sapien
ccaccaaaggtgctataaggaacca

SEQ ID NO: 1990100 - DNA, 25 bp, Homo sapien
tactcctaatactaaccctgactgg

SEQ ID NO: 1990101 - DNA, 25 bp, Homo sapien
ggatgtacttgctgctcatcagaga

SEQ ID NO: 1990102 - DNA, 25 bp, Homo sapien
tcagggaagtccaccttagaaggaa

SEQ ID NO: 1990103 - DNA, 25 bp, Homo sapien
gacatacagtgctattggtgtgacc

SEQ ID NO: 1990104 - DNA, 25 bp, Homo sapien
gccttaacaatggatctcagggaag

SEQ ID NO: 1990105 - DNA, 25 bp, Homo sapien
tccctgcatttggtgagcattaggc

SEQ ID NO: 1990106 - DNA, 25 bp, Homo sapien
gcttgttcatgctctagccgaagtc

SEQ ID NO: 1990107 - DNA, 25 bp, Homo sapien
gttcatgctctagccgaagtctctg

SEQ ID NO: 1990108 - DNA, 25 bp, Homo sapien
ctctggcgtgggctgagaagcttgt

SEQ ID NO: 1990109 - DNA, 25 bp, Homo sapien
gagaagcttgttcatgctctagccg

SEQ ID NO: 1990110 - DNA, 25 bp, Homo sapien
tgcttactcttgaagcaatctttct

SEQ ID NO: 1990111 - DNA, 25 bp, Homo sapien
ccttacaagagtaaggactgcttac

SEQ ID NO: 1990112 - DNA, 25 bp, Homo sapien
aagcaatccttacaagagtaaggac

SEQ ID NO: 1990113 - DNA, 25 bp, Homo sapien
agtaaggactgcttactcttgaagc

SEQ ID NO: 1990114 - DNA, 25 bp, Homo sapien
gcagacattctctgttccagctcat

SEQ ID NO: 1990115 - DNA, 25 bp, Homo sapien
tgagaccctccaactggaccattag

SEQ ID NO: 1990116 - DNA, 25 bp, Homo sapien
agcagacattctctgttccagctca

SEQ ID NO: 1990117 - DNA, 25 bp, Homo sapien
tggaccattagctctctccggctct

SEQ ID NO: 1990118 - DNA, 25 bp, Homo sapien
cagggttccaataagagcatgtaca

SEQ ID NO: 1990119 - DNA, 25 bp, Homo sapien
tgaatcaataacagttagattaccc

SEQ ID NO: 1990120 - DNA, 25 bp, Homo sapien
taagagcatgtacacagtgtgaagg

SEQ ID NO: 1990121 - DNA, 25 bp, Homo sapien
attacccagggttccaataagagca

SEQ ID NO: 1990122 - DNA, 25 bp, Homo sapien
acctgcagtaggggacataacttac

SEQ ID NO: 1990123 - DNA, 25 bp, Homo sapien
agacctgcagtaggggacataactt

SEQ ID NO: 1990124 - DNA, 25 bp, Homo sapien
ttaagacctgcagtaggggacataa

SEQ ID NO: 1990125 - DNA, 25 bp, Homo sapien
taagacctgcagtaggggacataac

SEQ ID NO: 1990126 - DNA, 25 bp, Homo sapien
ttccaataaatgacaattcgttccc

SEQ ID NO: 1990127 - DNA, 25 bp, Homo sapien
catgaacatacattagagcaaaagc

SEQ ID NO: 1990128 - DNA, 25 bp, Homo sapien
gcaatgagaaaaccgcaggtcggca

SEQ ID NO: 1990129 - DNA, 25 bp, Homo sapien
taagagaagggtctgatcaacaact

SEQ ID NO: 1990130 - DNA, 25 bp, Homo sapien
gtatctctagtgactgtggtatctc

SEQ ID NO: 1990131 - DNA, 25 bp, Homo sapien
ctcagggtatctctagtgactgtgg

SEQ ID NO: 1990132 - DNA, 25 bp, Homo sapien
tgtgggttttgggatgacatgaacc

SEQ ID NO: 1990133 - DNA, 25 bp, Homo sapien
gatgacatgaacctcagggtatctc

SEQ ID NO: 1990134 - DNA, 25 bp, Homo sapien
gtgagtgggtgtagaggttagcttc

SEQ ID NO: 1990135 - DNA, 25 bp, Homo sapien
tgagtgggtgtagaggttagcttct

SEQ ID NO: 1990136 - DNA, 25 bp, Homo sapien
gggtgtagaggttagcttctgagtg

SEQ ID NO: 1990137 - DNA, 25 bp, Homo sapien
agtgggtgtagaggttagcttctga

SEQ ID NO: 1990138 - DNA, 25 bp, Homo sapien
tcagtaaaatgaaaccgaactgaat

SEQ ID NO: 1990139 - DNA, 25 bp, Homo sapien
aaatgaaaccgaactgaatactcac

SEQ ID NO: 1990140 - DNA, 25 bp, Homo sapien
taaaatgaaaccgaactgaatactc

SEQ ID NO: 1990141 - DNA, 25 bp, Homo sapien
tttcagtaaaatgaaaccgaactga

SEQ ID NO: 1990142 - DNA, 25 bp, Homo sapien
tcgtctcccggagccgaaaggctct

SEQ ID NO: 1990143 - DNA, 25 bp, Homo sapien
tcatacatagcgtggtacatgcact

SEQ ID NO: 1990144 - DNA, 25 bp, Homo sapien
ccaaaaagatgggacgtgaatagtc

SEQ ID NO: 1990145 - DNA, 25 bp, Homo sapien
tgagcacattttggtgagccatggg

SEQ ID NO: 1990146 - DNA, 25 bp, Homo sapien
ttcatgggcaattatacaggctgta

SEQ ID NO: 1990147 - DNA, 25 bp, Homo sapien
ggaaatacaatagcaataccccatg

SEQ ID NO: 1990148 - DNA, 25 bp, Homo sapien
tcctggtccataggagcctttcaag

SEQ ID NO: 1990149 - DNA, 25 bp, Homo sapien
ctgatgacgacaggatgattgccct

SEQ ID NO: 1990150 - DNA, 25 bp, Homo sapien
tccttgggtaccgacaccgcagtac

SEQ ID NO: 1990151 - DNA, 25 bp, Homo sapien
gctgttggccccctgagatgcagaa

SEQ ID NO: 1990152 - DNA, 25 bp, Homo sapien
cccctgagatgcagaagctgctgag

SEQ ID NO: 1990153 - DNA, 25 bp, Homo sapien
tattgctgacatctgggtgacgtgg

SEQ ID NO: 1990154 - DNA, 25 bp, Homo sapien
gtcccttaagattagcatattcaca

SEQ ID NO: 1990155 - DNA, 25 bp, Homo sapien
gtttatatcttttgttgtaagctgc

SEQ ID NO: 1990156 - DNA, 25 bp, Homo sapien
aaagaggcttgtgtataaaagcaaa

SEQ ID NO: 1990157 - DNA, 25 bp, Homo sapien
aacatgcagagtaacatccttgtcc

SEQ ID NO: 1990158 - DNA, 25 bp, Homo sapien
gaagcagatgccagtctaaaacctc

SEQ ID NO: 1990159 - DNA, 25 bp, Homo sapien
tactcctataaagctcccagtgaag

SEQ ID NO: 1990160 - DNA, 25 bp, Homo sapien
tgcagaaccgcctctatagggctgg

SEQ ID NO: 1990161 - DNA, 25 bp, Homo sapien
tgaggtcagtataagaaacagccac

SEQ ID NO: 1990162 - DNA, 25 bp, Homo sapien
caatataaattcactggctatcatc

SEQ ID NO: 1990163 - DNA, 25 bp, Homo sapien
ataatcaggccttttaaagtgctca

SEQ ID NO: 1990164 - DNA, 25 bp, Homo sapien
ccaatataaattcactggctatcat

SEQ ID NO: 1990165 - DNA, 25 bp, Homo sapien
tataatcaggccttttaaagtgctc

SEQ ID NO: 1990166 - DNA, 25 bp, Homo sapien
ggagcggggagagcctgccccctga

SEQ ID NO: 1990167 - DNA, 25 bp, Homo sapien
gggaggagcggggagagcctgcccc

SEQ ID NO: 1990168 - DNA, 25 bp, Homo sapien
ggggaggagcggggagagcctgccc

SEQ ID NO: 1990169 - DNA, 25 bp, Homo sapien
gaggagcggggagagcctgccccct

SEQ ID NO: 1990170 - DNA, 25 bp, Homo sapien
tctccccctactcctgtgagggagt

SEQ ID NO: 1990171 - DNA, 25 bp, Homo sapien
gtggagcaggctgacgctgaccgga

SEQ ID NO: 1990172 - DNA, 25 bp, Homo sapien
accggatgggcatgggaattggcct

SEQ ID NO: 1990173 - DNA, 25 bp, Homo sapien
cctactcctgtgagggagtcctgcg

SEQ ID NO: 1990174 - DNA, 25 bp, Homo sapien
gccactagcaagtcattccttaagt

SEQ ID NO: 1990175 - DNA, 25 bp, Homo sapien
cagccactagcaagtcattccttaa

SEQ ID NO: 1990176 - DNA, 25 bp, Homo sapien
agccactagcaagtcattccttaag

SEQ ID NO: 1990177 - DNA, 25 bp, Homo sapien
cactagcaagtcattccttaagttt

SEQ ID NO: 1990178 - DNA, 25 bp, Homo sapien
caagagaggacatagtgttagtgat

SEQ ID NO: 1990179 - DNA, 25 bp, Homo sapien
ttcacaagagaggacatagtgttag

SEQ ID NO: 1990180 - DNA, 25 bp, Homo sapien
cagctctttcacaagagaggacata

SEQ ID NO: 1990181 - DNA, 25 bp, Homo sapien
tctttcacaagagaggacatagtgt

SEQ ID NO: 1990182 - DNA, 25 bp, Homo sapien
gaatgtacccaggttttcgggcatg

SEQ ID NO: 1990183 - DNA, 25 bp, Homo sapien
catggatttgcgctagaaaagcctt

SEQ ID NO: 1990184 - DNA, 25 bp, Homo sapien
tgtcgccacgcatggtacttgtggt

SEQ ID NO: 1990185 - DNA, 25 bp, Homo sapien
gagtccgtgcaaattcagaatccac

SEQ ID NO: 1990186 - DNA, 25 bp, Homo sapien
agatgacaactaattcaccattttg

SEQ ID NO: 1990187 - DNA, 25 bp, Homo sapien
aaacagatgacaactaattcaccat

SEQ ID NO: 1990188 - DNA, 25 bp, Homo sapien
caaaacagatgacaactaattcacc

SEQ ID NO: 1990189 - DNA, 25 bp, Homo sapien
cagacaaaacagatgacaactaatt

SEQ ID NO: 1990190 - DNA, 25 bp, Homo sapien
ctccagctgccggacagagtcattt

SEQ ID NO: 1990191 - DNA, 25 bp, Homo sapien
caggctgcacatagggatctgcatc

SEQ ID NO: 1990192 - DNA, 25 bp, Homo sapien
gtttcaggtattcctccatctggag

SEQ ID NO: 1990193 - DNA, 25 bp, Homo sapien
tgccggacagagtcattttcatagt

SEQ ID NO: 1990194 - DNA, 25 bp, Homo sapien
ggtgacacgtcaagtctgtgatgca

SEQ ID NO: 1990195 - DNA, 25 bp, Homo sapien
caaaggacacaaacgagaaaggtga

SEQ ID NO: 1990196 - DNA, 25 bp, Homo sapien
cgagaaaggtgacacgtcaagtctg

SEQ ID NO: 1990197 - DNA, 25 bp, Homo sapien
cacaaacgagaaaggtgacacgtca

SEQ ID NO: 1990198 - DNA, 25 bp, Homo sapien
gaggagtgtgataaaaggatattgc

SEQ ID NO: 1990199 - DNA, 25 bp, Homo sapien
ggagtgtgataaaaggatattgcat

SEQ ID NO: 1990200 - DNA, 25 bp, Homo sapien
ttgagaggagtgtgataaaaggata

SEQ ID NO: 1990201 - DNA, 25 bp, Homo sapien
tgagaggagtgtgataaaaggatat

SEQ ID NO: 1990202 - DNA, 25 bp, Homo sapien
acaggaagtcctccatgtggatctc

SEQ ID NO: 1990203 - DNA, 25 bp, Homo sapien
gtggatctctttcttagtgggtacc

SEQ ID NO: 1990204 - DNA, 25 bp, Homo sapien
ctttcttagtgggtaccagaggcat

SEQ ID NO: 1990205 - DNA, 25 bp, Homo sapien
tcctccatgtggatctctttcttag

SEQ ID NO: 1990206 - DNA, 25 bp, Homo sapien
caggaatgaaagtcctaggacactg

SEQ ID NO: 1990207 - DNA, 25 bp, Homo sapien
aagtcctaggacactgtgctattgc

SEQ ID NO: 1990208 - DNA, 25 bp, Homo sapien
tgaaagtcctaggacactgtgctat

SEQ ID NO: 1990209 - DNA, 25 bp, Homo sapien
gaatgaaagtcctaggacactgtgc

SEQ ID NO: 1990210 - DNA, 25 bp, Homo sapien
gacatgtgaacatcgtacagccgcc

SEQ ID NO: 1990211 - DNA, 25 bp, Homo sapien
gagaaggtttttgccagccccagaa

SEQ ID NO: 1990212 - DNA, 25 bp, Homo sapien
tatgccagctcggtccagtcagtgg

SEQ ID NO: 1990213 - DNA, 25 bp, Homo sapien
gaaggcctccaaacaacttgatggg

SEQ ID NO: 1990214 - DNA, 25 bp, Homo sapien
ccttgcaatggctttatatgacgat

SEQ ID NO: 1990215 - DNA, 25 bp, Homo sapien
ccatgtgatggagttggttggcaat

SEQ ID NO: 1990216 - DNA, 25 bp, Homo sapien
tatgacgatatcaacaaccatgtga

SEQ ID NO: 1990217 - DNA, 25 bp, Homo sapien
tagtcagaaattggtcattggcggc

SEQ ID NO: 1990218 - DNA, 25 bp, Homo sapien
ggtgctcgagtctggtctcagtgct

SEQ ID NO: 1990219 - DNA, 25 bp, Homo sapien
agtctggtctcagtgctgacgtgga

SEQ ID NO: 1990220 - DNA, 25 bp, Homo sapien
aggacaggggtgctcgagtctggtc

SEQ ID NO: 1990221 - DNA, 25 bp, Homo sapien
cgagtctggtctcagtgctgacgtg

SEQ ID NO: 1990222 - DNA, 25 bp, Homo sapien
ggctccttgcgtggaatcgaaccaa

SEQ ID NO: 1990223 - DNA, 25 bp, Homo sapien
gatctatctacggttaacagccaag

SEQ ID NO: 1990224 - DNA, 25 bp, Homo sapien
caaaatataacatgtccccaggagg

SEQ ID NO: 1990225 - DNA, 25 bp, Homo sapien
ggtttgcacttagaacaggccccaa

SEQ ID NO: 1990226 - DNA, 25 bp, Homo sapien
tattccatcaatgggtcctgcttta

SEQ ID NO: 1990227 - DNA, 25 bp, Homo sapien
gctattttgcctcggtggctcaata

SEQ ID NO: 1990228 - DNA, 25 bp, Homo sapien
cagactgactccacgttgctttagg

SEQ ID NO: 1990229 - DNA, 25 bp, Homo sapien
catggctagatgcagaggattcaaa

SEQ ID NO: 1990230 - DNA, 25 bp, Homo sapien
acattgacttcctagccctgctgat

SEQ ID NO: 1990231 - DNA, 25 bp, Homo sapien
ttcctagccctgctgatcctccttt

SEQ ID NO: 1990232 - DNA, 25 bp, Homo sapien
attgacttcctagccctgctgatcc

SEQ ID NO: 1990233 - DNA, 25 bp, Homo sapien
cctagccctgctgatcctcctttat

SEQ ID NO: 1990234 - DNA, 25 bp, Homo sapien
gtctagcagtctgacatcacttgta

SEQ ID NO: 1990235 - DNA, 25 bp, Homo sapien
tccagtgagaatgtatagtaaccca

SEQ ID NO: 1990236 - DNA, 25 bp, Homo sapien
caaactctggctcgcatttttctag

SEQ ID NO: 1990237 - DNA, 25 bp, Homo sapien
cagattgtaatctttgtgtctagca

SEQ ID NO: 1990238 - DNA, 25 bp, Homo sapien
ttcataaccagatacacatttgtgt

SEQ ID NO: 1990239 - DNA, 25 bp, Homo sapien
aactctcccggacaattctttcata

SEQ ID NO: 1990240 - DNA, 25 bp, Homo sapien
gacagatcagcaggcttcttaacac

SEQ ID NO: 1990241 - DNA, 25 bp, Homo sapien
accagagcctgagaactctcccgga

SEQ ID NO: 1990242 - DNA, 25 bp, Homo sapien
gggtgagatgccagaaagtactgtt

SEQ ID NO: 1990243 - DNA, 25 bp, Homo sapien
ggcagtagtatcagcttgggtagct

SEQ ID NO: 1990244 - DNA, 25 bp, Homo sapien
agaaagtactgtttccgctgcacac

SEQ ID NO: 1990245 - DNA, 25 bp, Homo sapien
agtgtggattcagctggtagatgaa

SEQ ID NO: 1990246 - DNA, 25 bp, Homo sapien
agcaatgtaatgttggtgtagactg

SEQ ID NO: 1990247 - DNA, 25 bp, Homo sapien
ctgatctaaaggaacgatggcctgt

SEQ ID NO: 1990248 - DNA, 25 bp, Homo sapien
acgatggcctgtaacacattttagc

SEQ ID NO: 1990249 - DNA, 25 bp, Homo sapien
cttcacctggacgttgagtgaatgg

SEQ ID NO: 1990250 - DNA, 25 bp, Homo sapien
catctctctcctttaatatacattt

SEQ ID NO: 1990251 - DNA, 25 bp, Homo sapien
tcatctctctcctttaatatacatt

SEQ ID NO: 1990252 - DNA, 25 bp, Homo sapien
tttttcatctctctcctttaatata

SEQ ID NO: 1990253 - DNA, 25 bp, Homo sapien
tttcatctctctcctttaatataca

SEQ ID NO: 1990254 - DNA, 25 bp, Homo sapien
agtccacccgagagagtccggccag

SEQ ID NO: 1990255 - DNA, 25 bp, Homo sapien
tccgggagtccacccgagagagtcc

SEQ ID NO: 1990256 - DNA, 25 bp, Homo sapien
gggagtccacccgagagagtccggc

SEQ ID NO: 1990257 - DNA, 25 bp, Homo sapien
gtgactcgcagtctgccaccgccgc

SEQ ID NO: 1990258 - DNA, 25 bp, Homo sapien
gctccggcgctgtcgcctccttcct

SEQ ID NO: 1990259 - DNA, 25 bp, Homo sapien
ccggcgctgtcgcctccttcctctg

SEQ ID NO: 1990260 - DNA, 25 bp, Homo sapien
ctccggcgctgtcgcctccttcctc

SEQ ID NO: 1990261 - DNA, 25 bp, Homo sapien
tgctccggcgctgtcgcctccttcc

SEQ ID NO: 1990262 - DNA, 25 bp, Homo sapien
cactgtattgacgaagtcactggag

SEQ ID NO: 1990263 - DNA, 25 bp, Homo sapien
cgaagaatttcccactaagccgagt

SEQ ID NO: 1990264 - DNA, 25 bp, Homo sapien
aatcagctttatcgagcgccccagg

SEQ ID NO: 1990265 - DNA, 25 bp, Homo sapien
cctggctctttgtgggatttctggc

SEQ ID NO: 1990266 - DNA, 25 bp, Homo sapien
gtgtcctattcagcaaaagtgtaaa

SEQ ID NO: 1990267 - DNA, 25 bp, Homo sapien
aaaagtgtaaatcgcgggtcctcag

SEQ ID NO: 1990268 - DNA, 25 bp, Homo sapien
ggtcctcagattagaagtaggtgct

SEQ ID NO: 1990269 - DNA, 25 bp, Homo sapien
tgcgtctgaccacaatcgcaaccgg

SEQ ID NO: 1990270 - DNA, 25 bp, Homo sapien
cttaacaacagtgcagaaaccaggc

SEQ ID NO: 1990271 - DNA, 25 bp, Homo sapien
caggctgctggagtatgtttctgct

SEQ ID NO: 1990272 - DNA, 25 bp, Homo sapien
tacacatgagtcatcacaggaatgg

SEQ ID NO: 1990273 - DNA, 25 bp, Homo sapien
tttcctactgactgctacacatgag

SEQ ID NO: 1990274 - DNA, 25 bp, Homo sapien
aaacaaacaagtatggctgcagtcc

SEQ ID NO: 1990275 - DNA, 25 bp, Homo sapien
tgggcatacagtctttggttcaaca

SEQ ID NO: 1990276 - DNA, 25 bp, Homo sapien
gggtaaatcagaggtctgcagtagt

SEQ ID NO: 1990277 - DNA, 25 bp, Homo sapien
catgctgccacagccatagacaaga

SEQ ID NO: 1990278 - DNA, 25 bp, Homo sapien
gctatcacttcatctaacaagtgct

SEQ ID NO: 1990279 - DNA, 25 bp, Homo sapien
tcacttcatctaacaagtgcttaat

SEQ ID NO: 1990280 - DNA, 25 bp, Homo sapien
tgtagctatcacttcatctaacaag

SEQ ID NO: 1990281 - DNA, 25 bp, Homo sapien
tagctatcacttcatctaacaagtg

SEQ ID NO: 1990282 - DNA, 25 bp, Homo sapien
gatgcggcctcgatgaaaagggccc

SEQ ID NO: 1990283 - DNA, 25 bp, Homo sapien
tggatgcggcctcgatgaaaagggc

SEQ ID NO: 1990284 - DNA, 25 bp, Homo sapien
tcatgtggatgcggcctcgatgaaa

SEQ ID NO: 1990285 - DNA, 25 bp, Homo sapien
tgtggatgcggcctcgatgaaaagg

SEQ ID NO: 1990286 - DNA, 25 bp, Homo sapien
taatagtacccagtagctgtgcaag

SEQ ID NO: 1990287 - DNA, 25 bp, Homo sapien
gaattgttatactactcagtgaagg

SEQ ID NO: 1990288 - DNA, 25 bp, Homo sapien
gattattccgagacacaggtctgga

SEQ ID NO: 1990289 - DNA, 25 bp, Homo sapien
tggccaccaagctacgaagcaggaa

SEQ ID NO: 1990290 - DNA, 25 bp, Homo sapien
ggctgttgaaatgaactgttcctct

SEQ ID NO: 1990291 - DNA, 25 bp, Homo sapien
gctgttgaaatgaactgttcctctg

SEQ ID NO: 1990292 - DNA, 25 bp, Homo sapien
tggctgttgaaatgaactgttcctc

SEQ ID NO: 1990293 - DNA, 25 bp, Homo sapien
ccactgagccctgtcccaactctgt

SEQ ID NO: 1990294 - DNA, 25 bp, Homo sapien
tgagccctgtcccaactctgtccta

SEQ ID NO: 1990295 - DNA, 25 bp, Homo sapien
cactgagccctgtcccaactctgtc

SEQ ID NO: 1990296 - DNA, 25 bp, Homo sapien
actgagccctgtcccaactctgtcc

SEQ ID NO: 1990297 - DNA, 25 bp, Homo sapien
ctttaattggaatgttggtcagtac

SEQ ID NO: 1990298 - DNA, 25 bp, Homo sapien
tacaagtgcaattacaagaaacttc

SEQ ID NO: 1990299 - DNA, 25 bp, Homo sapien
gatgttcccacagattctgacacaa

SEQ ID NO: 1990300 - DNA, 25 bp, Homo sapien
gattctgacacaataactgatgatg

SEQ ID NO: 1990301 - DNA, 25 bp, Homo sapien
ggtaaagtaaatcattccacaagtg

SEQ ID NO: 1990302 - DNA, 25 bp, Homo sapien
cagtacttgagaagagttcctgaaa

SEQ ID NO: 1990303 - DNA, 25 bp, Homo sapien
ttctgcacgcaaaacactcaactct

SEQ ID NO: 1990304 - DNA, 25 bp, Homo sapien
agcttcacattctgcacgcaaaaca

SEQ ID NO: 1990305 - DNA, 25 bp, Homo sapien
gaaatgaattctgatgatgtaaatg

SEQ ID NO: 1990306 - DNA, 25 bp, Homo sapien
tgttaacagtatccgagttgttacc

SEQ ID NO: 1990307 - DNA, 25 bp, Homo sapien
acagtatccgagttgttacctctga

SEQ ID NO: 1990308 - DNA, 25 bp, Homo sapien
ctacagagaggacggcaatttagtg

SEQ ID NO: 1990309 - DNA, 25 bp, Homo sapien
tccagtagggaatggcaggtacagt

SEQ ID NO: 1990310 - DNA, 25 bp, Homo sapien
gcactgaaattgcactggtggcaca

SEQ ID NO: 1990311 - DNA, 25 bp, Homo sapien
aaaaagtatatggttggccagccag

SEQ ID NO: 1990312 - DNA, 25 bp, Homo sapien
tcacccagaggcataggaagatttt

SEQ ID NO: 1990313 - DNA, 25 bp, Homo sapien
ccaggaagagatatactaaatcaag

SEQ ID NO: 1990314 - DNA, 25 bp, Homo sapien
gaattttatgactgaagcaagatat

SEQ ID NO: 1990315 - DNA, 25 bp, Homo sapien
ttttatgactgaagcaagatattcc

SEQ ID NO: 1990316 - DNA, 25 bp, Homo sapien
tcaagggtgtatctaacgtatctgc

SEQ ID NO: 1990317 - DNA, 25 bp, Homo sapien
tgatggccaagaatttgggctgatg

SEQ ID NO: 1990318 - DNA, 25 bp, Homo sapien
tgaaggaagggatgggatgatggcc

SEQ ID NO: 1990319 - DNA, 25 bp, Homo sapien
ggatgatggccaagaatttgggctg

SEQ ID NO: 1990320 - DNA, 25 bp, Homo sapien
gggatgggatgatggccaagaattt

SEQ ID NO: 1990321 - DNA, 25 bp, Homo sapien
gcctgctccgcacggaccgtgcctg

SEQ ID NO: 1990322 - DNA, 25 bp, Homo sapien
aggaaggtggctgcgtcttcccgct

SEQ ID NO: 1990323 - DNA, 25 bp, Homo sapien
agctgacgtcagagcgccggcagca

SEQ ID NO: 1990324 - DNA, 25 bp, Homo sapien
agcagcaccctggtcacgtggccag

SEQ ID NO: 1990325 - DNA, 25 bp, Homo sapien
tggcgcactcccgagaaggggaaca

SEQ ID NO: 1990326 - DNA, 25 bp, Homo sapien
ccgagaaggggaacaaaccgctgtg

SEQ ID NO: 1990327 - DNA, 25 bp, Homo sapien
aaggggaacaaaccgctgtgggctg

SEQ ID NO: 1990328 - DNA, 25 bp, Homo sapien
gcgcactcccgagaaggggaacaaa

SEQ ID NO: 1990329 - DNA, 25 bp, Homo sapien
taggaacgctccccgcgcactgtgt

SEQ ID NO: 1990330 - DNA, 25 bp, Homo sapien
gatggtcccgttattatcctggatg

SEQ ID NO: 1990331 - DNA, 25 bp, Homo sapien
gcttccggaaaggaatgatggtccc

SEQ ID NO: 1990332 - DNA, 25 bp, Homo sapien
cctggatgatgtcgttgttgttctc

SEQ ID NO: 1990333 - DNA, 25 bp, Homo sapien
tataacgggctggatttccgcgcgc

SEQ ID NO: 1990334 - DNA, 25 bp, Homo sapien
tctgctccattatataacgggctgg

SEQ ID NO: 1990335 - DNA, 25 bp, Homo sapien
agtgtctgctccattatataacggg

SEQ ID NO: 1990336 - DNA, 25 bp, Homo sapien
tccattatataacgggctggatttc

SEQ ID NO: 1990337 - DNA, 25 bp, Homo sapien
agataccaaataatcacaaccgcct

SEQ ID NO: 1990338 - DNA, 25 bp, Homo sapien
aaaggaagtgctactgcctgtctcc

SEQ ID NO: 1990339 - DNA, 25 bp, Homo sapien
tgctttccatctgcagtcgcggagc

SEQ ID NO: 1990340 - DNA, 25 bp, Homo sapien
caaacccaacatgacacatggaaac

SEQ ID NO: 1990341 - DNA, 25 bp, Homo sapien
gcggtggccataaactccttagaaa

SEQ ID NO: 1990342 - DNA, 25 bp, Homo sapien
ggcggtttaacatcacagactgcag

SEQ ID NO: 1990343 - DNA, 25 bp, Homo sapien
cagaggaaatatgaccgaagctatc

SEQ ID NO: 1990344 - DNA, 25 bp, Homo sapien
cactctccaggttaagcgcaaacgt

SEQ ID NO: 1990345 - DNA, 25 bp, Homo sapien
gggcacagccaaaattaactccaag

SEQ ID NO: 1990346 - DNA, 25 bp, Homo sapien
ttttggtgacctcatgggcacagcc

SEQ ID NO: 1990347 - DNA, 25 bp, Homo sapien
aaatttccaatcacagggtctctga

SEQ ID NO: 1990348 - DNA, 25 bp, Homo sapien
taggaaacgcaaataatagcctggg

SEQ ID NO: 1990349 - DNA, 25 bp, Homo sapien
taatcaaggtgcaagctagtttcaa

SEQ ID NO: 1990350 - DNA, 25 bp, Homo sapien
ggtgcaaatgctataacagtaatgt

SEQ ID NO: 1990351 - DNA, 25 bp, Homo sapien
gttaagagatgtgggtcaggaacca

SEQ ID NO: 1990352 - DNA, 25 bp, Homo sapien
cactatcagatacctgggttaagag

SEQ ID NO: 1990353 - DNA, 25 bp, Homo sapien
tccaactagcatctgcatgaaacag

SEQ ID NO: 1990354 - DNA, 25 bp, Homo sapien
cagggagatccagagcacgactcat

SEQ ID NO: 1990355 - DNA, 25 bp, Homo sapien
tcttaaaagcctggagtatacaaac

SEQ ID NO: 1990356 - DNA, 25 bp, Homo sapien
cacccatgtggaaatagtcctctag

SEQ ID NO: 1990357 - DNA, 25 bp, Homo sapien
aaagcaagagcacccggaagaccat

SEQ ID NO: 1990358 - DNA, 25 bp, Homo sapien
caacagataccagctacagagcagg

SEQ ID NO: 1990359 - DNA, 25 bp, Homo sapien
cagaagctctgaaaatccgtaaaag

SEQ ID NO: 1990360 - DNA, 25 bp, Homo sapien
cagagttgggcatgtactaaagcat

SEQ ID NO: 1990361 - DNA, 25 bp, Homo sapien
tgagccagagaacatctacctagtc

SEQ ID NO: 1990362 - DNA, 25 bp, Homo sapien
tagtgattctagacccacacagtgg

SEQ ID NO: 1990363 - DNA, 25 bp, Homo sapien
ggctcaagctctcgcatggcattaa

SEQ ID NO: 1990364 - DNA, 25 bp, Homo sapien
tctctgcacattagagggctcaagc

SEQ ID NO: 1990365 - DNA, 25 bp, Homo sapien
cagaaacactaagataaacaatcgg

SEQ ID NO: 1990366 - DNA, 25 bp, Homo sapien
tgttcagtctttaccttgctaatga

SEQ ID NO: 1990367 - DNA, 25 bp, Homo sapien
gaattgtaggtttccactttgagag

SEQ ID NO: 1990368 - DNA, 25 bp, Homo sapien
tggtggcctataaaactctgttcag

SEQ ID NO: 1990369 - DNA, 25 bp, Homo sapien
gactgcaaagggtacaaggagtctt

SEQ ID NO: 1990370 - DNA, 25 bp, Homo sapien
caggcaccgtttggcacaccttatg

SEQ ID NO: 1990371 - DNA, 25 bp, Homo sapien
gaaccctgggaagttgatgctacta

SEQ ID NO: 1990372 - DNA, 25 bp, Homo sapien
ttgaggcatttactttgcaccaggc

SEQ ID NO: 1990373 - DNA, 25 bp, Homo sapien
aatatgtacttactgaggatggacc

SEQ ID NO: 1990374 - DNA, 25 bp, Homo sapien
agtgcccgggctaaatagactcatt

SEQ ID NO: 1990375 - DNA, 25 bp, Homo sapien
ggatggaccatgtaactaattgctg

SEQ ID NO: 1990376 - DNA, 25 bp, Homo sapien
gaacactttactacagaagacacac

SEQ ID NO: 1990377 - DNA, 25 bp, Homo sapien
gcttcgtagggcatcgtccccaaaa

SEQ ID NO: 1990378 - DNA, 25 bp, Homo sapien
taaacgatgttcagctaagttggtg

SEQ ID NO: 1990379 - DNA, 25 bp, Homo sapien
gcaaggtactgatctgcctctacat

SEQ ID NO: 1990380 - DNA, 25 bp, Homo sapien
tacagctgagctaagataaacgatg

SEQ ID NO: 1990381 - DNA, 25 bp, Homo sapien
taatgagagctctgttctaggcatc

SEQ ID NO: 1990382 - DNA, 25 bp, Homo sapien
caggacaagggaagtacaggccagt

SEQ ID NO: 1990383 - DNA, 25 bp, Homo sapien
caaatatcaatacgtgcccctagtg

SEQ ID NO: 1990384 - DNA, 25 bp, Homo sapien
tatcgtaggagtcatcacatcgtgc

SEQ ID NO: 1990385 - DNA, 25 bp, Homo sapien
catgatcccaggtcttttccagtca

SEQ ID NO: 1990386 - DNA, 25 bp, Homo sapien
tagctctttcccatgatcccaggtc

SEQ ID NO: 1990387 - DNA, 25 bp, Homo sapien
gctctttcccatgatcccaggtctt

SEQ ID NO: 1990388 - DNA, 25 bp, Homo sapien
cttagctctttcccatgatcccagg

SEQ ID NO: 1990389 - DNA, 25 bp, Homo sapien
tagacagacaatgcaagaccaactc

SEQ ID NO: 1990390 - DNA, 25 bp, Homo sapien
taggttcaatacctcgagaggcagg

SEQ ID NO: 1990391 - DNA, 25 bp, Homo sapien
gcttccatagggagggacagtgtaa

SEQ ID NO: 1990392 - DNA, 25 bp, Homo sapien
gagcacggaactgacttcacacaag

SEQ ID NO: 1990393 - DNA, 25 bp, Homo sapien
ccagcatagcaggtaaagtgaggtg

SEQ ID NO: 1990394 - DNA, 25 bp, Homo sapien
tccagcatagcaggtaaagtgaggt

SEQ ID NO: 1990395 - DNA, 25 bp, Homo sapien
tctttgccagtcactggactttcgc

SEQ ID NO: 1990396 - DNA, 25 bp, Homo sapien
actttcgctcggtccaggtcaaggc

SEQ ID NO: 1990397 - DNA, 25 bp, Homo sapien
agtcactggactttcgctcggtcca

SEQ ID NO: 1990398 - DNA, 25 bp, Homo sapien
cactgtcagttctcatttcacagag

SEQ ID NO: 1990399 - DNA, 25 bp, Homo sapien
tctacacatgccaacaggggagaag

SEQ ID NO: 1990400 - DNA, 25 bp, Homo sapien
tagaaatatcgatgcttccttggaa

SEQ ID NO: 1990401 - DNA, 25 bp, Homo sapien
caacgagcagactagaagagagata

SEQ ID NO: 1990402 - DNA, 25 bp, Homo sapien
ttgggcttgagcatataatgatttc

SEQ ID NO: 1990403 - DNA, 25 bp, Homo sapien
ccaactgactaggtgtttgagatcc

SEQ ID NO: 1990404 - DNA, 25 bp, Homo sapien
gaaacttcatgttcaacataaaatg

SEQ ID NO: 1990405 - DNA, 25 bp, Homo sapien
aacataaaatgttctgaggccgggc

SEQ ID NO: 1990406 - DNA, 25 bp, Homo sapien
caactggaaacttcatgttcaacat

SEQ ID NO: 1990407 - DNA, 25 bp, Homo sapien
ccacattcaactggaaacttcatgt

SEQ ID NO: 1990408 - DNA, 25 bp, Homo sapien
ttctcatgtttggatcttcagcatg

SEQ ID NO: 1990409 - DNA, 25 bp, Homo sapien
tttattctcatgtttggatcttcag

SEQ ID NO: 1990410 - DNA, 25 bp, Homo sapien
tattctcatgtttggatcttcagca

SEQ ID NO: 1990411 - DNA, 25 bp, Homo sapien
ttattctcatgtttggatcttcagc

SEQ ID NO: 1990412 - DNA, 25 bp, Homo sapien
gatactatgtcattaacccatgcaa

SEQ ID NO: 1990413 - DNA, 25 bp, Homo sapien
gaggtagaatacacattgaccgcca

SEQ ID NO: 1990414 - DNA, 25 bp, Homo sapien
gctgttccacttttgtgtagtttaa

SEQ ID NO: 1990415 - DNA, 25 bp, Homo sapien
tcatagtctcttgggttatcgaggt

SEQ ID NO: 1990416 - DNA, 25 bp, Homo sapien
gaaaggcattacgaagctcaagcaa

SEQ ID NO: 1990417 - DNA, 25 bp, Homo sapien
cacattccacatgacagactgtaaa

SEQ ID NO: 1990418 - DNA, 25 bp, Homo sapien
tccaatacgtgtccgtgtggctctg

SEQ ID NO: 1990419 - DNA, 25 bp, Homo sapien
tcctggatgctcataaacacttttc

SEQ ID NO: 1990420 - DNA, 25 bp, Homo sapien
tttcatgttgaagccaaagggaaag

SEQ ID NO: 1990421 - DNA, 25 bp, Homo sapien
tactcagacctaagaatgaattaat

SEQ ID NO: 1990422 - DNA, 25 bp, Homo sapien
tctcttatctatttgtttactggaa

SEQ ID NO: 1990423 - DNA, 25 bp, Homo sapien
tctttcataaatactcagacctaag

SEQ ID NO: 1990424 - DNA, 25 bp, Homo sapien
tgggaaaaagagcaatgttgacttc

SEQ ID NO: 1990425 - DNA, 25 bp, Homo sapien
acctattctgactcatgaaatttca

SEQ ID NO: 1990426 - DNA, 25 bp, Homo sapien
tgacttcttcctacctattctgact

SEQ ID NO: 1990427 - DNA, 25 bp, Homo sapien
agagcaatgttgacttcttcctacc

SEQ ID NO: 1990428 - DNA, 25 bp, Homo sapien
tcctcgtgggaaaaatgatcacagg

SEQ ID NO: 1990429 - DNA, 25 bp, Homo sapien
tgatcaagtccagacctggtgaagg

SEQ ID NO: 1990430 - DNA, 25 bp, Homo sapien
tcatactcaaagttagtgctctagg

SEQ ID NO: 1990431 - DNA, 25 bp, Homo sapien
gctctaggagtattctgatcaagtc

SEQ ID NO: 1990432 - DNA, 25 bp, Homo sapien
gaggcaacgcctaagttctggccaa

SEQ ID NO: 1990433 - DNA, 25 bp, Homo sapien
gacttcatgtctgagacctaggcat

SEQ ID NO: 1990434 - DNA, 25 bp, Homo sapien
tagatcaacaatatacatgcctggt

SEQ ID NO: 1990435 - DNA, 25 bp, Homo sapien
ggttagctagcacccactactgacc

SEQ ID NO: 1990436 - DNA, 25 bp, Homo sapien
cactagccttgtgaggatgggagtc

SEQ ID NO: 1990437 - DNA, 25 bp, Homo sapien
agtgccagccctacatgcagactgt

SEQ ID NO: 1990438 - DNA, 25 bp, Homo sapien
taacagctttcagtgacagacagtg

SEQ ID NO: 1990439 - DNA, 25 bp, Homo sapien
cagtccaggatatagtgacagtcca

SEQ ID NO: 1990440 - DNA, 25 bp, Homo sapien
tcatcggtaacctgtcctgacagag

SEQ ID NO: 1990441 - DNA, 25 bp, Homo sapien
ttgaagtattactgtccctctttcg

SEQ ID NO: 1990442 - DNA, 25 bp, Homo sapien
aatacagcacttattacttgaagta

SEQ ID NO: 1990443 - DNA, 25 bp, Homo sapien
tacttgaagtattactgtccctctt

SEQ ID NO: 1990444 - DNA, 25 bp, Homo sapien
attacttgaagtattactgtccctc

SEQ ID NO: 1990445 - DNA, 25 bp, Homo sapien
catgcagaatgcgaagagaaactgc

SEQ ID NO: 1990446 - DNA, 25 bp, Homo sapien
aatggagaacgatcctcctcatgca

SEQ ID NO: 1990447 - DNA, 25 bp, Homo sapien
ggtgtctttacgagttgccaagcaa

SEQ ID NO: 1990448 - DNA, 25 bp, Homo sapien
caggtatgcaattctaacatgccca

SEQ ID NO: 1990449 - DNA, 25 bp, Homo sapien
tcatctacaccaataacatccccta

SEQ ID NO: 1990450 - DNA, 25 bp, Homo sapien
tctacaccaataacatcccctatta

SEQ ID NO: 1990451 - DNA, 25 bp, Homo sapien
ctttcatctacaccaataacatccc

SEQ ID NO: 1990452 - DNA, 25 bp, Homo sapien
atctacaccaataacatcccctatt

SEQ ID NO: 1990453 - DNA, 25 bp, Homo sapien
gaactgcaactattacctaagccca

SEQ ID NO: 1990454 - DNA, 25 bp, Homo sapien
ccaaacctcgtgttgaaggaagcat

SEQ ID NO: 1990455 - DNA, 25 bp, Homo sapien
tacaaggttacatatttccagcaca

SEQ ID NO: 1990456 - DNA, 25 bp, Homo sapien
tgaccaagatgtttgccagtgctct

SEQ ID NO: 1990457 - DNA, 25 bp, Homo sapien
tgagattaggtgtggatttttcact

SEQ ID NO: 1990458 - DNA, 25 bp, Homo sapien
tttcacttgtggtatgtcagaacta

SEQ ID NO: 1990459 - DNA, 25 bp, Homo sapien
cttgtggtatgtcagaactaaaaca

SEQ ID NO: 1990460 - DNA, 25 bp, Homo sapien
tcacttgtggtatgtcagaactaaa

SEQ ID NO: 1990461 - DNA, 25 bp, Homo sapien
tttctcctatacctgtggccatttg

SEQ ID NO: 1990462 - DNA, 25 bp, Homo sapien
tagccagatttcttagcatcattta

SEQ ID NO: 1990463 - DNA, 25 bp, Homo sapien
aaatcagttggctacaaacgtgtgg

SEQ ID NO: 1990464 - DNA, 25 bp, Homo sapien
gtctttcacttaagtctttagccca

SEQ ID NO: 1990465 - DNA, 25 bp, Homo sapien
ctgtacctcaacaatacagcacctg

SEQ ID NO: 1990466 - DNA, 25 bp, Homo sapien
cacaggatctgggagctagagggaa

SEQ ID NO: 1990467 - DNA, 25 bp, Homo sapien
cctaaactccgtgtattgtactcca

SEQ ID NO: 1990468 - DNA, 25 bp, Homo sapien
aatgcgcttatatctccttgtccac

SEQ ID NO: 1990469 - DNA, 25 bp, Homo sapien
tgatgcttgcagaagtttaaaattg

SEQ ID NO: 1990470 - DNA, 25 bp, Homo sapien
tatcaacgttcattcgcttaaatga

SEQ ID NO: 1990471 - DNA, 25 bp, Homo sapien
actttcttcaaactaatgcagccag

SEQ ID NO: 1990472 - DNA, 25 bp, Homo sapien
cattcgcttaaatgatgcttgcaga

SEQ ID NO: 1990473 - DNA, 25 bp, Homo sapien
tcgtgcctctacaggatcatactcc

SEQ ID NO: 1990474 - DNA, 25 bp, Homo sapien
aggaggaattgcatcttgcccttgt

SEQ ID NO: 1990475 - DNA, 25 bp, Homo sapien
tgcccttgtcgtgcctctacaggat

SEQ ID NO: 1990476 - DNA, 25 bp, Homo sapien
ttcccatcgtagttagcatcataga

SEQ ID NO: 1990477 - DNA, 25 bp, Homo sapien
gagtttgcatggtgagacttttttg

SEQ ID NO: 1990478 - DNA, 25 bp, Homo sapien
tgtgggggagtttgcatggtgagac

SEQ ID NO: 1990479 - DNA, 25 bp, Homo sapien
agtttgcatggtgagacttttttgg

SEQ ID NO: 1990480 - DNA, 25 bp, Homo sapien
ctgtgggggagtttgcatggtgaga

SEQ ID NO: 1990481 - DNA, 25 bp, Homo sapien
ggaggtaggatgtacagttcacgaa

SEQ ID NO: 1990482 - DNA, 25 bp, Homo sapien
gaagggttagagacgatgatccata

SEQ ID NO: 1990483 - DNA, 25 bp, Homo sapien
agttcatatgctggtctgtactgcc

SEQ ID NO: 1990484 - DNA, 25 bp, Homo sapien
tcaacgacttcacttttggacaaag

SEQ ID NO: 1990485 - DNA, 25 bp, Homo sapien
tatgccctcagtattttaatggacc

SEQ ID NO: 1990486 - DNA, 25 bp, Homo sapien
aattgctgcaatctaggcctatgcc

SEQ ID NO: 1990487 - DNA, 25 bp, Homo sapien
ggttgaatctactcttactgcctcc

SEQ ID NO: 1990488 - DNA, 25 bp, Homo sapien
ggaccaattctctgagggactatta

SEQ ID NO: 1990489 - DNA, 25 bp, Homo sapien
catgaatgaagactaaggtgcatac

SEQ ID NO: 1990490 - DNA, 25 bp, Homo sapien
gcaaacacactctgggtaagtacct

SEQ ID NO: 1990491 - DNA, 25 bp, Homo sapien
ccttgccctaatgagctatgtgcta

SEQ ID NO: 1990492 - DNA, 25 bp, Homo sapien
taaacatggtcaaggtatcaggaac

SEQ ID NO: 1990493 - DNA, 25 bp, Homo sapien
cacagacacgggaggcgagaacctc

SEQ ID NO: 1990494 - DNA, 25 bp, Homo sapien
ggccacccagaagaacggaggtcag

SEQ ID NO: 1990495 - DNA, 25 bp, Homo sapien
tttcatgggccacactcacaccaag

SEQ ID NO: 1990496 - DNA, 25 bp, Homo sapien
ggaggtcagaacaccaagcaccagc

SEQ ID NO: 1990497 - DNA, 25 bp, Homo sapien
tgggctccaaggcataggttccttc

SEQ ID NO: 1990498 - DNA, 25 bp, Homo sapien
tgattaacccataacccaccaatgg

SEQ ID NO: 1990499 - DNA, 25 bp, Homo sapien
aatatgctcagcttcaataaatttg

SEQ ID NO: 1990500 - DNA, 25 bp, Homo sapien
tactgtataaagatgcacaactgca

SEQ ID NO: 1990501 - DNA, 25 bp, Homo sapien
gaaaccttttgtcctcattatattc

SEQ ID NO: 1990502 - DNA, 25 bp, Homo sapien
aagacaatatcctaacatacagcat

SEQ ID NO: 1990503 - DNA, 25 bp, Homo sapien
aataaaagacaatatcctaacatac

SEQ ID NO: 1990504 - DNA, 25 bp, Homo sapien
ctgtcacatgattaagaaatactaa

SEQ ID NO: 1990505 - DNA, 25 bp, Homo sapien
ggtgcaggcgatgaaaatcaggctc

SEQ ID NO: 1990506 - DNA, 25 bp, Homo sapien
tcaggtggtggcctagggccccagg

SEQ ID NO: 1990507 - DNA, 25 bp, Homo sapien
atcaggctcggcaacctctgctgct

SEQ ID NO: 1990508 - DNA, 25 bp, Homo sapien
catgtgggatggaagcaccgcttct

SEQ ID NO: 1990509 - DNA, 25 bp, Homo sapien
aagagcaactatgaagaagcagagg

SEQ ID NO: 1990510 - DNA, 25 bp, Homo sapien
gagcccaacttcaacctgcctgtgt

SEQ ID NO: 1990511 - DNA, 25 bp, Homo sapien
tgctgcagttactgatgctctcccc

SEQ ID NO: 1990512 - DNA, 25 bp, Homo sapien
tcagcagagtctcggccctaaaatg

SEQ ID NO: 1990513 - DNA, 25 bp, Homo sapien
gctttgtgactggtatatgggcttc

SEQ ID NO: 1990514 - DNA, 25 bp, Homo sapien
tcagctctgttgaagcccatataaa

SEQ ID NO: 1990515 - DNA, 25 bp, Homo sapien
tgtcccgctgaccaagttctttaac

SEQ ID NO: 1990516 - DNA, 25 bp, Homo sapien
taaaacactcctggaacactacttc

SEQ ID NO: 1990517 - DNA, 25 bp, Homo sapien
aacatgaggttaatgccattgtccc

SEQ ID NO: 1990518 - DNA, 25 bp, Homo sapien
catgaggttaatgccattgtccctt

SEQ ID NO: 1990519 - DNA, 25 bp, Homo sapien
taacatgaggttaatgccattgtcc

SEQ ID NO: 1990520 - DNA, 25 bp, Homo sapien
agtaacatgaggttaatgccattgt

SEQ ID NO: 1990521 - DNA, 25 bp, Homo sapien
ccagtgatcccttcccatatagaag

SEQ ID NO: 1990522 - DNA, 25 bp, Homo sapien
caacatataagagatacctccagtg

SEQ ID NO: 1990523 - DNA, 25 bp, Homo sapien
tataagagatacctccagtgatccc

SEQ ID NO: 1990524 - DNA, 25 bp, Homo sapien
ttacaacaacatataagagatacct

SEQ ID NO: 1990525 - DNA, 25 bp, Homo sapien
ttatcggatttggatgctgagccac

SEQ ID NO: 1990526 - DNA, 25 bp, Homo sapien
cattaagctgtatgacctgcgtttc

SEQ ID NO: 1990527 - DNA, 25 bp, Homo sapien
ggaagaagcccttttggctgatgag

SEQ ID NO: 1990528 - DNA, 25 bp, Homo sapien
tcgagaaggtgtggatcctggttta

SEQ ID NO: 1990529 - DNA, 25 bp, Homo sapien
ggcgtggccagagctgatgcattac

SEQ ID NO: 1990530 - DNA, 25 bp, Homo sapien
gaggcgtggccagagctgatgcatt

SEQ ID NO: 1990531 - DNA, 25 bp, Homo sapien
ctagaggcgtggccagagctgatgc

SEQ ID NO: 1990532 - DNA, 25 bp, Homo sapien
tagaggcgtggccagagctgatgca

SEQ ID NO: 1990533 - DNA, 25 bp, Homo sapien
gatttgtgactaacactttttattc

SEQ ID NO: 1990534 - DNA, 25 bp, Homo sapien
cctacctcttacacacgtcactgct

SEQ ID NO: 1990535 - DNA, 25 bp, Homo sapien
ccatcttaatgtacagctttgagat

SEQ ID NO: 1990536 - DNA, 25 bp, Homo sapien
tctcacttacttgaaaccaaggatt

SEQ ID NO: 1990537 - DNA, 25 bp, Homo sapien
atgggcaacggtctagcctggagct

SEQ ID NO: 1990538 - DNA, 25 bp, Homo sapien
agtgggcaggatgggcaacggtcta

SEQ ID NO: 1990539 - DNA, 25 bp, Homo sapien
agaagtgggcaggatgggcaacggt

SEQ ID NO: 1990540 - DNA, 25 bp, Homo sapien
ggcaggatgggcaacggtctagcct

SEQ ID NO: 1990541 - DNA, 25 bp, Homo sapien
ttttactacctttatattaccagca

SEQ ID NO: 1990542 - DNA, 25 bp, Homo sapien
gaataagctcaactactaatagctg

SEQ ID NO: 1990543 - DNA, 25 bp, Homo sapien
gaggcagactcaccctaatgcagca

SEQ ID NO: 1990544 - DNA, 25 bp, Homo sapien
ccagcattaagcgtaatatctttca

SEQ ID NO: 1990545 - DNA, 25 bp, Homo sapien
taatcttaggaaagatgagcagtac

SEQ ID NO: 1990546 - DNA, 25 bp, Homo sapien
atgggccctccactacccgttgctt

SEQ ID NO: 1990547 - DNA, 25 bp, Homo sapien
taaaggctcctctcatagcggcagg

SEQ ID NO: 1990548 - DNA, 25 bp, Homo sapien
aaaaggctctcctcgatgggccctc

SEQ ID NO: 1990549 - DNA, 25 bp, Homo sapien
aagtcctacctgctggatggcttgt

SEQ ID NO: 1990550 - DNA, 25 bp, Homo sapien
gccttttaattgagaagaagtcatt

SEQ ID NO: 1990551 - DNA, 25 bp, Homo sapien
tcagcaggtaattagaacattctag

SEQ ID NO: 1990552 - DNA, 25 bp, Homo sapien
gaaacagggctcaaactgagaatca

SEQ ID NO: 1990553 - DNA, 25 bp, Homo sapien
gattcagggttaccctcactgacac

SEQ ID NO: 1990554 - DNA, 25 bp, Homo sapien
cttcctgtgcacctggcaaaccata

SEQ ID NO: 1990555 - DNA, 25 bp, Homo sapien
atcctgtagattcagggttaccctc

SEQ ID NO: 1990556 - DNA, 25 bp, Homo sapien
ggcaaaccatatccatcctgtagat

SEQ ID NO: 1990557 - DNA, 25 bp, Homo sapien
cttcccctcgatcctggttcagagt

SEQ ID NO: 1990558 - DNA, 25 bp, Homo sapien
ccctcgatcctggttcagagtttcc

SEQ ID NO: 1990559 - DNA, 25 bp, Homo sapien
tcccctcgatcctggttcagagttt

SEQ ID NO: 1990560 - DNA, 25 bp, Homo sapien
ctcgatcctggttcagagtttccag

SEQ ID NO: 1990561 - DNA, 25 bp, Homo sapien
ttgtctggagcttgaccctgggcca

SEQ ID NO: 1990562 - DNA, 25 bp, Homo sapien
tctggtcattcccttcaggcaactg

SEQ ID NO: 1990563 - DNA, 25 bp, Homo sapien
gagcgtttattaaccagggacagag

SEQ ID NO: 1990564 - DNA, 25 bp, Homo sapien
taaccaatgtgtaagtctgagggag

SEQ ID NO: 1990565 - DNA, 25 bp, Homo sapien
caagggcaagttttaatgaatgtac

SEQ ID NO: 1990566 - DNA, 25 bp, Homo sapien
tcaagggcaagttttaatgaatgta

SEQ ID NO: 1990567 - DNA, 25 bp, Homo sapien
ttcaagggcaagttttaatgaatgt

SEQ ID NO: 1990568 - DNA, 25 bp, Homo sapien
cttcaagggcaagttttaatgaatg

SEQ ID NO: 1990569 - DNA, 25 bp, Homo sapien
ctgcacgaggtcatcattttcctgc

SEQ ID NO: 1990570 - DNA, 25 bp, Homo sapien
cattagtctctgcacgaggtcatca

SEQ ID NO: 1990571 - DNA, 25 bp, Homo sapien
gagtagctcgatctctctcaacttc

SEQ ID NO: 1990572 - DNA, 25 bp, Homo sapien
attttcctgcccgtgttcttggcag

SEQ ID NO: 1990573 - DNA, 25 bp, Homo sapien
ccataaaggagatgggcatgtggct

SEQ ID NO: 1990574 - DNA, 25 bp, Homo sapien
tctgtcctggcaatgagtaaccaag

SEQ ID NO: 1990575 - DNA, 25 bp, Homo sapien
taaccaagacaaccagctacgaaat

SEQ ID NO: 1990576 - DNA, 25 bp, Homo sapien
catgaagaaggaggaatccgtatac

SEQ ID NO: 1990577 - DNA, 25 bp, Homo sapien
gatgaatgccccgaaaaagaggcca

SEQ ID NO: 1990578 - DNA, 25 bp, Homo sapien
tgaacatcttgctctggtaacccac

SEQ ID NO: 1990579 - DNA, 25 bp, Homo sapien
agcgcagtgccagagatacaacaac

SEQ ID NO: 1990580 - DNA, 25 bp, Homo sapien
cacacagggcgtgttcaactgaaga

SEQ ID NO: 1990581 - DNA, 25 bp, Homo sapien
tgaagtctctgcgtggtcctccagg

SEQ ID NO: 1990582 - DNA, 25 bp, Homo sapien
caaatgccatcttcgctgtgaagtc

SEQ ID NO: 1990583 - DNA, 25 bp, Homo sapien
caacacaaatgccatcttcgctgtg

SEQ ID NO: 1990584 - DNA, 25 bp, Homo sapien
catcttcgctgtgaagtctctgcgt

SEQ ID NO: 1990585 - DNA, 25 bp, Homo sapien
taggcttagataccagagcagcagt

SEQ ID NO: 1990586 - DNA, 25 bp, Homo sapien
catgacaaccatgagtaaagctgct

SEQ ID NO: 1990587 - DNA, 25 bp, Homo sapien
tgtaatataaaagcagcacccctgg

SEQ ID NO: 1990588 - DNA, 25 bp, Homo sapien
ggactttgggacatctacttagact

SEQ ID NO: 1990589 - DNA, 25 bp, Homo sapien
gcgggggctgctgttcgtgggcttg

SEQ ID NO: 1990590 - DNA, 25 bp, Homo sapien
ctgcttccggctcttctgtgtggcc

SEQ ID NO: 1990591 - DNA, 25 bp, Homo sapien
ctctgcttccggctcttctgtgtgg

SEQ ID NO: 1990592 - DNA, 25 bp, Homo sapien
ggctgctgttcgtgggcttgctcct

SEQ ID NO: 1990593 - DNA, 25 bp, Homo sapien
tggtaacggcagattgggaacaact

SEQ ID NO: 1990594 - DNA, 25 bp, Homo sapien
tgggccctgaaatcctagctttgaa

SEQ ID NO: 1990595 - DNA, 25 bp, Homo sapien
tgtatgtgaccctacgatctctcgg

SEQ ID NO: 1990596 - DNA, 25 bp, Homo sapien
taaggtcaatgacaaggagggccct

SEQ ID NO: 1990597 - DNA, 25 bp, Homo sapien
gaatggcctaggaaccactgcagta

SEQ ID NO: 1990598 - DNA, 25 bp, Homo sapien
aataaacgaatggtctgccccaagc

SEQ ID NO: 1990599 - DNA, 25 bp, Homo sapien
gaagtgctataaccagccgacagcg

SEQ ID NO: 1990600 - DNA, 25 bp, Homo sapien
tgttccctgaatgccgagatgagag

SEQ ID NO: 1990601 - DNA, 25 bp, Homo sapien
gctcatgtcgataaatcattgccgt

SEQ ID NO: 1990602 - DNA, 25 bp, Homo sapien
tggacctgcaggagctaggattctg

SEQ ID NO: 1990603 - DNA, 25 bp, Homo sapien
gctgtacttagaaacatctgcctgc

SEQ ID NO: 1990604 - DNA, 25 bp, Homo sapien
tgtcaagcaggtcattctgccacaa

SEQ ID NO: 1990605 - DNA, 25 bp, Homo sapien
cggtgaaaagggtattagctgaagc

SEQ ID NO: 1990606 - DNA, 25 bp, Homo sapien
tagctgaagcccagtaacctgcagg

SEQ ID NO: 1990607 - DNA, 25 bp, Homo sapien
caggctccagggtaacgtctgcatc

SEQ ID NO: 1990608 - DNA, 25 bp, Homo sapien
aggctggcactcttcacggtgaaaa

SEQ ID NO: 1990609 - DNA, 25 bp, Homo sapien
tgatccaaagtaccaatgccacgtg

SEQ ID NO: 1990610 - DNA, 25 bp, Homo sapien
ccaggcttgatgataaaatcgttgc

SEQ ID NO: 1990611 - DNA, 25 bp, Homo sapien
aattaacttcagctgggtcttccat

SEQ ID NO: 1990612 - DNA, 25 bp, Homo sapien
cacgtgagggtcctccagggatcaa

SEQ ID NO: 1990613 - DNA, 25 bp, Homo sapien
ggaagtcaaattgtaaattgtctct

SEQ ID NO: 1990614 - DNA, 25 bp, Homo sapien
aagtcaaattgtaaattgtctctgt

SEQ ID NO: 1990615 - DNA, 25 bp, Homo sapien
gtcaaattgtaaattgtctctgttt

SEQ ID NO: 1990616 - DNA, 25 bp, Homo sapien
taggaatacagtttacaagagacat

SEQ ID NO: 1990617 - DNA, 25 bp, Homo sapien
ctgtggagtccccttcgcaggccct

SEQ ID NO: 1990618 - DNA, 25 bp, Homo sapien
tgctcttgtcctgcgtgtggcctct

SEQ ID NO: 1990619 - DNA, 25 bp, Homo sapien
tccacccttggtcagccttcagctt

SEQ ID NO: 1990620 - DNA, 25 bp, Homo sapien
tctgcctcatccacccttggtcagc

SEQ ID NO: 1990621 - DNA, 25 bp, Homo sapien
gaacagcgcagagtgatgttggtct

SEQ ID NO: 1990622 - DNA, 25 bp, Homo sapien
tgctgttgaacagcgcagagtgatg

SEQ ID NO: 1990623 - DNA, 25 bp, Homo sapien
tctgcagttacagggtctctggaaa

SEQ ID NO: 1990624 - DNA, 25 bp, Homo sapien
tggaggagtcgacacttgtcccatc

SEQ ID NO: 1990625 - DNA, 25 bp, Homo sapien
tgctcttgactgctagaagcactac

SEQ ID NO: 1990626 - DNA, 25 bp, Homo sapien
caatctcaacgtggctgctcttgac

SEQ ID NO: 1990627 - DNA, 25 bp, Homo sapien
tgacttcaccaatctcaacgtggct

SEQ ID NO: 1990628 - DNA, 25 bp, Homo sapien
ttgatatcggcaggacatctccacc

SEQ ID NO: 1990629 - DNA, 25 bp, Homo sapien
tccttccttctgtctatcagctatg

SEQ ID NO: 1990630 - DNA, 25 bp, Homo sapien
ggacagctccatgttttgcattcat

SEQ ID NO: 1990631 - DNA, 25 bp, Homo sapien
ggccctgcatagctggtcgctcagt

SEQ ID NO: 1990632 - DNA, 25 bp, Homo sapien
tcagctatgtcatgccaaggtactt

SEQ ID NO: 1990633 - DNA, 25 bp, Homo sapien
gctctgaggtccttggggattgcct

SEQ ID NO: 1990634 - DNA, 25 bp, Homo sapien
tcagcaccttcagtggctctgaggt

SEQ ID NO: 1990635 - DNA, 25 bp, Homo sapien
tctgaggtccttggggattgccttc

SEQ ID NO: 1990636 - DNA, 25 bp, Homo sapien
tttgccttcagcaccttcagtggct

SEQ ID NO: 1990637 - DNA, 25 bp, Homo sapien
caaaagatcgaatccctggagaccc

SEQ ID NO: 1990638 - DNA, 25 bp, Homo sapien
ctgggcttgcaggtctcgttgttct

SEQ ID NO: 1990639 - DNA, 25 bp, Homo sapien
tgaaaatgtcttaagtcaaaagcac

SEQ ID NO: 1990640 - DNA, 25 bp, Homo sapien
tcaaaagcactgtgcaaaagatcga

SEQ ID NO: 1990641 - DNA, 25 bp, Homo sapien
gaatgcctgtagttagaattgttcc

SEQ ID NO: 1990642 - DNA, 25 bp, Homo sapien
ccatgggaggaagctcggtactgtt

SEQ ID NO: 1990643 - DNA, 25 bp, Homo sapien
tccacccaacaaggaagtggcttga

SEQ ID NO: 1990644 - DNA, 25 bp, Homo sapien
gaattgttccatgtccaaaccactc

SEQ ID NO: 1990645 - DNA, 25 bp, Homo sapien
ttccattattggcttgcaccttgtt

SEQ ID NO: 1990646 - DNA, 25 bp, Homo sapien
gcaatgtcggaacttctcccatcct

SEQ ID NO: 1990647 - DNA, 25 bp, Homo sapien
tattggcttgcaccttgttcactgg

SEQ ID NO: 1990648 - DNA, 25 bp, Homo sapien
ttaaaggcaatgtcggaacttctcc

SEQ ID NO: 1990649 - DNA, 25 bp, Homo sapien
catacgtgtcacaattacctttaga

SEQ ID NO: 1990650 - DNA, 25 bp, Homo sapien
tgatctgtttcaactaggctaaaca

SEQ ID NO: 1990651 - DNA, 25 bp, Homo sapien
tcttcgctggcccagttacctgatc

SEQ ID NO: 1990652 - DNA, 25 bp, Homo sapien
gcttattcatatggtttaggtatcc

SEQ ID NO: 1990653 - DNA, 25 bp, Homo sapien
cacagatctggcaaaagtgtttcca

SEQ ID NO: 1990654 - DNA, 25 bp, Homo sapien
cattgtaccaccaaagaagctgaca

SEQ ID NO: 1990655 - DNA, 25 bp, Homo sapien
caggctgcccagtgtcacagaatga

SEQ ID NO: 1990656 - DNA, 25 bp, Homo sapien
cctgagagtctgtaggtcatgaaac

SEQ ID NO: 1990657 - DNA, 25 bp, Homo sapien
tagagcaggattttgatagtacaga

SEQ ID NO: 1990658 - DNA, 25 bp, Homo sapien
tacagatcagaagtgaagtcaactg

SEQ ID NO: 1990659 - DNA, 25 bp, Homo sapien
tttaatccagcggtctactttagag

SEQ ID NO: 1990660 - DNA, 25 bp, Homo sapien
tcatggcacaggtctttaaatttcg

SEQ ID NO: 1990661 - DNA, 25 bp, Homo sapien
atcttccttcttctgacccatactc

SEQ ID NO: 1990662 - DNA, 25 bp, Homo sapien
tcttccttcttctgacccatactca

SEQ ID NO: 1990663 - DNA, 25 bp, Homo sapien
tgacataccatccaacatcttcctt

SEQ ID NO: 1990664 - DNA, 25 bp, Homo sapien
ccttgacataccatccaacatcttc

SEQ ID NO: 1990665 - DNA, 25 bp, Homo sapien
cccgagctgcaagccacaaagaccg

SEQ ID NO: 1990666 - DNA, 25 bp, Homo sapien
ccaggagcggccaggaaatgagcca

SEQ ID NO: 1990667 - DNA, 25 bp, Homo sapien
aggagcggccaggaaatgagccacc

SEQ ID NO: 1990668 - DNA, 25 bp, Homo sapien
ggagcggccaggaaatgagccaccc

SEQ ID NO: 1990669 - DNA, 25 bp, Homo sapien
caggagcggccaggaaatgagccac

SEQ ID NO: 1990670 - DNA, 25 bp, Homo sapien
aaaccgcagcatttacgaagtcacg

SEQ ID NO: 1990671 - DNA, 25 bp, Homo sapien
tgttgtgacacagaccaaacttgac

SEQ ID NO: 1990672 - DNA, 25 bp, Homo sapien
cctgcttttaggatggcgagatatc

SEQ ID NO: 1990673 - DNA, 25 bp, Homo sapien
tgagttccccagtcgcttggagacg

SEQ ID NO: 1990674 - DNA, 25 bp, Homo sapien
tgcttgcgaaggagtgtgagtaatc

SEQ ID NO: 1990675 - DNA, 25 bp, Homo sapien
gctgaaacagcttagcaaaaagctc

SEQ ID NO: 1990676 - DNA, 25 bp, Homo sapien
cttgcgaaggagtgtgagtaatctc

SEQ ID NO: 1990677 - DNA, 25 bp, Homo sapien
aaagctcagtacaactggttctgtg

SEQ ID NO: 1990678 - DNA, 25 bp, Homo sapien
cactagtattagttcttgttccgga

SEQ ID NO: 1990679 - DNA, 25 bp, Homo sapien
tgagtactcccattctgcttaaatt

SEQ ID NO: 1990680 - DNA, 25 bp, Homo sapien
cttggcaggattgagtactcccatt

SEQ ID NO: 1990681 - DNA, 25 bp, Homo sapien
ggatcctgaggtatcagggttgaaa

SEQ ID NO: 1990682 - DNA, 25 bp, Homo sapien
tagccactgatagcaaagttcctgg

SEQ ID NO: 1990683 - DNA, 25 bp, Homo sapien
gattatgttgctgaacccagatctg

SEQ ID NO: 1990684 - DNA, 25 bp, Homo sapien
cctcgccgctttctggattatgttg

SEQ ID NO: 1990685 - DNA, 25 bp, Homo sapien
tccagtaccagcagttctaagatct

SEQ ID NO: 1990686 - DNA, 25 bp, Homo sapien
ggctgtaaattccttttcccacatc

SEQ ID NO: 1990687 - DNA, 25 bp, Homo sapien
atgctccaggctgtaaattcctttt

SEQ ID NO: 1990688 - DNA, 25 bp, Homo sapien
caggctgtaaattccttttcccaca

SEQ ID NO: 1990689 - DNA, 25 bp, Homo sapien
ctgtaaattccttttcccacatcac

SEQ ID NO: 1990690 - DNA, 25 bp, Homo sapien
tagagacataaaaatttttatccta

SEQ ID NO: 1990691 - DNA, 25 bp, Homo sapien
agtatggctctattagtcacttcag

SEQ ID NO: 1990692 - DNA, 25 bp, Homo sapien
ggttagctttgtgagaaaatcccta

SEQ ID NO: 1990693 - DNA, 25 bp, Homo sapien
tctcaaagaggtcaatgatgacatc

SEQ ID NO: 1990694 - DNA, 25 bp, Homo sapien
attcaagggtatagacaagtatggc

SEQ ID NO: 1990695 - DNA, 25 bp, Homo sapien
ctgttgactcttgggatgctctgag

SEQ ID NO: 1990696 - DNA, 25 bp, Homo sapien
cactgctggtccctgtggactagct

SEQ ID NO: 1990697 - DNA, 25 bp, Homo sapien
tggaggtggatgtctgttgactctt

SEQ ID NO: 1990698 - DNA, 25 bp, Homo sapien
ctgtgtctttaagggctggaggtgg

SEQ ID NO: 1990699 - DNA, 25 bp, Homo sapien
ctaagtgtcaagagtttccagatga

SEQ ID NO: 1990700 - DNA, 25 bp, Homo sapien
gatgctcacatgtggcaagtttgtc

SEQ ID NO: 1990701 - DNA, 25 bp, Homo sapien
gtttgtcaagtgcaattaattctgc

SEQ ID NO: 1990702 - DNA, 25 bp, Homo sapien
taaagcgagcacctctggtttagaa

SEQ ID NO: 1990703 - DNA, 25 bp, Homo sapien
gggtgaatacaaagccgctaaagcg

SEQ ID NO: 1990704 - DNA, 25 bp, Homo sapien
gatggtatggcctttacttgggcta

SEQ ID NO: 1990705 - DNA, 25 bp, Homo sapien
ttatattctcacaccttcgggatgg

SEQ ID NO: 1990706 - DNA, 25 bp, Homo sapien
taggtgcctttagatgtgctccaac

SEQ ID NO: 1990707 - DNA, 25 bp, Homo sapien
tacaggtcttcatgacttggatcct

SEQ ID NO: 1990708 - DNA, 25 bp, Homo sapien
ctctctctcaagtggtttcgcaacc

SEQ ID NO: 1990709 - DNA, 25 bp, Homo sapien
gtctacatctacacttcgaattcca

SEQ ID NO: 1990710 - DNA, 25 bp, Homo sapien
gatgtcactgtcctccagtatcttt

SEQ ID NO: 1990711 - DNA, 25 bp, Homo sapien
acagaagcttctacctacaaagatg

SEQ ID NO: 1990712 - DNA, 25 bp, Homo sapien
catttctcttgtcaccgtcaaaact

SEQ ID NO: 1990713 - DNA, 25 bp, Homo sapien
atttctcttgtcaccgtcaaaactt

SEQ ID NO: 1990714 - DNA, 25 bp, Homo sapien
taattcctcgaaatgaaggttcctg

SEQ ID NO: 1990715 - DNA, 25 bp, Homo sapien
tgagggagtccctgtgatttttctt

SEQ ID NO: 1990716 - DNA, 25 bp, Homo sapien
gagggagtccctgtgatttttcttc

SEQ ID NO: 1990717 - DNA, 25 bp, Homo sapien
gaagatcacttgactaaaactgccc

SEQ ID NO: 1990718 - DNA, 25 bp, Homo sapien
tgagatatgaactttgactgaatgc

SEQ ID NO: 1990719 - DNA, 25 bp, Homo sapien
tacactgataaggttcctccccact

SEQ ID NO: 1990720 - DNA, 25 bp, Homo sapien
ggaccgatctgtgcctgaaagcctt

SEQ ID NO: 1990721 - DNA, 25 bp, Homo sapien
caggtgctccttaaggtcacatagg

SEQ ID NO: 1990722 - DNA, 25 bp, Homo sapien
caggaaaagctttcaagggacactt

SEQ ID NO: 1990723 - DNA, 25 bp, Homo sapien
tagttcctgagacgaagtgcctcac

SEQ ID NO: 1990724 - DNA, 25 bp, Homo sapien
gctgccttgcccattagactgtaga

SEQ ID NO: 1990725 - DNA, 25 bp, Homo sapien
tgtgggttcaaagtctgacctcccc

SEQ ID NO: 1990726 - DNA, 25 bp, Homo sapien
catctgctacatacgtgctgagaaa

SEQ ID NO: 1990727 - DNA, 25 bp, Homo sapien
catgggcatttaggcctcctgctgt

SEQ ID NO: 1990728 - DNA, 25 bp, Homo sapien
caaaagatggttgggcgccatggct

SEQ ID NO: 1990729 - DNA, 25 bp, Homo sapien
tagagtcccaatgtccctgaatccc

SEQ ID NO: 1990730 - DNA, 25 bp, Homo sapien
attcatgtcttaccagcagcattag

SEQ ID NO: 1990731 - DNA, 25 bp, Homo sapien
tcaaaaggcaatgcttaaagcttct

SEQ ID NO: 1990732 - DNA, 25 bp, Homo sapien
ctggtattgattgccagagatggta

SEQ ID NO: 1990733 - DNA, 25 bp, Homo sapien
taagagatcatctacatcagctcct

SEQ ID NO: 1990734 - DNA, 25 bp, Homo sapien
tcctgaaacttggaagagacaagag

SEQ ID NO: 1990735 - DNA, 25 bp, Homo sapien
tgcttatggctatggaatacatgga

SEQ ID NO: 1990736 - DNA, 25 bp, Homo sapien
tcagctcctttaagtgagggtctag

SEQ ID NO: 1990737 - DNA, 25 bp, Homo sapien
tctgagccaaaaagtgtcgggaaac

SEQ ID NO: 1990738 - DNA, 25 bp, Homo sapien
tcgggaaactaaaagagacagtctc

SEQ ID NO: 1990739 - DNA, 25 bp, Homo sapien
gctgagaaggaccaagcttagacct

SEQ ID NO: 1990740 - DNA, 25 bp, Homo sapien
tgtgttcaccagaattaggactctc

SEQ ID NO: 1990741 - DNA, 25 bp, Homo sapien
acaattcggcctctttgtgtccaga

SEQ ID NO: 1990742 - DNA, 25 bp, Homo sapien
ccagaggttgtgcagttatcgagtg

SEQ ID NO: 1990743 - DNA, 25 bp, Homo sapien
tcccaatgcccatagaaacgttgtt

SEQ ID NO: 1990744 - DNA, 25 bp, Homo sapien
cgagtgaggtcgatcagaagtctaa

SEQ ID NO: 1990745 - DNA, 25 bp, Homo sapien
ctctatgagtgctttgactgtggga

SEQ ID NO: 1990746 - DNA, 25 bp, Homo sapien
gcgttgacactagggaaaagctcta

SEQ ID NO: 1990747 - DNA, 25 bp, Homo sapien
tgatattacacaacagagcgttgac

SEQ ID NO: 1990748 - DNA, 25 bp, Homo sapien
tctcatgagagtgaaggaagtttca

SEQ ID NO: 1990749 - DNA, 25 bp, Homo sapien
tgaatgtgtagcctcagcagctatg

SEQ ID NO: 1990750 - DNA, 25 bp, Homo sapien
gatatcgccgggaaaacttcctgga

SEQ ID NO: 1990751 - DNA, 25 bp, Homo sapien
gcaaagtgttgatggcaaagcaaga

SEQ ID NO: 1990752 - DNA, 25 bp, Homo sapien
ttcccaacggatagctgaagaagct

SEQ ID NO: 1990753 - DNA, 25 bp, Homo sapien
tcttgatgtcttcctgatgtataca

SEQ ID NO: 1990754 - DNA, 25 bp, Homo sapien
tatacatctgaggacaaaatttttc

SEQ ID NO: 1990755 - DNA, 25 bp, Homo sapien
gcccagtctctacttgtaatctcta

SEQ ID NO: 1990756 - DNA, 25 bp, Homo sapien
cattgcccttaattttgtccctaca

SEQ ID NO: 1990757 - DNA, 25 bp, Homo sapien
tagcctcatgatatgccttgccaga

SEQ ID NO: 1990758 - DNA, 25 bp, Homo sapien
ttgccagaagtagcgcctgagatgg

SEQ ID NO: 1990759 - DNA, 25 bp, Homo sapien
catttatgcgtggtcccatggccat

SEQ ID NO: 1990760 - DNA, 25 bp, Homo sapien
cacagctttcacctaggtcatgagg

SEQ ID NO: 1990761 - DNA, 25 bp, Homo sapien
tactctaatgagaatctgattgatt

SEQ ID NO: 1990762 - DNA, 25 bp, Homo sapien
gaccttgttttaactaagcctctca

SEQ ID NO: 1990763 - DNA, 25 bp, Homo sapien
tgttttaactaagcctctcactccc

SEQ ID NO: 1990764 - DNA, 25 bp, Homo sapien
ctgaccttgttttaactaagcctct

SEQ ID NO: 1990765 - DNA, 25 bp, Homo sapien
agagtcctcataaaacacaatctat

SEQ ID NO: 1990766 - DNA, 25 bp, Homo sapien
cacaatctatacttgaatgcagtga

SEQ ID NO: 1990767 - DNA, 25 bp, Homo sapien
ccatatgaaatactcccaactttaa

SEQ ID NO: 1990768 - DNA, 25 bp, Homo sapien
tggaaaccctagtaaacatactata

SEQ ID NO: 1990769 - DNA, 25 bp, Homo sapien
cagaaccttagagtatgactgcatt

SEQ ID NO: 1990770 - DNA, 25 bp, Homo sapien
ggacctagcaagaaagtggccatct

SEQ ID NO: 1990771 - DNA, 25 bp, Homo sapien
gggatgatcttgtgaggacctagca

SEQ ID NO: 1990772 - DNA, 25 bp, Homo sapien
taatgccagcgctttaagaggttga

SEQ ID NO: 1990773 - DNA, 25 bp, Homo sapien
tatgaggacctaagcccaaaggcca

SEQ ID NO: 1990774 - DNA, 25 bp, Homo sapien
caagcaggtgctacattaaaacggg

SEQ ID NO: 1990775 - DNA, 25 bp, Homo sapien
ggaactcattgggatgtgcactgct

SEQ ID NO: 1990776 - DNA, 25 bp, Homo sapien
tggacctcggcagttcaccaaagga

SEQ ID NO: 1990777 - DNA, 25 bp, Homo sapien
tcaaagctcagtattctgttattta

SEQ ID NO: 1990778 - DNA, 25 bp, Homo sapien
caaagctcagtattctgttatttaa

SEQ ID NO: 1990779 - DNA, 25 bp, Homo sapien
aagctcagtattctgttatttaatt

SEQ ID NO: 1990780 - DNA, 25 bp, Homo sapien
attcaaagctcagtattctgttatt

SEQ ID NO: 1990781 - DNA, 25 bp, Homo sapien
cctggagccaagaggtattccggca

SEQ ID NO: 1990782 - DNA, 25 bp, Homo sapien
tattccggcagaagttcaggcagtt

SEQ ID NO: 1990783 - DNA, 25 bp, Homo sapien
tgctatgctccctggcaactgggct

SEQ ID NO: 1990784 - DNA, 25 bp, Homo sapien
tatgttttggaccaggactttggcc

SEQ ID NO: 1990785 - DNA, 25 bp, Homo sapien
acgcggccacgggcagctcgagggc

SEQ ID NO: 1990786 - DNA, 25 bp, Homo sapien
gcacgcggccacgggcagctcgagg

SEQ ID NO: 1990787 - DNA, 25 bp, Homo sapien
gcggccacgggcagctcgagggcag

SEQ ID NO: 1990788 - DNA, 25 bp, Homo sapien
cgcggccacgggcagctcgagggca

SEQ ID NO: 1990789 - DNA, 25 bp, Homo sapien
tgaaccactcgaaaggacagtccac

SEQ ID NO: 1990790 - DNA, 25 bp, Homo sapien
ggtaaaacgtgcagcttgtcatgtc

SEQ ID NO: 1990791 - DNA, 25 bp, Homo sapien
gaccctcttgcaaaactctgaccag

SEQ ID NO: 1990792 - DNA, 25 bp, Homo sapien
tgtttgaaccatctgggcgctccct

SEQ ID NO: 1990793 - DNA, 25 bp, Homo sapien
tcttgaggtgaatgtcggaatccat

SEQ ID NO: 1990794 - DNA, 25 bp, Homo sapien
accgggtgacggagggctgccgaga

SEQ ID NO: 1990795 - DNA, 25 bp, Homo sapien
cagtgccttagccagggacctgctt

SEQ ID NO: 1990796 - DNA, 25 bp, Homo sapien
tgcttggccagcgacagatcctttg

SEQ ID NO: 1990797 - DNA, 25 bp, Homo sapien
gctgtgaagcctcacacccggcgaa

SEQ ID NO: 1990798 - DNA, 25 bp, Homo sapien
gtcaccggaccgctgtgaagcctca

SEQ ID NO: 1990799 - DNA, 25 bp, Homo sapien
cacccggcgaacctgccatcgccct

SEQ ID NO: 1990800 - DNA, 25 bp, Homo sapien
tcgacttggtcaccggaccgctgtg

SEQ ID NO: 1990801 - DNA, 25 bp, Homo sapien
caaggactcgagaaaccatgcacag

SEQ ID NO: 1990802 - DNA, 25 bp, Homo sapien
gttaggcaagatcacccggaactcc

SEQ ID NO: 1990803 - DNA, 25 bp, Homo sapien
gaacaaaccgaacactaggccgtga

SEQ ID NO: 1990804 - DNA, 25 bp, Homo sapien
cacagtttcctgctcgttaggcaag

SEQ ID NO: 1990805 - DNA, 25 bp, Homo sapien
taggctgattcgtatggatgcacca

SEQ ID NO: 1990806 - DNA, 25 bp, Homo sapien
gttcattcggttgaacccaaggcca

SEQ ID NO: 1990807 - DNA, 25 bp, Homo sapien
cacagagtttctggcgttcattcgg

SEQ ID NO: 1990808 - DNA, 25 bp, Homo sapien
gctctttcccagtacggtaggctga

SEQ ID NO: 1990809 - DNA, 25 bp, Homo sapien
cagaatgtattaggcttcctcccca

SEQ ID NO: 1990810 - DNA, 25 bp, Homo sapien
cattccccattccaagtctagagat

SEQ ID NO: 1990811 - DNA, 25 bp, Homo sapien
catccaagagccagggattaaccca

SEQ ID NO: 1990812 - DNA, 25 bp, Homo sapien
gtataactggaaagataacgcagag

SEQ ID NO: 1990813 - DNA, 25 bp, Homo sapien
ctggaggcaactgggcaccactggg

SEQ ID NO: 1990814 - DNA, 25 bp, Homo sapien
gatgtaatctctgagactagaccac

SEQ ID NO: 1990815 - DNA, 25 bp, Homo sapien
atgtaatctctgagactagaccacc

SEQ ID NO: 1990816 - DNA, 25 bp, Homo sapien
acagatgtaatctctgagactagac

SEQ ID NO: 1990817 - DNA, 25 bp, Homo sapien
gctgcaactggacacctcagtgtgc

SEQ ID NO: 1990818 - DNA, 25 bp, Homo sapien
attgaactggatctccatgggctgc

SEQ ID NO: 1990819 - DNA, 25 bp, Homo sapien
ttcctgagattcataattgaactgg

SEQ ID NO: 1990820 - DNA, 25 bp, Homo sapien
tgtgcaagtggagaattaccatttc

SEQ ID NO: 1990821 - DNA, 25 bp, Homo sapien
tatagtattagtgtaccccagtgaa

SEQ ID NO: 1990822 - DNA, 25 bp, Homo sapien
tggtcatatgacctgctttcatcaa

SEQ ID NO: 1990823 - DNA, 25 bp, Homo sapien
tctataatgactttagaactggtca

SEQ ID NO: 1990824 - DNA, 25 bp, Homo sapien
tcccagtacccatatccctgtgtag

SEQ ID NO: 1990825 - DNA, 25 bp, Homo sapien
ggagaattctctctcaaccctaact

SEQ ID NO: 1990826 - DNA, 25 bp, Homo sapien
taaaagatgtgcagacccacaagag

SEQ ID NO: 1990827 - DNA, 25 bp, Homo sapien
aatgtcatctgccaagtgcttaagg

SEQ ID NO: 1990828 - DNA, 25 bp, Homo sapien
tgccaacatagacttgcataagaag

SEQ ID NO: 1990829 - DNA, 25 bp, Homo sapien
caaagggatctaaggttggcatgac

SEQ ID NO: 1990830 - DNA, 25 bp, Homo sapien
tatcttgtccatggtatctcgcagg

SEQ ID NO: 1990831 - DNA, 25 bp, Homo sapien
tggagctgtaagagcctggatacga

SEQ ID NO: 1990832 - DNA, 25 bp, Homo sapien
ctctctcgtagggtgccaaagttcc

SEQ ID NO: 1990833 - DNA, 25 bp, Homo sapien
actgaatttcttggctatcagccca

SEQ ID NO: 1990834 - DNA, 25 bp, Homo sapien
tcttgccaacggctccaattagcag

SEQ ID NO: 1990835 - DNA, 25 bp, Homo sapien
gaaaacacattcaattcgggcgaaa

SEQ ID NO: 1990836 - DNA, 25 bp, Homo sapien
taaataaagactagctcaaaggagt

SEQ ID NO: 1990837 - DNA, 25 bp, Homo sapien
caggagatctaggaatactgaaacc

SEQ ID NO: 1990838 - DNA, 25 bp, Homo sapien
taagaaagtttcaggtgacacagat

SEQ ID NO: 1990839 - DNA, 25 bp, Homo sapien
tgaacattaccctctgaggaaacct

SEQ ID NO: 1990840 - DNA, 25 bp, Homo sapien
ctctgtatgtttgtcacaggagatc

SEQ ID NO: 1990841 - DNA, 25 bp, Homo sapien
ataaacaaaatccaaatggaatgtg

SEQ ID NO: 1990842 - DNA, 25 bp, Homo sapien
caataaacaaaatccaaatggaatg

SEQ ID NO: 1990843 - DNA, 25 bp, Homo sapien
ctggaacaataaacaaaatccaaat

SEQ ID NO: 1990844 - DNA, 25 bp, Homo sapien
aaacaaaatccaaatggaatgtgtt

SEQ ID NO: 1990845 - DNA, 25 bp, Homo sapien
gactgctagactcttctgtcaatgg

SEQ ID NO: 1990846 - DNA, 25 bp, Homo sapien
tgagactgctagactcttctgtcaa

SEQ ID NO: 1990847 - DNA, 25 bp, Homo sapien
gagactgctagactcttctgtcaat

SEQ ID NO: 1990848 - DNA, 25 bp, Homo sapien
tctgagactgctagactcttctgtc

SEQ ID NO: 1990849 - DNA, 25 bp, Homo sapien
gtactccaaacaaagctttgcccat

SEQ ID NO: 1990850 - DNA, 25 bp, Homo sapien
tctccttttaaagacgttctgatct

SEQ ID NO: 1990851 - DNA, 25 bp, Homo sapien
cagttatgaggtctccttttaaaga

SEQ ID NO: 1990852 - DNA, 25 bp, Homo sapien
aattcacagaattctttgccttcag

SEQ ID NO: 1990853 - DNA, 25 bp, Homo sapien
gtttctcacagtgcgtttttcgatg

SEQ ID NO: 1990854 - DNA, 25 bp, Homo sapien
cataaggtttctcacagtgcgtttt

SEQ ID NO: 1990855 - DNA, 25 bp, Homo sapien
taaggtttctcacagtgcgtttttc

SEQ ID NO: 1990856 - DNA, 25 bp, Homo sapien
aggtttctcacagtgcgtttttcga

SEQ ID NO: 1990857 - DNA, 25 bp, Homo sapien
tgtttaataaggtctgagctccaac

SEQ ID NO: 1990858 - DNA, 25 bp, Homo sapien
ctgatgtataataagatctgagctc

SEQ ID NO: 1990859 - DNA, 25 bp, Homo sapien
gtataataagatctgagctctgact

SEQ ID NO: 1990860 - DNA, 25 bp, Homo sapien
ctcatcacatttataaggtttttca

SEQ ID NO: 1990861 - DNA, 25 bp, Homo sapien
gatgtataataagatctgagctctg

SEQ ID NO: 1990862 - DNA, 25 bp, Homo sapien
tacaatgacggcattgatagggttt

SEQ ID NO: 1990863 - DNA, 25 bp, Homo sapien
cttttactacaatgacggcattgat

SEQ ID NO: 1990864 - DNA, 25 bp, Homo sapien
agatctgagcgctggctaaaacttt

SEQ ID NO: 1990865 - DNA, 25 bp, Homo sapien
gatctgagcgctggctaaaactttt

SEQ ID NO: 1990866 - DNA, 25 bp, Homo sapien
cagtatggattctctgatgtttaac

SEQ ID NO: 1990867 - DNA, 25 bp, Homo sapien
ccccagtgtggattctttgatgttt

SEQ ID NO: 1990868 - DNA, 25 bp, Homo sapien
cccagtgtggattctttgatgtttt

SEQ ID NO: 1990869 - DNA, 25 bp, Homo sapien
ctgagctctgactgaaggctttccc

SEQ ID NO: 1990870 - DNA, 25 bp, Homo sapien
gatgcagaataagatctgagctctg

SEQ ID NO: 1990871 - DNA, 25 bp, Homo sapien
tgactgaaggctttcccacacacat

SEQ ID NO: 1990872 - DNA, 25 bp, Homo sapien
ctgatgcagaataagatctgagctc

SEQ ID NO: 1990873 - DNA, 25 bp, Homo sapien
ctacactgattacatggatatggtt

SEQ ID NO: 1990874 - DNA, 25 bp, Homo sapien
ctgattacatggatatggtttctcc

SEQ ID NO: 1990875 - DNA, 25 bp, Homo sapien
cactgattacatggatatggtttct

SEQ ID NO: 1990876 - DNA, 25 bp, Homo sapien
gattacatggatatggtttctcccc

SEQ ID NO: 1990877 - DNA, 25 bp, Homo sapien
ccagtgtggatccttcgatgtttaa

SEQ ID NO: 1990878 - DNA, 25 bp, Homo sapien
ggatccttcgatgtttaataaggtc

SEQ ID NO: 1990879 - DNA, 25 bp, Homo sapien
gtgtggatccttcgatgtttaataa

SEQ ID NO: 1990880 - DNA, 25 bp, Homo sapien
gtggatccttcgatgtttaataagg

SEQ ID NO: 1990881 - DNA, 25 bp, Homo sapien
tttgctacattgatcacagggatag

SEQ ID NO: 1990882 - DNA, 25 bp, Homo sapien
gttttgctacattgatcacagggat

SEQ ID NO: 1990883 - DNA, 25 bp, Homo sapien
ttgctacattgatcacagggatagg

SEQ ID NO: 1990884 - DNA, 25 bp, Homo sapien
aggttttgctacattgatcacaggg

SEQ ID NO: 1990885 - DNA, 25 bp, Homo sapien
gatgattaataagatctgaaagcct

SEQ ID NO: 1990886 - DNA, 25 bp, Homo sapien
tgatgattaataagatctgaaagcc

SEQ ID NO: 1990887 - DNA, 25 bp, Homo sapien
gtgaattcgttgatgattaataaga

SEQ ID NO: 1990888 - DNA, 25 bp, Homo sapien
ttcgttgatgattaataagatctga

SEQ ID NO: 1990889 - DNA, 25 bp, Homo sapien
cttcgactaaacattttattgcact

SEQ ID NO: 1990890 - DNA, 25 bp, Homo sapien
ctcatcttcgactaaacattttatt

SEQ ID NO: 1990891 - DNA, 25 bp, Homo sapien
tcttcgactaaacattttattgcac

SEQ ID NO: 1990892 - DNA, 25 bp, Homo sapien
catcttcgactaaacattttattgc

SEQ ID NO: 1990893 - DNA, 25 bp, Homo sapien
gtgtattctttgatgcttaacaaga

SEQ ID NO: 1990894 - DNA, 25 bp, Homo sapien
ctattgcaatgataaggcttttcac

SEQ ID NO: 1990895 - DNA, 25 bp, Homo sapien
tctgaacggcgactaaagcttttag

SEQ ID NO: 1990896 - DNA, 25 bp, Homo sapien
ctgagctttgactaaaacttttatc

SEQ ID NO: 1990897 - DNA, 25 bp, Homo sapien
ctctgatgaagaataaggtcagaac

SEQ ID NO: 1990898 - DNA, 25 bp, Homo sapien
gatgaagaataaggtcagaactctg

SEQ ID NO: 1990899 - DNA, 25 bp, Homo sapien
tgaagaataaggtcagaactctgac

SEQ ID NO: 1990900 - DNA, 25 bp, Homo sapien
ctgatgaagaataaggtcagaactc

SEQ ID NO: 1990901 - DNA, 25 bp, Homo sapien
tcagaacgccgactaaagcttttgc

SEQ ID NO: 1990902 - DNA, 25 bp, Homo sapien
tgagatctgactgaaacttttgctg

SEQ ID NO: 1990903 - DNA, 25 bp, Homo sapien
cacaatggacttcctcatgaatagt

SEQ ID NO: 1990904 - DNA, 25 bp, Homo sapien
gagagttggctacaacttctgctgc

SEQ ID NO: 1990905 - DNA, 25 bp, Homo sapien
ctctggtactgaatagagttggtgt

SEQ ID NO: 1990906 - DNA, 25 bp, Homo sapien
tggtgtacacactaaaggttttctc

SEQ ID NO: 1990907 - DNA, 25 bp, Homo sapien
ttctggtacagtgtctctggtactg

SEQ ID NO: 1990908 - DNA, 25 bp, Homo sapien
tactgaatagagttggtgtacacac

SEQ ID NO: 1990909 - DNA, 25 bp, Homo sapien
gtggttttaatgtagcataagagtt

SEQ ID NO: 1990910 - DNA, 25 bp, Homo sapien
tagcataagagttgaacactgatta

SEQ ID NO: 1990911 - DNA, 25 bp, Homo sapien
aatgtagcataagagttgaacactg

SEQ ID NO: 1990912 - DNA, 25 bp, Homo sapien
ttttaatgtagcataagagttgaac

SEQ ID NO: 1990913 - DNA, 25 bp, Homo sapien
gacttttgactgaatacctcccaca

SEQ ID NO: 1990914 - DNA, 25 bp, Homo sapien
ggttttcccacaactcgcaggactc

SEQ ID NO: 1990915 - DNA, 25 bp, Homo sapien
taaagtaagactctagctgtcaggg

SEQ ID NO: 1990916 - DNA, 25 bp, Homo sapien
gagtatagcatgtttacacacgtgg

SEQ ID NO: 1990917 - DNA, 25 bp, Homo sapien
tagtacctcaacaagttcaacctgg

SEQ ID NO: 1990918 - DNA, 25 bp, Homo sapien
tcctctcagaggtcaaggtagggtg

SEQ ID NO: 1990919 - DNA, 25 bp, Homo sapien
caagggtcttagaagctctgtacca

SEQ ID NO: 1990920 - DNA, 25 bp, Homo sapien
tcacatggttggttctcgaggcaac

SEQ ID NO: 1990921 - DNA, 25 bp, Homo sapien
tttgaagctatctacctggaatcag

SEQ ID NO: 1990922 - DNA, 25 bp, Homo sapien
ctgtggacacccactaagtgcctgt

SEQ ID NO: 1990923 - DNA, 25 bp, Homo sapien
catagatgcttcaggttaagggctc

SEQ ID NO: 1990924 - DNA, 25 bp, Homo sapien
ccagatgtgtatgaggtttccccaa

SEQ ID NO: 1990925 - DNA, 25 bp, Homo sapien
tctgagttcttacaagcatgtccta

SEQ ID NO: 1990926 - DNA, 25 bp, Homo sapien
taatgcatcgtaactgtttgtgtgc

SEQ ID NO: 1990927 - DNA, 25 bp, Homo sapien
tcttcaacaggaaccagtacaatgc

SEQ ID NO: 1990928 - DNA, 25 bp, Homo sapien
taatcagaattgaaccttgactcct

SEQ ID NO: 1990929 - DNA, 25 bp, Homo sapien
aaactgatctgcctaggacttccag

SEQ ID NO: 1990930 - DNA, 25 bp, Homo sapien
tttgcatcagtcgagttaatcacac

SEQ ID NO: 1990931 - DNA, 25 bp, Homo sapien
gagatccctttacgttccatacaag

SEQ ID NO: 1990932 - DNA, 25 bp, Homo sapien
tagactgaacatagggtatcttccc

SEQ ID NO: 1990933 - DNA, 25 bp, Homo sapien
aagagtatattttggccaaggttga

SEQ ID NO: 1990934 - DNA, 25 bp, Homo sapien
cattgttgaactacagggtatgagc

SEQ ID NO: 1990935 - DNA, 25 bp, Homo sapien
ctatgtgtattgacctgaaggaaga

SEQ ID NO: 1990936 - DNA, 25 bp, Homo sapien
ggtacaatgtaagggtcaaacttca

SEQ ID NO: 1990937 - DNA, 25 bp, Homo sapien
caagggagggatgcaacctgtcctg

SEQ ID NO: 1990938 - DNA, 25 bp, Homo sapien
caaaatggcagataagccgagtgcg

SEQ ID NO: 1990939 - DNA, 25 bp, Homo sapien
gagtccctgaggagactgcatcacg

SEQ ID NO: 1990940 - DNA, 25 bp, Homo sapien
gggtcacatcaaccagtcctgctag

SEQ ID NO: 1990941 - DNA, 25 bp, Homo sapien
caaactgacaggactacacactgga

SEQ ID NO: 1990942 - DNA, 25 bp, Homo sapien
ttagtagcaacagattcaaagcagg

SEQ ID NO: 1990943 - DNA, 25 bp, Homo sapien
cactggacagacaaacatcaggaag

SEQ ID NO: 1990944 - DNA, 25 bp, Homo sapien
gatgctttccttaagtccagccagg

SEQ ID NO: 1990945 - DNA, 25 bp, Homo sapien
cagttatcaaaaattacagtatcag

SEQ ID NO: 1990946 - DNA, 25 bp, Homo sapien
cctaattgaggccaaaggtatgaat

SEQ ID NO: 1990947 - DNA, 25 bp, Homo sapien
ccatcatagtgaggggcatggctaa

SEQ ID NO: 1990948 - DNA, 25 bp, Homo sapien
tagcaagcacagtcttttaacctgc

SEQ ID NO: 1990949 - DNA, 25 bp, Homo sapien
catttatatgattatgacccaaaga

SEQ ID NO: 1990950 - DNA, 25 bp, Homo sapien
ttcattcaagggcacccatgagagt

SEQ ID NO: 1990951 - DNA, 25 bp, Homo sapien
gatcttaatataccaactaagctca

SEQ ID NO: 1990952 - DNA, 25 bp, Homo sapien
ttaacaaggaaatctagccatctct

SEQ ID NO: 1990953 - DNA, 25 bp, Homo sapien
tctgttctgattaatataggttatt

SEQ ID NO: 1990954 - DNA, 25 bp, Homo sapien
gtgagccaataaagtccctttcttg

SEQ ID NO: 1990955 - DNA, 25 bp, Homo sapien
taaagttttgtgagccaataaagtc

SEQ ID NO: 1990956 - DNA, 25 bp, Homo sapien
tcttgtttaagataattgaattgag

SEQ ID NO: 1990957 - DNA, 25 bp, Homo sapien
gaatatttctttagtctggagtcca

SEQ ID NO: 1990958 - DNA, 25 bp, Homo sapien
tcccaaaggccttcataactgtatt

SEQ ID NO: 1990959 - DNA, 25 bp, Homo sapien
ctgtggcttaggtgagcatgtgacc

SEQ ID NO: 1990960 - DNA, 25 bp, Homo sapien
ccagtaaggtggatttttggatcaa

SEQ ID NO: 1990961 - DNA, 25 bp, Homo sapien
tcagaaaggattctgaggctaaggc

SEQ ID NO: 1990962 - DNA, 25 bp, Homo sapien
tagtatgagggttggcaaatactgt

SEQ ID NO: 1990963 - DNA, 25 bp, Homo sapien
ggaagcttccctgtggtagatttgt

SEQ ID NO: 1990964 - DNA, 25 bp, Homo sapien
ctgtggtagatttgtcataaatgcc

SEQ ID NO: 1990965 - DNA, 25 bp, Homo sapien
gaaacaagtcagtgtccaataaagc

SEQ ID NO: 1990966 - DNA, 25 bp, Homo sapien
tctactgtttagtggaaaactctgg

SEQ ID NO: 1990967 - DNA, 25 bp, Homo sapien
tagtaataaatgcaaggccagctgg

SEQ ID NO: 1990968 - DNA, 25 bp, Homo sapien
ggttatatctggtgcttggatcaag

SEQ ID NO: 1990969 - DNA, 25 bp, Homo sapien
gctaagagcctcaaaatgaaccata

SEQ ID NO: 1990970 - DNA, 25 bp, Homo sapien
gaaatggtgtcatacctgcctagaa

SEQ ID NO: 1990971 - DNA, 25 bp, Homo sapien
ggcaacaggaattacaaagtctgaa

SEQ ID NO: 1990972 - DNA, 25 bp, Homo sapien
agaggataaaggatggctaagagcc

SEQ ID NO: 1990973 - DNA, 25 bp, Homo sapien
aaaccggtacggcatgttgctgtac

SEQ ID NO: 1990974 - DNA, 25 bp, Homo sapien
gaacgtcatagaatgtacttgcaca

SEQ ID NO: 1990975 - DNA, 25 bp, Homo sapien
ctatggtctgagaaatatgttaggc

SEQ ID NO: 1990976 - DNA, 25 bp, Homo sapien
gcacaaacctaaatggcgtagccta

SEQ ID NO: 1990977 - DNA, 25 bp, Homo sapien
aagtcaaggtgcttatgcgagtgcc

SEQ ID NO: 1990978 - DNA, 25 bp, Homo sapien
tgtcgtaaacaacagcacgggcatg

SEQ ID NO: 1990979 - DNA, 25 bp, Homo sapien
taaaggtccagaagcagtatacagt

SEQ ID NO: 1990980 - DNA, 25 bp, Homo sapien
ggctcattgctagtatgtgtcgtaa

SEQ ID NO: 1990981 - DNA, 25 bp, Homo sapien
agctaagccttgttataacctgcag

SEQ ID NO: 1990982 - DNA, 25 bp, Homo sapien
tggatgactacagcatacactgtgg

SEQ ID NO: 1990983 - DNA, 25 bp, Homo sapien
tccatgagcttttgtctcagatacc

SEQ ID NO: 1990984 - DNA, 25 bp, Homo sapien
atctctattatctctggtacccagg

SEQ ID NO: 1990985 - DNA, 25 bp, Homo sapien
cataagcccccatggttcttgctca

SEQ ID NO: 1990986 - DNA, 25 bp, Homo sapien
tcttgctcactatagaatcctggct

SEQ ID NO: 1990987 - DNA, 25 bp, Homo sapien
ggttcttgctcactatagaatcctg

SEQ ID NO: 1990988 - DNA, 25 bp, Homo sapien
ccccatggttcttgctcactataga

SEQ ID NO: 1990989 - DNA, 25 bp, Homo sapien
tctatcatgttgacaaccatcctct

SEQ ID NO: 1990990 - DNA, 25 bp, Homo sapien
taaatgcaccaccttcaacagcttg

SEQ ID NO: 1990991 - DNA, 25 bp, Homo sapien
tctggttcccagtcctctatcatgt

SEQ ID NO: 1990992 - DNA, 25 bp, Homo sapien
aacacctcagctactgacacccaca

SEQ ID NO: 1990993 - DNA, 25 bp, Homo sapien
ggagtcatcaaagccatgggagtca

SEQ ID NO: 1990994 - DNA, 25 bp, Homo sapien
gagtcatcaaagccatgggagtcaa

SEQ ID NO: 1990995 - DNA, 25 bp, Homo sapien
gtcatcaaagccatgggagtcaaag

SEQ ID NO: 1990996 - DNA, 25 bp, Homo sapien
agtcatcaaagccatgggagtcaaa

SEQ ID NO: 1990997 - DNA, 25 bp, Homo sapien
acaggtccgggtggcacttggtatc

SEQ ID NO: 1990998 - DNA, 25 bp, Homo sapien
tgctccctgtagttcccatgatgct

SEQ ID NO: 1990999 - DNA, 25 bp, Homo sapien
tgccctaagacactgtaaagagacc

SEQ ID NO: 1991000 - DNA, 25 bp, Homo sapien
tccagttgcccaggaatgagtcgtg

SEQ ID NO: 1991001 - DNA, 25 bp, Homo sapien
tgagaaagagtgtgaaccagggccc

SEQ ID NO: 1991002 - DNA, 25 bp, Homo sapien
ctatgaggaccagagggtccagaaa

SEQ ID NO: 1991003 - DNA, 25 bp, Homo sapien
tgaagacagccagccgagtgagaaa

SEQ ID NO: 1991004 - DNA, 25 bp, Homo sapien
tgggagttgtcttctaggttctgag

SEQ ID NO: 1991005 - DNA, 25 bp, Homo sapien
agcccttgctcattaactgatcctg

SEQ ID NO: 1991006 - DNA, 25 bp, Homo sapien
ccttgctcattaactgatcctgtac

SEQ ID NO: 1991007 - DNA, 25 bp, Homo sapien
gcccttgctcattaactgatcctgt

SEQ ID NO: 1991008 - DNA, 25 bp, Homo sapien
tgctcattaactgatcctgtactga

SEQ ID NO: 1991009 - DNA, 25 bp, Homo sapien
gacattgtttttgcgggagagctgt

SEQ ID NO: 1991010 - DNA, 25 bp, Homo sapien
tttgcgggagagctgtgaattctga

SEQ ID NO: 1991011 - DNA, 25 bp, Homo sapien
ttctgaagattaggttgcttctcac

SEQ ID NO: 1991012 - DNA, 25 bp, Homo sapien
ctgtgaattctgaagattaggttgc

SEQ ID NO: 1991013 - DNA, 25 bp, Homo sapien
gggaggacagtggaaacaggccctg

SEQ ID NO: 1991014 - DNA, 25 bp, Homo sapien
cttcccaataacaaaccgagagcgg

SEQ ID NO: 1991015 - DNA, 25 bp, Homo sapien
tgctttggggaattaggcaccaggt

SEQ ID NO: 1991016 - DNA, 25 bp, Homo sapien
cagcctgtgcaagtggcagctgcct

SEQ ID NO: 1991017 - DNA, 25 bp, Homo sapien
taggacaggtctgcagaaagcccat

SEQ ID NO: 1991018 - DNA, 25 bp, Homo sapien
tgttaggacaggtctgcagaaagcc

SEQ ID NO: 1991019 - DNA, 25 bp, Homo sapien
ttaggacaggtctgcagaaagccca

SEQ ID NO: 1991020 - DNA, 25 bp, Homo sapien
ctttgttaggacaggtctgcagaaa

SEQ ID NO: 1991021 - DNA, 25 bp, Homo sapien
ggatctggccgcctatcttcctccc

SEQ ID NO: 1991022 - DNA, 25 bp, Homo sapien
accacagtgactgctcaagtgcttc

SEQ ID NO: 1991023 - DNA, 25 bp, Homo sapien
tggatctggccgcctatcttcctcc

SEQ ID NO: 1991024 - DNA, 25 bp, Homo sapien
cagtgactgctcaagtgcttctggg

SEQ ID NO: 1991025 - DNA, 25 bp, Homo sapien
tagtcattcattcgtctgggtgtgg

SEQ ID NO: 1991026 - DNA, 25 bp, Homo sapien
gcccatgtagtgtgagatcgtgaaa

SEQ ID NO: 1991027 - DNA, 25 bp, Homo sapien
aaaatagctggtgggcagatgagct

SEQ ID NO: 1991028 - DNA, 25 bp, Homo sapien
ggtgctcagatccagttattggctc

SEQ ID NO: 1991029 - DNA, 25 bp, Homo sapien
ttcaggaagttaactctgatacaac

SEQ ID NO: 1991030 - DNA, 25 bp, Homo sapien
ggtgttaacagaggagggcccagat

SEQ ID NO: 1991031 - DNA, 25 bp, Homo sapien
gacagttaggaaagaccgtgcatgg

SEQ ID NO: 1991032 - DNA, 25 bp, Homo sapien
tttagtctcctgtaatcagaacact

SEQ ID NO: 1991033 - DNA, 25 bp, Homo sapien
caggccgggttttcaagcatcaaga

SEQ ID NO: 1991034 - DNA, 25 bp, Homo sapien
gagagaagccagctacagcttggag

SEQ ID NO: 1991035 - DNA, 25 bp, Homo sapien
tccgagctccgccttttagattgca

SEQ ID NO: 1991036 - DNA, 25 bp, Homo sapien
gcatcaagacggaagtaacagcgga

SEQ ID NO: 1991037 - DNA, 25 bp, Homo sapien
aggaccctggagcacgctgtgcagg

SEQ ID NO: 1991038 - DNA, 25 bp, Homo sapien
cagcttgggttgcatctctccttct

SEQ ID NO: 1991039 - DNA, 25 bp, Homo sapien
aatggtcaagactggagccacactg

SEQ ID NO: 1991040 - DNA, 25 bp, Homo sapien
gattccttctcactatgcagtaagt

SEQ ID NO: 1991041 - DNA, 25 bp, Homo sapien
taagtgtccctgatagctgagatca

SEQ ID NO: 1991042 - DNA, 25 bp, Homo sapien
gccacactgacaggagcaacatttc

SEQ ID NO: 1991043 - DNA, 25 bp, Homo sapien
caggagtgtgggcagtcctctttgc

SEQ ID NO: 1991044 - DNA, 25 bp, Homo sapien
ccttctctttaacctgagcatagag

SEQ ID NO: 1991045 - DNA, 25 bp, Homo sapien
ggcactcatcacagcgtggaggcag

SEQ ID NO: 1991046 - DNA, 25 bp, Homo sapien
ccatcttccctgcacagggcactca

SEQ ID NO: 1991047 - DNA, 25 bp, Homo sapien
ccgccagaatcgttgaattggtgaa

SEQ ID NO: 1991048 - DNA, 25 bp, Homo sapien
tagacacctgtaagaagagttccgc

SEQ ID NO: 1991049 - DNA, 25 bp, Homo sapien
gttggaagtaaccaatagacacctg

SEQ ID NO: 1991050 - DNA, 25 bp, Homo sapien
gacaagtgtgaattggtggaatagt

SEQ ID NO: 1991051 - DNA, 25 bp, Homo sapien
tcacacgacgaagagtgtggatgta

SEQ ID NO: 1991052 - DNA, 25 bp, Homo sapien
caggaagcatgcgaaaaatcacacg

SEQ ID NO: 1991053 - DNA, 25 bp, Homo sapien
ggatcaataagccaagctatcatac

SEQ ID NO: 1991054 - DNA, 25 bp, Homo sapien
ctattgagtcccacgtatcgaagac

SEQ ID NO: 1991055 - DNA, 25 bp, Homo sapien
gaattctctgtctagccctaccact

SEQ ID NO: 1991056 - DNA, 25 bp, Homo sapien
tagccctaccactcaccgagtcctt

SEQ ID NO: 1991057 - DNA, 25 bp, Homo sapien
ccataagaattctctgtctagccct

SEQ ID NO: 1991058 - DNA, 25 bp, Homo sapien
taagaattctctgtctagccctacc

SEQ ID NO: 1991059 - DNA, 25 bp, Homo sapien
tggagcgctgtcagccgcgctgagc

SEQ ID NO: 1991060 - DNA, 25 bp, Homo sapien
aattccaatacccagctgtaccctg

SEQ ID NO: 1991061 - DNA, 25 bp, Homo sapien
tgagcctgcgcctggcgaccgcgat

SEQ ID NO: 1991062 - DNA, 25 bp, Homo sapien
ggaaacactgcttggtacaattcca

SEQ ID NO: 1991063 - DNA, 25 bp, Homo sapien
tgttgcgcgtcgagcaggtcacggg

SEQ ID NO: 1991064 - DNA, 25 bp, Homo sapien
agacaactcgggctgttgcgcgtcg

SEQ ID NO: 1991065 - DNA, 25 bp, Homo sapien
gatggaggagccctcacagcggatc

SEQ ID NO: 1991066 - DNA, 25 bp, Homo sapien
gaggagccctcacagcggatcggct

SEQ ID NO: 1991067 - DNA, 25 bp, Homo sapien
gcggcggcaggcgtcctccgggccg

SEQ ID NO: 1991068 - DNA, 25 bp, Homo sapien
cggcggcaggcgtcctccgggccgg

SEQ ID NO: 1991069 - DNA, 25 bp, Homo sapien
agctgccaaccagagacgccgcgtg

SEQ ID NO: 1991070 - DNA, 25 bp, Homo sapien
cagcgccggccacaaagggaccggg

SEQ ID NO: 1991071 - DNA, 25 bp, Homo sapien
caaactaggacggaaactcgctgct

SEQ ID NO: 1991072 - DNA, 25 bp, Homo sapien
tgtccaacggcaccggggtcccaga

SEQ ID NO: 1991073 - DNA, 25 bp, Homo sapien
cccgcaaaaataaaggccatatgtg

SEQ ID NO: 1991074 - DNA, 25 bp, Homo sapien
tgcaagtcaataaacttgacacatc

SEQ ID NO: 1991075 - DNA, 25 bp, Homo sapien
gaatgttaatggtatagaaggatca

SEQ ID NO: 1991076 - DNA, 25 bp, Homo sapien
tatagaaggatcatacccctccccg

SEQ ID NO: 1991077 - DNA, 25 bp, Homo sapien
ggtcctctgagtcctaatttacgca

SEQ ID NO: 1991078 - DNA, 25 bp, Homo sapien
gaagacatacacacggccaataagc

SEQ ID NO: 1991079 - DNA, 25 bp, Homo sapien
taacatgccagattgagggactagc

SEQ ID NO: 1991080 - DNA, 25 bp, Homo sapien
tgccagtgccatttacagagaagtt

SEQ ID NO: 1991081 - DNA, 25 bp, Homo sapien
gctatgagaagccagacactaatgg

SEQ ID NO: 1991082 - DNA, 25 bp, Homo sapien
ccagaggctacatgatatgcagtat

SEQ ID NO: 1991083 - DNA, 25 bp, Homo sapien
tatgccaagtcaccatttgcctgtt

SEQ ID NO: 1991084 - DNA, 25 bp, Homo sapien
gtttactgtcattccctcctaagca

SEQ ID NO: 1991085 - DNA, 25 bp, Homo sapien
taagagggctcgtttcactgttctg

SEQ ID NO: 1991086 - DNA, 25 bp, Homo sapien
tatggttacagggttcctcagtggc

SEQ ID NO: 1991087 - DNA, 25 bp, Homo sapien
gagacgatgctaactgccacagaga

SEQ ID NO: 1991088 - DNA, 25 bp, Homo sapien
gagaacagtagccacagacaggaaa

SEQ ID NO: 1991089 - DNA, 25 bp, Homo sapien
acacaacggatggagctgcaaggac

SEQ ID NO: 1991090 - DNA, 25 bp, Homo sapien
tacagggacctttgcgatgctgcca

SEQ ID NO: 1991091 - DNA, 25 bp, Homo sapien
catagctgccatatcctgagaggaa

SEQ ID NO: 1991092 - DNA, 25 bp, Homo sapien
gatgctgccaaacctaatgctaaca

SEQ ID NO: 1991093 - DNA, 25 bp, Homo sapien
caaagtggtttttcaaatgaattca

SEQ ID NO: 1991094 - DNA, 25 bp, Homo sapien
aatgaattcatatcccaaatccaca

SEQ ID NO: 1991095 - DNA, 25 bp, Homo sapien
ggtttttcaaatgaattcatatccc

SEQ ID NO: 1991096 - DNA, 25 bp, Homo sapien
tcccaaatccacatgtcccacatct

SEQ ID NO: 1991097 - DNA, 25 bp, Homo sapien
tcagctactgaagcttgcgcattcg

SEQ ID NO: 1991098 - DNA, 25 bp, Homo sapien
ctgaagcttgcgcattcgtcatgta

SEQ ID NO: 1991099 - DNA, 25 bp, Homo sapien
cgtcatgtagttctcgtgctgtggt

SEQ ID NO: 1991100 - DNA, 25 bp, Homo sapien
tcgtcatgtagttctcgtgctgtgg

SEQ ID NO: 1991101 - DNA, 25 bp, Homo sapien
ctatgtgatcaattttggagtaact

SEQ ID NO: 1991102 - DNA, 25 bp, Homo sapien
tgatcaattttggagtaactgcggt

SEQ ID NO: 1991103 - DNA, 25 bp, Homo sapien
attttggagtaactgcggtgtggtg

SEQ ID NO: 1991104 - DNA, 25 bp, Homo sapien
caattttggagtaactgcggtgtgg

SEQ ID NO: 1991105 - DNA, 25 bp, Homo sapien
aggtgcctgccatcagcctcccgag

SEQ ID NO: 1991106 - DNA, 25 bp, Homo sapien
acgccctgctcattttttgaatttg

SEQ ID NO: 1991107 - DNA, 25 bp, Homo sapien
ccacgccctgctcattttttgaatt

SEQ ID NO: 1991108 - DNA, 25 bp, Homo sapien
caccacgccctgctcattttttgaa

SEQ ID NO: 1991109 - DNA, 25 bp, Homo sapien
cagtattttctacggccaaatgatt

SEQ ID NO: 1991110 - DNA, 25 bp, Homo sapien
gattaatcagtattttctacggcca

SEQ ID NO: 1991111 - DNA, 25 bp, Homo sapien
acgcctaaccctgatcctattctta

SEQ ID NO: 1991112 - DNA, 25 bp, Homo sapien
ttcccaaagattaatcagtattttc

SEQ ID NO: 1991113 - DNA, 25 bp, Homo sapien
tattccaatccagtttcatcagaaa

SEQ ID NO: 1991114 - DNA, 25 bp, Homo sapien
tacaaagatcatgaaaattattcca

SEQ ID NO: 1991115 - DNA, 25 bp, Homo sapien
ggcactttaagtcaaatgcaaaatt

SEQ ID NO: 1991116 - DNA, 25 bp, Homo sapien
tttcatcagaaatcacgttcatacc

SEQ ID NO: 1991117 - DNA, 25 bp, Homo sapien
taggaccaccttgcagtatgcaaat

SEQ ID NO: 1991118 - DNA, 25 bp, Homo sapien
gcagcaggaacatatccaagagtac

SEQ ID NO: 1991119 - DNA, 25 bp, Homo sapien
aggaggtggctaggaccaccttgca

SEQ ID NO: 1991120 - DNA, 25 bp, Homo sapien
aagagtacccaaatcaaggaggtgg

SEQ ID NO: 1991121 - DNA, 25 bp, Homo sapien
taactttctgctacttcaacatcct

SEQ ID NO: 1991122 - DNA, 25 bp, Homo sapien
actttctgctacttcaacatccttg

SEQ ID NO: 1991123 - DNA, 25 bp, Homo sapien
tgctacttcaacatccttgtcaatt

SEQ ID NO: 1991124 - DNA, 25 bp, Homo sapien
tctgctacttcaacatccttgtcaa

SEQ ID NO: 1991125 - DNA, 25 bp, Homo sapien
cctctttaggaatgacgactggttt

SEQ ID NO: 1991126 - DNA, 25 bp, Homo sapien
gcaatcatctcacttgccattaaat

SEQ ID NO: 1991127 - DNA, 25 bp, Homo sapien
ggtaaagatctgttgagtgcaatca

SEQ ID NO: 1991128 - DNA, 25 bp, Homo sapien
ccttcatgaggcttttgtactggct

SEQ ID NO: 1991129 - DNA, 25 bp, Homo sapien
ggtgtggatccatcataaaaagttc

SEQ ID NO: 1991130 - DNA, 25 bp, Homo sapien
ccaatgcctgaaatacatagtgcta

SEQ ID NO: 1991131 - DNA, 25 bp, Homo sapien
tagagaggtcaatataacggctgcc

SEQ ID NO: 1991132 - DNA, 25 bp, Homo sapien
ttaagaacaatcagcactcaagtgc

SEQ ID NO: 1991133 - DNA, 25 bp, Homo sapien
caaatatatcaagtcataatacatg

SEQ ID NO: 1991134 - DNA, 25 bp, Homo sapien
tagatcaagtcataatatacacaaa

SEQ ID NO: 1991135 - DNA, 25 bp, Homo sapien
gtcataatacatgtagatcaagtca

SEQ ID NO: 1991136 - DNA, 25 bp, Homo sapien
tatggttcaacctaaaagaagttca

SEQ ID NO: 1991137 - DNA, 25 bp, Homo sapien
gacagttcgcagaagtgtgctccaa

SEQ ID NO: 1991138 - DNA, 25 bp, Homo sapien
gctccaagcctcattgtggaaaaca

SEQ ID NO: 1991139 - DNA, 25 bp, Homo sapien
tcttggtgagcgattaatgacacta

SEQ ID NO: 1991140 - DNA, 25 bp, Homo sapien
caccacacttgttgtaggaagatta

SEQ ID NO: 1991141 - DNA, 25 bp, Homo sapien
taagaggttatgctcctcaggacac

SEQ ID NO: 1991142 - DNA, 25 bp, Homo sapien
taactgcaaggccaaatagagatcc

SEQ ID NO: 1991143 - DNA, 25 bp, Homo sapien
gaaatgctggactgttaactgcaag

SEQ ID NO: 1991144 - DNA, 25 bp, Homo sapien
caggacacaggcaagcatataggat

SEQ ID NO: 1991145 - DNA, 25 bp, Homo sapien
gatcacttggcctttagacacagca

SEQ ID NO: 1991146 - DNA, 25 bp, Homo sapien
tctgatcaatccagaacgttgttcc

SEQ ID NO: 1991147 - DNA, 25 bp, Homo sapien
gaattacatgaactggtacttttag

SEQ ID NO: 1991148 - DNA, 25 bp, Homo sapien
cgttgttccattcgaattacatgaa

SEQ ID NO: 1991149 - DNA, 25 bp, Homo sapien
tttgatcctggccaagagaggctcc

SEQ ID NO: 1991150 - DNA, 25 bp, Homo sapien
tcacctgaggcaggacctaggtttt

SEQ ID NO: 1991151 - DNA, 25 bp, Homo sapien
tcaagagcccagctttatacaggtg

SEQ ID NO: 1991152 - DNA, 25 bp, Homo sapien
tcaaggcagaagcttagtgacccca

SEQ ID NO: 1991153 - DNA, 25 bp, Homo sapien
gcagaaaccctaccagcgaaagctg

SEQ ID NO: 1991154 - DNA, 25 bp, Homo sapien
tacgctaaaccaagcagtcatgata

SEQ ID NO: 1991155 - DNA, 25 bp, Homo sapien
ttttttacacgcatacgtgcacgtg

SEQ ID NO: 1991156 - DNA, 25 bp, Homo sapien
gagatttttgtactagcattcatga

SEQ ID NO: 1991157 - DNA, 25 bp, Homo sapien
cattatctatgggagtgatcagagg

SEQ ID NO: 1991158 - DNA, 25 bp, Homo sapien
catcgatgatgggacacaccactgt

SEQ ID NO: 1991159 - DNA, 25 bp, Homo sapien
aacaggataccagcgaaaattgagc

SEQ ID NO: 1991160 - DNA, 25 bp, Homo sapien
gagcctgccatgtactcaaaagtat

SEQ ID NO: 1991161 - DNA, 25 bp, Homo sapien
ccataggtcatatcagagcctgcca

SEQ ID NO: 1991162 - DNA, 25 bp, Homo sapien
tgttccaatttcctgaaagtaatct

SEQ ID NO: 1991163 - DNA, 25 bp, Homo sapien
tccaatttcctgaaagtaatctctg

SEQ ID NO: 1991164 - DNA, 25 bp, Homo sapien
atatgttccaatttcctgaaagtaa

SEQ ID NO: 1991165 - DNA, 25 bp, Homo sapien
caatttcctgaaagtaatctctgtc

SEQ ID NO: 1991166 - DNA, 25 bp, Homo sapien
ccctgtgcctcctggaaacgtgtaa

SEQ ID NO: 1991167 - DNA, 25 bp, Homo sapien
gaaacacatgtccaacatgtgagca

SEQ ID NO: 1991168 - DNA, 25 bp, Homo sapien
gtaaggtgtagctttccgaaacaca

SEQ ID NO: 1991169 - DNA, 25 bp, Homo sapien
tctgcaagtcgtctgttatttttat

SEQ ID NO: 1991170 - DNA, 25 bp, Homo sapien
gacgatatatctccataatctacct

SEQ ID NO: 1991171 - DNA, 25 bp, Homo sapien
gatatatattctctaggtaccagga

SEQ ID NO: 1991172 - DNA, 25 bp, Homo sapien
cattgtagtttgtgtcttagaccaa

SEQ ID NO: 1991173 - DNA, 25 bp, Homo sapien
tcccaatgagaaatagtgacgtgga

SEQ ID NO: 1991174 - DNA, 25 bp, Homo sapien
taagggcgtacaaggcttaaggcca

SEQ ID NO: 1991175 - DNA, 25 bp, Homo sapien
cctgggctgcactatggtgggtact

SEQ ID NO: 1991176 - DNA, 25 bp, Homo sapien
tcagaagcataagatccctgggctg

SEQ ID NO: 1991177 - DNA, 25 bp, Homo sapien
gaatgacctccaatctagaaatgac

SEQ ID NO: 1991178 - DNA, 25 bp, Homo sapien
aaagaatttcgctcagattgggcca

SEQ ID NO: 1991179 - DNA, 25 bp, Homo sapien
tctataacccgagcactttaagagg

SEQ ID NO: 1991180 - DNA, 25 bp, Homo sapien
tctcagggtccaatacattatatgt

SEQ ID NO: 1991181 - DNA, 25 bp, Homo sapien
gacgatgatggctatctcacttgaa

SEQ ID NO: 1991182 - DNA, 25 bp, Homo sapien
tatctagacactgattcgtttccac

SEQ ID NO: 1991183 - DNA, 25 bp, Homo sapien
tagccatgttatctagacactgatt

SEQ ID NO: 1991184 - DNA, 25 bp, Homo sapien
catgttatctagacactgattcgtt

SEQ ID NO: 1991185 - DNA, 25 bp, Homo sapien
ttctagccatgttatctagacactg

SEQ ID NO: 1991186 - DNA, 25 bp, Homo sapien
tggcatttgagcattgtaactgggc

SEQ ID NO: 1991187 - DNA, 25 bp, Homo sapien
ggtcatactcccagagttggttgcc

SEQ ID NO: 1991188 - DNA, 25 bp, Homo sapien
tgagcattgtaactgggccattaag

SEQ ID NO: 1991189 - DNA, 25 bp, Homo sapien
actgggtcatactcccagagttggt

SEQ ID NO: 1991190 - DNA, 25 bp, Homo sapien
ttttattactataggcaactgcata

SEQ ID NO: 1991191 - DNA, 25 bp, Homo sapien
ttactataggcaactgcataactta

SEQ ID NO: 1991192 - DNA, 25 bp, Homo sapien
tattactataggcaactgcataact

SEQ ID NO: 1991193 - DNA, 25 bp, Homo sapien
tactataggcaactgcataacttac

SEQ ID NO: 1991194 - DNA, 25 bp, Homo sapien
tagtcatactatctggctgctcaga

SEQ ID NO: 1991195 - DNA, 25 bp, Homo sapien
tactgtgcaaagaaacctggatcga

SEQ ID NO: 1991196 - DNA, 25 bp, Homo sapien
tcaaaaatagcgtggtactgtgcaa

SEQ ID NO: 1991197 - DNA, 25 bp, Homo sapien
tagtaaagtctacctgcatcctaga

SEQ ID NO: 1991198 - DNA, 25 bp, Homo sapien
tgcagtctctaatgctgggcacctg

SEQ ID NO: 1991199 - DNA, 25 bp, Homo sapien
gcagggtgacgtttcgaagaagcca

SEQ ID NO: 1991200 - DNA, 25 bp, Homo sapien
gattactgttcacatgctgcagggt

SEQ ID NO: 1991201 - DNA, 25 bp, Homo sapien
ggcacctggctatcctcttctgtgg

SEQ ID NO: 1991202 - DNA, 25 bp, Homo sapien
taaaaggtacagttctccagaaagc

SEQ ID NO: 1991203 - DNA, 25 bp, Homo sapien
tactggctaccagttctaatcagga

SEQ ID NO: 1991204 - DNA, 25 bp, Homo sapien
ttcattatgacagcacgttcagcag

SEQ ID NO: 1991205 - DNA, 25 bp, Homo sapien
tcacgtccatggacaggaaggctgg

SEQ ID NO: 1991206 - DNA, 25 bp, Homo sapien
gatttagcctaaataagatttagga

SEQ ID NO: 1991207 - DNA, 25 bp, Homo sapien
aattgacaactttcaattgacactc

SEQ ID NO: 1991208 - DNA, 25 bp, Homo sapien
ttttaattgacaactttcaattgac

SEQ ID NO: 1991209 - DNA, 25 bp, Homo sapien
taaaactgatttagcctaaataaga

SEQ ID NO: 1991210 - DNA, 25 bp, Homo sapien
gaattaacacagctcatggaaaagg

SEQ ID NO: 1991211 - DNA, 25 bp, Homo sapien
tattcaagcattaggcctactggag

SEQ ID NO: 1991212 - DNA, 25 bp, Homo sapien
cattagcgatgcgacttttggaaac

SEQ ID NO: 1991213 - DNA, 25 bp, Homo sapien
tgcctgcagtgaaagtccttgataa

SEQ ID NO: 1991214 - DNA, 25 bp, Homo sapien
aaggcaatgggattatctatcaggt

SEQ ID NO: 1991215 - DNA, 25 bp, Homo sapien
tataatagagtgataagcatctgcc

SEQ ID NO: 1991216 - DNA, 25 bp, Homo sapien
gccctcaagtggtcctatcgtctca

SEQ ID NO: 1991217 - DNA, 25 bp, Homo sapien
gaaataagaccaagctatgctggag

SEQ ID NO: 1991218 - DNA, 25 bp, Homo sapien
gtgaatagatttgtgagattcaaat

SEQ ID NO: 1991219 - DNA, 25 bp, Homo sapien
actggggtggggtgaatagatttgt

SEQ ID NO: 1991220 - DNA, 25 bp, Homo sapien
gactggggtggggtgaatagatttg

SEQ ID NO: 1991221 - DNA, 25 bp, Homo sapien
ttccaaatggcttaaaaagtgactc

SEQ ID NO: 1991222 - DNA, 25 bp, Homo sapien
tgacattgggtagtacaagtgctcc

SEQ ID NO: 1991223 - DNA, 25 bp, Homo sapien
gctaggatatagatacacaactgaa

SEQ ID NO: 1991224 - DNA, 25 bp, Homo sapien
aaactgtgcatggtatgaagaaggc

SEQ ID NO: 1991225 - DNA, 25 bp, Homo sapien
atcacaggtgttagctattaagccc

SEQ ID NO: 1991226 - DNA, 25 bp, Homo sapien
gcagactagtatccaatgtataaac

SEQ ID NO: 1991227 - DNA, 25 bp, Homo sapien
taccattacttgattatctattagc

SEQ ID NO: 1991228 - DNA, 25 bp, Homo sapien
tctttcaattgcagactagtatcca

SEQ ID NO: 1991229 - DNA, 25 bp, Homo sapien
cctaggttgtggtagattcagacac

SEQ ID NO: 1991230 - DNA, 25 bp, Homo sapien
taataaggccatcagtcatactggg

SEQ ID NO: 1991231 - DNA, 25 bp, Homo sapien
catctaggtcactagtgggtctgct

SEQ ID NO: 1991232 - DNA, 25 bp, Homo sapien
catactgggctagggttcaccgtaa

SEQ ID NO: 1991233 - DNA, 25 bp, Homo sapien
aatctggttaacagccacttctggg

SEQ ID NO: 1991234 - DNA, 25 bp, Homo sapien
taagggcttgtacatccccaggaag

SEQ ID NO: 1991235 - DNA, 25 bp, Homo sapien
actgggtttcacaggcaatgaaagc

SEQ ID NO: 1991236 - DNA, 25 bp, Homo sapien
tggcttttagaattgccggagtcct

SEQ ID NO: 1991237 - DNA, 25 bp, Homo sapien
tgctggattgtgaaaacctccactt

SEQ ID NO: 1991238 - DNA, 25 bp, Homo sapien
ttctttctctgtactagggcactcc

SEQ ID NO: 1991239 - DNA, 25 bp, Homo sapien
tactagggcactccatgtagaaggg

SEQ ID NO: 1991240 - DNA, 25 bp, Homo sapien
aaagaaatgctggattgtgaaaacc

SEQ ID NO: 1991241 - DNA, 25 bp, Homo sapien
tgcctttcatatgtcccattacatg

SEQ ID NO: 1991242 - DNA, 25 bp, Homo sapien
cctttgtaggctcacacttccctgg

SEQ ID NO: 1991243 - DNA, 25 bp, Homo sapien
ctggaacatggcagcttgtgcaatt

SEQ ID NO: 1991244 - DNA, 25 bp, Homo sapien
tatgtcccattacatgtgtaggtct

SEQ ID NO: 1991245 - DNA, 25 bp, Homo sapien
ctgttagtaaggagagccctgagca

SEQ ID NO: 1991246 - DNA, 25 bp, Homo sapien
tcctgttcccacagattgtcagtgc

SEQ ID NO: 1991247 - DNA, 25 bp, Homo sapien
ccaatcagactgagaggactgtcct

SEQ ID NO: 1991248 - DNA, 25 bp, Homo sapien
gcagcagtgataatgagaccctcca

SEQ ID NO: 1991249 - DNA, 25 bp, Homo sapien
tgcccctccaagttgaggcgggagc

SEQ ID NO: 1991250 - DNA, 25 bp, Homo sapien
gctattgattttgatggcagtggct

SEQ ID NO: 1991251 - DNA, 25 bp, Homo sapien
gacccgggcctcctattccattgaa

SEQ ID NO: 1991252 - DNA, 25 bp, Homo sapien
tagttattactgcatgtaggaaagc

SEQ ID NO: 1991253 - DNA, 25 bp, Homo sapien
tttgcaattccagtaaaagctcagc

SEQ ID NO: 1991254 - DNA, 25 bp, Homo sapien
ctttgcaattccagtaaaagctcag

SEQ ID NO: 1991255 - DNA, 25 bp, Homo sapien
aattccagtaaaagctcagctttta

SEQ ID NO: 1991256 - DNA, 25 bp, Homo sapien
tgcaattccagtaaaagctcagctt

SEQ ID NO: 1991257 - DNA, 25 bp, Homo sapien
cttggatgaggaggagctgtttcat

SEQ ID NO: 1991258 - DNA, 25 bp, Homo sapien
tgaagatgggcggttacatcctttg

SEQ ID NO: 1991259 - DNA, 25 bp, Homo sapien
gatgggcggttacatcctttgtgtt

SEQ ID NO: 1991260 - DNA, 25 bp, Homo sapien
ggcggttacatcctttgtgttctgc

SEQ ID NO: 1991261 - DNA, 25 bp, Homo sapien
tgtgtttgagtccctttcaaagatc

SEQ ID NO: 1991262 - DNA, 25 bp, Homo sapien
tctttcattctcagccagaaggaat

SEQ ID NO: 1991263 - DNA, 25 bp, Homo sapien
tccttaatctttcattctcagccag

SEQ ID NO: 1991264 - DNA, 25 bp, Homo sapien
cttaatctttcattctcagccagaa

SEQ ID NO: 1991265 - DNA, 25 bp, Homo sapien
taatctttcattctcagccagaagg

SEQ ID NO: 1991266 - DNA, 25 bp, Homo sapien
cattttctactggaccttttagaag

SEQ ID NO: 1991267 - DNA, 25 bp, Homo sapien
tggcaagttccataactctgacatt

SEQ ID NO: 1991268 - DNA, 25 bp, Homo sapien
ttctgaatgtggtggcaagttccat

SEQ ID NO: 1991269 - DNA, 25 bp, Homo sapien
cgtctacatccagctcattttctac

SEQ ID NO: 1991270 - DNA, 25 bp, Homo sapien
tctcacatcattaaaaccaaagggt

SEQ ID NO: 1991271 - DNA, 25 bp, Homo sapien
tgccaactagcattacttccactct

SEQ ID NO: 1991272 - DNA, 25 bp, Homo sapien
ggtatttcctccttggtatttgcaa

SEQ ID NO: 1991273 - DNA, 25 bp, Homo sapien
taaaatgtaccctgattaattatgt

SEQ ID NO: 1991274 - DNA, 25 bp, Homo sapien
tccacaaagcctagcgtgtaaaaga

SEQ ID NO: 1991275 - DNA, 25 bp, Homo sapien
caaagcctagcgtgtaaaagatgag

SEQ ID NO: 1991276 - DNA, 25 bp, Homo sapien
ctagcgtgtaaaagatgaggtgcag

SEQ ID NO: 1991277 - DNA, 25 bp, Homo sapien
gcagcagttccacaaagcctagcgt

SEQ ID NO: 1991278 - DNA, 25 bp, Homo sapien
gacgcaggtccgcagcagagcctgc

SEQ ID NO: 1991279 - DNA, 25 bp, Homo sapien
tgctctgacccctcgtgtcttgtgt

SEQ ID NO: 1991280 - DNA, 25 bp, Homo sapien
cctcgtgtcttgtgttgcagccgga

SEQ ID NO: 1991281 - DNA, 25 bp, Homo sapien
tgttgcagccggagggacgcaggtc

SEQ ID NO: 1991282 - DNA, 25 bp, Homo sapien
aaaaacttgcctatactgcttggtg

SEQ ID NO: 1991283 - DNA, 25 bp, Homo sapien
caagcttagttttggcggaaaggca

SEQ ID NO: 1991284 - DNA, 25 bp, Homo sapien
ttgtacagaattattaaggagcccc

SEQ ID NO: 1991285 - DNA, 25 bp, Homo sapien
tgaatgaaaaaactaggtgggaggc

SEQ ID NO: 1991286 - DNA, 25 bp, Homo sapien
gttgcaaaacagtacagtaagttat

SEQ ID NO: 1991287 - DNA, 25 bp, Homo sapien
aacagtacagtaagttatttactct

SEQ ID NO: 1991288 - DNA, 25 bp, Homo sapien
cagtacagtaagttatttactcttt

SEQ ID NO: 1991289 - DNA, 25 bp, Homo sapien
tgcaaaacagtacagtaagttattt

SEQ ID NO: 1991290 - DNA, 25 bp, Homo sapien
tctgcttgtatctccctgtgcctct

SEQ ID NO: 1991291 - DNA, 25 bp, Homo sapien
cagtttctgcttgtatctccctgtg

SEQ ID NO: 1991292 - DNA, 25 bp, Homo sapien
ctggcaatatcagccatccgtccat

SEQ ID NO: 1991293 - DNA, 25 bp, Homo sapien
ttggccctggcaatatcagccatcc

SEQ ID NO: 1991294 - DNA, 25 bp, Homo sapien
gcccttttgtgattgccctgccgca

SEQ ID NO: 1991295 - DNA, 25 bp, Homo sapien
agtcagacttgagctcgggcgtagc

SEQ ID NO: 1991296 - DNA, 25 bp, Homo sapien
ccgggctgtggcgatagagtccaaa

SEQ ID NO: 1991297 - DNA, 25 bp, Homo sapien
aggcacccagcggagtttcgagtca

SEQ ID NO: 1991298 - DNA, 25 bp, Homo sapien
tcgccgcgggaaccaggtgagaaaa

SEQ ID NO: 1991299 - DNA, 25 bp, Homo sapien
tccggtttccttcgcgtccagtctg

SEQ ID NO: 1991300 - DNA, 25 bp, Homo sapien
acaggcaccgtaggcagacaggttc

SEQ ID NO: 1991301 - DNA, 25 bp, Homo sapien
tggtgtccggactcaagctgcttcc

SEQ ID NO: 1991302 - DNA, 25 bp, Homo sapien
ggaggtagcgggcttggcccgggca

SEQ ID NO: 1991303 - DNA, 25 bp, Homo sapien
cgctgcagcctcaaggtagtgcttc

SEQ ID NO: 1991304 - DNA, 25 bp, Homo sapien
gcgctgcagcctcaaggtagtgctt

SEQ ID NO: 1991305 - DNA, 25 bp, Homo sapien
gggcagctgtcgtgcagtccccgcg

SEQ ID NO: 1991306 - DNA, 25 bp, Homo sapien
ctcgcctcccgcttcccctccagtc

SEQ ID NO: 1991307 - DNA, 25 bp, Homo sapien
ctcccgcttcccctccagtcctctt

SEQ ID NO: 1991308 - DNA, 25 bp, Homo sapien
tcccgcttcccctccagtcctctta

SEQ ID NO: 1991309 - DNA, 25 bp, Homo sapien
ccgctcgcctcccgcttcccctcca

SEQ ID NO: 1991310 - DNA, 25 bp, Homo sapien
agaaagagacttgtgaggagcaaag

SEQ ID NO: 1991311 - DNA, 25 bp, Homo sapien
gaatagctccaaggtttttgggctc

SEQ ID NO: 1991312 - DNA, 25 bp, Homo sapien
gagaggtctgcgctgagtatataca

SEQ ID NO: 1991313 - DNA, 25 bp, Homo sapien
ttttgggctcaataactgtaaggga

SEQ ID NO: 1991314 - DNA, 25 bp, Homo sapien
gagttagggagtcaagaatagctcc

SEQ ID NO: 1991315 - DNA, 25 bp, Homo sapien
ccaacaggatttgctcgcatactgg

SEQ ID NO: 1991316 - DNA, 25 bp, Homo sapien
caacaggatttgctcgcatactggc

SEQ ID NO: 1991317 - DNA, 25 bp, Homo sapien
gagtgatattatagagaccagaggg

SEQ ID NO: 1991318 - DNA, 25 bp, Homo sapien
caacgtcaaatgttaagtgctggga

SEQ ID NO: 1991319 - DNA, 25 bp, Homo sapien
caaaggacaattcaccgaggcatac

SEQ ID NO: 1991320 - DNA, 25 bp, Homo sapien
tggctagggaaagcttcattgagtg

SEQ ID NO: 1991321 - DNA, 25 bp, Homo sapien
gacgcactcgagagttatccagaac

SEQ ID NO: 1991322 - DNA, 25 bp, Homo sapien
tatggacacgtttcttcaaaagtgc

SEQ ID NO: 1991323 - DNA, 25 bp, Homo sapien
tttgggtttgagacgcactcgagag

SEQ ID NO: 1991324 - DNA, 25 bp, Homo sapien
ctggaaacagtatggacacgtttct

SEQ ID NO: 1991325 - DNA, 25 bp, Homo sapien
gtttctcgcttctcgattaagaagt

SEQ ID NO: 1991326 - DNA, 25 bp, Homo sapien
tctttaaaactgagtgtatagtttc

SEQ ID NO: 1991327 - DNA, 25 bp, Homo sapien
gagtgtatagtttctcgcttctcga

SEQ ID NO: 1991328 - DNA, 25 bp, Homo sapien
gcttctcgattaagaagtttctgta

SEQ ID NO: 1991329 - DNA, 25 bp, Homo sapien
tggagtctttgaactttttcaccat

SEQ ID NO: 1991330 - DNA, 25 bp, Homo sapien
caatacacttttggagtctttgaac

SEQ ID NO: 1991331 - DNA, 25 bp, Homo sapien
atacacttttggagtctttgaactt

SEQ ID NO: 1991332 - DNA, 25 bp, Homo sapien
ttggagtctttgaactttttcacca

SEQ ID NO: 1991333 - DNA, 25 bp, Homo sapien
ctgttctgttgcatgttttacaagt

SEQ ID NO: 1991334 - DNA, 25 bp, Homo sapien
ggcaggattgctcttcaatgttgac

SEQ ID NO: 1991335 - DNA, 25 bp, Homo sapien
ttgtaggagtggcaggattgctctt

SEQ ID NO: 1991336 - DNA, 25 bp, Homo sapien
gttctgttgcatgttttacaagtga

SEQ ID NO: 1991337 - DNA, 25 bp, Homo sapien
tgctgggctcttgcctttcgagcca

SEQ ID NO: 1991338 - DNA, 25 bp, Homo sapien
gagccagacatgtcatgatttgggt

SEQ ID NO: 1991339 - DNA, 25 bp, Homo sapien
gcctttcgagccagacatgtcatga

SEQ ID NO: 1991340 - DNA, 25 bp, Homo sapien
tcttgcctttcgagccagacatgtc

SEQ ID NO: 1991341 - DNA, 25 bp, Homo sapien
aggagcaagtagatactgactgtcc

SEQ ID NO: 1991342 - DNA, 25 bp, Homo sapien
gcaagtagatactgactgtccagat

SEQ ID NO: 1991343 - DNA, 25 bp, Homo sapien
gagcaagtagatactgactgtccag

SEQ ID NO: 1991344 - DNA, 25 bp, Homo sapien
ttgaggagcaagtagatactgactg

SEQ ID NO: 1991345 - DNA, 25 bp, Homo sapien
gaaatttctgaagtccacctttgga

SEQ ID NO: 1991346 - DNA, 25 bp, Homo sapien
taaaagtccacccttcagagaagat

SEQ ID NO: 1991347 - DNA, 25 bp, Homo sapien
ccacccttcagagaagataagaaat

SEQ ID NO: 1991348 - DNA, 25 bp, Homo sapien
cacctttggaatcttttgggattca

SEQ ID NO: 1991349 - DNA, 25 bp, Homo sapien
atagatatgtatctacaaggaactt

SEQ ID NO: 1991350 - DNA, 25 bp, Homo sapien
cccataaacactgaaggatgccaag

SEQ ID NO: 1991351 - DNA, 25 bp, Homo sapien
tcagatctagtttccatgtattcaa

SEQ ID NO: 1991352 - DNA, 25 bp, Homo sapien
aggcaggtttcaggtattcacacta

SEQ ID NO: 1991353 - DNA, 25 bp, Homo sapien
taatgtggacaacttcccacctgag

SEQ ID NO: 1991354 - DNA, 25 bp, Homo sapien
cacttgcaaatgaagtaatgtggac

SEQ ID NO: 1991355 - DNA, 25 bp, Homo sapien
gaaatgcccaaagacctttctgcga

SEQ ID NO: 1991356 - DNA, 25 bp, Homo sapien
gaaaccactgcataatccagggtta

SEQ ID NO: 1991357 - DNA, 25 bp, Homo sapien
tataaacactactgccatgaacatt

SEQ ID NO: 1991358 - DNA, 25 bp, Homo sapien
caaagtgactccaccattttacaat

SEQ ID NO: 1991359 - DNA, 25 bp, Homo sapien
cagttatctcgggtatatgcctgaa

SEQ ID NO: 1991360 - DNA, 25 bp, Homo sapien
tcctaggagcaatgtgtgatggttc

SEQ ID NO: 1991361 - DNA, 25 bp, Homo sapien
cagatttgtgatcagagctatgagt

SEQ ID NO: 1991362 - DNA, 25 bp, Homo sapien
ggcagggcgattccatataccatgg

SEQ ID NO: 1991363 - DNA, 25 bp, Homo sapien
gcgagtacggtgctcctcagaagtc

SEQ ID NO: 1991364 - DNA, 25 bp, Homo sapien
taagaggatggatcctgtacagcga

SEQ ID NO: 1991365 - DNA, 25 bp, Homo sapien
gaccctgtgtgttagagcagttgca

SEQ ID NO: 1991366 - DNA, 25 bp, Homo sapien
aagcagtgccacactacagggtaga

SEQ ID NO: 1991367 - DNA, 25 bp, Homo sapien
aaaagttccattccaactgccagtg

SEQ ID NO: 1991368 - DNA, 25 bp, Homo sapien
gccgtctatgggattaaaagacacg

SEQ ID NO: 1991369 - DNA, 25 bp, Homo sapien
cagtgttgataatacaactgctatt

SEQ ID NO: 1991370 - DNA, 25 bp, Homo sapien
agctcaaagcattccacccacttcg

SEQ ID NO: 1991371 - DNA, 25 bp, Homo sapien
ctttttgaatagcaaatgtcgtatc

SEQ ID NO: 1991372 - DNA, 25 bp, Homo sapien
taaccaagttgcatcacagtgttga

SEQ ID NO: 1991373 - DNA, 25 bp, Homo sapien
ggcaggcaactgtaatcctagctgc

SEQ ID NO: 1991374 - DNA, 25 bp, Homo sapien
aggcaactgtaatcctagctgctcg

SEQ ID NO: 1991375 - DNA, 25 bp, Homo sapien
gtagtggcaggcaactgtaatccta

SEQ ID NO: 1991376 - DNA, 25 bp, Homo sapien
tgtagtggcaggcaactgtaatcct

SEQ ID NO: 1991377 - DNA, 25 bp, Homo sapien
gataagcacatgcagataccatcca

SEQ ID NO: 1991378 - DNA, 25 bp, Homo sapien
ccagttccttgctattgaagaacag

SEQ ID NO: 1991379 - DNA, 25 bp, Homo sapien
tatcacccattgaataccttttggc

SEQ ID NO: 1991380 - DNA, 25 bp, Homo sapien
ggaagtagtatttgtttagccagct

SEQ ID NO: 1991381 - DNA, 25 bp, Homo sapien
aagtaaatgaatgccattagaaatg

SEQ ID NO: 1991382 - DNA, 25 bp, Homo sapien
ctgtctcctggtaggcactcaggtg

SEQ ID NO: 1991383 - DNA, 25 bp, Homo sapien
aaatgtaacttggggctgggagcgg

SEQ ID NO: 1991384 - DNA, 25 bp, Homo sapien
ctcctggtaggcactcaggtgtttg

SEQ ID NO: 1991385 - DNA, 25 bp, Homo sapien
tcactacatctggccaatagtaata

SEQ ID NO: 1991386 - DNA, 25 bp, Homo sapien
aactcatgagtacaagttatcttcc

SEQ ID NO: 1991387 - DNA, 25 bp, Homo sapien
atgttttgtaaagaagagttcttgc

SEQ ID NO: 1991388 - DNA, 25 bp, Homo sapien
tgtaacctcgaactcatgagtacaa

SEQ ID NO: 1991389 - DNA, 25 bp, Homo sapien
tcctttgtagcgtgccaagatgtcc

SEQ ID NO: 1991390 - DNA, 25 bp, Homo sapien
ttttatttgccagaggacatgagac

SEQ ID NO: 1991391 - DNA, 25 bp, Homo sapien
tctgcctttgacactcctgagacag

SEQ ID NO: 1991392 - DNA, 25 bp, Homo sapien
agttacatgagtgtgtctgccttcc

SEQ ID NO: 1991393 - DNA, 25 bp, Homo sapien
tgggttttaatcttactgagactcc

SEQ ID NO: 1991394 - DNA, 25 bp, Homo sapien
tgttttctggtctcgtggtttctga

SEQ ID NO: 1991395 - DNA, 25 bp, Homo sapien
ggatttgtagattcacgtcttcaag

SEQ ID NO: 1991396 - DNA, 25 bp, Homo sapien
gttaactggcagatcccttaggctg

SEQ ID NO: 1991397 - DNA, 25 bp, Homo sapien
ggttacatattggttgtgaagtaga

SEQ ID NO: 1991398 - DNA, 25 bp, Homo sapien
caataagctatgttagatatctttc

SEQ ID NO: 1991399 - DNA, 25 bp, Homo sapien
tttttagctccccagcatactgcgt

SEQ ID NO: 1991400 - DNA, 25 bp, Homo sapien
tattcactaatacggcttaaacttg

SEQ ID NO: 1991401 - DNA, 25 bp, Homo sapien
ttatgattgagttgtaagtgttccc

SEQ ID NO: 1991402 - DNA, 25 bp, Homo sapien
gtaaatgtctcagtcaatactaggc

SEQ ID NO: 1991403 - DNA, 25 bp, Homo sapien
tttaaaatacattcctacaagcagt

SEQ ID NO: 1991404 - DNA, 25 bp, Homo sapien
gttcccaatgtattctaggtacaag

SEQ ID NO: 1991405 - DNA, 25 bp, Homo sapien
tgtgaagaccaaaatggcatacaat

SEQ ID NO: 1991406 - DNA, 25 bp, Homo sapien
gacagatgactgcttttgcagggtg

SEQ ID NO: 1991407 - DNA, 25 bp, Homo sapien
gatgactgcttttgcagggtgtagc

SEQ ID NO: 1991408 - DNA, 25 bp, Homo sapien
cagatgactgcttttgcagggtgta

SEQ ID NO: 1991409 - DNA, 25 bp, Homo sapien
ttgacagatgactgcttttgcaggg

SEQ ID NO: 1991410 - DNA, 25 bp, Homo sapien
ccgctgccgctttaatcctcatatt

SEQ ID NO: 1991411 - DNA, 25 bp, Homo sapien
tagtgattaacaccatattccaaga

SEQ ID NO: 1991412 - DNA, 25 bp, Homo sapien
ttccaagatagtggttgtcatagtg

SEQ ID NO: 1991413 - DNA, 25 bp, Homo sapien
gcagggaagtggacgcaagcgggtt

SEQ ID NO: 1991414 - DNA, 25 bp, Homo sapien
gagttgttccttccatccggagttg

SEQ ID NO: 1991415 - DNA, 25 bp, Homo sapien
gagggttcaggcctggcaaactccc

SEQ ID NO: 1991416 - DNA, 25 bp, Homo sapien
gggttcaggcctggcaaactcccac

SEQ ID NO: 1991417 - DNA, 25 bp, Homo sapien
gttcaggcctggcaaactcccacca

SEQ ID NO: 1991418 - DNA, 25 bp, Homo sapien
ttcaggcctggcaaactcccaccat

SEQ ID NO: 1991419 - DNA, 25 bp, Homo sapien
gatctaacatcctagtgccaaaagc

SEQ ID NO: 1991420 - DNA, 25 bp, Homo sapien
tgagtcacggagtgctaaatctagc

SEQ ID NO: 1991421 - DNA, 25 bp, Homo sapien
gaagagttggtgctatgactgagtc

SEQ ID NO: 1991422 - DNA, 25 bp, Homo sapien
gacagccagattagactgtggacca

SEQ ID NO: 1991423 - DNA, 25 bp, Homo sapien
caaaatgttcgtgcgggtatatacc

SEQ ID NO: 1991424 - DNA, 25 bp, Homo sapien
tacggtactgtagccatactaggcc

SEQ ID NO: 1991425 - DNA, 25 bp, Homo sapien
tcaccagactgggttattgccaagt

SEQ ID NO: 1991426 - DNA, 25 bp, Homo sapien
catagtttcagtaggtcatagggag

SEQ ID NO: 1991427 - DNA, 25 bp, Homo sapien
ttgaaaacatctgcctgccggtaca

SEQ ID NO: 1991428 - DNA, 25 bp, Homo sapien
gcagagcattactttgccaggtatg

SEQ ID NO: 1991429 - DNA, 25 bp, Homo sapien
tcattactagaagagaggcatgtct

SEQ ID NO: 1991430 - DNA, 25 bp, Homo sapien
tgtttaggccaagtaggatagcgtt

SEQ ID NO: 1991431 - DNA, 25 bp, Homo sapien
gtcgccaactggtcagccgcacaaa

SEQ ID NO: 1991432 - DNA, 25 bp, Homo sapien
cgcacccggtttgggcagcaaaaca

SEQ ID NO: 1991433 - DNA, 25 bp, Homo sapien
gtcatagagcaccacggagcaggac

SEQ ID NO: 1991434 - DNA, 25 bp, Homo sapien
gtgagaagtctccagcacgggtgcc

SEQ ID NO: 1991435 - DNA, 25 bp, Homo sapien
caggacgtgccaaaggccagaagtc

SEQ ID NO: 1991436 - DNA, 25 bp, Homo sapien
gccatctcctgcgttgtatttgaat

SEQ ID NO: 1991437 - DNA, 25 bp, Homo sapien
aataaagccgtatgaacagaaatac

SEQ ID NO: 1991438 - DNA, 25 bp, Homo sapien
aatacatatagccatctcctgcgtt

SEQ ID NO: 1991439 - DNA, 25 bp, Homo sapien
gagacacgctcctggccaataatga

SEQ ID NO: 1991440 - DNA, 25 bp, Homo sapien
cattcaagttggtaacaacaaccct

SEQ ID NO: 1991441 - DNA, 25 bp, Homo sapien
aatccactgtatgcaattgactcgg

SEQ ID NO: 1991442 - DNA, 25 bp, Homo sapien
gactcgggcggtgtgaccattcaag

SEQ ID NO: 1991443 - DNA, 25 bp, Homo sapien
gccatcctgtttacaaatccactgt

SEQ ID NO: 1991444 - DNA, 25 bp, Homo sapien
ccagtgaatcacttgattatcagat

SEQ ID NO: 1991445 - DNA, 25 bp, Homo sapien
cagtgaatcacttgattatcagatc

SEQ ID NO: 1991446 - DNA, 25 bp, Homo sapien
cccagtgaatcacttgattatcaga

SEQ ID NO: 1991447 - DNA, 25 bp, Homo sapien
tcccagtgaatcacttgattatcag

SEQ ID NO: 1991448 - DNA, 25 bp, Homo sapien
tcaagtagggctgcaaaatagaaaa

SEQ ID NO: 1991449 - DNA, 25 bp, Homo sapien
aatatgagtatactttgggattgaa

SEQ ID NO: 1991450 - DNA, 25 bp, Homo sapien
gcatccactcatgatacttgcctaa

SEQ ID NO: 1991451 - DNA, 25 bp, Homo sapien
ttactaagtacttttagcatccact

SEQ ID NO: 1991452 - DNA, 25 bp, Homo sapien
tgaatcagaaagaatgacagaagca

SEQ ID NO: 1991453 - DNA, 25 bp, Homo sapien
ctgaatcagaaagaatgacagaagc

SEQ ID NO: 1991454 - DNA, 25 bp, Homo sapien
gaatcagaaagaatgacagaagcat

SEQ ID NO: 1991455 - DNA, 25 bp, Homo sapien
cttgaagatgcactgcttttaaaag

SEQ ID NO: 1991456 - DNA, 25 bp, Homo sapien
ggtaaacagcatgcaccgcataaac

SEQ ID NO: 1991457 - DNA, 25 bp, Homo sapien
gcatgcaccgcataaacaggtcctt

SEQ ID NO: 1991458 - DNA, 25 bp, Homo sapien
aacgatcagtgtacataatgcagga

SEQ ID NO: 1991459 - DNA, 25 bp, Homo sapien
tgcagaaacgatcagtgtacataat

SEQ ID NO: 1991460 - DNA, 25 bp, Homo sapien
tctggaccctttttagaccagagtc

SEQ ID NO: 1991461 - DNA, 25 bp, Homo sapien
accagagtcgaacagcagaatctgc

SEQ ID NO: 1991462 - DNA, 25 bp, Homo sapien
ttagaccagagtcgaacagcagaat

SEQ ID NO: 1991463 - DNA, 25 bp, Homo sapien
ccctttttagaccagagtcgaacag

SEQ ID NO: 1991464 - DNA, 25 bp, Homo sapien
aagtttaaagtctgaaggcacatta

SEQ ID NO: 1991465 - DNA, 25 bp, Homo sapien
aaagtttaaagtctgaaggcacatt

SEQ ID NO: 1991466 - DNA, 25 bp, Homo sapien
agcagagagccaaagcaaatccatt

SEQ ID NO: 1991467 - DNA, 25 bp, Homo sapien
gccttgcacagaatggaagcgtaac

SEQ ID NO: 1991468 - DNA, 25 bp, Homo sapien
gaaatgaaattctgttatgatgcca

SEQ ID NO: 1991469 - DNA, 25 bp, Homo sapien
gcctgaatgcagatggaagaaatga

SEQ ID NO: 1991470 - DNA, 25 bp, Homo sapien
tgaaaccatagagtcgcagctcctg

SEQ ID NO: 1991471 - DNA, 25 bp, Homo sapien
taccaacatggctaatgcacacaga

SEQ ID NO: 1991472 - DNA, 25 bp, Homo sapien
aataatgaacagctactatgagccc

SEQ ID NO: 1991473 - DNA, 25 bp, Homo sapien
tcaagagcaactagagagcattttc

SEQ ID NO: 1991474 - DNA, 25 bp, Homo sapien
ctagggcgttatcctttgggaggct

SEQ ID NO: 1991475 - DNA, 25 bp, Homo sapien
gcaaatatgtgaattctgcaatcat

SEQ ID NO: 1991476 - DNA, 25 bp, Homo sapien
gttgagcaaatatgtgaattctgca

SEQ ID NO: 1991477 - DNA, 25 bp, Homo sapien
caaatatgtgaattctgcaatcatc

SEQ ID NO: 1991478 - DNA, 25 bp, Homo sapien
gagcaaatatgtgaattctgcaatc

SEQ ID NO: 1991479 - DNA, 25 bp, Homo sapien
aaaggctgcccattccactcctcta

SEQ ID NO: 1991480 - DNA, 25 bp, Homo sapien
cattccactcctctaatccaatcct

SEQ ID NO: 1991481 - DNA, 25 bp, Homo sapien
ctaatccaatcctcatgtccacaga

SEQ ID NO: 1991482 - DNA, 25 bp, Homo sapien
atccaatcctcatgtccacagagag

SEQ ID NO: 1991483 - DNA, 25 bp, Homo sapien
ttctttcagtcttatgttatcgtca

SEQ ID NO: 1991484 - DNA, 25 bp, Homo sapien
caatcttgtgaacagcttgctagga

SEQ ID NO: 1991485 - DNA, 25 bp, Homo sapien
ttatcgtcatcctgagtttctaaag

SEQ ID NO: 1991486 - DNA, 25 bp, Homo sapien
agatgttgactttatatacagcttc

SEQ ID NO: 1991487 - DNA, 25 bp, Homo sapien
tcatgaccggctagcactgtctcca

SEQ ID NO: 1991488 - DNA, 25 bp, Homo sapien
tagcactgtctccagagtaacagca

SEQ ID NO: 1991489 - DNA, 25 bp, Homo sapien
ggctagcactgtctccagagtaaca

SEQ ID NO: 1991490 - DNA, 25 bp, Homo sapien
acccagttttcatgaccggctagca

SEQ ID NO: 1991491 - DNA, 25 bp, Homo sapien
tggagtaagggatatgtgtatggtt

SEQ ID NO: 1991492 - DNA, 25 bp, Homo sapien
tgtgccataagatttaactggagta

SEQ ID NO: 1991493 - DNA, 25 bp, Homo sapien
agtaagggatatgtgtatggttttc

SEQ ID NO: 1991494 - DNA, 25 bp, Homo sapien
gccataagatttaactggagtaagg

SEQ ID NO: 1991495 - DNA, 25 bp, Homo sapien
gtccagcagaccaggaatgcagtat

SEQ ID NO: 1991496 - DNA, 25 bp, Homo sapien
aaaattctccacttgatttggtcag

SEQ ID NO: 1991497 - DNA, 25 bp, Homo sapien
caatgttcaatggaactgagtgtcc

SEQ ID NO: 1991498 - DNA, 25 bp, Homo sapien
aaatgtcatgtatttgagatttcta

SEQ ID NO: 1991499 - DNA, 25 bp, Homo sapien
gaagcagataataatctcactggct

SEQ ID NO: 1991500 - DNA, 25 bp, Homo sapien
cagataataatctcactggctgctg

SEQ ID NO: 1991501 - DNA, 25 bp, Homo sapien
ataataatctcactggctgctgtag

SEQ ID NO: 1991502 - DNA, 25 bp, Homo sapien
tggaagcagataataatctcactgg

SEQ ID NO: 1991503 - DNA, 25 bp, Homo sapien
cattgaactggcaatcataaaatcc

SEQ ID NO: 1991504 - DNA, 25 bp, Homo sapien
tgtttccaaaggtgcaacgctccgt

SEQ ID NO: 1991505 - DNA, 25 bp, Homo sapien
tattcccacctacttcacctactcg

SEQ ID NO: 1991506 - DNA, 25 bp, Homo sapien
cgctccgtggaaagcatgagcaatg

SEQ ID NO: 1991507 - DNA, 25 bp, Homo sapien
tactccctctgtgaacaaaaactga

SEQ ID NO: 1991508 - DNA, 25 bp, Homo sapien
tccacagagcacctttttgaacaac

SEQ ID NO: 1991509 - DNA, 25 bp, Homo sapien
tgagcaatggacagcacttttggac

SEQ ID NO: 1991510 - DNA, 25 bp, Homo sapien
gggacgtggaaactctgtaccttca

SEQ ID NO: 1991511 - DNA, 25 bp, Homo sapien
gcaaaaagtctagttgtctgatcag

SEQ ID NO: 1991512 - DNA, 25 bp, Homo sapien
ttctggatcccagactaggtcttgg

SEQ ID NO: 1991513 - DNA, 25 bp, Homo sapien
gtaccaacagtgataataaattctc

SEQ ID NO: 1991514 - DNA, 25 bp, Homo sapien
aggtcttggacaccatcaaagtgtc

SEQ ID NO: 1991515 - DNA, 25 bp, Homo sapien
tttccacaaaattccgaggtgcaga

SEQ ID NO: 1991516 - DNA, 25 bp, Homo sapien
cagtgattgtcctgtaatggcacaa

SEQ ID NO: 1991517 - DNA, 25 bp, Homo sapien
gccaaacatttcaggtcatacccat

SEQ ID NO: 1991518 - DNA, 25 bp, Homo sapien
acccatgtatctgaggccttgcaat

SEQ ID NO: 1991519 - DNA, 25 bp, Homo sapien
taatcccaatgcagggacagtggct

SEQ ID NO: 1991520 - DNA, 25 bp, Homo sapien
aatcccaatgcagggacagtggctc

SEQ ID NO: 1991521 - DNA, 25 bp, Homo sapien
gataatcccaatgcagggacagtgg

SEQ ID NO: 1991522 - DNA, 25 bp, Homo sapien
tttgataatcccaatgcagggacag

SEQ ID NO: 1991523 - DNA, 25 bp, Homo sapien
cagtaagtatggagggctgaaaggc

SEQ ID NO: 1991524 - DNA, 25 bp, Homo sapien
taagtatggagggctgaaaggccac

SEQ ID NO: 1991525 - DNA, 25 bp, Homo sapien
gctgatactcaaaaccagtactagt

SEQ ID NO: 1991526 - DNA, 25 bp, Homo sapien
tcaaaaccagtactagttaacagct

SEQ ID NO: 1991527 - DNA, 25 bp, Homo sapien
cagaagatgatcctcagtgggaggc

SEQ ID NO: 1991528 - DNA, 25 bp, Homo sapien
agaagatgatcctcagtgggaggct

SEQ ID NO: 1991529 - DNA, 25 bp, Homo sapien
tgcagaagatgatcctcagtgggag

SEQ ID NO: 1991530 - DNA, 25 bp, Homo sapien
tctgcagaagatgatcctcagtggg

SEQ ID NO: 1991531 - DNA, 25 bp, Homo sapien
caagcagagtctttgaactgttaca

SEQ ID NO: 1991532 - DNA, 25 bp, Homo sapien
cagagtctttgaactgttacaagta

SEQ ID NO: 1991533 - DNA, 25 bp, Homo sapien
aaatatttcataaccgtgcccatat

SEQ ID NO: 1991534 - DNA, 25 bp, Homo sapien
gaactgttacaagtaacacaaaata

SEQ ID NO: 1991535 - DNA, 25 bp, Homo sapien
acatgtgataaagttgtatccaggg

SEQ ID NO: 1991536 - DNA, 25 bp, Homo sapien
tgataaagttgtatccagggtatat

SEQ ID NO: 1991537 - DNA, 25 bp, Homo sapien
atatctacataagcacatgtgataa

SEQ ID NO: 1991538 - DNA, 25 bp, Homo sapien
acacaccccccatgaactactactc

SEQ ID NO: 1991539 - DNA, 25 bp, Homo sapien
taaaacactatcgttactaacagag

SEQ ID NO: 1991540 - DNA, 25 bp, Homo sapien
tctacggaacagacccacatatatg

SEQ ID NO: 1991541 - DNA, 25 bp, Homo sapien
tatgaacaaccgactttagacaaag

SEQ ID NO: 1991542 - DNA, 25 bp, Homo sapien
ggagataacatactacaaccatttc

SEQ ID NO: 1991543 - DNA, 25 bp, Homo sapien
tccaaagaatgatagctgcatgctc

SEQ ID NO: 1991544 - DNA, 25 bp, Homo sapien
cctgtttccaagatgtagtgttcca

SEQ ID NO: 1991545 - DNA, 25 bp, Homo sapien
ggttcgatctctggaaacagctagt

SEQ ID NO: 1991546 - DNA, 25 bp, Homo sapien
gagaaggccatctgcgtgactgtca

SEQ ID NO: 1991547 - DNA, 25 bp, Homo sapien
cagtttatgccaggttcagagtaga

SEQ ID NO: 1991548 - DNA, 25 bp, Homo sapien
cataatcacaagtaggtcaacccaa

SEQ ID NO: 1991549 - DNA, 25 bp, Homo sapien
gctgagtatactttacagtccctgg

SEQ ID NO: 1991550 - DNA, 25 bp, Homo sapien
cagtccctgggtgttctctaaaaca

SEQ ID NO: 1991551 - DNA, 25 bp, Homo sapien
gaatgcttttgtactgactggtcac

SEQ ID NO: 1991552 - DNA, 25 bp, Homo sapien
tgaaatagactgaagccaggcaacc

SEQ ID NO: 1991553 - DNA, 25 bp, Homo sapien
gaagttcaactcacgcctacagaag

SEQ ID NO: 1991554 - DNA, 25 bp, Homo sapien
gaagttctagcccttatatggacta

SEQ ID NO: 1991555 - DNA, 25 bp, Homo sapien
tatgtatacactattcacaaagcag

SEQ ID NO: 1991556 - DNA, 25 bp, Homo sapien
tgtatacactattcacaaagcagag

SEQ ID NO: 1991557 - DNA, 25 bp, Homo sapien
aatatgtatacactattcacaaagc

SEQ ID NO: 1991558 - DNA, 25 bp, Homo sapien
gtatacactattcacaaagcagaga

SEQ ID NO: 1991559 - DNA, 25 bp, Homo sapien
tttgttggtgaaggcaaaaagacta

SEQ ID NO: 1991560 - DNA, 25 bp, Homo sapien
gcacagaagtaattttgttggtgaa

SEQ ID NO: 1991561 - DNA, 25 bp, Homo sapien
gaagtaattttgttggtgaaggcaa

SEQ ID NO: 1991562 - DNA, 25 bp, Homo sapien
ctgtgcacagaagtaattttgttgg

SEQ ID NO: 1991563 - DNA, 25 bp, Homo sapien
aaatacttgctgtcaggactccaat

SEQ ID NO: 1991564 - DNA, 25 bp, Homo sapien
ctttttgtctcgactcccagtgaag

SEQ ID NO: 1991565 - DNA, 25 bp, Homo sapien
tttttgtctcgactcccagtgaaga

SEQ ID NO: 1991566 - DNA, 25 bp, Homo sapien
tgctgtcaggactccaatcacaaga

SEQ ID NO: 1991567 - DNA, 25 bp, Homo sapien
gaaaggaatacatagctgattttta

SEQ ID NO: 1991568 - DNA, 25 bp, Homo sapien
taacagaaaggcaggattatgcatt

SEQ ID NO: 1991569 - DNA, 25 bp, Homo sapien
gaaaggcaggattatgcatttttta

SEQ ID NO: 1991570 - DNA, 25 bp, Homo sapien
ctgtaacagaaaggcaggattatgc

SEQ ID NO: 1991571 - DNA, 25 bp, Homo sapien
gaagtgaagtggacaacagtagcaa

SEQ ID NO: 1991572 - DNA, 25 bp, Homo sapien
tttcagagaatgtccagcgaatgct

SEQ ID NO: 1991573 - DNA, 25 bp, Homo sapien
aagatactgagcagaaggctttgtc

SEQ ID NO: 1991574 - DNA, 25 bp, Homo sapien
gacctatccctgagagtagcagctg

SEQ ID NO: 1991575 - DNA, 25 bp, Homo sapien
tactcacaaattggttctgatccag

SEQ ID NO: 1991576 - DNA, 25 bp, Homo sapien
acagagaggtgtctaacatgccttc

SEQ ID NO: 1991577 - DNA, 25 bp, Homo sapien
ttccccaagaagctaccacaaaatg

SEQ ID NO: 1991578 - DNA, 25 bp, Homo sapien
gatccagtggagtcccatcagtagg

SEQ ID NO: 1991579 - DNA, 25 bp, Homo sapien
ctaatacagacagatcacacactgt

SEQ ID NO: 1991580 - DNA, 25 bp, Homo sapien
catgtactacagtttcatcggcaaa

SEQ ID NO: 1991581 - DNA, 25 bp, Homo sapien
gacagatcacacactgtaaagcctt

SEQ ID NO: 1991582 - DNA, 25 bp, Homo sapien
gccttctctttgcaaggtttctagc

SEQ ID NO: 1991583 - DNA, 25 bp, Homo sapien
gcactgggcagacgctgacagctgt

SEQ ID NO: 1991584 - DNA, 25 bp, Homo sapien
gtcatcagtggagtcgcactcaccc

SEQ ID NO: 1991585 - DNA, 25 bp, Homo sapien
gggcagacgctgacagctgtcacag

SEQ ID NO: 1991586 - DNA, 25 bp, Homo sapien
gtgctcaatacagtcatcagtggag

SEQ ID NO: 1991587 - DNA, 25 bp, Homo sapien
cctcttaaaactaagccccacacag

SEQ ID NO: 1991588 - DNA, 25 bp, Homo sapien
ctcttaaaactaagccccacacaga

SEQ ID NO: 1991589 - DNA, 25 bp, Homo sapien
cttcgtcattgctctaaagtagttc

SEQ ID NO: 1991590 - DNA, 25 bp, Homo sapien
gagggggacaacagtgattaactta

SEQ ID NO: 1991591 - DNA, 25 bp, Homo sapien
ggggacaacagtgattaacttagca

SEQ ID NO: 1991592 - DNA, 25 bp, Homo sapien
attgttatcttcgtcattgctctaa

SEQ ID NO: 1991593 - DNA, 25 bp, Homo sapien
ttgtttctacacagtgggtccagtc

SEQ ID NO: 1991594 - DNA, 25 bp, Homo sapien
tccacactccaatcctactgcaacc

SEQ ID NO: 1991595 - DNA, 25 bp, Homo sapien
ctccaatcctactgcaaccacgtat

SEQ ID NO: 1991596 - DNA, 25 bp, Homo sapien
acactccaatcctactgcaaccacg

SEQ ID NO: 1991597 - DNA, 25 bp, Homo sapien
aatgatattagtagctttctgaacg

SEQ ID NO: 1991598 - DNA, 25 bp, Homo sapien
tggtagagaccatgagccaacacac

SEQ ID NO: 1991599 - DNA, 25 bp, Homo sapien
tataacacagaatgatattagtagc

SEQ ID NO: 1991600 - DNA, 25 bp, Homo sapien
ttcaacagtacagatatacgaaggt

SEQ ID NO: 1991601 - DNA, 25 bp, Homo sapien
cacaccaggttagaggtgaagggag

SEQ ID NO: 1991602 - DNA, 25 bp, Homo sapien
caccaggttagaggtgaagggagca

SEQ ID NO: 1991603 - DNA, 25 bp, Homo sapien
tcacaccaggttagaggtgaaggga

SEQ ID NO: 1991604 - DNA, 25 bp, Homo sapien
acaccaggttagaggtgaagggagc

SEQ ID NO: 1991605 - DNA, 25 bp, Homo sapien
agaagatagggagtttggcaaacca

SEQ ID NO: 1991606 - DNA, 25 bp, Homo sapien
aattctatacgtgttcccttcctgc

SEQ ID NO: 1991607 - DNA, 25 bp, Homo sapien
tcctaagtcaccataatgaccaaag

SEQ ID NO: 1991608 - DNA, 25 bp, Homo sapien
tgttaagtcacgcattagttccatc

SEQ ID NO: 1991609 - DNA, 25 bp, Homo sapien
cacagtgtgatcttcaccacagctt

SEQ ID NO: 1991610 - DNA, 25 bp, Homo sapien
taagataccagtgactgcaagcatg

SEQ ID NO: 1991611 - DNA, 25 bp, Homo sapien
tagccggaattggtggtgtgcctct

SEQ ID NO: 1991612 - DNA, 25 bp, Homo sapien
ttcttaaattgggacacacagaggc

SEQ ID NO: 1991613 - DNA, 25 bp, Homo sapien
tgttatataacaaagcgaagggtcc

SEQ ID NO: 1991614 - DNA, 25 bp, Homo sapien
ggatcaagacagagcacacttggcg

SEQ ID NO: 1991615 - DNA, 25 bp, Homo sapien
cacttggcgtggtatgctatctata

SEQ ID NO: 1991616 - DNA, 25 bp, Homo sapien
caaatggctctatgttccaacaggg

SEQ ID NO: 1991617 - DNA, 25 bp, Homo sapien
gactggctgcagctcaaacctacaa

SEQ ID NO: 1991618 - DNA, 25 bp, Homo sapien
ccagctgacggcacaagagtataca

SEQ ID NO: 1991619 - DNA, 25 bp, Homo sapien
gctagtctgaactgagatgggccct

SEQ ID NO: 1991620 - DNA, 25 bp, Homo sapien
aaaactcagtctctctaggcaaggc

SEQ ID NO: 1991621 - DNA, 25 bp, Homo sapien
gaagcctgcatgcacttgggtcaga

SEQ ID NO: 1991622 - DNA, 25 bp, Homo sapien
gattggctagttcagatcaagaggc

SEQ ID NO: 1991623 - DNA, 25 bp, Homo sapien
gcttaggtaacactgcaaaacccag

SEQ ID NO: 1991624 - DNA, 25 bp, Homo sapien
gaagaatctaggtccctctgtagtc

SEQ ID NO: 1991625 - DNA, 25 bp, Homo sapien
catacattgcactggattcacacgt

SEQ ID NO: 1991626 - DNA, 25 bp, Homo sapien
gagcccctgcaagagcagcctttgt

SEQ ID NO: 1991627 - DNA, 25 bp, Homo sapien
gaatggaagccagactcatacacta

SEQ ID NO: 1991628 - DNA, 25 bp, Homo sapien
gcatccctctgtgtcgggagacagt

SEQ ID NO: 1991629 - DNA, 25 bp, Homo sapien
caaaagccaaagactaagggtagca

SEQ ID NO: 1991630 - DNA, 25 bp, Homo sapien
gaaggcatctacctgacacagcata

SEQ ID NO: 1991631 - DNA, 25 bp, Homo sapien
tctcctgaagctcggtatggccaca

SEQ ID NO: 1991632 - DNA, 25 bp, Homo sapien
tcatactaaggacgtcagacagcga

SEQ ID NO: 1991633 - DNA, 25 bp, Homo sapien
caacactaaattctgcccgaggaga

SEQ ID NO: 1991634 - DNA, 25 bp, Homo sapien
gcaaaacaggtactgcacgcacagg

SEQ ID NO: 1991635 - DNA, 25 bp, Homo sapien
atcccaggtgcggaacccgctgctg

SEQ ID NO: 1991636 - DNA, 25 bp, Homo sapien
gtggagaacccaaggccggcgacca

SEQ ID NO: 1991637 - DNA, 25 bp, Homo sapien
atggtggacagtgcggatgggcggc

SEQ ID NO: 1991638 - DNA, 25 bp, Homo sapien
agcctcccagtctctcggaatccgc

SEQ ID NO: 1991639 - DNA, 25 bp, Homo sapien
ggcccgggaagtgcgcgaagccggc

SEQ ID NO: 1991640 - DNA, 25 bp, Homo sapien
ctcccagtctctcggaatccgcagc

SEQ ID NO: 1991641 - DNA, 25 bp, Homo sapien
ggctagtccatccaggccggccggg

SEQ ID NO: 1991642 - DNA, 25 bp, Homo sapien
gggaacccgcgaaggtccacagctc

SEQ ID NO: 1991643 - DNA, 25 bp, Homo sapien
cgggaacccgcgaaggtccacagct

SEQ ID NO: 1991644 - DNA, 25 bp, Homo sapien
caggctgcccgggccgtagccgtag

SEQ ID NO: 1991645 - DNA, 25 bp, Homo sapien
tgccaggcggctgaactcgcgcgcc

SEQ ID NO: 1991646 - DNA, 25 bp, Homo sapien
gtagccgtaggctagccgcggtgcg

SEQ ID NO: 1991647 - DNA, 25 bp, Homo sapien
aggcggctgaactcgcgcgcccgca

SEQ ID NO: 1991648 - DNA, 25 bp, Homo sapien
caccagttgttcatcgcgacagagc

SEQ ID NO: 1991649 - DNA, 25 bp, Homo sapien
taagtggtaacgagttctgagggcc

SEQ ID NO: 1991650 - DNA, 25 bp, Homo sapien
gagcagatacactcaaaccccggtg

SEQ ID NO: 1991651 - DNA, 25 bp, Homo sapien
gaaaagtactgttctctgagggaca

SEQ ID NO: 1991652 - DNA, 25 bp, Homo sapien
tgatgttaggagaaagtcaggcagc

SEQ ID NO: 1991653 - DNA, 25 bp, Homo sapien
tggctccaccagtagccattctggg

SEQ ID NO: 1991654 - DNA, 25 bp, Homo sapien
ccacagtcttctggagggccaagta

SEQ ID NO: 1991655 - DNA, 25 bp, Homo sapien
tccaatgctcgggacacaggtgtag

SEQ ID NO: 1991656 - DNA, 25 bp, Homo sapien
caccatacccagtttgtgctacaca

SEQ ID NO: 1991657 - DNA, 25 bp, Homo sapien
gatcttgtgagaacgcaccctcacg

SEQ ID NO: 1991658 - DNA, 25 bp, Homo sapien
caaccggatcttgtgagaacgcacc

SEQ ID NO: 1991659 - DNA, 25 bp, Homo sapien
tgagaacgcaccctcacgagaactg

SEQ ID NO: 1991660 - DNA, 25 bp, Homo sapien
caaggtacgtccacattttagcatg

SEQ ID NO: 1991661 - DNA, 25 bp, Homo sapien
tagtgtctgacttctttaatttagc

SEQ ID NO: 1991662 - DNA, 25 bp, Homo sapien
gcctttagtgtctgacttctttaat

SEQ ID NO: 1991663 - DNA, 25 bp, Homo sapien
tatcattaccaatcactccccaatg

SEQ ID NO: 1991664 - DNA, 25 bp, Homo sapien
tagtgaagctttcgagctggctctg

SEQ ID NO: 1991665 - DNA, 25 bp, Homo sapien
ttttccatgagatcactagtgaagc

SEQ ID NO: 1991666 - DNA, 25 bp, Homo sapien
ggcacctgcatggtcaagatagaca

SEQ ID NO: 1991667 - DNA, 25 bp, Homo sapien
cctgcatggtcaagatagacagttc

SEQ ID NO: 1991668 - DNA, 25 bp, Homo sapien
taatccagcgtttaacatgcacagg

SEQ ID NO: 1991669 - DNA, 25 bp, Homo sapien
cagaatattcctggcctattaatcc

SEQ ID NO: 1991670 - DNA, 25 bp, Homo sapien
tcagctttttgtggtcagaatattc

SEQ ID NO: 1991671 - DNA, 25 bp, Homo sapien
caggtatatcagctgcatgtagttg

SEQ ID NO: 1991672 - DNA, 25 bp, Homo sapien
ctgtagcgcacctgctccacagtgt

SEQ ID NO: 1991673 - DNA, 25 bp, Homo sapien
ctgctccacagtgtcatgggtgagc

SEQ ID NO: 1991674 - DNA, 25 bp, Homo sapien
ctccacagtgtcatgggtgagcttg

SEQ ID NO: 1991675 - DNA, 25 bp, Homo sapien
ccacagtgtcatgggtgagcttgct

SEQ ID NO: 1991676 - DNA, 25 bp, Homo sapien
tccacaataaacttaatcagagttg

SEQ ID NO: 1991677 - DNA, 25 bp, Homo sapien
caataaacttaatcagagttgatac

SEQ ID NO: 1991678 - DNA, 25 bp, Homo sapien
cactggatatctccaattggatatg

SEQ ID NO: 1991679 - DNA, 25 bp, Homo sapien
caaatatcactggatatctccaatt

SEQ ID NO: 1991680 - DNA, 25 bp, Homo sapien
tcccggcagtgaagatcacagtgta

SEQ ID NO: 1991681 - DNA, 25 bp, Homo sapien
tacccactacggaggtgtggctgtc

SEQ ID NO: 1991682 - DNA, 25 bp, Homo sapien
gaggtaacagaagcgactcccactg

SEQ ID NO: 1991683 - DNA, 25 bp, Homo sapien
tctgcggtggtgtggaagtgcgcca

SEQ ID NO: 1991684 - DNA, 25 bp, Homo sapien
ctgaagcactacgttcctctgcaga

SEQ ID NO: 1991685 - DNA, 25 bp, Homo sapien
cctctggcctgaccggggtggatat

SEQ ID NO: 1991686 - DNA, 25 bp, Homo sapien
tacgttcctctgcagaccacaggtc

SEQ ID NO: 1991687 - DNA, 25 bp, Homo sapien
ggatatgacatttatagccatggtc

SEQ ID NO: 1991688 - DNA, 25 bp, Homo sapien
caggcctgtaggaaacccgaagatc

SEQ ID NO: 1991689 - DNA, 25 bp, Homo sapien
tgctcacgtaggaggctgcatccag

SEQ ID NO: 1991690 - DNA, 25 bp, Homo sapien
tgctaggtacgcagaggctgtccct

SEQ ID NO: 1991691 - DNA, 25 bp, Homo sapien
tagaggagccgcacgattatggacc

SEQ ID NO: 1991692 - DNA, 25 bp, Homo sapien
gctctaaatttcctagggtggccag

SEQ ID NO: 1991693 - DNA, 25 bp, Homo sapien
tttgtacaccaagacctgtccagct

SEQ ID NO: 1991694 - DNA, 25 bp, Homo sapien
agtttgaaactacctgcctgtgcaa

SEQ ID NO: 1991695 - DNA, 25 bp, Homo sapien
tctgtcaagggatgtacttcgctga

SEQ ID NO: 1991696 - DNA, 25 bp, Homo sapien
tgttttagcgcgataacatcaagga

SEQ ID NO: 1991697 - DNA, 25 bp, Homo sapien
ggtgtcaaatccatgttttagcgcg

SEQ ID NO: 1991698 - DNA, 25 bp, Homo sapien
gaatgagatggtgccatcttcaaac

SEQ ID NO: 1991699 - DNA, 25 bp, Homo sapien
ctgtgaggcgctctagggtgtcaaa

SEQ ID NO: 1991700 - DNA, 25 bp, Homo sapien
cctggaaggcgtttaacctctctga

SEQ ID NO: 1991701 - DNA, 25 bp, Homo sapien
cattctgtgaagctagcaatctcct

SEQ ID NO: 1991702 - DNA, 25 bp, Homo sapien
caggaaagaaatcatgcctcatgcg

SEQ ID NO: 1991703 - DNA, 25 bp, Homo sapien
tgcgaagaccatcggcagacacagt

SEQ ID NO: 1991704 - DNA, 25 bp, Homo sapien
taaggctaaggttaaggcactgaag

SEQ ID NO: 1991705 - DNA, 25 bp, Homo sapien
tgcccctatgttgggctaaggctaa

SEQ ID NO: 1991706 - DNA, 25 bp, Homo sapien
tgcattgccatcagggcgaccctct

SEQ ID NO: 1991707 - DNA, 25 bp, Homo sapien
agggcgaccctctcttcccgtgaat

SEQ ID NO: 1991708 - DNA, 25 bp, Homo sapien
cttggaaagtactcactactcactg

SEQ ID NO: 1991709 - DNA, 25 bp, Homo sapien
gccctgttaatatctttccttggaa

SEQ ID NO: 1991710 - DNA, 25 bp, Homo sapien
ccgagctacctggacctgttagaca

SEQ ID NO: 1991711 - DNA, 25 bp, Homo sapien
ggactggtacagtcaacctttgcat

SEQ ID NO: 1991712 - DNA, 25 bp, Homo sapien
tgggacgacaggcattcaccaccat

SEQ ID NO: 1991713 - DNA, 25 bp, Homo sapien
tagctgggacgacaggcattcacca

SEQ ID NO: 1991714 - DNA, 25 bp, Homo sapien
gggacgacaggcattcaccaccatg

SEQ ID NO: 1991715 - DNA, 25 bp, Homo sapien
gctgggacgacaggcattcaccacc

SEQ ID NO: 1991716 - DNA, 25 bp, Homo sapien
aaattgatgattgggccctgaacct

SEQ ID NO: 1991717 - DNA, 25 bp, Homo sapien
taggtatactgagccaaggtgaagg

SEQ ID NO: 1991718 - DNA, 25 bp, Homo sapien
gaggacagggccacgtaggtatact

SEQ ID NO: 1991719 - DNA, 25 bp, Homo sapien
gaatcgctgtaaatccgcaccacag

SEQ ID NO: 1991720 - DNA, 25 bp, Homo sapien
tcttagtagtgtcagggctggttct

SEQ ID NO: 1991721 - DNA, 25 bp, Homo sapien
ttagtagtgtcagggctggttctgc

SEQ ID NO: 1991722 - DNA, 25 bp, Homo sapien
ttcttagtagtgtcagggctggttc

SEQ ID NO: 1991723 - DNA, 25 bp, Homo sapien
gcttcttagtagtgtcagggctggt

SEQ ID NO: 1991724 - DNA, 25 bp, Homo sapien
cacagttagtcatgccttagccaca

SEQ ID NO: 1991725 - DNA, 25 bp, Homo sapien
aactcatcctgtgtctagccctggg

SEQ ID NO: 1991726 - DNA, 25 bp, Homo sapien
cagctgatgtttccgaaggccacca

SEQ ID NO: 1991727 - DNA, 25 bp, Homo sapien
gaaaaagagacagccaaacccagct

SEQ ID NO: 1991728 - DNA, 25 bp, Homo sapien
acagaagcagccagttcgcaggtgg

SEQ ID NO: 1991729 - DNA, 25 bp, Homo sapien
cagttcgcaggtggatgttgtaaag

SEQ ID NO: 1991730 - DNA, 25 bp, Homo sapien
gatgttgtaaagactggccattttg

SEQ ID NO: 1991731 - DNA, 25 bp, Homo sapien
aagcagccagttcgcaggtggatgt

SEQ ID NO: 1991732 - DNA, 25 bp, Homo sapien
aggtcagcttgagtgcccctgcagg

SEQ ID NO: 1991733 - DNA, 25 bp, Homo sapien
tcagacacccgaacaaatggagcca

SEQ ID NO: 1991734 - DNA, 25 bp, Homo sapien
tggagcagtcctggacaaaccttgg

SEQ ID NO: 1991735 - DNA, 25 bp, Homo sapien
ggagccacagcgttccataggacca

SEQ ID NO: 1991736 - DNA, 25 bp, Homo sapien
tgtgggctgcccatctatgaggtcc

SEQ ID NO: 1991737 - DNA, 25 bp, Homo sapien
catcatccagcgtcgacatgtatcc

SEQ ID NO: 1991738 - DNA, 25 bp, Homo sapien
tatgaggtccatattgtccccacag

SEQ ID NO: 1991739 - DNA, 25 bp, Homo sapien
gacatgtatccaaatgaaatcctca

SEQ ID NO: 1991740 - DNA, 25 bp, Homo sapien
catgacagcaggtataacatcagcc

SEQ ID NO: 1991741 - DNA, 25 bp, Homo sapien
tagacgagttgttccaaaccctgga

SEQ ID NO: 1991742 - DNA, 25 bp, Homo sapien
tcttcctgaggcgagaggctacgtc

SEQ ID NO: 1991743 - DNA, 25 bp, Homo sapien
tctctgaaggagtcggctgggttct

SEQ ID NO: 1991744 - DNA, 25 bp, Homo sapien
ttgattggatagagataaaggttag

SEQ ID NO: 1991745 - DNA, 25 bp, Homo sapien
ttggatagagataaaggttagtgac

SEQ ID NO: 1991746 - DNA, 25 bp, Homo sapien
agagataaaggttagtgacaacatg

SEQ ID NO: 1991747 - DNA, 25 bp, Homo sapien
ggatttgattggatagagataaagg

SEQ ID NO: 1991748 - DNA, 25 bp, Homo sapien
gaatgcctcaggaccaacgctatgt

SEQ ID NO: 1991749 - DNA, 25 bp, Homo sapien
gctgtctgcatcgaatatcacgttg

SEQ ID NO: 1991750 - DNA, 25 bp, Homo sapien
aaattcatcaataagtaggcggtac

SEQ ID NO: 1991751 - DNA, 25 bp, Homo sapien
tatcacgttgcatacatttgtcgcg

SEQ ID NO: 1991752 - DNA, 25 bp, Homo sapien
gaccatgatcctttgccgcaagtcg

SEQ ID NO: 1991753 - DNA, 25 bp, Homo sapien
ggtcatatagcagcccttggtttcc

SEQ ID NO: 1991754 - DNA, 25 bp, Homo sapien
ccgcaagtcgatgaagggctggatc

SEQ ID NO: 1991755 - DNA, 25 bp, Homo sapien
ctgactcaggcaaacaccattgtga

SEQ ID NO: 1991756 - DNA, 25 bp, Homo sapien
cctgctttggcgaatctgagtccgt

SEQ ID NO: 1991757 - DNA, 25 bp, Homo sapien
aagaggcacctctataggctccatc

SEQ ID NO: 1991758 - DNA, 25 bp, Homo sapien
tcagcacagaccctgctttggcgaa

SEQ ID NO: 1991759 - DNA, 25 bp, Homo sapien
ggcgaatctgagtccgttcactatt

SEQ ID NO: 1991760 - DNA, 25 bp, Homo sapien
tgacaaggacggccaaaaaatgttg

SEQ ID NO: 1991761 - DNA, 25 bp, Homo sapien
tgaactttgtttgatcaaatgacaa

SEQ ID NO: 1991762 - DNA, 25 bp, Homo sapien
tctttgcattcctttgagagtttga

SEQ ID NO: 1991763 - DNA, 25 bp, Homo sapien
gcattcctttgagagtttgaacttt

SEQ ID NO: 1991764 - DNA, 25 bp, Homo sapien
ctgaaaatgatggagcatttaaaag

SEQ ID NO: 1991765 - DNA, 25 bp, Homo sapien
aaaagaagagttgctttctcagaat

SEQ ID NO: 1991766 - DNA, 25 bp, Homo sapien
aatgatggagcatttaaaagaagag

SEQ ID NO: 1991767 - DNA, 25 bp, Homo sapien
gctttctcagaatgccagtgaatca

SEQ ID NO: 1991768 - DNA, 25 bp, Homo sapien
tggtgtttagttgccggtgaagttc

SEQ ID NO: 1991769 - DNA, 25 bp, Homo sapien
caaaatactggatgtgttgatcagc

SEQ ID NO: 1991770 - DNA, 25 bp, Homo sapien
ctggtgtttagttgccggtgaagtt

SEQ ID NO: 1991771 - DNA, 25 bp, Homo sapien
ttccaaaatactggatgtgttgatc

SEQ ID NO: 1991772 - DNA, 25 bp, Homo sapien
gggctgaacttcatgactctcagat

SEQ ID NO: 1991773 - DNA, 25 bp, Homo sapien
gaagctggacaaaagggcctgctta

SEQ ID NO: 1991774 - DNA, 25 bp, Homo sapien
gaatgattaaacagtgagagctagg

SEQ ID NO: 1991775 - DNA, 25 bp, Homo sapien
tctgtacatgaagcagggctgaact

SEQ ID NO: 1991776 - DNA, 25 bp, Homo sapien
gctgagatccttcagtgagaataat

SEQ ID NO: 1991777 - DNA, 25 bp, Homo sapien
gataataatattggcacgaaaacgc

SEQ ID NO: 1991778 - DNA, 25 bp, Homo sapien
ctggaaacgcaaagagccaattgaa

SEQ ID NO: 1991779 - DNA, 25 bp, Homo sapien
cgcaaagagccaattgaaatctcat

SEQ ID NO: 1991780 - DNA, 25 bp, Homo sapien
tttgtaacgccacaaagctgtgtcc

SEQ ID NO: 1991781 - DNA, 25 bp, Homo sapien
acttgaccgtgctcgagagtggaaa

SEQ ID NO: 1991782 - DNA, 25 bp, Homo sapien
gggatacaaggactcaagcccaggc

SEQ ID NO: 1991783 - DNA, 25 bp, Homo sapien
tcactattatacacgaggatccctg

SEQ ID NO: 1991784 - DNA, 25 bp, Homo sapien
ttggctctgatactggcactgtaca

SEQ ID NO: 1991785 - DNA, 25 bp, Homo sapien
cattggctctgatactggcactgta

SEQ ID NO: 1991786 - DNA, 25 bp, Homo sapien
ggctctgatactggcactgtacaaa

SEQ ID NO: 1991787 - DNA, 25 bp, Homo sapien
ctgatactggcactgtacaaagctc

SEQ ID NO: 1991788 - DNA, 25 bp, Homo sapien
aaaacatgctggtttcgttgcccag

SEQ ID NO: 1991789 - DNA, 25 bp, Homo sapien
cgttgcccagtttgctggtcgatgc

SEQ ID NO: 1991790 - DNA, 25 bp, Homo sapien
tttgctggtcgatgcaaatcatctg

SEQ ID NO: 1991791 - DNA, 25 bp, Homo sapien
ctttgtttcacgactctcagaaagt

SEQ ID NO: 1991792 - DNA, 25 bp, Homo sapien
gaaacatggggaggataaatccaat

SEQ ID NO: 1991793 - DNA, 25 bp, Homo sapien
ccaatgatgcatgcatcaggtacat

SEQ ID NO: 1991794 - DNA, 25 bp, Homo sapien
ggaggataaatccaatgatgcatgc

SEQ ID NO: 1991795 - DNA, 25 bp, Homo sapien
taaatccaatgatgcatgcatcagg

SEQ ID NO: 1991796 - DNA, 25 bp, Homo sapien
cattctctttcaacacagggagcac

SEQ ID NO: 1991797 - DNA, 25 bp, Homo sapien
cacattctctttcaacacagggagc

SEQ ID NO: 1991798 - DNA, 25 bp, Homo sapien
ccacattctctttcaacacagggag

SEQ ID NO: 1991799 - DNA, 25 bp, Homo sapien
ttccacattctctttcaacacaggg

SEQ ID NO: 1991800 - DNA, 25 bp, Homo sapien
ggtgtttctcagatgcaggtaaatc

SEQ ID NO: 1991801 - DNA, 25 bp, Homo sapien
ttctcagatgcaggtaaatcatgac

SEQ ID NO: 1991802 - DNA, 25 bp, Homo sapien
ttaggaggtaacatcctggtgtttc

SEQ ID NO: 1991803 - DNA, 25 bp, Homo sapien
taggaggtaacatcctggtgtttct

SEQ ID NO: 1991804 - DNA, 25 bp, Homo sapien
tgtgcaatcattaggctccatctca

SEQ ID NO: 1991805 - DNA, 25 bp, Homo sapien
tcggtgatctcaggaaccagagtca

SEQ ID NO: 1991806 - DNA, 25 bp, Homo sapien
tggaaagttccctcctgcatgaaac

SEQ ID NO: 1991807 - DNA, 25 bp, Homo sapien
catttgtcagcggaaggtcttggaa

SEQ ID NO: 1991808 - DNA, 25 bp, Homo sapien
taagtagataaccaaataatagtgc

SEQ ID NO: 1991809 - DNA, 25 bp, Homo sapien
gacactagagatatactggcacagg

SEQ ID NO: 1991810 - DNA, 25 bp, Homo sapien
tagtgctgtaaaggagaggatctgc

SEQ ID NO: 1991811 - DNA, 25 bp, Homo sapien
tacagtctagtgaaaacagatcaat

SEQ ID NO: 1991812 - DNA, 25 bp, Homo sapien
taaaggattcttgatgctcaccaaa

SEQ ID NO: 1991813 - DNA, 25 bp, Homo sapien
taaaaggaccatgacgcgaatgccc

SEQ ID NO: 1991814 - DNA, 25 bp, Homo sapien
ttgtgactctaacaccaaggtttgg

SEQ ID NO: 1991815 - DNA, 25 bp, Homo sapien
gataagcggacatctttcaacagca

SEQ ID NO: 1991816 - DNA, 25 bp, Homo sapien
ccagtccacgagctgaacatggctc

SEQ ID NO: 1991817 - DNA, 25 bp, Homo sapien
gcaggttgagtatcatgcagctcag

SEQ ID NO: 1991818 - DNA, 25 bp, Homo sapien
ctcaggagcgggaatgtccacaggt

SEQ ID NO: 1991819 - DNA, 25 bp, Homo sapien
ggtcccttttgcgagtgtggttgca

SEQ ID NO: 1991820 - DNA, 25 bp, Homo sapien
tagatgtctgggatgcattcccttc

SEQ ID NO: 1991821 - DNA, 25 bp, Homo sapien
tgcacaaatcgcagtgaccacattt

SEQ ID NO: 1991822 - DNA, 25 bp, Homo sapien
ggaatttgtagtagccgacatctgc

SEQ ID NO: 1991823 - DNA, 25 bp, Homo sapien
tcatttctagaaactgcgcatagat

SEQ ID NO: 1991824 - DNA, 25 bp, Homo sapien
catcagttcattgctctcggtgact

SEQ ID NO: 1991825 - DNA, 25 bp, Homo sapien
ttctgcatcagttcattgctctcgg

SEQ ID NO: 1991826 - DNA, 25 bp, Homo sapien
tgcatcagttcattgctctcggtga

SEQ ID NO: 1991827 - DNA, 25 bp, Homo sapien
agttcattgctctcggtgactcttg

SEQ ID NO: 1991828 - DNA, 25 bp, Homo sapien
ttggccctgctacccactttcttgg

SEQ ID NO: 1991829 - DNA, 25 bp, Homo sapien
actttcttggcagcatctgtcacca

SEQ ID NO: 1991830 - DNA, 25 bp, Homo sapien
ctttcttggcagcatctgtcaccat

SEQ ID NO: 1991831 - DNA, 25 bp, Homo sapien
ctggaggacaccttggccctgctac

SEQ ID NO: 1991832 - DNA, 25 bp, Homo sapien
gcctttccagatgaaggcggcggcg

SEQ ID NO: 1991833 - DNA, 25 bp, Homo sapien
agggagccggcttcggcagcaagag

SEQ ID NO: 1991834 - DNA, 25 bp, Homo sapien
agatttggaataccccggcagggca

SEQ ID NO: 1991835 - DNA, 25 bp, Homo sapien
gctgcccagatttggaataccccgg

SEQ ID NO: 1991836 - DNA, 25 bp, Homo sapien
gacgcccgggtagctgcgcgcaggg

SEQ ID NO: 1991837 - DNA, 25 bp, Homo sapien
ggccgggacgcccgggtagctgcgc

SEQ ID NO: 1991838 - DNA, 25 bp, Homo sapien
gggacgcccgggtagctgcgcgcag

SEQ ID NO: 1991839 - DNA, 25 bp, Homo sapien
cgggacgcccgggtagctgcgcgca

SEQ ID NO: 1991840 - DNA, 25 bp, Homo sapien
acccggcaagccagcgtggccatga

SEQ ID NO: 1991841 - DNA, 25 bp, Homo sapien
gcaagccagcgtggccatgatgcat

SEQ ID NO: 1991842 - DNA, 25 bp, Homo sapien
ctgcacccggcaagccagcgtggcc

SEQ ID NO: 1991843 - DNA, 25 bp, Homo sapien
cggcaagccagcgtggccatgatgc

SEQ ID NO: 1991844 - DNA, 25 bp, Homo sapien
ggtgccgagcgcgaggtcctcgcgg

SEQ ID NO: 1991845 - DNA, 25 bp, Homo sapien
tgctgttgaaagggtccgtgtcgtc

SEQ ID NO: 1991846 - DNA, 25 bp, Homo sapien
gcgcctgcagcagcctatggacccc

SEQ ID NO: 1991847 - DNA, 25 bp, Homo sapien
gtcctcgcggaacgtgaacagcggc

SEQ ID NO: 1991848 - DNA, 25 bp, Homo sapien
ctcccaatcaaatgtgcttttgtgg

SEQ ID NO: 1991849 - DNA, 25 bp, Homo sapien
ggccagagaggtttccacgactgta

SEQ ID NO: 1991850 - DNA, 25 bp, Homo sapien
gagaggtttccacgactgtatccgt

SEQ ID NO: 1991851 - DNA, 25 bp, Homo sapien
tgtctcccaatcaaatgtgcttttg

SEQ ID NO: 1991852 - DNA, 25 bp, Homo sapien
tctcactcatgtgaccaggtgactt

SEQ ID NO: 1991853 - DNA, 25 bp, Homo sapien
tattctgagttcaagtgtcagtctt

SEQ ID NO: 1991854 - DNA, 25 bp, Homo sapien
tgagttcaagtgtcagtcttggagg

SEQ ID NO: 1991855 - DNA, 25 bp, Homo sapien
gtggtattctgagttcaagtgtcag

SEQ ID NO: 1991856 - DNA, 25 bp, Homo sapien
tctgagttcaagtgtcagtcttgga

SEQ ID NO: 1991857 - DNA, 25 bp, Homo sapien
caggcatgcccacaccatccaggac

SEQ ID NO: 1991858 - DNA, 25 bp, Homo sapien
cacgagagcccccaggcatgcccac

SEQ ID NO: 1991859 - DNA, 25 bp, Homo sapien
atgcccacaccatccaggacagcat

SEQ ID NO: 1991860 - DNA, 25 bp, Homo sapien
cccaggcatgcccacaccatccagg

SEQ ID NO: 1991861 - DNA, 25 bp, Homo sapien
ccggactgccggtgtctggtgattc

SEQ ID NO: 1991862 - DNA, 25 bp, Homo sapien
agctcagacactagccgctcccgga

SEQ ID NO: 1991863 - DNA, 25 bp, Homo sapien
aagctgcggtcaggagcctgcctga

SEQ ID NO: 1991864 - DNA, 25 bp, Homo sapien
attcacagaagctgcggtcaggagc

SEQ ID NO: 1991865 - DNA, 25 bp, Homo sapien
ctttgcagtcaaaggtgaggatcca

SEQ ID NO: 1991866 - DNA, 25 bp, Homo sapien
gtcaaaggtgaggatccacgttggg

SEQ ID NO: 1991867 - DNA, 25 bp, Homo sapien
tctttgcagtcaaaggtgaggatcc

SEQ ID NO: 1991868 - DNA, 25 bp, Homo sapien
ggtgaggatccacgttgggagtggg

SEQ ID NO: 1991869 - DNA, 25 bp, Homo sapien
tcagcaaagagggcacagcagggca

SEQ ID NO: 1991870 - DNA, 25 bp, Homo sapien
cagcaaagagggcacagcagggcac

SEQ ID NO: 1991871 - DNA, 25 bp, Homo sapien
ttcagggcctagcaaatcacagcac

SEQ ID NO: 1991872 - DNA, 25 bp, Homo sapien
ggagtcacagacaccaatcaggtaa

SEQ ID NO: 1991873 - DNA, 25 bp, Homo sapien
ttcactaggacatcgcagatctggg

SEQ ID NO: 1991874 - DNA, 25 bp, Homo sapien
tcagccacagaacggtgcgtgcagt

SEQ ID NO: 1991875 - DNA, 25 bp, Homo sapien
actgtcaccagaagaacgatgcaga

SEQ ID NO: 1991876 - DNA, 25 bp, Homo sapien
gtcaccagaagaacgatgcagaacc

SEQ ID NO: 1991877 - DNA, 25 bp, Homo sapien
caccagaagaacgatgcagaaccac

SEQ ID NO: 1991878 - DNA, 25 bp, Homo sapien
ccagaagaacgatgcagaaccacac

SEQ ID NO: 1991879 - DNA, 25 bp, Homo sapien
agaaacaggtaggatttagtgaagc

SEQ ID NO: 1991880 - DNA, 25 bp, Homo sapien
caaactgaagtagtcgaggatggtc

SEQ ID NO: 1991881 - DNA, 25 bp, Homo sapien
ggctctgtgcccctatgggcatcaa

SEQ ID NO: 1991882 - DNA, 25 bp, Homo sapien
ctagtactttatagcataaagctga

SEQ ID NO: 1991883 - DNA, 25 bp, Homo sapien
ttggaatcacaagaccctactgccc

SEQ ID NO: 1991884 - DNA, 25 bp, Homo sapien
tacacacccatggagtcggtcctag

SEQ ID NO: 1991885 - DNA, 25 bp, Homo sapien
gggccctgtgcaactacactcgtta

SEQ ID NO: 1991886 - DNA, 25 bp, Homo sapien
cactgtcccgttggcctttgcttaa

SEQ ID NO: 1991887 - DNA, 25 bp, Homo sapien
catgggggaagataacattacaggg

SEQ ID NO: 1991888 - DNA, 25 bp, Homo sapien
tggctctaggtttggtggccaggac

SEQ ID NO: 1991889 - DNA, 25 bp, Homo sapien
gctctaggtttggtggccaggacat

SEQ ID NO: 1991890 - DNA, 25 bp, Homo sapien
agccatgggggaagataacattaca

SEQ ID NO: 1991891 - DNA, 25 bp, Homo sapien
ctcataattactaaaggcttgatgg

SEQ ID NO: 1991892 - DNA, 25 bp, Homo sapien
cataattactaaaggcttgatggtg

SEQ ID NO: 1991893 - DNA, 25 bp, Homo sapien
tactaaaggcttgatggtgaatttc

SEQ ID NO: 1991894 - DNA, 25 bp, Homo sapien
taaaggcttgatggtgaatttcagc

SEQ ID NO: 1991895 - DNA, 25 bp, Homo sapien
aagagcctgttatacccaacctgct

SEQ ID NO: 1991896 - DNA, 25 bp, Homo sapien
gagaaagagcctgttatacccaacc

SEQ ID NO: 1991897 - DNA, 25 bp, Homo sapien
gaaagagcctgttatacccaacctg

SEQ ID NO: 1991898 - DNA, 25 bp, Homo sapien
agagaaagagcctgttatacccaac

SEQ ID NO: 1991899 - DNA, 25 bp, Homo sapien
agggtggcctccaaatccaggtagg

SEQ ID NO: 1991900 - DNA, 25 bp, Homo sapien
caaatccaggtaggcgccattgtga

SEQ ID NO: 1991901 - DNA, 25 bp, Homo sapien
cctccaaatccaggtaggcgccatt

SEQ ID NO: 1991902 - DNA, 25 bp, Homo sapien
tggcctccaaatccaggtaggcgcc

SEQ ID NO: 1991903 - DNA, 25 bp, Homo sapien
gtccttaggatgatgctgtgcttct

SEQ ID NO: 1991904 - DNA, 25 bp, Homo sapien
gctgcgtccttaggatgatgctgtg

SEQ ID NO: 1991905 - DNA, 25 bp, Homo sapien
gacagctgcgtccttaggatgatgc

SEQ ID NO: 1991906 - DNA, 25 bp, Homo sapien
tgcgtccttaggatgatgctgtgct

SEQ ID NO: 1991907 - DNA, 25 bp, Homo sapien
gaactcgcagctattgtggcaaaac

SEQ ID NO: 1991908 - DNA, 25 bp, Homo sapien
caaaacatgccggtctacctgtgat

SEQ ID NO: 1991909 - DNA, 25 bp, Homo sapien
cataaagaggtttgtgagcaagcac

SEQ ID NO: 1991910 - DNA, 25 bp, Homo sapien
tccagcggagctgaagatgcttatg

SEQ ID NO: 1991911 - DNA, 25 bp, Homo sapien
tattggacacttgaaaggacaggcc

SEQ ID NO: 1991912 - DNA, 25 bp, Homo sapien
gccagttggccctctgaacattttt

SEQ ID NO: 1991913 - DNA, 25 bp, Homo sapien
cagagaatcaatcgccagggtttta

SEQ ID NO: 1991914 - DNA, 25 bp, Homo sapien
gagatttagttatcagagccagttg

SEQ ID NO: 1991915 - DNA, 25 bp, Homo sapien
gcaaagagggtgtaccacctgcagc

SEQ ID NO: 1991916 - DNA, 25 bp, Homo sapien
acagggcaaagagggtgtaccacct

SEQ ID NO: 1991917 - DNA, 25 bp, Homo sapien
gcagctccaaatctaagctgcatgg

SEQ ID NO: 1991918 - DNA, 25 bp, Homo sapien
tgcagctccaaatctaagctgcatg

SEQ ID NO: 1991919 - DNA, 25 bp, Homo sapien
agcaaggacactgtgagcttagcca

SEQ ID NO: 1991920 - DNA, 25 bp, Homo sapien
acagcaaggacactgtgagcttagc

SEQ ID NO: 1991921 - DNA, 25 bp, Homo sapien
cagcaaggacactgtgagcttagcc

SEQ ID NO: 1991922 - DNA, 25 bp, Homo sapien
gcaacaagatgaacatctttggaag

SEQ ID NO: 1991923 - DNA, 25 bp, Homo sapien
tttaaaggaccaagcactgggagtc

SEQ ID NO: 1991924 - DNA, 25 bp, Homo sapien
gtgtcaaacccatctcatgctgagg

SEQ ID NO: 1991925 - DNA, 25 bp, Homo sapien
gaatcagaggatcctggcatcaaag

SEQ ID NO: 1991926 - DNA, 25 bp, Homo sapien
tatctgattaacccacagagctcat

SEQ ID NO: 1991927 - DNA, 25 bp, Homo sapien
tctgattaacccacagagctcattc

SEQ ID NO: 1991928 - DNA, 25 bp, Homo sapien
atctgattaacccacagagctcatt

SEQ ID NO: 1991929 - DNA, 25 bp, Homo sapien
ttatctgattaacccacagagctca

SEQ ID NO: 1991930 - DNA, 25 bp, Homo sapien
tccagtctgatggaaggccccttag

SEQ ID NO: 1991931 - DNA, 25 bp, Homo sapien
gcctaagaaatctccctcagccgag

SEQ ID NO: 1991932 - DNA, 25 bp, Homo sapien
catgcacgccttgggatctgtctcc

SEQ ID NO: 1991933 - DNA, 25 bp, Homo sapien
taagggccttctagacacatgcacg

SEQ ID NO: 1991934 - DNA, 25 bp, Homo sapien
catttggggacgacagcatcccacc

SEQ ID NO: 1991935 - DNA, 25 bp, Homo sapien
gttacatttggggacgacagcatcc

SEQ ID NO: 1991936 - DNA, 25 bp, Homo sapien
tctgccatcaacttgttacatttgg

SEQ ID NO: 1991937 - DNA, 25 bp, Homo sapien
atcaaagtctgccatcaacttgtta

SEQ ID NO: 1991938 - DNA, 25 bp, Homo sapien
caaaaacacgataactggaggccag

SEQ ID NO: 1991939 - DNA, 25 bp, Homo sapien
agaccagtctagcctggtcaatatg

SEQ ID NO: 1991940 - DNA, 25 bp, Homo sapien
tgtatcaaaaacacgataactggag

SEQ ID NO: 1991941 - DNA, 25 bp, Homo sapien
aaacacgataactggaggccaggcc

SEQ ID NO: 1991942 - DNA, 25 bp, Homo sapien
taaaaagctgtccagatactgggtc

SEQ ID NO: 1991943 - DNA, 25 bp, Homo sapien
tgagccacccatcaatgcagggaga

SEQ ID NO: 1991944 - DNA, 25 bp, Homo sapien
gctacctggtaaagaggagtgcccg

SEQ ID NO: 1991945 - DNA, 25 bp, Homo sapien
ggacagcttctaaggtaccccaggc

SEQ ID NO: 1991946 - DNA, 25 bp, Homo sapien
atctccaaaagaaaacactaattca

SEQ ID NO: 1991947 - DNA, 25 bp, Homo sapien
ctaatctccaaaagaaaacactaat

SEQ ID NO: 1991948 - DNA, 25 bp, Homo sapien
tccaaaagaaaacactaattcatta

SEQ ID NO: 1991949 - DNA, 25 bp, Homo sapien
tctccaaaagaaaacactaattcat

SEQ ID NO: 1991950 - DNA, 25 bp, Homo sapien
agggtctctcgcaaggagtgcacca

SEQ ID NO: 1991951 - DNA, 25 bp, Homo sapien
cagggtctctcgcaaggagtgcacc

SEQ ID NO: 1991952 - DNA, 25 bp, Homo sapien
ccctcgcccacggcagactcctgtg

SEQ ID NO: 1991953 - DNA, 25 bp, Homo sapien
tccctcgcccacggcagactcctgt

SEQ ID NO: 1991954 - DNA, 25 bp, Homo sapien
cctcgcccacggcagactcctgtgg

SEQ ID NO: 1991955 - DNA, 25 bp, Homo sapien
gcctggggtggtggcagaaggaaac

SEQ ID NO: 1991956 - DNA, 25 bp, Homo sapien
tcacaaggtggcagccacagcaggg

SEQ ID NO: 1991957 - DNA, 25 bp, Homo sapien
cagggcctggggtggtggcagaagg

SEQ ID NO: 1991958 - DNA, 25 bp, Homo sapien
gggcctggggtggtggcagaaggaa

SEQ ID NO: 1991959 - DNA, 25 bp, Homo sapien
tcacaactgttagagcatggcccaa

SEQ ID NO: 1991960 - DNA, 25 bp, Homo sapien
cagaagccagataggacaagaacca

SEQ ID NO: 1991961 - DNA, 25 bp, Homo sapien
atcatgcgcatatccctcctgcagg

SEQ ID NO: 1991962 - DNA, 25 bp, Homo sapien
ggcactgaaccaacttatgggacaa

SEQ ID NO: 1991963 - DNA, 25 bp, Homo sapien
ttctctacttcatctatggcaccag

SEQ ID NO: 1991964 - DNA, 25 bp, Homo sapien
tctctacttcatctatggcaccagc

SEQ ID NO: 1991965 - DNA, 25 bp, Homo sapien
gggatgactgtgagtagtggaggct

SEQ ID NO: 1991966 - DNA, 25 bp, Homo sapien
agtggaggcttgaggtacccccgat

SEQ ID NO: 1991967 - DNA, 25 bp, Homo sapien
gtgagtagtggaggcttgaggtacc

SEQ ID NO: 1991968 - DNA, 25 bp, Homo sapien
tgactgtgagtagtggaggcttgag

SEQ ID NO: 1991969 - DNA, 25 bp, Homo sapien
tcgtccgctggagttgtatagtttt

SEQ ID NO: 1991970 - DNA, 25 bp, Homo sapien
ccttctcaaatctcgtccgctggag

SEQ ID NO: 1991971 - DNA, 25 bp, Homo sapien
gagaagagggcccttctcaaatctc

SEQ ID NO: 1991972 - DNA, 25 bp, Homo sapien
aatctcgtccgctggagttgtatag

SEQ ID NO: 1991973 - DNA, 25 bp, Homo sapien
gaaataatcctagactattcaatag

SEQ ID NO: 1991974 - DNA, 25 bp, Homo sapien
tattacgtttcctactccagacttg

SEQ ID NO: 1991975 - DNA, 25 bp, Homo sapien
ggtgtttcagaccacaatctcgttg

SEQ ID NO: 1991976 - DNA, 25 bp, Homo sapien
tgctctctgtataagatgttccaag

SEQ ID NO: 1991977 - DNA, 25 bp, Homo sapien
cccaccttgatcaaacatgtcagac

SEQ ID NO: 1991978 - DNA, 25 bp, Homo sapien
ttctgatagttctgatcagcctcag

SEQ ID NO: 1991979 - DNA, 25 bp, Homo sapien
gccactacaaattcatgcaccaaat

SEQ ID NO: 1991980 - DNA, 25 bp, Homo sapien
cccttaagatgtagttctgatagtt

SEQ ID NO: 1991981 - DNA, 25 bp, Homo sapien
caaaagggaaagccataaggagaca

SEQ ID NO: 1991982 - DNA, 25 bp, Homo sapien
gccaaaagggaaagccataaggaga

SEQ ID NO: 1991983 - DNA, 25 bp, Homo sapien
atggctgcatgaaagccacgccgca

SEQ ID NO: 1991984 - DNA, 25 bp, Homo sapien
aagccacgccgcagggagattttct

SEQ ID NO: 1991985 - DNA, 25 bp, Homo sapien
gcatgaaagccacgccgcagggaga

SEQ ID NO: 1991986 - DNA, 25 bp, Homo sapien
aaagccacgccgcagggagattttc

SEQ ID NO: 1991987 - DNA, 25 bp, Homo sapien
gagcagctgggcatataacagcagc

SEQ ID NO: 1991988 - DNA, 25 bp, Homo sapien
tgagtccattccatgccacctacag

SEQ ID NO: 1991989 - DNA, 25 bp, Homo sapien
tcatcgggagaccattaaaaaggcc

SEQ ID NO: 1991990 - DNA, 25 bp, Homo sapien
caaagtcattgatccttacgaagct

SEQ ID NO: 1991991 - DNA, 25 bp, Homo sapien
gcgtaaaaatacaattatcagggag

SEQ ID NO: 1991992 - DNA, 25 bp, Homo sapien
atacaattatcagggagtcagggag

SEQ ID NO: 1991993 - DNA, 25 bp, Homo sapien
taaaaatacaattatcagggagtca

SEQ ID NO: 1991994 - DNA, 25 bp, Homo sapien
cctggcgtaaaaatacaattatcag

SEQ ID NO: 1991995 - DNA, 25 bp, Homo sapien
cctactgagggacaattggtacatt

SEQ ID NO: 1991996 - DNA, 25 bp, Homo sapien
catttgatactgcagaatctgtagg

SEQ ID NO: 1991997 - DNA, 25 bp, Homo sapien
ggatgtactgcagtctaaccattaa

SEQ ID NO: 1991998 - DNA, 25 bp, Homo sapien
tagagtccttgcattaaccatttga

SEQ ID NO: 1991999 - DNA, 25 bp, Homo sapien
gaaaaaactattccatcgccacaaa

SEQ ID NO: 1992000 - DNA, 25 bp, Homo sapien
gctacagtactatatcaagaccaag

SEQ ID NO: 1992001 - DNA, 25 bp, Homo sapien
gagatcccaggtactcttcaccagt

SEQ ID NO: 1992002 - DNA, 25 bp, Homo sapien
aatgtgcatggatagctccatatca

SEQ ID NO: 1992003 - DNA, 25 bp, Homo sapien
caaggatgtctgacacggaaacaca

SEQ ID NO: 1992004 - DNA, 25 bp, Homo sapien
cacggaaacacaacgtctttgttca

SEQ ID NO: 1992005 - DNA, 25 bp, Homo sapien
cttctagacacaaggatgtctgaca

SEQ ID NO: 1992006 - DNA, 25 bp, Homo sapien
tgtctgacacggaaacacaacgtct

SEQ ID NO: 1992007 - DNA, 25 bp, Homo sapien
tttgttcatcgtaggtggactgatt

SEQ ID NO: 1992008 - DNA, 25 bp, Homo sapien
acctcaggccagctgagtttaaaag

SEQ ID NO: 1992009 - DNA, 25 bp, Homo sapien
tcaggccagctgagtttaaaaggtt

SEQ ID NO: 1992010 - DNA, 25 bp, Homo sapien
taggtggactgattagggtttcttc

SEQ ID NO: 1992011 - DNA, 25 bp, Homo sapien
aaagcacaccgactgctccgcatgc

SEQ ID NO: 1992012 - DNA, 25 bp, Homo sapien
gtggcgacctctccacctcaacaaa

SEQ ID NO: 1992013 - DNA, 25 bp, Homo sapien
ctttcagcctgtggcgacctctcca

SEQ ID NO: 1992014 - DNA, 25 bp, Homo sapien
gccagggtggttctccttaatgctt

SEQ ID NO: 1992015 - DNA, 25 bp, Homo sapien
gaggggactcgttgctgagcccatg

SEQ ID NO: 1992016 - DNA, 25 bp, Homo sapien
catgcaaaggccacataaactgtgt

SEQ ID NO: 1992017 - DNA, 25 bp, Homo sapien
ctgaggggactcgttgctgagccca

SEQ ID NO: 1992018 - DNA, 25 bp, Homo sapien
atgcaaaggccacataaactgtgtc

SEQ ID NO: 1992019 - DNA, 25 bp, Homo sapien
aatgaaataccagtggaagcacaca

SEQ ID NO: 1992020 - DNA, 25 bp, Homo sapien
atccaatgaaataccagtggaagca

SEQ ID NO: 1992021 - DNA, 25 bp, Homo sapien
ccaatgaaataccagtggaagcaca

SEQ ID NO: 1992022 - DNA, 25 bp, Homo sapien
tgaaataccagtggaagcacacagc

SEQ ID NO: 1992023 - DNA, 25 bp, Homo sapien
cagagttttaggtgcccatatgccc

SEQ ID NO: 1992024 - DNA, 25 bp, Homo sapien
cagacttctgtgagtgagtttccac

SEQ ID NO: 1992025 - DNA, 25 bp, Homo sapien
gaattcatcgggaaagacagggtcc

SEQ ID NO: 1992026 - DNA, 25 bp, Homo sapien
tgcactaatttgagtccagaccaga

SEQ ID NO: 1992027 - DNA, 25 bp, Homo sapien
tttcttaaggtaggtgcttacatta

SEQ ID NO: 1992028 - DNA, 25 bp, Homo sapien
ttgctaacttccattgagaattcct

SEQ ID NO: 1992029 - DNA, 25 bp, Homo sapien
tcatttagtacaaaacgtttgctaa

SEQ ID NO: 1992030 - DNA, 25 bp, Homo sapien
ccattgagaattcctcaacacatgg

SEQ ID NO: 1992031 - DNA, 25 bp, Homo sapien
tgtaaaccgctccagacacgagatg

SEQ ID NO: 1992032 - DNA, 25 bp, Homo sapien
aagcaatccggcctgtaaaccgctc

SEQ ID NO: 1992033 - DNA, 25 bp, Homo sapien
cacgagatggcgctaaatagattca

SEQ ID NO: 1992034 - DNA, 25 bp, Homo sapien
cactactactaaagcaatccggcct

SEQ ID NO: 1992035 - DNA, 25 bp, Homo sapien
tttgacccaatgagagtgtacagcc

SEQ ID NO: 1992036 - DNA, 25 bp, Homo sapien
actgaatggtttcattgcggtttat

SEQ ID NO: 1992037 - DNA, 25 bp, Homo sapien
tgcggtttattactccattcattcc

SEQ ID NO: 1992038 - DNA, 25 bp, Homo sapien
gacccaatgagagtgtacagccact

SEQ ID NO: 1992039 - DNA, 25 bp, Homo sapien
agaacagattaatccaatatgcttt

SEQ ID NO: 1992040 - DNA, 25 bp, Homo sapien
gaacagattaatccaatatgctttt

SEQ ID NO: 1992041 - DNA, 25 bp, Homo sapien
aaactttcagcaatgtccccagtgt

SEQ ID NO: 1992042 - DNA, 25 bp, Homo sapien
tccattctacacaccacgttactta

SEQ ID NO: 1992043 - DNA, 25 bp, Homo sapien
gcgggtgggctcataggttctctaa

SEQ ID NO: 1992044 - DNA, 25 bp, Homo sapien
tgtgatactgagctaacccttccca

SEQ ID NO: 1992045 - DNA, 25 bp, Homo sapien
gcaaagccaagccccgcctccgccc

SEQ ID NO: 1992046 - DNA, 25 bp, Homo sapien
ctcgtagtagcccccagcaaagcca

SEQ ID NO: 1992047 - DNA, 25 bp, Homo sapien
gtagtagcccccagcaaagccaagc

SEQ ID NO: 1992048 - DNA, 25 bp, Homo sapien
caagccccgcctccgccccaaccat

SEQ ID NO: 1992049 - DNA, 25 bp, Homo sapien
gtactctacaaagacgagcagcagc

SEQ ID NO: 1992050 - DNA, 25 bp, Homo sapien
acagcagtgacagcctgaattagga

SEQ ID NO: 1992051 - DNA, 25 bp, Homo sapien
agaggtgcgttggactccgagtact

SEQ ID NO: 1992052 - DNA, 25 bp, Homo sapien
ctgaattaggagaggtgcgttggac

SEQ ID NO: 1992053 - DNA, 25 bp, Homo sapien
tcattgcataaaccagtagctccgt

SEQ ID NO: 1992054 - DNA, 25 bp, Homo sapien
atgatatttgaccaaggtttgaccc

SEQ ID NO: 1992055 - DNA, 25 bp, Homo sapien
catgatatttgaccaaggtttgacc

SEQ ID NO: 1992056 - DNA, 25 bp, Homo sapien
agtcattgcataaaccagtagctcc

SEQ ID NO: 1992057 - DNA, 25 bp, Homo sapien
tcataactcgaataatggcgttttc

SEQ ID NO: 1992058 - DNA, 25 bp, Homo sapien
agaaggcctctattcataactcgaa

SEQ ID NO: 1992059 - DNA, 25 bp, Homo sapien
gcttctctaacacttctatcttggg

SEQ ID NO: 1992060 - DNA, 25 bp, Homo sapien
tatcttggggctatcagtgttggaa

SEQ ID NO: 1992061 - DNA, 25 bp, Homo sapien
gttgagttgctccactaagtccagg

SEQ ID NO: 1992062 - DNA, 25 bp, Homo sapien
ttcttgttcaagtgcctctgggaca

SEQ ID NO: 1992063 - DNA, 25 bp, Homo sapien
taagtccaggtcagtccctttcttg

SEQ ID NO: 1992064 - DNA, 25 bp, Homo sapien
tccacgacgtcgtagaaggtgtctt

SEQ ID NO: 1992065 - DNA, 25 bp, Homo sapien
gcttgagtgttccataaatggtcct

SEQ ID NO: 1992066 - DNA, 25 bp, Homo sapien
gaagttccaccccactcaggtataa

SEQ ID NO: 1992067 - DNA, 25 bp, Homo sapien
tctccttgagtgaaggtgccgctga

SEQ ID NO: 1992068 - DNA, 25 bp, Homo sapien
caaatcatgtatctggccctgcctg

SEQ ID NO: 1992069 - DNA, 25 bp, Homo sapien
tgatgctctgcaccgagtgcctgcg

SEQ ID NO: 1992070 - DNA, 25 bp, Homo sapien
ttttcacgcagatctcgcacttggt

SEQ ID NO: 1992071 - DNA, 25 bp, Homo sapien
tcgcacttggttgggcttgaagctg

SEQ ID NO: 1992072 - DNA, 25 bp, Homo sapien
ctgcggctccttctgcggtccaggc

SEQ ID NO: 1992073 - DNA, 25 bp, Homo sapien
caagactgtgaaccgtgcccaggat

SEQ ID NO: 1992074 - DNA, 25 bp, Homo sapien
actgtgaaccgtgcccaggatggtc

SEQ ID NO: 1992075 - DNA, 25 bp, Homo sapien
cccagcacttcaagactgtgaaccg

SEQ ID NO: 1992076 - DNA, 25 bp, Homo sapien
acttcaagactgtgaaccgtgccca

SEQ ID NO: 1992077 - DNA, 25 bp, Homo sapien
gctcactaagattaccaagttccag

SEQ ID NO: 1992078 - DNA, 25 bp, Homo sapien
tccacagcctcacgataattgatag

SEQ ID NO: 1992079 - DNA, 25 bp, Homo sapien
tactccatcgccaaggtagtggtta

SEQ ID NO: 1992080 - DNA, 25 bp, Homo sapien
cctgctgggccactaattggtatgc

SEQ ID NO: 1992081 - DNA, 25 bp, Homo sapien
agcacagttccataagtaggctccc

SEQ ID NO: 1992082 - DNA, 25 bp, Homo sapien
gaaagatgccaaaactcttcttcac

SEQ ID NO: 1992083 - DNA, 25 bp, Homo sapien
tccataagtaggctccccgatttgc

SEQ ID NO: 1992084 - DNA, 25 bp, Homo sapien
agtaggctccccgatttgcccactg

SEQ ID NO: 1992085 - DNA, 25 bp, Homo sapien
ctccttcctgtcaaaacatgggaag

SEQ ID NO: 1992086 - DNA, 25 bp, Homo sapien
ttatgcgggtgcacaaaatattttc

SEQ ID NO: 1992087 - DNA, 25 bp, Homo sapien
ctagcatgtttatgcgggtgcacaa

SEQ ID NO: 1992088 - DNA, 25 bp, Homo sapien
tagcatgtttatgcgggtgcacaaa

SEQ ID NO: 1992089 - DNA, 25 bp, Homo sapien
atgtttatgcgggtgcacaaaatat

SEQ ID NO: 1992090 - DNA, 25 bp, Homo sapien
tgccactcatagtaccaatggttgt

SEQ ID NO: 1992091 - DNA, 25 bp, Homo sapien
tagtaccaatggttgttaatctggt

SEQ ID NO: 1992092 - DNA, 25 bp, Homo sapien
cccaagtagctacttgccactcata

SEQ ID NO: 1992093 - DNA, 25 bp, Homo sapien
aagtagctacttgccactcatagta

SEQ ID NO: 1992094 - DNA, 25 bp, Homo sapien
ccatgcctgcgtggactgccagcaa

SEQ ID NO: 1992095 - DNA, 25 bp, Homo sapien
agcaaaaatcgagccttagaaagtg

SEQ ID NO: 1992096 - DNA, 25 bp, Homo sapien
cgtggactgccagcaaaaatcgagc

SEQ ID NO: 1992097 - DNA, 25 bp, Homo sapien
gactgccagcaaaaatcgagcctta

SEQ ID NO: 1992098 - DNA, 25 bp, Homo sapien
cttcttcggaactgggctccgtgat

SEQ ID NO: 1992099 - DNA, 25 bp, Homo sapien
tcttcggaactgggctccgtgattg

SEQ ID NO: 1992100 - DNA, 25 bp, Homo sapien
tcttcttcggaactgggctccgtga

SEQ ID NO: 1992101 - DNA, 25 bp, Homo sapien
ggaactgggctccgtgattggctgc

SEQ ID NO: 1992102 - DNA, 25 bp, Homo sapien
ttttagtgtgagcttgggaggctcc

SEQ ID NO: 1992103 - DNA, 25 bp, Homo sapien
ctgaaggtgcagaagcatgtgcata

SEQ ID NO: 1992104 - DNA, 25 bp, Homo sapien
tgaaggtgcagaagcatgtgcatac

SEQ ID NO: 1992105 - DNA, 25 bp, Homo sapien
atgcctttgaaggccgccttttcca

SEQ ID NO: 1992106 - DNA, 25 bp, Homo sapien
gcctttgaaggccgccttttccagc

SEQ ID NO: 1992107 - DNA, 25 bp, Homo sapien
ctttgaaggccgccttttccagcca

SEQ ID NO: 1992108 - DNA, 25 bp, Homo sapien
tttgaaggccgccttttccagccag

SEQ ID NO: 1992109 - DNA, 25 bp, Homo sapien
aaaaatcctaggtagagacagcaca

SEQ ID NO: 1992110 - DNA, 25 bp, Homo sapien
ataaaaatcctaggtagagacagca

SEQ ID NO: 1992111 - DNA, 25 bp, Homo sapien
taaaaatcctaggtagagacagcac

SEQ ID NO: 1992112 - DNA, 25 bp, Homo sapien
aaaatcctaggtagagacagcacac

SEQ ID NO: 1992113 - DNA, 25 bp, Homo sapien
cataagggcaggcacccaacagttt

SEQ ID NO: 1992114 - DNA, 25 bp, Homo sapien
gactcccagccatgttcgtgtgaac

SEQ ID NO: 1992115 - DNA, 25 bp, Homo sapien
cagagctctgcttgtacataagggc

SEQ ID NO: 1992116 - DNA, 25 bp, Homo sapien
gaagatggacatgctgtagcgagct

SEQ ID NO: 1992117 - DNA, 25 bp, Homo sapien
tcttggtcaaatagcagatctgtcc

SEQ ID NO: 1992118 - DNA, 25 bp, Homo sapien
tgaggaagaggtatcccacaaagcc

SEQ ID NO: 1992119 - DNA, 25 bp, Homo sapien
tgctaaaaagcccaaccttgaggaa

SEQ ID NO: 1992120 - DNA, 25 bp, Homo sapien
gctgctggtgttggcatctgaattt

SEQ ID NO: 1992121 - DNA, 25 bp, Homo sapien
gtttgcccaagcaatcctgacatgc

SEQ ID NO: 1992122 - DNA, 25 bp, Homo sapien
taagacttatagagggcaaggaggt

SEQ ID NO: 1992123 - DNA, 25 bp, Homo sapien
catgctgagtttgtcaaaccaggag

SEQ ID NO: 1992124 - DNA, 25 bp, Homo sapien
gcaaggaggtggctctcaggccaaa

SEQ ID NO: 1992125 - DNA, 25 bp, Homo sapien
tgcgagctggcattcgagacagcag

SEQ ID NO: 1992126 - DNA, 25 bp, Homo sapien
gctttccctgcgagctggcattcga

SEQ ID NO: 1992127 - DNA, 25 bp, Homo sapien
agaagcggctttccctgcgagctgg

SEQ ID NO: 1992128 - DNA, 25 bp, Homo sapien
agtgccaaccagaagcggctttccc

SEQ ID NO: 1992129 - DNA, 25 bp, Homo sapien
ctgaggcagggggtgacaggagggc

SEQ ID NO: 1992130 - DNA, 25 bp, Homo sapien
gcagggggtgacaggagggcagatg

SEQ ID NO: 1992131 - DNA, 25 bp, Homo sapien
agggggtgacaggagggcagatggg

SEQ ID NO: 1992132 - DNA, 25 bp, Homo sapien
gaggcagggggtgacaggagggcag

SEQ ID NO: 1992133 - DNA, 25 bp, Homo sapien
ggtgtggcggaggagggccgagcag

SEQ ID NO: 1992134 - DNA, 25 bp, Homo sapien
ctggtgtggcggaggagggccgagc

SEQ ID NO: 1992135 - DNA, 25 bp, Homo sapien
tggtgtggcggaggagggccgagca

SEQ ID NO: 1992136 - DNA, 25 bp, Homo sapien
tgtctatggtcggtgacaccttcag

SEQ ID NO: 1992137 - DNA, 25 bp, Homo sapien
gcacgtagggcagcttgtctatggt

SEQ ID NO: 1992138 - DNA, 25 bp, Homo sapien
caaagtcataggagaagaggtggaa

SEQ ID NO: 1992139 - DNA, 25 bp, Homo sapien
gagtcctcaaagtcataggagaaga

SEQ ID NO: 1992140 - DNA, 25 bp, Homo sapien
gagcataccactctattccattatc

SEQ ID NO: 1992141 - DNA, 25 bp, Homo sapien
gacttggtttctgagtactcatttt

SEQ ID NO: 1992142 - DNA, 25 bp, Homo sapien
gctcagagcataccactctattcca

SEQ ID NO: 1992143 - DNA, 25 bp, Homo sapien
agaggctcagagcataccactctat

SEQ ID NO: 1992144 - DNA, 25 bp, Homo sapien
taagagttattgccaaaattgctgt

SEQ ID NO: 1992145 - DNA, 25 bp, Homo sapien
agagttattgccaaaattgctgtat

SEQ ID NO: 1992146 - DNA, 25 bp, Homo sapien
aagagttattgccaaaattgctgta

SEQ ID NO: 1992147 - DNA, 25 bp, Homo sapien
ggtgggcacactggatccagatgag

SEQ ID NO: 1992148 - DNA, 25 bp, Homo sapien
tggtgggcacactggatccagatga

SEQ ID NO: 1992149 - DNA, 25 bp, Homo sapien
cactggatccagatgagggtcttga

SEQ ID NO: 1992150 - DNA, 25 bp, Homo sapien
ggcacactggatccagatgagggtc

SEQ ID NO: 1992151 - DNA, 25 bp, Homo sapien
acttgaggactgtgaagctatcagc

SEQ ID NO: 1992152 - DNA, 25 bp, Homo sapien
ggactgtgaagctatcagcgtgctt

SEQ ID NO: 1992153 - DNA, 25 bp, Homo sapien
tgtgaagctatcagcgtgcttgtcg

SEQ ID NO: 1992154 - DNA, 25 bp, Homo sapien
gctatcagcgtgcttgtcgaactca

SEQ ID NO: 1992155 - DNA, 25 bp, Homo sapien
atttctggtggtctaatactcttgc

SEQ ID NO: 1992156 - DNA, 25 bp, Homo sapien
tccatgtacccatacaattcttttc

SEQ ID NO: 1992157 - DNA, 25 bp, Homo sapien
gcttctgggagtcataatcagttaa

SEQ ID NO: 1992158 - DNA, 25 bp, Homo sapien
tactcttgccaagttaaattccttc

SEQ ID NO: 1992159 - DNA, 25 bp, Homo sapien
tggcaagtcccacagccagtgccat

SEQ ID NO: 1992160 - DNA, 25 bp, Homo sapien
ctggcaagtcccacagccagtgcca

SEQ ID NO: 1992161 - DNA, 25 bp, Homo sapien
gcggcagccaactctgccaaacctg

SEQ ID NO: 1992162 - DNA, 25 bp, Homo sapien
caggcggcagccaactctgccaaac

SEQ ID NO: 1992163 - DNA, 25 bp, Homo sapien
ccaggcggcagccaactctgccaaa

SEQ ID NO: 1992164 - DNA, 25 bp, Homo sapien
cctccaggcggcagccaactctgcc

SEQ ID NO: 1992165 - DNA, 25 bp, Homo sapien
tctaacatccatacactcgtgcaag

SEQ ID NO: 1992166 - DNA, 25 bp, Homo sapien
ggctctctgagggatttaactccag

SEQ ID NO: 1992167 - DNA, 25 bp, Homo sapien
tgctggaagtctccacccaatttgc

SEQ ID NO: 1992168 - DNA, 25 bp, Homo sapien
gcttttcttccagtatcgtcccagt

SEQ ID NO: 1992169 - DNA, 25 bp, Homo sapien
gggcgtactgtttcctcacattgac

SEQ ID NO: 1992170 - DNA, 25 bp, Homo sapien
ctccagccgccattgatgagaaagt

SEQ ID NO: 1992171 - DNA, 25 bp, Homo sapien
tcagtcccagggcttgggcgtactg

SEQ ID NO: 1992172 - DNA, 25 bp, Homo sapien
attgacaaggcaagcctccagccgc

SEQ ID NO: 1992173 - DNA, 25 bp, Homo sapien
attgtttttctcataggaattcagc

SEQ ID NO: 1992174 - DNA, 25 bp, Homo sapien
tgtttttctcataggaattcagcat

SEQ ID NO: 1992175 - DNA, 25 bp, Homo sapien
ttgtttttctcataggaattcagca

SEQ ID NO: 1992176 - DNA, 25 bp, Homo sapien
ctgcctgaaggatgatgtgagaaga

SEQ ID NO: 1992177 - DNA, 25 bp, Homo sapien
tcccgctctattctctgcaaccttt

SEQ ID NO: 1992178 - DNA, 25 bp, Homo sapien
gaaggatgatgtgagaagaccactc

SEQ ID NO: 1992179 - DNA, 25 bp, Homo sapien
tgtgagaagaccactcggtgatgac

SEQ ID NO: 1992180 - DNA, 25 bp, Homo sapien
ctcctctcttttgtctaaataatct

SEQ ID NO: 1992181 - DNA, 25 bp, Homo sapien
tcctctcttttgtctaaataatctc

SEQ ID NO: 1992182 - DNA, 25 bp, Homo sapien
ctctcttttgtctaaataatctcgg

SEQ ID NO: 1992183 - DNA, 25 bp, Homo sapien
cctctcttttgtctaaataatctcg

SEQ ID NO: 1992184 - DNA, 25 bp, Homo sapien
ggaagctggacctatgtcatgacct

SEQ ID NO: 1992185 - DNA, 25 bp, Homo sapien
agcaccgggctttctatccacaaac

SEQ ID NO: 1992186 - DNA, 25 bp, Homo sapien
actgtcacgtatccctgctgccatg

SEQ ID NO: 1992187 - DNA, 25 bp, Homo sapien
tagtacttgatctgaggacccaccg

SEQ ID NO: 1992188 - DNA, 25 bp, Homo sapien
gccacaggcatttacggtgttacag

SEQ ID NO: 1992189 - DNA, 25 bp, Homo sapien
acaggcatttacggtgttacagctt

SEQ ID NO: 1992190 - DNA, 25 bp, Homo sapien
ccacaggcatttacggtgttacagc

SEQ ID NO: 1992191 - DNA, 25 bp, Homo sapien
cggtgttacagcttagcgacccctc

SEQ ID NO: 1992192 - DNA, 25 bp, Homo sapien
gcagcagcgttcatctgcagtggcc

SEQ ID NO: 1992193 - DNA, 25 bp, Homo sapien
cagcagcgttcatctgcagtggcca

SEQ ID NO: 1992194 - DNA, 25 bp, Homo sapien
gccagagtggtgaaggcggtgggct

SEQ ID NO: 1992195 - DNA, 25 bp, Homo sapien
ggtgggctggtacgcggagacggcc

SEQ ID NO: 1992196 - DNA, 25 bp, Homo sapien
cctcacagatgccatcactgaagat

SEQ ID NO: 1992197 - DNA, 25 bp, Homo sapien
cctttggcctcacagatgccatcac

SEQ ID NO: 1992198 - DNA, 25 bp, Homo sapien
ctttggcctcacagatgccatcact

SEQ ID NO: 1992199 - DNA, 25 bp, Homo sapien
tggcctcacagatgccatcactgaa

SEQ ID NO: 1992200 - DNA, 25 bp, Homo sapien
tatatatttgactcaaatgctattc

SEQ ID NO: 1992201 - DNA, 25 bp, Homo sapien
tgtatatatttgactcaaatgctat

SEQ ID NO: 1992202 - DNA, 25 bp, Homo sapien
gtatatatttgactcaaatgctatt

SEQ ID NO: 1992203 - DNA, 25 bp, Homo sapien
cctcagctgccaactgttccaagta

SEQ ID NO: 1992204 - DNA, 25 bp, Homo sapien
ctgccaactgttccaagtatttgta

SEQ ID NO: 1992205 - DNA, 25 bp, Homo sapien
tcgtgctcctcagctgccaactgtt

SEQ ID NO: 1992206 - DNA, 25 bp, Homo sapien
agctgccaactgttccaagtatttg

SEQ ID NO: 1992207 - DNA, 25 bp, Homo sapien
aggaggcagacaccgtgagagcctc

SEQ ID NO: 1992208 - DNA, 25 bp, Homo sapien
gtccaaggagaggtcggctctgccc

SEQ ID NO: 1992209 - DNA, 25 bp, Homo sapien
cctcttgagagtctgaagatgaggg

SEQ ID NO: 1992210 - DNA, 25 bp, Homo sapien
ctgctggcgaggtcaggtccaagga

SEQ ID NO: 1992211 - DNA, 25 bp, Homo sapien
ttactcatccatgactgagccatct

SEQ ID NO: 1992212 - DNA, 25 bp, Homo sapien
ccatggctcagggatcgggagtaac

SEQ ID NO: 1992213 - DNA, 25 bp, Homo sapien
gacaatcttccatggctcagggatc

SEQ ID NO: 1992214 - DNA, 25 bp, Homo sapien
gatcgggagtaacgggatgtcacgg

SEQ ID NO: 1992215 - DNA, 25 bp, Homo sapien
gtacttcacagtttagacaatcatt

SEQ ID NO: 1992216 - DNA, 25 bp, Homo sapien
gctgttctgtacttcacagtttaga

SEQ ID NO: 1992217 - DNA, 25 bp, Homo sapien
tcggagctgttctgtacttcacagt

SEQ ID NO: 1992218 - DNA, 25 bp, Homo sapien
tcagctcggagctgttctgtacttc

SEQ ID NO: 1992219 - DNA, 25 bp, Homo sapien
tatctgggcctcagtaaaacatgga

SEQ ID NO: 1992220 - DNA, 25 bp, Homo sapien
tatgattgcatgttcccacaaggat

SEQ ID NO: 1992221 - DNA, 25 bp, Homo sapien
gatgggcatcagaacactaattaca

SEQ ID NO: 1992222 - DNA, 25 bp, Homo sapien
atagcaatgcaaacatggtagagcc

SEQ ID NO: 1992223 - DNA, 25 bp, Homo sapien
ggaggaaggacacaaagatctgatt

SEQ ID NO: 1992224 - DNA, 25 bp, Homo sapien
gaaggacacaaagatctgattgcat

SEQ ID NO: 1992225 - DNA, 25 bp, Homo sapien
ggatggaggaaggacacaaagatct

SEQ ID NO: 1992226 - DNA, 25 bp, Homo sapien
tggatggaggaaggacacaaagatc

SEQ ID NO: 1992227 - DNA, 25 bp, Homo sapien
tactaagggaaagggacattcaggc

SEQ ID NO: 1992228 - DNA, 25 bp, Homo sapien
cactctaagggtgtgtgcttgaacc

SEQ ID NO: 1992229 - DNA, 25 bp, Homo sapien
aattctggcagggtctacgcatggc

SEQ ID NO: 1992230 - DNA, 25 bp, Homo sapien
tgagaacacgcagatcagggcagct

SEQ ID NO: 1992231 - DNA, 25 bp, Homo sapien
tctttcttccggctcttgctctagt

SEQ ID NO: 1992232 - DNA, 25 bp, Homo sapien
tcgggttcaggatccccggcacttg

SEQ ID NO: 1992233 - DNA, 25 bp, Homo sapien
tccaacgtgctgctggaggacgaga

SEQ ID NO: 1992234 - DNA, 25 bp, Homo sapien
tctgcttccggttctgcctctgatt

SEQ ID NO: 1992235 - DNA, 25 bp, Homo sapien
caagaaagccctgtcgcctggtata

SEQ ID NO: 1992236 - DNA, 25 bp, Homo sapien
tataatgacatagctgcccggactc

SEQ ID NO: 1992237 - DNA, 25 bp, Homo sapien
tggcacatgccgactgaaacaaggg

SEQ ID NO: 1992238 - DNA, 25 bp, Homo sapien
tttgggcctaagacatcgactcgag

SEQ ID NO: 1992239 - DNA, 25 bp, Homo sapien
tgccttattacctccaagggacgcg

SEQ ID NO: 1992240 - DNA, 25 bp, Homo sapien
cattagtgcctgtctagggtacaag

SEQ ID NO: 1992241 - DNA, 25 bp, Homo sapien
agcgctgactcacactggctcattg

SEQ ID NO: 1992242 - DNA, 25 bp, Homo sapien
taggtatagcatacaggtgctggtg

SEQ ID NO: 1992243 - DNA, 25 bp, Homo sapien
tcttctatgggttacttgaatactt

SEQ ID NO: 1992244 - DNA, 25 bp, Homo sapien
caacttttaagttacaatctacctg

SEQ ID NO: 1992245 - DNA, 25 bp, Homo sapien
tgtcttctatgggttacttgaatac

SEQ ID NO: 1992246 - DNA, 25 bp, Homo sapien
tacctgtgtcattatgtttgagaag

SEQ ID NO: 1992247 - DNA, 25 bp, Homo sapien
ctcataaacatacctcttagcaggg

SEQ ID NO: 1992248 - DNA, 25 bp, Homo sapien
tggccttcccactagagtcttcctt

SEQ ID NO: 1992249 - DNA, 25 bp, Homo sapien
tgtgcattagtaacccactccagaa

SEQ ID NO: 1992250 - DNA, 25 bp, Homo sapien
taaccttgcctccaagttcagtgac

SEQ ID NO: 1992251 - DNA, 25 bp, Homo sapien
tggtgaggatgtcgccacactgtcc

SEQ ID NO: 1992252 - DNA, 25 bp, Homo sapien
tggatatcctggtagcaaggctggc

SEQ ID NO: 1992253 - DNA, 25 bp, Homo sapien
ccggagacttcctgttatgggcata

SEQ ID NO: 1992254 - DNA, 25 bp, Homo sapien
tgggaccttgtcattgggctcagca

SEQ ID NO: 1992255 - DNA, 25 bp, Homo sapien
tggaggaggaggaaccaataaatta

SEQ ID NO: 1992256 - DNA, 25 bp, Homo sapien
ggagggggaggaatgctgtccaaca

SEQ ID NO: 1992257 - DNA, 25 bp, Homo sapien
gggcctccctgtgacccaggtccac

SEQ ID NO: 1992258 - DNA, 25 bp, Homo sapien
ctgtccaacaggggcggagggggtg

SEQ ID NO: 1992259 - DNA, 25 bp, Homo sapien
gatttagactcaaacaggtgctcca

SEQ ID NO: 1992260 - DNA, 25 bp, Homo sapien
ggaattctctgcagcgtcggttgtt

SEQ ID NO: 1992261 - DNA, 25 bp, Homo sapien
tcattccagaacaaacggatggtct

SEQ ID NO: 1992262 - DNA, 25 bp, Homo sapien
tggaagtgtccaccttaatgggttc

SEQ ID NO: 1992263 - DNA, 25 bp, Homo sapien
caatcaagaagcatgctgaagacta

SEQ ID NO: 1992264 - DNA, 25 bp, Homo sapien
gaagcatgctgaagactagcagtac

SEQ ID NO: 1992265 - DNA, 25 bp, Homo sapien
tccaatcaagaagcatgctgaagac

SEQ ID NO: 1992266 - DNA, 25 bp, Homo sapien
caagaagcatgctgaagactagcag

SEQ ID NO: 1992267 - DNA, 25 bp, Homo sapien
tatacagaacgaatctcttcagccc

SEQ ID NO: 1992268 - DNA, 25 bp, Homo sapien
acagaacgaatctcttcagccctac

SEQ ID NO: 1992269 - DNA, 25 bp, Homo sapien
tacagaacgaatctcttcagcccta

SEQ ID NO: 1992270 - DNA, 25 bp, Homo sapien
ttatacagaacgaatctcttcagcc

SEQ ID NO: 1992271 - DNA, 25 bp, Homo sapien
gggtctctgactcatgtagcctaca

SEQ ID NO: 1992272 - DNA, 25 bp, Homo sapien
taagtaagctggtgaccatgttagc

SEQ ID NO: 1992273 - DNA, 25 bp, Homo sapien
gaaagctcctttgcctaatataagt

SEQ ID NO: 1992274 - DNA, 25 bp, Homo sapien
gttagctaataagggtctctgactc

SEQ ID NO: 1992275 - DNA, 25 bp, Homo sapien
tcagccactccgtggggcagaaagt

SEQ ID NO: 1992276 - DNA, 25 bp, Homo sapien
tgggttgggagtccgctttctagaa

SEQ ID NO: 1992277 - DNA, 25 bp, Homo sapien
ctgggttgggagtccgctttctaga

SEQ ID NO: 1992278 - DNA, 25 bp, Homo sapien
ctgcaaactcagccactccgtgggg

SEQ ID NO: 1992279 - DNA, 25 bp, Homo sapien
tgttctctaaagcaggggccctggc

SEQ ID NO: 1992280 - DNA, 25 bp, Homo sapien
ctagggctgggagcagccaagccat

SEQ ID NO: 1992281 - DNA, 25 bp, Homo sapien
gggccctggctagggctgggagcag

SEQ ID NO: 1992282 - DNA, 25 bp, Homo sapien
cttgttctctaaagcaggggccctg

SEQ ID NO: 1992283 - DNA, 25 bp, Homo sapien
ataggggacgaaccagcttagaggc

SEQ ID NO: 1992284 - DNA, 25 bp, Homo sapien
gaataggggacgaaccagcttagag

SEQ ID NO: 1992285 - DNA, 25 bp, Homo sapien
aataggggacgaaccagcttagagg

SEQ ID NO: 1992286 - DNA, 25 bp, Homo sapien
tttcctgtgcacttaggcctctgtg

SEQ ID NO: 1992287 - DNA, 25 bp, Homo sapien
cctgtgcacttaggcctctgtgcag

SEQ ID NO: 1992288 - DNA, 25 bp, Homo sapien
cctttcctgtgcacttaggcctctg

SEQ ID NO: 1992289 - DNA, 25 bp, Homo sapien
acctttcctgtgcacttaggcctct

SEQ ID NO: 1992290 - DNA, 25 bp, Homo sapien
gggcagcaccgtcagaccaatattg

SEQ ID NO: 1992291 - DNA, 25 bp, Homo sapien
atccagaacaatgatctcttgcctt

SEQ ID NO: 1992292 - DNA, 25 bp, Homo sapien
tattgatggcgttactcctcttgga

SEQ ID NO: 1992293 - DNA, 25 bp, Homo sapien
ttcaaaatggcgatcttaatcgtcc

SEQ ID NO: 1992294 - DNA, 25 bp, Homo sapien
tgtgctgctactcccatatccgtca

SEQ ID NO: 1992295 - DNA, 25 bp, Homo sapien
gctgtaattattccttcctggatca

SEQ ID NO: 1992296 - DNA, 25 bp, Homo sapien
tcccatatccgtcagcgtcatagct

SEQ ID NO: 1992297 - DNA, 25 bp, Homo sapien
gcgtcatagctgtaattattccttc

SEQ ID NO: 1992298 - DNA, 25 bp, Homo sapien
cctattccctaggaagtagagtaag

SEQ ID NO: 1992299 - DNA, 25 bp, Homo sapien
gattagagaacagctccctattccc

SEQ ID NO: 1992300 - DNA, 25 bp, Homo sapien
tatgctttgtagcacttctcctgca

SEQ ID NO: 1992301 - DNA, 25 bp, Homo sapien
tatacttgaagcaacttgacccaaa

SEQ ID NO: 1992302 - DNA, 25 bp, Homo sapien
attttgaatgcccagaggtgaagtc

SEQ ID NO: 1992303 - DNA, 25 bp, Homo sapien
cagagagctcgctgatggaggacag

SEQ ID NO: 1992304 - DNA, 25 bp, Homo sapien
aatgcccagaggtgaagtcgtgcag

SEQ ID NO: 1992305 - DNA, 25 bp, Homo sapien
aagtcgtgcagagagctcgctgatg

SEQ ID NO: 1992306 - DNA, 25 bp, Homo sapien
cagctgctgatcacttggtgtacac

SEQ ID NO: 1992307 - DNA, 25 bp, Homo sapien
ctggtgcccacaatctagtgtctga

SEQ ID NO: 1992308 - DNA, 25 bp, Homo sapien
gcagacactttagaatcagccttca

SEQ ID NO: 1992309 - DNA, 25 bp, Homo sapien
tggtgtacacacgacctcctcattg

SEQ ID NO: 1992310 - DNA, 25 bp, Homo sapien
ttctccaactggtctattccttcct

SEQ ID NO: 1992311 - DNA, 25 bp, Homo sapien
agagagtagacaggataaagcccaa

SEQ ID NO: 1992312 - DNA, 25 bp, Homo sapien
caactggtctattccttccttcagg

SEQ ID NO: 1992313 - DNA, 25 bp, Homo sapien
agtagacaggataaagcccaaggtt

SEQ ID NO: 1992314 - DNA, 25 bp, Homo sapien
cccggcctaggccctgatatcttaa

SEQ ID NO: 1992315 - DNA, 25 bp, Homo sapien
cggcctaggccctgatatcttaaga

SEQ ID NO: 1992316 - DNA, 25 bp, Homo sapien
cttaagaacaaattccttctagatt

SEQ ID NO: 1992317 - DNA, 25 bp, Homo sapien
atcttaagaacaaattccttctaga

SEQ ID NO: 1992318 - DNA, 25 bp, Homo sapien
ctgttttgcaaacatcaataaaaga

SEQ ID NO: 1992319 - DNA, 25 bp, Homo sapien
tttgcaaacatcaataaaagacatg

SEQ ID NO: 1992320 - DNA, 25 bp, Homo sapien
gttttgcaaacatcaataaaagaca

SEQ ID NO: 1992321 - DNA, 25 bp, Homo sapien
ataaaagacatgtttcaagcaggct

SEQ ID NO: 1992322 - DNA, 25 bp, Homo sapien
gtgatggccccgatctccgagtaca

SEQ ID NO: 1992323 - DNA, 25 bp, Homo sapien
gggaagttttctaccaccatggtgc

SEQ ID NO: 1992324 - DNA, 25 bp, Homo sapien
cacatggtggagaagcgactgcttg

SEQ ID NO: 1992325 - DNA, 25 bp, Homo sapien
ggtagcttaactcaaacgctttggc

SEQ ID NO: 1992326 - DNA, 25 bp, Homo sapien
ccgccggacaccagcctgaactgag

SEQ ID NO: 1992327 - DNA, 25 bp, Homo sapien
tgcaaacactgaaaccgccggacac

SEQ ID NO: 1992328 - DNA, 25 bp, Homo sapien
aaatcagagcgagaacactgcaaac

SEQ ID NO: 1992329 - DNA, 25 bp, Homo sapien
aatcagagcgagaacactgcaaaca

SEQ ID NO: 1992330 - DNA, 25 bp, Homo sapien
aattataattcgctctgcacagtct

SEQ ID NO: 1992331 - DNA, 25 bp, Homo sapien
tctgacatccgttgttttaaaactg

SEQ ID NO: 1992332 - DNA, 25 bp, Homo sapien
cagtctttcaggaactctgacatcc

SEQ ID NO: 1992333 - DNA, 25 bp, Homo sapien
tgaggtgatcccatgaagctttgca

SEQ ID NO: 1992334 - DNA, 25 bp, Homo sapien
ttctgctgcaaaaccctttccctgg

SEQ ID NO: 1992335 - DNA, 25 bp, Homo sapien
ctctctgtggttggcccgtttctgt

SEQ ID NO: 1992336 - DNA, 25 bp, Homo sapien
ccctggttgtgcgatactctagtgc

SEQ ID NO: 1992337 - DNA, 25 bp, Homo sapien
ttcacttcccgaattgcataaggtg

SEQ ID NO: 1992338 - DNA, 25 bp, Homo sapien
gctctaggaccaactttgtacacag

SEQ ID NO: 1992339 - DNA, 25 bp, Homo sapien
tacacaggatgaggaattagttgct

SEQ ID NO: 1992340 - DNA, 25 bp, Homo sapien
gcctcgtgttgccttgtctatgtca

SEQ ID NO: 1992341 - DNA, 25 bp, Homo sapien
cagaaaggctgtaggtgcctcgtgt

SEQ ID NO: 1992342 - DNA, 25 bp, Homo sapien
ccctgaggtaacagtcagctaactc

SEQ ID NO: 1992343 - DNA, 25 bp, Homo sapien
tgcatcgtgctgagagtgtcctgct

SEQ ID NO: 1992344 - DNA, 25 bp, Homo sapien
gtcagctaactcgattccctgacca

SEQ ID NO: 1992345 - DNA, 25 bp, Homo sapien
acggctccgggccaatcttctgggg

SEQ ID NO: 1992346 - DNA, 25 bp, Homo sapien
ggcttgctcggctgcgtgtgcggac

SEQ ID NO: 1992347 - DNA, 25 bp, Homo sapien
agctcagaccctgcggctggcttgg

SEQ ID NO: 1992348 - DNA, 25 bp, Homo sapien
gccttcatgttctcgtgctcagccg

SEQ ID NO: 1992349 - DNA, 25 bp, Homo sapien
gggacgaggttttcagcacagcctt

SEQ ID NO: 1992350 - DNA, 25 bp, Homo sapien
tataatgccacagcttttagactgg

SEQ ID NO: 1992351 - DNA, 25 bp, Homo sapien
tgaacaatggtcctcctcagagtag

SEQ ID NO: 1992352 - DNA, 25 bp, Homo sapien
tgatagcatacctacagcatgagca

SEQ ID NO: 1992353 - DNA, 25 bp, Homo sapien
cttgatctacttgctattaggccag

SEQ ID NO: 1992354 - DNA, 25 bp, Homo sapien
gacattgggcgagtcatcagttccc

SEQ ID NO: 1992355 - DNA, 25 bp, Homo sapien
tcatctgtgacattgggcgagtcat

SEQ ID NO: 1992356 - DNA, 25 bp, Homo sapien
ttgacgatgcggtccatgatctcat

SEQ ID NO: 1992357 - DNA, 25 bp, Homo sapien
gcacttgggtggctgacttgacgat

SEQ ID NO: 1992358 - DNA, 25 bp, Homo sapien
gcagcaacgaattcccatcagcaac

SEQ ID NO: 1992359 - DNA, 25 bp, Homo sapien
aggcagcaacgaattcccatcagca

SEQ ID NO: 1992360 - DNA, 25 bp, Homo sapien
tcaggcagcaacgaattcccatcag

SEQ ID NO: 1992361 - DNA, 25 bp, Homo sapien
cttcaggcagcaacgaattcccatc

SEQ ID NO: 1992362 - DNA, 25 bp, Homo sapien
tccagtactcctgaagactcttttt

SEQ ID NO: 1992363 - DNA, 25 bp, Homo sapien
gcatccagtactcctgaagactctt

SEQ ID NO: 1992364 - DNA, 25 bp, Homo sapien
cattagcatccagtactcctgaaga

SEQ ID NO: 1992365 - DNA, 25 bp, Homo sapien
acattagcatccagtactcctgaag

SEQ ID NO: 1992366 - DNA, 25 bp, Homo sapien
gggcttggccactgttcaacaccgt

SEQ ID NO: 1992367 - DNA, 25 bp, Homo sapien
tcctgggtaggatcgtagagcaaaa

SEQ ID NO: 1992368 - DNA, 25 bp, Homo sapien
ttctgagtggacgtaaaacggcagg

SEQ ID NO: 1992369 - DNA, 25 bp, Homo sapien
gacatgagggctaaatgcaatctgg

SEQ ID NO: 1992370 - DNA, 25 bp, Homo sapien
gcccagggctcacacttagtggtag

SEQ ID NO: 1992371 - DNA, 25 bp, Homo sapien
gagtcgcatccgagaacaatggcaa

SEQ ID NO: 1992372 - DNA, 25 bp, Homo sapien
gactttggatcacagtccacactgg

SEQ ID NO: 1992373 - DNA, 25 bp, Homo sapien
tcaataagtgagcaaacccggacca

SEQ ID NO: 1992374 - DNA, 25 bp, Homo sapien
tttagcttggcatgatggtattccc

SEQ ID NO: 1992375 - DNA, 25 bp, Homo sapien
tcaaaataaaggctggataagggtg

SEQ ID NO: 1992376 - DNA, 25 bp, Homo sapien
gaggaggtagctgcctcacccaaga

SEQ ID NO: 1992377 - DNA, 25 bp, Homo sapien
gaagagaaacgttatggatctgcct

SEQ ID NO: 1992378 - DNA, 25 bp, Homo sapien
tgcaactccgaggtgccaaccaagc

SEQ ID NO: 1992379 - DNA, 25 bp, Homo sapien
agctgcaactccgaggtgccaacca

SEQ ID NO: 1992380 - DNA, 25 bp, Homo sapien
ctccgaggtgccaaccaagcccagg

SEQ ID NO: 1992381 - DNA, 25 bp, Homo sapien
actccgaggtgccaaccaagcccag

SEQ ID NO: 1992382 - DNA, 25 bp, Homo sapien
tgttccttgcccagaaaaggtgtca

SEQ ID NO: 1992383 - DNA, 25 bp, Homo sapien
gatccaagtcaatgcgtagcaggca

SEQ ID NO: 1992384 - DNA, 25 bp, Homo sapien
cacagctgacacgatggagaaggta

SEQ ID NO: 1992385 - DNA, 25 bp, Homo sapien
cacggaatcaagagaaacacagctg

SEQ ID NO: 1992386 - DNA, 25 bp, Homo sapien
aaatacagcccaaaggatctgaagg

SEQ ID NO: 1992387 - DNA, 25 bp, Homo sapien
ccgttccaagcgagggtgcttctga

SEQ ID NO: 1992388 - DNA, 25 bp, Homo sapien
gaggcgagcctgtggaactgtttaa

SEQ ID NO: 1992389 - DNA, 25 bp, Homo sapien
tctgaaggccgttccaagcgagggt

SEQ ID NO: 1992390 - DNA, 25 bp, Homo sapien
tggccacaagcaaagagtcagcagc

SEQ ID NO: 1992391 - DNA, 25 bp, Homo sapien
gaacaacagtgtcgcaatcattcct

SEQ ID NO: 1992392 - DNA, 25 bp, Homo sapien
tgttgagcccctccaatgggagctg

SEQ ID NO: 1992393 - DNA, 25 bp, Homo sapien
aggcgccaatccaacagcatgggaa

SEQ ID NO: 1992394 - DNA, 25 bp, Homo sapien
tagctgtggctcaaaactcttatcg

SEQ ID NO: 1992395 - DNA, 25 bp, Homo sapien
gacagtgtacctttgtggttctgaa

SEQ ID NO: 1992396 - DNA, 25 bp, Homo sapien
caggccttgtccaataccatccttg

SEQ ID NO: 1992397 - DNA, 25 bp, Homo sapien
tttcctatagctcttagcacccagg

SEQ ID NO: 1992398 - DNA, 25 bp, Homo sapien
gtgaagcagcggaggaaccaggagg

SEQ ID NO: 1992399 - DNA, 25 bp, Homo sapien
ggtcagcggtgtcactcaaatctgt

SEQ ID NO: 1992400 - DNA, 25 bp, Homo sapien
atctgtggcaatcaagtgggagttc

SEQ ID NO: 1992401 - DNA, 25 bp, Homo sapien
gccctggattccacaagtgaagcag

SEQ ID NO: 1992402 - DNA, 25 bp, Homo sapien
aattgtatgttctttgtatccctta

SEQ ID NO: 1992403 - DNA, 25 bp, Homo sapien
aatatctcgctctgctcatttcttt

SEQ ID NO: 1992404 - DNA, 25 bp, Homo sapien
tgtatcccttaccacaaatatctcg

SEQ ID NO: 1992405 - DNA, 25 bp, Homo sapien
attttcatactgctcttcctcaatt

SEQ ID NO: 1992406 - DNA, 25 bp, Homo sapien
tttactgcctattaccgcctgctca

SEQ ID NO: 1992407 - DNA, 25 bp, Homo sapien
ggttcctggacagagcgttatactg

SEQ ID NO: 1992408 - DNA, 25 bp, Homo sapien
tgggcctgccccagtggcaatatgc

SEQ ID NO: 1992409 - DNA, 25 bp, Homo sapien
caccagctatggcattagcccacag

SEQ ID NO: 1992410 - DNA, 25 bp, Homo sapien
tcaaaaacaaaggacttccagtctg

SEQ ID NO: 1992411 - DNA, 25 bp, Homo sapien
gcccaggtgatagagtggagaccct

SEQ ID NO: 1992412 - DNA, 25 bp, Homo sapien
caaggctacaatgaaccatgttcac

SEQ ID NO: 1992413 - DNA, 25 bp, Homo sapien
ggtatggtggccacacctatggacc

SEQ ID NO: 1992414 - DNA, 25 bp, Homo sapien
ctaggacttcccctcttgccatgtt

SEQ ID NO: 1992415 - DNA, 25 bp, Homo sapien
tcagcttgttccctttgagctcctt

SEQ ID NO: 1992416 - DNA, 25 bp, Homo sapien
taggacttcccctcttgccatgttc

SEQ ID NO: 1992417 - DNA, 25 bp, Homo sapien
ccctttgagctcctttgccaggtgg

SEQ ID NO: 1992418 - DNA, 25 bp, Homo sapien
gtgctcattgccacaatttccagca

SEQ ID NO: 1992419 - DNA, 25 bp, Homo sapien
tcaggagatgccgttgtgctcattg

SEQ ID NO: 1992420 - DNA, 25 bp, Homo sapien
ggagatgccgttgtgctcattgcca

SEQ ID NO: 1992421 - DNA, 25 bp, Homo sapien
gagatgccgttgtgctcattgccac

SEQ ID NO: 1992422 - DNA, 25 bp, Homo sapien
ggctccagaacgccgcggcactggg

SEQ ID NO: 1992423 - DNA, 25 bp, Homo sapien
tccagaacgccgcggcactggggcg

SEQ ID NO: 1992424 - DNA, 25 bp, Homo sapien
ctccagaacgccgcggcactggggc

SEQ ID NO: 1992425 - DNA, 25 bp, Homo sapien
gctccagaacgccgcggcactgggg

SEQ ID NO: 1992426 - DNA, 25 bp, Homo sapien
ttgaaattgcaaaactctctcttcc

SEQ ID NO: 1992427 - DNA, 25 bp, Homo sapien
tatcattgaacataggccaggtgca

SEQ ID NO: 1992428 - DNA, 25 bp, Homo sapien
tagcttctgcaggtatgatttcttc

SEQ ID NO: 1992429 - DNA, 25 bp, Homo sapien
tcctcaaatatcttcatggctcact

SEQ ID NO: 1992430 - DNA, 25 bp, Homo sapien
caataatattatccggcatccaaat

SEQ ID NO: 1992431 - DNA, 25 bp, Homo sapien
ctgtatacctcttataattcataat

SEQ ID NO: 1992432 - DNA, 25 bp, Homo sapien
aatattatccggcatccaaatgctg

SEQ ID NO: 1992433 - DNA, 25 bp, Homo sapien
aatacaataatattatccggcatcc

SEQ ID NO: 1992434 - DNA, 25 bp, Homo sapien
aacgtatactactgattgttcttca

SEQ ID NO: 1992435 - DNA, 25 bp, Homo sapien
ggaacgtatactactgattgttctt

SEQ ID NO: 1992436 - DNA, 25 bp, Homo sapien
acgtatactactgattgttcttcat

SEQ ID NO: 1992437 - DNA, 25 bp, Homo sapien
ctggaacgtatactactgattgttc

SEQ ID NO: 1992438 - DNA, 25 bp, Homo sapien
cctggaagtcttaagtttaacatca

SEQ ID NO: 1992439 - DNA, 25 bp, Homo sapien
gactccatggagattgaagcatcag

SEQ ID NO: 1992440 - DNA, 25 bp, Homo sapien
tgtcttgatctgacatttccttcag

SEQ ID NO: 1992441 - DNA, 25 bp, Homo sapien
taacatcagcttttggactcatcag

SEQ ID NO: 1992442 - DNA, 25 bp, Homo sapien
tccacaggttatagattccagaaca

SEQ ID NO: 1992443 - DNA, 25 bp, Homo sapien
taaactggtcagataggacatgtgc

SEQ ID NO: 1992444 - DNA, 25 bp, Homo sapien
tctggttgcagagggaaaatataac

SEQ ID NO: 1992445 - DNA, 25 bp, Homo sapien
gccaaaggaatgcaccgatactatt

SEQ ID NO: 1992446 - DNA, 25 bp, Homo sapien
gacataaatccttcaatgatgcact

SEQ ID NO: 1992447 - DNA, 25 bp, Homo sapien
agacataaatccttcaatgatgcac

SEQ ID NO: 1992448 - DNA, 25 bp, Homo sapien
tgatagactggcagagaggcttgct

SEQ ID NO: 1992449 - DNA, 25 bp, Homo sapien
tactcacagatacctggcaaaagag

SEQ ID NO: 1992450 - DNA, 25 bp, Homo sapien
ccagggaatccagagtgtaatgcat

SEQ ID NO: 1992451 - DNA, 25 bp, Homo sapien
taagggcttcgagtggcttccacat

SEQ ID NO: 1992452 - DNA, 25 bp, Homo sapien
gggataaagagagcatctgtacaga

SEQ ID NO: 1992453 - DNA, 25 bp, Homo sapien
taagagaagaaggacatccatgtgg

SEQ ID NO: 1992454 - DNA, 25 bp, Homo sapien
ctgacaagggcatccacatatcggg

SEQ ID NO: 1992455 - DNA, 25 bp, Homo sapien
taataccagcccaatgtcagaacct

SEQ ID NO: 1992456 - DNA, 25 bp, Homo sapien
ataaccaaaatttgactcaagcata

SEQ ID NO: 1992457 - DNA, 25 bp, Homo sapien
gcctttcagcttttcataaccaaaa

SEQ ID NO: 1992458 - DNA, 25 bp, Homo sapien
ctgtagtggtagcctttcagctttt

SEQ ID NO: 1992459 - DNA, 25 bp, Homo sapien
aaccaaaatttgactcaagcataat

SEQ ID NO: 1992460 - DNA, 25 bp, Homo sapien
tcttcttctcaaatgactcctgctc

SEQ ID NO: 1992461 - DNA, 25 bp, Homo sapien
ttcttctcaaatgactcctgctcag

SEQ ID NO: 1992462 - DNA, 25 bp, Homo sapien
tctcaaatgactcctgctcagcttt

SEQ ID NO: 1992463 - DNA, 25 bp, Homo sapien
ttctcaaatgactcctgctcagctt

SEQ ID NO: 1992464 - DNA, 25 bp, Homo sapien
gcagaacagctggatggccttatca

SEQ ID NO: 1992465 - DNA, 25 bp, Homo sapien
ggttccagctcaattacagcagtgc

SEQ ID NO: 1992466 - DNA, 25 bp, Homo sapien
taccaaatacaaggaggttccagct

SEQ ID NO: 1992467 - DNA, 25 bp, Homo sapien
tgcttagcagcctaacagcagcagc

SEQ ID NO: 1992468 - DNA, 25 bp, Homo sapien
ctaagcccagaatagcaggcaaagg

SEQ ID NO: 1992469 - DNA, 25 bp, Homo sapien
tgctaagcccagaatagcaggcaaa

SEQ ID NO: 1992470 - DNA, 25 bp, Homo sapien
cttgctaagcccagaatagcaggca

SEQ ID NO: 1992471 - DNA, 25 bp, Homo sapien
gcccagaatagcaggcaaaggggct

SEQ ID NO: 1992472 - DNA, 25 bp, Homo sapien
tctccatttggctctgctcttcata

SEQ ID NO: 1992473 - DNA, 25 bp, Homo sapien
tgtatcttgataatagcacaatgat

SEQ ID NO: 1992474 - DNA, 25 bp, Homo sapien
aaatgtatcttgataatagcacaat

SEQ ID NO: 1992475 - DNA, 25 bp, Homo sapien
taaataaatatctccttacaagata

SEQ ID NO: 1992476 - DNA, 25 bp, Homo sapien
tatcttgataatagcacaatgatca

SEQ ID NO: 1992477 - DNA, 25 bp, Homo sapien
ttgtcagcactatgagatgttgccc

SEQ ID NO: 1992478 - DNA, 25 bp, Homo sapien
taatttccagatatggaagacagtg

SEQ ID NO: 1992479 - DNA, 25 bp, Homo sapien
tgagatgttgcccaataatttccag

SEQ ID NO: 1992480 - DNA, 25 bp, Homo sapien
catgataatgtgagcacttgtcagc

SEQ ID NO: 1992481 - DNA, 25 bp, Homo sapien
aaatgtatagaactatggagaaaga

SEQ ID NO: 1992482 - DNA, 25 bp, Homo sapien
aggaagtgaatacatatactttcaa

SEQ ID NO: 1992483 - DNA, 25 bp, Homo sapien
tactttcaagaatgcatataaacag

SEQ ID NO: 1992484 - DNA, 25 bp, Homo sapien
aagggtgtttcaaggtcttagcaat

SEQ ID NO: 1992485 - DNA, 25 bp, Homo sapien
aaacaggctgatgaaactgctcagc

SEQ ID NO: 1992486 - DNA, 25 bp, Homo sapien
acactgccagtttaaattgaaaggg

SEQ ID NO: 1992487 - DNA, 25 bp, Homo sapien
cagactcccaaaataccacaggcag

SEQ ID NO: 1992488 - DNA, 25 bp, Homo sapien
tacataaacagaaacactgccagtt

SEQ ID NO: 1992489 - DNA, 25 bp, Homo sapien
tataactcctaattttataggctat

SEQ ID NO: 1992490 - DNA, 25 bp, Homo sapien
gaatttcattcaacctgacctacaa

SEQ ID NO: 1992491 - DNA, 25 bp, Homo sapien
accctctggtaatgatgaccataaa

SEQ ID NO: 1992492 - DNA, 25 bp, Homo sapien
aatactgtcttttcaggagcttctg

SEQ ID NO: 1992493 - DNA, 25 bp, Homo sapien
tgactagctacatataggttgtctt

SEQ ID NO: 1992494 - DNA, 25 bp, Homo sapien
gagtgccatgacttgactagctaca

SEQ ID NO: 1992495 - DNA, 25 bp, Homo sapien
aagggagtgccatgacttgactagc

SEQ ID NO: 1992496 - DNA, 25 bp, Homo sapien
catgacttgactagctacatatagg

SEQ ID NO: 1992497 - DNA, 25 bp, Homo sapien
ctatattctggtgatgcccaaaagc

SEQ ID NO: 1992498 - DNA, 25 bp, Homo sapien
catgctgcatattctctctgggcaa

SEQ ID NO: 1992499 - DNA, 25 bp, Homo sapien
tatgctcaatccagaaatcagggtc

SEQ ID NO: 1992500 - DNA, 25 bp, Homo sapien
catatctgatcctgagttttaccaa

SEQ ID NO: 1992501 - DNA, 25 bp, Homo sapien
gatactacacttctgaaaggtccca

SEQ ID NO: 1992502 - DNA, 25 bp, Homo sapien
ttctcccaaagggtacgcccaatga

SEQ ID NO: 1992503 - DNA, 25 bp, Homo sapien
tctgaaggccgtatcagttctccca

SEQ ID NO: 1992504 - DNA, 25 bp, Homo sapien
tttacaaattcacctcagcatgaag

SEQ ID NO: 1992505 - DNA, 25 bp, Homo sapien
tcttcccttaaagcacagtgaaaat

SEQ ID NO: 1992506 - DNA, 25 bp, Homo sapien
cccttaaagcacagtgaaaataatc

SEQ ID NO: 1992507 - DNA, 25 bp, Homo sapien
agatgaagtttcgccctattgccca

SEQ ID NO: 1992508 - DNA, 25 bp, Homo sapien
taacaattatgccatagtgctatga

SEQ ID NO: 1992509 - DNA, 25 bp, Homo sapien
tatttaaaatatgcgccaacaggcc

SEQ ID NO: 1992510 - DNA, 25 bp, Homo sapien
gaaaactacatctagctgaccaagc

SEQ ID NO: 1992511 - DNA, 25 bp, Homo sapien
taactcagaagctgcaaccctttca

SEQ ID NO: 1992512 - DNA, 25 bp, Homo sapien
cactgtgagaaacaccaggtgcagg

SEQ ID NO: 1992513 - DNA, 25 bp, Homo sapien
ggtatgcgtatcaatcatctctaag

SEQ ID NO: 1992514 - DNA, 25 bp, Homo sapien
gaggtagggtctaacaagcttctga

SEQ ID NO: 1992515 - DNA, 25 bp, Homo sapien
tggtccagggaacatacttacggta

SEQ ID NO: 1992516 - DNA, 25 bp, Homo sapien
gcttctgagtaatgctgatgttgct

SEQ ID NO: 1992517 - DNA, 25 bp, Homo sapien
taggtgtcagtccaacattcttggc

SEQ ID NO: 1992518 - DNA, 25 bp, Homo sapien
cacaagacagcgaaaaggccatgca

SEQ ID NO: 1992519 - DNA, 25 bp, Homo sapien
taacaggcataagacgtacaaaggc

SEQ ID NO: 1992520 - DNA, 25 bp, Homo sapien
tcttggctcaaatcgtaactctggt

SEQ ID NO: 1992521 - DNA, 25 bp, Homo sapien
tctcctgttgttctgataaatattt

SEQ ID NO: 1992522 - DNA, 25 bp, Homo sapien
taaatatttctgatacaggcttaga

SEQ ID NO: 1992523 - DNA, 25 bp, Homo sapien
ggcttagaagttcttggcattctct

SEQ ID NO: 1992524 - DNA, 25 bp, Homo sapien
tctgatacaggcttagaagttcttg

SEQ ID NO: 1992525 - DNA, 25 bp, Homo sapien
cattctagcagcaccaagttctgag

SEQ ID NO: 1992526 - DNA, 25 bp, Homo sapien
tgcattctagcagcaccaagttctg

SEQ ID NO: 1992527 - DNA, 25 bp, Homo sapien
tctagcagcaccaagttctgagaga

SEQ ID NO: 1992528 - DNA, 25 bp, Homo sapien
gttcctgcattctagcagcaccaag

SEQ ID NO: 1992529 - DNA, 25 bp, Homo sapien
ggtaaatgaaagattgctccatctc

SEQ ID NO: 1992530 - DNA, 25 bp, Homo sapien
gattggccttccgttttgtgccctc

SEQ ID NO: 1992531 - DNA, 25 bp, Homo sapien
taatactggtaaatgaaagattgct

SEQ ID NO: 1992532 - DNA, 25 bp, Homo sapien
cacatccttgccaaatggattggcc

SEQ ID NO: 1992533 - DNA, 25 bp, Homo sapien
tttgagatttcggtggctactgttg

SEQ ID NO: 1992534 - DNA, 25 bp, Homo sapien
ctactttgagatttcggtggctact

SEQ ID NO: 1992535 - DNA, 25 bp, Homo sapien
ttgagatttcggtggctactgttgt

SEQ ID NO: 1992536 - DNA, 25 bp, Homo sapien
actttgagatttcggtggctactgt

SEQ ID NO: 1992537 - DNA, 25 bp, Homo sapien
ggcaatactagtcagccgctttaag

SEQ ID NO: 1992538 - DNA, 25 bp, Homo sapien
gccacagtgcccagttcatataatg

SEQ ID NO: 1992539 - DNA, 25 bp, Homo sapien
aactcaaatgcaactatgggactac

SEQ ID NO: 1992540 - DNA, 25 bp, Homo sapien
gttcttttaaggcaatactagtcag

SEQ ID NO: 1992541 - DNA, 25 bp, Homo sapien
tagtgtgatctctgctccctgcaag

SEQ ID NO: 1992542 - DNA, 25 bp, Homo sapien
gctccgcctcctgggttcaagtgat

SEQ ID NO: 1992543 - DNA, 25 bp, Homo sapien
ctgactcagtctcctaagtagttgg

SEQ ID NO: 1992544 - DNA, 25 bp, Homo sapien
cttgacttcatgatccgcttgtctc

SEQ ID NO: 1992545 - DNA, 25 bp, Homo sapien
aaagaaattggacctttgcctcgca

SEQ ID NO: 1992546 - DNA, 25 bp, Homo sapien
tcaaaagcagcataaagacagcaaa

SEQ ID NO: 1992547 - DNA, 25 bp, Homo sapien
tgcctcgcatcaattcccagaatta

SEQ ID NO: 1992548 - DNA, 25 bp, Homo sapien
ggtttaacatctagactatacgaag

SEQ ID NO: 1992549 - DNA, 25 bp, Homo sapien
tcaggctacctgtgtctttacaagt

SEQ ID NO: 1992550 - DNA, 25 bp, Homo sapien
tgtatgcagcatatggttggatcat

SEQ ID NO: 1992551 - DNA, 25 bp, Homo sapien
tctgtgttaggtccacatgatctaa

SEQ ID NO: 1992552 - DNA, 25 bp, Homo sapien
tctgcagtagctggatagaatgttc

SEQ ID NO: 1992553 - DNA, 25 bp, Homo sapien
ttgttgcatctcaggaataaaatcc

SEQ ID NO: 1992554 - DNA, 25 bp, Homo sapien
ttggtaagatgtttgcggtgtattt

SEQ ID NO: 1992555 - DNA, 25 bp, Homo sapien
gttgaaccattgttgcatctcagga

SEQ ID NO: 1992556 - DNA, 25 bp, Homo sapien
gcggtgtatttgtcgtaagttcctc

SEQ ID NO: 1992557 - DNA, 25 bp, Homo sapien
ttattttgctaaagttgagtttgca

SEQ ID NO: 1992558 - DNA, 25 bp, Homo sapien
cagaattgaattgcttaacagagaa

SEQ ID NO: 1992559 - DNA, 25 bp, Homo sapien
tgcaagtcaggccagaattgaattg

SEQ ID NO: 1992560 - DNA, 25 bp, Homo sapien
tcaggccagaattgaattgcttaac

SEQ ID NO: 1992561 - DNA, 25 bp, Homo sapien
tatgctcaagtaggaaccatccagt

SEQ ID NO: 1992562 - DNA, 25 bp, Homo sapien
aagtttcaatgggttgcagtgcccc

SEQ ID NO: 1992563 - DNA, 25 bp, Homo sapien
ccacagcattgactaggagtaggct

SEQ ID NO: 1992564 - DNA, 25 bp, Homo sapien
gaatcctggactgcagacttaggtc

SEQ ID NO: 1992565 - DNA, 25 bp, Homo sapien
gctgttttagaagaagctttgtctc

SEQ ID NO: 1992566 - DNA, 25 bp, Homo sapien
gcagatgctgaaggcgctccttttc

SEQ ID NO: 1992567 - DNA, 25 bp, Homo sapien
tccagtcgagactggtgaagctgct

SEQ ID NO: 1992568 - DNA, 25 bp, Homo sapien
gaagcatcagttgctgctttctatc

SEQ ID NO: 1992569 - DNA, 25 bp, Homo sapien
tccaacttggttcttggaaactcta

SEQ ID NO: 1992570 - DNA, 25 bp, Homo sapien
tgagttcttggggtttagtaagctg

SEQ ID NO: 1992571 - DNA, 25 bp, Homo sapien
ccagttctctcgacttaaacagagc

SEQ ID NO: 1992572 - DNA, 25 bp, Homo sapien
tctctcgacttaaacagagcctgag

SEQ ID NO: 1992573 - DNA, 25 bp, Homo sapien
cagcaaccagttctctcgacttaaa

SEQ ID NO: 1992574 - DNA, 25 bp, Homo sapien
cgtattcatatggtcacaaaactgt

SEQ ID NO: 1992575 - DNA, 25 bp, Homo sapien
tatttatgcccttaagattcttgtt

SEQ ID NO: 1992576 - DNA, 25 bp, Homo sapien
caaaattgtataacaggaatgtacg

SEQ ID NO: 1992577 - DNA, 25 bp, Homo sapien
caacatagagctataaaagtatacc

SEQ ID NO: 1992578 - DNA, 25 bp, Homo sapien
cctccccgatgttctcctcattgcc

SEQ ID NO: 1992579 - DNA, 25 bp, Homo sapien
cttcgtattcatcatcttctgatga

SEQ ID NO: 1992580 - DNA, 25 bp, Homo sapien
tcgtattcatcatcttctgatgatt

SEQ ID NO: 1992581 - DNA, 25 bp, Homo sapien
catcttctgatgatttcttattata

SEQ ID NO: 1992582 - DNA, 25 bp, Homo sapien
ttacttcgtattcatcatcttctga

SEQ ID NO: 1992583 - DNA, 25 bp, Homo sapien
ggtgggtatagtagaccaatctcca

SEQ ID NO: 1992584 - DNA, 25 bp, Homo sapien
gatatgtgcacatttgccagtggtg

SEQ ID NO: 1992585 - DNA, 25 bp, Homo sapien
gagcaggaatggtctgtccttatgc

SEQ ID NO: 1992586 - DNA, 25 bp, Homo sapien
cacaaggtgtgcatgggcatcagtc

SEQ ID NO: 1992587 - DNA, 25 bp, Homo sapien
gctagcgtagagtgcagcattcata

SEQ ID NO: 1992588 - DNA, 25 bp, Homo sapien
tgcccgagcaattctttaggcgaaa

SEQ ID NO: 1992589 - DNA, 25 bp, Homo sapien
tactgccacactgatctccaaaatg

SEQ ID NO: 1992590 - DNA, 25 bp, Homo sapien
taaccggaaaagagttgctatgcca

SEQ ID NO: 1992591 - DNA, 25 bp, Homo sapien
gagcgcagtggagcaatctcttctc

SEQ ID NO: 1992592 - DNA, 25 bp, Homo sapien
gcgcagtggagcaatctcttctcac

SEQ ID NO: 1992593 - DNA, 25 bp, Homo sapien
gcctgccaccaagccaagttaattt

SEQ ID NO: 1992594 - DNA, 25 bp, Homo sapien
ggtgcctgccaccaagccaagttaa

SEQ ID NO: 1992595 - DNA, 25 bp, Homo sapien
tgaggttatcaaagcaagcagactc

SEQ ID NO: 1992596 - DNA, 25 bp, Homo sapien
tatgttagaacaaaggctgagaacc

SEQ ID NO: 1992597 - DNA, 25 bp, Homo sapien
cacagtgtgacaagagctccgtttc

SEQ ID NO: 1992598 - DNA, 25 bp, Homo sapien
tatctaagatgctacctctggtcca

SEQ ID NO: 1992599 - DNA, 25 bp, Homo sapien
tgtagccttgaagtacagtagcgtg

SEQ ID NO: 1992600 - DNA, 25 bp, Homo sapien
gtagccttgaagtacagtagcgtga

SEQ ID NO: 1992601 - DNA, 25 bp, Homo sapien
taggtcaaccattcggtccaggaag

SEQ ID NO: 1992602 - DNA, 25 bp, Homo sapien
aatcatccatttgtagcagggctca

SEQ ID NO: 1992603 - DNA, 25 bp, Homo sapien
gatttttactgggacaatgcagcag

SEQ ID NO: 1992604 - DNA, 25 bp, Homo sapien
cagggactgaaaagactggcagaaa

SEQ ID NO: 1992605 - DNA, 25 bp, Homo sapien
cagtcattcttgtgagtgagtaaag

SEQ ID NO: 1992606 - DNA, 25 bp, Homo sapien
gatacagtcattcttgtgagtgagt

SEQ ID NO: 1992607 - DNA, 25 bp, Homo sapien
ttcttgtgagtgagtaaagcaggta

SEQ ID NO: 1992608 - DNA, 25 bp, Homo sapien
cattcttgtgagtgagtaaagcagg

SEQ ID NO: 1992609 - DNA, 25 bp, Homo sapien
cttttatttgcactcttgataccat

SEQ ID NO: 1992610 - DNA, 25 bp, Homo sapien
tatttgcactcttgataccatcttg

SEQ ID NO: 1992611 - DNA, 25 bp, Homo sapien
tgcactcttgataccatcttgaccc

SEQ ID NO: 1992612 - DNA, 25 bp, Homo sapien
cactcttgataccatcttgacccat

SEQ ID NO: 1992613 - DNA, 25 bp, Homo sapien
tcttttgacatgaccactgggcatc

SEQ ID NO: 1992614 - DNA, 25 bp, Homo sapien
gatgatgttccaagcagccagccat

SEQ ID NO: 1992615 - DNA, 25 bp, Homo sapien
tatgcgaatgaaacccaactgtctt

SEQ ID NO: 1992616 - DNA, 25 bp, Homo sapien
actgggcatcatctttcatatgcga

SEQ ID NO: 1992617 - DNA, 25 bp, Homo sapien
gccttgcaggcacacttcagtgtgt

SEQ ID NO: 1992618 - DNA, 25 bp, Homo sapien
caaaaagagggacaagttggataca

SEQ ID NO: 1992619 - DNA, 25 bp, Homo sapien
tagtctatgaccatacttactgctg

SEQ ID NO: 1992620 - DNA, 25 bp, Homo sapien
taaatgtgttacctgtggccttgca

SEQ ID NO: 1992621 - DNA, 25 bp, Homo sapien
gcataggagatgtagacgcatcttt

SEQ ID NO: 1992622 - DNA, 25 bp, Homo sapien
tagacgcatcttttctaactcctgt

SEQ ID NO: 1992623 - DNA, 25 bp, Homo sapien
gagatgtagacgcatcttttctaac

SEQ ID NO: 1992624 - DNA, 25 bp, Homo sapien
tgtagacgcatcttttctaactcct

SEQ ID NO: 1992625 - DNA, 25 bp, Homo sapien
tcaaactggccaaatctagatgctt

SEQ ID NO: 1992626 - DNA, 25 bp, Homo sapien
aaggactccatgtggttcaaactgg

SEQ ID NO: 1992627 - DNA, 25 bp, Homo sapien
ggaagcccttacattaccatgatca

SEQ ID NO: 1992628 - DNA, 25 bp, Homo sapien
gataaattaggaaagccctgctgct

SEQ ID NO: 1992629 - DNA, 25 bp, Homo sapien
aagtatgtactcaagtatttcccaa

SEQ ID NO: 1992630 - DNA, 25 bp, Homo sapien
tcaaagtatgtactcaagtatttcc

SEQ ID NO: 1992631 - DNA, 25 bp, Homo sapien
caaagtatgtactcaagtatttccc

SEQ ID NO: 1992632 - DNA, 25 bp, Homo sapien
tatgtactcaagtatttcccaaatc

SEQ ID NO: 1992633 - DNA, 25 bp, Homo sapien
catagcagttttcagagttcagtac

SEQ ID NO: 1992634 - DNA, 25 bp, Homo sapien
tcaccattcatagcagttttcagag

SEQ ID NO: 1992635 - DNA, 25 bp, Homo sapien
atagcagttttcagagttcagtacc

SEQ ID NO: 1992636 - DNA, 25 bp, Homo sapien
ccattcatagcagttttcagagttc

SEQ ID NO: 1992637 - DNA, 25 bp, Homo sapien
gaagcagatctttgtggagattcct

SEQ ID NO: 1992638 - DNA, 25 bp, Homo sapien
taataggttccttccataatccgtg

SEQ ID NO: 1992639 - DNA, 25 bp, Homo sapien
aatccgtgtagcctagcattttgtc

SEQ ID NO: 1992640 - DNA, 25 bp, Homo sapien
tctaggagaacaatatgaagaaatg

SEQ ID NO: 1992641 - DNA, 25 bp, Homo sapien
gcatgtgtttcaccctctgtgtagg

SEQ ID NO: 1992642 - DNA, 25 bp, Homo sapien
caacggtatgggctccataagggta

SEQ ID NO: 1992643 - DNA, 25 bp, Homo sapien
ttattctcaattcttacctctaggc

SEQ ID NO: 1992644 - DNA, 25 bp, Homo sapien
tccaaaatagccatcaatccacagt

SEQ ID NO: 1992645 - DNA, 25 bp, Homo sapien
ccagacaggaaaggatcagattatt

SEQ ID NO: 1992646 - DNA, 25 bp, Homo sapien
cccagacaggaaaggatcagattat

SEQ ID NO: 1992647 - DNA, 25 bp, Homo sapien
gcatccccatcttcttccgggttga

SEQ ID NO: 1992648 - DNA, 25 bp, Homo sapien
aggtttgggcgcagagtttgggctc

SEQ ID NO: 1992649 - DNA, 25 bp, Homo sapien
ttagaggactgagtcggaaagtacc

SEQ ID NO: 1992650 - DNA, 25 bp, Homo sapien
cttctctggagggatagcgctgagg

SEQ ID NO: 1992651 - DNA, 25 bp, Homo sapien
cccttagtgtgttatcgaatgcctg

SEQ ID NO: 1992652 - DNA, 25 bp, Homo sapien
tagatcagtatgtgaggaaacccac

SEQ ID NO: 1992653 - DNA, 25 bp, Homo sapien
tggtttccaccacgcagaaagtatc

SEQ ID NO: 1992654 - DNA, 25 bp, Homo sapien
gatgctagtgagacaagtccccgtg

SEQ ID NO: 1992655 - DNA, 25 bp, Homo sapien
tgactcacaattggctctcgtgttg

SEQ ID NO: 1992656 - DNA, 25 bp, Homo sapien
ctctcgtgttgtttgtgatggcagg

SEQ ID NO: 1992657 - DNA, 25 bp, Homo sapien
gccaggctgatggctactgagactg

SEQ ID NO: 1992658 - DNA, 25 bp, Homo sapien
tccagcccattgagctctttggtta

SEQ ID NO: 1992659 - DNA, 25 bp, Homo sapien
gatttagtgctgcttgctcccaagg

SEQ ID NO: 1992660 - DNA, 25 bp, Homo sapien
gcttgagaggctactagggaccact

SEQ ID NO: 1992661 - DNA, 25 bp, Homo sapien
ccatggaaagttcacaggagcacgt

SEQ ID NO: 1992662 - DNA, 25 bp, Homo sapien
cttgggtggtggaacatactctggc

SEQ ID NO: 1992663 - DNA, 25 bp, Homo sapien
aacgccctcggcatgtgtccagtct

SEQ ID NO: 1992664 - DNA, 25 bp, Homo sapien
caatggtgaggcactatccgcaacg

SEQ ID NO: 1992665 - DNA, 25 bp, Homo sapien
tcggcatgtgtccagtcttgctttg

SEQ ID NO: 1992666 - DNA, 25 bp, Homo sapien
ttagggagttcaaaggacatgctgt

SEQ ID NO: 1992667 - DNA, 25 bp, Homo sapien
tattatgaacttggtgccggaagca

SEQ ID NO: 1992668 - DNA, 25 bp, Homo sapien
aagtttgcctcctggaaagcggact

SEQ ID NO: 1992669 - DNA, 25 bp, Homo sapien
aatcgtgagttggaaggagtccgcc

SEQ ID NO: 1992670 - DNA, 25 bp, Homo sapien
ctgcatcaagaactgtgggccttac

SEQ ID NO: 1992671 - DNA, 25 bp, Homo sapien
tattaacttgaaatctcatacgtac

SEQ ID NO: 1992672 - DNA, 25 bp, Homo sapien
ccatagagatgatttattaacttga

SEQ ID NO: 1992673 - DNA, 25 bp, Homo sapien
tagccatagagatgatttattaact

SEQ ID NO: 1992674 - DNA, 25 bp, Homo sapien
tttattaacttgaaatctcatacgt

SEQ ID NO: 1992675 - DNA, 25 bp, Homo sapien
aaacctactgggatgtgacaaacca

SEQ ID NO: 1992676 - DNA, 25 bp, Homo sapien
cacaaaatctagaggcggcttggtg

SEQ ID NO: 1992677 - DNA, 25 bp, Homo sapien
aatgttctgttccaacaagcacaaa

SEQ ID NO: 1992678 - DNA, 25 bp, Homo sapien
cttggtgttcacgtgatgtgagtga

SEQ ID NO: 1992679 - DNA, 25 bp, Homo sapien
gggcaggtgcgaagtctccgtattc

SEQ ID NO: 1992680 - DNA, 25 bp, Homo sapien
caggtgcgaagtctccgtattcagg

SEQ ID NO: 1992681 - DNA, 25 bp, Homo sapien
gcgaagtctccgtattcaggtgcag

SEQ ID NO: 1992682 - DNA, 25 bp, Homo sapien
tccgtattcaggtgcaggtgccagc

SEQ ID NO: 1992683 - DNA, 25 bp, Homo sapien
ccttcaaaccccgacgctgctttat

SEQ ID NO: 1992684 - DNA, 25 bp, Homo sapien
aattccttcaaaccccgacgctgct

SEQ ID NO: 1992685 - DNA, 25 bp, Homo sapien
tcaattccttcaaaccccgacgctg

SEQ ID NO: 1992686 - DNA, 25 bp, Homo sapien
ttcaaaccccgacgctgctttatta

SEQ ID NO: 1992687 - DNA, 25 bp, Homo sapien
tgggttgctgatcagtgtggctgta

SEQ ID NO: 1992688 - DNA, 25 bp, Homo sapien
atcagtgtgggttgctgatcagtgt

SEQ ID NO: 1992689 - DNA, 25 bp, Homo sapien
gctgatcagtgtggctgtagcaatt

SEQ ID NO: 1992690 - DNA, 25 bp, Homo sapien
ttgctgatcagtgtggctgtagcaa

SEQ ID NO: 1992691 - DNA, 25 bp, Homo sapien
tggacttgatacttcttgaagattg

SEQ ID NO: 1992692 - DNA, 25 bp, Homo sapien
atggacttgatacttcttgaagatt

SEQ ID NO: 1992693 - DNA, 25 bp, Homo sapien
ggacttgatacttcttgaagattga

SEQ ID NO: 1992694 - DNA, 25 bp, Homo sapien
tttccagatctaggtcagcattcca

SEQ ID NO: 1992695 - DNA, 25 bp, Homo sapien
gggctagtttccagatctaggtcag

SEQ ID NO: 1992696 - DNA, 25 bp, Homo sapien
tagtttccagatctaggtcagcatt

SEQ ID NO: 1992697 - DNA, 25 bp, Homo sapien
tgtggcctcatcattcttgctttca

SEQ ID NO: 1992698 - DNA, 25 bp, Homo sapien
aaatgccaacgctgctttctactcc

SEQ ID NO: 1992699 - DNA, 25 bp, Homo sapien
cgtgttccaaggacctccctcttgg

SEQ ID NO: 1992700 - DNA, 25 bp, Homo sapien
ctgggccttctggatcctccgtgtt

SEQ ID NO: 1992701 - DNA, 25 bp, Homo sapien
gccaacgctgctttctactcctggg

SEQ ID NO: 1992702 - DNA, 25 bp, Homo sapien
tcagatcttgaacagggcctgtcct

SEQ ID NO: 1992703 - DNA, 25 bp, Homo sapien
tctgatgtcctggtcagatcttgaa

SEQ ID NO: 1992704 - DNA, 25 bp, Homo sapien
gagggagaggccagctctgatgtcc

SEQ ID NO: 1992705 - DNA, 25 bp, Homo sapien
aatcaaggagggcaaacaccacagt

SEQ ID NO: 1992706 - DNA, 25 bp, Homo sapien
tgtgaagttcatcccatcccaatgg

SEQ ID NO: 1992707 - DNA, 25 bp, Homo sapien
tggaagacgtcaggccatgggccat

SEQ ID NO: 1992708 - DNA, 25 bp, Homo sapien
gccattgtttgtgtgctggtgccaa

SEQ ID NO: 1992709 - DNA, 25 bp, Homo sapien
tccagagactttccgggcaagggag

SEQ ID NO: 1992710 - DNA, 25 bp, Homo sapien
cttgctccagagactttccgggcaa

SEQ ID NO: 1992711 - DNA, 25 bp, Homo sapien
gccttccacgcttgctccagagact

SEQ ID NO: 1992712 - DNA, 25 bp, Homo sapien
gcttcactcgccttccacgcttgct

SEQ ID NO: 1992713 - DNA, 25 bp, Homo sapien
gacgccggtggaggccacgccgtcg

SEQ ID NO: 1992714 - DNA, 25 bp, Homo sapien
gcgcctggctgccgacgccggtgga

SEQ ID NO: 1992715 - DNA, 25 bp, Homo sapien
gcctggctgccgacgccggtggagg

SEQ ID NO: 1992716 - DNA, 25 bp, Homo sapien
ccggtggaggccacgccgtcggtcg

SEQ ID NO: 1992717 - DNA, 25 bp, Homo sapien
tcttgaaacagcttagagcgattct

SEQ ID NO: 1992718 - DNA, 25 bp, Homo sapien
caaatgggacttaccaagcaaggtc

SEQ ID NO: 1992719 - DNA, 25 bp, Homo sapien
cccgtgaagtgtgagaaaacaagga

SEQ ID NO: 1992720 - DNA, 25 bp, Homo sapien
gatactttgagaggcgctttgatga

SEQ ID NO: 1992721 - DNA, 25 bp, Homo sapien
tcttcaaggaaagtatagcgtctat

SEQ ID NO: 1992722 - DNA, 25 bp, Homo sapien
gaactgttggatgacacctttgaca

SEQ ID NO: 1992723 - DNA, 25 bp, Homo sapien
caggatgctgaacgggctacattaa

SEQ ID NO: 1992724 - DNA, 25 bp, Homo sapien
tagcgtctatggagttcagagggca

SEQ ID NO: 1992725 - DNA, 25 bp, Homo sapien
tgctgtgctcattttcgtttcgttc

SEQ ID NO: 1992726 - DNA, 25 bp, Homo sapien
gattggccagtcatgatcacacgtg

SEQ ID NO: 1992727 - DNA, 25 bp, Homo sapien
tcttgacttttgtgctgccacaatc

SEQ ID NO: 1992728 - DNA, 25 bp, Homo sapien
tcattttcgtttcgttcttggtgct

SEQ ID NO: 1992729 - DNA, 25 bp, Homo sapien
tcgcgctgagctaggaataaagttc

SEQ ID NO: 1992730 - DNA, 25 bp, Homo sapien
catgatggcgtcatgtaacaaggct

SEQ ID NO: 1992731 - DNA, 25 bp, Homo sapien
taagaatcggttgcatgacaattgc

SEQ ID NO: 1992732 - DNA, 25 bp, Homo sapien
caattgccgtcaagtttcgtggagg

SEQ ID NO: 1992733 - DNA, 25 bp, Homo sapien
ggctggtagcctttagacacttgac

SEQ ID NO: 1992734 - DNA, 25 bp, Homo sapien
tcctgcctaggagctgaagacacag

SEQ ID NO: 1992735 - DNA, 25 bp, Homo sapien
gtcgttgttaccttttctgctgggc

SEQ ID NO: 1992736 - DNA, 25 bp, Homo sapien
tgccccacacgggtcatgatgagtg

SEQ ID NO: 1992737 - DNA, 25 bp, Homo sapien
cccgggggagaccaggactcgcaca

SEQ ID NO: 1992738 - DNA, 25 bp, Homo sapien
tgaagcggcccaaagacgccaatcg

SEQ ID NO: 1992739 - DNA, 25 bp, Homo sapien
aatcgcccgtactgagcgccggcgg

SEQ ID NO: 1992740 - DNA, 25 bp, Homo sapien
caaagacgccaatcgcccgtactga

SEQ ID NO: 1992741 - DNA, 25 bp, Homo sapien
tctatgatgagaagagccttggcca

SEQ ID NO: 1992742 - DNA, 25 bp, Homo sapien
ggacctaatttcagctaccagcgga

SEQ ID NO: 1992743 - DNA, 25 bp, Homo sapien
tatgggacccatgcagtctaccgtg

SEQ ID NO: 1992744 - DNA, 25 bp, Homo sapien
aagcacatagtgtctgggcccgaga

SEQ ID NO: 1992745 - DNA, 25 bp, Homo sapien
gctgcctgcagactggtaaccacag

SEQ ID NO: 1992746 - DNA, 25 bp, Homo sapien
ctgcctgcagactggtaaccacagc

SEQ ID NO: 1992747 - DNA, 25 bp, Homo sapien
gcgcaggccagaggcaccgacagct

SEQ ID NO: 1992748 - DNA, 25 bp, Homo sapien
agctgcgggcggaggctctggagca

SEQ ID NO: 1992749 - DNA, 25 bp, Homo sapien
tgggcgagcgccgatgccgcctcct

SEQ ID NO: 1992750 - DNA, 25 bp, Homo sapien
caggccagaggcaccgacagctgcg

SEQ ID NO: 1992751 - DNA, 25 bp, Homo sapien
aggcccgaagtcagacccgccagtt

SEQ ID NO: 1992752 - DNA, 25 bp, Homo sapien
cttgtgataagtgcgctccaggcag

SEQ ID NO: 1992753 - DNA, 25 bp, Homo sapien
cccgaagtcagacccgccagttgtg

SEQ ID NO: 1992754 - DNA, 25 bp, Homo sapien
tcagacccgccagttgtgattcatt

SEQ ID NO: 1992755 - DNA, 25 bp, Homo sapien
tgtcctttgacattccggccacagg

SEQ ID NO: 1992756 - DNA, 25 bp, Homo sapien
tgggaaaggagagctatacggaaac

SEQ ID NO: 1992757 - DNA, 25 bp, Homo sapien
cacaaagtagtcattgtcctttgac

SEQ ID NO: 1992758 - DNA, 25 bp, Homo sapien
tatacggaaacccacaaagtagtca

SEQ ID NO: 1992759 - DNA, 25 bp, Homo sapien
aggtgtgtgggggctgctgaggcat

SEQ ID NO: 1992760 - DNA, 25 bp, Homo sapien
ctgatactcatcccaggtgtgtggg

SEQ ID NO: 1992761 - DNA, 25 bp, Homo sapien
gatactcatcccaggtgtgtggggg

SEQ ID NO: 1992762 - DNA, 25 bp, Homo sapien
ccaggtgtgtgggggctgctgaggc

SEQ ID NO: 1992763 - DNA, 25 bp, Homo sapien
tggatacagccccatgcgtgcatgc

SEQ ID NO: 1992764 - DNA, 25 bp, Homo sapien
cacactgaagtagcagtatgtgggc

SEQ ID NO: 1992765 - DNA, 25 bp, Homo sapien
ccccggactctcagtgagaggagtg

SEQ ID NO: 1992766 - DNA, 25 bp, Homo sapien
gagcacacagcatgggatcaacaaa

SEQ ID NO: 1992767 - DNA, 25 bp, Homo sapien
gggagctggaattatccgaggactc

SEQ ID NO: 1992768 - DNA, 25 bp, Homo sapien
gactcattcattcacgtgtctggtg

SEQ ID NO: 1992769 - DNA, 25 bp, Homo sapien
cacagcatggaaggcctgtctctgc

SEQ ID NO: 1992770 - DNA, 25 bp, Homo sapien
ggtggtcgatgttggctgtcagctg

SEQ ID NO: 1992771 - DNA, 25 bp, Homo sapien
agctccttgtcccttgcacccatca

SEQ ID NO: 1992772 - DNA, 25 bp, Homo sapien
ggattcctgaaggtcagctccttgt

SEQ ID NO: 1992773 - DNA, 25 bp, Homo sapien
cttctgaggattcctgaaggtcagc

SEQ ID NO: 1992774 - DNA, 25 bp, Homo sapien
tgaggattcctgaaggtcagctcct

SEQ ID NO: 1992775 - DNA, 25 bp, Homo sapien
tgaagctttctgatgcagccagcag

SEQ ID NO: 1992776 - DNA, 25 bp, Homo sapien
catgttcagggggctccactgccct

SEQ ID NO: 1992777 - DNA, 25 bp, Homo sapien
gaggtgcctgggacccatgttcagg

SEQ ID NO: 1992778 - DNA, 25 bp, Homo sapien
gacaaagcttgaggtgcctgggacc

SEQ ID NO: 1992779 - DNA, 25 bp, Homo sapien
caccaagcttggctgctttggtgcc

SEQ ID NO: 1992780 - DNA, 25 bp, Homo sapien
tctctgccgtcttttagtgtccagt

SEQ ID NO: 1992781 - DNA, 25 bp, Homo sapien
catctctgccgtcttttagtgtcca

SEQ ID NO: 1992782 - DNA, 25 bp, Homo sapien
agccatctttgccgggtatgctggg

SEQ ID NO: 1992783 - DNA, 25 bp, Homo sapien
cccatctctgccgtcttttagtgtc

SEQ ID NO: 1992784 - DNA, 25 bp, Homo sapien
ccaacagagagcggtggttcagcct

SEQ ID NO: 1992785 - DNA, 25 bp, Homo sapien
agggtccaacagagagcggtggttc

SEQ ID NO: 1992786 - DNA, 25 bp, Homo sapien
caacagagagcggtggttcagcctg

SEQ ID NO: 1992787 - DNA, 25 bp, Homo sapien
gtccaacagagagcggtggttcagc

SEQ ID NO: 1992788 - DNA, 25 bp, Homo sapien
tattaatacggcccaaattcccata

SEQ ID NO: 1992789 - DNA, 25 bp, Homo sapien
ggggcattggacaggtaactccatc

SEQ ID NO: 1992790 - DNA, 25 bp, Homo sapien
tccagtgtattcttgggagttttat

SEQ ID NO: 1992791 - DNA, 25 bp, Homo sapien
ggtggccggtgggcattctggacag

SEQ ID NO: 1992792 - DNA, 25 bp, Homo sapien
tgccccaatgatcaggggacagagg

SEQ ID NO: 1992793 - DNA, 25 bp, Homo sapien
ctgccccaatgatcaggggacagag

SEQ ID NO: 1992794 - DNA, 25 bp, Homo sapien
gccccaatgatcaggggacagaggc

SEQ ID NO: 1992795 - DNA, 25 bp, Homo sapien
gatgtggtcactgatgtgcatcctc

SEQ ID NO: 1992796 - DNA, 25 bp, Homo sapien
tgttgggggcgataattcccatcca

SEQ ID NO: 1992797 - DNA, 25 bp, Homo sapien
gtgcatcctccctcataggtgtcct

SEQ ID NO: 1992798 - DNA, 25 bp, Homo sapien
gttttccagtgtcatcccagcgtct

SEQ ID NO: 1992799 - DNA, 25 bp, Homo sapien
gggaagccttctcctatgatgctac

SEQ ID NO: 1992800 - DNA, 25 bp, Homo sapien
ccagggacttgtctccaggaggggt

SEQ ID NO: 1992801 - DNA, 25 bp, Homo sapien
ggaggggttgggatgcctacggcca

SEQ ID NO: 1992802 - DNA, 25 bp, Homo sapien
tcctatgatgctacccccagggact

SEQ ID NO: 1992803 - DNA, 25 bp, Homo sapien
gttttccgtgcattgcttccacaag

SEQ ID NO: 1992804 - DNA, 25 bp, Homo sapien
aatagccagtgtattcatgtcccag

SEQ ID NO: 1992805 - DNA, 25 bp, Homo sapien
aatggtgaggttcagacaaatagcc

SEQ ID NO: 1992806 - DNA, 25 bp, Homo sapien
gatgcttccggcaaagaatggatgc

SEQ ID NO: 1992807 - DNA, 25 bp, Homo sapien
tgttcccctccacgctgtggccacc

SEQ ID NO: 1992808 - DNA, 25 bp, Homo sapien
cctccacgctgtggccacctccaag

SEQ ID NO: 1992809 - DNA, 25 bp, Homo sapien
cctgttcccctccacgctgtggcca

SEQ ID NO: 1992810 - DNA, 25 bp, Homo sapien
ttcccctccacgctgtggccacctc

SEQ ID NO: 1992811 - DNA, 25 bp, Homo sapien
ctgcgctgagtctaagggaaggcct

SEQ ID NO: 1992812 - DNA, 25 bp, Homo sapien
ggcctgtgcgagctttgatgcctct

SEQ ID NO: 1992813 - DNA, 25 bp, Homo sapien
agtgcgccaactcagctgtaagcag

SEQ ID NO: 1992814 - DNA, 25 bp, Homo sapien
ccaacgtgattctcggcctcagggt

SEQ ID NO: 1992815 - DNA, 25 bp, Homo sapien
cctttcacacatttgaagttgggag

SEQ ID NO: 1992816 - DNA, 25 bp, Homo sapien
tcctttcacacatttgaagttggga

SEQ ID NO: 1992817 - DNA, 25 bp, Homo sapien
ttcacacatttgaagttgggagtca

SEQ ID NO: 1992818 - DNA, 25 bp, Homo sapien
atctcctttcacacatttgaagttg

SEQ ID NO: 1992819 - DNA, 25 bp, Homo sapien
cagagtccaagcacaaggctgggac

SEQ ID NO: 1992820 - DNA, 25 bp, Homo sapien
ccacggcatgccatcggggccactg

SEQ ID NO: 1992821 - DNA, 25 bp, Homo sapien
agcacagagcacctcttgactgggc

SEQ ID NO: 1992822 - DNA, 25 bp, Homo sapien
gggcagcacagagcacctcttgact

SEQ ID NO: 1992823 - DNA, 25 bp, Homo sapien
caggaatgcagaagccatggcttaa

SEQ ID NO: 1992824 - DNA, 25 bp, Homo sapien
ctgagaccaggaatgcagaagccat

SEQ ID NO: 1992825 - DNA, 25 bp, Homo sapien
gaatgcagaagccatggcttaaagc

SEQ ID NO: 1992826 - DNA, 25 bp, Homo sapien
tgagaccaggaatgcagaagccatg

SEQ ID NO: 1992827 - DNA, 25 bp, Homo sapien
gaggagacagcacatcctgcatggc

SEQ ID NO: 1992828 - DNA, 25 bp, Homo sapien
gagatcagccggcagcatgctgagc

SEQ ID NO: 1992829 - DNA, 25 bp, Homo sapien
cagcatgctgagcatccaatgagta

SEQ ID NO: 1992830 - DNA, 25 bp, Homo sapien
catccaatgagtagaggagacagca

SEQ ID NO: 1992831 - DNA, 25 bp, Homo sapien
agccaggtgtcctcaaagagggtct

SEQ ID NO: 1992832 - DNA, 25 bp, Homo sapien
tacatatccttgttccagaccctgc

SEQ ID NO: 1992833 - DNA, 25 bp, Homo sapien
cacttgtggcccctgtatatgtgtt

SEQ ID NO: 1992834 - DNA, 25 bp, Homo sapien
gacctggacgtccacagctcatcac

SEQ ID NO: 1992835 - DNA, 25 bp, Homo sapien
tgctccagacctggacgtccacagc

SEQ ID NO: 1992836 - DNA, 25 bp, Homo sapien
caactgctgacttttggtactgggt

SEQ ID NO: 1992837 - DNA, 25 bp, Homo sapien
tggggagacccctagccacaactgc

SEQ ID NO: 1992838 - DNA, 25 bp, Homo sapien
agtggctgcggtgggacaggctctg

SEQ ID NO: 1992839 - DNA, 25 bp, Homo sapien
ctgggtttctcccttccagaatctt

SEQ ID NO: 1992840 - DNA, 25 bp, Homo sapien
cagatgaaaccaccggccgacaaca

SEQ ID NO: 1992841 - DNA, 25 bp, Homo sapien
tgcacagcagaatcgggcccgattg

SEQ ID NO: 1992842 - DNA, 25 bp, Homo sapien
gcccgattgcatagagaagctgcca

SEQ ID NO: 1992843 - DNA, 25 bp, Homo sapien
gctgccagatgaaaccaccggccga

SEQ ID NO: 1992844 - DNA, 25 bp, Homo sapien
gccacatgagaaccaagtggaagct

SEQ ID NO: 1992845 - DNA, 25 bp, Homo sapien
gataacaggcccaactcttgtctcc

SEQ ID NO: 1992846 - DNA, 25 bp, Homo sapien
gcttgggagggagcgggtctagcac

SEQ ID NO: 1992847 - DNA, 25 bp, Homo sapien
tggggagtccatccagagggaacac

SEQ ID NO: 1992848 - DNA, 25 bp, Homo sapien
tcatcaacacgaaatgacagaaaag

SEQ ID NO: 1992849 - DNA, 25 bp, Homo sapien
ccagtgtgatggttactgctaggag

SEQ ID NO: 1992850 - DNA, 25 bp, Homo sapien
ggcacagactgggaccaccaggttt

SEQ ID NO: 1992851 - DNA, 25 bp, Homo sapien
ggaccaccaggttttatctcatcaa

SEQ ID NO: 1992852 - DNA, 25 bp, Homo sapien
cctccagacacagagcagacaaggc

SEQ ID NO: 1992853 - DNA, 25 bp, Homo sapien
cctggggtcctccagacacagagca

SEQ ID NO: 1992854 - DNA, 25 bp, Homo sapien
cagacacagagcagacaaggcccac

SEQ ID NO: 1992855 - DNA, 25 bp, Homo sapien
tccagacacagagcagacaaggccc

SEQ ID NO: 1992856 - DNA, 25 bp, Homo sapien
cttagtgggccgaagaggatcagca

SEQ ID NO: 1992857 - DNA, 25 bp, Homo sapien
ccaccccgcttagtgggccgaagag

SEQ ID NO: 1992858 - DNA, 25 bp, Homo sapien
atgtgtgtgcccaccccgcttagtg

SEQ ID NO: 1992859 - DNA, 25 bp, Homo sapien
tgtgtgtgcccaccccgcttagtgg

SEQ ID NO: 1992860 - DNA, 25 bp, Homo sapien
cggactctgggtggcctagaggcag

SEQ ID NO: 1992861 - DNA, 25 bp, Homo sapien
gtctcacctttaggcccattctcaa

SEQ ID NO: 1992862 - DNA, 25 bp, Homo sapien
acagacatttgtctcacctttaggc

SEQ ID NO: 1992863 - DNA, 25 bp, Homo sapien
catttgtctcacctttaggcccatt

SEQ ID NO: 1992864 - DNA, 25 bp, Homo sapien
aggctgacaggccactgtcctatca

SEQ ID NO: 1992865 - DNA, 25 bp, Homo sapien
tttcagggctcctgtctctgacaca

SEQ ID NO: 1992866 - DNA, 25 bp, Homo sapien
gctttgtaactttcagggctcctgt

SEQ ID NO: 1992867 - DNA, 25 bp, Homo sapien
aggagcagttcagggagctcttttt

SEQ ID NO: 1992868 - DNA, 25 bp, Homo sapien
tctcagccacttccccggagaaggg

SEQ ID NO: 1992869 - DNA, 25 bp, Homo sapien
tgaaggacccccgagtagagactct

SEQ ID NO: 1992870 - DNA, 25 bp, Homo sapien
ttcttgatcactagtccccggcact

SEQ ID NO: 1992871 - DNA, 25 bp, Homo sapien
cagacgttgctctgaactgagctct

SEQ ID NO: 1992872 - DNA, 25 bp, Homo sapien
agacaagaagtggtcacagctgtgc

SEQ ID NO: 1992873 - DNA, 25 bp, Homo sapien
tgctgtaggaggattcaggccaagg

SEQ ID NO: 1992874 - DNA, 25 bp, Homo sapien
gcttgtgcagttagaagggagacaa

SEQ ID NO: 1992875 - DNA, 25 bp, Homo sapien
gcaaatctgagtggtccatgggagt

SEQ ID NO: 1992876 - DNA, 25 bp, Homo sapien
tcgatgtggacaaggaaaaccccac

SEQ ID NO: 1992877 - DNA, 25 bp, Homo sapien
ctcgatgtggacaaggaaaacccca

SEQ ID NO: 1992878 - DNA, 25 bp, Homo sapien
gagagccgaggaggtagtagctgcc

SEQ ID NO: 1992879 - DNA, 25 bp, Homo sapien
ctgcggacagcgagagccgaggagg

SEQ ID NO: 1992880 - DNA, 25 bp, Homo sapien
aggaggtagtagctgcctgcgccag

SEQ ID NO: 1992881 - DNA, 25 bp, Homo sapien
ccccttcacgtgagggcccacttgt

SEQ ID NO: 1992882 - DNA, 25 bp, Homo sapien
atgaaccggccgatccaggtgaagc

SEQ ID NO: 1992883 - DNA, 25 bp, Homo sapien
gcaggcctgctataatgctgtcccc

SEQ ID NO: 1992884 - DNA, 25 bp, Homo sapien
tctgttgcagatgaaccggccgatc

SEQ ID NO: 1992885 - DNA, 25 bp, Homo sapien
cgcaggcctgctataatgctgtccc

SEQ ID NO: 1992886 - DNA, 25 bp, Homo sapien
gagtgctgggtgtctgtcccctcac

SEQ ID NO: 1992887 - DNA, 25 bp, Homo sapien
cctgagtgctgggtgtctgtcccct

SEQ ID NO: 1992888 - DNA, 25 bp, Homo sapien
tgcacctgagtgctgggtgtctgtc

SEQ ID NO: 1992889 - DNA, 25 bp, Homo sapien
ctgtgcacctgagtgctgggtgtct

SEQ ID NO: 1992890 - DNA, 25 bp, Homo sapien
tggctgcaatatggagccccagccc

SEQ ID NO: 1992891 - DNA, 25 bp, Homo sapien
tgacccataggccacttctgcgagc

SEQ ID NO: 1992892 - DNA, 25 bp, Homo sapien
ttctgcgagctggtacgggctggga

SEQ ID NO: 1992893 - DNA, 25 bp, Homo sapien
gcagatgtttgagtgaaccagggct

SEQ ID NO: 1992894 - DNA, 25 bp, Homo sapien
cattgacacagatccccgagaggga

SEQ ID NO: 1992895 - DNA, 25 bp, Homo sapien
ttaaaccactctgagacctccgggc

SEQ ID NO: 1992896 - DNA, 25 bp, Homo sapien
ttggagtccagagacccctagtgcc

SEQ ID NO: 1992897 - DNA, 25 bp, Homo sapien
gggacaagtagctgtgcccactcca

SEQ ID NO: 1992898 - DNA, 25 bp, Homo sapien
gaaggtctcaaagcgcaggacagac

SEQ ID NO: 1992899 - DNA, 25 bp, Homo sapien
ctgtacgggagggaattggcaacgg

SEQ ID NO: 1992900 - DNA, 25 bp, Homo sapien
agggaattggcaacggaaggtctca

SEQ ID NO: 1992901 - DNA, 25 bp, Homo sapien
caacggaaggtctcaaagcgcagga

SEQ ID NO: 1992902 - DNA, 25 bp, Homo sapien
agcttgtgactggctggtccagccg

SEQ ID NO: 1992903 - DNA, 25 bp, Homo sapien
tgtcctgacgcagccaaaactcact

SEQ ID NO: 1992904 - DNA, 25 bp, Homo sapien
gttgtcctgacgcagccaaaactca

SEQ ID NO: 1992905 - DNA, 25 bp, Homo sapien
gacgcagccaaaactcacttcgagt

SEQ ID NO: 1992906 - DNA, 25 bp, Homo sapien
cccagttgtcctgacgcagccaaaa

SEQ ID NO: 1992907 - DNA, 25 bp, Homo sapien
cagggaacccaggaacttcattacg

SEQ ID NO: 1992908 - DNA, 25 bp, Homo sapien
cagggcttgggaacaaagtatcttg

SEQ ID NO: 1992909 - DNA, 25 bp, Homo sapien
ggaaaggagctcgttcacagggaac

SEQ ID NO: 1992910 - DNA, 25 bp, Homo sapien
tcaactccataagggatgtcaagtg

SEQ ID NO: 1992911 - DNA, 25 bp, Homo sapien
acagcgcactggtggagaggagtag

SEQ ID NO: 1992912 - DNA, 25 bp, Homo sapien
gaggacagcgcactggtggagagga

SEQ ID NO: 1992913 - DNA, 25 bp, Homo sapien
tccggggaggacagcgcactggtgg

SEQ ID NO: 1992914 - DNA, 25 bp, Homo sapien
gggaggacagcgcactggtggagag

SEQ ID NO: 1992915 - DNA, 25 bp, Homo sapien
gccacagtgaattcttttaggatgt

SEQ ID NO: 1992916 - DNA, 25 bp, Homo sapien
gagaacctgctcttgcagatttctt

SEQ ID NO: 1992917 - DNA, 25 bp, Homo sapien
tctttcatgatctcgttcaatgcga

SEQ ID NO: 1992918 - DNA, 25 bp, Homo sapien
tcgttcaatgcgaatccccctgctt

SEQ ID NO: 1992919 - DNA, 25 bp, Homo sapien
tctagcgtgcgggtctgctgattca

SEQ ID NO: 1992920 - DNA, 25 bp, Homo sapien
tgcgggtctgctgattcactgtttc

SEQ ID NO: 1992921 - DNA, 25 bp, Homo sapien
cacagtgagctctagcgtgcgggtc

SEQ ID NO: 1992922 - DNA, 25 bp, Homo sapien
ttagggcacagtgagctctagcgtg

SEQ ID NO: 1992923 - DNA, 25 bp, Homo sapien
aaagtgagtccagaggcgatgactg

SEQ ID NO: 1992924 - DNA, 25 bp, Homo sapien
ggcttgtgacttcaattgcagacac

SEQ ID NO: 1992925 - DNA, 25 bp, Homo sapien
ccttgagggctacttttgacagaaa

SEQ ID NO: 1992926 - DNA, 25 bp, Homo sapien
tgtaactgggtggacccaatcacag

SEQ ID NO: 1992927 - DNA, 25 bp, Homo sapien
tgcgcggctgttgtctggaatttaa

SEQ ID NO: 1992928 - DNA, 25 bp, Homo sapien
gagggccgtgatcgatgcttattaa

SEQ ID NO: 1992929 - DNA, 25 bp, Homo sapien
cttgcaggcagtgcccgtgacctgg

SEQ ID NO: 1992930 - DNA, 25 bp, Homo sapien
tgcttattaatgaagctgccctgga

SEQ ID NO: 1992931 - DNA, 25 bp, Homo sapien
tgatgttcaggggtcgaggaggacc

SEQ ID NO: 1992932 - DNA, 25 bp, Homo sapien
tgcacctgtgaaaaccctgatgttc

SEQ ID NO: 1992933 - DNA, 25 bp, Homo sapien
gccacaggcagagtctctaaggggt

SEQ ID NO: 1992934 - DNA, 25 bp, Homo sapien
cctgtgaaaaccctgatgttcaggg

SEQ ID NO: 1992935 - DNA, 25 bp, Homo sapien
ctcagaagtgcgctgcgaagaatgt

SEQ ID NO: 1992936 - DNA, 25 bp, Homo sapien
cgtgaggggcgcattctggctgtga

SEQ ID NO: 1992937 - DNA, 25 bp, Homo sapien
cagaagtgcgctgcgaagaatgtca

SEQ ID NO: 1992938 - DNA, 25 bp, Homo sapien
agggctcagaagtgcgctgcgaaga

SEQ ID NO: 1992939 - DNA, 25 bp, Homo sapien
agacaggagatgctgcccgagcaga

SEQ ID NO: 1992940 - DNA, 25 bp, Homo sapien
aggatgtagcatggaagggtcgaca

SEQ ID NO: 1992941 - DNA, 25 bp, Homo sapien
gctgcccgagcagaaaggatgtagc

SEQ ID NO: 1992942 - DNA, 25 bp, Homo sapien
gaagggtcgacaggcagaccaccag

SEQ ID NO: 1992943 - DNA, 25 bp, Homo sapien
caggcctgtttctgaccagtgtctc

SEQ ID NO: 1992944 - DNA, 25 bp, Homo sapien
cgcaggcctgtttctgaccagtgtc

SEQ ID NO: 1992945 - DNA, 25 bp, Homo sapien
agggccaccgcaggcctgtttctga

SEQ ID NO: 1992946 - DNA, 25 bp, Homo sapien
caccgcaggcctgtttctgaccagt

SEQ ID NO: 1992947 - DNA, 25 bp, Homo sapien
cagttgggcccacaccgttagcttc

SEQ ID NO: 1992948 - DNA, 25 bp, Homo sapien
tccgcttgtgggacactggagccca

SEQ ID NO: 1992949 - DNA, 25 bp, Homo sapien
gaggcagtgggtctcgccagtctcc

SEQ ID NO: 1992950 - DNA, 25 bp, Homo sapien
ccctccgcttgtgggacactggagc

SEQ ID NO: 1992951 - DNA, 25 bp, Homo sapien
gggtgatgggaacatgacttccgag

SEQ ID NO: 1992952 - DNA, 25 bp, Homo sapien
gcaggccctccggaacatgccaggg

SEQ ID NO: 1992953 - DNA, 25 bp, Homo sapien
gcagaggacgctgccatctggagat

SEQ ID NO: 1992954 - DNA, 25 bp, Homo sapien
tgggaacatgacttccgaggcagag

SEQ ID NO: 1992955 - DNA, 25 bp, Homo sapien
gccgcccctggtgtagaagacagaa

SEQ ID NO: 1992956 - DNA, 25 bp, Homo sapien
tggccgcccctggtgtagaagacag

SEQ ID NO: 1992957 - DNA, 25 bp, Homo sapien
ggccgcccctggtgtagaagacaga

SEQ ID NO: 1992958 - DNA, 25 bp, Homo sapien
gcacatcgcatgctgagctagctgc

SEQ ID NO: 1992959 - DNA, 25 bp, Homo sapien
agcagcacatcgcatgctgagctag

SEQ ID NO: 1992960 - DNA, 25 bp, Homo sapien
tcagcagcacatcgcatgctgagct

SEQ ID NO: 1992961 - DNA, 25 bp, Homo sapien
ctgctgattacacagaccagagccc

SEQ ID NO: 1992962 - DNA, 25 bp, Homo sapien
acgggaatggctcagtgggcaactc

SEQ ID NO: 1992963 - DNA, 25 bp, Homo sapien
tcagtgtaaggacgggaatggctca

SEQ ID NO: 1992964 - DNA, 25 bp, Homo sapien
cgcccacacgtttcatttccaggat

SEQ ID NO: 1992965 - DNA, 25 bp, Homo sapien
ctcctccttcagtgtaaggacggga

SEQ ID NO: 1992966 - DNA, 25 bp, Homo sapien
cttcaggttcacgagcgtctgcatg

SEQ ID NO: 1992967 - DNA, 25 bp, Homo sapien
ggttcacgagcgtctgcatgcctct

SEQ ID NO: 1992968 - DNA, 25 bp, Homo sapien
tcaggttcacgagcgtctgcatgcc

SEQ ID NO: 1992969 - DNA, 25 bp, Homo sapien
acgagcgtctgcatgcctctgaaaa

SEQ ID NO: 1992970 - DNA, 25 bp, Homo sapien
cctccccttgcagccgttcccgtca

SEQ ID NO: 1992971 - DNA, 25 bp, Homo sapien
cccttgcagccgttcccgtcatctg

SEQ ID NO: 1992972 - DNA, 25 bp, Homo sapien
tgggctgccagggcgtgtcccctcc

SEQ ID NO: 1992973 - DNA, 25 bp, Homo sapien
ctgggctgccagggcgtgtcccctc

SEQ ID NO: 1992974 - DNA, 25 bp, Homo sapien
agaacccgactaggtggtccatcca

SEQ ID NO: 1992975 - DNA, 25 bp, Homo sapien
cacctcctggcgtgtcttcatccac

SEQ ID NO: 1992976 - DNA, 25 bp, Homo sapien
cccccacctcctggcgtgtcttcat

SEQ ID NO: 1992977 - DNA, 25 bp, Homo sapien
gaacccgactaggtggtccatccat

SEQ ID NO: 1992978 - DNA, 25 bp, Homo sapien
gggctccccattctcttcctggtca

SEQ ID NO: 1992979 - DNA, 25 bp, Homo sapien
cctggtcaagtttacagacagactt

SEQ ID NO: 1992980 - DNA, 25 bp, Homo sapien
gaggtattggccattgtctgttcag

SEQ ID NO: 1992981 - DNA, 25 bp, Homo sapien
tctgttcagacttcgctcttgtgag

SEQ ID NO: 1992982 - DNA, 25 bp, Homo sapien
accaaccaacttgggcgtggcgtgg

SEQ ID NO: 1992983 - DNA, 25 bp, Homo sapien
gaatcttcccttcgtggccactgtc

SEQ ID NO: 1992984 - DNA, 25 bp, Homo sapien
aagggcctcggatgaatcttccctt

SEQ ID NO: 1992985 - DNA, 25 bp, Homo sapien
cactgtcaccaaccaacttgggcgt

SEQ ID NO: 1992986 - DNA, 25 bp, Homo sapien
gtggagcagatggtccgtgcccgga

SEQ ID NO: 1992987 - DNA, 25 bp, Homo sapien
caggaccgggggtgcattcacatcc

SEQ ID NO: 1992988 - DNA, 25 bp, Homo sapien
ctgtgtcatagagaagcagggttgt

SEQ ID NO: 1992989 - DNA, 25 bp, Homo sapien
ccgtgcccggaagcgcctgatgtga

SEQ ID NO: 1992990 - DNA, 25 bp, Homo sapien
tctgtcccaggcatgtccctctccc

SEQ ID NO: 1992991 - DNA, 25 bp, Homo sapien
ccctctcccaaattgcactgccaca

SEQ ID NO: 1992992 - DNA, 25 bp, Homo sapien
gtcccaggcatgtccctctcccaaa

SEQ ID NO: 1992993 - DNA, 25 bp, Homo sapien
tctcccaaattgcactgccacagcc

SEQ ID NO: 1992994 - DNA, 25 bp, Homo sapien
caaaggcaacctggcaattagagtt

SEQ ID NO: 1992995 - DNA, 25 bp, Homo sapien
tagagttgaggacacagatgaccag

SEQ ID NO: 1992996 - DNA, 25 bp, Homo sapien
gtcattctggtatacgttgggcccg

SEQ ID NO: 1992997 - DNA, 25 bp, Homo sapien
tgccttcagaacttttggcgagtcg

SEQ ID NO: 1992998 - DNA, 25 bp, Homo sapien
tgctgaccttccgtctctcctacct

SEQ ID NO: 1992999 - DNA, 25 bp, Homo sapien
agcacccgttgtctgcccgtcttga

SEQ ID NO: 1993000 - DNA, 25 bp, Homo sapien
ggagacttcttgtaactgccctggt

SEQ ID NO: 1993001 - DNA, 25 bp, Homo sapien
tcttgagctccatagtcactgctac

SEQ ID NO: 1993002 - DNA, 25 bp, Homo sapien
gatcaaggcggagggctgacaggca

SEQ ID NO: 1993003 - DNA, 25 bp, Homo sapien
caacaagggctgaagagaattcccc

SEQ ID NO: 1993004 - DNA, 25 bp, Homo sapien
gtacatcattgtggggaggatcaag

SEQ ID NO: 1993005 - DNA, 25 bp, Homo sapien
aggcccctgctgtgtacatcattgt

SEQ ID NO: 1993006 - DNA, 25 bp, Homo sapien
cagagagccaatcctctagaagata

SEQ ID NO: 1993007 - DNA, 25 bp, Homo sapien
tgtagccacagtgaattgggggcaa

SEQ ID NO: 1993008 - DNA, 25 bp, Homo sapien
gagccactcataggttcctccaaag

SEQ ID NO: 1993009 - DNA, 25 bp, Homo sapien
caaagacccagagagccaatcctct

SEQ ID NO: 1993010 - DNA, 25 bp, Homo sapien
aggatgatggattatggcagaacag

SEQ ID NO: 1993011 - DNA, 25 bp, Homo sapien
tgcagacacggaagccttgaaggcc

SEQ ID NO: 1993012 - DNA, 25 bp, Homo sapien
cagcactgcagacacggaagccttg

SEQ ID NO: 1993013 - DNA, 25 bp, Homo sapien
tgaggatgatggattatggcagaac

SEQ ID NO: 1993014 - DNA, 25 bp, Homo sapien
aggctcagccccgtgcgtgccgtct

SEQ ID NO: 1993015 - DNA, 25 bp, Homo sapien
gtgcgtgccgtctctctatcgccaa

SEQ ID NO: 1993016 - DNA, 25 bp, Homo sapien
tgccgtctctctatcgccaagagag

SEQ ID NO: 1993017 - DNA, 25 bp, Homo sapien
tctctatcgccaagagagccccagg

SEQ ID NO: 1993018 - DNA, 25 bp, Homo sapien
tcaactttacatcgagactctgggt

SEQ ID NO: 1993019 - DNA, 25 bp, Homo sapien
tgtggttctgggtatccaggcctca

SEQ ID NO: 1993020 - DNA, 25 bp, Homo sapien
tggagactggcaagccggactcagc

SEQ ID NO: 1993021 - DNA, 25 bp, Homo sapien
aggattgaacaacagcctcccgtga

SEQ ID NO: 1993022 - DNA, 25 bp, Homo sapien
aggatgctgcaaaacaaagtcccac

SEQ ID NO: 1993023 - DNA, 25 bp, Homo sapien
tcaggatgctgcaaaacaaagtccc

SEQ ID NO: 1993024 - DNA, 25 bp, Homo sapien
caggatgctgcaaaacaaagtccca

SEQ ID NO: 1993025 - DNA, 25 bp, Homo sapien
ccagtctgttcatgaggtgctgggt

SEQ ID NO: 1993026 - DNA, 25 bp, Homo sapien
taactaaccgatggatgacatggcc

SEQ ID NO: 1993027 - DNA, 25 bp, Homo sapien
agagccatcaagaggtgcacaggag

SEQ ID NO: 1993028 - DNA, 25 bp, Homo sapien
gggcaggaccccagtctgttcatga

SEQ ID NO: 1993029 - DNA, 25 bp, Homo sapien
cccagctgccagtccaggcccccat

SEQ ID NO: 1993030 - DNA, 25 bp, Homo sapien
gcagaggagtcactggagcctgagc

SEQ ID NO: 1993031 - DNA, 25 bp, Homo sapien
tccagcagaggagtcactggagcct

SEQ ID NO: 1993032 - DNA, 25 bp, Homo sapien
cagcagaggagtcactggagcctga

SEQ ID NO: 1993033 - DNA, 25 bp, Homo sapien
agaggagtcactggagcctgagcat

SEQ ID NO: 1993034 - DNA, 25 bp, Homo sapien
gctggccttgcagttcaattttaaa

SEQ ID NO: 1993035 - DNA, 25 bp, Homo sapien
tcagctggccttgcagttcaatttt

SEQ ID NO: 1993036 - DNA, 25 bp, Homo sapien
cagctggccttgcagttcaatttta

SEQ ID NO: 1993037 - DNA, 25 bp, Homo sapien
aaaggtttcatcagctggccttgca

SEQ ID NO: 1993038 - DNA, 25 bp, Homo sapien
tgcctcttccatgaagcagtgttgc

SEQ ID NO: 1993039 - DNA, 25 bp, Homo sapien
ccatgaagcagtgttgctcatcagg

SEQ ID NO: 1993040 - DNA, 25 bp, Homo sapien
ctcttccatgaagcagtgttgctca

SEQ ID NO: 1993041 - DNA, 25 bp, Homo sapien
cttccatgaagcagtgttgctcatc

SEQ ID NO: 1993042 - DNA, 25 bp, Homo sapien
ccacatgctgtcacacggagtcaca

SEQ ID NO: 1993043 - DNA, 25 bp, Homo sapien
catgcaaacatggagtcacatggcc

SEQ ID NO: 1993044 - DNA, 25 bp, Homo sapien
actccagccatttgtccccagccct

SEQ ID NO: 1993045 - DNA, 25 bp, Homo sapien
gctgtcacacggagtcacatgcaaa

SEQ ID NO: 1993046 - DNA, 25 bp, Homo sapien
aaacaaacacttaactccagaggtg

SEQ ID NO: 1993047 - DNA, 25 bp, Homo sapien
agaactcctccactatgtgactgag

SEQ ID NO: 1993048 - DNA, 25 bp, Homo sapien
ctcctcttctgtggggtgtagtctg

SEQ ID NO: 1993049 - DNA, 25 bp, Homo sapien
cagaggtgccctgcatgaaggcact

SEQ ID NO: 1993050 - DNA, 25 bp, Homo sapien
ggtcacaaggtgtacactctccatc

SEQ ID NO: 1993051 - DNA, 25 bp, Homo sapien
gctggagtgatgtccaggcccaggc

SEQ ID NO: 1993052 - DNA, 25 bp, Homo sapien
cctccacactggtcttggtcacaag

SEQ ID NO: 1993053 - DNA, 25 bp, Homo sapien
tgagagtgctggagcaggtcgagcc

SEQ ID NO: 1993054 - DNA, 25 bp, Homo sapien
gggctccgaggatagagatgggatg

SEQ ID NO: 1993055 - DNA, 25 bp, Homo sapien
catgtgtggggctccgaggatagag

SEQ ID NO: 1993056 - DNA, 25 bp, Homo sapien
tcctttactcctcatatttttgaaa

SEQ ID NO: 1993057 - DNA, 25 bp, Homo sapien
tcctttaaagccaaccagggacagc

SEQ ID NO: 1993058 - DNA, 25 bp, Homo sapien
gatttatcatgcaggtcctcactgg

SEQ ID NO: 1993059 - DNA, 25 bp, Homo sapien
tttccattccagcaagcccatagcg

SEQ ID NO: 1993060 - DNA, 25 bp, Homo sapien
ggccaccctccaagttgtctatctg

SEQ ID NO: 1993061 - DNA, 25 bp, Homo sapien
caggtatattgggacaacagttgct

SEQ ID NO: 1993062 - DNA, 25 bp, Homo sapien
ttgaaagatatggttcagggtcttc

SEQ ID NO: 1993063 - DNA, 25 bp, Homo sapien
gaaagttgggtgcttggtcccttgc

SEQ ID NO: 1993064 - DNA, 25 bp, Homo sapien
ccttgcagtcctttgaaagatatgg

SEQ ID NO: 1993065 - DNA, 25 bp, Homo sapien
ctggaaagttgggtgcttggtccct

SEQ ID NO: 1993066 - DNA, 25 bp, Homo sapien
agtccagtcaacacctgaaagtggc

SEQ ID NO: 1993067 - DNA, 25 bp, Homo sapien
agaacctcacacacattggcgcggg

SEQ ID NO: 1993068 - DNA, 25 bp, Homo sapien
gtccagtcaacacctgaaagtggcc

SEQ ID NO: 1993069 - DNA, 25 bp, Homo sapien
ctgagaacctcacacacattggcgc

SEQ ID NO: 1993070 - DNA, 25 bp, Homo sapien
ggctcccagggtcaatatgttgttt

SEQ ID NO: 1993071 - DNA, 25 bp, Homo sapien
taaaaatgtagacatcgctggctcc

SEQ ID NO: 1993072 - DNA, 25 bp, Homo sapien
ctcccagggtcaatatgttgttttt

SEQ ID NO: 1993073 - DNA, 25 bp, Homo sapien
aaaatgtagacatcgctggctccca

SEQ ID NO: 1993074 - DNA, 25 bp, Homo sapien
caaatcactaatattgcagtagtcg

SEQ ID NO: 1993075 - DNA, 25 bp, Homo sapien
ctgtccagggagtgtcatgttgtga

SEQ ID NO: 1993076 - DNA, 25 bp, Homo sapien
gttctgtccagggagtgtcatgttg

SEQ ID NO: 1993077 - DNA, 25 bp, Homo sapien
cgtggtgaataagataatgaatgtg

SEQ ID NO: 1993078 - DNA, 25 bp, Homo sapien
gaagtgcattcccgccttctcaaca

SEQ ID NO: 1993079 - DNA, 25 bp, Homo sapien
caacacaggacagatgcaacaggga

SEQ ID NO: 1993080 - DNA, 25 bp, Homo sapien
gattgcagaagtgcattcccgcctt

SEQ ID NO: 1993081 - DNA, 25 bp, Homo sapien
agatgcaacagggagcgtgcagccc

SEQ ID NO: 1993082 - DNA, 25 bp, Homo sapien
ccaaccatgtggatttccaacttgg

SEQ ID NO: 1993083 - DNA, 25 bp, Homo sapien
ccccaaccatgtggatttccaactt

SEQ ID NO: 1993084 - DNA, 25 bp, Homo sapien
aaccatgtggatttccaacttggtg

SEQ ID NO: 1993085 - DNA, 25 bp, Homo sapien
ccatgtggatttccaacttggtggg

SEQ ID NO: 1993086 - DNA, 25 bp, Homo sapien
acagggctagattcttccccaagat

SEQ ID NO: 1993087 - DNA, 25 bp, Homo sapien
cagggctagattcttccccaagatc

SEQ ID NO: 1993088 - DNA, 25 bp, Homo sapien
gagcctccgatctgtttatcacttg

SEQ ID NO: 1993089 - DNA, 25 bp, Homo sapien
tgtgctcaggccacaggtaccccaa

SEQ ID NO: 1993090 - DNA, 25 bp, Homo sapien
cccatgagcccccactgtgtgctca

SEQ ID NO: 1993091 - DNA, 25 bp, Homo sapien
agcctggtcaagctcccagtgctgt

SEQ ID NO: 1993092 - DNA, 25 bp, Homo sapien
tctggccccacaaggactcctttcc

SEQ ID NO: 1993093 - DNA, 25 bp, Homo sapien
agcaccacataagacctgaggagcc

SEQ ID NO: 1993094 - DNA, 25 bp, Homo sapien
cagtgctgtttatttcatgagaaag

SEQ ID NO: 1993095 - DNA, 25 bp, Homo sapien
cctggggcctggaagaagaacacca

SEQ ID NO: 1993096 - DNA, 25 bp, Homo sapien
ccattgctgggttgccctggggcct

SEQ ID NO: 1993097 - DNA, 25 bp, Homo sapien
ctggaagaagaacaccaggccaggg

SEQ ID NO: 1993098 - DNA, 25 bp, Homo sapien
tgccattgctgggttgccctggggc

SEQ ID NO: 1993099 - DNA, 25 bp, Homo sapien
taccagcatgttagataagccctct

SEQ ID NO: 1993100 - DNA, 25 bp, Homo sapien
cttggctccatacgcctgcatagag

SEQ ID NO: 1993101 - DNA, 25 bp, Homo sapien
catagagatcttgtcattcagggta

SEQ ID NO: 1993102 - DNA, 25 bp, Homo sapien
gggataaagtcaagagcctctcgtt

SEQ ID NO: 1993103 - DNA, 25 bp, Homo sapien
ctaacagagaaccaactctcttggg

SEQ ID NO: 1993104 - DNA, 25 bp, Homo sapien
tcttccaaggtgtcttcagatggca

SEQ ID NO: 1993105 - DNA, 25 bp, Homo sapien
tcaggcaggccttgatggtaacatg

SEQ ID NO: 1993106 - DNA, 25 bp, Homo sapien
tggcccaagggctttcgccaagcag

SEQ ID NO: 1993107 - DNA, 25 bp, Homo sapien
accaatgagcctgtttcccctccag

SEQ ID NO: 1993108 - DNA, 25 bp, Homo sapien
aatgagcctgtttcccctccaggca

SEQ ID NO: 1993109 - DNA, 25 bp, Homo sapien
aggcactgtccctggcagacttggc

SEQ ID NO: 1993110 - DNA, 25 bp, Homo sapien
agacttggcagagaagcctctccct

SEQ ID NO: 1993111 - DNA, 25 bp, Homo sapien
gagacatgacttaccctcagtcacc

SEQ ID NO: 1993112 - DNA, 25 bp, Homo sapien
tcagtcacctagagtgtccgtggca

SEQ ID NO: 1993113 - DNA, 25 bp, Homo sapien
tgtccgtggcagacagaagaccagt

SEQ ID NO: 1993114 - DNA, 25 bp, Homo sapien
cagaagaccagtgtcccgatattct

SEQ ID NO: 1993115 - DNA, 25 bp, Homo sapien
gaggccacggaaaggacactcgagt

SEQ ID NO: 1993116 - DNA, 25 bp, Homo sapien
gtccccagaggccacggaaaggaca

SEQ ID NO: 1993117 - DNA, 25 bp, Homo sapien
gaaaggacactcgagtcaggcccaa

SEQ ID NO: 1993118 - DNA, 25 bp, Homo sapien
cgagtcaggcccaagttggcttccc

SEQ ID NO: 1993119 - DNA, 25 bp, Homo sapien
ccatgtggagaactctgcaggactg

SEQ ID NO: 1993120 - DNA, 25 bp, Homo sapien
agctagtaacccagggccttgagca

SEQ ID NO: 1993121 - DNA, 25 bp, Homo sapien
gtgatcaaggccgaggaaggtccca

SEQ ID NO: 1993122 - DNA, 25 bp, Homo sapien
gagtgatgtctccacatgtagctgg

SEQ ID NO: 1993123 - DNA, 25 bp, Homo sapien
ggaagcacgactccctcaccaagat

SEQ ID NO: 1993124 - DNA, 25 bp, Homo sapien
ccctcaccaagatacggcagcagag

SEQ ID NO: 1993125 - DNA, 25 bp, Homo sapien
catggcaggaagcacgactccctca

SEQ ID NO: 1993126 - DNA, 25 bp, Homo sapien
tccctcaccaagatacggcagcaga

SEQ ID NO: 1993127 - DNA, 25 bp, Homo sapien
tctctgcccccaggatttgctttgc

SEQ ID NO: 1993128 - DNA, 25 bp, Homo sapien
ctctctgcccccaggatttgctttg

SEQ ID NO: 1993129 - DNA, 25 bp, Homo sapien
ctgaagcgcttttgccccatgaagg

SEQ ID NO: 1993130 - DNA, 25 bp, Homo sapien
ccatgaaggtgactggtaccagccc

SEQ ID NO: 1993131 - DNA, 25 bp, Homo sapien
gtatttactgatcgcatctgtggcc

SEQ ID NO: 1993132 - DNA, 25 bp, Homo sapien
tcttcgctggtgtaataaggtggct

SEQ ID NO: 1993133 - DNA, 25 bp, Homo sapien
aattaattgccagctgtatgactgg

SEQ ID NO: 1993134 - DNA, 25 bp, Homo sapien
tatgactggatggtgtgaagaaacc

SEQ ID NO: 1993135 - DNA, 25 bp, Homo sapien
tgtgaagaaaccacagccacacgat

SEQ ID NO: 1993136 - DNA, 25 bp, Homo sapien
gatgtgtcccgtatattttttctgg

SEQ ID NO: 1993137 - DNA, 25 bp, Homo sapien
cccacaggcctgctccccagttccc

SEQ ID NO: 1993138 - DNA, 25 bp, Homo sapien
cacaggcctgctccccagttcccat

SEQ ID NO: 1993139 - DNA, 25 bp, Homo sapien
cccccacaggcctgctccccagttc

SEQ ID NO: 1993140 - DNA, 25 bp, Homo sapien
agcccccacaggcctgctccccagt

SEQ ID NO: 1993141 - DNA, 25 bp, Homo sapien
tagcctcctcattttgaaactcctg

SEQ ID NO: 1993142 - DNA, 25 bp, Homo sapien
aatatcttcccatccgaacaattag

SEQ ID NO: 1993143 - DNA, 25 bp, Homo sapien
catccgaacaattagcctcctcatt

SEQ ID NO: 1993144 - DNA, 25 bp, Homo sapien
atcttcccatccgaacaattagcct

SEQ ID NO: 1993145 - DNA, 25 bp, Homo sapien
agggatgaaagcctccacccacact

SEQ ID NO: 1993146 - DNA, 25 bp, Homo sapien
gggatgaaagcctccacccacactg

SEQ ID NO: 1993147 - DNA, 25 bp, Homo sapien
tcagggatgaaagcctccacccaca

SEQ ID NO: 1993148 - DNA, 25 bp, Homo sapien
cagggatgaaagcctccacccacac

SEQ ID NO: 1993149 - DNA, 25 bp, Homo sapien
caatgaagatgtgggcagggaagcc

SEQ ID NO: 1993150 - DNA, 25 bp, Homo sapien
gtgggcagggaagcctggaccctct

SEQ ID NO: 1993151 - DNA, 25 bp, Homo sapien
agccttggagccactctccagccat

SEQ ID NO: 1993152 - DNA, 25 bp, Homo sapien
gggagccttggagccactctccagc

SEQ ID NO: 1993153 - DNA, 25 bp, Homo sapien
tgcccggctgcctacagtgtctcca

SEQ ID NO: 1993154 - DNA, 25 bp, Homo sapien
ttcgtcaaagcgtccagacacagct

SEQ ID NO: 1993155 - DNA, 25 bp, Homo sapien
ccagacctatctcgggctctggact

SEQ ID NO: 1993156 - DNA, 25 bp, Homo sapien
tctctcagggagttcgtcaaagcgt

SEQ ID NO: 1993157 - DNA, 25 bp, Homo sapien
ctggggagcgagcctgcacagagaa

SEQ ID NO: 1993158 - DNA, 25 bp, Homo sapien
gggagcgagcctgcacagagaaaga

SEQ ID NO: 1993159 - DNA, 25 bp, Homo sapien
gctggggagcgagcctgcacagaga

SEQ ID NO: 1993160 - DNA, 25 bp, Homo sapien
tggggagcgagcctgcacagagaaa

SEQ ID NO: 1993161 - DNA, 25 bp, Homo sapien
caaggcctcgccagggggctcagct

SEQ ID NO: 1993162 - DNA, 25 bp, Homo sapien
agcacctgcgcaagacggaaagggt

SEQ ID NO: 1993163 - DNA, 25 bp, Homo sapien
gtcagcaaatgcgtcagagctggac

SEQ ID NO: 1993164 - DNA, 25 bp, Homo sapien
tcccagatgccaggacgctgtcagg

SEQ ID NO: 1993165 - DNA, 25 bp, Homo sapien
ggtggggatggctgccactccccat

SEQ ID NO: 1993166 - DNA, 25 bp, Homo sapien
tgcattgttatgctggacccaggaa

SEQ ID NO: 1993167 - DNA, 25 bp, Homo sapien
tccacaagtgaagtgatgaggccca

SEQ ID NO: 1993168 - DNA, 25 bp, Homo sapien
cagatagaaactgcaacatgtgggc

SEQ ID NO: 1993169 - DNA, 25 bp, Homo sapien
aatgtgttgtcccttgctaggagcc

SEQ ID NO: 1993170 - DNA, 25 bp, Homo sapien
tgctggttgtcccattgcagagcct

SEQ ID NO: 1993171 - DNA, 25 bp, Homo sapien
gctggttgtcccattgcagagcctg

SEQ ID NO: 1993172 - DNA, 25 bp, Homo sapien
ctaagtacgactgccctcccggaga

SEQ ID NO: 1993173 - DNA, 25 bp, Homo sapien
cacgtcatgtctgatggctcttcag

SEQ ID NO: 1993174 - DNA, 25 bp, Homo sapien
tcagcgctgtcccacgtcatgtctg

SEQ ID NO: 1993175 - DNA, 25 bp, Homo sapien
tgtgctgactgggtgctaagtacga

SEQ ID NO: 1993176 - DNA, 25 bp, Homo sapien
catcagatccaggatatgagaagcc

SEQ ID NO: 1993177 - DNA, 25 bp, Homo sapien
atcagatccaggatatgagaagccc

SEQ ID NO: 1993178 - DNA, 25 bp, Homo sapien
tcagatccaggatatgagaagccca

SEQ ID NO: 1993179 - DNA, 25 bp, Homo sapien
cagatccaggatatgagaagcccac

SEQ ID NO: 1993180 - DNA, 25 bp, Homo sapien
gaggatgattccttgagcagtgtcc

SEQ ID NO: 1993181 - DNA, 25 bp, Homo sapien
tccttgagcagtgtccagcagacct

SEQ ID NO: 1993182 - DNA, 25 bp, Homo sapien
gatgattccttgagcagtgtccagc

SEQ ID NO: 1993183 - DNA, 25 bp, Homo sapien
agaaagaggatgattccttgagcag

SEQ ID NO: 1993184 - DNA, 25 bp, Homo sapien
tcctgaataccttgcttattgcggg

SEQ ID NO: 1993185 - DNA, 25 bp, Homo sapien
cctgatgccggatggacatttccat

SEQ ID NO: 1993186 - DNA, 25 bp, Homo sapien
aaaatatgctttgcaggcggactct

SEQ ID NO: 1993187 - DNA, 25 bp, Homo sapien
attgatgggtggtcataatacagcc

SEQ ID NO: 1993188 - DNA, 25 bp, Homo sapien
tgtgctatcccacaagggtacagtg

SEQ ID NO: 1993189 - DNA, 25 bp, Homo sapien
tgctatcccacaagggtacagtgac

SEQ ID NO: 1993190 - DNA, 25 bp, Homo sapien
ggccttggctgtgctatcccacaag

SEQ ID NO: 1993191 - DNA, 25 bp, Homo sapien
tggctgtgctatcccacaagggtac

SEQ ID NO: 1993192 - DNA, 25 bp, Homo sapien
tccctgactgcccatgctcacattc

SEQ ID NO: 1993193 - DNA, 25 bp, Homo sapien
gtccacagccctgatgtcacagggc

SEQ ID NO: 1993194 - DNA, 25 bp, Homo sapien
aggcactctgggctcagccctgtca

SEQ ID NO: 1993195 - DNA, 25 bp, Homo sapien
tcagccctggctccccaattatggg

SEQ ID NO: 1993196 - DNA, 25 bp, Homo sapien
agggtaggtatgacactccagaggc

SEQ ID NO: 1993197 - DNA, 25 bp, Homo sapien
ccaagggtaggtatgacactccaga

SEQ ID NO: 1993198 - DNA, 25 bp, Homo sapien
ggtgaccaagggtaggtatgacact

SEQ ID NO: 1993199 - DNA, 25 bp, Homo sapien
ctgccacaggtgaccaagggtaggt

SEQ ID NO: 1993200 - DNA, 25 bp, Homo sapien
caggaccgaggctctggggttccct

SEQ ID NO: 1993201 - DNA, 25 bp, Homo sapien
tgaagcaggaccgaggctctggggt

SEQ ID NO: 1993202 - DNA, 25 bp, Homo sapien
aagcaggaccgaggctctggggttc

SEQ ID NO: 1993203 - DNA, 25 bp, Homo sapien
ctgaagcaggaccgaggctctgggg

SEQ ID NO: 1993204 - DNA, 25 bp, Homo sapien
cagggataacttgatggggagaaac

SEQ ID NO: 1993205 - DNA, 25 bp, Homo sapien
agggttcttttaaggcacagaggtg

SEQ ID NO: 1993206 - DNA, 25 bp, Homo sapien
aaaggcccagggataacttgatggg

SEQ ID NO: 1993207 - DNA, 25 bp, Homo sapien
atggagggttcttttaaggcacaga

SEQ ID NO: 1993208 - DNA, 25 bp, Homo sapien
tattttcagggagaccactctgagg

SEQ ID NO: 1993209 - DNA, 25 bp, Homo sapien
ttgtgtggctcctattaagtccctg

SEQ ID NO: 1993210 - DNA, 25 bp, Homo sapien
gcggcactcttagccctggatcttg

SEQ ID NO: 1993211 - DNA, 25 bp, Homo sapien
tcagccatggcctagctggcagcga

SEQ ID NO: 1993212 - DNA, 25 bp, Homo sapien
ataggctctacaaatgtcagccggc

SEQ ID NO: 1993213 - DNA, 25 bp, Homo sapien
ctctacaaatgtcagccggcaggga

SEQ ID NO: 1993214 - DNA, 25 bp, Homo sapien
ggctctacaaatgtcagccggcagg

SEQ ID NO: 1993215 - DNA, 25 bp, Homo sapien
ctacaaatgtcagccggcagggatg

SEQ ID NO: 1993216 - DNA, 25 bp, Homo sapien
tctaaagccagtgacgagcccttca

SEQ ID NO: 1993217 - DNA, 25 bp, Homo sapien
ttataagtggcagcaagctttgcag

SEQ ID NO: 1993218 - DNA, 25 bp, Homo sapien
tgatgcccggttctgcaaacaacag

SEQ ID NO: 1993219 - DNA, 25 bp, Homo sapien
tgtaagcagtatcaggctctgcaaa

SEQ ID NO: 1993220 - DNA, 25 bp, Homo sapien
gtagcagcaagttctctgaccaagg

SEQ ID NO: 1993221 - DNA, 25 bp, Homo sapien
tagcagcaagttctctgaccaaggc

SEQ ID NO: 1993222 - DNA, 25 bp, Homo sapien
gcagcaagttctctgaccaaggcaa

SEQ ID NO: 1993223 - DNA, 25 bp, Homo sapien
cagcaagttctctgaccaaggcaag

SEQ ID NO: 1993224 - DNA, 25 bp, Homo sapien
tcagcgatgagcccggaaagcaatg

SEQ ID NO: 1993225 - DNA, 25 bp, Homo sapien
agcccggaaagcaatgtcagactca

SEQ ID NO: 1993226 - DNA, 25 bp, Homo sapien
cagcgatgagcccggaaagcaatgt

SEQ ID NO: 1993227 - DNA, 25 bp, Homo sapien
gcccggaaagcaatgtcagactcac

SEQ ID NO: 1993228 - DNA, 25 bp, Homo sapien
catggagttgagctcatgtgtgacc

SEQ ID NO: 1993229 - DNA, 25 bp, Homo sapien
tgtggttatgaaaatgtgaggactc

SEQ ID NO: 1993230 - DNA, 25 bp, Homo sapien
ttgagctcatgtgtgacccaaactg

SEQ ID NO: 1993231 - DNA, 25 bp, Homo sapien
gttatgaaaatgtgaggactccatg

SEQ ID NO: 1993232 - DNA, 25 bp, Homo sapien
gaattatctcctgagcagcagtgct

SEQ ID NO: 1993233 - DNA, 25 bp, Homo sapien
gaccagacttctgtgggaaccagtg

SEQ ID NO: 1993234 - DNA, 25 bp, Homo sapien
ggttcaaatggtaaccagcattagc

SEQ ID NO: 1993235 - DNA, 25 bp, Homo sapien
gcatctgtatgccattagcactctg

SEQ ID NO: 1993236 - DNA, 25 bp, Homo sapien
cagaagctactgctgggactcggtg

SEQ ID NO: 1993237 - DNA, 25 bp, Homo sapien
ttctggcgtacagccacattgctta

SEQ ID NO: 1993238 - DNA, 25 bp, Homo sapien
gagatgccttgcctcctttcaccag

SEQ ID NO: 1993239 - DNA, 25 bp, Homo sapien
cactgaccattctggcgtacagcca

SEQ ID NO: 1993240 - DNA, 25 bp, Homo sapien
aaaaatcggacaatgcctgcagggc

SEQ ID NO: 1993241 - DNA, 25 bp, Homo sapien
tgggagaaaaatcggacaatgcctg

SEQ ID NO: 1993242 - DNA, 25 bp, Homo sapien
attgggagaaaaatcggacaatgcc

SEQ ID NO: 1993243 - DNA, 25 bp, Homo sapien
gagaaaaatcggacaatgcctgcag

SEQ ID NO: 1993244 - DNA, 25 bp, Homo sapien
ccaggcaatctgatgggtggttgat

SEQ ID NO: 1993245 - DNA, 25 bp, Homo sapien
ttaagctaatgcgtgttgtgtctca

SEQ ID NO: 1993246 - DNA, 25 bp, Homo sapien
agcattctttattgaggactgggca

SEQ ID NO: 1993247 - DNA, 25 bp, Homo sapien
tctgtttatttatggcaggaaaagc

SEQ ID NO: 1993248 - DNA, 25 bp, Homo sapien
ctctgaaagtgggtcggccggcttt

SEQ ID NO: 1993249 - DNA, 25 bp, Homo sapien
cagtggtctcacaccctctgaaagt

SEQ ID NO: 1993250 - DNA, 25 bp, Homo sapien
tgtgcaaagcctgctcggattgacc

SEQ ID NO: 1993251 - DNA, 25 bp, Homo sapien
tctcgagtttgtgcccttctgtgcc

SEQ ID NO: 1993252 - DNA, 25 bp, Homo sapien
taatggtgagcctggtgtgcccaac

SEQ ID NO: 1993253 - DNA, 25 bp, Homo sapien
ggctccacccttcagaacactgtca

SEQ ID NO: 1993254 - DNA, 25 bp, Homo sapien
gcgccatgtgggtggcatccccttc

SEQ ID NO: 1993255 - DNA, 25 bp, Homo sapien
gaggcaaaatgatgccgaacactcg

SEQ ID NO: 1993256 - DNA, 25 bp, Homo sapien
cagaaaggctccctaacaagttgat

SEQ ID NO: 1993257 - DNA, 25 bp, Homo sapien
cccagaaaggctccctaacaagttg

SEQ ID NO: 1993258 - DNA, 25 bp, Homo sapien
aaaggctccctaacaagttgatctg

SEQ ID NO: 1993259 - DNA, 25 bp, Homo sapien
cacgacatagtccaggcctgccatg

SEQ ID NO: 1993260 - DNA, 25 bp, Homo sapien
gaggcaggaggaatttctacattgg

SEQ ID NO: 1993261 - DNA, 25 bp, Homo sapien
agggaggcaggaggaatttctacat

SEQ ID NO: 1993262 - DNA, 25 bp, Homo sapien
ggcaggaggaatttctacattggaa

SEQ ID NO: 1993263 - DNA, 25 bp, Homo sapien
ggaggcaggaggaatttctacattg

SEQ ID NO: 1993264 - DNA, 25 bp, Homo sapien
cattatgagctggtgccgggagaac

SEQ ID NO: 1993265 - DNA, 25 bp, Homo sapien
caacccctgtgagatgtggaaatga

SEQ ID NO: 1993266 - DNA, 25 bp, Homo sapien
ggatcacttgggtggctctacctca

SEQ ID NO: 1993267 - DNA, 25 bp, Homo sapien
tgatcccgtaactcaggaagaggtg

SEQ ID NO: 1993268 - DNA, 25 bp, Homo sapien
tgggcacggcgtccctctcaggtga

SEQ ID NO: 1993269 - DNA, 25 bp, Homo sapien
ggtgggcacggcgtccctctcaggt

SEQ ID NO: 1993270 - DNA, 25 bp, Homo sapien
aggaggtgggcacggcgtccctctc

SEQ ID NO: 1993271 - DNA, 25 bp, Homo sapien
aggagaggaggtgggcacggcgtcc

SEQ ID NO: 1993272 - DNA, 25 bp, Homo sapien
taaggaaacatgtgtgccggccaaa

SEQ ID NO: 1993273 - DNA, 25 bp, Homo sapien
tattcagagacgaggcatcaagctg

SEQ ID NO: 1993274 - DNA, 25 bp, Homo sapien
ccgtatagacatagaagagcccgtc

SEQ ID NO: 1993275 - DNA, 25 bp, Homo sapien
tcaagtattagaggacaggcaggtc

SEQ ID NO: 1993276 - DNA, 25 bp, Homo sapien
cgtttcggctcccaaaagcccactg

SEQ ID NO: 1993277 - DNA, 25 bp, Homo sapien
ccaggatagttatgcccattcccat

SEQ ID NO: 1993278 - DNA, 25 bp, Homo sapien
cggctcccaaaagcccactgtgcct

SEQ ID NO: 1993279 - DNA, 25 bp, Homo sapien
agccaggatagttatgcccattccc

SEQ ID NO: 1993280 - DNA, 25 bp, Homo sapien
ttaggcaggaaggacttggtcccca

SEQ ID NO: 1993281 - DNA, 25 bp, Homo sapien
gaaggacttggtccccacaatcacc

SEQ ID NO: 1993282 - DNA, 25 bp, Homo sapien
caggaaggacttggtccccacaatc

SEQ ID NO: 1993283 - DNA, 25 bp, Homo sapien
tggtccccacaatcaccccacctgg

SEQ ID NO: 1993284 - DNA, 25 bp, Homo sapien
gagatgagaactagccatgccacag

SEQ ID NO: 1993285 - DNA, 25 bp, Homo sapien
atgagaactagccatgccacagtgg

SEQ ID NO: 1993286 - DNA, 25 bp, Homo sapien
ctgagagatgagaactagccatgcc

SEQ ID NO: 1993287 - DNA, 25 bp, Homo sapien
gagaactagccatgccacagtggga

SEQ ID NO: 1993288 - DNA, 25 bp, Homo sapien
agaactgctgggtttctggctcggg

SEQ ID NO: 1993289 - DNA, 25 bp, Homo sapien
ggaggaatccactttggagatggct

SEQ ID NO: 1993290 - DNA, 25 bp, Homo sapien
tgctgatcaccagcgtggcagaacc

SEQ ID NO: 1993291 - DNA, 25 bp, Homo sapien
ggccctcaggcattgtgttcagcag

SEQ ID NO: 1993292 - DNA, 25 bp, Homo sapien
tctgttatgtggtgaaagggggagc

SEQ ID NO: 1993293 - DNA, 25 bp, Homo sapien
gggagcatgtgcacggctaagtgga

SEQ ID NO: 1993294 - DNA, 25 bp, Homo sapien
agcatgtgcacggctaagtggaagc

SEQ ID NO: 1993295 - DNA, 25 bp, Homo sapien
catgtgcacggctaagtggaagcac

SEQ ID NO: 1993296 - DNA, 25 bp, Homo sapien
tggaagcatcaaggctcacatgctc

SEQ ID NO: 1993297 - DNA, 25 bp, Homo sapien
aaccgtgccccaggaagcttggctt

SEQ ID NO: 1993298 - DNA, 25 bp, Homo sapien
tgaccgaacaaagagcctgcctgtg

SEQ ID NO: 1993299 - DNA, 25 bp, Homo sapien
cacatgctcatgagggcagcacaca

SEQ ID NO: 1993300 - DNA, 25 bp, Homo sapien
gttgttccattctcagttcccgcag

SEQ ID NO: 1993301 - DNA, 25 bp, Homo sapien
gacaaagcgacccatattgaggcag

SEQ ID NO: 1993302 - DNA, 25 bp, Homo sapien
tagggaaggtcatgggtttcaactc

SEQ ID NO: 1993303 - DNA, 25 bp, Homo sapien
tgtgcccctgagatccaccatgcat

SEQ ID NO: 1993304 - DNA, 25 bp, Homo sapien
tccctgtgcttggatggggcatgca

SEQ ID NO: 1993305 - DNA, 25 bp, Homo sapien
ccagagttgaaggcacggtcccgca

SEQ ID NO: 1993306 - DNA, 25 bp, Homo sapien
ggctgtgtgatacccagagttgaag

SEQ ID NO: 1993307 - DNA, 25 bp, Homo sapien
catgtgcacatatgtgagggctgtg

SEQ ID NO: 1993308 - DNA, 25 bp, Homo sapien
atgctctccaacaggaatctgcctg

SEQ ID NO: 1993309 - DNA, 25 bp, Homo sapien
gctcagacttagctctggacattct

SEQ ID NO: 1993310 - DNA, 25 bp, Homo sapien
gctctccaacaggaatctgcctgta

SEQ ID NO: 1993311 - DNA, 25 bp, Homo sapien
gctggccctttgctcagacttagct

SEQ ID NO: 1993312 - DNA, 25 bp, Homo sapien
tcccacagagggaggtgtcaccatg

SEQ ID NO: 1993313 - DNA, 25 bp, Homo sapien
aagtgcaatgaatcctaaacctagg

SEQ ID NO: 1993314 - DNA, 25 bp, Homo sapien
gccacagccacgctgatgagccatg

SEQ ID NO: 1993315 - DNA, 25 bp, Homo sapien
taaacctaggatggaaggtgcctcc

SEQ ID NO: 1993316 - DNA, 25 bp, Homo sapien
ctgagtgacggtaacccgctataac

SEQ ID NO: 1993317 - DNA, 25 bp, Homo sapien
cccggcacggtggaggtggagcaga

SEQ ID NO: 1993318 - DNA, 25 bp, Homo sapien
tgagtgacggtaacccgctataacc

SEQ ID NO: 1993319 - DNA, 25 bp, Homo sapien
cgctataacccggcacggtggaggt

SEQ ID NO: 1993320 - DNA, 25 bp, Homo sapien
gtggtaagagatgtgaaggaatttc

SEQ ID NO: 1993321 - DNA, 25 bp, Homo sapien
ctggaggggtggtaagagatgtgaa

SEQ ID NO: 1993322 - DNA, 25 bp, Homo sapien
aggggtggtaagagatgtgaaggaa

SEQ ID NO: 1993323 - DNA, 25 bp, Homo sapien
tggaggggtggtaagagatgtgaag

SEQ ID NO: 1993324 - DNA, 25 bp, Homo sapien
gctgatgggcatcctatgatgggcc

SEQ ID NO: 1993325 - DNA, 25 bp, Homo sapien
aagcctagaaatctccgtaagtggg

SEQ ID NO: 1993326 - DNA, 25 bp, Homo sapien
aagcatgggcccgagttttgccgcc

SEQ ID NO: 1993327 - DNA, 25 bp, Homo sapien
tgatgggcctgaatttcccagaggc

SEQ ID NO: 1993328 - DNA, 25 bp, Homo sapien
gccatgtagacatcgcaagcctttg

SEQ ID NO: 1993329 - DNA, 25 bp, Homo sapien
taggactagccatgccttcagacag

SEQ ID NO: 1993330 - DNA, 25 bp, Homo sapien
tgaggaaatgagtacagaggacagc

SEQ ID NO: 1993331 - DNA, 25 bp, Homo sapien
agaggacagctttccgtcagcctgc

SEQ ID NO: 1993332 - DNA, 25 bp, Homo sapien
agggctggcttgaatcccgtgttca

SEQ ID NO: 1993333 - DNA, 25 bp, Homo sapien
cagaacgtggctgcttactatccct

SEQ ID NO: 1993334 - DNA, 25 bp, Homo sapien
gctcacagtacatataaacgctctt

SEQ ID NO: 1993335 - DNA, 25 bp, Homo sapien
catataaacgctcttaagtaataca

SEQ ID NO: 1993336 - DNA, 25 bp, Homo sapien
ccacagtcaggagggtggtattcaa

SEQ ID NO: 1993337 - DNA, 25 bp, Homo sapien
ggtggtattcaactgccctggtaaa

SEQ ID NO: 1993338 - DNA, 25 bp, Homo sapien
agaataatggggtgtctggctgcaa

SEQ ID NO: 1993339 - DNA, 25 bp, Homo sapien
caactgccctggtaaagaataatgg

SEQ ID NO: 1993340 - DNA, 25 bp, Homo sapien
acccctagaagggaagagctccttg

SEQ ID NO: 1993341 - DNA, 25 bp, Homo sapien
cgtgctggctcgtttctctgaaccc

SEQ ID NO: 1993342 - DNA, 25 bp, Homo sapien
tgaggcagaccgctggcccgttttc

SEQ ID NO: 1993343 - DNA, 25 bp, Homo sapien
tagaagggaagagctccttgggaac

SEQ ID NO: 1993344 - DNA, 25 bp, Homo sapien
aggttgcattccacgcagcagggag

SEQ ID NO: 1993345 - DNA, 25 bp, Homo sapien
tgagtcagccagattcacagtggtg

SEQ ID NO: 1993346 - DNA, 25 bp, Homo sapien
ttcccaggatgccaaggttgcattc

SEQ ID NO: 1993347 - DNA, 25 bp, Homo sapien
tggtgatgtaggtcgcagagctccc

SEQ ID NO: 1993348 - DNA, 25 bp, Homo sapien
ttaattagtcttgcaattcgtacac

SEQ ID NO: 1993349 - DNA, 25 bp, Homo sapien
ggaaacacatttatgagctcccact

SEQ ID NO: 1993350 - DNA, 25 bp, Homo sapien
acttctaccctaggcagaaggcctt

SEQ ID NO: 1993351 - DNA, 25 bp, Homo sapien
tatgtatgagtttaattagtcttgc

SEQ ID NO: 1993352 - DNA, 25 bp, Homo sapien
gctctgggagcgactggccccgctt

SEQ ID NO: 1993353 - DNA, 25 bp, Homo sapien
ctgataatcaggaccagctctggga

SEQ ID NO: 1993354 - DNA, 25 bp, Homo sapien
cacaacagcgtagactgtttgggag

SEQ ID NO: 1993355 - DNA, 25 bp, Homo sapien
gggagggctgtttccacgcatctgt

SEQ ID NO: 1993356 - DNA, 25 bp, Homo sapien
aaaactgtcccgtgtaaatacgctg

SEQ ID NO: 1993357 - DNA, 25 bp, Homo sapien
gctttcactgccacaagataacttg

SEQ ID NO: 1993358 - DNA, 25 bp, Homo sapien
catagagaaagacggcataagccca

SEQ ID NO: 1993359 - DNA, 25 bp, Homo sapien
gatgtgatagaagacagcaacccca

SEQ ID NO: 1993360 - DNA, 25 bp, Homo sapien
accctcatcacgcagaggcaggttt

SEQ ID NO: 1993361 - DNA, 25 bp, Homo sapien
tcttggctgagccagtgattaagag

SEQ ID NO: 1993362 - DNA, 25 bp, Homo sapien
tgattaagagggctagtctgcagca

SEQ ID NO: 1993363 - DNA, 25 bp, Homo sapien
actgccgttgacttctgggatgcca

SEQ ID NO: 1993364 - DNA, 25 bp, Homo sapien
tccctgcgcgggtgggggactctcc

SEQ ID NO: 1993365 - DNA, 25 bp, Homo sapien
tgggggactctccacgtcatttccc

SEQ ID NO: 1993366 - DNA, 25 bp, Homo sapien
cagctccctgcgcgggtgggggact

SEQ ID NO: 1993367 - DNA, 25 bp, Homo sapien
ggtgggggactctccacgtcatttc

SEQ ID NO: 1993368 - DNA, 25 bp, Homo sapien
tcaagaggcaagaaggtccgctggc

SEQ ID NO: 1993369 - DNA, 25 bp, Homo sapien
aggcaagaaggtccgctggcctctg

SEQ ID NO: 1993370 - DNA, 25 bp, Homo sapien
gggtcccacccaggtgctcacatcc

SEQ ID NO: 1993371 - DNA, 25 bp, Homo sapien
agtcagggtcccacccaggtgctca

SEQ ID NO: 1993372 - DNA, 25 bp, Homo sapien
agccatagataacacctggaaggat

SEQ ID NO: 1993373 - DNA, 25 bp, Homo sapien
gcgtagagtgcaccttaaaaggcaa

SEQ ID NO: 1993374 - DNA, 25 bp, Homo sapien
aaaggcaattactccagtcaaattg

SEQ ID NO: 1993375 - DNA, 25 bp, Homo sapien
tttgttggccacctgccatttcaga

SEQ ID NO: 1993376 - DNA, 25 bp, Homo sapien
tggaatacctgccatgcgtagagtg

SEQ ID NO: 1993377 - DNA, 25 bp, Homo sapien
taaacggaaaggacagagatcctgt

SEQ ID NO: 1993378 - DNA, 25 bp, Homo sapien
tcagatcagaccgagagagagagga

SEQ ID NO: 1993379 - DNA, 25 bp, Homo sapien
agcgagcggagagcgaggtgtagag

SEQ ID NO: 1993380 - DNA, 25 bp, Homo sapien
cagcctgtttaaacggaaaggacag

SEQ ID NO: 1993381 - DNA, 25 bp, Homo sapien
tcttcactgcctctttccttaaggc

SEQ ID NO: 1993382 - DNA, 25 bp, Homo sapien
cctctgcatcctgccttcttcactg

SEQ ID NO: 1993383 - DNA, 25 bp, Homo sapien
tgcctctttccttaaggctactacc

SEQ ID NO: 1993384 - DNA, 25 bp, Homo sapien
cactgcctctttccttaaggctact

SEQ ID NO: 1993385 - DNA, 25 bp, Homo sapien
cagagtacaggggagtctccgttcc

SEQ ID NO: 1993386 - DNA, 25 bp, Homo sapien
tacagagtacaggggagtctccgtt

SEQ ID NO: 1993387 - DNA, 25 bp, Homo sapien
acagagtacaggggagtctccgttc

SEQ ID NO: 1993388 - DNA, 25 bp, Homo sapien
tttgtggccatttggctctttgagt

SEQ ID NO: 1993389 - DNA, 25 bp, Homo sapien
ctctgggggtccgtagcccacacag

SEQ ID NO: 1993390 - DNA, 25 bp, Homo sapien
ggccttccctgagtgccactgccca

SEQ ID NO: 1993391 - DNA, 25 bp, Homo sapien
tggctctttgagtccgtttctttgc

SEQ ID NO: 1993392 - DNA, 25 bp, Homo sapien
agaacagttgagcagcttgtaagga

SEQ ID NO: 1993393 - DNA, 25 bp, Homo sapien
cagttgagcagcttgtaaggacacc

SEQ ID NO: 1993394 - DNA, 25 bp, Homo sapien
ttgagcagcttgtaaggacacccac

SEQ ID NO: 1993395 - DNA, 25 bp, Homo sapien
aacagttgagcagcttgtaaggaca

SEQ ID NO: 1993396 - DNA, 25 bp, Homo sapien
ggatgaggcaccctagtcccagaca

SEQ ID NO: 1993397 - DNA, 25 bp, Homo sapien
ggcgtcttcaaggagattcccgaag

SEQ ID NO: 1993398 - DNA, 25 bp, Homo sapien
gaagaccaaaccatcccgttcatta

SEQ ID NO: 1993399 - DNA, 25 bp, Homo sapien
gacacacaaagaccatgggcgtctt

SEQ ID NO: 1993400 - DNA, 25 bp, Homo sapien
acagccaatggaggaccttccagat

SEQ ID NO: 1993401 - DNA, 25 bp, Homo sapien
agccccctggttgttctggcctgtc

SEQ ID NO: 1993402 - DNA, 25 bp, Homo sapien
ggaggaccttccagatacagtgtcc

SEQ ID NO: 1993403 - DNA, 25 bp, Homo sapien
aatggaggaccttccagatacagtg

SEQ ID NO: 1993404 - DNA, 25 bp, Homo sapien
tccagtccaagaaacagcgtagagc

SEQ ID NO: 1993405 - DNA, 25 bp, Homo sapien
ctaaaggccagggatctgaccgaca

SEQ ID NO: 1993406 - DNA, 25 bp, Homo sapien
catagtttggcccttcacagtgtaa

SEQ ID NO: 1993407 - DNA, 25 bp, Homo sapien
agtgtaaagccctggaaccggatgc

SEQ ID NO: 1993408 - DNA, 25 bp, Homo sapien
caaggccccagaggacacagtttga

SEQ ID NO: 1993409 - DNA, 25 bp, Homo sapien
tatgtttcccctacctcaaatgcca

SEQ ID NO: 1993410 - DNA, 25 bp, Homo sapien
cccacacaggatgtgtatgtttccc

SEQ ID NO: 1993411 - DNA, 25 bp, Homo sapien
cagtttgaggacaatccaaggcccc

SEQ ID NO: 1993412 - DNA, 25 bp, Homo sapien
cctgtttgggtggctctggaccacc

SEQ ID NO: 1993413 - DNA, 25 bp, Homo sapien
tcctgtttgggtggctctggaccac

SEQ ID NO: 1993414 - DNA, 25 bp, Homo sapien
ctcctgtttgggtggctctggacca

SEQ ID NO: 1993415 - DNA, 25 bp, Homo sapien
cgtctctaaagtgggcagtcaggga

SEQ ID NO: 1993416 - DNA, 25 bp, Homo sapien
tctaaagtgggcagtcagggacaag

SEQ ID NO: 1993417 - DNA, 25 bp, Homo sapien
gcactaaagaccctcacaggccggg

SEQ ID NO: 1993418 - DNA, 25 bp, Homo sapien
ggagggggcactaaagaccctcaca

SEQ ID NO: 1993419 - DNA, 25 bp, Homo sapien
aatctagtcgaattcctcttacagc

SEQ ID NO: 1993420 - DNA, 25 bp, Homo sapien
gaagcagtttgtggactttttacca

SEQ ID NO: 1993421 - DNA, 25 bp, Homo sapien
gagaaatcttttcagcgcagggcaa

SEQ ID NO: 1993422 - DNA, 25 bp, Homo sapien
aacttccactccagaaatctagtcg

SEQ ID NO: 1993423 - DNA, 25 bp, Homo sapien
ggagcctgattcctgtggtccactg

SEQ ID NO: 1993424 - DNA, 25 bp, Homo sapien
tctggcttcttaatccctttccttc

SEQ ID NO: 1993425 - DNA, 25 bp, Homo sapien
tggtccactgccaagctcagaacca

SEQ ID NO: 1993426 - DNA, 25 bp, Homo sapien
tccaacactccctcaggagcctgat

SEQ ID NO: 1993427 - DNA, 25 bp, Homo sapien
ccaggccagcgagaccttgctgaag

SEQ ID NO: 1993428 - DNA, 25 bp, Homo sapien
tctgtccaggccagcgagaccttgc

SEQ ID NO: 1993429 - DNA, 25 bp, Homo sapien
tgctggtcttcacaagcccgtgcat

SEQ ID NO: 1993430 - DNA, 25 bp, Homo sapien
gtccaggccagcgagaccttgctga

SEQ ID NO: 1993431 - DNA, 25 bp, Homo sapien
tgaaatttgcattgggatagcccac

SEQ ID NO: 1993432 - DNA, 25 bp, Homo sapien
catgtttgacacagctctatcagga

SEQ ID NO: 1993433 - DNA, 25 bp, Homo sapien
ggataatccgttcaatcatcaaagg

SEQ ID NO: 1993434 - DNA, 25 bp, Homo sapien
ctcattgaacggacatgttgactct

SEQ ID NO: 1993435 - DNA, 25 bp, Homo sapien
cagtttttgtagagagctgccacag

SEQ ID NO: 1993436 - DNA, 25 bp, Homo sapien
tgccacagaggtgctacactgacag

SEQ ID NO: 1993437 - DNA, 25 bp, Homo sapien
taaactccccatcggatgccatgct

SEQ ID NO: 1993438 - DNA, 25 bp, Homo sapien
ccctctggctaacgtcctgtgctct

SEQ ID NO: 1993439 - DNA, 25 bp, Homo sapien
gttgccgatgaattcaatccagtca

SEQ ID NO: 1993440 - DNA, 25 bp, Homo sapien
cgttccccagacaaattgttctttg

SEQ ID NO: 1993441 - DNA, 25 bp, Homo sapien
ctttgaaaagttgccgatgaattca

SEQ ID NO: 1993442 - DNA, 25 bp, Homo sapien
aagcaactcttcgttccccagacaa

SEQ ID NO: 1993443 - DNA, 25 bp, Homo sapien
tgacagaaccagtgggagtagagcc

SEQ ID NO: 1993444 - DNA, 25 bp, Homo sapien
acaaccctgcaaggtgagcggaaca

SEQ ID NO: 1993445 - DNA, 25 bp, Homo sapien
cggaacaagtgtcattgtctctgct

SEQ ID NO: 1993446 - DNA, 25 bp, Homo sapien
cagatctgcaattcccatccttggg

SEQ ID NO: 1993447 - DNA, 25 bp, Homo sapien
tcccaggcaatcaggcctttcctgg

SEQ ID NO: 1993448 - DNA, 25 bp, Homo sapien
tgcctggaatatgctaactcatcta

SEQ ID NO: 1993449 - DNA, 25 bp, Homo sapien
ttagctgactacttgtctgcctgga

SEQ ID NO: 1993450 - DNA, 25 bp, Homo sapien
tcctttcacatcctccttactctcc

SEQ ID NO: 1993451 - DNA, 25 bp, Homo sapien
agaatacaggaaccaccagccagtg

SEQ ID NO: 1993452 - DNA, 25 bp, Homo sapien
aatacaggaaccaccagccagtgac

SEQ ID NO: 1993453 - DNA, 25 bp, Homo sapien
gtgacagccacgaagagagctctgc

SEQ ID NO: 1993454 - DNA, 25 bp, Homo sapien
cagtgacagccacgaagagagctct

SEQ ID NO: 1993455 - DNA, 25 bp, Homo sapien
gtttcacttctaagtggtcaagggc

SEQ ID NO: 1993456 - DNA, 25 bp, Homo sapien
cagggtcacagggtgagagtctgag

SEQ ID NO: 1993457 - DNA, 25 bp, Homo sapien
gagagtctgagcagacttgtttcac

SEQ ID NO: 1993458 - DNA, 25 bp, Homo sapien
ttgagaatacatccagcccctacag

SEQ ID NO: 1993459 - DNA, 25 bp, Homo sapien
tctttatgagaaacttaggccagtg

SEQ ID NO: 1993460 - DNA, 25 bp, Homo sapien
tatgagaaacttaggccagtgtctg

SEQ ID NO: 1993461 - DNA, 25 bp, Homo sapien
tggttctttatgagaaacttaggcc

SEQ ID NO: 1993462 - DNA, 25 bp, Homo sapien
tctgctggttctttatgagaaactt

SEQ ID NO: 1993463 - DNA, 25 bp, Homo sapien
ttcaggaattcaggtactggtcctg

SEQ ID NO: 1993464 - DNA, 25 bp, Homo sapien
gaattcaggtactggtcctgtcctc

SEQ ID NO: 1993465 - DNA, 25 bp, Homo sapien
caggaattcaggtactggtcctgtc

SEQ ID NO: 1993466 - DNA, 25 bp, Homo sapien
aggaattcaggtactggtcctgtcc

SEQ ID NO: 1993467 - DNA, 25 bp, Homo sapien
gaaactgaagcgctgtgggctgaag

SEQ ID NO: 1993468 - DNA, 25 bp, Homo sapien
accagcttcaggtgtccattgctgg

SEQ ID NO: 1993469 - DNA, 25 bp, Homo sapien
agcgctgtgggctgaaggcacacca

SEQ ID NO: 1993470 - DNA, 25 bp, Homo sapien
ctgggtcagggttgatgcagaaact

SEQ ID NO: 1993471 - DNA, 25 bp, Homo sapien
ccaggctggatctccatgtcccact

SEQ ID NO: 1993472 - DNA, 25 bp, Homo sapien
tggcaagtcagctgaactcaggtgg

SEQ ID NO: 1993473 - DNA, 25 bp, Homo sapien
agatgtggcaagtcagctgaactca

SEQ ID NO: 1993474 - DNA, 25 bp, Homo sapien
tgtggcaagtcagctgaactcaggt

SEQ ID NO: 1993475 - DNA, 25 bp, Homo sapien
tatctctggcatgctgtattgtttc

SEQ ID NO: 1993476 - DNA, 25 bp, Homo sapien
catgctgtattgtttcctatggaga

SEQ ID NO: 1993477 - DNA, 25 bp, Homo sapien
ttcctatggagaagcgtaggtcctc

SEQ ID NO: 1993478 - DNA, 25 bp, Homo sapien
taggtcctcaaggaacgagttcttc

SEQ ID NO: 1993479 - DNA, 25 bp, Homo sapien
tggcatttgatgggcgggaaacaac

SEQ ID NO: 1993480 - DNA, 25 bp, Homo sapien
aggcacagtggcaacggtcaatcca

SEQ ID NO: 1993481 - DNA, 25 bp, Homo sapien
aacggtcaatccaggccactggcat

SEQ ID NO: 1993482 - DNA, 25 bp, Homo sapien
gccacagtcgttttcatcaccatag

SEQ ID NO: 1993483 - DNA, 25 bp, Homo sapien
tagggtgcgacacagacattgggac

SEQ ID NO: 1993484 - DNA, 25 bp, Homo sapien
gagcctgggtgtagggtgcgacaca

SEQ ID NO: 1993485 - DNA, 25 bp, Homo sapien
tgcagagagcctgggtgtagggtgc

SEQ ID NO: 1993486 - DNA, 25 bp, Homo sapien
cacagacattgggactgtctgcagc

SEQ ID NO: 1993487 - DNA, 25 bp, Homo sapien
gcagcgaatgatacactcacactca

SEQ ID NO: 1993488 - DNA, 25 bp, Homo sapien
ccatttccagtaaagagatcccggg

SEQ ID NO: 1993489 - DNA, 25 bp, Homo sapien
gactgtatgactcaggaattcccag

SEQ ID NO: 1993490 - DNA, 25 bp, Homo sapien
gccattggccagcattgactgtatg

SEQ ID NO: 1993491 - DNA, 25 bp, Homo sapien
ctgtccctgcgtggtagctgcttga

SEQ ID NO: 1993492 - DNA, 25 bp, Homo sapien
acttcctgtccctgcgtggtagctg

SEQ ID NO: 1993493 - DNA, 25 bp, Homo sapien
cctgcgtggtagctgcttgacacag

SEQ ID NO: 1993494 - DNA, 25 bp, Homo sapien
caagggctccatcagacttcctgtc

SEQ ID NO: 1993495 - DNA, 25 bp, Homo sapien
ggccctccaacgctgaacaatactg

SEQ ID NO: 1993496 - DNA, 25 bp, Homo sapien
ggaagggagctgtcaaaaacgccat

SEQ ID NO: 1993497 - DNA, 25 bp, Homo sapien
ggtcgcgggaggccagccactctct

SEQ ID NO: 1993498 - DNA, 25 bp, Homo sapien
gctgaacaatactgtttcctctgga

SEQ ID NO: 1993499 - DNA, 25 bp, Homo sapien
taattaaagactggtgctgcatctg

SEQ ID NO: 1993500 - DNA, 25 bp, Homo sapien
catctgttgggcaatcttgacaatg

SEQ ID NO: 1993501 - DNA, 25 bp, Homo sapien
caaactgtgcagtactccaaagcta

SEQ ID NO: 1993502 - DNA, 25 bp, Homo sapien
ttctgtctctgactggttccttggg

SEQ ID NO: 1993503 - DNA, 25 bp, Homo sapien
agcgggacccctttctcgtgacagg

SEQ ID NO: 1993504 - DNA, 25 bp, Homo sapien
gggattccaaatcccagcccagagc

SEQ ID NO: 1993505 - DNA, 25 bp, Homo sapien
tatcaatgacaaggcaataccgttg

SEQ ID NO: 1993506 - DNA, 25 bp, Homo sapien
ctgcggagcaagctggtaaaacatt

SEQ ID NO: 1993507 - DNA, 25 bp, Homo sapien
gggctaagtactttgatgagcctct

SEQ ID NO: 1993508 - DNA, 25 bp, Homo sapien
ccctaaccttctaccaggttggatg

SEQ ID NO: 1993509 - DNA, 25 bp, Homo sapien
cgtgtgggctaagtactttgatgag

SEQ ID NO: 1993510 - DNA, 25 bp, Homo sapien
taaccttctaccaggttggatggtc

SEQ ID NO: 1993511 - DNA, 25 bp, Homo sapien
cagtcctggtgcaccagtcacatgg

SEQ ID NO: 1993512 - DNA, 25 bp, Homo sapien
actgcgtctgaaggcccacgcttgt

SEQ ID NO: 1993513 - DNA, 25 bp, Homo sapien
ggtgcaccagtcacatgggcagaat

SEQ ID NO: 1993514 - DNA, 25 bp, Homo sapien
caggcaagtccactgcgtctgaagg

SEQ ID NO: 1993515 - DNA, 25 bp, Homo sapien
tcatttgcgcagtaataaagctcgc

SEQ ID NO: 1993516 - DNA, 25 bp, Homo sapien
ttcagaggccccataactcttggag

SEQ ID NO: 1993517 - DNA, 25 bp, Homo sapien
gagaaatgaattcggcagcacggag

SEQ ID NO: 1993518 - DNA, 25 bp, Homo sapien
gaagtatctgtctttgccggccgct

SEQ ID NO: 1993519 - DNA, 25 bp, Homo sapien
aagaaactttagctcttctaggaca

SEQ ID NO: 1993520 - DNA, 25 bp, Homo sapien
ggaccagatctccttcggcattgct

SEQ ID NO: 1993521 - DNA, 25 bp, Homo sapien
tcttctaggacaaggaccagatctc

SEQ ID NO: 1993522 - DNA, 25 bp, Homo sapien
gatctccttcggcattgcttttcct

SEQ ID NO: 1993523 - DNA, 25 bp, Homo sapien
gatggcatttggagagactttctga

SEQ ID NO: 1993524 - DNA, 25 bp, Homo sapien
cacagaccagcggttattttctttt

SEQ ID NO: 1993525 - DNA, 25 bp, Homo sapien
gggaaataagctatgatgctcaggg

SEQ ID NO: 1993526 - DNA, 25 bp, Homo sapien
gtcactggaagcacgacacaggcag

SEQ ID NO: 1993527 - DNA, 25 bp, Homo sapien
ccaactgccccactggtgagggctg

SEQ ID NO: 1993528 - DNA, 25 bp, Homo sapien
tcctgaaaatctacagggtgaaggg

SEQ ID NO: 1993529 - DNA, 25 bp, Homo sapien
tgagggctgcttcaccaggattggc

SEQ ID NO: 1993530 - DNA, 25 bp, Homo sapien
gtgaagggggaattgaccaactgcc

SEQ ID NO: 1993531 - DNA, 25 bp, Homo sapien
catgcacgtggtgcttaatataagt

SEQ ID NO: 1993532 - DNA, 25 bp, Homo sapien
attggccaaaaatgcacgtaggccg

SEQ ID NO: 1993533 - DNA, 25 bp, Homo sapien
cacgtaggccgataagacaaggttc

SEQ ID NO: 1993534 - DNA, 25 bp, Homo sapien
taagacaaggttcacatgcacgtgg

SEQ ID NO: 1993535 - DNA, 25 bp, Homo sapien
tggactcctccaatgtaggggatgg

SEQ ID NO: 1993536 - DNA, 25 bp, Homo sapien
agtacctgtgcattgtgagagccca

SEQ ID NO: 1993537 - DNA, 25 bp, Homo sapien
caagcatagcataaaaattctcaga

SEQ ID NO: 1993538 - DNA, 25 bp, Homo sapien
gcactcaatacaatcagtacctgtg

SEQ ID NO: 1993539 - DNA, 25 bp, Homo sapien
ggtgaatcagatgccccatgcaaag

SEQ ID NO: 1993540 - DNA, 25 bp, Homo sapien
gacttggggatcctccactccaagg

SEQ ID NO: 1993541 - DNA, 25 bp, Homo sapien
ctccatgcaccctggaatttcactg

SEQ ID NO: 1993542 - DNA, 25 bp, Homo sapien
tccttattcagacaatggtgaatca

SEQ ID NO: 1993543 - DNA, 25 bp, Homo sapien
tgccgcctcctgcaatacactgtag

SEQ ID NO: 1993544 - DNA, 25 bp, Homo sapien
ccattgtggaggaatgaacagctcc

SEQ ID NO: 1993545 - DNA, 25 bp, Homo sapien
gccactgtcattaatgcctgcccta

SEQ ID NO: 1993546 - DNA, 25 bp, Homo sapien
ttgagtggttggaccccataggtga

SEQ ID NO: 1993547 - DNA, 25 bp, Homo sapien
cgttttcttctcaaggaggtcttct

SEQ ID NO: 1993548 - DNA, 25 bp, Homo sapien
ttttcttctcaaggaggtcttcttc

SEQ ID NO: 1993549 - DNA, 25 bp, Homo sapien
cttctggttgaagactgttttctct

SEQ ID NO: 1993550 - DNA, 25 bp, Homo sapien
ttgaagactgttttctcttctacca

SEQ ID NO: 1993551 - DNA, 25 bp, Homo sapien
ggttgaagactgttttctcttctac

SEQ ID NO: 1993552 - DNA, 25 bp, Homo sapien
tctggttgaagactgttttctcttc

SEQ ID NO: 1993553 - DNA, 25 bp, Homo sapien
gccagaccaacgcagggatgaagtc

SEQ ID NO: 1993554 - DNA, 25 bp, Homo sapien
gaggaacctgtatctcacagggaaa

SEQ ID NO: 1993555 - DNA, 25 bp, Homo sapien
gaagtctcatgggttcacagggaac

SEQ ID NO: 1993556 - DNA, 25 bp, Homo sapien
ggcagtgtcctctaacacttgtgga

SEQ ID NO: 1993557 - DNA, 25 bp, Homo sapien
cttgactaactcatccacttggggc

SEQ ID NO: 1993558 - DNA, 25 bp, Homo sapien
ctgcactcagtcttcatcaccaggt

SEQ ID NO: 1993559 - DNA, 25 bp, Homo sapien
ttgactaactcatccacttggggcc

SEQ ID NO: 1993560 - DNA, 25 bp, Homo sapien
cgcactgaggtgcttgccagagctc

SEQ ID NO: 1993561 - DNA, 25 bp, Homo sapien
tcatttatccagaggacagtcccct

SEQ ID NO: 1993562 - DNA, 25 bp, Homo sapien
gtcgaagttcactgaccgcactgag

SEQ ID NO: 1993563 - DNA, 25 bp, Homo sapien
taactgaaccaagtcgaagttcact

SEQ ID NO: 1993564 - DNA, 25 bp, Homo sapien
ttctttgctgttgccaggaatgaca

SEQ ID NO: 1993565 - DNA, 25 bp, Homo sapien
caggaatgacagcagtttagtgtga

SEQ ID NO: 1993566 - DNA, 25 bp, Homo sapien
tagtgtgataatctggaatatcaca

SEQ ID NO: 1993567 - DNA, 25 bp, Homo sapien
cagcagtttagtgtgataatctgga

SEQ ID NO: 1993568 - DNA, 25 bp, Homo sapien
aaagcctggctcgagttgtctaccc

SEQ ID NO: 1993569 - DNA, 25 bp, Homo sapien
agcctggctcgagttgtctacccac

SEQ ID NO: 1993570 - DNA, 25 bp, Homo sapien
aaaagcctggctcgagttgtctacc

SEQ ID NO: 1993571 - DNA, 25 bp, Homo sapien
ctaaaagcctggctcgagttgtcta

SEQ ID NO: 1993572 - DNA, 25 bp, Homo sapien
gccaaagaatgttccttgaaacacc

SEQ ID NO: 1993573 - DNA, 25 bp, Homo sapien
ccaaagaatgttccttgaaacacca

SEQ ID NO: 1993574 - DNA, 25 bp, Homo sapien
tttttcaggcttgctgtttcctgtt

SEQ ID NO: 1993575 - DNA, 25 bp, Homo sapien
gaataaccaaattgtttcttcgtca

SEQ ID NO: 1993576 - DNA, 25 bp, Homo sapien
tccttggccactgagtcaagaataa

SEQ ID NO: 1993577 - DNA, 25 bp, Homo sapien
caaattgtttcttcgtcaatttcct

SEQ ID NO: 1993578 - DNA, 25 bp, Homo sapien
atgtatacacaggctgtttagcttc

SEQ ID NO: 1993579 - DNA, 25 bp, Homo sapien
gtatacacaggctgtttagcttcat

SEQ ID NO: 1993580 - DNA, 25 bp, Homo sapien
tgtatacacaggctgtttagcttca

SEQ ID NO: 1993581 - DNA, 25 bp, Homo sapien
tatacacaggctgtttagcttcatc

SEQ ID NO: 1993582 - DNA, 25 bp, Homo sapien
acacagacaaaaacccacttgtggc

SEQ ID NO: 1993583 - DNA, 25 bp, Homo sapien
aaaaacccacttgtggctgaagtct

SEQ ID NO: 1993584 - DNA, 25 bp, Homo sapien
tcccacgcagagttgcaggcacgca

SEQ ID NO: 1993585 - DNA, 25 bp, Homo sapien
gcagcgttccctcagtaaagtgcct

SEQ ID NO: 1993586 - DNA, 25 bp, Homo sapien
cattttccagcgactagaacggtga

SEQ ID NO: 1993587 - DNA, 25 bp, Homo sapien
gaatgggctccattatgttcctaat

SEQ ID NO: 1993588 - DNA, 25 bp, Homo sapien
atggaaaattggtagtcaaacccat

SEQ ID NO: 1993589 - DNA, 25 bp, Homo sapien
tattccacggtaattacaaaacagc

SEQ ID NO: 1993590 - DNA, 25 bp, Homo sapien
tctccataggagaagcaaaccgagg

SEQ ID NO: 1993591 - DNA, 25 bp, Homo sapien
tcctgcaagagtggaggacatctcc

SEQ ID NO: 1993592 - DNA, 25 bp, Homo sapien
ccgaggcactctgatagaaaggctt

SEQ ID NO: 1993593 - DNA, 25 bp, Homo sapien
ggtcaggaccccagtgatggaagca

SEQ ID NO: 1993594 - DNA, 25 bp, Homo sapien
aagaactgggcacttgcacgtgtgc

SEQ ID NO: 1993595 - DNA, 25 bp, Homo sapien
gaactgggcacttgcacgtgtgcca

SEQ ID NO: 1993596 - DNA, 25 bp, Homo sapien
cacttgcacgtgtgccatcacagtt

SEQ ID NO: 1993597 - DNA, 25 bp, Homo sapien
tgggcacttgcacgtgtgccatcac

SEQ ID NO: 1993598 - DNA, 25 bp, Homo sapien
aaggtacttcctcaacacaggcctg

SEQ ID NO: 1993599 - DNA, 25 bp, Homo sapien
tgctgatgtcaagtggagactatga

SEQ ID NO: 1993600 - DNA, 25 bp, Homo sapien
gagtccttcgtgaccctgctgatgt

SEQ ID NO: 1993601 - DNA, 25 bp, Homo sapien
tcttctcaaggaagagccccctctt

SEQ ID NO: 1993602 - DNA, 25 bp, Homo sapien
agggtgggctcatcgcagaggaccg

SEQ ID NO: 1993603 - DNA, 25 bp, Homo sapien
gaagagaggagtttgacccatgcga

SEQ ID NO: 1993604 - DNA, 25 bp, Homo sapien
gacccatgcgataatataagaggct

SEQ ID NO: 1993605 - DNA, 25 bp, Homo sapien
ccatgcgataatataagaggctgtg

SEQ ID NO: 1993606 - DNA, 25 bp, Homo sapien
gagtttgacccatgcgataatataa

SEQ ID NO: 1993607 - DNA, 25 bp, Homo sapien
tgtcactgtggagcatcaccactga

SEQ ID NO: 1993608 - DNA, 25 bp, Homo sapien
accactgaaacacctttggtgcttc

SEQ ID NO: 1993609 - DNA, 25 bp, Homo sapien
gctggtgcccgaactgtcactgtgg

SEQ ID NO: 1993610 - DNA, 25 bp, Homo sapien
tggccacgcgagctgacttttgagg

SEQ ID NO: 1993611 - DNA, 25 bp, Homo sapien
ttagataaccaccactcgttgacag

SEQ ID NO: 1993612 - DNA, 25 bp, Homo sapien
cttcctctgttttccatggacagag

SEQ ID NO: 1993613 - DNA, 25 bp, Homo sapien
tcgttgacagcgaggaccctgcaga

SEQ ID NO: 1993614 - DNA, 25 bp, Homo sapien
tcaggtcccgcttttcccagggagc

SEQ ID NO: 1993615 - DNA, 25 bp, Homo sapien
tttttccctgaagcattaagagaaa

SEQ ID NO: 1993616 - DNA, 25 bp, Homo sapien
ttttttccctgaagcattaagagaa

SEQ ID NO: 1993617 - DNA, 25 bp, Homo sapien
tttgccaagagttgttcctgggcac

SEQ ID NO: 1993618 - DNA, 25 bp, Homo sapien
ccaggatctgtctgatccaagtcca

SEQ ID NO: 1993619 - DNA, 25 bp, Homo sapien
gccaacagagcccattttccaattt

SEQ ID NO: 1993620 - DNA, 25 bp, Homo sapien
taaggaatgagggagtgtgcgggag

SEQ ID NO: 1993621 - DNA, 25 bp, Homo sapien
cctgtggttcccaagcatacctgct

SEQ ID NO: 1993622 - DNA, 25 bp, Homo sapien
aaaagctttgtgagggctttctggc

SEQ ID NO: 1993623 - DNA, 25 bp, Homo sapien
ggtgcacagcgcctaactcttgtcc

SEQ ID NO: 1993624 - DNA, 25 bp, Homo sapien
gctctgaggcactgatacctattag

SEQ ID NO: 1993625 - DNA, 25 bp, Homo sapien
cagtagagttcaggacaatagtgca

SEQ ID NO: 1993626 - DNA, 25 bp, Homo sapien
agagttcaggacaatagtgcatcag

SEQ ID NO: 1993627 - DNA, 25 bp, Homo sapien
atagtgcatcagaccccctgaaggc

SEQ ID NO: 1993628 - DNA, 25 bp, Homo sapien
aaagcagtagagttcaggacaatag

SEQ ID NO: 1993629 - DNA, 25 bp, Homo sapien
cagactcaagtaacgcaattgggct

SEQ ID NO: 1993630 - DNA, 25 bp, Homo sapien
cccaatcaagtatgccagactcaag

SEQ ID NO: 1993631 - DNA, 25 bp, Homo sapien
cagtaaacccaacccaatcaagtat

SEQ ID NO: 1993632 - DNA, 25 bp, Homo sapien
caagtaacgcaattgggctaatcct

SEQ ID NO: 1993633 - DNA, 25 bp, Homo sapien
atcaatgttgtcacagccaaacgtt

SEQ ID NO: 1993634 - DNA, 25 bp, Homo sapien
tgttgtcacagccaaacgttccctc

SEQ ID NO: 1993635 - DNA, 25 bp, Homo sapien
gtcacagccaaacgttccctcatgg

SEQ ID NO: 1993636 - DNA, 25 bp, Homo sapien
cagccaaacgttccctcatggatga

SEQ ID NO: 1993637 - DNA, 25 bp, Homo sapien
ccttcacaaggtagccttgtgtctt

SEQ ID NO: 1993638 - DNA, 25 bp, Homo sapien
gacatgaggccccttcacaaggtag

SEQ ID NO: 1993639 - DNA, 25 bp, Homo sapien
gaggccccttcacaaggtagccttg

SEQ ID NO: 1993640 - DNA, 25 bp, Homo sapien
gccccttcacaaggtagccttgtgt

SEQ ID NO: 1993641 - DNA, 25 bp, Homo sapien
taaggagtggtcatctgcgtcagta

SEQ ID NO: 1993642 - DNA, 25 bp, Homo sapien
atcaagggctgcgaatgtaaggagt

SEQ ID NO: 1993643 - DNA, 25 bp, Homo sapien
tgcgtcagtatcgtgattttcatca

SEQ ID NO: 1993644 - DNA, 25 bp, Homo sapien
gtgtgaaacaactctggaaagcatc

SEQ ID NO: 1993645 - DNA, 25 bp, Homo sapien
aaagagagacccatgcgccaaacaa

SEQ ID NO: 1993646 - DNA, 25 bp, Homo sapien
ggttattaagttggacagcagggcc

SEQ ID NO: 1993647 - DNA, 25 bp, Homo sapien
agatggtcccaacgtccttcccatt

SEQ ID NO: 1993648 - DNA, 25 bp, Homo sapien
gccaaacaacgagctgtggttatta

SEQ ID NO: 1993649 - DNA, 25 bp, Homo sapien
tctgaatatatcaactttcagagag

SEQ ID NO: 1993650 - DNA, 25 bp, Homo sapien
gagcagtaggtctgaatatatcaac

SEQ ID NO: 1993651 - DNA, 25 bp, Homo sapien
gaaacttggccatgatgtaaaccct

SEQ ID NO: 1993652 - DNA, 25 bp, Homo sapien
tgtaaaccctgctggagctagatgg

SEQ ID NO: 1993653 - DNA, 25 bp, Homo sapien
gagaataacgatgaccaaataactg

SEQ ID NO: 1993654 - DNA, 25 bp, Homo sapien
tagagcaggagaataacgatgacca

SEQ ID NO: 1993655 - DNA, 25 bp, Homo sapien
tcagttaaggtagagcaggagaata

SEQ ID NO: 1993656 - DNA, 25 bp, Homo sapien
taactgtcagccagaactactcctg

SEQ ID NO: 1993657 - DNA, 25 bp, Homo sapien
tggggaaggataacaggaccaaaga

SEQ ID NO: 1993658 - DNA, 25 bp, Homo sapien
tccaggttacccctgaggctgagat

SEQ ID NO: 1993659 - DNA, 25 bp, Homo sapien
caggttacccctgaggctgagatca

SEQ ID NO: 1993660 - DNA, 25 bp, Homo sapien
ctccaggttacccctgaggctgaga

SEQ ID NO: 1993661 - DNA, 25 bp, Homo sapien
tctgcagtgtccaggccaactccta

SEQ ID NO: 1993662 - DNA, 25 bp, Homo sapien
agcaggcctctgacgcaagcagtag

SEQ ID NO: 1993663 - DNA, 25 bp, Homo sapien
aggcctctgacgcaagcagtagcca

SEQ ID NO: 1993664 - DNA, 25 bp, Homo sapien
tgtagctctagcaggcctctgacgc

SEQ ID NO: 1993665 - DNA, 25 bp, Homo sapien
ctctagcaggcctctgacgcaagca

SEQ ID NO: 1993666 - DNA, 25 bp, Homo sapien
attggtccaagaatggctcatccat

SEQ ID NO: 1993667 - DNA, 25 bp, Homo sapien
ggattggtccaagaatggctcatcc

SEQ ID NO: 1993668 - DNA, 25 bp, Homo sapien
tggattggtccaagaatggctcatc

SEQ ID NO: 1993669 - DNA, 25 bp, Homo sapien
gattggtccaagaatggctcatcca

SEQ ID NO: 1993670 - DNA, 25 bp, Homo sapien
ttgatcaagcaggacagaaatagcc

SEQ ID NO: 1993671 - DNA, 25 bp, Homo sapien
atcgaacagggcaccatgagcagct

SEQ ID NO: 1993672 - DNA, 25 bp, Homo sapien
tagccatctgcaaaaacgacgtgaa

SEQ ID NO: 1993673 - DNA, 25 bp, Homo sapien
gccagccataaaatgaacggccaac

SEQ ID NO: 1993674 - DNA, 25 bp, Homo sapien
tcaacaaccacagggaattgcaggc

SEQ ID NO: 1993675 - DNA, 25 bp, Homo sapien
gggatttcagcatcagggcttaagt

SEQ ID NO: 1993676 - DNA, 25 bp, Homo sapien
cttctggcagcaaaggacgatgatt

SEQ ID NO: 1993677 - DNA, 25 bp, Homo sapien
ggaagactctggcaatatcactggg

SEQ ID NO: 1993678 - DNA, 25 bp, Homo sapien
ttccatgggatccagactgcccaac

SEQ ID NO: 1993679 - DNA, 25 bp, Homo sapien
tgataactcccaacagaatgcccta

SEQ ID NO: 1993680 - DNA, 25 bp, Homo sapien
tgtcagcagcgattacttccatggg

SEQ ID NO: 1993681 - DNA, 25 bp, Homo sapien
taattccagcggtcagacttggcct

SEQ ID NO: 1993682 - DNA, 25 bp, Homo sapien
ggtgaggcactaagctttggagccc

SEQ ID NO: 1993683 - DNA, 25 bp, Homo sapien
tggtgctgtctccttccgagtgagc

SEQ ID NO: 1993684 - DNA, 25 bp, Homo sapien
gaaggttcccgacagcagtctggtg

SEQ ID NO: 1993685 - DNA, 25 bp, Homo sapien
tcacggccagaccttgaggaaggtt

SEQ ID NO: 1993686 - DNA, 25 bp, Homo sapien
tatctgactgatcaccacattccaa

SEQ ID NO: 1993687 - DNA, 25 bp, Homo sapien
cattccaatctatagaacagtaaac

SEQ ID NO: 1993688 - DNA, 25 bp, Homo sapien
tgatggttttatctgactgatcacc

SEQ ID NO: 1993689 - DNA, 25 bp, Homo sapien
caccacattccaatctatagaacag

SEQ ID NO: 1993690 - DNA, 25 bp, Homo sapien
gtctctggtaattcactgtggctga

SEQ ID NO: 1993691 - DNA, 25 bp, Homo sapien
agtctctggtaattcactgtggctg

SEQ ID NO: 1993692 - DNA, 25 bp, Homo sapien
ctctgtcttttgcgttagagctgcc

SEQ ID NO: 1993693 - DNA, 25 bp, Homo sapien
cactctgtcttttgcgttagagctg

SEQ ID NO: 1993694 - DNA, 25 bp, Homo sapien
actctgtcttttgcgttagagctgc

SEQ ID NO: 1993695 - DNA, 25 bp, Homo sapien
cttttactggactaaaaagtgcatc

SEQ ID NO: 1993696 - DNA, 25 bp, Homo sapien
tttacagagttgagaaagacaaccc

SEQ ID NO: 1993697 - DNA, 25 bp, Homo sapien
aagacaacccatgtgcacctgtttt

SEQ ID NO: 1993698 - DNA, 25 bp, Homo sapien
tgcatcatatcgacctgacccacag

SEQ ID NO: 1993699 - DNA, 25 bp, Homo sapien
ttttactccttctactccctgactc

SEQ ID NO: 1993700 - DNA, 25 bp, Homo sapien
gaggtgacagaagccaatgctttct

SEQ ID NO: 1993701 - DNA, 25 bp, Homo sapien
gacagaagccaatgctttctcttca

SEQ ID NO: 1993702 - DNA, 25 bp, Homo sapien
actccttctactccctgactcacca

SEQ ID NO: 1993703 - DNA, 25 bp, Homo sapien
ctaaaaggagttgcatgacgagtgg

SEQ ID NO: 1993704 - DNA, 25 bp, Homo sapien
gaaaggcacagcttaatcccgatga

SEQ ID NO: 1993705 - DNA, 25 bp, Homo sapien
cgttgcaggtgctgtcagtatgaca

SEQ ID NO: 1993706 - DNA, 25 bp, Homo sapien
gggcttatcaaaatcgagtccacgt

SEQ ID NO: 1993707 - DNA, 25 bp, Homo sapien
ccctgcttcactgccaaatcctggt

SEQ ID NO: 1993708 - DNA, 25 bp, Homo sapien
acaagcatcccctaagggctgaccc

SEQ ID NO: 1993709 - DNA, 25 bp, Homo sapien
cttgtcccccactcactccacaagc

SEQ ID NO: 1993710 - DNA, 25 bp, Homo sapien
tcactccacaagcatcccctaaggg

SEQ ID NO: 1993711 - DNA, 25 bp, Homo sapien
tgagccagctactagtgtgattggg

SEQ ID NO: 1993712 - DNA, 25 bp, Homo sapien
actgagccagctactagtgtgattg

SEQ ID NO: 1993713 - DNA, 25 bp, Homo sapien
tgattggggaaacaggattcttagc

SEQ ID NO: 1993714 - DNA, 25 bp, Homo sapien
catgaggcaacgaatgaaggaggca

SEQ ID NO: 1993715 - DNA, 25 bp, Homo sapien
tgtagcttctcaagaagatgttttt

SEQ ID NO: 1993716 - DNA, 25 bp, Homo sapien
tgtttttgaggctctgcgtcaatct

SEQ ID NO: 1993717 - DNA, 25 bp, Homo sapien
gtttttgaggctctgcgtcaatctc

SEQ ID NO: 1993718 - DNA, 25 bp, Homo sapien
gatgtttttgaggctctgcgtcaat

SEQ ID NO: 1993719 - DNA, 25 bp, Homo sapien
tctccctgttgtatattcctgggtc

SEQ ID NO: 1993720 - DNA, 25 bp, Homo sapien
atacagggtccggtcatctccaaga

SEQ ID NO: 1993721 - DNA, 25 bp, Homo sapien
cctgttgtatattcctgggtcgctt

SEQ ID NO: 1993722 - DNA, 25 bp, Homo sapien
tctcacaggcctgatacagggtccg

SEQ ID NO: 1993723 - DNA, 25 bp, Homo sapien
tcaggactccttatatgaaggcaat

SEQ ID NO: 1993724 - DNA, 25 bp, Homo sapien
tctggagtactcattagttctgacc

SEQ ID NO: 1993725 - DNA, 25 bp, Homo sapien
gaatataagaccaccccatcagttt

SEQ ID NO: 1993726 - DNA, 25 bp, Homo sapien
ctttgatagcgttgacttttctggc

SEQ ID NO: 1993727 - DNA, 25 bp, Homo sapien
gttgaaggcatgttgcctggacctg

SEQ ID NO: 1993728 - DNA, 25 bp, Homo sapien
gggccttctagtgccatggaaatca

SEQ ID NO: 1993729 - DNA, 25 bp, Homo sapien
tgacatgggccttctagtgccatgg

SEQ ID NO: 1993730 - DNA, 25 bp, Homo sapien
tgaccccagattgggggcaatgaca

SEQ ID NO: 1993731 - DNA, 25 bp, Homo sapien
tctagtgccatggaaatcagtcagt

SEQ ID NO: 1993732 - DNA, 25 bp, Homo sapien
tcctccacagttgaatactcttcat

SEQ ID NO: 1993733 - DNA, 25 bp, Homo sapien
cagcttaaattttccctcacttggc

SEQ ID NO: 1993734 - DNA, 25 bp, Homo sapien
tactcttcattgttagggactagtt

SEQ ID NO: 1993735 - DNA, 25 bp, Homo sapien
taaattttccctcacttggcttcat

SEQ ID NO: 1993736 - DNA, 25 bp, Homo sapien
tccttcagcattacttgttgctgac

SEQ ID NO: 1993737 - DNA, 25 bp, Homo sapien
ccactgtgaatatgataattaggcc

SEQ ID NO: 1993738 - DNA, 25 bp, Homo sapien
tcagctctgaacatcctgagcaatg

SEQ ID NO: 1993739 - DNA, 25 bp, Homo sapien
gttttactacctgtaccactgtgaa

SEQ ID NO: 1993740 - DNA, 25 bp, Homo sapien
tacatgggacagctacattgaacag

SEQ ID NO: 1993741 - DNA, 25 bp, Homo sapien
tgatcccctttgataagccccaagg

SEQ ID NO: 1993742 - DNA, 25 bp, Homo sapien
aactcatgctatggtagtatgccac

SEQ ID NO: 1993743 - DNA, 25 bp, Homo sapien
tgagatcttggttagcccacggcga

SEQ ID NO: 1993744 - DNA, 25 bp, Homo sapien
atcaagacactgctctgcccgtcat

SEQ ID NO: 1993745 - DNA, 25 bp, Homo sapien
aatagcatcaagacactgctctgcc

SEQ ID NO: 1993746 - DNA, 25 bp, Homo sapien
tagcatcaagacactgctctgcccg

SEQ ID NO: 1993747 - DNA, 25 bp, Homo sapien
cgcaatagcatcaagacactgctct

SEQ ID NO: 1993748 - DNA, 25 bp, Homo sapien
catcttcatcatggcaattccacat

SEQ ID NO: 1993749 - DNA, 25 bp, Homo sapien
catcatcactaatatcatgaacgct

SEQ ID NO: 1993750 - DNA, 25 bp, Homo sapien
tatcatgaacgctgttctttgatgc

SEQ ID NO: 1993751 - DNA, 25 bp, Homo sapien
ccatcttcatcatggcaattccaca

SEQ ID NO: 1993752 - DNA, 25 bp, Homo sapien
tacataatatctgacactaagtgtt

SEQ ID NO: 1993753 - DNA, 25 bp, Homo sapien
atctgacactaagtgttcaatagtg

SEQ ID NO: 1993754 - DNA, 25 bp, Homo sapien
tattacataatatctgacactaagt

SEQ ID NO: 1993755 - DNA, 25 bp, Homo sapien
cataatatctgacactaagtgttca

SEQ ID NO: 1993756 - DNA, 25 bp, Homo sapien
aatcttggtacttttccacctggct

SEQ ID NO: 1993757 - DNA, 25 bp, Homo sapien
cctctttttagacagccagttttca

SEQ ID NO: 1993758 - DNA, 25 bp, Homo sapien
tttcctgatacaaatcttggtactt

SEQ ID NO: 1993759 - DNA, 25 bp, Homo sapien
atcctctttttagacagccagtttt

SEQ ID NO: 1993760 - DNA, 25 bp, Homo sapien
tcctcttaactttttcagtctcagg

SEQ ID NO: 1993761 - DNA, 25 bp, Homo sapien
tccctccaacttcctgatttagcct

SEQ ID NO: 1993762 - DNA, 25 bp, Homo sapien
tcttaactttttcagtctcaggttc

SEQ ID NO: 1993763 - DNA, 25 bp, Homo sapien
ttttcagtctcaggttccctccaac

SEQ ID NO: 1993764 - DNA, 25 bp, Homo sapien
gattgtgctcgttaaaatgtgtcca

SEQ ID NO: 1993765 - DNA, 25 bp, Homo sapien
ccatttgccagctgatcgatgggag

SEQ ID NO: 1993766 - DNA, 25 bp, Homo sapien
ccagctgatcgatgggagttctgaa

SEQ ID NO: 1993767 - DNA, 25 bp, Homo sapien
tattttgttgccagaacttgcttgg

SEQ ID NO: 1993768 - DNA, 25 bp, Homo sapien
caaaccactacccattccatgctca

SEQ ID NO: 1993769 - DNA, 25 bp, Homo sapien
tacaaaccactacccattccatgct

SEQ ID NO: 1993770 - DNA, 25 bp, Homo sapien
actacaaaccactacccattccatg

SEQ ID NO: 1993771 - DNA, 25 bp, Homo sapien
aaaccactacccattccatgctcat

SEQ ID NO: 1993772 - DNA, 25 bp, Homo sapien
agaaggggagctccgggaatttgtg

SEQ ID NO: 1993773 - DNA, 25 bp, Homo sapien
tttaagtagtgaggagtaagagcct

SEQ ID NO: 1993774 - DNA, 25 bp, Homo sapien
tgaggagtaagagcctgaagatcta

SEQ ID NO: 1993775 - DNA, 25 bp, Homo sapien
tagtgaggagtaagagcctgaagat

SEQ ID NO: 1993776 - DNA, 25 bp, Homo sapien
ttcaaagtggtggaatccggcggca

SEQ ID NO: 1993777 - DNA, 25 bp, Homo sapien
tagagctctggatagcccacagtga

SEQ ID NO: 1993778 - DNA, 25 bp, Homo sapien
cagtgtagctggtcttgtggttgat

SEQ ID NO: 1993779 - DNA, 25 bp, Homo sapien
ggccccgccatcctctgaattttta

SEQ ID NO: 1993780 - DNA, 25 bp, Homo sapien
aatgccggagaagttcccacactcc

SEQ ID NO: 1993781 - DNA, 25 bp, Homo sapien
ctcctggtctgagaaacccgttcca

SEQ ID NO: 1993782 - DNA, 25 bp, Homo sapien
tgagaaacccgttccaggaggcaga

SEQ ID NO: 1993783 - DNA, 25 bp, Homo sapien
tggtctgagaaacccgttccaggag

SEQ ID NO: 1993784 - DNA, 25 bp, Homo sapien
aggtgctgagttccatggtgtcaga

SEQ ID NO: 1993785 - DNA, 25 bp, Homo sapien
gtgctgagttccatggtgtcagagc

SEQ ID NO: 1993786 - DNA, 25 bp, Homo sapien
ggtgctgagttccatggtgtcagag

SEQ ID NO: 1993787 - DNA, 25 bp, Homo sapien
cctgtctcagacacggtgctcccac

SEQ ID NO: 1993788 - DNA, 25 bp, Homo sapien
tcctgtctcagacacggtgctccca

SEQ ID NO: 1993789 - DNA, 25 bp, Homo sapien
ctaaaatggcatcacgaaggccaga

SEQ ID NO: 1993790 - DNA, 25 bp, Homo sapien
ccctggaatcagacaagaaaggctg

SEQ ID NO: 1993791 - DNA, 25 bp, Homo sapien
cacgaaggccagatcaggcacaaag

SEQ ID NO: 1993792 - DNA, 25 bp, Homo sapien
acaagaaaggctggcggtgactggg

SEQ ID NO: 1993793 - DNA, 25 bp, Homo sapien
tcatcatcgcctgcacatcgcttat

SEQ ID NO: 1993794 - DNA, 25 bp, Homo sapien
gcacatcgcttataaagatgataaa

SEQ ID NO: 1993795 - DNA, 25 bp, Homo sapien
catcgcctgcacatcgcttataaag

SEQ ID NO: 1993796 - DNA, 25 bp, Homo sapien
tgtatagtaactgaaccctaaaaca

SEQ ID NO: 1993797 - DNA, 25 bp, Homo sapien
acttgctgattgtcagagccactgg

SEQ ID NO: 1993798 - DNA, 25 bp, Homo sapien
gatttttcctggacagtacttgctg

SEQ ID NO: 1993799 - DNA, 25 bp, Homo sapien
acagtacttgctgattgtcagagcc

SEQ ID NO: 1993800 - DNA, 25 bp, Homo sapien
gtacttgctgattgtcagagccact

SEQ ID NO: 1993801 - DNA, 25 bp, Homo sapien
gaaggcatttactgcccaaaagggc

SEQ ID NO: 1993802 - DNA, 25 bp, Homo sapien
tcatagccggttttaacgcgtcctc

SEQ ID NO: 1993803 - DNA, 25 bp, Homo sapien
tgagagaagaccaaaactgagcccc

SEQ ID NO: 1993804 - DNA, 25 bp, Homo sapien
taaccttctgcattctcatagccgg

SEQ ID NO: 1993805 - DNA, 25 bp, Homo sapien
aggccagcttctggtagcagattgg

SEQ ID NO: 1993806 - DNA, 25 bp, Homo sapien
gcttctggtagcagattggagttta

SEQ ID NO: 1993807 - DNA, 25 bp, Homo sapien
ccagcttctggtagcagattggagt

SEQ ID NO: 1993808 - DNA, 25 bp, Homo sapien
ctggtagcagattggagtttacagg

SEQ ID NO: 1993809 - DNA, 25 bp, Homo sapien
catattcccctcatgtccaaagaca

SEQ ID NO: 1993810 - DNA, 25 bp, Homo sapien
gcaattggcaatggttgaggtctct

SEQ ID NO: 1993811 - DNA, 25 bp, Homo sapien
gaaatagatgctgtccacatattcc

SEQ ID NO: 1993812 - DNA, 25 bp, Homo sapien
ttgttggagccaaggatagggaaca

SEQ ID NO: 1993813 - DNA, 25 bp, Homo sapien
tcatttatctccttgagtgtctccg

SEQ ID NO: 1993814 - DNA, 25 bp, Homo sapien
ttccacatttagttctacacatgct

SEQ ID NO: 1993815 - DNA, 25 bp, Homo sapien
tgagtgtctccgattctgtttccat

SEQ ID NO: 1993816 - DNA, 25 bp, Homo sapien
catttagttctacacatgcttcatc

SEQ ID NO: 1993817 - DNA, 25 bp, Homo sapien
tccttccctgctgtgattcttccca

SEQ ID NO: 1993818 - DNA, 25 bp, Homo sapien
tgctgtccttccctgctgtgattct

SEQ ID NO: 1993819 - DNA, 25 bp, Homo sapien
tgtccttccctgctgtgattcttcc

SEQ ID NO: 1993820 - DNA, 25 bp, Homo sapien
ttccctgctgtgattcttcccacag

SEQ ID NO: 1993821 - DNA, 25 bp, Homo sapien
gcagggaccatgcatcagttttgcc

SEQ ID NO: 1993822 - DNA, 25 bp, Homo sapien
tctgtgaggtttacactcaatgagg

SEQ ID NO: 1993823 - DNA, 25 bp, Homo sapien
gggcagggaccatgcatcagttttg

SEQ ID NO: 1993824 - DNA, 25 bp, Homo sapien
gaggtttacactcaatgagggcagg

SEQ ID NO: 1993825 - DNA, 25 bp, Homo sapien
taatgctccgcagatcatatacaga

SEQ ID NO: 1993826 - DNA, 25 bp, Homo sapien
cagggagcaaacacatcttttctaa

SEQ ID NO: 1993827 - DNA, 25 bp, Homo sapien
gttcattaccacagctacactttca

SEQ ID NO: 1993828 - DNA, 25 bp, Homo sapien
catcatccgaagctgtaatgctccg

SEQ ID NO: 1993829 - DNA, 25 bp, Homo sapien
gaatagcgaacagttgctggaaaca

SEQ ID NO: 1993830 - DNA, 25 bp, Homo sapien
cttgacggaaatgacctactccatc

SEQ ID NO: 1993831 - DNA, 25 bp, Homo sapien
cctgaatagcgaacagttgctggaa

SEQ ID NO: 1993832 - DNA, 25 bp, Homo sapien
gaaatgacctactccatcatatatg

SEQ ID NO: 1993833 - DNA, 25 bp, Homo sapien
taaaacaccagctgctcgttcactg

SEQ ID NO: 1993834 - DNA, 25 bp, Homo sapien
gataagcagctgtaactctgaagtt

SEQ ID NO: 1993835 - DNA, 25 bp, Homo sapien
caatggtgttaatcttgagtgacaa

SEQ ID NO: 1993836 - DNA, 25 bp, Homo sapien
catcacacatttgacagggcttgaa

SEQ ID NO: 1993837 - DNA, 25 bp, Homo sapien
cctctgtcacaaattcctccaagtg

SEQ ID NO: 1993838 - DNA, 25 bp, Homo sapien
tgaagactggagtctataaagaaaa

SEQ ID NO: 1993839 - DNA, 25 bp, Homo sapien
caggttatccactgttgacacatac

SEQ ID NO: 1993840 - DNA, 25 bp, Homo sapien
tctataaagaaaaccatcccgcagg

SEQ ID NO: 1993841 - DNA, 25 bp, Homo sapien
aaaccatcccgcaggttatccactg

SEQ ID NO: 1993842 - DNA, 25 bp, Homo sapien
gagctcaagctgctgaatacttggt

SEQ ID NO: 1993843 - DNA, 25 bp, Homo sapien
tttctcctacactaagctgggtggc

SEQ ID NO: 1993844 - DNA, 25 bp, Homo sapien
tgccttaagccacataagtattgag

SEQ ID NO: 1993845 - DNA, 25 bp, Homo sapien
actttctcctacactaagctgggtg

SEQ ID NO: 1993846 - DNA, 25 bp, Homo sapien
ctagatcagtttgtcagggaagatt

SEQ ID NO: 1993847 - DNA, 25 bp, Homo sapien
tagatcagtttgtcagggaagattc

SEQ ID NO: 1993848 - DNA, 25 bp, Homo sapien
gagtcccttgctgattgatccaaaa

SEQ ID NO: 1993849 - DNA, 25 bp, Homo sapien
ggagtcccttgctgattgatccaaa

SEQ ID NO: 1993850 - DNA, 25 bp, Homo sapien
agtcccttgctgattgatccaaaat

SEQ ID NO: 1993851 - DNA, 25 bp, Homo sapien
agagatgtggcttcagtatgttggc

SEQ ID NO: 1993852 - DNA, 25 bp, Homo sapien
tttttagtagagatgtggcttcagt

SEQ ID NO: 1993853 - DNA, 25 bp, Homo sapien
tagtagagatgtggcttcagtatgt

SEQ ID NO: 1993854 - DNA, 25 bp, Homo sapien
ttagtagagatgtggcttcagtatg

SEQ ID NO: 1993855 - DNA, 25 bp, Homo sapien
tcctctttgactccatacacaggca

SEQ ID NO: 1993856 - DNA, 25 bp, Homo sapien
tcattcctctttgactccatacaca

SEQ ID NO: 1993857 - DNA, 25 bp, Homo sapien
ccatacacaggcaatggtaatgaac

SEQ ID NO: 1993858 - DNA, 25 bp, Homo sapien
tccatacacaggcaatggtaatgaa

SEQ ID NO: 1993859 - DNA, 25 bp, Homo sapien
catgatggctcctcaagttcactct

SEQ ID NO: 1993860 - DNA, 25 bp, Homo sapien
tcatgatggctcctcaagttcactc

SEQ ID NO: 1993861 - DNA, 25 bp, Homo sapien
taatcttgtgcattaggtaagtccc

SEQ ID NO: 1993862 - DNA, 25 bp, Homo sapien
atagttttctcacactgctcaatgg

SEQ ID NO: 1993863 - DNA, 25 bp, Homo sapien
aacaacaggatcagggaaaattggg

SEQ ID NO: 1993864 - DNA, 25 bp, Homo sapien
gactgctattctctagtcagaaaca

SEQ ID NO: 1993865 - DNA, 25 bp, Homo sapien
gggatcaaatccatgcatggtcctt

SEQ ID NO: 1993866 - DNA, 25 bp, Homo sapien
cacaacttgaccagaaagcaattgg

SEQ ID NO: 1993867 - DNA, 25 bp, Homo sapien
tgaattgctgatatcgacggcaggg

SEQ ID NO: 1993868 - DNA, 25 bp, Homo sapien
tgtccgtggtatagctgtcatgccc

SEQ ID NO: 1993869 - DNA, 25 bp, Homo sapien
ccataggatttatgtgttggctcca

SEQ ID NO: 1993870 - DNA, 25 bp, Homo sapien
ttccataggatttatgtgttggctc

SEQ ID NO: 1993871 - DNA, 25 bp, Homo sapien
tattccataggatttatgtgttggc

SEQ ID NO: 1993872 - DNA, 25 bp, Homo sapien
atattccataggatttatgtgttgg

SEQ ID NO: 1993873 - DNA, 25 bp, Homo sapien
tctgatatcgatggaaaccaactcc

SEQ ID NO: 1993874 - DNA, 25 bp, Homo sapien
gaccacagtctgatatcgatggaaa

SEQ ID NO: 1993875 - DNA, 25 bp, Homo sapien
ccatgtttgaatgaccacagtctga

SEQ ID NO: 1993876 - DNA, 25 bp, Homo sapien
tttgaatgaccacagtctgatatcg

SEQ ID NO: 1993877 - DNA, 25 bp, Homo sapien
gaggacactctcaactcttgattct

SEQ ID NO: 1993878 - DNA, 25 bp, Homo sapien
ccaaaactacatggtgtgttgcctt

SEQ ID NO: 1993879 - DNA, 25 bp, Homo sapien
aactacatggtgtgttgccttctcc

SEQ ID NO: 1993880 - DNA, 25 bp, Homo sapien
cttgaggacactctcaactcttgat

SEQ ID NO: 1993881 - DNA, 25 bp, Homo sapien
acctccaccacgactatcaccacaa

SEQ ID NO: 1993882 - DNA, 25 bp, Homo sapien
cctccaccacgactatcaccacaat

SEQ ID NO: 1993883 - DNA, 25 bp, Homo sapien
ctccaccacgactatcaccacaatc

SEQ ID NO: 1993884 - DNA, 25 bp, Homo sapien
gtgatggcagctagcacttgagcca

SEQ ID NO: 1993885 - DNA, 25 bp, Homo sapien
tgatggcagctagcacttgagccat

SEQ ID NO: 1993886 - DNA, 25 bp, Homo sapien
tgtattggtttacaggcctcatcat

SEQ ID NO: 1993887 - DNA, 25 bp, Homo sapien
gcttctttagcatcaatactcgtgt

SEQ ID NO: 1993888 - DNA, 25 bp, Homo sapien
tctatgggctcccattgcttcttta

SEQ ID NO: 1993889 - DNA, 25 bp, Homo sapien
aagctctatgggctcccattgcttc

SEQ ID NO: 1993890 - DNA, 25 bp, Homo sapien
taagatcacagtactaggaatgccc

SEQ ID NO: 1993891 - DNA, 25 bp, Homo sapien
gaatgcccataggtactgagatgtt

SEQ ID NO: 1993892 - DNA, 25 bp, Homo sapien
gcaaaagggtagtcaaggatcatct

SEQ ID NO: 1993893 - DNA, 25 bp, Homo sapien
ttatctggccaaaagaaatctggtt

SEQ ID NO: 1993894 - DNA, 25 bp, Homo sapien
gcttcatgaggacatagatattggg

SEQ ID NO: 1993895 - DNA, 25 bp, Homo sapien
tgttgcagcttcatgaggacataga

SEQ ID NO: 1993896 - DNA, 25 bp, Homo sapien
gagtctgcatttgttgcagcttcat

SEQ ID NO: 1993897 - DNA, 25 bp, Homo sapien
ttgagtctgcatttgttgcagcttc

SEQ ID NO: 1993898 - DNA, 25 bp, Homo sapien
cattcaaatagttgttgatggcgtc

SEQ ID NO: 1993899 - DNA, 25 bp, Homo sapien
tcattcaaatagttgttgatggcgt

SEQ ID NO: 1993900 - DNA, 25 bp, Homo sapien
attcaaatagttgttgatggcgtca

SEQ ID NO: 1993901 - DNA, 25 bp, Homo sapien
gtcattcaaatagttgttgatggcg

SEQ ID NO: 1993902 - DNA, 25 bp, Homo sapien
taaggggtgggctttagcatttgct

SEQ ID NO: 1993903 - DNA, 25 bp, Homo sapien
gctgtttttattccactaatgttcc

SEQ ID NO: 1993904 - DNA, 25 bp, Homo sapien
tccactaatgttcctttgatctaac

SEQ ID NO: 1993905 - DNA, 25 bp, Homo sapien
tgtgaaaagtaggtgattctgagtg

SEQ ID NO: 1993906 - DNA, 25 bp, Homo sapien
gtactgttgaatgttagcatactcc

SEQ ID NO: 1993907 - DNA, 25 bp, Homo sapien
gaatgttagcatactccagtgagaa

SEQ ID NO: 1993908 - DNA, 25 bp, Homo sapien
tcctgtttgccattagatccataag

SEQ ID NO: 1993909 - DNA, 25 bp, Homo sapien
ccattagatccataagtactgttga

SEQ ID NO: 1993910 - DNA, 25 bp, Homo sapien
taaatggaatcctgaatctcgtggc

SEQ ID NO: 1993911 - DNA, 25 bp, Homo sapien
taaaggtagttgcacttcagatcct

SEQ ID NO: 1993912 - DNA, 25 bp, Homo sapien
agaccgaaaccaatcctccttgtag

SEQ ID NO: 1993913 - DNA, 25 bp, Homo sapien
taaatgtcctaattctcctgaacac

SEQ ID NO: 1993914 - DNA, 25 bp, Homo sapien
gatgtagtctagttatgtggtccat

SEQ ID NO: 1993915 - DNA, 25 bp, Homo sapien
ccttgttccattgagttagatgtag

SEQ ID NO: 1993916 - DNA, 25 bp, Homo sapien
tagatgtagtctagttatgtggtcc

SEQ ID NO: 1993917 - DNA, 25 bp, Homo sapien
gtctgccccttgttccattgagtta

SEQ ID NO: 1993918 - DNA, 25 bp, Homo sapien
cagccaggttgaatagacccaaaat

SEQ ID NO: 1993919 - DNA, 25 bp, Homo sapien
acaaagtagtcttagcactgagatg

SEQ ID NO: 1993920 - DNA, 25 bp, Homo sapien
agccaggttgaatagacccaaaatg

SEQ ID NO: 1993921 - DNA, 25 bp, Homo sapien
cagcatcgacaaagtagtcttagca

SEQ ID NO: 1993922 - DNA, 25 bp, Homo sapien
gggcttgcagccagagatctcctgc

SEQ ID NO: 1993923 - DNA, 25 bp, Homo sapien
ttctgcagactaccaggatcaggta

SEQ ID NO: 1993924 - DNA, 25 bp, Homo sapien
gcctgatagcagtagggcccagcag

SEQ ID NO: 1993925 - DNA, 25 bp, Homo sapien
ggatcaggtagattgcagccacaat

SEQ ID NO: 1993926 - DNA, 25 bp, Homo sapien
taaggagccctagaacaggcacaga

SEQ ID NO: 1993927 - DNA, 25 bp, Homo sapien
ttagtagccagtaataaggagccct

SEQ ID NO: 1993928 - DNA, 25 bp, Homo sapien
gccagtaataaggagccctagaaca

SEQ ID NO: 1993929 - DNA, 25 bp, Homo sapien
taataaggagccctagaacaggcac

SEQ ID NO: 1993930 - DNA, 25 bp, Homo sapien
ggaacataatagcagagtcccagtg

SEQ ID NO: 1993931 - DNA, 25 bp, Homo sapien
ttttggtgcttctaaggcccaggct

SEQ ID NO: 1993932 - DNA, 25 bp, Homo sapien
gaccatattgctctgtgccctagga

SEQ ID NO: 1993933 - DNA, 25 bp, Homo sapien
tgccctaggaaaggtgctggaagct

SEQ ID NO: 1993934 - DNA, 25 bp, Homo sapien
gatcagttctgctagctctatgaaa

SEQ ID NO: 1993935 - DNA, 25 bp, Homo sapien
cataggaacccactcagcttgcagt

SEQ ID NO: 1993936 - DNA, 25 bp, Homo sapien
caccaaggagtgtctctgttggcac

SEQ ID NO: 1993937 - DNA, 25 bp, Homo sapien
tatgaaacttcctgccagtaccacc

SEQ ID NO: 1993938 - DNA, 25 bp, Homo sapien
tacatactgggaagtttatatctgt

SEQ ID NO: 1993939 - DNA, 25 bp, Homo sapien
tactgggaagtttatatctgtatcc

SEQ ID NO: 1993940 - DNA, 25 bp, Homo sapien
ctgggaagtttatatctgtatccat

SEQ ID NO: 1993941 - DNA, 25 bp, Homo sapien
acatactgggaagtttatatctgta

SEQ ID NO: 1993942 - DNA, 25 bp, Homo sapien
catgatggataggaccacatctcca

SEQ ID NO: 1993943 - DNA, 25 bp, Homo sapien
tccacatgatggataggaccacatc

SEQ ID NO: 1993944 - DNA, 25 bp, Homo sapien
tgatggataggaccacatctccagg

SEQ ID NO: 1993945 - DNA, 25 bp, Homo sapien
ctgtccacatgatggataggaccac

SEQ ID NO: 1993946 - DNA, 25 bp, Homo sapien
ggctctggccatgctgcagtttaca

SEQ ID NO: 1993947 - DNA, 25 bp, Homo sapien
tgcacttccaccttgggagaattcg

SEQ ID NO: 1993948 - DNA, 25 bp, Homo sapien
tattaaagccagtgatgtagtgggc

SEQ ID NO: 1993949 - DNA, 25 bp, Homo sapien
ctgtcactagtactgcagcctccag

SEQ ID NO: 1993950 - DNA, 25 bp, Homo sapien
tatccaaaagtcgatcagaagtttc

SEQ ID NO: 1993951 - DNA, 25 bp, Homo sapien
cagtctgcccgtgaagggctctcgg

SEQ ID NO: 1993952 - DNA, 25 bp, Homo sapien
gatcagaagtttctatcctctttcc

SEQ ID NO: 1993953 - DNA, 25 bp, Homo sapien
taagatagacatagcccatcagcat

SEQ ID NO: 1993954 - DNA, 25 bp, Homo sapien
tacacttcggtgacagcttcgtggc

SEQ ID NO: 1993955 - DNA, 25 bp, Homo sapien
gggtgcattgccatgctgtgatcct

SEQ ID NO: 1993956 - DNA, 25 bp, Homo sapien
tcctctctctggtaatgaggcagtt

SEQ ID NO: 1993957 - DNA, 25 bp, Homo sapien
tcgtggcctcaatggaagctgcagt

SEQ ID NO: 1993958 - DNA, 25 bp, Homo sapien
ggtaaaactatatggccatcatttc

SEQ ID NO: 1993959 - DNA, 25 bp, Homo sapien
ctatatggccatcatttccagaata

SEQ ID NO: 1993960 - DNA, 25 bp, Homo sapien
tatatggccatcatttccagaataa

SEQ ID NO: 1993961 - DNA, 25 bp, Homo sapien
ctggtaaaactatatggccatcatt

SEQ ID NO: 1993962 - DNA, 25 bp, Homo sapien
atattccctccacacttcactggat

SEQ ID NO: 1993963 - DNA, 25 bp, Homo sapien
tatccatattccctccacacttcac

SEQ ID NO: 1993964 - DNA, 25 bp, Homo sapien
tattccctccacacttcactggatg

SEQ ID NO: 1993965 - DNA, 25 bp, Homo sapien
tccctccacacttcactggatgttt

SEQ ID NO: 1993966 - DNA, 25 bp, Homo sapien
ccttccattggctgcaagttctgaa

SEQ ID NO: 1993967 - DNA, 25 bp, Homo sapien
agtcagggagccttgagggatctgc

SEQ ID NO: 1993968 - DNA, 25 bp, Homo sapien
cccttccattggctgcaagttctga

SEQ ID NO: 1993969 - DNA, 25 bp, Homo sapien
gccttgagggatctgcagagtcccc

SEQ ID NO: 1993970 - DNA, 25 bp, Homo sapien
ggctgctctgtccttaagcagaggc

SEQ ID NO: 1993971 - DNA, 25 bp, Homo sapien
tctccataaggataggatatgtaac

SEQ ID NO: 1993972 - DNA, 25 bp, Homo sapien
gatatgtaactataagcagtaggaa

SEQ ID NO: 1993973 - DNA, 25 bp, Homo sapien
tgacctctagagatacgaatgtatg

SEQ ID NO: 1993974 - DNA, 25 bp, Homo sapien
tgtatgaaccgagagagaagaaagg

SEQ ID NO: 1993975 - DNA, 25 bp, Homo sapien
agaggactcatttaatctaaacttc

SEQ ID NO: 1993976 - DNA, 25 bp, Homo sapien
tccaggacagctctaaccttgcttc

SEQ ID NO: 1993977 - DNA, 25 bp, Homo sapien
ggattctctcagggtcaggttatcc

SEQ ID NO: 1993978 - DNA, 25 bp, Homo sapien
tttaatctaaacttccaggacagct

SEQ ID NO: 1993979 - DNA, 25 bp, Homo sapien
tccagccagtttatcagcacactgt

SEQ ID NO: 1993980 - DNA, 25 bp, Homo sapien
ctgcctccagccagtttatcagcac

SEQ ID NO: 1993981 - DNA, 25 bp, Homo sapien
cctccagccagtttatcagcacact

SEQ ID NO: 1993982 - DNA, 25 bp, Homo sapien
tgaccatggctttctgtcccatgca

SEQ ID NO: 1993983 - DNA, 25 bp, Homo sapien
aaatatccccacatctacataactg

SEQ ID NO: 1993984 - DNA, 25 bp, Homo sapien
gtgaatcctggaccaaaaatatccc

SEQ ID NO: 1993985 - DNA, 25 bp, Homo sapien
tgcatttgataattcaggcatttta

SEQ ID NO: 1993986 - DNA, 25 bp, Homo sapien
ctttgaaacatgtgcactttgcatt

SEQ ID NO: 1993987 - DNA, 25 bp, Homo sapien
ctgtttctacccattggttattctt

SEQ ID NO: 1993988 - DNA, 25 bp, Homo sapien
tcctgtttctacccattggttattc

SEQ ID NO: 1993989 - DNA, 25 bp, Homo sapien
ctccttttcctgtttctacccattg

SEQ ID NO: 1993990 - DNA, 25 bp, Homo sapien
ctacccattggttattctttcccat

SEQ ID NO: 1993991 - DNA, 25 bp, Homo sapien
tctggtgtgatgtagaaaggaacat

SEQ ID NO: 1993992 - DNA, 25 bp, Homo sapien
tctgaagctatcacctccatggtca

SEQ ID NO: 1993993 - DNA, 25 bp, Homo sapien
agttctagttcttgcagtggttctt

SEQ ID NO: 1993994 - DNA, 25 bp, Homo sapien
tgttctcgtgaacctggagtagtca

SEQ ID NO: 1993995 - DNA, 25 bp, Homo sapien
ttcttgggtccatcctttgtcttcc

SEQ ID NO: 1993996 - DNA, 25 bp, Homo sapien
tattcctcaactggatctccagtca

SEQ ID NO: 1993997 - DNA, 25 bp, Homo sapien
ttcctcaactggatctccagtcatg

SEQ ID NO: 1993998 - DNA, 25 bp, Homo sapien
ttattcctcaactggatctccagtc

SEQ ID NO: 1993999 - DNA, 25 bp, Homo sapien
cctcaactggatctccagtcatgac

SEQ ID NO: 1994000 - DNA, 25 bp, Homo sapien
taaattctggactgccattaatgtc

SEQ ID NO: 1994001 - DNA, 25 bp, Homo sapien
aattctggactgccattaatgtcaa

SEQ ID NO: 1994002 - DNA, 25 bp, Homo sapien
ctaaattctggactgccattaatgt

SEQ ID NO: 1994003 - DNA, 25 bp, Homo sapien
aaattctggactgccattaatgtca

SEQ ID NO: 1994004 - DNA, 25 bp, Homo sapien
ggatagtatgctcagtgtcagaatt

SEQ ID NO: 1994005 - DNA, 25 bp, Homo sapien
tatagtaagatcaaaatgactgacc

SEQ ID NO: 1994006 - DNA, 25 bp, Homo sapien
caggctggctctaataaactcatta

SEQ ID NO: 1994007 - DNA, 25 bp, Homo sapien
ggaaattttccagtactggcaagca

SEQ ID NO: 1994008 - DNA, 25 bp, Homo sapien
gatgcgtgggtcttgtgaggctcag

SEQ ID NO: 1994009 - DNA, 25 bp, Homo sapien
gaggctcaggttggactaatccttc

SEQ ID NO: 1994010 - DNA, 25 bp, Homo sapien
aagatgcgtgggtcttgtgaggctc

SEQ ID NO: 1994011 - DNA, 25 bp, Homo sapien
tgaggctcaggttggactaatcctt

SEQ ID NO: 1994012 - DNA, 25 bp, Homo sapien
gttttcacactatcatagtagcact

SEQ ID NO: 1994013 - DNA, 25 bp, Homo sapien
ccataggcaccaggatgtgataagt

SEQ ID NO: 1994014 - DNA, 25 bp, Homo sapien
gcaccaggatgtgataagtagatgg

SEQ ID NO: 1994015 - DNA, 25 bp, Homo sapien
caacctctcaggtaccatgttttca

SEQ ID NO: 1994016 - DNA, 25 bp, Homo sapien
ctcatgatggctgtgtgcatgttaa

SEQ ID NO: 1994017 - DNA, 25 bp, Homo sapien
tgtgcatgttaatgagagggtctgt

SEQ ID NO: 1994018 - DNA, 25 bp, Homo sapien
aaaggatggagacttaagtcctcca

SEQ ID NO: 1994019 - DNA, 25 bp, Homo sapien
gagacttaagtcctccaaactcatg

SEQ ID NO: 1994020 - DNA, 25 bp, Homo sapien
acacaaatccacttctatcagattc

SEQ ID NO: 1994021 - DNA, 25 bp, Homo sapien
aaatgtcagtgccaaacacaaatcc

SEQ ID NO: 1994022 - DNA, 25 bp, Homo sapien
ggtaaatgtcagtgccaaacacaaa

SEQ ID NO: 1994023 - DNA, 25 bp, Homo sapien
gtaaatgtcagtgccaaacacaaat

SEQ ID NO: 1994024 - DNA, 25 bp, Homo sapien
gattgccggcagttccaactgtgag

SEQ ID NO: 1994025 - DNA, 25 bp, Homo sapien
tcgtacttgaatgccctcaggtaag

SEQ ID NO: 1994026 - DNA, 25 bp, Homo sapien
tggaatgaggcatcatccgtcacgc

SEQ ID NO: 1994027 - DNA, 25 bp, Homo sapien
tgtcatcacacgtaagattgccggc

SEQ ID NO: 1994028 - DNA, 25 bp, Homo sapien
agcagtcacttcctccacccccgca

SEQ ID NO: 1994029 - DNA, 25 bp, Homo sapien
tcacagggagtagcagtcacttcct

SEQ ID NO: 1994030 - DNA, 25 bp, Homo sapien
gcagtcacttcctccacccccgcac

SEQ ID NO: 1994031 - DNA, 25 bp, Homo sapien
cagggagtagcagtcacttcctcca

SEQ ID NO: 1994032 - DNA, 25 bp, Homo sapien
ttcttgatcagttgtcttggtggag

SEQ ID NO: 1994033 - DNA, 25 bp, Homo sapien
ctcctgtttgcaggggcttcttgat

SEQ ID NO: 1994034 - DNA, 25 bp, Homo sapien
gggcttcttgatcagttgtcttggt

SEQ ID NO: 1994035 - DNA, 25 bp, Homo sapien
tttgcaggggcttcttgatcagttg

SEQ ID NO: 1994036 - DNA, 25 bp, Homo sapien
gtttggccagtaggataaaccagta

SEQ ID NO: 1994037 - DNA, 25 bp, Homo sapien
tatcacggtctagcagcagctatgc

SEQ ID NO: 1994038 - DNA, 25 bp, Homo sapien
aagaagaaagactccaggcatgtct

SEQ ID NO: 1994039 - DNA, 25 bp, Homo sapien
ttgctttgttatcacggtctagcag

SEQ ID NO: 1994040 - DNA, 25 bp, Homo sapien
ttaccgcatatctggtcaggtctga

SEQ ID NO: 1994041 - DNA, 25 bp, Homo sapien
ccaggtaataggtgttaaaagagag

SEQ ID NO: 1994042 - DNA, 25 bp, Homo sapien
tatcagtttctaaggccatgagcat

SEQ ID NO: 1994043 - DNA, 25 bp, Homo sapien
cctggaatacccagtcttgatcaga

SEQ ID NO: 1994044 - DNA, 25 bp, Homo sapien
ttttctcaaccatacactggaacgg

SEQ ID NO: 1994045 - DNA, 25 bp, Homo sapien
cagaaaggacaataccatctgcagt

SEQ ID NO: 1994046 - DNA, 25 bp, Homo sapien
cccaaagtgtggcatcatgctcatc

SEQ ID NO: 1994047 - DNA, 25 bp, Homo sapien
taaagacgtcagagaacagattact

SEQ ID NO: 1994048 - DNA, 25 bp, Homo sapien
ggtaactcatttagctttggtgtca

SEQ ID NO: 1994049 - DNA, 25 bp, Homo sapien
tccaggcactgacattaacactcct

SEQ ID NO: 1994050 - DNA, 25 bp, Homo sapien
agcaccagcgtcttgctgtaaccca

SEQ ID NO: 1994051 - DNA, 25 bp, Homo sapien
cagcatatggagtccaatctccagg

SEQ ID NO: 1994052 - DNA, 25 bp, Homo sapien
tcctttctctgcgactgcaggtatt

SEQ ID NO: 1994053 - DNA, 25 bp, Homo sapien
tctctgcgactgcaggtattagcac

SEQ ID NO: 1994054 - DNA, 25 bp, Homo sapien
cccatctttggcaatatctctgtag

SEQ ID NO: 1994055 - DNA, 25 bp, Homo sapien
tggctctgcacagaagcaacccgat

SEQ ID NO: 1994056 - DNA, 25 bp, Homo sapien
atatttcattaaaggaacttagcag

SEQ ID NO: 1994057 - DNA, 25 bp, Homo sapien
tttcattaaaggaacttagcaggac

SEQ ID NO: 1994058 - DNA, 25 bp, Homo sapien
ttctttcagaacaaggagaagcaaa

SEQ ID NO: 1994059 - DNA, 25 bp, Homo sapien
attaaaggaacttagcaggactgag

SEQ ID NO: 1994060 - DNA, 25 bp, Homo sapien
cctataggcgttgcctccatttgct

SEQ ID NO: 1994061 - DNA, 25 bp, Homo sapien
catttgcttgcaccaatagcaagct

SEQ ID NO: 1994062 - DNA, 25 bp, Homo sapien
ggagatgtggaacccctataggcgt

SEQ ID NO: 1994063 - DNA, 25 bp, Homo sapien
caatagcaagctgagacgtgttctc

SEQ ID NO: 1994064 - DNA, 25 bp, Homo sapien
gacccaagttataaatgccaagtta

SEQ ID NO: 1994065 - DNA, 25 bp, Homo sapien
gatgataagacttgtaccttacaca

SEQ ID NO: 1994066 - DNA, 25 bp, Homo sapien
tctgtctgtctgtagaagatgataa

SEQ ID NO: 1994067 - DNA, 25 bp, Homo sapien
tatttttgacccaagttataaatgc

SEQ ID NO: 1994068 - DNA, 25 bp, Homo sapien
gagaggccacgggagttcctattgt

SEQ ID NO: 1994069 - DNA, 25 bp, Homo sapien
cacgggagttcctattgtagcaata

SEQ ID NO: 1994070 - DNA, 25 bp, Homo sapien
agaacctgtatagggagaggccacg

SEQ ID NO: 1994071 - DNA, 25 bp, Homo sapien
tgtccatgttacctatagaacctgt

SEQ ID NO: 1994072 - DNA, 25 bp, Homo sapien
tcaaaagaaccttcctaactggcca

SEQ ID NO: 1994073 - DNA, 25 bp, Homo sapien
tgctttgattcaaaagaaccttcct

SEQ ID NO: 1994074 - DNA, 25 bp, Homo sapien
tcctaactggccacttgtcagactg

SEQ ID NO: 1994075 - DNA, 25 bp, Homo sapien
tggccacttgtcagactgatgggaa

SEQ ID NO: 1994076 - DNA, 25 bp, Homo sapien
ctgaggcttcaatgtgccttgtgat

SEQ ID NO: 1994077 - DNA, 25 bp, Homo sapien
gaggcttcaatgtgccttgtgatta

SEQ ID NO: 1994078 - DNA, 25 bp, Homo sapien
tttctctcatatgcatatgacttaa

SEQ ID NO: 1994079 - DNA, 25 bp, Homo sapien
gcttcaatgtgccttgtgattaaat

SEQ ID NO: 1994080 - DNA, 25 bp, Homo sapien
gatccaggacctatccctggtatca

SEQ ID NO: 1994081 - DNA, 25 bp, Homo sapien
ggttgtatcatatcggatccaggac

SEQ ID NO: 1994082 - DNA, 25 bp, Homo sapien
caggattatgtttagtggttgtatc

SEQ ID NO: 1994083 - DNA, 25 bp, Homo sapien
cacttaatgtagcaccattcaaaaa

SEQ ID NO: 1994084 - DNA, 25 bp, Homo sapien
aaatccctctccagtgccttgcatt

SEQ ID NO: 1994085 - DNA, 25 bp, Homo sapien
taaatccctctccagtgccttgcat

SEQ ID NO: 1994086 - DNA, 25 bp, Homo sapien
gtcttctaaatccctctccagtgcc

SEQ ID NO: 1994087 - DNA, 25 bp, Homo sapien
ttctaaatccctctccagtgccttg

SEQ ID NO: 1994088 - DNA, 25 bp, Homo sapien
caagaagcgaacataatcagaagct

SEQ ID NO: 1994089 - DNA, 25 bp, Homo sapien
tctgttctgacgtcggccaagttcc

SEQ ID NO: 1994090 - DNA, 25 bp, Homo sapien
tcatcccaagaagcgaacataatca

SEQ ID NO: 1994091 - DNA, 25 bp, Homo sapien
tgtcttactctctgttctgacgtcg

SEQ ID NO: 1994092 - DNA, 25 bp, Homo sapien
gaagttactctctgatcagtttgct

SEQ ID NO: 1994093 - DNA, 25 bp, Homo sapien
tactctctgatcagtttgctgctgg

SEQ ID NO: 1994094 - DNA, 25 bp, Homo sapien
tcaagaagttactctctgatcagtt

SEQ ID NO: 1994095 - DNA, 25 bp, Homo sapien
gctgctgacttctgagcatctatta

SEQ ID NO: 1994096 - DNA, 25 bp, Homo sapien
tcttctgagagcactctgaatcttc

SEQ ID NO: 1994097 - DNA, 25 bp, Homo sapien
gatgtgctttgatgtctgacaggca

SEQ ID NO: 1994098 - DNA, 25 bp, Homo sapien
ctatggtgtaatgctcttctgagag

SEQ ID NO: 1994099 - DNA, 25 bp, Homo sapien
tctgaatcttcagtaaagatgtgct

SEQ ID NO: 1994100 - DNA, 25 bp, Homo sapien
agtgtgtgtagtttttctgatggtg

SEQ ID NO: 1994101 - DNA, 25 bp, Homo sapien
cttctggtggagtgaccagctggtt

SEQ ID NO: 1994102 - DNA, 25 bp, Homo sapien
gaccagctggttgggttgttcatat

SEQ ID NO: 1994103 - DNA, 25 bp, Homo sapien
tgtgtgtagtttttctgatggtgga

SEQ ID NO: 1994104 - DNA, 25 bp, Homo sapien
caccaatatcctagcccttctattt

SEQ ID NO: 1994105 - DNA, 25 bp, Homo sapien
caaccaccaatatcctagcccttct

SEQ ID NO: 1994106 - DNA, 25 bp, Homo sapien
accaccaatatcctagcccttctat

SEQ ID NO: 1994107 - DNA, 25 bp, Homo sapien
cccaaccaccaatatcctagccctt

SEQ ID NO: 1994108 - DNA, 25 bp, Homo sapien
tttcattttgggagcctcagacagt

SEQ ID NO: 1994109 - DNA, 25 bp, Homo sapien
gtgtttcattttgggagcctcagac

SEQ ID NO: 1994110 - DNA, 25 bp, Homo sapien
gtttcattttgggagcctcagacag

SEQ ID NO: 1994111 - DNA, 25 bp, Homo sapien
aagtgtttcattttgggagcctcag

SEQ ID NO: 1994112 - DNA, 25 bp, Homo sapien
aagcagggtagatatttagcaggga

SEQ ID NO: 1994113 - DNA, 25 bp, Homo sapien
tattttgtcagtgcatctaagaagc

SEQ ID NO: 1994114 - DNA, 25 bp, Homo sapien
agtcttgcgtctttcagcatttcgg

SEQ ID NO: 1994115 - DNA, 25 bp, Homo sapien
gctgatggatgtagtcttgcgtctt

SEQ ID NO: 1994116 - DNA, 25 bp, Homo sapien
cacaatggtttctagagctggcgag

SEQ ID NO: 1994117 - DNA, 25 bp, Homo sapien
aatggtttctagagctggctgtctg

SEQ ID NO: 1994118 - DNA, 25 bp, Homo sapien
ggctgtctgctcacaatggtttcta

SEQ ID NO: 1994119 - DNA, 25 bp, Homo sapien
tggatagagtccacgacactataag

SEQ ID NO: 1994120 - DNA, 25 bp, Homo sapien
tcttcattaagggtgatataatcta

SEQ ID NO: 1994121 - DNA, 25 bp, Homo sapien
ctatacctttgcagattcgtttacc

SEQ ID NO: 1994122 - DNA, 25 bp, Homo sapien
atacctttgcagattcgtttaccct

SEQ ID NO: 1994123 - DNA, 25 bp, Homo sapien
cattaagggtgatataatctatacc

SEQ ID NO: 1994124 - DNA, 25 bp, Homo sapien
ctgctcagggagatggaataaggag

SEQ ID NO: 1994125 - DNA, 25 bp, Homo sapien
gagatggaataaggagctattacag

SEQ ID NO: 1994126 - DNA, 25 bp, Homo sapien
cagggagatggaataaggagctatt

SEQ ID NO: 1994127 - DNA, 25 bp, Homo sapien
gaataaggagctattacagcttcaa

SEQ ID NO: 1994128 - DNA, 25 bp, Homo sapien
tcactgatagaagcttccaaaatca

SEQ ID NO: 1994129 - DNA, 25 bp, Homo sapien
cagtgaagcacggtgatttctcaca

SEQ ID NO: 1994130 - DNA, 25 bp, Homo sapien
ccacagtgaagcacggtgatttctc

SEQ ID NO: 1994131 - DNA, 25 bp, Homo sapien
aaaatcactgcttcggcccgtccct

SEQ ID NO: 1994132 - DNA, 25 bp, Homo sapien
gaggggaatgcacaacaatacagag

SEQ ID NO: 1994133 - DNA, 25 bp, Homo sapien
tgaggggaatgcacaacaatacaga

SEQ ID NO: 1994134 - DNA, 25 bp, Homo sapien
ctgaggggaatgcacaacaatacag

SEQ ID NO: 1994135 - DNA, 25 bp, Homo sapien
gcgtttgggagtttgtatcatggta

SEQ ID NO: 1994136 - DNA, 25 bp, Homo sapien
catggtaagaaccaccaagtggaac

SEQ ID NO: 1994137 - DNA, 25 bp, Homo sapien
caccaagtggaacttttcctctctg

SEQ ID NO: 1994138 - DNA, 25 bp, Homo sapien
gaacttttcctctctggttgttatc

SEQ ID NO: 1994139 - DNA, 25 bp, Homo sapien
ctgcttctgtcttataacactgaga

SEQ ID NO: 1994140 - DNA, 25 bp, Homo sapien
agagtaaaaacgctaacaaatagag

SEQ ID NO: 1994141 - DNA, 25 bp, Homo sapien
cactgagagagtaaaaacgctaaca

SEQ ID NO: 1994142 - DNA, 25 bp, Homo sapien
tataacactgagagagtaaaaacgc

SEQ ID NO: 1994143 - DNA, 25 bp, Homo sapien
accaaatcagccctgatagacatgc

SEQ ID NO: 1994144 - DNA, 25 bp, Homo sapien
aggaagacaggttaccaaatcagcc

SEQ ID NO: 1994145 - DNA, 25 bp, Homo sapien
ccaaatcagccctgatagacatgcc

SEQ ID NO: 1994146 - DNA, 25 bp, Homo sapien
gaagacaggttaccaaatcagccct

SEQ ID NO: 1994147 - DNA, 25 bp, Homo sapien
ctggctcctgtaaggcacactgtga

SEQ ID NO: 1994148 - DNA, 25 bp, Homo sapien
ggtctgatgttgtcaactcacaggt

SEQ ID NO: 1994149 - DNA, 25 bp, Homo sapien
tcctgtaaggcacactgtgaggtct

SEQ ID NO: 1994150 - DNA, 25 bp, Homo sapien
cacactgtgaggtctgatgttgtca

SEQ ID NO: 1994151 - DNA, 25 bp, Homo sapien
tgtgactttaactccctgtgagcca

SEQ ID NO: 1994152 - DNA, 25 bp, Homo sapien
tgaccaaacactgaggcaacaatag

SEQ ID NO: 1994153 - DNA, 25 bp, Homo sapien
tggactcagagtttcaatggtaccc

SEQ ID NO: 1994154 - DNA, 25 bp, Homo sapien
tgtgagccataacagaacgcatctc

SEQ ID NO: 1994155 - DNA, 25 bp, Homo sapien
ctgtgtttttgcaagtacaagacag

SEQ ID NO: 1994156 - DNA, 25 bp, Homo sapien
tgtgtttttgcaagtacaagacaga

SEQ ID NO: 1994157 - DNA, 25 bp, Homo sapien
gtgtttttgcaagtacaagacagaa

SEQ ID NO: 1994158 - DNA, 25 bp, Homo sapien
ttcccctggtacctcctgtgccttc

SEQ ID NO: 1994159 - DNA, 25 bp, Homo sapien
agaacatgtaaacattctcctgcag

SEQ ID NO: 1994160 - DNA, 25 bp, Homo sapien
cgttgtcagcgacaagccagcagcg

SEQ ID NO: 1994161 - DNA, 25 bp, Homo sapien
gctgcctgccagagccaaaggcgtt

SEQ ID NO: 1994162 - DNA, 25 bp, Homo sapien
taacaaaccatgttcccctcagaaa

SEQ ID NO: 1994163 - DNA, 25 bp, Homo sapien
ccagtgcccttaacaaaccatgttc

SEQ ID NO: 1994164 - DNA, 25 bp, Homo sapien
tgacctctagggcttgacctcttgg

SEQ ID NO: 1994165 - DNA, 25 bp, Homo sapien
cttgacctcttggaaatatgcattg

SEQ ID NO: 1994166 - DNA, 25 bp, Homo sapien
tccagctctatgctacactttgtca

SEQ ID NO: 1994167 - DNA, 25 bp, Homo sapien
tctggaactccagctctatgctaca

SEQ ID NO: 1994168 - DNA, 25 bp, Homo sapien
tacactttgtcacctggagtttctc

SEQ ID NO: 1994169 - DNA, 25 bp, Homo sapien
ctacactttgtcacctggagtttct

SEQ ID NO: 1994170 - DNA, 25 bp, Homo sapien
tttagtgtcacatagattctaggcc

SEQ ID NO: 1994171 - DNA, 25 bp, Homo sapien
gtttagtgtcacatagattctaggc

SEQ ID NO: 1994172 - DNA, 25 bp, Homo sapien
tgtttagtgtcacatagattctagg

SEQ ID NO: 1994173 - DNA, 25 bp, Homo sapien
cgctggtttcacccttcgaataaat

SEQ ID NO: 1994174 - DNA, 25 bp, Homo sapien
gatcagacccgctggtttcaccctt

SEQ ID NO: 1994175 - DNA, 25 bp, Homo sapien
cctttgatcagacccgctggtttca

SEQ ID NO: 1994176 - DNA, 25 bp, Homo sapien
cattctcctttgatcagacccgctg

SEQ ID NO: 1994177 - DNA, 25 bp, Homo sapien
acttctttacacttcttgccactgg

SEQ ID NO: 1994178 - DNA, 25 bp, Homo sapien
ccactggttcaacttgttggatgtt

SEQ ID NO: 1994179 - DNA, 25 bp, Homo sapien
gatgttggagttagcaagtggatca

SEQ ID NO: 1994180 - DNA, 25 bp, Homo sapien
tcaacttgttggatgttggagttag

SEQ ID NO: 1994181 - DNA, 25 bp, Homo sapien
actggtcttactttgggatcccagg

SEQ ID NO: 1994182 - DNA, 25 bp, Homo sapien
ccagggcatatgttccaggctctgc

SEQ ID NO: 1994183 - DNA, 25 bp, Homo sapien
tatggatgctcatccagtcactact

SEQ ID NO: 1994184 - DNA, 25 bp, Homo sapien
ggatcccagggcatatgttccaggc

SEQ ID NO: 1994185 - DNA, 25 bp, Homo sapien
attctccagcttcacacagtgacta

SEQ ID NO: 1994186 - DNA, 25 bp, Homo sapien
gccactgaatcttgtagtgaattcc

SEQ ID NO: 1994187 - DNA, 25 bp, Homo sapien
actgaatcttgtagtgaattcctgg

SEQ ID NO: 1994188 - DNA, 25 bp, Homo sapien
ttctccagcttcacacagtgactag

SEQ ID NO: 1994189 - DNA, 25 bp, Homo sapien
aaagtgtgtcatgtctctcagtaac

SEQ ID NO: 1994190 - DNA, 25 bp, Homo sapien
gtttgataaggatccaagagtcagc

SEQ ID NO: 1994191 - DNA, 25 bp, Homo sapien
caactgcagtgataggtttgataag

SEQ ID NO: 1994192 - DNA, 25 bp, Homo sapien
aagagtcagcaacaatcaacagcag

SEQ ID NO: 1994193 - DNA, 25 bp, Homo sapien
ctggaccgagaagataattgctgac

SEQ ID NO: 1994194 - DNA, 25 bp, Homo sapien
aagataattgctgacgtctgtgtga

SEQ ID NO: 1994195 - DNA, 25 bp, Homo sapien
cttctaaatgcagcgggacagccat

SEQ ID NO: 1994196 - DNA, 25 bp, Homo sapien
tgcttctaaatgcagcgggacagcc

SEQ ID NO: 1994197 - DNA, 25 bp, Homo sapien
ccttgaggttgaggcttaatagaac

SEQ ID NO: 1994198 - DNA, 25 bp, Homo sapien
tgtcaagacaagattaggagcctgc

SEQ ID NO: 1994199 - DNA, 25 bp, Homo sapien
agccttgaggttgaggcttaataga

SEQ ID NO: 1994200 - DNA, 25 bp, Homo sapien
aatagaactgtcaagacaagattag

SEQ ID NO: 1994201 - DNA, 25 bp, Homo sapien
gagcagccagggagcagcattatca

SEQ ID NO: 1994202 - DNA, 25 bp, Homo sapien
agcagccagggagcagcattatcat

SEQ ID NO: 1994203 - DNA, 25 bp, Homo sapien
cgtgtcctctggtaagcagagcttg

SEQ ID NO: 1994204 - DNA, 25 bp, Homo sapien
tgtcctctggtaagcagagcttgct

SEQ ID NO: 1994205 - DNA, 25 bp, Homo sapien
ctctggtaagcagagcttgctccat

SEQ ID NO: 1994206 - DNA, 25 bp, Homo sapien
tcctctggtaagcagagcttgctcc

SEQ ID NO: 1994207 - DNA, 25 bp, Homo sapien
cttgggcccttccttgtctaataga

SEQ ID NO: 1994208 - DNA, 25 bp, Homo sapien
gcccttccttgtctaatagagcttc

SEQ ID NO: 1994209 - DNA, 25 bp, Homo sapien
gggcccttccttgtctaatagagct

SEQ ID NO: 1994210 - DNA, 25 bp, Homo sapien
tgggcccttccttgtctaatagagc

SEQ ID NO: 1994211 - DNA, 25 bp, Homo sapien
gcaatgttcgtatatttcttgtatc

SEQ ID NO: 1994212 - DNA, 25 bp, Homo sapien
tcttgtatctattccttccctgtct

SEQ ID NO: 1994213 - DNA, 25 bp, Homo sapien
gctgataccaggacaatcgagtagc

SEQ ID NO: 1994214 - DNA, 25 bp, Homo sapien
ggcacagggaatataaagccagctg

SEQ ID NO: 1994215 - DNA, 25 bp, Homo sapien
gtactccaggttgggccacagacca

SEQ ID NO: 1994216 - DNA, 25 bp, Homo sapien
cacataacttgtcccttgttgctca

SEQ ID NO: 1994217 - DNA, 25 bp, Homo sapien
ccacataacttgtcccttgttgctc

SEQ ID NO: 1994218 - DNA, 25 bp, Homo sapien
ctcgacacattacttaagatgtgcc

SEQ ID NO: 1994219 - DNA, 25 bp, Homo sapien
atctttcggacagctcgacacatta

SEQ ID NO: 1994220 - DNA, 25 bp, Homo sapien
ggattcaaattatctttcggacagc

SEQ ID NO: 1994221 - DNA, 25 bp, Homo sapien
aaccaaagaaactgatgttgtgcaa

SEQ ID NO: 1994222 - DNA, 25 bp, Homo sapien
taaagtgaaattgctgcaacttaaa

SEQ ID NO: 1994223 - DNA, 25 bp, Homo sapien
aagtgaaattgctgcaacttaaaca

SEQ ID NO: 1994224 - DNA, 25 bp, Homo sapien
cttaaagtgaaattgctgcaactta

SEQ ID NO: 1994225 - DNA, 25 bp, Homo sapien
agtgaaattgctgcaacttaaacat

SEQ ID NO: 1994226 - DNA, 25 bp, Homo sapien
tagacacttccgctaaattatttga

SEQ ID NO: 1994227 - DNA, 25 bp, Homo sapien
tacagactttaagttcatccttcac

SEQ ID NO: 1994228 - DNA, 25 bp, Homo sapien
taagttcatccttcactatctcaga

SEQ ID NO: 1994229 - DNA, 25 bp, Homo sapien
tcagaatttgtatcaggatctcttc

SEQ ID NO: 1994230 - DNA, 25 bp, Homo sapien
tgacatcctgtcaactctttcactg

SEQ ID NO: 1994231 - DNA, 25 bp, Homo sapien
catcctgtcaactctttcactgtca

SEQ ID NO: 1994232 - DNA, 25 bp, Homo sapien
cctgtcaactctttcactgtcacta

SEQ ID NO: 1994233 - DNA, 25 bp, Homo sapien
cagctgacatcctgtcaactctttc

SEQ ID NO: 1994234 - DNA, 25 bp, Homo sapien
tctctctccccacaccgtggaggcc

SEQ ID NO: 1994235 - DNA, 25 bp, Homo sapien
tctccccacaccgtggaggccccat

SEQ ID NO: 1994236 - DNA, 25 bp, Homo sapien
tctctccccacaccgtggaggcccc

SEQ ID NO: 1994237 - DNA, 25 bp, Homo sapien
cactccaaggccttcttctctctct

SEQ ID NO: 1994238 - DNA, 25 bp, Homo sapien
tgaataatgctataacccgaacaaa

SEQ ID NO: 1994239 - DNA, 25 bp, Homo sapien
tcagagctagaaacacctgatttct

SEQ ID NO: 1994240 - DNA, 25 bp, Homo sapien
acaaaaaggattagtatcagagcta

SEQ ID NO: 1994241 - DNA, 25 bp, Homo sapien
atgctataacccgaacaaaaaggat

SEQ ID NO: 1994242 - DNA, 25 bp, Homo sapien
gaacatcgctcacacgcctttctgt

SEQ ID NO: 1994243 - DNA, 25 bp, Homo sapien
gcagttagcagagattgtctgatgc

SEQ ID NO: 1994244 - DNA, 25 bp, Homo sapien
gaattgatctgccatgtgtaagaga

SEQ ID NO: 1994245 - DNA, 25 bp, Homo sapien
ctgaggtctcctccaaactgtgcag

SEQ ID NO: 1994246 - DNA, 25 bp, Homo sapien
tggttccaaacgacatcgcccaatt

SEQ ID NO: 1994247 - DNA, 25 bp, Homo sapien
ccaggcttgatctgaccattcttct

SEQ ID NO: 1994248 - DNA, 25 bp, Homo sapien
tctgaccattcttcttaggtggccc

SEQ ID NO: 1994249 - DNA, 25 bp, Homo sapien
ccatttggttccaaacgacatcgcc

SEQ ID NO: 1994250 - DNA, 25 bp, Homo sapien
aatgatctgaaatggcaagtcaggg

SEQ ID NO: 1994251 - DNA, 25 bp, Homo sapien
tcaataagttttccatgcagaagaa

SEQ ID NO: 1994252 - DNA, 25 bp, Homo sapien
gaaatggcaagtcagggtttgcaga

SEQ ID NO: 1994253 - DNA, 25 bp, Homo sapien
tgcagaagaaatgatctgaaatggc

SEQ ID NO: 1994254 - DNA, 25 bp, Homo sapien
tcccaaaattgtaccatgtactccc

SEQ ID NO: 1994255 - DNA, 25 bp, Homo sapien
cattcatcctttacaagcgtttccc

SEQ ID NO: 1994256 - DNA, 25 bp, Homo sapien
tcattcatcctttacaagcgtttcc

SEQ ID NO: 1994257 - DNA, 25 bp, Homo sapien
cccaaaattgtaccatgtactccct

SEQ ID NO: 1994258 - DNA, 25 bp, Homo sapien
tctgagtgtaattcaaggggccagt

SEQ ID NO: 1994259 - DNA, 25 bp, Homo sapien
actctgagtgtaattcaaggggcca

SEQ ID NO: 1994260 - DNA, 25 bp, Homo sapien
aactctgagtgtaattcaaggggcc

SEQ ID NO: 1994261 - DNA, 25 bp, Homo sapien
ccaactctgagtgtaattcaagggg

SEQ ID NO: 1994262 - DNA, 25 bp, Homo sapien
caacatttccttgtactccagtggc

SEQ ID NO: 1994263 - DNA, 25 bp, Homo sapien
gaagtctccaacatttccttgtact

SEQ ID NO: 1994264 - DNA, 25 bp, Homo sapien
tcagtgaagtctccaacatttcctt

SEQ ID NO: 1994265 - DNA, 25 bp, Homo sapien
ctgtgacttcctcagtgaagtctcc

SEQ ID NO: 1994266 - DNA, 25 bp, Homo sapien
gcctttcaaacgcatctgatacgga

SEQ ID NO: 1994267 - DNA, 25 bp, Homo sapien
ttcaaacgcatctgatacggatgct

SEQ ID NO: 1994268 - DNA, 25 bp, Homo sapien
cctcgcctttcaaacgcatctgata

SEQ ID NO: 1994269 - DNA, 25 bp, Homo sapien
catctgatacggatgcttgaacttt

SEQ ID NO: 1994270 - DNA, 25 bp, Homo sapien
ataaacatccatgccattgacatca

SEQ ID NO: 1994271 - DNA, 25 bp, Homo sapien
cctttttgccagagaagaggggcat

SEQ ID NO: 1994272 - DNA, 25 bp, Homo sapien
tcattttcctttttgccagagaaga

SEQ ID NO: 1994273 - DNA, 25 bp, Homo sapien
attttcctttttgccagagaagagg

SEQ ID NO: 1994274 - DNA, 25 bp, Homo sapien
ggtatttctgctatcattaattgtg

SEQ ID NO: 1994275 - DNA, 25 bp, Homo sapien
cttgattgctaatccatcacaccta

SEQ ID NO: 1994276 - DNA, 25 bp, Homo sapien
cacacctaagtgtgatgcatgtggt

SEQ ID NO: 1994277 - DNA, 25 bp, Homo sapien
tgatgcatgtggtatcaaacatggg

SEQ ID NO: 1994278 - DNA, 25 bp, Homo sapien
ccggataacatgttgtgaggtgcag

SEQ ID NO: 1994279 - DNA, 25 bp, Homo sapien
tcaaagtggagaaaagcaaggagga

SEQ ID NO: 1994280 - DNA, 25 bp, Homo sapien
gaaaaatgattaggagatttgcagt

SEQ ID NO: 1994281 - DNA, 25 bp, Homo sapien
ggtgcaggggaaagacaagttcaaa

SEQ ID NO: 1994282 - DNA, 25 bp, Homo sapien
gggaactgaacactgtctgataaag

SEQ ID NO: 1994283 - DNA, 25 bp, Homo sapien
ctgtctgataaagattttaggtcta

SEQ ID NO: 1994284 - DNA, 25 bp, Homo sapien
gaatatgttcgtcatgctgatctgc

SEQ ID NO: 1994285 - DNA, 25 bp, Homo sapien
tgaaatagctaggatcagccaaagg

SEQ ID NO: 1994286 - DNA, 25 bp, Homo sapien
aatctctcaatgatgttaccgtagt

SEQ ID NO: 1994287 - DNA, 25 bp, Homo sapien
catgtttcaggcgtaattgagaggc

SEQ ID NO: 1994288 - DNA, 25 bp, Homo sapien
tctcaatgatgttaccgtagtagaa

SEQ ID NO: 1994289 - DNA, 25 bp, Homo sapien
ctgcatcaagatgtccccagaaaat

SEQ ID NO: 1994290 - DNA, 25 bp, Homo sapien
gaggctgcctgttcttccctgtact

SEQ ID NO: 1994291 - DNA, 25 bp, Homo sapien
ttcccactctctgtgaaatgatttc

SEQ ID NO: 1994292 - DNA, 25 bp, Homo sapien
tgatttctgttaatggctctggaaa

SEQ ID NO: 1994293 - DNA, 25 bp, Homo sapien
tccctgtactcccccaagaaaatga

SEQ ID NO: 1994294 - DNA, 25 bp, Homo sapien
gtgcatggcatccttgagcagaggt

SEQ ID NO: 1994295 - DNA, 25 bp, Homo sapien
acacttcccaaatgtgcatggcatc

SEQ ID NO: 1994296 - DNA, 25 bp, Homo sapien
tgtgcatggcatccttgagcagagg

SEQ ID NO: 1994297 - DNA, 25 bp, Homo sapien
aaggtagtgccttggttgccattga

SEQ ID NO: 1994298 - DNA, 25 bp, Homo sapien
tgccaggtttcttcaaaggtagtgc

SEQ ID NO: 1994299 - DNA, 25 bp, Homo sapien
caaaggtagtgccttggttgccatt

SEQ ID NO: 1994300 - DNA, 25 bp, Homo sapien
catttgccaggtttcttcaaaggta

SEQ ID NO: 1994301 - DNA, 25 bp, Homo sapien
tcatcagaggtaatgaatcttgtac

SEQ ID NO: 1994302 - DNA, 25 bp, Homo sapien
catggcctggtgacttttcatcaga

SEQ ID NO: 1994303 - DNA, 25 bp, Homo sapien
cctggtgacttttcatcagaggtaa

SEQ ID NO: 1994304 - DNA, 25 bp, Homo sapien
catcagaggtaatgaatcttgtact

SEQ ID NO: 1994305 - DNA, 25 bp, Homo sapien
cttatcaccaaatttctcaaattca

SEQ ID NO: 1994306 - DNA, 25 bp, Homo sapien
tccctattcggaaattcctgctttg

SEQ ID NO: 1994307 - DNA, 25 bp, Homo sapien
taaggtgcccattctattattccac

SEQ ID NO: 1994308 - DNA, 25 bp, Homo sapien
tcctgctttgtacgagaaactctcc

SEQ ID NO: 1994309 - DNA, 25 bp, Homo sapien
tgaaaatacctatggtgtgcctgga

SEQ ID NO: 1994310 - DNA, 25 bp, Homo sapien
catttgaaaatacctatggtgtgcc

SEQ ID NO: 1994311 - DNA, 25 bp, Homo sapien
tttgaaaatacctatggtgtgcctg

SEQ ID NO: 1994312 - DNA, 25 bp, Homo sapien
ttgaaaatacctatggtgtgcctgg

SEQ ID NO: 1994313 - DNA, 25 bp, Homo sapien
cacagccaatgtagggtggtcgcat

SEQ ID NO: 1994314 - DNA, 25 bp, Homo sapien
tggtcgcattgggttacgatttttc

SEQ ID NO: 1994315 - DNA, 25 bp, Homo sapien
caataatttgattctgctgaaacac

SEQ ID NO: 1994316 - DNA, 25 bp, Homo sapien
cagagttcctaagttttagttgcag

SEQ ID NO: 1994317 - DNA, 25 bp, Homo sapien
gaaaaggaagtgtacacaattcatc

SEQ ID NO: 1994318 - DNA, 25 bp, Homo sapien
taatgaggaggcaatcgttcctctg

SEQ ID NO: 1994319 - DNA, 25 bp, Homo sapien
aatgggattgggaagttgcacagaa

SEQ ID NO: 1994320 - DNA, 25 bp, Homo sapien
tgctatctcccctgtaattttaaag

SEQ ID NO: 1994321 - DNA, 25 bp, Homo sapien
actcgcacatgcaaatgactcatct

SEQ ID NO: 1994322 - DNA, 25 bp, Homo sapien
ctttataggatatgaagtgacagaa

SEQ ID NO: 1994323 - DNA, 25 bp, Homo sapien
tgactcatcttcttatgaagctcat

SEQ ID NO: 1994324 - DNA, 25 bp, Homo sapien
tgaagctcattactatattgaaact

SEQ ID NO: 1994325 - DNA, 25 bp, Homo sapien
taatgctctccataggtacccataa

SEQ ID NO: 1994326 - DNA, 25 bp, Homo sapien
agccgtttttattggccacactaca

SEQ ID NO: 1994327 - DNA, 25 bp, Homo sapien
tgtaagccgtttttattggccacac

SEQ ID NO: 1994328 - DNA, 25 bp, Homo sapien
catttgtgtcataatgctctccata

SEQ ID NO: 1994329 - DNA, 25 bp, Homo sapien
tcagtatgaaaatggtgactacttc

SEQ ID NO: 1994330 - DNA, 25 bp, Homo sapien
catttttcctgatataatcagtatg

SEQ ID NO: 1994331 - DNA, 25 bp, Homo sapien
tcgatattgcctcaatgtgagcttt

SEQ ID NO: 1994332 - DNA, 25 bp, Homo sapien
ttctcttacaagagaataccacagc

SEQ ID NO: 1994333 - DNA, 25 bp, Homo sapien
ttcactgagtgcacaaggatgcgaa

SEQ ID NO: 1994334 - DNA, 25 bp, Homo sapien
tgtagtaaacagattttcactgagt

SEQ ID NO: 1994335 - DNA, 25 bp, Homo sapien
tagtaaacagattttcactgagtgc

SEQ ID NO: 1994336 - DNA, 25 bp, Homo sapien
gagtgcacaaggatgcgaacatctc

SEQ ID NO: 1994337 - DNA, 25 bp, Homo sapien
ggtaccaagcagctagctctccttc

SEQ ID NO: 1994338 - DNA, 25 bp, Homo sapien
taagtttccaccaggtaccaagcag

SEQ ID NO: 1994339 - DNA, 25 bp, Homo sapien
tttattataaccccattctcttctg

SEQ ID NO: 1994340 - DNA, 25 bp, Homo sapien
cattctcttctggatttgtaagttt

SEQ ID NO: 1994341 - DNA, 25 bp, Homo sapien
gtaaatgtttagtgggcactgtcat

SEQ ID NO: 1994342 - DNA, 25 bp, Homo sapien
ttgtaaatgtttagtgggcactgtc

SEQ ID NO: 1994343 - DNA, 25 bp, Homo sapien
attacatttacatttgaaggcattt

SEQ ID NO: 1994344 - DNA, 25 bp, Homo sapien
tacatttgaaggcatttgtaaatgt

SEQ ID NO: 1994345 - DNA, 25 bp, Homo sapien
caatattcttgcaccccagctggtc

SEQ ID NO: 1994346 - DNA, 25 bp, Homo sapien
gctctgggtgtacttcaatttctcc

SEQ ID NO: 1994347 - DNA, 25 bp, Homo sapien
gacatcgagggtcattaaagccaga

SEQ ID NO: 1994348 - DNA, 25 bp, Homo sapien
tggctcagctgctacttgctctggg

SEQ ID NO: 1994349 - DNA, 25 bp, Homo sapien
ctacatgatgactgtcctatcacac

SEQ ID NO: 1994350 - DNA, 25 bp, Homo sapien
tcctacatgatgactgtcctatcac

SEQ ID NO: 1994351 - DNA, 25 bp, Homo sapien
cattcctacatgatgactgtcctat

SEQ ID NO: 1994352 - DNA, 25 bp, Homo sapien
gacattcctacatgatgactgtcct

SEQ ID NO: 1994353 - DNA, 25 bp, Homo sapien
ccattttggaaccatgttaaccagt

SEQ ID NO: 1994354 - DNA, 25 bp, Homo sapien
tgaacagccattttggaaccatgtt

SEQ ID NO: 1994355 - DNA, 25 bp, Homo sapien
accatgttaaccagtaataatagac

SEQ ID NO: 1994356 - DNA, 25 bp, Homo sapien
ctaggactgagtgaacagccatttt

SEQ ID NO: 1994357 - DNA, 25 bp, Homo sapien
tctatgtaagtgttggaatgaggag

SEQ ID NO: 1994358 - DNA, 25 bp, Homo sapien
gaaagggacttctatgtaagtgttg

SEQ ID NO: 1994359 - DNA, 25 bp, Homo sapien
tgggaaagggacttctatgtaagtg

SEQ ID NO: 1994360 - DNA, 25 bp, Homo sapien
gacttctatgtaagtgttggaatga

SEQ ID NO: 1994361 - DNA, 25 bp, Homo sapien
ggattcatatccagatgcccgtgtc

SEQ ID NO: 1994362 - DNA, 25 bp, Homo sapien
actgaggcagctcaagtcatatcca

SEQ ID NO: 1994363 - DNA, 25 bp, Homo sapien
tgtcttcagctcaacccaactgagg

SEQ ID NO: 1994364 - DNA, 25 bp, Homo sapien
cctgctgagaactcgttgaaaaatc

SEQ ID NO: 1994365 - DNA, 25 bp, Homo sapien
ataggtctagtctcacaatggttcc

SEQ ID NO: 1994366 - DNA, 25 bp, Homo sapien
gtctagtctcacaatggttcctttg

SEQ ID NO: 1994367 - DNA, 25 bp, Homo sapien
gtctcacaatggttcctttgtcgtt

SEQ ID NO: 1994368 - DNA, 25 bp, Homo sapien
tagtctcacaatggttcctttgtcg

SEQ ID NO: 1994369 - DNA, 25 bp, Homo sapien
tgtgtctgagtcagcttggcagaac

SEQ ID NO: 1994370 - DNA, 25 bp, Homo sapien
ttaactgtgaagtgctcctactgcc

SEQ ID NO: 1994371 - DNA, 25 bp, Homo sapien
taactgtgaagtgctcctactgcca

SEQ ID NO: 1994372 - DNA, 25 bp, Homo sapien
gtcagcttggcagaactgctagcag

SEQ ID NO: 1994373 - DNA, 25 bp, Homo sapien
tgtggttagctttatccacagtagc

SEQ ID NO: 1994374 - DNA, 25 bp, Homo sapien
tgtgtggttagctttatccacagta

SEQ ID NO: 1994375 - DNA, 25 bp, Homo sapien
gtggttagctttatccacagtagct

SEQ ID NO: 1994376 - DNA, 25 bp, Homo sapien
gttagctttatccacagtagctaca

SEQ ID NO: 1994377 - DNA, 25 bp, Homo sapien
ttagcatcctctagaactgtagttc

SEQ ID NO: 1994378 - DNA, 25 bp, Homo sapien
taaagctgagcctgatggctggatc

SEQ ID NO: 1994379 - DNA, 25 bp, Homo sapien
taatctcctgacttgtagtcgtagc

SEQ ID NO: 1994380 - DNA, 25 bp, Homo sapien
tctccaccaatttggcagcgtgcat

SEQ ID NO: 1994381 - DNA, 25 bp, Homo sapien
tggggtcttagtgtagagtcttgca

SEQ ID NO: 1994382 - DNA, 25 bp, Homo sapien
gagtcttgcatgagatcttatctga

SEQ ID NO: 1994383 - DNA, 25 bp, Homo sapien
tgccagagacatcagcccatttctt

SEQ ID NO: 1994384 - DNA, 25 bp, Homo sapien
gcaattggtcataacttcttataca

SEQ ID NO: 1994385 - DNA, 25 bp, Homo sapien
tagaattcaggtaggtctgtggaaa

SEQ ID NO: 1994386 - DNA, 25 bp, Homo sapien
cctgcttctggtggtcagaactcca

SEQ ID NO: 1994387 - DNA, 25 bp, Homo sapien
caactgcaaacctgcgtgtttctta

SEQ ID NO: 1994388 - DNA, 25 bp, Homo sapien
gtgtttcttacgtcctgattccaag

SEQ ID NO: 1994389 - DNA, 25 bp, Homo sapien
tctggaccgatctccacctttggtt

SEQ ID NO: 1994390 - DNA, 25 bp, Homo sapien
tataatgctctggaccgatctccac

SEQ ID NO: 1994391 - DNA, 25 bp, Homo sapien
tgctctggaccgatctccacctttg

SEQ ID NO: 1994392 - DNA, 25 bp, Homo sapien
ggaccgatctccacctttggttctc

SEQ ID NO: 1994393 - DNA, 25 bp, Homo sapien
acagacatgctcttttgcaaggaca

SEQ ID NO: 1994394 - DNA, 25 bp, Homo sapien
agacatgctcttttgcaaggacaga

SEQ ID NO: 1994395 - DNA, 25 bp, Homo sapien
cagacatgctcttttgcaaggacag

SEQ ID NO: 1994396 - DNA, 25 bp, Homo sapien
gacatgctcttttgcaaggacagag

SEQ ID NO: 1994397 - DNA, 25 bp, Homo sapien
cagccacccctccactttgcctagt

SEQ ID NO: 1994398 - DNA, 25 bp, Homo sapien
gccacccctccactttgcctagtag

SEQ ID NO: 1994399 - DNA, 25 bp, Homo sapien
cccctccactttgcctagtagttgt

SEQ ID NO: 1994400 - DNA, 25 bp, Homo sapien
cacccctccactttgcctagtagtt

SEQ ID NO: 1994401 - DNA, 25 bp, Homo sapien
cttttgcctggtttcttctttctgt

SEQ ID NO: 1994402 - DNA, 25 bp, Homo sapien
tcttctttctgtttatctgtgccac

SEQ ID NO: 1994403 - DNA, 25 bp, Homo sapien
tctttctgtttatctgtgccacttc

SEQ ID NO: 1994404 - DNA, 25 bp, Homo sapien
ctttctgtttatctgtgccacttct

SEQ ID NO: 1994405 - DNA, 25 bp, Homo sapien
ctccctgaaggacatctgtaattac

SEQ ID NO: 1994406 - DNA, 25 bp, Homo sapien
tcactgctctactccctgaaggaca

SEQ ID NO: 1994407 - DNA, 25 bp, Homo sapien
tactccctgaaggacatctgtaatt

SEQ ID NO: 1994408 - DNA, 25 bp, Homo sapien
ctgctctactccctgaaggacatct

SEQ ID NO: 1994409 - DNA, 25 bp, Homo sapien
gatgtggcccaaccagccattctgg

SEQ ID NO: 1994410 - DNA, 25 bp, Homo sapien
ccctcagagtggtacaggtgtgtaa

SEQ ID NO: 1994411 - DNA, 25 bp, Homo sapien
gaacagtaacccctatcaagaggat

SEQ ID NO: 1994412 - DNA, 25 bp, Homo sapien
tatactccaaacgtagtccctcaga

SEQ ID NO: 1994413 - DNA, 25 bp, Homo sapien
gggcattgtcctggttggtaattgt

SEQ ID NO: 1994414 - DNA, 25 bp, Homo sapien
gttggtaattgtgtggcctattgtt

SEQ ID NO: 1994415 - DNA, 25 bp, Homo sapien
gggctatttcctcaactatctgtac

SEQ ID NO: 1994416 - DNA, 25 bp, Homo sapien
tactttgccctgtgtagggcattgt

SEQ ID NO: 1994417 - DNA, 25 bp, Homo sapien
ttcacataaaatcgctgccgcaggt

SEQ ID NO: 1994418 - DNA, 25 bp, Homo sapien
agttcacataaaatcgctgccgcag

SEQ ID NO: 1994419 - DNA, 25 bp, Homo sapien
tccaagttcacataaaatcgctgcc

SEQ ID NO: 1994420 - DNA, 25 bp, Homo sapien
cagtaatccaagttcacataaaatc

SEQ ID NO: 1994421 - DNA, 25 bp, Homo sapien
tgaacggatggtacctgcaaagtgc

SEQ ID NO: 1994422 - DNA, 25 bp, Homo sapien
caatctcatgtattgggtgactgct

SEQ ID NO: 1994423 - DNA, 25 bp, Homo sapien
cagagagtgtcgttcctttcatcaa

SEQ ID NO: 1994424 - DNA, 25 bp, Homo sapien
tccaagtaatctgtgaagtagcgct

SEQ ID NO: 1994425 - DNA, 25 bp, Homo sapien
cacacctgaaacctgaaattaaccg

SEQ ID NO: 1994426 - DNA, 25 bp, Homo sapien
gattgtcacccacattgaggatgga

SEQ ID NO: 1994427 - DNA, 25 bp, Homo sapien
catgccattaccctctggaaacact

SEQ ID NO: 1994428 - DNA, 25 bp, Homo sapien
gaattatgctttactaggtctctag

SEQ ID NO: 1994429 - DNA, 25 bp, Homo sapien
tggcctcatttggtgagctggttgc

SEQ ID NO: 1994430 - DNA, 25 bp, Homo sapien
gttgtaacatctgtggagtcctgtg

SEQ ID NO: 1994431 - DNA, 25 bp, Homo sapien
gagtcctgtggaggaacccctagta

SEQ ID NO: 1994432 - DNA, 25 bp, Homo sapien
tctttacttcaacaggaccagctgc

SEQ ID NO: 1994433 - DNA, 25 bp, Homo sapien
ccatcgagctggttgtcttcttggc

SEQ ID NO: 1994434 - DNA, 25 bp, Homo sapien
caagactgggacgtctagtccacag

SEQ ID NO: 1994435 - DNA, 25 bp, Homo sapien
ttggctgccctgtgtcgtaaaatgg

SEQ ID NO: 1994436 - DNA, 25 bp, Homo sapien
tgcacatgacgtggatcccatcgag

SEQ ID NO: 1994437 - DNA, 25 bp, Homo sapien
gcacagccatgttttaagtagtcct

SEQ ID NO: 1994438 - DNA, 25 bp, Homo sapien
gatgctagcctgacctgtagagacc

SEQ ID NO: 1994439 - DNA, 25 bp, Homo sapien
tctgtccttgatctccgtgctgtga

SEQ ID NO: 1994440 - DNA, 25 bp, Homo sapien
tgtagagaccacctccgagagtgtg

SEQ ID NO: 1994441 - DNA, 25 bp, Homo sapien
tctcttgccgatcaatatgctggaa

SEQ ID NO: 1994442 - DNA, 25 bp, Homo sapien
caatgactgatgcaacacaatgagt

SEQ ID NO: 1994443 - DNA, 25 bp, Homo sapien
cacagactccattgaaggtaatagg

SEQ ID NO: 1994444 - DNA, 25 bp, Homo sapien
cacaatgagtggaggaaaaagttct

SEQ ID NO: 1994445 - DNA, 25 bp, Homo sapien
ggtacaatgtccgattgactgaatg

SEQ ID NO: 1994446 - DNA, 25 bp, Homo sapien
taatctctttgaccatccccatcga

SEQ ID NO: 1994447 - DNA, 25 bp, Homo sapien
tattcctaaatatggagctaagccg

SEQ ID NO: 1994448 - DNA, 25 bp, Homo sapien
taaaggcttgctgagcccatcatca

SEQ ID NO: 1994449 - DNA, 25 bp, Homo sapien
agaattcagtgatgcaggtctgctt

SEQ ID NO: 1994450 - DNA, 25 bp, Homo sapien
gaattcagtgatgcaggtctgcttg

SEQ ID NO: 1994451 - DNA, 25 bp, Homo sapien
ctcccagccattgacacaagtgtct

SEQ ID NO: 1994452 - DNA, 25 bp, Homo sapien
cattcagttttgtcactcccagcca

SEQ ID NO: 1994453 - DNA, 25 bp, Homo sapien
cagaggaatcctatacacctttgca

SEQ ID NO: 1994454 - DNA, 25 bp, Homo sapien
ttctgcagcccaaatgaagcagagg

SEQ ID NO: 1994455 - DNA, 25 bp, Homo sapien
tattagaatcatactgggtacacgc

SEQ ID NO: 1994456 - DNA, 25 bp, Homo sapien
ctgggtacacgctgtttttggaaga

SEQ ID NO: 1994457 - DNA, 25 bp, Homo sapien
aatggtggacagccagatccgatta

SEQ ID NO: 1994458 - DNA, 25 bp, Homo sapien
cgaatggtgtctttattgtattaga

SEQ ID NO: 1994459 - DNA, 25 bp, Homo sapien
aggatggattaggggaacatcttac

SEQ ID NO: 1994460 - DNA, 25 bp, Homo sapien
ttaggatggattaggggaacatctt

SEQ ID NO: 1994461 - DNA, 25 bp, Homo sapien
taggatggattaggggaacatctta

SEQ ID NO: 1994462 - DNA, 25 bp, Homo sapien
taaaatgcccttgttggcagtgctt

SEQ ID NO: 1994463 - DNA, 25 bp, Homo sapien
gagttgaatgcatgtccagtcacca

SEQ ID NO: 1994464 - DNA, 25 bp, Homo sapien
tatgccatgctgctgtattgatcct

SEQ ID NO: 1994465 - DNA, 25 bp, Homo sapien
tctgcattgcattgactatgccatg

SEQ ID NO: 1994466 - DNA, 25 bp, Homo sapien
ccatcatgatgactgtaaatccagg

SEQ ID NO: 1994467 - DNA, 25 bp, Homo sapien
ggtgttaatactctcggatggccca

SEQ ID NO: 1994468 - DNA, 25 bp, Homo sapien
taaccgactgtatatggcgatgtaa

SEQ ID NO: 1994469 - DNA, 25 bp, Homo sapien
taataaagcagccattaaccgactg

SEQ ID NO: 1994470 - DNA, 25 bp, Homo sapien
gctgatgggtgaatagggaaaagca

SEQ ID NO: 1994471 - DNA, 25 bp, Homo sapien
ctgatgggtgaatagggaaaagcag

SEQ ID NO: 1994472 - DNA, 25 bp, Homo sapien
ggctgatgggtgaatagggaaaagc

SEQ ID NO: 1994473 - DNA, 25 bp, Homo sapien
tggctgatgggtgaatagggaaaag

SEQ ID NO: 1994474 - DNA, 25 bp, Homo sapien
tgggcagtatgaggttctaagtcac

SEQ ID NO: 1994475 - DNA, 25 bp, Homo sapien
aatgagtttgtctaaagcctttcac

SEQ ID NO: 1994476 - DNA, 25 bp, Homo sapien
gctttccatagaaggttcatttacc

SEQ ID NO: 1994477 - DNA, 25 bp, Homo sapien
caattccattcactaagtgtgtgct

SEQ ID NO: 1994478 - DNA, 25 bp, Homo sapien
tcttttcctctttctataggagcat

SEQ ID NO: 1994479 - DNA, 25 bp, Homo sapien
tgaataaatatgtttcccttggaca

SEQ ID NO: 1994480 - DNA, 25 bp, Homo sapien
gaataaatatgtttcccttggacat

SEQ ID NO: 1994481 - DNA, 25 bp, Homo sapien
cctctttctataggagcatgaataa

SEQ ID NO: 1994482 - DNA, 25 bp, Homo sapien
caatcccattgattgtaagagtcaa

SEQ ID NO: 1994483 - DNA, 25 bp, Homo sapien
tggaccgcagttgggccatgctctt

SEQ ID NO: 1994484 - DNA, 25 bp, Homo sapien
cacaggccacattaatggaccgcag

SEQ ID NO: 1994485 - DNA, 25 bp, Homo sapien
acttcactgttggtttggtcaatcc

SEQ ID NO: 1994486 - DNA, 25 bp, Homo sapien
tctgcaacgtaacaccaagggaaac

SEQ ID NO: 1994487 - DNA, 25 bp, Homo sapien
tgcaacgtaacaccaagggaaactg

SEQ ID NO: 1994488 - DNA, 25 bp, Homo sapien
ctgcaacgtaacaccaagggaaact

SEQ ID NO: 1994489 - DNA, 25 bp, Homo sapien
atctgcaacgtaacaccaagggaaa

SEQ ID NO: 1994490 - DNA, 25 bp, Homo sapien
ttgagctgtgagtacaatctgattg

SEQ ID NO: 1994491 - DNA, 25 bp, Homo sapien
tccagtgatcctgaaataaagaatt

SEQ ID NO: 1994492 - DNA, 25 bp, Homo sapien
atttcatgagctgcaatttgtctag

SEQ ID NO: 1994493 - DNA, 25 bp, Homo sapien
acagtagaatccagtgatcctgaaa

SEQ ID NO: 1994494 - DNA, 25 bp, Homo sapien
cagatgattggccacctaaggtctt

SEQ ID NO: 1994495 - DNA, 25 bp, Homo sapien
tggccacctaaggtcttcagctgct

SEQ ID NO: 1994496 - DNA, 25 bp, Homo sapien
cttgaggacactaacaatgtctttc

SEQ ID NO: 1994497 - DNA, 25 bp, Homo sapien
tatcctcagatgattggccacctaa

SEQ ID NO: 1994498 - DNA, 25 bp, Homo sapien
cagcagcttgaaatggtgttcctgg

SEQ ID NO: 1994499 - DNA, 25 bp, Homo sapien
cctgggttcttgctggcatgtggct

SEQ ID NO: 1994500 - DNA, 25 bp, Homo sapien
ctcagcaaaaccatcgtataaaggg

SEQ ID NO: 1994501 - DNA, 25 bp, Homo sapien
cagcaaaaccatcgtataaagggaa

SEQ ID NO: 1994502 - DNA, 25 bp, Homo sapien
gaaatagatgggatgatcagctggg

SEQ ID NO: 1994503 - DNA, 25 bp, Homo sapien
tgaaatagatgggatgatcagctgg

SEQ ID NO: 1994504 - DNA, 25 bp, Homo sapien
gtgaaatagatgggatgatcagctg

SEQ ID NO: 1994505 - DNA, 25 bp, Homo sapien
tgtgttgtttccaagggtagataaa

SEQ ID NO: 1994506 - DNA, 25 bp, Homo sapien
gaataatttgggacctctagggaga

SEQ ID NO: 1994507 - DNA, 25 bp, Homo sapien
tttgacagctggaagtcaaactcca

SEQ ID NO: 1994508 - DNA, 25 bp, Homo sapien
atgaagtgtgcaaggctacaggagc

SEQ ID NO: 1994509 - DNA, 25 bp, Homo sapien
tctcgccaaacaacagcaaagaaaa

SEQ ID NO: 1994510 - DNA, 25 bp, Homo sapien
tcaggtttctgcatctcgccaaaca

SEQ ID NO: 1994511 - DNA, 25 bp, Homo sapien
tctgcatctcgccaaacaacagcaa

SEQ ID NO: 1994512 - DNA, 25 bp, Homo sapien
ggtttctgcatctcgccaaacaaca

SEQ ID NO: 1994513 - DNA, 25 bp, Homo sapien
ctgaagaacttggaagtccacacga

SEQ ID NO: 1994514 - DNA, 25 bp, Homo sapien
cacgaaaatgaatatggtagttact

SEQ ID NO: 1994515 - DNA, 25 bp, Homo sapien
ctgctctcagaaagggtgtgtgact

SEQ ID NO: 1994516 - DNA, 25 bp, Homo sapien
tgctctcagaaagggtgtgtgactg

SEQ ID NO: 1994517 - DNA, 25 bp, Homo sapien
tctctccgtgacatttaaaggtagc

SEQ ID NO: 1994518 - DNA, 25 bp, Homo sapien
ggatattgttgcacatggttttgca

SEQ ID NO: 1994519 - DNA, 25 bp, Homo sapien
catcctcacgagatatgaagacttc

SEQ ID NO: 1994520 - DNA, 25 bp, Homo sapien
tagtctccgttatgttgagatcaaa

SEQ ID NO: 1994521 - DNA, 25 bp, Homo sapien
ccaggttctgaattgattgtggatc

SEQ ID NO: 1994522 - DNA, 25 bp, Homo sapien
gaagaccaggttctgaattgattgt

SEQ ID NO: 1994523 - DNA, 25 bp, Homo sapien
caggttctgaattgattgtggatca

SEQ ID NO: 1994524 - DNA, 25 bp, Homo sapien
gaccaggttctgaattgattgtgga

SEQ ID NO: 1994525 - DNA, 25 bp, Homo sapien
tccaaagggcaagggtaacctcatg

SEQ ID NO: 1994526 - DNA, 25 bp, Homo sapien
tctgactagacaataggtaggccta

SEQ ID NO: 1994527 - DNA, 25 bp, Homo sapien
ttgttccacctgacatccaaagggc

SEQ ID NO: 1994528 - DNA, 25 bp, Homo sapien
ggatccactggagcatattcatgtc

SEQ ID NO: 1994529 - DNA, 25 bp, Homo sapien
gaattcaatgtttggcttgaccctg

SEQ ID NO: 1994530 - DNA, 25 bp, Homo sapien
gacagcaaatggctcaatggagaaa

SEQ ID NO: 1994531 - DNA, 25 bp, Homo sapien
cagtaatatgtatctcagcacagag

SEQ ID NO: 1994532 - DNA, 25 bp, Homo sapien
caagttctgcttctgaccgattgca

SEQ ID NO: 1994533 - DNA, 25 bp, Homo sapien
tttctctgctcaacactcctgacag

SEQ ID NO: 1994534 - DNA, 25 bp, Homo sapien
tcacgggggctatgatttctggcat

SEQ ID NO: 1994535 - DNA, 25 bp, Homo sapien
tcttctcatgtgcacctttctcctg

SEQ ID NO: 1994536 - DNA, 25 bp, Homo sapien
tctgcagatgcaccaacagctgctg

SEQ ID NO: 1994537 - DNA, 25 bp, Homo sapien
gccctttggttcatgcgttccattc

SEQ ID NO: 1994538 - DNA, 25 bp, Homo sapien
taccctctaacacagtatggtcacc

SEQ ID NO: 1994539 - DNA, 25 bp, Homo sapien
catgcgttccattcctattaatttc

SEQ ID NO: 1994540 - DNA, 25 bp, Homo sapien
tggtcacccttagccctttggttca

SEQ ID NO: 1994541 - DNA, 25 bp, Homo sapien
gctagcaggcatattgagtcacata

SEQ ID NO: 1994542 - DNA, 25 bp, Homo sapien
tgaactcattgagggtaggaaccaa

SEQ ID NO: 1994543 - DNA, 25 bp, Homo sapien
agtgtttctaatctcaatccccagg

SEQ ID NO: 1994544 - DNA, 25 bp, Homo sapien
tttcccaaaggtcaatgccagcagc

SEQ ID NO: 1994545 - DNA, 25 bp, Homo sapien
tggttagggcaacgaggtttttgca

SEQ ID NO: 1994546 - DNA, 25 bp, Homo sapien
cccatcctttgtttcacctgtttct

SEQ ID NO: 1994547 - DNA, 25 bp, Homo sapien
agggcaacgaggtttttgcagaatg

SEQ ID NO: 1994548 - DNA, 25 bp, Homo sapien
gttagggcaacgaggtttttgcaga

SEQ ID NO: 1994549 - DNA, 25 bp, Homo sapien
tctgtagcattgtttctcctgttgt

SEQ ID NO: 1994550 - DNA, 25 bp, Homo sapien
tgccatctggactgaagtctgtttt

SEQ ID NO: 1994551 - DNA, 25 bp, Homo sapien
ccatctggactgaagtctgtttttc

SEQ ID NO: 1994552 - DNA, 25 bp, Homo sapien
tttctctgtagcattgtttctcctg

SEQ ID NO: 1994553 - DNA, 25 bp, Homo sapien
gagaacaaatgtgcgctcagcttgg

SEQ ID NO: 1994554 - DNA, 25 bp, Homo sapien
tctcctccattactattaacaacag

SEQ ID NO: 1994555 - DNA, 25 bp, Homo sapien
gattgcttttagtagtgaagacaca

SEQ ID NO: 1994556 - DNA, 25 bp, Homo sapien
tgcctcccaacgttgtctgtgtagg

SEQ ID NO: 1994557 - DNA, 25 bp, Homo sapien
aacggttggagttaatcggccactg

SEQ ID NO: 1994558 - DNA, 25 bp, Homo sapien
cagctggttactaccctgagaaatc

SEQ ID NO: 1994559 - DNA, 25 bp, Homo sapien
tgactggcttaacagctcagctggt

SEQ ID NO: 1994560 - DNA, 25 bp, Homo sapien
ggccactggatttggactctagtta

SEQ ID NO: 1994561 - DNA, 25 bp, Homo sapien
acagatgagtgtgggaacataagct

SEQ ID NO: 1994562 - DNA, 25 bp, Homo sapien
gggtgataattagaacatgctgtac

SEQ ID NO: 1994563 - DNA, 25 bp, Homo sapien
cataagctgtgtggttagtgaggca

SEQ ID NO: 1994564 - DNA, 25 bp, Homo sapien
tatgcagtaaacaaagctattatga

SEQ ID NO: 1994565 - DNA, 25 bp, Homo sapien
tgatggatggttgcttgggtcagga

SEQ ID NO: 1994566 - DNA, 25 bp, Homo sapien
caaagaagaatgatggatggttgct

SEQ ID NO: 1994567 - DNA, 25 bp, Homo sapien
tttcctctgcaacatgtgctttggg

SEQ ID NO: 1994568 - DNA, 25 bp, Homo sapien
agctttcctctgcaacatgtgcttt

SEQ ID NO: 1994569 - DNA, 25 bp, Homo sapien
gagagcagggaaaatagcgtgtgac

SEQ ID NO: 1994570 - DNA, 25 bp, Homo sapien
caaaccagttctgataggttacagc

SEQ ID NO: 1994571 - DNA, 25 bp, Homo sapien
gcactagctttggtgtaaccatagc

SEQ ID NO: 1994572 - DNA, 25 bp, Homo sapien
catttgtattgatgcactagctttg

SEQ ID NO: 1994573 - DNA, 25 bp, Homo sapien
aaggaactatggattcctcagcaaa

SEQ ID NO: 1994574 - DNA, 25 bp, Homo sapien
ttgctgatagtaacagctgacagga

SEQ ID NO: 1994575 - DNA, 25 bp, Homo sapien
tcattgctgatagtaacagctgaca

SEQ ID NO: 1994576 - DNA, 25 bp, Homo sapien
ttaatcattgctgatagtaacagct

SEQ ID NO: 1994577 - DNA, 25 bp, Homo sapien
tgatagtaacagctgacaggaagac

SEQ ID NO: 1994578 - DNA, 25 bp, Homo sapien
caataagcagggcataaaatccatt

SEQ ID NO: 1994579 - DNA, 25 bp, Homo sapien
tatgggcagcctctttctagggcaa

SEQ ID NO: 1994580 - DNA, 25 bp, Homo sapien
tggcatttggaaggcaataagcagg

SEQ ID NO: 1994581 - DNA, 25 bp, Homo sapien
tacaccagttgttattactctgaaa

SEQ ID NO: 1994582 - DNA, 25 bp, Homo sapien
tcctcatccattctgcctagcatag

SEQ ID NO: 1994583 - DNA, 25 bp, Homo sapien
tgcaaatctcctcaccagaaggtgg

SEQ ID NO: 1994584 - DNA, 25 bp, Homo sapien
gcattttgctccctaactgtgtttg

SEQ ID NO: 1994585 - DNA, 25 bp, Homo sapien
ggtgactgtgcttaatataatgccc

SEQ ID NO: 1994586 - DNA, 25 bp, Homo sapien
cagccaccacctctggtgacttcat

SEQ ID NO: 1994587 - DNA, 25 bp, Homo sapien
ttcagccaccacctctggtgacttc

SEQ ID NO: 1994588 - DNA, 25 bp, Homo sapien
caacttcagccaccacctctggtga

SEQ ID NO: 1994589 - DNA, 25 bp, Homo sapien
acttcagccaccacctctggtgact

SEQ ID NO: 1994590 - DNA, 25 bp, Homo sapien
gaatgctgccttatgatcaaccact

SEQ ID NO: 1994591 - DNA, 25 bp, Homo sapien
gatcaaccactcttatattcacaga

SEQ ID NO: 1994592 - DNA, 25 bp, Homo sapien
ccagagttcacatctggtttgcccc

SEQ ID NO: 1994593 - DNA, 25 bp, Homo sapien
tctggtttgccccagaatgctgcct

SEQ ID NO: 1994594 - DNA, 25 bp, Homo sapien
aagccactccatcagatcaggtttc

SEQ ID NO: 1994595 - DNA, 25 bp, Homo sapien
actgggtgagagctaagccactcca

SEQ ID NO: 1994596 - DNA, 25 bp, Homo sapien
taagccactccatcagatcaggttt

SEQ ID NO: 1994597 - DNA, 25 bp, Homo sapien
ctttttactcttataattggaatgt

SEQ ID NO: 1994598 - DNA, 25 bp, Homo sapien
tactcttataattggaatgttgttg

SEQ ID NO: 1994599 - DNA, 25 bp, Homo sapien
gaatgttgttgatcagattctgctt

SEQ ID NO: 1994600 - DNA, 25 bp, Homo sapien
tataattggaatgttgttgatcaga

SEQ ID NO: 1994601 - DNA, 25 bp, Homo sapien
gaagggacttgcatgggccatgatg

SEQ ID NO: 1994602 - DNA, 25 bp, Homo sapien
ccagattgtgagtgattgatagaga

SEQ ID NO: 1994603 - DNA, 25 bp, Homo sapien
gtgaagaagacttgattctgcacct

SEQ ID NO: 1994604 - DNA, 25 bp, Homo sapien
ttgccggttacagctgccagattgt

SEQ ID NO: 1994605 - DNA, 25 bp, Homo sapien
ccttttacaggtccttcagagtgac

SEQ ID NO: 1994606 - DNA, 25 bp, Homo sapien
tcaaaagtgtcccaacctgccttaa

SEQ ID NO: 1994607 - DNA, 25 bp, Homo sapien
tgagtgctgtcagaatttcctgggt

SEQ ID NO: 1994608 - DNA, 25 bp, Homo sapien
ttaacttggtcacccagtcagccct

SEQ ID NO: 1994609 - DNA, 25 bp, Homo sapien
acgtacatagatttattgctcagtg

SEQ ID NO: 1994610 - DNA, 25 bp, Homo sapien
ttattgctcagtgttactcccatcc

SEQ ID NO: 1994611 - DNA, 25 bp, Homo sapien
ttaaacgtacatagatttattgctc

SEQ ID NO: 1994612 - DNA, 25 bp, Homo sapien
cagtgttactcccatccaggaaata

SEQ ID NO: 1994613 - DNA, 25 bp, Homo sapien
tacgctccagtgcagctgtgctgcc

SEQ ID NO: 1994614 - DNA, 25 bp, Homo sapien
tgtagacacagggatgtacgctcca

SEQ ID NO: 1994615 - DNA, 25 bp, Homo sapien
gtcccattggaatggtacttatcca

SEQ ID NO: 1994616 - DNA, 25 bp, Homo sapien
agggatgtacgctccagtgcagctg

SEQ ID NO: 1994617 - DNA, 25 bp, Homo sapien
tcaggtactccaactttaactaaca

SEQ ID NO: 1994618 - DNA, 25 bp, Homo sapien
gttggcccccggtttcctcatcata

SEQ ID NO: 1994619 - DNA, 25 bp, Homo sapien
cctgtctacccagtggcaatttgct

SEQ ID NO: 1994620 - DNA, 25 bp, Homo sapien
catcatcatttctattagtctcagg

SEQ ID NO: 1994621 - DNA, 25 bp, Homo sapien
gcaattgtagctcagtattactgaa

SEQ ID NO: 1994622 - DNA, 25 bp, Homo sapien
taagctgctcattgaagagtaccat

SEQ ID NO: 1994623 - DNA, 25 bp, Homo sapien
ttgtcactgagcaattgtagctcag

SEQ ID NO: 1994624 - DNA, 25 bp, Homo sapien
tactgaaatcttctttaagctgctc

SEQ ID NO: 1994625 - DNA, 25 bp, Homo sapien
ccctcttgatgacctaaatatccct

SEQ ID NO: 1994626 - DNA, 25 bp, Homo sapien
caagtcgtactgatcataggttgaa

SEQ ID NO: 1994627 - DNA, 25 bp, Homo sapien
ggttgaaatcatagggatcccctct

SEQ ID NO: 1994628 - DNA, 25 bp, Homo sapien
tttgtggaacaagtcgtactgatca

SEQ ID NO: 1994629 - DNA, 25 bp, Homo sapien
ctgggcaagatctgggctgcaggag

SEQ ID NO: 1994630 - DNA, 25 bp, Homo sapien
tcaagatacttgtgcagactgggca

SEQ ID NO: 1994631 - DNA, 25 bp, Homo sapien
gcagactgggcaagatctgggctgc

SEQ ID NO: 1994632 - DNA, 25 bp, Homo sapien
caagatacttgtgcagactgggcaa

SEQ ID NO: 1994633 - DNA, 25 bp, Homo sapien
gcttggacaccacattctctctttt

SEQ ID NO: 1994634 - DNA, 25 bp, Homo sapien
gaggcttcgggggtcagatcctgca

SEQ ID NO: 1994635 - DNA, 25 bp, Homo sapien
attctctctttttgcacacagatgt

SEQ ID NO: 1994636 - DNA, 25 bp, Homo sapien
gatcctgcagcttggacaccacatt

SEQ ID NO: 1994637 - DNA, 25 bp, Homo sapien
cagaagagcaagccggacagacgcc

SEQ ID NO: 1994638 - DNA, 25 bp, Homo sapien
agaagagcaagccggacagacgccg

SEQ ID NO: 1994639 - DNA, 25 bp, Homo sapien
acagaagagcaagccggacagacgc

SEQ ID NO: 1994640 - DNA, 25 bp, Homo sapien
tattttcctgaacagattgccaggg

SEQ ID NO: 1994641 - DNA, 25 bp, Homo sapien
tttctggtctattttcctgaacaga

SEQ ID NO: 1994642 - DNA, 25 bp, Homo sapien
ggattctgaagctggcgcagccctg

SEQ ID NO: 1994643 - DNA, 25 bp, Homo sapien
tcatctcatccctagatggcagcag

SEQ ID NO: 1994644 - DNA, 25 bp, Homo sapien
tctctgtttagtgattatgtgctcc

SEQ ID NO: 1994645 - DNA, 25 bp, Homo sapien
tgtttagtgattatgtgctccaact

SEQ ID NO: 1994646 - DNA, 25 bp, Homo sapien
tctgtttagtgattatgtgctccaa

SEQ ID NO: 1994647 - DNA, 25 bp, Homo sapien
ctcttctctgtttagtgattatgtg

SEQ ID NO: 1994648 - DNA, 25 bp, Homo sapien
gcaattatattcctgagatggtcag

SEQ ID NO: 1994649 - DNA, 25 bp, Homo sapien
gctgctcatggcaattatattcctg

SEQ ID NO: 1994650 - DNA, 25 bp, Homo sapien
catggcaattatattcctgagatgg

SEQ ID NO: 1994651 - DNA, 25 bp, Homo sapien
agatggtcaggaaaattgtatttct

SEQ ID NO: 1994652 - DNA, 25 bp, Homo sapien
atgaggactaatgttcaatttgttt

SEQ ID NO: 1994653 - DNA, 25 bp, Homo sapien
tgaggactaatgttcaatttgtttt

SEQ ID NO: 1994654 - DNA, 25 bp, Homo sapien
cttacctcaaagatttctgggagca

SEQ ID NO: 1994655 - DNA, 25 bp, Homo sapien
aaaaagaggtcccacaatatctgac

SEQ ID NO: 1994656 - DNA, 25 bp, Homo sapien
ttcagaatccccaagatgcatacgt

SEQ ID NO: 1994657 - DNA, 25 bp, Homo sapien
ccatctttgagtaagcacaggagaa

SEQ ID NO: 1994658 - DNA, 25 bp, Homo sapien
acatctgcttctttttttctcagtt

SEQ ID NO: 1994659 - DNA, 25 bp, Homo sapien
tgcttctttttttctcagtttgatt

SEQ ID NO: 1994660 - DNA, 25 bp, Homo sapien
tctgcttctttttttctcagtttga

SEQ ID NO: 1994661 - DNA, 25 bp, Homo sapien
atctgcttctttttttctcagtttg

SEQ ID NO: 1994662 - DNA, 25 bp, Homo sapien
aatgtttaggccacagacaatgcag

SEQ ID NO: 1994663 - DNA, 25 bp, Homo sapien
acagacaatgcagggtttcaagtct

SEQ ID NO: 1994664 - DNA, 25 bp, Homo sapien
tgcagggtttcaagtctgcctcttc

SEQ ID NO: 1994665 - DNA, 25 bp, Homo sapien
tctgtgcaatgtttaggccacagac

SEQ ID NO: 1994666 - DNA, 25 bp, Homo sapien
gtgattgtgtgccaggagacacctc

SEQ ID NO: 1994667 - DNA, 25 bp, Homo sapien
tctggtgaagtggaactatgcttgc

SEQ ID NO: 1994668 - DNA, 25 bp, Homo sapien
tccagccaagcgactctgccttagg

SEQ ID NO: 1994669 - DNA, 25 bp, Homo sapien
aactatgacctgaagtctctggtga

SEQ ID NO: 1994670 - DNA, 25 bp, Homo sapien
caattactacatattccactatcaa

SEQ ID NO: 1994671 - DNA, 25 bp, Homo sapien
tactacatattccactatcaatagc

SEQ ID NO: 1994672 - DNA, 25 bp, Homo sapien
aatagcatatccactggtattctcc

SEQ ID NO: 1994673 - DNA, 25 bp, Homo sapien
tccactatcaatagcatatccactg

SEQ ID NO: 1994674 - DNA, 25 bp, Homo sapien
attcctcctaagttctcacagaacc

SEQ ID NO: 1994675 - DNA, 25 bp, Homo sapien
caccttgtccttcccataatcttca

SEQ ID NO: 1994676 - DNA, 25 bp, Homo sapien
ttcctcctaagttctcacagaaccc

SEQ ID NO: 1994677 - DNA, 25 bp, Homo sapien
tcctcctaagttctcacagaaccca

SEQ ID NO: 1994678 - DNA, 25 bp, Homo sapien
ggtacacatcattgcagatcgtgaa

SEQ ID NO: 1994679 - DNA, 25 bp, Homo sapien
gaatgaattcctactagactgacag

SEQ ID NO: 1994680 - DNA, 25 bp, Homo sapien
aagggactatttctggcaattacca

SEQ ID NO: 1994681 - DNA, 25 bp, Homo sapien
ttccactaactgagaagtaagcatg

SEQ ID NO: 1994682 - DNA, 25 bp, Homo sapien
tacctgtgtcctatagaagggtcac

SEQ ID NO: 1994683 - DNA, 25 bp, Homo sapien
tgggcctgctggagtaaaacctagg

SEQ ID NO: 1994684 - DNA, 25 bp, Homo sapien
tcacaacatatgcttcacctgggcc

SEQ ID NO: 1994685 - DNA, 25 bp, Homo sapien
gattctatcttggtggagacagcca

SEQ ID NO: 1994686 - DNA, 25 bp, Homo sapien
ttgtgaagtttactctgtatggagc

SEQ ID NO: 1994687 - DNA, 25 bp, Homo sapien
ggtgctttcttgtatctagttcagg

SEQ ID NO: 1994688 - DNA, 25 bp, Homo sapien
agtttcaatatggctgtcaatagct

SEQ ID NO: 1994689 - DNA, 25 bp, Homo sapien
cagtttgatcatgagcatcctctgc

SEQ ID NO: 1994690 - DNA, 25 bp, Homo sapien
aatgcgctgggctccagatactcag

SEQ ID NO: 1994691 - DNA, 25 bp, Homo sapien
tacatctggtattccccaccaccac

SEQ ID NO: 1994692 - DNA, 25 bp, Homo sapien
cagatactcagctagatgctgtgtg

SEQ ID NO: 1994693 - DNA, 25 bp, Homo sapien
cagttttacaaatgcgctgggctcc

SEQ ID NO: 1994694 - DNA, 25 bp, Homo sapien
cagcaactggaacactgaagtaact

SEQ ID NO: 1994695 - DNA, 25 bp, Homo sapien
ctggaacactgaagtaacttccatc

SEQ ID NO: 1994696 - DNA, 25 bp, Homo sapien
gtgaagccctggctacaccagcaac

SEQ ID NO: 1994697 - DNA, 25 bp, Homo sapien
agccctggctacaccagcaactgga

SEQ ID NO: 1994698 - DNA, 25 bp, Homo sapien
tgctaacacttaagccctctgcaga

SEQ ID NO: 1994699 - DNA, 25 bp, Homo sapien
aaaagcagccacctcacgtgaaaaa

SEQ ID NO: 1994700 - DNA, 25 bp, Homo sapien
cactgccacggggctcacaaattca

SEQ ID NO: 1994701 - DNA, 25 bp, Homo sapien
ccacctcacgtgaaaaagcagaagg

SEQ ID NO: 1994702 - DNA, 25 bp, Homo sapien
gggaatagatgtgcagtagacatca

SEQ ID NO: 1994703 - DNA, 25 bp, Homo sapien
caagagactacatgaaacaactgaa

SEQ ID NO: 1994704 - DNA, 25 bp, Homo sapien
agacatcatgatgccatacttccac

SEQ ID NO: 1994705 - DNA, 25 bp, Homo sapien
tcaagagactacatgaaacaactga

SEQ ID NO: 1994706 - DNA, 25 bp, Homo sapien
tgatctgaggatagtcagagagagt

SEQ ID NO: 1994707 - DNA, 25 bp, Homo sapien
ttctgatctgaggatagtcagagag

SEQ ID NO: 1994708 - DNA, 25 bp, Homo sapien
tcatttgttggtatctgtctttcat

SEQ ID NO: 1994709 - DNA, 25 bp, Homo sapien
catttgttggtatctgtctttcatc

SEQ ID NO: 1994710 - DNA, 25 bp, Homo sapien
catagggtccttccttacattatag

SEQ ID NO: 1994711 - DNA, 25 bp, Homo sapien
tagaaatggatttgcgacctgcata

SEQ ID NO: 1994712 - DNA, 25 bp, Homo sapien
tatttaaccaacatacaacaggtgt

SEQ ID NO: 1994713 - DNA, 25 bp, Homo sapien
tattctaaatccatagggtccttcc

SEQ ID NO: 1994714 - DNA, 25 bp, Homo sapien
caagctctaggcattcggcactggg

SEQ ID NO: 1994715 - DNA, 25 bp, Homo sapien
ctaggcattcggcactgggcaaagg

SEQ ID NO: 1994716 - DNA, 25 bp, Homo sapien
tcagagcaagctctaggcattcggc

SEQ ID NO: 1994717 - DNA, 25 bp, Homo sapien
tcctttttcagagcaagctctaggc

SEQ ID NO: 1994718 - DNA, 25 bp, Homo sapien
tggctcctacttggtcctcccaaaa

SEQ ID NO: 1994719 - DNA, 25 bp, Homo sapien
ctccatgtctggctcctacttggtc

SEQ ID NO: 1994720 - DNA, 25 bp, Homo sapien
atgtctggctcctacttggtcctcc

SEQ ID NO: 1994721 - DNA, 25 bp, Homo sapien
catgtctggctcctacttggtcctc

SEQ ID NO: 1994722 - DNA, 25 bp, Homo sapien
tatcctgcttctagtttctccaagt

SEQ ID NO: 1994723 - DNA, 25 bp, Homo sapien
gaccacagaggtcacagcaagggcc

SEQ ID NO: 1994724 - DNA, 25 bp, Homo sapien
cctgctgtttctcactgaccacaga

SEQ ID NO: 1994725 - DNA, 25 bp, Homo sapien
caagtccctgaagccctgctgtttc

SEQ ID NO: 1994726 - DNA, 25 bp, Homo sapien
tctgatgagctagacttgaggcagg

SEQ ID NO: 1994727 - DNA, 25 bp, Homo sapien
taaataatgtccaatctcaggccaa

SEQ ID NO: 1994728 - DNA, 25 bp, Homo sapien
caggaggacaggcatcatatatctt

SEQ ID NO: 1994729 - DNA, 25 bp, Homo sapien
gctaagggcaacaggcagtcttgaa

SEQ ID NO: 1994730 - DNA, 25 bp, Homo sapien
ctgatctctccagattattaaatgg

SEQ ID NO: 1994731 - DNA, 25 bp, Homo sapien
ctccagattattaaatggtttctct

SEQ ID NO: 1994732 - DNA, 25 bp, Homo sapien
ctctccagattattaaatggtttct

SEQ ID NO: 1994733 - DNA, 25 bp, Homo sapien
gatctctccagattattaaatggtt

SEQ ID NO: 1994734 - DNA, 25 bp, Homo sapien
acatccttcttcacgcggtggcagg

SEQ ID NO: 1994735 - DNA, 25 bp, Homo sapien
caaacacatccttcttcacgcggtg

SEQ ID NO: 1994736 - DNA, 25 bp, Homo sapien
aacacatccttcttcacgcggtggc

SEQ ID NO: 1994737 - DNA, 25 bp, Homo sapien
cacatccttcttcacgcggtggcag

SEQ ID NO: 1994738 - DNA, 25 bp, Homo sapien
cagtgcacggaagaatgataaagca

SEQ ID NO: 1994739 - DNA, 25 bp, Homo sapien
tcggatgagagaagtatagactctg

SEQ ID NO: 1994740 - DNA, 25 bp, Homo sapien
gaatgataaagcaatcttctcggat

SEQ ID NO: 1994741 - DNA, 25 bp, Homo sapien
gcaatcttctcggatgagagaagta

SEQ ID NO: 1994742 - DNA, 25 bp, Homo sapien
taccaggttagcaagctttctgatg

SEQ ID NO: 1994743 - DNA, 25 bp, Homo sapien
tcaataccaggttagcaagctttct

SEQ ID NO: 1994744 - DNA, 25 bp, Homo sapien
taattgtcaataccaggttagcaag

SEQ ID NO: 1994745 - DNA, 25 bp, Homo sapien
ccaggttagcaagctttctgatgga

SEQ ID NO: 1994746 - DNA, 25 bp, Homo sapien
tgtggttactcatggtgcctcaact

SEQ ID NO: 1994747 - DNA, 25 bp, Homo sapien
gggcatccttgtagcaccctttatg

SEQ ID NO: 1994748 - DNA, 25 bp, Homo sapien
ttggtcagactttcatacagtatcg

SEQ ID NO: 1994749 - DNA, 25 bp, Homo sapien
catacagtatcgtcttgtcttttcc

SEQ ID NO: 1994750 - DNA, 25 bp, Homo sapien
acagctgggaagctgactgcaggac

SEQ ID NO: 1994751 - DNA, 25 bp, Homo sapien
tcttcacattcttaatatccccggt

SEQ ID NO: 1994752 - DNA, 25 bp, Homo sapien
cattcttaatatccccggtgtcggg

SEQ ID NO: 1994753 - DNA, 25 bp, Homo sapien
cccggtgtcggggagaattacagct

SEQ ID NO: 1994754 - DNA, 25 bp, Homo sapien
tcatcgcataccctcaggcaatggg

SEQ ID NO: 1994755 - DNA, 25 bp, Homo sapien
tcacaccagaagaactattcttcat

SEQ ID NO: 1994756 - DNA, 25 bp, Homo sapien
ggtcagtggcaacccagtggatcct

SEQ ID NO: 1994757 - DNA, 25 bp, Homo sapien
tcctgttggttattagatgtgtcgt

SEQ ID NO: 1994758 - DNA, 25 bp, Homo sapien
gatttgagtattcatcctgaagtga

SEQ ID NO: 1994759 - DNA, 25 bp, Homo sapien
caaatcctttcactgtaatctgcat

SEQ ID NO: 1994760 - DNA, 25 bp, Homo sapien
cctgaagtgatccaaatcctttcac

SEQ ID NO: 1994761 - DNA, 25 bp, Homo sapien
tgggatttgagtattcatcctgaag

SEQ ID NO: 1994762 - DNA, 25 bp, Homo sapien
gggagacaaggggagaaggctgcag

SEQ ID NO: 1994763 - DNA, 25 bp, Homo sapien
aagggagacaaggggagaaggctgc

SEQ ID NO: 1994764 - DNA, 25 bp, Homo sapien
ctgcaagggagacaaggggagaagg

SEQ ID NO: 1994765 - DNA, 25 bp, Homo sapien
gcaagggagacaaggggagaaggct

SEQ ID NO: 1994766 - DNA, 25 bp, Homo sapien
gaccagataatccttagtgacagca

SEQ ID NO: 1994767 - DNA, 25 bp, Homo sapien
tgcagctgactctccacgtttgggt

SEQ ID NO: 1994768 - DNA, 25 bp, Homo sapien
gaccacttccacaagacttcagaga

SEQ ID NO: 1994769 - DNA, 25 bp, Homo sapien
cactttgctttacgcccctggttat

SEQ ID NO: 1994770 - DNA, 25 bp, Homo sapien
tcttttgtaaagcatggtaatttga

SEQ ID NO: 1994771 - DNA, 25 bp, Homo sapien
agagctgggaagaccttcttgtcca

SEQ ID NO: 1994772 - DNA, 25 bp, Homo sapien
gaataccaggacaagataaaacagt

SEQ ID NO: 1994773 - DNA, 25 bp, Homo sapien
ggaagaccttcttgtccattctttc

SEQ ID NO: 1994774 - DNA, 25 bp, Homo sapien
ttttccagatatttggcactgacac

SEQ ID NO: 1994775 - DNA, 25 bp, Homo sapien
cagatatttggcactgacacccttg

SEQ ID NO: 1994776 - DNA, 25 bp, Homo sapien
atatttggcactgacacccttgcat

SEQ ID NO: 1994777 - DNA, 25 bp, Homo sapien
tccagatatttggcactgacaccct

SEQ ID NO: 1994778 - DNA, 25 bp, Homo sapien
tttgtcccagtgtgattaatttcat

SEQ ID NO: 1994779 - DNA, 25 bp, Homo sapien
tttattttgtcccagtgtgattaat

SEQ ID NO: 1994780 - DNA, 25 bp, Homo sapien
catttattttgtcccagtgtgatta

SEQ ID NO: 1994781 - DNA, 25 bp, Homo sapien
tattttgtcccagtgtgattaattt

SEQ ID NO: 1994782 - DNA, 25 bp, Homo sapien
gcagtgaaacgttacattggtttta

SEQ ID NO: 1994783 - DNA, 25 bp, Homo sapien
ccataagggttgaattgagaactgc

SEQ ID NO: 1994784 - DNA, 25 bp, Homo sapien
ttaccctccataagggttgaattga

SEQ ID NO: 1994785 - DNA, 25 bp, Homo sapien
tagagggcagtgaaacgttacattg

SEQ ID NO: 1994786 - DNA, 25 bp, Homo sapien
aagtcaatgattccaataggagttt

SEQ ID NO: 1994787 - DNA, 25 bp, Homo sapien
gtcaatgattccaataggagttttt

SEQ ID NO: 1994788 - DNA, 25 bp, Homo sapien
ccaagtcaatgattccaataggagt

SEQ ID NO: 1994789 - DNA, 25 bp, Homo sapien
tcaatgattccaataggagtttttt

SEQ ID NO: 1994790 - DNA, 25 bp, Homo sapien
gaatgatcttagagtgatcttcccc

SEQ ID NO: 1994791 - DNA, 25 bp, Homo sapien
gatcttccccatggtgcattgactt

SEQ ID NO: 1994792 - DNA, 25 bp, Homo sapien
tatttgccaactgtccttctcttac

SEQ ID NO: 1994793 - DNA, 25 bp, Homo sapien
gaatgcgccatgtatttcctagaga

SEQ ID NO: 1994794 - DNA, 25 bp, Homo sapien
caggagttgagaagtcagattgtat

SEQ ID NO: 1994795 - DNA, 25 bp, Homo sapien
gatccccggaaggtcatatggagca

SEQ ID NO: 1994796 - DNA, 25 bp, Homo sapien
tgaagccagaaaaacgaaacccaga

SEQ ID NO: 1994797 - DNA, 25 bp, Homo sapien
ggctgccctgttgtgttgagaaaat

SEQ ID NO: 1994798 - DNA, 25 bp, Homo sapien
ttggcaaggcctttttcaggtacca

SEQ ID NO: 1994799 - DNA, 25 bp, Homo sapien
aggcctttttcaggtaccaggtcat

SEQ ID NO: 1994800 - DNA, 25 bp, Homo sapien
tggcaaggcctttttcaggtaccag

SEQ ID NO: 1994801 - DNA, 25 bp, Homo sapien
ccttctgatgcataattcattttca

SEQ ID NO: 1994802 - DNA, 25 bp, Homo sapien
tgcacacgcaatcgcttttttggca

SEQ ID NO: 1994803 - DNA, 25 bp, Homo sapien
catattgtaatttgaagatgctgaa

SEQ ID NO: 1994804 - DNA, 25 bp, Homo sapien
tttcactttgttactggtgctgcac

SEQ ID NO: 1994805 - DNA, 25 bp, Homo sapien
atcagcaacctgatacctgttcctg

SEQ ID NO: 1994806 - DNA, 25 bp, Homo sapien
ggcatgtctttaccaatttctcctt

SEQ ID NO: 1994807 - DNA, 25 bp, Homo sapien
ggcagaggaaactgattcccctttg

SEQ ID NO: 1994808 - DNA, 25 bp, Homo sapien
tgttagcaaagtagtcaatgggcat

SEQ ID NO: 1994809 - DNA, 25 bp, Homo sapien
tgtcaaaaattacaacctcagcgtt

SEQ ID NO: 1994810 - DNA, 25 bp, Homo sapien
caggcagctctgtcaacgtgaacag

SEQ ID NO: 1994811 - DNA, 25 bp, Homo sapien
cacttaaaagtgtcagtgagaaggg

SEQ ID NO: 1994812 - DNA, 25 bp, Homo sapien
gcccaggaacattactgtcaaaaat

SEQ ID NO: 1994813 - DNA, 25 bp, Homo sapien
caggcgattaattcaacctccattt

SEQ ID NO: 1994814 - DNA, 25 bp, Homo sapien
tttgctgaatggcaggttttgttcc

SEQ ID NO: 1994815 - DNA, 25 bp, Homo sapien
tcaggcgattaattcaacctccatt

SEQ ID NO: 1994816 - DNA, 25 bp, Homo sapien
tcctttgctgaatggcaggttttgt

SEQ ID NO: 1994817 - DNA, 25 bp, Homo sapien
gaatcggtggtctctcacactggtg

SEQ ID NO: 1994818 - DNA, 25 bp, Homo sapien
cttcaagaaaccagctccaatttca

SEQ ID NO: 1994819 - DNA, 25 bp, Homo sapien
ttcaatagcgtttttctgaatagga

SEQ ID NO: 1994820 - DNA, 25 bp, Homo sapien
ccatcgtttaggtatgaaagccacc

SEQ ID NO: 1994821 - DNA, 25 bp, Homo sapien
tttgtttccacccattttagtagca

SEQ ID NO: 1994822 - DNA, 25 bp, Homo sapien
ttgtttccacccattttagtagcat

SEQ ID NO: 1994823 - DNA, 25 bp, Homo sapien
catatttatgagctcgctctcagct

SEQ ID NO: 1994824 - DNA, 25 bp, Homo sapien
gcatttcgaaacctcatatttatga

SEQ ID NO: 1994825 - DNA, 25 bp, Homo sapien
caaccgtctggttgcatttcgaaac

SEQ ID NO: 1994826 - DNA, 25 bp, Homo sapien
tataggttttgcaaccgtctggttg

SEQ ID NO: 1994827 - DNA, 25 bp, Homo sapien
gcactcttagtaagccaattccctt

SEQ ID NO: 1994828 - DNA, 25 bp, Homo sapien
cactcttagtaagccaattccctta

SEQ ID NO: 1994829 - DNA, 25 bp, Homo sapien
agcactcttagtaagccaattccct

SEQ ID NO: 1994830 - DNA, 25 bp, Homo sapien
cacgaatcatcagggatggatgctt

SEQ ID NO: 1994831 - DNA, 25 bp, Homo sapien
cagaggataaacagctggatgatca

SEQ ID NO: 1994832 - DNA, 25 bp, Homo sapien
ttagttctagcaaggtctcaggttc

SEQ ID NO: 1994833 - DNA, 25 bp, Homo sapien
tggatgatcagggacacacgaatca

SEQ ID NO: 1994834 - DNA, 25 bp, Homo sapien
accctgactgactgagagtgtaaac

SEQ ID NO: 1994835 - DNA, 25 bp, Homo sapien
gactgactgagagtgtaaacaccta

SEQ ID NO: 1994836 - DNA, 25 bp, Homo sapien
tgagaaataagcttgggttgaaccc

SEQ ID NO: 1994837 - DNA, 25 bp, Homo sapien
aataagcttgggttgaaccctgact

SEQ ID NO: 1994838 - DNA, 25 bp, Homo sapien
gtggaaagccttgagcctgctacct

SEQ ID NO: 1994839 - DNA, 25 bp, Homo sapien
tattcaggtcagattggaaggtcct

SEQ ID NO: 1994840 - DNA, 25 bp, Homo sapien
gcctcacagaactgatattcaggtc

SEQ ID NO: 1994841 - DNA, 25 bp, Homo sapien
ccttttgtgagctccgtggaaagcc

SEQ ID NO: 1994842 - DNA, 25 bp, Homo sapien
aaaagctgccgactagatgtggttt

SEQ ID NO: 1994843 - DNA, 25 bp, Homo sapien
taaaaagctgccgactagatgtggt

SEQ ID NO: 1994844 - DNA, 25 bp, Homo sapien
ctgtaaaaagctgccgactagatgt

SEQ ID NO: 1994845 - DNA, 25 bp, Homo sapien
aagctgccgactagatgtggttttt

SEQ ID NO: 1994846 - DNA, 25 bp, Homo sapien
ctgaagagaataaagctttgccgaa

SEQ ID NO: 1994847 - DNA, 25 bp, Homo sapien
tcacaagttttcagtacctcctacg

SEQ ID NO: 1994848 - DNA, 25 bp, Homo sapien
tgctgaagagaataaagctttgccg

SEQ ID NO: 1994849 - DNA, 25 bp, Homo sapien
tacctcctacgatgcccagcatagt

SEQ ID NO: 1994850 - DNA, 25 bp, Homo sapien
catcaggcccttcgtcgacttttgg

SEQ ID NO: 1994851 - DNA, 25 bp, Homo sapien
atcaggcccttcgtcgacttttggg

SEQ ID NO: 1994852 - DNA, 25 bp, Homo sapien
cagcagctgctgttacattaggttg

SEQ ID NO: 1994853 - DNA, 25 bp, Homo sapien
ctatcaattctcatgcttcggggca

SEQ ID NO: 1994854 - DNA, 25 bp, Homo sapien
tgggtaaaattataaggcctatcaa

SEQ ID NO: 1994855 - DNA, 25 bp, Homo sapien
taatcagatagcaagcaccaaggac

SEQ ID NO: 1994856 - DNA, 25 bp, Homo sapien
gaaattgcagtggtccgtagttgaa

SEQ ID NO: 1994857 - DNA, 25 bp, Homo sapien
ggtccgtagttgaaggctttcactc

SEQ ID NO: 1994858 - DNA, 25 bp, Homo sapien
ttgcagtggtccgtagttgaaggct

SEQ ID NO: 1994859 - DNA, 25 bp, Homo sapien
gcagtggtccgtagttgaaggcttt

SEQ ID NO: 1994860 - DNA, 25 bp, Homo sapien
tagctgctgtgtggcgttagtcccc

SEQ ID NO: 1994861 - DNA, 25 bp, Homo sapien
gataacctgacatgtactggagata

SEQ ID NO: 1994862 - DNA, 25 bp, Homo sapien
cctttgcaggataggcagttcccaa

SEQ ID NO: 1994863 - DNA, 25 bp, Homo sapien
gaaaaagtacctcgctcggagaaga

SEQ ID NO: 1994864 - DNA, 25 bp, Homo sapien
agtggtatcataggtctcccctcca

SEQ ID NO: 1994865 - DNA, 25 bp, Homo sapien
ctttagctacccagttcaggaccat

SEQ ID NO: 1994866 - DNA, 25 bp, Homo sapien
tcccctccacgcaagatctgtgaag

SEQ ID NO: 1994867 - DNA, 25 bp, Homo sapien
gaaaccagaaatcccttgccctgag

SEQ ID NO: 1994868 - DNA, 25 bp, Homo sapien
tattctgctccctggagagtatcat

SEQ ID NO: 1994869 - DNA, 25 bp, Homo sapien
ctgagtttcaactatatgtacatca

SEQ ID NO: 1994870 - DNA, 25 bp, Homo sapien
gagtttcaactatatgtacatcatc

SEQ ID NO: 1994871 - DNA, 25 bp, Homo sapien
gtttcaactatatgtacatcatcca

SEQ ID NO: 1994872 - DNA, 25 bp, Homo sapien
actatatgtacatcatccatcagct

SEQ ID NO: 1994873 - DNA, 25 bp, Homo sapien
aaacatcagaataagtgattttatc

SEQ ID NO: 1994874 - DNA, 25 bp, Homo sapien
tcagaataagtgattttatctcctc

SEQ ID NO: 1994875 - DNA, 25 bp, Homo sapien
gtcaaagagactatgatgaaaacat

SEQ ID NO: 1994876 - DNA, 25 bp, Homo sapien
caaagagactatgatgaaaacatca

SEQ ID NO: 1994877 - DNA, 25 bp, Homo sapien
tgttgtatcttcagagagcactgga

SEQ ID NO: 1994878 - DNA, 25 bp, Homo sapien
acatttattcatcggactctgaaat

SEQ ID NO: 1994879 - DNA, 25 bp, Homo sapien
ctaactgattgttgtatcttcagag

SEQ ID NO: 1994880 - DNA, 25 bp, Homo sapien
aagcaaagagtgtgacatttattca

SEQ ID NO: 1994881 - DNA, 25 bp, Homo sapien
tttcctcatcaccaaacttttctct

SEQ ID NO: 1994882 - DNA, 25 bp, Homo sapien
tctttcctcatcaccaaacttttct

SEQ ID NO: 1994883 - DNA, 25 bp, Homo sapien
ttcctcatcaccaaacttttctctc

SEQ ID NO: 1994884 - DNA, 25 bp, Homo sapien
ctgtaatggcctcttgcaagcttcc

SEQ ID NO: 1994885 - DNA, 25 bp, Homo sapien
gataatgtgacgtaatataatgtag

SEQ ID NO: 1994886 - DNA, 25 bp, Homo sapien
tgctcctccgggtatacatataaag

SEQ ID NO: 1994887 - DNA, 25 bp, Homo sapien
tgtagattaaatgcccatcgtccaa

SEQ ID NO: 1994888 - DNA, 25 bp, Homo sapien
tgaacacgagcttgagtatgtgaga

SEQ ID NO: 1994889 - DNA, 25 bp, Homo sapien
tggtgtgtcatccagtcgggagtac

SEQ ID NO: 1994890 - DNA, 25 bp, Homo sapien
gaattttgctctcaagattatgtta

SEQ ID NO: 1994891 - DNA, 25 bp, Homo sapien
caagatccccattcctaggtataga

SEQ ID NO: 1994892 - DNA, 25 bp, Homo sapien
gagaattaccatttaagccaagatc

SEQ ID NO: 1994893 - DNA, 25 bp, Homo sapien
taagaacagaccgtttgtcgagatc

SEQ ID NO: 1994894 - DNA, 25 bp, Homo sapien
cgtttgtcgagatctgcttctagca

SEQ ID NO: 1994895 - DNA, 25 bp, Homo sapien
gaacagaccgtttgtcgagatctgc

SEQ ID NO: 1994896 - DNA, 25 bp, Homo sapien
ttctactaagaacagaccgtttgtc

SEQ ID NO: 1994897 - DNA, 25 bp, Homo sapien
gcagcataccagcatttgccatcct

SEQ ID NO: 1994898 - DNA, 25 bp, Homo sapien
cattgaagcaggcagcataccagca

SEQ ID NO: 1994899 - DNA, 25 bp, Homo sapien
gtccttcctgccattgaagcaggca

SEQ ID NO: 1994900 - DNA, 25 bp, Homo sapien
gcaggcagcataccagcatttgcca

SEQ ID NO: 1994901 - DNA, 25 bp, Homo sapien
gcaaatacaatcagcgatactgagg

SEQ ID NO: 1994902 - DNA, 25 bp, Homo sapien
acagcaaatacaatcagcgatactg

SEQ ID NO: 1994903 - DNA, 25 bp, Homo sapien
tacaatcagcgatactgaggatagg

SEQ ID NO: 1994904 - DNA, 25 bp, Homo sapien
aatacaatcagcgatactgaggata

SEQ ID NO: 1994905 - DNA, 25 bp, Homo sapien
cctgagccttagttgaggatgttgc

SEQ ID NO: 1994906 - DNA, 25 bp, Homo sapien
ccaaatgtgaagtttgtcctgcccc

SEQ ID NO: 1994907 - DNA, 25 bp, Homo sapien
tattgcataggttttaagacaggtg

SEQ ID NO: 1994908 - DNA, 25 bp, Homo sapien
tattgttgattagtgtgctctccca

SEQ ID NO: 1994909 - DNA, 25 bp, Homo sapien
tttgatccaggtctggaatttttca

SEQ ID NO: 1994910 - DNA, 25 bp, Homo sapien
agacaggccattatatccacatgat

SEQ ID NO: 1994911 - DNA, 25 bp, Homo sapien
tatccacatgatggttaagggcctc

SEQ ID NO: 1994912 - DNA, 25 bp, Homo sapien
catgatggttaagggcctcctccac

SEQ ID NO: 1994913 - DNA, 25 bp, Homo sapien
caatagccagtagacaggccattat

SEQ ID NO: 1994914 - DNA, 25 bp, Homo sapien
acatccacaagaacagtaatcaagg

SEQ ID NO: 1994915 - DNA, 25 bp, Homo sapien
gtaatcaaggttatgttaacattga

SEQ ID NO: 1994916 - DNA, 25 bp, Homo sapien
gattagtgttatatgtgacatccac

SEQ ID NO: 1994917 - DNA, 25 bp, Homo sapien
tacagaggtgaagtccctttgatgt

SEQ ID NO: 1994918 - DNA, 25 bp, Homo sapien
agatctttcaagtcatacatatcag

SEQ ID NO: 1994919 - DNA, 25 bp, Homo sapien
taagtcgctcacagtcatctactgc

SEQ ID NO: 1994920 - DNA, 25 bp, Homo sapien
gatacttctcttaatgttgacaatg

SEQ ID NO: 1994921 - DNA, 25 bp, Homo sapien
cttttctaagatccagcttaagatc

SEQ ID NO: 1994922 - DNA, 25 bp, Homo sapien
ctgggtatttcagctcacagtagtc

SEQ ID NO: 1994923 - DNA, 25 bp, Homo sapien
ccctgggtatttcagctcacagtag

SEQ ID NO: 1994924 - DNA, 25 bp, Homo sapien
gtgttccctgggtatttcagctcac

SEQ ID NO: 1994925 - DNA, 25 bp, Homo sapien
ttccctgggtatttcagctcacagt

SEQ ID NO: 1994926 - DNA, 25 bp, Homo sapien
attcagtttcatggacatgcacgtc

SEQ ID NO: 1994927 - DNA, 25 bp, Homo sapien
tgggagtggttaagcacagtagcct

SEQ ID NO: 1994928 - DNA, 25 bp, Homo sapien
catggacatgcacgtctccacattc

SEQ ID NO: 1994929 - DNA, 25 bp, Homo sapien
cagtagcctgtagcacatattccag

SEQ ID NO: 1994930 - DNA, 25 bp, Homo sapien
cagcatatggaggtctcttctcgga

SEQ ID NO: 1994931 - DNA, 25 bp, Homo sapien
gcatcagcctttctgtgcgcagcca

SEQ ID NO: 1994932 - DNA, 25 bp, Homo sapien
tgcgcagccagtgttgagctacaat

SEQ ID NO: 1994933 - DNA, 25 bp, Homo sapien
gaacaagtgtatggcagctgctact

SEQ ID NO: 1994934 - DNA, 25 bp, Homo sapien
agcatgcagccataatgctgaagtg

SEQ ID NO: 1994935 - DNA, 25 bp, Homo sapien
gaggaagcatgcagccataatgctg

SEQ ID NO: 1994936 - DNA, 25 bp, Homo sapien
ctgaggaagcatgcagccataatgc

SEQ ID NO: 1994937 - DNA, 25 bp, Homo sapien
gaagcatgcagccataatgctgaag

SEQ ID NO: 1994938 - DNA, 25 bp, Homo sapien
gatgttctccgatgattatttcttt

SEQ ID NO: 1994939 - DNA, 25 bp, Homo sapien
cttttctgtactccctgaggatgtt

SEQ ID NO: 1994940 - DNA, 25 bp, Homo sapien
ggatgttctccgatgattatttctt

SEQ ID NO: 1994941 - DNA, 25 bp, Homo sapien
tttagcatcatctgcaaaccagtac

SEQ ID NO: 1994942 - DNA, 25 bp, Homo sapien
cccaatttagcatcatctgcaaacc

SEQ ID NO: 1994943 - DNA, 25 bp, Homo sapien
gttgacctttcttcccaatttagca

SEQ ID NO: 1994944 - DNA, 25 bp, Homo sapien
tagcatcatctgcaaaccagtacat

SEQ ID NO: 1994945 - DNA, 25 bp, Homo sapien
tatacaggatttgtaattgctgaag

SEQ ID NO: 1994946 - DNA, 25 bp, Homo sapien
gtcagaccattgataaaagtggatc

SEQ ID NO: 1994947 - DNA, 25 bp, Homo sapien
cccaaacaagccagactgtcagaga

SEQ ID NO: 1994948 - DNA, 25 bp, Homo sapien
tcagtaatgtaaattggccccaaac

SEQ ID NO: 1994949 - DNA, 25 bp, Homo sapien
atgggctcttcctatattgaagatt

SEQ ID NO: 1994950 - DNA, 25 bp, Homo sapien
tgggctcttcctatattgaagattt

SEQ ID NO: 1994951 - DNA, 25 bp, Homo sapien
aatgggctcttcctatattgaagat

SEQ ID NO: 1994952 - DNA, 25 bp, Homo sapien
gggtttagtatctaatctgacgcgg

SEQ ID NO: 1994953 - DNA, 25 bp, Homo sapien
ggacctttttagtatgcagttacat

SEQ ID NO: 1994954 - DNA, 25 bp, Homo sapien
tgcacgagcttctggacctttttag

SEQ ID NO: 1994955 - DNA, 25 bp, Homo sapien
gtcagtattataaattagttgcacg

SEQ ID NO: 1994956 - DNA, 25 bp, Homo sapien
tataaattagttgcacgagcttctg

SEQ ID NO: 1994957 - DNA, 25 bp, Homo sapien
tgttcctatcccctgaagcttcact

SEQ ID NO: 1994958 - DNA, 25 bp, Homo sapien
ctgttcctatcccctgaagcttcac

SEQ ID NO: 1994959 - DNA, 25 bp, Homo sapien
tatcccctgaagcttcactcttctc

SEQ ID NO: 1994960 - DNA, 25 bp, Homo sapien
cccctgaagcttcactcttctccat

SEQ ID NO: 1994961 - DNA, 25 bp, Homo sapien
gtatttcttagccaatgtactctct

SEQ ID NO: 1994962 - DNA, 25 bp, Homo sapien
gagtatacgtttcacgaacatttat

SEQ ID NO: 1994963 - DNA, 25 bp, Homo sapien
agtatttcttagccaatgtactctc

SEQ ID NO: 1994964 - DNA, 25 bp, Homo sapien
ttgagtatacgtttcacgaacattt

SEQ ID NO: 1994965 - DNA, 25 bp, Homo sapien
cttgatggcctggacaagaccttta

SEQ ID NO: 1994966 - DNA, 25 bp, Homo sapien
gatatattaagccacattccttaag

SEQ ID NO: 1994967 - DNA, 25 bp, Homo sapien
taagcttctgatatattaagccaca

SEQ ID NO: 1994968 - DNA, 25 bp, Homo sapien
tggacaagacctttaggattgtccc

SEQ ID NO: 1994969 - DNA, 25 bp, Homo sapien
aatcacacagtgttttgcatccaaa

SEQ ID NO: 1994970 - DNA, 25 bp, Homo sapien
gaccaacataatgaacaatgcattc

SEQ ID NO: 1994971 - DNA, 25 bp, Homo sapien
acagtgttttgcatccaaagttcac

SEQ ID NO: 1994972 - DNA, 25 bp, Homo sapien
gttttgcatccaaagttcactttct

SEQ ID NO: 1994973 - DNA, 25 bp, Homo sapien
ttaagatcgaatttggtgccccatg

SEQ ID NO: 1994974 - DNA, 25 bp, Homo sapien
caattacgctatttgcatccatggc

SEQ ID NO: 1994975 - DNA, 25 bp, Homo sapien
atagggcagaaggagtattcgttcc

SEQ ID NO: 1994976 - DNA, 25 bp, Homo sapien
attgcctccacttaaaaggatggga

SEQ ID NO: 1994977 - DNA, 25 bp, Homo sapien
ctttgtctacttccgtatccaaaat

SEQ ID NO: 1994978 - DNA, 25 bp, Homo sapien
tctacttccgtatccaaaattgtgt

SEQ ID NO: 1994979 - DNA, 25 bp, Homo sapien
tgtctacttccgtatccaaaattgt

SEQ ID NO: 1994980 - DNA, 25 bp, Homo sapien
cttccgtatccaaaattgtgtctat

SEQ ID NO: 1994981 - DNA, 25 bp, Homo sapien
tgtcactacttcctctcaatttctg

SEQ ID NO: 1994982 - DNA, 25 bp, Homo sapien
ttgtctctgtcactacttcctctca

SEQ ID NO: 1994983 - DNA, 25 bp, Homo sapien
tcctttgtctctgtcactacttcct

SEQ ID NO: 1994984 - DNA, 25 bp, Homo sapien
ttcctctcaatttctgtgacctcat

SEQ ID NO: 1994985 - DNA, 25 bp, Homo sapien
tctctccagtataatgaatagcaaa

SEQ ID NO: 1994986 - DNA, 25 bp, Homo sapien
ttttctctacatttcgcctttgtaa

SEQ ID NO: 1994987 - DNA, 25 bp, Homo sapien
ttctctacatttcgcctttgtaatg

SEQ ID NO: 1994988 - DNA, 25 bp, Homo sapien
atgtctctccagtataatgaatagc

SEQ ID NO: 1994989 - DNA, 25 bp, Homo sapien
ccaaatcatttggttttccctccat

SEQ ID NO: 1994990 - DNA, 25 bp, Homo sapien
cttcagaagtattagcagcttggaa

SEQ ID NO: 1994991 - DNA, 25 bp, Homo sapien
ttcagaagtattagcagcttggaat

SEQ ID NO: 1994992 - DNA, 25 bp, Homo sapien
cagaagtattagcagcttggaatgt

SEQ ID NO: 1994993 - DNA, 25 bp, Homo sapien
tcagaagtattagcagcttggaatg

SEQ ID NO: 1994994 - DNA, 25 bp, Homo sapien
tgtaattctccaatcccaactgtca

SEQ ID NO: 1994995 - DNA, 25 bp, Homo sapien
gaaacagcctgtttctggcagccgt

SEQ ID NO: 1994996 - DNA, 25 bp, Homo sapien
tgttgaaggctctttcatcgttcca

SEQ ID NO: 1994997 - DNA, 25 bp, Homo sapien
tggcagccgtaattcctattctgaa

SEQ ID NO: 1994998 - DNA, 25 bp, Homo sapien
ttattgatgagtggcattgcttggt

SEQ ID NO: 1994999 - DNA, 25 bp, Homo sapien
ttccacggtacacacagatgcgcag

SEQ ID NO: 1995000 - DNA, 25 bp, Homo sapien
tggtggcaagtgacatcgcagaaca

SEQ ID NO: 1995001 - DNA, 25 bp, Homo sapien
aatgagtcattacttattacatcca

SEQ ID NO: 1995002 - DNA, 25 bp, Homo sapien
gtgaatagattcagctctgcaaggg

SEQ ID NO: 1995003 - DNA, 25 bp, Homo sapien
gcatcaagagaatcaacgctttttg

SEQ ID NO: 1995004 - DNA, 25 bp, Homo sapien
tattagaacaattcccagcagaggc

SEQ ID NO: 1995005 - DNA, 25 bp, Homo sapien
tctgcaagggcctgaatatgaaata

SEQ ID NO: 1995006 - DNA, 25 bp, Homo sapien
gttggagatccatgggaacctatga

SEQ ID NO: 1995007 - DNA, 25 bp, Homo sapien
ggcatgttttacaaatgatccccat

SEQ ID NO: 1995008 - DNA, 25 bp, Homo sapien
taaaaattccataggtaggcagtaa

SEQ ID NO: 1995009 - DNA, 25 bp, Homo sapien
taggaactcccaggattattgatgg

SEQ ID NO: 1995010 - DNA, 25 bp, Homo sapien
tggtggatctttatagagcaaattg

SEQ ID NO: 1995011 - DNA, 25 bp, Homo sapien
agtttgttgtaagttcctgctaaat

SEQ ID NO: 1995012 - DNA, 25 bp, Homo sapien
taagtttgttgtaagttcctgctaa

SEQ ID NO: 1995013 - DNA, 25 bp, Homo sapien
aatgtggtggatctttatagagcaa

SEQ ID NO: 1995014 - DNA, 25 bp, Homo sapien
ctagtaagaaagtgggcagagattc

SEQ ID NO: 1995015 - DNA, 25 bp, Homo sapien
gctgttgtggaccaacagatcttgt

SEQ ID NO: 1995016 - DNA, 25 bp, Homo sapien
gaccaacagatcttgtccataacca

SEQ ID NO: 1995017 - DNA, 25 bp, Homo sapien
tgtggaccaacagatcttgtccata

SEQ ID NO: 1995018 - DNA, 25 bp, Homo sapien
aacagatcttgtccataaccagtaa

SEQ ID NO: 1995019 - DNA, 25 bp, Homo sapien
cctttgtctggcttgctcatcttta

SEQ ID NO: 1995020 - DNA, 25 bp, Homo sapien
cccacttgctgctgtacgggtgaca

SEQ ID NO: 1995021 - DNA, 25 bp, Homo sapien
ctgctgtacgggtgacagcaaacct

SEQ ID NO: 1995022 - DNA, 25 bp, Homo sapien
ccctttgtctggcttgctcatcttt

SEQ ID NO: 1995023 - DNA, 25 bp, Homo sapien
atatttcccccatagggtgagtatt

SEQ ID NO: 1995024 - DNA, 25 bp, Homo sapien
catatttcccccatagggtgagtat

SEQ ID NO: 1995025 - DNA, 25 bp, Homo sapien
tcatatttcccccatagggtgagta

SEQ ID NO: 1995026 - DNA, 25 bp, Homo sapien
cctgtatgaaatatggcccattgca

SEQ ID NO: 1995027 - DNA, 25 bp, Homo sapien
tgtatgaaatatggcccattgcatt

SEQ ID NO: 1995028 - DNA, 25 bp, Homo sapien
tttcctgtatgaaatatggcccatt

SEQ ID NO: 1995029 - DNA, 25 bp, Homo sapien
tcctgtatgaaatatggcccattgc

SEQ ID NO: 1995030 - DNA, 25 bp, Homo sapien
ctatgaatgaagtgaaggcatgtag

SEQ ID NO: 1995031 - DNA, 25 bp, Homo sapien
tgtcacatgggataatggtgcctct

SEQ ID NO: 1995032 - DNA, 25 bp, Homo sapien
tcacatgggataatggtgcctctga

SEQ ID NO: 1995033 - DNA, 25 bp, Homo sapien
ctttgtcacatgggataatggtgcc

SEQ ID NO: 1995034 - DNA, 25 bp, Homo sapien
ttgtcacatgggataatggtgcctc

SEQ ID NO: 1995035 - DNA, 25 bp, Homo sapien
cactggattcttgaggcttccctta

SEQ ID NO: 1995036 - DNA, 25 bp, Homo sapien
tctttcagtgtctatcctcatgctg

SEQ ID NO: 1995037 - DNA, 25 bp, Homo sapien
tatcctcatgctggtctgcactgga

SEQ ID NO: 1995038 - DNA, 25 bp, Homo sapien
agtgtctatcctcatgctggtctgc

SEQ ID NO: 1995039 - DNA, 25 bp, Homo sapien
gcacttggtcttcaattgttaagtc

SEQ ID NO: 1995040 - DNA, 25 bp, Homo sapien
ggtttgggcacttggtcttcaattg

SEQ ID NO: 1995041 - DNA, 25 bp, Homo sapien
ctgatacaaggggtttgggcacttg

SEQ ID NO: 1995042 - DNA, 25 bp, Homo sapien
ttaagatcgcactttggctgataca

SEQ ID NO: 1995043 - DNA, 25 bp, Homo sapien
gtgggtcctgcacacgactctgaag

SEQ ID NO: 1995044 - DNA, 25 bp, Homo sapien
tcctgcacacgactctgaagcaggc

SEQ ID NO: 1995045 - DNA, 25 bp, Homo sapien
tgggtcctgcacacgactctgaagc

SEQ ID NO: 1995046 - DNA, 25 bp, Homo sapien
ggtcctgcacacgactctgaagcag

SEQ ID NO: 1995047 - DNA, 25 bp, Homo sapien
caatatctctataggactgaatctc

SEQ ID NO: 1995048 - DNA, 25 bp, Homo sapien
gaatctcttcattcacaagttcatt

SEQ ID NO: 1995049 - DNA, 25 bp, Homo sapien
aatatctctataggactgaatctct

SEQ ID NO: 1995050 - DNA, 25 bp, Homo sapien
tctcttcattcacaagttcatttct

SEQ ID NO: 1995051 - DNA, 25 bp, Homo sapien
ttctgccggttaatgtactctatct

SEQ ID NO: 1995052 - DNA, 25 bp, Homo sapien
tgccggttaatgtactctatctttg

SEQ ID NO: 1995053 - DNA, 25 bp, Homo sapien
tccacaggggaaggttagctttgca

SEQ ID NO: 1995054 - DNA, 25 bp, Homo sapien
tgtccacaggggaaggttagctttg

SEQ ID NO: 1995055 - DNA, 25 bp, Homo sapien
cacaggggaaggttagctttgcaaa

SEQ ID NO: 1995056 - DNA, 25 bp, Homo sapien
ctgtccacaggggaaggttagcttt

SEQ ID NO: 1995057 - DNA, 25 bp, Homo sapien
aaatccatgtcattagcattgattt

SEQ ID NO: 1995058 - DNA, 25 bp, Homo sapien
ggtaaatccatgtcattagcattga

SEQ ID NO: 1995059 - DNA, 25 bp, Homo sapien
tggtaaatccatgtcattagcattg

SEQ ID NO: 1995060 - DNA, 25 bp, Homo sapien
gtaaatccatgtcattagcattgat

SEQ ID NO: 1995061 - DNA, 25 bp, Homo sapien
tctcattcgaagcactgttctttat

SEQ ID NO: 1995062 - DNA, 25 bp, Homo sapien
ttggctgctggcaggatatcagagg

SEQ ID NO: 1995063 - DNA, 25 bp, Homo sapien
ttccatgccaatggattcccagtgg

SEQ ID NO: 1995064 - DNA, 25 bp, Homo sapien
cagtggctccagacaactgctttct

SEQ ID NO: 1995065 - DNA, 25 bp, Homo sapien
tccctggatttgtgagtcgtgcggt

SEQ ID NO: 1995066 - DNA, 25 bp, Homo sapien
agggcgtcctgcgaaggctcagctc

SEQ ID NO: 1995067 - DNA, 25 bp, Homo sapien
tgtgtgcatttgaccaagggcgtcc

SEQ ID NO: 1995068 - DNA, 25 bp, Homo sapien
taatacagaaagattgggcttgttc

SEQ ID NO: 1995069 - DNA, 25 bp, Homo sapien
catggtcctgtacttcagtttcatt

SEQ ID NO: 1995070 - DNA, 25 bp, Homo sapien
ccatggtcctgtacttcagtttcat

SEQ ID NO: 1995071 - DNA, 25 bp, Homo sapien
cccatggtcctgtacttcagtttca

SEQ ID NO: 1995072 - DNA, 25 bp, Homo sapien
atggtcctgtacttcagtttcattt

SEQ ID NO: 1995073 - DNA, 25 bp, Homo sapien
gaaattgctcagtgtcgttagtgcc

SEQ ID NO: 1995074 - DNA, 25 bp, Homo sapien
tcttgattagaaattgctcagtgtc

SEQ ID NO: 1995075 - DNA, 25 bp, Homo sapien
catctttcttgattagaaattgctc

SEQ ID NO: 1995076 - DNA, 25 bp, Homo sapien
cagtgtcgttagtgcctggatccat

SEQ ID NO: 1995077 - DNA, 25 bp, Homo sapien
ctgcagggggccgtggccggtggct

SEQ ID NO: 1995078 - DNA, 25 bp, Homo sapien
ctggaccctgactgctccgggtcat

SEQ ID NO: 1995079 - DNA, 25 bp, Homo sapien
ggccgtggccggtggctggaccctg

SEQ ID NO: 1995080 - DNA, 25 bp, Homo sapien
gccggtggctggaccctgactgctc

SEQ ID NO: 1995081 - DNA, 25 bp, Homo sapien
agtcactttcattctcgcccggctg

SEQ ID NO: 1995082 - DNA, 25 bp, Homo sapien
cggccgattgtggaagtcactttca

SEQ ID NO: 1995083 - DNA, 25 bp, Homo sapien
ggcggccgattgtggaagtcacttt

SEQ ID NO: 1995084 - DNA, 25 bp, Homo sapien
tgtggaagtcactttcattctcgcc

SEQ ID NO: 1995085 - DNA, 25 bp, Homo sapien
tcttcacaggaaaaagcctcgttgc

SEQ ID NO: 1995086 - DNA, 25 bp, Homo sapien
ttttggatgtaaccacctccagagc

SEQ ID NO: 1995087 - DNA, 25 bp, Homo sapien
gataatttcaagagggtacgatggg

SEQ ID NO: 1995088 - DNA, 25 bp, Homo sapien
tcctgtgatatgtgacctagaagac

SEQ ID NO: 1995089 - DNA, 25 bp, Homo sapien
cttccggaagaacaggacaggccga

SEQ ID NO: 1995090 - DNA, 25 bp, Homo sapien
aaactgcttccggaagaacaggaca

SEQ ID NO: 1995091 - DNA, 25 bp, Homo sapien
tgcggttttccgctccccaaggatc

SEQ ID NO: 1995092 - DNA, 25 bp, Homo sapien
tggcagcatgagctgcggttttccg

SEQ ID NO: 1995093 - DNA, 25 bp, Homo sapien
gacactgtgtgccagatctttcctt

SEQ ID NO: 1995094 - DNA, 25 bp, Homo sapien
acactgtgtgccagatctttccttc

SEQ ID NO: 1995095 - DNA, 25 bp, Homo sapien
tcaatgggggtcaatgcaagcaccc

SEQ ID NO: 1995096 - DNA, 25 bp, Homo sapien
tgcaagcaccccaaacttcccagtt

SEQ ID NO: 1995097 - DNA, 25 bp, Homo sapien
acttcccagttgcttggccagtcat

SEQ ID NO: 1995098 - DNA, 25 bp, Homo sapien
tcttcaatgggggtcaatgcaagca

SEQ ID NO: 1995099 - DNA, 25 bp, Homo sapien
tttcggtcattaacctcttccacaa

SEQ ID NO: 1995100 - DNA, 25 bp, Homo sapien
ttatttcggtcattaacctcttcca

SEQ ID NO: 1995101 - DNA, 25 bp, Homo sapien
tcttccacaaccctttgatctcccc

SEQ ID NO: 1995102 - DNA, 25 bp, Homo sapien
cctcttccacaaccctttgatctcc

SEQ ID NO: 1995103 - DNA, 25 bp, Homo sapien
tttcataccaatgtagcacaggtgt

SEQ ID NO: 1995104 - DNA, 25 bp, Homo sapien
gacatgatggtcttcctaaagcaga

SEQ ID NO: 1995105 - DNA, 25 bp, Homo sapien
gcgtggtttcgcaggcatgtagtcc

SEQ ID NO: 1995106 - DNA, 25 bp, Homo sapien
ctaaagcagatatctaaccaggtct

SEQ ID NO: 1995107 - DNA, 25 bp, Homo sapien
tggagtttagtagtatgattgtagc

SEQ ID NO: 1995108 - DNA, 25 bp, Homo sapien
gatcccagtgatctcccaccttaat

SEQ ID NO: 1995109 - DNA, 25 bp, Homo sapien
tcctgcctcttgagtcattgaatag

SEQ ID NO: 1995110 - DNA, 25 bp, Homo sapien
gatgtaaaccgctgcacccagactt

SEQ ID NO: 1995111 - DNA, 25 bp, Homo sapien
ctctgtcggattgatccaggattca

SEQ ID NO: 1995112 - DNA, 25 bp, Homo sapien
tctgtcggattgatccaggattcat

SEQ ID NO: 1995113 - DNA, 25 bp, Homo sapien
actgctgtaagccctcaggatgtgc

SEQ ID NO: 1995114 - DNA, 25 bp, Homo sapien
ggcactgctgtaagccctcaggatg

SEQ ID NO: 1995115 - DNA, 25 bp, Homo sapien
gcactgctgtaagccctcaggatgt

SEQ ID NO: 1995116 - DNA, 25 bp, Homo sapien
ctgctgtaagccctcaggatgtgca

SEQ ID NO: 1995117 - DNA, 25 bp, Homo sapien
tctgcagtttcaaggggagggttgt

SEQ ID NO: 1995118 - DNA, 25 bp, Homo sapien
gatctgcagtttcaaggggagggtt

SEQ ID NO: 1995119 - DNA, 25 bp, Homo sapien
tgatctgcagtttcaaggggagggt

SEQ ID NO: 1995120 - DNA, 25 bp, Homo sapien
gtgatctgcagtttcaaggggaggg

SEQ ID NO: 1995121 - DNA, 25 bp, Homo sapien
gaccatagatttagctctgagatac

SEQ ID NO: 1995122 - DNA, 25 bp, Homo sapien
gaagaggtcacgaccatagatttag

SEQ ID NO: 1995123 - DNA, 25 bp, Homo sapien
ggtcacgaccatagatttagctctg

SEQ ID NO: 1995124 - DNA, 25 bp, Homo sapien
cttgagaagaggtcacgaccataga

SEQ ID NO: 1995125 - DNA, 25 bp, Homo sapien
ccacgctaagccctgcattggctga

SEQ ID NO: 1995126 - DNA, 25 bp, Homo sapien
cagggttttggctataggttcgcag

SEQ ID NO: 1995127 - DNA, 25 bp, Homo sapien
tgaaagtcccgagagggtgcacatg

SEQ ID NO: 1995128 - DNA, 25 bp, Homo sapien
tgcaggatctgccacgctaagccct

SEQ ID NO: 1995129 - DNA, 25 bp, Homo sapien
taaagcctcaacctctgccacgttg

SEQ ID NO: 1995130 - DNA, 25 bp, Homo sapien
cgttgagatctcttccttgccatct

SEQ ID NO: 1995131 - DNA, 25 bp, Homo sapien
tcaacctctgccacgttgagatctc

SEQ ID NO: 1995132 - DNA, 25 bp, Homo sapien
tctgccacgttgagatctcttcctt

SEQ ID NO: 1995133 - DNA, 25 bp, Homo sapien
gttcccccaaacttatgtcctcatg

SEQ ID NO: 1995134 - DNA, 25 bp, Homo sapien
aacttatgtcctcatgttctgccat

SEQ ID NO: 1995135 - DNA, 25 bp, Homo sapien
ccccaaacttatgtcctcatgttct

SEQ ID NO: 1995136 - DNA, 25 bp, Homo sapien
caaacttatgtcctcatgttctgcc

SEQ ID NO: 1995137 - DNA, 25 bp, Homo sapien
ggtgttcagagagttccttgaaggc

SEQ ID NO: 1995138 - DNA, 25 bp, Homo sapien
cagagagttccttgaaggcccacag

SEQ ID NO: 1995139 - DNA, 25 bp, Homo sapien
actggtgttcagagagttccttgaa

SEQ ID NO: 1995140 - DNA, 25 bp, Homo sapien
tgttcagagagttccttgaaggccc

SEQ ID NO: 1995141 - DNA, 25 bp, Homo sapien
gcattagtttggatggctccagaac

SEQ ID NO: 1995142 - DNA, 25 bp, Homo sapien
tgtttgagagtgaaattaacggtgc

SEQ ID NO: 1995143 - DNA, 25 bp, Homo sapien
taacggtgcattagtttggatggct

SEQ ID NO: 1995144 - DNA, 25 bp, Homo sapien
gaaattaacggtgcattagtttgga

SEQ ID NO: 1995145 - DNA, 25 bp, Homo sapien
taataatttcagtgctttacgcagt

SEQ ID NO: 1995146 - DNA, 25 bp, Homo sapien
gtgttaagtcagctgaaaaatatgt

SEQ ID NO: 1995147 - DNA, 25 bp, Homo sapien
taatcctatttgactaggggctgct

SEQ ID NO: 1995148 - DNA, 25 bp, Homo sapien
tgtgtagccctaataataatcctat

SEQ ID NO: 1995149 - DNA, 25 bp, Homo sapien
tattcacagcgtttcctcttccaac

SEQ ID NO: 1995150 - DNA, 25 bp, Homo sapien
gtctgtatattcacagcgtttcctc

SEQ ID NO: 1995151 - DNA, 25 bp, Homo sapien
tataggtctgtatattcacagcgtt

SEQ ID NO: 1995152 - DNA, 25 bp, Homo sapien
aatttgtttcatataggtctgtata

SEQ ID NO: 1995153 - DNA, 25 bp, Homo sapien
gattttttcaacaatgaacacgcca

SEQ ID NO: 1995154 - DNA, 25 bp, Homo sapien
gcttgacatgaaaagtacttatgcc

SEQ ID NO: 1995155 - DNA, 25 bp, Homo sapien
tagcagaagttatcatatgccttca

SEQ ID NO: 1995156 - DNA, 25 bp, Homo sapien
taacatatccctggatagcagaagt

SEQ ID NO: 1995157 - DNA, 25 bp, Homo sapien
ctggtttcttcaggtatggtccata

SEQ ID NO: 1995158 - DNA, 25 bp, Homo sapien
tggtttcttcaggtatggtccatac

SEQ ID NO: 1995159 - DNA, 25 bp, Homo sapien
gtttcttcaggtatggtccatacat

SEQ ID NO: 1995160 - DNA, 25 bp, Homo sapien
ggtttcttcaggtatggtccataca

SEQ ID NO: 1995161 - DNA, 25 bp, Homo sapien
ggtgtacacagatcagacagtggtt

SEQ ID NO: 1995162 - DNA, 25 bp, Homo sapien
tgtacacagatcagacagtggttga

SEQ ID NO: 1995163 - DNA, 25 bp, Homo sapien
agggtgtacacagatcagacagtgg

SEQ ID NO: 1995164 - DNA, 25 bp, Homo sapien
gggtgtacacagatcagacagtggt

SEQ ID NO: 1995165 - DNA, 25 bp, Homo sapien
aatagacaacatgcccccacttgct

SEQ ID NO: 1995166 - DNA, 25 bp, Homo sapien
ttcccggtaatagacaacatgcccc

SEQ ID NO: 1995167 - DNA, 25 bp, Homo sapien
tttttcccggtaatagacaacatgc

SEQ ID NO: 1995168 - DNA, 25 bp, Homo sapien
cttttctgattattgttgcattttg

SEQ ID NO: 1995169 - DNA, 25 bp, Homo sapien
accatgtggtctgggtagtagctga

SEQ ID NO: 1995170 - DNA, 25 bp, Homo sapien
gttcactggtcccttgatctagtga

SEQ ID NO: 1995171 - DNA, 25 bp, Homo sapien
tccttacatgcacctgagcatgaag

SEQ ID NO: 1995172 - DNA, 25 bp, Homo sapien
ggtagtagctgaaggaatgccctga

SEQ ID NO: 1995173 - DNA, 25 bp, Homo sapien
tctgcatatgaaagaatgggagcct

SEQ ID NO: 1995174 - DNA, 25 bp, Homo sapien
gatgagagatacgagccaaaatgca

SEQ ID NO: 1995175 - DNA, 25 bp, Homo sapien
agcttgccatcaaaactggtactgg

SEQ ID NO: 1995176 - DNA, 25 bp, Homo sapien
aaaatgcaaagtgatcatgccgatc

SEQ ID NO: 1995177 - DNA, 25 bp, Homo sapien
tttgacccatcacactctttcacgg

SEQ ID NO: 1995178 - DNA, 25 bp, Homo sapien
cacactctttcacggcttgctttaa

SEQ ID NO: 1995179 - DNA, 25 bp, Homo sapien
tctttcacggcttgctttaactcca

SEQ ID NO: 1995180 - DNA, 25 bp, Homo sapien
catcacactctttcacggcttgctt

SEQ ID NO: 1995181 - DNA, 25 bp, Homo sapien
tctgctctgaagcatgaggtgggat

SEQ ID NO: 1995182 - DNA, 25 bp, Homo sapien
ttcattatgattgcaaacccagcca

SEQ ID NO: 1995183 - DNA, 25 bp, Homo sapien
cacttgctctcagagggtgtgctct

SEQ ID NO: 1995184 - DNA, 25 bp, Homo sapien
ggtgggataaaccaatgcctcattg

SEQ ID NO: 1995185 - DNA, 25 bp, Homo sapien
tcaggaaaagattggataaactcat

SEQ ID NO: 1995186 - DNA, 25 bp, Homo sapien
tgaccacagctcttaatatctttca

SEQ ID NO: 1995187 - DNA, 25 bp, Homo sapien
gatggcaaacttgccagccttgatt

SEQ ID NO: 1995188 - DNA, 25 bp, Homo sapien
ttgcctttagcaatggtatgaagat

SEQ ID NO: 1995189 - DNA, 25 bp, Homo sapien
cataaaaggagaactcaggctccct

SEQ ID NO: 1995190 - DNA, 25 bp, Homo sapien
taaaaggagaactcaggctccctct

SEQ ID NO: 1995191 - DNA, 25 bp, Homo sapien
aaaaggagaactcaggctccctctt

SEQ ID NO: 1995192 - DNA, 25 bp, Homo sapien
ataaaaggagaactcaggctccctc

SEQ ID NO: 1995193 - DNA, 25 bp, Homo sapien
ggaatcagcttcggcccagactgtt

SEQ ID NO: 1995194 - DNA, 25 bp, Homo sapien
tcagcttcggcccagactgttctgt

SEQ ID NO: 1995195 - DNA, 25 bp, Homo sapien
gcttcggcccagactgttctgtctg

SEQ ID NO: 1995196 - DNA, 25 bp, Homo sapien
aatcagcttcggcccagactgttct

SEQ ID NO: 1995197 - DNA, 25 bp, Homo sapien
gacctgcctggaagggacctataaa

SEQ ID NO: 1995198 - DNA, 25 bp, Homo sapien
ataatgagccatcgtgtttcaaggg

SEQ ID NO: 1995199 - DNA, 25 bp, Homo sapien
tttctttaacgctggcagacctgcc

SEQ ID NO: 1995200 - DNA, 25 bp, Homo sapien
tagctaaaagcacagtttacagttg

SEQ ID NO: 1995201 - DNA, 25 bp, Homo sapien
ggtgcatcttattgcacgtctctgg

SEQ ID NO: 1995202 - DNA, 25 bp, Homo sapien
caggcttaggctccttgaaactgtc

SEQ ID NO: 1995203 - DNA, 25 bp, Homo sapien
gacactgctggtctcgaagacatct

SEQ ID NO: 1995204 - DNA, 25 bp, Homo sapien
ctgtcgtgcaggcttaggctccttg

SEQ ID NO: 1995205 - DNA, 25 bp, Homo sapien
attccatgtactttactagattctt

SEQ ID NO: 1995206 - DNA, 25 bp, Homo sapien
ttccatgtactttactagattcttg

SEQ ID NO: 1995207 - DNA, 25 bp, Homo sapien
aactaaaaaggataatgacatattt

SEQ ID NO: 1995208 - DNA, 25 bp, Homo sapien
tctgggggataaagcattacaagga

SEQ ID NO: 1995209 - DNA, 25 bp, Homo sapien
ggataaagcattacaaggaggagaa

SEQ ID NO: 1995210 - DNA, 25 bp, Homo sapien
gggggataaagcattacaaggagga

SEQ ID NO: 1995211 - DNA, 25 bp, Homo sapien
gggataaagcattacaaggaggaga

SEQ ID NO: 1995212 - DNA, 25 bp, Homo sapien
gagttttgggttgtgatacatctcc

SEQ ID NO: 1995213 - DNA, 25 bp, Homo sapien
gctttattccttgctgactgagtga

SEQ ID NO: 1995214 - DNA, 25 bp, Homo sapien
gactgagtgaataaaaccaattgcc

SEQ ID NO: 1995215 - DNA, 25 bp, Homo sapien
tagtgttattcaaaactgcagaccc

SEQ ID NO: 1995216 - DNA, 25 bp, Homo sapien
tattgcagggactacactggtgcac

SEQ ID NO: 1995217 - DNA, 25 bp, Homo sapien
ggtgcacttgtctaccagcagagtc

SEQ ID NO: 1995218 - DNA, 25 bp, Homo sapien
cccaggtgacctgacttgaggagtc

SEQ ID NO: 1995219 - DNA, 25 bp, Homo sapien
tagacacacttgagaagccatcatt

SEQ ID NO: 1995220 - DNA, 25 bp, Homo sapien
ttctgacatcctttacatattcatt

SEQ ID NO: 1995221 - DNA, 25 bp, Homo sapien
gattccatcacttcctagttctgac

SEQ ID NO: 1995222 - DNA, 25 bp, Homo sapien
gtttttgtggccagatgacctatga

SEQ ID NO: 1995223 - DNA, 25 bp, Homo sapien
acctatgagtcacaaggcaggctgt

SEQ ID NO: 1995224 - DNA, 25 bp, Homo sapien
aaattagaaaggttgagtccttcag

SEQ ID NO: 1995225 - DNA, 25 bp, Homo sapien
aattagaaaggttgagtccttcagt

SEQ ID NO: 1995226 - DNA, 25 bp, Homo sapien
gaagaactccagagtatcagactgg

SEQ ID NO: 1995227 - DNA, 25 bp, Homo sapien
tgtggaatctctacttgccagaggc

SEQ ID NO: 1995228 - DNA, 25 bp, Homo sapien
cagactggtgctcatgcattataaa

SEQ ID NO: 1995229 - DNA, 25 bp, Homo sapien
gacattttatcccagacgagtcttg

SEQ ID NO: 1995230 - DNA, 25 bp, Homo sapien
cagagcttggacctgaatttcacct

SEQ ID NO: 1995231 - DNA, 25 bp, Homo sapien
tctccagagcttggacctgaatttc

SEQ ID NO: 1995232 - DNA, 25 bp, Homo sapien
cactctccagagcttggacctgaat

SEQ ID NO: 1995233 - DNA, 25 bp, Homo sapien
tccagagcttggacctgaatttcac

SEQ ID NO: 1995234 - DNA, 25 bp, Homo sapien
caaccagtttagactagagcaggaa

SEQ ID NO: 1995235 - DNA, 25 bp, Homo sapien
aatgggaggattttagcctacagcc

SEQ ID NO: 1995236 - DNA, 25 bp, Homo sapien
gcctatagttggctgacccatggaa

SEQ ID NO: 1995237 - DNA, 25 bp, Homo sapien
tccgcagcaggaactaaacagataa

SEQ ID NO: 1995238 - DNA, 25 bp, Homo sapien
tgacctgatgagtccttgacagact

SEQ ID NO: 1995239 - DNA, 25 bp, Homo sapien
tgacagactcacaagttatagggcc

SEQ ID NO: 1995240 - DNA, 25 bp, Homo sapien
cattttccaccaattgacctgatga

SEQ ID NO: 1995241 - DNA, 25 bp, Homo sapien
gaatgatgtgccgtgccttgaagaa

SEQ ID NO: 1995242 - DNA, 25 bp, Homo sapien
ccattcatgaaggcaaggtgcttca

SEQ ID NO: 1995243 - DNA, 25 bp, Homo sapien
tcaccaatgagtcaggttgagatgt

SEQ ID NO: 1995244 - DNA, 25 bp, Homo sapien
tggcttctgactgaatgttccctgc

SEQ ID NO: 1995245 - DNA, 25 bp, Homo sapien
gttacaacgataaggagacacccat

SEQ ID NO: 1995246 - DNA, 25 bp, Homo sapien
gattcatcgaagctccctctatgtt

SEQ ID NO: 1995247 - DNA, 25 bp, Homo sapien
catcgaagctccctctatgtttttc

SEQ ID NO: 1995248 - DNA, 25 bp, Homo sapien
actgcatagattcatcgaagctccc

SEQ ID NO: 1995249 - DNA, 25 bp, Homo sapien
cagcaataaaacactgcatagattc

SEQ ID NO: 1995250 - DNA, 25 bp, Homo sapien
aaattcctgaacccaccacgtgcat

SEQ ID NO: 1995251 - DNA, 25 bp, Homo sapien
gaaattcctgaacccaccacgtgca

SEQ ID NO: 1995252 - DNA, 25 bp, Homo sapien
tgaaattcctgaacccaccacgtgc

SEQ ID NO: 1995253 - DNA, 25 bp, Homo sapien
ttgaaattcctgaacccaccacgtg

SEQ ID NO: 1995254 - DNA, 25 bp, Homo sapien
ctggaacttcagcgatttctccccc

SEQ ID NO: 1995255 - DNA, 25 bp, Homo sapien
tggaacttcagcgatttctccccca

SEQ ID NO: 1995256 - DNA, 25 bp, Homo sapien
ttccttcctttatgtcagactgggc

SEQ ID NO: 1995257 - DNA, 25 bp, Homo sapien
cttcctttatgtcagactgggccat

SEQ ID NO: 1995258 - DNA, 25 bp, Homo sapien
tgggtgccatgttaaagtgataagg

SEQ ID NO: 1995259 - DNA, 25 bp, Homo sapien
ctgggtgccatgttaaagtgataag

SEQ ID NO: 1995260 - DNA, 25 bp, Homo sapien
tgccatgttaaagtgataaggagaa

SEQ ID NO: 1995261 - DNA, 25 bp, Homo sapien
ggtgccatgttaaagtgataaggag

SEQ ID NO: 1995262 - DNA, 25 bp, Homo sapien
tccaggacgcgatgaggtttttcat

SEQ ID NO: 1995263 - DNA, 25 bp, Homo sapien
tgctgccaagagatagggatgctct

SEQ ID NO: 1995264 - DNA, 25 bp, Homo sapien
ggatgctcttgtccaggacgcgatg

SEQ ID NO: 1995265 - DNA, 25 bp, Homo sapien
taatggaccgtccaacccagttctg

SEQ ID NO: 1995266 - DNA, 25 bp, Homo sapien
ttccccaaatctttgatttgcacgg

SEQ ID NO: 1995267 - DNA, 25 bp, Homo sapien
ttgatttgcacggagtctgccacag

SEQ ID NO: 1995268 - DNA, 25 bp, Homo sapien
aaatctttgatttgcacggagtctg

SEQ ID NO: 1995269 - DNA, 25 bp, Homo sapien
ggagtctgccacagtagcttttcta

SEQ ID NO: 1995270 - DNA, 25 bp, Homo sapien
ctgattttgccgatatgtgatttgg

SEQ ID NO: 1995271 - DNA, 25 bp, Homo sapien
agtgcatatattggctgcagagtgc

SEQ ID NO: 1995272 - DNA, 25 bp, Homo sapien
tttgctgattttgccgatatgtgat

SEQ ID NO: 1995273 - DNA, 25 bp, Homo sapien
tttcatcatccagtgcatatattgg

SEQ ID NO: 1995274 - DNA, 25 bp, Homo sapien
tgctcggtgttgacacttgcttctg

SEQ ID NO: 1995275 - DNA, 25 bp, Homo sapien
catccttgggatcttgtcacaagca

SEQ ID NO: 1995276 - DNA, 25 bp, Homo sapien
ggactcgcccctgtggctagggcca

SEQ ID NO: 1995277 - DNA, 25 bp, Homo sapien
gctgtaatttcctctgctcggtgtt

SEQ ID NO: 1995278 - DNA, 25 bp, Homo sapien
gaggccctggcttaatagcttagca

SEQ ID NO: 1995279 - DNA, 25 bp, Homo sapien
cggcattcctgtatgggtctaggca

SEQ ID NO: 1995280 - DNA, 25 bp, Homo sapien
ggagaccttcggcatactgtgatca

SEQ ID NO: 1995281 - DNA, 25 bp, Homo sapien
taggcagggctctgttaacactgag

SEQ ID NO: 1995282 - DNA, 25 bp, Homo sapien
cctttaaccaagcttctctgaggcc

SEQ ID NO: 1995283 - DNA, 25 bp, Homo sapien
atcctttaaccaagcttctctgagg

SEQ ID NO: 1995284 - DNA, 25 bp, Homo sapien
tgtttctttggattttgtgcaaagg

SEQ ID NO: 1995285 - DNA, 25 bp, Homo sapien
tgaggccttaagttgtgcctgtttg

SEQ ID NO: 1995286 - DNA, 25 bp, Homo sapien
gttctcatcgggcattccacaaaca

SEQ ID NO: 1995287 - DNA, 25 bp, Homo sapien
tctcatcgggcattccacaaacagt

SEQ ID NO: 1995288 - DNA, 25 bp, Homo sapien
tcatcgggcattccacaaacagttg

SEQ ID NO: 1995289 - DNA, 25 bp, Homo sapien
atcgggcattccacaaacagttgct

SEQ ID NO: 1995290 - DNA, 25 bp, Homo sapien
tccaaagcgtatcagaatgatgttc

SEQ ID NO: 1995291 - DNA, 25 bp, Homo sapien
gcgtatcagaatgatgttcttggga

SEQ ID NO: 1995292 - DNA, 25 bp, Homo sapien
gtgatccaaagcgtatcagaatgat

SEQ ID NO: 1995293 - DNA, 25 bp, Homo sapien
aagcgtatcagaatgatgttcttgg

SEQ ID NO: 1995294 - DNA, 25 bp, Homo sapien
ctgttacaccagagacaacacaact

SEQ ID NO: 1995295 - DNA, 25 bp, Homo sapien
tcctaggaacctggccagtgattct

SEQ ID NO: 1995296 - DNA, 25 bp, Homo sapien
actgaggaattcttgccaggaggcc

SEQ ID NO: 1995297 - DNA, 25 bp, Homo sapien
gctccacagacgtctagctttccta

SEQ ID NO: 1995298 - DNA, 25 bp, Homo sapien
cacaggctccagtatcctgtgccag

SEQ ID NO: 1995299 - DNA, 25 bp, Homo sapien
tcacaggctccagtatcctgtgcca

SEQ ID NO: 1995300 - DNA, 25 bp, Homo sapien
ccatgttcctatcccggaagggctc

SEQ ID NO: 1995301 - DNA, 25 bp, Homo sapien
catgttcctatcccggaagggctcg

SEQ ID NO: 1995302 - DNA, 25 bp, Homo sapien
gcccatgttcctatcccggaagggc

SEQ ID NO: 1995303 - DNA, 25 bp, Homo sapien
tgttcctatcccggaagggctcgcc

SEQ ID NO: 1995304 - DNA, 25 bp, Homo sapien
gatgggccattggtccggttccact

SEQ ID NO: 1995305 - DNA, 25 bp, Homo sapien
aacaaccttgctgagagataaatgt

SEQ ID NO: 1995306 - DNA, 25 bp, Homo sapien
tggctactctcagaggcaagatcct

SEQ ID NO: 1995307 - DNA, 25 bp, Homo sapien
tgattccaagaggattttgagataa

SEQ ID NO: 1995308 - DNA, 25 bp, Homo sapien
ccagctggatgtaaacttaaatcga

SEQ ID NO: 1995309 - DNA, 25 bp, Homo sapien
acttaaatcgacatacaggaatttg

SEQ ID NO: 1995310 - DNA, 25 bp, Homo sapien
taaacttaaatcgacatacaggaat

SEQ ID NO: 1995311 - DNA, 25 bp, Homo sapien
gatgtaaacttaaatcgacatacag

SEQ ID NO: 1995312 - DNA, 25 bp, Homo sapien
gcctgagctatcttgacggcaaata

SEQ ID NO: 1995313 - DNA, 25 bp, Homo sapien
tccaaaagcctgagctatcttgacg

SEQ ID NO: 1995314 - DNA, 25 bp, Homo sapien
tatcttgacggcaaatatctgtcct

SEQ ID NO: 1995315 - DNA, 25 bp, Homo sapien
ttgacggcaaatatctgtcctctgg

SEQ ID NO: 1995316 - DNA, 25 bp, Homo sapien
atcttctgttccctcataaaggctc

SEQ ID NO: 1995317 - DNA, 25 bp, Homo sapien
ctgagagataacaggaaatgaaaaa

SEQ ID NO: 1995318 - DNA, 25 bp, Homo sapien
aaatgaagcaaagttatatcttctg

SEQ ID NO: 1995319 - DNA, 25 bp, Homo sapien
tatatcttctgttccctcataaagg

SEQ ID NO: 1995320 - DNA, 25 bp, Homo sapien
gctctgataacgtcggctccagttg

SEQ ID NO: 1995321 - DNA, 25 bp, Homo sapien
ccagttgaggtacaggaaaacagag

SEQ ID NO: 1995322 - DNA, 25 bp, Homo sapien
caggtggtgctctgataacgtcggc

SEQ ID NO: 1995323 - DNA, 25 bp, Homo sapien
agcctcagctgcaacggtggtagca

SEQ ID NO: 1995324 - DNA, 25 bp, Homo sapien
catgagaagctagccttcttgtctt

SEQ ID NO: 1995325 - DNA, 25 bp, Homo sapien
agcatgagaagctagccttcttgtc

SEQ ID NO: 1995326 - DNA, 25 bp, Homo sapien
gcatgagaagctagccttcttgtct

SEQ ID NO: 1995327 - DNA, 25 bp, Homo sapien
ttcagggtccccactatttagtcag

SEQ ID NO: 1995328 - DNA, 25 bp, Homo sapien
caaagcatatactcctattcagggt

SEQ ID NO: 1995329 - DNA, 25 bp, Homo sapien
tagacagtatatgctcggccatgct

SEQ ID NO: 1995330 - DNA, 25 bp, Homo sapien
aaagaaccaaagtgctatcatgcca

SEQ ID NO: 1995331 - DNA, 25 bp, Homo sapien
taaagaagctcttggtcaagcatgc

SEQ ID NO: 1995332 - DNA, 25 bp, Homo sapien
tcctggtaagatcaagaaggcatca

SEQ ID NO: 1995333 - DNA, 25 bp, Homo sapien
tcaagcatgccacaagaatggatac

SEQ ID NO: 1995334 - DNA, 25 bp, Homo sapien
tccgttcaacatacaaaagggcttg

SEQ ID NO: 1995335 - DNA, 25 bp, Homo sapien
tcacttcaagctgtctccgacgcat

SEQ ID NO: 1995336 - DNA, 25 bp, Homo sapien
ctcacttcaagctgtctccgacgca

SEQ ID NO: 1995337 - DNA, 25 bp, Homo sapien
cctcacttcaagctgtctccgacgc

SEQ ID NO: 1995338 - DNA, 25 bp, Homo sapien
gactgccagtaattcgccttcccag

SEQ ID NO: 1995339 - DNA, 25 bp, Homo sapien
atctgactgccagtaattcgccttc

SEQ ID NO: 1995340 - DNA, 25 bp, Homo sapien
gaatctgatcagcttttgccatggc

SEQ ID NO: 1995341 - DNA, 25 bp, Homo sapien
tttgccatggctttcataattgtga

SEQ ID NO: 1995342 - DNA, 25 bp, Homo sapien
tgtgctaagggcaagtcagaggcaa

SEQ ID NO: 1995343 - DNA, 25 bp, Homo sapien
atgtgctaagggcaagtcagaggca

SEQ ID NO: 1995344 - DNA, 25 bp, Homo sapien
tctgggatgtgctaagggcaagtca

SEQ ID NO: 1995345 - DNA, 25 bp, Homo sapien
gcactctgggatgtgctaagggcaa

SEQ ID NO: 1995346 - DNA, 25 bp, Homo sapien
tttttgcttggagcccttgggacat

SEQ ID NO: 1995347 - DNA, 25 bp, Homo sapien
cactgtgaagcgtgaatatgctgcc

SEQ ID NO: 1995348 - DNA, 25 bp, Homo sapien
tggaccatggcacttcctctgcttg

SEQ ID NO: 1995349 - DNA, 25 bp, Homo sapien
gtctctgttgcctgagaactgtatt

SEQ ID NO: 1995350 - DNA, 25 bp, Homo sapien
gctggttttgcctatattggtaccc

SEQ ID NO: 1995351 - DNA, 25 bp, Homo sapien
gctcttgagctggttttgcctatat

SEQ ID NO: 1995352 - DNA, 25 bp, Homo sapien
tgagctggttttgcctatattggta

SEQ ID NO: 1995353 - DNA, 25 bp, Homo sapien
gggctcttgagctggttttgcctat

SEQ ID NO: 1995354 - DNA, 25 bp, Homo sapien
cgttgagatctgaccagagcattct

SEQ ID NO: 1995355 - DNA, 25 bp, Homo sapien
tgctcatccccactgtcatcgagtg

SEQ ID NO: 1995356 - DNA, 25 bp, Homo sapien
aacaatcctgcacgttgagatctga

SEQ ID NO: 1995357 - DNA, 25 bp, Homo sapien
ggaatgttctgccaggtctcccgac

SEQ ID NO: 1995358 - DNA, 25 bp, Homo sapien
tcccactgagcctgcaatgtgatgg

SEQ ID NO: 1995359 - DNA, 25 bp, Homo sapien
ctcaccacctcagcccttttcccaa

SEQ ID NO: 1995360 - DNA, 25 bp, Homo sapien
gtgttccattgctcctttgagaaat

SEQ ID NO: 1995361 - DNA, 25 bp, Homo sapien
tgtctttctgacaatgtccgctgtt

SEQ ID NO: 1995362 - DNA, 25 bp, Homo sapien
caaactgagacccattttgtgttcc

SEQ ID NO: 1995363 - DNA, 25 bp, Homo sapien
ttgctcctgagagacaagctggcac

SEQ ID NO: 1995364 - DNA, 25 bp, Homo sapien
tctgacaagatacaatttcattgcc

SEQ ID NO: 1995365 - DNA, 25 bp, Homo sapien
ttccaactgacttttgtctaaattc

SEQ ID NO: 1995366 - DNA, 25 bp, Homo sapien
ctggatattcatccccggggctaga

SEQ ID NO: 1995367 - DNA, 25 bp, Homo sapien
cattgccagcatgatctggatattc

SEQ ID NO: 1995368 - DNA, 25 bp, Homo sapien
ttaggttatgaggtttttgcagaca

SEQ ID NO: 1995369 - DNA, 25 bp, Homo sapien
ggttccaccccagttgcatctatca

SEQ ID NO: 1995370 - DNA, 25 bp, Homo sapien
tacagaataccaaatgagttttgaa

SEQ ID NO: 1995371 - DNA, 25 bp, Homo sapien
ctgttttcttagttaggttatgagg

SEQ ID NO: 1995372 - DNA, 25 bp, Homo sapien
ctataacatcataagatacatacat

SEQ ID NO: 1995373 - DNA, 25 bp, Homo sapien
ctgtttccctactgcgttttgcttt

SEQ ID NO: 1995374 - DNA, 25 bp, Homo sapien
gatgttgggatagtagggatcttca

SEQ ID NO: 1995375 - DNA, 25 bp, Homo sapien
aagtaatgggaacggagcttctgga

SEQ ID NO: 1995376 - DNA, 25 bp, Homo sapien
aaagtactggatgttgggatagtag

SEQ ID NO: 1995377 - DNA, 25 bp, Homo sapien
tttgcctaagtaatgggaacggagc

SEQ ID NO: 1995378 - DNA, 25 bp, Homo sapien
cttctggtctactgtggcacgcttc

SEQ ID NO: 1995379 - DNA, 25 bp, Homo sapien
ttctccttctggtctactgtggcac

SEQ ID NO: 1995380 - DNA, 25 bp, Homo sapien
gtcctctagattattccagggaaat

SEQ ID NO: 1995381 - DNA, 25 bp, Homo sapien
cataaacctcaacgaagtcctctag

SEQ ID NO: 1995382 - DNA, 25 bp, Homo sapien
tgggtgtagcctgttcttcaagcgc

SEQ ID NO: 1995383 - DNA, 25 bp, Homo sapien
tgaatctcggaatagaccaaaagga

SEQ ID NO: 1995384 - DNA, 25 bp, Homo sapien
tcaagcgcttctacccctatggatt

SEQ ID NO: 1995385 - DNA, 25 bp, Homo sapien
agcaatgggtgtagcctgttcttca

SEQ ID NO: 1995386 - DNA, 25 bp, Homo sapien
cagggtgattcttactgcagtgatt

SEQ ID NO: 1995387 - DNA, 25 bp, Homo sapien
tatgaagttctatttgacatgatga

SEQ ID NO: 1995388 - DNA, 25 bp, Homo sapien
tgatgatccaatgatgatcagggtg

SEQ ID NO: 1995389 - DNA, 25 bp, Homo sapien
tttagtcttatctcctgcatgcctt

SEQ ID NO: 1995390 - DNA, 25 bp, Homo sapien
gatccaacaataagtctgggcagta

SEQ ID NO: 1995391 - DNA, 25 bp, Homo sapien
cattaactttagtgcagatccaaca

SEQ ID NO: 1995392 - DNA, 25 bp, Homo sapien
taagattggagatgctgagtatacg

SEQ ID NO: 1995393 - DNA, 25 bp, Homo sapien
tgggccttgcctttttccaaaatca

SEQ ID NO: 1995394 - DNA, 25 bp, Homo sapien
tcgtctccctgacaagtctgactgg

SEQ ID NO: 1995395 - DNA, 25 bp, Homo sapien
ccttggtgcgaggtgattgcggcct

SEQ ID NO: 1995396 - DNA, 25 bp, Homo sapien
gattgcggcctttcagagaagtggc

SEQ ID NO: 1995397 - DNA, 25 bp, Homo sapien
cacaagggtttccagttgttgctct

SEQ ID NO: 1995398 - DNA, 25 bp, Homo sapien
gagcagatgtgataacaaggttgtc

SEQ ID NO: 1995399 - DNA, 25 bp, Homo sapien
taatgatggagcagatgtgataaca

SEQ ID NO: 1995400 - DNA, 25 bp, Homo sapien
tataatgatggagcagatgtgataa

SEQ ID NO: 1995401 - DNA, 25 bp, Homo sapien
tgatggagcagatgtgataacaagg

SEQ ID NO: 1995402 - DNA, 25 bp, Homo sapien
tcaccgcctcgtggatggacttctt

SEQ ID NO: 1995403 - DNA, 25 bp, Homo sapien
gttgatgggcaacctcgacgtttcc

SEQ ID NO: 1995404 - DNA, 25 bp, Homo sapien
tattactttgcagttctcaacaggg

SEQ ID NO: 1995405 - DNA, 25 bp, Homo sapien
ctctccccagaaagcgttattactt

SEQ ID NO: 1995406 - DNA, 25 bp, Homo sapien
gagaacctgaagatatagttgccat

SEQ ID NO: 1995407 - DNA, 25 bp, Homo sapien
tggcccttgccatgttctgtactgc

SEQ ID NO: 1995408 - DNA, 25 bp, Homo sapien
tctgctttgctaatctggcccttgc

SEQ ID NO: 1995409 - DNA, 25 bp, Homo sapien
gcactgttcatcaactttcacgtgg

SEQ ID NO: 1995410 - DNA, 25 bp, Homo sapien
gctccaaatggactggcattgtcaa

SEQ ID NO: 1995411 - DNA, 25 bp, Homo sapien
tcagatgtttagtaacaagtggcat

SEQ ID NO: 1995412 - DNA, 25 bp, Homo sapien
gggatgacagcgttaatgattaagg

SEQ ID NO: 1995413 - DNA, 25 bp, Homo sapien
caggcagttacgagaaggtgctttt

SEQ ID NO: 1995414 - DNA, 25 bp, Homo sapien
gtgcttttttgggatgacagcgtta

SEQ ID NO: 1995415 - DNA, 25 bp, Homo sapien
ctgtcaaacaggcagttacgagaag

SEQ ID NO: 1995416 - DNA, 25 bp, Homo sapien
gtgcagaaggattgacagtttcctg

SEQ ID NO: 1995417 - DNA, 25 bp, Homo sapien
ttcttcagaggggttctctgatgtt

SEQ ID NO: 1995418 - DNA, 25 bp, Homo sapien
cttcttcagaggggttctctgatgt

SEQ ID NO: 1995419 - DNA, 25 bp, Homo sapien
tcagcaggagtgtgaaggtgaatgg

SEQ ID NO: 1995420 - DNA, 25 bp, Homo sapien
tatccccagctaatggatcagcagg

SEQ ID NO: 1995421 - DNA, 25 bp, Homo sapien
ggtgtatccccagctaatggatcag

SEQ ID NO: 1995422 - DNA, 25 bp, Homo sapien
tgaaggtgtatccccagctaatgga

SEQ ID NO: 1995423 - DNA, 25 bp, Homo sapien
tattcctgagatatttctgagacgc

SEQ ID NO: 1995424 - DNA, 25 bp, Homo sapien
gagaaaagtattcctgagatatttc

SEQ ID NO: 1995425 - DNA, 25 bp, Homo sapien
ttcctgagatatttctgagacgcat

SEQ ID NO: 1995426 - DNA, 25 bp, Homo sapien
taaagagaaaagtattcctgagata

SEQ ID NO: 1995427 - DNA, 25 bp, Homo sapien
agtaaagtcacctattccctgaaat

SEQ ID NO: 1995428 - DNA, 25 bp, Homo sapien
ggcagtaaagtcacctattccctga

SEQ ID NO: 1995429 - DNA, 25 bp, Homo sapien
taaggcagtaaagtcacctattccc

SEQ ID NO: 1995430 - DNA, 25 bp, Homo sapien
tttctaaggcagtaaagtcacctat

SEQ ID NO: 1995431 - DNA, 25 bp, Homo sapien
caagaagatcctactgggaaagagg

SEQ ID NO: 1995432 - DNA, 25 bp, Homo sapien
taggtgccctccagaattttgggta

SEQ ID NO: 1995433 - DNA, 25 bp, Homo sapien
gggtgctatattcagctgagatgcc

SEQ ID NO: 1995434 - DNA, 25 bp, Homo sapien
gaaagcacgataaggcacatgtccg

SEQ ID NO: 1995435 - DNA, 25 bp, Homo sapien
ttcttgacgcttcagaatagttggg

SEQ ID NO: 1995436 - DNA, 25 bp, Homo sapien
agcaaaatggtttatcgacatgcca

SEQ ID NO: 1995437 - DNA, 25 bp, Homo sapien
tctgtggttgagcaatagctcttcc

SEQ ID NO: 1995438 - DNA, 25 bp, Homo sapien
aggctttcagggaccatggtgtagc

SEQ ID NO: 1995439 - DNA, 25 bp, Homo sapien
gtatatagttggagttttgaaactg

SEQ ID NO: 1995440 - DNA, 25 bp, Homo sapien
cataaagcctgatcgaatggaaaaa

SEQ ID NO: 1995441 - DNA, 25 bp, Homo sapien
gaagatacaggcaagtgccgcagca

SEQ ID NO: 1995442 - DNA, 25 bp, Homo sapien
tttgccctcggtgggtatatagttg

SEQ ID NO: 1995443 - DNA, 25 bp, Homo sapien
taactttgttggctgctacaaccaa

SEQ ID NO: 1995444 - DNA, 25 bp, Homo sapien
ttcagatttaactttgttggctgct

SEQ ID NO: 1995445 - DNA, 25 bp, Homo sapien
tgttggctgctacaaccaaattgtc

SEQ ID NO: 1995446 - DNA, 25 bp, Homo sapien
cagatttaactttgttggctgctac

SEQ ID NO: 1995447 - DNA, 25 bp, Homo sapien
ttgcaggtaattgttgaaatatcaa

SEQ ID NO: 1995448 - DNA, 25 bp, Homo sapien
tgttgttgcaggtaattgttgaaat

SEQ ID NO: 1995449 - DNA, 25 bp, Homo sapien
gttgttgcaggtaattgttgaaata

SEQ ID NO: 1995450 - DNA, 25 bp, Homo sapien
tgttgcaggtaattgttgaaatatc

SEQ ID NO: 1995451 - DNA, 25 bp, Homo sapien
ctgccatgacaatgcctgagacagc

SEQ ID NO: 1995452 - DNA, 25 bp, Homo sapien
atgacaatgcctgagacagctcttc

SEQ ID NO: 1995453 - DNA, 25 bp, Homo sapien
ccatgacaatgcctgagacagctct

SEQ ID NO: 1995454 - DNA, 25 bp, Homo sapien
gacaatgcctgagacagctcttcca

SEQ ID NO: 1995455 - DNA, 25 bp, Homo sapien
tatgactagacaaggtccatgcggc

SEQ ID NO: 1995456 - DNA, 25 bp, Homo sapien
ggtctcaaagacagccttgtgtccc

SEQ ID NO: 1995457 - DNA, 25 bp, Homo sapien
gatgaggtgtgaccaatagcctgtt

SEQ ID NO: 1995458 - DNA, 25 bp, Homo sapien
cagagcgatgatgcgtttccccaaa

SEQ ID NO: 1995459 - DNA, 25 bp, Homo sapien
ccctgaagcatgaattgtgaatacc

SEQ ID NO: 1995460 - DNA, 25 bp, Homo sapien
tgatctcggataggcttaagccctg

SEQ ID NO: 1995461 - DNA, 25 bp, Homo sapien
cagttgtacaatttggagactggaa

SEQ ID NO: 1995462 - DNA, 25 bp, Homo sapien
tgtgaataccttttgctcagcatcc

SEQ ID NO: 1995463 - DNA, 25 bp, Homo sapien
ttagcacttcgctgccagctggctc

SEQ ID NO: 1995464 - DNA, 25 bp, Homo sapien
aaaaacacatgcaagtcactggctt

SEQ ID NO: 1995465 - DNA, 25 bp, Homo sapien
catgcaagtcactggctttagcact

SEQ ID NO: 1995466 - DNA, 25 bp, Homo sapien
tggctttagcacttcgctgccagct

SEQ ID NO: 1995467 - DNA, 25 bp, Homo sapien
taatctttgtcctaaaacgcagccc

SEQ ID NO: 1995468 - DNA, 25 bp, Homo sapien
tctttgtcctaaaacgcagccccat

SEQ ID NO: 1995469 - DNA, 25 bp, Homo sapien
aataatctttgtcctaaaacgcagc

SEQ ID NO: 1995470 - DNA, 25 bp, Homo sapien
tccacatacacaaataatctttgtc

SEQ ID NO: 1995471 - DNA, 25 bp, Homo sapien
gatagcctctcggtctttgagtttt

SEQ ID NO: 1995472 - DNA, 25 bp, Homo sapien
ccaaagatagcctctcggtctttga

SEQ ID NO: 1995473 - DNA, 25 bp, Homo sapien
aaagatagcctctcggtctttgagt

SEQ ID NO: 1995474 - DNA, 25 bp, Homo sapien
tagcctctcggtctttgagttttag

SEQ ID NO: 1995475 - DNA, 25 bp, Homo sapien
atctttatgagagttggctgcctgg

SEQ ID NO: 1995476 - DNA, 25 bp, Homo sapien
tctttatgagagttggctgcctggt

SEQ ID NO: 1995477 - DNA, 25 bp, Homo sapien
tcatctttatgagagttggctgcct

SEQ ID NO: 1995478 - DNA, 25 bp, Homo sapien
catctttatgagagttggctgcctg

SEQ ID NO: 1995479 - DNA, 25 bp, Homo sapien
aaaatggatctcacaagtctgctta

SEQ ID NO: 1995480 - DNA, 25 bp, Homo sapien
gaaaaaatggatctcacaagtctgc

SEQ ID NO: 1995481 - DNA, 25 bp, Homo sapien
ggatctcacaagtctgcttatcaga

SEQ ID NO: 1995482 - DNA, 25 bp, Homo sapien
ctcacaagtctgcttatcagatcac

SEQ ID NO: 1995483 - DNA, 25 bp, Homo sapien
taaatcgtctgaaactagagtgggc

SEQ ID NO: 1995484 - DNA, 25 bp, Homo sapien
tctggctgtcatgaatagtcttaaa

SEQ ID NO: 1995485 - DNA, 25 bp, Homo sapien
tagttgagcaaggtttaaatgagca

SEQ ID NO: 1995486 - DNA, 25 bp, Homo sapien
tagatttaatgcaacagctgaacac

SEQ ID NO: 1995487 - DNA, 25 bp, Homo sapien
aactactggtgaccagttcagccca

SEQ ID NO: 1995488 - DNA, 25 bp, Homo sapien
tttgggagacccttgattcacaggg

SEQ ID NO: 1995489 - DNA, 25 bp, Homo sapien
agttcagcccacgaggatgcccctc

SEQ ID NO: 1995490 - DNA, 25 bp, Homo sapien
cactatctgtagtggacaactactg

SEQ ID NO: 1995491 - DNA, 25 bp, Homo sapien
tcagacagaaggcatgtggtctgct

SEQ ID NO: 1995492 - DNA, 25 bp, Homo sapien
gattcttagcagtattgagccatga

SEQ ID NO: 1995493 - DNA, 25 bp, Homo sapien
tctgctaggccaaaggtggaatgca

SEQ ID NO: 1995494 - DNA, 25 bp, Homo sapien
gagccatgagcacactgatctgctt

SEQ ID NO: 1995495 - DNA, 25 bp, Homo sapien
ccccgccagcaagccgccaatccac

SEQ ID NO: 1995496 - DNA, 25 bp, Homo sapien
ccggagcgagttccgacgcggcgga

SEQ ID NO: 1995497 - DNA, 25 bp, Homo sapien
ccgccgaaacaacccttccgcgcat

SEQ ID NO: 1995498 - DNA, 25 bp, Homo sapien
aatccacgcccggagcgagttccga

SEQ ID NO: 1995499 - DNA, 25 bp, Homo sapien
tacaggaaaaacaacataaatgaac

SEQ ID NO: 1995500 - DNA, 25 bp, Homo sapien
aggtacaggaaaaacaacataaatg

SEQ ID NO: 1995501 - DNA, 25 bp, Homo sapien
ggtacaggaaaaacaacataaatga

SEQ ID NO: 1995502 - DNA, 25 bp, Homo sapien
gtacaggaaaaacaacataaatgaa

SEQ ID NO: 1995503 - DNA, 25 bp, Homo sapien
tggacgttgatatccaggtcacaac

SEQ ID NO: 1995504 - DNA, 25 bp, Homo sapien
atcttaagctggacgttgatatcca

SEQ ID NO: 1995505 - DNA, 25 bp, Homo sapien
caactatagatgtagtgaaacttct

SEQ ID NO: 1995506 - DNA, 25 bp, Homo sapien
ccaggtcacaactatagatgtagtg

SEQ ID NO: 1995507 - DNA, 25 bp, Homo sapien
gagcatgtctcttgatatagtcctg

SEQ ID NO: 1995508 - DNA, 25 bp, Homo sapien
tctcactggcaaggccaaaggcttc

SEQ ID NO: 1995509 - DNA, 25 bp, Homo sapien
aatgctttgtaggatgttctcactg

SEQ ID NO: 1995510 - DNA, 25 bp, Homo sapien
gaacttcaacattgggtcttccagg

SEQ ID NO: 1995511 - DNA, 25 bp, Homo sapien
tacacatcccatatggtgagggcca

SEQ ID NO: 1995512 - DNA, 25 bp, Homo sapien
tacaggcactgcttttccgggacca

SEQ ID NO: 1995513 - DNA, 25 bp, Homo sapien
tattttactggtagtttcagccatt

SEQ ID NO: 1995514 - DNA, 25 bp, Homo sapien
gaaaccgttgttcctcctacaggca

SEQ ID NO: 1995515 - DNA, 25 bp, Homo sapien
tggcaagacggctcatctgatcttc

SEQ ID NO: 1995516 - DNA, 25 bp, Homo sapien
gcttctacattaggccagactttca

SEQ ID NO: 1995517 - DNA, 25 bp, Homo sapien
tcaagtcatgcatcccttggcgaaa

SEQ ID NO: 1995518 - DNA, 25 bp, Homo sapien
agagtgctacttgttctgccaggag

SEQ ID NO: 1995519 - DNA, 25 bp, Homo sapien
agtacttgcctggaactaactgcag

SEQ ID NO: 1995520 - DNA, 25 bp, Homo sapien
tcagactgtatgctttccaagggtg

SEQ ID NO: 1995521 - DNA, 25 bp, Homo sapien
tgaagcctagccaacccaagtactt

SEQ ID NO: 1995522 - DNA, 25 bp, Homo sapien
caactttaaggctatgtcaccagaa

SEQ ID NO: 1995523 - DNA, 25 bp, Homo sapien
tttctagagttgttaatgtgcacaa

SEQ ID NO: 1995524 - DNA, 25 bp, Homo sapien
gtcatcatttctagagttgttaatg

SEQ ID NO: 1995525 - DNA, 25 bp, Homo sapien
tctagagttgttaatgtgcacaaat

SEQ ID NO: 1995526 - DNA, 25 bp, Homo sapien
ttagtcatcatttctagagttgtta

SEQ ID NO: 1995527 - DNA, 25 bp, Homo sapien
aaaactctgactcgcagtacagtgc

SEQ ID NO: 1995528 - DNA, 25 bp, Homo sapien
ttttccccaagttagcagaatggcc

SEQ ID NO: 1995529 - DNA, 25 bp, Homo sapien
tcaatagcagctgggatatacaaca

SEQ ID NO: 1995530 - DNA, 25 bp, Homo sapien
tttaccctaggcatacacattgcag

SEQ ID NO: 1995531 - DNA, 25 bp, Homo sapien
tatccctagacaatcaagactgaag

SEQ ID NO: 1995532 - DNA, 25 bp, Homo sapien
tgaaaactgttactactatgctact

SEQ ID NO: 1995533 - DNA, 25 bp, Homo sapien
caataaatcagaagagggttaagtc

SEQ ID NO: 1995534 - DNA, 25 bp, Homo sapien
tcatcctgaaagaactggactttta

SEQ ID NO: 1995535 - DNA, 25 bp, Homo sapien
tccaaaggcatcaagcagagctgct

SEQ ID NO: 1995536 - DNA, 25 bp, Homo sapien
taaacctgagatctagaccctggac

SEQ ID NO: 1995537 - DNA, 25 bp, Homo sapien
actctttgaagtggttggcatgaac

SEQ ID NO: 1995538 - DNA, 25 bp, Homo sapien
tggctctgatattagacactgcagc

SEQ ID NO: 1995539 - DNA, 25 bp, Homo sapien
tagtgggtcaaactacttcaatccc

SEQ ID NO: 1995540 - DNA, 25 bp, Homo sapien
attcaaaagatgcagtacaaccagc

SEQ ID NO: 1995541 - DNA, 25 bp, Homo sapien
cctctaatcaatgctctaggacaag

SEQ ID NO: 1995542 - DNA, 25 bp, Homo sapien
aactaaaatctcagggagctcctct

SEQ ID NO: 1995543 - DNA, 25 bp, Homo sapien
acgtggttttaggtgctggttctgc

SEQ ID NO: 1995544 - DNA, 25 bp, Homo sapien
gatcttaagcatatgtcactgatac

SEQ ID NO: 1995545 - DNA, 25 bp, Homo sapien
taaatagctagttcaagatcacagc

SEQ ID NO: 1995546 - DNA, 25 bp, Homo sapien
caatgtagtgcataagtcccaatcc

SEQ ID NO: 1995547 - DNA, 25 bp, Homo sapien
ggcaggtcactgtttactgacttaa

SEQ ID NO: 1995548 - DNA, 25 bp, Homo sapien
aggtcactgtttactgacttaacgg

SEQ ID NO: 1995549 - DNA, 25 bp, Homo sapien
cactgtttactgacttaacgggcat

SEQ ID NO: 1995550 - DNA, 25 bp, Homo sapien
ataggcaggtcactgtttactgact

SEQ ID NO: 1995551 - DNA, 25 bp, Homo sapien
atcaatgagtgcctttttgctaccc

SEQ ID NO: 1995552 - DNA, 25 bp, Homo sapien
ggcacttggatgaagattataactc

SEQ ID NO: 1995553 - DNA, 25 bp, Homo sapien
ttgctacccttctcaacaatcttgg

SEQ ID NO: 1995554 - DNA, 25 bp, Homo sapien
caacatgcctagctagtaactcttc

SEQ ID NO: 1995555 - DNA, 25 bp, Homo sapien
tacccaggaatacagaaacagctag

SEQ ID NO: 1995556 - DNA, 25 bp, Homo sapien
tcaataagctgccatcagtgagagc

SEQ ID NO: 1995557 - DNA, 25 bp, Homo sapien
caaaatatcattacgtgggtacagg

SEQ ID NO: 1995558 - DNA, 25 bp, Homo sapien
aattcaggaatcttgactgtcagtc

SEQ ID NO: 1995559 - DNA, 25 bp, Homo sapien
ctccaacagaatagctggacttctt

SEQ ID NO: 1995560 - DNA, 25 bp, Homo sapien
cactccaacagaatagctggacttc

SEQ ID NO: 1995561 - DNA, 25 bp, Homo sapien
tcactccaacagaatagctggactt

SEQ ID NO: 1995562 - DNA, 25 bp, Homo sapien
ttggtcactccaacagaatagctgg

SEQ ID NO: 1995563 - DNA, 25 bp, Homo sapien
ctgcagaataaatacaatgacgaaa

SEQ ID NO: 1995564 - DNA, 25 bp, Homo sapien
cagaataaatacaatgacgaaaatt

SEQ ID NO: 1995565 - DNA, 25 bp, Homo sapien
tacaatgacgaaaattttaatatac

SEQ ID NO: 1995566 - DNA, 25 bp, Homo sapien
atacaatgacgaaaattttaatata

SEQ ID NO: 1995567 - DNA, 25 bp, Homo sapien
tgtccttgtcgatgagctttggtga

SEQ ID NO: 1995568 - DNA, 25 bp, Homo sapien
tactttcaccatgtgtccttgtcga

SEQ ID NO: 1995569 - DNA, 25 bp, Homo sapien
tccagccaatctactttcaccatgt

SEQ ID NO: 1995570 - DNA, 25 bp, Homo sapien
tctctaaatgtcaatctatccagcc

SEQ ID NO: 1995571 - DNA, 25 bp, Homo sapien
cacttgacacatcgaaattcaacca

SEQ ID NO: 1995572 - DNA, 25 bp, Homo sapien
ttcataataaacaataccatattcc

SEQ ID NO: 1995573 - DNA, 25 bp, Homo sapien
tattccttatcatcacacttgacac

SEQ ID NO: 1995574 - DNA, 25 bp, Homo sapien
aaattcaaccatcaggtacatgaaa

SEQ ID NO: 1995575 - DNA, 25 bp, Homo sapien
tcccagcaggaacaacaatattttt

SEQ ID NO: 1995576 - DNA, 25 bp, Homo sapien
tgctgctaccctgcaaccaaataat

SEQ ID NO: 1995577 - DNA, 25 bp, Homo sapien
cattacttagtgtcctacttgccaa

SEQ ID NO: 1995578 - DNA, 25 bp, Homo sapien
gaactgcattacatgagtgataggc

SEQ ID NO: 1995579 - DNA, 25 bp, Homo sapien
gttaaaattggagatgattcatcac

SEQ ID NO: 1995580 - DNA, 25 bp, Homo sapien
ttaaaattggagatgattcatcacc

SEQ ID NO: 1995581 - DNA, 25 bp, Homo sapien
aaattggagatgattcatcaccgtc

SEQ ID NO: 1995582 - DNA, 25 bp, Homo sapien
taaaattggagatgattcatcaccg

SEQ ID NO: 1995583 - DNA, 25 bp, Homo sapien
cctatgtatggcatgagttatggat

SEQ ID NO: 1995584 - DNA, 25 bp, Homo sapien
tttagattacagatccatttggagt

SEQ ID NO: 1995585 - DNA, 25 bp, Homo sapien
tccattcctcagtattatgacttag

SEQ ID NO: 1995586 - DNA, 25 bp, Homo sapien
tactagatttccatgcatacttgga

SEQ ID NO: 1995587 - DNA, 25 bp, Homo sapien
acttcttaaactccgggcaagcttg

SEQ ID NO: 1995588 - DNA, 25 bp, Homo sapien
atttaactgatctctcgtggcagca

SEQ ID NO: 1995589 - DNA, 25 bp, Homo sapien
cattgggtttcagatcgtggtcaga

SEQ ID NO: 1995590 - DNA, 25 bp, Homo sapien
cttgtggtgtttgctctcaactaaa

SEQ ID NO: 1995591 - DNA, 25 bp, Homo sapien
agataatatctaaacttccaaacaa

SEQ ID NO: 1995592 - DNA, 25 bp, Homo sapien
gcttggttggtggataactcacaat

SEQ ID NO: 1995593 - DNA, 25 bp, Homo sapien
tcttgattcgtaagataatatctaa

SEQ ID NO: 1995594 - DNA, 25 bp, Homo sapien
ttcatatgtaagttgcttggttggt

SEQ ID NO: 1995595 - DNA, 25 bp, Homo sapien
gagaggataacagctccaaggagtc

SEQ ID NO: 1995596 - DNA, 25 bp, Homo sapien
tgaggtagatcccaattaacacatt

SEQ ID NO: 1995597 - DNA, 25 bp, Homo sapien
cataacgcctcacagttgggttggt

SEQ ID NO: 1995598 - DNA, 25 bp, Homo sapien
tcatcatcggcctgtcgcaaccggg

SEQ ID NO: 1995599 - DNA, 25 bp, Homo sapien
ctgcaatgaggccaattaataaacc

SEQ ID NO: 1995600 - DNA, 25 bp, Homo sapien
ccacaaagcatacccatataggatg

SEQ ID NO: 1995601 - DNA, 25 bp, Homo sapien
tgactaatccaacaaccagccgttt

SEQ ID NO: 1995602 - DNA, 25 bp, Homo sapien
gggcttccctattccaagacacagt

SEQ ID NO: 1995603 - DNA, 25 bp, Homo sapien
cctggaccaattgtaataggtacat

SEQ ID NO: 1995604 - DNA, 25 bp, Homo sapien
ctgactatccttcttggtaggttcc

SEQ ID NO: 1995605 - DNA, 25 bp, Homo sapien
ctatttctgcagaatttattccaga

SEQ ID NO: 1995606 - DNA, 25 bp, Homo sapien
ggttccaatccattctttatatcat

SEQ ID NO: 1995607 - DNA, 25 bp, Homo sapien
taagtaatagtagctaagacttact

SEQ ID NO: 1995608 - DNA, 25 bp, Homo sapien
tctacctcccgggtgtcaccatgtt

SEQ ID NO: 1995609 - DNA, 25 bp, Homo sapien
aagtaatagtagctaagacttacta

SEQ ID NO: 1995610 - DNA, 25 bp, Homo sapien
aataagtaatagtagctaagactta

SEQ ID NO: 1995611 - DNA, 25 bp, Homo sapien
agattatgggtaatgcctcttggga

SEQ ID NO: 1995612 - DNA, 25 bp, Homo sapien
tgcaacactagagtcacattgtact

SEQ ID NO: 1995613 - DNA, 25 bp, Homo sapien
tggaaaaagcgcatggtcaaagatt

SEQ ID NO: 1995614 - DNA, 25 bp, Homo sapien
tctgtccataagagaacgcacaatt

SEQ ID NO: 1995615 - DNA, 25 bp, Homo sapien
tgaagagactgaaggaagggggctg

SEQ ID NO: 1995616 - DNA, 25 bp, Homo sapien
ttccagattttcgccatctggaact

SEQ ID NO: 1995617 - DNA, 25 bp, Homo sapien
gtttttgcaggctctcgatatcaag

SEQ ID NO: 1995618 - DNA, 25 bp, Homo sapien
agtgttgagtttttgcaggctctcg

SEQ ID NO: 1995619 - DNA, 25 bp, Homo sapien
ggctctcgatatcaagaaggtacag

SEQ ID NO: 1995620 - DNA, 25 bp, Homo sapien
taaataattagccagtgttgagttt

SEQ ID NO: 1995621 - DNA, 25 bp, Homo sapien
ctgaaaataccctgaaaatggcaaa

SEQ ID NO: 1995622 - DNA, 25 bp, Homo sapien
gcttgcccatttaacgtcatagaaa

SEQ ID NO: 1995623 - DNA, 25 bp, Homo sapien
gcatttccatgaacccagctgtcag

SEQ ID NO: 1995624 - DNA, 25 bp, Homo sapien
cagttatatcctagctcctggaaag

SEQ ID NO: 1995625 - DNA, 25 bp, Homo sapien
aactgtgcctcaagaagtcagccac

SEQ ID NO: 1995626 - DNA, 25 bp, Homo sapien
ttaactgtgcctcaagaagtcagcc

SEQ ID NO: 1995627 - DNA, 25 bp, Homo sapien
attaactgtgcctcaagaagtcagc

SEQ ID NO: 1995628 - DNA, 25 bp, Homo sapien
taactgtgcctcaagaagtcagcca

SEQ ID NO: 1995629 - DNA, 25 bp, Homo sapien
gaagccctcttatctagtgtttaat

SEQ ID NO: 1995630 - DNA, 25 bp, Homo sapien
tgtaggcaggtcttacccacctggc

SEQ ID NO: 1995631 - DNA, 25 bp, Homo sapien
tccgtaaagttagatgaagccctct

SEQ ID NO: 1995632 - DNA, 25 bp, Homo sapien
gctctgccctttgtttgctccgtaa

SEQ ID NO: 1995633 - DNA, 25 bp, Homo sapien
ttagaaatcatttagacagtaaaaa

SEQ ID NO: 1995634 - DNA, 25 bp, Homo sapien
tagaaatcatttagacagtaaaaag

SEQ ID NO: 1995635 - DNA, 25 bp, Homo sapien
agaaatcatttagacagtaaaaagc

SEQ ID NO: 1995636 - DNA, 25 bp, Homo sapien
gaatgaagttaaggctggacttgac

SEQ ID NO: 1995637 - DNA, 25 bp, Homo sapien
acctcatcattattcaaaagtactg

SEQ ID NO: 1995638 - DNA, 25 bp, Homo sapien
tgggagaatgaagttaaggctggac

SEQ ID NO: 1995639 - DNA, 25 bp, Homo sapien
caaaaagcaaaatacctcatcatta

SEQ ID NO: 1995640 - DNA, 25 bp, Homo sapien
taagattgttgacagtggtttttct

SEQ ID NO: 1995641 - DNA, 25 bp, Homo sapien
atcactgatttacttaagattgttg

SEQ ID NO: 1995642 - DNA, 25 bp, Homo sapien
gatttacttaagattgttgacagtg

SEQ ID NO: 1995643 - DNA, 25 bp, Homo sapien
tctttgttgtaaagagaaccataaa

SEQ ID NO: 1995644 - DNA, 25 bp, Homo sapien
aacctcctatattttcaaggacata

SEQ ID NO: 1995645 - DNA, 25 bp, Homo sapien
aaggaaatagtagcaatttggcaat

SEQ ID NO: 1995646 - DNA, 25 bp, Homo sapien
gaatagtgattaacaattagtcaaa

SEQ ID NO: 1995647 - DNA, 25 bp, Homo sapien
cataatgaaatttaacgtgaggaaa

SEQ ID NO: 1995648 - DNA, 25 bp, Homo sapien
gcaagagtccacacatcaatagctt

SEQ ID NO: 1995649 - DNA, 25 bp, Homo sapien
cctctgtggcttaaaaggttgacac

SEQ ID NO: 1995650 - DNA, 25 bp, Homo sapien
gattgtctgcacaactataggcccc

SEQ ID NO: 1995651 - DNA, 25 bp, Homo sapien
ggcccctaaggatttagctacagca

SEQ ID NO: 1995652 - DNA, 25 bp, Homo sapien
tggtgaaactgtcaatatggtatta

SEQ ID NO: 1995653 - DNA, 25 bp, Homo sapien
aatggtgaaactgtcaatatggtat

SEQ ID NO: 1995654 - DNA, 25 bp, Homo sapien
ggtgaaactgtcaatatggtattat

SEQ ID NO: 1995655 - DNA, 25 bp, Homo sapien
taaatggtgaaactgtcaatatggt

SEQ ID NO: 1995656 - DNA, 25 bp, Homo sapien
cactcagttcaatttgtggtccatg

SEQ ID NO: 1995657 - DNA, 25 bp, Homo sapien
ccttggcactcagttcaatttgtgg

SEQ ID NO: 1995658 - DNA, 25 bp, Homo sapien
ggcactcagttcaatttgtggtcca

SEQ ID NO: 1995659 - DNA, 25 bp, Homo sapien
ttggcactcagttcaatttgtggtc

SEQ ID NO: 1995660 - DNA, 25 bp, Homo sapien
taagccaagtgtggtgtcgccgact

SEQ ID NO: 1995661 - DNA, 25 bp, Homo sapien
tcatgtagcagggttcacaaactcc

SEQ ID NO: 1995662 - DNA, 25 bp, Homo sapien
gggctgcagccaaaccagagaacat

SEQ ID NO: 1995663 - DNA, 25 bp, Homo sapien
tgaaacccaggactttgggctccca

SEQ ID NO: 1995664 - DNA, 25 bp, Homo sapien
tgatcttcacattccactatcacat

SEQ ID NO: 1995665 - DNA, 25 bp, Homo sapien
cattacgttcaagtacatctcatgg

SEQ ID NO: 1995666 - DNA, 25 bp, Homo sapien
gatcttcacattccactatcacata

SEQ ID NO: 1995667 - DNA, 25 bp, Homo sapien
gaatcttctcattacgttcaagtac

SEQ ID NO: 1995668 - DNA, 25 bp, Homo sapien
gctgtaacagaaacgagattagagg

SEQ ID NO: 1995669 - DNA, 25 bp, Homo sapien
gaccaaaggcttatttgccaatcag

SEQ ID NO: 1995670 - DNA, 25 bp, Homo sapien
tgggaacgaatacaaaagcttagtc

SEQ ID NO: 1995671 - DNA, 25 bp, Homo sapien
aaactaaatgctatacggtcctatg

SEQ ID NO: 1995672 - DNA, 25 bp, Homo sapien
ccactttcgcgttgtactgccttca

SEQ ID NO: 1995673 - DNA, 25 bp, Homo sapien
gccagcaaagaacgcataactctga

SEQ ID NO: 1995674 - DNA, 25 bp, Homo sapien
tctacaaatgtctgttgtgcagcca

SEQ ID NO: 1995675 - DNA, 25 bp, Homo sapien
gccttcattagatgcaccaaccgat

SEQ ID NO: 1995676 - DNA, 25 bp, Homo sapien
tagctgtttccggaattattcctct

SEQ ID NO: 1995677 - DNA, 25 bp, Homo sapien
aaacagtgtagctgtttccggaatt

SEQ ID NO: 1995678 - DNA, 25 bp, Homo sapien
ggcaacgggataagttccacatctg

SEQ ID NO: 1995679 - DNA, 25 bp, Homo sapien
taaaggcaacgggataagttccaca

SEQ ID NO: 1995680 - DNA, 25 bp, Homo sapien
taaaacccctgctgtatgtcttaga

SEQ ID NO: 1995681 - DNA, 25 bp, Homo sapien
tagaatccacctaccaatagaggga

SEQ ID NO: 1995682 - DNA, 25 bp, Homo sapien
gctcttgatgagtccttagtgttca

SEQ ID NO: 1995683 - DNA, 25 bp, Homo sapien
ctggtcttctttgggagttctagcc

SEQ ID NO: 1995684 - DNA, 25 bp, Homo sapien
tgcctccatcttccgtcttaaaaaa

SEQ ID NO: 1995685 - DNA, 25 bp, Homo sapien
gacgtaaatcatctccatgcttaaa

SEQ ID NO: 1995686 - DNA, 25 bp, Homo sapien
taaatataactggatatttgcctcc

SEQ ID NO: 1995687 - DNA, 25 bp, Homo sapien
gaagaataagttgatcttgacgtaa

SEQ ID NO: 1995688 - DNA, 25 bp, Homo sapien
tggtggctaacaccttataaggtgt

SEQ ID NO: 1995689 - DNA, 25 bp, Homo sapien
atgttttgtactggtggctaacacc

SEQ ID NO: 1995690 - DNA, 25 bp, Homo sapien
ggctaacaccttataaggtgtcaat

SEQ ID NO: 1995691 - DNA, 25 bp, Homo sapien
catgttttgtactggtggctaacac

SEQ ID NO: 1995692 - DNA, 25 bp, Homo sapien
tgaaggccttagagcacaatgcatt

SEQ ID NO: 1995693 - DNA, 25 bp, Homo sapien
cttacagtagggatcgaaggacatc

SEQ ID NO: 1995694 - DNA, 25 bp, Homo sapien
gaccatgtcggaagaaatttgccaa

SEQ ID NO: 1995695 - DNA, 25 bp, Homo sapien
taggccatggagcaaagaatgtttg

SEQ ID NO: 1995696 - DNA, 25 bp, Homo sapien
aaaggggacagacagtatgtggaag

SEQ ID NO: 1995697 - DNA, 25 bp, Homo sapien
aggggacagacagtatgtggaagaa

SEQ ID NO: 1995698 - DNA, 25 bp, Homo sapien
gaaaggggacagacagtatgtggaa

SEQ ID NO: 1995699 - DNA, 25 bp, Homo sapien
gggacagacagtatgtggaagaagg

SEQ ID NO: 1995700 - DNA, 25 bp, Homo sapien
tctgtatcaagaacttcagccacag

SEQ ID NO: 1995701 - DNA, 25 bp, Homo sapien
ctgtatcaagaacttcagccacagg

SEQ ID NO: 1995702 - DNA, 25 bp, Homo sapien
tctcatatttaaaggggagcaatag

SEQ ID NO: 1995703 - DNA, 25 bp, Homo sapien
taaagtgctcatcaattaatatcaa

SEQ ID NO: 1995704 - DNA, 25 bp, Homo sapien
cattactttgtcacagaaccactca

SEQ ID NO: 1995705 - DNA, 25 bp, Homo sapien
aacaatatcattgtagcagtgttct

SEQ ID NO: 1995706 - DNA, 25 bp, Homo sapien
gacttgctagaaggtcttacagact

SEQ ID NO: 1995707 - DNA, 25 bp, Homo sapien
tgtgcagccaagaatcagtatacaa

SEQ ID NO: 1995708 - DNA, 25 bp, Homo sapien
caatgatggcaattagggcccatgt

SEQ ID NO: 1995709 - DNA, 25 bp, Homo sapien
gaatgtgatctatgacccaggtaaa

SEQ ID NO: 1995710 - DNA, 25 bp, Homo sapien
gcactaatcccatttggcccattct

SEQ ID NO: 1995711 - DNA, 25 bp, Homo sapien
ttaacgtaagtgtccatgacctcag

SEQ ID NO: 1995712 - DNA, 25 bp, Homo sapien
cacagcttttaacgtaagtgtccat

SEQ ID NO: 1995713 - DNA, 25 bp, Homo sapien
gcttttaacgtaagtgtccatgacc

SEQ ID NO: 1995714 - DNA, 25 bp, Homo sapien
gagaaactaagtacaataccctgag

SEQ ID NO: 1995715 - DNA, 25 bp, Homo sapien
tgcatatgaagacaagcgaaattcc

SEQ ID NO: 1995716 - DNA, 25 bp, Homo sapien
tagaaatctacctgccactcaaggg

SEQ ID NO: 1995717 - DNA, 25 bp, Homo sapien
tcagtgcagctgagttgttcaatcc

SEQ ID NO: 1995718 - DNA, 25 bp, Homo sapien
actccaagtatataggtgatcacgc

SEQ ID NO: 1995719 - DNA, 25 bp, Homo sapien
ctccaactccaagtatataggtgat

SEQ ID NO: 1995720 - DNA, 25 bp, Homo sapien
tccaagtatataggtgatcacgcaa

SEQ ID NO: 1995721 - DNA, 25 bp, Homo sapien
atataggtgatcacgcaatatccag

SEQ ID NO: 1995722 - DNA, 25 bp, Homo sapien
atcttgttagtacatagattcaggg

SEQ ID NO: 1995723 - DNA, 25 bp, Homo sapien
gccaggccgcaacttatcttgttag

SEQ ID NO: 1995724 - DNA, 25 bp, Homo sapien
tacaatgtatgtctactggtagtca

SEQ ID NO: 1995725 - DNA, 25 bp, Homo sapien
gattcaggggtaaaaaccatgggca

SEQ ID NO: 1995726 - DNA, 25 bp, Homo sapien
tgaggtctagagcttgaacaactgg

SEQ ID NO: 1995727 - DNA, 25 bp, Homo sapien
caacaaaggctcttgtctgaggcag

SEQ ID NO: 1995728 - DNA, 25 bp, Homo sapien
tttagctaggtggtgttcaaggtcc

SEQ ID NO: 1995729 - DNA, 25 bp, Homo sapien
cattttccagtacagaagtgtgggc

SEQ ID NO: 1995730 - DNA, 25 bp, Homo sapien
tgaccaatccggtcaatctctgaca

SEQ ID NO: 1995731 - DNA, 25 bp, Homo sapien
caatccggtcaatctctgacacaaa

SEQ ID NO: 1995732 - DNA, 25 bp, Homo sapien
caatatacttgaacagatgaccaat

SEQ ID NO: 1995733 - DNA, 25 bp, Homo sapien
gaacagatgaccaatccggtcaatc

SEQ ID NO: 1995734 - DNA, 25 bp, Homo sapien
atatcttttaccttgttggatacac

SEQ ID NO: 1995735 - DNA, 25 bp, Homo sapien
ccaccttcaactaaatatgtgttct

SEQ ID NO: 1995736 - DNA, 25 bp, Homo sapien
ctaagctaagcaattcttttggtac

SEQ ID NO: 1995737 - DNA, 25 bp, Homo sapien
tgattctgccccaaaagaggtaaag

SEQ ID NO: 1995738 - DNA, 25 bp, Homo sapien
gatgttgacaagaaactcatttgtt

SEQ ID NO: 1995739 - DNA, 25 bp, Homo sapien
ggatgttgacaagaaactcatttgt

SEQ ID NO: 1995740 - DNA, 25 bp, Homo sapien
tggatgttgacaagaaactcatttg

SEQ ID NO: 1995741 - DNA, 25 bp, Homo sapien
ctggatgttgacaagaaactcattt

SEQ ID NO: 1995742 - DNA, 25 bp, Homo sapien
ggaagaggctttggatcccgaccca

SEQ ID NO: 1995743 - DNA, 25 bp, Homo sapien
tcttggtactgctcactctgtgtgc

SEQ ID NO: 1995744 - DNA, 25 bp, Homo sapien
tggaggaaagccgtgtaacactgtt

SEQ ID NO: 1995745 - DNA, 25 bp, Homo sapien
cactgtttacggaactcttggtact

SEQ ID NO: 1995746 - DNA, 25 bp, Homo sapien
gatcatacgtaaagtcacaggactg

SEQ ID NO: 1995747 - DNA, 25 bp, Homo sapien
tatatcatagacttccaggtggaca

SEQ ID NO: 1995748 - DNA, 25 bp, Homo sapien
agtttaaggagtggagtaacacacg

SEQ ID NO: 1995749 - DNA, 25 bp, Homo sapien
tgttattcaccaagataggagaggc

SEQ ID NO: 1995750 - DNA, 25 bp, Homo sapien
ttcaagtgcaatatctggaatgttt

SEQ ID NO: 1995751 - DNA, 25 bp, Homo sapien
ttgcatcaaccatcaaggaaaacaa

SEQ ID NO: 1995752 - DNA, 25 bp, Homo sapien
ctggttcaagtgcaatatctggaat

SEQ ID NO: 1995753 - DNA, 25 bp, Homo sapien
ggttcaagtgcaatatctggaatgt

SEQ ID NO: 1995754 - DNA, 25 bp, Homo sapien
ctttacagggatacagggaaattct

SEQ ID NO: 1995755 - DNA, 25 bp, Homo sapien
tgacaaacagtgcaacaatccatag

SEQ ID NO: 1995756 - DNA, 25 bp, Homo sapien
cataagtgcctgaattacaaagaga

SEQ ID NO: 1995757 - DNA, 25 bp, Homo sapien
tttggtggaggaacatctaaggctg

SEQ ID NO: 1995758 - DNA, 25 bp, Homo sapien
tcagactctgcatgtaatgcacagc

SEQ ID NO: 1995759 - DNA, 25 bp, Homo sapien
ggacactctcatcaatcagactctg

SEQ ID NO: 1995760 - DNA, 25 bp, Homo sapien
ttgtgaatctgttccaccactgcag

SEQ ID NO: 1995761 - DNA, 25 bp, Homo sapien
tcttcatccgacaggtctaagcgga

SEQ ID NO: 1995762 - DNA, 25 bp, Homo sapien
taatcaccactgactgcaaagaaca

SEQ ID NO: 1995763 - DNA, 25 bp, Homo sapien
cacggcttggtgagatactggtcac

SEQ ID NO: 1995764 - DNA, 25 bp, Homo sapien
tcagctggctggtgagatgtcaaaa

SEQ ID NO: 1995765 - DNA, 25 bp, Homo sapien
tctcaagaggacgtataatcaccac

SEQ ID NO: 1995766 - DNA, 25 bp, Homo sapien
taagttgccagagatttgacttcgc

SEQ ID NO: 1995767 - DNA, 25 bp, Homo sapien
acttcgctgttaggcaatgaggaaa

SEQ ID NO: 1995768 - DNA, 25 bp, Homo sapien
gccagagatttgacttcgctgttag

SEQ ID NO: 1995769 - DNA, 25 bp, Homo sapien
gatttgacttcgctgttaggcaatg

SEQ ID NO: 1995770 - DNA, 25 bp, Homo sapien
taatttaagagcatgcccactgcaa

SEQ ID NO: 1995771 - DNA, 25 bp, Homo sapien
tctatcctagtccaaaagagcctgt

SEQ ID NO: 1995772 - DNA, 25 bp, Homo sapien
tgaatagaagaataggtacacgcca

SEQ ID NO: 1995773 - DNA, 25 bp, Homo sapien
gatggtgatccttagactgttagaa

SEQ ID NO: 1995774 - DNA, 25 bp, Homo sapien
taaaaatgggaagcattgtatgaaa

SEQ ID NO: 1995775 - DNA, 25 bp, Homo sapien
ttaaaaatgggaagcattgtatgaa

SEQ ID NO: 1995776 - DNA, 25 bp, Homo sapien
ggattccctttaaatggacagcagt

SEQ ID NO: 1995777 - DNA, 25 bp, Homo sapien
gaaccttctgaacccaatctattgg

SEQ ID NO: 1995778 - DNA, 25 bp, Homo sapien
tctctgcctagacgtgtgcttttcc

SEQ ID NO: 1995779 - DNA, 25 bp, Homo sapien
tgcaagtgatgagtaaggattccct

SEQ ID NO: 1995780 - DNA, 25 bp, Homo sapien
ttcacaaagataaacaatagtctat

SEQ ID NO: 1995781 - DNA, 25 bp, Homo sapien
attcacaaagataaacaatagtcta

SEQ ID NO: 1995782 - DNA, 25 bp, Homo sapien
caaagataaacaatagtctatagtt

SEQ ID NO: 1995783 - DNA, 25 bp, Homo sapien
cacaaagataaacaatagtctatag

SEQ ID NO: 1995784 - DNA, 25 bp, Homo sapien
tatacaaaggttgctcctaacgtgg

SEQ ID NO: 1995785 - DNA, 25 bp, Homo sapien
caagcatcttgatgggtcaatccca

SEQ ID NO: 1995786 - DNA, 25 bp, Homo sapien
gaagcagaactcaggtaccatgtaa

SEQ ID NO: 1995787 - DNA, 25 bp, Homo sapien
gctggttactctgaagtctccaata

SEQ ID NO: 1995788 - DNA, 25 bp, Homo sapien
tccagaactctcataacatgtacat

SEQ ID NO: 1995789 - DNA, 25 bp, Homo sapien
caacatattacttcctccagaactc

SEQ ID NO: 1995790 - DNA, 25 bp, Homo sapien
tatttcaacatattacttcctccag

SEQ ID NO: 1995791 - DNA, 25 bp, Homo sapien
tacttcctccagaactctcataaca

SEQ ID NO: 1995792 - DNA, 25 bp, Homo sapien
tgatgctattgggatcatatgcccc

SEQ ID NO: 1995793 - DNA, 25 bp, Homo sapien
taggagttcacacggaagaaaggtc

SEQ ID NO: 1995794 - DNA, 25 bp, Homo sapien
tacaagaatgagcatacagagggct

SEQ ID NO: 1995795 - DNA, 25 bp, Homo sapien
tacattaacaggtctaggtgagcta

SEQ ID NO: 1995796 - DNA, 25 bp, Homo sapien
aggtttatcctctttacaattcttg

SEQ ID NO: 1995797 - DNA, 25 bp, Homo sapien
tgttaaggtggcactgaatacaaag

SEQ ID NO: 1995798 - DNA, 25 bp, Homo sapien
ttcctcacccaacacgcatcaacct

SEQ ID NO: 1995799 - DNA, 25 bp, Homo sapien
tacaattcttgttaaggtggcactg

SEQ ID NO: 1995800 - DNA, 25 bp, Homo sapien
gatataggcttgtcactcacagcca

SEQ ID NO: 1995801 - DNA, 25 bp, Homo sapien
cactctgaggatagagctctaaaga

SEQ ID NO: 1995802 - DNA, 25 bp, Homo sapien
agaaatatgcagactacactctgag

SEQ ID NO: 1995803 - DNA, 25 bp, Homo sapien
taattaaagtgatgtgtcctcacaa

SEQ ID NO: 1995804 - DNA, 25 bp, Homo sapien
tatagccctgccatgtaatactgag

SEQ ID NO: 1995805 - DNA, 25 bp, Homo sapien
tactgagcccctacatcatgttgac

SEQ ID NO: 1995806 - DNA, 25 bp, Homo sapien
taatcgtcaagactgtgatcactgg

SEQ ID NO: 1995807 - DNA, 25 bp, Homo sapien
tactgactactgagtgtgcctttgg

SEQ ID NO: 1995808 - DNA, 25 bp, Homo sapien
tttggaatatgggttatctaccctc

SEQ ID NO: 1995809 - DNA, 25 bp, Homo sapien
tggatgaccagcgtaacagagcctc

SEQ ID NO: 1995810 - DNA, 25 bp, Homo sapien
agatacctggttgggttggatgacc

SEQ ID NO: 1995811 - DNA, 25 bp, Homo sapien
aaaataaccattgacttagctcatg

SEQ ID NO: 1995812 - DNA, 25 bp, Homo sapien
gtctttgtgaccttatcttgagcca

SEQ ID NO: 1995813 - DNA, 25 bp, Homo sapien
accgagctgtatgtgggtaagacca

SEQ ID NO: 1995814 - DNA, 25 bp, Homo sapien
tgaccggaggtcactttcattcccg

SEQ ID NO: 1995815 - DNA, 25 bp, Homo sapien
caaatgtctctgacagtgatggccc

SEQ ID NO: 1995816 - DNA, 25 bp, Homo sapien
tttccactcggagacacatcatggg

SEQ ID NO: 1995817 - DNA, 25 bp, Homo sapien
tgggccatgccttaaagccacggtg

SEQ ID NO: 1995818 - DNA, 25 bp, Homo sapien
taaatggtaatcttgcaaaggctca

SEQ ID NO: 1995819 - DNA, 25 bp, Homo sapien
gcacctagttttgcaccacagaagg

SEQ ID NO: 1995820 - DNA, 25 bp, Homo sapien
tatgcacggtgtcagtgcagagatg

SEQ ID NO: 1995821 - DNA, 25 bp, Homo sapien
tgggccatgccttaaagcctggagg

SEQ ID NO: 1995822 - DNA, 25 bp, Homo sapien
tacttgtgttcccgggcagtagcct

SEQ ID NO: 1995823 - DNA, 25 bp, Homo sapien
cagggctggtgaccacagcatgggt

SEQ ID NO: 1995824 - DNA, 25 bp, Homo sapien
tggaaccaggatgtccaactaaagt

SEQ ID NO: 1995825 - DNA, 25 bp, Homo sapien
gaaacttccttgcttaggcgacgaa

SEQ ID NO: 1995826 - DNA, 25 bp, Homo sapien
tacagaacaagcttgctaatgtcac

SEQ ID NO: 1995827 - DNA, 25 bp, Homo sapien
tggcagatagaaaaagaaaccactt

SEQ ID NO: 1995828 - DNA, 25 bp, Homo sapien
tctatgaaatggactagaacccctg

SEQ ID NO: 1995829 - DNA, 25 bp, Homo sapien
tgaaatggactagaacccctgcaca

SEQ ID NO: 1995830 - DNA, 25 bp, Homo sapien
tatgaaatggactagaacccctgca

SEQ ID NO: 1995831 - DNA, 25 bp, Homo sapien
gaaatggactagaacccctgcacat

SEQ ID NO: 1995832 - DNA, 25 bp, Homo sapien
tcatcaccatcacctatggttccgg

SEQ ID NO: 1995833 - DNA, 25 bp, Homo sapien
aaagctgctccctttatccaatgtc

SEQ ID NO: 1995834 - DNA, 25 bp, Homo sapien
gtagctgtcccgtcacttaactgct

SEQ ID NO: 1995835 - DNA, 25 bp, Homo sapien
cctatggttccggtatcttctatgt

SEQ ID NO: 1995836 - DNA, 25 bp, Homo sapien
cactttcttggggatttcacttctt

SEQ ID NO: 1995837 - DNA, 25 bp, Homo sapien
tcactttcttggggatttcacttct

SEQ ID NO: 1995838 - DNA, 25 bp, Homo sapien
atgttttacacgtagctcttgggag

SEQ ID NO: 1995839 - DNA, 25 bp, Homo sapien
catgttttacacgtagctcttggga

SEQ ID NO: 1995840 - DNA, 25 bp, Homo sapien
tgcactacaggctacgtatttaggg

SEQ ID NO: 1995841 - DNA, 25 bp, Homo sapien
agtcctaatactgcctgatccgaag

SEQ ID NO: 1995842 - DNA, 25 bp, Homo sapien
catacatttgtatccaagcatttgc

SEQ ID NO: 1995843 - DNA, 25 bp, Homo sapien
tcttggattctgcttgaattaaatc

SEQ ID NO: 1995844 - DNA, 25 bp, Homo sapien
ctcccaagttcacaggttcacgcca

SEQ ID NO: 1995845 - DNA, 25 bp, Homo sapien
cccaagttcacaggttcacgccatt

SEQ ID NO: 1995846 - DNA, 25 bp, Homo sapien
aagctgtgcctcccaagttcacagg

SEQ ID NO: 1995847 - DNA, 25 bp, Homo sapien
gcctcccaagttcacaggttcacgc

SEQ ID NO: 1995848 - DNA, 25 bp, Homo sapien
aatacatgctatttccaagactgcc

SEQ ID NO: 1995849 - DNA, 25 bp, Homo sapien
tgttgacatatcagtggtttaaccc

SEQ ID NO: 1995850 - DNA, 25 bp, Homo sapien
tgggtgttgacgtccaggtcacaaa

SEQ ID NO: 1995851 - DNA, 25 bp, Homo sapien
tttcttgtttttgcgaagccccatg

SEQ ID NO: 1995852 - DNA, 25 bp, Homo sapien
ccaaagcaccaacttgtatgaggac

SEQ ID NO: 1995853 - DNA, 25 bp, Homo sapien
caccaacttgtatgaggacatgtaa

SEQ ID NO: 1995854 - DNA, 25 bp, Homo sapien
cacatgacatgaagatgtagatcac

SEQ ID NO: 1995855 - DNA, 25 bp, Homo sapien
tagatcacatcgcagaccaaagcac

SEQ ID NO: 1995856 - DNA, 25 bp, Homo sapien
ccattatgggagtgccttgaagaca

SEQ ID NO: 1995857 - DNA, 25 bp, Homo sapien
tgaagctcgacacatctcaacttgg

SEQ ID NO: 1995858 - DNA, 25 bp, Homo sapien
tgaaaatacggatgcatgatcccag

SEQ ID NO: 1995859 - DNA, 25 bp, Homo sapien
tatcccacgctacttggtgaagctc

SEQ ID NO: 1995860 - DNA, 25 bp, Homo sapien
caacagagcctacatgagatgtgcc

SEQ ID NO: 1995861 - DNA, 25 bp, Homo sapien
tcgttcagatagcagagcatcctct

SEQ ID NO: 1995862 - DNA, 25 bp, Homo sapien
tgagttacaacactggccgagcatt

SEQ ID NO: 1995863 - DNA, 25 bp, Homo sapien
cagagagtgcaagacgtgagactag

SEQ ID NO: 1995864 - DNA, 25 bp, Homo sapien
taatcatggcagaaggagaagcagg

SEQ ID NO: 1995865 - DNA, 25 bp, Homo sapien
tataatcatggcagaaggagaagca

SEQ ID NO: 1995866 - DNA, 25 bp, Homo sapien
cttataatcatggcagaaggagaag

SEQ ID NO: 1995867 - DNA, 25 bp, Homo sapien
agttacgcatggctggggaagcctc

SEQ ID NO: 1995868 - DNA, 25 bp, Homo sapien
tgttcacccacggacagaccttgtg

SEQ ID NO: 1995869 - DNA, 25 bp, Homo sapien
ctggccatggattcatcagccccat

SEQ ID NO: 1995870 - DNA, 25 bp, Homo sapien
ccatgaaattcacctatccaagtag

SEQ ID NO: 1995871 - DNA, 25 bp, Homo sapien
gtagaaattgacttcctggccatgg

SEQ ID NO: 1995872 - DNA, 25 bp, Homo sapien
cctctcaaaagcctaactgttgcca

SEQ ID NO: 1995873 - DNA, 25 bp, Homo sapien
gacattaaaattctaggtcctcact

SEQ ID NO: 1995874 - DNA, 25 bp, Homo sapien
ggtcagcatagcaaggccgcttctt

SEQ ID NO: 1995875 - DNA, 25 bp, Homo sapien
aattcacaccgcatattagacatta

SEQ ID NO: 1995876 - DNA, 25 bp, Homo sapien
caaccaagtgtctgctatattcaag

SEQ ID NO: 1995877 - DNA, 25 bp, Homo sapien
caacaacaaggtattcaggcaacaa

SEQ ID NO: 1995878 - DNA, 25 bp, Homo sapien
gagactcacctagcacattaagact

SEQ ID NO: 1995879 - DNA, 25 bp, Homo sapien
tgaaagcatagatgtcacaggacct

SEQ ID NO: 1995880 - DNA, 25 bp, Homo sapien
cgcagaatcgcagaatgtgatagat

SEQ ID NO: 1995881 - DNA, 25 bp, Homo sapien
tggctctctcataaatgggaaggag

SEQ ID NO: 1995882 - DNA, 25 bp, Homo sapien
ggaatactctccacagtctatgggc

SEQ ID NO: 1995883 - DNA, 25 bp, Homo sapien
tctatgggctgatgtcatgtggctc

SEQ ID NO: 1995884 - DNA, 25 bp, Homo sapien
cagtcagttggtagcaccgtctcca

SEQ ID NO: 1995885 - DNA, 25 bp, Homo sapien
acaagagtggccttcaaagctgaca

SEQ ID NO: 1995886 - DNA, 25 bp, Homo sapien
gagttatgcggtcccctatccaaag

SEQ ID NO: 1995887 - DNA, 25 bp, Homo sapien
gacctggccctaagtaaagtgactg

SEQ ID NO: 1995888 - DNA, 25 bp, Homo sapien
tattaactgagtgacggatacccta

SEQ ID NO: 1995889 - DNA, 25 bp, Homo sapien
tagtaaatcctcaatacgtggtagc

SEQ ID NO: 1995890 - DNA, 25 bp, Homo sapien
tctcacctgccatgtatgggattgc

SEQ ID NO: 1995891 - DNA, 25 bp, Homo sapien
tagtcaatgttactagcatagtgcc

SEQ ID NO: 1995892 - DNA, 25 bp, Homo sapien
aaaaatgtccctagctgagcatcca

SEQ ID NO: 1995893 - DNA, 25 bp, Homo sapien
gatagttagaggtctcagccacaga

SEQ ID NO: 1995894 - DNA, 25 bp, Homo sapien
gaagcaccaattgcagggatctggg

SEQ ID NO: 1995895 - DNA, 25 bp, Homo sapien
taaatgagtggttggccacaagccg

SEQ ID NO: 1995896 - DNA, 25 bp, Homo sapien
gacccatgtctctagaaagcagccc

SEQ ID NO: 1995897 - DNA, 25 bp, Homo sapien
aataaatcagcttggtcgggtgtcc

SEQ ID NO: 1995898 - DNA, 25 bp, Homo sapien
gaaagaagttaagtggcccagcagt

SEQ ID NO: 1995899 - DNA, 25 bp, Homo sapien
tcatggtggctaaacagtctgtcaa

SEQ ID NO: 1995900 - DNA, 25 bp, Homo sapien
gatgaggctacttcaaatggattct

SEQ ID NO: 1995901 - DNA, 25 bp, Homo sapien
tttacgtattagtcaccaatcatcc

SEQ ID NO: 1995902 - DNA, 25 bp, Homo sapien
aaagagactgtaaacatacaaaggc

SEQ ID NO: 1995903 - DNA, 25 bp, Homo sapien
cttaaatcatttctactggagatga

SEQ ID NO: 1995904 - DNA, 25 bp, Homo sapien
gccattcaattactaactaggcctg

SEQ ID NO: 1995905 - DNA, 25 bp, Homo sapien
aagtgcattgaaggtggtatggcta

SEQ ID NO: 1995906 - DNA, 25 bp, Homo sapien
cttccaagatctgatgaggtgaagt

SEQ ID NO: 1995907 - DNA, 25 bp, Homo sapien
ccaagatctgatgaggtgaagtgca

SEQ ID NO: 1995908 - DNA, 25 bp, Homo sapien
gagggctaattaagtcagtgacagc

SEQ ID NO: 1995909 - DNA, 25 bp, Homo sapien
ggcctactgctgctaaatagtgata

SEQ ID NO: 1995910 - DNA, 25 bp, Homo sapien
cttgagtgaagctaacaaatgtgca

SEQ ID NO: 1995911 - DNA, 25 bp, Homo sapien
aagaaagcagattgtccacccatgt

SEQ ID NO: 1995912 - DNA, 25 bp, Homo sapien
tctggcctggcatcttcctgtaaaa

SEQ ID NO: 1995913 - DNA, 25 bp, Homo sapien
tttgaaccgatttaacagccatctg

SEQ ID NO: 1995914 - DNA, 25 bp, Homo sapien
gccctgcataactaacggcctctgg

SEQ ID NO: 1995915 - DNA, 25 bp, Homo sapien
agccatctgataaacacgccctgca

SEQ ID NO: 1995916 - DNA, 25 bp, Homo sapien
tggaaacctttctagatgccgagag

SEQ ID NO: 1995917 - DNA, 25 bp, Homo sapien
caacgccaaggagatagagccagtc

SEQ ID NO: 1995918 - DNA, 25 bp, Homo sapien
ccgagaggttgtatggtccaggcat

SEQ ID NO: 1995919 - DNA, 25 bp, Homo sapien
caaattgcgccccaagcttgcagtt

SEQ ID NO: 1995920 - DNA, 25 bp, Homo sapien
cagcaactaaagggtgagtaccagg

SEQ ID NO: 1995921 - DNA, 25 bp, Homo sapien
agcaactaaagggtgagtaccaggc

SEQ ID NO: 1995922 - DNA, 25 bp, Homo sapien
gctgcaatcaggaagttgggaaaaa

SEQ ID NO: 1995923 - DNA, 25 bp, Homo sapien
catgcacatgggctattgctcaata

SEQ ID NO: 1995924 - DNA, 25 bp, Homo sapien
ttctctaggctgaaatgaagacaat

SEQ ID NO: 1995925 - DNA, 25 bp, Homo sapien
gaaatctggagtagagttctagccc

SEQ ID NO: 1995926 - DNA, 25 bp, Homo sapien
tcctgctgttctagagaaaagacct

SEQ ID NO: 1995927 - DNA, 25 bp, Homo sapien
gttctagagaaaagacctccccaga

SEQ ID NO: 1995928 - DNA, 25 bp, Homo sapien
ctgttctagagaaaagacctcccca

SEQ ID NO: 1995929 - DNA, 25 bp, Homo sapien
tgctgttctagagaaaagacctccc

SEQ ID NO: 1995930 - DNA, 25 bp, Homo sapien
gaacctgttgtagtagcattgtgat

SEQ ID NO: 1995931 - DNA, 25 bp, Homo sapien
ttgggtcaatacagagaggaacctg

SEQ ID NO: 1995932 - DNA, 25 bp, Homo sapien
aaaatgcctgccttcgagtacaaag

SEQ ID NO: 1995933 - DNA, 25 bp, Homo sapien
cctctgctcctgctattgggtcaat

SEQ ID NO: 1995934 - DNA, 25 bp, Homo sapien
ctgtctcacatacaagtgggatctg

SEQ ID NO: 1995935 - DNA, 25 bp, Homo sapien
agatgattttcctcaattagagact

SEQ ID NO: 1995936 - DNA, 25 bp, Homo sapien
gatggaaccagaagattaaaactgt

SEQ ID NO: 1995937 - DNA, 25 bp, Homo sapien
ctttagtggtacctggctgatggcc

SEQ ID NO: 1995938 - DNA, 25 bp, Homo sapien
tgtagtatcctagccagccagtctg

SEQ ID NO: 1995939 - DNA, 25 bp, Homo sapien
ctcttagtactgcttgtagtatcct

SEQ ID NO: 1995940 - DNA, 25 bp, Homo sapien
gccagccagtctgcttcatgcttct

SEQ ID NO: 1995941 - DNA, 25 bp, Homo sapien
tactgcttgtagtatcctagccagc

SEQ ID NO: 1995942 - DNA, 25 bp, Homo sapien
aatacactgacctgaactgtgaacc

SEQ ID NO: 1995943 - DNA, 25 bp, Homo sapien
taatgattctaaagcagggcttggc

SEQ ID NO: 1995944 - DNA, 25 bp, Homo sapien
tccccgtgtgggataattgctatta

SEQ ID NO: 1995945 - DNA, 25 bp, Homo sapien
catgagttagcgctgatgtttgcct

SEQ ID NO: 1995946 - DNA, 25 bp, Homo sapien
tattaatgtacatgagcccaggaac

SEQ ID NO: 1995947 - DNA, 25 bp, Homo sapien
tagctgattggtataggagtgaaga

SEQ ID NO: 1995948 - DNA, 25 bp, Homo sapien
gacaattttcccagatagtcaatga

SEQ ID NO: 1995949 - DNA, 25 bp, Homo sapien
taaatgcaccctcttcataggtgag

SEQ ID NO: 1995950 - DNA, 25 bp, Homo sapien
gctgagttttatggtctggttgacc

SEQ ID NO: 1995951 - DNA, 25 bp, Homo sapien
aaattgtcgtaatcatcacctttac

SEQ ID NO: 1995952 - DNA, 25 bp, Homo sapien
gacctctgagaaacccattttctct

SEQ ID NO: 1995953 - DNA, 25 bp, Homo sapien
cacctttactatggcaggttctgta

SEQ ID NO: 1995954 - DNA, 25 bp, Homo sapien
caattgaaccttgtttaattgccat

SEQ ID NO: 1995955 - DNA, 25 bp, Homo sapien
gattgcatttttgtaagctttgtca

SEQ ID NO: 1995956 - DNA, 25 bp, Homo sapien
atttctttagcaattgaaccttgtt

SEQ ID NO: 1995957 - DNA, 25 bp, Homo sapien
ctttgtcagtttgggtcctgtcaat

SEQ ID NO: 1995958 - DNA, 25 bp, Homo sapien
ttctaatggtttttaccacagtgta

SEQ ID NO: 1995959 - DNA, 25 bp, Homo sapien
taatggtttttaccacagtgtatct

SEQ ID NO: 1995960 - DNA, 25 bp, Homo sapien
ttatactgatccagctttcatgaag

SEQ ID NO: 1995961 - DNA, 25 bp, Homo sapien
tgaaagacaccacttatactgatcc

SEQ ID NO: 1995962 - DNA, 25 bp, Homo sapien
aaaagcttcaagctaaagtgaaaat

SEQ ID NO: 1995963 - DNA, 25 bp, Homo sapien
taaaagcttcaagctaaagtgaaaa

SEQ ID NO: 1995964 - DNA, 25 bp, Homo sapien
tggacagacactaaagcacagatga

SEQ ID NO: 1995965 - DNA, 25 bp, Homo sapien
tatcactgaggtagcggcaatagag

SEQ ID NO: 1995966 - DNA, 25 bp, Homo sapien
gctgtaacatagatcttgggcaagt

SEQ ID NO: 1995967 - DNA, 25 bp, Homo sapien
tgactctcctgcatacaagctgtaa

SEQ ID NO: 1995968 - DNA, 25 bp, Homo sapien
caccatgatcttatgatggatatca

SEQ ID NO: 1995969 - DNA, 25 bp, Homo sapien
ctcaaattagtttaaacagtcagga

SEQ ID NO: 1995970 - DNA, 25 bp, Homo sapien
tggcttaatacagttgaaactccag

SEQ ID NO: 1995971 - DNA, 25 bp, Homo sapien
tttggaggcaggtagtcttctggct

SEQ ID NO: 1995972 - DNA, 25 bp, Homo sapien
tgctatccacgatgaatccataatg

SEQ ID NO: 1995973 - DNA, 25 bp, Homo sapien
gatgaatccataatgagtccttcaa

SEQ ID NO: 1995974 - DNA, 25 bp, Homo sapien
ccataatgagtccttcaaaattttg

SEQ ID NO: 1995975 - DNA, 25 bp, Homo sapien
cctccatggctttaccaactctggc

SEQ ID NO: 1995976 - DNA, 25 bp, Homo sapien
ttcagttcatgtacatttgattcac

SEQ ID NO: 1995977 - DNA, 25 bp, Homo sapien
tctcttcagttcatgtacatttgat

SEQ ID NO: 1995978 - DNA, 25 bp, Homo sapien
ctatctcttcagttcatgtacattt

SEQ ID NO: 1995979 - DNA, 25 bp, Homo sapien
tcttcagttcatgtacatttgattc

SEQ ID NO: 1995980 - DNA, 25 bp, Homo sapien
cttcatctcttttcaaccacaagca

SEQ ID NO: 1995981 - DNA, 25 bp, Homo sapien
caggcctcaacagatatctagaagt

SEQ ID NO: 1995982 - DNA, 25 bp, Homo sapien
catctcttttcaaccacaagcattt

SEQ ID NO: 1995983 - DNA, 25 bp, Homo sapien
ggcctcaacagatatctagaagtgc

SEQ ID NO: 1995984 - DNA, 25 bp, Homo sapien
cactgcgaactacttgctgatgcca

SEQ ID NO: 1995985 - DNA, 25 bp, Homo sapien
gatgccagtcttgctaatggtataa

SEQ ID NO: 1995986 - DNA, 25 bp, Homo sapien
ctcctataaaatcctgcgaaaccaa

SEQ ID NO: 1995987 - DNA, 25 bp, Homo sapien
tcctgcgaaaccaagaacaaccaac

SEQ ID NO: 1995988 - DNA, 25 bp, Homo sapien
cccggaatctgagtgcaccgtcagt

SEQ ID NO: 1995989 - DNA, 25 bp, Homo sapien
tctgctacaaaacacatcacagagg

SEQ ID NO: 1995990 - DNA, 25 bp, Homo sapien
gagtgcaccgtcagtcctgctagct

SEQ ID NO: 1995991 - DNA, 25 bp, Homo sapien
gctacaaaacacatcacagaggcag

SEQ ID NO: 1995992 - DNA, 25 bp, Homo sapien
aatgggacaatataatacagtgagt

SEQ ID NO: 1995993 - DNA, 25 bp, Homo sapien
ggacaatataatacagtgagtccat

SEQ ID NO: 1995994 - DNA, 25 bp, Homo sapien
ctgcacctgacaaagtaatgggaca

SEQ ID NO: 1995995 - DNA, 25 bp, Homo sapien
tgcacctgacaaagtaatgggacaa

SEQ ID NO: 1995996 - DNA, 25 bp, Homo sapien
tatctacggtgcttacctccaacct

SEQ ID NO: 1995997 - DNA, 25 bp, Homo sapien
caatttttctggactaatcgagcct

SEQ ID NO: 1995998 - DNA, 25 bp, Homo sapien
gatgtggagtctcttgtataaacca

SEQ ID NO: 1995999 - DNA, 25 bp, Homo sapien
tgcttgttttgacgctatctacggt

SEQ ID NO: 1996000 - DNA, 25 bp, Homo sapien
tgaatctgttgttgccttgctcttg

SEQ ID NO: 1996001 - DNA, 25 bp, Homo sapien
atctgttgttgccttgctcttggac

SEQ ID NO: 1996002 - DNA, 25 bp, Homo sapien
gatgttgaatctgttgttgccttgc

SEQ ID NO: 1996003 - DNA, 25 bp, Homo sapien
cagatgttgaatctgttgttgcctt

SEQ ID NO: 1996004 - DNA, 25 bp, Homo sapien
ccatggtaggacacagtactggtct

SEQ ID NO: 1996005 - DNA, 25 bp, Homo sapien
gagtgcaatttgagggcagtagccc

SEQ ID NO: 1996006 - DNA, 25 bp, Homo sapien
gcagtagccccttaaagattggtaa

SEQ ID NO: 1996007 - DNA, 25 bp, Homo sapien
gaaagtgccatcttgtaagcagaga

SEQ ID NO: 1996008 - DNA, 25 bp, Homo sapien
tatgcctgctgatgcaacaactagt

SEQ ID NO: 1996009 - DNA, 25 bp, Homo sapien
tgtggtccatatcaacagtcagatc

SEQ ID NO: 1996010 - DNA, 25 bp, Homo sapien
gaggcaacctacataactcacaggg

SEQ ID NO: 1996011 - DNA, 25 bp, Homo sapien
ccagcaatgggaactagatagtgtc

SEQ ID NO: 1996012 - DNA, 25 bp, Homo sapien
gaggttcccggagtgctccttggca

SEQ ID NO: 1996013 - DNA, 25 bp, Homo sapien
cagcagaaccctgtgagagtgattt

SEQ ID NO: 1996014 - DNA, 25 bp, Homo sapien
cacaaaaaggagacgcagcctgaag

SEQ ID NO: 1996015 - DNA, 25 bp, Homo sapien
tccccattagaggttcccggagtgc

SEQ ID NO: 1996016 - DNA, 25 bp, Homo sapien
aatacactgttactatactggagcc

SEQ ID NO: 1996017 - DNA, 25 bp, Homo sapien
tcttgcagaccacatatagctgagt

SEQ ID NO: 1996018 - DNA, 25 bp, Homo sapien
tactggagcctttttggtgtactgg

SEQ ID NO: 1996019 - DNA, 25 bp, Homo sapien
gaacagtcgtttagtggccttctat

SEQ ID NO: 1996020 - DNA, 25 bp, Homo sapien
caactaggatttggatgtgattcag

SEQ ID NO: 1996021 - DNA, 25 bp, Homo sapien
agatgtgtggaggaggctaattcct

SEQ ID NO: 1996022 - DNA, 25 bp, Homo sapien
cctctgctgtagcatttggtgaggg

SEQ ID NO: 1996023 - DNA, 25 bp, Homo sapien
caacaacttggtgattaagagggcc

SEQ ID NO: 1996024 - DNA, 25 bp, Homo sapien
cagtgctgggtccaatctgtccaag

SEQ ID NO: 1996025 - DNA, 25 bp, Homo sapien
aagtcaaccctgtgccagtgctggg

SEQ ID NO: 1996026 - DNA, 25 bp, Homo sapien
aaatccagggatgcatgagcttggc

SEQ ID NO: 1996027 - DNA, 25 bp, Homo sapien
tagatctcccgtatggtccacttgg

SEQ ID NO: 1996028 - DNA, 25 bp, Homo sapien
gttcataccccaaacgctaattgag

SEQ ID NO: 1996029 - DNA, 25 bp, Homo sapien
gcttatttccttggacccgctgtgt

SEQ ID NO: 1996030 - DNA, 25 bp, Homo sapien
ttgtctttgaggagcgatttggccc

SEQ ID NO: 1996031 - DNA, 25 bp, Homo sapien
cccgctgtgtgatgtattgtttcca

SEQ ID NO: 1996032 - DNA, 25 bp, Homo sapien
tcctctcctaacttcttcagaagcc

SEQ ID NO: 1996033 - DNA, 25 bp, Homo sapien
ctcctctcctaacttcttcagaagc

SEQ ID NO: 1996034 - DNA, 25 bp, Homo sapien
ctctcctaacttcttcagaagccat

SEQ ID NO: 1996035 - DNA, 25 bp, Homo sapien
cctctcctaacttcttcagaagcca

SEQ ID NO: 1996036 - DNA, 25 bp, Homo sapien
agcctgactcaagcctcacattttc

SEQ ID NO: 1996037 - DNA, 25 bp, Homo sapien
taatcttgatggaaatactatagcg

SEQ ID NO: 1996038 - DNA, 25 bp, Homo sapien
tttctctgagcattcctgatggtgc

SEQ ID NO: 1996039 - DNA, 25 bp, Homo sapien
ctgatggtgctggacctctaatctt

SEQ ID NO: 1996040 - DNA, 25 bp, Homo sapien
gactttattgttcctaccatcttct

SEQ ID NO: 1996041 - DNA, 25 bp, Homo sapien
ctacctaaagccttcttcatgactt

SEQ ID NO: 1996042 - DNA, 25 bp, Homo sapien
tcttcatgactttattgttcctacc

SEQ ID NO: 1996043 - DNA, 25 bp, Homo sapien
cttctacctaaagccttcttcatga

SEQ ID NO: 1996044 - DNA, 25 bp, Homo sapien
gagccatatgattggggacataagg

SEQ ID NO: 1996045 - DNA, 25 bp, Homo sapien
ctcttccctatatgctcaagagcca

SEQ ID NO: 1996046 - DNA, 25 bp, Homo sapien
tcacactcttccctatatgctcaag

SEQ ID NO: 1996047 - DNA, 25 bp, Homo sapien
tttcacactcttccctatatgctca

SEQ ID NO: 1996048 - DNA, 25 bp, Homo sapien
tgatgaagaccaacaaatggacctt

SEQ ID NO: 1996049 - DNA, 25 bp, Homo sapien
gactgcagttcatggaagactatgg

SEQ ID NO: 1996050 - DNA, 25 bp, Homo sapien
tctttctgggcaattagtctgaggg

SEQ ID NO: 1996051 - DNA, 25 bp, Homo sapien
caaagtattttgagggcagaggtac

SEQ ID NO: 1996052 - DNA, 25 bp, Homo sapien
gatttctgcatgttagcctcattct

SEQ ID NO: 1996053 - DNA, 25 bp, Homo sapien
tttctgcatgttagcctcattctct

SEQ ID NO: 1996054 - DNA, 25 bp, Homo sapien
ctgatttctgcatgttagcctcatt

SEQ ID NO: 1996055 - DNA, 25 bp, Homo sapien
ttctgcatgttagcctcattctctt

SEQ ID NO: 1996056 - DNA, 25 bp, Homo sapien
agattgcaccattgcactccagccc

SEQ ID NO: 1996057 - DNA, 25 bp, Homo sapien
aacccaggaggcagtggttgtggtg

SEQ ID NO: 1996058 - DNA, 25 bp, Homo sapien
cagccctgggcaacaagagcgaaat

SEQ ID NO: 1996059 - DNA, 25 bp, Homo sapien
aggaggcagtggttgtggtgagccg

SEQ ID NO: 1996060 - DNA, 25 bp, Homo sapien
tgtgaagttacgtctcacgcaatgc

SEQ ID NO: 1996061 - DNA, 25 bp, Homo sapien
gggtgtgaagttacgtctcacgcaa

SEQ ID NO: 1996062 - DNA, 25 bp, Homo sapien
caatctggggtgtgaagttacgtct

SEQ ID NO: 1996063 - DNA, 25 bp, Homo sapien
gtgaagttacgtctcacgcaatgcc

SEQ ID NO: 1996064 - DNA, 25 bp, Homo sapien
caaaatgtcccttctggaatctgtt

SEQ ID NO: 1996065 - DNA, 25 bp, Homo sapien
aaatgtcccttctggaatctgtttc

SEQ ID NO: 1996066 - DNA, 25 bp, Homo sapien
tcagaaaagtagagggccttgtttc

SEQ ID NO: 1996067 - DNA, 25 bp, Homo sapien
ccacaaaatgtcccttctggaatct

SEQ ID NO: 1996068 - DNA, 25 bp, Homo sapien
ttttgcctagtttgagcacatacag

SEQ ID NO: 1996069 - DNA, 25 bp, Homo sapien
tgtatcattcactccacagtagaag

SEQ ID NO: 1996070 - DNA, 25 bp, Homo sapien
ggcttgctgaatccccatttgtatc

SEQ ID NO: 1996071 - DNA, 25 bp, Homo sapien
cgttgtggtcaagtgttaagcctct

SEQ ID NO: 1996072 - DNA, 25 bp, Homo sapien
gtacatcattccagcaaacggcaag

SEQ ID NO: 1996073 - DNA, 25 bp, Homo sapien
tacatcattccagcaaacggcaagg

SEQ ID NO: 1996074 - DNA, 25 bp, Homo sapien
cagcagtacatcattccagcaaacg

SEQ ID NO: 1996075 - DNA, 25 bp, Homo sapien
cagtacatcattccagcaaacggca

SEQ ID NO: 1996076 - DNA, 25 bp, Homo sapien
tgtgattagggacaaacaaccccag

SEQ ID NO: 1996077 - DNA, 25 bp, Homo sapien
tgattagggacaaacaaccccagtg

SEQ ID NO: 1996078 - DNA, 25 bp, Homo sapien
taaacttgtctcagatatggaaaaa

SEQ ID NO: 1996079 - DNA, 25 bp, Homo sapien
gttaaacttgtctcagatatggaaa

SEQ ID NO: 1996080 - DNA, 25 bp, Homo sapien
ctggttaaacttgtctcagatatgg

SEQ ID NO: 1996081 - DNA, 25 bp, Homo sapien
atggactgttccctggttaaacttg

SEQ ID NO: 1996082 - DNA, 25 bp, Homo sapien
gagagcactgagtgcctgatgttta

SEQ ID NO: 1996083 - DNA, 25 bp, Homo sapien
ggagagcactgagtgcctgatgttt

SEQ ID NO: 1996084 - DNA, 25 bp, Homo sapien
ctggagagcactgagtgcctgatgt

SEQ ID NO: 1996085 - DNA, 25 bp, Homo sapien
accactgcagtctggagagcactga

SEQ ID NO: 1996086 - DNA, 25 bp, Homo sapien
gatcttaccactaagaaggccatga

SEQ ID NO: 1996087 - DNA, 25 bp, Homo sapien
gaaggccatgacaaagggcctgaga

SEQ ID NO: 1996088 - DNA, 25 bp, Homo sapien
ttagccaagggaagatttatgtgcc

SEQ ID NO: 1996089 - DNA, 25 bp, Homo sapien
tatcaccatattgtacccttccaga

SEQ ID NO: 1996090 - DNA, 25 bp, Homo sapien
ccatgatatatgaaacctggtgtct

SEQ ID NO: 1996091 - DNA, 25 bp, Homo sapien
agttcaacctttaattccccatgat

SEQ ID NO: 1996092 - DNA, 25 bp, Homo sapien
gttcaacctttaattccccatgata

SEQ ID NO: 1996093 - DNA, 25 bp, Homo sapien
attccccatgatatatgaaacctgg

SEQ ID NO: 1996094 - DNA, 25 bp, Homo sapien
tcactgcaagctcgaacttttcttt

SEQ ID NO: 1996095 - DNA, 25 bp, Homo sapien
cactgcaagctcgaacttttctttt

SEQ ID NO: 1996096 - DNA, 25 bp, Homo sapien
ctcactgcaagctcgaacttttctt

SEQ ID NO: 1996097 - DNA, 25 bp, Homo sapien
ctgcaagctcgaacttttcttttaa

SEQ ID NO: 1996098 - DNA, 25 bp, Homo sapien
ttctccaaggaagacacataacgga

SEQ ID NO: 1996099 - DNA, 25 bp, Homo sapien
cagtgagagagtatgctattctcca

SEQ ID NO: 1996100 - DNA, 25 bp, Homo sapien
tacactgatacagtcaagttgtggg

SEQ ID NO: 1996101 - DNA, 25 bp, Homo sapien
ttatctgaggacaggtctttcatag

SEQ ID NO: 1996102 - DNA, 25 bp, Homo sapien
aaatagaatgtatgcttatgagata

SEQ ID NO: 1996103 - DNA, 25 bp, Homo sapien
tagaatgtatgcttatgagataacc

SEQ ID NO: 1996104 - DNA, 25 bp, Homo sapien
caccagaaagagtgaactgttttct

SEQ ID NO: 1996105 - DNA, 25 bp, Homo sapien
aatgtatgcttatgagataaccgca

SEQ ID NO: 1996106 - DNA, 25 bp, Homo sapien
tcttctttatgtacccgtagcccca

SEQ ID NO: 1996107 - DNA, 25 bp, Homo sapien
cttctttatgtacccgtagccccat

SEQ ID NO: 1996108 - DNA, 25 bp, Homo sapien
gtatccccaaacgaagcttctcctc

SEQ ID NO: 1996109 - DNA, 25 bp, Homo sapien
atccccaaacgaagcttctcctctg

SEQ ID NO: 1996110 - DNA, 25 bp, Homo sapien
agtatccccaaacgaagcttctcct

SEQ ID NO: 1996111 - DNA, 25 bp, Homo sapien
tatccccaaacgaagcttctcctct

SEQ ID NO: 1996112 - DNA, 25 bp, Homo sapien
gatgcctattgccaggacccatctg

SEQ ID NO: 1996113 - DNA, 25 bp, Homo sapien
aacgtcttgttgtcggaagttgctc

SEQ ID NO: 1996114 - DNA, 25 bp, Homo sapien
ggtgaggcttgcactagctctggca

SEQ ID NO: 1996115 - DNA, 25 bp, Homo sapien
taacagctgaagcaaactttctagt

SEQ ID NO: 1996116 - DNA, 25 bp, Homo sapien
taaaagccttcacagatatgatgcg

SEQ ID NO: 1996117 - DNA, 25 bp, Homo sapien
tatgcgttgcttgcacatctcgtaa

SEQ ID NO: 1996118 - DNA, 25 bp, Homo sapien
cagatatgatgcgtccttgcacaag

SEQ ID NO: 1996119 - DNA, 25 bp, Homo sapien
gactgttggatttgatatgcgttgc

SEQ ID NO: 1996120 - DNA, 25 bp, Homo sapien
tacatttggcctcatgcttgagaag

SEQ ID NO: 1996121 - DNA, 25 bp, Homo sapien
caggattgggtctataggcagatga

SEQ ID NO: 1996122 - DNA, 25 bp, Homo sapien
tgcgcaaatgatacagcaggcagct

SEQ ID NO: 1996123 - DNA, 25 bp, Homo sapien
taaatgagttcacttcaggattggg

SEQ ID NO: 1996124 - DNA, 25 bp, Homo sapien
ctgcaaatctccaggtagggttctg

SEQ ID NO: 1996125 - DNA, 25 bp, Homo sapien
tgcaaatctccaggtagggttctgt

SEQ ID NO: 1996126 - DNA, 25 bp, Homo sapien
gcaaatctccaggtagggttctgtg

SEQ ID NO: 1996127 - DNA, 25 bp, Homo sapien
aaatctccaggtagggttctgtgtc

SEQ ID NO: 1996128 - DNA, 25 bp, Homo sapien
ccactgagtggtgaaaaggtaaatg

SEQ ID NO: 1996129 - DNA, 25 bp, Homo sapien
tgtcttttgctctggtgcatatctc

SEQ ID NO: 1996130 - DNA, 25 bp, Homo sapien
tgtttaaaggtgacacagggactat

SEQ ID NO: 1996131 - DNA, 25 bp, Homo sapien
gcatatctctgaaacaacaggctgt

SEQ ID NO: 1996132 - DNA, 25 bp, Homo sapien
taaagtactgttttcggcaggtgaa

SEQ ID NO: 1996133 - DNA, 25 bp, Homo sapien
tactgttttcggcaggtgaaacagc

SEQ ID NO: 1996134 - DNA, 25 bp, Homo sapien
gataattaaagtactgttttcggca

SEQ ID NO: 1996135 - DNA, 25 bp, Homo sapien
tactgataattaaagtactgttttc

SEQ ID NO: 1996136 - DNA, 25 bp, Homo sapien
caaggaacacttcctcttgtaattg

SEQ ID NO: 1996137 - DNA, 25 bp, Homo sapien
tcctcttgtaattgactcaactgag

SEQ ID NO: 1996138 - DNA, 25 bp, Homo sapien
tcctattttcaaggaacacttcctc

SEQ ID NO: 1996139 - DNA, 25 bp, Homo sapien
cctcttgtaattgactcaactgaga

SEQ ID NO: 1996140 - DNA, 25 bp, Homo sapien
taagggccgattttgattgtcagca

SEQ ID NO: 1996141 - DNA, 25 bp, Homo sapien
tcctatgtacaccagagaaaatctg

SEQ ID NO: 1996142 - DNA, 25 bp, Homo sapien
tccagcttggtaatggacaccagac

SEQ ID NO: 1996143 - DNA, 25 bp, Homo sapien
agttaacatcattggcatcattggc

SEQ ID NO: 1996144 - DNA, 25 bp, Homo sapien
gggtatctgctctctactgtactca

SEQ ID NO: 1996145 - DNA, 25 bp, Homo sapien
gataacgatgctttcctcatgtcgg

SEQ ID NO: 1996146 - DNA, 25 bp, Homo sapien
gttgctattagaaggattcaaaaaa

SEQ ID NO: 1996147 - DNA, 25 bp, Homo sapien
actgtactcattataaactgtaggg

SEQ ID NO: 1996148 - DNA, 25 bp, Homo sapien
gaagaaattagaggatcaccatagg

SEQ ID NO: 1996149 - DNA, 25 bp, Homo sapien
ttagaggatcaccataggttttgtc

SEQ ID NO: 1996150 - DNA, 25 bp, Homo sapien
tgagctgaatcgaaatcatcttcct

SEQ ID NO: 1996151 - DNA, 25 bp, Homo sapien
cactttctccattatagcttgccat

SEQ ID NO: 1996152 - DNA, 25 bp, Homo sapien
tcataccaccgtcctgaaataccat

SEQ ID NO: 1996153 - DNA, 25 bp, Homo sapien
ttcataccaccgtcctgaaatacca

SEQ ID NO: 1996154 - DNA, 25 bp, Homo sapien
cacttcataccaccgtcctgaaata

SEQ ID NO: 1996155 - DNA, 25 bp, Homo sapien
ataccacttcataccaccgtcctga

SEQ ID NO: 1996156 - DNA, 25 bp, Homo sapien
taatattcgagcaagcacctgacac

SEQ ID NO: 1996157 - DNA, 25 bp, Homo sapien
acctgacacgggtgactttctcctt

SEQ ID NO: 1996158 - DNA, 25 bp, Homo sapien
agcggtaagttttcacaccaaatgc

SEQ ID NO: 1996159 - DNA, 25 bp, Homo sapien
tccagagagtacaaggtggtaatgc

SEQ ID NO: 1996160 - DNA, 25 bp, Homo sapien
ttttctggttgcttatttgcacatg

SEQ ID NO: 1996161 - DNA, 25 bp, Homo sapien
aatatttttggagcaaaaatcatag

SEQ ID NO: 1996162 - DNA, 25 bp, Homo sapien
tcctcgtcattgtgataacattctt

SEQ ID NO: 1996163 - DNA, 25 bp, Homo sapien
ttgtaagatttttcagaggtctgtt

SEQ ID NO: 1996164 - DNA, 25 bp, Homo sapien
tctggcactatgtctgttatactca

SEQ ID NO: 1996165 - DNA, 25 bp, Homo sapien
ttagctggtgcttcgtgtcaaatct

SEQ ID NO: 1996166 - DNA, 25 bp, Homo sapien
gcttcgtgtcaaatctggcactatg

SEQ ID NO: 1996167 - DNA, 25 bp, Homo sapien
cgtgtcaaatctggcactatgtctg

SEQ ID NO: 1996168 - DNA, 25 bp, Homo sapien
gctcttgcagcaacatgcctctgac

SEQ ID NO: 1996169 - DNA, 25 bp, Homo sapien
gcagcaacatgcctctgacttggtg

SEQ ID NO: 1996170 - DNA, 25 bp, Homo sapien
agcaacatgcctctgacttggtgat

SEQ ID NO: 1996171 - DNA, 25 bp, Homo sapien
ctgctcttgcagcaacatgcctctg

SEQ ID NO: 1996172 - DNA, 25 bp, Homo sapien
aatttgctctctggatacatccagt

SEQ ID NO: 1996173 - DNA, 25 bp, Homo sapien
agaatttgctctctggatacatcca

SEQ ID NO: 1996174 - DNA, 25 bp, Homo sapien
tttgctctctggatacatccagtgc

SEQ ID NO: 1996175 - DNA, 25 bp, Homo sapien
gtcaacttctgacctatcaaaaatc

SEQ ID NO: 1996176 - DNA, 25 bp, Homo sapien
cagcatggtctaaggaagttctgac

SEQ ID NO: 1996177 - DNA, 25 bp, Homo sapien
taacagatacgtggttgagtaactc

SEQ ID NO: 1996178 - DNA, 25 bp, Homo sapien
gcttcagtgggtctttcaaagggaa

SEQ ID NO: 1996179 - DNA, 25 bp, Homo sapien
agttctgacagatgggactgcttca

SEQ ID NO: 1996180 - DNA, 25 bp, Homo sapien
cactcatagagcacctctggttgca

SEQ ID NO: 1996181 - DNA, 25 bp, Homo sapien
tgtttccaaagctgtactagaagaa

SEQ ID NO: 1996182 - DNA, 25 bp, Homo sapien
cagtaggtctgagttgtctactcaa

SEQ ID NO: 1996183 - DNA, 25 bp, Homo sapien
actcaaggtatcatgaggctgtttc

SEQ ID NO: 1996184 - DNA, 25 bp, Homo sapien
tccaaagctgtactagaagaaaggc

SEQ ID NO: 1996185 - DNA, 25 bp, Homo sapien
cgctttccaaattactttagaaatg

SEQ ID NO: 1996186 - DNA, 25 bp, Homo sapien
tccaaattactttagaaatgccatg

SEQ ID NO: 1996187 - DNA, 25 bp, Homo sapien
caaattactttagaaatgccatgca

SEQ ID NO: 1996188 - DNA, 25 bp, Homo sapien
tttccaaattactttagaaatgcca

SEQ ID NO: 1996189 - DNA, 25 bp, Homo sapien
cgtgcagttgagaggacaagatgct

SEQ ID NO: 1996190 - DNA, 25 bp, Homo sapien
gctgtgcgctgcattgcatgcttca

SEQ ID NO: 1996191 - DNA, 25 bp, Homo sapien
tttgctgctgcaacttatgttttgc

SEQ ID NO: 1996192 - DNA, 25 bp, Homo sapien
ctagcatgccacgtgcagttgagag

SEQ ID NO: 1996193 - DNA, 25 bp, Homo sapien
caatagttactgagtttaggtggca

SEQ ID NO: 1996194 - DNA, 25 bp, Homo sapien
cagggctcatctttggcgcaatagt

SEQ ID NO: 1996195 - DNA, 25 bp, Homo sapien
tctttggcgcaatagttactgagtt

SEQ ID NO: 1996196 - DNA, 25 bp, Homo sapien
tagttactgagtttaggtggcaaat

SEQ ID NO: 1996197 - DNA, 25 bp, Homo sapien
tgtaaccacaccatccgtagggtag

SEQ ID NO: 1996198 - DNA, 25 bp, Homo sapien
ctaagcctcatctctggtccttgta

SEQ ID NO: 1996199 - DNA, 25 bp, Homo sapien
accacaccatccgtagggtagcctg

SEQ ID NO: 1996200 - DNA, 25 bp, Homo sapien
acaccatccgtagggtagcctgatg

SEQ ID NO: 1996201 - DNA, 25 bp, Homo sapien
gcagaggtgcattgatagcctgcat

SEQ ID NO: 1996202 - DNA, 25 bp, Homo sapien
gttgaaagcaagtgctactgaaatt

SEQ ID NO: 1996203 - DNA, 25 bp, Homo sapien
gagataatgtaaggattcttgctct

SEQ ID NO: 1996204 - DNA, 25 bp, Homo sapien
aattagtggtgccaagaagagagat

SEQ ID NO: 1996205 - DNA, 25 bp, Homo sapien
gccagcagttgccattgtaatcttg

SEQ ID NO: 1996206 - DNA, 25 bp, Homo sapien
cattgtaatcttggtatctatggta

SEQ ID NO: 1996207 - DNA, 25 bp, Homo sapien
cagttgccattgtaatcttggtatc

SEQ ID NO: 1996208 - DNA, 25 bp, Homo sapien
ggtgaatttgccagcagttgccatt

SEQ ID NO: 1996209 - DNA, 25 bp, Homo sapien
ttagaggcgattgccacaactgctc

SEQ ID NO: 1996210 - DNA, 25 bp, Homo sapien
aatttaggtcctgtttccatctagg

SEQ ID NO: 1996211 - DNA, 25 bp, Homo sapien
catctaggaattgatccaaatggaa

SEQ ID NO: 1996212 - DNA, 25 bp, Homo sapien
tagggtactgcaagctgagcatttc

SEQ ID NO: 1996213 - DNA, 25 bp, Homo sapien
tcaaatgcttctggttccagaattc

SEQ ID NO: 1996214 - DNA, 25 bp, Homo sapien
caaatgcttctggttccagaattct

SEQ ID NO: 1996215 - DNA, 25 bp, Homo sapien
tccagaattctcagttgatcctcta

SEQ ID NO: 1996216 - DNA, 25 bp, Homo sapien
gaattctcagttgatcctctatcat

SEQ ID NO: 1996217 - DNA, 25 bp, Homo sapien
gcatccctaaaaagctgttacttgg

SEQ ID NO: 1996218 - DNA, 25 bp, Homo sapien
acttggctggccataccggctagag

SEQ ID NO: 1996219 - DNA, 25 bp, Homo sapien
tagagatgacaactaccacgcttac

SEQ ID NO: 1996220 - DNA, 25 bp, Homo sapien
gtgtttctgcatccctaaaaagctg

SEQ ID NO: 1996221 - DNA, 25 bp, Homo sapien
tatcatcgccttcacataatcatgc

SEQ ID NO: 1996222 - DNA, 25 bp, Homo sapien
gtttcagtatcatcgccttcacata

SEQ ID NO: 1996223 - DNA, 25 bp, Homo sapien
cagtatcatcgccttcacataatca

SEQ ID NO: 1996224 - DNA, 25 bp, Homo sapien
ttagtttcagtatcatcgccttcac

SEQ ID NO: 1996225 - DNA, 25 bp, Homo sapien
tatgcttaggctgtcaaattagcac

SEQ ID NO: 1996226 - DNA, 25 bp, Homo sapien
tgtatcattttccagtgccagggtt

SEQ ID NO: 1996227 - DNA, 25 bp, Homo sapien
gaacctgttagattaaagctgcacc

SEQ ID NO: 1996228 - DNA, 25 bp, Homo sapien
taagactacaaaatcgttcaagagc

SEQ ID NO: 1996229 - DNA, 25 bp, Homo sapien
gcagtgttcaatgagctgtttgtct

SEQ ID NO: 1996230 - DNA, 25 bp, Homo sapien
ccttgtgagggccttgaagatataa

SEQ ID NO: 1996231 - DNA, 25 bp, Homo sapien
gaagatataagtgttgaatttttgg

SEQ ID NO: 1996232 - DNA, 25 bp, Homo sapien
gaaatgcacccccaatgcagtgttc

SEQ ID NO: 1996233 - DNA, 25 bp, Homo sapien
gatgagacctttacattctatggga

SEQ ID NO: 1996234 - DNA, 25 bp, Homo sapien
gtgctgagaaaaaccttggatccag

SEQ ID NO: 1996235 - DNA, 25 bp, Homo sapien
ggataccctacacccaaatccaaga

SEQ ID NO: 1996236 - DNA, 25 bp, Homo sapien
taaagtgaaaactagagtgctgaga

SEQ ID NO: 1996237 - DNA, 25 bp, Homo sapien
gattgcgtcaattcgggttccagcc

SEQ ID NO: 1996238 - DNA, 25 bp, Homo sapien
gaacacgcagtaaaaaatggctccg

SEQ ID NO: 1996239 - DNA, 25 bp, Homo sapien
ttgttttcagcgctccgaaagccgg

SEQ ID NO: 1996240 - DNA, 25 bp, Homo sapien
aaagccggcgcttgagatccaggca

SEQ ID NO: 1996241 - DNA, 25 bp, Homo sapien
gaccaggaaagatcaactgttccag

SEQ ID NO: 1996242 - DNA, 25 bp, Homo sapien
tgtacaaacgtactagaagtcaggc

SEQ ID NO: 1996243 - DNA, 25 bp, Homo sapien
tttgcaaaagtcataactgagagtg

SEQ ID NO: 1996244 - DNA, 25 bp, Homo sapien
cagaagcgccttattatttgcaaaa

SEQ ID NO: 1996245 - DNA, 25 bp, Homo sapien
gaagccaatttctccccagacagag

SEQ ID NO: 1996246 - DNA, 25 bp, Homo sapien
gaaaggcacactcttcagattccaa

SEQ ID NO: 1996247 - DNA, 25 bp, Homo sapien
tctgttagaggaacactccaatgcc

SEQ ID NO: 1996248 - DNA, 25 bp, Homo sapien
tccaatgccaagtatgtgggagcaa

SEQ ID NO: 1996249 - DNA, 25 bp, Homo sapien
tcatgggctaaatcgttctaagtat

SEQ ID NO: 1996250 - DNA, 25 bp, Homo sapien
gctaaatcgttctaagtatgcaaaa

SEQ ID NO: 1996251 - DNA, 25 bp, Homo sapien
gggctaaatcgttctaagtatgcaa

SEQ ID NO: 1996252 - DNA, 25 bp, Homo sapien
atgggctaaatcgttctaagtatgc

SEQ ID NO: 1996253 - DNA, 25 bp, Homo sapien
ttcatgctctttacaagcagagcta

SEQ ID NO: 1996254 - DNA, 25 bp, Homo sapien
gctctttacaagcagagctaataat

SEQ ID NO: 1996255 - DNA, 25 bp, Homo sapien
cagagctaataattttaccaagtag

SEQ ID NO: 1996256 - DNA, 25 bp, Homo sapien
tgatcccagtggaggatggtccacc

SEQ ID NO: 1996257 - DNA, 25 bp, Homo sapien
agatgaactgcacttccagtgttgg

SEQ ID NO: 1996258 - DNA, 25 bp, Homo sapien
ggagtgtgagattttctagttaaaa

SEQ ID NO: 1996259 - DNA, 25 bp, Homo sapien
gacacccatgatgaaggaattggag

SEQ ID NO: 1996260 - DNA, 25 bp, Homo sapien
ctttcgagttgaattttgagaactg

SEQ ID NO: 1996261 - DNA, 25 bp, Homo sapien
tctttctttccaaatgccttcccat

SEQ ID NO: 1996262 - DNA, 25 bp, Homo sapien
gcatttctttctttccaaatgcctt

SEQ ID NO: 1996263 - DNA, 25 bp, Homo sapien
ttgctatgtaaggcttccttgcatt

SEQ ID NO: 1996264 - DNA, 25 bp, Homo sapien
gctatgtaaggcttccttgcatttc

SEQ ID NO: 1996265 - DNA, 25 bp, Homo sapien
ggaatcccaagagaacaacaagtgt

SEQ ID NO: 1996266 - DNA, 25 bp, Homo sapien
aacaacaagtgtcaggagaagagaa

SEQ ID NO: 1996267 - DNA, 25 bp, Homo sapien
gaacaacaagtgtcaggagaagaga

SEQ ID NO: 1996268 - DNA, 25 bp, Homo sapien
gaatcccaagagaacaacaagtgtc

SEQ ID NO: 1996269 - DNA, 25 bp, Homo sapien
gaaagtgggtcgacagactgagtca

SEQ ID NO: 1996270 - DNA, 25 bp, Homo sapien
taggtggctcgcatatccacaagga

SEQ ID NO: 1996271 - DNA, 25 bp, Homo sapien
tactgccatgtagaaggtgacttaa

SEQ ID NO: 1996272 - DNA, 25 bp, Homo sapien
tatgcagttacaattggaaagtggg

SEQ ID NO: 1996273 - DNA, 25 bp, Homo sapien
tatgattggtatcaagacattgaac

SEQ ID NO: 1996274 - DNA, 25 bp, Homo sapien
actttgatattcttaggaggaagag

SEQ ID NO: 1996275 - DNA, 25 bp, Homo sapien
catcagtccattagctaagcataag

SEQ ID NO: 1996276 - DNA, 25 bp, Homo sapien
gagaagtgtgaccttttccacagtc

SEQ ID NO: 1996277 - DNA, 25 bp, Homo sapien
tttgtactacaccttgcccagtagc

SEQ ID NO: 1996278 - DNA, 25 bp, Homo sapien
ctttgtactacaccttgcccagtag

SEQ ID NO: 1996279 - DNA, 25 bp, Homo sapien
tgcccagtagctcttgctttttcct

SEQ ID NO: 1996280 - DNA, 25 bp, Homo sapien
ttgtactacaccttgcccagtagct

SEQ ID NO: 1996281 - DNA, 25 bp, Homo sapien
gactgtagtcatgctctcttttagc

SEQ ID NO: 1996282 - DNA, 25 bp, Homo sapien
cattctgaggaacttggatctagaa

SEQ ID NO: 1996283 - DNA, 25 bp, Homo sapien
taagagaagtcccttcacagggaac

SEQ ID NO: 1996284 - DNA, 25 bp, Homo sapien
ggtaagtataagagtgtgtgtaaag

SEQ ID NO: 1996285 - DNA, 25 bp, Homo sapien
cttcccgcttgggatgctccacggg

SEQ ID NO: 1996286 - DNA, 25 bp, Homo sapien
gcttcccgcttgggatgctccacgg

SEQ ID NO: 1996287 - DNA, 25 bp, Homo sapien
aaacttcagagatccttttcttggc

SEQ ID NO: 1996288 - DNA, 25 bp, Homo sapien
ggcttcccgcttgggatgctccacg

SEQ ID NO: 1996289 - DNA, 25 bp, Homo sapien
caagatttatggatcactgtgtcac

SEQ ID NO: 1996290 - DNA, 25 bp, Homo sapien
tcaagatttatggatcactgtgtca

SEQ ID NO: 1996291 - DNA, 25 bp, Homo sapien
tactcgatgaaaacctgaatccatt

SEQ ID NO: 1996292 - DNA, 25 bp, Homo sapien
tgaaaacctgaatccatttcatatc

SEQ ID NO: 1996293 - DNA, 25 bp, Homo sapien
tttactcgatgaaaacctgaatcca

SEQ ID NO: 1996294 - DNA, 25 bp, Homo sapien
tcgatgaaaacctgaatccatttca

SEQ ID NO: 1996295 - DNA, 25 bp, Homo sapien
ttccctctgctgaatttttctcctt

SEQ ID NO: 1996296 - DNA, 25 bp, Homo sapien
cattttctcaacacctcctttcctt

SEQ ID NO: 1996297 - DNA, 25 bp, Homo sapien
tcacttcttccaccattttctcaac

SEQ ID NO: 1996298 - DNA, 25 bp, Homo sapien
ttttctccttacttctcacttcttc

SEQ ID NO: 1996299 - DNA, 25 bp, Homo sapien
ctcagtctggagcttgtccaagcaa

SEQ ID NO: 1996300 - DNA, 25 bp, Homo sapien
caacagcactcttagtggccagctg

SEQ ID NO: 1996301 - DNA, 25 bp, Homo sapien
tggccagctgcgatactgtcaacag

SEQ ID NO: 1996302 - DNA, 25 bp, Homo sapien
gtcatcactacttggaaaacgtcct

SEQ ID NO: 1996303 - DNA, 25 bp, Homo sapien
tgttggcagagagccccaacaccat

SEQ ID NO: 1996304 - DNA, 25 bp, Homo sapien
ttgctatgtaatgtcccagtgttgg

SEQ ID NO: 1996305 - DNA, 25 bp, Homo sapien
gcctcctttgctatgtaatgtccca

SEQ ID NO: 1996306 - DNA, 25 bp, Homo sapien
tatgtaatgtcccagtgttggcaga

SEQ ID NO: 1996307 - DNA, 25 bp, Homo sapien
tgggctgtctcatctccaactttca

SEQ ID NO: 1996308 - DNA, 25 bp, Homo sapien
ctgggctgtctcatctccaactttc

SEQ ID NO: 1996309 - DNA, 25 bp, Homo sapien
gggctgtctcatctccaactttcat

SEQ ID NO: 1996310 - DNA, 25 bp, Homo sapien
tcctgagtaattttgctcataattt

SEQ ID NO: 1996311 - DNA, 25 bp, Homo sapien
ctcctgagtaattttgctcataatt

SEQ ID NO: 1996312 - DNA, 25 bp, Homo sapien
tcattaccatttaatgtctcgggca

SEQ ID NO: 1996313 - DNA, 25 bp, Homo sapien
taactgtaaccacatcattaccatt

SEQ ID NO: 1996314 - DNA, 25 bp, Homo sapien
aattggcaaataactgtaaccacat

SEQ ID NO: 1996315 - DNA, 25 bp, Homo sapien
taccatttaatgtctcgggcagttc

SEQ ID NO: 1996316 - DNA, 25 bp, Homo sapien
tgttccctggttgttgtatttcacg

SEQ ID NO: 1996317 - DNA, 25 bp, Homo sapien
cacgacatagtgaaccagctgcact

SEQ ID NO: 1996318 - DNA, 25 bp, Homo sapien
tagtgaaccagctgcactttctgca

SEQ ID NO: 1996319 - DNA, 25 bp, Homo sapien
tgtatttcacgacatagtgaaccag

SEQ ID NO: 1996320 - DNA, 25 bp, Homo sapien
atttttcctgagcaatatagctcac

SEQ ID NO: 1996321 - DNA, 25 bp, Homo sapien
gaatttttcctgagcaatatagctc

SEQ ID NO: 1996322 - DNA, 25 bp, Homo sapien
tactgcccagtgtagaacaatgaat

SEQ ID NO: 1996323 - DNA, 25 bp, Homo sapien
acaatattcataaatttactgccca

SEQ ID NO: 1996324 - DNA, 25 bp, Homo sapien
aacaaggaatctcatgttcaacagc

SEQ ID NO: 1996325 - DNA, 25 bp, Homo sapien
gaacaaggaatctcatgttcaacag

SEQ ID NO: 1996326 - DNA, 25 bp, Homo sapien
caaggaatctcatgttcaacagcag

SEQ ID NO: 1996327 - DNA, 25 bp, Homo sapien
acaaggaatctcatgttcaacagca

SEQ ID NO: 1996328 - DNA, 25 bp, Homo sapien
tggttcctgaagctggacgtatgat

SEQ ID NO: 1996329 - DNA, 25 bp, Homo sapien
taacaattacagtcctggttcctga

SEQ ID NO: 1996330 - DNA, 25 bp, Homo sapien
cagacaataatgtcgcaggaacagg

SEQ ID NO: 1996331 - DNA, 25 bp, Homo sapien
tttccattacccttgatcacagggc

SEQ ID NO: 1996332 - DNA, 25 bp, Homo sapien
gcagaagttaaacaccagaagttta

SEQ ID NO: 1996333 - DNA, 25 bp, Homo sapien
caccagaagtttaatagcacctttc

SEQ ID NO: 1996334 - DNA, 25 bp, Homo sapien
gtgaagctgttcatggcagaagtta

SEQ ID NO: 1996335 - DNA, 25 bp, Homo sapien
gaagctgttcatggcagaagttaaa

SEQ ID NO: 1996336 - DNA, 25 bp, Homo sapien
tctcctgatgccgttaataaatcaa

SEQ ID NO: 1996337 - DNA, 25 bp, Homo sapien
ttatctcctgatgccgttaataaat

SEQ ID NO: 1996338 - DNA, 25 bp, Homo sapien
gcttatctcctgatgccgttaataa

SEQ ID NO: 1996339 - DNA, 25 bp, Homo sapien
tcctgatgccgttaataaatcaagt

SEQ ID NO: 1996340 - DNA, 25 bp, Homo sapien
aattaaggcaggcaaaattgaaggc

SEQ ID NO: 1996341 - DNA, 25 bp, Homo sapien
tgaaggcaaggcatgggaaataaac

SEQ ID NO: 1996342 - DNA, 25 bp, Homo sapien
caagctctctgaatataggacagtc

SEQ ID NO: 1996343 - DNA, 25 bp, Homo sapien
gcagaaagtgttaattccacaagct

SEQ ID NO: 1996344 - DNA, 25 bp, Homo sapien
tctctcaaccttggactgaagtcct

SEQ ID NO: 1996345 - DNA, 25 bp, Homo sapien
tctcaaccttggactgaagtcctct

SEQ ID NO: 1996346 - DNA, 25 bp, Homo sapien
ctctcaaccttggactgaagtcctc

SEQ ID NO: 1996347 - DNA, 25 bp, Homo sapien
aggctgacttagaaccactgggaca

SEQ ID NO: 1996348 - DNA, 25 bp, Homo sapien
ttccagtgtggtcccatttttcagg

SEQ ID NO: 1996349 - DNA, 25 bp, Homo sapien
ctcagtcactttggcgtgtttgcac

SEQ ID NO: 1996350 - DNA, 25 bp, Homo sapien
cagtcactttggcgtgtttgcacat

SEQ ID NO: 1996351 - DNA, 25 bp, Homo sapien
gactgttgacatccatgcaagacat

SEQ ID NO: 1996352 - DNA, 25 bp, Homo sapien
ttttataaggtggaatttctctgca

SEQ ID NO: 1996353 - DNA, 25 bp, Homo sapien
ttttccatgatcgtgaggcttcccc

SEQ ID NO: 1996354 - DNA, 25 bp, Homo sapien
tgcctttttccatgatcgtgaggct

SEQ ID NO: 1996355 - DNA, 25 bp, Homo sapien
tccttttgcagctcaacaaatgtcg

SEQ ID NO: 1996356 - DNA, 25 bp, Homo sapien
catggacaggtcttcttgaataagt

SEQ ID NO: 1996357 - DNA, 25 bp, Homo sapien
tgtcgttaatgctatttgaggctct

SEQ ID NO: 1996358 - DNA, 25 bp, Homo sapien
aataagttctctttggcgtgctgta

SEQ ID NO: 1996359 - DNA, 25 bp, Homo sapien
tcatctgctacctctgcacccatcc

SEQ ID NO: 1996360 - DNA, 25 bp, Homo sapien
tgtaacctaaactgccaaagtgctt

SEQ ID NO: 1996361 - DNA, 25 bp, Homo sapien
acccatcccctttagcatcttgtaa

SEQ ID NO: 1996362 - DNA, 25 bp, Homo sapien
ctctaccctcaaatgctgtatcctt

SEQ ID NO: 1996363 - DNA, 25 bp, Homo sapien
tgcagaaacagagcgtgtgtcactt

SEQ ID NO: 1996364 - DNA, 25 bp, Homo sapien
gatatgattcattgtgaaagcgaga

SEQ ID NO: 1996365 - DNA, 25 bp, Homo sapien
ttgtgaaagcgagagataaagcagg

SEQ ID NO: 1996366 - DNA, 25 bp, Homo sapien
agcaggccaaacctttaatattcac

SEQ ID NO: 1996367 - DNA, 25 bp, Homo sapien
cctcgcatggaacaaatctaggcag

SEQ ID NO: 1996368 - DNA, 25 bp, Homo sapien
taatgtaccaaggatactgttgtaa

SEQ ID NO: 1996369 - DNA, 25 bp, Homo sapien
ctgttgtaaatctgacattcctcgc

SEQ ID NO: 1996370 - DNA, 25 bp, Homo sapien
caaataattcagtgtctcttggggg

SEQ ID NO: 1996371 - DNA, 25 bp, Homo sapien
tgactgcatattggttttgagaaca

SEQ ID NO: 1996372 - DNA, 25 bp, Homo sapien
accgtcttacactccagtaaagctg

SEQ ID NO: 1996373 - DNA, 25 bp, Homo sapien
gggatctgagtcaccgtcttacact

SEQ ID NO: 1996374 - DNA, 25 bp, Homo sapien
aatgtttctgtgttcctagccagca

SEQ ID NO: 1996375 - DNA, 25 bp, Homo sapien
ttttcccctgctctgactcaactgc

SEQ ID NO: 1996376 - DNA, 25 bp, Homo sapien
ctttgaaacatagcaactcctatgg

SEQ ID NO: 1996377 - DNA, 25 bp, Homo sapien
gaaacatagcaactcctatggcatt

SEQ ID NO: 1996378 - DNA, 25 bp, Homo sapien
gctctgactcaactgcattacccag

SEQ ID NO: 1996379 - DNA, 25 bp, Homo sapien
tcaagaacctgaatacatctcctct

SEQ ID NO: 1996380 - DNA, 25 bp, Homo sapien
ttcaagaacctgaatacatctcctc

SEQ ID NO: 1996381 - DNA, 25 bp, Homo sapien
ccttcaagaacctgaatacatctcc

SEQ ID NO: 1996382 - DNA, 25 bp, Homo sapien
ctccttcaagaacctgaatacatct

SEQ ID NO: 1996383 - DNA, 25 bp, Homo sapien
tgtcctgagctaatgggaattggct

SEQ ID NO: 1996384 - DNA, 25 bp, Homo sapien
aactggatagactgcctggttgtca

SEQ ID NO: 1996385 - DNA, 25 bp, Homo sapien
gcaatgcagatttccctgtgatgga

SEQ ID NO: 1996386 - DNA, 25 bp, Homo sapien
ttcaatggagccacctgtcctgagc

SEQ ID NO: 1996387 - DNA, 25 bp, Homo sapien
cctgtaactgtccattctcaatctt

SEQ ID NO: 1996388 - DNA, 25 bp, Homo sapien
cactttaattgagcaaggaggtaca

SEQ ID NO: 1996389 - DNA, 25 bp, Homo sapien
tctcaatcttcactttaattgagca

SEQ ID NO: 1996390 - DNA, 25 bp, Homo sapien
tcttcactttaattgagcaaggagg

SEQ ID NO: 1996391 - DNA, 25 bp, Homo sapien
tcagttctaacaggggccagagtaa

SEQ ID NO: 1996392 - DNA, 25 bp, Homo sapien
tttgtccactggtgtggaatgttcc

SEQ ID NO: 1996393 - DNA, 25 bp, Homo sapien
gggccagagtaattttgtccactgg

SEQ ID NO: 1996394 - DNA, 25 bp, Homo sapien
gaatgttccgtgaagtgaccaacag

SEQ ID NO: 1996395 - DNA, 25 bp, Homo sapien
aaaagtccctgtgatgacaggagga

SEQ ID NO: 1996396 - DNA, 25 bp, Homo sapien
cagggagtacacttcagacccagaa

SEQ ID NO: 1996397 - DNA, 25 bp, Homo sapien
atgacaggaggagtgaagggtgttc

SEQ ID NO: 1996398 - DNA, 25 bp, Homo sapien
tcagggagtacacttcagacccaga

SEQ ID NO: 1996399 - DNA, 25 bp, Homo sapien
tcttctgctggtccaaacctagcca

SEQ ID NO: 1996400 - DNA, 25 bp, Homo sapien
gacttatctacagagcagatgccag

SEQ ID NO: 1996401 - DNA, 25 bp, Homo sapien
cgtactctgtatttagaatggccca

SEQ ID NO: 1996402 - DNA, 25 bp, Homo sapien
cagatgccaggttccgtctcaagct

SEQ ID NO: 1996403 - DNA, 25 bp, Homo sapien
cagggtggtcagattggaagaaggt

SEQ ID NO: 1996404 - DNA, 25 bp, Homo sapien
ggtcagattggaagaaggtgcccac

SEQ ID NO: 1996405 - DNA, 25 bp, Homo sapien
ttggaagaaggtgcccaccaagtgt

SEQ ID NO: 1996406 - DNA, 25 bp, Homo sapien
aggtgcccaccaagtgtcttttact

SEQ ID NO: 1996407 - DNA, 25 bp, Homo sapien
ctacaggggtgaagaaaagatcaat

SEQ ID NO: 1996408 - DNA, 25 bp, Homo sapien
acaggggtgaagaaaagatcaatta

SEQ ID NO: 1996409 - DNA, 25 bp, Homo sapien
tacaggggtgaagaaaagatcaatt

SEQ ID NO: 1996410 - DNA, 25 bp, Homo sapien
caggggtgaagaaaagatcaattat

SEQ ID NO: 1996411 - DNA, 25 bp, Homo sapien
ctgtctctggtgaaggaggagaaaa

SEQ ID NO: 1996412 - DNA, 25 bp, Homo sapien
tctggtgaaggaggagaaaatggtg

SEQ ID NO: 1996413 - DNA, 25 bp, Homo sapien
tggtgaaggaggagaaaatggtgat

SEQ ID NO: 1996414 - DNA, 25 bp, Homo sapien
gtgaaggaggagaaaatggtgattc

SEQ ID NO: 1996415 - DNA, 25 bp, Homo sapien
attatggtaggattcctctctttca

SEQ ID NO: 1996416 - DNA, 25 bp, Homo sapien
ttattatggtaggattcctctcttt

SEQ ID NO: 1996417 - DNA, 25 bp, Homo sapien
aatgaagatctttctatgttattat

SEQ ID NO: 1996418 - DNA, 25 bp, Homo sapien
attgatgatttagtccttgcttcaa

SEQ ID NO: 1996419 - DNA, 25 bp, Homo sapien
gagagtcacttccagcagtgaagga

SEQ ID NO: 1996420 - DNA, 25 bp, Homo sapien
tgactaggaaccagagagtcacttc

SEQ ID NO: 1996421 - DNA, 25 bp, Homo sapien
ctattttgactaggaaccagagagt

SEQ ID NO: 1996422 - DNA, 25 bp, Homo sapien
ttaggtctattttgactaggaacca

SEQ ID NO: 1996423 - DNA, 25 bp, Homo sapien
tctctttccattaacataattggct

SEQ ID NO: 1996424 - DNA, 25 bp, Homo sapien
agtgtttatgatgtccgtagctttc

SEQ ID NO: 1996425 - DNA, 25 bp, Homo sapien
tgatgtccgtagctttctctctcat

SEQ ID NO: 1996426 - DNA, 25 bp, Homo sapien
tttatgatgtccgtagctttctctc

SEQ ID NO: 1996427 - DNA, 25 bp, Homo sapien
cactttcaacagtattattccccat

SEQ ID NO: 1996428 - DNA, 25 bp, Homo sapien
ccactttcaacagtattattcccca

SEQ ID NO: 1996429 - DNA, 25 bp, Homo sapien
aataatctccattgagtggctttgc

SEQ ID NO: 1996430 - DNA, 25 bp, Homo sapien
ccctttgaacaaaccggcaattgtg

SEQ ID NO: 1996431 - DNA, 25 bp, Homo sapien
aattgtggcccctttgttccattgc

SEQ ID NO: 1996432 - DNA, 25 bp, Homo sapien
gtttgtcaaaataatctccattgag

SEQ ID NO: 1996433 - DNA, 25 bp, Homo sapien
tgaatatggcaatcatcatcaaaac

SEQ ID NO: 1996434 - DNA, 25 bp, Homo sapien
ggctatttccagttcgtactctacc

SEQ ID NO: 1996435 - DNA, 25 bp, Homo sapien
ctttgttcatgaccttattaaaggc

SEQ ID NO: 1996436 - DNA, 25 bp, Homo sapien
ggcaaaattaacataaccataggtc

SEQ ID NO: 1996437 - DNA, 25 bp, Homo sapien
ccagtaaatcatgtactgcatcctc

SEQ ID NO: 1996438 - DNA, 25 bp, Homo sapien
gaaaaccagtaaatcatgtactgca

SEQ ID NO: 1996439 - DNA, 25 bp, Homo sapien
aaccagtaaatcatgtactgcatcc

SEQ ID NO: 1996440 - DNA, 25 bp, Homo sapien
tagaaaaccagtaaatcatgtactg

SEQ ID NO: 1996441 - DNA, 25 bp, Homo sapien
taaatttgtatgtaaaactggcact

SEQ ID NO: 1996442 - DNA, 25 bp, Homo sapien
aacataaaccatcccagatctttaa

SEQ ID NO: 1996443 - DNA, 25 bp, Homo sapien
tgtattgaagaacctatcccatggg

SEQ ID NO: 1996444 - DNA, 25 bp, Homo sapien
gagaaattgctaatatcagctcgct

SEQ ID NO: 1996445 - DNA, 25 bp, Homo sapien
cagctcgctttactctaatggtcca

SEQ ID NO: 1996446 - DNA, 25 bp, Homo sapien
cttgtagtttctttgcacctggtaa

SEQ ID NO: 1996447 - DNA, 25 bp, Homo sapien
tctcctagaagccagccgtattttt

SEQ ID NO: 1996448 - DNA, 25 bp, Homo sapien
tagaagccagccgtatttttctatc

SEQ ID NO: 1996449 - DNA, 25 bp, Homo sapien
tcctagaagccagccgtatttttct

SEQ ID NO: 1996450 - DNA, 25 bp, Homo sapien
ctctcctagaagccagccgtatttt

SEQ ID NO: 1996451 - DNA, 25 bp, Homo sapien
caattgtttccttcactcccatatt

SEQ ID NO: 1996452 - DNA, 25 bp, Homo sapien
tgccttcaaccctcaaccaattgtt

SEQ ID NO: 1996453 - DNA, 25 bp, Homo sapien
aattgtttccttcactcccatattc

SEQ ID NO: 1996454 - DNA, 25 bp, Homo sapien
tcatagcactgattcactgccttca

SEQ ID NO: 1996455 - DNA, 25 bp, Homo sapien
aagcctacagtgcctgatattttca

SEQ ID NO: 1996456 - DNA, 25 bp, Homo sapien
cctacagtgcctgatattttcaggc

SEQ ID NO: 1996457 - DNA, 25 bp, Homo sapien
tattttcaggcagtctcccattcaa

SEQ ID NO: 1996458 - DNA, 25 bp, Homo sapien
attttcaggcagtctcccattcaag

SEQ ID NO: 1996459 - DNA, 25 bp, Homo sapien
tctatggcatgtaatgttatactca

SEQ ID NO: 1996460 - DNA, 25 bp, Homo sapien
tactgattagtgttgatgcatgcaa

SEQ ID NO: 1996461 - DNA, 25 bp, Homo sapien
caaattgcacaaaacgttctatggc

SEQ ID NO: 1996462 - DNA, 25 bp, Homo sapien
tgttatactcaagaaagatggtatt

SEQ ID NO: 1996463 - DNA, 25 bp, Homo sapien
ggcgcttcatactttctcctacgca

SEQ ID NO: 1996464 - DNA, 25 bp, Homo sapien
ttttctaaatcaactaagggatcca

SEQ ID NO: 1996465 - DNA, 25 bp, Homo sapien
ggatccaaggtcgaccctggcgctt

SEQ ID NO: 1996466 - DNA, 25 bp, Homo sapien
tttctaaatcaactaagggatccaa

SEQ ID NO: 1996467 - DNA, 25 bp, Homo sapien
ctttctcattgctcactgaacccat

SEQ ID NO: 1996468 - DNA, 25 bp, Homo sapien
gctggtatggtgtctcagcatctct

SEQ ID NO: 1996469 - DNA, 25 bp, Homo sapien
tcctgtggtaactgaacctttgggc

SEQ ID NO: 1996470 - DNA, 25 bp, Homo sapien
catgttttaatcctgtggtaactga

SEQ ID NO: 1996471 - DNA, 25 bp, Homo sapien
tgccttcgtattgtgggtgccacct

SEQ ID NO: 1996472 - DNA, 25 bp, Homo sapien
tctgggagactgtgttgtaataggc

SEQ ID NO: 1996473 - DNA, 25 bp, Homo sapien
ctgggagactgtgttgtaataggca

SEQ ID NO: 1996474 - DNA, 25 bp, Homo sapien
ttacttcctcctcctctcttctctc

SEQ ID NO: 1996475 - DNA, 25 bp, Homo sapien
cttcctcctcctctcttctctccat

SEQ ID NO: 1996476 - DNA, 25 bp, Homo sapien
attacttcctcctcctctcttctct

SEQ ID NO: 1996477 - DNA, 25 bp, Homo sapien
cttcattattacttcctcctcctct

SEQ ID NO: 1996478 - DNA, 25 bp, Homo sapien
aaaggtaggatgcttcttatacata

SEQ ID NO: 1996479 - DNA, 25 bp, Homo sapien
gatgcttcttatacatataagcagg

SEQ ID NO: 1996480 - DNA, 25 bp, Homo sapien
tctgagatataaaaagttagggtaa

SEQ ID NO: 1996481 - DNA, 25 bp, Homo sapien
tagggtaaaggtaggatgcttctta

SEQ ID NO: 1996482 - DNA, 25 bp, Homo sapien
catttcatctattaagtgaccactt

SEQ ID NO: 1996483 - DNA, 25 bp, Homo sapien
tgatcatttcatctattaagtgacc

SEQ ID NO: 1996484 - DNA, 25 bp, Homo sapien
aggaactgtggcccatcactgatca

SEQ ID NO: 1996485 - DNA, 25 bp, Homo sapien
ggaactgtggcccatcactgatcat

SEQ ID NO: 1996486 - DNA, 25 bp, Homo sapien
ggctgtttagtaggcacaaaaccag

SEQ ID NO: 1996487 - DNA, 25 bp, Homo sapien
ggtgaccatgattgcctttctaggc

SEQ ID NO: 1996488 - DNA, 25 bp, Homo sapien
cagtaatggggtgaccatgattgcc

SEQ ID NO: 1996489 - DNA, 25 bp, Homo sapien
ctccaggctgtttagtaggcacaaa

SEQ ID NO: 1996490 - DNA, 25 bp, Homo sapien
gtagctattattgagctcgccaaag

SEQ ID NO: 1996491 - DNA, 25 bp, Homo sapien
tattattgagctcgccaaagattct

SEQ ID NO: 1996492 - DNA, 25 bp, Homo sapien
gctcgccaaagattctccaaacttc

SEQ ID NO: 1996493 - DNA, 25 bp, Homo sapien
actccttgtagctattattgagctc

SEQ ID NO: 1996494 - DNA, 25 bp, Homo sapien
tccctggatctggataacaatattg

SEQ ID NO: 1996495 - DNA, 25 bp, Homo sapien
ggatctggataacaatattgacatg

SEQ ID NO: 1996496 - DNA, 25 bp, Homo sapien
gattccctggatctggataacaata

SEQ ID NO: 1996497 - DNA, 25 bp, Homo sapien
cctggatctggataacaatattgac

SEQ ID NO: 1996498 - DNA, 25 bp, Homo sapien
gagaaacatgagtcgtcctctgtga

SEQ ID NO: 1996499 - DNA, 25 bp, Homo sapien
tccagggaaaattgggcagcagtac

SEQ ID NO: 1996500 - DNA, 25 bp, Homo sapien
catctctcgtggcttgcagtgtata

SEQ ID NO: 1996501 - DNA, 25 bp, Homo sapien
tatcaggtttaattagacagctgcc

SEQ ID NO: 1996502 - DNA, 25 bp, Homo sapien
ccaaagccttagacacaatgatcac

SEQ ID NO: 1996503 - DNA, 25 bp, Homo sapien
aaaggaaggtggtagcttgggctgc

SEQ ID NO: 1996504 - DNA, 25 bp, Homo sapien
aaggtggtagcttgggctgccccaa

SEQ ID NO: 1996505 - DNA, 25 bp, Homo sapien
cacaatgatcacatccctgtttctg

SEQ ID NO: 1996506 - DNA, 25 bp, Homo sapien
taaggctctctcatacctcccgtgt

SEQ ID NO: 1996507 - DNA, 25 bp, Homo sapien
atcagtatttaaggctctctcatac

SEQ ID NO: 1996508 - DNA, 25 bp, Homo sapien
cattgcctgaactgacattcagtgg

SEQ ID NO: 1996509 - DNA, 25 bp, Homo sapien
tctcagagacattgcctgaactgac

SEQ ID NO: 1996510 - DNA, 25 bp, Homo sapien
caaggcacctggtgatctagagcag

SEQ ID NO: 1996511 - DNA, 25 bp, Homo sapien
tgttcacactctctcaagatgtggg

SEQ ID NO: 1996512 - DNA, 25 bp, Homo sapien
gaattatacactttgggcaggccag

SEQ ID NO: 1996513 - DNA, 25 bp, Homo sapien
tctagagcaggcctgaatctaattt

SEQ ID NO: 1996514 - DNA, 25 bp, Homo sapien
caatgggttctcagttattgggttt

SEQ ID NO: 1996515 - DNA, 25 bp, Homo sapien
gttacttcctgattgaccttagaca

SEQ ID NO: 1996516 - DNA, 25 bp, Homo sapien
catctcaggaatatccaatgggttc

SEQ ID NO: 1996517 - DNA, 25 bp, Homo sapien
ctgttacttcctgattgaccttaga

SEQ ID NO: 1996518 - DNA, 25 bp, Homo sapien
ttctgttccacattggcttagacac

SEQ ID NO: 1996519 - DNA, 25 bp, Homo sapien
ctccaggtaataaaacacagctctt

SEQ ID NO: 1996520 - DNA, 25 bp, Homo sapien
ttgtcctccaggtaataaaacacag

SEQ ID NO: 1996521 - DNA, 25 bp, Homo sapien
tcctccaggtaataaaacacagctc

SEQ ID NO: 1996522 - DNA, 25 bp, Homo sapien
agtttcatctcctgtgaattgccta

SEQ ID NO: 1996523 - DNA, 25 bp, Homo sapien
gtttcatctcctgtgaattgcctat

SEQ ID NO: 1996524 - DNA, 25 bp, Homo sapien
ggttgtggaggagataactgttaaa

SEQ ID NO: 1996525 - DNA, 25 bp, Homo sapien
cagtagcttgggttgtggaggagat

SEQ ID NO: 1996526 - DNA, 25 bp, Homo sapien
tggaggagataactgttaaaatcat

SEQ ID NO: 1996527 - DNA, 25 bp, Homo sapien
tagcttgggttgtggaggagataac

SEQ ID NO: 1996528 - DNA, 25 bp, Homo sapien
gaacatattaagttctcatcagctg

SEQ ID NO: 1996529 - DNA, 25 bp, Homo sapien
tttcatttatcttgagggcaaagcc

SEQ ID NO: 1996530 - DNA, 25 bp, Homo sapien
taagttctcatcagctggaggattt

SEQ ID NO: 1996531 - DNA, 25 bp, Homo sapien
gggaggaagaacatattaagttctc

SEQ ID NO: 1996532 - DNA, 25 bp, Homo sapien
agcgtgaaggctttggggattccga

SEQ ID NO: 1996533 - DNA, 25 bp, Homo sapien
aaggctttggggattccgagagtct

SEQ ID NO: 1996534 - DNA, 25 bp, Homo sapien
gctttggggattccgagagtctctg

SEQ ID NO: 1996535 - DNA, 25 bp, Homo sapien
tttggagcgtgaaggctttggggat

SEQ ID NO: 1996536 - DNA, 25 bp, Homo sapien
gttgttatttattgcagtttgtggg

SEQ ID NO: 1996537 - DNA, 25 bp, Homo sapien
tggcacagtcaatctgactggagct

SEQ ID NO: 1996538 - DNA, 25 bp, Homo sapien
ctgcttggcacagtcaatctgactg

SEQ ID NO: 1996539 - DNA, 25 bp, Homo sapien
tcagaagagacggttgttatttatt

SEQ ID NO: 1996540 - DNA, 25 bp, Homo sapien
catctccagatacttgtgttttggg

SEQ ID NO: 1996541 - DNA, 25 bp, Homo sapien
tttgggtccaccagaaagaactggc

SEQ ID NO: 1996542 - DNA, 25 bp, Homo sapien
accttcatctccagatacttgtgtt

SEQ ID NO: 1996543 - DNA, 25 bp, Homo sapien
ctccagatacttgtgttttgggtcc

SEQ ID NO: 1996544 - DNA, 25 bp, Homo sapien
cctcaagatcattggcaagaataac

SEQ ID NO: 1996545 - DNA, 25 bp, Homo sapien
aaggaggagacccatattagcaact

SEQ ID NO: 1996546 - DNA, 25 bp, Homo sapien
tactggctcctcaagatcattggca

SEQ ID NO: 1996547 - DNA, 25 bp, Homo sapien
tattagcaactactggctcctcaag

SEQ ID NO: 1996548 - DNA, 25 bp, Homo sapien
taagtctaacatgctgaatggcctt

SEQ ID NO: 1996549 - DNA, 25 bp, Homo sapien
ctgtccgtgggataacttgtctcta

SEQ ID NO: 1996550 - DNA, 25 bp, Homo sapien
gtctctagagccaacagtaagtcta

SEQ ID NO: 1996551 - DNA, 25 bp, Homo sapien
cccaattttaagctgtccgtgggat

SEQ ID NO: 1996552 - DNA, 25 bp, Homo sapien
gagacccataggcaactggtatggg

SEQ ID NO: 1996553 - DNA, 25 bp, Homo sapien
ctgagacccataggcaactggtatg

SEQ ID NO: 1996554 - DNA, 25 bp, Homo sapien
tggtatggggatatcctgccctctt

SEQ ID NO: 1996555 - DNA, 25 bp, Homo sapien
ggcaactggtatggggatatcctgc

SEQ ID NO: 1996556 - DNA, 25 bp, Homo sapien
cttggggttgtaagagccaggatgt

SEQ ID NO: 1996557 - DNA, 25 bp, Homo sapien
tggggttgtaagagccaggatgttc

SEQ ID NO: 1996558 - DNA, 25 bp, Homo sapien
cccttggggttgtaagagccaggat

SEQ ID NO: 1996559 - DNA, 25 bp, Homo sapien
cttcccttggggttgtaagagccag

SEQ ID NO: 1996560 - DNA, 25 bp, Homo sapien
acttctaatcctcgcaggacctttt

SEQ ID NO: 1996561 - DNA, 25 bp, Homo sapien
tcgcaggacctttttctttcggcat

SEQ ID NO: 1996562 - DNA, 25 bp, Homo sapien
ctcgcaggacctttttctttcggca

SEQ ID NO: 1996563 - DNA, 25 bp, Homo sapien
ttcccacttctaatcctcgcaggac

SEQ ID NO: 1996564 - DNA, 25 bp, Homo sapien
ctgttgggaaagattagaacatttt

SEQ ID NO: 1996565 - DNA, 25 bp, Homo sapien
tgttgggaaagattagaacattttc

SEQ ID NO: 1996566 - DNA, 25 bp, Homo sapien
tccttttcccacttaactcagtcaa

SEQ ID NO: 1996567 - DNA, 25 bp, Homo sapien
cctagtgtagatgggctggtgtttt

SEQ ID NO: 1996568 - DNA, 25 bp, Homo sapien
gatccaaccccctagtgtagatggg

SEQ ID NO: 1996569 - DNA, 25 bp, Homo sapien
actcagtcaattgtattactgcagc

SEQ ID NO: 1996570 - DNA, 25 bp, Homo sapien
ccatggctctctgatgcaagcctga

SEQ ID NO: 1996571 - DNA, 25 bp, Homo sapien
cattgttgactgttccatggctctc

SEQ ID NO: 1996572 - DNA, 25 bp, Homo sapien
tgactgttccatggctctctgatgc

SEQ ID NO: 1996573 - DNA, 25 bp, Homo sapien
gagagccattgttgactgttccatg

SEQ ID NO: 1996574 - DNA, 25 bp, Homo sapien
aacttcaaacttggagggctgcaga

SEQ ID NO: 1996575 - DNA, 25 bp, Homo sapien
cagtttctaacggtgggtgtcaagc

SEQ ID NO: 1996576 - DNA, 25 bp, Homo sapien
tgtagggaatccttaaactggtctc

SEQ ID NO: 1996577 - DNA, 25 bp, Homo sapien
gaccaggatgggagacaattgtttc

SEQ ID NO: 1996578 - DNA, 25 bp, Homo sapien
cagttagaaacattcgtgtagggaa

SEQ ID NO: 1996579 - DNA, 25 bp, Homo sapien
gcagggcaatgtgtaatacatgttt

SEQ ID NO: 1996580 - DNA, 25 bp, Homo sapien
ggcagtctgatgaatgcagggcaat

SEQ ID NO: 1996581 - DNA, 25 bp, Homo sapien
tgttatttcccctttctgaagggca

SEQ ID NO: 1996582 - DNA, 25 bp, Homo sapien
tctgatgaatgcagggcaatgtgta

SEQ ID NO: 1996583 - DNA, 25 bp, Homo sapien
gatacactgagacagagctgtgctg

SEQ ID NO: 1996584 - DNA, 25 bp, Homo sapien
taatgacaaagcctcccggtgtgtt

SEQ ID NO: 1996585 - DNA, 25 bp, Homo sapien
gaataggactgctgtttgcaccaca

SEQ ID NO: 1996586 - DNA, 25 bp, Homo sapien
tcttgccagcaataatcaaagcgaa

SEQ ID NO: 1996587 - DNA, 25 bp, Homo sapien
tccataaggcaagaaaacgtcttct

SEQ ID NO: 1996588 - DNA, 25 bp, Homo sapien
tttgtgtccaccactgttccagtcc

SEQ ID NO: 1996589 - DNA, 25 bp, Homo sapien
ctattgatatttgcttgttgctttg

SEQ ID NO: 1996590 - DNA, 25 bp, Homo sapien
ttgtcatactgcctatttcaatttc

SEQ ID NO: 1996591 - DNA, 25 bp, Homo sapien
gactcccagggtctagctttgacat

SEQ ID NO: 1996592 - DNA, 25 bp, Homo sapien
taattatcatgtttgtgagaagtgg

SEQ ID NO: 1996593 - DNA, 25 bp, Homo sapien
tgtttgtgagaagtggatttgcaga

SEQ ID NO: 1996594 - DNA, 25 bp, Homo sapien
tggactcccagggtctagctttgac

SEQ ID NO: 1996595 - DNA, 25 bp, Homo sapien
tgagtcttgtattccgtttttctgt

SEQ ID NO: 1996596 - DNA, 25 bp, Homo sapien
catgatgtgcccctttacattgctg

SEQ ID NO: 1996597 - DNA, 25 bp, Homo sapien
tgccacactgagtcttgtattccgt

SEQ ID NO: 1996598 - DNA, 25 bp, Homo sapien
ctttcccacacccttgccgttccat

SEQ ID NO: 1996599 - DNA, 25 bp, Homo sapien
ttgcactgcctgttaacatggtgta

SEQ ID NO: 1996600 - DNA, 25 bp, Homo sapien
gtgtatgctctggtgagtgcctgct

SEQ ID NO: 1996601 - DNA, 25 bp, Homo sapien
gtggatgttaagagcctcctcactg

SEQ ID NO: 1996602 - DNA, 25 bp, Homo sapien
acaagtgagcaggtggatgttaaga

SEQ ID NO: 1996603 - DNA, 25 bp, Homo sapien
acctgctttgagaaggaacgtttgc

SEQ ID NO: 1996604 - DNA, 25 bp, Homo sapien
tgctttgagaaggaacgtttgcttc

SEQ ID NO: 1996605 - DNA, 25 bp, Homo sapien
cctgctttgagaaggaacgtttgct

SEQ ID NO: 1996606 - DNA, 25 bp, Homo sapien
ctttgagaaggaacgtttgcttcat

SEQ ID NO: 1996607 - DNA, 25 bp, Homo sapien
tcattgaccaggtgtgaaggtgtag

SEQ ID NO: 1996608 - DNA, 25 bp, Homo sapien
tgtaggctgctaagacagttctagt

SEQ ID NO: 1996609 - DNA, 25 bp, Homo sapien
cagttctagtgttgccatcagttga

SEQ ID NO: 1996610 - DNA, 25 bp, Homo sapien
tagatttcagtcaaatgaccacaga

SEQ ID NO: 1996611 - DNA, 25 bp, Homo sapien
gaacaataataactgtctagggctg

SEQ ID NO: 1996612 - DNA, 25 bp, Homo sapien
caatggcaactctgacattttccac

SEQ ID NO: 1996613 - DNA, 25 bp, Homo sapien
gcttaggttgacaccagcttaaaag

SEQ ID NO: 1996614 - DNA, 25 bp, Homo sapien
taagctgcagtaaagaatagtccct

SEQ ID NO: 1996615 - DNA, 25 bp, Homo sapien
tcttctttgtcaaggtctggaggct

SEQ ID NO: 1996616 - DNA, 25 bp, Homo sapien
aatgaaagtctttgattacatcttc

SEQ ID NO: 1996617 - DNA, 25 bp, Homo sapien
aggctatagagacgggtcacaattc

SEQ ID NO: 1996618 - DNA, 25 bp, Homo sapien
cagaaaattattgatgggtctcatt

SEQ ID NO: 1996619 - DNA, 25 bp, Homo sapien
aacaggggtggaggctcgtatgcat

SEQ ID NO: 1996620 - DNA, 25 bp, Homo sapien
cacactcccaaattagcccaggagg

SEQ ID NO: 1996621 - DNA, 25 bp, Homo sapien
ccaaattagcccaggaggacaggtc

SEQ ID NO: 1996622 - DNA, 25 bp, Homo sapien
acaggtctgctctgtgaaaacaggg

SEQ ID NO: 1996623 - DNA, 25 bp, Homo sapien
tctagaaagcctataaggctgtgcc

SEQ ID NO: 1996624 - DNA, 25 bp, Homo sapien
tgccttaggccatgttgttgaaaac

SEQ ID NO: 1996625 - DNA, 25 bp, Homo sapien
gggtataagcctgctgttggaacac

SEQ ID NO: 1996626 - DNA, 25 bp, Homo sapien
cacagggctggtaagtgagcaggaa

SEQ ID NO: 1996627 - DNA, 25 bp, Homo sapien
ggcacaactgctgttagctggaaca

SEQ ID NO: 1996628 - DNA, 25 bp, Homo sapien
tgaaccattgggtatctgtagccag

SEQ ID NO: 1996629 - DNA, 25 bp, Homo sapien
caaatctgccatcacaaggtggagc

SEQ ID NO: 1996630 - DNA, 25 bp, Homo sapien
tttgacccaaagaatacagcacagc

SEQ ID NO: 1996631 - DNA, 25 bp, Homo sapien
atcattccaactgaaattggggagc

SEQ ID NO: 1996632 - DNA, 25 bp, Homo sapien
cttgtctgctgctatgtggagcttg

SEQ ID NO: 1996633 - DNA, 25 bp, Homo sapien
gagcacatatcaaaggcaacacctt

SEQ ID NO: 1996634 - DNA, 25 bp, Homo sapien
tgtctgctgctatgtggagcttgcc

SEQ ID NO: 1996635 - DNA, 25 bp, Homo sapien
atgaaataaagtctcagcaagggcc

SEQ ID NO: 1996636 - DNA, 25 bp, Homo sapien
ccagggaaccctgtattgagaggtg

SEQ ID NO: 1996637 - DNA, 25 bp, Homo sapien
gaaaccccttgctatagaggacctg

SEQ ID NO: 1996638 - DNA, 25 bp, Homo sapien
agaggtgttcctaggcatgccaaaa

SEQ ID NO: 1996639 - DNA, 25 bp, Homo sapien
tggatgacacagcaacctgggagta

SEQ ID NO: 1996640 - DNA, 25 bp, Homo sapien
aacgctgacaggctgtggctatggc

SEQ ID NO: 1996641 - DNA, 25 bp, Homo sapien
agtgaaacgctgacaggctgtggct

SEQ ID NO: 1996642 - DNA, 25 bp, Homo sapien
gtatctctgcacaggattccagagc

SEQ ID NO: 1996643 - DNA, 25 bp, Homo sapien
gacggtgtctcactctattgccaag

SEQ ID NO: 1996644 - DNA, 25 bp, Homo sapien
aagctggagtgcagtggtgcaatct

SEQ ID NO: 1996645 - DNA, 25 bp, Homo sapien
aggcacctgcaaccacgcccggcta

SEQ ID NO: 1996646 - DNA, 25 bp, Homo sapien
cggtgtctcactctattgccaagct

SEQ ID NO: 1996647 - DNA, 25 bp, Homo sapien
cctgctacatctctgggtttgccag

SEQ ID NO: 1996648 - DNA, 25 bp, Homo sapien
tcctgctacatctctgggtttgcca

SEQ ID NO: 1996649 - DNA, 25 bp, Homo sapien
tgctacatctctgggtttgccagtg

SEQ ID NO: 1996650 - DNA, 25 bp, Homo sapien
gctcctgctacatctctgggtttgc

SEQ ID NO: 1996651 - DNA, 25 bp, Homo sapien
gacagtgtgagtaaagcccgaaaaa

SEQ ID NO: 1996652 - DNA, 25 bp, Homo sapien
gcccgaaaaacctgcttcttagctg

SEQ ID NO: 1996653 - DNA, 25 bp, Homo sapien
gttgatcaggaagattggcagaggg

SEQ ID NO: 1996654 - DNA, 25 bp, Homo sapien
gggacagtgtgagtaaagcccgaaa

SEQ ID NO: 1996655 - DNA, 25 bp, Homo sapien
gggaactctggaaaagcctgggctc

SEQ ID NO: 1996656 - DNA, 25 bp, Homo sapien
tctggaaaagcctgggctcctagcc

SEQ ID NO: 1996657 - DNA, 25 bp, Homo sapien
tggaaaagcctgggctcctagccat

SEQ ID NO: 1996658 - DNA, 25 bp, Homo sapien
tgagggaggggaactctggaaaagc

SEQ ID NO: 1996659 - DNA, 25 bp, Homo sapien
ctgaaggctgtggatgatcttgatc

SEQ ID NO: 1996660 - DNA, 25 bp, Homo sapien
gatctggctggtggattctcgacat

SEQ ID NO: 1996661 - DNA, 25 bp, Homo sapien
aagcattggggctgggcacattccc

SEQ ID NO: 1996662 - DNA, 25 bp, Homo sapien
ggattctcgacatagataagcctct

SEQ ID NO: 1996663 - DNA, 25 bp, Homo sapien
gatctttcgttagaggagttgccac

SEQ ID NO: 1996664 - DNA, 25 bp, Homo sapien
gaaagggtgatctttcgttagagga

SEQ ID NO: 1996665 - DNA, 25 bp, Homo sapien
tcagaagtgctataaagtagaaagg

SEQ ID NO: 1996666 - DNA, 25 bp, Homo sapien
tcttcagaagtgctataaagtagaa

SEQ ID NO: 1996667 - DNA, 25 bp, Homo sapien
tgttgacaagtctttcagactctgc

SEQ ID NO: 1996668 - DNA, 25 bp, Homo sapien
cagtctcatctaggacttcttccaa

SEQ ID NO: 1996669 - DNA, 25 bp, Homo sapien
caatggtcttgttggcttgttgaca

SEQ ID NO: 1996670 - DNA, 25 bp, Homo sapien
cagactctgcttcacaccttgacaa

SEQ ID NO: 1996671 - DNA, 25 bp, Homo sapien
tgttttaaagacaataagtgcctgt

SEQ ID NO: 1996672 - DNA, 25 bp, Homo sapien
acaataagtgcctgtttttgcctgg

SEQ ID NO: 1996673 - DNA, 25 bp, Homo sapien
aagacaataagtgcctgtttttgcc

SEQ ID NO: 1996674 - DNA, 25 bp, Homo sapien
taatgctgttttaaagacaataagt

SEQ ID NO: 1996675 - DNA, 25 bp, Homo sapien
gattccccaaatggtgatgggctgt

SEQ ID NO: 1996676 - DNA, 25 bp, Homo sapien
tgttcaggtctaaaggagattcccc

SEQ ID NO: 1996677 - DNA, 25 bp, Homo sapien
taggtttaggccacatggtacagtc

SEQ ID NO: 1996678 - DNA, 25 bp, Homo sapien
tacaggcaactccagagggaagacg

SEQ ID NO: 1996679 - DNA, 25 bp, Homo sapien
aatccatagagtggacgcagaccca

SEQ ID NO: 1996680 - DNA, 25 bp, Homo sapien
gaatcaatccatagagtggacgcag

SEQ ID NO: 1996681 - DNA, 25 bp, Homo sapien
tatggaatcaatccatagagtggac

SEQ ID NO: 1996682 - DNA, 25 bp, Homo sapien
tcaatccatagagtggacgcagacc

SEQ ID NO: 1996683 - DNA, 25 bp, Homo sapien
gaaacacgaatggaacccttcagag

SEQ ID NO: 1996684 - DNA, 25 bp, Homo sapien
gaaggtctgcaaatggttccgctca

SEQ ID NO: 1996685 - DNA, 25 bp, Homo sapien
tagatacggattcgggaaggtctgc

SEQ ID NO: 1996686 - DNA, 25 bp, Homo sapien
gaggactcctatcacgttcttcatg

SEQ ID NO: 1996687 - DNA, 25 bp, Homo sapien
tgtgataggctctcgaaactgggcg

SEQ ID NO: 1996688 - DNA, 25 bp, Homo sapien
gaaaacagttcgtggcctgggatct

SEQ ID NO: 1996689 - DNA, 25 bp, Homo sapien
tgccactatctgacacaacaggagc

SEQ ID NO: 1996690 - DNA, 25 bp, Homo sapien
tgcgcgcccagacgtgagctgtgat

SEQ ID NO: 1996691 - DNA, 25 bp, Homo sapien
gtccgcccgcggtcgctagtgttgc

SEQ ID NO: 1996692 - DNA, 25 bp, Homo sapien
tgctgagctgtgcagttcggtccgc

SEQ ID NO: 1996693 - DNA, 25 bp, Homo sapien
gaatcccggactcctagtgaaagga

SEQ ID NO: 1996694 - DNA, 25 bp, Homo sapien
tcttcaaaggatgggttggagcgtt

SEQ ID NO: 1996695 - DNA, 25 bp, Homo sapien
caccgatttatggagagagatatca

SEQ ID NO: 1996696 - DNA, 25 bp, Homo sapien
cgcttcccgcccgactctgccgcct

SEQ ID NO: 1996697 - DNA, 25 bp, Homo sapien
atcaagggggaaaatggcgtctccg

SEQ ID NO: 1996698 - DNA, 25 bp, Homo sapien
tccgccgcgccaccgatttatggag

SEQ ID NO: 1996699 - DNA, 25 bp, Homo sapien
ctgtcaaacggcgagccgcgagctg

SEQ ID NO: 1996700 - DNA, 25 bp, Homo sapien
actccatggcgatgagcatctgtca

SEQ ID NO: 1996701 - DNA, 25 bp, Homo sapien
tgagcatctgtcaaacggcgagccg

SEQ ID NO: 1996702 - DNA, 25 bp, Homo sapien
tgctgctgcggcaactccatggcga

SEQ ID NO: 1996703 - DNA, 25 bp, Homo sapien
ggaatcgcgcccatctcctgcaacc

SEQ ID NO: 1996704 - DNA, 25 bp, Homo sapien
gccggcccgccggaatcgcgcccat

SEQ ID NO: 1996705 - DNA, 25 bp, Homo sapien
atctcctgcaacctcgcccggaccg

SEQ ID NO: 1996706 - DNA, 25 bp, Homo sapien
tctcctgcaacctcgcccggaccgg

SEQ ID NO: 1996707 - DNA, 25 bp, Homo sapien
agccactccaattgagccagcatcg

SEQ ID NO: 1996708 - DNA, 25 bp, Homo sapien
acgagccactccaattgagccagca

SEQ ID NO: 1996709 - DNA, 25 bp, Homo sapien
caattgagccagcatcgccgcccac

SEQ ID NO: 1996710 - DNA, 25 bp, Homo sapien
ccaattgagccagcatcgccgccca

SEQ ID NO: 1996711 - DNA, 25 bp, Homo sapien
tacaatgtagctctctagctccact

SEQ ID NO: 1996712 - DNA, 25 bp, Homo sapien
gacacgttagattctgatacattcc

SEQ ID NO: 1996713 - DNA, 25 bp, Homo sapien
gccggctggaccacttcttgcctgt

SEQ ID NO: 1996714 - DNA, 25 bp, Homo sapien
cttctttctattaacgacacgttag

SEQ ID NO: 1996715 - DNA, 25 bp, Homo sapien
gaacttctcagacagtatttcggtc

SEQ ID NO: 1996716 - DNA, 25 bp, Homo sapien
gactttgtccctgcggaacttctca

SEQ ID NO: 1996717 - DNA, 25 bp, Homo sapien
caaagagataatggtttggaagaca

SEQ ID NO: 1996718 - DNA, 25 bp, Homo sapien
caaaaacaataaatcgataccgaag

SEQ ID NO: 1996719 - DNA, 25 bp, Homo sapien
cgatttcagacttgtagtaagcggt

SEQ ID NO: 1996720 - DNA, 25 bp, Homo sapien
agcattagggggcaataagaactcc

SEQ ID NO: 1996721 - DNA, 25 bp, Homo sapien
tgcacaactttcaatctccaatgaa

SEQ ID NO: 1996722 - DNA, 25 bp, Homo sapien
tctcaatacctctagcctcatctat

SEQ ID NO: 1996723 - DNA, 25 bp, Homo sapien
ttccctgccgtttgcaaatactctg

SEQ ID NO: 1996724 - DNA, 25 bp, Homo sapien
aaatactctgtttaaccacacttga

SEQ ID NO: 1996725 - DNA, 25 bp, Homo sapien
tgcaaatactctgtttaaccacact

SEQ ID NO: 1996726 - DNA, 25 bp, Homo sapien
gggctacattccctgccgtttgcaa

SEQ ID NO: 1996727 - DNA, 25 bp, Homo sapien
tctggagaacttactggatttgctg

SEQ ID NO: 1996728 - DNA, 25 bp, Homo sapien
gcggcaacgctgctattagttcttt

SEQ ID NO: 1996729 - DNA, 25 bp, Homo sapien
taaaaggagggacacagaagagtca

SEQ ID NO: 1996730 - DNA, 25 bp, Homo sapien
gctgatccttaactcaaagagcatt

SEQ ID NO: 1996731 - DNA, 25 bp, Homo sapien
tgggttctgtttctttgctcacact

SEQ ID NO: 1996732 - DNA, 25 bp, Homo sapien
cctcaggagggcttgtgttgggttc

SEQ ID NO: 1996733 - DNA, 25 bp, Homo sapien
tcttccacctcaggagggcttgtgt

SEQ ID NO: 1996734 - DNA, 25 bp, Homo sapien
ttaagtgtttcttccacctcaggag

SEQ ID NO: 1996735 - DNA, 25 bp, Homo sapien
agtctgggtatcaactgcgagtcct

SEQ ID NO: 1996736 - DNA, 25 bp, Homo sapien
caattttttggtgagtctgggtatc

SEQ ID NO: 1996737 - DNA, 25 bp, Homo sapien
tcaactgcgagtcctcttgtgattc

SEQ ID NO: 1996738 - DNA, 25 bp, Homo sapien
ggtatcaactgcgagtcctcttgtg

SEQ ID NO: 1996739 - DNA, 25 bp, Homo sapien
catcagcacacaaagctgttgttct

SEQ ID NO: 1996740 - DNA, 25 bp, Homo sapien
tcagcacacaaagctgttgttctcc

SEQ ID NO: 1996741 - DNA, 25 bp, Homo sapien
tcatcagcacacaaagctgttgttc

SEQ ID NO: 1996742 - DNA, 25 bp, Homo sapien
cttcatcagcacacaaagctgttgt

SEQ ID NO: 1996743 - DNA, 25 bp, Homo sapien
tgtgcccaccaaaaaatgcccaacg

SEQ ID NO: 1996744 - DNA, 25 bp, Homo sapien
gcccaacgatgcctgcaaagacata

SEQ ID NO: 1996745 - DNA, 25 bp, Homo sapien
ctctgagcccatcaatttaaagtgg

SEQ ID NO: 1996746 - DNA, 25 bp, Homo sapien
tgaagaccagacgtttgtcttctgt

SEQ ID NO: 1996747 - DNA, 25 bp, Homo sapien
gggatggagacacgatgaggtgttc

SEQ ID NO: 1996748 - DNA, 25 bp, Homo sapien
aaattccaagaacaaagtggtccag

SEQ ID NO: 1996749 - DNA, 25 bp, Homo sapien
tggagacacgatgaggtgttcagaa

SEQ ID NO: 1996750 - DNA, 25 bp, Homo sapien
gaacaaagtggtccagttgctaggg

SEQ ID NO: 1996751 - DNA, 25 bp, Homo sapien
acaatctctacagtcttccggagtt

SEQ ID NO: 1996752 - DNA, 25 bp, Homo sapien
gacaatctctacagtcttccggagt

SEQ ID NO: 1996753 - DNA, 25 bp, Homo sapien
cctctttgccgggagctgcttaagg

SEQ ID NO: 1996754 - DNA, 25 bp, Homo sapien
gaggagaccggcaggaagtctgact

SEQ ID NO: 1996755 - DNA, 25 bp, Homo sapien
ggagagcaaaggttctcctgcacag

SEQ ID NO: 1996756 - DNA, 25 bp, Homo sapien
tgcttaaggtttccctggactccat

SEQ ID NO: 1996757 - DNA, 25 bp, Homo sapien
tagcccgctttgtggtctgaatctt

SEQ ID NO: 1996758 - DNA, 25 bp, Homo sapien
tctcaggtggacatatatagttctc

SEQ ID NO: 1996759 - DNA, 25 bp, Homo sapien
ttctggtccccagactgcttgatgg

SEQ ID NO: 1996760 - DNA, 25 bp, Homo sapien
ctcactgtccgcgttggagttggaa

SEQ ID NO: 1996761 - DNA, 25 bp, Homo sapien
gacacttggctgttatacaataaac

SEQ ID NO: 1996762 - DNA, 25 bp, Homo sapien
ctgtgagagtctcagttactacaaa

SEQ ID NO: 1996763 - DNA, 25 bp, Homo sapien
tagtaatgactgaaatcaaaaggag

SEQ ID NO: 1996764 - DNA, 25 bp, Homo sapien
ccttagtcaggtgagtaattcatct

SEQ ID NO: 1996765 - DNA, 25 bp, Homo sapien
tataccaaggcagtcctctgctatc

SEQ ID NO: 1996766 - DNA, 25 bp, Homo sapien
acagctgagtgccacacacaggaag

SEQ ID NO: 1996767 - DNA, 25 bp, Homo sapien
gaagggaggtcactgtaagtcactg

SEQ ID NO: 1996768 - DNA, 25 bp, Homo sapien
tctgctatcacagctgagtgccaca

SEQ ID NO: 1996769 - DNA, 25 bp, Homo sapien
ctccaagtcccaaagattttcgaag

SEQ ID NO: 1996770 - DNA, 25 bp, Homo sapien
atctccaagtcccaaagattttcga

SEQ ID NO: 1996771 - DNA, 25 bp, Homo sapien
caagtcccaaagattttcgaagaca

SEQ ID NO: 1996772 - DNA, 25 bp, Homo sapien
tccaagtcccaaagattttcgaaga

SEQ ID NO: 1996773 - DNA, 25 bp, Homo sapien
tcttgggtgaaaatgaccagcctga

SEQ ID NO: 1996774 - DNA, 25 bp, Homo sapien
taagagacccaactccaatgcaaag

SEQ ID NO: 1996775 - DNA, 25 bp, Homo sapien
tcagatatgagcaccaaagtccact

SEQ ID NO: 1996776 - DNA, 25 bp, Homo sapien
cctttggtttcacgacagagtatcc

SEQ ID NO: 1996777 - DNA, 25 bp, Homo sapien
aagttaacattctcatcccatagag

SEQ ID NO: 1996778 - DNA, 25 bp, Homo sapien
taacattctcatcccatagagatca

SEQ ID NO: 1996779 - DNA, 25 bp, Homo sapien
ctttgcttactctctggttgcaaaa

SEQ ID NO: 1996780 - DNA, 25 bp, Homo sapien
tttagcctttgcttactctctggtt

SEQ ID NO: 1996781 - DNA, 25 bp, Homo sapien
gcagattatgcttgtgccaccccag

SEQ ID NO: 1996782 - DNA, 25 bp, Homo sapien
tagtgtaggacctgcttcccagagg

SEQ ID NO: 1996783 - DNA, 25 bp, Homo sapien
tcctcacgaaagagaagagctgcta

SEQ ID NO: 1996784 - DNA, 25 bp, Homo sapien
gaagagtccgtgcatccttgagcca

SEQ ID NO: 1996785 - DNA, 25 bp, Homo sapien
gtctccattgtttcccgtgtgaggt

SEQ ID NO: 1996786 - DNA, 25 bp, Homo sapien
tccattgtttcccgtgtgaggtcac

SEQ ID NO: 1996787 - DNA, 25 bp, Homo sapien
cattgtttcccgtgtgaggtcacag

SEQ ID NO: 1996788 - DNA, 25 bp, Homo sapien
ctgctcagacttctgagagtaaata

SEQ ID NO: 1996789 - DNA, 25 bp, Homo sapien
ttcgaggaccctttctggatctccc

SEQ ID NO: 1996790 - DNA, 25 bp, Homo sapien
ttcaacttctcattcgaggaccctt

SEQ ID NO: 1996791 - DNA, 25 bp, Homo sapien
tggatctcccaatcttggcttcctt

SEQ ID NO: 1996792 - DNA, 25 bp, Homo sapien
tgatccaatagcacgcaagcccaat

SEQ ID NO: 1996793 - DNA, 25 bp, Homo sapien
attagcaacgatagtttgttggaaa

SEQ ID NO: 1996794 - DNA, 25 bp, Homo sapien
taaaaggatattgaaggaagtgatg

SEQ ID NO: 1996795 - DNA, 25 bp, Homo sapien
caacgatagtttgttggaaatctac

SEQ ID NO: 1996796 - DNA, 25 bp, Homo sapien
tgttggaaatctactatacagtagt

SEQ ID NO: 1996797 - DNA, 25 bp, Homo sapien
tggtgggtatctggacgcgcccact

SEQ ID NO: 1996798 - DNA, 25 bp, Homo sapien
cccagaatttcacaaagggcaatta

SEQ ID NO: 1996799 - DNA, 25 bp, Homo sapien
cacaaagggcaattacaccatgtgg

SEQ ID NO: 1996800 - DNA, 25 bp, Homo sapien
agctgctgtccatcacagccacgtc

SEQ ID NO: 1996801 - DNA, 25 bp, Homo sapien
tctgaaagccaactcagcagatggt

SEQ ID NO: 1996802 - DNA, 25 bp, Homo sapien
ggacaacctttcctccgggagcatg

SEQ ID NO: 1996803 - DNA, 25 bp, Homo sapien
aaggatgctgggataacacaactgc

SEQ ID NO: 1996804 - DNA, 25 bp, Homo sapien
tgccaccaggatacagatgactgag

SEQ ID NO: 1996805 - DNA, 25 bp, Homo sapien
ctagtgtactagaaagcccctggac

SEQ ID NO: 1996806 - DNA, 25 bp, Homo sapien
ggcctcaacagggtctgattttcag

SEQ ID NO: 1996807 - DNA, 25 bp, Homo sapien
cccagggaagaaacgaatactagca

SEQ ID NO: 1996808 - DNA, 25 bp, Homo sapien
gggcttgtcctcatttgcttcagtg

SEQ ID NO: 1996809 - DNA, 25 bp, Homo sapien
gcctatgagtctatacaccagggag

SEQ ID NO: 1996810 - DNA, 25 bp, Homo sapien
taccaagtgtctacggtctaccagg

SEQ ID NO: 1996811 - DNA, 25 bp, Homo sapien
taagcacagtgtactcccaaggcaa

SEQ ID NO: 1996812 - DNA, 25 bp, Homo sapien
ccaagaagtttgtgcctgacagtga

SEQ ID NO: 1996813 - DNA, 25 bp, Homo sapien
tctttcagggctatggagctcttga

SEQ ID NO: 1996814 - DNA, 25 bp, Homo sapien
tatgactacagggtagatgtcgttc

SEQ ID NO: 1996815 - DNA, 25 bp, Homo sapien
taaaatggaagtgatggcataattc

SEQ ID NO: 1996816 - DNA, 25 bp, Homo sapien
tcaacataggcacatatgactacag

SEQ ID NO: 1996817 - DNA, 25 bp, Homo sapien
tccatgggtagagcagaataaaatc

SEQ ID NO: 1996818 - DNA, 25 bp, Homo sapien
aaaaggtgcatcaaaccaagtcaga

SEQ ID NO: 1996819 - DNA, 25 bp, Homo sapien
gacatctttacactcacttctccga

SEQ ID NO: 1996820 - DNA, 25 bp, Homo sapien
tgctagagggccattcagtgacatc

SEQ ID NO: 1996821 - DNA, 25 bp, Homo sapien
ccagaaactccagctaatgtagcct

SEQ ID NO: 1996822 - DNA, 25 bp, Homo sapien
gcaggcagtatttcgctgatctgtg

SEQ ID NO: 1996823 - DNA, 25 bp, Homo sapien
cagcaatggcagagtggaaatgttc

SEQ ID NO: 1996824 - DNA, 25 bp, Homo sapien
tgggaatggcacaccaatgagacca

SEQ ID NO: 1996825 - DNA, 25 bp, Homo sapien
cttttcctggatgtcagaaatccac

SEQ ID NO: 1996826 - DNA, 25 bp, Homo sapien
cacagcttttcctggatgtcagaaa

SEQ ID NO: 1996827 - DNA, 25 bp, Homo sapien
tgggtcacagcttttcctggatgtc

SEQ ID NO: 1996828 - DNA, 25 bp, Homo sapien
cagcttttcctggatgtcagaaatc

SEQ ID NO: 1996829 - DNA, 25 bp, Homo sapien
caggagcctgagactcaacgctgca

SEQ ID NO: 1996830 - DNA, 25 bp, Homo sapien
ccaggagcctgagactcaacgctgc

SEQ ID NO: 1996831 - DNA, 25 bp, Homo sapien
aggagcctgagactcaacgctgcac

SEQ ID NO: 1996832 - DNA, 25 bp, Homo sapien
ggctttgtgcagcagtgccccgtgt

SEQ ID NO: 1996833 - DNA, 25 bp, Homo sapien
cactggctcttgggcgcgtacagta

SEQ ID NO: 1996834 - DNA, 25 bp, Homo sapien
gtgtgaactgccaccgccggcattt

SEQ ID NO: 1996835 - DNA, 25 bp, Homo sapien
gtacagtagggcgcacacacatgca

SEQ ID NO: 1996836 - DNA, 25 bp, Homo sapien
ggcttccagcagtcgtcgcgccagg

SEQ ID NO: 1996837 - DNA, 25 bp, Homo sapien
caaagactgcgtttggcccggcttc

SEQ ID NO: 1996838 - DNA, 25 bp, Homo sapien
ggcgctgctgcgagagactgggtgc

SEQ ID NO: 1996839 - DNA, 25 bp, Homo sapien
gactgggtgcgcgacattcgccagc

SEQ ID NO: 1996840 - DNA, 25 bp, Homo sapien
gacgatgcaggcgactctccctgcg

SEQ ID NO: 1996841 - DNA, 25 bp, Homo sapien
gctccggcgcgcgtggtggctgtgc

SEQ ID NO: 1996842 - DNA, 25 bp, Homo sapien
ggttggacgatgcaggcgactctcc

SEQ ID NO: 1996843 - DNA, 25 bp, Homo sapien
tccggcgcgcgtggtggctgtgctt

SEQ ID NO: 1996844 - DNA, 25 bp, Homo sapien
tgaatcttctcagaatcgaagcctc

SEQ ID NO: 1996845 - DNA, 25 bp, Homo sapien
cagcattcaggggagatcaaaccgc

SEQ ID NO: 1996846 - DNA, 25 bp, Homo sapien
gggagatcaaaccgccggcctgcca

SEQ ID NO: 1996847 - DNA, 25 bp, Homo sapien
cgccaccctggacaatgccctgaat

SEQ ID NO: 1996848 - DNA, 25 bp, Homo sapien
tcttcacctgtctgcgagtcaactt

SEQ ID NO: 1996849 - DNA, 25 bp, Homo sapien
tgtctgcgagtcaacttgtgtgtcc

SEQ ID NO: 1996850 - DNA, 25 bp, Homo sapien
tgcgagtcaacttgtgtgtcctgcc

SEQ ID NO: 1996851 - DNA, 25 bp, Homo sapien
tcacctgtctgcgagtcaacttgtg

SEQ ID NO: 1996852 - DNA, 25 bp, Homo sapien
tcaaaatcttgtcgctaggtaagct

SEQ ID NO: 1996853 - DNA, 25 bp, Homo sapien
aaaactttactttgccatgtcctgc

SEQ ID NO: 1996854 - DNA, 25 bp, Homo sapien
tgtgaaggtcttccagctaaagaat

SEQ ID NO: 1996855 - DNA, 25 bp, Homo sapien
cctgcaggagatagtaagtgctaaa

SEQ ID NO: 1996856 - DNA, 25 bp, Homo sapien
ttcgcaggaaagcttcgcagacgcc

SEQ ID NO: 1996857 - DNA, 25 bp, Homo sapien
gagccataaaggtctgctgattgaa

SEQ ID NO: 1996858 - DNA, 25 bp, Homo sapien
tacatgttgaacgtatcaccttcgc

SEQ ID NO: 1996859 - DNA, 25 bp, Homo sapien
cttcgcagacgccacaattcttggg

SEQ ID NO: 1996860 - DNA, 25 bp, Homo sapien
ttatcgcacactacacttgaaattt

SEQ ID NO: 1996861 - DNA, 25 bp, Homo sapien
tgtgcttctgtcatgtttggattgg

SEQ ID NO: 1996862 - DNA, 25 bp, Homo sapien
gcacactacacttgaaatttgaatt

SEQ ID NO: 1996863 - DNA, 25 bp, Homo sapien
ttctgtcatgtttggattggcaggg

SEQ ID NO: 1996864 - DNA, 25 bp, Homo sapien
actctgccagggattattccaggaa

SEQ ID NO: 1996865 - DNA, 25 bp, Homo sapien
gagaggaagataaggtaagcagcaa

SEQ ID NO: 1996866 - DNA, 25 bp, Homo sapien
gattctttcaggtagaagacgctta

SEQ ID NO: 1996867 - DNA, 25 bp, Homo sapien
agacgcttaaggaggaatcatgtta

SEQ ID NO: 1996868 - DNA, 25 bp, Homo sapien
tacaatgacaagttccataattctc

SEQ ID NO: 1996869 - DNA, 25 bp, Homo sapien
ggagagatccctggtctgccccagc

SEQ ID NO: 1996870 - DNA, 25 bp, Homo sapien
agcccttgggttacaatgacaagtt

SEQ ID NO: 1996871 - DNA, 25 bp, Homo sapien
actccatggaagccttccgcaggct

SEQ ID NO: 1996872 - DNA, 25 bp, Homo sapien
ttttgtgagttaaagaaattgcatc

SEQ ID NO: 1996873 - DNA, 25 bp, Homo sapien
aattgcatctaaggagctccacgga

SEQ ID NO: 1996874 - DNA, 25 bp, Homo sapien
ccacggacacttgatgatttatgaa

SEQ ID NO: 1996875 - DNA, 25 bp, Homo sapien
tgaaatctgcctcatgaatatactt

SEQ ID NO: 1996876 - DNA, 25 bp, Homo sapien
gattctacactctgaggatgaactt

SEQ ID NO: 1996877 - DNA, 25 bp, Homo sapien
caggagccagcggaaactaagattc

SEQ ID NO: 1996878 - DNA, 25 bp, Homo sapien
gatgaacttctttcaatcacttgag

SEQ ID NO: 1996879 - DNA, 25 bp, Homo sapien
cctaacatctgggacattaccttcc

SEQ ID NO: 1996880 - DNA, 25 bp, Homo sapien
taaataccttctgctcaggcaacaa

SEQ ID NO: 1996881 - DNA, 25 bp, Homo sapien
ttaactcatgagaaaattaatgtat

SEQ ID NO: 1996882 - DNA, 25 bp, Homo sapien
cagaaggtctggctggttttaactc

SEQ ID NO: 1996883 - DNA, 25 bp, Homo sapien
ggttctcagtttgtgagggtttgca

SEQ ID NO: 1996884 - DNA, 25 bp, Homo sapien
tgcccatgttaactaaaggagtaag

SEQ ID NO: 1996885 - DNA, 25 bp, Homo sapien
tcagtgtgacggcacttgctatcat

SEQ ID NO: 1996886 - DNA, 25 bp, Homo sapien
ggctgcccatgttaactaaaggagt

SEQ ID NO: 1996887 - DNA, 25 bp, Homo sapien
gccaatactgagatcccatgcctta

SEQ ID NO: 1996888 - DNA, 25 bp, Homo sapien
gggtcagaccaaggcattttggtct

SEQ ID NO: 1996889 - DNA, 25 bp, Homo sapien
aaaaagttccccatgcatttctgtc

SEQ ID NO: 1996890 - DNA, 25 bp, Homo sapien
cctgagcccctaggacagtgcttct

SEQ ID NO: 1996891 - DNA, 25 bp, Homo sapien
tcaaccttagacagggagaagccca

SEQ ID NO: 1996892 - DNA, 25 bp, Homo sapien
gaagttagggcaattaagcggccgc

SEQ ID NO: 1996893 - DNA, 25 bp, Homo sapien
gaaattctaaatgtccagggaggcg

SEQ ID NO: 1996894 - DNA, 25 bp, Homo sapien
cagaggctgatgtgaggcccacaaa

SEQ ID NO: 1996895 - DNA, 25 bp, Homo sapien
tgcagcaagggggaattcgatggga

SEQ ID NO: 1996896 - DNA, 25 bp, Homo sapien
cagcaagggggaattcgatgggacc

SEQ ID NO: 1996897 - DNA, 25 bp, Homo sapien
gcaagggggaattcgatgggaccta

SEQ ID NO: 1996898 - DNA, 25 bp, Homo sapien
ccttgcagcaagggggaattcgatg

SEQ ID NO: 1996899 - DNA, 25 bp, Homo sapien
ggtgcacagtttgctccctgaatgg

SEQ ID NO: 1996900 - DNA, 25 bp, Homo sapien
gaaaagtacacatgccagctctggc

SEQ ID NO: 1996901 - DNA, 25 bp, Homo sapien
tggccgggcaaaagacaattaacac

SEQ ID NO: 1996902 - DNA, 25 bp, Homo sapien
tatgctggctctaccaccaaagacc

SEQ ID NO: 1996903 - DNA, 25 bp, Homo sapien
tcatctggccactccatgtaaccag

SEQ ID NO: 1996904 - DNA, 25 bp, Homo sapien
tatcccatgattcccaaataataat

SEQ ID NO: 1996905 - DNA, 25 bp, Homo sapien
gaatccaacaggaccactcgtagtt

SEQ ID NO: 1996906 - DNA, 25 bp, Homo sapien
gattttaattctacggctgtcacac

SEQ ID NO: 1996907 - DNA, 25 bp, Homo sapien
tctggtagggaatgatttgtcagtc

SEQ ID NO: 1996908 - DNA, 25 bp, Homo sapien
ctggtagggaatgatttgtcagtca

SEQ ID NO: 1996909 - DNA, 25 bp, Homo sapien
tgctgcttctaaaggactcccagcc

SEQ ID NO: 1996910 - DNA, 25 bp, Homo sapien
tacattttgattgtcggatccgtgc

SEQ ID NO: 1996911 - DNA, 25 bp, Homo sapien
gggttggtgtgaagatcaaatctga

SEQ ID NO: 1996912 - DNA, 25 bp, Homo sapien
tcagccataactactccctcttggg

SEQ ID NO: 1996913 - DNA, 25 bp, Homo sapien
tcacctttcaacatgctaggaatac

SEQ ID NO: 1996914 - DNA, 25 bp, Homo sapien
taatccctcagacatatggctgagc

SEQ ID NO: 1996915 - DNA, 25 bp, Homo sapien
aatccctagagagagaaaacttcct

SEQ ID NO: 1996916 - DNA, 25 bp, Homo sapien
ccttagactttagttgtatggacaa

SEQ ID NO: 1996917 - DNA, 25 bp, Homo sapien
tctcccggtatgtgggagtccctaa

SEQ ID NO: 1996918 - DNA, 25 bp, Homo sapien
gagtccctaagtcagcagctcgtaa

SEQ ID NO: 1996919 - DNA, 25 bp, Homo sapien
ggtctgctctgcatcgaggtttgaa

SEQ ID NO: 1996920 - DNA, 25 bp, Homo sapien
ttccttgacctgagcataagtcctg

SEQ ID NO: 1996921 - DNA, 25 bp, Homo sapien
aagcagctactccaagtaagagcag

SEQ ID NO: 1996922 - DNA, 25 bp, Homo sapien
agcagctactccaagtaagagcagg

SEQ ID NO: 1996923 - DNA, 25 bp, Homo sapien
tctttaactcagcatgtgtctgggc

SEQ ID NO: 1996924 - DNA, 25 bp, Homo sapien
ctttaactcagcatgtgtctgggca

SEQ ID NO: 1996925 - DNA, 25 bp, Homo sapien
tttaactcagcatgtgtctgggcag

SEQ ID NO: 1996926 - DNA, 25 bp, Homo sapien
gtttgattgataaggctaaggccca

SEQ ID NO: 1996927 - DNA, 25 bp, Homo sapien
gaaaatgccagtcctccatggtttg

SEQ ID NO: 1996928 - DNA, 25 bp, Homo sapien
gaataaggtttgttaactctagctg

SEQ ID NO: 1996929 - DNA, 25 bp, Homo sapien
gctaaggcccaatatacctgcatct

SEQ ID NO: 1996930 - DNA, 25 bp, Homo sapien
aaatcataaaaaagggctcattcct

SEQ ID NO: 1996931 - DNA, 25 bp, Homo sapien
tccactgtatccaaagaccacctgt

SEQ ID NO: 1996932 - DNA, 25 bp, Homo sapien
tataaatgatgtctagcgtcacctg

SEQ ID NO: 1996933 - DNA, 25 bp, Homo sapien
tgtgctggaagcctacacctttttc

SEQ ID NO: 1996934 - DNA, 25 bp, Homo sapien
tcctgggccgtaattaatactcatc

SEQ ID NO: 1996935 - DNA, 25 bp, Homo sapien
gtcttgaccattgtttcctgggccg

SEQ ID NO: 1996936 - DNA, 25 bp, Homo sapien
agttcccaggcccatgtaatgcagg

SEQ ID NO: 1996937 - DNA, 25 bp, Homo sapien
gaaggccaaaggacagacatgggct

SEQ ID NO: 1996938 - DNA, 25 bp, Homo sapien
aactggactgccaagagaatggaag

SEQ ID NO: 1996939 - DNA, 25 bp, Homo sapien
cagtatacaactggactgccaagag

SEQ ID NO: 1996940 - DNA, 25 bp, Homo sapien
ctgcacagtatacaactggactgcc

SEQ ID NO: 1996941 - DNA, 25 bp, Homo sapien
gagaatggaagattcatagcagagg

SEQ ID NO: 1996942 - DNA, 25 bp, Homo sapien
ggaagagtgaagctatagggctttc

SEQ ID NO: 1996943 - DNA, 25 bp, Homo sapien
gagtgaagctatagggctttcctgt

SEQ ID NO: 1996944 - DNA, 25 bp, Homo sapien
aagagtgaagctatagggctttcct

SEQ ID NO: 1996945 - DNA, 25 bp, Homo sapien
gaagctatagggctttcctgtttca

SEQ ID NO: 1996946 - DNA, 25 bp, Homo sapien
cttgtagtaaagctgtccccaggga

SEQ ID NO: 1996947 - DNA, 25 bp, Homo sapien
tgtagtaaagctgtccccagggagc

SEQ ID NO: 1996948 - DNA, 25 bp, Homo sapien
ccaccttgtagtaaagctgtcccca

SEQ ID NO: 1996949 - DNA, 25 bp, Homo sapien
ctgctccaccttgtagtaaagctgt

SEQ ID NO: 1996950 - DNA, 25 bp, Homo sapien
tgcgaatctgtagaccatgcaggac

SEQ ID NO: 1996951 - DNA, 25 bp, Homo sapien
cattggtaagctgtagtgggttccc

SEQ ID NO: 1996952 - DNA, 25 bp, Homo sapien
gggtctaaccctaacaatccatgca

SEQ ID NO: 1996953 - DNA, 25 bp, Homo sapien
cagattctatgaccagggtagtcac

SEQ ID NO: 1996954 - DNA, 25 bp, Homo sapien
ccagctgatggttgacagaagccaa

SEQ ID NO: 1996955 - DNA, 25 bp, Homo sapien
gctgatggttgacagaagccaaaaa

SEQ ID NO: 1996956 - DNA, 25 bp, Homo sapien
ggtcatctggggagcggcaggaact

SEQ ID NO: 1996957 - DNA, 25 bp, Homo sapien
agaggctgcacgttcacacaagtcc

SEQ ID NO: 1996958 - DNA, 25 bp, Homo sapien
aggagaaccctgctcggccactaac

SEQ ID NO: 1996959 - DNA, 25 bp, Homo sapien
gagaaccctgctcggccactaactt

SEQ ID NO: 1996960 - DNA, 25 bp, Homo sapien
caagcaggacctgagaaatgggtgt

SEQ ID NO: 1996961 - DNA, 25 bp, Homo sapien
gctcggccactaacttcacctggct

SEQ ID NO: 1996962 - DNA, 25 bp, Homo sapien
tccacatgcctgcacttcaagggtg

SEQ ID NO: 1996963 - DNA, 25 bp, Homo sapien
cacatgcctgcacttcaagggtggc

SEQ ID NO: 1996964 - DNA, 25 bp, Homo sapien
ctccacatgcctgcacttcaagggt

SEQ ID NO: 1996965 - DNA, 25 bp, Homo sapien
gcctccacatgcctgcacttcaagg

SEQ ID NO: 1996966 - DNA, 25 bp, Homo sapien
gtactgaccaagagctgaccctgga

SEQ ID NO: 1996967 - DNA, 25 bp, Homo sapien
aagtttggatgctcagccactgacc

SEQ ID NO: 1996968 - DNA, 25 bp, Homo sapien
taaataaccatccaggcaccgtggc

SEQ ID NO: 1996969 - DNA, 25 bp, Homo sapien
ttcactcatcccagaaggcacggag

SEQ ID NO: 1996970 - DNA, 25 bp, Homo sapien
gcacagctggtacagagaccgtgta

SEQ ID NO: 1996971 - DNA, 25 bp, Homo sapien
cagctggtacagagaccgtgtaggc

SEQ ID NO: 1996972 - DNA, 25 bp, Homo sapien
gtgatgcacagctggtacagagacc

SEQ ID NO: 1996973 - DNA, 25 bp, Homo sapien
ggtacagagaccgtgtaggctcatg

SEQ ID NO: 1996974 - DNA, 25 bp, Homo sapien
ttagcaaccttgaggaggtccccag

SEQ ID NO: 1996975 - DNA, 25 bp, Homo sapien
gcaagtgtagcctcgccggtgtgag

SEQ ID NO: 1996976 - DNA, 25 bp, Homo sapien
cacctctggaggctagcattcccaa

SEQ ID NO: 1996977 - DNA, 25 bp, Homo sapien
tcgccggtgtgaggcttagcaacct

SEQ ID NO: 1996978 - DNA, 25 bp, Homo sapien
ggacctattccagtgggtctacatg

SEQ ID NO: 1996979 - DNA, 25 bp, Homo sapien
tgtctgcgagtttctttggaactga

SEQ ID NO: 1996980 - DNA, 25 bp, Homo sapien
gtaaatcccagataaacgcagtgag

SEQ ID NO: 1996981 - DNA, 25 bp, Homo sapien
gagtctgctacacctggacctattc

SEQ ID NO: 1996982 - DNA, 25 bp, Homo sapien
cacggatcgcaatgccatcactcat

SEQ ID NO: 1996983 - DNA, 25 bp, Homo sapien
gaacacggatcgcaatgccatcact

SEQ ID NO: 1996984 - DNA, 25 bp, Homo sapien
ttgaacacggatcgcaatgccatca

SEQ ID NO: 1996985 - DNA, 25 bp, Homo sapien
cttgaacacggatcgcaatgccatc

SEQ ID NO: 1996986 - DNA, 25 bp, Homo sapien
tttattccagtagccagcctctgat

SEQ ID NO: 1996987 - DNA, 25 bp, Homo sapien
cgtaggcacacgctacagcctgttt

SEQ ID NO: 1996988 - DNA, 25 bp, Homo sapien
tctgatcctttgatgacacgcccag

SEQ ID NO: 1996989 - DNA, 25 bp, Homo sapien
tccaaacaccaaaactagaggactc

SEQ ID NO: 1996990 - DNA, 25 bp, Homo sapien
gagctgggcataagattcgtatgga

SEQ ID NO: 1996991 - DNA, 25 bp, Homo sapien
gcttgagctgggcataagattcgta

SEQ ID NO: 1996992 - DNA, 25 bp, Homo sapien
ctctagcttgagctgggcataagat

SEQ ID NO: 1996993 - DNA, 25 bp, Homo sapien
ctagcttgagctgggcataagattc

SEQ ID NO: 1996994 - DNA, 25 bp, Homo sapien
catagcctggatgagagctacagaa

SEQ ID NO: 1996995 - DNA, 25 bp, Homo sapien
gaatctaggctcaatggccttccca

SEQ ID NO: 1996996 - DNA, 25 bp, Homo sapien
ttctggactgggaatctaggctcaa

SEQ ID NO: 1996997 - DNA, 25 bp, Homo sapien
agagctacagaagtgggatcgcaga

SEQ ID NO: 1996998 - DNA, 25 bp, Homo sapien
ctggctgcaaggtcactggctgtga

SEQ ID NO: 1996999 - DNA, 25 bp, Homo sapien
gaggtcactggctgcaaggtcactg

SEQ ID NO: 1997000 - DNA, 25 bp, Homo sapien
tggctgaaatcctttgaggtcactg

SEQ ID NO: 1997001 - DNA, 25 bp, Homo sapien
ctgtggctgaaatcctttgaggtca

SEQ ID NO: 1997002 - DNA, 25 bp, Homo sapien
tcaaagattttgtaactatcttcct

SEQ ID NO: 1997003 - DNA, 25 bp, Homo sapien
catcaaagattttgtaactatcttc

SEQ ID NO: 1997004 - DNA, 25 bp, Homo sapien
caaaatcatcaaagattttgtaact

SEQ ID NO: 1997005 - DNA, 25 bp, Homo sapien
aatcatcaaagattttgtaactatc

SEQ ID NO: 1997006 - DNA, 25 bp, Homo sapien
gcgtttgccttggattgctcctgga

SEQ ID NO: 1997007 - DNA, 25 bp, Homo sapien
caagaagccttgaatgctctttgca

SEQ ID NO: 1997008 - DNA, 25 bp, Homo sapien
taagcagcctgcacattcttgtagg

SEQ ID NO: 1997009 - DNA, 25 bp, Homo sapien
gcactggatgccagcgtttgccttg

SEQ ID NO: 1997010 - DNA, 25 bp, Homo sapien
cattaggtaacttcgtcagggtcac

SEQ ID NO: 1997011 - DNA, 25 bp, Homo sapien
ggtctgtgtatagctgggagcccta

SEQ ID NO: 1997012 - DNA, 25 bp, Homo sapien
gaaataagctgcacaactcctttgc

SEQ ID NO: 1997013 - DNA, 25 bp, Homo sapien
caaagctaatattggtggcagaaca

SEQ ID NO: 1997014 - DNA, 25 bp, Homo sapien
aaacttctggttgaggactcatgga

SEQ ID NO: 1997015 - DNA, 25 bp, Homo sapien
ggaacccaggattgttctgcagatg

SEQ ID NO: 1997016 - DNA, 25 bp, Homo sapien
ggttgtgtcctctgatgatctctga

SEQ ID NO: 1997017 - DNA, 25 bp, Homo sapien
ctcctcacagaatactttggggttt

SEQ ID NO: 1997018 - DNA, 25 bp, Homo sapien
tatacttcttgtgcccagactgcag

SEQ ID NO: 1997019 - DNA, 25 bp, Homo sapien
ttttgaatgggatgccttggcctcc

SEQ ID NO: 1997020 - DNA, 25 bp, Homo sapien
aagagtgagagaaccgggttttgcg

SEQ ID NO: 1997021 - DNA, 25 bp, Homo sapien
cacatggcacgttcctgggacagga

SEQ ID NO: 1997022 - DNA, 25 bp, Homo sapien
gagaagatcataagcccaaatgctg

SEQ ID NO: 1997023 - DNA, 25 bp, Homo sapien
gagagaatgtctagctagcaggcag

SEQ ID NO: 1997024 - DNA, 25 bp, Homo sapien
cacaggtgtgggctttgcagaatcc

SEQ ID NO: 1997025 - DNA, 25 bp, Homo sapien
tcagggccgcctaatgcattatctc

SEQ ID NO: 1997026 - DNA, 25 bp, Homo sapien
aaatgtatcccatggtggaccagcg

SEQ ID NO: 1997027 - DNA, 25 bp, Homo sapien
catggcatagctgatacaaggcaag

SEQ ID NO: 1997028 - DNA, 25 bp, Homo sapien
gacacacacttgacaggccagctgt

SEQ ID NO: 1997029 - DNA, 25 bp, Homo sapien
taagtgatcgtctgagcaagcaaac

SEQ ID NO: 1997030 - DNA, 25 bp, Homo sapien
caacatactaacaggtgtgccagga

SEQ ID NO: 1997031 - DNA, 25 bp, Homo sapien
tgtctacacacgatccagggttggc

SEQ ID NO: 1997032 - DNA, 25 bp, Homo sapien
aatgacaacttcaggtctagacgcc

SEQ ID NO: 1997033 - DNA, 25 bp, Homo sapien
tgattgcggtacagtgtgcttccca

SEQ ID NO: 1997034 - DNA, 25 bp, Homo sapien
tctctgtgaaagacatgtgacctaa

SEQ ID NO: 1997035 - DNA, 25 bp, Homo sapien
ccaacgaaacagctaggcctttgtg

SEQ ID NO: 1997036 - DNA, 25 bp, Homo sapien
ttggcatttgtgaagcaggactctg

SEQ ID NO: 1997037 - DNA, 25 bp, Homo sapien
tattgcaaaacttgggcagccatgt

SEQ ID NO: 1997038 - DNA, 25 bp, Homo sapien
ctcttggtggtcctttgttgattcc

SEQ ID NO: 1997039 - DNA, 25 bp, Homo sapien
taaacttcatgacaatccaacaagc

SEQ ID NO: 1997040 - DNA, 25 bp, Homo sapien
ccagggagagttactattttcagtc

SEQ ID NO: 1997041 - DNA, 25 bp, Homo sapien
cattttcccaagtgcctaaagtgac

SEQ ID NO: 1997042 - DNA, 25 bp, Homo sapien
gagattacatcctaacaccattgcc

SEQ ID NO: 1997043 - DNA, 25 bp, Homo sapien
gaaagagcacttctctgtgagtcca

SEQ ID NO: 1997044 - DNA, 25 bp, Homo sapien
tcctaaaattctgagccacctgtcc

SEQ ID NO: 1997045 - DNA, 25 bp, Homo sapien
caacaacttgctatggtacgttcag

SEQ ID NO: 1997046 - DNA, 25 bp, Homo sapien
ttggagtgatgtgggtgctcgggtg

SEQ ID NO: 1997047 - DNA, 25 bp, Homo sapien
tgggtgctcgggtgtgtcccctcct

SEQ ID NO: 1997048 - DNA, 25 bp, Homo sapien
attggagtgatgtgggtgctcgggt

SEQ ID NO: 1997049 - DNA, 25 bp, Homo sapien
ggtgctcgggtgtgtcccctcctgt

SEQ ID NO: 1997050 - DNA, 25 bp, Homo sapien
tttctgagagtaaccacatcccacc

SEQ ID NO: 1997051 - DNA, 25 bp, Homo sapien
ggaaaggtcacagttttcagtgagt

SEQ ID NO: 1997052 - DNA, 25 bp, Homo sapien
gagtccagaggtgtgatgatgacaa

SEQ ID NO: 1997053 - DNA, 25 bp, Homo sapien
ttctaacacaggtacctggcagtag

SEQ ID NO: 1997054 - DNA, 25 bp, Homo sapien
cggaagcattgatctaaggatggca

SEQ ID NO: 1997055 - DNA, 25 bp, Homo sapien
ggaccctcactgcatgcagtctgaa

SEQ ID NO: 1997056 - DNA, 25 bp, Homo sapien
aatctaaccataagaggtagccagg

SEQ ID NO: 1997057 - DNA, 25 bp, Homo sapien
gtctgaaccagagagtttacacttg

SEQ ID NO: 1997058 - DNA, 25 bp, Homo sapien
tttccaggcccttcgtgccctacat

SEQ ID NO: 1997059 - DNA, 25 bp, Homo sapien
ttccaggcccttcgtgccctacatg

SEQ ID NO: 1997060 - DNA, 25 bp, Homo sapien
ttttccaggcccttcgtgccctaca

SEQ ID NO: 1997061 - DNA, 25 bp, Homo sapien
tgaaaagcacctgtcctcaggacgt

SEQ ID NO: 1997062 - DNA, 25 bp, Homo sapien
tattctacactgagtctagggcctg

SEQ ID NO: 1997063 - DNA, 25 bp, Homo sapien
cagtttggaccggtaatggtagcca

SEQ ID NO: 1997064 - DNA, 25 bp, Homo sapien
aaagccgtggacactgacagaccag

SEQ ID NO: 1997065 - DNA, 25 bp, Homo sapien
gatcaccaagttgggcacgcagtag

SEQ ID NO: 1997066 - DNA, 25 bp, Homo sapien
ggatctttgatcaccaagttgggca

SEQ ID NO: 1997067 - DNA, 25 bp, Homo sapien
atttcttcattacgaatttccacag

SEQ ID NO: 1997068 - DNA, 25 bp, Homo sapien
tagggatctttgatcaccaagttgg

SEQ ID NO: 1997069 - DNA, 25 bp, Homo sapien
tagtcttagatttggagcttaactg

SEQ ID NO: 1997070 - DNA, 25 bp, Homo sapien
agagtctagtcttagatttggagct

SEQ ID NO: 1997071 - DNA, 25 bp, Homo sapien
tctagtcttagatttggagcttaac

SEQ ID NO: 1997072 - DNA, 25 bp, Homo sapien
tttttggaagagtctagtcttagat

SEQ ID NO: 1997073 - DNA, 25 bp, Homo sapien
cagccagcctgaaaatcggaaatca

SEQ ID NO: 1997074 - DNA, 25 bp, Homo sapien
ctaagagtagcatcaataagaagga

SEQ ID NO: 1997075 - DNA, 25 bp, Homo sapien
cagatgtttgtttggactaagagta

SEQ ID NO: 1997076 - DNA, 25 bp, Homo sapien
ggcagcattcctggtcccacaaact

SEQ ID NO: 1997077 - DNA, 25 bp, Homo sapien
gacctgggctgtagcaatatttaca

SEQ ID NO: 1997078 - DNA, 25 bp, Homo sapien
caccaaatagggcaacaacagttca

SEQ ID NO: 1997079 - DNA, 25 bp, Homo sapien
cagatgacttgtctgaggttgacag

SEQ ID NO: 1997080 - DNA, 25 bp, Homo sapien
gaaaatattctctccgtgtctgggc

SEQ ID NO: 1997081 - DNA, 25 bp, Homo sapien
aaatctgtgttaccaggttcaggga

SEQ ID NO: 1997082 - DNA, 25 bp, Homo sapien
gacagcagccatgcactgatgaggt

SEQ ID NO: 1997083 - DNA, 25 bp, Homo sapien
gatatctactcagagggacattcag

SEQ ID NO: 1997084 - DNA, 25 bp, Homo sapien
gaatagggctatctccaaacagcta

SEQ ID NO: 1997085 - DNA, 25 bp, Homo sapien
ctgtctcacaggcatcctggtgcac

SEQ ID NO: 1997086 - DNA, 25 bp, Homo sapien
tctcacaggcatcctggtgcacgct

SEQ ID NO: 1997087 - DNA, 25 bp, Homo sapien
tcacaggcatcctggtgcacgctat

SEQ ID NO: 1997088 - DNA, 25 bp, Homo sapien
acaggcatcctggtgcacgctattc

SEQ ID NO: 1997089 - DNA, 25 bp, Homo sapien
ggaaactgacatgcagcaagtaagg

SEQ ID NO: 1997090 - DNA, 25 bp, Homo sapien
tgacatgcagcaagtaagggcttcc

SEQ ID NO: 1997091 - DNA, 25 bp, Homo sapien
caccaagtaagactcaccacctttt

SEQ ID NO: 1997092 - DNA, 25 bp, Homo sapien
tgcagcaagtaagggcttccagctc

SEQ ID NO: 1997093 - DNA, 25 bp, Homo sapien
gaaatcaacaactcgaggaggcaga

SEQ ID NO: 1997094 - DNA, 25 bp, Homo sapien
catttagatataacttggtcctggg

SEQ ID NO: 1997095 - DNA, 25 bp, Homo sapien
cagagaaccacaaagtcgggcattt

SEQ ID NO: 1997096 - DNA, 25 bp, Homo sapien
cattgaaccccttgcacatagacaa

SEQ ID NO: 1997097 - DNA, 25 bp, Homo sapien
taagggcacatgagcactaggaggc

SEQ ID NO: 1997098 - DNA, 25 bp, Homo sapien
tccaaaatacaaaccgagggcggca

SEQ ID NO: 1997099 - DNA, 25 bp, Homo sapien
tttctaggtgagacacaagctcgct

SEQ ID NO: 1997100 - DNA, 25 bp, Homo sapien
catggtgagtagtagagtcatcccc

SEQ ID NO: 1997101 - DNA, 25 bp, Homo sapien
gaagtagactatatgtgggggttca

SEQ ID NO: 1997102 - DNA, 25 bp, Homo sapien
gggttcatttaatccaattgtctga

SEQ ID NO: 1997103 - DNA, 25 bp, Homo sapien
gaaagtatgaatggctcggcagcac

SEQ ID NO: 1997104 - DNA, 25 bp, Homo sapien
ttgtctgacaactgtttattgagaa

SEQ ID NO: 1997105 - DNA, 25 bp, Homo sapien
ctaggtagaactgcacgagaaggct

SEQ ID NO: 1997106 - DNA, 25 bp, Homo sapien
tgttgccagaaagtataaccagagc

SEQ ID NO: 1997107 - DNA, 25 bp, Homo sapien
tagtggccaggtaggataaattcca

SEQ ID NO: 1997108 - DNA, 25 bp, Homo sapien
tgccccataagtgcatgttgccaga

SEQ ID NO: 1997109 - DNA, 25 bp, Homo sapien
gactgacagccacccttatgacgat

SEQ ID NO: 1997110 - DNA, 25 bp, Homo sapien
cgggcttagccgaattacaattagt

SEQ ID NO: 1997111 - DNA, 25 bp, Homo sapien
catgtgatagggactgttgtggcca

SEQ ID NO: 1997112 - DNA, 25 bp, Homo sapien
acaggcatgcgagagtgggttcact

SEQ ID NO: 1997113 - DNA, 25 bp, Homo sapien
gatccatctgggtaatggctcctcc

SEQ ID NO: 1997114 - DNA, 25 bp, Homo sapien
caagaacctggctcacaaatcaaag

SEQ ID NO: 1997115 - DNA, 25 bp, Homo sapien
aagcagctggtttccgtgtcactaa

SEQ ID NO: 1997116 - DNA, 25 bp, Homo sapien
caaatcaaagttaacactgccccgc

SEQ ID NO: 1997117 - DNA, 25 bp, Homo sapien
acaggcgaagcacacatcacagcct

SEQ ID NO: 1997118 - DNA, 25 bp, Homo sapien
cgcaagacaggcgaagcacacatca

SEQ ID NO: 1997119 - DNA, 25 bp, Homo sapien
acagagatggataaggcaagccgca

SEQ ID NO: 1997120 - DNA, 25 bp, Homo sapien
taaggcaagccgcaagacaggcgaa

SEQ ID NO: 1997121 - DNA, 25 bp, Homo sapien
tgtgggaggcccgtgtcataatgga

SEQ ID NO: 1997122 - DNA, 25 bp, Homo sapien
gaggcccgtgtcataatggagagtt

SEQ ID NO: 1997123 - DNA, 25 bp, Homo sapien
tgggaggcccgtgtcataatggaga

SEQ ID NO: 1997124 - DNA, 25 bp, Homo sapien
gggaggcccgtgtcataatggagag

SEQ ID NO: 1997125 - DNA, 25 bp, Homo sapien
aagcaattctgagtgacgggtccgc

SEQ ID NO: 1997126 - DNA, 25 bp, Homo sapien
tcctacgaagatagagcaacgggtc

SEQ ID NO: 1997127 - DNA, 25 bp, Homo sapien
tgactgaaagttggaaggcacggct

SEQ ID NO: 1997128 - DNA, 25 bp, Homo sapien
caatgctgggcgtcggaaagtgaca

SEQ ID NO: 1997129 - DNA, 25 bp, Homo sapien
tgtctgaggtgcaaagcccagcaat

SEQ ID NO: 1997130 - DNA, 25 bp, Homo sapien
caaactcaaatgtgcaaggagaccc

SEQ ID NO: 1997131 - DNA, 25 bp, Homo sapien
accatagtgggcacgactgcagcct

SEQ ID NO: 1997132 - DNA, 25 bp, Homo sapien
tgtaccattagatcagatgaggacc

SEQ ID NO: 1997133 - DNA, 25 bp, Homo sapien
tggaaacaatatggcccaaggctgt

SEQ ID NO: 1997134 - DNA, 25 bp, Homo sapien
tctagtgggcatgcaaagagacaca

SEQ ID NO: 1997135 - DNA, 25 bp, Homo sapien
tcatatatgatgtaaggccagggtc

SEQ ID NO: 1997136 - DNA, 25 bp, Homo sapien
gaataggatccttctagtagcaacc

SEQ ID NO: 1997137 - DNA, 25 bp, Homo sapien
gaggaaacttgggaggctcaataaa

SEQ ID NO: 1997138 - DNA, 25 bp, Homo sapien
gagatgcttaccttttacaacagct

SEQ ID NO: 1997139 - DNA, 25 bp, Homo sapien
aagatcatttccagtcccagacatg

SEQ ID NO: 1997140 - DNA, 25 bp, Homo sapien
ggaaaccaaatgattgtcaaagaga

SEQ ID NO: 1997141 - DNA, 25 bp, Homo sapien
gatggctcttgcagttggctttgta

SEQ ID NO: 1997142 - DNA, 25 bp, Homo sapien
ctaaattatagaggtcctcctggat

SEQ ID NO: 1997143 - DNA, 25 bp, Homo sapien
tagaggtcctcctggattgtagtct

SEQ ID NO: 1997144 - DNA, 25 bp, Homo sapien
gcagttggctttgtaacatgaggag

SEQ ID NO: 1997145 - DNA, 25 bp, Homo sapien
gaggcaatacattggaatcaccttt

SEQ ID NO: 1997146 - DNA, 25 bp, Homo sapien
tgcctaagcccctcatcattctgga

SEQ ID NO: 1997147 - DNA, 25 bp, Homo sapien
gacaccagctgggtttccgctctga

SEQ ID NO: 1997148 - DNA, 25 bp, Homo sapien
tttctaggattctgttcatgtactc

SEQ ID NO: 1997149 - DNA, 25 bp, Homo sapien
tgtgcccagtcagcacgtagcattt

SEQ ID NO: 1997150 - DNA, 25 bp, Homo sapien
gtgcccagtcagcacgtagcatttt

SEQ ID NO: 1997151 - DNA, 25 bp, Homo sapien
tgcccagtcagcacgtagcattttt

SEQ ID NO: 1997152 - DNA, 25 bp, Homo sapien
gccacagagctgtagcaggaggtat

SEQ ID NO: 1997153 - DNA, 25 bp, Homo sapien
ggacagggcactgcgttcctaaaga

SEQ ID NO: 1997154 - DNA, 25 bp, Homo sapien
caggctattcctggatgacaaacag

SEQ ID NO: 1997155 - DNA, 25 bp, Homo sapien
caagagtagcattgaactgaaggga

SEQ ID NO: 1997156 - DNA, 25 bp, Homo sapien
ctgtaagcattgattccgtgtaaga

SEQ ID NO: 1997157 - DNA, 25 bp, Homo sapien
cttagatacaaggtgactgtaagca

SEQ ID NO: 1997158 - DNA, 25 bp, Homo sapien
ttcagtttgcttagatacaaggtga

SEQ ID NO: 1997159 - DNA, 25 bp, Homo sapien
gactgtaagcattgattccgtgtaa

SEQ ID NO: 1997160 - DNA, 25 bp, Homo sapien
ggcattccagaataagcaaggcatt

SEQ ID NO: 1997161 - DNA, 25 bp, Homo sapien
agtaccatacgtgttattgcccctg

SEQ ID NO: 1997162 - DNA, 25 bp, Homo sapien
tatgatcttgatgctatgtaggcct

SEQ ID NO: 1997163 - DNA, 25 bp, Homo sapien
taatctccgttcacaataagtgcgc

SEQ ID NO: 1997164 - DNA, 25 bp, Homo sapien
gaataggacaaaggcccactcagta

SEQ ID NO: 1997165 - DNA, 25 bp, Homo sapien
catgtttacagtgggaagtgcctcc

SEQ ID NO: 1997166 - DNA, 25 bp, Homo sapien
tgagccaatcaataaagcccagggt

SEQ ID NO: 1997167 - DNA, 25 bp, Homo sapien
gatatgggcaggctactcgctcgtt

SEQ ID NO: 1997168 - DNA, 25 bp, Homo sapien
gttgccaccacagcacacggtggca

SEQ ID NO: 1997169 - DNA, 25 bp, Homo sapien
tgggagggaacacacttcttcctgc

SEQ ID NO: 1997170 - DNA, 25 bp, Homo sapien
acggtggcaattgcctccccagtct

SEQ ID NO: 1997171 - DNA, 25 bp, Homo sapien
gagaacacgacttctgaggagccct

SEQ ID NO: 1997172 - DNA, 25 bp, Homo sapien
actgcgttgccacagggaacctggc

SEQ ID NO: 1997173 - DNA, 25 bp, Homo sapien
tccctgttggcaaactccaaaaagc

SEQ ID NO: 1997174 - DNA, 25 bp, Homo sapien
aagcattttgtgaggttggctgcag

SEQ ID NO: 1997175 - DNA, 25 bp, Homo sapien
caagcttccctgttggcaaactcca

SEQ ID NO: 1997176 - DNA, 25 bp, Homo sapien
agaagcgatagtgatgaactcccag

SEQ ID NO: 1997177 - DNA, 25 bp, Homo sapien
tgaggagaagcgatagtgatgaact

SEQ ID NO: 1997178 - DNA, 25 bp, Homo sapien
gaaatctcttagcaattggatgagg

SEQ ID NO: 1997179 - DNA, 25 bp, Homo sapien
caattggatgaggagaagcgatagt

SEQ ID NO: 1997180 - DNA, 25 bp, Homo sapien
cttagagaagctgtatgttgttcca

SEQ ID NO: 1997181 - DNA, 25 bp, Homo sapien
ttagagaagctgtatgttgttccat

SEQ ID NO: 1997182 - DNA, 25 bp, Homo sapien
tcatgaaggaaaagtagggtctgtg

SEQ ID NO: 1997183 - DNA, 25 bp, Homo sapien
taagggtaagtcaatagcttcaata

SEQ ID NO: 1997184 - DNA, 25 bp, Homo sapien
tagttgctgctcaattacctcttcc

SEQ ID NO: 1997185 - DNA, 25 bp, Homo sapien
tcgattctgtttcttccgaagtagt

SEQ ID NO: 1997186 - DNA, 25 bp, Homo sapien
atataagcggtcagatttcttttgc

SEQ ID NO: 1997187 - DNA, 25 bp, Homo sapien
ggaaaaactcactgatatgtcatct

SEQ ID NO: 1997188 - DNA, 25 bp, Homo sapien
gctcaggaaatataagcggtcagat

SEQ ID NO: 1997189 - DNA, 25 bp, Homo sapien
attcccaccgaatggatggaggcag

SEQ ID NO: 1997190 - DNA, 25 bp, Homo sapien
ctgaaactcccagttgtgataccat

SEQ ID NO: 1997191 - DNA, 25 bp, Homo sapien
tcctcctattctccattccagtctc

SEQ ID NO: 1997192 - DNA, 25 bp, Homo sapien
ttcctcctattctccattccagtct

SEQ ID NO: 1997193 - DNA, 25 bp, Homo sapien
gtctctgaaactcccagttgtgata

SEQ ID NO: 1997194 - DNA, 25 bp, Homo sapien
tgagccttcgttcttactatgcact

SEQ ID NO: 1997195 - DNA, 25 bp, Homo sapien
gggcactgagccttcgttcttacta

SEQ ID NO: 1997196 - DNA, 25 bp, Homo sapien
ggtgggcactgagccttcgttctta

SEQ ID NO: 1997197 - DNA, 25 bp, Homo sapien
gctgtctggtccacttttaagtggg

SEQ ID NO: 1997198 - DNA, 25 bp, Homo sapien
gcatccgacgttgctgcagatgcag

SEQ ID NO: 1997199 - DNA, 25 bp, Homo sapien
taacactgtcaactgcggctggctt

SEQ ID NO: 1997200 - DNA, 25 bp, Homo sapien
tggtggaattgtaacactgtcaact

SEQ ID NO: 1997201 - DNA, 25 bp, Homo sapien
gaattgtaacactgtcaactgcggc

SEQ ID NO: 1997202 - DNA, 25 bp, Homo sapien
aaagagccagtgctgaaacggctcc

SEQ ID NO: 1997203 - DNA, 25 bp, Homo sapien
ccagtgctgaaacggctcccatgtt

SEQ ID NO: 1997204 - DNA, 25 bp, Homo sapien
agccagtgctgaaacggctcccatg

SEQ ID NO: 1997205 - DNA, 25 bp, Homo sapien
tcaaagagccagtgctgaaacggct

SEQ ID NO: 1997206 - DNA, 25 bp, Homo sapien
ttaggaattgagtaaggctgtctcc

SEQ ID NO: 1997207 - DNA, 25 bp, Homo sapien
agggatgagactgacacagtggagg

SEQ ID NO: 1997208 - DNA, 25 bp, Homo sapien
tccacgttcaggtgttaagccaaac

SEQ ID NO: 1997209 - DNA, 25 bp, Homo sapien
taaggacttgtaggatgtaattagg

SEQ ID NO: 1997210 - DNA, 25 bp, Homo sapien
caccaggggactgcagctgatcaat

SEQ ID NO: 1997211 - DNA, 25 bp, Homo sapien
atagctattgagcagtttgaccact

SEQ ID NO: 1997212 - DNA, 25 bp, Homo sapien
gtttgaccactgaggctgatctgtt

SEQ ID NO: 1997213 - DNA, 25 bp, Homo sapien
tgtttgagcacctccggcagccact

SEQ ID NO: 1997214 - DNA, 25 bp, Homo sapien
ggtgtgaatgatactatcactggga

SEQ ID NO: 1997215 - DNA, 25 bp, Homo sapien
ctgtggcatgaggtggttgggagca

SEQ ID NO: 1997216 - DNA, 25 bp, Homo sapien
cactgggcttcaatggaggtgtgaa

SEQ ID NO: 1997217 - DNA, 25 bp, Homo sapien
gactccctgggcgtctgatgcctca

SEQ ID NO: 1997218 - DNA, 25 bp, Homo sapien
gctgggctcactatgccaactttat

SEQ ID NO: 1997219 - DNA, 25 bp, Homo sapien
acacagttgctttcagttgccacta

SEQ ID NO: 1997220 - DNA, 25 bp, Homo sapien
taattacagaaaacccaatgcacag

SEQ ID NO: 1997221 - DNA, 25 bp, Homo sapien
tgggaaagattttgccctgccaccc

SEQ ID NO: 1997222 - DNA, 25 bp, Homo sapien
tgaccaaccaattgctgaataatag

SEQ ID NO: 1997223 - DNA, 25 bp, Homo sapien
aagagaatctcttagtaccattcag

SEQ ID NO: 1997224 - DNA, 25 bp, Homo sapien
taccattcagttgaaaattcatgac

SEQ ID NO: 1997225 - DNA, 25 bp, Homo sapien
ggcaggccttcccacgtagtgttaa

SEQ ID NO: 1997226 - DNA, 25 bp, Homo sapien
tgctccagttcaatgccttcaatgg

SEQ ID NO: 1997227 - DNA, 25 bp, Homo sapien
tgcacactgttttgattctgctcca

SEQ ID NO: 1997228 - DNA, 25 bp, Homo sapien
ctgctccagttcaatgccttcaatg

SEQ ID NO: 1997229 - DNA, 25 bp, Homo sapien
gctccagttcaatgccttcaatggc

SEQ ID NO: 1997230 - DNA, 25 bp, Homo sapien
gaaatacgagggcatttagccgtcc

SEQ ID NO: 1997231 - DNA, 25 bp, Homo sapien
ggctaggccaccaaacagttagtgc

SEQ ID NO: 1997232 - DNA, 25 bp, Homo sapien
tgattaggcaattcacaggtcctgg

SEQ ID NO: 1997233 - DNA, 25 bp, Homo sapien
cctctgggctggattcaagtgacta

SEQ ID NO: 1997234 - DNA, 25 bp, Homo sapien
caaatacaagctcaatggcattcag

SEQ ID NO: 1997235 - DNA, 25 bp, Homo sapien
tatgtgatcagcaaatacaagctca

SEQ ID NO: 1997236 - DNA, 25 bp, Homo sapien
gctcaatggcattcagttgtctcat

SEQ ID NO: 1997237 - DNA, 25 bp, Homo sapien
ctgatctggtgcatactatgtgatc

SEQ ID NO: 1997238 - DNA, 25 bp, Homo sapien
tgtcttccacaaataaatcgcaggg

SEQ ID NO: 1997239 - DNA, 25 bp, Homo sapien
tattaattgcatccccaaatgtggg

SEQ ID NO: 1997240 - DNA, 25 bp, Homo sapien
tgttccccgtgaaggtcatgcatcc

SEQ ID NO: 1997241 - DNA, 25 bp, Homo sapien
tgtgcccagcacagattgccaggag

SEQ ID NO: 1997242 - DNA, 25 bp, Homo sapien
tcttccgcacttcgcactggatggc

SEQ ID NO: 1997243 - DNA, 25 bp, Homo sapien
tcttggtgtagttgcacatcttccg

SEQ ID NO: 1997244 - DNA, 25 bp, Homo sapien
cgcactggatggcttcgatctcccg

SEQ ID NO: 1997245 - DNA, 25 bp, Homo sapien
tggcttcgatctcccgccgcttgaa

SEQ ID NO: 1997246 - DNA, 25 bp, Homo sapien
ccgcgcctcttcttcacgaagttgt

SEQ ID NO: 1997247 - DNA, 25 bp, Homo sapien
tctctggagtcctcatcgaactggg

SEQ ID NO: 1997248 - DNA, 25 bp, Homo sapien
catcgaactgggtgggctgcttcct

SEQ ID NO: 1997249 - DNA, 25 bp, Homo sapien
tcttcacgaagttgttgcctgtttt

SEQ ID NO: 1997250 - DNA, 25 bp, Homo sapien
tcttttgctgggcaggtcgatgcat

SEQ ID NO: 1997251 - DNA, 25 bp, Homo sapien
gcaggtcgatgcatttttccagcac

SEQ ID NO: 1997252 - DNA, 25 bp, Homo sapien
tttgctgggcaggtcgatgcatttt

SEQ ID NO: 1997253 - DNA, 25 bp, Homo sapien
gctgggcaggtcgatgcatttttcc

SEQ ID NO: 1997254 - DNA, 25 bp, Homo sapien
tggccatgatggtgtcttggctggc

SEQ ID NO: 1997255 - DNA, 25 bp, Homo sapien
tgatggtgtcttggctggcggcggg

SEQ ID NO: 1997256 - DNA, 25 bp, Homo sapien
catgatggtgtcttggctggcggcg

SEQ ID NO: 1997257 - DNA, 25 bp, Homo sapien
gccatgatggtgtcttggctggcgg

SEQ ID NO: 1997258 - DNA, 25 bp, Homo sapien
gcgcctcccgggccatgtggatgac

SEQ ID NO: 1997259 - DNA, 25 bp, Homo sapien
tgagcgggggcctgcggtttgtgtt

SEQ ID NO: 1997260 - DNA, 25 bp, Homo sapien
cctctgccttttggctttcacctcc

SEQ ID NO: 1997261 - DNA, 25 bp, Homo sapien
tctgccttttggctttcacctcctc

SEQ ID NO: 1997262 - DNA, 25 bp, Homo sapien
tgccttttggctttcacctcctctt

SEQ ID NO: 1997263 - DNA, 25 bp, Homo sapien
ttcctctgccttttggctttcacct

SEQ ID NO: 1997264 - DNA, 25 bp, Homo sapien
gtgtcagttccctaggccccaggtg

SEQ ID NO: 1997265 - DNA, 25 bp, Homo sapien
gcttcccacgtgtcagttccctagg

SEQ ID NO: 1997266 - DNA, 25 bp, Homo sapien
gctcactgcgcttcccacgtgtcag

SEQ ID NO: 1997267 - DNA, 25 bp, Homo sapien
cgtgtcagttccctaggccccaggt

SEQ ID NO: 1997268 - DNA, 25 bp, Homo sapien
cagccgtactgaagcgccgcgtggt

SEQ ID NO: 1997269 - DNA, 25 bp, Homo sapien
ttccgctcgcctgcggaggatccag

SEQ ID NO: 1997270 - DNA, 25 bp, Homo sapien
agccccgtcgtctggccggattctg

SEQ ID NO: 1997271 - DNA, 25 bp, Homo sapien
gagctgcggtgaagctcagacaagc

SEQ ID NO: 1997272 - DNA, 25 bp, Homo sapien
ccagcaaatgaaatcgggagtcgag

SEQ ID NO: 1997273 - DNA, 25 bp, Homo sapien
tttcctggccagcaaatgaaatcgg

SEQ ID NO: 1997274 - DNA, 25 bp, Homo sapien
tgccagttgagcaatttgcagcttt

SEQ ID NO: 1997275 - DNA, 25 bp, Homo sapien
agttgagcaatttgcagcttttctc

SEQ ID NO: 1997276 - DNA, 25 bp, Homo sapien
cacacagaacatgaatgcgggtctg

SEQ ID NO: 1997277 - DNA, 25 bp, Homo sapien
tgaggtcgcctatcactagaattcc

SEQ ID NO: 1997278 - DNA, 25 bp, Homo sapien
cctgaagatgacgttggtaccccaa

SEQ ID NO: 1997279 - DNA, 25 bp, Homo sapien
caattccatcgagaaactgtacggt

SEQ ID NO: 1997280 - DNA, 25 bp, Homo sapien
tgtccacgctaaaccaatggctaga

SEQ ID NO: 1997281 - DNA, 25 bp, Homo sapien
gaaatgtacagctgaaattgaccat

SEQ ID NO: 1997282 - DNA, 25 bp, Homo sapien
gatcaggtaccaaggcattgctaga

SEQ ID NO: 1997283 - DNA, 25 bp, Homo sapien
gataaaattgaagtggtgataccct

SEQ ID NO: 1997284 - DNA, 25 bp, Homo sapien
gaagctgtatgtggagcaccatgca

SEQ ID NO: 1997285 - DNA, 25 bp, Homo sapien
gtctgtaagctgcattggcccacgg

SEQ ID NO: 1997286 - DNA, 25 bp, Homo sapien
tatttatagacccagcaatgcgcag

SEQ ID NO: 1997287 - DNA, 25 bp, Homo sapien
taaccagactccttacaagtgggtc

SEQ ID NO: 1997288 - DNA, 25 bp, Homo sapien
cagagaggaccttgtattgtggaaa

SEQ ID NO: 1997289 - DNA, 25 bp, Homo sapien
ttccacgttgaccagttggcagctc

SEQ ID NO: 1997290 - DNA, 25 bp, Homo sapien
tatgtgcttctaagactgttcccca

SEQ ID NO: 1997291 - DNA, 25 bp, Homo sapien
tattacagttcgagtttctaggcac

SEQ ID NO: 1997292 - DNA, 25 bp, Homo sapien
tctacgcctcaaataacagcaagtc

SEQ ID NO: 1997293 - DNA, 25 bp, Homo sapien
aaattagccagcacgacttgtaaga

SEQ ID NO: 1997294 - DNA, 25 bp, Homo sapien
tagccagcacgacttgtaagacaat

SEQ ID NO: 1997295 - DNA, 25 bp, Homo sapien
atgctagatgtatctacgcctcaaa

SEQ ID NO: 1997296 - DNA, 25 bp, Homo sapien
ttaagtgctctatactgtgctaacc

SEQ ID NO: 1997297 - DNA, 25 bp, Homo sapien
accatggaggagcatgacagtaagc

SEQ ID NO: 1997298 - DNA, 25 bp, Homo sapien
ttaaaacccaacatctaagaccatg

SEQ ID NO: 1997299 - DNA, 25 bp, Homo sapien
cctgatctggtagcggaaaagactg

SEQ ID NO: 1997300 - DNA, 25 bp, Homo sapien
aagtttggaaatggattctggagtc

SEQ ID NO: 1997301 - DNA, 25 bp, Homo sapien
ggatgtgccattgaacctagctgac

SEQ ID NO: 1997302 - DNA, 25 bp, Homo sapien
ttctggagtcttctagagtatggag

SEQ ID NO: 1997303 - DNA, 25 bp, Homo sapien
gcagggctgttttccggtgtcatta

SEQ ID NO: 1997304 - DNA, 25 bp, Homo sapien
cagcttatgcaaggaacgagaagcc

SEQ ID NO: 1997305 - DNA, 25 bp, Homo sapien
caaggaacgagaagcccgcatgatt

SEQ ID NO: 1997306 - DNA, 25 bp, Homo sapien
cgagaagcccgcatgattgagggat

SEQ ID NO: 1997307 - DNA, 25 bp, Homo sapien
catgattgagggatgccgaagaatg

SEQ ID NO: 1997308 - DNA, 25 bp, Homo sapien
tgtgtaacaagaggaagacagaaca

SEQ ID NO: 1997309 - DNA, 25 bp, Homo sapien
ttgtgtaacaagaggaagacagaac

SEQ ID NO: 1997310 - DNA, 25 bp, Homo sapien
gtgtaacaagaggaagacagaacat

SEQ ID NO: 1997311 - DNA, 25 bp, Homo sapien
cttgtgtaacaagaggaagacagaa

SEQ ID NO: 1997312 - DNA, 25 bp, Homo sapien
taggcgacccgaacggggctgctgg

SEQ ID NO: 1997313 - DNA, 25 bp, Homo sapien
tgctggaaaaggccctcaggattta

SEQ ID NO: 1997314 - DNA, 25 bp, Homo sapien
gtaggcgacccgaacggggctgctg

SEQ ID NO: 1997315 - DNA, 25 bp, Homo sapien
gaaaaggccctcaggatttatgagc

SEQ ID NO: 1997316 - DNA, 25 bp, Homo sapien
tgatgagggtttcaaagcgtccctt

SEQ ID NO: 1997317 - DNA, 25 bp, Homo sapien
cagtggcgccggatgttcaaagaca

SEQ ID NO: 1997318 - DNA, 25 bp, Homo sapien
cgccggatgttcaaagacacaatgt

SEQ ID NO: 1997319 - DNA, 25 bp, Homo sapien
acaatgttctcttgtgatgagggtt

SEQ ID NO: 1997320 - DNA, 25 bp, Homo sapien
actctgtgttaatccctgggccaca

SEQ ID NO: 1997321 - DNA, 25 bp, Homo sapien
catcccaattccactctgcaagcag

SEQ ID NO: 1997322 - DNA, 25 bp, Homo sapien
ctgggccctggtttcatcccaattc

SEQ ID NO: 1997323 - DNA, 25 bp, Homo sapien
actctgcaagcagccactctgtgtt

SEQ ID NO: 1997324 - DNA, 25 bp, Homo sapien
gggccaattccctgcgattttccgc

SEQ ID NO: 1997325 - DNA, 25 bp, Homo sapien
cacaagatcccaactacatggcacc

SEQ ID NO: 1997326 - DNA, 25 bp, Homo sapien
aactacatggcacccaaatgggcca

SEQ ID NO: 1997327 - DNA, 25 bp, Homo sapien
gattttccgcagaattaccctccat

SEQ ID NO: 1997328 - DNA, 25 bp, Homo sapien
ttgcaaccaatttctcccggctcag

SEQ ID NO: 1997329 - DNA, 25 bp, Homo sapien
cctgccagtggatgtttatgtgact

SEQ ID NO: 1997330 - DNA, 25 bp, Homo sapien
tcagggagaccgcaggataaacttt

SEQ ID NO: 1997331 - DNA, 25 bp, Homo sapien
gcagttgagcttccctgactagagg

SEQ ID NO: 1997332 - DNA, 25 bp, Homo sapien
aggcaatgattgtcccaaaggaatg

SEQ ID NO: 1997333 - DNA, 25 bp, Homo sapien
ctcacgacatatggattaagcaatc

SEQ ID NO: 1997334 - DNA, 25 bp, Homo sapien
cacgacatatggattaagcaatctg

SEQ ID NO: 1997335 - DNA, 25 bp, Homo sapien
tatggattaagcaatctgttaatac

SEQ ID NO: 1997336 - DNA, 25 bp, Homo sapien
gacatatggattaagcaatctgtta

SEQ ID NO: 1997337 - DNA, 25 bp, Homo sapien
ccctttattgttggtatcattgaag

SEQ ID NO: 1997338 - DNA, 25 bp, Homo sapien
attccctttattgttggtatcattg

SEQ ID NO: 1997339 - DNA, 25 bp, Homo sapien
ttattgttggtatcattgaagtagc

SEQ ID NO: 1997340 - DNA, 25 bp, Homo sapien
tattgttggtatcattgaagtagcc

SEQ ID NO: 1997341 - DNA, 25 bp, Homo sapien
gtcccaatcagtggtgctctgcaca

SEQ ID NO: 1997342 - DNA, 25 bp, Homo sapien
ggtcccaatcagtggtgctctgcac

SEQ ID NO: 1997343 - DNA, 25 bp, Homo sapien
ggttatctgcatccgtcaagggaac

SEQ ID NO: 1997344 - DNA, 25 bp, Homo sapien
ctgggttatctgcatccgtcaaggg

SEQ ID NO: 1997345 - DNA, 25 bp, Homo sapien
tatctgcatccgtcaagggaaccat

SEQ ID NO: 1997346 - DNA, 25 bp, Homo sapien
tgggttatctgcatccgtcaaggga

SEQ ID NO: 1997347 - DNA, 25 bp, Homo sapien
cattctagcgtgttctccactcgcg

SEQ ID NO: 1997348 - DNA, 25 bp, Homo sapien
cggagaggagcacaacagtttctct

SEQ ID NO: 1997349 - DNA, 25 bp, Homo sapien
ggcggagaggagcacaacagtttct

SEQ ID NO: 1997350 - DNA, 25 bp, Homo sapien
agagggaatcccattctagcgtgtt

SEQ ID NO: 1997351 - DNA, 25 bp, Homo sapien
ttgagcaacaccctcaccagttaaa

SEQ ID NO: 1997352 - DNA, 25 bp, Homo sapien
tagcagtaccttgagcaacaccctc

SEQ ID NO: 1997353 - DNA, 25 bp, Homo sapien
gagcaacaccctcaccagttaaagg

SEQ ID NO: 1997354 - DNA, 25 bp, Homo sapien
cagccagtgtagcagtaccttgagc

SEQ ID NO: 1997355 - DNA, 25 bp, Homo sapien
taggaagcctagagatagcaggtgc

SEQ ID NO: 1997356 - DNA, 25 bp, Homo sapien
ctataggaagcctagagatagcagg

SEQ ID NO: 1997357 - DNA, 25 bp, Homo sapien
gaagcctagagatagcaggtgctga

SEQ ID NO: 1997358 - DNA, 25 bp, Homo sapien
agcctagagatagcaggtgctgaga

SEQ ID NO: 1997359 - DNA, 25 bp, Homo sapien
caaaatgttttaacagccctgagga

SEQ ID NO: 1997360 - DNA, 25 bp, Homo sapien
gaggagccgtccacccatggggctc

SEQ ID NO: 1997361 - DNA, 25 bp, Homo sapien
tgctgttcataaccaaaatgtttta

SEQ ID NO: 1997362 - DNA, 25 bp, Homo sapien
ccatggggctctgactctttgagac

SEQ ID NO: 1997363 - DNA, 25 bp, Homo sapien
cctgcttgtccttttaacaggattt

SEQ ID NO: 1997364 - DNA, 25 bp, Homo sapien
ggcagggctggtgcttactgacaat

SEQ ID NO: 1997365 - DNA, 25 bp, Homo sapien
taacaggatttcagccagagatttg

SEQ ID NO: 1997366 - DNA, 25 bp, Homo sapien
ttgagggaaaagtaccgcagtctag

SEQ ID NO: 1997367 - DNA, 25 bp, Homo sapien
tcctgagaaccgactgtgtgttccc

SEQ ID NO: 1997368 - DNA, 25 bp, Homo sapien
cctgagaaccgactgtgtgttccca

SEQ ID NO: 1997369 - DNA, 25 bp, Homo sapien
ctgagaaccgactgtgtgttcccag

SEQ ID NO: 1997370 - DNA, 25 bp, Homo sapien
ctgagatggcagaagagctgggtac

SEQ ID NO: 1997371 - DNA, 25 bp, Homo sapien
gagctgggtactggggagatctcaa

SEQ ID NO: 1997372 - DNA, 25 bp, Homo sapien
agctgggtactggggagatctcaat

SEQ ID NO: 1997373 - DNA, 25 bp, Homo sapien
agatggcagaagagctgggtactgg

SEQ ID NO: 1997374 - DNA, 25 bp, Homo sapien
gaagggtgacaagttcagtttagca

SEQ ID NO: 1997375 - DNA, 25 bp, Homo sapien
agcccaggtcaggacattcatctat

SEQ ID NO: 1997376 - DNA, 25 bp, Homo sapien
gtgacaagttcagtttagcagcaga

SEQ ID NO: 1997377 - DNA, 25 bp, Homo sapien
gacattcatctataatcagggaagc

SEQ ID NO: 1997378 - DNA, 25 bp, Homo sapien
tccccttggtgtagctctttaatct

SEQ ID NO: 1997379 - DNA, 25 bp, Homo sapien
tcttcgaagtgtgctgacattgttc

SEQ ID NO: 1997380 - DNA, 25 bp, Homo sapien
ctttaatcttcgaagtgtgctgaca

SEQ ID NO: 1997381 - DNA, 25 bp, Homo sapien
cactaagcaaagctcgtctcttctg

SEQ ID NO: 1997382 - DNA, 25 bp, Homo sapien
ttgcaaattttagtgcagagacaac

SEQ ID NO: 1997383 - DNA, 25 bp, Homo sapien
tgcaaattttagtgcagagacaaca

SEQ ID NO: 1997384 - DNA, 25 bp, Homo sapien
tgcccaggaaatatgaattcagtag

SEQ ID NO: 1997385 - DNA, 25 bp, Homo sapien
cagtttgttgcatagcctctgccca

SEQ ID NO: 1997386 - DNA, 25 bp, Homo sapien
agcctctgcccaggaaatatgaatt

SEQ ID NO: 1997387 - DNA, 25 bp, Homo sapien
cgtgcagtttgttgcatagcctctg

SEQ ID NO: 1997388 - DNA, 25 bp, Homo sapien
tcgtgactgtagacagtaactgttc

SEQ ID NO: 1997389 - DNA, 25 bp, Homo sapien
aaattcccagattggctcagtcctg

SEQ ID NO: 1997390 - DNA, 25 bp, Homo sapien
gcaaaccttttgatggtctatcaca

SEQ ID NO: 1997391 - DNA, 25 bp, Homo sapien
tgcaactcactaacgaaagtcagtt

SEQ ID NO: 1997392 - DNA, 25 bp, Homo sapien
tctgtggatatcagagcagatcatc

SEQ ID NO: 1997393 - DNA, 25 bp, Homo sapien
tgagtcctgagactggaatttggcc

SEQ ID NO: 1997394 - DNA, 25 bp, Homo sapien
tggaatttggcctcagtctgtggat

SEQ ID NO: 1997395 - DNA, 25 bp, Homo sapien
aactgctccgatgccacaagtctgg

SEQ ID NO: 1997396 - DNA, 25 bp, Homo sapien
tagattcagggcaacatcaagacgg

SEQ ID NO: 1997397 - DNA, 25 bp, Homo sapien
caaactggctctctgtcgagctggc

SEQ ID NO: 1997398 - DNA, 25 bp, Homo sapien
gataaagcttgatgaggatgacact

SEQ ID NO: 1997399 - DNA, 25 bp, Homo sapien
ccaccaagctgtttaacaaactggc

SEQ ID NO: 1997400 - DNA, 25 bp, Homo sapien
ctaccttcctgggtatgagtagaat

SEQ ID NO: 1997401 - DNA, 25 bp, Homo sapien
tctctaccttcctgggtatgagtag

SEQ ID NO: 1997402 - DNA, 25 bp, Homo sapien
tcctgggtatgagtagaatcttggg

SEQ ID NO: 1997403 - DNA, 25 bp, Homo sapien
ccttcctgggtatgagtagaatctt

SEQ ID NO: 1997404 - DNA, 25 bp, Homo sapien
tgaaagcaagacgaagagagtcctt

SEQ ID NO: 1997405 - DNA, 25 bp, Homo sapien
caagagtgatgtacaaagccctacg

SEQ ID NO: 1997406 - DNA, 25 bp, Homo sapien
cggacatacagacttcgtgtgcaag

SEQ ID NO: 1997407 - DNA, 25 bp, Homo sapien
tacaaagccctacggacatacagac

SEQ ID NO: 1997408 - DNA, 25 bp, Homo sapien
cacagcttcgcagagggaaagtcct

SEQ ID NO: 1997409 - DNA, 25 bp, Homo sapien
agctgagcagcttcaaaattcttca

SEQ ID NO: 1997410 - DNA, 25 bp, Homo sapien
ttcagagaatcacagcttcgcagag

SEQ ID NO: 1997411 - DNA, 25 bp, Homo sapien
tcagctgtgatccacaataagaaac

SEQ ID NO: 1997412 - DNA, 25 bp, Homo sapien
tcacctgtttttgaccccgaatatc

SEQ ID NO: 1997413 - DNA, 25 bp, Homo sapien
tgactatactgctcttcaccttcac

SEQ ID NO: 1997414 - DNA, 25 bp, Homo sapien
ccttgtttatagagctggatagctt

SEQ ID NO: 1997415 - DNA, 25 bp, Homo sapien
tattattgactgatactgataggct

SEQ ID NO: 1997416 - DNA, 25 bp, Homo sapien
tgggatgtaagttcccagaggctgc

SEQ ID NO: 1997417 - DNA, 25 bp, Homo sapien
ggctgcctctgaaatcaatttgctg

SEQ ID NO: 1997418 - DNA, 25 bp, Homo sapien
tgagaagggttggtgggatagaacc

SEQ ID NO: 1997419 - DNA, 25 bp, Homo sapien
gctgagtcactgctgagaagggttg

SEQ ID NO: 1997420 - DNA, 25 bp, Homo sapien
catacaaccaagaggtttgaggtga

SEQ ID NO: 1997421 - DNA, 25 bp, Homo sapien
ggctttacaggaaggagcacaagag

SEQ ID NO: 1997422 - DNA, 25 bp, Homo sapien
gtcctatgaatccagacaacccata

SEQ ID NO: 1997423 - DNA, 25 bp, Homo sapien
gctgctaatataaggagtcctatga

SEQ ID NO: 1997424 - DNA, 25 bp, Homo sapien
gaagacagccgactttgaaggcaca

SEQ ID NO: 1997425 - DNA, 25 bp, Homo sapien
tatcacctaggagatcacactgggt

SEQ ID NO: 1997426 - DNA, 25 bp, Homo sapien
tagtccctcagcactaacgtgggtc

SEQ ID NO: 1997427 - DNA, 25 bp, Homo sapien
caacattaaagaaagagctaggcct

SEQ ID NO: 1997428 - DNA, 25 bp, Homo sapien
tcctgttggcacaatgaatggaggt

SEQ ID NO: 1997429 - DNA, 25 bp, Homo sapien
tgtctgtaggtagaggtgcaaatac

SEQ ID NO: 1997430 - DNA, 25 bp, Homo sapien
tctgtaggtagaggtgcaaatactt

SEQ ID NO: 1997431 - DNA, 25 bp, Homo sapien
cctgttggcacaatgaatggaggtg

SEQ ID NO: 1997432 - DNA, 25 bp, Homo sapien
tggccaaaggtgggaaataagttga

SEQ ID NO: 1997433 - DNA, 25 bp, Homo sapien
cttcttgggccttggccaaaggtgg

SEQ ID NO: 1997434 - DNA, 25 bp, Homo sapien
tcttgggccttggccaaaggtggga

SEQ ID NO: 1997435 - DNA, 25 bp, Homo sapien
tctttttaggatgagcagtccgagg

SEQ ID NO: 1997436 - DNA, 25 bp, Homo sapien
gccacttcaaagacttgcagaagaa

SEQ ID NO: 1997437 - DNA, 25 bp, Homo sapien
aaatcgatttgaccttccatactgc

SEQ ID NO: 1997438 - DNA, 25 bp, Homo sapien
gaggaactagtgttcctccagttag

SEQ ID NO: 1997439 - DNA, 25 bp, Homo sapien
agatggagctgataaccaacattca

SEQ ID NO: 1997440 - DNA, 25 bp, Homo sapien
gatggagctgataaccaacattcaa

SEQ ID NO: 1997441 - DNA, 25 bp, Homo sapien
tactccattgttcacatttaagccc

SEQ ID NO: 1997442 - DNA, 25 bp, Homo sapien
tagtctgcagttcttcatggacagg

SEQ ID NO: 1997443 - DNA, 25 bp, Homo sapien
agccctgatgattagtctgcagttc

SEQ ID NO: 1997444 - DNA, 25 bp, Homo sapien
ggactcacgccaaatgcagattttt

SEQ ID NO: 1997445 - DNA, 25 bp, Homo sapien
gtaaagggttttctgcggcctcagc

SEQ ID NO: 1997446 - DNA, 25 bp, Homo sapien
tccttgtttagtgttagtcttgatg

SEQ ID NO: 1997447 - DNA, 25 bp, Homo sapien
ccctgcacaggactgagtgggaagt

SEQ ID NO: 1997448 - DNA, 25 bp, Homo sapien
agtcttgatggggtgcctgaggccc

SEQ ID NO: 1997449 - DNA, 25 bp, Homo sapien
tcgtgataagctttcaaggttgctg

SEQ ID NO: 1997450 - DNA, 25 bp, Homo sapien
ttcatcccattctgtccatcagttt

SEQ ID NO: 1997451 - DNA, 25 bp, Homo sapien
ctggcacctgattggtcgtgataag

SEQ ID NO: 1997452 - DNA, 25 bp, Homo sapien
gttcttactcccacagctgatccag

SEQ ID NO: 1997453 - DNA, 25 bp, Homo sapien
tattgaggatgtgtgcttgtctgct

SEQ ID NO: 1997454 - DNA, 25 bp, Homo sapien
gacttgagtcatgtgtccttgaacg

SEQ ID NO: 1997455 - DNA, 25 bp, Homo sapien
cagtaagtgcattaagacttgagtc

SEQ ID NO: 1997456 - DNA, 25 bp, Homo sapien
gcttcaatctgcgtgtatctccagc

SEQ ID NO: 1997457 - DNA, 25 bp, Homo sapien
ttattagcgtctgacttctggccct

SEQ ID NO: 1997458 - DNA, 25 bp, Homo sapien
ttaacctcttaattattagcgtctg

SEQ ID NO: 1997459 - DNA, 25 bp, Homo sapien
taattattagcgtctgacttctggc

SEQ ID NO: 1997460 - DNA, 25 bp, Homo sapien
aacctcttaattattagcgtctgac

SEQ ID NO: 1997461 - DNA, 25 bp, Homo sapien
tgtgacctccgagttacagttgtca

SEQ ID NO: 1997462 - DNA, 25 bp, Homo sapien
tgtttattggcgagccccagttgag

SEQ ID NO: 1997463 - DNA, 25 bp, Homo sapien
ggttacactcatatgcctagcagca

SEQ ID NO: 1997464 - DNA, 25 bp, Homo sapien
tgttggctatagtgggtctcctcac

SEQ ID NO: 1997465 - DNA, 25 bp, Homo sapien
tgactcaaaactcggaatacattta

SEQ ID NO: 1997466 - DNA, 25 bp, Homo sapien
caaaactcggaatacatttacagtc

SEQ ID NO: 1997467 - DNA, 25 bp, Homo sapien
aaaactcggaatacatttacagtca

SEQ ID NO: 1997468 - DNA, 25 bp, Homo sapien
aaagatgactcaaaactcggaatac

SEQ ID NO: 1997469 - DNA, 25 bp, Homo sapien
ttgcagtctcagaaacccggtttgg

SEQ ID NO: 1997470 - DNA, 25 bp, Homo sapien
catgaatgagtacgctggccaggaa

SEQ ID NO: 1997471 - DNA, 25 bp, Homo sapien
aagcttccggaacttggcagtccag

SEQ ID NO: 1997472 - DNA, 25 bp, Homo sapien
gaactgtgatgtgcaaggcccagct

SEQ ID NO: 1997473 - DNA, 25 bp, Homo sapien
tagtcccacattctgtggtccaggg

SEQ ID NO: 1997474 - DNA, 25 bp, Homo sapien
tttcatgaacctcagacaggccctc

SEQ ID NO: 1997475 - DNA, 25 bp, Homo sapien
caagttccaactgcttgtcgggaaa

SEQ ID NO: 1997476 - DNA, 25 bp, Homo sapien
gaactgtctgcatgcactagtgcct

SEQ ID NO: 1997477 - DNA, 25 bp, Homo sapien
atatctaaagtgcagtgctccttca

SEQ ID NO: 1997478 - DNA, 25 bp, Homo sapien
tttatcgggttctagcttcaccaga

SEQ ID NO: 1997479 - DNA, 25 bp, Homo sapien
gtaagacagcgggtactcaggaccg

SEQ ID NO: 1997480 - DNA, 25 bp, Homo sapien
gattgttgtttagagtggtatgacc

SEQ ID NO: 1997481 - DNA, 25 bp, Homo sapien
tgtgcctggactacaaagtggctcc

SEQ ID NO: 1997482 - DNA, 25 bp, Homo sapien
ctgggtggcctgtttaatgtatgaa

SEQ ID NO: 1997483 - DNA, 25 bp, Homo sapien
ccagaggctatttaggaaaaggtct

SEQ ID NO: 1997484 - DNA, 25 bp, Homo sapien
ccactgggtaatgagtgcacacagg

SEQ ID NO: 1997485 - DNA, 25 bp, Homo sapien
tgagacaatgtgcaaatggctctcc

SEQ ID NO: 1997486 - DNA, 25 bp, Homo sapien
gtgtggctcgcagcacattacgtgt

SEQ ID NO: 1997487 - DNA, 25 bp, Homo sapien
tgctgcccttgaagtgtggctcgca

SEQ ID NO: 1997488 - DNA, 25 bp, Homo sapien
ccactggaggtaatcgatgtatgta

SEQ ID NO: 1997489 - DNA, 25 bp, Homo sapien
tacgtgtccactggaggtaatcgat

SEQ ID NO: 1997490 - DNA, 25 bp, Homo sapien
aaggcaggcttcagatagataaggc

SEQ ID NO: 1997491 - DNA, 25 bp, Homo sapien
gaaaggattgggattgcttccgaga

SEQ ID NO: 1997492 - DNA, 25 bp, Homo sapien
cagatagttcccatagccaatgtga

SEQ ID NO: 1997493 - DNA, 25 bp, Homo sapien
tgctgattcttatccggcagtgact

SEQ ID NO: 1997494 - DNA, 25 bp, Homo sapien
gttcctggatcactggcttttccca

SEQ ID NO: 1997495 - DNA, 25 bp, Homo sapien
ttcctggatcactggcttttcccat

SEQ ID NO: 1997496 - DNA, 25 bp, Homo sapien
tgttcctggatcactggcttttccc

SEQ ID NO: 1997497 - DNA, 25 bp, Homo sapien
ctgttcctggatcactggcttttcc

SEQ ID NO: 1997498 - DNA, 25 bp, Homo sapien
ctttttatcacaaagtcgtatacca

SEQ ID NO: 1997499 - DNA, 25 bp, Homo sapien
caaagtcgtataccatgagcaggta

SEQ ID NO: 1997500 - DNA, 25 bp, Homo sapien
tatcacaaagtcgtataccatgagc

SEQ ID NO: 1997501 - DNA, 25 bp, Homo sapien
tcgtataccatgagcaggtaacggt

SEQ ID NO: 1997502 - DNA, 25 bp, Homo sapien
cagaagtttgtacaggcctcagctt

SEQ ID NO: 1997503 - DNA, 25 bp, Homo sapien
gcttctggatctgattagtagccat

SEQ ID NO: 1997504 - DNA, 25 bp, Homo sapien
gaagtttgtacaggcctcagcttct

SEQ ID NO: 1997505 - DNA, 25 bp, Homo sapien
gcagaagtttgtacaggcctcagct

SEQ ID NO: 1997506 - DNA, 25 bp, Homo sapien
gcctgcctccgtgattactgctctg

SEQ ID NO: 1997507 - DNA, 25 bp, Homo sapien
tctaaaaatagtggatgactgctcg

SEQ ID NO: 1997508 - DNA, 25 bp, Homo sapien
tctttgcatttagcctgcctgcctc

SEQ ID NO: 1997509 - DNA, 25 bp, Homo sapien
gactgctcggtacaggtgctgtttg

SEQ ID NO: 1997510 - DNA, 25 bp, Homo sapien
tgctagactgggatgaccttatgtc

SEQ ID NO: 1997511 - DNA, 25 bp, Homo sapien
gaggagtgaaaaacgcaccgcaggt

SEQ ID NO: 1997512 - DNA, 25 bp, Homo sapien
tatgtctggtaatgcatcagggagg

SEQ ID NO: 1997513 - DNA, 25 bp, Homo sapien
cttgctgcgaggtaatgagccctgc

SEQ ID NO: 1997514 - DNA, 25 bp, Homo sapien
gatgcatttgggagtataatttggc

SEQ ID NO: 1997515 - DNA, 25 bp, Homo sapien
tctgtcaatggatatgattccccag

SEQ ID NO: 1997516 - DNA, 25 bp, Homo sapien
gatttcagcccatttaccccagctg

SEQ ID NO: 1997517 - DNA, 25 bp, Homo sapien
gattccccagaagatactgatgcat

SEQ ID NO: 1997518 - DNA, 25 bp, Homo sapien
gaacaagaactgacggatacgggtc

SEQ ID NO: 1997519 - DNA, 25 bp, Homo sapien
taaaagataaggatcatgagcgcct

SEQ ID NO: 1997520 - DNA, 25 bp, Homo sapien
tctgacaggaacgacaagatgtgct

SEQ ID NO: 1997521 - DNA, 25 bp, Homo sapien
gatacgggtcctgtccattgcattt

SEQ ID NO: 1997522 - DNA, 25 bp, Homo sapien
tggtctcccacggagcagatgatag

SEQ ID NO: 1997523 - DNA, 25 bp, Homo sapien
tctcccacggagcagatgatagagt

SEQ ID NO: 1997524 - DNA, 25 bp, Homo sapien
cccacggagcagatgatagagttgc

SEQ ID NO: 1997525 - DNA, 25 bp, Homo sapien
gagttgcctggatttacttcttcac

SEQ ID NO: 1997526 - DNA, 25 bp, Homo sapien
tgttttcatcacctttagaaagtag

SEQ ID NO: 1997527 - DNA, 25 bp, Homo sapien
catgggggcagtgatgtaaaccaca

SEQ ID NO: 1997528 - DNA, 25 bp, Homo sapien
ggaagaggcagtcagatggcaatgg

SEQ ID NO: 1997529 - DNA, 25 bp, Homo sapien
tttagaaagtagcatcagggcatag

SEQ ID NO: 1997530 - DNA, 25 bp, Homo sapien
ttttagtatacagtaggccagttgc

SEQ ID NO: 1997531 - DNA, 25 bp, Homo sapien
tagtatacagtaggccagttgcttc

SEQ ID NO: 1997532 - DNA, 25 bp, Homo sapien
tatacagtaggccagttgcttccat

SEQ ID NO: 1997533 - DNA, 25 bp, Homo sapien
gagctgagctgttttagtatacagt

SEQ ID NO: 1997534 - DNA, 25 bp, Homo sapien
tttcttggcccacttagtgcattgg

SEQ ID NO: 1997535 - DNA, 25 bp, Homo sapien
cccacttagtgcattggagcagatt

SEQ ID NO: 1997536 - DNA, 25 bp, Homo sapien
ggcccacttagtgcattggagcaga

SEQ ID NO: 1997537 - DNA, 25 bp, Homo sapien
ttcgcggttgcaggttttcttggcc

SEQ ID NO: 1997538 - DNA, 25 bp, Homo sapien
gcagcagcccaactcccttagtgtg

SEQ ID NO: 1997539 - DNA, 25 bp, Homo sapien
taggaagattttgacccagagggaa

SEQ ID NO: 1997540 - DNA, 25 bp, Homo sapien
gatttgaatcccgtgtctcagaccc

SEQ ID NO: 1997541 - DNA, 25 bp, Homo sapien
tcctgcacactcgaaagcgttatca

SEQ ID NO: 1997542 - DNA, 25 bp, Homo sapien
ggagcttgtgaagagtttgtacctc

SEQ ID NO: 1997543 - DNA, 25 bp, Homo sapien
ttcttcatgcaagtgccaatatgcc

SEQ ID NO: 1997544 - DNA, 25 bp, Homo sapien
aatatgcccttctgtctagttggta

SEQ ID NO: 1997545 - DNA, 25 bp, Homo sapien
tcctgtcttcataggtcacattgag

SEQ ID NO: 1997546 - DNA, 25 bp, Homo sapien
atggtatagttatctagaagtggcc

SEQ ID NO: 1997547 - DNA, 25 bp, Homo sapien
cacacaaatggtatagttatctaga

SEQ ID NO: 1997548 - DNA, 25 bp, Homo sapien
attcgccagataaacacacaaatgg

SEQ ID NO: 1997549 - DNA, 25 bp, Homo sapien
ctactgggacattcgccagataaac

SEQ ID NO: 1997550 - DNA, 25 bp, Homo sapien
tgtacatgtgcaaaattgctgtcat

SEQ ID NO: 1997551 - DNA, 25 bp, Homo sapien
tcaattaccacgtgagaagcaactc

SEQ ID NO: 1997552 - DNA, 25 bp, Homo sapien
taatgtaacacttagaggtgccatc

SEQ ID NO: 1997553 - DNA, 25 bp, Homo sapien
gaagcaactcttggagatcccaggc

SEQ ID NO: 1997554 - DNA, 25 bp, Homo sapien
tttgtccaggcatgatcattcagcg

SEQ ID NO: 1997555 - DNA, 25 bp, Homo sapien
taggtcatcctacatgcttggtgag

SEQ ID NO: 1997556 - DNA, 25 bp, Homo sapien
cattgtgggttcactggtagtctgt

SEQ ID NO: 1997557 - DNA, 25 bp, Homo sapien
tctttgaggccttcagaggtcgtgt

SEQ ID NO: 1997558 - DNA, 25 bp, Homo sapien
tgcttgagagtacccagtgtcctct

SEQ ID NO: 1997559 - DNA, 25 bp, Homo sapien
caaacaggccttggatccagcttct

SEQ ID NO: 1997560 - DNA, 25 bp, Homo sapien
tcctgcttgagagtacccagtgtcc

SEQ ID NO: 1997561 - DNA, 25 bp, Homo sapien
aaacaggccttggatccagcttctt

SEQ ID NO: 1997562 - DNA, 25 bp, Homo sapien
caatttcagtcataggcaagtcttc

SEQ ID NO: 1997563 - DNA, 25 bp, Homo sapien
cataggcaagtcttccacagactct

SEQ ID NO: 1997564 - DNA, 25 bp, Homo sapien
ttcagtcataggcaagtcttccaca

SEQ ID NO: 1997565 - DNA, 25 bp, Homo sapien
cagtcataggcaagtcttccacaga

SEQ ID NO: 1997566 - DNA, 25 bp, Homo sapien
cctgggtgtccattccagtcatcag

SEQ ID NO: 1997567 - DNA, 25 bp, Homo sapien
tgggtgtccattccagtcatcagct

SEQ ID NO: 1997568 - DNA, 25 bp, Homo sapien
aggtctccctgggtgtccattccag

SEQ ID NO: 1997569 - DNA, 25 bp, Homo sapien
gctaaaaggtctccctgggtgtcca

SEQ ID NO: 1997570 - DNA, 25 bp, Homo sapien
tttttatatccatcatagaagaagg

SEQ ID NO: 1997571 - DNA, 25 bp, Homo sapien
ttttatatccatcatagaagaaggc

SEQ ID NO: 1997572 - DNA, 25 bp, Homo sapien
ccttccactaaactgctgatgtgga

SEQ ID NO: 1997573 - DNA, 25 bp, Homo sapien
gacatgtggtctggcacccagagac

SEQ ID NO: 1997574 - DNA, 25 bp, Homo sapien
tgggttcaccttccactaaactgct

SEQ ID NO: 1997575 - DNA, 25 bp, Homo sapien
acccagagacacgttctgatttcca

SEQ ID NO: 1997576 - DNA, 25 bp, Homo sapien
tggctatggcattcttcttttaggg

SEQ ID NO: 1997577 - DNA, 25 bp, Homo sapien
agatccatggcggtcctgggtaatg

SEQ ID NO: 1997578 - DNA, 25 bp, Homo sapien
tcctgaagccaagatccatggcggt

SEQ ID NO: 1997579 - DNA, 25 bp, Homo sapien
cggtcctgggtaatggctatggcat

SEQ ID NO: 1997580 - DNA, 25 bp, Homo sapien
cacagagtggtgtccttgatgctag

SEQ ID NO: 1997581 - DNA, 25 bp, Homo sapien
atccggaggtcactgtctccacaca

SEQ ID NO: 1997582 - DNA, 25 bp, Homo sapien
ctggttatccggaggtcactgtctc

SEQ ID NO: 1997583 - DNA, 25 bp, Homo sapien
ctgtctccacacagagtggtgtcct

SEQ ID NO: 1997584 - DNA, 25 bp, Homo sapien
cactttggaaaagtgaaagcggaat

SEQ ID NO: 1997585 - DNA, 25 bp, Homo sapien
tcactttggaaaagtgaaagcggaa

SEQ ID NO: 1997586 - DNA, 25 bp, Homo sapien
aagtctcaatctatatgctctttca

SEQ ID NO: 1997587 - DNA, 25 bp, Homo sapien
tctcaatctatatgctctttcatag

SEQ ID NO: 1997588 - DNA, 25 bp, Homo sapien
ggaaagtctcaatctatatgctctt

SEQ ID NO: 1997589 - DNA, 25 bp, Homo sapien
ctttggaaagtctcaatctatatgc

SEQ ID NO: 1997590 - DNA, 25 bp, Homo sapien
ctccaaagtatagctttcggtacat

SEQ ID NO: 1997591 - DNA, 25 bp, Homo sapien
gctttcggtacatcagtatattcat

SEQ ID NO: 1997592 - DNA, 25 bp, Homo sapien
tagctttcggtacatcagtatattc

SEQ ID NO: 1997593 - DNA, 25 bp, Homo sapien
aagtatagctttcggtacatcagta

SEQ ID NO: 1997594 - DNA, 25 bp, Homo sapien
tcaggtgggctcctagctgactgat

SEQ ID NO: 1997595 - DNA, 25 bp, Homo sapien
cattgtcccaggcatgctttcatgg

SEQ ID NO: 1997596 - DNA, 25 bp, Homo sapien
cctagctgactgattttgggagtcc

SEQ ID NO: 1997597 - DNA, 25 bp, Homo sapien
gctctacctctaggaaagcatttcc

SEQ ID NO: 1997598 - DNA, 25 bp, Homo sapien
aacaatgccatggacacataccatc

SEQ ID NO: 1997599 - DNA, 25 bp, Homo sapien
tccttccaacaatgccatggacaca

SEQ ID NO: 1997600 - DNA, 25 bp, Homo sapien
tgaccatccttccaacaatgccatg

SEQ ID NO: 1997601 - DNA, 25 bp, Homo sapien
cacactgaccatccttccaacaatg

SEQ ID NO: 1997602 - DNA, 25 bp, Homo sapien
gccttggtccatgccgtttcctttc

SEQ ID NO: 1997603 - DNA, 25 bp, Homo sapien
tgccttggtccatgccgtttccttt

SEQ ID NO: 1997604 - DNA, 25 bp, Homo sapien
tttgccttggtccatgccgtttcct

SEQ ID NO: 1997605 - DNA, 25 bp, Homo sapien
gcctttgccttggtccatgccgttt

SEQ ID NO: 1997606 - DNA, 25 bp, Homo sapien
agggctgccaaaagcagtaaagttc

SEQ ID NO: 1997607 - DNA, 25 bp, Homo sapien
ggctgccaaaagcagtaaagttcca

SEQ ID NO: 1997608 - DNA, 25 bp, Homo sapien
aggaagggctgccaaaagcagtaaa

SEQ ID NO: 1997609 - DNA, 25 bp, Homo sapien
gaagggctgccaaaagcagtaaagt

SEQ ID NO: 1997610 - DNA, 25 bp, Homo sapien
ctatcttagtgttgatatccaggta

SEQ ID NO: 1997611 - DNA, 25 bp, Homo sapien
cttagtgttgatatccaggtaggca

SEQ ID NO: 1997612 - DNA, 25 bp, Homo sapien
agtgttgatatccaggtaggcatga

SEQ ID NO: 1997613 - DNA, 25 bp, Homo sapien
atcttagtgttgatatccaggtagg

SEQ ID NO: 1997614 - DNA, 25 bp, Homo sapien
gtattcctggtgagaacacaaatgt

SEQ ID NO: 1997615 - DNA, 25 bp, Homo sapien
ctataggcatgtatcccttgggcct

SEQ ID NO: 1997616 - DNA, 25 bp, Homo sapien
attcctggtgagaacacaaatgtag

SEQ ID NO: 1997617 - DNA, 25 bp, Homo sapien
aggcatgtatcccttgggccttccc

SEQ ID NO: 1997618 - DNA, 25 bp, Homo sapien
cttatgaatctctacttagttgacc

SEQ ID NO: 1997619 - DNA, 25 bp, Homo sapien
agtggttctataaaggtcttatgaa

SEQ ID NO: 1997620 - DNA, 25 bp, Homo sapien
tgaccacaagtagtaagcaagaaac

SEQ ID NO: 1997621 - DNA, 25 bp, Homo sapien
acttagttgaccacaagtagtaagc

SEQ ID NO: 1997622 - DNA, 25 bp, Homo sapien
tcacagctcccgtgtggttgtaatc

SEQ ID NO: 1997623 - DNA, 25 bp, Homo sapien
gatagcagctgttttgaagacacaa

SEQ ID NO: 1997624 - DNA, 25 bp, Homo sapien
tcccgtgtggttgtaatcaccccag

SEQ ID NO: 1997625 - DNA, 25 bp, Homo sapien
tgtaatcaccccagagggaaaaata

SEQ ID NO: 1997626 - DNA, 25 bp, Homo sapien
ggctatcatgtgatcatcatggtca

SEQ ID NO: 1997627 - DNA, 25 bp, Homo sapien
gccagtttgactgggctatcatgtg

SEQ ID NO: 1997628 - DNA, 25 bp, Homo sapien
ttgagaaccaagtggccagtttgac

SEQ ID NO: 1997629 - DNA, 25 bp, Homo sapien
catttagtgtagtaatacaattttg

SEQ ID NO: 1997630 - DNA, 25 bp, Homo sapien
caggtctgctttgcctatatcacag

SEQ ID NO: 1997631 - DNA, 25 bp, Homo sapien
ctgctttgcctatatcacaggattg

SEQ ID NO: 1997632 - DNA, 25 bp, Homo sapien
gtctgctttgcctatatcacaggat

SEQ ID NO: 1997633 - DNA, 25 bp, Homo sapien
ggtctgctttgcctatatcacagga

SEQ ID NO: 1997634 - DNA, 25 bp, Homo sapien
cagtggtcacctcagatcttaaggt

SEQ ID NO: 1997635 - DNA, 25 bp, Homo sapien
gcttggagttgcagtggtcacctca

SEQ ID NO: 1997636 - DNA, 25 bp, Homo sapien
agtggtcacctcagatcttaaggtc

SEQ ID NO: 1997637 - DNA, 25 bp, Homo sapien
caggatggcttggagttgcagtggt

SEQ ID NO: 1997638 - DNA, 25 bp, Homo sapien
ggtctgtcttcaacaaaagttttga

SEQ ID NO: 1997639 - DNA, 25 bp, Homo sapien
tctctgagtgaaagacatgctcttg

SEQ ID NO: 1997640 - DNA, 25 bp, Homo sapien
tgctcttgacaatggacagtgggat

SEQ ID NO: 1997641 - DNA, 25 bp, Homo sapien
cattaggccagatggtgtaaggtct

SEQ ID NO: 1997642 - DNA, 25 bp, Homo sapien
gaagatgtagctctgcccaagactc

SEQ ID NO: 1997643 - DNA, 25 bp, Homo sapien
aagactctgggaccactctgatccg

SEQ ID NO: 1997644 - DNA, 25 bp, Homo sapien
tcaagagccataaaaccaggatatc

SEQ ID NO: 1997645 - DNA, 25 bp, Homo sapien
aaatcagggttggagctcatgtccc

SEQ ID NO: 1997646 - DNA, 25 bp, Homo sapien
aagcttgatggagtagtcaaaattc

SEQ ID NO: 1997647 - DNA, 25 bp, Homo sapien
aaagcttgatggagtagtcaaaatt

SEQ ID NO: 1997648 - DNA, 25 bp, Homo sapien
ctaaagcttgatggagtagtcaaaa

SEQ ID NO: 1997649 - DNA, 25 bp, Homo sapien
taaagcttgatggagtagtcaaaat

SEQ ID NO: 1997650 - DNA, 25 bp, Homo sapien
gatttctgggtgaagcatgacatgg

SEQ ID NO: 1997651 - DNA, 25 bp, Homo sapien
tgacctctgcgcattgacttctctg

SEQ ID NO: 1997652 - DNA, 25 bp, Homo sapien
tctctcatctgacctctgcgcattg

SEQ ID NO: 1997653 - DNA, 25 bp, Homo sapien
ttctctgccggtcatcaatgctctc

SEQ ID NO: 1997654 - DNA, 25 bp, Homo sapien
tgaagctttctatgctcacagcagc

SEQ ID NO: 1997655 - DNA, 25 bp, Homo sapien
tatgctcacagcagcccacgtgctg

SEQ ID NO: 1997656 - DNA, 25 bp, Homo sapien
tccccatgtgaagctttctatgctc

SEQ ID NO: 1997657 - DNA, 25 bp, Homo sapien
gcagcccacgtgctgatctcttctt

SEQ ID NO: 1997658 - DNA, 25 bp, Homo sapien
gagttatgtaggattgctcccgccc

SEQ ID NO: 1997659 - DNA, 25 bp, Homo sapien
tcctgaagaaagtgctattaccaaa

SEQ ID NO: 1997660 - DNA, 25 bp, Homo sapien
gagaactaggcctgtttcccgagaa

SEQ ID NO: 1997661 - DNA, 25 bp, Homo sapien
ccgagaactgtcagtgcagaattaa

SEQ ID NO: 1997662 - DNA, 25 bp, Homo sapien
tgagtgcccctggacagcatggatg

SEQ ID NO: 1997663 - DNA, 25 bp, Homo sapien
tttggtcaaaagagtaagtgcggcc

SEQ ID NO: 1997664 - DNA, 25 bp, Homo sapien
tagaacgatgttatgccctccagat

SEQ ID NO: 1997665 - DNA, 25 bp, Homo sapien
tgattacaggacgatgctcccagga

SEQ ID NO: 1997666 - DNA, 25 bp, Homo sapien
atcatactggagaagagcggctctt

SEQ ID NO: 1997667 - DNA, 25 bp, Homo sapien
ccagacagaggcatggaatgggttc

SEQ ID NO: 1997668 - DNA, 25 bp, Homo sapien
gattgttgtggacgtcattatctaa

SEQ ID NO: 1997669 - DNA, 25 bp, Homo sapien
tccacaagccaacagacaccaagga

SEQ ID NO: 1997670 - DNA, 25 bp, Homo sapien
ttattcattggtatatcttcagcac

SEQ ID NO: 1997671 - DNA, 25 bp, Homo sapien
tctctgctggtatgtaagcagctcc

SEQ ID NO: 1997672 - DNA, 25 bp, Homo sapien
ttatttgcccatctctgctggtatg

SEQ ID NO: 1997673 - DNA, 25 bp, Homo sapien
ctggtatgtaagcagctcctgagag

SEQ ID NO: 1997674 - DNA, 25 bp, Homo sapien
ggcactcatagcagttctcagccat

SEQ ID NO: 1997675 - DNA, 25 bp, Homo sapien
cagtcctcggcagtaatcttttggc

SEQ ID NO: 1997676 - DNA, 25 bp, Homo sapien
tcttttggccgtgacgtccaccgtg

SEQ ID NO: 1997677 - DNA, 25 bp, Homo sapien
tttatgcttgagacactggcattgc

SEQ ID NO: 1997678 - DNA, 25 bp, Homo sapien
tgcacaccactttcagtgtcttaaa

SEQ ID NO: 1997679 - DNA, 25 bp, Homo sapien
tacatctttatggatgctatcattg

SEQ ID NO: 1997680 - DNA, 25 bp, Homo sapien
tttcacggagaaaagagaatacaca

SEQ ID NO: 1997681 - DNA, 25 bp, Homo sapien
ccactgcagaagtttcacggagaaa

SEQ ID NO: 1997682 - DNA, 25 bp, Homo sapien
aagcggtgaggtagaacggatttct

SEQ ID NO: 1997683 - DNA, 25 bp, Homo sapien
cacaagtgcgcttgaacaagctgtc

SEQ ID NO: 1997684 - DNA, 25 bp, Homo sapien
gcggtgaggtagaacggatttcttc

SEQ ID NO: 1997685 - DNA, 25 bp, Homo sapien
cttttcacgttcacaagtgcgcttg

SEQ ID NO: 1997686 - DNA, 25 bp, Homo sapien
gacacctcttaagttcctcattgcc

SEQ ID NO: 1997687 - DNA, 25 bp, Homo sapien
tcttctacatgaagaaggacttcct

SEQ ID NO: 1997688 - DNA, 25 bp, Homo sapien
tatgcagcttgatgtagttgacacc

SEQ ID NO: 1997689 - DNA, 25 bp, Homo sapien
taatgaggtctgtgagttattcctc

SEQ ID NO: 1997690 - DNA, 25 bp, Homo sapien
gaaggggtgcataattataccctgc

SEQ ID NO: 1997691 - DNA, 25 bp, Homo sapien
ttactgctttgactgtatgggactg

SEQ ID NO: 1997692 - DNA, 25 bp, Homo sapien
cattgtctcatatcacgtggaagcc

SEQ ID NO: 1997693 - DNA, 25 bp, Homo sapien
tatgggactgtgacacattgtctca

SEQ ID NO: 1997694 - DNA, 25 bp, Homo sapien
tgtggccatgcgcagacagtaattg

SEQ ID NO: 1997695 - DNA, 25 bp, Homo sapien
agatgtggccatgcgcagacagtaa

SEQ ID NO: 1997696 - DNA, 25 bp, Homo sapien
ggccatgcgcagacagtaattgtgc

SEQ ID NO: 1997697 - DNA, 25 bp, Homo sapien
cagatgtggccatgcgcagacagta

SEQ ID NO: 1997698 - DNA, 25 bp, Homo sapien
cactcctgggacacaaactcacagt

SEQ ID NO: 1997699 - DNA, 25 bp, Homo sapien
tcccttccactcctgggacacaaac

SEQ ID NO: 1997700 - DNA, 25 bp, Homo sapien
ttctctgctctacactcagtttctg

SEQ ID NO: 1997701 - DNA, 25 bp, Homo sapien
cacagtccagtatgagctcccacat

SEQ ID NO: 1997702 - DNA, 25 bp, Homo sapien
gaagaatggctccaagttcaatcca

SEQ ID NO: 1997703 - DNA, 25 bp, Homo sapien
taaatgcaccgcttgcagagggacc

SEQ ID NO: 1997704 - DNA, 25 bp, Homo sapien
ccgggccaacaagccacatggactt

SEQ ID NO: 1997705 - DNA, 25 bp, Homo sapien
tcagtggcgactcaattaaacctgc

SEQ ID NO: 1997706 - DNA, 25 bp, Homo sapien
agttcctacagagagctcccggtca

SEQ ID NO: 1997707 - DNA, 25 bp, Homo sapien
aaagtattacggatgtgtcagacag

SEQ ID NO: 1997708 - DNA, 25 bp, Homo sapien
tgtggtgcctgtagaatttgtcagc

SEQ ID NO: 1997709 - DNA, 25 bp, Homo sapien
aaaacttttgtcacactgcctcaga

SEQ ID NO: 1997710 - DNA, 25 bp, Homo sapien
gaaaattcacgtggcattaccagtg

SEQ ID NO: 1997711 - DNA, 25 bp, Homo sapien
gacagaggttttcccaaagttgata

SEQ ID NO: 1997712 - DNA, 25 bp, Homo sapien
caatgagggcatcgatgacaatctg

SEQ ID NO: 1997713 - DNA, 25 bp, Homo sapien
cattatacgccactacaatgagggc

SEQ ID NO: 1997714 - DNA, 25 bp, Homo sapien
tcatttcacaatcttggtaccaaat

SEQ ID NO: 1997715 - DNA, 25 bp, Homo sapien
tcacaatcttggtaccaaatgatac

SEQ ID NO: 1997716 - DNA, 25 bp, Homo sapien
gccatgtattaacaaaggcatgtgg

SEQ ID NO: 1997717 - DNA, 25 bp, Homo sapien
ctgccatgtattaacaaaggcatgt

SEQ ID NO: 1997718 - DNA, 25 bp, Homo sapien
gcaaggcacacgggtggcccacgtc

SEQ ID NO: 1997719 - DNA, 25 bp, Homo sapien
tgcaaggcacacgggtggcccacgt

SEQ ID NO: 1997720 - DNA, 25 bp, Homo sapien
ggtggcccacgtccatgagatgccc

SEQ ID NO: 1997721 - DNA, 25 bp, Homo sapien
gggtggcccacgtccatgagatgcc

SEQ ID NO: 1997722 - DNA, 25 bp, Homo sapien
gaagcatgagcaatgtgggccctgt

SEQ ID NO: 1997723 - DNA, 25 bp, Homo sapien
gcatgagcaatgtgggccctgtgac

SEQ ID NO: 1997724 - DNA, 25 bp, Homo sapien
catgagcaatgtgggccctgtgacc

SEQ ID NO: 1997725 - DNA, 25 bp, Homo sapien
tgtgacctcatttctgcactgcagc

SEQ ID NO: 1997726 - DNA, 25 bp, Homo sapien
ttctttttcttggatgaagtccgta

SEQ ID NO: 1997727 - DNA, 25 bp, Homo sapien
tctttttcttggatgaagtccgtac

SEQ ID NO: 1997728 - DNA, 25 bp, Homo sapien
gtctgaggttttgatgggattggtt

SEQ ID NO: 1997729 - DNA, 25 bp, Homo sapien
gggattggttaatagatggcccaaa

SEQ ID NO: 1997730 - DNA, 25 bp, Homo sapien
tgatgggattggttaatagatggcc

SEQ ID NO: 1997731 - DNA, 25 bp, Homo sapien
tggttaatagatggcccaaaggcca

SEQ ID NO: 1997732 - DNA, 25 bp, Homo sapien
ggactgtcaggcatctcgctgaacc

SEQ ID NO: 1997733 - DNA, 25 bp, Homo sapien
ctgtcaggcatctcgctgaacctaa

SEQ ID NO: 1997734 - DNA, 25 bp, Homo sapien
gactgtcaggcatctcgctgaacct

SEQ ID NO: 1997735 - DNA, 25 bp, Homo sapien
aggactgtcaggcatctcgctgaac

SEQ ID NO: 1997736 - DNA, 25 bp, Homo sapien
tcactcaggtctgcacacaggcttc

SEQ ID NO: 1997737 - DNA, 25 bp, Homo sapien
caggggtgtaatggggcagtgctgg

SEQ ID NO: 1997738 - DNA, 25 bp, Homo sapien
caggtctgcacacaggcttctcagg

SEQ ID NO: 1997739 - DNA, 25 bp, Homo sapien
gcttctcaggggtgtaatggggcag

SEQ ID NO: 1997740 - DNA, 25 bp, Homo sapien
aaatcaaaagcaaatggccgggtgc

SEQ ID NO: 1997741 - DNA, 25 bp, Homo sapien
tggcccctcccagatattatgttct

SEQ ID NO: 1997742 - DNA, 25 bp, Homo sapien
ctcaaatggcggcagaagagagaga

SEQ ID NO: 1997743 - DNA, 25 bp, Homo sapien
aaattgtgccttagcaacagtcccc

SEQ ID NO: 1997744 - DNA, 25 bp, Homo sapien
tacctgcacaggatacagggactcc

SEQ ID NO: 1997745 - DNA, 25 bp, Homo sapien
gaaacccttgtatctgtggagctga

SEQ ID NO: 1997746 - DNA, 25 bp, Homo sapien
caaccttagaaccaagagggatgtc

SEQ ID NO: 1997747 - DNA, 25 bp, Homo sapien
cagccctgcttactagaaacccttg

SEQ ID NO: 1997748 - DNA, 25 bp, Homo sapien
attcttccgcgtccagaagaatgtc

SEQ ID NO: 1997749 - DNA, 25 bp, Homo sapien
cactgagtcagaatggaagtctctc

SEQ ID NO: 1997750 - DNA, 25 bp, Homo sapien
catttggccgatgaagatatccctg

SEQ ID NO: 1997751 - DNA, 25 bp, Homo sapien
gatcactgagtgttttttctctgcc

SEQ ID NO: 1997752 - DNA, 25 bp, Homo sapien
tccttcgggtcacagccactcttct

SEQ ID NO: 1997753 - DNA, 25 bp, Homo sapien
ggtcacagccactcttctatcgatg

SEQ ID NO: 1997754 - DNA, 25 bp, Homo sapien
tcacagccactcttctatcgatgga

SEQ ID NO: 1997755 - DNA, 25 bp, Homo sapien
tcgggtcacagccactcttctatcg

SEQ ID NO: 1997756 - DNA, 25 bp, Homo sapien
gctggaaagtggctctggcaggaga

SEQ ID NO: 1997757 - DNA, 25 bp, Homo sapien
ctgctggaaagtggctctggcagga

SEQ ID NO: 1997758 - DNA, 25 bp, Homo sapien
ctggaaagtggctctggcaggagag

SEQ ID NO: 1997759 - DNA, 25 bp, Homo sapien
ggaaagtggctctggcaggagagga

SEQ ID NO: 1997760 - DNA, 25 bp, Homo sapien
cagctcgggctggtaaactctgcct

SEQ ID NO: 1997761 - DNA, 25 bp, Homo sapien
tatccggggatgtcgagggccagct

SEQ ID NO: 1997762 - DNA, 25 bp, Homo sapien
gggctggtaaactctgcctcgtaga

SEQ ID NO: 1997763 - DNA, 25 bp, Homo sapien
gctcgggctggtaaactctgcctcg

SEQ ID NO: 1997764 - DNA, 25 bp, Homo sapien
ttggcctgctgagtcccgatgggcc

SEQ ID NO: 1997765 - DNA, 25 bp, Homo sapien
gcccgtgaggtagcccactgctttg

SEQ ID NO: 1997766 - DNA, 25 bp, Homo sapien
cactgctttggagaggcagatgcac

SEQ ID NO: 1997767 - DNA, 25 bp, Homo sapien
tgtactccttcatgtcgcccgtgag

SEQ ID NO: 1997768 - DNA, 25 bp, Homo sapien
cagcaaagaaagtagcctgaagaaa

SEQ ID NO: 1997769 - DNA, 25 bp, Homo sapien
cagctgtgaaaatcagtactgagtc

SEQ ID NO: 1997770 - DNA, 25 bp, Homo sapien
tgactcagttaagggctggtatctg

SEQ ID NO: 1997771 - DNA, 25 bp, Homo sapien
ggagaggggcgtacattctgcctca

SEQ ID NO: 1997772 - DNA, 25 bp, Homo sapien
ccagtgattgtccaccagggattct

SEQ ID NO: 1997773 - DNA, 25 bp, Homo sapien
tcagcagccctatgaagatgatgag

SEQ ID NO: 1997774 - DNA, 25 bp, Homo sapien
tgtcttggcccaaggcgagagctgt

SEQ ID NO: 1997775 - DNA, 25 bp, Homo sapien
cgagagctgttaaggtcgagaccac

SEQ ID NO: 1997776 - DNA, 25 bp, Homo sapien
gcactgtgggtgtatatggcccatt

SEQ ID NO: 1997777 - DNA, 25 bp, Homo sapien
tatggcccattggaaaccaacttct

SEQ ID NO: 1997778 - DNA, 25 bp, Homo sapien
gcctagatcttttctaggcactgtg

SEQ ID NO: 1997779 - DNA, 25 bp, Homo sapien
ctgtgggtgtatatggcccattgga

SEQ ID NO: 1997780 - DNA, 25 bp, Homo sapien
ctttcacctctgtagtgaccaggag

SEQ ID NO: 1997781 - DNA, 25 bp, Homo sapien
tcacctctgtagtgaccaggaggtc

SEQ ID NO: 1997782 - DNA, 25 bp, Homo sapien
tgtagtgaccaggaggtctagtgac

SEQ ID NO: 1997783 - DNA, 25 bp, Homo sapien
cctctgtagtgaccaggaggtctag

SEQ ID NO: 1997784 - DNA, 25 bp, Homo sapien
gttggctgttcttgcatggcagaag

SEQ ID NO: 1997785 - DNA, 25 bp, Homo sapien
tgtgttggctgttcttgcatggcag

SEQ ID NO: 1997786 - DNA, 25 bp, Homo sapien
agaagcttctggaagcttagggctc

SEQ ID NO: 1997787 - DNA, 25 bp, Homo sapien
catgtgttggctgttcttgcatggc

SEQ ID NO: 1997788 - DNA, 25 bp, Homo sapien
accagcatcccgttgtacccatgga

SEQ ID NO: 1997789 - DNA, 25 bp, Homo sapien
ccagtagtagtctaacttctccgag

SEQ ID NO: 1997790 - DNA, 25 bp, Homo sapien
agcatcccgttgtacccatggagtc

SEQ ID NO: 1997791 - DNA, 25 bp, Homo sapien
catggctgtgaaggtcacaggaaac

SEQ ID NO: 1997792 - DNA, 25 bp, Homo sapien
tactccagttaaaatccgtctccat

SEQ ID NO: 1997793 - DNA, 25 bp, Homo sapien
tgtggattattgtagcagatgcttc

SEQ ID NO: 1997794 - DNA, 25 bp, Homo sapien
cagcatccactcttactccagttaa

SEQ ID NO: 1997795 - DNA, 25 bp, Homo sapien
ggatatcactctaatctaaacactg

SEQ ID NO: 1997796 - DNA, 25 bp, Homo sapien
tgactgcaatgttgaagggcagagt

SEQ ID NO: 1997797 - DNA, 25 bp, Homo sapien
aaggtacaaggtgactgcaatgttg

SEQ ID NO: 1997798 - DNA, 25 bp, Homo sapien
ctgcaatgttgaagggcagagtgaa

SEQ ID NO: 1997799 - DNA, 25 bp, Homo sapien
caaggtgactgcaatgttgaagggc

SEQ ID NO: 1997800 - DNA, 25 bp, Homo sapien
tgaagacacaggctctaccagtgtt

SEQ ID NO: 1997801 - DNA, 25 bp, Homo sapien
cactgaagacacaggctctaccagt

SEQ ID NO: 1997802 - DNA, 25 bp, Homo sapien
gacacaggctctaccagtgttgtgg

SEQ ID NO: 1997803 - DNA, 25 bp, Homo sapien
gaagacacaggctctaccagtgttg

SEQ ID NO: 1997804 - DNA, 25 bp, Homo sapien
ctgcaaagttaacagaatacaggtc

SEQ ID NO: 1997805 - DNA, 25 bp, Homo sapien
tgcaaagttaacagaatacaggtca

SEQ ID NO: 1997806 - DNA, 25 bp, Homo sapien
cgaccccaacagggatggcttgtaa

SEQ ID NO: 1997807 - DNA, 25 bp, Homo sapien
cgcctgtccagggattgtcacagcc

SEQ ID NO: 1997808 - DNA, 25 bp, Homo sapien
gcagccccacgattgagccaatggc

SEQ ID NO: 1997809 - DNA, 25 bp, Homo sapien
cagatgagtggcgaggagatgaaca

SEQ ID NO: 1997810 - DNA, 25 bp, Homo sapien
atgaaaagagaacagtggtttccaa

SEQ ID NO: 1997811 - DNA, 25 bp, Homo sapien
ccacaggcttcacttggaggtcctc

SEQ ID NO: 1997812 - DNA, 25 bp, Homo sapien
ttccaaaccagttgtcaaagccaca

SEQ ID NO: 1997813 - DNA, 25 bp, Homo sapien
tgaaaagagaacagtggtttccaaa

SEQ ID NO: 1997814 - DNA, 25 bp, Homo sapien
agaacaaagaccaccctgggactgg

SEQ ID NO: 1997815 - DNA, 25 bp, Homo sapien
tgggccacagaacaaagaccaccct

SEQ ID NO: 1997816 - DNA, 25 bp, Homo sapien
ccacagaacaaagaccaccctggga

SEQ ID NO: 1997817 - DNA, 25 bp, Homo sapien
acagaacaaagaccaccctgggact

SEQ ID NO: 1997818 - DNA, 25 bp, Homo sapien
acaaggtgtggtatttctgtctgat

SEQ ID NO: 1997819 - DNA, 25 bp, Homo sapien
caaggtgtggtatttctgtctgatt

SEQ ID NO: 1997820 - DNA, 25 bp, Homo sapien
atgggacaaggtgtggtatttctgt

SEQ ID NO: 1997821 - DNA, 25 bp, Homo sapien
ctatgggacaaggtgtggtatttct

SEQ ID NO: 1997822 - DNA, 25 bp, Homo sapien
ggtctcgaagggtgtggccactgac

SEQ ID NO: 1997823 - DNA, 25 bp, Homo sapien
gtgagggcatagaacatgcctccga

SEQ ID NO: 1997824 - DNA, 25 bp, Homo sapien
caggagaggacgcagttgtagctcc

SEQ ID NO: 1997825 - DNA, 25 bp, Homo sapien
aggcctgtgtagatggtctcgaagg

SEQ ID NO: 1997826 - DNA, 25 bp, Homo sapien
tggagatggctgcttccatgtatgc

SEQ ID NO: 1997827 - DNA, 25 bp, Homo sapien
gatggctgcttccatgtatgcacag

SEQ ID NO: 1997828 - DNA, 25 bp, Homo sapien
gcttccatgtatgcacagaacaggg

SEQ ID NO: 1997829 - DNA, 25 bp, Homo sapien
catgatgttggagatggctgcttcc

SEQ ID NO: 1997830 - DNA, 25 bp, Homo sapien
gggtagtgttcaggagaatccacac

SEQ ID NO: 1997831 - DNA, 25 bp, Homo sapien
gctcaatgttcctttcccagacccc

SEQ ID NO: 1997832 - DNA, 25 bp, Homo sapien
cactttggggtagtgttcaggagaa

SEQ ID NO: 1997833 - DNA, 25 bp, Homo sapien
aaccccatatgtccagaagctctgg

SEQ ID NO: 1997834 - DNA, 25 bp, Homo sapien
ttcttcaccgcttttcactgtcagg

SEQ ID NO: 1997835 - DNA, 25 bp, Homo sapien
aagatggctgggttgtttgtcgtca

SEQ ID NO: 1997836 - DNA, 25 bp, Homo sapien
tttgctgagtgggagtctgaagatg

SEQ ID NO: 1997837 - DNA, 25 bp, Homo sapien
caggtagtagatgcggttggcctcg

SEQ ID NO: 1997838 - DNA, 25 bp, Homo sapien
catcaggtcaggcaaagagcgtttc

SEQ ID NO: 1997839 - DNA, 25 bp, Homo sapien
tgtgcttggttctacacaggtgcaa

SEQ ID NO: 1997840 - DNA, 25 bp, Homo sapien
ggtgagtgctgcaactgattgaacc

SEQ ID NO: 1997841 - DNA, 25 bp, Homo sapien
cagggaaagaaagttacaggtgtgc

SEQ ID NO: 1997842 - DNA, 25 bp, Homo sapien
ccaagaagatcacctgttaattacc

SEQ ID NO: 1997843 - DNA, 25 bp, Homo sapien
aatcccatcagtgtgaaattcctct

SEQ ID NO: 1997844 - DNA, 25 bp, Homo sapien
tgtggtcattagtctctagctcagc

SEQ ID NO: 1997845 - DNA, 25 bp, Homo sapien
tactctgtgtctgcctaggaaccac

SEQ ID NO: 1997846 - DNA, 25 bp, Homo sapien
tgcatcatgggatcggaccacctga

SEQ ID NO: 1997847 - DNA, 25 bp, Homo sapien
tgggacaagatcactccaggagctc

SEQ ID NO: 1997848 - DNA, 25 bp, Homo sapien
caatgctttgggtggacagcctcaa

SEQ ID NO: 1997849 - DNA, 25 bp, Homo sapien
taaagtgcagcaggacaagactgtc

SEQ ID NO: 1997850 - DNA, 25 bp, Homo sapien
cagtaactgctagcagaatgtaaaa

SEQ ID NO: 1997851 - DNA, 25 bp, Homo sapien
tttgattatgagtgttgggaaagga

SEQ ID NO: 1997852 - DNA, 25 bp, Homo sapien
gggaaaggagcagtaactgctagca

SEQ ID NO: 1997853 - DNA, 25 bp, Homo sapien
gcttttgattatgagtgttgggaaa

SEQ ID NO: 1997854 - DNA, 25 bp, Homo sapien
aaaatgtcgccgtctgccagggcaa

SEQ ID NO: 1997855 - DNA, 25 bp, Homo sapien
actctgtggacatgcaaagggtcaa

SEQ ID NO: 1997856 - DNA, 25 bp, Homo sapien
ttggaacagagatagcaagacaggg

SEQ ID NO: 1997857 - DNA, 25 bp, Homo sapien
cctcagggtagggaaagatcattgg

SEQ ID NO: 1997858 - DNA, 25 bp, Homo sapien
ccatcacatggatataggagttcca

SEQ ID NO: 1997859 - DNA, 25 bp, Homo sapien
catgtgtaacactcaaaagccagaa

SEQ ID NO: 1997860 - DNA, 25 bp, Homo sapien
cgcccctgggcttagcttcataaaa

SEQ ID NO: 1997861 - DNA, 25 bp, Homo sapien
gattgatgagaaaagacacgcccct

SEQ ID NO: 1997862 - DNA, 25 bp, Homo sapien
tcttctattttagctctcaaagatt

SEQ ID NO: 1997863 - DNA, 25 bp, Homo sapien
ctggagcaagaggagatagaaaatt

SEQ ID NO: 1997864 - DNA, 25 bp, Homo sapien
ccaggagttgtgagaagctgcatct

SEQ ID NO: 1997865 - DNA, 25 bp, Homo sapien
tcataaacacacatggatcttctat

SEQ ID NO: 1997866 - DNA, 25 bp, Homo sapien
tctcagcttatgaaagttggcaaat

SEQ ID NO: 1997867 - DNA, 25 bp, Homo sapien
ttcctggtttgttgtcaatcctggg

SEQ ID NO: 1997868 - DNA, 25 bp, Homo sapien
gggcctgagtaacacattaatagtt

SEQ ID NO: 1997869 - DNA, 25 bp, Homo sapien
gcgatgtcttctggatgaatgagtg

SEQ ID NO: 1997870 - DNA, 25 bp, Homo sapien
ttccttctgattcctgctgactggg

SEQ ID NO: 1997871 - DNA, 25 bp, Homo sapien
ttctgcacagcccaatactagatgc

SEQ ID NO: 1997872 - DNA, 25 bp, Homo sapien
ggaggactagcttcagctaccatgg

SEQ ID NO: 1997873 - DNA, 25 bp, Homo sapien
gactgtctggtagcttccctgttgt

SEQ ID NO: 1997874 - DNA, 25 bp, Homo sapien
taggaggaatctagatcatcgggac

SEQ ID NO: 1997875 - DNA, 25 bp, Homo sapien
tcatcgggactagaaagaagcagct

SEQ ID NO: 1997876 - DNA, 25 bp, Homo sapien
gcttccttctgattgggcggcgtct

SEQ ID NO: 1997877 - DNA, 25 bp, Homo sapien
tggcgcacgtctgccagttgaggaa

SEQ ID NO: 1997878 - DNA, 25 bp, Homo sapien
tcaggaccatttcaggggcacggtc

SEQ ID NO: 1997879 - DNA, 25 bp, Homo sapien
gaccatttcaggggcacggtccctg

SEQ ID NO: 1997880 - DNA, 25 bp, Homo sapien
caggaccatttcaggggcacggtcc

SEQ ID NO: 1997881 - DNA, 25 bp, Homo sapien
ttcaggaccatttcaggggcacggt

SEQ ID NO: 1997882 - DNA, 25 bp, Homo sapien
gatgtgaaatacactcctgtgcttg

SEQ ID NO: 1997883 - DNA, 25 bp, Homo sapien
tggatgaccactcgatgtgaaatac

SEQ ID NO: 1997884 - DNA, 25 bp, Homo sapien
cctccgaatggatgaccactcgatg

SEQ ID NO: 1997885 - DNA, 25 bp, Homo sapien
gaccactcgatgtgaaatacactcc

SEQ ID NO: 1997886 - DNA, 25 bp, Homo sapien
gactgtgggcttccggtatcgatag

SEQ ID NO: 1997887 - DNA, 25 bp, Homo sapien
ccggtatcgatagggaaatgggtct

SEQ ID NO: 1997888 - DNA, 25 bp, Homo sapien
aagcagctcgactgtgggcttccgg

SEQ ID NO: 1997889 - DNA, 25 bp, Homo sapien
tcctggtgttcgccttttccaaaca

SEQ ID NO: 1997890 - DNA, 25 bp, Homo sapien
cagccatggaactccgaatccagga

SEQ ID NO: 1997891 - DNA, 25 bp, Homo sapien
gaactccgaatccaggatgtcttgg

SEQ ID NO: 1997892 - DNA, 25 bp, Homo sapien
actggcagccatggaactccgaatc

SEQ ID NO: 1997893 - DNA, 25 bp, Homo sapien
catggaactccgaatccaggatgtc

SEQ ID NO: 1997894 - DNA, 25 bp, Homo sapien
ccgctgagggggttgttcacaaaca

SEQ ID NO: 1997895 - DNA, 25 bp, Homo sapien
tcacttgagatgtgcctcggaggac

SEQ ID NO: 1997896 - DNA, 25 bp, Homo sapien
caaacatcacttgagatgtgcctcg

SEQ ID NO: 1997897 - DNA, 25 bp, Homo sapien
tcggaggacccagtcaaagaactgg

SEQ ID NO: 1997898 - DNA, 25 bp, Homo sapien
gatgagggctgtcaaggtggacatg

SEQ ID NO: 1997899 - DNA, 25 bp, Homo sapien
tcaggatgagggctgtcaaggtgga

SEQ ID NO: 1997900 - DNA, 25 bp, Homo sapien
tcaaggtggacatgatggtacccag

SEQ ID NO: 1997901 - DNA, 25 bp, Homo sapien
ggacatgatggtacccaggcagcct

SEQ ID NO: 1997902 - DNA, 25 bp, Homo sapien
ccaccagtagtagtcacctttgtct

SEQ ID NO: 1997903 - DNA, 25 bp, Homo sapien
ttgtagccgtgaaatcctgcagcga

SEQ ID NO: 1997904 - DNA, 25 bp, Homo sapien
gacatgatgatgacgggtagcaaca

SEQ ID NO: 1997905 - DNA, 25 bp, Homo sapien
cacctttgtctgagaacacggccat

SEQ ID NO: 1997906 - DNA, 25 bp, Homo sapien
tacaaagtcacagtgatattgaagg

SEQ ID NO: 1997907 - DNA, 25 bp, Homo sapien
gatgttgggcatggcggatgcaggc

SEQ ID NO: 1997908 - DNA, 25 bp, Homo sapien
cccgtggctgccaggtacaaagtca

SEQ ID NO: 1997909 - DNA, 25 bp, Homo sapien
gcacttggacctctgaccaggtgat

SEQ ID NO: 1997910 - DNA, 25 bp, Homo sapien
ctgcccttcctccttccatgatacg

SEQ ID NO: 1997911 - DNA, 25 bp, Homo sapien
tgcccttcctccttccatgatacgt

SEQ ID NO: 1997912 - DNA, 25 bp, Homo sapien
gcccttcctccttccatgatacgta

SEQ ID NO: 1997913 - DNA, 25 bp, Homo sapien
cccttcctccttccatgatacgtac

SEQ ID NO: 1997914 - DNA, 25 bp, Homo sapien
caaatgagaggtgaggatatgaaca

SEQ ID NO: 1997915 - DNA, 25 bp, Homo sapien
gttatcacagccgtacacttggcca

SEQ ID NO: 1997916 - DNA, 25 bp, Homo sapien
tggtggatccaattgctgcatgcaa

SEQ ID NO: 1997917 - DNA, 25 bp, Homo sapien
acagagctatgaggaagatgcctcc

SEQ ID NO: 1997918 - DNA, 25 bp, Homo sapien
ctatgcatgcgagggtgctgttgaa

SEQ ID NO: 1997919 - DNA, 25 bp, Homo sapien
tagaacatgcctcctatcgctatgc

SEQ ID NO: 1997920 - DNA, 25 bp, Homo sapien
gccaggtgatgacgtagaacatgcc

SEQ ID NO: 1997921 - DNA, 25 bp, Homo sapien
tagatggagtcaaagggcgtcgcaa

SEQ ID NO: 1997922 - DNA, 25 bp, Homo sapien
gggcagcacccaggtaggcagcaaa

SEQ ID NO: 1997923 - DNA, 25 bp, Homo sapien
gataacatgttagccagggcagcac

SEQ ID NO: 1997924 - DNA, 25 bp, Homo sapien
cagataacatgttagccagggcagc

SEQ ID NO: 1997925 - DNA, 25 bp, Homo sapien
cacagataacatgttagccagggca

SEQ ID NO: 1997926 - DNA, 25 bp, Homo sapien
ggccaagtgcagggcggcaatccaa

SEQ ID NO: 1997927 - DNA, 25 bp, Homo sapien
aagggccaagtgcagggcggcaatc

SEQ ID NO: 1997928 - DNA, 25 bp, Homo sapien
ctgagagacagaagggccaagtgca

SEQ ID NO: 1997929 - DNA, 25 bp, Homo sapien
gccaagtgcagggcggcaatccaaa

SEQ ID NO: 1997930 - DNA, 25 bp, Homo sapien
ggtaggtgactttgctgagcgggag

SEQ ID NO: 1997931 - DNA, 25 bp, Homo sapien
caggtagtagatgcggttggcctct

SEQ ID NO: 1997932 - DNA, 25 bp, Homo sapien
taggagacatcgtaggcctgatact

SEQ ID NO: 1997933 - DNA, 25 bp, Homo sapien
gttatgattgatgcccttctgtttc

SEQ ID NO: 1997934 - DNA, 25 bp, Homo sapien
tctggaatggtgactacatacacgc

SEQ ID NO: 1997935 - DNA, 25 bp, Homo sapien
tctggacggcgtgctgaagcctgaa

SEQ ID NO: 1997936 - DNA, 25 bp, Homo sapien
cagaacagaccaaagggaaggctaa

SEQ ID NO: 1997937 - DNA, 25 bp, Homo sapien
tgaggcttatttcgcagaagagggc

SEQ ID NO: 1997938 - DNA, 25 bp, Homo sapien
aaatgaccgagttgtgtgatgacca

SEQ ID NO: 1997939 - DNA, 25 bp, Homo sapien
cttccgggctaatgcacagttcttg

SEQ ID NO: 1997940 - DNA, 25 bp, Homo sapien
gaaagacttgctcaacctggtaggg

SEQ ID NO: 1997941 - DNA, 25 bp, Homo sapien
taaccccacgtctggagagcatttt

SEQ ID NO: 1997942 - DNA, 25 bp, Homo sapien
gcctcaaggtgtgattgcaaactca

SEQ ID NO: 1997943 - DNA, 25 bp, Homo sapien
acagcatgcatgtgaagggtttcct

SEQ ID NO: 1997944 - DNA, 25 bp, Homo sapien
tgtgagcataaacagccttctggtg

SEQ ID NO: 1997945 - DNA, 25 bp, Homo sapien
gatgcttaatcctcagagaccacta

SEQ ID NO: 1997946 - DNA, 25 bp, Homo sapien
tgactgagagcagcgtggtcggagg

SEQ ID NO: 1997947 - DNA, 25 bp, Homo sapien
cctgactgagagcagcgtggtcgga

SEQ ID NO: 1997948 - DNA, 25 bp, Homo sapien
ctggggccatgcctctgacctctag

SEQ ID NO: 1997949 - DNA, 25 bp, Homo sapien
gcctctgacctctagccagctctgc

SEQ ID NO: 1997950 - DNA, 25 bp, Homo sapien
ccagtccctgaaggcggcttgtggc

SEQ ID NO: 1997951 - DNA, 25 bp, Homo sapien
cacttactcattcactgcgggagag

SEQ ID NO: 1997952 - DNA, 25 bp, Homo sapien
ccatcttgctgtatgctagggttag

SEQ ID NO: 1997953 - DNA, 25 bp, Homo sapien
caaaactcatcgctgttcacaagga

SEQ ID NO: 1997954 - DNA, 25 bp, Homo sapien
tatctggccccgtgagattgggaac

SEQ ID NO: 1997955 - DNA, 25 bp, Homo sapien
ggatgatgttccctcaacctctgaa

SEQ ID NO: 1997956 - DNA, 25 bp, Homo sapien
gattgggaacctgctgcatcagagg

SEQ ID NO: 1997957 - DNA, 25 bp, Homo sapien
tgggtggtgccagacaaagtgcttc

SEQ ID NO: 1997958 - DNA, 25 bp, Homo sapien
ttaattgaacccctttactatcatg

SEQ ID NO: 1997959 - DNA, 25 bp, Homo sapien
aattgaacccctttactatcatgta

SEQ ID NO: 1997960 - DNA, 25 bp, Homo sapien
ttgaacccctttactatcatgtaat

SEQ ID NO: 1997961 - DNA, 25 bp, Homo sapien
gaacccctttactatcatgtaatgt

SEQ ID NO: 1997962 - DNA, 25 bp, Homo sapien
ctgagtatacggatgaaagacagcc

SEQ ID NO: 1997963 - DNA, 25 bp, Homo sapien
ttggtgctgccagcaaaattacaag

SEQ ID NO: 1997964 - DNA, 25 bp, Homo sapien
ggattctgagtatacggatgaaaga

SEQ ID NO: 1997965 - DNA, 25 bp, Homo sapien
tggtgctgccagcaaaattacaagg

SEQ ID NO: 1997966 - DNA, 25 bp, Homo sapien
agcaggccagagttctcatatcaat

SEQ ID NO: 1997967 - DNA, 25 bp, Homo sapien
gcagcaggccagagttctcatatca

SEQ ID NO: 1997968 - DNA, 25 bp, Homo sapien
cagcaggccagagttctcatatcaa

SEQ ID NO: 1997969 - DNA, 25 bp, Homo sapien
ggcagcaggccagagttctcatatc

SEQ ID NO: 1997970 - DNA, 25 bp, Homo sapien
tctttggaatggaacacagtgtctc

SEQ ID NO: 1997971 - DNA, 25 bp, Homo sapien
ctccagaccctttgagtgacttcct

SEQ ID NO: 1997972 - DNA, 25 bp, Homo sapien
ccagaccctttgagtgacttcctca

SEQ ID NO: 1997973 - DNA, 25 bp, Homo sapien
ggaatggaacacagtgtctccagac

SEQ ID NO: 1997974 - DNA, 25 bp, Homo sapien
catcccaggccgttgcctgtgctgt

SEQ ID NO: 1997975 - DNA, 25 bp, Homo sapien
cctcaatgggatgttgcgtgaaggt

SEQ ID NO: 1997976 - DNA, 25 bp, Homo sapien
tgaaggtgtcagttccttcacaggg

SEQ ID NO: 1997977 - DNA, 25 bp, Homo sapien
gtgccctgggacaaattgtccttat

SEQ ID NO: 1997978 - DNA, 25 bp, Homo sapien
attgggtggggcagatgcttcctca

SEQ ID NO: 1997979 - DNA, 25 bp, Homo sapien
tcctcatcatttcatgtggcattat

SEQ ID NO: 1997980 - DNA, 25 bp, Homo sapien
ttgggtggggcagatgcttcctcat

SEQ ID NO: 1997981 - DNA, 25 bp, Homo sapien
cagtagattcacactgggtaaagcc

SEQ ID NO: 1997982 - DNA, 25 bp, Homo sapien
gccaaacacaggaggattcctaaat

SEQ ID NO: 1997983 - DNA, 25 bp, Homo sapien
ttctcctcagctcctaaatgtgtgt

SEQ ID NO: 1997984 - DNA, 25 bp, Homo sapien
gggtaaagccatctcacctgttatt

SEQ ID NO: 1997985 - DNA, 25 bp, Homo sapien
cactcagctgaggttgctgattatt

SEQ ID NO: 1997986 - DNA, 25 bp, Homo sapien
tgaggttgctgattattttctccca

SEQ ID NO: 1997987 - DNA, 25 bp, Homo sapien
tttctcactcagctgaggttgctga

SEQ ID NO: 1997988 - DNA, 25 bp, Homo sapien
cagtctttttctcactcagctgagg

SEQ ID NO: 1997989 - DNA, 25 bp, Homo sapien
tatttggagaagtgttcgcattgac

SEQ ID NO: 1997990 - DNA, 25 bp, Homo sapien
gaaccttctcccaactggggtgtca

SEQ ID NO: 1997991 - DNA, 25 bp, Homo sapien
tctggtaccggaagaagccagcttt

SEQ ID NO: 1997992 - DNA, 25 bp, Homo sapien
ccaactggggtgtcaactgtgggtc

SEQ ID NO: 1997993 - DNA, 25 bp, Homo sapien
cgggaatcaaatccgggccatggtg

SEQ ID NO: 1997994 - DNA, 25 bp, Homo sapien
gaccgggaatcaaatccgggccatg

SEQ ID NO: 1997995 - DNA, 25 bp, Homo sapien
atcccatccactacaccacccgggg

SEQ ID NO: 1997996 - DNA, 25 bp, Homo sapien
tcaaatccgggccatggtggtgaga

SEQ ID NO: 1997997 - DNA, 25 bp, Homo sapien
ccacagcattccaaggtctttgacc

SEQ ID NO: 1997998 - DNA, 25 bp, Homo sapien
tgttcttgacagagtaccaactgct

SEQ ID NO: 1997999 - DNA, 25 bp, Homo sapien
cctggcttcagtacccgatgtctct

SEQ ID NO: 1998000 - DNA, 25 bp, Homo sapien
gcattccaaggtctttgaccagcaa

SEQ ID NO: 1998001 - DNA, 25 bp, Homo sapien
gaggcacctaacagttatatactca

SEQ ID NO: 1998002 - DNA, 25 bp, Homo sapien
cacctccacgacaagggagagtgct

SEQ ID NO: 1998003 - DNA, 25 bp, Homo sapien
gctggagggaggcacctaacagtta

SEQ ID NO: 1998004 - DNA, 25 bp, Homo sapien
gcagtggctgataaagatttgccca

SEQ ID NO: 1998005 - DNA, 25 bp, Homo sapien
gtttttgattttaagtagcaggaga

SEQ ID NO: 1998006 - DNA, 25 bp, Homo sapien
agtttttgattttaagtagcaggag

SEQ ID NO: 1998007 - DNA, 25 bp, Homo sapien
tagtttttgattttaagtagcagga

SEQ ID NO: 1998008 - DNA, 25 bp, Homo sapien
tgtaccacactgatgtgcctgcatg

SEQ ID NO: 1998009 - DNA, 25 bp, Homo sapien
taagaaacccagtggtagggctctc

SEQ ID NO: 1998010 - DNA, 25 bp, Homo sapien
tctggcttggcctaaaacctgaaaa

SEQ ID NO: 1998011 - DNA, 25 bp, Homo sapien
ttttctcagtgtagacagcgtctcc

SEQ ID NO: 1998012 - DNA, 25 bp, Homo sapien
tagctctaatgaccacgcaaaaggc

SEQ ID NO: 1998013 - DNA, 25 bp, Homo sapien
aacgggaagccatcctacacaggga

SEQ ID NO: 1998014 - DNA, 25 bp, Homo sapien
cccacatgggagaccgctaatgaag

SEQ ID NO: 1998015 - DNA, 25 bp, Homo sapien
gaatcagcatgacgtgtgccctagc

SEQ ID NO: 1998016 - DNA, 25 bp, Homo sapien
gcgtcaccagctttagttccaaaag

SEQ ID NO: 1998017 - DNA, 25 bp, Homo sapien
gcttagccgggcgatgcctctgcgc

SEQ ID NO: 1998018 - DNA, 25 bp, Homo sapien
tcaaagaccgtccattcatccttac

SEQ ID NO: 1998019 - DNA, 25 bp, Homo sapien
ttccaaacaggaccatgacgggcgt

SEQ ID NO: 1998020 - DNA, 25 bp, Homo sapien
caacttatgggaggcatcaggcttc

SEQ ID NO: 1998021 - DNA, 25 bp, Homo sapien
caaagagataaatgccttgagtttc

SEQ ID NO: 1998022 - DNA, 25 bp, Homo sapien
agcagcccaaagagataaatgcctt

SEQ ID NO: 1998023 - DNA, 25 bp, Homo sapien
ttcagctcaggcaaggacaagcagc

SEQ ID NO: 1998024 - DNA, 25 bp, Homo sapien
tatggaatggcctgctcaccaatgc

SEQ ID NO: 1998025 - DNA, 25 bp, Homo sapien
gaaacgccaaaatcatcagaccctg

SEQ ID NO: 1998026 - DNA, 25 bp, Homo sapien
cacagccaggtcaattgggaagcag

SEQ ID NO: 1998027 - DNA, 25 bp, Homo sapien
tataagtatccctaaggcagagccc

SEQ ID NO: 1998028 - DNA, 25 bp, Homo sapien
catagtggggctgtccactctaacc

SEQ ID NO: 1998029 - DNA, 25 bp, Homo sapien
ttctcccttgacatggcgaaacctg

SEQ ID NO: 1998030 - DNA, 25 bp, Homo sapien
accttctcccttgacatggcgaaac

SEQ ID NO: 1998031 - DNA, 25 bp, Homo sapien
atgtcaccggtgacatagccaagag

SEQ ID NO: 1998032 - DNA, 25 bp, Homo sapien
ggcaagttctttcatgtcaccggtg

SEQ ID NO: 1998033 - DNA, 25 bp, Homo sapien
ctggaagggatgaggtaaagcagag

SEQ ID NO: 1998034 - DNA, 25 bp, Homo sapien
ggttgttgacgaacaccacttggga

SEQ ID NO: 1998035 - DNA, 25 bp, Homo sapien
tgccccggagaatccagtcaatgaa

SEQ ID NO: 1998036 - DNA, 25 bp, Homo sapien
tcaatgaactggagcaccacgggtt

SEQ ID NO: 1998037 - DNA, 25 bp, Homo sapien
caagaagtcctaccagaatcaggat

SEQ ID NO: 1998038 - DNA, 25 bp, Homo sapien
tagtctcccttgtccgaaaagacag

SEQ ID NO: 1998039 - DNA, 25 bp, Homo sapien
gcattgtagccatagagcccagatg

SEQ ID NO: 1998040 - DNA, 25 bp, Homo sapien
catgagtactcccaccagggtggca

SEQ ID NO: 1998041 - DNA, 25 bp, Homo sapien
agggtggcattgtagccatagagcc

SEQ ID NO: 1998042 - DNA, 25 bp, Homo sapien
cacgaacctattcttcagagcaggg

SEQ ID NO: 1998043 - DNA, 25 bp, Homo sapien
tggtgagcacttacaggctaggcct

SEQ ID NO: 1998044 - DNA, 25 bp, Homo sapien
gggtgggcatcccttctgcagacac

SEQ ID NO: 1998045 - DNA, 25 bp, Homo sapien
tagctctacaggtaggtcctcgtcc

SEQ ID NO: 1998046 - DNA, 25 bp, Homo sapien
ggagctgtagttataggtatgacca

SEQ ID NO: 1998047 - DNA, 25 bp, Homo sapien
gattgtaatgtcctgtggctgaaag

SEQ ID NO: 1998048 - DNA, 25 bp, Homo sapien
tgaaaggtacattgacaacgccatg

SEQ ID NO: 1998049 - DNA, 25 bp, Homo sapien
tgctgagcatggaattcaatgcact

SEQ ID NO: 1998050 - DNA, 25 bp, Homo sapien
tcacagccatagatctgaccaactc

SEQ ID NO: 1998051 - DNA, 25 bp, Homo sapien
aggagagtaggatggctcccaggaa

SEQ ID NO: 1998052 - DNA, 25 bp, Homo sapien
ggaaaatgccccctgtccatggatt

SEQ ID NO: 1998053 - DNA, 25 bp, Homo sapien
cagcaatgatcctatggcagcatgc

SEQ ID NO: 1998054 - DNA, 25 bp, Homo sapien
atgaacattcctcccattgcaatgc

SEQ ID NO: 1998055 - DNA, 25 bp, Homo sapien
gagctgttgaaaccccagagtccaa

SEQ ID NO: 1998056 - DNA, 25 bp, Homo sapien
ggtttgccaggtgagcgccatgaac

SEQ ID NO: 1998057 - DNA, 25 bp, Homo sapien
cagagtccaaagtagatgtcctcaa

SEQ ID NO: 1998058 - DNA, 25 bp, Homo sapien
tgctctcagagaggggacgtcactt

SEQ ID NO: 1998059 - DNA, 25 bp, Homo sapien
cgtttttactgcttatccttgattg

SEQ ID NO: 1998060 - DNA, 25 bp, Homo sapien
cctgttcacacacttagacagcaag

SEQ ID NO: 1998061 - DNA, 25 bp, Homo sapien
aagtgggctcaagccagaaccctgg

SEQ ID NO: 1998062 - DNA, 25 bp, Homo sapien
ccttacagtagaggcgcaattctgc

SEQ ID NO: 1998063 - DNA, 25 bp, Homo sapien
aatgaccctgacagcattcttggta

SEQ ID NO: 1998064 - DNA, 25 bp, Homo sapien
attaagactcgccaagtaggaccgg

SEQ ID NO: 1998065 - DNA, 25 bp, Homo sapien
catcagtttgtaggcaatgaccctg

SEQ ID NO: 1998066 - DNA, 25 bp, Homo sapien
tgccgactccaagataggccgtgaa

SEQ ID NO: 1998067 - DNA, 25 bp, Homo sapien
taaagtttgccatgccgactccaag

SEQ ID NO: 1998068 - DNA, 25 bp, Homo sapien
ctcagccataaagtttgccatgccg

SEQ ID NO: 1998069 - DNA, 25 bp, Homo sapien
gactccaagataggccgtgaacagg

SEQ ID NO: 1998070 - DNA, 25 bp, Homo sapien
tcacaaagggctttccaccattctt

SEQ ID NO: 1998071 - DNA, 25 bp, Homo sapien
gccaggtacaagctggcaatccaac

SEQ ID NO: 1998072 - DNA, 25 bp, Homo sapien
gaagatgcggttttcttcaggataa

SEQ ID NO: 1998073 - DNA, 25 bp, Homo sapien
gatgaggaacaatagcgtggccaaa

SEQ ID NO: 1998074 - DNA, 25 bp, Homo sapien
tacattccagtcttagtgccaaggc

SEQ ID NO: 1998075 - DNA, 25 bp, Homo sapien
gaaatgactcgtgaccatggctgca

SEQ ID NO: 1998076 - DNA, 25 bp, Homo sapien
gagaccctggaagttagctggagca

SEQ ID NO: 1998077 - DNA, 25 bp, Homo sapien
taagaacagattacagacgcgtcag

SEQ ID NO: 1998078 - DNA, 25 bp, Homo sapien
tgtaagaacaggttaagccaggaac

SEQ ID NO: 1998079 - DNA, 25 bp, Homo sapien
tcccatgagagaatgtcacacacac

SEQ ID NO: 1998080 - DNA, 25 bp, Homo sapien
tgcaaattcatagttccaaaggctt

SEQ ID NO: 1998081 - DNA, 25 bp, Homo sapien
tactacacgatacacactgaagtgg

SEQ ID NO: 1998082 - DNA, 25 bp, Homo sapien
aaagtataagtgctccctgcaaata

SEQ ID NO: 1998083 - DNA, 25 bp, Homo sapien
cctgcatggtagatccctgttctga

SEQ ID NO: 1998084 - DNA, 25 bp, Homo sapien
ctgttctgaagatcgactcgggtcc

SEQ ID NO: 1998085 - DNA, 25 bp, Homo sapien
tcagccacagcctagattcttcact

SEQ ID NO: 1998086 - DNA, 25 bp, Homo sapien
caactgtggtgaaagggtgtggaag

SEQ ID NO: 1998087 - DNA, 25 bp, Homo sapien
tggtgaaagggtgtggaagagaagt

SEQ ID NO: 1998088 - DNA, 25 bp, Homo sapien
ctgccaactgtggtgaaagggtgtg

SEQ ID NO: 1998089 - DNA, 25 bp, Homo sapien
aaagggtgtggaagagaagtgcttc

SEQ ID NO: 1998090 - DNA, 25 bp, Homo sapien
ggaaggacccagtgaagtattcttc

SEQ ID NO: 1998091 - DNA, 25 bp, Homo sapien
cccagtgaagtattcttcagcttcc

SEQ ID NO: 1998092 - DNA, 25 bp, Homo sapien
ggacccagtgaagtattcttcagct

SEQ ID NO: 1998093 - DNA, 25 bp, Homo sapien
accccggtgtgagacatgaggccat

SEQ ID NO: 1998094 - DNA, 25 bp, Homo sapien
cacatctggtgtaaaattgatgatc

SEQ ID NO: 1998095 - DNA, 25 bp, Homo sapien
atcttctcacatctggtgtaaaatt

SEQ ID NO: 1998096 - DNA, 25 bp, Homo sapien
ttctcacatctggtgtaaaattgat

SEQ ID NO: 1998097 - DNA, 25 bp, Homo sapien
catctggtgtaaaattgatgatctt

SEQ ID NO: 1998098 - DNA, 25 bp, Homo sapien
tgtcttctagggtgatgtttatgat

SEQ ID NO: 1998099 - DNA, 25 bp, Homo sapien
tatgggcagccacataatagaagag

SEQ ID NO: 1998100 - DNA, 25 bp, Homo sapien
ggcacatgaggtccaaacagagaaa

SEQ ID NO: 1998101 - DNA, 25 bp, Homo sapien
ctttggcaggcacatgaggtccaaa

SEQ ID NO: 1998102 - DNA, 25 bp, Homo sapien
gtgagcaagactcgatcacggccca

SEQ ID NO: 1998103 - DNA, 25 bp, Homo sapien
cagcgttttaacctaagggagtgca

SEQ ID NO: 1998104 - DNA, 25 bp, Homo sapien
gtttcccgacatgcccgtgagcaag

SEQ ID NO: 1998105 - DNA, 25 bp, Homo sapien
ttcggctttgcacagcttcctcgtg

SEQ ID NO: 1998106 - DNA, 25 bp, Homo sapien
ctgccatcatgtagcataatggctg

SEQ ID NO: 1998107 - DNA, 25 bp, Homo sapien
tgccatcatgtagcataatggctgc

SEQ ID NO: 1998108 - DNA, 25 bp, Homo sapien
atcatgtagcataatggctgcttat

SEQ ID NO: 1998109 - DNA, 25 bp, Homo sapien
ccatcatgtagcataatggctgctt

SEQ ID NO: 1998110 - DNA, 25 bp, Homo sapien
tgaatgctgagggttgaatttccaa

SEQ ID NO: 1998111 - DNA, 25 bp, Homo sapien
tgctgagggttgaatttccaagagt

SEQ ID NO: 1998112 - DNA, 25 bp, Homo sapien
ctgttgtggttttggccctaacatt

SEQ ID NO: 1998113 - DNA, 25 bp, Homo sapien
agggttgaatttccaagagtttgag

SEQ ID NO: 1998114 - DNA, 25 bp, Homo sapien
gctgtgagcatctgaacaccccagg

SEQ ID NO: 1998115 - DNA, 25 bp, Homo sapien
ctgtgagcatctgaacaccccaggc

SEQ ID NO: 1998116 - DNA, 25 bp, Homo sapien
tgagcatctgaacaccccaggccag

SEQ ID NO: 1998117 - DNA, 25 bp, Homo sapien
tgtgagcatctgaacaccccaggcc

SEQ ID NO: 1998118 - DNA, 25 bp, Homo sapien
gtcgggagaacccacgccaagcagg

SEQ ID NO: 1998119 - DNA, 25 bp, Homo sapien
aggccagcagccagatggacttttc

SEQ ID NO: 1998120 - DNA, 25 bp, Homo sapien
ccagcagccagatggacttttccat

SEQ ID NO: 1998121 - DNA, 25 bp, Homo sapien
ctgtcgggagaacccacgccaagca

SEQ ID NO: 1998122 - DNA, 25 bp, Homo sapien
gggccacaggctgaccctgctgtgg

SEQ ID NO: 1998123 - DNA, 25 bp, Homo sapien
agggccacaggctgaccctgctgtg

SEQ ID NO: 1998124 - DNA, 25 bp, Homo sapien
tatgaggagcccaacaatctgggag

SEQ ID NO: 1998125 - DNA, 25 bp, Homo sapien
cctgggcatgctaacagggtgctcc

SEQ ID NO: 1998126 - DNA, 25 bp, Homo sapien
gggtggcacttccggcattgtgaca

SEQ ID NO: 1998127 - DNA, 25 bp, Homo sapien
gctaccctccttgagggcacctggg

SEQ ID NO: 1998128 - DNA, 25 bp, Homo sapien
gcacgggtcacttgctctctgtgga

SEQ ID NO: 1998129 - DNA, 25 bp, Homo sapien
cttgtcggtttcatggcggagcacg

SEQ ID NO: 1998130 - DNA, 25 bp, Homo sapien
tagatcttctgtgggcgtagtcacg

SEQ ID NO: 1998131 - DNA, 25 bp, Homo sapien
cagaagctgcaattggatagggtca

SEQ ID NO: 1998132 - DNA, 25 bp, Homo sapien
gtcctgaagtgtgctgcaaatggca

SEQ ID NO: 1998133 - DNA, 25 bp, Homo sapien
gcccaaggacaagagccaattttga

SEQ ID NO: 1998134 - DNA, 25 bp, Homo sapien
ccaaggacaagagccaattttgaaa

SEQ ID NO: 1998135 - DNA, 25 bp, Homo sapien
aatgtcctgaagtgtgctgcaaatg

SEQ ID NO: 1998136 - DNA, 25 bp, Homo sapien
cctctgtgttgagcaagttctccgt

SEQ ID NO: 1998137 - DNA, 25 bp, Homo sapien
tgagcaagttctccgtagtatctat

SEQ ID NO: 1998138 - DNA, 25 bp, Homo sapien
tgttgagcaagttctccgtagtatc

SEQ ID NO: 1998139 - DNA, 25 bp, Homo sapien
aagttctccgtagtatctattttag

SEQ ID NO: 1998140 - DNA, 25 bp, Homo sapien
tgcgggtgcgtgaaggtgcagggca

SEQ ID NO: 1998141 - DNA, 25 bp, Homo sapien
gtcagcggcccgtcgtagtggcggt

SEQ ID NO: 1998142 - DNA, 25 bp, Homo sapien
cctgcatggaccagcgctgcgctgg

SEQ ID NO: 1998143 - DNA, 25 bp, Homo sapien
gcagggcagcactgccgcgtcgcct

SEQ ID NO: 1998144 - DNA, 25 bp, Homo sapien
gctcagcgccgtctggcagagctcg

SEQ ID NO: 1998145 - DNA, 25 bp, Homo sapien
gttgcggcgcgggttgcccagcagc

SEQ ID NO: 1998146 - DNA, 25 bp, Homo sapien
cagcagccggaagcggccgtgcagg

SEQ ID NO: 1998147 - DNA, 25 bp, Homo sapien
agcggaacacctgcgggcccgcata

SEQ ID NO: 1998148 - DNA, 25 bp, Homo sapien
cggcgaactcgacgcggcagaagta

SEQ ID NO: 1998149 - DNA, 25 bp, Homo sapien
tctcgtagcggtcatggacgtcgcc

SEQ ID NO: 1998150 - DNA, 25 bp, Homo sapien
gtcagccagggcgaggcgctcgacg

SEQ ID NO: 1998151 - DNA, 25 bp, Homo sapien
gaagtagcggcggtcgtcagccagg

SEQ ID NO: 1998152 - DNA, 25 bp, Homo sapien
gagggctgggtctcgttgcccttcc

SEQ ID NO: 1998153 - DNA, 25 bp, Homo sapien
caggtgtgagatccctggggtagag

SEQ ID NO: 1998154 - DNA, 25 bp, Homo sapien
ccccaggtgtgagatccctggggta

SEQ ID NO: 1998155 - DNA, 25 bp, Homo sapien
ctgggtctcgttgcccttcctggct

SEQ ID NO: 1998156 - DNA, 25 bp, Homo sapien
tctttctcgcctcttcgtctgagag

SEQ ID NO: 1998157 - DNA, 25 bp, Homo sapien
tttctcgcctcttcgtctgagagcc

SEQ ID NO: 1998158 - DNA, 25 bp, Homo sapien
tgtctttctcgcctcttcgtctgag

SEQ ID NO: 1998159 - DNA, 25 bp, Homo sapien
ttctcgcctcttcgtctgagagcca

SEQ ID NO: 1998160 - DNA, 25 bp, Homo sapien
tgcccccgtcccaatacagatgtgg

SEQ ID NO: 1998161 - DNA, 25 bp, Homo sapien
ggcgaaagattctatcatctctgct

SEQ ID NO: 1998162 - DNA, 25 bp, Homo sapien
gtggccttgggcgaaagattctatc

SEQ ID NO: 1998163 - DNA, 25 bp, Homo sapien
cttagccctttggacgccagagccg

SEQ ID NO: 1998164 - DNA, 25 bp, Homo sapien
gactgggcagcaccgagatgttgac

SEQ ID NO: 1998165 - DNA, 25 bp, Homo sapien
cggaaggcgtgagccggactgggca

SEQ ID NO: 1998166 - DNA, 25 bp, Homo sapien
cttcggcagtgcagagcgcgcggaa

SEQ ID NO: 1998167 - DNA, 25 bp, Homo sapien
ccgagatgttgacgatccgcggcgc

SEQ ID NO: 1998168 - DNA, 25 bp, Homo sapien
ggctccgcacggctgccaagctgtt

SEQ ID NO: 1998169 - DNA, 25 bp, Homo sapien
ctgttggcggccgtacacgtgtagc

SEQ ID NO: 1998170 - DNA, 25 bp, Homo sapien
ccatggaagcggaacaggtagacgc

SEQ ID NO: 1998171 - DNA, 25 bp, Homo sapien
ccttgaagccgagagcgccgagcag

SEQ ID NO: 1998172 - DNA, 25 bp, Homo sapien
ggggtgtccggggtgtccagatgct

SEQ ID NO: 1998173 - DNA, 25 bp, Homo sapien
gtgtctttagtaccagtgcctggta

SEQ ID NO: 1998174 - DNA, 25 bp, Homo sapien
tgttaaatgactgaacaacggtcgg

SEQ ID NO: 1998175 - DNA, 25 bp, Homo sapien
gcgacagtaaatcagcaaacaggga

SEQ ID NO: 1998176 - DNA, 25 bp, Homo sapien
caacggtcggctttcagattcaggg

SEQ ID NO: 1998177 - DNA, 25 bp, Homo sapien
ggtgagcacatggtggctggtgggc

SEQ ID NO: 1998178 - DNA, 25 bp, Homo sapien
ggttcatctggctcaaattttcata

SEQ ID NO: 1998179 - DNA, 25 bp, Homo sapien
tttacagtgctgaaatggatgttgg

SEQ ID NO: 1998180 - DNA, 25 bp, Homo sapien
ttacagtgctgaaatggatgttggt

SEQ ID NO: 1998181 - DNA, 25 bp, Homo sapien
ccttgagcagggtcttgaccttgag

SEQ ID NO: 1998182 - DNA, 25 bp, Homo sapien
ccagatgagcctccttgagcagggt

SEQ ID NO: 1998183 - DNA, 25 bp, Homo sapien
aatggttgtccacataggaggccag

SEQ ID NO: 1998184 - DNA, 25 bp, Homo sapien
aaggtgcccgagaaccaggactggc

SEQ ID NO: 1998185 - DNA, 25 bp, Homo sapien
tctggaagtttcacgctcaagctaa

SEQ ID NO: 1998186 - DNA, 25 bp, Homo sapien
gatctttgtagtcctcccagccagg

SEQ ID NO: 1998187 - DNA, 25 bp, Homo sapien
gacagtggttcccagataccttgag

SEQ ID NO: 1998188 - DNA, 25 bp, Homo sapien
gaagtgaagagagtgtcccaggtcc

SEQ ID NO: 1998189 - DNA, 25 bp, Homo sapien
gctagggtgagacaaatgaggcacc

SEQ ID NO: 1998190 - DNA, 25 bp, Homo sapien
tctcccctgcaatgtctttagttag

SEQ ID NO: 1998191 - DNA, 25 bp, Homo sapien
ttcacccagccattgagacaagctg

SEQ ID NO: 1998192 - DNA, 25 bp, Homo sapien
tgtccaaattagtccgtgttatcct

SEQ ID NO: 1998193 - DNA, 25 bp, Homo sapien
taaagacacgctttgcagctctgat

SEQ ID NO: 1998194 - DNA, 25 bp, Homo sapien
tagtctcttgagttttacaggccac

SEQ ID NO: 1998195 - DNA, 25 bp, Homo sapien
taatagtctgatctggcaacagcga

SEQ ID NO: 1998196 - DNA, 25 bp, Homo sapien
tacaggccacaaaatgtccgtctca

SEQ ID NO: 1998197 - DNA, 25 bp, Homo sapien
cacgaagttcatcacagtggcgtgt

SEQ ID NO: 1998198 - DNA, 25 bp, Homo sapien
atgaagtggaagaacacgaagttca

SEQ ID NO: 1998199 - DNA, 25 bp, Homo sapien
tggaagaacacgaagttcatcacag

SEQ ID NO: 1998200 - DNA, 25 bp, Homo sapien
gaacacgaagttcatcacagtggcg

SEQ ID NO: 1998201 - DNA, 25 bp, Homo sapien
gcgactattccaacagcagagttcc

SEQ ID NO: 1998202 - DNA, 25 bp, Homo sapien
tatattcctttcagacatggacagc

SEQ ID NO: 1998203 - DNA, 25 bp, Homo sapien
atggacagccagacccgccacatgg

SEQ ID NO: 1998204 - DNA, 25 bp, Homo sapien
cattcttgagtgtgtctatattcct

SEQ ID NO: 1998205 - DNA, 25 bp, Homo sapien
tttactcatcagatggttcaattcc

SEQ ID NO: 1998206 - DNA, 25 bp, Homo sapien
caagcttttactcatcagatggttc

SEQ ID NO: 1998207 - DNA, 25 bp, Homo sapien
aatgccaagcttttactcatcagat

SEQ ID NO: 1998208 - DNA, 25 bp, Homo sapien
gcttttactcatcagatggttcaat

SEQ ID NO: 1998209 - DNA, 25 bp, Homo sapien
taaccctgggcctcataagtgacat

SEQ ID NO: 1998210 - DNA, 25 bp, Homo sapien
tgggcaggtgcatgtaaggaaaaaa

SEQ ID NO: 1998211 - DNA, 25 bp, Homo sapien
gtagaccttactgctcacccatgtg

SEQ ID NO: 1998212 - DNA, 25 bp, Homo sapien
gagcctcaggtaataagtttgtgaa

SEQ ID NO: 1998213 - DNA, 25 bp, Homo sapien
gggtctggtttcctgccgtgaaata

SEQ ID NO: 1998214 - DNA, 25 bp, Homo sapien
gtctggtttcctgccgtgaaataat

SEQ ID NO: 1998215 - DNA, 25 bp, Homo sapien
ctgggtctggtttcctgccgtgaaa

SEQ ID NO: 1998216 - DNA, 25 bp, Homo sapien
tcctgccgtgaaataatttttctct

SEQ ID NO: 1998217 - DNA, 25 bp, Homo sapien
cgggcaggttgcttgaagcgcaggg

SEQ ID NO: 1998218 - DNA, 25 bp, Homo sapien
tcatgtgacagtccggaggccagaa

SEQ ID NO: 1998219 - DNA, 25 bp, Homo sapien
gacggcgccgcggaagggtctatgg

SEQ ID NO: 1998220 - DNA, 25 bp, Homo sapien
agtggcggagattcgatcatgtgac

SEQ ID NO: 1998221 - DNA, 25 bp, Homo sapien
taaagacccttggatacatcaggca

SEQ ID NO: 1998222 - DNA, 25 bp, Homo sapien
gctaccaggcacctttctgggagag

SEQ ID NO: 1998223 - DNA, 25 bp, Homo sapien
ctacgtgcagtgttctaaagaccct

SEQ ID NO: 1998224 - DNA, 25 bp, Homo sapien
cctttgaggatcttacattctggga

SEQ ID NO: 1998225 - DNA, 25 bp, Homo sapien
taggatgtaatagggaagtgtcacc

SEQ ID NO: 1998226 - DNA, 25 bp, Homo sapien
tgcagaaatccctcaaaaacaattg

SEQ ID NO: 1998227 - DNA, 25 bp, Homo sapien
accagtgttgatagcatatgcaatc

SEQ ID NO: 1998228 - DNA, 25 bp, Homo sapien
caattgataaatagggaatgatgtc

SEQ ID NO: 1998229 - DNA, 25 bp, Homo sapien
tggggactcagtccagatgggtata

SEQ ID NO: 1998230 - DNA, 25 bp, Homo sapien
cacatggggactcagtccagatggg

SEQ ID NO: 1998231 - DNA, 25 bp, Homo sapien
ggactcagtccagatgggtatatgc

SEQ ID NO: 1998232 - DNA, 25 bp, Homo sapien
catggggactcagtccagatgggta

SEQ ID NO: 1998233 - DNA, 25 bp, Homo sapien
cctgcaatgctgagtaacaatcagt

SEQ ID NO: 1998234 - DNA, 25 bp, Homo sapien
gtaacaatcagtgtttttatagggc

SEQ ID NO: 1998235 - DNA, 25 bp, Homo sapien
tgcaatgctgagtaacaatcagtgt

SEQ ID NO: 1998236 - DNA, 25 bp, Homo sapien
aacaatcagtgtttttatagggcat

SEQ ID NO: 1998237 - DNA, 25 bp, Homo sapien
ccgggctaacgcttcggcttcgctg

SEQ ID NO: 1998238 - DNA, 25 bp, Homo sapien
tccagtccgccctcgttccgggcta

SEQ ID NO: 1998239 - DNA, 25 bp, Homo sapien
ctaacgcttcggcttcgctgcggtt

SEQ ID NO: 1998240 - DNA, 25 bp, Homo sapien
ctcgttccgggctaacgcttcggct

SEQ ID NO: 1998241 - DNA, 25 bp, Homo sapien
tctcctcttccctcgccgcgcttgg

SEQ ID NO: 1998242 - DNA, 25 bp, Homo sapien
ttgtcttctccagcgtcgggcggtt

SEQ ID NO: 1998243 - DNA, 25 bp, Homo sapien
ggtttgtcttctccagcgtcgggcg

SEQ ID NO: 1998244 - DNA, 25 bp, Homo sapien
tcttctccagcgtcgggcggttccg

SEQ ID NO: 1998245 - DNA, 25 bp, Homo sapien
cttgaacccacggaccccgcagacg

SEQ ID NO: 1998246 - DNA, 25 bp, Homo sapien
ctgagtctcccaagtcttcatgtcc

SEQ ID NO: 1998247 - DNA, 25 bp, Homo sapien
tcgtcgtcctcgacatcgccgaaga

SEQ ID NO: 1998248 - DNA, 25 bp, Homo sapien
attctccgcttctgagtctcccaag

SEQ ID NO: 1998249 - DNA, 25 bp, Homo sapien
ggcttcttttgaggtgcacaattac

SEQ ID NO: 1998250 - DNA, 25 bp, Homo sapien
ttggcttcttttgaggtgcacaatt

SEQ ID NO: 1998251 - DNA, 25 bp, Homo sapien
tcttcttcatccacccaaattggct

SEQ ID NO: 1998252 - DNA, 25 bp, Homo sapien
caaattggcttcttttgaggtgcac

SEQ ID NO: 1998253 - DNA, 25 bp, Homo sapien
ctagcatttttcatcattatctttc

SEQ ID NO: 1998254 - DNA, 25 bp, Homo sapien
tttttcatcattatctttccgaaac

SEQ ID NO: 1998255 - DNA, 25 bp, Homo sapien
agcatttttcatcattatctttccg

SEQ ID NO: 1998256 - DNA, 25 bp, Homo sapien
catttttcatcattatctttccgaa

SEQ ID NO: 1998257 - DNA, 25 bp, Homo sapien
gaattcttcttaaagtcgcttctta

SEQ ID NO: 1998258 - DNA, 25 bp, Homo sapien
tgtgcacaaggacggaactgcacag

SEQ ID NO: 1998259 - DNA, 25 bp, Homo sapien
cagaaggacgttcagcattaccatg

SEQ ID NO: 1998260 - DNA, 25 bp, Homo sapien
tgagatctgagcagcagaaggacgt

SEQ ID NO: 1998261 - DNA, 25 bp, Homo sapien
tcacaatctgtgcacaaggacggaa

SEQ ID NO: 1998262 - DNA, 25 bp, Homo sapien
cctgaaatagtgatataggttatct

SEQ ID NO: 1998263 - DNA, 25 bp, Homo sapien
ttccaaacaggtgctctggatttta

SEQ ID NO: 1998264 - DNA, 25 bp, Homo sapien
ccaaacaggtgctctggattttagg

SEQ ID NO: 1998265 - DNA, 25 bp, Homo sapien
gatataggttatctaatccagcgac

SEQ ID NO: 1998266 - DNA, 25 bp, Homo sapien
gaattaatttccagctagcatgtca

SEQ ID NO: 1998267 - DNA, 25 bp, Homo sapien
tcgatagcaaatgcaaatacccagc

SEQ ID NO: 1998268 - DNA, 25 bp, Homo sapien
aaaaccttgctgtgagtactcatgg

SEQ ID NO: 1998269 - DNA, 25 bp, Homo sapien
catccccgaagaggcatatactttc

SEQ ID NO: 1998270 - DNA, 25 bp, Homo sapien
aattccatggcgtaaacatgagaaa

SEQ ID NO: 1998271 - DNA, 25 bp, Homo sapien
aaattccatggcgtaaacatgagaa

SEQ ID NO: 1998272 - DNA, 25 bp, Homo sapien
ctgagagaaaattccatggcgtaaa

SEQ ID NO: 1998273 - DNA, 25 bp, Homo sapien
gagaaaattccatggcgtaaacatg

SEQ ID NO: 1998274 - DNA, 25 bp, Homo sapien
ttcattccccaaggcaaagtatcca

SEQ ID NO: 1998275 - DNA, 25 bp, Homo sapien
gcacagctggctctataagccattt

SEQ ID NO: 1998276 - DNA, 25 bp, Homo sapien
cacagctggctctataagccatttt

SEQ ID NO: 1998277 - DNA, 25 bp, Homo sapien
agctggctctataagccattttcca

SEQ ID NO: 1998278 - DNA, 25 bp, Homo sapien
gttttcattgttctcttctaatgca

SEQ ID NO: 1998279 - DNA, 25 bp, Homo sapien
cattcatcactcaggaatctgtttt

SEQ ID NO: 1998280 - DNA, 25 bp, Homo sapien
tcattcatcactcaggaatctgttt

SEQ ID NO: 1998281 - DNA, 25 bp, Homo sapien
ggaatctgttttcattgttctcttc

SEQ ID NO: 1998282 - DNA, 25 bp, Homo sapien
aaaggcgtgacttcggctcaccaca

SEQ ID NO: 1998283 - DNA, 25 bp, Homo sapien
actcctgagtactgcaggcgcgtgc

SEQ ID NO: 1998284 - DNA, 25 bp, Homo sapien
gacagcatagggaggtaacatgaac

SEQ ID NO: 1998285 - DNA, 25 bp, Homo sapien
tatatgcagaatttgatccgtttgg

SEQ ID NO: 1998286 - DNA, 25 bp, Homo sapien
ctagttcctgcccataagagtggtt

SEQ ID NO: 1998287 - DNA, 25 bp, Homo sapien
gagccactatcttggctggcaggcc

SEQ ID NO: 1998288 - DNA, 25 bp, Homo sapien
gagtggttgacctttactgtgacca

SEQ ID NO: 1998289 - DNA, 25 bp, Homo sapien
ccagagccactatcttggctggcag

SEQ ID NO: 1998290 - DNA, 25 bp, Homo sapien
gaccttgtgaccaacggagaaaaca

SEQ ID NO: 1998291 - DNA, 25 bp, Homo sapien
gagaccttgtgaccaacggagaaaa

SEQ ID NO: 1998292 - DNA, 25 bp, Homo sapien
agagaccttgtgaccaacggagaaa

SEQ ID NO: 1998293 - DNA, 25 bp, Homo sapien
cttgtgaccaacggagaaaacacag

SEQ ID NO: 1998294 - DNA, 25 bp, Homo sapien
caggagggctgtttccttttgtctt

SEQ ID NO: 1998295 - DNA, 25 bp, Homo sapien
ggagggctgtttccttttgtcttgc

SEQ ID NO: 1998296 - DNA, 25 bp, Homo sapien
aggagggctgtttccttttgtcttg

SEQ ID NO: 1998297 - DNA, 25 bp, Homo sapien
tttttcaggtagaatggaggactgg

SEQ ID NO: 1998298 - DNA, 25 bp, Homo sapien
gctctcacgggaggcttgcgagttt

SEQ ID NO: 1998299 - DNA, 25 bp, Homo sapien
acagatggctctcacgggaggcttg

SEQ ID NO: 1998300 - DNA, 25 bp, Homo sapien
cacgggaggcttgcgagtttttcag

SEQ ID NO: 1998301 - DNA, 25 bp, Homo sapien
ggctcggactccagggcccaccctc

SEQ ID NO: 1998302 - DNA, 25 bp, Homo sapien
gcccgcgcccccagcagcgcgtgct

SEQ ID NO: 1998303 - DNA, 25 bp, Homo sapien
ggcccaccctctgccgcccgcgccc

SEQ ID NO: 1998304 - DNA, 25 bp, Homo sapien
cgcgtgcccgcgagtcccgggggct

SEQ ID NO: 1998305 - DNA, 25 bp, Homo sapien
cgagtgtggaacgcagaagttgagt

SEQ ID NO: 1998306 - DNA, 25 bp, Homo sapien
ctgcgcgagtgtggaacgcagaagt

SEQ ID NO: 1998307 - DNA, 25 bp, Homo sapien
tgcgcgagtgtggaacgcagaagtt

SEQ ID NO: 1998308 - DNA, 25 bp, Homo sapien
cgcgagtgtggaacgcagaagttga

SEQ ID NO: 1998309 - DNA, 25 bp, Homo sapien
tcgcaatcgggagtggtttaggacc

SEQ ID NO: 1998310 - DNA, 25 bp, Homo sapien
tttccaatacccaaagacttccaga

SEQ ID NO: 1998311 - DNA, 25 bp, Homo sapien
gaggcagctagcttcgggctgatat

SEQ ID NO: 1998312 - DNA, 25 bp, Homo sapien
tatattgatcgtggcccgacgctgt

SEQ ID NO: 1998313 - DNA, 25 bp, Homo sapien
cagttaagcctagcttcctagtgcc

SEQ ID NO: 1998314 - DNA, 25 bp, Homo sapien
tctgctgccccttgatggttctgcc

SEQ ID NO: 1998315 - DNA, 25 bp, Homo sapien
cccgcttctatgtccccagtttgtg

SEQ ID NO: 1998316 - DNA, 25 bp, Homo sapien
caagtacgtaaatggatgcatccct

SEQ ID NO: 1998317 - DNA, 25 bp, Homo sapien
cctaaactggatatatgtggcaggc

SEQ ID NO: 1998318 - DNA, 25 bp, Homo sapien
gacaatactgaagagcatagctggc

SEQ ID NO: 1998319 - DNA, 25 bp, Homo sapien
cctgcataaagaggtactgtaggca

SEQ ID NO: 1998320 - DNA, 25 bp, Homo sapien
tgtaagtttctagagtactttgtgt

SEQ ID NO: 1998321 - DNA, 25 bp, Homo sapien
ctcctgtggattcacatcaaatacc

SEQ ID NO: 1998322 - DNA, 25 bp, Homo sapien
taaactcctgtggattcacatcaaa

SEQ ID NO: 1998323 - DNA, 25 bp, Homo sapien
aactcctgtggattcacatcaaata

SEQ ID NO: 1998324 - DNA, 25 bp, Homo sapien
tcctgtggattcacatcaaatacca

SEQ ID NO: 1998325 - DNA, 25 bp, Homo sapien
tgtaaggggatatcttgataaactg

SEQ ID NO: 1998326 - DNA, 25 bp, Homo sapien
cgggtgtaaggggatatcttgataa

SEQ ID NO: 1998327 - DNA, 25 bp, Homo sapien
tggctgttatctatgcgggtgtaag

SEQ ID NO: 1998328 - DNA, 25 bp, Homo sapien
caagtggctgttatctatgcgggtg

SEQ ID NO: 1998329 - DNA, 25 bp, Homo sapien
cggcccaaactacatttcttattat

SEQ ID NO: 1998330 - DNA, 25 bp, Homo sapien
taaacagtgcttatggactatactg

SEQ ID NO: 1998331 - DNA, 25 bp, Homo sapien
ccacttggctatatgaatatgtaat

SEQ ID NO: 1998332 - DNA, 25 bp, Homo sapien
cctttcaggaattaaggcctgttag

SEQ ID NO: 1998333 - DNA, 25 bp, Homo sapien
caacaacttttgagtcgtggcgtgc

SEQ ID NO: 1998334 - DNA, 25 bp, Homo sapien
tcggttctgacctcgatgctgccac

SEQ ID NO: 1998335 - DNA, 25 bp, Homo sapien
cgtggcgtgcgtctaactgagttgc

SEQ ID NO: 1998336 - DNA, 25 bp, Homo sapien
gtatcgtgaggttgctgcttttgcc

SEQ ID NO: 1998337 - DNA, 25 bp, Homo sapien
gcataggaagacactataagttggg

SEQ ID NO: 1998338 - DNA, 25 bp, Homo sapien
ttttttcaaaggcagtagctactag

SEQ ID NO: 1998339 - DNA, 25 bp, Homo sapien
gcacattacagatgcagtagagaag

SEQ ID NO: 1998340 - DNA, 25 bp, Homo sapien
cactgcaccggtccactgataggtt

SEQ ID NO: 1998341 - DNA, 25 bp, Homo sapien
cattgtgtgaaggtcagcaggccca

SEQ ID NO: 1998342 - DNA, 25 bp, Homo sapien
cttagtgctgaatacgaaacgaccg

SEQ ID NO: 1998343 - DNA, 25 bp, Homo sapien
cgtgaaaacgtcctgcaggtgcaaa

SEQ ID NO: 1998344 - DNA, 25 bp, Homo sapien
taacaaccgctggtagcatcttggg

SEQ ID NO: 1998345 - DNA, 25 bp, Homo sapien
ttttgctcgtcacctgcgcagaggc

SEQ ID NO: 1998346 - DNA, 25 bp, Homo sapien
taccgcctgcggagtaactgcaaag

SEQ ID NO: 1998347 - DNA, 25 bp, Homo sapien
tggtacagggcagacagttaactcg

SEQ ID NO: 1998348 - DNA, 25 bp, Homo sapien
gcaaagatgctgtccgtgcgcgttg

SEQ ID NO: 1998349 - DNA, 25 bp, Homo sapien
tggtgaacgcgaggggcagtacttc

SEQ ID NO: 1998350 - DNA, 25 bp, Homo sapien
gggagaggtggtgaacgcgaggggc

SEQ ID NO: 1998351 - DNA, 25 bp, Homo sapien
aataagtaacctgccaaaaaatgca

SEQ ID NO: 1998352 - DNA, 25 bp, Homo sapien
gagaggtggtgaacgcgaggggcag

SEQ ID NO: 1998353 - DNA, 25 bp, Homo sapien
gatctcatcaggttggccagcttgg

SEQ ID NO: 1998354 - DNA, 25 bp, Homo sapien
ggatctcatcaggttggccagcttg

SEQ ID NO: 1998355 - DNA, 25 bp, Homo sapien
aagatgggatctcatcaggttggcc

SEQ ID NO: 1998356 - DNA, 25 bp, Homo sapien
atgggatctcatcaggttggccagc

SEQ ID NO: 1998357 - DNA, 25 bp, Homo sapien
tgagactcctggccgttgagcccct

SEQ ID NO: 1998358 - DNA, 25 bp, Homo sapien
ctgtgcaaggctggtcgaaggctct

SEQ ID NO: 1998359 - DNA, 25 bp, Homo sapien
caaggctggtcgaaggctctggcat

SEQ ID NO: 1998360 - DNA, 25 bp, Homo sapien
gagcccctgtgcaaggctggtcgaa

SEQ ID NO: 1998361 - DNA, 25 bp, Homo sapien
tttactaggaactcctagcgggaga

SEQ ID NO: 1998362 - DNA, 25 bp, Homo sapien
taggaactcctagcgggagatgcgc

SEQ ID NO: 1998363 - DNA, 25 bp, Homo sapien
gcggctcccgccactttactaggaa

SEQ ID NO: 1998364 - DNA, 25 bp, Homo sapien
tgcggctcccgccactttactagga

SEQ ID NO: 1998365 - DNA, 25 bp, Homo sapien
tttctctctcctcctgcggctccat

SEQ ID NO: 1998366 - DNA, 25 bp, Homo sapien
gtttctctctcctcctgcggctcca

SEQ ID NO: 1998367 - DNA, 25 bp, Homo sapien
ctgtggaataggatgatctccaaat

SEQ ID NO: 1998368 - DNA, 25 bp, Homo sapien
gtggaataggatgatctccaaatat

SEQ ID NO: 1998369 - DNA, 25 bp, Homo sapien
gatgatctccaaatattttttttaa

SEQ ID NO: 1998370 - DNA, 25 bp, Homo sapien
tgtggaataggatgatctccaaata

SEQ ID NO: 1998371 - DNA, 25 bp, Homo sapien
ctgcttcaagtcctctattaccagg

SEQ ID NO: 1998372 - DNA, 25 bp, Homo sapien
tctgtggtccgtgggttcacctcat

SEQ ID NO: 1998373 - DNA, 25 bp, Homo sapien
caagtcctctattaccaggtagaca

SEQ ID NO: 1998374 - DNA, 25 bp, Homo sapien
gtcctctattaccaggtagacatcc

SEQ ID NO: 1998375 - DNA, 25 bp, Homo sapien
ttcaaaactctggacttaatctcac

SEQ ID NO: 1998376 - DNA, 25 bp, Homo sapien
tttattctcgttcaaaactctggac

SEQ ID NO: 1998377 - DNA, 25 bp, Homo sapien
ttctcgttcaaaactctggacttaa

SEQ ID NO: 1998378 - DNA, 25 bp, Homo sapien
ctctatttattctcgttcaaaactc

SEQ ID NO: 1998379 - DNA, 25 bp, Homo sapien
cacctggccctgctgtatattaact

SEQ ID NO: 1998380 - DNA, 25 bp, Homo sapien
ggccctgctgtatattaacttttaa

SEQ ID NO: 1998381 - DNA, 25 bp, Homo sapien
gcacctggccctgctgtatattaac

SEQ ID NO: 1998382 - DNA, 25 bp, Homo sapien
cctggccctgctgtatattaacttt

SEQ ID NO: 1998383 - DNA, 25 bp, Homo sapien
ggaggctgagtcaggagaattgctt

SEQ ID NO: 1998384 - DNA, 25 bp, Homo sapien
gagctgagatcacaccaaagcactc

SEQ ID NO: 1998385 - DNA, 25 bp, Homo sapien
atgtgcctgtaatcctagttattca

SEQ ID NO: 1998386 - DNA, 25 bp, Homo sapien
gaacccaagaggcggaggttgcagt

SEQ ID NO: 1998387 - DNA, 25 bp, Homo sapien
catgaggtaagatgacaatgttgca

SEQ ID NO: 1998388 - DNA, 25 bp, Homo sapien
gaattaacactagatttgcagcggc

SEQ ID NO: 1998389 - DNA, 25 bp, Homo sapien
tgggaattctagagtgcaataactg

SEQ ID NO: 1998390 - DNA, 25 bp, Homo sapien
gaagtaagattagtacctagcaagg

SEQ ID NO: 1998391 - DNA, 25 bp, Homo sapien
ctttttaggcgctttattcattttg

SEQ ID NO: 1998392 - DNA, 25 bp, Homo sapien
ctattttgtgtgagtttgagtccaa

SEQ ID NO: 1998393 - DNA, 25 bp, Homo sapien
tctattttgtgtgagtttgagtcca

SEQ ID NO: 1998394 - DNA, 25 bp, Homo sapien
ctggcctttttaggcgctttattca

SEQ ID NO: 1998395 - DNA, 25 bp, Homo sapien
tgtttcaagggccaccgcactgtca

SEQ ID NO: 1998396 - DNA, 25 bp, Homo sapien
gctagcgaggtatcctttgtttcaa

SEQ ID NO: 1998397 - DNA, 25 bp, Homo sapien
gagattggcgggggaaaaattcaca

SEQ ID NO: 1998398 - DNA, 25 bp, Homo sapien
gtcaaccaaagcattcagatacctg

SEQ ID NO: 1998399 - DNA, 25 bp, Homo sapien
gatttcttcacttttggatttggta

SEQ ID NO: 1998400 - DNA, 25 bp, Homo sapien
gatttggtacgaaagagatcagagg

SEQ ID NO: 1998401 - DNA, 25 bp, Homo sapien
tcacttttggatttggtacgaaaga

SEQ ID NO: 1998402 - DNA, 25 bp, Homo sapien
tctaatactaaagttgcagttaaat

SEQ ID NO: 1998403 - DNA, 25 bp, Homo sapien
agatgcaactctgctttcttgacat

SEQ ID NO: 1998404 - DNA, 25 bp, Homo sapien
ctgtagacagatgcaactctgcttt

SEQ ID NO: 1998405 - DNA, 25 bp, Homo sapien
atgcaactctgctttcttgacatcc

SEQ ID NO: 1998406 - DNA, 25 bp, Homo sapien
acagatgcaactctgctttcttgac

SEQ ID NO: 1998407 - DNA, 25 bp, Homo sapien
tgcagccttgattccaaatctgaat

SEQ ID NO: 1998408 - DNA, 25 bp, Homo sapien
gcagccttgattccaaatctgaatt

SEQ ID NO: 1998409 - DNA, 25 bp, Homo sapien
tgaaaagtgaccaccatcaaatatt

SEQ ID NO: 1998410 - DNA, 25 bp, Homo sapien
attatttgaaaagtgaccaccatca

SEQ ID NO: 1998411 - DNA, 25 bp, Homo sapien
aaattatttgaaaagtgaccaccat

SEQ ID NO: 1998412 - DNA, 25 bp, Homo sapien
gtgaccaccatcaaatatttttctt

SEQ ID NO: 1998413 - DNA, 25 bp, Homo sapien
gatagtgctactaaggactgatgag

SEQ ID NO: 1998414 - DNA, 25 bp, Homo sapien
gaagcatccatgcctctggctgaaa

SEQ ID NO: 1998415 - DNA, 25 bp, Homo sapien
ctctgatagtgctactaaggactga

SEQ ID NO: 1998416 - DNA, 25 bp, Homo sapien
agtgctactaaggactgatgagaca

SEQ ID NO: 1998417 - DNA, 25 bp, Homo sapien
ggtatagtctgttgctttaatcttg

SEQ ID NO: 1998418 - DNA, 25 bp, Homo sapien
cttcaaaggtatagtctgttgcttt

SEQ ID NO: 1998419 - DNA, 25 bp, Homo sapien
cggcattaagtctaaataggactcc

SEQ ID NO: 1998420 - DNA, 25 bp, Homo sapien
gtctgttgctttaatcttgccagtt

SEQ ID NO: 1998421 - DNA, 25 bp, Homo sapien
ctcagggaaggttggaggaaataat

SEQ ID NO: 1998422 - DNA, 25 bp, Homo sapien
cagggaaggttggaggaaataattg

SEQ ID NO: 1998423 - DNA, 25 bp, Homo sapien
tagttctcgctttgcttcttcaatt

SEQ ID NO: 1998424 - DNA, 25 bp, Homo sapien
aattttcacttgagcaagagacgga

SEQ ID NO: 1998425 - DNA, 25 bp, Homo sapien
cttcaattttcacttgagcaagaga

SEQ ID NO: 1998426 - DNA, 25 bp, Homo sapien
ttttcacttgagcaagagacggatt

SEQ ID NO: 1998427 - DNA, 25 bp, Homo sapien
taagcagccggactttatcacttgc

SEQ ID NO: 1998428 - DNA, 25 bp, Homo sapien
gctacagcttgagtaagtcctccat

SEQ ID NO: 1998429 - DNA, 25 bp, Homo sapien
tgtttcagcttatatgcctttgcaa

SEQ ID NO: 1998430 - DNA, 25 bp, Homo sapien
tctctcaatatattcccctttttcc

SEQ ID NO: 1998431 - DNA, 25 bp, Homo sapien
tcttgtaagttcagcttcaatgcta

SEQ ID NO: 1998432 - DNA, 25 bp, Homo sapien
ctactcttcttgtaagttcagcttc

SEQ ID NO: 1998433 - DNA, 25 bp, Homo sapien
tcacagttccatcatgtctactctt

SEQ ID NO: 1998434 - DNA, 25 bp, Homo sapien
cacagttccatcatgtctactcttc

SEQ ID NO: 1998435 - DNA, 25 bp, Homo sapien
agtcctattcaatttactttgttag

SEQ ID NO: 1998436 - DNA, 25 bp, Homo sapien
cacacagtaagaaaccatattctat

SEQ ID NO: 1998437 - DNA, 25 bp, Homo sapien
atatgaaaactatgtatttgggcac

SEQ ID NO: 1998438 - DNA, 25 bp, Homo sapien
gatattctgtaatctaagaacacag

SEQ ID NO: 1998439 - DNA, 25 bp, Homo sapien
ttgggcacaaaaatgcaacacacag

SEQ ID NO: 1998440 - DNA, 25 bp, Homo sapien
gcctgggcaatatagcgagaacctg

SEQ ID NO: 1998441 - DNA, 25 bp, Homo sapien
cagcctgggcaatatagcgagaacc

SEQ ID NO: 1998442 - DNA, 25 bp, Homo sapien
gccagcctgggcaatatagcgagaa

SEQ ID NO: 1998443 - DNA, 25 bp, Homo sapien
cctgggcaatatagcgagaacctgt

SEQ ID NO: 1998444 - DNA, 25 bp, Homo sapien
cttctcttttgtatggtgccccagc

SEQ ID NO: 1998445 - DNA, 25 bp, Homo sapien
ctaatctccattttgtgctgcagct

SEQ ID NO: 1998446 - DNA, 25 bp, Homo sapien
taccctccagtcattgttgcagttg

SEQ ID NO: 1998447 - DNA, 25 bp, Homo sapien
cagctcacaccttggtccacattta

SEQ ID NO: 1998448 - DNA, 25 bp, Homo sapien
cgagcagtgggtcgcggtcagagcc

SEQ ID NO: 1998449 - DNA, 25 bp, Homo sapien
aacaagccccggcagcgagcagtgg

SEQ ID NO: 1998450 - DNA, 25 bp, Homo sapien
ctgccgggaccaaagtgaacctcgc

SEQ ID NO: 1998451 - DNA, 25 bp, Homo sapien
ccgctgcggtgactcaggacgcgac

SEQ ID NO: 1998452 - DNA, 25 bp, Homo sapien
caagaatacaccttttgtgtaaata

SEQ ID NO: 1998453 - DNA, 25 bp, Homo sapien
ctatttagaatttggttgcccacaa

SEQ ID NO: 1998454 - DNA, 25 bp, Homo sapien
tcatacataagaaggggaacaaaac

SEQ ID NO: 1998455 - DNA, 25 bp, Homo sapien
tgacctatactttccctatacgtgt

SEQ ID NO: 1998456 - DNA, 25 bp, Homo sapien
tactggagtgcagtgggggcgatct

SEQ ID NO: 1998457 - DNA, 25 bp, Homo sapien
gttcaagtgattctgtgattctcgt

SEQ ID NO: 1998458 - DNA, 25 bp, Homo sapien
caagtgattctgtgattctcgtgcc

SEQ ID NO: 1998459 - DNA, 25 bp, Homo sapien
gtctggttcagtcatccatactgga

SEQ ID NO: 1998460 - DNA, 25 bp, Homo sapien
gttaaatcatggagtagagtctagg

SEQ ID NO: 1998461 - DNA, 25 bp, Homo sapien
agagtctaggaaatgatatcaaaga

SEQ ID NO: 1998462 - DNA, 25 bp, Homo sapien
tttcaagttaaatcatggagtagag

SEQ ID NO: 1998463 - DNA, 25 bp, Homo sapien
gtctaggaaatgatatcaaagatgc

SEQ ID NO: 1998464 - DNA, 25 bp, Homo sapien
tagaatccgctacaccatctttctg

SEQ ID NO: 1998465 - DNA, 25 bp, Homo sapien
tttaaccttggcgactcggccattc

SEQ ID NO: 1998466 - DNA, 25 bp, Homo sapien
ggtcactatcactggtactactgtc

SEQ ID NO: 1998467 - DNA, 25 bp, Homo sapien
gggcttcggactcaatgagttcttc

SEQ ID NO: 1998468 - DNA, 25 bp, Homo sapien
gaaagacattcttttcaacgtgagg

SEQ ID NO: 1998469 - DNA, 25 bp, Homo sapien
taccaatgagagctagaacaagcgg

SEQ ID NO: 1998470 - DNA, 25 bp, Homo sapien
cagtaccagatgcaataagaatggg

SEQ ID NO: 1998471 - DNA, 25 bp, Homo sapien
ggataactagcttctcatgcattga

SEQ ID NO: 1998472 - DNA, 25 bp, Homo sapien
cagaacttgaacacctataaagtgc

SEQ ID NO: 1998473 - DNA, 25 bp, Homo sapien
tattaagagttccatcaaggtcttg

SEQ ID NO: 1998474 - DNA, 25 bp, Homo sapien
tatggacaagacttattatcagaac

SEQ ID NO: 1998475 - DNA, 25 bp, Homo sapien
gaacaatagcaaaggaatccaatag

SEQ ID NO: 1998476 - DNA, 25 bp, Homo sapien
tagcaagaatacaatgcatgaacac

SEQ ID NO: 1998477 - DNA, 25 bp, Homo sapien
tattcaatagcaagaatacaatgca

SEQ ID NO: 1998478 - DNA, 25 bp, Homo sapien
caagaatacaatgcatgaacactca

SEQ ID NO: 1998479 - DNA, 25 bp, Homo sapien
atacaatgcatgaacactcaagctc

SEQ ID NO: 1998480 - DNA, 25 bp, Homo sapien
tgtttatacgaaaactccctcaaga

SEQ ID NO: 1998481 - DNA, 25 bp, Homo sapien
caaaaacctcatgaagtcggtcacc

SEQ ID NO: 1998482 - DNA, 25 bp, Homo sapien
gagacaaacatttagcccagctcta

SEQ ID NO: 1998483 - DNA, 25 bp, Homo sapien
cctattttcaatgcctaaaaggctg

SEQ ID NO: 1998484 - DNA, 25 bp, Homo sapien
tcattaatggctgaagtgccctgtg

SEQ ID NO: 1998485 - DNA, 25 bp, Homo sapien
tacaaacgctggtctgtgtgaagtg

SEQ ID NO: 1998486 - DNA, 25 bp, Homo sapien
gatacagaatacctctgggtcagct

SEQ ID NO: 1998487 - DNA, 25 bp, Homo sapien
taatacccagtagcatagtggtcca

SEQ ID NO: 1998488 - DNA, 25 bp, Homo sapien
tattgagacatcgaagatcttgatt

SEQ ID NO: 1998489 - DNA, 25 bp, Homo sapien
gaaaaaatgtggttcagtctattac

SEQ ID NO: 1998490 - DNA, 25 bp, Homo sapien
taacgttcctaagaaatattgagac

SEQ ID NO: 1998491 - DNA, 25 bp, Homo sapien
tatacgactctaaatataccgccta

SEQ ID NO: 1998492 - DNA, 25 bp, Homo sapien
tgttgcactataatttcagagggaa

SEQ ID NO: 1998493 - DNA, 25 bp, Homo sapien
tggatccagtcaatacaatactagc

SEQ ID NO: 1998494 - DNA, 25 bp, Homo sapien
gaaaagtagtccttaacatgatgaa

SEQ ID NO: 1998495 - DNA, 25 bp, Homo sapien
gaagcctgttaagtgcttgaagcag

SEQ ID NO: 1998496 - DNA, 25 bp, Homo sapien
taatattttggtataggttctaaga

SEQ ID NO: 1998497 - DNA, 25 bp, Homo sapien
ggttctaagaatttaatcagtgtat

SEQ ID NO: 1998498 - DNA, 25 bp, Homo sapien
aggtgcgaatcccacagaatctcag

SEQ ID NO: 1998499 - DNA, 25 bp, Homo sapien
tgtattctggcattccttatctttc

SEQ ID NO: 1998500 - DNA, 25 bp, Homo sapien
aatcattctgcatacaacttttaag

SEQ ID NO: 1998501 - DNA, 25 bp, Homo sapien
tacctttaggcaaagtcagctatat

SEQ ID NO: 1998502 - DNA, 25 bp, Homo sapien
aattaccagtaatatcaatttaggg

SEQ ID NO: 1998503 - DNA, 25 bp, Homo sapien
aataaatcagactgagcgctgtggc

SEQ ID NO: 1998504 - DNA, 25 bp, Homo sapien
acagtttggttgcaacttccactaa

SEQ ID NO: 1998505 - DNA, 25 bp, Homo sapien
agaatacacttctttgtggattatt

SEQ ID NO: 1998506 - DNA, 25 bp, Homo sapien
catgtcaaatgcacagtgaggaaaa

SEQ ID NO: 1998507 - DNA, 25 bp, Homo sapien
tattaggaataagacttaattgcca

SEQ ID NO: 1998508 - DNA, 25 bp, Homo sapien
gccgccaataaattgtccacattta

SEQ ID NO: 1998509 - DNA, 25 bp, Homo sapien
agccgccaataaattgtccacattt

SEQ ID NO: 1998510 - DNA, 25 bp, Homo sapien
attgagtggcgcattgccagatgtt

SEQ ID NO: 1998511 - DNA, 25 bp, Homo sapien
tcttcattgagtggcgcattgccag

SEQ ID NO: 1998512 - DNA, 25 bp, Homo sapien
ttgccagatgttttgtcacttgcta

SEQ ID NO: 1998513 - DNA, 25 bp, Homo sapien
ttcattgagtggcgcattgccagat

SEQ ID NO: 1998514 - DNA, 25 bp, Homo sapien
ggaaaaatgtcagccaaaggagtcc

SEQ ID NO: 1998515 - DNA, 25 bp, Homo sapien
tgtgtattaaatcgggtgcagcaaa

SEQ ID NO: 1998516 - DNA, 25 bp, Homo sapien
cacaatgcttgaaagtgataggcca

SEQ ID NO: 1998517 - DNA, 25 bp, Homo sapien
tttgatgactgaaggccaacggaac

SEQ ID NO: 1998518 - DNA, 25 bp, Homo sapien
tatcctcatccaaggtaaggtcaac

SEQ ID NO: 1998519 - DNA, 25 bp, Homo sapien
tgaagctgaagctatgacaatgaac

SEQ ID NO: 1998520 - DNA, 25 bp, Homo sapien
gaagaggagggaattttccatgagt

SEQ ID NO: 1998521 - DNA, 25 bp, Homo sapien
gctgaagctatgacaatgaacttcc

SEQ ID NO: 1998522 - DNA, 25 bp, Homo sapien
aagctatgacaatgaacttccatgt

SEQ ID NO: 1998523 - DNA, 25 bp, Homo sapien
aatgcacatgccctactaggtgcca

SEQ ID NO: 1998524 - DNA, 25 bp, Homo sapien
taggtgccaataaggacctgactga

SEQ ID NO: 1998525 - DNA, 25 bp, Homo sapien
gaatgccctaagatgggagtgccaa

SEQ ID NO: 1998526 - DNA, 25 bp, Homo sapien
gactgatatgtgtgcgaatgcccta

SEQ ID NO: 1998527 - DNA, 25 bp, Homo sapien
tcctctcggatttgcaagtgcctgt

SEQ ID NO: 1998528 - DNA, 25 bp, Homo sapien
tacagagaccagctatgaaagacgg

SEQ ID NO: 1998529 - DNA, 25 bp, Homo sapien
caaagggccatagcaacggtaacaa

SEQ ID NO: 1998530 - DNA, 25 bp, Homo sapien
ttcacggtaagaggagcaaaaggct

SEQ ID NO: 1998531 - DNA, 25 bp, Homo sapien
acctttatgctacagacttatttca

SEQ ID NO: 1998532 - DNA, 25 bp, Homo sapien
ttaacctttatgctacagacttatt

SEQ ID NO: 1998533 - DNA, 25 bp, Homo sapien
aacctttatgctacagacttatttc

SEQ ID NO: 1998534 - DNA, 25 bp, Homo sapien
ctttatgctacagacttatttcaaa

SEQ ID NO: 1998535 - DNA, 25 bp, Homo sapien
cacaaaagagttttcattctcagga

SEQ ID NO: 1998536 - DNA, 25 bp, Homo sapien
gcaactattaccctgaatttggtgt

SEQ ID NO: 1998537 - DNA, 25 bp, Homo sapien
cacgcatttggtgaacatagctaag

SEQ ID NO: 1998538 - DNA, 25 bp, Homo sapien
tgtgtccttgctacccaacttatga

SEQ ID NO: 1998539 - DNA, 25 bp, Homo sapien
gatatacaatcttagcattgaaagg

SEQ ID NO: 1998540 - DNA, 25 bp, Homo sapien
tcccttagcgataactaaacacatt

SEQ ID NO: 1998541 - DNA, 25 bp, Homo sapien
gtcttcacctatagatatacaatct

SEQ ID NO: 1998542 - DNA, 25 bp, Homo sapien
gagaagggcagggaatcttcagtaa

SEQ ID NO: 1998543 - DNA, 25 bp, Homo sapien
gacttcagaagtgggctgtagccag

SEQ ID NO: 1998544 - DNA, 25 bp, Homo sapien
ttgaggcaagaagatcgcctgggcc

SEQ ID NO: 1998545 - DNA, 25 bp, Homo sapien
aacactgggtgggtacatagcctga

SEQ ID NO: 1998546 - DNA, 25 bp, Homo sapien
gaccctccaggatgtgagaatgcat

SEQ ID NO: 1998547 - DNA, 25 bp, Homo sapien
gatatccccattccagtcaacgagg

SEQ ID NO: 1998548 - DNA, 25 bp, Homo sapien
gtcaacgaggagacataatccacaa

SEQ ID NO: 1998549 - DNA, 25 bp, Homo sapien
tggcgatagcaaacacagcggctgc

SEQ ID NO: 1998550 - DNA, 25 bp, Homo sapien
ttatctggctgtgacttgagaggca

SEQ ID NO: 1998551 - DNA, 25 bp, Homo sapien
cgtgtgccgcgggtattcacctcct

SEQ ID NO: 1998552 - DNA, 25 bp, Homo sapien
tgccgcgggtattcacctccttttg

SEQ ID NO: 1998553 - DNA, 25 bp, Homo sapien
cgcaccgtgtgccgcgggtattcac

SEQ ID NO: 1998554 - DNA, 25 bp, Homo sapien
caccgtgtgccgcgggtattcacct

SEQ ID NO: 1998555 - DNA, 25 bp, Homo sapien
ttggcatcagatggatccgaggata

SEQ ID NO: 1998556 - DNA, 25 bp, Homo sapien
tccaggacacgggatgtgtgaggac

SEQ ID NO: 1998557 - DNA, 25 bp, Homo sapien
ggccgtgcgtacatcaaatctgtta

SEQ ID NO: 1998558 - DNA, 25 bp, Homo sapien
ttctctcggctctgttttaagctcc

SEQ ID NO: 1998559 - DNA, 25 bp, Homo sapien
ccttgatacaggggcagtgcggcca

SEQ ID NO: 1998560 - DNA, 25 bp, Homo sapien
ctctctctgattccacttgcaggtg

SEQ ID NO: 1998561 - DNA, 25 bp, Homo sapien
cacatggtcaaattctgactctctc

SEQ ID NO: 1998562 - DNA, 25 bp, Homo sapien
cttcacatggtcaaattctgactct

SEQ ID NO: 1998563 - DNA, 25 bp, Homo sapien
ctgtctctttcattccgctgaggaa

SEQ ID NO: 1998564 - DNA, 25 bp, Homo sapien
gtctctttcattccgctgaggaatg

SEQ ID NO: 1998565 - DNA, 25 bp, Homo sapien
tttcattccgctgaggaatgagctg

SEQ ID NO: 1998566 - DNA, 25 bp, Homo sapien
cattccgctgaggaatgagctgaac

SEQ ID NO: 1998567 - DNA, 25 bp, Homo sapien
ttatcccctggaccagtcctcacca

SEQ ID NO: 1998568 - DNA, 25 bp, Homo sapien
aagagctttgggcaacaagtctcta

SEQ ID NO: 1998569 - DNA, 25 bp, Homo sapien
agggtgccctgcatgagccccttat

SEQ ID NO: 1998570 - DNA, 25 bp, Homo sapien
acaagtctctaacaaggactcaggc

SEQ ID NO: 1998571 - DNA, 25 bp, Homo sapien
caccacctgggtgcacccctgtcag

SEQ ID NO: 1998572 - DNA, 25 bp, Homo sapien
tcagccacttgttgccagagggtgg

SEQ ID NO: 1998573 - DNA, 25 bp, Homo sapien
ccacacccaacttctgctctctgca

SEQ ID NO: 1998574 - DNA, 25 bp, Homo sapien
agctgtgcccgagcaccccccaacc

SEQ ID NO: 1998575 - DNA, 25 bp, Homo sapien
actgtaggtggcttctccgtatacc

SEQ ID NO: 1998576 - DNA, 25 bp, Homo sapien
aactggctcacatagagatttctgg

SEQ ID NO: 1998577 - DNA, 25 bp, Homo sapien
gcattatgagttccaaacaactggc

SEQ ID NO: 1998578 - DNA, 25 bp, Homo sapien
acagcctggtcgacacgttgggaac

SEQ ID NO: 1998579 - DNA, 25 bp, Homo sapien
tgtcttgagagtaacaataggcttc

SEQ ID NO: 1998580 - DNA, 25 bp, Homo sapien
caacggtaagaaaattgccttgtct

SEQ ID NO: 1998581 - DNA, 25 bp, Homo sapien
ctaggcatcgggcagtctggatcca

SEQ ID NO: 1998582 - DNA, 25 bp, Homo sapien
gatccagggtacttgatgtttgtcg

SEQ ID NO: 1998583 - DNA, 25 bp, Homo sapien
actcccttggatggtctcccctctg

SEQ ID NO: 1998584 - DNA, 25 bp, Homo sapien
ctttgacacagacgtaggccagaac

SEQ ID NO: 1998585 - DNA, 25 bp, Homo sapien
gacgtaggccagaacttcaggctga

SEQ ID NO: 1998586 - DNA, 25 bp, Homo sapien
caggctgaattttagtccccactca

SEQ ID NO: 1998587 - DNA, 25 bp, Homo sapien
ttcccggcccctctcgacattcaaa

SEQ ID NO: 1998588 - DNA, 25 bp, Homo sapien
cctctcgacattcaaaggcgctggg

SEQ ID NO: 1998589 - DNA, 25 bp, Homo sapien
cagatggcccatggaaaggctccct

SEQ ID NO: 1998590 - DNA, 25 bp, Homo sapien
gcagctgccgccacacaaaggcgcg

SEQ ID NO: 1998591 - DNA, 25 bp, Homo sapien
tgcgcgcgggccctttgtggcgcgg

SEQ ID NO: 1998592 - DNA, 25 bp, Homo sapien
ctgcgcgcgggccctttgtggcgcg

SEQ ID NO: 1998593 - DNA, 25 bp, Homo sapien
gaagcacgagatagccgacgtggac

SEQ ID NO: 1998594 - DNA, 25 bp, Homo sapien
aacactggaagcacgagatagccga

SEQ ID NO: 1998595 - DNA, 25 bp, Homo sapien
acgagatagccgacgtggaccagga

SEQ ID NO: 1998596 - DNA, 25 bp, Homo sapien
gccgacgtggaccaggaccatcctg

SEQ ID NO: 1998597 - DNA, 25 bp, Homo sapien
gctagccagccatcggtactaatga

SEQ ID NO: 1998598 - DNA, 25 bp, Homo sapien
ttcactacaaaagctcccacgaggg

SEQ ID NO: 1998599 - DNA, 25 bp, Homo sapien
gaaaaccaagcatgctctcgcgcgc

SEQ ID NO: 1998600 - DNA, 25 bp, Homo sapien
tcctttcgatcatacagggctaggt

SEQ ID NO: 1998601 - DNA, 25 bp, Homo sapien
cacaagggcgatgcacaaaaagggt

SEQ ID NO: 1998602 - DNA, 25 bp, Homo sapien
cttgaacccgtgtatgcaactgtca

SEQ ID NO: 1998603 - DNA, 25 bp, Homo sapien
ggaccgtgcaaacacaccccattta

SEQ ID NO: 1998604 - DNA, 25 bp, Homo sapien
gaaaatcgtgcaagtgcccacgaga

SEQ ID NO: 1998605 - DNA, 25 bp, Homo sapien
tttccaagacgagaaatgtgagtcc

SEQ ID NO: 1998606 - DNA, 25 bp, Homo sapien
aagacatcattctgtgtatgaggga

SEQ ID NO: 1998607 - DNA, 25 bp, Homo sapien
aaatgcatctcggatttgcttggga

SEQ ID NO: 1998608 - DNA, 25 bp, Homo sapien
ccaagcttgccttttaggttctggg

SEQ ID NO: 1998609 - DNA, 25 bp, Homo sapien
cctgggtgctgccaagaagctaact

SEQ ID NO: 1998610 - DNA, 25 bp, Homo sapien
taaccgagcgctgtacattgtcaac

SEQ ID NO: 1998611 - DNA, 25 bp, Homo sapien
cacagtacgtttcagcagggtaaca

SEQ ID NO: 1998612 - DNA, 25 bp, Homo sapien
caattaagacgctatggccatggct

SEQ ID NO: 1998613 - DNA, 25 bp, Homo sapien
atgttactgcctctccttttacggg

SEQ ID NO: 1998614 - DNA, 25 bp, Homo sapien
tcagtgtcaggactcgagcctagct

SEQ ID NO: 1998615 - DNA, 25 bp, Homo sapien
gcgtgtgtcactctgcccatgggtt

SEQ ID NO: 1998616 - DNA, 25 bp, Homo sapien
tctaggcaccgggacacagtgatga

SEQ ID NO: 1998617 - DNA, 25 bp, Homo sapien
tgtgaatttttgacccaagcaaact

SEQ ID NO: 1998618 - DNA, 25 bp, Homo sapien
ttggttggtaaaaagtgcataggtg

SEQ ID NO: 1998619 - DNA, 25 bp, Homo sapien
tgctgtctctcgttaccacatcact

SEQ ID NO: 1998620 - DNA, 25 bp, Homo sapien
tttcaactgggtcatcaacagccag

SEQ ID NO: 1998621 - DNA, 25 bp, Homo sapien
cacagcaggatactgtggggcactg

SEQ ID NO: 1998622 - DNA, 25 bp, Homo sapien
gccagagacatcatgcagtgacctg

SEQ ID NO: 1998623 - DNA, 25 bp, Homo sapien
tttcctgttgtctaggattggtgag

SEQ ID NO: 1998624 - DNA, 25 bp, Homo sapien
gtctaggattggtgagtaaacccat

SEQ ID NO: 1998625 - DNA, 25 bp, Homo sapien
gttgtctaggattggtgagtaaacc

SEQ ID NO: 1998626 - DNA, 25 bp, Homo sapien
cctgttgtctaggattggtgagtaa

SEQ ID NO: 1998627 - DNA, 25 bp, Homo sapien
tctccacaatgccccattcctgcac

SEQ ID NO: 1998628 - DNA, 25 bp, Homo sapien
aatctccacaatgccccattcctgc

SEQ ID NO: 1998629 - DNA, 25 bp, Homo sapien
tcctgcaccaacacccagcgggcag

SEQ ID NO: 1998630 - DNA, 25 bp, Homo sapien
tgcaccaacacccagcgggcaggaa

SEQ ID NO: 1998631 - DNA, 25 bp, Homo sapien
ggcgtccagacagggtatgaagctc

SEQ ID NO: 1998632 - DNA, 25 bp, Homo sapien
ccagacagggtatgaagctctggca

SEQ ID NO: 1998633 - DNA, 25 bp, Homo sapien
ccagctccagtcctatgtagatggg

SEQ ID NO: 1998634 - DNA, 25 bp, Homo sapien
gctgattaaacagcataagggccag

SEQ ID NO: 1998635 - DNA, 25 bp, Homo sapien
ttcttggtccgaaagaagctgtctc

SEQ ID NO: 1998636 - DNA, 25 bp, Homo sapien
gagcaaagccccacatacgtgaaag

SEQ ID NO: 1998637 - DNA, 25 bp, Homo sapien
ggacattatagcacattcggagcaa

SEQ ID NO: 1998638 - DNA, 25 bp, Homo sapien
tatgacacttctgagtttctggcag

SEQ ID NO: 1998639 - DNA, 25 bp, Homo sapien
ccttatgtgtcccatcagggtaagg

SEQ ID NO: 1998640 - DNA, 25 bp, Homo sapien
cctatccttatgtgtcccatcaggg

SEQ ID NO: 1998641 - DNA, 25 bp, Homo sapien
ggcccaacgccaaggaggcaggtcc

SEQ ID NO: 1998642 - DNA, 25 bp, Homo sapien
aggattctgggctagaggggccaga

SEQ ID NO: 1998643 - DNA, 25 bp, Homo sapien
agcctaacgggttcagtccttcaca

SEQ ID NO: 1998644 - DNA, 25 bp, Homo sapien
gcctaacgggttcagtccttcacac

SEQ ID NO: 1998645 - DNA, 25 bp, Homo sapien
ctcctcctccaccttaactgtggga

SEQ ID NO: 1998646 - DNA, 25 bp, Homo sapien
ctcctccaccttaactgtgggaagc

SEQ ID NO: 1998647 - DNA, 25 bp, Homo sapien
acatttcgatgagtgtcagtcaaac

SEQ ID NO: 1998648 - DNA, 25 bp, Homo sapien
gccttggggctcacgtgggtattca

SEQ ID NO: 1998649 - DNA, 25 bp, Homo sapien
ggtattcacatttcgatgagtgtca

SEQ ID NO: 1998650 - DNA, 25 bp, Homo sapien
gggctcacgtgggtattcacatttc

SEQ ID NO: 1998651 - DNA, 25 bp, Homo sapien
catatgcctaacaagcagcagaggc

SEQ ID NO: 1998652 - DNA, 25 bp, Homo sapien
gagtgacttgggtacccacttcctg

SEQ ID NO: 1998653 - DNA, 25 bp, Homo sapien
tgtccgtctccagttacctcgaggg

SEQ ID NO: 1998654 - DNA, 25 bp, Homo sapien
tttgacccggtcactccagctagac

SEQ ID NO: 1998655 - DNA, 25 bp, Homo sapien
gccggtgagtggaggcgccatggga

SEQ ID NO: 1998656 - DNA, 25 bp, Homo sapien
gtgctatgaagttctaatggtggga

SEQ ID NO: 1998657 - DNA, 25 bp, Homo sapien
tggttacgttttaaggagctggtgc

SEQ ID NO: 1998658 - DNA, 25 bp, Homo sapien
gcgccatgggagttgacctccacac

SEQ ID NO: 1998659 - DNA, 25 bp, Homo sapien
ccttcctattgaggtgtgcagaaca

SEQ ID NO: 1998660 - DNA, 25 bp, Homo sapien
gagaattgtttcgtctgatgcccct

SEQ ID NO: 1998661 - DNA, 25 bp, Homo sapien
tcaagacatgctagggtggctacct

SEQ ID NO: 1998662 - DNA, 25 bp, Homo sapien
caagcccggccctgtgaatacggtg

SEQ ID NO: 1998663 - DNA, 25 bp, Homo sapien
ggcctgatcatagttaaagttgcca

SEQ ID NO: 1998664 - DNA, 25 bp, Homo sapien
gatcatagttaaagttgccaaactg

SEQ ID NO: 1998665 - DNA, 25 bp, Homo sapien
gcaaattccctgcaacatctaccct

SEQ ID NO: 1998666 - DNA, 25 bp, Homo sapien
aattccctgcaacatctaccctcct

SEQ ID NO: 1998667 - DNA, 25 bp, Homo sapien
gaggtccacttctctcatgttccca

SEQ ID NO: 1998668 - DNA, 25 bp, Homo sapien
cagctttctctggagactcattagg

SEQ ID NO: 1998669 - DNA, 25 bp, Homo sapien
cactggtctaccaaggagccttcag

SEQ ID NO: 1998670 - DNA, 25 bp, Homo sapien
catgttcccactggagagtttgtgc

SEQ ID NO: 1998671 - DNA, 25 bp, Homo sapien
tctccatgacgaccagcacgagcgg

SEQ ID NO: 1998672 - DNA, 25 bp, Homo sapien
acactgacccttgtgcccacccggg

SEQ ID NO: 1998673 - DNA, 25 bp, Homo sapien
cggccgccacactgacccttgtgcc

SEQ ID NO: 1998674 - DNA, 25 bp, Homo sapien
atctccatgacgaccagcacgagcg

SEQ ID NO: 1998675 - DNA, 25 bp, Homo sapien
gtagcgtgaggatgctgagaccttt

SEQ ID NO: 1998676 - DNA, 25 bp, Homo sapien
gaagtggcggcaggaggtagcgtga

SEQ ID NO: 1998677 - DNA, 25 bp, Homo sapien
cggcaggaggtagcgtgaggatgct

SEQ ID NO: 1998678 - DNA, 25 bp, Homo sapien
caggtggaagtggcggcaggaggta

SEQ ID NO: 1998679 - DNA, 25 bp, Homo sapien
ggccagcgggaagtcgggagcgagc

SEQ ID NO: 1998680 - DNA, 25 bp, Homo sapien
cacggggtgggccagcgggaagtcg

SEQ ID NO: 1998681 - DNA, 25 bp, Homo sapien
ctggctgcgactgcacggggtgggc

SEQ ID NO: 1998682 - DNA, 25 bp, Homo sapien
actgcacggggtgggccagcgggaa

SEQ ID NO: 1998683 - DNA, 25 bp, Homo sapien
gggtcagcgactggtgcagggcgcc

SEQ ID NO: 1998684 - DNA, 25 bp, Homo sapien
tgcagggcgccgctgtgctggtggg

SEQ ID NO: 1998685 - DNA, 25 bp, Homo sapien
gggacctgtgacgtcctggaactgc

SEQ ID NO: 1998686 - DNA, 25 bp, Homo sapien
aggaggtattgctggtgcagggcct

SEQ ID NO: 1998687 - DNA, 25 bp, Homo sapien
tggacagatacacgctcctgactcc

SEQ ID NO: 1998688 - DNA, 25 bp, Homo sapien
tgggggtggacagatacacgctcct

SEQ ID NO: 1998689 - DNA, 25 bp, Homo sapien
ggtggacagatacacgctcctgact

SEQ ID NO: 1998690 - DNA, 25 bp, Homo sapien
ggggtggacagatacacgctcctga

SEQ ID NO: 1998691 - DNA, 25 bp, Homo sapien
cagtcagtgccctcagccaaatacc

SEQ ID NO: 1998692 - DNA, 25 bp, Homo sapien
gtcagtgccctcagccaaatacctg

SEQ ID NO: 1998693 - DNA, 25 bp, Homo sapien
tcagccaaatacctgggctgaggtg

SEQ ID NO: 1998694 - DNA, 25 bp, Homo sapien
agtcagtgccctcagccaaatacct

SEQ ID NO: 1998695 - DNA, 25 bp, Homo sapien
gaatttccgcttctactggtgatag

SEQ ID NO: 1998696 - DNA, 25 bp, Homo sapien
cgttatataacaagcaatgcagact

SEQ ID NO: 1998697 - DNA, 25 bp, Homo sapien
tcaagccttaatcttggtgccaagg

SEQ ID NO: 1998698 - DNA, 25 bp, Homo sapien
cacaagaatgcaaccagtaaaatcc

SEQ ID NO: 1998699 - DNA, 25 bp, Homo sapien
aagtggtgcattcgaggagtggcta

SEQ ID NO: 1998700 - DNA, 25 bp, Homo sapien
tctgggaaagtggtgcattcgagga

SEQ ID NO: 1998701 - DNA, 25 bp, Homo sapien
gagtggctaggtaatgctgatagtg

SEQ ID NO: 1998702 - DNA, 25 bp, Homo sapien
ggagtggctaggtaatgctgatagt

SEQ ID NO: 1998703 - DNA, 25 bp, Homo sapien
gggtagtttcggatttcatggacga

SEQ ID NO: 1998704 - DNA, 25 bp, Homo sapien
taagggtagtttcggatttcatgga

SEQ ID NO: 1998705 - DNA, 25 bp, Homo sapien
agggtagtttcggatttcatggacg

SEQ ID NO: 1998706 - DNA, 25 bp, Homo sapien
ggtagtttcggatttcatggacgac

SEQ ID NO: 1998707 - DNA, 25 bp, Homo sapien
cccgtacggcggaggtgtgtctgct

SEQ ID NO: 1998708 - DNA, 25 bp, Homo sapien
ctcatagctctcccgtacggcggag

SEQ ID NO: 1998709 - DNA, 25 bp, Homo sapien
tagctctcccgtacggcggaggtgt

SEQ ID NO: 1998710 - DNA, 25 bp, Homo sapien
catagctctcccgtacggcggaggt

SEQ ID NO: 1998711 - DNA, 25 bp, Homo sapien
ctccccgagtcacattacccaacct

SEQ ID NO: 1998712 - DNA, 25 bp, Homo sapien
agtcacattacccaacctgtcctcg

SEQ ID NO: 1998713 - DNA, 25 bp, Homo sapien
gtgaacctctcaatggtgttctgta

SEQ ID NO: 1998714 - DNA, 25 bp, Homo sapien
tcaatggtgttctgtacagctcccc

SEQ ID NO: 1998715 - DNA, 25 bp, Homo sapien
taaatccagtgccttgagaggagct

SEQ ID NO: 1998716 - DNA, 25 bp, Homo sapien
tctcatgagggagtgaagacggtcc

SEQ ID NO: 1998717 - DNA, 25 bp, Homo sapien
ggtagaaccgagagtcaaaattggc

SEQ ID NO: 1998718 - DNA, 25 bp, Homo sapien
gctctcgaccaatgcaccctagggt

SEQ ID NO: 1998719 - DNA, 25 bp, Homo sapien
cagacaaattgtgcatttctcatct

SEQ ID NO: 1998720 - DNA, 25 bp, Homo sapien
tcttccagcatagacagacaaattg

SEQ ID NO: 1998721 - DNA, 25 bp, Homo sapien
acaaattgtgcatttctcatctgtg

SEQ ID NO: 1998722 - DNA, 25 bp, Homo sapien
ctccatcttccagcatagacagaca

SEQ ID NO: 1998723 - DNA, 25 bp, Homo sapien
tcagctgtcggctcccagttgtgtc

SEQ ID NO: 1998724 - DNA, 25 bp, Homo sapien
tttcttgctcatggcgagccactgg

SEQ ID NO: 1998725 - DNA, 25 bp, Homo sapien
cacagttggtgaaagagatgcatac

SEQ ID NO: 1998726 - DNA, 25 bp, Homo sapien
tctcaatgtccactcggcagatggg

SEQ ID NO: 1998727 - DNA, 25 bp, Homo sapien
taagctaacatgctccggctgccat

SEQ ID NO: 1998728 - DNA, 25 bp, Homo sapien
tagcgacatgtccaccacaagatga

SEQ ID NO: 1998729 - DNA, 25 bp, Homo sapien
tacatggttcctacgtggtcgagag

SEQ ID NO: 1998730 - DNA, 25 bp, Homo sapien
gaaatagctagagacccctacatgg

SEQ ID NO: 1998731 - DNA, 25 bp, Homo sapien
catgaaccagtcgtgctagaagctc

SEQ ID NO: 1998732 - DNA, 25 bp, Homo sapien
cattgggtaccagtagctgagggcc

SEQ ID NO: 1998733 - DNA, 25 bp, Homo sapien
tacactggagctactgagttggacg

SEQ ID NO: 1998734 - DNA, 25 bp, Homo sapien
gccagagcagctattcccgcatgaa

SEQ ID NO: 1998735 - DNA, 25 bp, Homo sapien
gaatgtatccaaagaggccagcacc

SEQ ID NO: 1998736 - DNA, 25 bp, Homo sapien
catgcgtctcagtcaagaaagggtc

SEQ ID NO: 1998737 - DNA, 25 bp, Homo sapien
taagaatacttgcacggaggctggg

SEQ ID NO: 1998738 - DNA, 25 bp, Homo sapien
tctacgcgcgcaggagatgaaacac

SEQ ID NO: 1998739 - DNA, 25 bp, Homo sapien
gcagtatggcgaatctcggtctcca

SEQ ID NO: 1998740 - DNA, 25 bp, Homo sapien
cagtatggcgaatctcggtctccac

SEQ ID NO: 1998741 - DNA, 25 bp, Homo sapien
gtatggcgaatctcggtctccactt

SEQ ID NO: 1998742 - DNA, 25 bp, Homo sapien
gggcagtatggcgaatctcggtctc

SEQ ID NO: 1998743 - DNA, 25 bp, Homo sapien
tgcagagcagcataaggcatgcccg

SEQ ID NO: 1998744 - DNA, 25 bp, Homo sapien
actccacgggcttgtctccagggaa

SEQ ID NO: 1998745 - DNA, 25 bp, Homo sapien
cagcaggaggattacaaaaaaggac

SEQ ID NO: 1998746 - DNA, 25 bp, Homo sapien
gctgagaaattagccgcatccgagg

SEQ ID NO: 1998747 - DNA, 25 bp, Homo sapien
ctggatgttttctgagaacctttct

SEQ ID NO: 1998748 - DNA, 25 bp, Homo sapien
gatgttttctgagaacctttctcct

SEQ ID NO: 1998749 - DNA, 25 bp, Homo sapien
tttctgagaacctttctcctgggtg

SEQ ID NO: 1998750 - DNA, 25 bp, Homo sapien
tgttttctgagaacctttctcctgg

SEQ ID NO: 1998751 - DNA, 25 bp, Homo sapien
tcaacaacataccccaggaccttag

SEQ ID NO: 1998752 - DNA, 25 bp, Homo sapien
cgatggggtagtgctggcctggctc

SEQ ID NO: 1998753 - DNA, 25 bp, Homo sapien
ggcctggctcaacaacataccccag

SEQ ID NO: 1998754 - DNA, 25 bp, Homo sapien
caacataccccaggaccttagagag

SEQ ID NO: 1998755 - DNA, 25 bp, Homo sapien
cgttttgcatggacccatggtcctc

SEQ ID NO: 1998756 - DNA, 25 bp, Homo sapien
tggacccatggtcctcggcaccaat

SEQ ID NO: 1998757 - DNA, 25 bp, Homo sapien
acccatggtcctcggcaccaatggt

SEQ ID NO: 1998758 - DNA, 25 bp, Homo sapien
tgcatggacccatggtcctcggcac

SEQ ID NO: 1998759 - DNA, 25 bp, Homo sapien
gaatggccctctggataacataggt

SEQ ID NO: 1998760 - DNA, 25 bp, Homo sapien
ccgtaaccttgtcaatctcgcccat

SEQ ID NO: 1998761 - DNA, 25 bp, Homo sapien
ctgcgaatggccctctggataacat

SEQ ID NO: 1998762 - DNA, 25 bp, Homo sapien
gcgaatggccctctggataacatag

SEQ ID NO: 1998763 - DNA, 25 bp, Homo sapien
agttctttctggggcgatgctgttg

SEQ ID NO: 1998764 - DNA, 25 bp, Homo sapien
cggagaatggaataatctgactcac

SEQ ID NO: 1998765 - DNA, 25 bp, Homo sapien
ccacatccatgattctgtccagtca

SEQ ID NO: 1998766 - DNA, 25 bp, Homo sapien
tggctttggccaatcggagaatgga

SEQ ID NO: 1998767 - DNA, 25 bp, Homo sapien
cttttcctctgagctccccactgct

SEQ ID NO: 1998768 - DNA, 25 bp, Homo sapien
tttcctctgagctccccactgctgt

SEQ ID NO: 1998769 - DNA, 25 bp, Homo sapien
tcctctgagctccccactgctgtgg

SEQ ID NO: 1998770 - DNA, 25 bp, Homo sapien
tctgagctccccactgctgtggagc

SEQ ID NO: 1998771 - DNA, 25 bp, Homo sapien
ctggtgccccttactagctctggat

SEQ ID NO: 1998772 - DNA, 25 bp, Homo sapien
gggagtttgcctggcaacacctcta

SEQ ID NO: 1998773 - DNA, 25 bp, Homo sapien
tgtaaaacttgtctcttgggtggga

SEQ ID NO: 1998774 - DNA, 25 bp, Homo sapien
tgtgggccttcaagtcatacccctc

SEQ ID NO: 1998775 - DNA, 25 bp, Homo sapien
gagagtcacactgctagtgaatggt

SEQ ID NO: 1998776 - DNA, 25 bp, Homo sapien
tcaagaggttcaatgctgagagtca

SEQ ID NO: 1998777 - DNA, 25 bp, Homo sapien
catcccctttgacggatgagaaaac

SEQ ID NO: 1998778 - DNA, 25 bp, Homo sapien
tatccaagaatctctagaggcaagc

SEQ ID NO: 1998779 - DNA, 25 bp, Homo sapien
gaagaagtggatttggctttgttct

SEQ ID NO: 1998780 - DNA, 25 bp, Homo sapien
ggctgctggcttaagattgagttgt

SEQ ID NO: 1998781 - DNA, 25 bp, Homo sapien
tcaggaaggtaagggcgtctgttct

SEQ ID NO: 1998782 - DNA, 25 bp, Homo sapien
tgatccttggagtcctcgccctcca

SEQ ID NO: 1998783 - DNA, 25 bp, Homo sapien
cttcgcgatcccttgctgcgggccc

SEQ ID NO: 1998784 - DNA, 25 bp, Homo sapien
ctgcgggcccggagatcaaacgtgg

SEQ ID NO: 1998785 - DNA, 25 bp, Homo sapien
gcccggagatcaaacgtggcccgcc

SEQ ID NO: 1998786 - DNA, 25 bp, Homo sapien
gcgggcccggagatcaaacgtggcc

SEQ ID NO: 1998787 - DNA, 25 bp, Homo sapien
tgagggtcccaacagctgaaatcaa

SEQ ID NO: 1998788 - DNA, 25 bp, Homo sapien
tgtaagggctccatatggccatgcc

SEQ ID NO: 1998789 - DNA, 25 bp, Homo sapien
taggtcttacatctgggcacggcat

SEQ ID NO: 1998790 - DNA, 25 bp, Homo sapien
aaatcaatgtgtaggcggctggagc

SEQ ID NO: 1998791 - DNA, 25 bp, Homo sapien
tctccgctagattgcattgaaaatg

SEQ ID NO: 1998792 - DNA, 25 bp, Homo sapien
gcagttctaacaggacaacaccttc

SEQ ID NO: 1998793 - DNA, 25 bp, Homo sapien
tacagtgctctgagtgcagttctaa

SEQ ID NO: 1998794 - DNA, 25 bp, Homo sapien
tcagagaggatgcttcaggttaaat

SEQ ID NO: 1998795 - DNA, 25 bp, Homo sapien
cactgtcctgtagtacttgttggtt

SEQ ID NO: 1998796 - DNA, 25 bp, Homo sapien
ctgcactagggtcactgtcctgtag

SEQ ID NO: 1998797 - DNA, 25 bp, Homo sapien
gggtcactgtcctgtagtacttgtt

SEQ ID NO: 1998798 - DNA, 25 bp, Homo sapien
cactagggtcactgtcctgtagtac

SEQ ID NO: 1998799 - DNA, 25 bp, Homo sapien
cagctctggatagatgtccaaatcc

SEQ ID NO: 1998800 - DNA, 25 bp, Homo sapien
ggccacagctctggatagatgtcca

SEQ ID NO: 1998801 - DNA, 25 bp, Homo sapien
ccagtggacgggaaagcgggcagca

SEQ ID NO: 1998802 - DNA, 25 bp, Homo sapien
gggactgcccagtggacgggaaagc

SEQ ID NO: 1998803 - DNA, 25 bp, Homo sapien
gcctcctttggagtggagcaccgaa

SEQ ID NO: 1998804 - DNA, 25 bp, Homo sapien
gggaactgttctgcatttggaggtc

SEQ ID NO: 1998805 - DNA, 25 bp, Homo sapien
tgatggtgtcacatgattctgggct

SEQ ID NO: 1998806 - DNA, 25 bp, Homo sapien
ctgcttgggccctttgattccccga

SEQ ID NO: 1998807 - DNA, 25 bp, Homo sapien
tcaagcctgggtaacttggatgtta

SEQ ID NO: 1998808 - DNA, 25 bp, Homo sapien
caagcctgggtaacttggatgttaa

SEQ ID NO: 1998809 - DNA, 25 bp, Homo sapien
ggtaacttggatgttaatggcacta

SEQ ID NO: 1998810 - DNA, 25 bp, Homo sapien
cctgggtaacttggatgttaatggc

SEQ ID NO: 1998811 - DNA, 25 bp, Homo sapien
tctgtcctaaggtaattgtaaaggc

SEQ ID NO: 1998812 - DNA, 25 bp, Homo sapien
gaaaatagtttcgtgcctgaggtct

SEQ ID NO: 1998813 - DNA, 25 bp, Homo sapien
cacagtgtaattggtgctgaaaata

SEQ ID NO: 1998814 - DNA, 25 bp, Homo sapien
ctttctgacaattaggtgagccact

SEQ ID NO: 1998815 - DNA, 25 bp, Homo sapien
gcagtagttgcacatagttgccagt

SEQ ID NO: 1998816 - DNA, 25 bp, Homo sapien
tgttgctgctctaaatacagatgca

SEQ ID NO: 1998817 - DNA, 25 bp, Homo sapien
tagatttccaaaccatgttgcagtt

SEQ ID NO: 1998818 - DNA, 25 bp, Homo sapien
aacaaacccaaatctacgagcagta

SEQ ID NO: 1998819 - DNA, 25 bp, Homo sapien
gatttctcaaactgaagtgcccagg

SEQ ID NO: 1998820 - DNA, 25 bp, Homo sapien
gcccaggtgtggactcatcaatttc

SEQ ID NO: 1998821 - DNA, 25 bp, Homo sapien
tagggacatcctacttaagagttgg

SEQ ID NO: 1998822 - DNA, 25 bp, Homo sapien
catcaatttccgttagaatagggac

SEQ ID NO: 1998823 - DNA, 25 bp, Homo sapien
caagaaccaaatgacatgcaaggat

SEQ ID NO: 1998824 - DNA, 25 bp, Homo sapien
cacagaagactgcaacaagaaccaa

SEQ ID NO: 1998825 - DNA, 25 bp, Homo sapien
tggatggagtctacaaatcagtgaa

SEQ ID NO: 1998826 - DNA, 25 bp, Homo sapien
cactttcatacgttaatggatggag

SEQ ID NO: 1998827 - DNA, 25 bp, Homo sapien
aactgctttttcttggatctctagt

SEQ ID NO: 1998828 - DNA, 25 bp, Homo sapien
gaactgctttttcttggatctctag

SEQ ID NO: 1998829 - DNA, 25 bp, Homo sapien
tgattctgggaatcattcatcagaa

SEQ ID NO: 1998830 - DNA, 25 bp, Homo sapien
attctgggaatcattcatcagaact

SEQ ID NO: 1998831 - DNA, 25 bp, Homo sapien
aagagagtttagtcacacagggagg

SEQ ID NO: 1998832 - DNA, 25 bp, Homo sapien
gttagcgcagcaattcccgagtgtg

SEQ ID NO: 1998833 - DNA, 25 bp, Homo sapien
tgtgcagagcgttggactatgtact

SEQ ID NO: 1998834 - DNA, 25 bp, Homo sapien
tagctcagaacccagtaacccttga

SEQ ID NO: 1998835 - DNA, 25 bp, Homo sapien
aacatcataaacatgaatcttctga

SEQ ID NO: 1998836 - DNA, 25 bp, Homo sapien
ttaaacatcataaacatgaatcttc

SEQ ID NO: 1998837 - DNA, 25 bp, Homo sapien
catcataaacatgaatcttctgaat

SEQ ID NO: 1998838 - DNA, 25 bp, Homo sapien
aaacatcataaacatgaatcttctg

SEQ ID NO: 1998839 - DNA, 25 bp, Homo sapien
acctagccaaactttcaataatagt

SEQ ID NO: 1998840 - DNA, 25 bp, Homo sapien
ttgatttgaatttataggctcaagc

SEQ ID NO: 1998841 - DNA, 25 bp, Homo sapien
gtgaaacactcttgggatcatatca

SEQ ID NO: 1998842 - DNA, 25 bp, Homo sapien
catgtataggacagcatgtgtggga

SEQ ID NO: 1998843 - DNA, 25 bp, Homo sapien
ctcttgggatcatatcaaacagcat

SEQ ID NO: 1998844 - DNA, 25 bp, Homo sapien
gcattaacatgtttgggccaaccaa

SEQ ID NO: 1998845 - DNA, 25 bp, Homo sapien
atctaaacatttacgcccagggcct

SEQ ID NO: 1998846 - DNA, 25 bp, Homo sapien
taaaatccttgagtcggtgagccat

SEQ ID NO: 1998847 - DNA, 25 bp, Homo sapien
ggcggtagccgtgataaattgaaca

SEQ ID NO: 1998848 - DNA, 25 bp, Homo sapien
tataattagcaacaaggggataagg

SEQ ID NO: 1998849 - DNA, 25 bp, Homo sapien
ctgctcctaacccataccattcgaa

SEQ ID NO: 1998850 - DNA, 25 bp, Homo sapien
ctataacatctgctcctaacccata

SEQ ID NO: 1998851 - DNA, 25 bp, Homo sapien
gattcttatggggtcccgtcctata

SEQ ID NO: 1998852 - DNA, 25 bp, Homo sapien
tgtgacttacagattgggactcgca

SEQ ID NO: 1998853 - DNA, 25 bp, Homo sapien
tacaagacgtgtttgggcatgtcag

SEQ ID NO: 1998854 - DNA, 25 bp, Homo sapien
gacaaggaagttgatctcgagaaca

SEQ ID NO: 1998855 - DNA, 25 bp, Homo sapien
tattccctggttctgtgtcgtgtcc

SEQ ID NO: 1998856 - DNA, 25 bp, Homo sapien
caaatcatcggttttcagtttggat

SEQ ID NO: 1998857 - DNA, 25 bp, Homo sapien
catcacctgtagaacctgacttggc

SEQ ID NO: 1998858 - DNA, 25 bp, Homo sapien
gtatagacgccgatatccacgaact

SEQ ID NO: 1998859 - DNA, 25 bp, Homo sapien
gatatccacgaactcttgaaggact

SEQ ID NO: 1998860 - DNA, 25 bp, Homo sapien
tgggatctggtaagatttgccaaac

SEQ ID NO: 1998861 - DNA, 25 bp, Homo sapien
cttgggagcctttgagagttagcgc

SEQ ID NO: 1998862 - DNA, 25 bp, Homo sapien
ccattcttggtagtgttcatagcag

SEQ ID NO: 1998863 - DNA, 25 bp, Homo sapien
acagttttaactgaagtgggctgac

SEQ ID NO: 1998864 - DNA, 25 bp, Homo sapien
atttccaatattgtggtctgctggt

SEQ ID NO: 1998865 - DNA, 25 bp, Homo sapien
aaggtccctgctacactttaacctg

SEQ ID NO: 1998866 - DNA, 25 bp, Homo sapien
tattgtggtctgctggtggcagtca

SEQ ID NO: 1998867 - DNA, 25 bp, Homo sapien
tccctgctacactttaacctggtta

SEQ ID NO: 1998868 - DNA, 25 bp, Homo sapien
acacaaacctgatcagcagattatc

SEQ ID NO: 1998869 - DNA, 25 bp, Homo sapien
catagccgggggcttagagtcaaag

SEQ ID NO: 1998870 - DNA, 25 bp, Homo sapien
agcacacaaacctgatcagcagatt

SEQ ID NO: 1998871 - DNA, 25 bp, Homo sapien
ggggcttagagtcaaagcacacaaa

SEQ ID NO: 1998872 - DNA, 25 bp, Homo sapien
aattcatatgacgtgcccaacagag

SEQ ID NO: 1998873 - DNA, 25 bp, Homo sapien
tctgtgcagacccatgttaccctac

SEQ ID NO: 1998874 - DNA, 25 bp, Homo sapien
ggctgggcacatgcagtaagcatca

SEQ ID NO: 1998875 - DNA, 25 bp, Homo sapien
ttgaagatgaactgtaccccgccct

SEQ ID NO: 1998876 - DNA, 25 bp, Homo sapien
ggaggggcacatggggacccgacat

SEQ ID NO: 1998877 - DNA, 25 bp, Homo sapien
gcgccctccaggaggggcacatggg

SEQ ID NO: 1998878 - DNA, 25 bp, Homo sapien
ccaggaggggcacatggggacccga

SEQ ID NO: 1998879 - DNA, 25 bp, Homo sapien
ggggcgccctccaggaggggcacat

SEQ ID NO: 1998880 - DNA, 25 bp, Homo sapien
cagcgggagtgggtgcggcggcagc

SEQ ID NO: 1998881 - DNA, 25 bp, Homo sapien
ggtggcggcagcgtcgttggcggca

SEQ ID NO: 1998882 - DNA, 25 bp, Homo sapien
aaatggcggatttcgaagagttgag

SEQ ID NO: 1998883 - DNA, 25 bp, Homo sapien
gcgcccgcgggtggtataaaatggc

SEQ ID NO: 1998884 - DNA, 25 bp, Homo sapien
cgcgtgaagggcaccgtaagaatct

SEQ ID NO: 1998885 - DNA, 25 bp, Homo sapien
aatcttcccgaatgctcctgtcacg

SEQ ID NO: 1998886 - DNA, 25 bp, Homo sapien
cagttgcgacccagctctaggcagt

SEQ ID NO: 1998887 - DNA, 25 bp, Homo sapien
cggcggctttctccgtccataggca

SEQ ID NO: 1998888 - DNA, 25 bp, Homo sapien
tcagatttccccgactttttagcat

SEQ ID NO: 1998889 - DNA, 25 bp, Homo sapien
ctgccttggcgtttgactccttcct

SEQ ID NO: 1998890 - DNA, 25 bp, Homo sapien
tctgccttggcgtttgactccttcc

SEQ ID NO: 1998891 - DNA, 25 bp, Homo sapien
cctagctatcagatttccccgactt

SEQ ID NO: 1998892 - DNA, 25 bp, Homo sapien
tagtgacaaattatgagaatagaag

SEQ ID NO: 1998893 - DNA, 25 bp, Homo sapien
gaggcatatagagataacttggcaa

SEQ ID NO: 1998894 - DNA, 25 bp, Homo sapien
cagagttctatcatgaagtcaagaa

SEQ ID NO: 1998895 - DNA, 25 bp, Homo sapien
aaaagttattaaccacatacaatgc

SEQ ID NO: 1998896 - DNA, 25 bp, Homo sapien
cagagtttacttcctgttgggcttc

SEQ ID NO: 1998897 - DNA, 25 bp, Homo sapien
gctgcagagtttacttcctgttggg

SEQ ID NO: 1998898 - DNA, 25 bp, Homo sapien
tcaggaaaacaaggctgcagagttt

SEQ ID NO: 1998899 - DNA, 25 bp, Homo sapien
tgcagagtttacttcctgttgggct

SEQ ID NO: 1998900 - DNA, 25 bp, Homo sapien
tctctcttgctgtgaatcctattcc

SEQ ID NO: 1998901 - DNA, 25 bp, Homo sapien
ctgttctcattagacgtggaaaaac

SEQ ID NO: 1998902 - DNA, 25 bp, Homo sapien
aaaacatggacgtgttttcctctgc

SEQ ID NO: 1998903 - DNA, 25 bp, Homo sapien
cattatcttcggtcttcttcatcca

SEQ ID NO: 1998904 - DNA, 25 bp, Homo sapien
aagggagaaaagtagtcagttactg

SEQ ID NO: 1998905 - DNA, 25 bp, Homo sapien
aaagtagtcagttactgggctgacc

SEQ ID NO: 1998906 - DNA, 25 bp, Homo sapien
gagaaaagtagtcagttactgggct

SEQ ID NO: 1998907 - DNA, 25 bp, Homo sapien
tcagttactgggctgaccggtcgat

SEQ ID NO: 1998908 - DNA, 25 bp, Homo sapien
ttcccgcgcctgatgcgtgaatttc

SEQ ID NO: 1998909 - DNA, 25 bp, Homo sapien
cgcctgatgcgtgaatttcagggtc

SEQ ID NO: 1998910 - DNA, 25 bp, Homo sapien
cccgcgcctgatgcgtgaatttcag

SEQ ID NO: 1998911 - DNA, 25 bp, Homo sapien
cgcttcccgcgcctgatgcgtgaat

SEQ ID NO: 1998912 - DNA, 25 bp, Homo sapien
tagcaaccggagactcggaatcgtc

SEQ ID NO: 1998913 - DNA, 25 bp, Homo sapien
cgtcccgcagcaacagtaggagagg

SEQ ID NO: 1998914 - DNA, 25 bp, Homo sapien
gggttcttggtataatcatgtttta

SEQ ID NO: 1998915 - DNA, 25 bp, Homo sapien
tagtagcggactctgtcgccatagc

SEQ ID NO: 1998916 - DNA, 25 bp, Homo sapien
atattgctcttagcgccatctaggg

SEQ ID NO: 1998917 - DNA, 25 bp, Homo sapien
tacctaaatattgctcttagcgcca

SEQ ID NO: 1998918 - DNA, 25 bp, Homo sapien
gatcaaaccatcagtgagcatacct

SEQ ID NO: 1998919 - DNA, 25 bp, Homo sapien
cccaagagatcaaaccatcagtgag

SEQ ID NO: 1998920 - DNA, 25 bp, Homo sapien
gtgaaaaaggaacattcaaccatca

SEQ ID NO: 1998921 - DNA, 25 bp, Homo sapien
tgcaagaacaggatacagtgaaaaa

SEQ ID NO: 1998922 - DNA, 25 bp, Homo sapien
ggaacattcaaccatcaataaaaaa

SEQ ID NO: 1998923 - DNA, 25 bp, Homo sapien
aaagaaagcatgacatcttgcaaga

SEQ ID NO: 1998924 - DNA, 25 bp, Homo sapien
gaatcagaaagacggtgaagcgcct

SEQ ID NO: 1998925 - DNA, 25 bp, Homo sapien
tttgccagagacttagcggcccggt

SEQ ID NO: 1998926 - DNA, 25 bp, Homo sapien
tctggccactaagacggagccgaaa

SEQ ID NO: 1998927 - DNA, 25 bp, Homo sapien
tggtgctcgtggaccgaaacaccgg

SEQ ID NO: 1998928 - DNA, 25 bp, Homo sapien
ggcttcgggacgcccgagagcagcg

SEQ ID NO: 1998929 - DNA, 25 bp, Homo sapien
gcggcttcgggacgcccgagagcag

SEQ ID NO: 1998930 - DNA, 25 bp, Homo sapien
gcttcgggacgcccgagagcagcgg

SEQ ID NO: 1998931 - DNA, 25 bp, Homo sapien
cggcttcgggacgcccgagagcagc

SEQ ID NO: 1998932 - DNA, 25 bp, Homo sapien
gaatcagaaagacggtgaagcgcct

SEQ ID NO: 1998933 - DNA, 25 bp, Homo sapien
tctggccactaagacggagccgaaa

SEQ ID NO: 1998934 - DNA, 25 bp, Homo sapien
tttgccagagacttagcggcccggt

SEQ ID NO: 1998935 - DNA, 25 bp, Homo sapien
tggtgctcgtggaccgaaacaccgg

SEQ ID NO: 1998936 - DNA, 25 bp, Homo sapien
ggcttcgggacgcccgagagcagcg

SEQ ID NO: 1998937 - DNA, 25 bp, Homo sapien
gcggcttcgggacgcccgagagcag

SEQ ID NO: 1998938 - DNA, 25 bp, Homo sapien
gcttcgggacgcccgagagcagcgg

SEQ ID NO: 1998939 - DNA, 25 bp, Homo sapien
cggcttcgggacgcccgagagcagc

SEQ ID NO: 1998940 - DNA, 25 bp, Homo sapien
gaatcagaaagacggtgaagcgcct

SEQ ID NO: 1998941 - DNA, 25 bp, Homo sapien
tctggccactaagacggagccgaaa

SEQ ID NO: 1998942 - DNA, 25 bp, Homo sapien
tttgccagagacttagcggcccggt

SEQ ID NO: 1998943 - DNA, 25 bp, Homo sapien
tggtgctcgtggaccgaaacaccgg

SEQ ID NO: 1998944 - DNA, 25 bp, Homo sapien
tatacaccacatgcaacattagtgc

SEQ ID NO: 1998945 - DNA, 25 bp, Homo sapien
tatgataccatagcctgaggaaaag

SEQ ID NO: 1998946 - DNA, 25 bp, Homo sapien
tatcattcccagttttagacccaga

SEQ ID NO: 1998947 - DNA, 25 bp, Homo sapien
cctttttacgggtgcaatggagatt

SEQ ID NO: 1998948 - DNA, 25 bp, Homo sapien
aaaataacactgctcctacggcaat

SEQ ID NO: 1998949 - DNA, 25 bp, Homo sapien
aataacactgctcctacggcaataa

SEQ ID NO: 1998950 - DNA, 25 bp, Homo sapien
aacactgctcctacggcaataaacc

SEQ ID NO: 1998951 - DNA, 25 bp, Homo sapien
ctcgcactggaacagaggaaaattt

SEQ ID NO: 1998952 - DNA, 25 bp, Homo sapien
taaataatgcgaaatcaaaatgaga

SEQ ID NO: 1998953 - DNA, 25 bp, Homo sapien
tgagaagattttttcgtcgtgcttc

SEQ ID NO: 1998954 - DNA, 25 bp, Homo sapien
tttttcgtcgtgcttctgtcctcat

SEQ ID NO: 1998955 - DNA, 25 bp, Homo sapien
tgtgttaaataatgcgaaatcaaaa

SEQ ID NO: 1998956 - DNA, 25 bp, Homo sapien
actgtccaatataagtggccttagc

SEQ ID NO: 1998957 - DNA, 25 bp, Homo sapien
tgtccaatataagtggccttagcac

SEQ ID NO: 1998958 - DNA, 25 bp, Homo sapien
tccaatataagtggccttagcactg

SEQ ID NO: 1998959 - DNA, 25 bp, Homo sapien
ctgtccaatataagtggccttagca

SEQ ID NO: 1998960 - DNA, 25 bp, Homo sapien
ctggcagtttcacagaataaaaaga

SEQ ID NO: 1998961 - DNA, 25 bp, Homo sapien
gcagtttcacagaataaaaagaaga

SEQ ID NO: 1998962 - DNA, 25 bp, Homo sapien
tcacagaataaaaagaagaaattaa

SEQ ID NO: 1998963 - DNA, 25 bp, Homo sapien
ttcacagaataaaaagaagaaatta

SEQ ID NO: 1998964 - DNA, 25 bp, Homo sapien
ttgctccaaagcatttgctgtatcg

SEQ ID NO: 1998965 - DNA, 25 bp, Homo sapien
caaagcatttgctgtatcgatatac

SEQ ID NO: 1998966 - DNA, 25 bp, Homo sapien
atgttgtcacaaacttcaaaccgtc

SEQ ID NO: 1998967 - DNA, 25 bp, Homo sapien
tgtcacaaacttcaaaccgtcgtaa

SEQ ID NO: 1998968 - DNA, 25 bp, Homo sapien
tttgacaattttggggtatttctga

SEQ ID NO: 1998969 - DNA, 25 bp, Homo sapien
tgacaattttggggtatttctgaaa

SEQ ID NO: 1998970 - DNA, 25 bp, Homo sapien
tacaaaataataactctcatattcc

SEQ ID NO: 1998971 - DNA, 25 bp, Homo sapien
ctgtgtctgatgactttttgacaat

SEQ ID NO: 1998972 - DNA, 25 bp, Homo sapien
gcttccccaatactcatttttgtag

SEQ ID NO: 1998973 - DNA, 25 bp, Homo sapien
tattgatcattatctggattgatgg

SEQ ID NO: 1998974 - DNA, 25 bp, Homo sapien
tatacatgagctattagcttcccca

SEQ ID NO: 1998975 - DNA, 25 bp, Homo sapien
gcttttcattatctatacatgagct

SEQ ID NO: 1998976 - DNA, 25 bp, Homo sapien
cctccagccagccttgttgactgct

SEQ ID NO: 1998977 - DNA, 25 bp, Homo sapien
ccagccagccttgttgactgctaac

SEQ ID NO: 1998978 - DNA, 25 bp, Homo sapien
tttagatctttcctccagccagcct

SEQ ID NO: 1998979 - DNA, 25 bp, Homo sapien
ttagatctttcctccagccagcctt

SEQ ID NO: 1998980 - DNA, 25 bp, Homo sapien
gacaccattttgctgcattacatgg

SEQ ID NO: 1998981 - DNA, 25 bp, Homo sapien
ggacaccaggatgattgcacgaatc

SEQ ID NO: 1998982 - DNA, 25 bp, Homo sapien
gatgattgcacgaatctggcaggga

SEQ ID NO: 1998983 - DNA, 25 bp, Homo sapien
ttttgctgcattacatgggacacca

SEQ ID NO: 1998984 - DNA, 25 bp, Homo sapien
ctggtcttccctctacttctttgcg

SEQ ID NO: 1998985 - DNA, 25 bp, Homo sapien
cctctacttctttgcggtaaattat

SEQ ID NO: 1998986 - DNA, 25 bp, Homo sapien
tcttccctctacttctttgcggtaa

SEQ ID NO: 1998987 - DNA, 25 bp, Homo sapien
ctctacttctttgcggtaaattatt

SEQ ID NO: 1998988 - DNA, 25 bp, Homo sapien
catgactgcagtcagtattgctggg

SEQ ID NO: 1998989 - DNA, 25 bp, Homo sapien
cgagccgagtcgattaagaagaatt

SEQ ID NO: 1998990 - DNA, 25 bp, Homo sapien
taaagcttctggaaagggattccac

SEQ ID NO: 1998991 - DNA, 25 bp, Homo sapien
cacagagctgtgatggtaaagcttc

SEQ ID NO: 1998992 - DNA, 25 bp, Homo sapien
ccctttagagggtgaactgaagcct

SEQ ID NO: 1998993 - DNA, 25 bp, Homo sapien
actcatgtcacactgttggcccagg

SEQ ID NO: 1998994 - DNA, 25 bp, Homo sapien
cattagtcctaggtgcaccctgtgg

SEQ ID NO: 1998995 - DNA, 25 bp, Homo sapien
tgcaatgttctaaggagtgcccctc

SEQ ID NO: 1998996 - DNA, 25 bp, Homo sapien
tggccagcaagaccacacatgtcga

SEQ ID NO: 1998997 - DNA, 25 bp, Homo sapien
tagaagatgccatccagagagagac

SEQ ID NO: 1998998 - DNA, 25 bp, Homo sapien
cccatgttcagagtgatctcagaga

SEQ ID NO: 1998999 - DNA, 25 bp, Homo sapien
gataacaccaccaatgtccacatgg

SEQ ID NO: 1999000 - DNA, 25 bp, Homo sapien
tattgagcgatttggtgtcccctgt

SEQ ID NO: 1999001 - DNA, 25 bp, Homo sapien
gttttggaccggggcctctgctgat

SEQ ID NO: 1999002 - DNA, 25 bp, Homo sapien
ctgattaggatgctccttattgagc

SEQ ID NO: 1999003 - DNA, 25 bp, Homo sapien
ctgtggttttggaccggggcctctg

SEQ ID NO: 1999004 - DNA, 25 bp, Homo sapien
cttgctgcccttcttggcccccagg

SEQ ID NO: 1999005 - DNA, 25 bp, Homo sapien
tccttgctgcccttcttggccccca

SEQ ID NO: 1999006 - DNA, 25 bp, Homo sapien
gcccccaggaagtccagcatgaagg

SEQ ID NO: 1999007 - DNA, 25 bp, Homo sapien
tggcccccaggaagtccagcatgaa

SEQ ID NO: 1999008 - DNA, 25 bp, Homo sapien
tccaggcgagtgttatcaactacct

SEQ ID NO: 1999009 - DNA, 25 bp, Homo sapien
tgtaggccgaagttggcactttcca

SEQ ID NO: 1999010 - DNA, 25 bp, Homo sapien
cctctccactgtctttacggattct

SEQ ID NO: 1999011 - DNA, 25 bp, Homo sapien
tcttcgtgggtgggcattttcctct

SEQ ID NO: 1999012 - DNA, 25 bp, Homo sapien
tctggattatggtcgaaggtgttca

SEQ ID NO: 1999013 - DNA, 25 bp, Homo sapien
caaggcaagttcactggttgctccc

SEQ ID NO: 1999014 - DNA, 25 bp, Homo sapien
tgagcagcccttggaagtcaatgat

SEQ ID NO: 1999015 - DNA, 25 bp, Homo sapien
ttcactggttgctcccttgatggca

SEQ ID NO: 1999016 - DNA, 25 bp, Homo sapien
accacggctgccaattctcgcatct

SEQ ID NO: 1999017 - DNA, 25 bp, Homo sapien
ctcactgttcatgccaataaatgca

SEQ ID NO: 1999018 - DNA, 25 bp, Homo sapien
ggctgccaattctcgcatctcactg

SEQ ID NO: 1999019 - DNA, 25 bp, Homo sapien
caattctcgcatctcactgttcatg

SEQ ID NO: 1999020 - DNA, 25 bp, Homo sapien
tgttttcctctacagctgtaataaa

SEQ ID NO: 1999021 - DNA, 25 bp, Homo sapien
ctgcaatgcacatttgatcattttt

SEQ ID NO: 1999022 - DNA, 25 bp, Homo sapien
aaaactgatgttttcctctacagct

SEQ ID NO: 1999023 - DNA, 25 bp, Homo sapien
ctgatgttttcctctacagctgtaa

SEQ ID NO: 1999024 - DNA, 25 bp, Homo sapien
gctgcatcaagtccaataatgtcat

SEQ ID NO: 1999025 - DNA, 25 bp, Homo sapien
ccttataggatacacaacagcttct

SEQ ID NO: 1999026 - DNA, 25 bp, Homo sapien
tctttgactaactgcttggctgcat

SEQ ID NO: 1999027 - DNA, 25 bp, Homo sapien
gcatcaagtccaataatgtcattcc

SEQ ID NO: 1999028 - DNA, 25 bp, Homo sapien
tggagggccgtacagcagtagtcct

SEQ ID NO: 1999029 - DNA, 25 bp, Homo sapien
gggccgtacagcagtagtcctttcc

SEQ ID NO: 1999030 - DNA, 25 bp, Homo sapien
gagggccgtacagcagtagtccttt

SEQ ID NO: 1999031 - DNA, 25 bp, Homo sapien
ctggagggccgtacagcagtagtcc

SEQ ID NO: 1999032 - DNA, 25 bp, Homo sapien
atttgctgacaatggtggatgcaga

SEQ ID NO: 1999033 - DNA, 25 bp, Homo sapien
catttgctgacaatggtggatgcag

SEQ ID NO: 1999034 - DNA, 25 bp, Homo sapien
aatcccctctccatttgctgacaat

SEQ ID NO: 1999035 - DNA, 25 bp, Homo sapien
tccatttgctgacaatggtggatgc

SEQ ID NO: 1999036 - DNA, 25 bp, Homo sapien
gcgtggtagcgggcaagctcaaata

SEQ ID NO: 1999037 - DNA, 25 bp, Homo sapien
aagatcgtggatggggcgtggtagc

SEQ ID NO: 1999038 - DNA, 25 bp, Homo sapien
ggtagcgggcaagctcaaataacac

SEQ ID NO: 1999039 - DNA, 25 bp, Homo sapien
cgtggtagcgggcaagctcaaataa

SEQ ID NO: 1999040 - DNA, 25 bp, Homo sapien
gagtgaagtacagacgtggccctgc

SEQ ID NO: 1999041 - DNA, 25 bp, Homo sapien
gagtgggcaagactcattccccagg

SEQ ID NO: 1999042 - DNA, 25 bp, Homo sapien
gaggccatcacagcggctattttca

SEQ ID NO: 1999043 - DNA, 25 bp, Homo sapien
tttcagccagcagaaccgatatggc

SEQ ID NO: 1999044 - DNA, 25 bp, Homo sapien
tgctaagacaaatacgagatcttct

SEQ ID NO: 1999045 - DNA, 25 bp, Homo sapien
catctgcaccagtaactctgtcttc

SEQ ID NO: 1999046 - DNA, 25 bp, Homo sapien
tgtcttcatccgcaggcttccttca

SEQ ID NO: 1999047 - DNA, 25 bp, Homo sapien
tacgagatcttctgagcgtgccagc

SEQ ID NO: 1999048 - DNA, 25 bp, Homo sapien
cttagtgactcctgaaaatgtattc

SEQ ID NO: 1999049 - DNA, 25 bp, Homo sapien
acttagtgactcctgaaaatgtatt

SEQ ID NO: 1999050 - DNA, 25 bp, Homo sapien
cccagctaggctacaagagttgttg

SEQ ID NO: 1999051 - DNA, 25 bp, Homo sapien
gctgatcacctgagcaagtagagaa

SEQ ID NO: 1999052 - DNA, 25 bp, Homo sapien
gacggttctctgtttggactccact

SEQ ID NO: 1999053 - DNA, 25 bp, Homo sapien
gaccttggtcccctctgagaatggg

SEQ ID NO: 1999054 - DNA, 25 bp, Homo sapien
tctagtgaaggcacaatcaagacct

SEQ ID NO: 1999055 - DNA, 25 bp, Homo sapien
gaccttgattgcaggcagggaggac

SEQ ID NO: 1999056 - DNA, 25 bp, Homo sapien
ttggaaaaatgttgatctagtgaag

SEQ ID NO: 1999057 - DNA, 25 bp, Homo sapien
aagaccttgattgcaggcagggagg

SEQ ID NO: 1999058 - DNA, 25 bp, Homo sapien
actggctagctagggaccttgggac

SEQ ID NO: 1999059 - DNA, 25 bp, Homo sapien
aaatagactcccctgatagagagtg

SEQ ID NO: 1999060 - DNA, 25 bp, Homo sapien
ctgctctcgctagccaaaggactga

SEQ ID NO: 1999061 - DNA, 25 bp, Homo sapien
ccattataaatgagacctggcagaa

SEQ ID NO: 1999062 - DNA, 25 bp, Homo sapien
gtccctcgtcctgtctccactgtta

SEQ ID NO: 1999063 - DNA, 25 bp, Homo sapien
tgcttcaaggccttgtgcccgatca

SEQ ID NO: 1999064 - DNA, 25 bp, Homo sapien
tggccacttccacggtttacatctt

SEQ ID NO: 1999065 - DNA, 25 bp, Homo sapien
ttgtgcccgatcagctgagcccctg

SEQ ID NO: 1999066 - DNA, 25 bp, Homo sapien
ctacaggtgcgagcccggctaatat

SEQ ID NO: 1999067 - DNA, 25 bp, Homo sapien
tacaggtgcgagcccggctaatatt

SEQ ID NO: 1999068 - DNA, 25 bp, Homo sapien
acaggtgcgagcccggctaatattt

SEQ ID NO: 1999069 - DNA, 25 bp, Homo sapien
gaatcgtgagcagtttccaccacgc

SEQ ID NO: 1999070 - DNA, 25 bp, Homo sapien
cagtccgatcttgccagtgagtaaa

SEQ ID NO: 1999071 - DNA, 25 bp, Homo sapien
caataagttgggcactctaagtaca

SEQ ID NO: 1999072 - DNA, 25 bp, Homo sapien
tgggtgcccagtgcaaataaccgcc

SEQ ID NO: 1999073 - DNA, 25 bp, Homo sapien
cagtggtagatcatggcctgcctgg

SEQ ID NO: 1999074 - DNA, 25 bp, Homo sapien
ggcgtaacatggcacagtccagctc

SEQ ID NO: 1999075 - DNA, 25 bp, Homo sapien
tccaggcggcgtaacatggcacagt

SEQ ID NO: 1999076 - DNA, 25 bp, Homo sapien
aaggccctgctcttgctcacaggag

SEQ ID NO: 1999077 - DNA, 25 bp, Homo sapien
ggctcatctgctacccattttacag

SEQ ID NO: 1999078 - DNA, 25 bp, Homo sapien
tctctgagtctaaaccctatgctgt

SEQ ID NO: 1999079 - DNA, 25 bp, Homo sapien
ggctcaaagagtaagtgacttctcc

SEQ ID NO: 1999080 - DNA, 25 bp, Homo sapien
gggccaggatttgaccataggttct

SEQ ID NO: 1999081 - DNA, 25 bp, Homo sapien
ctaaaaagattcccagataaacagt

SEQ ID NO: 1999082 - DNA, 25 bp, Homo sapien
taaaaagattcccagataaacagtg

SEQ ID NO: 1999083 - DNA, 25 bp, Homo sapien
tctgtatctgtcacccatgaacatc

SEQ ID NO: 1999084 - DNA, 25 bp, Homo sapien
gccaaaaaaccagccattggtcagt

SEQ ID NO: 1999085 - DNA, 25 bp, Homo sapien
tcagtgggcagaatgctcctggcca

SEQ ID NO: 1999086 - DNA, 25 bp, Homo sapien
tacgttgttataggcaggacccagt

SEQ ID NO: 1999087 - DNA, 25 bp, Homo sapien
agatcttcctcacgggccgcatggc

SEQ ID NO: 1999088 - DNA, 25 bp, Homo sapien
tggtgattttcaagtgcatcaaaga

SEQ ID NO: 1999089 - DNA, 25 bp, Homo sapien
agacgagcttaatatctgagcctga

SEQ ID NO: 1999090 - DNA, 25 bp, Homo sapien
gcttccctgcagacgagcttaatat

SEQ ID NO: 1999091 - DNA, 25 bp, Homo sapien
gacagactcgaactctctttgccag

SEQ ID NO: 1999092 - DNA, 25 bp, Homo sapien
cagaaagtcggcagtggttactata

SEQ ID NO: 1999093 - DNA, 25 bp, Homo sapien
ggcttggtgtgagttagcacatcca

SEQ ID NO: 1999094 - DNA, 25 bp, Homo sapien
tctgagccagattctttgcggaggg

SEQ ID NO: 1999095 - DNA, 25 bp, Homo sapien
acaatacagtggctcaagttaatcc

SEQ ID NO: 1999096 - DNA, 25 bp, Homo sapien
tctcagctatccaaaacaatacagt

SEQ ID NO: 1999097 - DNA, 25 bp, Homo sapien
tttgtggccaggtcagggtaaatgt

SEQ ID NO: 1999098 - DNA, 25 bp, Homo sapien
cacggacattaataaactaggaggt

SEQ ID NO: 1999099 - DNA, 25 bp, Homo sapien
aatgttctcgaagcttaggtgcccc

SEQ ID NO: 1999100 - DNA, 25 bp, Homo sapien
taggtgccccatcctaagctttgga

SEQ ID NO: 1999101 - DNA, 25 bp, Homo sapien
tctgatgagaagctgcggcaatgga

SEQ ID NO: 1999102 - DNA, 25 bp, Homo sapien
tgtccggaatgagaaacagactgca

SEQ ID NO: 1999103 - DNA, 25 bp, Homo sapien
tctgacaggtccgagaatgtgttaa

SEQ ID NO: 1999104 - DNA, 25 bp, Homo sapien
gaattggttagaagttggagcctca

SEQ ID NO: 1999105 - DNA, 25 bp, Homo sapien
ttagaacaccaggaccagagcgggt

SEQ ID NO: 1999106 - DNA, 25 bp, Homo sapien
tcaaagacttaaggcttgcagacag

SEQ ID NO: 1999107 - DNA, 25 bp, Homo sapien
tactgtgataatcctgggccttgca

SEQ ID NO: 1999108 - DNA, 25 bp, Homo sapien
tatttttgcctctgacactatggga

SEQ ID NO: 1999109 - DNA, 25 bp, Homo sapien
gaagttagtgtccactagggtccta

SEQ ID NO: 1999110 - DNA, 25 bp, Homo sapien
tgaaatctcgtcttgtagcatggat

SEQ ID NO: 1999111 - DNA, 25 bp, Homo sapien
ctcttcattagccagagatgactaa

SEQ ID NO: 1999112 - DNA, 25 bp, Homo sapien
gaattgttctttagcccaagtggta

SEQ ID NO: 1999113 - DNA, 25 bp, Homo sapien
taaaaggtgcattaggctgtagttc

SEQ ID NO: 1999114 - DNA, 25 bp, Homo sapien
tgtattcccagcacgggtgacttct

SEQ ID NO: 1999115 - DNA, 25 bp, Homo sapien
ttgtagaaaccccacttgcagagcc

SEQ ID NO: 1999116 - DNA, 25 bp, Homo sapien
aaagcctttaactccatggctagga

SEQ ID NO: 1999117 - DNA, 25 bp, Homo sapien
gctccattcactcaacgaacgttat

SEQ ID NO: 1999118 - DNA, 25 bp, Homo sapien
tgtggatcatctcgagcaattttgt

SEQ ID NO: 1999119 - DNA, 25 bp, Homo sapien
tctgtgtgccacaaatagctaaagc

SEQ ID NO: 1999120 - DNA, 25 bp, Homo sapien
taccccagtgtactaggcaaatgtt

SEQ ID NO: 1999121 - DNA, 25 bp, Homo sapien
gagcaccttgtcagtttaccccagt

SEQ ID NO: 1999122 - DNA, 25 bp, Homo sapien
tcaccttagccctttgagtggcagg

SEQ ID NO: 1999123 - DNA, 25 bp, Homo sapien
ttcgttcccagtcataaaagccttg

SEQ ID NO: 1999124 - DNA, 25 bp, Homo sapien
tagtattgtaaaaggctcaggagcc

SEQ ID NO: 1999125 - DNA, 25 bp, Homo sapien
ggagttaatatcactgcagcaacaa

SEQ ID NO: 1999126 - DNA, 25 bp, Homo sapien
tgtatctgagtgtaattcccagcag

SEQ ID NO: 1999127 - DNA, 25 bp, Homo sapien
gatggcaaatttaatgttgtgtgtg

SEQ ID NO: 1999128 - DNA, 25 bp, Homo sapien
ttatgtgttgtggtgatcagtgatc

SEQ ID NO: 1999129 - DNA, 25 bp, Homo sapien
gtgtgtgttctgaccgcttcaccag

SEQ ID NO: 1999130 - DNA, 25 bp, Homo sapien
tcatcggcaccatatttccaacagt

SEQ ID NO: 1999131 - DNA, 25 bp, Homo sapien
caggagctcagtcaataatgggaaa

SEQ ID NO: 1999132 - DNA, 25 bp, Homo sapien
aacaaagtattgtggcaggagctca

SEQ ID NO: 1999133 - DNA, 25 bp, Homo sapien
catttagcaaaaggtaccaggcctt

SEQ ID NO: 1999134 - DNA, 25 bp, Homo sapien
gctgaaacctgacaaatgagtggaa

SEQ ID NO: 1999135 - DNA, 25 bp, Homo sapien
tgaatgaattgttcaccagagttct

SEQ ID NO: 1999136 - DNA, 25 bp, Homo sapien
taacactaagcaggatctttctgga

SEQ ID NO: 1999137 - DNA, 25 bp, Homo sapien
tctccaaaatggaagcagcttaaca

SEQ ID NO: 1999138 - DNA, 25 bp, Homo sapien
taaatagtgatacctctgtaagcgt

SEQ ID NO: 1999139 - DNA, 25 bp, Homo sapien
atcgttgttctcagttttgacttct

SEQ ID NO: 1999140 - DNA, 25 bp, Homo sapien
tatgatcgttgttctcagttttgac

SEQ ID NO: 1999141 - DNA, 25 bp, Homo sapien
tgatcgttgttctcagttttgactt

SEQ ID NO: 1999142 - DNA, 25 bp, Homo sapien
tcttccttgggctttttgttggcca

SEQ ID NO: 1999143 - DNA, 25 bp, Homo sapien
tcattcacaatagtctttcattagt

SEQ ID NO: 1999144 - DNA, 25 bp, Homo sapien
agtctttcattagtttaccaagtgg

SEQ ID NO: 1999145 - DNA, 25 bp, Homo sapien
tgcaccacagaaccattctgccctg

SEQ ID NO: 1999146 - DNA, 25 bp, Homo sapien
caccacagaaccattctgccctgcc

SEQ ID NO: 1999147 - DNA, 25 bp, Homo sapien
cttgtagttcaggtaacgagtatta

SEQ ID NO: 1999148 - DNA, 25 bp, Homo sapien
tagttcaggtaacgagtattataca

SEQ ID NO: 1999149 - DNA, 25 bp, Homo sapien
cagcttgtagttcaggtaacgagta

SEQ ID NO: 1999150 - DNA, 25 bp, Homo sapien
gtagttcaggtaacgagtattatac

SEQ ID NO: 1999151 - DNA, 25 bp, Homo sapien
cctttcctgaggacggcgtacggag

SEQ ID NO: 1999152 - DNA, 25 bp, Homo sapien
gtgcagacagaggacaacacggcgc

SEQ ID NO: 1999153 - DNA, 25 bp, Homo sapien
tgtctatcccggctgaggacccgcg

SEQ ID NO: 1999154 - DNA, 25 bp, Homo sapien
ctagctttccgtcagcggcggtgca

SEQ ID NO: 1999155 - DNA, 25 bp, Homo sapien
tgtaagctttcactggtcagccctg

SEQ ID NO: 1999156 - DNA, 25 bp, Homo sapien
cccagagcagttgtgattcagtaaa

SEQ ID NO: 1999157 - DNA, 25 bp, Homo sapien
tctggactccaaataccgatgatgt

SEQ ID NO: 1999158 - DNA, 25 bp, Homo sapien
taacttaagtgcctgttggcctgcc

SEQ ID NO: 1999159 - DNA, 25 bp, Homo sapien
gatcatgaaaggcagtaactctcca

SEQ ID NO: 1999160 - DNA, 25 bp, Homo sapien
cagcgtaaatattagcccacaagag

SEQ ID NO: 1999161 - DNA, 25 bp, Homo sapien
gccatgatgtgagtggttatcccta

SEQ ID NO: 1999162 - DNA, 25 bp, Homo sapien
tacactgtactacccaagaagactg

SEQ ID NO: 1999163 - DNA, 25 bp, Homo sapien
cgatctgtaagaaccgtgatgagag

SEQ ID NO: 1999164 - DNA, 25 bp, Homo sapien
gctaatgaaccttattcgatctgta

SEQ ID NO: 1999165 - DNA, 25 bp, Homo sapien
gaaccttattcgatctgtaagaacc

SEQ ID NO: 1999166 - DNA, 25 bp, Homo sapien
tcacagctaatgaaccttattcgat

SEQ ID NO: 1999167 - DNA, 25 bp, Homo sapien
gaggaagacctaattgcagagggct

SEQ ID NO: 1999168 - DNA, 25 bp, Homo sapien
tatttcacagtttcgctttccacag

SEQ ID NO: 1999169 - DNA, 25 bp, Homo sapien
cagcagcacactcaggcttgagcga

SEQ ID NO: 1999170 - DNA, 25 bp, Homo sapien
tgagcgagcacaagtatactagtcc

SEQ ID NO: 1999171 - DNA, 25 bp, Homo sapien
gctgagcctggatggattgccattt

SEQ ID NO: 1999172 - DNA, 25 bp, Homo sapien
gtgactttttgaagtctggacagca

SEQ ID NO: 1999173 - DNA, 25 bp, Homo sapien
cacctggccaccattgatctttctg

SEQ ID NO: 1999174 - DNA, 25 bp, Homo sapien
tgtcgagcgtttttggctgagcctg

SEQ ID NO: 1999175 - DNA, 25 bp, Homo sapien
ctgctgggtgcgcccccgccgccgc

SEQ ID NO: 1999176 - DNA, 25 bp, Homo sapien
ccgccgccaccgccgcccttggcag

SEQ ID NO: 1999177 - DNA, 25 bp, Homo sapien
gccgccaccgccgcccttggcagag

SEQ ID NO: 1999178 - DNA, 25 bp, Homo sapien
cgccgccgccaccgccgcccttggc

SEQ ID NO: 1999179 - DNA, 25 bp, Homo sapien
ccccaggccggggtttgagcgccat

SEQ ID NO: 1999180 - DNA, 25 bp, Homo sapien
gcaattcaggccgtcattctcccca

SEQ ID NO: 1999181 - DNA, 25 bp, Homo sapien
cactttctgcggtggaggggacgcc

SEQ ID NO: 1999182 - DNA, 25 bp, Homo sapien
tggaggggacgccccgccgcaattc

SEQ ID NO: 1999183 - DNA, 25 bp, Homo sapien
ctgtgtgagtctgggaactcagttt

SEQ ID NO: 1999184 - DNA, 25 bp, Homo sapien
tagtagcatggctggttacaaagca

SEQ ID NO: 1999185 - DNA, 25 bp, Homo sapien
tttagtagcatggctggttacaaag

SEQ ID NO: 1999186 - DNA, 25 bp, Homo sapien
tactgtgtgagtctgggaactcagt

SEQ ID NO: 1999187 - DNA, 25 bp, Homo sapien
gaaccaggacgtaagtacttctgaa

SEQ ID NO: 1999188 - DNA, 25 bp, Homo sapien
tctctttggtgaattcagaacagtc

SEQ ID NO: 1999189 - DNA, 25 bp, Homo sapien
ttccatttctgaaccaggacgtaag

SEQ ID NO: 1999190 - DNA, 25 bp, Homo sapien
cagttttaagtgaatgttaacagta

SEQ ID NO: 1999191 - DNA, 25 bp, Homo sapien
aaaggagaagcaagtaccttcctca

SEQ ID NO: 1999192 - DNA, 25 bp, Homo sapien
agcaagtaccttcctcacaaggcag

SEQ ID NO: 1999193 - DNA, 25 bp, Homo sapien
caaaggagaagcaagtaccttcctc

SEQ ID NO: 1999194 - DNA, 25 bp, Homo sapien
gagaagcaagtaccttcctcacaag

SEQ ID NO: 1999195 - DNA, 25 bp, Homo sapien
gtgcagacacatgggtaagcgtgca

SEQ ID NO: 1999196 - DNA, 25 bp, Homo sapien
cattggtgtggtcctgttggattcc

SEQ ID NO: 1999197 - DNA, 25 bp, Homo sapien
ccatggactgtgcagcagagcccat

SEQ ID NO: 1999198 - DNA, 25 bp, Homo sapien
ggtaagcgtgcagatttgctggtca

SEQ ID NO: 1999199 - DNA, 25 bp, Homo sapien
taagagcaccctccaaagaatcagc

SEQ ID NO: 1999200 - DNA, 25 bp, Homo sapien
tagggaccagctttgttctacaaca

SEQ ID NO: 1999201 - DNA, 25 bp, Homo sapien
caggaactagagacctccagtgcag

SEQ ID NO: 1999202 - DNA, 25 bp, Homo sapien
acaggtgcagactgtgaaaggccag

SEQ ID NO: 1999203 - DNA, 25 bp, Homo sapien
cagctgggtatggaagagtgaacaa

SEQ ID NO: 1999204 - DNA, 25 bp, Homo sapien
caggaactggaagtcccgttgaagt

SEQ ID NO: 1999205 - DNA, 25 bp, Homo sapien
tcatcttatgccagctgggtatgga

SEQ ID NO: 1999206 - DNA, 25 bp, Homo sapien
tgtccagcagtgaatatgaggatgg

SEQ ID NO: 1999207 - DNA, 25 bp, Homo sapien
agaggagctgttcacatgagaggct

SEQ ID NO: 1999208 - DNA, 25 bp, Homo sapien
aggagctgttcacatgagaggctaa

SEQ ID NO: 1999209 - DNA, 25 bp, Homo sapien
caagggctgatgtagtaaggatcct

SEQ ID NO: 1999210 - DNA, 25 bp, Homo sapien
gctgatgtagtaaggatcctcttcc

SEQ ID NO: 1999211 - DNA, 25 bp, Homo sapien
ccaaaaggtcaatcgataggatgga

SEQ ID NO: 1999212 - DNA, 25 bp, Homo sapien
gatgtctgcatcgagggcatctggc

SEQ ID NO: 1999213 - DNA, 25 bp, Homo sapien
aacaaccagggcaccgatttctctc

SEQ ID NO: 1999214 - DNA, 25 bp, Homo sapien
tctctccccaaaaggtcaatcgata

SEQ ID NO: 1999215 - DNA, 25 bp, Homo sapien
tatccaaagaccgtgaagggtagga

SEQ ID NO: 1999216 - DNA, 25 bp, Homo sapien
ttcaaacagggagatatcttcaata

SEQ ID NO: 1999217 - DNA, 25 bp, Homo sapien
ggtaggaaatatctccctgtcccat

SEQ ID NO: 1999218 - DNA, 25 bp, Homo sapien
catgactccacttagtatttcaaac

SEQ ID NO: 1999219 - DNA, 25 bp, Homo sapien
cttcaggtggaggcatgaaagtcat

SEQ ID NO: 1999220 - DNA, 25 bp, Homo sapien
gctataaagcaagtgttcccatagt

SEQ ID NO: 1999221 - DNA, 25 bp, Homo sapien
tagttaaagttagaggcatctgcaa

SEQ ID NO: 1999222 - DNA, 25 bp, Homo sapien
cttattgcaatgagccccttcaggt

SEQ ID NO: 1999223 - DNA, 25 bp, Homo sapien
cttccctttcaccgaaagagagaag

SEQ ID NO: 1999224 - DNA, 25 bp, Homo sapien
ccaatttcgagcaatttatgtgctc

SEQ ID NO: 1999225 - DNA, 25 bp, Homo sapien
tgtgtctgatccaatttcgagcaat

SEQ ID NO: 1999226 - DNA, 25 bp, Homo sapien
aatctgtgtctgatccaatttcgag

SEQ ID NO: 1999227 - DNA, 25 bp, Homo sapien
tgccataatctgtgtctgatccaat

SEQ ID NO: 1999228 - DNA, 25 bp, Homo sapien
caaccccctcctgtctgtgtggggc

SEQ ID NO: 1999229 - DNA, 25 bp, Homo sapien
tcagaaaggccagtcttggcccagg

SEQ ID NO: 1999230 - DNA, 25 bp, Homo sapien
gctggcccccgtggcagccctcctt

SEQ ID NO: 1999231 - DNA, 25 bp, Homo sapien
ttctccaacctccacaccacttggc

SEQ ID NO: 1999232 - DNA, 25 bp, Homo sapien
ggcaatccagaactctgccacaggc

SEQ ID NO: 1999233 - DNA, 25 bp, Homo sapien
tttgaagttgcttcctatcaccata

SEQ ID NO: 1999234 - DNA, 25 bp, Homo sapien
tatcaccatagcactctgagcactg

SEQ ID NO: 1999235 - DNA, 25 bp, Homo sapien
agtaggaggcaacttcttctttgaa

SEQ ID NO: 1999236 - DNA, 25 bp, Homo sapien
ttcctatccttcaaagccaagtagg

SEQ ID NO: 1999237 - DNA, 25 bp, Homo sapien
aacagcccattttctaatcgataca

SEQ ID NO: 1999238 - DNA, 25 bp, Homo sapien
gccttgaaatggtcaacagcccatt

SEQ ID NO: 1999239 - DNA, 25 bp, Homo sapien
gaaattgattgttgccttgaaatgg

SEQ ID NO: 1999240 - DNA, 25 bp, Homo sapien
ggtcaacagcccattttctaatcga

SEQ ID NO: 1999241 - DNA, 25 bp, Homo sapien
gtcaatccaagccacttggcatctg

SEQ ID NO: 1999242 - DNA, 25 bp, Homo sapien
gagcacgtctccctagcagtgctgg

SEQ ID NO: 1999243 - DNA, 25 bp, Homo sapien
atttagcactgagcacgtctcccta

SEQ ID NO: 1999244 - DNA, 25 bp, Homo sapien
cactgcagggggtacatagtcatca

SEQ ID NO: 1999245 - DNA, 25 bp, Homo sapien
ctgtttgtgtggttgttctttacac

SEQ ID NO: 1999246 - DNA, 25 bp, Homo sapien
ttccacaaaagcacttggtagagaa

SEQ ID NO: 1999247 - DNA, 25 bp, Homo sapien
gctttgaactggacttgtgaactgg

SEQ ID NO: 1999248 - DNA, 25 bp, Homo sapien
cagagatgagctttgaactggactt

SEQ ID NO: 1999249 - DNA, 25 bp, Homo sapien
aaagcacttggtagagaaggcctca

SEQ ID NO: 1999250 - DNA, 25 bp, Homo sapien
tgtttgagccatgagctgaagctac

SEQ ID NO: 1999251 - DNA, 25 bp, Homo sapien
tgagctgaagctacttccgaagagc

SEQ ID NO: 1999252 - DNA, 25 bp, Homo sapien
tacttccgaagagctccaggagaca

SEQ ID NO: 1999253 - DNA, 25 bp, Homo sapien
cagggctgtgtttgagccatgagct

SEQ ID NO: 1999254 - DNA, 25 bp, Homo sapien
ctccaactcttgattttaaataact

SEQ ID NO: 1999255 - DNA, 25 bp, Homo sapien
taggaggctatcttctccaactctt

SEQ ID NO: 1999256 - DNA, 25 bp, Homo sapien
caattctactcttcatgtttggttc

SEQ ID NO: 1999257 - DNA, 25 bp, Homo sapien
tgtttggttcttctaggaggctatc

SEQ ID NO: 1999258 - DNA, 25 bp, Homo sapien
tttattatgatgctcctcaatgatg

SEQ ID NO: 1999259 - DNA, 25 bp, Homo sapien
tgaatagtctccgtaatttggtttg

SEQ ID NO: 1999260 - DNA, 25 bp, Homo sapien
ttgatgcaagtgtgaaggccccgca

SEQ ID NO: 1999261 - DNA, 25 bp, Homo sapien
tgttctacattttgatgcaagtgtg

SEQ ID NO: 1999262 - DNA, 25 bp, Homo sapien
ccttcttgcccctgtaaatagcttc

SEQ ID NO: 1999263 - DNA, 25 bp, Homo sapien
ctgtgagagagaacgccctgggtac

SEQ ID NO: 1999264 - DNA, 25 bp, Homo sapien
gatggccacgatcaaagtcagccag

SEQ ID NO: 1999265 - DNA, 25 bp, Homo sapien
tatgaagagtgatgggttttgcttc

SEQ ID NO: 1999266 - DNA, 25 bp, Homo sapien
catcagcaaactctaggtccaccat

SEQ ID NO: 1999267 - DNA, 25 bp, Homo sapien
atgaggccaattaaaccatcagcaa

SEQ ID NO: 1999268 - DNA, 25 bp, Homo sapien
gaggccaattaaaccatcagcaaac

SEQ ID NO: 1999269 - DNA, 25 bp, Homo sapien
aaccatcagcaaactctaggtccac

SEQ ID NO: 1999270 - DNA, 25 bp, Homo sapien
ttgttaaatgagaatgacatgaaca

SEQ ID NO: 1999271 - DNA, 25 bp, Homo sapien
taaatgagaatgacatgaacatgtc

SEQ ID NO: 1999272 - DNA, 25 bp, Homo sapien
tcagtctggttggttgttaaatgag

SEQ ID NO: 1999273 - DNA, 25 bp, Homo sapien
agaatgacatgaacatgtcttccaa

SEQ ID NO: 1999274 - DNA, 25 bp, Homo sapien
cagccgaccctgagccttaaaaact

SEQ ID NO: 1999275 - DNA, 25 bp, Homo sapien
ctgagccttaaaaactttacttgca

SEQ ID NO: 1999276 - DNA, 25 bp, Homo sapien
gagccttaaaaactttacttgcagc

SEQ ID NO: 1999277 - DNA, 25 bp, Homo sapien
tgagccttaaaaactttacttgcag

SEQ ID NO: 1999278 - DNA, 25 bp, Homo sapien
aactctccttgacatcgacaggaac

SEQ ID NO: 1999279 - DNA, 25 bp, Homo sapien
tgcagcatacccaataagcatccgc

SEQ ID NO: 1999280 - DNA, 25 bp, Homo sapien
tcgacaggaacaaatgcagcatacc

SEQ ID NO: 1999281 - DNA, 25 bp, Homo sapien
ataagcatccgcagtgcagcaccct

SEQ ID NO: 1999282 - DNA, 25 bp, Homo sapien
tgggcacagaagcacaagcacctgt

SEQ ID NO: 1999283 - DNA, 25 bp, Homo sapien
tgtctttagtcaggatgtgcttccc

SEQ ID NO: 1999284 - DNA, 25 bp, Homo sapien
gaaaagtctcatagccgcagggtcc

SEQ ID NO: 1999285 - DNA, 25 bp, Homo sapien
gactgtgcagtggtggctacagacc

SEQ ID NO: 1999286 - DNA, 25 bp, Homo sapien
cccaatcaatacgaacattggcggg

SEQ ID NO: 1999287 - DNA, 25 bp, Homo sapien
ccaggtcccaatcaatacgaacatt

SEQ ID NO: 1999288 - DNA, 25 bp, Homo sapien
attggcggggcctcgatccatggct

SEQ ID NO: 1999289 - DNA, 25 bp, Homo sapien
ggggcctcgatccatggctgatgcc

SEQ ID NO: 1999290 - DNA, 25 bp, Homo sapien
accagggacatgtcaaggagcaggt

SEQ ID NO: 1999291 - DNA, 25 bp, Homo sapien
gagcaggttgaggaacccctggagc

SEQ ID NO: 1999292 - DNA, 25 bp, Homo sapien
ccagggacatgtcaaggagcaggtt

SEQ ID NO: 1999293 - DNA, 25 bp, Homo sapien
caccagggacatgtcaaggagcagg

SEQ ID NO: 1999294 - DNA, 25 bp, Homo sapien
tgtcaacacctatgtgtcccacttc

SEQ ID NO: 1999295 - DNA, 25 bp, Homo sapien
atctttgtcaacacctatgtgtccc

SEQ ID NO: 1999296 - DNA, 25 bp, Homo sapien
acctatgtgtcccacttctatgcca

SEQ ID NO: 1999297 - DNA, 25 bp, Homo sapien
aacacctatgtgtcccacttctatg

SEQ ID NO: 1999298 - DNA, 25 bp, Homo sapien
ctctctgcaaaagtgtctccaggct

SEQ ID NO: 1999299 - DNA, 25 bp, Homo sapien
tcttccgttgccgacttcttttcac

SEQ ID NO: 1999300 - DNA, 25 bp, Homo sapien
agttggcaagagctttctcttccgt

SEQ ID NO: 1999301 - DNA, 25 bp, Homo sapien
tggcaagagctttctcttccgttgc

SEQ ID NO: 1999302 - DNA, 25 bp, Homo sapien
gagctttctcttccgttgccgactt

SEQ ID NO: 1999303 - DNA, 25 bp, Homo sapien
aggcatccaggtatgcagcagctac

SEQ ID NO: 1999304 - DNA, 25 bp, Homo sapien
ggcatccaggtatgcagcagctaca

SEQ ID NO: 1999305 - DNA, 25 bp, Homo sapien
caggcatccaggtatgcagcagcta

SEQ ID NO: 1999306 - DNA, 25 bp, Homo sapien
gatttggtgaattcgtttaaggcca

SEQ ID NO: 1999307 - DNA, 25 bp, Homo sapien
tgagtttactgcagctcccgatgct

SEQ ID NO: 1999308 - DNA, 25 bp, Homo sapien
taaggccaaattgaaaacgtatcat

SEQ ID NO: 1999309 - DNA, 25 bp, Homo sapien
ttccacttgacatcgaagatgccga

SEQ ID NO: 1999310 - DNA, 25 bp, Homo sapien
ggtctcttccggtggtaacagtcat

SEQ ID NO: 1999311 - DNA, 25 bp, Homo sapien
cacagagcagggaaccgaggtctct

SEQ ID NO: 1999312 - DNA, 25 bp, Homo sapien
ccgaggtctcttccggtggtaacag

SEQ ID NO: 1999313 - DNA, 25 bp, Homo sapien
cagggaaccgaggtctcttccggtg

SEQ ID NO: 1999314 - DNA, 25 bp, Homo sapien
tgtcatttgaggatacactaatacc

SEQ ID NO: 1999315 - DNA, 25 bp, Homo sapien
ctgaggtggttcaaacccatccatg

SEQ ID NO: 1999316 - DNA, 25 bp, Homo sapien
gtggttcaaacccatccatgagcca

SEQ ID NO: 1999317 - DNA, 25 bp, Homo sapien
tgagccaggcctctcaattgtctgc

SEQ ID NO: 1999318 - DNA, 25 bp, Homo sapien
catgagccaggcctctcaattgtct

SEQ ID NO: 1999319 - DNA, 25 bp, Homo sapien
ttgggccgggcagggaatttgtcac

SEQ ID NO: 1999320 - DNA, 25 bp, Homo sapien
ataaggaccacagagcttgggccgg

SEQ ID NO: 1999321 - DNA, 25 bp, Homo sapien
tgttagtgaaactgagccgctcatc

SEQ ID NO: 1999322 - DNA, 25 bp, Homo sapien
gaaactgagccgctcatcttcagtc

SEQ ID NO: 1999323 - DNA, 25 bp, Homo sapien
cattgaggtagatgtgatacactgc

SEQ ID NO: 1999324 - DNA, 25 bp, Homo sapien
gatagagtttttcataccgagggca

SEQ ID NO: 1999325 - DNA, 25 bp, Homo sapien
aggagctcacggtcttattgaagag

SEQ ID NO: 1999326 - DNA, 25 bp, Homo sapien
tacactgcacagagacccaattcct

SEQ ID NO: 1999327 - DNA, 25 bp, Homo sapien
gaaatttcattttcgtccaaccaca

SEQ ID NO: 1999328 - DNA, 25 bp, Homo sapien
attttatcctcttgatatcaaagga

SEQ ID NO: 1999329 - DNA, 25 bp, Homo sapien
tgaagagcatgctgttagggacatt

SEQ ID NO: 1999330 - DNA, 25 bp, Homo sapien
tatgccagggtgtgttattacaaat

SEQ ID NO: 1999331 - DNA, 25 bp, Homo sapien
gagattaaacgtgtcaaagatccca

SEQ ID NO: 1999332 - DNA, 25 bp, Homo sapien
gagtaaggagagattaaacgtgtca

SEQ ID NO: 1999333 - DNA, 25 bp, Homo sapien
taaggagagattaaacgtgtcaaag

SEQ ID NO: 1999334 - DNA, 25 bp, Homo sapien
ggagagattaaacgtgtcaaagatc

SEQ ID NO: 1999335 - DNA, 25 bp, Homo sapien
ctcctccaggggacaattcagcaat

SEQ ID NO: 1999336 - DNA, 25 bp, Homo sapien
cctcctccaggggacaattcagcaa

SEQ ID NO: 1999337 - DNA, 25 bp, Homo sapien
acaattcagcaatgtctgacatcat

SEQ ID NO: 1999338 - DNA, 25 bp, Homo sapien
ttcagcaatgtctgacatcattttt

SEQ ID NO: 1999339 - DNA, 25 bp, Homo sapien
gccacaacttgcaccagaccagaac

SEQ ID NO: 1999340 - DNA, 25 bp, Homo sapien
gagtccatcggccagacccttggcc

SEQ ID NO: 1999341 - DNA, 25 bp, Homo sapien
aggtgagtccatcggccagaccctt

SEQ ID NO: 1999342 - DNA, 25 bp, Homo sapien
ctaggtgagtccatcggccagaccc

SEQ ID NO: 1999343 - DNA, 25 bp, Homo sapien
cactgattgcacccacatgcacatt

SEQ ID NO: 1999344 - DNA, 25 bp, Homo sapien
tgattgcacccacatgcacattcat

SEQ ID NO: 1999345 - DNA, 25 bp, Homo sapien
tatccacactgattgcacccacatg

SEQ ID NO: 1999346 - DNA, 25 bp, Homo sapien
ctatccacactgattgcacccacat

SEQ ID NO: 1999347 - DNA, 25 bp, Homo sapien
gcagtgctcttgagcaagttttaaa

SEQ ID NO: 1999348 - DNA, 25 bp, Homo sapien
ctcttgagcaagttttaaaatctcc

SEQ ID NO: 1999349 - DNA, 25 bp, Homo sapien
cttgagcaagttttaaaatctccat

SEQ ID NO: 1999350 - DNA, 25 bp, Homo sapien
cagcagtgctcttgagcaagtttta

SEQ ID NO: 1999351 - DNA, 25 bp, Homo sapien
tgggccagacaagccattttctctt

SEQ ID NO: 1999352 - DNA, 25 bp, Homo sapien
gtgggccagacaagccattttctct

SEQ ID NO: 1999353 - DNA, 25 bp, Homo sapien
gggcagatagagctgccacatcctc

SEQ ID NO: 1999354 - DNA, 25 bp, Homo sapien
ccaggtggcctctcatgcctatttc

SEQ ID NO: 1999355 - DNA, 25 bp, Homo sapien
tctctggtgcttgtccatgccttga

SEQ ID NO: 1999356 - DNA, 25 bp, Homo sapien
cttgagtttccagggcagatagagc

SEQ ID NO: 1999357 - DNA, 25 bp, Homo sapien
tgagggcttggcatagggatctcca

SEQ ID NO: 1999358 - DNA, 25 bp, Homo sapien
ttaatcctggctgtggcagtcactg

SEQ ID NO: 1999359 - DNA, 25 bp, Homo sapien
tagattgaattactgcgggctccgc

SEQ ID NO: 1999360 - DNA, 25 bp, Homo sapien
catgccgagctgctaatgaatgggc

SEQ ID NO: 1999361 - DNA, 25 bp, Homo sapien
ggtatattcagttgtccccgcatca

SEQ ID NO: 1999362 - DNA, 25 bp, Homo sapien
gcattgctgtatgactggggcccag

SEQ ID NO: 1999363 - DNA, 25 bp, Homo sapien
tacagtccaggcaccttcactctgg

SEQ ID NO: 1999364 - DNA, 25 bp, Homo sapien
atcatccttccgtgagccaaccctt

SEQ ID NO: 1999365 - DNA, 25 bp, Homo sapien
taggaagataggacacataggggtg

SEQ ID NO: 1999366 - DNA, 25 bp, Homo sapien
ttaggaagataggacacataggggt

SEQ ID NO: 1999367 - DNA, 25 bp, Homo sapien
tggtgagattaggaagataggacac

SEQ ID NO: 1999368 - DNA, 25 bp, Homo sapien
atctggtgagattaggaagatagga

SEQ ID NO: 1999369 - DNA, 25 bp, Homo sapien
ctcctttacatggatggattcctca

SEQ ID NO: 1999370 - DNA, 25 bp, Homo sapien
cctcctttacatggatggattcctc

SEQ ID NO: 1999371 - DNA, 25 bp, Homo sapien
tcctttacatggatggattcctcac

SEQ ID NO: 1999372 - DNA, 25 bp, Homo sapien
acaaggtccttcatggaataaatag

SEQ ID NO: 1999373 - DNA, 25 bp, Homo sapien
gaataaatagctttgcagtcaggtc

SEQ ID NO: 1999374 - DNA, 25 bp, Homo sapien
catcataggttgactcagggaaaac

SEQ ID NO: 1999375 - DNA, 25 bp, Homo sapien
cagtcaggtcttcccgcatttctct

SEQ ID NO: 1999376 - DNA, 25 bp, Homo sapien
gaaatgaacgcagtgggttgacaga

SEQ ID NO: 1999377 - DNA, 25 bp, Homo sapien
aacgcagtgggttgacagagactga

SEQ ID NO: 1999378 - DNA, 25 bp, Homo sapien
tgaacgcagtgggttgacagagact

SEQ ID NO: 1999379 - DNA, 25 bp, Homo sapien
aagaaatgaacgcagtgggttgaca

SEQ ID NO: 1999380 - DNA, 25 bp, Homo sapien
tcatagttctgcagaaacaacaagg

SEQ ID NO: 1999381 - DNA, 25 bp, Homo sapien
gtcttccatgcctcgcttacagagg

SEQ ID NO: 1999382 - DNA, 25 bp, Homo sapien
tccatgcctcgcttacagagggttg

SEQ ID NO: 1999383 - DNA, 25 bp, Homo sapien
ttccatgcctcgcttacagagggtt

SEQ ID NO: 1999384 - DNA, 25 bp, Homo sapien
tcttccatgcctcgcttacagaggg

SEQ ID NO: 1999385 - DNA, 25 bp, Homo sapien
tcctgatgaaaagcagtgttgccgt

SEQ ID NO: 1999386 - DNA, 25 bp, Homo sapien
taatagctgaggtccttgttcctga

SEQ ID NO: 1999387 - DNA, 25 bp, Homo sapien
tctgtacctcagtattggagtactc

SEQ ID NO: 1999388 - DNA, 25 bp, Homo sapien
agtccactctctcctttaagaaaag

SEQ ID NO: 1999389 - DNA, 25 bp, Homo sapien
tggcaactaatgctcctctatccca

SEQ ID NO: 1999390 - DNA, 25 bp, Homo sapien
ccaggaatttcggtgattggttctt

SEQ ID NO: 1999391 - DNA, 25 bp, Homo sapien
ctgggaagatcaaaaatactgcaac

SEQ ID NO: 1999392 - DNA, 25 bp, Homo sapien
aatttcggtgattggttcttctgag

SEQ ID NO: 1999393 - DNA, 25 bp, Homo sapien
cagaaagatagtcaatcccccaatt

SEQ ID NO: 1999394 - DNA, 25 bp, Homo sapien
ggagggataacattatatccgcata

SEQ ID NO: 1999395 - DNA, 25 bp, Homo sapien
cattatatccgcatagcatttgcga

SEQ ID NO: 1999396 - DNA, 25 bp, Homo sapien
tagttggatcgtaagaaagacacac

SEQ ID NO: 1999397 - DNA, 25 bp, Homo sapien
caggtaacacacactgattgataaa

SEQ ID NO: 1999398 - DNA, 25 bp, Homo sapien
tacaggtaacacacactgattgata

SEQ ID NO: 1999399 - DNA, 25 bp, Homo sapien
tgtacaggtaacacacactgattga

SEQ ID NO: 1999400 - DNA, 25 bp, Homo sapien
gtacaggtaacacacactgattgat

SEQ ID NO: 1999401 - DNA, 25 bp, Homo sapien
ggatgctaggatctgagtaaaagac

SEQ ID NO: 1999402 - DNA, 25 bp, Homo sapien
ggagaaaccatgtgaaaagggatgc

SEQ ID NO: 1999403 - DNA, 25 bp, Homo sapien
tcttgattctgttacatatatggag

SEQ ID NO: 1999404 - DNA, 25 bp, Homo sapien
tatataacttttgggaccaccttga

SEQ ID NO: 1999405 - DNA, 25 bp, Homo sapien
tttgctctcgggaaaccgtttcata

SEQ ID NO: 1999406 - DNA, 25 bp, Homo sapien
cattattcctttcagggacactttc

SEQ ID NO: 1999407 - DNA, 25 bp, Homo sapien
gaccgtctctgagttggccaatgtt

SEQ ID NO: 1999408 - DNA, 25 bp, Homo sapien
accagggtaacctggctttgctgtt

SEQ ID NO: 1999409 - DNA, 25 bp, Homo sapien
gattcctaaaggagtccgtatccca

SEQ ID NO: 1999410 - DNA, 25 bp, Homo sapien
aggaggagaaatcttgaccagtcca

SEQ ID NO: 1999411 - DNA, 25 bp, Homo sapien
gaggaggagaaatcttgaccagtcc

SEQ ID NO: 1999412 - DNA, 25 bp, Homo sapien
ttagattcctaaaggagtccgtatc

SEQ ID NO: 1999413 - DNA, 25 bp, Homo sapien
gcacgtgcacgaacaccaggatgca

SEQ ID NO: 1999414 - DNA, 25 bp, Homo sapien
cagcacgtgcacgaacaccaggatg

SEQ ID NO: 1999415 - DNA, 25 bp, Homo sapien
gcagcacgtgcacgaacaccaggat

SEQ ID NO: 1999416 - DNA, 25 bp, Homo sapien
agcacgtgcacgaacaccaggatgc

SEQ ID NO: 1999417 - DNA, 25 bp, Homo sapien
cctcttctagtggaaatttatgtat

SEQ ID NO: 1999418 - DNA, 25 bp, Homo sapien
ggccagtccttggaacactctgagt

SEQ ID NO: 1999419 - DNA, 25 bp, Homo sapien
gaatgacagctgaggtctgtcttat

SEQ ID NO: 1999420 - DNA, 25 bp, Homo sapien
cactgaccctagttgtcactccaga

SEQ ID NO: 1999421 - DNA, 25 bp, Homo sapien
ccctgtcggaccagtcttggatgtc

SEQ ID NO: 1999422 - DNA, 25 bp, Homo sapien
gtcggaccagtcttggatgtccttt

SEQ ID NO: 1999423 - DNA, 25 bp, Homo sapien
tgtcggaccagtcttggatgtcctt

SEQ ID NO: 1999424 - DNA, 25 bp, Homo sapien
cctgtcggaccagtcttggatgtcc

SEQ ID NO: 1999425 - DNA, 25 bp, Homo sapien
cagtgtttcgtgaggttgaagtcaa

SEQ ID NO: 1999426 - DNA, 25 bp, Homo sapien
ggtgaggaatctaggaacagcttag

SEQ ID NO: 1999427 - DNA, 25 bp, Homo sapien
caaggtattagccagggttgtagcc

SEQ ID NO: 1999428 - DNA, 25 bp, Homo sapien
gtagccattgtacagccattgactg

SEQ ID NO: 1999429 - DNA, 25 bp, Homo sapien
tgagcacatctagattcctctaatt

SEQ ID NO: 1999430 - DNA, 25 bp, Homo sapien
cctcaatggtacagaagttatcttt

SEQ ID NO: 1999431 - DNA, 25 bp, Homo sapien
ccacctcaatggtacagaagttatc

SEQ ID NO: 1999432 - DNA, 25 bp, Homo sapien
ctcctttgagcacatctagattcct

SEQ ID NO: 1999433 - DNA, 25 bp, Homo sapien
ttcccgcttgcagtatcccctcccc

SEQ ID NO: 1999434 - DNA, 25 bp, Homo sapien
gcccttcccgcttgcagtatcccct

SEQ ID NO: 1999435 - DNA, 25 bp, Homo sapien
ctttctgcccttcccgcttgcagta

SEQ ID NO: 1999436 - DNA, 25 bp, Homo sapien
ctgcccttcccgcttgcagtatccc

SEQ ID NO: 1999437 - DNA, 25 bp, Homo sapien
atctgcttccggcagccagtgttcc

SEQ ID NO: 1999438 - DNA, 25 bp, Homo sapien
ctttctcccaaatctgcttccggca

SEQ ID NO: 1999439 - DNA, 25 bp, Homo sapien
ccaaatctgcttccggcagccagtg

SEQ ID NO: 1999440 - DNA, 25 bp, Homo sapien
gcttccggcagccagtgttcctcat

SEQ ID NO: 1999441 - DNA, 25 bp, Homo sapien
atctcagatatgtgcatgtgcgtgc

SEQ ID NO: 1999442 - DNA, 25 bp, Homo sapien
gagatgcaacacatcaatcaggcca

SEQ ID NO: 1999443 - DNA, 25 bp, Homo sapien
ggtatgtccactcagctgacacact

SEQ ID NO: 1999444 - DNA, 25 bp, Homo sapien
tggcagaacagttttaccttgtggt

SEQ ID NO: 1999445 - DNA, 25 bp, Homo sapien
cggctgtgtggttttatggtttgat

SEQ ID NO: 1999446 - DNA, 25 bp, Homo sapien
gggctggtgaattcacttctataac

SEQ ID NO: 1999447 - DNA, 25 bp, Homo sapien
ccagcaccttggtcaaacggctgtg

SEQ ID NO: 1999448 - DNA, 25 bp, Homo sapien
agccataaaacacccttggtacagc

SEQ ID NO: 1999449 - DNA, 25 bp, Homo sapien
catcctcattgcctaatgagtacct

SEQ ID NO: 1999450 - DNA, 25 bp, Homo sapien
cactgtgacgaaagtcctagggttt

SEQ ID NO: 1999451 - DNA, 25 bp, Homo sapien
ctcccactgtgacgaaagtcctagg

SEQ ID NO: 1999452 - DNA, 25 bp, Homo sapien
cattgcctaatgagtacctggtgag

SEQ ID NO: 1999453 - DNA, 25 bp, Homo sapien
caatggccggccctgcattgctcgt

SEQ ID NO: 1999454 - DNA, 25 bp, Homo sapien
ggccggccctgcattgctcgttcag

SEQ ID NO: 1999455 - DNA, 25 bp, Homo sapien
ccctgcattgctcgttcagcgtggg

SEQ ID NO: 1999456 - DNA, 25 bp, Homo sapien
cggccctgcattgctcgttcagcgt

SEQ ID NO: 1999457 - DNA, 25 bp, Homo sapien
ctgcagaggtgtgatatctggcctg

SEQ ID NO: 1999458 - DNA, 25 bp, Homo sapien
gcagaggtgtgatatctggcctggc

SEQ ID NO: 1999459 - DNA, 25 bp, Homo sapien
tgcagaggtgtgatatctggcctgg

SEQ ID NO: 1999460 - DNA, 25 bp, Homo sapien
gaactgataactgccatgggagttt

SEQ ID NO: 1999461 - DNA, 25 bp, Homo sapien
tggaactgataactgccatgggagt

SEQ ID NO: 1999462 - DNA, 25 bp, Homo sapien
ctgtgtggaactgataactgccatg

SEQ ID NO: 1999463 - DNA, 25 bp, Homo sapien
tgtggaactgataactgccatggga

SEQ ID NO: 1999464 - DNA, 25 bp, Homo sapien
gggctggatgtgattgagatcttca

SEQ ID NO: 1999465 - DNA, 25 bp, Homo sapien
tgggctggatgtgattgagatcttc

SEQ ID NO: 1999466 - DNA, 25 bp, Homo sapien
gggagagaaagtgaccgctgtcttc

SEQ ID NO: 1999467 - DNA, 25 bp, Homo sapien
tgggggagagaaagtgaccgctgtc

SEQ ID NO: 1999468 - DNA, 25 bp, Homo sapien
gaacctggctggtggttgtggctgg

SEQ ID NO: 1999469 - DNA, 25 bp, Homo sapien
agggagctgtccagccgtgacagga

SEQ ID NO: 1999470 - DNA, 25 bp, Homo sapien
agctgtccagccgtgacaggaacct

SEQ ID NO: 1999471 - DNA, 25 bp, Homo sapien
tccagccgtgacaggaacctggctg

SEQ ID NO: 1999472 - DNA, 25 bp, Homo sapien
tcataaaggcttgagcatggaagaa

SEQ ID NO: 1999473 - DNA, 25 bp, Homo sapien
tggccattcccgagatgtgccccat

SEQ ID NO: 1999474 - DNA, 25 bp, Homo sapien
actccagccagtctggccattcccg

SEQ ID NO: 1999475 - DNA, 25 bp, Homo sapien
ctccagccagtctggccattcccga

SEQ ID NO: 1999476 - DNA, 25 bp, Homo sapien
ccagtctggccattcccgagatgtg

SEQ ID NO: 1999477 - DNA, 25 bp, Homo sapien
tgcaaacccagggtgctgtccgggc

SEQ ID NO: 1999478 - DNA, 25 bp, Homo sapien
gacaatccccgacagagagcaggaa

SEQ ID NO: 1999479 - DNA, 25 bp, Homo sapien
gtgctgtccgggctctgagcacacc

SEQ ID NO: 1999480 - DNA, 25 bp, Homo sapien
caggaaaggctggttgactctgcca

SEQ ID NO: 1999481 - DNA, 25 bp, Homo sapien
cccagcttctccatcgaggagtcga

SEQ ID NO: 1999482 - DNA, 25 bp, Homo sapien
ggtttctttgtcaaggctcccagct

SEQ ID NO: 1999483 - DNA, 25 bp, Homo sapien
tgtaggtttctttgtcaaggctccc

SEQ ID NO: 1999484 - DNA, 25 bp, Homo sapien
ccactggaagcagctagagacgttg

SEQ ID NO: 1999485 - DNA, 25 bp, Homo sapien
ctctggtcttccacaaaaggtgaaa

SEQ ID NO: 1999486 - DNA, 25 bp, Homo sapien
gggtaatttcgaacctgtgatgcaa

SEQ ID NO: 1999487 - DNA, 25 bp, Homo sapien
cctgcaagtttctgtcctggggtaa

SEQ ID NO: 1999488 - DNA, 25 bp, Homo sapien
agatctggctctttagtgatttggg

SEQ ID NO: 1999489 - DNA, 25 bp, Homo sapien
tgcgagggtaaaatgaagctacatc

SEQ ID NO: 1999490 - DNA, 25 bp, Homo sapien
catcagacaagtaagggttcagaac

SEQ ID NO: 1999491 - DNA, 25 bp, Homo sapien
cactacgcataggaacaagaattgg

SEQ ID NO: 1999492 - DNA, 25 bp, Homo sapien
taaggtcacactaacaagtgctggg

SEQ ID NO: 1999493 - DNA, 25 bp, Homo sapien
gactaacaagtagagggcccaaatg

SEQ ID NO: 1999494 - DNA, 25 bp, Homo sapien
gaagaggtttcagatggtctacact

SEQ ID NO: 1999495 - DNA, 25 bp, Homo sapien
tactggtggcacttagcactactga

SEQ ID NO: 1999496 - DNA, 25 bp, Homo sapien
ggaagagtgccatgaactttcaagg

SEQ ID NO: 1999497 - DNA, 25 bp, Homo sapien
ggctgttggtagagaggccctggcc

SEQ ID NO: 1999498 - DNA, 25 bp, Homo sapien
ctggcctgcctttctgcccaggacc

SEQ ID NO: 1999499 - DNA, 25 bp, Homo sapien
caggctgttggtagagaggccctgg

SEQ ID NO: 1999500 - DNA, 25 bp, Homo sapien
ggcctgcctttctgcccaggaccat

SEQ ID NO: 1999501 - DNA, 25 bp, Homo sapien
gataatcagtaaagacttgctgtgc

SEQ ID NO: 1999502 - DNA, 25 bp, Homo sapien
gaaatttcacttgcggcgctgtcag

SEQ ID NO: 1999503 - DNA, 25 bp, Homo sapien
ggcctggcataatgccttgtgtatg

SEQ ID NO: 1999504 - DNA, 25 bp, Homo sapien
ggtgctacattccagggagtggaca

SEQ ID NO: 1999505 - DNA, 25 bp, Homo sapien
gaagtctgtacccacaagcatcatg

SEQ ID NO: 1999506 - DNA, 25 bp, Homo sapien
tgctttccggtgcagggagcacatc

SEQ ID NO: 1999507 - DNA, 25 bp, Homo sapien
gaaccctggacggtctgactcagaa

SEQ ID NO: 1999508 - DNA, 25 bp, Homo sapien
aatgtacctggaatagcacagctag

SEQ ID NO: 1999509 - DNA, 25 bp, Homo sapien
gaggacagacagctaccaggttccc

SEQ ID NO: 1999510 - DNA, 25 bp, Homo sapien
gttccccagaaagacacaaaggagc

SEQ ID NO: 1999511 - DNA, 25 bp, Homo sapien
tcttggtcgagctgtctcagtggag

SEQ ID NO: 1999512 - DNA, 25 bp, Homo sapien
tctgcctcgagtcccagcatgagtg

SEQ ID NO: 1999513 - DNA, 25 bp, Homo sapien
ttgctgaagccgttgactggtatca

SEQ ID NO: 1999514 - DNA, 25 bp, Homo sapien
gccgttgactggtatcaccaggata

SEQ ID NO: 1999515 - DNA, 25 bp, Homo sapien
tggtatcaccaggataaacacaggc

SEQ ID NO: 1999516 - DNA, 25 bp, Homo sapien
tcaccaggataaacacaggcgtggg

SEQ ID NO: 1999517 - DNA, 25 bp, Homo sapien
ctggcagttatttacatagtgtctg

SEQ ID NO: 1999518 - DNA, 25 bp, Homo sapien
cagttatttacatagtgtctggctt

SEQ ID NO: 1999519 - DNA, 25 bp, Homo sapien
ttatttacatagtgtctggcttgac

SEQ ID NO: 1999520 - DNA, 25 bp, Homo sapien
ttacatagtgtctggcttgacagct

SEQ ID NO: 1999521 - DNA, 25 bp, Homo sapien
ttctagaatagagggcttccacgtt

SEQ ID NO: 1999522 - DNA, 25 bp, Homo sapien
tcacttctccggtgttctagaatag

SEQ ID NO: 1999523 - DNA, 25 bp, Homo sapien
tagagggcttccacgtttgtgagaa

SEQ ID NO: 1999524 - DNA, 25 bp, Homo sapien
tccacgtttgtgagaagtattggtg

SEQ ID NO: 1999525 - DNA, 25 bp, Homo sapien
ctattgtgtataatgtggacatggg

SEQ ID NO: 1999526 - DNA, 25 bp, Homo sapien
tgcatgtggctatccgtaatactgt

SEQ ID NO: 1999527 - DNA, 25 bp, Homo sapien
aacatgagatttctatgacttctat

SEQ ID NO: 1999528 - DNA, 25 bp, Homo sapien
cactttcccgttagtactaccatat

SEQ ID NO: 1999529 - DNA, 25 bp, Homo sapien
tggctggtcgatggctgtgccccat

SEQ ID NO: 1999530 - DNA, 25 bp, Homo sapien
ctggatggctggtcgatggctgtgc

SEQ ID NO: 1999531 - DNA, 25 bp, Homo sapien
atggctggtcgatggctgtgcccca

SEQ ID NO: 1999532 - DNA, 25 bp, Homo sapien
ggatggctggtcgatggctgtgccc

SEQ ID NO: 1999533 - DNA, 25 bp, Homo sapien
tgccaaccgttgtgattttaatcct

SEQ ID NO: 1999534 - DNA, 25 bp, Homo sapien
gaccttcctgaggtttgtccctgca

SEQ ID NO: 1999535 - DNA, 25 bp, Homo sapien
tgccctggagattgttgctgttgcc

SEQ ID NO: 1999536 - DNA, 25 bp, Homo sapien
agacacccacgtgccctggagattg

SEQ ID NO: 1999537 - DNA, 25 bp, Homo sapien
cccggccagttggttgcatgatctt

SEQ ID NO: 1999538 - DNA, 25 bp, Homo sapien
acctagggatgtgatgagttcatca

SEQ ID NO: 1999539 - DNA, 25 bp, Homo sapien
gatgtgatgagttcatcactcccgg

SEQ ID NO: 1999540 - DNA, 25 bp, Homo sapien
tgagttcatcactcccggccagttg

SEQ ID NO: 1999541 - DNA, 25 bp, Homo sapien
tgtgaccccaactcgtgactctctt

SEQ ID NO: 1999542 - DNA, 25 bp, Homo sapien
tgctctgtgaccccaactcgtgact

SEQ ID NO: 1999543 - DNA, 25 bp, Homo sapien
gcttctcggggactccacactgcca

SEQ ID NO: 1999544 - DNA, 25 bp, Homo sapien
ttcttctttcctaacggtgccagtg

SEQ ID NO: 1999545 - DNA, 25 bp, Homo sapien
ctgcagggggtactgggcaaaggag

SEQ ID NO: 1999546 - DNA, 25 bp, Homo sapien
agcagtgactggcaactctctgtgg

SEQ ID NO: 1999547 - DNA, 25 bp, Homo sapien
tgactggcaactctctgtggccagc

SEQ ID NO: 1999548 - DNA, 25 bp, Homo sapien
ggctcccgggggcaattggcatgtg

SEQ ID NO: 1999549 - DNA, 25 bp, Homo sapien
aggcatctacttcttggcaggagtc

SEQ ID NO: 1999550 - DNA, 25 bp, Homo sapien
caggcatctacttcttggcaggagt

SEQ ID NO: 1999551 - DNA, 25 bp, Homo sapien
tgaccacatagcagggggtgctgaa

SEQ ID NO: 1999552 - DNA, 25 bp, Homo sapien
cctcgctcgtcctcagcaagcctcc

SEQ ID NO: 1999553 - DNA, 25 bp, Homo sapien
ggcatgtgtgaggtgaccacatagc

SEQ ID NO: 1999554 - DNA, 25 bp, Homo sapien
ctggcccctcgctcgtcctcagcaa

SEQ ID NO: 1999555 - DNA, 25 bp, Homo sapien
caccgccttaggcaccattggtttt

SEQ ID NO: 1999556 - DNA, 25 bp, Homo sapien
aggcaccattggtttttcactaggt

SEQ ID NO: 1999557 - DNA, 25 bp, Homo sapien
attcttccttcagcaccgccttagg

SEQ ID NO: 1999558 - DNA, 25 bp, Homo sapien
aggaggacagccttgtttctgtgat

SEQ ID NO: 1999559 - DNA, 25 bp, Homo sapien
tcactgcccggttcttgagctccga

SEQ ID NO: 1999560 - DNA, 25 bp, Homo sapien
gatgggaatcactgcccggttcttg

SEQ ID NO: 1999561 - DNA, 25 bp, Homo sapien
ttataagatgggaatcactgcccgg

SEQ ID NO: 1999562 - DNA, 25 bp, Homo sapien
aatcactgcccggttcttgagctcc

SEQ ID NO: 1999563 - DNA, 25 bp, Homo sapien
taacaaggatgctgccagttcgggt

SEQ ID NO: 1999564 - DNA, 25 bp, Homo sapien
ggtttggacaatcggcttctaggca

SEQ ID NO: 1999565 - DNA, 25 bp, Homo sapien
gtagtgcgtaaaatccctctcttca

SEQ ID NO: 1999566 - DNA, 25 bp, Homo sapien
tctaggcagatgtcccaaaagtatt

SEQ ID NO: 1999567 - DNA, 25 bp, Homo sapien
ggaaggacttggcatttttccacat

SEQ ID NO: 1999568 - DNA, 25 bp, Homo sapien
ctggaaggacttggcatttttccac

SEQ ID NO: 1999569 - DNA, 25 bp, Homo sapien
tggaaggacttggcatttttccaca

SEQ ID NO: 1999570 - DNA, 25 bp, Homo sapien
agccctgtcaccgttgaaaggtgga

SEQ ID NO: 1999571 - DNA, 25 bp, Homo sapien
tgtcaccgttgaaaggtggacagtt

SEQ ID NO: 1999572 - DNA, 25 bp, Homo sapien
gtgttaacagccctgtcaccgttga

SEQ ID NO: 1999573 - DNA, 25 bp, Homo sapien
taacagccctgtcaccgttgaaagg

SEQ ID NO: 1999574 - DNA, 25 bp, Homo sapien
tgcaatatgatggatgcagaccctg

SEQ ID NO: 1999575 - DNA, 25 bp, Homo sapien
ttgtcaaaagtacgatgtggttcct

SEQ ID NO: 1999576 - DNA, 25 bp, Homo sapien
tggctgcatccttggtgcactgtga

SEQ ID NO: 1999577 - DNA, 25 bp, Homo sapien
tctttgtgagctttcgttctatgat

SEQ ID NO: 1999578 - DNA, 25 bp, Homo sapien
gaactagatcacagcattgtaggca

SEQ ID NO: 1999579 - DNA, 25 bp, Homo sapien
cctttgtaatcggagggctgtgtct

SEQ ID NO: 1999580 - DNA, 25 bp, Homo sapien
gatgcgggactttccctggatacaa

SEQ ID NO: 1999581 - DNA, 25 bp, Homo sapien
ttttagcaagcttagaggaactagc

SEQ ID NO: 1999582 - DNA, 25 bp, Homo sapien
gagctgttcttaactgatcctggtt

SEQ ID NO: 1999583 - DNA, 25 bp, Homo sapien
tataagttacctgcagtctgagctg

SEQ ID NO: 1999584 - DNA, 25 bp, Homo sapien
tcagggatatgctagaattacttcc

SEQ ID NO: 1999585 - DNA, 25 bp, Homo sapien
gaccttctgctcttcgagtagtttg

SEQ ID NO: 1999586 - DNA, 25 bp, Homo sapien
gctaaatcttattataaggaaacca

SEQ ID NO: 1999587 - DNA, 25 bp, Homo sapien
ccagtaatagttgcattgatactgc

SEQ ID NO: 1999588 - DNA, 25 bp, Homo sapien
tttttgtcctcataatcaaaacagc

SEQ ID NO: 1999589 - DNA, 25 bp, Homo sapien
cagtaatagttgcattgatactgct

SEQ ID NO: 1999590 - DNA, 25 bp, Homo sapien
ccttgaccttaatgtgttcagtggg

SEQ ID NO: 1999591 - DNA, 25 bp, Homo sapien
ttttgaaatccttgaccttaatgtg

SEQ ID NO: 1999592 - DNA, 25 bp, Homo sapien
ttatttagaagcagattttcctgta

SEQ ID NO: 1999593 - DNA, 25 bp, Homo sapien
acctaatctgttattcccacttctc

SEQ ID NO: 1999594 - DNA, 25 bp, Homo sapien
caccagaatgtttagtggctttcac

SEQ ID NO: 1999595 - DNA, 25 bp, Homo sapien
tcacttgtgaagatgtttgggctca

SEQ ID NO: 1999596 - DNA, 25 bp, Homo sapien
taaacatgcagtcttagggacaaca

SEQ ID NO: 1999597 - DNA, 25 bp, Homo sapien
cgggactatgaaacagggcaattgc

SEQ ID NO: 1999598 - DNA, 25 bp, Homo sapien
tagttacagattactcccctagaag

SEQ ID NO: 1999599 - DNA, 25 bp, Homo sapien
gagctggagccttaggaaagttcct

SEQ ID NO: 1999600 - DNA, 25 bp, Homo sapien
cccctagaagtctgtattaaatgag

SEQ ID NO: 1999601 - DNA, 25 bp, Homo sapien
aatgagtagatcagtaatcaagagc

SEQ ID NO: 1999602 - DNA, 25 bp, Homo sapien
tgtggtcctcactggcaatataagt

SEQ ID NO: 1999603 - DNA, 25 bp, Homo sapien
tacccacacatggactatggagaga

SEQ ID NO: 1999604 - DNA, 25 bp, Homo sapien
cttgggctaaaatcagaacgtctct

SEQ ID NO: 1999605 - DNA, 25 bp, Homo sapien
aaagtgcctgagatagacaataccc

SEQ ID NO: 1999606 - DNA, 25 bp, Homo sapien
gaaaacaggacgattagatgagctt

SEQ ID NO: 1999607 - DNA, 25 bp, Homo sapien
catcaccactcaaaactgtaatact

SEQ ID NO: 1999608 - DNA, 25 bp, Homo sapien
ggtaagaacatgtcgtccatcttgc

SEQ ID NO: 1999609 - DNA, 25 bp, Homo sapien
atcttgccattcacgccgccagttg

SEQ ID NO: 1999610 - DNA, 25 bp, Homo sapien
tctgtgctaggataagactgtgtca

SEQ ID NO: 1999611 - DNA, 25 bp, Homo sapien
cactatagacagtttaaccgggctg

SEQ ID NO: 1999612 - DNA, 25 bp, Homo sapien
ctttgtggcacagagtaggaatcca

SEQ ID NO: 1999613 - DNA, 25 bp, Homo sapien
tacggtgtctgtagttggctcctct

SEQ ID NO: 1999614 - DNA, 25 bp, Homo sapien
tacttgtacactgactgctagctcc

SEQ ID NO: 1999615 - DNA, 25 bp, Homo sapien
gaaaccaagcctagagattggctgc

SEQ ID NO: 1999616 - DNA, 25 bp, Homo sapien
tactcatgctaactcaaaaagaggt

SEQ ID NO: 1999617 - DNA, 25 bp, Homo sapien
catgtataaaactgaccctttagcc

SEQ ID NO: 1999618 - DNA, 25 bp, Homo sapien
taagtagtctctttacacagcagtc

SEQ ID NO: 1999619 - DNA, 25 bp, Homo sapien
aagcttgcattaggtttgacagtcc

SEQ ID NO: 1999620 - DNA, 25 bp, Homo sapien
tactagcttacgctttggagagaac

SEQ ID NO: 1999621 - DNA, 25 bp, Homo sapien
ggcagtgtctttccttactagctta

SEQ ID NO: 1999622 - DNA, 25 bp, Homo sapien
taagtaggtatcgttgcaggtgagt

SEQ ID NO: 1999623 - DNA, 25 bp, Homo sapien
aagctacaacgtgcctgactcctgg

SEQ ID NO: 1999624 - DNA, 25 bp, Homo sapien
tcctctgggacacgttcatttctca

SEQ ID NO: 1999625 - DNA, 25 bp, Homo sapien
ggaacagagtcgtactcaaagctac

SEQ ID NO: 1999626 - DNA, 25 bp, Homo sapien
gttttcaccactctgtgggcccgtg

SEQ ID NO: 1999627 - DNA, 25 bp, Homo sapien
ccttgcaccaggttttcaccactct

SEQ ID NO: 1999628 - DNA, 25 bp, Homo sapien
ttgcaccaggttttcaccactctgt

SEQ ID NO: 1999629 - DNA, 25 bp, Homo sapien
tcaccactctgtgggcccgtgaagc

SEQ ID NO: 1999630 - DNA, 25 bp, Homo sapien
gttgtagaaagcatagctgactgca

SEQ ID NO: 1999631 - DNA, 25 bp, Homo sapien
ttgtagaaagcatagctgactgcaa

SEQ ID NO: 1999632 - DNA, 25 bp, Homo sapien
ctgccatccgcatgcccctggccag

SEQ ID NO: 1999633 - DNA, 25 bp, Homo sapien
ccactgccatccgcatgcccctggc

SEQ ID NO: 1999634 - DNA, 25 bp, Homo sapien
actgccatccgcatgcccctggcca

SEQ ID NO: 1999635 - DNA, 25 bp, Homo sapien
acatcccgccgagaaaaactctcag

SEQ ID NO: 1999636 - DNA, 25 bp, Homo sapien
ttagtgattcaagggacaatcttcc

SEQ ID NO: 1999637 - DNA, 25 bp, Homo sapien
aatcttccataacttcggtcgcacg

SEQ ID NO: 1999638 - DNA, 25 bp, Homo sapien
gattgctctacgtaaaatgacactc

SEQ ID NO: 1999639 - DNA, 25 bp, Homo sapien
aacaactaggctggtccctgtcggc

SEQ ID NO: 1999640 - DNA, 25 bp, Homo sapien
tccatgtccgaagccaacaactagg

SEQ ID NO: 1999641 - DNA, 25 bp, Homo sapien
cacagatgaagctgttcgggcgcgc

SEQ ID NO: 1999642 - DNA, 25 bp, Homo sapien
agcggcagttcgaggagacacagat

SEQ ID NO: 1999643 - DNA, 25 bp, Homo sapien
cagccgaccacctagcatcagtgtt

SEQ ID NO: 1999644 - DNA, 25 bp, Homo sapien
taaagccctgcttagctgattctga

SEQ ID NO: 1999645 - DNA, 25 bp, Homo sapien
atcagagcctgggtgaatttgtgga

SEQ ID NO: 1999646 - DNA, 25 bp, Homo sapien
tttgtggaggcccaagacatatccc

SEQ ID NO: 1999647 - DNA, 25 bp, Homo sapien
tatacaactttgtgttgacatttac

SEQ ID NO: 1999648 - DNA, 25 bp, Homo sapien
caactttgtgttgacatttacttgg

SEQ ID NO: 1999649 - DNA, 25 bp, Homo sapien
tataattatacaactttgtgttgac

SEQ ID NO: 1999650 - DNA, 25 bp, Homo sapien
tttgtgttgacatttacttggaaag

SEQ ID NO: 1999651 - DNA, 25 bp, Homo sapien
taagcctgttatcagatcttctttc

SEQ ID NO: 1999652 - DNA, 25 bp, Homo sapien
tgatccctaagcctgttatcagatc

SEQ ID NO: 1999653 - DNA, 25 bp, Homo sapien
tccctaagcctgttatcagatcttc

SEQ ID NO: 1999654 - DNA, 25 bp, Homo sapien
attttgatccctaagcctgttatca

SEQ ID NO: 1999655 - DNA, 25 bp, Homo sapien
agaaagcgaagtcggacaagtccag

SEQ ID NO: 1999656 - DNA, 25 bp, Homo sapien
ggccagttctgagccaaaccagttt

SEQ ID NO: 1999657 - DNA, 25 bp, Homo sapien
gctgttaaataggatcccgttcatt

SEQ ID NO: 1999658 - DNA, 25 bp, Homo sapien
tccagtttaattgcgacgtgcagct

SEQ ID NO: 1999659 - DNA, 25 bp, Homo sapien
gcgcctgtcccagccccggggactc

SEQ ID NO: 1999660 - DNA, 25 bp, Homo sapien
tggccctagccagcaggaattgtgt

SEQ ID NO: 1999661 - DNA, 25 bp, Homo sapien
gaacatagcttattgggaatgcaaa

SEQ ID NO: 1999662 - DNA, 25 bp, Homo sapien
ttaccacaagagtgattaccatgcc

SEQ ID NO: 1999663 - DNA, 25 bp, Homo sapien
tcatgagacaacactggagctttcc

SEQ ID NO: 1999664 - DNA, 25 bp, Homo sapien
gtctgaggggccaattgagaaccag

SEQ ID NO: 1999665 - DNA, 25 bp, Homo sapien
ctgaggggccaattgagaaccagct

SEQ ID NO: 1999666 - DNA, 25 bp, Homo sapien
ttgtctgaggggccaattgagaacc

SEQ ID NO: 1999667 - DNA, 25 bp, Homo sapien
ctccttgtctgaggggccaattgag

SEQ ID NO: 1999668 - DNA, 25 bp, Homo sapien
tcctgactcttctcacattggcaga

SEQ ID NO: 1999669 - DNA, 25 bp, Homo sapien
aggaaccaaggttgcccatattcta

SEQ ID NO: 1999670 - DNA, 25 bp, Homo sapien
ggaaccaaggttgcccatattctaa

SEQ ID NO: 1999671 - DNA, 25 bp, Homo sapien
aatcctgttcctgactcttctcaca

SEQ ID NO: 1999672 - DNA, 25 bp, Homo sapien
ctaggaggaggcaaacattaagtct

SEQ ID NO: 1999673 - DNA, 25 bp, Homo sapien
actactggggctgaaggagcttgtc

SEQ ID NO: 1999674 - DNA, 25 bp, Homo sapien
ggaggcaaacattaagtctatacta

SEQ ID NO: 1999675 - DNA, 25 bp, Homo sapien
caaacattaagtctatactactggg

SEQ ID NO: 1999676 - DNA, 25 bp, Homo sapien
ggctggcagtaggaacaaagactcg

SEQ ID NO: 1999677 - DNA, 25 bp, Homo sapien
ggttgcgcctgcactggcttgatgt

SEQ ID NO: 1999678 - DNA, 25 bp, Homo sapien
aggaatgtgtggaacgcaggtcttc

SEQ ID NO: 1999679 - DNA, 25 bp, Homo sapien
caaagactcgcttgcactgggcttg

SEQ ID NO: 1999680 - DNA, 25 bp, Homo sapien
cccaaaatcagtcggcctcctgcag

SEQ ID NO: 1999681 - DNA, 25 bp, Homo sapien
cttggtacctcccaaaatcagtcgg

SEQ ID NO: 1999682 - DNA, 25 bp, Homo sapien
tctcttggtacctcccaaaatcagt

SEQ ID NO: 1999683 - DNA, 25 bp, Homo sapien
tcccaaaatcagtcggcctcctgca

SEQ ID NO: 1999684 - DNA, 25 bp, Homo sapien
tctttcagctggagtagaagcctgg

SEQ ID NO: 1999685 - DNA, 25 bp, Homo sapien
gaagaacagtgctcatgggcatggc

SEQ ID NO: 1999686 - DNA, 25 bp, Homo sapien
cctggatctctgtcttcgagggaca

SEQ ID NO: 1999687 - DNA, 25 bp, Homo sapien
gttttgccaccagatgggtattcca

SEQ ID NO: 1999688 - DNA, 25 bp, Homo sapien
tacataaacattggttctaaccagg

SEQ ID NO: 1999689 - DNA, 25 bp, Homo sapien
aatagggattaatgtctctgtggcc

SEQ ID NO: 1999690 - DNA, 25 bp, Homo sapien
gaaacaggtctgatctgcctccgac

SEQ ID NO: 1999691 - DNA, 25 bp, Homo sapien
gcagcacacgttttttcccctggta

SEQ ID NO: 1999692 - DNA, 25 bp, Homo sapien
tgttcctggcttccgttgtcctggc

SEQ ID NO: 1999693 - DNA, 25 bp, Homo sapien
aagccccactccagcgacttattgg

SEQ ID NO: 1999694 - DNA, 25 bp, Homo sapien
gtgagggctccagggtcgctccttt

SEQ ID NO: 1999695 - DNA, 25 bp, Homo sapien
cttattggtcggctagtggcagacc

SEQ ID NO: 1999696 - DNA, 25 bp, Homo sapien
ggtcctcctgagagtcagatgcaaa

SEQ ID NO: 1999697 - DNA, 25 bp, Homo sapien
ccgagagggagttgcgggtgtacct

SEQ ID NO: 1999698 - DNA, 25 bp, Homo sapien
tttaaattgtctcccccaagaatgc

SEQ ID NO: 1999699 - DNA, 25 bp, Homo sapien
ccagccgaaggaacgtaagggcact

SEQ ID NO: 1999700 - DNA, 25 bp, Homo sapien
ataggagagaggatctggaactctg

SEQ ID NO: 1999701 - DNA, 25 bp, Homo sapien
gcagagagcaactctcgccactgcc

SEQ ID NO: 1999702 - DNA, 25 bp, Homo sapien
cagagagcaactctcgccactgccc

SEQ ID NO: 1999703 - DNA, 25 bp, Homo sapien
tgcagagagcaactctcgccactgc

SEQ ID NO: 1999704 - DNA, 25 bp, Homo sapien
gtggcggcgtccgcaaagcgttcaa

SEQ ID NO: 1999705 - DNA, 25 bp, Homo sapien
gcggcgtccgcaaagcgttcaactc

SEQ ID NO: 1999706 - DNA, 25 bp, Homo sapien
gggtggcggcgtccgcaaagcgttc

SEQ ID NO: 1999707 - DNA, 25 bp, Homo sapien
gcgggtggcggcgtccgcaaagcgt

SEQ ID NO: 1999708 - DNA, 25 bp, Homo sapien
gccgggagagcgctgcgggcattct

SEQ ID NO: 1999709 - DNA, 25 bp, Homo sapien
cgggagagcgctgcgggcattctcg

SEQ ID NO: 1999710 - DNA, 25 bp, Homo sapien
gcggccgggagagcgctgcgggcat

SEQ ID NO: 1999711 - DNA, 25 bp, Homo sapien
agagcgctgcgggcattctcgctac

SEQ ID NO: 1999712 - DNA, 25 bp, Homo sapien
ggacacggcccgggcacgagcgcgg

SEQ ID NO: 1999713 - DNA, 25 bp, Homo sapien
cgggaccctggcggcgctcaggaca

SEQ ID NO: 1999714 - DNA, 25 bp, Homo sapien
accctggcggcgctcaggacacggc

SEQ ID NO: 1999715 - DNA, 25 bp, Homo sapien
gccgcgtggattcccagcccgggac

SEQ ID NO: 1999716 - DNA, 25 bp, Homo sapien
ggttgaagtaggagctttcgtcctc

SEQ ID NO: 1999717 - DNA, 25 bp, Homo sapien
tctgagccatgctcggtggttgaag

SEQ ID NO: 1999718 - DNA, 25 bp, Homo sapien
cttgccgtgtgaagccagcgggctt

SEQ ID NO: 1999719 - DNA, 25 bp, Homo sapien
tttcgtcctcactggaacatgagtg

SEQ ID NO: 1999720 - DNA, 25 bp, Homo sapien
gacagcttgggtagaagggcagcac

SEQ ID NO: 1999721 - DNA, 25 bp, Homo sapien
cacagacagcttgggtagaagggca

SEQ ID NO: 1999722 - DNA, 25 bp, Homo sapien
cagcttgggtagaagggcagcacga

SEQ ID NO: 1999723 - DNA, 25 bp, Homo sapien
cagacagcttgggtagaagggcagc

SEQ ID NO: 1999724 - DNA, 25 bp, Homo sapien
ggtggtgcctggggtggcctgcttc

SEQ ID NO: 1999725 - DNA, 25 bp, Homo sapien
ctggggctccaagggggtggtgcct

SEQ ID NO: 1999726 - DNA, 25 bp, Homo sapien
ctgcctggggctccaagggggtggt

SEQ ID NO: 1999727 - DNA, 25 bp, Homo sapien
ctccaagggggtggtgcctggggtg

SEQ ID NO: 1999728 - DNA, 25 bp, Homo sapien
gcgatgcccacatgcaggtgttaga

SEQ ID NO: 1999729 - DNA, 25 bp, Homo sapien
cccacatgcaggtgttagatgttcc

SEQ ID NO: 1999730 - DNA, 25 bp, Homo sapien
catgcaggtgttagatgttccgcac

SEQ ID NO: 1999731 - DNA, 25 bp, Homo sapien
tgcgcaggtgcgatgcccacatgca

SEQ ID NO: 1999732 - DNA, 25 bp, Homo sapien
tgagggttgaataacaggtcccaac

SEQ ID NO: 1999733 - DNA, 25 bp, Homo sapien
aggtcccaacttggagcatccattg

SEQ ID NO: 1999734 - DNA, 25 bp, Homo sapien
ctgagggttgaataacaggtcccaa

SEQ ID NO: 1999735 - DNA, 25 bp, Homo sapien
tcccaacttggagcatccattgcct

SEQ ID NO: 1999736 - DNA, 25 bp, Homo sapien
tgggatgcagacactcatctcatgg

SEQ ID NO: 1999737 - DNA, 25 bp, Homo sapien
catctcatggaagttcccagatgcc

SEQ ID NO: 1999738 - DNA, 25 bp, Homo sapien
tctttggactcctttgacctgcaca

SEQ ID NO: 1999739 - DNA, 25 bp, Homo sapien
tttggactcctttgacctgcacatt

SEQ ID NO: 1999740 - DNA, 25 bp, Homo sapien
gcatttgccacacacgttgtcacag

SEQ ID NO: 1999741 - DNA, 25 bp, Homo sapien
acgttgtcacagctgtgcaaccgga

SEQ ID NO: 1999742 - DNA, 25 bp, Homo sapien
cacagctgtgcaaccggaggccatt

SEQ ID NO: 1999743 - DNA, 25 bp, Homo sapien
catttgccacacacgttgtcacagc

SEQ ID NO: 1999744 - DNA, 25 bp, Homo sapien
gcaccctggacttgcaggtgcaggt

SEQ ID NO: 1999745 - DNA, 25 bp, Homo sapien
ggcaccctggacttgcaggtgcagg

SEQ ID NO: 1999746 - DNA, 25 bp, Homo sapien
aggcaccctggacttgcaggtgcag

SEQ ID NO: 1999747 - DNA, 25 bp, Homo sapien
tgtgtgttggctgagctccaagatc

SEQ ID NO: 1999748 - DNA, 25 bp, Homo sapien
tagctgtgtcggtttcataggcagc

SEQ ID NO: 1999749 - DNA, 25 bp, Homo sapien
cagtatccgggttcacaggatgctt

SEQ ID NO: 1999750 - DNA, 25 bp, Homo sapien
cataggcagctttcgcagtatccgg

SEQ ID NO: 1999751 - DNA, 25 bp, Homo sapien
gccaggccgtacacatgtgaatcag

SEQ ID NO: 1999752 - DNA, 25 bp, Homo sapien
ctaaactgccaggccgtacacatgt

SEQ ID NO: 1999753 - DNA, 25 bp, Homo sapien
ccgtacacatgtgaatcagctgcag

SEQ ID NO: 1999754 - DNA, 25 bp, Homo sapien
aactgccaggccgtacacatgtgaa

SEQ ID NO: 1999755 - DNA, 25 bp, Homo sapien
gagcgagaattcaatgggaggaggc

SEQ ID NO: 1999756 - DNA, 25 bp, Homo sapien
agcgagaattcaatgggaggaggct

SEQ ID NO: 1999757 - DNA, 25 bp, Homo sapien
tggagcgagaattcaatgggaggag

SEQ ID NO: 1999758 - DNA, 25 bp, Homo sapien
gatggagcgagaattcaatgggagg

SEQ ID NO: 1999759 - DNA, 25 bp, Homo sapien
tgacagtgtaaacaatcgttgacac

SEQ ID NO: 1999760 - DNA, 25 bp, Homo sapien
tgtaaacaatcgttgacacttttgg

SEQ ID NO: 1999761 - DNA, 25 bp, Homo sapien
taggcttcattacagtaatgacagt

SEQ ID NO: 1999762 - DNA, 25 bp, Homo sapien
tcactataggcttcattacagtaat

SEQ ID NO: 1999763 - DNA, 25 bp, Homo sapien
gaatggcatcagtgtgaggtcacgc

SEQ ID NO: 1999764 - DNA, 25 bp, Homo sapien
gagggagacccatgtcacttagact

SEQ ID NO: 1999765 - DNA, 25 bp, Homo sapien
gacacattgcaggattgagcgatgc

SEQ ID NO: 1999766 - DNA, 25 bp, Homo sapien
tcagcattctggcttattccatggg

SEQ ID NO: 1999767 - DNA, 25 bp, Homo sapien
tgccaggagcaaggacgtcaaaatg

SEQ ID NO: 1999768 - DNA, 25 bp, Homo sapien
gataaggtcttatggcgaacatggc

SEQ ID NO: 1999769 - DNA, 25 bp, Homo sapien
gctagtaggtgggatgcatagacca

SEQ ID NO: 1999770 - DNA, 25 bp, Homo sapien
tcgcaccagatatgagtcagagcta

SEQ ID NO: 1999771 - DNA, 25 bp, Homo sapien
atttgcccgttaaagcctggtgtgg

SEQ ID NO: 1999772 - DNA, 25 bp, Homo sapien
caaatttgcccgttaaagcctggtg

SEQ ID NO: 1999773 - DNA, 25 bp, Homo sapien
atacaaatttgcccgttaaagcctg

SEQ ID NO: 1999774 - DNA, 25 bp, Homo sapien
tcatacaaatttgcccgttaaagcc

SEQ ID NO: 1999775 - DNA, 25 bp, Homo sapien
atgatgtgctcagaggaaccttggg

SEQ ID NO: 1999776 - DNA, 25 bp, Homo sapien
catgatgtgctcagaggaaccttgg

SEQ ID NO: 1999777 - DNA, 25 bp, Homo sapien
agtgagtggtggatttcactttgag

SEQ ID NO: 1999778 - DNA, 25 bp, Homo sapien
gagtggtggatttcactttgagcat

SEQ ID NO: 1999779 - DNA, 25 bp, Homo sapien
gtgagtggtggatttcactttgagc

SEQ ID NO: 1999780 - DNA, 25 bp, Homo sapien
tgagtggtggatttcactttgagca

SEQ ID NO: 1999781 - DNA, 25 bp, Homo sapien
gtacttcgtataattagcaaaaata

SEQ ID NO: 1999782 - DNA, 25 bp, Homo sapien
ttcaagttggagatgacgaagcccc

SEQ ID NO: 1999783 - DNA, 25 bp, Homo sapien
tttccagtaataagtacttcgtata

SEQ ID NO: 1999784 - DNA, 25 bp, Homo sapien
aactttggcttcaagttggagatga

SEQ ID NO: 1999785 - DNA, 25 bp, Homo sapien
gaagatgatgcgaagcagttgtttc

SEQ ID NO: 1999786 - DNA, 25 bp, Homo sapien
cctcttcctggaagatgatgcgaag

SEQ ID NO: 1999787 - DNA, 25 bp, Homo sapien
tcctggaagatgatgcgaagcagtt

SEQ ID NO: 1999788 - DNA, 25 bp, Homo sapien
gatgatgcgaagcagttgtttcagg

SEQ ID NO: 1999789 - DNA, 25 bp, Homo sapien
ggcttaccaaggtgcacttcagaac

SEQ ID NO: 1999790 - DNA, 25 bp, Homo sapien
gatgaggcttaccaaggtgcacttc

SEQ ID NO: 1999791 - DNA, 25 bp, Homo sapien
gaagaaagatgaggcttaccaaggt

SEQ ID NO: 1999792 - DNA, 25 bp, Homo sapien
caaggtgcacttcagaactgttctg

SEQ ID NO: 1999793 - DNA, 25 bp, Homo sapien
caagtctgtagttgatcggttcctg

SEQ ID NO: 1999794 - DNA, 25 bp, Homo sapien
tgccctcactgtaatgctgcttagc

SEQ ID NO: 1999795 - DNA, 25 bp, Homo sapien
gatcccatgccttcgatgtttccaa

SEQ ID NO: 1999796 - DNA, 25 bp, Homo sapien
tcttgagtccatttccaggatccca

SEQ ID NO: 1999797 - DNA, 25 bp, Homo sapien
tctgctcatcttggctcttatccac

SEQ ID NO: 1999798 - DNA, 25 bp, Homo sapien
caaccccttttgaatgactcgcatc

SEQ ID NO: 1999799 - DNA, 25 bp, Homo sapien
cttatccactgcgttgtgatttcct

SEQ ID NO: 1999800 - DNA, 25 bp, Homo sapien
accccttttgaatgactcgcatctg

SEQ ID NO: 1999801 - DNA, 25 bp, Homo sapien
ccaagagaaggatattgtcagttgc

SEQ ID NO: 1999802 - DNA, 25 bp, Homo sapien
accaagagaaggatattgtcagttg

SEQ ID NO: 1999803 - DNA, 25 bp, Homo sapien
tcaaaccaagagaaggatattgtca

SEQ ID NO: 1999804 - DNA, 25 bp, Homo sapien
aaaccaagagaaggatattgtcagt

SEQ ID NO: 1999805 - DNA, 25 bp, Homo sapien
gaagattcggctgtcattcctttta

SEQ ID NO: 1999806 - DNA, 25 bp, Homo sapien
ttatatccccagaggtagttctcaa

SEQ ID NO: 1999807 - DNA, 25 bp, Homo sapien
aatccaggccagctaggtagaggaa

SEQ ID NO: 1999808 - DNA, 25 bp, Homo sapien
tatccccagaggtagttctcaaaca

SEQ ID NO: 1999809 - DNA, 25 bp, Homo sapien
tattggagtctctcctagcagagat

SEQ ID NO: 1999810 - DNA, 25 bp, Homo sapien
cctgtcccggtggatacgcaggcct

SEQ ID NO: 1999811 - DNA, 25 bp, Homo sapien
gcgtggctctcaggtaggtttctcc

SEQ ID NO: 1999812 - DNA, 25 bp, Homo sapien
tccctgtgggtttcaagagcgtggc

SEQ ID NO: 1999813 - DNA, 25 bp, Homo sapien
cagcagacgagcatgaggcatagac

SEQ ID NO: 1999814 - DNA, 25 bp, Homo sapien
cagacgagcatgaggcatagacagc

SEQ ID NO: 1999815 - DNA, 25 bp, Homo sapien
tgcagcagacgagcatgaggcatag

SEQ ID NO: 1999816 - DNA, 25 bp, Homo sapien
gagcatgaggcatagacagcatctc

SEQ ID NO: 1999817 - DNA, 25 bp, Homo sapien
cacccagcattgtaggagcggcagg

SEQ ID NO: 1999818 - DNA, 25 bp, Homo sapien
gggacagctgggaattgcacttcct

SEQ ID NO: 1999819 - DNA, 25 bp, Homo sapien
atcctcacaaatggcctcgctctgg

SEQ ID NO: 1999820 - DNA, 25 bp, Homo sapien
agcactggcaccagaggagctggcc

SEQ ID NO: 1999821 - DNA, 25 bp, Homo sapien
agctgactcatggagccaagatagc

SEQ ID NO: 1999822 - DNA, 25 bp, Homo sapien
gctgcatgagatcagctggaataac

SEQ ID NO: 1999823 - DNA, 25 bp, Homo sapien
tcttccccactcgcctgcgactgcc

SEQ ID NO: 1999824 - DNA, 25 bp, Homo sapien
actcgcctgcgactgcccccctcct

SEQ ID NO: 1999825 - DNA, 25 bp, Homo sapien
ccactcgcctgcgactgcccccctc

SEQ ID NO: 1999826 - DNA, 25 bp, Homo sapien
ttccccactcgcctgcgactgcccc

SEQ ID NO: 1999827 - DNA, 25 bp, Homo sapien
cattttcatacaggaccacctcaga

SEQ ID NO: 1999828 - DNA, 25 bp, Homo sapien
ttttatcctcttaatgagcgtgtaa

SEQ ID NO: 1999829 - DNA, 25 bp, Homo sapien
agcaaaaagcctgacccaacccaag

SEQ ID NO: 1999830 - DNA, 25 bp, Homo sapien
ttaatgagcgtgtaaacagaaggag

SEQ ID NO: 1999831 - DNA, 25 bp, Homo sapien
tcttttgtcacttgcacctcctcct

SEQ ID NO: 1999832 - DNA, 25 bp, Homo sapien
gtcttttgtcacttgcacctcctcc

SEQ ID NO: 1999833 - DNA, 25 bp, Homo sapien
aggatagaactttagcttgcccgca

SEQ ID NO: 1999834 - DNA, 25 bp, Homo sapien
gggcacttggtagatgctcagcaga

SEQ ID NO: 1999835 - DNA, 25 bp, Homo sapien
gctcagcagatattcagtgattatg

SEQ ID NO: 1999836 - DNA, 25 bp, Homo sapien
aagctacggtctgggcagtatttcc

SEQ ID NO: 1999837 - DNA, 25 bp, Homo sapien
gcttccttcatgtttcctgtgggct

SEQ ID NO: 1999838 - DNA, 25 bp, Homo sapien
ttggcttccttcatgtttcctgtgg

SEQ ID NO: 1999839 - DNA, 25 bp, Homo sapien
gggctggccaccagtggacatgcca

SEQ ID NO: 1999840 - DNA, 25 bp, Homo sapien
caccagtggacatgccacccttggg

SEQ ID NO: 1999841 - DNA, 25 bp, Homo sapien
cagagggtgctgactgtcaaatttc

SEQ ID NO: 1999842 - DNA, 25 bp, Homo sapien
taaaggaggtgtctacatagcagag

SEQ ID NO: 1999843 - DNA, 25 bp, Homo sapien
aatgtgattttgagatgttgcctgc

SEQ ID NO: 1999844 - DNA, 25 bp, Homo sapien
gttgcctgcatagggagtgtgctca

SEQ ID NO: 1999845 - DNA, 25 bp, Homo sapien
gatgacaataggaatcgaatgaaga

SEQ ID NO: 1999846 - DNA, 25 bp, Homo sapien
aatcaggcatgggaatatcagatga

SEQ ID NO: 1999847 - DNA, 25 bp, Homo sapien
ctgatgcaagagcttcttgggtcca

SEQ ID NO: 1999848 - DNA, 25 bp, Homo sapien
cagatgagttgatgacaataggaat

SEQ ID NO: 1999849 - DNA, 25 bp, Homo sapien
gggctgggcgcttcccgtgcttagg

SEQ ID NO: 1999850 - DNA, 25 bp, Homo sapien
tcccgtgcttaggtagacctgaagg

SEQ ID NO: 1999851 - DNA, 25 bp, Homo sapien
tgattatacatctttccagttgagt

SEQ ID NO: 1999852 - DNA, 25 bp, Homo sapien
ctccatggccttgattatacatctt

SEQ ID NO: 1999853 - DNA, 25 bp, Homo sapien
gccagtgcacttcctgcagctggca

SEQ ID NO: 1999854 - DNA, 25 bp, Homo sapien
ggtctgagaagcagggccgcagctg

SEQ ID NO: 1999855 - DNA, 25 bp, Homo sapien
tggtggccgcctgagccggggtctg

SEQ ID NO: 1999856 - DNA, 25 bp, Homo sapien
tgcagctggcaagtgcccttcagaa

SEQ ID NO: 1999857 - DNA, 25 bp, Homo sapien
atccgatgtcagtctgaactatttt

SEQ ID NO: 1999858 - DNA, 25 bp, Homo sapien
gatgtcagtctgaactattttgttg

SEQ ID NO: 1999859 - DNA, 25 bp, Homo sapien
tgtgtgtgtttaattacagaccacc

SEQ ID NO: 1999860 - DNA, 25 bp, Homo sapien
gtgtgtgtttaattacagaccaccc

SEQ ID NO: 1999861 - DNA, 25 bp, Homo sapien
gcttgtcctgggagcgtggtttacc

SEQ ID NO: 1999862 - DNA, 25 bp, Homo sapien
ccattagagctttgtttatctagct

SEQ ID NO: 1999863 - DNA, 25 bp, Homo sapien
cttaagcctttctatgccaataata

SEQ ID NO: 1999864 - DNA, 25 bp, Homo sapien
gcctttctatgccaataatatacag

SEQ ID NO: 1999865 - DNA, 25 bp, Homo sapien
tttgactgagaagatttaatgcacc

SEQ ID NO: 1999866 - DNA, 25 bp, Homo sapien
aacagaatctgggttgctttatttt

SEQ ID NO: 1999867 - DNA, 25 bp, Homo sapien
gaggtgatagcaccagccttccaaa

SEQ ID NO: 1999868 - DNA, 25 bp, Homo sapien
ttatttttgggtttgactgagaaga

SEQ ID NO: 1999869 - DNA, 25 bp, Homo sapien
accagtttgaaaggtagctgatagc

SEQ ID NO: 1999870 - DNA, 25 bp, Homo sapien
tacgcatgtcagaaaccagtttgaa

SEQ ID NO: 1999871 - DNA, 25 bp, Homo sapien
cacctctacgcatgtcagaaaccag

SEQ ID NO: 1999872 - DNA, 25 bp, Homo sapien
ccagtttgaaaggtagctgatagcc

SEQ ID NO: 1999873 - DNA, 25 bp, Homo sapien
gacccagtgcccccaggctgcccat

SEQ ID NO: 1999874 - DNA, 25 bp, Homo sapien
cttctggacccagtgcccccaggct

SEQ ID NO: 1999875 - DNA, 25 bp, Homo sapien
ttctggacccagtgcccccaggctg

SEQ ID NO: 1999876 - DNA, 25 bp, Homo sapien
ctggacccagtgcccccaggctgcc

SEQ ID NO: 1999877 - DNA, 25 bp, Homo sapien
cttgatgcccttgaggcatactttc

SEQ ID NO: 1999878 - DNA, 25 bp, Homo sapien
caatggaaaatgcaggatggccctt

SEQ ID NO: 1999879 - DNA, 25 bp, Homo sapien
tatcatgagaaacgtgtggagtgcc

SEQ ID NO: 1999880 - DNA, 25 bp, Homo sapien
gaacctagcgtgtgccattgcaacc

SEQ ID NO: 1999881 - DNA, 25 bp, Homo sapien
cccacaatggataagaggctgagcc

SEQ ID NO: 1999882 - DNA, 25 bp, Homo sapien
ctagctcactgcaggggggattggc

SEQ ID NO: 1999883 - DNA, 25 bp, Homo sapien
cagggcccagtaggctttgatgaag

SEQ ID NO: 1999884 - DNA, 25 bp, Homo sapien
aggggggattggcatggctctcttc

SEQ ID NO: 1999885 - DNA, 25 bp, Homo sapien
ctgaatgcactgtgctagctcactg

SEQ ID NO: 1999886 - DNA, 25 bp, Homo sapien
tggtgctggtaaaggagcatgctca

SEQ ID NO: 1999887 - DNA, 25 bp, Homo sapien
tagtgcggaagcgaatggctaagtg

SEQ ID NO: 1999888 - DNA, 25 bp, Homo sapien
ctgggaagccccgagcaggtctgca

SEQ ID NO: 1999889 - DNA, 25 bp, Homo sapien
catgctcaggcctgggctagtgtgc

SEQ ID NO: 1999890 - DNA, 25 bp, Homo sapien
ctgagagaggcacatgctccctggc

SEQ ID NO: 1999891 - DNA, 25 bp, Homo sapien
gagaggcacatgctccctggcaggt

SEQ ID NO: 1999892 - DNA, 25 bp, Homo sapien
ggcacatgctccctggcaggtaacg

SEQ ID NO: 1999893 - DNA, 25 bp, Homo sapien
gaggcacatgctccctggcaggtaa

SEQ ID NO: 1999894 - DNA, 25 bp, Homo sapien
aggtgcagcggccacaccttcttgg

SEQ ID NO: 1999895 - DNA, 25 bp, Homo sapien
ccttcttggcacagcttaggttctc

SEQ ID NO: 1999896 - DNA, 25 bp, Homo sapien
cacagcttaggttctcagttgtgtc

SEQ ID NO: 1999897 - DNA, 25 bp, Homo sapien
tgtgtgcgtgtcatgtttcccagct

SEQ ID NO: 1999898 - DNA, 25 bp, Homo sapien
tcctcagtcacaggattcattttat

SEQ ID NO: 1999899 - DNA, 25 bp, Homo sapien
ctcatgttgccgagagttgtttggt

SEQ ID NO: 1999900 - DNA, 25 bp, Homo sapien
cttggagatagagccaaaggttcct

SEQ ID NO: 1999901 - DNA, 25 bp, Homo sapien
ttccttgaactcatgttgccgagag

SEQ ID NO: 1999902 - DNA, 25 bp, Homo sapien
attgagtgtaggcttcctcctctcg

SEQ ID NO: 1999903 - DNA, 25 bp, Homo sapien
ggaggcttatgaggagtttctagaa

SEQ ID NO: 1999904 - DNA, 25 bp, Homo sapien
ctgcagaaactgtaggttttgggta

SEQ ID NO: 1999905 - DNA, 25 bp, Homo sapien
tcctctcgcctcttcaggaaatgaa

SEQ ID NO: 1999906 - DNA, 25 bp, Homo sapien
gtatcaagtgcctcttcgtgccagg

SEQ ID NO: 1999907 - DNA, 25 bp, Homo sapien
tgacaccagctaagtataggacatc

SEQ ID NO: 1999908 - DNA, 25 bp, Homo sapien
agcagatgctccttcgttcagggct

SEQ ID NO: 1999909 - DNA, 25 bp, Homo sapien
gatccagcccttgtcccttcatatg

SEQ ID NO: 1999910 - DNA, 25 bp, Homo sapien
ttacctcttgggaccgtgactgggc

SEQ ID NO: 1999911 - DNA, 25 bp, Homo sapien
catgacagtgggaggcgcttttgct

SEQ ID NO: 1999912 - DNA, 25 bp, Homo sapien
aaattgggctccaagtgttacctct

SEQ ID NO: 1999913 - DNA, 25 bp, Homo sapien
tatgtagtactttggaaagatgatc

SEQ ID NO: 1999914 - DNA, 25 bp, Homo sapien
ccagttagtatgtgcgcgctgattt

SEQ ID NO: 1999915 - DNA, 25 bp, Homo sapien
gcgtcgccgtttacagcacacatta

SEQ ID NO: 1999916 - DNA, 25 bp, Homo sapien
attttatacacatacgcgtcgccgt

SEQ ID NO: 1999917 - DNA, 25 bp, Homo sapien
aatttgcatttcttagccccgtgca

SEQ ID NO: 1999918 - DNA, 25 bp, Homo sapien
gactgcagggtcagagtgtagacct

SEQ ID NO: 1999919 - DNA, 25 bp, Homo sapien
ttgctgaatagttgtggattggccc

SEQ ID NO: 1999920 - DNA, 25 bp, Homo sapien
cagagtgtagacctccatcagcagg

SEQ ID NO: 1999921 - DNA, 25 bp, Homo sapien
tagttgtggattggccctggaaata

SEQ ID NO: 1999922 - DNA, 25 bp, Homo sapien
aaaactctttctctcaggccaatcc

SEQ ID NO: 1999923 - DNA, 25 bp, Homo sapien
cttcgcagcaaacaggcagcagtgg

SEQ ID NO: 1999924 - DNA, 25 bp, Homo sapien
cttcagagtctggtaagcaaaactc

SEQ ID NO: 1999925 - DNA, 25 bp, Homo sapien
ttgagggcccttgaaattcctctgg

SEQ ID NO: 1999926 - DNA, 25 bp, Homo sapien
agaaacacctcggtaggtcgtcctg

SEQ ID NO: 1999927 - DNA, 25 bp, Homo sapien
ccgagaagtccggtggcttggccct

SEQ ID NO: 1999928 - DNA, 25 bp, Homo sapien
ttcattggcggggttgaggaatcca

SEQ ID NO: 1999929 - DNA, 25 bp, Homo sapien
gcttggccctgttcttcattggcgg

SEQ ID NO: 1999930 - DNA, 25 bp, Homo sapien
tccttgctgctgtcaagtcgggaag

SEQ ID NO: 1999931 - DNA, 25 bp, Homo sapien
gctggaaaggctgggatccagcacc

SEQ ID NO: 1999932 - DNA, 25 bp, Homo sapien
ggtgtcgctcatgcaggactcaaag

SEQ ID NO: 1999933 - DNA, 25 bp, Homo sapien
gatctgagcagagtacagtccttgc

SEQ ID NO: 1999934 - DNA, 25 bp, Homo sapien
gcccgtcggcagccacaggtggttt

SEQ ID NO: 1999935 - DNA, 25 bp, Homo sapien
ggcccggagcgaagtggcgcgcggg

SEQ ID NO: 1999936 - DNA, 25 bp, Homo sapien
ctggaaaggaacttctgcgggcgcg

SEQ ID NO: 1999937 - DNA, 25 bp, Homo sapien
gggcgggcccgtcggcagccacagg

SEQ ID NO: 1999938 - DNA, 25 bp, Homo sapien
gcgcagccccgccacgagactctga

SEQ ID NO: 1999939 - DNA, 25 bp, Homo sapien
cagggaccggcggacaccggcggcg

SEQ ID NO: 1999940 - DNA, 25 bp, Homo sapien
acgagactctgacagcggcgcggcc

SEQ ID NO: 1999941 - DNA, 25 bp, Homo sapien
gcgaggctcgggcgcgcagggaccg

SEQ ID NO: 1999942 - DNA, 25 bp, Homo sapien
ttagccctgtgcgccccccgagccg

SEQ ID NO: 1999943 - DNA, 25 bp, Homo sapien
ggggctgacagccgcggcgcgggag

SEQ ID NO: 1999944 - DNA, 25 bp, Homo sapien
gcggggctgacagccgcggcgcggg

SEQ ID NO: 1999945 - DNA, 25 bp, Homo sapien
cggggctgacagccgcggcgcggga

SEQ ID NO: 1999946 - DNA, 25 bp, Homo sapien
gccgcagagggcgtcaggagaccgg

SEQ ID NO: 1999947 - DNA, 25 bp, Homo sapien
ggcgtcaggagaccggagaaacggc

SEQ ID NO: 1999948 - DNA, 25 bp, Homo sapien
tcaggagaccggagaaacggcggcc

SEQ ID NO: 1999949 - DNA, 25 bp, Homo sapien
cggcggtcccaagcctgcgctgggg

SEQ ID NO: 1999950 - DNA, 25 bp, Homo sapien
gtgctgcctccgatgtactaccaag

SEQ ID NO: 1999951 - DNA, 25 bp, Homo sapien
tattaatccgtagccagaatgggca

SEQ ID NO: 1999952 - DNA, 25 bp, Homo sapien
tggagggaacatctgcccaagtgtc

SEQ ID NO: 1999953 - DNA, 25 bp, Homo sapien
ttaggaagaggcaccaaaggttcac

SEQ ID NO: 1999954 - DNA, 25 bp, Homo sapien
aaacctaatatgagagggcagtggc

SEQ ID NO: 1999955 - DNA, 25 bp, Homo sapien
taggtgctctctaaatgcatccgca

SEQ ID NO: 1999956 - DNA, 25 bp, Homo sapien
cagggctgggatcctctaggtgctc

SEQ ID NO: 1999957 - DNA, 25 bp, Homo sapien
tgggtcagcagcattccaagtaact

SEQ ID NO: 1999958 - DNA, 25 bp, Homo sapien
cacatttatattagagtctatttac

SEQ ID NO: 1999959 - DNA, 25 bp, Homo sapien
tagagccacatttatattagagtct

SEQ ID NO: 1999960 - DNA, 25 bp, Homo sapien
gagccacatttatattagagtctat

SEQ ID NO: 1999961 - DNA, 25 bp, Homo sapien
gccacatttatattagagtctattt

SEQ ID NO: 1999962 - DNA, 25 bp, Homo sapien
tagaaagggacctactattatctcc

SEQ ID NO: 1999963 - DNA, 25 bp, Homo sapien
caatttacaatgtgctctacagtgc

SEQ ID NO: 1999964 - DNA, 25 bp, Homo sapien
acagtaaccccttaatgaatgttgt

SEQ ID NO: 1999965 - DNA, 25 bp, Homo sapien
tccagcatctctatggagtagaaag

SEQ ID NO: 1999966 - DNA, 25 bp, Homo sapien
ggcaatctcatcatactccaagagg

SEQ ID NO: 1999967 - DNA, 25 bp, Homo sapien
catcatactccaagaggagcaacat

SEQ ID NO: 1999968 - DNA, 25 bp, Homo sapien
gatgaggcaatctcatcatactcca

SEQ ID NO: 1999969 - DNA, 25 bp, Homo sapien
gacacacataagagcacgtgtcctc

SEQ ID NO: 1999970 - DNA, 25 bp, Homo sapien
tggactctgctcacgagttcccaaa

SEQ ID NO: 1999971 - DNA, 25 bp, Homo sapien
ttccttttggtaaccatggactctg

SEQ ID NO: 1999972 - DNA, 25 bp, Homo sapien
tctgctcacgagttcccaaataggg

SEQ ID NO: 1999973 - DNA, 25 bp, Homo sapien
gagagaaggtcacggttcctggtaa

SEQ ID NO: 1999974 - DNA, 25 bp, Homo sapien
ttgagctgaagacccaactcatcct

SEQ ID NO: 1999975 - DNA, 25 bp, Homo sapien
ctccttgagctgaagacccaactca

SEQ ID NO: 1999976 - DNA, 25 bp, Homo sapien
gagctgaagacccaactcatccttt

SEQ ID NO: 1999977 - DNA, 25 bp, Homo sapien
ccttgagctgaagacccaactcatc

SEQ ID NO: 1999978 - DNA, 25 bp, Homo sapien
gctcttgctccagcttcgtgggatg

SEQ ID NO: 1999979 - DNA, 25 bp, Homo sapien
ggctcttgctccagcttcgtgggat

SEQ ID NO: 1999980 - DNA, 25 bp, Homo sapien
tgggaagcatcatgaggagcaatgc

SEQ ID NO: 1999981 - DNA, 25 bp, Homo sapien
tcatgaggagcaatgcaaagtgggt

SEQ ID NO: 1999982 - DNA, 25 bp, Homo sapien
caggcgggttagcgtcctctgagaa

SEQ ID NO: 1999983 - DNA, 25 bp, Homo sapien
ttaacaggcgccgaggctctccagc

SEQ ID NO: 1999984 - DNA, 25 bp, Homo sapien
ttctccctgactgattgccttaaca

SEQ ID NO: 1999985 - DNA, 25 bp, Homo sapien
agggctggcagtctcgggcgggcag

SEQ ID NO: 1999986 - DNA, 25 bp, Homo sapien
gttggtgctgtcttgaagcgcagca

SEQ ID NO: 1999987 - DNA, 25 bp, Homo sapien
agcagacctgggacgggagctgcct

SEQ ID NO: 1999988 - DNA, 25 bp, Homo sapien
tgccttgcgtttgtaggctctctgg

SEQ ID NO: 1999989 - DNA, 25 bp, Homo sapien
cttgcgtttgtaggctctctggacc

SEQ ID NO: 1999990 - DNA, 25 bp, Homo sapien
tgtcggctttagcatgccctgtgat

SEQ ID NO: 1999991 - DNA, 25 bp, Homo sapien
atttttcttggaggctagtattggg

SEQ ID NO: 1999992 - DNA, 25 bp, Homo sapien
aatttttcttggaggctagtattgg

SEQ ID NO: 1999993 - DNA, 25 bp, Homo sapien
ctcatatcttgaatggtaatgctaa

SEQ ID NO: 1999994 - DNA, 25 bp, Homo sapien
tcttgaatggtaatgctaatctcta

SEQ ID NO: 1999995 - DNA, 25 bp, Homo sapien
tcactctactgatggattgcctgag

SEQ ID NO: 1999996 - DNA, 25 bp, Homo sapien
cctagaagtccaagggttcagccca

SEQ ID NO: 1999997 - DNA, 25 bp, Homo sapien
taaagctccatatccggtggcatgt

SEQ ID NO: 1999998 - DNA, 25 bp, Homo sapien
gttgatctgccccagtaaagctcca

SEQ ID NO: 1999999 - DNA, 25 bp, Homo sapien
ttgcaaggatgaagttccaacgctc

SEQ ID NO: 2000000 - DNA, 25 bp, Homo sapien
caaggatgaagttccaacgctccag

SEQ ID NO: 2000001 - DNA, 25 bp, Homo sapien
gaagttccaacgctccagcatgaga

SEQ ID NO: 2000002 - DNA, 25 bp, Homo sapien
gatgaagttccaacgctccagcatg

SEQ ID NO: 2000003 - DNA, 25 bp, Homo sapien
ctcaggtttgataggtctcctgtca

SEQ ID NO: 2000004 - DNA, 25 bp, Homo sapien
tcctcaggtttgataggtctcctgt

SEQ ID NO: 2000005 - DNA, 25 bp, Homo sapien
cctcaggtttgataggtctcctgtc

SEQ ID NO: 2000006 - DNA, 25 bp, Homo sapien
tcaggtttgataggtctcctgtcac

SEQ ID NO: 2000007 - DNA, 25 bp, Homo sapien
tgttgctggtttggcgtatttgtcc

SEQ ID NO: 2000008 - DNA, 25 bp, Homo sapien
cagttatcttcactgtgagcccctg

SEQ ID NO: 2000009 - DNA, 25 bp, Homo sapien
cccagttatcttcactgtgagcccc

SEQ ID NO: 2000010 - DNA, 25 bp, Homo sapien
tgggggtgagaatttgtgggtgact

SEQ ID NO: 2000011 - DNA, 25 bp, Homo sapien
ccaacagcctcagtattaaaggtat

SEQ ID NO: 2000012 - DNA, 25 bp, Homo sapien
gtggtttcaacactacataaggtaa

SEQ ID NO: 2000013 - DNA, 25 bp, Homo sapien
aaaggtatgagcagcacatcctcct

SEQ ID NO: 2000014 - DNA, 25 bp, Homo sapien
ttgctaaatccaacagcctcagtat

SEQ ID NO: 2000015 - DNA, 25 bp, Homo sapien
tcaactcctgtttcaaagccagcat

SEQ ID NO: 2000016 - DNA, 25 bp, Homo sapien
tctctcaactcctgtttcaaagcca

SEQ ID NO: 2000017 - DNA, 25 bp, Homo sapien
ctcaactcctgtttcaaagccagca

SEQ ID NO: 2000018 - DNA, 25 bp, Homo sapien
tctcaactcctgtttcaaagccagc

SEQ ID NO: 2000019 - DNA, 25 bp, Homo sapien
acatctgaagtattagtgaggtgac

SEQ ID NO: 2000020 - DNA, 25 bp, Homo sapien
gaagtattagtgaggtgactttgcc

SEQ ID NO: 2000021 - DNA, 25 bp, Homo sapien
tagtgaggtgactttgcctgcgtct

SEQ ID NO: 2000022 - DNA, 25 bp, Homo sapien
tattagtgaggtgactttgcctgcg

SEQ ID NO: 2000023 - DNA, 25 bp, Homo sapien
tatcctgaaattgtcataagctgca

SEQ ID NO: 2000024 - DNA, 25 bp, Homo sapien
ggcccacgatatcctgaaattgtca

SEQ ID NO: 2000025 - DNA, 25 bp, Homo sapien
acacagagggcccacgatatcctga

SEQ ID NO: 2000026 - DNA, 25 bp, Homo sapien
gaaattgtcataagctgcatcttcc

SEQ ID NO: 2000027 - DNA, 25 bp, Homo sapien
gctccacagccagcctttgtttatg

SEQ ID NO: 2000028 - DNA, 25 bp, Homo sapien
cagccagcctttgtttatggcctac

SEQ ID NO: 2000029 - DNA, 25 bp, Homo sapien
gccagcctttgtttatggcctactg

SEQ ID NO: 2000030 - DNA, 25 bp, Homo sapien
ccagcctttgtttatggcctactgt

SEQ ID NO: 2000031 - DNA, 25 bp, Homo sapien
gaccaatagagaaaacgctgacagc

SEQ ID NO: 2000032 - DNA, 25 bp, Homo sapien
cacttttcggtttctgaccaataga

SEQ ID NO: 2000033 - DNA, 25 bp, Homo sapien
tgctttcttgccaatggcggcggtg

SEQ ID NO: 2000034 - DNA, 25 bp, Homo sapien
cagctgggccgtttggactggcgca

SEQ ID NO: 2000035 - DNA, 25 bp, Homo sapien
ggttgtagccaaagcctgacttgca

SEQ ID NO: 2000036 - DNA, 25 bp, Homo sapien
ttcctggttgtagccaaagcctgac

SEQ ID NO: 2000037 - DNA, 25 bp, Homo sapien
gcctgacttgcaacaggtcaaactt

SEQ ID NO: 2000038 - DNA, 25 bp, Homo sapien
ctgacttgcaacaggtcaaactttc

SEQ ID NO: 2000039 - DNA, 25 bp, Homo sapien
actccactatgggtcataggttgag

SEQ ID NO: 2000040 - DNA, 25 bp, Homo sapien
tctctgggacctattggggcatgct

SEQ ID NO: 2000041 - DNA, 25 bp, Homo sapien
gttgagctgtcccataatgatcatc

SEQ ID NO: 2000042 - DNA, 25 bp, Homo sapien
tggcacctctggtgttagaggacga

SEQ ID NO: 2000043 - DNA, 25 bp, Homo sapien
tggaacagaagatccagcccagcac

SEQ ID NO: 2000044 - DNA, 25 bp, Homo sapien
tgtgtttcatatgagttcccaaatg

SEQ ID NO: 2000045 - DNA, 25 bp, Homo sapien
gaatgtgtttcatatgagttcccaa

SEQ ID NO: 2000046 - DNA, 25 bp, Homo sapien
aatgtgtttcatatgagttcccaaa

SEQ ID NO: 2000047 - DNA, 25 bp, Homo sapien
gtgtttcatatgagttcccaaatgg

SEQ ID NO: 2000048 - DNA, 25 bp, Homo sapien
taaggcagattctatcgtcaggtcc

SEQ ID NO: 2000049 - DNA, 25 bp, Homo sapien
agattctatcgtcaggtcctcgtca

SEQ ID NO: 2000050 - DNA, 25 bp, Homo sapien
agggctcagatgtaaggcagattct

SEQ ID NO: 2000051 - DNA, 25 bp, Homo sapien
gggctcagatgtaaggcagattcta

SEQ ID NO: 2000052 - DNA, 25 bp, Homo sapien
tcctgcaagtttgccctggtgcagg

SEQ ID NO: 2000053 - DNA, 25 bp, Homo sapien
tcaatcctgcaagtttgccctggtg

SEQ ID NO: 2000054 - DNA, 25 bp, Homo sapien
aagtttgccctggtgcagggctcac

SEQ ID NO: 2000055 - DNA, 25 bp, Homo sapien
aatcctgcaagtttgccctggtgca

SEQ ID NO: 2000056 - DNA, 25 bp, Homo sapien
aatgtgtcttcagtatcagtgtggt

SEQ ID NO: 2000057 - DNA, 25 bp, Homo sapien
tcagtgtggttcacagcattactcc

SEQ ID NO: 2000058 - DNA, 25 bp, Homo sapien
tgtggttcacagcattactccccat

SEQ ID NO: 2000059 - DNA, 25 bp, Homo sapien
tcagtatcagtgtggttcacagcat

SEQ ID NO: 2000060 - DNA, 25 bp, Homo sapien
gttgagtgacttccgatctttgtag

SEQ ID NO: 2000061 - DNA, 25 bp, Homo sapien
tgagtgacttccgatctttgtagtt

SEQ ID NO: 2000062 - DNA, 25 bp, Homo sapien
agtgacttccgatctttgtagtttg

SEQ ID NO: 2000063 - DNA, 25 bp, Homo sapien
ggttgagtgacttccgatctttgta

SEQ ID NO: 2000064 - DNA, 25 bp, Homo sapien
ttttacatattgtgtgacaggcatg

SEQ ID NO: 2000065 - DNA, 25 bp, Homo sapien
cctgttgtcattgttggtttttaca

SEQ ID NO: 2000066 - DNA, 25 bp, Homo sapien
tacatattgtgtgacaggcatgcca

SEQ ID NO: 2000067 - DNA, 25 bp, Homo sapien
gtttttacatattgtgtgacaggca

SEQ ID NO: 2000068 - DNA, 25 bp, Homo sapien
ggagagccgactcctgcctcgagtt

SEQ ID NO: 2000069 - DNA, 25 bp, Homo sapien
ggagggacgaggctccggagagccg

SEQ ID NO: 2000070 - DNA, 25 bp, Homo sapien
ctcgagttcggagcgtcccagctgc

SEQ ID NO: 2000071 - DNA, 25 bp, Homo sapien
ccagcgcacagacccagcagagagg

SEQ ID NO: 2000072 - DNA, 25 bp, Homo sapien
cggagcgcggtctgaacagctgcaa

SEQ ID NO: 2000073 - DNA, 25 bp, Homo sapien
gatactaaaccaactgctcgatgca

SEQ ID NO: 2000074 - DNA, 25 bp, Homo sapien
gcaagtttggctgatactaaaccaa

SEQ ID NO: 2000075 - DNA, 25 bp, Homo sapien
aactgctcgatgcagcaaatgcggg

SEQ ID NO: 2000076 - DNA, 25 bp, Homo sapien
cagacttccgttctttagtggctgc

SEQ ID NO: 2000077 - DNA, 25 bp, Homo sapien
tgcaagccacatttttgagcctcag

SEQ ID NO: 2000078 - DNA, 25 bp, Homo sapien
gggctaatactctcctacctcacag

SEQ ID NO: 2000079 - DNA, 25 bp, Homo sapien
aggtgtcaagaatccatactcagaa

SEQ ID NO: 2000080 - DNA, 25 bp, Homo sapien
caggaccttggattcatgactaatg

SEQ ID NO: 2000081 - DNA, 25 bp, Homo sapien
acaggacttggcacactgtagtcaa

SEQ ID NO: 2000082 - DNA, 25 bp, Homo sapien
gacttagccatgaaaatctccaccc

SEQ ID NO: 2000083 - DNA, 25 bp, Homo sapien
tgttatccacccagagcccaaaggg

SEQ ID NO: 2000084 - DNA, 25 bp, Homo sapien
tcatgtcagtggaccctaattcagt

SEQ ID NO: 2000085 - DNA, 25 bp, Homo sapien
aggtcatgtcagtggaccctaattc

SEQ ID NO: 2000086 - DNA, 25 bp, Homo sapien
ccctaaccctcagtacttcagaaca

SEQ ID NO: 2000087 - DNA, 25 bp, Homo sapien
atcacatgagggcactgcaagaagg

SEQ ID NO: 2000088 - DNA, 25 bp, Homo sapien
caaaactgtgcacgctctggaaatc

SEQ ID NO: 2000089 - DNA, 25 bp, Homo sapien
tcaagtctatgacagcttgctggaa

SEQ ID NO: 2000090 - DNA, 25 bp, Homo sapien
ttttctgctcaaaactgtgcacgct

SEQ ID NO: 2000091 - DNA, 25 bp, Homo sapien
ccccagatcaagtctatgacagctt

SEQ ID NO: 2000092 - DNA, 25 bp, Homo sapien
tgggtgcaccgaatcacttgctgat

SEQ ID NO: 2000093 - DNA, 25 bp, Homo sapien
taagtttgctgggtgcaccgaatca

SEQ ID NO: 2000094 - DNA, 25 bp, Homo sapien
ccgaatcacttgctgatctttgttc

SEQ ID NO: 2000095 - DNA, 25 bp, Homo sapien
gtaaatctattctaagtttgctggg

SEQ ID NO: 2000096 - DNA, 25 bp, Homo sapien
ggatgtcccgtgctctgctggcctt

SEQ ID NO: 2000097 - DNA, 25 bp, Homo sapien
ttccaagccctgcacgtagtgtttt

SEQ ID NO: 2000098 - DNA, 25 bp, Homo sapien
cctgcaaagtaagccattttggaga

SEQ ID NO: 2000099 - DNA, 25 bp, Homo sapien
ggaggtcatgaaacacagggatgtc

SEQ ID NO: 2000100 - DNA, 25 bp, Homo sapien
ggaaggtgacctgtatggccaagca

SEQ ID NO: 2000101 - DNA, 25 bp, Homo sapien
actgctggggatgcgactgccttcc

SEQ ID NO: 2000102 - DNA, 25 bp, Homo sapien
caggatgtcctcagatatacttgca

SEQ ID NO: 2000103 - DNA, 25 bp, Homo sapien
tgacaccagactccactccgtggaa

SEQ ID NO: 2000104 - DNA, 25 bp, Homo sapien
tgtaatccagctgggtcagctttaa

SEQ ID NO: 2000105 - DNA, 25 bp, Homo sapien
gcgctgctgtaatccagctgggtca

SEQ ID NO: 2000106 - DNA, 25 bp, Homo sapien
agtgcgctgctgtaatccagctggg

SEQ ID NO: 2000107 - DNA, 25 bp, Homo sapien
gctgtaatccagctgggtcagcttt

SEQ ID NO: 2000108 - DNA, 25 bp, Homo sapien
gggaatgctggaaagcatgaaaggc

SEQ ID NO: 2000109 - DNA, 25 bp, Homo sapien
acaggccacagagaatgggttctgg

SEQ ID NO: 2000110 - DNA, 25 bp, Homo sapien
ctggggaatgctggaaagcatgaaa

SEQ ID NO: 2000111 - DNA, 25 bp, Homo sapien
ctttgacaggccacagagaatgggt

SEQ ID NO: 2000112 - DNA, 25 bp, Homo sapien
taagtccagttcagctgcgcaagcc

SEQ ID NO: 2000113 - DNA, 25 bp, Homo sapien
agttcagctgcgcaagcctgcattg

SEQ ID NO: 2000114 - DNA, 25 bp, Homo sapien
tcagctgcgcaagcctgcattgggc

SEQ ID NO: 2000115 - DNA, 25 bp, Homo sapien
gatcaaggataagtccagttcagct

SEQ ID NO: 2000116 - DNA, 25 bp, Homo sapien
gtctggagcttactgcaggcccact

SEQ ID NO: 2000117 - DNA, 25 bp, Homo sapien
actgcaggcccactggaagtctaag

SEQ ID NO: 2000118 - DNA, 25 bp, Homo sapien
cactggaagtctaagggtttggctt

SEQ ID NO: 2000119 - DNA, 25 bp, Homo sapien
gggtgccgcagccagaagatgagct

SEQ ID NO: 2000120 - DNA, 25 bp, Homo sapien
cctggagtgggcattggaaactgct

SEQ ID NO: 2000121 - DNA, 25 bp, Homo sapien
tcaagcctttgggtcctgtccaggg

SEQ ID NO: 2000122 - DNA, 25 bp, Homo sapien
tgtccagggtgccagaagttatgta

SEQ ID NO: 2000123 - DNA, 25 bp, Homo sapien
ccagggagtccgaagtcatttaggg

SEQ ID NO: 2000124 - DNA, 25 bp, Homo sapien
ggcacattacaagtggacccagcag

SEQ ID NO: 2000125 - DNA, 25 bp, Homo sapien
ggtggcacattacaagtggacccag

SEQ ID NO: 2000126 - DNA, 25 bp, Homo sapien
cagacggctgctgatgggcacagat

SEQ ID NO: 2000127 - DNA, 25 bp, Homo sapien
acagatgggtggcacattacaagtg

SEQ ID NO: 2000128 - DNA, 25 bp, Homo sapien
cccccaccactttcgatgaccgcct

SEQ ID NO: 2000129 - DNA, 25 bp, Homo sapien
ccaccactttcgatgaccgccttgt

SEQ ID NO: 2000130 - DNA, 25 bp, Homo sapien
cccaccactttcgatgaccgccttg

SEQ ID NO: 2000131 - DNA, 25 bp, Homo sapien
caccactttcgatgaccgccttgtc

SEQ ID NO: 2000132 - DNA, 25 bp, Homo sapien
tctgtccccaagagtagcctccatg

SEQ ID NO: 2000133 - DNA, 25 bp, Homo sapien
catggctggccggaaggcaagggag

SEQ ID NO: 2000134 - DNA, 25 bp, Homo sapien
caagggagatgccatggattctttc

SEQ ID NO: 2000135 - DNA, 25 bp, Homo sapien
cagggcatggctggccggaaggcaa

SEQ ID NO: 2000136 - DNA, 25 bp, Homo sapien
agggggaatgacgtactgggagcca

SEQ ID NO: 2000137 - DNA, 25 bp, Homo sapien
gggaatgacgtactgggagccactc

SEQ ID NO: 2000138 - DNA, 25 bp, Homo sapien
gaatgacgtactgggagccactcag

SEQ ID NO: 2000139 - DNA, 25 bp, Homo sapien
ctgaagggggaatgacgtactggga

SEQ ID NO: 2000140 - DNA, 25 bp, Homo sapien
catctgccaggtctgaacaagttgg

SEQ ID NO: 2000141 - DNA, 25 bp, Homo sapien
tagttcctgatatctatgctgcctg

SEQ ID NO: 2000142 - DNA, 25 bp, Homo sapien
agtcctgcaacacccagcatggagc

SEQ ID NO: 2000143 - DNA, 25 bp, Homo sapien
ggaggtagttcctgatatctatgct

SEQ ID NO: 2000144 - DNA, 25 bp, Homo sapien
gtccactcgtcccagcagaacagca

SEQ ID NO: 2000145 - DNA, 25 bp, Homo sapien
gcttgcttggtgaccgtaagatcag

SEQ ID NO: 2000146 - DNA, 25 bp, Homo sapien
ccttggggctcacaggtctgtccac

SEQ ID NO: 2000147 - DNA, 25 bp, Homo sapien
ttggtgaccgtaagatcagcagcct

SEQ ID NO: 2000148 - DNA, 25 bp, Homo sapien
ccagggggaacaggagaatacatca

SEQ ID NO: 2000149 - DNA, 25 bp, Homo sapien
cagggggaacaggagaatacatcac

SEQ ID NO: 2000150 - DNA, 25 bp, Homo sapien
ccctccagctcaggggcctgggccg

SEQ ID NO: 2000151 - DNA, 25 bp, Homo sapien
cctccagctcaggggcctgggccgg

SEQ ID NO: 2000152 - DNA, 25 bp, Homo sapien
ctccagctcaggggcctgggccggg

SEQ ID NO: 2000153 - DNA, 25 bp, Homo sapien
tccagctcaggggcctgggccggga

SEQ ID NO: 2000154 - DNA, 25 bp, Homo sapien
tcgccatcaccctccgtcttgtcag

SEQ ID NO: 2000155 - DNA, 25 bp, Homo sapien
tagctgtcgatgaagcgctccagct

SEQ ID NO: 2000156 - DNA, 25 bp, Homo sapien
cagcacgtagctgtcgatgaagcgc

SEQ ID NO: 2000157 - DNA, 25 bp, Homo sapien
tactccagcacgtagctgtcgatga

SEQ ID NO: 2000158 - DNA, 25 bp, Homo sapien
ccttctgattgtcccaggagtccca

SEQ ID NO: 2000159 - DNA, 25 bp, Homo sapien
caacattcccgaggcaacagcataa

SEQ ID NO: 2000160 - DNA, 25 bp, Homo sapien
gggactctcctgtacatgcttgtgc

SEQ ID NO: 2000161 - DNA, 25 bp, Homo sapien
ttggagatgggataacacgcacgag

SEQ ID NO: 2000162 - DNA, 25 bp, Homo sapien
gggctcaggactcgcacctcctgac

SEQ ID NO: 2000163 - DNA, 25 bp, Homo sapien
ctggcagtggcccgcaaggcagtct

SEQ ID NO: 2000164 - DNA, 25 bp, Homo sapien
ggcagtggcccgcaaggcagtctcc

SEQ ID NO: 2000165 - DNA, 25 bp, Homo sapien
tcgcacctcctgacgacacagtcct

SEQ ID NO: 2000166 - DNA, 25 bp, Homo sapien
catgggtggtccaccattgagtact

SEQ ID NO: 2000167 - DNA, 25 bp, Homo sapien
taagcctttcatgggtggtccacca

SEQ ID NO: 2000168 - DNA, 25 bp, Homo sapien
gggtggtccaccattgagtacttcc

SEQ ID NO: 2000169 - DNA, 25 bp, Homo sapien
ttcttctgttaagcctttcatgggt

SEQ ID NO: 2000170 - DNA, 25 bp, Homo sapien
gcggttcgctgcagtccgctgtcca

SEQ ID NO: 2000171 - DNA, 25 bp, Homo sapien
tgtccagcggttcgctgcagtccgc

SEQ ID NO: 2000172 - DNA, 25 bp, Homo sapien
acagctgctgtccagcggttcgctg

SEQ ID NO: 2000173 - DNA, 25 bp, Homo sapien
gctcgccctcgggagaaggaacagc

SEQ ID NO: 2000174 - DNA, 25 bp, Homo sapien
tcaatcgatgagtttgggggagtgg

SEQ ID NO: 2000175 - DNA, 25 bp, Homo sapien
tgagtttgggggagtgggagcttcc

SEQ ID NO: 2000176 - DNA, 25 bp, Homo sapien
gatgagtttgggggagtgggagctt

SEQ ID NO: 2000177 - DNA, 25 bp, Homo sapien
aatcgatgagtttgggggagtggga

SEQ ID NO: 2000178 - DNA, 25 bp, Homo sapien
tttaggagaccccagaataactggc

SEQ ID NO: 2000179 - DNA, 25 bp, Homo sapien
tttgcggcagaacaaaaacgagact

SEQ ID NO: 2000180 - DNA, 25 bp, Homo sapien
cctcctgcagttgggcaaggtagca

SEQ ID NO: 2000181 - DNA, 25 bp, Homo sapien
tggcacggagatgttagaaggaccc

SEQ ID NO: 2000182 - DNA, 25 bp, Homo sapien
ttgtcaaacactgcgtaccccgagt

SEQ ID NO: 2000183 - DNA, 25 bp, Homo sapien
ccatgggcccatattatctggcgaa

SEQ ID NO: 2000184 - DNA, 25 bp, Homo sapien
tgctccttgcggtgttagggtgcct

SEQ ID NO: 2000185 - DNA, 25 bp, Homo sapien
tgaacccctggagaccctatcagga

SEQ ID NO: 2000186 - DNA, 25 bp, Homo sapien
tcatgggtggtgtccccgagagctg

SEQ ID NO: 2000187 - DNA, 25 bp, Homo sapien
cagcatcccatcagagtggcactca

SEQ ID NO: 2000188 - DNA, 25 bp, Homo sapien
ccttgaaggatgaagggaacagcag

SEQ ID NO: 2000189 - DNA, 25 bp, Homo sapien
caggctgaagggagccttgaaggat

SEQ ID NO: 2000190 - DNA, 25 bp, Homo sapien
tcctggacatgtgcagccaacgtgg

SEQ ID NO: 2000191 - DNA, 25 bp, Homo sapien
catgtgcagccaacgtgggcagtca

SEQ ID NO: 2000192 - DNA, 25 bp, Homo sapien
tgcagccaacgtgggcagtcaagag

SEQ ID NO: 2000193 - DNA, 25 bp, Homo sapien
gcagtcaagaggagcaccagagcag

SEQ ID NO: 2000194 - DNA, 25 bp, Homo sapien
ggtcggagtcaatgttggtgcccat

SEQ ID NO: 2000195 - DNA, 25 bp, Homo sapien
cccctgggtcggagtcaatgttggt

SEQ ID NO: 2000196 - DNA, 25 bp, Homo sapien
gtcaatgttggtgcccatatagctg

SEQ ID NO: 2000197 - DNA, 25 bp, Homo sapien
gttatcccctgggtcggagtcaatg

SEQ ID NO: 2000198 - DNA, 25 bp, Homo sapien
tatccacgatccaatagtaagtttg

SEQ ID NO: 2000199 - DNA, 25 bp, Homo sapien
caatagtaagttggaagcacagccc

SEQ ID NO: 2000200 - DNA, 25 bp, Homo sapien
caacaagacattttgatggccttac

SEQ ID NO: 2000201 - DNA, 25 bp, Homo sapien
gctcctcgctgtgtcgttcctcagg

SEQ ID NO: 2000202 - DNA, 25 bp, Homo sapien
tgttacacttgatcaaattgactat

SEQ ID NO: 2000203 - DNA, 25 bp, Homo sapien
cctttgttacacttgatcaaattga

SEQ ID NO: 2000204 - DNA, 25 bp, Homo sapien
ttgttacacttgatcaaattgacta

SEQ ID NO: 2000205 - DNA, 25 bp, Homo sapien
acttgatcaaattgactattaaagc

SEQ ID NO: 2000206 - DNA, 25 bp, Homo sapien
gttcagtttctgtgtagttgtgtgg

SEQ ID NO: 2000207 - DNA, 25 bp, Homo sapien
tgttcagtttctgtgtagttgtgtg

SEQ ID NO: 2000208 - DNA, 25 bp, Homo sapien
gtttgttgtgatttctgttctttca

SEQ ID NO: 2000209 - DNA, 25 bp, Homo sapien
gttgtgatttctgttctttcacatt

SEQ ID NO: 2000210 - DNA, 25 bp, Homo sapien
agctgattcctctcgtcattgttgt

SEQ ID NO: 2000211 - DNA, 25 bp, Homo sapien
gcacactcccgtgcagagctgattc

SEQ ID NO: 2000212 - DNA, 25 bp, Homo sapien
ctgcacactcccgtgcagagctgat

SEQ ID NO: 2000213 - DNA, 25 bp, Homo sapien
agagctgattcctctcgtcattgtt

SEQ ID NO: 2000214 - DNA, 25 bp, Homo sapien
atagcacatgccgttcacagcacgt

SEQ ID NO: 2000215 - DNA, 25 bp, Homo sapien
cctgtgaacctcatagcacatgccg

SEQ ID NO: 2000216 - DNA, 25 bp, Homo sapien
gaacctcatagcacatgccgttcac

SEQ ID NO: 2000217 - DNA, 25 bp, Homo sapien
agcacatgccgttcacagcacgtac

SEQ ID NO: 2000218 - DNA, 25 bp, Homo sapien
tgcagaacagccctgtgatcagctg

SEQ ID NO: 2000219 - DNA, 25 bp, Homo sapien
catctgcagaacagccctgtgatca

SEQ ID NO: 2000220 - DNA, 25 bp, Homo sapien
gcatctgcagaacagccctgtgatc

SEQ ID NO: 2000221 - DNA, 25 bp, Homo sapien
tctgcagaacagccctgtgatcagc

SEQ ID NO: 2000222 - DNA, 25 bp, Homo sapien
caatctctggacttccagattcttg

SEQ ID NO: 2000223 - DNA, 25 bp, Homo sapien
ttggggtcagggaaatgtgctccca

SEQ ID NO: 2000224 - DNA, 25 bp, Homo sapien
tggacttccagattcttggggtcag

SEQ ID NO: 2000225 - DNA, 25 bp, Homo sapien
cttggggtcagggaaatgtgctccc

SEQ ID NO: 2000226 - DNA, 25 bp, Homo sapien
atgtccgtgcccagcatgtccagag

SEQ ID NO: 2000227 - DNA, 25 bp, Homo sapien
tgttggccgcccagatgtccgtgcc

SEQ ID NO: 2000228 - DNA, 25 bp, Homo sapien
cgaaggtgttggccgcccagatgtc

SEQ ID NO: 2000229 - DNA, 25 bp, Homo sapien
gcccagatgtccgtgcccagcatgt

SEQ ID NO: 2000230 - DNA, 25 bp, Homo sapien
tgggtgaagtccagcttttccggct

SEQ ID NO: 2000231 - DNA, 25 bp, Homo sapien
gtgtcggactttgcggtggaactgg

SEQ ID NO: 2000232 - DNA, 25 bp, Homo sapien
ggctgcttgggcgtgtgtcggactt

SEQ ID NO: 2000233 - DNA, 25 bp, Homo sapien
ccttcgcggtcgatgtgtggcaggg

SEQ ID NO: 2000234 - DNA, 25 bp, Homo sapien
ctggaaggaccttctcgatgtcatt

SEQ ID NO: 2000235 - DNA, 25 bp, Homo sapien
attcaggttgatgccatccccatct

SEQ ID NO: 2000236 - DNA, 25 bp, Homo sapien
aaggaccttctcgatgtcattcagg

SEQ ID NO: 2000237 - DNA, 25 bp, Homo sapien
ggaccttctcgatgtcattcaggtt

SEQ ID NO: 2000238 - DNA, 25 bp, Homo sapien
gggtcattttcaggacagtgtgcat

SEQ ID NO: 2000239 - DNA, 25 bp, Homo sapien
gggacttcccacagcaagcaccagg

SEQ ID NO: 2000240 - DNA, 25 bp, Homo sapien
tgaagacgcctttggctgctggcgc

SEQ ID NO: 2000241 - DNA, 25 bp, Homo sapien
atgtgcagcgctgaccaggaggcat

SEQ ID NO: 2000242 - DNA, 25 bp, Homo sapien
ctccgtgggaccacgggtgacatgg

SEQ ID NO: 2000243 - DNA, 25 bp, Homo sapien
tgacatggagcaacagtcgccggtg

SEQ ID NO: 2000244 - DNA, 25 bp, Homo sapien
gaccacgggtgacatggagcaacag

SEQ ID NO: 2000245 - DNA, 25 bp, Homo sapien
agcaacagtcgccggtgcacagggc

SEQ ID NO: 2000246 - DNA, 25 bp, Homo sapien
aggaggaatccttgcaggtgatctg

SEQ ID NO: 2000247 - DNA, 25 bp, Homo sapien
aaaggagcacttccaggtaataagg

SEQ ID NO: 2000248 - DNA, 25 bp, Homo sapien
gtaataaggatgcacccagagccct

SEQ ID NO: 2000249 - DNA, 25 bp, Homo sapien
ctgaggtgacaacatgtcggtagga

SEQ ID NO: 2000250 - DNA, 25 bp, Homo sapien
ggagctgccgtgtgcaatacctatt

SEQ ID NO: 2000251 - DNA, 25 bp, Homo sapien
ccatgctcgtggtgagtggctccca

SEQ ID NO: 2000252 - DNA, 25 bp, Homo sapien
ctcactacagccttctgagatggtg

SEQ ID NO: 2000253 - DNA, 25 bp, Homo sapien
gaagcccttagatttgactggcacc

SEQ ID NO: 2000254 - DNA, 25 bp, Homo sapien
aacttaagtctcatttagtgagaca

SEQ ID NO: 2000255 - DNA, 25 bp, Homo sapien
gtgagacaattaacaagctcaggtt

SEQ ID NO: 2000256 - DNA, 25 bp, Homo sapien
caattaacaagctcaggtttttgaa

SEQ ID NO: 2000257 - DNA, 25 bp, Homo sapien
cagaagtcaagtggattcccagttg

SEQ ID NO: 2000258 - DNA, 25 bp, Homo sapien
gatgtcctctaaccataaggctcag

SEQ ID NO: 2000259 - DNA, 25 bp, Homo sapien
tgacaacacaccacagatgcttagg

SEQ ID NO: 2000260 - DNA, 25 bp, Homo sapien
taagctctccgaggacaaaggtggc

SEQ ID NO: 2000261 - DNA, 25 bp, Homo sapien
cccaggactcagtgaaactgtaagc

SEQ ID NO: 2000262 - DNA, 25 bp, Homo sapien
tccccaggatggaagcgagtcccat

SEQ ID NO: 2000263 - DNA, 25 bp, Homo sapien
gataaatacatagttgcctccccag

SEQ ID NO: 2000264 - DNA, 25 bp, Homo sapien
gccctcctagcttggcatgcagccg

SEQ ID NO: 2000265 - DNA, 25 bp, Homo sapien
tgttcccttcaagtgctcccttcat

SEQ ID NO: 2000266 - DNA, 25 bp, Homo sapien
caggaaagacttgaacacaggccac

SEQ ID NO: 2000267 - DNA, 25 bp, Homo sapien
tcatgctgctcattgacacgggaca

SEQ ID NO: 2000268 - DNA, 25 bp, Homo sapien
cactggaggatgactgtgactctct

SEQ ID NO: 2000269 - DNA, 25 bp, Homo sapien
tctctgtgtcgaagaccaaatggga

SEQ ID NO: 2000270 - DNA, 25 bp, Homo sapien
tcctggaatctctaggctgcacagc

SEQ ID NO: 2000271 - DNA, 25 bp, Homo sapien
tgtgggtcacgtccaagcagaaata

SEQ ID NO: 2000272 - DNA, 25 bp, Homo sapien
catggaatttctggaagctgccgct

SEQ ID NO: 2000273 - DNA, 25 bp, Homo sapien
tgccctgtggcgtgaacctaaaact

SEQ ID NO: 2000274 - DNA, 25 bp, Homo sapien
ctctgggactgcactaagtacacca

SEQ ID NO: 2000275 - DNA, 25 bp, Homo sapien
cattagtaactcctgaaagagagca

SEQ ID NO: 2000276 - DNA, 25 bp, Homo sapien
gatcattagtaactcctgaaagaga

SEQ ID NO: 2000277 - DNA, 25 bp, Homo sapien
cctctgggactgcactaagtacacc

SEQ ID NO: 2000278 - DNA, 25 bp, Homo sapien
tcctgcggaacagcttcttggtgtg

SEQ ID NO: 2000279 - DNA, 25 bp, Homo sapien
cctgcggaacagcttcttggtgtgt

SEQ ID NO: 2000280 - DNA, 25 bp, Homo sapien
gcttcttggtgtgtgcgatctccac

SEQ ID NO: 2000281 - DNA, 25 bp, Homo sapien
gtgtgtgcgatctccacttcatggg

SEQ ID NO: 2000282 - DNA, 25 bp, Homo sapien
ttagcagggacttaatgagggcaat

SEQ ID NO: 2000283 - DNA, 25 bp, Homo sapien
ttagaatctgacagggctgcctgcc

SEQ ID NO: 2000284 - DNA, 25 bp, Homo sapien
tcttatctatctttagcagggactt

SEQ ID NO: 2000285 - DNA, 25 bp, Homo sapien
cagggacttaatgagggcaatttcc

SEQ ID NO: 2000286 - DNA, 25 bp, Homo sapien
cttacacctgtgagtgccgatgagt

SEQ ID NO: 2000287 - DNA, 25 bp, Homo sapien
ctgtgagcgccgatgggcacagccg

SEQ ID NO: 2000288 - DNA, 25 bp, Homo sapien
cctgtgagcgctgatgggtacggct

SEQ ID NO: 2000289 - DNA, 25 bp, Homo sapien
gcacagccgtgtgcttacacctgtg

SEQ ID NO: 2000290 - DNA, 25 bp, Homo sapien
tatgagcgccgatgggtatggccgg

SEQ ID NO: 2000291 - DNA, 25 bp, Homo sapien
atgagcgccgatgggtatggccggg

SEQ ID NO: 2000292 - DNA, 25 bp, Homo sapien
acctatgagcgccgatgggtatggc

SEQ ID NO: 2000293 - DNA, 25 bp, Homo sapien
cctatgagcgccgatgggtatggcc

SEQ ID NO: 2000294 - DNA, 25 bp, Homo sapien
cctgctacatcaatgagtacagcca

SEQ ID NO: 2000295 - DNA, 25 bp, Homo sapien
gctacatcaatgagtacagccaagt

SEQ ID NO: 2000296 - DNA, 25 bp, Homo sapien
agcctgctacatcaatgagtacagc

SEQ ID NO: 2000297 - DNA, 25 bp, Homo sapien
tcagaaccagtgggatgcacagcct

SEQ ID NO: 2000298 - DNA, 25 bp, Homo sapien
tccccgtgcatgtgagttgatcagg

SEQ ID NO: 2000299 - DNA, 25 bp, Homo sapien
ccgtctttagctccccgtgcatgtg

SEQ ID NO: 2000300 - DNA, 25 bp, Homo sapien
catgtgagttgatcaggtggttaac

SEQ ID NO: 2000301 - DNA, 25 bp, Homo sapien
ccaaagaggaccatgccgtctttag

SEQ ID NO: 2000302 - DNA, 25 bp, Homo sapien
ctgtctcccggaaagggcgccgagg

SEQ ID NO: 2000303 - DNA, 25 bp, Homo sapien
tcaaaatacaccggggctgtctccc

SEQ ID NO: 2000304 - DNA, 25 bp, Homo sapien
cagtcaaaatacaccggggctgtct

SEQ ID NO: 2000305 - DNA, 25 bp, Homo sapien
tagagtaaggaagcacagtcaaaat

SEQ ID NO: 2000306 - DNA, 25 bp, Homo sapien
taagggtagatcaaccactgacaca

SEQ ID NO: 2000307 - DNA, 25 bp, Homo sapien
caaaacgggatgcaggagcagtaaa

SEQ ID NO: 2000308 - DNA, 25 bp, Homo sapien
accagttcacaaaacgggatgcagg

SEQ ID NO: 2000309 - DNA, 25 bp, Homo sapien
gatcaaccactgacacaccagttca

SEQ ID NO: 2000310 - DNA, 25 bp, Homo sapien
tgttacccctgaggcatcactggct

SEQ ID NO: 2000311 - DNA, 25 bp, Homo sapien
tggtcagccccgtcatcaaggtaag

SEQ ID NO: 2000312 - DNA, 25 bp, Homo sapien
aatgggagtcctgcttggataggcc

SEQ ID NO: 2000313 - DNA, 25 bp, Homo sapien
taaaaaaggtccaagcagggcagtg

SEQ ID NO: 2000314 - DNA, 25 bp, Homo sapien
tctggactctgaggctaagacttcc

SEQ ID NO: 2000315 - DNA, 25 bp, Homo sapien
tatgtctggtctcaggaggggaact

SEQ ID NO: 2000316 - DNA, 25 bp, Homo sapien
gacttcctggggtgtcttatgtctg

SEQ ID NO: 2000317 - DNA, 25 bp, Homo sapien
gtccctaagcgaggtgctgaaaggc

SEQ ID NO: 2000318 - DNA, 25 bp, Homo sapien
ctaccagggttgaacacagagctca

SEQ ID NO: 2000319 - DNA, 25 bp, Homo sapien
taccagggttgaacacagagctcat

SEQ ID NO: 2000320 - DNA, 25 bp, Homo sapien
cgtaggatggcgctaccagggttga

SEQ ID NO: 2000321 - DNA, 25 bp, Homo sapien
atggcgctaccagggttgaacacag

SEQ ID NO: 2000322 - DNA, 25 bp, Homo sapien
ttccccagcaatggagacctaggct

SEQ ID NO: 2000323 - DNA, 25 bp, Homo sapien
gaacagacttggagttaggcctcgt

SEQ ID NO: 2000324 - DNA, 25 bp, Homo sapien
gatgagccgcttttgctcccagcaa

SEQ ID NO: 2000325 - DNA, 25 bp, Homo sapien
caaatatttgtcagcggtcgttggc

SEQ ID NO: 2000326 - DNA, 25 bp, Homo sapien
cattcgcctttagacacagcctcct

SEQ ID NO: 2000327 - DNA, 25 bp, Homo sapien
tgtctcccattcgcctttagacaca

SEQ ID NO: 2000328 - DNA, 25 bp, Homo sapien
gcctccttggctgatgaacactcag

SEQ ID NO: 2000329 - DNA, 25 bp, Homo sapien
agcctccttggctgatgaacactca

SEQ ID NO: 2000330 - DNA, 25 bp, Homo sapien
gctaagcctgtcaactaatcacagc

SEQ ID NO: 2000331 - DNA, 25 bp, Homo sapien
gtcaactaatcacagcaccttgcag

SEQ ID NO: 2000332 - DNA, 25 bp, Homo sapien
actaatcacagcaccttgcagccac

SEQ ID NO: 2000333 - DNA, 25 bp, Homo sapien
ctaagcctgtcaactaatcacagca

SEQ ID NO: 2000334 - DNA, 25 bp, Homo sapien
gctgggcggcggctcctttgcacat

SEQ ID NO: 2000335 - DNA, 25 bp, Homo sapien
ttgctgggcggcggctcctttgcac

SEQ ID NO: 2000336 - DNA, 25 bp, Homo sapien
cttgctgggcggcggctcctttgca

SEQ ID NO: 2000337 - DNA, 25 bp, Homo sapien
ccttgctgggcggcggctcctttgc

SEQ ID NO: 2000338 - DNA, 25 bp, Homo sapien
tgctgggtaccttgtcactgtctag

SEQ ID NO: 2000339 - DNA, 25 bp, Homo sapien
tgtggctacagttcctgcagaggtg

SEQ ID NO: 2000340 - DNA, 25 bp, Homo sapien
tcctgctgactaggcataccctggg

SEQ ID NO: 2000341 - DNA, 25 bp, Homo sapien
aaatctggtaccctgaactgaatcc

SEQ ID NO: 2000342 - DNA, 25 bp, Homo sapien
tctctttggcattgcggtgtgcgcc

SEQ ID NO: 2000343 - DNA, 25 bp, Homo sapien
cgatgcgctcgggaagaatactgtc

SEQ ID NO: 2000344 - DNA, 25 bp, Homo sapien
atgttgccatggtgccagcgccggt

SEQ ID NO: 2000345 - DNA, 25 bp, Homo sapien
ccttgtcgcctggtgggtgcttcat

SEQ ID NO: 2000346 - DNA, 25 bp, Homo sapien
gagatttcactgcaactaggaccag

SEQ ID NO: 2000347 - DNA, 25 bp, Homo sapien
cctgcagtggtggttaaaagcggcc

SEQ ID NO: 2000348 - DNA, 25 bp, Homo sapien
tgtccctgacaatagaagctctggc

SEQ ID NO: 2000349 - DNA, 25 bp, Homo sapien
taactgcaaggaagtgagatctggc

SEQ ID NO: 2000350 - DNA, 25 bp, Homo sapien
ccttctggtagattgtgcgcacgat

SEQ ID NO: 2000351 - DNA, 25 bp, Homo sapien
catctcctcggagttggtggagttc

SEQ ID NO: 2000352 - DNA, 25 bp, Homo sapien
tcctccatgaaggtggtgagcttgg

SEQ ID NO: 2000353 - DNA, 25 bp, Homo sapien
tggtgtccacgtcgctgctgttgtt

SEQ ID NO: 2000354 - DNA, 25 bp, Homo sapien
ggcggtggtggccggcgtccagtta

SEQ ID NO: 2000355 - DNA, 25 bp, Homo sapien
gcggtggtggccggcgtccagttac

SEQ ID NO: 2000356 - DNA, 25 bp, Homo sapien
gggccatgaattatgctgtccagaa

SEQ ID NO: 2000357 - DNA, 25 bp, Homo sapien
tgaggggccatgaattatgctgtcc

SEQ ID NO: 2000358 - DNA, 25 bp, Homo sapien
attatgctgtccagaaaagcccact

SEQ ID NO: 2000359 - DNA, 25 bp, Homo sapien
tgaattatgctgtccagaaaagccc

SEQ ID NO: 2000360 - DNA, 25 bp, Homo sapien
caggtgctggttggggaccgagagc

SEQ ID NO: 2000361 - DNA, 25 bp, Homo sapien
tggttggggaccgagagccagatgg

SEQ ID NO: 2000362 - DNA, 25 bp, Homo sapien
aacctgatcctatgggggcatctcg

SEQ ID NO: 2000363 - DNA, 25 bp, Homo sapien
ctgtgcaggccgggtctagaactgc

SEQ ID NO: 2000364 - DNA, 25 bp, Homo sapien
gaacttgtactacccaagcctgtct

SEQ ID NO: 2000365 - DNA, 25 bp, Homo sapien
gagcacacacatttcaacagaggag

SEQ ID NO: 2000366 - DNA, 25 bp, Homo sapien
gaggagggcttgaacttgtactacc

SEQ ID NO: 2000367 - DNA, 25 bp, Homo sapien
tgtctcagcaaaggagcattcccag

SEQ ID NO: 2000368 - DNA, 25 bp, Homo sapien
tagctcggatgcagacacctcttgg

SEQ ID NO: 2000369 - DNA, 25 bp, Homo sapien
aatactttgctctgcatagctcgga

SEQ ID NO: 2000370 - DNA, 25 bp, Homo sapien
tagatgtgttgttggcaacggttgc

SEQ ID NO: 2000371 - DNA, 25 bp, Homo sapien
cagacacactgatgccggctctaat

SEQ ID NO: 2000372 - DNA, 25 bp, Homo sapien
gggctctggttcgaagatgcccact

SEQ ID NO: 2000373 - DNA, 25 bp, Homo sapien
tggttcgaagatgcccactgacttg

SEQ ID NO: 2000374 - DNA, 25 bp, Homo sapien
gctctggttcgaagatgcccactga

SEQ ID NO: 2000375 - DNA, 25 bp, Homo sapien
ccaggggctctggttcgaagatgcc

SEQ ID NO: 2000376 - DNA, 25 bp, Homo sapien
atacttcaaagtggcctgaagcttc

SEQ ID NO: 2000377 - DNA, 25 bp, Homo sapien
agcttctctcactctgggacctggg

SEQ ID NO: 2000378 - DNA, 25 bp, Homo sapien
ttctctcactctgggacctgggatc

SEQ ID NO: 2000379 - DNA, 25 bp, Homo sapien
tcatacttcaaagtggcctgaagct

SEQ ID NO: 2000380 - DNA, 25 bp, Homo sapien
tgccaagtggaagcaaaacataccg

SEQ ID NO: 2000381 - DNA, 25 bp, Homo sapien
cctagacaggcaacggaggtacaca

SEQ ID NO: 2000382 - DNA, 25 bp, Homo sapien
tgcattcacgaatcatgaaggtggt

SEQ ID NO: 2000383 - DNA, 25 bp, Homo sapien
ttagtgatctgtaaggaagggacca

SEQ ID NO: 2000384 - DNA, 25 bp, Homo sapien
cggggtctgtacaggtatatccagc

SEQ ID NO: 2000385 - DNA, 25 bp, Homo sapien
ggggtctgtacaggtatatccagcc

SEQ ID NO: 2000386 - DNA, 25 bp, Homo sapien
tgcggggtctgtacaggtatatcca

SEQ ID NO: 2000387 - DNA, 25 bp, Homo sapien
ctgtgcggggtctgtacaggtatat

SEQ ID NO: 2000388 - DNA, 25 bp, Homo sapien
ctgcagggtgtagggcactctgaag

SEQ ID NO: 2000389 - DNA, 25 bp, Homo sapien
agggtgtagggcactctgaaggggt

SEQ ID NO: 2000390 - DNA, 25 bp, Homo sapien
tgcagggtgtagggcactctgaagg

SEQ ID NO: 2000391 - DNA, 25 bp, Homo sapien
gcagggtgtagggcactctgaaggg

SEQ ID NO: 2000392 - DNA, 25 bp, Homo sapien
gggatgctgactgtgaaatactggt

SEQ ID NO: 2000393 - DNA, 25 bp, Homo sapien
caagatatttctgatgatggggatg

SEQ ID NO: 2000394 - DNA, 25 bp, Homo sapien
gacttgatgtgtgaatggaggccat

SEQ ID NO: 2000395 - DNA, 25 bp, Homo sapien
tgactgtgaaatactggtagagtgg

SEQ ID NO: 2000396 - DNA, 25 bp, Homo sapien
tccggtctgaagactagatgggccc

SEQ ID NO: 2000397 - DNA, 25 bp, Homo sapien
cttctccattcgttctgagatccgg

SEQ ID NO: 2000398 - DNA, 25 bp, Homo sapien
ctagatgggccccttgtgttgttcc

SEQ ID NO: 2000399 - DNA, 25 bp, Homo sapien
ttgtgttgttcccaaggaggcttgg

SEQ ID NO: 2000400 - DNA, 25 bp, Homo sapien
gttggatgaatgttgtatccaaggt

SEQ ID NO: 2000401 - DNA, 25 bp, Homo sapien
aactgaagcataagttggatgaatg

SEQ ID NO: 2000402 - DNA, 25 bp, Homo sapien
cccttcctaatcagcaaagggtgac

SEQ ID NO: 2000403 - DNA, 25 bp, Homo sapien
tgacgcaaacaggtgtaataaccct

SEQ ID NO: 2000404 - DNA, 25 bp, Homo sapien
tcaaattcccgatgtactgggtgat

SEQ ID NO: 2000405 - DNA, 25 bp, Homo sapien
taggaccatcgggtggctgtcacag

SEQ ID NO: 2000406 - DNA, 25 bp, Homo sapien
cgatgtactgggtgattgctgccct

SEQ ID NO: 2000407 - DNA, 25 bp, Homo sapien
gagcatcatgtcaaattcccgatgt

SEQ ID NO: 2000408 - DNA, 25 bp, Homo sapien
tgtctcaggtttctcaaggcattct

SEQ ID NO: 2000409 - DNA, 25 bp, Homo sapien
tgctatttcctgcaccggccacatc

SEQ ID NO: 2000410 - DNA, 25 bp, Homo sapien
ttcccactcgggataaccacatgag

SEQ ID NO: 2000411 - DNA, 25 bp, Homo sapien
ggccacatcaataagccctgaaagc

SEQ ID NO: 2000412 - DNA, 25 bp, Homo sapien
gctcgcctgtgctgctgcgcatggt

SEQ ID NO: 2000413 - DNA, 25 bp, Homo sapien
ctgctgcgcatggtgccgaagacct

SEQ ID NO: 2000414 - DNA, 25 bp, Homo sapien
agacctcgcacaggaaggtgatgaa

SEQ ID NO: 2000415 - DNA, 25 bp, Homo sapien
ggcacacgagcacacggaagggctc

SEQ ID NO: 2000416 - DNA, 25 bp, Homo sapien
tctcgggctccgggggacacatcca

SEQ ID NO: 2000417 - DNA, 25 bp, Homo sapien
tgtatctcggctagagccttgggca

SEQ ID NO: 2000418 - DNA, 25 bp, Homo sapien
tatctcggctagagccttgggcagt

SEQ ID NO: 2000419 - DNA, 25 bp, Homo sapien
cctgtatctcggctagagccttggg

SEQ ID NO: 2000420 - DNA, 25 bp, Homo sapien
cccctctaggggaatggcaggtgct

SEQ ID NO: 2000421 - DNA, 25 bp, Homo sapien
gggcatgaccaacggcagtctcctg

SEQ ID NO: 2000422 - DNA, 25 bp, Homo sapien
gacctggtgggatgttgggacctgg

SEQ ID NO: 2000423 - DNA, 25 bp, Homo sapien
gggttggttggggatctcactcact

SEQ ID NO: 2000424 - DNA, 25 bp, Homo sapien
gcagaagacaggttccactaggaca

SEQ ID NO: 2000425 - DNA, 25 bp, Homo sapien
ggagcagaagacaggttccactagg

SEQ ID NO: 2000426 - DNA, 25 bp, Homo sapien
tgagtcagggatggcctcggggctg

SEQ ID NO: 2000427 - DNA, 25 bp, Homo sapien
gcagggtggcggttggtggtgagtc

SEQ ID NO: 2000428 - DNA, 25 bp, Homo sapien
tcagggacagcttcctgggaagaaa

SEQ ID NO: 2000429 - DNA, 25 bp, Homo sapien
agaggaggctcagggacagcttcct

SEQ ID NO: 2000430 - DNA, 25 bp, Homo sapien
cagcttcctgggaagaaacctttga

SEQ ID NO: 2000431 - DNA, 25 bp, Homo sapien
gtcaggagaggaggctcagggacag

SEQ ID NO: 2000432 - DNA, 25 bp, Homo sapien
tgggcctctcggaagacctgaagat

SEQ ID NO: 2000433 - DNA, 25 bp, Homo sapien
ttggagcacaacaagtccaacttct

SEQ ID NO: 2000434 - DNA, 25 bp, Homo sapien
ggccattcggaagggcctctgttcc

SEQ ID NO: 2000435 - DNA, 25 bp, Homo sapien
cagtgacataaagccttggagcaca

SEQ ID NO: 2000436 - DNA, 25 bp, Homo sapien
ttcgaaaacagccaccaaggcagct

SEQ ID NO: 2000437 - DNA, 25 bp, Homo sapien
gtaattggcattggcccatcccctg

SEQ ID NO: 2000438 - DNA, 25 bp, Homo sapien
cagcccctgaatcttgtaattggca

SEQ ID NO: 2000439 - DNA, 25 bp, Homo sapien
gttgactgacaagtccaggagcttc

SEQ ID NO: 2000440 - DNA, 25 bp, Homo sapien
gatggagttatggtcactgggaaca

SEQ ID NO: 2000441 - DNA, 25 bp, Homo sapien
gcaagccctccccactccgcaggga

SEQ ID NO: 2000442 - DNA, 25 bp, Homo sapien
tggagttatggtcactgggaacact

SEQ ID NO: 2000443 - DNA, 25 bp, Homo sapien
ggaacaggatggagttatggtcact

SEQ ID NO: 2000444 - DNA, 25 bp, Homo sapien
gcatgcccaggatgtaaccaggctg

SEQ ID NO: 2000445 - DNA, 25 bp, Homo sapien
caggctggtagcttgggatgccacc

SEQ ID NO: 2000446 - DNA, 25 bp, Homo sapien
ccaggatgtaaccaggctggtagct

SEQ ID NO: 2000447 - DNA, 25 bp, Homo sapien
caggctgcccaaggcatgcccagga

SEQ ID NO: 2000448 - DNA, 25 bp, Homo sapien
gggagaaaccaaggtgctccagtca

SEQ ID NO: 2000449 - DNA, 25 bp, Homo sapien
ctcagggagaaaccaaggtgctcca

SEQ ID NO: 2000450 - DNA, 25 bp, Homo sapien
cagggagaaaccaaggtgctccagt

SEQ ID NO: 2000451 - DNA, 25 bp, Homo sapien
tcagggagaaaccaaggtgctccag

SEQ ID NO: 2000452 - DNA, 25 bp, Homo sapien
aagaatccaaggcaattgtgcgagc

SEQ ID NO: 2000453 - DNA, 25 bp, Homo sapien
tgtcctattgtctctggcggagact

SEQ ID NO: 2000454 - DNA, 25 bp, Homo sapien
acacagtgtttgttcggaagcgaat

SEQ ID NO: 2000455 - DNA, 25 bp, Homo sapien
cgtgccctcgaacggcaaaatgtgt

SEQ ID NO: 2000456 - DNA, 25 bp, Homo sapien
actcatcagagtctctggcactgac

SEQ ID NO: 2000457 - DNA, 25 bp, Homo sapien
tcgggggaggagcagcccactcatc

SEQ ID NO: 2000458 - DNA, 25 bp, Homo sapien
gaggagcagcccactcatcagagtc

SEQ ID NO: 2000459 - DNA, 25 bp, Homo sapien
ggggaggagcagcccactcatcaga

SEQ ID NO: 2000460 - DNA, 25 bp, Homo sapien
cttggttgctggcttttgagagtgg

SEQ ID NO: 2000461 - DNA, 25 bp, Homo sapien
gttgctggcttttgagagtggattc

SEQ ID NO: 2000462 - DNA, 25 bp, Homo sapien
ctggcttttgagagtggattctcag

SEQ ID NO: 2000463 - DNA, 25 bp, Homo sapien
tgctggcttttgagagtggattctc

SEQ ID NO: 2000464 - DNA, 25 bp, Homo sapien
ctgagtcatggggtccaacatccaa

SEQ ID NO: 2000465 - DNA, 25 bp, Homo sapien
ggaagggtggacattgagggacctg

SEQ ID NO: 2000466 - DNA, 25 bp, Homo sapien
tttatgtcttaaggggaccattctg

SEQ ID NO: 2000467 - DNA, 25 bp, Homo sapien
tgcttggcctggtttatgtcttaag

SEQ ID NO: 2000468 - DNA, 25 bp, Homo sapien
gggtggacattgagggacctggcca

SEQ ID NO: 2000469 - DNA, 25 bp, Homo sapien
acactcattgggcttcactttctgg

SEQ ID NO: 2000470 - DNA, 25 bp, Homo sapien
ccacactcattgggcttcactttct

SEQ ID NO: 2000471 - DNA, 25 bp, Homo sapien
ttcccacactcattgggcttcactt

SEQ ID NO: 2000472 - DNA, 25 bp, Homo sapien
tcccacactcattgggcttcacttt

SEQ ID NO: 2000473 - DNA, 25 bp, Homo sapien
ccttcacatcctgagattgcaagag

SEQ ID NO: 2000474 - DNA, 25 bp, Homo sapien
catcttccttcacatcctgagattg

SEQ ID NO: 2000475 - DNA, 25 bp, Homo sapien
ttccttcacatcctgagattgcaag

SEQ ID NO: 2000476 - DNA, 25 bp, Homo sapien
tcttccttcacatcctgagattgca

SEQ ID NO: 2000477 - DNA, 25 bp, Homo sapien
cagagatgtggggttaggatggcct

SEQ ID NO: 2000478 - DNA, 25 bp, Homo sapien
atggcctcgggtcccacagtggccc

SEQ ID NO: 2000479 - DNA, 25 bp, Homo sapien
cagacagagatgtggggttaggatg

SEQ ID NO: 2000480 - DNA, 25 bp, Homo sapien
tgtggggttaggatggcctcgggtc

SEQ ID NO: 2000481 - DNA, 25 bp, Homo sapien
tggagctcgatgacctctaggagca

SEQ ID NO: 2000482 - DNA, 25 bp, Homo sapien
caggctgtcagtttctggatggttc

SEQ ID NO: 2000483 - DNA, 25 bp, Homo sapien
cacagcatcttgtcccgtgcgctgg

SEQ ID NO: 2000484 - DNA, 25 bp, Homo sapien
ttccagctgttagcgtggagctcga

SEQ ID NO: 2000485 - DNA, 25 bp, Homo sapien
ccatttctttctcccgccagggcca

SEQ ID NO: 2000486 - DNA, 25 bp, Homo sapien
ctggccaccgactctgcctgccctc

SEQ ID NO: 2000487 - DNA, 25 bp, Homo sapien
catctggccctgtgcaccagggccc

SEQ ID NO: 2000488 - DNA, 25 bp, Homo sapien
ctgtcctcccgcctgtccatctggc

SEQ ID NO: 2000489 - DNA, 25 bp, Homo sapien
cttgtgcgggggcactcctctcagg

SEQ ID NO: 2000490 - DNA, 25 bp, Homo sapien
ggcttgtgcgggggcactcctctca

SEQ ID NO: 2000491 - DNA, 25 bp, Homo sapien
tgtgcgggggcactcctctcaggga

SEQ ID NO: 2000492 - DNA, 25 bp, Homo sapien
tgcgggggcactcctctcagggatt

SEQ ID NO: 2000493 - DNA, 25 bp, Homo sapien
tgacaaaggccgtcaattacgggcg

SEQ ID NO: 2000494 - DNA, 25 bp, Homo sapien
cctaattggctactggcaagctgtc

SEQ ID NO: 2000495 - DNA, 25 bp, Homo sapien
tcacatcacgggcattttcattggc

SEQ ID NO: 2000496 - DNA, 25 bp, Homo sapien
gagtcacagcgatgagatccctcac

SEQ ID NO: 2000497 - DNA, 25 bp, Homo sapien
cccagtggtgacagtatcagccctt

SEQ ID NO: 2000498 - DNA, 25 bp, Homo sapien
cagtggcgaggaacacaggattcca

SEQ ID NO: 2000499 - DNA, 25 bp, Homo sapien
ttctgtgccctgtttgccacaaggc

SEQ ID NO: 2000500 - DNA, 25 bp, Homo sapien
taatttgccagtctcgttctgtgcc

SEQ ID NO: 2000501 - DNA, 25 bp, Homo sapien
ccagtaagacctgcgtgtggagcgc

SEQ ID NO: 2000502 - DNA, 25 bp, Homo sapien
taaggaagcggctaggctctgacat

SEQ ID NO: 2000503 - DNA, 25 bp, Homo sapien
gcattagctaaaatcgagtcctggg

SEQ ID NO: 2000504 - DNA, 25 bp, Homo sapien
ggcctgcccggcctcaataaaagag

SEQ ID NO: 2000505 - DNA, 25 bp, Homo sapien
tcaggtaaacttgtgccccctacac

SEQ ID NO: 2000506 - DNA, 25 bp, Homo sapien
caccttgtcgccaacaggctctttt

SEQ ID NO: 2000507 - DNA, 25 bp, Homo sapien
tttagagacaggcaaaggctccaca

SEQ ID NO: 2000508 - DNA, 25 bp, Homo sapien
ccctacaccttgtcgccaacaggct

SEQ ID NO: 2000509 - DNA, 25 bp, Homo sapien
gcgtcctgcgtgaagcttgctctga

SEQ ID NO: 2000510 - DNA, 25 bp, Homo sapien
ttcggaggaaggagaatcaggcccc

SEQ ID NO: 2000511 - DNA, 25 bp, Homo sapien
gcaaacagtatgtctggagccaccg

SEQ ID NO: 2000512 - DNA, 25 bp, Homo sapien
cacacagtgtttcggagcgtcctgc

SEQ ID NO: 2000513 - DNA, 25 bp, Homo sapien
tcaacatcagatggctggaccgcct

SEQ ID NO: 2000514 - DNA, 25 bp, Homo sapien
tagaaatgcaatatccagctctgcc

SEQ ID NO: 2000515 - DNA, 25 bp, Homo sapien
cattcagaggtcaactcggacgcgg

SEQ ID NO: 2000516 - DNA, 25 bp, Homo sapien
aggacgatccccaaacagtgaaggt

SEQ ID NO: 2000517 - DNA, 25 bp, Homo sapien
tcaatcagaataaataccgactcgg

SEQ ID NO: 2000518 - DNA, 25 bp, Homo sapien
caccctcatccctcggagaaaataa

SEQ ID NO: 2000519 - DNA, 25 bp, Homo sapien
ctcatccctcggagaaaataataga

SEQ ID NO: 2000520 - DNA, 25 bp, Homo sapien
taaataccgactcggccaacattta

SEQ ID NO: 2000521 - DNA, 25 bp, Homo sapien
ctggctgtctgggcccccgccccta

SEQ ID NO: 2000522 - DNA, 25 bp, Homo sapien
tgctctggtggcggcctggctgtct

SEQ ID NO: 2000523 - DNA, 25 bp, Homo sapien
gctctggtggcggcctggctgtctg

SEQ ID NO: 2000524 - DNA, 25 bp, Homo sapien
cttggaggcccgcgtctggggcacc

SEQ ID NO: 2000525 - DNA, 25 bp, Homo sapien
gtgtctgatgccagaaaacagactg

SEQ ID NO: 2000526 - DNA, 25 bp, Homo sapien
ctgacaaggaacacgggccggtgtc

SEQ ID NO: 2000527 - DNA, 25 bp, Homo sapien
aacacgggccggtgtctgatgccag

SEQ ID NO: 2000528 - DNA, 25 bp, Homo sapien
gacacgactccccaggcaggcctga

SEQ ID NO: 2000529 - DNA, 25 bp, Homo sapien
gagggacacgactccccaggcaggc

SEQ ID NO: 2000530 - DNA, 25 bp, Homo sapien
cagctgagggacacgactccccagg

SEQ ID NO: 2000531 - DNA, 25 bp, Homo sapien
ctgcagctgagggacacgactcccc

SEQ ID NO: 2000532 - DNA, 25 bp, Homo sapien
tccgcggcagctttggcgggaagcc

SEQ ID NO: 2000533 - DNA, 25 bp, Homo sapien
gaggtaggtcctgtcgtccactccc

SEQ ID NO: 2000534 - DNA, 25 bp, Homo sapien
ttccgtgtgagtgttccgcgcagag

SEQ ID NO: 2000535 - DNA, 25 bp, Homo sapien
gagggagggtggtcgcactagcggg

SEQ ID NO: 2000536 - DNA, 25 bp, Homo sapien
ccacttgtagtttgggttcagctgg

SEQ ID NO: 2000537 - DNA, 25 bp, Homo sapien
cccacttgtagtttgggttcagctg

SEQ ID NO: 2000538 - DNA, 25 bp, Homo sapien
cacttgtagtttgggttcagctgga

SEQ ID NO: 2000539 - DNA, 25 bp, Homo sapien
acccacttgtagtttgggttcagct

SEQ ID NO: 2000540 - DNA, 25 bp, Homo sapien
ccaatgaagcgggaagcccacgtgg

SEQ ID NO: 2000541 - DNA, 25 bp, Homo sapien
atgaagcgggaagcccacgtggcct

SEQ ID NO: 2000542 - DNA, 25 bp, Homo sapien
ctagtttccaccaatgaagcgggaa

SEQ ID NO: 2000543 - DNA, 25 bp, Homo sapien
ttccaccaatgaagcgggaagccca

SEQ ID NO: 2000544 - DNA, 25 bp, Homo sapien
tcacactggtggttaggctgacaca

SEQ ID NO: 2000545 - DNA, 25 bp, Homo sapien
tacacggatttgaaactctgtaggt

SEQ ID NO: 2000546 - DNA, 25 bp, Homo sapien
ggctgacacagcgtttacacggatt

SEQ ID NO: 2000547 - DNA, 25 bp, Homo sapien
gaaactccactgagtgctgaaacat

SEQ ID NO: 2000548 - DNA, 25 bp, Homo sapien
caagggggagagtgtctgttggcct

SEQ ID NO: 2000549 - DNA, 25 bp, Homo sapien
gggtctgagacggccagcgccagtc

SEQ ID NO: 2000550 - DNA, 25 bp, Homo sapien
cctggggtctgagacggccagcgcc

SEQ ID NO: 2000551 - DNA, 25 bp, Homo sapien
ggccacaagggggagagtgtctgtt

SEQ ID NO: 2000552 - DNA, 25 bp, Homo sapien
aagagaagacttgccagttggcgat

SEQ ID NO: 2000553 - DNA, 25 bp, Homo sapien
gagaagacttgccagttggcgatgg

SEQ ID NO: 2000554 - DNA, 25 bp, Homo sapien
aagacttgccagttggcgatggttc

SEQ ID NO: 2000555 - DNA, 25 bp, Homo sapien
agaagacttgccagttggcgatggt

SEQ ID NO: 2000556 - DNA, 25 bp, Homo sapien
gctagtggccgaaccagaaccaatt

SEQ ID NO: 2000557 - DNA, 25 bp, Homo sapien
tctgagcagcgagcctgctagtggc

SEQ ID NO: 2000558 - DNA, 25 bp, Homo sapien
tccctcatcaaggacacgggcctgt

SEQ ID NO: 2000559 - DNA, 25 bp, Homo sapien
ctgccccttggacacgctcagtggg

SEQ ID NO: 2000560 - DNA, 25 bp, Homo sapien
agttgtaggttattcagctgcagac

SEQ ID NO: 2000561 - DNA, 25 bp, Homo sapien
ctcccttgtgagttgtaggttattc

SEQ ID NO: 2000562 - DNA, 25 bp, Homo sapien
ttgtaggttattcagctgcagactc

SEQ ID NO: 2000563 - DNA, 25 bp, Homo sapien
tgtgagttgtaggttattcagctgc

SEQ ID NO: 2000564 - DNA, 25 bp, Homo sapien
aaaggcatgcaactccagaacaggt

SEQ ID NO: 2000565 - DNA, 25 bp, Homo sapien
tgatgtagctgggaagcctctaggc

SEQ ID NO: 2000566 - DNA, 25 bp, Homo sapien
tagacaatcccgtgcgcaaacacat

SEQ ID NO: 2000567 - DNA, 25 bp, Homo sapien
aaacacatgagagcgtgcggatgcc

SEQ ID NO: 2000568 - DNA, 25 bp, Homo sapien
cacggggctggctgacaggcacggg

SEQ ID NO: 2000569 - DNA, 25 bp, Homo sapien
caggcacggggtagccagagcattg

SEQ ID NO: 2000570 - DNA, 25 bp, Homo sapien
gtatgcgtgaaggcctggaatgcca

SEQ ID NO: 2000571 - DNA, 25 bp, Homo sapien
cggggtagccagagcattgttgttc

SEQ ID NO: 2000572 - DNA, 25 bp, Homo sapien
tgtcattatcctcattaacggtgag

SEQ ID NO: 2000573 - DNA, 25 bp, Homo sapien
gaattgtcattatcctcattaacgg

SEQ ID NO: 2000574 - DNA, 25 bp, Homo sapien
cattaacggtgaggtcactgtgcag

SEQ ID NO: 2000575 - DNA, 25 bp, Homo sapien
tatcctcattaacggtgaggtcact

SEQ ID NO: 2000576 - DNA, 25 bp, Homo sapien
tgggcgctgacccaggtcttcatcc

SEQ ID NO: 2000577 - DNA, 25 bp, Homo sapien
cacagatgggcgctgacccaggtct

SEQ ID NO: 2000578 - DNA, 25 bp, Homo sapien
gggcattgaggtcagaccacagatg

SEQ ID NO: 2000579 - DNA, 25 bp, Homo sapien
tgaggtcagaccacagatgggcgct

SEQ ID NO: 2000580 - DNA, 25 bp, Homo sapien
ttgtctgcattcaacttctggccgg

SEQ ID NO: 2000581 - DNA, 25 bp, Homo sapien
tcagtattcgccatagggactatca

SEQ ID NO: 2000582 - DNA, 25 bp, Homo sapien
tgaagcatagctctgcctgtctgct

SEQ ID NO: 2000583 - DNA, 25 bp, Homo sapien
gaagcccatttgagactggcaccag

SEQ ID NO: 2000584 - DNA, 25 bp, Homo sapien
tgctgggcttcacgttggttctagg

SEQ ID NO: 2000585 - DNA, 25 bp, Homo sapien
tgtttttgcaaagacgttcccttga

SEQ ID NO: 2000586 - DNA, 25 bp, Homo sapien
gatacccgatggattttctcaaacc

SEQ ID NO: 2000587 - DNA, 25 bp, Homo sapien
gaaatagagcctctagaacgtggct

SEQ ID NO: 2000588 - DNA, 25 bp, Homo sapien
ctggcgagcccgacattcgggagcc

SEQ ID NO: 2000589 - DNA, 25 bp, Homo sapien
gggaggcgccgacgggggcaggctc

SEQ ID NO: 2000590 - DNA, 25 bp, Homo sapien
agactggcgcatgccacggagcgcc

SEQ ID NO: 2000591 - DNA, 25 bp, Homo sapien
aggctcggccgtccccagggaagcg

SEQ ID NO: 2000592 - DNA, 25 bp, Homo sapien
cccctgagtcttcgtgtgcgcggaa

SEQ ID NO: 2000593 - DNA, 25 bp, Homo sapien
cggaattcgaggagatccggttact

SEQ ID NO: 2000594 - DNA, 25 bp, Homo sapien
tattttgccagacgtctcatgcggg

SEQ ID NO: 2000595 - DNA, 25 bp, Homo sapien
ttggttgttaggttttgcgagagcc

SEQ ID NO: 2000596 - DNA, 25 bp, Homo sapien
ctgggtcgaggcgagcagcccatgc

SEQ ID NO: 2000597 - DNA, 25 bp, Homo sapien
gagaacgcgcgacccgtctggggcc

SEQ ID NO: 2000598 - DNA, 25 bp, Homo sapien
caagcagcttgtgcccggggggggc

SEQ ID NO: 2000599 - DNA, 25 bp, Homo sapien
gggaagggacatcggcggcccctgc

SEQ ID NO: 2000600 - DNA, 25 bp, Homo sapien
cgggcgcgacgaggagagtctcgga

SEQ ID NO: 2000601 - DNA, 25 bp, Homo sapien
tcccgggcgcgacgaggagagtctc

SEQ ID NO: 2000602 - DNA, 25 bp, Homo sapien
cgcgacgaggagagtctcggaggag

SEQ ID NO: 2000603 - DNA, 25 bp, Homo sapien
gaggctcccgggcgcgacgaggaga

SEQ ID NO: 2000604 - DNA, 25 bp, Homo sapien
gcgggagagagctgcccgagacaga

SEQ ID NO: 2000605 - DNA, 25 bp, Homo sapien
gagcccctgagtgcggcgcggcgag

SEQ ID NO: 2000606 - DNA, 25 bp, Homo sapien
ccgagacagagccagtccgtcggcg

SEQ ID NO: 2000607 - DNA, 25 bp, Homo sapien
ggcggcagaaggaccggagcgccag

SEQ ID NO: 2000608 - DNA, 25 bp, Homo sapien
gctcgtcagccggccaaatgcattc

SEQ ID NO: 2000609 - DNA, 25 bp, Homo sapien
acagctcgtcagccggccaaatgca

SEQ ID NO: 2000610 - DNA, 25 bp, Homo sapien
agctcgtcagccggccaaatgcatt

SEQ ID NO: 2000611 - DNA, 25 bp, Homo sapien
tcacagctcgtcagccggccaaatg

SEQ ID NO: 2000612 - DNA, 25 bp, Homo sapien
gccagcttgggtatatgtttcttcg

SEQ ID NO: 2000613 - DNA, 25 bp, Homo sapien
ttatgccctagcaatgccatgcccg

SEQ ID NO: 2000614 - DNA, 25 bp, Homo sapien
ttctatgcagtaacccgccagcttg

SEQ ID NO: 2000615 - DNA, 25 bp, Homo sapien
tcagctttcacgctgtaaatgcgtt

SEQ ID NO: 2000616 - DNA, 25 bp, Homo sapien
ccagttgtgcatggtttagggctca

SEQ ID NO: 2000617 - DNA, 25 bp, Homo sapien
tctggataggcacctggcaaatgtt

SEQ ID NO: 2000618 - DNA, 25 bp, Homo sapien
gccaagaagcgttgattgtcccatc

SEQ ID NO: 2000619 - DNA, 25 bp, Homo sapien
caagaatatttgtggagtccgggct

SEQ ID NO: 2000620 - DNA, 25 bp, Homo sapien
ggtggagattttgctgtgcccagct

SEQ ID NO: 2000621 - DNA, 25 bp, Homo sapien
aacactcctttattggagcaccagg

SEQ ID NO: 2000622 - DNA, 25 bp, Homo sapien
agctccatatccaacaagttcctca

SEQ ID NO: 2000623 - DNA, 25 bp, Homo sapien
tccatatccaacaagttcctcagct

SEQ ID NO: 2000624 - DNA, 25 bp, Homo sapien
ctcccattatatacgcgggtctcat

SEQ ID NO: 2000625 - DNA, 25 bp, Homo sapien
agtcacagccgtcccaggcttgctg

SEQ ID NO: 2000626 - DNA, 25 bp, Homo sapien
cttccggagtcacagccgtcccagg

SEQ ID NO: 2000627 - DNA, 25 bp, Homo sapien
tctcccattatatacgcgggtctca

SEQ ID NO: 2000628 - DNA, 25 bp, Homo sapien
agatcgtgatgtcccccagcgcccc

SEQ ID NO: 2000629 - DNA, 25 bp, Homo sapien
tcagatcgtgatgtcccccagcgcc

SEQ ID NO: 2000630 - DNA, 25 bp, Homo sapien
gatcgtgatgtcccccagcgccccc

SEQ ID NO: 2000631 - DNA, 25 bp, Homo sapien
cagatcgtgatgtcccccagcgccc

SEQ ID NO: 2000632 - DNA, 25 bp, Homo sapien
aatgtagggatgcagcatgagaaat

SEQ ID NO: 2000633 - DNA, 25 bp, Homo sapien
tctggaagagtaagtcatcgggcag

SEQ ID NO: 2000634 - DNA, 25 bp, Homo sapien
tagaatgtagggatgcagcatgaga

SEQ ID NO: 2000635 - DNA, 25 bp, Homo sapien
cgggcagagggtcataaatgcattt

SEQ ID NO: 2000636 - DNA, 25 bp, Homo sapien
ctcattgaccagtttaaatcccgcc

SEQ ID NO: 2000637 - DNA, 25 bp, Homo sapien
tgaccagtttaaatcccgcctcctc

SEQ ID NO: 2000638 - DNA, 25 bp, Homo sapien
cagtttaaatcccgcctcctccagg

SEQ ID NO: 2000639 - DNA, 25 bp, Homo sapien
cattgaccagtttaaatcccgcctc

SEQ ID NO: 2000640 - DNA, 25 bp, Homo sapien
aaataacgtgtatttctgatgctag

SEQ ID NO: 2000641 - DNA, 25 bp, Homo sapien
aataacgtgtatttctgatgctagc

SEQ ID NO: 2000642 - DNA, 25 bp, Homo sapien
tttctgatgctagcaataaacaatt

SEQ ID NO: 2000643 - DNA, 25 bp, Homo sapien
acaaaaataacgtgtatttctgatg

SEQ ID NO: 2000644 - DNA, 25 bp, Homo sapien
tgagtccataattacaatctgccac

SEQ ID NO: 2000645 - DNA, 25 bp, Homo sapien
gagtgaaataatgccagttttagac

SEQ ID NO: 2000646 - DNA, 25 bp, Homo sapien
tatatctagcgcatacattgagtcc

SEQ ID NO: 2000647 - DNA, 25 bp, Homo sapien
gacatgaaacgatcctgaacattgg

SEQ ID NO: 2000648 - DNA, 25 bp, Homo sapien
accatggattccgactgagggcagg

SEQ ID NO: 2000649 - DNA, 25 bp, Homo sapien
tgtctacaactcagcagtcggcctg

SEQ ID NO: 2000650 - DNA, 25 bp, Homo sapien
ccaagatcctgttgccttaggcaca

SEQ ID NO: 2000651 - DNA, 25 bp, Homo sapien
tggaatccacaggacatccagctgt

SEQ ID NO: 2000652 - DNA, 25 bp, Homo sapien
gcagcgtgctgagctctgtacctca

SEQ ID NO: 2000653 - DNA, 25 bp, Homo sapien
tctaaagtttgaggccgtcctaaga

SEQ ID NO: 2000654 - DNA, 25 bp, Homo sapien
tgagaagtgcgttttaacagcgaca

SEQ ID NO: 2000655 - DNA, 25 bp, Homo sapien
tcacacccagaagggtttcgtggag

SEQ ID NO: 2000656 - DNA, 25 bp, Homo sapien
tttgggtcctggccctcagccccca

SEQ ID NO: 2000657 - DNA, 25 bp, Homo sapien
ttgggtcctggccctcagcccccat

SEQ ID NO: 2000658 - DNA, 25 bp, Homo sapien
agctctcctctgttcccactgtcat

SEQ ID NO: 2000659 - DNA, 25 bp, Homo sapien
cctggtggcactgccagctctcctc

SEQ ID NO: 2000660 - DNA, 25 bp, Homo sapien
ggtggcactgccagctctcctctgt

SEQ ID NO: 2000661 - DNA, 25 bp, Homo sapien
cagctctcctctgttcccactgtca

SEQ ID NO: 2000662 - DNA, 25 bp, Homo sapien
caccttattggcagcatagctttgt

SEQ ID NO: 2000663 - DNA, 25 bp, Homo sapien
acacgaatcaccttattggcagcat

SEQ ID NO: 2000664 - DNA, 25 bp, Homo sapien
gctttgtaacttagaccagagatca

SEQ ID NO: 2000665 - DNA, 25 bp, Homo sapien
tgtaacttagaccagagatcattgt

SEQ ID NO: 2000666 - DNA, 25 bp, Homo sapien
tcacatgggaaactcttgatatttc

SEQ ID NO: 2000667 - DNA, 25 bp, Homo sapien
atgggaaactcttgatatttctgac

SEQ ID NO: 2000668 - DNA, 25 bp, Homo sapien
catgggaaactcttgatatttctga

SEQ ID NO: 2000669 - DNA, 25 bp, Homo sapien
cacatgggaaactcttgatatttct

SEQ ID NO: 2000670 - DNA, 25 bp, Homo sapien
aaaatactgagtttaagactcatta

SEQ ID NO: 2000671 - DNA, 25 bp, Homo sapien
aaccatgttattcatgaatttgtcc

SEQ ID NO: 2000672 - DNA, 25 bp, Homo sapien
ctttttctaaccatgttattcatga

SEQ ID NO: 2000673 - DNA, 25 bp, Homo sapien
tatgcttgtgggtaaaggtttcaca

SEQ ID NO: 2000674 - DNA, 25 bp, Homo sapien
ggctgcagtgagctagggttgcacc

SEQ ID NO: 2000675 - DNA, 25 bp, Homo sapien
aaggctgcagtgagctagggttgca

SEQ ID NO: 2000676 - DNA, 25 bp, Homo sapien
tttgggaggcttagatgggagaatt

SEQ ID NO: 2000677 - DNA, 25 bp, Homo sapien
gcttgaatccaggaattcaaggctg

SEQ ID NO: 2000678 - DNA, 25 bp, Homo sapien
gacttacacggtaggaattctggct

SEQ ID NO: 2000679 - DNA, 25 bp, Homo sapien
tgatcttccaacaccaatgggagga

SEQ ID NO: 2000680 - DNA, 25 bp, Homo sapien
tcatagtagcaagttgaagattcaa

SEQ ID NO: 2000681 - DNA, 25 bp, Homo sapien
tattaccaaggatgtctgaaccaga

SEQ ID NO: 2000682 - DNA, 25 bp, Homo sapien
tccagttagtacagtacctgttcat

SEQ ID NO: 2000683 - DNA, 25 bp, Homo sapien
aaattccagttagtacagtacctgt

SEQ ID NO: 2000684 - DNA, 25 bp, Homo sapien
tctaaattccagttagtacagtacc

SEQ ID NO: 2000685 - DNA, 25 bp, Homo sapien
tttcagttctcccctactggactct

SEQ ID NO: 2000686 - DNA, 25 bp, Homo sapien
cattctggttttcctttcttctttg

SEQ ID NO: 2000687 - DNA, 25 bp, Homo sapien
ctctttttggtcacactactcttag

SEQ ID NO: 2000688 - DNA, 25 bp, Homo sapien
ctgatgtactaaaccatagtggaat

SEQ ID NO: 2000689 - DNA, 25 bp, Homo sapien
ggtcacactactcttagatttttcc

SEQ ID NO: 2000690 - DNA, 25 bp, Homo sapien
catagtggaattctgagtttgctcc

SEQ ID NO: 2000691 - DNA, 25 bp, Homo sapien
agaattcacattctcttcggtgtga

SEQ ID NO: 2000692 - DNA, 25 bp, Homo sapien
tgaaagccctacttttacattgtaa

SEQ ID NO: 2000693 - DNA, 25 bp, Homo sapien
tgtgagtgaagatggtgaacctcat

SEQ ID NO: 2000694 - DNA, 25 bp, Homo sapien
cattctcttcggtgtgagtgaagat

SEQ ID NO: 2000695 - DNA, 25 bp, Homo sapien
cagagttgatactcagaattgggca

SEQ ID NO: 2000696 - DNA, 25 bp, Homo sapien
gcaggacaagaccagatcttcactt

SEQ ID NO: 2000697 - DNA, 25 bp, Homo sapien
gagttgatactcagaattgggcaag

SEQ ID NO: 2000698 - DNA, 25 bp, Homo sapien
tgggcaagttgtaggtgttaggagc

SEQ ID NO: 2000699 - DNA, 25 bp, Homo sapien
tacttggtgcttttgagcctgactg

SEQ ID NO: 2000700 - DNA, 25 bp, Homo sapien
gaagcatgctgcgtctgatgactgt

SEQ ID NO: 2000701 - DNA, 25 bp, Homo sapien
catagactacctgattgtggcagta

SEQ ID NO: 2000702 - DNA, 25 bp, Homo sapien
cctgactgatgtggtcgaagcatgc

SEQ ID NO: 2000703 - DNA, 25 bp, Homo sapien
tatagatagaagtcttactccactg

SEQ ID NO: 2000704 - DNA, 25 bp, Homo sapien
ctatagatagaagtcttactccact

SEQ ID NO: 2000705 - DNA, 25 bp, Homo sapien
agatagaagtcttactccactgcaa

SEQ ID NO: 2000706 - DNA, 25 bp, Homo sapien
tagatagaagtcttactccactgca

SEQ ID NO: 2000707 - DNA, 25 bp, Homo sapien
ggtggagtgtagtccctgcaggtga

SEQ ID NO: 2000708 - DNA, 25 bp, Homo sapien
caggtggagtgtagtccctgcaggt

SEQ ID NO: 2000709 - DNA, 25 bp, Homo sapien
ggccaggtggagtgtagtccctgca

SEQ ID NO: 2000710 - DNA, 25 bp, Homo sapien
gtggagtgtagtccctgcaggtgag

SEQ ID NO: 2000711 - DNA, 25 bp, Homo sapien
cttctcttgccgtgttcctttgcag

SEQ ID NO: 2000712 - DNA, 25 bp, Homo sapien
gtttatcgtgcaccaaaatagaggg

SEQ ID NO: 2000713 - DNA, 25 bp, Homo sapien
gatgacttataccagcactatactg

SEQ ID NO: 2000714 - DNA, 25 bp, Homo sapien
tagactcgtgatgatgttgatcagc

SEQ ID NO: 2000715 - DNA, 25 bp, Homo sapien
gacaagctgtcaatctcgaatatca

SEQ ID NO: 2000716 - DNA, 25 bp, Homo sapien
ttgtcatcttttacagacttgaatg

SEQ ID NO: 2000717 - DNA, 25 bp, Homo sapien
gtcatcttttacagacttgaatgtt

SEQ ID NO: 2000718 - DNA, 25 bp, Homo sapien
tgtcatcttttacagacttgaatgt

SEQ ID NO: 2000719 - DNA, 25 bp, Homo sapien
tgttcttccccaaggtcagctcctt

SEQ ID NO: 2000720 - DNA, 25 bp, Homo sapien
tcttccccaaggtcagctccttaca

SEQ ID NO: 2000721 - DNA, 25 bp, Homo sapien
ttccccaaggtcagctccttacaca

SEQ ID NO: 2000722 - DNA, 25 bp, Homo sapien
ctctgttcttccccaaggtcagctc

SEQ ID NO: 2000723 - DNA, 25 bp, Homo sapien
tacacctgtaaatatagatggtaca

SEQ ID NO: 2000724 - DNA, 25 bp, Homo sapien
ttcatccacataccatgtaggaagg

SEQ ID NO: 2000725 - DNA, 25 bp, Homo sapien
agtcagaagacgtttttcatccaca

SEQ ID NO: 2000726 - DNA, 25 bp, Homo sapien
taaatagttgctttgtccgaagtca

SEQ ID NO: 2000727 - DNA, 25 bp, Homo sapien
gccagatccattgctgcatgtagac

SEQ ID NO: 2000728 - DNA, 25 bp, Homo sapien
tgtagacactatggaggcagtaacc

SEQ ID NO: 2000729 - DNA, 25 bp, Homo sapien
ggttatgtggaaacagaccgtctca

SEQ ID NO: 2000730 - DNA, 25 bp, Homo sapien
ggtacaactcctatgaagaatgtgg

SEQ ID NO: 2000731 - DNA, 25 bp, Homo sapien
agaagttggttgttgaactacgtgg

SEQ ID NO: 2000732 - DNA, 25 bp, Homo sapien
caaatccatgacttatgctttcact

SEQ ID NO: 2000733 - DNA, 25 bp, Homo sapien
gcaacttccgtgtagtagtctcaag

SEQ ID NO: 2000734 - DNA, 25 bp, Homo sapien
ggtcagctcctctattttgggcaaa

SEQ ID NO: 2000735 - DNA, 25 bp, Homo sapien
aagctttctgggttttcacacctct

SEQ ID NO: 2000736 - DNA, 25 bp, Homo sapien
gataagcacatagcctctgaagcca

SEQ ID NO: 2000737 - DNA, 25 bp, Homo sapien
gccactgtgcaagcctcgggcagtt

SEQ ID NO: 2000738 - DNA, 25 bp, Homo sapien
cagtacaatgtagaggataagcaca

SEQ ID NO: 2000739 - DNA, 25 bp, Homo sapien
gcagcgtgagaactgactataacac

SEQ ID NO: 2000740 - DNA, 25 bp, Homo sapien
aacagctaaaactttattgtgttgg

SEQ ID NO: 2000741 - DNA, 25 bp, Homo sapien
ggcacacagtgaccatcgtaactgg

SEQ ID NO: 2000742 - DNA, 25 bp, Homo sapien
tatactcttggtgtggatctcactg

SEQ ID NO: 2000743 - DNA, 25 bp, Homo sapien
tgtgaattcttacagacctaccttt

SEQ ID NO: 2000744 - DNA, 25 bp, Homo sapien
tcttcattgctcttggcttaatagc

SEQ ID NO: 2000745 - DNA, 25 bp, Homo sapien
cttgcatctctgggttgccatgatg

SEQ ID NO: 2000746 - DNA, 25 bp, Homo sapien
ttaatagcccctgcatttcctgcct

SEQ ID NO: 2000747 - DNA, 25 bp, Homo sapien
tattgttcggatccttcttcattgc

SEQ ID NO: 2000748 - DNA, 25 bp, Homo sapien
gggcctgcctgcttgtagacaaaaa

SEQ ID NO: 2000749 - DNA, 25 bp, Homo sapien
gagatgcttgggctcagttcagcaa

SEQ ID NO: 2000750 - DNA, 25 bp, Homo sapien
catcctctagaagtatagagtccag

SEQ ID NO: 2000751 - DNA, 25 bp, Homo sapien
tatgcaacgcaagaggcatgcacaa

SEQ ID NO: 2000752 - DNA, 25 bp, Homo sapien
ccagttttgagttagtatgaattac

SEQ ID NO: 2000753 - DNA, 25 bp, Homo sapien
agcaagcatatcaattttagcagtt

SEQ ID NO: 2000754 - DNA, 25 bp, Homo sapien
cagaagaccatttcatggaaggtca

SEQ ID NO: 2000755 - DNA, 25 bp, Homo sapien
taaccatcacagtatctcaggtatt

SEQ ID NO: 2000756 - DNA, 25 bp, Homo sapien
gagagcaagttgatatagtttccca

SEQ ID NO: 2000757 - DNA, 25 bp, Homo sapien
ccaacctaatttatagagcccaaga

SEQ ID NO: 2000758 - DNA, 25 bp, Homo sapien
gggtgtaacccatgaagctgcattg

SEQ ID NO: 2000759 - DNA, 25 bp, Homo sapien
cccagattgaacatctgtatcagtg

SEQ ID NO: 2000760 - DNA, 25 bp, Homo sapien
cagctatctgatctttgtcaaagcg

SEQ ID NO: 2000761 - DNA, 25 bp, Homo sapien
aaaaccagcatgatattggcacaaa

SEQ ID NO: 2000762 - DNA, 25 bp, Homo sapien
tctgacctctaagtatactataagg

SEQ ID NO: 2000763 - DNA, 25 bp, Homo sapien
taggaatacatttgcccgaggaggt

SEQ ID NO: 2000764 - DNA, 25 bp, Homo sapien
gtccctgaggccatgtagtttcctt

SEQ ID NO: 2000765 - DNA, 25 bp, Homo sapien
ccctgaggccatgtagtttcctttc

SEQ ID NO: 2000766 - DNA, 25 bp, Homo sapien
tccctgaggccatgtagtttccttt

SEQ ID NO: 2000767 - DNA, 25 bp, Homo sapien
cctgaggccatgtagtttcctttca

SEQ ID NO: 2000768 - DNA, 25 bp, Homo sapien
ggctaaaaaggaactagcaatatcc

SEQ ID NO: 2000769 - DNA, 25 bp, Homo sapien
aaaatctgttgtatactcctcagag

SEQ ID NO: 2000770 - DNA, 25 bp, Homo sapien
ggcatattcagggtcacagggatta

SEQ ID NO: 2000771 - DNA, 25 bp, Homo sapien
caatatccttaaggaggtggtggaa

SEQ ID NO: 2000772 - DNA, 25 bp, Homo sapien
tttctctgggaagcacgcataatag

SEQ ID NO: 2000773 - DNA, 25 bp, Homo sapien
gtctctctagttgtatttctctggg

SEQ ID NO: 2000774 - DNA, 25 bp, Homo sapien
gggaagcacgcataatagtcttttc

SEQ ID NO: 2000775 - DNA, 25 bp, Homo sapien
tgtggagctgtagcaagttgacttt

SEQ ID NO: 2000776 - DNA, 25 bp, Homo sapien
cccagcatgggtttgtatcttcaaa

SEQ ID NO: 2000777 - DNA, 25 bp, Homo sapien
agttcagcaagagtaattatttctg

SEQ ID NO: 2000778 - DNA, 25 bp, Homo sapien
gagtaattatttctgcatagtcctt

SEQ ID NO: 2000779 - DNA, 25 bp, Homo sapien
ttctctctctagtcctgattttggt

SEQ ID NO: 2000780 - DNA, 25 bp, Homo sapien
ctgtccaagtgggagataaaggcac

SEQ ID NO: 2000781 - DNA, 25 bp, Homo sapien
tccaagtgggagataaaggcacccc

SEQ ID NO: 2000782 - DNA, 25 bp, Homo sapien
agaaggcagggactctctgtccaag

SEQ ID NO: 2000783 - DNA, 25 bp, Homo sapien
gagaaggcagggactctctgtccaa

SEQ ID NO: 2000784 - DNA, 25 bp, Homo sapien
gacacgctgggggcaatgatggttc

SEQ ID NO: 2000785 - DNA, 25 bp, Homo sapien
cgctgggggcaatgatggttcccat

SEQ ID NO: 2000786 - DNA, 25 bp, Homo sapien
ctgatacttgacacaggacacgctg

SEQ ID NO: 2000787 - DNA, 25 bp, Homo sapien
tgatacttgacacaggacacgctgg

SEQ ID NO: 2000788 - DNA, 25 bp, Homo sapien
tgtaatcggccagcaaagcgggtac

SEQ ID NO: 2000789 - DNA, 25 bp, Homo sapien
aagcgggtacccaggatagactgat

SEQ ID NO: 2000790 - DNA, 25 bp, Homo sapien
gatgggatgattgtaatcggccagc

SEQ ID NO: 2000791 - DNA, 25 bp, Homo sapien
tactgaacaggggtagagaagtgat

SEQ ID NO: 2000792 - DNA, 25 bp, Homo sapien
ggacgccggttcaggagcttgctca

SEQ ID NO: 2000793 - DNA, 25 bp, Homo sapien
aggacgccggttcaggagcttgctc

SEQ ID NO: 2000794 - DNA, 25 bp, Homo sapien
tcattaccatagcaccacaggaggc

SEQ ID NO: 2000795 - DNA, 25 bp, Homo sapien
gcttttggagcattcaaactctctg

SEQ ID NO: 2000796 - DNA, 25 bp, Homo sapien
taacagctggccttgcaaggaattc

SEQ ID NO: 2000797 - DNA, 25 bp, Homo sapien
actttctgagtcttgctgctaacag

SEQ ID NO: 2000798 - DNA, 25 bp, Homo sapien
tggggggaaagctggattgccctgg

SEQ ID NO: 2000799 - DNA, 25 bp, Homo sapien
ctggggggaaagctggattgccctg

SEQ ID NO: 2000800 - DNA, 25 bp, Homo sapien
gggaaagctggattgccctggggag

SEQ ID NO: 2000801 - DNA, 25 bp, Homo sapien
aaagctggattgccctggggagctc

SEQ ID NO: 2000802 - DNA, 25 bp, Homo sapien
acccgaaggttggacaccctggctg

SEQ ID NO: 2000803 - DNA, 25 bp, Homo sapien
tgtccaaagccacctgagggataag

SEQ ID NO: 2000804 - DNA, 25 bp, Homo sapien
ccttgggtccctaatgaagtctggg

SEQ ID NO: 2000805 - DNA, 25 bp, Homo sapien
gaagtctgggtcctaactcaggctc

SEQ ID NO: 2000806 - DNA, 25 bp, Homo sapien
catgtaaatcagcaggtctcagctt

SEQ ID NO: 2000807 - DNA, 25 bp, Homo sapien
cctttttatctgagaccggaattca

SEQ ID NO: 2000808 - DNA, 25 bp, Homo sapien
gataggagtctagatatttacctga

SEQ ID NO: 2000809 - DNA, 25 bp, Homo sapien
taatgacctcattcctaagttcctt

SEQ ID NO: 2000810 - DNA, 25 bp, Homo sapien
aaatagaaggtttgtgccagtagac

SEQ ID NO: 2000811 - DNA, 25 bp, Homo sapien
cccggcttgttatgataatttctaa

SEQ ID NO: 2000812 - DNA, 25 bp, Homo sapien
cacccggcttgttatgataatttct

SEQ ID NO: 2000813 - DNA, 25 bp, Homo sapien
cgcacccggcttgttatgataattt

SEQ ID NO: 2000814 - DNA, 25 bp, Homo sapien
accgcacccggcttgttatgataat

SEQ ID NO: 2000815 - DNA, 25 bp, Homo sapien
tcctagcgagcgtcagtacttttcg

SEQ ID NO: 2000816 - DNA, 25 bp, Homo sapien
caacacgtactgacatcctagcgag

SEQ ID NO: 2000817 - DNA, 25 bp, Homo sapien
ttttagttgggcatctgggacgcgc

SEQ ID NO: 2000818 - DNA, 25 bp, Homo sapien
atgagggtcccagttttcacacaac

SEQ ID NO: 2000819 - DNA, 25 bp, Homo sapien
tgaatttactcccgtgccataagtt

SEQ ID NO: 2000820 - DNA, 25 bp, Homo sapien
aatgctgaatttactcccgtgccat

SEQ ID NO: 2000821 - DNA, 25 bp, Homo sapien
taatgctgaatttactcccgtgcca

SEQ ID NO: 2000822 - DNA, 25 bp, Homo sapien
tgctgaatttactcccgtgccataa

SEQ ID NO: 2000823 - DNA, 25 bp, Homo sapien
gctgaatttactcccgtgccataag

SEQ ID NO: 2000824 - DNA, 25 bp, Homo sapien
atgctgaatttactcccgtgccata

SEQ ID NO: 2000825 - DNA, 25 bp, Homo sapien
tatggcacgggagtaaattcagcat

SEQ ID NO: 2000826 - DNA, 25 bp, Homo sapien
cttatggcacgggagtaaattcagc

SEQ ID NO: 2000827 - DNA, 25 bp, Homo sapien
ttatggcacgggagtaaattcagca

SEQ ID NO: 2000828 - DNA, 25 bp, Homo sapien
tggcacgggagtaaattcagcatta

SEQ ID NO: 2000829 - DNA, 25 bp, Homo sapien
atggcacgggagtaaattcagcatt

SEQ ID NO: 2000830 - DNA, 25 bp, Homo sapien
aacttatggcacgggagtaaattca

SEQ ID NO: 2000831 - DNA, 25 bp, Homo sapien
cttcagcttattctggaggcaggaa

SEQ ID NO: 2000832 - DNA, 25 bp, Homo sapien
ctcaggttcttgacttaaaagaact

SEQ ID NO: 2000833 - DNA, 25 bp, Homo sapien
cttaagttcattagatgtaaaaaga

SEQ ID NO: 2000834 - DNA, 25 bp, Homo sapien
gacttcagcttattctggaggcagg

SEQ ID NO: 2000835 - DNA, 25 bp, Homo sapien
ggaggacttcagcttattctggagg

SEQ ID NO: 2000836 - DNA, 25 bp, Homo sapien
aatacttaaatggtagaaatcaaca

SEQ ID NO: 2000837 - DNA, 25 bp, Homo sapien
tctttttacatctaatgaacttaag

SEQ ID NO: 2000838 - DNA, 25 bp, Homo sapien
agttcttttaagtcaagaacctgag

SEQ ID NO: 2000839 - DNA, 25 bp, Homo sapien
ttcctgcctccagaataagctgaag

SEQ ID NO: 2000840 - DNA, 25 bp, Homo sapien
tgttgatttctaccatttaagtatt

SEQ ID NO: 2000841 - DNA, 25 bp, Homo sapien
tgcctccagaataagctgaagtcct

SEQ ID NO: 2000842 - DNA, 25 bp, Homo sapien
cctccagaataagctgaagtcctcc

SEQ ID NO: 2000843 - DNA, 25 bp, Homo sapien
gcagataatcatacgggcctgaggt

SEQ ID NO: 2000844 - DNA, 25 bp, Homo sapien
aatcatacgggcctgaggtactgaa

SEQ ID NO: 2000845 - DNA, 25 bp, Homo sapien
catcagcagataatcatacgggcct

SEQ ID NO: 2000846 - DNA, 25 bp, Homo sapien
tacgggcctgaggtactgaatataa

SEQ ID NO: 2000847 - DNA, 25 bp, Homo sapien
gaagtggctatgtacatctaagtgg

SEQ ID NO: 2000848 - DNA, 25 bp, Homo sapien
gggccatcagcagataatcatacgg

SEQ ID NO: 2000849 - DNA, 25 bp, Homo sapien
tattcagtacctcaggcccgtatga

SEQ ID NO: 2000850 - DNA, 25 bp, Homo sapien
cgtatgattatctgctgatggcccc

SEQ ID NO: 2000851 - DNA, 25 bp, Homo sapien
gatggccccacttagatgtacatag

SEQ ID NO: 2000852 - DNA, 25 bp, Homo sapien
ttatattcagtacctcaggcccgta

SEQ ID NO: 2000853 - DNA, 25 bp, Homo sapien
ccacttagatgtacatagccacttc

SEQ ID NO: 2000854 - DNA, 25 bp, Homo sapien
tacctcaggcccgtatgattatctg

SEQ ID NO: 2000855 - DNA, 25 bp, Homo sapien
gttccttttccgtaaggatcatctc

SEQ ID NO: 2000856 - DNA, 25 bp, Homo sapien
ttccttttccgtaaggatcatctca

SEQ ID NO: 2000857 - DNA, 25 bp, Homo sapien
tgttccttttccgtaaggatcatct

SEQ ID NO: 2000858 - DNA, 25 bp, Homo sapien
taaggatcatctcaatgtggcaggg

SEQ ID NO: 2000859 - DNA, 25 bp, Homo sapien
ccctgccacattgagatgatcctta

SEQ ID NO: 2000860 - DNA, 25 bp, Homo sapien
tgagatgatccttacggaaaaggaa

SEQ ID NO: 2000861 - DNA, 25 bp, Homo sapien
agatgatccttacggaaaaggaaca

SEQ ID NO: 2000862 - DNA, 25 bp, Homo sapien
gagatgatccttacggaaaaggaac

SEQ ID NO: 2000863 - DNA, 25 bp, Homo sapien
agtaactacagcactgcttccacag

SEQ ID NO: 2000864 - DNA, 25 bp, Homo sapien
gaaatgccatcatcgcagccatact

SEQ ID NO: 2000865 - DNA, 25 bp, Homo sapien
aaaggtgtcctaagaaatgccatca

SEQ ID NO: 2000866 - DNA, 25 bp, Homo sapien
gatgattcgaacagctgctcagaga

SEQ ID NO: 2000867 - DNA, 25 bp, Homo sapien
gatcacctagaggaaagtacagtgt

SEQ ID NO: 2000868 - DNA, 25 bp, Homo sapien
gcttccacagaagtagccacacggg

SEQ ID NO: 2000869 - DNA, 25 bp, Homo sapien
tcgtggggttctccgggtcaagtga

SEQ ID NO: 2000870 - DNA, 25 bp, Homo sapien
tcacttgacccggagaaccccacga

SEQ ID NO: 2000871 - DNA, 25 bp, Homo sapien
gatgatggcatttcttaggacacct

SEQ ID NO: 2000872 - DNA, 25 bp, Homo sapien
gaattacactgtactttcctctagg

SEQ ID NO: 2000873 - DNA, 25 bp, Homo sapien
tctgagcagctgttcgaatcatctg

SEQ ID NO: 2000874 - DNA, 25 bp, Homo sapien
gaagcagtgctgtagttactggaag

SEQ ID NO: 2000875 - DNA, 25 bp, Homo sapien
gaaagtatggctgcgatgatggcat

SEQ ID NO: 2000876 - DNA, 25 bp, Homo sapien
cccgtgtggctacttctgtggaagc

SEQ ID NO: 2000877 - DNA, 25 bp, Homo sapien
gagtgtttctcctgcgttgctccga

SEQ ID NO: 2000878 - DNA, 25 bp, Homo sapien
cggctacgaatctcgcgagaagtca

SEQ ID NO: 2000879 - DNA, 25 bp, Homo sapien
taagtaggcaattcgttttcacacg

SEQ ID NO: 2000880 - DNA, 25 bp, Homo sapien
gctactaaatcctcgctggaggcgg

SEQ ID NO: 2000881 - DNA, 25 bp, Homo sapien
ctgctgcggtgcacactgcgatgtg

SEQ ID NO: 2000882 - DNA, 25 bp, Homo sapien
aaaacagcattgtacgggaggctcc

SEQ ID NO: 2000883 - DNA, 25 bp, Homo sapien
tctacagagtaagcgaagcctcggc

SEQ ID NO: 2000884 - DNA, 25 bp, Homo sapien
caaagagatcttacgtctgggagca

SEQ ID NO: 2000885 - DNA, 25 bp, Homo sapien
gaacccaatagaagtcctcaggaga

SEQ ID NO: 2000886 - DNA, 25 bp, Homo sapien
gaccacatacactttgactaaccgg

SEQ ID NO: 2000887 - DNA, 25 bp, Homo sapien
gattcgaatacgaggaaacacttgc

SEQ ID NO: 2000888 - DNA, 25 bp, Homo sapien
ccaagtgcccgctgtaagatggcaa

SEQ ID NO: 2000889 - DNA, 25 bp, Homo sapien
gactaaccggattctcaccacataa

SEQ ID NO: 2000890 - DNA, 25 bp, Homo sapien
caaaatggacatgctttctagaggg

SEQ ID NO: 2000891 - DNA, 25 bp, Homo sapien
gctagtaagcatgtcctaggaggtc

SEQ ID NO: 2000892 - DNA, 25 bp, Homo sapien
gaacatggtcgcttccttgaccacc

SEQ ID NO: 2000893 - DNA, 25 bp, Homo sapien
caacagtgcaccctgagagagttca

SEQ ID NO: 2000894 - DNA, 25 bp, Homo sapien
tattgatccgggtcctgcggcagaa

SEQ ID NO: 2000895 - DNA, 25 bp, Homo sapien
gggaggatccggctctttaagacga

SEQ ID NO: 2000896 - DNA, 25 bp, Homo sapien
gtagcaaagcacttagcgaggcgcg

SEQ ID NO: 2000897 - DNA, 25 bp, Homo sapien
tctcgtccgcaatacgtgggtgata

SEQ ID NO: 2000898 - DNA, 25 bp, Homo sapien
tccctgaaactctgcgtccgctggg

SEQ ID NO: 2000899 - DNA, 25 bp, Homo sapien
ggagtggtctatccgctccctgggc

SEQ ID NO: 2000900 - DNA, 25 bp, Homo sapien
gccgcacaataacccggcggagcta

SEQ ID NO: 2000901 - DNA, 25 bp, Homo sapien
cccaagtggcggaggcggacatttc

SEQ ID NO: 2000902 - DNA, 25 bp, Homo sapien
ctcctccggacacccagatcctcct

SEQ ID NO: 2000903 - DNA, 25 bp, Homo sapien
cctccggacacccagatcctcctct

SEQ ID NO: 2000904 - DNA, 25 bp, Homo sapien
ggacgccgcacgctcggccccgctt

SEQ ID NO: 2000905 - DNA, 25 bp, Homo sapien
tgccctcctccggacacccagatcc

SEQ ID NO: 2000906 - DNA, 25 bp, Homo sapien
tcttggtgtttccagcaatcccggc

SEQ ID NO: 2000907 - DNA, 25 bp, Homo sapien
agaacgagatctgccctcgtcctga

SEQ ID NO: 2000908 - DNA, 25 bp, Homo sapien
aaaatgaaaacttggcggcacggag

SEQ ID NO: 2000909 - DNA, 25 bp, Homo sapien
agtgtcaacggcttgccccagaacg

SEQ ID NO: 2000910 - DNA, 25 bp, Homo sapien
gggctccccgcagcaaagcaatagc

SEQ ID NO: 2000911 - DNA, 25 bp, Homo sapien
aaacagagcagaggaacggagttgc

SEQ ID NO: 2000912 - DNA, 25 bp, Homo sapien
gcagcaaagcaatagcagaggctcc

SEQ ID NO: 2000913 - DNA, 25 bp, Homo sapien
cagagcagaggaacggagttgctca

SEQ ID NO: 2000914 - DNA, 25 bp, Homo sapien
atggtttgacctcagtctgtgtagc

SEQ ID NO: 2000915 - DNA, 25 bp, Homo sapien
tttgacctcagtctgtgtagctttg

SEQ ID NO: 2000916 - DNA, 25 bp, Homo sapien
ctgtgtagctttgggtttgtggagc

SEQ ID NO: 2000917 - DNA, 25 bp, Homo sapien
tggaggtgcggaggttaaacctcac

SEQ ID NO: 2000918 - DNA, 25 bp, Homo sapien
tgcagtcttctaagggctggctgtg

SEQ ID NO: 2000919 - DNA, 25 bp, Homo sapien
tggccgacggagaggtagcatcctt

SEQ ID NO: 2000920 - DNA, 25 bp, Homo sapien
cgtccatccgtgaatgatgaaaaag

SEQ ID NO: 2000921 - DNA, 25 bp, Homo sapien
gaaaaaggttttagctgtcatgttg

SEQ ID NO: 2000922 - DNA, 25 bp, Homo sapien
cacaactacattggcgtctttctct

SEQ ID NO: 2000923 - DNA, 25 bp, Homo sapien
tcttgtgtgcagggctgacacgagt

SEQ ID NO: 2000924 - DNA, 25 bp, Homo sapien
gctgacacgagtttgtgcagccagt

SEQ ID NO: 2000925 - DNA, 25 bp, Homo sapien
tgcagggctgacacgagtttgtgca

SEQ ID NO: 2000926 - DNA, 25 bp, Homo sapien
ggtgggccagggggagccagtcaac

SEQ ID NO: 2000927 - DNA, 25 bp, Homo sapien
tggtgggccagggggagccagtcaa

SEQ ID NO: 2000928 - DNA, 25 bp, Homo sapien
ctggtgggccagggggagccagtca

SEQ ID NO: 2000929 - DNA, 25 bp, Homo sapien
gcagccagtcgagcatcctggcaat

SEQ ID NO: 2000930 - DNA, 25 bp, Homo sapien
tgtcccaccaccctggtattattga

SEQ ID NO: 2000931 - DNA, 25 bp, Homo sapien
gtcgagcatcctggcaatgctgtgt

SEQ ID NO: 2000932 - DNA, 25 bp, Homo sapien
ccctggtattattgaccgcatccgt

SEQ ID NO: 2000933 - DNA, 25 bp, Homo sapien
ttgggtttgagatcctgctggtgac

SEQ ID NO: 2000934 - DNA, 25 bp, Homo sapien
gacctgcatttcttaagaagattgg

SEQ ID NO: 2000935 - DNA, 25 bp, Homo sapien
tttatcagactccagaagttcatgg

SEQ ID NO: 2000936 - DNA, 25 bp, Homo sapien
ttcatggcaacagatgcatgacctg

SEQ ID NO: 2000937 - DNA, 25 bp, Homo sapien
gctccgaggctgtagccgatcaagt

SEQ ID NO: 2000938 - DNA, 25 bp, Homo sapien
cgttcctttcacgaagttgcctgca

SEQ ID NO: 2000939 - DNA, 25 bp, Homo sapien
caagtggacattcccgagagaaaaa

SEQ ID NO: 2000940 - DNA, 25 bp, Homo sapien
agttgcctgcatacccggccacgtg

SEQ ID NO: 2000941 - DNA, 25 bp, Homo sapien
cagttgcgatcaccttgtccacagg

SEQ ID NO: 2000942 - DNA, 25 bp, Homo sapien
caccttgtccacaggtccatgagaa

SEQ ID NO: 2000943 - DNA, 25 bp, Homo sapien
gatcaccttgtccacaggtccatga

SEQ ID NO: 2000944 - DNA, 25 bp, Homo sapien
ccttgtccacaggtccatgagaagt

SEQ ID NO: 2000945 - DNA, 25 bp, Homo sapien
tgttcagggttgctatgtggttcag

SEQ ID NO: 2000946 - DNA, 25 bp, Homo sapien
tggttcagagatagcatagagtagc

SEQ ID NO: 2000947 - DNA, 25 bp, Homo sapien
ggatctggaatctgacagcatgggt

SEQ ID NO: 2000948 - DNA, 25 bp, Homo sapien
acttatagggcccaggatattgggc

SEQ ID NO: 2000949 - DNA, 25 bp, Homo sapien
gcagcagaaggaggccccaaaacag

SEQ ID NO: 2000950 - DNA, 25 bp, Homo sapien
tgcagcagaaggaggccccaaaaca

SEQ ID NO: 2000951 - DNA, 25 bp, Homo sapien
ctgcagcagaaggaggccccaaaac

SEQ ID NO: 2000952 - DNA, 25 bp, Homo sapien
aaatctgcatcgtccggagagagcc

SEQ ID NO: 2000953 - DNA, 25 bp, Homo sapien
tgctcaagccgaaggaacgcgtgta

SEQ ID NO: 2000954 - DNA, 25 bp, Homo sapien
aagacatcgttgagtccacagcctg

SEQ ID NO: 2000955 - DNA, 25 bp, Homo sapien
ggatgtcggccccttcaaacatggg

SEQ ID NO: 2000956 - DNA, 25 bp, Homo sapien
tctgaaaggcatgcctgcccgggtt

SEQ ID NO: 2000957 - DNA, 25 bp, Homo sapien
tattacaacggttcttgcggcagct

SEQ ID NO: 2000958 - DNA, 25 bp, Homo sapien
tgcactggaaggcaaaactcggctt

SEQ ID NO: 2000959 - DNA, 25 bp, Homo sapien
acaaagaggtggacggctcgctcat

SEQ ID NO: 2000960 - DNA, 25 bp, Homo sapien
cagggacactccagggactgaaggt

SEQ ID NO: 2000961 - DNA, 25 bp, Homo sapien
agggacactccagggactgaaggtt

SEQ ID NO: 2000962 - DNA, 25 bp, Homo sapien
tcagggacactccagggactgaagg

SEQ ID NO: 2000963 - DNA, 25 bp, Homo sapien
ggacactccagggactgaaggttac

SEQ ID NO: 2000964 - DNA, 25 bp, Homo sapien
tccctttcctaggacatgcacagtg

SEQ ID NO: 2000965 - DNA, 25 bp, Homo sapien
ttgcaacgatttgattggattgtgc

SEQ ID NO: 2000966 - DNA, 25 bp, Homo sapien
cctgggctaggatgtgccctgctct

SEQ ID NO: 2000967 - DNA, 25 bp, Homo sapien
cacagtgtaatctgatttgcaacga

SEQ ID NO: 2000968 - DNA, 25 bp, Homo sapien
agaacaaagatgcttgtaacccttg

SEQ ID NO: 2000969 - DNA, 25 bp, Homo sapien
agcagaacaaagatgcttgtaaccc

SEQ ID NO: 2000970 - DNA, 25 bp, Homo sapien
agatgcttgtaacccttgcttgtca

SEQ ID NO: 2000971 - DNA, 25 bp, Homo sapien
caaagatgcttgtaacccttgcttg

SEQ ID NO: 2000972 - DNA, 25 bp, Homo sapien
aatttctcccatgttcttgtaactg

SEQ ID NO: 2000973 - DNA, 25 bp, Homo sapien
ctgggaatctgcattagtgccataa

SEQ ID NO: 2000974 - DNA, 25 bp, Homo sapien
tgacgtaaaaggtgggctcaatttc

SEQ ID NO: 2000975 - DNA, 25 bp, Homo sapien
tagtgccataaagggtgacgtaaaa

SEQ ID NO: 2000976 - DNA, 25 bp, Homo sapien
gacttcacccggatgcgcctgatat

SEQ ID NO: 2000977 - DNA, 25 bp, Homo sapien
tcctcggtgtagaccaggaaggtgt

SEQ ID NO: 2000978 - DNA, 25 bp, Homo sapien
tagctgcgaaactccttccacaggt

SEQ ID NO: 2000979 - DNA, 25 bp, Homo sapien
agctggatcttcaagaggtctccca

SEQ ID NO: 2000980 - DNA, 25 bp, Homo sapien
ggagagagaataatgctctgaaaat

SEQ ID NO: 2000981 - DNA, 25 bp, Homo sapien
ctggaagtgatactccagtctgctt

SEQ ID NO: 2000982 - DNA, 25 bp, Homo sapien
tctggaagtgatactccagtctgct

SEQ ID NO: 2000983 - DNA, 25 bp, Homo sapien
tctgaaaatcagatgctggggaaaa

SEQ ID NO: 2000984 - DNA, 25 bp, Homo sapien
gctgccaagctgtgtcatagatgac

SEQ ID NO: 2000985 - DNA, 25 bp, Homo sapien
tatagtttgtacctgcaagggccca

SEQ ID NO: 2000986 - DNA, 25 bp, Homo sapien
ttgacaaaggtctcgcaggcttccc

SEQ ID NO: 2000987 - DNA, 25 bp, Homo sapien
ccaggcacggtgttaggagctgata

SEQ ID NO: 2000988 - DNA, 25 bp, Homo sapien
tcccggcctggggatatgctggtgt

SEQ ID NO: 2000989 - DNA, 25 bp, Homo sapien
tctcagggtcttctgtacaaaatgt

SEQ ID NO: 2000990 - DNA, 25 bp, Homo sapien
atcccgacacttgcgaaaccagagc

SEQ ID NO: 2000991 - DNA, 25 bp, Homo sapien
gcctggggatatgctggtgttctca

SEQ ID NO: 2000992 - DNA, 25 bp, Homo sapien
tgttcatgctatgtccctggcaccc

SEQ ID NO: 2000993 - DNA, 25 bp, Homo sapien
gaacgtgtgagaaagtcctggttac

SEQ ID NO: 2000994 - DNA, 25 bp, Homo sapien
cccagcacatgctaggagatcatca

SEQ ID NO: 2000995 - DNA, 25 bp, Homo sapien
tcaacgtgtcctgggtggaacgtgt

SEQ ID NO: 2000996 - DNA, 25 bp, Homo sapien
gcaagagctatagcagcgcagtccc

SEQ ID NO: 2000997 - DNA, 25 bp, Homo sapien
cagccatcacaggagaccagttgtt

SEQ ID NO: 2000998 - DNA, 25 bp, Homo sapien
ccattgggtgggtcctcagcagtaa

SEQ ID NO: 2000999 - DNA, 25 bp, Homo sapien
tcagcagtaactttcctccatgggc

SEQ ID NO: 2001000 - DNA, 25 bp, Homo sapien
agggcctcttcggagccagcgttcc

SEQ ID NO: 2001001 - DNA, 25 bp, Homo sapien
aggctcgcccagcaactgagaaacc

SEQ ID NO: 2001002 - DNA, 25 bp, Homo sapien
gaaaccaatccagtgtgcacgagag

SEQ ID NO: 2001003 - DNA, 25 bp, Homo sapien
cgttcctcgtcaggcagagtacagg

SEQ ID NO: 2001004 - DNA, 25 bp, Homo sapien
taagcagtatggtcagtgcaaccca

SEQ ID NO: 2001005 - DNA, 25 bp, Homo sapien
tataagtctaggcatgtggctgaac

SEQ ID NO: 2001006 - DNA, 25 bp, Homo sapien
catgagtcagctcctgtcggaagga

SEQ ID NO: 2001007 - DNA, 25 bp, Homo sapien
aagcagttatatctggcaaccggcc

SEQ ID NO: 2001008 - DNA, 25 bp, Homo sapien
gaaatgtggatctaatggtcagcaa

SEQ ID NO: 2001009 - DNA, 25 bp, Homo sapien
cgcacctggccctaaggagtacatt

SEQ ID NO: 2001010 - DNA, 25 bp, Homo sapien
cctgctggatggacatttctgtggc

SEQ ID NO: 2001011 - DNA, 25 bp, Homo sapien
ccaggtaaaggtctactagccattg

SEQ ID NO: 2001012 - DNA, 25 bp, Homo sapien
gatgactgatccatgcaaagacgtg

SEQ ID NO: 2001013 - DNA, 25 bp, Homo sapien
aagttcatgtccatacaaggattca

SEQ ID NO: 2001014 - DNA, 25 bp, Homo sapien
taattatgctgagtacaagaaggca

SEQ ID NO: 2001015 - DNA, 25 bp, Homo sapien
gatccagctatcctactcccaaaag

SEQ ID NO: 2001016 - DNA, 25 bp, Homo sapien
gtacctctggtacaatttcctctga

SEQ ID NO: 2001017 - DNA, 25 bp, Homo sapien
tgatcgtacctctggtacaatttcc

SEQ ID NO: 2001018 - DNA, 25 bp, Homo sapien
tcaatttgatcgtacctctggtaca

SEQ ID NO: 2001019 - DNA, 25 bp, Homo sapien
taacgttcaatttgatcgtacctct

SEQ ID NO: 2001020 - DNA, 25 bp, Homo sapien
cacaggaggaaattctgctggtaaa

SEQ ID NO: 2001021 - DNA, 25 bp, Homo sapien
acaggaggaaattctgctggtaaaa

SEQ ID NO: 2001022 - DNA, 25 bp, Homo sapien
tcagttcatagattccttctccttg

SEQ ID NO: 2001023 - DNA, 25 bp, Homo sapien
tccaggactcagttcatagattcct

SEQ ID NO: 2001024 - DNA, 25 bp, Homo sapien
tagctggagcgtgtccaggactcag

SEQ ID NO: 2001025 - DNA, 25 bp, Homo sapien
gatagctggagcgtgtccaggactc

SEQ ID NO: 2001026 - DNA, 25 bp, Homo sapien
ctgagggcagccaggatggcaggtg

SEQ ID NO: 2001027 - DNA, 25 bp, Homo sapien
gggcagccaggatggcaggtgccct

SEQ ID NO: 2001028 - DNA, 25 bp, Homo sapien
gcagccaggatggcaggtgccctga

SEQ ID NO: 2001029 - DNA, 25 bp, Homo sapien
gagggcagccaggatggcaggtgcc

SEQ ID NO: 2001030 - DNA, 25 bp, Homo sapien
ttcctgggcagcttttccaagggac

SEQ ID NO: 2001031 - DNA, 25 bp, Homo sapien
tctgctctggtgctagattaccttg

SEQ ID NO: 2001032 - DNA, 25 bp, Homo sapien
gaaggatgcaccaggaagggcaccc

SEQ ID NO: 2001033 - DNA, 25 bp, Homo sapien
accttgaaaggttggttacagcaca

SEQ ID NO: 2001034 - DNA, 25 bp, Homo sapien
tctccctgcagttttgggtctgctc

SEQ ID NO: 2001035 - DNA, 25 bp, Homo sapien
tcacggtgccaattgcaggcagaag

SEQ ID NO: 2001036 - DNA, 25 bp, Homo sapien
aagactcaaaaccaggccttcgtgg

SEQ ID NO: 2001037 - DNA, 25 bp, Homo sapien
gggttaagctcttcacggtgccaat

SEQ ID NO: 2001038 - DNA, 25 bp, Homo sapien
caattgcaggcagaagctccttcaa

SEQ ID NO: 2001039 - DNA, 25 bp, Homo sapien
cccaaggctaggcacagacagagag

SEQ ID NO: 2001040 - DNA, 25 bp, Homo sapien
gcctgaaacttcaaggctaaagaaa

SEQ ID NO: 2001041 - DNA, 25 bp, Homo sapien
gacagagaggcaaatgcctttagaa

SEQ ID NO: 2001042 - DNA, 25 bp, Homo sapien
cagccaatcaccaagtatgttaggg

SEQ ID NO: 2001043 - DNA, 25 bp, Homo sapien
ccttgcaagccagtgtggtctgctt

SEQ ID NO: 2001044 - DNA, 25 bp, Homo sapien
cagatatcaggtaggaagagtccag

SEQ ID NO: 2001045 - DNA, 25 bp, Homo sapien
gctttagcagatatcaggtaggaag

SEQ ID NO: 2001046 - DNA, 25 bp, Homo sapien
cccttgcaagccagtgtggtctgct

SEQ ID NO: 2001047 - DNA, 25 bp, Homo sapien
caaagggatttgaagagtgaggctt

SEQ ID NO: 2001048 - DNA, 25 bp, Homo sapien
agagtgaggcttagaccagtacccc

SEQ ID NO: 2001049 - DNA, 25 bp, Homo sapien
gaggcttagaccagtacccctgggc

SEQ ID NO: 2001050 - DNA, 25 bp, Homo sapien
gtgaggcttagaccagtacccctgg

SEQ ID NO: 2001051 - DNA, 25 bp, Homo sapien
gagcttctatttgcctaaattcttc

SEQ ID NO: 2001052 - DNA, 25 bp, Homo sapien
agaggtaatgtggaaatccgtcacc

SEQ ID NO: 2001053 - DNA, 25 bp, Homo sapien
caagcctggggtcattaaaccatga

SEQ ID NO: 2001054 - DNA, 25 bp, Homo sapien
ggaaatccgtcacccactggctcat

SEQ ID NO: 2001055 - DNA, 25 bp, Homo sapien
gcccttcaggtgacaagaggcccat

SEQ ID NO: 2001056 - DNA, 25 bp, Homo sapien
aagcccttcaggtgacaagaggccc

SEQ ID NO: 2001057 - DNA, 25 bp, Homo sapien
agcccttcaggtgacaagaggccca

SEQ ID NO: 2001058 - DNA, 25 bp, Homo sapien
ctttggtttcctgtcaacctgcaaa

SEQ ID NO: 2001059 - DNA, 25 bp, Homo sapien
aagtcatggccatgatatgtaaatg

SEQ ID NO: 2001060 - DNA, 25 bp, Homo sapien
tttggtttcctgtcaacctgcaaag

SEQ ID NO: 2001061 - DNA, 25 bp, Homo sapien
gaacccacactgatttcttcaagct

SEQ ID NO: 2001062 - DNA, 25 bp, Homo sapien
atttcttcaagctccctccactgcc

SEQ ID NO: 2001063 - DNA, 25 bp, Homo sapien
actgccccagaatgccctctgctct

SEQ ID NO: 2001064 - DNA, 25 bp, Homo sapien
ggcagcagcacagaacccacactga

SEQ ID NO: 2001065 - DNA, 25 bp, Homo sapien
gtttcccaagcatacaggcagccag

SEQ ID NO: 2001066 - DNA, 25 bp, Homo sapien
gggcaccctgcacttggaatcctaa

SEQ ID NO: 2001067 - DNA, 25 bp, Homo sapien
tattcaacatgcgactgccaggtgc

SEQ ID NO: 2001068 - DNA, 25 bp, Homo sapien
aaaatgcaaatttcccctgtggcag

SEQ ID NO: 2001069 - DNA, 25 bp, Homo sapien
tcacagggtgttgggtaatccagtc

SEQ ID NO: 2001070 - DNA, 25 bp, Homo sapien
gcattgcctttggatatgccagcaa

SEQ ID NO: 2001071 - DNA, 25 bp, Homo sapien
gtcattgtccccatgaactctgatg

SEQ ID NO: 2001072 - DNA, 25 bp, Homo sapien
tcttctcacagaaagtcctatacag

SEQ ID NO: 2001073 - DNA, 25 bp, Homo sapien
cccagtggaggcaggtttcctagaa

SEQ ID NO: 2001074 - DNA, 25 bp, Homo sapien
caccttcggtactaacggcacatgg

SEQ ID NO: 2001075 - DNA, 25 bp, Homo sapien
caaaatgtcctggatggcacccgaa

SEQ ID NO: 2001076 - DNA, 25 bp, Homo sapien
tggacaccagtgagagcctgaggac

SEQ ID NO: 2001077 - DNA, 25 bp, Homo sapien
tgggagcctttagccaacccagtgg

SEQ ID NO: 2001078 - DNA, 25 bp, Homo sapien
cagaagcccgtaactcaaaggtgac

SEQ ID NO: 2001079 - DNA, 25 bp, Homo sapien
cctgggttgaatttctggacagccc

SEQ ID NO: 2001080 - DNA, 25 bp, Homo sapien
acagcacagtagatccacagaggcc

SEQ ID NO: 2001081 - DNA, 25 bp, Homo sapien
cactccaggacaaggcgaacatcgt

SEQ ID NO: 2001082 - DNA, 25 bp, Homo sapien
ccaggacaaggcgaacatcgtgggg

SEQ ID NO: 2001083 - DNA, 25 bp, Homo sapien
ccaggatgtagaaggaagcgtgtct

SEQ ID NO: 2001084 - DNA, 25 bp, Homo sapien
actccaggacaaggcgaacatcgtg

SEQ ID NO: 2001085 - DNA, 25 bp, Homo sapien
cgcacaaggggctgggactggcatc

SEQ ID NO: 2001086 - DNA, 25 bp, Homo sapien
gcacaaggggctgggactggcatca

SEQ ID NO: 2001087 - DNA, 25 bp, Homo sapien
cacaaggggctgggactggcatcac

SEQ ID NO: 2001088 - DNA, 25 bp, Homo sapien
aaaacttctcccaaggacctgcagc

SEQ ID NO: 2001089 - DNA, 25 bp, Homo sapien
tcccaaggacctgcagccttcctac

SEQ ID NO: 2001090 - DNA, 25 bp, Homo sapien
cttctcccaaggacctgcagccttc

SEQ ID NO: 2001091 - DNA, 25 bp, Homo sapien
tcaaaacttctcccaaggacctgca

SEQ ID NO: 2001092 - DNA, 25 bp, Homo sapien
tgctgagggatcacacggaagggac

SEQ ID NO: 2001093 - DNA, 25 bp, Homo sapien
tgtccgggacaagacacgcagcttg

SEQ ID NO: 2001094 - DNA, 25 bp, Homo sapien
tgggtgctgagggatcacacggaag

SEQ ID NO: 2001095 - DNA, 25 bp, Homo sapien
cagttaaactgtccgggacaagaca

SEQ ID NO: 2001096 - DNA, 25 bp, Homo sapien
gtgccagcccccaggtttgcattat

SEQ ID NO: 2001097 - DNA, 25 bp, Homo sapien
tgccagcccccaggtttgcattatt

SEQ ID NO: 2001098 - DNA, 25 bp, Homo sapien
tatcatccactatttcatctgagtg

SEQ ID NO: 2001099 - DNA, 25 bp, Homo sapien
atttcatctgagtgtctaaacaagc

SEQ ID NO: 2001100 - DNA, 25 bp, Homo sapien
cactatttcatctgagtgtctaaac

SEQ ID NO: 2001101 - DNA, 25 bp, Homo sapien
catccactatttcatctgagtgtct

SEQ ID NO: 2001102 - DNA, 25 bp, Homo sapien
tgcccaccaattcctgtgctctagg

SEQ ID NO: 2001103 - DNA, 25 bp, Homo sapien
ttcttgaaggcctcttggctgcagg

SEQ ID NO: 2001104 - DNA, 25 bp, Homo sapien
gccaagtttgtccttgccaacatct

SEQ ID NO: 2001105 - DNA, 25 bp, Homo sapien
agttatttcttgaaggcctcttggc

SEQ ID NO: 2001106 - DNA, 25 bp, Homo sapien
agggcccctttcttgatccagacat

SEQ ID NO: 2001107 - DNA, 25 bp, Homo sapien
tgtctttgcggaagtcactccatcc

SEQ ID NO: 2001108 - DNA, 25 bp, Homo sapien
atcctggctgcgcatctctttgctg

SEQ ID NO: 2001109 - DNA, 25 bp, Homo sapien
ggcttcgtacccctaatcctggctg

SEQ ID NO: 2001110 - DNA, 25 bp, Homo sapien
ggaccatggacttctggtgatgacg

SEQ ID NO: 2001111 - DNA, 25 bp, Homo sapien
ttgaggaccatggacttctggtgat

SEQ ID NO: 2001112 - DNA, 25 bp, Homo sapien
ggtgatgacgtcttttccatgggcc

SEQ ID NO: 2001113 - DNA, 25 bp, Homo sapien
gaggaccatggacttctggtgatga

SEQ ID NO: 2001114 - DNA, 25 bp, Homo sapien
catggtcaccggacctttgcccgaa

SEQ ID NO: 2001115 - DNA, 25 bp, Homo sapien
tcctgcagcaggtgccgggcatgag

SEQ ID NO: 2001116 - DNA, 25 bp, Homo sapien
gggcatgagcgccagaacagtgttt

SEQ ID NO: 2001117 - DNA, 25 bp, Homo sapien
ccgaaggtggaccatgcaagtgtga

SEQ ID NO: 2001118 - DNA, 25 bp, Homo sapien
catccatccaaatgagaaaagcgag

SEQ ID NO: 2001119 - DNA, 25 bp, Homo sapien
tcatccatccaaatgagaaaagcga

SEQ ID NO: 2001120 - DNA, 25 bp, Homo sapien
tccatccaaatgagaaaagcgaggc

SEQ ID NO: 2001121 - DNA, 25 bp, Homo sapien
catccaaatgagaaaagcgaggctt

SEQ ID NO: 2001122 - DNA, 25 bp, Homo sapien
acataataatcagtaggagtagcaa

SEQ ID NO: 2001123 - DNA, 25 bp, Homo sapien
cgatgataacgatgatgacaaccag

SEQ ID NO: 2001124 - DNA, 25 bp, Homo sapien
tgataacgatgatgacaaccagcat

SEQ ID NO: 2001125 - DNA, 25 bp, Homo sapien
tcagtaggagtagcaaggatgacaa

SEQ ID NO: 2001126 - DNA, 25 bp, Homo sapien
tatggcatcacggtctctatggcct

SEQ ID NO: 2001127 - DNA, 25 bp, Homo sapien
tctatggcctttattctgaatgccg

SEQ ID NO: 2001128 - DNA, 25 bp, Homo sapien
tttattctgaatgccgtctttcctc

SEQ ID NO: 2001129 - DNA, 25 bp, Homo sapien
tggcccgccaccaaccgctctatgg

SEQ ID NO: 2001130 - DNA, 25 bp, Homo sapien
tcagataaggaacccgaaacccgca

SEQ ID NO: 2001131 - DNA, 25 bp, Homo sapien
caagctccccaggtgctaattatca

SEQ ID NO: 2001132 - DNA, 25 bp, Homo sapien
agggcgggagaatagcccagcctca

SEQ ID NO: 2001133 - DNA, 25 bp, Homo sapien
gctaattatcagcacctcctgttca

SEQ ID NO: 2001134 - DNA, 25 bp, Homo sapien
aactgtagatattcactgagagctt

SEQ ID NO: 2001135 - DNA, 25 bp, Homo sapien
aggaaaactgtagatattcactgag

SEQ ID NO: 2001136 - DNA, 25 bp, Homo sapien
tgagagcttcctctggcaggccttc

SEQ ID NO: 2001137 - DNA, 25 bp, Homo sapien
ttcactgagagcttcctctggcagg

SEQ ID NO: 2001138 - DNA, 25 bp, Homo sapien
tgatgctacattgaacagggcactg

SEQ ID NO: 2001139 - DNA, 25 bp, Homo sapien
atgctacattgaacagggcactggg

SEQ ID NO: 2001140 - DNA, 25 bp, Homo sapien
gatgctacattgaacagggcactgg

SEQ ID NO: 2001141 - DNA, 25 bp, Homo sapien
gtctgccaccctcggggttctttga

SEQ ID NO: 2001142 - DNA, 25 bp, Homo sapien
tctccccactctttcgggatgtctt

SEQ ID NO: 2001143 - DNA, 25 bp, Homo sapien
tgacgggctcattctgagcctctcc

SEQ ID NO: 2001144 - DNA, 25 bp, Homo sapien
ttcgggatgtcttcaggtggatgcc

SEQ ID NO: 2001145 - DNA, 25 bp, Homo sapien
gcaggtgacgggctcattctgagcc

SEQ ID NO: 2001146 - DNA, 25 bp, Homo sapien
attaaaagtgcaagactgtcgagaa

SEQ ID NO: 2001147 - DNA, 25 bp, Homo sapien
agtgcaagactgtcgagaaccagac

SEQ ID NO: 2001148 - DNA, 25 bp, Homo sapien
caagactgtcgagaaccagacactc

SEQ ID NO: 2001149 - DNA, 25 bp, Homo sapien
taaaagtgcaagactgtcgagaacc

SEQ ID NO: 2001150 - DNA, 25 bp, Homo sapien
tcaccatcgagtccatagacgcagc

SEQ ID NO: 2001151 - DNA, 25 bp, Homo sapien
ccctgaagggatcaaatcctatctg

SEQ ID NO: 2001152 - DNA, 25 bp, Homo sapien
ggtctgggtcatgaaggttccttcc

SEQ ID NO: 2001153 - DNA, 25 bp, Homo sapien
ggtacaggcaggtcaccatcgagtc

SEQ ID NO: 2001154 - DNA, 25 bp, Homo sapien
tgagtgtccctgaatatgtctgacc

SEQ ID NO: 2001155 - DNA, 25 bp, Homo sapien
gcagacagcagtgtagtagtgtgta

SEQ ID NO: 2001156 - DNA, 25 bp, Homo sapien
cctgtctacactggagtcaatgcaa

SEQ ID NO: 2001157 - DNA, 25 bp, Homo sapien
caattaagcaagacacatcctgagt

SEQ ID NO: 2001158 - DNA, 25 bp, Homo sapien
tttgggatccttactgagaagcagc

SEQ ID NO: 2001159 - DNA, 25 bp, Homo sapien
ttaaaaagctgaagtggcacataca

SEQ ID NO: 2001160 - DNA, 25 bp, Homo sapien
taatggactagtggcaacaggcaag

SEQ ID NO: 2001161 - DNA, 25 bp, Homo sapien
aggcagatgacaagcggcctaccca

SEQ ID NO: 2001162 - DNA, 25 bp, Homo sapien
cacatggaaacaataactcctgatt

SEQ ID NO: 2001163 - DNA, 25 bp, Homo sapien
tgacaaccaccagtgtattttgttt

SEQ ID NO: 2001164 - DNA, 25 bp, Homo sapien
tttttagcgtacaattcactggtat

SEQ ID NO: 2001165 - DNA, 25 bp, Homo sapien
aataactcctgattctcccatcccc

SEQ ID NO: 2001166 - DNA, 25 bp, Homo sapien
gaaatcgtattcttgccaagtaacc

SEQ ID NO: 2001167 - DNA, 25 bp, Homo sapien
tcttgccaagtaaccaccacttctg

SEQ ID NO: 2001168 - DNA, 25 bp, Homo sapien
cattaaaagaaatcgtattcttgcc

SEQ ID NO: 2001169 - DNA, 25 bp, Homo sapien
cttctgccttagataatatgattat

SEQ ID NO: 2001170 - DNA, 25 bp, Homo sapien
gtaactcgttgaagcatcccagatg

SEQ ID NO: 2001171 - DNA, 25 bp, Homo sapien
cattccagatgtcccacagtatcag

SEQ ID NO: 2001172 - DNA, 25 bp, Homo sapien
gccagtgaaccaagaaagcgttgtt

SEQ ID NO: 2001173 - DNA, 25 bp, Homo sapien
tggtagattagcatagccagtgaac

SEQ ID NO: 2001174 - DNA, 25 bp, Homo sapien
caatgggacctgatcatataaggaa

SEQ ID NO: 2001175 - DNA, 25 bp, Homo sapien
taaggaaaatactgcgggctcatcc

SEQ ID NO: 2001176 - DNA, 25 bp, Homo sapien
catttcgctcgccacgttttcataa

SEQ ID NO: 2001177 - DNA, 25 bp, Homo sapien
gctgcaatggggacccgaaagcgcc

SEQ ID NO: 2001178 - DNA, 25 bp, Homo sapien
gcagtggtctcgtcatcatcggcca

SEQ ID NO: 2001179 - DNA, 25 bp, Homo sapien
actcagattgcgcagtggtctcgtc

SEQ ID NO: 2001180 - DNA, 25 bp, Homo sapien
gattgcgcagtggtctcgtcatcat

SEQ ID NO: 2001181 - DNA, 25 bp, Homo sapien
cagaactcagattgcgcagtggtct

SEQ ID NO: 2001182 - DNA, 25 bp, Homo sapien
tacgcactcaaaagaagccctcgct

SEQ ID NO: 2001183 - DNA, 25 bp, Homo sapien
gccctccgagccctggtatcgaggg

SEQ ID NO: 2001184 - DNA, 25 bp, Homo sapien
gggcattcgctgacgactcagagaa

SEQ ID NO: 2001185 - DNA, 25 bp, Homo sapien
cattgcaagagtgtcaccaaagtgt

SEQ ID NO: 2001186 - DNA, 25 bp, Homo sapien
tacaagaatacataactgcttaaac

SEQ ID NO: 2001187 - DNA, 25 bp, Homo sapien
acatgatgtaaacctgaaaaggact

SEQ ID NO: 2001188 - DNA, 25 bp, Homo sapien
aatggaagaatgtggtacacgcctg

SEQ ID NO: 2001189 - DNA, 25 bp, Homo sapien
caattttgtagcttacgtgaaggac

SEQ ID NO: 2001190 - DNA, 25 bp, Homo sapien
gcccaggaatgtcaagcgactatca

SEQ ID NO: 2001191 - DNA, 25 bp, Homo sapien
taatgcaaggcctagaaccgtacca

SEQ ID NO: 2001192 - DNA, 25 bp, Homo sapien
aaataatcattcgtctcaactggcg

SEQ ID NO: 2001193 - DNA, 25 bp, Homo sapien
aatactagaatctggtgatcagcag

SEQ ID NO: 2001194 - DNA, 25 bp, Homo sapien
caaatcctaccacccttttactgag

SEQ ID NO: 2001195 - DNA, 25 bp, Homo sapien
aagacttgtccctacttcctgacag

SEQ ID NO: 2001196 - DNA, 25 bp, Homo sapien
gagtgaacccgtacttccttggatc

SEQ ID NO: 2001197 - DNA, 25 bp, Homo sapien
gaaccctgaatagtactgataccca

SEQ ID NO: 2001198 - DNA, 25 bp, Homo sapien
gtgtgctcacaaacccacactcaga

SEQ ID NO: 2001199 - DNA, 25 bp, Homo sapien
tccattcacctcatgtacacagctt

SEQ ID NO: 2001200 - DNA, 25 bp, Homo sapien
tcagactgggatcacttagacacat

SEQ ID NO: 2001201 - DNA, 25 bp, Homo sapien
gagaaagttgcccacttattccatt

SEQ ID NO: 2001202 - DNA, 25 bp, Homo sapien
tgaataaagaggtgtgccaaatcta

SEQ ID NO: 2001203 - DNA, 25 bp, Homo sapien
gggtgaatccaacaccatggaagaa

SEQ ID NO: 2001204 - DNA, 25 bp, Homo sapien
gcagctacaggttgacaaagtttct

SEQ ID NO: 2001205 - DNA, 25 bp, Homo sapien
gcctctctgaaagagttcagatcat

SEQ ID NO: 2001206 - DNA, 25 bp, Homo sapien
aaagcaagcattcaattggaaaccc

SEQ ID NO: 2001207 - DNA, 25 bp, Homo sapien
cttagatgtttgctgctcttagaat

SEQ ID NO: 2001208 - DNA, 25 bp, Homo sapien
tgatagcagtatgctgttcccataa

SEQ ID NO: 2001209 - DNA, 25 bp, Homo sapien
taagatttatccatgaattggaagt

SEQ ID NO: 2001210 - DNA, 25 bp, Homo sapien
tcctcagtgtgctcaaacgcttttg

SEQ ID NO: 2001211 - DNA, 25 bp, Homo sapien
gctgctatcccaaactccaagtgag

SEQ ID NO: 2001212 - DNA, 25 bp, Homo sapien
gacagtggtgtaactgacctccaga

SEQ ID NO: 2001213 - DNA, 25 bp, Homo sapien
caaaattagaagtgccagtcctcag

SEQ ID NO: 2001214 - DNA, 25 bp, Homo sapien
aagtctgaagatgcatgtttccagc

SEQ ID NO: 2001215 - DNA, 25 bp, Homo sapien
cccaatgtgagcaagaaggaagtat

SEQ ID NO: 2001216 - DNA, 25 bp, Homo sapien
acatcccagcgtgtctcaatctgga

SEQ ID NO: 2001217 - DNA, 25 bp, Homo sapien
caactgctattagatgccaagcaca

SEQ ID NO: 2001218 - DNA, 25 bp, Homo sapien
gccctggctagaactatactgaata

SEQ ID NO: 2001219 - DNA, 25 bp, Homo sapien
aggtaaatcttgcttggtcatggtg

SEQ ID NO: 2001220 - DNA, 25 bp, Homo sapien
gatatgttgtctgcaagaggatcat

SEQ ID NO: 2001221 - DNA, 25 bp, Homo sapien
gaatgagttaaagtgtgccttcctc

SEQ ID NO: 2001222 - DNA, 25 bp, Homo sapien
agaactcagtagtgcacgcctctcc

SEQ ID NO: 2001223 - DNA, 25 bp, Homo sapien
accagagaactcagtagtgcacgcc

SEQ ID NO: 2001224 - DNA, 25 bp, Homo sapien
gcagaccagagaactcagtagtgca

SEQ ID NO: 2001225 - DNA, 25 bp, Homo sapien
ggcccagcagaccagagaactcagt

SEQ ID NO: 2001226 - DNA, 25 bp, Homo sapien
tttgacacagtacaacaggccttgc

SEQ ID NO: 2001227 - DNA, 25 bp, Homo sapien
agatactggtttccctaggcctgaa

SEQ ID NO: 2001228 - DNA, 25 bp, Homo sapien
gggcaggacctagaactccattaca

SEQ ID NO: 2001229 - DNA, 25 bp, Homo sapien
gcatgaccagatccgtgtagtccaa

SEQ ID NO: 2001230 - DNA, 25 bp, Homo sapien
atctctctcctaagaaccagcactt

SEQ ID NO: 2001231 - DNA, 25 bp, Homo sapien
gaaccagcacttcatttgatggcct

SEQ ID NO: 2001232 - DNA, 25 bp, Homo sapien
ttgacgccatctctctcctaagaac

SEQ ID NO: 2001233 - DNA, 25 bp, Homo sapien
ctttgcagttggcttgacgccatct

SEQ ID NO: 2001234 - DNA, 25 bp, Homo sapien
ctccctgggttagtaaaaggatatg

SEQ ID NO: 2001235 - DNA, 25 bp, Homo sapien
gccagaaccaattttgacagactct

SEQ ID NO: 2001236 - DNA, 25 bp, Homo sapien
tattccatcttttgtgccagaacca

SEQ ID NO: 2001237 - DNA, 25 bp, Homo sapien
gtaaaaggatatgcccttcctttca

SEQ ID NO: 2001238 - DNA, 25 bp, Homo sapien
tagcccaggcggttagacgagagcc

SEQ ID NO: 2001239 - DNA, 25 bp, Homo sapien
taactggcagttcagaaacagagcc

SEQ ID NO: 2001240 - DNA, 25 bp, Homo sapien
gaatgagctgcgtgaagtcatcagc

SEQ ID NO: 2001241 - DNA, 25 bp, Homo sapien
gagttaaagccatgatgcatctgac

SEQ ID NO: 2001242 - DNA, 25 bp, Homo sapien
cctacaggtggctcatgaggcctcg

SEQ ID NO: 2001243 - DNA, 25 bp, Homo sapien
taacccaagtaccaactggagctgc

SEQ ID NO: 2001244 - DNA, 25 bp, Homo sapien
ggtttgcaaggatactgcccacctg

SEQ ID NO: 2001245 - DNA, 25 bp, Homo sapien
gaccagcctggtagaaggtttgcaa

SEQ ID NO: 2001246 - DNA, 25 bp, Homo sapien
cctgactggcgcatttctgacggct

SEQ ID NO: 2001247 - DNA, 25 bp, Homo sapien
tgaataaggttttacggtctgccgc

SEQ ID NO: 2001248 - DNA, 25 bp, Homo sapien
aatattgtacagaggagcttcggac

SEQ ID NO: 2001249 - DNA, 25 bp, Homo sapien
tcacaggagaccttcggtagccaca

SEQ ID NO: 2001250 - DNA, 25 bp, Homo sapien
gaagacggtatcagccaagtatgcc

SEQ ID NO: 2001251 - DNA, 25 bp, Homo sapien
ggagagtggccagttgtctgcacca

SEQ ID NO: 2001252 - DNA, 25 bp, Homo sapien
gaatcagtccatcatagtcagtggg

SEQ ID NO: 2001253 - DNA, 25 bp, Homo sapien
tccctggacggtagcagagcctttc

SEQ ID NO: 2001254 - DNA, 25 bp, Homo sapien
gaacctctctggttgaggaatactg

SEQ ID NO: 2001255 - DNA, 25 bp, Homo sapien
acctctctggttgaggaatactgca

SEQ ID NO: 2001256 - DNA, 25 bp, Homo sapien
ctctctggttgaggaatactgcaga

SEQ ID NO: 2001257 - DNA, 25 bp, Homo sapien
gggaacctctctggttgaggaatac

SEQ ID NO: 2001258 - DNA, 25 bp, Homo sapien
tgggtctctcgttctgtgacctcct

SEQ ID NO: 2001259 - DNA, 25 bp, Homo sapien
ctgggtctctcgttctgtgacctcc

SEQ ID NO: 2001260 - DNA, 25 bp, Homo sapien
gaagcagtatggaaatgagtgtcca

SEQ ID NO: 2001261 - DNA, 25 bp, Homo sapien
gatttggatccccataagtgtgaag

SEQ ID NO: 2001262 - DNA, 25 bp, Homo sapien
tgagtgtccatcgtgaaaaagccaa

SEQ ID NO: 2001263 - DNA, 25 bp, Homo sapien
aggagggtctcttgcttgatttgga

SEQ ID NO: 2001264 - DNA, 25 bp, Homo sapien
caggtgttgtctcccgcaggagctg

SEQ ID NO: 2001265 - DNA, 25 bp, Homo sapien
ggagccagcatagaagccagtgttg

SEQ ID NO: 2001266 - DNA, 25 bp, Homo sapien
ggtatattgtagccatgctgaggag

SEQ ID NO: 2001267 - DNA, 25 bp, Homo sapien
gagcagacgttgtctgaaggtaggg

SEQ ID NO: 2001268 - DNA, 25 bp, Homo sapien
tagggtagagcattagtttccaggg

SEQ ID NO: 2001269 - DNA, 25 bp, Homo sapien
cctgcggctgcttcatgggcagtca

SEQ ID NO: 2001270 - DNA, 25 bp, Homo sapien
agtgggtcctttggcacctgcggct

SEQ ID NO: 2001271 - DNA, 25 bp, Homo sapien
cagtcagggtttgcctgtaggcccc

SEQ ID NO: 2001272 - DNA, 25 bp, Homo sapien
tcacagccagcctagtaaccagtag

SEQ ID NO: 2001273 - DNA, 25 bp, Homo sapien
gattgctagtttacaccttgcccct

SEQ ID NO: 2001274 - DNA, 25 bp, Homo sapien
caactaagtttggagcctgtaactc

SEQ ID NO: 2001275 - DNA, 25 bp, Homo sapien
taagtaagtagacaaactgacctgc

SEQ ID NO: 2001276 - DNA, 25 bp, Homo sapien
catgcaggccgtttctcacttgaat

SEQ ID NO: 2001277 - DNA, 25 bp, Homo sapien
agtgttcttccggtttctagccagg

SEQ ID NO: 2001278 - DNA, 25 bp, Homo sapien
tctgtgcactagttgaggtcttcct

SEQ ID NO: 2001279 - DNA, 25 bp, Homo sapien
gaatatccaaacagatgtgctcatg

SEQ ID NO: 2001280 - DNA, 25 bp, Homo sapien
tcagctctggtttggtttgctgatc

SEQ ID NO: 2001281 - DNA, 25 bp, Homo sapien
gctctggtttggtttgctgatccct

SEQ ID NO: 2001282 - DNA, 25 bp, Homo sapien
tggtttggtttgctgatccctagac

SEQ ID NO: 2001283 - DNA, 25 bp, Homo sapien
tctggtttggtttgctgatccctag

SEQ ID NO: 2001284 - DNA, 25 bp, Homo sapien
cccagttttcgatggagttgtctgt

SEQ ID NO: 2001285 - DNA, 25 bp, Homo sapien
tcccagttttcgatggagttgtctg

SEQ ID NO: 2001286 - DNA, 25 bp, Homo sapien
tcgctaatccgtgatgttgagcctt

SEQ ID NO: 2001287 - DNA, 25 bp, Homo sapien
atttgcatttcgctaatccgtgatg

SEQ ID NO: 2001288 - DNA, 25 bp, Homo sapien
tctagggactatactccagagccag

SEQ ID NO: 2001289 - DNA, 25 bp, Homo sapien
cagccttcaccctgcatcagaggta

SEQ ID NO: 2001290 - DNA, 25 bp, Homo sapien
tgtgagttccctcccagcaatctgt

SEQ ID NO: 2001291 - DNA, 25 bp, Homo sapien
aattgtggaaactctttgtctggca

SEQ ID NO: 2001292 - DNA, 25 bp, Homo sapien
cagcccacaagtgttgctgttctgg

SEQ ID NO: 2001293 - DNA, 25 bp, Homo sapien
cctctggagtcctcccggtggttga

SEQ ID NO: 2001294 - DNA, 25 bp, Homo sapien
ggtctccagagtgctccatcccaat

SEQ ID NO: 2001295 - DNA, 25 bp, Homo sapien
cggtggttgagtcctggtggtctcc

SEQ ID NO: 2001296 - DNA, 25 bp, Homo sapien
tctgtgaaacatgtagccggtctag

SEQ ID NO: 2001297 - DNA, 25 bp, Homo sapien
tctgcatagtttcctgttcttgggc

SEQ ID NO: 2001298 - DNA, 25 bp, Homo sapien
ggcctgtttctgctctgggtaccca

SEQ ID NO: 2001299 - DNA, 25 bp, Homo sapien
tccttatgaggcactgtggattgtc

SEQ ID NO: 2001300 - DNA, 25 bp, Homo sapien
tgctcagctggttaaggcgccatgg

SEQ ID NO: 2001301 - DNA, 25 bp, Homo sapien
tattgttgggtacggaggattccat

SEQ ID NO: 2001302 - DNA, 25 bp, Homo sapien
ggtcccatgcggccgtctttggagc

SEQ ID NO: 2001303 - DNA, 25 bp, Homo sapien
cctttgcctcttgatggggacgtct

SEQ ID NO: 2001304 - DNA, 25 bp, Homo sapien
gacggagtcagctgacacttaacat

SEQ ID NO: 2001305 - DNA, 25 bp, Homo sapien
ttccgtctggagcagcgtgtgtcga

SEQ ID NO: 2001306 - DNA, 25 bp, Homo sapien
cttaacatgcttgcccagctcagac

SEQ ID NO: 2001307 - DNA, 25 bp, Homo sapien
tgtcgaggctctgacggagtcagct

SEQ ID NO: 2001308 - DNA, 25 bp, Homo sapien
tgttttacgtgtagcaggcttccag

SEQ ID NO: 2001309 - DNA, 25 bp, Homo sapien
aaaaggatgccttctgtggacggca

SEQ ID NO: 2001310 - DNA, 25 bp, Homo sapien
tatgagggcaagtaccagcattgtc

SEQ ID NO: 2001311 - DNA, 25 bp, Homo sapien
gaatgactgcaaaagagtgacacct

SEQ ID NO: 2001312 - DNA, 25 bp, Homo sapien
gatcctctgcgggtttgtcaataaa

SEQ ID NO: 2001313 - DNA, 25 bp, Homo sapien
tgattttaattaggccctgggtgtg

SEQ ID NO: 2001314 - DNA, 25 bp, Homo sapien
gttttgtgaaggtgatcctctgcgg

SEQ ID NO: 2001315 - DNA, 25 bp, Homo sapien
ctgtgattttaattaggccctgggt

SEQ ID NO: 2001316 - DNA, 25 bp, Homo sapien
gagcctttgccaatgcccaggaaga

SEQ ID NO: 2001317 - DNA, 25 bp, Homo sapien
agttcaggtagggtggatattgctc

SEQ ID NO: 2001318 - DNA, 25 bp, Homo sapien
ggatattgctcgttctcattcttct

SEQ ID NO: 2001319 - DNA, 25 bp, Homo sapien
tgtctccttttgaaggagcctttgc

SEQ ID NO: 2001320 - DNA, 25 bp, Homo sapien
tcctgatttctgcatcagtacccac

SEQ ID NO: 2001321 - DNA, 25 bp, Homo sapien
tgaggatactgctttactaaagagc

SEQ ID NO: 2001322 - DNA, 25 bp, Homo sapien
cactaagtggcagggttaagatttg

SEQ ID NO: 2001323 - DNA, 25 bp, Homo sapien
taagatccgtactccttccatgcag

SEQ ID NO: 2001324 - DNA, 25 bp, Homo sapien
gctataattctccaagtgtaggagg

SEQ ID NO: 2001325 - DNA, 25 bp, Homo sapien
gaagacatcccctatataccttggt

SEQ ID NO: 2001326 - DNA, 25 bp, Homo sapien
tatgcctcggtgcacttgaatttgc

SEQ ID NO: 2001327 - DNA, 25 bp, Homo sapien
ttggtgcccacactacagagcaagg

SEQ ID NO: 2001328 - DNA, 25 bp, Homo sapien
tgtgatttcacatggtatgcctcgg

SEQ ID NO: 2001329 - DNA, 25 bp, Homo sapien
cagtaggctgtgcttttcacgaagg

SEQ ID NO: 2001330 - DNA, 25 bp, Homo sapien
caaactgctgtataatgtattggtc

SEQ ID NO: 2001331 - DNA, 25 bp, Homo sapien
tctttggctgaggaattgtggtcca

SEQ ID NO: 2001332 - DNA, 25 bp, Homo sapien
tgatgactcagcactcttgtttacg

SEQ ID NO: 2001333 - DNA, 25 bp, Homo sapien
tgtagttcttatgtggcaaagcttg

SEQ ID NO: 2001334 - DNA, 25 bp, Homo sapien
tgatgtcaagacctgtgggttgtct

SEQ ID NO: 2001335 - DNA, 25 bp, Homo sapien
gggataatggagtatgcttttcaaa

SEQ ID NO: 2001336 - DNA, 25 bp, Homo sapien
tgtctttaatatgtgattgggataa

SEQ ID NO: 2001337 - DNA, 25 bp, Homo sapien
gagtctccccaggataacgagttta

SEQ ID NO: 2001338 - DNA, 25 bp, Homo sapien
tgtctctcatggttgttagtcttca

SEQ ID NO: 2001339 - DNA, 25 bp, Homo sapien
ttgtctctcatggttgttagtcttc

SEQ ID NO: 2001340 - DNA, 25 bp, Homo sapien
gtctctcatggttgttagtcttcat

SEQ ID NO: 2001341 - DNA, 25 bp, Homo sapien
gcgtgttagcatgtggtcccatgga

SEQ ID NO: 2001342 - DNA, 25 bp, Homo sapien
ggatccagtgttgctacgttgttca

SEQ ID NO: 2001343 - DNA, 25 bp, Homo sapien
cgtgagtactgtccaacttgtgact

SEQ ID NO: 2001344 - DNA, 25 bp, Homo sapien
tgccatcacgtctgcgtgagtactg

SEQ ID NO: 2001345 - DNA, 25 bp, Homo sapien
cgctgggaagtgttgactgtggtac

SEQ ID NO: 2001346 - DNA, 25 bp, Homo sapien
catccgctgggaagtgttgactgtg

SEQ ID NO: 2001347 - DNA, 25 bp, Homo sapien
tccgctgggaagtgttgactgtggt

SEQ ID NO: 2001348 - DNA, 25 bp, Homo sapien
tcatccgctgggaagtgttgactgt

SEQ ID NO: 2001349 - DNA, 25 bp, Homo sapien
tcatcatgggacttgatcctcacat

SEQ ID NO: 2001350 - DNA, 25 bp, Homo sapien
tcatgggacttgatcctcacatctg

SEQ ID NO: 2001351 - DNA, 25 bp, Homo sapien
cttgctcatcatgggacttgatcct

SEQ ID NO: 2001352 - DNA, 25 bp, Homo sapien
gggacttgatcctcacatctgtatt

SEQ ID NO: 2001353 - DNA, 25 bp, Homo sapien
taacagcagtgtcgtcttatattgg

SEQ ID NO: 2001354 - DNA, 25 bp, Homo sapien
atgatgttctcccatttagttgtcc

SEQ ID NO: 2001355 - DNA, 25 bp, Homo sapien
tatattggtgtatactttgttttcc

SEQ ID NO: 2001356 - DNA, 25 bp, Homo sapien
tgatgttctcccatttagttgtcct

SEQ ID NO: 2001357 - DNA, 25 bp, Homo sapien
ccagtttagattggctccactatgc

SEQ ID NO: 2001358 - DNA, 25 bp, Homo sapien
tttagattggctccactatgcaccg

SEQ ID NO: 2001359 - DNA, 25 bp, Homo sapien
ttggctccactatgcaccgttgtcc

SEQ ID NO: 2001360 - DNA, 25 bp, Homo sapien
tctctggttccagtttagattggct

SEQ ID NO: 2001361 - DNA, 25 bp, Homo sapien
ataaccagtagaaagcccatctgtt

SEQ ID NO: 2001362 - DNA, 25 bp, Homo sapien
taaccagtagaaagcccatctgttt

SEQ ID NO: 2001363 - DNA, 25 bp, Homo sapien
gccttggtccacttttcctggctcc

SEQ ID NO: 2001364 - DNA, 25 bp, Homo sapien
taaaattgggtatttctgatctaaa

SEQ ID NO: 2001365 - DNA, 25 bp, Homo sapien
cttaaaattgggtatttctgatcta

SEQ ID NO: 2001366 - DNA, 25 bp, Homo sapien
ttctgatctaaaactaaccatcctt

SEQ ID NO: 2001367 - DNA, 25 bp, Homo sapien
caagatcagagaaggatcgagtcca

SEQ ID NO: 2001368 - DNA, 25 bp, Homo sapien
tccatgtgcagaaagaacggcaggt

SEQ ID NO: 2001369 - DNA, 25 bp, Homo sapien
gaaagaacggcaggtggtctgatcc

SEQ ID NO: 2001370 - DNA, 25 bp, Homo sapien
ggtggtctgatcctgcttgtgttct

SEQ ID NO: 2001371 - DNA, 25 bp, Homo sapien
ggagctgatgatggtctctgttgtc

SEQ ID NO: 2001372 - DNA, 25 bp, Homo sapien
agctgatgatggtctctgttgtcac

SEQ ID NO: 2001373 - DNA, 25 bp, Homo sapien
gagctgatgatggtctctgttgtca

SEQ ID NO: 2001374 - DNA, 25 bp, Homo sapien
gtggagctgatgatggtctctgttg

SEQ ID NO: 2001375 - DNA, 25 bp, Homo sapien
agaaattgttttctttgtagtgagg

SEQ ID NO: 2001376 - DNA, 25 bp, Homo sapien
ttgagaaattgttttctttgtagtg

SEQ ID NO: 2001377 - DNA, 25 bp, Homo sapien
gagaaattgttttctttgtagtgag

SEQ ID NO: 2001378 - DNA, 25 bp, Homo sapien
ctttgagaaattgttttctttgtag

SEQ ID NO: 2001379 - DNA, 25 bp, Homo sapien
cagcagcctcaaatacagcttccga

SEQ ID NO: 2001380 - DNA, 25 bp, Homo sapien
agcgatcagggatgggcgacggcct

SEQ ID NO: 2001381 - DNA, 25 bp, Homo sapien
ggccacctgtgcagcgatcagggat

SEQ ID NO: 2001382 - DNA, 25 bp, Homo sapien
ccgcagcagcctcaaatacagcttc

SEQ ID NO: 2001383 - DNA, 25 bp, Homo sapien
gcagggccgggatgagttcatgctc

SEQ ID NO: 2001384 - DNA, 25 bp, Homo sapien
tgcagagccttagcagcgtcgaagt

SEQ ID NO: 2001385 - DNA, 25 bp, Homo sapien
gccttagcagcgtcgaagtccagtc

SEQ ID NO: 2001386 - DNA, 25 bp, Homo sapien
tagcagcgtcgaagtccagtcgaga

SEQ ID NO: 2001387 - DNA, 25 bp, Homo sapien
cgtcgaagtccagtcgagaggccat

SEQ ID NO: 2001388 - DNA, 25 bp, Homo sapien
tacaggttgggtggactgtcgatgg

SEQ ID NO: 2001389 - DNA, 25 bp, Homo sapien
acaggttgggtggactgtcgatggc

SEQ ID NO: 2001390 - DNA, 25 bp, Homo sapien
ttacaggttgggtggactgtcgatg

SEQ ID NO: 2001391 - DNA, 25 bp, Homo sapien
gcttgaaagctgagtgggaccagca

SEQ ID NO: 2001392 - DNA, 25 bp, Homo sapien
caaatttagcaaggatcatggctga

SEQ ID NO: 2001393 - DNA, 25 bp, Homo sapien
aagattttggacagccttgtgcgag

SEQ ID NO: 2001394 - DNA, 25 bp, Homo sapien
ttgtgcgagcaagaatcaaggatgc

SEQ ID NO: 2001395 - DNA, 25 bp, Homo sapien
gatacggcccatgcaattttattaa

SEQ ID NO: 2001396 - DNA, 25 bp, Homo sapien
tcaagtattgagaacctggcctgtg

SEQ ID NO: 2001397 - DNA, 25 bp, Homo sapien
tacaaatggtgaatggatttccaac

SEQ ID NO: 2001398 - DNA, 25 bp, Homo sapien
aattgttgggaggacagcccttttg

SEQ ID NO: 2001399 - DNA, 25 bp, Homo sapien
tgtgaactgcaacaacgcctggtgc

SEQ ID NO: 2001400 - DNA, 25 bp, Homo sapien
gatctagcagatacatggcaacgtg

SEQ ID NO: 2001401 - DNA, 25 bp, Homo sapien
gagttccgggaaacatagcctcacc

SEQ ID NO: 2001402 - DNA, 25 bp, Homo sapien
tattatagggatctgaccgcatgcc

SEQ ID NO: 2001403 - DNA, 25 bp, Homo sapien
tagtagagcctagactcaaacccag

SEQ ID NO: 2001404 - DNA, 25 bp, Homo sapien
cactaacaggagttttcggtgacct

SEQ ID NO: 2001405 - DNA, 25 bp, Homo sapien
tttgtccaatgtcgaacagctggtg

SEQ ID NO: 2001406 - DNA, 25 bp, Homo sapien
tacttcctcagggagatagcaattg

SEQ ID NO: 2001407 - DNA, 25 bp, Homo sapien
tgctgaagagcacggcaagaagctg

SEQ ID NO: 2001408 - DNA, 25 bp, Homo sapien
gaacgccgattccatgagcttgagg

SEQ ID NO: 2001409 - DNA, 25 bp, Homo sapien
tcgccttcaggaaatggaacgccga

SEQ ID NO: 2001410 - DNA, 25 bp, Homo sapien
cattctacgtgccaagcagcaggct

SEQ ID NO: 2001411 - DNA, 25 bp, Homo sapien
tgatcctcccaaaagcgggtcagag

SEQ ID NO: 2001412 - DNA, 25 bp, Homo sapien
tcagaggttggacacactccaccag

SEQ ID NO: 2001413 - DNA, 25 bp, Homo sapien
cccgacgtggagacaaagggtctag

SEQ ID NO: 2001414 - DNA, 25 bp, Homo sapien
tccttggtaggatgcagggctctca

SEQ ID NO: 2001415 - DNA, 25 bp, Homo sapien
cctagaggtctttggtagatctgtg

SEQ ID NO: 2001416 - DNA, 25 bp, Homo sapien
tcctagaggtctttggtagatctgt

SEQ ID NO: 2001417 - DNA, 25 bp, Homo sapien
tgtcctagaggtctttggtagatct

SEQ ID NO: 2001418 - DNA, 25 bp, Homo sapien
gtcctagaggtctttggtagatctg

SEQ ID NO: 2001419 - DNA, 25 bp, Homo sapien
cctgctagaattcaggatctgggcc

SEQ ID NO: 2001420 - DNA, 25 bp, Homo sapien
tagtgggccaaggtataaggatcac

SEQ ID NO: 2001421 - DNA, 25 bp, Homo sapien
gaagggtgacgtcatggaactaaag

SEQ ID NO: 2001422 - DNA, 25 bp, Homo sapien
cagactggtgggcatgagctgtcct

SEQ ID NO: 2001423 - DNA, 25 bp, Homo sapien
aaagaggtttaatcacaaggcagcc

SEQ ID NO: 2001424 - DNA, 25 bp, Homo sapien
gaaagaggtttaatcacaaggcagc

SEQ ID NO: 2001425 - DNA, 25 bp, Homo sapien
aagaggtttaatcacaaggcagcca

SEQ ID NO: 2001426 - DNA, 25 bp, Homo sapien
tcaccggtgtttgtccatcttgcac

SEQ ID NO: 2001427 - DNA, 25 bp, Homo sapien
catcttgcactacttccaactggca

SEQ ID NO: 2001428 - DNA, 25 bp, Homo sapien
gcatatgatttgacctattatctcc

SEQ ID NO: 2001429 - DNA, 25 bp, Homo sapien
ctcagcataccacatcaccggtgtt

SEQ ID NO: 2001430 - DNA, 25 bp, Homo sapien
tacgttctgagattggatgagactg

SEQ ID NO: 2001431 - DNA, 25 bp, Homo sapien
gggcacactcaggttggtatgccat

SEQ ID NO: 2001432 - DNA, 25 bp, Homo sapien
gcacactcaggttggtatgccatag

SEQ ID NO: 2001433 - DNA, 25 bp, Homo sapien
tcctgcttacgttctgagattggat

SEQ ID NO: 2001434 - DNA, 25 bp, Homo sapien
ctttttgtgccccttgcctttgtca

SEQ ID NO: 2001435 - DNA, 25 bp, Homo sapien
tttgtgccccttgcctttgtcacac

SEQ ID NO: 2001436 - DNA, 25 bp, Homo sapien
ttgtgccccttgcctttgtcacacc

SEQ ID NO: 2001437 - DNA, 25 bp, Homo sapien
ttttgtgccccttgcctttgtcaca

SEQ ID NO: 2001438 - DNA, 25 bp, Homo sapien
gctgccatgacaaccaaacggttat

SEQ ID NO: 2001439 - DNA, 25 bp, Homo sapien
gaccagaagtgtccagccagctgtt

SEQ ID NO: 2001440 - DNA, 25 bp, Homo sapien
tttggcattgtgcagcaaaagctga

SEQ ID NO: 2001441 - DNA, 25 bp, Homo sapien
tgaaaggtcccactctcaatgttgt

SEQ ID NO: 2001442 - DNA, 25 bp, Homo sapien
caggatgggctacttgcatgagaca

SEQ ID NO: 2001443 - DNA, 25 bp, Homo sapien
gagtttttccgcagtgagatcgcct

SEQ ID NO: 2001444 - DNA, 25 bp, Homo sapien
atggcttcgggagcacccagtggct

SEQ ID NO: 2001445 - DNA, 25 bp, Homo sapien
caggttctagtctctttggttccca

SEQ ID NO: 2001446 - DNA, 25 bp, Homo sapien
tggaggcatcatacatcgtccccat

SEQ ID NO: 2001447 - DNA, 25 bp, Homo sapien
cagtctgcaccataaagcggatggg

SEQ ID NO: 2001448 - DNA, 25 bp, Homo sapien
cataaagcggatgggtttccctggt

SEQ ID NO: 2001449 - DNA, 25 bp, Homo sapien
acttcccagtctgcaccataaagcg

SEQ ID NO: 2001450 - DNA, 25 bp, Homo sapien
taacccggaggtgctctttccgcgc

SEQ ID NO: 2001451 - DNA, 25 bp, Homo sapien
gaggtgctctttccgcgctaaccag

SEQ ID NO: 2001452 - DNA, 25 bp, Homo sapien
tcagccgctgttcccggtttgcgtc

SEQ ID NO: 2001453 - DNA, 25 bp, Homo sapien
tccatgcttccgaagcgcaggctca

SEQ ID NO: 2001454 - DNA, 25 bp, Homo sapien
ggtgagacgggactctgtaagcaaa

SEQ ID NO: 2001455 - DNA, 25 bp, Homo sapien
cagtctccgttggaagcccaggatg

SEQ ID NO: 2001456 - DNA, 25 bp, Homo sapien
tgtaagcaaaattcaaaccgcccgc

SEQ ID NO: 2001457 - DNA, 25 bp, Homo sapien
tccgtccgggagcaaaaggctactc

SEQ ID NO: 2001458 - DNA, 25 bp, Homo sapien
aggcagggtccccaacacacagact

SEQ ID NO: 2001459 - DNA, 25 bp, Homo sapien
ccaaaggcagggtccccaacacaca

SEQ ID NO: 2001460 - DNA, 25 bp, Homo sapien
tcgggcgcttccaaaggcagggtcc

SEQ ID NO: 2001461 - DNA, 25 bp, Homo sapien
ctcgggcgcttccaaaggcagggtc

SEQ ID NO: 2001462 - DNA, 25 bp, Homo sapien
tttcattaacatgagagcataattg

SEQ ID NO: 2001463 - DNA, 25 bp, Homo sapien
atgataaggttttcttaatattgcc

SEQ ID NO: 2001464 - DNA, 25 bp, Homo sapien
taacatgagagcataattgttccag

SEQ ID NO: 2001465 - DNA, 25 bp, Homo sapien
gagcataattgttccagatctgacg

SEQ ID NO: 2001466 - DNA, 25 bp, Homo sapien
tcataattgaagcttcccatctgca

SEQ ID NO: 2001467 - DNA, 25 bp, Homo sapien
ttcataattgaagcttcccatctgc

SEQ ID NO: 2001468 - DNA, 25 bp, Homo sapien
cttcataattgaagcttcccatctg

SEQ ID NO: 2001469 - DNA, 25 bp, Homo sapien
cataattgaagcttcccatctgcat

SEQ ID NO: 2001470 - DNA, 25 bp, Homo sapien
tcttgatactgaatttccaattcca

SEQ ID NO: 2001471 - DNA, 25 bp, Homo sapien
ttagaagttcatttattacaatgat

SEQ ID NO: 2001472 - DNA, 25 bp, Homo sapien
tttagaagttcatttattacaatga

SEQ ID NO: 2001473 - DNA, 25 bp, Homo sapien
cttgaggcaaatgggaaggaacgtt

SEQ ID NO: 2001474 - DNA, 25 bp, Homo sapien
gctctgggttactgttacttgaggc

SEQ ID NO: 2001475 - DNA, 25 bp, Homo sapien
gtaatcttcttcaagagattcacag

SEQ ID NO: 2001476 - DNA, 25 bp, Homo sapien
cttcttcaagagattcacagagttc

SEQ ID NO: 2001477 - DNA, 25 bp, Homo sapien
tcaggatcaagatctgatcccttaa

SEQ ID NO: 2001478 - DNA, 25 bp, Homo sapien
aggatcaagatctgatcccttaaca

SEQ ID NO: 2001479 - DNA, 25 bp, Homo sapien
caggatcaagatctgatcccttaac

SEQ ID NO: 2001480 - DNA, 25 bp, Homo sapien
tgaactcatcacaagttataaatgg

SEQ ID NO: 2001481 - DNA, 25 bp, Homo sapien
gaaggaacaccattgaactcatcac

SEQ ID NO: 2001482 - DNA, 25 bp, Homo sapien
gaactcatcacaagttataaatggc

SEQ ID NO: 2001483 - DNA, 25 bp, Homo sapien
ttgaactcatcacaagttataaatg

SEQ ID NO: 2001484 - DNA, 25 bp, Homo sapien
gattataggttaagcgggatttcat

SEQ ID NO: 2001485 - DNA, 25 bp, Homo sapien
tggtatccttcgtttcttcatcaat

SEQ ID NO: 2001486 - DNA, 25 bp, Homo sapien
actaattactgccttgttgatttct

SEQ ID NO: 2001487 - DNA, 25 bp, Homo sapien
cacagaattcatagacttttttggc

SEQ ID NO: 2001488 - DNA, 25 bp, Homo sapien
agtaacacgtgaaacttcttgtcag

SEQ ID NO: 2001489 - DNA, 25 bp, Homo sapien
gcctccggcagtgtcgtaaaatatt

SEQ ID NO: 2001490 - DNA, 25 bp, Homo sapien
aagttgtgaactcctttatgtcagc

SEQ ID NO: 2001491 - DNA, 25 bp, Homo sapien
cggcagtgtcgtaaaatattcagta

SEQ ID NO: 2001492 - DNA, 25 bp, Homo sapien
cataacgagtaagtcctccccctcg

SEQ ID NO: 2001493 - DNA, 25 bp, Homo sapien
gttataacataacgagtaagtcctc

SEQ ID NO: 2001494 - DNA, 25 bp, Homo sapien
caggttataacataacgagtaagtc

SEQ ID NO: 2001495 - DNA, 25 bp, Homo sapien
tcaggttataacataacgagtaagt

SEQ ID NO: 2001496 - DNA, 25 bp, Homo sapien
tataccctgttggtatgttcaaaag

SEQ ID NO: 2001497 - DNA, 25 bp, Homo sapien
taagaaacaagaataggtcaggtgt

SEQ ID NO: 2001498 - DNA, 25 bp, Homo sapien
gcctctatactctataccctgttgg

SEQ ID NO: 2001499 - DNA, 25 bp, Homo sapien
aattatagaaatagcctctatactc

SEQ ID NO: 2001500 - DNA, 25 bp, Homo sapien
tgaaaatatataagttggccgggcg

SEQ ID NO: 2001501 - DNA, 25 bp, Homo sapien
gcagcattgttcactcaacacaaaa

SEQ ID NO: 2001502 - DNA, 25 bp, Homo sapien
cattatgtgcctagtacagaggcgt

SEQ ID NO: 2001503 - DNA, 25 bp, Homo sapien
aggcgcatgccgatctgtacccaat

SEQ ID NO: 2001504 - DNA, 25 bp, Homo sapien
tcaggtaagctgctccctaaggacc

SEQ ID NO: 2001505 - DNA, 25 bp, Homo sapien
gggtatcctaacctcatcagcttga

SEQ ID NO: 2001506 - DNA, 25 bp, Homo sapien
gccatcgatggaatttagacactag

SEQ ID NO: 2001507 - DNA, 25 bp, Homo sapien
ttacctatagactgaaatgccatcg

SEQ ID NO: 2001508 - DNA, 25 bp, Homo sapien
ggtgcccatcaagagtgacctcatt

SEQ ID NO: 2001509 - DNA, 25 bp, Homo sapien
tcttgttgacataggcctgatggat

SEQ ID NO: 2001510 - DNA, 25 bp, Homo sapien
cttcataaagctggagtgcgtcacc

SEQ ID NO: 2001511 - DNA, 25 bp, Homo sapien
gattattgacacaaatctccagccc

SEQ ID NO: 2001512 - DNA, 25 bp, Homo sapien
ggacccttgcccaacaggcagtctt

SEQ ID NO: 2001513 - DNA, 25 bp, Homo sapien
tggcagtatgtttaaaccagtccac

SEQ ID NO: 2001514 - DNA, 25 bp, Homo sapien
gaggaggttggcagtatgtttaaac

SEQ ID NO: 2001515 - DNA, 25 bp, Homo sapien
gggacccttgcccaacaggcagtct

SEQ ID NO: 2001516 - DNA, 25 bp, Homo sapien
ttggcacttgaacagctgctattct

SEQ ID NO: 2001517 - DNA, 25 bp, Homo sapien
tgatgtttttatggttggcacttga

SEQ ID NO: 2001518 - DNA, 25 bp, Homo sapien
ctgtttgcaccccagcaatatatgg

SEQ ID NO: 2001519 - DNA, 25 bp, Homo sapien
cagcaatatatggaggtagtagggt

SEQ ID NO: 2001520 - DNA, 25 bp, Homo sapien
gacttgcagcctaaatctaacccac

SEQ ID NO: 2001521 - DNA, 25 bp, Homo sapien
tttgtccagcacatatgagcaagtg

SEQ ID NO: 2001522 - DNA, 25 bp, Homo sapien
cagcttggtgatatgtaaccttagc

SEQ ID NO: 2001523 - DNA, 25 bp, Homo sapien
ggacttccttatgctggctgggact

SEQ ID NO: 2001524 - DNA, 25 bp, Homo sapien
tgttcgatgaccttaaggaagtagt

SEQ ID NO: 2001525 - DNA, 25 bp, Homo sapien
atccaaatgttcgatgaccttaagg

SEQ ID NO: 2001526 - DNA, 25 bp, Homo sapien
aatgttcgatgaccttaaggaagta

SEQ ID NO: 2001527 - DNA, 25 bp, Homo sapien
gataatcatccaaatgttcgatgac

SEQ ID NO: 2001528 - DNA, 25 bp, Homo sapien
acattgttcactcccacaatgaagc

SEQ ID NO: 2001529 - DNA, 25 bp, Homo sapien
agatgtccttggatagcctcatgca

SEQ ID NO: 2001530 - DNA, 25 bp, Homo sapien
gatgtccttggatagcctcatgcat

SEQ ID NO: 2001531 - DNA, 25 bp, Homo sapien
ccagatgtccttggatagcctcatg

SEQ ID NO: 2001532 - DNA, 25 bp, Homo sapien
tccagatgtccttggatagcctcat

SEQ ID NO: 2001533 - DNA, 25 bp, Homo sapien
aggtgagcatagtgacttcacatgg

SEQ ID NO: 2001534 - DNA, 25 bp, Homo sapien
gttccaggtgagcatagtgacttca

SEQ ID NO: 2001535 - DNA, 25 bp, Homo sapien
tccaggtgagcatagtgacttcaca

SEQ ID NO: 2001536 - DNA, 25 bp, Homo sapien
ccaggtgagcatagtgacttcacat

SEQ ID NO: 2001537 - DNA, 25 bp, Homo sapien
cggctggatgatcagctcaaaggag

SEQ ID NO: 2001538 - DNA, 25 bp, Homo sapien
taatcagtggcacctcactcaggat

SEQ ID NO: 2001539 - DNA, 25 bp, Homo sapien
tcagtggcacctcactcaggatttc

SEQ ID NO: 2001540 - DNA, 25 bp, Homo sapien
atgctgcagttgtcaaacaccggct

SEQ ID NO: 2001541 - DNA, 25 bp, Homo sapien
ggaagcaaggatgcagtttcctctg

SEQ ID NO: 2001542 - DNA, 25 bp, Homo sapien
ctccaggaagcaaggatgcagtttc

SEQ ID NO: 2001543 - DNA, 25 bp, Homo sapien
cagtttcctctgccatgtcaagcac

SEQ ID NO: 2001544 - DNA, 25 bp, Homo sapien
caggaagcaaggatgcagtttcctc

SEQ ID NO: 2001545 - DNA, 25 bp, Homo sapien
gatgataggatagggaactgatgca

SEQ ID NO: 2001546 - DNA, 25 bp, Homo sapien
ttgtacctgctgatgataggatagg

SEQ ID NO: 2001547 - DNA, 25 bp, Homo sapien
catttgtacctgctgatgataggat

SEQ ID NO: 2001548 - DNA, 25 bp, Homo sapien
taggatagggaactgatgcaacagt

SEQ ID NO: 2001549 - DNA, 25 bp, Homo sapien
gcagagacagtgctatatcaacagg

SEQ ID NO: 2001550 - DNA, 25 bp, Homo sapien
tgcagagacagtgctatatcaacag

SEQ ID NO: 2001551 - DNA, 25 bp, Homo sapien
ctatatcaacaggccaagcagcagc

SEQ ID NO: 2001552 - DNA, 25 bp, Homo sapien
gctatatcaacaggccaagcagcag

SEQ ID NO: 2001553 - DNA, 25 bp, Homo sapien
ttcatgtgacagactagtgtgtcca

SEQ ID NO: 2001554 - DNA, 25 bp, Homo sapien
tgcaagcatcaggttcagccagatg

SEQ ID NO: 2001555 - DNA, 25 bp, Homo sapien
tggcttcagggaaggtgcaagcatc

SEQ ID NO: 2001556 - DNA, 25 bp, Homo sapien
ttcttccatgggagcgcactcatca

SEQ ID NO: 2001557 - DNA, 25 bp, Homo sapien
gattccaacttcacagatcaagagc

SEQ ID NO: 2001558 - DNA, 25 bp, Homo sapien
ttccaacttcacagatcaagagcat

SEQ ID NO: 2001559 - DNA, 25 bp, Homo sapien
attccaacttcacagatcaagagca

SEQ ID NO: 2001560 - DNA, 25 bp, Homo sapien
tgtctccacagggattctctattct

SEQ ID NO: 2001561 - DNA, 25 bp, Homo sapien
cagtctcatatatggccccaggcat

SEQ ID NO: 2001562 - DNA, 25 bp, Homo sapien
tgagcatccctaaggtggtcagtct

SEQ ID NO: 2001563 - DNA, 25 bp, Homo sapien
ccaggcatggcctgttaatggtatt

SEQ ID NO: 2001564 - DNA, 25 bp, Homo sapien
gtgcagagtttgttcataggagaga

SEQ ID NO: 2001565 - DNA, 25 bp, Homo sapien
gcagagtttgttcataggagagaaa

SEQ ID NO: 2001566 - DNA, 25 bp, Homo sapien
agcctcagggtagtaaccgctaaag

SEQ ID NO: 2001567 - DNA, 25 bp, Homo sapien
ccatcaaaagcctcagggtagtaac

SEQ ID NO: 2001568 - DNA, 25 bp, Homo sapien
cttgcttcctttgtgcgtttctccc

SEQ ID NO: 2001569 - DNA, 25 bp, Homo sapien
tgtcatatcctggatcaccaacagg

SEQ ID NO: 2001570 - DNA, 25 bp, Homo sapien
acatggctggggtgaattgctacgc

SEQ ID NO: 2001571 - DNA, 25 bp, Homo sapien
ttttcccggtcagcacacatggctg

SEQ ID NO: 2001572 - DNA, 25 bp, Homo sapien
ggtgaattgctacgcagtcccatct

SEQ ID NO: 2001573 - DNA, 25 bp, Homo sapien
ccccattcattatgtctgtattcag

SEQ ID NO: 2001574 - DNA, 25 bp, Homo sapien
tgtctgtattcagtggatctaccca

SEQ ID NO: 2001575 - DNA, 25 bp, Homo sapien
cccattcattatgtctgtattcagt

SEQ ID NO: 2001576 - DNA, 25 bp, Homo sapien
gtctgtattcagtggatctacccat

SEQ ID NO: 2001577 - DNA, 25 bp, Homo sapien
cacttgacagcttgatattcagctc

SEQ ID NO: 2001578 - DNA, 25 bp, Homo sapien
taaattgtgtgaacatttagggtag

SEQ ID NO: 2001579 - DNA, 25 bp, Homo sapien
aattgtgtgaacatttagggtaggg

SEQ ID NO: 2001580 - DNA, 25 bp, Homo sapien
tgccccacttgacagcttgatattc

SEQ ID NO: 2001581 - DNA, 25 bp, Homo sapien
ggccatcaaggctcatgaccagtga

SEQ ID NO: 2001582 - DNA, 25 bp, Homo sapien
gaaccttctgtatgtcccagggtga

SEQ ID NO: 2001583 - DNA, 25 bp, Homo sapien
gcacacacgggctgcgtcatgacat

SEQ ID NO: 2001584 - DNA, 25 bp, Homo sapien
tctggcaaaccgtgagaagctgtat

SEQ ID NO: 2001585 - DNA, 25 bp, Homo sapien
catctgctgcccctgaagtgtgaga

SEQ ID NO: 2001586 - DNA, 25 bp, Homo sapien
attcatgctgcgcacttctaacctc

SEQ ID NO: 2001587 - DNA, 25 bp, Homo sapien
tgaagtgtgagatgctaccaagacc

SEQ ID NO: 2001588 - DNA, 25 bp, Homo sapien
ctcttattcatgctgcgcacttcta

SEQ ID NO: 2001589 - DNA, 25 bp, Homo sapien
agaaggcgggaagcggggatctgcc

SEQ ID NO: 2001590 - DNA, 25 bp, Homo sapien
cacacgcggtagagctccagtcact

SEQ ID NO: 2001591 - DNA, 25 bp, Homo sapien
ttcccggggcacacgcggtagagct

SEQ ID NO: 2001592 - DNA, 25 bp, Homo sapien
aagcccttcctcacgcccgccgtgg

SEQ ID NO: 2001593 - DNA, 25 bp, Homo sapien
gagcccgagagcgtggcggcccggg

SEQ ID NO: 2001594 - DNA, 25 bp, Homo sapien
gcagagcccgagagcgtggcggccc

SEQ ID NO: 2001595 - DNA, 25 bp, Homo sapien
gcccgagagcgtggcggcccgggcg

SEQ ID NO: 2001596 - DNA, 25 bp, Homo sapien
cagagcccgagagcgtggcggcccg

SEQ ID NO: 2001597 - DNA, 25 bp, Homo sapien
gaggataatcgggactgcgatccga

SEQ ID NO: 2001598 - DNA, 25 bp, Homo sapien
cagtgtaggcgcctctgtcgggtgg

SEQ ID NO: 2001599 - DNA, 25 bp, Homo sapien
ccttcaacgagaaagggagaggctg

SEQ ID NO: 2001600 - DNA, 25 bp, Homo sapien
ggagaggacgctgtattaacccttc

SEQ ID NO: 2001601 - DNA, 25 bp, Homo sapien
tacgattccgtagagtagctggcag

SEQ ID NO: 2001602 - DNA, 25 bp, Homo sapien
gacccagctgggatgtcaaacccga

SEQ ID NO: 2001603 - DNA, 25 bp, Homo sapien
gattagcgatcggaatccattcccc

SEQ ID NO: 2001604 - DNA, 25 bp, Homo sapien
tttcctgatagagagcaacccggga

SEQ ID NO: 2001605 - DNA, 25 bp, Homo sapien
tgtgatagtttcagtactgcctgtg

SEQ ID NO: 2001606 - DNA, 25 bp, Homo sapien
tacacagcaaaatacgaatgggatt

SEQ ID NO: 2001607 - DNA, 25 bp, Homo sapien
aaaatagtctcattccaccaattga

SEQ ID NO: 2001608 - DNA, 25 bp, Homo sapien
tatcacaggatcaccggtaggattt

SEQ ID NO: 2001609 - DNA, 25 bp, Homo sapien
caataaagacacctttactttgtca

SEQ ID NO: 2001610 - DNA, 25 bp, Homo sapien
taaaatggccactatacctatgaga

SEQ ID NO: 2001611 - DNA, 25 bp, Homo sapien
tgtttagctgtgttggtaagcaaaa

SEQ ID NO: 2001612 - DNA, 25 bp, Homo sapien
cctatgagatcagaggttattgttt

SEQ ID NO: 2001613 - DNA, 25 bp, Homo sapien
tctcttgtgtctcctgcacgtgcat

SEQ ID NO: 2001614 - DNA, 25 bp, Homo sapien
tatcacttcccatggggactcctgt

SEQ ID NO: 2001615 - DNA, 25 bp, Homo sapien
gggactcctgtgacagtctcttgtg

SEQ ID NO: 2001616 - DNA, 25 bp, Homo sapien
ctgcggccttatcacttcccatggg

SEQ ID NO: 2001617 - DNA, 25 bp, Homo sapien
cctactcaggcttctgatgaaaccc

SEQ ID NO: 2001618 - DNA, 25 bp, Homo sapien
cgtttgccaacactggtcttcaatc

SEQ ID NO: 2001619 - DNA, 25 bp, Homo sapien
ctactcaggcttctgatgaaacccc

SEQ ID NO: 2001620 - DNA, 25 bp, Homo sapien
ctggtcttcaatccctttggtgtga

SEQ ID NO: 2001621 - DNA, 25 bp, Homo sapien
tctctgatttgattcctccaccata

SEQ ID NO: 2001622 - DNA, 25 bp, Homo sapien
gggaaattaggatttgcactctctg

SEQ ID NO: 2001623 - DNA, 25 bp, Homo sapien
gtacacgaagtggatgggaaattag

SEQ ID NO: 2001624 - DNA, 25 bp, Homo sapien
cagaacatcccataggtctgtgtga

SEQ ID NO: 2001625 - DNA, 25 bp, Homo sapien
gagacaaagctggaagtcgccgact

SEQ ID NO: 2001626 - DNA, 25 bp, Homo sapien
tctactcggcagaattgaaggcatc

SEQ ID NO: 2001627 - DNA, 25 bp, Homo sapien
taattggctttgcaccccttagagt

SEQ ID NO: 2001628 - DNA, 25 bp, Homo sapien
taaatgacttagatactcctcagga

SEQ ID NO: 2001629 - DNA, 25 bp, Homo sapien
aaacctgaatggttgcaaatccctg

SEQ ID NO: 2001630 - DNA, 25 bp, Homo sapien
tcaaatcgtgaacaatactaaagtt

SEQ ID NO: 2001631 - DNA, 25 bp, Homo sapien
tttcccaatcaaagtgaactagtga

SEQ ID NO: 2001632 - DNA, 25 bp, Homo sapien
caccaaggaagtctttgactgcaag

SEQ ID NO: 2001633 - DNA, 25 bp, Homo sapien
ggcagttggcctagagcacagtact

SEQ ID NO: 2001634 - DNA, 25 bp, Homo sapien
gggagtgtggcctagacaatcgttc

SEQ ID NO: 2001635 - DNA, 25 bp, Homo sapien
gacaatcgttctaaccaatcactga

SEQ ID NO: 2001636 - DNA, 25 bp, Homo sapien
gcagggtccttgagaccctcaggca

SEQ ID NO: 2001637 - DNA, 25 bp, Homo sapien
aacctccagattagtggagggtgat

SEQ ID NO: 2001638 - DNA, 25 bp, Homo sapien
cagattagtggagggtgatgcagcc

SEQ ID NO: 2001639 - DNA, 25 bp, Homo sapien
ctccagattagtggagggtgatgca

SEQ ID NO: 2001640 - DNA, 25 bp, Homo sapien
cctccagattagtggagggtgatgc

SEQ ID NO: 2001641 - DNA, 25 bp, Homo sapien
ctgctgaccggccacatctgcttgc

SEQ ID NO: 2001642 - DNA, 25 bp, Homo sapien
tgctgaccggccacatctgcttgcc

SEQ ID NO: 2001643 - DNA, 25 bp, Homo sapien
tgaccggccacatctgcttgccagg

SEQ ID NO: 2001644 - DNA, 25 bp, Homo sapien
ctgaccggccacatctgcttgccag

SEQ ID NO: 2001645 - DNA, 25 bp, Homo sapien
gcctgggccagtggtcatggcccat

SEQ ID NO: 2001646 - DNA, 25 bp, Homo sapien
tgagaacagaaatgacaggggagag

SEQ ID NO: 2001647 - DNA, 25 bp, Homo sapien
gaacagaaatgacaggggagaggcc

SEQ ID NO: 2001648 - DNA, 25 bp, Homo sapien
gaggcctgggccagtggtcatggcc

SEQ ID NO: 2001649 - DNA, 25 bp, Homo sapien
ggctgatgactcctcaccctggtca

SEQ ID NO: 2001650 - DNA, 25 bp, Homo sapien
tggctgatgactcctcaccctggtc

SEQ ID NO: 2001651 - DNA, 25 bp, Homo sapien
tagtggcttataggtccctaatgca

SEQ ID NO: 2001652 - DNA, 25 bp, Homo sapien
cttagtggcttataggtccctaatg

SEQ ID NO: 2001653 - DNA, 25 bp, Homo sapien
tataggtccctaatgcagccacttt

SEQ ID NO: 2001654 - DNA, 25 bp, Homo sapien
gcttataggtccctaatgcagccac

SEQ ID NO: 2001655 - DNA, 25 bp, Homo sapien
ggacaaacacgctggccataggagc

SEQ ID NO: 2001656 - DNA, 25 bp, Homo sapien
gagatcggcaaactgcccagttaga

SEQ ID NO: 2001657 - DNA, 25 bp, Homo sapien
gcccagttagaagtgaccctggaaa

SEQ ID NO: 2001658 - DNA, 25 bp, Homo sapien
ggcctgaactgaatatctaaggaga

SEQ ID NO: 2001659 - DNA, 25 bp, Homo sapien
ccagagtctgccctcatgactcttc

SEQ ID NO: 2001660 - DNA, 25 bp, Homo sapien
tgagttcgtgatctcttatctttcc

SEQ ID NO: 2001661 - DNA, 25 bp, Homo sapien
cttcccctttgagttcgtgatctct

SEQ ID NO: 2001662 - DNA, 25 bp, Homo sapien
aaagcatgtggaccaagccagagtc

SEQ ID NO: 2001663 - DNA, 25 bp, Homo sapien
aatgttcccactgtcagagagatgg

SEQ ID NO: 2001664 - DNA, 25 bp, Homo sapien
gggaacaatgttcccactgtcagag

SEQ ID NO: 2001665 - DNA, 25 bp, Homo sapien
ctgaggccagggaacaatgttccca

SEQ ID NO: 2001666 - DNA, 25 bp, Homo sapien
gttcccactgtcagagagatgggca

SEQ ID NO: 2001667 - DNA, 25 bp, Homo sapien
tcttgctgacgtgggcaggtgactc

SEQ ID NO: 2001668 - DNA, 25 bp, Homo sapien
gcaagcaccagagtacttctcagtt

SEQ ID NO: 2001669 - DNA, 25 bp, Homo sapien
ccctgaagatcaaacgctacgtcat

SEQ ID NO: 2001670 - DNA, 25 bp, Homo sapien
gatcatctcaaagaatccagcaagc

SEQ ID NO: 2001671 - DNA, 25 bp, Homo sapien
catcttggagggcttgagtgtttac

SEQ ID NO: 2001672 - DNA, 25 bp, Homo sapien
ttctatagaaggcagttacccgggc

SEQ ID NO: 2001673 - DNA, 25 bp, Homo sapien
tacccgggccaggtacctgcatctt

SEQ ID NO: 2001674 - DNA, 25 bp, Homo sapien
gactttaaccaatctaggtcgtaga

SEQ ID NO: 2001675 - DNA, 25 bp, Homo sapien
gggtcctcttgcgtcccattttgct

SEQ ID NO: 2001676 - DNA, 25 bp, Homo sapien
tttgctcttctcctataacacttcc

SEQ ID NO: 2001677 - DNA, 25 bp, Homo sapien
ttccacttccagctcgatggtcatt

SEQ ID NO: 2001678 - DNA, 25 bp, Homo sapien
acttccagctcgatggtcattatgg

SEQ ID NO: 2001679 - DNA, 25 bp, Homo sapien
tcctggagcaagtgccagtcatcaa

SEQ ID NO: 2001680 - DNA, 25 bp, Homo sapien
ccaggtaccccagagagtgaattag

SEQ ID NO: 2001681 - DNA, 25 bp, Homo sapien
gctgagggacaagataggctctctt

SEQ ID NO: 2001682 - DNA, 25 bp, Homo sapien
tttccagatagtcctcatcttccag

SEQ ID NO: 2001683 - DNA, 25 bp, Homo sapien
tcttcacacttctaattacttcatg

SEQ ID NO: 2001684 - DNA, 25 bp, Homo sapien
tggatttggaaacagcgaacccgat

SEQ ID NO: 2001685 - DNA, 25 bp, Homo sapien
tggaaacagcgaacccgatagaatt

SEQ ID NO: 2001686 - DNA, 25 bp, Homo sapien
cgaacccgatagaattcttcacact

SEQ ID NO: 2001687 - DNA, 25 bp, Homo sapien
tgcccagaatggctacggaaggttg

SEQ ID NO: 2001688 - DNA, 25 bp, Homo sapien
cccagaatggctacggaaggttggt

SEQ ID NO: 2001689 - DNA, 25 bp, Homo sapien
gcccagaatggctacggaaggttgg

SEQ ID NO: 2001690 - DNA, 25 bp, Homo sapien
ctatatcctgggtactcctggatgc

SEQ ID NO: 2001691 - DNA, 25 bp, Homo sapien
ggccagctgacagaaaatcctatag

SEQ ID NO: 2001692 - DNA, 25 bp, Homo sapien
taaaatcaaaccgacacacggcagc

SEQ ID NO: 2001693 - DNA, 25 bp, Homo sapien
gaccacagataaaatcaaaccgaca

SEQ ID NO: 2001694 - DNA, 25 bp, Homo sapien
tatagtctcgcaattctccagaagt

SEQ ID NO: 2001695 - DNA, 25 bp, Homo sapien
catgacattcccaggttgtgcccat

SEQ ID NO: 2001696 - DNA, 25 bp, Homo sapien
cagggcgccccctcttgacttagga

SEQ ID NO: 2001697 - DNA, 25 bp, Homo sapien
cattttgagcctggggtaccagggc

SEQ ID NO: 2001698 - DNA, 25 bp, Homo sapien
tctgcctggtcacctacatgacatt

SEQ ID NO: 2001699 - DNA, 25 bp, Homo sapien
gggacaagagccgattaagatctgt

SEQ ID NO: 2001700 - DNA, 25 bp, Homo sapien
tttggcatgacctcaaggtgacaga

SEQ ID NO: 2001701 - DNA, 25 bp, Homo sapien
aatagccatgctgttgatatggccc

SEQ ID NO: 2001702 - DNA, 25 bp, Homo sapien
taagatctgtgtataagtccaagtt

SEQ ID NO: 2001703 - DNA, 25 bp, Homo sapien
taaatgttaggcatcactttggcta

SEQ ID NO: 2001704 - DNA, 25 bp, Homo sapien
tatggaatgaaaatctacatcctgg

SEQ ID NO: 2001705 - DNA, 25 bp, Homo sapien
tgttaagctttatctctatggaatg

SEQ ID NO: 2001706 - DNA, 25 bp, Homo sapien
cagccattttctactaagataccag

SEQ ID NO: 2001707 - DNA, 25 bp, Homo sapien
ggtggccacgggcatagcaccagct

SEQ ID NO: 2001708 - DNA, 25 bp, Homo sapien
cagggagaacaaagccttcccatgc

SEQ ID NO: 2001709 - DNA, 25 bp, Homo sapien
tcagcgatactaaaatagcacggag

SEQ ID NO: 2001710 - DNA, 25 bp, Homo sapien
tagcacggagagaaattccggctgc

SEQ ID NO: 2001711 - DNA, 25 bp, Homo sapien
tcctcacgaacaaaccaggtctggt

SEQ ID NO: 2001712 - DNA, 25 bp, Homo sapien
tgacctttaactgtgaacctcagcc

SEQ ID NO: 2001713 - DNA, 25 bp, Homo sapien
ccatgctagagcctgtggcacaggg

SEQ ID NO: 2001714 - DNA, 25 bp, Homo sapien
gactagcacggcctgtagctgacac

SEQ ID NO: 2001715 - DNA, 25 bp, Homo sapien
tcagatcctcccgaacctcatgctt

SEQ ID NO: 2001716 - DNA, 25 bp, Homo sapien
cgaacctcatgctttcgactttcca

SEQ ID NO: 2001717 - DNA, 25 bp, Homo sapien
gctttcgactttccacaggaactat

SEQ ID NO: 2001718 - DNA, 25 bp, Homo sapien
catttcacagacactgctttcttcc

SEQ ID NO: 2001719 - DNA, 25 bp, Homo sapien
atttgaataagatgtactcaagatt

SEQ ID NO: 2001720 - DNA, 25 bp, Homo sapien
taatttgtcagatcttcggtaattc

SEQ ID NO: 2001721 - DNA, 25 bp, Homo sapien
agatcttcggtaattctgttctgca

SEQ ID NO: 2001722 - DNA, 25 bp, Homo sapien
tgataatttgtcagatcttcggtaa

SEQ ID NO: 2001723 - DNA, 25 bp, Homo sapien
accctcctgctgtgcgtagcactcc

SEQ ID NO: 2001724 - DNA, 25 bp, Homo sapien
cttgctcaggggattccggggcttt

SEQ ID NO: 2001725 - DNA, 25 bp, Homo sapien
gcccaagtgttatttgatctgtcca

SEQ ID NO: 2001726 - DNA, 25 bp, Homo sapien
tccagccagctgaaacactgcttgc

SEQ ID NO: 2001727 - DNA, 25 bp, Homo sapien
tgtattccactgcaccaagagaggc

SEQ ID NO: 2001728 - DNA, 25 bp, Homo sapien
cgccacctcgcccaagactgtattc

SEQ ID NO: 2001729 - DNA, 25 bp, Homo sapien
ggttccaaatgcaggggagctcagc

SEQ ID NO: 2001730 - DNA, 25 bp, Homo sapien
agactgtattccactgcaccaagag

SEQ ID NO: 2001731 - DNA, 25 bp, Homo sapien
tttcatgagctctacaccaagttac

SEQ ID NO: 2001732 - DNA, 25 bp, Homo sapien
agaaacacaagcacctttcatgagc

SEQ ID NO: 2001733 - DNA, 25 bp, Homo sapien
gagaaacacaagcacctttcatgag

SEQ ID NO: 2001734 - DNA, 25 bp, Homo sapien
ggagaaacacaagcacctttcatga

SEQ ID NO: 2001735 - DNA, 25 bp, Homo sapien
ctgagccagtctggtaagcactggt

SEQ ID NO: 2001736 - DNA, 25 bp, Homo sapien
aacctgagccagtctggtaagcact

SEQ ID NO: 2001737 - DNA, 25 bp, Homo sapien
acctgagccagtctggtaagcactg

SEQ ID NO: 2001738 - DNA, 25 bp, Homo sapien
cctgagccagtctggtaagcactgg

SEQ ID NO: 2001739 - DNA, 25 bp, Homo sapien
cattctgtcaagtcccacggctgag

SEQ ID NO: 2001740 - DNA, 25 bp, Homo sapien
caagcagtatgcagggatcccatca

SEQ ID NO: 2001741 - DNA, 25 bp, Homo sapien
gaaaggccaagtctcggctagcggc

SEQ ID NO: 2001742 - DNA, 25 bp, Homo sapien
aacctgcattgggagggctgtctac

SEQ ID NO: 2001743 - DNA, 25 bp, Homo sapien
tccccaatcttgagcacgaggtcct

SEQ ID NO: 2001744 - DNA, 25 bp, Homo sapien
gacgatgtacgccacgctgaacttg

SEQ ID NO: 2001745 - DNA, 25 bp, Homo sapien
tagacactggcgatgcagtcaccct

SEQ ID NO: 2001746 - DNA, 25 bp, Homo sapien
tgcgggcatcgctcagggcaatctt

SEQ ID NO: 2001747 - DNA, 25 bp, Homo sapien
gggattctgtggaccaccagtatcc

SEQ ID NO: 2001748 - DNA, 25 bp, Homo sapien
gaatagcttgggaatgctgcaagta

SEQ ID NO: 2001749 - DNA, 25 bp, Homo sapien
agtatccgccattccagccagacat

SEQ ID NO: 2001750 - DNA, 25 bp, Homo sapien
catggagctaggaatagcttgggaa

SEQ ID NO: 2001751 - DNA, 25 bp, Homo sapien
agtggccgggtcagctctgatccct

SEQ ID NO: 2001752 - DNA, 25 bp, Homo sapien
ggtctgggcccttgagaacaactca

SEQ ID NO: 2001753 - DNA, 25 bp, Homo sapien
ggaatcgcaatagtaccgtctgcca

SEQ ID NO: 2001754 - DNA, 25 bp, Homo sapien
gtggagcatttagcacccaccacgg

SEQ ID NO: 2001755 - DNA, 25 bp, Homo sapien
tgggagcaaatgagacatactgtcc

SEQ ID NO: 2001756 - DNA, 25 bp, Homo sapien
cagttgctcactagagaagagaagg

SEQ ID NO: 2001757 - DNA, 25 bp, Homo sapien
gactgcaacttgaaacctcgacgtg

SEQ ID NO: 2001758 - DNA, 25 bp, Homo sapien
taaatgaacctaatgggcacgtgcc

SEQ ID NO: 2001759 - DNA, 25 bp, Homo sapien
gccccaaggccactgggtcaggagt

SEQ ID NO: 2001760 - DNA, 25 bp, Homo sapien
tttagccctgcgtacatctgaatgc

SEQ ID NO: 2001761 - DNA, 25 bp, Homo sapien
tgaatgcactttgacagccacgctt

SEQ ID NO: 2001762 - DNA, 25 bp, Homo sapien
gggaaactgacatctggtgtctgcc

SEQ ID NO: 2001763 - DNA, 25 bp, Homo sapien
tggagcaacacactctcaccgtgag

SEQ ID NO: 2001764 - DNA, 25 bp, Homo sapien
gcaagaacgatagacccggcaatgg

SEQ ID NO: 2001765 - DNA, 25 bp, Homo sapien
gagatgagcaggtttagtgagccca

SEQ ID NO: 2001766 - DNA, 25 bp, Homo sapien
caagctgtcatcgtgctcctcagga

SEQ ID NO: 2001767 - DNA, 25 bp, Homo sapien
ttggtgggaatctatgttgctagtt

SEQ ID NO: 2001768 - DNA, 25 bp, Homo sapien
ttgctagttagcaggccttgggcct

SEQ ID NO: 2001769 - DNA, 25 bp, Homo sapien
cactgttctactgaaaggaatactc

SEQ ID NO: 2001770 - DNA, 25 bp, Homo sapien
tactctgggtagtggccttttccta

SEQ ID NO: 2001771 - DNA, 25 bp, Homo sapien
ttgaatccttatacattgctagtgg

SEQ ID NO: 2001772 - DNA, 25 bp, Homo sapien
aacagtctggtagctcctcaagcag

SEQ ID NO: 2001773 - DNA, 25 bp, Homo sapien
gcaaaatagtgtggcccctttggaa

SEQ ID NO: 2001774 - DNA, 25 bp, Homo sapien
ggtctaaatagacagttctccagag

SEQ ID NO: 2001775 - DNA, 25 bp, Homo sapien
actgagtgagctactttaggataac

SEQ ID NO: 2001776 - DNA, 25 bp, Homo sapien
taaatatcctaccattggccaggca

SEQ ID NO: 2001777 - DNA, 25 bp, Homo sapien
tactggcttctagtaagtagcggcc

SEQ ID NO: 2001778 - DNA, 25 bp, Homo sapien
taagtagcggccaaggatgcttcta

SEQ ID NO: 2001779 - DNA, 25 bp, Homo sapien
ttgaatgcctctggttctagaagcc

SEQ ID NO: 2001780 - DNA, 25 bp, Homo sapien
ctgattcaattttagtagtgactgc

SEQ ID NO: 2001781 - DNA, 25 bp, Homo sapien
gccactcagtggaaggcctaatact

SEQ ID NO: 2001782 - DNA, 25 bp, Homo sapien
gaatatttatgagcatggagttcat

SEQ ID NO: 2001783 - DNA, 25 bp, Homo sapien
tcttatgtggtgactcaacttctat

SEQ ID NO: 2001784 - DNA, 25 bp, Homo sapien
taccttataagttttctggattatc

SEQ ID NO: 2001785 - DNA, 25 bp, Homo sapien
gacactcattaaccaagttgttgat

SEQ ID NO: 2001786 - DNA, 25 bp, Homo sapien
catgcccagccttgtatggctgata

SEQ ID NO: 2001787 - DNA, 25 bp, Homo sapien
aaagtctctctgtcacaaggtctgc

SEQ ID NO: 2001788 - DNA, 25 bp, Homo sapien
ctgaagttttaaaagtctctctgtc

SEQ ID NO: 2001789 - DNA, 25 bp, Homo sapien
ttaaaagtctctctgtcacaaggtc

SEQ ID NO: 2001790 - DNA, 25 bp, Homo sapien
tgaagttttaaaagtctctctgtca

SEQ ID NO: 2001791 - DNA, 25 bp, Homo sapien
gcagggagggtaacgacacaacata

SEQ ID NO: 2001792 - DNA, 25 bp, Homo sapien
tagtgtctgtgctcaagcctagccc

SEQ ID NO: 2001793 - DNA, 25 bp, Homo sapien
tcttgcctgggaccaacctggaggt

SEQ ID NO: 2001794 - DNA, 25 bp, Homo sapien
tcatgctaccgtgtggaagccggac

SEQ ID NO: 2001795 - DNA, 25 bp, Homo sapien
atggagtaaaaacgttgagctaaag

SEQ ID NO: 2001796 - DNA, 25 bp, Homo sapien
aacgttgagctaaaggaatgattga

SEQ ID NO: 2001797 - DNA, 25 bp, Homo sapien
gtcaggagaaaattagctcgaagtt

SEQ ID NO: 2001798 - DNA, 25 bp, Homo sapien
aaattagctcgaagtttcattgcca

SEQ ID NO: 2001799 - DNA, 25 bp, Homo sapien
cattcgagcagagaccagagtgagt

SEQ ID NO: 2001800 - DNA, 25 bp, Homo sapien
ggatattactgcaggaccctcctct

SEQ ID NO: 2001801 - DNA, 25 bp, Homo sapien
tccagaaaggcctctcatgtaaggg

SEQ ID NO: 2001802 - DNA, 25 bp, Homo sapien
tgttgacatccactctgtacaaggg

SEQ ID NO: 2001803 - DNA, 25 bp, Homo sapien
ggaggggctacaagttctcctctgt

SEQ ID NO: 2001804 - DNA, 25 bp, Homo sapien
tgggtggagggatgatttggttggg

SEQ ID NO: 2001805 - DNA, 25 bp, Homo sapien
ggtggagggatgatttggttgggct

SEQ ID NO: 2001806 - DNA, 25 bp, Homo sapien
ctggaggggctacaagttctcctct

SEQ ID NO: 2001807 - DNA, 25 bp, Homo sapien
taaaagctttggacattatcctcat

SEQ ID NO: 2001808 - DNA, 25 bp, Homo sapien
ctgataaaagctttggacattatcc

SEQ ID NO: 2001809 - DNA, 25 bp, Homo sapien
cgtctgataaaagctttggacatta

SEQ ID NO: 2001810 - DNA, 25 bp, Homo sapien
gataaaagctttggacattatcctc

SEQ ID NO: 2001811 - DNA, 25 bp, Homo sapien
taagacttgcaagcgatcctcgggc

SEQ ID NO: 2001812 - DNA, 25 bp, Homo sapien
taaccccccagagtgactgggacta

SEQ ID NO: 2001813 - DNA, 25 bp, Homo sapien
gcaagcgatcctcgggctttaaccc

SEQ ID NO: 2001814 - DNA, 25 bp, Homo sapien
agtctcccagtaagacttgcaagcg

SEQ ID NO: 2001815 - DNA, 25 bp, Homo sapien
gcagatttctcaaaccgagcagcag

SEQ ID NO: 2001816 - DNA, 25 bp, Homo sapien
ctgaatagagggctccactgcctcg

SEQ ID NO: 2001817 - DNA, 25 bp, Homo sapien
tgcctcgcacataagagagacttct

SEQ ID NO: 2001818 - DNA, 25 bp, Homo sapien
gggctccactgcctcgcacataaga

SEQ ID NO: 2001819 - DNA, 25 bp, Homo sapien
cacataagagagacttctaaggctg

SEQ ID NO: 2001820 - DNA, 25 bp, Homo sapien
tattgctcccatccacccattttgc

SEQ ID NO: 2001821 - DNA, 25 bp, Homo sapien
tgccctgtgaggagcataattaggg

SEQ ID NO: 2001822 - DNA, 25 bp, Homo sapien
acccattttgctgtccctttagagt

SEQ ID NO: 2001823 - DNA, 25 bp, Homo sapien
tttcgtcagctattgctcccatcca

SEQ ID NO: 2001824 - DNA, 25 bp, Homo sapien
agagaggagttgcagtcgagtggat

SEQ ID NO: 2001825 - DNA, 25 bp, Homo sapien
caacatggtactggtgatcagaatt

SEQ ID NO: 2001826 - DNA, 25 bp, Homo sapien
gagccctgggtgtccgaatgggaga

SEQ ID NO: 2001827 - DNA, 25 bp, Homo sapien
ggatggggtgaaattcaggataatt

SEQ ID NO: 2001828 - DNA, 25 bp, Homo sapien
gctcttgctgagaacagataagacc

SEQ ID NO: 2001829 - DNA, 25 bp, Homo sapien
gagactctggcgttttctgtatcca

SEQ ID NO: 2001830 - DNA, 25 bp, Homo sapien
cattactgctagcaacagagtaacc

SEQ ID NO: 2001831 - DNA, 25 bp, Homo sapien
ggagccctgctcaagttcattactg

SEQ ID NO: 2001832 - DNA, 25 bp, Homo sapien
ctcttccagtttcccctcccatgaa

SEQ ID NO: 2001833 - DNA, 25 bp, Homo sapien
ccagtttcccctcccatgaaacaga

SEQ ID NO: 2001834 - DNA, 25 bp, Homo sapien
ttcctcccacgcctcttccagtttc

SEQ ID NO: 2001835 - DNA, 25 bp, Homo sapien
gcctcttccagtttcccctcccatg

SEQ ID NO: 2001836 - DNA, 25 bp, Homo sapien
cagcaaagagcattctccccgtaag

SEQ ID NO: 2001837 - DNA, 25 bp, Homo sapien
ccacatgtcgatggctttggtgtag

SEQ ID NO: 2001838 - DNA, 25 bp, Homo sapien
ccggcggcccacatgtcgatggctt

SEQ ID NO: 2001839 - DNA, 25 bp, Homo sapien
tgttaccaacccttctgacagataa

SEQ ID NO: 2001840 - DNA, 25 bp, Homo sapien
aggacaggctgacaacaagggcagt

SEQ ID NO: 2001841 - DNA, 25 bp, Homo sapien
ctgatactcgcttcagatctctcct

SEQ ID NO: 2001842 - DNA, 25 bp, Homo sapien
gccactctgatactcgcttcagatc

SEQ ID NO: 2001843 - DNA, 25 bp, Homo sapien
gggaggacaggctgacaacaagggc

SEQ ID NO: 2001844 - DNA, 25 bp, Homo sapien
ctggtgttccctcagaaaggccact

SEQ ID NO: 2001845 - DNA, 25 bp, Homo sapien
ggtgttccctcagaaaggccactgt

SEQ ID NO: 2001846 - DNA, 25 bp, Homo sapien
tggtgttccctcagaaaggccactg

SEQ ID NO: 2001847 - DNA, 25 bp, Homo sapien
catctcgtgaccacagacagtgagc

SEQ ID NO: 2001848 - DNA, 25 bp, Homo sapien
gtggattatacagtctcgtctgggc

SEQ ID NO: 2001849 - DNA, 25 bp, Homo sapien
gcctgaaggttgtcagcctgttgga

SEQ ID NO: 2001850 - DNA, 25 bp, Homo sapien
cagctcttctccgtctggcctgaag

SEQ ID NO: 2001851 - DNA, 25 bp, Homo sapien
ccactggccaccgtatggcatttct

SEQ ID NO: 2001852 - DNA, 25 bp, Homo sapien
ctggctctggacagatgggtctcct

SEQ ID NO: 2001853 - DNA, 25 bp, Homo sapien
acaaccactggccaccgtatggcat

SEQ ID NO: 2001854 - DNA, 25 bp, Homo sapien
ctctggacagatgggtctccttgct

SEQ ID NO: 2001855 - DNA, 25 bp, Homo sapien
caccctgagcagctcgtccttgtct

SEQ ID NO: 2001856 - DNA, 25 bp, Homo sapien
tcccggattacagggatggtctcca

SEQ ID NO: 2001857 - DNA, 25 bp, Homo sapien
agtggattccaaactgagctgctca

SEQ ID NO: 2001858 - DNA, 25 bp, Homo sapien
ttctgtacaatcttgtcaccttcct

SEQ ID NO: 2001859 - DNA, 25 bp, Homo sapien
cagtggattccaaactgagctgctc

SEQ ID NO: 2001860 - DNA, 25 bp, Homo sapien
gaagcttctgtacaatcttgtcacc

SEQ ID NO: 2001861 - DNA, 25 bp, Homo sapien
gttagcggccatcagcacgatgtcg

SEQ ID NO: 2001862 - DNA, 25 bp, Homo sapien
cctcagggcacgagtatgggctcat

SEQ ID NO: 2001863 - DNA, 25 bp, Homo sapien
tctcagctgttaggcgatccatggg

SEQ ID NO: 2001864 - DNA, 25 bp, Homo sapien
cacgatgtcgtcgatctcatcctca

SEQ ID NO: 2001865 - DNA, 25 bp, Homo sapien
caggctgctagaagtgagctcctac

SEQ ID NO: 2001866 - DNA, 25 bp, Homo sapien
ttgcacaaaggaaggcctctgaccc

SEQ ID NO: 2001867 - DNA, 25 bp, Homo sapien
gcggagcactgtattgaaccccatg

SEQ ID NO: 2001868 - DNA, 25 bp, Homo sapien
caatgagctatgcaacttgggagac

SEQ ID NO: 2001869 - DNA, 25 bp, Homo sapien
ggtcgcgctgtacctcgctggcgtc

SEQ ID NO: 2001870 - DNA, 25 bp, Homo sapien
ttgtagtcgcaggagcgcccgtagt

SEQ ID NO: 2001871 - DNA, 25 bp, Homo sapien
tccatggacgagtgcgactgctcta

SEQ ID NO: 2001872 - DNA, 25 bp, Homo sapien
tcggagctgctgtgcgagtccttgc

SEQ ID NO: 2001873 - DNA, 25 bp, Homo sapien
tgtccaggtaggacggcgaccccac

SEQ ID NO: 2001874 - DNA, 25 bp, Homo sapien
ttgtccaggtaggacggcgacccca

SEQ ID NO: 2001875 - DNA, 25 bp, Homo sapien
gcctgcttccagtgcgacaggtcca

SEQ ID NO: 2001876 - DNA, 25 bp, Homo sapien
gcggcttgttgtcgcgccacagcag

SEQ ID NO: 2001877 - DNA, 25 bp, Homo sapien
cttgggctccgagtagtggtgcggc

SEQ ID NO: 2001878 - DNA, 25 bp, Homo sapien
tagtggtgcggcttgttgtcgcgcc

SEQ ID NO: 2001879 - DNA, 25 bp, Homo sapien
ggcgaggcagacaagcggcgctcgg

SEQ ID NO: 2001880 - DNA, 25 bp, Homo sapien
cgcgggagatgaacacgtccaggtc

SEQ ID NO: 2001881 - DNA, 25 bp, Homo sapien
gagatgaacacgtccaggtcgaact

SEQ ID NO: 2001882 - DNA, 25 bp, Homo sapien
gatgaacacgtccaggtcgaactgg

SEQ ID NO: 2001883 - DNA, 25 bp, Homo sapien
ttcagggcgcgggagatgaacacgt

SEQ ID NO: 2001884 - DNA, 25 bp, Homo sapien
tattgtccggcaggtcctcgggctt

SEQ ID NO: 2001885 - DNA, 25 bp, Homo sapien
tgaggtcgcccagtttattgtccgg

SEQ ID NO: 2001886 - DNA, 25 bp, Homo sapien
ttctttggagaaggcctcggtctgc

SEQ ID NO: 2001887 - DNA, 25 bp, Homo sapien
gggatgcacgcaccattgaggtcgc

SEQ ID NO: 2001888 - DNA, 25 bp, Homo sapien
gaattggtgccttcaacctcactgg

SEQ ID NO: 2001889 - DNA, 25 bp, Homo sapien
cattaggtcccgaggtaggtctgga

SEQ ID NO: 2001890 - DNA, 25 bp, Homo sapien
gatggtttcggagctacctctgcaa

SEQ ID NO: 2001891 - DNA, 25 bp, Homo sapien
cattctatggtggacagaccctggc

SEQ ID NO: 2001892 - DNA, 25 bp, Homo sapien
ggtcacgacgtgctctccaacacat

SEQ ID NO: 2001893 - DNA, 25 bp, Homo sapien
ccccaaggtcacgacgtgctctcca

SEQ ID NO: 2001894 - DNA, 25 bp, Homo sapien
tccaacacatctctgtagggtctgc

SEQ ID NO: 2001895 - DNA, 25 bp, Homo sapien
ctgtagggtctgctgtttgtcaagg

SEQ ID NO: 2001896 - DNA, 25 bp, Homo sapien
atgctggtgcctgacccctaagagc

SEQ ID NO: 2001897 - DNA, 25 bp, Homo sapien
cctacactatgaggggcattgctgc

SEQ ID NO: 2001898 - DNA, 25 bp, Homo sapien
cccttcctttgtcatgaggtctcca

SEQ ID NO: 2001899 - DNA, 25 bp, Homo sapien
accccacgcttctgcagagggcctg

SEQ ID NO: 2001900 - DNA, 25 bp, Homo sapien
cagtggcagaaatggtagaatgttc

SEQ ID NO: 2001901 - DNA, 25 bp, Homo sapien
caccagtggcagaaatggtagaatg

SEQ ID NO: 2001902 - DNA, 25 bp, Homo sapien
ccagtggcagaaatggtagaatgtt

SEQ ID NO: 2001903 - DNA, 25 bp, Homo sapien
acaccagtggcagaaatggtagaat

SEQ ID NO: 2001904 - DNA, 25 bp, Homo sapien
tgtgagggtgaacgcagcccaagac

SEQ ID NO: 2001905 - DNA, 25 bp, Homo sapien
gctgtgatgtgagggtgaacgcagc

SEQ ID NO: 2001906 - DNA, 25 bp, Homo sapien
cagcccaagaccaactggtggaatc

SEQ ID NO: 2001907 - DNA, 25 bp, Homo sapien
cgcagcccaagaccaactggtggaa

SEQ ID NO: 2001908 - DNA, 25 bp, Homo sapien
cagcagcttgttcctttaccaaaaa

SEQ ID NO: 2001909 - DNA, 25 bp, Homo sapien
taaaactttatttggcctgacctga

SEQ ID NO: 2001910 - DNA, 25 bp, Homo sapien
cacatgaggagtggtgtacatttct

SEQ ID NO: 2001911 - DNA, 25 bp, Homo sapien
agtttctaatgtgttgcaggtttca

SEQ ID NO: 2001912 - DNA, 25 bp, Homo sapien
taggatggttcccacacttttagaa

SEQ ID NO: 2001913 - DNA, 25 bp, Homo sapien
tcagctcaagtaggatggttcccac

SEQ ID NO: 2001914 - DNA, 25 bp, Homo sapien
tcccacacttttagaaacttctcac

SEQ ID NO: 2001915 - DNA, 25 bp, Homo sapien
gctcaagtaggatggttcccacact

SEQ ID NO: 2001916 - DNA, 25 bp, Homo sapien
tgtaggatgctgaagtaactgatgt

SEQ ID NO: 2001917 - DNA, 25 bp, Homo sapien
cattcctggtatccttagggccttt

SEQ ID NO: 2001918 - DNA, 25 bp, Homo sapien
ctgaagtaactgatgtaaaatggct

SEQ ID NO: 2001919 - DNA, 25 bp, Homo sapien
cacagtcattcctggtatccttagg

SEQ ID NO: 2001920 - DNA, 25 bp, Homo sapien
ctgcatgcacaaggcggacttatgt

SEQ ID NO: 2001921 - DNA, 25 bp, Homo sapien
cacaaggcggacttatgtcattgtc

SEQ ID NO: 2001922 - DNA, 25 bp, Homo sapien
aaggcggacttatgtcattgtcaag

SEQ ID NO: 2001923 - DNA, 25 bp, Homo sapien
atgcacaaggcggacttatgtcatt

SEQ ID NO: 2001924 - DNA, 25 bp, Homo sapien
tttcagaatcagactaaaatttcct

SEQ ID NO: 2001925 - DNA, 25 bp, Homo sapien
aaatcagtgaacatcttggcagcag

SEQ ID NO: 2001926 - DNA, 25 bp, Homo sapien
ctcccccaacattaaatcagtgaac

SEQ ID NO: 2001927 - DNA, 25 bp, Homo sapien
ttaaatcagtgaacatcttggcagc

SEQ ID NO: 2001928 - DNA, 25 bp, Homo sapien
atcagtgaacatcttggcagcagct

SEQ ID NO: 2001929 - DNA, 25 bp, Homo sapien
agctgtggacaggtacagacacctc

SEQ ID NO: 2001930 - DNA, 25 bp, Homo sapien
tgctcctggcctgatctggctttcc

SEQ ID NO: 2001931 - DNA, 25 bp, Homo sapien
tcctgcaagtttctgccccagagtg

SEQ ID NO: 2001932 - DNA, 25 bp, Homo sapien
taaatgcttgcagtgtttgcacaag

SEQ ID NO: 2001933 - DNA, 25 bp, Homo sapien
cttcctctttgaagtcgagtttctt

SEQ ID NO: 2001934 - DNA, 25 bp, Homo sapien
ccttcctctttgaagtcgagtttct

SEQ ID NO: 2001935 - DNA, 25 bp, Homo sapien
ccacccttcctctttgaagtcgagt

SEQ ID NO: 2001936 - DNA, 25 bp, Homo sapien
cacccttcctctttgaagtcgagtt

SEQ ID NO: 2001937 - DNA, 25 bp, Homo sapien
cattgaggccggattcctgcgttgc

SEQ ID NO: 2001938 - DNA, 25 bp, Homo sapien
aggataatcactctcacagctaggc

SEQ ID NO: 2001939 - DNA, 25 bp, Homo sapien
caagcaaccagagtgttatcagcaa

SEQ ID NO: 2001940 - DNA, 25 bp, Homo sapien
gagcctaatcctataaccctagcag

SEQ ID NO: 2001941 - DNA, 25 bp, Homo sapien
tcatgaatactaatggcagatctgt

SEQ ID NO: 2001942 - DNA, 25 bp, Homo sapien
cacatgcaaacatccccatggtaac

SEQ ID NO: 2001943 - DNA, 25 bp, Homo sapien
tcctcttgttagtaacctgccaccg

SEQ ID NO: 2001944 - DNA, 25 bp, Homo sapien
cgattctgacggtgaaagcctgacc

SEQ ID NO: 2001945 - DNA, 25 bp, Homo sapien
tgatttctatctcggcacatgcaaa

SEQ ID NO: 2001946 - DNA, 25 bp, Homo sapien
caggagtgtcctgaaatagtgggcc

SEQ ID NO: 2001947 - DNA, 25 bp, Homo sapien
tccttggttccagggagcaagtttc

SEQ ID NO: 2001948 - DNA, 25 bp, Homo sapien
tcatcacttggagtcccactagcca

SEQ ID NO: 2001949 - DNA, 25 bp, Homo sapien
actagccaattggtgcctccttagg

SEQ ID NO: 2001950 - DNA, 25 bp, Homo sapien
gtctttgtctgttaggggaggacca

SEQ ID NO: 2001951 - DNA, 25 bp, Homo sapien
tgtctgttaggggaggaccatctac

SEQ ID NO: 2001952 - DNA, 25 bp, Homo sapien
ggaagcagccattgcggctttgcct

SEQ ID NO: 2001953 - DNA, 25 bp, Homo sapien
gaagcagccattgcggctttgcctg

SEQ ID NO: 2001954 - DNA, 25 bp, Homo sapien
ggatgggaaaagatgaggcaaatga

SEQ ID NO: 2001955 - DNA, 25 bp, Homo sapien
atgggaaaagatgaggcaaatgact

SEQ ID NO: 2001956 - DNA, 25 bp, Homo sapien
caggatgggaaaagatgaggcaaat

SEQ ID NO: 2001957 - DNA, 25 bp, Homo sapien
ctggcaaggcaggatgggaaaagat

SEQ ID NO: 2001958 - DNA, 25 bp, Homo sapien
caagaatatggttcccactcccaag

SEQ ID NO: 2001959 - DNA, 25 bp, Homo sapien
gattggtagatagtctgtgccagac

SEQ ID NO: 2001960 - DNA, 25 bp, Homo sapien
ttcaggagatgaagcctaggtgctc

SEQ ID NO: 2001961 - DNA, 25 bp, Homo sapien
cctggaggacctctggttggttcag

SEQ ID NO: 2001962 - DNA, 25 bp, Homo sapien
tttggaaggactgtctgaaagattc

SEQ ID NO: 2001963 - DNA, 25 bp, Homo sapien
gcatgaggaggcgttctatattaag

SEQ ID NO: 2001964 - DNA, 25 bp, Homo sapien
ggaggcgttctatattaagaactgc

SEQ ID NO: 2001965 - DNA, 25 bp, Homo sapien
gattccacttgcatggttggcctgg

SEQ ID NO: 2001966 - DNA, 25 bp, Homo sapien
gttaggtggacatgtactattcagc

SEQ ID NO: 2001967 - DNA, 25 bp, Homo sapien
gtactattcagcttagtcttcatgc

SEQ ID NO: 2001968 - DNA, 25 bp, Homo sapien
catagcctgttacagcaggtttgaa

SEQ ID NO: 2001969 - DNA, 25 bp, Homo sapien
gaaggctgccggaagaactgcaagt

SEQ ID NO: 2001970 - DNA, 25 bp, Homo sapien
ccactggtttaatgaggaagcctgt

SEQ ID NO: 2001971 - DNA, 25 bp, Homo sapien
tagaaattattaggccctgctgccg

SEQ ID NO: 2001972 - DNA, 25 bp, Homo sapien
aaggatggcagagaaaccgagtccc

SEQ ID NO: 2001973 - DNA, 25 bp, Homo sapien
caaagtacagctgttgaaaagggtc

SEQ ID NO: 2001974 - DNA, 25 bp, Homo sapien
ggcgtggtatatctgaataacaatt

SEQ ID NO: 2001975 - DNA, 25 bp, Homo sapien
cccattaatggcgtggtatatctga

SEQ ID NO: 2001976 - DNA, 25 bp, Homo sapien
ttatgcccattaatggcgtggtata

SEQ ID NO: 2001977 - DNA, 25 bp, Homo sapien
taatggcgtggtatatctgaataac

SEQ ID NO: 2001978 - DNA, 25 bp, Homo sapien
taatgacggaaaggcacacagtgcc

SEQ ID NO: 2001979 - DNA, 25 bp, Homo sapien
ctccacctttgtaatgacggaaagg

SEQ ID NO: 2001980 - DNA, 25 bp, Homo sapien
tggttttttgggtatgcataccttg

SEQ ID NO: 2001981 - DNA, 25 bp, Homo sapien
tttgggtatgcataccttgatggcc

SEQ ID NO: 2001982 - DNA, 25 bp, Homo sapien
ccatgagctctgtaaatatggtgta

SEQ ID NO: 2001983 - DNA, 25 bp, Homo sapien
caagaatctacctctaaaccctgaa

SEQ ID NO: 2001984 - DNA, 25 bp, Homo sapien
tctccatgtagcagggggatctctc

SEQ ID NO: 2001985 - DNA, 25 bp, Homo sapien
ggatctctcatatgggttaatctga

SEQ ID NO: 2001986 - DNA, 25 bp, Homo sapien
aaggttctgccccactgggttcatg

SEQ ID NO: 2001987 - DNA, 25 bp, Homo sapien
tcactgaaggttctgccccactggg

SEQ ID NO: 2001988 - DNA, 25 bp, Homo sapien
tgaaggttctgccccactgggttca

SEQ ID NO: 2001989 - DNA, 25 bp, Homo sapien
ttggctcactgaaggttctgcccca

SEQ ID NO: 2001990 - DNA, 25 bp, Homo sapien
gaacaaacatcttgataaacactgg

SEQ ID NO: 2001991 - DNA, 25 bp, Homo sapien
tgtgcaaccccgagagtgaacacct

SEQ ID NO: 2001992 - DNA, 25 bp, Homo sapien
agcttgcaacttctttaagggcagg

SEQ ID NO: 2001993 - DNA, 25 bp, Homo sapien
taaacactggacagaagagcccagc

SEQ ID NO: 2001994 - DNA, 25 bp, Homo sapien
gatctggcaagtggtagtcttctgg

SEQ ID NO: 2001995 - DNA, 25 bp, Homo sapien
actctggaatccataggaggctcta

SEQ ID NO: 2001996 - DNA, 25 bp, Homo sapien
agcatttggtgcagcgtctgtgggc

SEQ ID NO: 2001997 - DNA, 25 bp, Homo sapien
cagacaaaagagacgaaagagcatt

SEQ ID NO: 2001998 - DNA, 25 bp, Homo sapien
gaaacttgccccacctctgatgtat

SEQ ID NO: 2001999 - DNA, 25 bp, Homo sapien
caggcacagggacgtgataagcccc

SEQ ID NO: 2002000 - DNA, 25 bp, Homo sapien
cagaggtcatgaacatcgcagagcc

SEQ ID NO: 2002001 - DNA, 25 bp, Homo sapien
gataagcccctgcttcagaaaacac

SEQ ID NO: 2002002 - DNA, 25 bp, Homo sapien
gaaacacccacagatccactaaact

SEQ ID NO: 2002003 - DNA, 25 bp, Homo sapien
aggaaggggaacaagcccatggcaa

SEQ ID NO: 2002004 - DNA, 25 bp, Homo sapien
gaaggggaacaagcccatggcaaag

SEQ ID NO: 2002005 - DNA, 25 bp, Homo sapien
acacccacagatccactaaacttca

SEQ ID NO: 2002006 - DNA, 25 bp, Homo sapien
agagcctgtcctgtagctctggtcc

SEQ ID NO: 2002007 - DNA, 25 bp, Homo sapien
gaaagatccagttgtgcttccttag

SEQ ID NO: 2002008 - DNA, 25 bp, Homo sapien
gcctttgctgcccattgactgtggt

SEQ ID NO: 2002009 - DNA, 25 bp, Homo sapien
gaatctgcaataggaatgagctcac

SEQ ID NO: 2002010 - DNA, 25 bp, Homo sapien
tcctgaatctgcaataggaatgagc

SEQ ID NO: 2002011 - DNA, 25 bp, Homo sapien
cacacgcagaggcggcccgaagagc

SEQ ID NO: 2002012 - DNA, 25 bp, Homo sapien
gagccgccgtcagctcaggctcaca

SEQ ID NO: 2002013 - DNA, 25 bp, Homo sapien
gtctcgcgccgcgacaggtggtaca

SEQ ID NO: 2002014 - DNA, 25 bp, Homo sapien
acaggtggtacacccggcggagagg

SEQ ID NO: 2002015 - DNA, 25 bp, Homo sapien
tctccagcccgcagcaagtcttttt

SEQ ID NO: 2002016 - DNA, 25 bp, Homo sapien
aatctcagaactctccagcccgcag

SEQ ID NO: 2002017 - DNA, 25 bp, Homo sapien
caatctcagaactctccagcccgca

SEQ ID NO: 2002018 - DNA, 25 bp, Homo sapien
aactctccagcccgcagcaagtctt

SEQ ID NO: 2002019 - DNA, 25 bp, Homo sapien
tgatagccacaagcatcaggaaggt

SEQ ID NO: 2002020 - DNA, 25 bp, Homo sapien
tgggtacaacatcgcaattagctta

SEQ ID NO: 2002021 - DNA, 25 bp, Homo sapien
gagcaatgcttaaggagtatacacg

SEQ ID NO: 2002022 - DNA, 25 bp, Homo sapien
gataatccgtgtagaaactagcgct

SEQ ID NO: 2002023 - DNA, 25 bp, Homo sapien
gagaatctggatggtatacaaatac

SEQ ID NO: 2002024 - DNA, 25 bp, Homo sapien
gatcaaaggaggtacaatatgccac

SEQ ID NO: 2002025 - DNA, 25 bp, Homo sapien
tcaaatcaaatctcaaagtcaagaa

SEQ ID NO: 2002026 - DNA, 25 bp, Homo sapien
aatacaggcaacatcaaatgtcatc

SEQ ID NO: 2002027 - DNA, 25 bp, Homo sapien
ggatggtttaattctcgtctcaacc

SEQ ID NO: 2002028 - DNA, 25 bp, Homo sapien
gattctacttatggtgtgggatgga

SEQ ID NO: 2002029 - DNA, 25 bp, Homo sapien
ttaattctcgtctcaacctcagtga

SEQ ID NO: 2002030 - DNA, 25 bp, Homo sapien
attcaaacaagttgaggtttaggat

SEQ ID NO: 2002031 - DNA, 25 bp, Homo sapien
gcaaatgtcgacatgccaaagtaca

SEQ ID NO: 2002032 - DNA, 25 bp, Homo sapien
gttcttgggttcagcataagtggct

SEQ ID NO: 2002033 - DNA, 25 bp, Homo sapien
ggttcagcataagtggcttgccttt

SEQ ID NO: 2002034 - DNA, 25 bp, Homo sapien
ttttatgtgcaaatgtcgacatgcc

SEQ ID NO: 2002035 - DNA, 25 bp, Homo sapien
caagagtacaataaagagccaggag

SEQ ID NO: 2002036 - DNA, 25 bp, Homo sapien
tagtgggaaacaaacgggactggca

SEQ ID NO: 2002037 - DNA, 25 bp, Homo sapien
tgtaaatatctcacatgtggcccaa

SEQ ID NO: 2002038 - DNA, 25 bp, Homo sapien
tgtccaccgaaccaaacatagatga

SEQ ID NO: 2002039 - DNA, 25 bp, Homo sapien
tcagaaggccagaatgttagacatt

SEQ ID NO: 2002040 - DNA, 25 bp, Homo sapien
tcctgaggagtctataacccatgaa

SEQ ID NO: 2002041 - DNA, 25 bp, Homo sapien
ccatgaattgggaatcactggtcta

SEQ ID NO: 2002042 - DNA, 25 bp, Homo sapien
tcaatcttagggatttcagaaggcc

SEQ ID NO: 2002043 - DNA, 25 bp, Homo sapien
gcatttgtcgttcttgtaaagtaaa

SEQ ID NO: 2002044 - DNA, 25 bp, Homo sapien
cgtaaggcttgaatatcttgtgtct

SEQ ID NO: 2002045 - DNA, 25 bp, Homo sapien
gaagaccaagcatttgtcgttcttg

SEQ ID NO: 2002046 - DNA, 25 bp, Homo sapien
agtttctatgaaatcgtaaggcttg

SEQ ID NO: 2002047 - DNA, 25 bp, Homo sapien
tgcgtttgatgcaccatttgcctgc

SEQ ID NO: 2002048 - DNA, 25 bp, Homo sapien
cacaactcaacctggacttgctgcg

SEQ ID NO: 2002049 - DNA, 25 bp, Homo sapien
caacctggacttgctgcgtttgatg

SEQ ID NO: 2002050 - DNA, 25 bp, Homo sapien
caaatgcatcacaactcaacctgga

SEQ ID NO: 2002051 - DNA, 25 bp, Homo sapien
gcagtattctataaaacaatttctc

SEQ ID NO: 2002052 - DNA, 25 bp, Homo sapien
cgtcggtgtatatacaattggcatt

SEQ ID NO: 2002053 - DNA, 25 bp, Homo sapien
caattggcattaaactctcaatgtc

SEQ ID NO: 2002054 - DNA, 25 bp, Homo sapien
tcatcttgcagtattctataaaaca

SEQ ID NO: 2002055 - DNA, 25 bp, Homo sapien
tgtgtccatactgggagcaggcaag

SEQ ID NO: 2002056 - DNA, 25 bp, Homo sapien
gatgtgtccatactgggagcaggca

SEQ ID NO: 2002057 - DNA, 25 bp, Homo sapien
aagatgtgtccatactgggagcagg

SEQ ID NO: 2002058 - DNA, 25 bp, Homo sapien
agatgtgtccatactgggagcaggc

SEQ ID NO: 2002059 - DNA, 25 bp, Homo sapien
taatgggtgttatggaatgatattt

SEQ ID NO: 2002060 - DNA, 25 bp, Homo sapien
tgtaatgggtgttatggaatgatat

SEQ ID NO: 2002061 - DNA, 25 bp, Homo sapien
gggtgttatggaatgatattttcct

SEQ ID NO: 2002062 - DNA, 25 bp, Homo sapien
gaaatgtaatgggtgttatggaatg

SEQ ID NO: 2002063 - DNA, 25 bp, Homo sapien
attgatctaacatgacctctgtctg

SEQ ID NO: 2002064 - DNA, 25 bp, Homo sapien
tccacaattgatctaacatgacctc

SEQ ID NO: 2002065 - DNA, 25 bp, Homo sapien
cacaattgatctaacatgacctctg

SEQ ID NO: 2002066 - DNA, 25 bp, Homo sapien
gatctaacatgacctctgtctgaga

SEQ ID NO: 2002067 - DNA, 25 bp, Homo sapien
tgcaaattaaaagttgtcaaaaatg

SEQ ID NO: 2002068 - DNA, 25 bp, Homo sapien
atgcaaattaaaagttgtcaaaaat

SEQ ID NO: 2002069 - DNA, 25 bp, Homo sapien
atcacaaaaaaatgcaaattaaaag

SEQ ID NO: 2002070 - DNA, 25 bp, Homo sapien
cttaatcacaaaaaaatgcaaatta

SEQ ID NO: 2002071 - DNA, 25 bp, Homo sapien
tacacactggcaggcatctatcagg

SEQ ID NO: 2002072 - DNA, 25 bp, Homo sapien
acacactggcaggcatctatcaggc

SEQ ID NO: 2002073 - DNA, 25 bp, Homo sapien
cacatcaatacacactggcaggcat

SEQ ID NO: 2002074 - DNA, 25 bp, Homo sapien
tcaatacacactggcaggcatctat

SEQ ID NO: 2002075 - DNA, 25 bp, Homo sapien
tcaatcaggtcatcatactgttgtg

SEQ ID NO: 2002076 - DNA, 25 bp, Homo sapien
tcaggtcatcatactgttgtgtgcg

SEQ ID NO: 2002077 - DNA, 25 bp, Homo sapien
caggtcatcatactgttgtgtgcga

SEQ ID NO: 2002078 - DNA, 25 bp, Homo sapien
tcatcaatcaggtcatcatactgtt

SEQ ID NO: 2002079 - DNA, 25 bp, Homo sapien
caatatttttctcggtactttctca

SEQ ID NO: 2002080 - DNA, 25 bp, Homo sapien
atgcattatgatttccaaagtcttc

SEQ ID NO: 2002081 - DNA, 25 bp, Homo sapien
ttccaaagtcttcgaactgaatgag

SEQ ID NO: 2002082 - DNA, 25 bp, Homo sapien
tatgatttccaaagtcttcgaactg

SEQ ID NO: 2002083 - DNA, 25 bp, Homo sapien
tgtgctgcaagaagacctgctagag

SEQ ID NO: 2002084 - DNA, 25 bp, Homo sapien
tgctgcaagaagacctgctagagct

SEQ ID NO: 2002085 - DNA, 25 bp, Homo sapien
gtgctgcaagaagacctgctagagc

SEQ ID NO: 2002086 - DNA, 25 bp, Homo sapien
tacttgtcaaacatccagattttct

SEQ ID NO: 2002087 - DNA, 25 bp, Homo sapien
taaaccatacttgtcaaacatccag

SEQ ID NO: 2002088 - DNA, 25 bp, Homo sapien
ttctgacaggccattttctaccata

SEQ ID NO: 2002089 - DNA, 25 bp, Homo sapien
taataaaccatacttgtcaaacatc

SEQ ID NO: 2002090 - DNA, 25 bp, Homo sapien
taattaggaagttctcagttcctac

SEQ ID NO: 2002091 - DNA, 25 bp, Homo sapien
tagttttaggagtgtcaaacacgat

SEQ ID NO: 2002092 - DNA, 25 bp, Homo sapien
tatcaaaactactgcaatactgcaa

SEQ ID NO: 2002093 - DNA, 25 bp, Homo sapien
taggagtgtcaaacacgatcatact

SEQ ID NO: 2002094 - DNA, 25 bp, Homo sapien
gattatgatctccaaagggttaaga

SEQ ID NO: 2002095 - DNA, 25 bp, Homo sapien
taaatgccaagcgacagctatacca

SEQ ID NO: 2002096 - DNA, 25 bp, Homo sapien
taaattggtttcaggagcacatgct

SEQ ID NO: 2002097 - DNA, 25 bp, Homo sapien
ttaagaatttctgctcacggccagg

SEQ ID NO: 2002098 - DNA, 25 bp, Homo sapien
tcaaaagtatcaggtatgctctctg

SEQ ID NO: 2002099 - DNA, 25 bp, Homo sapien
caaaagtatcaggtatgctctctgg

SEQ ID NO: 2002100 - DNA, 25 bp, Homo sapien
cttcaaaagtatcaggtatgctctc

SEQ ID NO: 2002101 - DNA, 25 bp, Homo sapien
aaaagtatcaggtatgctctctggg

SEQ ID NO: 2002102 - DNA, 25 bp, Homo sapien
gtgctgtaggattacttaatgcaaa

SEQ ID NO: 2002103 - DNA, 25 bp, Homo sapien
ggagtgaaaagacggccagcacctg

SEQ ID NO: 2002104 - DNA, 25 bp, Homo sapien
gctgtaggattacttaatgcaaata

SEQ ID NO: 2002105 - DNA, 25 bp, Homo sapien
catcaggagtgaaaagacggccagc

SEQ ID NO: 2002106 - DNA, 25 bp, Homo sapien
gtaagtttcactggcccaaatggac

SEQ ID NO: 2002107 - DNA, 25 bp, Homo sapien
tttccttgacctggtgtaaagactc

SEQ ID NO: 2002108 - DNA, 25 bp, Homo sapien
ttgacctggtgtaaagactcgccca

SEQ ID NO: 2002109 - DNA, 25 bp, Homo sapien
aagactcgcccatctgtaagtttca

SEQ ID NO: 2002110 - DNA, 25 bp, Homo sapien
gatgccagcctatataaacttgtca

SEQ ID NO: 2002111 - DNA, 25 bp, Homo sapien
gctagtcagggaaagacctaccaga

SEQ ID NO: 2002112 - DNA, 25 bp, Homo sapien
gaaagagacaactgaggatcactag

SEQ ID NO: 2002113 - DNA, 25 bp, Homo sapien
taattagagcctgctgtcagctagt

SEQ ID NO: 2002114 - DNA, 25 bp, Homo sapien
cagcactttagggtttcagtccaga

SEQ ID NO: 2002115 - DNA, 25 bp, Homo sapien
gcagtcccgaacagaggcttgaggt

SEQ ID NO: 2002116 - DNA, 25 bp, Homo sapien
tagtgccagactcggacatggtgcc

SEQ ID NO: 2002117 - DNA, 25 bp, Homo sapien
catttacggtatatccagggtttca

SEQ ID NO: 2002118 - DNA, 25 bp, Homo sapien
cagtctgccaggtggtgaatccccg

SEQ ID NO: 2002119 - DNA, 25 bp, Homo sapien
ggttggcaagtatttcccataagca

SEQ ID NO: 2002120 - DNA, 25 bp, Homo sapien
tgctgtcagtctaacggtcgcttct

SEQ ID NO: 2002121 - DNA, 25 bp, Homo sapien
aaaaactcagccatgaggccggcac

SEQ ID NO: 2002122 - DNA, 25 bp, Homo sapien
ctgtggcacgaccaaagcttgctgt

SEQ ID NO: 2002123 - DNA, 25 bp, Homo sapien
caagtgatcatctgtcctcggtgtc

SEQ ID NO: 2002124 - DNA, 25 bp, Homo sapien
tatcatgcatctttaaccaccaacg

SEQ ID NO: 2002125 - DNA, 25 bp, Homo sapien
tcatctcatcttgtcttgcctatgt

SEQ ID NO: 2002126 - DNA, 25 bp, Homo sapien
tctctggatgcatgtaggatccctt

SEQ ID NO: 2002127 - DNA, 25 bp, Homo sapien
aataccatctagcttccagtgctgg

SEQ ID NO: 2002128 - DNA, 25 bp, Homo sapien
tggagctgtcatcctagaaaacccc

SEQ ID NO: 2002129 - DNA, 25 bp, Homo sapien
agtgctggtgagaagcatcaatctg

SEQ ID NO: 2002130 - DNA, 25 bp, Homo sapien
ctgtcactaatatgccgggtgttac

SEQ ID NO: 2002131 - DNA, 25 bp, Homo sapien
actgtcactaatatgccgggtgtta

SEQ ID NO: 2002132 - DNA, 25 bp, Homo sapien
acactgtcactaatatgccgggtgt

SEQ ID NO: 2002133 - DNA, 25 bp, Homo sapien
cactgtcactaatatgccgggtgtt

SEQ ID NO: 2002134 - DNA, 25 bp, Homo sapien
taaataacagaataaggacccagta

SEQ ID NO: 2002135 - DNA, 25 bp, Homo sapien
aaacaggtaatataattcctcttat

SEQ ID NO: 2002136 - DNA, 25 bp, Homo sapien
aagcattggggaaacagagagtaaa

SEQ ID NO: 2002137 - DNA, 25 bp, Homo sapien
aatggaaaaagcattggggaaacag

SEQ ID NO: 2002138 - DNA, 25 bp, Homo sapien
ttagcaagcggtgggtaaagtctcc

SEQ ID NO: 2002139 - DNA, 25 bp, Homo sapien
tattagcaagcggtgggtaaagtct

SEQ ID NO: 2002140 - DNA, 25 bp, Homo sapien
tgaatattagcaagcggtgggtaaa

SEQ ID NO: 2002141 - DNA, 25 bp, Homo sapien
agcaagcggtgggtaaagtctccct

SEQ ID NO: 2002142 - DNA, 25 bp, Homo sapien
gtcttcaggttctgggtatcggaaa

SEQ ID NO: 2002143 - DNA, 25 bp, Homo sapien
gggaatcatattcactccgccatgt

SEQ ID NO: 2002144 - DNA, 25 bp, Homo sapien
ctggcagcagggaatcatattcact

SEQ ID NO: 2002145 - DNA, 25 bp, Homo sapien
ttctgggtatcggaaagccatttta

SEQ ID NO: 2002146 - DNA, 25 bp, Homo sapien
tatcacaggagggcttgatgcagat

SEQ ID NO: 2002147 - DNA, 25 bp, Homo sapien
atcacaggagggcttgatgcagatt

SEQ ID NO: 2002148 - DNA, 25 bp, Homo sapien
ttatcacaggagggcttgatgcaga

SEQ ID NO: 2002149 - DNA, 25 bp, Homo sapien
caactatctgactgtagggtgctgg

SEQ ID NO: 2002150 - DNA, 25 bp, Homo sapien
caaccaaagtggtcagggagaacaa

SEQ ID NO: 2002151 - DNA, 25 bp, Homo sapien
cccaacagatgtggagacgcatgga

SEQ ID NO: 2002152 - DNA, 25 bp, Homo sapien
agtagctctgtaagaactaggccag

SEQ ID NO: 2002153 - DNA, 25 bp, Homo sapien
taatgttatagttaaggcttgattt

SEQ ID NO: 2002154 - DNA, 25 bp, Homo sapien
gtagttcccattactctcataatgt

SEQ ID NO: 2002155 - DNA, 25 bp, Homo sapien
atgttatagttaaggcttgatttag

SEQ ID NO: 2002156 - DNA, 25 bp, Homo sapien
cccattactctcataatgttatagt

SEQ ID NO: 2002157 - DNA, 25 bp, Homo sapien
tctagttgggcaataagatagcata

SEQ ID NO: 2002158 - DNA, 25 bp, Homo sapien
aaagtcacgtgatgttcccatatga

SEQ ID NO: 2002159 - DNA, 25 bp, Homo sapien
taagtctgccttcaatggagaaaga

SEQ ID NO: 2002160 - DNA, 25 bp, Homo sapien
ggaataagggcatagtttctccagt

SEQ ID NO: 2002161 - DNA, 25 bp, Homo sapien
ttcacacagagagtatgtttaggcg

SEQ ID NO: 2002162 - DNA, 25 bp, Homo sapien
ggcaatgccattgcgaccattttaa

SEQ ID NO: 2002163 - DNA, 25 bp, Homo sapien
ccagcaagggtgacatagcaaaacc

SEQ ID NO: 2002164 - DNA, 25 bp, Homo sapien
acttccatgaagactgtaccaggca

SEQ ID NO: 2002165 - DNA, 25 bp, Homo sapien
aagtgcaaatcaccaatcagttgag

SEQ ID NO: 2002166 - DNA, 25 bp, Homo sapien
tgcacaaagtgcaaatcaccaatca

SEQ ID NO: 2002167 - DNA, 25 bp, Homo sapien
caccaatcagttgagagctatatga

SEQ ID NO: 2002168 - DNA, 25 bp, Homo sapien
tcagttgagagctatatgaatacat

SEQ ID NO: 2002169 - DNA, 25 bp, Homo sapien
gcattcccataagcaattactacaa

SEQ ID NO: 2002170 - DNA, 25 bp, Homo sapien
attactacaagactacccattccgt

SEQ ID NO: 2002171 - DNA, 25 bp, Homo sapien
gaacacacatctcattacaacatat

SEQ ID NO: 2002172 - DNA, 25 bp, Homo sapien
tatgttctatacaaggcattcctct

SEQ ID NO: 2002173 - DNA, 25 bp, Homo sapien
cccagctgtccgcggggctacaatg

SEQ ID NO: 2002174 - DNA, 25 bp, Homo sapien
ggcccagctgtccgcggggctacaa

SEQ ID NO: 2002175 - DNA, 25 bp, Homo sapien
gcccagctgtccgcggggctacaat

SEQ ID NO: 2002176 - DNA, 25 bp, Homo sapien
ccttcgttttcaggcaggcagtgtc

SEQ ID NO: 2002177 - DNA, 25 bp, Homo sapien
tgtgcctagggcagatatcgctgtc

SEQ ID NO: 2002178 - DNA, 25 bp, Homo sapien
gacatgcaccattctaggcactagg

SEQ ID NO: 2002179 - DNA, 25 bp, Homo sapien
tgcgagcaaaccagattaggtccct

SEQ ID NO: 2002180 - DNA, 25 bp, Homo sapien
tacttgataagacaaacggtgtgct

SEQ ID NO: 2002181 - DNA, 25 bp, Homo sapien
caactgttaactcataggcaatcat

SEQ ID NO: 2002182 - DNA, 25 bp, Homo sapien
tgggagtaccccattaggcagcacg

SEQ ID NO: 2002183 - DNA, 25 bp, Homo sapien
taacagccgctagtgatcattgcca

SEQ ID NO: 2002184 - DNA, 25 bp, Homo sapien
ccgggttggagatgggtatgctgca

SEQ ID NO: 2002185 - DNA, 25 bp, Homo sapien
cactcgccttcacaccgaaggacca

SEQ ID NO: 2002186 - DNA, 25 bp, Homo sapien
atgctgcacccgtccccaggaatgt

SEQ ID NO: 2002187 - DNA, 25 bp, Homo sapien
tccccacagtcaaagagccagcact

SEQ ID NO: 2002188 - DNA, 25 bp, Homo sapien
gtgatgaagatcttggtaattctcc

SEQ ID NO: 2002189 - DNA, 25 bp, Homo sapien
gtctccatgaaggtgtgtgatgaag

SEQ ID NO: 2002190 - DNA, 25 bp, Homo sapien
ccactctgcaggctgattgtgcaga

SEQ ID NO: 2002191 - DNA, 25 bp, Homo sapien
ccatgaaggtgtgtgatgaagatct

SEQ ID NO: 2002192 - DNA, 25 bp, Homo sapien
tagatttcaataggctgtttggaca

SEQ ID NO: 2002193 - DNA, 25 bp, Homo sapien
catagatttcaataggctgtttgga

SEQ ID NO: 2002194 - DNA, 25 bp, Homo sapien
tttcaataggctgtttggacaccat

SEQ ID NO: 2002195 - DNA, 25 bp, Homo sapien
gatttcaataggctgtttggacacc

SEQ ID NO: 2002196 - DNA, 25 bp, Homo sapien
catggttcgccagataaagtcccga

SEQ ID NO: 2002197 - DNA, 25 bp, Homo sapien
gatctgctgtaggaaccagttcatg

SEQ ID NO: 2002198 - DNA, 25 bp, Homo sapien
ggactgtctgctctattcacatgcg

SEQ ID NO: 2002199 - DNA, 25 bp, Homo sapien
tggaagaccagctccgtgtgagaga

SEQ ID NO: 2002200 - DNA, 25 bp, Homo sapien
taagtttctgtgcattgagtttacc

SEQ ID NO: 2002201 - DNA, 25 bp, Homo sapien
tgggcgtttcttttccacgactgaa

SEQ ID NO: 2002202 - DNA, 25 bp, Homo sapien
cgactgaaaacccaaatgagggaat

SEQ ID NO: 2002203 - DNA, 25 bp, Homo sapien
gcattgagtttacctgggcgtttct

SEQ ID NO: 2002204 - DNA, 25 bp, Homo sapien
tagtatagtatgaccaccaattcca

SEQ ID NO: 2002205 - DNA, 25 bp, Homo sapien
tatcaaagtgggcttaaatctcgta

SEQ ID NO: 2002206 - DNA, 25 bp, Homo sapien
taatcaacacctagtcaaaacaagt

SEQ ID NO: 2002207 - DNA, 25 bp, Homo sapien
ggagcattttttcaggcaattgtac

SEQ ID NO: 2002208 - DNA, 25 bp, Homo sapien
agcctctttgcacggcacaactttg

SEQ ID NO: 2002209 - DNA, 25 bp, Homo sapien
gcatcatccagggttgcttcgtgga

SEQ ID NO: 2002210 - DNA, 25 bp, Homo sapien
tgctagagtcacttcttggagatct

SEQ ID NO: 2002211 - DNA, 25 bp, Homo sapien
gagatctaacactgattcagcttgc

SEQ ID NO: 2002212 - DNA, 25 bp, Homo sapien
ttattagggcccaaataatttcaga

SEQ ID NO: 2002213 - DNA, 25 bp, Homo sapien
aaactggactataggttcagtaaca

SEQ ID NO: 2002214 - DNA, 25 bp, Homo sapien
ctataggttcagtaacatattcaca

SEQ ID NO: 2002215 - DNA, 25 bp, Homo sapien
tgagccaattcatcaatgcagctcc

SEQ ID NO: 2002216 - DNA, 25 bp, Homo sapien
ttgctgtgtatctcaatgggcctgc

SEQ ID NO: 2002217 - DNA, 25 bp, Homo sapien
aataccatttttagccacgagggct

SEQ ID NO: 2002218 - DNA, 25 bp, Homo sapien
aatcctgcctgtccaacgtctcatg

SEQ ID NO: 2002219 - DNA, 25 bp, Homo sapien
cccaggactgcatggaatattggct

SEQ ID NO: 2002220 - DNA, 25 bp, Homo sapien
actgaaggctagctttccatggagc

SEQ ID NO: 2002221 - DNA, 25 bp, Homo sapien
tgtgtttcccaaactgatttgactg

SEQ ID NO: 2002222 - DNA, 25 bp, Homo sapien
tttcccaaactgatttgactgagga

SEQ ID NO: 2002223 - DNA, 25 bp, Homo sapien
cctctgagtgaatcagcactgaagg

SEQ ID NO: 2002224 - DNA, 25 bp, Homo sapien
tttggagtctccacaactagccagg

SEQ ID NO: 2002225 - DNA, 25 bp, Homo sapien
gagagtgggttacctgctccagacc

SEQ ID NO: 2002226 - DNA, 25 bp, Homo sapien
gaggtactaccacatatcagagaat

SEQ ID NO: 2002227 - DNA, 25 bp, Homo sapien
ggttcaacagagctgacaggcctct

SEQ ID NO: 2002228 - DNA, 25 bp, Homo sapien
tagagtcctagcctcttgcacaagt

SEQ ID NO: 2002229 - DNA, 25 bp, Homo sapien
tcagctctaggtggacatttctaag

SEQ ID NO: 2002230 - DNA, 25 bp, Homo sapien
taagacagaccattctagagactgc

SEQ ID NO: 2002231 - DNA, 25 bp, Homo sapien
gacataataatctctatcctcaggg

SEQ ID NO: 2002232 - DNA, 25 bp, Homo sapien
taaaagtgcattaatgaggcatgag

SEQ ID NO: 2002233 - DNA, 25 bp, Homo sapien
taaacaactttggagaattagaaca

SEQ ID NO: 2002234 - DNA, 25 bp, Homo sapien
ggtgcctggccacaagtgtgcattt

SEQ ID NO: 2002235 - DNA, 25 bp, Homo sapien
tgatttagggtctatctgggcaagt

SEQ ID NO: 2002236 - DNA, 25 bp, Homo sapien
gcaatatagtacatgaccaggcaca

SEQ ID NO: 2002237 - DNA, 25 bp, Homo sapien
gtggtggtgcacattaagggtctct

SEQ ID NO: 2002238 - DNA, 25 bp, Homo sapien
gcacattaagggtctctcctatccc

SEQ ID NO: 2002239 - DNA, 25 bp, Homo sapien
tatctatattggtctggctaagacc

SEQ ID NO: 2002240 - DNA, 25 bp, Homo sapien
ccctgcgaagagacccatgtgacaa

SEQ ID NO: 2002241 - DNA, 25 bp, Homo sapien
ggaagcttgaaagtggatccctcgc

SEQ ID NO: 2002242 - DNA, 25 bp, Homo sapien
taagttgtaccgagattcctgaccc

SEQ ID NO: 2002243 - DNA, 25 bp, Homo sapien
caaggtctgcctacaactacatgag

SEQ ID NO: 2002244 - DNA, 25 bp, Homo sapien
aaatcaatgacagttcagaaccagt

SEQ ID NO: 2002245 - DNA, 25 bp, Homo sapien
gtgatattttggctcccctaaaatc

SEQ ID NO: 2002246 - DNA, 25 bp, Homo sapien
ttcagaaccagtatccagtagcccc

SEQ ID NO: 2002247 - DNA, 25 bp, Homo sapien
cccagccccacagtgatattttggc

SEQ ID NO: 2002248 - DNA, 25 bp, Homo sapien
ccctagccgacttttgcttccctgg

SEQ ID NO: 2002249 - DNA, 25 bp, Homo sapien
ctctgaggctcccagaacactcgcc

SEQ ID NO: 2002250 - DNA, 25 bp, Homo sapien
aacactcgcccctctaatgtctgct

SEQ ID NO: 2002251 - DNA, 25 bp, Homo sapien
tcctccagggctcgggtaccaaggc

SEQ ID NO: 2002252 - DNA, 25 bp, Homo sapien
ggagactcccactgttcaccattaa

SEQ ID NO: 2002253 - DNA, 25 bp, Homo sapien
tctacaaagtgaggctgggatagcg

SEQ ID NO: 2002254 - DNA, 25 bp, Homo sapien
caccgtagccttatcaaactctgca

SEQ ID NO: 2002255 - DNA, 25 bp, Homo sapien
ggtagacccttagtgctgttcagca

SEQ ID NO: 2002256 - DNA, 25 bp, Homo sapien
tgtcaacagcccgatctcagcaaaa

SEQ ID NO: 2002257 - DNA, 25 bp, Homo sapien
aatgctctgttctgtcctcacgaag

SEQ ID NO: 2002258 - DNA, 25 bp, Homo sapien
gatctcagatagttccagctttaag

SEQ ID NO: 2002259 - DNA, 25 bp, Homo sapien
ggaacttgcatgatgccgaacccca

SEQ ID NO: 2002260 - DNA, 25 bp, Homo sapien
gtgaggctggaacaaaggatctgct

SEQ ID NO: 2002261 - DNA, 25 bp, Homo sapien
gactgagggccttagtcctttgcag

SEQ ID NO: 2002262 - DNA, 25 bp, Homo sapien
gctctccatagggaagctaacaata

SEQ ID NO: 2002263 - DNA, 25 bp, Homo sapien
ccttagtcctttgcaggctgttggc

SEQ ID NO: 2002264 - DNA, 25 bp, Homo sapien
cctgtttgagggagtggtcgccggg

SEQ ID NO: 2002265 - DNA, 25 bp, Homo sapien
tgccaacttgtcgagaagccactga

SEQ ID NO: 2002266 - DNA, 25 bp, Homo sapien
cgacgacgaccagggccgtgttgtt

SEQ ID NO: 2002267 - DNA, 25 bp, Homo sapien
cgggcggaggcgaaggcctgtttga

SEQ ID NO: 2002268 - DNA, 25 bp, Homo sapien
aggcgcgaacgcaggctccgccacc

SEQ ID NO: 2002269 - DNA, 25 bp, Homo sapien
ggaaggcgcgaacgcaggctccgcc

SEQ ID NO: 2002270 - DNA, 25 bp, Homo sapien
gaaggcgcgaacgcaggctccgcca

SEQ ID NO: 2002271 - DNA, 25 bp, Homo sapien
aaggcgcgaacgcaggctccgccac

SEQ ID NO: 2002272 - DNA, 25 bp, Homo sapien
agagcaggaagggcctcccgaggag

SEQ ID NO: 2002273 - DNA, 25 bp, Homo sapien
agcaggaagggcctcccgaggagag

SEQ ID NO: 2002274 - DNA, 25 bp, Homo sapien
gggagagcaggaagggcctcccgag

SEQ ID NO: 2002275 - DNA, 25 bp, Homo sapien
gcaggaagggcctcccgaggagagc

SEQ ID NO: 2002276 - DNA, 25 bp, Homo sapien
gcgggccggaccgcctcgagctccc

SEQ ID NO: 2002277 - DNA, 25 bp, Homo sapien
tccgcggacgcaccgggcccgtagc

SEQ ID NO: 2002278 - DNA, 25 bp, Homo sapien
ggcggggggcctctctcgctgggcg

SEQ ID NO: 2002279 - DNA, 25 bp, Homo sapien
cggcggcccggagagctcctcggcc

SEQ ID NO: 2002280 - DNA, 25 bp, Homo sapien
tgggctcgggcggtggcgaggggag

SEQ ID NO: 2002281 - DNA, 25 bp, Homo sapien
ctgggctcgggcggtggcgagggga

SEQ ID NO: 2002282 - DNA, 25 bp, Homo sapien
taaaacacccgagtaaccaagctgc

SEQ ID NO: 2002283 - DNA, 25 bp, Homo sapien
tttgccagcaaaaaggagtgaacct

SEQ ID NO: 2002284 - DNA, 25 bp, Homo sapien
gggcgaccgtgaaactactgagaac

SEQ ID NO: 2002285 - DNA, 25 bp, Homo sapien
gaatgtgtcctgcataccgctgtca

SEQ ID NO: 2002286 - DNA, 25 bp, Homo sapien
tggtgtcccactaaaaagcagctag

SEQ ID NO: 2002287 - DNA, 25 bp, Homo sapien
aatatgggtgtgcatcatcgtgccc

SEQ ID NO: 2002288 - DNA, 25 bp, Homo sapien
taaatgttctcctcgaagtggccag

SEQ ID NO: 2002289 - DNA, 25 bp, Homo sapien
tatgttgtactttgaacggatcgcc

SEQ ID NO: 2002290 - DNA, 25 bp, Homo sapien
aattattcgctgtctctcacattgc

SEQ ID NO: 2002291 - DNA, 25 bp, Homo sapien
ttctgggctaattatattttcctcc

SEQ ID NO: 2002292 - DNA, 25 bp, Homo sapien
tgtgggatgcaagataattattcgc

SEQ ID NO: 2002293 - DNA, 25 bp, Homo sapien
tagagttaggttctgggctaattat

SEQ ID NO: 2002294 - DNA, 25 bp, Homo sapien
tctgttgttatctctttcacataaa

SEQ ID NO: 2002295 - DNA, 25 bp, Homo sapien
aaatgtctgtctcaactcataaacc

SEQ ID NO: 2002296 - DNA, 25 bp, Homo sapien
aatgtctgtctcaactcataaaccc

SEQ ID NO: 2002297 - DNA, 25 bp, Homo sapien
aaattacttaattaaaatgtcactg

SEQ ID NO: 2002298 - DNA, 25 bp, Homo sapien
aattacttaattaaaatgtcactgt

SEQ ID NO: 2002299 - DNA, 25 bp, Homo sapien
tgtcactgtttttgacattccaaaa

SEQ ID NO: 2002300 - DNA, 25 bp, Homo sapien
tgtttttgacattccaaaaatatta

SEQ ID NO: 2002301 - DNA, 25 bp, Homo sapien
tctggttaagtcagagattcaatgc

SEQ ID NO: 2002302 - DNA, 25 bp, Homo sapien
cacatcagaacacattttacgaagt

SEQ ID NO: 2002303 - DNA, 25 bp, Homo sapien
tggttaagtcagagattcaatgcac

SEQ ID NO: 2002304 - DNA, 25 bp, Homo sapien
gaacacattttacgaagtagatctg

SEQ ID NO: 2002305 - DNA, 25 bp, Homo sapien
cagctaacgttgcaaggaaaattgt

SEQ ID NO: 2002306 - DNA, 25 bp, Homo sapien
cgttgcaaggaaaattgttagacat

SEQ ID NO: 2002307 - DNA, 25 bp, Homo sapien
aattgttagacatgtattcaggata

SEQ ID NO: 2002308 - DNA, 25 bp, Homo sapien
aaaaacaacagctaacgttgcaagg

SEQ ID NO: 2002309 - DNA, 25 bp, Homo sapien
acttgttggtgtattcgtaatagac

SEQ ID NO: 2002310 - DNA, 25 bp, Homo sapien
atggtaacacatttactaggatgag

SEQ ID NO: 2002311 - DNA, 25 bp, Homo sapien
tgtctatggcacatcaaactatgca

SEQ ID NO: 2002312 - DNA, 25 bp, Homo sapien
tgcacaatgctcagacaggcatcat

SEQ ID NO: 2002313 - DNA, 25 bp, Homo sapien
tgtagtagcttgaaaggaaacgtag

SEQ ID NO: 2002314 - DNA, 25 bp, Homo sapien
gtttttaaatctgccaccatagagg

SEQ ID NO: 2002315 - DNA, 25 bp, Homo sapien
ttgtacaggatgcacagtatctgaa

SEQ ID NO: 2002316 - DNA, 25 bp, Homo sapien
caaattaaattaccctgtagtagct

SEQ ID NO: 2002317 - DNA, 25 bp, Homo sapien
caattccaggtgatacaactcgttc

SEQ ID NO: 2002318 - DNA, 25 bp, Homo sapien
cagagacgggcatagatcacatgag

SEQ ID NO: 2002319 - DNA, 25 bp, Homo sapien
cacattttaagtcaaacgcatactg

SEQ ID NO: 2002320 - DNA, 25 bp, Homo sapien
tgaggaaatcctttccgaccagcca

SEQ ID NO: 2002321 - DNA, 25 bp, Homo sapien
acaaaagttcatgaaccatttcaat

SEQ ID NO: 2002322 - DNA, 25 bp, Homo sapien
aagttcatgaaccatttcaattcag

SEQ ID NO: 2002323 - DNA, 25 bp, Homo sapien
cgctatctaacaatacataactaag

SEQ ID NO: 2002324 - DNA, 25 bp, Homo sapien
ttcaattcagaagtagcataaacgc

SEQ ID NO: 2002325 - DNA, 25 bp, Homo sapien
cattactctgcagtgttaatcctga

SEQ ID NO: 2002326 - DNA, 25 bp, Homo sapien
attactctgcagtgttaatcctgag

SEQ ID NO: 2002327 - DNA, 25 bp, Homo sapien
tactctgcagtgttaatcctgagag

SEQ ID NO: 2002328 - DNA, 25 bp, Homo sapien
ctctgcagtgttaatcctgagagat

SEQ ID NO: 2002329 - DNA, 25 bp, Homo sapien
aaaacagagaggataggacaaaaca

SEQ ID NO: 2002330 - DNA, 25 bp, Homo sapien
tgcctgccgctcacacaaactaatt

SEQ ID NO: 2002331 - DNA, 25 bp, Homo sapien
cacaaactaattctaggtcaacaaa

SEQ ID NO: 2002332 - DNA, 25 bp, Homo sapien
acaaaaaaacagagaggataggaca

SEQ ID NO: 2002333 - DNA, 25 bp, Homo sapien
ttttgagacagtttcgctcgttgcc

SEQ ID NO: 2002334 - DNA, 25 bp, Homo sapien
gcaatggcgtgatctcagctcactg

SEQ ID NO: 2002335 - DNA, 25 bp, Homo sapien
tgcaatggcgtgatctcagctcact

SEQ ID NO: 2002336 - DNA, 25 bp, Homo sapien
gagacagtttcgctcgttgcccagg

SEQ ID NO: 2002337 - DNA, 25 bp, Homo sapien
tactgaatgtaatgtcccctatagg

SEQ ID NO: 2002338 - DNA, 25 bp, Homo sapien
ttttgcatatagaaaccctggaagg

SEQ ID NO: 2002339 - DNA, 25 bp, Homo sapien
taaggcaggcaaaaaccgaatggct

SEQ ID NO: 2002340 - DNA, 25 bp, Homo sapien
caaggtccagaacagtatgcatagt

SEQ ID NO: 2002341 - DNA, 25 bp, Homo sapien
gctgtatgtctctgtcgatgcacga

SEQ ID NO: 2002342 - DNA, 25 bp, Homo sapien
gacaacgatggctgtccctcaaagt

SEQ ID NO: 2002343 - DNA, 25 bp, Homo sapien
cgatgcacgattacttggtggatgc

SEQ ID NO: 2002344 - DNA, 25 bp, Homo sapien
gctggtagcattagactcagatggg

SEQ ID NO: 2002345 - DNA, 25 bp, Homo sapien
caataatggtactttcggtagcaac

SEQ ID NO: 2002346 - DNA, 25 bp, Homo sapien
gaagtaggtagctgtgctctagcac

SEQ ID NO: 2002347 - DNA, 25 bp, Homo sapien
caagtgattaaggaactgggttctc

SEQ ID NO: 2002348 - DNA, 25 bp, Homo sapien
cagaaccaggtcatatgatcatgcc

SEQ ID NO: 2002349 - DNA, 25 bp, Homo sapien
ggaagagagtaacatgtcaccattg

SEQ ID NO: 2002350 - DNA, 25 bp, Homo sapien
ggcaatactcttagctaacttacaa

SEQ ID NO: 2002351 - DNA, 25 bp, Homo sapien
actcgactgttaatcctatttggaa

SEQ ID NO: 2002352 - DNA, 25 bp, Homo sapien
gtcaccattgctcaaagtatcaaag

SEQ ID NO: 2002353 - DNA, 25 bp, Homo sapien
atctgcaacagtccttcactatggc

SEQ ID NO: 2002354 - DNA, 25 bp, Homo sapien
ttcactatggctgccccccagtata

SEQ ID NO: 2002355 - DNA, 25 bp, Homo sapien
gccctgatgctatctgcaacagtcc

SEQ ID NO: 2002356 - DNA, 25 bp, Homo sapien
gccccccagtatactggcaggctga

SEQ ID NO: 2002357 - DNA, 25 bp, Homo sapien
aggcaaattaggtgtgtatggtgca

SEQ ID NO: 2002358 - DNA, 25 bp, Homo sapien
gccgttttggtggtgaggcaaatta

SEQ ID NO: 2002359 - DNA, 25 bp, Homo sapien
ggtgctgaagatggccgttttggtg

SEQ ID NO: 2002360 - DNA, 25 bp, Homo sapien
gtgtatggtgcagtcctacttccag

SEQ ID NO: 2002361 - DNA, 25 bp, Homo sapien
cacacagcctgttaaaggtccaaac

SEQ ID NO: 2002362 - DNA, 25 bp, Homo sapien
taacttgtcaatggtcacacagcct

SEQ ID NO: 2002363 - DNA, 25 bp, Homo sapien
tcaacactatgacggcctaggcagc

SEQ ID NO: 2002364 - DNA, 25 bp, Homo sapien
tacgaacaccccttgaggtagatac

SEQ ID NO: 2002365 - DNA, 25 bp, Homo sapien
caggatgattggaaatgggaggctg

SEQ ID NO: 2002366 - DNA, 25 bp, Homo sapien
ggaatgcaagctcattgtgaacagg

SEQ ID NO: 2002367 - DNA, 25 bp, Homo sapien
ctggaatgcaagctcattgtgaaca

SEQ ID NO: 2002368 - DNA, 25 bp, Homo sapien
aatgcaagctcattgtgaacaggcc

SEQ ID NO: 2002369 - DNA, 25 bp, Homo sapien
ttgaactgaagaaagctacttagcg

SEQ ID NO: 2002370 - DNA, 25 bp, Homo sapien
gctacttagcgatttactcttttgc

SEQ ID NO: 2002371 - DNA, 25 bp, Homo sapien
tcggcatgtacttaagattctttcc

SEQ ID NO: 2002372 - DNA, 25 bp, Homo sapien
taaccagagatcctgaatagagtga

SEQ ID NO: 2002373 - DNA, 25 bp, Homo sapien
aatcacctaagtctgggaggtcagg

SEQ ID NO: 2002374 - DNA, 25 bp, Homo sapien
caacttgtaaaagctatgtacccta

SEQ ID NO: 2002375 - DNA, 25 bp, Homo sapien
tgaaattattttcagccgggcatgg

SEQ ID NO: 2002376 - DNA, 25 bp, Homo sapien
tgccatgtcactctaatgaacttgt

SEQ ID NO: 2002377 - DNA, 25 bp, Homo sapien
cactgaccctaagatgtattccagg

SEQ ID NO: 2002378 - DNA, 25 bp, Homo sapien
aatcacacagttgttgtacacacag

SEQ ID NO: 2002379 - DNA, 25 bp, Homo sapien
gattccctaattgagagaaagtgca

SEQ ID NO: 2002380 - DNA, 25 bp, Homo sapien
gggatctttctaggcactgcataca

SEQ ID NO: 2002381 - DNA, 25 bp, Homo sapien
aggctttcacttgcactccacaaca

SEQ ID NO: 2002382 - DNA, 25 bp, Homo sapien
tttcacttgcactccacaacacagt

SEQ ID NO: 2002383 - DNA, 25 bp, Homo sapien
taaggctttcacttgcactccacaa

SEQ ID NO: 2002384 - DNA, 25 bp, Homo sapien
tcacttgcactccacaacacagttt

SEQ ID NO: 2002385 - DNA, 25 bp, Homo sapien
tccagaagggtccacgtatccatca

SEQ ID NO: 2002386 - DNA, 25 bp, Homo sapien
ggagagttgacccaaacaaaagcga

SEQ ID NO: 2002387 - DNA, 25 bp, Homo sapien
acaaaagcgatctcctccagaaggg

SEQ ID NO: 2002388 - DNA, 25 bp, Homo sapien
aacaatagggcagcttgaaggaacc

SEQ ID NO: 2002389 - DNA, 25 bp, Homo sapien
ttgtagaaatgtatgatcacagaaa

SEQ ID NO: 2002390 - DNA, 25 bp, Homo sapien
tctgtctaagtagtaactctgtaca

SEQ ID NO: 2002391 - DNA, 25 bp, Homo sapien
cacttgggtagatcttatgaacagc

SEQ ID NO: 2002392 - DNA, 25 bp, Homo sapien
tggtcactaaggcacctgacccaaa

SEQ ID NO: 2002393 - DNA, 25 bp, Homo sapien
taactctgtacaaagaccgcgtggt

SEQ ID NO: 2002394 - DNA, 25 bp, Homo sapien
ctagattactgataatgtcaataaa

SEQ ID NO: 2002395 - DNA, 25 bp, Homo sapien
cgataaaactagattactgataatg

SEQ ID NO: 2002396 - DNA, 25 bp, Homo sapien
caataaatgccctcagaaaatgtgt

SEQ ID NO: 2002397 - DNA, 25 bp, Homo sapien
ataaatgccctcagaaaatgtgttt

SEQ ID NO: 2002398 - DNA, 25 bp, Homo sapien
cataccagtctagacttatgggtac

SEQ ID NO: 2002399 - DNA, 25 bp, Homo sapien
gagccactaaatcaggccttatgta

SEQ ID NO: 2002400 - DNA, 25 bp, Homo sapien
actttgtggcttacgttggtcttga

SEQ ID NO: 2002401 - DNA, 25 bp, Homo sapien
tattaagtgtaataaatagcaccgc

SEQ ID NO: 2002402 - DNA, 25 bp, Homo sapien
gactactatgtcatgagagaagcag

SEQ ID NO: 2002403 - DNA, 25 bp, Homo sapien
tcctagcttcttggcttataaaatg

SEQ ID NO: 2002404 - DNA, 25 bp, Homo sapien
taaaaacttgaaacgcccagtgcta

SEQ ID NO: 2002405 - DNA, 25 bp, Homo sapien
ggccacttaaagagaattcaaacat

SEQ ID NO: 2002406 - DNA, 25 bp, Homo sapien
aatcactatgcccagtctattctgc

SEQ ID NO: 2002407 - DNA, 25 bp, Homo sapien
gggattataggagtcaatcactatg

SEQ ID NO: 2002408 - DNA, 25 bp, Homo sapien
ggagtcaatcactatgcccagtcta

SEQ ID NO: 2002409 - DNA, 25 bp, Homo sapien
gcccagtctattctgcccattgttt

SEQ ID NO: 2002410 - DNA, 25 bp, Homo sapien
tctttggtgaggtgtttgttcatgt

SEQ ID NO: 2002411 - DNA, 25 bp, Homo sapien
atcaatgaatttacactgacacatc

SEQ ID NO: 2002412 - DNA, 25 bp, Homo sapien
tcaatgaatttacactgacacatca

SEQ ID NO: 2002413 - DNA, 25 bp, Homo sapien
caaccatggtatttacatgaaccac

SEQ ID NO: 2002414 - DNA, 25 bp, Homo sapien
tgaagcaaggctgctcaatgtccac

SEQ ID NO: 2002415 - DNA, 25 bp, Homo sapien
gaaccatgtggctatactccctatc

SEQ ID NO: 2002416 - DNA, 25 bp, Homo sapien
taagagaaatctgagaatgcataat

SEQ ID NO: 2002417 - DNA, 25 bp, Homo sapien
tcgatgacactgacgcaaatcaaag

SEQ ID NO: 2002418 - DNA, 25 bp, Homo sapien
tctgtcgatgacactgacgcaaatc

SEQ ID NO: 2002419 - DNA, 25 bp, Homo sapien
tgcagcttgtgcagtagccgcctgc

SEQ ID NO: 2002420 - DNA, 25 bp, Homo sapien
tagctggagctattccacctactga

SEQ ID NO: 2002421 - DNA, 25 bp, Homo sapien
gaatgaatcactagttatgccttca

SEQ ID NO: 2002422 - DNA, 25 bp, Homo sapien
tcataaaagtctatagtcaggagtt

SEQ ID NO: 2002423 - DNA, 25 bp, Homo sapien
caggagtttaactctgcagtaaaaa

SEQ ID NO: 2002424 - DNA, 25 bp, Homo sapien
ccttcagacgtggaagatgggtgcc

SEQ ID NO: 2002425 - DNA, 25 bp, Homo sapien
gtgaatttcaatccagcaaggtgtt

SEQ ID NO: 2002426 - DNA, 25 bp, Homo sapien
gagggcccggtgtaagtgaatttca

SEQ ID NO: 2002427 - DNA, 25 bp, Homo sapien
tgagtatgcataagcgacgaaggtc

SEQ ID NO: 2002428 - DNA, 25 bp, Homo sapien
tctgtcttgggtaatccggtcccca

SEQ ID NO: 2002429 - DNA, 25 bp, Homo sapien
tgtgggtctgcaatcggcatggtat

SEQ ID NO: 2002430 - DNA, 25 bp, Homo sapien
tggtatgaagtacttcgtctaggag

SEQ ID NO: 2002431 - DNA, 25 bp, Homo sapien
tcagtctaaaggttgtgggtctgca

SEQ ID NO: 2002432 - DNA, 25 bp, Homo sapien
tgcaatcggcatggtatgaagtact

SEQ ID NO: 2002433 - DNA, 25 bp, Homo sapien
catcctgataaggttaagggcccca

SEQ ID NO: 2002434 - DNA, 25 bp, Homo sapien
tcgatgttctgcagataaaaggctc

SEQ ID NO: 2002435 - DNA, 25 bp, Homo sapien
gagacattaggtagagtgacgctgc

SEQ ID NO: 2002436 - DNA, 25 bp, Homo sapien
tgtattttgtagtccaccatcctga

SEQ ID NO: 2002437 - DNA, 25 bp, Homo sapien
tggtacagtcaatacatctgcaact

SEQ ID NO: 2002438 - DNA, 25 bp, Homo sapien
gatcattgatggcaaagggcttaga

SEQ ID NO: 2002439 - DNA, 25 bp, Homo sapien
gcatacatattgtgtctgtggtaca

SEQ ID NO: 2002440 - DNA, 25 bp, Homo sapien
gtttgcagtcttgccccaagataca

SEQ ID NO: 2002441 - DNA, 25 bp, Homo sapien
aaaaccaactctacacatgatacac

SEQ ID NO: 2002442 - DNA, 25 bp, Homo sapien
tatcatcttgtagataatcaggtct

SEQ ID NO: 2002443 - DNA, 25 bp, Homo sapien
catactatttatcctgtagacaatc

SEQ ID NO: 2002444 - DNA, 25 bp, Homo sapien
cctgtcatttagtagaaggtacctc

SEQ ID NO: 2002445 - DNA, 25 bp, Homo sapien
ggaggactatcatcacacaagtgtt

SEQ ID NO: 2002446 - DNA, 25 bp, Homo sapien
cattccaggtgatataaggaggact

SEQ ID NO: 2002447 - DNA, 25 bp, Homo sapien
caaaagtcatgtagcttggatcaag

SEQ ID NO: 2002448 - DNA, 25 bp, Homo sapien
tctatagctaaaagttctccaggca

SEQ ID NO: 2002449 - DNA, 25 bp, Homo sapien
taaaggcaacaccatgaaggattcc

SEQ ID NO: 2002450 - DNA, 25 bp, Homo sapien
caaacatggaatgaggtcttacggt

SEQ ID NO: 2002451 - DNA, 25 bp, Homo sapien
caagtatggctctccttaagccaga

SEQ ID NO: 2002452 - DNA, 25 bp, Homo sapien
gggtgtacatggctcatctctcatt

SEQ ID NO: 2002453 - DNA, 25 bp, Homo sapien
tgtctcagaccatttagtaaaggca

SEQ ID NO: 2002454 - DNA, 25 bp, Homo sapien
tcagcaagaatcaggaagcactcta

SEQ ID NO: 2002455 - DNA, 25 bp, Homo sapien
ggaggcacactaacactcacatatg

SEQ ID NO: 2002456 - DNA, 25 bp, Homo sapien
caactgctagggataaggctgggcc

SEQ ID NO: 2002457 - DNA, 25 bp, Homo sapien
tgaaaagtatccacatcaacagaga

SEQ ID NO: 2002458 - DNA, 25 bp, Homo sapien
tgtacaggagtaaggccagaaggca

SEQ ID NO: 2002459 - DNA, 25 bp, Homo sapien
ggcaggatgtcagaccctcaattct

SEQ ID NO: 2002460 - DNA, 25 bp, Homo sapien
ggcacctataggtcaaaaatatctg

SEQ ID NO: 2002461 - DNA, 25 bp, Homo sapien
gaagagagctctgaatgatccagcc

SEQ ID NO: 2002462 - DNA, 25 bp, Homo sapien
taagtgtttattgcagcccctaagg

SEQ ID NO: 2002463 - DNA, 25 bp, Homo sapien
taattgtactcatccaagggtaggc

SEQ ID NO: 2002464 - DNA, 25 bp, Homo sapien
gtcttaatcaatccaagcccgtgag

SEQ ID NO: 2002465 - DNA, 25 bp, Homo sapien
aaagcagaagctacgagtggctctt

SEQ ID NO: 2002466 - DNA, 25 bp, Homo sapien
tttagccacagactttaaccaggca

SEQ ID NO: 2002467 - DNA, 25 bp, Homo sapien
cagagttctcaagaaaggttcgact

SEQ ID NO: 2002468 - DNA, 25 bp, Homo sapien
gaactcctgggactttcaactgacc

SEQ ID NO: 2002469 - DNA, 25 bp, Homo sapien
cactttggaaaagagcttgaaaaat

SEQ ID NO: 2002470 - DNA, 25 bp, Homo sapien
tacaaccaatcaatattactcatgg

SEQ ID NO: 2002471 - DNA, 25 bp, Homo sapien
atctaaagacttgcacataaatgtg

SEQ ID NO: 2002472 - DNA, 25 bp, Homo sapien
taccaactttatgcataatagcgaa

SEQ ID NO: 2002473 - DNA, 25 bp, Homo sapien
tgctagccccttctcgctgggaaaa

SEQ ID NO: 2002474 - DNA, 25 bp, Homo sapien
ggctcgctccacacctagaatctgg

SEQ ID NO: 2002475 - DNA, 25 bp, Homo sapien
tcgcgctgtcacctcgcaaagggct

SEQ ID NO: 2002476 - DNA, 25 bp, Homo sapien
tgtgggccttcacaataaacgcagc

SEQ ID NO: 2002477 - DNA, 25 bp, Homo sapien
cctgggtcccgggacattgtctatc

SEQ ID NO: 2002478 - DNA, 25 bp, Homo sapien
gacattgtctatctagcccggagga

SEQ ID NO: 2002479 - DNA, 25 bp, Homo sapien
gactgcggttgacgactccgggctt

SEQ ID NO: 2002480 - DNA, 25 bp, Homo sapien
agtgaagatccagactccgcagaat

SEQ ID NO: 2002481 - DNA, 25 bp, Homo sapien
gagtagctctctgcgctgtctcctc

SEQ ID NO: 2002482 - DNA, 25 bp, Homo sapien
ggagagtagctctctgcgctgtctc

SEQ ID NO: 2002483 - DNA, 25 bp, Homo sapien
tcaggtgccggttgggagagtagct

SEQ ID NO: 2002484 - DNA, 25 bp, Homo sapien
ttgggagagtagctctctgcgctgt

SEQ ID NO: 2002485 - DNA, 25 bp, Homo sapien
tgactgtgcctcaccggcaaagaaa

SEQ ID NO: 2002486 - DNA, 25 bp, Homo sapien
ggagtgctgtgggaccatcctgact

SEQ ID NO: 2002487 - DNA, 25 bp, Homo sapien
gctgtgggaccatcctgactgtgcc

SEQ ID NO: 2002488 - DNA, 25 bp, Homo sapien
tgcctcaccggcaaagaaaggactg

SEQ ID NO: 2002489 - DNA, 25 bp, Homo sapien
tacgcctcagcggactcaggtttcg

SEQ ID NO: 2002490 - DNA, 25 bp, Homo sapien
caaaggtcgatggtaagcgaggcca

SEQ ID NO: 2002491 - DNA, 25 bp, Homo sapien
gcaagttcctgaagaagagccagta

SEQ ID NO: 2002492 - DNA, 25 bp, Homo sapien
ggtttcggctgatactcggtggcaa

SEQ ID NO: 2002493 - DNA, 25 bp, Homo sapien
cagtgcccgccttctgcagtgcctg

SEQ ID NO: 2002494 - DNA, 25 bp, Homo sapien
tctccagtgcccgccttctgcagtg

SEQ ID NO: 2002495 - DNA, 25 bp, Homo sapien
tccagtgcccgccttctgcagtgcc

SEQ ID NO: 2002496 - DNA, 25 bp, Homo sapien
agtgcctgccttctccagtgcctgc

SEQ ID NO: 2002497 - DNA, 25 bp, Homo sapien
aggtatacagccagaagtggccaaa

SEQ ID NO: 2002498 - DNA, 25 bp, Homo sapien
tatgccagccaataaagaagcccat

SEQ ID NO: 2002499 - DNA, 25 bp, Homo sapien
cagctgtgcaagaggtatacagcca

SEQ ID NO: 2002500 - DNA, 25 bp, Homo sapien
aagtggccaaatttatgccagccaa

SEQ ID NO: 2002501 - DNA, 25 bp, Homo sapien
tcactgactgttccttgccagtgga

SEQ ID NO: 2002502 - DNA, 25 bp, Homo sapien
caagcgctcactgactgttccttgc

SEQ ID NO: 2002503 - DNA, 25 bp, Homo sapien
gggtcccagtgattaggtctgggct

SEQ ID NO: 2002504 - DNA, 25 bp, Homo sapien
tgactgttccttgccagtggattgg

SEQ ID NO: 2002505 - DNA, 25 bp, Homo sapien
tgtctctgtccatcaggaacgtggc

SEQ ID NO: 2002506 - DNA, 25 bp, Homo sapien
gaacgtggccaatgacaccaggtct

SEQ ID NO: 2002507 - DNA, 25 bp, Homo sapien
caccaggtctgcagatagacaggat

SEQ ID NO: 2002508 - DNA, 25 bp, Homo sapien
tgcagatagacaggataaatttggt

SEQ ID NO: 2002509 - DNA, 25 bp, Homo sapien
tccaaaggagtccggcactgagggt

SEQ ID NO: 2002510 - DNA, 25 bp, Homo sapien
tctagaggcagttgcagagccaagt

SEQ ID NO: 2002511 - DNA, 25 bp, Homo sapien
ctcgccgctcgctaacactgcttct

SEQ ID NO: 2002512 - DNA, 25 bp, Homo sapien
gcttctagtttctagaggcagttgc

SEQ ID NO: 2002513 - DNA, 25 bp, Homo sapien
tctgtttctgttgcatgtgttggcg

SEQ ID NO: 2002514 - DNA, 25 bp, Homo sapien
tgtttctgttgcatgtgttggcgcc

SEQ ID NO: 2002515 - DNA, 25 bp, Homo sapien
caagtgcaaattctgtttctgttgc

SEQ ID NO: 2002516 - DNA, 25 bp, Homo sapien
tttctgttgcatgtgttggcgccat

SEQ ID NO: 2002517 - DNA, 25 bp, Homo sapien
tgtatcacatagctcctggaggtat

SEQ ID NO: 2002518 - DNA, 25 bp, Homo sapien
cagtctacgaagctgtgaagatgtg

SEQ ID NO: 2002519 - DNA, 25 bp, Homo sapien
ttttaaaggtgcacaagaagatgtt

SEQ ID NO: 2002520 - DNA, 25 bp, Homo sapien
ggaaattgtccagcttcgcaatgga

SEQ ID NO: 2002521 - DNA, 25 bp, Homo sapien
taagggtgttctaagggcgcgctaa

SEQ ID NO: 2002522 - DNA, 25 bp, Homo sapien
tggtttgatccagcaagctccacaa

SEQ ID NO: 2002523 - DNA, 25 bp, Homo sapien
gagctaaacccagtggacctgtgta

SEQ ID NO: 2002524 - DNA, 25 bp, Homo sapien
ggcgcgctaagaccacttggagcta

SEQ ID NO: 2002525 - DNA, 25 bp, Homo sapien
tgcccttggcataattcacaaaagc

SEQ ID NO: 2002526 - DNA, 25 bp, Homo sapien
tcacctgtggatgtctataacttca

SEQ ID NO: 2002527 - DNA, 25 bp, Homo sapien
tctgtgctggcattgaaaggacaaa

SEQ ID NO: 2002528 - DNA, 25 bp, Homo sapien
aaagcagctgtgacaacctccaatc

SEQ ID NO: 2002529 - DNA, 25 bp, Homo sapien
caaggctggtatgatcagtggatca

SEQ ID NO: 2002530 - DNA, 25 bp, Homo sapien
taagatttcaaaacaatgggtccca

SEQ ID NO: 2002531 - DNA, 25 bp, Homo sapien
tggagggtacttggcattacagacg

SEQ ID NO: 2002532 - DNA, 25 bp, Homo sapien
tcatctcgcccagagtgctcaaggc

SEQ ID NO: 2002533 - DNA, 25 bp, Homo sapien
catgtagtcctaatctgcccggtca

SEQ ID NO: 2002534 - DNA, 25 bp, Homo sapien
cctgaaaatgttgaccgagcacggg

SEQ ID NO: 2002535 - DNA, 25 bp, Homo sapien
tctcgaaacaaaaatgggcctgccc

SEQ ID NO: 2002536 - DNA, 25 bp, Homo sapien
gaagacctagcagttgactctcctg

SEQ ID NO: 2002537 - DNA, 25 bp, Homo sapien
tgttcaaatggtcggtatcaccgcc

SEQ ID NO: 2002538 - DNA, 25 bp, Homo sapien
tacttgggctgtattcgtggaacac

SEQ ID NO: 2002539 - DNA, 25 bp, Homo sapien
tgcgccgccgagtgtcttctaaaag

SEQ ID NO: 2002540 - DNA, 25 bp, Homo sapien
agtgtgaagtttctcgggcgaccca

SEQ ID NO: 2002541 - DNA, 25 bp, Homo sapien
gcgcgcgccgggggctggttaaggc

SEQ ID NO: 2002542 - DNA, 25 bp, Homo sapien
agagcggcgtggggcgtagccgccg

SEQ ID NO: 2002543 - DNA, 25 bp, Homo sapien
cggagagcggcgtggggcgtagccg

SEQ ID NO: 2002544 - DNA, 25 bp, Homo sapien
tggttaaggccatgaaacaaaagaa

SEQ ID NO: 2002545 - DNA, 25 bp, Homo sapien
aaaaattctctaagctccacctatc

SEQ ID NO: 2002546 - DNA, 25 bp, Homo sapien
ttatcaacatccagtaccacagtgg

SEQ ID NO: 2002547 - DNA, 25 bp, Homo sapien
taagacaggctaactgggatggctg

SEQ ID NO: 2002548 - DNA, 25 bp, Homo sapien
tcttgaacctacaaacctacattga

SEQ ID NO: 2002549 - DNA, 25 bp, Homo sapien
cttcactctagatgtgtggctcttc

SEQ ID NO: 2002550 - DNA, 25 bp, Homo sapien
ctttaaatggcctaaaagttctgca

SEQ ID NO: 2002551 - DNA, 25 bp, Homo sapien
tggctaactccttaacctgcaaatc

SEQ ID NO: 2002552 - DNA, 25 bp, Homo sapien
tgcatgctccactcctaatttagcc

SEQ ID NO: 2002553 - DNA, 25 bp, Homo sapien
aagagatagaaacaagctgtctcat

SEQ ID NO: 2002554 - DNA, 25 bp, Homo sapien
ctcattaaacgtgggtttaccactg

SEQ ID NO: 2002555 - DNA, 25 bp, Homo sapien
gatagaaacaagctgtctcattaaa

SEQ ID NO: 2002556 - DNA, 25 bp, Homo sapien
tgtctcattaaacgtgggtttacca

SEQ ID NO: 2002557 - DNA, 25 bp, Homo sapien
caaaataaacatccccggttggatg

SEQ ID NO: 2002558 - DNA, 25 bp, Homo sapien
gctgcccgatctccctttgaaaagt

SEQ ID NO: 2002559 - DNA, 25 bp, Homo sapien
tgtcttgggtaagacaccttgtggg

SEQ ID NO: 2002560 - DNA, 25 bp, Homo sapien
ccattcggataagtagagacctaaa

SEQ ID NO: 2002561 - DNA, 25 bp, Homo sapien
gaatgaatgagaataagctgctgga

SEQ ID NO: 2002562 - DNA, 25 bp, Homo sapien
gatggaatgaatgagaataagctgc

SEQ ID NO: 2002563 - DNA, 25 bp, Homo sapien
aagtaggtcgttgcactaaaggaag

SEQ ID NO: 2002564 - DNA, 25 bp, Homo sapien
ttaagtaggtcgttgcactaaagga

SEQ ID NO: 2002565 - DNA, 25 bp, Homo sapien
gcagcattgagagtaggtgaccaga

SEQ ID NO: 2002566 - DNA, 25 bp, Homo sapien
ggctggatggcaacagatacccaag

SEQ ID NO: 2002567 - DNA, 25 bp, Homo sapien
cagagtgatcaactggctatggcat

SEQ ID NO: 2002568 - DNA, 25 bp, Homo sapien
gatgcatactacactctcaaagagg

SEQ ID NO: 2002569 - DNA, 25 bp, Homo sapien
gagaggggagagatttaaagagatc

SEQ ID NO: 2002570 - DNA, 25 bp, Homo sapien
agcaagtccaggatacagtggggag

SEQ ID NO: 2002571 - DNA, 25 bp, Homo sapien
ggagcaagtccaggatacagtgggg

SEQ ID NO: 2002572 - DNA, 25 bp, Homo sapien
tccgtagttttaactctcgtctcca

SEQ ID NO: 2002573 - DNA, 25 bp, Homo sapien
ccgtagttttaactctcgtctccat

SEQ ID NO: 2002574 - DNA, 25 bp, Homo sapien
gaccaactaaggcagaatcgttaga

SEQ ID NO: 2002575 - DNA, 25 bp, Homo sapien
tttagaccagctcagtaagttcgca

SEQ ID NO: 2002576 - DNA, 25 bp, Homo sapien
tgtgttagccaaacctcctgaggag

SEQ ID NO: 2002577 - DNA, 25 bp, Homo sapien
tctgccaactgatggtttagaccag

SEQ ID NO: 2002578 - DNA, 25 bp, Homo sapien
ctggatacccaagatgtccagagaa

SEQ ID NO: 2002579 - DNA, 25 bp, Homo sapien
ggacaccaatagacccctcttagaa

SEQ ID NO: 2002580 - DNA, 25 bp, Homo sapien
gaggccacataatttgacaacggtg

SEQ ID NO: 2002581 - DNA, 25 bp, Homo sapien
gacaacggtggagatacttcccatc

SEQ ID NO: 2002582 - DNA, 25 bp, Homo sapien
tatggaaaggagctccgtagctgtg

SEQ ID NO: 2002583 - DNA, 25 bp, Homo sapien
ggagacgattctgaagccctctgac

SEQ ID NO: 2002584 - DNA, 25 bp, Homo sapien
ccaaggagacgattctgaagccctc

SEQ ID NO: 2002585 - DNA, 25 bp, Homo sapien
aggagacgattctgaagccctctga

SEQ ID NO: 2002586 - DNA, 25 bp, Homo sapien
ctagaaaggtgatcaggagattcag

SEQ ID NO: 2002587 - DNA, 25 bp, Homo sapien
gctgggagctgtgacccaattggat

SEQ ID NO: 2002588 - DNA, 25 bp, Homo sapien
tgggagctgtgacccaattggatcc

SEQ ID NO: 2002589 - DNA, 25 bp, Homo sapien
gaaaggtgatcaggagattcagcag

SEQ ID NO: 2002590 - DNA, 25 bp, Homo sapien
caaggaacctggatcatcagcttct

SEQ ID NO: 2002591 - DNA, 25 bp, Homo sapien
aaggaacctggatcatcagcttctt

SEQ ID NO: 2002592 - DNA, 25 bp, Homo sapien
tcaaggaacctggatcatcagcttc

SEQ ID NO: 2002593 - DNA, 25 bp, Homo sapien
ctctgcgggcccctgatgacactag

SEQ ID NO: 2002594 - DNA, 25 bp, Homo sapien
aaataagtctctgactaaggggtca

SEQ ID NO: 2002595 - DNA, 25 bp, Homo sapien
tgatgacactagctgctgcaatgtt

SEQ ID NO: 2002596 - DNA, 25 bp, Homo sapien
taaggggtcaaatcccacagctctg

SEQ ID NO: 2002597 - DNA, 25 bp, Homo sapien
gatattcttgctttccctcggccag

SEQ ID NO: 2002598 - DNA, 25 bp, Homo sapien
tcatgagagttcgaatagagagtgt

SEQ ID NO: 2002599 - DNA, 25 bp, Homo sapien
cctcggccagaagaatcattctctt

SEQ ID NO: 2002600 - DNA, 25 bp, Homo sapien
ccctgactcagctcgcaagacgttt

SEQ ID NO: 2002601 - DNA, 25 bp, Homo sapien
gttcagtaagatcaccgtgactcgt

SEQ ID NO: 2002602 - DNA, 25 bp, Homo sapien
gaagtggcttgaaaagtccctgttc

SEQ ID NO: 2002603 - DNA, 25 bp, Homo sapien
cgtgactcgtagaaccttcacagct

SEQ ID NO: 2002604 - DNA, 25 bp, Homo sapien
tcggcagtgccgtaaatgaagtggc

SEQ ID NO: 2002605 - DNA, 25 bp, Homo sapien
ccaccagctggttatgacgatagtc

SEQ ID NO: 2002606 - DNA, 25 bp, Homo sapien
aatgacctctgagcacaagtctcgg

SEQ ID NO: 2002607 - DNA, 25 bp, Homo sapien
ggaaagaagtgccttggccaccagc

SEQ ID NO: 2002608 - DNA, 25 bp, Homo sapien
cagttcatgagaatgggcccagtct

SEQ ID NO: 2002609 - DNA, 25 bp, Homo sapien
tcctcaacaaagcaggctccacata

SEQ ID NO: 2002610 - DNA, 25 bp, Homo sapien
cacataatttatcccctgaagaacc

SEQ ID NO: 2002611 - DNA, 25 bp, Homo sapien
ctcaacaaagcaggctccacataat

SEQ ID NO: 2002612 - DNA, 25 bp, Homo sapien
ctccacataatttatcccctgaaga

SEQ ID NO: 2002613 - DNA, 25 bp, Homo sapien
tttactgctggtatagggtgcctca

SEQ ID NO: 2002614 - DNA, 25 bp, Homo sapien
caaaagtacattctaagcagggtgc

SEQ ID NO: 2002615 - DNA, 25 bp, Homo sapien
gatacatgctcaaaattcccctggg

SEQ ID NO: 2002616 - DNA, 25 bp, Homo sapien
ttgctatagtagctctggccccagg

SEQ ID NO: 2002617 - DNA, 25 bp, Homo sapien
aattctcgaattcctcttggccctc

SEQ ID NO: 2002618 - DNA, 25 bp, Homo sapien
tctcctgttcgtggtttattacact

SEQ ID NO: 2002619 - DNA, 25 bp, Homo sapien
tactcagagaaatgttctgactttc

SEQ ID NO: 2002620 - DNA, 25 bp, Homo sapien
ccttgggaagcccagatccctcaca

SEQ ID NO: 2002621 - DNA, 25 bp, Homo sapien
ctgtgcagccaggaatctcccgcag

SEQ ID NO: 2002622 - DNA, 25 bp, Homo sapien
taaggaggacgaccctgtgcagcca

SEQ ID NO: 2002623 - DNA, 25 bp, Homo sapien
cagccaggaatctcccgcagcagaa

SEQ ID NO: 2002624 - DNA, 25 bp, Homo sapien
gagaggccactctaaggaggacgac

SEQ ID NO: 2002625 - DNA, 25 bp, Homo sapien
aactctgcgatcatcttgtctgagc

SEQ ID NO: 2002626 - DNA, 25 bp, Homo sapien
aagtcacctgcgctctcaccaatga

SEQ ID NO: 2002627 - DNA, 25 bp, Homo sapien
gacagctcaacttgcacaaggcctg

SEQ ID NO: 2002628 - DNA, 25 bp, Homo sapien
tcaccaatgatatcaacatccttgc

SEQ ID NO: 2002629 - DNA, 25 bp, Homo sapien
cctacatcataacagggttcgaggg

SEQ ID NO: 2002630 - DNA, 25 bp, Homo sapien
tacatcataacagggttcgagggag

SEQ ID NO: 2002631 - DNA, 25 bp, Homo sapien
ctcatgcatgagggtgaaaacccag

SEQ ID NO: 2002632 - DNA, 25 bp, Homo sapien
catgcatgagggtgaaaacccagtc

SEQ ID NO: 2002633 - DNA, 25 bp, Homo sapien
ctggagcctgcattgtttcctcttt

SEQ ID NO: 2002634 - DNA, 25 bp, Homo sapien
gagcctgcattgtttcctctttaaa

SEQ ID NO: 2002635 - DNA, 25 bp, Homo sapien
ttcctctttaaatgcttttatctgg

SEQ ID NO: 2002636 - DNA, 25 bp, Homo sapien
taaatgcttttatctggctccccat

SEQ ID NO: 2002637 - DNA, 25 bp, Homo sapien
ttaaagaagcgtaacatccaagcat

SEQ ID NO: 2002638 - DNA, 25 bp, Homo sapien
taacatccaagcatgcaggagccat

SEQ ID NO: 2002639 - DNA, 25 bp, Homo sapien
ccaagcatgcaggagccatgggaga

SEQ ID NO: 2002640 - DNA, 25 bp, Homo sapien
ctgctctttaaagaagcgtaacatc

SEQ ID NO: 2002641 - DNA, 25 bp, Homo sapien
gagctgcctgccaaacacttcctgt

SEQ ID NO: 2002642 - DNA, 25 bp, Homo sapien
tcagcgggacaggtttgctagattc

SEQ ID NO: 2002643 - DNA, 25 bp, Homo sapien
cagcgggacaggtttgctagattct

SEQ ID NO: 2002644 - DNA, 25 bp, Homo sapien
tgccaaacacttcctgtgaggaact

SEQ ID NO: 2002645 - DNA, 25 bp, Homo sapien
ggaccagtacagtgggcactttcag

SEQ ID NO: 2002646 - DNA, 25 bp, Homo sapien
ggcactaagtcagtccatgccaggg

SEQ ID NO: 2002647 - DNA, 25 bp, Homo sapien
ggccccagtgacaggtatccactaa

SEQ ID NO: 2002648 - DNA, 25 bp, Homo sapien
taagcatcatcaccagacacagttg

SEQ ID NO: 2002649 - DNA, 25 bp, Homo sapien
tgcacccctgcttcaatatttttaa

SEQ ID NO: 2002650 - DNA, 25 bp, Homo sapien
ggatgcacccctgcttcaatatttt

SEQ ID NO: 2002651 - DNA, 25 bp, Homo sapien
atgcacccctgcttcaatattttta

SEQ ID NO: 2002652 - DNA, 25 bp, Homo sapien
gatgcacccctgcttcaatattttt

SEQ ID NO: 2002653 - DNA, 25 bp, Homo sapien
cctctctaagggtggagaaggacat

SEQ ID NO: 2002654 - DNA, 25 bp, Homo sapien
acttggtacctctctaagggtggag

SEQ ID NO: 2002655 - DNA, 25 bp, Homo sapien
caatctccactatcttgatgtatga

SEQ ID NO: 2002656 - DNA, 25 bp, Homo sapien
ggagtcagcaaacttggtacctctc

SEQ ID NO: 2002657 - DNA, 25 bp, Homo sapien
atccatccacccatctatccagatt

SEQ ID NO: 2002658 - DNA, 25 bp, Homo sapien
catccatccacccatctatccagat

SEQ ID NO: 2002659 - DNA, 25 bp, Homo sapien
catccacccatctatccagattcat

SEQ ID NO: 2002660 - DNA, 25 bp, Homo sapien
tccatccacccatctatccagattc

SEQ ID NO: 2002661 - DNA, 25 bp, Homo sapien
ccacatacaggaaacggcagatttc

SEQ ID NO: 2002662 - DNA, 25 bp, Homo sapien
cacaggttttcctctgccggcaaac

SEQ ID NO: 2002663 - DNA, 25 bp, Homo sapien
aacacaggttttcctctgccggcaa

SEQ ID NO: 2002664 - DNA, 25 bp, Homo sapien
gaaacggcagatttctggcctttca

SEQ ID NO: 2002665 - DNA, 25 bp, Homo sapien
cataggcccattgaatatagaagga

SEQ ID NO: 2002666 - DNA, 25 bp, Homo sapien
aggggctccagccaagcttcaggga

SEQ ID NO: 2002667 - DNA, 25 bp, Homo sapien
taaggtgcactgagggcaagaccag

SEQ ID NO: 2002668 - DNA, 25 bp, Homo sapien
cagatactgacttagacctccatag

SEQ ID NO: 2002669 - DNA, 25 bp, Homo sapien
tcattgttgactgggctaggtggaa

SEQ ID NO: 2002670 - DNA, 25 bp, Homo sapien
gactaagttggaaagatgctcccca

SEQ ID NO: 2002671 - DNA, 25 bp, Homo sapien
gaaacgccgattccctgcaaatctg

SEQ ID NO: 2002672 - DNA, 25 bp, Homo sapien
gaaacagcgccatctagcagccttt

SEQ ID NO: 2002673 - DNA, 25 bp, Homo sapien
tggctgatacagtggacattaattg

SEQ ID NO: 2002674 - DNA, 25 bp, Homo sapien
aacatattttctgccggctttggct

SEQ ID NO: 2002675 - DNA, 25 bp, Homo sapien
tctgtagtttctggagtataacata

SEQ ID NO: 2002676 - DNA, 25 bp, Homo sapien
ccggctttggctgatacagtggaca

SEQ ID NO: 2002677 - DNA, 25 bp, Homo sapien
atgcagcatgttagtgatgccagca

SEQ ID NO: 2002678 - DNA, 25 bp, Homo sapien
gatgcagcatgttagtgatgccagc

SEQ ID NO: 2002679 - DNA, 25 bp, Homo sapien
tgcagcatgttagtgatgccagcag

SEQ ID NO: 2002680 - DNA, 25 bp, Homo sapien
actatctccagactcagtgtgccat

SEQ ID NO: 2002681 - DNA, 25 bp, Homo sapien
cagagtagacgtcagcagtgcaggt

SEQ ID NO: 2002682 - DNA, 25 bp, Homo sapien
agtgcaggtatcaaagctggacttc

SEQ ID NO: 2002683 - DNA, 25 bp, Homo sapien
tgggagtgaatacaaaaggcacttc

SEQ ID NO: 2002684 - DNA, 25 bp, Homo sapien
aaactgttagaatatgggcctctgc

SEQ ID NO: 2002685 - DNA, 25 bp, Homo sapien
tagcgaacagtactgtaagccaaac

SEQ ID NO: 2002686 - DNA, 25 bp, Homo sapien
gatttacatatctctgggctgcaag

SEQ ID NO: 2002687 - DNA, 25 bp, Homo sapien
taccatgctcggctttgaagccttc

SEQ ID NO: 2002688 - DNA, 25 bp, Homo sapien
gaatgacatcttctagagagttcac

SEQ ID NO: 2002689 - DNA, 25 bp, Homo sapien
gggctggagataaagttctgagtct

SEQ ID NO: 2002690 - DNA, 25 bp, Homo sapien
cggaccaaggagcaagcgtttctga

SEQ ID NO: 2002691 - DNA, 25 bp, Homo sapien
tgcccagggacatcactctgctagg

SEQ ID NO: 2002692 - DNA, 25 bp, Homo sapien
gtagctgaggcagtggtcttgcaaa

SEQ ID NO: 2002693 - DNA, 25 bp, Homo sapien
gtttgataaggccaccattgaagca

SEQ ID NO: 2002694 - DNA, 25 bp, Homo sapien
gaagcaagcagttcttgacaaggca

SEQ ID NO: 2002695 - DNA, 25 bp, Homo sapien
tggcaacaataaggcactaactgca

SEQ ID NO: 2002696 - DNA, 25 bp, Homo sapien
agccttggggttgcaggtccggcag

SEQ ID NO: 2002697 - DNA, 25 bp, Homo sapien
acactgaagccactgacagggcagg

SEQ ID NO: 2002698 - DNA, 25 bp, Homo sapien
acagaggttctcagcagaggccaga

SEQ ID NO: 2002699 - DNA, 25 bp, Homo sapien
agaggccagacttgagagagctgca

SEQ ID NO: 2002700 - DNA, 25 bp, Homo sapien
tcttcgcaaagggacagattttcct

SEQ ID NO: 2002701 - DNA, 25 bp, Homo sapien
aaagcgtttctgtctagcagctgcc

SEQ ID NO: 2002702 - DNA, 25 bp, Homo sapien
tcagacaagctcctcggtgagggaa

SEQ ID NO: 2002703 - DNA, 25 bp, Homo sapien
agatacggcttagatccaggccctg

SEQ ID NO: 2002704 - DNA, 25 bp, Homo sapien
ggtagttgccttagtcctcgccctc

SEQ ID NO: 2002705 - DNA, 25 bp, Homo sapien
aagacagtgacaccgggatagctgg

SEQ ID NO: 2002706 - DNA, 25 bp, Homo sapien
tgaacagcagttgatacaagacagt

SEQ ID NO: 2002707 - DNA, 25 bp, Homo sapien
gatcatctgctgttgctcatactcc

SEQ ID NO: 2002708 - DNA, 25 bp, Homo sapien
aaagctgcctgacatatggctctca

SEQ ID NO: 2002709 - DNA, 25 bp, Homo sapien
tgaaactctttaacctgccatgcaa

SEQ ID NO: 2002710 - DNA, 25 bp, Homo sapien
cgcgcccagctgaactgaaactctt

SEQ ID NO: 2002711 - DNA, 25 bp, Homo sapien
gatggttgcaatctccaatctcctg

SEQ ID NO: 2002712 - DNA, 25 bp, Homo sapien
ccacatccagtgtcgtaaacaaaga

SEQ ID NO: 2002713 - DNA, 25 bp, Homo sapien
tagtatctgctctcctgggcatatc

SEQ ID NO: 2002714 - DNA, 25 bp, Homo sapien
aattctggatgaggtccctgtcccc

SEQ ID NO: 2002715 - DNA, 25 bp, Homo sapien
tctgtgacagcttctgccagcatct

SEQ ID NO: 2002716 - DNA, 25 bp, Homo sapien
tttcttcaggattacccaagaggga

SEQ ID NO: 2002717 - DNA, 25 bp, Homo sapien
accattacttttgtccatttaagca

SEQ ID NO: 2002718 - DNA, 25 bp, Homo sapien
tcttcaggattacccaagagggagg

SEQ ID NO: 2002719 - DNA, 25 bp, Homo sapien
gtccatttaagcatggtttcttcag

SEQ ID NO: 2002720 - DNA, 25 bp, Homo sapien
agccttatggcaagagaaggcacag

SEQ ID NO: 2002721 - DNA, 25 bp, Homo sapien
gccttatggcaagagaaggcacaga

SEQ ID NO: 2002722 - DNA, 25 bp, Homo sapien
cccaattttctgggcgagctctggt

SEQ ID NO: 2002723 - DNA, 25 bp, Homo sapien
caattttctgggcgagctctggtcc

SEQ ID NO: 2002724 - DNA, 25 bp, Homo sapien
ccaattttctgggcgagctctggtc

SEQ ID NO: 2002725 - DNA, 25 bp, Homo sapien
aaggcatcagttcaactgggcatag

SEQ ID NO: 2002726 - DNA, 25 bp, Homo sapien
tggacttggttgttaaaggcatcag

SEQ ID NO: 2002727 - DNA, 25 bp, Homo sapien
gagatagctactggacttggttgtt

SEQ ID NO: 2002728 - DNA, 25 bp, Homo sapien
taggcatagggcaggcataagcagc

SEQ ID NO: 2002729 - DNA, 25 bp, Homo sapien
aaagccaagtgagtggtgatttctc

SEQ ID NO: 2002730 - DNA, 25 bp, Homo sapien
tctgaaaaagcctagtactaccagg

SEQ ID NO: 2002731 - DNA, 25 bp, Homo sapien
gggtgggtgccaacaagtctgaaaa

SEQ ID NO: 2002732 - DNA, 25 bp, Homo sapien
ctctactagctcttgatcagggtgg

SEQ ID NO: 2002733 - DNA, 25 bp, Homo sapien
aggagcctgtgccaaagtgttcctg

SEQ ID NO: 2002734 - DNA, 25 bp, Homo sapien
ggagcctgtgccaaagtgttcctgc

SEQ ID NO: 2002735 - DNA, 25 bp, Homo sapien
tgaccatcggctagtggatggacgt

SEQ ID NO: 2002736 - DNA, 25 bp, Homo sapien
tccaacctgctgatgaccatcggct

SEQ ID NO: 2002737 - DNA, 25 bp, Homo sapien
cagagcctgctcattaggccctttc

SEQ ID NO: 2002738 - DNA, 25 bp, Homo sapien
gatggacgtggaggactccagccac

SEQ ID NO: 2002739 - DNA, 25 bp, Homo sapien
gatagcagccaacatacctttcttc

SEQ ID NO: 2002740 - DNA, 25 bp, Homo sapien
agatagcagccaacatacctttctt

SEQ ID NO: 2002741 - DNA, 25 bp, Homo sapien
catgccacatgtagatagcagccaa

SEQ ID NO: 2002742 - DNA, 25 bp, Homo sapien
cacccatgccacatgtagatagcag

SEQ ID NO: 2002743 - DNA, 25 bp, Homo sapien
tattcttctggtgtccggtacagac

SEQ ID NO: 2002744 - DNA, 25 bp, Homo sapien
ggtacagaccagtgcacaatcagtg

SEQ ID NO: 2002745 - DNA, 25 bp, Homo sapien
tcagtggatgggctagaagaaattt

SEQ ID NO: 2002746 - DNA, 25 bp, Homo sapien
cacaatcagtggatgggctagaaga

SEQ ID NO: 2002747 - DNA, 25 bp, Homo sapien
tgcttcatcagacttccattgtcca

SEQ ID NO: 2002748 - DNA, 25 bp, Homo sapien
tgtccaggcaacagacaatactctg

SEQ ID NO: 2002749 - DNA, 25 bp, Homo sapien
gaaaatcactacctgctgatagcca

SEQ ID NO: 2002750 - DNA, 25 bp, Homo sapien
ctctgaatgagtccaaaagaaaatc

SEQ ID NO: 2002751 - DNA, 25 bp, Homo sapien
tcaacgattttcaaaattggttcca

SEQ ID NO: 2002752 - DNA, 25 bp, Homo sapien
caacgattttcaaaattggttccat

SEQ ID NO: 2002753 - DNA, 25 bp, Homo sapien
tattgtgattatctcatccttgctt

SEQ ID NO: 2002754 - DNA, 25 bp, Homo sapien
ctctctgacagggtgaagtttcaac

SEQ ID NO: 2002755 - DNA, 25 bp, Homo sapien
ctaatggtagcaagcagcctctctg

SEQ ID NO: 2002756 - DNA, 25 bp, Homo sapien
aaagctctaatggtagcaagcagcc

SEQ ID NO: 2002757 - DNA, 25 bp, Homo sapien
tattctgtaaaacggacccttggca

SEQ ID NO: 2002758 - DNA, 25 bp, Homo sapien
aagttcccaacatccccttgccttg

SEQ ID NO: 2002759 - DNA, 25 bp, Homo sapien
tggcaccagtaatgtgtggctccgt

SEQ ID NO: 2002760 - DNA, 25 bp, Homo sapien
tgttgctgatcagtgcatatgtctg

SEQ ID NO: 2002761 - DNA, 25 bp, Homo sapien
ccccagttgtacaaacacagctttt

SEQ ID NO: 2002762 - DNA, 25 bp, Homo sapien
aacaccagttagttgcactgaaatt

SEQ ID NO: 2002763 - DNA, 25 bp, Homo sapien
gactctgccccagttgtacaaacac

SEQ ID NO: 2002764 - DNA, 25 bp, Homo sapien
aggaacaaacaccagttagttgcac

SEQ ID NO: 2002765 - DNA, 25 bp, Homo sapien
ggctccagtattagcttcaattcta

SEQ ID NO: 2002766 - DNA, 25 bp, Homo sapien
taagacatagagtcacggaaattgg

SEQ ID NO: 2002767 - DNA, 25 bp, Homo sapien
gttatatttagagttccatcgaacc

SEQ ID NO: 2002768 - DNA, 25 bp, Homo sapien
cgaacctgtctagtgatgtcaacct

SEQ ID NO: 2002769 - DNA, 25 bp, Homo sapien
gggacaaactgtgtcattccccaca

SEQ ID NO: 2002770 - DNA, 25 bp, Homo sapien
tgtgtcattccccacagtgctttgc

SEQ ID NO: 2002771 - DNA, 25 bp, Homo sapien
gtgtcattccccacagtgctttgcc

SEQ ID NO: 2002772 - DNA, 25 bp, Homo sapien
caaactgtgtcattccccacagtgc

SEQ ID NO: 2002773 - DNA, 25 bp, Homo sapien
agcaggttctgactctcatcctctg

SEQ ID NO: 2002774 - DNA, 25 bp, Homo sapien
gcaaattctggagctaggatggttg

SEQ ID NO: 2002775 - DNA, 25 bp, Homo sapien
caagcaggttctgactctcatcctc

SEQ ID NO: 2002776 - DNA, 25 bp, Homo sapien
gctaggatggttgcttctgctacca

SEQ ID NO: 2002777 - DNA, 25 bp, Homo sapien
tacagcagatgataaagaggaacac

SEQ ID NO: 2002778 - DNA, 25 bp, Homo sapien
ttacagcagatgataaagaggaaca

SEQ ID NO: 2002779 - DNA, 25 bp, Homo sapien
acagcagatgataaagaggaacact

SEQ ID NO: 2002780 - DNA, 25 bp, Homo sapien
caaaccgtagatattcccatgttgg

SEQ ID NO: 2002781 - DNA, 25 bp, Homo sapien
cacatgagctgaagccttttgagtc

SEQ ID NO: 2002782 - DNA, 25 bp, Homo sapien
agttattcgaggagtgttactgtcc

SEQ ID NO: 2002783 - DNA, 25 bp, Homo sapien
tcctgtgtagactgatcatagctgt

SEQ ID NO: 2002784 - DNA, 25 bp, Homo sapien
aagtctgctggctcgctgctcagag

SEQ ID NO: 2002785 - DNA, 25 bp, Homo sapien
aattgcctagctcattggaaaccag

SEQ ID NO: 2002786 - DNA, 25 bp, Homo sapien
gcttttgccccacctggtagcttga

SEQ ID NO: 2002787 - DNA, 25 bp, Homo sapien
gaatggctaggcttatgccctgaaa

SEQ ID NO: 2002788 - DNA, 25 bp, Homo sapien
gactcccagaatggattgacacttt

SEQ ID NO: 2002789 - DNA, 25 bp, Homo sapien
agactcccagaatggattgacactt

SEQ ID NO: 2002790 - DNA, 25 bp, Homo sapien
cagaatggattgacactttgccacc

SEQ ID NO: 2002791 - DNA, 25 bp, Homo sapien
tcccagaatggattgacactttgcc

SEQ ID NO: 2002792 - DNA, 25 bp, Homo sapien
ctttacacagccagcagttgatgtc

SEQ ID NO: 2002793 - DNA, 25 bp, Homo sapien
cagttgatgtcccaccctggccaga

SEQ ID NO: 2002794 - DNA, 25 bp, Homo sapien
tacacagccagcagttgatgtccca

SEQ ID NO: 2002795 - DNA, 25 bp, Homo sapien
acacagccagcagttgatgtcccac

SEQ ID NO: 2002796 - DNA, 25 bp, Homo sapien
taaaaaggcctatctcttcctcatc

SEQ ID NO: 2002797 - DNA, 25 bp, Homo sapien
tcagctgcagccatagcatctgggt

SEQ ID NO: 2002798 - DNA, 25 bp, Homo sapien
agctgcagccatagcatctgggtcc

SEQ ID NO: 2002799 - DNA, 25 bp, Homo sapien
tctgggtccattggaatggccagat

SEQ ID NO: 2002800 - DNA, 25 bp, Homo sapien
ttttatagataagcactcccagtcc

SEQ ID NO: 2002801 - DNA, 25 bp, Homo sapien
tataggttgggagcatatccctcgg

SEQ ID NO: 2002802 - DNA, 25 bp, Homo sapien
caagtgtcagctattgcccagagac

SEQ ID NO: 2002803 - DNA, 25 bp, Homo sapien
catcatgaggcacaagcatggtgac

SEQ ID NO: 2002804 - DNA, 25 bp, Homo sapien
ccttgccaagtgatgcaatattgta

SEQ ID NO: 2002805 - DNA, 25 bp, Homo sapien
taggcttttcttatgatagtgctcc

SEQ ID NO: 2002806 - DNA, 25 bp, Homo sapien
agtaggcttgtgctctaggcttttc

SEQ ID NO: 2002807 - DNA, 25 bp, Homo sapien
taaaagcatattgtgttaacactgc

SEQ ID NO: 2002808 - DNA, 25 bp, Homo sapien
taatgttgagggctcttagatccac

SEQ ID NO: 2002809 - DNA, 25 bp, Homo sapien
ccgatggatgttgtctaatgttgag

SEQ ID NO: 2002810 - DNA, 25 bp, Homo sapien
tcatcagcccaaccagggccacttt

SEQ ID NO: 2002811 - DNA, 25 bp, Homo sapien
cactttcccaagatccgatggatgt

SEQ ID NO: 2002812 - DNA, 25 bp, Homo sapien
gttggggtggtgaagtccttccaga

SEQ ID NO: 2002813 - DNA, 25 bp, Homo sapien
ggttgcttgtacacatcagcatcca

SEQ ID NO: 2002814 - DNA, 25 bp, Homo sapien
tggttgcttgtacacatcagcatcc

SEQ ID NO: 2002815 - DNA, 25 bp, Homo sapien
gttgcttgtacacatcagcatccat

SEQ ID NO: 2002816 - DNA, 25 bp, Homo sapien
ttcaacttggtcactagttctggct

SEQ ID NO: 2002817 - DNA, 25 bp, Homo sapien
tgacatgtccagtaacgcagttctg

SEQ ID NO: 2002818 - DNA, 25 bp, Homo sapien
ctctaactggtcaccaaacactttt

SEQ ID NO: 2002819 - DNA, 25 bp, Homo sapien
tgaactatcctctaactggtcacca

SEQ ID NO: 2002820 - DNA, 25 bp, Homo sapien
gttccacagggctctacattgagtt

SEQ ID NO: 2002821 - DNA, 25 bp, Homo sapien
caggagagctatacttccagcattc

SEQ ID NO: 2002822 - DNA, 25 bp, Homo sapien
caggcctcttgaactttagatatgt

SEQ ID NO: 2002823 - DNA, 25 bp, Homo sapien
tcaggctacttccacaggcctcttg

SEQ ID NO: 2002824 - DNA, 25 bp, Homo sapien
ttgtcttcacctggataacctgatc

SEQ ID NO: 2002825 - DNA, 25 bp, Homo sapien
ggtgtagatcaaattagcatgctgc

SEQ ID NO: 2002826 - DNA, 25 bp, Homo sapien
caattttcctgctaaagtgactcca

SEQ ID NO: 2002827 - DNA, 25 bp, Homo sapien
gagtcaggggtgtagatcaaattag

SEQ ID NO: 2002828 - DNA, 25 bp, Homo sapien
cagattgtatacttcagagagtcag

SEQ ID NO: 2002829 - DNA, 25 bp, Homo sapien
cactgcttaacagagtcctccagag

SEQ ID NO: 2002830 - DNA, 25 bp, Homo sapien
tgatatggccggctgagtcagacca

SEQ ID NO: 2002831 - DNA, 25 bp, Homo sapien
cattatcccattggcatctctcaag

SEQ ID NO: 2002832 - DNA, 25 bp, Homo sapien
tcaagaactggatcaatgtcaaggt

SEQ ID NO: 2002833 - DNA, 25 bp, Homo sapien
cagcattgcaagttcagggatactg

SEQ ID NO: 2002834 - DNA, 25 bp, Homo sapien
cagtgctcagtgtgtttgctttagt

SEQ ID NO: 2002835 - DNA, 25 bp, Homo sapien
attgcaagttcagggatactgctcc

SEQ ID NO: 2002836 - DNA, 25 bp, Homo sapien
gcattgcaagttcagggatactgct

SEQ ID NO: 2002837 - DNA, 25 bp, Homo sapien
gagatccacagccaacactgattcc

SEQ ID NO: 2002838 - DNA, 25 bp, Homo sapien
tatctatgataccattatccctctc

SEQ ID NO: 2002839 - DNA, 25 bp, Homo sapien
gatccacagccaacactgattcctg

SEQ ID NO: 2002840 - DNA, 25 bp, Homo sapien
cactttcagtatctatgataccatt

SEQ ID NO: 2002841 - DNA, 25 bp, Homo sapien
tactcttgctaatggtagtgaagtg

SEQ ID NO: 2002842 - DNA, 25 bp, Homo sapien
tggctgcccctttactcttgctaat

SEQ ID NO: 2002843 - DNA, 25 bp, Homo sapien
ggacagggttgcaaagcctccctct

SEQ ID NO: 2002844 - DNA, 25 bp, Homo sapien
ctacttgttggacagggttgcaaag

SEQ ID NO: 2002845 - DNA, 25 bp, Homo sapien
tcctcagtatatgtgtgtgcctgaa

SEQ ID NO: 2002846 - DNA, 25 bp, Homo sapien
cctcagtatatgtgtgtgcctgaag

SEQ ID NO: 2002847 - DNA, 25 bp, Homo sapien
tgcctgaagcaggtgattgcaggtc

SEQ ID NO: 2002848 - DNA, 25 bp, Homo sapien
gtgtgtgcctgaagcaggtgattgc

SEQ ID NO: 2002849 - DNA, 25 bp, Homo sapien
agtttcttagtctgaactgtcatgc

SEQ ID NO: 2002850 - DNA, 25 bp, Homo sapien
actgtcatgcctaataactttctta

SEQ ID NO: 2002851 - DNA, 25 bp, Homo sapien
tcccacagccaagcctagtttctta

SEQ ID NO: 2002852 - DNA, 25 bp, Homo sapien
tcttagttcaggtggctttttcttc

SEQ ID NO: 2002853 - DNA, 25 bp, Homo sapien
gctctccagctgctataagccccat

SEQ ID NO: 2002854 - DNA, 25 bp, Homo sapien
atcaaacctctggtgctctccagct

SEQ ID NO: 2002855 - DNA, 25 bp, Homo sapien
ctctggtgctctccagctgctataa

SEQ ID NO: 2002856 - DNA, 25 bp, Homo sapien
ctcccatcaaacctctggtgctctc

SEQ ID NO: 2002857 - DNA, 25 bp, Homo sapien
tgacattagcttccgtactttggag

SEQ ID NO: 2002858 - DNA, 25 bp, Homo sapien
tagcttccgtactttggagtgaaaa

SEQ ID NO: 2002859 - DNA, 25 bp, Homo sapien
cattagcttccgtactttggagtga

SEQ ID NO: 2002860 - DNA, 25 bp, Homo sapien
aactgacattagcttccgtactttg

SEQ ID NO: 2002861 - DNA, 25 bp, Homo sapien
gctcaagacctgctgatagctggaa

SEQ ID NO: 2002862 - DNA, 25 bp, Homo sapien
ccagcgtgcagataaggttgggacc

SEQ ID NO: 2002863 - DNA, 25 bp, Homo sapien
tcatccttacacaataccagccggt

SEQ ID NO: 2002864 - DNA, 25 bp, Homo sapien
tattggtggctacactcggatctct

SEQ ID NO: 2002865 - DNA, 25 bp, Homo sapien
tcccaaggaagaattagaaactgac

SEQ ID NO: 2002866 - DNA, 25 bp, Homo sapien
ttaccacacctcctccataaaaatc

SEQ ID NO: 2002867 - DNA, 25 bp, Homo sapien
acacctcctccataaaaatccctct

SEQ ID NO: 2002868 - DNA, 25 bp, Homo sapien
ccacacctcctccataaaaatccct

SEQ ID NO: 2002869 - DNA, 25 bp, Homo sapien
taccacacctcctccataaaaatcc

SEQ ID NO: 2002870 - DNA, 25 bp, Homo sapien
cccaaggtaagcaatgagtcctccc

SEQ ID NO: 2002871 - DNA, 25 bp, Homo sapien
tccccaaggtaagcaatgagtcctc

SEQ ID NO: 2002872 - DNA, 25 bp, Homo sapien
ccccaaggtaagcaatgagtcctcc

SEQ ID NO: 2002873 - DNA, 25 bp, Homo sapien
gacatccgagtgtctgttccacagc

SEQ ID NO: 2002874 - DNA, 25 bp, Homo sapien
gtctgttccacagcccaatacaatc

SEQ ID NO: 2002875 - DNA, 25 bp, Homo sapien
tgactgacatccgagtgtctgttcc

SEQ ID NO: 2002876 - DNA, 25 bp, Homo sapien
gaggccaactgagatggtgactgac

SEQ ID NO: 2002877 - DNA, 25 bp, Homo sapien
caatctcgtctccatattgccagtg

SEQ ID NO: 2002878 - DNA, 25 bp, Homo sapien
tcactcgatcatcagtctgcatatt

SEQ ID NO: 2002879 - DNA, 25 bp, Homo sapien
tggcttcctcactcgatcatcagtc

SEQ ID NO: 2002880 - DNA, 25 bp, Homo sapien
ctctaatgttggttcccatttctcc

SEQ ID NO: 2002881 - DNA, 25 bp, Homo sapien
atgctccccacagcctacagtagaa

SEQ ID NO: 2002882 - DNA, 25 bp, Homo sapien
cagcctacagtagaagactggtgtt

SEQ ID NO: 2002883 - DNA, 25 bp, Homo sapien
ggtgtttagcctccactcccaacat

SEQ ID NO: 2002884 - DNA, 25 bp, Homo sapien
tagaagactggtgtttagcctccac

SEQ ID NO: 2002885 - DNA, 25 bp, Homo sapien
ggagacatttggagactttccaaat

SEQ ID NO: 2002886 - DNA, 25 bp, Homo sapien
aactctgcagacttcccgctctact

SEQ ID NO: 2002887 - DNA, 25 bp, Homo sapien
actctgcagacttcccgctctactt

SEQ ID NO: 2002888 - DNA, 25 bp, Homo sapien
ctctgcagacttcccgctctacttt

SEQ ID NO: 2002889 - DNA, 25 bp, Homo sapien
cacagacgtcttttagtctttcctt

SEQ ID NO: 2002890 - DNA, 25 bp, Homo sapien
tgttgcagttgttgtctcaatacca

SEQ ID NO: 2002891 - DNA, 25 bp, Homo sapien
atcctctatcctccaatgctgcaag

SEQ ID NO: 2002892 - DNA, 25 bp, Homo sapien
tgttggaagcgtctcatgggttttg

SEQ ID NO: 2002893 - DNA, 25 bp, Homo sapien
tgcccggtgattcaggttgtaatga

SEQ ID NO: 2002894 - DNA, 25 bp, Homo sapien
aagtgcccggtgattcaggttgtaa

SEQ ID NO: 2002895 - DNA, 25 bp, Homo sapien
agtgcccggtgattcaggttgtaat

SEQ ID NO: 2002896 - DNA, 25 bp, Homo sapien
gcccggtgattcaggttgtaatgag

SEQ ID NO: 2002897 - DNA, 25 bp, Homo sapien
atcacttcattcttttcagggaaac

SEQ ID NO: 2002898 - DNA, 25 bp, Homo sapien
gcgaatcacttcattcttttcaggg

SEQ ID NO: 2002899 - DNA, 25 bp, Homo sapien
tcagcgaatcacttcattcttttca

SEQ ID NO: 2002900 - DNA, 25 bp, Homo sapien
gaatcacttcattcttttcagggaa

SEQ ID NO: 2002901 - DNA, 25 bp, Homo sapien
attttggggacattctggggagcct

SEQ ID NO: 2002902 - DNA, 25 bp, Homo sapien
caattttggggacattctggggagc

SEQ ID NO: 2002903 - DNA, 25 bp, Homo sapien
tcaattttggggacattctggggag

SEQ ID NO: 2002904 - DNA, 25 bp, Homo sapien
ttttggggacattctggggagcctc

SEQ ID NO: 2002905 - DNA, 25 bp, Homo sapien
acctactatgtactctaatgaaatg

SEQ ID NO: 2002906 - DNA, 25 bp, Homo sapien
gcattacttagaagaacctactatg

SEQ ID NO: 2002907 - DNA, 25 bp, Homo sapien
cattaaagcaataactaagaattac

SEQ ID NO: 2002908 - DNA, 25 bp, Homo sapien
aatgaaatgtaagccaatcatattc

SEQ ID NO: 2002909 - DNA, 25 bp, Homo sapien
ctgttttttcttcgaaggatttcat

SEQ ID NO: 2002910 - DNA, 25 bp, Homo sapien
tctgttttttcttcgaaggatttca

SEQ ID NO: 2002911 - DNA, 25 bp, Homo sapien
ttttcttcgaaggatttcatttcca

SEQ ID NO: 2002912 - DNA, 25 bp, Homo sapien
cttcgaaggatttcatttccagttc

SEQ ID NO: 2002913 - DNA, 25 bp, Homo sapien
gctccactgtgttactgtaaattct

SEQ ID NO: 2002914 - DNA, 25 bp, Homo sapien
tccactgtgttactgtaaattcttt

SEQ ID NO: 2002915 - DNA, 25 bp, Homo sapien
tgctccactgtgttactgtaaattc

SEQ ID NO: 2002916 - DNA, 25 bp, Homo sapien
ttttgctccactgtgttactgtaaa

SEQ ID NO: 2002917 - DNA, 25 bp, Homo sapien
tcactggaaccattgaagtcttcag

SEQ ID NO: 2002918 - DNA, 25 bp, Homo sapien
tatggagtcctcttctgtgaatgct

SEQ ID NO: 2002919 - DNA, 25 bp, Homo sapien
gataaatgctgccagtgacctctaa

SEQ ID NO: 2002920 - DNA, 25 bp, Homo sapien
tcattgtcaacaaacactatggagt

SEQ ID NO: 2002921 - DNA, 25 bp, Homo sapien
gctcctgaagtcctgagtcaaggca

SEQ ID NO: 2002922 - DNA, 25 bp, Homo sapien
cctgctttggagtcttctgggtctg

SEQ ID NO: 2002923 - DNA, 25 bp, Homo sapien
catctcacatttgaagagagtgggc

SEQ ID NO: 2002924 - DNA, 25 bp, Homo sapien
tatgcggctgcatgataaattagca

SEQ ID NO: 2002925 - DNA, 25 bp, Homo sapien
cagtttagtcctcggtatgtccagg

SEQ ID NO: 2002926 - DNA, 25 bp, Homo sapien
tacggcatcttttgtaagcagagaa

SEQ ID NO: 2002927 - DNA, 25 bp, Homo sapien
gaatctgggactgaatacctgtgtt

SEQ ID NO: 2002928 - DNA, 25 bp, Homo sapien
aatggaaaacaccttcagaagctcg

SEQ ID NO: 2002929 - DNA, 25 bp, Homo sapien
cctgtgtttcaaatggagtccttgc

SEQ ID NO: 2002930 - DNA, 25 bp, Homo sapien
attcggtccaagagatcccgagccc

SEQ ID NO: 2002931 - DNA, 25 bp, Homo sapien
aaaagttccattcggtccaagagat

SEQ ID NO: 2002932 - DNA, 25 bp, Homo sapien
taactcaaggaaacggagggagcca

SEQ ID NO: 2002933 - DNA, 25 bp, Homo sapien
tccattcggtccaagagatcccgag

SEQ ID NO: 2002934 - DNA, 25 bp, Homo sapien
cgccgagccccttcggcttcctcct

SEQ ID NO: 2002935 - DNA, 25 bp, Homo sapien
cgcgccgagccccttcggcttcctc

SEQ ID NO: 2002936 - DNA, 25 bp, Homo sapien
cacacgcgccgagccccttcggctt

SEQ ID NO: 2002937 - DNA, 25 bp, Homo sapien
cacacacgcgccgagccccttcggc

SEQ ID NO: 2002938 - DNA, 25 bp, Homo sapien
agatgcgcgctgaacaaggaagctc

SEQ ID NO: 2002939 - DNA, 25 bp, Homo sapien
ggaagctccgaagagtacaaaagcc

SEQ ID NO: 2002940 - DNA, 25 bp, Homo sapien
tgggtacccaaacacatctaagact

SEQ ID NO: 2002941 - DNA, 25 bp, Homo sapien
cggttacttgaagatgcgcgctgaa

SEQ ID NO: 2002942 - DNA, 25 bp, Homo sapien
tctagcatgctctctgtatttaccg

SEQ ID NO: 2002943 - DNA, 25 bp, Homo sapien
tgctctctgtatttaccgaagtctg

SEQ ID NO: 2002944 - DNA, 25 bp, Homo sapien
tctgtatttaccgaagtctgttcca

SEQ ID NO: 2002945 - DNA, 25 bp, Homo sapien
taccgaagtctgttccattatctcc

SEQ ID NO: 2002946 - DNA, 25 bp, Homo sapien
caagataatggtgtcaaggacaggt

SEQ ID NO: 2002947 - DNA, 25 bp, Homo sapien
tcatcctctaagtgatcccaaagct

SEQ ID NO: 2002948 - DNA, 25 bp, Homo sapien
aatcaaattcagtgcatgtgcagct

SEQ ID NO: 2002949 - DNA, 25 bp, Homo sapien
caaagctgccccgaggtatacaaat

SEQ ID NO: 2002950 - DNA, 25 bp, Homo sapien
agtttctcttgacatttgcccataa

SEQ ID NO: 2002951 - DNA, 25 bp, Homo sapien
gtttctcttgacatttgcccataag

SEQ ID NO: 2002952 - DNA, 25 bp, Homo sapien
tctcttgacatttgcccataagcat

SEQ ID NO: 2002953 - DNA, 25 bp, Homo sapien
tcaacgctaaggtacaaagtttctc

SEQ ID NO: 2002954 - DNA, 25 bp, Homo sapien
ggctgataaaaacttatctcatatt

SEQ ID NO: 2002955 - DNA, 25 bp, Homo sapien
taaattaatttgtaggcctgagttg

SEQ ID NO: 2002956 - DNA, 25 bp, Homo sapien
tccacatcaggaattgtctttgcca

SEQ ID NO: 2002957 - DNA, 25 bp, Homo sapien
ttgtaggcctgagttgttttatggt

SEQ ID NO: 2002958 - DNA, 25 bp, Homo sapien
tccaggaaatgtacgaactgctgtt

SEQ ID NO: 2002959 - DNA, 25 bp, Homo sapien
aactgctgttgtaagtcagctgctt

SEQ ID NO: 2002960 - DNA, 25 bp, Homo sapien
tacgtagtgatatcctgtgcctgag

SEQ ID NO: 2002961 - DNA, 25 bp, Homo sapien
catgatacatcccaacagtccagga

SEQ ID NO: 2002962 - DNA, 25 bp, Homo sapien
gaggtggaaataacaataagtggac

SEQ ID NO: 2002963 - DNA, 25 bp, Homo sapien
tcatgtttctatgcaggatcctctc

SEQ ID NO: 2002964 - DNA, 25 bp, Homo sapien
cctctcactctaaatggaaataaaa

SEQ ID NO: 2002965 - DNA, 25 bp, Homo sapien
cagattatagttgaattcctaggaa

SEQ ID NO: 2002966 - DNA, 25 bp, Homo sapien
tttttcaatgaggattgttagccac

SEQ ID NO: 2002967 - DNA, 25 bp, Homo sapien
tctgcctttttcaatgaggattgtt

SEQ ID NO: 2002968 - DNA, 25 bp, Homo sapien
tgcctttttcaatgaggattgttag

SEQ ID NO: 2002969 - DNA, 25 bp, Homo sapien
cctttttcaatgaggattgttagcc

SEQ ID NO: 2002970 - DNA, 25 bp, Homo sapien
gcagggcttctctatcattgttttt

SEQ ID NO: 2002971 - DNA, 25 bp, Homo sapien
ttttctgcacttgtgtatacagccg

SEQ ID NO: 2002972 - DNA, 25 bp, Homo sapien
ctctgcagggcttctctatcattgt

SEQ ID NO: 2002973 - DNA, 25 bp, Homo sapien
tacagccgatagtgccctgcatagg

SEQ ID NO: 2002974 - DNA, 25 bp, Homo sapien
agccccgtgacactcagggatctat

SEQ ID NO: 2002975 - DNA, 25 bp, Homo sapien
cctcttgacttgttagagcaaaatc

SEQ ID NO: 2002976 - DNA, 25 bp, Homo sapien
acctcttgacttgttagagcaaaat

SEQ ID NO: 2002977 - DNA, 25 bp, Homo sapien
ccacctcttgacttgttagagcaaa

SEQ ID NO: 2002978 - DNA, 25 bp, Homo sapien
cacctcttgacttgttagagcaaaa

SEQ ID NO: 2002979 - DNA, 25 bp, Homo sapien
ggtgctccgtcactcacagatagaa

SEQ ID NO: 2002980 - DNA, 25 bp, Homo sapien
ttagaaggcctgtttggttcagcgg

SEQ ID NO: 2002981 - DNA, 25 bp, Homo sapien
gcagcgagactgatgtgcctcttag

SEQ ID NO: 2002982 - DNA, 25 bp, Homo sapien
ccatgggtcatctgatcgtttagaa

SEQ ID NO: 2002983 - DNA, 25 bp, Homo sapien
cacctgctttacccctgatccccat

SEQ ID NO: 2002984 - DNA, 25 bp, Homo sapien
cattgttacactgaagttctgattt

SEQ ID NO: 2002985 - DNA, 25 bp, Homo sapien
actgaagttctgatttttcaacttc

SEQ ID NO: 2002986 - DNA, 25 bp, Homo sapien
acactgaagttctgatttttcaact

SEQ ID NO: 2002987 - DNA, 25 bp, Homo sapien
tgaagttctgatttttcaacttctg

SEQ ID NO: 2002988 - DNA, 25 bp, Homo sapien
catttacttaagaaattgacttcaa

SEQ ID NO: 2002989 - DNA, 25 bp, Homo sapien
ggcaaacattttaatatctttacat

SEQ ID NO: 2002990 - DNA, 25 bp, Homo sapien
aaataaacacattcaaatcgtattt

SEQ ID NO: 2002991 - DNA, 25 bp, Homo sapien
ctttcataaccaaggcaaacatttt

SEQ ID NO: 2002992 - DNA, 25 bp, Homo sapien
tattggcaacaacggcagctcacgt

SEQ ID NO: 2002993 - DNA, 25 bp, Homo sapien
cagctcacgttcacccattgttgga

SEQ ID NO: 2002994 - DNA, 25 bp, Homo sapien
tattgcaaaacccagtattggcaac

SEQ ID NO: 2002995 - DNA, 25 bp, Homo sapien
tctgctccagatgtaaaagcatctt

SEQ ID NO: 2002996 - DNA, 25 bp, Homo sapien
gctgcattcttcgtcattactctga

SEQ ID NO: 2002997 - DNA, 25 bp, Homo sapien
ttactacaggttcacttcctttagc

SEQ ID NO: 2002998 - DNA, 25 bp, Homo sapien
ctgtgagcggaagctgcattcttcg

SEQ ID NO: 2002999 - DNA, 25 bp, Homo sapien
cgtcattactctgatatatatttac

SEQ ID NO: 2003000 - DNA, 25 bp, Homo sapien
cattgaaaccactaagaccggatga

SEQ ID NO: 2003001 - DNA, 25 bp, Homo sapien
tgaagccttcagtgtgggacctcct

SEQ ID NO: 2003002 - DNA, 25 bp, Homo sapien
taagctgtttgccaagactctgcag

SEQ ID NO: 2003003 - DNA, 25 bp, Homo sapien
gcaccatacacagtccagttcgaga

SEQ ID NO: 2003004 - DNA, 25 bp, Homo sapien
atattctgtagttaaaagggcaggg

SEQ ID NO: 2003005 - DNA, 25 bp, Homo sapien
cttgtcgatattctgtagttaaaag

SEQ ID NO: 2003006 - DNA, 25 bp, Homo sapien
tgtcgatattctgtagttaaaaggg

SEQ ID NO: 2003007 - DNA, 25 bp, Homo sapien
tcgatattctgtagttaaaagggca

SEQ ID NO: 2003008 - DNA, 25 bp, Homo sapien
acttgtcactagatccttgatcagc

SEQ ID NO: 2003009 - DNA, 25 bp, Homo sapien
tgaacttgtcactagatccttgatc

SEQ ID NO: 2003010 - DNA, 25 bp, Homo sapien
tgtcactagatccttgatcagcacc

SEQ ID NO: 2003011 - DNA, 25 bp, Homo sapien
tcatttgaacttgtcactagatcct

SEQ ID NO: 2003012 - DNA, 25 bp, Homo sapien
ggattggctatttgcaaccctgcta

SEQ ID NO: 2003013 - DNA, 25 bp, Homo sapien
tactgacttgtgctgtgtaggcaga

SEQ ID NO: 2003014 - DNA, 25 bp, Homo sapien
tacagagtatgaactcccgcctcgg

SEQ ID NO: 2003015 - DNA, 25 bp, Homo sapien
gatagacttcgcatgtggcagggca

SEQ ID NO: 2003016 - DNA, 25 bp, Homo sapien
agcagccaaatatcttcttcaagtg

SEQ ID NO: 2003017 - DNA, 25 bp, Homo sapien
gaataccccatcagggctcaggaag

SEQ ID NO: 2003018 - DNA, 25 bp, Homo sapien
ggttgggtagatgcatctaacactg

SEQ ID NO: 2003019 - DNA, 25 bp, Homo sapien
tctaacactgtttccctgagtaggc

SEQ ID NO: 2003020 - DNA, 25 bp, Homo sapien
aaatgccttcgggtaagtgggtgca

SEQ ID NO: 2003021 - DNA, 25 bp, Homo sapien
gaaacataaggccacaagatcctaa

SEQ ID NO: 2003022 - DNA, 25 bp, Homo sapien
gatcctaaatcgcagtaaatgcctt

SEQ ID NO: 2003023 - DNA, 25 bp, Homo sapien
gaagaaattaggagtgaaccagctg

SEQ ID NO: 2003024 - DNA, 25 bp, Homo sapien
cagccgtctatgatctatttttatg

SEQ ID NO: 2003025 - DNA, 25 bp, Homo sapien
cccagccgtctatgatctattttta

SEQ ID NO: 2003026 - DNA, 25 bp, Homo sapien
accacacccagccgtctatgatcta

SEQ ID NO: 2003027 - DNA, 25 bp, Homo sapien
cacacccagccgtctatgatctatt

SEQ ID NO: 2003028 - DNA, 25 bp, Homo sapien
atatgtaaacattaataagctcatt

SEQ ID NO: 2003029 - DNA, 25 bp, Homo sapien
catatgtaaacattaataagctcat

SEQ ID NO: 2003030 - DNA, 25 bp, Homo sapien
cgtaatatatatagggtgattcccc

SEQ ID NO: 2003031 - DNA, 25 bp, Homo sapien
tgacccctcctcatagtcaccactc

SEQ ID NO: 2003032 - DNA, 25 bp, Homo sapien
agttacccgtaatatatatagggtg

SEQ ID NO: 2003033 - DNA, 25 bp, Homo sapien
ttctctggaagttacccgtaatata

SEQ ID NO: 2003034 - DNA, 25 bp, Homo sapien
ccttgacctgttttgtgcctgtggc

SEQ ID NO: 2003035 - DNA, 25 bp, Homo sapien
gcaacaaaggtaaggtagtaatgag

SEQ ID NO: 2003036 - DNA, 25 bp, Homo sapien
agccttgacctgttttgtgcctgtg

SEQ ID NO: 2003037 - DNA, 25 bp, Homo sapien
tgcctgtggcaacaaaggtaaggta

SEQ ID NO: 2003038 - DNA, 25 bp, Homo sapien
gactgaaagaccagaaccgaaccag

SEQ ID NO: 2003039 - DNA, 25 bp, Homo sapien
gcttgaagctgagtccctggtatgg

SEQ ID NO: 2003040 - DNA, 25 bp, Homo sapien
gatctgatctgatagcaagacctca

SEQ ID NO: 2003041 - DNA, 25 bp, Homo sapien
gattgcagcatggaatgctctccca

SEQ ID NO: 2003042 - DNA, 25 bp, Homo sapien
cttcctgattctgtagcccacagtg

SEQ ID NO: 2003043 - DNA, 25 bp, Homo sapien
tgtgctttgctttagtgcctctgtt

SEQ ID NO: 2003044 - DNA, 25 bp, Homo sapien
ccacagtgtcccacgctgtatctgt

SEQ ID NO: 2003045 - DNA, 25 bp, Homo sapien
tctgtttattgccagcaggcgctgg

SEQ ID NO: 2003046 - DNA, 25 bp, Homo sapien
tagtcaattatagcagggctacgga

SEQ ID NO: 2003047 - DNA, 25 bp, Homo sapien
ggattgcggacatctatgcacttgc

SEQ ID NO: 2003048 - DNA, 25 bp, Homo sapien
tgtaatggcgtctagcaaaggaaac

SEQ ID NO: 2003049 - DNA, 25 bp, Homo sapien
tagtacagagccattcccagtttca

SEQ ID NO: 2003050 - DNA, 25 bp, Homo sapien
ggcactgggaatcgggccactggta

SEQ ID NO: 2003051 - DNA, 25 bp, Homo sapien
gggccactggtatgaccacatggat

SEQ ID NO: 2003052 - DNA, 25 bp, Homo sapien
gtatgaccacatggatggttgatga

SEQ ID NO: 2003053 - DNA, 25 bp, Homo sapien
gaatcgggccactggtatgaccaca

SEQ ID NO: 2003054 - DNA, 25 bp, Homo sapien
ctttgagccagttttgaccaaggat

SEQ ID NO: 2003055 - DNA, 25 bp, Homo sapien
ctgggtgatacatatttctgtcctc

SEQ ID NO: 2003056 - DNA, 25 bp, Homo sapien
gggtgatacatatttctgtcctctt

SEQ ID NO: 2003057 - DNA, 25 bp, Homo sapien
tcctctttgagccagttttgaccaa

SEQ ID NO: 2003058 - DNA, 25 bp, Homo sapien
cttgaagtagcaatacacagattgg

SEQ ID NO: 2003059 - DNA, 25 bp, Homo sapien
ggctgccctgaaaggaggtcgctat

SEQ ID NO: 2003060 - DNA, 25 bp, Homo sapien
aattcttataggtagaaggctgccc

SEQ ID NO: 2003061 - DNA, 25 bp, Homo sapien
gagtgtgtctggaatccagtagcag

SEQ ID NO: 2003062 - DNA, 25 bp, Homo sapien
tagaaaggggatggcatggttccca

SEQ ID NO: 2003063 - DNA, 25 bp, Homo sapien
gataacagcacgcaacacaaaggca

SEQ ID NO: 2003064 - DNA, 25 bp, Homo sapien
gcagtcattgcctattctcatatgg

SEQ ID NO: 2003065 - DNA, 25 bp, Homo sapien
tctcatatggttatcaagctaagat

SEQ ID NO: 2003066 - DNA, 25 bp, Homo sapien
gcaaaagtacagtccctttgctagt

SEQ ID NO: 2003067 - DNA, 25 bp, Homo sapien
acagtccctttgctagttgttcatc

SEQ ID NO: 2003068 - DNA, 25 bp, Homo sapien
gatgagttgggcagtataatttcct

SEQ ID NO: 2003069 - DNA, 25 bp, Homo sapien
tgatgagttgggcagtataatttcc

SEQ ID NO: 2003070 - DNA, 25 bp, Homo sapien
catagtcagaatggaacgtgagtca

SEQ ID NO: 2003071 - DNA, 25 bp, Homo sapien
tcctggctcccgttcacggtgattg

SEQ ID NO: 2003072 - DNA, 25 bp, Homo sapien
tctagaggtgcattctagtcctggc

SEQ ID NO: 2003073 - DNA, 25 bp, Homo sapien
aaaattcacaatgcgagccgctgcc

SEQ ID NO: 2003074 - DNA, 25 bp, Homo sapien
gtaaagtcagaaatttctcaggcaa

SEQ ID NO: 2003075 - DNA, 25 bp, Homo sapien
caccatgctttcaatcatattagag

SEQ ID NO: 2003076 - DNA, 25 bp, Homo sapien
ggcaaatgattgaactctagattcc

SEQ ID NO: 2003077 - DNA, 25 bp, Homo sapien
tgatataagtgaagtctagagacat

SEQ ID NO: 2003078 - DNA, 25 bp, Homo sapien
gagcaagtgaacctctgagaaacaa

SEQ ID NO: 2003079 - DNA, 25 bp, Homo sapien
taatagccagaggttttgcacaagc

SEQ ID NO: 2003080 - DNA, 25 bp, Homo sapien
caaatggtccgctgtgtctgctgac

SEQ ID NO: 2003081 - DNA, 25 bp, Homo sapien
tctgctgacagagaaatctaatagc

SEQ ID NO: 2003082 - DNA, 25 bp, Homo sapien
tagacttccgaacaccatattctga

SEQ ID NO: 2003083 - DNA, 25 bp, Homo sapien
caggaatccattggaaataatttca

SEQ ID NO: 2003084 - DNA, 25 bp, Homo sapien
tcacaaagattgcaagtatagagtt

SEQ ID NO: 2003085 - DNA, 25 bp, Homo sapien
aagtatagagttgtaactacacagg

SEQ ID NO: 2003086 - DNA, 25 bp, Homo sapien
taatttcagattcgaacattgccat

SEQ ID NO: 2003087 - DNA, 25 bp, Homo sapien
ctctctggttcatttcatctgtgta

SEQ ID NO: 2003088 - DNA, 25 bp, Homo sapien
catctgtgtaatttgggttttcagc

SEQ ID NO: 2003089 - DNA, 25 bp, Homo sapien
ttgatttatgccacaattccttact

SEQ ID NO: 2003090 - DNA, 25 bp, Homo sapien
ccttcttgatttatgccacaattcc

SEQ ID NO: 2003091 - DNA, 25 bp, Homo sapien
agtcaatgaaatcatccttcaggac

SEQ ID NO: 2003092 - DNA, 25 bp, Homo sapien
ccttcaggactctaagcactgtcaa

SEQ ID NO: 2003093 - DNA, 25 bp, Homo sapien
gctgtcgaatccttgtttgcatgaa

SEQ ID NO: 2003094 - DNA, 25 bp, Homo sapien
gagagtgtagagaccaatctgccct

SEQ ID NO: 2003095 - DNA, 25 bp, Homo sapien
ggctctgatcttcctgttgcagatc

SEQ ID NO: 2003096 - DNA, 25 bp, Homo sapien
gtggctctgatcttcctgttgcaga

SEQ ID NO: 2003097 - DNA, 25 bp, Homo sapien
ctctgatcttcctgttgcagatcat

SEQ ID NO: 2003098 - DNA, 25 bp, Homo sapien
ctctcttgtggctctgatcttcctg

SEQ ID NO: 2003099 - DNA, 25 bp, Homo sapien
tggcctctgacatggtgtgatttcc

SEQ ID NO: 2003100 - DNA, 25 bp, Homo sapien
cagtgccgacggcattcacatggcc

SEQ ID NO: 2003101 - DNA, 25 bp, Homo sapien
tccggtagtaccttagagctagtga

SEQ ID NO: 2003102 - DNA, 25 bp, Homo sapien
gagctagtgatacattttaagccaa

SEQ ID NO: 2003103 - DNA, 25 bp, Homo sapien
ggtttctgtgaagcactggtgccat

SEQ ID NO: 2003104 - DNA, 25 bp, Homo sapien
attggggtttctgtgaagcactggt

SEQ ID NO: 2003105 - DNA, 25 bp, Homo sapien
aggaccagcacctatgactattggg

SEQ ID NO: 2003106 - DNA, 25 bp, Homo sapien
caaaggaccagcacctatgactatt

SEQ ID NO: 2003107 - DNA, 25 bp, Homo sapien
tcactggaactcctcggtcggactc

SEQ ID NO: 2003108 - DNA, 25 bp, Homo sapien
tccccgcattgtgacggcatcagaa

SEQ ID NO: 2003109 - DNA, 25 bp, Homo sapien
cggagcagtcgaggaggacatttcc

SEQ ID NO: 2003110 - DNA, 25 bp, Homo sapien
tgagccagaatctcctaaagatgcc

SEQ ID NO: 2003111 - DNA, 25 bp, Homo sapien
gagttattctgatcagtcttccaag

SEQ ID NO: 2003112 - DNA, 25 bp, Homo sapien
ttctcagaccctcactaggagagtg

SEQ ID NO: 2003113 - DNA, 25 bp, Homo sapien
catgaaggagtggtgattctgccca

SEQ ID NO: 2003114 - DNA, 25 bp, Homo sapien
gcccaattgtcctgttattgatgaa

SEQ ID NO: 2003115 - DNA, 25 bp, Homo sapien
gggaagatatatgccccttgtgaat

SEQ ID NO: 2003116 - DNA, 25 bp, Homo sapien
tgagattaaatcaggtccatggtct

SEQ ID NO: 2003117 - DNA, 25 bp, Homo sapien
gaattctagtggtttggcaatctta

SEQ ID NO: 2003118 - DNA, 25 bp, Homo sapien
tccatggtctttattactgggaaga

SEQ ID NO: 2003119 - DNA, 25 bp, Homo sapien
tgcaaggtcactcaatctcaaacgc

SEQ ID NO: 2003120 - DNA, 25 bp, Homo sapien
caagtcgagaccaagtgaactccca

SEQ ID NO: 2003121 - DNA, 25 bp, Homo sapien
caaacgcctgctctggtcagtacaa

SEQ ID NO: 2003122 - DNA, 25 bp, Homo sapien
tattccaagggatttgggcactgct

SEQ ID NO: 2003123 - DNA, 25 bp, Homo sapien
ttctgagcgtattcaagggccctgg

SEQ ID NO: 2003124 - DNA, 25 bp, Homo sapien
tccagactgctgcacaggatgaagt

SEQ ID NO: 2003125 - DNA, 25 bp, Homo sapien
aaatggaaagctctgcactgtaacc

SEQ ID NO: 2003126 - DNA, 25 bp, Homo sapien
catgctttaactacaaaacaatggg

SEQ ID NO: 2003127 - DNA, 25 bp, Homo sapien
gatttaccataggtaagccttctcc

SEQ ID NO: 2003128 - DNA, 25 bp, Homo sapien
agattcttcccccattggcgattta

SEQ ID NO: 2003129 - DNA, 25 bp, Homo sapien
cattggcgatttaccataggtaagc

SEQ ID NO: 2003130 - DNA, 25 bp, Homo sapien
ccccattggcgatttaccataggta

SEQ ID NO: 2003131 - DNA, 25 bp, Homo sapien
cattcgagttgggagtggcaacccc

SEQ ID NO: 2003132 - DNA, 25 bp, Homo sapien
aggcattcgagttgggagtggcaac

SEQ ID NO: 2003133 - DNA, 25 bp, Homo sapien
gcattcgagttgggagtggcaaccc

SEQ ID NO: 2003134 - DNA, 25 bp, Homo sapien
ggcattcgagttgggagtggcaacc

SEQ ID NO: 2003135 - DNA, 25 bp, Homo sapien
gctgaaacaacgtgccatctgccat

SEQ ID NO: 2003136 - DNA, 25 bp, Homo sapien
tccagttgcccatccacattatatt

SEQ ID NO: 2003137 - DNA, 25 bp, Homo sapien
tacctccgagctgaagacagtttga

SEQ ID NO: 2003138 - DNA, 25 bp, Homo sapien
gttgtcccctctgtgctaagctctg

SEQ ID NO: 2003139 - DNA, 25 bp, Homo sapien
tcgatgagaaagtgctgtaaatgcc

SEQ ID NO: 2003140 - DNA, 25 bp, Homo sapien
gacttctttggaaagcaggaaggca

SEQ ID NO: 2003141 - DNA, 25 bp, Homo sapien
tgtactattcagtgctccgccacct

SEQ ID NO: 2003142 - DNA, 25 bp, Homo sapien
tcttgccgggaacattcactgtgag

SEQ ID NO: 2003143 - DNA, 25 bp, Homo sapien
tataaactgccatggctatgttgtc

SEQ ID NO: 2003144 - DNA, 25 bp, Homo sapien
cagctgcatcggctgttgcaactct

SEQ ID NO: 2003145 - DNA, 25 bp, Homo sapien
tagcgagtgtcatccatccatatac

SEQ ID NO: 2003146 - DNA, 25 bp, Homo sapien
aatctcttagggctctcatataaaa

SEQ ID NO: 2003147 - DNA, 25 bp, Homo sapien
ctccatgctcagttttagcgagcat

SEQ ID NO: 2003148 - DNA, 25 bp, Homo sapien
catcaagtgacccacttttccgtgt

SEQ ID NO: 2003149 - DNA, 25 bp, Homo sapien
ttattgaaaaccagcgtatttctca

SEQ ID NO: 2003150 - DNA, 25 bp, Homo sapien
tgacccacttttccgtgtgtcgaag

SEQ ID NO: 2003151 - DNA, 25 bp, Homo sapien
aaccagcgtatttctcatcaagtga

SEQ ID NO: 2003152 - DNA, 25 bp, Homo sapien
cctctaattgtttagaggttttcat

SEQ ID NO: 2003153 - DNA, 25 bp, Homo sapien
ggtttgcagcctctaattgtttaga

SEQ ID NO: 2003154 - DNA, 25 bp, Homo sapien
ctgatgctggtgccaggtttgcagc

SEQ ID NO: 2003155 - DNA, 25 bp, Homo sapien
gtgccaggtttgcagcctctaattg

SEQ ID NO: 2003156 - DNA, 25 bp, Homo sapien
gaatagggtcagacctgacacacca

SEQ ID NO: 2003157 - DNA, 25 bp, Homo sapien
aaaagaatagggtcagacctgacac

SEQ ID NO: 2003158 - DNA, 25 bp, Homo sapien
ttaaaaagaatagggtcagacctga

SEQ ID NO: 2003159 - DNA, 25 bp, Homo sapien
aagaatagggtcagacctgacacac

SEQ ID NO: 2003160 - DNA, 25 bp, Homo sapien
tattccctatatttgcactgacagc

SEQ ID NO: 2003161 - DNA, 25 bp, Homo sapien
cataatctccatggttattgaactc

SEQ ID NO: 2003162 - DNA, 25 bp, Homo sapien
cacagatttctggtgaatatccatc

SEQ ID NO: 2003163 - DNA, 25 bp, Homo sapien
actttttccagttgaagctcagtca

SEQ ID NO: 2003164 - DNA, 25 bp, Homo sapien
aagcaaacattgctgccccattcca

SEQ ID NO: 2003165 - DNA, 25 bp, Homo sapien
ccacatggctatttaattacaggtt

SEQ ID NO: 2003166 - DNA, 25 bp, Homo sapien
tattgacattaatgcatagtggtgc

SEQ ID NO: 2003167 - DNA, 25 bp, Homo sapien
aagggatacaagaaggctcacatct

SEQ ID NO: 2003168 - DNA, 25 bp, Homo sapien
tactttatcacatttcctggacacg

SEQ ID NO: 2003169 - DNA, 25 bp, Homo sapien
catttcctggacacgttcaacttta

SEQ ID NO: 2003170 - DNA, 25 bp, Homo sapien
gacacgttcaactttatcagtaatg

SEQ ID NO: 2003171 - DNA, 25 bp, Homo sapien
tttgcattgagggttcttactttat

SEQ ID NO: 2003172 - DNA, 25 bp, Homo sapien
acagaaatcagagggtgtaaatctc

SEQ ID NO: 2003173 - DNA, 25 bp, Homo sapien
taatacagaaatcagagggtgtaaa

SEQ ID NO: 2003174 - DNA, 25 bp, Homo sapien
gaaatcagagggtgtaaatctcttc

SEQ ID NO: 2003175 - DNA, 25 bp, Homo sapien
aatcagagggtgtaaatctcttcat

SEQ ID NO: 2003176 - DNA, 25 bp, Homo sapien
tggagtaattcaggattctccggaa

SEQ ID NO: 2003177 - DNA, 25 bp, Homo sapien
ctaagagcattgctaggttatttct

SEQ ID NO: 2003178 - DNA, 25 bp, Homo sapien
gtaattcaggattctccggaatcat

SEQ ID NO: 2003179 - DNA, 25 bp, Homo sapien
gagcattgctaggttatttcttagc

SEQ ID NO: 2003180 - DNA, 25 bp, Homo sapien
tgcaatgctccagagggcaagacca

SEQ ID NO: 2003181 - DNA, 25 bp, Homo sapien
gagtagcactgtgtctcccatgaag

SEQ ID NO: 2003182 - DNA, 25 bp, Homo sapien
cgagctgagcatcggtaaattccaa

SEQ ID NO: 2003183 - DNA, 25 bp, Homo sapien
cagtggattgttggcatgggctccc

SEQ ID NO: 2003184 - DNA, 25 bp, Homo sapien
tggtggaggatagccagaaacacaa

SEQ ID NO: 2003185 - DNA, 25 bp, Homo sapien
ccttcaatggctactacattggatg

SEQ ID NO: 2003186 - DNA, 25 bp, Homo sapien
gacttcctcgcctcgtaaccaggta

SEQ ID NO: 2003187 - DNA, 25 bp, Homo sapien
actacattggatggtctttgcagaa

SEQ ID NO: 2003188 - DNA, 25 bp, Homo sapien
tctgcagaggcactaatattctcat

SEQ ID NO: 2003189 - DNA, 25 bp, Homo sapien
ctctgcagaggcactaatattctca

SEQ ID NO: 2003190 - DNA, 25 bp, Homo sapien
tcacattggagataagcaagttgct

SEQ ID NO: 2003191 - DNA, 25 bp, Homo sapien
catcatctgtcacattggagataag

SEQ ID NO: 2003192 - DNA, 25 bp, Homo sapien
taacccatgatatacattattacca

SEQ ID NO: 2003193 - DNA, 25 bp, Homo sapien
agaacaagcaacgtcattatctaac

SEQ ID NO: 2003194 - DNA, 25 bp, Homo sapien
gcaacgtcattatctaacccatgat

SEQ ID NO: 2003195 - DNA, 25 bp, Homo sapien
acaagcaacgtcattatctaaccca

SEQ ID NO: 2003196 - DNA, 25 bp, Homo sapien
ctcctcgagggaatgacttctgacc

SEQ ID NO: 2003197 - DNA, 25 bp, Homo sapien
cctcgagggaatgacttctgacctc

SEQ ID NO: 2003198 - DNA, 25 bp, Homo sapien
tcctcgagggaatgacttctgacct

SEQ ID NO: 2003199 - DNA, 25 bp, Homo sapien
ctcaccactccccagtacccacttt

SEQ ID NO: 2003200 - DNA, 25 bp, Homo sapien
tacgaagcccactgaagccaggttt

SEQ ID NO: 2003201 - DNA, 25 bp, Homo sapien
tacgaattgtaattatacgaagccc

SEQ ID NO: 2003202 - DNA, 25 bp, Homo sapien
ttcccagaacctagtgcaatccttg

SEQ ID NO: 2003203 - DNA, 25 bp, Homo sapien
tttattcagacagtattaggccaac

SEQ ID NO: 2003204 - DNA, 25 bp, Homo sapien
tcagtaaagttcccactcatctcca

SEQ ID NO: 2003205 - DNA, 25 bp, Homo sapien
cagtaaagttcccactcatctccac

SEQ ID NO: 2003206 - DNA, 25 bp, Homo sapien
taccaatcagcgtaaatagaatcat

SEQ ID NO: 2003207 - DNA, 25 bp, Homo sapien
tgcagtcataatggcccatcctcca

SEQ ID NO: 2003208 - DNA, 25 bp, Homo sapien
aagatctgtctcagtgcagtcataa

SEQ ID NO: 2003209 - DNA, 25 bp, Homo sapien
gggagcacattctaccaatcagcgt

SEQ ID NO: 2003210 - DNA, 25 bp, Homo sapien
atagtttggaggaggaggaatcttc

SEQ ID NO: 2003211 - DNA, 25 bp, Homo sapien
tacacagtatagtttggaggaggag

SEQ ID NO: 2003212 - DNA, 25 bp, Homo sapien
tggaggaggaggaatcttcctttta

SEQ ID NO: 2003213 - DNA, 25 bp, Homo sapien
ttacacagtatagtttggaggagga

SEQ ID NO: 2003214 - DNA, 25 bp, Homo sapien
catcattaagataaactcggaagca

SEQ ID NO: 2003215 - DNA, 25 bp, Homo sapien
gcgcctctttagctgtacagttcag

SEQ ID NO: 2003216 - DNA, 25 bp, Homo sapien
ctaaggctctagcattgcctctctc

SEQ ID NO: 2003217 - DNA, 25 bp, Homo sapien
cacttagagtgatatacaagcgcct

SEQ ID NO: 2003218 - DNA, 25 bp, Homo sapien
gagtaccatactgcacaatgcacat

SEQ ID NO: 2003219 - DNA, 25 bp, Homo sapien
tggagtaccatactgcacaatgcac

SEQ ID NO: 2003220 - DNA, 25 bp, Homo sapien
ctggagtaccatactgcacaatgca

SEQ ID NO: 2003221 - DNA, 25 bp, Homo sapien
ggagtaccatactgcacaatgcaca

SEQ ID NO: 2003222 - DNA, 25 bp, Homo sapien
caatgacgccaaaatctgatatgac

SEQ ID NO: 2003223 - DNA, 25 bp, Homo sapien
tttagtcaatgacgccaaaatctga

SEQ ID NO: 2003224 - DNA, 25 bp, Homo sapien
aattagtgtgatttgtccacactcc

SEQ ID NO: 2003225 - DNA, 25 bp, Homo sapien
tgtccacactcccttttagtcaatg

SEQ ID NO: 2003226 - DNA, 25 bp, Homo sapien
tccttgatattctgggtcactttcc

SEQ ID NO: 2003227 - DNA, 25 bp, Homo sapien
atccttgatattctgggtcactttc

SEQ ID NO: 2003228 - DNA, 25 bp, Homo sapien
catccttgatattctgggtcacttt

SEQ ID NO: 2003229 - DNA, 25 bp, Homo sapien
tcaaatagtactcatcagtctattg

SEQ ID NO: 2003230 - DNA, 25 bp, Homo sapien
tactcatcagtctattgtgaattat

SEQ ID NO: 2003231 - DNA, 25 bp, Homo sapien
aatagtactcatcagtctattgtga

SEQ ID NO: 2003232 - DNA, 25 bp, Homo sapien
tagtactcatcagtctattgtgaat

SEQ ID NO: 2003233 - DNA, 25 bp, Homo sapien
gtctgaccattgagaagccaagttg

SEQ ID NO: 2003234 - DNA, 25 bp, Homo sapien
tagtcattcagggtctgaccattga

SEQ ID NO: 2003235 - DNA, 25 bp, Homo sapien
tcagggtctgaccattgagaagcca

SEQ ID NO: 2003236 - DNA, 25 bp, Homo sapien
cattcagggtctgaccattgagaag

SEQ ID NO: 2003237 - DNA, 25 bp, Homo sapien
tatttgtctgagttgaacgtgccca

SEQ ID NO: 2003238 - DNA, 25 bp, Homo sapien
ctgagttgaacgtgcccatgtaggc

SEQ ID NO: 2003239 - DNA, 25 bp, Homo sapien
ttgaacgtgcccatgtaggcaacat

SEQ ID NO: 2003240 - DNA, 25 bp, Homo sapien
cattgatagcattatttgtctgagt

SEQ ID NO: 2003241 - DNA, 25 bp, Homo sapien
tctccatacgagtgtctctcacaca

SEQ ID NO: 2003242 - DNA, 25 bp, Homo sapien
ggattggttgttgagatttgcattt

SEQ ID NO: 2003243 - DNA, 25 bp, Homo sapien
ctccatacgagtgtctctcacacat

SEQ ID NO: 2003244 - DNA, 25 bp, Homo sapien
atcactaggaatgaccacatctcca

SEQ ID NO: 2003245 - DNA, 25 bp, Homo sapien
cagagactgtacattcaaactcaat

SEQ ID NO: 2003246 - DNA, 25 bp, Homo sapien
ctgaaaataatcactaggaatgacc

SEQ ID NO: 2003247 - DNA, 25 bp, Homo sapien
aataatcactaggaatgaccacatc

SEQ ID NO: 2003248 - DNA, 25 bp, Homo sapien
caggcttagggacaatgagctgtgc

SEQ ID NO: 2003249 - DNA, 25 bp, Homo sapien
caccaccccaagtatccgtaagttg

SEQ ID NO: 2003250 - DNA, 25 bp, Homo sapien
caagtatccgtaagttgcttcctcc

SEQ ID NO: 2003251 - DNA, 25 bp, Homo sapien
tttcagccacacattgataaaagcc

SEQ ID NO: 2003252 - DNA, 25 bp, Homo sapien
caaagcaaggttcccattgtcttac

SEQ ID NO: 2003253 - DNA, 25 bp, Homo sapien
taccaaagcaaggttcccattgtct

SEQ ID NO: 2003254 - DNA, 25 bp, Homo sapien
aggtaccaaagcaaggttcccattg

SEQ ID NO: 2003255 - DNA, 25 bp, Homo sapien
gtaccaaagcaaggttcccattgtc

SEQ ID NO: 2003256 - DNA, 25 bp, Homo sapien
gccaaatacaataaacaacgaccaa

SEQ ID NO: 2003257 - DNA, 25 bp, Homo sapien
gagagtagatgccactgacaacact

SEQ ID NO: 2003258 - DNA, 25 bp, Homo sapien
tcacgctttcggatttttatcttca

SEQ ID NO: 2003259 - DNA, 25 bp, Homo sapien
tcttttgaatccaatgccaaataca

SEQ ID NO: 2003260 - DNA, 25 bp, Homo sapien
cctacctgaagcacgtgctgaatga

SEQ ID NO: 2003261 - DNA, 25 bp, Homo sapien
gctggcttcctacctgaagcacgtg

SEQ ID NO: 2003262 - DNA, 25 bp, Homo sapien
tacagccatatcctcttgattagca

SEQ ID NO: 2003263 - DNA, 25 bp, Homo sapien
tgaaggacaaggtgaatgacaagcc

SEQ ID NO: 2003264 - DNA, 25 bp, Homo sapien
cttcattctgtggttaagcaggttt

SEQ ID NO: 2003265 - DNA, 25 bp, Homo sapien
ttctgtggttaagcaggtttcctga

SEQ ID NO: 2003266 - DNA, 25 bp, Homo sapien
cattctgtggttaagcaggtttcct

SEQ ID NO: 2003267 - DNA, 25 bp, Homo sapien
tcattctgtggttaagcaggtttcc

SEQ ID NO: 2003268 - DNA, 25 bp, Homo sapien
catctgaagactggtgaacagtcat

SEQ ID NO: 2003269 - DNA, 25 bp, Homo sapien
tcatctgaagactggtgaacagtca

SEQ ID NO: 2003270 - DNA, 25 bp, Homo sapien
ctagggaatcaccagaaccttgatg

SEQ ID NO: 2003271 - DNA, 25 bp, Homo sapien
ccttgatggcatctctagtaaagac

SEQ ID NO: 2003272 - DNA, 25 bp, Homo sapien
gactccatattttatcctcatcctg

SEQ ID NO: 2003273 - DNA, 25 bp, Homo sapien
tctagtaaagacaaactgtgtctca

SEQ ID NO: 2003274 - DNA, 25 bp, Homo sapien
tggacagttttatatctggagcagc

SEQ ID NO: 2003275 - DNA, 25 bp, Homo sapien
catttaagttgtactagtgtggaca

SEQ ID NO: 2003276 - DNA, 25 bp, Homo sapien
tcatctgggtattcccagcaacttg

SEQ ID NO: 2003277 - DNA, 25 bp, Homo sapien
tacatttaagttgtactagtgtgga

SEQ ID NO: 2003278 - DNA, 25 bp, Homo sapien
tgggcgccagctgagacggacaaat

SEQ ID NO: 2003279 - DNA, 25 bp, Homo sapien
gggaccacatctctgggagccgaag

SEQ ID NO: 2003280 - DNA, 25 bp, Homo sapien
gacaaatcggctggaaaccaagaca

SEQ ID NO: 2003281 - DNA, 25 bp, Homo sapien
ctctggagaaaaagaccgtgaaagt

SEQ ID NO: 2003282 - DNA, 25 bp, Homo sapien
tgtaaatgggcagataagcacactg

SEQ ID NO: 2003283 - DNA, 25 bp, Homo sapien
aatgggcagataagcacactgggtt

SEQ ID NO: 2003284 - DNA, 25 bp, Homo sapien
ccctctgtaaatgggcagataagca

SEQ ID NO: 2003285 - DNA, 25 bp, Homo sapien
taaatgggcagataagcacactggg

SEQ ID NO: 2003286 - DNA, 25 bp, Homo sapien
ctgtgttgtattcaatgctcgttcc

SEQ ID NO: 2003287 - DNA, 25 bp, Homo sapien
gacccaggctgtgttgtattcaatg

SEQ ID NO: 2003288 - DNA, 25 bp, Homo sapien
caggctgtgttgtattcaatgctcg

SEQ ID NO: 2003289 - DNA, 25 bp, Homo sapien
cccaggctgtgttgtattcaatgct

SEQ ID NO: 2003290 - DNA, 25 bp, Homo sapien
tctcccggtccccattcattgtaag

SEQ ID NO: 2003291 - DNA, 25 bp, Homo sapien
tgatgggttgagaactctctcccgg

SEQ ID NO: 2003292 - DNA, 25 bp, Homo sapien
ggtccccattcattgtaagccacaa

SEQ ID NO: 2003293 - DNA, 25 bp, Homo sapien
taagccacaactcgaaaggtgtaca

SEQ ID NO: 2003294 - DNA, 25 bp, Homo sapien
taaatgtggcccgttccttttcata

SEQ ID NO: 2003295 - DNA, 25 bp, Homo sapien
aagaattcaaggatattgcagagga

SEQ ID NO: 2003296 - DNA, 25 bp, Homo sapien
aattcaaggatattgcagaggaaaa

SEQ ID NO: 2003297 - DNA, 25 bp, Homo sapien
tgaaagaattcaaggatattgcaga

SEQ ID NO: 2003298 - DNA, 25 bp, Homo sapien
ttcgcaaaggttctgtgaaagaatt

SEQ ID NO: 2003299 - DNA, 25 bp, Homo sapien
ggcactttatgtagtctaacccatt

SEQ ID NO: 2003300 - DNA, 25 bp, Homo sapien
caggcctaaggcactttatgtagtc

SEQ ID NO: 2003301 - DNA, 25 bp, Homo sapien
ttatgtagtctaacccatttgattt

SEQ ID NO: 2003302 - DNA, 25 bp, Homo sapien
taaggcactttatgtagtctaaccc

SEQ ID NO: 2003303 - DNA, 25 bp, Homo sapien
ggaaacagatatgacaaccacacac

SEQ ID NO: 2003304 - DNA, 25 bp, Homo sapien
ttctgggaaacagatatgacaacca

SEQ ID NO: 2003305 - DNA, 25 bp, Homo sapien
tctgggaaacagatatgacaaccac

SEQ ID NO: 2003306 - DNA, 25 bp, Homo sapien
tgggaaacagatatgacaaccacac

SEQ ID NO: 2003307 - DNA, 25 bp, Homo sapien
catgtggcccagttgataagtaaag

SEQ ID NO: 2003308 - DNA, 25 bp, Homo sapien
aagatatatgccgtatgtgagggat

SEQ ID NO: 2003309 - DNA, 25 bp, Homo sapien
cagacagtgcataaacatgtggccc

SEQ ID NO: 2003310 - DNA, 25 bp, Homo sapien
aattgtgatatggtgcagacagtgc

SEQ ID NO: 2003311 - DNA, 25 bp, Homo sapien
tcttttcctgtggacacctcagtgc

SEQ ID NO: 2003312 - DNA, 25 bp, Homo sapien
ttggactggaccgtttgcataggca

SEQ ID NO: 2003313 - DNA, 25 bp, Homo sapien
gaacaatctgtaaccttggactgga

SEQ ID NO: 2003314 - DNA, 25 bp, Homo sapien
cagcttgcaggttttctactggccc

SEQ ID NO: 2003315 - DNA, 25 bp, Homo sapien
gcccggaccatagcgattataagct

SEQ ID NO: 2003316 - DNA, 25 bp, Homo sapien
tatatcatcagtagagacgcccgga

SEQ ID NO: 2003317 - DNA, 25 bp, Homo sapien
tcggtgaattttttcaggccttcca

SEQ ID NO: 2003318 - DNA, 25 bp, Homo sapien
gccttccagtttataagatagtcca

SEQ ID NO: 2003319 - DNA, 25 bp, Homo sapien
tcaaatatgtaaaaggagtttcact

SEQ ID NO: 2003320 - DNA, 25 bp, Homo sapien
caaatatgtaaaaggagtttcactg

SEQ ID NO: 2003321 - DNA, 25 bp, Homo sapien
aaatatgtaaaaggagtttcactgt

SEQ ID NO: 2003322 - DNA, 25 bp, Homo sapien
atatgtaaaaggagtttcactgttt

SEQ ID NO: 2003323 - DNA, 25 bp, Homo sapien
cagttactgccaaaatcttgaaaga

SEQ ID NO: 2003324 - DNA, 25 bp, Homo sapien
cacagttactgccaaaatcttgaaa

SEQ ID NO: 2003325 - DNA, 25 bp, Homo sapien
tcacagttactgccaaaatcttgaa

SEQ ID NO: 2003326 - DNA, 25 bp, Homo sapien
acagttactgccaaaatcttgaaag

SEQ ID NO: 2003327 - DNA, 25 bp, Homo sapien
acttccagggagacgttctgaggcg

SEQ ID NO: 2003328 - DNA, 25 bp, Homo sapien
acgttctgaggcggggcacttggca

SEQ ID NO: 2003329 - DNA, 25 bp, Homo sapien
ccacttccagggagacgttctgagg

SEQ ID NO: 2003330 - DNA, 25 bp, Homo sapien
gaccacttccagggagacgttctga

SEQ ID NO: 2003331 - DNA, 25 bp, Homo sapien
tttaagtcccatggggagaaataca

SEQ ID NO: 2003332 - DNA, 25 bp, Homo sapien
tcccatggggagaaatacatagctt

SEQ ID NO: 2003333 - DNA, 25 bp, Homo sapien
cctgctgtcccgctgatgtgctttt

SEQ ID NO: 2003334 - DNA, 25 bp, Homo sapien
gtacagaatcttccatgtaggttca

SEQ ID NO: 2003335 - DNA, 25 bp, Homo sapien
gtgtccctctgtcaagccatatccc

SEQ ID NO: 2003336 - DNA, 25 bp, Homo sapien
tccgactcctgttgtgtgtccctct

SEQ ID NO: 2003337 - DNA, 25 bp, Homo sapien
gacccacatgtcatagagtaagtat

SEQ ID NO: 2003338 - DNA, 25 bp, Homo sapien
taggaaacttcttgacatctgcgtc

SEQ ID NO: 2003339 - DNA, 25 bp, Homo sapien
tactaggtatggctaatttacatga

SEQ ID NO: 2003340 - DNA, 25 bp, Homo sapien
aaatattagctgtctgattgctctg

SEQ ID NO: 2003341 - DNA, 25 bp, Homo sapien
cagacattgttcctttcaataaata

SEQ ID NO: 2003342 - DNA, 25 bp, Homo sapien
catgacacataacagacattgttcc

SEQ ID NO: 2003343 - DNA, 25 bp, Homo sapien
agggttatttcatcttttctattct

SEQ ID NO: 2003344 - DNA, 25 bp, Homo sapien
gttatttcatcttttctattcttta

SEQ ID NO: 2003345 - DNA, 25 bp, Homo sapien
atttcatcttttctattctttaggt

SEQ ID NO: 2003346 - DNA, 25 bp, Homo sapien
tatttcatcttttctattctttagg

SEQ ID NO: 2003347 - DNA, 25 bp, Homo sapien
cagtggtaaacccaggattggtagc

SEQ ID NO: 2003348 - DNA, 25 bp, Homo sapien
tttattgtaactatgacaatcacag

SEQ ID NO: 2003349 - DNA, 25 bp, Homo sapien
ccttccagtggtaaacccaggattg

SEQ ID NO: 2003350 - DNA, 25 bp, Homo sapien
gatccttccagtggtaaacccagga

SEQ ID NO: 2003351 - DNA, 25 bp, Homo sapien
ggacccgactccttgatagctcaag

SEQ ID NO: 2003352 - DNA, 25 bp, Homo sapien
gatagctcaagcgacatttccttcc

SEQ ID NO: 2003353 - DNA, 25 bp, Homo sapien
cagctgtgctacatgattcttcttc

SEQ ID NO: 2003354 - DNA, 25 bp, Homo sapien
tgttgtcttcacactcctaatgagg

SEQ ID NO: 2003355 - DNA, 25 bp, Homo sapien
gctgagttgagaagaagattcatat

SEQ ID NO: 2003356 - DNA, 25 bp, Homo sapien
caagagcagtgagccctgaagtgtt

SEQ ID NO: 2003357 - DNA, 25 bp, Homo sapien
tgggacaagagcagtgagccctgaa

SEQ ID NO: 2003358 - DNA, 25 bp, Homo sapien
gacaagagcagtgagccctgaagtg

SEQ ID NO: 2003359 - DNA, 25 bp, Homo sapien
taacagcggcctatcttcaagcaaa

SEQ ID NO: 2003360 - DNA, 25 bp, Homo sapien
cagcaggctttcaatctcagagcag

SEQ ID NO: 2003361 - DNA, 25 bp, Homo sapien
cacataactcatgttaacagcaggc

SEQ ID NO: 2003362 - DNA, 25 bp, Homo sapien
tctcaaagacacgatgtaccatgta

SEQ ID NO: 2003363 - DNA, 25 bp, Homo sapien
gatttagcgctctgaaccagcaaaa

SEQ ID NO: 2003364 - DNA, 25 bp, Homo sapien
tcagtctttttgactcccctatcag

SEQ ID NO: 2003365 - DNA, 25 bp, Homo sapien
ctactagccttctgattcacaacca

SEQ ID NO: 2003366 - DNA, 25 bp, Homo sapien
ccagcaaaacctactagccttctga

SEQ ID NO: 2003367 - DNA, 25 bp, Homo sapien
tgtcgaattttatagccggtaataa

SEQ ID NO: 2003368 - DNA, 25 bp, Homo sapien
tgtgtcgaattttatagccggtaat

SEQ ID NO: 2003369 - DNA, 25 bp, Homo sapien
ctgtgtcgaattttatagccggtaa

SEQ ID NO: 2003370 - DNA, 25 bp, Homo sapien
attttatagccggtaataaatccat

SEQ ID NO: 2003371 - DNA, 25 bp, Homo sapien
accagaggttgtttggctccagtgt

SEQ ID NO: 2003372 - DNA, 25 bp, Homo sapien
gaggttgtttggctccagtgtttcc

SEQ ID NO: 2003373 - DNA, 25 bp, Homo sapien
ggtaccagaggttgtttggctccag

SEQ ID NO: 2003374 - DNA, 25 bp, Homo sapien
taggtaccagaggttgtttggctcc

SEQ ID NO: 2003375 - DNA, 25 bp, Homo sapien
tcaatgttcctttggagtgagacta

SEQ ID NO: 2003376 - DNA, 25 bp, Homo sapien
tcctttggagtgagactatatttta

SEQ ID NO: 2003377 - DNA, 25 bp, Homo sapien
ttgcaagactacaccatgtgaacac

SEQ ID NO: 2003378 - DNA, 25 bp, Homo sapien
aaaccttgcaagactacaccatgtg

SEQ ID NO: 2003379 - DNA, 25 bp, Homo sapien
tggacatgctttacattgtttgtga

SEQ ID NO: 2003380 - DNA, 25 bp, Homo sapien
aattgtaacaatagtggacatgctt

SEQ ID NO: 2003381 - DNA, 25 bp, Homo sapien
agtggacatgctttacattgtttgt

SEQ ID NO: 2003382 - DNA, 25 bp, Homo sapien
gacatgctttacattgtttgtgact

SEQ ID NO: 2003383 - DNA, 25 bp, Homo sapien
gggaagaaagttactatgcaccaag

SEQ ID NO: 2003384 - DNA, 25 bp, Homo sapien
gaaagttactatgcaccaagtattc

SEQ ID NO: 2003385 - DNA, 25 bp, Homo sapien
gttactatgcaccaagtattcctac

SEQ ID NO: 2003386 - DNA, 25 bp, Homo sapien
cacaggggggaagaaagttactatg

SEQ ID NO: 2003387 - DNA, 25 bp, Homo sapien
ggtggtccagtaccattgactgtca

SEQ ID NO: 2003388 - DNA, 25 bp, Homo sapien
ataccagttggaaggtggtccagta

SEQ ID NO: 2003389 - DNA, 25 bp, Homo sapien
taccattgactgtcatggctgacac

SEQ ID NO: 2003390 - DNA, 25 bp, Homo sapien
catctagatcattctctggagtctc

SEQ ID NO: 2003391 - DNA, 25 bp, Homo sapien
gagcttggttgatcaggaacttgag

SEQ ID NO: 2003392 - DNA, 25 bp, Homo sapien
ggttcaagggaggagtccaactcat

SEQ ID NO: 2003393 - DNA, 25 bp, Homo sapien
actgtctcagcgtaagggctcccaa

SEQ ID NO: 2003394 - DNA, 25 bp, Homo sapien
gataatataacctcgcaccacgatg

SEQ ID NO: 2003395 - DNA, 25 bp, Homo sapien
attttcccagtgacaacaacaaaga

SEQ ID NO: 2003396 - DNA, 25 bp, Homo sapien
tttccattgaccactggaaaaagaa

SEQ ID NO: 2003397 - DNA, 25 bp, Homo sapien
ttatagaaattattaggatcagaag

SEQ ID NO: 2003398 - DNA, 25 bp, Homo sapien
tttcccagtgacaacaacaaagatg

SEQ ID NO: 2003399 - DNA, 25 bp, Homo sapien
aaggctcatttctagtgtgctgcat

SEQ ID NO: 2003400 - DNA, 25 bp, Homo sapien
tttcctgagcaatcaaccactgttc

SEQ ID NO: 2003401 - DNA, 25 bp, Homo sapien
tgtaatgactagagctttgtcagca

SEQ ID NO: 2003402 - DNA, 25 bp, Homo sapien
agctcttcctctgtaaacgagaaca

SEQ ID NO: 2003403 - DNA, 25 bp, Homo sapien
atggcattgctgtagttgctacagc

SEQ ID NO: 2003404 - DNA, 25 bp, Homo sapien
catggcattgctgtagttgctacag

SEQ ID NO: 2003405 - DNA, 25 bp, Homo sapien
ccatggcattgctgtagttgctaca

SEQ ID NO: 2003406 - DNA, 25 bp, Homo sapien
catgccaagttcttgtcggggccca

SEQ ID NO: 2003407 - DNA, 25 bp, Homo sapien
ccaagttcttgtcggggcccactct

SEQ ID NO: 2003408 - DNA, 25 bp, Homo sapien
tgccaagttcttgtcggggcccact

SEQ ID NO: 2003409 - DNA, 25 bp, Homo sapien
ccatgccaagttcttgtcggggccc

SEQ ID NO: 2003410 - DNA, 25 bp, Homo sapien
tcgagtcatctgagtaatgacagct

SEQ ID NO: 2003411 - DNA, 25 bp, Homo sapien
ctaccaaatctcgagtcatctgagt

SEQ ID NO: 2003412 - DNA, 25 bp, Homo sapien
atctgagtaatgacagcttctttca

SEQ ID NO: 2003413 - DNA, 25 bp, Homo sapien
gtaatgacagcttctttcacttgat

SEQ ID NO: 2003414 - DNA, 25 bp, Homo sapien
cggttatagacctggtggtggcact

SEQ ID NO: 2003415 - DNA, 25 bp, Homo sapien
aggaactccttctccggcattgtta

SEQ ID NO: 2003416 - DNA, 25 bp, Homo sapien
ctggtggtggcactttcataaagag

SEQ ID NO: 2003417 - DNA, 25 bp, Homo sapien
cttctccggcattgttaaaagcttt

SEQ ID NO: 2003418 - DNA, 25 bp, Homo sapien
taataatcaactgggtcagtgggat

SEQ ID NO: 2003419 - DNA, 25 bp, Homo sapien
ctgggaccgaggtggggaaatcatc

SEQ ID NO: 2003420 - DNA, 25 bp, Homo sapien
gataataatcaactgggtcagtggg

SEQ ID NO: 2003421 - DNA, 25 bp, Homo sapien
aggataataatcaactgggtcagtg

SEQ ID NO: 2003422 - DNA, 25 bp, Homo sapien
aagtcgcacctcagacgtcttttgg

SEQ ID NO: 2003423 - DNA, 25 bp, Homo sapien
agaaaagctggttctccaccggacg

SEQ ID NO: 2003424 - DNA, 25 bp, Homo sapien
ggacagagttgtctgcccagctgac

SEQ ID NO: 2003425 - DNA, 25 bp, Homo sapien
acagcctgtacacctactggtggga

SEQ ID NO: 2003426 - DNA, 25 bp, Homo sapien
ggtttgaggcctgttgctgtgtaac

SEQ ID NO: 2003427 - DNA, 25 bp, Homo sapien
tgtttggtttgaggcctgttgctgt

SEQ ID NO: 2003428 - DNA, 25 bp, Homo sapien
ttgaggcctgttgctgtgtaactta

SEQ ID NO: 2003429 - DNA, 25 bp, Homo sapien
tgtgtttggtttgaggcctgttgct

SEQ ID NO: 2003430 - DNA, 25 bp, Homo sapien
tgtgcagtcatgctccaagtactgg

SEQ ID NO: 2003431 - DNA, 25 bp, Homo sapien
catgctccaagtactggaccttctg

SEQ ID NO: 2003432 - DNA, 25 bp, Homo sapien
gcagtcatgctccaagtactggacc

SEQ ID NO: 2003433 - DNA, 25 bp, Homo sapien
ggtggcatgtgcagtcatgctccaa

SEQ ID NO: 2003434 - DNA, 25 bp, Homo sapien
gggaggctgccaactcacaatgacg

SEQ ID NO: 2003435 - DNA, 25 bp, Homo sapien
agtaattttcccattggcttccaag

SEQ ID NO: 2003436 - DNA, 25 bp, Homo sapien
acaatgacggcacgaggcttccctt

SEQ ID NO: 2003437 - DNA, 25 bp, Homo sapien
ggcttcccttccctagtaatgactg

SEQ ID NO: 2003438 - DNA, 25 bp, Homo sapien
cgtgcttgaattcgaaagtaataca

SEQ ID NO: 2003439 - DNA, 25 bp, Homo sapien
gatccatgatttgatgagtaagcct

SEQ ID NO: 2003440 - DNA, 25 bp, Homo sapien
tacatagtatcaaggttgagatcca

SEQ ID NO: 2003441 - DNA, 25 bp, Homo sapien
tccataatccagtcatcaattggga

SEQ ID NO: 2003442 - DNA, 25 bp, Homo sapien
cacaggatagggcagagatagacat

SEQ ID NO: 2003443 - DNA, 25 bp, Homo sapien
tctattacccgataggccagcatgg

SEQ ID NO: 2003444 - DNA, 25 bp, Homo sapien
tgtgtgtaggaagtgactccctccc

SEQ ID NO: 2003445 - DNA, 25 bp, Homo sapien
cagtgtgtatgtatcccagtgggac

SEQ ID NO: 2003446 - DNA, 25 bp, Homo sapien
ggtcattagccattttgtcagggtg

SEQ ID NO: 2003447 - DNA, 25 bp, Homo sapien
ttggtcattagccattttgtcaggg

SEQ ID NO: 2003448 - DNA, 25 bp, Homo sapien
ttagccattttgtcagggtgttcca

SEQ ID NO: 2003449 - DNA, 25 bp, Homo sapien
cattagccattttgtcagggtgttc

SEQ ID NO: 2003450 - DNA, 25 bp, Homo sapien
caggattgattcaaggaacacaaaa

SEQ ID NO: 2003451 - DNA, 25 bp, Homo sapien
gattgattcaaggaacacaaaatga

SEQ ID NO: 2003452 - DNA, 25 bp, Homo sapien
cagacaggattgattcaaggaacac

SEQ ID NO: 2003453 - DNA, 25 bp, Homo sapien
ctaacagacaggattgattcaagga

SEQ ID NO: 2003454 - DNA, 25 bp, Homo sapien
tgcttcatcaggtgtatggtccagg

SEQ ID NO: 2003455 - DNA, 25 bp, Homo sapien
caggtgtatggtccaggtgaaaaga

SEQ ID NO: 2003456 - DNA, 25 bp, Homo sapien
cttcatcaggtgtatggtccaggtg

SEQ ID NO: 2003457 - DNA, 25 bp, Homo sapien
atcaggtgtatggtccaggtgaaaa

SEQ ID NO: 2003458 - DNA, 25 bp, Homo sapien
aacaagattaatcgtcacgccagtg

SEQ ID NO: 2003459 - DNA, 25 bp, Homo sapien
acaagattaatcgtcacgccagtgt

SEQ ID NO: 2003460 - DNA, 25 bp, Homo sapien
attaacaagattaatcgtcacgcca

SEQ ID NO: 2003461 - DNA, 25 bp, Homo sapien
taacaagattaatcgtcacgccagt

SEQ ID NO: 2003462 - DNA, 25 bp, Homo sapien
attttaattggtccttcagaatgga

SEQ ID NO: 2003463 - DNA, 25 bp, Homo sapien
atttcatacaaagaagcttgacatt

SEQ ID NO: 2003464 - DNA, 25 bp, Homo sapien
caagaaaatttacatcttccttatc

SEQ ID NO: 2003465 - DNA, 25 bp, Homo sapien
tcctctcaagaaaatttacatcttc

SEQ ID NO: 2003466 - DNA, 25 bp, Homo sapien
catttagggtgcttctatcaatcaa

SEQ ID NO: 2003467 - DNA, 25 bp, Homo sapien
tatcaactggccaataacctccatc

SEQ ID NO: 2003468 - DNA, 25 bp, Homo sapien
tcaatcaaattagtatcaactggcc

SEQ ID NO: 2003469 - DNA, 25 bp, Homo sapien
agggtgcttctatcaatcaaattag

SEQ ID NO: 2003470 - DNA, 25 bp, Homo sapien
aaggaagatagttagggatctcata

SEQ ID NO: 2003471 - DNA, 25 bp, Homo sapien
tagttagggatctcatagattttta

SEQ ID NO: 2003472 - DNA, 25 bp, Homo sapien
ggaagatagttagggatctcataga

SEQ ID NO: 2003473 - DNA, 25 bp, Homo sapien
gatagttagggatctcatagatttt

SEQ ID NO: 2003474 - DNA, 25 bp, Homo sapien
cacaatgatcacaagcaggttgctg

SEQ ID NO: 2003475 - DNA, 25 bp, Homo sapien
tgatgacaccaacggtgaccacaat

SEQ ID NO: 2003476 - DNA, 25 bp, Homo sapien
aagagcgtcgggtgcaaatcacagc

SEQ ID NO: 2003477 - DNA, 25 bp, Homo sapien
cacgatgaccactaccagcactgtg

SEQ ID NO: 2003478 - DNA, 25 bp, Homo sapien
ctgttccgtgatttcacaacccctt

SEQ ID NO: 2003479 - DNA, 25 bp, Homo sapien
gctgccttgatgttccactgttccg

SEQ ID NO: 2003480 - DNA, 25 bp, Homo sapien
gatgttccactgttccgtgatttca

SEQ ID NO: 2003481 - DNA, 25 bp, Homo sapien
cccaccttcttttacatgagtccct

SEQ ID NO: 2003482 - DNA, 25 bp, Homo sapien
taagatgactggagattttctcaac

SEQ ID NO: 2003483 - DNA, 25 bp, Homo sapien
taggatttaagatgactggagattt

SEQ ID NO: 2003484 - DNA, 25 bp, Homo sapien
caaagtgcttagggtaggatttaag

SEQ ID NO: 2003485 - DNA, 25 bp, Homo sapien
aacatggcaccaaatcccacttttg

SEQ ID NO: 2003486 - DNA, 25 bp, Homo sapien
ctgttggttcttgacacgactgctg

SEQ ID NO: 2003487 - DNA, 25 bp, Homo sapien
tagttcatacaagctactctcagtg

SEQ ID NO: 2003488 - DNA, 25 bp, Homo sapien
tccatggctgctcaatagttcatac

SEQ ID NO: 2003489 - DNA, 25 bp, Homo sapien
ggttttccgatgatgaataagtagc

SEQ ID NO: 2003490 - DNA, 25 bp, Homo sapien
taacctgtgcaaagtcattggagtg

SEQ ID NO: 2003491 - DNA, 25 bp, Homo sapien
gtcttggcaactttggatgggagag

SEQ ID NO: 2003492 - DNA, 25 bp, Homo sapien
tgatggatccaaagatcagggggtc

SEQ ID NO: 2003493 - DNA, 25 bp, Homo sapien
ttggcaactttggatgggagagtcc

SEQ ID NO: 2003494 - DNA, 25 bp, Homo sapien
atcagggggtcggaggtccttctgg

SEQ ID NO: 2003495 - DNA, 25 bp, Homo sapien
aggattgttggactgggcatccatg

SEQ ID NO: 2003496 - DNA, 25 bp, Homo sapien
cagccagcgacctctccagagtgga

SEQ ID NO: 2003497 - DNA, 25 bp, Homo sapien
catgggaatcatgagcttggcccgg

SEQ ID NO: 2003498 - DNA, 25 bp, Homo sapien
gtgcagccagcgacctctccagagt

SEQ ID NO: 2003499 - DNA, 25 bp, Homo sapien
gacaaccctaaaggacagcctcagg

SEQ ID NO: 2003500 - DNA, 25 bp, Homo sapien
ggccaaatagttacatccgattgtg

SEQ ID NO: 2003501 - DNA, 25 bp, Homo sapien
tccaaattaagtcgctcacccaagg

SEQ ID NO: 2003502 - DNA, 25 bp, Homo sapien
ttacttgagtcaggatagagaaggc

SEQ ID NO: 2003503 - DNA, 25 bp, Homo sapien
ttggcaccgggatggcgctcacgac

SEQ ID NO: 2003504 - DNA, 25 bp, Homo sapien
tggcacaggccggagagtgaactgc

SEQ ID NO: 2003505 - DNA, 25 bp, Homo sapien
gaaacctcggtccactgagagtgtt

SEQ ID NO: 2003506 - DNA, 25 bp, Homo sapien
tgggtactgggcactttctagcgtt

SEQ ID NO: 2003507 - DNA, 25 bp, Homo sapien
ttaaaaagagaggaaaatgcattac

SEQ ID NO: 2003508 - DNA, 25 bp, Homo sapien
ttattaaaaagagaggaaaatgcat

SEQ ID NO: 2003509 - DNA, 25 bp, Homo sapien
tcatttgtgcttattaaaaagagag

SEQ ID NO: 2003510 - DNA, 25 bp, Homo sapien
catttgtgcttattaaaaagagagg

SEQ ID NO: 2003511 - DNA, 25 bp, Homo sapien
agacaaaagtggtgtgtaagggact

SEQ ID NO: 2003512 - DNA, 25 bp, Homo sapien
ctcattggtggaggtagcaaaggat

SEQ ID NO: 2003513 - DNA, 25 bp, Homo sapien
cagcataggtggttgttgggtagtt

SEQ ID NO: 2003514 - DNA, 25 bp, Homo sapien
gggactttcggttctattgcactca

SEQ ID NO: 2003515 - DNA, 25 bp, Homo sapien
tgctcatcaaggaggccatctcaga

SEQ ID NO: 2003516 - DNA, 25 bp, Homo sapien
aatggagctcaatttggatactagc

SEQ ID NO: 2003517 - DNA, 25 bp, Homo sapien
taatgtagattagcccagttcagct

SEQ ID NO: 2003518 - DNA, 25 bp, Homo sapien
tatgtggcttgtgtactaatgcaac

SEQ ID NO: 2003519 - DNA, 25 bp, Homo sapien
tggatggccactgaatactttaacc

SEQ ID NO: 2003520 - DNA, 25 bp, Homo sapien
tgtgacccatcaagtgtataagaaa

SEQ ID NO: 2003521 - DNA, 25 bp, Homo sapien
attccttctgtcactcatgcggcca

SEQ ID NO: 2003522 - DNA, 25 bp, Homo sapien
cagcagtagttaaccatgtgaccca

SEQ ID NO: 2003523 - DNA, 25 bp, Homo sapien
agtgcttgtagctcaccaagcataa

SEQ ID NO: 2003524 - DNA, 25 bp, Homo sapien
cttaagtgcttgtagctcaccaagc

SEQ ID NO: 2003525 - DNA, 25 bp, Homo sapien
ccttaagtgcttgtagctcaccaag

SEQ ID NO: 2003526 - DNA, 25 bp, Homo sapien
taagtgcttgtagctcaccaagcat

SEQ ID NO: 2003527 - DNA, 25 bp, Homo sapien
gatattctgttcgtggtacctctga

SEQ ID NO: 2003528 - DNA, 25 bp, Homo sapien
caaagagggctaactattcacgctg

SEQ ID NO: 2003529 - DNA, 25 bp, Homo sapien
ggattcacagtaagtccagtctgca

SEQ ID NO: 2003530 - DNA, 25 bp, Homo sapien
tcgcacatttaggaatgggcaggcg

SEQ ID NO: 2003531 - DNA, 25 bp, Homo sapien
ctgttggtttgtggctctcctcaga

SEQ ID NO: 2003532 - DNA, 25 bp, Homo sapien
ttcacatgggtcttaggaagagtgg

SEQ ID NO: 2003533 - DNA, 25 bp, Homo sapien
gacacaggaagcaaaggggatcttg

SEQ ID NO: 2003534 - DNA, 25 bp, Homo sapien
ccaagggaggctgttttcacatggg

SEQ ID NO: 2003535 - DNA, 25 bp, Homo sapien
ctcattggtttagatgctattacac

SEQ ID NO: 2003536 - DNA, 25 bp, Homo sapien
cagcgccagtcaatctgtcccttga

SEQ ID NO: 2003537 - DNA, 25 bp, Homo sapien
aagaacaacaatggcctggggtggc

SEQ ID NO: 2003538 - DNA, 25 bp, Homo sapien
ggtgaatggacagtactcattggtt

SEQ ID NO: 2003539 - DNA, 25 bp, Homo sapien
ctcactgaatgaagatgctggtaat

SEQ ID NO: 2003540 - DNA, 25 bp, Homo sapien
gcatattgtttcacccactccatct

SEQ ID NO: 2003541 - DNA, 25 bp, Homo sapien
aaaaggggataataagagattgcat

SEQ ID NO: 2003542 - DNA, 25 bp, Homo sapien
gaagatgtttcagagtcaaaaagat

SEQ ID NO: 2003543 - DNA, 25 bp, Homo sapien
cctgtgatggcattaagctgcttca

SEQ ID NO: 2003544 - DNA, 25 bp, Homo sapien
tgatggcattaagctgcttcatgag

SEQ ID NO: 2003545 - DNA, 25 bp, Homo sapien
aacttgccatttgttcactcagatc

SEQ ID NO: 2003546 - DNA, 25 bp, Homo sapien
ttgttcactcagatcatcctgttca

SEQ ID NO: 2003547 - DNA, 25 bp, Homo sapien
ggctgtcaggtatcacccaatggga

SEQ ID NO: 2003548 - DNA, 25 bp, Homo sapien
gaacaaattcgcaaatggaccggac

SEQ ID NO: 2003549 - DNA, 25 bp, Homo sapien
catgtcggaagtgtcaggtggcacc

SEQ ID NO: 2003550 - DNA, 25 bp, Homo sapien
taagcacattacagggcagaccaga

SEQ ID NO: 2003551 - DNA, 25 bp, Homo sapien
gtctgaaacatcacactagcacagg

SEQ ID NO: 2003552 - DNA, 25 bp, Homo sapien
cctgtggttgcatgaagggaactga

SEQ ID NO: 2003553 - DNA, 25 bp, Homo sapien
cccaaagggtggataagtatcagca

SEQ ID NO: 2003554 - DNA, 25 bp, Homo sapien
tgaaagggaaagtaaccctgctctg

SEQ ID NO: 2003555 - DNA, 25 bp, Homo sapien
agtccttcagagagtgcaactggaa

SEQ ID NO: 2003556 - DNA, 25 bp, Homo sapien
ggcccatgcccctgtgtttattaaa

SEQ ID NO: 2003557 - DNA, 25 bp, Homo sapien
ggttaacaatgctagaatctgacag

SEQ ID NO: 2003558 - DNA, 25 bp, Homo sapien
caactggaagtctgccacgtgaacg

SEQ ID NO: 2003559 - DNA, 25 bp, Homo sapien
ttggaaatctgcgttcttcatctgc

SEQ ID NO: 2003560 - DNA, 25 bp, Homo sapien
tttggaaatctgcgttcttcatctg

SEQ ID NO: 2003561 - DNA, 25 bp, Homo sapien
tggaaatctgcgttcttcatctgca

SEQ ID NO: 2003562 - DNA, 25 bp, Homo sapien
tagcagccttttgctcggatgaggg

SEQ ID NO: 2003563 - DNA, 25 bp, Homo sapien
acagccaaggaaaggtcaagtaggg

SEQ ID NO: 2003564 - DNA, 25 bp, Homo sapien
tgggaaatttaatagagtcctctgg

SEQ ID NO: 2003565 - DNA, 25 bp, Homo sapien
gctcgagtaatttggcgtacatcca

SEQ ID NO: 2003566 - DNA, 25 bp, Homo sapien
ggcattgtggatgtcatcgccatat

SEQ ID NO: 2003567 - DNA, 25 bp, Homo sapien
cggcattgtggatgtcatcgccata

SEQ ID NO: 2003568 - DNA, 25 bp, Homo sapien
acaggaatctcatcttctaaatatt

SEQ ID NO: 2003569 - DNA, 25 bp, Homo sapien
gaaagccagaaacacaggaatctca

SEQ ID NO: 2003570 - DNA, 25 bp, Homo sapien
acacaggaatctcatcttctaaata

SEQ ID NO: 2003571 - DNA, 25 bp, Homo sapien
atgaaagccagaaacacaggaatct

SEQ ID NO: 2003572 - DNA, 25 bp, Homo sapien
ttgaactggtaatgaaaatggtgat

SEQ ID NO: 2003573 - DNA, 25 bp, Homo sapien
tgcagccataagcactgggtccact

SEQ ID NO: 2003574 - DNA, 25 bp, Homo sapien
gatgcagccataagcactgggtcca

SEQ ID NO: 2003575 - DNA, 25 bp, Homo sapien
gccataagcactgggtccacttttc

SEQ ID NO: 2003576 - DNA, 25 bp, Homo sapien
cttcagtgcattgctaccactgcag

SEQ ID NO: 2003577 - DNA, 25 bp, Homo sapien
agtgcattgctaccactgcagaggt

SEQ ID NO: 2003578 - DNA, 25 bp, Homo sapien
cattgctaccactgcagaggtttca

SEQ ID NO: 2003579 - DNA, 25 bp, Homo sapien
aaacttcagtgcattgctaccactg

SEQ ID NO: 2003580 - DNA, 25 bp, Homo sapien
caaaagtccattgaacatcagccat

SEQ ID NO: 2003581 - DNA, 25 bp, Homo sapien
gggaaaggaaggcattgctcaacat

SEQ ID NO: 2003582 - DNA, 25 bp, Homo sapien
tgtctaatactctgttgggaaagga

SEQ ID NO: 2003583 - DNA, 25 bp, Homo sapien
ttatagccctaataccaaaagtcca

SEQ ID NO: 2003584 - DNA, 25 bp, Homo sapien
taacattttaggcactgcacagccc

SEQ ID NO: 2003585 - DNA, 25 bp, Homo sapien
ttggaagcaagtcacactgtggtga

SEQ ID NO: 2003586 - DNA, 25 bp, Homo sapien
ttagatcctctgcatgaaaccatgc

SEQ ID NO: 2003587 - DNA, 25 bp, Homo sapien
acatggtccccagtttagatcctct

SEQ ID NO: 2003588 - DNA, 25 bp, Homo sapien
gaattagacatccaactgaagatgc

SEQ ID NO: 2003589 - DNA, 25 bp, Homo sapien
atgaaaaagcctgtggataggtcaa

SEQ ID NO: 2003590 - DNA, 25 bp, Homo sapien
caaaacgtctcctgtacatgtgcag

SEQ ID NO: 2003591 - DNA, 25 bp, Homo sapien
ttatggagttcaagggaaagacgag

SEQ ID NO: 2003592 - DNA, 25 bp, Homo sapien
ttgttagccaggtagaagagaatga

SEQ ID NO: 2003593 - DNA, 25 bp, Homo sapien
agacaagtaataagcagcatctgcc

SEQ ID NO: 2003594 - DNA, 25 bp, Homo sapien
gccacacttcagagagcatatatga

SEQ ID NO: 2003595 - DNA, 25 bp, Homo sapien
ctgactactggacttgttagccagg

SEQ ID NO: 2003596 - DNA, 25 bp, Homo sapien
tcacccccgatacccttgtgagtgt

SEQ ID NO: 2003597 - DNA, 25 bp, Homo sapien
tctggaattgaaccatattcttttc

SEQ ID NO: 2003598 - DNA, 25 bp, Homo sapien
tactcctcctgttgttaaatcaccc

SEQ ID NO: 2003599 - DNA, 25 bp, Homo sapien
taaatcacccccgatacccttgtga

SEQ ID NO: 2003600 - DNA, 25 bp, Homo sapien
caggtttcatacaacaatataaagc

SEQ ID NO: 2003601 - DNA, 25 bp, Homo sapien
caaaacttcttagtggaatagtcat

SEQ ID NO: 2003602 - DNA, 25 bp, Homo sapien
aacatcttgatgagtagccctggtg

SEQ ID NO: 2003603 - DNA, 25 bp, Homo sapien
aaagcagtgtctctgttccacttca

SEQ ID NO: 2003604 - DNA, 25 bp, Homo sapien
tgaaaatgggagtaccacataccaa

SEQ ID NO: 2003605 - DNA, 25 bp, Homo sapien
caaaccaatgaaaggaacagctgga

SEQ ID NO: 2003606 - DNA, 25 bp, Homo sapien
tgggagtaccacataccaaaatcta

SEQ ID NO: 2003607 - DNA, 25 bp, Homo sapien
taccaggagggaagtctatagcaat

SEQ ID NO: 2003608 - DNA, 25 bp, Homo sapien
ttttatgaaggtgattatctgtaaa

SEQ ID NO: 2003609 - DNA, 25 bp, Homo sapien
tttatgaaggtgattatctgtaaaa

SEQ ID NO: 2003610 - DNA, 25 bp, Homo sapien
gaccattcagcaggaagcacaatct

SEQ ID NO: 2003611 - DNA, 25 bp, Homo sapien
aatgttaacggtgaggactgcagcc

SEQ ID NO: 2003612 - DNA, 25 bp, Homo sapien
tatataaatctctctatgcagacaa

SEQ ID NO: 2003613 - DNA, 25 bp, Homo sapien
aatcttggcttcagaactacttggc

SEQ ID NO: 2003614 - DNA, 25 bp, Homo sapien
aacatacctcatagtagagttctga

SEQ ID NO: 2003615 - DNA, 25 bp, Homo sapien
ccaggtgagtatcttacttcattta

SEQ ID NO: 2003616 - DNA, 25 bp, Homo sapien
attgtcataagaataaagtcatgca

SEQ ID NO: 2003617 - DNA, 25 bp, Homo sapien
gaaaatccaggtgagtatcttactt

SEQ ID NO: 2003618 - DNA, 25 bp, Homo sapien
ttggtcatattgtgaggggcttgaa

SEQ ID NO: 2003619 - DNA, 25 bp, Homo sapien
ctttgccccaaacgtaccctctgtg

SEQ ID NO: 2003620 - DNA, 25 bp, Homo sapien
tatattcggtagtaaaatatgtgag

SEQ ID NO: 2003621 - DNA, 25 bp, Homo sapien
cctctgtgttttatattcggtagta

SEQ ID NO: 2003622 - DNA, 25 bp, Homo sapien
agatgaagggccctgatctaagagc

SEQ ID NO: 2003623 - DNA, 25 bp, Homo sapien
atgaagggccctgatctaagagctt

SEQ ID NO: 2003624 - DNA, 25 bp, Homo sapien
aagatactgttggtatttcttttca

SEQ ID NO: 2003625 - DNA, 25 bp, Homo sapien
gctgagatgaagggccctgatctaa

SEQ ID NO: 2003626 - DNA, 25 bp, Homo sapien
gatgtcgccattacaaatggcttgg

SEQ ID NO: 2003627 - DNA, 25 bp, Homo sapien
tgttacatcccattctgtgatgtcg

SEQ ID NO: 2003628 - DNA, 25 bp, Homo sapien
gcttggtcgtctttatccactctac

SEQ ID NO: 2003629 - DNA, 25 bp, Homo sapien
caaatggcttggtcgtctttatcca

SEQ ID NO: 2003630 - DNA, 25 bp, Homo sapien
tgcatagaggttggaccgcaacatt

SEQ ID NO: 2003631 - DNA, 25 bp, Homo sapien
tctgtggcttttgccgagtgcatag

SEQ ID NO: 2003632 - DNA, 25 bp, Homo sapien
tgatgtagtttttagagcccagaca

SEQ ID NO: 2003633 - DNA, 25 bp, Homo sapien
tctacattctccaattctgtggctt

SEQ ID NO: 2003634 - DNA, 25 bp, Homo sapien
aagtcacagagaaaccatgccatgc

SEQ ID NO: 2003635 - DNA, 25 bp, Homo sapien
aataaaatgctcagtcagtgtgggc

SEQ ID NO: 2003636 - DNA, 25 bp, Homo sapien
gaaagcacctcaaatgcatgtgaag

SEQ ID NO: 2003637 - DNA, 25 bp, Homo sapien
tagtaggcggcatagcaggtgcatc

SEQ ID NO: 2003638 - DNA, 25 bp, Homo sapien
tgtttatggttataaccttctgtat

SEQ ID NO: 2003639 - DNA, 25 bp, Homo sapien
gctgtttatggttataaccttctgt

SEQ ID NO: 2003640 - DNA, 25 bp, Homo sapien
tgctgtttatggttataaccttctg

SEQ ID NO: 2003641 - DNA, 25 bp, Homo sapien
cctgctgtttatggttataaccttc

SEQ ID NO: 2003642 - DNA, 25 bp, Homo sapien
caactttggtgagtttgagtttctg

SEQ ID NO: 2003643 - DNA, 25 bp, Homo sapien
tgataaccacctgttttggaaggta

SEQ ID NO: 2003644 - DNA, 25 bp, Homo sapien
ccataatctctgacaactttggtga

SEQ ID NO: 2003645 - DNA, 25 bp, Homo sapien
gtattttgccaacccaaagaccata

SEQ ID NO: 2003646 - DNA, 25 bp, Homo sapien
cattttcataatttaactttgtgtc

SEQ ID NO: 2003647 - DNA, 25 bp, Homo sapien
ctctgtctttcctgttaccgcttgc

SEQ ID NO: 2003648 - DNA, 25 bp, Homo sapien
ctgttaccgcttgctctgaggcttc

SEQ ID NO: 2003649 - DNA, 25 bp, Homo sapien
acagctaggtccctaggactccttg

SEQ ID NO: 2003650 - DNA, 25 bp, Homo sapien
cttttggcagcacttattctaattt

SEQ ID NO: 2003651 - DNA, 25 bp, Homo sapien
tgtaccattggacacgagggctgag

SEQ ID NO: 2003652 - DNA, 25 bp, Homo sapien
gacaatataagagggtactccgaga

SEQ ID NO: 2003653 - DNA, 25 bp, Homo sapien
aagggctggccggatctgttcctgc

SEQ ID NO: 2003654 - DNA, 25 bp, Homo sapien
caagagtattgagctcccctctggg

SEQ ID NO: 2003655 - DNA, 25 bp, Homo sapien
ctggagccccaaaagtaagaatgat

SEQ ID NO: 2003656 - DNA, 25 bp, Homo sapien
gccccaaaagtaagaatgatagtaa

SEQ ID NO: 2003657 - DNA, 25 bp, Homo sapien
tcacagtggttgcatcataattgta

SEQ ID NO: 2003658 - DNA, 25 bp, Homo sapien
gctgatcacagtggttgcatcataa

SEQ ID NO: 2003659 - DNA, 25 bp, Homo sapien
tggcatctctttgttgatcagctgc

SEQ ID NO: 2003660 - DNA, 25 bp, Homo sapien
tatgtgggcattgatagatggcaga

SEQ ID NO: 2003661 - DNA, 25 bp, Homo sapien
gcaaatgagagtcactttggtaaag

SEQ ID NO: 2003662 - DNA, 25 bp, Homo sapien
gcaactgatatcatcatggcaactt

SEQ ID NO: 2003663 - DNA, 25 bp, Homo sapien
tcttcctgtactgtgggcaactgat

SEQ ID NO: 2003664 - DNA, 25 bp, Homo sapien
tttggtcatggaggtagttcttaaa

SEQ ID NO: 2003665 - DNA, 25 bp, Homo sapien
acttcttactgttgtcagactgagg

SEQ ID NO: 2003666 - DNA, 25 bp, Homo sapien
tgtttcaatggcagttattacctgt

SEQ ID NO: 2003667 - DNA, 25 bp, Homo sapien
gttattacctgttctttggtcatgg

SEQ ID NO: 2003668 - DNA, 25 bp, Homo sapien
tcaccttgtttccccataagcctca

SEQ ID NO: 2003669 - DNA, 25 bp, Homo sapien
caccttgtttccccataagcctcat

SEQ ID NO: 2003670 - DNA, 25 bp, Homo sapien
agagcaacatcattttggttagcaa

SEQ ID NO: 2003671 - DNA, 25 bp, Homo sapien
tcattttggttagcaaatgtgccat

SEQ ID NO: 2003672 - DNA, 25 bp, Homo sapien
gtgggcagatggagctcacacagct

SEQ ID NO: 2003673 - DNA, 25 bp, Homo sapien
gaggaaatttagacccaagtgagag

SEQ ID NO: 2003674 - DNA, 25 bp, Homo sapien
tttctgcaggaaaggttttacagat

SEQ ID NO: 2003675 - DNA, 25 bp, Homo sapien
ggacggtcacctttgtgggatagac

SEQ ID NO: 2003676 - DNA, 25 bp, Homo sapien
agacataaggcttgtgtttctgcag

SEQ ID NO: 2003677 - DNA, 25 bp, Homo sapien
agacaaagcataggacggtcacctt

SEQ ID NO: 2003678 - DNA, 25 bp, Homo sapien
caaatgttggtagtgtcccaagagt

SEQ ID NO: 2003679 - DNA, 25 bp, Homo sapien
aatctgtccccttagaaaagcaggg

SEQ ID NO: 2003680 - DNA, 25 bp, Homo sapien
gacattctgtagatggcggaaaact

SEQ ID NO: 2003681 - DNA, 25 bp, Homo sapien
tgctggtgcctgatcctagaggtga

SEQ ID NO: 2003682 - DNA, 25 bp, Homo sapien
gccatttattagaacccatctttga

SEQ ID NO: 2003683 - DNA, 25 bp, Homo sapien
tctctgtggtgaatacagtaaggaa

SEQ ID NO: 2003684 - DNA, 25 bp, Homo sapien
atttggagccagacatctctgtggt

SEQ ID NO: 2003685 - DNA, 25 bp, Homo sapien
cagtaaggaatgtagtaaagtaggt

SEQ ID NO: 2003686 - DNA, 25 bp, Homo sapien
agcagaagatgtgaggtgagggcat

SEQ ID NO: 2003687 - DNA, 25 bp, Homo sapien
gaccaggggatggagagcattgagc

SEQ ID NO: 2003688 - DNA, 25 bp, Homo sapien
gcattgagcagaagatgtgaggtga

SEQ ID NO: 2003689 - DNA, 25 bp, Homo sapien
atggagagcattgagcagaagatgt

SEQ ID NO: 2003690 - DNA, 25 bp, Homo sapien
ggttcaggcccaaaatatccaggaa

SEQ ID NO: 2003691 - DNA, 25 bp, Homo sapien
gctaattagagtcctgatatctaaa

SEQ ID NO: 2003692 - DNA, 25 bp, Homo sapien
tgctcataaggctttctgctaatta

SEQ ID NO: 2003693 - DNA, 25 bp, Homo sapien
tgtcatcttgctcataaggctttct

SEQ ID NO: 2003694 - DNA, 25 bp, Homo sapien
taagcaccagcgtaattggcagcac

SEQ ID NO: 2003695 - DNA, 25 bp, Homo sapien
gctactgctgtttagatattcttga

SEQ ID NO: 2003696 - DNA, 25 bp, Homo sapien
ttcagttcatacaggaacacagggt

SEQ ID NO: 2003697 - DNA, 25 bp, Homo sapien
caactagttgtggtccctaagctac

SEQ ID NO: 2003698 - DNA, 25 bp, Homo sapien
tttgtgttggcaagtgtttggcagt

SEQ ID NO: 2003699 - DNA, 25 bp, Homo sapien
agggtgagaggatgtttgtgttggc

SEQ ID NO: 2003700 - DNA, 25 bp, Homo sapien
atgtttgtgttggcaagtgtttggc

SEQ ID NO: 2003701 - DNA, 25 bp, Homo sapien
gagaggatgtttgtgttggcaagtg

SEQ ID NO: 2003702 - DNA, 25 bp, Homo sapien
tgaagctgagaactgcactttctat

SEQ ID NO: 2003703 - DNA, 25 bp, Homo sapien
gacatgtcagactcattatgtttga

SEQ ID NO: 2003704 - DNA, 25 bp, Homo sapien
ttgattcattggacttcagtgtctg

SEQ ID NO: 2003705 - DNA, 25 bp, Homo sapien
tgcactttctataagcagctgtgaa

SEQ ID NO: 2003706 - DNA, 25 bp, Homo sapien
ttacactgtcgtttgccctgaaggg

SEQ ID NO: 2003707 - DNA, 25 bp, Homo sapien
taggctctcatgacactgtaactcc

SEQ ID NO: 2003708 - DNA, 25 bp, Homo sapien
ccttcctagcactggtccgagttgt

SEQ ID NO: 2003709 - DNA, 25 bp, Homo sapien
tccgagttgtaattgctcagagcct

SEQ ID NO: 2003710 - DNA, 25 bp, Homo sapien
ccaagagccctgacttcagcaaagt

SEQ ID NO: 2003711 - DNA, 25 bp, Homo sapien
tagaaatgctctatgcatgtccctt

SEQ ID NO: 2003712 - DNA, 25 bp, Homo sapien
gctttggaatcatagtacgtgccca

SEQ ID NO: 2003713 - DNA, 25 bp, Homo sapien
tacgtgcccaaaatctccacaggct

SEQ ID NO: 2003714 - DNA, 25 bp, Homo sapien
gcaacattgatgagcctgaatcact

SEQ ID NO: 2003715 - DNA, 25 bp, Homo sapien
gatgagcctgaatcactagcttgta

SEQ ID NO: 2003716 - DNA, 25 bp, Homo sapien
tgaagataagaactataccatagag

SEQ ID NO: 2003717 - DNA, 25 bp, Homo sapien
gaatcactagcttgtactatgaaga

SEQ ID NO: 2003718 - DNA, 25 bp, Homo sapien
tgaagttcaggaaaccacaaaatgt

SEQ ID NO: 2003719 - DNA, 25 bp, Homo sapien
tgtatttccgcctgttcagtccacc

SEQ ID NO: 2003720 - DNA, 25 bp, Homo sapien
tcatgcatttggtgggcctcataag

SEQ ID NO: 2003721 - DNA, 25 bp, Homo sapien
ctccagtgtgagctgcgatgatgaa

SEQ ID NO: 2003722 - DNA, 25 bp, Homo sapien
catctggccttgttgacgggaacct

SEQ ID NO: 2003723 - DNA, 25 bp, Homo sapien
cagcactgggctcggttttagggac

SEQ ID NO: 2003724 - DNA, 25 bp, Homo sapien
tgtcctgcgattggatggctgccga

SEQ ID NO: 2003725 - DNA, 25 bp, Homo sapien
tctgcagtctgggacggcagatgat

SEQ ID NO: 2003726 - DNA, 25 bp, Homo sapien
ggatcatattggcatctctttatac

SEQ ID NO: 2003727 - DNA, 25 bp, Homo sapien
tctctttatactgccattccttctc

SEQ ID NO: 2003728 - DNA, 25 bp, Homo sapien
aggatcatattggcatctctttata

SEQ ID NO: 2003729 - DNA, 25 bp, Homo sapien
gcatctctttatactgccattcctt

SEQ ID NO: 2003730 - DNA, 25 bp, Homo sapien
accccaacttgtagggcaaagcata

SEQ ID NO: 2003731 - DNA, 25 bp, Homo sapien
atagaagagcaagtgggtgcgaacg

SEQ ID NO: 2003732 - DNA, 25 bp, Homo sapien
caagtgggtgcgaacgggccagggc

SEQ ID NO: 2003733 - DNA, 25 bp, Homo sapien
caccccaacttgtagggcaaagcat

SEQ ID NO: 2003734 - DNA, 25 bp, Homo sapien
caattttgaagttgcccgaagttca

SEQ ID NO: 2003735 - DNA, 25 bp, Homo sapien
cgaagttcaactgtactgagttggg

SEQ ID NO: 2003736 - DNA, 25 bp, Homo sapien
cccagaattgctgtcaattttgaag

SEQ ID NO: 2003737 - DNA, 25 bp, Homo sapien
accacattcctggtgggagacccca

SEQ ID NO: 2003738 - DNA, 25 bp, Homo sapien
cagactttggatattggagaagccc

SEQ ID NO: 2003739 - DNA, 25 bp, Homo sapien
ctctgccactgccagactttggata

SEQ ID NO: 2003740 - DNA, 25 bp, Homo sapien
actttggatattggagaagccctac

SEQ ID NO: 2003741 - DNA, 25 bp, Homo sapien
ccactgccagactttggatattgga

SEQ ID NO: 2003742 - DNA, 25 bp, Homo sapien
ttaaaccactgtgacctccagctct

SEQ ID NO: 2003743 - DNA, 25 bp, Homo sapien
tgtgacctccagctctccttgatgc

SEQ ID NO: 2003744 - DNA, 25 bp, Homo sapien
ttgatgccatgctttccaagtagca

SEQ ID NO: 2003745 - DNA, 25 bp, Homo sapien
tagcagtcattctttgaatggtcgc

SEQ ID NO: 2003746 - DNA, 25 bp, Homo sapien
cattgactttatcgtgcatgtcaag

SEQ ID NO: 2003747 - DNA, 25 bp, Homo sapien
ctttatcgtgcatgtcaagtaactc

SEQ ID NO: 2003748 - DNA, 25 bp, Homo sapien
tcaagtaactctgtccagttacatg

SEQ ID NO: 2003749 - DNA, 25 bp, Homo sapien
tttggctcctacattgactttatcg

SEQ ID NO: 2003750 - DNA, 25 bp, Homo sapien
agcagattcagaaagtaaaggtggt

SEQ ID NO: 2003751 - DNA, 25 bp, Homo sapien
taaaggtggttacttatcacaggtg

SEQ ID NO: 2003752 - DNA, 25 bp, Homo sapien
ctgtcggccctcatgctgcagtcag

SEQ ID NO: 2003753 - DNA, 25 bp, Homo sapien
cagattcagaaagtaaaggtggtta

SEQ ID NO: 2003754 - DNA, 25 bp, Homo sapien
tagtaagttagagtgttgaccaaga

SEQ ID NO: 2003755 - DNA, 25 bp, Homo sapien
agtaagttagagtgttgaccaagaa

SEQ ID NO: 2003756 - DNA, 25 bp, Homo sapien
ttagtaagttagagtgttgaccaag

SEQ ID NO: 2003757 - DNA, 25 bp, Homo sapien
ccatgtagactaggtatatcctgca

SEQ ID NO: 2003758 - DNA, 25 bp, Homo sapien
gaagcatcctgcaatagtaactctc

SEQ ID NO: 2003759 - DNA, 25 bp, Homo sapien
ctaggtatatcctgcagaagcatcc

SEQ ID NO: 2003760 - DNA, 25 bp, Homo sapien
gcaacaagcaatccatgtagactag

SEQ ID NO: 2003761 - DNA, 25 bp, Homo sapien
gtcttgtgctgaatcttgccactgc

SEQ ID NO: 2003762 - DNA, 25 bp, Homo sapien
ggattatcttgatcaagtcttgtgc

SEQ ID NO: 2003763 - DNA, 25 bp, Homo sapien
tgccactgcatctgtttcagaggcc

SEQ ID NO: 2003764 - DNA, 25 bp, Homo sapien
tcagaggccagattttccatagctc

SEQ ID NO: 2003765 - DNA, 25 bp, Homo sapien
cactcaacctcttctcatattgctg

SEQ ID NO: 2003766 - DNA, 25 bp, Homo sapien
tcactcaacctcttctcatattgct

SEQ ID NO: 2003767 - DNA, 25 bp, Homo sapien
cccatgacacagagtttacccgtat

SEQ ID NO: 2003768 - DNA, 25 bp, Homo sapien
ttacccgtataaaacctgcacatgt

SEQ ID NO: 2003769 - DNA, 25 bp, Homo sapien
taaattgtataccaagcccccatga

SEQ ID NO: 2003770 - DNA, 25 bp, Homo sapien
cataaattgtataccaagcccccat

SEQ ID NO: 2003771 - DNA, 25 bp, Homo sapien
cagcaagcttgaagtgctaatccca

SEQ ID NO: 2003772 - DNA, 25 bp, Homo sapien
ccagaacagcaagcttgaagtgcta

SEQ ID NO: 2003773 - DNA, 25 bp, Homo sapien
cagaacagcaagcttgaagtgctaa

SEQ ID NO: 2003774 - DNA, 25 bp, Homo sapien
gaacagcaagcttgaagtgctaatc

SEQ ID NO: 2003775 - DNA, 25 bp, Homo sapien
taacgatgttcctctagttgcaggc

SEQ ID NO: 2003776 - DNA, 25 bp, Homo sapien
acatggtcagtcaggacggaatccg

SEQ ID NO: 2003777 - DNA, 25 bp, Homo sapien
gtgtctttttcctagcataacatgg

SEQ ID NO: 2003778 - DNA, 25 bp, Homo sapien
tccgtactcctctggtagttcagta

SEQ ID NO: 2003779 - DNA, 25 bp, Homo sapien
gaaatcgattaggactctcacagga

SEQ ID NO: 2003780 - DNA, 25 bp, Homo sapien
caaagacagtctggcaatgaggatc

SEQ ID NO: 2003781 - DNA, 25 bp, Homo sapien
caggaactcttgcacgctcagacaa

SEQ ID NO: 2003782 - DNA, 25 bp, Homo sapien
tagctgtcgtgcaggtaagaccatt

SEQ ID NO: 2003783 - DNA, 25 bp, Homo sapien
gaaagcagagcgattcttcctagga

SEQ ID NO: 2003784 - DNA, 25 bp, Homo sapien
aaggttttctgtctcgagaacgcca

SEQ ID NO: 2003785 - DNA, 25 bp, Homo sapien
gggtgactagtcaaagcttttccag

SEQ ID NO: 2003786 - DNA, 25 bp, Homo sapien
tccactcgggtcttaagctgacaaa

SEQ ID NO: 2003787 - DNA, 25 bp, Homo sapien
gaaggacatctctggatcatgtttc

SEQ ID NO: 2003788 - DNA, 25 bp, Homo sapien
tttctcgggcacaggggacatcaga

SEQ ID NO: 2003789 - DNA, 25 bp, Homo sapien
aagccattatatggtgtcccttggg

SEQ ID NO: 2003790 - DNA, 25 bp, Homo sapien
tctccagttacgcaaggcagaagcc

SEQ ID NO: 2003791 - DNA, 25 bp, Homo sapien
cacactttgaaattaggagaacctg

SEQ ID NO: 2003792 - DNA, 25 bp, Homo sapien
tcactctggtaaaagcaagccatct

SEQ ID NO: 2003793 - DNA, 25 bp, Homo sapien
cataatgtgaagaactaccatttct

SEQ ID NO: 2003794 - DNA, 25 bp, Homo sapien
tgctgtcatctttgatactatctgg

SEQ ID NO: 2003795 - DNA, 25 bp, Homo sapien
tcataatgtgaagaactaccatttc

SEQ ID NO: 2003796 - DNA, 25 bp, Homo sapien
ctttgatactatctggtctcttgat

SEQ ID NO: 2003797 - DNA, 25 bp, Homo sapien
tccagtcttcatggattcaggattc

SEQ ID NO: 2003798 - DNA, 25 bp, Homo sapien
gtttgaaacagtttagagtagttgc

SEQ ID NO: 2003799 - DNA, 25 bp, Homo sapien
tcatagtttgaaacagtttagagta

SEQ ID NO: 2003800 - DNA, 25 bp, Homo sapien
ttgaaacagtttagagtagttgcct

SEQ ID NO: 2003801 - DNA, 25 bp, Homo sapien
agcggcgctggcggcgactccgcca

SEQ ID NO: 2003802 - DNA, 25 bp, Homo sapien
gcggcgctggcggcgactccgccat

SEQ ID NO: 2003803 - DNA, 25 bp, Homo sapien
cagcggcgctggcggcgactccgcc

SEQ ID NO: 2003804 - DNA, 25 bp, Homo sapien
atgatgcttgcgcgcgtcccccgcg

SEQ ID NO: 2003805 - DNA, 25 bp, Homo sapien
ggctcggttacggaagaagcgcagc

SEQ ID NO: 2003806 - DNA, 25 bp, Homo sapien
ctcggttacggaagaagcgcagcgc

SEQ ID NO: 2003807 - DNA, 25 bp, Homo sapien
caagggctcggttacggaagaagcg

SEQ ID NO: 2003808 - DNA, 25 bp, Homo sapien
acaagatggccgcccatagcgcttg

SEQ ID NO: 2003809 - DNA, 25 bp, Homo sapien
tggccgcccatagcgcttggaggac

SEQ ID NO: 2003810 - DNA, 25 bp, Homo sapien
gagacaagatggccgcccatagcgc

SEQ ID NO: 2003811 - DNA, 25 bp, Homo sapien
agatggccgcccatagcgcttggag

SEQ ID NO: 2003812 - DNA, 25 bp, Homo sapien
tgcgttttcgcttactgttcctaag

SEQ ID NO: 2003813 - DNA, 25 bp, Homo sapien
taagttgcgttttcgcttactgttc

SEQ ID NO: 2003814 - DNA, 25 bp, Homo sapien
caccaagctgggtatgttagaattc

SEQ ID NO: 2003815 - DNA, 25 bp, Homo sapien
caagctgggtatgttagaattccac

SEQ ID NO: 2003816 - DNA, 25 bp, Homo sapien
catttccagagtttatcattgaacc

SEQ ID NO: 2003817 - DNA, 25 bp, Homo sapien
tcatttccagagtttatcattgaac

SEQ ID NO: 2003818 - DNA, 25 bp, Homo sapien
tcgaagaacatgaataaagacagtc

SEQ ID NO: 2003819 - DNA, 25 bp, Homo sapien
caaaccacgaaaaccactgtaagat

SEQ ID NO: 2003820 - DNA, 25 bp, Homo sapien
taaatgacacagaaaacgttctatc

SEQ ID NO: 2003821 - DNA, 25 bp, Homo sapien
gatgcattgcctaaataaatgacac

SEQ ID NO: 2003822 - DNA, 25 bp, Homo sapien
cattcggctgttagcaaacttgcaa

SEQ ID NO: 2003823 - DNA, 25 bp, Homo sapien
caggtggccttgtaaactcatatga

SEQ ID NO: 2003824 - DNA, 25 bp, Homo sapien
cttgcaaatccctagacctgagtga

SEQ ID NO: 2003825 - DNA, 25 bp, Homo sapien
taaagacactgtgacgaattcaacc

SEQ ID NO: 2003826 - DNA, 25 bp, Homo sapien
gcttctccatcccgccgctgccaac

SEQ ID NO: 2003827 - DNA, 25 bp, Homo sapien
cttctccatcccgccgctgccaacc

SEQ ID NO: 2003828 - DNA, 25 bp, Homo sapien
ttctccatcccgccgctgccaaccg

SEQ ID NO: 2003829 - DNA, 25 bp, Homo sapien
agcttctccatcccgccgctgccaa

SEQ ID NO: 2003830 - DNA, 25 bp, Homo sapien
tgcgagctggctgccgcccccacgt

SEQ ID NO: 2003831 - DNA, 25 bp, Homo sapien
ctgcgagctggctgccgcccccacg

SEQ ID NO: 2003832 - DNA, 25 bp, Homo sapien
ggctgccgcccccacgtccgccagt

SEQ ID NO: 2003833 - DNA, 25 bp, Homo sapien
ccgcccccacgtccgccagttccat

SEQ ID NO: 2003834 - DNA, 25 bp, Homo sapien
tttacacccaaggaggccgctggct

SEQ ID NO: 2003835 - DNA, 25 bp, Homo sapien
aaggaggccgctggctcctctggct

SEQ ID NO: 2003836 - DNA, 25 bp, Homo sapien
ccttctcatttacacccaaggaggc

SEQ ID NO: 2003837 - DNA, 25 bp, Homo sapien
ctcatttacacccaaggaggccgct

SEQ ID NO: 2003838 - DNA, 25 bp, Homo sapien
cgccgcgtaacacaaggcagaggga

SEQ ID NO: 2003839 - DNA, 25 bp, Homo sapien
tatttgtagtgtggacgcgccccac

SEQ ID NO: 2003840 - DNA, 25 bp, Homo sapien
gggtgaagccattcctctagaggta

SEQ ID NO: 2003841 - DNA, 25 bp, Homo sapien
gaaaggacggcgcagataaaccctc

SEQ ID NO: 2003842 - DNA, 25 bp, Homo sapien
aatgagcgacaaggtcctcaacttc

SEQ ID NO: 2003843 - DNA, 25 bp, Homo sapien
tgccaaatgagcgacaaggtcctca

SEQ ID NO: 2003844 - DNA, 25 bp, Homo sapien
caaatgagcgacaaggtcctcaact

SEQ ID NO: 2003845 - DNA, 25 bp, Homo sapien
cttctgccaaatgagcgacaaggtc

SEQ ID NO: 2003846 - DNA, 25 bp, Homo sapien
acctgactccgcctaggttctgagc

SEQ ID NO: 2003847 - DNA, 25 bp, Homo sapien
cggagacgtgaccacagcggacctg

SEQ ID NO: 2003848 - DNA, 25 bp, Homo sapien
acagcggacctgactccgcctaggt

SEQ ID NO: 2003849 - DNA, 25 bp, Homo sapien
agacgtgaccacagcggacctgact

SEQ ID NO: 2003850 - DNA, 25 bp, Homo sapien
gtttaatgctaaatcgccagtgcct

SEQ ID NO: 2003851 - DNA, 25 bp, Homo sapien
gggatctagctctgcaactttcagg

SEQ ID NO: 2003852 - DNA, 25 bp, Homo sapien
gagaaccggtgcctttacatccagg

SEQ ID NO: 2003853 - DNA, 25 bp, Homo sapien
caaccagtgggtacaagtgtgggct

SEQ ID NO: 2003854 - DNA, 25 bp, Homo sapien
gatgaagcatttggtgtgggcaaca

SEQ ID NO: 2003855 - DNA, 25 bp, Homo sapien
atgaagcatttggtgtgggcaacac

SEQ ID NO: 2003856 - DNA, 25 bp, Homo sapien
actctggatgaagcatttggtgtgg

SEQ ID NO: 2003857 - DNA, 25 bp, Homo sapien
ctatgactctggatgaagcatttgg

SEQ ID NO: 2003858 - DNA, 25 bp, Homo sapien
atcatttctacttgtgcataaaagc

SEQ ID NO: 2003859 - DNA, 25 bp, Homo sapien
tcatttctacttgtgcataaaagca

SEQ ID NO: 2003860 - DNA, 25 bp, Homo sapien
gatcatttctacttgtgcataaaag

SEQ ID NO: 2003861 - DNA, 25 bp, Homo sapien
cttggcgtagcaaaaactagtcatc

SEQ ID NO: 2003862 - DNA, 25 bp, Homo sapien
ttggcgtagcaaaaactagtcatcc

SEQ ID NO: 2003863 - DNA, 25 bp, Homo sapien
catagcctccatatatcaaatctct

SEQ ID NO: 2003864 - DNA, 25 bp, Homo sapien
taagaatcaaaagccctgtctcaat

SEQ ID NO: 2003865 - DNA, 25 bp, Homo sapien
aacattaggttttcaagctatctcc

SEQ ID NO: 2003866 - DNA, 25 bp, Homo sapien
tgagaaacccaagcacaattgaaga

SEQ ID NO: 2003867 - DNA, 25 bp, Homo sapien
taagacatttctctgtagcgggtca

SEQ ID NO: 2003868 - DNA, 25 bp, Homo sapien
tagcgggtcaggtcttctccattaa

SEQ ID NO: 2003869 - DNA, 25 bp, Homo sapien
cattaactaataccaactgtggaca

SEQ ID NO: 2003870 - DNA, 25 bp, Homo sapien
tcatagttgcaggtaaccaccaaat

SEQ ID NO: 2003871 - DNA, 25 bp, Homo sapien
acatataattatatagggcccaaaa

SEQ ID NO: 2003872 - DNA, 25 bp, Homo sapien
taataaggttataaacagatcagag

SEQ ID NO: 2003873 - DNA, 25 bp, Homo sapien
tacagtaaaggactaactggctacg

SEQ ID NO: 2003874 - DNA, 25 bp, Homo sapien
tctttcttggtatcaacttcataag

SEQ ID NO: 2003875 - DNA, 25 bp, Homo sapien
ctctcaacaactggactaaattctt

SEQ ID NO: 2003876 - DNA, 25 bp, Homo sapien
gaaagttcatcactttgcagctgct

SEQ ID NO: 2003877 - DNA, 25 bp, Homo sapien
actgattattgtatacatgacccga

SEQ ID NO: 2003878 - DNA, 25 bp, Homo sapien
acacagtcaccgcagaaagttcatc

SEQ ID NO: 2003879 - DNA, 25 bp, Homo sapien
cagaggcctaaccttgacttttcca

SEQ ID NO: 2003880 - DNA, 25 bp, Homo sapien
ggactaagagatcactgccaccctg

SEQ ID NO: 2003881 - DNA, 25 bp, Homo sapien
tcaataagcaaattccaagggcctg

SEQ ID NO: 2003882 - DNA, 25 bp, Homo sapien
gccaccctgttatccacttgactaa

SEQ ID NO: 2003883 - DNA, 25 bp, Homo sapien
caagtagtctgatgtgcaagacgtc

SEQ ID NO: 2003884 - DNA, 25 bp, Homo sapien
ctgagatccaacaagtagtctgatg

SEQ ID NO: 2003885 - DNA, 25 bp, Homo sapien
tgcaagacgtcaagcaggtttatag

SEQ ID NO: 2003886 - DNA, 25 bp, Homo sapien
tctgatgtgcaagacgtcaagcagg

SEQ ID NO: 2003887 - DNA, 25 bp, Homo sapien
tatgaataagatgttgacaactttc

SEQ ID NO: 2003888 - DNA, 25 bp, Homo sapien
caaactatgaataagatgttgacaa

SEQ ID NO: 2003889 - DNA, 25 bp, Homo sapien
gccagtgagccccaactgattatac

SEQ ID NO: 2003890 - DNA, 25 bp, Homo sapien
tatacatggcttcccgcatctctgc

SEQ ID NO: 2003891 - DNA, 25 bp, Homo sapien
actgagcttttggatacgctgagca

SEQ ID NO: 2003892 - DNA, 25 bp, Homo sapien
tacgctgagcaactgaaattcctaa

SEQ ID NO: 2003893 - DNA, 25 bp, Homo sapien
cgcacactattgatacccagtgctt

SEQ ID NO: 2003894 - DNA, 25 bp, Homo sapien
gaaaaggtttggagatcacgcacac

SEQ ID NO: 2003895 - DNA, 25 bp, Homo sapien
taaagtacggtatcctcatcttgag

SEQ ID NO: 2003896 - DNA, 25 bp, Homo sapien
cagtaaagtgcttgtcccatagcaa

SEQ ID NO: 2003897 - DNA, 25 bp, Homo sapien
gcaagagttcttaatcacctaggac

SEQ ID NO: 2003898 - DNA, 25 bp, Homo sapien
gaaggaatggacaaacaacagtact

SEQ ID NO: 2003899 - DNA, 25 bp, Homo sapien
tgtccttagtttgagccatttagtt

SEQ ID NO: 2003900 - DNA, 25 bp, Homo sapien
ttgtccttagtttgagccatttagt

SEQ ID NO: 2003901 - DNA, 25 bp, Homo sapien
cttgtccttagtttgagccatttag

SEQ ID NO: 2003902 - DNA, 25 bp, Homo sapien
aaggattagcacaaactcaaataac

SEQ ID NO: 2003903 - DNA, 25 bp, Homo sapien
aggattagcacaaactcaaataact

SEQ ID NO: 2003904 - DNA, 25 bp, Homo sapien
ggattagcacaaactcaaataacta

SEQ ID NO: 2003905 - DNA, 25 bp, Homo sapien
gattagcacaaactcaaataactat

SEQ ID NO: 2003906 - DNA, 25 bp, Homo sapien
ttaaaagactagcaagtagttcttc

SEQ ID NO: 2003907 - DNA, 25 bp, Homo sapien
aagactagcaagtagttcttcaatc

SEQ ID NO: 2003908 - DNA, 25 bp, Homo sapien
tagcaagtagttcttcaatcttatt

SEQ ID NO: 2003909 - DNA, 25 bp, Homo sapien
tgtttaaaagactagcaagtagttc

SEQ ID NO: 2003910 - DNA, 25 bp, Homo sapien
gttccaagatggaacatcaaatatt

SEQ ID NO: 2003911 - DNA, 25 bp, Homo sapien
ccacataccgtatatagaatgaata

SEQ ID NO: 2003912 - DNA, 25 bp, Homo sapien
aaatattctttccacataccgtata

SEQ ID NO: 2003913 - DNA, 25 bp, Homo sapien
tctttccacataccgtatatagaat

SEQ ID NO: 2003914 - DNA, 25 bp, Homo sapien
tgacgactctcacgaccatagtgct

SEQ ID NO: 2003915 - DNA, 25 bp, Homo sapien
gcttctcagaggaataccgacggat

SEQ ID NO: 2003916 - DNA, 25 bp, Homo sapien
cactgtatgaggcttccttccatct

SEQ ID NO: 2003917 - DNA, 25 bp, Homo sapien
gaaggaatagggcactgacgactct

SEQ ID NO: 2003918 - DNA, 25 bp, Homo sapien
tggatacccacatgcaaagcaaaga

SEQ ID NO: 2003919 - DNA, 25 bp, Homo sapien
tgaagacccttaccgtataccacac

SEQ ID NO: 2003920 - DNA, 25 bp, Homo sapien
ttcagtgggtggagaatagtcttca

SEQ ID NO: 2003921 - DNA, 25 bp, Homo sapien
cacactactatataccgctagaaca

SEQ ID NO: 2003922 - DNA, 25 bp, Homo sapien
ctcagccctccatccagataggccc

SEQ ID NO: 2003923 - DNA, 25 bp, Homo sapien
ctccctcagccctccatccagatag

SEQ ID NO: 2003924 - DNA, 25 bp, Homo sapien
cctccatccagataggccccggtgt

SEQ ID NO: 2003925 - DNA, 25 bp, Homo sapien
agccctccatccagataggccccgg

SEQ ID NO: 2003926 - DNA, 25 bp, Homo sapien
catagctcagttggtacagggtgaa

SEQ ID NO: 2003927 - DNA, 25 bp, Homo sapien
gaaagtaggagatagcagcttcact

SEQ ID NO: 2003928 - DNA, 25 bp, Homo sapien
cactcagcagtgttgccagtaaaat

SEQ ID NO: 2003929 - DNA, 25 bp, Homo sapien
gatttgaggcagtgggcaaaagccc

SEQ ID NO: 2003930 - DNA, 25 bp, Homo sapien
gcttgccagagcgtgaagtagttga

SEQ ID NO: 2003931 - DNA, 25 bp, Homo sapien
gaagcacacacttagaagggtaagg

SEQ ID NO: 2003932 - DNA, 25 bp, Homo sapien
aagggtaaggtgaaatggcatcttc

SEQ ID NO: 2003933 - DNA, 25 bp, Homo sapien
tttcataagtatatcaaccattggg

SEQ ID NO: 2003934 - DNA, 25 bp, Homo sapien
gaaagataatactcctctagaggca

SEQ ID NO: 2003935 - DNA, 25 bp, Homo sapien
tctagaggcatgtaatggacaactc

SEQ ID NO: 2003936 - DNA, 25 bp, Homo sapien
gaatatctactggaagctgcttgaa

SEQ ID NO: 2003937 - DNA, 25 bp, Homo sapien
gatgttcccggttcacaaggagata

SEQ ID NO: 2003938 - DNA, 25 bp, Homo sapien
ttatttatgtccaatgtggaaatct

SEQ ID NO: 2003939 - DNA, 25 bp, Homo sapien
atttatgtccaatgtggaaatctga

SEQ ID NO: 2003940 - DNA, 25 bp, Homo sapien
gtccaatgtggaaatctgatcctgc

SEQ ID NO: 2003941 - DNA, 25 bp, Homo sapien
tgtggaaatctgatcctgctctctt

SEQ ID NO: 2003942 - DNA, 25 bp, Homo sapien
gagcttaataaaccgctaatccgaa

SEQ ID NO: 2003943 - DNA, 25 bp, Homo sapien
tacgctttgtgccagaatttacttc

SEQ ID NO: 2003944 - DNA, 25 bp, Homo sapien
gaacagtttactccgttattgaata

SEQ ID NO: 2003945 - DNA, 25 bp, Homo sapien
tccgaaaataatggtattcccttgc

SEQ ID NO: 2003946 - DNA, 25 bp, Homo sapien
caatccagatttgatggaagacaca

SEQ ID NO: 2003947 - DNA, 25 bp, Homo sapien
cagttctaaatctacagctctaagg

SEQ ID NO: 2003948 - DNA, 25 bp, Homo sapien
tgatcccaaaagataggaggagaga

SEQ ID NO: 2003949 - DNA, 25 bp, Homo sapien
cctagaaggaacatctgacacacaa

SEQ ID NO: 2003950 - DNA, 25 bp, Homo sapien
ctaatactttcagatattcagacat

SEQ ID NO: 2003951 - DNA, 25 bp, Homo sapien
tataactcctctaatactttcagat

SEQ ID NO: 2003952 - DNA, 25 bp, Homo sapien
ctctaatactttcagatattcagac

SEQ ID NO: 2003953 - DNA, 25 bp, Homo sapien
catataactcctctaatactttcag

SEQ ID NO: 2003954 - DNA, 25 bp, Homo sapien
tagctaggtattgcagaaggtacca

SEQ ID NO: 2003955 - DNA, 25 bp, Homo sapien
tattttgtcacttcgattacttcta

SEQ ID NO: 2003956 - DNA, 25 bp, Homo sapien
taccaggtactgcatgtttgattcc

SEQ ID NO: 2003957 - DNA, 25 bp, Homo sapien
atcagaaagccaaacataagttttt

SEQ ID NO: 2003958 - DNA, 25 bp, Homo sapien
ccttctttgcatgagagaggatgca

SEQ ID NO: 2003959 - DNA, 25 bp, Homo sapien
agccttctttgcatgagagaggatg

SEQ ID NO: 2003960 - DNA, 25 bp, Homo sapien
cttctttgcatgagagaggatgcac

SEQ ID NO: 2003961 - DNA, 25 bp, Homo sapien
gccttctttgcatgagagaggatgc

SEQ ID NO: 2003962 - DNA, 25 bp, Homo sapien
gatgaacagaattagtggtttctgg

SEQ ID NO: 2003963 - DNA, 25 bp, Homo sapien
agaaagtggctttcgctttgaaagg

SEQ ID NO: 2003964 - DNA, 25 bp, Homo sapien
gatccttgtgataaacctgttctgt

SEQ ID NO: 2003965 - DNA, 25 bp, Homo sapien
ttctgtgtgttgactgtggcgtggt

SEQ ID NO: 2003966 - DNA, 25 bp, Homo sapien
tgtagatatgcctagtgacactctg

SEQ ID NO: 2003967 - DNA, 25 bp, Homo sapien
catatcttggaattactgcgagcca

SEQ ID NO: 2003968 - DNA, 25 bp, Homo sapien
tagtgggatcaacaattagacgtat

SEQ ID NO: 2003969 - DNA, 25 bp, Homo sapien
gcagcatatatcctgtagcactgag

SEQ ID NO: 2003970 - DNA, 25 bp, Homo sapien
tctcctccattgtcgttactactta

SEQ ID NO: 2003971 - DNA, 25 bp, Homo sapien
ttcatgcttgtttaggatactactt

SEQ ID NO: 2003972 - DNA, 25 bp, Homo sapien
gcttgtttaggatactactttctcc

SEQ ID NO: 2003973 - DNA, 25 bp, Homo sapien
ttgtcgttactacttattaccacca

SEQ ID NO: 2003974 - DNA, 25 bp, Homo sapien
gatgggacaaccctcgaaaagacac

SEQ ID NO: 2003975 - DNA, 25 bp, Homo sapien
aaggagaagtgttccgaagcgacag

SEQ ID NO: 2003976 - DNA, 25 bp, Homo sapien
caatttttccagtcccaatcaggcg

SEQ ID NO: 2003977 - DNA, 25 bp, Homo sapien
tctcggctgtcacaggatgggacaa

SEQ ID NO: 2003978 - DNA, 25 bp, Homo sapien
aatagccaatgggaatatcgcacag

SEQ ID NO: 2003979 - DNA, 25 bp, Homo sapien
tatcgcacaggaaattaagaacaac

SEQ ID NO: 2003980 - DNA, 25 bp, Homo sapien
cgtacaggcttcagttcgaatctcc

SEQ ID NO: 2003981 - DNA, 25 bp, Homo sapien
tccatcacgcggaagaacagaatgt

SEQ ID NO: 2003982 - DNA, 25 bp, Homo sapien
gcttcttcaaagtggattgtttcta

SEQ ID NO: 2003983 - DNA, 25 bp, Homo sapien
ggcttcttcaaagtggattgtttct

SEQ ID NO: 2003984 - DNA, 25 bp, Homo sapien
ggattgtttctattcatttccctta

SEQ ID NO: 2003985 - DNA, 25 bp, Homo sapien
agtggattgtttctattcatttccc

SEQ ID NO: 2003986 - DNA, 25 bp, Homo sapien
gggcagatactgaagattcctgaga

SEQ ID NO: 2003987 - DNA, 25 bp, Homo sapien
gaggaattactaccactcagggtgc

SEQ ID NO: 2003988 - DNA, 25 bp, Homo sapien
agcagatctgtacagcttatcttta

SEQ ID NO: 2003989 - DNA, 25 bp, Homo sapien
gaaacgagccatcagaattagagga

SEQ ID NO: 2003990 - DNA, 25 bp, Homo sapien
attagtaaaatcctcatcaatgtta

SEQ ID NO: 2003991 - DNA, 25 bp, Homo sapien
taaaatcctcatcaatgttaatttt

SEQ ID NO: 2003992 - DNA, 25 bp, Homo sapien
atattagtaaaatcctcatcaatgt

SEQ ID NO: 2003993 - DNA, 25 bp, Homo sapien
gtaaaatcctcatcaatgttaattt

SEQ ID NO: 2003994 - DNA, 25 bp, Homo sapien
tttacaaaaacacccagatctcaat

SEQ ID NO: 2003995 - DNA, 25 bp, Homo sapien
tttacaatactacagtacatctccc

SEQ ID NO: 2003996 - DNA, 25 bp, Homo sapien
cttaacatcttgtgaatattactgt

SEQ ID NO: 2003997 - DNA, 25 bp, Homo sapien
tcaaggaagctttattatggacaaa

SEQ ID NO: 2003998 - DNA, 25 bp, Homo sapien
ttttcttgctcgttcggtgactcgg

SEQ ID NO: 2003999 - DNA, 25 bp, Homo sapien
aatagatcatcagttgttaggctca

SEQ ID NO: 2004000 - DNA, 25 bp, Homo sapien
ggctcatggagtctatgtcattaac

SEQ ID NO: 2004001 - DNA, 25 bp, Homo sapien
ggtgactcggtccaacataagtata

SEQ ID NO: 2004002 - DNA, 25 bp, Homo sapien
tatatttgagcgtataacaggagta

SEQ ID NO: 2004003 - DNA, 25 bp, Homo sapien
tataacaggagtaacaaagttatcc

SEQ ID NO: 2004004 - DNA, 25 bp, Homo sapien
tgagcgtataacaggagtaacaaag

SEQ ID NO: 2004005 - DNA, 25 bp, Homo sapien
acaggagtaacaaagttatccttgc

SEQ ID NO: 2004006 - DNA, 25 bp, Homo sapien
gctagtgagccatcttgggtaattc

SEQ ID NO: 2004007 - DNA, 25 bp, Homo sapien
tattgataagccgagaagttccttg

SEQ ID NO: 2004008 - DNA, 25 bp, Homo sapien
cctttgactatttgcatcaggtagc

SEQ ID NO: 2004009 - DNA, 25 bp, Homo sapien
cagccagactgggtatttgaaatca

SEQ ID NO: 2004010 - DNA, 25 bp, Homo sapien
tgtcctgggagaagtggattctcac

SEQ ID NO: 2004011 - DNA, 25 bp, Homo sapien
cactgaatggctttgtggattgtcc

SEQ ID NO: 2004012 - DNA, 25 bp, Homo sapien
aatggctttgtggattgtcctggga

SEQ ID NO: 2004013 - DNA, 25 bp, Homo sapien
ctgaatggctttgtggattgtcctg

SEQ ID NO: 2004014 - DNA, 25 bp, Homo sapien
ctgtatgtgaagattataagcattc

SEQ ID NO: 2004015 - DNA, 25 bp, Homo sapien
gcaaaatctcacaaagtcaacaaga

SEQ ID NO: 2004016 - DNA, 25 bp, Homo sapien
gatatcacatcaactttacagcact

SEQ ID NO: 2004017 - DNA, 25 bp, Homo sapien
ggaatgtacattcatctataacagc

SEQ ID NO: 2004018 - DNA, 25 bp, Homo sapien
ggccttcaagataagcaattcaatt

SEQ ID NO: 2004019 - DNA, 25 bp, Homo sapien
tttggtaattcttcagtacactgct

SEQ ID NO: 2004020 - DNA, 25 bp, Homo sapien
caagtttatctaatgagcaaggact

SEQ ID NO: 2004021 - DNA, 25 bp, Homo sapien
cttcagtacactgctctagatttct

SEQ ID NO: 2004022 - DNA, 25 bp, Homo sapien
tgaagcagacgttatttctccatct

SEQ ID NO: 2004023 - DNA, 25 bp, Homo sapien
gaagcagacgttatttctccatctt

SEQ ID NO: 2004024 - DNA, 25 bp, Homo sapien
acaggatttaaaggatgcaagatag

SEQ ID NO: 2004025 - DNA, 25 bp, Homo sapien
ggatttaaaggatgcaagatagcaa

SEQ ID NO: 2004026 - DNA, 25 bp, Homo sapien
taaaggatgcaagatagcaattaag

SEQ ID NO: 2004027 - DNA, 25 bp, Homo sapien
tttaaaggatgcaagatagcaatta

SEQ ID NO: 2004028 - DNA, 25 bp, Homo sapien
cagagttaacgggaacaggagattt

SEQ ID NO: 2004029 - DNA, 25 bp, Homo sapien
tcaagaacccctttagcactctttg

SEQ ID NO: 2004030 - DNA, 25 bp, Homo sapien
gcactctttgcccttgaagtttgtt

SEQ ID NO: 2004031 - DNA, 25 bp, Homo sapien
gaggactatcatcagagttaacggg

SEQ ID NO: 2004032 - DNA, 25 bp, Homo sapien
gggcttcaacaggaccatgatgttt

SEQ ID NO: 2004033 - DNA, 25 bp, Homo sapien
tttgattaaaacgttcttgtactgc

SEQ ID NO: 2004034 - DNA, 25 bp, Homo sapien
aggaccatgatgtttgcctccagag

SEQ ID NO: 2004035 - DNA, 25 bp, Homo sapien
gattaaaacgttcttgtactgcttg

SEQ ID NO: 2004036 - DNA, 25 bp, Homo sapien
ttctgaagtgacctagtaataggaa

SEQ ID NO: 2004037 - DNA, 25 bp, Homo sapien
tcaactgtaatttagagaaatcatc

SEQ ID NO: 2004038 - DNA, 25 bp, Homo sapien
gaagtgacctagtaataggaatcat

SEQ ID NO: 2004039 - DNA, 25 bp, Homo sapien
cctagtaataggaatcatactttcc

SEQ ID NO: 2004040 - DNA, 25 bp, Homo sapien
tcaggcgagataaatggtgcaaagc

SEQ ID NO: 2004041 - DNA, 25 bp, Homo sapien
cattcgtatcatcaaccaggtctct

SEQ ID NO: 2004042 - DNA, 25 bp, Homo sapien
ggtctctcaggcgagataaatggtg

SEQ ID NO: 2004043 - DNA, 25 bp, Homo sapien
tcacattttcggtgaccgttctcca

SEQ ID NO: 2004044 - DNA, 25 bp, Homo sapien
gtggtgactattcattgtggtgaca

SEQ ID NO: 2004045 - DNA, 25 bp, Homo sapien
catttgctggccagaaggcgaaagt

SEQ ID NO: 2004046 - DNA, 25 bp, Homo sapien
gaaaaacgctatcatttgggtgaag

SEQ ID NO: 2004047 - DNA, 25 bp, Homo sapien
gggtccttgcagttcacattctagt

SEQ ID NO: 2004048 - DNA, 25 bp, Homo sapien
caattagaagttaccacctgatgcc

SEQ ID NO: 2004049 - DNA, 25 bp, Homo sapien
caattccatgcgtctgtaacacagg

SEQ ID NO: 2004050 - DNA, 25 bp, Homo sapien
cagaaatctctatgaagctgaaatt

SEQ ID NO: 2004051 - DNA, 25 bp, Homo sapien
tcagtcttgacccttcatattggtc

SEQ ID NO: 2004052 - DNA, 25 bp, Homo sapien
tattggtcacaccattgtcccttga

SEQ ID NO: 2004053 - DNA, 25 bp, Homo sapien
tctggatagcacttctaccaaaaat

SEQ ID NO: 2004054 - DNA, 25 bp, Homo sapien
ttgacaagttcacttctggatagca

SEQ ID NO: 2004055 - DNA, 25 bp, Homo sapien
ggatagcacttctaccaaaaatgtt

SEQ ID NO: 2004056 - DNA, 25 bp, Homo sapien
gttcacttctggatagcacttctac

SEQ ID NO: 2004057 - DNA, 25 bp, Homo sapien
tatatgtgttcaggattaggcctca

SEQ ID NO: 2004058 - DNA, 25 bp, Homo sapien
tgataggcactgcaatccaacgcaa

SEQ ID NO: 2004059 - DNA, 25 bp, Homo sapien
gaactagtcccagtgaaggtcctga

SEQ ID NO: 2004060 - DNA, 25 bp, Homo sapien
tagagtggtgatacacaacagagtc

SEQ ID NO: 2004061 - DNA, 25 bp, Homo sapien
ggacgaaataaaatacttggccaga

SEQ ID NO: 2004062 - DNA, 25 bp, Homo sapien
gatagttagaatgtttagggacgaa

SEQ ID NO: 2004063 - DNA, 25 bp, Homo sapien
gtggatagttagaatgtttagggac

SEQ ID NO: 2004064 - DNA, 25 bp, Homo sapien
cagtttggtggatagttagaatgtt

SEQ ID NO: 2004065 - DNA, 25 bp, Homo sapien
tataacagctaaatgaatgacaggg

SEQ ID NO: 2004066 - DNA, 25 bp, Homo sapien
aacatagtataagaggcaccaccca

SEQ ID NO: 2004067 - DNA, 25 bp, Homo sapien
ggtgctatcatcaaggagataaaac

SEQ ID NO: 2004068 - DNA, 25 bp, Homo sapien
ttcctgattctgtaaagcagtataa

SEQ ID NO: 2004069 - DNA, 25 bp, Homo sapien
gtctttcctgatgccgggctttttg

SEQ ID NO: 2004070 - DNA, 25 bp, Homo sapien
tttcctgatgccgggctttttggat

SEQ ID NO: 2004071 - DNA, 25 bp, Homo sapien
tctttcctgatgccgggctttttgg

SEQ ID NO: 2004072 - DNA, 25 bp, Homo sapien
tgtctttcctgatgccgggcttttt

SEQ ID NO: 2004073 - DNA, 25 bp, Homo sapien
tctggaccacctgccaaaagaaact

SEQ ID NO: 2004074 - DNA, 25 bp, Homo sapien
ttctggaccacctgccaaaagaaac

SEQ ID NO: 2004075 - DNA, 25 bp, Homo sapien
ttcctggttcaggacctacgatgat

SEQ ID NO: 2004076 - DNA, 25 bp, Homo sapien
cttcctggttcaggacctacgatga

SEQ ID NO: 2004077 - DNA, 25 bp, Homo sapien
tgctagtattcagactatggtacct

SEQ ID NO: 2004078 - DNA, 25 bp, Homo sapien
taccttatactattctttaccatga

SEQ ID NO: 2004079 - DNA, 25 bp, Homo sapien
cagactatggtaccttatactattc

SEQ ID NO: 2004080 - DNA, 25 bp, Homo sapien
ttcactctcatatgttttgctagta

SEQ ID NO: 2004081 - DNA, 25 bp, Homo sapien
ggaggaataggtctgtacgagtcca

SEQ ID NO: 2004082 - DNA, 25 bp, Homo sapien
cagtctagaccctgttagacattta

SEQ ID NO: 2004083 - DNA, 25 bp, Homo sapien
tctgtacgagtccaggaatggcaat

SEQ ID NO: 2004084 - DNA, 25 bp, Homo sapien
tagtaacacacgcagtgctatcagt

SEQ ID NO: 2004085 - DNA, 25 bp, Homo sapien
taccgggcccactggattgtaccat

SEQ ID NO: 2004086 - DNA, 25 bp, Homo sapien
gacagtcatgttcactggcgttgaa

SEQ ID NO: 2004087 - DNA, 25 bp, Homo sapien
gcctggaggccattgctttttatcc

SEQ ID NO: 2004088 - DNA, 25 bp, Homo sapien
ggaggccacctcctaagagcatggg

SEQ ID NO: 2004089 - DNA, 25 bp, Homo sapien
gattgcgtgaacaaccttctcaggc

SEQ ID NO: 2004090 - DNA, 25 bp, Homo sapien
ggtgaatttccctagcttgcagttt

SEQ ID NO: 2004091 - DNA, 25 bp, Homo sapien
ttctcaggctgagctaggtcccagg

SEQ ID NO: 2004092 - DNA, 25 bp, Homo sapien
ccagggcctattttcaactagagaa

SEQ ID NO: 2004093 - DNA, 25 bp, Homo sapien
ttagggaagaagattacttggccag

SEQ ID NO: 2004094 - DNA, 25 bp, Homo sapien
tttagggaagaagattacttggcca

SEQ ID NO: 2004095 - DNA, 25 bp, Homo sapien
tgaattctatggtactctgagtgcc

SEQ ID NO: 2004096 - DNA, 25 bp, Homo sapien
gtaatgctggattccaatagtgaaa

SEQ ID NO: 2004097 - DNA, 25 bp, Homo sapien
tctccaatgggagtgttgaattcta

SEQ ID NO: 2004098 - DNA, 25 bp, Homo sapien
cacatgtgctcttaatgtaatgctg

SEQ ID NO: 2004099 - DNA, 25 bp, Homo sapien
ttcaaccttcaccgtggagcagcct

SEQ ID NO: 2004100 - DNA, 25 bp, Homo sapien
aaccttcaccgtggagcagccttca

SEQ ID NO: 2004101 - DNA, 25 bp, Homo sapien
atgcctgccatgattggctccttca

SEQ ID NO: 2004102 - DNA, 25 bp, Homo sapien
tccatgcctgccatgattggctcct

SEQ ID NO: 2004103 - DNA, 25 bp, Homo sapien
tgcgagtacagtagcagacaagtac

SEQ ID NO: 2004104 - DNA, 25 bp, Homo sapien
tacagtagcagacgtactcgcaaag

SEQ ID NO: 2004105 - DNA, 25 bp, Homo sapien
tagcagacaagtacagtagcagacg

SEQ ID NO: 2004106 - DNA, 25 bp, Homo sapien
cagacgtactcgcaaaggaagtggt

SEQ ID NO: 2004107 - DNA, 25 bp, Homo sapien
tatagttgtagggtaacaaagtgac

SEQ ID NO: 2004108 - DNA, 25 bp, Homo sapien
aatatagttgtagggtaacaaagtg

SEQ ID NO: 2004109 - DNA, 25 bp, Homo sapien
tgagcttcctggactagctggtcca

SEQ ID NO: 2004110 - DNA, 25 bp, Homo sapien
ctggactagctggtccagatggtcc

SEQ ID NO: 2004111 - DNA, 25 bp, Homo sapien
gcccaactctatggagtctgctttg

SEQ ID NO: 2004112 - DNA, 25 bp, Homo sapien
tccaagcccaactctatggagtctg

SEQ ID NO: 2004113 - DNA, 25 bp, Homo sapien
ggagtctgctttggacactgttagg

SEQ ID NO: 2004114 - DNA, 25 bp, Homo sapien
gctttggacactgttaggaacacac

SEQ ID NO: 2004115 - DNA, 25 bp, Homo sapien
tcgttatcactctcatgtgctttgt

SEQ ID NO: 2004116 - DNA, 25 bp, Homo sapien
tatcaatttctagagcagttacatc

SEQ ID NO: 2004117 - DNA, 25 bp, Homo sapien
agaggttcagttaaccaggtaatat

SEQ ID NO: 2004118 - DNA, 25 bp, Homo sapien
ggttcagttaaccaggtaatatcaa

SEQ ID NO: 2004119 - DNA, 25 bp, Homo sapien
ccatgtgcacaggaatcacatttcc

SEQ ID NO: 2004120 - DNA, 25 bp, Homo sapien
ggccatagggtccacgcagcggtca

SEQ ID NO: 2004121 - DNA, 25 bp, Homo sapien
gccatagggtccacgcagcggtcac

SEQ ID NO: 2004122 - DNA, 25 bp, Homo sapien
gccttcacactttcacatttatcca

SEQ ID NO: 2004123 - DNA, 25 bp, Homo sapien
tgctccctgagccttcacactttca

SEQ ID NO: 2004124 - DNA, 25 bp, Homo sapien
ccagtgtcctttcagatgctccctg

SEQ ID NO: 2004125 - DNA, 25 bp, Homo sapien
agtgtcctttcagatgctccctgag

SEQ ID NO: 2004126 - DNA, 25 bp, Homo sapien
tatgccttttcttcaggctactgaa

SEQ ID NO: 2004127 - DNA, 25 bp, Homo sapien
ctttatgccttttcttcaggctact

SEQ ID NO: 2004128 - DNA, 25 bp, Homo sapien
tcttcaggctactgaactctggaaa

SEQ ID NO: 2004129 - DNA, 25 bp, Homo sapien
ttttcttcaggctactgaactctgg

SEQ ID NO: 2004130 - DNA, 25 bp, Homo sapien
ccaatttcaaggtcctgccattgtg

SEQ ID NO: 2004131 - DNA, 25 bp, Homo sapien
gggcttagcttcggctgctcccact

SEQ ID NO: 2004132 - DNA, 25 bp, Homo sapien
ccattgtgtaagttatctccaagtc

SEQ ID NO: 2004133 - DNA, 25 bp, Homo sapien
ctgggctgagctatgggaaatctgt

SEQ ID NO: 2004134 - DNA, 25 bp, Homo sapien
tcacacctctgatgctgcctcctca

SEQ ID NO: 2004135 - DNA, 25 bp, Homo sapien
cacacctctgatgctgcctcctcac

SEQ ID NO: 2004136 - DNA, 25 bp, Homo sapien
gagatgataaatgacagacaagagt

SEQ ID NO: 2004137 - DNA, 25 bp, Homo sapien
gtgtcgctatttatccacttcatgg

SEQ ID NO: 2004138 - DNA, 25 bp, Homo sapien
catctttcctggtagtctgtctgtc

SEQ ID NO: 2004139 - DNA, 25 bp, Homo sapien
ccttatgaacaagtagctgaagctt

SEQ ID NO: 2004140 - DNA, 25 bp, Homo sapien
gacctggaatcactaacatgctgtg

SEQ ID NO: 2004141 - DNA, 25 bp, Homo sapien
gaatcactaacatgctgtgttctgg

SEQ ID NO: 2004142 - DNA, 25 bp, Homo sapien
cttggacctggaatcactaacatgc

SEQ ID NO: 2004143 - DNA, 25 bp, Homo sapien
aacatgctgtgttctggccttccac

SEQ ID NO: 2004144 - DNA, 25 bp, Homo sapien
caggagtccaggcattcattgacat

SEQ ID NO: 2004145 - DNA, 25 bp, Homo sapien
aggagtccaggcattcattgacatc

SEQ ID NO: 2004146 - DNA, 25 bp, Homo sapien
cattgacatctacgtcacagtctgc

SEQ ID NO: 2004147 - DNA, 25 bp, Homo sapien
attcattgacatctacgtcacagtc

SEQ ID NO: 2004148 - DNA, 25 bp, Homo sapien
gtcagggtaggactgtgctgtcaca

SEQ ID NO: 2004149 - DNA, 25 bp, Homo sapien
tcagggtaggactgtgctgtcacag

SEQ ID NO: 2004150 - DNA, 25 bp, Homo sapien
cagggtaggactgtgctgtcacagt

SEQ ID NO: 2004151 - DNA, 25 bp, Homo sapien
gacatcagtagaaactgacatgctg

SEQ ID NO: 2004152 - DNA, 25 bp, Homo sapien
gggttcctggactgatgcagacagc

SEQ ID NO: 2004153 - DNA, 25 bp, Homo sapien
gcattgatattggtgcaagccccac

SEQ ID NO: 2004154 - DNA, 25 bp, Homo sapien
gctggaatagtctgtctgggagttc

SEQ ID NO: 2004155 - DNA, 25 bp, Homo sapien
tattgacatgaccataactgttgtg

SEQ ID NO: 2004156 - DNA, 25 bp, Homo sapien
ccattatggtaatagcttccgttga

SEQ ID NO: 2004157 - DNA, 25 bp, Homo sapien
aactgttgtggtgctattatgctca

SEQ ID NO: 2004158 - DNA, 25 bp, Homo sapien
gatggttgtagcttcaggagttgta

SEQ ID NO: 2004159 - DNA, 25 bp, Homo sapien
gattattatttctttggtctactga

SEQ ID NO: 2004160 - DNA, 25 bp, Homo sapien
tgagagccaacatgacagcttcggc

SEQ ID NO: 2004161 - DNA, 25 bp, Homo sapien
gagccaacatgacagcttcggccat

SEQ ID NO: 2004162 - DNA, 25 bp, Homo sapien
tttggtctactgataaactgagagc

SEQ ID NO: 2004163 - DNA, 25 bp, Homo sapien
tgttctgagcaggatttataaccaa

SEQ ID NO: 2004164 - DNA, 25 bp, Homo sapien
tgagagaactctgatagctggccat

SEQ ID NO: 2004165 - DNA, 25 bp, Homo sapien
tcttgttggctgacatgtgtttgag

SEQ ID NO: 2004166 - DNA, 25 bp, Homo sapien
tctcagagtcgccaataaaggatct

SEQ ID NO: 2004167 - DNA, 25 bp, Homo sapien
gattgttagcatgacagacagcatg

SEQ ID NO: 2004168 - DNA, 25 bp, Homo sapien
gttagcatgacagacagcatggata

SEQ ID NO: 2004169 - DNA, 25 bp, Homo sapien
ctggattgttagcatgacagacagc

SEQ ID NO: 2004170 - DNA, 25 bp, Homo sapien
ttagcatgacagacagcatggatac

SEQ ID NO: 2004171 - DNA, 25 bp, Homo sapien
tggaagtcaactatgatgcatcagt

SEQ ID NO: 2004172 - DNA, 25 bp, Homo sapien
ctggtggaagtcaactatgatgcat

SEQ ID NO: 2004173 - DNA, 25 bp, Homo sapien
ggtggaagtcaactatgatgcatca

SEQ ID NO: 2004174 - DNA, 25 bp, Homo sapien
gaagtcaactatgatgcatcagtac

SEQ ID NO: 2004175 - DNA, 25 bp, Homo sapien
ctgccagtatcacaagcttctctcc

SEQ ID NO: 2004176 - DNA, 25 bp, Homo sapien
tcaatttgttcattgccctttatat

SEQ ID NO: 2004177 - DNA, 25 bp, Homo sapien
agcttctctccaagaatatttttca

SEQ ID NO: 2004178 - DNA, 25 bp, Homo sapien
atcacaagcttctctccaagaatat

SEQ ID NO: 2004179 - DNA, 25 bp, Homo sapien
gctcaacgttcaatatgtattttcc

SEQ ID NO: 2004180 - DNA, 25 bp, Homo sapien
tggttttcagagtgctcaacgttca

SEQ ID NO: 2004181 - DNA, 25 bp, Homo sapien
gagtgctcaacgttcaatatgtatt

SEQ ID NO: 2004182 - DNA, 25 bp, Homo sapien
ttcagagtgctcaacgttcaatatg

SEQ ID NO: 2004183 - DNA, 25 bp, Homo sapien
tgagcctcttggtcatttggatgtg

SEQ ID NO: 2004184 - DNA, 25 bp, Homo sapien
ggattcctgggttcacgcagacccc

SEQ ID NO: 2004185 - DNA, 25 bp, Homo sapien
cgcagaccccagttaagttgggaga

SEQ ID NO: 2004186 - DNA, 25 bp, Homo sapien
catcttgaatgtgcaaggattcctg

SEQ ID NO: 2004187 - DNA, 25 bp, Homo sapien
catcatttgtggatagctggataac

SEQ ID NO: 2004188 - DNA, 25 bp, Homo sapien
tatcacacaggctaagagacaagcc

SEQ ID NO: 2004189 - DNA, 25 bp, Homo sapien
tataaatgatcggtaggtgcaacag

SEQ ID NO: 2004190 - DNA, 25 bp, Homo sapien
taacaatggaggaattggccgatcc

SEQ ID NO: 2004191 - DNA, 25 bp, Homo sapien
gaagtgatggctatggctgttcaaa

SEQ ID NO: 2004192 - DNA, 25 bp, Homo sapien
gcaggttcggatgtgttgacaaaaa

SEQ ID NO: 2004193 - DNA, 25 bp, Homo sapien
tggagtttctccacaagagactttg

SEQ ID NO: 2004194 - DNA, 25 bp, Homo sapien
tccacttgaagtgataggagtagct

SEQ ID NO: 2004195 - DNA, 25 bp, Homo sapien
tgctgccatcgggggatgttgccat

SEQ ID NO: 2004196 - DNA, 25 bp, Homo sapien
atgctgccatcgggggatgttgcca

SEQ ID NO: 2004197 - DNA, 25 bp, Homo sapien
agatgctgccatcgggggatgttgc

SEQ ID NO: 2004198 - DNA, 25 bp, Homo sapien
acagatgctgccatcgggggatgtt

SEQ ID NO: 2004199 - DNA, 25 bp, Homo sapien
tcacttggctcgtagggcaagtgga

SEQ ID NO: 2004200 - DNA, 25 bp, Homo sapien
aaatccctaggcatacagctaacag

SEQ ID NO: 2004201 - DNA, 25 bp, Homo sapien
aatttccatcctcacggataggaag

SEQ ID NO: 2004202 - DNA, 25 bp, Homo sapien
tggaaaaatttccatcctcacggat

SEQ ID NO: 2004203 - DNA, 25 bp, Homo sapien
aatccctaggcatacagctaacagg

SEQ ID NO: 2004204 - DNA, 25 bp, Homo sapien
ggcaattaggccaatagacacacca

SEQ ID NO: 2004205 - DNA, 25 bp, Homo sapien
tgcagggtgctctcagatccaggaa

SEQ ID NO: 2004206 - DNA, 25 bp, Homo sapien
actggtgggcttgccaaagtggaca

SEQ ID NO: 2004207 - DNA, 25 bp, Homo sapien
gaagctttagttggccacaggagca

SEQ ID NO: 2004208 - DNA, 25 bp, Homo sapien
aagtttctttcgaattaagcttgca

SEQ ID NO: 2004209 - DNA, 25 bp, Homo sapien
ctttcacctttcttatctacctgaa

SEQ ID NO: 2004210 - DNA, 25 bp, Homo sapien
agtttctttcgaattaagcttgcaa

SEQ ID NO: 2004211 - DNA, 25 bp, Homo sapien
tttctttcgaattaagcttgcaaaa

SEQ ID NO: 2004212 - DNA, 25 bp, Homo sapien
tcaaatattaattacgtcaatacca

SEQ ID NO: 2004213 - DNA, 25 bp, Homo sapien
tgtgctgcttttattaccaatagac

SEQ ID NO: 2004214 - DNA, 25 bp, Homo sapien
aaatggtccctgatgacttagaaaa

SEQ ID NO: 2004215 - DNA, 25 bp, Homo sapien
tcaataccaatttctaagaattggg

SEQ ID NO: 2004216 - DNA, 25 bp, Homo sapien
tagtaagtctccaaggctattgggc

SEQ ID NO: 2004217 - DNA, 25 bp, Homo sapien
gtgataggttaatattttgcaagcc

SEQ ID NO: 2004218 - DNA, 25 bp, Homo sapien
ttttcagaggaaagatcaggtagta

SEQ ID NO: 2004219 - DNA, 25 bp, Homo sapien
ttggtcatccctgccttgtgatagg

SEQ ID NO: 2004220 - DNA, 25 bp, Homo sapien
agtggcgtatacagactacgtgtgc

SEQ ID NO: 2004221 - DNA, 25 bp, Homo sapien
tacagactacgtgtgctgggaagac

SEQ ID NO: 2004222 - DNA, 25 bp, Homo sapien
tattcagtggcgtatacagactacg

SEQ ID NO: 2004223 - DNA, 25 bp, Homo sapien
tgaaccctcattattcagtggcgta

SEQ ID NO: 2004224 - DNA, 25 bp, Homo sapien
gaatgagtaactcggtgaatgaact

SEQ ID NO: 2004225 - DNA, 25 bp, Homo sapien
tattactatcgaatgagtaactcgg

SEQ ID NO: 2004226 - DNA, 25 bp, Homo sapien
catcactatgtgctttgagcctttg

SEQ ID NO: 2004227 - DNA, 25 bp, Homo sapien
ttacactacatcactatgtgctttg

SEQ ID NO: 2004228 - DNA, 25 bp, Homo sapien
ttggaccagtctgtggcttttcaag

SEQ ID NO: 2004229 - DNA, 25 bp, Homo sapien
tcacagtgcccaggtttgtaaaggg

SEQ ID NO: 2004230 - DNA, 25 bp, Homo sapien
taagaacagtgtgacttggaccagt

SEQ ID NO: 2004231 - DNA, 25 bp, Homo sapien
cttgccaaaagccaatggtgactat

SEQ ID NO: 2004232 - DNA, 25 bp, Homo sapien
aaatactgatctttatcaattgcct

SEQ ID NO: 2004233 - DNA, 25 bp, Homo sapien
ttgagcctgaaagctgtgctgtgca

SEQ ID NO: 2004234 - DNA, 25 bp, Homo sapien
tgaaagctgtgctgtgcactatgaa

SEQ ID NO: 2004235 - DNA, 25 bp, Homo sapien
tgtgctgtgcactatgaaatgccat

SEQ ID NO: 2004236 - DNA, 25 bp, Homo sapien
aacatgtcaatttgtctgtggctgc

SEQ ID NO: 2004237 - DNA, 25 bp, Homo sapien
tcctggttctgaacaaggacacatt

SEQ ID NO: 2004238 - DNA, 25 bp, Homo sapien
tttagcctgaacatgtcaatttgtc

SEQ ID NO: 2004239 - DNA, 25 bp, Homo sapien
cacattttagcctgaacatgtcaat

SEQ ID NO: 2004240 - DNA, 25 bp, Homo sapien
tagagttgcccttacagaataaatg

SEQ ID NO: 2004241 - DNA, 25 bp, Homo sapien
ctggcataatggttgaaaaggtaga

SEQ ID NO: 2004242 - DNA, 25 bp, Homo sapien
aacccattagcagtctagagattgt

SEQ ID NO: 2004243 - DNA, 25 bp, Homo sapien
ctagagattgtttacgaaatagata

SEQ ID NO: 2004244 - DNA, 25 bp, Homo sapien
gcaggtagcatatattttctacatt

SEQ ID NO: 2004245 - DNA, 25 bp, Homo sapien
cagcaggtagcatatattttctaca

SEQ ID NO: 2004246 - DNA, 25 bp, Homo sapien
tcagcaggtagcatatattttctac

SEQ ID NO: 2004247 - DNA, 25 bp, Homo sapien
attcagcaggtagcatatattttct

SEQ ID NO: 2004248 - DNA, 25 bp, Homo sapien
agggctttcaacagtgatgatggca

SEQ ID NO: 2004249 - DNA, 25 bp, Homo sapien
tccacttggaagtcaatcttggtgc

SEQ ID NO: 2004250 - DNA, 25 bp, Homo sapien
cagcagggctttcaacagtgatgat

SEQ ID NO: 2004251 - DNA, 25 bp, Homo sapien
tgttccacttggaagtcaatcttgg

SEQ ID NO: 2004252 - DNA, 25 bp, Homo sapien
taggcaggttagtgtaagatgcctg

SEQ ID NO: 2004253 - DNA, 25 bp, Homo sapien
caggttagtgtaagatgcctgtgtg

SEQ ID NO: 2004254 - DNA, 25 bp, Homo sapien
tgagaggctgggatcggtaaccacc

SEQ ID NO: 2004255 - DNA, 25 bp, Homo sapien
agaggctgggatcggtaaccaccag

SEQ ID NO: 2004256 - DNA, 25 bp, Homo sapien
ctggcatccaccatgtcaggcccac

SEQ ID NO: 2004257 - DNA, 25 bp, Homo sapien
tggcatccaccatgtcaggcccact

SEQ ID NO: 2004258 - DNA, 25 bp, Homo sapien
ggcgttcacgggagatgatgccatg

SEQ ID NO: 2004259 - DNA, 25 bp, Homo sapien
tcccatgggcgttcacgggagatga

SEQ ID NO: 2004260 - DNA, 25 bp, Homo sapien
ttcctgtatctgtcaccttcatgct

SEQ ID NO: 2004261 - DNA, 25 bp, Homo sapien
tgtatctgtcaccttcatgcttcat

SEQ ID NO: 2004262 - DNA, 25 bp, Homo sapien
gtattcctgtatctgtcaccttcat

SEQ ID NO: 2004263 - DNA, 25 bp, Homo sapien
tagtaatgtattcctgtatctgtca

SEQ ID NO: 2004264 - DNA, 25 bp, Homo sapien
ggcatggaaattggctaaacctcat

SEQ ID NO: 2004265 - DNA, 25 bp, Homo sapien
atctggcatggaaattggctaaacc

SEQ ID NO: 2004266 - DNA, 25 bp, Homo sapien
cattggcatctaacccatgatacat

SEQ ID NO: 2004267 - DNA, 25 bp, Homo sapien
cccctgggtccatagcatgtaagca

SEQ ID NO: 2004268 - DNA, 25 bp, Homo sapien
tttccttgccgggagagcaggtgtc

SEQ ID NO: 2004269 - DNA, 25 bp, Homo sapien
tccaacctgtggctccggatgggtc

SEQ ID NO: 2004270 - DNA, 25 bp, Homo sapien
ggagacaggatctgctccacagggc

SEQ ID NO: 2004271 - DNA, 25 bp, Homo sapien
gggacagctacttatctcctccaac

SEQ ID NO: 2004272 - DNA, 25 bp, Homo sapien
agacatttacagctatgaccacctt

SEQ ID NO: 2004273 - DNA, 25 bp, Homo sapien
tacagctatgaccacctttcctgct

SEQ ID NO: 2004274 - DNA, 25 bp, Homo sapien
gacatttacagctatgaccaccttt

SEQ ID NO: 2004275 - DNA, 25 bp, Homo sapien
atttacagctatgaccacctttcct

SEQ ID NO: 2004276 - DNA, 25 bp, Homo sapien
tcactccccagctgttactagtgag

SEQ ID NO: 2004277 - DNA, 25 bp, Homo sapien
ttgtctttgtcgagtttcactcccc

SEQ ID NO: 2004278 - DNA, 25 bp, Homo sapien
ctagtgttttccgatataaaacatt

SEQ ID NO: 2004279 - DNA, 25 bp, Homo sapien
cagctgttactagtgagaaaagtca

SEQ ID NO: 2004280 - DNA, 25 bp, Homo sapien
gaagtcgtgccaaagttccactgct

SEQ ID NO: 2004281 - DNA, 25 bp, Homo sapien
ctgctgctttgaggaagtcgtgcca

SEQ ID NO: 2004282 - DNA, 25 bp, Homo sapien
gtcgtgccaaagttccactgctttg

SEQ ID NO: 2004283 - DNA, 25 bp, Homo sapien
tttgaggaagtcgtgccaaagttcc

SEQ ID NO: 2004284 - DNA, 25 bp, Homo sapien
gaaccaggaggacttttagatacag

SEQ ID NO: 2004285 - DNA, 25 bp, Homo sapien
tagtctttatcgtggtatcacaagc

SEQ ID NO: 2004286 - DNA, 25 bp, Homo sapien
cacaagctgtaccacaagaaccagg

SEQ ID NO: 2004287 - DNA, 25 bp, Homo sapien
ttatcgtggtatcacaagctgtacc

SEQ ID NO: 2004288 - DNA, 25 bp, Homo sapien
cctactgtagtgatgaatttgggat

SEQ ID NO: 2004289 - DNA, 25 bp, Homo sapien
agaaatgttgtcttccccacccctg

SEQ ID NO: 2004290 - DNA, 25 bp, Homo sapien
ggagtttgatcagataatcatagtc

SEQ ID NO: 2004291 - DNA, 25 bp, Homo sapien
gataatcatagtctccatcggtcat

SEQ ID NO: 2004292 - DNA, 25 bp, Homo sapien
ttccctgaagatccattcggtcctt

SEQ ID NO: 2004293 - DNA, 25 bp, Homo sapien
cattcggtccttgtgcattataaac

SEQ ID NO: 2004294 - DNA, 25 bp, Homo sapien
gatccattcggtccttgtgcattat

SEQ ID NO: 2004295 - DNA, 25 bp, Homo sapien
ctgaagatccattcggtccttgtgc

SEQ ID NO: 2004296 - DNA, 25 bp, Homo sapien
caagtagcacttataacggcgttaa

SEQ ID NO: 2004297 - DNA, 25 bp, Homo sapien
gtaaaatattctagctggagggcaa

SEQ ID NO: 2004298 - DNA, 25 bp, Homo sapien
caaagccagtcgcatggcatgggac

SEQ ID NO: 2004299 - DNA, 25 bp, Homo sapien
gatcaaagtctgaaaggacaaagcc

SEQ ID NO: 2004300 - DNA, 25 bp, Homo sapien
ggaattaacactactgtctaccgag

SEQ ID NO: 2004301 - DNA, 25 bp, Homo sapien
caggatttggaggtatgtgccttct

SEQ ID NO: 2004302 - DNA, 25 bp, Homo sapien
tattagcttggacactgtaccagag

SEQ ID NO: 2004303 - DNA, 25 bp, Homo sapien
cattctaagacacacgatgcaggat

SEQ ID NO: 2004304 - DNA, 25 bp, Homo sapien
agtcaaaaaagctaacagagagggc

SEQ ID NO: 2004305 - DNA, 25 bp, Homo sapien
gaggaatggcttcagaggaaccagc

SEQ ID NO: 2004306 - DNA, 25 bp, Homo sapien
taaatggaattcacagtcaaaaaag

SEQ ID NO: 2004307 - DNA, 25 bp, Homo sapien
aacagagattcttgtgaggaatggc

SEQ ID NO: 2004308 - DNA, 25 bp, Homo sapien
ctgacatatcatgtgcgaggacata

SEQ ID NO: 2004309 - DNA, 25 bp, Homo sapien
agagaaggctgccatcatgcaaggc

SEQ ID NO: 2004310 - DNA, 25 bp, Homo sapien
gctgccatcatgcaaggctgacata

SEQ ID NO: 2004311 - DNA, 25 bp, Homo sapien
tgcgaggacatatgggaaccacatt

SEQ ID NO: 2004312 - DNA, 25 bp, Homo sapien
gcgtctctgaaaaatgcagtggtga

SEQ ID NO: 2004313 - DNA, 25 bp, Homo sapien
aaatgcagtggtgagactccggaac

SEQ ID NO: 2004314 - DNA, 25 bp, Homo sapien
gaaaaatgcagtggtgagactccgg

SEQ ID NO: 2004315 - DNA, 25 bp, Homo sapien
ggcgtctctgaaaaatgcagtggtg

SEQ ID NO: 2004316 - DNA, 25 bp, Homo sapien
gctctgttgactggtgaggtcaaac

SEQ ID NO: 2004317 - DNA, 25 bp, Homo sapien
agaagctctgttgactggtgaggtc

SEQ ID NO: 2004318 - DNA, 25 bp, Homo sapien
tgttgactggtgaggtcaaacatta

SEQ ID NO: 2004319 - DNA, 25 bp, Homo sapien
gactggtgaggtcaaacattaataa

SEQ ID NO: 2004320 - DNA, 25 bp, Homo sapien
caataagcatttgcttgcagttggc

SEQ ID NO: 2004321 - DNA, 25 bp, Homo sapien
ggtaggtctgccttgttgccaatta

SEQ ID NO: 2004322 - DNA, 25 bp, Homo sapien
atatttgtcagccagttcccgagct

SEQ ID NO: 2004323 - DNA, 25 bp, Homo sapien
cgagcttgccgttcattgacttccc

SEQ ID NO: 2004324 - DNA, 25 bp, Homo sapien
ttccagaatttccaccattgacagt

SEQ ID NO: 2004325 - DNA, 25 bp, Homo sapien
ttccattcgcttcatgattaagtcc

SEQ ID NO: 2004326 - DNA, 25 bp, Homo sapien
cattcgcttcatgattaagtccaaa

SEQ ID NO: 2004327 - DNA, 25 bp, Homo sapien
ccaccattgacagtatcagggattt

SEQ ID NO: 2004328 - DNA, 25 bp, Homo sapien
gccattgtgcgtggtttactcaaca

SEQ ID NO: 2004329 - DNA, 25 bp, Homo sapien
tcattctagtacagcttattgggtg

SEQ ID NO: 2004330 - DNA, 25 bp, Homo sapien
tccccaatgcaaatctaaaagtatg

SEQ ID NO: 2004331 - DNA, 25 bp, Homo sapien
tgatcatgtttgaaagggcctcagg

SEQ ID NO: 2004332 - DNA, 25 bp, Homo sapien
tctgaggcaccgagttagagcaatg

SEQ ID NO: 2004333 - DNA, 25 bp, Homo sapien
cgaacctgttgcgatgctgcagaaa

SEQ ID NO: 2004334 - DNA, 25 bp, Homo sapien
aaatctatacgacgaggaaacagcc

SEQ ID NO: 2004335 - DNA, 25 bp, Homo sapien
tcaataccagatagaagttcgcaga

SEQ ID NO: 2004336 - DNA, 25 bp, Homo sapien
tatagtagaaggatgacaaagacac

SEQ ID NO: 2004337 - DNA, 25 bp, Homo sapien
caaattggataaagtggtaactggc

SEQ ID NO: 2004338 - DNA, 25 bp, Homo sapien
gctgattaaaactctcgcctggttc

SEQ ID NO: 2004339 - DNA, 25 bp, Homo sapien
tacagggcgatagctgataatacga

SEQ ID NO: 2004340 - DNA, 25 bp, Homo sapien
aaatttgttgattcccagtgtactc

SEQ ID NO: 2004341 - DNA, 25 bp, Homo sapien
aagagacagacaggcttcatcaaat

SEQ ID NO: 2004342 - DNA, 25 bp, Homo sapien
gattcccagtgtactcaatttgcag

SEQ ID NO: 2004343 - DNA, 25 bp, Homo sapien
ttgattcccagtgtactcaatttgc

SEQ ID NO: 2004344 - DNA, 25 bp, Homo sapien
gaacacaaggttatacactatgatt

SEQ ID NO: 2004345 - DNA, 25 bp, Homo sapien
ggttatacactatgattaactcacc

SEQ ID NO: 2004346 - DNA, 25 bp, Homo sapien
tgtttcatgaacacaaggttataca

SEQ ID NO: 2004347 - DNA, 25 bp, Homo sapien
cactatgattaactcaccactgcac

SEQ ID NO: 2004348 - DNA, 25 bp, Homo sapien
tgaggaaagaattgtgtatcctttt

SEQ ID NO: 2004349 - DNA, 25 bp, Homo sapien
cctcaaacgtttggtgtaatatgca

SEQ ID NO: 2004350 - DNA, 25 bp, Homo sapien
tttacgaatgaggatttttccctca

SEQ ID NO: 2004351 - DNA, 25 bp, Homo sapien
attatacatccaaaatcctttacga

SEQ ID NO: 2004352 - DNA, 25 bp, Homo sapien
aatgtcattgtagttgggtctccac

SEQ ID NO: 2004353 - DNA, 25 bp, Homo sapien
tgagcctgacacgaactctgtgaag

SEQ ID NO: 2004354 - DNA, 25 bp, Homo sapien
caaacgtaggcagcatcttggcatc

SEQ ID NO: 2004355 - DNA, 25 bp, Homo sapien
acctaacagtgtgcgtcaggaacca

SEQ ID NO: 2004356 - DNA, 25 bp, Homo sapien
gtggaatggcagatacaggctcttc

SEQ ID NO: 2004357 - DNA, 25 bp, Homo sapien
tcctctctccggcttccctcatgct

SEQ ID NO: 2004358 - DNA, 25 bp, Homo sapien
ggaatgtcttcaccaggtggaatgg

SEQ ID NO: 2004359 - DNA, 25 bp, Homo sapien
cttcaccaggtggaatggcagatac

SEQ ID NO: 2004360 - DNA, 25 bp, Homo sapien
gggatggtgaagcactatggccagt

SEQ ID NO: 2004361 - DNA, 25 bp, Homo sapien
tgggatggtgaagcactatggccag

SEQ ID NO: 2004362 - DNA, 25 bp, Homo sapien
attgggatggtgaagcactatggcc

SEQ ID NO: 2004363 - DNA, 25 bp, Homo sapien
ttgggatggtgaagcactatggcca

SEQ ID NO: 2004364 - DNA, 25 bp, Homo sapien
aaggaaggatggctaatattttgct

SEQ ID NO: 2004365 - DNA, 25 bp, Homo sapien
aggaaggatggctaatattttgctc

SEQ ID NO: 2004366 - DNA, 25 bp, Homo sapien
ggctaatattttgctcccttccatc

SEQ ID NO: 2004367 - DNA, 25 bp, Homo sapien
atattttgctcccttccatctttac

SEQ ID NO: 2004368 - DNA, 25 bp, Homo sapien
ctctgcacaccaggcagtggtctcg

SEQ ID NO: 2004369 - DNA, 25 bp, Homo sapien
tatgctgctgcttgacaaatctcta

SEQ ID NO: 2004370 - DNA, 25 bp, Homo sapien
acaccaggcagtggtctcgcatcct

SEQ ID NO: 2004371 - DNA, 25 bp, Homo sapien
agtggtctcgcatcctgtccaccag

SEQ ID NO: 2004372 - DNA, 25 bp, Homo sapien
ctttgcattcccagttgccaggatc

SEQ ID NO: 2004373 - DNA, 25 bp, Homo sapien
tctcatctgcagtttgtgattcact

SEQ ID NO: 2004374 - DNA, 25 bp, Homo sapien
gatcttcagagggagatttccattc

SEQ ID NO: 2004375 - DNA, 25 bp, Homo sapien
gcagatctctcatctgcagtttgtg

SEQ ID NO: 2004376 - DNA, 25 bp, Homo sapien
ttggctgattctagatgttgtccct

SEQ ID NO: 2004377 - DNA, 25 bp, Homo sapien
attctagatgttgtccctgtgcccc

SEQ ID NO: 2004378 - DNA, 25 bp, Homo sapien
tgattctagatgttgtccctgtgcc

SEQ ID NO: 2004379 - DNA, 25 bp, Homo sapien
gctgattctagatgttgtccctgtg

SEQ ID NO: 2004380 - DNA, 25 bp, Homo sapien
tgagttgcacttccagcgggagctg

SEQ ID NO: 2004381 - DNA, 25 bp, Homo sapien
agttgcacttccagcgggagctgtc

SEQ ID NO: 2004382 - DNA, 25 bp, Homo sapien
gagttgcacttccagcgggagctgt

SEQ ID NO: 2004383 - DNA, 25 bp, Homo sapien
ttgcacttccagcgggagctgtcat

SEQ ID NO: 2004384 - DNA, 25 bp, Homo sapien
ctaggacaccggtgaaatcaggttg

SEQ ID NO: 2004385 - DNA, 25 bp, Homo sapien
actctgtgtcagagactccttccct

SEQ ID NO: 2004386 - DNA, 25 bp, Homo sapien
aatcaggttgtgagatgaggagtta

SEQ ID NO: 2004387 - DNA, 25 bp, Homo sapien
gatcctcctgacgtagccactggac

SEQ ID NO: 2004388 - DNA, 25 bp, Homo sapien
ggagccaagcctgcgggcggtggcg

SEQ ID NO: 2004389 - DNA, 25 bp, Homo sapien
tgtccaggtgcctttccagcggctt

SEQ ID NO: 2004390 - DNA, 25 bp, Homo sapien
tccccagtggagttcctggcatcaa

SEQ ID NO: 2004391 - DNA, 25 bp, Homo sapien
ggcgccccacaaggtaggcgagtct

SEQ ID NO: 2004392 - DNA, 25 bp, Homo sapien
agcgctgggcgtacgcgtcctgccg

SEQ ID NO: 2004393 - DNA, 25 bp, Homo sapien
tccagcgctgggcgtacgcgtcctg

SEQ ID NO: 2004394 - DNA, 25 bp, Homo sapien
gctctccagcgctgggcgtacgcgt

SEQ ID NO: 2004395 - DNA, 25 bp, Homo sapien
tgggcgtacgcgtcctgccgcgact

SEQ ID NO: 2004396 - DNA, 25 bp, Homo sapien
tagaaccttcttgaaaagcagcggc

SEQ ID NO: 2004397 - DNA, 25 bp, Homo sapien
aaccttcttgaaaagcagcggccga

SEQ ID NO: 2004398 - DNA, 25 bp, Homo sapien
ttagggtgcaaatagaaccttcttg

SEQ ID NO: 2004399 - DNA, 25 bp, Homo sapien
cttcttgaaaagcagcggccgatcc

SEQ ID NO: 2004400 - DNA, 25 bp, Homo sapien
tctttgtacttgaagccacagtcat

SEQ ID NO: 2004401 - DNA, 25 bp, Homo sapien
aagttgaattctttggcctcagtcc

SEQ ID NO: 2004402 - DNA, 25 bp, Homo sapien
tggcctcagtccttatcttctttgt

SEQ ID NO: 2004403 - DNA, 25 bp, Homo sapien
ctggccccaagttgaattctttggc

SEQ ID NO: 2004404 - DNA, 25 bp, Homo sapien
gctgaaccaagagctagagcaaagc

SEQ ID NO: 2004405 - DNA, 25 bp, Homo sapien
gagctagagcaaagctagaaggacc

SEQ ID NO: 2004406 - DNA, 25 bp, Homo sapien
aaccaagagctagagcaaagctaga

SEQ ID NO: 2004407 - DNA, 25 bp, Homo sapien
ggacttggggatactgtgtcttctt

SEQ ID NO: 2004408 - DNA, 25 bp, Homo sapien
gatgaagactgagcaatacggcggt

SEQ ID NO: 2004409 - DNA, 25 bp, Homo sapien
ggcggtcacttgtgccctctgaggc

SEQ ID NO: 2004410 - DNA, 25 bp, Homo sapien
tgccaaggagctcaagatgaagact

SEQ ID NO: 2004411 - DNA, 25 bp, Homo sapien
caacaaatgaaggtgccctgcttcc

SEQ ID NO: 2004412 - DNA, 25 bp, Homo sapien
tactccaggatcctaaatacgtaca

SEQ ID NO: 2004413 - DNA, 25 bp, Homo sapien
gttgtcatatttactgtccgcactg

SEQ ID NO: 2004414 - DNA, 25 bp, Homo sapien
gaacctggatgtctagacgttttat

SEQ ID NO: 2004415 - DNA, 25 bp, Homo sapien
atacgtacactgtttcaggaacctg

SEQ ID NO: 2004416 - DNA, 25 bp, Homo sapien
caccactgagggatgagatggcagc

SEQ ID NO: 2004417 - DNA, 25 bp, Homo sapien
cagctgcaggtgtatgggcagccac

SEQ ID NO: 2004418 - DNA, 25 bp, Homo sapien
tttgttgaatacatcaccactgagg

SEQ ID NO: 2004419 - DNA, 25 bp, Homo sapien
cccctcctacccctaggtcaggcat

SEQ ID NO: 2004420 - DNA, 25 bp, Homo sapien
tgtttgagagtttgggcccttcatc

SEQ ID NO: 2004421 - DNA, 25 bp, Homo sapien
tttgagagtttgggcccttcatcca

SEQ ID NO: 2004422 - DNA, 25 bp, Homo sapien
gtttgagagtttgggcccttcatcc

SEQ ID NO: 2004423 - DNA, 25 bp, Homo sapien
tatgtttgagagtttgggcccttca

SEQ ID NO: 2004424 - DNA, 25 bp, Homo sapien
ggtggttacattccccactgcatgt

SEQ ID NO: 2004425 - DNA, 25 bp, Homo sapien
gaccgctggccaaagttccacttct

SEQ ID NO: 2004426 - DNA, 25 bp, Homo sapien
ccgctggccaaagttccacttctgt

SEQ ID NO: 2004427 - DNA, 25 bp, Homo sapien
agtgggtggttacattccccactgc

SEQ ID NO: 2004428 - DNA, 25 bp, Homo sapien
cttcacgcccacaggatttccaata

SEQ ID NO: 2004429 - DNA, 25 bp, Homo sapien
tctttggctctttcggcccttcacg

SEQ ID NO: 2004430 - DNA, 25 bp, Homo sapien
tatccctggaaggtatttgcccttc

SEQ ID NO: 2004431 - DNA, 25 bp, Homo sapien
cagatgagtccaacagtgcttaaga

SEQ ID NO: 2004432 - DNA, 25 bp, Homo sapien
gaacatcttgggctcccatcccgtg

SEQ ID NO: 2004433 - DNA, 25 bp, Homo sapien
catcccgtgcctgtcttttaatagc

SEQ ID NO: 2004434 - DNA, 25 bp, Homo sapien
catgcttgaattaccctctattaga

SEQ ID NO: 2004435 - DNA, 25 bp, Homo sapien
aaacggtacctgtgctttgtctcca

SEQ ID NO: 2004436 - DNA, 25 bp, Homo sapien
cttgaaatgggatggggctgcccat

SEQ ID NO: 2004437 - DNA, 25 bp, Homo sapien
ggacagcattcagcttcatcttggc

SEQ ID NO: 2004438 - DNA, 25 bp, Homo sapien
catgttgcttcccatggagctatgg

SEQ ID NO: 2004439 - DNA, 25 bp, Homo sapien
tattggccttgagcagtgataaaca

SEQ ID NO: 2004440 - DNA, 25 bp, Homo sapien
ttggcagcctccatagaagtggtgt

SEQ ID NO: 2004441 - DNA, 25 bp, Homo sapien
ttgaaagattacatccttcttgggc

SEQ ID NO: 2004442 - DNA, 25 bp, Homo sapien
ggtcattagctcatggtgttcttgg

SEQ ID NO: 2004443 - DNA, 25 bp, Homo sapien
gaaagattacatccttcttgggctt

SEQ ID NO: 2004444 - DNA, 25 bp, Homo sapien
gttgaccctggatagcattcacggt

SEQ ID NO: 2004445 - DNA, 25 bp, Homo sapien
ctatttttctttgcgacatctttct

SEQ ID NO: 2004446 - DNA, 25 bp, Homo sapien
atttttctttgcgacatctttcttt

SEQ ID NO: 2004447 - DNA, 25 bp, Homo sapien
tcctcatagttcctgaaacaacaca

SEQ ID NO: 2004448 - DNA, 25 bp, Homo sapien
caaagttcaggatttgttttccact

SEQ ID NO: 2004449 - DNA, 25 bp, Homo sapien
tgaaacaacacaccctaaagctatg

SEQ ID NO: 2004450 - DNA, 25 bp, Homo sapien
taaagctatgcctatcattggtagt

SEQ ID NO: 2004451 - DNA, 25 bp, Homo sapien
ctcctgtttccccacgtagcactga

SEQ ID NO: 2004452 - DNA, 25 bp, Homo sapien
tggctgaacatctgaagggtgctgc

SEQ ID NO: 2004453 - DNA, 25 bp, Homo sapien
ctaggaggtcggtaaggatgctttt

SEQ ID NO: 2004454 - DNA, 25 bp, Homo sapien
taaagctaggaggtcggtaaggatg

SEQ ID NO: 2004455 - DNA, 25 bp, Homo sapien
ctgcatctggtccacatttgatggc

SEQ ID NO: 2004456 - DNA, 25 bp, Homo sapien
atggcttcacgggatgttagagcga

SEQ ID NO: 2004457 - DNA, 25 bp, Homo sapien
cagaggatcctggtcctccaagccc

SEQ ID NO: 2004458 - DNA, 25 bp, Homo sapien
ttgaactggatggctgaaagtatct

SEQ ID NO: 2004459 - DNA, 25 bp, Homo sapien
ccttgaactggatggctgaaagtat

SEQ ID NO: 2004460 - DNA, 25 bp, Homo sapien
tcagaggatcctggtcctccaagcc

SEQ ID NO: 2004461 - DNA, 25 bp, Homo sapien
ccagctcttagaggcaccagcagag

SEQ ID NO: 2004462 - DNA, 25 bp, Homo sapien
cagggtcagagtaccactggctcta

SEQ ID NO: 2004463 - DNA, 25 bp, Homo sapien
ccttccaaagggtttactgcagaga

SEQ ID NO: 2004464 - DNA, 25 bp, Homo sapien
gatatgacagtcctctttggagccc

SEQ ID NO: 2004465 - DNA, 25 bp, Homo sapien
aaccagccagtcattgccagtaagc

SEQ ID NO: 2004466 - DNA, 25 bp, Homo sapien
gggcactgtggtagacatgttccaa

SEQ ID NO: 2004467 - DNA, 25 bp, Homo sapien
cagtaagctgggttgaccttttggg

SEQ ID NO: 2004468 - DNA, 25 bp, Homo sapien
caaatagctttagtggctggtcctc

SEQ ID NO: 2004469 - DNA, 25 bp, Homo sapien
gatctcagcatagccttgaagcaca

SEQ ID NO: 2004470 - DNA, 25 bp, Homo sapien
ctaagtgctcccgtggacatctaag

SEQ ID NO: 2004471 - DNA, 25 bp, Homo sapien
taattaacgactgttgcctgagtgc

SEQ ID NO: 2004472 - DNA, 25 bp, Homo sapien
ttcaagctgtgccatctgcccggca

SEQ ID NO: 2004473 - DNA, 25 bp, Homo sapien
tcagagtcgacattttaacaagaac

SEQ ID NO: 2004474 - DNA, 25 bp, Homo sapien
ggaagtgtctaatctgccaggtgtg

SEQ ID NO: 2004475 - DNA, 25 bp, Homo sapien
gcgacagaactagatgccaactctt

SEQ ID NO: 2004476 - DNA, 25 bp, Homo sapien
gcatcattggactctagtctgggcg

SEQ ID NO: 2004477 - DNA, 25 bp, Homo sapien
ctgcaacctagactgtaccattaat

SEQ ID NO: 2004478 - DNA, 25 bp, Homo sapien
gcaacctagactgtaccattaatgt

SEQ ID NO: 2004479 - DNA, 25 bp, Homo sapien
aatgttactaattttaccatacttg

SEQ ID NO: 2004480 - DNA, 25 bp, Homo sapien
tagactgtaccattaatgttactaa

SEQ ID NO: 2004481 - DNA, 25 bp, Homo sapien
tgagtcatcttcagtagcctggaaa

SEQ ID NO: 2004482 - DNA, 25 bp, Homo sapien
cccaatgtctactaaagatgagatc

SEQ ID NO: 2004483 - DNA, 25 bp, Homo sapien
caatgtctactaaagatgagatcat

SEQ ID NO: 2004484 - DNA, 25 bp, Homo sapien
gagtcatcttcagtagcctggaaac

SEQ ID NO: 2004485 - DNA, 25 bp, Homo sapien
gtaagtccggttggaaggcaataga

SEQ ID NO: 2004486 - DNA, 25 bp, Homo sapien
tctatatgaccaacacaataattac

SEQ ID NO: 2004487 - DNA, 25 bp, Homo sapien
tgtaagtccggttggaaggcaatag

SEQ ID NO: 2004488 - DNA, 25 bp, Homo sapien
gcaatagatgcatctatatgaccaa

SEQ ID NO: 2004489 - DNA, 25 bp, Homo sapien
tagctgagcgcttcataacagaatg

SEQ ID NO: 2004490 - DNA, 25 bp, Homo sapien
caatgtaaaggaaagcccgcggtag

SEQ ID NO: 2004491 - DNA, 25 bp, Homo sapien
gaaatgtaaagtaatgtatgcaatg

SEQ ID NO: 2004492 - DNA, 25 bp, Homo sapien
cagaatgttctaatcaagtacgtgg

SEQ ID NO: 2004493 - DNA, 25 bp, Homo sapien
tattcgatgaagtcatgtacatgac

SEQ ID NO: 2004494 - DNA, 25 bp, Homo sapien
tctgtagttattcgatgaagtcatg

SEQ ID NO: 2004495 - DNA, 25 bp, Homo sapien
cgatgaagtcatgtacatgaccgtt

SEQ ID NO: 2004496 - DNA, 25 bp, Homo sapien
tcccatctgtagttattcgatgaag

SEQ ID NO: 2004497 - DNA, 25 bp, Homo sapien
aacaaacccagcttggtcaaggcca

SEQ ID NO: 2004498 - DNA, 25 bp, Homo sapien
aacccagcttggtcaaggccattac

SEQ ID NO: 2004499 - DNA, 25 bp, Homo sapien
caaaaacaaacccagcttggtcaag

SEQ ID NO: 2004500 - DNA, 25 bp, Homo sapien
caaacccagcttggtcaaggccatt

SEQ ID NO: 2004501 - DNA, 25 bp, Homo sapien
tgatttgtagaagtgtccaaacagg

SEQ ID NO: 2004502 - DNA, 25 bp, Homo sapien
ccaaacaggttgtgtgctggagttc

SEQ ID NO: 2004503 - DNA, 25 bp, Homo sapien
gaagtgtccaaacaggttgtgtgct

SEQ ID NO: 2004504 - DNA, 25 bp, Homo sapien
gtggctgagtgcctcgattttttca

SEQ ID NO: 2004505 - DNA, 25 bp, Homo sapien
aattttttgcgactgtacacatagc

SEQ ID NO: 2004506 - DNA, 25 bp, Homo sapien
cgactgtacacatagctgcagcatt

SEQ ID NO: 2004507 - DNA, 25 bp, Homo sapien
tgtttttagttgtaggtcgcagcgg

SEQ ID NO: 2004508 - DNA, 25 bp, Homo sapien
gggaaattttttgcgactgtacaca

SEQ ID NO: 2004509 - DNA, 25 bp, Homo sapien
gactgtagtacaccctagtaggaaa

SEQ ID NO: 2004510 - DNA, 25 bp, Homo sapien
tcaaaagggtccatactacgctatc

SEQ ID NO: 2004511 - DNA, 25 bp, Homo sapien
tctgtatgacgacacttaggctggg

SEQ ID NO: 2004512 - DNA, 25 bp, Homo sapien
cacaaaaatttagtctgctggctga

SEQ ID NO: 2004513 - DNA, 25 bp, Homo sapien
cattactcagtaatgcaatacctct

SEQ ID NO: 2004514 - DNA, 25 bp, Homo sapien
gatgtattcattactcagtaatgca

SEQ ID NO: 2004515 - DNA, 25 bp, Homo sapien
tgcaatacctctattgttgaattcc

SEQ ID NO: 2004516 - DNA, 25 bp, Homo sapien
cagctttgatgtattcattactcag

SEQ ID NO: 2004517 - DNA, 25 bp, Homo sapien
aaaaagtaaattgtagtcatttgat

SEQ ID NO: 2004518 - DNA, 25 bp, Homo sapien
aaagtaaattgtagtcatttgatta

SEQ ID NO: 2004519 - DNA, 25 bp, Homo sapien
aaaagtaaattgtagtcatttgatt

SEQ ID NO: 2004520 - DNA, 25 bp, Homo sapien
tcctgatgacaacgaagtgatgaca

SEQ ID NO: 2004521 - DNA, 25 bp, Homo sapien
tatcgtaacctgtagtgccaactct

SEQ ID NO: 2004522 - DNA, 25 bp, Homo sapien
tatggcacagcgactcatcagatag

SEQ ID NO: 2004523 - DNA, 25 bp, Homo sapien
caaggcgggtatccctaggaacaat

SEQ ID NO: 2004524 - DNA, 25 bp, Homo sapien
catagtgggttgaccaggccttcaa

SEQ ID NO: 2004525 - DNA, 25 bp, Homo sapien
acttgtttcccctagatttcagatg

SEQ ID NO: 2004526 - DNA, 25 bp, Homo sapien
tttgactcacaatgaggtcatggtc

SEQ ID NO: 2004527 - DNA, 25 bp, Homo sapien
tcagatgtcacggtatgaaaggttt

SEQ ID NO: 2004528 - DNA, 25 bp, Homo sapien
tttccagtggactcagttgacttcc

SEQ ID NO: 2004529 - DNA, 25 bp, Homo sapien
actcagttgacttccatgtttacca

SEQ ID NO: 2004530 - DNA, 25 bp, Homo sapien
catgtttaccatacacacctgtggc

SEQ ID NO: 2004531 - DNA, 25 bp, Homo sapien
cagtggactcagttgacttccatgt

SEQ ID NO: 2004532 - DNA, 25 bp, Homo sapien
caattctaattggtcgttagcctga

SEQ ID NO: 2004533 - DNA, 25 bp, Homo sapien
tttgtgtaaggtgtagcatttgttg

SEQ ID NO: 2004534 - DNA, 25 bp, Homo sapien
agcttccggacaggcctggcagaga

SEQ ID NO: 2004535 - DNA, 25 bp, Homo sapien
aatatcacccaaatgctcagcttcc

SEQ ID NO: 2004536 - DNA, 25 bp, Homo sapien
tgaagttttggaacaacattttcat

SEQ ID NO: 2004537 - DNA, 25 bp, Homo sapien
caaacttatgcatgttaatggattc

SEQ ID NO: 2004538 - DNA, 25 bp, Homo sapien
atgcatgttaatggattctttgaag

SEQ ID NO: 2004539 - DNA, 25 bp, Homo sapien
tggtaatttaacttattgtggccaa

SEQ ID NO: 2004540 - DNA, 25 bp, Homo sapien
tgccgaatacttctagataacccct

SEQ ID NO: 2004541 - DNA, 25 bp, Homo sapien
gataaattccgtgtcttgccacaag

SEQ ID NO: 2004542 - DNA, 25 bp, Homo sapien
ttgtgaattaagaacatgctgcctc

SEQ ID NO: 2004543 - DNA, 25 bp, Homo sapien
tgtactttgcctcaattccctgagg

SEQ ID NO: 2004544 - DNA, 25 bp, Homo sapien
gagagaggctgaatagcccagcaga

SEQ ID NO: 2004545 - DNA, 25 bp, Homo sapien
ggagagaggctgaatagcccagcag

SEQ ID NO: 2004546 - DNA, 25 bp, Homo sapien
ccatccatgaaataggcctcttaaa

SEQ ID NO: 2004547 - DNA, 25 bp, Homo sapien
aactaggattgaataactgccaaat

SEQ ID NO: 2004548 - DNA, 25 bp, Homo sapien
atccatgaaataggcctcttaaata

SEQ ID NO: 2004549 - DNA, 25 bp, Homo sapien
ttaactaggattgaataactgccaa

SEQ ID NO: 2004550 - DNA, 25 bp, Homo sapien
aattattcattttggtgaccctggc

SEQ ID NO: 2004551 - DNA, 25 bp, Homo sapien
cattacacagttgggttgttccaac

SEQ ID NO: 2004552 - DNA, 25 bp, Homo sapien
cagtttgccacgtattagagcttta

SEQ ID NO: 2004553 - DNA, 25 bp, Homo sapien
gcagacacatgtttcccttgaggat

SEQ ID NO: 2004554 - DNA, 25 bp, Homo sapien
gaaagcacttgcttcggtgaggaaa

SEQ ID NO: 2004555 - DNA, 25 bp, Homo sapien
gactccatatgtaccattgtaaagg

SEQ ID NO: 2004556 - DNA, 25 bp, Homo sapien
gctttcttgcataacagtcactgga

SEQ ID NO: 2004557 - DNA, 25 bp, Homo sapien
gagaaggctctgaagcttccagtat

SEQ ID NO: 2004558 - DNA, 25 bp, Homo sapien
ttcaccagctcatcaacagcaaggg

SEQ ID NO: 2004559 - DNA, 25 bp, Homo sapien
gcaatgaccgtcacatagcttgcta

SEQ ID NO: 2004560 - DNA, 25 bp, Homo sapien
cttgttagccagacctgttgtggaa

SEQ ID NO: 2004561 - DNA, 25 bp, Homo sapien
tgtaggactgtgagacgaatacccc

SEQ ID NO: 2004562 - DNA, 25 bp, Homo sapien
tatgaattgacaaaaatcttgggcc

SEQ ID NO: 2004563 - DNA, 25 bp, Homo sapien
tcttgggcctcaaagagtaatcaag

SEQ ID NO: 2004564 - DNA, 25 bp, Homo sapien
tgttacagctctacttagggactga

SEQ ID NO: 2004565 - DNA, 25 bp, Homo sapien
tgaacaatacttgggtggcaggcag

SEQ ID NO: 2004566 - DNA, 25 bp, Homo sapien
taggtaagaacaagggtccaagatg

SEQ ID NO: 2004567 - DNA, 25 bp, Homo sapien
gcttcacttagagccgatgcttatg

SEQ ID NO: 2004568 - DNA, 25 bp, Homo sapien
tattacatggtgaaagctctgtccc

SEQ ID NO: 2004569 - DNA, 25 bp, Homo sapien
tccaagatgaagtaacctaccacag

SEQ ID NO: 2004570 - DNA, 25 bp, Homo sapien
atagctgtcctgacggcgagtggca

SEQ ID NO: 2004571 - DNA, 25 bp, Homo sapien
gacggcgagtggcaaacatggccca

SEQ ID NO: 2004572 - DNA, 25 bp, Homo sapien
tgtcctgacggcgagtggcaaacat

SEQ ID NO: 2004573 - DNA, 25 bp, Homo sapien
gtgatagctgtcctgacggcgagtg

SEQ ID NO: 2004574 - DNA, 25 bp, Homo sapien
ctgccactttgcattccctgcccct

SEQ ID NO: 2004575 - DNA, 25 bp, Homo sapien
ccctgccttccaaatgaccgccagg

SEQ ID NO: 2004576 - DNA, 25 bp, Homo sapien
ctgccttccaaatgaccgccaggaa

SEQ ID NO: 2004577 - DNA, 25 bp, Homo sapien
ccttccaaatgaccgccaggaacat

SEQ ID NO: 2004578 - DNA, 25 bp, Homo sapien
cctgaggcccttcgcatgtttgtcc

SEQ ID NO: 2004579 - DNA, 25 bp, Homo sapien
actctgggttgctaatgtgcttcgc

SEQ ID NO: 2004580 - DNA, 25 bp, Homo sapien
catttgatggcaacgccaggcctga

SEQ ID NO: 2004581 - DNA, 25 bp, Homo sapien
gatctggaagaaccgacatatggtt

SEQ ID NO: 2004582 - DNA, 25 bp, Homo sapien
taacgagctttctccaggccggatg

SEQ ID NO: 2004583 - DNA, 25 bp, Homo sapien
cagatgtggcttagcggtaacgagc

SEQ ID NO: 2004584 - DNA, 25 bp, Homo sapien
accaggggggtcattccctgctctg

SEQ ID NO: 2004585 - DNA, 25 bp, Homo sapien
ggcttagcggtaacgagctttctcc

SEQ ID NO: 2004586 - DNA, 25 bp, Homo sapien
tcaccacagaatgagccttggtttg

SEQ ID NO: 2004587 - DNA, 25 bp, Homo sapien
caaatagctgtgtgcggtgaacgat

SEQ ID NO: 2004588 - DNA, 25 bp, Homo sapien
ggtttgtgaaactgacattctgttg

SEQ ID NO: 2004589 - DNA, 25 bp, Homo sapien
gggtccagagctgtacatttcacca

SEQ ID NO: 2004590 - DNA, 25 bp, Homo sapien
cctcgtggccgagggtccttggcaa

SEQ ID NO: 2004591 - DNA, 25 bp, Homo sapien
gccagacttttaggaatagaggact

SEQ ID NO: 2004592 - DNA, 25 bp, Homo sapien
tcattacgaatgttcctggattgcc

SEQ ID NO: 2004593 - DNA, 25 bp, Homo sapien
tcttttggattggtgctgactgtca

SEQ ID NO: 2004594 - DNA, 25 bp, Homo sapien
atgatcacagctgttgtgacttaaa

SEQ ID NO: 2004595 - DNA, 25 bp, Homo sapien
gaaacttgtatgctcaaattggtta

SEQ ID NO: 2004596 - DNA, 25 bp, Homo sapien
tttcaactcatgacagctgtgatat

SEQ ID NO: 2004597 - DNA, 25 bp, Homo sapien
aaaatgatcacagctgttgtgactt

SEQ ID NO: 2004598 - DNA, 25 bp, Homo sapien
catcttgagagagggcatgttgagg

SEQ ID NO: 2004599 - DNA, 25 bp, Homo sapien
tgaggtaattggtgggagagagtgg

SEQ ID NO: 2004600 - DNA, 25 bp, Homo sapien
gagtggggagagttgaattccagct

SEQ ID NO: 2004601 - DNA, 25 bp, Homo sapien
gggcatgttgaggtaattggtggga

SEQ ID NO: 2004602 - DNA, 25 bp, Homo sapien
tgtactgcgcatacacaatcccggg

SEQ ID NO: 2004603 - DNA, 25 bp, Homo sapien
aagaatccgagaccatgtactgcgc

SEQ ID NO: 2004604 - DNA, 25 bp, Homo sapien
catgggcggcaactctttgatgtac

SEQ ID NO: 2004605 - DNA, 25 bp, Homo sapien
ttggcccggccatatgggaaaatgc

SEQ ID NO: 2004606 - DNA, 25 bp, Homo sapien
ctcgacccggacgccgcacctcgta

SEQ ID NO: 2004607 - DNA, 25 bp, Homo sapien
tacgaggtgcggcgtccgggtcgag

SEQ ID NO: 2004608 - DNA, 25 bp, Homo sapien
caaagttgagcgtctgacagcagcg

SEQ ID NO: 2004609 - DNA, 25 bp, Homo sapien
tttctccgagtcgagttctcaggca

SEQ ID NO: 2004610 - DNA, 25 bp, Homo sapien
ggaaaagttgaatcgatctcgcgta

SEQ ID NO: 2004611 - DNA, 25 bp, Homo sapien
tcaggcagctgcgtacaatgctggg

SEQ ID NO: 2004612 - DNA, 25 bp, Homo sapien
gatattcgtcggttcgaaggtacca

SEQ ID NO: 2004613 - DNA, 25 bp, Homo sapien
actccagagtggagaacgtgcgccc

SEQ ID NO: 2004614 - DNA, 25 bp, Homo sapien
gatgctgcaaaactctgaaaatgtg

SEQ ID NO: 2004615 - DNA, 25 bp, Homo sapien
taaagctacagtgaaagcacccaac

SEQ ID NO: 2004616 - DNA, 25 bp, Homo sapien
tgtgttttgttagcatattgagttg

SEQ ID NO: 2004617 - DNA, 25 bp, Homo sapien
ctcgggtggcatttgcttcggcata

SEQ ID NO: 2004618 - DNA, 25 bp, Homo sapien
cttcggcatatgcaaatgatttagt

SEQ ID NO: 2004619 - DNA, 25 bp, Homo sapien
tattgagttgtaaggaaataggtgc

SEQ ID NO: 2004620 - DNA, 25 bp, Homo sapien
aaataagaatcgtgtgggtttcatt

SEQ ID NO: 2004621 - DNA, 25 bp, Homo sapien
gcttcacctcaaatatatctgtcaa

SEQ ID NO: 2004622 - DNA, 25 bp, Homo sapien
tattgaacatctaccttgtaggtaa

SEQ ID NO: 2004623 - DNA, 25 bp, Homo sapien
tgtaggtaatactatgccaatgcat

SEQ ID NO: 2004624 - DNA, 25 bp, Homo sapien
ccaaagttgggaatcactaaataat

SEQ ID NO: 2004625 - DNA, 25 bp, Homo sapien
caaatggagcttaacccaaagttgg

SEQ ID NO: 2004626 - DNA, 25 bp, Homo sapien
accctgtgcatgtccccaaatggag

SEQ ID NO: 2004627 - DNA, 25 bp, Homo sapien
ttcatgaaatggttgaatatagctc

SEQ ID NO: 2004628 - DNA, 25 bp, Homo sapien
tacctgccacagagtactagttatg

SEQ ID NO: 2004629 - DNA, 25 bp, Homo sapien
gcagcaaggttactcatcaagatgt

SEQ ID NO: 2004630 - DNA, 25 bp, Homo sapien
caaacctgtgatacagcttggccag

SEQ ID NO: 2004631 - DNA, 25 bp, Homo sapien
gaaggaactaacactcaaacctgtg

SEQ ID NO: 2004632 - DNA, 25 bp, Homo sapien
ccactcggcagtaagggatatcttc

SEQ ID NO: 2004633 - DNA, 25 bp, Homo sapien
tgttagagaacacaacccactcggc

SEQ ID NO: 2004634 - DNA, 25 bp, Homo sapien
ggtccagaccccataaagaatgtgg

SEQ ID NO: 2004635 - DNA, 25 bp, Homo sapien
tactaagtagatacaggtccagacc

SEQ ID NO: 2004636 - DNA, 25 bp, Homo sapien
agccattgtgcctaggtaattcagg

SEQ ID NO: 2004637 - DNA, 25 bp, Homo sapien
ccattgtgcctaggtaattcagggc

SEQ ID NO: 2004638 - DNA, 25 bp, Homo sapien
attgtgcctaggtaattcagggcat

SEQ ID NO: 2004639 - DNA, 25 bp, Homo sapien
tatggtatgtaaatgatatttggag

SEQ ID NO: 2004640 - DNA, 25 bp, Homo sapien
caaaatttcgagaatcaccataagg

SEQ ID NO: 2004641 - DNA, 25 bp, Homo sapien
tttcgagaatcaccataagggcttc

SEQ ID NO: 2004642 - DNA, 25 bp, Homo sapien
tgtgcaaaatttcgagaatcaccat

SEQ ID NO: 2004643 - DNA, 25 bp, Homo sapien
gaatcaccataagggcttctttgca

SEQ ID NO: 2004644 - DNA, 25 bp, Homo sapien
ttttggctgccgtggtcgaaatgaa

SEQ ID NO: 2004645 - DNA, 25 bp, Homo sapien
tgaaatgggcaagctgtagtccgct

SEQ ID NO: 2004646 - DNA, 25 bp, Homo sapien
gaggtactaatatcaaaacagactg

SEQ ID NO: 2004647 - DNA, 25 bp, Homo sapien
aaacagactgcttgtcgtcgcacgg

SEQ ID NO: 2004648 - DNA, 25 bp, Homo sapien
gaaacagattgctttaaacatgtgc

SEQ ID NO: 2004649 - DNA, 25 bp, Homo sapien
acagattgctttaaacatgtgcttc

SEQ ID NO: 2004650 - DNA, 25 bp, Homo sapien
gaggaaacagattgctttaaacatg

SEQ ID NO: 2004651 - DNA, 25 bp, Homo sapien
tcacatgaggaaacagattgcttta

SEQ ID NO: 2004652 - DNA, 25 bp, Homo sapien
gactaggtagacctgtgtggcagtc

SEQ ID NO: 2004653 - DNA, 25 bp, Homo sapien
agtgcccctgttgaattcacaaaag

SEQ ID NO: 2004654 - DNA, 25 bp, Homo sapien
tagatttcttacactgagcaggaat

SEQ ID NO: 2004655 - DNA, 25 bp, Homo sapien
cctggcaagatgaagatgtgtggac

SEQ ID NO: 2004656 - DNA, 25 bp, Homo sapien
acgggtctgcccaagtgatgcacag

SEQ ID NO: 2004657 - DNA, 25 bp, Homo sapien
tggtattctctaataggccgggaac

SEQ ID NO: 2004658 - DNA, 25 bp, Homo sapien
gatgcccggagctgcttatactgtg

SEQ ID NO: 2004659 - DNA, 25 bp, Homo sapien
gaactggtacatcggctgtgatgcc

SEQ ID NO: 2004660 - DNA, 25 bp, Homo sapien
tttgcattcttgtgtagttcaagag

SEQ ID NO: 2004661 - DNA, 25 bp, Homo sapien
tcatgttggcagtgctactgttttg

SEQ ID NO: 2004662 - DNA, 25 bp, Homo sapien
tcacagtcccactttaataaaatgt

SEQ ID NO: 2004663 - DNA, 25 bp, Homo sapien
tcttatatacagctatcactatcat

SEQ ID NO: 2004664 - DNA, 25 bp, Homo sapien
gagcagttgaagacgacacatgctg

SEQ ID NO: 2004665 - DNA, 25 bp, Homo sapien
ttctcacagtactgatgacactggg

SEQ ID NO: 2004666 - DNA, 25 bp, Homo sapien
gtgccatctaattgacagctgtctg

SEQ ID NO: 2004667 - DNA, 25 bp, Homo sapien
ggcctactgagtgtgagcgtgccat

SEQ ID NO: 2004668 - DNA, 25 bp, Homo sapien
gaagtgcttgttccagagtcacagg

SEQ ID NO: 2004669 - DNA, 25 bp, Homo sapien
tctctatctgcagtgtctaacaggg

SEQ ID NO: 2004670 - DNA, 25 bp, Homo sapien
caagggctaggcttgccgtctctat

SEQ ID NO: 2004671 - DNA, 25 bp, Homo sapien
ttaaccatgccaatgacccctgagg

SEQ ID NO: 2004672 - DNA, 25 bp, Homo sapien
cagggcagagcgagctgcctctctt

SEQ ID NO: 2004673 - DNA, 25 bp, Homo sapien
tggatgttataaccagggcagagcg

SEQ ID NO: 2004674 - DNA, 25 bp, Homo sapien
agggaccctggatgttataaccagg

SEQ ID NO: 2004675 - DNA, 25 bp, Homo sapien
ttataaccagggcagagcgagctgc

SEQ ID NO: 2004676 - DNA, 25 bp, Homo sapien
ctgcttgcagttccctcaagagttc

SEQ ID NO: 2004677 - DNA, 25 bp, Homo sapien
ttataagaacctgaaatacctttgc

SEQ ID NO: 2004678 - DNA, 25 bp, Homo sapien
tgttctaccagctaactcacctgct

SEQ ID NO: 2004679 - DNA, 25 bp, Homo sapien
tcaagagttctttcacggttctctc

SEQ ID NO: 2004680 - DNA, 25 bp, Homo sapien
tccacaaaacattgttccttggctt

SEQ ID NO: 2004681 - DNA, 25 bp, Homo sapien
ctggagtgacagtctccacaaaaca

SEQ ID NO: 2004682 - DNA, 25 bp, Homo sapien
gctgctggagtgacagtctccacaa

SEQ ID NO: 2004683 - DNA, 25 bp, Homo sapien
tccctcacatgcctcctgtccactg

SEQ ID NO: 2004684 - DNA, 25 bp, Homo sapien
tagacccccagtcaccaccgtggct

SEQ ID NO: 2004685 - DNA, 25 bp, Homo sapien
gtggctgcccgtgctgctctgatcc

SEQ ID NO: 2004686 - DNA, 25 bp, Homo sapien
gataccaataaatctgctgctgcct

SEQ ID NO: 2004687 - DNA, 25 bp, Homo sapien
gatctcatcaattctgcttgcaaga

SEQ ID NO: 2004688 - DNA, 25 bp, Homo sapien
ccagggtattttgtgccccactgct

SEQ ID NO: 2004689 - DNA, 25 bp, Homo sapien
tcacagagatgccaggtttcacgga

SEQ ID NO: 2004690 - DNA, 25 bp, Homo sapien
gtttcacggaatggagggctgagtc

SEQ ID NO: 2004691 - DNA, 25 bp, Homo sapien
tgtgttctcccagggtattttgtgc

SEQ ID NO: 2004692 - DNA, 25 bp, Homo sapien
ctgggatatagcccaggtctaaagc

SEQ ID NO: 2004693 - DNA, 25 bp, Homo sapien
gttgattatcaggaattgtttgtat

SEQ ID NO: 2004694 - DNA, 25 bp, Homo sapien
aatggaagtttagagttgattatca

SEQ ID NO: 2004695 - DNA, 25 bp, Homo sapien
tgggatatagcccaggtctaaagcc

SEQ ID NO: 2004696 - DNA, 25 bp, Homo sapien
tagcgtggtcgcagcaatctccata

SEQ ID NO: 2004697 - DNA, 25 bp, Homo sapien
gcttcatggttgtgagtcttgcaag

SEQ ID NO: 2004698 - DNA, 25 bp, Homo sapien
tactatctctgtgcttagcgtggtc

SEQ ID NO: 2004699 - DNA, 25 bp, Homo sapien
aaagccttcgtaatgtagccgtgga

SEQ ID NO: 2004700 - DNA, 25 bp, Homo sapien
gttcctgcagaagaccgtgttcctg

SEQ ID NO: 2004701 - DNA, 25 bp, Homo sapien
aatgttcgggctagatagcctgggc

SEQ ID NO: 2004702 - DNA, 25 bp, Homo sapien
ctgtgtctctggtgtaaagctctca

SEQ ID NO: 2004703 - DNA, 25 bp, Homo sapien
tttacagccattccagcgcaacgga

SEQ ID NO: 2004704 - DNA, 25 bp, Homo sapien
gatgccgacttgttctgtagacggg

SEQ ID NO: 2004705 - DNA, 25 bp, Homo sapien
ggagatgccgacttgttctgtagac

SEQ ID NO: 2004706 - DNA, 25 bp, Homo sapien
agaaggattgattgacggatgttgt

SEQ ID NO: 2004707 - DNA, 25 bp, Homo sapien
acggatgttgtgtctgctcatttac

SEQ ID NO: 2004708 - DNA, 25 bp, Homo sapien
agcagcggacgggttcgatttggac

SEQ ID NO: 2004709 - DNA, 25 bp, Homo sapien
gaacacatgttgacttcctggactg

SEQ ID NO: 2004710 - DNA, 25 bp, Homo sapien
ttcgatttggacagaacacatgttg

SEQ ID NO: 2004711 - DNA, 25 bp, Homo sapien
cagaacacatgttgacttcctggac

SEQ ID NO: 2004712 - DNA, 25 bp, Homo sapien
tgtacttctcctaagcaggatgcca

SEQ ID NO: 2004713 - DNA, 25 bp, Homo sapien
tcctaagcaggatgccaagtgaggg

SEQ ID NO: 2004714 - DNA, 25 bp, Homo sapien
gataatgtgtgtacttctcctaagc

SEQ ID NO: 2004715 - DNA, 25 bp, Homo sapien
aatttgataatgtgtgtacttctcc

SEQ ID NO: 2004716 - DNA, 25 bp, Homo sapien
tcggaaaatcaagcataaaactcat

SEQ ID NO: 2004717 - DNA, 25 bp, Homo sapien
gcgttcggaaaatcaagcataaaac

SEQ ID NO: 2004718 - DNA, 25 bp, Homo sapien
gttcggaaaatcaagcataaaactc

SEQ ID NO: 2004719 - DNA, 25 bp, Homo sapien
ctgcgttcggaaaatcaagcataaa

SEQ ID NO: 2004720 - DNA, 25 bp, Homo sapien
gcacactctgtggaattagtgttat

SEQ ID NO: 2004721 - DNA, 25 bp, Homo sapien
gattatgttgattaattgcacactc

SEQ ID NO: 2004722 - DNA, 25 bp, Homo sapien
cccaaacagctaagttatccccatg

SEQ ID NO: 2004723 - DNA, 25 bp, Homo sapien
taagttatccccatgattatgttga

SEQ ID NO: 2004724 - DNA, 25 bp, Homo sapien
ttgtgggcagcgaagccagtgttcc

SEQ ID NO: 2004725 - DNA, 25 bp, Homo sapien
gtttcaggtgttgcaacaaaatcaa

SEQ ID NO: 2004726 - DNA, 25 bp, Homo sapien
acacccagatgttttgtttcaggtg

SEQ ID NO: 2004727 - DNA, 25 bp, Homo sapien
cagtgttcctgccagtattcccgtt

SEQ ID NO: 2004728 - DNA, 25 bp, Homo sapien
tgcacgtgttaattcctgtgggcat

SEQ ID NO: 2004729 - DNA, 25 bp, Homo sapien
ttgggacctttgtcatggcattgtt

SEQ ID NO: 2004730 - DNA, 25 bp, Homo sapien
ccacatttactggagttattgaact

SEQ ID NO: 2004731 - DNA, 25 bp, Homo sapien
ggacctttgtcatggcattgtttgt

SEQ ID NO: 2004732 - DNA, 25 bp, Homo sapien
gagggaagctatgcattctgagatc

SEQ ID NO: 2004733 - DNA, 25 bp, Homo sapien
caaaagttcttctatgcacctggct

SEQ ID NO: 2004734 - DNA, 25 bp, Homo sapien
tatatgggttttgatccggtgtgac

SEQ ID NO: 2004735 - DNA, 25 bp, Homo sapien
tctgttccggtcatttccttgtata

SEQ ID NO: 2004736 - DNA, 25 bp, Homo sapien
gccctccttagcatgctgattttca

SEQ ID NO: 2004737 - DNA, 25 bp, Homo sapien
ctttggcagagccaaaggccaggct

SEQ ID NO: 2004738 - DNA, 25 bp, Homo sapien
ggcttgactttctgccagcctgtcc

SEQ ID NO: 2004739 - DNA, 25 bp, Homo sapien
agccaccaaccactcttttctccag

SEQ ID NO: 2004740 - DNA, 25 bp, Homo sapien
cagggcacccttgtcacgcaacagg

SEQ ID NO: 2004741 - DNA, 25 bp, Homo sapien
ttgtcacgcaacaggcctgtagctc

SEQ ID NO: 2004742 - DNA, 25 bp, Homo sapien
tgttctataggactatatccttgac

SEQ ID NO: 2004743 - DNA, 25 bp, Homo sapien
tctataggactatatccttgactgg

SEQ ID NO: 2004744 - DNA, 25 bp, Homo sapien
ataggactatatccttgactgggca

SEQ ID NO: 2004745 - DNA, 25 bp, Homo sapien
attttgttctataggactatatcct

SEQ ID NO: 2004746 - DNA, 25 bp, Homo sapien
agcccttacaccagctgtcgagctt

SEQ ID NO: 2004747 - DNA, 25 bp, Homo sapien
gcccttacaccagctgtcgagcttg

SEQ ID NO: 2004748 - DNA, 25 bp, Homo sapien
ttacaccagctgtcgagcttgacat

SEQ ID NO: 2004749 - DNA, 25 bp, Homo sapien
ccttacaccagctgtcgagcttgac

SEQ ID NO: 2004750 - DNA, 25 bp, Homo sapien
tttgtgttatctgctgaagcaccaa

SEQ ID NO: 2004751 - DNA, 25 bp, Homo sapien
gagctttcttgacatgccttgaagc

SEQ ID NO: 2004752 - DNA, 25 bp, Homo sapien
gccttgaagctcacagtgcactgat

SEQ ID NO: 2004753 - DNA, 25 bp, Homo sapien
ctaggcttggtgcagtcccgagagc

SEQ ID NO: 2004754 - DNA, 25 bp, Homo sapien
cagaagggccaatgaagtacttgag

SEQ ID NO: 2004755 - DNA, 25 bp, Homo sapien
cagctgagttgatagaggagtgaaa

SEQ ID NO: 2004756 - DNA, 25 bp, Homo sapien
gaaagtactgtatttgaagaaccac

SEQ ID NO: 2004757 - DNA, 25 bp, Homo sapien
gaagaaccacgtgttcaagttctgc

SEQ ID NO: 2004758 - DNA, 25 bp, Homo sapien
ggttaaatggggaattatgcagcat

SEQ ID NO: 2004759 - DNA, 25 bp, Homo sapien
aggtgagagcaaagatgcatgcaca

SEQ ID NO: 2004760 - DNA, 25 bp, Homo sapien
gaagggttaaatggggaattatgca

SEQ ID NO: 2004761 - DNA, 25 bp, Homo sapien
gagaggtgagagcaaagatgcatgc

SEQ ID NO: 2004762 - DNA, 25 bp, Homo sapien
tcattaggcatttgctggctgattc

SEQ ID NO: 2004763 - DNA, 25 bp, Homo sapien
gtgctaagtgctcattaggcatttg

SEQ ID NO: 2004764 - DNA, 25 bp, Homo sapien
taagtgctcattaggcatttgctgg

SEQ ID NO: 2004765 - DNA, 25 bp, Homo sapien
ttaggcatttgctggctgattctat

SEQ ID NO: 2004766 - DNA, 25 bp, Homo sapien
ttggtgatggctgtttgaacagccg

SEQ ID NO: 2004767 - DNA, 25 bp, Homo sapien
aggattggaatcattagaaacccta

SEQ ID NO: 2004768 - DNA, 25 bp, Homo sapien
agaaaccctaggttagtagcatcag

SEQ ID NO: 2004769 - DNA, 25 bp, Homo sapien
gtttgaacagccgtttgctttctcc

SEQ ID NO: 2004770 - DNA, 25 bp, Homo sapien
tgtaggcaacgtgcctcccaaagag

SEQ ID NO: 2004771 - DNA, 25 bp, Homo sapien
cttgtaggcaacgtgcctcccaaag

SEQ ID NO: 2004772 - DNA, 25 bp, Homo sapien
gtaggcaacgtgcctcccaaagagc

SEQ ID NO: 2004773 - DNA, 25 bp, Homo sapien
ttgtaggcaacgtgcctcccaaaga

SEQ ID NO: 2004774 - DNA, 25 bp, Homo sapien
ggttctctggagttcttggtgcact

SEQ ID NO: 2004775 - DNA, 25 bp, Homo sapien
tgccctgatactcgcctggtacttg

SEQ ID NO: 2004776 - DNA, 25 bp, Homo sapien
tcatttataccactcggttctctgg

SEQ ID NO: 2004777 - DNA, 25 bp, Homo sapien
gtgatgactaacatctgccctgata

SEQ ID NO: 2004778 - DNA, 25 bp, Homo sapien
ttggaccttggtttctattcctgtg

SEQ ID NO: 2004779 - DNA, 25 bp, Homo sapien
gaccttggtttctattcctgtgatg

SEQ ID NO: 2004780 - DNA, 25 bp, Homo sapien
ccttggtttctattcctgtgatgat

SEQ ID NO: 2004781 - DNA, 25 bp, Homo sapien
tggaccttggtttctattcctgtga

SEQ ID NO: 2004782 - DNA, 25 bp, Homo sapien
taggttctttacttggcagctatca

SEQ ID NO: 2004783 - DNA, 25 bp, Homo sapien
tatacactaggaagcagacgaagag

SEQ ID NO: 2004784 - DNA, 25 bp, Homo sapien
tatggagggcagagttatgagtatc

SEQ ID NO: 2004785 - DNA, 25 bp, Homo sapien
tgtaacacgctgtactttggcacaa

SEQ ID NO: 2004786 - DNA, 25 bp, Homo sapien
tgaaccatagatgaagttacacata

SEQ ID NO: 2004787 - DNA, 25 bp, Homo sapien
aatgaaccatagatgaagttacaca

SEQ ID NO: 2004788 - DNA, 25 bp, Homo sapien
atgaaccatagatgaagttacacat

SEQ ID NO: 2004789 - DNA, 25 bp, Homo sapien
gaaccatagatgaagttacacatat

SEQ ID NO: 2004790 - DNA, 25 bp, Homo sapien
tggattttcttgggttctttattca

SEQ ID NO: 2004791 - DNA, 25 bp, Homo sapien
tttactatgtggttaacaagaaata

SEQ ID NO: 2004792 - DNA, 25 bp, Homo sapien
atttactatgtggttaacaagaaat

SEQ ID NO: 2004793 - DNA, 25 bp, Homo sapien
ttactatgtggttaacaagaaataa

SEQ ID NO: 2004794 - DNA, 25 bp, Homo sapien
cgtgtgttccggttcaaaagttgca

SEQ ID NO: 2004795 - DNA, 25 bp, Homo sapien
gggaaaaatgtaactcaatcagctt

SEQ ID NO: 2004796 - DNA, 25 bp, Homo sapien
ccggttcaaaagttgcatcttcatt

SEQ ID NO: 2004797 - DNA, 25 bp, Homo sapien
ctcataaataaagccgtgtgttccg

SEQ ID NO: 2004798 - DNA, 25 bp, Homo sapien
tttccccagccgtggggatggtagc

SEQ ID NO: 2004799 - DNA, 25 bp, Homo sapien
gtagctgtttccatccgactgttca

SEQ ID NO: 2004800 - DNA, 25 bp, Homo sapien
gggatggtagctgtttccatccgac

SEQ ID NO: 2004801 - DNA, 25 bp, Homo sapien
ccgtggggatggtagctgtttccat

SEQ ID NO: 2004802 - DNA, 25 bp, Homo sapien
tcctcatcacgtctctctgagctta

SEQ ID NO: 2004803 - DNA, 25 bp, Homo sapien
tctcttcctcatcacgtctctctga

SEQ ID NO: 2004804 - DNA, 25 bp, Homo sapien
taacctccttggagataacagcccc

SEQ ID NO: 2004805 - DNA, 25 bp, Homo sapien
gccccagtctgctggtgtctcttcc

SEQ ID NO: 2004806 - DNA, 25 bp, Homo sapien
ctattcattgagaaacgtgcttgta

SEQ ID NO: 2004807 - DNA, 25 bp, Homo sapien
gaagaaccagggatgtgaatttttg

SEQ ID NO: 2004808 - DNA, 25 bp, Homo sapien
gaaacgtgcttgtatgcatataaac

SEQ ID NO: 2004809 - DNA, 25 bp, Homo sapien
gccttagaagaaccagggatgtgaa

SEQ ID NO: 2004810 - DNA, 25 bp, Homo sapien
ttttcttccatacataatccaaatt

SEQ ID NO: 2004811 - DNA, 25 bp, Homo sapien
tcttccatacataatccaaatttca

SEQ ID NO: 2004812 - DNA, 25 bp, Homo sapien
aatgtattaattttgccgaatgcca

SEQ ID NO: 2004813 - DNA, 25 bp, Homo sapien
caaatgtattaattttgccgaatgc

SEQ ID NO: 2004814 - DNA, 25 bp, Homo sapien
ggtgaggtcacaaaacttcttttca

SEQ ID NO: 2004815 - DNA, 25 bp, Homo sapien
tggtgaggtcacaaaacttcttttc

SEQ ID NO: 2004816 - DNA, 25 bp, Homo sapien
tactgagcggagtaagggtttcatc

SEQ ID NO: 2004817 - DNA, 25 bp, Homo sapien
tcactcagacttgttcagattactg

SEQ ID NO: 2004818 - DNA, 25 bp, Homo sapien
tgttcagattactgagcggagtaag

SEQ ID NO: 2004819 - DNA, 25 bp, Homo sapien
tgagcggagtaagggtttcatctga

SEQ ID NO: 2004820 - DNA, 25 bp, Homo sapien
ctggaatcagactgagttgttatca

SEQ ID NO: 2004821 - DNA, 25 bp, Homo sapien
cttctattgagaggcagtttggtgc

SEQ ID NO: 2004822 - DNA, 25 bp, Homo sapien
gtgcagtgcctcaatctggaatcag

SEQ ID NO: 2004823 - DNA, 25 bp, Homo sapien
aggcagtttggtgcagtgcctcaat

SEQ ID NO: 2004824 - DNA, 25 bp, Homo sapien
gagaaatggctttcggaagttttgc

SEQ ID NO: 2004825 - DNA, 25 bp, Homo sapien
tgcactttctccattcgttcctttg

SEQ ID NO: 2004826 - DNA, 25 bp, Homo sapien
cccctttctgcttgttgcactttct

SEQ ID NO: 2004827 - DNA, 25 bp, Homo sapien
tttgccaggaaacgtagccctaggc

SEQ ID NO: 2004828 - DNA, 25 bp, Homo sapien
taatgccagatgagtttggtgtaag

SEQ ID NO: 2004829 - DNA, 25 bp, Homo sapien
tgccagatgagtttggtgtaagatg

SEQ ID NO: 2004830 - DNA, 25 bp, Homo sapien
caaaccgccttccaagtggggctct

SEQ ID NO: 2004831 - DNA, 25 bp, Homo sapien
ccagatgagtttggtgtaagatgca

SEQ ID NO: 2004832 - DNA, 25 bp, Homo sapien
tgatgctttggattggtaggacctg

SEQ ID NO: 2004833 - DNA, 25 bp, Homo sapien
taaaactagtatggatatgctgagc

SEQ ID NO: 2004834 - DNA, 25 bp, Homo sapien
tagtcgtaggatcagcacaaagcgg

SEQ ID NO: 2004835 - DNA, 25 bp, Homo sapien
aagcggaacttgacacacttgtgga

SEQ ID NO: 2004836 - DNA, 25 bp, Homo sapien
taatggaatctcaccccagtggaaa

SEQ ID NO: 2004837 - DNA, 25 bp, Homo sapien
gaacggtggaaactaacaacagctg

SEQ ID NO: 2004838 - DNA, 25 bp, Homo sapien
ccttagggacggacaaagagctgag

SEQ ID NO: 2004839 - DNA, 25 bp, Homo sapien
cacttcagctagaaaccagtaggaa

SEQ ID NO: 2004840 - DNA, 25 bp, Homo sapien
gatgcaacgggcaaaaactgaactg

SEQ ID NO: 2004841 - DNA, 25 bp, Homo sapien
aatgaggtgctcgatgaattttcgt

SEQ ID NO: 2004842 - DNA, 25 bp, Homo sapien
gtaactgacgatctgaggaaaaatg

SEQ ID NO: 2004843 - DNA, 25 bp, Homo sapien
caaagtgcctccgagggatgcaacg

SEQ ID NO: 2004844 - DNA, 25 bp, Homo sapien
ctccgctcccggaggaggcgtggtc

SEQ ID NO: 2004845 - DNA, 25 bp, Homo sapien
aggcgtggtcgaccagcaccgccat

SEQ ID NO: 2004846 - DNA, 25 bp, Homo sapien
cgctcccggaggaggcgtggtcgac

SEQ ID NO: 2004847 - DNA, 25 bp, Homo sapien
ccggaggaggcgtggtcgaccagca

SEQ ID NO: 2004848 - DNA, 25 bp, Homo sapien
gccaagtgaagactttttggacttg

SEQ ID NO: 2004849 - DNA, 25 bp, Homo sapien
tgagtctacaaagcaatagatgaag

SEQ ID NO: 2004850 - DNA, 25 bp, Homo sapien
ttatggcacaaactacatttgagtc

SEQ ID NO: 2004851 - DNA, 25 bp, Homo sapien
gatgaaggtcttcgccaagtgaaga

SEQ ID NO: 2004852 - DNA, 25 bp, Homo sapien
cttcctcttcgctcctggggtccaa

SEQ ID NO: 2004853 - DNA, 25 bp, Homo sapien
ttcctcttcgctcctggggtccaat

SEQ ID NO: 2004854 - DNA, 25 bp, Homo sapien
cataggctacggtcaatctcttcct

SEQ ID NO: 2004855 - DNA, 25 bp, Homo sapien
ataggctacggtcaatctcttcctc

SEQ ID NO: 2004856 - DNA, 25 bp, Homo sapien
cttaactgactagagcaaagacttc

SEQ ID NO: 2004857 - DNA, 25 bp, Homo sapien
tatgcttaactgactagagcaaaga

SEQ ID NO: 2004858 - DNA, 25 bp, Homo sapien
gtgtcctatgcttaactgactagag

SEQ ID NO: 2004859 - DNA, 25 bp, Homo sapien
tcctatgcttaactgactagagcaa

SEQ ID NO: 2004860 - DNA, 25 bp, Homo sapien
gctcaatgtcttgtgtcctcaatgt

SEQ ID NO: 2004861 - DNA, 25 bp, Homo sapien
ccattagcatgtaaaggctgggaag

SEQ ID NO: 2004862 - DNA, 25 bp, Homo sapien
taagggccccagtttttcatcttga

SEQ ID NO: 2004863 - DNA, 25 bp, Homo sapien
gaattcttcattgccccttgcatag

SEQ ID NO: 2004864 - DNA, 25 bp, Homo sapien
ccaccagttgagaagccttgggtat

SEQ ID NO: 2004865 - DNA, 25 bp, Homo sapien
tcttggtatcatgagggagttagcc

SEQ ID NO: 2004866 - DNA, 25 bp, Homo sapien
caacagctatctccgtctagaggca

SEQ ID NO: 2004867 - DNA, 25 bp, Homo sapien
gatttgatggaaggctggaacctgc

SEQ ID NO: 2004868 - DNA, 25 bp, Homo sapien
gccttcctgcggatatcagactcca

SEQ ID NO: 2004869 - DNA, 25 bp, Homo sapien
tcagaagtccagttgggcctcaggg

SEQ ID NO: 2004870 - DNA, 25 bp, Homo sapien
tctattgcgtaggaaataatggcca

SEQ ID NO: 2004871 - DNA, 25 bp, Homo sapien
caggcatcttgttggttactataca

SEQ ID NO: 2004872 - DNA, 25 bp, Homo sapien
cttgtacatctgaaatcttctaata

SEQ ID NO: 2004873 - DNA, 25 bp, Homo sapien
tgtacatctgaaatcttctaataac

SEQ ID NO: 2004874 - DNA, 25 bp, Homo sapien
tgcttgtacatctgaaatcttctaa

SEQ ID NO: 2004875 - DNA, 25 bp, Homo sapien
tgtgcttgtacatctgaaatcttct

SEQ ID NO: 2004876 - DNA, 25 bp, Homo sapien
tggtgggaacagcatctctcttcat

SEQ ID NO: 2004877 - DNA, 25 bp, Homo sapien
tcagagcctgaaaactgctggtggg

SEQ ID NO: 2004878 - DNA, 25 bp, Homo sapien
gctcagagcctgaaaactgctggtg

SEQ ID NO: 2004879 - DNA, 25 bp, Homo sapien
agcctgaaaactgctggtgggaaca

SEQ ID NO: 2004880 - DNA, 25 bp, Homo sapien
aatgtagaccattttggacattaaa

SEQ ID NO: 2004881 - DNA, 25 bp, Homo sapien
gtgtgtgtgtaatcttgaaggatga

SEQ ID NO: 2004882 - DNA, 25 bp, Homo sapien
tgagggctaaggataaagtgaatgt

SEQ ID NO: 2004883 - DNA, 25 bp, Homo sapien
tactcttaagtctacataaaagaaa

SEQ ID NO: 2004884 - DNA, 25 bp, Homo sapien
gttggtctcttctgtacttctacga

SEQ ID NO: 2004885 - DNA, 25 bp, Homo sapien
aggcgttcactcacccgggttctga

SEQ ID NO: 2004886 - DNA, 25 bp, Homo sapien
tagtttctacgctggcttcaagcac

SEQ ID NO: 2004887 - DNA, 25 bp, Homo sapien
tacttctacgaagaacagctttgta

SEQ ID NO: 2004888 - DNA, 25 bp, Homo sapien
gctatgctctatatcaagggttgac

SEQ ID NO: 2004889 - DNA, 25 bp, Homo sapien
ctttgggcttaaccgagacatacct

SEQ ID NO: 2004890 - DNA, 25 bp, Homo sapien
tataggctggaattcgtgacttgct

SEQ ID NO: 2004891 - DNA, 25 bp, Homo sapien
ttaaactaggtcataaagggcactg

SEQ ID NO: 2004892 - DNA, 25 bp, Homo sapien
cagtatcacctttcttgtagattgg

SEQ ID NO: 2004893 - DNA, 25 bp, Homo sapien
gtatcacctttcttgtagattggca

SEQ ID NO: 2004894 - DNA, 25 bp, Homo sapien
agtatcacctttcttgtagattggc

SEQ ID NO: 2004895 - DNA, 25 bp, Homo sapien
acagtatcacctttcttgtagattg

SEQ ID NO: 2004896 - DNA, 25 bp, Homo sapien
gtgcagcattccttttcgaacagtg

SEQ ID NO: 2004897 - DNA, 25 bp, Homo sapien
ctttctcttatcttgtttgtttaca

SEQ ID NO: 2004898 - DNA, 25 bp, Homo sapien
cagcattccttttcgaacagtgccc

SEQ ID NO: 2004899 - DNA, 25 bp, Homo sapien
gggttacacagtagactcttccagc

SEQ ID NO: 2004900 - DNA, 25 bp, Homo sapien
ttagctgtgcctcgcaaattttgat

SEQ ID NO: 2004901 - DNA, 25 bp, Homo sapien
gtcattcatgctataggtttgtcaa

SEQ ID NO: 2004902 - DNA, 25 bp, Homo sapien
tgtctgtagtgatattccctcttta

SEQ ID NO: 2004903 - DNA, 25 bp, Homo sapien
ttttctaagctattgaggtgggaac

SEQ ID NO: 2004904 - DNA, 25 bp, Homo sapien
tggagcaacattgaatggaataggc

SEQ ID NO: 2004905 - DNA, 25 bp, Homo sapien
ctttttggtaggcaacttgaactca

SEQ ID NO: 2004906 - DNA, 25 bp, Homo sapien
tggaataggcagattattttccact

SEQ ID NO: 2004907 - DNA, 25 bp, Homo sapien
ccatactctaatatctggagcaaca

SEQ ID NO: 2004908 - DNA, 25 bp, Homo sapien
gtgtaaaatcttctggttttgccat

SEQ ID NO: 2004909 - DNA, 25 bp, Homo sapien
tttgccatttttatcccacaggaca

SEQ ID NO: 2004910 - DNA, 25 bp, Homo sapien
agcttaagtgtaaaatcttctggtt

SEQ ID NO: 2004911 - DNA, 25 bp, Homo sapien
ttcatctttcagcttaagtgtaaaa

SEQ ID NO: 2004912 - DNA, 25 bp, Homo sapien
agaatttcccggaatgagaggtggt

SEQ ID NO: 2004913 - DNA, 25 bp, Homo sapien
tgtgttctttcgtctgtccaagatg

SEQ ID NO: 2004914 - DNA, 25 bp, Homo sapien
tgttctttcgtctgtccaagatgca

SEQ ID NO: 2004915 - DNA, 25 bp, Homo sapien
tgtcaaagagaatttcccggaatga

SEQ ID NO: 2004916 - DNA, 25 bp, Homo sapien
tccatctcagcaccatcccacaaca

SEQ ID NO: 2004917 - DNA, 25 bp, Homo sapien
catccatctcagcaccatcccacaa

SEQ ID NO: 2004918 - DNA, 25 bp, Homo sapien
tttccttgccgttctcatccatctc

SEQ ID NO: 2004919 - DNA, 25 bp, Homo sapien
gcttttttccttgccgttctcatcc

SEQ ID NO: 2004920 - DNA, 25 bp, Homo sapien
atggataaactgtaggcctgagtca

SEQ ID NO: 2004921 - DNA, 25 bp, Homo sapien
ggactgagccttcttgaccaagcca

SEQ ID NO: 2004922 - DNA, 25 bp, Homo sapien
gcctgagtcaatggactgagccttc

SEQ ID NO: 2004923 - DNA, 25 bp, Homo sapien
tcaatggactgagccttcttgacca

SEQ ID NO: 2004924 - DNA, 25 bp, Homo sapien
aggaggctggctctctgatgtaagt

SEQ ID NO: 2004925 - DNA, 25 bp, Homo sapien
ggtgacaaagcctctagtgtttgtt

SEQ ID NO: 2004926 - DNA, 25 bp, Homo sapien
gggtgaggggtgacaaagcctctag

SEQ ID NO: 2004927 - DNA, 25 bp, Homo sapien
ggaggaggctggctctctgatgtaa

SEQ ID NO: 2004928 - DNA, 25 bp, Homo sapien
agttccgaggcagtgatatctccca

SEQ ID NO: 2004929 - DNA, 25 bp, Homo sapien
ggagcgagttgcagccttataccct

SEQ ID NO: 2004930 - DNA, 25 bp, Homo sapien
tgtgcagcaattgtataaggagcga

SEQ ID NO: 2004931 - DNA, 25 bp, Homo sapien
tcctcattccaatcctcttgtttgc

SEQ ID NO: 2004932 - DNA, 25 bp, Homo sapien
gctagagacaaaggcttcagagctg

SEQ ID NO: 2004933 - DNA, 25 bp, Homo sapien
gctgctgctgatcctgttatctcac

SEQ ID NO: 2004934 - DNA, 25 bp, Homo sapien
ttaaggagctagagacaaaggcttc

SEQ ID NO: 2004935 - DNA, 25 bp, Homo sapien
agagctgctgctgatcctgttatct

SEQ ID NO: 2004936 - DNA, 25 bp, Homo sapien
ttgcaacactggagtctaggtgaag

SEQ ID NO: 2004937 - DNA, 25 bp, Homo sapien
aggtgaagcaattacctggtaagtc

SEQ ID NO: 2004938 - DNA, 25 bp, Homo sapien
acaaattaataagtgccctgatcca

SEQ ID NO: 2004939 - DNA, 25 bp, Homo sapien
ttcagaacaagtctgtgtctgcagg

SEQ ID NO: 2004940 - DNA, 25 bp, Homo sapien
tcatcttgggtgtctagtgctgaca

SEQ ID NO: 2004941 - DNA, 25 bp, Homo sapien
ctaatgcagttagttaccagctgct

SEQ ID NO: 2004942 - DNA, 25 bp, Homo sapien
cgtgcagaatctgtgtctgtcaaca

SEQ ID NO: 2004943 - DNA, 25 bp, Homo sapien
gctgacacggctgctaaagctcgtg

SEQ ID NO: 2004944 - DNA, 25 bp, Homo sapien
tatttttgtgaagtgtagcccctga

SEQ ID NO: 2004945 - DNA, 25 bp, Homo sapien
gctcaataagtgtctgtagcctgaa

SEQ ID NO: 2004946 - DNA, 25 bp, Homo sapien
taaagtctcaatggattgtagcagc

SEQ ID NO: 2004947 - DNA, 25 bp, Homo sapien
cagccaggtggatgaatggaatgcc

SEQ ID NO: 2004948 - DNA, 25 bp, Homo sapien
catcccatgctgtgccctatgggaa

SEQ ID NO: 2004949 - DNA, 25 bp, Homo sapien
ggcagcaattacagtgtgctgctac

SEQ ID NO: 2004950 - DNA, 25 bp, Homo sapien
tgctgctacatctgctgggttccac

SEQ ID NO: 2004951 - DNA, 25 bp, Homo sapien
gggacaatgcaacttaatcagactg

SEQ ID NO: 2004952 - DNA, 25 bp, Homo sapien
gacaagaagatgtgatcaatggaaa

SEQ ID NO: 2004953 - DNA, 25 bp, Homo sapien
ctaatgaaatagtaggccgggcccg

SEQ ID NO: 2004954 - DNA, 25 bp, Homo sapien
tactctgattgtagtgaagcctttc

SEQ ID NO: 2004955 - DNA, 25 bp, Homo sapien
tagcatgattctaaaactagttgcc

SEQ ID NO: 2004956 - DNA, 25 bp, Homo sapien
cgcgcggggtgctggcggagatgtc

SEQ ID NO: 2004957 - DNA, 25 bp, Homo sapien
cgccgcccagccaagtccgcgcggg

SEQ ID NO: 2004958 - DNA, 25 bp, Homo sapien
gccgtgcggtgacaagctgactccc

SEQ ID NO: 2004959 - DNA, 25 bp, Homo sapien
gtcccggccgccgtgcggtgacaag

SEQ ID NO: 2004960 - DNA, 25 bp, Homo sapien
gtggtggtgcacaacagtaagtccc

SEQ ID NO: 2004961 - DNA, 25 bp, Homo sapien
tacttaggaggtgaaagaaccatga

SEQ ID NO: 2004962 - DNA, 25 bp, Homo sapien
ggttaacctgagtccatgagttcaa

SEQ ID NO: 2004963 - DNA, 25 bp, Homo sapien
gcgacacagcaataccctgcctgaa

SEQ ID NO: 2004964 - DNA, 25 bp, Homo sapien
gctgctcctgataagcttcagtggc

SEQ ID NO: 2004965 - DNA, 25 bp, Homo sapien
gccagctgaaaggacccaggagact

SEQ ID NO: 2004966 - DNA, 25 bp, Homo sapien
tggctgctcctgataagcttcagtg

SEQ ID NO: 2004967 - DNA, 25 bp, Homo sapien
ctcctgataagcttcagtggctaag

SEQ ID NO: 2004968 - DNA, 25 bp, Homo sapien
tccgcaaggatcatgacagtgtagg

SEQ ID NO: 2004969 - DNA, 25 bp, Homo sapien
tatatgggctatccctgacagaagc

SEQ ID NO: 2004970 - DNA, 25 bp, Homo sapien
ttccctgccaaaagaggtatccgca

SEQ ID NO: 2004971 - DNA, 25 bp, Homo sapien
taatgactgcatttgtaggcccaca

SEQ ID NO: 2004972 - DNA, 25 bp, Homo sapien
tctggccgtgaaacaccctttgata

SEQ ID NO: 2004973 - DNA, 25 bp, Homo sapien
tagcagatctgagcacgaagtcagc

SEQ ID NO: 2004974 - DNA, 25 bp, Homo sapien
caccctttgatatcagtagcagatc

SEQ ID NO: 2004975 - DNA, 25 bp, Homo sapien
catttactctttctggccgtgaaac

SEQ ID NO: 2004976 - DNA, 25 bp, Homo sapien
agccagaaagggttgtagctcccta

SEQ ID NO: 2004977 - DNA, 25 bp, Homo sapien
tacgatgggtctgtagcaccagcga

SEQ ID NO: 2004978 - DNA, 25 bp, Homo sapien
agatctagcacggatggagccctga

SEQ ID NO: 2004979 - DNA, 25 bp, Homo sapien
ccatgaaaagaccatgtagccagaa

SEQ ID NO: 2004980 - DNA, 25 bp, Homo sapien
atggcctcgtcgtctaagaggatcc

SEQ ID NO: 2004981 - DNA, 25 bp, Homo sapien
gagaccctttgccagggtagaatgg

SEQ ID NO: 2004982 - DNA, 25 bp, Homo sapien
cacatggtctgagaccctttgccag

SEQ ID NO: 2004983 - DNA, 25 bp, Homo sapien
tcgtcgtctaagaggatccacatgg

SEQ ID NO: 2004984 - DNA, 25 bp, Homo sapien
cagtaggaatttttccattcagaac

SEQ ID NO: 2004985 - DNA, 25 bp, Homo sapien
tggcatcagtaggaatttttccatt

SEQ ID NO: 2004986 - DNA, 25 bp, Homo sapien
ggaatttttccattcagaacacaga

SEQ ID NO: 2004987 - DNA, 25 bp, Homo sapien
taggaatttttccattcagaacaca

SEQ ID NO: 2004988 - DNA, 25 bp, Homo sapien
caaactgggccaacaaagataaggt

SEQ ID NO: 2004989 - DNA, 25 bp, Homo sapien
caaaactgttacatccctagaagag

SEQ ID NO: 2004990 - DNA, 25 bp, Homo sapien
tgactcccactcctagtttaaaaga

SEQ ID NO: 2004991 - DNA, 25 bp, Homo sapien
gataaggtgagaacagacaaggtca

SEQ ID NO: 2004992 - DNA, 25 bp, Homo sapien
gcatttagataaacgacataaggta

SEQ ID NO: 2004993 - DNA, 25 bp, Homo sapien
tgtgtcatgttttaatcgaaaagca

SEQ ID NO: 2004994 - DNA, 25 bp, Homo sapien
taaggtaaacgtctctgtagcagcc

SEQ ID NO: 2004995 - DNA, 25 bp, Homo sapien
tcttgatttacgaaatattaatgtc

SEQ ID NO: 2004996 - DNA, 25 bp, Homo sapien
ctgattccagagttggaatctggca

SEQ ID NO: 2004997 - DNA, 25 bp, Homo sapien
aagctgccattacctgattccagag

SEQ ID NO: 2004998 - DNA, 25 bp, Homo sapien
tatgtttggtacaggatccaagctg

SEQ ID NO: 2004999 - DNA, 25 bp, Homo sapien
tggtacaggatccaagctgccatta

SEQ ID NO: 2005000 - DNA, 25 bp, Homo sapien
ctggggggaggagacaagatggccg

SEQ ID NO: 2005001 - DNA, 25 bp, Homo sapien
agacgggtgatttcagcatttccat

SEQ ID NO: 2005002 - DNA, 25 bp, Homo sapien
tcccagcctgagcgacgcagaagac

SEQ ID NO: 2005003 - DNA, 25 bp, Homo sapien
aataggaacagctccggtctacagc

SEQ ID NO: 2005004 - DNA, 25 bp, Homo sapien
tggaactctgagtctatgccagtag

SEQ ID NO: 2005005 - DNA, 25 bp, Homo sapien
agtcactgtcctcttactccaagac

SEQ ID NO: 2005006 - DNA, 25 bp, Homo sapien
tgcataatctcccacagtcttgtcc

SEQ ID NO: 2005007 - DNA, 25 bp, Homo sapien
gaactctgagtctatgccagtagca

SEQ ID NO: 2005008 - DNA, 25 bp, Homo sapien
gcaggaatggagaaggcttgttcca

SEQ ID NO: 2005009 - DNA, 25 bp, Homo sapien
caagtagtggttaggtttgcactct

SEQ ID NO: 2005010 - DNA, 25 bp, Homo sapien
tagtctgcaaaacagtgctctgtgg

SEQ ID NO: 2005011 - DNA, 25 bp, Homo sapien
ttggctctcccttttagggcctgat

SEQ ID NO: 2005012 - DNA, 25 bp, Homo sapien
tgcactctgaacataacgaacgagg

SEQ ID NO: 2005013 - DNA, 25 bp, Homo sapien
gatccatatgttcaccgaataatat

SEQ ID NO: 2005014 - DNA, 25 bp, Homo sapien
ctgcagatccatatgttcaccgaat

SEQ ID NO: 2005015 - DNA, 25 bp, Homo sapien
tttcacaagaagtctgcagatccat

SEQ ID NO: 2005016 - DNA, 25 bp, Homo sapien
ttcacaagaagtctgcagatccata

SEQ ID NO: 2005017 - DNA, 25 bp, Homo sapien
tgtctctctggtccaactttgcctg

SEQ ID NO: 2005018 - DNA, 25 bp, Homo sapien
gtctctctggtccaactttgcctgc

SEQ ID NO: 2005019 - DNA, 25 bp, Homo sapien
tctctggtccaactttgcctgctga

SEQ ID NO: 2005020 - DNA, 25 bp, Homo sapien
tctggtccaactttgcctgctgaag

SEQ ID NO: 2005021 - DNA, 25 bp, Homo sapien
cgtgtaccgggtcctctggaaggct

SEQ ID NO: 2005022 - DNA, 25 bp, Homo sapien
tgcaagctaattccttcagcccagc

SEQ ID NO: 2005023 - DNA, 25 bp, Homo sapien
gagaccgccgcaatgtgcagcgtgt

SEQ ID NO: 2005024 - DNA, 25 bp, Homo sapien
ggaaggctgatctgttacttgcacc

SEQ ID NO: 2005025 - DNA, 25 bp, Homo sapien
cagtcaattgctcaggaactgattc

SEQ ID NO: 2005026 - DNA, 25 bp, Homo sapien
cttttgccccagacatgacttggaa

SEQ ID NO: 2005027 - DNA, 25 bp, Homo sapien
acatgccccgggcatcattttggag

SEQ ID NO: 2005028 - DNA, 25 bp, Homo sapien
gaactgcttgccacatttatactct

SEQ ID NO: 2005029 - DNA, 25 bp, Homo sapien
aatattctatatcgcactgtgatac

SEQ ID NO: 2005030 - DNA, 25 bp, Homo sapien
caatattctatatcgcactgtgata

SEQ ID NO: 2005031 - DNA, 25 bp, Homo sapien
tcaatattctatatcgcactgtgat

SEQ ID NO: 2005032 - DNA, 25 bp, Homo sapien
tgacttattaaaatctgtggacatc

SEQ ID NO: 2005033 - DNA, 25 bp, Homo sapien
tcctagccactcatcaagacgacga

SEQ ID NO: 2005034 - DNA, 25 bp, Homo sapien
tgcacctcgtgaaaattggccaacc

SEQ ID NO: 2005035 - DNA, 25 bp, Homo sapien
gggtgtagcctgatggtcctagcca

SEQ ID NO: 2005036 - DNA, 25 bp, Homo sapien
aagacgacgataccaagattgcggg

SEQ ID NO: 2005037 - DNA, 25 bp, Homo sapien
gtaagtcagtgtttcacctggcctg

SEQ ID NO: 2005038 - DNA, 25 bp, Homo sapien
tcttccgcgctttgactaactaagg

SEQ ID NO: 2005039 - DNA, 25 bp, Homo sapien
cctttcatagaattgcgctggactc

SEQ ID NO: 2005040 - DNA, 25 bp, Homo sapien
taatcccgattgtgggctccttggg

SEQ ID NO: 2005041 - DNA, 25 bp, Homo sapien
tctgagtaaggttcactgttattga

SEQ ID NO: 2005042 - DNA, 25 bp, Homo sapien
ttgctgttactgatcatgtcggcac

SEQ ID NO: 2005043 - DNA, 25 bp, Homo sapien
gttgctgttactgatcatgtcggca

SEQ ID NO: 2005044 - DNA, 25 bp, Homo sapien
cactgttattgatcatgttgctgtt

SEQ ID NO: 2005045 - DNA, 25 bp, Homo sapien
gaagacctctagttattcttcatag

SEQ ID NO: 2005046 - DNA, 25 bp, Homo sapien
tctagttattcttcataggctgttg

SEQ ID NO: 2005047 - DNA, 25 bp, Homo sapien
gttattcttcataggctgttgtggg

SEQ ID NO: 2005048 - DNA, 25 bp, Homo sapien
tctgatatgaagacctctagttatt

SEQ ID NO: 2005049 - DNA, 25 bp, Homo sapien
gactggtcatgtacacacactttca

SEQ ID NO: 2005050 - DNA, 25 bp, Homo sapien
ccttaatgcttctaggttccatgca

SEQ ID NO: 2005051 - DNA, 25 bp, Homo sapien
tttgggcttgttctataggacatcg

SEQ ID NO: 2005052 - DNA, 25 bp, Homo sapien
catttacatgcttcccatatgcccg

SEQ ID NO: 2005053 - DNA, 25 bp, Homo sapien
cagccacgttggaaagtaagcttgc

SEQ ID NO: 2005054 - DNA, 25 bp, Homo sapien
gaatgtgaaacgatgcagccacgtt

SEQ ID NO: 2005055 - DNA, 25 bp, Homo sapien
aacgatgcagccacgttggaaagta

SEQ ID NO: 2005056 - DNA, 25 bp, Homo sapien
cacgttggaaagtaagcttgcagta

SEQ ID NO: 2005057 - DNA, 25 bp, Homo sapien
ctttcaggaaacctacagggagatt

SEQ ID NO: 2005058 - DNA, 25 bp, Homo sapien
aactcaaaatggatattcaacttaa

SEQ ID NO: 2005059 - DNA, 25 bp, Homo sapien
agtgattaacaagatcctctcgatc

SEQ ID NO: 2005060 - DNA, 25 bp, Homo sapien
gagaacataggagtaatccttcctg

SEQ ID NO: 2005061 - DNA, 25 bp, Homo sapien
cataggtgaagccagtgatgttgtc

SEQ ID NO: 2005062 - DNA, 25 bp, Homo sapien
gatgatctgttgaagttggctgcct

SEQ ID NO: 2005063 - DNA, 25 bp, Homo sapien
cataattgaagaggactaggaacag

SEQ ID NO: 2005064 - DNA, 25 bp, Homo sapien
tgtcctgaggactgattgctatgcc

SEQ ID NO: 2005065 - DNA, 25 bp, Homo sapien
cacttccacgataatagcattgatc

SEQ ID NO: 2005066 - DNA, 25 bp, Homo sapien
cttttgtaaggaacctactcctgca

SEQ ID NO: 2005067 - DNA, 25 bp, Homo sapien
caagcccacttccacgataatagca

SEQ ID NO: 2005068 - DNA, 25 bp, Homo sapien
gaacctactcctgcaataacaagcc

SEQ ID NO: 2005069 - DNA, 25 bp, Homo sapien
cctgtgttgcataatcctgggttgg

SEQ ID NO: 2005070 - DNA, 25 bp, Homo sapien
tagtacttctaatttgggttgagga

SEQ ID NO: 2005071 - DNA, 25 bp, Homo sapien
cagcaatgtcacacttgtttagtac

SEQ ID NO: 2005072 - DNA, 25 bp, Homo sapien
aggactcagctgtatatttaacatg

SEQ ID NO: 2005073 - DNA, 25 bp, Homo sapien
gacaggccatcactctttgtgttcc

SEQ ID NO: 2005074 - DNA, 25 bp, Homo sapien
acaggccatcactctttgtgttcct

SEQ ID NO: 2005075 - DNA, 25 bp, Homo sapien
ctctttgtgttcctcttgaggtatg

SEQ ID NO: 2005076 - DNA, 25 bp, Homo sapien
cactctttgtgttcctcttgaggta

SEQ ID NO: 2005077 - DNA, 25 bp, Homo sapien
gcaggttaggagaggctaggctgag

SEQ ID NO: 2005078 - DNA, 25 bp, Homo sapien
gagaggctaggctgagagactcacc

SEQ ID NO: 2005079 - DNA, 25 bp, Homo sapien
ggttaggagaggctaggctgagaga

SEQ ID NO: 2005080 - DNA, 25 bp, Homo sapien
ctttttgagcaggttaggagaggct

SEQ ID NO: 2005081 - DNA, 25 bp, Homo sapien
tgatatcatttgtagccacggtgga

SEQ ID NO: 2005082 - DNA, 25 bp, Homo sapien
tagtataccccaattgcctgctgga

SEQ ID NO: 2005083 - DNA, 25 bp, Homo sapien
aaagcagatgcacgcctcattgtga

SEQ ID NO: 2005084 - DNA, 25 bp, Homo sapien
gctttgcgtttctgttggttgattc

SEQ ID NO: 2005085 - DNA, 25 bp, Homo sapien
catgaagatgtggtctgaatatccc

SEQ ID NO: 2005086 - DNA, 25 bp, Homo sapien
caaagtgtgaagacagtgcttgggc

SEQ ID NO: 2005087 - DNA, 25 bp, Homo sapien
tttgacagcctcatccaagaagaag

SEQ ID NO: 2005088 - DNA, 25 bp, Homo sapien
tccatggctagaagtgatgctatcc

SEQ ID NO: 2005089 - DNA, 25 bp, Homo sapien
actgagctcacaattattgcttttt

SEQ ID NO: 2005090 - DNA, 25 bp, Homo sapien
tgggtccttcccttaataattagca

SEQ ID NO: 2005091 - DNA, 25 bp, Homo sapien
cactgagctcacaattattgctttt

SEQ ID NO: 2005092 - DNA, 25 bp, Homo sapien
cctaccagcacattgcctgtgacag

SEQ ID NO: 2005093 - DNA, 25 bp, Homo sapien
aaggctccaggaactctgtgttgta

SEQ ID NO: 2005094 - DNA, 25 bp, Homo sapien
ttccatttcctagctcctcaaaggc

SEQ ID NO: 2005095 - DNA, 25 bp, Homo sapien
tcctgcagtgcctaccagcacattg

SEQ ID NO: 2005096 - DNA, 25 bp, Homo sapien
taatattccctgtgtccttccttga

SEQ ID NO: 2005097 - DNA, 25 bp, Homo sapien
tgtccttccttgagtccaaattcta

SEQ ID NO: 2005098 - DNA, 25 bp, Homo sapien
tattccctgtgtccttccttgagtc

SEQ ID NO: 2005099 - DNA, 25 bp, Homo sapien
ttccttgagtccaaattctacccat

SEQ ID NO: 2005100 - DNA, 25 bp, Homo sapien
tattgcgagatgtcaatgagctatg

SEQ ID NO: 2005101 - DNA, 25 bp, Homo sapien
ctatgacatgtctcagagtgctcca

SEQ ID NO: 2005102 - DNA, 25 bp, Homo sapien
gggaaggccgatccatctctcagct

SEQ ID NO: 2005103 - DNA, 25 bp, Homo sapien
ctctctggtcaggttaatgtcttca

SEQ ID NO: 2005104 - DNA, 25 bp, Homo sapien
tataactctaccaggtggcaaaagg

SEQ ID NO: 2005105 - DNA, 25 bp, Homo sapien
taatcagagtatcgatttataactc

SEQ ID NO: 2005106 - DNA, 25 bp, Homo sapien
gagtatcgatttataactctaccag

SEQ ID NO: 2005107 - DNA, 25 bp, Homo sapien
gatttataactctaccaggtggcaa

SEQ ID NO: 2005108 - DNA, 25 bp, Homo sapien
ttgaccaccccatcttgtaactttc

SEQ ID NO: 2005109 - DNA, 25 bp, Homo sapien
gatacccattggtggaagtgcaggc

SEQ ID NO: 2005110 - DNA, 25 bp, Homo sapien
cttgaccaccccatcttgtaacttt

SEQ ID NO: 2005111 - DNA, 25 bp, Homo sapien
tgtatgcatccttggggatacccat

SEQ ID NO: 2005112 - DNA, 25 bp, Homo sapien
agattccaatgctgtagaagcactg

SEQ ID NO: 2005113 - DNA, 25 bp, Homo sapien
gaagcactggcatctttgagggtcc

SEQ ID NO: 2005114 - DNA, 25 bp, Homo sapien
agcactggcatctttgagggtccaa

SEQ ID NO: 2005115 - DNA, 25 bp, Homo sapien
tgtagaagcactggcatctttgagg

SEQ ID NO: 2005116 - DNA, 25 bp, Homo sapien
ctgtgtagtgtttctatgtgcaaga

SEQ ID NO: 2005117 - DNA, 25 bp, Homo sapien
aacatacagctgaagtgctgtgtag

SEQ ID NO: 2005118 - DNA, 25 bp, Homo sapien
tcaaataaggtgacactcccccttc

SEQ ID NO: 2005119 - DNA, 25 bp, Homo sapien
gcaaacatgtgtcctttacatggtc

SEQ ID NO: 2005120 - DNA, 25 bp, Homo sapien
cttgaaggcagcaatgagtttccca

SEQ ID NO: 2005121 - DNA, 25 bp, Homo sapien
tgacggctaaaaaggacccctctgc

SEQ ID NO: 2005122 - DNA, 25 bp, Homo sapien
tcccaatgggcgtgaccatagccag

SEQ ID NO: 2005123 - DNA, 25 bp, Homo sapien
ccgcctgagtgttgctggaatacca

SEQ ID NO: 2005124 - DNA, 25 bp, Homo sapien
tccagcacagagaagccatagactt

SEQ ID NO: 2005125 - DNA, 25 bp, Homo sapien
tgaagacgtaggaacaactggatcc

SEQ ID NO: 2005126 - DNA, 25 bp, Homo sapien
ctctccttcggactttgagtgtcat

SEQ ID NO: 2005127 - DNA, 25 bp, Homo sapien
tcattaagttgggtaaggagaggca

SEQ ID NO: 2005128 - DNA, 25 bp, Homo sapien
caacttggcaagaggctggcaagaa

SEQ ID NO: 2005129 - DNA, 25 bp, Homo sapien
gagcaacttggcaagaggctggcaa

SEQ ID NO: 2005130 - DNA, 25 bp, Homo sapien
ttggagagggctgagcaacttggca

SEQ ID NO: 2005131 - DNA, 25 bp, Homo sapien
agggctgagcaacttggcaagaggc

SEQ ID NO: 2005132 - DNA, 25 bp, Homo sapien
tttggtcttgaccacagcatcagaa

SEQ ID NO: 2005133 - DNA, 25 bp, Homo sapien
tctgctttggtcttgaccacagcat

SEQ ID NO: 2005134 - DNA, 25 bp, Homo sapien
cagcatcagaaatgatttgatgcat

SEQ ID NO: 2005135 - DNA, 25 bp, Homo sapien
gctttggtcttgaccacagcatcag

SEQ ID NO: 2005136 - DNA, 25 bp, Homo sapien
cttgcggagcttcctagagtggctg

SEQ ID NO: 2005137 - DNA, 25 bp, Homo sapien
taatggtgccacatgcgtcaatggg

SEQ ID NO: 2005138 - DNA, 25 bp, Homo sapien
caacaataaggcaccccagactgtg

SEQ ID NO: 2005139 - DNA, 25 bp, Homo sapien
gggagcctttcacgccagctttcag

SEQ ID NO: 2005140 - DNA, 25 bp, Homo sapien
tgaatggagtcgagtggagatgttc

SEQ ID NO: 2005141 - DNA, 25 bp, Homo sapien
aatggagtcgagtggagatgttccc

SEQ ID NO: 2005142 - DNA, 25 bp, Homo sapien
tggagtcgagtggagatgttcccac

SEQ ID NO: 2005143 - DNA, 25 bp, Homo sapien
ctaagctgagtgaatggagtcgagt

SEQ ID NO: 2005144 - DNA, 25 bp, Homo sapien
gatgccattcccagaataatgctat

SEQ ID NO: 2005145 - DNA, 25 bp, Homo sapien
tatgaggaagcaggttctttgtact

SEQ ID NO: 2005146 - DNA, 25 bp, Homo sapien
tagaacagcttagaccttgaagaaa

SEQ ID NO: 2005147 - DNA, 25 bp, Homo sapien
ttctttgtactaggaggagtggaag

SEQ ID NO: 2005148 - DNA, 25 bp, Homo sapien
tcagctcagagtagatgggatatag

SEQ ID NO: 2005149 - DNA, 25 bp, Homo sapien
gggatatagccacgttacagagggc

SEQ ID NO: 2005150 - DNA, 25 bp, Homo sapien
tacagagggctttgaactcgattcc

SEQ ID NO: 2005151 - DNA, 25 bp, Homo sapien
catggataacatgtcatctattgag

SEQ ID NO: 2005152 - DNA, 25 bp, Homo sapien
ctcctctcggagaaactctccccgt

SEQ ID NO: 2005153 - DNA, 25 bp, Homo sapien
tcctctcggagaaactctccccgtc

SEQ ID NO: 2005154 - DNA, 25 bp, Homo sapien
cgtcttctcctttctattgtcccct

SEQ ID NO: 2005155 - DNA, 25 bp, Homo sapien
tcttctcctttctattgtcccctga

SEQ ID NO: 2005156 - DNA, 25 bp, Homo sapien
tcacttctgacctgaaacaatggga

SEQ ID NO: 2005157 - DNA, 25 bp, Homo sapien
ttcacttctgacctgaaacaatggg

SEQ ID NO: 2005158 - DNA, 25 bp, Homo sapien
gttcacttctgacctgaaacaatgg

SEQ ID NO: 2005159 - DNA, 25 bp, Homo sapien
tgttcacttctgacctgaaacaatg

SEQ ID NO: 2005160 - DNA, 25 bp, Homo sapien
tttcacaaatttctccgaccaggga

SEQ ID NO: 2005161 - DNA, 25 bp, Homo sapien
aaatcctgggtctgatgacttgcca

SEQ ID NO: 2005162 - DNA, 25 bp, Homo sapien
catattacctttgatgtgccataca

SEQ ID NO: 2005163 - DNA, 25 bp, Homo sapien
agggaacactttttcacagagcatc

SEQ ID NO: 2005164 - DNA, 25 bp, Homo sapien
tgaatttctaccaacaaagatgcct

SEQ ID NO: 2005165 - DNA, 25 bp, Homo sapien
tctcacagacaacaaggatttattg

SEQ ID NO: 2005166 - DNA, 25 bp, Homo sapien
cacaggagttcatgggtacgatgcc

SEQ ID NO: 2005167 - DNA, 25 bp, Homo sapien
caaattatggattgcaaaaccaaag

SEQ ID NO: 2005168 - DNA, 25 bp, Homo sapien
tggctctctcacttcttacgttggg

SEQ ID NO: 2005169 - DNA, 25 bp, Homo sapien
agagtgtggactcttgaattggact

SEQ ID NO: 2005170 - DNA, 25 bp, Homo sapien
aattggactgctgggttgtgaatcc

SEQ ID NO: 2005171 - DNA, 25 bp, Homo sapien
ggtaatcaccgtttttatgtctctg

SEQ ID NO: 2005172 - DNA, 25 bp, Homo sapien
tcaatggctacattgccagccatca

SEQ ID NO: 2005173 - DNA, 25 bp, Homo sapien
ttctcaatggctacattgccagcca

SEQ ID NO: 2005174 - DNA, 25 bp, Homo sapien
tctcaatggctacattgccagccat

SEQ ID NO: 2005175 - DNA, 25 bp, Homo sapien
caatggctacattgccagccatcat

SEQ ID NO: 2005176 - DNA, 25 bp, Homo sapien
ctgagctggctctctgatacctccc

SEQ ID NO: 2005177 - DNA, 25 bp, Homo sapien
ccctcttttatacctgaccccactg

SEQ ID NO: 2005178 - DNA, 25 bp, Homo sapien
gagctggctctctgatacctcccat

SEQ ID NO: 2005179 - DNA, 25 bp, Homo sapien
tcttttatacctgaccccactgagc

SEQ ID NO: 2005180 - DNA, 25 bp, Homo sapien
gccctatgtcccagctattgcataa

SEQ ID NO: 2005181 - DNA, 25 bp, Homo sapien
caccaggatgggcattgtcttcagg

SEQ ID NO: 2005182 - DNA, 25 bp, Homo sapien
ccatggagtttttgcagaggtgaac

SEQ ID NO: 2005183 - DNA, 25 bp, Homo sapien
tgtgcactcatcaagccatagcctt

SEQ ID NO: 2005184 - DNA, 25 bp, Homo sapien
acatgcccagtgtgctcttgcctca

SEQ ID NO: 2005185 - DNA, 25 bp, Homo sapien
gatcttccaccacacgtccacgtgg

SEQ ID NO: 2005186 - DNA, 25 bp, Homo sapien
cttgaacatgcccagtgtgctcttg

SEQ ID NO: 2005187 - DNA, 25 bp, Homo sapien
aaacgatcttccaccacacgtccac

SEQ ID NO: 2005188 - DNA, 25 bp, Homo sapien
gtctcaagattgctggaagtcctag

SEQ ID NO: 2005189 - DNA, 25 bp, Homo sapien
tatattgatgctttccacttgggca

SEQ ID NO: 2005190 - DNA, 25 bp, Homo sapien
tgcaggtatcccatagcacccgatg

SEQ ID NO: 2005191 - DNA, 25 bp, Homo sapien
tgttggagtacctgtgagcaccctt

SEQ ID NO: 2005192 - DNA, 25 bp, Homo sapien
cttggagtaactctgacaaactaca

SEQ ID NO: 2005193 - DNA, 25 bp, Homo sapien
tctgacaaactacacctttagcggc

SEQ ID NO: 2005194 - DNA, 25 bp, Homo sapien
gagtaactctgacaaactacacctt

SEQ ID NO: 2005195 - DNA, 25 bp, Homo sapien
gacaaactacacctttagcggccag

SEQ ID NO: 2005196 - DNA, 25 bp, Homo sapien
ttcccctacagatggaagatcaagg

SEQ ID NO: 2005197 - DNA, 25 bp, Homo sapien
ccctacagatggaagatcaaggcca

SEQ ID NO: 2005198 - DNA, 25 bp, Homo sapien
tacagatggaagatcaaggccaagg

SEQ ID NO: 2005199 - DNA, 25 bp, Homo sapien
gatcttcccctacagatggaagatc

SEQ ID NO: 2005200 - DNA, 25 bp, Homo sapien
gatttcacagttgatcatctgcatg

SEQ ID NO: 2005201 - DNA, 25 bp, Homo sapien
tttcacaaagttgcacacagatttc

SEQ ID NO: 2005202 - DNA, 25 bp, Homo sapien
gaatagttacgtccaaaagccctgc

SEQ ID NO: 2005203 - DNA, 25 bp, Homo sapien
gccctgccgttgattctaaatttga

SEQ ID NO: 2005204 - DNA, 25 bp, Homo sapien
tttcttctttctccttctgcttccc

SEQ ID NO: 2005205 - DNA, 25 bp, Homo sapien
cttcacaaggcagaaaatacttcct

SEQ ID NO: 2005206 - DNA, 25 bp, Homo sapien
ttctttctccttctgcttccctcat

SEQ ID NO: 2005207 - DNA, 25 bp, Homo sapien
tcttctttctccttctgcttccctc

SEQ ID NO: 2005208 - DNA, 25 bp, Homo sapien
gccttattgttatctggtaagtcat

SEQ ID NO: 2005209 - DNA, 25 bp, Homo sapien
gcgtccttccggattatcttctaca

SEQ ID NO: 2005210 - DNA, 25 bp, Homo sapien
ggattatcttctacactatgcctta

SEQ ID NO: 2005211 - DNA, 25 bp, Homo sapien
gagaagtactgcgtccttccggatt

SEQ ID NO: 2005212 - DNA, 25 bp, Homo sapien
cctctaggttctggagacggagctc

SEQ ID NO: 2005213 - DNA, 25 bp, Homo sapien
gggatgtcacccaacaacgagattt

SEQ ID NO: 2005214 - DNA, 25 bp, Homo sapien
tcttggaagctgaagtgattgccgc

SEQ ID NO: 2005215 - DNA, 25 bp, Homo sapien
gccgctgtccgtgaagtaatcctcc

SEQ ID NO: 2005216 - DNA, 25 bp, Homo sapien
aacaaatcatgcgtttatgcaccag

SEQ ID NO: 2005217 - DNA, 25 bp, Homo sapien
tttcctttagagcaacggctctctg

SEQ ID NO: 2005218 - DNA, 25 bp, Homo sapien
tcagccgcctcaagattccaggcaa

SEQ ID NO: 2005219 - DNA, 25 bp, Homo sapien
caaagcatcgtgtggcattgaggaa

SEQ ID NO: 2005220 - DNA, 25 bp, Homo sapien
atcaagcaggttggcgatggtgatc

SEQ ID NO: 2005221 - DNA, 25 bp, Homo sapien
gcaggttggcgatggtgatctcctt

SEQ ID NO: 2005222 - DNA, 25 bp, Homo sapien
ggttggcgatggtgatctccttcat

SEQ ID NO: 2005223 - DNA, 25 bp, Homo sapien
catcaagcaggttggcgatggtgat

SEQ ID NO: 2005224 - DNA, 25 bp, Homo sapien
acatagagcagcttcgagacgagcc

SEQ ID NO: 2005225 - DNA, 25 bp, Homo sapien
aaagaacctgattaatgacagcacc

SEQ ID NO: 2005226 - DNA, 25 bp, Homo sapien
tggagtcaccaagctgaaaagaacc

SEQ ID NO: 2005227 - DNA, 25 bp, Homo sapien
gacagcacctgagataagtggcact

SEQ ID NO: 2005228 - DNA, 25 bp, Homo sapien
aaacagctcccttaatggcctctta

SEQ ID NO: 2005229 - DNA, 25 bp, Homo sapien
gaaacagctcccttaatggcctctt

SEQ ID NO: 2005230 - DNA, 25 bp, Homo sapien
aacagctcccttaatggcctcttac

SEQ ID NO: 2005231 - DNA, 25 bp, Homo sapien
agagagtgggggcaatgaaggtgat

SEQ ID NO: 2005232 - DNA, 25 bp, Homo sapien
atgaaggtgatggaggaaaatgtct

SEQ ID NO: 2005233 - DNA, 25 bp, Homo sapien
tgatggaggaaaatgtctctcttct

SEQ ID NO: 2005234 - DNA, 25 bp, Homo sapien
gaaggtgatggaggaaaatgtctct

SEQ ID NO: 2005235 - DNA, 25 bp, Homo sapien
tgttgaaattcagtaatgggttaaa

SEQ ID NO: 2005236 - DNA, 25 bp, Homo sapien
accagctgcactggtttgttgaaat

SEQ ID NO: 2005237 - DNA, 25 bp, Homo sapien
tccagctctgttgaagcaccagctg

SEQ ID NO: 2005238 - DNA, 25 bp, Homo sapien
gtgatgagacaacagcttgtgctgc

SEQ ID NO: 2005239 - DNA, 25 bp, Homo sapien
catcaactgggagagtgaagcagga

SEQ ID NO: 2005240 - DNA, 25 bp, Homo sapien
aactgggagagtgaagcaggagagg

SEQ ID NO: 2005241 - DNA, 25 bp, Homo sapien
gggagagtgaagcaggagagggcat

SEQ ID NO: 2005242 - DNA, 25 bp, Homo sapien
ctgggagagtgaagcaggagagggc

SEQ ID NO: 2005243 - DNA, 25 bp, Homo sapien
gcaaacaaaactggcagagtggaaa

SEQ ID NO: 2005244 - DNA, 25 bp, Homo sapien
ccacccctagtgccagacatgcaaa

SEQ ID NO: 2005245 - DNA, 25 bp, Homo sapien
gccacccctagtgccagacatgcaa

SEQ ID NO: 2005246 - DNA, 25 bp, Homo sapien
tgcaaacaaaactggcagagtggaa

SEQ ID NO: 2005247 - DNA, 25 bp, Homo sapien
tggcattcggtagcacgttggagtc

SEQ ID NO: 2005248 - DNA, 25 bp, Homo sapien
tggagtcagactggtccaccttcct

SEQ ID NO: 2005249 - DNA, 25 bp, Homo sapien
ctgccagttggcattcggtagcacg

SEQ ID NO: 2005250 - DNA, 25 bp, Homo sapien
tcggtagcacgttggagtcagactg

SEQ ID NO: 2005251 - DNA, 25 bp, Homo sapien
gaagattccaagattgtgggaatga

SEQ ID NO: 2005252 - DNA, 25 bp, Homo sapien
aactgtgggtgccaatctggtgccc

SEQ ID NO: 2005253 - DNA, 25 bp, Homo sapien
tctggctgttgttgacggtttgaag

SEQ ID NO: 2005254 - DNA, 25 bp, Homo sapien
tattcaagccactctgagaagattc

SEQ ID NO: 2005255 - DNA, 25 bp, Homo sapien
gacaaagcctccacttaatgacgta

SEQ ID NO: 2005256 - DNA, 25 bp, Homo sapien
aaagcctccacttaatgacgtactg

SEQ ID NO: 2005257 - DNA, 25 bp, Homo sapien
caaagcctccacttaatgacgtact

SEQ ID NO: 2005258 - DNA, 25 bp, Homo sapien
acaaagcctccacttaatgacgtac

SEQ ID NO: 2005259 - DNA, 25 bp, Homo sapien
aagttcaccactccaccgggcagtt

SEQ ID NO: 2005260 - DNA, 25 bp, Homo sapien
tgtgagcatgggaccgctctttcca

SEQ ID NO: 2005261 - DNA, 25 bp, Homo sapien
ccgggcagttgtgagcatgggaccg

SEQ ID NO: 2005262 - DNA, 25 bp, Homo sapien
tgggaccgctctttccattcacttg

SEQ ID NO: 2005263 - DNA, 25 bp, Homo sapien
agcaacatgaccctgaaattgggat

SEQ ID NO: 2005264 - DNA, 25 bp, Homo sapien
ctaagcaacatgaccctgaaattgg

SEQ ID NO: 2005265 - DNA, 25 bp, Homo sapien
catgaccctgaaattgggataaaaa

SEQ ID NO: 2005266 - DNA, 25 bp, Homo sapien
caacatgaccctgaaattgggataa

SEQ ID NO: 2005267 - DNA, 25 bp, Homo sapien
ggaaaatcaattgctcggtgctgac

SEQ ID NO: 2005268 - DNA, 25 bp, Homo sapien
gtgtaataaacatctccaggagagg

SEQ ID NO: 2005269 - DNA, 25 bp, Homo sapien
atgggcaaaagcacgaaggagatga

SEQ ID NO: 2005270 - DNA, 25 bp, Homo sapien
ttgattcagagaaaggactgcactc

SEQ ID NO: 2005271 - DNA, 25 bp, Homo sapien
tatgtagactagaaacatccttatg

SEQ ID NO: 2005272 - DNA, 25 bp, Homo sapien
cagtattgttcaccatatgtagact

SEQ ID NO: 2005273 - DNA, 25 bp, Homo sapien
ctaggaaatgcattgagggtagaat

SEQ ID NO: 2005274 - DNA, 25 bp, Homo sapien
ggtagaatgcatgaacagtattgtt

SEQ ID NO: 2005275 - DNA, 25 bp, Homo sapien
ctatgggatacatggagcacagaca

SEQ ID NO: 2005276 - DNA, 25 bp, Homo sapien
atacatggagcacagacaaaggagg

SEQ ID NO: 2005277 - DNA, 25 bp, Homo sapien
atgggatacatggagcacagacaaa

SEQ ID NO: 2005278 - DNA, 25 bp, Homo sapien
acatggagcacagacaaaggaggtg

SEQ ID NO: 2005279 - DNA, 25 bp, Homo sapien
ctgctctagtgtgtcctgatgattt

SEQ ID NO: 2005280 - DNA, 25 bp, Homo sapien
tgtcctgatgatttataggtgtgat

SEQ ID NO: 2005281 - DNA, 25 bp, Homo sapien
ggtttgttgcacgtttcctctatca

SEQ ID NO: 2005282 - DNA, 25 bp, Homo sapien
tttggtttgttgcacgtttcctcta

SEQ ID NO: 2005283 - DNA, 25 bp, Homo sapien
acacaaggctggacgtgggcttgca

SEQ ID NO: 2005284 - DNA, 25 bp, Homo sapien
tggcatgatctaaggtttttgcact

SEQ ID NO: 2005285 - DNA, 25 bp, Homo sapien
ctggagcccccgtctgaatgagaga

SEQ ID NO: 2005286 - DNA, 25 bp, Homo sapien
atgagagaggctcccacatatgatg

SEQ ID NO: 2005287 - DNA, 25 bp, Homo sapien
aaggaaagccacttacaagagatag

SEQ ID NO: 2005288 - DNA, 25 bp, Homo sapien
agattaccacaagggcagttgcaca

SEQ ID NO: 2005289 - DNA, 25 bp, Homo sapien
gaagctggcctttgtcaaccatgcg

SEQ ID NO: 2005290 - DNA, 25 bp, Homo sapien
cacttacaagagataggaacggaaa

SEQ ID NO: 2005291 - DNA, 25 bp, Homo sapien
caggtgcggtgcttgtcaggattcc

SEQ ID NO: 2005292 - DNA, 25 bp, Homo sapien
gctacggcattcacttccaggctca

SEQ ID NO: 2005293 - DNA, 25 bp, Homo sapien
tgtcagcaaactccatgtaggtgtc

SEQ ID NO: 2005294 - DNA, 25 bp, Homo sapien
ggctgtaatgtcctccgctacggca

SEQ ID NO: 2005295 - DNA, 25 bp, Homo sapien
tctgttacccatgagcgcaactcag

SEQ ID NO: 2005296 - DNA, 25 bp, Homo sapien
tgttacccatgagcgcaactcagca

SEQ ID NO: 2005297 - DNA, 25 bp, Homo sapien
aactcagcaattgctgactgtaaca

SEQ ID NO: 2005298 - DNA, 25 bp, Homo sapien
cccatgagcgcaactcagcaattgc

SEQ ID NO: 2005299 - DNA, 25 bp, Homo sapien
ccatgcacaattggtgttcccttcc

SEQ ID NO: 2005300 - DNA, 25 bp, Homo sapien
aaaagtttgccagataatgttctga

SEQ ID NO: 2005301 - DNA, 25 bp, Homo sapien
ttttccccatgcacaattggtgttc

SEQ ID NO: 2005302 - DNA, 25 bp, Homo sapien
tgttctgacatcttgatgtgactgt

SEQ ID NO: 2005303 - DNA, 25 bp, Homo sapien
caacaacaattgtcacagttattca

SEQ ID NO: 2005304 - DNA, 25 bp, Homo sapien
taaaatattgatatccaactgcagt

SEQ ID NO: 2005305 - DNA, 25 bp, Homo sapien
catccaccagatgaagtcccggttg

SEQ ID NO: 2005306 - DNA, 25 bp, Homo sapien
ccaactgcagtctcaatgttgctgg

SEQ ID NO: 2005307 - DNA, 25 bp, Homo sapien
tgtgacatgtgtaaccagagtgcat

SEQ ID NO: 2005308 - DNA, 25 bp, Homo sapien
cagaaagtgccactgctgttagcat

SEQ ID NO: 2005309 - DNA, 25 bp, Homo sapien
tgttaagatgaggtgtcctgagact

SEQ ID NO: 2005310 - DNA, 25 bp, Homo sapien
gagactttgtttccacaccacggga

SEQ ID NO: 2005311 - DNA, 25 bp, Homo sapien
ttgagcccttgggtcctagaacttc

SEQ ID NO: 2005312 - DNA, 25 bp, Homo sapien
tgagcccttgggtcctagaacttcc

SEQ ID NO: 2005313 - DNA, 25 bp, Homo sapien
tcaccagagtgcaagtgagtatcct

SEQ ID NO: 2005314 - DNA, 25 bp, Homo sapien
aggtgggaaatcgaggcttagttca

SEQ ID NO: 2005315 - DNA, 25 bp, Homo sapien
ggcaggcatggagtccagtagctac

SEQ ID NO: 2005316 - DNA, 25 bp, Homo sapien
tagctacatcatagtcgggtaatgg

SEQ ID NO: 2005317 - DNA, 25 bp, Homo sapien
tgcattgactcacttctctcccaag

SEQ ID NO: 2005318 - DNA, 25 bp, Homo sapien
gagagtcaccatcttgcattgactc

SEQ ID NO: 2005319 - DNA, 25 bp, Homo sapien
tggtttggggtcttatcctctccca

SEQ ID NO: 2005320 - DNA, 25 bp, Homo sapien
ccaggaagatctgacggagagtcac

SEQ ID NO: 2005321 - DNA, 25 bp, Homo sapien
cacagagccctgattttacagtggc

SEQ ID NO: 2005322 - DNA, 25 bp, Homo sapien
gatagagggtttttacacagagccc

SEQ ID NO: 2005323 - DNA, 25 bp, Homo sapien
tccccgaactagtgccatcgaggct

SEQ ID NO: 2005324 - DNA, 25 bp, Homo sapien
tacagtggcttctaactttgcagtc

SEQ ID NO: 2005325 - DNA, 25 bp, Homo sapien
tctgtttacagaagcacctgtcccc

SEQ ID NO: 2005326 - DNA, 25 bp, Homo sapien
tgtttacagaagcacctgtccccag

SEQ ID NO: 2005327 - DNA, 25 bp, Homo sapien
gtatctcgggtcttggctctgttct

SEQ ID NO: 2005328 - DNA, 25 bp, Homo sapien
ggaaccacagccagtatctcgggtc

SEQ ID NO: 2005329 - DNA, 25 bp, Homo sapien
cagggggatgccacaagaagtcaga

SEQ ID NO: 2005330 - DNA, 25 bp, Homo sapien
ctgcagggggatgccacaagaagtc

SEQ ID NO: 2005331 - DNA, 25 bp, Homo sapien
cacaagaagtcagagaaggcacttc

SEQ ID NO: 2005332 - DNA, 25 bp, Homo sapien
gatgccacaagaagtcagagaaggc

SEQ ID NO: 2005333 - DNA, 25 bp, Homo sapien
gaactgacagcagacctattgaagg

SEQ ID NO: 2005334 - DNA, 25 bp, Homo sapien
ggaactgacagcagacctattgaag

SEQ ID NO: 2005335 - DNA, 25 bp, Homo sapien
tgggaactgacagcagacctattga

SEQ ID NO: 2005336 - DNA, 25 bp, Homo sapien
aactgacagcagacctattgaaggc

SEQ ID NO: 2005337 - DNA, 25 bp, Homo sapien
tgagatgcccgacttcactaaccat

SEQ ID NO: 2005338 - DNA, 25 bp, Homo sapien
aatggctgagatgcccgacttcact

SEQ ID NO: 2005339 - DNA, 25 bp, Homo sapien
ggctgagatgcccgacttcactaac

SEQ ID NO: 2005340 - DNA, 25 bp, Homo sapien
gaatggctgagatgcccgacttcac

SEQ ID NO: 2005341 - DNA, 25 bp, Homo sapien
catggctttagtcagcctggatttg

SEQ ID NO: 2005342 - DNA, 25 bp, Homo sapien
cagcagaaacctgtaaggtatttaa

SEQ ID NO: 2005343 - DNA, 25 bp, Homo sapien
aagcttcaaatcttacagcagaaac

SEQ ID NO: 2005344 - DNA, 25 bp, Homo sapien
gaaaatctggccattgatttctgcc

SEQ ID NO: 2005345 - DNA, 25 bp, Homo sapien
ccatatacctggagacaagtaaggc

SEQ ID NO: 2005346 - DNA, 25 bp, Homo sapien
gacaagtaaggcacggatggctgca

SEQ ID NO: 2005347 - DNA, 25 bp, Homo sapien
actcacagtcttgttccttcctctg

SEQ ID NO: 2005348 - DNA, 25 bp, Homo sapien
gatggctgcacgggcctgtcttctt

SEQ ID NO: 2005349 - DNA, 25 bp, Homo sapien
taagacaacattgttcttggcagta

SEQ ID NO: 2005350 - DNA, 25 bp, Homo sapien
ctgtaagacaacattgttcttggca

SEQ ID NO: 2005351 - DNA, 25 bp, Homo sapien
agacaacattgttcttggcagtagt

SEQ ID NO: 2005352 - DNA, 25 bp, Homo sapien
tgtaagacaacattgttcttggcag

SEQ ID NO: 2005353 - DNA, 25 bp, Homo sapien
ctcttacattgataactaccctatg

SEQ ID NO: 2005354 - DNA, 25 bp, Homo sapien
gaacttccgattgtgggctttgcag

SEQ ID NO: 2005355 - DNA, 25 bp, Homo sapien
ctgccgctctgaacttccgattgtg

SEQ ID NO: 2005356 - DNA, 25 bp, Homo sapien
tacattgataactaccctatgctgc

SEQ ID NO: 2005357 - DNA, 25 bp, Homo sapien
gaacaccaagtatctccatggccaa

SEQ ID NO: 2005358 - DNA, 25 bp, Homo sapien
gacaacactggctgtgaacaagaac

SEQ ID NO: 2005359 - DNA, 25 bp, Homo sapien
tcagtgacccatgattgaagggacc

SEQ ID NO: 2005360 - DNA, 25 bp, Homo sapien
tgaagagttccacgtcccaggtgca

SEQ ID NO: 2005361 - DNA, 25 bp, Homo sapien
aaatcactaagaatcactccattcc

SEQ ID NO: 2005362 - DNA, 25 bp, Homo sapien
taaatcactaagaatcactccattc

SEQ ID NO: 2005363 - DNA, 25 bp, Homo sapien
caataagtctagttcaatcactctt

SEQ ID NO: 2005364 - DNA, 25 bp, Homo sapien
aataagtctagttcaatcactcttt

SEQ ID NO: 2005365 - DNA, 25 bp, Homo sapien
taagtctagttcaatcactcttttt

SEQ ID NO: 2005366 - DNA, 25 bp, Homo sapien
agtctagttcaatcactcttttttt

SEQ ID NO: 2005367 - DNA, 25 bp, Homo sapien
gtggggaaaatccaccctgcgtctc

SEQ ID NO: 2005368 - DNA, 25 bp, Homo sapien
agcaggcagtagagtccagtctctg

SEQ ID NO: 2005369 - DNA, 25 bp, Homo sapien
tgaatggggatctgagtcaacagct

SEQ ID NO: 2005370 - DNA, 25 bp, Homo sapien
gctccacaatgtgaacctctggttg

SEQ ID NO: 2005371 - DNA, 25 bp, Homo sapien
tctcagtgtctgtatgccctggatg

SEQ ID NO: 2005372 - DNA, 25 bp, Homo sapien
tcagtgtctgtatgccctggatgaa

SEQ ID NO: 2005373 - DNA, 25 bp, Homo sapien
cttctcagtgtctgtatgccctgga

SEQ ID NO: 2005374 - DNA, 25 bp, Homo sapien
cagtgtctgtatgccctggatgaaa

SEQ ID NO: 2005375 - DNA, 25 bp, Homo sapien
cttgagcaagaaaattattcctttt

SEQ ID NO: 2005376 - DNA, 25 bp, Homo sapien
gccttgagcaagaaaattattcctt

SEQ ID NO: 2005377 - DNA, 25 bp, Homo sapien
tgagcaagaaaattattccttttcc

SEQ ID NO: 2005378 - DNA, 25 bp, Homo sapien
ggccttgagcaagaaaattattcct

SEQ ID NO: 2005379 - DNA, 25 bp, Homo sapien
caagtgaacgaagagctaactggcc

SEQ ID NO: 2005380 - DNA, 25 bp, Homo sapien
ggccacaggaaatcatacttgggat

SEQ ID NO: 2005381 - DNA, 25 bp, Homo sapien
ggatctgcaatcaggaactcttgag

SEQ ID NO: 2005382 - DNA, 25 bp, Homo sapien
gcctttggttttatcccagcatcaa

SEQ ID NO: 2005383 - DNA, 25 bp, Homo sapien
aatctctggttgcataaaggcctca

SEQ ID NO: 2005384 - DNA, 25 bp, Homo sapien
taatatctgtaagggataccccagc

SEQ ID NO: 2005385 - DNA, 25 bp, Homo sapien
tgaaaaatgcagtctcatatccatg

SEQ ID NO: 2005386 - DNA, 25 bp, Homo sapien
ggcctcactccaaagtaacgttcaa

SEQ ID NO: 2005387 - DNA, 25 bp, Homo sapien
gacttggctgaattaccaagttcaa

SEQ ID NO: 2005388 - DNA, 25 bp, Homo sapien
gctgaattaccaagttcaactggtg

SEQ ID NO: 2005389 - DNA, 25 bp, Homo sapien
attaccaagttcaactggtgacagg

SEQ ID NO: 2005390 - DNA, 25 bp, Homo sapien
ttggctgaattaccaagttcaactg

SEQ ID NO: 2005391 - DNA, 25 bp, Homo sapien
caggtctattacacgcacatgtaat

SEQ ID NO: 2005392 - DNA, 25 bp, Homo sapien
ctattacacgcacatgtaatatttc

SEQ ID NO: 2005393 - DNA, 25 bp, Homo sapien
tattacacgcacatgtaatatttct

SEQ ID NO: 2005394 - DNA, 25 bp, Homo sapien
aaatccaggtctattacacgcacat

SEQ ID NO: 2005395 - DNA, 25 bp, Homo sapien
acaggcagtctaaatccagcatggg

SEQ ID NO: 2005396 - DNA, 25 bp, Homo sapien
cagactagactcttggcaacaggca

SEQ ID NO: 2005397 - DNA, 25 bp, Homo sapien
tcagatgagtgaggtgcccagacta

SEQ ID NO: 2005398 - DNA, 25 bp, Homo sapien
catgactccgatgcaacgtgtggct

SEQ ID NO: 2005399 - DNA, 25 bp, Homo sapien
tattgcacccagtgctggaaatccc

SEQ ID NO: 2005400 - DNA, 25 bp, Homo sapien
catcagcctgtattggctgctagca

SEQ ID NO: 2005401 - DNA, 25 bp, Homo sapien
catagtaagtatttagttgtagata

SEQ ID NO: 2005402 - DNA, 25 bp, Homo sapien
attggctgctagcaatatgtgtcac

SEQ ID NO: 2005403 - DNA, 25 bp, Homo sapien
tagggcattgacaatagaagcaacc

SEQ ID NO: 2005404 - DNA, 25 bp, Homo sapien
atatctacgtctctccaagagctca

SEQ ID NO: 2005405 - DNA, 25 bp, Homo sapien
gaagcaacctgttcccttgttgtca

SEQ ID NO: 2005406 - DNA, 25 bp, Homo sapien
cctgcccatgctgaaaatatctacg

SEQ ID NO: 2005407 - DNA, 25 bp, Homo sapien
atttgcttccatggcttttgacagc

SEQ ID NO: 2005408 - DNA, 25 bp, Homo sapien
ctgtgcatttgcttccatggctttt

SEQ ID NO: 2005409 - DNA, 25 bp, Homo sapien
ttgcttccatggcttttgacagcat

SEQ ID NO: 2005410 - DNA, 25 bp, Homo sapien
tgcatttgcttccatggcttttgac

SEQ ID NO: 2005411 - DNA, 25 bp, Homo sapien
ttgactgagcttcctgaaccagaaa

SEQ ID NO: 2005412 - DNA, 25 bp, Homo sapien
tgctttgactgagcttcctgaacca

SEQ ID NO: 2005413 - DNA, 25 bp, Homo sapien
cagcaggattggcgggctgctttga

SEQ ID NO: 2005414 - DNA, 25 bp, Homo sapien
ctttgactgagcttcctgaaccaga

SEQ ID NO: 2005415 - DNA, 25 bp, Homo sapien
tcaagcttgggctggatagcaggtg

SEQ ID NO: 2005416 - DNA, 25 bp, Homo sapien
cctgttggcaatttcaagcttgggc

SEQ ID NO: 2005417 - DNA, 25 bp, Homo sapien
tgttggcaatttcaagcttgggctg

SEQ ID NO: 2005418 - DNA, 25 bp, Homo sapien
agcttgggctggatagcaggtggta

SEQ ID NO: 2005419 - DNA, 25 bp, Homo sapien
tgagtgagtcaagccccttaataga

SEQ ID NO: 2005420 - DNA, 25 bp, Homo sapien
agtcaagccccttaatagacgacat

SEQ ID NO: 2005421 - DNA, 25 bp, Homo sapien
gtgagtcaagccccttaatagacga

SEQ ID NO: 2005422 - DNA, 25 bp, Homo sapien
gtgagtgagtcaagccccttaatag

SEQ ID NO: 2005423 - DNA, 25 bp, Homo sapien
catgagcttcaggataagaacaggg

SEQ ID NO: 2005424 - DNA, 25 bp, Homo sapien
tactagtgatggcagcatgagcttc

SEQ ID NO: 2005425 - DNA, 25 bp, Homo sapien
caggggagatcatatatttcaggaa

SEQ ID NO: 2005426 - DNA, 25 bp, Homo sapien
caggctccaaatgtcccagttttac

SEQ ID NO: 2005427 - DNA, 25 bp, Homo sapien
ttggcattccccactgtgacttgga

SEQ ID NO: 2005428 - DNA, 25 bp, Homo sapien
tgtgacttggaatatagagaaggag

SEQ ID NO: 2005429 - DNA, 25 bp, Homo sapien
acttggaatatagagaaggaggcag

SEQ ID NO: 2005430 - DNA, 25 bp, Homo sapien
tttgccttggcattccccactgtga

SEQ ID NO: 2005431 - DNA, 25 bp, Homo sapien
tgggggaagagtgaacctgaggtct

SEQ ID NO: 2005432 - DNA, 25 bp, Homo sapien
tttcctcgcaggcatcttggttcct

SEQ ID NO: 2005433 - DNA, 25 bp, Homo sapien
aaacctcattccctcactcagtctg

SEQ ID NO: 2005434 - DNA, 25 bp, Homo sapien
ttctcaagtttctactcctctttct

SEQ ID NO: 2005435 - DNA, 25 bp, Homo sapien
ttcgccttcgaactgcagctctaaa

SEQ ID NO: 2005436 - DNA, 25 bp, Homo sapien
gccaaatacatgtaagggagtggag

SEQ ID NO: 2005437 - DNA, 25 bp, Homo sapien
gtgagagaggacaggagcgccaaga

SEQ ID NO: 2005438 - DNA, 25 bp, Homo sapien
caagaacagtaccttggtagcagcc

SEQ ID NO: 2005439 - DNA, 25 bp, Homo sapien
ttagacttctaggccaggtacttca

SEQ ID NO: 2005440 - DNA, 25 bp, Homo sapien
tcatgttgtgaatgcaacatgttcg

SEQ ID NO: 2005441 - DNA, 25 bp, Homo sapien
tactttgtgtcatgttgtgaatgca

SEQ ID NO: 2005442 - DNA, 25 bp, Homo sapien
tatactttgtgtcatgttgtgaatg

SEQ ID NO: 2005443 - DNA, 25 bp, Homo sapien
tgtgaatgcaacatgttcgacagca

SEQ ID NO: 2005444 - DNA, 25 bp, Homo sapien
tttctccattaacctcatccacttc

SEQ ID NO: 2005445 - DNA, 25 bp, Homo sapien
ttctccattaacctcatccacttct

SEQ ID NO: 2005446 - DNA, 25 bp, Homo sapien
ttttctccattaacctcatccactt

SEQ ID NO: 2005447 - DNA, 25 bp, Homo sapien
ccgtagagagtctctgacaagtctc

SEQ ID NO: 2005448 - DNA, 25 bp, Homo sapien
taagccacaatgtgagaaatcctgt

SEQ ID NO: 2005449 - DNA, 25 bp, Homo sapien
aatcctgtggccgtttcccgtagag

SEQ ID NO: 2005450 - DNA, 25 bp, Homo sapien
tgtaagccacaatgtgagaaatcct

SEQ ID NO: 2005451 - DNA, 25 bp, Homo sapien
taaagtgatcgtatggaagagagaa

SEQ ID NO: 2005452 - DNA, 25 bp, Homo sapien
aaaggataaagtgatcgtatggaag

SEQ ID NO: 2005453 - DNA, 25 bp, Homo sapien
tcaaaactccgggaactccactctg

SEQ ID NO: 2005454 - DNA, 25 bp, Homo sapien
ctggaatgtctttacaaggtgtcaa

SEQ ID NO: 2005455 - DNA, 25 bp, Homo sapien
tctataggtttttcataccctagaa

SEQ ID NO: 2005456 - DNA, 25 bp, Homo sapien
gagcagtcgtagtgcaagatgatca

SEQ ID NO: 2005457 - DNA, 25 bp, Homo sapien
ccctagaatacgtggaatgtgtgtt

SEQ ID NO: 2005458 - DNA, 25 bp, Homo sapien
ggcagaaatttggagcagtcgtagt

SEQ ID NO: 2005459 - DNA, 25 bp, Homo sapien
aagactctgaatgattctccccact

SEQ ID NO: 2005460 - DNA, 25 bp, Homo sapien
gattgaagacctagacggggtgtat

SEQ ID NO: 2005461 - DNA, 25 bp, Homo sapien
agacggggtgtatgttgaagactct

SEQ ID NO: 2005462 - DNA, 25 bp, Homo sapien
gaagactctgaatgattctccccac

SEQ ID NO: 2005463 - DNA, 25 bp, Homo sapien
tggggctctccttcatcttatgctc

SEQ ID NO: 2005464 - DNA, 25 bp, Homo sapien
ggctctccttcatcttatgctccat

SEQ ID NO: 2005465 - DNA, 25 bp, Homo sapien
gggctctccttcatcttatgctcca

SEQ ID NO: 2005466 - DNA, 25 bp, Homo sapien
cctggggctctccttcatcttatgc

SEQ ID NO: 2005467 - DNA, 25 bp, Homo sapien
tcctgatttgtcaactggctgtttc

SEQ ID NO: 2005468 - DNA, 25 bp, Homo sapien
cagttcacggcctaataatgagatc

SEQ ID NO: 2005469 - DNA, 25 bp, Homo sapien
caggaagaggtccaccctggaattc

SEQ ID NO: 2005470 - DNA, 25 bp, Homo sapien
cactgtagtgttgggtccaggaaga

SEQ ID NO: 2005471 - DNA, 25 bp, Homo sapien
tctttggtggaaatagaaagctgtg

SEQ ID NO: 2005472 - DNA, 25 bp, Homo sapien
ttctttggtggaaatagaaagctgt

SEQ ID NO: 2005473 - DNA, 25 bp, Homo sapien
cttctttggtggaaatagaaagctg

SEQ ID NO: 2005474 - DNA, 25 bp, Homo sapien
acatagagaaaatggcaagattttc

SEQ ID NO: 2005475 - DNA, 25 bp, Homo sapien
ctgacatagagaaaatggcaagatt

SEQ ID NO: 2005476 - DNA, 25 bp, Homo sapien
tagagaaaatggcaagattttcttt

SEQ ID NO: 2005477 - DNA, 25 bp, Homo sapien
gaaaatggcaagattttctttattc

SEQ ID NO: 2005478 - DNA, 25 bp, Homo sapien
acgttgtatcaagtttatggcccca

SEQ ID NO: 2005479 - DNA, 25 bp, Homo sapien
gagcatcatcgaaactgtctccgta

SEQ ID NO: 2005480 - DNA, 25 bp, Homo sapien
taccatgtgttttctgacaagagca

SEQ ID NO: 2005481 - DNA, 25 bp, Homo sapien
gaagctatctggcacatatacagtg

SEQ ID NO: 2005482 - DNA, 25 bp, Homo sapien
gagattctctccctattacttgcct

SEQ ID NO: 2005483 - DNA, 25 bp, Homo sapien
ggtgctttctaaggacagccttggg

SEQ ID NO: 2005484 - DNA, 25 bp, Homo sapien
gaagtgtgcatagtcttctatggga

SEQ ID NO: 2005485 - DNA, 25 bp, Homo sapien
ggtgacgcaagacctgcagaagtgt

SEQ ID NO: 2005486 - DNA, 25 bp, Homo sapien
tatcaaattcatcttgctcaacacc

SEQ ID NO: 2005487 - DNA, 25 bp, Homo sapien
gaaagccccacttcccttgcaccac

SEQ ID NO: 2005488 - DNA, 25 bp, Homo sapien
actgttctctctcttatcaaattca

SEQ ID NO: 2005489 - DNA, 25 bp, Homo sapien
acaccaccaggtccatctttgaaag

SEQ ID NO: 2005490 - DNA, 25 bp, Homo sapien
cttgcatgactagtacaaagcactt

SEQ ID NO: 2005491 - DNA, 25 bp, Homo sapien
ggagaggtttgctctgacgccctag

SEQ ID NO: 2005492 - DNA, 25 bp, Homo sapien
caaatgcaaccatgagtaatccctg

SEQ ID NO: 2005493 - DNA, 25 bp, Homo sapien
ggacattctcctgcatagcacaaga

SEQ ID NO: 2005494 - DNA, 25 bp, Homo sapien
caagatcttgggcagctgctgatag

SEQ ID NO: 2005495 - DNA, 25 bp, Homo sapien
cttgggcagctgctgatagggcagt

SEQ ID NO: 2005496 - DNA, 25 bp, Homo sapien
atcttgggcagctgctgatagggca

SEQ ID NO: 2005497 - DNA, 25 bp, Homo sapien
tgggcagctgctgatagggcagtgg

SEQ ID NO: 2005498 - DNA, 25 bp, Homo sapien
ctggggacccccacactgtggccgg

SEQ ID NO: 2005499 - DNA, 25 bp, Homo sapien
gacccccacactgtggccgggctct

SEQ ID NO: 2005500 - DNA, 25 bp, Homo sapien
ctgtggccgggctctcatagttcat

SEQ ID NO: 2005501 - DNA, 25 bp, Homo sapien
cacactgtggccgggctctcatagt

SEQ ID NO: 2005502 - DNA, 25 bp, Homo sapien
aagttcctaggtctgagtcaaaata

SEQ ID NO: 2005503 - DNA, 25 bp, Homo sapien
ggtgacattacaagttcctaggtct

SEQ ID NO: 2005504 - DNA, 25 bp, Homo sapien
tacaagttcctaggtctgagtcaaa

SEQ ID NO: 2005505 - DNA, 25 bp, Homo sapien
gacattacaagttcctaggtctgag

SEQ ID NO: 2005506 - DNA, 25 bp, Homo sapien
gggctttgatgcaaatagggttgac

SEQ ID NO: 2005507 - DNA, 25 bp, Homo sapien
tggtgcttaagcagtttgtgggctt

SEQ ID NO: 2005508 - DNA, 25 bp, Homo sapien
taagcagtttgtgggctttgatgca

SEQ ID NO: 2005509 - DNA, 25 bp, Homo sapien
cagtttgtgggctttgatgcaaata

SEQ ID NO: 2005510 - DNA, 25 bp, Homo sapien
caggcccagctgttcaatgaagttc

SEQ ID NO: 2005511 - DNA, 25 bp, Homo sapien
ttctttgcaccacaactgcctgcct

SEQ ID NO: 2005512 - DNA, 25 bp, Homo sapien
gcttctcctatccagaaccttcagg

SEQ ID NO: 2005513 - DNA, 25 bp, Homo sapien
tgcctgcctagaataaccatcctcc

SEQ ID NO: 2005514 - DNA, 25 bp, Homo sapien
agttgcaactgaggccatagatggc

SEQ ID NO: 2005515 - DNA, 25 bp, Homo sapien
tttaacaagcgtcttccggccctga

SEQ ID NO: 2005516 - DNA, 25 bp, Homo sapien
aagaagatccactggtaggtgttgg

SEQ ID NO: 2005517 - DNA, 25 bp, Homo sapien
cagagctccctccttaataaaagaa

SEQ ID NO: 2005518 - DNA, 25 bp, Homo sapien
tattgcttccgtgtgatctgaaagg

SEQ ID NO: 2005519 - DNA, 25 bp, Homo sapien
ctattgcttccgtgtgatctgaaag

SEQ ID NO: 2005520 - DNA, 25 bp, Homo sapien
attgcttccgtgtgatctgaaaggg

SEQ ID NO: 2005521 - DNA, 25 bp, Homo sapien
gctattgcttccgtgtgatctgaaa

SEQ ID NO: 2005522 - DNA, 25 bp, Homo sapien
tgcatctgagtcatcatagcaagcg

SEQ ID NO: 2005523 - DNA, 25 bp, Homo sapien
atcatagcaagcgtgccagccagcc

SEQ ID NO: 2005524 - DNA, 25 bp, Homo sapien
gccagccagctagccaatgctctgt

SEQ ID NO: 2005525 - DNA, 25 bp, Homo sapien
gcatctatttcatgcagatgagctg

SEQ ID NO: 2005526 - DNA, 25 bp, Homo sapien
ctagtagtcaaataccgaatacaga

SEQ ID NO: 2005527 - DNA, 25 bp, Homo sapien
agtagtcaaataccgaatacagagg

SEQ ID NO: 2005528 - DNA, 25 bp, Homo sapien
tagtagtcaaataccgaatacagag

SEQ ID NO: 2005529 - DNA, 25 bp, Homo sapien
caactgccgacgagaagcaacactg

SEQ ID NO: 2005530 - DNA, 25 bp, Homo sapien
aactgccgacgagaagcaacactga

SEQ ID NO: 2005531 - DNA, 25 bp, Homo sapien
actgccgacgagaagcaacactgat

SEQ ID NO: 2005532 - DNA, 25 bp, Homo sapien
acaactgccgacgagaagcaacact

SEQ ID NO: 2005533 - DNA, 25 bp, Homo sapien
cagcttctttttttcctctaaaatg

SEQ ID NO: 2005534 - DNA, 25 bp, Homo sapien
atatttacagctttcagcttctttt

SEQ ID NO: 2005535 - DNA, 25 bp, Homo sapien
ttacagctttcagcttctttttttc

SEQ ID NO: 2005536 - DNA, 25 bp, Homo sapien
gctttcagcttctttttttcctcta

SEQ ID NO: 2005537 - DNA, 25 bp, Homo sapien
tctgaactgagacggcttatccagc

SEQ ID NO: 2005538 - DNA, 25 bp, Homo sapien
ctgtgtgtctgaactgagacggctt

SEQ ID NO: 2005539 - DNA, 25 bp, Homo sapien
tgtgtctgaactgagacggcttatc

SEQ ID NO: 2005540 - DNA, 25 bp, Homo sapien
tgtctgaactgagacggcttatcca

SEQ ID NO: 2005541 - DNA, 25 bp, Homo sapien
ggcctgatctgtgggtgttcccaac

SEQ ID NO: 2005542 - DNA, 25 bp, Homo sapien
aaatagaacggcaacatctgcagcc

SEQ ID NO: 2005543 - DNA, 25 bp, Homo sapien
tctaatccacgggtagcgggtagcg

SEQ ID NO: 2005544 - DNA, 25 bp, Homo sapien
tgcctggtgtcaagttaccctgctt

SEQ ID NO: 2005545 - DNA, 25 bp, Homo sapien
cccagaacgaaacaagatctaggag

SEQ ID NO: 2005546 - DNA, 25 bp, Homo sapien
ccagaacgaaacaagatctaggagc

SEQ ID NO: 2005547 - DNA, 25 bp, Homo sapien
acaggcccttgtttgacctctggac

SEQ ID NO: 2005548 - DNA, 25 bp, Homo sapien
gccaagacgataagccccagagtat

SEQ ID NO: 2005549 - DNA, 25 bp, Homo sapien
gacctaaggctacccaagactttga

SEQ ID NO: 2005550 - DNA, 25 bp, Homo sapien
tcttgaaggacatcacgtgagctac

SEQ ID NO: 2005551 - DNA, 25 bp, Homo sapien
gaccttgttcaaccctgctgagctt

SEQ ID NO: 2005552 - DNA, 25 bp, Homo sapien
ctgacgagaaatgaccttgttcaac

SEQ ID NO: 2005553 - DNA, 25 bp, Homo sapien
cctgctgagcttcctagatttactg

SEQ ID NO: 2005554 - DNA, 25 bp, Homo sapien
tgctgagcttcctagatttactggg

SEQ ID NO: 2005555 - DNA, 25 bp, Homo sapien
ctcggtctgccagtgtgtcggcgct

SEQ ID NO: 2005556 - DNA, 25 bp, Homo sapien
catctgatgcacagggttgcttcct

SEQ ID NO: 2005557 - DNA, 25 bp, Homo sapien
tcttgctgagcagggattaggatgc

SEQ ID NO: 2005558 - DNA, 25 bp, Homo sapien
gaggatatattttcgtcttccaggg

SEQ ID NO: 2005559 - DNA, 25 bp, Homo sapien
cctgatcatgggcttttaaacctaa

SEQ ID NO: 2005560 - DNA, 25 bp, Homo sapien
taagaaatccagctgggaacagtgg

SEQ ID NO: 2005561 - DNA, 25 bp, Homo sapien
cagtgtttttggcagcgattatagg

SEQ ID NO: 2005562 - DNA, 25 bp, Homo sapien
aatattgactattccccagttaagc

SEQ ID NO: 2005563 - DNA, 25 bp, Homo sapien
tggaggcagccacgtaacaattaga

SEQ ID NO: 2005564 - DNA, 25 bp, Homo sapien
ggcagccacgtaacaattagagttg

SEQ ID NO: 2005565 - DNA, 25 bp, Homo sapien
gccacgtaacaattagagttgaaac

SEQ ID NO: 2005566 - DNA, 25 bp, Homo sapien
ttgttccccagtctcaatattctgt

SEQ ID NO: 2005567 - DNA, 25 bp, Homo sapien
attgttccccagtctcaatattctg

SEQ ID NO: 2005568 - DNA, 25 bp, Homo sapien
tggaggcagccacgtaacaattaga

SEQ ID NO: 2005569 - DNA, 25 bp, Homo sapien
ttgttccccagtctcaatattctgt

SEQ ID NO: 2005570 - DNA, 25 bp, Homo sapien
gccacgtaacaattagagttgaaac

SEQ ID NO: 2005571 - DNA, 25 bp, Homo sapien
tggaggcagccacgtaacaattaga

SEQ ID NO: 2005572 - DNA, 25 bp, Homo sapien
cacgttgttccccagtctcaatata

SEQ ID NO: 2005573 - DNA, 25 bp, Homo sapien
cagtctcaatatactgttggaggca

SEQ ID NO: 2005574 - DNA, 25 bp, Homo sapien
gttgttccccagtctcaatattctg

SEQ ID NO: 2005575 - DNA, 25 bp, Homo sapien
caaggtaccacattcttgtgcccac

SEQ ID NO: 2005576 - DNA, 25 bp, Homo sapien
tgtgcccacgacaggcttttataat

SEQ ID NO: 2005577 - DNA, 25 bp, Homo sapien
tagtgcatctagaaaactggtattc

SEQ ID NO: 2005578 - DNA, 25 bp, Homo sapien
cgaaagtcaggtattgcagtaggaa

SEQ ID NO: 2005579 - DNA, 25 bp, Homo sapien
tgtcacacatcatatagcccctgga

SEQ ID NO: 2005580 - DNA, 25 bp, Homo sapien
tcccctggatacttgtgaagagaat

SEQ ID NO: 2005581 - DNA, 25 bp, Homo sapien
ctgtttacgagccttatagtgtcct

SEQ ID NO: 2005582 - DNA, 25 bp, Homo sapien
ggccagcttagtccttgtacagata

SEQ ID NO: 2005583 - DNA, 25 bp, Homo sapien
tgttgtcactgataatgctctcctc

SEQ ID NO: 2005584 - DNA, 25 bp, Homo sapien
taaaggattggctacctgaatactc

SEQ ID NO: 2005585 - DNA, 25 bp, Homo sapien
caaaatatgggtcttaaatcgtgcc

SEQ ID NO: 2005586 - DNA, 25 bp, Homo sapien
gattaaggcattctatacatgggac

SEQ ID NO: 2005587 - DNA, 25 bp, Homo sapien
taaaatgatacatagattgttctcc

SEQ ID NO: 2005588 - DNA, 25 bp, Homo sapien
acatagattgttctcctgtgtaaga

SEQ ID NO: 2005589 - DNA, 25 bp, Homo sapien
tttagccatttgtaagagtataatt

SEQ ID NO: 2005590 - DNA, 25 bp, Homo sapien
tctatgctttatgcactctcagtct

SEQ ID NO: 2005591 - DNA, 25 bp, Homo sapien
tgtcttgtatgtagacctgccccga

SEQ ID NO: 2005592 - DNA, 25 bp, Homo sapien
tacagtacaggagcatcttcaaagt

SEQ ID NO: 2005593 - DNA, 25 bp, Homo sapien
aagcctcagatctgggaaacgcgga

SEQ ID NO: 2005594 - DNA, 25 bp, Homo sapien
tgaatgactgcacagaaagcgcccc

SEQ ID NO: 2005595 - DNA, 25 bp, Homo sapien
catttccctacttgcaaggcctaag

SEQ ID NO: 2005596 - DNA, 25 bp, Homo sapien
acgatggagaccgaaagtggagaaa

SEQ ID NO: 2005597 - DNA, 25 bp, Homo sapien
taagccggcgccgagagagccagcc

SEQ ID NO: 2005598 - DNA, 25 bp, Homo sapien
agagccagccgcgttacgatggaga

SEQ ID NO: 2005599 - DNA, 25 bp, Homo sapien
tcacagcttcatctcatgccgcgat

SEQ ID NO: 2005600 - DNA, 25 bp, Homo sapien
gccgtctccccagtgatactgcaag

SEQ ID NO: 2005601 - DNA, 25 bp, Homo sapien
ggcaagcgctatacagccgccgtct

SEQ ID NO: 2005602 - DNA, 25 bp, Homo sapien
tagcctatcagaccgccggtgggcg

SEQ ID NO: 2005603 - DNA, 25 bp, Homo sapien
tctgttaaaagtacggctgagatgc

SEQ ID NO: 2005604 - DNA, 25 bp, Homo sapien
tgtgggcgcttttcgaccccaaaga

SEQ ID NO: 2005605 - DNA, 25 bp, Homo sapien
tgacatcctgttacgatcgtggccc

SEQ ID NO: 2005606 - DNA, 25 bp, Homo sapien
ggtagaacaaggctgtttcctgcca

SEQ ID NO: 2005607 - DNA, 25 bp, Homo sapien
cagtgcagtactagtgaaggtggac

SEQ ID NO: 2005608 - DNA, 25 bp, Homo sapien
cagggagtggttacaacaggcctta

SEQ ID NO: 2005609 - DNA, 25 bp, Homo sapien
gaacttctagccctgaaaggaaaga

SEQ ID NO: 2005610 - DNA, 25 bp, Homo sapien
ctggagccgcctgggagaacttcta

SEQ ID NO: 2005611 - DNA, 25 bp, Homo sapien
gaccaaacaacagtgctcgaggatt

SEQ ID NO: 2005612 - DNA, 25 bp, Homo sapien
caagctttagacaaacaagtgattg

SEQ ID NO: 2005613 - DNA, 25 bp, Homo sapien
tgtatgaccaaacaacagtgctcga

SEQ ID NO: 2005614 - DNA, 25 bp, Homo sapien
atgctgtatgaccaaacaacagtgc

SEQ ID NO: 2005615 - DNA, 25 bp, Homo sapien
actcacatcccagaggcacatctct

SEQ ID NO: 2005616 - DNA, 25 bp, Homo sapien
ctgtatgccagtatgtgtgcaagct

SEQ ID NO: 2005617 - DNA, 25 bp, Homo sapien
tgtatgccagtatgtgtgcaagcta

SEQ ID NO: 2005618 - DNA, 25 bp, Homo sapien
gtatgtgtgcaagctaattttgtaa

SEQ ID NO: 2005619 - DNA, 25 bp, Homo sapien
ggatttcagggtaatgtccgtggca

SEQ ID NO: 2005620 - DNA, 25 bp, Homo sapien
tacttcaaggctggtagcatccaca

SEQ ID NO: 2005621 - DNA, 25 bp, Homo sapien
cggtgggatcgaataatactcatgg

SEQ ID NO: 2005622 - DNA, 25 bp, Homo sapien
tactcatggagctaatccagtctgg

SEQ ID NO: 2005623 - DNA, 25 bp, Homo sapien
caggatgccagtcaccgagagtgct

SEQ ID NO: 2005624 - DNA, 25 bp, Homo sapien
taacaatccagaccttcaggatgcc

SEQ ID NO: 2005625 - DNA, 25 bp, Homo sapien
tgcatgtcacttatttccgaggtaa

SEQ ID NO: 2005626 - DNA, 25 bp, Homo sapien
accgagagtgctaccactgtgtcct

SEQ ID NO: 2005627 - DNA, 25 bp, Homo sapien
atttggaacacacaaccaaaagtga

SEQ ID NO: 2005628 - DNA, 25 bp, Homo sapien
gcaattctgacaataaattggtttg

SEQ ID NO: 2005629 - DNA, 25 bp, Homo sapien
tgcacaaaaagagatgctttggcaa

SEQ ID NO: 2005630 - DNA, 25 bp, Homo sapien
cctcctcaaatattggctcagtatc

SEQ ID NO: 2005631 - DNA, 25 bp, Homo sapien
tcactaggacctgaacacaacaagg

SEQ ID NO: 2005632 - DNA, 25 bp, Homo sapien
gaacacaacaaggaatagtctccgg

SEQ ID NO: 2005633 - DNA, 25 bp, Homo sapien
acaacaaggaatagtctccggcatc

SEQ ID NO: 2005634 - DNA, 25 bp, Homo sapien
cattttcactaggacctgaacacaa

SEQ ID NO: 2005635 - DNA, 25 bp, Homo sapien
aggttgtaccctaaattctgaatct

SEQ ID NO: 2005636 - DNA, 25 bp, Homo sapien
aagtcaggttgtaccctaaattctg

SEQ ID NO: 2005637 - DNA, 25 bp, Homo sapien
tgactgtcctaatttattacttgct

SEQ ID NO: 2005638 - DNA, 25 bp, Homo sapien
tgtcctaatttattacttgctgcat

SEQ ID NO: 2005639 - DNA, 25 bp, Homo sapien
taaattttcaactgccttccccaca

SEQ ID NO: 2005640 - DNA, 25 bp, Homo sapien
tctttatcttttcgatccaagagga

SEQ ID NO: 2005641 - DNA, 25 bp, Homo sapien
gcggaatgaatcactagctggaagg

SEQ ID NO: 2005642 - DNA, 25 bp, Homo sapien
ccaagaggatatgttgtacaggagg

SEQ ID NO: 2005643 - DNA, 25 bp, Homo sapien
catagaagaaccgagtaacaggagg

SEQ ID NO: 2005644 - DNA, 25 bp, Homo sapien
ctgcatccatagaagaaccgagtaa

SEQ ID NO: 2005645 - DNA, 25 bp, Homo sapien
tagaagaaccgagtaacaggaggac

SEQ ID NO: 2005646 - DNA, 25 bp, Homo sapien
catccatagaagaaccgagtaacag

SEQ ID NO: 2005647 - DNA, 25 bp, Homo sapien
agaatcaccctgaattaacagttta

SEQ ID NO: 2005648 - DNA, 25 bp, Homo sapien
agaagaatcaccctgaattaacagt

SEQ ID NO: 2005649 - DNA, 25 bp, Homo sapien
ttccaaatattcaaccttccagaag

SEQ ID NO: 2005650 - DNA, 25 bp, Homo sapien
cttcacttccctgtttatcagctgt

SEQ ID NO: 2005651 - DNA, 25 bp, Homo sapien
aacaagtcgtccatgtgctggtatg

SEQ ID NO: 2005652 - DNA, 25 bp, Homo sapien
ctaatagaagttgtcattgccagcc

SEQ ID NO: 2005653 - DNA, 25 bp, Homo sapien
tgcaacagctgtactatggccgtct

SEQ ID NO: 2005654 - DNA, 25 bp, Homo sapien
tactattgggaatcacactcagctg

SEQ ID NO: 2005655 - DNA, 25 bp, Homo sapien
tgttccgatgaccacggagtgttct

SEQ ID NO: 2005656 - DNA, 25 bp, Homo sapien
cgatgaccacggagtgttctgtgag

SEQ ID NO: 2005657 - DNA, 25 bp, Homo sapien
tttgttccgatgaccacggagtgtt

SEQ ID NO: 2005658 - DNA, 25 bp, Homo sapien
ttccgatgaccacggagtgttctgt

SEQ ID NO: 2005659 - DNA, 25 bp, Homo sapien
actacagttttcaggtggaactaga

SEQ ID NO: 2005660 - DNA, 25 bp, Homo sapien
caccatgaacacagaagatatgttt

SEQ ID NO: 2005661 - DNA, 25 bp, Homo sapien
aaatccacacctccagatatcaggt

SEQ ID NO: 2005662 - DNA, 25 bp, Homo sapien
gaagttgagtaatctcaccaccatg

SEQ ID NO: 2005663 - DNA, 25 bp, Homo sapien
gttagtctagattccatttacattc

SEQ ID NO: 2005664 - DNA, 25 bp, Homo sapien
tataacttggctctaccatagtgaa

SEQ ID NO: 2005665 - DNA, 25 bp, Homo sapien
tttacattcctgatagtaatataac

SEQ ID NO: 2005666 - DNA, 25 bp, Homo sapien
cttggctctaccatagtgaaataat

SEQ ID NO: 2005667 - DNA, 25 bp, Homo sapien
gacagctctgagaatttaatcgtca

SEQ ID NO: 2005668 - DNA, 25 bp, Homo sapien
taaatagctataatactaaaagtaa

SEQ ID NO: 2005669 - DNA, 25 bp, Homo sapien
taatcgtcaatgtaaatgaggaaaa

SEQ ID NO: 2005670 - DNA, 25 bp, Homo sapien
ctaacaacagaaagacagctctgag

SEQ ID NO: 2005671 - DNA, 25 bp, Homo sapien
gaaacatatcactggtactaaacag

SEQ ID NO: 2005672 - DNA, 25 bp, Homo sapien
tcggcattttcgaaaacttctgttc

SEQ ID NO: 2005673 - DNA, 25 bp, Homo sapien
catatcactggtactaaacagttta

SEQ ID NO: 2005674 - DNA, 25 bp, Homo sapien
tatcactggtactaaacagtttatt

SEQ ID NO: 2005675 - DNA, 25 bp, Homo sapien
tgagtggtcactggctacagagcag

SEQ ID NO: 2005676 - DNA, 25 bp, Homo sapien
tatccatttgccagacgtacacaga

SEQ ID NO: 2005677 - DNA, 25 bp, Homo sapien
ggtaatcatcagaaggcctccattt

SEQ ID NO: 2005678 - DNA, 25 bp, Homo sapien
ggaaaaaggtgacgagatgccaaca

SEQ ID NO: 2005679 - DNA, 25 bp, Homo sapien
ggaacagcttcatcacaagcgttta

SEQ ID NO: 2005680 - DNA, 25 bp, Homo sapien
tcatagcttgttttaggttgactgc

SEQ ID NO: 2005681 - DNA, 25 bp, Homo sapien
gactgctggatgactaagtgaatca

SEQ ID NO: 2005682 - DNA, 25 bp, Homo sapien
tagaatctcaactgctgttatcccc

SEQ ID NO: 2005683 - DNA, 25 bp, Homo sapien
gttgcaagggtttgtagcttatgat

SEQ ID NO: 2005684 - DNA, 25 bp, Homo sapien
gggtttgtagcttatgatgggccat

SEQ ID NO: 2005685 - DNA, 25 bp, Homo sapien
ccaagaggttagttgcaagggtttg

SEQ ID NO: 2005686 - DNA, 25 bp, Homo sapien
tcagaagccaagaggttagttgcaa

SEQ ID NO: 2005687 - DNA, 25 bp, Homo sapien
tagagtatcccaatacaggctttgc

SEQ ID NO: 2005688 - DNA, 25 bp, Homo sapien
gtaggccaggcaacaattaccactg

SEQ ID NO: 2005689 - DNA, 25 bp, Homo sapien
tacaagactaaggaggttcacaagc

SEQ ID NO: 2005690 - DNA, 25 bp, Homo sapien
gagaaatccctaatggtccagccaa

SEQ ID NO: 2005691 - DNA, 25 bp, Homo sapien
cacaaatgagttatcatggtctaca

SEQ ID NO: 2005692 - DNA, 25 bp, Homo sapien
gatgctcagcatcctactatataga

SEQ ID NO: 2005693 - DNA, 25 bp, Homo sapien
tggtctacagtcaaaaggaacggga

SEQ ID NO: 2005694 - DNA, 25 bp, Homo sapien
taagtccaggatgggttagaacact

SEQ ID NO: 2005695 - DNA, 25 bp, Homo sapien
aagggttggtaatggcttcactgtc

SEQ ID NO: 2005696 - DNA, 25 bp, Homo sapien
taagggttggtaatggcttcactgt

SEQ ID NO: 2005697 - DNA, 25 bp, Homo sapien
ctaagggttggtaatggcttcactg

SEQ ID NO: 2005698 - DNA, 25 bp, Homo sapien
tgattggcacaacaatgctcaagat

SEQ ID NO: 2005699 - DNA, 25 bp, Homo sapien
ggtgattctgattggcacaacaatg

SEQ ID NO: 2005700 - DNA, 25 bp, Homo sapien
tctgattggcacaacaatgctcaag

SEQ ID NO: 2005701 - DNA, 25 bp, Homo sapien
gattctgattggcacaacaatgctc

SEQ ID NO: 2005702 - DNA, 25 bp, Homo sapien
ccctatcctgatcgagaacgttcct

SEQ ID NO: 2005703 - DNA, 25 bp, Homo sapien
cctggaaacctagcttcatcaatta

SEQ ID NO: 2005704 - DNA, 25 bp, Homo sapien
tttacctttgaaatcgcccactctc

SEQ ID NO: 2005705 - DNA, 25 bp, Homo sapien
caattatcaattcctccctatcctg

SEQ ID NO: 2005706 - DNA, 25 bp, Homo sapien
cccactgggtgtgggtgtaactgat

SEQ ID NO: 2005707 - DNA, 25 bp, Homo sapien
gggcctagcttagagtatgcattca

SEQ ID NO: 2005708 - DNA, 25 bp, Homo sapien
ctggttgtagcttggggcctagctt

SEQ ID NO: 2005709 - DNA, 25 bp, Homo sapien
catcaggtaggaactccccaatgcc

SEQ ID NO: 2005710 - DNA, 25 bp, Homo sapien
ccaacaacccttcaggtcagtttgg

SEQ ID NO: 2005711 - DNA, 25 bp, Homo sapien
cgtcctcctaatgtcaagcctctct

SEQ ID NO: 2005712 - DNA, 25 bp, Homo sapien
ttggggttctctctcacttggttca

SEQ ID NO: 2005713 - DNA, 25 bp, Homo sapien
gctccctttgcctggggtgttcttc

SEQ ID NO: 2005714 - DNA, 25 bp, Homo sapien
ttatgagaatatttaggtaaatttc

SEQ ID NO: 2005715 - DNA, 25 bp, Homo sapien
cagggagttatgagaatatttaggt

SEQ ID NO: 2005716 - DNA, 25 bp, Homo sapien
ggagttatgagaatatttaggtaaa

SEQ ID NO: 2005717 - DNA, 25 bp, Homo sapien
tatgagaatatttaggtaaatttcc

SEQ ID NO: 2005718 - DNA, 25 bp, Homo sapien
taggtttgtctttattgcttgaacc

SEQ ID NO: 2005719 - DNA, 25 bp, Homo sapien
taagagcagtattcggcctagaggc

SEQ ID NO: 2005720 - DNA, 25 bp, Homo sapien
taatcaacgcttccacatcaaagaa

SEQ ID NO: 2005721 - DNA, 25 bp, Homo sapien
gcctagaggcttcttcagtcaggag

SEQ ID NO: 2005722 - DNA, 25 bp, Homo sapien
ccatgtgacagtttacaagcaggct

SEQ ID NO: 2005723 - DNA, 25 bp, Homo sapien
tgacaagaggccaaacgatacggtg

SEQ ID NO: 2005724 - DNA, 25 bp, Homo sapien
cattccaaggcgatccaggcaaact

SEQ ID NO: 2005725 - DNA, 25 bp, Homo sapien
cattcaaaccccaggcgtgaaggca

SEQ ID NO: 2005726 - DNA, 25 bp, Homo sapien
taattatatttacaagagctagtct

SEQ ID NO: 2005727 - DNA, 25 bp, Homo sapien
gggcaaacttcaagtacgtatacaa

SEQ ID NO: 2005728 - DNA, 25 bp, Homo sapien
aatattagggcaaacttcaagtacg

SEQ ID NO: 2005729 - DNA, 25 bp, Homo sapien
tagtctatatgaccaactccctcat

SEQ ID NO: 2005730 - DNA, 25 bp, Homo sapien
cacaatattactggaagttggaggg

SEQ ID NO: 2005731 - DNA, 25 bp, Homo sapien
ttgcacaatattactggaagttgga

SEQ ID NO: 2005732 - DNA, 25 bp, Homo sapien
tgccttagaaaggtctggggtgctt

SEQ ID NO: 2005733 - DNA, 25 bp, Homo sapien
ccttgccttagaaaggtctggggtg

SEQ ID NO: 2005734 - DNA, 25 bp, Homo sapien
aggctgtgttaattttgcatggttt

SEQ ID NO: 2005735 - DNA, 25 bp, Homo sapien
aatggggagaaattgttatccctgg

SEQ ID NO: 2005736 - DNA, 25 bp, Homo sapien
tatccctggaaaggctgtgttaatt

SEQ ID NO: 2005737 - DNA, 25 bp, Homo sapien
tggggagaaattgttatccctggaa

SEQ ID NO: 2005738 - DNA, 25 bp, Homo sapien
ggtcagagccagagtgatcagcatc

SEQ ID NO: 2005739 - DNA, 25 bp, Homo sapien
gatcagcatcagaccgagcggaaac

SEQ ID NO: 2005740 - DNA, 25 bp, Homo sapien
cgagcggaaacgacaggtgcagcaa

SEQ ID NO: 2005741 - DNA, 25 bp, Homo sapien
taagaaacaggtatgtaaagcagga

SEQ ID NO: 2005742 - DNA, 25 bp, Homo sapien
gaggcctaaatttatccaatcccag

SEQ ID NO: 2005743 - DNA, 25 bp, Homo sapien
gtctggcagcataacacagtgcata

SEQ ID NO: 2005744 - DNA, 25 bp, Homo sapien
cgatcttgccatcttcgggccagca

SEQ ID NO: 2005745 - DNA, 25 bp, Homo sapien
tatccaatcccagtaggtctggcag

SEQ ID NO: 2005746 - DNA, 25 bp, Homo sapien
gacgtggtctatgtactgaggtaag

SEQ ID NO: 2005747 - DNA, 25 bp, Homo sapien
tatgtactgaggtaagtaaggagcc

SEQ ID NO: 2005748 - DNA, 25 bp, Homo sapien
gatatgacgtggtctatgtactgag

SEQ ID NO: 2005749 - DNA, 25 bp, Homo sapien
ggtaagtaaggagcccaggcatcaa

SEQ ID NO: 2005750 - DNA, 25 bp, Homo sapien
gctttgtagagaagcatgagaactc

SEQ ID NO: 2005751 - DNA, 25 bp, Homo sapien
cttttctacatattcctgcaaagct

SEQ ID NO: 2005752 - DNA, 25 bp, Homo sapien
cctgcaaagctttgtagagaagcat

SEQ ID NO: 2005753 - DNA, 25 bp, Homo sapien
gcaaagctttgtagagaagcatgag

SEQ ID NO: 2005754 - DNA, 25 bp, Homo sapien
aagagagtttgccttgtatctgcac

SEQ ID NO: 2005755 - DNA, 25 bp, Homo sapien
taataatgcaatgggcggaggcaca

SEQ ID NO: 2005756 - DNA, 25 bp, Homo sapien
caatcccaactttaactagcaagag

SEQ ID NO: 2005757 - DNA, 25 bp, Homo sapien
tcagatccatatcgaacaagctggc

SEQ ID NO: 2005758 - DNA, 25 bp, Homo sapien
ctgcaaacggctttttattgcataa

SEQ ID NO: 2005759 - DNA, 25 bp, Homo sapien
ggacattgactgtcaaaacaatttt

SEQ ID NO: 2005760 - DNA, 25 bp, Homo sapien
tcttttcattaagattatacacaca

SEQ ID NO: 2005761 - DNA, 25 bp, Homo sapien
tactgttacagatgactgggttggc

SEQ ID NO: 2005762 - DNA, 25 bp, Homo sapien
gcatggacattgactgtcaaaacaa

SEQ ID NO: 2005763 - DNA, 25 bp, Homo sapien
ggataatctgagcaatgaaccggca

SEQ ID NO: 2005764 - DNA, 25 bp, Homo sapien
aatgactgattctacggaaggcagg

SEQ ID NO: 2005765 - DNA, 25 bp, Homo sapien
gacagttattaggagcctgctgagg

SEQ ID NO: 2005766 - DNA, 25 bp, Homo sapien
taaaagagctccctatggccaatgc

SEQ ID NO: 2005767 - DNA, 25 bp, Homo sapien
tgttggcagaaaccatccaattggt

SEQ ID NO: 2005768 - DNA, 25 bp, Homo sapien
cattgcctatgtgatgatctgtcgc

SEQ ID NO: 2005769 - DNA, 25 bp, Homo sapien
tcagcggaccactgttataaagctg

SEQ ID NO: 2005770 - DNA, 25 bp, Homo sapien
gaaatttgacgctacgaaagtgcat

SEQ ID NO: 2005771 - DNA, 25 bp, Homo sapien
tcattatactaaacactcaaggagc

SEQ ID NO: 2005772 - DNA, 25 bp, Homo sapien
taactgtgcaatggtataggaaaca

SEQ ID NO: 2005773 - DNA, 25 bp, Homo sapien
cagaggttacatcatcaagtggtga

SEQ ID NO: 2005774 - DNA, 25 bp, Homo sapien
tggtaaacataaccgtgcaataggt

SEQ ID NO: 2005775 - DNA, 25 bp, Homo sapien
gatagtctgcgcggcttctgatgtg

SEQ ID NO: 2005776 - DNA, 25 bp, Homo sapien
atagtctgcgcggcttctgatgtga

SEQ ID NO: 2005777 - DNA, 25 bp, Homo sapien
tagtctgcgcggcttctgatgtgac

SEQ ID NO: 2005778 - DNA, 25 bp, Homo sapien
tggacttttgcttcaggccctgagg

SEQ ID NO: 2005779 - DNA, 25 bp, Homo sapien
tatttagagggtgtatcacttcacc

SEQ ID NO: 2005780 - DNA, 25 bp, Homo sapien
ggtaagacaccaaactatgaccctc

SEQ ID NO: 2005781 - DNA, 25 bp, Homo sapien
tgttcagcctgcaattaaggtgagg

SEQ ID NO: 2005782 - DNA, 25 bp, Homo sapien
taactaagtcacaggaaggtctcac

SEQ ID NO: 2005783 - DNA, 25 bp, Homo sapien
tgcccagccaaacccaagagtttga

SEQ ID NO: 2005784 - DNA, 25 bp, Homo sapien
gatatccagcaaagtaactacctct

SEQ ID NO: 2005785 - DNA, 25 bp, Homo sapien
tatctccctgttgtgtaggatagtc

SEQ ID NO: 2005786 - DNA, 25 bp, Homo sapien
taaacaatcaaggtaaactgtgaca

SEQ ID NO: 2005787 - DNA, 25 bp, Homo sapien
tagggattcccagactttgaagaaa

SEQ ID NO: 2005788 - DNA, 25 bp, Homo sapien
gaagaaactgggaccatcatccaca

SEQ ID NO: 2005789 - DNA, 25 bp, Homo sapien
tgactgaagaggcagcaaccaaata

SEQ ID NO: 2005790 - DNA, 25 bp, Homo sapien
gggaccatcatccacaagtacatct

SEQ ID NO: 2005791 - DNA, 25 bp, Homo sapien
ccttctaggattttccctgcgctcc

SEQ ID NO: 2005792 - DNA, 25 bp, Homo sapien
ttccttctaggattttccctgcgct

SEQ ID NO: 2005793 - DNA, 25 bp, Homo sapien
tgcgctcccctggcttcttcgccat

SEQ ID NO: 2005794 - DNA, 25 bp, Homo sapien
ctctcctctagtttccttctaggat

SEQ ID NO: 2005795 - DNA, 25 bp, Homo sapien
aatttgccactttctgtcctttatc

SEQ ID NO: 2005796 - DNA, 25 bp, Homo sapien
ggtctgctagctggcggtcctctgg

SEQ ID NO: 2005797 - DNA, 25 bp, Homo sapien
tacacagcgttttgggctgcaggtc

SEQ ID NO: 2005798 - DNA, 25 bp, Homo sapien
acacagcgttttgggctgcaggtct

SEQ ID NO: 2005799 - DNA, 25 bp, Homo sapien
ctctacacagcgttttgggctgcag

SEQ ID NO: 2005800 - DNA, 25 bp, Homo sapien
atcaagttgaaggttgtgaaagggc

SEQ ID NO: 2005801 - DNA, 25 bp, Homo sapien
gaaggttgtgaaagggcggctcaca

SEQ ID NO: 2005802 - DNA, 25 bp, Homo sapien
cacgaatcaagttgaaggttgtgaa

SEQ ID NO: 2005803 - DNA, 25 bp, Homo sapien
cgaatcaagttgaaggttgtgaaag

SEQ ID NO: 2005804 - DNA, 25 bp, Homo sapien
caggaggcccaatcgctgtctttca

SEQ ID NO: 2005805 - DNA, 25 bp, Homo sapien
ttaacctggtgtgataaaagacttg

SEQ ID NO: 2005806 - DNA, 25 bp, Homo sapien
caactccagagagagttaacctggt

SEQ ID NO: 2005807 - DNA, 25 bp, Homo sapien
gaagctcaatactcgactgctctgc

SEQ ID NO: 2005808 - DNA, 25 bp, Homo sapien
gctaaaccttaacatgctgttcact

SEQ ID NO: 2005809 - DNA, 25 bp, Homo sapien
ccgctaaaccttaacatgctgttca

SEQ ID NO: 2005810 - DNA, 25 bp, Homo sapien
ctcaaaaccgctaaaccttaacatg

SEQ ID NO: 2005811 - DNA, 25 bp, Homo sapien
aaaaccgctaaaccttaacatgctg

SEQ ID NO: 2005812 - DNA, 25 bp, Homo sapien
tgttacttccccactcacttgaaaa

SEQ ID NO: 2005813 - DNA, 25 bp, Homo sapien
gctgtgttacttccccactcacttg

SEQ ID NO: 2005814 - DNA, 25 bp, Homo sapien
ctactgacagaacatatggaatttg

SEQ ID NO: 2005815 - DNA, 25 bp, Homo sapien
ttgctccccaaatctaagaggcttt

SEQ ID NO: 2005816 - DNA, 25 bp, Homo sapien
cacgggactgcagggatactgatca

SEQ ID NO: 2005817 - DNA, 25 bp, Homo sapien
tctaatgtactgaagcaggccctga

SEQ ID NO: 2005818 - DNA, 25 bp, Homo sapien
aggcaaggcattgaccccagccgtt

SEQ ID NO: 2005819 - DNA, 25 bp, Homo sapien
ttcccctgcttggatgagcacagct

SEQ ID NO: 2005820 - DNA, 25 bp, Homo sapien
gagaggcctcatatggcaagctgaa

SEQ ID NO: 2005821 - DNA, 25 bp, Homo sapien
taaagaggtgccaaaccatgagagg

SEQ ID NO: 2005822 - DNA, 25 bp, Homo sapien
aagtagctaatggtttcagcccaga

SEQ ID NO: 2005823 - DNA, 25 bp, Homo sapien
taacaaaggtcactcaaagctcggt

SEQ ID NO: 2005824 - DNA, 25 bp, Homo sapien
acaatagcggtagcttgcttccgtc

SEQ ID NO: 2005825 - DNA, 25 bp, Homo sapien
gccagcgagtagttggatccaccac

SEQ ID NO: 2005826 - DNA, 25 bp, Homo sapien
tagtcaacccgaatccctcaggaat

SEQ ID NO: 2005827 - DNA, 25 bp, Homo sapien
caggaatttggctagagcttcgagg

SEQ ID NO: 2005828 - DNA, 25 bp, Homo sapien
ggctgagtcactttgaagaagtctt

SEQ ID NO: 2005829 - DNA, 25 bp, Homo sapien
tcaggtcgcaagacacttgagttca

SEQ ID NO: 2005830 - DNA, 25 bp, Homo sapien
attgtaaagttatagccaggtgcag

SEQ ID NO: 2005831 - DNA, 25 bp, Homo sapien
gaagggaaacggttctcaggtcgca

SEQ ID NO: 2005832 - DNA, 25 bp, Homo sapien
cgcccagccgttcctacatttatat

SEQ ID NO: 2005833 - DNA, 25 bp, Homo sapien
cagatatttgtactaagcaatggaa

SEQ ID NO: 2005834 - DNA, 25 bp, Homo sapien
aatatcaaatacaaaaggatggtgt

SEQ ID NO: 2005835 - DNA, 25 bp, Homo sapien
caaatacaaaaggatggtgttgaga

SEQ ID NO: 2005836 - DNA, 25 bp, Homo sapien
cagaaggatctccactgaagtgtgc

SEQ ID NO: 2005837 - DNA, 25 bp, Homo sapien
agatgtccgtattcacaggtgacct

SEQ ID NO: 2005838 - DNA, 25 bp, Homo sapien
caatagatgtccgtattcacaggtg

SEQ ID NO: 2005839 - DNA, 25 bp, Homo sapien
tcaatagatgtccgtattcacaggt

SEQ ID NO: 2005840 - DNA, 25 bp, Homo sapien
atagatgtccgtattcacaggtgac

SEQ ID NO: 2005841 - DNA, 25 bp, Homo sapien
tgtcccagtgaactgacaaccgcag

SEQ ID NO: 2005842 - DNA, 25 bp, Homo sapien
ttctttctttactcccagaatgctg

SEQ ID NO: 2005843 - DNA, 25 bp, Homo sapien
ctgtcccagtgaactgacaaccgca

SEQ ID NO: 2005844 - DNA, 25 bp, Homo sapien
tctgtctgtacatgatttaagggag

SEQ ID NO: 2005845 - DNA, 25 bp, Homo sapien
ctggatgtctgtctgtacatgattt

SEQ ID NO: 2005846 - DNA, 25 bp, Homo sapien
gtctgtacatgatttaagggaggta

SEQ ID NO: 2005847 - DNA, 25 bp, Homo sapien
tgtctgtctgtacatgatttaaggg

SEQ ID NO: 2005848 - DNA, 25 bp, Homo sapien
ggattcagaactacatctacaacca

SEQ ID NO: 2005849 - DNA, 25 bp, Homo sapien
tacatctacaaccaatcccaagtcc

SEQ ID NO: 2005850 - DNA, 25 bp, Homo sapien
tggattcagaactacatctacaacc

SEQ ID NO: 2005851 - DNA, 25 bp, Homo sapien
caatcccaagtccactttctcctcc

SEQ ID NO: 2005852 - DNA, 25 bp, Homo sapien
tagcagaagaaacgtcagtgccttg

SEQ ID NO: 2005853 - DNA, 25 bp, Homo sapien
agcagaagaaacgtcagtgccttgc

SEQ ID NO: 2005854 - DNA, 25 bp, Homo sapien
ctgtagcagaagaaacgtcagtgcc

SEQ ID NO: 2005855 - DNA, 25 bp, Homo sapien
tgtagcagaagaaacgtcagtgcct

SEQ ID NO: 2005856 - DNA, 25 bp, Homo sapien
gaacagcggacacatccatgtaagg

SEQ ID NO: 2005857 - DNA, 25 bp, Homo sapien
tgtaaggctcccaaacagtgaaccc

SEQ ID NO: 2005858 - DNA, 25 bp, Homo sapien
caagttgtttctcggcatcggcaca

SEQ ID NO: 2005859 - DNA, 25 bp, Homo sapien
tcaatggctgttcttcggatagtgc

SEQ ID NO: 2005860 - DNA, 25 bp, Homo sapien
tctgctgaatacaaggacctaacaa

SEQ ID NO: 2005861 - DNA, 25 bp, Homo sapien
tgctaaactgctcattctagagtca

SEQ ID NO: 2005862 - DNA, 25 bp, Homo sapien
ttatgctaaactgctcattctagag

SEQ ID NO: 2005863 - DNA, 25 bp, Homo sapien
caaggacctaacaatggcatcacca

SEQ ID NO: 2005864 - DNA, 25 bp, Homo sapien
cctctaagttctcgcttccatccct

SEQ ID NO: 2005865 - DNA, 25 bp, Homo sapien
cattacctctaagttctcgcttcca

SEQ ID NO: 2005866 - DNA, 25 bp, Homo sapien
tacctctaagttctcgcttccatcc

SEQ ID NO: 2005867 - DNA, 25 bp, Homo sapien
ttacctctaagttctcgcttccatc

SEQ ID NO: 2005868 - DNA, 25 bp, Homo sapien
gccatggaagagcccgatgctcttg

SEQ ID NO: 2005869 - DNA, 25 bp, Homo sapien
ttgcgagaaagcaagatgggcagtt

SEQ ID NO: 2005870 - DNA, 25 bp, Homo sapien
agagcccgatgctcttgggtcccag

SEQ ID NO: 2005871 - DNA, 25 bp, Homo sapien
gaaagaggtgttttgcgagaaagca

SEQ ID NO: 2005872 - DNA, 25 bp, Homo sapien
ccatacggagggtagagacgaagca

SEQ ID NO: 2005873 - DNA, 25 bp, Homo sapien
tctgactgatagtataactgtctct

SEQ ID NO: 2005874 - DNA, 25 bp, Homo sapien
taagtctttgtgactgttacactgc

SEQ ID NO: 2005875 - DNA, 25 bp, Homo sapien
cactgcttaaatctctgactgatag

SEQ ID NO: 2005876 - DNA, 25 bp, Homo sapien
gagggcatgcctcgcagagcgggcc

SEQ ID NO: 2005877 - DNA, 25 bp, Homo sapien
caatgagcgagagggcatgcctcgc

SEQ ID NO: 2005878 - DNA, 25 bp, Homo sapien
ggtggtctggcggtggcaatgagcg

SEQ ID NO: 2005879 - DNA, 25 bp, Homo sapien
ggtgatgaaggcgggtggtctggcg

SEQ ID NO: 2005880 - DNA, 25 bp, Homo sapien
caccgtggaattcagtgtacatgca

SEQ ID NO: 2005881 - DNA, 25 bp, Homo sapien
gagcccataccccatggacactgag

SEQ ID NO: 2005882 - DNA, 25 bp, Homo sapien
ttttcgtttacagttagagagccag

SEQ ID NO: 2005883 - DNA, 25 bp, Homo sapien
gaagtaatgaatgcaccacaccgtg

SEQ ID NO: 2005884 - DNA, 25 bp, Homo sapien
caataagaatttcaatgactctcaa

SEQ ID NO: 2005885 - DNA, 25 bp, Homo sapien
tcccctttagctcgtgcaagagttg

SEQ ID NO: 2005886 - DNA, 25 bp, Homo sapien
gcatattctgctgtgattgggtatt

SEQ ID NO: 2005887 - DNA, 25 bp, Homo sapien
caagagttgttgtgtgcatattctg

SEQ ID NO: 2005888 - DNA, 25 bp, Homo sapien
agatccttcaaggcagtacataatg

SEQ ID NO: 2005889 - DNA, 25 bp, Homo sapien
gatccttcaaggcagtacataatga

SEQ ID NO: 2005890 - DNA, 25 bp, Homo sapien
aagatccttcaaggcagtacataat

SEQ ID NO: 2005891 - DNA, 25 bp, Homo sapien
gggccaccatgttcttatgcactcc

SEQ ID NO: 2005892 - DNA, 25 bp, Homo sapien
tgtactgagtgacatcaacatgaca

SEQ ID NO: 2005893 - DNA, 25 bp, Homo sapien
aacatgacagccctgcgataacggg

SEQ ID NO: 2005894 - DNA, 25 bp, Homo sapien
tgcactcccttgaaaggtggctcca

SEQ ID NO: 2005895 - DNA, 25 bp, Homo sapien
gatccacttggttacagtctgcagg

SEQ ID NO: 2005896 - DNA, 25 bp, Homo sapien
gaattggtcaacagccctcatggat

SEQ ID NO: 2005897 - DNA, 25 bp, Homo sapien
ttgattacacaacacaggcaagctg

SEQ ID NO: 2005898 - DNA, 25 bp, Homo sapien
aaaggttcatagacatcaaggtggc

SEQ ID NO: 2005899 - DNA, 25 bp, Homo sapien
aatggcaaagcgcagttgaagggaa

SEQ ID NO: 2005900 - DNA, 25 bp, Homo sapien
aagaaccatcagtaatggcaaagcg

SEQ ID NO: 2005901 - DNA, 25 bp, Homo sapien
aagcaacatgctcaggggaggatgc

SEQ ID NO: 2005902 - DNA, 25 bp, Homo sapien
catcagtaatggcaaagcgcagttg

SEQ ID NO: 2005903 - DNA, 25 bp, Homo sapien
gattccgctcataatagctgaccat

SEQ ID NO: 2005904 - DNA, 25 bp, Homo sapien
ggcgagctccaactgctattctgtg

SEQ ID NO: 2005905 - DNA, 25 bp, Homo sapien
ccggatgtcgtacagggccactgaa

SEQ ID NO: 2005906 - DNA, 25 bp, Homo sapien
ggccactgaaccatggcgagctcca

SEQ ID NO: 2005907 - DNA, 25 bp, Homo sapien
tttaaagaagcctgacaaggtcacc

SEQ ID NO: 2005908 - DNA, 25 bp, Homo sapien
gcagctgtgtcttatgtggtaacaa

SEQ ID NO: 2005909 - DNA, 25 bp, Homo sapien
gcatatttgatgcacgcccagaaaa

SEQ ID NO: 2005910 - DNA, 25 bp, Homo sapien
tcacacattagagactttgagaagg

SEQ ID NO: 2005911 - DNA, 25 bp, Homo sapien
gccatacttatcctgtggttttgca

SEQ ID NO: 2005912 - DNA, 25 bp, Homo sapien
aggccaacatgccatacttatcctg

SEQ ID NO: 2005913 - DNA, 25 bp, Homo sapien
catgccatacttatcctgtggtttt

SEQ ID NO: 2005914 - DNA, 25 bp, Homo sapien
caacatgccatacttatcctgtggt

SEQ ID NO: 2005915 - DNA, 25 bp, Homo sapien
caagtggccctatttaaagtcagat

SEQ ID NO: 2005916 - DNA, 25 bp, Homo sapien
tccttgaaacccctggacaagtggc

SEQ ID NO: 2005917 - DNA, 25 bp, Homo sapien
taagaatattcagaagctgggtgcc

SEQ ID NO: 2005918 - DNA, 25 bp, Homo sapien
cagatacgggcttttggcacaaacc

SEQ ID NO: 2005919 - DNA, 25 bp, Homo sapien
tgaaatatgatgtctataaagtaaa

SEQ ID NO: 2005920 - DNA, 25 bp, Homo sapien
gactttaactaggagagaaactgag

SEQ ID NO: 2005921 - DNA, 25 bp, Homo sapien
tgatgtctataaagtaaacctagac

SEQ ID NO: 2005922 - DNA, 25 bp, Homo sapien
agactttaactaggagagaaactga

SEQ ID NO: 2005923 - DNA, 25 bp, Homo sapien
tgctagtgctcaaacagatcatgct

SEQ ID NO: 2005924 - DNA, 25 bp, Homo sapien
gacgtgtcctagctcaagactgtga

SEQ ID NO: 2005925 - DNA, 25 bp, Homo sapien
agtctgcccaaaaatgaacccaggg

SEQ ID NO: 2005926 - DNA, 25 bp, Homo sapien
tatctttaagcattaggacgtgtcc

SEQ ID NO: 2005927 - DNA, 25 bp, Homo sapien
ggcagtcggcagcaatgggtcaata

SEQ ID NO: 2005928 - DNA, 25 bp, Homo sapien
tagataatcaacaacaaggcccgag

SEQ ID NO: 2005929 - DNA, 25 bp, Homo sapien
aaggctgaatcagttggctcccaga

SEQ ID NO: 2005930 - DNA, 25 bp, Homo sapien
cccagagacattgtgtagataatca

SEQ ID NO: 2005931 - DNA, 25 bp, Homo sapien
catgtcaagcctaatgttaatgcaa

SEQ ID NO: 2005932 - DNA, 25 bp, Homo sapien
gcaacatgtcaagcctaatgttaat

SEQ ID NO: 2005933 - DNA, 25 bp, Homo sapien
aatttcatgttgacaatatatgcaa

SEQ ID NO: 2005934 - DNA, 25 bp, Homo sapien
aatatatgcaaagctagcactggct

SEQ ID NO: 2005935 - DNA, 25 bp, Homo sapien
ccacagtaacaaatcatagcataat

SEQ ID NO: 2005936 - DNA, 25 bp, Homo sapien
taccacagtaacaaatcatagcata

SEQ ID NO: 2005937 - DNA, 25 bp, Homo sapien
cagtaacaaatcatagcataatcct

SEQ ID NO: 2005938 - DNA, 25 bp, Homo sapien
cacagtaacaaatcatagcataatc

SEQ ID NO: 2005939 - DNA, 25 bp, Homo sapien
tagtgtacaatacctgttaatgcta

SEQ ID NO: 2005940 - DNA, 25 bp, Homo sapien
acattttattcactctaccaacaga

SEQ ID NO: 2005941 - DNA, 25 bp, Homo sapien
gcctttcctatagtaacagcagtta

SEQ ID NO: 2005942 - DNA, 25 bp, Homo sapien
gaaaacactctaaacaacttcagta

SEQ ID NO: 2005943 - DNA, 25 bp, Homo sapien
tcagctctggaagaacaatgtttgc

SEQ ID NO: 2005944 - DNA, 25 bp, Homo sapien
ttgatccgcaactcagacacaggga

SEQ ID NO: 2005945 - DNA, 25 bp, Homo sapien
tgaactgttgcctaagcctatggac

SEQ ID NO: 2005946 - DNA, 25 bp, Homo sapien
accatcaggtggaagcgctcaaaac

SEQ ID NO: 2005947 - DNA, 25 bp, Homo sapien
tcacgcaatgaaaggagaattcttg

SEQ ID NO: 2005948 - DNA, 25 bp, Homo sapien
tccaagttcctttcctgctaggcaa

SEQ ID NO: 2005949 - DNA, 25 bp, Homo sapien
ccatcgagagagcagtcaaggttta

SEQ ID NO: 2005950 - DNA, 25 bp, Homo sapien
gaatggcaatgcagttcacgcaatg

SEQ ID NO: 2005951 - DNA, 25 bp, Homo sapien
taggtagatatggaacatcctgctg

SEQ ID NO: 2005952 - DNA, 25 bp, Homo sapien
ctccactgagggttctattagacta

SEQ ID NO: 2005953 - DNA, 25 bp, Homo sapien
gactaactgcctcaaagttgaaagg

SEQ ID NO: 2005954 - DNA, 25 bp, Homo sapien
gctgaaggaagtaatgaggcagcct

SEQ ID NO: 2005955 - DNA, 25 bp, Homo sapien
gaacacatgctagaagtcttatact

SEQ ID NO: 2005956 - DNA, 25 bp, Homo sapien
gagcagtaggtcaggatcttcacat

SEQ ID NO: 2005957 - DNA, 25 bp, Homo sapien
caggcttttacatggcaggacttca

SEQ ID NO: 2005958 - DNA, 25 bp, Homo sapien
ccgtcatgatgggacttggcatttt

SEQ ID NO: 2005959 - DNA, 25 bp, Homo sapien
gctgtcagtgtttgagtaggtggca

SEQ ID NO: 2005960 - DNA, 25 bp, Homo sapien
gcaagatatcttccatcaggagcaa

SEQ ID NO: 2005961 - DNA, 25 bp, Homo sapien
taggtggcaagatatcttccatcag

SEQ ID NO: 2005962 - DNA, 25 bp, Homo sapien
ttgagtaggtggcaagatatcttcc

SEQ ID NO: 2005963 - DNA, 25 bp, Homo sapien
gtttctggcaagcacggacccatga

SEQ ID NO: 2005964 - DNA, 25 bp, Homo sapien
cactcagacatccaataaatgtgga

SEQ ID NO: 2005965 - DNA, 25 bp, Homo sapien
tgtgtctctaatgcacaggccagta

SEQ ID NO: 2005966 - DNA, 25 bp, Homo sapien
tattcctccaagatcccaagagaac

SEQ ID NO: 2005967 - DNA, 25 bp, Homo sapien
tacaaacgatgctcgagtaaggaca

SEQ ID NO: 2005968 - DNA, 25 bp, Homo sapien
tgttttcttgaacagcgactggata

SEQ ID NO: 2005969 - DNA, 25 bp, Homo sapien
tcaaattcggcatgaatgtgaagta

SEQ ID NO: 2005970 - DNA, 25 bp, Homo sapien
gaatgtgaagtattatagtaacggt

SEQ ID NO: 2005971 - DNA, 25 bp, Homo sapien
taagggacataactatcatagctca

SEQ ID NO: 2005972 - DNA, 25 bp, Homo sapien
taacatgtggaacgataaagacccc

SEQ ID NO: 2005973 - DNA, 25 bp, Homo sapien
cacatatccctattcctgtctgaga

SEQ ID NO: 2005974 - DNA, 25 bp, Homo sapien
gaaatcctgtaagggacataacatg

SEQ ID NO: 2005975 - DNA, 25 bp, Homo sapien
gatatgtgaaatcctgtaagggaca

SEQ ID NO: 2005976 - DNA, 25 bp, Homo sapien
gaatagggatatgtgaaatcctgta

SEQ ID NO: 2005977 - DNA, 25 bp, Homo sapien
tcacatatccctattcctgcctgag

SEQ ID NO: 2005978 - DNA, 25 bp, Homo sapien
tattcctgcctgagaatagggatat

SEQ ID NO: 2005979 - DNA, 25 bp, Homo sapien
cttgagtaataacccttttaagatg

SEQ ID NO: 2005980 - DNA, 25 bp, Homo sapien
gcaggctccactgacattttcacaa

SEQ ID NO: 2005981 - DNA, 25 bp, Homo sapien
ggcatctctagcagagtgtgtgcag

SEQ ID NO: 2005982 - DNA, 25 bp, Homo sapien
tcagagggcgtaaatcatggcatct

SEQ ID NO: 2005983 - DNA, 25 bp, Homo sapien
gaacctgacaaaaggagagtccatg

SEQ ID NO: 2005984 - DNA, 25 bp, Homo sapien
ggatgagtcagcgaagacaagtttt

SEQ ID NO: 2005985 - DNA, 25 bp, Homo sapien
gactgggtcgatctctcctggctac

SEQ ID NO: 2005986 - DNA, 25 bp, Homo sapien
aactgcactcactccctgaaggatg

SEQ ID NO: 2005987 - DNA, 25 bp, Homo sapien
gcatgccgatgcttcccagcagtga

SEQ ID NO: 2005988 - DNA, 25 bp, Homo sapien
cacctggtaggttttaatgcagcgc

SEQ ID NO: 2005989 - DNA, 25 bp, Homo sapien
tgaggtgccgagttcagcatgccga

SEQ ID NO: 2005990 - DNA, 25 bp, Homo sapien
aagcggtgctccttcccgtcatggg

SEQ ID NO: 2005991 - DNA, 25 bp, Homo sapien
tagagaactaaaacgcagtcacggc

SEQ ID NO: 2005992 - DNA, 25 bp, Homo sapien
aaggacagagcaacatcggcttgga

SEQ ID NO: 2005993 - DNA, 25 bp, Homo sapien
ggcccctgggaacaatctggtgtga

SEQ ID NO: 2005994 - DNA, 25 bp, Homo sapien
gcatgcacaagtgacaagacccggc

SEQ ID NO: 2005995 - DNA, 25 bp, Homo sapien
gcatgtgtgcgtgcctctgaatcga

SEQ ID NO: 2005996 - DNA, 25 bp, Homo sapien
gcgtgcctctgaatcgacagatggc

SEQ ID NO: 2005997 - DNA, 25 bp, Homo sapien
tctgaatcgacagatggcacgagcg

SEQ ID NO: 2005998 - DNA, 25 bp, Homo sapien
acagatggcacgagcgggttctgcc

SEQ ID NO: 2005999 - DNA, 25 bp, Homo sapien
gcaacaagagcgttcccaggaacca

SEQ ID NO: 2006000 - DNA, 25 bp, Homo sapien
gcttctgttgcaccaagcaacaaga

SEQ ID NO: 2006001 - DNA, 25 bp, Homo sapien
ccaagcaacaagagcgttcccagga

SEQ ID NO: 2006002 - DNA, 25 bp, Homo sapien
ccaggaaccactggctttcccctgc

SEQ ID NO: 2006003 - DNA, 25 bp, Homo sapien
gagaagactctggacccactggaaa

SEQ ID NO: 2006004 - DNA, 25 bp, Homo sapien
ggagagtcttcattttcggtacacg

SEQ ID NO: 2006005 - DNA, 25 bp, Homo sapien
taatttcaatcgtgaggactgccac

SEQ ID NO: 2006006 - DNA, 25 bp, Homo sapien
gtgaaaggcctacccacgcttgtgg

SEQ ID NO: 2006007 - DNA, 25 bp, Homo sapien
ttcagcacacatagagtctattaag

SEQ ID NO: 2006008 - DNA, 25 bp, Homo sapien
ttgatcagtttatgtgatcgctgat

SEQ ID NO: 2006009 - DNA, 25 bp, Homo sapien
tcatatagaactgttactgccccta

SEQ ID NO: 2006010 - DNA, 25 bp, Homo sapien
tatagaactgttactgcccctattt

SEQ ID NO: 2006011 - DNA, 25 bp, Homo sapien
tatgtgatcgctgatcatatagaac

SEQ ID NO: 2006012 - DNA, 25 bp, Homo sapien
ggtgcataaacctctcactcagaga

SEQ ID NO: 2006013 - DNA, 25 bp, Homo sapien
tagccaaaaggtgtacagaagcagg

SEQ ID NO: 2006014 - DNA, 25 bp, Homo sapien
tgtctggcaggtatgggcaccactg

SEQ ID NO: 2006015 - DNA, 25 bp, Homo sapien
catgtttacagcaggcctgatgatg

SEQ ID NO: 2006016 - DNA, 25 bp, Homo sapien
aatggctgcaaagtgaagaactttc

SEQ ID NO: 2006017 - DNA, 25 bp, Homo sapien
cattccgatcacacaaaactttgac

SEQ ID NO: 2006018 - DNA, 25 bp, Homo sapien
aagaactttcttgattgttggcagc

SEQ ID NO: 2006019 - DNA, 25 bp, Homo sapien
gatttcgagtgtcctttgacaaagg

SEQ ID NO: 2006020 - DNA, 25 bp, Homo sapien
ggtccttgcgggttgttcaatctcc

SEQ ID NO: 2006021 - DNA, 25 bp, Homo sapien
gggtacctagcatacctgctccagc

SEQ ID NO: 2006022 - DNA, 25 bp, Homo sapien
catttcttcttagtgtcagccacca

SEQ ID NO: 2006023 - DNA, 25 bp, Homo sapien
ccaagcagcttataacatcagggca

SEQ ID NO: 2006024 - DNA, 25 bp, Homo sapien
ttccaaactgaagcaaagagggttg

SEQ ID NO: 2006025 - DNA, 25 bp, Homo sapien
caaatgcgctgggagctatgaagct

SEQ ID NO: 2006026 - DNA, 25 bp, Homo sapien
tgaaggaagcaatacataggcaggg

SEQ ID NO: 2006027 - DNA, 25 bp, Homo sapien
tagcaggtctcagttgggaaatatc

SEQ ID NO: 2006028 - DNA, 25 bp, Homo sapien
gcaatagtttgagttctcagaatct

SEQ ID NO: 2006029 - DNA, 25 bp, Homo sapien
ctgcctcttacatgtcccttggccc

SEQ ID NO: 2006030 - DNA, 25 bp, Homo sapien
tgcctcttacatgtcccttggccct

SEQ ID NO: 2006031 - DNA, 25 bp, Homo sapien
tcaaggtgtgaacatggatgatgtt

SEQ ID NO: 2006032 - DNA, 25 bp, Homo sapien
ggactggcaaatgccattggtcccc

SEQ ID NO: 2006033 - DNA, 25 bp, Homo sapien
gaatgtgagtattctggactggcaa

SEQ ID NO: 2006034 - DNA, 25 bp, Homo sapien
tgatgttttccaagaatgtgagtat

SEQ ID NO: 2006035 - DNA, 25 bp, Homo sapien
ccccagtggtacagcgttttccctg

SEQ ID NO: 2006036 - DNA, 25 bp, Homo sapien
tcaccacaaatagggttttcaatgc

SEQ ID NO: 2006037 - DNA, 25 bp, Homo sapien
ccttctcgaggctaaaacagggcct

SEQ ID NO: 2006038 - DNA, 25 bp, Homo sapien
tccatatcagagataggctgacccc

SEQ ID NO: 2006039 - DNA, 25 bp, Homo sapien
gacatagtcaacagtcccgctctgg

SEQ ID NO: 2006040 - DNA, 25 bp, Homo sapien
gaactggctatgctacatgtcttca

SEQ ID NO: 2006041 - DNA, 25 bp, Homo sapien
ctagaatgaactggctatgctacat

SEQ ID NO: 2006042 - DNA, 25 bp, Homo sapien
gctatgctacatgtcttcataaaag

SEQ ID NO: 2006043 - DNA, 25 bp, Homo sapien
gaatgaactggctatgctacatgtc

SEQ ID NO: 2006044 - DNA, 25 bp, Homo sapien
tcccctgttaagagaacttgacctc

SEQ ID NO: 2006045 - DNA, 25 bp, Homo sapien
caagtggttggaacttgccatccct

SEQ ID NO: 2006046 - DNA, 25 bp, Homo sapien
tggttggaacttgccatccctgccc

SEQ ID NO: 2006047 - DNA, 25 bp, Homo sapien
aatcgttctcacatagagttccaga

SEQ ID NO: 2006048 - DNA, 25 bp, Homo sapien
ctgtctgctcccttcccacctcccc

SEQ ID NO: 2006049 - DNA, 25 bp, Homo sapien
tgtctgctcccttcccacctcccct

SEQ ID NO: 2006050 - DNA, 25 bp, Homo sapien
ctgctcccttcccacctcccctcac

SEQ ID NO: 2006051 - DNA, 25 bp, Homo sapien
gtctgctcccttcccacctcccctc

SEQ ID NO: 2006052 - DNA, 25 bp, Homo sapien
cagagaaactacatactggtataga

SEQ ID NO: 2006053 - DNA, 25 bp, Homo sapien
agttggagaaacttattatggctgc

SEQ ID NO: 2006054 - DNA, 25 bp, Homo sapien
ttcctggaccacaccaagcaactgg

SEQ ID NO: 2006055 - DNA, 25 bp, Homo sapien
ccagggtgaagcaataacgctgttc

SEQ ID NO: 2006056 - DNA, 25 bp, Homo sapien
ccttccacaaatcatcgctgttcgg

SEQ ID NO: 2006057 - DNA, 25 bp, Homo sapien
cactcgagagcagggtctgcctact

SEQ ID NO: 2006058 - DNA, 25 bp, Homo sapien
tgcctactggttatcaacgtccttc

SEQ ID NO: 2006059 - DNA, 25 bp, Homo sapien
ttgtgcactcgagagcagggtctgc

SEQ ID NO: 2006060 - DNA, 25 bp, Homo sapien
tgctgtgttgcattcggacagtgct

SEQ ID NO: 2006061 - DNA, 25 bp, Homo sapien
cccatctgctgtgttgcattcggac

SEQ ID NO: 2006062 - DNA, 25 bp, Homo sapien
tgcttaaggatgaggaaggcctgat

SEQ ID NO: 2006063 - DNA, 25 bp, Homo sapien
cattcggacagtgcttaaggatgag

SEQ ID NO: 2006064 - DNA, 25 bp, Homo sapien
atctttggttcagtggtctcgttac

SEQ ID NO: 2006065 - DNA, 25 bp, Homo sapien
ccccatctttggttcagtggtctcg

SEQ ID NO: 2006066 - DNA, 25 bp, Homo sapien
ccatctttggttcagtggtctcgtt

SEQ ID NO: 2006067 - DNA, 25 bp, Homo sapien
tctccccatctttggttcagtggtc

SEQ ID NO: 2006068 - DNA, 25 bp, Homo sapien
tgcccggcagggatgctgcattttc

SEQ ID NO: 2006069 - DNA, 25 bp, Homo sapien
gtcactgctcgccatgatgtcccat

SEQ ID NO: 2006070 - DNA, 25 bp, Homo sapien
gctcgccatgatgtcccataggagg

SEQ ID NO: 2006071 - DNA, 25 bp, Homo sapien
tttctccatccgtcactgctcgcca

SEQ ID NO: 2006072 - DNA, 25 bp, Homo sapien
tattgcggctgtgaggccagtgtcc

SEQ ID NO: 2006073 - DNA, 25 bp, Homo sapien
ttaaaatgtaatctgtgccggcccc

SEQ ID NO: 2006074 - DNA, 25 bp, Homo sapien
gaaaacgaagctgcatattgcggct

SEQ ID NO: 2006075 - DNA, 25 bp, Homo sapien
tcagcggctctaagatggatgacca

SEQ ID NO: 2006076 - DNA, 25 bp, Homo sapien
agttcttgaaacctactggaaggtg

SEQ ID NO: 2006077 - DNA, 25 bp, Homo sapien
ctttggaggatttatttatgggcac

SEQ ID NO: 2006078 - DNA, 25 bp, Homo sapien
acctactggaaggtgggcccagcac

SEQ ID NO: 2006079 - DNA, 25 bp, Homo sapien
tatgggcacacagttcttgaaacct

SEQ ID NO: 2006080 - DNA, 25 bp, Homo sapien
ggcagcacattgaatattcacctcc

SEQ ID NO: 2006081 - DNA, 25 bp, Homo sapien
cttcagcgtccatttccctccatcc

SEQ ID NO: 2006082 - DNA, 25 bp, Homo sapien
cagaggcagcacattgaatattcac

SEQ ID NO: 2006083 - DNA, 25 bp, Homo sapien
gaggcagcacattgaatattcacct

SEQ ID NO: 2006084 - DNA, 25 bp, Homo sapien
gtgtcctgtcccagaccctttcaga

SEQ ID NO: 2006085 - DNA, 25 bp, Homo sapien
gggggattcgagcagtttccacact

SEQ ID NO: 2006086 - DNA, 25 bp, Homo sapien
gtcctgtcccagaccctttcagatg

SEQ ID NO: 2006087 - DNA, 25 bp, Homo sapien
ttgggggattcgagcagtttccaca

SEQ ID NO: 2006088 - DNA, 25 bp, Homo sapien
caggcccaactgtcagggaaggcaa

SEQ ID NO: 2006089 - DNA, 25 bp, Homo sapien
catggcaggaactggaagtcgttac

SEQ ID NO: 2006090 - DNA, 25 bp, Homo sapien
tgtccctccaggcaatacctcctga

SEQ ID NO: 2006091 - DNA, 25 bp, Homo sapien
gcaagggccgaagcccaagtcccat

SEQ ID NO: 2006092 - DNA, 25 bp, Homo sapien
ctgcccaatccccacggctaagttt

SEQ ID NO: 2006093 - DNA, 25 bp, Homo sapien
gtcatcctgactctaccagagctgg

SEQ ID NO: 2006094 - DNA, 25 bp, Homo sapien
ccaggagggttctccacatggcccc

SEQ ID NO: 2006095 - DNA, 25 bp, Homo sapien
cacggctaagttttgccccctctgg

SEQ ID NO: 2006096 - DNA, 25 bp, Homo sapien
gggcccctggcaggccgtctgcagg

SEQ ID NO: 2006097 - DNA, 25 bp, Homo sapien
tgggcacacagagccggggggcccc

SEQ ID NO: 2006098 - DNA, 25 bp, Homo sapien
aggccgtctgcaggtctttttccca

SEQ ID NO: 2006099 - DNA, 25 bp, Homo sapien
ggtctttttcccatgcctgcatctg

SEQ ID NO: 2006100 - DNA, 25 bp, Homo sapien
ggaaagcgggatagtgacttgaact

SEQ ID NO: 2006101 - DNA, 25 bp, Homo sapien
ccactcaacaacatgcagcactggg

SEQ ID NO: 2006102 - DNA, 25 bp, Homo sapien
tactaattcgccatgatattttcct

SEQ ID NO: 2006103 - DNA, 25 bp, Homo sapien
acttccaagcaatactgcccactca

SEQ ID NO: 2006104 - DNA, 25 bp, Homo sapien
cctcattgtcaacatttagcttcat

SEQ ID NO: 2006105 - DNA, 25 bp, Homo sapien
cacggccggaacacagagggtatga

SEQ ID NO: 2006106 - DNA, 25 bp, Homo sapien
accagaagtctatgccagggaggat

SEQ ID NO: 2006107 - DNA, 25 bp, Homo sapien
tactggccagagctcaaaatcttga

SEQ ID NO: 2006108 - DNA, 25 bp, Homo sapien
ataaggctccattgacacggcgggc

SEQ ID NO: 2006109 - DNA, 25 bp, Homo sapien
cttgagccctttgagcagggccttc

SEQ ID NO: 2006110 - DNA, 25 bp, Homo sapien
cattgaacagaggtccgtaaagaaa

SEQ ID NO: 2006111 - DNA, 25 bp, Homo sapien
tggtgggactcatgagaacccctca

SEQ ID NO: 2006112 - DNA, 25 bp, Homo sapien
aagaaaagaacttgagccctttgag

SEQ ID NO: 2006113 - DNA, 25 bp, Homo sapien
gtccatggtactgatattagcaaaa

SEQ ID NO: 2006114 - DNA, 25 bp, Homo sapien
tgtccatggtactgatattagcaaa

SEQ ID NO: 2006115 - DNA, 25 bp, Homo sapien
tttggctctcgtttcagccactttg

SEQ ID NO: 2006116 - DNA, 25 bp, Homo sapien
tcgtttcagccactttgcagaattg

SEQ ID NO: 2006117 - DNA, 25 bp, Homo sapien
gagctttccctgctggcctgcattc

SEQ ID NO: 2006118 - DNA, 25 bp, Homo sapien
cattgctccttctacactgccagcc

SEQ ID NO: 2006119 - DNA, 25 bp, Homo sapien
agccagagctttccctgctggcctg

SEQ ID NO: 2006120 - DNA, 25 bp, Homo sapien
agccagccagagctttccctgctgg

SEQ ID NO: 2006121 - DNA, 25 bp, Homo sapien
ctggctggttggcaaactggaaaac

SEQ ID NO: 2006122 - DNA, 25 bp, Homo sapien
ggcctggctggttggcaaactggaa

SEQ ID NO: 2006123 - DNA, 25 bp, Homo sapien
ctggttggcaaactggaaaacctga

SEQ ID NO: 2006124 - DNA, 25 bp, Homo sapien
gctggttggcaaactggaaaacctg

SEQ ID NO: 2006125 - DNA, 25 bp, Homo sapien
cagaagcgctggaagtggggggctg

SEQ ID NO: 2006126 - DNA, 25 bp, Homo sapien
ccagaagcgctggaagtggggggct

SEQ ID NO: 2006127 - DNA, 25 bp, Homo sapien
cccagaagcgctggaagtggggggc

SEQ ID NO: 2006128 - DNA, 25 bp, Homo sapien
gccgctgaccgggctcaggccacgc

SEQ ID NO: 2006129 - DNA, 25 bp, Homo sapien
tcaggccacgctcagcaacgcacat

SEQ ID NO: 2006130 - DNA, 25 bp, Homo sapien
cgcccggccgctgaccgggctcagg

SEQ ID NO: 2006131 - DNA, 25 bp, Homo sapien
gctgaccgggctcaggccacgctca

SEQ ID NO: 2006132 - DNA, 25 bp, Homo sapien
agagaaggctctgcgacgtggcttc

SEQ ID NO: 2006133 - DNA, 25 bp, Homo sapien
tctttgctgggttgcgcttccgggt

SEQ ID NO: 2006134 - DNA, 25 bp, Homo sapien
aggctctgcgacgtggcttccctgg

SEQ ID NO: 2006135 - DNA, 25 bp, Homo sapien
cccaggggtgaacgacaggctcttt

SEQ ID NO: 2006136 - DNA, 25 bp, Homo sapien
gggtgcccggtttgcattcagactt

SEQ ID NO: 2006137 - DNA, 25 bp, Homo sapien
aaggagcttctaatccaatcatggg

SEQ ID NO: 2006138 - DNA, 25 bp, Homo sapien
gaccatggccctgattaaatccaac

SEQ ID NO: 2006139 - DNA, 25 bp, Homo sapien
gatccccctattgcatttggaccat

SEQ ID NO: 2006140 - DNA, 25 bp, Homo sapien
tagtgagtgaagtcaacctgcaggg

SEQ ID NO: 2006141 - DNA, 25 bp, Homo sapien
tgagtgaagtcaacctgcagggtga

SEQ ID NO: 2006142 - DNA, 25 bp, Homo sapien
tgaagtcaacctgcagggtgacaca

SEQ ID NO: 2006143 - DNA, 25 bp, Homo sapien
gccaactagtgagtgaagtcaacct

SEQ ID NO: 2006144 - DNA, 25 bp, Homo sapien
gcacaatgtaatggacagcaggcag

SEQ ID NO: 2006145 - DNA, 25 bp, Homo sapien
aaattgtggcctcgcagatccagac

SEQ ID NO: 2006146 - DNA, 25 bp, Homo sapien
tgccacccaaatgtgaatgaacctg

SEQ ID NO: 2006147 - DNA, 25 bp, Homo sapien
gatgctgggaatttgaagagaaagc

SEQ ID NO: 2006148 - DNA, 25 bp, Homo sapien
aagaacatggatacttgccggtgtc

SEQ ID NO: 2006149 - DNA, 25 bp, Homo sapien
tggcatgcccctcagaacaagaaca

SEQ ID NO: 2006150 - DNA, 25 bp, Homo sapien
caggttgatgcacttgatcctccaa

SEQ ID NO: 2006151 - DNA, 25 bp, Homo sapien
caagtagataaaatgcccagaaggc

SEQ ID NO: 2006152 - DNA, 25 bp, Homo sapien
cggaacctgattttatgtggtggct

SEQ ID NO: 2006153 - DNA, 25 bp, Homo sapien
taccggaacctgattttatgtggtg

SEQ ID NO: 2006154 - DNA, 25 bp, Homo sapien
tcagcaataccggaacctgatttta

SEQ ID NO: 2006155 - DNA, 25 bp, Homo sapien
gcaataccggaacctgattttatgt

SEQ ID NO: 2006156 - DNA, 25 bp, Homo sapien
ctgtattaaggcaaggtgaagctct

SEQ ID NO: 2006157 - DNA, 25 bp, Homo sapien
ttcccccggacgctgtattaaggca

SEQ ID NO: 2006158 - DNA, 25 bp, Homo sapien
ccccggacgctgtattaaggcaagg

SEQ ID NO: 2006159 - DNA, 25 bp, Homo sapien
gacgctgtattaaggcaaggtgaag

SEQ ID NO: 2006160 - DNA, 25 bp, Homo sapien
taatcttcctttaggggctcctagc

SEQ ID NO: 2006161 - DNA, 25 bp, Homo sapien
cctttaggggctcctagcaactgtc

SEQ ID NO: 2006162 - DNA, 25 bp, Homo sapien
cacctcgtcctaatcttcctttagg

SEQ ID NO: 2006163 - DNA, 25 bp, Homo sapien
ttcacctcgtcctaatcttccttta

SEQ ID NO: 2006164 - DNA, 25 bp, Homo sapien
atcataccagaagactgtatatctg

SEQ ID NO: 2006165 - DNA, 25 bp, Homo sapien
cataccagaagactgtatatctgcc

SEQ ID NO: 2006166 - DNA, 25 bp, Homo sapien
tcataccagaagactgtatatctgc

SEQ ID NO: 2006167 - DNA, 25 bp, Homo sapien
aatcataccagaagactgtatatct

SEQ ID NO: 2006168 - DNA, 25 bp, Homo sapien
ctagaatgtgtagaggtggctaagg

SEQ ID NO: 2006169 - DNA, 25 bp, Homo sapien
ccagaccgcggaggttgtggaagac

SEQ ID NO: 2006170 - DNA, 25 bp, Homo sapien
ggcagcaaccgcctgctggattcca

SEQ ID NO: 2006171 - DNA, 25 bp, Homo sapien
ggcccacaaggaaaccgattatagc

SEQ ID NO: 2006172 - DNA, 25 bp, Homo sapien
gctgccgccgccgccaccgtccgcc

SEQ ID NO: 2006173 - DNA, 25 bp, Homo sapien
gtcgaggccgggcccgcaccgccgc

SEQ ID NO: 2006174 - DNA, 25 bp, Homo sapien
tgccgccgccgccaccgtccgccat

SEQ ID NO: 2006175 - DNA, 25 bp, Homo sapien
aggccgggcccgcaccgccgctgcc

SEQ ID NO: 2006176 - DNA, 25 bp, Homo sapien
cagggggcaacgaggccgggttgat

SEQ ID NO: 2006177 - DNA, 25 bp, Homo sapien
gaggccgggttgatggggccgccgc

SEQ ID NO: 2006178 - DNA, 25 bp, Homo sapien
ctgagggtcgccagggggcaacgag

SEQ ID NO: 2006179 - DNA, 25 bp, Homo sapien
cgaggccgggttgatggggccgccg

SEQ ID NO: 2006180 - DNA, 25 bp, Homo sapien
acgtcagccttgcagtcccggcgga

SEQ ID NO: 2006181 - DNA, 25 bp, Homo sapien
tgcctcagaccatcgtgcagttggt

SEQ ID NO: 2006182 - DNA, 25 bp, Homo sapien
ttggttgtcgtttgctggaggattc

SEQ ID NO: 2006183 - DNA, 25 bp, Homo sapien
cgacacaaaattatccgctttctgg

SEQ ID NO: 2006184 - DNA, 25 bp, Homo sapien
gaagcattcttggacagagagtctg

SEQ ID NO: 2006185 - DNA, 25 bp, Homo sapien
gggtgccacggtcaactttctctct

SEQ ID NO: 2006186 - DNA, 25 bp, Homo sapien
tcttgagctcagtgatgaacttggc

SEQ ID NO: 2006187 - DNA, 25 bp, Homo sapien
tgtttcaggacaatcctgggtcgcg

SEQ ID NO: 2006188 - DNA, 25 bp, Homo sapien
tattgcacggtccatgccctaggag

SEQ ID NO: 2006189 - DNA, 25 bp, Homo sapien
caaactcatggtgggaacgggaagc

SEQ ID NO: 2006190 - DNA, 25 bp, Homo sapien
caagtgattagtgccgatgtggccc

SEQ ID NO: 2006191 - DNA, 25 bp, Homo sapien
tcctgcttagacgatgtgtggctcc

SEQ ID NO: 2006192 - DNA, 25 bp, Homo sapien
ttatttagcagggaccagtgggcag

SEQ ID NO: 2006193 - DNA, 25 bp, Homo sapien
cgcacgcacgtaatgagctctctca

SEQ ID NO: 2006194 - DNA, 25 bp, Homo sapien
atgcacgcacgcacgtaatgagctc

SEQ ID NO: 2006195 - DNA, 25 bp, Homo sapien
gggaattatttagcagggaccagtg

SEQ ID NO: 2006196 - DNA, 25 bp, Homo sapien
aaagatctcaagagagctcacttac

SEQ ID NO: 2006197 - DNA, 25 bp, Homo sapien
caagcactgtcatgtggtaggagga

SEQ ID NO: 2006198 - DNA, 25 bp, Homo sapien
catgatactggcatcggctcggcct

SEQ ID NO: 2006199 - DNA, 25 bp, Homo sapien
gaacagcaccaagtaatccttttta

SEQ ID NO: 2006200 - DNA, 25 bp, Homo sapien
gcaggagtcttctgcatcttcttca

SEQ ID NO: 2006201 - DNA, 25 bp, Homo sapien
caggagtcttctgcatcttcttcat

SEQ ID NO: 2006202 - DNA, 25 bp, Homo sapien
ctgcaggagtcttctgcatcttctt

SEQ ID NO: 2006203 - DNA, 25 bp, Homo sapien
tgcaggagtcttctgcatcttcttc

SEQ ID NO: 2006204 - DNA, 25 bp, Homo sapien
cttccttttatagatccgtgaatac

SEQ ID NO: 2006205 - DNA, 25 bp, Homo sapien
ccttttatagatccgtgaatacatc

SEQ ID NO: 2006206 - DNA, 25 bp, Homo sapien
tgcatatttaaagggcacctgtttt

SEQ ID NO: 2006207 - DNA, 25 bp, Homo sapien
catctccatcttcgttccattccca

SEQ ID NO: 2006208 - DNA, 25 bp, Homo sapien
cagtggagcaacaaggaggagcaca

SEQ ID NO: 2006209 - DNA, 25 bp, Homo sapien
tgaggcagtggagcaacaaggagga

SEQ ID NO: 2006210 - DNA, 25 bp, Homo sapien
aacaaggaggagcacatggcaagag

SEQ ID NO: 2006211 - DNA, 25 bp, Homo sapien
tggcaagagctgaatccatggccat

SEQ ID NO: 2006212 - DNA, 25 bp, Homo sapien
gcctgacacccagacacaatggtga

SEQ ID NO: 2006213 - DNA, 25 bp, Homo sapien
taccaactgattttgcccagcctga

SEQ ID NO: 2006214 - DNA, 25 bp, Homo sapien
ttctcaccaggtctataccaactga

SEQ ID NO: 2006215 - DNA, 25 bp, Homo sapien
tttctcccgctcagaagtgtcactg

SEQ ID NO: 2006216 - DNA, 25 bp, Homo sapien
gtcccatatttcactgaatgctcct

SEQ ID NO: 2006217 - DNA, 25 bp, Homo sapien
ctgtcccatatttcactgaatgctc

SEQ ID NO: 2006218 - DNA, 25 bp, Homo sapien
ttcccaggggtttgcatagcaagag

SEQ ID NO: 2006219 - DNA, 25 bp, Homo sapien
ctcttctacaattcccaggggtttg

SEQ ID NO: 2006220 - DNA, 25 bp, Homo sapien
gaacagccctggtcttgatagaaga

SEQ ID NO: 2006221 - DNA, 25 bp, Homo sapien
gaggactatcccagaacagccctgg

SEQ ID NO: 2006222 - DNA, 25 bp, Homo sapien
catgagatttgtgaccgtcagcagc

SEQ ID NO: 2006223 - DNA, 25 bp, Homo sapien
ttatacctcttccagccagaggact

SEQ ID NO: 2006224 - DNA, 25 bp, Homo sapien
cctgggtgtatttggtccatggcat

SEQ ID NO: 2006225 - DNA, 25 bp, Homo sapien
ttcctgggtgtatttggtccatggc

SEQ ID NO: 2006226 - DNA, 25 bp, Homo sapien
ggtgtatttggtccatggcatccct

SEQ ID NO: 2006227 - DNA, 25 bp, Homo sapien
tatttggtccatggcatccctctct

SEQ ID NO: 2006228 - DNA, 25 bp, Homo sapien
ctggaagtagaaattagatgtccta

SEQ ID NO: 2006229 - DNA, 25 bp, Homo sapien
cgaagcttagcattgggtcctgagt

SEQ ID NO: 2006230 - DNA, 25 bp, Homo sapien
cagaagggaagaacttgacaccacg

SEQ ID NO: 2006231 - DNA, 25 bp, Homo sapien
aaaatgccagcatgttgcagaaggg

SEQ ID NO: 2006232 - DNA, 25 bp, Homo sapien
tcttctttgcggtagacctctggat

SEQ ID NO: 2006233 - DNA, 25 bp, Homo sapien
tctttgcggtagacctctggatgct

SEQ ID NO: 2006234 - DNA, 25 bp, Homo sapien
tgcggtagacctctggatgctcact

SEQ ID NO: 2006235 - DNA, 25 bp, Homo sapien
agtactatcttctttgcggtagacc

SEQ ID NO: 2006236 - DNA, 25 bp, Homo sapien
tgacaacaatgtccccatgacatgc

SEQ ID NO: 2006237 - DNA, 25 bp, Homo sapien
tcagggcggctgacaacaatgtccc

SEQ ID NO: 2006238 - DNA, 25 bp, Homo sapien
acaatgtccccatgacatgctcagc

SEQ ID NO: 2006239 - DNA, 25 bp, Homo sapien
cacaacatccaacatcagggcggct

SEQ ID NO: 2006240 - DNA, 25 bp, Homo sapien
tgcccgcatggccaacagtctgctt

SEQ ID NO: 2006241 - DNA, 25 bp, Homo sapien
tccaccagtcccaaactgatgttca

SEQ ID NO: 2006242 - DNA, 25 bp, Homo sapien
cagtctgcttggctgcaacttatct

SEQ ID NO: 2006243 - DNA, 25 bp, Homo sapien
ggacaggggtctgcccatcagctgc

SEQ ID NO: 2006244 - DNA, 25 bp, Homo sapien
ttagcaagtccatgccaagagaatc

SEQ ID NO: 2006245 - DNA, 25 bp, Homo sapien
aacaggtctgatccatatcgttcct

SEQ ID NO: 2006246 - DNA, 25 bp, Homo sapien
gatcacaaagatagccatggactaa

SEQ ID NO: 2006247 - DNA, 25 bp, Homo sapien
tatcgttcctcttgcactagatcca

SEQ ID NO: 2006248 - DNA, 25 bp, Homo sapien
ttcttttcctgggacgccagccaag

SEQ ID NO: 2006249 - DNA, 25 bp, Homo sapien
tccctgggccgtagaatatggagcc

SEQ ID NO: 2006250 - DNA, 25 bp, Homo sapien
gccagccaagcaggtttgattttcc

SEQ ID NO: 2006251 - DNA, 25 bp, Homo sapien
gagtgagggtcgcaaagcctctgcc

SEQ ID NO: 2006252 - DNA, 25 bp, Homo sapien
gcagctgatgggcagacccctgtcc

SEQ ID NO: 2006253 - DNA, 25 bp, Homo sapien
aagcagactgttggccatgcgggca

SEQ ID NO: 2006254 - DNA, 25 bp, Homo sapien
ccatcaacatcagtttgggactggc

SEQ ID NO: 2006255 - DNA, 25 bp, Homo sapien
aaatgctgatgtttggccatcaaca

SEQ ID NO: 2006256 - DNA, 25 bp, Homo sapien
gaaagcaaaaggctgatatggccaa

SEQ ID NO: 2006257 - DNA, 25 bp, Homo sapien
ctgaatgtgaaagcaaaaggctgat

SEQ ID NO: 2006258 - DNA, 25 bp, Homo sapien
gcaaaaggctgatatggccaaagtc

SEQ ID NO: 2006259 - DNA, 25 bp, Homo sapien
aaaggctgatatggccaaagtcttt

SEQ ID NO: 2006260 - DNA, 25 bp, Homo sapien
cactgacccctgtgtcatagctgcc

SEQ ID NO: 2006261 - DNA, 25 bp, Homo sapien
gcactgacccctgtgtcatagctgc

SEQ ID NO: 2006262 - DNA, 25 bp, Homo sapien
gggcactgacccctgtgtcatagct

SEQ ID NO: 2006263 - DNA, 25 bp, Homo sapien
ctgacccctgtgtcatagctgcccc

SEQ ID NO: 2006264 - DNA, 25 bp, Homo sapien
ccaagctgaggtgtcaatcaaattt

SEQ ID NO: 2006265 - DNA, 25 bp, Homo sapien
tctctttgaaagagcgtggtggaat

SEQ ID NO: 2006266 - DNA, 25 bp, Homo sapien
cccagagcttccaagctgaggtgtc

SEQ ID NO: 2006267 - DNA, 25 bp, Homo sapien
gcttccaagctgaggtgtcaatcaa

SEQ ID NO: 2006268 - DNA, 25 bp, Homo sapien
aggcagtctcttccacgttctcttt

SEQ ID NO: 2006269 - DNA, 25 bp, Homo sapien
gaaggcagtctcttccacgttctct

SEQ ID NO: 2006270 - DNA, 25 bp, Homo sapien
ccggaaggcagtctcttccacgttc

SEQ ID NO: 2006271 - DNA, 25 bp, Homo sapien
ggaaggcagtctcttccacgttctc

SEQ ID NO: 2006272 - DNA, 25 bp, Homo sapien
tggccaggtagtgcatattccagag

SEQ ID NO: 2006273 - DNA, 25 bp, Homo sapien
ggccaggtagtgcatattccagaga

SEQ ID NO: 2006274 - DNA, 25 bp, Homo sapien
gttctccagtaaaggccatgtcttc

SEQ ID NO: 2006275 - DNA, 25 bp, Homo sapien
gagttctccagtaaaggccatgtct

SEQ ID NO: 2006276 - DNA, 25 bp, Homo sapien
tctccagtaaaggccatgtcttctg

SEQ ID NO: 2006277 - DNA, 25 bp, Homo sapien
tgagttctccagtaaaggccatgtc

SEQ ID NO: 2006278 - DNA, 25 bp, Homo sapien
tttcttcctagactcaccaatctta

SEQ ID NO: 2006279 - DNA, 25 bp, Homo sapien
gctgggtcttgtggttctatccttg

SEQ ID NO: 2006280 - DNA, 25 bp, Homo sapien
ttccgctgggtcttgtggttctatc

SEQ ID NO: 2006281 - DNA, 25 bp, Homo sapien
cttgtggttctatccttgtgacttt

SEQ ID NO: 2006282 - DNA, 25 bp, Homo sapien
gtgacactcttcttggtttccctgc

SEQ ID NO: 2006283 - DNA, 25 bp, Homo sapien
tctcctttggctgatgtgacactct

SEQ ID NO: 2006284 - DNA, 25 bp, Homo sapien
agcaatgacctcagtccatttgagc

SEQ ID NO: 2006285 - DNA, 25 bp, Homo sapien
catcatttggagctgttgaccttct

SEQ ID NO: 2006286 - DNA, 25 bp, Homo sapien
gtcatgttacccaggttcatgatga

SEQ ID NO: 2006287 - DNA, 25 bp, Homo sapien
ttataagaagctgcctagagtggcc

SEQ ID NO: 2006288 - DNA, 25 bp, Homo sapien
gctgcctagagtggccacacaagct

SEQ ID NO: 2006289 - DNA, 25 bp, Homo sapien
acacaagctggtcatgttacccagg

SEQ ID NO: 2006290 - DNA, 25 bp, Homo sapien
gtaggagtgggaggctgtccttctt

SEQ ID NO: 2006291 - DNA, 25 bp, Homo sapien
gagtgggaggctgtccttcttggat

SEQ ID NO: 2006292 - DNA, 25 bp, Homo sapien
tgggaggctgtccttcttggattga

SEQ ID NO: 2006293 - DNA, 25 bp, Homo sapien
ggaggctgtccttcttggattgaac

SEQ ID NO: 2006294 - DNA, 25 bp, Homo sapien
taggatgcatatcgtgccataggag

SEQ ID NO: 2006295 - DNA, 25 bp, Homo sapien
tgctattgacaccacagccctgagg

SEQ ID NO: 2006296 - DNA, 25 bp, Homo sapien
gccataggagtgttttcaatcctgg

SEQ ID NO: 2006297 - DNA, 25 bp, Homo sapien
ggagcagttctgagtgaccaggctt

SEQ ID NO: 2006298 - DNA, 25 bp, Homo sapien
agcagaggtctgtgatttctgcccc

SEQ ID NO: 2006299 - DNA, 25 bp, Homo sapien
ccctcttcttgggtcacgacggtga

SEQ ID NO: 2006300 - DNA, 25 bp, Homo sapien
catccttagtgtgggaaacagttgg

SEQ ID NO: 2006301 - DNA, 25 bp, Homo sapien
ggtcacgacggtgacctcccacgag

SEQ ID NO: 2006302 - DNA, 25 bp, Homo sapien
agaaaaggcttggagagagacagca

SEQ ID NO: 2006303 - DNA, 25 bp, Homo sapien
gatcttcctgagtatagctgaggag

SEQ ID NO: 2006304 - DNA, 25 bp, Homo sapien
gcagcagcgcggtgccctgaacccc

SEQ ID NO: 2006305 - DNA, 25 bp, Homo sapien
gagagaaggcagcagcgcggtgccc

SEQ ID NO: 2006306 - DNA, 25 bp, Homo sapien
atggcttcggtgacaacaatggcag

SEQ ID NO: 2006307 - DNA, 25 bp, Homo sapien
tcatggcttcggtgacaacaatggc

SEQ ID NO: 2006308 - DNA, 25 bp, Homo sapien
ggctgcagacacatcgcccctggca

SEQ ID NO: 2006309 - DNA, 25 bp, Homo sapien
gctgcagacacatcgcccctggcac

SEQ ID NO: 2006310 - DNA, 25 bp, Homo sapien
tgctggccacttggcgcagcattta

SEQ ID NO: 2006311 - DNA, 25 bp, Homo sapien
ggccacttggcgcagcatttagact

SEQ ID NO: 2006312 - DNA, 25 bp, Homo sapien
ctggtggtcatggatccctttcacc

SEQ ID NO: 2006313 - DNA, 25 bp, Homo sapien
tggatccctttcaccctcttggttg

SEQ ID NO: 2006314 - DNA, 25 bp, Homo sapien
gggagagacaagtttccactctgta

SEQ ID NO: 2006315 - DNA, 25 bp, Homo sapien
cctaaggtgtgctcagtcaactgtg

SEQ ID NO: 2006316 - DNA, 25 bp, Homo sapien
taatatttcaacttctcctaaggtg

SEQ ID NO: 2006317 - DNA, 25 bp, Homo sapien
tccttgggaggttcatagcagccct

SEQ ID NO: 2006318 - DNA, 25 bp, Homo sapien
ggctcagctgacagcagtagcttga

SEQ ID NO: 2006319 - DNA, 25 bp, Homo sapien
tcagctgacagcagtagcttgatgt

SEQ ID NO: 2006320 - DNA, 25 bp, Homo sapien
agctgacagcagtagcttgatgtga

SEQ ID NO: 2006321 - DNA, 25 bp, Homo sapien
tgggctcagctgacagcagtagctt

SEQ ID NO: 2006322 - DNA, 25 bp, Homo sapien
atgggtggctgatacaggtgtacat

SEQ ID NO: 2006323 - DNA, 25 bp, Homo sapien
tatgggtggctgatacaggtgtaca

SEQ ID NO: 2006324 - DNA, 25 bp, Homo sapien
ctggtgggaacagagtatgggtggc

SEQ ID NO: 2006325 - DNA, 25 bp, Homo sapien
aacagagtatgggtggctgatacag

SEQ ID NO: 2006326 - DNA, 25 bp, Homo sapien
ctcatgcaccgacaatctgaagacc

SEQ ID NO: 2006327 - DNA, 25 bp, Homo sapien
ggactgtgctcttgaaaggctcctt

SEQ ID NO: 2006328 - DNA, 25 bp, Homo sapien
ctggactgtgctcttgaaaggctcc

SEQ ID NO: 2006329 - DNA, 25 bp, Homo sapien
tgctgctgctactcatgcaccgaca

SEQ ID NO: 2006330 - DNA, 25 bp, Homo sapien
cacatagttcactgatgcaaatcct

SEQ ID NO: 2006331 - DNA, 25 bp, Homo sapien
agccttttgctcattccagtaacca

SEQ ID NO: 2006332 - DNA, 25 bp, Homo sapien
tgctcattccagtaaccacacatac

SEQ ID NO: 2006333 - DNA, 25 bp, Homo sapien
ttagaccagccttttgctcattcca

SEQ ID NO: 2006334 - DNA, 25 bp, Homo sapien
gaccagccttttgctcattccagta

SEQ ID NO: 2006335 - DNA, 25 bp, Homo sapien
cataacacaccgtaggaggaagagg

SEQ ID NO: 2006336 - DNA, 25 bp, Homo sapien
taggtagcatgtggagacccaacaa

SEQ ID NO: 2006337 - DNA, 25 bp, Homo sapien
aaggcaacctcggtggattccacag

SEQ ID NO: 2006338 - DNA, 25 bp, Homo sapien
catcgggagttggtgcataacacac

SEQ ID NO: 2006339 - DNA, 25 bp, Homo sapien
ggacatcggcttaaactctgggttc

SEQ ID NO: 2006340 - DNA, 25 bp, Homo sapien
cctgcaagggtcatagacaagttcc

SEQ ID NO: 2006341 - DNA, 25 bp, Homo sapien
tggagaggactcgtgtgactaactt

SEQ ID NO: 2006342 - DNA, 25 bp, Homo sapien
acaagttccccaaaccatcagggtg

SEQ ID NO: 2006343 - DNA, 25 bp, Homo sapien
aatgtggacacaaactaccctaggc

SEQ ID NO: 2006344 - DNA, 25 bp, Homo sapien
taccctaggcatgagcattgggttg

SEQ ID NO: 2006345 - DNA, 25 bp, Homo sapien
cattgggttgacattggttggcttc

SEQ ID NO: 2006346 - DNA, 25 bp, Homo sapien
cctcaatgtggacacaaactaccct

SEQ ID NO: 2006347 - DNA, 25 bp, Homo sapien
agatctgacgttgccaaaagctggt

SEQ ID NO: 2006348 - DNA, 25 bp, Homo sapien
ctcagatctgacgttgccaaaagct

SEQ ID NO: 2006349 - DNA, 25 bp, Homo sapien
catgctcagatctgacgttgccaaa

SEQ ID NO: 2006350 - DNA, 25 bp, Homo sapien
tgctcagatctgacgttgccaaaag

SEQ ID NO: 2006351 - DNA, 25 bp, Homo sapien
tctgtccccacaacaagctatggct

SEQ ID NO: 2006352 - DNA, 25 bp, Homo sapien
acaacaagctatggctttgcttcta

SEQ ID NO: 2006353 - DNA, 25 bp, Homo sapien
tgtccccacaacaagctatggcttt

SEQ ID NO: 2006354 - DNA, 25 bp, Homo sapien
cccacaacaagctatggctttgctt

SEQ ID NO: 2006355 - DNA, 25 bp, Homo sapien
tggcttcccaggatccaaggcactc

SEQ ID NO: 2006356 - DNA, 25 bp, Homo sapien
caaggcagcctttgctcctcagcct

SEQ ID NO: 2006357 - DNA, 25 bp, Homo sapien
caaacgacctgctgactgcaggtta

SEQ ID NO: 2006358 - DNA, 25 bp, Homo sapien
aggcactccaggccgctctctgatg

SEQ ID NO: 2006359 - DNA, 25 bp, Homo sapien
cgcttttgttctgagtaaaaccaag

SEQ ID NO: 2006360 - DNA, 25 bp, Homo sapien
tcgcttttgttctgagtaaaaccaa

SEQ ID NO: 2006361 - DNA, 25 bp, Homo sapien
tcacagactttatgggtgaagtcca

SEQ ID NO: 2006362 - DNA, 25 bp, Homo sapien
gccaatgcctgtagaccgttcctgt

SEQ ID NO: 2006363 - DNA, 25 bp, Homo sapien
tcaggcaaggagacttcacagactt

SEQ ID NO: 2006364 - DNA, 25 bp, Homo sapien
ttgaatcccttaaccaagccaatgc

SEQ ID NO: 2006365 - DNA, 25 bp, Homo sapien
gaatggaaagtgtgaattaagggca

SEQ ID NO: 2006366 - DNA, 25 bp, Homo sapien
tggaaagtgtgaattaagggcagtt

SEQ ID NO: 2006367 - DNA, 25 bp, Homo sapien
gaaagtgtgaattaagggcagtttc

SEQ ID NO: 2006368 - DNA, 25 bp, Homo sapien
aagtgtgaattaagggcagtttcag

SEQ ID NO: 2006369 - DNA, 25 bp, Homo sapien
aacttgtttgtggttcccagttgca

SEQ ID NO: 2006370 - DNA, 25 bp, Homo sapien
tctcctgattcttgttgaacttgtt

SEQ ID NO: 2006371 - DNA, 25 bp, Homo sapien
tcaaaagcatgggtgggagtacact

SEQ ID NO: 2006372 - DNA, 25 bp, Homo sapien
actagaatcccattaggtgctgcaa

SEQ ID NO: 2006373 - DNA, 25 bp, Homo sapien
tggctatccatgtgctcagccctga

SEQ ID NO: 2006374 - DNA, 25 bp, Homo sapien
agccctgatccagacaacagacgat

SEQ ID NO: 2006375 - DNA, 25 bp, Homo sapien
ttcttccatcgcactcctgagcaag

SEQ ID NO: 2006376 - DNA, 25 bp, Homo sapien
gactgaggcaaacctggcacatcag

SEQ ID NO: 2006377 - DNA, 25 bp, Homo sapien
taattaccacaatatgggcaacctg

SEQ ID NO: 2006378 - DNA, 25 bp, Homo sapien
ccacaatatgggcaacctgcttttg

SEQ ID NO: 2006379 - DNA, 25 bp, Homo sapien
aatatgggcaacctgcttttgctgg

SEQ ID NO: 2006380 - DNA, 25 bp, Homo sapien
ttaccacaatatgggcaacctgctt

SEQ ID NO: 2006381 - DNA, 25 bp, Homo sapien
cctgggcttccttcatcaatgccat

SEQ ID NO: 2006382 - DNA, 25 bp, Homo sapien
ctctagccccggcaagcatgtcaga

SEQ ID NO: 2006383 - DNA, 25 bp, Homo sapien
tgcttgtgggaagcgctgcaccaga

SEQ ID NO: 2006384 - DNA, 25 bp, Homo sapien
ggccgaggagacaggccaactctag

SEQ ID NO: 2006385 - DNA, 25 bp, Homo sapien
tgttcagcctgaagggccacaggcc

SEQ ID NO: 2006386 - DNA, 25 bp, Homo sapien
tcaggacctagtgtggcccttgtgc

SEQ ID NO: 2006387 - DNA, 25 bp, Homo sapien
ctttaggatgatgccacatgtggta

SEQ ID NO: 2006388 - DNA, 25 bp, Homo sapien
aaaggagagaccacttaaatgaggt

SEQ ID NO: 2006389 - DNA, 25 bp, Homo sapien
cactcacctcgggatttcttcagga

SEQ ID NO: 2006390 - DNA, 25 bp, Homo sapien
tgggatcaacccctggaaaacagcc

SEQ ID NO: 2006391 - DNA, 25 bp, Homo sapien
aactttgcctgcccaggacatttcc

SEQ ID NO: 2006392 - DNA, 25 bp, Homo sapien
cttgcacatgtccagaaaggagccg

SEQ ID NO: 2006393 - DNA, 25 bp, Homo sapien
acatcacagggtggactgaagcccc

SEQ ID NO: 2006394 - DNA, 25 bp, Homo sapien
tgcatgtccctccaaaagctgttcc

SEQ ID NO: 2006395 - DNA, 25 bp, Homo sapien
gttccaatgattcagcctgaacaca

SEQ ID NO: 2006396 - DNA, 25 bp, Homo sapien
gactggactgtcagggtaatacatg

SEQ ID NO: 2006397 - DNA, 25 bp, Homo sapien
tgacacagtcatccagatgagtggg

SEQ ID NO: 2006398 - DNA, 25 bp, Homo sapien
gatggaggtaactgatcttcccggg

SEQ ID NO: 2006399 - DNA, 25 bp, Homo sapien
tctgtacttcggtttggagaagggc

SEQ ID NO: 2006400 - DNA, 25 bp, Homo sapien
tgaagtgagcctttctgctggtgga

SEQ ID NO: 2006401 - DNA, 25 bp, Homo sapien
tcctaattgcaaccagagtagaagg

SEQ ID NO: 2006402 - DNA, 25 bp, Homo sapien
gaagacctgatgagctcccttggga

SEQ ID NO: 2006403 - DNA, 25 bp, Homo sapien
tcccttgggaaacatatctgtgtgg

SEQ ID NO: 2006404 - DNA, 25 bp, Homo sapien
cactttgcacccactagagactttt

SEQ ID NO: 2006405 - DNA, 25 bp, Homo sapien
gcttgcatgcctggatatgatgaac

SEQ ID NO: 2006406 - DNA, 25 bp, Homo sapien
gaaattggcgtttgagttctgataa

SEQ ID NO: 2006407 - DNA, 25 bp, Homo sapien
cttgtaggctttcatggacctaatg

SEQ ID NO: 2006408 - DNA, 25 bp, Homo sapien
agcttcggcagagcaaggcttgtct

SEQ ID NO: 2006409 - DNA, 25 bp, Homo sapien
gagattcttccaagatggttatgac

SEQ ID NO: 2006410 - DNA, 25 bp, Homo sapien
gaatttgccagaatgactcccctgt

SEQ ID NO: 2006411 - DNA, 25 bp, Homo sapien
gacaatgtgcttgcccctgacttga

SEQ ID NO: 2006412 - DNA, 25 bp, Homo sapien
gaagctccaaacagcaactgggcct

SEQ ID NO: 2006413 - DNA, 25 bp, Homo sapien
cctaaagggtgggtagtgcctagca

SEQ ID NO: 2006414 - DNA, 25 bp, Homo sapien
gggacacgtagctgatgagcgataa

SEQ ID NO: 2006415 - DNA, 25 bp, Homo sapien
cggaatcccgcgtggaacatgtaca

SEQ ID NO: 2006416 - DNA, 25 bp, Homo sapien
gcgacccgggccattttgcagtttc

SEQ ID NO: 2006417 - DNA, 25 bp, Homo sapien
cgataaaatcagcagggcgacgctg

SEQ ID NO: 2006418 - DNA, 25 bp, Homo sapien
catcaaccaaattcccgagggcact

SEQ ID NO: 2006419 - DNA, 25 bp, Homo sapien
ggaaggaccgcgcagttatctggcc

SEQ ID NO: 2006420 - DNA, 25 bp, Homo sapien
acatcgatttggacagcggcttcta

SEQ ID NO: 2006421 - DNA, 25 bp, Homo sapien
ttatctggcccaaagagtctcggag

SEQ ID NO: 2006422 - DNA, 25 bp, Homo sapien
caccctcaccctcctgaaagcctcc

SEQ ID NO: 2006423 - DNA, 25 bp, Homo sapien
tcaccctcctgaaagcctcccccaa

SEQ ID NO: 2006424 - DNA, 25 bp, Homo sapien
ccatttctgaaatgagggaagggat

SEQ ID NO: 2006425 - DNA, 25 bp, Homo sapien
ccaacccccatttctgaaatgaggg

SEQ ID NO: 2006426 - DNA, 25 bp, Homo sapien
tcctgagaataaacccgcgtgtcct

SEQ ID NO: 2006427 - DNA, 25 bp, Homo sapien
gggcgctcccctcacgcctgtccat

SEQ ID NO: 2006428 - DNA, 25 bp, Homo sapien
gcccgcggagtctgcggacagggcg

SEQ ID NO: 2006429 - DNA, 25 bp, Homo sapien
ggagtccggcgcctgcgccattaaa

SEQ ID NO: 2006430 - DNA, 25 bp, Homo sapien
tgggcggcccttccgaggctcgctt

SEQ ID NO: 2006431 - DNA, 25 bp, Homo sapien
aattgcagaaatcccggaaagctgg

SEQ ID NO: 2006432 - DNA, 25 bp, Homo sapien
ggtgggcggcccttccgaggctcgc

SEQ ID NO: 2006433 - DNA, 25 bp, Homo sapien
cagggggcgggggaattgcagaaat

SEQ ID NO: 2006434 - DNA, 25 bp, Homo sapien
ccgctcctcggtccaggcgaggctc

SEQ ID NO: 2006435 - DNA, 25 bp, Homo sapien
aggcgaggctcctctgggttcctcg

SEQ ID NO: 2006436 - DNA, 25 bp, Homo sapien
ccaggcgaggctcctctgggttcct

SEQ ID NO: 2006437 - DNA, 25 bp, Homo sapien
tgggttcctcgcctcggtcccagct

SEQ ID NO: 2006438 - DNA, 25 bp, Homo sapien
gaagccgaggtagccattaaagtgc

SEQ ID NO: 2006439 - DNA, 25 bp, Homo sapien
ccgggtgccggagagaccataaaat

SEQ ID NO: 2006440 - DNA, 25 bp, Homo sapien
tagggaaccccatctgcattgtcca

SEQ ID NO: 2006441 - DNA, 25 bp, Homo sapien
taaaatggccgtcatgcggagagca

SEQ ID NO: 2006442 - DNA, 25 bp, Homo sapien
ctttgatgtaaaaacgctgtccgat

SEQ ID NO: 2006443 - DNA, 25 bp, Homo sapien
cgtaatgggcacgaatgacgggtct

SEQ ID NO: 2006444 - DNA, 25 bp, Homo sapien
tctagaaacttcagcgcaaattgtg

SEQ ID NO: 2006445 - DNA, 25 bp, Homo sapien
gctgtccgattaaatttccacttag

SEQ ID NO: 2006446 - DNA, 25 bp, Homo sapien
tgcagggatccaaagaatggccccg

SEQ ID NO: 2006447 - DNA, 25 bp, Homo sapien
tagtgcatcagttgtccaatccgaa

SEQ ID NO: 2006448 - DNA, 25 bp, Homo sapien
tgttacggtcctgaatagtcaagag

SEQ ID NO: 2006449 - DNA, 25 bp, Homo sapien
gacatgttgcattatatttcccggc

SEQ ID NO: 2006450 - DNA, 25 bp, Homo sapien
ggatctcttcacatattgctgatgc

SEQ ID NO: 2006451 - DNA, 25 bp, Homo sapien
tgacagagtcagcttggtgagccct

SEQ ID NO: 2006452 - DNA, 25 bp, Homo sapien
cataagaatacctgtgctcagccgt

SEQ ID NO: 2006453 - DNA, 25 bp, Homo sapien
catgcattcggtacagcagctgaaa

SEQ ID NO: 2006454 - DNA, 25 bp, Homo sapien
tcaatcaagtctaaaccatgtggct

SEQ ID NO: 2006455 - DNA, 25 bp, Homo sapien
tctgatcccaccagcaaaacaggtc

SEQ ID NO: 2006456 - DNA, 25 bp, Homo sapien
attatgaggactatctgagcagagc

SEQ ID NO: 2006457 - DNA, 25 bp, Homo sapien
ccatttcgttagcagcatagtccca

SEQ ID NO: 2006458 - DNA, 25 bp, Homo sapien
caaacacggtgtggttgtgataccc

SEQ ID NO: 2006459 - DNA, 25 bp, Homo sapien
taataaggcaggtttaggaccaggc

SEQ ID NO: 2006460 - DNA, 25 bp, Homo sapien
caacttggccagacgttgggctgaa

SEQ ID NO: 2006461 - DNA, 25 bp, Homo sapien
tgatcccaacagagcacagtgtgag

SEQ ID NO: 2006462 - DNA, 25 bp, Homo sapien
gcacttgactacacaagcctgggag

SEQ ID NO: 2006463 - DNA, 25 bp, Homo sapien
ccaatggtcctgagctgattactgc

SEQ ID NO: 2006464 - DNA, 25 bp, Homo sapien
gcgtctagcattaagcaggttgcca

SEQ ID NO: 2006465 - DNA, 25 bp, Homo sapien
taaccagtgaaaacagagcgtctag

SEQ ID NO: 2006466 - DNA, 25 bp, Homo sapien
taagtagtggctcgggcataaggaa

SEQ ID NO: 2006467 - DNA, 25 bp, Homo sapien
attcacggataagtagtggctcggg

SEQ ID NO: 2006468 - DNA, 25 bp, Homo sapien
cggataagtagtggctcgggcataa

SEQ ID NO: 2006469 - DNA, 25 bp, Homo sapien
ctcgggcataaggaagctgagggca

SEQ ID NO: 2006470 - DNA, 25 bp, Homo sapien
cagtgcctttccagatatgtagagc

SEQ ID NO: 2006471 - DNA, 25 bp, Homo sapien
gaatatttgaacaccttgggatcca

SEQ ID NO: 2006472 - DNA, 25 bp, Homo sapien
tgcccagagatattcctaccaagtg

SEQ ID NO: 2006473 - DNA, 25 bp, Homo sapien
agcgtgatgtttactgggtgtcccc

SEQ ID NO: 2006474 - DNA, 25 bp, Homo sapien
aaggcatacttgtgctcaggctgca

SEQ ID NO: 2006475 - DNA, 25 bp, Homo sapien
tgctcaatgtagagaaacaagctca

SEQ ID NO: 2006476 - DNA, 25 bp, Homo sapien
aagccccttgtgcttgtagctgtgg

SEQ ID NO: 2006477 - DNA, 25 bp, Homo sapien
tattccacttatgcaggttgaccaa

SEQ ID NO: 2006478 - DNA, 25 bp, Homo sapien
cagaatcagtggttgggagacccag

SEQ ID NO: 2006479 - DNA, 25 bp, Homo sapien
cgggcagggaatcacggtattaaca

SEQ ID NO: 2006480 - DNA, 25 bp, Homo sapien
taactaatgatgcttggtgaccgga

SEQ ID NO: 2006481 - DNA, 25 bp, Homo sapien
cagttgtctcatctccacatggagg

SEQ ID NO: 2006482 - DNA, 25 bp, Homo sapien
tggaacacaaggcaatgaggcaggc

SEQ ID NO: 2006483 - DNA, 25 bp, Homo sapien
aagttcctcagtctagcagtgctgg

SEQ ID NO: 2006484 - DNA, 25 bp, Homo sapien
tgcctgtcacaagggaggtcagtct

SEQ ID NO: 2006485 - DNA, 25 bp, Homo sapien
tcagtctgatttgttaaggccctcg

SEQ ID NO: 2006486 - DNA, 25 bp, Homo sapien
cttcaagggatttatctaaggaaat

SEQ ID NO: 2006487 - DNA, 25 bp, Homo sapien
acagcaatgtaaagttgcaaagaac

SEQ ID NO: 2006488 - DNA, 25 bp, Homo sapien
gatgttcatcagagcactgtttaca

SEQ ID NO: 2006489 - DNA, 25 bp, Homo sapien
ctcttgaaaatccacttcaagggat

SEQ ID NO: 2006490 - DNA, 25 bp, Homo sapien
tagtacacaataatgcataatcctt

SEQ ID NO: 2006491 - DNA, 25 bp, Homo sapien
tccttaatgatgatgcatgtttttc

SEQ ID NO: 2006492 - DNA, 25 bp, Homo sapien
aataatgcataatccttctgttgag

SEQ ID NO: 2006493 - DNA, 25 bp, Homo sapien
tgcataatccttctgttgaggaagt

SEQ ID NO: 2006494 - DNA, 25 bp, Homo sapien
tcgccgggccctaactcaagtggct

SEQ ID NO: 2006495 - DNA, 25 bp, Homo sapien
tgctgggtctgagcctttcacacag

SEQ ID NO: 2006496 - DNA, 25 bp, Homo sapien
tagatgctggagacaactgctgttc

SEQ ID NO: 2006497 - DNA, 25 bp, Homo sapien
tcaggcccatgggtgttagatgctg

SEQ ID NO: 2006498 - DNA, 25 bp, Homo sapien
ttagtgaccgagcacaggcctggct

SEQ ID NO: 2006499 - DNA, 25 bp, Homo sapien
agtaagctgagttagtgaccgagca

SEQ ID NO: 2006500 - DNA, 25 bp, Homo sapien
taagctgagttagtgaccgagcaca

SEQ ID NO: 2006501 - DNA, 25 bp, Homo sapien
ctgagttagtgaccgagcacaggcc

SEQ ID NO: 2006502 - DNA, 25 bp, Homo sapien
caacaaacacgagactgcagatttc

SEQ ID NO: 2006503 - DNA, 25 bp, Homo sapien
tgcaacaaacacgagactgcagatt

SEQ ID NO: 2006504 - DNA, 25 bp, Homo sapien
gcaacaaacacgagactgcagattt

SEQ ID NO: 2006505 - DNA, 25 bp, Homo sapien
acaaacacgagactgcagatttctc

SEQ ID NO: 2006506 - DNA, 25 bp, Homo sapien
tcattttcctctgaagaatttagag

SEQ ID NO: 2006507 - DNA, 25 bp, Homo sapien
cctctgaagaatttagagtggtcat

SEQ ID NO: 2006508 - DNA, 25 bp, Homo sapien
cacttgtgtatttctcattttcctc

SEQ ID NO: 2006509 - DNA, 25 bp, Homo sapien
tcacttgtgtatttctcattttcct

SEQ ID NO: 2006510 - DNA, 25 bp, Homo sapien
agtaagatacacctccttggatgtc

SEQ ID NO: 2006511 - DNA, 25 bp, Homo sapien
gaccatggcgtggagacagcctaca

SEQ ID NO: 2006512 - DNA, 25 bp, Homo sapien
tgtggtggtgcgttctgtgtccaac

SEQ ID NO: 2006513 - DNA, 25 bp, Homo sapien
aggcagctcgccaacccagctggtt

SEQ ID NO: 2006514 - DNA, 25 bp, Homo sapien
caattgtcgtgaaaagtcagcggcc

SEQ ID NO: 2006515 - DNA, 25 bp, Homo sapien
ggatggagttccacgacattcgcga

SEQ ID NO: 2006516 - DNA, 25 bp, Homo sapien
taaatcaatgcggtttctaggcgct

SEQ ID NO: 2006517 - DNA, 25 bp, Homo sapien
gcccggcggcctctgatttaattat

SEQ ID NO: 2006518 - DNA, 25 bp, Homo sapien
tcggagggctgcgagaaacctgttg

SEQ ID NO: 2006519 - DNA, 25 bp, Homo sapien
aaacctgttggccacgaggaatcgg

SEQ ID NO: 2006520 - DNA, 25 bp, Homo sapien
ctgttggccacgaggaatcggtgtt

SEQ ID NO: 2006521 - DNA, 25 bp, Homo sapien
gccgctccctttgcccgctcggcgg

SEQ ID NO: 2006522 - DNA, 25 bp, Homo sapien
ctcggcggcctcgagagagcacaag

SEQ ID NO: 2006523 - DNA, 25 bp, Homo sapien
gaaagggagagcgactctggcggac

SEQ ID NO: 2006524 - DNA, 25 bp, Homo sapien
tctggcggactcaagggtcggaggt

SEQ ID NO: 2006525 - DNA, 25 bp, Homo sapien
tggagaagcgggacctgttccccgc

SEQ ID NO: 2006526 - DNA, 25 bp, Homo sapien
tttggaaaagtgcctcgatgtcact

SEQ ID NO: 2006527 - DNA, 25 bp, Homo sapien
ttggaaaagtgcctcgatgtcacta

SEQ ID NO: 2006528 - DNA, 25 bp, Homo sapien
tgctccagggagtgtcagtctgcag

SEQ ID NO: 2006529 - DNA, 25 bp, Homo sapien
aactatagtttcctccgaagtccag

SEQ ID NO: 2006530 - DNA, 25 bp, Homo sapien
tgtgtcttcgggaaccgcttacttc

SEQ ID NO: 2006531 - DNA, 25 bp, Homo sapien
tctgcctagctaagctgctagcgcg

SEQ ID NO: 2006532 - DNA, 25 bp, Homo sapien
cccatgccaatccatagcgtttctg

SEQ ID NO: 2006533 - DNA, 25 bp, Homo sapien
cgcccatgaattgcagctgtctgtg

SEQ ID NO: 2006534 - DNA, 25 bp, Homo sapien
aatccatagcgtttctggcaatcag

SEQ ID NO: 2006535 - DNA, 25 bp, Homo sapien
ttctggcaatcagcgtcgcccatga

SEQ ID NO: 2006536 - DNA, 25 bp, Homo sapien
tattgatcagggatctgtgagctgc

SEQ ID NO: 2006537 - DNA, 25 bp, Homo sapien
ccccaatgctcgaaatcttgtcagg

SEQ ID NO: 2006538 - DNA, 25 bp, Homo sapien
acagtaaccacgacccaaatctagg

SEQ ID NO: 2006539 - DNA, 25 bp, Homo sapien
gaggagagctgctaatttctacccc

SEQ ID NO: 2006540 - DNA, 25 bp, Homo sapien
ccttcaaccacttccagctgttaga

SEQ ID NO: 2006541 - DNA, 25 bp, Homo sapien
gacataagtttgagaagcgtgacct

SEQ ID NO: 2006542 - DNA, 25 bp, Homo sapien
gctgaggttgcgcagatgttgcctt

SEQ ID NO: 2006543 - DNA, 25 bp, Homo sapien
taaagagacagtaattaaggacagg

SEQ ID NO: 2006544 - DNA, 25 bp, Homo sapien
gtaggcagccttcattcagtccatc

SEQ ID NO: 2006545 - DNA, 25 bp, Homo sapien
ggcgcagccttctaggtctttggtg

SEQ ID NO: 2006546 - DNA, 25 bp, Homo sapien
catcgataggcggtgtaggcagcct

SEQ ID NO: 2006547 - DNA, 25 bp, Homo sapien
tctttggtgaggcatcgataggcgg

SEQ ID NO: 2006548 - DNA, 25 bp, Homo sapien
agctcgggccggtagtcgccgccgt

SEQ ID NO: 2006549 - DNA, 25 bp, Homo sapien
ggccggcccgtgcaaagtgcccaga

SEQ ID NO: 2006550 - DNA, 25 bp, Homo sapien
gtgcagcgggatggagagctcgggc

SEQ ID NO: 2006551 - DNA, 25 bp, Homo sapien
gatcgaggccatgctggtgaccatg

SEQ ID NO: 2006552 - DNA, 25 bp, Homo sapien
gttgctcatgcccatgccaggcgga

SEQ ID NO: 2006553 - DNA, 25 bp, Homo sapien
tcagcgtggtgtaggtgttgctcat

SEQ ID NO: 2006554 - DNA, 25 bp, Homo sapien
ttgtcagacacggtggagatgggtg

SEQ ID NO: 2006555 - DNA, 25 bp, Homo sapien
tggcagcggctggagcggtgtcagc

SEQ ID NO: 2006556 - DNA, 25 bp, Homo sapien
ctgacgttgccggacaggcgctggt

SEQ ID NO: 2006557 - DNA, 25 bp, Homo sapien
cgctcgtcgcgcatgagggtgaagc

SEQ ID NO: 2006558 - DNA, 25 bp, Homo sapien
gacaggtgttgctcaccgcgggtca

SEQ ID NO: 2006559 - DNA, 25 bp, Homo sapien
tgcaggccgttcaggtgcgacatca

SEQ ID NO: 2006560 - DNA, 25 bp, Homo sapien
accctctgcgcaaagatcgcctggg

SEQ ID NO: 2006561 - DNA, 25 bp, Homo sapien
cggaccgtagttgggcagactctgc

SEQ ID NO: 2006562 - DNA, 25 bp, Homo sapien
gggtccgtgcgcacaaaagcgcgca

SEQ ID NO: 2006563 - DNA, 25 bp, Homo sapien
gcgtgccagtcgcagtaactactgc

SEQ ID NO: 2006564 - DNA, 25 bp, Homo sapien
aaaagcgcgcaactgcgtgccagtc

SEQ ID NO: 2006565 - DNA, 25 bp, Homo sapien
tgcatctttccctctagctcgcgca

SEQ ID NO: 2006566 - DNA, 25 bp, Homo sapien
ggtatagtgtgtccttcccagcggg

SEQ ID NO: 2006567 - DNA, 25 bp, Homo sapien
gttggtcgagtgcaccccacaagct

SEQ ID NO: 2006568 - DNA, 25 bp, Homo sapien
cctggcttgccatagggtatagtgt

SEQ ID NO: 2006569 - DNA, 25 bp, Homo sapien
aagacccgcgctatgcaaatcatcg

SEQ ID NO: 2006570 - DNA, 25 bp, Homo sapien
gctttatcttgccccgaaccaacag

SEQ ID NO: 2006571 - DNA, 25 bp, Homo sapien
catttcccgccgctattattatcgc

SEQ ID NO: 2006572 - DNA, 25 bp, Homo sapien
tatcgctctctactggctgctttat

SEQ ID NO: 2006573 - DNA, 25 bp, Homo sapien
tatcttgccccgaaccaacagcaaa

SEQ ID NO: 2006574 - DNA, 25 bp, Homo sapien
gcggggattccgatcgatactccgg

SEQ ID NO: 2006575 - DNA, 25 bp, Homo sapien
tccgatcgatactccgggcggagaa

SEQ ID NO: 2006576 - DNA, 25 bp, Homo sapien
gggattccgatcgatactccgggcg

SEQ ID NO: 2006577 - DNA, 25 bp, Homo sapien
gattccgatcgatactccgggcgga

SEQ ID NO: 2006578 - DNA, 25 bp, Homo sapien
taattgtccaacgaatgcacctgcg

SEQ ID NO: 2006579 - DNA, 25 bp, Homo sapien
tgcacctgcgtaaaaagtctgcgcg

SEQ ID NO: 2006580 - DNA, 25 bp, Homo sapien
tactagggccacgtttaattgtcca

SEQ ID NO: 2006581 - DNA, 25 bp, Homo sapien
tgcgcgtgagcctttttagtacgag

SEQ ID NO: 2006582 - DNA, 25 bp, Homo sapien
ctgctggcggtggaagccctgactg

SEQ ID NO: 2006583 - DNA, 25 bp, Homo sapien
actgtgctccccgactccacttgaa

SEQ ID NO: 2006584 - DNA, 25 bp, Homo sapien
tgctccccgactccacttgaaacct

SEQ ID NO: 2006585 - DNA, 25 bp, Homo sapien
tgctggcggtggaagccctgactgt

SEQ ID NO: 2006586 - DNA, 25 bp, Homo sapien
ttatcgctgatctcacacagagagc

SEQ ID NO: 2006587 - DNA, 25 bp, Homo sapien
gagggtccatctccaattcgctcaa

SEQ ID NO: 2006588 - DNA, 25 bp, Homo sapien
gatttaaccgcagtagagggtccat

SEQ ID NO: 2006589 - DNA, 25 bp, Homo sapien
gctcaaacagcgttcctccatggcg

SEQ ID NO: 2006590 - DNA, 25 bp, Homo sapien
taaaacatcccgttgagggtggcaa

SEQ ID NO: 2006591 - DNA, 25 bp, Homo sapien
aaaacatcccgttgagggtggcaat

SEQ ID NO: 2006592 - DNA, 25 bp, Homo sapien
ctaaaacatcccgttgagggtggca

SEQ ID NO: 2006593 - DNA, 25 bp, Homo sapien
tccctcaccaacctggtgatacccc

SEQ ID NO: 2006594 - DNA, 25 bp, Homo sapien
ctcaccaacctggtgataccccact

SEQ ID NO: 2006595 - DNA, 25 bp, Homo sapien
cttagtgaggacattgatgggcctg

SEQ ID NO: 2006596 - DNA, 25 bp, Homo sapien
tgggcctggggcactacagtccaga

SEQ ID NO: 2006597 - DNA, 25 bp, Homo sapien
agcctgcagtgagcactggtcctcc

SEQ ID NO: 2006598 - DNA, 25 bp, Homo sapien
atgcagagagaaagggaagcctgca

SEQ ID NO: 2006599 - DNA, 25 bp, Homo sapien
ctgcagtgagcactggtcctccgga

SEQ ID NO: 2006600 - DNA, 25 bp, Homo sapien
gagagaaagggaagcctgcagtgag

SEQ ID NO: 2006601 - DNA, 25 bp, Homo sapien
gtcggctggaggcagaccgcacagc

SEQ ID NO: 2006602 - DNA, 25 bp, Homo sapien
tcggctggaggcagaccgcacagcg

SEQ ID NO: 2006603 - DNA, 25 bp, Homo sapien
tgtcggctggaggcagaccgcacag

SEQ ID NO: 2006604 - DNA, 25 bp, Homo sapien
tcagctgaagagctcgcagcttccc

SEQ ID NO: 2006605 - DNA, 25 bp, Homo sapien
agaagaggccttttcgcttttcagc

SEQ ID NO: 2006606 - DNA, 25 bp, Homo sapien
ccctcctaggaaggcttgtgcaaag

SEQ ID NO: 2006607 - DNA, 25 bp, Homo sapien
ggagcgtgaccctttccactaagga

SEQ ID NO: 2006608 - DNA, 25 bp, Homo sapien
ctcagtgttttgtccagtccagggt

SEQ ID NO: 2006609 - DNA, 25 bp, Homo sapien
acagagccatagaacctcagtgttt

SEQ ID NO: 2006610 - DNA, 25 bp, Homo sapien
cagggttgtcagtttcacataagga

SEQ ID NO: 2006611 - DNA, 25 bp, Homo sapien
agtggaagccaaagtctggatcccc

SEQ ID NO: 2006612 - DNA, 25 bp, Homo sapien
tatgtggtcagagtcgtgcagcaac

SEQ ID NO: 2006613 - DNA, 25 bp, Homo sapien
ggaggcgggacagggtgagggattg

SEQ ID NO: 2006614 - DNA, 25 bp, Homo sapien
gtgcagcaacgctcatcaagccagg

SEQ ID NO: 2006615 - DNA, 25 bp, Homo sapien
aagccagggatgattcccatccaga

SEQ ID NO: 2006616 - DNA, 25 bp, Homo sapien
aggtgcaaggttagcccagccctgt

SEQ ID NO: 2006617 - DNA, 25 bp, Homo sapien
cacagtcacatgctggtcagggtct

SEQ ID NO: 2006618 - DNA, 25 bp, Homo sapien
ccagttctgccacggaaggtgcaag

SEQ ID NO: 2006619 - DNA, 25 bp, Homo sapien
caaggatgcgatagaaacccaacga

SEQ ID NO: 2006620 - DNA, 25 bp, Homo sapien
catatttttgttggattctgatgat

SEQ ID NO: 2006621 - DNA, 25 bp, Homo sapien
gcatatttttgttggattctgatga

SEQ ID NO: 2006622 - DNA, 25 bp, Homo sapien
atatttttgttggattctgatgatt

SEQ ID NO: 2006623 - DNA, 25 bp, Homo sapien
cggtaatgatttcttctttgctcat

SEQ ID NO: 2006624 - DNA, 25 bp, Homo sapien
agaagaaggagaggagtcagtgggc

SEQ ID NO: 2006625 - DNA, 25 bp, Homo sapien
gaaggagaggagtcagtgggctcac

SEQ ID NO: 2006626 - DNA, 25 bp, Homo sapien
agaaggagaggagtcagtgggctca

SEQ ID NO: 2006627 - DNA, 25 bp, Homo sapien
cttgaagggaaagagaagaaggaga

SEQ ID NO: 2006628 - DNA, 25 bp, Homo sapien
tcggcgttggaggtcagtgaacacc

SEQ ID NO: 2006629 - DNA, 25 bp, Homo sapien
tgcatctcctttgacgggcgtttgt

SEQ ID NO: 2006630 - DNA, 25 bp, Homo sapien
catgctttggtacacgtgctggagg

SEQ ID NO: 2006631 - DNA, 25 bp, Homo sapien
caccaggcgggacttcttctgggaa

SEQ ID NO: 2006632 - DNA, 25 bp, Homo sapien
gcaatcccgagcttggttgacacca

SEQ ID NO: 2006633 - DNA, 25 bp, Homo sapien
ttcagcttgcacttggactccatag

SEQ ID NO: 2006634 - DNA, 25 bp, Homo sapien
tcttggaagcctaaactcagagtcc

SEQ ID NO: 2006635 - DNA, 25 bp, Homo sapien
tttcaaatcaccagtgaagggcccc

SEQ ID NO: 2006636 - DNA, 25 bp, Homo sapien
ggaccagatgactgatcaaccaagg

SEQ ID NO: 2006637 - DNA, 25 bp, Homo sapien
tgtgcgtctgcattatgtacaacag

SEQ ID NO: 2006638 - DNA, 25 bp, Homo sapien
cataacacacagtaggagggaccag

SEQ ID NO: 2006639 - DNA, 25 bp, Homo sapien
ccccaaatcagaaagagcgagaatg

SEQ ID NO: 2006640 - DNA, 25 bp, Homo sapien
ccagagttctgtgggcgctcttcca

SEQ ID NO: 2006641 - DNA, 25 bp, Homo sapien
tccacttgctatgggaaggtgacaa

SEQ ID NO: 2006642 - DNA, 25 bp, Homo sapien
taatgtccttggtgtagctggtccg

SEQ ID NO: 2006643 - DNA, 25 bp, Homo sapien
gatgatgcgccaaatgcaagagctg

SEQ ID NO: 2006644 - DNA, 25 bp, Homo sapien
taactggtgaaaatggaccaccgag

SEQ ID NO: 2006645 - DNA, 25 bp, Homo sapien
tcaccaccttaatcgaggctgaggg

SEQ ID NO: 2006646 - DNA, 25 bp, Homo sapien
gaattggtaattaccaccctgagga

SEQ ID NO: 2006647 - DNA, 25 bp, Homo sapien
tgtagcaatcacatgaaaacgaggc

SEQ ID NO: 2006648 - DNA, 25 bp, Homo sapien
gacaaagggacacaagggaagagcc

SEQ ID NO: 2006649 - DNA, 25 bp, Homo sapien
gacccaaacgctgagattagtatgt

SEQ ID NO: 2006650 - DNA, 25 bp, Homo sapien
tcagaggatgctggagacccaaacg

SEQ ID NO: 2006651 - DNA, 25 bp, Homo sapien
gccaatgaacaatctcctaggaagg

SEQ ID NO: 2006652 - DNA, 25 bp, Homo sapien
tgctaaagcctacaattgccaagag

SEQ ID NO: 2006653 - DNA, 25 bp, Homo sapien
tatgagacttatacaaccaactggg

SEQ ID NO: 2006654 - DNA, 25 bp, Homo sapien
gattatcgccaaggtagttgtgcct

SEQ ID NO: 2006655 - DNA, 25 bp, Homo sapien
tgtacacagtctagacacctatagg

SEQ ID NO: 2006656 - DNA, 25 bp, Homo sapien
taagaggtgaagttcgcctggtacc

SEQ ID NO: 2006657 - DNA, 25 bp, Homo sapien
gctccgagggccacaataattaaga

SEQ ID NO: 2006658 - DNA, 25 bp, Homo sapien
ttctgtatagaagccccgaaatcca

SEQ ID NO: 2006659 - DNA, 25 bp, Homo sapien
cacacagagttcattcttggaagca

SEQ ID NO: 2006660 - DNA, 25 bp, Homo sapien
ttggctaacacacaaatcacgttga

SEQ ID NO: 2006661 - DNA, 25 bp, Homo sapien
tgtgccaatggtggtcaagttccct

SEQ ID NO: 2006662 - DNA, 25 bp, Homo sapien
actgatgagttgattggtcccttcc

SEQ ID NO: 2006663 - DNA, 25 bp, Homo sapien
gatgggccttgagcttgtttggaca

SEQ ID NO: 2006664 - DNA, 25 bp, Homo sapien
gctttggaaccgtgaagaactagaa

SEQ ID NO: 2006665 - DNA, 25 bp, Homo sapien
gcaaggcactcgtcccgtggttatg

SEQ ID NO: 2006666 - DNA, 25 bp, Homo sapien
ccaactgactgtatggaggcccagt

SEQ ID NO: 2006667 - DNA, 25 bp, Homo sapien
ttcggtaaggaattgcgcggtctgc

SEQ ID NO: 2006668 - DNA, 25 bp, Homo sapien
tgctaacaaacaataggcgcccatg

SEQ ID NO: 2006669 - DNA, 25 bp, Homo sapien
ggcgcccatgcataaataaagtcca

SEQ ID NO: 2006670 - DNA, 25 bp, Homo sapien
tacgagaagaaaccacgcatagtca

SEQ ID NO: 2006671 - DNA, 25 bp, Homo sapien
taaagggtattttcgaggtgacaca

SEQ ID NO: 2006672 - DNA, 25 bp, Homo sapien
aaaaagggctgggtacactcatgtc

SEQ ID NO: 2006673 - DNA, 25 bp, Homo sapien
gccagacccatgcattgcctgtgat

SEQ ID NO: 2006674 - DNA, 25 bp, Homo sapien
caaggaaaaggacatccattggcac

SEQ ID NO: 2006675 - DNA, 25 bp, Homo sapien
ggcaaagtgtaaccagccagaccca

SEQ ID NO: 2006676 - DNA, 25 bp, Homo sapien
tgtcccatgtaaagccaccagatgg

SEQ ID NO: 2006677 - DNA, 25 bp, Homo sapien
tccaaaaggtatagatgggatagct

SEQ ID NO: 2006678 - DNA, 25 bp, Homo sapien
tagccttgactggatagtgtgcaag

SEQ ID NO: 2006679 - DNA, 25 bp, Homo sapien
gggacctggatcctttgcaacccca

SEQ ID NO: 2006680 - DNA, 25 bp, Homo sapien
ttcccaggtggcaggttccttgtca

SEQ ID NO: 2006681 - DNA, 25 bp, Homo sapien
gctagtcttcggactcttttcttcc

SEQ ID NO: 2006682 - DNA, 25 bp, Homo sapien
tacctatccgattgctagtcttcgg

SEQ ID NO: 2006683 - DNA, 25 bp, Homo sapien
gtatctgttaatggtatgactacct

SEQ ID NO: 2006684 - DNA, 25 bp, Homo sapien
taagaagtttgctggcaccacttgg

SEQ ID NO: 2006685 - DNA, 25 bp, Homo sapien
gactgaactgctcttggattgagaa

SEQ ID NO: 2006686 - DNA, 25 bp, Homo sapien
tcagtatgccaggtgttttacaaca

SEQ ID NO: 2006687 - DNA, 25 bp, Homo sapien
tccctctggtccaggagaacacttt

SEQ ID NO: 2006688 - DNA, 25 bp, Homo sapien
tttggtggaaggatagctcctcttg

SEQ ID NO: 2006689 - DNA, 25 bp, Homo sapien
ggatctacagtatctgtgttaataa

SEQ ID NO: 2006690 - DNA, 25 bp, Homo sapien
cagtatctgtgttaataaagtattg

SEQ ID NO: 2006691 - DNA, 25 bp, Homo sapien
tcactgaccaaggaaggatctacag

SEQ ID NO: 2006692 - DNA, 25 bp, Homo sapien
gcatatggtcaacggaggctcacac

SEQ ID NO: 2006693 - DNA, 25 bp, Homo sapien
tcaacagtatagaacaaaggatgca

SEQ ID NO: 2006694 - DNA, 25 bp, Homo sapien
caagaataaacacatctgaggccag

SEQ ID NO: 2006695 - DNA, 25 bp, Homo sapien
gagtacggtctttgagcatatggtc

SEQ ID NO: 2006696 - DNA, 25 bp, Homo sapien
caaaggactgagtttctagaatagc

SEQ ID NO: 2006697 - DNA, 25 bp, Homo sapien
cacaaaggactgagtttctagaata

SEQ ID NO: 2006698 - DNA, 25 bp, Homo sapien
acaaaggactgagtttctagaatag

SEQ ID NO: 2006699 - DNA, 25 bp, Homo sapien
tacactttggaaatatagcgcaggg

SEQ ID NO: 2006700 - DNA, 25 bp, Homo sapien
cccttgatgatgaagcgtgatcctc

SEQ ID NO: 2006701 - DNA, 25 bp, Homo sapien
tccaaaaggactgggagcttatcag

SEQ ID NO: 2006702 - DNA, 25 bp, Homo sapien
ccagtgtaagcgatgttgcagacaa

SEQ ID NO: 2006703 - DNA, 25 bp, Homo sapien
gaatttacagcactaccatttaatg

SEQ ID NO: 2006704 - DNA, 25 bp, Homo sapien
cagaatttacagcactaccatttaa

SEQ ID NO: 2006705 - DNA, 25 bp, Homo sapien
aatttacagcactaccatttaatga

SEQ ID NO: 2006706 - DNA, 25 bp, Homo sapien
tttacagcactaccatttaatgata

SEQ ID NO: 2006707 - DNA, 25 bp, Homo sapien
atctcagctgcttagcaatcagaat

SEQ ID NO: 2006708 - DNA, 25 bp, Homo sapien
ccatctcagctgcttagcaatcaga

SEQ ID NO: 2006709 - DNA, 25 bp, Homo sapien
cttcacttctacccatctcagctgc

SEQ ID NO: 2006710 - DNA, 25 bp, Homo sapien
tcacttctacccatctcagctgctt

SEQ ID NO: 2006711 - DNA, 25 bp, Homo sapien
gttgtcggtccaacccctctggcat

SEQ ID NO: 2006712 - DNA, 25 bp, Homo sapien
aaagcactgccatcaagagcataag

SEQ ID NO: 2006713 - DNA, 25 bp, Homo sapien
atcaagagcataagaccctcccagg

SEQ ID NO: 2006714 - DNA, 25 bp, Homo sapien
ggacatttggccctcaaaagcactg

SEQ ID NO: 2006715 - DNA, 25 bp, Homo sapien
gtaaatcatcctggcatcttgaatg

SEQ ID NO: 2006716 - DNA, 25 bp, Homo sapien
aatcagctctctggagctctaagat

SEQ ID NO: 2006717 - DNA, 25 bp, Homo sapien
aaatcagctctctggagctctaaga

SEQ ID NO: 2006718 - DNA, 25 bp, Homo sapien
ggcatcttgaatggtcagaaaatca

SEQ ID NO: 2006719 - DNA, 25 bp, Homo sapien
tgacgttcataaaattccttgttga

SEQ ID NO: 2006720 - DNA, 25 bp, Homo sapien
cattgacgtacagtcaccgtcgagt

SEQ ID NO: 2006721 - DNA, 25 bp, Homo sapien
ggcagaagccgtgagacctgttgac

SEQ ID NO: 2006722 - DNA, 25 bp, Homo sapien
tgttgaactttatacattgacgtac

SEQ ID NO: 2006723 - DNA, 25 bp, Homo sapien
ctgccagagtggagaaataggtaag

SEQ ID NO: 2006724 - DNA, 25 bp, Homo sapien
ggagaaataggtaagaagctgctaa

SEQ ID NO: 2006725 - DNA, 25 bp, Homo sapien
taggtaagaagctgctaaaaggaaa

SEQ ID NO: 2006726 - DNA, 25 bp, Homo sapien
tgccagagtggagaaataggtaaga

SEQ ID NO: 2006727 - DNA, 25 bp, Homo sapien
ctctccagctgaactaaacgctccc

SEQ ID NO: 2006728 - DNA, 25 bp, Homo sapien
ctgaactaaacgctcccccaggcca

SEQ ID NO: 2006729 - DNA, 25 bp, Homo sapien
tatgtgtacatatctacatcaacat

SEQ ID NO: 2006730 - DNA, 25 bp, Homo sapien
tctacatcaacatctaaagccctct

SEQ ID NO: 2006731 - DNA, 25 bp, Homo sapien
ttctctggtttgcttgagtgataaa

SEQ ID NO: 2006732 - DNA, 25 bp, Homo sapien
ctggtttgcttgagtgataaaaaat

SEQ ID NO: 2006733 - DNA, 25 bp, Homo sapien
ctctggtttgcttgagtgataaaaa

SEQ ID NO: 2006734 - DNA, 25 bp, Homo sapien
ggtttgcttgagtgataaaaaatta

SEQ ID NO: 2006735 - DNA, 25 bp, Homo sapien
gggtccgtacccatgcttggacttg

SEQ ID NO: 2006736 - DNA, 25 bp, Homo sapien
ctgggtccgtacccatgcttggact

SEQ ID NO: 2006737 - DNA, 25 bp, Homo sapien
tgggtccgtacccatgcttggactt

SEQ ID NO: 2006738 - DNA, 25 bp, Homo sapien
caaagccagtgtcgctgaaagccta

SEQ ID NO: 2006739 - DNA, 25 bp, Homo sapien
taaactgccgtcctggaaaaagctc

SEQ ID NO: 2006740 - DNA, 25 bp, Homo sapien
gaaaccaagccccaagtcgggatga

SEQ ID NO: 2006741 - DNA, 25 bp, Homo sapien
tggaaaatctttcacggcagcagaa

SEQ ID NO: 2006742 - DNA, 25 bp, Homo sapien
agcagcatgagcaaaggaggatctg

SEQ ID NO: 2006743 - DNA, 25 bp, Homo sapien
agcatgagcaaaggaggatctgacc

SEQ ID NO: 2006744 - DNA, 25 bp, Homo sapien
gcaaaggaggatctgacctctgttt

SEQ ID NO: 2006745 - DNA, 25 bp, Homo sapien
tgagcaaaggaggatctgacctctg

SEQ ID NO: 2006746 - DNA, 25 bp, Homo sapien
gtttcttcagcctggagtgtagcca

SEQ ID NO: 2006747 - DNA, 25 bp, Homo sapien
ttcagcctggagtgtagccaggtgt

SEQ ID NO: 2006748 - DNA, 25 bp, Homo sapien
tggcctgagctcccaagcaggtcat

SEQ ID NO: 2006749 - DNA, 25 bp, Homo sapien
gtagccaggtgtggcctgaggtggc

SEQ ID NO: 2006750 - DNA, 25 bp, Homo sapien
caggagcgtgatcagacatctcatt

SEQ ID NO: 2006751 - DNA, 25 bp, Homo sapien
taagagccgaatgtctctccaggag

SEQ ID NO: 2006752 - DNA, 25 bp, Homo sapien
ttcctaagagccgaatgtctctcca

SEQ ID NO: 2006753 - DNA, 25 bp, Homo sapien
gtctctccaggagcgtgatcagaca

SEQ ID NO: 2006754 - DNA, 25 bp, Homo sapien
ctgtttccagttgcggtattaccct

SEQ ID NO: 2006755 - DNA, 25 bp, Homo sapien
ttttgtgtcccgcaagcctctccct

SEQ ID NO: 2006756 - DNA, 25 bp, Homo sapien
tgtgtttctgcgatgctttctcctg

SEQ ID NO: 2006757 - DNA, 25 bp, Homo sapien
ctttgctgcaatcccttgatcctca

SEQ ID NO: 2006758 - DNA, 25 bp, Homo sapien
ataaagacagctgctctgtgcagcc

SEQ ID NO: 2006759 - DNA, 25 bp, Homo sapien
aagacagctgctctgtgcagccact

SEQ ID NO: 2006760 - DNA, 25 bp, Homo sapien
tcagagctcgacagaaataaagaca

SEQ ID NO: 2006761 - DNA, 25 bp, Homo sapien
cagagctcgacagaaataaagacag

SEQ ID NO: 2006762 - DNA, 25 bp, Homo sapien
gcctgtagtactaacagaatccatg

SEQ ID NO: 2006763 - DNA, 25 bp, Homo sapien
caccaaaaacccatgggcctgtagt

SEQ ID NO: 2006764 - DNA, 25 bp, Homo sapien
gggacaaaagctttccgatgacaaa

SEQ ID NO: 2006765 - DNA, 25 bp, Homo sapien
tgattcccaatcaacagtttcagcc

SEQ ID NO: 2006766 - DNA, 25 bp, Homo sapien
ccaagtggagtgagcagcaagacct

SEQ ID NO: 2006767 - DNA, 25 bp, Homo sapien
tctgccgtatgagctcctgtcgatg

SEQ ID NO: 2006768 - DNA, 25 bp, Homo sapien
ctgtcgatgcggcaaaggaccacct

SEQ ID NO: 2006769 - DNA, 25 bp, Homo sapien
taaagctggcagctgtaagcgaacg

SEQ ID NO: 2006770 - DNA, 25 bp, Homo sapien
tttgagtgaccgtcccaccgtgaag

SEQ ID NO: 2006771 - DNA, 25 bp, Homo sapien
tgacagccctcatgagtagcatcca

SEQ ID NO: 2006772 - DNA, 25 bp, Homo sapien
tagttttcctacgttgatgacagcc

SEQ ID NO: 2006773 - DNA, 25 bp, Homo sapien
caagggcctgcttcaattctttgat

SEQ ID NO: 2006774 - DNA, 25 bp, Homo sapien
tagtgatgagcttcaccctggagct

SEQ ID NO: 2006775 - DNA, 25 bp, Homo sapien
tagggaggcaatttggttacctgca

SEQ ID NO: 2006776 - DNA, 25 bp, Homo sapien
cagcgaggccaccattcattggtca

SEQ ID NO: 2006777 - DNA, 25 bp, Homo sapien
catgatacgtgccttggtgggagtc

SEQ ID NO: 2006778 - DNA, 25 bp, Homo sapien
gatctctctggtttccgaacacgta

SEQ ID NO: 2006779 - DNA, 25 bp, Homo sapien
cagccctgcagaagtagccttatca

SEQ ID NO: 2006780 - DNA, 25 bp, Homo sapien
tcagttatccatgtaaggaggaggg

SEQ ID NO: 2006781 - DNA, 25 bp, Homo sapien
cagcctcttggtcccgtgtgggatt

SEQ ID NO: 2006782 - DNA, 25 bp, Homo sapien
tataccctagtgttcaagccccatc

SEQ ID NO: 2006783 - DNA, 25 bp, Homo sapien
tttgggagagagtgaaactataccc

SEQ ID NO: 2006784 - DNA, 25 bp, Homo sapien
aagccccatctttacccagaggtca

SEQ ID NO: 2006785 - DNA, 25 bp, Homo sapien
gaagaccaatcaaaagggagtgggc

SEQ ID NO: 2006786 - DNA, 25 bp, Homo sapien
caagcatgtgaatagatgtgagcct

SEQ ID NO: 2006787 - DNA, 25 bp, Homo sapien
ggatctgcagtccatagccctctgt

SEQ ID NO: 2006788 - DNA, 25 bp, Homo sapien
tccaggaaccaaacatctagttagc

SEQ ID NO: 2006789 - DNA, 25 bp, Homo sapien
tactgtaggctatctgccctaggtg

SEQ ID NO: 2006790 - DNA, 25 bp, Homo sapien
gaagccattcagtaagcctgctgtg

SEQ ID NO: 2006791 - DNA, 25 bp, Homo sapien
cacagattagatctaaggacatggt

SEQ ID NO: 2006792 - DNA, 25 bp, Homo sapien
cctaactacagtttcatgccaggta

SEQ ID NO: 2006793 - DNA, 25 bp, Homo sapien
tgtgaatcactaaaaaactctcccc

SEQ ID NO: 2006794 - DNA, 25 bp, Homo sapien
cctcaggattattagcagctaagca

SEQ ID NO: 2006795 - DNA, 25 bp, Homo sapien
tgcatttggtggagaaatcaactaa

SEQ ID NO: 2006796 - DNA, 25 bp, Homo sapien
gaaaatacctggcatgaaactgtag

SEQ ID NO: 2006797 - DNA, 25 bp, Homo sapien
ttagttgatttctccaccaaatgca

SEQ ID NO: 2006798 - DNA, 25 bp, Homo sapien
cacagcaggcttactgaatggcttc

SEQ ID NO: 2006799 - DNA, 25 bp, Homo sapien
tcttaataacaattgtgagtggctg

SEQ ID NO: 2006800 - DNA, 25 bp, Homo sapien
tgcttagctgctaataatcctgagg

SEQ ID NO: 2006801 - DNA, 25 bp, Homo sapien
ctgtagttagggatacatttcagca

SEQ ID NO: 2006802 - DNA, 25 bp, Homo sapien
tatatacagaacgattacagtggaa

SEQ ID NO: 2006803 - DNA, 25 bp, Homo sapien
cacacaccacattataacctgcaaa

SEQ ID NO: 2006804 - DNA, 25 bp, Homo sapien
aaagctggcaatattcacacaccac

SEQ ID NO: 2006805 - DNA, 25 bp, Homo sapien
gttgcaatcaacaagccggccgtta

SEQ ID NO: 2006806 - DNA, 25 bp, Homo sapien
aagggtactagatactggtaggatc

SEQ ID NO: 2006807 - DNA, 25 bp, Homo sapien
tcaaataccaaagtactaccctgaa

SEQ ID NO: 2006808 - DNA, 25 bp, Homo sapien
aatgtggtgtgtgaatattgccagc

SEQ ID NO: 2006809 - DNA, 25 bp, Homo sapien
tccactgtaatcgttctgtatatat

SEQ ID NO: 2006810 - DNA, 25 bp, Homo sapien
ttaaaaaattgatcctaccagtatc

SEQ ID NO: 2006811 - DNA, 25 bp, Homo sapien
taacggccggcttgttgattgcaac

SEQ ID NO: 2006812 - DNA, 25 bp, Homo sapien
gagaattcagggtagtactttggta

SEQ ID NO: 2006813 - DNA, 25 bp, Homo sapien
gatcctaccagtatctagtaccctt

SEQ ID NO: 2006814 - DNA, 25 bp, Homo sapien
tcaacagagtagaggatacacacct

SEQ ID NO: 2006815 - DNA, 25 bp, Homo sapien
ggaatcctcaggacatcgctgcatg

SEQ ID NO: 2006816 - DNA, 25 bp, Homo sapien
tggtgtctgtcatcagtctctcagg

SEQ ID NO: 2006817 - DNA, 25 bp, Homo sapien
tccacaggaaatcgacacagcaaga

SEQ ID NO: 2006818 - DNA, 25 bp, Homo sapien
tagaaggacttgatctccacaggaa

SEQ ID NO: 2006819 - DNA, 25 bp, Homo sapien
tacaacttggatcgcaacaagacag

SEQ ID NO: 2006820 - DNA, 25 bp, Homo sapien
tcgatttcctgtggagatcaagtcc

SEQ ID NO: 2006821 - DNA, 25 bp, Homo sapien
cctgagagactgatgacagacacca

SEQ ID NO: 2006822 - DNA, 25 bp, Homo sapien
catgcagcgatgtcctgaggattcc

SEQ ID NO: 2006823 - DNA, 25 bp, Homo sapien
gatcaagtccttctacatgcagcga

SEQ ID NO: 2006824 - DNA, 25 bp, Homo sapien
taatgaaccaatcttgctgtgtcga

SEQ ID NO: 2006825 - DNA, 25 bp, Homo sapien
tgtttgacctcaggatatcccagaa

SEQ ID NO: 2006826 - DNA, 25 bp, Homo sapien
tgatctctaaagcacctggtgacca

SEQ ID NO: 2006827 - DNA, 25 bp, Homo sapien
gcactaatgttggaggagtaacctg

SEQ ID NO: 2006828 - DNA, 25 bp, Homo sapien
taaatcaatgctatcgtgagcacca

SEQ ID NO: 2006829 - DNA, 25 bp, Homo sapien
tgccttcgtgttctggactgctctg

SEQ ID NO: 2006830 - DNA, 25 bp, Homo sapien
ttgagctggacatcaacgtcagact

SEQ ID NO: 2006831 - DNA, 25 bp, Homo sapien
tctgcccggtatgactgagcaatac

SEQ ID NO: 2006832 - DNA, 25 bp, Homo sapien
cacaagtagaaggtggtgccacact

SEQ ID NO: 2006833 - DNA, 25 bp, Homo sapien
gaaacttgaatagtggtgctcacga

SEQ ID NO: 2006834 - DNA, 25 bp, Homo sapien
tattgctcagtcataccgggcagag

SEQ ID NO: 2006835 - DNA, 25 bp, Homo sapien
gaggagtctgacgttgatgtccagc

SEQ ID NO: 2006836 - DNA, 25 bp, Homo sapien
tcctaaaagcacgatccatggtcac

SEQ ID NO: 2006837 - DNA, 25 bp, Homo sapien
caacagacacatgatgatccgagga

SEQ ID NO: 2006838 - DNA, 25 bp, Homo sapien
gcgactagggcgagccccggattcc

SEQ ID NO: 2006839 - DNA, 25 bp, Homo sapien
cgaagcctgttatgaggagcaaaaa

SEQ ID NO: 2006840 - DNA, 25 bp, Homo sapien
atgtctgtgagtttgcctggggaca

SEQ ID NO: 2006841 - DNA, 25 bp, Homo sapien
cggtgtccccgcgactagggcgagc

SEQ ID NO: 2006842 - DNA, 25 bp, Homo sapien
taggccatcttcacctattaatttg

SEQ ID NO: 2006843 - DNA, 25 bp, Homo sapien
gccatcttcacctattaatttggca

SEQ ID NO: 2006844 - DNA, 25 bp, Homo sapien
tcaaaatgattttgataggccatct

SEQ ID NO: 2006845 - DNA, 25 bp, Homo sapien
aaatgattttgataggccatcttca

SEQ ID NO: 2006846 - DNA, 25 bp, Homo sapien
tcttgattagatattcctccgaaca

SEQ ID NO: 2006847 - DNA, 25 bp, Homo sapien
tattcctccgaacaagagatacagt

SEQ ID NO: 2006848 - DNA, 25 bp, Homo sapien
cgccattgtacaccaggatgggcaa

SEQ ID NO: 2006849 - DNA, 25 bp, Homo sapien
aattccggacgcactgggaggcgga

SEQ ID NO: 2006850 - DNA, 25 bp, Homo sapien
tagagttagggagatcagccaggca

SEQ ID NO: 2006851 - DNA, 25 bp, Homo sapien
gaagattgagtctgggtttttccaa

SEQ ID NO: 2006852 - DNA, 25 bp, Homo sapien
aaggtggccagactttagagacaga

SEQ ID NO: 2006853 - DNA, 25 bp, Homo sapien
gtaaagatttagagttagggagatc

SEQ ID NO: 2006854 - DNA, 25 bp, Homo sapien
tttgcaaattgtgggaaagattgac

SEQ ID NO: 2006855 - DNA, 25 bp, Homo sapien
gaaaacttagcttgtgtaattctgt

SEQ ID NO: 2006856 - DNA, 25 bp, Homo sapien
tgcaaatgtgtcaaagacatactgt

SEQ ID NO: 2006857 - DNA, 25 bp, Homo sapien
catactgttgggtgcaatattaaca

SEQ ID NO: 2006858 - DNA, 25 bp, Homo sapien
cacactagtttccatagttcgagaa

SEQ ID NO: 2006859 - DNA, 25 bp, Homo sapien
gtttactactaggtgagatagcaca

SEQ ID NO: 2006860 - DNA, 25 bp, Homo sapien
agagaaaaggttattggcagccaca

SEQ ID NO: 2006861 - DNA, 25 bp, Homo sapien
tgtgcctgcctatatgcaaagtatt

SEQ ID NO: 2006862 - DNA, 25 bp, Homo sapien
tcttcagcataatttcccagaggcc

SEQ ID NO: 2006863 - DNA, 25 bp, Homo sapien
ccagtctcaatccagggcaatagaa

SEQ ID NO: 2006864 - DNA, 25 bp, Homo sapien
gaaagctaagtggttcgttcaatca

SEQ ID NO: 2006865 - DNA, 25 bp, Homo sapien
tgtacattatggttgaaagggaacg

SEQ ID NO: 2006866 - DNA, 25 bp, Homo sapien
ggagcttatctgcaaaccgtagggc

SEQ ID NO: 2006867 - DNA, 25 bp, Homo sapien
ggatggagaggcaccttccgactac

SEQ ID NO: 2006868 - DNA, 25 bp, Homo sapien
gggtcctaacatcgatgatcctctt

SEQ ID NO: 2006869 - DNA, 25 bp, Homo sapien
tcttttgccgtcaccattgcctctg

SEQ ID NO: 2006870 - DNA, 25 bp, Homo sapien
ggcacacatatttgttatgttcctt

SEQ ID NO: 2006871 - DNA, 25 bp, Homo sapien
tgtgactgggttgaattcattggca

SEQ ID NO: 2006872 - DNA, 25 bp, Homo sapien
tagacagtaagagcttactatgaag

SEQ ID NO: 2006873 - DNA, 25 bp, Homo sapien
ttccttttagacagtaagagcttac

SEQ ID NO: 2006874 - DNA, 25 bp, Homo sapien
gaagatatctcataccagctgggtg

SEQ ID NO: 2006875 - DNA, 25 bp, Homo sapien
cgtaactagccgtgccaaaaggaca

SEQ ID NO: 2006876 - DNA, 25 bp, Homo sapien
tctttttagttggaacgccgcagca

SEQ ID NO: 2006877 - DNA, 25 bp, Homo sapien
tgaggcacctaacaccgcatttgag

SEQ ID NO: 2006878 - DNA, 25 bp, Homo sapien
tgagtttagagtaacatgtttagca

SEQ ID NO: 2006879 - DNA, 25 bp, Homo sapien
ccctagaaggctgcctttttctgga

SEQ ID NO: 2006880 - DNA, 25 bp, Homo sapien
tggtaaatctgtgggaacttcatca

SEQ ID NO: 2006881 - DNA, 25 bp, Homo sapien
gctggtgcttgctttgacaatatca

SEQ ID NO: 2006882 - DNA, 25 bp, Homo sapien
gggccaatgacgtgaacatgatcaa

SEQ ID NO: 2006883 - DNA, 25 bp, Homo sapien
gtacaagaaagccatcacgctggcc

SEQ ID NO: 2006884 - DNA, 25 bp, Homo sapien
taaccatgacaacgcctgtgaccct

SEQ ID NO: 2006885 - DNA, 25 bp, Homo sapien
gcccaacgtgctagagaggagaaat

SEQ ID NO: 2006886 - DNA, 25 bp, Homo sapien
tcaacccaggctatacagcaagacc

SEQ ID NO: 2006887 - DNA, 25 bp, Homo sapien
cacttcaacccaggctatacagcaa

SEQ ID NO: 2006888 - DNA, 25 bp, Homo sapien
actgcacttcaacccaggctataca

SEQ ID NO: 2006889 - DNA, 25 bp, Homo sapien
tgcacttcaacccaggctatacagc

SEQ ID NO: 2006890 - DNA, 25 bp, Homo sapien
tggcagcgagttgcgtagtcccagc

SEQ ID NO: 2006891 - DNA, 25 bp, Homo sapien
gcttggcagcgagttgcgtagtccc

SEQ ID NO: 2006892 - DNA, 25 bp, Homo sapien
tattcagttcaacagtaagaatgag

SEQ ID NO: 2006893 - DNA, 25 bp, Homo sapien
cagtaagaatgagcctggcaaacat

SEQ ID NO: 2006894 - DNA, 25 bp, Homo sapien
gcagtaattgtgaaacatggcagcc

SEQ ID NO: 2006895 - DNA, 25 bp, Homo sapien
gatctgggtgcttactggagacaaa

SEQ ID NO: 2006896 - DNA, 25 bp, Homo sapien
catttggtgggcacagagtagaaca

SEQ ID NO: 2006897 - DNA, 25 bp, Homo sapien
cagcaaccaggatgtataattagcc

SEQ ID NO: 2006898 - DNA, 25 bp, Homo sapien
aatatttgatctcatgcttaagaga

SEQ ID NO: 2006899 - DNA, 25 bp, Homo sapien
tgatctcatgcttaagagataattg

SEQ ID NO: 2006900 - DNA, 25 bp, Homo sapien
taagagataattgtaacttcagcat

SEQ ID NO: 2006901 - DNA, 25 bp, Homo sapien
ctcatgcttaagagataattgtaac

SEQ ID NO: 2006902 - DNA, 25 bp, Homo sapien
gacttaattgtgagttttagcctta

SEQ ID NO: 2006903 - DNA, 25 bp, Homo sapien
taattgtgagttttagccttaataa

SEQ ID NO: 2006904 - DNA, 25 bp, Homo sapien
aagacttaattgtgagttttagcct

SEQ ID NO: 2006905 - DNA, 25 bp, Homo sapien
cttaattgtgagttttagccttaat

SEQ ID NO: 2006906 - DNA, 25 bp, Homo sapien
agttgtcaggttcgtgcttatgtca

SEQ ID NO: 2006907 - DNA, 25 bp, Homo sapien
tcatgggaaaattgccagatactct

SEQ ID NO: 2006908 - DNA, 25 bp, Homo sapien
tatgtcattacaccccaaggcagct

SEQ ID NO: 2006909 - DNA, 25 bp, Homo sapien
tgacctcagctttaacaatggcttg

SEQ ID NO: 2006910 - DNA, 25 bp, Homo sapien
gacattctttaaccacgtgggctgc

SEQ ID NO: 2006911 - DNA, 25 bp, Homo sapien
ctcttctgtacttgatggcagggaa

SEQ ID NO: 2006912 - DNA, 25 bp, Homo sapien
gcaatgcaggcacataacagaccac

SEQ ID NO: 2006913 - DNA, 25 bp, Homo sapien
gaagcagcaggtagacatttgtagc

SEQ ID NO: 2006914 - DNA, 25 bp, Homo sapien
ctttcctgactacgaataacacagg

SEQ ID NO: 2006915 - DNA, 25 bp, Homo sapien
cttgtaatgagcacccagattttta

SEQ ID NO: 2006916 - DNA, 25 bp, Homo sapien
tacagagatatgtacgtatcataag

SEQ ID NO: 2006917 - DNA, 25 bp, Homo sapien
tacattcctttccagtgattacaag

SEQ ID NO: 2006918 - DNA, 25 bp, Homo sapien
tattatgccatatatcgctgtgcca

SEQ ID NO: 2006919 - DNA, 25 bp, Homo sapien
tgtgccaacttaagttgccgaaggg

SEQ ID NO: 2006920 - DNA, 25 bp, Homo sapien
ctagatggccggatttaggaagtgc

SEQ ID NO: 2006921 - DNA, 25 bp, Homo sapien
ggttaaatagtttgccctctagcat

SEQ ID NO: 2006922 - DNA, 25 bp, Homo sapien
aatcgaagtcgggtcaattgcttgg

SEQ ID NO: 2006923 - DNA, 25 bp, Homo sapien
gctgggaatcgaagtcgggtcaatt

SEQ ID NO: 2006924 - DNA, 25 bp, Homo sapien
cgaagtcgggtcaattgcttggaag

SEQ ID NO: 2006925 - DNA, 25 bp, Homo sapien
attggctgggaatcgaagtcgggtc

SEQ ID NO: 2006926 - DNA, 25 bp, Homo sapien
gaagtcgggtcaattgcttggaagg

SEQ ID NO: 2006927 - DNA, 25 bp, Homo sapien
cctgtatcaaggaaagctagtcatt

SEQ ID NO: 2006928 - DNA, 25 bp, Homo sapien
taaagcgtagtctgccttcacttca

SEQ ID NO: 2006929 - DNA, 25 bp, Homo sapien
gaatccttcgatgcagtttgtgcca

SEQ ID NO: 2006930 - DNA, 25 bp, Homo sapien
tcagcctggatctctttaaggtgcc

SEQ ID NO: 2006931 - DNA, 25 bp, Homo sapien
gtactatgctgagaaggacacaccc

SEQ ID NO: 2006932 - DNA, 25 bp, Homo sapien
tcaatgaacagctcgggcagatcca

SEQ ID NO: 2006933 - DNA, 25 bp, Homo sapien
tcaaagcatcggcagattcagggtc

SEQ ID NO: 2006934 - DNA, 25 bp, Homo sapien
taaaaagtgctgtatcaacgggcag

SEQ ID NO: 2006935 - DNA, 25 bp, Homo sapien
tgtctctactagaaagtaacctcct

SEQ ID NO: 2006936 - DNA, 25 bp, Homo sapien
taggcacttaggaaatacttacgga

SEQ ID NO: 2006937 - DNA, 25 bp, Homo sapien
tacaaaggcctttactcagacaaca

SEQ ID NO: 2006938 - DNA, 25 bp, Homo sapien
gacatgtcccctgcacctagaatgg

SEQ ID NO: 2006939 - DNA, 25 bp, Homo sapien
gagggatagtgctttggaataaacc

SEQ ID NO: 2006940 - DNA, 25 bp, Homo sapien
gagacataggaatcacatacacacc

SEQ ID NO: 2006941 - DNA, 25 bp, Homo sapien
gttctgataaagaatagcccagaga

SEQ ID NO: 2006942 - DNA, 25 bp, Homo sapien
taatatgaaagttcactgcccttgg

SEQ ID NO: 2006943 - DNA, 25 bp, Homo sapien
gatgtcacttgaaatcacagaccag

SEQ ID NO: 2006944 - DNA, 25 bp, Homo sapien
tttaggcttcatgtccaggtatggc

SEQ ID NO: 2006945 - DNA, 25 bp, Homo sapien
caacaaacagtgaagggaaccaaca

SEQ ID NO: 2006946 - DNA, 25 bp, Homo sapien
gcactttggtagtcctagctgatgg

SEQ ID NO: 2006947 - DNA, 25 bp, Homo sapien
accgaacttccaagagagggttgca

SEQ ID NO: 2006948 - DNA, 25 bp, Homo sapien
taatgtacaagcaaatccaccgaac

SEQ ID NO: 2006949 - DNA, 25 bp, Homo sapien
gatcaaggtcatttctggtaacccc

SEQ ID NO: 2006950 - DNA, 25 bp, Homo sapien
cgtgtttgcggttcaattgcagaca

SEQ ID NO: 2006951 - DNA, 25 bp, Homo sapien
tactgctgatgttcggtaaaggcct

SEQ ID NO: 2006952 - DNA, 25 bp, Homo sapien
gaacctaaggcctagactcagggac

SEQ ID NO: 2006953 - DNA, 25 bp, Homo sapien
aaggcctatggcctcttcagtcagc

SEQ ID NO: 2006954 - DNA, 25 bp, Homo sapien
aaatcctttcagtcacccttcaggg

SEQ ID NO: 2006955 - DNA, 25 bp, Homo sapien
gcccatttacattcgatgttatatt

SEQ ID NO: 2006956 - DNA, 25 bp, Homo sapien
tctcttgtggtgtgctttaatttcc

SEQ ID NO: 2006957 - DNA, 25 bp, Homo sapien
gttctagtcactattttttatcagt

SEQ ID NO: 2006958 - DNA, 25 bp, Homo sapien
ccatgaggcttgtaagtactgtcta

SEQ ID NO: 2006959 - DNA, 25 bp, Homo sapien
agtgctgaaagtgtagtgttgatgt

SEQ ID NO: 2006960 - DNA, 25 bp, Homo sapien
gactcgttctgtgacttaatatacg

SEQ ID NO: 2006961 - DNA, 25 bp, Homo sapien
gggtgctccagtgtaaggtggataa

SEQ ID NO: 2006962 - DNA, 25 bp, Homo sapien
cctggctctagttcttttagatgca

SEQ ID NO: 2006963 - DNA, 25 bp, Homo sapien
tcagcctaatgacgaagtggttccc

SEQ ID NO: 2006964 - DNA, 25 bp, Homo sapien
cacacgtgccaaagatgatcggtct

SEQ ID NO: 2006965 - DNA, 25 bp, Homo sapien
caaaaccgagtcaacagggaagcag

SEQ ID NO: 2006966 - DNA, 25 bp, Homo sapien
tctcttcttaggatgcgactgacag

SEQ ID NO: 2006967 - DNA, 25 bp, Homo sapien
ggatcatctagattgttgcacatta

SEQ ID NO: 2006968 - DNA, 25 bp, Homo sapien
aaggtcattaatgcaatgtcatcaa

SEQ ID NO: 2006969 - DNA, 25 bp, Homo sapien
catcaaatactctttggatcatcta

SEQ ID NO: 2006970 - DNA, 25 bp, Homo sapien
ttaaggtcattaatgcaatgtcatc

SEQ ID NO: 2006971 - DNA, 25 bp, Homo sapien
caacgggtgcttccctggatcagga

SEQ ID NO: 2006972 - DNA, 25 bp, Homo sapien
tctgcgacggcagcaaaacagcagt

SEQ ID NO: 2006973 - DNA, 25 bp, Homo sapien
gacggcgagcgaaagctcagttcta

SEQ ID NO: 2006974 - DNA, 25 bp, Homo sapien
agcctttagcgcgatcaggagtggc

SEQ ID NO: 2006975 - DNA, 25 bp, Homo sapien
cgtactgccaggaaagtataaatat

SEQ ID NO: 2006976 - DNA, 25 bp, Homo sapien
taaccaatgaaagtataagtactgc

SEQ ID NO: 2006977 - DNA, 25 bp, Homo sapien
ccagggaattataagtataaccaat

SEQ ID NO: 2006978 - DNA, 25 bp, Homo sapien
tagtataaaccatgaaagtatacgt

SEQ ID NO: 2006979 - DNA, 25 bp, Homo sapien
ttgcaaaccattcatctaactaagg

SEQ ID NO: 2006980 - DNA, 25 bp, Homo sapien
catggtgatgccaatttagtggaaa

SEQ ID NO: 2006981 - DNA, 25 bp, Homo sapien
aaaagcttctactcagcaagggaag

SEQ ID NO: 2006982 - DNA, 25 bp, Homo sapien
gatcgtggtctttccatggacatgg

SEQ ID NO: 2006983 - DNA, 25 bp, Homo sapien
catgcacactgcagagaagtcgagt

SEQ ID NO: 2006984 - DNA, 25 bp, Homo sapien
ggacatttcttcactctcagcggag

SEQ ID NO: 2006985 - DNA, 25 bp, Homo sapien
tattcttcgaaactctggcagtcag

SEQ ID NO: 2006986 - DNA, 25 bp, Homo sapien
tcctctctcaacctcaaagggctgg

SEQ ID NO: 2006987 - DNA, 25 bp, Homo sapien
aaaaatgatgaaggaccaggcgtgg

SEQ ID NO: 2006988 - DNA, 25 bp, Homo sapien
gactataagcctcctaagtacagaa

SEQ ID NO: 2006989 - DNA, 25 bp, Homo sapien
catagccggtatgtcagtaatgagt

SEQ ID NO: 2006990 - DNA, 25 bp, Homo sapien
caaacgagcctcctatatgccagac

SEQ ID NO: 2006991 - DNA, 25 bp, Homo sapien
aatcagactagatgtttgcacaagg

SEQ ID NO: 2006992 - DNA, 25 bp, Homo sapien
ggtgagcattgctcaatcaaaccca

SEQ ID NO: 2006993 - DNA, 25 bp, Homo sapien
tgttggatacttctataggtgtacc

SEQ ID NO: 2006994 - DNA, 25 bp, Homo sapien
gcagaaagcatctttaatgggcact

SEQ ID NO: 2006995 - DNA, 25 bp, Homo sapien
tatatgtgctgccgaagcaagcaca

SEQ ID NO: 2006996 - DNA, 25 bp, Homo sapien
tgtgtgtcatccttgtgcaaaggcc

SEQ ID NO: 2006997 - DNA, 25 bp, Homo sapien
gctaatcttctctatatcattccaa

SEQ ID NO: 2006998 - DNA, 25 bp, Homo sapien
ttttagtatatgtgctgccgaagca

SEQ ID NO: 2006999 - DNA, 25 bp, Homo sapien
aattccataaccacagtgaagaggg

SEQ ID NO: 2007000 - DNA, 25 bp, Homo sapien
cacacaggacggataaacagaaaac

SEQ ID NO: 2007001 - DNA, 25 bp, Homo sapien
ccagggagctacgaacacagtattc

SEQ ID NO: 2007002 - DNA, 25 bp, Homo sapien
gaccagtctgagctacacggtgaga

SEQ ID NO: 2007003 - DNA, 25 bp, Homo sapien
ttacctgtcccatgaacgaagcatg

SEQ ID NO: 2007004 - DNA, 25 bp, Homo sapien
gaaaagtcatagatccagtgacagg

SEQ ID NO: 2007005 - DNA, 25 bp, Homo sapien
gaccgggcttgttctggatccctat

SEQ ID NO: 2007006 - DNA, 25 bp, Homo sapien
tcacgatggccttcggcagtgcaca

SEQ ID NO: 2007007 - DNA, 25 bp, Homo sapien
ttcatagggacaggagccacgttgc

SEQ ID NO: 2007008 - DNA, 25 bp, Homo sapien
actttaagcttcatagggacaggag

SEQ ID NO: 2007009 - DNA, 25 bp, Homo sapien
gggacaggagccacgttgctcacca

SEQ ID NO: 2007010 - DNA, 25 bp, Homo sapien
aagcttcatagggacaggagccacg

SEQ ID NO: 2007011 - DNA, 25 bp, Homo sapien
tgccaacaggacttccgaacagatg

SEQ ID NO: 2007012 - DNA, 25 bp, Homo sapien
cttcattgacaggagggcggtctgt

SEQ ID NO: 2007013 - DNA, 25 bp, Homo sapien
tgcaactaggttataaagagcctcc

SEQ ID NO: 2007014 - DNA, 25 bp, Homo sapien
tcagcagaacctgggtcgcaaaagg

SEQ ID NO: 2007015 - DNA, 25 bp, Homo sapien
aaactcatcaaagcttgaagccaac

SEQ ID NO: 2007016 - DNA, 25 bp, Homo sapien
tgagtttatactcacactgtgccct

SEQ ID NO: 2007017 - DNA, 25 bp, Homo sapien
cagactgtagcatggcagagttatc

SEQ ID NO: 2007018 - DNA, 25 bp, Homo sapien
tccccttagggtagaatccatggca

SEQ ID NO: 2007019 - DNA, 25 bp, Homo sapien
tgctttcctccagagtagcatggaa

SEQ ID NO: 2007020 - DNA, 25 bp, Homo sapien
aaataagaatgcagggaatgtggga

SEQ ID NO: 2007021 - DNA, 25 bp, Homo sapien
tgaagacacctgaaggcagcacgtg

SEQ ID NO: 2007022 - DNA, 25 bp, Homo sapien
gttgttgaagacacctgaaggcagc

SEQ ID NO: 2007023 - DNA, 25 bp, Homo sapien
cacaggtgtgccatagtacccagct

SEQ ID NO: 2007024 - DNA, 25 bp, Homo sapien
ggcaaggttctaagtctccgatcta

SEQ ID NO: 2007025 - DNA, 25 bp, Homo sapien
tagaagcccgtggaatgctcctgag

SEQ ID NO: 2007026 - DNA, 25 bp, Homo sapien
gaaagatagagttccccagagcagg

SEQ ID NO: 2007027 - DNA, 25 bp, Homo sapien
cctgggctatgtaggaaacaggaat

SEQ ID NO: 2007028 - DNA, 25 bp, Homo sapien
attgcctttctcctgggctatgtag

SEQ ID NO: 2007029 - DNA, 25 bp, Homo sapien
tgggctatgtaggaaacaggaatca

SEQ ID NO: 2007030 - DNA, 25 bp, Homo sapien
cagccattgcctttctcctgggcta

SEQ ID NO: 2007031 - DNA, 25 bp, Homo sapien
gtttcataactggtccctgcaagca

SEQ ID NO: 2007032 - DNA, 25 bp, Homo sapien
cacaaggctgtgtgatgagttccaa

SEQ ID NO: 2007033 - DNA, 25 bp, Homo sapien
caggcctcatagcttcctaggtgca

SEQ ID NO: 2007034 - DNA, 25 bp, Homo sapien
tccaaatgagatagcttaggtagag

SEQ ID NO: 2007035 - DNA, 25 bp, Homo sapien
caaaattttgccactacccatggga

SEQ ID NO: 2007036 - DNA, 25 bp, Homo sapien
cttttccgacggaggcgtgtgcctg

SEQ ID NO: 2007037 - DNA, 25 bp, Homo sapien
ggaaactggcctccctgttggcgtg

SEQ ID NO: 2007038 - DNA, 25 bp, Homo sapien
aagaaaagttctgaagtgtctgccc

SEQ ID NO: 2007039 - DNA, 25 bp, Homo sapien
tccggtgactgtcgggtcgcgtccg

SEQ ID NO: 2007040 - DNA, 25 bp, Homo sapien
cgccagccccgctgagatggctgca

SEQ ID NO: 2007041 - DNA, 25 bp, Homo sapien
ccgccagccccgctgagatggctgc

SEQ ID NO: 2007042 - DNA, 25 bp, Homo sapien
cactgtttttccggtgactgtcggg

SEQ ID NO: 2007043 - DNA, 25 bp, Homo sapien
ccgtgcgctttattgtgggatgggg

SEQ ID NO: 2007044 - DNA, 25 bp, Homo sapien
atcttccgtgcgctttattgtggga

SEQ ID NO: 2007045 - DNA, 25 bp, Homo sapien
ttccgtgcgctttattgtgggatgg

SEQ ID NO: 2007046 - DNA, 25 bp, Homo sapien
gggaggtgatggggaagaccgacac

SEQ ID NO: 2007047 - DNA, 25 bp, Homo sapien
agggggtgagatcgctctcctcccc

SEQ ID NO: 2007048 - DNA, 25 bp, Homo sapien
tggagggggtgagatcgctctcctc

SEQ ID NO: 2007049 - DNA, 25 bp, Homo sapien
gagggggtgagatcgctctcctccc

SEQ ID NO: 2007050 - DNA, 25 bp, Homo sapien
atggagggggtgagatcgctctcct

SEQ ID NO: 2007051 - DNA, 25 bp, Homo sapien
ctttgggagcagatgccaacgtgtc

SEQ ID NO: 2007052 - DNA, 25 bp, Homo sapien
tgtccgaaaaggacttgcgggccaa

SEQ ID NO: 2007053 - DNA, 25 bp, Homo sapien
gggccaaacgtatctgaccgcggcc

SEQ ID NO: 2007054 - DNA, 25 bp, Homo sapien
gcagatgccaacgtgtccgaaaagg

SEQ ID NO: 2007055 - DNA, 25 bp, Homo sapien
cccgagcccgcacaggtgggatttg

SEQ ID NO: 2007056 - DNA, 25 bp, Homo sapien
agaccccggtgaccgggtcctgctg

SEQ ID NO: 2007057 - DNA, 25 bp, Homo sapien
tgtgcggtggctaccgcccctctgg

SEQ ID NO: 2007058 - DNA, 25 bp, Homo sapien
gatcggtagcgacacacatgtccgg

SEQ ID NO: 2007059 - DNA, 25 bp, Homo sapien
gccccttggcccggcggtgtcctgc

SEQ ID NO: 2007060 - DNA, 25 bp, Homo sapien
ccccttggcccggcggtgtcctgca

SEQ ID NO: 2007061 - DNA, 25 bp, Homo sapien
cccttggcccggcggtgtcctgcag

SEQ ID NO: 2007062 - DNA, 25 bp, Homo sapien
taagcaggggtgcggcgccgggggc

SEQ ID NO: 2007063 - DNA, 25 bp, Homo sapien
caggtaagcaggggtgcggcgccgg

SEQ ID NO: 2007064 - DNA, 25 bp, Homo sapien
ccagcgaacgccaggtaagcagggg

SEQ ID NO: 2007065 - DNA, 25 bp, Homo sapien
cccagcgaacgccaggtaagcaggg

SEQ ID NO: 2007066 - DNA, 25 bp, Homo sapien
gccaactagacacgcttccccgggc

SEQ ID NO: 2007067 - DNA, 25 bp, Homo sapien
aggcgggggagccactagcgagccg

SEQ ID NO: 2007068 - DNA, 25 bp, Homo sapien
cgagccgcgagagccggaggtgccg

SEQ ID NO: 2007069 - DNA, 25 bp, Homo sapien
ggccagcccccgtgcgccatgcagc

SEQ ID NO: 2007070 - DNA, 25 bp, Homo sapien
actccaggacgcacggagggcgtgg

SEQ ID NO: 2007071 - DNA, 25 bp, Homo sapien
cccggggcttgcagtccagcccctc

SEQ ID NO: 2007072 - DNA, 25 bp, Homo sapien
gccgccccggggcttgcagtccagc

SEQ ID NO: 2007073 - DNA, 25 bp, Homo sapien
ctgactccaggacgcacggagggcg

SEQ ID NO: 2007074 - DNA, 25 bp, Homo sapien
cttggcatcaagaggacacagctcc

SEQ ID NO: 2007075 - DNA, 25 bp, Homo sapien
ttggcatcaagaggacacagctccc

SEQ ID NO: 2007076 - DNA, 25 bp, Homo sapien
aaaaactcgatagcgtttggactcg

SEQ ID NO: 2007077 - DNA, 25 bp, Homo sapien
tttctggaagtcttgaggcgcagcc

SEQ ID NO: 2007078 - DNA, 25 bp, Homo sapien
aactttgacgcgcattcggtgaccg

SEQ ID NO: 2007079 - DNA, 25 bp, Homo sapien
tttggactcggcagaaagcctgctg

SEQ ID NO: 2007080 - DNA, 25 bp, Homo sapien
gacaaggtcggtttccaggtgagct

SEQ ID NO: 2007081 - DNA, 25 bp, Homo sapien
agcaacaccagctgatgcactctga

SEQ ID NO: 2007082 - DNA, 25 bp, Homo sapien
ggtttccaggtgagctaattccttc

SEQ ID NO: 2007083 - DNA, 25 bp, Homo sapien
ccagctgatgcactctgagaacctc

SEQ ID NO: 2007084 - DNA, 25 bp, Homo sapien
gcgcttgaacaggagggaattttct

SEQ ID NO: 2007085 - DNA, 25 bp, Homo sapien
aagctttccccaaggtccaatcctg

SEQ ID NO: 2007086 - DNA, 25 bp, Homo sapien
caatgggtctgggatggaatgcttc

SEQ ID NO: 2007087 - DNA, 25 bp, Homo sapien
ggacttatctagttagcgcttgaac

SEQ ID NO: 2007088 - DNA, 25 bp, Homo sapien
tttgcaatcgttgtggatgaacaac

SEQ ID NO: 2007089 - DNA, 25 bp, Homo sapien
acatgtcatagccagggtagatggg

SEQ ID NO: 2007090 - DNA, 25 bp, Homo sapien
cgttgtggatgaacaacatgtcata

SEQ ID NO: 2007091 - DNA, 25 bp, Homo sapien
tgtggatgaacaacatgtcatagcc

SEQ ID NO: 2007092 - DNA, 25 bp, Homo sapien
cctttgcctgcaagacgggcttggg

SEQ ID NO: 2007093 - DNA, 25 bp, Homo sapien
tgcaagacgggcttgggtaagatgg

SEQ ID NO: 2007094 - DNA, 25 bp, Homo sapien
cctgcaagacgggcttgggtaagat

SEQ ID NO: 2007095 - DNA, 25 bp, Homo sapien
ttgcctgcaagacgggcttgggtaa

SEQ ID NO: 2007096 - DNA, 25 bp, Homo sapien
ggctgtgacctcctgctcctcactc

SEQ ID NO: 2007097 - DNA, 25 bp, Homo sapien
gccagctcaaccagccttgcttcat

SEQ ID NO: 2007098 - DNA, 25 bp, Homo sapien
tcccattacagactccctcatccct

SEQ ID NO: 2007099 - DNA, 25 bp, Homo sapien
cctgagaatttcttggcaaaccttc

SEQ ID NO: 2007100 - DNA, 25 bp, Homo sapien
cacgatgtcataagtgttcaccaaa

SEQ ID NO: 2007101 - DNA, 25 bp, Homo sapien
tcatgggttctgtgttcgggtgccc

SEQ ID NO: 2007102 - DNA, 25 bp, Homo sapien
ttgagaaaacgaccaagaggtggcc

SEQ ID NO: 2007103 - DNA, 25 bp, Homo sapien
agcatgacgccccagatgagaacac

SEQ ID NO: 2007104 - DNA, 25 bp, Homo sapien
ggactccaggatgccagtgcacctc

SEQ ID NO: 2007105 - DNA, 25 bp, Homo sapien
ccaggatgccagtgcacctctccct

SEQ ID NO: 2007106 - DNA, 25 bp, Homo sapien
ctggactccaggatgccagtgcacc

SEQ ID NO: 2007107 - DNA, 25 bp, Homo sapien
ccctggactccaggatgccagtgca

SEQ ID NO: 2007108 - DNA, 25 bp, Homo sapien
gattttgtccccagcgctgttgtag

SEQ ID NO: 2007109 - DNA, 25 bp, Homo sapien
gaatgcacgtttccaccctgcttct

SEQ ID NO: 2007110 - DNA, 25 bp, Homo sapien
cccagcgctgttgtagaaagtctgt

SEQ ID NO: 2007111 - DNA, 25 bp, Homo sapien
tatcatttgaatgcacgtttccacc

SEQ ID NO: 2007112 - DNA, 25 bp, Homo sapien
cttgacccttgctcttctagcagac

SEQ ID NO: 2007113 - DNA, 25 bp, Homo sapien
tgacccttgctcttctagcagactc

SEQ ID NO: 2007114 - DNA, 25 bp, Homo sapien
tgcaagctgttcttgacccttgctc

SEQ ID NO: 2007115 - DNA, 25 bp, Homo sapien
aagctgttcttgacccttgctcttc

SEQ ID NO: 2007116 - DNA, 25 bp, Homo sapien
ttttcaccccattgaaggtccagtc

SEQ ID NO: 2007117 - DNA, 25 bp, Homo sapien
ccagctctgtggtccagttgacaac

SEQ ID NO: 2007118 - DNA, 25 bp, Homo sapien
tcaccccattgaaggtccagtccag

SEQ ID NO: 2007119 - DNA, 25 bp, Homo sapien
gctctgtggtccagttgacaaccat

SEQ ID NO: 2007120 - DNA, 25 bp, Homo sapien
tggggcccctcatgacatgtatacc

SEQ ID NO: 2007121 - DNA, 25 bp, Homo sapien
tgtataccaatcagcaaggccctgt

SEQ ID NO: 2007122 - DNA, 25 bp, Homo sapien
atgtataccaatcagcaaggccctg

SEQ ID NO: 2007123 - DNA, 25 bp, Homo sapien
catgtataccaatcagcaaggccct

SEQ ID NO: 2007124 - DNA, 25 bp, Homo sapien
tcatcgattactctacctgctttgt

SEQ ID NO: 2007125 - DNA, 25 bp, Homo sapien
ttagctcatcgattactctacctgc

SEQ ID NO: 2007126 - DNA, 25 bp, Homo sapien
ttattagctcatcgattactctacc

SEQ ID NO: 2007127 - DNA, 25 bp, Homo sapien
gctcatcgattactctacctgcttt

SEQ ID NO: 2007128 - DNA, 25 bp, Homo sapien
ctccttctacttccactgtctctcc

SEQ ID NO: 2007129 - DNA, 25 bp, Homo sapien
ctgtctctccataacccaggatcct

SEQ ID NO: 2007130 - DNA, 25 bp, Homo sapien
cactgtctctccataacccaggatc

SEQ ID NO: 2007131 - DNA, 25 bp, Homo sapien
ttccactgtctctccataacccagg

SEQ ID NO: 2007132 - DNA, 25 bp, Homo sapien
agagtcaaagtctaggcctggctct

SEQ ID NO: 2007133 - DNA, 25 bp, Homo sapien
ggagagtcaaagtctaggcctggct

SEQ ID NO: 2007134 - DNA, 25 bp, Homo sapien
acagcgagtgtggagagtcaaagtc

SEQ ID NO: 2007135 - DNA, 25 bp, Homo sapien
ttctggctgtgacagcgagtgtgga

SEQ ID NO: 2007136 - DNA, 25 bp, Homo sapien
gggaataggatgatatgttccagaa

SEQ ID NO: 2007137 - DNA, 25 bp, Homo sapien
ttctaggtgtctgcctgagatagga

SEQ ID NO: 2007138 - DNA, 25 bp, Homo sapien
tgggttgctaaatgtctagtgccac

SEQ ID NO: 2007139 - DNA, 25 bp, Homo sapien
tctaacaacaatactcaacttgatg

SEQ ID NO: 2007140 - DNA, 25 bp, Homo sapien
aaacttgtccactgcgtggtccctg

SEQ ID NO: 2007141 - DNA, 25 bp, Homo sapien
gaaacttgtccactgcgtggtccct

SEQ ID NO: 2007142 - DNA, 25 bp, Homo sapien
tgaaacttgtccactgcgtggtccc

SEQ ID NO: 2007143 - DNA, 25 bp, Homo sapien
aaaggccaaatgagaaaggcatgtc

SEQ ID NO: 2007144 - DNA, 25 bp, Homo sapien
tgagaaaggcatgtctctcacacat

SEQ ID NO: 2007145 - DNA, 25 bp, Homo sapien
gggaaaggccaaatgagaaaggcat

SEQ ID NO: 2007146 - DNA, 25 bp, Homo sapien
gccaaatgagaaaggcatgtctctc

SEQ ID NO: 2007147 - DNA, 25 bp, Homo sapien
gacatcaagcactgagatttaccag

SEQ ID NO: 2007148 - DNA, 25 bp, Homo sapien
tcaatatccgacatcaagcactgag

SEQ ID NO: 2007149 - DNA, 25 bp, Homo sapien
ctgagatttaccagccacacctaat

SEQ ID NO: 2007150 - DNA, 25 bp, Homo sapien
catgtcttatgcaatcaatatccga

SEQ ID NO: 2007151 - DNA, 25 bp, Homo sapien
ccctgttgtgagctgagaatcttga

SEQ ID NO: 2007152 - DNA, 25 bp, Homo sapien
tgagaatcttgacatccaaacttca

SEQ ID NO: 2007153 - DNA, 25 bp, Homo sapien
tgacatccaaacttcatagaactgc

SEQ ID NO: 2007154 - DNA, 25 bp, Homo sapien
cctgttgtgagctgagaatcttgac

SEQ ID NO: 2007155 - DNA, 25 bp, Homo sapien
gctattgttggtgactctgctccac

SEQ ID NO: 2007156 - DNA, 25 bp, Homo sapien
cctgctattgttggtgactctgctc

SEQ ID NO: 2007157 - DNA, 25 bp, Homo sapien
tattgttggtgactctgctccacag

SEQ ID NO: 2007158 - DNA, 25 bp, Homo sapien
ttcctgctattgttggtgactctgc

SEQ ID NO: 2007159 - DNA, 25 bp, Homo sapien
catacactgccattggtccgagaaa

SEQ ID NO: 2007160 - DNA, 25 bp, Homo sapien
tacactgccattggtccgagaaaaa

SEQ ID NO: 2007161 - DNA, 25 bp, Homo sapien
cactgccattggtccgagaaaaacg

SEQ ID NO: 2007162 - DNA, 25 bp, Homo sapien
tgccattggtccgagaaaaacggac

SEQ ID NO: 2007163 - DNA, 25 bp, Homo sapien
tagctttgggccatgcgtgggaaaa

SEQ ID NO: 2007164 - DNA, 25 bp, Homo sapien
aaaactctgagagctcgtagctttg

SEQ ID NO: 2007165 - DNA, 25 bp, Homo sapien
tcatctcgtgctgcaagaaggaaaa

SEQ ID NO: 2007166 - DNA, 25 bp, Homo sapien
gaacctatctttgtgtcatctcgtg

SEQ ID NO: 2007167 - DNA, 25 bp, Homo sapien
ctgctaaaagccaccctgatgatct

SEQ ID NO: 2007168 - DNA, 25 bp, Homo sapien
tgtagggtccttcactggtaccatg

SEQ ID NO: 2007169 - DNA, 25 bp, Homo sapien
taccatgtgagctggctttgcactc

SEQ ID NO: 2007170 - DNA, 25 bp, Homo sapien
gaaacgactgtgtctattgggtgcc

SEQ ID NO: 2007171 - DNA, 25 bp, Homo sapien
cactgcagtggactaaacccctcta

SEQ ID NO: 2007172 - DNA, 25 bp, Homo sapien
gactaaacccctctatggcgggaca

SEQ ID NO: 2007173 - DNA, 25 bp, Homo sapien
tcacttgtctgcatctgaactcttc

SEQ ID NO: 2007174 - DNA, 25 bp, Homo sapien
tatggcgggacacttagccctcact

SEQ ID NO: 2007175 - DNA, 25 bp, Homo sapien
tgagtagggcatggacccttttccc

SEQ ID NO: 2007176 - DNA, 25 bp, Homo sapien
tcccaggtcccagtgagtagggcat

SEQ ID NO: 2007177 - DNA, 25 bp, Homo sapien
cagtgagtagggcatggaccctttt

SEQ ID NO: 2007178 - DNA, 25 bp, Homo sapien
gtcccagtgagtagggcatggaccc

SEQ ID NO: 2007179 - DNA, 25 bp, Homo sapien
acctggataggaaccaagcaggcca

SEQ ID NO: 2007180 - DNA, 25 bp, Homo sapien
tcacctgaaccaaccttgtttggct

SEQ ID NO: 2007181 - DNA, 25 bp, Homo sapien
ctgaaccaaccttgtttggctccac

SEQ ID NO: 2007182 - DNA, 25 bp, Homo sapien
tgctggagccgatgacaacctggat

SEQ ID NO: 2007183 - DNA, 25 bp, Homo sapien
tgggaaatggattccttcatccagc

SEQ ID NO: 2007184 - DNA, 25 bp, Homo sapien
tatccctcaagagatgaagacattc

SEQ ID NO: 2007185 - DNA, 25 bp, Homo sapien
tcatccagcatgttagttctgcttt

SEQ ID NO: 2007186 - DNA, 25 bp, Homo sapien
agagatgaagacattctgaccctgg

SEQ ID NO: 2007187 - DNA, 25 bp, Homo sapien
cactgttctgtctaattcacgtgga

SEQ ID NO: 2007188 - DNA, 25 bp, Homo sapien
tcttgaggagcgtctataggtagtg

SEQ ID NO: 2007189 - DNA, 25 bp, Homo sapien
cagtcaactgtcgttcttctcagag

SEQ ID NO: 2007190 - DNA, 25 bp, Homo sapien
agcagtattgagagccagctgtggc

SEQ ID NO: 2007191 - DNA, 25 bp, Homo sapien
tgagacttcacagttggaataattt

SEQ ID NO: 2007192 - DNA, 25 bp, Homo sapien
gagacttcacagttggaataatttg

SEQ ID NO: 2007193 - DNA, 25 bp, Homo sapien
acttcacagttggaataatttgaca

SEQ ID NO: 2007194 - DNA, 25 bp, Homo sapien
gacttcacagttggaataatttgac

SEQ ID NO: 2007195 - DNA, 25 bp, Homo sapien
tgaaggcccctagaggcccataaat

SEQ ID NO: 2007196 - DNA, 25 bp, Homo sapien
cagtgttgaaggcccctagaggccc

SEQ ID NO: 2007197 - DNA, 25 bp, Homo sapien
gcaaaggagacagtgttgaaggccc

SEQ ID NO: 2007198 - DNA, 25 bp, Homo sapien
tgttgaaggcccctagaggcccata

SEQ ID NO: 2007199 - DNA, 25 bp, Homo sapien
tttgttttacgttccagacaacatc

SEQ ID NO: 2007200 - DNA, 25 bp, Homo sapien
ttttacgttccagacaacatctgtc

SEQ ID NO: 2007201 - DNA, 25 bp, Homo sapien
ggcattttgttttacgttccagaca

SEQ ID NO: 2007202 - DNA, 25 bp, Homo sapien
tacgttccagacaacatctgtctgc

SEQ ID NO: 2007203 - DNA, 25 bp, Homo sapien
tgctgggaacgtgctctttgaaaaa

SEQ ID NO: 2007204 - DNA, 25 bp, Homo sapien
tacacgccttttgtcagccatatgc

SEQ ID NO: 2007205 - DNA, 25 bp, Homo sapien
gacattgtgtttgctgggaacgtgc

SEQ ID NO: 2007206 - DNA, 25 bp, Homo sapien
aagccttttggaactgctagcagga

SEQ ID NO: 2007207 - DNA, 25 bp, Homo sapien
ggcctgtggcttctttgacggtctt

SEQ ID NO: 2007208 - DNA, 25 bp, Homo sapien
ctccaggaagacaaccggtaggcct

SEQ ID NO: 2007209 - DNA, 25 bp, Homo sapien
gcttctttgacggtcttggttagtg

SEQ ID NO: 2007210 - DNA, 25 bp, Homo sapien
gaagacaaccggtaggcctgtggct

SEQ ID NO: 2007211 - DNA, 25 bp, Homo sapien
tggtagcttctgtttggtgtttctg

SEQ ID NO: 2007212 - DNA, 25 bp, Homo sapien
ccatgtctggccactttggtagctt

SEQ ID NO: 2007213 - DNA, 25 bp, Homo sapien
cactttggtagcttctgtttggtgt

SEQ ID NO: 2007214 - DNA, 25 bp, Homo sapien
tggccactttggtagcttctgtttg

SEQ ID NO: 2007215 - DNA, 25 bp, Homo sapien
aaatattcacacctcctttgtggaa

SEQ ID NO: 2007216 - DNA, 25 bp, Homo sapien
aatattcacacctcctttgtggaaa

SEQ ID NO: 2007217 - DNA, 25 bp, Homo sapien
atattcacacctcctttgtggaaaa

SEQ ID NO: 2007218 - DNA, 25 bp, Homo sapien
caggcccaggtcttgtattgaggac

SEQ ID NO: 2007219 - DNA, 25 bp, Homo sapien
tttcacagttgacttcaccacaggc

SEQ ID NO: 2007220 - DNA, 25 bp, Homo sapien
ccaggtcttgtattgaggacaagga

SEQ ID NO: 2007221 - DNA, 25 bp, Homo sapien
ttcacagttgacttcaccacaggcc

SEQ ID NO: 2007222 - DNA, 25 bp, Homo sapien
tttacaatattttctagagccagtc

SEQ ID NO: 2007223 - DNA, 25 bp, Homo sapien
caatattttctagagccagtctgag

SEQ ID NO: 2007224 - DNA, 25 bp, Homo sapien
aatattttctagagccagtctgagc

SEQ ID NO: 2007225 - DNA, 25 bp, Homo sapien
tacaatattttctagagccagtctg

SEQ ID NO: 2007226 - DNA, 25 bp, Homo sapien
ccatcatgggcttcttgtttggttg

SEQ ID NO: 2007227 - DNA, 25 bp, Homo sapien
tcttgtttggttgaggggttttgca

SEQ ID NO: 2007228 - DNA, 25 bp, Homo sapien
tctgcccatcatgggcttcttgttt

SEQ ID NO: 2007229 - DNA, 25 bp, Homo sapien
tttgccattgagctccatctgccca

SEQ ID NO: 2007230 - DNA, 25 bp, Homo sapien
ggagatgcctgtgtcactccctggt

SEQ ID NO: 2007231 - DNA, 25 bp, Homo sapien
ttccacccccgggtgcagtgtgagt

SEQ ID NO: 2007232 - DNA, 25 bp, Homo sapien
gatgcctgtgtcactccctggttca

SEQ ID NO: 2007233 - DNA, 25 bp, Homo sapien
tgtgtcactccctggttcatgagct

SEQ ID NO: 2007234 - DNA, 25 bp, Homo sapien
ttccccgagctttcccttcagccat

SEQ ID NO: 2007235 - DNA, 25 bp, Homo sapien
cttccccgagctttcccttcagcca

SEQ ID NO: 2007236 - DNA, 25 bp, Homo sapien
ttccactttgatggagctacctcca

SEQ ID NO: 2007237 - DNA, 25 bp, Homo sapien
ttagtcctattgtactgctgcttcc

SEQ ID NO: 2007238 - DNA, 25 bp, Homo sapien
gcagcctagagccatggacaggagg

SEQ ID NO: 2007239 - DNA, 25 bp, Homo sapien
tccagctttttagcacatttgtagg

SEQ ID NO: 2007240 - DNA, 25 bp, Homo sapien
gggaaatgcactgcctacaggctca

SEQ ID NO: 2007241 - DNA, 25 bp, Homo sapien
gaaagctctaccaacaaggaggtga

SEQ ID NO: 2007242 - DNA, 25 bp, Homo sapien
cgtgcagggacctctacaacgagtg

SEQ ID NO: 2007243 - DNA, 25 bp, Homo sapien
tacaggctcagtggcaagggaacat

SEQ ID NO: 2007244 - DNA, 25 bp, Homo sapien
ggtacatcagagatattgtaggtgc

SEQ ID NO: 2007245 - DNA, 25 bp, Homo sapien
tctgctccccaaaggggctttcctg

SEQ ID NO: 2007246 - DNA, 25 bp, Homo sapien
ttctggtacatcagagatattgtag

SEQ ID NO: 2007247 - DNA, 25 bp, Homo sapien
cagagatattgtaggtgcgcagaat

SEQ ID NO: 2007248 - DNA, 25 bp, Homo sapien
gatgaatgcttgagtaacgtctgaa

SEQ ID NO: 2007249 - DNA, 25 bp, Homo sapien
tgttccttgcagttctgagtgaata

SEQ ID NO: 2007250 - DNA, 25 bp, Homo sapien
agtaacgtctgaagtgttccttgca

SEQ ID NO: 2007251 - DNA, 25 bp, Homo sapien
ccctttatatgatttgtgggggtgg

SEQ ID NO: 2007252 - DNA, 25 bp, Homo sapien
tgggagaggcagcatttagccacat

SEQ ID NO: 2007253 - DNA, 25 bp, Homo sapien
tctggcctgctctaatggactcaag

SEQ ID NO: 2007254 - DNA, 25 bp, Homo sapien
gatcatgtgctcgtggaatcctgga

SEQ ID NO: 2007255 - DNA, 25 bp, Homo sapien
tgtccttggtcttgtttgccagtag

SEQ ID NO: 2007256 - DNA, 25 bp, Homo sapien
gcggacggccggttctcccctctgc

SEQ ID NO: 2007257 - DNA, 25 bp, Homo sapien
agagcgcgccgagcaccgggcggca

SEQ ID NO: 2007258 - DNA, 25 bp, Homo sapien
tgcgcacgccctgccgggtaagcgg

SEQ ID NO: 2007259 - DNA, 25 bp, Homo sapien
gtgagggtgcccgagagcgcgccct

SEQ ID NO: 2007260 - DNA, 25 bp, Homo sapien
tcttcggaaagtccatagaccggct

SEQ ID NO: 2007261 - DNA, 25 bp, Homo sapien
aaagtccatagaccggctccccgag

SEQ ID NO: 2007262 - DNA, 25 bp, Homo sapien
ctcgtcttcggaaagtccatagacc

SEQ ID NO: 2007263 - DNA, 25 bp, Homo sapien
tcggaaagtccatagaccggctccc

SEQ ID NO: 2007264 - DNA, 25 bp, Homo sapien
aatcctggccgtagactttgcaaaa

SEQ ID NO: 2007265 - DNA, 25 bp, Homo sapien
gaggctccgaaatccacaatcctgg

SEQ ID NO: 2007266 - DNA, 25 bp, Homo sapien
gcgacccagacgtgacatgcatcat

SEQ ID NO: 2007267 - DNA, 25 bp, Homo sapien
caccctggaggtgccgggctttgaa

SEQ ID NO: 2007268 - DNA, 25 bp, Homo sapien
gtgggagacacggaagagagaatga

SEQ ID NO: 2007269 - DNA, 25 bp, Homo sapien
tccagtgaaaccgaccgcctgggag

SEQ ID NO: 2007270 - DNA, 25 bp, Homo sapien
cctttccagtgaaaccgaccgcctg

SEQ ID NO: 2007271 - DNA, 25 bp, Homo sapien
cagtgaaaccgaccgcctgggaggc

SEQ ID NO: 2007272 - DNA, 25 bp, Homo sapien
tgggttgtaaaattcacctctcgaa

SEQ ID NO: 2007273 - DNA, 25 bp, Homo sapien
ggaaatacctccctgctgagtaatg

SEQ ID NO: 2007274 - DNA, 25 bp, Homo sapien
acataccaataagagccgagcgtgg

SEQ ID NO: 2007275 - DNA, 25 bp, Homo sapien
tcatgaaatgcacaaccaggatagg

SEQ ID NO: 2007276 - DNA, 25 bp, Homo sapien
gactcctgtggacaaaagtggcaag

SEQ ID NO: 2007277 - DNA, 25 bp, Homo sapien
ttggaagaacaaccctgccgtttgc

SEQ ID NO: 2007278 - DNA, 25 bp, Homo sapien
tgaagtcatcagaactgccctggct

SEQ ID NO: 2007279 - DNA, 25 bp, Homo sapien
gatgacgcaaggaacagcacctaag

SEQ ID NO: 2007280 - DNA, 25 bp, Homo sapien
attcttcaggttctcagggtagtta

SEQ ID NO: 2007281 - DNA, 25 bp, Homo sapien
cttcaggttctcagggtagttagga

SEQ ID NO: 2007282 - DNA, 25 bp, Homo sapien
tcagggtagttaggagattcgtaag

SEQ ID NO: 2007283 - DNA, 25 bp, Homo sapien
ggagattcgtaagtaagtttgtgga

SEQ ID NO: 2007284 - DNA, 25 bp, Homo sapien
tctcaagaatcagcataagcatact

SEQ ID NO: 2007285 - DNA, 25 bp, Homo sapien
tcagctccctgtagatgtagttcaa

SEQ ID NO: 2007286 - DNA, 25 bp, Homo sapien
taagcatactctagaattcaacgtc

SEQ ID NO: 2007287 - DNA, 25 bp, Homo sapien
tcaacgtcaacatgggaagttcagc

SEQ ID NO: 2007288 - DNA, 25 bp, Homo sapien
aactatgcagaaaggtgctattgag

SEQ ID NO: 2007289 - DNA, 25 bp, Homo sapien
tcattgctgtcagtgaagtattcag

SEQ ID NO: 2007290 - DNA, 25 bp, Homo sapien
catcacttgaatggagtaaacggtc

SEQ ID NO: 2007291 - DNA, 25 bp, Homo sapien
gaagaggtgcctaatctatacgaga

SEQ ID NO: 2007292 - DNA, 25 bp, Homo sapien
tctggtattgacagtggcagtttca

SEQ ID NO: 2007293 - DNA, 25 bp, Homo sapien
tctgcaaccttcttccgtggaacac

SEQ ID NO: 2007294 - DNA, 25 bp, Homo sapien
tataaagcaatcaaacatgggtctg

SEQ ID NO: 2007295 - DNA, 25 bp, Homo sapien
tcctggagtcacaaaagaaacattg

SEQ ID NO: 2007296 - DNA, 25 bp, Homo sapien
gactcttggattgaaaggcacagaa

SEQ ID NO: 2007297 - DNA, 25 bp, Homo sapien
gaacctcatcaggttggactcttgg

SEQ ID NO: 2007298 - DNA, 25 bp, Homo sapien
catgttaccgtctgtcctgtgtgga

SEQ ID NO: 2007299 - DNA, 25 bp, Homo sapien
tacaaaatgattactggcaggatac

SEQ ID NO: 2007300 - DNA, 25 bp, Homo sapien
taatgctgacgtgtaacccacagga

SEQ ID NO: 2007301 - DNA, 25 bp, Homo sapien
ggattatgtgataaaatgacactgc

SEQ ID NO: 2007302 - DNA, 25 bp, Homo sapien
tgcagaaatgacagagtgttacttc

SEQ ID NO: 2007303 - DNA, 25 bp, Homo sapien
atgaataatgctgacgtgtaaccca

SEQ ID NO: 2007304 - DNA, 25 bp, Homo sapien
ggttgcagtgagctgagatagtgcc

SEQ ID NO: 2007305 - DNA, 25 bp, Homo sapien
gagtcacttgagcttgggagatgga

SEQ ID NO: 2007306 - DNA, 25 bp, Homo sapien
ctgagatagtgccactgcactccag

SEQ ID NO: 2007307 - DNA, 25 bp, Homo sapien
aggagagtcacttgagcttgggaga

SEQ ID NO: 2007308 - DNA, 25 bp, Homo sapien
gaagtgcatatcaactcaagatctg

SEQ ID NO: 2007309 - DNA, 25 bp, Homo sapien
agatctgagcgactccaaagcccaa

SEQ ID NO: 2007310 - DNA, 25 bp, Homo sapien
cgataacactaaagggctctggaac

SEQ ID NO: 2007311 - DNA, 25 bp, Homo sapien
tctggtcaccacactttaggaaagg

SEQ ID NO: 2007312 - DNA, 25 bp, Homo sapien
ccatgtaaagccctgagcaatggtg

SEQ ID NO: 2007313 - DNA, 25 bp, Homo sapien
aagggagcaggtactggtgactcac

SEQ ID NO: 2007314 - DNA, 25 bp, Homo sapien
taagtccatgtaaagccctgagcaa

SEQ ID NO: 2007315 - DNA, 25 bp, Homo sapien
tgaagggagcaggtactggtgactc

SEQ ID NO: 2007316 - DNA, 25 bp, Homo sapien
catgctcttacacgaactcttctag

SEQ ID NO: 2007317 - DNA, 25 bp, Homo sapien
ttggcatactgtgcccgagaaccgc

SEQ ID NO: 2007318 - DNA, 25 bp, Homo sapien
ggtgattcctactcatctccattca

SEQ ID NO: 2007319 - DNA, 25 bp, Homo sapien
gcttgcagagccagtatgtgaatgg

SEQ ID NO: 2007320 - DNA, 25 bp, Homo sapien
ggactttgcaagctgcactaggaaa

SEQ ID NO: 2007321 - DNA, 25 bp, Homo sapien
gctgggactgcatgtcttgctctag

SEQ ID NO: 2007322 - DNA, 25 bp, Homo sapien
aattgggcctttattctgcaggtag

SEQ ID NO: 2007323 - DNA, 25 bp, Homo sapien
caccatctgtggcagtgtaatgagg

SEQ ID NO: 2007324 - DNA, 25 bp, Homo sapien
aggtgccgccacctatgcagtcagg

SEQ ID NO: 2007325 - DNA, 25 bp, Homo sapien
gtgaaatgggtgcagtcgtccagcc

SEQ ID NO: 2007326 - DNA, 25 bp, Homo sapien
tgccaggtctgtaaggccctcaagg

SEQ ID NO: 2007327 - DNA, 25 bp, Homo sapien
gattacgaataaacacagtccacgg

SEQ ID NO: 2007328 - DNA, 25 bp, Homo sapien
cctggtgagatttcaagctccacag

SEQ ID NO: 2007329 - DNA, 25 bp, Homo sapien
gctccacagtgtcgatcaatgccca

SEQ ID NO: 2007330 - DNA, 25 bp, Homo sapien
gaaatgattacagggctggcagaga

SEQ ID NO: 2007331 - DNA, 25 bp, Homo sapien
catggccccaatgggcgaggattcc

SEQ ID NO: 2007332 - DNA, 25 bp, Homo sapien
atcttgggctgcatgtgacctgctt

SEQ ID NO: 2007333 - DNA, 25 bp, Homo sapien
attctgcaaggctgaaaggatttca

SEQ ID NO: 2007334 - DNA, 25 bp, Homo sapien
tgtgaaattgtatgaagcactgact

SEQ ID NO: 2007335 - DNA, 25 bp, Homo sapien
ggtttgcctcttgcaatgccacagt

SEQ ID NO: 2007336 - DNA, 25 bp, Homo sapien
tccacatggcaatttagcacaatga

SEQ ID NO: 2007337 - DNA, 25 bp, Homo sapien
tgtctgtgctactaaaggtctgggc

SEQ ID NO: 2007338 - DNA, 25 bp, Homo sapien
gcttcaggagtccttgaaatcagta

SEQ ID NO: 2007339 - DNA, 25 bp, Homo sapien
cagattattctgtaaagcaagcaga

SEQ ID NO: 2007340 - DNA, 25 bp, Homo sapien
aacattacctactctcttatttggg

SEQ ID NO: 2007341 - DNA, 25 bp, Homo sapien
ttaccgagcccgaggatgcatcatc

SEQ ID NO: 2007342 - DNA, 25 bp, Homo sapien
ctttaccgagcccgaggatgcatca

SEQ ID NO: 2007343 - DNA, 25 bp, Homo sapien
cttcctttaccgagcccgaggatgc

SEQ ID NO: 2007344 - DNA, 25 bp, Homo sapien
ctgtgcttcctttaccgagcccgag

SEQ ID NO: 2007345 - DNA, 25 bp, Homo sapien
tagcgctctccttgccgacagattt

SEQ ID NO: 2007346 - DNA, 25 bp, Homo sapien
cagcattgtcacagcccattatgcg

SEQ ID NO: 2007347 - DNA, 25 bp, Homo sapien
cattatgcgtttctgggcttcaggc

SEQ ID NO: 2007348 - DNA, 25 bp, Homo sapien
gattgaatcctcgaaagcatccgat

SEQ ID NO: 2007349 - DNA, 25 bp, Homo sapien
gtgtcttcttcacagggaccacccg

SEQ ID NO: 2007350 - DNA, 25 bp, Homo sapien
tgtaaaaccctattgctggccctcg

SEQ ID NO: 2007351 - DNA, 25 bp, Homo sapien
tctcccttccttcgacagctgtggg

SEQ ID NO: 2007352 - DNA, 25 bp, Homo sapien
ccacccgcaggaaggattaattctg

SEQ ID NO: 2007353 - DNA, 25 bp, Homo sapien
ttctctttcctagatgtgagacaac

SEQ ID NO: 2007354 - DNA, 25 bp, Homo sapien
ctatataatatgaacattctctttc

SEQ ID NO: 2007355 - DNA, 25 bp, Homo sapien
acattctctttcctagatgtgagac

SEQ ID NO: 2007356 - DNA, 25 bp, Homo sapien
tatataatatgaacattctctttcc

SEQ ID NO: 2007357 - DNA, 25 bp, Homo sapien
aatggcctaatggactaaattggac

SEQ ID NO: 2007358 - DNA, 25 bp, Homo sapien
tatcaggccacagggaaaatgccca

SEQ ID NO: 2007359 - DNA, 25 bp, Homo sapien
catgaagtaatgtgtgtggcagaat

SEQ ID NO: 2007360 - DNA, 25 bp, Homo sapien
aaatactaactgaaccacctgctgt

SEQ ID NO: 2007361 - DNA, 25 bp, Homo sapien
tccccttaaggctacgacatagtgt

SEQ ID NO: 2007362 - DNA, 25 bp, Homo sapien
gctctggccacgtgagatgcctgct

SEQ ID NO: 2007363 - DNA, 25 bp, Homo sapien
tcatgttgacaataatccccggtgt

SEQ ID NO: 2007364 - DNA, 25 bp, Homo sapien
gacaaaatgtcctactctctgaact

SEQ ID NO: 2007365 - DNA, 25 bp, Homo sapien
ggtcgccccaacttgttctttcatc

SEQ ID NO: 2007366 - DNA, 25 bp, Homo sapien
tctcagggtcgccccaacttgttct

SEQ ID NO: 2007367 - DNA, 25 bp, Homo sapien
tctctcagggtcgccccaacttgtt

SEQ ID NO: 2007368 - DNA, 25 bp, Homo sapien
tgggctctctcagggtcgccccaac

SEQ ID NO: 2007369 - DNA, 25 bp, Homo sapien
agcatcggcagtggggtccgatgtc

SEQ ID NO: 2007370 - DNA, 25 bp, Homo sapien
cggcagtggggtccgatgtcgtccc

SEQ ID NO: 2007371 - DNA, 25 bp, Homo sapien
tcggcagtggggtccgatgtcgtcc

SEQ ID NO: 2007372 - DNA, 25 bp, Homo sapien
catcggcagtggggtccgatgtcgt

SEQ ID NO: 2007373 - DNA, 25 bp, Homo sapien
ttccagttggcttccagctggggcc

SEQ ID NO: 2007374 - DNA, 25 bp, Homo sapien
tccagttggcttccagctggggcct

SEQ ID NO: 2007375 - DNA, 25 bp, Homo sapien
cagagccagagcacagaaaccaagc

SEQ ID NO: 2007376 - DNA, 25 bp, Homo sapien
gccctggaagaatggatgagatttg

SEQ ID NO: 2007377 - DNA, 25 bp, Homo sapien
cagccccttctgcattgcattgcag

SEQ ID NO: 2007378 - DNA, 25 bp, Homo sapien
ttgggggacagtaaggtgccctgga

SEQ ID NO: 2007379 - DNA, 25 bp, Homo sapien
aactcaagggcagagcaagttctga

SEQ ID NO: 2007380 - DNA, 25 bp, Homo sapien
gaaagcagtctacacggttgttcct

SEQ ID NO: 2007381 - DNA, 25 bp, Homo sapien
tttaacttgactcccaggaaagcag

SEQ ID NO: 2007382 - DNA, 25 bp, Homo sapien
ggtaactttccactgccgggtgaca

SEQ ID NO: 2007383 - DNA, 25 bp, Homo sapien
ctgtcagtccaaatcagagtgcttt

SEQ ID NO: 2007384 - DNA, 25 bp, Homo sapien
aaacaggattgatggctcggccagc

SEQ ID NO: 2007385 - DNA, 25 bp, Homo sapien
aactgtctccttttaagcacaggaa

SEQ ID NO: 2007386 - DNA, 25 bp, Homo sapien
tagaactgaaagacatcgtcccttc

SEQ ID NO: 2007387 - DNA, 25 bp, Homo sapien
gcaagatcacaggagaagggggtca

SEQ ID NO: 2007388 - DNA, 25 bp, Homo sapien
caagatcacaggagaagggggtcat

SEQ ID NO: 2007389 - DNA, 25 bp, Homo sapien
gtgaggcaagatcacaggagaaggg

SEQ ID NO: 2007390 - DNA, 25 bp, Homo sapien
aggcaagatcacaggagaagggggt

SEQ ID NO: 2007391 - DNA, 25 bp, Homo sapien
gaataatacactcatactgccctac

SEQ ID NO: 2007392 - DNA, 25 bp, Homo sapien
tgttttcataggaggtacaaccact

SEQ ID NO: 2007393 - DNA, 25 bp, Homo sapien
ttatctcatcgaatttttaacccaa

SEQ ID NO: 2007394 - DNA, 25 bp, Homo sapien
tcctatgggatatattatttgatgc

SEQ ID NO: 2007395 - DNA, 25 bp, Homo sapien
taggtggctgtcaaccgtcacggaa

SEQ ID NO: 2007396 - DNA, 25 bp, Homo sapien
gctggaagacgtgcctaagaagcca

SEQ ID NO: 2007397 - DNA, 25 bp, Homo sapien
cattgtcactagtttggccccttgg

SEQ ID NO: 2007398 - DNA, 25 bp, Homo sapien
tggttctcaaagtacggactcccga

SEQ ID NO: 2007399 - DNA, 25 bp, Homo sapien
aattccactgtctcattagacatcg

SEQ ID NO: 2007400 - DNA, 25 bp, Homo sapien
gtagaattccactgtctcattagac

SEQ ID NO: 2007401 - DNA, 25 bp, Homo sapien
gtctcattagacatcgagaagtcag

SEQ ID NO: 2007402 - DNA, 25 bp, Homo sapien
cactgtctcattagacatcgagaag

SEQ ID NO: 2007403 - DNA, 25 bp, Homo sapien
aaggaactggcggtcattaacccag

SEQ ID NO: 2007404 - DNA, 25 bp, Homo sapien
aaacacgggcaggtggcctcccaag

SEQ ID NO: 2007405 - DNA, 25 bp, Homo sapien
tcattaacccaggtcaaacacgggc

SEQ ID NO: 2007406 - DNA, 25 bp, Homo sapien
gcaggagagcagatgagtcgtatta

SEQ ID NO: 2007407 - DNA, 25 bp, Homo sapien
tgtgcataagcagttactagagtcc

SEQ ID NO: 2007408 - DNA, 25 bp, Homo sapien
tgcgagagcgtcatctggaaatcca

SEQ ID NO: 2007409 - DNA, 25 bp, Homo sapien
taaggtgcccgagccataagtgaca

SEQ ID NO: 2007410 - DNA, 25 bp, Homo sapien
cttttaggaagcacatgacaaggtg

SEQ ID NO: 2007411 - DNA, 25 bp, Homo sapien
atgctagctattccacagaaaagtg

SEQ ID NO: 2007412 - DNA, 25 bp, Homo sapien
tctacccggacatgcaacttgacta

SEQ ID NO: 2007413 - DNA, 25 bp, Homo sapien
tcttccttgtagttaggtgcagtca

SEQ ID NO: 2007414 - DNA, 25 bp, Homo sapien
ccaaaaggtatgaggcctcttcaaa

SEQ ID NO: 2007415 - DNA, 25 bp, Homo sapien
ctttggcgaaaagacactggagctg

SEQ ID NO: 2007416 - DNA, 25 bp, Homo sapien
gaagagctgacagcaagccccgttt

SEQ ID NO: 2007417 - DNA, 25 bp, Homo sapien
caccatctagtaggcggaagacaga

SEQ ID NO: 2007418 - DNA, 25 bp, Homo sapien
tatttactgagtacccatcacgtgc

SEQ ID NO: 2007419 - DNA, 25 bp, Homo sapien
tgcgcccggctgcaacaccccattt

SEQ ID NO: 2007420 - DNA, 25 bp, Homo sapien
cgcccggctgcaacaccccatttct

SEQ ID NO: 2007421 - DNA, 25 bp, Homo sapien
gcgcccggctgcaacaccccatttc

SEQ ID NO: 2007422 - DNA, 25 bp, Homo sapien
tgtgagaaggagaacaaaaaaagag

SEQ ID NO: 2007423 - DNA, 25 bp, Homo sapien
ctgtgagaaggagaacaaaaaaaga

SEQ ID NO: 2007424 - DNA, 25 bp, Homo sapien
ttactctgagaatacgggactctcc

SEQ ID NO: 2007425 - DNA, 25 bp, Homo sapien
aagatgtcctttttggcgagatcaa

SEQ ID NO: 2007426 - DNA, 25 bp, Homo sapien
acttttactctgagaatacgggact

SEQ ID NO: 2007427 - DNA, 25 bp, Homo sapien
ttttggcgagatcaattccagaaac

SEQ ID NO: 2007428 - DNA, 25 bp, Homo sapien
aacttcatgcaacacattgctgaca

SEQ ID NO: 2007429 - DNA, 25 bp, Homo sapien
caaaagggctgatttaaagatacag

SEQ ID NO: 2007430 - DNA, 25 bp, Homo sapien
ccaataggaacaaaagggctgattt

SEQ ID NO: 2007431 - DNA, 25 bp, Homo sapien
acattgctgacagccaataggaaca

SEQ ID NO: 2007432 - DNA, 25 bp, Homo sapien
tcatgcatgatcaatcacaggtgag

SEQ ID NO: 2007433 - DNA, 25 bp, Homo sapien
tgaaatctaggggtcaccaagggcc

SEQ ID NO: 2007434 - DNA, 25 bp, Homo sapien
tatagagggactccagtgtcaggca

SEQ ID NO: 2007435 - DNA, 25 bp, Homo sapien
aaatagaggcgtgcttactaatggc

SEQ ID NO: 2007436 - DNA, 25 bp, Homo sapien
aatgacattgcacctactgtggcag

SEQ ID NO: 2007437 - DNA, 25 bp, Homo sapien
taggaaaccaccaggtaatgcatct

SEQ ID NO: 2007438 - DNA, 25 bp, Homo sapien
tctaatctagcaatcgaggcaagtg

SEQ ID NO: 2007439 - DNA, 25 bp, Homo sapien
agggatccttctgcccatgcctaga

SEQ ID NO: 2007440 - DNA, 25 bp, Homo sapien
aatgtgtccctgaagaactacagca

SEQ ID NO: 2007441 - DNA, 25 bp, Homo sapien
gaaagcaggaatgtgtgcgcctact

SEQ ID NO: 2007442 - DNA, 25 bp, Homo sapien
taccttaaaacacgacagagctgct

SEQ ID NO: 2007443 - DNA, 25 bp, Homo sapien
tgctgccgacagaagtcactttgcg

SEQ ID NO: 2007444 - DNA, 25 bp, Homo sapien
tctgacctagggtgactgcagtctc

SEQ ID NO: 2007445 - DNA, 25 bp, Homo sapien
ggctcggttatccaatctgctccaa

SEQ ID NO: 2007446 - DNA, 25 bp, Homo sapien
agatgttcaagtggagtcgcggctc

SEQ ID NO: 2007447 - DNA, 25 bp, Homo sapien
cacgcgggccaactgctcagatgtt

SEQ ID NO: 2007448 - DNA, 25 bp, Homo sapien
ctcagcaggagtgttgccacccaaa

SEQ ID NO: 2007449 - DNA, 25 bp, Homo sapien
gggcctcagcaggagtgttgccacc

SEQ ID NO: 2007450 - DNA, 25 bp, Homo sapien
agcaggagtgttgccacccaaactg

SEQ ID NO: 2007451 - DNA, 25 bp, Homo sapien
aggagtgttgccacccaaactgggc

SEQ ID NO: 2007452 - DNA, 25 bp, Homo sapien
tgaggcgggcagcagtgttctgtcc

SEQ ID NO: 2007453 - DNA, 25 bp, Homo sapien
gaggcgggcagcagtgttctgtcct

SEQ ID NO: 2007454 - DNA, 25 bp, Homo sapien
aggcgggcagcagtgttctgtcctc

SEQ ID NO: 2007455 - DNA, 25 bp, Homo sapien
aggcgggcagcagtgttctgtcctc

SEQ ID NO: 2007456 - DNA, 25 bp, Homo sapien
ggcgggcagcagtgttctgtcccct

SEQ ID NO: 2007457 - DNA, 25 bp, Homo sapien
gaggcgggcagcagtgttctgtcct

SEQ ID NO: 2007458 - DNA, 25 bp, Homo sapien
tgaggcgggcagcagtgttctgtcc

SEQ ID NO: 2007459 - DNA, 25 bp, Homo sapien
cacctgtacctctcctctatggaag

SEQ ID NO: 2007460 - DNA, 25 bp, Homo sapien
acccctaaggtgagggtcaggtgca

SEQ ID NO: 2007461 - DNA, 25 bp, Homo sapien
tctgggacctaccacaagaagagag

SEQ ID NO: 2007462 - DNA, 25 bp, Homo sapien
taacccatcactcgtgtccttggct

SEQ ID NO: 2007463 - DNA, 25 bp, Homo sapien
caaacatttctggactacactgtgt

SEQ ID NO: 2007464 - DNA, 25 bp, Homo sapien
cttctccaagccaccactccaggga

SEQ ID NO: 2007465 - DNA, 25 bp, Homo sapien
tgaactgatcggtttctctggaaaa

SEQ ID NO: 2007466 - DNA, 25 bp, Homo sapien
ccacgcccagacaggagaacacttt

SEQ ID NO: 2007467 - DNA, 25 bp, Homo sapien
gaattctgatttacacgttcgttat

SEQ ID NO: 2007468 - DNA, 25 bp, Homo sapien
ctgatttacacgttcgttattggaa

SEQ ID NO: 2007469 - DNA, 25 bp, Homo sapien
gctgccagcagatgcacttgttctg

SEQ ID NO: 2007470 - DNA, 25 bp, Homo sapien
gggctgctaactccttaagctggct

SEQ ID NO: 2007471 - DNA, 25 bp, Homo sapien
cctaacaacagcaacggcggcgagg

SEQ ID NO: 2007472 - DNA, 25 bp, Homo sapien
tctagatgcagatggtctgtttccc

SEQ ID NO: 2007473 - DNA, 25 bp, Homo sapien
ggagaaatcctggtctccgccagct

SEQ ID NO: 2007474 - DNA, 25 bp, Homo sapien
caggtaaccaacagcctggagtggg

SEQ ID NO: 2007475 - DNA, 25 bp, Homo sapien
ataaagagaaaactggccatgccca

SEQ ID NO: 2007476 - DNA, 25 bp, Homo sapien
catccaaggcaaagagagcacataa

SEQ ID NO: 2007477 - DNA, 25 bp, Homo sapien
ttggttccacctcatcggtctcagc

SEQ ID NO: 2007478 - DNA, 25 bp, Homo sapien
tggccatgcccagttcctacaggtg

SEQ ID NO: 2007479 - DNA, 25 bp, Homo sapien
tatcactggtttgatgccgagttcc

SEQ ID NO: 2007480 - DNA, 25 bp, Homo sapien
ggtttgatgccgagttcctcccctg

SEQ ID NO: 2007481 - DNA, 25 bp, Homo sapien
gactactggatgtctggatctgatc

SEQ ID NO: 2007482 - DNA, 25 bp, Homo sapien
tctgctttatcactggtttgatgcc

SEQ ID NO: 2007483 - DNA, 25 bp, Homo sapien
tagccctgaaatttcaagatccgcc

SEQ ID NO: 2007484 - DNA, 25 bp, Homo sapien
ctaatgactaatgaatagccctgaa

SEQ ID NO: 2007485 - DNA, 25 bp, Homo sapien
tagcccaagctacttatgattataa

SEQ ID NO: 2007486 - DNA, 25 bp, Homo sapien
aagatccgccttcctacatgttttc

SEQ ID NO: 2007487 - DNA, 25 bp, Homo sapien
aagccattgtacagaaggtggtatc

SEQ ID NO: 2007488 - DNA, 25 bp, Homo sapien
accgcgccccatgctgaaagtttca

SEQ ID NO: 2007489 - DNA, 25 bp, Homo sapien
tcagctaagcaaagtccagacatat

SEQ ID NO: 2007490 - DNA, 25 bp, Homo sapien
attaaaggaattaaggaagccattg

SEQ ID NO: 2007491 - DNA, 25 bp, Homo sapien
ctggaaaacttgatataatcttcaa

SEQ ID NO: 2007492 - DNA, 25 bp, Homo sapien
cttcaaaccgatgttgctgggctga

SEQ ID NO: 2007493 - DNA, 25 bp, Homo sapien
actggaaaacttgatataatcttca

SEQ ID NO: 2007494 - DNA, 25 bp, Homo sapien
ttcaaaccgatgttgctgggctgaa

SEQ ID NO: 2007495 - DNA, 25 bp, Homo sapien
aattctcctgtaccttaagcagcag

SEQ ID NO: 2007496 - DNA, 25 bp, Homo sapien
tgtccagcaaagatgaattctcctg

SEQ ID NO: 2007497 - DNA, 25 bp, Homo sapien
gttaccatgtccagcaaagatgaat

SEQ ID NO: 2007498 - DNA, 25 bp, Homo sapien
gcaaagatgaattctcctgtacctt

SEQ ID NO: 2007499 - DNA, 25 bp, Homo sapien
gactagcgctgctggaaatctacct

SEQ ID NO: 2007500 - DNA, 25 bp, Homo sapien
gaaagtgttcagctggactagcgct

SEQ ID NO: 2007501 - DNA, 25 bp, Homo sapien
ccagttttaaagcagtgcccgtaca

SEQ ID NO: 2007502 - DNA, 25 bp, Homo sapien
taacacaactgagaaggaatgcgcc

SEQ ID NO: 2007503 - DNA, 25 bp, Homo sapien
gggccagcacaaacatactttaaaa

SEQ ID NO: 2007504 - DNA, 25 bp, Homo sapien
gaattccggccatcttaacacttaa

SEQ ID NO: 2007505 - DNA, 25 bp, Homo sapien
tactgaaagtaacccggctcattaa

SEQ ID NO: 2007506 - DNA, 25 bp, Homo sapien
tcattaatacgaaggtgtggcctgc

SEQ ID NO: 2007507 - DNA, 25 bp, Homo sapien
ctgtttataattgcatgtgatcctc

SEQ ID NO: 2007508 - DNA, 25 bp, Homo sapien
tctgcccaagaatctatgaccaaat

SEQ ID NO: 2007509 - DNA, 25 bp, Homo sapien
aaatgacctctgataacgtgacagg

SEQ ID NO: 2007510 - DNA, 25 bp, Homo sapien
tgaccttagtcagaggaggctgttt

SEQ ID NO: 2007511 - DNA, 25 bp, Homo sapien
tgtcatgctcaagatcaacttttaa

SEQ ID NO: 2007512 - DNA, 25 bp, Homo sapien
catgctcaagatcaacttttaatgg

SEQ ID NO: 2007513 - DNA, 25 bp, Homo sapien
tctgtgtcatgctcaagatcaactt

SEQ ID NO: 2007514 - DNA, 25 bp, Homo sapien
gttctgtgtcatgctcaagatcaac

SEQ ID NO: 2007515 - DNA, 25 bp, Homo sapien
ctggagtctgacacaccctggtttg

SEQ ID NO: 2007516 - DNA, 25 bp, Homo sapien
tttgatctagggtaacacagcggca

SEQ ID NO: 2007517 - DNA, 25 bp, Homo sapien
cttggtgagccgaggctattagcac

SEQ ID NO: 2007518 - DNA, 25 bp, Homo sapien
gctcagacttaagaccacagtaggt

SEQ ID NO: 2007519 - DNA, 25 bp, Homo sapien
tgatgtcacgaccaaaaaaaagttc

SEQ ID NO: 2007520 - DNA, 25 bp, Homo sapien
tatttttctgatgtcacgaccaaaa

SEQ ID NO: 2007521 - DNA, 25 bp, Homo sapien
acttggttatttttctgatgtcacg

SEQ ID NO: 2007522 - DNA, 25 bp, Homo sapien
aaaagttcaacagcaatggagcaga

SEQ ID NO: 2007523 - DNA, 25 bp, Homo sapien
taattccagaaacctgatgaggctg

SEQ ID NO: 2007524 - DNA, 25 bp, Homo sapien
ccagttgcttacattcttagcgtca

SEQ ID NO: 2007525 - DNA, 25 bp, Homo sapien
tagatcttcagctcactatgcacca

SEQ ID NO: 2007526 - DNA, 25 bp, Homo sapien
tgtataagcctcaatctagatatga

SEQ ID NO: 2007527 - DNA, 25 bp, Homo sapien
gctgctgctgatacacattcccagg

SEQ ID NO: 2007528 - DNA, 25 bp, Homo sapien
gcttctaatgtctgaacaggcagcc

SEQ ID NO: 2007529 - DNA, 25 bp, Homo sapien
ttggcactggcctaaacacaaacaa

SEQ ID NO: 2007530 - DNA, 25 bp, Homo sapien
caaacaaagaatggagctgctcgtc

SEQ ID NO: 2007531 - DNA, 25 bp, Homo sapien
tctaacggcaggaactactcaggga

SEQ ID NO: 2007532 - DNA, 25 bp, Homo sapien
taattctggcagacattggttccca

SEQ ID NO: 2007533 - DNA, 25 bp, Homo sapien
tattcccttggaaccctgaaagtca

SEQ ID NO: 2007534 - DNA, 25 bp, Homo sapien
caaagtggaggcaacaccgagctgt

SEQ ID NO: 2007535 - DNA, 25 bp, Homo sapien
cactgggacagcttgcaaaaagatt

SEQ ID NO: 2007536 - DNA, 25 bp, Homo sapien
aaaaggaagatggtcaatatggcac

SEQ ID NO: 2007537 - DNA, 25 bp, Homo sapien
gcagagggctcatggatgcagcata

SEQ ID NO: 2007538 - DNA, 25 bp, Homo sapien
gcaaatttctttcgactacctgaca

SEQ ID NO: 2007539 - DNA, 25 bp, Homo sapien
caagaagttcgagcattgagcctgg

SEQ ID NO: 2007540 - DNA, 25 bp, Homo sapien
aaggttgggcagacaccaaaatgca

SEQ ID NO: 2007541 - DNA, 25 bp, Homo sapien
ccaaaatgcaccctgaaggatctca

SEQ ID NO: 2007542 - DNA, 25 bp, Homo sapien
tggcctccaaatccacgtcaaggtt

SEQ ID NO: 2007543 - DNA, 25 bp, Homo sapien
atattcattagaaggagataagaca

SEQ ID NO: 2007544 - DNA, 25 bp, Homo sapien
catattcattagaaggagataagac

SEQ ID NO: 2007545 - DNA, 25 bp, Homo sapien
gcagtgggacccaacggaaggcctc

SEQ ID NO: 2007546 - DNA, 25 bp, Homo sapien
gggaaacttacatagcctctctgtg

SEQ ID NO: 2007547 - DNA, 25 bp, Homo sapien
tgcagagctcaaaccctgggtcttc

SEQ ID NO: 2007548 - DNA, 25 bp, Homo sapien
gtgcaaatctgggtacctggcccca

SEQ ID NO: 2007549 - DNA, 25 bp, Homo sapien
tctgaaggcacacatagaaccggga

SEQ ID NO: 2007550 - DNA, 25 bp, Homo sapien
tggacaccctcagccttagaaaaag

SEQ ID NO: 2007551 - DNA, 25 bp, Homo sapien
gatgaatcaggcgtcactttccagg

SEQ ID NO: 2007552 - DNA, 25 bp, Homo sapien
aaaacacagataactgggccccgct

SEQ ID NO: 2007553 - DNA, 25 bp, Homo sapien
aaaagatggatcaagagccggcacc

SEQ ID NO: 2007554 - DNA, 25 bp, Homo sapien
ttcattcaaaagagaaaacagtgga

SEQ ID NO: 2007555 - DNA, 25 bp, Homo sapien
cttttcattcaaaagagaaaacagt

SEQ ID NO: 2007556 - DNA, 25 bp, Homo sapien
tttaataggattatacttttcattc

SEQ ID NO: 2007557 - DNA, 25 bp, Homo sapien
cattcaaaagagaaaacagtggaac

SEQ ID NO: 2007558 - DNA, 25 bp, Homo sapien
tggaccaaagcaagttctctattct

SEQ ID NO: 2007559 - DNA, 25 bp, Homo sapien
tgtttttgtctggaccaaagcaagt

SEQ ID NO: 2007560 - DNA, 25 bp, Homo sapien
ggaccaaagcaagttctctattctc

SEQ ID NO: 2007561 - DNA, 25 bp, Homo sapien
taattgtttttgtctggaccaaagc

SEQ ID NO: 2007562 - DNA, 25 bp, Homo sapien
cttcattccattttgggttcagtgt

SEQ ID NO: 2007563 - DNA, 25 bp, Homo sapien
aattcttcattccattttgggttca

SEQ ID NO: 2007564 - DNA, 25 bp, Homo sapien
tcttcattccattttgggttcagtg

SEQ ID NO: 2007565 - DNA, 25 bp, Homo sapien
cctgaaataaaattcttcattccat

SEQ ID NO: 2007566 - DNA, 25 bp, Homo sapien
caaataggagtctgtgattagatgg

SEQ ID NO: 2007567 - DNA, 25 bp, Homo sapien
ggagtctgtgattagatgggtttac

SEQ ID NO: 2007568 - DNA, 25 bp, Homo sapien
caaatacttcaaataggagtctgtg

SEQ ID NO: 2007569 - DNA, 25 bp, Homo sapien
cagtctattttcgtcaaatacttca

SEQ ID NO: 2007570 - DNA, 25 bp, Homo sapien
aaagcatgactttgtcaacagctct

SEQ ID NO: 2007571 - DNA, 25 bp, Homo sapien
attttctatgatccagaaacatcaa

SEQ ID NO: 2007572 - DNA, 25 bp, Homo sapien
gaaacatcaattatttaacaaagag

SEQ ID NO: 2007573 - DNA, 25 bp, Homo sapien
tctgcaaagcatgactttgtcaaca

SEQ ID NO: 2007574 - DNA, 25 bp, Homo sapien
gaagaaatgctacctagagctgact

SEQ ID NO: 2007575 - DNA, 25 bp, Homo sapien
caatattaccacagttgggacacaa

SEQ ID NO: 2007576 - DNA, 25 bp, Homo sapien
actgttttccagtaagaagtcagca

SEQ ID NO: 2007577 - DNA, 25 bp, Homo sapien
tgctacctagagctgactgttttcc

SEQ ID NO: 2007578 - DNA, 25 bp, Homo sapien
catgaagaagtcgtcttctctctcc

SEQ ID NO: 2007579 - DNA, 25 bp, Homo sapien
tgttgctgcgaccagagccaaaatg

SEQ ID NO: 2007580 - DNA, 25 bp, Homo sapien
gggtgcgggctgcttctccgcggta

SEQ ID NO: 2007581 - DNA, 25 bp, Homo sapien
ttctccgcggtagggtgtggaatgc

SEQ ID NO: 2007582 - DNA, 25 bp, Homo sapien
ctggtcaagagctgcgggatgaaca

SEQ ID NO: 2007583 - DNA, 25 bp, Homo sapien
acatggacgagctccgcttaagcgc

SEQ ID NO: 2007584 - DNA, 25 bp, Homo sapien
tgcgggatgaacatggacgagctcc

SEQ ID NO: 2007585 - DNA, 25 bp, Homo sapien
gggcgggcgtcgatgctggtcaaga

SEQ ID NO: 2007586 - DNA, 25 bp, Homo sapien
gcagggagatctgcacggaggagct

SEQ ID NO: 2007587 - DNA, 25 bp, Homo sapien
gccttgcgctgcagggagatctgca

SEQ ID NO: 2007588 - DNA, 25 bp, Homo sapien
tccgtggccccgtccgtggccttgc

SEQ ID NO: 2007589 - DNA, 25 bp, Homo sapien
ctcgggcggcccgcacccgtccgtg

SEQ ID NO: 2007590 - DNA, 25 bp, Homo sapien
tcgggcgttgcgcatggaggcccat

SEQ ID NO: 2007591 - DNA, 25 bp, Homo sapien
gggtcgggcgttgcgcatggaggcc

SEQ ID NO: 2007592 - DNA, 25 bp, Homo sapien
cgttgcgcatggaggcccatcgtcg

SEQ ID NO: 2007593 - DNA, 25 bp, Homo sapien
gggcgttgcgcatggaggcccatcg

SEQ ID NO: 2007594 - DNA, 25 bp, Homo sapien
ggcgaggccctcgtggtggcagtgg

SEQ ID NO: 2007595 - DNA, 25 bp, Homo sapien
ctggggcgaggccctcgtggtggca

SEQ ID NO: 2007596 - DNA, 25 bp, Homo sapien
ggggcgaggccctcgtggtggcagt

SEQ ID NO: 2007597 - DNA, 25 bp, Homo sapien
gcgaggccctcgtggtggcagtggc

SEQ ID NO: 2007598 - DNA, 25 bp, Homo sapien
tcggcgagggctcccgggagccact

SEQ ID NO: 2007599 - DNA, 25 bp, Homo sapien
ctgccctcggaggggagctcccggg

SEQ ID NO: 2007600 - DNA, 25 bp, Homo sapien
cctcggcgagggctcccgggagcca

SEQ ID NO: 2007601 - DNA, 25 bp, Homo sapien
tgtccctcggcgagggctcccggga

SEQ ID NO: 2007602 - DNA, 25 bp, Homo sapien
tctccagccgaatgcgaggatacct

SEQ ID NO: 2007603 - DNA, 25 bp, Homo sapien
tgtcagctcccgtggaaacagggct

SEQ ID NO: 2007604 - DNA, 25 bp, Homo sapien
gaagccaaagttgaggtcgctgcct

SEQ ID NO: 2007605 - DNA, 25 bp, Homo sapien
catctggaacgtgctgcagggacca

SEQ ID NO: 2007606 - DNA, 25 bp, Homo sapien
aaatcatcgtgccagaactcggcca

SEQ ID NO: 2007607 - DNA, 25 bp, Homo sapien
tggaccacaaatcatcgtgccagaa

SEQ ID NO: 2007608 - DNA, 25 bp, Homo sapien
tcgtgccagaactcggccaaacatt

SEQ ID NO: 2007609 - DNA, 25 bp, Homo sapien
tcggccaaacattcagatccactgg

SEQ ID NO: 2007610 - DNA, 25 bp, Homo sapien
cagagtcatcatatgcctggtcgat

SEQ ID NO: 2007611 - DNA, 25 bp, Homo sapien
gctgcagagtcatcatatgcctggt

SEQ ID NO: 2007612 - DNA, 25 bp, Homo sapien
gagtcatcatatgcctggtcgatgg

SEQ ID NO: 2007613 - DNA, 25 bp, Homo sapien
ctaaaccacgaaagctgcagagtca

SEQ ID NO: 2007614 - DNA, 25 bp, Homo sapien
catgctgcttggtatgaactaagag

SEQ ID NO: 2007615 - DNA, 25 bp, Homo sapien
cagccaactctgaggtgggtttcca

SEQ ID NO: 2007616 - DNA, 25 bp, Homo sapien
tgtgcaggacatggaatatcatgct

SEQ ID NO: 2007617 - DNA, 25 bp, Homo sapien
gagaactagaaggttgcagacagga

SEQ ID NO: 2007618 - DNA, 25 bp, Homo sapien
ccttataataaatgcaatctgcaaa

SEQ ID NO: 2007619 - DNA, 25 bp, Homo sapien
gcaaatcagaagcagactcgctggt

SEQ ID NO: 2007620 - DNA, 25 bp, Homo sapien
tcaatggacaatacgccttataata

SEQ ID NO: 2007621 - DNA, 25 bp, Homo sapien
tgcaaaagtgcaaaaatatatccac

SEQ ID NO: 2007622 - DNA, 25 bp, Homo sapien
ggacctttgggcgaacggctgcttc

SEQ ID NO: 2007623 - DNA, 25 bp, Homo sapien
gaacggctgcttccgctgcagttcc

SEQ ID NO: 2007624 - DNA, 25 bp, Homo sapien
tcccagcgcaggacctttgggcgaa

SEQ ID NO: 2007625 - DNA, 25 bp, Homo sapien
ttgggcgaacggctgcttccgctgc

SEQ ID NO: 2007626 - DNA, 25 bp, Homo sapien
tcggtcggcctggttctctctctgt

SEQ ID NO: 2007627 - DNA, 25 bp, Homo sapien
cagtcagcccggttttctgtgtgac

SEQ ID NO: 2007628 - DNA, 25 bp, Homo sapien
tgtgtgaccatgtgggccggtcggc

SEQ ID NO: 2007629 - DNA, 25 bp, Homo sapien
ctctgtgtgaccacgtgggtcggtc

SEQ ID NO: 2007630 - DNA, 25 bp, Homo sapien
agctgctgacaaatgttcactgtat

SEQ ID NO: 2007631 - DNA, 25 bp, Homo sapien
cagctgctgacaaatgttcactgta

SEQ ID NO: 2007632 - DNA, 25 bp, Homo sapien
ctgctgacaaatgttcactgtatcc

SEQ ID NO: 2007633 - DNA, 25 bp, Homo sapien
gctgctgacaaatgttcactgtatc

SEQ ID NO: 2007634 - DNA, 25 bp, Homo sapien
ccaagtttgctctgtattatacaag

SEQ ID NO: 2007635 - DNA, 25 bp, Homo sapien
aaattcctggacattacgaagttgg

SEQ ID NO: 2007636 - DNA, 25 bp, Homo sapien
tgtattattcgacaagtttgaggaa

SEQ ID NO: 2007637 - DNA, 25 bp, Homo sapien
tggatatgataaaaacccaggaaaa

SEQ ID NO: 2007638 - DNA, 25 bp, Homo sapien
ggcattgattttcccaagagcacaa

SEQ ID NO: 2007639 - DNA, 25 bp, Homo sapien
cattgattttcccaagagcacaagc

SEQ ID NO: 2007640 - DNA, 25 bp, Homo sapien
attggcattgattttcccaagagca

SEQ ID NO: 2007641 - DNA, 25 bp, Homo sapien
attgattttcccaagagcacaagcc

SEQ ID NO: 2007642 - DNA, 25 bp, Homo sapien
caaagccttttggtgtgtgcccaca

SEQ ID NO: 2007643 - DNA, 25 bp, Homo sapien
gagactgtcggaaggtctgccgcaa

SEQ ID NO: 2007644 - DNA, 25 bp, Homo sapien
aactgtggtatgactccggtctggg

SEQ ID NO: 2007645 - DNA, 25 bp, Homo sapien
gcaaagtgatctgacaactgtggta

SEQ ID NO: 2007646 - DNA, 25 bp, Homo sapien
tgtccttgtaagagagatgcagaag

SEQ ID NO: 2007647 - DNA, 25 bp, Homo sapien
caaggcagccccagcggcagaggct

SEQ ID NO: 2007648 - DNA, 25 bp, Homo sapien
aagcaaggggcagatgtgttcctag

SEQ ID NO: 2007649 - DNA, 25 bp, Homo sapien
tgcagaaggagatctgacacagcag

SEQ ID NO: 2007650 - DNA, 25 bp, Homo sapien
ggatgtgatgcgttccatcacactt

SEQ ID NO: 2007651 - DNA, 25 bp, Homo sapien
gcgttccatcacacttccaagtgca

SEQ ID NO: 2007652 - DNA, 25 bp, Homo sapien
cacttccaagtgcacactggtgggc

SEQ ID NO: 2007653 - DNA, 25 bp, Homo sapien
actggtgggcacctccatagggcgc

SEQ ID NO: 2007654 - DNA, 25 bp, Homo sapien
tcaagtgcccatgcttgcaagaagt

SEQ ID NO: 2007655 - DNA, 25 bp, Homo sapien
caatgtcgtgtcaaaagccttcaac

SEQ ID NO: 2007656 - DNA, 25 bp, Homo sapien
gaaaagcccagaggagcaaaatgcc

SEQ ID NO: 2007657 - DNA, 25 bp, Homo sapien
taagaatgagcatcctaggcaccaa

SEQ ID NO: 2007658 - DNA, 25 bp, Homo sapien
caaaactgtcaaacgtccctgggag

SEQ ID NO: 2007659 - DNA, 25 bp, Homo sapien
ggctgtcctatgcttcgtaaggtat

SEQ ID NO: 2007660 - DNA, 25 bp, Homo sapien
tacttctgactagggtatctcaaag

SEQ ID NO: 2007661 - DNA, 25 bp, Homo sapien
ctagataattctttccgtgagggct

SEQ ID NO: 2007662 - DNA, 25 bp, Homo sapien
actgatatgagattgaacttaattt

SEQ ID NO: 2007663 - DNA, 25 bp, Homo sapien
gcaaactgatatgagattgaactta

SEQ ID NO: 2007664 - DNA, 25 bp, Homo sapien
aaactgatatgagattgaacttaat

SEQ ID NO: 2007665 - DNA, 25 bp, Homo sapien
gatatgagattgaacttaatttaaa

SEQ ID NO: 2007666 - DNA, 25 bp, Homo sapien
gtgagcagcactgttgtgcttagga

SEQ ID NO: 2007667 - DNA, 25 bp, Homo sapien
cagcactgttgtgcttaggagcttt

SEQ ID NO: 2007668 - DNA, 25 bp, Homo sapien
ctctgccaactagatgcccaggtga

SEQ ID NO: 2007669 - DNA, 25 bp, Homo sapien
ggtgcgaacactgggataggactct

SEQ ID NO: 2007670 - DNA, 25 bp, Homo sapien
tcgaacatctgacctccaacgatct

SEQ ID NO: 2007671 - DNA, 25 bp, Homo sapien
aacatctgacctccaacgatctgcc

SEQ ID NO: 2007672 - DNA, 25 bp, Homo sapien
gtctcgaacatctgacctccaacga

SEQ ID NO: 2007673 - DNA, 25 bp, Homo sapien
gaacatctgacctccaacgatctgc

SEQ ID NO: 2007674 - DNA, 25 bp, Homo sapien
ttagatgacccgagaagcaaactgg

SEQ ID NO: 2007675 - DNA, 25 bp, Homo sapien
tagccagcttgagccacctaagaag

SEQ ID NO: 2007676 - DNA, 25 bp, Homo sapien
tttagatatgatgagaccagcccca

SEQ ID NO: 2007677 - DNA, 25 bp, Homo sapien
cattcaaaatgcgtaaaagctgggc

SEQ ID NO: 2007678 - DNA, 25 bp, Homo sapien
gaaggtgactaaggggcacgtccac

SEQ ID NO: 2007679 - DNA, 25 bp, Homo sapien
aggagaaagtccttaaatgtatagg

SEQ ID NO: 2007680 - DNA, 25 bp, Homo sapien
gaggagaaagtccttaaatgtatag

SEQ ID NO: 2007681 - DNA, 25 bp, Homo sapien
aagtccttaaatgtatagggtcgct

SEQ ID NO: 2007682 - DNA, 25 bp, Homo sapien
ccttaaatgtatagggtcgctccat

SEQ ID NO: 2007683 - DNA, 25 bp, Homo sapien
ggccattttcaatcgcaaaaatccc

SEQ ID NO: 2007684 - DNA, 25 bp, Homo sapien
tcttcatcttgacctccattttttg

SEQ ID NO: 2007685 - DNA, 25 bp, Homo sapien
tcaatcgcaaaaatcccttaactcg

SEQ ID NO: 2007686 - DNA, 25 bp, Homo sapien
aaatcccttaactcgagacttatga

SEQ ID NO: 2007687 - DNA, 25 bp, Homo sapien
aacatgaatatgatctcaaggcaag

SEQ ID NO: 2007688 - DNA, 25 bp, Homo sapien
gagaggcctgacgccctccacgtac

SEQ ID NO: 2007689 - DNA, 25 bp, Homo sapien
caaaacatgaatatgatctcaaggc

SEQ ID NO: 2007690 - DNA, 25 bp, Homo sapien
catgaatatgatctcaaggcaagga

SEQ ID NO: 2007691 - DNA, 25 bp, Homo sapien
ttgcatcccaaacaaccgcaggagc

SEQ ID NO: 2007692 - DNA, 25 bp, Homo sapien
ccaaacaaccgcaggagccaggagt

SEQ ID NO: 2007693 - DNA, 25 bp, Homo sapien
cccaaacaaccgcaggagccaggag

SEQ ID NO: 2007694 - DNA, 25 bp, Homo sapien
tctttgcatcccaaacaaccgcagg

SEQ ID NO: 2007695 - DNA, 25 bp, Homo sapien
gacatagtaagttcggcctaaattg

SEQ ID NO: 2007696 - DNA, 25 bp, Homo sapien
gaagccgagtcatttgagtcaacaa

SEQ ID NO: 2007697 - DNA, 25 bp, Homo sapien
tggtgctgagaagccgagtcatttg

SEQ ID NO: 2007698 - DNA, 25 bp, Homo sapien
tggtccggttgttgtggttgacata

SEQ ID NO: 2007699 - DNA, 25 bp, Homo sapien
ctgatgttattgtccgactccgagg

SEQ ID NO: 2007700 - DNA, 25 bp, Homo sapien
tattgtccgactccgaggacacgtc

SEQ ID NO: 2007701 - DNA, 25 bp, Homo sapien
tcgctgatgtgcctgcgggagcgga

SEQ ID NO: 2007702 - DNA, 25 bp, Homo sapien
gcggaagcgccggtgtgctgcctcc

SEQ ID NO: 2007703 - DNA, 25 bp, Homo sapien
gtctccagcgatattcacttcctct

SEQ ID NO: 2007704 - DNA, 25 bp, Homo sapien
gagtctccagcgatattcacttcct

SEQ ID NO: 2007705 - DNA, 25 bp, Homo sapien
gagagtctccagcgatattcacttc

SEQ ID NO: 2007706 - DNA, 25 bp, Homo sapien
ctccagcgatattcacttcctctga

SEQ ID NO: 2007707 - DNA, 25 bp, Homo sapien
ttccccattggagtctggagtgatc

SEQ ID NO: 2007708 - DNA, 25 bp, Homo sapien
tgttccccattggagtctggagtga

SEQ ID NO: 2007709 - DNA, 25 bp, Homo sapien
gttccccattggagtctggagtgat

SEQ ID NO: 2007710 - DNA, 25 bp, Homo sapien
tggtagatggccctgttctgcaact

SEQ ID NO: 2007711 - DNA, 25 bp, Homo sapien
ctgttctgcaactgcgtcggtgaca

SEQ ID NO: 2007712 - DNA, 25 bp, Homo sapien
aactgcgtcggtgacactgcatgac

SEQ ID NO: 2007713 - DNA, 25 bp, Homo sapien
gacactgcatgacctcaaccttgag

SEQ ID NO: 2007714 - DNA, 25 bp, Homo sapien
tgaaagcccaaaaagtcaactgatg

SEQ ID NO: 2007715 - DNA, 25 bp, Homo sapien
aaaggaacatgtggacggtcgccca

SEQ ID NO: 2007716 - DNA, 25 bp, Homo sapien
aaactaaagcaatggaggttccagc

SEQ ID NO: 2007717 - DNA, 25 bp, Homo sapien
aatccactttcctagggcaattggc

SEQ ID NO: 2007718 - DNA, 25 bp, Homo sapien
gtgacagttgatgaacgcgctctcc

SEQ ID NO: 2007719 - DNA, 25 bp, Homo sapien
cacccgtgacagttgatgaacgcgc

SEQ ID NO: 2007720 - DNA, 25 bp, Homo sapien
ccgtgacagttgatgaacgcgctct

SEQ ID NO: 2007721 - DNA, 25 bp, Homo sapien
cccgtgacagttgatgaacgcgctc

SEQ ID NO: 2007722 - DNA, 25 bp, Homo sapien
cccacagacaggaataccatacatt

SEQ ID NO: 2007723 - DNA, 25 bp, Homo sapien
ttctttaaacagctattgcagtgcg

SEQ ID NO: 2007724 - DNA, 25 bp, Homo sapien
agcctaactttagggatcaagtaga

SEQ ID NO: 2007725 - DNA, 25 bp, Homo sapien
gcataaactataagctagcctaact

SEQ ID NO: 2007726 - DNA, 25 bp, Homo sapien
tgccacccgggatctcattcagagg

SEQ ID NO: 2007727 - DNA, 25 bp, Homo sapien
tacacgcaggttgcaaggccaacaa

SEQ ID NO: 2007728 - DNA, 25 bp, Homo sapien
tgaattctactggaggctgcctcac

SEQ ID NO: 2007729 - DNA, 25 bp, Homo sapien
cagaaattacaagtgcacggtgggt

SEQ ID NO: 2007730 - DNA, 25 bp, Homo sapien
gacagaattgcaagacaggaagtca

SEQ ID NO: 2007731 - DNA, 25 bp, Homo sapien
tgatataataccatgatggctccag

SEQ ID NO: 2007732 - DNA, 25 bp, Homo sapien
gatgatataataccatgatggctcc

SEQ ID NO: 2007733 - DNA, 25 bp, Homo sapien
gagatgatataataccatgatggct

SEQ ID NO: 2007734 - DNA, 25 bp, Homo sapien
gatataataccatgatggctccagc

SEQ ID NO: 2007735 - DNA, 25 bp, Homo sapien
cacagcgtatggagttgaaagggca

SEQ ID NO: 2007736 - DNA, 25 bp, Homo sapien
tcaggacggttacttcagcacagcg

SEQ ID NO: 2007737 - DNA, 25 bp, Homo sapien
ttgtgatgcccaaaagccattagct

SEQ ID NO: 2007738 - DNA, 25 bp, Homo sapien
tacagacaggccatggaagggcccg

SEQ ID NO: 2007739 - DNA, 25 bp, Homo sapien
acagaacgctgaatttgattaaaat

SEQ ID NO: 2007740 - DNA, 25 bp, Homo sapien
tctggaaaggacacttgggaggcaa

SEQ ID NO: 2007741 - DNA, 25 bp, Homo sapien
tggaaaccttaaggatatttttgca

SEQ ID NO: 2007742 - DNA, 25 bp, Homo sapien
atgtgtcatagatcatgtcagaact

SEQ ID NO: 2007743 - DNA, 25 bp, Homo sapien
gggaggcaactgatcaactgaaagc

SEQ ID NO: 2007744 - DNA, 25 bp, Homo sapien
tatgtgcacccaagtctgctgatag

SEQ ID NO: 2007745 - DNA, 25 bp, Homo sapien
cccaagtctgctgataggagtgtgt

SEQ ID NO: 2007746 - DNA, 25 bp, Homo sapien
taggagtgtgtttctttgaaggtga

SEQ ID NO: 2007747 - DNA, 25 bp, Homo sapien
gctgataggagtgtgtttctttgaa

SEQ ID NO: 2007748 - DNA, 25 bp, Homo sapien
gaaatgaaccccatacagttgcaga

SEQ ID NO: 2007749 - DNA, 25 bp, Homo sapien
ttggttctaagaccccgtagtctca

SEQ ID NO: 2007750 - DNA, 25 bp, Homo sapien
cacttacaagtgtctggaaaacagc

SEQ ID NO: 2007751 - DNA, 25 bp, Homo sapien
caaacgtaaagggttgctgccaagg

SEQ ID NO: 2007752 - DNA, 25 bp, Homo sapien
cagacccggcgtggtatgtacatag

SEQ ID NO: 2007753 - DNA, 25 bp, Homo sapien
aaggcagacccggcgtggtatgtac

SEQ ID NO: 2007754 - DNA, 25 bp, Homo sapien
gacccggcgtggtatgtacataggc

SEQ ID NO: 2007755 - DNA, 25 bp, Homo sapien
cccggcgtggtatgtacataggcca

SEQ ID NO: 2007756 - DNA, 25 bp, Homo sapien
tatgtgcgccccttagcatcttttc

SEQ ID NO: 2007757 - DNA, 25 bp, Homo sapien
ccaagttgtggttcgattgttatga

SEQ ID NO: 2007758 - DNA, 25 bp, Homo sapien
tatgattgacatagtatgtgcgccc

SEQ ID NO: 2007759 - DNA, 25 bp, Homo sapien
ctgcatgataggtcgagtccaagtt

SEQ ID NO: 2007760 - DNA, 25 bp, Homo sapien
cataaacaccaggaaaggagttcgg

SEQ ID NO: 2007761 - DNA, 25 bp, Homo sapien
ttaagttggatggcaatcttcgtac

SEQ ID NO: 2007762 - DNA, 25 bp, Homo sapien
ggagttcggtcatgtacatttcggc

SEQ ID NO: 2007763 - DNA, 25 bp, Homo sapien
tacatttcggcttctatggcctgcg

SEQ ID NO: 2007764 - DNA, 25 bp, Homo sapien
gcagataaagttactgttggcgagc

SEQ ID NO: 2007765 - DNA, 25 bp, Homo sapien
gtttgtggctgatccggacgcacca

SEQ ID NO: 2007766 - DNA, 25 bp, Homo sapien
tgaggctcgattagatggttgttac

SEQ ID NO: 2007767 - DNA, 25 bp, Homo sapien
tactgttggcgagctgaggctacga

SEQ ID NO: 2007768 - DNA, 25 bp, Homo sapien
gacgtacgggtgagtccttggcacc

SEQ ID NO: 2007769 - DNA, 25 bp, Homo sapien
ccaggttgtagtctttgtgttatga

SEQ ID NO: 2007770 - DNA, 25 bp, Homo sapien
tatgatcaatgaagaagggccggcc

SEQ ID NO: 2007771 - DNA, 25 bp, Homo sapien
ggccgtttggcgctatcctcatttc

SEQ ID NO: 2007772 - DNA, 25 bp, Homo sapien
cagggagagtcgctttcatcaggca

SEQ ID NO: 2007773 - DNA, 25 bp, Homo sapien
gaagagagtcccagcagtgatgtta

SEQ ID NO: 2007774 - DNA, 25 bp, Homo sapien
tgtgaagtcacgtggctactccagg

SEQ ID NO: 2007775 - DNA, 25 bp, Homo sapien
ggtttcgaaatctctccatgggtcc

SEQ ID NO: 2007776 - DNA, 25 bp, Homo sapien
gggtttaaagatgtctttgaccgca

SEQ ID NO: 2007777 - DNA, 25 bp, Homo sapien
aagatgtctttgaccgcatatgtac

SEQ ID NO: 2007778 - DNA, 25 bp, Homo sapien
gaccgcatatgtactggaaatttca

SEQ ID NO: 2007779 - DNA, 25 bp, Homo sapien
tctttgaccgcatatgtactggaaa

SEQ ID NO: 2007780 - DNA, 25 bp, Homo sapien
attccatgtgtctccagtgtactca

SEQ ID NO: 2007781 - DNA, 25 bp, Homo sapien
caatgttgccctaatataccaggca

SEQ ID NO: 2007782 - DNA, 25 bp, Homo sapien
tgaacccaggaaccaaacagatttg

SEQ ID NO: 2007783 - DNA, 25 bp, Homo sapien
gattgaaccttaaccttcgcagcct

SEQ ID NO: 2007784 - DNA, 25 bp, Homo sapien
ctgagccgtcaccaacaagggagaa

SEQ ID NO: 2007785 - DNA, 25 bp, Homo sapien
cgttcggccatccaagtgaattctt

SEQ ID NO: 2007786 - DNA, 25 bp, Homo sapien
tcggccatccaagtgaattctttct

SEQ ID NO: 2007787 - DNA, 25 bp, Homo sapien
aaaacgttcggccatccaagtgaat

SEQ ID NO: 2007788 - DNA, 25 bp, Homo sapien
caatataaaacgttcggccatccaa

SEQ ID NO: 2007789 - DNA, 25 bp, Homo sapien
ttttctccacataacacctggctgc

SEQ ID NO: 2007790 - DNA, 25 bp, Homo sapien
tcattttctccacataacacctggc

SEQ ID NO: 2007791 - DNA, 25 bp, Homo sapien
tgtctctgcctcctagtaacatctg

SEQ ID NO: 2007792 - DNA, 25 bp, Homo sapien
gtagggcatacacatacatgaaagc

SEQ ID NO: 2007793 - DNA, 25 bp, Homo sapien
gaaattctgttcacaatgtctctgc

SEQ ID NO: 2007794 - DNA, 25 bp, Homo sapien
tctggtttaaacaaagggtagctca

SEQ ID NO: 2007795 - DNA, 25 bp, Homo sapien
ataacctggttcctgtcctgtaggc

SEQ ID NO: 2007796 - DNA, 25 bp, Homo sapien
ggcattgtggcatacgtgggcataa

SEQ ID NO: 2007797 - DNA, 25 bp, Homo sapien
ggcataacctggttcctgtcctgta

SEQ ID NO: 2007798 - DNA, 25 bp, Homo sapien
tgtggcatacgtgggcataacctgg

SEQ ID NO: 2007799 - DNA, 25 bp, Homo sapien
tgtagataggatacctgtggccaat

SEQ ID NO: 2007800 - DNA, 25 bp, Homo sapien
caggtctagtaagactgttgacagg

SEQ ID NO: 2007801 - DNA, 25 bp, Homo sapien
gagaaactcagtttagtcacgatga

SEQ ID NO: 2007802 - DNA, 25 bp, Homo sapien
gacatcattcctacaagatgtagag

SEQ ID NO: 2007803 - DNA, 25 bp, Homo sapien
tttgagagaatcttgatggaagcaa

SEQ ID NO: 2007804 - DNA, 25 bp, Homo sapien
agaatcttgatggaagcaaaaggca

SEQ ID NO: 2007805 - DNA, 25 bp, Homo sapien
caactgtttgagagaatcttgatgg

SEQ ID NO: 2007806 - DNA, 25 bp, Homo sapien
cttacctttcacagaagactttgga

SEQ ID NO: 2007807 - DNA, 25 bp, Homo sapien
gcagtcttgggtcttcccactgagt

SEQ ID NO: 2007808 - DNA, 25 bp, Homo sapien
ccagtaatagctgggttctgcagtc

SEQ ID NO: 2007809 - DNA, 25 bp, Homo sapien
ggttctgcagtcttgggtcttccca

SEQ ID NO: 2007810 - DNA, 25 bp, Homo sapien
cggaccagtaatagctgggttctgc

SEQ ID NO: 2007811 - DNA, 25 bp, Homo sapien
caacaatgacgtggcaaatgggagt

SEQ ID NO: 2007812 - DNA, 25 bp, Homo sapien
cccaacaatgacgtggcaaatggga

SEQ ID NO: 2007813 - DNA, 25 bp, Homo sapien
cacccaacaatgacgtggcaaatgg

SEQ ID NO: 2007814 - DNA, 25 bp, Homo sapien
attccacccaacaatgacgtggcaa

SEQ ID NO: 2007815 - DNA, 25 bp, Homo sapien
tactgatactctggtcagcagacca

SEQ ID NO: 2007816 - DNA, 25 bp, Homo sapien
ccaatggtgggcaaagaaatttgtc

SEQ ID NO: 2007817 - DNA, 25 bp, Homo sapien
caacaagctctcaggcgatactgat

SEQ ID NO: 2007818 - DNA, 25 bp, Homo sapien
taagaaccataaactggactaggct

SEQ ID NO: 2007819 - DNA, 25 bp, Homo sapien
tcaagtcggctgattataaagttct

SEQ ID NO: 2007820 - DNA, 25 bp, Homo sapien
agcagcatgtgtgaacatcacttac

SEQ ID NO: 2007821 - DNA, 25 bp, Homo sapien
gaaagtgttacacaacatgagatag

SEQ ID NO: 2007822 - DNA, 25 bp, Homo sapien
catgagatagtgttcatgacagcag

SEQ ID NO: 2007823 - DNA, 25 bp, Homo sapien
aataggtctacgtgaaaaatgaaca

SEQ ID NO: 2007824 - DNA, 25 bp, Homo sapien
tcactggccgggagacattggagct

SEQ ID NO: 2007825 - DNA, 25 bp, Homo sapien
tgattctgacccttgcaaggactgt

SEQ ID NO: 2007826 - DNA, 25 bp, Homo sapien
aaatctgccttattgtgtaggtcgg

SEQ ID NO: 2007827 - DNA, 25 bp, Homo sapien
aatttcttcctgaagtagtcatatt

SEQ ID NO: 2007828 - DNA, 25 bp, Homo sapien
gcttaaattctctggagtaagggac

SEQ ID NO: 2007829 - DNA, 25 bp, Homo sapien
taaattctctggagtaagggacagc

SEQ ID NO: 2007830 - DNA, 25 bp, Homo sapien
taatttcttcctgaagtagtcatat

SEQ ID NO: 2007831 - DNA, 25 bp, Homo sapien
gacatctggtcttttcacggacata

SEQ ID NO: 2007832 - DNA, 25 bp, Homo sapien
cagtctagcttttaggacatctggt

SEQ ID NO: 2007833 - DNA, 25 bp, Homo sapien
tctccgataggactcttcaaatatg

SEQ ID NO: 2007834 - DNA, 25 bp, Homo sapien
tcaagacctttctctgattcaaact

SEQ ID NO: 2007835 - DNA, 25 bp, Homo sapien
caaatgatcttgcttggttcacaat

SEQ ID NO: 2007836 - DNA, 25 bp, Homo sapien
ggttcacaatcatgtggatcagtag

SEQ ID NO: 2007837 - DNA, 25 bp, Homo sapien
gtagttttcaaactgggatcacaga

SEQ ID NO: 2007838 - DNA, 25 bp, Homo sapien
ctgcaaatttttagatttgtccaaa

SEQ ID NO: 2007839 - DNA, 25 bp, Homo sapien
aagtgaagtaggacaaatgatcctc

SEQ ID NO: 2007840 - DNA, 25 bp, Homo sapien
gagcttcccatgaaatacggccaga

SEQ ID NO: 2007841 - DNA, 25 bp, Homo sapien
gaggcctgaattagggttgatctga

SEQ ID NO: 2007842 - DNA, 25 bp, Homo sapien
gcaactcttccaataaaagtgaagt

SEQ ID NO: 2007843 - DNA, 25 bp, Homo sapien
gaaatttgaagacactgctgactag

SEQ ID NO: 2007844 - DNA, 25 bp, Homo sapien
atttgaagacactgctgactaggcc

SEQ ID NO: 2007845 - DNA, 25 bp, Homo sapien
ggaaatttgaagacactgctgacta

SEQ ID NO: 2007846 - DNA, 25 bp, Homo sapien
aatttgaagacactgctgactaggc

SEQ ID NO: 2007847 - DNA, 25 bp, Homo sapien
gcgtggccctatgcaggctccaata

SEQ ID NO: 2007848 - DNA, 25 bp, Homo sapien
agtaaaagcatgaagccgaccaggg

SEQ ID NO: 2007849 - DNA, 25 bp, Homo sapien
gggacattcccatcggacagatgtg

SEQ ID NO: 2007850 - DNA, 25 bp, Homo sapien
tgcagtacaggccaattctccccgg

SEQ ID NO: 2007851 - DNA, 25 bp, Homo sapien
aaagggcacactaagcagaggaaca

SEQ ID NO: 2007852 - DNA, 25 bp, Homo sapien
gaaaggccaggtgaaattccatctg

SEQ ID NO: 2007853 - DNA, 25 bp, Homo sapien
tctgttatcattgcttgggcagcga

SEQ ID NO: 2007854 - DNA, 25 bp, Homo sapien
acttgccagccgtttgccagggcgg

SEQ ID NO: 2007855 - DNA, 25 bp, Homo sapien
tgtcattcagggttatctgctttcc

SEQ ID NO: 2007856 - DNA, 25 bp, Homo sapien
ccatgtcattcagggttatctgctt

SEQ ID NO: 2007857 - DNA, 25 bp, Homo sapien
cattcagggttatctgctttcccaa

SEQ ID NO: 2007858 - DNA, 25 bp, Homo sapien
tccatgtcattcagggttatctgct

SEQ ID NO: 2007859 - DNA, 25 bp, Homo sapien
cttctcataagacacgagtgcccgg

SEQ ID NO: 2007860 - DNA, 25 bp, Homo sapien
ccagtgtgtgacgtgcatttactta

SEQ ID NO: 2007861 - DNA, 25 bp, Homo sapien
tgatggccagtgtgtgacgtgcatt

SEQ ID NO: 2007862 - DNA, 25 bp, Homo sapien
taagacacgagtgcccggtgatggc

SEQ ID NO: 2007863 - DNA, 25 bp, Homo sapien
caaagttttcttcgtctatgcagaa

SEQ ID NO: 2007864 - DNA, 25 bp, Homo sapien
tccaaagttttcttcgtctatgcag

SEQ ID NO: 2007865 - DNA, 25 bp, Homo sapien
cgtctatgcagaacatgaggtccag

SEQ ID NO: 2007866 - DNA, 25 bp, Homo sapien
tttcttcgtctatgcagaacatgag

SEQ ID NO: 2007867 - DNA, 25 bp, Homo sapien
gagctatttgtgtcaaaggcagcag

SEQ ID NO: 2007868 - DNA, 25 bp, Homo sapien
caagggtgagacaaaaaagcagcgg

SEQ ID NO: 2007869 - DNA, 25 bp, Homo sapien
aaggcactgtgccttgcaggtgtct

SEQ ID NO: 2007870 - DNA, 25 bp, Homo sapien
caggacagctggcagggtgacacct

SEQ ID NO: 2007871 - DNA, 25 bp, Homo sapien
tcaggagaagcagttgaggaggccg

SEQ ID NO: 2007872 - DNA, 25 bp, Homo sapien
gagaagcagttgaggaggccgttag

SEQ ID NO: 2007873 - DNA, 25 bp, Homo sapien
aggagaagcagttgaggaggccgtt

SEQ ID NO: 2007874 - DNA, 25 bp, Homo sapien
gaagcagttgaggaggccgttagac

SEQ ID NO: 2007875 - DNA, 25 bp, Homo sapien
tgggcttcaaatccacttgatatgt

SEQ ID NO: 2007876 - DNA, 25 bp, Homo sapien
tatttctgacccattgggcttcaaa

SEQ ID NO: 2007877 - DNA, 25 bp, Homo sapien
catttgtgaccattatttctgaccc

SEQ ID NO: 2007878 - DNA, 25 bp, Homo sapien
gacccattgggcttcaaatccactt

SEQ ID NO: 2007879 - DNA, 25 bp, Homo sapien
cctttatagggcagctcaatggagt

SEQ ID NO: 2007880 - DNA, 25 bp, Homo sapien
aattccttagggttgcacatgctga

SEQ ID NO: 2007881 - DNA, 25 bp, Homo sapien
gatcccagagttatgcatttgaagc

SEQ ID NO: 2007882 - DNA, 25 bp, Homo sapien
taattttgccctgctggtcactgac

SEQ ID NO: 2007883 - DNA, 25 bp, Homo sapien
ttagaggatgaatggtaagacctcc

SEQ ID NO: 2007884 - DNA, 25 bp, Homo sapien
taagacctccttatgcaactgaagt

SEQ ID NO: 2007885 - DNA, 25 bp, Homo sapien
tgtaaagtgtactcaggacaatgca

SEQ ID NO: 2007886 - DNA, 25 bp, Homo sapien
tacatgtataagatgcacacacccg

SEQ ID NO: 2007887 - DNA, 25 bp, Homo sapien
ctgcttctggaccctgttcacaaat

SEQ ID NO: 2007888 - DNA, 25 bp, Homo sapien
tggaccctgttcacaaatctccact

SEQ ID NO: 2007889 - DNA, 25 bp, Homo sapien
gcttctggaccctgttcacaaatct

SEQ ID NO: 2007890 - DNA, 25 bp, Homo sapien
tctggaccctgttcacaaatctcca

SEQ ID NO: 2007891 - DNA, 25 bp, Homo sapien
caaatcaataggaagtagttctgtg

SEQ ID NO: 2007892 - DNA, 25 bp, Homo sapien
tttaatcaaatcaataggaagtagt

SEQ ID NO: 2007893 - DNA, 25 bp, Homo sapien
caataggaagtagttctgtgaatcc

SEQ ID NO: 2007894 - DNA, 25 bp, Homo sapien
taatcaaatcaataggaagtagttc

SEQ ID NO: 2007895 - DNA, 25 bp, Homo sapien
cctctgatggacaaggcaactacag

SEQ ID NO: 2007896 - DNA, 25 bp, Homo sapien
ctctacttactaggcatgttccaga

SEQ ID NO: 2007897 - DNA, 25 bp, Homo sapien
tctgatggacaaggcaactacagct

SEQ ID NO: 2007898 - DNA, 25 bp, Homo sapien
gcctctacttactaggcatgttcca

SEQ ID NO: 2007899 - DNA, 25 bp, Homo sapien
tttgcctcgcctggtgcatagggcc

SEQ ID NO: 2007900 - DNA, 25 bp, Homo sapien
aatgagacgtcgttctacaggccca

SEQ ID NO: 2007901 - DNA, 25 bp, Homo sapien
tacaggcccaagtagatgcttacgg

SEQ ID NO: 2007902 - DNA, 25 bp, Homo sapien
tgcagcagaggatacttggccagtc

SEQ ID NO: 2007903 - DNA, 25 bp, Homo sapien
tcccacctatcagaggaaaggcttg

SEQ ID NO: 2007904 - DNA, 25 bp, Homo sapien
tgtttctctcgacacaacaaagggc

SEQ ID NO: 2007905 - DNA, 25 bp, Homo sapien
aataaagttcctaggcctgaccgtg

SEQ ID NO: 2007906 - DNA, 25 bp, Homo sapien
gaatggcagacatacgctaaggcac

SEQ ID NO: 2007907 - DNA, 25 bp, Homo sapien
ctcctcctgagaggttattcctctg

SEQ ID NO: 2007908 - DNA, 25 bp, Homo sapien
tcctcctgagaggttattcctctga

SEQ ID NO: 2007909 - DNA, 25 bp, Homo sapien
cctcctgagaggttattcctctgaa

SEQ ID NO: 2007910 - DNA, 25 bp, Homo sapien
ctcctgagaggttattcctctgaat

SEQ ID NO: 2007911 - DNA, 25 bp, Homo sapien
ccctctagtcttacgcatgggacct

SEQ ID NO: 2007912 - DNA, 25 bp, Homo sapien
ctgtggattctctcacgctccagca

SEQ ID NO: 2007913 - DNA, 25 bp, Homo sapien
catgggacctgtggattctctcacg

SEQ ID NO: 2007914 - DNA, 25 bp, Homo sapien
ctagtcttacgcatgggacctgtgg

SEQ ID NO: 2007915 - DNA, 25 bp, Homo sapien
cactgtgccgcgaaggtaagctagc

SEQ ID NO: 2007916 - DNA, 25 bp, Homo sapien
caagccacggcatgtcgtatcggat

SEQ ID NO: 2007917 - DNA, 25 bp, Homo sapien
aattcgaaccttgcgcaagccacgg

SEQ ID NO: 2007918 - DNA, 25 bp, Homo sapien
cagtcacgagggcagctcaattcga

SEQ ID NO: 2007919 - DNA, 25 bp, Homo sapien
attcacatccacatcaccgaggccg

SEQ ID NO: 2007920 - DNA, 25 bp, Homo sapien
tccagaaccactgaatgacggggtg

SEQ ID NO: 2007921 - DNA, 25 bp, Homo sapien
gcagtagccgttcttgtaaatagaa

SEQ ID NO: 2007922 - DNA, 25 bp, Homo sapien
agaatgctgtctccagtcattcaca

SEQ ID NO: 2007923 - DNA, 25 bp, Homo sapien
taaaagtcactttcacgaggtggtc

SEQ ID NO: 2007924 - DNA, 25 bp, Homo sapien
tatttacgcattggaggaccagtcc

SEQ ID NO: 2007925 - DNA, 25 bp, Homo sapien
tgaagtcagaccacaatggagggcg

SEQ ID NO: 2007926 - DNA, 25 bp, Homo sapien
ttgcaaagccatccctgaagcctgt

SEQ ID NO: 2007927 - DNA, 25 bp, Homo sapien
cattattatgggaatccaggtggct

SEQ ID NO: 2007928 - DNA, 25 bp, Homo sapien
tgtgttcgaggcttaccagttcccc

SEQ ID NO: 2007929 - DNA, 25 bp, Homo sapien
gattgtagacacgttccctagaaga

SEQ ID NO: 2007930 - DNA, 25 bp, Homo sapien
ccacttggactgctgtaggcaaaca

SEQ ID NO: 2007931 - DNA, 25 bp, Homo sapien
accggatacgcttttcggcgtccat

SEQ ID NO: 2007932 - DNA, 25 bp, Homo sapien
tactcgcgatgtccctgtgacaaac

SEQ ID NO: 2007933 - DNA, 25 bp, Homo sapien
gacaaactgcagtaaccggatacgc

SEQ ID NO: 2007934 - DNA, 25 bp, Homo sapien
cataaagttcggcaaatccattcat

SEQ ID NO: 2007935 - DNA, 25 bp, Homo sapien
tcaggactgccccattgctctattg

SEQ ID NO: 2007936 - DNA, 25 bp, Homo sapien
gctctattgtaaacagctgaggacc

SEQ ID NO: 2007937 - DNA, 25 bp, Homo sapien
tgccccattgctctattgtaaacag

SEQ ID NO: 2007938 - DNA, 25 bp, Homo sapien
agtttctcaggactgccccattgct

SEQ ID NO: 2007939 - DNA, 25 bp, Homo sapien
agcccccgctgcatgagaaacacag

SEQ ID NO: 2007940 - DNA, 25 bp, Homo sapien
acgctgctcaccgttttccagaagg

SEQ ID NO: 2007941 - DNA, 25 bp, Homo sapien
aacacagggctacgctgctcaccgt

SEQ ID NO: 2007942 - DNA, 25 bp, Homo sapien
tgctcaccgttttccagaaggccca

SEQ ID NO: 2007943 - DNA, 25 bp, Homo sapien
gcaaatcgccctggcaatagtgagg

SEQ ID NO: 2007944 - DNA, 25 bp, Homo sapien
ggttttcagacaaatggatggcctc

SEQ ID NO: 2007945 - DNA, 25 bp, Homo sapien
aagaccagagcctttagccacagaa

SEQ ID NO: 2007946 - DNA, 25 bp, Homo sapien
gaaaaagtccctacatatctggagg

SEQ ID NO: 2007947 - DNA, 25 bp, Homo sapien
catatggaggtaagtcaaggcgatt

SEQ ID NO: 2007948 - DNA, 25 bp, Homo sapien
ccttgagcattttccacggccatga

SEQ ID NO: 2007949 - DNA, 25 bp, Homo sapien
agtttctctcgtaaatcttcaaagg

SEQ ID NO: 2007950 - DNA, 25 bp, Homo sapien
tccacggccatgagaagtttctctc

SEQ ID NO: 2007951 - DNA, 25 bp, Homo sapien
gcaaatgcaaaagtgcaagcagaac

SEQ ID NO: 2007952 - DNA, 25 bp, Homo sapien
ctgttaggcaaatgcaaaagtgcaa

SEQ ID NO: 2007953 - DNA, 25 bp, Homo sapien
gaacttgcttgaagaacaaccaccc

SEQ ID NO: 2007954 - DNA, 25 bp, Homo sapien
gcaaaagtgcaagcagaacttgctt

SEQ ID NO: 2007955 - DNA, 25 bp, Homo sapien
accaggttcccgcatccgaacttgg

SEQ ID NO: 2007956 - DNA, 25 bp, Homo sapien
catccgaacttggacgagtgcgtgg

SEQ ID NO: 2007957 - DNA, 25 bp, Homo sapien
agtgcgtggtgaaggctcggctcca

SEQ ID NO: 2007958 - DNA, 25 bp, Homo sapien
tctctgccatcgcctctgcaaaagt

SEQ ID NO: 2007959 - DNA, 25 bp, Homo sapien
gcctgcagaggcacaacataaatag

SEQ ID NO: 2007960 - DNA, 25 bp, Homo sapien
tcaaccagttgataatttgtggtgg

SEQ ID NO: 2007961 - DNA, 25 bp, Homo sapien
gtaattagtgtacacatcaaccagt

SEQ ID NO: 2007962 - DNA, 25 bp, Homo sapien
gaggcacaacataaatagcattaag

SEQ ID NO: 2007963 - DNA, 25 bp, Homo sapien
gagtcgtaatactatacctgttgag

SEQ ID NO: 2007964 - DNA, 25 bp, Homo sapien
cctgttgagtgattaattccattca

SEQ ID NO: 2007965 - DNA, 25 bp, Homo sapien
catctttaatcataacgaaataaaa

SEQ ID NO: 2007966 - DNA, 25 bp, Homo sapien
tctgaaaatcggtctaaatcatttt

SEQ ID NO: 2007967 - DNA, 25 bp, Homo sapien
tacacggtattgaagcatgcaacag

SEQ ID NO: 2007968 - DNA, 25 bp, Homo sapien
tctgcaatggagacttacacgtgga

SEQ ID NO: 2007969 - DNA, 25 bp, Homo sapien
aaagatgactgtacagcgccaggaa

SEQ ID NO: 2007970 - DNA, 25 bp, Homo sapien
gaatcaaactgtgcaggtaccctca

SEQ ID NO: 2007971 - DNA, 25 bp, Homo sapien
ttatgctgtgaagatgactgggtgt

SEQ ID NO: 2007972 - DNA, 25 bp, Homo sapien
cctgcaattatgctgtgaagatgac

SEQ ID NO: 2007973 - DNA, 25 bp, Homo sapien
tttactgccacctgcaattatgctg

SEQ ID NO: 2007974 - DNA, 25 bp, Homo sapien
gccacctgcaattatgctgtgaaga

SEQ ID NO: 2007975 - DNA, 25 bp, Homo sapien
gacctctgggataggcaacactgcc

SEQ ID NO: 2007976 - DNA, 25 bp, Homo sapien
cactgaagctgggaatacaccgcaa

SEQ ID NO: 2007977 - DNA, 25 bp, Homo sapien
gaaaactggcttacacgggaacaca

SEQ ID NO: 2007978 - DNA, 25 bp, Homo sapien
taagagaaccgcaacaggcagtgtg

SEQ ID NO: 2007979 - DNA, 25 bp, Homo sapien
acacttttaccaggggcttcaccat

SEQ ID NO: 2007980 - DNA, 25 bp, Homo sapien
aggtacccgagacttgcagcccagc

SEQ ID NO: 2007981 - DNA, 25 bp, Homo sapien
gagggctctgcgctgtcaacactgc

SEQ ID NO: 2007982 - DNA, 25 bp, Homo sapien
ttcacccggaagcacggagggctca

SEQ ID NO: 2007983 - DNA, 25 bp, Homo sapien
gagggctcaggacgccttgtcccca

SEQ ID NO: 2007984 - DNA, 25 bp, Homo sapien
gcctggagccctggtaaaagggcat

SEQ ID NO: 2007985 - DNA, 25 bp, Homo sapien
gccctggtaaaagggcatatctgaa

SEQ ID NO: 2007986 - DNA, 25 bp, Homo sapien
tggagccctggtaaaagggcatatc

SEQ ID NO: 2007987 - DNA, 25 bp, Homo sapien
aattccgatggggaactgtgcagca

SEQ ID NO: 2007988 - DNA, 25 bp, Homo sapien
gggcaaaagcatgtggaggaaacac

SEQ ID NO: 2007989 - DNA, 25 bp, Homo sapien
gtggaggaaacacggtctcccctca

SEQ ID NO: 2007990 - DNA, 25 bp, Homo sapien
aaagcatgtggaggaaacacggtct

SEQ ID NO: 2007991 - DNA, 25 bp, Homo sapien
catgtggaggaaacacggtctcccc

SEQ ID NO: 2007992 - DNA, 25 bp, Homo sapien
aatgtagatattggagttgggctgc

SEQ ID NO: 2007993 - DNA, 25 bp, Homo sapien
tgaatgcccttgctcataaggagtg

SEQ ID NO: 2007994 - DNA, 25 bp, Homo sapien
caatacaggcaagcctttgaagggt

SEQ ID NO: 2007995 - DNA, 25 bp, Homo sapien
ggctgcaccagtgcaaactggactg

SEQ ID NO: 2007996 - DNA, 25 bp, Homo sapien
tttttgctgagaccaggaggcttgg

SEQ ID NO: 2007997 - DNA, 25 bp, Homo sapien
gctgagaccaggaggcttggaaatt

SEQ ID NO: 2007998 - DNA, 25 bp, Homo sapien
ggctcggatacctggaggcctccag

SEQ ID NO: 2007999 - DNA, 25 bp, Homo sapien
agccaagtgtggctcggatacctgg

SEQ ID NO: 2008000 - DNA, 25 bp, Homo sapien
gatctttgggaactccacctgtgag

SEQ ID NO: 2008001 - DNA, 25 bp, Homo sapien
atgatctttgggaactccacctgtg

SEQ ID NO: 2008002 - DNA, 25 bp, Homo sapien
tctttgggaactccacctgtgagtt

SEQ ID NO: 2008003 - DNA, 25 bp, Homo sapien
tttgggaactccacctgtgagttcc

SEQ ID NO: 2008004 - DNA, 25 bp, Homo sapien
cttggaagcacccagcccaactgag

SEQ ID NO: 2008005 - DNA, 25 bp, Homo sapien
gacttgtggcaagaaccatatgtga

SEQ ID NO: 2008006 - DNA, 25 bp, Homo sapien
gacctgaactgacatgcagctattg

SEQ ID NO: 2008007 - DNA, 25 bp, Homo sapien
aatgtgaagcaacctgacttgtggc

SEQ ID NO: 2008008 - DNA, 25 bp, Homo sapien
gcttgagcaacgtctcctctatgaa

SEQ ID NO: 2008009 - DNA, 25 bp, Homo sapien
ctgaggactgctctgtacaggggtc

SEQ ID NO: 2008010 - DNA, 25 bp, Homo sapien
acagccgggaccgcagaggaagcaa

SEQ ID NO: 2008011 - DNA, 25 bp, Homo sapien
cacagccgggaccgcagaggaagca

SEQ ID NO: 2008012 - DNA, 25 bp, Homo sapien
gaggactgctctgtacaggggtcct

SEQ ID NO: 2008013 - DNA, 25 bp, Homo sapien
ggcttttgaacattaacaagattga

SEQ ID NO: 2008014 - DNA, 25 bp, Homo sapien
gaggggaggcttttgaacattaaca

SEQ ID NO: 2008015 - DNA, 25 bp, Homo sapien
gaacattaacaagattgaaatttac

SEQ ID NO: 2008016 - DNA, 25 bp, Homo sapien
actggacacactccaactacagaaa

SEQ ID NO: 2008017 - DNA, 25 bp, Homo sapien
ccatatgagggcacgccatggaaga

SEQ ID NO: 2008018 - DNA, 25 bp, Homo sapien
gccgcggaatcgagggtccatatga

SEQ ID NO: 2008019 - DNA, 25 bp, Homo sapien
tgtgaccatagaggctgggtacccg

SEQ ID NO: 2008020 - DNA, 25 bp, Homo sapien
tcagcactaccaagaggacctactg

SEQ ID NO: 2008021 - DNA, 25 bp, Homo sapien
tttggaccagtccagagggcatcca

SEQ ID NO: 2008022 - DNA, 25 bp, Homo sapien
gaccagtccagagggcatccagatt

SEQ ID NO: 2008023 - DNA, 25 bp, Homo sapien
agtccagagggcatccagattcccc

SEQ ID NO: 2008024 - DNA, 25 bp, Homo sapien
agattttggaccagtccagagggca

SEQ ID NO: 2008025 - DNA, 25 bp, Homo sapien
tccgggctccattgccaaactttgg

SEQ ID NO: 2008026 - DNA, 25 bp, Homo sapien
gagttcaaaactccgggctccattg

SEQ ID NO: 2008027 - DNA, 25 bp, Homo sapien
tttggagtcgctcctcttccaactt

SEQ ID NO: 2008028 - DNA, 25 bp, Homo sapien
tgccaaactttggagtcgctcctct

SEQ ID NO: 2008029 - DNA, 25 bp, Homo sapien
cctcacgggaagactgccatgtatg

SEQ ID NO: 2008030 - DNA, 25 bp, Homo sapien
ggcagagaagacaggtcacctagtg

SEQ ID NO: 2008031 - DNA, 25 bp, Homo sapien
gactgccatgtatgacctggtcacc

SEQ ID NO: 2008032 - DNA, 25 bp, Homo sapien
cacactcagcaagattggaaagtcc

SEQ ID NO: 2008033 - DNA, 25 bp, Homo sapien
tcagctccggtcctctcagtccaag

SEQ ID NO: 2008034 - DNA, 25 bp, Homo sapien
agtcagctccggtcctctcagtcca

SEQ ID NO: 2008035 - DNA, 25 bp, Homo sapien
gtcagctccggtcctctcagtccaa

SEQ ID NO: 2008036 - DNA, 25 bp, Homo sapien
ttttcaacaccggagtcagcagcct

SEQ ID NO: 2008037 - DNA, 25 bp, Homo sapien
gcgctgggtggcatctttttcaaca

SEQ ID NO: 2008038 - DNA, 25 bp, Homo sapien
gacaaagttatggtgtgttcaacac

SEQ ID NO: 2008039 - DNA, 25 bp, Homo sapien
cacctcctgttgctcaggcgctggg

SEQ ID NO: 2008040 - DNA, 25 bp, Homo sapien
aaggccttgagggattctgtttagc

SEQ ID NO: 2008041 - DNA, 25 bp, Homo sapien
tacactggttgggaagtattaacac

SEQ ID NO: 2008042 - DNA, 25 bp, Homo sapien
cagcacaattttctacagtgtggaa

SEQ ID NO: 2008043 - DNA, 25 bp, Homo sapien
cagggtgacttgtccaaatgccagc

SEQ ID NO: 2008044 - DNA, 25 bp, Homo sapien
acctataaggttgctcatagtggca

SEQ ID NO: 2008045 - DNA, 25 bp, Homo sapien
ttctatggcccagaaatctatctcc

SEQ ID NO: 2008046 - DNA, 25 bp, Homo sapien
catagtggcattgtttataagggta

SEQ ID NO: 2008047 - DNA, 25 bp, Homo sapien
agtctggtagacttggaaattcaag

SEQ ID NO: 2008048 - DNA, 25 bp, Homo sapien
tcataccagggctatcgctgaccat

SEQ ID NO: 2008049 - DNA, 25 bp, Homo sapien
gcttggagcgctctatcctgggcaa

SEQ ID NO: 2008050 - DNA, 25 bp, Homo sapien
catactctcttaggtgggactcgcc

SEQ ID NO: 2008051 - DNA, 25 bp, Homo sapien
tagaacagaaatcgccacctcctgg

SEQ ID NO: 2008052 - DNA, 25 bp, Homo sapien
cagctgtaaatgaacccttccgtat

SEQ ID NO: 2008053 - DNA, 25 bp, Homo sapien
gtgttgtgatctactctccgtggca

SEQ ID NO: 2008054 - DNA, 25 bp, Homo sapien
ggagctccaaataaatccctacagg

SEQ ID NO: 2008055 - DNA, 25 bp, Homo sapien
ttttctagcaaaaagggagctccaa

SEQ ID NO: 2008056 - DNA, 25 bp, Homo sapien
ggaaccttgtcagctccacatattg

SEQ ID NO: 2008057 - DNA, 25 bp, Homo sapien
ccacatattgtgacctaagcagaga

SEQ ID NO: 2008058 - DNA, 25 bp, Homo sapien
aactctgtagccacgaaggtgttaa

SEQ ID NO: 2008059 - DNA, 25 bp, Homo sapien
gaaggtgttaacttcacctccacat

SEQ ID NO: 2008060 - DNA, 25 bp, Homo sapien
gtttagacacaaacaccattgtcac

SEQ ID NO: 2008061 - DNA, 25 bp, Homo sapien
taatggcgtttgatagtttagacac

SEQ ID NO: 2008062 - DNA, 25 bp, Homo sapien
gcctagcagtagctatttagtgtga

SEQ ID NO: 2008063 - DNA, 25 bp, Homo sapien
tatttagtgtgataatggcgtttga

SEQ ID NO: 2008064 - DNA, 25 bp, Homo sapien
taaatgattacctcgtgcctggcct

SEQ ID NO: 2008065 - DNA, 25 bp, Homo sapien
taagcttgcggtctgtctgcataac

SEQ ID NO: 2008066 - DNA, 25 bp, Homo sapien
gccaagacatttatcgagggaagga

SEQ ID NO: 2008067 - DNA, 25 bp, Homo sapien
tgctcaaagcaaacgatgccaagac

SEQ ID NO: 2008068 - DNA, 25 bp, Homo sapien
tataatgcgagccagtgaatgccca

SEQ ID NO: 2008069 - DNA, 25 bp, Homo sapien
gaggctttccagcaagggactcaga

SEQ ID NO: 2008070 - DNA, 25 bp, Homo sapien
ttggctcccgtttggaacaattaca

SEQ ID NO: 2008071 - DNA, 25 bp, Homo sapien
aaagtgtcttcaatgcctaggacag

SEQ ID NO: 2008072 - DNA, 25 bp, Homo sapien
tgaggatattgatcgcatactggcg

SEQ ID NO: 2008073 - DNA, 25 bp, Homo sapien
ggctgcaggtacaggacagaacttt

SEQ ID NO: 2008074 - DNA, 25 bp, Homo sapien
taacccaggttctacacagattcga

SEQ ID NO: 2008075 - DNA, 25 bp, Homo sapien
gaggaccagacgattccagaaccct

SEQ ID NO: 2008076 - DNA, 25 bp, Homo sapien
tggtgttgggacagtttgtctaccc

SEQ ID NO: 2008077 - DNA, 25 bp, Homo sapien
ttacagggttttgcaattttcagct

SEQ ID NO: 2008078 - DNA, 25 bp, Homo sapien
ggctgggtcatgtagatggctgctt

SEQ ID NO: 2008079 - DNA, 25 bp, Homo sapien
ggtggctgggtcatgtagatggctg

SEQ ID NO: 2008080 - DNA, 25 bp, Homo sapien
gcatggaagacccagtcctcacatt

SEQ ID NO: 2008081 - DNA, 25 bp, Homo sapien
cacattgtccccgagtctgggaaca

SEQ ID NO: 2008082 - DNA, 25 bp, Homo sapien
tgtttaattccacctgagaaaaatc

SEQ ID NO: 2008083 - DNA, 25 bp, Homo sapien
aaaggagcatggaagacccagtcct

SEQ ID NO: 2008084 - DNA, 25 bp, Homo sapien
taagggaggaattgtgatcaggccc

SEQ ID NO: 2008085 - DNA, 25 bp, Homo sapien
gccctttaggatcctcagtagccat

SEQ ID NO: 2008086 - DNA, 25 bp, Homo sapien
gaagcacttggctccctaaattaag

SEQ ID NO: 2008087 - DNA, 25 bp, Homo sapien
cagatttacactgagcggctttcct

SEQ ID NO: 2008088 - DNA, 25 bp, Homo sapien
gggtcaccacaagtgccagagtgct

SEQ ID NO: 2008089 - DNA, 25 bp, Homo sapien
gaatgtaactcaacctctgtcaaag

SEQ ID NO: 2008090 - DNA, 25 bp, Homo sapien
tgcctttctcacaaaccatggacgg

SEQ ID NO: 2008091 - DNA, 25 bp, Homo sapien
tacactttgctagccgaggtcacaa

SEQ ID NO: 2008092 - DNA, 25 bp, Homo sapien
ctccactgcccgctttgccccggcc

SEQ ID NO: 2008093 - DNA, 25 bp, Homo sapien
cctctgcagctgtgtggaatggcaa

SEQ ID NO: 2008094 - DNA, 25 bp, Homo sapien
cactgcccgctttgccccggccttt

SEQ ID NO: 2008095 - DNA, 25 bp, Homo sapien
tccctctgcagctgtgtggaatggc

SEQ ID NO: 2008096 - DNA, 25 bp, Homo sapien
caatgaatgctcaacccagggactg

SEQ ID NO: 2008097 - DNA, 25 bp, Homo sapien
tccttgcccagacaaataacagggt

SEQ ID NO: 2008098 - DNA, 25 bp, Homo sapien
gaaatgcccacgctcattgacgttg

SEQ ID NO: 2008099 - DNA, 25 bp, Homo sapien
gggcccagaagcatcagagaccatt

SEQ ID NO: 2008100 - DNA, 25 bp, Homo sapien
gctcaggagttggtgtgaagcaacc

SEQ ID NO: 2008101 - DNA, 25 bp, Homo sapien
tttgaaaagcctcgaggcagtcctg

SEQ ID NO: 2008102 - DNA, 25 bp, Homo sapien
gcgctcaggcatacaggaaacactg

SEQ ID NO: 2008103 - DNA, 25 bp, Homo sapien
ggcagtcctgatgcaaatgaccggg

SEQ ID NO: 2008104 - DNA, 25 bp, Homo sapien
ctaggtagcaaagaaaagtctgcac

SEQ ID NO: 2008105 - DNA, 25 bp, Homo sapien
cagtttgtgagaacgggtcaaagca

SEQ ID NO: 2008106 - DNA, 25 bp, Homo sapien
gctgtcagtttgtgagaacgggtca

SEQ ID NO: 2008107 - DNA, 25 bp, Homo sapien
ggcaagggcaatggccttggtgatg

SEQ ID NO: 2008108 - DNA, 25 bp, Homo sapien
gtgagaacgggtcaaagcagcagcc

SEQ ID NO: 2008109 - DNA, 25 bp, Homo sapien
tagaggagagcttgatgttattgaa

SEQ ID NO: 2008110 - DNA, 25 bp, Homo sapien
gggtagaggagagcttgatgttatt

SEQ ID NO: 2008111 - DNA, 25 bp, Homo sapien
gagagcttgatgttattgaattcat

SEQ ID NO: 2008112 - DNA, 25 bp, Homo sapien
gaggagagcttgatgttattgaatt

SEQ ID NO: 2008113 - DNA, 25 bp, Homo sapien
catgtcgcatgtaaggtgggtcact

SEQ ID NO: 2008114 - DNA, 25 bp, Homo sapien
tctgcaatggtgatcctgttggaga

SEQ ID NO: 2008115 - DNA, 25 bp, Homo sapien
aaaggatagcgagtttctgcaatgg

SEQ ID NO: 2008116 - DNA, 25 bp, Homo sapien
gtgggtcactagcagggaaacctgc

SEQ ID NO: 2008117 - DNA, 25 bp, Homo sapien
gaacgagggatttagagcgagaccc

SEQ ID NO: 2008118 - DNA, 25 bp, Homo sapien
cttgtgaagacagcgcattaggagg

SEQ ID NO: 2008119 - DNA, 25 bp, Homo sapien
ttgggtatgttcttgggcttgtgaa

SEQ ID NO: 2008120 - DNA, 25 bp, Homo sapien
gacctggctggcatacacttcaggg

SEQ ID NO: 2008121 - DNA, 25 bp, Homo sapien
tgaagttttatgttggaactgtctc

SEQ ID NO: 2008122 - DNA, 25 bp, Homo sapien
tgttggaactgtctccaggcttctc

SEQ ID NO: 2008123 - DNA, 25 bp, Homo sapien
tttccctgggatggctcagtgatga

SEQ ID NO: 2008124 - DNA, 25 bp, Homo sapien
tgatgatgaagttttatgttggaac

SEQ ID NO: 2008125 - DNA, 25 bp, Homo sapien
atgcaattctgtgttggaaccacca

SEQ ID NO: 2008126 - DNA, 25 bp, Homo sapien
accatcgcctttgcccactcctgct

SEQ ID NO: 2008127 - DNA, 25 bp, Homo sapien
tgttggaaccaccatcgcctttgcc

SEQ ID NO: 2008128 - DNA, 25 bp, Homo sapien
accaccatcgcctttgcccactcct

SEQ ID NO: 2008129 - DNA, 25 bp, Homo sapien
cactgcgttggagcaagtgcccata

SEQ ID NO: 2008130 - DNA, 25 bp, Homo sapien
tcactagattgcacgggtaaggtcc

SEQ ID NO: 2008131 - DNA, 25 bp, Homo sapien
ccctccatgggcaagtcacgtgctg

SEQ ID NO: 2008132 - DNA, 25 bp, Homo sapien
gacccaggcatctagcaggtgcaga

SEQ ID NO: 2008133 - DNA, 25 bp, Homo sapien
gggttgacacgcacaactccacagg

SEQ ID NO: 2008134 - DNA, 25 bp, Homo sapien
gaaaatgacatagttgagcccagaa

SEQ ID NO: 2008135 - DNA, 25 bp, Homo sapien
ggccaaattcatgacgtccctgaaa

SEQ ID NO: 2008136 - DNA, 25 bp, Homo sapien
aataatgactcacgcttctcttggg

SEQ ID NO: 2008137 - DNA, 25 bp, Homo sapien
tgctttcaagcgaccagggagactg

SEQ ID NO: 2008138 - DNA, 25 bp, Homo sapien
tgtccccaggtgtgttctcaaggca

SEQ ID NO: 2008139 - DNA, 25 bp, Homo sapien
caaggatgctcgtgctgacttcagg

SEQ ID NO: 2008140 - DNA, 25 bp, Homo sapien
aaagtttgcctacgacatctgctgc

SEQ ID NO: 2008141 - DNA, 25 bp, Homo sapien
gggagcaaagactgagttgcttcag

SEQ ID NO: 2008142 - DNA, 25 bp, Homo sapien
tctccttggctggacataagttttc

SEQ ID NO: 2008143 - DNA, 25 bp, Homo sapien
cttctccttggctggacataagttt

SEQ ID NO: 2008144 - DNA, 25 bp, Homo sapien
ttctccttggctggacataagtttt

SEQ ID NO: 2008145 - DNA, 25 bp, Homo sapien
cttcccacgggcagtacatacaggg

SEQ ID NO: 2008146 - DNA, 25 bp, Homo sapien
ggagccataatatgcccatgaacat

SEQ ID NO: 2008147 - DNA, 25 bp, Homo sapien
gatgcatgactgacaggctgtaagc

SEQ ID NO: 2008148 - DNA, 25 bp, Homo sapien
tgaccacaaggtagtaagactgact

SEQ ID NO: 2008149 - DNA, 25 bp, Homo sapien
tccgggaacaccaggataaccagta

SEQ ID NO: 2008150 - DNA, 25 bp, Homo sapien
aaagattaagtagtcctagccctca

SEQ ID NO: 2008151 - DNA, 25 bp, Homo sapien
gcatgctaatcgctataacaggcct

SEQ ID NO: 2008152 - DNA, 25 bp, Homo sapien
ccagtagtgcttagggttcaaagtc

SEQ ID NO: 2008153 - DNA, 25 bp, Homo sapien
tggcagccatgccactcattggacg

SEQ ID NO: 2008154 - DNA, 25 bp, Homo sapien
gccatgccactcattggacggtctc

SEQ ID NO: 2008155 - DNA, 25 bp, Homo sapien
tcccagttggcatcctggcagccat

SEQ ID NO: 2008156 - DNA, 25 bp, Homo sapien
gctttagtgtcccagttggcatcct

SEQ ID NO: 2008157 - DNA, 25 bp, Homo sapien
tgcctgctgttggagctgaatgcga

SEQ ID NO: 2008158 - DNA, 25 bp, Homo sapien
gcaataaggtgggttttagtctctg

SEQ ID NO: 2008159 - DNA, 25 bp, Homo sapien
attttgaggagtagttcagtggcag

SEQ ID NO: 2008160 - DNA, 25 bp, Homo sapien
tgaatgcgagacatggcctctgttg

SEQ ID NO: 2008161 - DNA, 25 bp, Homo sapien
tacttgggagacagccggattggca

SEQ ID NO: 2008162 - DNA, 25 bp, Homo sapien
gacagccggattggcatttgctggc

SEQ ID NO: 2008163 - DNA, 25 bp, Homo sapien
cagtatacttgggagacagccggat

SEQ ID NO: 2008164 - DNA, 25 bp, Homo sapien
actccagtatacttgggagacagcc

SEQ ID NO: 2008165 - DNA, 25 bp, Homo sapien
ttttttcagataatccactcttaat

SEQ ID NO: 2008166 - DNA, 25 bp, Homo sapien
gctctcacactggttatttttttca

SEQ ID NO: 2008167 - DNA, 25 bp, Homo sapien
tcagataatccactcttaattttct

SEQ ID NO: 2008168 - DNA, 25 bp, Homo sapien
ggttctgggttaggcagctctcaca

SEQ ID NO: 2008169 - DNA, 25 bp, Homo sapien
gcagcaccacggcctggaaaggctg

SEQ ID NO: 2008170 - DNA, 25 bp, Homo sapien
gctgccagggcggcaccctgtggtt

SEQ ID NO: 2008171 - DNA, 25 bp, Homo sapien
agcagcaccacggcctggaaaggct

SEQ ID NO: 2008172 - DNA, 25 bp, Homo sapien
gccagggcggcaccctgtggtttct

SEQ ID NO: 2008173 - DNA, 25 bp, Homo sapien
gggaactcgtctctcagggtatctg

SEQ ID NO: 2008174 - DNA, 25 bp, Homo sapien
ggaactcgtctctcagggtatctga

SEQ ID NO: 2008175 - DNA, 25 bp, Homo sapien
tttttaggtgttggtgagaccttga

SEQ ID NO: 2008176 - DNA, 25 bp, Homo sapien
cttgaactgtcctcggggaactcgt

SEQ ID NO: 2008177 - DNA, 25 bp, Homo sapien
gcttgtgagctgtgacctcttccct

SEQ ID NO: 2008178 - DNA, 25 bp, Homo sapien
gtgacagcagccatgcgacttgctg

SEQ ID NO: 2008179 - DNA, 25 bp, Homo sapien
ccctgatcctttcagctgacagcaa

SEQ ID NO: 2008180 - DNA, 25 bp, Homo sapien
tgacagcagccatgcgacttgctga

SEQ ID NO: 2008181 - DNA, 25 bp, Homo sapien
ggaatggagagccaaatgataggaa

SEQ ID NO: 2008182 - DNA, 25 bp, Homo sapien
tcaatccattacttctgtcggtaac

SEQ ID NO: 2008183 - DNA, 25 bp, Homo sapien
ccaaatgataggaatttcaggcact

SEQ ID NO: 2008184 - DNA, 25 bp, Homo sapien
gtaacttgattgtaacttgatgtcc

SEQ ID NO: 2008185 - DNA, 25 bp, Homo sapien
tgattgcgaagaatggtcttcaatc

SEQ ID NO: 2008186 - DNA, 25 bp, Homo sapien
gattgcgaagaatggtcttcaatct

SEQ ID NO: 2008187 - DNA, 25 bp, Homo sapien
gactacaaatagtgccaatggtatc

SEQ ID NO: 2008188 - DNA, 25 bp, Homo sapien
ctacaaatagtgccaatggtatcca

SEQ ID NO: 2008189 - DNA, 25 bp, Homo sapien
actgtgtcccttcggagtgatgttg

SEQ ID NO: 2008190 - DNA, 25 bp, Homo sapien
ctgtgtcccttcggagtgatgttga

SEQ ID NO: 2008191 - DNA, 25 bp, Homo sapien
gactcctggctaacaatgttgatgg

SEQ ID NO: 2008192 - DNA, 25 bp, Homo sapien
tttcaacaaaagactcctggctaac

SEQ ID NO: 2008193 - DNA, 25 bp, Homo sapien
actcctggctaacaatgttgatggg

SEQ ID NO: 2008194 - DNA, 25 bp, Homo sapien
aactaactcgtctttctgggcttga

SEQ ID NO: 2008195 - DNA, 25 bp, Homo sapien
ttcaagaactaactcgtctttctgg

SEQ ID NO: 2008196 - DNA, 25 bp, Homo sapien
caagaactaactcgtctttctgggc

SEQ ID NO: 2008197 - DNA, 25 bp, Homo sapien
tccttcaagaactaactcgtctttc

SEQ ID NO: 2008198 - DNA, 25 bp, Homo sapien
gaaagtgtggatagccaggttcccc

SEQ ID NO: 2008199 - DNA, 25 bp, Homo sapien
gatagccaggttccccatggtctgc

SEQ ID NO: 2008200 - DNA, 25 bp, Homo sapien
tttttgttgggccctttcatgtctc

SEQ ID NO: 2008201 - DNA, 25 bp, Homo sapien
gcatcagccagatgcttgccccaat

SEQ ID NO: 2008202 - DNA, 25 bp, Homo sapien
tcaaatgagcaatgggacaggaggc

SEQ ID NO: 2008203 - DNA, 25 bp, Homo sapien
ttccatttgttggaggacaggctcc

SEQ ID NO: 2008204 - DNA, 25 bp, Homo sapien
cataagggaacagcatagtaacact

SEQ ID NO: 2008205 - DNA, 25 bp, Homo sapien
cagagctcctagagaaccctgttct

SEQ ID NO: 2008206 - DNA, 25 bp, Homo sapien
aagttatcaagggtgtagtcatggc

SEQ ID NO: 2008207 - DNA, 25 bp, Homo sapien
ttatcaagggtgtagtcatggcctc

SEQ ID NO: 2008208 - DNA, 25 bp, Homo sapien
ctgtggaacacagacagcggaaagg

SEQ ID NO: 2008209 - DNA, 25 bp, Homo sapien
tatcaagggtgtagtcatggcctct

SEQ ID NO: 2008210 - DNA, 25 bp, Homo sapien
aggaagacaggtttggacagcttac

SEQ ID NO: 2008211 - DNA, 25 bp, Homo sapien
tctttttgtcctcaggaagacaggt

SEQ ID NO: 2008212 - DNA, 25 bp, Homo sapien
gaagacagtttttcaccctgtagtg

SEQ ID NO: 2008213 - DNA, 25 bp, Homo sapien
tgtcctcaggaagacaggtttggac

SEQ ID NO: 2008214 - DNA, 25 bp, Homo sapien
tgaggttttgctgcccctctaggta

SEQ ID NO: 2008215 - DNA, 25 bp, Homo sapien
gatcctttgtgctagctcttgcttg

SEQ ID NO: 2008216 - DNA, 25 bp, Homo sapien
actgaggttttgctgcccctctagg

SEQ ID NO: 2008217 - DNA, 25 bp, Homo sapien
ccccagaacaagacctaaattgatc

SEQ ID NO: 2008218 - DNA, 25 bp, Homo sapien
tggtttctgaccctgcaagcataaa

SEQ ID NO: 2008219 - DNA, 25 bp, Homo sapien
aagtgtggtttctgaccctgcaagc

SEQ ID NO: 2008220 - DNA, 25 bp, Homo sapien
agtgtggtttctgaccctgcaagca

SEQ ID NO: 2008221 - DNA, 25 bp, Homo sapien
tgtggtttctgaccctgcaagcata

SEQ ID NO: 2008222 - DNA, 25 bp, Homo sapien
aagggtggagcacactatcttcaga

SEQ ID NO: 2008223 - DNA, 25 bp, Homo sapien
taaagctttgaagggtggagcacac

SEQ ID NO: 2008224 - DNA, 25 bp, Homo sapien
tatcttcagaagtgtagatactttt

SEQ ID NO: 2008225 - DNA, 25 bp, Homo sapien
tcctttatgggcaacatgctagggt

SEQ ID NO: 2008226 - DNA, 25 bp, Homo sapien
gctcctgatcactgggctgttcatt

SEQ ID NO: 2008227 - DNA, 25 bp, Homo sapien
tgttcattcagagtgtgggagttcc

SEQ ID NO: 2008228 - DNA, 25 bp, Homo sapien
tccaaggatgacctgttctcagtcc

SEQ ID NO: 2008229 - DNA, 25 bp, Homo sapien
tcacaaactgttaggtgccaagaat

SEQ ID NO: 2008230 - DNA, 25 bp, Homo sapien
cattgacaaggagacttgggcttcc

SEQ ID NO: 2008231 - DNA, 25 bp, Homo sapien
ccaagcagacattgacaaggagact

SEQ ID NO: 2008232 - DNA, 25 bp, Homo sapien
agatcctgactccattcagatacag

SEQ ID NO: 2008233 - DNA, 25 bp, Homo sapien
ggtgtccttgggaaccaagcagaca

SEQ ID NO: 2008234 - DNA, 25 bp, Homo sapien
gttagtccaacccattccatcaagg

SEQ ID NO: 2008235 - DNA, 25 bp, Homo sapien
aagtgtggagacagttgatggccca

SEQ ID NO: 2008236 - DNA, 25 bp, Homo sapien
taatggtggttcctcgttagtccaa

SEQ ID NO: 2008237 - DNA, 25 bp, Homo sapien
ggccttggagtaatggtggttcctc

SEQ ID NO: 2008238 - DNA, 25 bp, Homo sapien
gatttagacatgcagctgaaaggca

SEQ ID NO: 2008239 - DNA, 25 bp, Homo sapien
ggaatcaaagccaactagatgaggg

SEQ ID NO: 2008240 - DNA, 25 bp, Homo sapien
tagtctgctcattaggttgcattac

SEQ ID NO: 2008241 - DNA, 25 bp, Homo sapien
tttgtgaaagccctactccagtcct

SEQ ID NO: 2008242 - DNA, 25 bp, Homo sapien
aactttgggatttctctatttgatg

SEQ ID NO: 2008243 - DNA, 25 bp, Homo sapien
tcagtattgcttagactggttggca

SEQ ID NO: 2008244 - DNA, 25 bp, Homo sapien
actatcgttccacttcacatccagg

SEQ ID NO: 2008245 - DNA, 25 bp, Homo sapien
acattgaggtatgggattgaagaac

SEQ ID NO: 2008246 - DNA, 25 bp, Homo sapien
ccgccccaattagacaggtttgccg

SEQ ID NO: 2008247 - DNA, 25 bp, Homo sapien
ggcggaagaacaaatctggcagcgc

SEQ ID NO: 2008248 - DNA, 25 bp, Homo sapien
cccaattagacaggtttgccgaggg

SEQ ID NO: 2008249 - DNA, 25 bp, Homo sapien
aagaacaaatctggcagcgcggcac

SEQ ID NO: 2008250 - DNA, 25 bp, Homo sapien
gtagcgggtcccccaacagcgacat

SEQ ID NO: 2008251 - DNA, 25 bp, Homo sapien
ggaggcgcccgcgactccccgccag

SEQ ID NO: 2008252 - DNA, 25 bp, Homo sapien
cagcggccccgtgggggcggccgag

SEQ ID NO: 2008253 - DNA, 25 bp, Homo sapien
aggcggttgagggtcgcgccggccg

SEQ ID NO: 2008254 - DNA, 25 bp, Homo sapien
catttcgagattctagggctgcaga

SEQ ID NO: 2008255 - DNA, 25 bp, Homo sapien
taacagcaaagggtgtccaggtcag

SEQ ID NO: 2008256 - DNA, 25 bp, Homo sapien
cttgaatggaatcagggccgggtct

SEQ ID NO: 2008257 - DNA, 25 bp, Homo sapien
aaaagtgcaccttctactcagcagg

SEQ ID NO: 2008258 - DNA, 25 bp, Homo sapien
taacgcaagtagacaggtaacactg

SEQ ID NO: 2008259 - DNA, 25 bp, Homo sapien
tcttaagtgttgtggaggtaacgca

SEQ ID NO: 2008260 - DNA, 25 bp, Homo sapien
tcagcctgagtaggcagcaagtaca

SEQ ID NO: 2008261 - DNA, 25 bp, Homo sapien
aaagcacatgtgaccagagtagaga

SEQ ID NO: 2008262 - DNA, 25 bp, Homo sapien
caaaatgaccccaaatgaagcggat

SEQ ID NO: 2008263 - DNA, 25 bp, Homo sapien
gcctgaggtaaaggcataggtcttt

SEQ ID NO: 2008264 - DNA, 25 bp, Homo sapien
gagaaattgagccttgatactgaca

SEQ ID NO: 2008265 - DNA, 25 bp, Homo sapien
caatcagtgttacaaggttagcaat

SEQ ID NO: 2008266 - DNA, 25 bp, Homo sapien
ttttcacccattaacttcagcagac

SEQ ID NO: 2008267 - DNA, 25 bp, Homo sapien
agagaacactgctccaggtctaggc

SEQ ID NO: 2008268 - DNA, 25 bp, Homo sapien
gagaacactgctccaggtctaggca

SEQ ID NO: 2008269 - DNA, 25 bp, Homo sapien
tctgtgactgtgcaacctttttcac

SEQ ID NO: 2008270 - DNA, 25 bp, Homo sapien
gggaaacaatttactagcgctggaa

SEQ ID NO: 2008271 - DNA, 25 bp, Homo sapien
tgtgcagtggaaatgctcgacaaga

SEQ ID NO: 2008272 - DNA, 25 bp, Homo sapien
gagtaaaaacctcgatcctctgagg

SEQ ID NO: 2008273 - DNA, 25 bp, Homo sapien
caagttggccaacccatgtgcagtg

SEQ ID NO: 2008274 - DNA, 25 bp, Homo sapien
cggtaatcccgctttctgccacagt

SEQ ID NO: 2008275 - DNA, 25 bp, Homo sapien
gattctcaatatatctcccacggta

SEQ ID NO: 2008276 - DNA, 25 bp, Homo sapien
agtgagcctaccttactgagaaagt

SEQ ID NO: 2008277 - DNA, 25 bp, Homo sapien
ccacagtgagcctaccttactgaga

SEQ ID NO: 2008278 - DNA, 25 bp, Homo sapien
agtgcctgcctagcggcaccatact

SEQ ID NO: 2008279 - DNA, 25 bp, Homo sapien
agctcccaaggttgagctgcctgga

SEQ ID NO: 2008280 - DNA, 25 bp, Homo sapien
acatggagtgcatgccccactcaca

SEQ ID NO: 2008281 - DNA, 25 bp, Homo sapien
ggccccgaagctcccaaggttgagc

SEQ ID NO: 2008282 - DNA, 25 bp, Homo sapien
cagcccgggcgtgaagtacatctct

SEQ ID NO: 2008283 - DNA, 25 bp, Homo sapien
gcccgggcgtgaagtacatctctct

SEQ ID NO: 2008284 - DNA, 25 bp, Homo sapien
agcccgggcgtgaagtacatctctc

SEQ ID NO: 2008285 - DNA, 25 bp, Homo sapien
ggcagcccgggcgtgaagtacatct

SEQ ID NO: 2008286 - DNA, 25 bp, Homo sapien
agcagcagaactttgggtgcttcga

SEQ ID NO: 2008287 - DNA, 25 bp, Homo sapien
ttgagcagcagaactttgggtgctt

SEQ ID NO: 2008288 - DNA, 25 bp, Homo sapien
cagcagaactttgggtgcttcgagc

SEQ ID NO: 2008289 - DNA, 25 bp, Homo sapien
gcagaactttgggtgcttcgagcca

SEQ ID NO: 2008290 - DNA, 25 bp, Homo sapien
agggcctgcttgacacccctgagaa

SEQ ID NO: 2008291 - DNA, 25 bp, Homo sapien
tactcagtacagtgccagagacagg

SEQ ID NO: 2008292 - DNA, 25 bp, Homo sapien
caaggccaagtactttctcaggaag

SEQ ID NO: 2008293 - DNA, 25 bp, Homo sapien
tattaacttggcctcggtaagccag

SEQ ID NO: 2008294 - DNA, 25 bp, Homo sapien
agttttgggcacaaatctgcctggc

SEQ ID NO: 2008295 - DNA, 25 bp, Homo sapien
cacaattccaggtggtggataacgt

SEQ ID NO: 2008296 - DNA, 25 bp, Homo sapien
ctagaaccatgaccctgaagaacag

SEQ ID NO: 2008297 - DNA, 25 bp, Homo sapien
gacagaaggcctcgagaacatgatt

SEQ ID NO: 2008298 - DNA, 25 bp, Homo sapien
atgtggttgcaaatcggctttctcc

SEQ ID NO: 2008299 - DNA, 25 bp, Homo sapien
caggaagtgcaggatatggagatag

SEQ ID NO: 2008300 - DNA, 25 bp, Homo sapien
tgctccgagatcttggtgtcattgc

SEQ ID NO: 2008301 - DNA, 25 bp, Homo sapien
ctggttgaaggctatgtggttgcaa

SEQ ID NO: 2008302 - DNA, 25 bp, Homo sapien
atggaatgcacgtccgtctgtgcat

SEQ ID NO: 2008303 - DNA, 25 bp, Homo sapien
aaatggaatgcacgtccgtctgtgc

SEQ ID NO: 2008304 - DNA, 25 bp, Homo sapien
aatggaatgcacgtccgtctgtgca

SEQ ID NO: 2008305 - DNA, 25 bp, Homo sapien
gaaatggaatgcacgtccgtctgtg

SEQ ID NO: 2008306 - DNA, 25 bp, Homo sapien
ccaaactcttgccacacttgttaag

SEQ ID NO: 2008307 - DNA, 25 bp, Homo sapien
aactcttgccacacttgttaagagg

SEQ ID NO: 2008308 - DNA, 25 bp, Homo sapien
cacacttgttaagaggccaggtctg

SEQ ID NO: 2008309 - DNA, 25 bp, Homo sapien
ttgccacacttgttaagaggccagg

SEQ ID NO: 2008310 - DNA, 25 bp, Homo sapien
tacagagctaaaaacttcctggatg

SEQ ID NO: 2008311 - DNA, 25 bp, Homo sapien
tcccactggaaaccagtcagcccaa

SEQ ID NO: 2008312 - DNA, 25 bp, Homo sapien
gtcagcccaacgcattccacaacca

SEQ ID NO: 2008313 - DNA, 25 bp, Homo sapien
tggaaaccagtcagcccaacgcatt

SEQ ID NO: 2008314 - DNA, 25 bp, Homo sapien
catgcctggcattagctagatcttc

SEQ ID NO: 2008315 - DNA, 25 bp, Homo sapien
tgcagcttctccactagtacttgct

SEQ ID NO: 2008316 - DNA, 25 bp, Homo sapien
gggattatagacaccatgatcaatt

SEQ ID NO: 2008317 - DNA, 25 bp, Homo sapien
catgatcaattacgagccaccatgc

SEQ ID NO: 2008318 - DNA, 25 bp, Homo sapien
gatgtccagttgcccggcaacacag

SEQ ID NO: 2008319 - DNA, 25 bp, Homo sapien
tttcacaaactgtccagccaagact

SEQ ID NO: 2008320 - DNA, 25 bp, Homo sapien
ttgcccggcaacacagtttcacaaa

SEQ ID NO: 2008321 - DNA, 25 bp, Homo sapien
cattttgaaccactgatattgaaca

SEQ ID NO: 2008322 - DNA, 25 bp, Homo sapien
tctctctttggggactttacggtca

SEQ ID NO: 2008323 - DNA, 25 bp, Homo sapien
ggtgcctgcatgaacaacattacca

SEQ ID NO: 2008324 - DNA, 25 bp, Homo sapien
gagataccactggtgcctgcatgaa

SEQ ID NO: 2008325 - DNA, 25 bp, Homo sapien
acggtcacaatgaagaggagatacc

SEQ ID NO: 2008326 - DNA, 25 bp, Homo sapien
tgaaattgttattaactcgacagac

SEQ ID NO: 2008327 - DNA, 25 bp, Homo sapien
tggctgaattcaaaggtgaaattgt

SEQ ID NO: 2008328 - DNA, 25 bp, Homo sapien
taactcgacagacataaaagcctgc

SEQ ID NO: 2008329 - DNA, 25 bp, Homo sapien
tctgggatgtcgcaaacatccagct

SEQ ID NO: 2008330 - DNA, 25 bp, Homo sapien
gaggagaggagagctaaaagatcac

SEQ ID NO: 2008331 - DNA, 25 bp, Homo sapien
tcacctgtgaagtgcaggtccacag

SEQ ID NO: 2008332 - DNA, 25 bp, Homo sapien
gagagctaaaagatcacctgtgaag

SEQ ID NO: 2008333 - DNA, 25 bp, Homo sapien
taaaagatcacctgtgaagtgcagg

SEQ ID NO: 2008334 - DNA, 25 bp, Homo sapien
ctttgatatcctgctctgggtcatc

SEQ ID NO: 2008335 - DNA, 25 bp, Homo sapien
ggtcatcccagtcccttcccactgc

SEQ ID NO: 2008336 - DNA, 25 bp, Homo sapien
cggggctttgatatcctgctctggg

SEQ ID NO: 2008337 - DNA, 25 bp, Homo sapien
ctgggtcatcccagtcccttcccac

SEQ ID NO: 2008338 - DNA, 25 bp, Homo sapien
tggattcagagacgccatcaacact

SEQ ID NO: 2008339 - DNA, 25 bp, Homo sapien
ccactggtagtgaggaatagggctt

SEQ ID NO: 2008340 - DNA, 25 bp, Homo sapien
tggttcaacacagatttgcaacttg

SEQ ID NO: 2008341 - DNA, 25 bp, Homo sapien
cagcttttgggaagttggttcaaca

SEQ ID NO: 2008342 - DNA, 25 bp, Homo sapien
ggtgttccaaatccacataaggcac

SEQ ID NO: 2008343 - DNA, 25 bp, Homo sapien
tcttgctatcttgactgtctcgatc

SEQ ID NO: 2008344 - DNA, 25 bp, Homo sapien
tctcgatcattatatacatgacacc

SEQ ID NO: 2008345 - DNA, 25 bp, Homo sapien
caccagtaggttccttggtgttcca

SEQ ID NO: 2008346 - DNA, 25 bp, Homo sapien
atttatttgtattagagatggaatc

SEQ ID NO: 2008347 - DNA, 25 bp, Homo sapien
cactatgttgcccgggctggtctca

SEQ ID NO: 2008348 - DNA, 25 bp, Homo sapien
tttatttgtattagagatggaatct

SEQ ID NO: 2008349 - DNA, 25 bp, Homo sapien
tttatttatttgtattagagatgga

SEQ ID NO: 2008350 - DNA, 25 bp, Homo sapien
ccaaattacgcagttaagaatggga

SEQ ID NO: 2008351 - DNA, 25 bp, Homo sapien
catgatcttaagaagggcagccgtc

SEQ ID NO: 2008352 - DNA, 25 bp, Homo sapien
gttggcaaaccaacacatgcatcaa

SEQ ID NO: 2008353 - DNA, 25 bp, Homo sapien
ggcagccgtcaagcaaatagagatc

SEQ ID NO: 2008354 - DNA, 25 bp, Homo sapien
cttcagtgcactccactgcctcatc

SEQ ID NO: 2008355 - DNA, 25 bp, Homo sapien
gcactccactgcctcatctgttctt

SEQ ID NO: 2008356 - DNA, 25 bp, Homo sapien
tcagtgcactccactgcctcatctg

SEQ ID NO: 2008357 - DNA, 25 bp, Homo sapien
agtgcactccactgcctcatctgtt

SEQ ID NO: 2008358 - DNA, 25 bp, Homo sapien
caccaatcccaagagtaactagcat

SEQ ID NO: 2008359 - DNA, 25 bp, Homo sapien
taactagcatgcaggagatttggtt

SEQ ID NO: 2008360 - DNA, 25 bp, Homo sapien
gagtaactagcatgcaggagatttg

SEQ ID NO: 2008361 - DNA, 25 bp, Homo sapien
cccaagagtaactagcatgcaggag

SEQ ID NO: 2008362 - DNA, 25 bp, Homo sapien
catattatggtaaaggtgacatggt

SEQ ID NO: 2008363 - DNA, 25 bp, Homo sapien
tttgagagcatctaatcatggctaa

SEQ ID NO: 2008364 - DNA, 25 bp, Homo sapien
aaatatccatgatcacgtagccacc

SEQ ID NO: 2008365 - DNA, 25 bp, Homo sapien
agagtcctgtagcttcaaaaaatcc

SEQ ID NO: 2008366 - DNA, 25 bp, Homo sapien
tcatctgagacttctggagaaactt

SEQ ID NO: 2008367 - DNA, 25 bp, Homo sapien
gctgttacctattgtcaccctactg

SEQ ID NO: 2008368 - DNA, 25 bp, Homo sapien
caaaatgaaatagaggacaccatgc

SEQ ID NO: 2008369 - DNA, 25 bp, Homo sapien
aaaggacactgttcatatgcaattc

SEQ ID NO: 2008370 - DNA, 25 bp, Homo sapien
caggatgaccaagattatttaattc

SEQ ID NO: 2008371 - DNA, 25 bp, Homo sapien
aggatgaccaagattatttaattca

SEQ ID NO: 2008372 - DNA, 25 bp, Homo sapien
ggatgaccaagattatttaattcat

SEQ ID NO: 2008373 - DNA, 25 bp, Homo sapien
aggctggtcagttgtttgctcttta

SEQ ID NO: 2008374 - DNA, 25 bp, Homo sapien
ggctggtcagttgtttgctctttat

SEQ ID NO: 2008375 - DNA, 25 bp, Homo sapien
gaaaaagcacacaactgatctgaac

SEQ ID NO: 2008376 - DNA, 25 bp, Homo sapien
tcagacttgtaagaccttgcttcca

SEQ ID NO: 2008377 - DNA, 25 bp, Homo sapien
gcctctaagcctctgccatagaata

SEQ ID NO: 2008378 - DNA, 25 bp, Homo sapien
tagttggactctcaatacacattca

SEQ ID NO: 2008379 - DNA, 25 bp, Homo sapien
cagcaagactcttagctggctgatc

SEQ ID NO: 2008380 - DNA, 25 bp, Homo sapien
agactcttagctggctgatccacag

SEQ ID NO: 2008381 - DNA, 25 bp, Homo sapien
gcaagactcttagctggctgatcca

SEQ ID NO: 2008382 - DNA, 25 bp, Homo sapien
aagactcttagctggctgatccaca

SEQ ID NO: 2008383 - DNA, 25 bp, Homo sapien
atcaaaagggcaaccttgtccttcg

SEQ ID NO: 2008384 - DNA, 25 bp, Homo sapien
cagtaagatccaacagtgaaaccac

SEQ ID NO: 2008385 - DNA, 25 bp, Homo sapien
cagcattacgcatctcatattcagt

SEQ ID NO: 2008386 - DNA, 25 bp, Homo sapien
ccaccaaaggagctttgagcttggg

SEQ ID NO: 2008387 - DNA, 25 bp, Homo sapien
taagttagtcaattcgtacacatcc

SEQ ID NO: 2008388 - DNA, 25 bp, Homo sapien
agtcattttaaactcaccaggatgg

SEQ ID NO: 2008389 - DNA, 25 bp, Homo sapien
cattagccactagttccaagtcatt

SEQ ID NO: 2008390 - DNA, 25 bp, Homo sapien
tccaaagaggatatatgagtggcaa

SEQ ID NO: 2008391 - DNA, 25 bp, Homo sapien
ggaaccctcattcatttctggtggc

SEQ ID NO: 2008392 - DNA, 25 bp, Homo sapien
tttcataaccatgtcctgcataata

SEQ ID NO: 2008393 - DNA, 25 bp, Homo sapien
attttcataaccatgtcctgcataa

SEQ ID NO: 2008394 - DNA, 25 bp, Homo sapien
ttcataaccatgtcctgcataatat

SEQ ID NO: 2008395 - DNA, 25 bp, Homo sapien
ttttcataaccatgtcctgcataat

SEQ ID NO: 2008396 - DNA, 25 bp, Homo sapien
tatatggatttggagcatcaacggg

SEQ ID NO: 2008397 - DNA, 25 bp, Homo sapien
tttcttgcatcaatttcagtatatt

SEQ ID NO: 2008398 - DNA, 25 bp, Homo sapien
gatttggagcatcaacggggaccat

SEQ ID NO: 2008399 - DNA, 25 bp, Homo sapien
ttcagtatattttgtacacacagac

SEQ ID NO: 2008400 - DNA, 25 bp, Homo sapien
gagttgaatcccctgtagtgtgagt

SEQ ID NO: 2008401 - DNA, 25 bp, Homo sapien
caaacatctgcttcggctactcatt

SEQ ID NO: 2008402 - DNA, 25 bp, Homo sapien
catgtctggaagaccaggactgact

SEQ ID NO: 2008403 - DNA, 25 bp, Homo sapien
tccttagaaaggcaatggcagacaa

SEQ ID NO: 2008404 - DNA, 25 bp, Homo sapien
cttttagtgcatccaagattggaat

SEQ ID NO: 2008405 - DNA, 25 bp, Homo sapien
caatattggcggtgacttttagtgc

SEQ ID NO: 2008406 - DNA, 25 bp, Homo sapien
gattggaatggtatcatcgtagtca

SEQ ID NO: 2008407 - DNA, 25 bp, Homo sapien
caaacacaatattggcggtgacttt

SEQ ID NO: 2008408 - DNA, 25 bp, Homo sapien
acttcaacgtaaacatcaaatgttc

SEQ ID NO: 2008409 - DNA, 25 bp, Homo sapien
ttaagacccctgctcctaaaaagca

SEQ ID NO: 2008410 - DNA, 25 bp, Homo sapien
taagacccctgctcctaaaaagcaa

SEQ ID NO: 2008411 - DNA, 25 bp, Homo sapien
cacattgaatacgtacatcatagca

SEQ ID NO: 2008412 - DNA, 25 bp, Homo sapien
catgatatggaatgctaaagtcgat

SEQ ID NO: 2008413 - DNA, 25 bp, Homo sapien
gggacttctgtatacaccaataagc

SEQ ID NO: 2008414 - DNA, 25 bp, Homo sapien
aaacacttgccacatgggacttctg

SEQ ID NO: 2008415 - DNA, 25 bp, Homo sapien
tttgccaatccagaatgctggattt

SEQ ID NO: 2008416 - DNA, 25 bp, Homo sapien
tgccaatccagaatgctggatttca

SEQ ID NO: 2008417 - DNA, 25 bp, Homo sapien
catttgccaatccagaatgctggat

SEQ ID NO: 2008418 - DNA, 25 bp, Homo sapien
atttgccaatccagaatgctggatt

SEQ ID NO: 2008419 - DNA, 25 bp, Homo sapien
cttcatccagtaacacagtgatttt

SEQ ID NO: 2008420 - DNA, 25 bp, Homo sapien
gcaacttcatccagtaacacagtga

SEQ ID NO: 2008421 - DNA, 25 bp, Homo sapien
caacttcatccagtaacacagtgat

SEQ ID NO: 2008422 - DNA, 25 bp, Homo sapien
catccagtaacacagtgattttctt

SEQ ID NO: 2008423 - DNA, 25 bp, Homo sapien
tgccgaggcttagccttgtagtctg

SEQ ID NO: 2008424 - DNA, 25 bp, Homo sapien
actgtgccgaggcttagccttgtag

SEQ ID NO: 2008425 - DNA, 25 bp, Homo sapien
ttaatgactgtgccgaggcttagcc

SEQ ID NO: 2008426 - DNA, 25 bp, Homo sapien
aatgactgtgccgaggcttagcctt

SEQ ID NO: 2008427 - DNA, 25 bp, Homo sapien
taccaaggcactgggcatagaagca

SEQ ID NO: 2008428 - DNA, 25 bp, Homo sapien
tcaaatagggagatttgccagtacc

SEQ ID NO: 2008429 - DNA, 25 bp, Homo sapien
catagaagcaaagtagagctctgag

SEQ ID NO: 2008430 - DNA, 25 bp, Homo sapien
atttgccagtaccaaggcactgggc

SEQ ID NO: 2008431 - DNA, 25 bp, Homo sapien
gaaaagtggctaagtcaagtgatct

SEQ ID NO: 2008432 - DNA, 25 bp, Homo sapien
cacagcattataccagcaggcaggg

SEQ ID NO: 2008433 - DNA, 25 bp, Homo sapien
gacagttggtcaaacaccttatacc

SEQ ID NO: 2008434 - DNA, 25 bp, Homo sapien
tggcaggaagtccaaagccctggct

SEQ ID NO: 2008435 - DNA, 25 bp, Homo sapien
tcacagcacatatcgggatgccatt

SEQ ID NO: 2008436 - DNA, 25 bp, Homo sapien
gatcagcgaaaagcaaaactgtcta

SEQ ID NO: 2008437 - DNA, 25 bp, Homo sapien
gaagttcaaatatcctcacagcaca

SEQ ID NO: 2008438 - DNA, 25 bp, Homo sapien
cctgcctgggcaattctggttaagc

SEQ ID NO: 2008439 - DNA, 25 bp, Homo sapien
cacgaagggcacaatgtgcacggca

SEQ ID NO: 2008440 - DNA, 25 bp, Homo sapien
ccacgaagggcacaatgtgcacggc

SEQ ID NO: 2008441 - DNA, 25 bp, Homo sapien
gcacaatgtgcacggcactgagctg

SEQ ID NO: 2008442 - DNA, 25 bp, Homo sapien
ggcacaatgtgcacggcactgagct

SEQ ID NO: 2008443 - DNA, 25 bp, Homo sapien
atttatcatgatactattaggcctt

SEQ ID NO: 2008444 - DNA, 25 bp, Homo sapien
catgatactattaggcctttactta

SEQ ID NO: 2008445 - DNA, 25 bp, Homo sapien
tactactaagacaggggtcagacac

SEQ ID NO: 2008446 - DNA, 25 bp, Homo sapien
gggtcagacacaaagcatccaaaac

SEQ ID NO: 2008447 - DNA, 25 bp, Homo sapien
tggaatgagtttcaattaagtaatc

SEQ ID NO: 2008448 - DNA, 25 bp, Homo sapien
atgagtttcaattaagtaatctgga

SEQ ID NO: 2008449 - DNA, 25 bp, Homo sapien
gaatgagtttcaattaagtaatctg

SEQ ID NO: 2008450 - DNA, 25 bp, Homo sapien
ccagccatggaatgagtttcaatta

SEQ ID NO: 2008451 - DNA, 25 bp, Homo sapien
tggtgtggtcatacttactacagtc

SEQ ID NO: 2008452 - DNA, 25 bp, Homo sapien
cacctaagtctcgcgagtagctggc

SEQ ID NO: 2008453 - DNA, 25 bp, Homo sapien
atggggggtctgacaatgttgccta

SEQ ID NO: 2008454 - DNA, 25 bp, Homo sapien
ttattttccccttcaactgcttggc

SEQ ID NO: 2008455 - DNA, 25 bp, Homo sapien
aggcgggctgctagcaaactccatg

SEQ ID NO: 2008456 - DNA, 25 bp, Homo sapien
tgaattgtggcggtgcaagtctgaa

SEQ ID NO: 2008457 - DNA, 25 bp, Homo sapien
caatcccaggttggtttataggcaa

SEQ ID NO: 2008458 - DNA, 25 bp, Homo sapien
tctccagagaagcagtaccaacaag

SEQ ID NO: 2008459 - DNA, 25 bp, Homo sapien
tagcatattaggtcaacaaaaagga

SEQ ID NO: 2008460 - DNA, 25 bp, Homo sapien
tgtggctctgttagtatgatacaaa

SEQ ID NO: 2008461 - DNA, 25 bp, Homo sapien
aaaagtgtagagaagcaggctagcc

SEQ ID NO: 2008462 - DNA, 25 bp, Homo sapien
acaaaaaggaagttggtgtggctct

SEQ ID NO: 2008463 - DNA, 25 bp, Homo sapien
gattccgcacaagagattcagcaga

SEQ ID NO: 2008464 - DNA, 25 bp, Homo sapien
ccctgtattggatcagtaagtgctc

SEQ ID NO: 2008465 - DNA, 25 bp, Homo sapien
taaactacttcgaatctctagagcc

SEQ ID NO: 2008466 - DNA, 25 bp, Homo sapien
gagccttggcccactgtagattccg

SEQ ID NO: 2008467 - DNA, 25 bp, Homo sapien
gaaaatcagtaacgtaggcatcaca

SEQ ID NO: 2008468 - DNA, 25 bp, Homo sapien
ggcatcacacattattatctccggt

SEQ ID NO: 2008469 - DNA, 25 bp, Homo sapien
tcctaattgaatctgaacaccacag

SEQ ID NO: 2008470 - DNA, 25 bp, Homo sapien
tatctccggtggtttgtaaactata

SEQ ID NO: 2008471 - DNA, 25 bp, Homo sapien
gcagtgaactgagtctggtatagag

SEQ ID NO: 2008472 - DNA, 25 bp, Homo sapien
actgagtctggtatagaggcaatgc

SEQ ID NO: 2008473 - DNA, 25 bp, Homo sapien
ggcaatgcttgggaagatcctttga

SEQ ID NO: 2008474 - DNA, 25 bp, Homo sapien
tgataccaagtagctgccagtttct

SEQ ID NO: 2008475 - DNA, 25 bp, Homo sapien
gtagctataaacagaaaaggtagta

SEQ ID NO: 2008476 - DNA, 25 bp, Homo sapien
tagctataaacagaaaaggtagtaa

SEQ ID NO: 2008477 - DNA, 25 bp, Homo sapien
tagtagctataaacagaaaaggtag

SEQ ID NO: 2008478 - DNA, 25 bp, Homo sapien
ttagtagctataaacagaaaaggta

SEQ ID NO: 2008479 - DNA, 25 bp, Homo sapien
tggtaaggaccattagacataagac

SEQ ID NO: 2008480 - DNA, 25 bp, Homo sapien
tcccaaacctcgatgcatgtctaat

SEQ ID NO: 2008481 - DNA, 25 bp, Homo sapien
gcaatgagtgataatgccctgctcc

SEQ ID NO: 2008482 - DNA, 25 bp, Homo sapien
taatttagcaatgagaggtttccca

SEQ ID NO: 2008483 - DNA, 25 bp, Homo sapien
tgaagcatggtgagcgaaacttgaa

SEQ ID NO: 2008484 - DNA, 25 bp, Homo sapien
tatctgctggtgtaacattacttgg

SEQ ID NO: 2008485 - DNA, 25 bp, Homo sapien
ctggagtccggctgcaatgacagct

SEQ ID NO: 2008486 - DNA, 25 bp, Homo sapien
actaaatggtatttcatcagttgtc

SEQ ID NO: 2008487 - DNA, 25 bp, Homo sapien
taggttatgcctggtgatcggcaag

SEQ ID NO: 2008488 - DNA, 25 bp, Homo sapien
gagtattatctcattaggccagtga

SEQ ID NO: 2008489 - DNA, 25 bp, Homo sapien
tctggtgccagctctaacttagatg

SEQ ID NO: 2008490 - DNA, 25 bp, Homo sapien
tgggaaattctgataggcagctatg

SEQ ID NO: 2008491 - DNA, 25 bp, Homo sapien
ggtgcctcaggcatgtcacttaaca

SEQ ID NO: 2008492 - DNA, 25 bp, Homo sapien
ttaaatatggtacagttgatcctca

SEQ ID NO: 2008493 - DNA, 25 bp, Homo sapien
ccctcaaattgatatccgtggcact

SEQ ID NO: 2008494 - DNA, 25 bp, Homo sapien
gaggctgaacaagatgatgctctgc

SEQ ID NO: 2008495 - DNA, 25 bp, Homo sapien
tagtgccgagtgaacatccttgtcc

SEQ ID NO: 2008496 - DNA, 25 bp, Homo sapien
tgttgaacaaaccttgaattcctaa

SEQ ID NO: 2008497 - DNA, 25 bp, Homo sapien
tgaagtataatgttaggtgtgggct

SEQ ID NO: 2008498 - DNA, 25 bp, Homo sapien
caaatgctgtaataagacaatctgt

SEQ ID NO: 2008499 - DNA, 25 bp, Homo sapien
gtatcaactgtgaatacatatagtt

SEQ ID NO: 2008500 - DNA, 25 bp, Homo sapien
atatacaactatgtatcaactgtga

SEQ ID NO: 2008501 - DNA, 25 bp, Homo sapien
ctttttatggattctttagcatttt

SEQ ID NO: 2008502 - DNA, 25 bp, Homo sapien
tgtatcaactgtgaatacatatagt

SEQ ID NO: 2008503 - DNA, 25 bp, Homo sapien
tccatatgcctacactgtcttattg

SEQ ID NO: 2008504 - DNA, 25 bp, Homo sapien
tgtcttattgtagcttggtagcact

SEQ ID NO: 2008505 - DNA, 25 bp, Homo sapien
ttgatgctactgtatataggatttc

SEQ ID NO: 2008506 - DNA, 25 bp, Homo sapien
cagttccattcctctgatcgatatg

SEQ ID NO: 2008507 - DNA, 25 bp, Homo sapien
taggaaggtagggatccttttgctg

SEQ ID NO: 2008508 - DNA, 25 bp, Homo sapien
acgtagctaccagttagttgtccca

SEQ ID NO: 2008509 - DNA, 25 bp, Homo sapien
ttcctaagcccaacatcacaaagat

SEQ ID NO: 2008510 - DNA, 25 bp, Homo sapien
tatgtctaagaaaccattcctaagc

SEQ ID NO: 2008511 - DNA, 25 bp, Homo sapien
tacatgtcagtgatctaagctctgg

SEQ ID NO: 2008512 - DNA, 25 bp, Homo sapien
gcaattggcacgagattcaagtaaa

SEQ ID NO: 2008513 - DNA, 25 bp, Homo sapien
cagcctccacggatgctgcagtgag

SEQ ID NO: 2008514 - DNA, 25 bp, Homo sapien
aaatggaccttttctgtgccaggat

SEQ ID NO: 2008515 - DNA, 25 bp, Homo sapien
tagagctgttttgcgggatagatac

SEQ ID NO: 2008516 - DNA, 25 bp, Homo sapien
gatacataacacaaactggtggcat

SEQ ID NO: 2008517 - DNA, 25 bp, Homo sapien
ttagaagatatacactgccggccgg

SEQ ID NO: 2008518 - DNA, 25 bp, Homo sapien
gaagctgagcatatttacattacac

SEQ ID NO: 2008519 - DNA, 25 bp, Homo sapien
atcatcaaaggtgcgagtttgaact

SEQ ID NO: 2008520 - DNA, 25 bp, Homo sapien
agtatcatcaaaggtgcgagtttga

SEQ ID NO: 2008521 - DNA, 25 bp, Homo sapien
tatcatcaaaggtgcgagtttgaac

SEQ ID NO: 2008522 - DNA, 25 bp, Homo sapien
gcagtatcatcaaaggtgcgagttt

SEQ ID NO: 2008523 - DNA, 25 bp, Homo sapien
cattcagctgtgtcaagctcaggga

SEQ ID NO: 2008524 - DNA, 25 bp, Homo sapien
aaatgggatcgcctcaaagttaggg

SEQ ID NO: 2008525 - DNA, 25 bp, Homo sapien
ccctggggtcttccacattcagctg

SEQ ID NO: 2008526 - DNA, 25 bp, Homo sapien
agctgtgtcaagctcagggaataca

SEQ ID NO: 2008527 - DNA, 25 bp, Homo sapien
gggaaagaaaacacagaagctcagt

SEQ ID NO: 2008528 - DNA, 25 bp, Homo sapien
tgggggaaagaaaacacagaagctc

SEQ ID NO: 2008529 - DNA, 25 bp, Homo sapien
ggaaagaaaacacagaagctcagtg

SEQ ID NO: 2008530 - DNA, 25 bp, Homo sapien
gggggaaagaaaacacagaagctca

SEQ ID NO: 2008531 - DNA, 25 bp, Homo sapien
gatcatctggggtcccccctttctc

SEQ ID NO: 2008532 - DNA, 25 bp, Homo sapien
gacaactgggcttctttcggaaaga

SEQ ID NO: 2008533 - DNA, 25 bp, Homo sapien
gattccagcctctgtcaatactgtg

SEQ ID NO: 2008534 - DNA, 25 bp, Homo sapien
gacagagagcactccgataacatct

SEQ ID NO: 2008535 - DNA, 25 bp, Homo sapien
tctgaggagtgttcgacagtgttcc

SEQ ID NO: 2008536 - DNA, 25 bp, Homo sapien
tcatgtccttttctctgaaaatgag

SEQ ID NO: 2008537 - DNA, 25 bp, Homo sapien
aaaatgagccaaaccataaatgtac

SEQ ID NO: 2008538 - DNA, 25 bp, Homo sapien
tctctgaaaatgagccaaaccataa

SEQ ID NO: 2008539 - DNA, 25 bp, Homo sapien
atgtccttttctctgaaaatgagcc

SEQ ID NO: 2008540 - DNA, 25 bp, Homo sapien
tgatatttgtttcacggtctctgtt

SEQ ID NO: 2008541 - DNA, 25 bp, Homo sapien
atttgtttcacggtctctgttgggc

SEQ ID NO: 2008542 - DNA, 25 bp, Homo sapien
tttgtttcacggtctctgttgggct

SEQ ID NO: 2008543 - DNA, 25 bp, Homo sapien
atatttgtttcacggtctctgttgg

SEQ ID NO: 2008544 - DNA, 25 bp, Homo sapien
agataagagtcttgccctcaaagag

SEQ ID NO: 2008545 - DNA, 25 bp, Homo sapien
tgggtccgcagcaacaatgcaaagt

SEQ ID NO: 2008546 - DNA, 25 bp, Homo sapien
tttgggaaccattaagtgacctctg

SEQ ID NO: 2008547 - DNA, 25 bp, Homo sapien
gggctaatcacagagcactttcgga

SEQ ID NO: 2008548 - DNA, 25 bp, Homo sapien
gactacttgctagcgcatttgggaa

SEQ ID NO: 2008549 - DNA, 25 bp, Homo sapien
tctgcattctgcatcaatactcatg

SEQ ID NO: 2008550 - DNA, 25 bp, Homo sapien
ctctgatgctgatcctgagggtctc

SEQ ID NO: 2008551 - DNA, 25 bp, Homo sapien
tattttcagcctctgatgctgatcc

SEQ ID NO: 2008552 - DNA, 25 bp, Homo sapien
gggcttctgaaaatagtcaccagta

SEQ ID NO: 2008553 - DNA, 25 bp, Homo sapien
taatggtccctcacttccgagaggt

SEQ ID NO: 2008554 - DNA, 25 bp, Homo sapien
gtggctattttcaggcacgttccca

SEQ ID NO: 2008555 - DNA, 25 bp, Homo sapien
tattttcaggcacgttcccactact

SEQ ID NO: 2008556 - DNA, 25 bp, Homo sapien
gacacctgataagtgcagacacttg

SEQ ID NO: 2008557 - DNA, 25 bp, Homo sapien
catgtgaatcttctccatattgttc

SEQ ID NO: 2008558 - DNA, 25 bp, Homo sapien
aggggccatgtgaatcttctccata

SEQ ID NO: 2008559 - DNA, 25 bp, Homo sapien
gtcatccttacaaaggggccatgtg

SEQ ID NO: 2008560 - DNA, 25 bp, Homo sapien
catccttacaaaggggccatgtgaa

SEQ ID NO: 2008561 - DNA, 25 bp, Homo sapien
acatgtcatttgagactccaggcag

SEQ ID NO: 2008562 - DNA, 25 bp, Homo sapien
cattttcagccacattaggcaccag

SEQ ID NO: 2008563 - DNA, 25 bp, Homo sapien
tcactgggctcaataacattttcag

SEQ ID NO: 2008564 - DNA, 25 bp, Homo sapien
gcagcccgagggcattggatttcct

SEQ ID NO: 2008565 - DNA, 25 bp, Homo sapien
cttcttggaaacttggagaatttct

SEQ ID NO: 2008566 - DNA, 25 bp, Homo sapien
ttggaaacttggagaatttcttgtg

SEQ ID NO: 2008567 - DNA, 25 bp, Homo sapien
tcttggaaacttggagaatttcttg

SEQ ID NO: 2008568 - DNA, 25 bp, Homo sapien
cttggaaacttggagaatttcttgt

SEQ ID NO: 2008569 - DNA, 25 bp, Homo sapien
aggagtagcccaggggatgtccact

SEQ ID NO: 2008570 - DNA, 25 bp, Homo sapien
cttggctgaagtgagcattttctca

SEQ ID NO: 2008571 - DNA, 25 bp, Homo sapien
cactgatacccacgaaaacaaaggg

SEQ ID NO: 2008572 - DNA, 25 bp, Homo sapien
tccactggagatagggtgggcgccc

SEQ ID NO: 2008573 - DNA, 25 bp, Homo sapien
ggagtggtgactcaatgcctgtaat

SEQ ID NO: 2008574 - DNA, 25 bp, Homo sapien
agaggctgatgcatgcttgggctca

SEQ ID NO: 2008575 - DNA, 25 bp, Homo sapien
ctactgagaggctgatgcatgcttg

SEQ ID NO: 2008576 - DNA, 25 bp, Homo sapien
caggagtggtgactcaatgcctgta

SEQ ID NO: 2008577 - DNA, 25 bp, Homo sapien
gacagtgagttatggcagaaaaagc

SEQ ID NO: 2008578 - DNA, 25 bp, Homo sapien
taattgagccagtggagacagtgag

SEQ ID NO: 2008579 - DNA, 25 bp, Homo sapien
cctctacaatgccactaattggcta

SEQ ID NO: 2008580 - DNA, 25 bp, Homo sapien
caacttgagaattttattggaaact

SEQ ID NO: 2008581 - DNA, 25 bp, Homo sapien
acaccagtcttattgccttaagccc

SEQ ID NO: 2008582 - DNA, 25 bp, Homo sapien
tcctctgagctttgactttatcatc

SEQ ID NO: 2008583 - DNA, 25 bp, Homo sapien
taaagagggccaatctccaaataca

SEQ ID NO: 2008584 - DNA, 25 bp, Homo sapien
taaggggccatcgttcagttcctct

SEQ ID NO: 2008585 - DNA, 25 bp, Homo sapien
ttggctgattcttgcctggaagagc

SEQ ID NO: 2008586 - DNA, 25 bp, Homo sapien
tgggacaactgctactgggccatcc

SEQ ID NO: 2008587 - DNA, 25 bp, Homo sapien
gctgccaagaattgctactgggaca

SEQ ID NO: 2008588 - DNA, 25 bp, Homo sapien
tccttgcctacaccgggcaggagag

SEQ ID NO: 2008589 - DNA, 25 bp, Homo sapien
tctacccaggatcttgaagccaagg

SEQ ID NO: 2008590 - DNA, 25 bp, Homo sapien
tgtataatcgtgacccgtgcaaggg

SEQ ID NO: 2008591 - DNA, 25 bp, Homo sapien
tgtaagcccgctaaaggtcacgaag

SEQ ID NO: 2008592 - DNA, 25 bp, Homo sapien
gaagcaaggcctcgccaaagatggt

SEQ ID NO: 2008593 - DNA, 25 bp, Homo sapien
tctcttctttcaagcacctgggggg

SEQ ID NO: 2008594 - DNA, 25 bp, Homo sapien
cttctcttctttcaagcacctgggg

SEQ ID NO: 2008595 - DNA, 25 bp, Homo sapien
gcacctggggggagaagtccaaatc

SEQ ID NO: 2008596 - DNA, 25 bp, Homo sapien
tttcaagcacctggggggagaagtc

SEQ ID NO: 2008597 - DNA, 25 bp, Homo sapien
tgtgtctgctcacacgggatgcgtc

SEQ ID NO: 2008598 - DNA, 25 bp, Homo sapien
tgctctctgtgttggtggctgacaa

SEQ ID NO: 2008599 - DNA, 25 bp, Homo sapien
aacctggctcagatctttgtgtacg

SEQ ID NO: 2008600 - DNA, 25 bp, Homo sapien
cccaagaaagcgagctatgtgtgtc

SEQ ID NO: 2008601 - DNA, 25 bp, Homo sapien
aaccctcgctgagttgccaacaagt

SEQ ID NO: 2008602 - DNA, 25 bp, Homo sapien
taaaaaagctatggcaaccctcgct

SEQ ID NO: 2008603 - DNA, 25 bp, Homo sapien
gagctgatctgcctcaaaccagttt

SEQ ID NO: 2008604 - DNA, 25 bp, Homo sapien
cagtttcagccggttctggtcaccc

SEQ ID NO: 2008605 - DNA, 25 bp, Homo sapien
ggaagctgctatcctactgtagtag

SEQ ID NO: 2008606 - DNA, 25 bp, Homo sapien
ctgtgtggtgtctaagtgtgcattc

SEQ ID NO: 2008607 - DNA, 25 bp, Homo sapien
tgtgcattcacatactgtgtaggga

SEQ ID NO: 2008608 - DNA, 25 bp, Homo sapien
tagggatggtaccttcctgcaagct

SEQ ID NO: 2008609 - DNA, 25 bp, Homo sapien
aaagcatgcaaagtagcattctcca

SEQ ID NO: 2008610 - DNA, 25 bp, Homo sapien
tttgttataaacaccgagaaagaga

SEQ ID NO: 2008611 - DNA, 25 bp, Homo sapien
agaccctgcaaacctgcaccttttt

SEQ ID NO: 2008612 - DNA, 25 bp, Homo sapien
ttttagggctccattagtcacgtac

SEQ ID NO: 2008613 - DNA, 25 bp, Homo sapien
gaaaaagcacaagacagaacatacc

SEQ ID NO: 2008614 - DNA, 25 bp, Homo sapien
catccccaacaccctttagtagctt

SEQ ID NO: 2008615 - DNA, 25 bp, Homo sapien
aagaaaaagcacaagacagaacata

SEQ ID NO: 2008616 - DNA, 25 bp, Homo sapien
cataatagtcagaagcatccccaac

SEQ ID NO: 2008617 - DNA, 25 bp, Homo sapien
gggttaaaagcagccccagtcaaca

SEQ ID NO: 2008618 - DNA, 25 bp, Homo sapien
gttaaaagcagccccagtcaacagg

SEQ ID NO: 2008619 - DNA, 25 bp, Homo sapien
ggttaaaagcagccccagtcaacag

SEQ ID NO: 2008620 - DNA, 25 bp, Homo sapien
ttaaaagcagccccagtcaacaggc

SEQ ID NO: 2008621 - DNA, 25 bp, Homo sapien
cagttactgtcacacggctgcattc

SEQ ID NO: 2008622 - DNA, 25 bp, Homo sapien
caatgttcagttactgtcacacggc

SEQ ID NO: 2008623 - DNA, 25 bp, Homo sapien
gaaagactttagaccaatgttcagt

SEQ ID NO: 2008624 - DNA, 25 bp, Homo sapien
ctttagaccaatgttcagttactgt

SEQ ID NO: 2008625 - DNA, 25 bp, Homo sapien
ttccataatgaagcaaacaccaacc

SEQ ID NO: 2008626 - DNA, 25 bp, Homo sapien
gcacacagcaaacctgtgattaata

SEQ ID NO: 2008627 - DNA, 25 bp, Homo sapien
aggggacagtaagtataaggcatcc

SEQ ID NO: 2008628 - DNA, 25 bp, Homo sapien
tggttccctttccataatgaagcaa

SEQ ID NO: 2008629 - DNA, 25 bp, Homo sapien
tgagccattgcactaggcccaaagt

SEQ ID NO: 2008630 - DNA, 25 bp, Homo sapien
gcccaaagtcacttgtctgtgctga

SEQ ID NO: 2008631 - DNA, 25 bp, Homo sapien
tgacctaaggcctgacagtcttcat

SEQ ID NO: 2008632 - DNA, 25 bp, Homo sapien
tttccatctgatccgactacaagtg

SEQ ID NO: 2008633 - DNA, 25 bp, Homo sapien
atctgtgattccataagggccacac

SEQ ID NO: 2008634 - DNA, 25 bp, Homo sapien
caatctgtgattccataagggccac

SEQ ID NO: 2008635 - DNA, 25 bp, Homo sapien
ggcccagagccgatactgtcaccat

SEQ ID NO: 2008636 - DNA, 25 bp, Homo sapien
cagagccgatactgtcaccatgcca

SEQ ID NO: 2008637 - DNA, 25 bp, Homo sapien
ccacacctagctactttttgtcatt

SEQ ID NO: 2008638 - DNA, 25 bp, Homo sapien
cacctagctactttttgtcatttta

SEQ ID NO: 2008639 - DNA, 25 bp, Homo sapien
acctagctactttttgtcattttag

SEQ ID NO: 2008640 - DNA, 25 bp, Homo sapien
gtcattttagtagagactgggtttc

SEQ ID NO: 2008641 - DNA, 25 bp, Homo sapien
tttgaagagcgcagtccatacagcc

SEQ ID NO: 2008642 - DNA, 25 bp, Homo sapien
catttagaagaaccttgctcagtcc

SEQ ID NO: 2008643 - DNA, 25 bp, Homo sapien
ttacaacctaagactagaccccaga

SEQ ID NO: 2008644 - DNA, 25 bp, Homo sapien
tcacatgggacagggatcttgtctc

SEQ ID NO: 2008645 - DNA, 25 bp, Homo sapien
gatatgcaaaccatcccctgtgcag

SEQ ID NO: 2008646 - DNA, 25 bp, Homo sapien
gatgccccacccttatgcagtgaag

SEQ ID NO: 2008647 - DNA, 25 bp, Homo sapien
tgtgatatcctagacggactcctgg

SEQ ID NO: 2008648 - DNA, 25 bp, Homo sapien
tagttaaagagaaccggccaagcat

SEQ ID NO: 2008649 - DNA, 25 bp, Homo sapien
cctgcaaaacatgaggctgtctcct

SEQ ID NO: 2008650 - DNA, 25 bp, Homo sapien
caagggaaccccaagaattatacag

SEQ ID NO: 2008651 - DNA, 25 bp, Homo sapien
gcagcagcagccttaatggtcatat

SEQ ID NO: 2008652 - DNA, 25 bp, Homo sapien
tcaggaacctcgcaagtgagttttc

SEQ ID NO: 2008653 - DNA, 25 bp, Homo sapien
tatttactactattagctagtgacc

SEQ ID NO: 2008654 - DNA, 25 bp, Homo sapien
gaaatccttgctgccctatttacta

SEQ ID NO: 2008655 - DNA, 25 bp, Homo sapien
tgaggtggccatagcgcctccctga

SEQ ID NO: 2008656 - DNA, 25 bp, Homo sapien
tattagctagtgacctgaggtggcc

SEQ ID NO: 2008657 - DNA, 25 bp, Homo sapien
ttaaatgagcagaaaatagttccat

SEQ ID NO: 2008658 - DNA, 25 bp, Homo sapien
tgttaaatgagcagaaaatagttcc

SEQ ID NO: 2008659 - DNA, 25 bp, Homo sapien
gttaaatgagcagaaaatagttcca

SEQ ID NO: 2008660 - DNA, 25 bp, Homo sapien
ctgttaaatgagcagaaaatagttc

SEQ ID NO: 2008661 - DNA, 25 bp, Homo sapien
tcatcgtgtccagactcaatagctg

SEQ ID NO: 2008662 - DNA, 25 bp, Homo sapien
catatctgggatgtcaaatgctgcc

SEQ ID NO: 2008663 - DNA, 25 bp, Homo sapien
caatagctgctttaggatcgaccat

SEQ ID NO: 2008664 - DNA, 25 bp, Homo sapien
gaacattcttgacgataacgctgac

SEQ ID NO: 2008665 - DNA, 25 bp, Homo sapien
tatccggttgcttcagggatggttt

SEQ ID NO: 2008666 - DNA, 25 bp, Homo sapien
gactatccggttgcttcagggatgg

SEQ ID NO: 2008667 - DNA, 25 bp, Homo sapien
tggttttttggtcccgtcgatgaga

SEQ ID NO: 2008668 - DNA, 25 bp, Homo sapien
tgggactatccggttgcttcaggga

SEQ ID NO: 2008669 - DNA, 25 bp, Homo sapien
gcacgctccgtctgtcgtagtgctg

SEQ ID NO: 2008670 - DNA, 25 bp, Homo sapien
ggccatcacggacgctgtctgctcg

SEQ ID NO: 2008671 - DNA, 25 bp, Homo sapien
catcacggacgctgtctgctcggaa

SEQ ID NO: 2008672 - DNA, 25 bp, Homo sapien
tcgatgcgcacgctccgtctgtcgt

SEQ ID NO: 2008673 - DNA, 25 bp, Homo sapien
tattgcttgacggagaaactatcat

SEQ ID NO: 2008674 - DNA, 25 bp, Homo sapien
tttaaaattaagtgggagcattgca

SEQ ID NO: 2008675 - DNA, 25 bp, Homo sapien
tggaagttgaagtggaagtattgct

SEQ ID NO: 2008676 - DNA, 25 bp, Homo sapien
aaattaagtgggagcattgcattac

SEQ ID NO: 2008677 - DNA, 25 bp, Homo sapien
tcccagttatgccagactgaatttt

SEQ ID NO: 2008678 - DNA, 25 bp, Homo sapien
ccgatatgactgtcccagttatgcc

SEQ ID NO: 2008679 - DNA, 25 bp, Homo sapien
ccagttatgccagactgaatttttg

SEQ ID NO: 2008680 - DNA, 25 bp, Homo sapien
aaggagccgatatgactgtcccagt

SEQ ID NO: 2008681 - DNA, 25 bp, Homo sapien
tacagactcatcactgaaacacaaa

SEQ ID NO: 2008682 - DNA, 25 bp, Homo sapien
ctacagactcatcactgaaacacaa

SEQ ID NO: 2008683 - DNA, 25 bp, Homo sapien
cagactcatcactgaaacacaaaaa

SEQ ID NO: 2008684 - DNA, 25 bp, Homo sapien
gactcatcactgaaacacaaaaatt

SEQ ID NO: 2008685 - DNA, 25 bp, Homo sapien
tagcaccccaggcaacagtaatggt

SEQ ID NO: 2008686 - DNA, 25 bp, Homo sapien
ccccaggcaacagtaatggtcgaga

SEQ ID NO: 2008687 - DNA, 25 bp, Homo sapien
ctgctggatagcaccccaggcaaca

SEQ ID NO: 2008688 - DNA, 25 bp, Homo sapien
ggcaacagtaatggtcgagaacccc

SEQ ID NO: 2008689 - DNA, 25 bp, Homo sapien
tctcccccaaactgatatgcaggtt

SEQ ID NO: 2008690 - DNA, 25 bp, Homo sapien
gactgaaacgctcaatatagtaaag

SEQ ID NO: 2008691 - DNA, 25 bp, Homo sapien
atgttcatggactgaaacgctcaat

SEQ ID NO: 2008692 - DNA, 25 bp, Homo sapien
tgatgaatctatgcccatgttcatg

SEQ ID NO: 2008693 - DNA, 25 bp, Homo sapien
aaaggttagctagggatctcaagac

SEQ ID NO: 2008694 - DNA, 25 bp, Homo sapien
gtagccgaccaccaagaaacgagtg

SEQ ID NO: 2008695 - DNA, 25 bp, Homo sapien
tctcaagaccctaggaatgacaggg

SEQ ID NO: 2008696 - DNA, 25 bp, Homo sapien
aaaagcctgtgctctgtagccgacc

SEQ ID NO: 2008697 - DNA, 25 bp, Homo sapien
gaatcagagagtgttcaagcttgac

SEQ ID NO: 2008698 - DNA, 25 bp, Homo sapien
tctatccaatcctgtcactgaaatt

SEQ ID NO: 2008699 - DNA, 25 bp, Homo sapien
cattctggccagttaaggaatcaga

SEQ ID NO: 2008700 - DNA, 25 bp, Homo sapien
actgcgcccggtactcttactgagc

SEQ ID NO: 2008701 - DNA, 25 bp, Homo sapien
aaaatgtcttgcacttacttgggaa

SEQ ID NO: 2008702 - DNA, 25 bp, Homo sapien
cagcaaggaaaaccagtcaacagat

SEQ ID NO: 2008703 - DNA, 25 bp, Homo sapien
aaggttagaacaagccacagcaagg

SEQ ID NO: 2008704 - DNA, 25 bp, Homo sapien
ggtcccatcctaccatgagtcaaat

SEQ ID NO: 2008705 - DNA, 25 bp, Homo sapien
attctctggtgtgatgcataactgc

SEQ ID NO: 2008706 - DNA, 25 bp, Homo sapien
tgatgcataactgcactggttagga

SEQ ID NO: 2008707 - DNA, 25 bp, Homo sapien
ggattctctggtgtgatgcataact

SEQ ID NO: 2008708 - DNA, 25 bp, Homo sapien
gtgcaccgacctgcagatggcccca

SEQ ID NO: 2008709 - DNA, 25 bp, Homo sapien
acagtgagaaccttgaatgtgagac

SEQ ID NO: 2008710 - DNA, 25 bp, Homo sapien
cagtgagaaccttgaatgtgagact

SEQ ID NO: 2008711 - DNA, 25 bp, Homo sapien
cacagtgagaaccttgaatgtgaga

SEQ ID NO: 2008712 - DNA, 25 bp, Homo sapien
tcacagtgagaaccttgaatgtgag

SEQ ID NO: 2008713 - DNA, 25 bp, Homo sapien
tgcagtacaggcctactgggcccaa

SEQ ID NO: 2008714 - DNA, 25 bp, Homo sapien
cgggaacactgcagtacaggcctac

SEQ ID NO: 2008715 - DNA, 25 bp, Homo sapien
tgagggagggttatctccgggaaca

SEQ ID NO: 2008716 - DNA, 25 bp, Homo sapien
ggagggttatctccgggaacactgc

SEQ ID NO: 2008717 - DNA, 25 bp, Homo sapien
taaagggctgcgtctaccctgctgc

SEQ ID NO: 2008718 - DNA, 25 bp, Homo sapien
cactctctactgaaacgagggcacg

SEQ ID NO: 2008719 - DNA, 25 bp, Homo sapien
tatgttactaacaagcagcctcctc

SEQ ID NO: 2008720 - DNA, 25 bp, Homo sapien
gcacaaagaattctaaggagccgct

SEQ ID NO: 2008721 - DNA, 25 bp, Homo sapien
ggtcaaagtggcgatacagcaaggt

SEQ ID NO: 2008722 - DNA, 25 bp, Homo sapien
cgatacagcaaggtttgcagggtga

SEQ ID NO: 2008723 - DNA, 25 bp, Homo sapien
tttcaatgtgttggtcaaagtggcg

SEQ ID NO: 2008724 - DNA, 25 bp, Homo sapien
gcaaggtttgcagggtgaacacagt

SEQ ID NO: 2008725 - DNA, 25 bp, Homo sapien
gaattttgagttgcaggcttaatgc

SEQ ID NO: 2008726 - DNA, 25 bp, Homo sapien
aattttgagttgcaggcttaatgct

SEQ ID NO: 2008727 - DNA, 25 bp, Homo sapien
caggcttaatgctcaaaggcaagtt

SEQ ID NO: 2008728 - DNA, 25 bp, Homo sapien
gtgaagactccctagaaccaccaca

SEQ ID NO: 2008729 - DNA, 25 bp, Homo sapien
gctcctgtttgactcttatgcaatc

SEQ ID NO: 2008730 - DNA, 25 bp, Homo sapien
gcaccctggcagtgtacttataccg

SEQ ID NO: 2008731 - DNA, 25 bp, Homo sapien
ccgtagattattgaagtattgctcc

SEQ ID NO: 2008732 - DNA, 25 bp, Homo sapien
ggtcccacccctagtgatgccaatt

SEQ ID NO: 2008733 - DNA, 25 bp, Homo sapien
gatgccaattagctggtctggtgag

SEQ ID NO: 2008734 - DNA, 25 bp, Homo sapien
aatgctttccacagagacttggtta

SEQ ID NO: 2008735 - DNA, 25 bp, Homo sapien
tagaagttctgtttcgatccacaaa

SEQ ID NO: 2008736 - DNA, 25 bp, Homo sapien
cacttgagatcaaccttccccaaaa

SEQ ID NO: 2008737 - DNA, 25 bp, Homo sapien
gctgtaaatccaacatccagagagt

SEQ ID NO: 2008738 - DNA, 25 bp, Homo sapien
cataaactcaacaaaggtgtgttgg

SEQ ID NO: 2008739 - DNA, 25 bp, Homo sapien
ccaccaagagtgaacgttgggtgga

SEQ ID NO: 2008740 - DNA, 25 bp, Homo sapien
gatgggttaaactatcataagggta

SEQ ID NO: 2008741 - DNA, 25 bp, Homo sapien
tgattcaacacaaacatccaggtat

SEQ ID NO: 2008742 - DNA, 25 bp, Homo sapien
gaaatctctggctaccctttaatga

SEQ ID NO: 2008743 - DNA, 25 bp, Homo sapien
cactgtcaagtaggtaagccgaatt

SEQ ID NO: 2008744 - DNA, 25 bp, Homo sapien
gctgtgggacgagctgaaagacttg

SEQ ID NO: 2008745 - DNA, 25 bp, Homo sapien
aggctgtgggacgagctgaaagact

SEQ ID NO: 2008746 - DNA, 25 bp, Homo sapien
agctgaaagacttgtcacactggcg

SEQ ID NO: 2008747 - DNA, 25 bp, Homo sapien
ggacgagctgaaagacttgtcacac

SEQ ID NO: 2008748 - DNA, 25 bp, Homo sapien
gtgtgacaacccaatccaaaaactc

SEQ ID NO: 2008749 - DNA, 25 bp, Homo sapien
taagtgtgacaacccaatccaaaaa

SEQ ID NO: 2008750 - DNA, 25 bp, Homo sapien
gtgacaacccaatccaaaaactcta

SEQ ID NO: 2008751 - DNA, 25 bp, Homo sapien
atttaagtgtgacaacccaatccaa

SEQ ID NO: 2008752 - DNA, 25 bp, Homo sapien
caagaatgctactgagggaaggaca

SEQ ID NO: 2008753 - DNA, 25 bp, Homo sapien
caaagacatgagtgtccagcgccaa

SEQ ID NO: 2008754 - DNA, 25 bp, Homo sapien
ggactgaatctgtgaccagccctga

SEQ ID NO: 2008755 - DNA, 25 bp, Homo sapien
tgattggccctaaaccctgatgacc

SEQ ID NO: 2008756 - DNA, 25 bp, Homo sapien
tggttcaacacgcaatcagcaattt

SEQ ID NO: 2008757 - DNA, 25 bp, Homo sapien
ggtcgaaggtcctccttagccgtca

SEQ ID NO: 2008758 - DNA, 25 bp, Homo sapien
ttagccgtcagttcacacagacagg

SEQ ID NO: 2008759 - DNA, 25 bp, Homo sapien
cacagacaggtccaataagctgagt

SEQ ID NO: 2008760 - DNA, 25 bp, Homo sapien
ggagataacgcacttgctgacaaaa

SEQ ID NO: 2008761 - DNA, 25 bp, Homo sapien
taacgcacttgctgacaaaataagc

SEQ ID NO: 2008762 - DNA, 25 bp, Homo sapien
ggcaaggagataacgcacttgctga

SEQ ID NO: 2008763 - DNA, 25 bp, Homo sapien
gtgaaaggcaaggagataacgcact

SEQ ID NO: 2008764 - DNA, 25 bp, Homo sapien
gcatcagctggacgtgcttctccag

SEQ ID NO: 2008765 - DNA, 25 bp, Homo sapien
ttctccagcatcaaacgtttggtaa

SEQ ID NO: 2008766 - DNA, 25 bp, Homo sapien
ccttgatgccatgcatcagctggac

SEQ ID NO: 2008767 - DNA, 25 bp, Homo sapien
cagcatcaaacgtttggtaaaggta

SEQ ID NO: 2008768 - DNA, 25 bp, Homo sapien
ttttaaaactgtaactatgcaacaa

SEQ ID NO: 2008769 - DNA, 25 bp, Homo sapien
tgtaaagcaaacatctgcaatgtta

SEQ ID NO: 2008770 - DNA, 25 bp, Homo sapien
aaagcaaacatctgcaatgttagac

SEQ ID NO: 2008771 - DNA, 25 bp, Homo sapien
taaagcaaacatctgcaatgttaga

SEQ ID NO: 2008772 - DNA, 25 bp, Homo sapien
tattctttaactcaccaccaggagc

SEQ ID NO: 2008773 - DNA, 25 bp, Homo sapien
gaagctacctttgcacacactttct

SEQ ID NO: 2008774 - DNA, 25 bp, Homo sapien
gaggttttactcgatgattaactcc

SEQ ID NO: 2008775 - DNA, 25 bp, Homo sapien
tacgtgtgcaccacgatgtccagct

SEQ ID NO: 2008776 - DNA, 25 bp, Homo sapien
ccgtgtgtccgcatgtgagtattta

SEQ ID NO: 2008777 - DNA, 25 bp, Homo sapien
tcaggggattcatcctcgtggctgg

SEQ ID NO: 2008778 - DNA, 25 bp, Homo sapien
gcgccatcaggggattcatcctcgt

SEQ ID NO: 2008779 - DNA, 25 bp, Homo sapien
gacacggcgccatcaggggattcat

SEQ ID NO: 2008780 - DNA, 25 bp, Homo sapien
tttgaattcaggaactgcccctgtt

SEQ ID NO: 2008781 - DNA, 25 bp, Homo sapien
atttgaattcaggaactgcccctgt

SEQ ID NO: 2008782 - DNA, 25 bp, Homo sapien
aactgcccctgttactaagaactct

SEQ ID NO: 2008783 - DNA, 25 bp, Homo sapien
gaactgcccctgttactaagaactc

SEQ ID NO: 2008784 - DNA, 25 bp, Homo sapien
gatctgccgagaaaacaaatcccat

SEQ ID NO: 2008785 - DNA, 25 bp, Homo sapien
gttcctagtgtttttgagacccaca

SEQ ID NO: 2008786 - DNA, 25 bp, Homo sapien
cacatcgaggaagtgctaagacact

SEQ ID NO: 2008787 - DNA, 25 bp, Homo sapien
tgaagttgtgcatcccgactctaag

SEQ ID NO: 2008788 - DNA, 25 bp, Homo sapien
tgtcgctgcaattaattacttccca

SEQ ID NO: 2008789 - DNA, 25 bp, Homo sapien
gcttgtcgctgcaattaattacttc

SEQ ID NO: 2008790 - DNA, 25 bp, Homo sapien
ccctgtagcttgtcgctgcaattaa

SEQ ID NO: 2008791 - DNA, 25 bp, Homo sapien
tctgcaacaccctgtagcttgtcgc

SEQ ID NO: 2008792 - DNA, 25 bp, Homo sapien
tcacctactgaagagtcgagcagga

SEQ ID NO: 2008793 - DNA, 25 bp, Homo sapien
caagattcatacaatggcaggtacc

SEQ ID NO: 2008794 - DNA, 25 bp, Homo sapien
catagttttggtcatcccgtgcctg

SEQ ID NO: 2008795 - DNA, 25 bp, Homo sapien
tcaattcagagtcaccacggccatt

SEQ ID NO: 2008796 - DNA, 25 bp, Homo sapien
ggccagttccactgcatcagacctc

SEQ ID NO: 2008797 - DNA, 25 bp, Homo sapien
ggcttttgacaggagccctcgcctc

SEQ ID NO: 2008798 - DNA, 25 bp, Homo sapien
cctcttgggctcagccagtgggtgc

SEQ ID NO: 2008799 - DNA, 25 bp, Homo sapien
agttccactgcatcagacctcttgg

SEQ ID NO: 2008800 - DNA, 25 bp, Homo sapien
tgcagtatatgaagcttgcagtacc

SEQ ID NO: 2008801 - DNA, 25 bp, Homo sapien
gcttgcagtaccaccctcggaagtt

SEQ ID NO: 2008802 - DNA, 25 bp, Homo sapien
ctcggaagttccccttgggagcagg

SEQ ID NO: 2008803 - DNA, 25 bp, Homo sapien
atatgaagcttgcagtaccaccctc

SEQ ID NO: 2008804 - DNA, 25 bp, Homo sapien
ctaaataatcagattgggagtggga

SEQ ID NO: 2008805 - DNA, 25 bp, Homo sapien
ccattactgagtagttcaagtgaat

SEQ ID NO: 2008806 - DNA, 25 bp, Homo sapien
aaataatcagattgggagtgggaga

SEQ ID NO: 2008807 - DNA, 25 bp, Homo sapien
tttccagagcatcagacacatgcat

SEQ ID NO: 2008808 - DNA, 25 bp, Homo sapien
ctgggaaacacatcgccacaatgtt

SEQ ID NO: 2008809 - DNA, 25 bp, Homo sapien
acacatcgccacaatgttctttcat

SEQ ID NO: 2008810 - DNA, 25 bp, Homo sapien
tttggcattcataacatatacgcat

SEQ ID NO: 2008811 - DNA, 25 bp, Homo sapien
ttttggcattcataacatatacgca

SEQ ID NO: 2008812 - DNA, 25 bp, Homo sapien
acatcctcttcagcacaagaatcag

SEQ ID NO: 2008813 - DNA, 25 bp, Homo sapien
tcctcttcagcacaagaatcaggga

SEQ ID NO: 2008814 - DNA, 25 bp, Homo sapien
ctcttcagcacaagaatcagggaca

SEQ ID NO: 2008815 - DNA, 25 bp, Homo sapien
acgcccacactgtagtcagccccat

SEQ ID NO: 2008816 - DNA, 25 bp, Homo sapien
ttttctcgcccgatctgagaccagc

SEQ ID NO: 2008817 - DNA, 25 bp, Homo sapien
tctgggtgagtgcagtccgtgcaaa

SEQ ID NO: 2008818 - DNA, 25 bp, Homo sapien
gcaaacagcttccacctggtactgc

SEQ ID NO: 2008819 - DNA, 25 bp, Homo sapien
tactgccgagctggttgtctcacat

SEQ ID NO: 2008820 - DNA, 25 bp, Homo sapien
gactcaagacacgaatgccattcag

SEQ ID NO: 2008821 - DNA, 25 bp, Homo sapien
tgtgtcccgagatgatccaaagaag

SEQ ID NO: 2008822 - DNA, 25 bp, Homo sapien
gaaaagcactccagagcatgagcca

SEQ ID NO: 2008823 - DNA, 25 bp, Homo sapien
aaagacagccatgcagtcatctgac

SEQ ID NO: 2008824 - DNA, 25 bp, Homo sapien
tccaagatagaagggaccactccaa

SEQ ID NO: 2008825 - DNA, 25 bp, Homo sapien
ctgatcaggaaaaatgtatcaactc

SEQ ID NO: 2008826 - DNA, 25 bp, Homo sapien
ctgctgttccattcaagcacattat

SEQ ID NO: 2008827 - DNA, 25 bp, Homo sapien
aatgtatcaactccaagatagaagg

SEQ ID NO: 2008828 - DNA, 25 bp, Homo sapien
gattcccactgatggcccagacatg

SEQ ID NO: 2008829 - DNA, 25 bp, Homo sapien
ttctctggtgtctccgattcccact

SEQ ID NO: 2008830 - DNA, 25 bp, Homo sapien
gacaggtttcctagtccccagattg

SEQ ID NO: 2008831 - DNA, 25 bp, Homo sapien
atgaccagtggcctttcgtgccctc

SEQ ID NO: 2008832 - DNA, 25 bp, Homo sapien
gcatctttaaaaacgaacttgcact

SEQ ID NO: 2008833 - DNA, 25 bp, Homo sapien
catctttaaaaacgaacttgcactt

SEQ ID NO: 2008834 - DNA, 25 bp, Homo sapien
tgcatctttaaaaacgaacttgcac

SEQ ID NO: 2008835 - DNA, 25 bp, Homo sapien
ctcctccaagcaagatctgaagcag

SEQ ID NO: 2008836 - DNA, 25 bp, Homo sapien
ccagacaggtccccagggaacaaga

SEQ ID NO: 2008837 - DNA, 25 bp, Homo sapien
agcacattgaatacaggtgaagagg

SEQ ID NO: 2008838 - DNA, 25 bp, Homo sapien
ccaacaagcacattgaatacaggtg

SEQ ID NO: 2008839 - DNA, 25 bp, Homo sapien
caaccaacaagcacattgaatacag

SEQ ID NO: 2008840 - DNA, 25 bp, Homo sapien
catgcttgccggcagttatcccagt

SEQ ID NO: 2008841 - DNA, 25 bp, Homo sapien
gcattcttgaccgacacaaagttat

SEQ ID NO: 2008842 - DNA, 25 bp, Homo sapien
agcaacagcagattcgtccaccatg

SEQ ID NO: 2008843 - DNA, 25 bp, Homo sapien
cacaaagttatttagcaacagcaga

SEQ ID NO: 2008844 - DNA, 25 bp, Homo sapien
gcaaggtaccaggtccagccattgc

SEQ ID NO: 2008845 - DNA, 25 bp, Homo sapien
tcattggcaaggtaccaggtccagc

SEQ ID NO: 2008846 - DNA, 25 bp, Homo sapien
atgaagataatcactggtgtggtga

SEQ ID NO: 2008847 - DNA, 25 bp, Homo sapien
gaactggaagtcattggcaaggtac

SEQ ID NO: 2008848 - DNA, 25 bp, Homo sapien
gacaatgcaattctgctagtgaaag

SEQ ID NO: 2008849 - DNA, 25 bp, Homo sapien
tgcaattctgctagtgaaagttgcc

SEQ ID NO: 2008850 - DNA, 25 bp, Homo sapien
caattctgctagtgaaagttgccat

SEQ ID NO: 2008851 - DNA, 25 bp, Homo sapien
gcctttgacaatgcaattctgctag

SEQ ID NO: 2008852 - DNA, 25 bp, Homo sapien
ggaagtttatatgccaaggtgatca

SEQ ID NO: 2008853 - DNA, 25 bp, Homo sapien
tggagccacgacaggaagtttatat

SEQ ID NO: 2008854 - DNA, 25 bp, Homo sapien
gccacgacaggaagtttatatgcca

SEQ ID NO: 2008855 - DNA, 25 bp, Homo sapien
acagcatggccccaaggaggatgag

SEQ ID NO: 2008856 - DNA, 25 bp, Homo sapien
cagtgcaggttgaaaggttcagaag

SEQ ID NO: 2008857 - DNA, 25 bp, Homo sapien
gaaaggttcagaagtttggaagcaa

SEQ ID NO: 2008858 - DNA, 25 bp, Homo sapien
tcatacccactttttccatgaacca

SEQ ID NO: 2008859 - DNA, 25 bp, Homo sapien
ggcaaagggaatccaaatccctgag

SEQ ID NO: 2008860 - DNA, 25 bp, Homo sapien
gaataatcagcaagcccaaaggtac

SEQ ID NO: 2008861 - DNA, 25 bp, Homo sapien
caaatccctgagatgtccattggaa

SEQ ID NO: 2008862 - DNA, 25 bp, Homo sapien
ccaaaggtacatttagggcacactt

SEQ ID NO: 2008863 - DNA, 25 bp, Homo sapien
gaaatacaatacaatcgcctcttca

SEQ ID NO: 2008864 - DNA, 25 bp, Homo sapien
aagaactggcccaaatcggcagtag

SEQ ID NO: 2008865 - DNA, 25 bp, Homo sapien
tttgtgtagtactccacgaaataca

SEQ ID NO: 2008866 - DNA, 25 bp, Homo sapien
tcggcagtagggctttgtgtagtac

SEQ ID NO: 2008867 - DNA, 25 bp, Homo sapien
ccaccgcaaatagggtgaccaggga

SEQ ID NO: 2008868 - DNA, 25 bp, Homo sapien
atgtatgccagagcggccaccgcaa

SEQ ID NO: 2008869 - DNA, 25 bp, Homo sapien
gcagaggagtcatccaccatgtatg

SEQ ID NO: 2008870 - DNA, 25 bp, Homo sapien
ggagtcatccaccatgtatgccaga

SEQ ID NO: 2008871 - DNA, 25 bp, Homo sapien
cacagggtccggtggagggcttggt

SEQ ID NO: 2008872 - DNA, 25 bp, Homo sapien
ccacagggtccggtggagggcttgg

SEQ ID NO: 2008873 - DNA, 25 bp, Homo sapien
tggagccgcttccatacctccatat

SEQ ID NO: 2008874 - DNA, 25 bp, Homo sapien
gggtgtgaacccgacagcaaagcct

SEQ ID NO: 2008875 - DNA, 25 bp, Homo sapien
ctgtgtgttcgatttgtcaccttta

SEQ ID NO: 2008876 - DNA, 25 bp, Homo sapien
tatcctccgtggcacgcaaagagga

SEQ ID NO: 2008877 - DNA, 25 bp, Homo sapien
attgaagccttttatctgcttggct

SEQ ID NO: 2008878 - DNA, 25 bp, Homo sapien
ccattgaagccttttatctgcttgg

SEQ ID NO: 2008879 - DNA, 25 bp, Homo sapien
cattgaagccttttatctgcttggc

SEQ ID NO: 2008880 - DNA, 25 bp, Homo sapien
ttccattgaagccttttatctgctt

SEQ ID NO: 2008881 - DNA, 25 bp, Homo sapien
agtttgaggacgaaagctgtaggtg

SEQ ID NO: 2008882 - DNA, 25 bp, Homo sapien
ttgaggacgaaagctgtaggtgaca

SEQ ID NO: 2008883 - DNA, 25 bp, Homo sapien
aaggagtaatgtggtcagatgactc

SEQ ID NO: 2008884 - DNA, 25 bp, Homo sapien
ctgaagggctttaactgaaggagta

SEQ ID NO: 2008885 - DNA, 25 bp, Homo sapien
attctgtgcctaagtctgtgaactt

SEQ ID NO: 2008886 - DNA, 25 bp, Homo sapien
ctgtgcctaagtctgtgaacttttc

SEQ ID NO: 2008887 - DNA, 25 bp, Homo sapien
tcccattgcattctgtgcctaagtc

SEQ ID NO: 2008888 - DNA, 25 bp, Homo sapien
atcccatcgatgctcccattgcatt

SEQ ID NO: 2008889 - DNA, 25 bp, Homo sapien
agggaacaagcactgatgcatgaag

SEQ ID NO: 2008890 - DNA, 25 bp, Homo sapien
aatcggatgcaccaagtagcgagca

SEQ ID NO: 2008891 - DNA, 25 bp, Homo sapien
tagcgagcataactgatgctggaca

SEQ ID NO: 2008892 - DNA, 25 bp, Homo sapien
tcctgaaggccattgtaaaggatga

SEQ ID NO: 2008893 - DNA, 25 bp, Homo sapien
caagaaagcacacggttcaccagac

SEQ ID NO: 2008894 - DNA, 25 bp, Homo sapien
cacacggtgtccagagaaaagatag

SEQ ID NO: 2008895 - DNA, 25 bp, Homo sapien
agggccagcccagtgacgaaggtca

SEQ ID NO: 2008896 - DNA, 25 bp, Homo sapien
gaaggtcagcacacggtgtccagag

SEQ ID NO: 2008897 - DNA, 25 bp, Homo sapien
cagtgacgaaggtcagcacacggtg

SEQ ID NO: 2008898 - DNA, 25 bp, Homo sapien
aatgagattcacaccccttctcggg

SEQ ID NO: 2008899 - DNA, 25 bp, Homo sapien
tcatcacctagataaggccacctca

SEQ ID NO: 2008900 - DNA, 25 bp, Homo sapien
ccttctcgggaatacaagcattcat

SEQ ID NO: 2008901 - DNA, 25 bp, Homo sapien
gctcgtcattaccaacaaggcccat

SEQ ID NO: 2008902 - DNA, 25 bp, Homo sapien
ggctgttgagccttggcgccccact

SEQ ID NO: 2008903 - DNA, 25 bp, Homo sapien
gctgtccgtggccatcagagtgtgt

SEQ ID NO: 2008904 - DNA, 25 bp, Homo sapien
catcctcagggagatgatccccgtg

SEQ ID NO: 2008905 - DNA, 25 bp, Homo sapien
tcagcagagggaccagacctcaggg

SEQ ID NO: 2008906 - DNA, 25 bp, Homo sapien
taccctgaaaatgccactggtcctc

SEQ ID NO: 2008907 - DNA, 25 bp, Homo sapien
tctggcctcataactggaagcattt

SEQ ID NO: 2008908 - DNA, 25 bp, Homo sapien
tttctggcctcataactggaagcat

SEQ ID NO: 2008909 - DNA, 25 bp, Homo sapien
ttctggcctcataactggaagcatt

SEQ ID NO: 2008910 - DNA, 25 bp, Homo sapien
tggcctcataactggaagcatttgg

SEQ ID NO: 2008911 - DNA, 25 bp, Homo sapien
cctgctctaggtatttaaaatccta

SEQ ID NO: 2008912 - DNA, 25 bp, Homo sapien
tgctctaggtatttaaaatcctagt

SEQ ID NO: 2008913 - DNA, 25 bp, Homo sapien
atacctgctctaggtatttaaaatc

SEQ ID NO: 2008914 - DNA, 25 bp, Homo sapien
tacctgctctaggtatttaaaatcc

SEQ ID NO: 2008915 - DNA, 25 bp, Homo sapien
catatgccagttcagtgtagcctcg

SEQ ID NO: 2008916 - DNA, 25 bp, Homo sapien
atcttcccttccaagaatggagtgg

SEQ ID NO: 2008917 - DNA, 25 bp, Homo sapien
cagaagtcatcatgatgaagaaggc

SEQ ID NO: 2008918 - DNA, 25 bp, Homo sapien
tgtagcctcggcattcatgtaagaa

SEQ ID NO: 2008919 - DNA, 25 bp, Homo sapien
ggtgctgttttcgtatcctctacct

SEQ ID NO: 2008920 - DNA, 25 bp, Homo sapien
cacaatggtgctgttttcgtatcct

SEQ ID NO: 2008921 - DNA, 25 bp, Homo sapien
tcctcatcgtcatcgctcccttctc

SEQ ID NO: 2008922 - DNA, 25 bp, Homo sapien
atcctgctccacacaatggtgctgt

SEQ ID NO: 2008923 - DNA, 25 bp, Homo sapien
ccaggaagcacctattctcaggttg

SEQ ID NO: 2008924 - DNA, 25 bp, Homo sapien
caggaagcacctattctcaggttgc

SEQ ID NO: 2008925 - DNA, 25 bp, Homo sapien
cccaggaagcacctattctcaggtt

SEQ ID NO: 2008926 - DNA, 25 bp, Homo sapien
ggaagcacctattctcaggttgcct

SEQ ID NO: 2008927 - DNA, 25 bp, Homo sapien
ttgaatccatgggattttcaatatg

SEQ ID NO: 2008928 - DNA, 25 bp, Homo sapien
gaatccatgggattttcaatatgat

SEQ ID NO: 2008929 - DNA, 25 bp, Homo sapien
tctttttgaatccatgggattttca

SEQ ID NO: 2008930 - DNA, 25 bp, Homo sapien
gccttctttttgaatccatgggatt

SEQ ID NO: 2008931 - DNA, 25 bp, Homo sapien
agaactccttatgccgtcactttgg

SEQ ID NO: 2008932 - DNA, 25 bp, Homo sapien
tctaacaaagaactccttatgccgt

SEQ ID NO: 2008933 - DNA, 25 bp, Homo sapien
tccttatgccgtcactttggcttac

SEQ ID NO: 2008934 - DNA, 25 bp, Homo sapien
acaaagaactccttatgccgtcact

SEQ ID NO: 2008935 - DNA, 25 bp, Homo sapien
tccgatgccgctcatctatttgttc

SEQ ID NO: 2008936 - DNA, 25 bp, Homo sapien
cccaggataaaggcggacaggtgat

SEQ ID NO: 2008937 - DNA, 25 bp, Homo sapien
cccaaacacatgcagctaaagcttt

SEQ ID NO: 2008938 - DNA, 25 bp, Homo sapien
ctccacgggtctgaaactattgcta

SEQ ID NO: 2008939 - DNA, 25 bp, Homo sapien
aggaggcttccggtgtgttcaagaa

SEQ ID NO: 2008940 - DNA, 25 bp, Homo sapien
ttccggtgtgttcaagaaggcagcg

SEQ ID NO: 2008941 - DNA, 25 bp, Homo sapien
tacttcacagtctgacaaaatctgc

SEQ ID NO: 2008942 - DNA, 25 bp, Homo sapien
tctaaattccttagtaggctggtca

SEQ ID NO: 2008943 - DNA, 25 bp, Homo sapien
taaggatccaggaattttgaagtcc

SEQ ID NO: 2008944 - DNA, 25 bp, Homo sapien
gaagtccagtctgaccagcagtcct

SEQ ID NO: 2008945 - DNA, 25 bp, Homo sapien
cttaaggatccaggaattttgaagt

SEQ ID NO: 2008946 - DNA, 25 bp, Homo sapien
gaattttgaagtccagtctgaccag

SEQ ID NO: 2008947 - DNA, 25 bp, Homo sapien
aggacatttgtctgatgcattgggt

SEQ ID NO: 2008948 - DNA, 25 bp, Homo sapien
gcaggtgtagattccacgttagtcc

SEQ ID NO: 2008949 - DNA, 25 bp, Homo sapien
taggtttgcgatatctctggctggc

SEQ ID NO: 2008950 - DNA, 25 bp, Homo sapien
tccctcaccagagagctagcactgt

SEQ ID NO: 2008951 - DNA, 25 bp, Homo sapien
gctttgatcagaggccctggaacct

SEQ ID NO: 2008952 - DNA, 25 bp, Homo sapien
tactcaggggagctgttcttagaag

SEQ ID NO: 2008953 - DNA, 25 bp, Homo sapien
gctcacctatctccccgcactgagt

SEQ ID NO: 2008954 - DNA, 25 bp, Homo sapien
gattctatgtctgctcacctatctc

SEQ ID NO: 2008955 - DNA, 25 bp, Homo sapien
ttgctggtcagacaaaaagataagt

SEQ ID NO: 2008956 - DNA, 25 bp, Homo sapien
tctatggatgtgagggtctttccct

SEQ ID NO: 2008957 - DNA, 25 bp, Homo sapien
tgaaccagagaagtagagacaatgc

SEQ ID NO: 2008958 - DNA, 25 bp, Homo sapien
gctttcacagtgagctttttcccag

SEQ ID NO: 2008959 - DNA, 25 bp, Homo sapien
tagttgaggctacactacctgctgt

SEQ ID NO: 2008960 - DNA, 25 bp, Homo sapien
gctgtggtcctcatacccacttgca

SEQ ID NO: 2008961 - DNA, 25 bp, Homo sapien
tccccattgaagtgcctgaggtcct

SEQ ID NO: 2008962 - DNA, 25 bp, Homo sapien
tcttccacagtgacaccctctgagt

SEQ ID NO: 2008963 - DNA, 25 bp, Homo sapien
tgaggtcctgctacggctgtggtcc

SEQ ID NO: 2008964 - DNA, 25 bp, Homo sapien
cctgtcttagctgggcctcaagtgt

SEQ ID NO: 2008965 - DNA, 25 bp, Homo sapien
ctccagttctagcatcccttgaagg

SEQ ID NO: 2008966 - DNA, 25 bp, Homo sapien
tctagcatcccttgaagggtagcct

SEQ ID NO: 2008967 - DNA, 25 bp, Homo sapien
gcctgtcttagctgggcctcaagtg

SEQ ID NO: 2008968 - DNA, 25 bp, Homo sapien
agtttcaccagtgccgtggatggtc

SEQ ID NO: 2008969 - DNA, 25 bp, Homo sapien
tttgagtttcaccagtgccgtggat

SEQ ID NO: 2008970 - DNA, 25 bp, Homo sapien
gtcacaatgtttgcacagcggttgg

SEQ ID NO: 2008971 - DNA, 25 bp, Homo sapien
aagtcacaatgtttgcacagcggtt

SEQ ID NO: 2008972 - DNA, 25 bp, Homo sapien
cctaagatgcactgagttgctcttc

SEQ ID NO: 2008973 - DNA, 25 bp, Homo sapien
tggtggtcccttcccaaatgaagtc

SEQ ID NO: 2008974 - DNA, 25 bp, Homo sapien
cacaaactctagaggattctaagcc

SEQ ID NO: 2008975 - DNA, 25 bp, Homo sapien
taactcagtgtcagtattctggcag

SEQ ID NO: 2008976 - DNA, 25 bp, Homo sapien
tgggtggcacagacggctgcggagc

SEQ ID NO: 2008977 - DNA, 25 bp, Homo sapien
ggtggcacagacggctgcggagcac

SEQ ID NO: 2008978 - DNA, 25 bp, Homo sapien
ctgggtggcacagacggctgcggag

SEQ ID NO: 2008979 - DNA, 25 bp, Homo sapien
tggcacagacggctgcggagcacct

SEQ ID NO: 2008980 - DNA, 25 bp, Homo sapien
ccgaagatatccaagccggacgcgg

SEQ ID NO: 2008981 - DNA, 25 bp, Homo sapien
ttgttcatcttcttcaggtccccga

SEQ ID NO: 2008982 - DNA, 25 bp, Homo sapien
ttcaggtccccgaagatatccaagc

SEQ ID NO: 2008983 - DNA, 25 bp, Homo sapien
tcttcttcaggtccccgaagatatc

SEQ ID NO: 2008984 - DNA, 25 bp, Homo sapien
gccacggcgcgctcaccaccctcct

SEQ ID NO: 2008985 - DNA, 25 bp, Homo sapien
tccccgctagcacaggcggtcccgg

SEQ ID NO: 2008986 - DNA, 25 bp, Homo sapien
gactccccgctagcacaggcggtcc

SEQ ID NO: 2008987 - DNA, 25 bp, Homo sapien
cccgactccccgctagcacaggcgg

SEQ ID NO: 2008988 - DNA, 25 bp, Homo sapien
tactggcaggccttatcgctgagag

SEQ ID NO: 2008989 - DNA, 25 bp, Homo sapien
gacagtctgcaattatagccatcag

SEQ ID NO: 2008990 - DNA, 25 bp, Homo sapien
ggatcaatacactcatcagagggcc

SEQ ID NO: 2008991 - DNA, 25 bp, Homo sapien
tgatctttcaaagggcaaactggtt

SEQ ID NO: 2008992 - DNA, 25 bp, Homo sapien
gatcatggcgaagtttaaaacctgg

SEQ ID NO: 2008993 - DNA, 25 bp, Homo sapien
ctgcctgtgagcacgatcaagcctt

SEQ ID NO: 2008994 - DNA, 25 bp, Homo sapien
tatcatgagtgcagaagacacgatc

SEQ ID NO: 2008995 - DNA, 25 bp, Homo sapien
agcctttccatatcatgagtgcaga

SEQ ID NO: 2008996 - DNA, 25 bp, Homo sapien
tactctgtgaactattggaatgtct

SEQ ID NO: 2008997 - DNA, 25 bp, Homo sapien
gaatgtctcgtccttcaactttaaa

SEQ ID NO: 2008998 - DNA, 25 bp, Homo sapien
aactatttcaccagctctgattggg

SEQ ID NO: 2008999 - DNA, 25 bp, Homo sapien
tcttcccggaaatttgtgaggaaca

SEQ ID NO: 2009000 - DNA, 25 bp, Homo sapien
gagctccttcaaataactaacatgt

SEQ ID NO: 2009001 - DNA, 25 bp, Homo sapien
tcacccagtgagtcaatggcagaac

SEQ ID NO: 2009002 - DNA, 25 bp, Homo sapien
taagcatttggtccaaagtcaccca

SEQ ID NO: 2009003 - DNA, 25 bp, Homo sapien
catcctctgttgcaatgtgacttga

SEQ ID NO: 2009004 - DNA, 25 bp, Homo sapien
tatgactcacacagataaaaatcca

SEQ ID NO: 2009005 - DNA, 25 bp, Homo sapien
cacactaagctgcataaaggtaaat

SEQ ID NO: 2009006 - DNA, 25 bp, Homo sapien
cttcataagtaagtcacagctggta

SEQ ID NO: 2009007 - DNA, 25 bp, Homo sapien
tttactaatcatgtgaagtactctc

SEQ ID NO: 2009008 - DNA, 25 bp, Homo sapien
tacaggaccagtgtatcaccacagg

SEQ ID NO: 2009009 - DNA, 25 bp, Homo sapien
ccaagtgtgctctaggctgtcctca

SEQ ID NO: 2009010 - DNA, 25 bp, Homo sapien
gatttgcagccacggttataaagga

SEQ ID NO: 2009011 - DNA, 25 bp, Homo sapien
cctcaggaatctaacaggtaggcat

SEQ ID NO: 2009012 - DNA, 25 bp, Homo sapien
cacaaaaacgctgctgacaaggagc

SEQ ID NO: 2009013 - DNA, 25 bp, Homo sapien
gaagtcaggtcatgaagctggttta

SEQ ID NO: 2009014 - DNA, 25 bp, Homo sapien
ttcatcagtgggcaaaatcatgtga

SEQ ID NO: 2009015 - DNA, 25 bp, Homo sapien
gaactgttttcattcttaggcctca

SEQ ID NO: 2009016 - DNA, 25 bp, Homo sapien
agtttactcaagactttactgtcag

SEQ ID NO: 2009017 - DNA, 25 bp, Homo sapien
taaattccaaaacactcaagtatcc

SEQ ID NO: 2009018 - DNA, 25 bp, Homo sapien
gacaaccattcaactgaagcacaaa

SEQ ID NO: 2009019 - DNA, 25 bp, Homo sapien
gataacctgaccttcctttagtcta

SEQ ID NO: 2009020 - DNA, 25 bp, Homo sapien
tcagaaatttgatgtctccattatc

SEQ ID NO: 2009021 - DNA, 25 bp, Homo sapien
cagaaatttgatgtctccattatct

SEQ ID NO: 2009022 - DNA, 25 bp, Homo sapien
gacaggatggactaactggaagccc

SEQ ID NO: 2009023 - DNA, 25 bp, Homo sapien
tatgtaatcagatggacccaggtct

SEQ ID NO: 2009024 - DNA, 25 bp, Homo sapien
gagagtacctacagcattccctgaa

SEQ ID NO: 2009025 - DNA, 25 bp, Homo sapien
ggttcagtgcataaaccagccaacg

SEQ ID NO: 2009026 - DNA, 25 bp, Homo sapien
ttaaaatagttaagccgcttgtaca

SEQ ID NO: 2009027 - DNA, 25 bp, Homo sapien
ttaagccgcttgtacaaaaagaata

SEQ ID NO: 2009028 - DNA, 25 bp, Homo sapien
atagttaagccgcttgtacaaaaag

SEQ ID NO: 2009029 - DNA, 25 bp, Homo sapien
taaaatagttaagccgcttgtacaa

SEQ ID NO: 2009030 - DNA, 25 bp, Homo sapien
ggtgaccataccaacatatggtaaa

SEQ ID NO: 2009031 - DNA, 25 bp, Homo sapien
tatggtgaccataccaacatatggt

SEQ ID NO: 2009032 - DNA, 25 bp, Homo sapien
attcattattatggtgaccatacca

SEQ ID NO: 2009033 - DNA, 25 bp, Homo sapien
tattatggtgaccataccaacatat

SEQ ID NO: 2009034 - DNA, 25 bp, Homo sapien
aagaagactgcctgtttacagttgc

SEQ ID NO: 2009035 - DNA, 25 bp, Homo sapien
attctgcaggcctattaatggcaac

SEQ ID NO: 2009036 - DNA, 25 bp, Homo sapien
taatggcaacatgttttaagaagac

SEQ ID NO: 2009037 - DNA, 25 bp, Homo sapien
tgccattttagaacactgaacatac

SEQ ID NO: 2009038 - DNA, 25 bp, Homo sapien
ctgtgaggtctacaaagaaatttgg

SEQ ID NO: 2009039 - DNA, 25 bp, Homo sapien
gctacattatggtcaaaaacccaaa

SEQ ID NO: 2009040 - DNA, 25 bp, Homo sapien
gatgaagtccgttaaatactgcgct

SEQ ID NO: 2009041 - DNA, 25 bp, Homo sapien
tgttctctaaatgagctgttcaatg

SEQ ID NO: 2009042 - DNA, 25 bp, Homo sapien
catatgcacccattacagccaaaag

SEQ ID NO: 2009043 - DNA, 25 bp, Homo sapien
taacacatatgcacccattacagcc

SEQ ID NO: 2009044 - DNA, 25 bp, Homo sapien
ttagtaacacatatgcacccattac

SEQ ID NO: 2009045 - DNA, 25 bp, Homo sapien
cacatatgcacccattacagccaaa

SEQ ID NO: 2009046 - DNA, 25 bp, Homo sapien
cagaaaatggaacatctcaaatata

SEQ ID NO: 2009047 - DNA, 25 bp, Homo sapien
gaaaatggaacatctcaaatatatt

SEQ ID NO: 2009048 - DNA, 25 bp, Homo sapien
agaaaatggaacatctcaaatatat

SEQ ID NO: 2009049 - DNA, 25 bp, Homo sapien
actggtgaatcttttatttggacaa

SEQ ID NO: 2009050 - DNA, 25 bp, Homo sapien
cctttcaatgttggtgctccccaaa

SEQ ID NO: 2009051 - DNA, 25 bp, Homo sapien
ctttcaatgttggtgctccccaaac

SEQ ID NO: 2009052 - DNA, 25 bp, Homo sapien
tttcaatgttggtgctccccaaact

SEQ ID NO: 2009053 - DNA, 25 bp, Homo sapien
ctgcttggccgggaacctcacggca

SEQ ID NO: 2009054 - DNA, 25 bp, Homo sapien
ccgggaacctcacggcagtgcaagc

SEQ ID NO: 2009055 - DNA, 25 bp, Homo sapien
cttggccgggaacctcacggcagtg

SEQ ID NO: 2009056 - DNA, 25 bp, Homo sapien
ggccgggaacctcacggcagtgcaa

SEQ ID NO: 2009057 - DNA, 25 bp, Homo sapien
catacatcttgaatctctgtagctg

SEQ ID NO: 2009058 - DNA, 25 bp, Homo sapien
ccctctgcgatggtcttcttattat

SEQ ID NO: 2009059 - DNA, 25 bp, Homo sapien
tacttatggggattcgccttccctc

SEQ ID NO: 2009060 - DNA, 25 bp, Homo sapien
tacatcttgaatctctgtagctgta

SEQ ID NO: 2009061 - DNA, 25 bp, Homo sapien
cacgattccattctctagagtacat

SEQ ID NO: 2009062 - DNA, 25 bp, Homo sapien
ctgcctctgtattggacatcacgat

SEQ ID NO: 2009063 - DNA, 25 bp, Homo sapien
gacatcacgattccattctctagag

SEQ ID NO: 2009064 - DNA, 25 bp, Homo sapien
tctgtattggacatcacgattccat

SEQ ID NO: 2009065 - DNA, 25 bp, Homo sapien
gctgcatacaacattactgacttac

SEQ ID NO: 2009066 - DNA, 25 bp, Homo sapien
tattctttctatatgcagtttgctg

SEQ ID NO: 2009067 - DNA, 25 bp, Homo sapien
gtccgtgttgtgttgaggtatattc

SEQ ID NO: 2009068 - DNA, 25 bp, Homo sapien
gctgagagcttttatccatttcttc

SEQ ID NO: 2009069 - DNA, 25 bp, Homo sapien
ggtttgtcaaatatggtccgtgttg

SEQ ID NO: 2009070 - DNA, 25 bp, Homo sapien
ttgtcccgcagtctggcagttgagg

SEQ ID NO: 2009071 - DNA, 25 bp, Homo sapien
taaggaggtggtcccagtgactgct

SEQ ID NO: 2009072 - DNA, 25 bp, Homo sapien
gtgactgctcttctaccagacctac

SEQ ID NO: 2009073 - DNA, 25 bp, Homo sapien
agggcatgagaggacagcctaagtt

SEQ ID NO: 2009074 - DNA, 25 bp, Homo sapien
caggtgcatgtcagcacgcccagct

SEQ ID NO: 2009075 - DNA, 25 bp, Homo sapien
gggactacaggtgcatgtcagcacg

SEQ ID NO: 2009076 - DNA, 25 bp, Homo sapien
actacaggtgcatgtcagcacgccc

SEQ ID NO: 2009077 - DNA, 25 bp, Homo sapien
acaggtgcatgtcagcacgcccagc

SEQ ID NO: 2009078 - DNA, 25 bp, Homo sapien
atctccattttacaccttactgtca

SEQ ID NO: 2009079 - DNA, 25 bp, Homo sapien
tctccattttacaccttactgtcat

SEQ ID NO: 2009080 - DNA, 25 bp, Homo sapien
ctctttatcttcggctacttgtttt

SEQ ID NO: 2009081 - DNA, 25 bp, Homo sapien
tgcttctaggaggattgccaagcaa

SEQ ID NO: 2009082 - DNA, 25 bp, Homo sapien
taggaggattgccaagcaatttggg

SEQ ID NO: 2009083 - DNA, 25 bp, Homo sapien
ctgcttctaggaggattgccaagca

SEQ ID NO: 2009084 - DNA, 25 bp, Homo sapien
ttctaggaggattgccaagcaattt

SEQ ID NO: 2009085 - DNA, 25 bp, Homo sapien
tatgaacagcgccttcagtgtatac

SEQ ID NO: 2009086 - DNA, 25 bp, Homo sapien
cagtcccgtagagggctatgaacag

SEQ ID NO: 2009087 - DNA, 25 bp, Homo sapien
aaaagcagtcccgtagagggctatg

SEQ ID NO: 2009088 - DNA, 25 bp, Homo sapien
agggctatgaacagcgccttcagtg

SEQ ID NO: 2009089 - DNA, 25 bp, Homo sapien
ccatcaggtgttaaagcagggcttg

SEQ ID NO: 2009090 - DNA, 25 bp, Homo sapien
cccatggaatgagcacctgtcacca

SEQ ID NO: 2009091 - DNA, 25 bp, Homo sapien
cagtgagtgagagccaccagggctt

SEQ ID NO: 2009092 - DNA, 25 bp, Homo sapien
gaaggaccagattgttgtttccaaa

SEQ ID NO: 2009093 - DNA, 25 bp, Homo sapien
agccttgcagctgaataactcccat

SEQ ID NO: 2009094 - DNA, 25 bp, Homo sapien
cttgcagctgaataactcccatttc

SEQ ID NO: 2009095 - DNA, 25 bp, Homo sapien
gccttgcagctgaataactcccatt

SEQ ID NO: 2009096 - DNA, 25 bp, Homo sapien
tgcagctgaataactcccatttctt

SEQ ID NO: 2009097 - DNA, 25 bp, Homo sapien
tgaacataaagctcacacatacagc

SEQ ID NO: 2009098 - DNA, 25 bp, Homo sapien
ctgcatgaacataaagctcacacat

SEQ ID NO: 2009099 - DNA, 25 bp, Homo sapien
gaacataaagctcacacatacagcc

SEQ ID NO: 2009100 - DNA, 25 bp, Homo sapien
gcatgaacataaagctcacacatac

SEQ ID NO: 2009101 - DNA, 25 bp, Homo sapien
aaagcaggtctctgtttgctgccgg

SEQ ID NO: 2009102 - DNA, 25 bp, Homo sapien
cagcaacaagtggagagtagagtac

SEQ ID NO: 2009103 - DNA, 25 bp, Homo sapien
gcaacaagtggagagtagagtacag

SEQ ID NO: 2009104 - DNA, 25 bp, Homo sapien
acaagtggagagtagagtacaggaa

SEQ ID NO: 2009105 - DNA, 25 bp, Homo sapien
ccacagcaacaagtggagagtagag

SEQ ID NO: 2009106 - DNA, 25 bp, Homo sapien
gaagggctggcagaccatgaaaaca

SEQ ID NO: 2009107 - DNA, 25 bp, Homo sapien
attagattctctttcctcgtgtgcg

SEQ ID NO: 2009108 - DNA, 25 bp, Homo sapien
gctgcgtctgtgttagggagaataa

SEQ ID NO: 2009109 - DNA, 25 bp, Homo sapien
aattgtgttcaaaaatggctgcgtc

SEQ ID NO: 2009110 - DNA, 25 bp, Homo sapien
aatctgcctggcttgttgctcatta

SEQ ID NO: 2009111 - DNA, 25 bp, Homo sapien
agagtaggtgatggcgcaaggggtg

SEQ ID NO: 2009112 - DNA, 25 bp, Homo sapien
aggagagggaccagagagagtaggt

SEQ ID NO: 2009113 - DNA, 25 bp, Homo sapien
gctggcagcgttctggggctgagca

SEQ ID NO: 2009114 - DNA, 25 bp, Homo sapien
tggcagcgttctggggctgagcagc

SEQ ID NO: 2009115 - DNA, 25 bp, Homo sapien
tgcacggtcctgcttgaaatccagc

SEQ ID NO: 2009116 - DNA, 25 bp, Homo sapien
cacggtcctgcttgaaatccagctc

SEQ ID NO: 2009117 - DNA, 25 bp, Homo sapien
cagcatgtcgctgatgcccttccat

SEQ ID NO: 2009118 - DNA, 25 bp, Homo sapien
cttcccagcatgtcgctgatgccct

SEQ ID NO: 2009119 - DNA, 25 bp, Homo sapien
ctgcagggagatgctccaagattcc

SEQ ID NO: 2009120 - DNA, 25 bp, Homo sapien
gcagggagatgctccaagattccca

SEQ ID NO: 2009121 - DNA, 25 bp, Homo sapien
tgcagggagatgctccaagattccc

SEQ ID NO: 2009122 - DNA, 25 bp, Homo sapien
gcagagactggtgacccggacctcg

SEQ ID NO: 2009123 - DNA, 25 bp, Homo sapien
agagcagagactggtgacccggacc

SEQ ID NO: 2009124 - DNA, 25 bp, Homo sapien
agagactggtgacccggacctcgga

SEQ ID NO: 2009125 - DNA, 25 bp, Homo sapien
ggtgacccggacctcggaggagctc

SEQ ID NO: 2009126 - DNA, 25 bp, Homo sapien
ccagcaggaccagcgggagctcacg

SEQ ID NO: 2009127 - DNA, 25 bp, Homo sapien
gccaggcagaggaccagcgccagca

SEQ ID NO: 2009128 - DNA, 25 bp, Homo sapien
atcttggtcagcacggtccctccgc

SEQ ID NO: 2009129 - DNA, 25 bp, Homo sapien
ccagtggttgccgcgcgggtacatc

SEQ ID NO: 2009130 - DNA, 25 bp, Homo sapien
gggagcctccaagccggtgcctaga

SEQ ID NO: 2009131 - DNA, 25 bp, Homo sapien
agggagcctccaagccggtgcctag

SEQ ID NO: 2009132 - DNA, 25 bp, Homo sapien
cggccgtcctctccgcctgggttct

SEQ ID NO: 2009133 - DNA, 25 bp, Homo sapien
cgcagcgcggccgtcctctccgcct

SEQ ID NO: 2009134 - DNA, 25 bp, Homo sapien
tgaggaagttggacgctctgcgttt

SEQ ID NO: 2009135 - DNA, 25 bp, Homo sapien
tgctggaagctatgctcggcgacgc

SEQ ID NO: 2009136 - DNA, 25 bp, Homo sapien
acgctctgcgtttgctggaagctat

SEQ ID NO: 2009137 - DNA, 25 bp, Homo sapien
gctatgctcggcgacgccgagagcc

SEQ ID NO: 2009138 - DNA, 25 bp, Homo sapien
tcagatagccactcaataaccttgc

SEQ ID NO: 2009139 - DNA, 25 bp, Homo sapien
tcacatggtgctcagatagccactc

SEQ ID NO: 2009140 - DNA, 25 bp, Homo sapien
tggtgctcagatagccactcaataa

SEQ ID NO: 2009141 - DNA, 25 bp, Homo sapien
gctcagatagccactcaataacctt

SEQ ID NO: 2009142 - DNA, 25 bp, Homo sapien
ttcccacctgatgtactctctcagc

SEQ ID NO: 2009143 - DNA, 25 bp, Homo sapien
tgcttctatgagacccagcaaattc

SEQ ID NO: 2009144 - DNA, 25 bp, Homo sapien
acagaagaagactcccctgtgctct

SEQ ID NO: 2009145 - DNA, 25 bp, Homo sapien
ctctctcagaaacagaagaagactc

SEQ ID NO: 2009146 - DNA, 25 bp, Homo sapien
tttgaagttgctgctatcctctgaa

SEQ ID NO: 2009147 - DNA, 25 bp, Homo sapien
tgaagttgctgctatcctctgaatc

SEQ ID NO: 2009148 - DNA, 25 bp, Homo sapien
tctttgaagttgctgctatcctctg

SEQ ID NO: 2009149 - DNA, 25 bp, Homo sapien
ctttgaagttgctgctatcctctga

SEQ ID NO: 2009150 - DNA, 25 bp, Homo sapien
gacaaatgagaagggtactgctgtt

SEQ ID NO: 2009151 - DNA, 25 bp, Homo sapien
tgaaaaaggcatggcagctagaatc

SEQ ID NO: 2009152 - DNA, 25 bp, Homo sapien
catggcagctagaatctgagaagtc

SEQ ID NO: 2009153 - DNA, 25 bp, Homo sapien
gatatccacctacaggaactctggc

SEQ ID NO: 2009154 - DNA, 25 bp, Homo sapien
caactggaggtggaattaaatgaga

SEQ ID NO: 2009155 - DNA, 25 bp, Homo sapien
actggaggtggaattaaatgagatg

SEQ ID NO: 2009156 - DNA, 25 bp, Homo sapien
aactggaggtggaattaaatgagat

SEQ ID NO: 2009157 - DNA, 25 bp, Homo sapien
gagtgagctgaagtctaatcctaga

SEQ ID NO: 2009158 - DNA, 25 bp, Homo sapien
gaacttattactagaggagcagctg

SEQ ID NO: 2009159 - DNA, 25 bp, Homo sapien
tacgcgctgagatgaaaaaacactt

SEQ ID NO: 2009160 - DNA, 25 bp, Homo sapien
ggcggagcgcagcaatctgtacttt

SEQ ID NO: 2009161 - DNA, 25 bp, Homo sapien
attgctggttcagctgggggttcct

SEQ ID NO: 2009162 - DNA, 25 bp, Homo sapien
tgctggttcagctgggggttccttc

SEQ ID NO: 2009163 - DNA, 25 bp, Homo sapien
tcattgctggttcagctgggggttc

SEQ ID NO: 2009164 - DNA, 25 bp, Homo sapien
gctggttcagctgggggttccttcc

SEQ ID NO: 2009165 - DNA, 25 bp, Homo sapien
gcttgcagaacgcagtctcttaggg

SEQ ID NO: 2009166 - DNA, 25 bp, Homo sapien
gatgatccgtagaactgatgcttgc

SEQ ID NO: 2009167 - DNA, 25 bp, Homo sapien
gaatctaaccaacaggtagcctaga

SEQ ID NO: 2009168 - DNA, 25 bp, Homo sapien
ttattgtgaatggtaacagctcggg

SEQ ID NO: 2009169 - DNA, 25 bp, Homo sapien
ctgaaaaatcctggttcaggtctac

SEQ ID NO: 2009170 - DNA, 25 bp, Homo sapien
caccaactgggtaaccgcttcggat

SEQ ID NO: 2009171 - DNA, 25 bp, Homo sapien
tcctggttcaggtctacaagaaacc

SEQ ID NO: 2009172 - DNA, 25 bp, Homo sapien
agaaaccaatccagaggtcacttca

SEQ ID NO: 2009173 - DNA, 25 bp, Homo sapien
aattcaactaagagtagaatcttcc

SEQ ID NO: 2009174 - DNA, 25 bp, Homo sapien
attcaactaagagtagaatcttcct

SEQ ID NO: 2009175 - DNA, 25 bp, Homo sapien
ttcaactaagagtagaatcttcctt

SEQ ID NO: 2009176 - DNA, 25 bp, Homo sapien
aaattcaactaagagtagaatcttc

SEQ ID NO: 2009177 - DNA, 25 bp, Homo sapien
tggcggcttcagcatttgatgagat

SEQ ID NO: 2009178 - DNA, 25 bp, Homo sapien
catttgatgagatgctgtccccatc

SEQ ID NO: 2009179 - DNA, 25 bp, Homo sapien
gcttcagcatttgatgagatgctgt

SEQ ID NO: 2009180 - DNA, 25 bp, Homo sapien
cggcttcagcatttgatgagatgct

SEQ ID NO: 2009181 - DNA, 25 bp, Homo sapien
agtctttgcggagaccgctggagcc

SEQ ID NO: 2009182 - DNA, 25 bp, Homo sapien
tgacggtagagggaatgccaattgc

SEQ ID NO: 2009183 - DNA, 25 bp, Homo sapien
taatctagaatctggtgacggtaga

SEQ ID NO: 2009184 - DNA, 25 bp, Homo sapien
cacaggctagctgaaagtctttgcg

SEQ ID NO: 2009185 - DNA, 25 bp, Homo sapien
tcctagttccgaacacggttctgtc

SEQ ID NO: 2009186 - DNA, 25 bp, Homo sapien
ggctgtgtatccctagtggatttcc

SEQ ID NO: 2009187 - DNA, 25 bp, Homo sapien
cagtgtcctgaggttcccgtaggac

SEQ ID NO: 2009188 - DNA, 25 bp, Homo sapien
cctggggttaggcactgcggccctg

SEQ ID NO: 2009189 - DNA, 25 bp, Homo sapien
ttatgagtttttctgctacttcccc

SEQ ID NO: 2009190 - DNA, 25 bp, Homo sapien
tatgagtttttctgctacttcccct

SEQ ID NO: 2009191 - DNA, 25 bp, Homo sapien
gcagtcttgggcacctgtgaccttg

SEQ ID NO: 2009192 - DNA, 25 bp, Homo sapien
cttcacttcccttagatcattgcca

SEQ ID NO: 2009193 - DNA, 25 bp, Homo sapien
ttcccttagatcattgccaagatta

SEQ ID NO: 2009194 - DNA, 25 bp, Homo sapien
cttgagcatgccaccgtcagcatct

SEQ ID NO: 2009195 - DNA, 25 bp, Homo sapien
ctgaaaccgacttgggaaaaggatg

SEQ ID NO: 2009196 - DNA, 25 bp, Homo sapien
aatatggattgtaatcatcgtcccc

SEQ ID NO: 2009197 - DNA, 25 bp, Homo sapien
gaccctggcatgacgcaatatggat

SEQ ID NO: 2009198 - DNA, 25 bp, Homo sapien
tgtggaaagtaccaagaccctggca

SEQ ID NO: 2009199 - DNA, 25 bp, Homo sapien
gcctgagcgtgctcgatatccaccg

SEQ ID NO: 2009200 - DNA, 25 bp, Homo sapien
agagctagttcttgcgggcgtgccc

SEQ ID NO: 2009201 - DNA, 25 bp, Homo sapien
gggcgtgccctggacagtatctgca

SEQ ID NO: 2009202 - DNA, 25 bp, Homo sapien
ggaatctcgaaatctcagcccgctt

SEQ ID NO: 2009203 - DNA, 25 bp, Homo sapien
cgcagttgaaacttcgggtggattt

SEQ ID NO: 2009204 - DNA, 25 bp, Homo sapien
accctgtttccttgcgaagggcctg

SEQ ID NO: 2009205 - DNA, 25 bp, Homo sapien
tgcgaataccgagttggaaacgaaa

SEQ ID NO: 2009206 - DNA, 25 bp, Homo sapien
agggcctggcacctcgcagttgaaa

SEQ ID NO: 2009207 - DNA, 25 bp, Homo sapien
ccaagaaaaagcatcggcggaaccg

SEQ ID NO: 2009208 - DNA, 25 bp, Homo sapien
ccccgagtacgaaggtgagtgcgca

SEQ ID NO: 2009209 - DNA, 25 bp, Homo sapien
agagaaagcttaggacccatcgccg

SEQ ID NO: 2009210 - DNA, 25 bp, Homo sapien
cccgagcttaggagttggccagacg

SEQ ID NO: 2009211 - DNA, 25 bp, Homo sapien
ggcgggagcacctcgcgacttcaca

SEQ ID NO: 2009212 - DNA, 25 bp, Homo sapien
acgggagcttctcgcttgccggcca

SEQ ID NO: 2009213 - DNA, 25 bp, Homo sapien
ccagccatggccgacgggagcttct

SEQ ID NO: 2009214 - DNA, 25 bp, Homo sapien
acctcgcgacttcacagcatcgagg

SEQ ID NO: 2009215 - DNA, 25 bp, Homo sapien
cgcggatccccggagtgtgtttgta

SEQ ID NO: 2009216 - DNA, 25 bp, Homo sapien
tccgacttctgggactaaggcggca

SEQ ID NO: 2009217 - DNA, 25 bp, Homo sapien
gcttaaaacggatcaagaggtggaa

SEQ ID NO: 2009218 - DNA, 25 bp, Homo sapien
gggaatattcctagtgccggcccag

SEQ ID NO: 2009219 - DNA, 25 bp, Homo sapien
gagggggctagaggggcgagtctga

SEQ ID NO: 2009220 - DNA, 25 bp, Homo sapien
ctagaggggcgagtctgaagctggg

SEQ ID NO: 2009221 - DNA, 25 bp, Homo sapien
ccagagggggctagaggggcgagtc

SEQ ID NO: 2009222 - DNA, 25 bp, Homo sapien
ggctagaggggcgagtctgaagctg

SEQ ID NO: 2009223 - DNA, 25 bp, Homo sapien
gtacaacccagccaagaaaggagtg

SEQ ID NO: 2009224 - DNA, 25 bp, Homo sapien
tatagacggacaaactaaacgcgag

SEQ ID NO: 2009225 - DNA, 25 bp, Homo sapien
aagccttcggctgggtctcggcgct

SEQ ID NO: 2009226 - DNA, 25 bp, Homo sapien
gaaattcaaactgcgacgagtgcgg

SEQ ID NO: 2009227 - DNA, 25 bp, Homo sapien
gtcaccggacttgcggacataaatg

SEQ ID NO: 2009228 - DNA, 25 bp, Homo sapien
ccggacttgcggacataaatggccc

SEQ ID NO: 2009229 - DNA, 25 bp, Homo sapien
tagaggtcaccggacttgcggacat

SEQ ID NO: 2009230 - DNA, 25 bp, Homo sapien
gaggtcaccggacttgcggacataa

SEQ ID NO: 2009231 - DNA, 25 bp, Homo sapien
catctttccaagtggccgatcagtc

SEQ ID NO: 2009232 - DNA, 25 bp, Homo sapien
agccaattactcctgaaccctcggg

SEQ ID NO: 2009233 - DNA, 25 bp, Homo sapien
agcgaggaactccaggtgggtctcc

SEQ ID NO: 2009234 - DNA, 25 bp, Homo sapien
gcgacaccgctgctcatcagtaaag

SEQ ID NO: 2009235 - DNA, 25 bp, Homo sapien
aatttgtttgatgcccacgacgtgg

SEQ ID NO: 2009236 - DNA, 25 bp, Homo sapien
taaagggacgcagcaaacgcttgtc

SEQ ID NO: 2009237 - DNA, 25 bp, Homo sapien
tttaattcacggttcaggccaccag

SEQ ID NO: 2009238 - DNA, 25 bp, Homo sapien
gataaagaagacacccctgctgtgg

SEQ ID NO: 2009239 - DNA, 25 bp, Homo sapien
agcgcgggccccgaatcctcgacgc

SEQ ID NO: 2009240 - DNA, 25 bp, Homo sapien
cactggcacccgcgggaggcggaac

SEQ ID NO: 2009241 - DNA, 25 bp, Homo sapien
ctatgcagaacagccgctcccgtcc

SEQ ID NO: 2009242 - DNA, 25 bp, Homo sapien
gtgttcctagcgccgcggccactgg

SEQ ID NO: 2009243 - DNA, 25 bp, Homo sapien
gaacaagggattgcctgcctcactg

SEQ ID NO: 2009244 - DNA, 25 bp, Homo sapien
cagtacatggaagcatgccacgaga

SEQ ID NO: 2009245 - DNA, 25 bp, Homo sapien
gattctgagcacaccaatgtttgag

SEQ ID NO: 2009246 - DNA, 25 bp, Homo sapien
gtcattgttcaataggcacctcagg

SEQ ID NO: 2009247 - DNA, 25 bp, Homo sapien
taagtcattgtgtctatgatgccac

SEQ ID NO: 2009248 - DNA, 25 bp, Homo sapien
tgcaattgcgtaatggcttatatcc

SEQ ID NO: 2009249 - DNA, 25 bp, Homo sapien
ggtttgctctgtggaaaaatcaatc

SEQ ID NO: 2009250 - DNA, 25 bp, Homo sapien
tatgaaacagcatgagcatgagcct

SEQ ID NO: 2009251 - DNA, 25 bp, Homo sapien
tattatagcaataccaaacgagtgc

SEQ ID NO: 2009252 - DNA, 25 bp, Homo sapien
ttgggctaacgacctaaaatctata

SEQ ID NO: 2009253 - DNA, 25 bp, Homo sapien
tgtgtgtgcaaacagtctggcgttg

SEQ ID NO: 2009254 - DNA, 25 bp, Homo sapien
tctggcgttgctttttatgttgata

SEQ ID NO: 2009255 - DNA, 25 bp, Homo sapien
gggttagtgaccatttgcatactct

SEQ ID NO: 2009256 - DNA, 25 bp, Homo sapien
tatagtctttgtgcatacttctagg

SEQ ID NO: 2009257 - DNA, 25 bp, Homo sapien
acttaaccttgaaatgtcagactgg

SEQ ID NO: 2009258 - DNA, 25 bp, Homo sapien
gaactaaggacattgtgaagcactt

SEQ ID NO: 2009259 - DNA, 25 bp, Homo sapien
tgagtgaaaccgtcagactggtcag

SEQ ID NO: 2009260 - DNA, 25 bp, Homo sapien
tggaggcgtctatgagacaacacag

SEQ ID NO: 2009261 - DNA, 25 bp, Homo sapien
accgtcagactggtcagtggaatgc

SEQ ID NO: 2009262 - DNA, 25 bp, Homo sapien
tgtatcaagagactttctgtttcag

SEQ ID NO: 2009263 - DNA, 25 bp, Homo sapien
tgcagctacaaagcggacaagtctg

SEQ ID NO: 2009264 - DNA, 25 bp, Homo sapien
gggtcacaaagccattagcctccta

SEQ ID NO: 2009265 - DNA, 25 bp, Homo sapien
gaatgcactcgtaggaaatcagaat

SEQ ID NO: 2009266 - DNA, 25 bp, Homo sapien
gaaatcatctatatgtgcagctaca

SEQ ID NO: 2009267 - DNA, 25 bp, Homo sapien
ttgacaaagtgaatgttcaggagca

SEQ ID NO: 2009268 - DNA, 25 bp, Homo sapien
gcctaatatgtagtcctgtgtcgga

SEQ ID NO: 2009269 - DNA, 25 bp, Homo sapien
ttgtggaatctgttgtaatgtctcc

SEQ ID NO: 2009270 - DNA, 25 bp, Homo sapien
ctgtgtcggagagtcttctatgtgc

SEQ ID NO: 2009271 - DNA, 25 bp, Homo sapien
tgcacaccatatgcgctgtggaggg

SEQ ID NO: 2009272 - DNA, 25 bp, Homo sapien
gatctcgtcggtactttccgttgga

SEQ ID NO: 2009273 - DNA, 25 bp, Homo sapien
tcgccgtttcgagtacaaatacagc

SEQ ID NO: 2009274 - DNA, 25 bp, Homo sapien
tgctgctgtcactcggtcgcttcgt

SEQ ID NO: 2009275 - DNA, 25 bp, Homo sapien
gacgcctgggtccatagcacattat

SEQ ID NO: 2009276 - DNA, 25 bp, Homo sapien
tgggattcaacttccaaaactggga

SEQ ID NO: 2009277 - DNA, 25 bp, Homo sapien
tattcattgagtggaagaccgatcc

SEQ ID NO: 2009278 - DNA, 25 bp, Homo sapien
taatggcccatgaatccgaagatgg

SEQ ID NO: 2009279 - DNA, 25 bp, Homo sapien
ttaatggcatctaccttagagggct

SEQ ID NO: 2009280 - DNA, 25 bp, Homo sapien
tatttaatctatgcttctgtttcct

SEQ ID NO: 2009281 - DNA, 25 bp, Homo sapien
aaatggaaatattaatggcatctac

SEQ ID NO: 2009282 - DNA, 25 bp, Homo sapien
atctaccttagagggctgctgtcag

SEQ ID NO: 2009283 - DNA, 25 bp, Homo sapien
tagcttaagcaaaacggaggtctat

SEQ ID NO: 2009284 - DNA, 25 bp, Homo sapien
ccaatggtgtgttgagggaccctca

SEQ ID NO: 2009285 - DNA, 25 bp, Homo sapien
tttgggatactttttgctagcacag

SEQ ID NO: 2009286 - DNA, 25 bp, Homo sapien
gctccctgtgagtaggaagaccaga

SEQ ID NO: 2009287 - DNA, 25 bp, Homo sapien
gtgctctcttccggattccagtggc

SEQ ID NO: 2009288 - DNA, 25 bp, Homo sapien
acagtgctctcttccggattccagt

SEQ ID NO: 2009289 - DNA, 25 bp, Homo sapien
cagtgctctcttccggattccagtg

SEQ ID NO: 2009290 - DNA, 25 bp, Homo sapien
ctctcttccggattccagtggccat

SEQ ID NO: 2009291 - DNA, 25 bp, Homo sapien
gactaaagccttgatggtccagccc

SEQ ID NO: 2009292 - DNA, 25 bp, Homo sapien
aatgatgtggagtccggcgtgcctc

SEQ ID NO: 2009293 - DNA, 25 bp, Homo sapien
cttctggtggcggagaggactcttc

SEQ ID NO: 2009294 - DNA, 25 bp, Homo sapien
cacattaggcctgaattcagactaa

SEQ ID NO: 2009295 - DNA, 25 bp, Homo sapien
taggattgtttaggtccttggactc

SEQ ID NO: 2009296 - DNA, 25 bp, Homo sapien
taaggaagcactaggcagacaatat

SEQ ID NO: 2009297 - DNA, 25 bp, Homo sapien
gaatgaggaattatgagactcctgg

SEQ ID NO: 2009298 - DNA, 25 bp, Homo sapien
gactctgtgagctgtaaacaggtag

SEQ ID NO: 2009299 - DNA, 25 bp, Homo sapien
tttccaactgccaaaatcaagacct

SEQ ID NO: 2009300 - DNA, 25 bp, Homo sapien
ggcgactctgccctagattcctata

SEQ ID NO: 2009301 - DNA, 25 bp, Homo sapien
taaagacctatcactagggcgactc

SEQ ID NO: 2009302 - DNA, 25 bp, Homo sapien
ggttctccaggtgattacccaagac

SEQ ID NO: 2009303 - DNA, 25 bp, Homo sapien
tagcactggaccaacgacaaacaag

SEQ ID NO: 2009304 - DNA, 25 bp, Homo sapien
gcttgggtcaggatacctgtgttac

SEQ ID NO: 2009305 - DNA, 25 bp, Homo sapien
tcctccaagaagctgcgttagcact

SEQ ID NO: 2009306 - DNA, 25 bp, Homo sapien
ccaacgacaaacaagtgaagggctt

SEQ ID NO: 2009307 - DNA, 25 bp, Homo sapien
tctcatggatgcaaagtgtgtcgtt

SEQ ID NO: 2009308 - DNA, 25 bp, Homo sapien
caccgaaccgcttgggggctctcat

SEQ ID NO: 2009309 - DNA, 25 bp, Homo sapien
tgtgtcgtttccttgtggaaggaca

SEQ ID NO: 2009310 - DNA, 25 bp, Homo sapien
gatgcaaagtgtgtcgtttccttgt

SEQ ID NO: 2009311 - DNA, 25 bp, Homo sapien
tcacaacacagactgagatttggct

SEQ ID NO: 2009312 - DNA, 25 bp, Homo sapien
ttcccagagccacacgctcaaagca

SEQ ID NO: 2009313 - DNA, 25 bp, Homo sapien
ctccacgatgcgctccttcccagag

SEQ ID NO: 2009314 - DNA, 25 bp, Homo sapien
acccttggctccacgatgcgctcct

SEQ ID NO: 2009315 - DNA, 25 bp, Homo sapien
acagcattcacgccagctgcacagg

SEQ ID NO: 2009316 - DNA, 25 bp, Homo sapien
gaggaagtcaactccaggctataga

SEQ ID NO: 2009317 - DNA, 25 bp, Homo sapien
ccttggcctgaggtactccgggtca

SEQ ID NO: 2009318 - DNA, 25 bp, Homo sapien
aaagctcagagttcttcacggagga

SEQ ID NO: 2009319 - DNA, 25 bp, Homo sapien
tccagggtccttgatggagcagaga

SEQ ID NO: 2009320 - DNA, 25 bp, Homo sapien
attaccacccgagagcggcagttgc

SEQ ID NO: 2009321 - DNA, 25 bp, Homo sapien
cgtgtgatctactctttgagaacca

SEQ ID NO: 2009322 - DNA, 25 bp, Homo sapien
gagaaccaccacttgtgtaggtttg

SEQ ID NO: 2009323 - DNA, 25 bp, Homo sapien
gttgaccagcgtgtgatctactctt

SEQ ID NO: 2009324 - DNA, 25 bp, Homo sapien
ctcttcttgggccttggaagtcctg

SEQ ID NO: 2009325 - DNA, 25 bp, Homo sapien
ggaagtcctggttgagtttagtcac

SEQ ID NO: 2009326 - DNA, 25 bp, Homo sapien
acaccaggaacatctcttcttgggc

SEQ ID NO: 2009327 - DNA, 25 bp, Homo sapien
cctacaccaggaacatctcttcttg

SEQ ID NO: 2009328 - DNA, 25 bp, Homo sapien
gagggatccaacagcagtaggaaca

SEQ ID NO: 2009329 - DNA, 25 bp, Homo sapien
ctgtgtttccattgttacagggagg

SEQ ID NO: 2009330 - DNA, 25 bp, Homo sapien
aaggccacgatggttacaaactcag

SEQ ID NO: 2009331 - DNA, 25 bp, Homo sapien
aactcaggtgcacagggagtgagca

SEQ ID NO: 2009332 - DNA, 25 bp, Homo sapien
ccggcagccttgacgcttctggctt

SEQ ID NO: 2009333 - DNA, 25 bp, Homo sapien
ggtccccaaaatcaccatcgacttg

SEQ ID NO: 2009334 - DNA, 25 bp, Homo sapien
atcgacttgacgtcccagccggcag

SEQ ID NO: 2009335 - DNA, 25 bp, Homo sapien
cagccttgacgcttctggcttagag

SEQ ID NO: 2009336 - DNA, 25 bp, Homo sapien
catttgtgtgattgcatgccaggaa

SEQ ID NO: 2009337 - DNA, 25 bp, Homo sapien
tcctctggccatgatcgtggattgc

SEQ ID NO: 2009338 - DNA, 25 bp, Homo sapien
atcacaggcctgtcctttgagggaa

SEQ ID NO: 2009339 - DNA, 25 bp, Homo sapien
gattgccgtttgttggtcactgttc

SEQ ID NO: 2009340 - DNA, 25 bp, Homo sapien
aaagggatcttctgagttgtaccca

SEQ ID NO: 2009341 - DNA, 25 bp, Homo sapien
tagacatttggtatgtgactgggtc

SEQ ID NO: 2009342 - DNA, 25 bp, Homo sapien
tacccataggtggagagtaaggtgt

SEQ ID NO: 2009343 - DNA, 25 bp, Homo sapien
tcttctgagttgtacccataggtgg

SEQ ID NO: 2009344 - DNA, 25 bp, Homo sapien
cagtgttggcggtatttggatctgc

SEQ ID NO: 2009345 - DNA, 25 bp, Homo sapien
agtgttggcggtatttggatctgcc

SEQ ID NO: 2009346 - DNA, 25 bp, Homo sapien
ccagtgttggcggtatttggatctg

SEQ ID NO: 2009347 - DNA, 25 bp, Homo sapien
tgttggcggtatttggatctgccat

SEQ ID NO: 2009348 - DNA, 25 bp, Homo sapien
gccacaaaggaagtatacagttgaa

SEQ ID NO: 2009349 - DNA, 25 bp, Homo sapien
ctgactgtggtgtcggaagttccac

SEQ ID NO: 2009350 - DNA, 25 bp, Homo sapien
tgaagttaggcctgagcagcctgag

SEQ ID NO: 2009351 - DNA, 25 bp, Homo sapien
gaaattgccacaaaggaagtataca

SEQ ID NO: 2009352 - DNA, 25 bp, Homo sapien
ctgtttgggatgaggctttgtaatc

SEQ ID NO: 2009353 - DNA, 25 bp, Homo sapien
gggatgaggctttgtaatctaaatg

SEQ ID NO: 2009354 - DNA, 25 bp, Homo sapien
gatgaggctttgtaatctaaatgtt

SEQ ID NO: 2009355 - DNA, 25 bp, Homo sapien
ttgggatgaggctttgtaatctaaa

SEQ ID NO: 2009356 - DNA, 25 bp, Homo sapien
gcagtcagcacttattaaacgccac

SEQ ID NO: 2009357 - DNA, 25 bp, Homo sapien
tacggtaaaagattcaggtccagca

SEQ ID NO: 2009358 - DNA, 25 bp, Homo sapien
gcatcagtgtattggatacggtaaa

SEQ ID NO: 2009359 - DNA, 25 bp, Homo sapien
cgtatcggtaatatgggatccgtaa

SEQ ID NO: 2009360 - DNA, 25 bp, Homo sapien
agggctccaacctcggagtctgggc

SEQ ID NO: 2009361 - DNA, 25 bp, Homo sapien
tctgggccagccgaaaatgtcaggg

SEQ ID NO: 2009362 - DNA, 25 bp, Homo sapien
ggtggctttccaagtcagactagct

SEQ ID NO: 2009363 - DNA, 25 bp, Homo sapien
gtcagactagcttgtgagattgctg

SEQ ID NO: 2009364 - DNA, 25 bp, Homo sapien
gccttaatgaaaagttgcagatact

SEQ ID NO: 2009365 - DNA, 25 bp, Homo sapien
ggcccttctcattttcactggctct

SEQ ID NO: 2009366 - DNA, 25 bp, Homo sapien
tccacgaggtcctgttgcaacaaca

SEQ ID NO: 2009367 - DNA, 25 bp, Homo sapien
ggcagctactatcggccacttgaca

SEQ ID NO: 2009368 - DNA, 25 bp, Homo sapien
caggaaggtccgtggtaatgagcca

SEQ ID NO: 2009369 - DNA, 25 bp, Homo sapien
gaagtctcaggaactaggtcatgtt

SEQ ID NO: 2009370 - DNA, 25 bp, Homo sapien
tagaaacttagttagcaagccagga

SEQ ID NO: 2009371 - DNA, 25 bp, Homo sapien
cttccaagagtctgaagtctcagga

SEQ ID NO: 2009372 - DNA, 25 bp, Homo sapien
ctggccgctgtgcaggtgatcttac

SEQ ID NO: 2009373 - DNA, 25 bp, Homo sapien
tgctgtgatgttctggccgctgtgc

SEQ ID NO: 2009374 - DNA, 25 bp, Homo sapien
atgttctggccgctgtgcaggtgat

SEQ ID NO: 2009375 - DNA, 25 bp, Homo sapien
ttctggccgctgtgcaggtgatctt

SEQ ID NO: 2009376 - DNA, 25 bp, Homo sapien
gttttaagtggtgcttataaatgag

SEQ ID NO: 2009377 - DNA, 25 bp, Homo sapien
gaaactcggtgctctgaaaacttgc

SEQ ID NO: 2009378 - DNA, 25 bp, Homo sapien
gaaaacttgctgctttgtgtcctca

SEQ ID NO: 2009379 - DNA, 25 bp, Homo sapien
gtgtcctcactgctagtggcatctg

SEQ ID NO: 2009380 - DNA, 25 bp, Homo sapien
tctatggctggcagaagtatccaga

SEQ ID NO: 2009381 - DNA, 25 bp, Homo sapien
cagaaggaaaatctatggctggcag

SEQ ID NO: 2009382 - DNA, 25 bp, Homo sapien
tggcagaagtatccagagatgtgtg

SEQ ID NO: 2009383 - DNA, 25 bp, Homo sapien
ctgagcctcaaacgaggtaaacaca

SEQ ID NO: 2009384 - DNA, 25 bp, Homo sapien
cacctggtgcctcttctctgccagt

SEQ ID NO: 2009385 - DNA, 25 bp, Homo sapien
tgactccagacttcctctccccatg

SEQ ID NO: 2009386 - DNA, 25 bp, Homo sapien
gctgtcttctttggccacctggtgc

SEQ ID NO: 2009387 - DNA, 25 bp, Homo sapien
tcttctctgccagtgggcctcagtc

SEQ ID NO: 2009388 - DNA, 25 bp, Homo sapien
ttgaaattgtcttcggtatttccaa

SEQ ID NO: 2009389 - DNA, 25 bp, Homo sapien
agtcgacattttcccagcccaagac

SEQ ID NO: 2009390 - DNA, 25 bp, Homo sapien
tttgaaattgtcttcggtatttcca

SEQ ID NO: 2009391 - DNA, 25 bp, Homo sapien
tgaaattgtcttcggtatttccaaa

SEQ ID NO: 2009392 - DNA, 25 bp, Homo sapien
ggtcgttcttatttgtcatgtacac

SEQ ID NO: 2009393 - DNA, 25 bp, Homo sapien
gatgcctgttgaatacgtgttgttt

SEQ ID NO: 2009394 - DNA, 25 bp, Homo sapien
gttgcagttcccctggcactttctt

SEQ ID NO: 2009395 - DNA, 25 bp, Homo sapien
tatgaccattgccaagttgcagttc

SEQ ID NO: 2009396 - DNA, 25 bp, Homo sapien
catgtgtggccggccatgagaaaga

SEQ ID NO: 2009397 - DNA, 25 bp, Homo sapien
ggttcgagagttcagtagtcatggg

SEQ ID NO: 2009398 - DNA, 25 bp, Homo sapien
ccagaaggggagagtaacctagaat

SEQ ID NO: 2009399 - DNA, 25 bp, Homo sapien
gttcagctctatgaggcacttctgc

SEQ ID NO: 2009400 - DNA, 25 bp, Homo sapien
gagccttcctagtgccccagcactc

SEQ ID NO: 2009401 - DNA, 25 bp, Homo sapien
agagccttcctagtgccccagcact

SEQ ID NO: 2009402 - DNA, 25 bp, Homo sapien
gaagagccttcctagtgccccagca

SEQ ID NO: 2009403 - DNA, 25 bp, Homo sapien
aggaagagccttcctagtgccccag

SEQ ID NO: 2009404 - DNA, 25 bp, Homo sapien
gacgctcttaattcggttggcgttg

SEQ ID NO: 2009405 - DNA, 25 bp, Homo sapien
tcaaactggagtttgacctgaaatt

SEQ ID NO: 2009406 - DNA, 25 bp, Homo sapien
tttatagcccttggtggggtgctca

SEQ ID NO: 2009407 - DNA, 25 bp, Homo sapien
ttagacgctcttaattcggttggcg

SEQ ID NO: 2009408 - DNA, 25 bp, Homo sapien
caataagtaattacagcacatctga

SEQ ID NO: 2009409 - DNA, 25 bp, Homo sapien
tctgcagctggatcacattcaataa

SEQ ID NO: 2009410 - DNA, 25 bp, Homo sapien
aggtcactcccagagcgttcattag

SEQ ID NO: 2009411 - DNA, 25 bp, Homo sapien
gcctttaatattgcataaccctttg

SEQ ID NO: 2009412 - DNA, 25 bp, Homo sapien
ctggattccggccagaacgtacgcg

SEQ ID NO: 2009413 - DNA, 25 bp, Homo sapien
gaacgtacgcgtgtgcacatcccct

SEQ ID NO: 2009414 - DNA, 25 bp, Homo sapien
ttccggccagaacgtacgcgtgtgc

SEQ ID NO: 2009415 - DNA, 25 bp, Homo sapien
tacgcgtgtgcacatcccctcaaag

SEQ ID NO: 2009416 - DNA, 25 bp, Homo sapien
gctgtcctgtccatttacacggtct

SEQ ID NO: 2009417 - DNA, 25 bp, Homo sapien
tgtcctgtccatttacacggtctgt

SEQ ID NO: 2009418 - DNA, 25 bp, Homo sapien
cctgtccatttacacggtctgtgca

SEQ ID NO: 2009419 - DNA, 25 bp, Homo sapien
tccatttacacggtctgtgcagtag

SEQ ID NO: 2009420 - DNA, 25 bp, Homo sapien
ccttggccgtaggagagtattacat

SEQ ID NO: 2009421 - DNA, 25 bp, Homo sapien
tctttcccatcgcagatgttctttc

SEQ ID NO: 2009422 - DNA, 25 bp, Homo sapien
gcagtgctggccaacttttctttcc

SEQ ID NO: 2009423 - DNA, 25 bp, Homo sapien
cagaggaggtccattctggatgctg

SEQ ID NO: 2009424 - DNA, 25 bp, Homo sapien
ctaggggatgaggtgaagatgctaa

SEQ ID NO: 2009425 - DNA, 25 bp, Homo sapien
gaagattggttccaaggctagggga

SEQ ID NO: 2009426 - DNA, 25 bp, Homo sapien
aagattggttccaaggctaggggat

SEQ ID NO: 2009427 - DNA, 25 bp, Homo sapien
gaagatgctaactgaagaatcagga

SEQ ID NO: 2009428 - DNA, 25 bp, Homo sapien
cataactgttttggccttatgtgac

SEQ ID NO: 2009429 - DNA, 25 bp, Homo sapien
tgaagagggtagcatgctgcttcct

SEQ ID NO: 2009430 - DNA, 25 bp, Homo sapien
ctccattggatccttccttatttgc

SEQ ID NO: 2009431 - DNA, 25 bp, Homo sapien
cctccgtcagcgaagctcttatggg

SEQ ID NO: 2009432 - DNA, 25 bp, Homo sapien
tgtgctttgcggtttgccatgtgga

SEQ ID NO: 2009433 - DNA, 25 bp, Homo sapien
gacattgtctttgtcccagatgcct

SEQ ID NO: 2009434 - DNA, 25 bp, Homo sapien
cggtttgccatgtggacattgtctt

SEQ ID NO: 2009435 - DNA, 25 bp, Homo sapien
ttcaagcatgtgctttgcggtttgc

SEQ ID NO: 2009436 - DNA, 25 bp, Homo sapien
tggagtacctactctgtcgtactct

SEQ ID NO: 2009437 - DNA, 25 bp, Homo sapien
catgactcggacagtctagcttggg

SEQ ID NO: 2009438 - DNA, 25 bp, Homo sapien
gatacagacatgactcggacagtct

SEQ ID NO: 2009439 - DNA, 25 bp, Homo sapien
ctactctgtcgtactctaggccagg

SEQ ID NO: 2009440 - DNA, 25 bp, Homo sapien
tgagcattccctaaagcggtcatct

SEQ ID NO: 2009441 - DNA, 25 bp, Homo sapien
cccagatcctcaggttgggatgccc

SEQ ID NO: 2009442 - DNA, 25 bp, Homo sapien
catcatttttcagggccgcctctgg

SEQ ID NO: 2009443 - DNA, 25 bp, Homo sapien
cagcagccctcactggtttgacagg

SEQ ID NO: 2009444 - DNA, 25 bp, Homo sapien
gaattgaggtcccttttcttcagtg

SEQ ID NO: 2009445 - DNA, 25 bp, Homo sapien
agtgttgaatgggactgggaatacc

SEQ ID NO: 2009446 - DNA, 25 bp, Homo sapien
ggactgggaataccgccctctcttg

SEQ ID NO: 2009447 - DNA, 25 bp, Homo sapien
gccgtgaattccctacctgcttgtc

SEQ ID NO: 2009448 - DNA, 25 bp, Homo sapien
tggcaaattgaagtccgattgcctg

SEQ ID NO: 2009449 - DNA, 25 bp, Homo sapien
tgttattattggaaactcttcccat

SEQ ID NO: 2009450 - DNA, 25 bp, Homo sapien
ccagtgcagggatgttattattgga

SEQ ID NO: 2009451 - DNA, 25 bp, Homo sapien
tgaagtccgattgcctggacagccc

SEQ ID NO: 2009452 - DNA, 25 bp, Homo sapien
gctcccgagtggagttaagctgctg

SEQ ID NO: 2009453 - DNA, 25 bp, Homo sapien
tactgttgtcacttgtgcagcaggc

SEQ ID NO: 2009454 - DNA, 25 bp, Homo sapien
tgagggtaagtccatggctggcctc

SEQ ID NO: 2009455 - DNA, 25 bp, Homo sapien
tcaatgccaggatagtgagagccag

SEQ ID NO: 2009456 - DNA, 25 bp, Homo sapien
gtagaatcaccttacctagccaatg

SEQ ID NO: 2009457 - DNA, 25 bp, Homo sapien
caaccgcacttgtacttggaggaag

SEQ ID NO: 2009458 - DNA, 25 bp, Homo sapien
gtggccaccaccgtcatagcaatat

SEQ ID NO: 2009459 - DNA, 25 bp, Homo sapien
ggcaggaagcctaactctattttgt

SEQ ID NO: 2009460 - DNA, 25 bp, Homo sapien
cagggagttgtagcgacacagtgtc

SEQ ID NO: 2009461 - DNA, 25 bp, Homo sapien
gagagaggcacataaacagcacact

SEQ ID NO: 2009462 - DNA, 25 bp, Homo sapien
tgaggaacttactctctaaaggaga

SEQ ID NO: 2009463 - DNA, 25 bp, Homo sapien
tgtcttgagatgatataacttcccg

SEQ ID NO: 2009464 - DNA, 25 bp, Homo sapien
aaagtggcttacaaggagagggtct

SEQ ID NO: 2009465 - DNA, 25 bp, Homo sapien
aggttaaagtggcttacaaggagag

SEQ ID NO: 2009466 - DNA, 25 bp, Homo sapien
gacaggttaaagtggcttacaagga

SEQ ID NO: 2009467 - DNA, 25 bp, Homo sapien
gaggacaggttaaagtggcttacaa

SEQ ID NO: 2009468 - DNA, 25 bp, Homo sapien
aattctgacagtgatcgtccatcgg

SEQ ID NO: 2009469 - DNA, 25 bp, Homo sapien
cgtccatcgggatagccttttaaat

SEQ ID NO: 2009470 - DNA, 25 bp, Homo sapien
cagtgatcgtccatcgggatagcct

SEQ ID NO: 2009471 - DNA, 25 bp, Homo sapien
tgggtcccaacaaattctgacagtg

SEQ ID NO: 2009472 - DNA, 25 bp, Homo sapien
agtcctgtgctaggtttcatgggat

SEQ ID NO: 2009473 - DNA, 25 bp, Homo sapien
taggtttcatgggatgctttctgtc

SEQ ID NO: 2009474 - DNA, 25 bp, Homo sapien
gatggaccactgaatcgtcctctcc

SEQ ID NO: 2009475 - DNA, 25 bp, Homo sapien
aaaaatagtcttgatggaccactga

SEQ ID NO: 2009476 - DNA, 25 bp, Homo sapien
taatgggcaaggatgaaagtttctc

SEQ ID NO: 2009477 - DNA, 25 bp, Homo sapien
taagataatgggcaaggatgaaagt

SEQ ID NO: 2009478 - DNA, 25 bp, Homo sapien
ctataagataatgggcaaggatgaa

SEQ ID NO: 2009479 - DNA, 25 bp, Homo sapien
atgggcaaggatgaaagtttctcat

SEQ ID NO: 2009480 - DNA, 25 bp, Homo sapien
atggagtcccagtagggaggggcag

SEQ ID NO: 2009481 - DNA, 25 bp, Homo sapien
ccaaggggcagtgcgcagatctcca

SEQ ID NO: 2009482 - DNA, 25 bp, Homo sapien
tacaacaaccagattccaaggggca

SEQ ID NO: 2009483 - DNA, 25 bp, Homo sapien
cagtgcgcagatctccagatggccg

SEQ ID NO: 2009484 - DNA, 25 bp, Homo sapien
cttttaacgcgccagactttctgaa

SEQ ID NO: 2009485 - DNA, 25 bp, Homo sapien
cccagtcacgttgggagtttcccat

SEQ ID NO: 2009486 - DNA, 25 bp, Homo sapien
ggagtttcccatgggatcgtgaaaa

SEQ ID NO: 2009487 - DNA, 25 bp, Homo sapien
ccagactttctgaacccagtcacgt

SEQ ID NO: 2009488 - DNA, 25 bp, Homo sapien
ccaggtacaggatcggtagggagga

SEQ ID NO: 2009489 - DNA, 25 bp, Homo sapien
gtacaacatgcaaggcagtgagagt

SEQ ID NO: 2009490 - DNA, 25 bp, Homo sapien
gttctccagtacaacatgcaaggca

SEQ ID NO: 2009491 - DNA, 25 bp, Homo sapien
gccaccgaggactaagcctatttcc

SEQ ID NO: 2009492 - DNA, 25 bp, Homo sapien
tgattatggaaccctgagcatcaca

SEQ ID NO: 2009493 - DNA, 25 bp, Homo sapien
gaaccctgagcatcacatctcattt

SEQ ID NO: 2009494 - DNA, 25 bp, Homo sapien
tatggaaccctgagcatcacatctc

SEQ ID NO: 2009495 - DNA, 25 bp, Homo sapien
gattatggaaccctgagcatcacat

SEQ ID NO: 2009496 - DNA, 25 bp, Homo sapien
aagtcgtgcaaaggaacgcgtggca

SEQ ID NO: 2009497 - DNA, 25 bp, Homo sapien
caatgttatttgtcgggatgtggtg

SEQ ID NO: 2009498 - DNA, 25 bp, Homo sapien
cataatgtgtgtggaagtcgtgcaa

SEQ ID NO: 2009499 - DNA, 25 bp, Homo sapien
catgcacgggctcgcttgcttttct

SEQ ID NO: 2009500 - DNA, 25 bp, Homo sapien
tcatccatgtgtttgatcacgcagc

SEQ ID NO: 2009501 - DNA, 25 bp, Homo sapien
tttgatcacgcagctcattgctggc

SEQ ID NO: 2009502 - DNA, 25 bp, Homo sapien
tcaggatggattttactatttcctc

SEQ ID NO: 2009503 - DNA, 25 bp, Homo sapien
tgcttcagtcggttcaggatggatt

SEQ ID NO: 2009504 - DNA, 25 bp, Homo sapien
ggacgcagctagacagagaaaagga

SEQ ID NO: 2009505 - DNA, 25 bp, Homo sapien
tctgtgacccggctttagggacgca

SEQ ID NO: 2009506 - DNA, 25 bp, Homo sapien
aaggaaagcattgcatagcgaggtc

SEQ ID NO: 2009507 - DNA, 25 bp, Homo sapien
gcattgtctgtgacccggctttagg

SEQ ID NO: 2009508 - DNA, 25 bp, Homo sapien
tacacatgagctccaacaaactcac

SEQ ID NO: 2009509 - DNA, 25 bp, Homo sapien
ctacacatgagctccaacaaactca

SEQ ID NO: 2009510 - DNA, 25 bp, Homo sapien
cagtgctgctgttgagtgcagtgct

SEQ ID NO: 2009511 - DNA, 25 bp, Homo sapien
tgagtgcagtgcttcctgatgttag

SEQ ID NO: 2009512 - DNA, 25 bp, Homo sapien
tacccagttgtttccgggagcagtg

SEQ ID NO: 2009513 - DNA, 25 bp, Homo sapien
cctcggagccgtaaacagtgctgct

SEQ ID NO: 2009514 - DNA, 25 bp, Homo sapien
tttcttgttattgccactagagcca

SEQ ID NO: 2009515 - DNA, 25 bp, Homo sapien
ggctttgccttagctgaatttgtca

SEQ ID NO: 2009516 - DNA, 25 bp, Homo sapien
aaaccagcgtcctgccagctttctt

SEQ ID NO: 2009517 - DNA, 25 bp, Homo sapien
catggctgaagtccttgatcctttc

SEQ ID NO: 2009518 - DNA, 25 bp, Homo sapien
ggcaagttaccatctaccactgtca

SEQ ID NO: 2009519 - DNA, 25 bp, Homo sapien
tgcaggcaagttaccatctaccact

SEQ ID NO: 2009520 - DNA, 25 bp, Homo sapien
tcatgtgacctctttctgtcttggc

SEQ ID NO: 2009521 - DNA, 25 bp, Homo sapien
ccatggatcatgatcctccttcatg

SEQ ID NO: 2009522 - DNA, 25 bp, Homo sapien
atttattaacatcctttccatattt

SEQ ID NO: 2009523 - DNA, 25 bp, Homo sapien
gatgaggcttctcttgaataaccca

SEQ ID NO: 2009524 - DNA, 25 bp, Homo sapien
tgtatttattaacatcctttccata

SEQ ID NO: 2009525 - DNA, 25 bp, Homo sapien
aacccagataattatcaggtttttg

SEQ ID NO: 2009526 - DNA, 25 bp, Homo sapien
taagggccctcgtaaagacttcatg

SEQ ID NO: 2009527 - DNA, 25 bp, Homo sapien
gacttcatgtgcaaatttgctggct

SEQ ID NO: 2009528 - DNA, 25 bp, Homo sapien
gctgctccgggttctggttccatat

SEQ ID NO: 2009529 - DNA, 25 bp, Homo sapien
gagcctctgctcagtgtctctaagg

SEQ ID NO: 2009530 - DNA, 25 bp, Homo sapien
ctggctctcgccgaacctcagagga

SEQ ID NO: 2009531 - DNA, 25 bp, Homo sapien
agggtcctccagaaaccctctggct

SEQ ID NO: 2009532 - DNA, 25 bp, Homo sapien
aaaccctctggctctcgccgaacct

SEQ ID NO: 2009533 - DNA, 25 bp, Homo sapien
gctctcgccgaacctcagaggaggg

SEQ ID NO: 2009534 - DNA, 25 bp, Homo sapien
agtggtcccttggtgacagtcactg

SEQ ID NO: 2009535 - DNA, 25 bp, Homo sapien
ccttcatttgttagaccctttccat

SEQ ID NO: 2009536 - DNA, 25 bp, Homo sapien
cctcagtggtcccttggtgacagtc

SEQ ID NO: 2009537 - DNA, 25 bp, Homo sapien
tcagtggtcccttggtgacagtcac

SEQ ID NO: 2009538 - DNA, 25 bp, Homo sapien
ggaccacatccgttctagacctttc

SEQ ID NO: 2009539 - DNA, 25 bp, Homo sapien
cctgtgggacattctatttgcctca

SEQ ID NO: 2009540 - DNA, 25 bp, Homo sapien
ttggccactcctgtgggacattcta

SEQ ID NO: 2009541 - DNA, 25 bp, Homo sapien
gaaactgggaccacatccgttctag

SEQ ID NO: 2009542 - DNA, 25 bp, Homo sapien
ttttgtgagtttagagggtctgctg

SEQ ID NO: 2009543 - DNA, 25 bp, Homo sapien
atcagcagctttcccaaaccctgct

SEQ ID NO: 2009544 - DNA, 25 bp, Homo sapien
ctgctcagcaggaccggagctcctt

SEQ ID NO: 2009545 - DNA, 25 bp, Homo sapien
agcaggaccggagctccttttgtga

SEQ ID NO: 2009546 - DNA, 25 bp, Homo sapien
gaaagtacagcgtcaacaaggcaat

SEQ ID NO: 2009547 - DNA, 25 bp, Homo sapien
tgccgctccctgaaatacttgtgtg

SEQ ID NO: 2009548 - DNA, 25 bp, Homo sapien
gcaaacacgggtggctgctttcgta

SEQ ID NO: 2009549 - DNA, 25 bp, Homo sapien
agcttttacgctggaacctgctggg

SEQ ID NO: 2009550 - DNA, 25 bp, Homo sapien
cgtgtctgaagtcttcaggcgagct

SEQ ID NO: 2009551 - DNA, 25 bp, Homo sapien
tgtctgaagtcttcaggcgagctca

SEQ ID NO: 2009552 - DNA, 25 bp, Homo sapien
ccgtgtctgaagtcttcaggcgagc

SEQ ID NO: 2009553 - DNA, 25 bp, Homo sapien
gtgtctgaagtcttcaggcgagctc

SEQ ID NO: 2009554 - DNA, 25 bp, Homo sapien
atccccacgcgccagggattcccca

SEQ ID NO: 2009555 - DNA, 25 bp, Homo sapien
agcctggcgatccccacgcgccagg

SEQ ID NO: 2009556 - DNA, 25 bp, Homo sapien
tggcgatccccacgcgccagggatt

SEQ ID NO: 2009557 - DNA, 25 bp, Homo sapien
cctggcgatccccacgcgccaggga

SEQ ID NO: 2009558 - DNA, 25 bp, Homo sapien
tccgtgggtcgcgtcagggataccc

SEQ ID NO: 2009559 - DNA, 25 bp, Homo sapien
tggctcgtccctgtggccggagtct

SEQ ID NO: 2009560 - DNA, 25 bp, Homo sapien
gagctggttcgcttcgtcgtgaccc

SEQ ID NO: 2009561 - DNA, 25 bp, Homo sapien
actggctggcacagctcgtgaaccc

SEQ ID NO: 2009562 - DNA, 25 bp, Homo sapien
agccccataatattccggacccctg

SEQ ID NO: 2009563 - DNA, 25 bp, Homo sapien
tcctggcgttgggacacacgtggac

SEQ ID NO: 2009564 - DNA, 25 bp, Homo sapien
tccccgtgcaggtggtgcaaacgcc

SEQ ID NO: 2009565 - DNA, 25 bp, Homo sapien
caggacgcttggtccggacggagct

SEQ ID NO: 2009566 - DNA, 25 bp, Homo sapien
tcacggaggaaagacgaacactggc

SEQ ID NO: 2009567 - DNA, 25 bp, Homo sapien
tcgtgagaccctggtgcaaaatgca

SEQ ID NO: 2009568 - DNA, 25 bp, Homo sapien
caaatctcagggtaggtcctcacgg

SEQ ID NO: 2009569 - DNA, 25 bp, Homo sapien
tctccccggtggagaatcagctcct

SEQ ID NO: 2009570 - DNA, 25 bp, Homo sapien
tgtttcagggaaactgacagatctt

SEQ ID NO: 2009571 - DNA, 25 bp, Homo sapien
tagtatgcactagaaagccccagac

SEQ ID NO: 2009572 - DNA, 25 bp, Homo sapien
aattgtataactatctgctctctgg

SEQ ID NO: 2009573 - DNA, 25 bp, Homo sapien
cactttacttttgtacgcagccgtc

SEQ ID NO: 2009574 - DNA, 25 bp, Homo sapien
tgtggccacggccctttttagcacg

SEQ ID NO: 2009575 - DNA, 25 bp, Homo sapien
cgggctacacaagattgattcctga

SEQ ID NO: 2009576 - DNA, 25 bp, Homo sapien
ggtccttgcgggctacacaagattg

SEQ ID NO: 2009577 - DNA, 25 bp, Homo sapien
tgtgaactgcacaactcaaaaagta

SEQ ID NO: 2009578 - DNA, 25 bp, Homo sapien
acactcagttgcctcattccagtat

SEQ ID NO: 2009579 - DNA, 25 bp, Homo sapien
acttgaaactgggagccatgagaat

SEQ ID NO: 2009580 - DNA, 25 bp, Homo sapien
cttgaaactgggagccatgagaatt

SEQ ID NO: 2009581 - DNA, 25 bp, Homo sapien
tatctacttatgatcatttctctcc

SEQ ID NO: 2009582 - DNA, 25 bp, Homo sapien
ttgtattccatattcttggtagatt

SEQ ID NO: 2009583 - DNA, 25 bp, Homo sapien
ctggaacatgggattactcaataaa

SEQ ID NO: 2009584 - DNA, 25 bp, Homo sapien
tctggaacatgggattactcaataa

SEQ ID NO: 2009585 - DNA, 25 bp, Homo sapien
gatttgccttaaatacttaagacaa

SEQ ID NO: 2009586 - DNA, 25 bp, Homo sapien
agtccaaggagctttggtagagtgt

SEQ ID NO: 2009587 - DNA, 25 bp, Homo sapien
cctttgaccatcagcctctgttgct

SEQ ID NO: 2009588 - DNA, 25 bp, Homo sapien
tctgttgctgtaattggcctcggag

SEQ ID NO: 2009589 - DNA, 25 bp, Homo sapien
ctttggtagagtgtagcctttgacc

SEQ ID NO: 2009590 - DNA, 25 bp, Homo sapien
tcactgactgacctataaagttggg

SEQ ID NO: 2009591 - DNA, 25 bp, Homo sapien
ttacccagagatcactacccatgct

SEQ ID NO: 2009592 - DNA, 25 bp, Homo sapien
tcagagatctcttggcttggtcact

SEQ ID NO: 2009593 - DNA, 25 bp, Homo sapien
gcttgagtacctggtctcagagatc

SEQ ID NO: 2009594 - DNA, 25 bp, Homo sapien
tttggcattcatgtagagatctgga

SEQ ID NO: 2009595 - DNA, 25 bp, Homo sapien
tcctttggcattcatgtagagatct

SEQ ID NO: 2009596 - DNA, 25 bp, Homo sapien
ctgtctctcctttggcattcatgta

SEQ ID NO: 2009597 - DNA, 25 bp, Homo sapien
tctctcctttggcattcatgtagag

SEQ ID NO: 2009598 - DNA, 25 bp, Homo sapien
gaactctccattgcgtacaccaagt

SEQ ID NO: 2009599 - DNA, 25 bp, Homo sapien
ggttatacctcatggctatgcacaa

SEQ ID NO: 2009600 - DNA, 25 bp, Homo sapien
catagacggtggtcctcatgtccaa

SEQ ID NO: 2009601 - DNA, 25 bp, Homo sapien
tctcaatggcgttgacatagacggt

SEQ ID NO: 2009602 - DNA, 25 bp, Homo sapien
gtctttgcaaagtgacacattttga

SEQ ID NO: 2009603 - DNA, 25 bp, Homo sapien
gccttcttgatacagtggtagacat

SEQ ID NO: 2009604 - DNA, 25 bp, Homo sapien
cattttgatgccttcttgatacagt

SEQ ID NO: 2009605 - DNA, 25 bp, Homo sapien
gatgccttcttgatacagtggtaga

SEQ ID NO: 2009606 - DNA, 25 bp, Homo sapien
tttggatggcgaatggtcactttgc

SEQ ID NO: 2009607 - DNA, 25 bp, Homo sapien
actttgctatgggaagaaagcacca

SEQ ID NO: 2009608 - DNA, 25 bp, Homo sapien
tctttttggcttagactatttggat

SEQ ID NO: 2009609 - DNA, 25 bp, Homo sapien
tggcttagactatttggatggcgaa

SEQ ID NO: 2009610 - DNA, 25 bp, Homo sapien
gaggacaagagatggcgctgtgagc

SEQ ID NO: 2009611 - DNA, 25 bp, Homo sapien
gacaagagatggcgctgtgagctca

SEQ ID NO: 2009612 - DNA, 25 bp, Homo sapien
aagagatggcgctgtgagctcaata

SEQ ID NO: 2009613 - DNA, 25 bp, Homo sapien
ggaggacaagagatggcgctgtgag

SEQ ID NO: 2009614 - DNA, 25 bp, Homo sapien
gacgatgtcactcctgcgaggacac

SEQ ID NO: 2009615 - DNA, 25 bp, Homo sapien
aaagacgatgtcactcctgcgagga

SEQ ID NO: 2009616 - DNA, 25 bp, Homo sapien
ccacataggatttaaagacgatgtc

SEQ ID NO: 2009617 - DNA, 25 bp, Homo sapien
tgccacataggatttaaagacgatg

SEQ ID NO: 2009618 - DNA, 25 bp, Homo sapien
aggaagtagttggacttccaggtca

SEQ ID NO: 2009619 - DNA, 25 bp, Homo sapien
ggaagtagttggacttccaggtcac

SEQ ID NO: 2009620 - DNA, 25 bp, Homo sapien
cttaaggaagtagttggacttccag

SEQ ID NO: 2009621 - DNA, 25 bp, Homo sapien
tcggataaccatccaaaagctggat

SEQ ID NO: 2009622 - DNA, 25 bp, Homo sapien
ttcggataaccatccaaaagctgga

SEQ ID NO: 2009623 - DNA, 25 bp, Homo sapien
cggataaccatccaaaagctggatg

SEQ ID NO: 2009624 - DNA, 25 bp, Homo sapien
gataaccatccaaaagctggatgat

SEQ ID NO: 2009625 - DNA, 25 bp, Homo sapien
actggctaccagcatgtccctgatc

SEQ ID NO: 2009626 - DNA, 25 bp, Homo sapien
tactggctaccagcatgtccctgat

SEQ ID NO: 2009627 - DNA, 25 bp, Homo sapien
cttactggctaccagcatgtccctg

SEQ ID NO: 2009628 - DNA, 25 bp, Homo sapien
tggctaccagcatgtccctgatctc

SEQ ID NO: 2009629 - DNA, 25 bp, Homo sapien
agtgacatcacatggggcaatggca

SEQ ID NO: 2009630 - DNA, 25 bp, Homo sapien
catggggcaatggcaccagcacagg

SEQ ID NO: 2009631 - DNA, 25 bp, Homo sapien
ggcaatggcaccagcacaggtggct

SEQ ID NO: 2009632 - DNA, 25 bp, Homo sapien
aatggcaccagcacaggtggctcct

SEQ ID NO: 2009633 - DNA, 25 bp, Homo sapien
gtgcccaaaggttttagtgatgatg

SEQ ID NO: 2009634 - DNA, 25 bp, Homo sapien
tgcccaaaggttttagtgatgatgc

SEQ ID NO: 2009635 - DNA, 25 bp, Homo sapien
aagggagagatgttccgcatgttca

SEQ ID NO: 2009636 - DNA, 25 bp, Homo sapien
tgctgccattgtcaaacacctgctg

SEQ ID NO: 2009637 - DNA, 25 bp, Homo sapien
agaagggagagatgttccgcatgtt

SEQ ID NO: 2009638 - DNA, 25 bp, Homo sapien
gggagagatgttccgcatgttcagc

SEQ ID NO: 2009639 - DNA, 25 bp, Homo sapien
gacagacattggcaatgttgcggac

SEQ ID NO: 2009640 - DNA, 25 bp, Homo sapien
attggcaatgttgcggacaccctcc

SEQ ID NO: 2009641 - DNA, 25 bp, Homo sapien
tgcagacagacattggcaatgttgc

SEQ ID NO: 2009642 - DNA, 25 bp, Homo sapien
tagaatggggtacggaggcaacagc

SEQ ID NO: 2009643 - DNA, 25 bp, Homo sapien
ggtagcagccgcaaaggcatatgga

SEQ ID NO: 2009644 - DNA, 25 bp, Homo sapien
acaggggtagcagccgcaaaggcat

SEQ ID NO: 2009645 - DNA, 25 bp, Homo sapien
aggcatatggatcaaccaagaacac

SEQ ID NO: 2009646 - DNA, 25 bp, Homo sapien
aaaggcatatggatcaaccaagaac

SEQ ID NO: 2009647 - DNA, 25 bp, Homo sapien
cttctgtgcgagctcaagcccagaa

SEQ ID NO: 2009648 - DNA, 25 bp, Homo sapien
tctgtgcgagctcaagcccagaagc

SEQ ID NO: 2009649 - DNA, 25 bp, Homo sapien
ttctgtgcgagctcaagcccagaag

SEQ ID NO: 2009650 - DNA, 25 bp, Homo sapien
agacacagcagctctacgtaccagg

SEQ ID NO: 2009651 - DNA, 25 bp, Homo sapien
tatctgattcagtgactttctggca

SEQ ID NO: 2009652 - DNA, 25 bp, Homo sapien
ggaactctgccctattggagctctg

SEQ ID NO: 2009653 - DNA, 25 bp, Homo sapien
gatctccaactttcgtcgggagcca

SEQ ID NO: 2009654 - DNA, 25 bp, Homo sapien
tggtcctgctgaaggtatggacaac

SEQ ID NO: 2009655 - DNA, 25 bp, Homo sapien
tatacaaacgagtaaaagtggacag

SEQ ID NO: 2009656 - DNA, 25 bp, Homo sapien
gaatcatcacaagacgcaggaagca

SEQ ID NO: 2009657 - DNA, 25 bp, Homo sapien
acatagtttcgaggctgatgttggc

SEQ ID NO: 2009658 - DNA, 25 bp, Homo sapien
tccggacgcgcggagatgccaacta

SEQ ID NO: 2009659 - DNA, 25 bp, Homo sapien
cgagctgaacacgaacagtcctgca

SEQ ID NO: 2009660 - DNA, 25 bp, Homo sapien
ctcggacagctgcaggacgcgagct

SEQ ID NO: 2009661 - DNA, 25 bp, Homo sapien
aactacacacggtgagtgcccggga

SEQ ID NO: 2009662 - DNA, 25 bp, Homo sapien
gctcggttgagcgttcttgcgcgcc

SEQ ID NO: 2009663 - DNA, 25 bp, Homo sapien
ttgagcgttcttgcgcgccttcttc

SEQ ID NO: 2009664 - DNA, 25 bp, Homo sapien
gggctcggttgagcgttcttgcgcg

SEQ ID NO: 2009665 - DNA, 25 bp, Homo sapien
tcggttgagcgttcttgcgcgcctt

SEQ ID NO: 2009666 - DNA, 25 bp, Homo sapien
agctgcatcccaatcgcaaatccgg

SEQ ID NO: 2009667 - DNA, 25 bp, Homo sapien
gctttttgcccctggtgaaacgcag

SEQ ID NO: 2009668 - DNA, 25 bp, Homo sapien
gggaagggcaagtggcgaggaggaa

SEQ ID NO: 2009669 - DNA, 25 bp, Homo sapien
tcccaatcgcaaatccggcttggtc

SEQ ID NO: 2009670 - DNA, 25 bp, Homo sapien
tctctggaagcgctgggagtccagg

SEQ ID NO: 2009671 - DNA, 25 bp, Homo sapien
aagcgctgggagtccaggcggtccc

SEQ ID NO: 2009672 - DNA, 25 bp, Homo sapien
tcctgccccttctgccgcgacaatg

SEQ ID NO: 2009673 - DNA, 25 bp, Homo sapien
cttctgccgcgacaatgactttctc

SEQ ID NO: 2009674 - DNA, 25 bp, Homo sapien
gattcagaagtttctgccggaagtt

SEQ ID NO: 2009675 - DNA, 25 bp, Homo sapien
gaagagtttggatatcagattcaga

SEQ ID NO: 2009676 - DNA, 25 bp, Homo sapien
tcctgagttgagtagcacactcgac

SEQ ID NO: 2009677 - DNA, 25 bp, Homo sapien
tgagtagcacactcgacttccagct

SEQ ID NO: 2009678 - DNA, 25 bp, Homo sapien
ggagtcccctcatgcaagtttttga

SEQ ID NO: 2009679 - DNA, 25 bp, Homo sapien
cgtgcacctcctgagaaaactcttt

SEQ ID NO: 2009680 - DNA, 25 bp, Homo sapien
tcaaattgatgaaacgtgcacctcc

SEQ ID NO: 2009681 - DNA, 25 bp, Homo sapien
caattacaatgcagtctttcttcaa

SEQ ID NO: 2009682 - DNA, 25 bp, Homo sapien
tgtattccatcttccgtttccaagg

SEQ ID NO: 2009683 - DNA, 25 bp, Homo sapien
tccaagggcacccatgaatgcacct

SEQ ID NO: 2009684 - DNA, 25 bp, Homo sapien
tcccaaagaatgataatctgggaaa

SEQ ID NO: 2009685 - DNA, 25 bp, Homo sapien
agaatgataatctgggaaaacttga

SEQ ID NO: 2009686 - DNA, 25 bp, Homo sapien
agtctactgatttactggccccaag

SEQ ID NO: 2009687 - DNA, 25 bp, Homo sapien
gccgcccagtctaatcacaggtcat

SEQ ID NO: 2009688 - DNA, 25 bp, Homo sapien
tcacagtaggccagcggtaatcttc

SEQ ID NO: 2009689 - DNA, 25 bp, Homo sapien
tagtttctagtaacgcccaacagga

SEQ ID NO: 2009690 - DNA, 25 bp, Homo sapien
gatggtaaaatagctgcctctaggc

SEQ ID NO: 2009691 - DNA, 25 bp, Homo sapien
gagaccctactaagaagctatataa

SEQ ID NO: 2009692 - DNA, 25 bp, Homo sapien
tatttgaggactgtatatagcccag

SEQ ID NO: 2009693 - DNA, 25 bp, Homo sapien
gatgcacactaatgtgacaaggagc

SEQ ID NO: 2009694 - DNA, 25 bp, Homo sapien
gcatagacaatttgagttcctggca

SEQ ID NO: 2009695 - DNA, 25 bp, Homo sapien
ataaagtcctgcatacgagtactgg

SEQ ID NO: 2009696 - DNA, 25 bp, Homo sapien
tgtcattgtctcgatatcactcttg

SEQ ID NO: 2009697 - DNA, 25 bp, Homo sapien
cacagcatacgcctgtccattagca

SEQ ID NO: 2009698 - DNA, 25 bp, Homo sapien
attgcaaacaaaagtctaacctgag

SEQ ID NO: 2009699 - DNA, 25 bp, Homo sapien
gcagcaatgaagttaaacactggca

SEQ ID NO: 2009700 - DNA, 25 bp, Homo sapien
tggcgaagaaccatcttgaaatcac

SEQ ID NO: 2009701 - DNA, 25 bp, Homo sapien
tctcaattttggaccgcaggaacat

SEQ ID NO: 2009702 - DNA, 25 bp, Homo sapien
ttcccatggatcttcctcaaaggcc

SEQ ID NO: 2009703 - DNA, 25 bp, Homo sapien
acctcaaatgattcacctgtcttgg

SEQ ID NO: 2009704 - DNA, 25 bp, Homo sapien
gacctcaaatgattcacctgtcttg

SEQ ID NO: 2009705 - DNA, 25 bp, Homo sapien
ctgacctcaaatgattcacctgtct

SEQ ID NO: 2009706 - DNA, 25 bp, Homo sapien
acctgacctcaaatgattcacctgt

SEQ ID NO: 2009707 - DNA, 25 bp, Homo sapien
caagtgtcatcattaaagaattttg

SEQ ID NO: 2009708 - DNA, 25 bp, Homo sapien
gggaacaagtgtcatcattaaagaa

SEQ ID NO: 2009709 - DNA, 25 bp, Homo sapien
ggaacaagtgtcatcattaaagaat

SEQ ID NO: 2009710 - DNA, 25 bp, Homo sapien
gttatttgcttggcatcggtacttc

SEQ ID NO: 2009711 - DNA, 25 bp, Homo sapien
gggaagagaagggagaaatatgtac

SEQ ID NO: 2009712 - DNA, 25 bp, Homo sapien
agggaagagaagggagaaatatgta

SEQ ID NO: 2009713 - DNA, 25 bp, Homo sapien
catggaaagaataaggcgagagagc

SEQ ID NO: 2009714 - DNA, 25 bp, Homo sapien
tttcatggaaagaataaggcgagag

SEQ ID NO: 2009715 - DNA, 25 bp, Homo sapien
agaataaggcgagagagctgcattg

SEQ ID NO: 2009716 - DNA, 25 bp, Homo sapien
gaattttcatggaaagaataaggcg

SEQ ID NO: 2009717 - DNA, 25 bp, Homo sapien
acagcagttcgtcccggagcacgga

SEQ ID NO: 2009718 - DNA, 25 bp, Homo sapien
cagttcgtcccggagcacggaattt

SEQ ID NO: 2009719 - DNA, 25 bp, Homo sapien
ttcgtcccggagcacggaattttca

SEQ ID NO: 2009720 - DNA, 25 bp, Homo sapien
cccggagcacggaattttcatcttt

SEQ ID NO: 2009721 - DNA, 25 bp, Homo sapien
ggtgcaagtggcccgcgcgccccca

SEQ ID NO: 2009722 - DNA, 25 bp, Homo sapien
cttggggtgcaagtggcccgcgcgc

SEQ ID NO: 2009723 - DNA, 25 bp, Homo sapien
tgcaagtggcccgcgcgcccccacc

SEQ ID NO: 2009724 - DNA, 25 bp, Homo sapien
tggggtgcaagtggcccgcgcgccc

SEQ ID NO: 2009725 - DNA, 25 bp, Homo sapien
ctgagccgtcggttccgcgggtgcc

SEQ ID NO: 2009726 - DNA, 25 bp, Homo sapien
tgagccgtcggttccgcgggtgcct

SEQ ID NO: 2009727 - DNA, 25 bp, Homo sapien
cacagcttcgtgcttttctcttagt

SEQ ID NO: 2009728 - DNA, 25 bp, Homo sapien
acagcttcgtgcttttctcttagta

SEQ ID NO: 2009729 - DNA, 25 bp, Homo sapien
ccacagcttcgtgcttttctcttag

SEQ ID NO: 2009730 - DNA, 25 bp, Homo sapien
tgccccattcagatgtctctcattt

SEQ ID NO: 2009731 - DNA, 25 bp, Homo sapien
tctctcatttctagattcagaggtc

SEQ ID NO: 2009732 - DNA, 25 bp, Homo sapien
aaagaaagaagtatctgccccattc

SEQ ID NO: 2009733 - DNA, 25 bp, Homo sapien
ttttctgcctcccagtcaggtttct

SEQ ID NO: 2009734 - DNA, 25 bp, Homo sapien
tgtgatgaaagcaactggaataagt

SEQ ID NO: 2009735 - DNA, 25 bp, Homo sapien
tcaggctgtgatgaaagcaactgga

SEQ ID NO: 2009736 - DNA, 25 bp, Homo sapien
aggctgtgatgaaagcaactggaat

SEQ ID NO: 2009737 - DNA, 25 bp, Homo sapien
gctgtgatgaaagcaactggaataa

SEQ ID NO: 2009738 - DNA, 25 bp, Homo sapien
ggaagaggaatatctcccaatgaga

SEQ ID NO: 2009739 - DNA, 25 bp, Homo sapien
caaagcaagatggcctcatgaagat

SEQ ID NO: 2009740 - DNA, 25 bp, Homo sapien
caagatggcctcatgaagattcaca

SEQ ID NO: 2009741 - DNA, 25 bp, Homo sapien
aagcaagatggcctcatgaagattc

SEQ ID NO: 2009742 - DNA, 25 bp, Homo sapien
catatgattgtcaaccggtgaaaga

SEQ ID NO: 2009743 - DNA, 25 bp, Homo sapien
ggccaatgacattaagtttatctca

SEQ ID NO: 2009744 - DNA, 25 bp, Homo sapien
gattgtcaaccggtgaaagaaatcc

SEQ ID NO: 2009745 - DNA, 25 bp, Homo sapien
actgcagaaatggttcttgtgactg

SEQ ID NO: 2009746 - DNA, 25 bp, Homo sapien
gaattaaacttgatgacagaggtac

SEQ ID NO: 2009747 - DNA, 25 bp, Homo sapien
gtgagaggaattaaacttgatgaca

SEQ ID NO: 2009748 - DNA, 25 bp, Homo sapien
cagaggtactattgtgacttgaatc

SEQ ID NO: 2009749 - DNA, 25 bp, Homo sapien
gagaaacatcgatcggatcgaagtt

SEQ ID NO: 2009750 - DNA, 25 bp, Homo sapien
agcttactgggttctgggtagtagc

SEQ ID NO: 2009751 - DNA, 25 bp, Homo sapien
caagtgacaaagcttactgggttct

SEQ ID NO: 2009752 - DNA, 25 bp, Homo sapien
tgacaaagcttactgggttctgggt

SEQ ID NO: 2009753 - DNA, 25 bp, Homo sapien
acaaagcttactgggttctgggtag

SEQ ID NO: 2009754 - DNA, 25 bp, Homo sapien
gatacgcaaagctttagcactccat

SEQ ID NO: 2009755 - DNA, 25 bp, Homo sapien
cgcaaagctttagcactccattcat

SEQ ID NO: 2009756 - DNA, 25 bp, Homo sapien
ggatacgcaaagctttagcactcca

SEQ ID NO: 2009757 - DNA, 25 bp, Homo sapien
tacgcaaagctttagcactccattc

SEQ ID NO: 2009758 - DNA, 25 bp, Homo sapien
tctttgggtactatcaagatacttc

SEQ ID NO: 2009759 - DNA, 25 bp, Homo sapien
gttctttgggtactatcaagatact

SEQ ID NO: 2009760 - DNA, 25 bp, Homo sapien
ccagttctttgggtactatcaagat

SEQ ID NO: 2009761 - DNA, 25 bp, Homo sapien
tgggtactatcaagatacttccatc

SEQ ID NO: 2009762 - DNA, 25 bp, Homo sapien
aggcgcaatcccagtattgagcagc

SEQ ID NO: 2009763 - DNA, 25 bp, Homo sapien
ccttaggtaacatggcagtgcctca

SEQ ID NO: 2009764 - DNA, 25 bp, Homo sapien
caggcgcaatcccagtattgagcag

SEQ ID NO: 2009765 - DNA, 25 bp, Homo sapien
gcagtgcctcactcccggaaggtca

SEQ ID NO: 2009766 - DNA, 25 bp, Homo sapien
cagggagtcctagcaccgattttgc

SEQ ID NO: 2009767 - DNA, 25 bp, Homo sapien
gcggacgctgcagataagttacgaa

SEQ ID NO: 2009768 - DNA, 25 bp, Homo sapien
ggaaagcgactaccacgacttggag

SEQ ID NO: 2009769 - DNA, 25 bp, Homo sapien
tcccgtgggcgttgagtgacactga

SEQ ID NO: 2009770 - DNA, 25 bp, Homo sapien
tcccgacgatttgggctatggaaag

SEQ ID NO: 2009771 - DNA, 25 bp, Homo sapien
gaaatgttctaagcagagcccgtca

SEQ ID NO: 2009772 - DNA, 25 bp, Homo sapien
tcaggagcccacgagacacattttg

SEQ ID NO: 2009773 - DNA, 25 bp, Homo sapien
gtttctgaagaccaagaacatcggc

SEQ ID NO: 2009774 - DNA, 25 bp, Homo sapien
atttttgtagtttccagaagagacg

SEQ ID NO: 2009775 - DNA, 25 bp, Homo sapien
ccgaaggaccctttgtatttctgtg

SEQ ID NO: 2009776 - DNA, 25 bp, Homo sapien
cacttcaacttccgcctccgcctcc

SEQ ID NO: 2009777 - DNA, 25 bp, Homo sapien
ctgcctcggcttcccgaaggaccct

SEQ ID NO: 2009778 - DNA, 25 bp, Homo sapien
actgttggatacttataatcaaaac

SEQ ID NO: 2009779 - DNA, 25 bp, Homo sapien
tgcctgtaggatgtactgtatgtag

SEQ ID NO: 2009780 - DNA, 25 bp, Homo sapien
taatatggatcatctctacttctgt

SEQ ID NO: 2009781 - DNA, 25 bp, Homo sapien
ttattactagacctcaaccacagtc

SEQ ID NO: 2009782 - DNA, 25 bp, Homo sapien
ccaatttgggtatatatgtattgcc

SEQ ID NO: 2009783 - DNA, 25 bp, Homo sapien
gggtatatatgtattgccaaagcaa

SEQ ID NO: 2009784 - DNA, 25 bp, Homo sapien
tagaatgctgcacaagtgtgtgtca

SEQ ID NO: 2009785 - DNA, 25 bp, Homo sapien
gaatgctgcacaagtgtgtgtcatc

SEQ ID NO: 2009786 - DNA, 25 bp, Homo sapien
tgtgatgtgagttgcaaggccctta

SEQ ID NO: 2009787 - DNA, 25 bp, Homo sapien
gcaaggcccttatttgaacttgatc

SEQ ID NO: 2009788 - DNA, 25 bp, Homo sapien
gaacttgatctccaatagttaattc

SEQ ID NO: 2009789 - DNA, 25 bp, Homo sapien
tgtcagtgtctttgattgttccagg

SEQ ID NO: 2009790 - DNA, 25 bp, Homo sapien
cattgtgcgtggtctcagctgctga

SEQ ID NO: 2009791 - DNA, 25 bp, Homo sapien
cattttcatcattctccgtggaaac

SEQ ID NO: 2009792 - DNA, 25 bp, Homo sapien
acagcagggcacattgtgcgtggtc

SEQ ID NO: 2009793 - DNA, 25 bp, Homo sapien
ccaagggatgggtggtgaccaacat

SEQ ID NO: 2009794 - DNA, 25 bp, Homo sapien
atccacgatggctctctcacttgta

SEQ ID NO: 2009795 - DNA, 25 bp, Homo sapien
cttggaggaaatccacgatggctct

SEQ ID NO: 2009796 - DNA, 25 bp, Homo sapien
gaggaaatccacgatggctctctca

SEQ ID NO: 2009797 - DNA, 25 bp, Homo sapien
acgatggctctctcacttgtattca

SEQ ID NO: 2009798 - DNA, 25 bp, Homo sapien
ggaaggagcctagattcagcacatt

SEQ ID NO: 2009799 - DNA, 25 bp, Homo sapien
ctaggaaggagcctagattcagcac

SEQ ID NO: 2009800 - DNA, 25 bp, Homo sapien
ggagcctagattcagcacattttca

SEQ ID NO: 2009801 - DNA, 25 bp, Homo sapien
gagcctagattcagcacattttcaa

SEQ ID NO: 2009802 - DNA, 25 bp, Homo sapien
caatgtatgggagtcacattcaggg

SEQ ID NO: 2009803 - DNA, 25 bp, Homo sapien
gagccagcttcaaggattgtagaaa

SEQ ID NO: 2009804 - DNA, 25 bp, Homo sapien
agcatccacaggaacacgagccagc

SEQ ID NO: 2009805 - DNA, 25 bp, Homo sapien
aaagggactaccttgagtggttgca

SEQ ID NO: 2009806 - DNA, 25 bp, Homo sapien
gccctggctgtaactaacattgaat

SEQ ID NO: 2009807 - DNA, 25 bp, Homo sapien
tgggcttttcattccgttgcactgg

SEQ ID NO: 2009808 - DNA, 25 bp, Homo sapien
caagattggtaagtagccctggctg

SEQ ID NO: 2009809 - DNA, 25 bp, Homo sapien
agatatacacacagggaggacgcca

SEQ ID NO: 2009810 - DNA, 25 bp, Homo sapien
gcaacctgcagactgcccttggaca

SEQ ID NO: 2009811 - DNA, 25 bp, Homo sapien
tgcaacctgcagactgcccttggac

SEQ ID NO: 2009812 - DNA, 25 bp, Homo sapien
caacctgcagactgcccttggacat

SEQ ID NO: 2009813 - DNA, 25 bp, Homo sapien
ctgcaacctgcagactgcccttgga

SEQ ID NO: 2009814 - DNA, 25 bp, Homo sapien
ggggccagactttgtgtcaccaata

SEQ ID NO: 2009815 - DNA, 25 bp, Homo sapien
ggccagactttgtgtcaccaataaa

SEQ ID NO: 2009816 - DNA, 25 bp, Homo sapien
tggttgatttaggaatgatttggtt

SEQ ID NO: 2009817 - DNA, 25 bp, Homo sapien
aatggttgatttaggaatgatttgg

SEQ ID NO: 2009818 - DNA, 25 bp, Homo sapien
agcagccaggccttatttctgaatt

SEQ ID NO: 2009819 - DNA, 25 bp, Homo sapien
tgagccttccacatccagaggatac

SEQ ID NO: 2009820 - DNA, 25 bp, Homo sapien
gaggatacaggacaagagcgaccac

SEQ ID NO: 2009821 - DNA, 25 bp, Homo sapien
taaggccccaatttgatgcagccca

SEQ ID NO: 2009822 - DNA, 25 bp, Homo sapien
tgttgggcatgagccttccacatcc

SEQ ID NO: 2009823 - DNA, 25 bp, Homo sapien
cataaggaacccgaaggaatccagt

SEQ ID NO: 2009824 - DNA, 25 bp, Homo sapien
tagacgatggcatgctcactttctg

SEQ ID NO: 2009825 - DNA, 25 bp, Homo sapien
aggagaccacccgttcagcatagca

SEQ ID NO: 2009826 - DNA, 25 bp, Homo sapien
tccagtagtacaacaaggagaccac

SEQ ID NO: 2009827 - DNA, 25 bp, Homo sapien
ggccaatagacctacacggccaaat

SEQ ID NO: 2009828 - DNA, 25 bp, Homo sapien
tggctggccaatagacctacacggc

SEQ ID NO: 2009829 - DNA, 25 bp, Homo sapien
cttggctggccaatagacctacacg

SEQ ID NO: 2009830 - DNA, 25 bp, Homo sapien
aatagacctacacggccaaattaat

SEQ ID NO: 2009831 - DNA, 25 bp, Homo sapien
tctctctcctactggttattcttga

SEQ ID NO: 2009832 - DNA, 25 bp, Homo sapien
gcaccggcgatggtggttaactcct

SEQ ID NO: 2009833 - DNA, 25 bp, Homo sapien
gcgatggtggttaactccttgtgtt

SEQ ID NO: 2009834 - DNA, 25 bp, Homo sapien
ccctcttcctttgagagagcaccgg

SEQ ID NO: 2009835 - DNA, 25 bp, Homo sapien
tgatccatattcttggccagaagag

SEQ ID NO: 2009836 - DNA, 25 bp, Homo sapien
aaatgatccatattcttggccagaa

SEQ ID NO: 2009837 - DNA, 25 bp, Homo sapien
ctacatatatcaacttgcctctgtg

SEQ ID NO: 2009838 - DNA, 25 bp, Homo sapien
gatccatattcttggccagaagagc

SEQ ID NO: 2009839 - DNA, 25 bp, Homo sapien
tccgtccattagcagtttttgtgga

SEQ ID NO: 2009840 - DNA, 25 bp, Homo sapien
ttctccgtccattagcagtttttgt

SEQ ID NO: 2009841 - DNA, 25 bp, Homo sapien
tccatgaaatttctccgtccattag

SEQ ID NO: 2009842 - DNA, 25 bp, Homo sapien
tgaaatttctccgtccattagcagt

SEQ ID NO: 2009843 - DNA, 25 bp, Homo sapien
cagctgaggaagagttccgatgacc

SEQ ID NO: 2009844 - DNA, 25 bp, Homo sapien
gaatagcctgacagttaacacctgg

SEQ ID NO: 2009845 - DNA, 25 bp, Homo sapien
taataaaggtctgctaccagggcac

SEQ ID NO: 2009846 - DNA, 25 bp, Homo sapien
tgaagtgaagaaatcaccgatgctt

SEQ ID NO: 2009847 - DNA, 25 bp, Homo sapien
ccaaaagggcagaagtctgtaattt

SEQ ID NO: 2009848 - DNA, 25 bp, Homo sapien
gccaaaagggcagaagtctgtaatt

SEQ ID NO: 2009849 - DNA, 25 bp, Homo sapien
caaaagggcagaagtctgtaatttc

SEQ ID NO: 2009850 - DNA, 25 bp, Homo sapien
agccaaaagggcagaagtctgtaat

SEQ ID NO: 2009851 - DNA, 25 bp, Homo sapien
gtgctttcgcgtcaaaccaatcttt

SEQ ID NO: 2009852 - DNA, 25 bp, Homo sapien
tgctttcgcgtcaaaccaatctttc

SEQ ID NO: 2009853 - DNA, 25 bp, Homo sapien
agtaggtgctttcgcgtcaaaccaa

SEQ ID NO: 2009854 - DNA, 25 bp, Homo sapien
acgtagtaggtgctttcgcgtcaaa

SEQ ID NO: 2009855 - DNA, 25 bp, Homo sapien
cttcagtaatcagctgaattttcta

SEQ ID NO: 2009856 - DNA, 25 bp, Homo sapien
tggaagttaggcagtttttgccctg

SEQ ID NO: 2009857 - DNA, 25 bp, Homo sapien
gccatggaagttaggcagtttttgc

SEQ ID NO: 2009858 - DNA, 25 bp, Homo sapien
atcagctgaattttctaaatgcaac

SEQ ID NO: 2009859 - DNA, 25 bp, Homo sapien
acattttgtcatgggtaagatccat

SEQ ID NO: 2009860 - DNA, 25 bp, Homo sapien
ctgccattttttgaccatggaacac

SEQ ID NO: 2009861 - DNA, 25 bp, Homo sapien
catggaacacattttgtcatgggta

SEQ ID NO: 2009862 - DNA, 25 bp, Homo sapien
gaacacattttgtcatgggtaagat

SEQ ID NO: 2009863 - DNA, 25 bp, Homo sapien
gaaaagacgaagcaagtaaccatcg

SEQ ID NO: 2009864 - DNA, 25 bp, Homo sapien
ccaacacagaaaagacgaagcaagt

SEQ ID NO: 2009865 - DNA, 25 bp, Homo sapien
cgtatctgattgctgcgttttttag

SEQ ID NO: 2009866 - DNA, 25 bp, Homo sapien
aagacgaagcaagtaaccatcggta

SEQ ID NO: 2009867 - DNA, 25 bp, Homo sapien
tcgagtcatgatttccatcatcttc

SEQ ID NO: 2009868 - DNA, 25 bp, Homo sapien
ttccatcatcttcttccggatttgg

SEQ ID NO: 2009869 - DNA, 25 bp, Homo sapien
catcatcttcttccggatttggcgg

SEQ ID NO: 2009870 - DNA, 25 bp, Homo sapien
ctcgagtcatgatttccatcatctt

SEQ ID NO: 2009871 - DNA, 25 bp, Homo sapien
acgaagacatcatagagaggataaa

SEQ ID NO: 2009872 - DNA, 25 bp, Homo sapien
gagctttcccagttcaaacttgggc

SEQ ID NO: 2009873 - DNA, 25 bp, Homo sapien
ttctaacgaagacatcatagagagg

SEQ ID NO: 2009874 - DNA, 25 bp, Homo sapien
tgtctcgtccccagcagcttttcca

SEQ ID NO: 2009875 - DNA, 25 bp, Homo sapien
tttgccactatttgaagtctgaact

SEQ ID NO: 2009876 - DNA, 25 bp, Homo sapien
tttatttgccactatttgaagtctg

SEQ ID NO: 2009877 - DNA, 25 bp, Homo sapien
ttacaaatagcactttttatttgcc

SEQ ID NO: 2009878 - DNA, 25 bp, Homo sapien
tttacaaatagcactttttatttgc

SEQ ID NO: 2009879 - DNA, 25 bp, Homo sapien
tgggcaaagaacagcccgggactgc

SEQ ID NO: 2009880 - DNA, 25 bp, Homo sapien
taatctgatggattgatgacaggcc

SEQ ID NO: 2009881 - DNA, 25 bp, Homo sapien
gacaggcctcatctcttccgtgtga

SEQ ID NO: 2009882 - DNA, 25 bp, Homo sapien
tgtgggtacaatagaacactgctgt

SEQ ID NO: 2009883 - DNA, 25 bp, Homo sapien
tgccaatgcccattctaatgcaagt

SEQ ID NO: 2009884 - DNA, 25 bp, Homo sapien
cacaccttggaggaacctcagtagc

SEQ ID NO: 2009885 - DNA, 25 bp, Homo sapien
cagtagctacaatagtgccactgca

SEQ ID NO: 2009886 - DNA, 25 bp, Homo sapien
taatgcaagtcatcacaccgtggta

SEQ ID NO: 2009887 - DNA, 25 bp, Homo sapien
taacatctacatacatacggctgac

SEQ ID NO: 2009888 - DNA, 25 bp, Homo sapien
tgtatctccttcatgtaggtccagc

SEQ ID NO: 2009889 - DNA, 25 bp, Homo sapien
taggtccagctgatgctgaattgta

SEQ ID NO: 2009890 - DNA, 25 bp, Homo sapien
tacagccatcggtttcgggccagac

SEQ ID NO: 2009891 - DNA, 25 bp, Homo sapien
aggcctttttcatctattttggcac

SEQ ID NO: 2009892 - DNA, 25 bp, Homo sapien
aaggcctttttcatctattttggca

SEQ ID NO: 2009893 - DNA, 25 bp, Homo sapien
taaggcctttttcatctattttggc

SEQ ID NO: 2009894 - DNA, 25 bp, Homo sapien
catggcactgtgatggttaaatctc

SEQ ID NO: 2009895 - DNA, 25 bp, Homo sapien
tctagtagtgggtttttcactccta

SEQ ID NO: 2009896 - DNA, 25 bp, Homo sapien
tagtgggtttttcactcctaatgaa

SEQ ID NO: 2009897 - DNA, 25 bp, Homo sapien
cactgtgatggttaaatctcttgat

SEQ ID NO: 2009898 - DNA, 25 bp, Homo sapien
tagactggagttagaccatgataat

SEQ ID NO: 2009899 - DNA, 25 bp, Homo sapien
tactgtagtgactagactggagtta

SEQ ID NO: 2009900 - DNA, 25 bp, Homo sapien
gactcttgcgatttcgcccttttga

SEQ ID NO: 2009901 - DNA, 25 bp, Homo sapien
ctggactcttgcgatttcgcccttt

SEQ ID NO: 2009902 - DNA, 25 bp, Homo sapien
caattaacttgggtatataagcttc

SEQ ID NO: 2009903 - DNA, 25 bp, Homo sapien
gcagcactactcaagagaacctcaa

SEQ ID NO: 2009904 - DNA, 25 bp, Homo sapien
ggcagatcttcttaacttggaatcg

SEQ ID NO: 2009905 - DNA, 25 bp, Homo sapien
cttggaatgggcagatcttcttaac

SEQ ID NO: 2009906 - DNA, 25 bp, Homo sapien
gagcttgtaggctgcctggagtatc

SEQ ID NO: 2009907 - DNA, 25 bp, Homo sapien
cttgtaggctgcctggagtatctct

SEQ ID NO: 2009908 - DNA, 25 bp, Homo sapien
tgtggagcttgtaggctgcctggag

SEQ ID NO: 2009909 - DNA, 25 bp, Homo sapien
tgtaggctgcctggagtatctctat

SEQ ID NO: 2009910 - DNA, 25 bp, Homo sapien
tgtgcaagcaggatagcatcagccc

SEQ ID NO: 2009911 - DNA, 25 bp, Homo sapien
gagcatcatagccacctcacatttt

SEQ ID NO: 2009912 - DNA, 25 bp, Homo sapien
cctgagtaactgcagtaaagtcttt

SEQ ID NO: 2009913 - DNA, 25 bp, Homo sapien
gccctaatttacctcgccagcattt

SEQ ID NO: 2009914 - DNA, 25 bp, Homo sapien
tgtacatttgcactcaaagaaaaac

SEQ ID NO: 2009915 - DNA, 25 bp, Homo sapien
atgtacatttgcactcaaagaaaaa

SEQ ID NO: 2009916 - DNA, 25 bp, Homo sapien
tcagcataagcctcctctacacaga

SEQ ID NO: 2009917 - DNA, 25 bp, Homo sapien
taagcctcctctacacagagctgtc

SEQ ID NO: 2009918 - DNA, 25 bp, Homo sapien
gttttttcatcacaatcctcttctc

SEQ ID NO: 2009919 - DNA, 25 bp, Homo sapien
agtcatgtaacccaacattcagaaa

SEQ ID NO: 2009920 - DNA, 25 bp, Homo sapien
ctaggttcttaatgccatcaaatga

SEQ ID NO: 2009921 - DNA, 25 bp, Homo sapien
tttgccaaatacttctaggttctta

SEQ ID NO: 2009922 - DNA, 25 bp, Homo sapien
tctaggttcttaatgccatcaaatg

SEQ ID NO: 2009923 - DNA, 25 bp, Homo sapien
ttctaggttcttaatgccatcaaat

SEQ ID NO: 2009924 - DNA, 25 bp, Homo sapien
cttcaatttcggtggccctggtctg

SEQ ID NO: 2009925 - DNA, 25 bp, Homo sapien
ttcttcaatttcggtggccctggtc

SEQ ID NO: 2009926 - DNA, 25 bp, Homo sapien
tggccctggtctgttgtttaggtaa

SEQ ID NO: 2009927 - DNA, 25 bp, Homo sapien
gtggccctggtctgttgtttaggta

SEQ ID NO: 2009928 - DNA, 25 bp, Homo sapien
tatcagccaatatttatagtatgtc

SEQ ID NO: 2009929 - DNA, 25 bp, Homo sapien
gaggtcttatgttatacttggtgta

SEQ ID NO: 2009930 - DNA, 25 bp, Homo sapien
taaggcatggaagtagggcaaagat

SEQ ID NO: 2009931 - DNA, 25 bp, Homo sapien
tattttcactagctatatatcagcc

SEQ ID NO: 2009932 - DNA, 25 bp, Homo sapien
gactgcggtcagaagatagctgtcc

SEQ ID NO: 2009933 - DNA, 25 bp, Homo sapien
tcaagcctgtgctgtatactgagca

SEQ ID NO: 2009934 - DNA, 25 bp, Homo sapien
gagggctgcttcaatcaaggtcatg

SEQ ID NO: 2009935 - DNA, 25 bp, Homo sapien
tagtaagcatggaagtacacggcct

SEQ ID NO: 2009936 - DNA, 25 bp, Homo sapien
attcacccgtggcacctccaccact

SEQ ID NO: 2009937 - DNA, 25 bp, Homo sapien
tctggagcatattcacccgtggcac

SEQ ID NO: 2009938 - DNA, 25 bp, Homo sapien
tcccataaccctctggagcatattc

SEQ ID NO: 2009939 - DNA, 25 bp, Homo sapien
ggagcatattcacccgtggcacctc

SEQ ID NO: 2009940 - DNA, 25 bp, Homo sapien
cagtgcttcctgccggcagtgcccc

SEQ ID NO: 2009941 - DNA, 25 bp, Homo sapien
acattcccttgcagcaaccccactg

SEQ ID NO: 2009942 - DNA, 25 bp, Homo sapien
agagcacattcccttgcagcaaccc

SEQ ID NO: 2009943 - DNA, 25 bp, Homo sapien
agcacattcccttgcagcaacccca

SEQ ID NO: 2009944 - DNA, 25 bp, Homo sapien
acatgccactggtcacaaagtagat

SEQ ID NO: 2009945 - DNA, 25 bp, Homo sapien
gccactggtcacaaagtagataagc

SEQ ID NO: 2009946 - DNA, 25 bp, Homo sapien
tgccactggtcacaaagtagataag

SEQ ID NO: 2009947 - DNA, 25 bp, Homo sapien
catgccactggtcacaaagtagata

SEQ ID NO: 2009948 - DNA, 25 bp, Homo sapien
acagcacagatgtccccctctggac

SEQ ID NO: 2009949 - DNA, 25 bp, Homo sapien
cacagatgtccccctctggaccaga

SEQ ID NO: 2009950 - DNA, 25 bp, Homo sapien
cagcacagatgtccccctctggacc

SEQ ID NO: 2009951 - DNA, 25 bp, Homo sapien
ccacagcacagatgtccccctctgg

SEQ ID NO: 2009952 - DNA, 25 bp, Homo sapien
taaagcaagagatgtgcgactcctc

SEQ ID NO: 2009953 - DNA, 25 bp, Homo sapien
gctggctcaagagacctagctttca

SEQ ID NO: 2009954 - DNA, 25 bp, Homo sapien
gccattgtaggattgttcattgacc

SEQ ID NO: 2009955 - DNA, 25 bp, Homo sapien
tatgagcccaatttgtgggccctaa

SEQ ID NO: 2009956 - DNA, 25 bp, Homo sapien
tcggcattgagagtgtggtttatca

SEQ ID NO: 2009957 - DNA, 25 bp, Homo sapien
catcatcggcattgagagtgtggtt

SEQ ID NO: 2009958 - DNA, 25 bp, Homo sapien
atcatcatcggcattgagagtgtgg

SEQ ID NO: 2009959 - DNA, 25 bp, Homo sapien
ggaaaagaccaagaggagcagaggc

SEQ ID NO: 2009960 - DNA, 25 bp, Homo sapien
gaaatccctagttcctataaagcaa

SEQ ID NO: 2009961 - DNA, 25 bp, Homo sapien
gatgcccttagctcccttgaggaag

SEQ ID NO: 2009962 - DNA, 25 bp, Homo sapien
tttaagagtgccctgacccaaatca

SEQ ID NO: 2009963 - DNA, 25 bp, Homo sapien
ctttatggaagtgcttgaaatccct

SEQ ID NO: 2009964 - DNA, 25 bp, Homo sapien
cccactgggtggctaattgtaacct

SEQ ID NO: 2009965 - DNA, 25 bp, Homo sapien
gtgtgccaaaaaacgtgaatcctga

SEQ ID NO: 2009966 - DNA, 25 bp, Homo sapien
tacagtaaccctttgatgcgatgat

SEQ ID NO: 2009967 - DNA, 25 bp, Homo sapien
tatataagcaaatgagcccactggg

SEQ ID NO: 2009968 - DNA, 25 bp, Homo sapien
cttgcgacaaaccaaaatgctatca

SEQ ID NO: 2009969 - DNA, 25 bp, Homo sapien
ttgcgacaaaccaaaatgctatcac

SEQ ID NO: 2009970 - DNA, 25 bp, Homo sapien
tgcgacaaaccaaaatgctatcacc

SEQ ID NO: 2009971 - DNA, 25 bp, Homo sapien
cgacaaaccaaaatgctatcaccat

SEQ ID NO: 2009972 - DNA, 25 bp, Homo sapien
gctttcacagctagtcatttccgat

SEQ ID NO: 2009973 - DNA, 25 bp, Homo sapien
caatttatcctctgtcaacaaataa

SEQ ID NO: 2009974 - DNA, 25 bp, Homo sapien
ttccgatttccatcccaatttatcc

SEQ ID NO: 2009975 - DNA, 25 bp, Homo sapien
tagtcatttccgatttccatcccaa

SEQ ID NO: 2009976 - DNA, 25 bp, Homo sapien
gtaattgttgacaccttcacccact

SEQ ID NO: 2009977 - DNA, 25 bp, Homo sapien
attgttgacaccttcacccactcag

SEQ ID NO: 2009978 - DNA, 25 bp, Homo sapien
gttgacaccttcacccactcagtta

SEQ ID NO: 2009979 - DNA, 25 bp, Homo sapien
tgttgacaccttcacccactcagtt

SEQ ID NO: 2009980 - DNA, 25 bp, Homo sapien
tattaccatccgatttctgtgccat

SEQ ID NO: 2009981 - DNA, 25 bp, Homo sapien
caaaaccaagcttattaccatccga

SEQ ID NO: 2009982 - DNA, 25 bp, Homo sapien
caagcttattaccatccgatttctg

SEQ ID NO: 2009983 - DNA, 25 bp, Homo sapien
taattcatcaaaaccaagcttatta

SEQ ID NO: 2009984 - DNA, 25 bp, Homo sapien
acattcttctacccattcgccacat

SEQ ID NO: 2009985 - DNA, 25 bp, Homo sapien
cagcacaattgacactttgcagact

SEQ ID NO: 2009986 - DNA, 25 bp, Homo sapien
cacaattgacactttgcagacttca

SEQ ID NO: 2009987 - DNA, 25 bp, Homo sapien
gcagcacaattgacactttgcagac

SEQ ID NO: 2009988 - DNA, 25 bp, Homo sapien
agtgcagcacaattgacactttgca

SEQ ID NO: 2009989 - DNA, 25 bp, Homo sapien
tattgtcaaggcgtataattctcct

SEQ ID NO: 2009990 - DNA, 25 bp, Homo sapien
catctagaaatagcattaatctttc

SEQ ID NO: 2009991 - DNA, 25 bp, Homo sapien
catcactcaagacactgcagttggt

SEQ ID NO: 2009992 - DNA, 25 bp, Homo sapien
gggtagatctcaatgaatcggagac

SEQ ID NO: 2009993 - DNA, 25 bp, Homo sapien
cagattaaacttgaaaggtcccagg

SEQ ID NO: 2009994 - DNA, 25 bp, Homo sapien
tgaaacacaatagcctcaggaatgg

SEQ ID NO: 2009995 - DNA, 25 bp, Homo sapien
cacctgatcctttcctgggtactac

SEQ ID NO: 2009996 - DNA, 25 bp, Homo sapien
ggtaaatttcaggatccacttatca

SEQ ID NO: 2009997 - DNA, 25 bp, Homo sapien
gggtgttctatttcaagaggcctga

SEQ ID NO: 2009998 - DNA, 25 bp, Homo sapien
gttaatctaccgttatctactggag

SEQ ID NO: 2009999 - DNA, 25 bp, Homo sapien
caccatgttacacagtctgcttcag

SEQ ID NO: 2010000 - DNA, 25 bp, Homo sapien
ttgggatacaggcagtggattaacc

SEQ ID NO: 2010001 - DNA, 25 bp, Homo sapien
tgctctcaatggcaaagctatgaac

SEQ ID NO: 2010002 - DNA, 25 bp, Homo sapien
ggcaaagctatgaacatagatcctc

SEQ ID NO: 2010003 - DNA, 25 bp, Homo sapien
agctatgaacatagatcctccttcg

SEQ ID NO: 2010004 - DNA, 25 bp, Homo sapien
gaacatagatcctccttcgcttcat

SEQ ID NO: 2010005 - DNA, 25 bp, Homo sapien
ccacttctcattaaattccatgtaa

SEQ ID NO: 2010006 - DNA, 25 bp, Homo sapien
tagagtatcagtaggattccacttc

SEQ ID NO: 2010007 - DNA, 25 bp, Homo sapien
acgcccggcctcaatagtgataata

SEQ ID NO: 2010008 - DNA, 25 bp, Homo sapien
ttacaatttagagtatcagtaggat

SEQ ID NO: 2010009 - DNA, 25 bp, Homo sapien
cttactccttagtagattctgagac

SEQ ID NO: 2010010 - DNA, 25 bp, Homo sapien
gatttgtgatccagagcattaaagg

SEQ ID NO: 2010011 - DNA, 25 bp, Homo sapien
aatgatttgtgatccagagcattaa

SEQ ID NO: 2010012 - DNA, 25 bp, Homo sapien
actccttagtagattctgagactct

SEQ ID NO: 2010013 - DNA, 25 bp, Homo sapien
cattcttccagatgggataactttt

SEQ ID NO: 2010014 - DNA, 25 bp, Homo sapien
tcattcttccagatgggataacttt

SEQ ID NO: 2010015 - DNA, 25 bp, Homo sapien
ccccaggggtaggcaaccactccag

SEQ ID NO: 2010016 - DNA, 25 bp, Homo sapien
agagggccacaatgtagaggccctt

SEQ ID NO: 2010017 - DNA, 25 bp, Homo sapien
ccaggggtaggcaaccactccaggc

SEQ ID NO: 2010018 - DNA, 25 bp, Homo sapien
agggccacaatgtagaggccctttt

SEQ ID NO: 2010019 - DNA, 25 bp, Homo sapien
ctgctagtctaatgaatttattaga

SEQ ID NO: 2010020 - DNA, 25 bp, Homo sapien
taaattagtcattacattcccagtg

SEQ ID NO: 2010021 - DNA, 25 bp, Homo sapien
ctgtagaagaatatctaccacttgc

SEQ ID NO: 2010022 - DNA, 25 bp, Homo sapien
gaatatctaccacttgcagcagaaa

SEQ ID NO: 2010023 - DNA, 25 bp, Homo sapien
tagaagaatatctaccacttgcagc

SEQ ID NO: 2010024 - DNA, 25 bp, Homo sapien
gaagaatatctaccacttgcagcag

SEQ ID NO: 2010025 - DNA, 25 bp, Homo sapien
cttcaagtagttgatgaggatgatg

SEQ ID NO: 2010026 - DNA, 25 bp, Homo sapien
tgatgaggatgatggaagtccaata

SEQ ID NO: 2010027 - DNA, 25 bp, Homo sapien
agttgatgaggatgatggaagtcca

SEQ ID NO: 2010028 - DNA, 25 bp, Homo sapien
caagtagttgatgaggatgatggaa

SEQ ID NO: 2010029 - DNA, 25 bp, Homo sapien
tcagcaagtaactgttccagagatt

SEQ ID NO: 2010030 - DNA, 25 bp, Homo sapien
tcaggcagttctaaggtaaacccaa

SEQ ID NO: 2010031 - DNA, 25 bp, Homo sapien
ggtggtcaggcagttctaaggtaaa

SEQ ID NO: 2010032 - DNA, 25 bp, Homo sapien
aggtatctgtgcaatcagcaagtaa

SEQ ID NO: 2010033 - DNA, 25 bp, Homo sapien
agctggttaaaatagcgaggatgtc

SEQ ID NO: 2010034 - DNA, 25 bp, Homo sapien
caagtccagtcatatctaacccact

SEQ ID NO: 2010035 - DNA, 25 bp, Homo sapien
gtggctgtcaaccattcccctgcaa

SEQ ID NO: 2010036 - DNA, 25 bp, Homo sapien
tcatatctaacccactggacagctg

SEQ ID NO: 2010037 - DNA, 25 bp, Homo sapien
aaaactggggctatttcatatgtaa

SEQ ID NO: 2010038 - DNA, 25 bp, Homo sapien
aaactggggctatttcatatgtaaa

SEQ ID NO: 2010039 - DNA, 25 bp, Homo sapien
aactggggctatttcatatgtaaac

SEQ ID NO: 2010040 - DNA, 25 bp, Homo sapien
aatgcatggaagtgcagtcatgcct

SEQ ID NO: 2010041 - DNA, 25 bp, Homo sapien
gtttatagtgagctactaaaatacc

SEQ ID NO: 2010042 - DNA, 25 bp, Homo sapien
gaagtgcagtcatgccttttgtttt

SEQ ID NO: 2010043 - DNA, 25 bp, Homo sapien
tatagtgagctactaaaataccata

SEQ ID NO: 2010044 - DNA, 25 bp, Homo sapien
caattacattatcaattccaatacc

SEQ ID NO: 2010045 - DNA, 25 bp, Homo sapien
cacactttacttcaattacattatc

SEQ ID NO: 2010046 - DNA, 25 bp, Homo sapien
ttccaatacccaaaattgttgcagc

SEQ ID NO: 2010047 - DNA, 25 bp, Homo sapien
tacattatcaattccaatacccaaa

SEQ ID NO: 2010048 - DNA, 25 bp, Homo sapien
aatctgggagaggattcttgccaaa

SEQ ID NO: 2010049 - DNA, 25 bp, Homo sapien
ggaaccacaggcaaatgaaatctca

SEQ ID NO: 2010050 - DNA, 25 bp, Homo sapien
ctgggagaggattcttgccaaaaaa

SEQ ID NO: 2010051 - DNA, 25 bp, Homo sapien
tcttgccaaaaaatggaaccacagg

SEQ ID NO: 2010052 - DNA, 25 bp, Homo sapien
aagcggaatcattcttacaatctca

SEQ ID NO: 2010053 - DNA, 25 bp, Homo sapien
cattcttacaatctcatgaagtcca

SEQ ID NO: 2010054 - DNA, 25 bp, Homo sapien
tcttacaatctcatgaagtccacag

SEQ ID NO: 2010055 - DNA, 25 bp, Homo sapien
ctggtgatgaaaaagcggaatcatt

SEQ ID NO: 2010056 - DNA, 25 bp, Homo sapien
cacagacacagaatggagtttggcc

SEQ ID NO: 2010057 - DNA, 25 bp, Homo sapien
ggcacagacacagaatggagtttgg

SEQ ID NO: 2010058 - DNA, 25 bp, Homo sapien
gcacagacacagaatggagtttggc

SEQ ID NO: 2010059 - DNA, 25 bp, Homo sapien
cacaaatatcagcgatgtcagggag

SEQ ID NO: 2010060 - DNA, 25 bp, Homo sapien
tcacaaatatcagcgatgtcaggga

SEQ ID NO: 2010061 - DNA, 25 bp, Homo sapien
ctcacaaatatcagcgatgtcaggg

SEQ ID NO: 2010062 - DNA, 25 bp, Homo sapien
tcaataccactgagtttataggaat

SEQ ID NO: 2010063 - DNA, 25 bp, Homo sapien
tttcaataccactgagtttatagga

SEQ ID NO: 2010064 - DNA, 25 bp, Homo sapien
ctttcaataccactgagtttatagg

SEQ ID NO: 2010065 - DNA, 25 bp, Homo sapien
ttcaataccactgagtttataggaa

SEQ ID NO: 2010066 - DNA, 25 bp, Homo sapien
cggatcaagatagcagagcactgaa

SEQ ID NO: 2010067 - DNA, 25 bp, Homo sapien
gcactgaagagggacacccattagt

SEQ ID NO: 2010068 - DNA, 25 bp, Homo sapien
cacccattagtttgtgtggattcca

SEQ ID NO: 2010069 - DNA, 25 bp, Homo sapien
tttttcccggatcaagatagcagag

SEQ ID NO: 2010070 - DNA, 25 bp, Homo sapien
ctaggtatgagaaaatgaataaaga

SEQ ID NO: 2010071 - DNA, 25 bp, Homo sapien
gaaaatgaataaagattccctcaga

SEQ ID NO: 2010072 - DNA, 25 bp, Homo sapien
atgagaaaatgaataaagattccct

SEQ ID NO: 2010073 - DNA, 25 bp, Homo sapien
gagaaaatgaataaagattccctca

SEQ ID NO: 2010074 - DNA, 25 bp, Homo sapien
cagccaacttagcaggagctgaagc

SEQ ID NO: 2010075 - DNA, 25 bp, Homo sapien
aatgttaacagttccagtcagcaga

SEQ ID NO: 2010076 - DNA, 25 bp, Homo sapien
gcagagataatgttaacagttccag

SEQ ID NO: 2010077 - DNA, 25 bp, Homo sapien
ctgccatgcagccaacttagcagga

SEQ ID NO: 2010078 - DNA, 25 bp, Homo sapien
ctctgtttcaggctaggcttgtgga

SEQ ID NO: 2010079 - DNA, 25 bp, Homo sapien
actctgtttcaggctaggcttgtgg

SEQ ID NO: 2010080 - DNA, 25 bp, Homo sapien
cagcttgcatctgattacatgcatc

SEQ ID NO: 2010081 - DNA, 25 bp, Homo sapien
cttgcatctgattacatgcatctag

SEQ ID NO: 2010082 - DNA, 25 bp, Homo sapien
tcagcttgcatctgattacatgcat

SEQ ID NO: 2010083 - DNA, 25 bp, Homo sapien
gcttgcatctgattacatgcatcta

SEQ ID NO: 2010084 - DNA, 25 bp, Homo sapien
cattaaccactgcttgaagatatca

SEQ ID NO: 2010085 - DNA, 25 bp, Homo sapien
ggccacactgaatagttttatccgc

SEQ ID NO: 2010086 - DNA, 25 bp, Homo sapien
gaagatatcaacatgtcggccacac

SEQ ID NO: 2010087 - DNA, 25 bp, Homo sapien
tccgccgtgtcaaagtcaacattgt

SEQ ID NO: 2010088 - DNA, 25 bp, Homo sapien
aatgagtaaaagatgacaaattcct

SEQ ID NO: 2010089 - DNA, 25 bp, Homo sapien
aaagtagaatgagtaaaagatgaca

SEQ ID NO: 2010090 - DNA, 25 bp, Homo sapien
ttctactccaataaaaagtagaatg

SEQ ID NO: 2010091 - DNA, 25 bp, Homo sapien
tgagtaaaagatgacaaattcctac

SEQ ID NO: 2010092 - DNA, 25 bp, Homo sapien
aaccttatagaagtattttgcaagt

SEQ ID NO: 2010093 - DNA, 25 bp, Homo sapien
aaaccttatagaagtattttgcaag

SEQ ID NO: 2010094 - DNA, 25 bp, Homo sapien
taaaaccttatagaagtattttgca

SEQ ID NO: 2010095 - DNA, 25 bp, Homo sapien
tctcttatattatctactgtctgga

SEQ ID NO: 2010096 - DNA, 25 bp, Homo sapien
tatattatctactgtctggaaatgc

SEQ ID NO: 2010097 - DNA, 25 bp, Homo sapien
tcttatattatctactgtctggaaa

SEQ ID NO: 2010098 - DNA, 25 bp, Homo sapien
ttatattatctactgtctggaaatg

SEQ ID NO: 2010099 - DNA, 25 bp, Homo sapien
gaaaaatattttacaagtatccata

SEQ ID NO: 2010100 - DNA, 25 bp, Homo sapien
agaaaaatattttacaagtatccat

SEQ ID NO: 2010101 - DNA, 25 bp, Homo sapien
gaaataccagaagcagacattagtg

SEQ ID NO: 2010102 - DNA, 25 bp, Homo sapien
tgggaaataccagaagcagacatta

SEQ ID NO: 2010103 - DNA, 25 bp, Homo sapien
aataccagaagcagacattagtgaa

SEQ ID NO: 2010104 - DNA, 25 bp, Homo sapien
gggaaataccagaagcagacattag

SEQ ID NO: 2010105 - DNA, 25 bp, Homo sapien
ggagttcttgatctctttcaaaacc

SEQ ID NO: 2010106 - DNA, 25 bp, Homo sapien
ttcggagttcttgatctctttcaaa

SEQ ID NO: 2010107 - DNA, 25 bp, Homo sapien
ctttcggagttcttgatctctttca

SEQ ID NO: 2010108 - DNA, 25 bp, Homo sapien
ccttttggaatatgtttaagccttg

SEQ ID NO: 2010109 - DNA, 25 bp, Homo sapien
tcatctgtgctttaatctttggagc

SEQ ID NO: 2010110 - DNA, 25 bp, Homo sapien
tagcttatcatgattgtgccttcca

SEQ ID NO: 2010111 - DNA, 25 bp, Homo sapien
cacatggctggtagcttatcatgat

SEQ ID NO: 2010112 - DNA, 25 bp, Homo sapien
catctgtgctttaatctttggagca

SEQ ID NO: 2010113 - DNA, 25 bp, Homo sapien
ctttctgtcttgaggcaggattaga

SEQ ID NO: 2010114 - DNA, 25 bp, Homo sapien
gcaggattagaaaaaaaccattcgc

SEQ ID NO: 2010115 - DNA, 25 bp, Homo sapien
caggattagaaaaaaaccattcgca

SEQ ID NO: 2010116 - DNA, 25 bp, Homo sapien
tgtcttgaggcaggattagaaaaaa

SEQ ID NO: 2010117 - DNA, 25 bp, Homo sapien
cttcccaagcctttcaatttcatca

SEQ ID NO: 2010118 - DNA, 25 bp, Homo sapien
aatttcatcaataagatagtcaaca

SEQ ID NO: 2010119 - DNA, 25 bp, Homo sapien
caatttcatcaataagatagtcaac

SEQ ID NO: 2010120 - DNA, 25 bp, Homo sapien
atccttcccaagcctttcaatttca

SEQ ID NO: 2010121 - DNA, 25 bp, Homo sapien
tactcaaattgagtcttttggagca

SEQ ID NO: 2010122 - DNA, 25 bp, Homo sapien
ctcaaattgagtcttttggagcaac

SEQ ID NO: 2010123 - DNA, 25 bp, Homo sapien
caaattgagtcttttggagcaacat

SEQ ID NO: 2010124 - DNA, 25 bp, Homo sapien
tttaaaggcgtactcaaattgagtc

SEQ ID NO: 2010125 - DNA, 25 bp, Homo sapien
caccggagacctcgctggcatgagg

SEQ ID NO: 2010126 - DNA, 25 bp, Homo sapien
ggcaccggagacctcgctggcatga

SEQ ID NO: 2010127 - DNA, 25 bp, Homo sapien
gcatgaggggccgtctggctggacc

SEQ ID NO: 2010128 - DNA, 25 bp, Homo sapien
accttgggtccgagctggctggtcc

SEQ ID NO: 2010129 - DNA, 25 bp, Homo sapien
ctccgagccactggcgcgggctggg

SEQ ID NO: 2010130 - DNA, 25 bp, Homo sapien
ccccggtgtcccgtgtggtctcgca

SEQ ID NO: 2010131 - DNA, 25 bp, Homo sapien
agcgcccggagtccgcgactgctgg

SEQ ID NO: 2010132 - DNA, 25 bp, Homo sapien
tgtcccgtgtggtctcgcagctcct

SEQ ID NO: 2010133 - DNA, 25 bp, Homo sapien
aattcggtgcactcgctgtctctta

SEQ ID NO: 2010134 - DNA, 25 bp, Homo sapien
tactttcacaaattcggtgcactcg

SEQ ID NO: 2010135 - DNA, 25 bp, Homo sapien
tcacaaattcggtgcactcgctgtc

SEQ ID NO: 2010136 - DNA, 25 bp, Homo sapien
ggaggatactttcacaaattcggtg

SEQ ID NO: 2010137 - DNA, 25 bp, Homo sapien
gcgcccagggcttcatgtaaaatct

SEQ ID NO: 2010138 - DNA, 25 bp, Homo sapien
ggagtgcgtatcacagaaggccatg

SEQ ID NO: 2010139 - DNA, 25 bp, Homo sapien
tctcctgcgtggagtgcgtatcaca

SEQ ID NO: 2010140 - DNA, 25 bp, Homo sapien
tgcagttgcgcagtccagcagtgcc

SEQ ID NO: 2010141 - DNA, 25 bp, Homo sapien
ctggcgagggtgatggtgtgatacc

SEQ ID NO: 2010142 - DNA, 25 bp, Homo sapien
cgagggtgatggtgtgatacctcat

SEQ ID NO: 2010143 - DNA, 25 bp, Homo sapien
gcgagggtgatggtgtgatacctca

SEQ ID NO: 2010144 - DNA, 25 bp, Homo sapien
gccctggcgagggtgatggtgtgat

SEQ ID NO: 2010145 - DNA, 25 bp, Homo sapien
gttcacattgtcgtagccactgcct

SEQ ID NO: 2010146 - DNA, 25 bp, Homo sapien
tgttcacattgtcgtagccactgcc

SEQ ID NO: 2010147 - DNA, 25 bp, Homo sapien
gatgttcacattgtcgtagccactg

SEQ ID NO: 2010148 - DNA, 25 bp, Homo sapien
atgttcacattgtcgtagccactgc

SEQ ID NO: 2010149 - DNA, 25 bp, Homo sapien
acagcaatctcaagctcgcaggcag

SEQ ID NO: 2010150 - DNA, 25 bp, Homo sapien
gtggcagatggttgagttggctgtc

SEQ ID NO: 2010151 - DNA, 25 bp, Homo sapien
acacagcaatctcaagctcgcaggc

SEQ ID NO: 2010152 - DNA, 25 bp, Homo sapien
cagatggttgagttggctgtctctt

SEQ ID NO: 2010153 - DNA, 25 bp, Homo sapien
cctgcgtctccccaccgatgtgagc

SEQ ID NO: 2010154 - DNA, 25 bp, Homo sapien
cctctcggatctgccccatgctgta

SEQ ID NO: 2010155 - DNA, 25 bp, Homo sapien
cacctctcggatctgccccatgctg

SEQ ID NO: 2010156 - DNA, 25 bp, Homo sapien
ccaccgatgtgagcccctcccaagg

SEQ ID NO: 2010157 - DNA, 25 bp, Homo sapien
ggcctcggctcgaactggaaccgct

SEQ ID NO: 2010158 - DNA, 25 bp, Homo sapien
tcggctcgaactggaaccgcttgcc

SEQ ID NO: 2010159 - DNA, 25 bp, Homo sapien
cggctcgaactggaaccgcttgccc

SEQ ID NO: 2010160 - DNA, 25 bp, Homo sapien
cctcggctcgaactggaaccgcttg

SEQ ID NO: 2010161 - DNA, 25 bp, Homo sapien
atgtttgttgagcttgcagtgcaaa

SEQ ID NO: 2010162 - DNA, 25 bp, Homo sapien
tgttgagcttgcagtgcaaagagat

SEQ ID NO: 2010163 - DNA, 25 bp, Homo sapien
tgagcttgcagtgcaaagagatgca

SEQ ID NO: 2010164 - DNA, 25 bp, Homo sapien
ttgcagtgcaaagagatgcagtcac

SEQ ID NO: 2010165 - DNA, 25 bp, Homo sapien
taaggctttctcgtccaccagggca

SEQ ID NO: 2010166 - DNA, 25 bp, Homo sapien
tattgagggcctgtgctaaggcttt

SEQ ID NO: 2010167 - DNA, 25 bp, Homo sapien
ctttctcgtccaccagggcaccacg

SEQ ID NO: 2010168 - DNA, 25 bp, Homo sapien
gcaccacgggctgcgttcacaagga

SEQ ID NO: 2010169 - DNA, 25 bp, Homo sapien
gggcacgtcgagagctgccctctta

SEQ ID NO: 2010170 - DNA, 25 bp, Homo sapien
actggggcacgtcgagagctgccct

SEQ ID NO: 2010171 - DNA, 25 bp, Homo sapien
aaagagctctgactggggcacgtcg

SEQ ID NO: 2010172 - DNA, 25 bp, Homo sapien
cacgtcgagagctgccctcttatct

SEQ ID NO: 2010173 - DNA, 25 bp, Homo sapien
tgaggagtgcagatgagattccggg

SEQ ID NO: 2010174 - DNA, 25 bp, Homo sapien
ggagtgcagatgagattccgggcat

SEQ ID NO: 2010175 - DNA, 25 bp, Homo sapien
gcgtgaggagtgcagatgagattcc

SEQ ID NO: 2010176 - DNA, 25 bp, Homo sapien
tggggggcagcgtgaggagtgcaga

SEQ ID NO: 2010177 - DNA, 25 bp, Homo sapien
ttctgtggctgcgggaagtcctcct

SEQ ID NO: 2010178 - DNA, 25 bp, Homo sapien
cggcattctctgctttgttcgttgg

SEQ ID NO: 2010179 - DNA, 25 bp, Homo sapien
ggagccacgcacacgaagcctggca

SEQ ID NO: 2010180 - DNA, 25 bp, Homo sapien
cacacgaagcctggcagatatctgt

SEQ ID NO: 2010181 - DNA, 25 bp, Homo sapien
cgtcagattcgttttctctgagttc

SEQ ID NO: 2010182 - DNA, 25 bp, Homo sapien
agaatcagctaaaaagaccgtcaga

SEQ ID NO: 2010183 - DNA, 25 bp, Homo sapien
aaagaccgtcagattcgttttctct

SEQ ID NO: 2010184 - DNA, 25 bp, Homo sapien
gaccgtcagattcgttttctctgag

SEQ ID NO: 2010185 - DNA, 25 bp, Homo sapien
tttgtcactaaaataggaatgtacc

SEQ ID NO: 2010186 - DNA, 25 bp, Homo sapien
taggaatgtacctatacagaggctc

SEQ ID NO: 2010187 - DNA, 25 bp, Homo sapien
tacctatacagaggctcaaaatagg

SEQ ID NO: 2010188 - DNA, 25 bp, Homo sapien
gaatgtacctatacagaggctcaaa

SEQ ID NO: 2010189 - DNA, 25 bp, Homo sapien
cgttttcctccacatcgccttgggt

SEQ ID NO: 2010190 - DNA, 25 bp, Homo sapien
cagtctctactgtggagacagtctc

SEQ ID NO: 2010191 - DNA, 25 bp, Homo sapien
gacagtctctacgtctttgttgctg

SEQ ID NO: 2010192 - DNA, 25 bp, Homo sapien
gggttgccacagtcagagttctgtc

SEQ ID NO: 2010193 - DNA, 25 bp, Homo sapien
tccatggtcctcatttattgtcccc

SEQ ID NO: 2010194 - DNA, 25 bp, Homo sapien
ctttcctctaccattaactaaagct

SEQ ID NO: 2010195 - DNA, 25 bp, Homo sapien
tcaatgctcaattccagattgatat

SEQ ID NO: 2010196 - DNA, 25 bp, Homo sapien
ttctctctgtaagcagaatctcccc

SEQ ID NO: 2010197 - DNA, 25 bp, Homo sapien
cctcaatctcaactgggttcatcag

SEQ ID NO: 2010198 - DNA, 25 bp, Homo sapien
cgagcttcctcaatctcaactgggt

SEQ ID NO: 2010199 - DNA, 25 bp, Homo sapien
tgatcttttccggaaattttgcacg

SEQ ID NO: 2010200 - DNA, 25 bp, Homo sapien
ggaaattttgcacgagcttcctcaa

SEQ ID NO: 2010201 - DNA, 25 bp, Homo sapien
cttagttgatttactcttattactc

SEQ ID NO: 2010202 - DNA, 25 bp, Homo sapien
tagttgatttactcttattactcat

SEQ ID NO: 2010203 - DNA, 25 bp, Homo sapien
ttagttgatttactcttattactca

SEQ ID NO: 2010204 - DNA, 25 bp, Homo sapien
tcttagttgatttactcttattact

SEQ ID NO: 2010205 - DNA, 25 bp, Homo sapien
tttgccgtgggctctgaagactagc

SEQ ID NO: 2010206 - DNA, 25 bp, Homo sapien
gatgcctccattacaggtggttggt

SEQ ID NO: 2010207 - DNA, 25 bp, Homo sapien
gaagaacaaatgtccacgcagacag

SEQ ID NO: 2010208 - DNA, 25 bp, Homo sapien
cctgatggctttgacgctgtgggta

SEQ ID NO: 2010209 - DNA, 25 bp, Homo sapien
agtatgtggtcacaaacccaacagg

SEQ ID NO: 2010210 - DNA, 25 bp, Homo sapien
gtatgtggtcacaaacccaacagga

SEQ ID NO: 2010211 - DNA, 25 bp, Homo sapien
tcagtatgtggtcacaaacccaaca

SEQ ID NO: 2010212 - DNA, 25 bp, Homo sapien
tatgtggtcacaaacccaacaggac

SEQ ID NO: 2010213 - DNA, 25 bp, Homo sapien
gattgacaatcctgtgaagatatgg

SEQ ID NO: 2010214 - DNA, 25 bp, Homo sapien
cctgtgaagatatggcttgaccttt

SEQ ID NO: 2010215 - DNA, 25 bp, Homo sapien
ctctggattgacaatcctgtgaaga

SEQ ID NO: 2010216 - DNA, 25 bp, Homo sapien
gacaatcctgtgaagatatggcttg

SEQ ID NO: 2010217 - DNA, 25 bp, Homo sapien
tctgctttgtagacccaaggttcac

SEQ ID NO: 2010218 - DNA, 25 bp, Homo sapien
agccagctcagcaagacacaaatgt

SEQ ID NO: 2010219 - DNA, 25 bp, Homo sapien
caaggttcactagctacatccaccc

SEQ ID NO: 2010220 - DNA, 25 bp, Homo sapien
acaaatttggcccttgtctcctgcc

SEQ ID NO: 2010221 - DNA, 25 bp, Homo sapien
agaaacatatgaaagcttgttgggc

SEQ ID NO: 2010222 - DNA, 25 bp, Homo sapien
gaacagtaggaagtatgtggtcttg

SEQ ID NO: 2010223 - DNA, 25 bp, Homo sapien
aaacatatgaaagcttgttgggctt

SEQ ID NO: 2010224 - DNA, 25 bp, Homo sapien
gaaacatatgaaagcttgttgggct

SEQ ID NO: 2010225 - DNA, 25 bp, Homo sapien
taaaagggcatgtccattgggccct

SEQ ID NO: 2010226 - DNA, 25 bp, Homo sapien
ggcatgtccattgggccctctagca

SEQ ID NO: 2010227 - DNA, 25 bp, Homo sapien
ggtggtgaaataaaagggcatgtcc

SEQ ID NO: 2010228 - DNA, 25 bp, Homo sapien
aaataaaagggcatgtccattgggc

SEQ ID NO: 2010229 - DNA, 25 bp, Homo sapien
gggacatcatagaagtttttatcag

SEQ ID NO: 2010230 - DNA, 25 bp, Homo sapien
agggacatcatagaagtttttatca

SEQ ID NO: 2010231 - DNA, 25 bp, Homo sapien
tgagagtctagaccctttttcagag

SEQ ID NO: 2010232 - DNA, 25 bp, Homo sapien
aagtccgtcgcctcttgagaatcag

SEQ ID NO: 2010233 - DNA, 25 bp, Homo sapien
tctgtgggccataccaaaaattttg

SEQ ID NO: 2010234 - DNA, 25 bp, Homo sapien
tactcccagacacatagcattgctg

SEQ ID NO: 2010235 - DNA, 25 bp, Homo sapien
ggtatgactggcaggaccaccatct

SEQ ID NO: 2010236 - DNA, 25 bp, Homo sapien
tatgactggcaggaccaccatctgt

SEQ ID NO: 2010237 - DNA, 25 bp, Homo sapien
ggctgggctggtatgactggcagga

SEQ ID NO: 2010238 - DNA, 25 bp, Homo sapien
ggctggtatgactggcaggaccacc

SEQ ID NO: 2010239 - DNA, 25 bp, Homo sapien
ttgtatctaattgaaatggtcccat

SEQ ID NO: 2010240 - DNA, 25 bp, Homo sapien
attgtatctaattgaaatggtccca

SEQ ID NO: 2010241 - DNA, 25 bp, Homo sapien
aattgtatctaattgaaatggtccc

SEQ ID NO: 2010242 - DNA, 25 bp, Homo sapien
gccccaatcaatccaatttagagcc

SEQ ID NO: 2010243 - DNA, 25 bp, Homo sapien
taatgccccaatcaatccaatttag

SEQ ID NO: 2010244 - DNA, 25 bp, Homo sapien
gcagtaatgccccaatcaatccaat

SEQ ID NO: 2010245 - DNA, 25 bp, Homo sapien
cccaatcaatccaatttagagccat

SEQ ID NO: 2010246 - DNA, 25 bp, Homo sapien
tttctgagagccatccttataggag

SEQ ID NO: 2010247 - DNA, 25 bp, Homo sapien
tctgagagccatccttataggagcc

SEQ ID NO: 2010248 - DNA, 25 bp, Homo sapien
catccttataggagcctgaatcatc

SEQ ID NO: 2010249 - DNA, 25 bp, Homo sapien
gagccatccttataggagcctgaat

SEQ ID NO: 2010250 - DNA, 25 bp, Homo sapien
actgctgtggacgtgaataaaggaa

SEQ ID NO: 2010251 - DNA, 25 bp, Homo sapien
agtaactgctgtggacgtgaataaa

SEQ ID NO: 2010252 - DNA, 25 bp, Homo sapien
tgctgtggacgtgaataaaggaaca

SEQ ID NO: 2010253 - DNA, 25 bp, Homo sapien
taactgctgtggacgtgaataaagg

SEQ ID NO: 2010254 - DNA, 25 bp, Homo sapien
tgaaattcagtcgttttccttgttc

SEQ ID NO: 2010255 - DNA, 25 bp, Homo sapien
ctgaaattcagtcgttttccttgtt

SEQ ID NO: 2010256 - DNA, 25 bp, Homo sapien
ttccttgttctttctttcattgagt

SEQ ID NO: 2010257 - DNA, 25 bp, Homo sapien
ttttccttgttctttctttcattga

SEQ ID NO: 2010258 - DNA, 25 bp, Homo sapien
tctttttcttcctcttggtgggtca

SEQ ID NO: 2010259 - DNA, 25 bp, Homo sapien
cttcctcttggtgggtcaaaggcat

SEQ ID NO: 2010260 - DNA, 25 bp, Homo sapien
ttcttcctcttggtgggtcaaaggc

SEQ ID NO: 2010261 - DNA, 25 bp, Homo sapien
tcttcctcttggtgggtcaaaggca

SEQ ID NO: 2010262 - DNA, 25 bp, Homo sapien
ggaagctcttctgattgcatttgtg

SEQ ID NO: 2010263 - DNA, 25 bp, Homo sapien
gaagctcttctgattgcatttgtga

SEQ ID NO: 2010264 - DNA, 25 bp, Homo sapien
agctcttctgattgcatttgtgaag

SEQ ID NO: 2010265 - DNA, 25 bp, Homo sapien
ctcttctgattgcatttgtgaagtt

SEQ ID NO: 2010266 - DNA, 25 bp, Homo sapien
tgagttttggccgattttatggaag

SEQ ID NO: 2010267 - DNA, 25 bp, Homo sapien
caaattaagagctgtgtttaaattt

SEQ ID NO: 2010268 - DNA, 25 bp, Homo sapien
ccttcacttggtcattcaaattaag

SEQ ID NO: 2010269 - DNA, 25 bp, Homo sapien
gttgtggcaaagcagtctcctcaac

SEQ ID NO: 2010270 - DNA, 25 bp, Homo sapien
gtggcaaagcagtctcctcaaccct

SEQ ID NO: 2010271 - DNA, 25 bp, Homo sapien
gcatgagggataagctgtgtcccag

SEQ ID NO: 2010272 - DNA, 25 bp, Homo sapien
agcatgagggataagctgtgtccca

SEQ ID NO: 2010273 - DNA, 25 bp, Homo sapien
atgagggataagctgtgtcccaggg

SEQ ID NO: 2010274 - DNA, 25 bp, Homo sapien
catgagggataagctgtgtcccagg

SEQ ID NO: 2010275 - DNA, 25 bp, Homo sapien
ctttagtgtatcccaatgagaaatt

SEQ ID NO: 2010276 - DNA, 25 bp, Homo sapien
aactgtaaattatatcctctcaaac

SEQ ID NO: 2010277 - DNA, 25 bp, Homo sapien
tactttccgcttcatacacttacaa

SEQ ID NO: 2010278 - DNA, 25 bp, Homo sapien
attcaactgtaaattatatcctctc

SEQ ID NO: 2010279 - DNA, 25 bp, Homo sapien
aagcttcatggatatattatttgtg

SEQ ID NO: 2010280 - DNA, 25 bp, Homo sapien
cttcatggatatattatttgtgaaa

SEQ ID NO: 2010281 - DNA, 25 bp, Homo sapien
ataagcttcatggatatattatttg

SEQ ID NO: 2010282 - DNA, 25 bp, Homo sapien
agcttcatggatatattatttgtga

SEQ ID NO: 2010283 - DNA, 25 bp, Homo sapien
cggctttctttgaaccacgggtatg

SEQ ID NO: 2010284 - DNA, 25 bp, Homo sapien
taaatggaaatagaaaggcccatgt

SEQ ID NO: 2010285 - DNA, 25 bp, Homo sapien
atggaaatagaaaggcccatgtcat

SEQ ID NO: 2010286 - DNA, 25 bp, Homo sapien
cacgggtatggggctaaatggaaat

SEQ ID NO: 2010287 - DNA, 25 bp, Homo sapien
cataaatgggcctagctttaatccc

SEQ ID NO: 2010288 - DNA, 25 bp, Homo sapien
tcatatgccggcataaatgggccta

SEQ ID NO: 2010289 - DNA, 25 bp, Homo sapien
gccggcataaatgggcctagcttta

SEQ ID NO: 2010290 - DNA, 25 bp, Homo sapien
ctagctttaatcccagtgtcactct

SEQ ID NO: 2010291 - DNA, 25 bp, Homo sapien
tgttcaggctgaaagtgtgggtcac

SEQ ID NO: 2010292 - DNA, 25 bp, Homo sapien
tgtacactgggcacaacctttgggt

SEQ ID NO: 2010293 - DNA, 25 bp, Homo sapien
ccatgagaggaagagggctgataac

SEQ ID NO: 2010294 - DNA, 25 bp, Homo sapien
tgcaatagcagtagtgaccccagag

SEQ ID NO: 2010295 - DNA, 25 bp, Homo sapien
tctctctagttttgttattgtcccc

SEQ ID NO: 2010296 - DNA, 25 bp, Homo sapien
gagatcctgaatcacatgaagatga

SEQ ID NO: 2010297 - DNA, 25 bp, Homo sapien
cactatccattgtatttccgaatca

SEQ ID NO: 2010298 - DNA, 25 bp, Homo sapien
gatgatgttgtaagttaattccaga

SEQ ID NO: 2010299 - DNA, 25 bp, Homo sapien
gaaggcactctgaatatcagggaaa

SEQ ID NO: 2010300 - DNA, 25 bp, Homo sapien
attcctacggcaggcaatgaaggca

SEQ ID NO: 2010301 - DNA, 25 bp, Homo sapien
gataactttgattcaggtttactgg

SEQ ID NO: 2010302 - DNA, 25 bp, Homo sapien
aaagctgtcagttctatttgataac

SEQ ID NO: 2010303 - DNA, 25 bp, Homo sapien
catctgtagcatgaagattattgac

SEQ ID NO: 2010304 - DNA, 25 bp, Homo sapien
catgaagattattgacatttaaggg

SEQ ID NO: 2010305 - DNA, 25 bp, Homo sapien
cagtatttccatctgtagcatgaag

SEQ ID NO: 2010306 - DNA, 25 bp, Homo sapien
aaatacagtatttccatctgtagca

SEQ ID NO: 2010307 - DNA, 25 bp, Homo sapien
ccaagcactgaccatttaggacaaa

SEQ ID NO: 2010308 - DNA, 25 bp, Homo sapien
gcactgaccatttaggacaaagagg

SEQ ID NO: 2010309 - DNA, 25 bp, Homo sapien
tcaagagcagtagaagtagcaatag

SEQ ID NO: 2010310 - DNA, 25 bp, Homo sapien
aagtagcaatagaagcgcctctttc

SEQ ID NO: 2010311 - DNA, 25 bp, Homo sapien
ttgcttcctgaagtcaactaatgga

SEQ ID NO: 2010312 - DNA, 25 bp, Homo sapien
ttagtattgcttcctgaagtcaact

SEQ ID NO: 2010313 - DNA, 25 bp, Homo sapien
ctaatggattgaaaagggactggga

SEQ ID NO: 2010314 - DNA, 25 bp, Homo sapien
cctgaagtcaactaatggattgaaa

SEQ ID NO: 2010315 - DNA, 25 bp, Homo sapien
agctcaatttgcaaccagcaggatt

SEQ ID NO: 2010316 - DNA, 25 bp, Homo sapien
gactctgagctcaatttgcaaccag

SEQ ID NO: 2010317 - DNA, 25 bp, Homo sapien
caaccagcaggattctggccaacag

SEQ ID NO: 2010318 - DNA, 25 bp, Homo sapien
ctgttgactctgagctcaatttgca

SEQ ID NO: 2010319 - DNA, 25 bp, Homo sapien
gataccactgatgcacgaaattctc

SEQ ID NO: 2010320 - DNA, 25 bp, Homo sapien
cttgataccactgatgcacgaaatt

SEQ ID NO: 2010321 - DNA, 25 bp, Homo sapien
taccactgatgcacgaaattctcca

SEQ ID NO: 2010322 - DNA, 25 bp, Homo sapien
ttctttttgcacttgataccactga

SEQ ID NO: 2010323 - DNA, 25 bp, Homo sapien
tctccctctctcacgtcttctattg

SEQ ID NO: 2010324 - DNA, 25 bp, Homo sapien
tctctcacgtcttctattgagttcc

SEQ ID NO: 2010325 - DNA, 25 bp, Homo sapien
ccctctctcacgtcttctattgagt

SEQ ID NO: 2010326 - DNA, 25 bp, Homo sapien
tctcacgtcttctattgagttcctt

SEQ ID NO: 2010327 - DNA, 25 bp, Homo sapien
tagtcttgtcgtggccaaactaggc

SEQ ID NO: 2010328 - DNA, 25 bp, Homo sapien
ttctgccagccccaatagtcttgtc

SEQ ID NO: 2010329 - DNA, 25 bp, Homo sapien
cccaatagtcttgtcgtggccaaac

SEQ ID NO: 2010330 - DNA, 25 bp, Homo sapien
cgtggccaaactaggccttgaagca

SEQ ID NO: 2010331 - DNA, 25 bp, Homo sapien
gtctccaacagaagcatattctatg

SEQ ID NO: 2010332 - DNA, 25 bp, Homo sapien
ccaacagaagcatattctatgctgc

SEQ ID NO: 2010333 - DNA, 25 bp, Homo sapien
tcctatctctactaagtctccaaca

SEQ ID NO: 2010334 - DNA, 25 bp, Homo sapien
ctatctctactaagtctccaacaga

SEQ ID NO: 2010335 - DNA, 25 bp, Homo sapien
ctattcttcgaaatgttctttagaa

SEQ ID NO: 2010336 - DNA, 25 bp, Homo sapien
gtctgctcccagacagcctcggagt

SEQ ID NO: 2010337 - DNA, 25 bp, Homo sapien
gatataacagccatggttctggttg

SEQ ID NO: 2010338 - DNA, 25 bp, Homo sapien
aagggcatagatcttctctgctcac

SEQ ID NO: 2010339 - DNA, 25 bp, Homo sapien
ggccacgtttctctcccagctgata

SEQ ID NO: 2010340 - DNA, 25 bp, Homo sapien
gctgatgaaggacccagcctctgaa

SEQ ID NO: 2010341 - DNA, 25 bp, Homo sapien
tcctggagtgcttgttgggtcacgt

SEQ ID NO: 2010342 - DNA, 25 bp, Homo sapien
gaagaacagtactcggtgccaaacc

SEQ ID NO: 2010343 - DNA, 25 bp, Homo sapien
ggaaagatccatataagccagttga

SEQ ID NO: 2010344 - DNA, 25 bp, Homo sapien
gccagttgatctatagactaagcct

SEQ ID NO: 2010345 - DNA, 25 bp, Homo sapien
gctgattgttaccagtcaagagctc

SEQ ID NO: 2010346 - DNA, 25 bp, Homo sapien
tattatcaagccaaacccattggaa

SEQ ID NO: 2010347 - DNA, 25 bp, Homo sapien
caagaaattcttgtggtccactcat

SEQ ID NO: 2010348 - DNA, 25 bp, Homo sapien
cacgagtggcaatgcacagggtcat

SEQ ID NO: 2010349 - DNA, 25 bp, Homo sapien
catagtccaattaagcttgctaagc

SEQ ID NO: 2010350 - DNA, 25 bp, Homo sapien
ggctttaaacttgatgggtcaagaa

SEQ ID NO: 2010351 - DNA, 25 bp, Homo sapien
ctagtgggagagggttgaagtgatt

SEQ ID NO: 2010352 - DNA, 25 bp, Homo sapien
tagtgggagagggttgaagtgatta

SEQ ID NO: 2010353 - DNA, 25 bp, Homo sapien
agtgggagagggttgaagtgattac

SEQ ID NO: 2010354 - DNA, 25 bp, Homo sapien
gcagtaggcagccaagcctcgaggc

SEQ ID NO: 2010355 - DNA, 25 bp, Homo sapien
tgcagtaggcagccaagcctcgagg

SEQ ID NO: 2010356 - DNA, 25 bp, Homo sapien
agtaggcagccaagcctcgaggcgc

SEQ ID NO: 2010357 - DNA, 25 bp, Homo sapien
aggcagccaagcctcgaggcgccat

SEQ ID NO: 2010358 - DNA, 25 bp, Homo sapien
cagctaccttaaagacagtaggaga

SEQ ID NO: 2010359 - DNA, 25 bp, Homo sapien
gtaaattctttgtgtattataccac

SEQ ID NO: 2010360 - DNA, 25 bp, Homo sapien
gagccagctaccttaaagacagtag

SEQ ID NO: 2010361 - DNA, 25 bp, Homo sapien
gtgtaaattctttgtgtattatacc

SEQ ID NO: 2010362 - DNA, 25 bp, Homo sapien
gggctgcttgagaggtagctctcaa

SEQ ID NO: 2010363 - DNA, 25 bp, Homo sapien
aggtagctctcaagtagaagggtga

SEQ ID NO: 2010364 - DNA, 25 bp, Homo sapien
tgaccctctggtgcacggacaggtc

SEQ ID NO: 2010365 - DNA, 25 bp, Homo sapien
caggtcctggaactaccacgctgta

SEQ ID NO: 2010366 - DNA, 25 bp, Homo sapien
aactgccagtgtttgtattgcaatg

SEQ ID NO: 2010367 - DNA, 25 bp, Homo sapien
tctgtccaactgccagatagttttg

SEQ ID NO: 2010368 - DNA, 25 bp, Homo sapien
tttgtattgcaatggctccacagcc

SEQ ID NO: 2010369 - DNA, 25 bp, Homo sapien
gtcatctgtccaactgccagatagt

SEQ ID NO: 2010370 - DNA, 25 bp, Homo sapien
tgaggcacagaattactgctaacac

SEQ ID NO: 2010371 - DNA, 25 bp, Homo sapien
aactgaaaatatgaggcacagaatt

SEQ ID NO: 2010372 - DNA, 25 bp, Homo sapien
tgctcagaatgattggtgtcccctt

SEQ ID NO: 2010373 - DNA, 25 bp, Homo sapien
tcagtgcctttaaacttctgggaat

SEQ ID NO: 2010374 - DNA, 25 bp, Homo sapien
tccaggtgcattgcttggagtgaca

SEQ ID NO: 2010375 - DNA, 25 bp, Homo sapien
ggtatcgggcttgcctgtgctccac

SEQ ID NO: 2010376 - DNA, 25 bp, Homo sapien
tgcttggagtgacacactggtggtt

SEQ ID NO: 2010377 - DNA, 25 bp, Homo sapien
cctttgtgctttatccagctccagg

SEQ ID NO: 2010378 - DNA, 25 bp, Homo sapien
gcatttccacagacccgttgagtcc

SEQ ID NO: 2010379 - DNA, 25 bp, Homo sapien
ctatggcctttgtttgatgtctgca

SEQ ID NO: 2010380 - DNA, 25 bp, Homo sapien
tggcctttgtttgatgtctgcattt

SEQ ID NO: 2010381 - DNA, 25 bp, Homo sapien
cacagacccgttgagtccctgtggg

SEQ ID NO: 2010382 - DNA, 25 bp, Homo sapien
catgtgaggctcgtattccaggtct

SEQ ID NO: 2010383 - DNA, 25 bp, Homo sapien
cagcagttgtcatgggaagctggct

SEQ ID NO: 2010384 - DNA, 25 bp, Homo sapien
tactgggcggctctgtacgtgtgac

SEQ ID NO: 2010385 - DNA, 25 bp, Homo sapien
tccaggtcttatccttcagacattg

SEQ ID NO: 2010386 - DNA, 25 bp, Homo sapien
taatgtttttcagagcactatccaa

SEQ ID NO: 2010387 - DNA, 25 bp, Homo sapien
tatgtaatacatagttcacattcag

SEQ ID NO: 2010388 - DNA, 25 bp, Homo sapien
gagcactatccaaatgaggttcata

SEQ ID NO: 2010389 - DNA, 25 bp, Homo sapien
tatccactgccacataatgtttttc

SEQ ID NO: 2010390 - DNA, 25 bp, Homo sapien
cctggaggagcttcattgcgatatt

SEQ ID NO: 2010391 - DNA, 25 bp, Homo sapien
ggaggagcttcattgcgatattgaa

SEQ ID NO: 2010392 - DNA, 25 bp, Homo sapien
tttggatgttggaacctggaggagc

SEQ ID NO: 2010393 - DNA, 25 bp, Homo sapien
gagcttcattgcgatattgaatcat

SEQ ID NO: 2010394 - DNA, 25 bp, Homo sapien
cagctcatgggaatccgagatgcca

SEQ ID NO: 2010395 - DNA, 25 bp, Homo sapien
atccgagatgccatttgattcgtct

SEQ ID NO: 2010396 - DNA, 25 bp, Homo sapien
gagatgccatttgattcgtcttcca

SEQ ID NO: 2010397 - DNA, 25 bp, Homo sapien
gtagcagctcatgggaatccgagat

SEQ ID NO: 2010398 - DNA, 25 bp, Homo sapien
taggagaaaaggatcatgcatgaag

SEQ ID NO: 2010399 - DNA, 25 bp, Homo sapien
ctaggagaaaaggatcatgcatgaa

SEQ ID NO: 2010400 - DNA, 25 bp, Homo sapien
aagaagaagggaagcaaaaatgaag

SEQ ID NO: 2010401 - DNA, 25 bp, Homo sapien
aatgaagagagagctgaagacatca

SEQ ID NO: 2010402 - DNA, 25 bp, Homo sapien
taaagaagaagggaagcaaaaatga

SEQ ID NO: 2010403 - DNA, 25 bp, Homo sapien
aagaagggaagcaaaaatgaagaga

SEQ ID NO: 2010404 - DNA, 25 bp, Homo sapien
tcctcaaatagagaccagtctggat

SEQ ID NO: 2010405 - DNA, 25 bp, Homo sapien
tcaactgccgtgttcgtatctggat

SEQ ID NO: 2010406 - DNA, 25 bp, Homo sapien
gaggattctgtttagccagggctgt

SEQ ID NO: 2010407 - DNA, 25 bp, Homo sapien
tctggatgggaaactgcctgcggag

SEQ ID NO: 2010408 - DNA, 25 bp, Homo sapien
ctgctatagagttgctttcctccat

SEQ ID NO: 2010409 - DNA, 25 bp, Homo sapien
ctcctcctgcccatgtgtgtttgta

SEQ ID NO: 2010410 - DNA, 25 bp, Homo sapien
tcctcctgcccatgtgtgtttgtac

SEQ ID NO: 2010411 - DNA, 25 bp, Homo sapien
tgagactccagaagggccgttctgt

SEQ ID NO: 2010412 - DNA, 25 bp, Homo sapien
gtgagactccagaagggccgttctg

SEQ ID NO: 2010413 - DNA, 25 bp, Homo sapien
agtgagactccagaagggccgttct

SEQ ID NO: 2010414 - DNA, 25 bp, Homo sapien
gggtgtccactagagttgcactgtg

SEQ ID NO: 2010415 - DNA, 25 bp, Homo sapien
gcactgtggtccattatccaggacc

SEQ ID NO: 2010416 - DNA, 25 bp, Homo sapien
ggaccatgtgttgcgggacttctct

SEQ ID NO: 2010417 - DNA, 25 bp, Homo sapien
gtctctgaaacctctacaaccctgg

SEQ ID NO: 2010418 - DNA, 25 bp, Homo sapien
ggtggactgtgaatcattctgcagc

SEQ ID NO: 2010419 - DNA, 25 bp, Homo sapien
cagctggtggactgtgaatcattct

SEQ ID NO: 2010420 - DNA, 25 bp, Homo sapien
tgaatcattctgcagcaggaagcgc

SEQ ID NO: 2010421 - DNA, 25 bp, Homo sapien
gctggtggactgtgaatcattctgc

SEQ ID NO: 2010422 - DNA, 25 bp, Homo sapien
agatccaggtaaaattaatgcccca

SEQ ID NO: 2010423 - DNA, 25 bp, Homo sapien
tttttctgcaagtggtaacttgtag

SEQ ID NO: 2010424 - DNA, 25 bp, Homo sapien
tgtagtgagttgctactgggttttg

SEQ ID NO: 2010425 - DNA, 25 bp, Homo sapien
aattaatgccccatttttctgcaag

SEQ ID NO: 2010426 - DNA, 25 bp, Homo sapien
tatagcccaaatgcctagcaccata

SEQ ID NO: 2010427 - DNA, 25 bp, Homo sapien
tgtcaacagtatagcccaaatgcct

SEQ ID NO: 2010428 - DNA, 25 bp, Homo sapien
tctccacttgtcaacagtatagccc

SEQ ID NO: 2010429 - DNA, 25 bp, Homo sapien
aacagtatagcccaaatgcctagca

SEQ ID NO: 2010430 - DNA, 25 bp, Homo sapien
ggacctctatgatcacttcctactg

SEQ ID NO: 2010431 - DNA, 25 bp, Homo sapien
cctgttgggacctctatgatcactt

SEQ ID NO: 2010432 - DNA, 25 bp, Homo sapien
ggtggtgcaacttcataggattctg

SEQ ID NO: 2010433 - DNA, 25 bp, Homo sapien
gggttcttgtactcctcatggtggt

SEQ ID NO: 2010434 - DNA, 25 bp, Homo sapien
tggaaggccttttttctgtccattc

SEQ ID NO: 2010435 - DNA, 25 bp, Homo sapien
gccttttttctgtccattctcccac

SEQ ID NO: 2010436 - DNA, 25 bp, Homo sapien
agatgctgtttttgttttttgttgt

SEQ ID NO: 2010437 - DNA, 25 bp, Homo sapien
ttaacttggaagatgctgtttttgt

SEQ ID NO: 2010438 - DNA, 25 bp, Homo sapien
gactttttcgcatggttagggtcca

SEQ ID NO: 2010439 - DNA, 25 bp, Homo sapien
ctttttcgcatggttagggtccact

SEQ ID NO: 2010440 - DNA, 25 bp, Homo sapien
atgactttttcgcatggttagggtc

SEQ ID NO: 2010441 - DNA, 25 bp, Homo sapien
ctatgactttttcgcatggttaggg

SEQ ID NO: 2010442 - DNA, 25 bp, Homo sapien
ttcggtcctaactgctccagggcgg

SEQ ID NO: 2010443 - DNA, 25 bp, Homo sapien
tctgccttcggatgtttcgcaaagt

SEQ ID NO: 2010444 - DNA, 25 bp, Homo sapien
ggcgggcgttctgctcacgtagctg

SEQ ID NO: 2010445 - DNA, 25 bp, Homo sapien
gactctccggagaccttcggtccta

SEQ ID NO: 2010446 - DNA, 25 bp, Homo sapien
gatggcaggtagctctgaaaacatg

SEQ ID NO: 2010447 - DNA, 25 bp, Homo sapien
caaaggtaaggttctataggctcag

SEQ ID NO: 2010448 - DNA, 25 bp, Homo sapien
tataaccaggagaaaggttgatggc

SEQ ID NO: 2010449 - DNA, 25 bp, Homo sapien
taatacacgtgaagccaaactttgc

SEQ ID NO: 2010450 - DNA, 25 bp, Homo sapien
tatagacatgatacggtgatccagg

SEQ ID NO: 2010451 - DNA, 25 bp, Homo sapien
caatgtggtccagcaactaaggtaa

SEQ ID NO: 2010452 - DNA, 25 bp, Homo sapien
gccatatgtgatctgaagttctgag

SEQ ID NO: 2010453 - DNA, 25 bp, Homo sapien
tatcatagagggcaaaactttccat

SEQ ID NO: 2010454 - DNA, 25 bp, Homo sapien
aagtttaaagctgaacgtccttgtg

SEQ ID NO: 2010455 - DNA, 25 bp, Homo sapien
tacacactgtcggatattcaaaagc

SEQ ID NO: 2010456 - DNA, 25 bp, Homo sapien
cgtccttgtgtagttagtagctgct

SEQ ID NO: 2010457 - DNA, 25 bp, Homo sapien
catttgataggtggtggtccgttac

SEQ ID NO: 2010458 - DNA, 25 bp, Homo sapien
cctcggacagtaccagttaaggcca

SEQ ID NO: 2010459 - DNA, 25 bp, Homo sapien
tacaaatgtgtaggtagctcaaacc

SEQ ID NO: 2010460 - DNA, 25 bp, Homo sapien
taaagatctggataagctgagcgga

SEQ ID NO: 2010461 - DNA, 25 bp, Homo sapien
ggccagcgcctaagcacagtttttt

SEQ ID NO: 2010462 - DNA, 25 bp, Homo sapien
aaaattgagtccctataaaatgctc

SEQ ID NO: 2010463 - DNA, 25 bp, Homo sapien
ttgagtccctataaaatgctctgca

SEQ ID NO: 2010464 - DNA, 25 bp, Homo sapien
ggataaggaaaattgagtccctata

SEQ ID NO: 2010465 - DNA, 25 bp, Homo sapien
aatctttgggataaggaaaattgag

SEQ ID NO: 2010466 - DNA, 25 bp, Homo sapien
ttgaccgtgtaaattctaagggctc

SEQ ID NO: 2010467 - DNA, 25 bp, Homo sapien
tgtaaattctaagggctccaagctg

SEQ ID NO: 2010468 - DNA, 25 bp, Homo sapien
cgtgtaaattctaagggctccaagc

SEQ ID NO: 2010469 - DNA, 25 bp, Homo sapien
gcaatggggatgaatcagttttgac

SEQ ID NO: 2010470 - DNA, 25 bp, Homo sapien
tgttcatcacactaaaagtatggct

SEQ ID NO: 2010471 - DNA, 25 bp, Homo sapien
tctacttgggtgaacaacaacacaa

SEQ ID NO: 2010472 - DNA, 25 bp, Homo sapien
actgtgcccggttgtcttgataatt

SEQ ID NO: 2010473 - DNA, 25 bp, Homo sapien
tatatgctaccaactgaccaagaag

SEQ ID NO: 2010474 - DNA, 25 bp, Homo sapien
taatcaggaacgagtaccatgttgc

SEQ ID NO: 2010475 - DNA, 25 bp, Homo sapien
cccaaatggtgaatacatgctcctg

SEQ ID NO: 2010476 - DNA, 25 bp, Homo sapien
cttcttttggtaggactgacagtct

SEQ ID NO: 2010477 - DNA, 25 bp, Homo sapien
tgtaggttctcacagttcctgaggg

SEQ ID NO: 2010478 - DNA, 25 bp, Homo sapien
cattctcatcaagagtgaagttgta

SEQ ID NO: 2010479 - DNA, 25 bp, Homo sapien
catcaagagtgaagttgtaagggcc

SEQ ID NO: 2010480 - DNA, 25 bp, Homo sapien
tctcatcaagagtgaagttgtaagg

SEQ ID NO: 2010481 - DNA, 25 bp, Homo sapien
atgcattctcatcaagagtgaagtt

SEQ ID NO: 2010482 - DNA, 25 bp, Homo sapien
gcttcctaaatgagatcccgtttca

SEQ ID NO: 2010483 - DNA, 25 bp, Homo sapien
atgcttcctaaatgagatcccgttt

SEQ ID NO: 2010484 - DNA, 25 bp, Homo sapien
tttttgattggacacttatgcttcc

SEQ ID NO: 2010485 - DNA, 25 bp, Homo sapien
cagtttttgattggacacttatgct

SEQ ID NO: 2010486 - DNA, 25 bp, Homo sapien
gcattgctcattctaccagaagtcc

SEQ ID NO: 2010487 - DNA, 25 bp, Homo sapien
cattgctcattctaccagaagtcca

SEQ ID NO: 2010488 - DNA, 25 bp, Homo sapien
attgctcattctaccagaagtccac

SEQ ID NO: 2010489 - DNA, 25 bp, Homo sapien
ttgctcattctaccagaagtccaca

SEQ ID NO: 2010490 - DNA, 25 bp, Homo sapien
tgtactcttccagaacgaaaaactg

SEQ ID NO: 2010491 - DNA, 25 bp, Homo sapien
gaacggtggtcgtaaggtccatcag

SEQ ID NO: 2010492 - DNA, 25 bp, Homo sapien
caaagggtcggtcccagtgtactct

SEQ ID NO: 2010493 - DNA, 25 bp, Homo sapien
cttggtccgctgatgtgactgtggc

SEQ ID NO: 2010494 - DNA, 25 bp, Homo sapien
gacaggcagcaccggcatagttaat

SEQ ID NO: 2010495 - DNA, 25 bp, Homo sapien
ttaatcagaggagcaacatgatgga

SEQ ID NO: 2010496 - DNA, 25 bp, Homo sapien
tcagaggagcaacatgatggaaagg

SEQ ID NO: 2010497 - DNA, 25 bp, Homo sapien
aatcagaggagcaacatgatggaaa

SEQ ID NO: 2010498 - DNA, 25 bp, Homo sapien
cagcagcacagttacgtacatcttg

SEQ ID NO: 2010499 - DNA, 25 bp, Homo sapien
gcagcacagttacgtacatcttggg

SEQ ID NO: 2010500 - DNA, 25 bp, Homo sapien
agcagcacagttacgtacatcttgg

SEQ ID NO: 2010501 - DNA, 25 bp, Homo sapien
tgaggccttcgctttccgtgtgacc

SEQ ID NO: 2010502 - DNA, 25 bp, Homo sapien
gctgacgcttgagtgtgaggccttc

SEQ ID NO: 2010503 - DNA, 25 bp, Homo sapien
gacgtcttgtaagtgcgcaatgaaa

SEQ ID NO: 2010504 - DNA, 25 bp, Homo sapien
gaccttcatcttgatgtgggcctga

SEQ ID NO: 2010505 - DNA, 25 bp, Homo sapien
ctgtgatcccggcaggccgcaggtg

SEQ ID NO: 2010506 - DNA, 25 bp, Homo sapien
tccctgataagtatggaaaacagga

SEQ ID NO: 2010507 - DNA, 25 bp, Homo sapien
cttctccctgataagtatggaaaac

SEQ ID NO: 2010508 - DNA, 25 bp, Homo sapien
acaaaattcttctccctgataagta

SEQ ID NO: 2010509 - DNA, 25 bp, Homo sapien
aaattcttctccctgataagtatgg

SEQ ID NO: 2010510 - DNA, 25 bp, Homo sapien
ccagtggtgtcgtcgatggtaaaca

SEQ ID NO: 2010511 - DNA, 25 bp, Homo sapien
agtggccacataaggtccgtccagg

SEQ ID NO: 2010512 - DNA, 25 bp, Homo sapien
tccgtccaggaacttgggctcattg

SEQ ID NO: 2010513 - DNA, 25 bp, Homo sapien
ggcttgagcccttagagtatactgg

SEQ ID NO: 2010514 - DNA, 25 bp, Homo sapien
gctgtcacttggatgacggaggtac

SEQ ID NO: 2010515 - DNA, 25 bp, Homo sapien
ttttagagtccacagaaaaatatgg

SEQ ID NO: 2010516 - DNA, 25 bp, Homo sapien
caccaccctggcactgttgccgtag

SEQ ID NO: 2010517 - DNA, 25 bp, Homo sapien
atatggctggccctgaagaatgctg

SEQ ID NO: 2010518 - DNA, 25 bp, Homo sapien
gtttgctctcttaatcctaaagcta

SEQ ID NO: 2010519 - DNA, 25 bp, Homo sapien
ctggttaatacactccctggagagt

SEQ ID NO: 2010520 - DNA, 25 bp, Homo sapien
ctgtcagggcagtgctagtttgctc

SEQ ID NO: 2010521 - DNA, 25 bp, Homo sapien
taaagctaagagcagtcttctctgg

SEQ ID NO: 2010522 - DNA, 25 bp, Homo sapien
gttgtggtcccagctaatcctccaa

SEQ ID NO: 2010523 - DNA, 25 bp, Homo sapien
cttggcttggataatcacttcgtag

SEQ ID NO: 2010524 - DNA, 25 bp, Homo sapien
tccatgttcatgagcgctgtcctaa

SEQ ID NO: 2010525 - DNA, 25 bp, Homo sapien
tcacttcgtagtattctttggcttc

SEQ ID NO: 2010526 - DNA, 25 bp, Homo sapien
gtctgtgctctcttgggttaggtac

SEQ ID NO: 2010527 - DNA, 25 bp, Homo sapien
cccgaggtctgtgctctcttgggtt

SEQ ID NO: 2010528 - DNA, 25 bp, Homo sapien
tctgcaacgggtgcgtccctctggg

SEQ ID NO: 2010529 - DNA, 25 bp, Homo sapien
ctctgcaacgggtgcgtccctctgg

SEQ ID NO: 2010530 - DNA, 25 bp, Homo sapien
caggaaatcaagaggcagaagtcca

SEQ ID NO: 2010531 - DNA, 25 bp, Homo sapien
cctcatttgtcccattccactcatc

SEQ ID NO: 2010532 - DNA, 25 bp, Homo sapien
gttcccttagccaggaaatcaagag

SEQ ID NO: 2010533 - DNA, 25 bp, Homo sapien
ggaaatcaagaggcagaagtccatg

SEQ ID NO: 2010534 - DNA, 25 bp, Homo sapien
cttcactgccactcgttccattatg

SEQ ID NO: 2010535 - DNA, 25 bp, Homo sapien
gctgtcacttcatattcaaatctga

SEQ ID NO: 2010536 - DNA, 25 bp, Homo sapien
tccattatgcgtcctctatttttat

SEQ ID NO: 2010537 - DNA, 25 bp, Homo sapien
tgtcctgctgtcacttcatattcaa

SEQ ID NO: 2010538 - DNA, 25 bp, Homo sapien
tgttattttgtcaatcataatgtga

SEQ ID NO: 2010539 - DNA, 25 bp, Homo sapien
ttttgttattttgtcaatcataatg

SEQ ID NO: 2010540 - DNA, 25 bp, Homo sapien
attttgtcaatcataatgtgactga

SEQ ID NO: 2010541 - DNA, 25 bp, Homo sapien
tattttgtcaatcataatgtgactg

SEQ ID NO: 2010542 - DNA, 25 bp, Homo sapien
gacacgcattcttgataatccgtca

SEQ ID NO: 2010543 - DNA, 25 bp, Homo sapien
caggacacgcattcttgataatccg

SEQ ID NO: 2010544 - DNA, 25 bp, Homo sapien
aagccaggacacgcattcttgataa

SEQ ID NO: 2010545 - DNA, 25 bp, Homo sapien
gccaggacacgcattcttgataatc

SEQ ID NO: 2010546 - DNA, 25 bp, Homo sapien
tatgataccaacttggaaattggga

SEQ ID NO: 2010547 - DNA, 25 bp, Homo sapien
ggcaaacactctcccgacagtggag

SEQ ID NO: 2010548 - DNA, 25 bp, Homo sapien
gagctaattggagctgattccaaca

SEQ ID NO: 2010549 - DNA, 25 bp, Homo sapien
tgggatctgtgctaatgtcaaaggc

SEQ ID NO: 2010550 - DNA, 25 bp, Homo sapien
gttggacatttggtggggaggagcc

SEQ ID NO: 2010551 - DNA, 25 bp, Homo sapien
aaagcagccaggaagctcgaactgg

SEQ ID NO: 2010552 - DNA, 25 bp, Homo sapien
ccgcacctggctccgagggtcctag

SEQ ID NO: 2010553 - DNA, 25 bp, Homo sapien
gcacctggctccgagggtcctaggc

SEQ ID NO: 2010554 - DNA, 25 bp, Homo sapien
agcaatgacaggaaaattgattcgc

SEQ ID NO: 2010555 - DNA, 25 bp, Homo sapien
ctgaaaagcaatgacaggaaaattg

SEQ ID NO: 2010556 - DNA, 25 bp, Homo sapien
aaagcaatgacaggaaaattgattc

SEQ ID NO: 2010557 - DNA, 25 bp, Homo sapien
caatgacaggaaaattgattcgcca

SEQ ID NO: 2010558 - DNA, 25 bp, Homo sapien
aacgcatctctaggtgaggattggc

SEQ ID NO: 2010559 - DNA, 25 bp, Homo sapien
gggcccaagttcagaaaacgcatct

SEQ ID NO: 2010560 - DNA, 25 bp, Homo sapien
tgttgtgtcctgaaatgggcccaag

SEQ ID NO: 2010561 - DNA, 25 bp, Homo sapien
tctgtatggttgttccaatcgccac

SEQ ID NO: 2010562 - DNA, 25 bp, Homo sapien
catataaggaaaaggtgaaatctgt

SEQ ID NO: 2010563 - DNA, 25 bp, Homo sapien
aagggaagggaagattccagcatat

SEQ ID NO: 2010564 - DNA, 25 bp, Homo sapien
ggaagggaagattccagcatataag

SEQ ID NO: 2010565 - DNA, 25 bp, Homo sapien
gcatataaggaaaaggtgaaatctg

SEQ ID NO: 2010566 - DNA, 25 bp, Homo sapien
tgtggtgtcaacctgtccatcaact

SEQ ID NO: 2010567 - DNA, 25 bp, Homo sapien
cactttggttccagttggtgagaga

SEQ ID NO: 2010568 - DNA, 25 bp, Homo sapien
tcttcttgagcggaagcatcttggt

SEQ ID NO: 2010569 - DNA, 25 bp, Homo sapien
cacgcttcataggtttggcagctgc

SEQ ID NO: 2010570 - DNA, 25 bp, Homo sapien
tatgagcagaatcggcatcatgcag

SEQ ID NO: 2010571 - DNA, 25 bp, Homo sapien
tcggcatcatgcaggtacaaagctg

SEQ ID NO: 2010572 - DNA, 25 bp, Homo sapien
gcagaatcggcatcatgcaggtaca

SEQ ID NO: 2010573 - DNA, 25 bp, Homo sapien
ctcctatgagcagaatcggcatcat

SEQ ID NO: 2010574 - DNA, 25 bp, Homo sapien
catggattacgtacatcatttgcat

SEQ ID NO: 2010575 - DNA, 25 bp, Homo sapien
acatggattacgtacatcatttgca

SEQ ID NO: 2010576 - DNA, 25 bp, Homo sapien
tggattacgtacatcatttgcattt

SEQ ID NO: 2010577 - DNA, 25 bp, Homo sapien
aacatggattacgtacatcatttgc

SEQ ID NO: 2010578 - DNA, 25 bp, Homo sapien
tcatttccatagcaaggacagtgat

SEQ ID NO: 2010579 - DNA, 25 bp, Homo sapien
tcttcccggtctaggggtcttgctg

SEQ ID NO: 2010580 - DNA, 25 bp, Homo sapien
gggcacctgttgtaatgtcaacata

SEQ ID NO: 2010581 - DNA, 25 bp, Homo sapien
ggtcttgctgtcattagggcacctg

SEQ ID NO: 2010582 - DNA, 25 bp, Homo sapien
gactttgattgtgacaggaacactt

SEQ ID NO: 2010583 - DNA, 25 bp, Homo sapien
ggcgttctcacagacaaaagcttca

SEQ ID NO: 2010584 - DNA, 25 bp, Homo sapien
gcttcatagaatctggggaactctg

SEQ ID NO: 2010585 - DNA, 25 bp, Homo sapien
aacacttccaacctgggagggattg

SEQ ID NO: 2010586 - DNA, 25 bp, Homo sapien
ttgggcccagccctgtagacttgcc

SEQ ID NO: 2010587 - DNA, 25 bp, Homo sapien
agctaaagctaactctcacaatatg

SEQ ID NO: 2010588 - DNA, 25 bp, Homo sapien
cccagctgggcttgcttagtttgta

SEQ ID NO: 2010589 - DNA, 25 bp, Homo sapien
aatcctgctgtttaaaagccagctg

SEQ ID NO: 2010590 - DNA, 25 bp, Homo sapien
gagtaagttgcatgaagtctgtgga

SEQ ID NO: 2010591 - DNA, 25 bp, Homo sapien
gttgcatgaagtctgtggagaccat

SEQ ID NO: 2010592 - DNA, 25 bp, Homo sapien
catgaagtctgtggagaccatgatg

SEQ ID NO: 2010593 - DNA, 25 bp, Homo sapien
ttcaaaggagtaagttgcatgaagt

SEQ ID NO: 2010594 - DNA, 25 bp, Homo sapien
tagaaatgctgaccattgcgtgggt

SEQ ID NO: 2010595 - DNA, 25 bp, Homo sapien
ctcaggagccaagctgtagtagaaa

SEQ ID NO: 2010596 - DNA, 25 bp, Homo sapien
ccattgcgtgggtcatcttggtcca

SEQ ID NO: 2010597 - DNA, 25 bp, Homo sapien
ttggtccaccgcactcactgtctgg

SEQ ID NO: 2010598 - DNA, 25 bp, Homo sapien
tcatgactttttgttaccctttgct

SEQ ID NO: 2010599 - DNA, 25 bp, Homo sapien
tgtttgaaactaaaaccaggcgtgc

SEQ ID NO: 2010600 - DNA, 25 bp, Homo sapien
gagaatctcaagttttacagcagaa

SEQ ID NO: 2010601 - DNA, 25 bp, Homo sapien
tgaagggatgacttagaagaatgct

SEQ ID NO: 2010602 - DNA, 25 bp, Homo sapien
ctaagaggacaaagatgcaggcgag

SEQ ID NO: 2010603 - DNA, 25 bp, Homo sapien
gacctcctggttagaatccgtgctg

SEQ ID NO: 2010604 - DNA, 25 bp, Homo sapien
gggctgcccgctatctgctatcagg

SEQ ID NO: 2010605 - DNA, 25 bp, Homo sapien
gataggcaggtgaaagacactctgc

SEQ ID NO: 2010606 - DNA, 25 bp, Homo sapien
aagtcgaagctctgttccgagtccg

SEQ ID NO: 2010607 - DNA, 25 bp, Homo sapien
cggtgccgcctcatggacaaaatga

SEQ ID NO: 2010608 - DNA, 25 bp, Homo sapien
atgtatggttgtttccggtgccgcc

SEQ ID NO: 2010609 - DNA, 25 bp, Homo sapien
aacatatacgtctggagggagtcga

SEQ ID NO: 2010610 - DNA, 25 bp, Homo sapien
tagctgagaggagacacgagcactc

SEQ ID NO: 2010611 - DNA, 25 bp, Homo sapien
gacaaaggccttagcgaatggcaga

SEQ ID NO: 2010612 - DNA, 25 bp, Homo sapien
tggttggctgcaccttgtccgcgaa

SEQ ID NO: 2010613 - DNA, 25 bp, Homo sapien
gcacccgcggagaacgtctggattt

SEQ ID NO: 2010614 - DNA, 25 bp, Homo sapien
atactgtttccagcaagcgtgggcc

SEQ ID NO: 2010615 - DNA, 25 bp, Homo sapien
tttgctgttgtacctgaggacccag

SEQ ID NO: 2010616 - DNA, 25 bp, Homo sapien
gggtcacacgaatggaagtgtctct

SEQ ID NO: 2010617 - DNA, 25 bp, Homo sapien
tccatatgctctgcagtcaagcagg

SEQ ID NO: 2010618 - DNA, 25 bp, Homo sapien
taatcctgggggtagacaccaggcc

SEQ ID NO: 2010619 - DNA, 25 bp, Homo sapien
gttgatgaagctaatcctgggggta

SEQ ID NO: 2010620 - DNA, 25 bp, Homo sapien
ccagactgcgagtgcccctcggtag

SEQ ID NO: 2010621 - DNA, 25 bp, Homo sapien
gacaccaggccagactgcgagtgcc

SEQ ID NO: 2010622 - DNA, 25 bp, Homo sapien
catatgcttagatccatgtcggagt

SEQ ID NO: 2010623 - DNA, 25 bp, Homo sapien
tggctcgtggccttgagtttacaga

SEQ ID NO: 2010624 - DNA, 25 bp, Homo sapien
gaagactgtgactgaaaaccctaaa

SEQ ID NO: 2010625 - DNA, 25 bp, Homo sapien
tcaatgtcacagtgggtgccgtcag

SEQ ID NO: 2010626 - DNA, 25 bp, Homo sapien
tccttctgcggtgatgggctccact

SEQ ID NO: 2010627 - DNA, 25 bp, Homo sapien
tgatgggctccactgtagtggtgtt

SEQ ID NO: 2010628 - DNA, 25 bp, Homo sapien
atgggctccactgtagtggtgttgc

SEQ ID NO: 2010629 - DNA, 25 bp, Homo sapien
ttctggtccttctgcggtgatgggc

SEQ ID NO: 2010630 - DNA, 25 bp, Homo sapien
gccctctggtggccgaaagagagac

SEQ ID NO: 2010631 - DNA, 25 bp, Homo sapien
tctggtggccgaaagagagactgcc

SEQ ID NO: 2010632 - DNA, 25 bp, Homo sapien
cttgtccgcagatggaagcaaagca

SEQ ID NO: 2010633 - DNA, 25 bp, Homo sapien
ccgcagatggaagcaaagcaaaccc

SEQ ID NO: 2010634 - DNA, 25 bp, Homo sapien
cctgtggcccgtcttgcaggttccg

SEQ ID NO: 2010635 - DNA, 25 bp, Homo sapien
caaggacgcccctcggccaggtgtg

SEQ ID NO: 2010636 - DNA, 25 bp, Homo sapien
tgtgaacatctatgctggcttgttt

SEQ ID NO: 2010637 - DNA, 25 bp, Homo sapien
ttttaaaaagctaagcggctggcag

SEQ ID NO: 2010638 - DNA, 25 bp, Homo sapien
aatccatggtgttctgctgtgggaa

SEQ ID NO: 2010639 - DNA, 25 bp, Homo sapien
gatgtgaacacttatactgtttcag

SEQ ID NO: 2010640 - DNA, 25 bp, Homo sapien
caattttccagatgtgaacacttat

SEQ ID NO: 2010641 - DNA, 25 bp, Homo sapien
actgtttcagatttaatccatggtg

SEQ ID NO: 2010642 - DNA, 25 bp, Homo sapien
tacacattgcagacgtttttaccaa

SEQ ID NO: 2010643 - DNA, 25 bp, Homo sapien
tgaagcctgtatgggcatggcatac

SEQ ID NO: 2010644 - DNA, 25 bp, Homo sapien
aatgatgctgcgatgctgaactgtc

SEQ ID NO: 2010645 - DNA, 25 bp, Homo sapien
tcagctatccgatgtgcagggagta

SEQ ID NO: 2010646 - DNA, 25 bp, Homo sapien
gaagatgaacagctttgtcagattt

SEQ ID NO: 2010647 - DNA, 25 bp, Homo sapien
agatgaacagctttgtcagatttct

SEQ ID NO: 2010648 - DNA, 25 bp, Homo sapien
agaaaagaacggaagatgaacagct

SEQ ID NO: 2010649 - DNA, 25 bp, Homo sapien
gagaaaagaacggaagatgaacagc

SEQ ID NO: 2010650 - DNA, 25 bp, Homo sapien
tcaaggggcctctgagtcaatcacg

SEQ ID NO: 2010651 - DNA, 25 bp, Homo sapien
tctgagtcaatcacgatttttcctt

SEQ ID NO: 2010652 - DNA, 25 bp, Homo sapien
gtcaatcacgatttttccttctgca

SEQ ID NO: 2010653 - DNA, 25 bp, Homo sapien
gggcctctgagtcaatcacgatttt

SEQ ID NO: 2010654 - DNA, 25 bp, Homo sapien
gccagtttccaggagctttattggc

SEQ ID NO: 2010655 - DNA, 25 bp, Homo sapien
ctcaattaccctgagtgtgatggac

SEQ ID NO: 2010656 - DNA, 25 bp, Homo sapien
ggagtgaagcagattataagtcact

SEQ ID NO: 2010657 - DNA, 25 bp, Homo sapien
gcagattataagtcactcctgtgag

SEQ ID NO: 2010658 - DNA, 25 bp, Homo sapien
agaaaatggcagatgcaggaagatt

SEQ ID NO: 2010659 - DNA, 25 bp, Homo sapien
gatgcaggaagattggagtgaagca

SEQ ID NO: 2010660 - DNA, 25 bp, Homo sapien
agctgttggtagggaccaccctctt

SEQ ID NO: 2010661 - DNA, 25 bp, Homo sapien
gttctttcaaagatgacctcaattg

SEQ ID NO: 2010662 - DNA, 25 bp, Homo sapien
ccctcttttgcaggtggaaagggtg

SEQ ID NO: 2010663 - DNA, 25 bp, Homo sapien
ctttcaaagatgacctcaattggcc

SEQ ID NO: 2010664 - DNA, 25 bp, Homo sapien
tctgtcacaattcagggcactggaa

SEQ ID NO: 2010665 - DNA, 25 bp, Homo sapien
acatcaaggtgtcttaaggctcgaa

SEQ ID NO: 2010666 - DNA, 25 bp, Homo sapien
tgtaactgcctgaggagttcttcct

SEQ ID NO: 2010667 - DNA, 25 bp, Homo sapien
gcctgctgcacaaacaaagaccata

SEQ ID NO: 2010668 - DNA, 25 bp, Homo sapien
tgttctccatgtggtgaatgtagag

SEQ ID NO: 2010669 - DNA, 25 bp, Homo sapien
gtagaatcaatttaatacagaccat

SEQ ID NO: 2010670 - DNA, 25 bp, Homo sapien
tctccagagagttactggcaaatac

SEQ ID NO: 2010671 - DNA, 25 bp, Homo sapien
cacagataagacagatctccagaga

SEQ ID NO: 2010672 - DNA, 25 bp, Homo sapien
tttttaagcttcgttgtcttggtca

SEQ ID NO: 2010673 - DNA, 25 bp, Homo sapien
acctgcctcttattgttctccttcg

SEQ ID NO: 2010674 - DNA, 25 bp, Homo sapien
tggtcagttcatccaaagggcgggt

SEQ ID NO: 2010675 - DNA, 25 bp, Homo sapien
cactggtgttgtccagctgtggtca

SEQ ID NO: 2010676 - DNA, 25 bp, Homo sapien
ttttcaatgctcacgtttcctcctg

SEQ ID NO: 2010677 - DNA, 25 bp, Homo sapien
ccactctggcttctgagaactccag

SEQ ID NO: 2010678 - DNA, 25 bp, Homo sapien
cactctggcttctgagaactccagg

SEQ ID NO: 2010679 - DNA, 25 bp, Homo sapien
catcaaataaaacggaggaacaagt

SEQ ID NO: 2010680 - DNA, 25 bp, Homo sapien
ccgaagccttgcccagctatattta

SEQ ID NO: 2010681 - DNA, 25 bp, Homo sapien
atctcccactaaaatccgaagcctt

SEQ ID NO: 2010682 - DNA, 25 bp, Homo sapien
agccttgcccagctatatttagaac

SEQ ID NO: 2010683 - DNA, 25 bp, Homo sapien
gaagccttgcccagctatatttaga

SEQ ID NO: 2010684 - DNA, 25 bp, Homo sapien
ggagggatcgcttcctacgtcagga

SEQ ID NO: 2010685 - DNA, 25 bp, Homo sapien
gaaggagttcagcaagaagtcccct

SEQ ID NO: 2010686 - DNA, 25 bp, Homo sapien
tacactcatagcctgcagggatcgc

SEQ ID NO: 2010687 - DNA, 25 bp, Homo sapien
tagactgcacatacccttgaggcct

SEQ ID NO: 2010688 - DNA, 25 bp, Homo sapien
gcttcgcttctcaggggatgcaccc

SEQ ID NO: 2010689 - DNA, 25 bp, Homo sapien
gcctgagcttcgcttctcaggggat

SEQ ID NO: 2010690 - DNA, 25 bp, Homo sapien
gagcttcgcttctcaggggatgcac

SEQ ID NO: 2010691 - DNA, 25 bp, Homo sapien
ctgagcttcgcttctcaggggatgc

SEQ ID NO: 2010692 - DNA, 25 bp, Homo sapien
tgcaagaattccctcactaccacaa

SEQ ID NO: 2010693 - DNA, 25 bp, Homo sapien
ttcacacagttggaacaggaacaaa

SEQ ID NO: 2010694 - DNA, 25 bp, Homo sapien
taccagtgctaggttaactgggagg

SEQ ID NO: 2010695 - DNA, 25 bp, Homo sapien
gcttatggttcctcaggctatacag

SEQ ID NO: 2010696 - DNA, 25 bp, Homo sapien
taaacgacatcccagaaggtcactg

SEQ ID NO: 2010697 - DNA, 25 bp, Homo sapien
tatcttcaagtcctagcctccggtc

SEQ ID NO: 2010698 - DNA, 25 bp, Homo sapien
tctcctcccaaagggtatcttcaag

SEQ ID NO: 2010699 - DNA, 25 bp, Homo sapien
tccaaacgttgcaggtgtctcctcc

SEQ ID NO: 2010700 - DNA, 25 bp, Homo sapien
ttggagtctgttactcccattgagt

SEQ ID NO: 2010701 - DNA, 25 bp, Homo sapien
tggagtctgttactcccattgagtc

SEQ ID NO: 2010702 - DNA, 25 bp, Homo sapien
tatctcgagggccatcctgagcagc

SEQ ID NO: 2010703 - DNA, 25 bp, Homo sapien
agagtcaaaatagatggccagtgct

SEQ ID NO: 2010704 - DNA, 25 bp, Homo sapien
gagctctgaaaaccttatctcgagg

SEQ ID NO: 2010705 - DNA, 25 bp, Homo sapien
gcttcctcagaggtcccgcagtttt

SEQ ID NO: 2010706 - DNA, 25 bp, Homo sapien
gagctagcaacgtcagccagcttct

SEQ ID NO: 2010707 - DNA, 25 bp, Homo sapien
ctttgaagtggagctagcaacgtca

SEQ ID NO: 2010708 - DNA, 25 bp, Homo sapien
aagtggagctagcaacgtcagccag

SEQ ID NO: 2010709 - DNA, 25 bp, Homo sapien
tgaagtggagctagcaacgtcagcc

SEQ ID NO: 2010710 - DNA, 25 bp, Homo sapien
tccactgagctcagacagatctggt

SEQ ID NO: 2010711 - DNA, 25 bp, Homo sapien
gtctctgattgttcgcctccactga

SEQ ID NO: 2010712 - DNA, 25 bp, Homo sapien
cactgagctcagacagatctggtgc

SEQ ID NO: 2010713 - DNA, 25 bp, Homo sapien
tctgaggctgttattcagtcgagtc

SEQ ID NO: 2010714 - DNA, 25 bp, Homo sapien
ttcacaagagagacgcgtatccatc

SEQ ID NO: 2010715 - DNA, 25 bp, Homo sapien
catctgaagcaaaaagtccacgtac

SEQ ID NO: 2010716 - DNA, 25 bp, Homo sapien
cagaggtctccttactgtgtgacag

SEQ ID NO: 2010717 - DNA, 25 bp, Homo sapien
gaaggagcaccgttgaaatcagagg

SEQ ID NO: 2010718 - DNA, 25 bp, Homo sapien
gttgacagcaaaatcatgtggcagg

SEQ ID NO: 2010719 - DNA, 25 bp, Homo sapien
cagcaaaatcatgtggcagggagaa

SEQ ID NO: 2010720 - DNA, 25 bp, Homo sapien
tcagaacaattactgttgacagcaa

SEQ ID NO: 2010721 - DNA, 25 bp, Homo sapien
agaggctcagaacaattactgttga

SEQ ID NO: 2010722 - DNA, 25 bp, Homo sapien
gaaggctgtagccactccaaccaat

SEQ ID NO: 2010723 - DNA, 25 bp, Homo sapien
ttttcaaaggatgttccctgagagc

SEQ ID NO: 2010724 - DNA, 25 bp, Homo sapien
caccagggaatgactagggaaggct

SEQ ID NO: 2010725 - DNA, 25 bp, Homo sapien
agagccctaggagccaccagggaat

SEQ ID NO: 2010726 - DNA, 25 bp, Homo sapien
gcattttaggctcacactgcttgtc

SEQ ID NO: 2010727 - DNA, 25 bp, Homo sapien
tgctgacatgcacaagagaagtgtt

SEQ ID NO: 2010728 - DNA, 25 bp, Homo sapien
agttttcttggatctgggcatttta

SEQ ID NO: 2010729 - DNA, 25 bp, Homo sapien
ccccagggtaagagaggagtaatca

SEQ ID NO: 2010730 - DNA, 25 bp, Homo sapien
aaagccctataggtgcatcttgcct

SEQ ID NO: 2010731 - DNA, 25 bp, Homo sapien
ttcagatgacactactggtggtggc

SEQ ID NO: 2010732 - DNA, 25 bp, Homo sapien
ctgtagacttgatggggacacagcg

SEQ ID NO: 2010733 - DNA, 25 bp, Homo sapien
ggtcttgggaaagccctataggtgc

SEQ ID NO: 2010734 - DNA, 25 bp, Homo sapien
gagtaagcccaagcttgtctttgca

SEQ ID NO: 2010735 - DNA, 25 bp, Homo sapien
tgtttagaaattgtgctgcatgccc

SEQ ID NO: 2010736 - DNA, 25 bp, Homo sapien
caggtcccaagtgaaccatatacag

SEQ ID NO: 2010737 - DNA, 25 bp, Homo sapien
gaacaacttgttgcaccgtatacag

SEQ ID NO: 2010738 - DNA, 25 bp, Homo sapien
tagatggtgtcttagccagtcctga

SEQ ID NO: 2010739 - DNA, 25 bp, Homo sapien
tgtatgccaaactggtgtcttgtcc

SEQ ID NO: 2010740 - DNA, 25 bp, Homo sapien
tgccaaatattgacttcgtaaaggg

SEQ ID NO: 2010741 - DNA, 25 bp, Homo sapien
tacagataaatgagctgctgggctg

SEQ ID NO: 2010742 - DNA, 25 bp, Homo sapien
taaccatggaatgcaaggcctgttc

SEQ ID NO: 2010743 - DNA, 25 bp, Homo sapien
gcctcactcaacagtcatgggtgta

SEQ ID NO: 2010744 - DNA, 25 bp, Homo sapien
tcagtgcagacagactctagaatcc

SEQ ID NO: 2010745 - DNA, 25 bp, Homo sapien
tccgctctagagttggttgccacgt

SEQ ID NO: 2010746 - DNA, 25 bp, Homo sapien
gatgtagtggtgcttgaaatactca

SEQ ID NO: 2010747 - DNA, 25 bp, Homo sapien
gtgggagtgcttccctgtagctgtc

SEQ ID NO: 2010748 - DNA, 25 bp, Homo sapien
tccatgggatgtagggctagtagcc

SEQ ID NO: 2010749 - DNA, 25 bp, Homo sapien
gcagagtactgagggacctcttgaa

SEQ ID NO: 2010750 - DNA, 25 bp, Homo sapien
ttgttctgctactcttaacctttct

SEQ ID NO: 2010751 - DNA, 25 bp, Homo sapien
ggagagtgcttgcaggttctctgag

SEQ ID NO: 2010752 - DNA, 25 bp, Homo sapien
gatctgctatccctggttgggtctg

SEQ ID NO: 2010753 - DNA, 25 bp, Homo sapien
gcctgtgcctgactaagctcatttc

SEQ ID NO: 2010754 - DNA, 25 bp, Homo sapien
tgttgaagatttaagtagatggcct

SEQ ID NO: 2010755 - DNA, 25 bp, Homo sapien
gcaagccagctgaaataccagatga

SEQ ID NO: 2010756 - DNA, 25 bp, Homo sapien
gatggcctgtatcagaaagatgtgc

SEQ ID NO: 2010757 - DNA, 25 bp, Homo sapien
gatccaatataactaagtggctggc

SEQ ID NO: 2010758 - DNA, 25 bp, Homo sapien
tgacacatctgtcaccgggcattcc

SEQ ID NO: 2010759 - DNA, 25 bp, Homo sapien
tcaatgacacatctgtcaccgggca

SEQ ID NO: 2010760 - DNA, 25 bp, Homo sapien
ctaccagaggacaaaaagtcaatga

SEQ ID NO: 2010761 - DNA, 25 bp, Homo sapien
gaggacaaaaagtcaatgacacatc

SEQ ID NO: 2010762 - DNA, 25 bp, Homo sapien
tcaattggactacgcatgtatgcag

SEQ ID NO: 2010763 - DNA, 25 bp, Homo sapien
tagagctcgagccaatggaattctc

SEQ ID NO: 2010764 - DNA, 25 bp, Homo sapien
aaatacagcaaaccaggatgctcat

SEQ ID NO: 2010765 - DNA, 25 bp, Homo sapien
tatgcagcagttgtgtcctggaagg

SEQ ID NO: 2010766 - DNA, 25 bp, Homo sapien
tggttgtacatccaggctccttgag

SEQ ID NO: 2010767 - DNA, 25 bp, Homo sapien
tgagggtaggactcttgtttaccat

SEQ ID NO: 2010768 - DNA, 25 bp, Homo sapien
tctcatggttctctttatatggttc

SEQ ID NO: 2010769 - DNA, 25 bp, Homo sapien
tccttgagggtaggactcttgttta

SEQ ID NO: 2010770 - DNA, 25 bp, Homo sapien
gcctcccctcgtcttggtctctgtg

SEQ ID NO: 2010771 - DNA, 25 bp, Homo sapien
gtgtctgctgagtcctcacccttga

SEQ ID NO: 2010772 - DNA, 25 bp, Homo sapien
ctacccgtaaccaccctgggcactg

SEQ ID NO: 2010773 - DNA, 25 bp, Homo sapien
gtcctcacccttgacattgaaatgg

SEQ ID NO: 2010774 - DNA, 25 bp, Homo sapien
cttgggaccaccccctgctttagag

SEQ ID NO: 2010775 - DNA, 25 bp, Homo sapien
tgggaccaccccctgctttagagcg

SEQ ID NO: 2010776 - DNA, 25 bp, Homo sapien
ttgggaccaccccctgctttagagc

SEQ ID NO: 2010777 - DNA, 25 bp, Homo sapien
cacttgcccccctgaagtcttcaca

SEQ ID NO: 2010778 - DNA, 25 bp, Homo sapien
cccctgaagtcttcacaagccccac

SEQ ID NO: 2010779 - DNA, 25 bp, Homo sapien
ttgcccccctgaagtcttcacaagc

SEQ ID NO: 2010780 - DNA, 25 bp, Homo sapien
tacacttgcccccctgaagtcttca

SEQ ID NO: 2010781 - DNA, 25 bp, Homo sapien
gctttgtcagctgaagttcttttca

SEQ ID NO: 2010782 - DNA, 25 bp, Homo sapien
tgctcttcacctcttgctcttgctt

SEQ ID NO: 2010783 - DNA, 25 bp, Homo sapien
gctgaagttcttttcaggatggtca

SEQ ID NO: 2010784 - DNA, 25 bp, Homo sapien
tttttgaaagcctcttgctcttcac

SEQ ID NO: 2010785 - DNA, 25 bp, Homo sapien
aggccggcgatgtggagagttcagc

SEQ ID NO: 2010786 - DNA, 25 bp, Homo sapien
tgctgagtttatagtcagaattgta

SEQ ID NO: 2010787 - DNA, 25 bp, Homo sapien
ggtttatctgatgctgagtttatag

SEQ ID NO: 2010788 - DNA, 25 bp, Homo sapien
cagcctggtttacatacggttcacc

SEQ ID NO: 2010789 - DNA, 25 bp, Homo sapien
tgtgctggctacgaggaaaatgact

SEQ ID NO: 2010790 - DNA, 25 bp, Homo sapien
gggtaacttgttctgaatgcctgtg

SEQ ID NO: 2010791 - DNA, 25 bp, Homo sapien
ccgaaggccaacctctacagtgggt

SEQ ID NO: 2010792 - DNA, 25 bp, Homo sapien
gtaagtctacagcaacacccgaagg

SEQ ID NO: 2010793 - DNA, 25 bp, Homo sapien
gtgtagctgctcttgagacttggaa

SEQ ID NO: 2010794 - DNA, 25 bp, Homo sapien
tactgagcagtgtagctgctcttga

SEQ ID NO: 2010795 - DNA, 25 bp, Homo sapien
tgaactgatactgagcagtgtagct

SEQ ID NO: 2010796 - DNA, 25 bp, Homo sapien
cctgtggtctctgaactgatactga

SEQ ID NO: 2010797 - DNA, 25 bp, Homo sapien
cctgcaggatcagctgggggtggct

SEQ ID NO: 2010798 - DNA, 25 bp, Homo sapien
ttggtggcttcccagtgccctgcag

SEQ ID NO: 2010799 - DNA, 25 bp, Homo sapien
ccagtgccctgcaggatcagctggg

SEQ ID NO: 2010800 - DNA, 25 bp, Homo sapien
ttcccagtgccctgcaggatcagct

SEQ ID NO: 2010801 - DNA, 25 bp, Homo sapien
taaaacctgtacttattctaatgac

SEQ ID NO: 2010802 - DNA, 25 bp, Homo sapien
cctaaaacctgtacttattctaatg

SEQ ID NO: 2010803 - DNA, 25 bp, Homo sapien
ctaaaacctgtacttattctaatga

SEQ ID NO: 2010804 - DNA, 25 bp, Homo sapien
catcctacttagagagacatggtga

SEQ ID NO: 2010805 - DNA, 25 bp, Homo sapien
tgacttgactacatgcttccctgct

SEQ ID NO: 2010806 - DNA, 25 bp, Homo sapien
cactgttgcctttgtaatgcctgct

SEQ ID NO: 2010807 - DNA, 25 bp, Homo sapien
tcatcatgaaactgggaaccctaag

SEQ ID NO: 2010808 - DNA, 25 bp, Homo sapien
aaaatcagagtcaacaagcccaacg

SEQ ID NO: 2010809 - DNA, 25 bp, Homo sapien
tgtgggtgcaggaacgtaatatttc

SEQ ID NO: 2010810 - DNA, 25 bp, Homo sapien
ggtattcgtgataaatgtgggtgca

SEQ ID NO: 2010811 - DNA, 25 bp, Homo sapien
tctagcaaatcctagtgacactgtt

SEQ ID NO: 2010812 - DNA, 25 bp, Homo sapien
tctctttggagtgcggaggccacgt

SEQ ID NO: 2010813 - DNA, 25 bp, Homo sapien
attggatttgaccaccaaaagctcc

SEQ ID NO: 2010814 - DNA, 25 bp, Homo sapien
gaggccacgtcacagctgcaattgg

SEQ ID NO: 2010815 - DNA, 25 bp, Homo sapien
catcccgacacagcttctttataat

SEQ ID NO: 2010816 - DNA, 25 bp, Homo sapien
gcatcagacatgaagatttccatgc

SEQ ID NO: 2010817 - DNA, 25 bp, Homo sapien
cagcccagagtaagaaaataccacg

SEQ ID NO: 2010818 - DNA, 25 bp, Homo sapien
aaaataccacgtgggagatgaggac

SEQ ID NO: 2010819 - DNA, 25 bp, Homo sapien
gacaggcgtggtctcctctttcttc

SEQ ID NO: 2010820 - DNA, 25 bp, Homo sapien
tcttaatgatatggtgaaaacagca

SEQ ID NO: 2010821 - DNA, 25 bp, Homo sapien
ccattagagagtcatttcttaatga

SEQ ID NO: 2010822 - DNA, 25 bp, Homo sapien
ctggttttaccattagagagtcatt

SEQ ID NO: 2010823 - DNA, 25 bp, Homo sapien
gcatgaattttgttcatttggtcgg

SEQ ID NO: 2010824 - DNA, 25 bp, Homo sapien
tacaatcccacaacctgcagaatag

SEQ ID NO: 2010825 - DNA, 25 bp, Homo sapien
catacaatcccacaacctgcagaat

SEQ ID NO: 2010826 - DNA, 25 bp, Homo sapien
cttctgaaggctcggcatcgggata

SEQ ID NO: 2010827 - DNA, 25 bp, Homo sapien
gataccatgaaccactgccatacaa

SEQ ID NO: 2010828 - DNA, 25 bp, Homo sapien
ttctctttggtcagttcatgcgctg

SEQ ID NO: 2010829 - DNA, 25 bp, Homo sapien
tttggtcagttcatgcgctgttaaa

SEQ ID NO: 2010830 - DNA, 25 bp, Homo sapien
tctttggtcagttcatgcgctgtta

SEQ ID NO: 2010831 - DNA, 25 bp, Homo sapien
tctctttggtcagttcatgcgctgt

SEQ ID NO: 2010832 - DNA, 25 bp, Homo sapien
atgacaacagccgagttgtttgtgg

SEQ ID NO: 2010833 - DNA, 25 bp, Homo sapien
gtctgtgtgcctgttctatttgcac

SEQ ID NO: 2010834 - DNA, 25 bp, Homo sapien
tggatgagtctttcgatggctggaa

SEQ ID NO: 2010835 - DNA, 25 bp, Homo sapien
tcatttggtgcccatgtggatgaca

SEQ ID NO: 2010836 - DNA, 25 bp, Homo sapien
gcacccagtgtttactttccaaaga

SEQ ID NO: 2010837 - DNA, 25 bp, Homo sapien
caaagattccagagggttttcgtga

SEQ ID NO: 2010838 - DNA, 25 bp, Homo sapien
gatgctagcagacaagttgctttgt

SEQ ID NO: 2010839 - DNA, 25 bp, Homo sapien
tgtttgaagctaggatgcctctgga

SEQ ID NO: 2010840 - DNA, 25 bp, Homo sapien
cctgtgctggtatctgagtgtgttt

SEQ ID NO: 2010841 - DNA, 25 bp, Homo sapien
gcatctagatatgctctgggtttcc

SEQ ID NO: 2010842 - DNA, 25 bp, Homo sapien
gctgatgctcttcatgactgtgttt

SEQ ID NO: 2010843 - DNA, 25 bp, Homo sapien
tgaaaatgcatgcatctagatatgc

SEQ ID NO: 2010844 - DNA, 25 bp, Homo sapien
gaccaggctgcagtacgtataccaa

SEQ ID NO: 2010845 - DNA, 25 bp, Homo sapien
gatgactggatgaggctttacacca

SEQ ID NO: 2010846 - DNA, 25 bp, Homo sapien
aacagattggttgtataggcactca

SEQ ID NO: 2010847 - DNA, 25 bp, Homo sapien
cattggtgactctttgacaacacag

SEQ ID NO: 2010848 - DNA, 25 bp, Homo sapien
gatttcttggcctagatcacgtttg

SEQ ID NO: 2010849 - DNA, 25 bp, Homo sapien
tttgggtggttcttgatgtccatga

SEQ ID NO: 2010850 - DNA, 25 bp, Homo sapien
tagatcacgtttggctgctaaggcc

SEQ ID NO: 2010851 - DNA, 25 bp, Homo sapien
gactacgttcttcgtggagttgtga

SEQ ID NO: 2010852 - DNA, 25 bp, Homo sapien
cattgtaggatttaaagagggagac

SEQ ID NO: 2010853 - DNA, 25 bp, Homo sapien
ggtagagatgcttcttaatttacag

SEQ ID NO: 2010854 - DNA, 25 bp, Homo sapien
gggataaagttggtagagatgcttc

SEQ ID NO: 2010855 - DNA, 25 bp, Homo sapien
gaaatgcgcattagcctacaatggg

SEQ ID NO: 2010856 - DNA, 25 bp, Homo sapien
tttaatacacctactgacatcatag

SEQ ID NO: 2010857 - DNA, 25 bp, Homo sapien
cagcagagaccacagggcaacagat

SEQ ID NO: 2010858 - DNA, 25 bp, Homo sapien
gcagagaccacagggcaacagataa

SEQ ID NO: 2010859 - DNA, 25 bp, Homo sapien
ctagggccacccaggaggtggcctc

SEQ ID NO: 2010860 - DNA, 25 bp, Homo sapien
gagaccacagggcaacagataagat

SEQ ID NO: 2010861 - DNA, 25 bp, Homo sapien
cctcttgtttaaggcttcctgagtt

SEQ ID NO: 2010862 - DNA, 25 bp, Homo sapien
tcttgtttaaggcttcctgagtttg

SEQ ID NO: 2010863 - DNA, 25 bp, Homo sapien
ctgcctcttgtttaaggcttcctga

SEQ ID NO: 2010864 - DNA, 25 bp, Homo sapien
ctgagtttgtttggaaccgcccagg

SEQ ID NO: 2010865 - DNA, 25 bp, Homo sapien
aggcttcagtctagaggtggggtat

SEQ ID NO: 2010866 - DNA, 25 bp, Homo sapien
atttaggcttcagtctagaggtggg

SEQ ID NO: 2010867 - DNA, 25 bp, Homo sapien
ggcttcagtctagaggtggggtatc

SEQ ID NO: 2010868 - DNA, 25 bp, Homo sapien
tagatttaggcttcagtctagaggt

SEQ ID NO: 2010869 - DNA, 25 bp, Homo sapien
gtttccatagatgcctgctttctta

SEQ ID NO: 2010870 - DNA, 25 bp, Homo sapien
ctggtttcctttcatgggaattttg

SEQ ID NO: 2010871 - DNA, 25 bp, Homo sapien
catacacaggcagttgtatctgaat

SEQ ID NO: 2010872 - DNA, 25 bp, Homo sapien
tatctgaatgttaggtttccataga

SEQ ID NO: 2010873 - DNA, 25 bp, Homo sapien
aagaagccattggaggtaggtgcag

SEQ ID NO: 2010874 - DNA, 25 bp, Homo sapien
tgaagaagccattggaggtaggtgc

SEQ ID NO: 2010875 - DNA, 25 bp, Homo sapien
tttgaagaagccattggaggtaggt

SEQ ID NO: 2010876 - DNA, 25 bp, Homo sapien
gaatttgggattgtagaaatcccac

SEQ ID NO: 2010877 - DNA, 25 bp, Homo sapien
tgggtggtttctgcatcaacatcgt

SEQ ID NO: 2010878 - DNA, 25 bp, Homo sapien
tctgggtcatttgggccgacagtgc

SEQ ID NO: 2010879 - DNA, 25 bp, Homo sapien
cacgatctgggtagcgcctgggtgt

SEQ ID NO: 2010880 - DNA, 25 bp, Homo sapien
catttgggccgacagtgctggcaca

SEQ ID NO: 2010881 - DNA, 25 bp, Homo sapien
ttcctgcatgtatttcactgcaggc

SEQ ID NO: 2010882 - DNA, 25 bp, Homo sapien
cctgcatgtatttcactgcaggctg

SEQ ID NO: 2010883 - DNA, 25 bp, Homo sapien
ccttcctgcatgtatttcactgcag

SEQ ID NO: 2010884 - DNA, 25 bp, Homo sapien
gcatgtatttcactgcaggctgaag

SEQ ID NO: 2010885 - DNA, 25 bp, Homo sapien
ctagtaggcgctctgccaccagagg

SEQ ID NO: 2010886 - DNA, 25 bp, Homo sapien
tgctagtaggcgctctgccaccaga

SEQ ID NO: 2010887 - DNA, 25 bp, Homo sapien
tagtaggcgctctgccaccagaggg

SEQ ID NO: 2010888 - DNA, 25 bp, Homo sapien
tgttgctagtaggcgctctgccacc

SEQ ID NO: 2010889 - DNA, 25 bp, Homo sapien
ctgctccgatttctttctttcctag

SEQ ID NO: 2010890 - DNA, 25 bp, Homo sapien
tgctccgatttctttctttcctagg

SEQ ID NO: 2010891 - DNA, 25 bp, Homo sapien
tttgccccaagatgttattccccac

SEQ ID NO: 2010892 - DNA, 25 bp, Homo sapien
agtgtgtctttgccccaagatgtta

SEQ ID NO: 2010893 - DNA, 25 bp, Homo sapien
tctttgccccaagatgttattcccc

SEQ ID NO: 2010894 - DNA, 25 bp, Homo sapien
gtgtctttgccccaagatgttattc

SEQ ID NO: 2010895 - DNA, 25 bp, Homo sapien
ggtggtcccgggagttgcgtgtctc

SEQ ID NO: 2010896 - DNA, 25 bp, Homo sapien
aggtggtcccgggagttgcgtgtct

SEQ ID NO: 2010897 - DNA, 25 bp, Homo sapien
gggagcggcgctgtcggctgctcgg

SEQ ID NO: 2010898 - DNA, 25 bp, Homo sapien
gctgctcggccgagtcctcggatgc

SEQ ID NO: 2010899 - DNA, 25 bp, Homo sapien
cagggatgtctgcgcccctacggcg

SEQ ID NO: 2010900 - DNA, 25 bp, Homo sapien
gaaagggcagctgccgcctgctgta

SEQ ID NO: 2010901 - DNA, 25 bp, Homo sapien
gccgcctctgtagcgagcacccgag

SEQ ID NO: 2010902 - DNA, 25 bp, Homo sapien
gagtttcggtttgtttctctgctct

SEQ ID NO: 2010903 - DNA, 25 bp, Homo sapien
tgtccgaccgcgaacgcggagggcg

SEQ ID NO: 2010904 - DNA, 25 bp, Homo sapien
ttggtgccggagtctcagtgacaca

SEQ ID NO: 2010905 - DNA, 25 bp, Homo sapien
aaaaagctctcgctcggtgccgagc

SEQ ID NO: 2010906 - DNA, 25 bp, Homo sapien
agtctggctgaaaggagcgggcgcg

SEQ ID NO: 2010907 - DNA, 25 bp, Homo sapien
attcgggactgacggagagaagtcc

SEQ ID NO: 2010908 - DNA, 25 bp, Homo sapien
tgacggagagaagtcccgggcccgc

SEQ ID NO: 2010909 - DNA, 25 bp, Homo sapien
tgggcgattcgggactgacggagag

SEQ ID NO: 2010910 - DNA, 25 bp, Homo sapien
gggaggtgggcgattcgggactgac

SEQ ID NO: 2010911 - DNA, 25 bp, Homo sapien
gggcaaagccgagggagcgcgcgag

SEQ ID NO: 2010912 - DNA, 25 bp, Homo sapien
ggagcgcgcgagagagggtaggcag

SEQ ID NO: 2010913 - DNA, 25 bp, Homo sapien
cgagggagcgcgcgagagagggtag

SEQ ID NO: 2010914 - DNA, 25 bp, Homo sapien
aaagccgagggagcgcgcgagagag

SEQ ID NO: 2010915 - DNA, 25 bp, Homo sapien
tcaggtcccgcttttgcacggtaga

SEQ ID NO: 2010916 - DNA, 25 bp, Homo sapien
cgcttttgcacggtagagagacggc

SEQ ID NO: 2010917 - DNA, 25 bp, Homo sapien
ttttgcacggtagagagacggcgtc

SEQ ID NO: 2010918 - DNA, 25 bp, Homo sapien
ggtcccgcttttgcacggtagagag

SEQ ID NO: 2010919 - DNA, 25 bp, Homo sapien
ctaggcacagactgggcacccccca

SEQ ID NO: 2010920 - DNA, 25 bp, Homo sapien
ctgcccctcctcccggctgcccagg

SEQ ID NO: 2010921 - DNA, 25 bp, Homo sapien
ccctcctcccggctgcccaggcctc

SEQ ID NO: 2010922 - DNA, 25 bp, Homo sapien
tgcccctcctcccggctgcccaggc

SEQ ID NO: 2010923 - DNA, 25 bp, Homo sapien
ggtgtccattcgggcctctttggaa

SEQ ID NO: 2010924 - DNA, 25 bp, Homo sapien
cctggctggactacgtgaactttta

SEQ ID NO: 2010925 - DNA, 25 bp, Homo sapien
aaaagtatccggtgacgaggatgca

SEQ ID NO: 2010926 - DNA, 25 bp, Homo sapien
ccattcgagggattcaagtagtggg

SEQ ID NO: 2010927 - DNA, 25 bp, Homo sapien
tataacccctaggacttgcatctct

SEQ ID NO: 2010928 - DNA, 25 bp, Homo sapien
agcccctagatccaggtgcagcaga

SEQ ID NO: 2010929 - DNA, 25 bp, Homo sapien
ccttgagtttgaatgatgagggcag

SEQ ID NO: 2010930 - DNA, 25 bp, Homo sapien
gaaacagacgtttggattccttgag

SEQ ID NO: 2010931 - DNA, 25 bp, Homo sapien
agggtggactgacttgagcccctag

SEQ ID NO: 2010932 - DNA, 25 bp, Homo sapien
atttagaagtgttggccacaccttc

SEQ ID NO: 2010933 - DNA, 25 bp, Homo sapien
tacttgctcccttgaagcaaaaggt

SEQ ID NO: 2010934 - DNA, 25 bp, Homo sapien
caggacctcattacttgctcccttg

SEQ ID NO: 2010935 - DNA, 25 bp, Homo sapien
gaagtgttggccacaccttcacata

SEQ ID NO: 2010936 - DNA, 25 bp, Homo sapien
caaagagagtctaccaagcttctga

SEQ ID NO: 2010937 - DNA, 25 bp, Homo sapien
atctacccaaagagagtctaccaag

SEQ ID NO: 2010938 - DNA, 25 bp, Homo sapien
gagtctaccaagcttctgagccttc

SEQ ID NO: 2010939 - DNA, 25 bp, Homo sapien
tacccaaagagagtctaccaagctt

SEQ ID NO: 2010940 - DNA, 25 bp, Homo sapien
tccgcatttctaacaattgcttgaa

SEQ ID NO: 2010941 - DNA, 25 bp, Homo sapien
aacaattgcttgaaaaggcactgtt

SEQ ID NO: 2010942 - DNA, 25 bp, Homo sapien
cacattccgcatttctaacaattgc

SEQ ID NO: 2010943 - DNA, 25 bp, Homo sapien
gctcagccacattccgcatttctaa

SEQ ID NO: 2010944 - DNA, 25 bp, Homo sapien
gacttcatagactgggtcctcaatc

SEQ ID NO: 2010945 - DNA, 25 bp, Homo sapien
ttctggaatgtgaagtagcgaagcc

SEQ ID NO: 2010946 - DNA, 25 bp, Homo sapien
agtagcgaagccacttcttgttgcc

SEQ ID NO: 2010947 - DNA, 25 bp, Homo sapien
tatttaacctcaggctcatgttagg

SEQ ID NO: 2010948 - DNA, 25 bp, Homo sapien
cacagtgtaagtggtgatattggaa

SEQ ID NO: 2010949 - DNA, 25 bp, Homo sapien
tgtattgtggaacccagtgcttgca

SEQ ID NO: 2010950 - DNA, 25 bp, Homo sapien
ggaagtggatttgccctccattcgg

SEQ ID NO: 2010951 - DNA, 25 bp, Homo sapien
ggcagggtattccatgtattgtgga

SEQ ID NO: 2010952 - DNA, 25 bp, Homo sapien
gcttgtgtggcgagaggctcactca

SEQ ID NO: 2010953 - DNA, 25 bp, Homo sapien
tgagaggaggacctgttatccatcc

SEQ ID NO: 2010954 - DNA, 25 bp, Homo sapien
tctgagaccggagaataatgagagg

SEQ ID NO: 2010955 - DNA, 25 bp, Homo sapien
gctcactcaagggacctcttagttt

SEQ ID NO: 2010956 - DNA, 25 bp, Homo sapien
taagttagacataccaccacaggcc

SEQ ID NO: 2010957 - DNA, 25 bp, Homo sapien
tgtgacatccatgacctgatccagg

SEQ ID NO: 2010958 - DNA, 25 bp, Homo sapien
tctctgtgtgcaagtcctctgagtc

SEQ ID NO: 2010959 - DNA, 25 bp, Homo sapien
tcctgatccagatttggcgtaagtt

SEQ ID NO: 2010960 - DNA, 25 bp, Homo sapien
atcaccgtaagaggcagtggttgtg

SEQ ID NO: 2010961 - DNA, 25 bp, Homo sapien
taagaggcagtggttgtgctgctca

SEQ ID NO: 2010962 - DNA, 25 bp, Homo sapien
actaggcctttacgtccctgctttg

SEQ ID NO: 2010963 - DNA, 25 bp, Homo sapien
ggctttcatgtggacaggcccggcc

SEQ ID NO: 2010964 - DNA, 25 bp, Homo sapien
gggtgcacatccaacccacacaaga

SEQ ID NO: 2010965 - DNA, 25 bp, Homo sapien
gacccttctcaccacatttgactag

SEQ ID NO: 2010966 - DNA, 25 bp, Homo sapien
acaagaccagtctaagttctttgca

SEQ ID NO: 2010967 - DNA, 25 bp, Homo sapien
gataactgtgcctgcattgctaacc

SEQ ID NO: 2010968 - DNA, 25 bp, Homo sapien
ttaaaatattttttgatggagacag

SEQ ID NO: 2010969 - DNA, 25 bp, Homo sapien
ttctgtataagcatggttttttgtt

SEQ ID NO: 2010970 - DNA, 25 bp, Homo sapien
tcactcttgttcaggctagaatgca

SEQ ID NO: 2010971 - DNA, 25 bp, Homo sapien
gtttcactatgttttccaggcagca

SEQ ID NO: 2010972 - DNA, 25 bp, Homo sapien
gttatgctgtgtgctttcagtacta

SEQ ID NO: 2010973 - DNA, 25 bp, Homo sapien
ggcaatatctttgtagcattttccc

SEQ ID NO: 2010974 - DNA, 25 bp, Homo sapien
attaatgattgttatgctgtgtgct

SEQ ID NO: 2010975 - DNA, 25 bp, Homo sapien
ctttcagtactatggcaatatcttt

SEQ ID NO: 2010976 - DNA, 25 bp, Homo sapien
gacatataactgtgccattaaaaac

SEQ ID NO: 2010977 - DNA, 25 bp, Homo sapien
ctgcgacctttttacacttgttttg

SEQ ID NO: 2010978 - DNA, 25 bp, Homo sapien
ttttgacatataactgtgccattaa

SEQ ID NO: 2010979 - DNA, 25 bp, Homo sapien
cctcctgcgacctttttacacttgt

SEQ ID NO: 2010980 - DNA, 25 bp, Homo sapien
ccatgctatcatcttagagggccca

SEQ ID NO: 2010981 - DNA, 25 bp, Homo sapien
taaggctttaggaaaccgctgcagc

SEQ ID NO: 2010982 - DNA, 25 bp, Homo sapien
gaatcaagacttaggacatttgctg

SEQ ID NO: 2010983 - DNA, 25 bp, Homo sapien
gagggcccatgaataaaccttagag

SEQ ID NO: 2010984 - DNA, 25 bp, Homo sapien
tggacaactaagaagctatggtagc

SEQ ID NO: 2010985 - DNA, 25 bp, Homo sapien
gaaatctcatgcatcagttcatagc

SEQ ID NO: 2010986 - DNA, 25 bp, Homo sapien
ctatggtagcaaacagtgatgttga

SEQ ID NO: 2010987 - DNA, 25 bp, Homo sapien
gatggaatgagaatcatgaactttc

SEQ ID NO: 2010988 - DNA, 25 bp, Homo sapien
gttgagagcacctgcagcaatctgg

SEQ ID NO: 2010989 - DNA, 25 bp, Homo sapien
tctgtggaaaagcataggaaggcat

SEQ ID NO: 2010990 - DNA, 25 bp, Homo sapien
taagctttcctggtatgcgccctat

SEQ ID NO: 2010991 - DNA, 25 bp, Homo sapien
tcagtcaaccagctagatgcatgtg

SEQ ID NO: 2010992 - DNA, 25 bp, Homo sapien
tattcagggagaaccactattcaac

SEQ ID NO: 2010993 - DNA, 25 bp, Homo sapien
agtgtctcagtttgcagtattcagg

SEQ ID NO: 2010994 - DNA, 25 bp, Homo sapien
tctcaggagctggtaccaattttgg

SEQ ID NO: 2010995 - DNA, 25 bp, Homo sapien
tgtgccgtgacacccgggtaattat

SEQ ID NO: 2010996 - DNA, 25 bp, Homo sapien
tgaccacactttaacattcaagtct

SEQ ID NO: 2010997 - DNA, 25 bp, Homo sapien
taagatttttatatcacttctattc

SEQ ID NO: 2010998 - DNA, 25 bp, Homo sapien
gtacacagtacaagttttcttctaa

SEQ ID NO: 2010999 - DNA, 25 bp, Homo sapien
acatccagtacacagtacaagtttt

SEQ ID NO: 2011000 - DNA, 25 bp, Homo sapien
ctgactggttccgacgggccgcagc

SEQ ID NO: 2011001 - DNA, 25 bp, Homo sapien
agtacgctccaaggcaggagatccg

SEQ ID NO: 2011002 - DNA, 25 bp, Homo sapien
agtgtgggcgcctccctgactggtt

SEQ ID NO: 2011003 - DNA, 25 bp, Homo sapien
tcctgcctcccgacttagagacaag

SEQ ID NO: 2011004 - DNA, 25 bp, Homo sapien
tattgatcgcgcaacagctgagcag

SEQ ID NO: 2011005 - DNA, 25 bp, Homo sapien
cctggattggagaagtagtcgcgca

SEQ ID NO: 2011006 - DNA, 25 bp, Homo sapien
tcactgagaaatggattcacgccgc

SEQ ID NO: 2011007 - DNA, 25 bp, Homo sapien
taacagctcggtatgcagctccagg

SEQ ID NO: 2011008 - DNA, 25 bp, Homo sapien
agctgtcccccgcccgacgctgtac

SEQ ID NO: 2011009 - DNA, 25 bp, Homo sapien
gctgtcccccgcccgacgctgtact

SEQ ID NO: 2011010 - DNA, 25 bp, Homo sapien
tgtcccccgcccgacgctgtactcg

SEQ ID NO: 2011011 - DNA, 25 bp, Homo sapien
gcccgacgctgtactcggttcccga

SEQ ID NO: 2011012 - DNA, 25 bp, Homo sapien
cggagtgtgacaggctgcgtccact

SEQ ID NO: 2011013 - DNA, 25 bp, Homo sapien
taccctgccggagtgtgacaggctg

SEQ ID NO: 2011014 - DNA, 25 bp, Homo sapien
cccaaataccctgccggagtgtgac

SEQ ID NO: 2011015 - DNA, 25 bp, Homo sapien
gtacaatcccaaataccctgccgga

SEQ ID NO: 2011016 - DNA, 25 bp, Homo sapien
tggagtcccgtaatagccagtgaac

SEQ ID NO: 2011017 - DNA, 25 bp, Homo sapien
tacatctgacttttcggagacagca

SEQ ID NO: 2011018 - DNA, 25 bp, Homo sapien
caccagccaagggttggaagcaggc

SEQ ID NO: 2011019 - DNA, 25 bp, Homo sapien
gactgctggtagaacctgtctgcct

SEQ ID NO: 2011020 - DNA, 25 bp, Homo sapien
tgtcattaccacaatttttatcttg

SEQ ID NO: 2011021 - DNA, 25 bp, Homo sapien
tcagtgttcatcaatgtcattacca

SEQ ID NO: 2011022 - DNA, 25 bp, Homo sapien
tcaatgtcattaccacaatttttat

SEQ ID NO: 2011023 - DNA, 25 bp, Homo sapien
tgttcatcaatgtcattaccacaat

SEQ ID NO: 2011024 - DNA, 25 bp, Homo sapien
aaaactgatggtacaaatgtgagct

SEQ ID NO: 2011025 - DNA, 25 bp, Homo sapien
tgaaaaagttgcttcggacaggagg

SEQ ID NO: 2011026 - DNA, 25 bp, Homo sapien
taaactaagggagctcacaagcaca

SEQ ID NO: 2011027 - DNA, 25 bp, Homo sapien
cactgataggtggtttgaagtaaca

SEQ ID NO: 2011028 - DNA, 25 bp, Homo sapien
gaaaccctcatacatcactcttctt

SEQ ID NO: 2011029 - DNA, 25 bp, Homo sapien
ttttgtaaatgcacagagaaccacc

SEQ ID NO: 2011030 - DNA, 25 bp, Homo sapien
gaagctagacacataaggctacatg

SEQ ID NO: 2011031 - DNA, 25 bp, Homo sapien
gcatcataggagaatgggtagtgac

SEQ ID NO: 2011032 - DNA, 25 bp, Homo sapien
tggacaaagcgttctccaaagaaga

SEQ ID NO: 2011033 - DNA, 25 bp, Homo sapien
tgttaagggccatatctacatgata

SEQ ID NO: 2011034 - DNA, 25 bp, Homo sapien
tacgtgcaaatcaagtatctgttaa

SEQ ID NO: 2011035 - DNA, 25 bp, Homo sapien
gtgaaaacacaatctacacaatgga

SEQ ID NO: 2011036 - DNA, 25 bp, Homo sapien
ttcatctgtttccctgttaccatca

SEQ ID NO: 2011037 - DNA, 25 bp, Homo sapien
gaatatcttgcaaagtctaaagaat

SEQ ID NO: 2011038 - DNA, 25 bp, Homo sapien
agggtactaatgctcccagctcgat

SEQ ID NO: 2011039 - DNA, 25 bp, Homo sapien
tctaaagaatcaagggtactaatgc

SEQ ID NO: 2011040 - DNA, 25 bp, Homo sapien
tttgatggagctcaagatacccaac

SEQ ID NO: 2011041 - DNA, 25 bp, Homo sapien
tgatggagctcaagatacccaactg

SEQ ID NO: 2011042 - DNA, 25 bp, Homo sapien
cattttgatggagctcaagataccc

SEQ ID NO: 2011043 - DNA, 25 bp, Homo sapien
tggagctcaagatacccaactgatg

SEQ ID NO: 2011044 - DNA, 25 bp, Homo sapien
ttgtgaacgcatgcagcagagttga

SEQ ID NO: 2011045 - DNA, 25 bp, Homo sapien
aacgcatgcagcagagttgatttgc

SEQ ID NO: 2011046 - DNA, 25 bp, Homo sapien
cagcagagttgatttgcaagcaaac

SEQ ID NO: 2011047 - DNA, 25 bp, Homo sapien
gatttgcaagcaaactggtgaatgt

SEQ ID NO: 2011048 - DNA, 25 bp, Homo sapien
ctgcggcctttgtcaggttggctcg

SEQ ID NO: 2011049 - DNA, 25 bp, Homo sapien
tcggagggcctgaatggtctccttg

SEQ ID NO: 2011050 - DNA, 25 bp, Homo sapien
ctttgtcaggttggctcggagggcc

SEQ ID NO: 2011051 - DNA, 25 bp, Homo sapien
ggttggctcggagggcctgaatggt

SEQ ID NO: 2011052 - DNA, 25 bp, Homo sapien
ttcgttcctgtaaaggaacttcatg

SEQ ID NO: 2011053 - DNA, 25 bp, Homo sapien
tcgttcctgtaaaggaacttcatgt

SEQ ID NO: 2011054 - DNA, 25 bp, Homo sapien
ctgatcatcgttttcatctgaaaag

SEQ ID NO: 2011055 - DNA, 25 bp, Homo sapien
tctgaaaaggttattgatgtaagct

SEQ ID NO: 2011056 - DNA, 25 bp, Homo sapien
ttcattgactaagaagtttagagct

SEQ ID NO: 2011057 - DNA, 25 bp, Homo sapien
gatgtaagcttatagttattcttca

SEQ ID NO: 2011058 - DNA, 25 bp, Homo sapien
gcttataattggtgtaagggcctct

SEQ ID NO: 2011059 - DNA, 25 bp, Homo sapien
cactggccacatctacaagatcttt

SEQ ID NO: 2011060 - DNA, 25 bp, Homo sapien
tccaaaatcccggtagagttgcaat

SEQ ID NO: 2011061 - DNA, 25 bp, Homo sapien
caataagtctggaggttttggaatg

SEQ ID NO: 2011062 - DNA, 25 bp, Homo sapien
gaccatttctcactatttaacaaac

SEQ ID NO: 2011063 - DNA, 25 bp, Homo sapien
gatttgctccatcaatgaccatttc

SEQ ID NO: 2011064 - DNA, 25 bp, Homo sapien
tctgatttgctccatcaatgaccat

SEQ ID NO: 2011065 - DNA, 25 bp, Homo sapien
tatcttctaatttctgtactaacat

SEQ ID NO: 2011066 - DNA, 25 bp, Homo sapien
gaatagtggaatcagcttcatctga

SEQ ID NO: 2011067 - DNA, 25 bp, Homo sapien
ttaggtttatcaaaatgaactgtct

SEQ ID NO: 2011068 - DNA, 25 bp, Homo sapien
tttgtggggcaactgatccaaagga

SEQ ID NO: 2011069 - DNA, 25 bp, Homo sapien
catctgatattgaaagatggatgtc

SEQ ID NO: 2011070 - DNA, 25 bp, Homo sapien
cttgatggaatgcaggagacaattt

SEQ ID NO: 2011071 - DNA, 25 bp, Homo sapien
ttgatggaatgcaggagacaatttc

SEQ ID NO: 2011072 - DNA, 25 bp, Homo sapien
ctgctgacattcgacaaaaagagag

SEQ ID NO: 2011073 - DNA, 25 bp, Homo sapien
gacattcgacaaaaagagagtagtg

SEQ ID NO: 2011074 - DNA, 25 bp, Homo sapien
tatcctaaacgactatctgctgaca

SEQ ID NO: 2011075 - DNA, 25 bp, Homo sapien
ctcgtatcctaaacgactatctgct

SEQ ID NO: 2011076 - DNA, 25 bp, Homo sapien
cccagcattaacataacgctttttt

SEQ ID NO: 2011077 - DNA, 25 bp, Homo sapien
tagcacattgggaacaatgtgtggc

SEQ ID NO: 2011078 - DNA, 25 bp, Homo sapien
gccaatagcacattgggaacaatgt

SEQ ID NO: 2011079 - DNA, 25 bp, Homo sapien
tctttgccaatagcacattgggaac

SEQ ID NO: 2011080 - DNA, 25 bp, Homo sapien
ttactgggacgaaaatactttcatg

SEQ ID NO: 2011081 - DNA, 25 bp, Homo sapien
tactgggacgaaaatactttcatgt

SEQ ID NO: 2011082 - DNA, 25 bp, Homo sapien
aatgtttctggataactggatagcc

SEQ ID NO: 2011083 - DNA, 25 bp, Homo sapien
tggcatatggctagacatacagacc

SEQ ID NO: 2011084 - DNA, 25 bp, Homo sapien
aacccgaagaatctaggcccaactg

SEQ ID NO: 2011085 - DNA, 25 bp, Homo sapien
catttgcccatcaaaggatatggtc

SEQ ID NO: 2011086 - DNA, 25 bp, Homo sapien
gagtggtctgtttctgacagagcca

SEQ ID NO: 2011087 - DNA, 25 bp, Homo sapien
gaggtccagtaagtgaggaagaaaa

SEQ ID NO: 2011088 - DNA, 25 bp, Homo sapien
gataattgctagattgagactgccc

SEQ ID NO: 2011089 - DNA, 25 bp, Homo sapien
agagccagcaaggaacacgattagg

SEQ ID NO: 2011090 - DNA, 25 bp, Homo sapien
cactgggaatgagagacagagcata

SEQ ID NO: 2011091 - DNA, 25 bp, Homo sapien
tgatactcaccgaaaactgttaaga

SEQ ID NO: 2011092 - DNA, 25 bp, Homo sapien
gaggcaatgatactaatgagacgac

SEQ ID NO: 2011093 - DNA, 25 bp, Homo sapien
gatcctatatgttttccctagaggc

SEQ ID NO: 2011094 - DNA, 25 bp, Homo sapien
ttttgtacccttagcacttgaccca

SEQ ID NO: 2011095 - DNA, 25 bp, Homo sapien
tgaattgtctcagtatcagtagaaa

SEQ ID NO: 2011096 - DNA, 25 bp, Homo sapien
caagggcccactagcttttacacta

SEQ ID NO: 2011097 - DNA, 25 bp, Homo sapien
gacatgctgacaccgtaattttaat

SEQ ID NO: 2011098 - DNA, 25 bp, Homo sapien
ctggcctcttgatcaaattgaaaag

SEQ ID NO: 2011099 - DNA, 25 bp, Homo sapien
tacacaatatgagggggatcaactc

SEQ ID NO: 2011100 - DNA, 25 bp, Homo sapien
caggatgtagacatgctgtacacaa

SEQ ID NO: 2011101 - DNA, 25 bp, Homo sapien
tgtggagaagctgatctcgctcttt

SEQ ID NO: 2011102 - DNA, 25 bp, Homo sapien
gctacctatctggaacttgttgcac

SEQ ID NO: 2011103 - DNA, 25 bp, Homo sapien
catatacaggcagatgaagttgggc

SEQ ID NO: 2011104 - DNA, 25 bp, Homo sapien
tacaagggccttcctaatagagctt

SEQ ID NO: 2011105 - DNA, 25 bp, Homo sapien
gaagagccgttttctagtcaacaga

SEQ ID NO: 2011106 - DNA, 25 bp, Homo sapien
caacatgacgcgcaaatgccacaca

SEQ ID NO: 2011107 - DNA, 25 bp, Homo sapien
ccaacactgtggtaaaagttcagct

SEQ ID NO: 2011108 - DNA, 25 bp, Homo sapien
cgtgttggtccaacatgacgcgcaa

SEQ ID NO: 2011109 - DNA, 25 bp, Homo sapien
gttcagcttctacacgtgttggtcc

SEQ ID NO: 2011110 - DNA, 25 bp, Homo sapien
tctttgactggaaaaggagtatatt

SEQ ID NO: 2011111 - DNA, 25 bp, Homo sapien
cttcttcatagaatataaatctttc

SEQ ID NO: 2011112 - DNA, 25 bp, Homo sapien
tgactggaaaaggagtatatttgtt

SEQ ID NO: 2011113 - DNA, 25 bp, Homo sapien
ggttttgttcccatatgtcttcttc

SEQ ID NO: 2011114 - DNA, 25 bp, Homo sapien
aatgagggagtgagggagaacctaa

SEQ ID NO: 2011115 - DNA, 25 bp, Homo sapien
gtgagggagaacctaaatatgaggt

SEQ ID NO: 2011116 - DNA, 25 bp, Homo sapien
agaacctaaatatgaggttacaggg

SEQ ID NO: 2011117 - DNA, 25 bp, Homo sapien
agggagtgagggagaacctaaatat

SEQ ID NO: 2011118 - DNA, 25 bp, Homo sapien
taagaatgcaataaagcttcttcct

SEQ ID NO: 2011119 - DNA, 25 bp, Homo sapien
tcaccacaaatcctgttaagaatgc

SEQ ID NO: 2011120 - DNA, 25 bp, Homo sapien
agagaattacatttcaccacaaatc

SEQ ID NO: 2011121 - DNA, 25 bp, Homo sapien
tctgggaatccctgtttgactatac

SEQ ID NO: 2011122 - DNA, 25 bp, Homo sapien
caagcagtcgtctttctgggtattt

SEQ ID NO: 2011123 - DNA, 25 bp, Homo sapien
aggtaaggtgccagtgctccacagg

SEQ ID NO: 2011124 - DNA, 25 bp, Homo sapien
aggaaggtaaggtgccagtgctcca

SEQ ID NO: 2011125 - DNA, 25 bp, Homo sapien
ctccacaggattctgccacaagcag

SEQ ID NO: 2011126 - DNA, 25 bp, Homo sapien
caaatctgccttatcttccattaac

SEQ ID NO: 2011127 - DNA, 25 bp, Homo sapien
aagaaccaaggagctacggatttct

SEQ ID NO: 2011128 - DNA, 25 bp, Homo sapien
taccaaatctgccttatcttccatt

SEQ ID NO: 2011129 - DNA, 25 bp, Homo sapien
ggatcatcaatgtatcccataatga

SEQ ID NO: 2011130 - DNA, 25 bp, Homo sapien
agcactaactactctttctgaggga

SEQ ID NO: 2011131 - DNA, 25 bp, Homo sapien
cagcgtaagctggtaaaaatacttg

SEQ ID NO: 2011132 - DNA, 25 bp, Homo sapien
tctgagggatcacccaaggctgaca

SEQ ID NO: 2011133 - DNA, 25 bp, Homo sapien
caagttctgtagtccacgcagcgta

SEQ ID NO: 2011134 - DNA, 25 bp, Homo sapien
atgggatcaaggactgcaaggcaga

SEQ ID NO: 2011135 - DNA, 25 bp, Homo sapien
tgtggcacttcaccatgaagcttgg

SEQ ID NO: 2011136 - DNA, 25 bp, Homo sapien
gagaaaggtgcattctgtagcacta

SEQ ID NO: 2011137 - DNA, 25 bp, Homo sapien
tagcactaatgcaaagagagatggg

SEQ ID NO: 2011138 - DNA, 25 bp, Homo sapien
ttgaagaggcgacataggccgagga

SEQ ID NO: 2011139 - DNA, 25 bp, Homo sapien
gcgacataggccgaggaaacctagt

SEQ ID NO: 2011140 - DNA, 25 bp, Homo sapien
gacataggccgaggaaacctagtca

SEQ ID NO: 2011141 - DNA, 25 bp, Homo sapien
agaggcgacataggccgaggaaacc

SEQ ID NO: 2011142 - DNA, 25 bp, Homo sapien
actgccaattgctcacgacttccga

SEQ ID NO: 2011143 - DNA, 25 bp, Homo sapien
tctcccagcctgttgtaccctcttg

SEQ ID NO: 2011144 - DNA, 25 bp, Homo sapien
tctagctggtagtcataaagttgca

SEQ ID NO: 2011145 - DNA, 25 bp, Homo sapien
cacgacttccgataatagtggacac

SEQ ID NO: 2011146 - DNA, 25 bp, Homo sapien
caaatgtccggcaaaggcgccagaa

SEQ ID NO: 2011147 - DNA, 25 bp, Homo sapien
aatgtccggcaaaggcgccagaaaa

SEQ ID NO: 2011148 - DNA, 25 bp, Homo sapien
ttttgccaaatgtccggcaaaggcg

SEQ ID NO: 2011149 - DNA, 25 bp, Homo sapien
gcaaaggcgccagaaaaatctggag

SEQ ID NO: 2011150 - DNA, 25 bp, Homo sapien
tcagatagtcttaaaatctcctgga

SEQ ID NO: 2011151 - DNA, 25 bp, Homo sapien
tgttttcttcagatagtcttaaaat

SEQ ID NO: 2011152 - DNA, 25 bp, Homo sapien
ttcagatagtcttaaaatctcctgg

SEQ ID NO: 2011153 - DNA, 25 bp, Homo sapien
ttcttcagatagtcttaaaatctcc

SEQ ID NO: 2011154 - DNA, 25 bp, Homo sapien
taacccaaatgagatggtatactct

SEQ ID NO: 2011155 - DNA, 25 bp, Homo sapien
gagccactagcataaacatttctga

SEQ ID NO: 2011156 - DNA, 25 bp, Homo sapien
tactaggttacaagtaagtattatc

SEQ ID NO: 2011157 - DNA, 25 bp, Homo sapien
taagcgtccctataggcaggttgtc

SEQ ID NO: 2011158 - DNA, 25 bp, Homo sapien
ctgtagctttagtgaggaccccatt

SEQ ID NO: 2011159 - DNA, 25 bp, Homo sapien
gcataaatggggactgtagctttag

SEQ ID NO: 2011160 - DNA, 25 bp, Homo sapien
gtaaggactcctgttgcataaatgg

SEQ ID NO: 2011161 - DNA, 25 bp, Homo sapien
tgaatataacacgtaaggactcctg

SEQ ID NO: 2011162 - DNA, 25 bp, Homo sapien
cttcaggctatgtgtataatgtgta

SEQ ID NO: 2011163 - DNA, 25 bp, Homo sapien
tgtataatgtgtatatgaaacacat

SEQ ID NO: 2011164 - DNA, 25 bp, Homo sapien
ttgggtcccattcccaagatatctc

SEQ ID NO: 2011165 - DNA, 25 bp, Homo sapien
acacattttgtgtttagacttgggt

SEQ ID NO: 2011166 - DNA, 25 bp, Homo sapien
tcttctaagaatccaactaacagtt

SEQ ID NO: 2011167 - DNA, 25 bp, Homo sapien
agcagcgtcattacatcttctaaga

SEQ ID NO: 2011168 - DNA, 25 bp, Homo sapien
tcaggctatcaagaggagcatgaga

SEQ ID NO: 2011169 - DNA, 25 bp, Homo sapien
cccaattccacaaaagaagccttca

SEQ ID NO: 2011170 - DNA, 25 bp, Homo sapien
tagcagcagtacacctcacgagtgc

SEQ ID NO: 2011171 - DNA, 25 bp, Homo sapien
taatagtaactcatggtaggctggg

SEQ ID NO: 2011172 - DNA, 25 bp, Homo sapien
tcacgagtgctgaagtatggacaac

SEQ ID NO: 2011173 - DNA, 25 bp, Homo sapien
tatggacaacaccataccacaaaac

SEQ ID NO: 2011174 - DNA, 25 bp, Homo sapien
aaactaaggtacagagaggctcaac

SEQ ID NO: 2011175 - DNA, 25 bp, Homo sapien
ccaaggcagcctagatttattgcaa

SEQ ID NO: 2011176 - DNA, 25 bp, Homo sapien
tctcttttgcaactctatgggcagt

SEQ ID NO: 2011177 - DNA, 25 bp, Homo sapien
cattcaaggaaccagtaagctgaga

SEQ ID NO: 2011178 - DNA, 25 bp, Homo sapien
ctgataacttttactgacatgctca

SEQ ID NO: 2011179 - DNA, 25 bp, Homo sapien
tagtctctcaaacaagatccagaag

SEQ ID NO: 2011180 - DNA, 25 bp, Homo sapien
agttcatcaacaacctgagaggaca

SEQ ID NO: 2011181 - DNA, 25 bp, Homo sapien
tttttagggtaagcaggcataattc

SEQ ID NO: 2011182 - DNA, 25 bp, Homo sapien
cctggtatatgtatgcctcattttc

SEQ ID NO: 2011183 - DNA, 25 bp, Homo sapien
attaggttcctggtatatgtatgcc

SEQ ID NO: 2011184 - DNA, 25 bp, Homo sapien
cctattaggttcctggtatatgtat

SEQ ID NO: 2011185 - DNA, 25 bp, Homo sapien
ggttcctggtatatgtatgcctcat

SEQ ID NO: 2011186 - DNA, 25 bp, Homo sapien
tgagttcaaccgagaagggcaatcc

SEQ ID NO: 2011187 - DNA, 25 bp, Homo sapien
ggcaatccccttctcaatttcagaa

SEQ ID NO: 2011188 - DNA, 25 bp, Homo sapien
aatacaagagaacaatactgagccg

SEQ ID NO: 2011189 - DNA, 25 bp, Homo sapien
tagtacttagtcctcacagaagatc

SEQ ID NO: 2011190 - DNA, 25 bp, Homo sapien
tgagagcaggaacaaccctctgagc

SEQ ID NO: 2011191 - DNA, 25 bp, Homo sapien
tgagctaccagagtttcattcaccc

SEQ ID NO: 2011192 - DNA, 25 bp, Homo sapien
gagctaccagagtttcattcacccc

SEQ ID NO: 2011193 - DNA, 25 bp, Homo sapien
tcagggtcactggagagagtaatga

SEQ ID NO: 2011194 - DNA, 25 bp, Homo sapien
aactgggttagctgtgactgaggat

SEQ ID NO: 2011195 - DNA, 25 bp, Homo sapien
aactggaataagaactgggttagct

SEQ ID NO: 2011196 - DNA, 25 bp, Homo sapien
ctgtaaaccagtcaacatgcaataa

SEQ ID NO: 2011197 - DNA, 25 bp, Homo sapien
gtaaaccagtcaacatgcaataaaa

SEQ ID NO: 2011198 - DNA, 25 bp, Homo sapien
tcactggacaaggtaacaagggccg

SEQ ID NO: 2011199 - DNA, 25 bp, Homo sapien
acaagggccggagcaacccgcttgt

SEQ ID NO: 2011200 - DNA, 25 bp, Homo sapien
cttcactcatgcctcgaagagtcag

SEQ ID NO: 2011201 - DNA, 25 bp, Homo sapien
tgtcaactaacgcttcactcatgcc

SEQ ID NO: 2011202 - DNA, 25 bp, Homo sapien
ccaaaggctggaattgtggcaatcc

SEQ ID NO: 2011203 - DNA, 25 bp, Homo sapien
caaaggctggaattgtggcaatcct

SEQ ID NO: 2011204 - DNA, 25 bp, Homo sapien
tttcttttgggtaatatgtccacaa

SEQ ID NO: 2011205 - DNA, 25 bp, Homo sapien
acaaataatatatgtgctaatctac

SEQ ID NO: 2011206 - DNA, 25 bp, Homo sapien
taaggacatatccaatataataaca

SEQ ID NO: 2011207 - DNA, 25 bp, Homo sapien
caccagtgaaatatataagtgaaaa

SEQ ID NO: 2011208 - DNA, 25 bp, Homo sapien
gaatgttggtcttgatactgaggat

SEQ ID NO: 2011209 - DNA, 25 bp, Homo sapien
ctgggttctgcgttagggccaactc

SEQ ID NO: 2011210 - DNA, 25 bp, Homo sapien
ttatgatctctgtatgcaaagaatg

SEQ ID NO: 2011211 - DNA, 25 bp, Homo sapien
ggtcttgatactgaggatcttccag

SEQ ID NO: 2011212 - DNA, 25 bp, Homo sapien
ataggtaggtatctattctacaata

SEQ ID NO: 2011213 - DNA, 25 bp, Homo sapien
aggtaggtatctattctacaataaa

SEQ ID NO: 2011214 - DNA, 25 bp, Homo sapien
gataggtaggtatctattctacaat

SEQ ID NO: 2011215 - DNA, 25 bp, Homo sapien
taggtaggtatctattctacaataa

SEQ ID NO: 2011216 - DNA, 25 bp, Homo sapien
accaaaggtcctgtgataactaaca

SEQ ID NO: 2011217 - DNA, 25 bp, Homo sapien
caaaggtcctgtgataactaacaat

SEQ ID NO: 2011218 - DNA, 25 bp, Homo sapien
ccaaaggtcctgtgataactaacaa

SEQ ID NO: 2011219 - DNA, 25 bp, Homo sapien
ggaaaattgccacttcagaaaatct

SEQ ID NO: 2011220 - DNA, 25 bp, Homo sapien
aaatctccaatgtacgactgaacat

SEQ ID NO: 2011221 - DNA, 25 bp, Homo sapien
caactctacggtgttccagataaaa

SEQ ID NO: 2011222 - DNA, 25 bp, Homo sapien
tgggcccagacctcaaacaagaaac

SEQ ID NO: 2011223 - DNA, 25 bp, Homo sapien
ctctgcctcagaaacaacaaacaaa

SEQ ID NO: 2011224 - DNA, 25 bp, Homo sapien
caaacaaaaaactgtatatcagaaa

SEQ ID NO: 2011225 - DNA, 25 bp, Homo sapien
aagactctgcctcagaaacaacaaa

SEQ ID NO: 2011226 - DNA, 25 bp, Homo sapien
caaaaaactgtatatcagaaaacgt

SEQ ID NO: 2011227 - DNA, 25 bp, Homo sapien
cccgagttgatggactacagatacg

SEQ ID NO: 2011228 - DNA, 25 bp, Homo sapien
agttaacccctcagatgtagacaga

SEQ ID NO: 2011229 - DNA, 25 bp, Homo sapien
gacagatggttaaaagcagtaggag

SEQ ID NO: 2011230 - DNA, 25 bp, Homo sapien
tagacaggctaattctaaaactgac

SEQ ID NO: 2011231 - DNA, 25 bp, Homo sapien
gttgaggatcacaaaacgccaccca

SEQ ID NO: 2011232 - DNA, 25 bp, Homo sapien
tgctgaccaactgtagtgacccctt

SEQ ID NO: 2011233 - DNA, 25 bp, Homo sapien
tgaggagctctagaacaaattagga

SEQ ID NO: 2011234 - DNA, 25 bp, Homo sapien
tcattaattggcacgctgaggcctc

SEQ ID NO: 2011235 - DNA, 25 bp, Homo sapien
tgtccagtcttttagaatccacaat

SEQ ID NO: 2011236 - DNA, 25 bp, Homo sapien
tctgtaagttgttcaccaaggctaa

SEQ ID NO: 2011237 - DNA, 25 bp, Homo sapien
caaaaagatgcgtagcaatgtccag

SEQ ID NO: 2011238 - DNA, 25 bp, Homo sapien
caaggctaacttatgcaaatgtggt

SEQ ID NO: 2011239 - DNA, 25 bp, Homo sapien
cactctaagattggttacataaatg

SEQ ID NO: 2011240 - DNA, 25 bp, Homo sapien
caagttccactctaagattggttac

SEQ ID NO: 2011241 - DNA, 25 bp, Homo sapien
tccactctaagattggttacataaa

SEQ ID NO: 2011242 - DNA, 25 bp, Homo sapien
gttccactctaagattggttacata

SEQ ID NO: 2011243 - DNA, 25 bp, Homo sapien
ctgagaccaggtaaaaagtgattaa

SEQ ID NO: 2011244 - DNA, 25 bp, Homo sapien
gtgattaaccattaaatcctctgaa

SEQ ID NO: 2011245 - DNA, 25 bp, Homo sapien
tgagaccaggtaaaaagtgattaac

SEQ ID NO: 2011246 - DNA, 25 bp, Homo sapien
aaagtgattaaccattaaatcctct

SEQ ID NO: 2011247 - DNA, 25 bp, Homo sapien
atgttccatgtcagtccgtaaacat

SEQ ID NO: 2011248 - DNA, 25 bp, Homo sapien
ctcttggacggtcttgttttcaact

SEQ ID NO: 2011249 - DNA, 25 bp, Homo sapien
ccttgaggctcttggacggtcttgt

SEQ ID NO: 2011250 - DNA, 25 bp, Homo sapien
ggctcttggacggtcttgttttcaa

SEQ ID NO: 2011251 - DNA, 25 bp, Homo sapien
tgaggctcttggacggtcttgtttt

SEQ ID NO: 2011252 - DNA, 25 bp, Homo sapien
gaagactgcttccattctaagaggc

SEQ ID NO: 2011253 - DNA, 25 bp, Homo sapien
tgtgactagaacattcccaagttga

SEQ ID NO: 2011254 - DNA, 25 bp, Homo sapien
tttcagtaagagtacgtacagctca

SEQ ID NO: 2011255 - DNA, 25 bp, Homo sapien
tagagtccacttaagatgctcaagg

SEQ ID NO: 2011256 - DNA, 25 bp, Homo sapien
gcctttaattaccacccatatgctg

SEQ ID NO: 2011257 - DNA, 25 bp, Homo sapien
tgcagatccctaggcctaatccagt

SEQ ID NO: 2011258 - DNA, 25 bp, Homo sapien
gaggcccaggtctatactacaaagc

SEQ ID NO: 2011259 - DNA, 25 bp, Homo sapien
tggtgtctaattccatgcctggtca

SEQ ID NO: 2011260 - DNA, 25 bp, Homo sapien
tgcttacataccacctacaagatga

SEQ ID NO: 2011261 - DNA, 25 bp, Homo sapien
ccagctgaagtcctatggtgccttt

SEQ ID NO: 2011262 - DNA, 25 bp, Homo sapien
tctcaagcttctgttcacgccctaa

SEQ ID NO: 2011263 - DNA, 25 bp, Homo sapien
ggctaatacttcacaactcagtgat

SEQ ID NO: 2011264 - DNA, 25 bp, Homo sapien
tctactgcatgaggtgtgtgctgcc

SEQ ID NO: 2011265 - DNA, 25 bp, Homo sapien
ctatgtagtctataagggtgtgcac

SEQ ID NO: 2011266 - DNA, 25 bp, Homo sapien
tcaaagacaacgtgtggcaagctgc

SEQ ID NO: 2011267 - DNA, 25 bp, Homo sapien
cacggagcacacctgggtctatgta

SEQ ID NO: 2011268 - DNA, 25 bp, Homo sapien
caacatggcacctgatgttgtcaac

SEQ ID NO: 2011269 - DNA, 25 bp, Homo sapien
cactcactaagcttgcagcaattga

SEQ ID NO: 2011270 - DNA, 25 bp, Homo sapien
tcaactggcccattttgttcaaaaa

SEQ ID NO: 2011271 - DNA, 25 bp, Homo sapien
tggtctttgtatcttcactcactaa

SEQ ID NO: 2011272 - DNA, 25 bp, Homo sapien
aaaggcaagtacttcaagtacaagg

SEQ ID NO: 2011273 - DNA, 25 bp, Homo sapien
gcttgaggtccatcttagtgtttac

SEQ ID NO: 2011274 - DNA, 25 bp, Homo sapien
caaggaaccagtcggcttgaggtcc

SEQ ID NO: 2011275 - DNA, 25 bp, Homo sapien
tacttcaagtacaaggaaccagtcg

SEQ ID NO: 2011276 - DNA, 25 bp, Homo sapien
atatctttggaggttaggataaaat

SEQ ID NO: 2011277 - DNA, 25 bp, Homo sapien
tggaggttaggataaaattataatg

SEQ ID NO: 2011278 - DNA, 25 bp, Homo sapien
ggaggttaggataaaattataatgc

SEQ ID NO: 2011279 - DNA, 25 bp, Homo sapien
taagtaccattgtaatagcttagtg

SEQ ID NO: 2011280 - DNA, 25 bp, Homo sapien
tgcgaatatcccatccaaaaattaa

SEQ ID NO: 2011281 - DNA, 25 bp, Homo sapien
tgaaagacaagaacatagacaaggg

SEQ ID NO: 2011282 - DNA, 25 bp, Homo sapien
tagacaagggacttggtacagacca

SEQ ID NO: 2011283 - DNA, 25 bp, Homo sapien
tcaggaatgcctagaacccaacagt

SEQ ID NO: 2011284 - DNA, 25 bp, Homo sapien
ggaggtcactgactttaagggacga

SEQ ID NO: 2011285 - DNA, 25 bp, Homo sapien
ttgcatgactgtagagacaactgtc

SEQ ID NO: 2011286 - DNA, 25 bp, Homo sapien
tatacatcaaacacaggaggtcact

SEQ ID NO: 2011287 - DNA, 25 bp, Homo sapien
tcttccaggtacctctgaaatgtat

SEQ ID NO: 2011288 - DNA, 25 bp, Homo sapien
gaatcttgcctactattgcctttaa

SEQ ID NO: 2011289 - DNA, 25 bp, Homo sapien
aaatacattctacccattcacctga

SEQ ID NO: 2011290 - DNA, 25 bp, Homo sapien
tatagcaacatggtccccttttagt

SEQ ID NO: 2011291 - DNA, 25 bp, Homo sapien
tcctcttacggagatgagactagtg

SEQ ID NO: 2011292 - DNA, 25 bp, Homo sapien
cgtggtcttagcaaactcaagtatg

SEQ ID NO: 2011293 - DNA, 25 bp, Homo sapien
gcctcctgaccgatatataatagct

SEQ ID NO: 2011294 - DNA, 25 bp, Homo sapien
cattggattagtttgacacgtggtc

SEQ ID NO: 2011295 - DNA, 25 bp, Homo sapien
caaatcccttggtaaacttggtgag

SEQ ID NO: 2011296 - DNA, 25 bp, Homo sapien
aataaaatgtcacctcagcaaagcc

SEQ ID NO: 2011297 - DNA, 25 bp, Homo sapien
ttgcaagctctgtaagtaggctgtg

SEQ ID NO: 2011298 - DNA, 25 bp, Homo sapien
tgtgatctatgcacacactgccttt

SEQ ID NO: 2011299 - DNA, 25 bp, Homo sapien
tcgtcgactgcagttaaggcatcaa

SEQ ID NO: 2011300 - DNA, 25 bp, Homo sapien
gatgcgccaccgtcgagaatgaacg

SEQ ID NO: 2011301 - DNA, 25 bp, Homo sapien
ggccttccgaaagtggatgcgccac

SEQ ID NO: 2011302 - DNA, 25 bp, Homo sapien
tccttcctggagatttcgtcgactg

SEQ ID NO: 2011303 - DNA, 25 bp, Homo sapien
ctggcgggcgccgcggcctcagcgg

SEQ ID NO: 2011304 - DNA, 25 bp, Homo sapien
gcgggacaggctggcgggcgccgcg

SEQ ID NO: 2011305 - DNA, 25 bp, Homo sapien
gctggcgggcgccgcggcctcagcg

SEQ ID NO: 2011306 - DNA, 25 bp, Homo sapien
ggcgcgggacaggctggcgggcgcc

SEQ ID NO: 2011307 - DNA, 25 bp, Homo sapien
cagcagcagcgcgaacagcgggcgg

SEQ ID NO: 2011308 - DNA, 25 bp, Homo sapien
agccgggcgagcagcgcgcagagca

SEQ ID NO: 2011309 - DNA, 25 bp, Homo sapien
gcagcgcgaacagcgggcggcgccg

SEQ ID NO: 2011310 - DNA, 25 bp, Homo sapien
gcagccgggcgagcagcgcgcagag

SEQ ID NO: 2011311 - DNA, 25 bp, Homo sapien
ggtctgcgagggtcaagtccagcat

SEQ ID NO: 2011312 - DNA, 25 bp, Homo sapien
ctgttccgagaggaccgggaagcca

SEQ ID NO: 2011313 - DNA, 25 bp, Homo sapien
accgggaagccactcgggtctgcga

SEQ ID NO: 2011314 - DNA, 25 bp, Homo sapien
tgtactgagaaacctgttccgagag

SEQ ID NO: 2011315 - DNA, 25 bp, Homo sapien
ctggactgccaatctcctgaagaca

SEQ ID NO: 2011316 - DNA, 25 bp, Homo sapien
caggttgtgggtactccatttgttg

SEQ ID NO: 2011317 - DNA, 25 bp, Homo sapien
cactgcagagtgtgctacaggttgt

SEQ ID NO: 2011318 - DNA, 25 bp, Homo sapien
gcagtcactgaatgcattgaacaca

SEQ ID NO: 2011319 - DNA, 25 bp, Homo sapien
tgtccttccttcggttccctgcaaa

SEQ ID NO: 2011320 - DNA, 25 bp, Homo sapien
ctctgatgcgagtccctgctgttct

SEQ ID NO: 2011321 - DNA, 25 bp, Homo sapien
gttctcaccgccagacaaagcactg

SEQ ID NO: 2011322 - DNA, 25 bp, Homo sapien
tgcaaacactccactctgatgcgag

SEQ ID NO: 2011323 - DNA, 25 bp, Homo sapien
gtgattaattggttgtaaacaccat

SEQ ID NO: 2011324 - DNA, 25 bp, Homo sapien
aacaaataaatctgttaactggttg

SEQ ID NO: 2011325 - DNA, 25 bp, Homo sapien
aacaccattgcactcagacctgcct

SEQ ID NO: 2011326 - DNA, 25 bp, Homo sapien
atctgttaactggttgtgattaatt

SEQ ID NO: 2011327 - DNA, 25 bp, Homo sapien
agacatctctaggtctggcaatggc

SEQ ID NO: 2011328 - DNA, 25 bp, Homo sapien
ttctcattccaagacatctctaggt

SEQ ID NO: 2011329 - DNA, 25 bp, Homo sapien
ctagatgtcagagcctgcaagttcc

SEQ ID NO: 2011330 - DNA, 25 bp, Homo sapien
gctctgtctctacgctgaacttctc

SEQ ID NO: 2011331 - DNA, 25 bp, Homo sapien
cctccgtgtcacctgctgggtcagg

SEQ ID NO: 2011332 - DNA, 25 bp, Homo sapien
tcacctgctgggtcaggattttttg

SEQ ID NO: 2011333 - DNA, 25 bp, Homo sapien
cagtcaggtcttcctgatacttgga

SEQ ID NO: 2011334 - DNA, 25 bp, Homo sapien
ctttgctggtgccagacgggcctcc

SEQ ID NO: 2011335 - DNA, 25 bp, Homo sapien
tgcccgtcactcatgccaggaaatg

SEQ ID NO: 2011336 - DNA, 25 bp, Homo sapien
tctttgtgcccgtcactcatgccag

SEQ ID NO: 2011337 - DNA, 25 bp, Homo sapien
taataaggactgaacacggggctgc

SEQ ID NO: 2011338 - DNA, 25 bp, Homo sapien
cagcctctttgtgcccgtcactcat

SEQ ID NO: 2011339 - DNA, 25 bp, Homo sapien
tatgttacgatgcacccctatttcc

SEQ ID NO: 2011340 - DNA, 25 bp, Homo sapien
ccaaagtgacggaaggaggaagcat

SEQ ID NO: 2011341 - DNA, 25 bp, Homo sapien
tagtagaagccaacaagccctgtgg

SEQ ID NO: 2011342 - DNA, 25 bp, Homo sapien
aatccagtgcttctccaatgtgcgc

SEQ ID NO: 2011343 - DNA, 25 bp, Homo sapien
tagaactcaaccgagagagtcctgg

SEQ ID NO: 2011344 - DNA, 25 bp, Homo sapien
ggacatatttgccaaggcccttgga

SEQ ID NO: 2011345 - DNA, 25 bp, Homo sapien
tatgcgccagggacaatttcagatc

SEQ ID NO: 2011346 - DNA, 25 bp, Homo sapien
catgcacggcttgacggagaaacag

SEQ ID NO: 2011347 - DNA, 25 bp, Homo sapien
gaaggagaattgcaaccctggcctc

SEQ ID NO: 2011348 - DNA, 25 bp, Homo sapien
cacagcttttgtaaaggaggacaca

SEQ ID NO: 2011349 - DNA, 25 bp, Homo sapien
taatgcattggaaagatcctccctg

SEQ ID NO: 2011350 - DNA, 25 bp, Homo sapien
cacagccacatatagagaggaagga

SEQ ID NO: 2011351 - DNA, 25 bp, Homo sapien
tatgtaacttccatccagtcattcc

SEQ ID NO: 2011352 - DNA, 25 bp, Homo sapien
gcagtggtctgtatccaatagagga

SEQ ID NO: 2011353 - DNA, 25 bp, Homo sapien
aggagggatattcacgggcacagct

SEQ ID NO: 2011354 - DNA, 25 bp, Homo sapien
cgggcacagctgagtggaattagta

SEQ ID NO: 2011355 - DNA, 25 bp, Homo sapien
ggcccctcttgtcaaatcgagacga

SEQ ID NO: 2011356 - DNA, 25 bp, Homo sapien
caattgtagtgcaagtcattatgga

SEQ ID NO: 2011357 - DNA, 25 bp, Homo sapien
catcgaacgatgtagaaagaggctt

SEQ ID NO: 2011358 - DNA, 25 bp, Homo sapien
tccactgaaaattcatgctgacatc

SEQ ID NO: 2011359 - DNA, 25 bp, Homo sapien
tgtcagatgtcacaagctgtgtcct

SEQ ID NO: 2011360 - DNA, 25 bp, Homo sapien
tatccctgaagtagctgcttagggg

SEQ ID NO: 2011361 - DNA, 25 bp, Homo sapien
cctgaagtagctgcttaggggcact

SEQ ID NO: 2011362 - DNA, 25 bp, Homo sapien
gcactgtcagatgtcacaagctgtg

SEQ ID NO: 2011363 - DNA, 25 bp, Homo sapien
tttgtgttctacacacagaaaggta

SEQ ID NO: 2011364 - DNA, 25 bp, Homo sapien
ttgtgttctacacacagaaaggtac

SEQ ID NO: 2011365 - DNA, 25 bp, Homo sapien
ttagccgaacagacatccacgtatg

SEQ ID NO: 2011366 - DNA, 25 bp, Homo sapien
tgcgattcatgcaagttccctgctg

SEQ ID NO: 2011367 - DNA, 25 bp, Homo sapien
cacgtatgcacaccacacttgcgat

SEQ ID NO: 2011368 - DNA, 25 bp, Homo sapien
aactgaagaactgggcttagccgaa

SEQ ID NO: 2011369 - DNA, 25 bp, Homo sapien
ggtatgattctaagacaaataccaa

SEQ ID NO: 2011370 - DNA, 25 bp, Homo sapien
ccttctggttcaaaacggtatgatt

SEQ ID NO: 2011371 - DNA, 25 bp, Homo sapien
tcccttctggttcaaaacggtatga

SEQ ID NO: 2011372 - DNA, 25 bp, Homo sapien
aaaacggtatgattctaagacaaat

SEQ ID NO: 2011373 - DNA, 25 bp, Homo sapien
gatgctcataatgcttctcactggt

SEQ ID NO: 2011374 - DNA, 25 bp, Homo sapien
acatttgttacagcaccgtcccaga

SEQ ID NO: 2011375 - DNA, 25 bp, Homo sapien
catggaggagcgatctgcaaagcca

SEQ ID NO: 2011376 - DNA, 25 bp, Homo sapien
tcactggtacatggaggagcgatct

SEQ ID NO: 2011377 - DNA, 25 bp, Homo sapien
ctaccataacgcgtctatccaattt

SEQ ID NO: 2011378 - DNA, 25 bp, Homo sapien
gccactaccataacgcgtctatcca

SEQ ID NO: 2011379 - DNA, 25 bp, Homo sapien
cataacgcgtctatccaatttcttt

SEQ ID NO: 2011380 - DNA, 25 bp, Homo sapien
ctgccactaccataacgcgtctatc

SEQ ID NO: 2011381 - DNA, 25 bp, Homo sapien
ttctgctcctcaacaggtatatgga

SEQ ID NO: 2011382 - DNA, 25 bp, Homo sapien
ccttctgctcctcaacaggtatatg

SEQ ID NO: 2011383 - DNA, 25 bp, Homo sapien
tttttagcagcaacaattccagtgt

SEQ ID NO: 2011384 - DNA, 25 bp, Homo sapien
gcaacaattccagtgtggttattcc

SEQ ID NO: 2011385 - DNA, 25 bp, Homo sapien
gctgcagaaatagtcagccacactt

SEQ ID NO: 2011386 - DNA, 25 bp, Homo sapien
agtgcgggccccgtggactgtggct

SEQ ID NO: 2011387 - DNA, 25 bp, Homo sapien
ccccagaatgatgagagagtgcggg

SEQ ID NO: 2011388 - DNA, 25 bp, Homo sapien
actggggctgcagaaatagtcagcc

SEQ ID NO: 2011389 - DNA, 25 bp, Homo sapien
tcacaaactttatgcagcaagcatt

SEQ ID NO: 2011390 - DNA, 25 bp, Homo sapien
cacagggcagacatacactgtcaga

SEQ ID NO: 2011391 - DNA, 25 bp, Homo sapien
ccaagtattcatccgggccacaggg

SEQ ID NO: 2011392 - DNA, 25 bp, Homo sapien
gaggtagtagtgcatttagaagaca

SEQ ID NO: 2011393 - DNA, 25 bp, Homo sapien
caggcctgcagagtgaatcaccagg

SEQ ID NO: 2011394 - DNA, 25 bp, Homo sapien
tcaccaggacactgctcgagaagtc

SEQ ID NO: 2011395 - DNA, 25 bp, Homo sapien
acgactgcgctatccaacatccagc

SEQ ID NO: 2011396 - DNA, 25 bp, Homo sapien
actgctcgagaagtcccaagttcct

SEQ ID NO: 2011397 - DNA, 25 bp, Homo sapien
ctggctccagtggtacccagccgtg

SEQ ID NO: 2011398 - DNA, 25 bp, Homo sapien
ggcggcagcactcgcagtcctggct

SEQ ID NO: 2011399 - DNA, 25 bp, Homo sapien
tgttgcggcggcagcactcgcagtc

SEQ ID NO: 2011400 - DNA, 25 bp, Homo sapien
gggtcgtgctgttgccggcgaccac

SEQ ID NO: 2011401 - DNA, 25 bp, Homo sapien
gctgggcgcccaggcccggcgcgca

SEQ ID NO: 2011402 - DNA, 25 bp, Homo sapien
gggtgctgggcgcccaggcccggcg

SEQ ID NO: 2011403 - DNA, 25 bp, Homo sapien
acgggtgctgggcgcccaggcccgg

SEQ ID NO: 2011404 - DNA, 25 bp, Homo sapien
gtgctgggcgcccaggcccggcgcg

SEQ ID NO: 2011405 - DNA, 25 bp, Homo sapien
tgacttgatgtcaggccactaacac

SEQ ID NO: 2011406 - DNA, 25 bp, Homo sapien
tggaaccacgctcagaaaggtaact

SEQ ID NO: 2011407 - DNA, 25 bp, Homo sapien
accccagcagtgagttatggaacca

SEQ ID NO: 2011408 - DNA, 25 bp, Homo sapien
tgatgtccaggtcaggctagctctg

SEQ ID NO: 2011409 - DNA, 25 bp, Homo sapien
gtctgcatttgtccgtggaggaaaa

SEQ ID NO: 2011410 - DNA, 25 bp, Homo sapien
cacactgtgtccttgttgagctgca

SEQ ID NO: 2011411 - DNA, 25 bp, Homo sapien
ggtctgcatttgtccgtggaggaaa

SEQ ID NO: 2011412 - DNA, 25 bp, Homo sapien
gtttgcacactgtgtccttgttgag

SEQ ID NO: 2011413 - DNA, 25 bp, Homo sapien
tactctctttccaaggaaggtacag

SEQ ID NO: 2011414 - DNA, 25 bp, Homo sapien
gcatcggatttctctgtcccatgat

SEQ ID NO: 2011415 - DNA, 25 bp, Homo sapien
gtcccatgatgttctactctctttc

SEQ ID NO: 2011416 - DNA, 25 bp, Homo sapien
gaagaactgcaaaccgcatcggatt

SEQ ID NO: 2011417 - DNA, 25 bp, Homo sapien
gatctaaaccagctgaccaccctgg

SEQ ID NO: 2011418 - DNA, 25 bp, Homo sapien
agaggacgcccgcaaatccacgtgc

SEQ ID NO: 2011419 - DNA, 25 bp, Homo sapien
tattcagctgaccatgcacgggatg

SEQ ID NO: 2011420 - DNA, 25 bp, Homo sapien
tgccatctgggagggatctaaacca

SEQ ID NO: 2011421 - DNA, 25 bp, Homo sapien
aagattctttaattttacgcagttg

SEQ ID NO: 2011422 - DNA, 25 bp, Homo sapien
ggatagcagaagtgacagtccccac

SEQ ID NO: 2011423 - DNA, 25 bp, Homo sapien
caaatcccggtaaatcaaacctcag

SEQ ID NO: 2011424 - DNA, 25 bp, Homo sapien
caaaaatgttggtctgggatagcag

SEQ ID NO: 2011425 - DNA, 25 bp, Homo sapien
tatagcaaacgccaaagatgatggc

SEQ ID NO: 2011426 - DNA, 25 bp, Homo sapien
caccagggccacagacgcgaagaga

SEQ ID NO: 2011427 - DNA, 25 bp, Homo sapien
ccacagacgcgaagagaagcagaat

SEQ ID NO: 2011428 - DNA, 25 bp, Homo sapien
ttttcctatagcaaacgccaaagat

SEQ ID NO: 2011429 - DNA, 25 bp, Homo sapien
gcggccacaagcctcattgatccag

SEQ ID NO: 2011430 - DNA, 25 bp, Homo sapien
cttatctccacttaggcggccacaa

SEQ ID NO: 2011431 - DNA, 25 bp, Homo sapien
tatctccacttaggcggccacaagc

SEQ ID NO: 2011432 - DNA, 25 bp, Homo sapien
acaagcctcattgatccagtgccac

SEQ ID NO: 2011433 - DNA, 25 bp, Homo sapien
tcttcgccttgtgcgtagggaccac

SEQ ID NO: 2011434 - DNA, 25 bp, Homo sapien
tctgggtagcacatatcttctggaa

SEQ ID NO: 2011435 - DNA, 25 bp, Homo sapien
cagagtcagcagtaagacaccttca

SEQ ID NO: 2011436 - DNA, 25 bp, Homo sapien
tagggaccacctcctacacatgtgc

SEQ ID NO: 2011437 - DNA, 25 bp, Homo sapien
gttgcagctttctgaacccactgtg

SEQ ID NO: 2011438 - DNA, 25 bp, Homo sapien
tgtggatttgcttccaggctcagtg

SEQ ID NO: 2011439 - DNA, 25 bp, Homo sapien
gacatgggagtccaatcagtcctgc

SEQ ID NO: 2011440 - DNA, 25 bp, Homo sapien
tctgtgtccccgtgaagcactggct

SEQ ID NO: 2011441 - DNA, 25 bp, Homo sapien
tatgcatggatgcagaaactgcccc

SEQ ID NO: 2011442 - DNA, 25 bp, Homo sapien
gcctgaatgcaaaagggtatgggat

SEQ ID NO: 2011443 - DNA, 25 bp, Homo sapien
tgccccagtggtaaacgatgaagcc

SEQ ID NO: 2011444 - DNA, 25 bp, Homo sapien
cagcgctgggcgcagtgtataacca

SEQ ID NO: 2011445 - DNA, 25 bp, Homo sapien
cgaaaattaatttggcccgcttgct

SEQ ID NO: 2011446 - DNA, 25 bp, Homo sapien
gcctccaaaatcaatctggctgctg

SEQ ID NO: 2011447 - DNA, 25 bp, Homo sapien
taattgtggagagaatagcacagcc

SEQ ID NO: 2011448 - DNA, 25 bp, Homo sapien
cacgggcagactctctacggatgtt

SEQ ID NO: 2011449 - DNA, 25 bp, Homo sapien
tccatggcacgtcataatccagatt

SEQ ID NO: 2011450 - DNA, 25 bp, Homo sapien
cataatccagattcaccggaaagca

SEQ ID NO: 2011451 - DNA, 25 bp, Homo sapien
cactgttcaaggatgaaaactgcca

SEQ ID NO: 2011452 - DNA, 25 bp, Homo sapien
ggaaagcaatctaatgacatcaatg

SEQ ID NO: 2011453 - DNA, 25 bp, Homo sapien
ggctgataaaaaggcttctaccgta

SEQ ID NO: 2011454 - DNA, 25 bp, Homo sapien
ccgtagcagcaacagaagtaggcgt

SEQ ID NO: 2011455 - DNA, 25 bp, Homo sapien
aagtaggcgtagcaacacagttaag

SEQ ID NO: 2011456 - DNA, 25 bp, Homo sapien
cagttaagtcctcctagagaaatca

SEQ ID NO: 2011457 - DNA, 25 bp, Homo sapien
tagagaagccaagaccaaaacacaa

SEQ ID NO: 2011458 - DNA, 25 bp, Homo sapien
gagaagccaagaccaaaacacaagg

SEQ ID NO: 2011459 - DNA, 25 bp, Homo sapien
ctagagaagccaagaccaaaacaca

SEQ ID NO: 2011460 - DNA, 25 bp, Homo sapien
gaagccaagaccaaaacacaaggaa

SEQ ID NO: 2011461 - DNA, 25 bp, Homo sapien
cctcgaatttggaaggcatgttttg

SEQ ID NO: 2011462 - DNA, 25 bp, Homo sapien
cactccacacgagattttcctcgaa

SEQ ID NO: 2011463 - DNA, 25 bp, Homo sapien
taccgatacgcatgtaggaaattcc

SEQ ID NO: 2011464 - DNA, 25 bp, Homo sapien
gcatgttttggatggcctgactaaa

SEQ ID NO: 2011465 - DNA, 25 bp, Homo sapien
gtagaccacgatgatgtcgcccttg

SEQ ID NO: 2011466 - DNA, 25 bp, Homo sapien
gatgtcgcccttgaagttcatcacc

SEQ ID NO: 2011467 - DNA, 25 bp, Homo sapien
ccacgatgatgtcgcccttgaagtt

SEQ ID NO: 2011468 - DNA, 25 bp, Homo sapien
gatgatgtcgcccttgaagttcatc

SEQ ID NO: 2011469 - DNA, 25 bp, Homo sapien
cgccctcctgcgaggtctggctgac

SEQ ID NO: 2011470 - DNA, 25 bp, Homo sapien
gcgccctcctgcgaggtctggctga

SEQ ID NO: 2011471 - DNA, 25 bp, Homo sapien
cgcgccctcctgcgaggtctggctg

SEQ ID NO: 2011472 - DNA, 25 bp, Homo sapien
ccgcgccctcctgcgaggtctggct

SEQ ID NO: 2011473 - DNA, 25 bp, Homo sapien
cgttccccgcgaaggagtctcggcg

SEQ ID NO: 2011474 - DNA, 25 bp, Homo sapien
gcctcgaggccttctccggctcccg

SEQ ID NO: 2011475 - DNA, 25 bp, Homo sapien
cggcctcgaggccttctccggctcc

SEQ ID NO: 2011476 - DNA, 25 bp, Homo sapien
ggcctcgaggccttctccggctccc

SEQ ID NO: 2011477 - DNA, 25 bp, Homo sapien
aagccttggccccgccttgctcctg

SEQ ID NO: 2011478 - DNA, 25 bp, Homo sapien
ccttggccccgccttgctcctgcac

SEQ ID NO: 2011479 - DNA, 25 bp, Homo sapien
tcaagccttggccccgccttgctcc

SEQ ID NO: 2011480 - DNA, 25 bp, Homo sapien
agccttggccccgccttgctcctgc

SEQ ID NO: 2011481 - DNA, 25 bp, Homo sapien
gcgagccctggctccgagcttcggg

SEQ ID NO: 2011482 - DNA, 25 bp, Homo sapien
agagaatgccgggtggtcttcctcg

SEQ ID NO: 2011483 - DNA, 25 bp, Homo sapien
ctgtaccgatcgatccctgggtggc

SEQ ID NO: 2011484 - DNA, 25 bp, Homo sapien
gggtggtcttcctcgactgtaccga

SEQ ID NO: 2011485 - DNA, 25 bp, Homo sapien
catccgtgggcatggggacagtcct

SEQ ID NO: 2011486 - DNA, 25 bp, Homo sapien
cacaaattactgctgcgagtttgag

SEQ ID NO: 2011487 - DNA, 25 bp, Homo sapien
taaaaatagctgtcatagtgccaca

SEQ ID NO: 2011488 - DNA, 25 bp, Homo sapien
tagtgccacaaattactgctgcgag

SEQ ID NO: 2011489 - DNA, 25 bp, Homo sapien
gaaagagaccctcacctttaggaga

SEQ ID NO: 2011490 - DNA, 25 bp, Homo sapien
gaaaatacgtaaagcaggccagcgt

SEQ ID NO: 2011491 - DNA, 25 bp, Homo sapien
gctgcaccgggctataatcgcacca

SEQ ID NO: 2011492 - DNA, 25 bp, Homo sapien
taacatggtgggaccgtgtctctgg

SEQ ID NO: 2011493 - DNA, 25 bp, Homo sapien
ctagcgggtaaggtcacatactgag

SEQ ID NO: 2011494 - DNA, 25 bp, Homo sapien
gtaaggtcacatactgagcttagtt

SEQ ID NO: 2011495 - DNA, 25 bp, Homo sapien
tagcgggtaaggtcacatactgagc

SEQ ID NO: 2011496 - DNA, 25 bp, Homo sapien
cgggtaaggtcacatactgagctta

SEQ ID NO: 2011497 - DNA, 25 bp, Homo sapien
cagcaggagggaaaaaccagtgatc

SEQ ID NO: 2011498 - DNA, 25 bp, Homo sapien
caaggctaacccacagatgcacgat

SEQ ID NO: 2011499 - DNA, 25 bp, Homo sapien
tgacagtcacagcagaaactcgggt

SEQ ID NO: 2011500 - DNA, 25 bp, Homo sapien
tctcacaagcgggatgatgccaaga

SEQ ID NO: 2011501 - DNA, 25 bp, Homo sapien
gctggttcgggtaaggttcataatg

SEQ ID NO: 2011502 - DNA, 25 bp, Homo sapien
taaggttcataatgccctgattcct

SEQ ID NO: 2011503 - DNA, 25 bp, Homo sapien
ctgcctgtctctggcatagtcggct

SEQ ID NO: 2011504 - DNA, 25 bp, Homo sapien
tctctggcatagtcggcttcactag

SEQ ID NO: 2011505 - DNA, 25 bp, Homo sapien
cacactgttgctgaacgaacacatt

SEQ ID NO: 2011506 - DNA, 25 bp, Homo sapien
gtcacactgttgctgaacgaacaca

SEQ ID NO: 2011507 - DNA, 25 bp, Homo sapien
cactgttgctgaacgaacacatttt

SEQ ID NO: 2011508 - DNA, 25 bp, Homo sapien
gttgctgaacgaacacattttattt

SEQ ID NO: 2011509 - DNA, 25 bp, Homo sapien
tctccagggagactgataaggtcta

SEQ ID NO: 2011510 - DNA, 25 bp, Homo sapien
cacatggttatgctcaaatggaccc

SEQ ID NO: 2011511 - DNA, 25 bp, Homo sapien
ccagcctattccagtgcagtgatcc

SEQ ID NO: 2011512 - DNA, 25 bp, Homo sapien
gaaagttctgcattagacacctggg

SEQ ID NO: 2011513 - DNA, 25 bp, Homo sapien
tgaggatttacagaccacagaggct

SEQ ID NO: 2011514 - DNA, 25 bp, Homo sapien
ccagcccgggatttataggattgac

SEQ ID NO: 2011515 - DNA, 25 bp, Homo sapien
cacagccgggagcttgaaatcacag

SEQ ID NO: 2011516 - DNA, 25 bp, Homo sapien
gaattgcaaacgctagggctcagcc

SEQ ID NO: 2011517 - DNA, 25 bp, Homo sapien
cacggccgctactggtgaaatcaca

SEQ ID NO: 2011518 - DNA, 25 bp, Homo sapien
gctgcacggccgctactggtgaaat

SEQ ID NO: 2011519 - DNA, 25 bp, Homo sapien
gcactcagcactctggtgcctttgg

SEQ ID NO: 2011520 - DNA, 25 bp, Homo sapien
cactctggtgcctttggccaagagc

SEQ ID NO: 2011521 - DNA, 25 bp, Homo sapien
caaaacccgacgaagtgaattcaca

SEQ ID NO: 2011522 - DNA, 25 bp, Homo sapien
gcagagtctcagaactatgtttgat

SEQ ID NO: 2011523 - DNA, 25 bp, Homo sapien
actacctttgtcaagcagagtctca

SEQ ID NO: 2011524 - DNA, 25 bp, Homo sapien
acttgagggaagcagagtggcaccc

SEQ ID NO: 2011525 - DNA, 25 bp, Homo sapien
actctaagaaggcagcccagtcttt

SEQ ID NO: 2011526 - DNA, 25 bp, Homo sapien
ctcctgccgtgaagtcattgatgaa

SEQ ID NO: 2011527 - DNA, 25 bp, Homo sapien
cagtctttgggtcctagagggctgg

SEQ ID NO: 2011528 - DNA, 25 bp, Homo sapien
ttctgcactctaagaaggcagccca

SEQ ID NO: 2011529 - DNA, 25 bp, Homo sapien
ggagccccgatgactaagacttcaa

SEQ ID NO: 2011530 - DNA, 25 bp, Homo sapien
cagtctcagtaggtttccaggagcc

SEQ ID NO: 2011531 - DNA, 25 bp, Homo sapien
tccaggagccccgatgactaagact

SEQ ID NO: 2011532 - DNA, 25 bp, Homo sapien
gccccgatgactaagacttcaaatg

SEQ ID NO: 2011533 - DNA, 25 bp, Homo sapien
tctactagtgcaggtgaccgaggcc

SEQ ID NO: 2011534 - DNA, 25 bp, Homo sapien
tccacagactttctactagtgcagg

SEQ ID NO: 2011535 - DNA, 25 bp, Homo sapien
ccaaggacgggtttttcaagcattg

SEQ ID NO: 2011536 - DNA, 25 bp, Homo sapien
tcctcttcacgaaaaatgggtccac

SEQ ID NO: 2011537 - DNA, 25 bp, Homo sapien
cttgatttgtatgattgtgtgggct

SEQ ID NO: 2011538 - DNA, 25 bp, Homo sapien
ttgatttgtatgattgtgtgggctt

SEQ ID NO: 2011539 - DNA, 25 bp, Homo sapien
ccactgtaacgttggaatggtacac

SEQ ID NO: 2011540 - DNA, 25 bp, Homo sapien
ttcatggctttttgtatatgcatag

SEQ ID NO: 2011541 - DNA, 25 bp, Homo sapien
catggctttttgtatatgcatagcc

SEQ ID NO: 2011542 - DNA, 25 bp, Homo sapien
tcttaaagtgaacaggaaaatttga

SEQ ID NO: 2011543 - DNA, 25 bp, Homo sapien
gcagctccccaagttaggcatccat

SEQ ID NO: 2011544 - DNA, 25 bp, Homo sapien
gcccctcttaggtgatgcttgcaga

SEQ ID NO: 2011545 - DNA, 25 bp, Homo sapien
tgtgaggcacttgttctaatgcggg

SEQ ID NO: 2011546 - DNA, 25 bp, Homo sapien
tgcaactgacaccatcttggagtcc

SEQ ID NO: 2011547 - DNA, 25 bp, Homo sapien
tttgttgtgcaatggaatctgcaaa

SEQ ID NO: 2011548 - DNA, 25 bp, Homo sapien
gaagtgtattgccatttccggaatt

SEQ ID NO: 2011549 - DNA, 25 bp, Homo sapien
gccatttccggaatttgttgtgcaa

SEQ ID NO: 2011550 - DNA, 25 bp, Homo sapien
aagacttgaagtgtattgccatttc

SEQ ID NO: 2011551 - DNA, 25 bp, Homo sapien
cctggagagcactgtcgcctgcgaa

SEQ ID NO: 2011552 - DNA, 25 bp, Homo sapien
ggagagcactgtcgcctgcgaagcc

SEQ ID NO: 2011553 - DNA, 25 bp, Homo sapien
tgtcgatgacgagggcgacagtatc

SEQ ID NO: 2011554 - DNA, 25 bp, Homo sapien
agccattgtcgatgacgagggcgac

SEQ ID NO: 2011555 - DNA, 25 bp, Homo sapien
ttcagggtcagaatgcctctcttgc

SEQ ID NO: 2011556 - DNA, 25 bp, Homo sapien
tcagggtcagaatgcctctcttgct

SEQ ID NO: 2011557 - DNA, 25 bp, Homo sapien
cttcagggtcagaatgcctctcttg

SEQ ID NO: 2011558 - DNA, 25 bp, Homo sapien
tggagccaaatctcctccatatcct

SEQ ID NO: 2011559 - DNA, 25 bp, Homo sapien
agaaggtgtggagccaaatctcctc

SEQ ID NO: 2011560 - DNA, 25 bp, Homo sapien
tcctccatatcctcccagttggtga

SEQ ID NO: 2011561 - DNA, 25 bp, Homo sapien
ctcactgtagaaggtgtggagccaa

SEQ ID NO: 2011562 - DNA, 25 bp, Homo sapien
ttggggttcagagaggcctcggtca

SEQ ID NO: 2011563 - DNA, 25 bp, Homo sapien
tcagagaggcctcggtcagcagcag

SEQ ID NO: 2011564 - DNA, 25 bp, Homo sapien
agcagggggtgctcctcaggagcca

SEQ ID NO: 2011565 - DNA, 25 bp, Homo sapien
gcagcagggggtgctcctcaggagc

SEQ ID NO: 2011566 - DNA, 25 bp, Homo sapien
gacagcaaggcctggatggccacat

SEQ ID NO: 2011567 - DNA, 25 bp, Homo sapien
ccacatacatggctggggtgttgaa

SEQ ID NO: 2011568 - DNA, 25 bp, Homo sapien
agcaaggcctggatggccacataca

SEQ ID NO: 2011569 - DNA, 25 bp, Homo sapien
aaggcctggatggccacatacatgg

SEQ ID NO: 2011570 - DNA, 25 bp, Homo sapien
tttcccgcttggccgtggtggtgaa

SEQ ID NO: 2011571 - DNA, 25 bp, Homo sapien
ttcccgcttggccgtggtggtgaag

SEQ ID NO: 2011572 - DNA, 25 bp, Homo sapien
atttcccgcttggccgtggtggtga

SEQ ID NO: 2011573 - DNA, 25 bp, Homo sapien
gatttcccgcttggccgtggtggtg

SEQ ID NO: 2011574 - DNA, 25 bp, Homo sapien
catagcacagcttctcctcgatgtc

SEQ ID NO: 2011575 - DNA, 25 bp, Homo sapien
ctgctcaaagtccagggcaacatag

SEQ ID NO: 2011576 - DNA, 25 bp, Homo sapien
agcacagcttctcctcgatgtcatg

SEQ ID NO: 2011577 - DNA, 25 bp, Homo sapien
catggccatctcctgctcaaagtcc

SEQ ID NO: 2011578 - DNA, 25 bp, Homo sapien
actctgttgacgtaccggtctttgc

SEQ ID NO: 2011579 - DNA, 25 bp, Homo sapien
gagccaggccggtgatctcctgcat

SEQ ID NO: 2011580 - DNA, 25 bp, Homo sapien
ggagctgccaatccacatggagtat

SEQ ID NO: 2011581 - DNA, 25 bp, Homo sapien
catggagtatttgcgctcagaagga

SEQ ID NO: 2011582 - DNA, 25 bp, Homo sapien
tccttcctgaagacaatccgcaaag

SEQ ID NO: 2011583 - DNA, 25 bp, Homo sapien
atcttgagctggtggatgggaaaca

SEQ ID NO: 2011584 - DNA, 25 bp, Homo sapien
tccgcaaagtgtccgtctggacata

SEQ ID NO: 2011585 - DNA, 25 bp, Homo sapien
taatggttagccagatggcattcca

SEQ ID NO: 2011586 - DNA, 25 bp, Homo sapien
agctaaccagccctgcatggtgctc

SEQ ID NO: 2011587 - DNA, 25 bp, Homo sapien
tgcgtcccaccctccttcagacaga

SEQ ID NO: 2011588 - DNA, 25 bp, Homo sapien
ccttcagacagagctaaccagccct

SEQ ID NO: 2011589 - DNA, 25 bp, Homo sapien
ttcagacagagctaaccagccctgc

SEQ ID NO: 2011590 - DNA, 25 bp, Homo sapien
gttcttggggactgtggttgattcc

SEQ ID NO: 2011591 - DNA, 25 bp, Homo sapien
cttggggactgtggttgattcccat

SEQ ID NO: 2011592 - DNA, 25 bp, Homo sapien
ttcttggggactgtggttgattccc

SEQ ID NO: 2011593 - DNA, 25 bp, Homo sapien
tcttggggactgtggttgattccca

SEQ ID NO: 2011594 - DNA, 25 bp, Homo sapien
ttcaaccaatctggcttcagaagga

SEQ ID NO: 2011595 - DNA, 25 bp, Homo sapien
ggatattcaaccaatctggcttcag

SEQ ID NO: 2011596 - DNA, 25 bp, Homo sapien
tattcaaccaatctggcttcagaag

SEQ ID NO: 2011597 - DNA, 25 bp, Homo sapien
caaccaatctggcttcagaaggagg

SEQ ID NO: 2011598 - DNA, 25 bp, Homo sapien
tctcgcagcagccagacatactgca

SEQ ID NO: 2011599 - DNA, 25 bp, Homo sapien
ttgtgggtgcaggcaaactgactcc

SEQ ID NO: 2011600 - DNA, 25 bp, Homo sapien
ccagacatactgcagagcccattgt

SEQ ID NO: 2011601 - DNA, 25 bp, Homo sapien
agacatactgcagagcccattgtgg

SEQ ID NO: 2011602 - DNA, 25 bp, Homo sapien
gagtgtctaaccacttggtggccag

SEQ ID NO: 2011603 - DNA, 25 bp, Homo sapien
tggtggccagtttaaatctttccca

SEQ ID NO: 2011604 - DNA, 25 bp, Homo sapien
agtttatgttgtcccatgagccctg

SEQ ID NO: 2011605 - DNA, 25 bp, Homo sapien
tcaggtctggcgagtgtctaaccac

SEQ ID NO: 2011606 - DNA, 25 bp, Homo sapien
tttcctatatatcctgctttagctg

SEQ ID NO: 2011607 - DNA, 25 bp, Homo sapien
ttcctatatatcctgctttagctgc

SEQ ID NO: 2011608 - DNA, 25 bp, Homo sapien
agcaagcgagcgagggtgtcctcct

SEQ ID NO: 2011609 - DNA, 25 bp, Homo sapien
cagcatcctcggctagggcggcgca

SEQ ID NO: 2011610 - DNA, 25 bp, Homo sapien
ctgttccctcgcgagccggtgagga

SEQ ID NO: 2011611 - DNA, 25 bp, Homo sapien
gggtgcgttggcttcagcggcagct

SEQ ID NO: 2011612 - DNA, 25 bp, Homo sapien
ctcgcgcagcgccgccgagggcccc

SEQ ID NO: 2011613 - DNA, 25 bp, Homo sapien
gcgcagcgccgccgagggccccccg

SEQ ID NO: 2011614 - DNA, 25 bp, Homo sapien
ctgctcgcgcagcgccgccgagggc

SEQ ID NO: 2011615 - DNA, 25 bp, Homo sapien
cgcagcgccgccgagggccccccgc

SEQ ID NO: 2011616 - DNA, 25 bp, Homo sapien
ggtagacgatgaggcgcgagcgcac

SEQ ID NO: 2011617 - DNA, 25 bp, Homo sapien
agcgcagctccagcgggttgcacag

SEQ ID NO: 2011618 - DNA, 25 bp, Homo sapien
ttggcctccgagtcgcgcaggtagt

SEQ ID NO: 2011619 - DNA, 25 bp, Homo sapien
gggtagcaggcggtgcagacggcca

SEQ ID NO: 2011620 - DNA, 25 bp, Homo sapien
ccgcgcgcaggcttttgagcaccga

SEQ ID NO: 2011621 - DNA, 25 bp, Homo sapien
gggccgcgcgcaggcttttgagcac

SEQ ID NO: 2011622 - DNA, 25 bp, Homo sapien
gccgcgcgcaggcttttgagcaccg

SEQ ID NO: 2011623 - DNA, 25 bp, Homo sapien
ggccgcgcgcaggcttttgagcacc

SEQ ID NO: 2011624 - DNA, 25 bp, Homo sapien
cgcggcgcggagcctctccaagtgt

SEQ ID NO: 2011625 - DNA, 25 bp, Homo sapien
gggctccacaatgccgccttccggg

SEQ ID NO: 2011626 - DNA, 25 bp, Homo sapien
ggagaaagccgggtgcagcgaggcc

SEQ ID NO: 2011627 - DNA, 25 bp, Homo sapien
ccctggggccggcaaacttgcacgg

SEQ ID NO: 2011628 - DNA, 25 bp, Homo sapien
gagcggcccagcgagacgaagctca

SEQ ID NO: 2011629 - DNA, 25 bp, Homo sapien
gaagctcagccctctggcgctggga

SEQ ID NO: 2011630 - DNA, 25 bp, Homo sapien
tgtgatggcgggtggctgtgtctgc

SEQ ID NO: 2011631 - DNA, 25 bp, Homo sapien
gcagcgatcgcaccgcgagtccagg

SEQ ID NO: 2011632 - DNA, 25 bp, Homo sapien
cgcaccgagcgctgagatgctcaga

SEQ ID NO: 2011633 - DNA, 25 bp, Homo sapien
atgctcagagccaaaaacgtcccga

SEQ ID NO: 2011634 - DNA, 25 bp, Homo sapien
tcttccgtggcaacaccgtggcacg

SEQ ID NO: 2011635 - DNA, 25 bp, Homo sapien
gcacggaagggacttctagagcatt

SEQ ID NO: 2011636 - DNA, 25 bp, Homo sapien
ccaggccgcgctagaaaaggtttct

SEQ ID NO: 2011637 - DNA, 25 bp, Homo sapien
cagatgtctgctgggaacacaagcc

SEQ ID NO: 2011638 - DNA, 25 bp, Homo sapien
gaatcaagcccgtgagaaagcgcgt

SEQ ID NO: 2011639 - DNA, 25 bp, Homo sapien
ccggaaccccaatctgtaggcagga

SEQ ID NO: 2011640 - DNA, 25 bp, Homo sapien
cacgtcctgagaagcagtgatgtgc

SEQ ID NO: 2011641 - DNA, 25 bp, Homo sapien
tgctgacgttaatggcaggatgccc

SEQ ID NO: 2011642 - DNA, 25 bp, Homo sapien
cagtgatgtgctgacgttaatggca

SEQ ID NO: 2011643 - DNA, 25 bp, Homo sapien
ccacttcacttgacacgtcctgaga

SEQ ID NO: 2011644 - DNA, 25 bp, Homo sapien
tgggactcggaggtcactctacgca

SEQ ID NO: 2011645 - DNA, 25 bp, Homo sapien
agaacaagccacagctgggactcgg

SEQ ID NO: 2011646 - DNA, 25 bp, Homo sapien
gacagcctgggagcaacatcatcag

SEQ ID NO: 2011647 - DNA, 25 bp, Homo sapien
cggactgcagcgaatgagggcttaa

SEQ ID NO: 2011648 - DNA, 25 bp, Homo sapien
gttgcgtgacctccgagcccctaag

SEQ ID NO: 2011649 - DNA, 25 bp, Homo sapien
ctagctccgggcgttgcgtgacctc

SEQ ID NO: 2011650 - DNA, 25 bp, Homo sapien
cggaccctatatcgccgtgcgctag

SEQ ID NO: 2011651 - DNA, 25 bp, Homo sapien
cctaaggcgggtcgcggcgcctcca

SEQ ID NO: 2011652 - DNA, 25 bp, Homo sapien
tccgcctggaagtctccggcgctag

SEQ ID NO: 2011653 - DNA, 25 bp, Homo sapien
gcagcatccacgtggttctcgagtc

SEQ ID NO: 2011654 - DNA, 25 bp, Homo sapien
agggttatcgccacggcccagtacg

SEQ ID NO: 2011655 - DNA, 25 bp, Homo sapien
ccaaagcctggcctccgcgggaaga

SEQ ID NO: 2011656 - DNA, 25 bp, Homo sapien
ccagtatgtttcctatattgcgaag

SEQ ID NO: 2011657 - DNA, 25 bp, Homo sapien
tatcttgaagtagcatcgttgatgt

SEQ ID NO: 2011658 - DNA, 25 bp, Homo sapien
gcgaagttaatcaaagtacttggtc

SEQ ID NO: 2011659 - DNA, 25 bp, Homo sapien
tctcactaggattctggctgccaca

SEQ ID NO: 2011660 - DNA, 25 bp, Homo sapien
ctggaaaatgactgcatagaaaaat

SEQ ID NO: 2011661 - DNA, 25 bp, Homo sapien
aaaatgactgcatagaaaaatgtaa

SEQ ID NO: 2011662 - DNA, 25 bp, Homo sapien
ggaaaatgactgcatagaaaaatgt

SEQ ID NO: 2011663 - DNA, 25 bp, Homo sapien
tggaaaatgactgcatagaaaaatg

SEQ ID NO: 2011664 - DNA, 25 bp, Homo sapien
gaaacagataggaatgatatcccta

SEQ ID NO: 2011665 - DNA, 25 bp, Homo sapien
cctattttatactggacactctgga

SEQ ID NO: 2011666 - DNA, 25 bp, Homo sapien
gggatctcactaagttgtcagagtt

SEQ ID NO: 2011667 - DNA, 25 bp, Homo sapien
caaattgtgctaatcgctctatgaa

SEQ ID NO: 2011668 - DNA, 25 bp, Homo sapien
aattctagtgtgaaagatcaaattt

SEQ ID NO: 2011669 - DNA, 25 bp, Homo sapien
tcctccaggctgggtcaagctatcc

SEQ ID NO: 2011670 - DNA, 25 bp, Homo sapien
atcctccaggctgggtcaagctatc

SEQ ID NO: 2011671 - DNA, 25 bp, Homo sapien
cagcctcgatatacttaatcttaaa

SEQ ID NO: 2011672 - DNA, 25 bp, Homo sapien
atgtcaccatatcgggtcactgcaa

SEQ ID NO: 2011673 - DNA, 25 bp, Homo sapien
tgcccagcctcgatatacttaatct

SEQ ID NO: 2011674 - DNA, 25 bp, Homo sapien
ttaaagcagtgtatcatattggtat

SEQ ID NO: 2011675 - DNA, 25 bp, Homo sapien
tgcacagcaacgcaatcacggctca

SEQ ID NO: 2011676 - DNA, 25 bp, Homo sapien
agtcagcatccacccattgaagatt

SEQ ID NO: 2011677 - DNA, 25 bp, Homo sapien
tattaaataagcacagccagtcagc

SEQ ID NO: 2011678 - DNA, 25 bp, Homo sapien
tgcctaggctgctaatagtctgatt

SEQ ID NO: 2011679 - DNA, 25 bp, Homo sapien
tacacggcatgtggttcaggtggtc

SEQ ID NO: 2011680 - DNA, 25 bp, Homo sapien
gccaagtagctggacatcctaaaaa

SEQ ID NO: 2011681 - DNA, 25 bp, Homo sapien
cctttcttaactcgcctgaggcaga

SEQ ID NO: 2011682 - DNA, 25 bp, Homo sapien
tatcgcttgcctcaagagctactgg

SEQ ID NO: 2011683 - DNA, 25 bp, Homo sapien
tgtcaggaccacgagaaaagtggat

SEQ ID NO: 2011684 - DNA, 25 bp, Homo sapien
gatgagaatcggcagccccaatggt

SEQ ID NO: 2011685 - DNA, 25 bp, Homo sapien
ctagttggagaaaagtgtcaggacc

SEQ ID NO: 2011686 - DNA, 25 bp, Homo sapien
gggtagcataaaatctgagaactcc

SEQ ID NO: 2011687 - DNA, 25 bp, Homo sapien
tgttgaagacagtcaggcagttcct

SEQ ID NO: 2011688 - DNA, 25 bp, Homo sapien
gtcattgtacctggccagtcaacca

SEQ ID NO: 2011689 - DNA, 25 bp, Homo sapien
ttagtgagatgcataagaagatacc

SEQ ID NO: 2011690 - DNA, 25 bp, Homo sapien
cccttacacattgatggtggaaaca

SEQ ID NO: 2011691 - DNA, 25 bp, Homo sapien
ccatggactaagagtaataatcaca

SEQ ID NO: 2011692 - DNA, 25 bp, Homo sapien
tgagaaagagggagatacgttaact

SEQ ID NO: 2011693 - DNA, 25 bp, Homo sapien
taatcacagatttaggtcttctcat

SEQ ID NO: 2011694 - DNA, 25 bp, Homo sapien
aataggtgactgcacactatgggca

SEQ ID NO: 2011695 - DNA, 25 bp, Homo sapien
tgtgaggtgccacggtaagtccgtc

SEQ ID NO: 2011696 - DNA, 25 bp, Homo sapien
tattaagctgctctcgttattttgc

SEQ ID NO: 2011697 - DNA, 25 bp, Homo sapien
cgtcctgaggtattggagcttgctc

SEQ ID NO: 2011698 - DNA, 25 bp, Homo sapien
gcttgctctattaagctgctctcgt

SEQ ID NO: 2011699 - DNA, 25 bp, Homo sapien
tttgaaagtgtactcccagtatttg

SEQ ID NO: 2011700 - DNA, 25 bp, Homo sapien
ctctggactcctttcaacattatct

SEQ ID NO: 2011701 - DNA, 25 bp, Homo sapien
ttctctggactcctttcaacattat

SEQ ID NO: 2011702 - DNA, 25 bp, Homo sapien
tgaaagtgtactcccagtatttgtc

SEQ ID NO: 2011703 - DNA, 25 bp, Homo sapien
gaagatgtggacaaggaattcccga

SEQ ID NO: 2011704 - DNA, 25 bp, Homo sapien
ctgaggagaaaaggcgtagctcaag

SEQ ID NO: 2011705 - DNA, 25 bp, Homo sapien
cgatacagctgacgggcaagaagaa

SEQ ID NO: 2011706 - DNA, 25 bp, Homo sapien
ctcaagcagggagaagtaaggaaga

SEQ ID NO: 2011707 - DNA, 25 bp, Homo sapien
agattcctgctctccatgagaatat

SEQ ID NO: 2011708 - DNA, 25 bp, Homo sapien
tccatgagaatatctactggaaaga

SEQ ID NO: 2011709 - DNA, 25 bp, Homo sapien
ggtgggatggctgaggatgaagaat

SEQ ID NO: 2011710 - DNA, 25 bp, Homo sapien
tcaacgagcaagtggtgggatggct

SEQ ID NO: 2011711 - DNA, 25 bp, Homo sapien
gttgtgactgaaagatcagaccaat

SEQ ID NO: 2011712 - DNA, 25 bp, Homo sapien
actgttgtgactgaaagatcagacc

SEQ ID NO: 2011713 - DNA, 25 bp, Homo sapien
ttactgttgtgactgaaagatcaga

SEQ ID NO: 2011714 - DNA, 25 bp, Homo sapien
tgttgtgactgaaagatcagaccaa

SEQ ID NO: 2011715 - DNA, 25 bp, Homo sapien
tccacctttggggttcaagtgattc

SEQ ID NO: 2011716 - DNA, 25 bp, Homo sapien
actgctgacctcagatgatccacct

SEQ ID NO: 2011717 - DNA, 25 bp, Homo sapien
ttgaactgctgacctcagatgatcc

SEQ ID NO: 2011718 - DNA, 25 bp, Homo sapien
ctccacctttggggttcaagtgatt

SEQ ID NO: 2011719 - DNA, 25 bp, Homo sapien
tgcctgcatggaccttacactctgg

SEQ ID NO: 2011720 - DNA, 25 bp, Homo sapien
ggtgaagattctgctcagcatagct

SEQ ID NO: 2011721 - DNA, 25 bp, Homo sapien
cagcatagctagtactatttttacc

SEQ ID NO: 2011722 - DNA, 25 bp, Homo sapien
gacacccatgctaaggttctcgagt

SEQ ID NO: 2011723 - DNA, 25 bp, Homo sapien
tgcagggcgacccacagcattcagc

SEQ ID NO: 2011724 - DNA, 25 bp, Homo sapien
catcttctgactgaacctcagggct

SEQ ID NO: 2011725 - DNA, 25 bp, Homo sapien
tgcaccatcttctgactgaacctca

SEQ ID NO: 2011726 - DNA, 25 bp, Homo sapien
tttcctactgggaaatgcaccatct

SEQ ID NO: 2011727 - DNA, 25 bp, Homo sapien
cttaggatgggctctaggtcaggat

SEQ ID NO: 2011728 - DNA, 25 bp, Homo sapien
atgggctctaggtcaggatgtcgcc

SEQ ID NO: 2011729 - DNA, 25 bp, Homo sapien
taggtcaggatgtcgccgttcctcc

SEQ ID NO: 2011730 - DNA, 25 bp, Homo sapien
gatgtcgccgttcctcccttttcaa

SEQ ID NO: 2011731 - DNA, 25 bp, Homo sapien
actgggccacctcaagtttagaagg

SEQ ID NO: 2011732 - DNA, 25 bp, Homo sapien
cctcagagaggtgagtgccacgact

SEQ ID NO: 2011733 - DNA, 25 bp, Homo sapien
gagactctcgctgcttaattacccg

SEQ ID NO: 2011734 - DNA, 25 bp, Homo sapien
ttggacctgagctgccgggaaacat

SEQ ID NO: 2011735 - DNA, 25 bp, Homo sapien
gggagaggagcaagtcttcatcttc

SEQ ID NO: 2011736 - DNA, 25 bp, Homo sapien
cttccagaccaagctggtgcccgcc

SEQ ID NO: 2011737 - DNA, 25 bp, Homo sapien
ttccagaccaagctggtgcccgccc

SEQ ID NO: 2011738 - DNA, 25 bp, Homo sapien
tccagaccaagctggtgcccgccca

SEQ ID NO: 2011739 - DNA, 25 bp, Homo sapien
taattggggtcctagctgagagcca

SEQ ID NO: 2011740 - DNA, 25 bp, Homo sapien
atctcaaacttacaaatacagtaca

SEQ ID NO: 2011741 - DNA, 25 bp, Homo sapien
ataaatacctagtgtaatggctaac

SEQ ID NO: 2011742 - DNA, 25 bp, Homo sapien
tatgttctcctacaatcaatatcag

SEQ ID NO: 2011743 - DNA, 25 bp, Homo sapien
tagctttaataacatctttacagta

SEQ ID NO: 2011744 - DNA, 25 bp, Homo sapien
aattagctttaataacatctttaca

SEQ ID NO: 2011745 - DNA, 25 bp, Homo sapien
tcaaaattagctttaataacatctt

SEQ ID NO: 2011746 - DNA, 25 bp, Homo sapien
taataacatctttacagtaaaaaca

SEQ ID NO: 2011747 - DNA, 25 bp, Homo sapien
gctgtgtactttctgactttgtaga

SEQ ID NO: 2011748 - DNA, 25 bp, Homo sapien
agaagctgtgtactttctgactttg

SEQ ID NO: 2011749 - DNA, 25 bp, Homo sapien
tctgatgatatggactgaaagaagc

SEQ ID NO: 2011750 - DNA, 25 bp, Homo sapien
tgtagggagtctgatgatatggact

SEQ ID NO: 2011751 - DNA, 25 bp, Homo sapien
tagtccgtgcatgaaagaaaggcct

SEQ ID NO: 2011752 - DNA, 25 bp, Homo sapien
ctttaatagtccgtgcatgaaagaa

SEQ ID NO: 2011753 - DNA, 25 bp, Homo sapien
gtccgtgcatgaaagaaaggcctaa

SEQ ID NO: 2011754 - DNA, 25 bp, Homo sapien
taatagtccgtgcatgaaagaaagg

SEQ ID NO: 2011755 - DNA, 25 bp, Homo sapien
ttcggattgataattacgttagcat

SEQ ID NO: 2011756 - DNA, 25 bp, Homo sapien
tctacatagctacagaatgatcagg

SEQ ID NO: 2011757 - DNA, 25 bp, Homo sapien
gctgttgttatcattcagacataaa

SEQ ID NO: 2011758 - DNA, 25 bp, Homo sapien
ggtcaactaatcacaaagagtcata

SEQ ID NO: 2011759 - DNA, 25 bp, Homo sapien
aaaaacccaacagtgtatgcaaatg

SEQ ID NO: 2011760 - DNA, 25 bp, Homo sapien
tatgcaaatgaaccctgacaacagt

SEQ ID NO: 2011761 - DNA, 25 bp, Homo sapien
aacgttaggctgacaagatttccca

SEQ ID NO: 2011762 - DNA, 25 bp, Homo sapien
tcactagtgaaacaactcagatatg

SEQ ID NO: 2011763 - DNA, 25 bp, Homo sapien
gaagcattcaatactattaactttt

SEQ ID NO: 2011764 - DNA, 25 bp, Homo sapien
aaaatgaatggagggtgagtggtga

SEQ ID NO: 2011765 - DNA, 25 bp, Homo sapien
ggaaaatgaatggagggtgagtggt

SEQ ID NO: 2011766 - DNA, 25 bp, Homo sapien
aaatgaatggagggtgagtggtgaa

SEQ ID NO: 2011767 - DNA, 25 bp, Homo sapien
tctaatatcttagaagtcttcagag

SEQ ID NO: 2011768 - DNA, 25 bp, Homo sapien
taatatcttagaagtcttcagagag

SEQ ID NO: 2011769 - DNA, 25 bp, Homo sapien
gttctaatatcttagaagtcttcag

SEQ ID NO: 2011770 - DNA, 25 bp, Homo sapien
tttaagtgttctaatatcttagaag

SEQ ID NO: 2011771 - DNA, 25 bp, Homo sapien
caatctatggatggtctcctggcta

SEQ ID NO: 2011772 - DNA, 25 bp, Homo sapien
tatatccccatcagcagtgcctgag

SEQ ID NO: 2011773 - DNA, 25 bp, Homo sapien
catagatgcaggattgctggacagc

SEQ ID NO: 2011774 - DNA, 25 bp, Homo sapien
tcctgactaccagtgaggctgcaca

SEQ ID NO: 2011775 - DNA, 25 bp, Homo sapien
tctcaaatgtcttccacctaacagc

SEQ ID NO: 2011776 - DNA, 25 bp, Homo sapien
ttgtatgatcataaccactggtgac

SEQ ID NO: 2011777 - DNA, 25 bp, Homo sapien
catttctcaacatagaagacatctt

SEQ ID NO: 2011778 - DNA, 25 bp, Homo sapien
gcaaaaaccaacagtaggatgctac

SEQ ID NO: 2011779 - DNA, 25 bp, Homo sapien
ttcccagtatgcttcttgtggatta

SEQ ID NO: 2011780 - DNA, 25 bp, Homo sapien
ttttcccagtatgcttcttgtggat

SEQ ID NO: 2011781 - DNA, 25 bp, Homo sapien
cccagtatgcttcttgtggattatg

SEQ ID NO: 2011782 - DNA, 25 bp, Homo sapien
agtatgcttcttgtggattatggca

SEQ ID NO: 2011783 - DNA, 25 bp, Homo sapien
ggtaagcccatccaatggagaacaa

SEQ ID NO: 2011784 - DNA, 25 bp, Homo sapien
agcccatccaatggagaacaacttg

SEQ ID NO: 2011785 - DNA, 25 bp, Homo sapien
tggagaacaacttgtaccaatattg

SEQ ID NO: 2011786 - DNA, 25 bp, Homo sapien
taagcccatccaatggagaacaact

SEQ ID NO: 2011787 - DNA, 25 bp, Homo sapien
gaatggtggtacagctttgcttcct

SEQ ID NO: 2011788 - DNA, 25 bp, Homo sapien
tgaatggtggtacagctttgcttcc

SEQ ID NO: 2011789 - DNA, 25 bp, Homo sapien
tggtggtacagctttgcttcctcca

SEQ ID NO: 2011790 - DNA, 25 bp, Homo sapien
aatggtggtacagctttgcttcctc

SEQ ID NO: 2011791 - DNA, 25 bp, Homo sapien
attgaagataaactccgtttttcag

SEQ ID NO: 2011792 - DNA, 25 bp, Homo sapien
tattgaagataaactccgtttttca

SEQ ID NO: 2011793 - DNA, 25 bp, Homo sapien
gaggagtggagagtctaataccatt

SEQ ID NO: 2011794 - DNA, 25 bp, Homo sapien
tggagagtctaataccatttattct

SEQ ID NO: 2011795 - DNA, 25 bp, Homo sapien
ctgaggagtggagagtctaatacca

SEQ ID NO: 2011796 - DNA, 25 bp, Homo sapien
gagtggagagtctaataccatttat

SEQ ID NO: 2011797 - DNA, 25 bp, Homo sapien
ctttcacagtaccaccatgggcatg

SEQ ID NO: 2011798 - DNA, 25 bp, Homo sapien
tgtattccctaaattaactccattg

SEQ ID NO: 2011799 - DNA, 25 bp, Homo sapien
ggagaagaacaacctgggagactcc

SEQ ID NO: 2011800 - DNA, 25 bp, Homo sapien
gctggagaagaacaacctgggagac

SEQ ID NO: 2011801 - DNA, 25 bp, Homo sapien
gccacaggagagatctcccatggcc

SEQ ID NO: 2011802 - DNA, 25 bp, Homo sapien
cccatggccttgggacctgtctcct

SEQ ID NO: 2011803 - DNA, 25 bp, Homo sapien
gcctcataaaacttcgcaaaggatg

SEQ ID NO: 2011804 - DNA, 25 bp, Homo sapien
gggatcactacataaatgtgtcagg

SEQ ID NO: 2011805 - DNA, 25 bp, Homo sapien
taaaatattctcctagaggtctgcg

SEQ ID NO: 2011806 - DNA, 25 bp, Homo sapien
tgagggttgacattcccctaaagcc

SEQ ID NO: 2011807 - DNA, 25 bp, Homo sapien
gcagtagttcccaaacactgtgaga

SEQ ID NO: 2011808 - DNA, 25 bp, Homo sapien
gctgcagtgaacacctaggtacttg

SEQ ID NO: 2011809 - DNA, 25 bp, Homo sapien
cacggcagcagtatggaaaatgaac

SEQ ID NO: 2011810 - DNA, 25 bp, Homo sapien
taaatacatacaaatcggtgacgga

SEQ ID NO: 2011811 - DNA, 25 bp, Homo sapien
ctagatggagaactgtaactctctg

SEQ ID NO: 2011812 - DNA, 25 bp, Homo sapien
tcatgtcggggactagatggagaac

SEQ ID NO: 2011813 - DNA, 25 bp, Homo sapien
catcatgtcggggactagatggaga

SEQ ID NO: 2011814 - DNA, 25 bp, Homo sapien
ctcttccatcatgtcggggactaga

SEQ ID NO: 2011815 - DNA, 25 bp, Homo sapien
tgccatgccaacaatactcccactt

SEQ ID NO: 2011816 - DNA, 25 bp, Homo sapien
gccaacaatactcccacttcaaaga

SEQ ID NO: 2011817 - DNA, 25 bp, Homo sapien
cctgccatgccaacaatactcccac

SEQ ID NO: 2011818 - DNA, 25 bp, Homo sapien
ccccacccctgccatgccaacaata

SEQ ID NO: 2011819 - DNA, 25 bp, Homo sapien
gattttaagcctctgtgcaacgagg

SEQ ID NO: 2011820 - DNA, 25 bp, Homo sapien
caacgaggaactgaagacataatac

SEQ ID NO: 2011821 - DNA, 25 bp, Homo sapien
ggcagacctgagaaggccctaagct

SEQ ID NO: 2011822 - DNA, 25 bp, Homo sapien
ctgtttaaaaatgtagccgcccaag

SEQ ID NO: 2011823 - DNA, 25 bp, Homo sapien
taccagaatggtagagtaagacctc

SEQ ID NO: 2011824 - DNA, 25 bp, Homo sapien
catagctccctaagacatagcgtga

SEQ ID NO: 2011825 - DNA, 25 bp, Homo sapien
aaggtgttaccaatcagacgttgtc

SEQ ID NO: 2011826 - DNA, 25 bp, Homo sapien
taaaggcttacagcactctgacgag

SEQ ID NO: 2011827 - DNA, 25 bp, Homo sapien
gatgcaaagcgggagtactactgtg

SEQ ID NO: 2011828 - DNA, 25 bp, Homo sapien
tttgggtgcaggaacgacaacttca

SEQ ID NO: 2011829 - DNA, 25 bp, Homo sapien
gcaactttagcctctgaactgtaag

SEQ ID NO: 2011830 - DNA, 25 bp, Homo sapien
tgatgcgatgctcaggcttccgggt

SEQ ID NO: 2011831 - DNA, 25 bp, Homo sapien
gattgagtcctaccacttgggatgc

SEQ ID NO: 2011832 - DNA, 25 bp, Homo sapien
cacattggtaggctgagggactgtc

SEQ ID NO: 2011833 - DNA, 25 bp, Homo sapien
gttctggctgggtaacacgccggca

SEQ ID NO: 2011834 - DNA, 25 bp, Homo sapien
taagaggtgctgtcactctgcgcgg

SEQ ID NO: 2011835 - DNA, 25 bp, Homo sapien
ggcctccatggacgactgcttacag

SEQ ID NO: 2011836 - DNA, 25 bp, Homo sapien
caactacgttaggtgctggatatac

SEQ ID NO: 2011837 - DNA, 25 bp, Homo sapien
catagttggcttggctccccatgac

SEQ ID NO: 2011838 - DNA, 25 bp, Homo sapien
cgaaccactggtgttggcaactacg

SEQ ID NO: 2011839 - DNA, 25 bp, Homo sapien
tcaaaaacaagtcctctgggagtta

SEQ ID NO: 2011840 - DNA, 25 bp, Homo sapien
caaaaacaagtcctctgggagttat

SEQ ID NO: 2011841 - DNA, 25 bp, Homo sapien
aagtcctctgggagttattgtgatt

SEQ ID NO: 2011842 - DNA, 25 bp, Homo sapien
gtcctctgggagttattgtgattac

SEQ ID NO: 2011843 - DNA, 25 bp, Homo sapien
tggcaaaacgacaaaggtcaaatgc

SEQ ID NO: 2011844 - DNA, 25 bp, Homo sapien
tgctctgtgtgacctgggtctacac

SEQ ID NO: 2011845 - DNA, 25 bp, Homo sapien
gtgctgcaagcaagagatttaacat

SEQ ID NO: 2011846 - DNA, 25 bp, Homo sapien
tgcttactctatgaaacaggattgt

SEQ ID NO: 2011847 - DNA, 25 bp, Homo sapien
agtgccactccaaatggccaatccg

SEQ ID NO: 2011848 - DNA, 25 bp, Homo sapien
gtcatcacaaaccactacgtacaag

SEQ ID NO: 2011849 - DNA, 25 bp, Homo sapien
acaaggcaccttcgtcagctctagt

SEQ ID NO: 2011850 - DNA, 25 bp, Homo sapien
tacgtacaagctatcacacgggcat

SEQ ID NO: 2011851 - DNA, 25 bp, Homo sapien
tgggaaagacagaactaagtcaccg

SEQ ID NO: 2011852 - DNA, 25 bp, Homo sapien
ctaaaatgggaaagacagaactaag

SEQ ID NO: 2011853 - DNA, 25 bp, Homo sapien
aaatgggaaagacagaactaagtca

SEQ ID NO: 2011854 - DNA, 25 bp, Homo sapien
gggaaagacagaactaagtcaccgc

SEQ ID NO: 2011855 - DNA, 25 bp, Homo sapien
tgcagaatccaacgtatcattagaa

SEQ ID NO: 2011856 - DNA, 25 bp, Homo sapien
agaatccaacgtatcattagaaggg

SEQ ID NO: 2011857 - DNA, 25 bp, Homo sapien
gtctgcagaatccaacgtatcatta

SEQ ID NO: 2011858 - DNA, 25 bp, Homo sapien
cagaatccaacgtatcattagaagg

SEQ ID NO: 2011859 - DNA, 25 bp, Homo sapien
cacttgagtgtattaagtaggcaag

SEQ ID NO: 2011860 - DNA, 25 bp, Homo sapien
cacacttgagtgtattaagtaggca

SEQ ID NO: 2011861 - DNA, 25 bp, Homo sapien
tattaagtaggcaagctttactcgt

SEQ ID NO: 2011862 - DNA, 25 bp, Homo sapien
agtgtattaagtaggcaagctttac

SEQ ID NO: 2011863 - DNA, 25 bp, Homo sapien
tgttgaaccaggagaccagaggctc

SEQ ID NO: 2011864 - DNA, 25 bp, Homo sapien
tacatataagcctgttgttgaacca

SEQ ID NO: 2011865 - DNA, 25 bp, Homo sapien
aatcccaactgcatagaaatctagg

SEQ ID NO: 2011866 - DNA, 25 bp, Homo sapien
aagcacgcaccaacatttaagtttg

SEQ ID NO: 2011867 - DNA, 25 bp, Homo sapien
acaaaagtggggtgaatgcactgct

SEQ ID NO: 2011868 - DNA, 25 bp, Homo sapien
tacaaaagtggggtgaatgcactgc

SEQ ID NO: 2011869 - DNA, 25 bp, Homo sapien
ttacaaaagtggggtgaatgcactg

SEQ ID NO: 2011870 - DNA, 25 bp, Homo sapien
agagagcgacattcacaccagtgtg

SEQ ID NO: 2011871 - DNA, 25 bp, Homo sapien
tgtctctttgagcacaacacggtgg

SEQ ID NO: 2011872 - DNA, 25 bp, Homo sapien
agtgattcacaacgcggcccataag

SEQ ID NO: 2011873 - DNA, 25 bp, Homo sapien
tctgttctagaaatataagtggcct

SEQ ID NO: 2011874 - DNA, 25 bp, Homo sapien
acagcactgtgacaccgtctcggga

SEQ ID NO: 2011875 - DNA, 25 bp, Homo sapien
acagcgctgtgacaccatctcggga

SEQ ID NO: 2011876 - DNA, 25 bp, Homo sapien
agcactgtgacaccatctcgggagg

SEQ ID NO: 2011877 - DNA, 25 bp, Homo sapien
agcactgtgacaccgtctcgggagg

SEQ ID NO: 2011878 - DNA, 25 bp, Homo sapien
cagcactgtgacaccatctcgggag

SEQ ID NO: 2011879 - DNA, 25 bp, Homo sapien
agcgctgtgacaccatctcgggagg

SEQ ID NO: 2011880 - DNA, 25 bp, Homo sapien
agcactgtgacaccatctcgggagg

SEQ ID NO: 2011881 - DNA, 25 bp, Homo sapien
acagcgctgtgacaccatctcggga

SEQ ID NO: 2011882 - DNA, 25 bp, Homo sapien
cttccccaaggtgactctccactct

SEQ ID NO: 2011883 - DNA, 25 bp, Homo sapien
tgcaaagacctaggctgcacatgca

SEQ ID NO: 2011884 - DNA, 25 bp, Homo sapien
ttactatggctgtatctccttcccc

SEQ ID NO: 2011885 - DNA, 25 bp, Homo sapien
aattttccctttactatggctgtat

SEQ ID NO: 2011886 - DNA, 25 bp, Homo sapien
tcgtgactacgtttccaggcaggga

SEQ ID NO: 2011887 - DNA, 25 bp, Homo sapien
ggtggaactattgtcacagcttgcc

SEQ ID NO: 2011888 - DNA, 25 bp, Homo sapien
gatgtcttccaagctcaaatggatg

SEQ ID NO: 2011889 - DNA, 25 bp, Homo sapien
tctggaaatcaatgagccctccctc

SEQ ID NO: 2011890 - DNA, 25 bp, Homo sapien
gaggcctttttcacagcggctcaaa

SEQ ID NO: 2011891 - DNA, 25 bp, Homo sapien
tctctaaattaggtcagtaggaaat

SEQ ID NO: 2011892 - DNA, 25 bp, Homo sapien
gaaataacatctgcttgctcgcact

SEQ ID NO: 2011893 - DNA, 25 bp, Homo sapien
accaggtggcattgcgttccaatga

SEQ ID NO: 2011894 - DNA, 25 bp, Homo sapien
gatgaccaaatgcacgcaggaaaag

SEQ ID NO: 2011895 - DNA, 25 bp, Homo sapien
tgcactctttaaggttttgggcaca

SEQ ID NO: 2011896 - DNA, 25 bp, Homo sapien
tcaagctgcttttatggccagctgc

SEQ ID NO: 2011897 - DNA, 25 bp, Homo sapien
cacacatttcaacggctgaatgagg

SEQ ID NO: 2011898 - DNA, 25 bp, Homo sapien
cagcacttcgtctcactgaacccaa

SEQ ID NO: 2011899 - DNA, 25 bp, Homo sapien
tctgcagcacttcgtctcactgaac

SEQ ID NO: 2011900 - DNA, 25 bp, Homo sapien
cctgtctgcagcacttcgtctcact

SEQ ID NO: 2011901 - DNA, 25 bp, Homo sapien
tgtctgcagcacttcgtctcactga

SEQ ID NO: 2011902 - DNA, 25 bp, Homo sapien
gtgagcaccaacttcaagcagaggc

SEQ ID NO: 2011903 - DNA, 25 bp, Homo sapien
caggaagtgagcaccaacttcaagc

SEQ ID NO: 2011904 - DNA, 25 bp, Homo sapien
acagttccataaagccactgccctg

SEQ ID NO: 2011905 - DNA, 25 bp, Homo sapien
aagtgagcaccaacttcaagcagag

SEQ ID NO: 2011906 - DNA, 25 bp, Homo sapien
cacctgtgggttcctatcaccttac

SEQ ID NO: 2011907 - DNA, 25 bp, Homo sapien
tggcgtgtgttccaggcgtgcccac

SEQ ID NO: 2011908 - DNA, 25 bp, Homo sapien
caaatccttcgagagccacaaggaa

SEQ ID NO: 2011909 - DNA, 25 bp, Homo sapien
aagaggcctcgctatgggataggat

SEQ ID NO: 2011910 - DNA, 25 bp, Homo sapien
tgccccactgcttcagtagatttaa

SEQ ID NO: 2011911 - DNA, 25 bp, Homo sapien
gatttaatggaatactccgtgcgca

SEQ ID NO: 2011912 - DNA, 25 bp, Homo sapien
tgtgtgaagcacaactcagcgtgcg

SEQ ID NO: 2011913 - DNA, 25 bp, Homo sapien
tccgtgcgcaaaacttgtgtgaagc

SEQ ID NO: 2011914 - DNA, 25 bp, Homo sapien
atgaaggttactttgtcaccatcca

SEQ ID NO: 2011915 - DNA, 25 bp, Homo sapien
tgaaggttactttgtcaccatccat

SEQ ID NO: 2011916 - DNA, 25 bp, Homo sapien
ctagcaggaataagcactcagtaac

SEQ ID NO: 2011917 - DNA, 25 bp, Homo sapien
ggaataagcactcagtaactgccag

SEQ ID NO: 2011918 - DNA, 25 bp, Homo sapien
caggcagcctggtggcattcttcac

SEQ ID NO: 2011919 - DNA, 25 bp, Homo sapien
aagcactcagtaactgccaggcagc

SEQ ID NO: 2011920 - DNA, 25 bp, Homo sapien
gacatacccacgaaagacagaggtg

SEQ ID NO: 2011921 - DNA, 25 bp, Homo sapien
ttatgctgccaacccaagagctacg

SEQ ID NO: 2011922 - DNA, 25 bp, Homo sapien
aaccttgttgtcacactgcctgggc

SEQ ID NO: 2011923 - DNA, 25 bp, Homo sapien
cccatgagtgttcgcagaagagcct

SEQ ID NO: 2011924 - DNA, 25 bp, Homo sapien
gcagcccgtgtacaggaagattttc

SEQ ID NO: 2011925 - DNA, 25 bp, Homo sapien
tcccgcggtgaagcaggtgcctgca

SEQ ID NO: 2011926 - DNA, 25 bp, Homo sapien
ggagaaccacggtcttccagatgcc

SEQ ID NO: 2011927 - DNA, 25 bp, Homo sapien
ccattaggtgactgttgcaaggaga

SEQ ID NO: 2011928 - DNA, 25 bp, Homo sapien
ttttgttgttgtcttcagggcacat

SEQ ID NO: 2011929 - DNA, 25 bp, Homo sapien
cagtgtctcttaattctcactctca

SEQ ID NO: 2011930 - DNA, 25 bp, Homo sapien
ttctttgatggctgttttctctgga

SEQ ID NO: 2011931 - DNA, 25 bp, Homo sapien
cagggcacattctcttgatcttctc

SEQ ID NO: 2011932 - DNA, 25 bp, Homo sapien
cttcggcccgttgctgaatgtacaa

SEQ ID NO: 2011933 - DNA, 25 bp, Homo sapien
gcactggagactgcccagcaatgca

SEQ ID NO: 2011934 - DNA, 25 bp, Homo sapien
gctgaatgtacaaggaggcagcact

SEQ ID NO: 2011935 - DNA, 25 bp, Homo sapien
gaggcagcactggagactgcccagc

SEQ ID NO: 2011936 - DNA, 25 bp, Homo sapien
ggaggttccgtgtgacggtcgcgtc

SEQ ID NO: 2011937 - DNA, 25 bp, Homo sapien
cagtcccggcgcaaacaacacagcg

SEQ ID NO: 2011938 - DNA, 25 bp, Homo sapien
tcccggcgcaaacaacacagcgcgg

SEQ ID NO: 2011939 - DNA, 25 bp, Homo sapien
tgacggtcgcgtcccagggcagcac

SEQ ID NO: 2011940 - DNA, 25 bp, Homo sapien
aacaggaaagccagcgaggtcccgg

SEQ ID NO: 2011941 - DNA, 25 bp, Homo sapien
aggtcccggagggagccacttcgag

SEQ ID NO: 2011942 - DNA, 25 bp, Homo sapien
tcccggagggagccacttcgaggat

SEQ ID NO: 2011943 - DNA, 25 bp, Homo sapien
ccggtcgcacggcttggccgagggg

SEQ ID NO: 2011944 - DNA, 25 bp, Homo sapien
gtcagagtggggtcccggggaagca

SEQ ID NO: 2011945 - DNA, 25 bp, Homo sapien
gagcggagctgaggtgctcgcggga

SEQ ID NO: 2011946 - DNA, 25 bp, Homo sapien
gcggagctgaggtgctcgcgggagc

SEQ ID NO: 2011947 - DNA, 25 bp, Homo sapien
ggagcggagctgaggtgctcgcggg

SEQ ID NO: 2011948 - DNA, 25 bp, Homo sapien
agcggagctgaggtgctcgcgggag

SEQ ID NO: 2011949 - DNA, 25 bp, Homo sapien
aaacgcaaagaggagtctccgcact

SEQ ID NO: 2011950 - DNA, 25 bp, Homo sapien
tatgctggacgcactcaaggttggg

SEQ ID NO: 2011951 - DNA, 25 bp, Homo sapien
gacggaccatcgtcctgagtgtggc

SEQ ID NO: 2011952 - DNA, 25 bp, Homo sapien
cgcgcgcattttcccggacatttag

SEQ ID NO: 2011953 - DNA, 25 bp, Homo sapien
ggagaagcaacttctagaccactac

SEQ ID NO: 2011954 - DNA, 25 bp, Homo sapien
gggatttagaaggtactggaagctc

SEQ ID NO: 2011955 - DNA, 25 bp, Homo sapien
caacttctagaccactactttctgg

SEQ ID NO: 2011956 - DNA, 25 bp, Homo sapien
gctctgtcttgaacctttggaaaga

SEQ ID NO: 2011957 - DNA, 25 bp, Homo sapien
ggggaaagatccagaggccgtgcag

SEQ ID NO: 2011958 - DNA, 25 bp, Homo sapien
cgtgcagcctccataatttccgctg

SEQ ID NO: 2011959 - DNA, 25 bp, Homo sapien
gcctccataatttccgctgatcaat

SEQ ID NO: 2011960 - DNA, 25 bp, Homo sapien
cataatttccgctgatcaatgtgcc

SEQ ID NO: 2011961 - DNA, 25 bp, Homo sapien
cagggaacagggtgtattgctgtca

SEQ ID NO: 2011962 - DNA, 25 bp, Homo sapien
cggtgctaggccaggtgttacaaga

SEQ ID NO: 2011963 - DNA, 25 bp, Homo sapien
tattgctgtcactggcggtgctagg

SEQ ID NO: 2011964 - DNA, 25 bp, Homo sapien
gagactggcgactggcagggaacag

SEQ ID NO: 2011965 - DNA, 25 bp, Homo sapien
tattgtggctactgctggagacttt

SEQ ID NO: 2011966 - DNA, 25 bp, Homo sapien
atgttccttattcctgttatcatta

SEQ ID NO: 2011967 - DNA, 25 bp, Homo sapien
cttttattgtggctactgctggaga

SEQ ID NO: 2011968 - DNA, 25 bp, Homo sapien
cattaataagattaagggcttcttt

SEQ ID NO: 2011969 - DNA, 25 bp, Homo sapien
tttcaacaccctaatgagtgcactc

SEQ ID NO: 2011970 - DNA, 25 bp, Homo sapien
aaaagagtatagctttctcaggatc

SEQ ID NO: 2011971 - DNA, 25 bp, Homo sapien
acacaaaagagtatagctttctcag

SEQ ID NO: 2011972 - DNA, 25 bp, Homo sapien
aatacctttcaacaccctaatgagt

SEQ ID NO: 2011973 - DNA, 25 bp, Homo sapien
gaacagctgcctccgatctgctgtc

SEQ ID NO: 2011974 - DNA, 25 bp, Homo sapien
ctaccacggcggtgaacagctgcct

SEQ ID NO: 2011975 - DNA, 25 bp, Homo sapien
tgcgctcacgggctaccacggcggt

SEQ ID NO: 2011976 - DNA, 25 bp, Homo sapien
gatctgctgtcgttccctcttttcc

SEQ ID NO: 2011977 - DNA, 25 bp, Homo sapien
ttttccgctccatgcccctttgctc

SEQ ID NO: 2011978 - DNA, 25 bp, Homo sapien
ctgatgccgtcagctcctggttcta

SEQ ID NO: 2011979 - DNA, 25 bp, Homo sapien
gcattcacggccttattccaccttt

SEQ ID NO: 2011980 - DNA, 25 bp, Homo sapien
cacggccttattccacctttcaagg

SEQ ID NO: 2011981 - DNA, 25 bp, Homo sapien
aaaaggctagataatccccaggtct

SEQ ID NO: 2011982 - DNA, 25 bp, Homo sapien
tgaaaaaggctagataatccccagg

SEQ ID NO: 2011983 - DNA, 25 bp, Homo sapien
aaaggctagataatccccaggtctc

SEQ ID NO: 2011984 - DNA, 25 bp, Homo sapien
gtgaaaaaggctagataatccccag

SEQ ID NO: 2011985 - DNA, 25 bp, Homo sapien
ctaaggcagcggcggcccctgtgac

SEQ ID NO: 2011986 - DNA, 25 bp, Homo sapien
taaggcagcggcggcccctgtgaca

SEQ ID NO: 2011987 - DNA, 25 bp, Homo sapien
ctgcagggacggcggtggagggact

SEQ ID NO: 2011988 - DNA, 25 bp, Homo sapien
ggacggcggtggagggactgggctc

SEQ ID NO: 2011989 - DNA, 25 bp, Homo sapien
cggcggtggagggactgggctccct

SEQ ID NO: 2011990 - DNA, 25 bp, Homo sapien
cagggacggcggtggagggactggg

SEQ ID NO: 2011991 - DNA, 25 bp, Homo sapien
ggcggcaggtgggccctgtctgcag

SEQ ID NO: 2011992 - DNA, 25 bp, Homo sapien
gcgagtggctttcccgctccccttc

SEQ ID NO: 2011993 - DNA, 25 bp, Homo sapien
ccactccacggagggccgcaggagc

SEQ ID NO: 2011994 - DNA, 25 bp, Homo sapien
cagccaggatggtgacgcaggaggg

SEQ ID NO: 2011995 - DNA, 25 bp, Homo sapien
caggatggtgacgcaggagggaggg

SEQ ID NO: 2011996 - DNA, 25 bp, Homo sapien
ggatggtgacgcaggagggagggcg

SEQ ID NO: 2011997 - DNA, 25 bp, Homo sapien
gaggaaactgtgagatgtaaagtct

SEQ ID NO: 2011998 - DNA, 25 bp, Homo sapien
ccagatgtgagtcaagagatgcgga

SEQ ID NO: 2011999 - DNA, 25 bp, Homo sapien
tattccccttgattcgtaccagctg

SEQ ID NO: 2012000 - DNA, 25 bp, Homo sapien
tgagatgtaaagtcttctggactca

SEQ ID NO: 2012001 - DNA, 25 bp, Homo sapien
tcgtggccttcgtgccggcaagcca

SEQ ID NO: 2012002 - DNA, 25 bp, Homo sapien
agcttcgtggccttcgtgccggcaa

SEQ ID NO: 2012003 - DNA, 25 bp, Homo sapien
cttcgtgccggcaagccacagctgt

SEQ ID NO: 2012004 - DNA, 25 bp, Homo sapien
ttcgtgccggcaagccacagctgtc

SEQ ID NO: 2012005 - DNA, 25 bp, Homo sapien
agagaccccggcctgcgtcactctg

SEQ ID NO: 2012006 - DNA, 25 bp, Homo sapien
cactctgctgtgcatcacgtctgga

SEQ ID NO: 2012007 - DNA, 25 bp, Homo sapien
tcagaattagcacggagagaccccg

SEQ ID NO: 2012008 - DNA, 25 bp, Homo sapien
tgtgcatcacgtctggagctcaggt

SEQ ID NO: 2012009 - DNA, 25 bp, Homo sapien
ctcgcctgtctttggcctctgggag

SEQ ID NO: 2012010 - DNA, 25 bp, Homo sapien
tgcctcgcctgtctttggcctctgg

SEQ ID NO: 2012011 - DNA, 25 bp, Homo sapien
tagcggcggcgctcctgcctcgcct

SEQ ID NO: 2012012 - DNA, 25 bp, Homo sapien
gcctccatcctccaatagcggcggc

SEQ ID NO: 2012013 - DNA, 25 bp, Homo sapien
ctctgatggccatccaagccggtgc

SEQ ID NO: 2012014 - DNA, 25 bp, Homo sapien
cctcgcctagtgtccagaactgagc

SEQ ID NO: 2012015 - DNA, 25 bp, Homo sapien
agaactgagctctacctagcccttg

SEQ ID NO: 2012016 - DNA, 25 bp, Homo sapien
gttttgccatatagagacttccggg

SEQ ID NO: 2012017 - DNA, 25 bp, Homo sapien
cacaacagcaattgaagtggattcc

SEQ ID NO: 2012018 - DNA, 25 bp, Homo sapien
tgatgaagttggaaaggcgaacaca

SEQ ID NO: 2012019 - DNA, 25 bp, Homo sapien
agtggattccaagaataaaaaatga

SEQ ID NO: 2012020 - DNA, 25 bp, Homo sapien
aatgattcgccagaaatacgccagg

SEQ ID NO: 2012021 - DNA, 25 bp, Homo sapien
agcgccacagcagcgtagaaggcct

SEQ ID NO: 2012022 - DNA, 25 bp, Homo sapien
gcctcggagcgccacagcagcgtag

SEQ ID NO: 2012023 - DNA, 25 bp, Homo sapien
agggaagcctcggagcgccacagca

SEQ ID NO: 2012024 - DNA, 25 bp, Homo sapien
cagcagggaagcctcggagcgccac

SEQ ID NO: 2012025 - DNA, 25 bp, Homo sapien
cttcaaccaatagatggggctctgc

SEQ ID NO: 2012026 - DNA, 25 bp, Homo sapien
aggctgaagaggagcttcaaccaat

SEQ ID NO: 2012027 - DNA, 25 bp, Homo sapien
gaagaggagcttcaaccaatagatg

SEQ ID NO: 2012028 - DNA, 25 bp, Homo sapien
agaggagcttcaaccaatagatggg

SEQ ID NO: 2012029 - DNA, 25 bp, Homo sapien
gtccctcaccattgcacacccaagc

SEQ ID NO: 2012030 - DNA, 25 bp, Homo sapien
gggactgtggtcttgagtccctcac

SEQ ID NO: 2012031 - DNA, 25 bp, Homo sapien
tagggactgtggtcttgagtccctc

SEQ ID NO: 2012032 - DNA, 25 bp, Homo sapien
ccctcaccattgcacacccaagcat

SEQ ID NO: 2012033 - DNA, 25 bp, Homo sapien
gaagctgcctgatcagagtacagat

SEQ ID NO: 2012034 - DNA, 25 bp, Homo sapien
ggtctgcttcttggcaaaattgtgt

SEQ ID NO: 2012035 - DNA, 25 bp, Homo sapien
tgggtctgcttcttggcaaaattgt

SEQ ID NO: 2012036 - DNA, 25 bp, Homo sapien
tactggggtacacagtgggtctgct

SEQ ID NO: 2012037 - DNA, 25 bp, Homo sapien
ctgcttcttggcaaaattgtgtgcc

SEQ ID NO: 2012038 - DNA, 25 bp, Homo sapien
ctctgggacactccttgcatctttc

SEQ ID NO: 2012039 - DNA, 25 bp, Homo sapien
tcacactctcgccttgccctgttct

SEQ ID NO: 2012040 - DNA, 25 bp, Homo sapien
tcttgcctgcgttttctctgggaca

SEQ ID NO: 2012041 - DNA, 25 bp, Homo sapien
ggtggtcccctttcatgtaaattgc

SEQ ID NO: 2012042 - DNA, 25 bp, Homo sapien
aactcggaagtctttattacaaatg

SEQ ID NO: 2012043 - DNA, 25 bp, Homo sapien
cctggatctagctggcaagatccca

SEQ ID NO: 2012044 - DNA, 25 bp, Homo sapien
tggaagcaggtaaaactcggaagtc

SEQ ID NO: 2012045 - DNA, 25 bp, Homo sapien
ctagctggcaagatcccaattttgg

SEQ ID NO: 2012046 - DNA, 25 bp, Homo sapien
ctgtcagcctgatgcactgtgcggc

SEQ ID NO: 2012047 - DNA, 25 bp, Homo sapien
tgtcagcctgatgcactgtgcggct

SEQ ID NO: 2012048 - DNA, 25 bp, Homo sapien
gctgtcagcctgatgcactgtgcgg

SEQ ID NO: 2012049 - DNA, 25 bp, Homo sapien
ggctgtcagcctgatgcactgtgcg

SEQ ID NO: 2012050 - DNA, 25 bp, Homo sapien
ctcaatgcgatgcttgtgagttttc

SEQ ID NO: 2012051 - DNA, 25 bp, Homo sapien
agtttcctcaatgcgatgcttgtga

SEQ ID NO: 2012052 - DNA, 25 bp, Homo sapien
acagtttcctcaatgcgatgcttgt

SEQ ID NO: 2012053 - DNA, 25 bp, Homo sapien
tttcctcaatgcgatgcttgtgagt

SEQ ID NO: 2012054 - DNA, 25 bp, Homo sapien
ctgactgagcacatgagatgaggat

SEQ ID NO: 2012055 - DNA, 25 bp, Homo sapien
aaagccttgagactgtctgcttggc

SEQ ID NO: 2012056 - DNA, 25 bp, Homo sapien
tgactgagcacatgagatgaggatc

SEQ ID NO: 2012057 - DNA, 25 bp, Homo sapien
tgcgtgcaaagtctcgaaagccttg

SEQ ID NO: 2012058 - DNA, 25 bp, Homo sapien
cccactctcaagccaaccaaaaaat

SEQ ID NO: 2012059 - DNA, 25 bp, Homo sapien
ccactctcaagccaaccaaaaaatc

SEQ ID NO: 2012060 - DNA, 25 bp, Homo sapien
tgattccagatctaatgatcttctg

SEQ ID NO: 2012061 - DNA, 25 bp, Homo sapien
cctgattccagatctaatgatcttc

SEQ ID NO: 2012062 - DNA, 25 bp, Homo sapien
ttccagatctaatgatcttctgcat

SEQ ID NO: 2012063 - DNA, 25 bp, Homo sapien
gattccagatctaatgatcttctgc

SEQ ID NO: 2012064 - DNA, 25 bp, Homo sapien
ctgaagcaatggaaaatgtcagatc

SEQ ID NO: 2012065 - DNA, 25 bp, Homo sapien
tctcctgcaagccttgaaatgcagt

SEQ ID NO: 2012066 - DNA, 25 bp, Homo sapien
agggattcctctccgaccgcacttg

SEQ ID NO: 2012067 - DNA, 25 bp, Homo sapien
cctgatggagctgatctcctgcaag

SEQ ID NO: 2012068 - DNA, 25 bp, Homo sapien
ctccttagtgaaggtcccctgatgg

SEQ ID NO: 2012069 - DNA, 25 bp, Homo sapien
tagggcatattgtcattaccattcc

SEQ ID NO: 2012070 - DNA, 25 bp, Homo sapien
gctctgtccctatttttcatccaca

SEQ ID NO: 2012071 - DNA, 25 bp, Homo sapien
tcatccacacaagggatggcattgt

SEQ ID NO: 2012072 - DNA, 25 bp, Homo sapien
ggatggcattgtctgccagagatga

SEQ ID NO: 2012073 - DNA, 25 bp, Homo sapien
ctctgggaagtggataaatgacgaa

SEQ ID NO: 2012074 - DNA, 25 bp, Homo sapien
ggcagttatgattaggggctcccac

SEQ ID NO: 2012075 - DNA, 25 bp, Homo sapien
tgatcctcccaacggctctgggaag

SEQ ID NO: 2012076 - DNA, 25 bp, Homo sapien
gataaatgacgaacataatcaggat

SEQ ID NO: 2012077 - DNA, 25 bp, Homo sapien
gaagtcaggcaatacagaccaaagt

SEQ ID NO: 2012078 - DNA, 25 bp, Homo sapien
agaagtcaggcaatacagaccaaag

SEQ ID NO: 2012079 - DNA, 25 bp, Homo sapien
aagtcaggcaatacagaccaaagtt

SEQ ID NO: 2012080 - DNA, 25 bp, Homo sapien
cacagtttcattgaacaagaatgaa

SEQ ID NO: 2012081 - DNA, 25 bp, Homo sapien
cgcttaggttatcacagtttcattg

SEQ ID NO: 2012082 - DNA, 25 bp, Homo sapien
ggttatcacagtttcattgaacaag

SEQ ID NO: 2012083 - DNA, 25 bp, Homo sapien
gtttcattgaacaagaatgaagaag

SEQ ID NO: 2012084 - DNA, 25 bp, Homo sapien
taaaccacatactatctatgacctg

SEQ ID NO: 2012085 - DNA, 25 bp, Homo sapien
cgcgccaggccctaaatccggattt

SEQ ID NO: 2012086 - DNA, 25 bp, Homo sapien
cctcaataaagtgactaaacttgca

SEQ ID NO: 2012087 - DNA, 25 bp, Homo sapien
gcctctcgggcccaggtgattttcc

SEQ ID NO: 2012088 - DNA, 25 bp, Homo sapien
aaaggaaaatagcaaaggactgagg

SEQ ID NO: 2012089 - DNA, 25 bp, Homo sapien
aaatagcaaaggactgaggtttcat

SEQ ID NO: 2012090 - DNA, 25 bp, Homo sapien
tgaaaaggaaaatagcaaaggactg

SEQ ID NO: 2012091 - DNA, 25 bp, Homo sapien
gaaaatagcaaaggactgaggtttc

SEQ ID NO: 2012092 - DNA, 25 bp, Homo sapien
caggcagcgtctgggaattctaact

SEQ ID NO: 2012093 - DNA, 25 bp, Homo sapien
gtgcttgttcgaaggcacaacccta

SEQ ID NO: 2012094 - DNA, 25 bp, Homo sapien
agcgtctgggaattctaactgaggc

SEQ ID NO: 2012095 - DNA, 25 bp, Homo sapien
taactgaggctgtcgttgaatgtgc

SEQ ID NO: 2012096 - DNA, 25 bp, Homo sapien
ggtcctggtcctcacctgcgcccat

SEQ ID NO: 2012097 - DNA, 25 bp, Homo sapien
aggtcctggtcctcacctgcgccca

SEQ ID NO: 2012098 - DNA, 25 bp, Homo sapien
ggtcgcaggtcctggtcctcacctg

SEQ ID NO: 2012099 - DNA, 25 bp, Homo sapien
gaaggtcgcaggtcctggtcctcac

SEQ ID NO: 2012100 - DNA, 25 bp, Homo sapien
ggtgagggctttcagggactgtaaa

SEQ ID NO: 2012101 - DNA, 25 bp, Homo sapien
gtgagggctttcagggactgtaaac

SEQ ID NO: 2012102 - DNA, 25 bp, Homo sapien
tgagggctttcagggactgtaaacg

SEQ ID NO: 2012103 - DNA, 25 bp, Homo sapien
tggttctcgtaaggggatcggcaat

SEQ ID NO: 2012104 - DNA, 25 bp, Homo sapien
agttgtggttctcgtaaggggatcg

SEQ ID NO: 2012105 - DNA, 25 bp, Homo sapien
tcgtaaggggatcggcaatcccgag

SEQ ID NO: 2012106 - DNA, 25 bp, Homo sapien
gggatcggcaatcccgagggaaaca

SEQ ID NO: 2012107 - DNA, 25 bp, Homo sapien
ggagcattccgtcggtgtctcagtg

SEQ ID NO: 2012108 - DNA, 25 bp, Homo sapien
gattcggagcattccgtcggtgtct

SEQ ID NO: 2012109 - DNA, 25 bp, Homo sapien
ctcaacccggcgaaccagccgcgga

SEQ ID NO: 2012110 - DNA, 25 bp, Homo sapien
ttccgtcggtgtctcagtgttccat

SEQ ID NO: 2012111 - DNA, 25 bp, Homo sapien
ccaatggcgttgtgcgcggccgttc

SEQ ID NO: 2012112 - DNA, 25 bp, Homo sapien
gggagtcgctgtaccgtggccgcgg

SEQ ID NO: 2012113 - DNA, 25 bp, Homo sapien
tccctgccgagctcggggagtcgct

SEQ ID NO: 2012114 - DNA, 25 bp, Homo sapien
cggcggcgggctccattgcagtggg

SEQ ID NO: 2012115 - DNA, 25 bp, Homo sapien
ctcggggccgccggggtcagcgcgg

SEQ ID NO: 2012116 - DNA, 25 bp, Homo sapien
ggtcagcgcgggctccggactccgg

SEQ ID NO: 2012117 - DNA, 25 bp, Homo sapien
cggggtcagcgcgggctccggactc

SEQ ID NO: 2012118 - DNA, 25 bp, Homo sapien
cgccggggtcagcgcgggctccgga

SEQ ID NO: 2012119 - DNA, 25 bp, Homo sapien
ctccgggtgcacagcgacgccgagg

SEQ ID NO: 2012120 - DNA, 25 bp, Homo sapien
gcggcggccgcggacagattcctct

SEQ ID NO: 2012121 - DNA, 25 bp, Homo sapien
cggcgcctcgcctggggcctcttcc

SEQ ID NO: 2012122 - DNA, 25 bp, Homo sapien
ggcagcgccgggggagtgcgaggca

SEQ ID NO: 2012123 - DNA, 25 bp, Homo sapien
cgcaggtaggtcgaggccatgtggc

SEQ ID NO: 2012124 - DNA, 25 bp, Homo sapien
ccatgtggcggtcgaagacgtgcac

SEQ ID NO: 2012125 - DNA, 25 bp, Homo sapien
ccggtgcttcagaagcagcgtcttc

SEQ ID NO: 2012126 - DNA, 25 bp, Homo sapien
gctgcagcgtctgccggtgcttcag

SEQ ID NO: 2012127 - DNA, 25 bp, Homo sapien
gcggtacctccgagtcccgcggctc

SEQ ID NO: 2012128 - DNA, 25 bp, Homo sapien
gcgctcctcgcgggcggtacctccg

SEQ ID NO: 2012129 - DNA, 25 bp, Homo sapien
ctggcgcggcgcgaccacccgcccg

SEQ ID NO: 2012130 - DNA, 25 bp, Homo sapien
ccccgaaggcacccggcgcgctcct

SEQ ID NO: 2012131 - DNA, 25 bp, Homo sapien
ggtgtcggagaccacaggccgtggg

SEQ ID NO: 2012132 - DNA, 25 bp, Homo sapien
tcggtgtcggagaccacaggccgtg

SEQ ID NO: 2012133 - DNA, 25 bp, Homo sapien
gcgcggggcgaagagacagggcccc

SEQ ID NO: 2012134 - DNA, 25 bp, Homo sapien
ggggcgcggggcgaagagacagggc

SEQ ID NO: 2012135 - DNA, 25 bp, Homo sapien
gctgtaggggtccaaccggtcagac

SEQ ID NO: 2012136 - DNA, 25 bp, Homo sapien
gtcagacacgctctcggcgctggga

SEQ ID NO: 2012137 - DNA, 25 bp, Homo sapien
ggccgaggctgcgtcggcctcgagc

SEQ ID NO: 2012138 - DNA, 25 bp, Homo sapien
ctcgagctcttccgacgacgacgag

SEQ ID NO: 2012139 - DNA, 25 bp, Homo sapien
ctggggaagcgggaggggctgcgcg

SEQ ID NO: 2012140 - DNA, 25 bp, Homo sapien
cgggaggggctgcgcggggtggccg

SEQ ID NO: 2012141 - DNA, 25 bp, Homo sapien
gctgcgcggggtggccgggacggcg

SEQ ID NO: 2012142 - DNA, 25 bp, Homo sapien
gaagcgggaggggctgcgcggggtg

SEQ ID NO: 2012143 - DNA, 25 bp, Homo sapien
ctcctcgcacgacccctcgcggacg

SEQ ID NO: 2012144 - DNA, 25 bp, Homo sapien
gccttctcctcgcacgacccctcgc

SEQ ID NO: 2012145 - DNA, 25 bp, Homo sapien
ttctcctcgcacgacccctcgcgga

SEQ ID NO: 2012146 - DNA, 25 bp, Homo sapien
tcgcacgacccctcgcggacggccc

SEQ ID NO: 2012147 - DNA, 25 bp, Homo sapien
gaggcgccttctccgcggtcacccc

SEQ ID NO: 2012148 - DNA, 25 bp, Homo sapien
cggaggcgccttctccgcggtcacc

SEQ ID NO: 2012149 - DNA, 25 bp, Homo sapien
ggcggaggcgccttctccgcggtca

SEQ ID NO: 2012150 - DNA, 25 bp, Homo sapien
gcgccttctccgcggtcaccccgct

SEQ ID NO: 2012151 - DNA, 25 bp, Homo sapien
ctgcacgtacagggtgggcggcggg

SEQ ID NO: 2012152 - DNA, 25 bp, Homo sapien
cccagttggaagaggtagtcatttt

SEQ ID NO: 2012153 - DNA, 25 bp, Homo sapien
ggatctgcaatggcttctcctccgc

SEQ ID NO: 2012154 - DNA, 25 bp, Homo sapien
ctccgcctccaagcgccgggtggtc

SEQ ID NO: 2012155 - DNA, 25 bp, Homo sapien
ccagttggaagaggtagtcattttg

SEQ ID NO: 2012156 - DNA, 25 bp, Homo sapien
atagaagcggatgaggcagccaatc

SEQ ID NO: 2012157 - DNA, 25 bp, Homo sapien
gcatagaagcggatgaggcagccaa

SEQ ID NO: 2012158 - DNA, 25 bp, Homo sapien
ctgcatagaagcggatgaggcagcc

SEQ ID NO: 2012159 - DNA, 25 bp, Homo sapien
catagaagcggatgaggcagccaat

SEQ ID NO: 2012160 - DNA, 25 bp, Homo sapien
accacccgtcaaggcaggtgacttc

SEQ ID NO: 2012161 - DNA, 25 bp, Homo sapien
ttgcaaccacccgtcaaggcaggtg

SEQ ID NO: 2012162 - DNA, 25 bp, Homo sapien
cttttgcaaccacccgtcaaggcag

SEQ ID NO: 2012163 - DNA, 25 bp, Homo sapien
caaccacccgtcaaggcaggtgact

SEQ ID NO: 2012164 - DNA, 25 bp, Homo sapien
ttcaattaaaatgtgcgaacaattt

SEQ ID NO: 2012165 - DNA, 25 bp, Homo sapien
cacatacctgccaaaaggggcattt

SEQ ID NO: 2012166 - DNA, 25 bp, Homo sapien
catacctgccaaaaggggcatttta

SEQ ID NO: 2012167 - DNA, 25 bp, Homo sapien
taaaatgtgcgaacaatttgttatt

SEQ ID NO: 2012168 - DNA, 25 bp, Homo sapien
tcaacagcactaacgtaccatgggt

SEQ ID NO: 2012169 - DNA, 25 bp, Homo sapien
cagtaccatttgtgtcttgcagtca

SEQ ID NO: 2012170 - DNA, 25 bp, Homo sapien
tagtattttacagcaatgggtccgg

SEQ ID NO: 2012171 - DNA, 25 bp, Homo sapien
aatagaccatgaaagcccgtttgcc

SEQ ID NO: 2012172 - DNA, 25 bp, Homo sapien
cccaaatgactgtgagaacttcctg

SEQ ID NO: 2012173 - DNA, 25 bp, Homo sapien
tcctgcagtgagaacaccatgaata

SEQ ID NO: 2012174 - DNA, 25 bp, Homo sapien
ccaaatgactgtgagaacttcctgc

SEQ ID NO: 2012175 - DNA, 25 bp, Homo sapien
agaacttcctgcagtgagaacacca

SEQ ID NO: 2012176 - DNA, 25 bp, Homo sapien
agtttcagaagtcagcgacgtcaga

SEQ ID NO: 2012177 - DNA, 25 bp, Homo sapien
agcacactgccagtttcagaagtca

SEQ ID NO: 2012178 - DNA, 25 bp, Homo sapien
agtcagcgacgtcagaaaaggagtg

SEQ ID NO: 2012179 - DNA, 25 bp, Homo sapien
taccagcacactgccagtttcagaa

SEQ ID NO: 2012180 - DNA, 25 bp, Homo sapien
cctctttaggactcaatctgttcaa

SEQ ID NO: 2012181 - DNA, 25 bp, Homo sapien
gagtgacgacctgaactagatacaa

SEQ ID NO: 2012182 - DNA, 25 bp, Homo sapien
gacttgggttcagtgtcagccgata

SEQ ID NO: 2012183 - DNA, 25 bp, Homo sapien
tttagctgggtggtgaggaatactc

SEQ ID NO: 2012184 - DNA, 25 bp, Homo sapien
gtcaccgcatttactcacagaaggg

SEQ ID NO: 2012185 - DNA, 25 bp, Homo sapien
cccttctgtgagtaaatgcggtgac

SEQ ID NO: 2012186 - DNA, 25 bp, Homo sapien
tataaaatagcctcctccatcgtca

SEQ ID NO: 2012187 - DNA, 25 bp, Homo sapien
tagaggtgctaatggattctcatcc

SEQ ID NO: 2012188 - DNA, 25 bp, Homo sapien
tatctaagtgccagccaaatactgc

SEQ ID NO: 2012189 - DNA, 25 bp, Homo sapien
taggagccctaagatgacttgagcc

SEQ ID NO: 2012190 - DNA, 25 bp, Homo sapien
tcacaagaaggctgctacacagact

SEQ ID NO: 2012191 - DNA, 25 bp, Homo sapien
tattagctcagtcaagggcaaagga

SEQ ID NO: 2012192 - DNA, 25 bp, Homo sapien
tgtccgggaccacatattatacctg

SEQ ID NO: 2012193 - DNA, 25 bp, Homo sapien
caacagaccaatgaaggagccaatg

SEQ ID NO: 2012194 - DNA, 25 bp, Homo sapien
gatgagaacaagatagcaagtaaag

SEQ ID NO: 2012195 - DNA, 25 bp, Homo sapien
aaggaatgtcttattagtgggctgg

SEQ ID NO: 2012196 - DNA, 25 bp, Homo sapien
gaccaagctggtcaacatgttaaaa

SEQ ID NO: 2012197 - DNA, 25 bp, Homo sapien
gaatggctagggacagatttgatga

SEQ ID NO: 2012198 - DNA, 25 bp, Homo sapien
aatgcaaacgaatctctagtgacta

SEQ ID NO: 2012199 - DNA, 25 bp, Homo sapien
aatgaacttggttccctaggtcaag

SEQ ID NO: 2012200 - DNA, 25 bp, Homo sapien
tcaagggtagatagaggataaacat

SEQ ID NO: 2012201 - DNA, 25 bp, Homo sapien
tcacaggtggatataggtcaaaact

SEQ ID NO: 2012202 - DNA, 25 bp, Homo sapien
gcgctttgccccgaaaacatctgat

SEQ ID NO: 2012203 - DNA, 25 bp, Homo sapien
tttaacaccgccaagagtcactacc

SEQ ID NO: 2012204 - DNA, 25 bp, Homo sapien
ggaagcaacccaaactatggctaag

SEQ ID NO: 2012205 - DNA, 25 bp, Homo sapien
gcaagaacagtattttattggtccc

SEQ ID NO: 2012206 - DNA, 25 bp, Homo sapien
gacttttacctgtgagcattagcca

SEQ ID NO: 2012207 - DNA, 25 bp, Homo sapien
gcaagttggccttcactggaacaaa

SEQ ID NO: 2012208 - DNA, 25 bp, Homo sapien
gaaactgagggaccacactagaggc

SEQ ID NO: 2012209 - DNA, 25 bp, Homo sapien
tgcacaaccttggaggccatgagcc

SEQ ID NO: 2012210 - DNA, 25 bp, Homo sapien
cttggtagactgaacaagaacagct

SEQ ID NO: 2012211 - DNA, 25 bp, Homo sapien
taatagcccatgaaatcactagcct

SEQ ID NO: 2012212 - DNA, 25 bp, Homo sapien
gcctcacacacaatttatctttaaa

SEQ ID NO: 2012213 - DNA, 25 bp, Homo sapien
cctgttattcctagctgttgttcca

SEQ ID NO: 2012214 - DNA, 25 bp, Homo sapien
aattcatggaaagcattgactctct

SEQ ID NO: 2012215 - DNA, 25 bp, Homo sapien
ccaccagcatgcatgccaccaccag

SEQ ID NO: 2012216 - DNA, 25 bp, Homo sapien
cagcatgcatgccaccaccaggaat

SEQ ID NO: 2012217 - DNA, 25 bp, Homo sapien
gcatgcatgccaccaccaggaatca

SEQ ID NO: 2012218 - DNA, 25 bp, Homo sapien
accagcatgcatgccaccaccagga

SEQ ID NO: 2012219 - DNA, 25 bp, Homo sapien
gagctgtcatattgctggcaggaaa

SEQ ID NO: 2012220 - DNA, 25 bp, Homo sapien
aggaaattggatctccctttgtagc

SEQ ID NO: 2012221 - DNA, 25 bp, Homo sapien
gatgcagcaaaagagctgtcatatt

SEQ ID NO: 2012222 - DNA, 25 bp, Homo sapien
tccctttgtagcttgaataaagtca

SEQ ID NO: 2012223 - DNA, 25 bp, Homo sapien
acccactggtgagccaacctttctt

SEQ ID NO: 2012224 - DNA, 25 bp, Homo sapien
gacccactggtgagccaacctttct

SEQ ID NO: 2012225 - DNA, 25 bp, Homo sapien
catgtacccctccaaaaagacttgg

SEQ ID NO: 2012226 - DNA, 25 bp, Homo sapien
tgccctcttccccacatgtacccct

SEQ ID NO: 2012227 - DNA, 25 bp, Homo sapien
tttccttccctggaatcgaatctgc

SEQ ID NO: 2012228 - DNA, 25 bp, Homo sapien
tccctggaatcgaatctgccctctt

SEQ ID NO: 2012229 - DNA, 25 bp, Homo sapien
ttctgcttgggagggtgtgttaatc

SEQ ID NO: 2012230 - DNA, 25 bp, Homo sapien
gcttgggagggtgtgttaatcccca

SEQ ID NO: 2012231 - DNA, 25 bp, Homo sapien
tattctgcttgggagggtgtgttaa

SEQ ID NO: 2012232 - DNA, 25 bp, Homo sapien
ctgcttgggagggtgtgttaatccc

SEQ ID NO: 2012233 - DNA, 25 bp, Homo sapien
tctgaagttacctacaacttctata

SEQ ID NO: 2012234 - DNA, 25 bp, Homo sapien
tacaacttctatattccacctagaa

SEQ ID NO: 2012235 - DNA, 25 bp, Homo sapien
cttctatattccacctagaaaccat

SEQ ID NO: 2012236 - DNA, 25 bp, Homo sapien
gttacctacaacttctatattccac

SEQ ID NO: 2012237 - DNA, 25 bp, Homo sapien
tccattgtaacagatggtagacctg

SEQ ID NO: 2012238 - DNA, 25 bp, Homo sapien
tgtcacttccattgtaacagatggt

SEQ ID NO: 2012239 - DNA, 25 bp, Homo sapien
tcagttccgtaggtttagcttccac

SEQ ID NO: 2012240 - DNA, 25 bp, Homo sapien
tggtagacctgttcagttccgtagg

SEQ ID NO: 2012241 - DNA, 25 bp, Homo sapien
atcatcaggatttggttgattatac

SEQ ID NO: 2012242 - DNA, 25 bp, Homo sapien
ctggtggatcatcaggatttggttg

SEQ ID NO: 2012243 - DNA, 25 bp, Homo sapien
tggatcatcaggatttggttgatta

SEQ ID NO: 2012244 - DNA, 25 bp, Homo sapien
tggtggatcatcaggatttggttga

SEQ ID NO: 2012245 - DNA, 25 bp, Homo sapien
gccattctagtgcatatgtagtggt

SEQ ID NO: 2012246 - DNA, 25 bp, Homo sapien
gccaaagtaactattcaaatcctgt

SEQ ID NO: 2012247 - DNA, 25 bp, Homo sapien
tcttctcgcaagtttgtgatccgca

SEQ ID NO: 2012248 - DNA, 25 bp, Homo sapien
gtgatccgcatatcttctttgccaa

SEQ ID NO: 2012249 - DNA, 25 bp, Homo sapien
aataagccacaggttcgaatttcac

SEQ ID NO: 2012250 - DNA, 25 bp, Homo sapien
gatgttaggaaataagccacaggtt

SEQ ID NO: 2012251 - DNA, 25 bp, Homo sapien
taagccacaggttcgaatttcactt

SEQ ID NO: 2012252 - DNA, 25 bp, Homo sapien
taggaaataagccacaggttcgaat

SEQ ID NO: 2012253 - DNA, 25 bp, Homo sapien
ggcgtcttgtccatcggttcactgg

SEQ ID NO: 2012254 - DNA, 25 bp, Homo sapien
tcaggcaggtcccacataggatgac

SEQ ID NO: 2012255 - DNA, 25 bp, Homo sapien
ccaattagtggcagaacatgcatct

SEQ ID NO: 2012256 - DNA, 25 bp, Homo sapien
gctgaatccgttcagagctacccgt

SEQ ID NO: 2012257 - DNA, 25 bp, Homo sapien
tctccttccattaatcccccacagt

SEQ ID NO: 2012258 - DNA, 25 bp, Homo sapien
ccccacagtaccttcctgcatcttt

SEQ ID NO: 2012259 - DNA, 25 bp, Homo sapien
aacagatatcattgtgcctacttca

SEQ ID NO: 2012260 - DNA, 25 bp, Homo sapien
cctgcatctttcttacaacagatat

SEQ ID NO: 2012261 - DNA, 25 bp, Homo sapien
aaccttacagctaggagcggtggtg

SEQ ID NO: 2012262 - DNA, 25 bp, Homo sapien
tatgcctctgatcaaggagcctgca

SEQ ID NO: 2012263 - DNA, 25 bp, Homo sapien
tctaacctcacaatagggtgctggg

SEQ ID NO: 2012264 - DNA, 25 bp, Homo sapien
gaacattaatttgctcggcatgcac

SEQ ID NO: 2012265 - DNA, 25 bp, Homo sapien
gagacttgtcgcagccaccttaagt

SEQ ID NO: 2012266 - DNA, 25 bp, Homo sapien
cttgtcgcagccaccttaagtattc

SEQ ID NO: 2012267 - DNA, 25 bp, Homo sapien
tcgcagccaccttaagtattctgtg

SEQ ID NO: 2012268 - DNA, 25 bp, Homo sapien
ggagacttgtcgcagccaccttaag

SEQ ID NO: 2012269 - DNA, 25 bp, Homo sapien
tgtaactaaccatattttagaccca

SEQ ID NO: 2012270 - DNA, 25 bp, Homo sapien
tggattcctggattaagtgcttgct

SEQ ID NO: 2012271 - DNA, 25 bp, Homo sapien
tttagacccagctaaagcagaaagg

SEQ ID NO: 2012272 - DNA, 25 bp, Homo sapien
gcagaaaggaactttgtagccagct

SEQ ID NO: 2012273 - DNA, 25 bp, Homo sapien
taaaaattgctaatcactggcagta

SEQ ID NO: 2012274 - DNA, 25 bp, Homo sapien
aaaaattgctaatcactggcagtat

SEQ ID NO: 2012275 - DNA, 25 bp, Homo sapien
tgggacatggtgatcttattaaatc

SEQ ID NO: 2012276 - DNA, 25 bp, Homo sapien
accttcccagttcgcaattttcgtg

SEQ ID NO: 2012277 - DNA, 25 bp, Homo sapien
ttttatagttgtcttagcctgggtc

SEQ ID NO: 2012278 - DNA, 25 bp, Homo sapien
tagcctgggtcagtccctcaaatat

SEQ ID NO: 2012279 - DNA, 25 bp, Homo sapien
tatcctcgacacataatgcttaaag

SEQ ID NO: 2012280 - DNA, 25 bp, Homo sapien
catgttttacataggattcaaaccc

SEQ ID NO: 2012281 - DNA, 25 bp, Homo sapien
caaacagggagttccttcacccatt

SEQ ID NO: 2012282 - DNA, 25 bp, Homo sapien
gcttaaagaagggtgtggccatgtt

SEQ ID NO: 2012283 - DNA, 25 bp, Homo sapien
gaagaagagcagatgacaattgaag

SEQ ID NO: 2012284 - DNA, 25 bp, Homo sapien
gattctagtctactctccctagatg

SEQ ID NO: 2012285 - DNA, 25 bp, Homo sapien
gaagctgaaggagcttgtaacaatc

SEQ ID NO: 2012286 - DNA, 25 bp, Homo sapien
ttccctgtaggcatatattcccaaa

SEQ ID NO: 2012287 - DNA, 25 bp, Homo sapien
gatgtaaagactatccattctgaga

SEQ ID NO: 2012288 - DNA, 25 bp, Homo sapien
tttttgccctcctactctggagtgg

SEQ ID NO: 2012289 - DNA, 25 bp, Homo sapien
tttaggtccttatcaaaatgaatcc

SEQ ID NO: 2012290 - DNA, 25 bp, Homo sapien
gcctatcttggtagaacacatctga

SEQ ID NO: 2012291 - DNA, 25 bp, Homo sapien
tgtagacaggttcatggccctccag

SEQ ID NO: 2012292 - DNA, 25 bp, Homo sapien
taaaagcgtagctcacaatatgccc

SEQ ID NO: 2012293 - DNA, 25 bp, Homo sapien
tagacatcgtgtccctaactgcagg

SEQ ID NO: 2012294 - DNA, 25 bp, Homo sapien
cttttccctacacaagagaactggg

SEQ ID NO: 2012295 - DNA, 25 bp, Homo sapien
gcacccagccccttcattccattta

SEQ ID NO: 2012296 - DNA, 25 bp, Homo sapien
ccatttagattctatggtaggcttg

SEQ ID NO: 2012297 - DNA, 25 bp, Homo sapien
taggcttgttagatcaaagggccct

SEQ ID NO: 2012298 - DNA, 25 bp, Homo sapien
aaagggcccttgattcttcatccaa

SEQ ID NO: 2012299 - DNA, 25 bp, Homo sapien
ctttgcagttcattaagccccctgg

SEQ ID NO: 2012300 - DNA, 25 bp, Homo sapien
gatgttccaggctacaacacgagag

SEQ ID NO: 2012301 - DNA, 25 bp, Homo sapien
cactgagctaatgcgctgggatgca

SEQ ID NO: 2012302 - DNA, 25 bp, Homo sapien
tcttggctgtagaagaggttggcag

SEQ ID NO: 2012303 - DNA, 25 bp, Homo sapien
tatccttattagagtctcgattgcc

SEQ ID NO: 2012304 - DNA, 25 bp, Homo sapien
tgcagcaccaaactgtcccagttgt

SEQ ID NO: 2012305 - DNA, 25 bp, Homo sapien
ttcatagtacacgtcagctacaggg

SEQ ID NO: 2012306 - DNA, 25 bp, Homo sapien
tttcttccgggcaatattaacagta

SEQ ID NO: 2012307 - DNA, 25 bp, Homo sapien
tggtgatgaaaagttgacctctggc

SEQ ID NO: 2012308 - DNA, 25 bp, Homo sapien
gaggcattcgaacctgagtgactcc

SEQ ID NO: 2012309 - DNA, 25 bp, Homo sapien
taaggtttacccctactgggctgca

SEQ ID NO: 2012310 - DNA, 25 bp, Homo sapien
tcccatggcaatatcagaaagttac

SEQ ID NO: 2012311 - DNA, 25 bp, Homo sapien
taggcctatcttccccatgcttaaa

SEQ ID NO: 2012312 - DNA, 25 bp, Homo sapien
tggacaatggaagtgggagacaaac

SEQ ID NO: 2012313 - DNA, 25 bp, Homo sapien
agttactccgataccacataggaag

SEQ ID NO: 2012314 - DNA, 25 bp, Homo sapien
gacaaacacctcatagtagtgtgta

SEQ ID NO: 2012315 - DNA, 25 bp, Homo sapien
tctaatcagagctcaaatcaagtct

SEQ ID NO: 2012316 - DNA, 25 bp, Homo sapien
tctattatgcccacatccttgcacg

SEQ ID NO: 2012317 - DNA, 25 bp, Homo sapien
gctttctaagaagagaggtacttga

SEQ ID NO: 2012318 - DNA, 25 bp, Homo sapien
ctctttctcgcatgagaggacctgc

SEQ ID NO: 2012319 - DNA, 25 bp, Homo sapien
ttcctttctccagcttcacagccat

SEQ ID NO: 2012320 - DNA, 25 bp, Homo sapien
cttcctttctccagcttcacagcca

SEQ ID NO: 2012321 - DNA, 25 bp, Homo sapien
tttccttcctttctccagcttcaca

SEQ ID NO: 2012322 - DNA, 25 bp, Homo sapien
tccttcctttctccagcttcacagc

SEQ ID NO: 2012323 - DNA, 25 bp, Homo sapien
cagggttggaatactgcagactgcc

SEQ ID NO: 2012324 - DNA, 25 bp, Homo sapien
tgggaagtcccctaaatgattattg

SEQ ID NO: 2012325 - DNA, 25 bp, Homo sapien
gcagggcattgcaggacacgttcag

SEQ ID NO: 2012326 - DNA, 25 bp, Homo sapien
ttgtgcatcactccaacggctgccg

SEQ ID NO: 2012327 - DNA, 25 bp, Homo sapien
caactcagcaggaagggattggaga

SEQ ID NO: 2012328 - DNA, 25 bp, Homo sapien
tctccaatacttcgggaatgtcagt

SEQ ID NO: 2012329 - DNA, 25 bp, Homo sapien
tcttaaagcctgtagcctaagggtc

SEQ ID NO: 2012330 - DNA, 25 bp, Homo sapien
gaaagaaagacccagataactaagc

SEQ ID NO: 2012331 - DNA, 25 bp, Homo sapien
aatcatagcatctagatcaccaagc

SEQ ID NO: 2012332 - DNA, 25 bp, Homo sapien
catagagcgcttttaggaaatagcc

SEQ ID NO: 2012333 - DNA, 25 bp, Homo sapien
caagcttattgtctcgtaggtcaag

SEQ ID NO: 2012334 - DNA, 25 bp, Homo sapien
gccacagatgtctaatgtgaccagt

SEQ ID NO: 2012335 - DNA, 25 bp, Homo sapien
tgggtaaacatcaagttgaacaagt

SEQ ID NO: 2012336 - DNA, 25 bp, Homo sapien
taggacagataatttggaactgggt

SEQ ID NO: 2012337 - DNA, 25 bp, Homo sapien
catccatgtaggacagataatttgg

SEQ ID NO: 2012338 - DNA, 25 bp, Homo sapien
cttgaaacatccatgtaggacagat

SEQ ID NO: 2012339 - DNA, 25 bp, Homo sapien
aaacttctagctttcggctttcaca

SEQ ID NO: 2012340 - DNA, 25 bp, Homo sapien
attatggccaatatccaaaacttct

SEQ ID NO: 2012341 - DNA, 25 bp, Homo sapien
tcacatacccactcaggcacatttt

SEQ ID NO: 2012342 - DNA, 25 bp, Homo sapien
ttcggctttcacatacccactcagg

SEQ ID NO: 2012343 - DNA, 25 bp, Homo sapien
cctggccctgtcaaactctttatat

SEQ ID NO: 2012344 - DNA, 25 bp, Homo sapien
ttatataccttacttggatagacaa

SEQ ID NO: 2012345 - DNA, 25 bp, Homo sapien
gacaaagtatgagtattaaatcaat

SEQ ID NO: 2012346 - DNA, 25 bp, Homo sapien
ggccctgtcaaactctttatatacc

SEQ ID NO: 2012347 - DNA, 25 bp, Homo sapien
tcctgccagtagtttccggagactg

SEQ ID NO: 2012348 - DNA, 25 bp, Homo sapien
agacctccaccgaggttctttctag

SEQ ID NO: 2012349 - DNA, 25 bp, Homo sapien
catcagaaggttaggtgggagctca

SEQ ID NO: 2012350 - DNA, 25 bp, Homo sapien
cttgccaactggttgtgtcctgcca

SEQ ID NO: 2012351 - DNA, 25 bp, Homo sapien
ctgtctctgcacactgtgctttgat

SEQ ID NO: 2012352 - DNA, 25 bp, Homo sapien
tgctttgatattaacgtaaaaacaa

SEQ ID NO: 2012353 - DNA, 25 bp, Homo sapien
tctgcacactgtgctttgatattaa

SEQ ID NO: 2012354 - DNA, 25 bp, Homo sapien
gtgctttgatattaacgtaaaaaca

SEQ ID NO: 2012355 - DNA, 25 bp, Homo sapien
ggttctacagattcagcgtagaact

SEQ ID NO: 2012356 - DNA, 25 bp, Homo sapien
cagaattggccagattcagaaatgg

SEQ ID NO: 2012357 - DNA, 25 bp, Homo sapien
tcaggctcctaaaacctaaatccat

SEQ ID NO: 2012358 - DNA, 25 bp, Homo sapien
cctttatttggttctacagattcag

SEQ ID NO: 2012359 - DNA, 25 bp, Homo sapien
caaaccaaatacacgatatttgtca

SEQ ID NO: 2012360 - DNA, 25 bp, Homo sapien
tcaaactcatcaaaccaaatacacg

SEQ ID NO: 2012361 - DNA, 25 bp, Homo sapien
tgtgcaaagaggctaagtattaacc

SEQ ID NO: 2012362 - DNA, 25 bp, Homo sapien
ctgtcagtactagtttattcatttc

SEQ ID NO: 2012363 - DNA, 25 bp, Homo sapien
tgtgtctggccctgtaatacttaac

SEQ ID NO: 2012364 - DNA, 25 bp, Homo sapien
gaagcaaagtctcaccaatgcctgc

SEQ ID NO: 2012365 - DNA, 25 bp, Homo sapien
ttctacttcagaacacgaaccactg

SEQ ID NO: 2012366 - DNA, 25 bp, Homo sapien
caaactgaatggaagggcaactgaa

SEQ ID NO: 2012367 - DNA, 25 bp, Homo sapien
ccttgggcaccctgtaattactcct

SEQ ID NO: 2012368 - DNA, 25 bp, Homo sapien
gggtacgaactattcgacagtggac

SEQ ID NO: 2012369 - DNA, 25 bp, Homo sapien
taggcttcacaatagattttttggg

SEQ ID NO: 2012370 - DNA, 25 bp, Homo sapien
caataacccaatatggatctgttca

SEQ ID NO: 2012371 - DNA, 25 bp, Homo sapien
taagttacacctattgcctagatgg

SEQ ID NO: 2012372 - DNA, 25 bp, Homo sapien
tattaaatgaccttatccccttgga

SEQ ID NO: 2012373 - DNA, 25 bp, Homo sapien
tagatggcaatcgataagctccttc

SEQ ID NO: 2012374 - DNA, 25 bp, Homo sapien
taaatcttctggttgaatcgaaccc

SEQ ID NO: 2012375 - DNA, 25 bp, Homo sapien
atgtaggcacttagtggtataaaca

SEQ ID NO: 2012376 - DNA, 25 bp, Homo sapien
tagctctgggtttagtgtgttctgt

SEQ ID NO: 2012377 - DNA, 25 bp, Homo sapien
gcacttagtggtataaacattccct

SEQ ID NO: 2012378 - DNA, 25 bp, Homo sapien
ataaacattccctttgctgtatccc

SEQ ID NO: 2012379 - DNA, 25 bp, Homo sapien
gactgtttgggcagtataaccattt

SEQ ID NO: 2012380 - DNA, 25 bp, Homo sapien
catcagtgtcttatagttctccttc

SEQ ID NO: 2012381 - DNA, 25 bp, Homo sapien
tcagtgtcttatagttctccttcta

SEQ ID NO: 2012382 - DNA, 25 bp, Homo sapien
ctgtagactgtttgggcagtataac

SEQ ID NO: 2012383 - DNA, 25 bp, Homo sapien
aaactctgaagtcggttataggcca

SEQ ID NO: 2012384 - DNA, 25 bp, Homo sapien
tgtctcttcggaaagcgtggctgga

SEQ ID NO: 2012385 - DNA, 25 bp, Homo sapien
tataggccatgtgaaggatcttcaa

SEQ ID NO: 2012386 - DNA, 25 bp, Homo sapien
ctttccagtttgttcgcagaggcgt

SEQ ID NO: 2012387 - DNA, 25 bp, Homo sapien
tgcatgcgcctgcaattcatgatcg

SEQ ID NO: 2012388 - DNA, 25 bp, Homo sapien
tgagcaatcacggtgtgcatgcgcc

SEQ ID NO: 2012389 - DNA, 25 bp, Homo sapien
ctgggagctgcataacttcgggaaa

SEQ ID NO: 2012390 - DNA, 25 bp, Homo sapien
gaaagacctcgatgcagttggagtg

SEQ ID NO: 2012391 - DNA, 25 bp, Homo sapien
cggctgctagattctgtaacaccct

SEQ ID NO: 2012392 - DNA, 25 bp, Homo sapien
tccccagtggcacagtcagttccaa

SEQ ID NO: 2012393 - DNA, 25 bp, Homo sapien
tgaggatcccaatcacagtctggat

SEQ ID NO: 2012394 - DNA, 25 bp, Homo sapien
gcacagtcagttccaaaaatgagga

SEQ ID NO: 2012395 - DNA, 25 bp, Homo sapien
cactggaaagtgtagatgttcaaca

SEQ ID NO: 2012396 - DNA, 25 bp, Homo sapien
ccccggatatcctaagcgcagtgca

SEQ ID NO: 2012397 - DNA, 25 bp, Homo sapien
tccatgagactatggcctcctagag

SEQ ID NO: 2012398 - DNA, 25 bp, Homo sapien
cctcctagagagcagggattgctgc

SEQ ID NO: 2012399 - DNA, 25 bp, Homo sapien
cttccctcaatgtactccttgtatg

SEQ ID NO: 2012400 - DNA, 25 bp, Homo sapien
atcccatttcccccggagggctctg

SEQ ID NO: 2012401 - DNA, 25 bp, Homo sapien
tgcttccctcaatgtactccttgta

SEQ ID NO: 2012402 - DNA, 25 bp, Homo sapien
ctgcatcccatttcccccggagggc

SEQ ID NO: 2012403 - DNA, 25 bp, Homo sapien
aatactgggtaataatgggacatgc

SEQ ID NO: 2012404 - DNA, 25 bp, Homo sapien
tcagtacacatcagcatagcaggac

SEQ ID NO: 2012405 - DNA, 25 bp, Homo sapien
gagatgatgttcctgtgcctcccct

SEQ ID NO: 2012406 - DNA, 25 bp, Homo sapien
cacaatctactggacactgatggga

SEQ ID NO: 2012407 - DNA, 25 bp, Homo sapien
caaaagtgcttacagaaacgatcag

SEQ ID NO: 2012408 - DNA, 25 bp, Homo sapien
aaagtgcttacagaaacgatcagag

SEQ ID NO: 2012409 - DNA, 25 bp, Homo sapien
tcaaaagtgcttacagaaacgatca

SEQ ID NO: 2012410 - DNA, 25 bp, Homo sapien
agtgcttacagaaacgatcagaggg

SEQ ID NO: 2012411 - DNA, 25 bp, Homo sapien
ggttttctggtaatgtgacttcact

SEQ ID NO: 2012412 - DNA, 25 bp, Homo sapien
aaggcgcgggtttccagtcaggtct

SEQ ID NO: 2012413 - DNA, 25 bp, Homo sapien
ccagggttttgtgatcaaggacaag

SEQ ID NO: 2012414 - DNA, 25 bp, Homo sapien
gtcaggtctagctcctgcagtttgg

SEQ ID NO: 2012415 - DNA, 25 bp, Homo sapien
tacccccgaagcttcagtgtaacca

SEQ ID NO: 2012416 - DNA, 25 bp, Homo sapien
gatcaatcttgaaacagcggatatt

SEQ ID NO: 2012417 - DNA, 25 bp, Homo sapien
gtaaccatgactccatacagctggg

SEQ ID NO: 2012418 - DNA, 25 bp, Homo sapien
ggctccggaagcgtctcctgtagaa

SEQ ID NO: 2012419 - DNA, 25 bp, Homo sapien
tgacaacaacagcataaaggccagg

SEQ ID NO: 2012420 - DNA, 25 bp, Homo sapien
tatatgccgcctataagaaatccat

SEQ ID NO: 2012421 - DNA, 25 bp, Homo sapien
tcacactataaactctaaacaagcc

SEQ ID NO: 2012422 - DNA, 25 bp, Homo sapien
cagagacacacggtagaataagaat

SEQ ID NO: 2012423 - DNA, 25 bp, Homo sapien
gcatgacaatgaatgtattgaccat

SEQ ID NO: 2012424 - DNA, 25 bp, Homo sapien
gtctccgtcaaacacaccatacagg

SEQ ID NO: 2012425 - DNA, 25 bp, Homo sapien
cagggcttcgcggttgtcacagaag

SEQ ID NO: 2012426 - DNA, 25 bp, Homo sapien
caaaatgtcactcatagtgcactgg

SEQ ID NO: 2012427 - DNA, 25 bp, Homo sapien
catgatgtaagatctggacagaggc

SEQ ID NO: 2012428 - DNA, 25 bp, Homo sapien
ggcagcggctttccatttcgacaga

SEQ ID NO: 2012429 - DNA, 25 bp, Homo sapien
tgcccacattagcagaggtcaaggt

SEQ ID NO: 2012430 - DNA, 25 bp, Homo sapien
tgatatgacaaaggacagcggcacc

SEQ ID NO: 2012431 - DNA, 25 bp, Homo sapien
gcaaatgctccctagctagtttctg

SEQ ID NO: 2012432 - DNA, 25 bp, Homo sapien
gcaaacatggaatgggatcatgccc

SEQ ID NO: 2012433 - DNA, 25 bp, Homo sapien
ataggacagatgcatgattattccc

SEQ ID NO: 2012434 - DNA, 25 bp, Homo sapien
ggtagagccctcaaccaccaaagca

SEQ ID NO: 2012435 - DNA, 25 bp, Homo sapien
cagcgctgtaggatgctcagtggcc

SEQ ID NO: 2012436 - DNA, 25 bp, Homo sapien
tgagcaatgaagcttccaccatggg

SEQ ID NO: 2012437 - DNA, 25 bp, Homo sapien
catgaatcatggtttgcacgtcaga

SEQ ID NO: 2012438 - DNA, 25 bp, Homo sapien
tgaaaaaatgacgtgggcagacagc

SEQ ID NO: 2012439 - DNA, 25 bp, Homo sapien
cttactgcctaggatgaagaactca

SEQ ID NO: 2012440 - DNA, 25 bp, Homo sapien
ctgatgctgtcgtggcagccgtagc

SEQ ID NO: 2012441 - DNA, 25 bp, Homo sapien
caggatgcgcgtggactcagtcact

SEQ ID NO: 2012442 - DNA, 25 bp, Homo sapien
tgcaccaccacagcgctgatgctgt

SEQ ID NO: 2012443 - DNA, 25 bp, Homo sapien
aggactgggtggtggcacagcccca

SEQ ID NO: 2012444 - DNA, 25 bp, Homo sapien
gggaggaaagatgccaggactgggt

SEQ ID NO: 2012445 - DNA, 25 bp, Homo sapien
ctgagggaggaaagatgccaggact

SEQ ID NO: 2012446 - DNA, 25 bp, Homo sapien
gatgccaggactgggtggtggcaca

SEQ ID NO: 2012447 - DNA, 25 bp, Homo sapien
tgagggccgatccttgatcaccatg

SEQ ID NO: 2012448 - DNA, 25 bp, Homo sapien
tcgtcactgtcaaggccgttgtcgg

SEQ ID NO: 2012449 - DNA, 25 bp, Homo sapien
tcgttggcgctgatgacaatgccct

SEQ ID NO: 2012450 - DNA, 25 bp, Homo sapien
caatggtcccaacggcagagaagtc

SEQ ID NO: 2012451 - DNA, 25 bp, Homo sapien
caaaatagcctccaggctttcgaag

SEQ ID NO: 2012452 - DNA, 25 bp, Homo sapien
gcaaaatagcctccaggctttcgaa

SEQ ID NO: 2012453 - DNA, 25 bp, Homo sapien
ggcagcaaaatagcctccaggcttt

SEQ ID NO: 2012454 - DNA, 25 bp, Homo sapien
ccagctccgggggtatgataaactg

SEQ ID NO: 2012455 - DNA, 25 bp, Homo sapien
cgggggtatgataaactgatcatca

SEQ ID NO: 2012456 - DNA, 25 bp, Homo sapien
ctccgggggtatgataaactgatca

SEQ ID NO: 2012457 - DNA, 25 bp, Homo sapien
gctccgggggtatgataaactgatc

SEQ ID NO: 2012458 - DNA, 25 bp, Homo sapien
tgctgttgctcctggtgatgcttca

SEQ ID NO: 2012459 - DNA, 25 bp, Homo sapien
tgctcctggtgatgcttcatgattt

SEQ ID NO: 2012460 - DNA, 25 bp, Homo sapien
tcctggtgatgcttcatgatttctt

SEQ ID NO: 2012461 - DNA, 25 bp, Homo sapien
gttgctcctggtgatgcttcatgat

SEQ ID NO: 2012462 - DNA, 25 bp, Homo sapien
tccagctggtagtgccgcggcagct

SEQ ID NO: 2012463 - DNA, 25 bp, Homo sapien
tcatagtggcgtgtcgtaataatct

SEQ ID NO: 2012464 - DNA, 25 bp, Homo sapien
tcgtaataatctggcagctggtcca

SEQ ID NO: 2012465 - DNA, 25 bp, Homo sapien
cgtgtcgtaataatctggcagctgg

SEQ ID NO: 2012466 - DNA, 25 bp, Homo sapien
gtttatttgttaaacagctcggctg

SEQ ID NO: 2012467 - DNA, 25 bp, Homo sapien
tttatttgttaaacagctcggctgg

SEQ ID NO: 2012468 - DNA, 25 bp, Homo sapien
ttatttgttaaacagctcggctggg

SEQ ID NO: 2012469 - DNA, 25 bp, Homo sapien
aacccctggtttaatgtgagcctgg

SEQ ID NO: 2012470 - DNA, 25 bp, Homo sapien
taaatcatttagcaacggcagcctg

SEQ ID NO: 2012471 - DNA, 25 bp, Homo sapien
gacagagtaaagcaactcctaggag

SEQ ID NO: 2012472 - DNA, 25 bp, Homo sapien
gaacctacagattagctgcgatgac

SEQ ID NO: 2012473 - DNA, 25 bp, Homo sapien
cctaagatccatttcctccggacag

SEQ ID NO: 2012474 - DNA, 25 bp, Homo sapien
taagatccatttcctccggacagaa

SEQ ID NO: 2012475 - DNA, 25 bp, Homo sapien
ctaagatccatttcctccggacaga

SEQ ID NO: 2012476 - DNA, 25 bp, Homo sapien
aatgggttcagggcccttgggtgca

SEQ ID NO: 2012477 - DNA, 25 bp, Homo sapien
tgggaaggctgggacaggggaggaa

SEQ ID NO: 2012478 - DNA, 25 bp, Homo sapien
atgggttcagggcccttgggtgcag

SEQ ID NO: 2012479 - DNA, 25 bp, Homo sapien
ctgtcaaagtgggaaggctgggaca

SEQ ID NO: 2012480 - DNA, 25 bp, Homo sapien
gggcactatacaaccatgctgattg

SEQ ID NO: 2012481 - DNA, 25 bp, Homo sapien
catgctgattgtggcagcagtaagg

SEQ ID NO: 2012482 - DNA, 25 bp, Homo sapien
gcttgagtataactctgggtatgta

SEQ ID NO: 2012483 - DNA, 25 bp, Homo sapien
tgtaaatggcctaatggggcactat

SEQ ID NO: 2012484 - DNA, 25 bp, Homo sapien
aggaactaaggcgtcggtgtgagag

SEQ ID NO: 2012485 - DNA, 25 bp, Homo sapien
tgcaggaactaaggcgtcggtgtga

SEQ ID NO: 2012486 - DNA, 25 bp, Homo sapien
taaggcgtcggtgtgagagcttgga

SEQ ID NO: 2012487 - DNA, 25 bp, Homo sapien
gaactaaggcgtcggtgtgagagct

SEQ ID NO: 2012488 - DNA, 25 bp, Homo sapien
tttagaatctggaagcgattgctgc

SEQ ID NO: 2012489 - DNA, 25 bp, Homo sapien
ggaagcgattgctgcctccgtggac

SEQ ID NO: 2012490 - DNA, 25 bp, Homo sapien
gcagacacagaagttaggaaatgag

SEQ ID NO: 2012491 - DNA, 25 bp, Homo sapien
taggaaatgaggtgtccctgcatca

SEQ ID NO: 2012492 - DNA, 25 bp, Homo sapien
cacagctctccgcttcccgtttcat

SEQ ID NO: 2012493 - DNA, 25 bp, Homo sapien
tctctcccctcaaagccctttccca

SEQ ID NO: 2012494 - DNA, 25 bp, Homo sapien
tctccgcttcccgtttcatttcttc

SEQ ID NO: 2012495 - DNA, 25 bp, Homo sapien
tcaccacagctctccgcttcccgtt

SEQ ID NO: 2012496 - DNA, 25 bp, Homo sapien
aagtagccagctctttactggtgtt

SEQ ID NO: 2012497 - DNA, 25 bp, Homo sapien
agccattttctcagggccccgtgct

SEQ ID NO: 2012498 - DNA, 25 bp, Homo sapien
ctccacaccaagccattttctcagg

SEQ ID NO: 2012499 - DNA, 25 bp, Homo sapien
cctcatgaggttagcacagccacct

SEQ ID NO: 2012500 - DNA, 25 bp, Homo sapien
cactgccaaaggctgaaacaggtcc

SEQ ID NO: 2012501 - DNA, 25 bp, Homo sapien
aggagcacacgggaaagcctggaca

SEQ ID NO: 2012502 - DNA, 25 bp, Homo sapien
ctggacagcctggacgtgggcgggg

SEQ ID NO: 2012503 - DNA, 25 bp, Homo sapien
caggaggagcacacgggaaagcctg

SEQ ID NO: 2012504 - DNA, 25 bp, Homo sapien
ctgcagccgtgggaatgacccagtg

SEQ ID NO: 2012505 - DNA, 25 bp, Homo sapien
aggcgaggggctctgcgtccctggt

SEQ ID NO: 2012506 - DNA, 25 bp, Homo sapien
ggcctggctgcagccgtgggaatga

SEQ ID NO: 2012507 - DNA, 25 bp, Homo sapien
cctggtttgtggtgcccaaggggag

SEQ ID NO: 2012508 - DNA, 25 bp, Homo sapien
ggctccatggccagccttaagacac

SEQ ID NO: 2012509 - DNA, 25 bp, Homo sapien
cacacacgcaaccttttcgccctct

SEQ ID NO: 2012510 - DNA, 25 bp, Homo sapien
acacacgcaaccttttcgccctctt

SEQ ID NO: 2012511 - DNA, 25 bp, Homo sapien
ctccatggccagccttaagacacac

SEQ ID NO: 2012512 - DNA, 25 bp, Homo sapien
caaagctattcttcctatgctgcag

SEQ ID NO: 2012513 - DNA, 25 bp, Homo sapien
gaaatccaaagctattcttcctatg

SEQ ID NO: 2012514 - DNA, 25 bp, Homo sapien
ttcaccagcgttaccggggctgcac

SEQ ID NO: 2012515 - DNA, 25 bp, Homo sapien
ttcttcctatgctgcagagaggaac

SEQ ID NO: 2012516 - DNA, 25 bp, Homo sapien
ctacattacgcttccctttgtggta

SEQ ID NO: 2012517 - DNA, 25 bp, Homo sapien
tacgcttccctttgtggtaggtgct

SEQ ID NO: 2012518 - DNA, 25 bp, Homo sapien
tggtaggtgctttgacctcagcact

SEQ ID NO: 2012519 - DNA, 25 bp, Homo sapien
gcttccctttgtggtaggtgctttg

SEQ ID NO: 2012520 - DNA, 25 bp, Homo sapien
gcactcctactcatcccggtgtcca

SEQ ID NO: 2012521 - DNA, 25 bp, Homo sapien
ctccctctggcccatcggtgcccag

SEQ ID NO: 2012522 - DNA, 25 bp, Homo sapien
gtgcccagcactcctactcatcccg

SEQ ID NO: 2012523 - DNA, 25 bp, Homo sapien
caaagactctcaagggtgggccctg

SEQ ID NO: 2012524 - DNA, 25 bp, Homo sapien
ctcactcaggtaacttggactgccc

SEQ ID NO: 2012525 - DNA, 25 bp, Homo sapien
actcaggtaacttggactgcccagc

SEQ ID NO: 2012526 - DNA, 25 bp, Homo sapien
tcccaagtatcttcagcagtgctgg

SEQ ID NO: 2012527 - DNA, 25 bp, Homo sapien
ggactgcccagctcccaagtatctt

SEQ ID NO: 2012528 - DNA, 25 bp, Homo sapien
agggtccctcaaggcccctgcttgg

SEQ ID NO: 2012529 - DNA, 25 bp, Homo sapien
tgccttcgtccacagataaagaaat

SEQ ID NO: 2012530 - DNA, 25 bp, Homo sapien
taagtcacccacagggtccctcaag

SEQ ID NO: 2012531 - DNA, 25 bp, Homo sapien
tgtcactgccttcgtccacagataa

SEQ ID NO: 2012532 - DNA, 25 bp, Homo sapien
ggggaggagggtgtgctggcagtgg

SEQ ID NO: 2012533 - DNA, 25 bp, Homo sapien
tgagggagtggggaggagggtgtgc

SEQ ID NO: 2012534 - DNA, 25 bp, Homo sapien
ggagtggggaggagggtgtgctggc

SEQ ID NO: 2012535 - DNA, 25 bp, Homo sapien
gtggggaggagggtgtgctggcagt

SEQ ID NO: 2012536 - DNA, 25 bp, Homo sapien
gtatttggccatgccgctgaggctg

SEQ ID NO: 2012537 - DNA, 25 bp, Homo sapien
ctgaaaggttaatgaatttgctgcc

SEQ ID NO: 2012538 - DNA, 25 bp, Homo sapien
tgaggctgaaaggttaatgaatttg

SEQ ID NO: 2012539 - DNA, 25 bp, Homo sapien
ggtatttggccatgccgctgaggct

SEQ ID NO: 2012540 - DNA, 25 bp, Homo sapien
ggacgccaatacacaggagagcttg

SEQ ID NO: 2012541 - DNA, 25 bp, Homo sapien
gaaactgtccatgatataaaggtgc

SEQ ID NO: 2012542 - DNA, 25 bp, Homo sapien
aaaatgggatgggattcgcactgca

SEQ ID NO: 2012543 - DNA, 25 bp, Homo sapien
gcaccacacataggccttgcagaga

SEQ ID NO: 2012544 - DNA, 25 bp, Homo sapien
gacgctttcatttctacaggatgga

SEQ ID NO: 2012545 - DNA, 25 bp, Homo sapien
atgctgacgctttcatttctacagg

SEQ ID NO: 2012546 - DNA, 25 bp, Homo sapien
gctgacgctttcatttctacaggat

SEQ ID NO: 2012547 - DNA, 25 bp, Homo sapien
gctttcatttctacaggatggaacc

SEQ ID NO: 2012548 - DNA, 25 bp, Homo sapien
cctggttccaggtcactctgcacaa

SEQ ID NO: 2012549 - DNA, 25 bp, Homo sapien
tcactctgcacaaggctgcaagaaa

SEQ ID NO: 2012550 - DNA, 25 bp, Homo sapien
tttttcctggttccaggtcactctg

SEQ ID NO: 2012551 - DNA, 25 bp, Homo sapien
acaaggctgcaagaaacatccttac

SEQ ID NO: 2012552 - DNA, 25 bp, Homo sapien
tgccatcgccatccggtgtacattc

SEQ ID NO: 2012553 - DNA, 25 bp, Homo sapien
ggacagttggacgacagaaggaccc

SEQ ID NO: 2012554 - DNA, 25 bp, Homo sapien
ggacccattgtgttctcctgccatc

SEQ ID NO: 2012555 - DNA, 25 bp, Homo sapien
tccggtgtacattctcctcaccagt

SEQ ID NO: 2012556 - DNA, 25 bp, Homo sapien
ggagattcccttgccaaaccagaaa

SEQ ID NO: 2012557 - DNA, 25 bp, Homo sapien
tagcagaagacatctgggagattcc

SEQ ID NO: 2012558 - DNA, 25 bp, Homo sapien
cagaaattatggctatctctcgagc

SEQ ID NO: 2012559 - DNA, 25 bp, Homo sapien
cctgagcagtctacacagtttagag

SEQ ID NO: 2012560 - DNA, 25 bp, Homo sapien
ggagcaggtgcttggtcaggacggc

SEQ ID NO: 2012561 - DNA, 25 bp, Homo sapien
gcttggtcaggacggcacgcagcac

SEQ ID NO: 2012562 - DNA, 25 bp, Homo sapien
caggtgcttggtcaggacggcacgc

SEQ ID NO: 2012563 - DNA, 25 bp, Homo sapien
cagaacaccccttttcgaaatccag

SEQ ID NO: 2012564 - DNA, 25 bp, Homo sapien
gtccgcacactgcagcccaaggcga

SEQ ID NO: 2012565 - DNA, 25 bp, Homo sapien
agcacgtgcagtgcgctcaagaccc

SEQ ID NO: 2012566 - DNA, 25 bp, Homo sapien
tgcagtcgaaagcacgtgcagtgcg

SEQ ID NO: 2012567 - DNA, 25 bp, Homo sapien
gctgtgctcagtgcagtcgaaagca

SEQ ID NO: 2012568 - DNA, 25 bp, Homo sapien
tggcgcacagacgagtacagaacag

SEQ ID NO: 2012569 - DNA, 25 bp, Homo sapien
tggattgatacccacgaagccaggt

SEQ ID NO: 2012570 - DNA, 25 bp, Homo sapien
tattcacacaggatgggcaacagct

SEQ ID NO: 2012571 - DNA, 25 bp, Homo sapien
acagggctgaaatgcgaggcttagc

SEQ ID NO: 2012572 - DNA, 25 bp, Homo sapien
cccaaggtccggagaaggctgccaa

SEQ ID NO: 2012573 - DNA, 25 bp, Homo sapien
caggagactgcttatttgaacaaag

SEQ ID NO: 2012574 - DNA, 25 bp, Homo sapien
gccaagactagggatagcttccaga

SEQ ID NO: 2012575 - DNA, 25 bp, Homo sapien
tgaaacacacatcgcctaagcctga

SEQ ID NO: 2012576 - DNA, 25 bp, Homo sapien
tatgtttggaccaacaggcagggtg

SEQ ID NO: 2012577 - DNA, 25 bp, Homo sapien
cctgcacaggcccttatgtttggac

SEQ ID NO: 2012578 - DNA, 25 bp, Homo sapien
caggcccttatgtttggaccaacag

SEQ ID NO: 2012579 - DNA, 25 bp, Homo sapien
aatacactgtctccaagccagccgc

SEQ ID NO: 2012580 - DNA, 25 bp, Homo sapien
tgtggcaggcctggcacttcgagcc

SEQ ID NO: 2012581 - DNA, 25 bp, Homo sapien
gcttgtggcaggcctggcacttcga

SEQ ID NO: 2012582 - DNA, 25 bp, Homo sapien
ggtgcttgtggcaggcctggcactt

SEQ ID NO: 2012583 - DNA, 25 bp, Homo sapien
ttgtggcaggcctggcacttcgagc

SEQ ID NO: 2012584 - DNA, 25 bp, Homo sapien
tgaggtttggataaccactccccac

SEQ ID NO: 2012585 - DNA, 25 bp, Homo sapien
cagtctgaggtttggataaccactc

SEQ ID NO: 2012586 - DNA, 25 bp, Homo sapien
tccccacccataggccaagataaat

SEQ ID NO: 2012587 - DNA, 25 bp, Homo sapien
ccataggccaagataaatgccccac

SEQ ID NO: 2012588 - DNA, 25 bp, Homo sapien
tctttagctctattatgatggatat

SEQ ID NO: 2012589 - DNA, 25 bp, Homo sapien
gattagacacgtattaaacattctc

SEQ ID NO: 2012590 - DNA, 25 bp, Homo sapien
caggttgtagaaacatgttgcttaa

SEQ ID NO: 2012591 - DNA, 25 bp, Homo sapien
tttctacttaaggactcagattaga

SEQ ID NO: 2012592 - DNA, 25 bp, Homo sapien
ttccaggtttgctccttgatcatcc

SEQ ID NO: 2012593 - DNA, 25 bp, Homo sapien
aggtttgctccttgatcatccactt

SEQ ID NO: 2012594 - DNA, 25 bp, Homo sapien
ccaggtttgctccttgatcatccac

SEQ ID NO: 2012595 - DNA, 25 bp, Homo sapien
ctttccaggtttgctccttgatcat

SEQ ID NO: 2012596 - DNA, 25 bp, Homo sapien
gtcttgcctgctcccagggcttcat

SEQ ID NO: 2012597 - DNA, 25 bp, Homo sapien
caccagtcttgcctgctcccagggc

SEQ ID NO: 2012598 - DNA, 25 bp, Homo sapien
ccagtcttgcctgctcccagggctt

SEQ ID NO: 2012599 - DNA, 25 bp, Homo sapien
agtcttgcctgctcccagggcttca

SEQ ID NO: 2012600 - DNA, 25 bp, Homo sapien
cggatatctagggagccccccattt

SEQ ID NO: 2012601 - DNA, 25 bp, Homo sapien
acaccctcggatatctagggagccc

SEQ ID NO: 2012602 - DNA, 25 bp, Homo sapien
cctcggatatctagggagcccccca

SEQ ID NO: 2012603 - DNA, 25 bp, Homo sapien
gacaccctcggatatctagggagcc

SEQ ID NO: 2012604 - DNA, 25 bp, Homo sapien
tggcttttcccaagtgtcgaccaga

SEQ ID NO: 2012605 - DNA, 25 bp, Homo sapien
caattcttggaagacactaaaacaa

SEQ ID NO: 2012606 - DNA, 25 bp, Homo sapien
cttgtccaaaaccagtaaagcgatc

SEQ ID NO: 2012607 - DNA, 25 bp, Homo sapien
taaagcgatcaaagggccaaatctc

SEQ ID NO: 2012608 - DNA, 25 bp, Homo sapien
gttgaccaactatacagacgaccat

SEQ ID NO: 2012609 - DNA, 25 bp, Homo sapien
accatattgcacaacccaggtggag

SEQ ID NO: 2012610 - DNA, 25 bp, Homo sapien
tcaactatacagatgggcagccctt

SEQ ID NO: 2012611 - DNA, 25 bp, Homo sapien
aatcagtgccttattgtggtcaacc

SEQ ID NO: 2012612 - DNA, 25 bp, Homo sapien
tgcctttgatgatcttagggcagga

SEQ ID NO: 2012613 - DNA, 25 bp, Homo sapien
cctttgatgatcttagggcaggatg

SEQ ID NO: 2012614 - DNA, 25 bp, Homo sapien
ccgggacttagccattttaaccatg

SEQ ID NO: 2012615 - DNA, 25 bp, Homo sapien
cattttaaccatgcctttgatgatc

SEQ ID NO: 2012616 - DNA, 25 bp, Homo sapien
ttccatgacggccacactgatcttg

SEQ ID NO: 2012617 - DNA, 25 bp, Homo sapien
tgggtttttccatgacggccacact

SEQ ID NO: 2012618 - DNA, 25 bp, Homo sapien
atgggtttttccatgacggccacac

SEQ ID NO: 2012619 - DNA, 25 bp, Homo sapien
tttccatgacggccacactgatctt

SEQ ID NO: 2012620 - DNA, 25 bp, Homo sapien
caacttcgcccgcaggatgagtcgc

SEQ ID NO: 2012621 - DNA, 25 bp, Homo sapien
tgggaaaagactgcccccctcgcaa

SEQ ID NO: 2012622 - DNA, 25 bp, Homo sapien
tcgcccgcaggatgagtcgcctctg

SEQ ID NO: 2012623 - DNA, 25 bp, Homo sapien
ctcgcaacttcgcccgcaggatgag

SEQ ID NO: 2012624 - DNA, 25 bp, Homo sapien
ttgtcctcttgatgtgatttctggg

SEQ ID NO: 2012625 - DNA, 25 bp, Homo sapien
gagctttcctgtctgctggagctgc

SEQ ID NO: 2012626 - DNA, 25 bp, Homo sapien
tggagctgccgaaaacctgagtttt

SEQ ID NO: 2012627 - DNA, 25 bp, Homo sapien
aaatggcccagaaatgtgtgtcccc

SEQ ID NO: 2012628 - DNA, 25 bp, Homo sapien
caagtaatgcccgttgagacacggg

SEQ ID NO: 2012629 - DNA, 25 bp, Homo sapien
cacaggctgacagcaagtaatgccc

SEQ ID NO: 2012630 - DNA, 25 bp, Homo sapien
tgagctgctgcttgtattttggaaa

SEQ ID NO: 2012631 - DNA, 25 bp, Homo sapien
gctgacagcaagtaatgcccgttga

SEQ ID NO: 2012632 - DNA, 25 bp, Homo sapien
tgcttccagtcctccgaagcacgat

SEQ ID NO: 2012633 - DNA, 25 bp, Homo sapien
cagaggtccttgtcaaagcattcac

SEQ ID NO: 2012634 - DNA, 25 bp, Homo sapien
gcacgatcgatgtttgtttcagaca

SEQ ID NO: 2012635 - DNA, 25 bp, Homo sapien
tttgatcagcctcaacccgtctgct

SEQ ID NO: 2012636 - DNA, 25 bp, Homo sapien
ccgggctccagcatcccaaacgtgt

SEQ ID NO: 2012637 - DNA, 25 bp, Homo sapien
gacaggaagatgtccgggctccagc

SEQ ID NO: 2012638 - DNA, 25 bp, Homo sapien
aggaagatgtccgggctccagcatc

SEQ ID NO: 2012639 - DNA, 25 bp, Homo sapien
tgcacagaaagaggacaggaagatg

SEQ ID NO: 2012640 - DNA, 25 bp, Homo sapien
cagtcccgagggagtgaattcagca

SEQ ID NO: 2012641 - DNA, 25 bp, Homo sapien
ttcttctccacgttgatccccacag

SEQ ID NO: 2012642 - DNA, 25 bp, Homo sapien
cttcttctccacgttgatccccaca

SEQ ID NO: 2012643 - DNA, 25 bp, Homo sapien
tacttcaagttcaacacctgactgg

SEQ ID NO: 2012644 - DNA, 25 bp, Homo sapien
ttacttcaagttcaacacctgactg

SEQ ID NO: 2012645 - DNA, 25 bp, Homo sapien
ggcaagagcccattacttcattgag

SEQ ID NO: 2012646 - DNA, 25 bp, Homo sapien
tgattaacttgtaagagctctttgt

SEQ ID NO: 2012647 - DNA, 25 bp, Homo sapien
tgggtctcgcatgtgtcatctgcca

SEQ ID NO: 2012648 - DNA, 25 bp, Homo sapien
tatagatggatcagaaatgaatgcc

SEQ ID NO: 2012649 - DNA, 25 bp, Homo sapien
tgctggtaccactcctgtgagataa

SEQ ID NO: 2012650 - DNA, 25 bp, Homo sapien
gagataacagtttccctgtgttcca

SEQ ID NO: 2012651 - DNA, 25 bp, Homo sapien
tctgcaaggaccttccttggtgtgt

SEQ ID NO: 2012652 - DNA, 25 bp, Homo sapien
ttttgaagaaggtaacaatcctagc

SEQ ID NO: 2012653 - DNA, 25 bp, Homo sapien
gagtcctccccttttgaagctgagc

SEQ ID NO: 2012654 - DNA, 25 bp, Homo sapien
tccccttttgaagctgagcctcggc

SEQ ID NO: 2012655 - DNA, 25 bp, Homo sapien
cagggagtcctccccttttgaagct

SEQ ID NO: 2012656 - DNA, 25 bp, Homo sapien
ttgaagctgagcctcggcatcctcg

SEQ ID NO: 2012657 - DNA, 25 bp, Homo sapien
gagcactttctctgggactttggga

SEQ ID NO: 2012658 - DNA, 25 bp, Homo sapien
tctggaagggcccttagctgtagga

SEQ ID NO: 2012659 - DNA, 25 bp, Homo sapien
ccaggtacaggggactgaaataagt

SEQ ID NO: 2012660 - DNA, 25 bp, Homo sapien
gactgaaataagtacccagcctgct

SEQ ID NO: 2012661 - DNA, 25 bp, Homo sapien
ttcggggttcatcatcaacacgcac

SEQ ID NO: 2012662 - DNA, 25 bp, Homo sapien
aggaaaatccacacgttgatttcgg

SEQ ID NO: 2012663 - DNA, 25 bp, Homo sapien
ttgatttcggggttcatcatcaaca

SEQ ID NO: 2012664 - DNA, 25 bp, Homo sapien
aaggaaaatccacacgttgatttcg

SEQ ID NO: 2012665 - DNA, 25 bp, Homo sapien
ttctcttctgtagcaagccagtcgt

SEQ ID NO: 2012666 - DNA, 25 bp, Homo sapien
ccagtgagaccttctaaggtggttc

SEQ ID NO: 2012667 - DNA, 25 bp, Homo sapien
agggctcaaaactgccccaccagtg

SEQ ID NO: 2012668 - DNA, 25 bp, Homo sapien
tctggatggagtccgagagaacttc

SEQ ID NO: 2012669 - DNA, 25 bp, Homo sapien
ccttctgttcggcctttttggatgt

SEQ ID NO: 2012670 - DNA, 25 bp, Homo sapien
tctcagtctaactgcagacaccgat

SEQ ID NO: 2012671 - DNA, 25 bp, Homo sapien
tcagtctaactgcagacaccgatga

SEQ ID NO: 2012672 - DNA, 25 bp, Homo sapien
caccttctgttcggcctttttggat

SEQ ID NO: 2012673 - DNA, 25 bp, Homo sapien
gacccgtctggacctagtgtcttgc

SEQ ID NO: 2012674 - DNA, 25 bp, Homo sapien
tctgcatccttacaagttggtttcc

SEQ ID NO: 2012675 - DNA, 25 bp, Homo sapien
cgagggtctgctcaataaactcaca

SEQ ID NO: 2012676 - DNA, 25 bp, Homo sapien
aatttaccccaaacgctcaccagag

SEQ ID NO: 2012677 - DNA, 25 bp, Homo sapien
cttctgggctctgaatttgactcac

SEQ ID NO: 2012678 - DNA, 25 bp, Homo sapien
cagtgttgagtttgctaattttctg

SEQ ID NO: 2012679 - DNA, 25 bp, Homo sapien
agtgttgagtttgctaattttctga

SEQ ID NO: 2012680 - DNA, 25 bp, Homo sapien
gtgttgagtttgctaattttctgac

SEQ ID NO: 2012681 - DNA, 25 bp, Homo sapien
gaagaactgcatccacttccaacca

SEQ ID NO: 2012682 - DNA, 25 bp, Homo sapien
tttctgagataaagaatttggaagc

SEQ ID NO: 2012683 - DNA, 25 bp, Homo sapien
atttggaagcatctccttgagttcc

SEQ ID NO: 2012684 - DNA, 25 bp, Homo sapien
taccacggattctttggaagaactg

SEQ ID NO: 2012685 - DNA, 25 bp, Homo sapien
tcccaaggggaacatcatctcctat

SEQ ID NO: 2012686 - DNA, 25 bp, Homo sapien
gcagctcaggggagctttgatcctc

SEQ ID NO: 2012687 - DNA, 25 bp, Homo sapien
cctatatccatgtggaacctctcag

SEQ ID NO: 2012688 - DNA, 25 bp, Homo sapien
gctcaggggagctttgatcctctct

SEQ ID NO: 2012689 - DNA, 25 bp, Homo sapien
aatacggtaaggatactttacatgg

SEQ ID NO: 2012690 - DNA, 25 bp, Homo sapien
gccaccattagctataatggcactt

SEQ ID NO: 2012691 - DNA, 25 bp, Homo sapien
tttcatacttttaccttccatggct

SEQ ID NO: 2012692 - DNA, 25 bp, Homo sapien
tggctgatattctgcaacactgtac

SEQ ID NO: 2012693 - DNA, 25 bp, Homo sapien
taggcccgttttcacgtggagcatg

SEQ ID NO: 2012694 - DNA, 25 bp, Homo sapien
tgtggtctccgaatgtctggaagct

SEQ ID NO: 2012695 - DNA, 25 bp, Homo sapien
tcctccagggatgatcaacagggca

SEQ ID NO: 2012696 - DNA, 25 bp, Homo sapien
gaattccactgtcaagaaagagcag

SEQ ID NO: 2012697 - DNA, 25 bp, Homo sapien
ctgccccaaacaaatatgcaaaagg

SEQ ID NO: 2012698 - DNA, 25 bp, Homo sapien
tgccccaaacaaatatgcaaaaggt

SEQ ID NO: 2012699 - DNA, 25 bp, Homo sapien
cccaaacaaatatgcaaaaggttca

SEQ ID NO: 2012700 - DNA, 25 bp, Homo sapien
tatctgggccacaagtgaagtcaac

SEQ ID NO: 2012701 - DNA, 25 bp, Homo sapien
cctttgtggaactgtacggccccag

SEQ ID NO: 2012702 - DNA, 25 bp, Homo sapien
atcaccctgggtgcctatctgggcc

SEQ ID NO: 2012703 - DNA, 25 bp, Homo sapien
gcatgcggcctctgtttgatttctc

SEQ ID NO: 2012704 - DNA, 25 bp, Homo sapien
ggcctggttccaaacctgcagcaag

SEQ ID NO: 2012705 - DNA, 25 bp, Homo sapien
tttcttcttactgccgatgagactc

SEQ ID NO: 2012706 - DNA, 25 bp, Homo sapien
tcttcttactgccgatgagactctg

SEQ ID NO: 2012707 - DNA, 25 bp, Homo sapien
ttcttactgccgatgagactctgca

SEQ ID NO: 2012708 - DNA, 25 bp, Homo sapien
cttactgccgatgagactctgcagt

SEQ ID NO: 2012709 - DNA, 25 bp, Homo sapien
agatagtattgccaatgagtctcca

SEQ ID NO: 2012710 - DNA, 25 bp, Homo sapien
tggccgcagtagtcacagatagtat

SEQ ID NO: 2012711 - DNA, 25 bp, Homo sapien
ctgacggttgcatgtcatagattct

SEQ ID NO: 2012712 - DNA, 25 bp, Homo sapien
gccaatgagtctccagccctcttgg

SEQ ID NO: 2012713 - DNA, 25 bp, Homo sapien
acttccttgcgtgtgctctgccggc

SEQ ID NO: 2012714 - DNA, 25 bp, Homo sapien
tagaaaaaagtcctcacttccttgc

SEQ ID NO: 2012715 - DNA, 25 bp, Homo sapien
tgcttggcttcatggagcgctcttt

SEQ ID NO: 2012716 - DNA, 25 bp, Homo sapien
tcccagccgccagtgcggcttgctc

SEQ ID NO: 2012717 - DNA, 25 bp, Homo sapien
gaggaaggcaaatccttgtgcttct

SEQ ID NO: 2012718 - DNA, 25 bp, Homo sapien
tgtgtgtccttcagttatatgctca

SEQ ID NO: 2012719 - DNA, 25 bp, Homo sapien
gctttggggagcagccttcgccagc

SEQ ID NO: 2012720 - DNA, 25 bp, Homo sapien
ggagggtgcgggaggaagagtcaca

SEQ ID NO: 2012721 - DNA, 25 bp, Homo sapien
taggagtgccccgattgctgctcat

SEQ ID NO: 2012722 - DNA, 25 bp, Homo sapien
gtgccccgattgctgctcatgcatc

SEQ ID NO: 2012723 - DNA, 25 bp, Homo sapien
ctgctcatgcatccgacccctaact

SEQ ID NO: 2012724 - DNA, 25 bp, Homo sapien
aagtaggagtgccccgattgctgct

SEQ ID NO: 2012725 - DNA, 25 bp, Homo sapien
atctggtcctcgacagatgtctggg

SEQ ID NO: 2012726 - DNA, 25 bp, Homo sapien
aaccagcaccatccggggtgcatct

SEQ ID NO: 2012727 - DNA, 25 bp, Homo sapien
gatgtctgggcctgcggtaggtcat

SEQ ID NO: 2012728 - DNA, 25 bp, Homo sapien
ccatccggggtgcatctggtcctcg

SEQ ID NO: 2012729 - DNA, 25 bp, Homo sapien
gctgggatctgagtaagactattat

SEQ ID NO: 2012730 - DNA, 25 bp, Homo sapien
acggtcacagaatgacccattgagc

SEQ ID NO: 2012731 - DNA, 25 bp, Homo sapien
tgacccattgagctgcagaactggg

SEQ ID NO: 2012732 - DNA, 25 bp, Homo sapien
cttttgagtgggatgtaagcaggct

SEQ ID NO: 2012733 - DNA, 25 bp, Homo sapien
agagactgcattttccttgtgatag

SEQ ID NO: 2012734 - DNA, 25 bp, Homo sapien
ccttgtgatagagaggtctgctgtc

SEQ ID NO: 2012735 - DNA, 25 bp, Homo sapien
tcctggtactaacagctgctgccac

SEQ ID NO: 2012736 - DNA, 25 bp, Homo sapien
ctgtcctggtactaacagctgctgc

SEQ ID NO: 2012737 - DNA, 25 bp, Homo sapien
aaaagtgtctgaccggtcctgagcg

SEQ ID NO: 2012738 - DNA, 25 bp, Homo sapien
gacttttctcgtgttaagtgcccac

SEQ ID NO: 2012739 - DNA, 25 bp, Homo sapien
tcctgagcgtttgacgggaagtgac

SEQ ID NO: 2012740 - DNA, 25 bp, Homo sapien
cactgctgacaatgctgacaggcct

SEQ ID NO: 2012741 - DNA, 25 bp, Homo sapien
ttgatgtggccccattcgctctgac

SEQ ID NO: 2012742 - DNA, 25 bp, Homo sapien
gtgggatccagccttgcacagtgcc

SEQ ID NO: 2012743 - DNA, 25 bp, Homo sapien
ggaaggtcctgtgactggtggtttc

SEQ ID NO: 2012744 - DNA, 25 bp, Homo sapien
gtcctgtgactggtggtttctccat

SEQ ID NO: 2012745 - DNA, 25 bp, Homo sapien
atcagtgtccacgaccagcgtcctt

SEQ ID NO: 2012746 - DNA, 25 bp, Homo sapien
gggctcagggacagccgccatttcc

SEQ ID NO: 2012747 - DNA, 25 bp, Homo sapien
ctggaaggtccctcgcagctatggc

SEQ ID NO: 2012748 - DNA, 25 bp, Homo sapien
agaagtctcacttgtttcactcggc

SEQ ID NO: 2012749 - DNA, 25 bp, Homo sapien
tacatgccaaggttgatgtcacgga

SEQ ID NO: 2012750 - DNA, 25 bp, Homo sapien
cctcgttcttcatacatgccaaggt

SEQ ID NO: 2012751 - DNA, 25 bp, Homo sapien
tcacggatccaaaccagttttgagt

SEQ ID NO: 2012752 - DNA, 25 bp, Homo sapien
gccaaggttgatgtcacggatccaa

SEQ ID NO: 2012753 - DNA, 25 bp, Homo sapien
cttgtagtctccgctgaaggaccca

SEQ ID NO: 2012754 - DNA, 25 bp, Homo sapien
ttgtagtctccgctgaaggacccat

SEQ ID NO: 2012755 - DNA, 25 bp, Homo sapien
gtcttgtagtctccgctgaaggacc

SEQ ID NO: 2012756 - DNA, 25 bp, Homo sapien
tcttgtagtctccgctgaaggaccc

SEQ ID NO: 2012757 - DNA, 25 bp, Homo sapien
aaatcctgccttgatgagtctcagg

SEQ ID NO: 2012758 - DNA, 25 bp, Homo sapien
gaattctgaatggaccattccaggt

SEQ ID NO: 2012759 - DNA, 25 bp, Homo sapien
gaccattccaggtggggacctcatg

SEQ ID NO: 2012760 - DNA, 25 bp, Homo sapien
cttagtacaaggtccgatgttcttg

SEQ ID NO: 2012761 - DNA, 25 bp, Homo sapien
gggacctcatggcttagtacaaggt

SEQ ID NO: 2012762 - DNA, 25 bp, Homo sapien
gtcctgtctcgtgactcatccgata

SEQ ID NO: 2012763 - DNA, 25 bp, Homo sapien
tgtcgcctcctcaagttgactgtcc

SEQ ID NO: 2012764 - DNA, 25 bp, Homo sapien
gcaaatgagatttgtcgcctcctca

SEQ ID NO: 2012765 - DNA, 25 bp, Homo sapien
tccgatactgttgacttgctgtaca

SEQ ID NO: 2012766 - DNA, 25 bp, Homo sapien
acctccaaggagaacatgagtgagg

SEQ ID NO: 2012767 - DNA, 25 bp, Homo sapien
gaggatgggcctctaacctccaagg

SEQ ID NO: 2012768 - DNA, 25 bp, Homo sapien
aacctccaaggagaacatgagtgag

SEQ ID NO: 2012769 - DNA, 25 bp, Homo sapien
ggaggatgggcctctaacctccaag

SEQ ID NO: 2012770 - DNA, 25 bp, Homo sapien
cttggtcacaccaatggcccacact

SEQ ID NO: 2012771 - DNA, 25 bp, Homo sapien
tggtcacaccaatggcccacactgg

SEQ ID NO: 2012772 - DNA, 25 bp, Homo sapien
ttggtcacaccaatggcccacactg

SEQ ID NO: 2012773 - DNA, 25 bp, Homo sapien
ggtttgctctgtgtcggtttgcacg

SEQ ID NO: 2012774 - DNA, 25 bp, Homo sapien
gatggagtttcatgctttttctcac

SEQ ID NO: 2012775 - DNA, 25 bp, Homo sapien
tcaaggcaaatcagaagaccgggtg

SEQ ID NO: 2012776 - DNA, 25 bp, Homo sapien
cggtttgcacgtttgtagatggagt

SEQ ID NO: 2012777 - DNA, 25 bp, Homo sapien
gctgctcatgtctgacatcgttccc

SEQ ID NO: 2012778 - DNA, 25 bp, Homo sapien
tttgtttcctctaatggacacattc

SEQ ID NO: 2012779 - DNA, 25 bp, Homo sapien
cattccagatttgagtgcggagcgg

SEQ ID NO: 2012780 - DNA, 25 bp, Homo sapien
tcactgggtgatggcctttgtttcc

SEQ ID NO: 2012781 - DNA, 25 bp, Homo sapien
ctcctccagtggtttcaaatgcatg

SEQ ID NO: 2012782 - DNA, 25 bp, Homo sapien
ttcaaatgcatggaatgatttttca

SEQ ID NO: 2012783 - DNA, 25 bp, Homo sapien
ttctcctccagtggtttcaaatgca

SEQ ID NO: 2012784 - DNA, 25 bp, Homo sapien
aatgcatggaatgatttttcagcca

SEQ ID NO: 2012785 - DNA, 25 bp, Homo sapien
gctttcttgccatggcttaagttca

SEQ ID NO: 2012786 - DNA, 25 bp, Homo sapien
gtgctttcttgccatggcttaagtt

SEQ ID NO: 2012787 - DNA, 25 bp, Homo sapien
cacgccttaaatctaactgtgcttt

SEQ ID NO: 2012788 - DNA, 25 bp, Homo sapien
cttgaacgctgacgttcacgcctta

SEQ ID NO: 2012789 - DNA, 25 bp, Homo sapien
cacggctccttttccggttgtgtag

SEQ ID NO: 2012790 - DNA, 25 bp, Homo sapien
ttttccggttgtgtagccatttagc

SEQ ID NO: 2012791 - DNA, 25 bp, Homo sapien
gagtcagtttctccacggctccttt

SEQ ID NO: 2012792 - DNA, 25 bp, Homo sapien
ggagtcagtttctccacggctcctt

SEQ ID NO: 2012793 - DNA, 25 bp, Homo sapien
tccacagcggatccttctccccact

SEQ ID NO: 2012794 - DNA, 25 bp, Homo sapien
caggatatgcgtgctgtccagggtc

SEQ ID NO: 2012795 - DNA, 25 bp, Homo sapien
ctggagctggcttgactcctcgcct

SEQ ID NO: 2012796 - DNA, 25 bp, Homo sapien
cagggtccagggacgccgtccctgc

SEQ ID NO: 2012797 - DNA, 25 bp, Homo sapien
tgagagctggcgcagtcaactgcag

SEQ ID NO: 2012798 - DNA, 25 bp, Homo sapien
ggcgcagtcaactgcagggtgtcct

SEQ ID NO: 2012799 - DNA, 25 bp, Homo sapien
catgatatcgtatgggcttggccag

SEQ ID NO: 2012800 - DNA, 25 bp, Homo sapien
taatatgtatacgttttccatgatc

SEQ ID NO: 2012801 - DNA, 25 bp, Homo sapien
tgaggacttgggttgttgctagtta

SEQ ID NO: 2012802 - DNA, 25 bp, Homo sapien
agtgcaatgtttctagatcccaccc

SEQ ID NO: 2012803 - DNA, 25 bp, Homo sapien
tgttgagaatggctccccactttgg

SEQ ID NO: 2012804 - DNA, 25 bp, Homo sapien
ccactttggattccaatagggaaag

SEQ ID NO: 2012805 - DNA, 25 bp, Homo sapien
taatactcacgagtgaggagatagt

SEQ ID NO: 2012806 - DNA, 25 bp, Homo sapien
tgtctgcgttgttcttgctcaacag

SEQ ID NO: 2012807 - DNA, 25 bp, Homo sapien
caagcagcatcagggtgtttagtgt

SEQ ID NO: 2012808 - DNA, 25 bp, Homo sapien
tgctcaacagacagataagtgagga

SEQ ID NO: 2012809 - DNA, 25 bp, Homo sapien
tgggtgattctgacggccagtgctt

SEQ ID NO: 2012810 - DNA, 25 bp, Homo sapien
ctctctacaggtgaaggtcccaatc

SEQ ID NO: 2012811 - DNA, 25 bp, Homo sapien
tgcatttttcccaagcgccctgggt

SEQ ID NO: 2012812 - DNA, 25 bp, Homo sapien
tacaggtgaaggtcccaatcgcaaa

SEQ ID NO: 2012813 - DNA, 25 bp, Homo sapien
ctggaaaactcagggtcgtttctga

SEQ ID NO: 2012814 - DNA, 25 bp, Homo sapien
cagtgtcgctaaggagtggaaccaa

SEQ ID NO: 2012815 - DNA, 25 bp, Homo sapien
gattatcagctgtgaagttggcagt

SEQ ID NO: 2012816 - DNA, 25 bp, Homo sapien
tggaaccaagatgcccactgcttct

SEQ ID NO: 2012817 - DNA, 25 bp, Homo sapien
cagttctcgttttcccaggtataat

SEQ ID NO: 2012818 - DNA, 25 bp, Homo sapien
atttctggctgatagtgggatggcc

SEQ ID NO: 2012819 - DNA, 25 bp, Homo sapien
acggctgttaatagggatttctggc

SEQ ID NO: 2012820 - DNA, 25 bp, Homo sapien
cagcacttcattggatgcggtgggt

SEQ ID NO: 2012821 - DNA, 25 bp, Homo sapien
ggcttgaccctcaggaagggagaat

SEQ ID NO: 2012822 - DNA, 25 bp, Homo sapien
gagaacaatctccaggggcttgacc

SEQ ID NO: 2012823 - DNA, 25 bp, Homo sapien
ggcaggcccatggtttctagggttg

SEQ ID NO: 2012824 - DNA, 25 bp, Homo sapien
ctcaggaagggagaatcccttcttc

SEQ ID NO: 2012825 - DNA, 25 bp, Homo sapien
cgtgattgattagcaaagctgttct

SEQ ID NO: 2012826 - DNA, 25 bp, Homo sapien
tgacaggtccgacatgcacagattt

SEQ ID NO: 2012827 - DNA, 25 bp, Homo sapien
cactttcctgaagcgtgattgatta

SEQ ID NO: 2012828 - DNA, 25 bp, Homo sapien
gctgttctgctcaagggcagcctgt

SEQ ID NO: 2012829 - DNA, 25 bp, Homo sapien
acgcttggcggtctccgtgcctctt

SEQ ID NO: 2012830 - DNA, 25 bp, Homo sapien
tcctgccgcctgcacctggaacgct

SEQ ID NO: 2012831 - DNA, 25 bp, Homo sapien
cgcctgcacctggaacgcttggcgg

SEQ ID NO: 2012832 - DNA, 25 bp, Homo sapien
gaacgcttggcggtctccgtgcctc

SEQ ID NO: 2012833 - DNA, 25 bp, Homo sapien
gggttcacagaccaaggctcgctct

SEQ ID NO: 2012834 - DNA, 25 bp, Homo sapien
cctggggttcacagaccaaggctcg

SEQ ID NO: 2012835 - DNA, 25 bp, Homo sapien
cggccctggggttcacagaccaagg

SEQ ID NO: 2012836 - DNA, 25 bp, Homo sapien
gttcacagaccaaggctcgctctgc

SEQ ID NO: 2012837 - DNA, 25 bp, Homo sapien
caaatgaattagatgagccggtgcc

SEQ ID NO: 2012838 - DNA, 25 bp, Homo sapien
aaatgaattagatgagccggtgccc

SEQ ID NO: 2012839 - DNA, 25 bp, Homo sapien
ggtgcagttttgtggatctgtacac

SEQ ID NO: 2012840 - DNA, 25 bp, Homo sapien
ccccatattaagtaaggcagtgtca

SEQ ID NO: 2012841 - DNA, 25 bp, Homo sapien
agtgtcagccctggtggtccgtgca

SEQ ID NO: 2012842 - DNA, 25 bp, Homo sapien
catattaagtaaggcagtgtcagcc

SEQ ID NO: 2012843 - DNA, 25 bp, Homo sapien
ctggtggtccgtgcagactcagtgc

SEQ ID NO: 2012844 - DNA, 25 bp, Homo sapien
taatcgccaggtggtaggaccagga

SEQ ID NO: 2012845 - DNA, 25 bp, Homo sapien
tagaaaagtgtattcccatgccagt

SEQ ID NO: 2012846 - DNA, 25 bp, Homo sapien
cattatatatcgcagggacttcccc

SEQ ID NO: 2012847 - DNA, 25 bp, Homo sapien
taacaggtggcctctcaacttgcac

SEQ ID NO: 2012848 - DNA, 25 bp, Homo sapien
ttagcacaaatataccatgtcccct

SEQ ID NO: 2012849 - DNA, 25 bp, Homo sapien
taccatgtccccttgtaaaatgtct

SEQ ID NO: 2012850 - DNA, 25 bp, Homo sapien
acaaatataccatgtccccttgtaa

SEQ ID NO: 2012851 - DNA, 25 bp, Homo sapien
ataccatgtccccttgtaaaatgtc

SEQ ID NO: 2012852 - DNA, 25 bp, Homo sapien
tttgcctttatccacgctgttccct

SEQ ID NO: 2012853 - DNA, 25 bp, Homo sapien
ccaaggcctccactaatcgccatct

SEQ ID NO: 2012854 - DNA, 25 bp, Homo sapien
ctggacatttgcttttcgtcccttg

SEQ ID NO: 2012855 - DNA, 25 bp, Homo sapien
tccactaatcgccatctggacattt

SEQ ID NO: 2012856 - DNA, 25 bp, Homo sapien
ttcgtcccttgtactgcctgttctc

SEQ ID NO: 2012857 - DNA, 25 bp, Homo sapien
gatgataaccacaggggtgagccct

SEQ ID NO: 2012858 - DNA, 25 bp, Homo sapien
taagatgataaccacaggggtgagc

SEQ ID NO: 2012859 - DNA, 25 bp, Homo sapien
aggggtgagccctgagatcttccac

SEQ ID NO: 2012860 - DNA, 25 bp, Homo sapien
ccacaggggtgagccctgagatctt

SEQ ID NO: 2012861 - DNA, 25 bp, Homo sapien
gttaccaaaatgacagtgcacctgc

SEQ ID NO: 2012862 - DNA, 25 bp, Homo sapien
tgcagacagtgttgagttaccaaaa

SEQ ID NO: 2012863 - DNA, 25 bp, Homo sapien
gcaacaacacatactatcgtcgagt

SEQ ID NO: 2012864 - DNA, 25 bp, Homo sapien
tgaaggactaaatcgaagccagagc

SEQ ID NO: 2012865 - DNA, 25 bp, Homo sapien
ctgtggtgagacacagcttgcagcc

SEQ ID NO: 2012866 - DNA, 25 bp, Homo sapien
tgtggtgagacacagcttgcagcca

SEQ ID NO: 2012867 - DNA, 25 bp, Homo sapien
gtggtgagacacagcttgcagccac

SEQ ID NO: 2012868 - DNA, 25 bp, Homo sapien
acctttgcgtggcatggctcctctg

SEQ ID NO: 2012869 - DNA, 25 bp, Homo sapien
tgactgaagagcttcaggctggtgc

SEQ ID NO: 2012870 - DNA, 25 bp, Homo sapien
ttcatgactgaagagcttcaggctg

SEQ ID NO: 2012871 - DNA, 25 bp, Homo sapien
tggtgctgccgcaggggacctttgc

SEQ ID NO: 2012872 - DNA, 25 bp, Homo sapien
tttggtaaaacctgtgccaggacca

SEQ ID NO: 2012873 - DNA, 25 bp, Homo sapien
catttctggcgaaacctgattgcat

SEQ ID NO: 2012874 - DNA, 25 bp, Homo sapien
ttggtaaaacctgtgccaggaccag

SEQ ID NO: 2012875 - DNA, 25 bp, Homo sapien
cacatgactgcatttctggcgaaac

SEQ ID NO: 2012876 - DNA, 25 bp, Homo sapien
ggcccactcttgagattgcatttct

SEQ ID NO: 2012877 - DNA, 25 bp, Homo sapien
cactcttgagattgcatttcttggc

SEQ ID NO: 2012878 - DNA, 25 bp, Homo sapien
ctcttgagattgcatttcttggcca

SEQ ID NO: 2012879 - DNA, 25 bp, Homo sapien
cccactcttgagattgcatttcttg

SEQ ID NO: 2012880 - DNA, 25 bp, Homo sapien
tgtctgacactttctgcactcgtcc

SEQ ID NO: 2012881 - DNA, 25 bp, Homo sapien
cactttctgcactcgtccctgctgc

SEQ ID NO: 2012882 - DNA, 25 bp, Homo sapien
cccgtatttcttagctttatcacaa

SEQ ID NO: 2012883 - DNA, 25 bp, Homo sapien
ttctcccgtatttcttagctttatc

SEQ ID NO: 2012884 - DNA, 25 bp, Homo sapien
tagtgtggcagctagaaatttccct

SEQ ID NO: 2012885 - DNA, 25 bp, Homo sapien
tgacttcaagttcccatgaatgtgg

SEQ ID NO: 2012886 - DNA, 25 bp, Homo sapien
gagctgcaccggacgtttgtctcac

SEQ ID NO: 2012887 - DNA, 25 bp, Homo sapien
ccctacagagatggtggcacagtcc

SEQ ID NO: 2012888 - DNA, 25 bp, Homo sapien
gggagagacattgagggttttagga

SEQ ID NO: 2012889 - DNA, 25 bp, Homo sapien
gagagacattgagggttttaggaga

SEQ ID NO: 2012890 - DNA, 25 bp, Homo sapien
gagacattgagggttttaggagatc

SEQ ID NO: 2012891 - DNA, 25 bp, Homo sapien
gacattgagggttttaggagatctg

SEQ ID NO: 2012892 - DNA, 25 bp, Homo sapien
caatgttaacacttggtatgcattc

SEQ ID NO: 2012893 - DNA, 25 bp, Homo sapien
aatgttaacacttggtatgcattct

SEQ ID NO: 2012894 - DNA, 25 bp, Homo sapien
ccaatgttaacacttggtatgcatt

SEQ ID NO: 2012895 - DNA, 25 bp, Homo sapien
tgttaacacttggtatgcattcttc

SEQ ID NO: 2012896 - DNA, 25 bp, Homo sapien
cacaggccttagcaagatcatctga

SEQ ID NO: 2012897 - DNA, 25 bp, Homo sapien
ccgttcacaggccttagcaagatca

SEQ ID NO: 2012898 - DNA, 25 bp, Homo sapien
tcactgcattcctgggatgccgttc

SEQ ID NO: 2012899 - DNA, 25 bp, Homo sapien
cattcctgggatgccgttcacaggc

SEQ ID NO: 2012900 - DNA, 25 bp, Homo sapien
cctcaaaatgcttaggtgagattaa

SEQ ID NO: 2012901 - DNA, 25 bp, Homo sapien
tttataacaatcacttttgaaggcc

SEQ ID NO: 2012902 - DNA, 25 bp, Homo sapien
tccaaccagctgtggcaataaccag

SEQ ID NO: 2012903 - DNA, 25 bp, Homo sapien
tcaccccgttgttatgggccccatg

SEQ ID NO: 2012904 - DNA, 25 bp, Homo sapien
agtgtcggccacaattcaaatccaa

SEQ ID NO: 2012905 - DNA, 25 bp, Homo sapien
tagtgtcggccacaattcaaatcca

SEQ ID NO: 2012906 - DNA, 25 bp, Homo sapien
ttagtgtcggccacaattcaaatcc

SEQ ID NO: 2012907 - DNA, 25 bp, Homo sapien
catacgtgaagttgtttgctacagc

SEQ ID NO: 2012908 - DNA, 25 bp, Homo sapien
gaatgccctccttgttttgtggcag

SEQ ID NO: 2012909 - DNA, 25 bp, Homo sapien
tctggagaacggtgagaatgccctc

SEQ ID NO: 2012910 - DNA, 25 bp, Homo sapien
taatgaggagagactggtaataagg

SEQ ID NO: 2012911 - DNA, 25 bp, Homo sapien
tcacaatattccagcgcctctccgt

SEQ ID NO: 2012912 - DNA, 25 bp, Homo sapien
gaagacgaccgtaactgaggtgtag

SEQ ID NO: 2012913 - DNA, 25 bp, Homo sapien
gacgaccgtaactgaggtgtaggaa

SEQ ID NO: 2012914 - DNA, 25 bp, Homo sapien
gttacttgaagacgaccgtaactga

SEQ ID NO: 2012915 - DNA, 25 bp, Homo sapien
tccaattagaagtgtagacagtcgt

SEQ ID NO: 2012916 - DNA, 25 bp, Homo sapien
tagacagtcgtgtccctcaaggttt

SEQ ID NO: 2012917 - DNA, 25 bp, Homo sapien
gattccactctaggccactttactt

SEQ ID NO: 2012918 - DNA, 25 bp, Homo sapien
ttgaatgaatcagatacggctttcc

SEQ ID NO: 2012919 - DNA, 25 bp, Homo sapien
gtgggaggtgacagcaacattttgc

SEQ ID NO: 2012920 - DNA, 25 bp, Homo sapien
ggaggtgacagcaacattttgccac

SEQ ID NO: 2012921 - DNA, 25 bp, Homo sapien
tgggaggtgacagcaacattttgcc

SEQ ID NO: 2012922 - DNA, 25 bp, Homo sapien
aggtgacagcaacattttgccacat

SEQ ID NO: 2012923 - DNA, 25 bp, Homo sapien
ggccatgcttgggacacttacacgc

SEQ ID NO: 2012924 - DNA, 25 bp, Homo sapien
tgcaaactgcgtttgccttttgcat

SEQ ID NO: 2012925 - DNA, 25 bp, Homo sapien
tacaaatagacctcagcgaagccct

SEQ ID NO: 2012926 - DNA, 25 bp, Homo sapien
gaagccctgcgtgcatgcaaactgc

SEQ ID NO: 2012927 - DNA, 25 bp, Homo sapien
ggatccacactctcttctgtatgag

SEQ ID NO: 2012928 - DNA, 25 bp, Homo sapien
gaagtccattccgaggtgaccttgc

SEQ ID NO: 2012929 - DNA, 25 bp, Homo sapien
gattcccacatacagcgagtatttg

SEQ ID NO: 2012930 - DNA, 25 bp, Homo sapien
tgtagtcagccttaaatggatccac

SEQ ID NO: 2012931 - DNA, 25 bp, Homo sapien
gggaaaatcactctatggacaaagt

SEQ ID NO: 2012932 - DNA, 25 bp, Homo sapien
gatttgtactgcagagtggctttaa

SEQ ID NO: 2012933 - DNA, 25 bp, Homo sapien
cccctcgagaaggaatggagccctt

SEQ ID NO: 2012934 - DNA, 25 bp, Homo sapien
ggcagcctggcagtacctgcatgaa

SEQ ID NO: 2012935 - DNA, 25 bp, Homo sapien
tgtgctttactctttaggcaaaccc

SEQ ID NO: 2012936 - DNA, 25 bp, Homo sapien
ccttaaatggcgtaggtagtataat

SEQ ID NO: 2012937 - DNA, 25 bp, Homo sapien
cagaaaatgtataaccacattcctt

SEQ ID NO: 2012938 - DNA, 25 bp, Homo sapien
ttttaagacaggataggacatttta

SEQ ID NO: 2012939 - DNA, 25 bp, Homo sapien
tgcttccagtgaagagtaaaagtaa

SEQ ID NO: 2012940 - DNA, 25 bp, Homo sapien
gagacacagtggagcattgaggtag

SEQ ID NO: 2012941 - DNA, 25 bp, Homo sapien
acagtggagcattgaggtaggtcat

SEQ ID NO: 2012942 - DNA, 25 bp, Homo sapien
ggagacacagtggagcattgaggta

SEQ ID NO: 2012943 - DNA, 25 bp, Homo sapien
gacacagtggagcattgaggtaggt

SEQ ID NO: 2012944 - DNA, 25 bp, Homo sapien
aggacttgagacagcgtactcccca

SEQ ID NO: 2012945 - DNA, 25 bp, Homo sapien
ccgagaggacttgagacagcgtact

SEQ ID NO: 2012946 - DNA, 25 bp, Homo sapien
gagaggacttgagacagcgtactcc

SEQ ID NO: 2012947 - DNA, 25 bp, Homo sapien
cccgagaggacttgagacagcgtac

SEQ ID NO: 2012948 - DNA, 25 bp, Homo sapien
caccggtgagagtccgtgttctttc

SEQ ID NO: 2012949 - DNA, 25 bp, Homo sapien
ttttgattggcgacagagaggcctg

SEQ ID NO: 2012950 - DNA, 25 bp, Homo sapien
tgctgatgggactcgagtgctcact

SEQ ID NO: 2012951 - DNA, 25 bp, Homo sapien
tctgctgccagcaagaccttagcgt

SEQ ID NO: 2012952 - DNA, 25 bp, Homo sapien
gctgactcaggaagaccatttgagc

SEQ ID NO: 2012953 - DNA, 25 bp, Homo sapien
ttaccgatcatggtggtgtgtatgc

SEQ ID NO: 2012954 - DNA, 25 bp, Homo sapien
ccgatcatggtggtgtgtatgcacc

SEQ ID NO: 2012955 - DNA, 25 bp, Homo sapien
aattaccgatcatggtggtgtgtat

SEQ ID NO: 2012956 - DNA, 25 bp, Homo sapien
agaaagcattccgaccctggcgtta

SEQ ID NO: 2012957 - DNA, 25 bp, Homo sapien
gagattcaatccagaacggccttgg

SEQ ID NO: 2012958 - DNA, 25 bp, Homo sapien
ccttgggagttcttcgtcggctgac

SEQ ID NO: 2012959 - DNA, 25 bp, Homo sapien
tggcgttagccccactcatgagtct

SEQ ID NO: 2012960 - DNA, 25 bp, Homo sapien
tcctttggccactgagaggtttggt

SEQ ID NO: 2012961 - DNA, 25 bp, Homo sapien
tttagcaccagaatggaaacaccca

SEQ ID NO: 2012962 - DNA, 25 bp, Homo sapien
tcatgaaatctaaccttatttaaca

SEQ ID NO: 2012963 - DNA, 25 bp, Homo sapien
aggagtgaaaggcattgttgttgct

SEQ ID NO: 2012964 - DNA, 25 bp, Homo sapien
tcacagatggtgagccgctttatca

SEQ ID NO: 2012965 - DNA, 25 bp, Homo sapien
catgctaaggtaggaaggtttgttc

SEQ ID NO: 2012966 - DNA, 25 bp, Homo sapien
cttgagacctatcactcttctgtgg

SEQ ID NO: 2012967 - DNA, 25 bp, Homo sapien
ttcgtggaaaacagctgtgggtgcc

SEQ ID NO: 2012968 - DNA, 25 bp, Homo sapien
gagacataagctagattccattcct

SEQ ID NO: 2012969 - DNA, 25 bp, Homo sapien
cataagctagattccattcctgttt

SEQ ID NO: 2012970 - DNA, 25 bp, Homo sapien
gattatctttccaacacaagaaagg

SEQ ID NO: 2012971 - DNA, 25 bp, Homo sapien
aaagagagacataagctagattcca

SEQ ID NO: 2012972 - DNA, 25 bp, Homo sapien
tattctgggacaatagggtaggcca

SEQ ID NO: 2012973 - DNA, 25 bp, Homo sapien
aagtcattcgttaggtcttacctgg

SEQ ID NO: 2012974 - DNA, 25 bp, Homo sapien
tcccaggcaagctgatgtctagagt

SEQ ID NO: 2012975 - DNA, 25 bp, Homo sapien
tgtgtcgttagaaacatgcaaacct

SEQ ID NO: 2012976 - DNA, 25 bp, Homo sapien
ctttgcttagcaccgagaagtctgg

SEQ ID NO: 2012977 - DNA, 25 bp, Homo sapien
tttgtagagaatcatcccaggagca

SEQ ID NO: 2012978 - DNA, 25 bp, Homo sapien
tctgtgatcacaaaataaggcgctg

SEQ ID NO: 2012979 - DNA, 25 bp, Homo sapien
aatgaaaagattggcagagctgccc

SEQ ID NO: 2012980 - DNA, 25 bp, Homo sapien
tccctggcataagaaactagttttg

SEQ ID NO: 2012981 - DNA, 25 bp, Homo sapien
gagatgaccttagtagaaataacaa

SEQ ID NO: 2012982 - DNA, 25 bp, Homo sapien
catgccatctgagatgaccttagta

SEQ ID NO: 2012983 - DNA, 25 bp, Homo sapien
tggcaatgataacagctccgcagcc

SEQ ID NO: 2012984 - DNA, 25 bp, Homo sapien
tgttctccaaagtatctgtcccctg

SEQ ID NO: 2012985 - DNA, 25 bp, Homo sapien
taaaggacacccagataattggcct

SEQ ID NO: 2012986 - DNA, 25 bp, Homo sapien
tgagcttgtccgtatctgtgagaaa

SEQ ID NO: 2012987 - DNA, 25 bp, Homo sapien
cagcttgtagatttgtccccatgaa

SEQ ID NO: 2012988 - DNA, 25 bp, Homo sapien
cttggcatgtgacaataatctgcac

SEQ ID NO: 2012989 - DNA, 25 bp, Homo sapien
cgtggattagcccatctcctgaata

SEQ ID NO: 2012990 - DNA, 25 bp, Homo sapien
gctgctcgtagaaaattggaacctt

SEQ ID NO: 2012991 - DNA, 25 bp, Homo sapien
taacatggataaatcaggtccttgg

SEQ ID NO: 2012992 - DNA, 25 bp, Homo sapien
agcggtcccgtggatagagattcat

SEQ ID NO: 2012993 - DNA, 25 bp, Homo sapien
gggaggcgtgaagcggtcccgtgga

SEQ ID NO: 2012994 - DNA, 25 bp, Homo sapien
tccgtccccggctccttcatcgtcc

SEQ ID NO: 2012995 - DNA, 25 bp, Homo sapien
ggattcctgcctccgtccccggctc

SEQ ID NO: 2012996 - DNA, 25 bp, Homo sapien
cacataatgggctgacttcatccaa

SEQ ID NO: 2012997 - DNA, 25 bp, Homo sapien
cacatccagcccagcgggttttgga

SEQ ID NO: 2012998 - DNA, 25 bp, Homo sapien
tctattggacccagaagtgcgtaaa

SEQ ID NO: 2012999 - DNA, 25 bp, Homo sapien
ggttttcccttagatgctgtggagg

SEQ ID NO: 2013000 - DNA, 25 bp, Homo sapien
gaatacgtcagattggaccagtgct

SEQ ID NO: 2013001 - DNA, 25 bp, Homo sapien
cagcttgctgctaaatgggacccaa

SEQ ID NO: 2013002 - DNA, 25 bp, Homo sapien
gactcaaatgcttagggaacgtttc

SEQ ID NO: 2013003 - DNA, 25 bp, Homo sapien
caagatgagttggacccattgccag

SEQ ID NO: 2013004 - DNA, 25 bp, Homo sapien
cgtgtgcaagaatggtacataccca

SEQ ID NO: 2013005 - DNA, 25 bp, Homo sapien
agtattctctttgtgcacgtgtgca

SEQ ID NO: 2013006 - DNA, 25 bp, Homo sapien
taagctcccataagtaggaatgcgg

SEQ ID NO: 2013007 - DNA, 25 bp, Homo sapien
cagttcttcaacctcaccaaagtgg

SEQ ID NO: 2013008 - DNA, 25 bp, Homo sapien
taagaagccattcgagctcccgaag

SEQ ID NO: 2013009 - DNA, 25 bp, Homo sapien
cccgggatttcagagcgtagtcgct

SEQ ID NO: 2013010 - DNA, 25 bp, Homo sapien
tgaaaagcgaaagtgggccgtgacc

SEQ ID NO: 2013011 - DNA, 25 bp, Homo sapien
gtcccaagccgagggctgaactcca

SEQ ID NO: 2013012 - DNA, 25 bp, Homo sapien
cagagagcagacttattccaagaga

SEQ ID NO: 2013013 - DNA, 25 bp, Homo sapien
ggaacaacaacgtcagaaagctgaa

SEQ ID NO: 2013014 - DNA, 25 bp, Homo sapien
ccatagctgctagttcagggccacc

SEQ ID NO: 2013015 - DNA, 25 bp, Homo sapien
ggaattctagccattgagccatagc

SEQ ID NO: 2013016 - DNA, 25 bp, Homo sapien
aactccatggagagggtttgcctct

SEQ ID NO: 2013017 - DNA, 25 bp, Homo sapien
catgtctggtgtctcaagttgggct

SEQ ID NO: 2013018 - DNA, 25 bp, Homo sapien
gatctctcatcatgcagtagtccag

SEQ ID NO: 2013019 - DNA, 25 bp, Homo sapien
ggtgaggaatccaagatggctccat

SEQ ID NO: 2013020 - DNA, 25 bp, Homo sapien
cctattgactgtattctgtgtatta

SEQ ID NO: 2013021 - DNA, 25 bp, Homo sapien
taaattggttagatacaaagaaatc

SEQ ID NO: 2013022 - DNA, 25 bp, Homo sapien
tattacctaaattggttagatacaa

SEQ ID NO: 2013023 - DNA, 25 bp, Homo sapien
aattgatataacctattgactgtat

SEQ ID NO: 2013024 - DNA, 25 bp, Homo sapien
ctttcactgtgcaatctcaagagga

SEQ ID NO: 2013025 - DNA, 25 bp, Homo sapien
gggaacagtttgtcctgaccacaca

SEQ ID NO: 2013026 - DNA, 25 bp, Homo sapien
tagcaagattgaccaaaacaggtgg

SEQ ID NO: 2013027 - DNA, 25 bp, Homo sapien
gaaatactgtaatgcgcacctttgc

SEQ ID NO: 2013028 - DNA, 25 bp, Homo sapien
gcttaatgtagaggactcccagtcc

SEQ ID NO: 2013029 - DNA, 25 bp, Homo sapien
aaatacttgtattgagtccccgtcg

SEQ ID NO: 2013030 - DNA, 25 bp, Homo sapien
ggcttaatcgttagtcctctgtgga

SEQ ID NO: 2013031 - DNA, 25 bp, Homo sapien
ccagaatggatctagggcttcagtg

SEQ ID NO: 2013032 - DNA, 25 bp, Homo sapien
gggtctcccgagctactggctttgt

SEQ ID NO: 2013033 - DNA, 25 bp, Homo sapien
gcttccaaaccagccaagatctggg

SEQ ID NO: 2013034 - DNA, 25 bp, Homo sapien
aaaggtcgtttctggcccgctcttg

SEQ ID NO: 2013035 - DNA, 25 bp, Homo sapien
gggcaggtttctccaatcagggtta

SEQ ID NO: 2013036 - DNA, 25 bp, Homo sapien
tgggaactccgccatgtcatccact

SEQ ID NO: 2013037 - DNA, 25 bp, Homo sapien
ctctcctcgcccctcgttcccttgg

SEQ ID NO: 2013038 - DNA, 25 bp, Homo sapien
cacttcgcccaacctccaggtatca

SEQ ID NO: 2013039 - DNA, 25 bp, Homo sapien
tgcgcgcttcgacgttgctgctgtt

SEQ ID NO: 2013040 - DNA, 25 bp, Homo sapien
cagtcggcgggtcttggaaatggac

SEQ ID NO: 2013041 - DNA, 25 bp, Homo sapien
gtgaaggcgcagtcacaggcccaaa

SEQ ID NO: 2013042 - DNA, 25 bp, Homo sapien
gaaatggacgactttttcactcaaa

SEQ ID NO: 2013043 - DNA, 25 bp, Homo sapien
gaattattcaccaccgagacgagga

SEQ ID NO: 2013044 - DNA, 25 bp, Homo sapien
acctggatgtggaggcgaccgtgtc

SEQ ID NO: 2013045 - DNA, 25 bp, Homo sapien
tggaggcgaccgtgtctgggcagaa

SEQ ID NO: 2013046 - DNA, 25 bp, Homo sapien
gttatcctggaaaatgcgtggaaaa

SEQ ID NO: 2013047 - DNA, 25 bp, Homo sapien
atcctggaaaatgcgtggaaaagga

SEQ ID NO: 2013048 - DNA, 25 bp, Homo sapien
tgcagtgttcctggtgctcaaaggg

SEQ ID NO: 2013049 - DNA, 25 bp, Homo sapien
aagtgattttactccctctgcagtg

SEQ ID NO: 2013050 - DNA, 25 bp, Homo sapien
tgggagctggaaatactgccaacat

SEQ ID NO: 2013051 - DNA, 25 bp, Homo sapien
gttgggagctggaaatactgccaac

SEQ ID NO: 2013052 - DNA, 25 bp, Homo sapien
tcagaagtctctcgagttccaaaaa

SEQ ID NO: 2013053 - DNA, 25 bp, Homo sapien
agaagtctctcgagttccaaaaatc

SEQ ID NO: 2013054 - DNA, 25 bp, Homo sapien
tctcagaagtctctcgagttccaaa

SEQ ID NO: 2013055 - DNA, 25 bp, Homo sapien
atcctgcatgtcctgaagtctcccc

SEQ ID NO: 2013056 - DNA, 25 bp, Homo sapien
taatcctcagtgcatgaacgcaaag

SEQ ID NO: 2013057 - DNA, 25 bp, Homo sapien
ttcctgttcctatgctgactggctc

SEQ ID NO: 2013058 - DNA, 25 bp, Homo sapien
agcccttagtatctggggtcccagt

SEQ ID NO: 2013059 - DNA, 25 bp, Homo sapien
tgcatgaacgcaaagagatctgcct

SEQ ID NO: 2013060 - DNA, 25 bp, Homo sapien
ttccatgggcttcctccttctccat

SEQ ID NO: 2013061 - DNA, 25 bp, Homo sapien
tggtcatttccatgggcttcctcct

SEQ ID NO: 2013062 - DNA, 25 bp, Homo sapien
catttccatgggcttcctccttctc

SEQ ID NO: 2013063 - DNA, 25 bp, Homo sapien
ggtcatttccatgggcttcctcctt

SEQ ID NO: 2013064 - DNA, 25 bp, Homo sapien
ttaagatagaggactccctttggcc

SEQ ID NO: 2013065 - DNA, 25 bp, Homo sapien
ttcaggtaggacatgcaccctggca

SEQ ID NO: 2013066 - DNA, 25 bp, Homo sapien
ggccagtacccaaacgtgtgtcaag

SEQ ID NO: 2013067 - DNA, 25 bp, Homo sapien
gatgaataggattgcaatttgcacc

SEQ ID NO: 2013068 - DNA, 25 bp, Homo sapien
gtgtcacctttagcacccacttgag

SEQ ID NO: 2013069 - DNA, 25 bp, Homo sapien
tgaacagatcaacggcaaaagccga

SEQ ID NO: 2013070 - DNA, 25 bp, Homo sapien
aaaagccgaatttgctagttgcagg

SEQ ID NO: 2013071 - DNA, 25 bp, Homo sapien
ccagtggctccttttcacatagttg

SEQ ID NO: 2013072 - DNA, 25 bp, Homo sapien
ggaattactgaggaacagacccact

SEQ ID NO: 2013073 - DNA, 25 bp, Homo sapien
tacccggaagttctctttcgctggc

SEQ ID NO: 2013074 - DNA, 25 bp, Homo sapien
tgctggtcccagacagtgcataact

SEQ ID NO: 2013075 - DNA, 25 bp, Homo sapien
cattgcagggtcaaatgctggtccc

SEQ ID NO: 2013076 - DNA, 25 bp, Homo sapien
gaactaagtttgtttacatccgatg

SEQ ID NO: 2013077 - DNA, 25 bp, Homo sapien
tgtttgaaatccaaagggtacatct

SEQ ID NO: 2013078 - DNA, 25 bp, Homo sapien
gagccgcttgattagtttcagtgag

SEQ ID NO: 2013079 - DNA, 25 bp, Homo sapien
gaaagattcagagatttgtctacgt

SEQ ID NO: 2013080 - DNA, 25 bp, Homo sapien
aattcctttgcatacggtctcttcg

SEQ ID NO: 2013081 - DNA, 25 bp, Homo sapien
ctttgcatacggtctcttcgtagag

SEQ ID NO: 2013082 - DNA, 25 bp, Homo sapien
cctttgcatacggtctcttcgtaga

SEQ ID NO: 2013083 - DNA, 25 bp, Homo sapien
tccaattcctttgcatacggtctct

SEQ ID NO: 2013084 - DNA, 25 bp, Homo sapien
gagatccttaattgagttgttgatc

SEQ ID NO: 2013085 - DNA, 25 bp, Homo sapien
catctgtgagatccttaattgagtt

SEQ ID NO: 2013086 - DNA, 25 bp, Homo sapien
tctgtgagatccttaattgagttgt

SEQ ID NO: 2013087 - DNA, 25 bp, Homo sapien
tgtgagatccttaattgagttgttg

SEQ ID NO: 2013088 - DNA, 25 bp, Homo sapien
gagcttcttggaccccggggctatc

SEQ ID NO: 2013089 - DNA, 25 bp, Homo sapien
agcactgagccggagaaagaaccta

SEQ ID NO: 2013090 - DNA, 25 bp, Homo sapien
ggggctatcagaggaacgaccagca

SEQ ID NO: 2013091 - DNA, 25 bp, Homo sapien
acgaggagtccgacgagggagacgc

SEQ ID NO: 2013092 - DNA, 25 bp, Homo sapien
ggtcgttcacactgttgtcagctaa

SEQ ID NO: 2013093 - DNA, 25 bp, Homo sapien
cttgttgactctgaaaggacattct

SEQ ID NO: 2013094 - DNA, 25 bp, Homo sapien
tcatccacttgccaacaaagtaggc

SEQ ID NO: 2013095 - DNA, 25 bp, Homo sapien
caaggattttggtctggtcgttcac

SEQ ID NO: 2013096 - DNA, 25 bp, Homo sapien
ccgtgccctcaggttcctcattgga

SEQ ID NO: 2013097 - DNA, 25 bp, Homo sapien
attggaatggatttatgccccactc

SEQ ID NO: 2013098 - DNA, 25 bp, Homo sapien
ttttactgctacatgctgccccaca

SEQ ID NO: 2013099 - DNA, 25 bp, Homo sapien
caggaaaggcactttgccggccgtg

SEQ ID NO: 2013100 - DNA, 25 bp, Homo sapien
tcagctggtgacttagctttcctcg

SEQ ID NO: 2013101 - DNA, 25 bp, Homo sapien
cctcgctgggttacaaattctataa

SEQ ID NO: 2013102 - DNA, 25 bp, Homo sapien
ttttgtaccacttaccttccagctg

SEQ ID NO: 2013103 - DNA, 25 bp, Homo sapien
gaacaatatacttcgctatcaaccg

SEQ ID NO: 2013104 - DNA, 25 bp, Homo sapien
tagaggctgggtaaagtcacgttcc

SEQ ID NO: 2013105 - DNA, 25 bp, Homo sapien
tactgagaaggtcaaaaagccatgc

SEQ ID NO: 2013106 - DNA, 25 bp, Homo sapien
ccttgctatggaggagagccaatca

SEQ ID NO: 2013107 - DNA, 25 bp, Homo sapien
tcaaaggagccagaagggtcactct

SEQ ID NO: 2013108 - DNA, 25 bp, Homo sapien
ggtgtagcctcatgcagctgtgaat

SEQ ID NO: 2013109 - DNA, 25 bp, Homo sapien
gtggacaaagcaattcaaagaaaac

SEQ ID NO: 2013110 - DNA, 25 bp, Homo sapien
ttcaaaagaagggtgtagcctcatg

SEQ ID NO: 2013111 - DNA, 25 bp, Homo sapien
gagaagtaatagcatctgcattcaa

SEQ ID NO: 2013112 - DNA, 25 bp, Homo sapien
ggagacaccacggggcataagaaaa

SEQ ID NO: 2013113 - DNA, 25 bp, Homo sapien
cggagacaccacggggcataagaaa

SEQ ID NO: 2013114 - DNA, 25 bp, Homo sapien
ttcacttatcggcactgactacagg

SEQ ID NO: 2013115 - DNA, 25 bp, Homo sapien
tgtgcacatagttgtggcctccaaa

SEQ ID NO: 2013116 - DNA, 25 bp, Homo sapien
gacatatcttctgaaaagaggacca

SEQ ID NO: 2013117 - DNA, 25 bp, Homo sapien
tccaacaggttagactgctcatagt

SEQ ID NO: 2013118 - DNA, 25 bp, Homo sapien
taagtaatgccccggtgggctgcat

SEQ ID NO: 2013119 - DNA, 25 bp, Homo sapien
gatcagagctggagaaataagtaat

SEQ ID NO: 2013120 - DNA, 25 bp, Homo sapien
tagacccctagtacaacagcggatc

SEQ ID NO: 2013121 - DNA, 25 bp, Homo sapien
cccctagtacaacagcggatcagag

SEQ ID NO: 2013122 - DNA, 25 bp, Homo sapien
aaggctgtttagatgaatgctctgg

SEQ ID NO: 2013123 - DNA, 25 bp, Homo sapien
ggaaggctgtttagatgaatgctct

SEQ ID NO: 2013124 - DNA, 25 bp, Homo sapien
taggaaggctgtttagatgaatgct

SEQ ID NO: 2013125 - DNA, 25 bp, Homo sapien
ctggccacacctaaagtggggagct

SEQ ID NO: 2013126 - DNA, 25 bp, Homo sapien
caggagacaacctggtctagaactc

SEQ ID NO: 2013127 - DNA, 25 bp, Homo sapien
gctattccaatgctagcccctgaac

SEQ ID NO: 2013128 - DNA, 25 bp, Homo sapien
gagagatgggttcctggaataacca

SEQ ID NO: 2013129 - DNA, 25 bp, Homo sapien
tgccaaacgctattccaatgctagc

SEQ ID NO: 2013130 - DNA, 25 bp, Homo sapien
cttgagagatgggttcctggaataa

SEQ ID NO: 2013131 - DNA, 25 bp, Homo sapien
tggcgaagaggataaggaaggcgac

SEQ ID NO: 2013132 - DNA, 25 bp, Homo sapien
atggcgaagaggataaggaaggcga

SEQ ID NO: 2013133 - DNA, 25 bp, Homo sapien
tgtactgccacctactcagatctga

SEQ ID NO: 2013134 - DNA, 25 bp, Homo sapien
tcagatctgagctaattaacaaagt

SEQ ID NO: 2013135 - DNA, 25 bp, Homo sapien
caacaaacttagcacatagcagaac

SEQ ID NO: 2013136 - DNA, 25 bp, Homo sapien
tttggtttgaattgcccactcccca

SEQ ID NO: 2013137 - DNA, 25 bp, Homo sapien
tttcccatacagaacgtggcctcca

SEQ ID NO: 2013138 - DNA, 25 bp, Homo sapien
ttcccatacagaacgtggcctccat

SEQ ID NO: 2013139 - DNA, 25 bp, Homo sapien
aggaagctctatgatcttacaattg

SEQ ID NO: 2013140 - DNA, 25 bp, Homo sapien
ctccacatccttgggtagtaggatg

SEQ ID NO: 2013141 - DNA, 25 bp, Homo sapien
catccttgggtagtaggatgaacat

SEQ ID NO: 2013142 - DNA, 25 bp, Homo sapien
tccacatccttgggtagtaggatga

SEQ ID NO: 2013143 - DNA, 25 bp, Homo sapien
tgatccaggccttcaaagagcccct

SEQ ID NO: 2013144 - DNA, 25 bp, Homo sapien
ggcctcagccagctaagcagaggtg

SEQ ID NO: 2013145 - DNA, 25 bp, Homo sapien
gcaaatcactgaggcccatgtggat

SEQ ID NO: 2013146 - DNA, 25 bp, Homo sapien
gatggtcccctggaaagtcagcaaa

SEQ ID NO: 2013147 - DNA, 25 bp, Homo sapien
ccagaagtttttggtatgtgactca

SEQ ID NO: 2013148 - DNA, 25 bp, Homo sapien
gataagcccagcttcaaagcagtct

SEQ ID NO: 2013149 - DNA, 25 bp, Homo sapien
taatagtgtgatcgtcgctcattgc

SEQ ID NO: 2013150 - DNA, 25 bp, Homo sapien
tccccagcctataacagtgttccat

SEQ ID NO: 2013151 - DNA, 25 bp, Homo sapien
cattcaattcatccttgtgctgcag

SEQ ID NO: 2013152 - DNA, 25 bp, Homo sapien
gataacatttgatagggccactccc

SEQ ID NO: 2013153 - DNA, 25 bp, Homo sapien
cactgtgacagtgactctgagttga

SEQ ID NO: 2013154 - DNA, 25 bp, Homo sapien
tgtgctgcaggatccgtgctcctgg

SEQ ID NO: 2013155 - DNA, 25 bp, Homo sapien
cagaaatcggcatccacagaaaagt

SEQ ID NO: 2013156 - DNA, 25 bp, Homo sapien
tcagggaggacttaacatgggctat

SEQ ID NO: 2013157 - DNA, 25 bp, Homo sapien
gagtttacagaaatcggcatccaca

SEQ ID NO: 2013158 - DNA, 25 bp, Homo sapien
cctgatccagcaacattagcaattt

SEQ ID NO: 2013159 - DNA, 25 bp, Homo sapien
tagtgccaaccaaatgaccagatgg

SEQ ID NO: 2013160 - DNA, 25 bp, Homo sapien
tgtgcaagtcagctagaagcccctg

SEQ ID NO: 2013161 - DNA, 25 bp, Homo sapien
agtaatccatgaacctgcaacacgg

SEQ ID NO: 2013162 - DNA, 25 bp, Homo sapien
tatagtagcctgagcatgtgcccaa

SEQ ID NO: 2013163 - DNA, 25 bp, Homo sapien
ccaggctttggttcttaggcatcca

SEQ ID NO: 2013164 - DNA, 25 bp, Homo sapien
gagatggcaacgactccttttggac

SEQ ID NO: 2013165 - DNA, 25 bp, Homo sapien
taaatttagctatcgacagcagctc

SEQ ID NO: 2013166 - DNA, 25 bp, Homo sapien
tgactccagtcaggtctcagcatgt

SEQ ID NO: 2013167 - DNA, 25 bp, Homo sapien
ctgcatacttctctccctttatcct

SEQ ID NO: 2013168 - DNA, 25 bp, Homo sapien
catacttctctccctttatccttcc

SEQ ID NO: 2013169 - DNA, 25 bp, Homo sapien
cttctctccctttatccttccttct

SEQ ID NO: 2013170 - DNA, 25 bp, Homo sapien
tctctccctttatccttccttctgc

SEQ ID NO: 2013171 - DNA, 25 bp, Homo sapien
gcaactgaccgttccaggccctgag

SEQ ID NO: 2013172 - DNA, 25 bp, Homo sapien
tgttataatgtgacggacagcgcca

SEQ ID NO: 2013173 - DNA, 25 bp, Homo sapien
agctgtagcaactgaccgttccagg

SEQ ID NO: 2013174 - DNA, 25 bp, Homo sapien
caggccctgagcagcactgttataa

SEQ ID NO: 2013175 - DNA, 25 bp, Homo sapien
gtaccaccagactctatgagcctcg

SEQ ID NO: 2013176 - DNA, 25 bp, Homo sapien
cggatgctcatacgggtagaagtgc

SEQ ID NO: 2013177 - DNA, 25 bp, Homo sapien
gagcctcgtatttcagtgtccccac

SEQ ID NO: 2013178 - DNA, 25 bp, Homo sapien
ctgtggacggatgctcatacgggta

SEQ ID NO: 2013179 - DNA, 25 bp, Homo sapien
acagagccacatcaggtaagttggg

SEQ ID NO: 2013180 - DNA, 25 bp, Homo sapien
tcacagagccacatcaggtaagttg

SEQ ID NO: 2013181 - DNA, 25 bp, Homo sapien
ccacatcaggtaagttggggctgag

SEQ ID NO: 2013182 - DNA, 25 bp, Homo sapien
acatcaggtaagttggggctgagtc

SEQ ID NO: 2013183 - DNA, 25 bp, Homo sapien
gcgcgtttcacatggggtacctgtt

SEQ ID NO: 2013184 - DNA, 25 bp, Homo sapien
ggccctggtttggactacagaagat

SEQ ID NO: 2013185 - DNA, 25 bp, Homo sapien
tttggactacagaagattcccaggg

SEQ ID NO: 2013186 - DNA, 25 bp, Homo sapien
gggcaaagggacagattcctgatga

SEQ ID NO: 2013187 - DNA, 25 bp, Homo sapien
ggcaagtcctacagcctgtgaaaac

SEQ ID NO: 2013188 - DNA, 25 bp, Homo sapien
ccagtgagggctgtccccagctaag

SEQ ID NO: 2013189 - DNA, 25 bp, Homo sapien
ctgtgctctgataaagtcaattcaa

SEQ ID NO: 2013190 - DNA, 25 bp, Homo sapien
ggaaccaggcaagtcctacagcctg

SEQ ID NO: 2013191 - DNA, 25 bp, Homo sapien
ttgccctcagagttgctgctaacag

SEQ ID NO: 2013192 - DNA, 25 bp, Homo sapien
tcttgccctcagagttgctgctaac

SEQ ID NO: 2013193 - DNA, 25 bp, Homo sapien
ttcttgccctcagagttgctgctaa

SEQ ID NO: 2013194 - DNA, 25 bp, Homo sapien
gccctcagagttgctgctaacagct

SEQ ID NO: 2013195 - DNA, 25 bp, Homo sapien
cactgagagtccatctcaggacggc

SEQ ID NO: 2013196 - DNA, 25 bp, Homo sapien
gagtccatctcaggacggccgtgaa

SEQ ID NO: 2013197 - DNA, 25 bp, Homo sapien
gaaaggacctcctagcactgagagt

SEQ ID NO: 2013198 - DNA, 25 bp, Homo sapien
caagaccactggttgtagaaaggac

SEQ ID NO: 2013199 - DNA, 25 bp, Homo sapien
gcacccaagcgtaccataccaaggg

SEQ ID NO: 2013200 - DNA, 25 bp, Homo sapien
gacgatcatctttgcctatctcttg

SEQ ID NO: 2013201 - DNA, 25 bp, Homo sapien
catcaatctgatgtgcactgtcact

SEQ ID NO: 2013202 - DNA, 25 bp, Homo sapien
caaaatttggtgtttgctgtaacaa

SEQ ID NO: 2013203 - DNA, 25 bp, Homo sapien
cattctgggaaaattcgttgaagtg

SEQ ID NO: 2013204 - DNA, 25 bp, Homo sapien
ctgggaaaattcgttgaagtgtagt

SEQ ID NO: 2013205 - DNA, 25 bp, Homo sapien
tctgggaaaattcgttgaagtgtag

SEQ ID NO: 2013206 - DNA, 25 bp, Homo sapien
tgggaaaattcgttgaagtgtagta

SEQ ID NO: 2013207 - DNA, 25 bp, Homo sapien
ccagaggctctgtcgtttttttctg

SEQ ID NO: 2013208 - DNA, 25 bp, Homo sapien
tccagaggctctgtcgtttttttct

SEQ ID NO: 2013209 - DNA, 25 bp, Homo sapien
tgaccagtccgctctcattgtttaa

SEQ ID NO: 2013210 - DNA, 25 bp, Homo sapien
cagtgtgtaatcagtcttgatcctg

SEQ ID NO: 2013211 - DNA, 25 bp, Homo sapien
ctgtctaatttggagagaagctgcc

SEQ ID NO: 2013212 - DNA, 25 bp, Homo sapien
gcctgttggcaatactcagtgtgta

SEQ ID NO: 2013213 - DNA, 25 bp, Homo sapien
tagtcaccattcgtgtgcaactcac

SEQ ID NO: 2013214 - DNA, 25 bp, Homo sapien
tttaaatagtatgctacatggtagc

SEQ ID NO: 2013215 - DNA, 25 bp, Homo sapien
tagctttagtcaccattcgtgtgca

SEQ ID NO: 2013216 - DNA, 25 bp, Homo sapien
tatgctacatggtagctttagtcac

SEQ ID NO: 2013217 - DNA, 25 bp, Homo sapien
tctaggtacgaagctgtttagccac

SEQ ID NO: 2013218 - DNA, 25 bp, Homo sapien
catggctccttctagtgattcaaaa

SEQ ID NO: 2013219 - DNA, 25 bp, Homo sapien
tattttggccaaaggaggccaccca

SEQ ID NO: 2013220 - DNA, 25 bp, Homo sapien
gtaaactgctcacattgaacactgg

SEQ ID NO: 2013221 - DNA, 25 bp, Homo sapien
aggcagtgatgctcgtagttaggag

SEQ ID NO: 2013222 - DNA, 25 bp, Homo sapien
tcaggcagtgatgctcgtagttagg

SEQ ID NO: 2013223 - DNA, 25 bp, Homo sapien
taggagtgagactctcctgagaagt

SEQ ID NO: 2013224 - DNA, 25 bp, Homo sapien
agtcaggcagtgatgctcgtagtta

SEQ ID NO: 2013225 - DNA, 25 bp, Homo sapien
acattcaacccagaagttaatctct

SEQ ID NO: 2013226 - DNA, 25 bp, Homo sapien
cagaagttaatctcttgtctggatt

SEQ ID NO: 2013227 - DNA, 25 bp, Homo sapien
aatcaacactttcaatcgtcgtgtg

SEQ ID NO: 2013228 - DNA, 25 bp, Homo sapien
aattgaatcacaccatctaagtatt

SEQ ID NO: 2013229 - DNA, 25 bp, Homo sapien
cagtctcagcattaatagcgtcctt

SEQ ID NO: 2013230 - DNA, 25 bp, Homo sapien
tccttgctgaagagttccttgattt

SEQ ID NO: 2013231 - DNA, 25 bp, Homo sapien
cagtaccagcacagtctcagcatta

SEQ ID NO: 2013232 - DNA, 25 bp, Homo sapien
agtaaacagcattcaccagtaccag

SEQ ID NO: 2013233 - DNA, 25 bp, Homo sapien
cgtgttttcatggtcaaagtatgtt

SEQ ID NO: 2013234 - DNA, 25 bp, Homo sapien
tgttttcatggtcaaagtatgtttc

SEQ ID NO: 2013235 - DNA, 25 bp, Homo sapien
gtgttttcatggtcaaagtatgttt

SEQ ID NO: 2013236 - DNA, 25 bp, Homo sapien
catttagacagaaaggtgcatccac

SEQ ID NO: 2013237 - DNA, 25 bp, Homo sapien
gcatttagacagaaaggtgcatcca

SEQ ID NO: 2013238 - DNA, 25 bp, Homo sapien
cgcatttagacagaaaggtgcatcc

SEQ ID NO: 2013239 - DNA, 25 bp, Homo sapien
tgaagccaattctgtagaggccttt

SEQ ID NO: 2013240 - DNA, 25 bp, Homo sapien
cagacccttcaggttatctttagag

SEQ ID NO: 2013241 - DNA, 25 bp, Homo sapien
gatggcagcagcacgaacatgctga

SEQ ID NO: 2013242 - DNA, 25 bp, Homo sapien
ggcctttttgcgtcatcatcttcac

SEQ ID NO: 2013243 - DNA, 25 bp, Homo sapien
agatcagccctcgtttcatcaaaga

SEQ ID NO: 2013244 - DNA, 25 bp, Homo sapien
tggaattgagatcatagctgtcttc

SEQ ID NO: 2013245 - DNA, 25 bp, Homo sapien
caaagatatccgtaatgcccatgtc

SEQ ID NO: 2013246 - DNA, 25 bp, Homo sapien
caaattgggacttggagagattcca

SEQ ID NO: 2013247 - DNA, 25 bp, Homo sapien
ctttccgagacaacagccccagtgg

SEQ ID NO: 2013248 - DNA, 25 bp, Homo sapien
tccgagacaacagccccagtggctg

SEQ ID NO: 2013249 - DNA, 25 bp, Homo sapien
cccagtggctgcagctgcctgggta

SEQ ID NO: 2013250 - DNA, 25 bp, Homo sapien
ccagtggctgcagctgcctgggtac

SEQ ID NO: 2013251 - DNA, 25 bp, Homo sapien
gtggttggcattaaactccacccaa

SEQ ID NO: 2013252 - DNA, 25 bp, Homo sapien
ttttgttgtgtctaatgaaaaagag

SEQ ID NO: 2013253 - DNA, 25 bp, Homo sapien
taaactccacccaagatcgtagtga

SEQ ID NO: 2013254 - DNA, 25 bp, Homo sapien
tggcattaaactccacccaagatcg

SEQ ID NO: 2013255 - DNA, 25 bp, Homo sapien
cagactcagatgaaaataagctaca

SEQ ID NO: 2013256 - DNA, 25 bp, Homo sapien
taagctacagggtgacagaaagatc

SEQ ID NO: 2013257 - DNA, 25 bp, Homo sapien
taagcacaagccgatggctggagga

SEQ ID NO: 2013258 - DNA, 25 bp, Homo sapien
agctccaaagtactagacactgctc

SEQ ID NO: 2013259 - DNA, 25 bp, Homo sapien
tcacaggacatcttccatgcagtag

SEQ ID NO: 2013260 - DNA, 25 bp, Homo sapien
taaaaggagctagccacaggtggga

SEQ ID NO: 2013261 - DNA, 25 bp, Homo sapien
tgcctgtgctgggtgcataaaagga

SEQ ID NO: 2013262 - DNA, 25 bp, Homo sapien
gccagcagcacttctcttgacacct

SEQ ID NO: 2013263 - DNA, 25 bp, Homo sapien
atacggaggccagccgtccacaatg

SEQ ID NO: 2013264 - DNA, 25 bp, Homo sapien
cagattaccacaccagagaacagag

SEQ ID NO: 2013265 - DNA, 25 bp, Homo sapien
ggtcaggccttcagtagactagagc

SEQ ID NO: 2013266 - DNA, 25 bp, Homo sapien
ccctgagtccgcgagtaggaacact

SEQ ID NO: 2013267 - DNA, 25 bp, Homo sapien
tagagcttgagatgagcccaatggc

SEQ ID NO: 2013268 - DNA, 25 bp, Homo sapien
cgtgtcagtggtcatggcagaacat

SEQ ID NO: 2013269 - DNA, 25 bp, Homo sapien
gacgtgtcagtggtcatggcagaac

SEQ ID NO: 2013270 - DNA, 25 bp, Homo sapien
gtcagtggtcatggcagaacattca

SEQ ID NO: 2013271 - DNA, 25 bp, Homo sapien
tgtgagttggacgtgtcagtggtca

SEQ ID NO: 2013272 - DNA, 25 bp, Homo sapien
cagccacaaggtgggccaaggaaac

SEQ ID NO: 2013273 - DNA, 25 bp, Homo sapien
gacagccacaaggtgggccaaggaa

SEQ ID NO: 2013274 - DNA, 25 bp, Homo sapien
gaaactgagccgcaagcaagacctg

SEQ ID NO: 2013275 - DNA, 25 bp, Homo sapien
tgagccgcaagcaagacctgaaacc

SEQ ID NO: 2013276 - DNA, 25 bp, Homo sapien
ggccacactgaacgactggtggcag

SEQ ID NO: 2013277 - DNA, 25 bp, Homo sapien
gccttctgcaaaaaaactgcgtggc

SEQ ID NO: 2013278 - DNA, 25 bp, Homo sapien
cgtggccacactgaacgactggtgg

SEQ ID NO: 2013279 - DNA, 25 bp, Homo sapien
tgcaaaaaaactgcgtggccacact

SEQ ID NO: 2013280 - DNA, 25 bp, Homo sapien
tctcagagcacaaagaaatcactgg

SEQ ID NO: 2013281 - DNA, 25 bp, Homo sapien
aggctagcatgggagcaggtgtggt

SEQ ID NO: 2013282 - DNA, 25 bp, Homo sapien
aagaggaggctagcatgggagcagg

SEQ ID NO: 2013283 - DNA, 25 bp, Homo sapien
aggaagaggaggctagcatgggagc

SEQ ID NO: 2013284 - DNA, 25 bp, Homo sapien
cctatatataggtcatggtttccag

SEQ ID NO: 2013285 - DNA, 25 bp, Homo sapien
aatctgagaaatcccgatgtaaatg

SEQ ID NO: 2013286 - DNA, 25 bp, Homo sapien
ttccagctacgtgtcgggcagtggt

SEQ ID NO: 2013287 - DNA, 25 bp, Homo sapien
gccaagtcagacatggaaacagccc

SEQ ID NO: 2013288 - DNA, 25 bp, Homo sapien
ctctgttgaggctgataccctttat

SEQ ID NO: 2013289 - DNA, 25 bp, Homo sapien
attattttctacagtcatgtggtag

SEQ ID NO: 2013290 - DNA, 25 bp, Homo sapien
cattagactgtctatgaatactgct

SEQ ID NO: 2013291 - DNA, 25 bp, Homo sapien
ggtagatctgggttgtaggtttctc

SEQ ID NO: 2013292 - DNA, 25 bp, Homo sapien
caacgaactaggaagcataagtcaa

SEQ ID NO: 2013293 - DNA, 25 bp, Homo sapien
gtggtggctgggcaacgaactagga

SEQ ID NO: 2013294 - DNA, 25 bp, Homo sapien
ggctgggcaacgaactaggaagcat

SEQ ID NO: 2013295 - DNA, 25 bp, Homo sapien
ctgggcaacgaactaggaagcataa

SEQ ID NO: 2013296 - DNA, 25 bp, Homo sapien
ttgtccaggcgacaccagtttgtcc

SEQ ID NO: 2013297 - DNA, 25 bp, Homo sapien
tcagttcttatttccccgcggagca

SEQ ID NO: 2013298 - DNA, 25 bp, Homo sapien
ttgctgggagacatccatcaatcta

SEQ ID NO: 2013299 - DNA, 25 bp, Homo sapien
tactggagtcttccgtcatccggtg

SEQ ID NO: 2013300 - DNA, 25 bp, Homo sapien
tttggtgaaaggtcgctgctgcctg

SEQ ID NO: 2013301 - DNA, 25 bp, Homo sapien
ttttggtgaaaggtcgctgctgcct

SEQ ID NO: 2013302 - DNA, 25 bp, Homo sapien
ggaggaccatgccaattgcagtcaa

SEQ ID NO: 2013303 - DNA, 25 bp, Homo sapien
aagtcgagtgctgacggcgccaagt

SEQ ID NO: 2013304 - DNA, 25 bp, Homo sapien
aagatcaaacccaagtcgagtgctg

SEQ ID NO: 2013305 - DNA, 25 bp, Homo sapien
gaccatgccaattgcagtcaagatg

SEQ ID NO: 2013306 - DNA, 25 bp, Homo sapien
tcagcctttattcttgagctcttcg

SEQ ID NO: 2013307 - DNA, 25 bp, Homo sapien
tattcttgagctcttcgtctctttt

SEQ ID NO: 2013308 - DNA, 25 bp, Homo sapien
gagctcttcgtctctttttcagagt

SEQ ID NO: 2013309 - DNA, 25 bp, Homo sapien
gcctttattcttgagctcttcgtct

SEQ ID NO: 2013310 - DNA, 25 bp, Homo sapien
ctcttttccttcagcctttattctt

SEQ ID NO: 2013311 - DNA, 25 bp, Homo sapien
tcttttccttcagcctttattctta

SEQ ID NO: 2013312 - DNA, 25 bp, Homo sapien
ccagttctatcatagcggtattgtc

SEQ ID NO: 2013313 - DNA, 25 bp, Homo sapien
taaggtctcttctcaatattaaggg

SEQ ID NO: 2013314 - DNA, 25 bp, Homo sapien
tattgtccattacacctaaggtctc

SEQ ID NO: 2013315 - DNA, 25 bp, Homo sapien
tgtctattagcctttaccagttcta

SEQ ID NO: 2013316 - DNA, 25 bp, Homo sapien
cataatcattagtgagtttgcttat

SEQ ID NO: 2013317 - DNA, 25 bp, Homo sapien
ggttatgttcagttcataatcatta

SEQ ID NO: 2013318 - DNA, 25 bp, Homo sapien
tgaaggaagaggtatgttttttctc

SEQ ID NO: 2013319 - DNA, 25 bp, Homo sapien
gcctgttggttatgttcagttcata

SEQ ID NO: 2013320 - DNA, 25 bp, Homo sapien
gactttcatcggctgcatttacaaa

SEQ ID NO: 2013321 - DNA, 25 bp, Homo sapien
aatcaacaggttccagagatgcatg

SEQ ID NO: 2013322 - DNA, 25 bp, Homo sapien
cttctttcgactttcatcggctgca

SEQ ID NO: 2013323 - DNA, 25 bp, Homo sapien
aaaatcaacaggttccagagatgca

SEQ ID NO: 2013324 - DNA, 25 bp, Homo sapien
catggctatgtgtaaacagttctcc

SEQ ID NO: 2013325 - DNA, 25 bp, Homo sapien
tgtggatgggaacgacaagtcttga

SEQ ID NO: 2013326 - DNA, 25 bp, Homo sapien
gagagctgtaggttgtcgttacccc

SEQ ID NO: 2013327 - DNA, 25 bp, Homo sapien
gatgaagactaggtggccccagctg

SEQ ID NO: 2013328 - DNA, 25 bp, Homo sapien
cagtttgcctcttatcagctgagga

SEQ ID NO: 2013329 - DNA, 25 bp, Homo sapien
tcccagtggataaattaaggttcat

SEQ ID NO: 2013330 - DNA, 25 bp, Homo sapien
tgcccatcgcctatttatcccagtg

SEQ ID NO: 2013331 - DNA, 25 bp, Homo sapien
tgagggccttgctgacaaagggttt

SEQ ID NO: 2013332 - DNA, 25 bp, Homo sapien
caaatgaagaaacagaaaaaggttg

SEQ ID NO: 2013333 - DNA, 25 bp, Homo sapien
tgcaaatgaagaaacagaaaaaggt

SEQ ID NO: 2013334 - DNA, 25 bp, Homo sapien
ctgcaaatgaagaaacagaaaaagg

SEQ ID NO: 2013335 - DNA, 25 bp, Homo sapien
caccagcttggtagagctactaata

SEQ ID NO: 2013336 - DNA, 25 bp, Homo sapien
ttcttaaactccctgtcccattgcc

SEQ ID NO: 2013337 - DNA, 25 bp, Homo sapien
accagcaccagcttggtagagctac

SEQ ID NO: 2013338 - DNA, 25 bp, Homo sapien
tggtagagctactaatagagccatc

SEQ ID NO: 2013339 - DNA, 25 bp, Homo sapien
ccatcgatgtcgttgggcagaagca

SEQ ID NO: 2013340 - DNA, 25 bp, Homo sapien
agaagcacaaacatgcttaggtcgt

SEQ ID NO: 2013341 - DNA, 25 bp, Homo sapien
tgcttaggtcgttgtttttatatgg

SEQ ID NO: 2013342 - DNA, 25 bp, Homo sapien
ctccaggccatcgatgtcgttgggc

SEQ ID NO: 2013343 - DNA, 25 bp, Homo sapien
gggtccatagataccaaccatttct

SEQ ID NO: 2013344 - DNA, 25 bp, Homo sapien
taatgctccccagtagacatccatc

SEQ ID NO: 2013345 - DNA, 25 bp, Homo sapien
aatggtgggtgatcgttaggactcc

SEQ ID NO: 2013346 - DNA, 25 bp, Homo sapien
ctgctggagagtgagaaacactttc

SEQ ID NO: 2013347 - DNA, 25 bp, Homo sapien
agccaggaccgcctctagatcgtaa

SEQ ID NO: 2013348 - DNA, 25 bp, Homo sapien
tcggtgccttcctcagttactgcca

SEQ ID NO: 2013349 - DNA, 25 bp, Homo sapien
ggagcctgacgacattcccgagtag

SEQ ID NO: 2013350 - DNA, 25 bp, Homo sapien
gatgtgacagtaaagcctatgccgg

SEQ ID NO: 2013351 - DNA, 25 bp, Homo sapien
tggtttgactcaccttacgcatggc

SEQ ID NO: 2013352 - DNA, 25 bp, Homo sapien
caccatgctaagtgcaagacgccag

SEQ ID NO: 2013353 - DNA, 25 bp, Homo sapien
aaactggattgtggcgatgcataac

SEQ ID NO: 2013354 - DNA, 25 bp, Homo sapien
cactttcgaggatggttataaacac

SEQ ID NO: 2013355 - DNA, 25 bp, Homo sapien
tgagatgccactttgtacctacaaa

SEQ ID NO: 2013356 - DNA, 25 bp, Homo sapien
atttctagcctaggaatctccccaa

SEQ ID NO: 2013357 - DNA, 25 bp, Homo sapien
gaggaaatgtccacgtatcatatat

SEQ ID NO: 2013358 - DNA, 25 bp, Homo sapien
tgagaagacaagacagacaacccaa

SEQ ID NO: 2013359 - DNA, 25 bp, Homo sapien
catccataacttctgggtgtagcca

SEQ ID NO: 2013360 - DNA, 25 bp, Homo sapien
gaaccccactgccagagttgagtct

SEQ ID NO: 2013361 - DNA, 25 bp, Homo sapien
catgtacacagtgaaatggttgctc

SEQ ID NO: 2013362 - DNA, 25 bp, Homo sapien
caatttgtctgatgtctgaacccca

SEQ ID NO: 2013363 - DNA, 25 bp, Homo sapien
ttcagggcaaacctccgtgcctcag

SEQ ID NO: 2013364 - DNA, 25 bp, Homo sapien
tctctgtggcaatatatgacatcag

SEQ ID NO: 2013365 - DNA, 25 bp, Homo sapien
tccttaagttcaaccttcagggcaa

SEQ ID NO: 2013366 - DNA, 25 bp, Homo sapien
ctgtctatcacatgctaggagaact

SEQ ID NO: 2013367 - DNA, 25 bp, Homo sapien
cattcactgctgtagaatactcagc

SEQ ID NO: 2013368 - DNA, 25 bp, Homo sapien
aatactcagctgtatgaaactagct

SEQ ID NO: 2013369 - DNA, 25 bp, Homo sapien
cctgttccttgcgattatgtctaga

SEQ ID NO: 2013370 - DNA, 25 bp, Homo sapien
ccattaacaagaatgctgcaattca

SEQ ID NO: 2013371 - DNA, 25 bp, Homo sapien
gttgctttccagtagtgaagttcac

SEQ ID NO: 2013372 - DNA, 25 bp, Homo sapien
tttccagtagtgaagttcacagagt

SEQ ID NO: 2013373 - DNA, 25 bp, Homo sapien
ccagtagtgaagttcacagagtggc

SEQ ID NO: 2013374 - DNA, 25 bp, Homo sapien
ctttgttgctttccagtagtgaagt

SEQ ID NO: 2013375 - DNA, 25 bp, Homo sapien
tcagccagtcgagatattttcccac

SEQ ID NO: 2013376 - DNA, 25 bp, Homo sapien
gatcagccagtcgagatattttccc

SEQ ID NO: 2013377 - DNA, 25 bp, Homo sapien
gtgtcacaggagaacatctccatct

SEQ ID NO: 2013378 - DNA, 25 bp, Homo sapien
ctagactacccgcttttgcagtgtc

SEQ ID NO: 2013379 - DNA, 25 bp, Homo sapien
ggaccatgcttagagcataaagcag

SEQ ID NO: 2013380 - DNA, 25 bp, Homo sapien
taaagcagactcagcgaagaaaaga

SEQ ID NO: 2013381 - DNA, 25 bp, Homo sapien
tctcctatgttgttactgttcagct

SEQ ID NO: 2013382 - DNA, 25 bp, Homo sapien
cacatcaaggcaaaattcaacgtta

SEQ ID NO: 2013383 - DNA, 25 bp, Homo sapien
ggttttaatgagtctacagtatgac

SEQ ID NO: 2013384 - DNA, 25 bp, Homo sapien
gaaccctggttttaatgagtctaca

SEQ ID NO: 2013385 - DNA, 25 bp, Homo sapien
cttaggtgagtccttgaaccctggt

SEQ ID NO: 2013386 - DNA, 25 bp, Homo sapien
gagtctacagtatgactaaaatgaa

SEQ ID NO: 2013387 - DNA, 25 bp, Homo sapien
tgagagaattagacaccaaactcgg

SEQ ID NO: 2013388 - DNA, 25 bp, Homo sapien
caccaaactcggaatgaattcttcc

SEQ ID NO: 2013389 - DNA, 25 bp, Homo sapien
gaattagacaccaaactcggaatga

SEQ ID NO: 2013390 - DNA, 25 bp, Homo sapien
tagacaccaaactcggaatgaattc

SEQ ID NO: 2013391 - DNA, 25 bp, Homo sapien
aatgccatcgtctttgtcccgtaga

SEQ ID NO: 2013392 - DNA, 25 bp, Homo sapien
tgaaatgccatcgtctttgtcccgt

SEQ ID NO: 2013393 - DNA, 25 bp, Homo sapien
catcgtctttgtcccgtagagcctg

SEQ ID NO: 2013394 - DNA, 25 bp, Homo sapien
tttgtcccgtagagcctgttggcaa

SEQ ID NO: 2013395 - DNA, 25 bp, Homo sapien
ttggggtatgaaattcagaggacgc

SEQ ID NO: 2013396 - DNA, 25 bp, Homo sapien
ggggtatgaaattcagaggacgcca

SEQ ID NO: 2013397 - DNA, 25 bp, Homo sapien
tcagaggacgccaagaaagttgttg

SEQ ID NO: 2013398 - DNA, 25 bp, Homo sapien
ttttggggtatgaaattcagaggac

SEQ ID NO: 2013399 - DNA, 25 bp, Homo sapien
ctggagcaacaatttatgaccaccc

SEQ ID NO: 2013400 - DNA, 25 bp, Homo sapien
ggagcaacaatttatgaccacccat

SEQ ID NO: 2013401 - DNA, 25 bp, Homo sapien
tggagcaacaatttatgaccaccca

SEQ ID NO: 2013402 - DNA, 25 bp, Homo sapien
tttactccggaggccctcctgtgta

SEQ ID NO: 2013403 - DNA, 25 bp, Homo sapien
ttactccggaggccctcctgtgtag

SEQ ID NO: 2013404 - DNA, 25 bp, Homo sapien
tactccggaggccctcctgtgtagc

SEQ ID NO: 2013405 - DNA, 25 bp, Homo sapien
gataccatttctcagaacagcttaa

SEQ ID NO: 2013406 - DNA, 25 bp, Homo sapien
tcaacccaagcattaatcgttttcc

SEQ ID NO: 2013407 - DNA, 25 bp, Homo sapien
tctgtagactgttcaaaatccacag

SEQ ID NO: 2013408 - DNA, 25 bp, Homo sapien
ccacagtttgcaacctggcttgata

SEQ ID NO: 2013409 - DNA, 25 bp, Homo sapien
agataattatatttggatttgaact

SEQ ID NO: 2013410 - DNA, 25 bp, Homo sapien
aagataattatatttggatttgaac

SEQ ID NO: 2013411 - DNA, 25 bp, Homo sapien
gataattatatttggatttgaactc

SEQ ID NO: 2013412 - DNA, 25 bp, Homo sapien
taagataattatatttggatttgaa

SEQ ID NO: 2013413 - DNA, 25 bp, Homo sapien
ctttccaaagagatttgcgactttt

SEQ ID NO: 2013414 - DNA, 25 bp, Homo sapien
tttccaaagagatttgcgacttttc

SEQ ID NO: 2013415 - DNA, 25 bp, Homo sapien
cattcaccaggaccattacagatga

SEQ ID NO: 2013416 - DNA, 25 bp, Homo sapien
gacttttaactgtctctcttacttg

SEQ ID NO: 2013417 - DNA, 25 bp, Homo sapien
tggcattcaccaggaccattacaga

SEQ ID NO: 2013418 - DNA, 25 bp, Homo sapien
ctcacttagctgaaaaggactttta

SEQ ID NO: 2013419 - DNA, 25 bp, Homo sapien
taatttgttgttaacgtagggcagc

SEQ ID NO: 2013420 - DNA, 25 bp, Homo sapien
gctatgcctactggaagcagaataa

SEQ ID NO: 2013421 - DNA, 25 bp, Homo sapien
tgcggctcctttacaaaggccagtt

SEQ ID NO: 2013422 - DNA, 25 bp, Homo sapien
tcaagaacttgcatctgcggctcct

SEQ ID NO: 2013423 - DNA, 25 bp, Homo sapien
gaaacgtccccgaattcagctgctt

SEQ ID NO: 2013424 - DNA, 25 bp, Homo sapien
catcatgttagaagagcttgtccac

SEQ ID NO: 2013425 - DNA, 25 bp, Homo sapien
tgaagagatctgtcacccctagaga

SEQ ID NO: 2013426 - DNA, 25 bp, Homo sapien
taggcccttggttggtgacattcca

SEQ ID NO: 2013427 - DNA, 25 bp, Homo sapien
ttagggagaggcaagcttgccacag

SEQ ID NO: 2013428 - DNA, 25 bp, Homo sapien
gagctctcattggtaggctttttac

SEQ ID NO: 2013429 - DNA, 25 bp, Homo sapien
cagaataggatcgtgttggtatgag

SEQ ID NO: 2013430 - DNA, 25 bp, Homo sapien
gggtggttcgccttgaactgagctc

SEQ ID NO: 2013431 - DNA, 25 bp, Homo sapien
gcagagatgtcaggtcacttattca

SEQ ID NO: 2013432 - DNA, 25 bp, Homo sapien
ctcatgaaatggttggaagaaatcc

SEQ ID NO: 2013433 - DNA, 25 bp, Homo sapien
ccgtgggaaagtcacaggattgtct

SEQ ID NO: 2013434 - DNA, 25 bp, Homo sapien
tgaacagctttttggccgtgggaaa

SEQ ID NO: 2013435 - DNA, 25 bp, Homo sapien
tgcaggcaaaatgtcaggtccagag

SEQ ID NO: 2013436 - DNA, 25 bp, Homo sapien
tatccttaggagtcagaaatagcag

SEQ ID NO: 2013437 - DNA, 25 bp, Homo sapien
tgagaccagcattatggtccccaga

SEQ ID NO: 2013438 - DNA, 25 bp, Homo sapien
ttaggcttgcagttaagatcagtgc

SEQ ID NO: 2013439 - DNA, 25 bp, Homo sapien
tatttgaagggatcggacctgaagc

SEQ ID NO: 2013440 - DNA, 25 bp, Homo sapien
ggcaattgcatttctcgactcaaga

SEQ ID NO: 2013441 - DNA, 25 bp, Homo sapien
tcatagaggtaccactctggcagtc

SEQ ID NO: 2013442 - DNA, 25 bp, Homo sapien
gacctgaagccccataatgctgtca

SEQ ID NO: 2013443 - DNA, 25 bp, Homo sapien
ctttggctcaactcccaagggagag

SEQ ID NO: 2013444 - DNA, 25 bp, Homo sapien
tacctcctaagacttctcactcctc

SEQ ID NO: 2013445 - DNA, 25 bp, Homo sapien
actgcagtctgcggccttcacagct

SEQ ID NO: 2013446 - DNA, 25 bp, Homo sapien
agcacacctataccaaggttcaggg

SEQ ID NO: 2013447 - DNA, 25 bp, Homo sapien
ttcagataggagctgaaacttggtg

SEQ ID NO: 2013448 - DNA, 25 bp, Homo sapien
cagcttcagataggagctgaaactt

SEQ ID NO: 2013449 - DNA, 25 bp, Homo sapien
gcttcagataggagctgaaacttgg

SEQ ID NO: 2013450 - DNA, 25 bp, Homo sapien
tcagataggagctgaaacttggtgt

SEQ ID NO: 2013451 - DNA, 25 bp, Homo sapien
cctgttagttattgcaactggcttc

SEQ ID NO: 2013452 - DNA, 25 bp, Homo sapien
tctttgtactgctttccatccttcc

SEQ ID NO: 2013453 - DNA, 25 bp, Homo sapien
catttgccctgttagttattgcaac

SEQ ID NO: 2013454 - DNA, 25 bp, Homo sapien
ccagagaaacatttgccctgttagt

SEQ ID NO: 2013455 - DNA, 25 bp, Homo sapien
ccccatgcacttaggaaggtgatga

SEQ ID NO: 2013456 - DNA, 25 bp, Homo sapien
gactgttgagccctaggtattttcc

SEQ ID NO: 2013457 - DNA, 25 bp, Homo sapien
gagagcttcgaagggagcctgtttt

SEQ ID NO: 2013458 - DNA, 25 bp, Homo sapien
tttaaaggctgtccaaaggtgcagc

SEQ ID NO: 2013459 - DNA, 25 bp, Homo sapien
atcttccttgagattcgttagtgaa

SEQ ID NO: 2013460 - DNA, 25 bp, Homo sapien
tgagattcgttagtgaacttacctc

SEQ ID NO: 2013461 - DNA, 25 bp, Homo sapien
tccttgagattcgttagtgaactta

SEQ ID NO: 2013462 - DNA, 25 bp, Homo sapien
gattcgttagtgaacttacctcttg

SEQ ID NO: 2013463 - DNA, 25 bp, Homo sapien
tcatagaggaagttggccgctggtt

SEQ ID NO: 2013464 - DNA, 25 bp, Homo sapien
cttactgtcttcatagaggaagttg

SEQ ID NO: 2013465 - DNA, 25 bp, Homo sapien
tcttcatagaggaagttggccgctg

SEQ ID NO: 2013466 - DNA, 25 bp, Homo sapien
tgtcttcatagaggaagttggccgc

SEQ ID NO: 2013467 - DNA, 25 bp, Homo sapien
tctcccatgacaccacttaaatcag

SEQ ID NO: 2013468 - DNA, 25 bp, Homo sapien
gctggcatccgattcccatgccatt

SEQ ID NO: 2013469 - DNA, 25 bp, Homo sapien
aaatttttcagctggcatccgattc

SEQ ID NO: 2013470 - DNA, 25 bp, Homo sapien
accacttaaatcagtcatagacaag

SEQ ID NO: 2013471 - DNA, 25 bp, Homo sapien
tcacaaggagggagagccatgcagt

SEQ ID NO: 2013472 - DNA, 25 bp, Homo sapien
cacataggcatctggggactggcat

SEQ ID NO: 2013473 - DNA, 25 bp, Homo sapien
tttgctccataagaagagcacacat

SEQ ID NO: 2013474 - DNA, 25 bp, Homo sapien
gactggcatgttgtgggtgaggaag

SEQ ID NO: 2013475 - DNA, 25 bp, Homo sapien
tccatttccttgattgtcatccatc

SEQ ID NO: 2013476 - DNA, 25 bp, Homo sapien
gaacaggttgaagcaaaactctgca

SEQ ID NO: 2013477 - DNA, 25 bp, Homo sapien
ggagtcatcttgagcgcccaagcgg

SEQ ID NO: 2013478 - DNA, 25 bp, Homo sapien
agggccagggcagcgaagaggctca

SEQ ID NO: 2013479 - DNA, 25 bp, Homo sapien
tgactattagaagagtttccatatc

SEQ ID NO: 2013480 - DNA, 25 bp, Homo sapien
gactattagaagagtttccatatcc

SEQ ID NO: 2013481 - DNA, 25 bp, Homo sapien
ctgactattagaagagtttccatat

SEQ ID NO: 2013482 - DNA, 25 bp, Homo sapien
gatcataatccttgtgggatgcatt

SEQ ID NO: 2013483 - DNA, 25 bp, Homo sapien
tttcagcaaaaagcccattcacaat

SEQ ID NO: 2013484 - DNA, 25 bp, Homo sapien
cattcacaatgctgagatcataatc

SEQ ID NO: 2013485 - DNA, 25 bp, Homo sapien
aactcttttcagttgagactggagc

SEQ ID NO: 2013486 - DNA, 25 bp, Homo sapien
gctccactttggcatcgtataattt

SEQ ID NO: 2013487 - DNA, 25 bp, Homo sapien
taaatgattcgtaaagtcaactcgc

SEQ ID NO: 2013488 - DNA, 25 bp, Homo sapien
cgtctagtgtcttctaaatgattcg

SEQ ID NO: 2013489 - DNA, 25 bp, Homo sapien
atttttcggcacactcaatgtagtc

SEQ ID NO: 2013490 - DNA, 25 bp, Homo sapien
ggctgattgccacttgcctttgaag

SEQ ID NO: 2013491 - DNA, 25 bp, Homo sapien
cagatgagcttatgccaccttcacc

SEQ ID NO: 2013492 - DNA, 25 bp, Homo sapien
gaaatggcaatttatggtttcgctc

SEQ ID NO: 2013493 - DNA, 25 bp, Homo sapien
tggtttcgctcttggtgaaggctga

SEQ ID NO: 2013494 - DNA, 25 bp, Homo sapien
ctcaggcagcagaacgtacatgttt

SEQ ID NO: 2013495 - DNA, 25 bp, Homo sapien
gaacttccgttcctgatgcatcatg

SEQ ID NO: 2013496 - DNA, 25 bp, Homo sapien
tgggtcctcaataacagacaaattg

SEQ ID NO: 2013497 - DNA, 25 bp, Homo sapien
tcaagaatcttcattgatgggtcct

SEQ ID NO: 2013498 - DNA, 25 bp, Homo sapien
ggtgaccaatatctcccagtgcagt

SEQ ID NO: 2013499 - DNA, 25 bp, Homo sapien
tgtaaagcaaggatcatagtagccc

SEQ ID NO: 2013500 - DNA, 25 bp, Homo sapien
gactcatgactaaaccggtcctctg

SEQ ID NO: 2013501 - DNA, 25 bp, Homo sapien
tatgagagaggcctgaattccgcca

SEQ ID NO: 2013502 - DNA, 25 bp, Homo sapien
gaggtcattcgccttggattggtcc

SEQ ID NO: 2013503 - DNA, 25 bp, Homo sapien
gaatgggtggtcagctctaaacagc

SEQ ID NO: 2013504 - DNA, 25 bp, Homo sapien
caaagatatctttcagccctagggc

SEQ ID NO: 2013505 - DNA, 25 bp, Homo sapien
tctaaacagcgtggactgagggagt

SEQ ID NO: 2013506 - DNA, 25 bp, Homo sapien
gagcagggatcaggacaatcaacca

SEQ ID NO: 2013507 - DNA, 25 bp, Homo sapien
cacatggtggtagaatgctaagagc

SEQ ID NO: 2013508 - DNA, 25 bp, Homo sapien
ccataatttccagacgggtcatggg

SEQ ID NO: 2013509 - DNA, 25 bp, Homo sapien
gatccctagggctacttctacgttc

SEQ ID NO: 2013510 - DNA, 25 bp, Homo sapien
tataaactacacagcatatgagata

SEQ ID NO: 2013511 - DNA, 25 bp, Homo sapien
gagatatgattctgtagataacaac

SEQ ID NO: 2013512 - DNA, 25 bp, Homo sapien
ctacacagcatatgagatatgattc

SEQ ID NO: 2013513 - DNA, 25 bp, Homo sapien
cagcatatgagatatgattctgtag

SEQ ID NO: 2013514 - DNA, 25 bp, Homo sapien
tgggcttaatgccttctcaagtggt

SEQ ID NO: 2013515 - DNA, 25 bp, Homo sapien
tggttgctcacagccacaatagggt

SEQ ID NO: 2013516 - DNA, 25 bp, Homo sapien
cacaatagggttttggaactctgag

SEQ ID NO: 2013517 - DNA, 25 bp, Homo sapien
tctcaagtggttgctcacagccaca

SEQ ID NO: 2013518 - DNA, 25 bp, Homo sapien
caggagagtcaagggacaaaagaag

SEQ ID NO: 2013519 - DNA, 25 bp, Homo sapien
gcatttgctgcactgaaagagcctc

SEQ ID NO: 2013520 - DNA, 25 bp, Homo sapien
tgattgtcctctagacatgactgaa

SEQ ID NO: 2013521 - DNA, 25 bp, Homo sapien
agagattctcagttgcgtggccata

SEQ ID NO: 2013522 - DNA, 25 bp, Homo sapien
gactgaagatggactgctgtaatag

SEQ ID NO: 2013523 - DNA, 25 bp, Homo sapien
tcctcattggaagaacttgaagttc

SEQ ID NO: 2013524 - DNA, 25 bp, Homo sapien
cctcattggaagaacttgaagttct

SEQ ID NO: 2013525 - DNA, 25 bp, Homo sapien
tggactgaagatggactgctgtaat

SEQ ID NO: 2013526 - DNA, 25 bp, Homo sapien
gagctgcttctgcaaaaattccact

SEQ ID NO: 2013527 - DNA, 25 bp, Homo sapien
gcttctgcaaaaattccacttgcca

SEQ ID NO: 2013528 - DNA, 25 bp, Homo sapien
gctgcttctgcaaaaattccacttg

SEQ ID NO: 2013529 - DNA, 25 bp, Homo sapien
caagagaagtggatgagctgcttct

SEQ ID NO: 2013530 - DNA, 25 bp, Homo sapien
tgtaactacagctgcggaggctcag

SEQ ID NO: 2013531 - DNA, 25 bp, Homo sapien
ttactttaacctcaagctttctgca

SEQ ID NO: 2013532 - DNA, 25 bp, Homo sapien
tctgcatgtgtcattctcaagcaca

SEQ ID NO: 2013533 - DNA, 25 bp, Homo sapien
ttggcaacaggtccgaaggagatgc

SEQ ID NO: 2013534 - DNA, 25 bp, Homo sapien
tcagttggttggcaacaggtccgaa

SEQ ID NO: 2013535 - DNA, 25 bp, Homo sapien
tacgtaacatgtcaaaaatgcatgt

SEQ ID NO: 2013536 - DNA, 25 bp, Homo sapien
tccgaaggagatgccaatacgtaac

SEQ ID NO: 2013537 - DNA, 25 bp, Homo sapien
tctgccagaacagagttgcacccag

SEQ ID NO: 2013538 - DNA, 25 bp, Homo sapien
ggcgttaccccagcaataacagctg

SEQ ID NO: 2013539 - DNA, 25 bp, Homo sapien
aggtgcgatgaagtctcccggtgcc

SEQ ID NO: 2013540 - DNA, 25 bp, Homo sapien
tgattcagcatacatctgccagaac

SEQ ID NO: 2013541 - DNA, 25 bp, Homo sapien
aggaaggggcctccatcatgctcca

SEQ ID NO: 2013542 - DNA, 25 bp, Homo sapien
atgctccaatgctgcatctggagtc

SEQ ID NO: 2013543 - DNA, 25 bp, Homo sapien
catctggagtcgttctgatggattg

SEQ ID NO: 2013544 - DNA, 25 bp, Homo sapien
agtcgttctgatggattgacgccca

SEQ ID NO: 2013545 - DNA, 25 bp, Homo sapien
tcaagaactacatccctggacttcg

SEQ ID NO: 2013546 - DNA, 25 bp, Homo sapien
gacttcgggatgtcggcttctttgt

SEQ ID NO: 2013547 - DNA, 25 bp, Homo sapien
agaactacatccctggacttcggga

SEQ ID NO: 2013548 - DNA, 25 bp, Homo sapien
catccctggacttcgggatgtcggc

SEQ ID NO: 2013549 - DNA, 25 bp, Homo sapien
tgaacaaaagaagaccgcaaagtct

SEQ ID NO: 2013550 - DNA, 25 bp, Homo sapien
gggacctgcaaacctggaacaattg

SEQ ID NO: 2013551 - DNA, 25 bp, Homo sapien
cacctccaaaagatatcggttccaa

SEQ ID NO: 2013552 - DNA, 25 bp, Homo sapien
aagatatcggttccaagtgaacaaa

SEQ ID NO: 2013553 - DNA, 25 bp, Homo sapien
accctcagtgaacttctacgtagaa

SEQ ID NO: 2013554 - DNA, 25 bp, Homo sapien
tacaaccctcagtgaacttctacgt

SEQ ID NO: 2013555 - DNA, 25 bp, Homo sapien
tctgactcttacaaccctcagtgaa

SEQ ID NO: 2013556 - DNA, 25 bp, Homo sapien
tcttacaaccctcagtgaacttcta

SEQ ID NO: 2013557 - DNA, 25 bp, Homo sapien
cacctgtgaggtttgattcacaccc

SEQ ID NO: 2013558 - DNA, 25 bp, Homo sapien
actcacctgtgaggtttgattcaca

SEQ ID NO: 2013559 - DNA, 25 bp, Homo sapien
tcacaccccataacttccatggagt

SEQ ID NO: 2013560 - DNA, 25 bp, Homo sapien
gaggtttgattcacaccccataact

SEQ ID NO: 2013561 - DNA, 25 bp, Homo sapien
gttgctgtctgacgggcaatgctcc

SEQ ID NO: 2013562 - DNA, 25 bp, Homo sapien
gacgggcaatgctcctctgagagtt

SEQ ID NO: 2013563 - DNA, 25 bp, Homo sapien
tgagttgctgtctgacgggcaatgc

SEQ ID NO: 2013564 - DNA, 25 bp, Homo sapien
ctgtctgacgggcaatgctcctctg

SEQ ID NO: 2013565 - DNA, 25 bp, Homo sapien
ttcaatctattaataccagcatgag

SEQ ID NO: 2013566 - DNA, 25 bp, Homo sapien
cctatttcccatagacatggcatgg

SEQ ID NO: 2013567 - DNA, 25 bp, Homo sapien
catagacatggcatggaaatcattg

SEQ ID NO: 2013568 - DNA, 25 bp, Homo sapien
ctattaataccagcatgagggaaga

SEQ ID NO: 2013569 - DNA, 25 bp, Homo sapien
aaacagtagctagtagagaacatat

SEQ ID NO: 2013570 - DNA, 25 bp, Homo sapien
tattgttgtactagattgacccagc

SEQ ID NO: 2013571 - DNA, 25 bp, Homo sapien
gtcaaccctgcaactactttggctg

SEQ ID NO: 2013572 - DNA, 25 bp, Homo sapien
taatgtatctagttgtttccatcaa

SEQ ID NO: 2013573 - DNA, 25 bp, Homo sapien
aatgttccacatcgcttcactcggt

SEQ ID NO: 2013574 - DNA, 25 bp, Homo sapien
tatagattatatcctgatgctcaga

SEQ ID NO: 2013575 - DNA, 25 bp, Homo sapien
cactcggtggtgcatagcttcacta

SEQ ID NO: 2013576 - DNA, 25 bp, Homo sapien
cactatgaagtgtaagagcttaagc

SEQ ID NO: 2013577 - DNA, 25 bp, Homo sapien
gggcttgcttttgccagatgcttga

SEQ ID NO: 2013578 - DNA, 25 bp, Homo sapien
tgagggcaaagagtgtgtttgccac

SEQ ID NO: 2013579 - DNA, 25 bp, Homo sapien
tgtgtttgccacacaaagatcctcc

SEQ ID NO: 2013580 - DNA, 25 bp, Homo sapien
ggccatggtggacgagatgctccat

SEQ ID NO: 2013581 - DNA, 25 bp, Homo sapien
tgggtcaccatgtgcatggaaagaa

SEQ ID NO: 2013582 - DNA, 25 bp, Homo sapien
accagccggcggcatcttggtgtga

SEQ ID NO: 2013583 - DNA, 25 bp, Homo sapien
aactggaaaccagccggcggcatct

SEQ ID NO: 2013584 - DNA, 25 bp, Homo sapien
cactcaggtacattctcgtgggaaa

SEQ ID NO: 2013585 - DNA, 25 bp, Homo sapien
gcaatattggccaatgctctctctg

SEQ ID NO: 2013586 - DNA, 25 bp, Homo sapien
agcaatattggccaatgctctctct

SEQ ID NO: 2013587 - DNA, 25 bp, Homo sapien
atattggccaatgctctctctgtga

SEQ ID NO: 2013588 - DNA, 25 bp, Homo sapien
aatattggccaatgctctctctgtg

SEQ ID NO: 2013589 - DNA, 25 bp, Homo sapien
attggctcccacttcattaaactga

SEQ ID NO: 2013590 - DNA, 25 bp, Homo sapien
tgggggtaactgcattggctcccac

SEQ ID NO: 2013591 - DNA, 25 bp, Homo sapien
taactacccttctggatctgctgca

SEQ ID NO: 2013592 - DNA, 25 bp, Homo sapien
tgcaaaatcgcatcaggataactac

SEQ ID NO: 2013593 - DNA, 25 bp, Homo sapien
cctgtggatgcattgattgcagagc

SEQ ID NO: 2013594 - DNA, 25 bp, Homo sapien
cagtaaataattccctgtggatgca

SEQ ID NO: 2013595 - DNA, 25 bp, Homo sapien
cggaagctcgcagacttctcaccaa

SEQ ID NO: 2013596 - DNA, 25 bp, Homo sapien
ccaaacagcttattgacactttcca

SEQ ID NO: 2013597 - DNA, 25 bp, Homo sapien
gagtgcagacccctttgtccacgct

SEQ ID NO: 2013598 - DNA, 25 bp, Homo sapien
gaagggcagctgttacgcaaggcca

SEQ ID NO: 2013599 - DNA, 25 bp, Homo sapien
tgactctgagattgggacatttgca

SEQ ID NO: 2013600 - DNA, 25 bp, Homo sapien
tacttgtttgggatccagccatttc

SEQ ID NO: 2013601 - DNA, 25 bp, Homo sapien
tatttctgacagagtcgaatatatt

SEQ ID NO: 2013602 - DNA, 25 bp, Homo sapien
tctgaggagtaatatttctgacaga

SEQ ID NO: 2013603 - DNA, 25 bp, Homo sapien
gttctgaggagtaatatttctgaca

SEQ ID NO: 2013604 - DNA, 25 bp, Homo sapien
atttctgacagagtcgaatatattc

SEQ ID NO: 2013605 - DNA, 25 bp, Homo sapien
ccaggaattaatcttttttctagct

SEQ ID NO: 2013606 - DNA, 25 bp, Homo sapien
gtttgagtcttgacccaggaattaa

SEQ ID NO: 2013607 - DNA, 25 bp, Homo sapien
ttggtttgagtcttgacccaggaat

SEQ ID NO: 2013608 - DNA, 25 bp, Homo sapien
caggaattaatcttttttctagctt

SEQ ID NO: 2013609 - DNA, 25 bp, Homo sapien
gctcacaccatttactaagctcagg

SEQ ID NO: 2013610 - DNA, 25 bp, Homo sapien
aatcaaggagggatgaagcagagac

SEQ ID NO: 2013611 - DNA, 25 bp, Homo sapien
tccacagtgggcatagactcacaat

SEQ ID NO: 2013612 - DNA, 25 bp, Homo sapien
taaaacaccactgagctaatcagga

SEQ ID NO: 2013613 - DNA, 25 bp, Homo sapien
cacggaaaggataaagcccatttag

SEQ ID NO: 2013614 - DNA, 25 bp, Homo sapien
tctacagaaccttcaggtaacaagt

SEQ ID NO: 2013615 - DNA, 25 bp, Homo sapien
gtttcttctcaaatggagttttcca

SEQ ID NO: 2013616 - DNA, 25 bp, Homo sapien
caggaccatcctggtatccccatct

SEQ ID NO: 2013617 - DNA, 25 bp, Homo sapien
ccagcatatgggagttctagaatct

SEQ ID NO: 2013618 - DNA, 25 bp, Homo sapien
tccaagccagtggacacatcggcaa

SEQ ID NO: 2013619 - DNA, 25 bp, Homo sapien
tccaatgtttagcttttcacgcaag

SEQ ID NO: 2013620 - DNA, 25 bp, Homo sapien
tcatctggaagcaacaagaacatgc

SEQ ID NO: 2013621 - DNA, 25 bp, Homo sapien
catggcttggtggaacacttcagaa

SEQ ID NO: 2013622 - DNA, 25 bp, Homo sapien
attggcccgtcccttgttgaaggcg

SEQ ID NO: 2013623 - DNA, 25 bp, Homo sapien
gctggtccacttgttgagtttgtca

SEQ ID NO: 2013624 - DNA, 25 bp, Homo sapien
cgacatccctgagaaattggcccgt

SEQ ID NO: 2013625 - DNA, 25 bp, Homo sapien
ctgtgccagcggctgcttcagtgcc

SEQ ID NO: 2013626 - DNA, 25 bp, Homo sapien
ctcctgtgccagcggctgcttcagt

SEQ ID NO: 2013627 - DNA, 25 bp, Homo sapien
gtgccagcggctgcttcagtgccct

SEQ ID NO: 2013628 - DNA, 25 bp, Homo sapien
tcctgtgccagcggctgcttcagtg

SEQ ID NO: 2013629 - DNA, 25 bp, Homo sapien
tagggtgaggaaaatctgccgaaaa

SEQ ID NO: 2013630 - DNA, 25 bp, Homo sapien
aaaggatgatctgccacaaactgtg

SEQ ID NO: 2013631 - DNA, 25 bp, Homo sapien
gaaaaggatgatctgccacaaactg

SEQ ID NO: 2013632 - DNA, 25 bp, Homo sapien
gaaaatctgccgaaaaataaaatgc

SEQ ID NO: 2013633 - DNA, 25 bp, Homo sapien
gaagggcatggagggatacctactt

SEQ ID NO: 2013634 - DNA, 25 bp, Homo sapien
gataggaaattaacagatcatctgc

SEQ ID NO: 2013635 - DNA, 25 bp, Homo sapien
ggaaaatctaaatgggcatgatccc

SEQ ID NO: 2013636 - DNA, 25 bp, Homo sapien
ggcacacagctcatctacaaaaatc

SEQ ID NO: 2013637 - DNA, 25 bp, Homo sapien
atgatctgcagacctaatgaaatga

SEQ ID NO: 2013638 - DNA, 25 bp, Homo sapien
cctggattctgacaaattgtaactc

SEQ ID NO: 2013639 - DNA, 25 bp, Homo sapien
tgtacacatgagagacctggattct

SEQ ID NO: 2013640 - DNA, 25 bp, Homo sapien
ctctgtacacatgagagacctggat

SEQ ID NO: 2013641 - DNA, 25 bp, Homo sapien
cacatgagagacctggattctgaca

SEQ ID NO: 2013642 - DNA, 25 bp, Homo sapien
ctgtagtaagagattgtggctgaag

SEQ ID NO: 2013643 - DNA, 25 bp, Homo sapien
agtaagagattgtggctgaagagtt

SEQ ID NO: 2013644 - DNA, 25 bp, Homo sapien
agattgtggctgaagagttgagaaa

SEQ ID NO: 2013645 - DNA, 25 bp, Homo sapien
gattgtggctgaagagttgagaaac

SEQ ID NO: 2013646 - DNA, 25 bp, Homo sapien
ctcccactggagcagaattggcaat

SEQ ID NO: 2013647 - DNA, 25 bp, Homo sapien
tgttttctcccactggagcagaatt

SEQ ID NO: 2013648 - DNA, 25 bp, Homo sapien
ctggagcagaattggcaatttgctc

SEQ ID NO: 2013649 - DNA, 25 bp, Homo sapien
cccactggagcagaattggcaattt

SEQ ID NO: 2013650 - DNA, 25 bp, Homo sapien
ggaaaacgtcaggaattctctatac

SEQ ID NO: 2013651 - DNA, 25 bp, Homo sapien
cgtcaggaattctctatactcaaat

SEQ ID NO: 2013652 - DNA, 25 bp, Homo sapien
tctctatactcaaataacttaatca

SEQ ID NO: 2013653 - DNA, 25 bp, Homo sapien
gagctttggaaaacgtcaggaattc

SEQ ID NO: 2013654 - DNA, 25 bp, Homo sapien
tgcagtggtacctttggcgcccaaa

SEQ ID NO: 2013655 - DNA, 25 bp, Homo sapien
ggcgcccaaatacactatggtcaag

SEQ ID NO: 2013656 - DNA, 25 bp, Homo sapien
tttaccctgagcagattcagctagc

SEQ ID NO: 2013657 - DNA, 25 bp, Homo sapien
tatggtcaaggaagttgagatgctc

SEQ ID NO: 2013658 - DNA, 25 bp, Homo sapien
tcacatttgactccctggtctctgt

SEQ ID NO: 2013659 - DNA, 25 bp, Homo sapien
agggtcacatttgactccctggtct

SEQ ID NO: 2013660 - DNA, 25 bp, Homo sapien
ggtcacatttgactccctggtctct

SEQ ID NO: 2013661 - DNA, 25 bp, Homo sapien
ttcagggtcacatttgactccctgg

SEQ ID NO: 2013662 - DNA, 25 bp, Homo sapien
ttctctccatatatcgcattggctg

SEQ ID NO: 2013663 - DNA, 25 bp, Homo sapien
catatatcgcattggctgttttaag

SEQ ID NO: 2013664 - DNA, 25 bp, Homo sapien
tatttcttccgagttgctcaagttg

SEQ ID NO: 2013665 - DNA, 25 bp, Homo sapien
catcgttgggcttgaggatttctga

SEQ ID NO: 2013666 - DNA, 25 bp, Homo sapien
gtcctttctgatttgatcagaagct

SEQ ID NO: 2013667 - DNA, 25 bp, Homo sapien
cctcggtctgtctttcaacccaaga

SEQ ID NO: 2013668 - DNA, 25 bp, Homo sapien
tcggtctgtctttcaacccaagagt

SEQ ID NO: 2013669 - DNA, 25 bp, Homo sapien
ttctgatttgatcagaagcttccac

SEQ ID NO: 2013670 - DNA, 25 bp, Homo sapien
tgcactaagaattgatgttcccaga

SEQ ID NO: 2013671 - DNA, 25 bp, Homo sapien
gtggaatccacagagtcatcaggca

SEQ ID NO: 2013672 - DNA, 25 bp, Homo sapien
tatagggcgttcaccagaatcatcc

SEQ ID NO: 2013673 - DNA, 25 bp, Homo sapien
gaatcatcctggttgtggaatccac

SEQ ID NO: 2013674 - DNA, 25 bp, Homo sapien
ttttgtagtagagttgaaggcccac

SEQ ID NO: 2013675 - DNA, 25 bp, Homo sapien
tgaggtcacggcttttgtagtagag

SEQ ID NO: 2013676 - DNA, 25 bp, Homo sapien
gtagtataagcaggctgaggtcacg

SEQ ID NO: 2013677 - DNA, 25 bp, Homo sapien
gtcttctggcagtagtataagcagg

SEQ ID NO: 2013678 - DNA, 25 bp, Homo sapien
gaaaaacagtagtagagagagcacc

SEQ ID NO: 2013679 - DNA, 25 bp, Homo sapien
tgcccatttggaaccaagaaagaaa

SEQ ID NO: 2013680 - DNA, 25 bp, Homo sapien
aagtggaatgaaaaacagtagtaga

SEQ ID NO: 2013681 - DNA, 25 bp, Homo sapien
ctgcccatttggaaccaagaaagaa

SEQ ID NO: 2013682 - DNA, 25 bp, Homo sapien
tgtctgcactggtccactcattcag

SEQ ID NO: 2013683 - DNA, 25 bp, Homo sapien
gaacttgggaaggtgtagctgcact

SEQ ID NO: 2013684 - DNA, 25 bp, Homo sapien
tgaagacattcctgagaaatcagct

SEQ ID NO: 2013685 - DNA, 25 bp, Homo sapien
gcttctcataggtgatggccttttc

SEQ ID NO: 2013686 - DNA, 25 bp, Homo sapien
tcaatggatgggactctaattcgta

SEQ ID NO: 2013687 - DNA, 25 bp, Homo sapien
tagggggagcataatcttccataaa

SEQ ID NO: 2013688 - DNA, 25 bp, Homo sapien
aagaatggtgttggttttattgtgc

SEQ ID NO: 2013689 - DNA, 25 bp, Homo sapien
gggtgatttgcattgaattcaatgg

SEQ ID NO: 2013690 - DNA, 25 bp, Homo sapien
ctgtaagatggtcttgtttgttgag

SEQ ID NO: 2013691 - DNA, 25 bp, Homo sapien
cactgtaagatggtcttgtttgttg

SEQ ID NO: 2013692 - DNA, 25 bp, Homo sapien
taagatggtcttgtttgttgagaga

SEQ ID NO: 2013693 - DNA, 25 bp, Homo sapien
cacactgtaagatggtcttgtttgt

SEQ ID NO: 2013694 - DNA, 25 bp, Homo sapien
gataacatcttacatgaccacggta

SEQ ID NO: 2013695 - DNA, 25 bp, Homo sapien
tacagctaattctcatatactccag

SEQ ID NO: 2013696 - DNA, 25 bp, Homo sapien
ttttagattggcagaagaggtgcag

SEQ ID NO: 2013697 - DNA, 25 bp, Homo sapien
aaaactagggcaccaacattgagag

SEQ ID NO: 2013698 - DNA, 25 bp, Homo sapien
agcagccgaggatgggcgcccagga

SEQ ID NO: 2013699 - DNA, 25 bp, Homo sapien
cgccctggaccagtgttagaggcga

SEQ ID NO: 2013700 - DNA, 25 bp, Homo sapien
ccttctgtgcggacccggaaggaag

SEQ ID NO: 2013701 - DNA, 25 bp, Homo sapien
acgcgctcaggccttctgtgcggac

SEQ ID NO: 2013702 - DNA, 25 bp, Homo sapien
catagcgccccgtttatttccgtca

SEQ ID NO: 2013703 - DNA, 25 bp, Homo sapien
taaggagaccatctattagttcccg

SEQ ID NO: 2013704 - DNA, 25 bp, Homo sapien
ggacacctcatacaccctaaggaga

SEQ ID NO: 2013705 - DNA, 25 bp, Homo sapien
gagagaagggtcaagggacacctca

SEQ ID NO: 2013706 - DNA, 25 bp, Homo sapien
cagacggagaaatacagggctcgga

SEQ ID NO: 2013707 - DNA, 25 bp, Homo sapien
gagtcagacggagaaatacagggct

SEQ ID NO: 2013708 - DNA, 25 bp, Homo sapien
cggagaaatacagggctcggagtcc

SEQ ID NO: 2013709 - DNA, 25 bp, Homo sapien
gtcagacggagaaatacagggctcg

SEQ ID NO: 2013710 - DNA, 25 bp, Homo sapien
tctaggaggaactgaaagctgcaga

SEQ ID NO: 2013711 - DNA, 25 bp, Homo sapien
atgtcgggaaaagagcagaggctcc

SEQ ID NO: 2013712 - DNA, 25 bp, Homo sapien
tgcaggtaccgatgaccaggaagct

SEQ ID NO: 2013713 - DNA, 25 bp, Homo sapien
cagatgctgaaatccggagatgtcg

SEQ ID NO: 2013714 - DNA, 25 bp, Homo sapien
tcatgctgcttcaatccgctctttc

SEQ ID NO: 2013715 - DNA, 25 bp, Homo sapien
tctcttcactaaatgatcaacagct

SEQ ID NO: 2013716 - DNA, 25 bp, Homo sapien
ctgggtgcatcccttcccagttctc

SEQ ID NO: 2013717 - DNA, 25 bp, Homo sapien
ttcactaaatgatcaacagctctgc

SEQ ID NO: 2013718 - DNA, 25 bp, Homo sapien
ccagttctccgcgcagctgcccagg

SEQ ID NO: 2013719 - DNA, 25 bp, Homo sapien
cccagttctccgcgcagctgcccag

SEQ ID NO: 2013720 - DNA, 25 bp, Homo sapien
cagttctccgcgcagctgcccagga

SEQ ID NO: 2013721 - DNA, 25 bp, Homo sapien
ttgcttctgatagagcatccatgac

SEQ ID NO: 2013722 - DNA, 25 bp, Homo sapien
ttctgatagagcatccatgacggtg

SEQ ID NO: 2013723 - DNA, 25 bp, Homo sapien
ctgatagagcatccatgacggtgag

SEQ ID NO: 2013724 - DNA, 25 bp, Homo sapien
gccatttgcttctgatagagcatcc

SEQ ID NO: 2013725 - DNA, 25 bp, Homo sapien
gaaaaccatggccaaggctgatgat

SEQ ID NO: 2013726 - DNA, 25 bp, Homo sapien
tggccaaggctgatgatatgctcat

SEQ ID NO: 2013727 - DNA, 25 bp, Homo sapien
gagctgcagtgtttccctttgcccc

SEQ ID NO: 2013728 - DNA, 25 bp, Homo sapien
ccccatgaaaaccatggccaaggct

SEQ ID NO: 2013729 - DNA, 25 bp, Homo sapien
gagcccgttggcagttctaagcaca

SEQ ID NO: 2013730 - DNA, 25 bp, Homo sapien
gttaattgcaacaagaagtgactga

SEQ ID NO: 2013731 - DNA, 25 bp, Homo sapien
gcacatattcagtgtcagttctgtt

SEQ ID NO: 2013732 - DNA, 25 bp, Homo sapien
tgaaaacctcgatgaatatctccat

SEQ ID NO: 2013733 - DNA, 25 bp, Homo sapien
taatctgaaggcaaactgatgaatc

SEQ ID NO: 2013734 - DNA, 25 bp, Homo sapien
tgctattggtatgggattcttgaaa

SEQ ID NO: 2013735 - DNA, 25 bp, Homo sapien
cacatattgatgacttcttgcacgc

SEQ ID NO: 2013736 - DNA, 25 bp, Homo sapien
aagttactatttgacaaagtgtggc

SEQ ID NO: 2013737 - DNA, 25 bp, Homo sapien
tgtaaatctgcaatgtccagagcgg

SEQ ID NO: 2013738 - DNA, 25 bp, Homo sapien
tatacaatcctagaccagcagtgtc

SEQ ID NO: 2013739 - DNA, 25 bp, Homo sapien
cagtgtccatcggaactttctggga

SEQ ID NO: 2013740 - DNA, 25 bp, Homo sapien
ccagagcggtgccacataggctatt

SEQ ID NO: 2013741 - DNA, 25 bp, Homo sapien
agtttacacgtgttgtggacttctc

SEQ ID NO: 2013742 - DNA, 25 bp, Homo sapien
caaagtctagctgttttatcgttgc

SEQ ID NO: 2013743 - DNA, 25 bp, Homo sapien
aatttgccacaggaatctgtaaaac

SEQ ID NO: 2013744 - DNA, 25 bp, Homo sapien
tttagttttatcagcaacccaggag

SEQ ID NO: 2013745 - DNA, 25 bp, Homo sapien
tatcgaaatagaataacaatatatt

SEQ ID NO: 2013746 - DNA, 25 bp, Homo sapien
ctgtttaaaatattatcgaaataga

SEQ ID NO: 2013747 - DNA, 25 bp, Homo sapien
taaaatattatcgaaatagaataac

SEQ ID NO: 2013748 - DNA, 25 bp, Homo sapien
tattatcgaaatagaataacaatat

SEQ ID NO: 2013749 - DNA, 25 bp, Homo sapien
tccacaaggcagtgcaaagaggtgt

SEQ ID NO: 2013750 - DNA, 25 bp, Homo sapien
gaagaagagggtgccaccctgttgc

SEQ ID NO: 2013751 - DNA, 25 bp, Homo sapien
tccacttgactggactatccacaag

SEQ ID NO: 2013752 - DNA, 25 bp, Homo sapien
ctgttgctcctggctgtaacactca

SEQ ID NO: 2013753 - DNA, 25 bp, Homo sapien
ttgcatttgggaatagagtgaacca

SEQ ID NO: 2013754 - DNA, 25 bp, Homo sapien
catttgggaatagagtgaaccagta

SEQ ID NO: 2013755 - DNA, 25 bp, Homo sapien
gctcctccagatgtgacaggcttgt

SEQ ID NO: 2013756 - DNA, 25 bp, Homo sapien
accacatgccatgcggggtcacagg

SEQ ID NO: 2013757 - DNA, 25 bp, Homo sapien
gcaagagccttagagttcccactta

SEQ ID NO: 2013758 - DNA, 25 bp, Homo sapien
ggagtgaaggctctcaggacctcca

SEQ ID NO: 2013759 - DNA, 25 bp, Homo sapien
cccacttattgaagcataggaggag

SEQ ID NO: 2013760 - DNA, 25 bp, Homo sapien
tctccttttcaactgtggccctgca

SEQ ID NO: 2013761 - DNA, 25 bp, Homo sapien
tgtccatactctgtcacctctatca

SEQ ID NO: 2013762 - DNA, 25 bp, Homo sapien
tgggtgtgtccctccgcagttcttt

SEQ ID NO: 2013763 - DNA, 25 bp, Homo sapien
tgttcctcctgtccatactctgtca

SEQ ID NO: 2013764 - DNA, 25 bp, Homo sapien
actaaatgatcaacagtcctgttac

SEQ ID NO: 2013765 - DNA, 25 bp, Homo sapien
gcttccggcagatgactcagaaccg

SEQ ID NO: 2013766 - DNA, 25 bp, Homo sapien
tcctcctttgtagatgcttcacgtc

SEQ ID NO: 2013767 - DNA, 25 bp, Homo sapien
tgctgctttgactattcctcctttg

SEQ ID NO: 2013768 - DNA, 25 bp, Homo sapien
acgtccgccttgattgagggcaagg

SEQ ID NO: 2013769 - DNA, 25 bp, Homo sapien
tgcctcgctctgattcctgctctgg

SEQ ID NO: 2013770 - DNA, 25 bp, Homo sapien
aagaggtggcctccgcgggaacctg

SEQ ID NO: 2013771 - DNA, 25 bp, Homo sapien
cgccgtcattctcctagttcctgcc

SEQ ID NO: 2013772 - DNA, 25 bp, Homo sapien
tctcacgcactccagggaagaggtg

SEQ ID NO: 2013773 - DNA, 25 bp, Homo sapien
tgcccctgcgagtggacccagggaa

SEQ ID NO: 2013774 - DNA, 25 bp, Homo sapien
gcaaccaataggctgtaagcacagg

SEQ ID NO: 2013775 - DNA, 25 bp, Homo sapien
gaagcagacaatgaagaagagaata

SEQ ID NO: 2013776 - DNA, 25 bp, Homo sapien
aaagtaacgccggtggctgcaacag

SEQ ID NO: 2013777 - DNA, 25 bp, Homo sapien
tagactgtctagagccagagacctg

SEQ ID NO: 2013778 - DNA, 25 bp, Homo sapien
cccgattccgagaggttccatgaga

SEQ ID NO: 2013779 - DNA, 25 bp, Homo sapien
ccatgagaatggatgaaactacaca

SEQ ID NO: 2013780 - DNA, 25 bp, Homo sapien
tggagccatcagcatcccgattccg

SEQ ID NO: 2013781 - DNA, 25 bp, Homo sapien
ctttcactcgaggacatttcagaga

SEQ ID NO: 2013782 - DNA, 25 bp, Homo sapien
catctttcactcgaggacatttcag

SEQ ID NO: 2013783 - DNA, 25 bp, Homo sapien
cctctccagagcttatactagggtc

SEQ ID NO: 2013784 - DNA, 25 bp, Homo sapien
tactagggtctgcagatgttggaag

SEQ ID NO: 2013785 - DNA, 25 bp, Homo sapien
tacgtttcttgagttgtcctcttcc

SEQ ID NO: 2013786 - DNA, 25 bp, Homo sapien
gaagaatacgtttcttgagttgtcc

SEQ ID NO: 2013787 - DNA, 25 bp, Homo sapien
gaatacgtttcttgagttgtcctct

SEQ ID NO: 2013788 - DNA, 25 bp, Homo sapien
agaagaatacgtttcttgagttgtc

SEQ ID NO: 2013789 - DNA, 25 bp, Homo sapien
ctgggacatctgggctgcagtgctt

SEQ ID NO: 2013790 - DNA, 25 bp, Homo sapien
ttccctttgcccccatgaagaccat

SEQ ID NO: 2013791 - DNA, 25 bp, Homo sapien
ggacatctgggctgcagtgcttccc

SEQ ID NO: 2013792 - DNA, 25 bp, Homo sapien
cttccctttgcccccatgaagacca

SEQ ID NO: 2013793 - DNA, 25 bp, Homo sapien
tctccttcctttgtgacaagcacac

SEQ ID NO: 2013794 - DNA, 25 bp, Homo sapien
ctccttcctttgtgacaagcacaca

SEQ ID NO: 2013795 - DNA, 25 bp, Homo sapien
tccttcctttgtgacaagcacacat

SEQ ID NO: 2013796 - DNA, 25 bp, Homo sapien
ctcttctccactgccgagctgctcc

SEQ ID NO: 2013797 - DNA, 25 bp, Homo sapien
ttctccactgccgagctgctcctcc

SEQ ID NO: 2013798 - DNA, 25 bp, Homo sapien
ctccactgccgagctgctcctcctt

SEQ ID NO: 2013799 - DNA, 25 bp, Homo sapien
ctacctccagctccacaggcctcag

SEQ ID NO: 2013800 - DNA, 25 bp, Homo sapien
tcaaagatgtgaatttgccagactg

SEQ ID NO: 2013801 - DNA, 25 bp, Homo sapien
gatctagagaaaataactctatggc

SEQ ID NO: 2013802 - DNA, 25 bp, Homo sapien
ctgtattgatgatctgatctagaga

SEQ ID NO: 2013803 - DNA, 25 bp, Homo sapien
gaaaataactctatggcttgacttc

SEQ ID NO: 2013804 - DNA, 25 bp, Homo sapien
aaccaacactgacttttaacgctgc

SEQ ID NO: 2013805 - DNA, 25 bp, Homo sapien
aaaccaacactgacttttaacgctg

SEQ ID NO: 2013806 - DNA, 25 bp, Homo sapien
ccaacactgacttttaacgctgcca

SEQ ID NO: 2013807 - DNA, 25 bp, Homo sapien
ttaacgctgccattatactctccca

SEQ ID NO: 2013808 - DNA, 25 bp, Homo sapien
gaatatctccgtctttgtataaaca

SEQ ID NO: 2013809 - DNA, 25 bp, Homo sapien
ctggaaacctcggtgaatatctccg

SEQ ID NO: 2013810 - DNA, 25 bp, Homo sapien
acctcggtgaatatctccgtctttg

SEQ ID NO: 2013811 - DNA, 25 bp, Homo sapien
cggtgaatatctccgtctttgtata

SEQ ID NO: 2013812 - DNA, 25 bp, Homo sapien
gttctaagcaagtactgagtgccag

SEQ ID NO: 2013813 - DNA, 25 bp, Homo sapien
agagtctgttggcagttctaagcaa

SEQ ID NO: 2013814 - DNA, 25 bp, Homo sapien
gcagttctaagcaagtactgagtgc

SEQ ID NO: 2013815 - DNA, 25 bp, Homo sapien
agttctaagcaagtactgagtgcca

SEQ ID NO: 2013816 - DNA, 25 bp, Homo sapien
tttgtcatcaatatgtgaatactac

SEQ ID NO: 2013817 - DNA, 25 bp, Homo sapien
tcatcaatatgtgaatactacttac

SEQ ID NO: 2013818 - DNA, 25 bp, Homo sapien
ttgtcatcaatatgtgaatactact

SEQ ID NO: 2013819 - DNA, 25 bp, Homo sapien
tgtcatcaatatgtgaatactactt

SEQ ID NO: 2013820 - DNA, 25 bp, Homo sapien
tctcatttggtaaaggttcccacaa

SEQ ID NO: 2013821 - DNA, 25 bp, Homo sapien
aaggttcccacaaatgcaaaagcat

SEQ ID NO: 2013822 - DNA, 25 bp, Homo sapien
cactgagtttagtctcatttggtaa

SEQ ID NO: 2013823 - DNA, 25 bp, Homo sapien
cacaaaacactgagtttagtctcat

SEQ ID NO: 2013824 - DNA, 25 bp, Homo sapien
tccagctctgcctgatagaacttct

SEQ ID NO: 2013825 - DNA, 25 bp, Homo sapien
gaacttctgacagtattctttaaag

SEQ ID NO: 2013826 - DNA, 25 bp, Homo sapien
gctctgcctgatagaacttctgaca

SEQ ID NO: 2013827 - DNA, 25 bp, Homo sapien
cctgatagaacttctgacagtattc

SEQ ID NO: 2013828 - DNA, 25 bp, Homo sapien
ctcattccactttcccttgaaataa

SEQ ID NO: 2013829 - DNA, 25 bp, Homo sapien
tgtcccagcatccagtacctctgaa

SEQ ID NO: 2013830 - DNA, 25 bp, Homo sapien
tgtcaggggatcgactgtcccagca

SEQ ID NO: 2013831 - DNA, 25 bp, Homo sapien
ccagcatccagtacctctgaaatct

SEQ ID NO: 2013832 - DNA, 25 bp, Homo sapien
gctccaggacctgggtgtgtacctc

SEQ ID NO: 2013833 - DNA, 25 bp, Homo sapien
aggtccgtgttgtcatcgggaagca

SEQ ID NO: 2013834 - DNA, 25 bp, Homo sapien
ctcttccacatagggcagctccagg

SEQ ID NO: 2013835 - DNA, 25 bp, Homo sapien
tgggtgtgtacctcatccgcatacc

SEQ ID NO: 2013836 - DNA, 25 bp, Homo sapien
gacacacaatgatgttcacccagca

SEQ ID NO: 2013837 - DNA, 25 bp, Homo sapien
tgcctgtaataaccccaactggaaa

SEQ ID NO: 2013838 - DNA, 25 bp, Homo sapien
ggaaactcctcaaatgccaattggt

SEQ ID NO: 2013839 - DNA, 25 bp, Homo sapien
cagctggactccacagatactcagg

SEQ ID NO: 2013840 - DNA, 25 bp, Homo sapien
tcctggagttagcttcaaattcttc

SEQ ID NO: 2013841 - DNA, 25 bp, Homo sapien
caatacatactactgtgagtgggag

SEQ ID NO: 2013842 - DNA, 25 bp, Homo sapien
ctattcagggttaaatcagagggca

SEQ ID NO: 2013843 - DNA, 25 bp, Homo sapien
ggaatgcaagaagacttcatcagca

SEQ ID NO: 2013844 - DNA, 25 bp, Homo sapien
aatttgtccaggctttgaatttctc

SEQ ID NO: 2013845 - DNA, 25 bp, Homo sapien
tctcatatgtaagtgctttttccac

SEQ ID NO: 2013846 - DNA, 25 bp, Homo sapien
atttgtccaggctttgaatttctca

SEQ ID NO: 2013847 - DNA, 25 bp, Homo sapien
ctgaatttgtccaggctttgaattt

SEQ ID NO: 2013848 - DNA, 25 bp, Homo sapien
aggcacattcttctcagttgacatt

SEQ ID NO: 2013849 - DNA, 25 bp, Homo sapien
gggcaaccttggacagaggcacatt

SEQ ID NO: 2013850 - DNA, 25 bp, Homo sapien
tcattgacctccacgaagcacttgt

SEQ ID NO: 2013851 - DNA, 25 bp, Homo sapien
gccttggcttcgtcaaaagcatcga

SEQ ID NO: 2013852 - DNA, 25 bp, Homo sapien
aaagggtggtctgcacagaatcttg

SEQ ID NO: 2013853 - DNA, 25 bp, Homo sapien
aagggtggtctgcacagaatcttgg

SEQ ID NO: 2013854 - DNA, 25 bp, Homo sapien
aaaagggtggtctgcacagaatctt

SEQ ID NO: 2013855 - DNA, 25 bp, Homo sapien
gaaaggagggtatgtacagcaattg

SEQ ID NO: 2013856 - DNA, 25 bp, Homo sapien
actaggtcacagggaatgttaatta

SEQ ID NO: 2013857 - DNA, 25 bp, Homo sapien
atgttaattaaggcaagataggtag

SEQ ID NO: 2013858 - DNA, 25 bp, Homo sapien
attttggcattcaagccactgcacc

SEQ ID NO: 2013859 - DNA, 25 bp, Homo sapien
aaatttcatgcatctgcggcctcag

SEQ ID NO: 2013860 - DNA, 25 bp, Homo sapien
taaagtgcattgctgagtccctgaa

SEQ ID NO: 2013861 - DNA, 25 bp, Homo sapien
cataagatcccctgaaacaatgggc

SEQ ID NO: 2013862 - DNA, 25 bp, Homo sapien
gaagattggtagttgcctgagcaga

SEQ ID NO: 2013863 - DNA, 25 bp, Homo sapien
ggaagagcaggtgaccgcacgcgag

SEQ ID NO: 2013864 - DNA, 25 bp, Homo sapien
agcaggtgaccgcacgcgagggccc

SEQ ID NO: 2013865 - DNA, 25 bp, Homo sapien
tggcttgagcgcactggcctcctgc

SEQ ID NO: 2013866 - DNA, 25 bp, Homo sapien
cagggctggcttgagcgcactggcc

SEQ ID NO: 2013867 - DNA, 25 bp, Homo sapien
caatgccgtctgatgtttctgtact

SEQ ID NO: 2013868 - DNA, 25 bp, Homo sapien
ggttgcaattagttatcacacatcc

SEQ ID NO: 2013869 - DNA, 25 bp, Homo sapien
gtacttacactcaggtgctgataat

SEQ ID NO: 2013870 - DNA, 25 bp, Homo sapien
tagagagtttcagccaattatttgg

SEQ ID NO: 2013871 - DNA, 25 bp, Homo sapien
cgttgcccactcttgatgttgtcag

SEQ ID NO: 2013872 - DNA, 25 bp, Homo sapien
ccagttgttctacatcgttgcccac

SEQ ID NO: 2013873 - DNA, 25 bp, Homo sapien
aagacggcattcaggttataggaca

SEQ ID NO: 2013874 - DNA, 25 bp, Homo sapien
tattaggcttttgtagatatggcca

SEQ ID NO: 2013875 - DNA, 25 bp, Homo sapien
acaccccggagcgtcaggaggaact

SEQ ID NO: 2013876 - DNA, 25 bp, Homo sapien
accccggagcgtcaggaggaactgt

SEQ ID NO: 2013877 - DNA, 25 bp, Homo sapien
agacaccccggagcgtcaggaggaa

SEQ ID NO: 2013878 - DNA, 25 bp, Homo sapien
tcagacaccccggagcgtcaggagg

SEQ ID NO: 2013879 - DNA, 25 bp, Homo sapien
attcacccacattgaagaaactccc

SEQ ID NO: 2013880 - DNA, 25 bp, Homo sapien
ctgcatctgctgtttattcacccac

SEQ ID NO: 2013881 - DNA, 25 bp, Homo sapien
tgcatctgctgtttattcacccaca

SEQ ID NO: 2013882 - DNA, 25 bp, Homo sapien
gcatctgctgtttattcacccacat

SEQ ID NO: 2013883 - DNA, 25 bp, Homo sapien
tacaagaagaatggcctttcgtgga

SEQ ID NO: 2013884 - DNA, 25 bp, Homo sapien
taagagtccgggactaagcagagaa

SEQ ID NO: 2013885 - DNA, 25 bp, Homo sapien
aacgcaagtgggtcagcatcagaag

SEQ ID NO: 2013886 - DNA, 25 bp, Homo sapien
gaagaatggcctttcgtggaaacat

SEQ ID NO: 2013887 - DNA, 25 bp, Homo sapien
tctcttggcagatcgttgagggctt

SEQ ID NO: 2013888 - DNA, 25 bp, Homo sapien
ttggcagatcgttgagggctttgat

SEQ ID NO: 2013889 - DNA, 25 bp, Homo sapien
tgtctcttggcagatcgttgagggc

SEQ ID NO: 2013890 - DNA, 25 bp, Homo sapien
tccagttactctgatgatgtcatca

SEQ ID NO: 2013891 - DNA, 25 bp, Homo sapien
tgccgctcacagtggaaacttcact

SEQ ID NO: 2013892 - DNA, 25 bp, Homo sapien
tgctccccacaatatgcatctagaa

SEQ ID NO: 2013893 - DNA, 25 bp, Homo sapien
tatgaactttgctacccattctggg

SEQ ID NO: 2013894 - DNA, 25 bp, Homo sapien
ggtggtattagacaatgtgttccca

SEQ ID NO: 2013895 - DNA, 25 bp, Homo sapien
cagtcgaggttagtcacttctaatc

SEQ ID NO: 2013896 - DNA, 25 bp, Homo sapien
caggtccatttgcaatgaatctgtc

SEQ ID NO: 2013897 - DNA, 25 bp, Homo sapien
ttcacctccaccaaagactattatt

SEQ ID NO: 2013898 - DNA, 25 bp, Homo sapien
gaatatgagcccagaacagtcgagg

SEQ ID NO: 2013899 - DNA, 25 bp, Homo sapien
tgtagcatgaatgaaccagccagtg

SEQ ID NO: 2013900 - DNA, 25 bp, Homo sapien
gtgcgtccatccacagcaaagtgtt

SEQ ID NO: 2013901 - DNA, 25 bp, Homo sapien
aaacactccagtcaccctgcattgg

SEQ ID NO: 2013902 - DNA, 25 bp, Homo sapien
gcgaggtcattagcagtgcgtccat

SEQ ID NO: 2013903 - DNA, 25 bp, Homo sapien
gtccctgaaagcctcagagtttcat

SEQ ID NO: 2013904 - DNA, 25 bp, Homo sapien
cagtggtgtggccttggcaccgtac

SEQ ID NO: 2013905 - DNA, 25 bp, Homo sapien
ctcacgtccctgaaagcctcagagt

SEQ ID NO: 2013906 - DNA, 25 bp, Homo sapien
gtggccttggcaccgtacctcacgt

SEQ ID NO: 2013907 - DNA, 25 bp, Homo sapien
tggtgtcaccctcaaaagactaagg

SEQ ID NO: 2013908 - DNA, 25 bp, Homo sapien
cagagagtcctcagcacttcctggg

SEQ ID NO: 2013909 - DNA, 25 bp, Homo sapien
ttcctgggcatgacacctcagccat

SEQ ID NO: 2013910 - DNA, 25 bp, Homo sapien
aagactaaggcagaagccacccaga

SEQ ID NO: 2013911 - DNA, 25 bp, Homo sapien
tatgcaaccagtgccaacctctgag

SEQ ID NO: 2013912 - DNA, 25 bp, Homo sapien
cctggaaccatgtggaggaatcact

SEQ ID NO: 2013913 - DNA, 25 bp, Homo sapien
tgccatatcgtgtctgaagtcccag

SEQ ID NO: 2013914 - DNA, 25 bp, Homo sapien
ctgaggcttctcaggtaatgagcaa

SEQ ID NO: 2013915 - DNA, 25 bp, Homo sapien
gctataatctttataaggtatccaa

SEQ ID NO: 2013916 - DNA, 25 bp, Homo sapien
gctaaaattcttatgttgccacata

SEQ ID NO: 2013917 - DNA, 25 bp, Homo sapien
gaatagtgctagtttgatggctaaa

SEQ ID NO: 2013918 - DNA, 25 bp, Homo sapien
taaactcattcgatatacttcatcc

SEQ ID NO: 2013919 - DNA, 25 bp, Homo sapien
agagtggcacaagtacaaatccagc

SEQ ID NO: 2013920 - DNA, 25 bp, Homo sapien
aagtacaaatccagcctgccttgca

SEQ ID NO: 2013921 - DNA, 25 bp, Homo sapien
tgcatccaacacagattccaggacc

SEQ ID NO: 2013922 - DNA, 25 bp, Homo sapien
tgccttgcatccaacacagattcca

SEQ ID NO: 2013923 - DNA, 25 bp, Homo sapien
caaagtctggtccttctgaccagga

SEQ ID NO: 2013924 - DNA, 25 bp, Homo sapien
tagcaggcctgttaagcaaagtctg

SEQ ID NO: 2013925 - DNA, 25 bp, Homo sapien
agaaagctccgcaccggagatcctc

SEQ ID NO: 2013926 - DNA, 25 bp, Homo sapien
tagatgaagggatccgtagcaggcc

SEQ ID NO: 2013927 - DNA, 25 bp, Homo sapien
tcagccttccactttttgtattctg

SEQ ID NO: 2013928 - DNA, 25 bp, Homo sapien
ttattcagccttccactttttgtat

SEQ ID NO: 2013929 - DNA, 25 bp, Homo sapien
ttccactttttgtattctgtgcaac

SEQ ID NO: 2013930 - DNA, 25 bp, Homo sapien
cttgttttttattcagccttccact

SEQ ID NO: 2013931 - DNA, 25 bp, Homo sapien
tcatcagaaagcagtgaggtcactt

SEQ ID NO: 2013932 - DNA, 25 bp, Homo sapien
tcaaattgaacaactgcatcgaagc

SEQ ID NO: 2013933 - DNA, 25 bp, Homo sapien
tacggacgtgttgtgcatccattca

SEQ ID NO: 2013934 - DNA, 25 bp, Homo sapien
tcgaagcccagatgagtacggacgt

SEQ ID NO: 2013935 - DNA, 25 bp, Homo sapien
gtgtgagaactgaagggaccattaa

SEQ ID NO: 2013936 - DNA, 25 bp, Homo sapien
ttacaagccaggtagaacaggacaa

SEQ ID NO: 2013937 - DNA, 25 bp, Homo sapien
ttttaggattgattacaagccaggt

SEQ ID NO: 2013938 - DNA, 25 bp, Homo sapien
gagaactgaagggaccattaaagta

SEQ ID NO: 2013939 - DNA, 25 bp, Homo sapien
ttcagtttggaagccatacgcagga

SEQ ID NO: 2013940 - DNA, 25 bp, Homo sapien
tctttcaagtaatgagttccacggc

SEQ ID NO: 2013941 - DNA, 25 bp, Homo sapien
tcttctaaaggcaccataacgggag

SEQ ID NO: 2013942 - DNA, 25 bp, Homo sapien
cagagatgaactgtggccacttcag

SEQ ID NO: 2013943 - DNA, 25 bp, Homo sapien
gaattccagctttccagtttcatag

SEQ ID NO: 2013944 - DNA, 25 bp, Homo sapien
tctgccctgcagtcaatggtaaagc

SEQ ID NO: 2013945 - DNA, 25 bp, Homo sapien
ggtctctgggtactgttcataaatc

SEQ ID NO: 2013946 - DNA, 25 bp, Homo sapien
tacttaggtgaagagctgaacatca

SEQ ID NO: 2013947 - DNA, 25 bp, Homo sapien
cttctgcctctttctattccctttt

SEQ ID NO: 2013948 - DNA, 25 bp, Homo sapien
cctcccctcccatgcaattttccct

SEQ ID NO: 2013949 - DNA, 25 bp, Homo sapien
tttcctcccctcccatgcaattttc

SEQ ID NO: 2013950 - DNA, 25 bp, Homo sapien
gctttctccttgtgtgcccttctgc

SEQ ID NO: 2013951 - DNA, 25 bp, Homo sapien
cacagggtcttcagacttcacgtac

SEQ ID NO: 2013952 - DNA, 25 bp, Homo sapien
cttcacagggtcttcagacttcacg

SEQ ID NO: 2013953 - DNA, 25 bp, Homo sapien
tgcaggacagcctcttcacagggtc

SEQ ID NO: 2013954 - DNA, 25 bp, Homo sapien
ggtcttcagacttcacgtactccat

SEQ ID NO: 2013955 - DNA, 25 bp, Homo sapien
acattaaacatgcattgtccgtaac

SEQ ID NO: 2013956 - DNA, 25 bp, Homo sapien
ctctctgctctccatacattaaaca

SEQ ID NO: 2013957 - DNA, 25 bp, Homo sapien
gcctgcttctccactacagtctcca

SEQ ID NO: 2013958 - DNA, 25 bp, Homo sapien
aaacatgcattgtccgtaacactac

SEQ ID NO: 2013959 - DNA, 25 bp, Homo sapien
cttcaaagacgaggagggctatgta

SEQ ID NO: 2013960 - DNA, 25 bp, Homo sapien
cgaggagggctatgtattttgcatt

SEQ ID NO: 2013961 - DNA, 25 bp, Homo sapien
caaagacgaggagggctatgtattt

SEQ ID NO: 2013962 - DNA, 25 bp, Homo sapien
agacgaggagggctatgtattttgc

SEQ ID NO: 2013963 - DNA, 25 bp, Homo sapien
gggggaaggagccccatgacattct

SEQ ID NO: 2013964 - DNA, 25 bp, Homo sapien
acacagctcagtaactcgaccacag

SEQ ID NO: 2013965 - DNA, 25 bp, Homo sapien
gccatttgagcgatcatttagccaa

SEQ ID NO: 2013966 - DNA, 25 bp, Homo sapien
cacagattggccatttgagcgatca

SEQ ID NO: 2013967 - DNA, 25 bp, Homo sapien
catttagccaataatcgaaacgcat

SEQ ID NO: 2013968 - DNA, 25 bp, Homo sapien
gattattcatatgacgtatgtcacc

SEQ ID NO: 2013969 - DNA, 25 bp, Homo sapien
gcagaagacgtaggtcatgactctc

SEQ ID NO: 2013970 - DNA, 25 bp, Homo sapien
ccttgccgatatgtgagacgatatg

SEQ ID NO: 2013971 - DNA, 25 bp, Homo sapien
tgacgtatgtcacctctgggctgaa

SEQ ID NO: 2013972 - DNA, 25 bp, Homo sapien
cttgaatacgacagggggagtcatt

SEQ ID NO: 2013973 - DNA, 25 bp, Homo sapien
cagaaagcctttgcattggagaaga

SEQ ID NO: 2013974 - DNA, 25 bp, Homo sapien
taatggcaatgtcaggcaaaggtct

SEQ ID NO: 2013975 - DNA, 25 bp, Homo sapien
actgcttcctcccatgggcttgagg

SEQ ID NO: 2013976 - DNA, 25 bp, Homo sapien
gaagataaattcagcacgaacagcc

SEQ ID NO: 2013977 - DNA, 25 bp, Homo sapien
aagatcaaggccagtttgggcaaca

SEQ ID NO: 2013978 - DNA, 25 bp, Homo sapien
cagaagatcaaggccagtttgggca

SEQ ID NO: 2013979 - DNA, 25 bp, Homo sapien
gaagatcaaggccagtttgggcaac

SEQ ID NO: 2013980 - DNA, 25 bp, Homo sapien
cccagaagatcaaggccagtttggg

SEQ ID NO: 2013981 - DNA, 25 bp, Homo sapien
tcctgctcagtgtcacaggtatgag

SEQ ID NO: 2013982 - DNA, 25 bp, Homo sapien
gggctgatgtcgaaaaccttcagct

SEQ ID NO: 2013983 - DNA, 25 bp, Homo sapien
tgatgtcgaaaaccttcagcttccc

SEQ ID NO: 2013984 - DNA, 25 bp, Homo sapien
ttcccaagacaacactgatcaggcc

SEQ ID NO: 2013985 - DNA, 25 bp, Homo sapien
cgtagaacattgattgcaaggtaac

SEQ ID NO: 2013986 - DNA, 25 bp, Homo sapien
ctcgtagaacattgattgcaaggta

SEQ ID NO: 2013987 - DNA, 25 bp, Homo sapien
tactcgtagaacattgattgcaagg

SEQ ID NO: 2013988 - DNA, 25 bp, Homo sapien
atatactcgtagaacattgattgca

SEQ ID NO: 2013989 - DNA, 25 bp, Homo sapien
cattcagttcccactaagaagcatc

SEQ ID NO: 2013990 - DNA, 25 bp, Homo sapien
tgttggaggcaaggtaagagacaca

SEQ ID NO: 2013991 - DNA, 25 bp, Homo sapien
gacacagatgtagcccactctatgt

SEQ ID NO: 2013992 - DNA, 25 bp, Homo sapien
tataaacctgtcctgtagaagccag

SEQ ID NO: 2013993 - DNA, 25 bp, Homo sapien
gctttacaatgacgacagctttatg

SEQ ID NO: 2013994 - DNA, 25 bp, Homo sapien
gtttacattcgacttcatctttaag

SEQ ID NO: 2013995 - DNA, 25 bp, Homo sapien
ttatgtttacattcgacttcatctt

SEQ ID NO: 2013996 - DNA, 25 bp, Homo sapien
ttaagggctttacaatgacgacagc

SEQ ID NO: 2013997 - DNA, 25 bp, Homo sapien
tgaaggatccttgcctccagacttt

SEQ ID NO: 2013998 - DNA, 25 bp, Homo sapien
ggtgaaggatccttgcctccagact

SEQ ID NO: 2013999 - DNA, 25 bp, Homo sapien
tggtgaaggatccttgcctccagac

SEQ ID NO: 2014000 - DNA, 25 bp, Homo sapien
aaggatccttgcctccagacttttt

SEQ ID NO: 2014001 - DNA, 25 bp, Homo sapien
taaaacgtgtcacatagcccacact

SEQ ID NO: 2014002 - DNA, 25 bp, Homo sapien
ctagcgtgtataccacagtctgtgg

SEQ ID NO: 2014003 - DNA, 25 bp, Homo sapien
gggtgccattcatgtagactagcgt

SEQ ID NO: 2014004 - DNA, 25 bp, Homo sapien
cttccctttcgatgacatttgtttt

SEQ ID NO: 2014005 - DNA, 25 bp, Homo sapien
atccacactgggaataaattttctt

SEQ ID NO: 2014006 - DNA, 25 bp, Homo sapien
cactgggaataaattttcttagcta

SEQ ID NO: 2014007 - DNA, 25 bp, Homo sapien
attttcttagctattgctccatgtt

SEQ ID NO: 2014008 - DNA, 25 bp, Homo sapien
acaaaattctgcaagtctcccagca

SEQ ID NO: 2014009 - DNA, 25 bp, Homo sapien
ccactcctgcccctggaatggtgat

SEQ ID NO: 2014010 - DNA, 25 bp, Homo sapien
tgcccctggaatggtgatctgcttc

SEQ ID NO: 2014011 - DNA, 25 bp, Homo sapien
gatctgcttcagaagatgccttgcc

SEQ ID NO: 2014012 - DNA, 25 bp, Homo sapien
tctgcttcagaagatgccttgcctt

SEQ ID NO: 2014013 - DNA, 25 bp, Homo sapien
gctgtcagtcacactgctacatgct

SEQ ID NO: 2014014 - DNA, 25 bp, Homo sapien
gaagctaatgttttcaggcttgggc

SEQ ID NO: 2014015 - DNA, 25 bp, Homo sapien
gtcagtcacactgctacatgctggg

SEQ ID NO: 2014016 - DNA, 25 bp, Homo sapien
ttcttcagggtcaggtctgagcgtg

SEQ ID NO: 2014017 - DNA, 25 bp, Homo sapien
tgggataaggtcaaccaaaggagtc

SEQ ID NO: 2014018 - DNA, 25 bp, Homo sapien
gctggtgaatgggataaggtcaacc

SEQ ID NO: 2014019 - DNA, 25 bp, Homo sapien
aaaggagtccgcttcagaattgtca

SEQ ID NO: 2014020 - DNA, 25 bp, Homo sapien
ggtcaaccaaaggagtccgcttcag

SEQ ID NO: 2014021 - DNA, 25 bp, Homo sapien
tgctagtttcaagatcttgaacatg

SEQ ID NO: 2014022 - DNA, 25 bp, Homo sapien
gtttcaagatcttgaacatgttacc

SEQ ID NO: 2014023 - DNA, 25 bp, Homo sapien
aacatgttacctgccaacactgagc

SEQ ID NO: 2014024 - DNA, 25 bp, Homo sapien
tagtttcaagatcttgaacatgtta

SEQ ID NO: 2014025 - DNA, 25 bp, Homo sapien
ttcactctcttaccagttctcacca

SEQ ID NO: 2014026 - DNA, 25 bp, Homo sapien
cactctcttaccagttctcaccacc

SEQ ID NO: 2014027 - DNA, 25 bp, Homo sapien
tgatttcactctcttaccagttctc

SEQ ID NO: 2014028 - DNA, 25 bp, Homo sapien
atttcactctcttaccagttctcac

SEQ ID NO: 2014029 - DNA, 25 bp, Homo sapien
aatcaatgctatgcatatgtagctc

SEQ ID NO: 2014030 - DNA, 25 bp, Homo sapien
tgctatgcatatgtagctcagagtc

SEQ ID NO: 2014031 - DNA, 25 bp, Homo sapien
tatgcatatgtagctcagagtcccc

SEQ ID NO: 2014032 - DNA, 25 bp, Homo sapien
tcaatgctatgcatatgtagctcag

SEQ ID NO: 2014033 - DNA, 25 bp, Homo sapien
ttgctccatttacaacagctgatga

SEQ ID NO: 2014034 - DNA, 25 bp, Homo sapien
agctgatgaccaataaccattcatt

SEQ ID NO: 2014035 - DNA, 25 bp, Homo sapien
gctgatgaccaataaccattcattt

SEQ ID NO: 2014036 - DNA, 25 bp, Homo sapien
ttgatgaatgccagttctcgcaggg

SEQ ID NO: 2014037 - DNA, 25 bp, Homo sapien
tctcgcaggggacatcaactctaag

SEQ ID NO: 2014038 - DNA, 25 bp, Homo sapien
tcaacaatgaagttaacccttatat

SEQ ID NO: 2014039 - DNA, 25 bp, Homo sapien
tgttgtaggctttatttgtgctcct

SEQ ID NO: 2014040 - DNA, 25 bp, Homo sapien
caagatcagttgcacagttccaagg

SEQ ID NO: 2014041 - DNA, 25 bp, Homo sapien
agtgcatggccccaagcgctcacct

SEQ ID NO: 2014042 - DNA, 25 bp, Homo sapien
ctggtgttctgtgccaagatcagtt

SEQ ID NO: 2014043 - DNA, 25 bp, Homo sapien
tgtgccaagatcagttgcacagttc

SEQ ID NO: 2014044 - DNA, 25 bp, Homo sapien
ttctcatccatactctttgtttctg

SEQ ID NO: 2014045 - DNA, 25 bp, Homo sapien
tgtttctgttgttgtgcgtggatct

SEQ ID NO: 2014046 - DNA, 25 bp, Homo sapien
atctggaatggcatgggaaggcaaa

SEQ ID NO: 2014047 - DNA, 25 bp, Homo sapien
gcgtggatctggaatggcatgggaa

SEQ ID NO: 2014048 - DNA, 25 bp, Homo sapien
caactgtcataaaactgcctgcaat

SEQ ID NO: 2014049 - DNA, 25 bp, Homo sapien
cagccatccctgttaacataagaag

SEQ ID NO: 2014050 - DNA, 25 bp, Homo sapien
cataagaagatgatcaggaggttcc

SEQ ID NO: 2014051 - DNA, 25 bp, Homo sapien
cattgatgacgcctaaaagtgccac

SEQ ID NO: 2014052 - DNA, 25 bp, Homo sapien
ttctttcaaagtatagcacactctt

SEQ ID NO: 2014053 - DNA, 25 bp, Homo sapien
caaagtatagcacactcttatttca

SEQ ID NO: 2014054 - DNA, 25 bp, Homo sapien
tttctctccggtagcaggtgagcag

SEQ ID NO: 2014055 - DNA, 25 bp, Homo sapien
gcacactcttatttcaaggtcacct

SEQ ID NO: 2014056 - DNA, 25 bp, Homo sapien
gcagcatgttcttcgataaagttca

SEQ ID NO: 2014057 - DNA, 25 bp, Homo sapien
tactaaatctcaatggtccagcggc

SEQ ID NO: 2014058 - DNA, 25 bp, Homo sapien
ggctcagtaatccaaacaacatgtc

SEQ ID NO: 2014059 - DNA, 25 bp, Homo sapien
ggctggcaaacatattgcctactaa

SEQ ID NO: 2014060 - DNA, 25 bp, Homo sapien
ctatatctcaactctgctatcagga

SEQ ID NO: 2014061 - DNA, 25 bp, Homo sapien
taagtttgcagtccataaatgggat

SEQ ID NO: 2014062 - DNA, 25 bp, Homo sapien
ctcaactctgctatcaggaatcaag

SEQ ID NO: 2014063 - DNA, 25 bp, Homo sapien
tatcaggaatcaagtaagtttgcag

SEQ ID NO: 2014064 - DNA, 25 bp, Homo sapien
cgattatatttcaaaagctgagatt

SEQ ID NO: 2014065 - DNA, 25 bp, Homo sapien
caacgattatatttcaaaagctgag

SEQ ID NO: 2014066 - DNA, 25 bp, Homo sapien
ttatatttcaaaagctgagatttct

SEQ ID NO: 2014067 - DNA, 25 bp, Homo sapien
tatatttcaaaagctgagatttctc

SEQ ID NO: 2014068 - DNA, 25 bp, Homo sapien
gaagaagcagtctacgtgtccatcg

SEQ ID NO: 2014069 - DNA, 25 bp, Homo sapien
ccatgtccatagcagggttatcaca

SEQ ID NO: 2014070 - DNA, 25 bp, Homo sapien
tcagcctgaagacggaaagaaattc

SEQ ID NO: 2014071 - DNA, 25 bp, Homo sapien
acaaatgaatagaccaaatgtggta

SEQ ID NO: 2014072 - DNA, 25 bp, Homo sapien
gaccgaagagttatatgctcttccc

SEQ ID NO: 2014073 - DNA, 25 bp, Homo sapien
cctggaggatgcacgtgtgctcgct

SEQ ID NO: 2014074 - DNA, 25 bp, Homo sapien
tcgctctgatcgagagggcaatctg

SEQ ID NO: 2014075 - DNA, 25 bp, Homo sapien
tggatccccggaagccaagtgcaaa

SEQ ID NO: 2014076 - DNA, 25 bp, Homo sapien
tcttcacaagaacacatagaggaga

SEQ ID NO: 2014077 - DNA, 25 bp, Homo sapien
ttctcttcacaagaacacatagagg

SEQ ID NO: 2014078 - DNA, 25 bp, Homo sapien
gaactcgtgctagagaagcattctc

SEQ ID NO: 2014079 - DNA, 25 bp, Homo sapien
atcatattgaactcgtgctagagaa

SEQ ID NO: 2014080 - DNA, 25 bp, Homo sapien
tatgcgcatatgtgcttctgtgcag

SEQ ID NO: 2014081 - DNA, 25 bp, Homo sapien
tctgaatgactggagcccaagcctt

SEQ ID NO: 2014082 - DNA, 25 bp, Homo sapien
tatggcgtatacctaataatccagg

SEQ ID NO: 2014083 - DNA, 25 bp, Homo sapien
gctcatggtaggaaatgcagccttg

SEQ ID NO: 2014084 - DNA, 25 bp, Homo sapien
gtgctctggtggtttcgttttcctg

SEQ ID NO: 2014085 - DNA, 25 bp, Homo sapien
tgctctggtggtttcgttttcctgt

SEQ ID NO: 2014086 - DNA, 25 bp, Homo sapien
atcacctgtatgcctggatgtgctc

SEQ ID NO: 2014087 - DNA, 25 bp, Homo sapien
cacatcacctgtatgcctggatgtg

SEQ ID NO: 2014088 - DNA, 25 bp, Homo sapien
ggctgcttctgttcacatctcttgg

SEQ ID NO: 2014089 - DNA, 25 bp, Homo sapien
tgccttgacacaacgagtgtaaagt

SEQ ID NO: 2014090 - DNA, 25 bp, Homo sapien
tgtctcctctcgtggatctgaagca

SEQ ID NO: 2014091 - DNA, 25 bp, Homo sapien
agtgtaaagtgtcttgttggcaacc

SEQ ID NO: 2014092 - DNA, 25 bp, Homo sapien
tctagttcctgcttgcgtctctcca

SEQ ID NO: 2014093 - DNA, 25 bp, Homo sapien
ttccgtatgtagctagctgctcctc

SEQ ID NO: 2014094 - DNA, 25 bp, Homo sapien
gtcttccgtatgtagctagctgctc

SEQ ID NO: 2014095 - DNA, 25 bp, Homo sapien
tggagtcttccgtatgtagctagct

SEQ ID NO: 2014096 - DNA, 25 bp, Homo sapien
ctcacattcaatgtgcagtgccctg

SEQ ID NO: 2014097 - DNA, 25 bp, Homo sapien
gctcctgaaactctgtgatagccat

SEQ ID NO: 2014098 - DNA, 25 bp, Homo sapien
tctgtgctcctgaaactctgtgata

SEQ ID NO: 2014099 - DNA, 25 bp, Homo sapien
cacattcaatgtgcagtgccctgca

SEQ ID NO: 2014100 - DNA, 25 bp, Homo sapien
gattagactgtaattctggtggagg

SEQ ID NO: 2014101 - DNA, 25 bp, Homo sapien
acacaagtccatatctcctaatctg

SEQ ID NO: 2014102 - DNA, 25 bp, Homo sapien
ttttattgctccaagtgctctaaga

SEQ ID NO: 2014103 - DNA, 25 bp, Homo sapien
tattgctccaagtgctctaagaagt

SEQ ID NO: 2014104 - DNA, 25 bp, Homo sapien
tctgttccacaagcaggagagttga

SEQ ID NO: 2014105 - DNA, 25 bp, Homo sapien
tagtttctaccacagtagttaccac

SEQ ID NO: 2014106 - DNA, 25 bp, Homo sapien
tactccatagagtttcttcatagca

SEQ ID NO: 2014107 - DNA, 25 bp, Homo sapien
catagcaagcattgtgactgtacct

SEQ ID NO: 2014108 - DNA, 25 bp, Homo sapien
tgcattctcaagacaccccacattt

SEQ ID NO: 2014109 - DNA, 25 bp, Homo sapien
ctacagctgcagattcttctcagtt

SEQ ID NO: 2014110 - DNA, 25 bp, Homo sapien
tacagctgcagattcttctcagttt

SEQ ID NO: 2014111 - DNA, 25 bp, Homo sapien
tccaatctcttctgtgtcacagcag

SEQ ID NO: 2014112 - DNA, 25 bp, Homo sapien
gtgtcacagcagctcactaatattt

SEQ ID NO: 2014113 - DNA, 25 bp, Homo sapien
gaccctttatcaacaatcaattgac

SEQ ID NO: 2014114 - DNA, 25 bp, Homo sapien
ttaacatccagttgatccagcacaa

SEQ ID NO: 2014115 - DNA, 25 bp, Homo sapien
ccactttgagttgatattttatgta

SEQ ID NO: 2014116 - DNA, 25 bp, Homo sapien
ttatgtattgtgtgagttaatgatc

SEQ ID NO: 2014117 - DNA, 25 bp, Homo sapien
tatatttgctccaacgcttctccag

SEQ ID NO: 2014118 - DNA, 25 bp, Homo sapien
ttagcctttcttggacagcatcctg

SEQ ID NO: 2014119 - DNA, 25 bp, Homo sapien
gcatcctgctttaagaatgtgtcat

SEQ ID NO: 2014120 - DNA, 25 bp, Homo sapien
ccaagaatgccagtaaaagccaact

SEQ ID NO: 2014121 - DNA, 25 bp, Homo sapien
tactataagagctaactatgaaaga

SEQ ID NO: 2014122 - DNA, 25 bp, Homo sapien
ctatgaaagataggcaacagacttc

SEQ ID NO: 2014123 - DNA, 25 bp, Homo sapien
tatatgtaaacatcaatacaagtat

SEQ ID NO: 2014124 - DNA, 25 bp, Homo sapien
tacaagtatactataagagctaact

SEQ ID NO: 2014125 - DNA, 25 bp, Homo sapien
gtgtttactaattcataatcttcac

SEQ ID NO: 2014126 - DNA, 25 bp, Homo sapien
tacaaacatgtttgtgtttactaat

SEQ ID NO: 2014127 - DNA, 25 bp, Homo sapien
ttcataatcttcacccagttctagt

SEQ ID NO: 2014128 - DNA, 25 bp, Homo sapien
caaacatgtttgtgtttactaattc

SEQ ID NO: 2014129 - DNA, 25 bp, Homo sapien
tttggaagggaagcatctggcaggt

SEQ ID NO: 2014130 - DNA, 25 bp, Homo sapien
ctttggaagggaagcatctggcagg

SEQ ID NO: 2014131 - DNA, 25 bp, Homo sapien
gtttctattacaatatgggcagaac

SEQ ID NO: 2014132 - DNA, 25 bp, Homo sapien
cctttggaagggaagcatctggcag

SEQ ID NO: 2014133 - DNA, 25 bp, Homo sapien
tctgcttcataattgatgtctgagc

SEQ ID NO: 2014134 - DNA, 25 bp, Homo sapien
tcccaatcgcagctaaatccagatc

SEQ ID NO: 2014135 - DNA, 25 bp, Homo sapien
tgcttcataattgatgtctgagctc

SEQ ID NO: 2014136 - DNA, 25 bp, Homo sapien
gatgtctgagctcccaatcgcagct

SEQ ID NO: 2014137 - DNA, 25 bp, Homo sapien
tcctccctaatggacacgtaattcc

SEQ ID NO: 2014138 - DNA, 25 bp, Homo sapien
gacactgaggaggtctgtgacttca

SEQ ID NO: 2014139 - DNA, 25 bp, Homo sapien
caattagggagtcagtaaccacctg

SEQ ID NO: 2014140 - DNA, 25 bp, Homo sapien
cacagtaggttggttattagccaga

SEQ ID NO: 2014141 - DNA, 25 bp, Homo sapien
gcctgctggatcattagctgtgtat

SEQ ID NO: 2014142 - DNA, 25 bp, Homo sapien
tcctgagaatataatgccttgcaca

SEQ ID NO: 2014143 - DNA, 25 bp, Homo sapien
aaacataatgtagtccgtcttccag

SEQ ID NO: 2014144 - DNA, 25 bp, Homo sapien
gagattctcaaagcccctatatgga

SEQ ID NO: 2014145 - DNA, 25 bp, Homo sapien
tttgcaggtgtgctttagtctgtgc

SEQ ID NO: 2014146 - DNA, 25 bp, Homo sapien
tgtgcaagggtcgttttatgttgca

SEQ ID NO: 2014147 - DNA, 25 bp, Homo sapien
tagtctgtgcaagggtcgttttatg

SEQ ID NO: 2014148 - DNA, 25 bp, Homo sapien
tgtgctttagtctgtgcaagggtcg

SEQ ID NO: 2014149 - DNA, 25 bp, Homo sapien
gtcagtttcaacagcaggagcttgc

SEQ ID NO: 2014150 - DNA, 25 bp, Homo sapien
cagtttcaacagcaggagcttgcat

SEQ ID NO: 2014151 - DNA, 25 bp, Homo sapien
ggtcagtttcaacagcaggagcttg

SEQ ID NO: 2014152 - DNA, 25 bp, Homo sapien
tcagtttcaacagcaggagcttgca

SEQ ID NO: 2014153 - DNA, 25 bp, Homo sapien
catcaccacctgtttaggcaagtgc

SEQ ID NO: 2014154 - DNA, 25 bp, Homo sapien
gattgggccaatgtagtccttttac

SEQ ID NO: 2014155 - DNA, 25 bp, Homo sapien
ccagggctggaagtcatatctaccc

SEQ ID NO: 2014156 - DNA, 25 bp, Homo sapien
gaagcatttcatggaaagcaagagc

SEQ ID NO: 2014157 - DNA, 25 bp, Homo sapien
cagtggccttgaaacagctatagct

SEQ ID NO: 2014158 - DNA, 25 bp, Homo sapien
tagctatgcttattgcctgacacat

SEQ ID NO: 2014159 - DNA, 25 bp, Homo sapien
ctcaaagccataggcttaaaggaat

SEQ ID NO: 2014160 - DNA, 25 bp, Homo sapien
ggtgaaattgcagatttcaagtcag

SEQ ID NO: 2014161 - DNA, 25 bp, Homo sapien
aagtgccggcactgagattcaaacc

SEQ ID NO: 2014162 - DNA, 25 bp, Homo sapien
caattcaatagcaccttctgagcca

SEQ ID NO: 2014163 - DNA, 25 bp, Homo sapien
gagaagactagcctcaagaaagtga

SEQ ID NO: 2014164 - DNA, 25 bp, Homo sapien
taaaattgcacatatgaacgaatca

SEQ ID NO: 2014165 - DNA, 25 bp, Homo sapien
ccttttttctgatcttcataatctg

SEQ ID NO: 2014166 - DNA, 25 bp, Homo sapien
ttttctgatcttcataatctggaaa

SEQ ID NO: 2014167 - DNA, 25 bp, Homo sapien
tctgatcttcataatctggaaatga

SEQ ID NO: 2014168 - DNA, 25 bp, Homo sapien
atcttcataatctggaaatgaaagc

SEQ ID NO: 2014169 - DNA, 25 bp, Homo sapien
cattgatatgtacattcgctatgtg

SEQ ID NO: 2014170 - DNA, 25 bp, Homo sapien
tatgtacattcgctatgtgacaggt

SEQ ID NO: 2014171 - DNA, 25 bp, Homo sapien
ctaggtaatcgctactgatctaaca

SEQ ID NO: 2014172 - DNA, 25 bp, Homo sapien
gatctaacaccaacaccattctcat

SEQ ID NO: 2014173 - DNA, 25 bp, Homo sapien
gctaaagaaagctagtaaattctcc

SEQ ID NO: 2014174 - DNA, 25 bp, Homo sapien
tgagttcgaaatgttagtgctaagc

SEQ ID NO: 2014175 - DNA, 25 bp, Homo sapien
tgcctagcttggaagccatagcact

SEQ ID NO: 2014176 - DNA, 25 bp, Homo sapien
gtcacaggaggttttaccaattaca

SEQ ID NO: 2014177 - DNA, 25 bp, Homo sapien
taggcaaaatttgcactgaggcagc

SEQ ID NO: 2014178 - DNA, 25 bp, Homo sapien
ttttaggcaaaatttgcactgaggc

SEQ ID NO: 2014179 - DNA, 25 bp, Homo sapien
ttaggcaaaatttgcactgaggcag

SEQ ID NO: 2014180 - DNA, 25 bp, Homo sapien
ggcaaaatttgcactgaggcagctt

SEQ ID NO: 2014181 - DNA, 25 bp, Homo sapien
aagagaactccacccattctcactg

SEQ ID NO: 2014182 - DNA, 25 bp, Homo sapien
tggccacctagaaagagaactccac

SEQ ID NO: 2014183 - DNA, 25 bp, Homo sapien
tggacaccagtttcatcggcctcag

SEQ ID NO: 2014184 - DNA, 25 bp, Homo sapien
tctcactgctagtctctttgttctc

SEQ ID NO: 2014185 - DNA, 25 bp, Homo sapien
catcagtattctgttcatcatcagc

SEQ ID NO: 2014186 - DNA, 25 bp, Homo sapien
catcatcagctcctgctgcgttcat

SEQ ID NO: 2014187 - DNA, 25 bp, Homo sapien
tgttcatcatcagctcctgctgcgt

SEQ ID NO: 2014188 - DNA, 25 bp, Homo sapien
gttcatcatcagctcctgctgcgtt

SEQ ID NO: 2014189 - DNA, 25 bp, Homo sapien
tgaatccaagccagttttaaaggaa

SEQ ID NO: 2014190 - DNA, 25 bp, Homo sapien
caagccagttttaaaggaaacacat

SEQ ID NO: 2014191 - DNA, 25 bp, Homo sapien
ctgccaatatgaatccaagccagtt

SEQ ID NO: 2014192 - DNA, 25 bp, Homo sapien
aggaaacacattcaaaatgacacat

SEQ ID NO: 2014193 - DNA, 25 bp, Homo sapien
gccagggtaaattctatcacacgtg

SEQ ID NO: 2014194 - DNA, 25 bp, Homo sapien
tatcacacgtgttatcatgactgtg

SEQ ID NO: 2014195 - DNA, 25 bp, Homo sapien
tctatcacacgtgttatcatgactg

SEQ ID NO: 2014196 - DNA, 25 bp, Homo sapien
gtggcagcggccagggtaaattcta

SEQ ID NO: 2014197 - DNA, 25 bp, Homo sapien
accgtcaatgatgggaatatcttcc

SEQ ID NO: 2014198 - DNA, 25 bp, Homo sapien
gaattgtcaccgtcaatgatgggaa

SEQ ID NO: 2014199 - DNA, 25 bp, Homo sapien
ctatgaattgtcaccgtcaatgatg

SEQ ID NO: 2014200 - DNA, 25 bp, Homo sapien
tgtcaccgtcaatgatgggaatatc

SEQ ID NO: 2014201 - DNA, 25 bp, Homo sapien
tcaaaataactggttcaaagttaca

SEQ ID NO: 2014202 - DNA, 25 bp, Homo sapien
gatgtcaaaataactggttcaaagt

SEQ ID NO: 2014203 - DNA, 25 bp, Homo sapien
ctgatgtcaaaataactggttcaaa

SEQ ID NO: 2014204 - DNA, 25 bp, Homo sapien
tcaaagttacaacaattatccaaag

SEQ ID NO: 2014205 - DNA, 25 bp, Homo sapien
gagttacctacaggtagtgatttca

SEQ ID NO: 2014206 - DNA, 25 bp, Homo sapien
tcttctccttctcgcacaaccagag

SEQ ID NO: 2014207 - DNA, 25 bp, Homo sapien
cttctcgcacaaccagagttaccta

SEQ ID NO: 2014208 - DNA, 25 bp, Homo sapien
agagttacctacaggtagtgatttc

SEQ ID NO: 2014209 - DNA, 25 bp, Homo sapien
tttgaatcaagagtaaaagtcactg

SEQ ID NO: 2014210 - DNA, 25 bp, Homo sapien
gagtcacaaggtagatattcttgca

SEQ ID NO: 2014211 - DNA, 25 bp, Homo sapien
tgattggccacgaaaccgcaggtta

SEQ ID NO: 2014212 - DNA, 25 bp, Homo sapien
ccgcaggttaaggtcgaataattgt

SEQ ID NO: 2014213 - DNA, 25 bp, Homo sapien
aatccaactggataggatacttagc

SEQ ID NO: 2014214 - DNA, 25 bp, Homo sapien
ttgaagaatccaactggataggata

SEQ ID NO: 2014215 - DNA, 25 bp, Homo sapien
gatacttagccagagatctgctcat

SEQ ID NO: 2014216 - DNA, 25 bp, Homo sapien
actggataggatacttagccagaga

SEQ ID NO: 2014217 - DNA, 25 bp, Homo sapien
tccgctttaccaagtttcctgtaca

SEQ ID NO: 2014218 - DNA, 25 bp, Homo sapien
ccgctttaccaagtttcctgtacat

SEQ ID NO: 2014219 - DNA, 25 bp, Homo sapien
ttccccataattcctgttggatgac

SEQ ID NO: 2014220 - DNA, 25 bp, Homo sapien
gcttgcatctttacctattccccat

SEQ ID NO: 2014221 - DNA, 25 bp, Homo sapien
gcatccacattgttgcttgcatctt

SEQ ID NO: 2014222 - DNA, 25 bp, Homo sapien
gtcattttgctttgcatccacattg

SEQ ID NO: 2014223 - DNA, 25 bp, Homo sapien
tgtctccccagactatgatataagc

SEQ ID NO: 2014224 - DNA, 25 bp, Homo sapien
ttgacctactctacacagcactttg

SEQ ID NO: 2014225 - DNA, 25 bp, Homo sapien
tcagtgcccatacactaagtacgtc

SEQ ID NO: 2014226 - DNA, 25 bp, Homo sapien
caagattattcagacctcagtgccc

SEQ ID NO: 2014227 - DNA, 25 bp, Homo sapien
agttttcactggaatagctttcaga

SEQ ID NO: 2014228 - DNA, 25 bp, Homo sapien
tcttcagttttcactggaatagctt

SEQ ID NO: 2014229 - DNA, 25 bp, Homo sapien
caagaaaatttactcttctcagatc

SEQ ID NO: 2014230 - DNA, 25 bp, Homo sapien
aatacaagaaaatttactcttctca

SEQ ID NO: 2014231 - DNA, 25 bp, Homo sapien
atcaactctagggcagcccaatctg

SEQ ID NO: 2014232 - DNA, 25 bp, Homo sapien
catcaactctagggcagcccaatct

SEQ ID NO: 2014233 - DNA, 25 bp, Homo sapien
tcaactctagggcagcccaatctgg

SEQ ID NO: 2014234 - DNA, 25 bp, Homo sapien
caactctagggcagcccaatctggc

SEQ ID NO: 2014235 - DNA, 25 bp, Homo sapien
caaggttgaggtcctcattgaggga

SEQ ID NO: 2014236 - DNA, 25 bp, Homo sapien
cgtccaaggttgaggtcctcattga

SEQ ID NO: 2014237 - DNA, 25 bp, Homo sapien
aggttgaggtcctcattgagggagt

SEQ ID NO: 2014238 - DNA, 25 bp, Homo sapien
tccaaggttgaggtcctcattgagg

SEQ ID NO: 2014239 - DNA, 25 bp, Homo sapien
tttagaatgcctgctcctaattttc

SEQ ID NO: 2014240 - DNA, 25 bp, Homo sapien
aatcatttagaatgcctgctcctaa

SEQ ID NO: 2014241 - DNA, 25 bp, Homo sapien
ggctttcctcagactagttgatcca

SEQ ID NO: 2014242 - DNA, 25 bp, Homo sapien
ttcctcagactagttgatccacctt

SEQ ID NO: 2014243 - DNA, 25 bp, Homo sapien
tgacaacattattagctcgactttt

SEQ ID NO: 2014244 - DNA, 25 bp, Homo sapien
tattagctcgactttttaatactga

SEQ ID NO: 2014245 - DNA, 25 bp, Homo sapien
taatactgaagcacagcgtgaagct

SEQ ID NO: 2014246 - DNA, 25 bp, Homo sapien
gcgtgaagctttagaaacactaagc

SEQ ID NO: 2014247 - DNA, 25 bp, Homo sapien
cctaagcgggttgttacaaattgct

SEQ ID NO: 2014248 - DNA, 25 bp, Homo sapien
tcaatttcctaagcgggttgttaca

SEQ ID NO: 2014249 - DNA, 25 bp, Homo sapien
tcctaagcgggttgttacaaattgc

SEQ ID NO: 2014250 - DNA, 25 bp, Homo sapien
ctaagcgggttgttacaaattgctt

SEQ ID NO: 2014251 - DNA, 25 bp, Homo sapien
cattctgaacaattacccatgattg

SEQ ID NO: 2014252 - DNA, 25 bp, Homo sapien
ggaaaacttgccgtcttacactgca

SEQ ID NO: 2014253 - DNA, 25 bp, Homo sapien
atgcaggaaaacttgccgtcttaca

SEQ ID NO: 2014254 - DNA, 25 bp, Homo sapien
ttcttgcaaagaacgttctacattc

SEQ ID NO: 2014255 - DNA, 25 bp, Homo sapien
aaggtggatccaaaatctctatagc

SEQ ID NO: 2014256 - DNA, 25 bp, Homo sapien
ctatcactctgggtacattcctcct

SEQ ID NO: 2014257 - DNA, 25 bp, Homo sapien
aaccctaaacattttgtcctcatag

SEQ ID NO: 2014258 - DNA, 25 bp, Homo sapien
gccttccttccactactacctgtcc

SEQ ID NO: 2014259 - DNA, 25 bp, Homo sapien
ctgtcccactgagccaaccctaaac

SEQ ID NO: 2014260 - DNA, 25 bp, Homo sapien
ggcgtatacaattccagcagacatg

SEQ ID NO: 2014261 - DNA, 25 bp, Homo sapien
aatcactggcagctggcgtatacaa

SEQ ID NO: 2014262 - DNA, 25 bp, Homo sapien
tccagcagacatgccagttttctcc

SEQ ID NO: 2014263 - DNA, 25 bp, Homo sapien
gagtaaagtttcctgaacgtggatc

SEQ ID NO: 2014264 - DNA, 25 bp, Homo sapien
cagactggatttcctgtatcaaatt

SEQ ID NO: 2014265 - DNA, 25 bp, Homo sapien
acttgaccctacactatcagactgg

SEQ ID NO: 2014266 - DNA, 25 bp, Homo sapien
gaccctacactatcagactggattt

SEQ ID NO: 2014267 - DNA, 25 bp, Homo sapien
ctaaaaacttgaccctacactatca

SEQ ID NO: 2014268 - DNA, 25 bp, Homo sapien
cactccttctgatactgggagatga

SEQ ID NO: 2014269 - DNA, 25 bp, Homo sapien
tgggagatgaagtcgcatttacaaa

SEQ ID NO: 2014270 - DNA, 25 bp, Homo sapien
aacgcatggactggattttgatggc

SEQ ID NO: 2014271 - DNA, 25 bp, Homo sapien
tttcactccttctgatactgggaga

SEQ ID NO: 2014272 - DNA, 25 bp, Homo sapien
taaagtgtttctattcaaatcttgc

SEQ ID NO: 2014273 - DNA, 25 bp, Homo sapien
ttctattcaaatcttgctgttcaca

SEQ ID NO: 2014274 - DNA, 25 bp, Homo sapien
tcaaagtaaagtgtttctattcaaa

SEQ ID NO: 2014275 - DNA, 25 bp, Homo sapien
aagtgtttctattcaaatcttgctg

SEQ ID NO: 2014276 - DNA, 25 bp, Homo sapien
gccacatgcgaatttataacagtac

SEQ ID NO: 2014277 - DNA, 25 bp, Homo sapien
ctgtaaagccacatgcgaatttata

SEQ ID NO: 2014278 - DNA, 25 bp, Homo sapien
aaagccacatgcgaatttataacag

SEQ ID NO: 2014279 - DNA, 25 bp, Homo sapien
gtaaagccacatgcgaatttataac

SEQ ID NO: 2014280 - DNA, 25 bp, Homo sapien
attcacattctaagggaaagaaggc

SEQ ID NO: 2014281 - DNA, 25 bp, Homo sapien
gaacgtcaattccacaggggaagaa

SEQ ID NO: 2014282 - DNA, 25 bp, Homo sapien
tattcacattctaagggaaagaagg

SEQ ID NO: 2014283 - DNA, 25 bp, Homo sapien
gaaggctctctcttcatagatctca

SEQ ID NO: 2014284 - DNA, 25 bp, Homo sapien
cgttgccccctgaactgcgtgcagt

SEQ ID NO: 2014285 - DNA, 25 bp, Homo sapien
aactgcgtgcagtttcagcttaagt

SEQ ID NO: 2014286 - DNA, 25 bp, Homo sapien
tgcagtttcagcttaagttggcttt

SEQ ID NO: 2014287 - DNA, 25 bp, Homo sapien
tctttcctgtctgcatcaccgttgc

SEQ ID NO: 2014288 - DNA, 25 bp, Homo sapien
tagaagaaataaagatacttcgtta

SEQ ID NO: 2014289 - DNA, 25 bp, Homo sapien
tttgacagtggcacgcagcattcat

SEQ ID NO: 2014290 - DNA, 25 bp, Homo sapien
taacacctccgtagatgatttgaca

SEQ ID NO: 2014291 - DNA, 25 bp, Homo sapien
tctccataacacctccgtagatgat

SEQ ID NO: 2014292 - DNA, 25 bp, Homo sapien
gatgatttgacagtggcacgcagca

SEQ ID NO: 2014293 - DNA, 25 bp, Homo sapien
ctgaagtgtagatgaattttagatc

SEQ ID NO: 2014294 - DNA, 25 bp, Homo sapien
aagtgtagatgaattttagatcctc

SEQ ID NO: 2014295 - DNA, 25 bp, Homo sapien
gattgtcttctaagttttcccctga

SEQ ID NO: 2014296 - DNA, 25 bp, Homo sapien
gtggtcaagattgtcttctaagttt

SEQ ID NO: 2014297 - DNA, 25 bp, Homo sapien
ggtcatatttttcctcacgactgct

SEQ ID NO: 2014298 - DNA, 25 bp, Homo sapien
tggtcatatttttcctcacgactgc

SEQ ID NO: 2014299 - DNA, 25 bp, Homo sapien
cctcacgactgctgttcgttatcat

SEQ ID NO: 2014300 - DNA, 25 bp, Homo sapien
tttggtcatatttttcctcacgact

SEQ ID NO: 2014301 - DNA, 25 bp, Homo sapien
cactcaagaacattactggaggtgt

SEQ ID NO: 2014302 - DNA, 25 bp, Homo sapien
tcaaaatctgcgtcctccaaatgtt

SEQ ID NO: 2014303 - DNA, 25 bp, Homo sapien
tggggtggacacgttcttctgcttt

SEQ ID NO: 2014304 - DNA, 25 bp, Homo sapien
aaatgttggcgctactggtgtctca

SEQ ID NO: 2014305 - DNA, 25 bp, Homo sapien
catccatactggcaattttgtacct

SEQ ID NO: 2014306 - DNA, 25 bp, Homo sapien
gggcatatccccatccatactggca

SEQ ID NO: 2014307 - DNA, 25 bp, Homo sapien
tatctgaaggatagggcatatcccc

SEQ ID NO: 2014308 - DNA, 25 bp, Homo sapien
catactggcaattttgtacctctcc

SEQ ID NO: 2014309 - DNA, 25 bp, Homo sapien
caatgacagattggtttagtctcaa

SEQ ID NO: 2014310 - DNA, 25 bp, Homo sapien
agttgtttgcaggagcccgatagtc

SEQ ID NO: 2014311 - DNA, 25 bp, Homo sapien
caggagcccgatagtcaatgacaga

SEQ ID NO: 2014312 - DNA, 25 bp, Homo sapien
gacagattggtttagtctcaaacaa

SEQ ID NO: 2014313 - DNA, 25 bp, Homo sapien
tagaaagcataacaaggttagaagc

SEQ ID NO: 2014314 - DNA, 25 bp, Homo sapien
gaagctgggttagtactgcagtaca

SEQ ID NO: 2014315 - DNA, 25 bp, Homo sapien
cggtagtagccagcaagcagaaatg

SEQ ID NO: 2014316 - DNA, 25 bp, Homo sapien
tgcagtacaactcagcggcttcctc

SEQ ID NO: 2014317 - DNA, 25 bp, Homo sapien
tgagtaagagtgtccccgtttttca

SEQ ID NO: 2014318 - DNA, 25 bp, Homo sapien
tgacattgtcctggcaaaacaccat

SEQ ID NO: 2014319 - DNA, 25 bp, Homo sapien
ccaacacagtaaggggatgagtaag

SEQ ID NO: 2014320 - DNA, 25 bp, Homo sapien
gtccccgtttttcacactgaatctg

SEQ ID NO: 2014321 - DNA, 25 bp, Homo sapien
cagactgttattaaagctgtccatc

SEQ ID NO: 2014322 - DNA, 25 bp, Homo sapien
caaatgaggcccaagcattacgttg

SEQ ID NO: 2014323 - DNA, 25 bp, Homo sapien
cattacgttgaatattgtactgtgc

SEQ ID NO: 2014324 - DNA, 25 bp, Homo sapien
ccatcctattgtcggtggtgtgcca

SEQ ID NO: 2014325 - DNA, 25 bp, Homo sapien
tgccagttgtagaatgccggtgcca

SEQ ID NO: 2014326 - DNA, 25 bp, Homo sapien
tttagcagtaggagcatctggctcc

SEQ ID NO: 2014327 - DNA, 25 bp, Homo sapien
tgccaatctgcaagagataatttag

SEQ ID NO: 2014328 - DNA, 25 bp, Homo sapien
aatttagcagtaggagcatctggct

SEQ ID NO: 2014329 - DNA, 25 bp, Homo sapien
cacttgccacagtgttccacaatat

SEQ ID NO: 2014330 - DNA, 25 bp, Homo sapien
tcacttgccacagtgttccacaata

SEQ ID NO: 2014331 - DNA, 25 bp, Homo sapien
tcacccatgcagctggtaccaggac

SEQ ID NO: 2014332 - DNA, 25 bp, Homo sapien
cacccatgcagctggtaccaggaca

SEQ ID NO: 2014333 - DNA, 25 bp, Homo sapien
cccatgcagctggtaccaggacaat

SEQ ID NO: 2014334 - DNA, 25 bp, Homo sapien
catgcagctggtaccaggacaatta

SEQ ID NO: 2014335 - DNA, 25 bp, Homo sapien
tatttatgaaggagtcagtggaggc

SEQ ID NO: 2014336 - DNA, 25 bp, Homo sapien
tagcaacaagactcatcaattatgc

SEQ ID NO: 2014337 - DNA, 25 bp, Homo sapien
tcaattatgctctcaacaaaaaggt

SEQ ID NO: 2014338 - DNA, 25 bp, Homo sapien
tggcctgttagaagatagcaacaag

SEQ ID NO: 2014339 - DNA, 25 bp, Homo sapien
tagtcataatagcaggtacacttac

SEQ ID NO: 2014340 - DNA, 25 bp, Homo sapien
gccacagaacaattagttaatagct

SEQ ID NO: 2014341 - DNA, 25 bp, Homo sapien
tacctgttagacttagggtcatccc

SEQ ID NO: 2014342 - DNA, 25 bp, Homo sapien
caaaattatgtctataagccacaga

SEQ ID NO: 2014343 - DNA, 25 bp, Homo sapien
taaacaacgttcttccaactgtgaa

SEQ ID NO: 2014344 - DNA, 25 bp, Homo sapien
caaaggcttctcgaagtaaacaacg

SEQ ID NO: 2014345 - DNA, 25 bp, Homo sapien
gaagagacagtcttaatccaggata

SEQ ID NO: 2014346 - DNA, 25 bp, Homo sapien
taaggagccatcttttaaacttcag

SEQ ID NO: 2014347 - DNA, 25 bp, Homo sapien
ctttgttcttcagatagcctggtga

SEQ ID NO: 2014348 - DNA, 25 bp, Homo sapien
tacttaaaaagaggacatatcactg

SEQ ID NO: 2014349 - DNA, 25 bp, Homo sapien
actacaagtattcgttgagtaccta

SEQ ID NO: 2014350 - DNA, 25 bp, Homo sapien
gtttgttgctcaggtcactaattcc

SEQ ID NO: 2014351 - DNA, 25 bp, Homo sapien
cctgaaattgggtagaggacacttg

SEQ ID NO: 2014352 - DNA, 25 bp, Homo sapien
tcatgagttaatgcccagcctattg

SEQ ID NO: 2014353 - DNA, 25 bp, Homo sapien
taaaactcccttactggtagaagca

SEQ ID NO: 2014354 - DNA, 25 bp, Homo sapien
gatcaggcccacagtcggatttcag

SEQ ID NO: 2014355 - DNA, 25 bp, Homo sapien
atattcagggtgcaatggccatgga

SEQ ID NO: 2014356 - DNA, 25 bp, Homo sapien
cttttgagatcacgcaagattgggc

SEQ ID NO: 2014357 - DNA, 25 bp, Homo sapien
caggccaaacttgcttagcttttga

SEQ ID NO: 2014358 - DNA, 25 bp, Homo sapien
agattgggcatattcagggtgcaat

SEQ ID NO: 2014359 - DNA, 25 bp, Homo sapien
cgtggagtcttcgtgcagaatagga

SEQ ID NO: 2014360 - DNA, 25 bp, Homo sapien
tgcaaataaattccaatcgttcttt

SEQ ID NO: 2014361 - DNA, 25 bp, Homo sapien
cttcgtgcagaataggaagatgttg

SEQ ID NO: 2014362 - DNA, 25 bp, Homo sapien
ggtcctttattgacgtggagtcttc

SEQ ID NO: 2014363 - DNA, 25 bp, Homo sapien
gaagaattaatctttccaatacgat

SEQ ID NO: 2014364 - DNA, 25 bp, Homo sapien
agaattaatctttccaatacgattt

SEQ ID NO: 2014365 - DNA, 25 bp, Homo sapien
ctgaagaattaatctttccaatacg

SEQ ID NO: 2014366 - DNA, 25 bp, Homo sapien
tgaagaattaatctttccaatacga

SEQ ID NO: 2014367 - DNA, 25 bp, Homo sapien
tggtggctgggatccactgtgtcaa

SEQ ID NO: 2014368 - DNA, 25 bp, Homo sapien
ggtgatgcagacaaaataccttctt

SEQ ID NO: 2014369 - DNA, 25 bp, Homo sapien
gggatttatcttggtgctgcaccag

SEQ ID NO: 2014370 - DNA, 25 bp, Homo sapien
taggtgagtcttctgtggcagtagc

SEQ ID NO: 2014371 - DNA, 25 bp, Homo sapien
ctctttggtactccctactaatatt

SEQ ID NO: 2014372 - DNA, 25 bp, Homo sapien
aagtaaccagtgtcactacatctat

SEQ ID NO: 2014373 - DNA, 25 bp, Homo sapien
ctgtaagtaaccagtgtcactacat

SEQ ID NO: 2014374 - DNA, 25 bp, Homo sapien
taaccagtgtcactacatctattga

SEQ ID NO: 2014375 - DNA, 25 bp, Homo sapien
gtaagtaaccagtgtcactacatct

SEQ ID NO: 2014376 - DNA, 25 bp, Homo sapien
ctctgtaactgaaacagttatctaa

SEQ ID NO: 2014377 - DNA, 25 bp, Homo sapien
tctgtaactgaaacagttatctaaa

SEQ ID NO: 2014378 - DNA, 25 bp, Homo sapien
tgaagcatgcgcagaaggatatatg

SEQ ID NO: 2014379 - DNA, 25 bp, Homo sapien
ctgaagcatgcgcagaaggatatat

SEQ ID NO: 2014380 - DNA, 25 bp, Homo sapien
agcatgcgcagaaggatatatgtgc

SEQ ID NO: 2014381 - DNA, 25 bp, Homo sapien
gaagcatgcgcagaaggatatatgt

SEQ ID NO: 2014382 - DNA, 25 bp, Homo sapien
tgtatggatttaggcttattttgct

SEQ ID NO: 2014383 - DNA, 25 bp, Homo sapien
caaactgttccatgatatgggtaaa

SEQ ID NO: 2014384 - DNA, 25 bp, Homo sapien
gctgtagcaacacagaatccttgac

SEQ ID NO: 2014385 - DNA, 25 bp, Homo sapien
ttcctatactccacaagcagctgta

SEQ ID NO: 2014386 - DNA, 25 bp, Homo sapien
tcattatacatctgctcatcagcag

SEQ ID NO: 2014387 - DNA, 25 bp, Homo sapien
tctttccaggcggaagcaaaaagaa

SEQ ID NO: 2014388 - DNA, 25 bp, Homo sapien
tatacatctgctcatcagcagaaca

SEQ ID NO: 2014389 - DNA, 25 bp, Homo sapien
ttctctctttccaggcggaagcaaa

SEQ ID NO: 2014390 - DNA, 25 bp, Homo sapien
aaagggggtcccatagtgcagcggt

SEQ ID NO: 2014391 - DNA, 25 bp, Homo sapien
gcagggcccgccaagcccccgccca

SEQ ID NO: 2014392 - DNA, 25 bp, Homo sapien
ccgagtgcagggcccgccaagcccc

SEQ ID NO: 2014393 - DNA, 25 bp, Homo sapien
aagggggtcccatagtgcagcggtg

SEQ ID NO: 2014394 - DNA, 25 bp, Homo sapien
tgttacagttcttaacacggtgagt

SEQ ID NO: 2014395 - DNA, 25 bp, Homo sapien
ttacagttcttaacacggtgagtgt

SEQ ID NO: 2014396 - DNA, 25 bp, Homo sapien
tacagttcttaacacggtgagtgtt

SEQ ID NO: 2014397 - DNA, 25 bp, Homo sapien
cagttcttaacacggtgagtgttac

SEQ ID NO: 2014398 - DNA, 25 bp, Homo sapien
aggtccctcatccagcatccgggat

SEQ ID NO: 2014399 - DNA, 25 bp, Homo sapien
cgtatcaaattggtgtgaaaggcct

SEQ ID NO: 2014400 - DNA, 25 bp, Homo sapien
caaaccgtatcaaattggtgtgaaa

SEQ ID NO: 2014401 - DNA, 25 bp, Homo sapien
ttacagttcaactttacattccagc

SEQ ID NO: 2014402 - DNA, 25 bp, Homo sapien
tcgtgatccacaggaagcttgattg

SEQ ID NO: 2014403 - DNA, 25 bp, Homo sapien
ttgattgatggtggcttcccttgtc

SEQ ID NO: 2014404 - DNA, 25 bp, Homo sapien
atccacaggaagcttgattgatggt

SEQ ID NO: 2014405 - DNA, 25 bp, Homo sapien
tgtcgtgatccacaggaagcttgat

SEQ ID NO: 2014406 - DNA, 25 bp, Homo sapien
tgccaagccctgtgataaatttctg

SEQ ID NO: 2014407 - DNA, 25 bp, Homo sapien
gggcagtcggacttccaggcattct

SEQ ID NO: 2014408 - DNA, 25 bp, Homo sapien
cattcttgctgagtccgggcatcca

SEQ ID NO: 2014409 - DNA, 25 bp, Homo sapien
catttgacaaaaagtgtggccgagc

SEQ ID NO: 2014410 - DNA, 25 bp, Homo sapien
gagtctggtactaaagaccctggta

SEQ ID NO: 2014411 - DNA, 25 bp, Homo sapien
aaggacagtggcagtatagagcatc

SEQ ID NO: 2014412 - DNA, 25 bp, Homo sapien
cagaaacacgggacacagggtggaa

SEQ ID NO: 2014413 - DNA, 25 bp, Homo sapien
tactgcatctctgaaccatggcttg

SEQ ID NO: 2014414 - DNA, 25 bp, Homo sapien
caagagttctgctgttcatttgtgt

SEQ ID NO: 2014415 - DNA, 25 bp, Homo sapien
cacagtggggagacttctgactata

SEQ ID NO: 2014416 - DNA, 25 bp, Homo sapien
tctgactatacttgccaattcatgg

SEQ ID NO: 2014417 - DNA, 25 bp, Homo sapien
ccaattcatgggagcaagagttctg

SEQ ID NO: 2014418 - DNA, 25 bp, Homo sapien
catgttccagttcaagcactcacaa

SEQ ID NO: 2014419 - DNA, 25 bp, Homo sapien
tgaaggcctaagaaacaggagcact

SEQ ID NO: 2014420 - DNA, 25 bp, Homo sapien
cactcacaagcagagagcgaattca

SEQ ID NO: 2014421 - DNA, 25 bp, Homo sapien
agattctgatctagtcttgaaggcc

SEQ ID NO: 2014422 - DNA, 25 bp, Homo sapien
gtaaagacctgagcgaaaatgaagc

SEQ ID NO: 2014423 - DNA, 25 bp, Homo sapien
caaattggccaatgactgttgtcaa

SEQ ID NO: 2014424 - DNA, 25 bp, Homo sapien
taagattagctactgcagaaggaac

SEQ ID NO: 2014425 - DNA, 25 bp, Homo sapien
gacttcaagttacaccaaagcagta

SEQ ID NO: 2014426 - DNA, 25 bp, Homo sapien
caccgcatccggcttattaatttca

SEQ ID NO: 2014427 - DNA, 25 bp, Homo sapien
tggcggtctactgcggaccctagct

SEQ ID NO: 2014428 - DNA, 25 bp, Homo sapien
cacctctgaggttctagaaattctc

SEQ ID NO: 2014429 - DNA, 25 bp, Homo sapien
ttctccagtacaccattgatgggta

SEQ ID NO: 2014430 - DNA, 25 bp, Homo sapien
tagagtatgccaacctgacagtctg

SEQ ID NO: 2014431 - DNA, 25 bp, Homo sapien
cactttggctgtttaatcttggaca

SEQ ID NO: 2014432 - DNA, 25 bp, Homo sapien
tcaagttacttgacctagctgaaat

SEQ ID NO: 2014433 - DNA, 25 bp, Homo sapien
tagaaaatccatagctcccaagcgt

SEQ ID NO: 2014434 - DNA, 25 bp, Homo sapien
tctataccatctgcttgaattgtaa

SEQ ID NO: 2014435 - DNA, 25 bp, Homo sapien
gaggttgtggcacaggaccaaagca

SEQ ID NO: 2014436 - DNA, 25 bp, Homo sapien
aggaccaaagcatatctataccatc

SEQ ID NO: 2014437 - DNA, 25 bp, Homo sapien
gaccaaagcatatctataccatctg

SEQ ID NO: 2014438 - DNA, 25 bp, Homo sapien
tcattcgtaatgtatagagctttct

SEQ ID NO: 2014439 - DNA, 25 bp, Homo sapien
tcatctttaacacagtaacgtttca

SEQ ID NO: 2014440 - DNA, 25 bp, Homo sapien
gtatagagctttcttaatctttcca

SEQ ID NO: 2014441 - DNA, 25 bp, Homo sapien
cagtaacgtttcatctcattcgtaa

SEQ ID NO: 2014442 - DNA, 25 bp, Homo sapien
gaatgtagtgtttgatgaatgtaac

SEQ ID NO: 2014443 - DNA, 25 bp, Homo sapien
tatagatactgaatggccacaatta

SEQ ID NO: 2014444 - DNA, 25 bp, Homo sapien
ctctgtaagtgattatagatactga

SEQ ID NO: 2014445 - DNA, 25 bp, Homo sapien
agtgtttgatgaatgtaactacaac

SEQ ID NO: 2014446 - DNA, 25 bp, Homo sapien
cacgtttggtttcgccatcatagga

SEQ ID NO: 2014447 - DNA, 25 bp, Homo sapien
cagagtttgcctactgtaatgcatc

SEQ ID NO: 2014448 - DNA, 25 bp, Homo sapien
aggactctggagacggatttcttga

SEQ ID NO: 2014449 - DNA, 25 bp, Homo sapien
cagctacagacaaagtctaagggca

SEQ ID NO: 2014450 - DNA, 25 bp, Homo sapien
gatgggtcaggaagatattcccccc

SEQ ID NO: 2014451 - DNA, 25 bp, Homo sapien
cgattgtgtataccagttgaagtca

SEQ ID NO: 2014452 - DNA, 25 bp, Homo sapien
ggcattggccaccagacgagatcga

SEQ ID NO: 2014453 - DNA, 25 bp, Homo sapien
cccccctatggtatagtattgtgaa

SEQ ID NO: 2014454 - DNA, 25 bp, Homo sapien
catttgtacttgaagtactgtttcc

SEQ ID NO: 2014455 - DNA, 25 bp, Homo sapien
tcggtccacctgcatttgtacttga

SEQ ID NO: 2014456 - DNA, 25 bp, Homo sapien
ccacctgcatttgtacttgaagtac

SEQ ID NO: 2014457 - DNA, 25 bp, Homo sapien
ggtccacctgcatttgtacttgaag

SEQ ID NO: 2014458 - DNA, 25 bp, Homo sapien
cacatgttttattaggtcctttctc

SEQ ID NO: 2014459 - DNA, 25 bp, Homo sapien
gttgtcaagtttagggtcaacacat

SEQ ID NO: 2014460 - DNA, 25 bp, Homo sapien
caatttctggtttgattagaagacc

SEQ ID NO: 2014461 - DNA, 25 bp, Homo sapien
gcttaagctgttgtcaagtttaggg

SEQ ID NO: 2014462 - DNA, 25 bp, Homo sapien
tgaaagccgtgatcagttgagctcc

SEQ ID NO: 2014463 - DNA, 25 bp, Homo sapien
ctcctgaggcatgaaggcaaagtca

SEQ ID NO: 2014464 - DNA, 25 bp, Homo sapien
tcagttgagctcctgaggcatgaag

SEQ ID NO: 2014465 - DNA, 25 bp, Homo sapien
cttagcctgtcgtgaaagccgtgat

SEQ ID NO: 2014466 - DNA, 25 bp, Homo sapien
ccagggagccactgagacttcggcg

SEQ ID NO: 2014467 - DNA, 25 bp, Homo sapien
tgtgcatccgaaagaacgtgcgctc

SEQ ID NO: 2014468 - DNA, 25 bp, Homo sapien
gcagactggaggaaccggctcgaca

SEQ ID NO: 2014469 - DNA, 25 bp, Homo sapien
aaaagaacgcgaagacggagccgct

SEQ ID NO: 2014470 - DNA, 25 bp, Homo sapien
gccaagggaaactccacacggacat

SEQ ID NO: 2014471 - DNA, 25 bp, Homo sapien
tgtcaacaccggctttccgggccaa

SEQ ID NO: 2014472 - DNA, 25 bp, Homo sapien
cacaagcctgtcctgccttgcagag

SEQ ID NO: 2014473 - DNA, 25 bp, Homo sapien
cacatctcactgcaacacgcagtaa

SEQ ID NO: 2014474 - DNA, 25 bp, Homo sapien
agacctctgcagaacccggcggcac

SEQ ID NO: 2014475 - DNA, 25 bp, Homo sapien
tggtcctctttgaggagagtgctcc

SEQ ID NO: 2014476 - DNA, 25 bp, Homo sapien
agccggcgcggagttgtgcccccat

SEQ ID NO: 2014477 - DNA, 25 bp, Homo sapien
ccccatcagtccgaggttgagggag

SEQ ID NO: 2014478 - DNA, 25 bp, Homo sapien
cggaggggacgcaggatgcagatga

SEQ ID NO: 2014479 - DNA, 25 bp, Homo sapien
gaggggacgcaggatgcagatgaac

SEQ ID NO: 2014480 - DNA, 25 bp, Homo sapien
aggcggaggggacgcaggatgcaga

SEQ ID NO: 2014481 - DNA, 25 bp, Homo sapien
tgccaggcggaggggacgcaggatg

SEQ ID NO: 2014482 - DNA, 25 bp, Homo sapien
taccggcaagtagcagtgtaccatg

SEQ ID NO: 2014483 - DNA, 25 bp, Homo sapien
tgtaccatgtgcacccatgaagaag

SEQ ID NO: 2014484 - DNA, 25 bp, Homo sapien
cacactggaaggttgaataccggca

SEQ ID NO: 2014485 - DNA, 25 bp, Homo sapien
tgaagcggtacagaataacgggtct

SEQ ID NO: 2014486 - DNA, 25 bp, Homo sapien
actatgacatttaagaaatccgtag

SEQ ID NO: 2014487 - DNA, 25 bp, Homo sapien
tatgacatttaagaaatccgtaggg

SEQ ID NO: 2014488 - DNA, 25 bp, Homo sapien
gaactatgacatttaagaaatccgt

SEQ ID NO: 2014489 - DNA, 25 bp, Homo sapien
ctgaactatgacatttaagaaatcc

SEQ ID NO: 2014490 - DNA, 25 bp, Homo sapien
aatagccttcgccaaagaatggtgt

SEQ ID NO: 2014491 - DNA, 25 bp, Homo sapien
tgctgaatagccttcgccaaagaat

SEQ ID NO: 2014492 - DNA, 25 bp, Homo sapien
ggcttagtagctcttgcctccggca

SEQ ID NO: 2014493 - DNA, 25 bp, Homo sapien
gattggaagaggtcaccactgctga

SEQ ID NO: 2014494 - DNA, 25 bp, Homo sapien
cacaggaaaagagctattagctgca

SEQ ID NO: 2014495 - DNA, 25 bp, Homo sapien
aatggcagaactccactttgcccaa

SEQ ID NO: 2014496 - DNA, 25 bp, Homo sapien
acacaggaaaagagctattagctgc

SEQ ID NO: 2014497 - DNA, 25 bp, Homo sapien
agaactccactttgcccaacttcat

SEQ ID NO: 2014498 - DNA, 25 bp, Homo sapien
cgggacctccctgattggaaatagg

SEQ ID NO: 2014499 - DNA, 25 bp, Homo sapien
gggtctgaacccatgtattcctcca

SEQ ID NO: 2014500 - DNA, 25 bp, Homo sapien
acacccagctgcgcttggtccggga

SEQ ID NO: 2014501 - DNA, 25 bp, Homo sapien
tggaaatagggctttgatctggacc

SEQ ID NO: 2014502 - DNA, 25 bp, Homo sapien
acatttctgggcacagacatcacct

SEQ ID NO: 2014503 - DNA, 25 bp, Homo sapien
atttctgggcacagacatcacctcc

SEQ ID NO: 2014504 - DNA, 25 bp, Homo sapien
tctgggcacagacatcacctcccaa

SEQ ID NO: 2014505 - DNA, 25 bp, Homo sapien
tgggcacagacatcacctcccaaaa

SEQ ID NO: 2014506 - DNA, 25 bp, Homo sapien
gaccatctaagtggcctaggttgaa

SEQ ID NO: 2014507 - DNA, 25 bp, Homo sapien
tgtcaatttgacacatacggtagtt

SEQ ID NO: 2014508 - DNA, 25 bp, Homo sapien
cccaaatagctagattgtgttagga

SEQ ID NO: 2014509 - DNA, 25 bp, Homo sapien
ttaatgatattaggcaatttgcccc

SEQ ID NO: 2014510 - DNA, 25 bp, Homo sapien
ttgatttctactggggtaataggta

SEQ ID NO: 2014511 - DNA, 25 bp, Homo sapien
taaagcaaagccaatcctgcaaact

SEQ ID NO: 2014512 - DNA, 25 bp, Homo sapien
gatttctactggggtaataggtata

SEQ ID NO: 2014513 - DNA, 25 bp, Homo sapien
agcaaagccaatcctgcaaactgca

SEQ ID NO: 2014514 - DNA, 25 bp, Homo sapien
taagagatggacctcaggctacctg

SEQ ID NO: 2014515 - DNA, 25 bp, Homo sapien
aagacaattcctgcttccactaaga

SEQ ID NO: 2014516 - DNA, 25 bp, Homo sapien
tgcttgaagtcgcatcatctgtaag

SEQ ID NO: 2014517 - DNA, 25 bp, Homo sapien
gttagggagccagtatgcaaaccca

SEQ ID NO: 2014518 - DNA, 25 bp, Homo sapien
gcaagcccagctaagtataaggaca

SEQ ID NO: 2014519 - DNA, 25 bp, Homo sapien
gacagtttgagaagtcatgtcatac

SEQ ID NO: 2014520 - DNA, 25 bp, Homo sapien
tattgaggttcaatgctgaccttca

SEQ ID NO: 2014521 - DNA, 25 bp, Homo sapien
acctcctagaaataagtgtcatcct

SEQ ID NO: 2014522 - DNA, 25 bp, Homo sapien
caacgtcctctcaaattctacggaa

SEQ ID NO: 2014523 - DNA, 25 bp, Homo sapien
tacctgactaatgtggtattcataa

SEQ ID NO: 2014524 - DNA, 25 bp, Homo sapien
ctattaagggttagtgcaaatacct

SEQ ID NO: 2014525 - DNA, 25 bp, Homo sapien
tctacggaaatttttggaccactga

SEQ ID NO: 2014526 - DNA, 25 bp, Homo sapien
ggagagagtggaccacatcacggaa

SEQ ID NO: 2014527 - DNA, 25 bp, Homo sapien
tcaatgcaaagaagccccaggtatg

SEQ ID NO: 2014528 - DNA, 25 bp, Homo sapien
cccaggtatggctactgaatctcca

SEQ ID NO: 2014529 - DNA, 25 bp, Homo sapien
ccattttcttagaggcagagtggcc

SEQ ID NO: 2014530 - DNA, 25 bp, Homo sapien
cagagtggcccaattggaaggtcaa

SEQ ID NO: 2014531 - DNA, 25 bp, Homo sapien
acagagccctggtagaaacaggcat

SEQ ID NO: 2014532 - DNA, 25 bp, Homo sapien
gacagagccctggtagaaacaggca

SEQ ID NO: 2014533 - DNA, 25 bp, Homo sapien
ttttcctgaagtcttacaactgtct

SEQ ID NO: 2014534 - DNA, 25 bp, Homo sapien
cacagacatccaattcagctcgatg

SEQ ID NO: 2014535 - DNA, 25 bp, Homo sapien
aattcagctcgatgcaaattccctt

SEQ ID NO: 2014536 - DNA, 25 bp, Homo sapien
gacatccaattcagctcgatgcaaa

SEQ ID NO: 2014537 - DNA, 25 bp, Homo sapien
tttggccttttcagcatgctcacca

SEQ ID NO: 2014538 - DNA, 25 bp, Homo sapien
tggctgactcttgatcctccttctt

SEQ ID NO: 2014539 - DNA, 25 bp, Homo sapien
ttggctgactcttgatcctccttct

SEQ ID NO: 2014540 - DNA, 25 bp, Homo sapien
gccttttcagcatgctcaccaaata

SEQ ID NO: 2014541 - DNA, 25 bp, Homo sapien
ctgtaagtgattctttccctgcact

SEQ ID NO: 2014542 - DNA, 25 bp, Homo sapien
tgtaagtgattctttccctgcactg

SEQ ID NO: 2014543 - DNA, 25 bp, Homo sapien
tctgtaagtgattctttccctgcac

SEQ ID NO: 2014544 - DNA, 25 bp, Homo sapien
ccacgggtttgttggtgagcctatc

SEQ ID NO: 2014545 - DNA, 25 bp, Homo sapien
gaactcctgccgtgtatgggccatc

SEQ ID NO: 2014546 - DNA, 25 bp, Homo sapien
tatccagcgcttgagctcggagcgt

SEQ ID NO: 2014547 - DNA, 25 bp, Homo sapien
tttgatgacaaactccgactcgggc

SEQ ID NO: 2014548 - DNA, 25 bp, Homo sapien
gcatccgtcgctgtcacttgtacca

SEQ ID NO: 2014549 - DNA, 25 bp, Homo sapien
ccttgcagaatactgtagaccactc

SEQ ID NO: 2014550 - DNA, 25 bp, Homo sapien
tgttgccatatgtaggatcatcagc

SEQ ID NO: 2014551 - DNA, 25 bp, Homo sapien
gagaagtacggctgtccttgcagaa

SEQ ID NO: 2014552 - DNA, 25 bp, Homo sapien
tatcgttgacatcagttagggtcac

SEQ ID NO: 2014553 - DNA, 25 bp, Homo sapien
tagttcctgacagtcctccattttg

SEQ ID NO: 2014554 - DNA, 25 bp, Homo sapien
cattttgaccaaccatatcctttgc

SEQ ID NO: 2014555 - DNA, 25 bp, Homo sapien
gacaagcaaatactggtctttagcc

SEQ ID NO: 2014556 - DNA, 25 bp, Homo sapien
ggtaatgactctgggacgttatatt

SEQ ID NO: 2014557 - DNA, 25 bp, Homo sapien
aaatgcccaaaccatcaccatccac

SEQ ID NO: 2014558 - DNA, 25 bp, Homo sapien
ggccacaactgaggctacaggtaat

SEQ ID NO: 2014559 - DNA, 25 bp, Homo sapien
cacaatcttgtactccatttcagca

SEQ ID NO: 2014560 - DNA, 25 bp, Homo sapien
gtgccaatgatattcccaacctggg

SEQ ID NO: 2014561 - DNA, 25 bp, Homo sapien
caagctcagaaagcgagggtcggca

SEQ ID NO: 2014562 - DNA, 25 bp, Homo sapien
tcgtgtcactgaacggacccaagct

SEQ ID NO: 2014563 - DNA, 25 bp, Homo sapien
cctccatagggtacaagggtgaaga

SEQ ID NO: 2014564 - DNA, 25 bp, Homo sapien
tattgaagtatctctccaagtctgt

SEQ ID NO: 2014565 - DNA, 25 bp, Homo sapien
ttgtctctcgatccaaagacttggc

SEQ ID NO: 2014566 - DNA, 25 bp, Homo sapien
cagttgtgatgaccccactgttggc

SEQ ID NO: 2014567 - DNA, 25 bp, Homo sapien
cactgttggcatcaatattgaagta

SEQ ID NO: 2014568 - DNA, 25 bp, Homo sapien
ctaataaataagacagtgtcttatc

SEQ ID NO: 2014569 - DNA, 25 bp, Homo sapien
tgtcttatcatttactctttgccca

SEQ ID NO: 2014570 - DNA, 25 bp, Homo sapien
taagacagtgtcttatcatttactc

SEQ ID NO: 2014571 - DNA, 25 bp, Homo sapien
gtgtcttatcatttactctttgccc

SEQ ID NO: 2014572 - DNA, 25 bp, Homo sapien
gctgggcattttcacagacggtggt

SEQ ID NO: 2014573 - DNA, 25 bp, Homo sapien
ctcatagtccatggcaaattcaggg

SEQ ID NO: 2014574 - DNA, 25 bp, Homo sapien
caagtatagtgatggccacatagcc

SEQ ID NO: 2014575 - DNA, 25 bp, Homo sapien
tgatgtcaagtatagtgatggccac

SEQ ID NO: 2014576 - DNA, 25 bp, Homo sapien
aaaactggtgtccattggatggctc

SEQ ID NO: 2014577 - DNA, 25 bp, Homo sapien
cgttgttaagctgaagtaaaactgg

SEQ ID NO: 2014578 - DNA, 25 bp, Homo sapien
tggtgtccattggatggctcatctt

SEQ ID NO: 2014579 - DNA, 25 bp, Homo sapien
ggttatttgttgcatccgttgttaa

SEQ ID NO: 2014580 - DNA, 25 bp, Homo sapien
tgcctctatcggtaacaatattaat

SEQ ID NO: 2014581 - DNA, 25 bp, Homo sapien
tgcttagagtatctgtacctgctgc

SEQ ID NO: 2014582 - DNA, 25 bp, Homo sapien
cttagagtatctgtacctgctgcct

SEQ ID NO: 2014583 - DNA, 25 bp, Homo sapien
gtacctgctgcctctatcggtaaca

SEQ ID NO: 2014584 - DNA, 25 bp, Homo sapien
aaatgctgagaattatccttcttaa

SEQ ID NO: 2014585 - DNA, 25 bp, Homo sapien
cctaaatgctgagaattatccttct

SEQ ID NO: 2014586 - DNA, 25 bp, Homo sapien
cttgtaccagatgaacctaaatgct

SEQ ID NO: 2014587 - DNA, 25 bp, Homo sapien
ttgtaccagatgaacctaaatgctg

SEQ ID NO: 2014588 - DNA, 25 bp, Homo sapien
cttgtgaagttcataaattcccttc

SEQ ID NO: 2014589 - DNA, 25 bp, Homo sapien
ttctccttgtgaagttcataaattc

SEQ ID NO: 2014590 - DNA, 25 bp, Homo sapien
tgaagttcataaattcccttctctg

SEQ ID NO: 2014591 - DNA, 25 bp, Homo sapien
tccttgtgaagttcataaattccct

SEQ ID NO: 2014592 - DNA, 25 bp, Homo sapien
gagtaagttcctgtacatttcacaa

SEQ ID NO: 2014593 - DNA, 25 bp, Homo sapien
gctggagttgttgaaggatactgtt

SEQ ID NO: 2014594 - DNA, 25 bp, Homo sapien
tttcacaatagcacgcaggcctatg

SEQ ID NO: 2014595 - DNA, 25 bp, Homo sapien
taccaactccgatgtcagaggcatt

SEQ ID NO: 2014596 - DNA, 25 bp, Homo sapien
ctggtcagtattgaggctgtgttgt

SEQ ID NO: 2014597 - DNA, 25 bp, Homo sapien
cacagtcacacacgcggatggtgag

SEQ ID NO: 2014598 - DNA, 25 bp, Homo sapien
cacaggcgagtatggctatcagggc

SEQ ID NO: 2014599 - DNA, 25 bp, Homo sapien
gccagcaggtaggacataggcctct

SEQ ID NO: 2014600 - DNA, 25 bp, Homo sapien
aggtctgggctacgccgtcagcatc

SEQ ID NO: 2014601 - DNA, 25 bp, Homo sapien
tcagagcaagccctggaaacagtac

SEQ ID NO: 2014602 - DNA, 25 bp, Homo sapien
tcaccaaatggagaagataataggc

SEQ ID NO: 2014603 - DNA, 25 bp, Homo sapien
taataggcaagtcgtgacatgtggt

SEQ ID NO: 2014604 - DNA, 25 bp, Homo sapien
gaataaacccattacccagtgtcca

SEQ ID NO: 2014605 - DNA, 25 bp, Homo sapien
tagtgagcaaaacaccatccaggcc

SEQ ID NO: 2014606 - DNA, 25 bp, Homo sapien
agaagccccttgttccaaattgtat

SEQ ID NO: 2014607 - DNA, 25 bp, Homo sapien
acaaatcctgatacctaatgcctag

SEQ ID NO: 2014608 - DNA, 25 bp, Homo sapien
taatgcctagaaacgagattcacac

SEQ ID NO: 2014609 - DNA, 25 bp, Homo sapien
ccttagaagtggaagagatattcca

SEQ ID NO: 2014610 - DNA, 25 bp, Homo sapien
catagtgacgataaggaggatcaac

SEQ ID NO: 2014611 - DNA, 25 bp, Homo sapien
tccgcgagtcgtttaaagcgaggtc

SEQ ID NO: 2014612 - DNA, 25 bp, Homo sapien
tgcagccatgtcaaacgcttccgtg

SEQ ID NO: 2014613 - DNA, 25 bp, Homo sapien
catccctccgggtcttggtgtctcg

SEQ ID NO: 2014614 - DNA, 25 bp, Homo sapien
gagtacaaactctcttggccagtcc

SEQ ID NO: 2014615 - DNA, 25 bp, Homo sapien
ctatgagtacaaactctcttggcca

SEQ ID NO: 2014616 - DNA, 25 bp, Homo sapien
tgagtacaaactctcttggccagtc

SEQ ID NO: 2014617 - DNA, 25 bp, Homo sapien
tatgagtacaaactctcttggccag

SEQ ID NO: 2014618 - DNA, 25 bp, Homo sapien
ttttgatatgcaacaagttccaggg

SEQ ID NO: 2014619 - DNA, 25 bp, Homo sapien
ttccttcatgtagctcgggctggag

SEQ ID NO: 2014620 - DNA, 25 bp, Homo sapien
tcagagtctgtggtcagtgcagtcc

SEQ ID NO: 2014621 - DNA, 25 bp, Homo sapien
cacagggcactactttctcatagag

SEQ ID NO: 2014622 - DNA, 25 bp, Homo sapien
ggctgcaagtttacagaatcctaca

SEQ ID NO: 2014623 - DNA, 25 bp, Homo sapien
acacctccgtttagtggtatgtgca

SEQ ID NO: 2014624 - DNA, 25 bp, Homo sapien
tatacttatgaagttgaaggccact

SEQ ID NO: 2014625 - DNA, 25 bp, Homo sapien
tattgaactgggtaaatacgcgtgt

SEQ ID NO: 2014626 - DNA, 25 bp, Homo sapien
tatatatttcacttgcctccaggca

SEQ ID NO: 2014627 - DNA, 25 bp, Homo sapien
catttgcatttcttgggcatgtgga

SEQ ID NO: 2014628 - DNA, 25 bp, Homo sapien
tatatccagccgactaacatgattg

SEQ ID NO: 2014629 - DNA, 25 bp, Homo sapien
cctccaggcatcgtggaccagaaag

SEQ ID NO: 2014630 - DNA, 25 bp, Homo sapien
gagctgtccctatggcaacttcagt

SEQ ID NO: 2014631 - DNA, 25 bp, Homo sapien
gacagtttagcttcataagatttag

SEQ ID NO: 2014632 - DNA, 25 bp, Homo sapien
tgccttccacgagcccagcactggg

SEQ ID NO: 2014633 - DNA, 25 bp, Homo sapien
acttcagtggaactgtttgttgaca

SEQ ID NO: 2014634 - DNA, 25 bp, Homo sapien
gaaactgttcctatcaaaagattag

SEQ ID NO: 2014635 - DNA, 25 bp, Homo sapien
taagaggccaattcactcttgtcaa

SEQ ID NO: 2014636 - DNA, 25 bp, Homo sapien
aattagaaactgttcctatcaaaag

SEQ ID NO: 2014637 - DNA, 25 bp, Homo sapien
caaaagattaggagcataagaggcc

SEQ ID NO: 2014638 - DNA, 25 bp, Homo sapien
tttacgttgtactccatgtacaaaa

SEQ ID NO: 2014639 - DNA, 25 bp, Homo sapien
aaatttccttatatctagacatgtc

SEQ ID NO: 2014640 - DNA, 25 bp, Homo sapien
tccttatatctagacatgtcatagc

SEQ ID NO: 2014641 - DNA, 25 bp, Homo sapien
acacttttttacgttgtactccatg

SEQ ID NO: 2014642 - DNA, 25 bp, Homo sapien
ggaatttcacaatgccattccacag

SEQ ID NO: 2014643 - DNA, 25 bp, Homo sapien
tttgggaatttcacaatgccattcc

SEQ ID NO: 2014644 - DNA, 25 bp, Homo sapien
cactgagtacgggtatctggcaatc

SEQ ID NO: 2014645 - DNA, 25 bp, Homo sapien
ttccacagtactcactgagtacggg

SEQ ID NO: 2014646 - DNA, 25 bp, Homo sapien
acagcaccatcatactctctataca

SEQ ID NO: 2014647 - DNA, 25 bp, Homo sapien
cagcaccatcatactctctatacat

SEQ ID NO: 2014648 - DNA, 25 bp, Homo sapien
tccttgtcagagtatggtaaacaca

SEQ ID NO: 2014649 - DNA, 25 bp, Homo sapien
atatccttgtcagagtatggtaaac

SEQ ID NO: 2014650 - DNA, 25 bp, Homo sapien
aacacagttagaatccaagccacca

SEQ ID NO: 2014651 - DNA, 25 bp, Homo sapien
gaatccaagccaccaacatgcaaat

SEQ ID NO: 2014652 - DNA, 25 bp, Homo sapien
tcacacacaggaacaacgatcacaa

SEQ ID NO: 2014653 - DNA, 25 bp, Homo sapien
aacattcacgctaagacttgcctca

SEQ ID NO: 2014654 - DNA, 25 bp, Homo sapien
ttcacgctaagacttgcctcactct

SEQ ID NO: 2014655 - DNA, 25 bp, Homo sapien
caacgatcacaacattcacgctaag

SEQ ID NO: 2014656 - DNA, 25 bp, Homo sapien
tgggtaagctggtgacaatgactcc

SEQ ID NO: 2014657 - DNA, 25 bp, Homo sapien
ggctaaccatggactgaaagaaggg

SEQ ID NO: 2014658 - DNA, 25 bp, Homo sapien
tccagaaccttcacaccaaggaggg

SEQ ID NO: 2014659 - DNA, 25 bp, Homo sapien
tatagattggttactaccctccagg

SEQ ID NO: 2014660 - DNA, 25 bp, Homo sapien
gtacatgcacctcgttaccacatcg

SEQ ID NO: 2014661 - DNA, 25 bp, Homo sapien
caataatgggctctctttcagtgct

SEQ ID NO: 2014662 - DNA, 25 bp, Homo sapien
gggtcccttgtcctggtacatgcac

SEQ ID NO: 2014663 - DNA, 25 bp, Homo sapien
ttcagtgctcctatcatctctcctt

SEQ ID NO: 2014664 - DNA, 25 bp, Homo sapien
cttagaggatgctctctccgactgg

SEQ ID NO: 2014665 - DNA, 25 bp, Homo sapien
cacaggaagctgacatgtgaacact

SEQ ID NO: 2014666 - DNA, 25 bp, Homo sapien
tgcagtgatcaggtcggcaggtcat

SEQ ID NO: 2014667 - DNA, 25 bp, Homo sapien
tgttgagcaaaatgacacacaggaa

SEQ ID NO: 2014668 - DNA, 25 bp, Homo sapien
tccatctagtcgctgtaatccaagc

SEQ ID NO: 2014669 - DNA, 25 bp, Homo sapien
gtaatccaagcttcatttggtgctg

SEQ ID NO: 2014670 - DNA, 25 bp, Homo sapien
ccagagcactccatctagtcgctgt

SEQ ID NO: 2014671 - DNA, 25 bp, Homo sapien
tctagtcgctgtaatccaagcttca

SEQ ID NO: 2014672 - DNA, 25 bp, Homo sapien
agtcttccagggataaaccatggga

SEQ ID NO: 2014673 - DNA, 25 bp, Homo sapien
ggcagagaacaagcagggaaataat

SEQ ID NO: 2014674 - DNA, 25 bp, Homo sapien
cagtgctgcttgtagctcggtgact

SEQ ID NO: 2014675 - DNA, 25 bp, Homo sapien
ctaatttgtctctcaattgttccaa

SEQ ID NO: 2014676 - DNA, 25 bp, Homo sapien
tcagaaaacagtatgctggatgatc

SEQ ID NO: 2014677 - DNA, 25 bp, Homo sapien
gaaaacagtatgctggatgatccag

SEQ ID NO: 2014678 - DNA, 25 bp, Homo sapien
tatgctggatgatccaggtagactc

SEQ ID NO: 2014679 - DNA, 25 bp, Homo sapien
ccaagggtccttattcagaaaacag

SEQ ID NO: 2014680 - DNA, 25 bp, Homo sapien
ggatatttatgtgcgtctggagctg

SEQ ID NO: 2014681 - DNA, 25 bp, Homo sapien
ggagctgaggattccaattcctgag

SEQ ID NO: 2014682 - DNA, 25 bp, Homo sapien
tctctagaaacagttaatgccatgg

SEQ ID NO: 2014683 - DNA, 25 bp, Homo sapien
tcagggcacattagaatcttctagg

SEQ ID NO: 2014684 - DNA, 25 bp, Homo sapien
tcttaggtctctgcatatcatgcag

SEQ ID NO: 2014685 - DNA, 25 bp, Homo sapien
ttattcaggaactctccatgaagtc

SEQ ID NO: 2014686 - DNA, 25 bp, Homo sapien
cctctgtcaactgattattcaggaa

SEQ ID NO: 2014687 - DNA, 25 bp, Homo sapien
actcttaggtctctgcatatcatgc

SEQ ID NO: 2014688 - DNA, 25 bp, Homo sapien
caggcatgatcaactctcgggaggg

SEQ ID NO: 2014689 - DNA, 25 bp, Homo sapien
tcgggagggattgagagcacttctt

SEQ ID NO: 2014690 - DNA, 25 bp, Homo sapien
gctgtgggtcttgtagttggcttcc

SEQ ID NO: 2014691 - DNA, 25 bp, Homo sapien
cccattggcacgacttaagcggaca

SEQ ID NO: 2014692 - DNA, 25 bp, Homo sapien
gatgactccatgcagatactagatg

SEQ ID NO: 2014693 - DNA, 25 bp, Homo sapien
tcctaaagggcttgcattacatgca

SEQ ID NO: 2014694 - DNA, 25 bp, Homo sapien
aagcggtaggtgactgatgactcca

SEQ ID NO: 2014695 - DNA, 25 bp, Homo sapien
tccatatgttgtgccatgtagtccc

SEQ ID NO: 2014696 - DNA, 25 bp, Homo sapien
tatgtcttcctggagtggcataaca

SEQ ID NO: 2014697 - DNA, 25 bp, Homo sapien
tattatatgcgttatgtcttcctgg

SEQ ID NO: 2014698 - DNA, 25 bp, Homo sapien
tggagtggcataacaacataggacc

SEQ ID NO: 2014699 - DNA, 25 bp, Homo sapien
tatgcgttatgtcttcctggagtgg

SEQ ID NO: 2014700 - DNA, 25 bp, Homo sapien
aaagctggccgatgaatttgacagc

SEQ ID NO: 2014701 - DNA, 25 bp, Homo sapien
ctccacaaagctggccgatgaattt

SEQ ID NO: 2014702 - DNA, 25 bp, Homo sapien
actggacaaagaatatctccacaaa

SEQ ID NO: 2014703 - DNA, 25 bp, Homo sapien
aaaactggacaaagaatatctccac

SEQ ID NO: 2014704 - DNA, 25 bp, Homo sapien
tagattctcaccagccagaaggcca

SEQ ID NO: 2014705 - DNA, 25 bp, Homo sapien
agaaggccagacaactgacagcccc

SEQ ID NO: 2014706 - DNA, 25 bp, Homo sapien
gccagaaggccagacaactgacagc

SEQ ID NO: 2014707 - DNA, 25 bp, Homo sapien
gtagattctcaccagccagaaggcc

SEQ ID NO: 2014708 - DNA, 25 bp, Homo sapien
gagctggaacagataaaaggaagtc

SEQ ID NO: 2014709 - DNA, 25 bp, Homo sapien
tcacgactgctgtatatcccacagg

SEQ ID NO: 2014710 - DNA, 25 bp, Homo sapien
ccaacctaggagagctggaacagat

SEQ ID NO: 2014711 - DNA, 25 bp, Homo sapien
tattcgattgtctgatcttcagccc

SEQ ID NO: 2014712 - DNA, 25 bp, Homo sapien
ggttctggttctgatactcacagtc

SEQ ID NO: 2014713 - DNA, 25 bp, Homo sapien
ctggttctgatactcacagtcatgc

SEQ ID NO: 2014714 - DNA, 25 bp, Homo sapien
ctcacagtcatgcacagcatccaag

SEQ ID NO: 2014715 - DNA, 25 bp, Homo sapien
actcacagtcatgcacagcatccaa

SEQ ID NO: 2014716 - DNA, 25 bp, Homo sapien
tactgaggctctataagctgaaatg

SEQ ID NO: 2014717 - DNA, 25 bp, Homo sapien
gagagttcgtgcaagtgtatcaaga

SEQ ID NO: 2014718 - DNA, 25 bp, Homo sapien
tgtgaaataggttttctactcttat

SEQ ID NO: 2014719 - DNA, 25 bp, Homo sapien
tgtatcaagaactccattactgagg

SEQ ID NO: 2014720 - DNA, 25 bp, Homo sapien
gtagatccatgcattgacatttcaa

SEQ ID NO: 2014721 - DNA, 25 bp, Homo sapien
ttcaacggaagaattgcggcagcca

SEQ ID NO: 2014722 - DNA, 25 bp, Homo sapien
tgtgaagtagatccatgcattgaca

SEQ ID NO: 2014723 - DNA, 25 bp, Homo sapien
gacatttcaacggaagaattgcggc

SEQ ID NO: 2014724 - DNA, 25 bp, Homo sapien
cgttgccacgggaagttgtcatttt

SEQ ID NO: 2014725 - DNA, 25 bp, Homo sapien
tgagttccccttagagagactgccc

SEQ ID NO: 2014726 - DNA, 25 bp, Homo sapien
ccccctggaatcttgcaggagcttc

SEQ ID NO: 2014727 - DNA, 25 bp, Homo sapien
gactgcccccctggaatcttgcagg

SEQ ID NO: 2014728 - DNA, 25 bp, Homo sapien
caggaactattcgctgtaatgatca

SEQ ID NO: 2014729 - DNA, 25 bp, Homo sapien
tcaggaactattcgctgtaatgatc

SEQ ID NO: 2014730 - DNA, 25 bp, Homo sapien
atgtgatgtgcttaatcactgtggc

SEQ ID NO: 2014731 - DNA, 25 bp, Homo sapien
ggcatcagggccaggtgtcagtttt

SEQ ID NO: 2014732 - DNA, 25 bp, Homo sapien
catcagggccaggtgtcagtttttt

SEQ ID NO: 2014733 - DNA, 25 bp, Homo sapien
ttatttttcctgatcacggaatgtg

SEQ ID NO: 2014734 - DNA, 25 bp, Homo sapien
cttgaagaccaattccaatgcctcc

SEQ ID NO: 2014735 - DNA, 25 bp, Homo sapien
tttgtttcttgaagaccaattccaa

SEQ ID NO: 2014736 - DNA, 25 bp, Homo sapien
aatgcctcctccaaaataaagatta

SEQ ID NO: 2014737 - DNA, 25 bp, Homo sapien
tttcttgaagaccaattccaatgcc

SEQ ID NO: 2014738 - DNA, 25 bp, Homo sapien
atctagccttcgcatatctgagcca

SEQ ID NO: 2014739 - DNA, 25 bp, Homo sapien
tgtccagctaaaactgacacctcag

SEQ ID NO: 2014740 - DNA, 25 bp, Homo sapien
ctagccttcgcatatctgagccaat

SEQ ID NO: 2014741 - DNA, 25 bp, Homo sapien
caagttgtaggcaattgtccagcta

SEQ ID NO: 2014742 - DNA, 25 bp, Homo sapien
ctctgaagatgactggccgatccac

SEQ ID NO: 2014743 - DNA, 25 bp, Homo sapien
gagctctgaagatgactggccgatc

SEQ ID NO: 2014744 - DNA, 25 bp, Homo sapien
tgctgcccttttttcctagagagct

SEQ ID NO: 2014745 - DNA, 25 bp, Homo sapien
gctctgaagatgactggccgatcca

SEQ ID NO: 2014746 - DNA, 25 bp, Homo sapien
ctttgctcccttaggctctaaaata

SEQ ID NO: 2014747 - DNA, 25 bp, Homo sapien
gctcccttaggctctaaaataagcc

SEQ ID NO: 2014748 - DNA, 25 bp, Homo sapien
tctaaaataagcctttgggacatca

SEQ ID NO: 2014749 - DNA, 25 bp, Homo sapien
taggctctaaaataagcctttggga

SEQ ID NO: 2014750 - DNA, 25 bp, Homo sapien
ttacacatcccaatcatggctgctg

SEQ ID NO: 2014751 - DNA, 25 bp, Homo sapien
acacatcccaatcatggctgctgag

SEQ ID NO: 2014752 - DNA, 25 bp, Homo sapien
ttttctggagaacggggtctcgcta

SEQ ID NO: 2014753 - DNA, 25 bp, Homo sapien
tcccgcctcttagcctccctgagag

SEQ ID NO: 2014754 - DNA, 25 bp, Homo sapien
caagctatcctcccgcctcttagcc

SEQ ID NO: 2014755 - DNA, 25 bp, Homo sapien
tttctggagaacggggtctcgctat

SEQ ID NO: 2014756 - DNA, 25 bp, Homo sapien
ctaagaaccgcttttcagagggcag

SEQ ID NO: 2014757 - DNA, 25 bp, Homo sapien
caaaacattgtccatttcttaggcc

SEQ ID NO: 2014758 - DNA, 25 bp, Homo sapien
cctcactagaagacttgaagggctc

SEQ ID NO: 2014759 - DNA, 25 bp, Homo sapien
ctcttgttaatcttgcagggttggg

SEQ ID NO: 2014760 - DNA, 25 bp, Homo sapien
gaaaaggagagcagagggtgtgctg

SEQ ID NO: 2014761 - DNA, 25 bp, Homo sapien
ggcacagctggactgggcacaccat

SEQ ID NO: 2014762 - DNA, 25 bp, Homo sapien
ggagagcagagggtgtgctgaggct

SEQ ID NO: 2014763 - DNA, 25 bp, Homo sapien
gctggactgggcacaccatggccat

SEQ ID NO: 2014764 - DNA, 25 bp, Homo sapien
tgaattttggggcagggcatacagt

SEQ ID NO: 2014765 - DNA, 25 bp, Homo sapien
tcagatccgatgttctaactgatct

SEQ ID NO: 2014766 - DNA, 25 bp, Homo sapien
tctaactgatctctcatgaagtctg

SEQ ID NO: 2014767 - DNA, 25 bp, Homo sapien
ctgatctctcatgaagtctgaattt

SEQ ID NO: 2014768 - DNA, 25 bp, Homo sapien
gtaatgggcgccagatgtcagagta

SEQ ID NO: 2014769 - DNA, 25 bp, Homo sapien
tgggcgccagatgtcagagtataaa

SEQ ID NO: 2014770 - DNA, 25 bp, Homo sapien
gggcgccagatgtcagagtataaaa

SEQ ID NO: 2014771 - DNA, 25 bp, Homo sapien
aatgggcgccagatgtcagagtata

SEQ ID NO: 2014772 - DNA, 25 bp, Homo sapien
tgagccttagtttctgtgctcacac

SEQ ID NO: 2014773 - DNA, 25 bp, Homo sapien
cggtgctgtctgagaacaggaagtc

SEQ ID NO: 2014774 - DNA, 25 bp, Homo sapien
actgataacggtgctgtctgagaac

SEQ ID NO: 2014775 - DNA, 25 bp, Homo sapien
tctgtgctcacactgataacggtgc

SEQ ID NO: 2014776 - DNA, 25 bp, Homo sapien
gatttgttctcacagtttggaaaag

SEQ ID NO: 2014777 - DNA, 25 bp, Homo sapien
tgtaagggaagatttgatttgttct

SEQ ID NO: 2014778 - DNA, 25 bp, Homo sapien
tggcgagttgaaggtttggataaat

SEQ ID NO: 2014779 - DNA, 25 bp, Homo sapien
gataaatgggtgaagagtggtattc

SEQ ID NO: 2014780 - DNA, 25 bp, Homo sapien
gctagattagagcagggccctgcct

SEQ ID NO: 2014781 - DNA, 25 bp, Homo sapien
aaagacagctagattagagcagggc

SEQ ID NO: 2014782 - DNA, 25 bp, Homo sapien
agacagctagattagagcagggccc

SEQ ID NO: 2014783 - DNA, 25 bp, Homo sapien
ctgtgaaaagacagctagattagag

SEQ ID NO: 2014784 - DNA, 25 bp, Homo sapien
ttgtcctcatcaaggcatgggagcc

SEQ ID NO: 2014785 - DNA, 25 bp, Homo sapien
tctctgattcctccattgcctgctt

SEQ ID NO: 2014786 - DNA, 25 bp, Homo sapien
aggcatgggagcctttgcccttcat

SEQ ID NO: 2014787 - DNA, 25 bp, Homo sapien
gaccaatctattgtcctcatcaagg

SEQ ID NO: 2014788 - DNA, 25 bp, Homo sapien
taattgacttaacatcattctctcc

SEQ ID NO: 2014789 - DNA, 25 bp, Homo sapien
tgcagtaggtgaattcgtggaccac

SEQ ID NO: 2014790 - DNA, 25 bp, Homo sapien
gtaggtgaattcgtggaccacttcc

SEQ ID NO: 2014791 - DNA, 25 bp, Homo sapien
cagtaggtgaattcgtggaccactt

SEQ ID NO: 2014792 - DNA, 25 bp, Homo sapien
ttttgggcatcccattatttgcctg

SEQ ID NO: 2014793 - DNA, 25 bp, Homo sapien
cagctcatcccaagattcttcctgt

SEQ ID NO: 2014794 - DNA, 25 bp, Homo sapien
tcttcctgtagtttcattttgggca

SEQ ID NO: 2014795 - DNA, 25 bp, Homo sapien
gcatcccattatttgcctgcaaaca

SEQ ID NO: 2014796 - DNA, 25 bp, Homo sapien
cttatactgtttccttaaaattgtg

SEQ ID NO: 2014797 - DNA, 25 bp, Homo sapien
ttatactgtttccttaaaattgtga

SEQ ID NO: 2014798 - DNA, 25 bp, Homo sapien
tatactgtttccttaaaattgtgaa

SEQ ID NO: 2014799 - DNA, 25 bp, Homo sapien
gttgagcacatgaactaatttccag

SEQ ID NO: 2014800 - DNA, 25 bp, Homo sapien
tgagcacatgaactaatttccagca

SEQ ID NO: 2014801 - DNA, 25 bp, Homo sapien
ctgttgagcacatgaactaatttcc

SEQ ID NO: 2014802 - DNA, 25 bp, Homo sapien
gagcacatgaactaatttccagcat

SEQ ID NO: 2014803 - DNA, 25 bp, Homo sapien
ccaggggctgatttcctaacgtcag

SEQ ID NO: 2014804 - DNA, 25 bp, Homo sapien
tggttttgctccgaccagtgaaaac

SEQ ID NO: 2014805 - DNA, 25 bp, Homo sapien
gaagtcactggttttgctccgacca

SEQ ID NO: 2014806 - DNA, 25 bp, Homo sapien
aagaagtcactggttttgctccgac

SEQ ID NO: 2014807 - DNA, 25 bp, Homo sapien
gtttctgttcagaaatacactgtga

SEQ ID NO: 2014808 - DNA, 25 bp, Homo sapien
gtttaatctgagcagtttctgttca

SEQ ID NO: 2014809 - DNA, 25 bp, Homo sapien
ctccaaaatcctgatcggtataatg

SEQ ID NO: 2014810 - DNA, 25 bp, Homo sapien
tataatgatcctgggtggttgacag

SEQ ID NO: 2014811 - DNA, 25 bp, Homo sapien
tatggcgtggatactcagtctgaga

SEQ ID NO: 2014812 - DNA, 25 bp, Homo sapien
tgaattggaatggaagaccgcttgc

SEQ ID NO: 2014813 - DNA, 25 bp, Homo sapien
tgcgccgtagctttggctgtccaaa

SEQ ID NO: 2014814 - DNA, 25 bp, Homo sapien
tgcagctgcccaaaagtagcagttg

SEQ ID NO: 2014815 - DNA, 25 bp, Homo sapien
cagaatccgatatcctgaataaacg

SEQ ID NO: 2014816 - DNA, 25 bp, Homo sapien
gatccagaatccgatatcctgaata

SEQ ID NO: 2014817 - DNA, 25 bp, Homo sapien
atccgatatcctgaataaacgaggg

SEQ ID NO: 2014818 - DNA, 25 bp, Homo sapien
ctgtgatccagaatccgatatcctg

SEQ ID NO: 2014819 - DNA, 25 bp, Homo sapien
ataatcttcccctctcactatgagc

SEQ ID NO: 2014820 - DNA, 25 bp, Homo sapien
tgagcatccactgcactatatcgtt

SEQ ID NO: 2014821 - DNA, 25 bp, Homo sapien
gcactatatcgttccactctcccca

SEQ ID NO: 2014822 - DNA, 25 bp, Homo sapien
taatcttcccctctcactatgagca

SEQ ID NO: 2014823 - DNA, 25 bp, Homo sapien
ggaaaacttcacaaacgtgcgtgtc

SEQ ID NO: 2014824 - DNA, 25 bp, Homo sapien
gaaaacttcacaaacgtgcgtgtca

SEQ ID NO: 2014825 - DNA, 25 bp, Homo sapien
aaacttcacaaacgtgcgtgtcatc

SEQ ID NO: 2014826 - DNA, 25 bp, Homo sapien
taggaaaacttcacaaacgtgcgtg

SEQ ID NO: 2014827 - DNA, 25 bp, Homo sapien
tcttctttaggttatatgttaccat

SEQ ID NO: 2014828 - DNA, 25 bp, Homo sapien
tctgccaatttgtatccttcaaaca

SEQ ID NO: 2014829 - DNA, 25 bp, Homo sapien
gggataaagtctgccaatttgtatc

SEQ ID NO: 2014830 - DNA, 25 bp, Homo sapien
ggacatggggataaagtctgccaat

SEQ ID NO: 2014831 - DNA, 25 bp, Homo sapien
ctgtgtggacatggggataaagtct

SEQ ID NO: 2014832 - DNA, 25 bp, Homo sapien
ctgcatgcatatacaggaggaggtg

SEQ ID NO: 2014833 - DNA, 25 bp, Homo sapien
gcatatacaggaggaggtgttaaac

SEQ ID NO: 2014834 - DNA, 25 bp, Homo sapien
catgcatatacaggaggaggtgtta

SEQ ID NO: 2014835 - DNA, 25 bp, Homo sapien
tacaggaggaggtgttaaacttggc

SEQ ID NO: 2014836 - DNA, 25 bp, Homo sapien
cacaagactcattggaatgaatgag

SEQ ID NO: 2014837 - DNA, 25 bp, Homo sapien
ttcacaagactcattggaatgaatg

SEQ ID NO: 2014838 - DNA, 25 bp, Homo sapien
agactcattggaatgaatgagttca

SEQ ID NO: 2014839 - DNA, 25 bp, Homo sapien
agcttcacaagactcattggaatga

SEQ ID NO: 2014840 - DNA, 25 bp, Homo sapien
tttgtgatactaaccagaccaacgg

SEQ ID NO: 2014841 - DNA, 25 bp, Homo sapien
tagttcttttgtgatactaaccaga

SEQ ID NO: 2014842 - DNA, 25 bp, Homo sapien
taaccagaccaacggcttcttcatc

SEQ ID NO: 2014843 - DNA, 25 bp, Homo sapien
gataatctctgttctactagttctt

SEQ ID NO: 2014844 - DNA, 25 bp, Homo sapien
gctatttcaaccagggatatacgca

SEQ ID NO: 2014845 - DNA, 25 bp, Homo sapien
cgctgaatggtatgacagggagaac

SEQ ID NO: 2014846 - DNA, 25 bp, Homo sapien
gaagaagaagggatgctatttcaac

SEQ ID NO: 2014847 - DNA, 25 bp, Homo sapien
agctttaagagccatgacatgattc

SEQ ID NO: 2014848 - DNA, 25 bp, Homo sapien
tatccggttgtgatatccttagctg

SEQ ID NO: 2014849 - DNA, 25 bp, Homo sapien
tatgtgtccaagtctatatccggtt

SEQ ID NO: 2014850 - DNA, 25 bp, Homo sapien
aactatgtaacttttgatcgtgcac

SEQ ID NO: 2014851 - DNA, 25 bp, Homo sapien
ccttagctgtgtcttataactatgt

SEQ ID NO: 2014852 - DNA, 25 bp, Homo sapien
tagcatatttacttctgcttctcat

SEQ ID NO: 2014853 - DNA, 25 bp, Homo sapien
tgagttagcatatttacttctgctt

SEQ ID NO: 2014854 - DNA, 25 bp, Homo sapien
ttagcatatttacttctgcttctca

SEQ ID NO: 2014855 - DNA, 25 bp, Homo sapien
gattgagttagcatatttacttctg

SEQ ID NO: 2014856 - DNA, 25 bp, Homo sapien
tatctgtgccaagacacacagcact

SEQ ID NO: 2014857 - DNA, 25 bp, Homo sapien
agacacacagcactgattacttcca

SEQ ID NO: 2014858 - DNA, 25 bp, Homo sapien
ccatcatatttatctgtgccaagac

SEQ ID NO: 2014859 - DNA, 25 bp, Homo sapien
gacacacagcactgattacttccat

SEQ ID NO: 2014860 - DNA, 25 bp, Homo sapien
cagattttgatggtgtcaacttgag

SEQ ID NO: 2014861 - DNA, 25 bp, Homo sapien
cctggcatccttgttaacgtacatg

SEQ ID NO: 2014862 - DNA, 25 bp, Homo sapien
tctctgattcctggcatccttgtta

SEQ ID NO: 2014863 - DNA, 25 bp, Homo sapien
acgtacatgtttccgcagcagattt

SEQ ID NO: 2014864 - DNA, 25 bp, Homo sapien
atcattttgttcagcctctatgtag

SEQ ID NO: 2014865 - DNA, 25 bp, Homo sapien
tcattttgttcagcctctatgtagg

SEQ ID NO: 2014866 - DNA, 25 bp, Homo sapien
cctctatgtagggtacttgatggca

SEQ ID NO: 2014867 - DNA, 25 bp, Homo sapien
ctatgtagggtacttgatggcaagt

SEQ ID NO: 2014868 - DNA, 25 bp, Homo sapien
tccatgcatggaatattcctcgtat

SEQ ID NO: 2014869 - DNA, 25 bp, Homo sapien
ctcgtatattccatgcatggaatat

SEQ ID NO: 2014870 - DNA, 25 bp, Homo sapien
ctcgtatattccatgcaaggaatat

SEQ ID NO: 2014871 - DNA, 25 bp, Homo sapien
ccatgcatggaatattcctcgtata

SEQ ID NO: 2014872 - DNA, 25 bp, Homo sapien
ttattcctcgtatataccatacaag

SEQ ID NO: 2014873 - DNA, 25 bp, Homo sapien
gcagatccccgaattcattatcacc

SEQ ID NO: 2014874 - DNA, 25 bp, Homo sapien
tgggaccttgctgaacagacatgaa

SEQ ID NO: 2014875 - DNA, 25 bp, Homo sapien
cacccttgaaggatctgtacttagg

SEQ ID NO: 2014876 - DNA, 25 bp, Homo sapien
ctggagtctgggaccttgctgaaca

SEQ ID NO: 2014877 - DNA, 25 bp, Homo sapien
ttgggttgttctggagaatcagtcc

SEQ ID NO: 2014878 - DNA, 25 bp, Homo sapien
ttgttctggagaatcagtccctctc

SEQ ID NO: 2014879 - DNA, 25 bp, Homo sapien
gttgttctggagaatcagtccctct

SEQ ID NO: 2014880 - DNA, 25 bp, Homo sapien
cggtttgggttgttctggagaatca

SEQ ID NO: 2014881 - DNA, 25 bp, Homo sapien
tctttaaatctccttcactctgctt

SEQ ID NO: 2014882 - DNA, 25 bp, Homo sapien
ctttaaatctccttcactctgcttg

SEQ ID NO: 2014883 - DNA, 25 bp, Homo sapien
gatctgcacccagtaaagagctgcc

SEQ ID NO: 2014884 - DNA, 25 bp, Homo sapien
cttttccaggatctgcacccagtaa

SEQ ID NO: 2014885 - DNA, 25 bp, Homo sapien
aggatctgcacccagtaaagagctg

SEQ ID NO: 2014886 - DNA, 25 bp, Homo sapien
tccaggatctgcacccagtaaagag

SEQ ID NO: 2014887 - DNA, 25 bp, Homo sapien
cagcgatcgttgcaatagagccttt

SEQ ID NO: 2014888 - DNA, 25 bp, Homo sapien
tcgttgcaatagagcctttagcagc

SEQ ID NO: 2014889 - DNA, 25 bp, Homo sapien
attttgacagcgatcgttgcaatag

SEQ ID NO: 2014890 - DNA, 25 bp, Homo sapien
ttgacagcgatcgttgcaatagagc

SEQ ID NO: 2014891 - DNA, 25 bp, Homo sapien
ccctgatgtgctcgccatttcctgg

SEQ ID NO: 2014892 - DNA, 25 bp, Homo sapien
tgatgtgctcgccatttcctggctc

SEQ ID NO: 2014893 - DNA, 25 bp, Homo sapien
tgttccctgatgtgctcgccatttc

SEQ ID NO: 2014894 - DNA, 25 bp, Homo sapien
cagctgtgttccctgatgtgctcgc

SEQ ID NO: 2014895 - DNA, 25 bp, Homo sapien
caactgcagtataaaacctgtaaga

SEQ ID NO: 2014896 - DNA, 25 bp, Homo sapien
gcagtataaaacctgtaagatttat

SEQ ID NO: 2014897 - DNA, 25 bp, Homo sapien
ctgcagtataaaacctgtaagattt

SEQ ID NO: 2014898 - DNA, 25 bp, Homo sapien
aactgcagtataaaacctgtaagat

SEQ ID NO: 2014899 - DNA, 25 bp, Homo sapien
tcaccacagttaatttagcagccat

SEQ ID NO: 2014900 - DNA, 25 bp, Homo sapien
cagcttcagagtagatgagaaacaa

SEQ ID NO: 2014901 - DNA, 25 bp, Homo sapien
tagcaagtaatgctcgtcagtcttg

SEQ ID NO: 2014902 - DNA, 25 bp, Homo sapien
tcagtcttgacacccagaatgtcag

SEQ ID NO: 2014903 - DNA, 25 bp, Homo sapien
gaggcagccgtaatggcagctgtca

SEQ ID NO: 2014904 - DNA, 25 bp, Homo sapien
taatttccctcttatcaagatatca

SEQ ID NO: 2014905 - DNA, 25 bp, Homo sapien
ttatcaagatatcatggtctcccat

SEQ ID NO: 2014906 - DNA, 25 bp, Homo sapien
gcttgtagttttactccacttcatt

SEQ ID NO: 2014907 - DNA, 25 bp, Homo sapien
tccctcttatcaagatatcatggtc

SEQ ID NO: 2014908 - DNA, 25 bp, Homo sapien
cattttcataaagcctattatccag

SEQ ID NO: 2014909 - DNA, 25 bp, Homo sapien
aggagtgttccctgttttcatttag

SEQ ID NO: 2014910 - DNA, 25 bp, Homo sapien
agcctattatccaggagtgttccct

SEQ ID NO: 2014911 - DNA, 25 bp, Homo sapien
ctgttttcatttaggtcattgactt

SEQ ID NO: 2014912 - DNA, 25 bp, Homo sapien
aatcagatactgtgagagcttgccc

SEQ ID NO: 2014913 - DNA, 25 bp, Homo sapien
caacttttacccgtgcaaaatcaga

SEQ ID NO: 2014914 - DNA, 25 bp, Homo sapien
tacccgtgcaaaatcagatactgtg

SEQ ID NO: 2014915 - DNA, 25 bp, Homo sapien
tgcaaaatcagatactgtgagagct

SEQ ID NO: 2014916 - DNA, 25 bp, Homo sapien
tcatgaagtcatgtgatcaaaattc

SEQ ID NO: 2014917 - DNA, 25 bp, Homo sapien
ggaaactaaactgtggtgaagaaca

SEQ ID NO: 2014918 - DNA, 25 bp, Homo sapien
caaaattccttcaattaatcagcag

SEQ ID NO: 2014919 - DNA, 25 bp, Homo sapien
tgtgtaattatgctctatgatgccc

SEQ ID NO: 2014920 - DNA, 25 bp, Homo sapien
gaccaacacccacagccagacataa

SEQ ID NO: 2014921 - DNA, 25 bp, Homo sapien
ccagacataacactgatgaagccat

SEQ ID NO: 2014922 - DNA, 25 bp, Homo sapien
cttcacgtgaccaacacccacagcc

SEQ ID NO: 2014923 - DNA, 25 bp, Homo sapien
cccacagccagacataacactgatg

SEQ ID NO: 2014924 - DNA, 25 bp, Homo sapien
ccaagtgaacgttatacacaagctc

SEQ ID NO: 2014925 - DNA, 25 bp, Homo sapien
agttgacagccaagtgaacgttata

SEQ ID NO: 2014926 - DNA, 25 bp, Homo sapien
ccaagaagttgacagccaagtgaac

SEQ ID NO: 2014927 - DNA, 25 bp, Homo sapien
atgacaccaagaagttgacagccaa

SEQ ID NO: 2014928 - DNA, 25 bp, Homo sapien
ttggcaaattttacgaacacaaatc

SEQ ID NO: 2014929 - DNA, 25 bp, Homo sapien
tcttctaacacagatttagtactgg

SEQ ID NO: 2014930 - DNA, 25 bp, Homo sapien
ttagcactggtaaaacaaccttcta

SEQ ID NO: 2014931 - DNA, 25 bp, Homo sapien
cacaatcttcgtgccctaacacaaa

SEQ ID NO: 2014932 - DNA, 25 bp, Homo sapien
gttaggtctgcaatacgcaccaaat

SEQ ID NO: 2014933 - DNA, 25 bp, Homo sapien
ctgcaatacgcaccaaatgctgaac

SEQ ID NO: 2014934 - DNA, 25 bp, Homo sapien
taggtctgcaatacgcaccaaatgc

SEQ ID NO: 2014935 - DNA, 25 bp, Homo sapien
gtctgcaatacgcaccaaatgctga

SEQ ID NO: 2014936 - DNA, 25 bp, Homo sapien
cccaacaggcctgccaggagaaggg

SEQ ID NO: 2014937 - DNA, 25 bp, Homo sapien
tggccccacccaacaggcctgccag

SEQ ID NO: 2014938 - DNA, 25 bp, Homo sapien
ggccccacccaacaggcctgccagg

SEQ ID NO: 2014939 - DNA, 25 bp, Homo sapien
ccacccaacaggcctgccaggagaa

SEQ ID NO: 2014940 - DNA, 25 bp, Homo sapien
cctggagatttcctaattatcccca

SEQ ID NO: 2014941 - DNA, 25 bp, Homo sapien
catagctttcagtaggtacagaaca

SEQ ID NO: 2014942 - DNA, 25 bp, Homo sapien
ctttcagtaggtacagaacatagag

SEQ ID NO: 2014943 - DNA, 25 bp, Homo sapien
gaaaggatcgtagcaaatcatagct

SEQ ID NO: 2014944 - DNA, 25 bp, Homo sapien
cgagaaaggatcgtagcaaatcata

SEQ ID NO: 2014945 - DNA, 25 bp, Homo sapien
ctgacacttccgctttgaatcccat

SEQ ID NO: 2014946 - DNA, 25 bp, Homo sapien
gccaaaaaccttttgcccagctctg

SEQ ID NO: 2014947 - DNA, 25 bp, Homo sapien
caaaaaccttttgcccagctctgac

SEQ ID NO: 2014948 - DNA, 25 bp, Homo sapien
atctgtgccaaaaaccttttgccca

SEQ ID NO: 2014949 - DNA, 25 bp, Homo sapien
cagtggtcagcatgcgacagacagt

SEQ ID NO: 2014950 - DNA, 25 bp, Homo sapien
tagcacagcggcaatccctaaagtg

SEQ ID NO: 2014951 - DNA, 25 bp, Homo sapien
gacagacagtgtccctagcacagcg

SEQ ID NO: 2014952 - DNA, 25 bp, Homo sapien
tggtcagcagcggatgcagcactga

SEQ ID NO: 2014953 - DNA, 25 bp, Homo sapien
tgtgttccaaaggtggagtagtcgt

SEQ ID NO: 2014954 - DNA, 25 bp, Homo sapien
cagggtaccgttgtgctttgaggaa

SEQ ID NO: 2014955 - DNA, 25 bp, Homo sapien
caaaggtggagtagtcgtgtgctct

SEQ ID NO: 2014956 - DNA, 25 bp, Homo sapien
taatcttgttaaagttctgtccagg

SEQ ID NO: 2014957 - DNA, 25 bp, Homo sapien
acattccttaagcagctggctctga

SEQ ID NO: 2014958 - DNA, 25 bp, Homo sapien
ggctctgaggaaggtctcagcttta

SEQ ID NO: 2014959 - DNA, 25 bp, Homo sapien
ctctgaagatgtctgcacattcctt

SEQ ID NO: 2014960 - DNA, 25 bp, Homo sapien
cagctttaagacactgaggctggtt

SEQ ID NO: 2014961 - DNA, 25 bp, Homo sapien
tttcatcgcttctagcctgaggcca

SEQ ID NO: 2014962 - DNA, 25 bp, Homo sapien
tcctggtaagggacaagttagcttc

SEQ ID NO: 2014963 - DNA, 25 bp, Homo sapien
gcagaaactggcaagtaaaccacca

SEQ ID NO: 2014964 - DNA, 25 bp, Homo sapien
catgcttgggtttcactcctggtaa

SEQ ID NO: 2014965 - DNA, 25 bp, Homo sapien
tcatggcttgtatgttgggaccaag

SEQ ID NO: 2014966 - DNA, 25 bp, Homo sapien
tgtgcacctctgaagtaggactgag

SEQ ID NO: 2014967 - DNA, 25 bp, Homo sapien
tccacctttcagtgaggagagtagg

SEQ ID NO: 2014968 - DNA, 25 bp, Homo sapien
catcttttggttggtgctttgtagg

SEQ ID NO: 2014969 - DNA, 25 bp, Homo sapien
tacgttatctagttatgcagcactg

SEQ ID NO: 2014970 - DNA, 25 bp, Homo sapien
aacacttgagatgtttgagctacca

SEQ ID NO: 2014971 - DNA, 25 bp, Homo sapien
catggatagattcaactaagtcttc

SEQ ID NO: 2014972 - DNA, 25 bp, Homo sapien
ttatcagacctatgtgtaataagac

SEQ ID NO: 2014973 - DNA, 25 bp, Homo sapien
gaccaaattgtctgatatatctgat

SEQ ID NO: 2014974 - DNA, 25 bp, Homo sapien
tctgattaatcatgatttcacttca

SEQ ID NO: 2014975 - DNA, 25 bp, Homo sapien
tcatttttaaagacgcaaatgactt

SEQ ID NO: 2014976 - DNA, 25 bp, Homo sapien
gacattctaagatatcaagacactt

SEQ ID NO: 2014977 - DNA, 25 bp, Homo sapien
gggattgactctcccagcatgttcc

SEQ ID NO: 2014978 - DNA, 25 bp, Homo sapien
cacccttagggtgatctaggaaaat

SEQ ID NO: 2014979 - DNA, 25 bp, Homo sapien
ttccccaaacataggcctaattgag

SEQ ID NO: 2014980 - DNA, 25 bp, Homo sapien
tgtatgcatgtgatggtgcctgaga

SEQ ID NO: 2014981 - DNA, 25 bp, Homo sapien
ccagctggtcaagtttgaagatatt

SEQ ID NO: 2014982 - DNA, 25 bp, Homo sapien
gatttgctgcctactagctaccagc

SEQ ID NO: 2014983 - DNA, 25 bp, Homo sapien
gaaatatcaccaactaatactaatg

SEQ ID NO: 2014984 - DNA, 25 bp, Homo sapien
accaaatattgtttgccacctctac

SEQ ID NO: 2014985 - DNA, 25 bp, Homo sapien
tgtgtggagcacttgtagtcagccc

SEQ ID NO: 2014986 - DNA, 25 bp, Homo sapien
aaggtgtcagatatccgcagtgggc

SEQ ID NO: 2014987 - DNA, 25 bp, Homo sapien
tcgtttactccgaggctggttgcag

SEQ ID NO: 2014988 - DNA, 25 bp, Homo sapien
tacatcagggttcctacagcctaca

SEQ ID NO: 2014989 - DNA, 25 bp, Homo sapien
tatgtttgtacacatgaagctgata

SEQ ID NO: 2014990 - DNA, 25 bp, Homo sapien
ttatgtttgtacacatgaagctgat

SEQ ID NO: 2014991 - DNA, 25 bp, Homo sapien
atgtttgtacacatgaagctgataa

SEQ ID NO: 2014992 - DNA, 25 bp, Homo sapien
catgatcggacgagaagtatctagg

SEQ ID NO: 2014993 - DNA, 25 bp, Homo sapien
tccccgttggcggttacttcatgat

SEQ ID NO: 2014994 - DNA, 25 bp, Homo sapien
tatctaggtgactgaagatattcca

SEQ ID NO: 2014995 - DNA, 25 bp, Homo sapien
gcggttacttcatgatcggacgaga

SEQ ID NO: 2014996 - DNA, 25 bp, Homo sapien
acggagaggcgtctttcgacaccgg

SEQ ID NO: 2014997 - DNA, 25 bp, Homo sapien
gttcttccagccgcggacgggcacg

SEQ ID NO: 2014998 - DNA, 25 bp, Homo sapien
agacttgtccaagactgaaacttgc

SEQ ID NO: 2014999 - DNA, 25 bp, Homo sapien
agactgaaacttgcttaggttcttc

SEQ ID NO: 2015000 - DNA, 25 bp, Homo sapien
gacgacgcgggggtcttgcggagcc

SEQ ID NO: 2015001 - DNA, 25 bp, Homo sapien
gccgtagcgcgggagacgacgcggg

SEQ ID NO: 2015002 - DNA, 25 bp, Homo sapien
tggggcagcgcctgccgtagcgcgg

SEQ ID NO: 2015003 - DNA, 25 bp, Homo sapien
tgaggagaccgagctggggcagcgc

SEQ ID NO: 2015004 - DNA, 25 bp, Homo sapien
ctgagggcgggcgtgtccgggccgt

SEQ ID NO: 2015005 - DNA, 25 bp, Homo sapien
tggatacggcgccaccgagagaacc

SEQ ID NO: 2015006 - DNA, 25 bp, Homo sapien
tctgtcctgcggtccgtggttgccc

SEQ ID NO: 2015007 - DNA, 25 bp, Homo sapien
caagcgtccggcgtttcctgagggc

SEQ ID NO: 2015008 - DNA, 25 bp, Homo sapien
tggcacagaggatcctcggccgcgg

SEQ ID NO: 2015009 - DNA, 25 bp, Homo sapien
gcacagaggatcctcggccgcggcg

SEQ ID NO: 2015010 - DNA, 25 bp, Homo sapien
ctggcacagaggatcctcggccgcg

SEQ ID NO: 2015011 - DNA, 25 bp, Homo sapien
agctggcacagaggatcctcggccg

SEQ ID NO: 2015012 - DNA, 25 bp, Homo sapien
ttagactctcgcactcccaaactgt

SEQ ID NO: 2015013 - DNA, 25 bp, Homo sapien
aaaggttttaacgccagcctggcag

SEQ ID NO: 2015014 - DNA, 25 bp, Homo sapien
tatatagttgtcgtcttcccataac

SEQ ID NO: 2015015 - DNA, 25 bp, Homo sapien
tagttgtcgtcttcccataaccaaa

SEQ ID NO: 2015016 - DNA, 25 bp, Homo sapien
gcatctgagctttcacggccaaagc

SEQ ID NO: 2015017 - DNA, 25 bp, Homo sapien
cggccaaagctgtagcaaaggtgga

SEQ ID NO: 2015018 - DNA, 25 bp, Homo sapien
tacatctggccctggtaagtggttc

SEQ ID NO: 2015019 - DNA, 25 bp, Homo sapien
taagtggttcgagaaatctgcatct

SEQ ID NO: 2015020 - DNA, 25 bp, Homo sapien
tctctggaggatctgtggctaccat

SEQ ID NO: 2015021 - DNA, 25 bp, Homo sapien
gaccccaggccttctgaatggaaac

SEQ ID NO: 2015022 - DNA, 25 bp, Homo sapien
tgtggtcctggaactatcattatca

SEQ ID NO: 2015023 - DNA, 25 bp, Homo sapien
aatgcttatcgtgtagtagtccagg

SEQ ID NO: 2015024 - DNA, 25 bp, Homo sapien
gaatggaaacttacgggcctgtgcc

SEQ ID NO: 2015025 - DNA, 25 bp, Homo sapien
tttgccaacaccaacacattttacc

SEQ ID NO: 2015026 - DNA, 25 bp, Homo sapien
tgctttttgccaacaccaacacatt

SEQ ID NO: 2015027 - DNA, 25 bp, Homo sapien
tgtgacaacgtaacccgttcttctg

SEQ ID NO: 2015028 - DNA, 25 bp, Homo sapien
acgtaacccgttcttctgtaggcat

SEQ ID NO: 2015029 - DNA, 25 bp, Homo sapien
ttcttccctgagttaagatgtcttt

SEQ ID NO: 2015030 - DNA, 25 bp, Homo sapien
gttttcttccctgagttaagatgtc

SEQ ID NO: 2015031 - DNA, 25 bp, Homo sapien
ttccctgagttaagatgtctttaac

SEQ ID NO: 2015032 - DNA, 25 bp, Homo sapien
ctgttttcttccctgagttaagatg

SEQ ID NO: 2015033 - DNA, 25 bp, Homo sapien
gagctggctatgcaaacaacacacc

SEQ ID NO: 2015034 - DNA, 25 bp, Homo sapien
tatgttcgtctccagaaaatcatgg

SEQ ID NO: 2015035 - DNA, 25 bp, Homo sapien
gacctagactcccttgagatctgga

SEQ ID NO: 2015036 - DNA, 25 bp, Homo sapien
gagtgctttacccattatcaggcaa

SEQ ID NO: 2015037 - DNA, 25 bp, Homo sapien
gcctttagtctataagtgtctgacc

SEQ ID NO: 2015038 - DNA, 25 bp, Homo sapien
agaagatagttgaggaacactttcc

SEQ ID NO: 2015039 - DNA, 25 bp, Homo sapien
ccttgcaagaagaatcgtcactaag

SEQ ID NO: 2015040 - DNA, 25 bp, Homo sapien
caaagcctttgaggattatgggaat

SEQ ID NO: 2015041 - DNA, 25 bp, Homo sapien
tgttgactacgcaaacctcagggca

SEQ ID NO: 2015042 - DNA, 25 bp, Homo sapien
tgggatggacataaagagctttacc

SEQ ID NO: 2015043 - DNA, 25 bp, Homo sapien
tctgtgtgccaagatgagacatgtc

SEQ ID NO: 2015044 - DNA, 25 bp, Homo sapien
tcagggcaccttggcaagacttggg

SEQ ID NO: 2015045 - DNA, 25 bp, Homo sapien
gaaggcgatgaaacaagatctgaac

SEQ ID NO: 2015046 - DNA, 25 bp, Homo sapien
tctgaactaaaggacgtgtacgcca

SEQ ID NO: 2015047 - DNA, 25 bp, Homo sapien
ttataaaacactatcgaaggcgatg

SEQ ID NO: 2015048 - DNA, 25 bp, Homo sapien
caagatctgaactaaaggacgtgta

SEQ ID NO: 2015049 - DNA, 25 bp, Homo sapien
gaggagcaaagcgttttattcagac

SEQ ID NO: 2015050 - DNA, 25 bp, Homo sapien
gaaaagcagctcctatctgagatgc

SEQ ID NO: 2015051 - DNA, 25 bp, Homo sapien
gagttggccgctgtcaattgtttta

SEQ ID NO: 2015052 - DNA, 25 bp, Homo sapien
cgtccttaggacagaactgtggagc

SEQ ID NO: 2015053 - DNA, 25 bp, Homo sapien
aggcatgaagcatgcaactggagat

SEQ ID NO: 2015054 - DNA, 25 bp, Homo sapien
gattgggttaggattctcagattcc

SEQ ID NO: 2015055 - DNA, 25 bp, Homo sapien
gaatatctaggatcttcaggcatga

SEQ ID NO: 2015056 - DNA, 25 bp, Homo sapien
gattcctctggaacgcttgctgctc

SEQ ID NO: 2015057 - DNA, 25 bp, Homo sapien
tttagggtctacactatctttgttc

SEQ ID NO: 2015058 - DNA, 25 bp, Homo sapien
aagagccaatttagggtctacacta

SEQ ID NO: 2015059 - DNA, 25 bp, Homo sapien
caatttagggtctacactatctttg

SEQ ID NO: 2015060 - DNA, 25 bp, Homo sapien
gccaatttagggtctacactatctt

SEQ ID NO: 2015061 - DNA, 25 bp, Homo sapien
atactggctgctctgggaattttca

SEQ ID NO: 2015062 - DNA, 25 bp, Homo sapien
agaatagtgatactggctgctctgg

SEQ ID NO: 2015063 - DNA, 25 bp, Homo sapien
tactggctgctctgggaattttcat

SEQ ID NO: 2015064 - DNA, 25 bp, Homo sapien
ctgagaatagtgatactggctgctc

SEQ ID NO: 2015065 - DNA, 25 bp, Homo sapien
caaattgtgtgaggtttcccgtggc

SEQ ID NO: 2015066 - DNA, 25 bp, Homo sapien
attgtgtgaggtttcccgtggcccg

SEQ ID NO: 2015067 - DNA, 25 bp, Homo sapien
ccaaattgtgtgaggtttcccgtgg

SEQ ID NO: 2015068 - DNA, 25 bp, Homo sapien
ggtgaagcagctagtccaagatagt

SEQ ID NO: 2015069 - DNA, 25 bp, Homo sapien
tttattggccacatacagcagcaca

SEQ ID NO: 2015070 - DNA, 25 bp, Homo sapien
tctgatgccattgggacctgctgga

SEQ ID NO: 2015071 - DNA, 25 bp, Homo sapien
caagagtgcactgagctttattggc

SEQ ID NO: 2015072 - DNA, 25 bp, Homo sapien
ccacaaagtatactctggaattgac

SEQ ID NO: 2015073 - DNA, 25 bp, Homo sapien
ctctccacaaagtatactctggaat

SEQ ID NO: 2015074 - DNA, 25 bp, Homo sapien
acaaagtatactctggaattgactg

SEQ ID NO: 2015075 - DNA, 25 bp, Homo sapien
tcctctccacaaagtatactctgga

SEQ ID NO: 2015076 - DNA, 25 bp, Homo sapien
tgagtttttgaagcatatcatttcc

SEQ ID NO: 2015077 - DNA, 25 bp, Homo sapien
cacttgatggtagattgggtaagca

SEQ ID NO: 2015078 - DNA, 25 bp, Homo sapien
gatgggagattttttccgcttgagt

SEQ ID NO: 2015079 - DNA, 25 bp, Homo sapien
tatcatttcctaggagttctctgcc

SEQ ID NO: 2015080 - DNA, 25 bp, Homo sapien
cacacatccctaaagcctgctgaga

SEQ ID NO: 2015081 - DNA, 25 bp, Homo sapien
catccctaaagcctgctgagatcct

SEQ ID NO: 2015082 - DNA, 25 bp, Homo sapien
ctaaagcctgctgagatccttcacc

SEQ ID NO: 2015083 - DNA, 25 bp, Homo sapien
atccacacatccctaaagcctgctg

SEQ ID NO: 2015084 - DNA, 25 bp, Homo sapien
agcttggcttgaatgtgacctcctc

SEQ ID NO: 2015085 - DNA, 25 bp, Homo sapien
tgggcggtgaattttgcaaggaata

SEQ ID NO: 2015086 - DNA, 25 bp, Homo sapien
tctgctctgcatcctgtgtttgggc

SEQ ID NO: 2015087 - DNA, 25 bp, Homo sapien
gaaagtaaagcttggcttgaatgtg

SEQ ID NO: 2015088 - DNA, 25 bp, Homo sapien
catgaatccactggctacagctgta

SEQ ID NO: 2015089 - DNA, 25 bp, Homo sapien
gctgtatttttcagagggtgcctgt

SEQ ID NO: 2015090 - DNA, 25 bp, Homo sapien
aggcagctgcatgaatccactggct

SEQ ID NO: 2015091 - DNA, 25 bp, Homo sapien
ggctacagctgtatttttcagaggg

SEQ ID NO: 2015092 - DNA, 25 bp, Homo sapien
gctcaaggagttccaaggatttctc

SEQ ID NO: 2015093 - DNA, 25 bp, Homo sapien
tctcagagctcaaggagttccaagg

SEQ ID NO: 2015094 - DNA, 25 bp, Homo sapien
ggagttccaaggatttctctttgca

SEQ ID NO: 2015095 - DNA, 25 bp, Homo sapien
tcagagctcaaggagttccaaggat

SEQ ID NO: 2015096 - DNA, 25 bp, Homo sapien
taaaggaaatcaatacgttgaaggc

SEQ ID NO: 2015097 - DNA, 25 bp, Homo sapien
gaaggcttagctgcactcctatgtt

SEQ ID NO: 2015098 - DNA, 25 bp, Homo sapien
cgttgaaggcttagctgcactccta

SEQ ID NO: 2015099 - DNA, 25 bp, Homo sapien
aatcaatacgttgaaggcttagctg

SEQ ID NO: 2015100 - DNA, 25 bp, Homo sapien
cgtcaggcatagtgatggatgccac

SEQ ID NO: 2015101 - DNA, 25 bp, Homo sapien
tttccgttccactgacgtcaggcat

SEQ ID NO: 2015102 - DNA, 25 bp, Homo sapien
ttcaagatgggtggatgctttgcca

SEQ ID NO: 2015103 - DNA, 25 bp, Homo sapien
tgcatttccaagacatgagggtccc

SEQ ID NO: 2015104 - DNA, 25 bp, Homo sapien
cagacccaggagattagcaagcact

SEQ ID NO: 2015105 - DNA, 25 bp, Homo sapien
gaataacttcatgctcctacgtctg

SEQ ID NO: 2015106 - DNA, 25 bp, Homo sapien
gaattggtggtatcccatgaggtca

SEQ ID NO: 2015107 - DNA, 25 bp, Homo sapien
tccttgcacggcttttgggtaaaca

SEQ ID NO: 2015108 - DNA, 25 bp, Homo sapien
tttgttagccttgatgatctcgttc

SEQ ID NO: 2015109 - DNA, 25 bp, Homo sapien
ctctctggtttgttagccttgatga

SEQ ID NO: 2015110 - DNA, 25 bp, Homo sapien
ctaatagaccaagttattgttcatt

SEQ ID NO: 2015111 - DNA, 25 bp, Homo sapien
tcaaatgtaactccagtgcagctct

SEQ ID NO: 2015112 - DNA, 25 bp, Homo sapien
taaacattatcatcatcttctagtg

SEQ ID NO: 2015113 - DNA, 25 bp, Homo sapien
aaacattatcatcatcttctagtgc

SEQ ID NO: 2015114 - DNA, 25 bp, Homo sapien
ttaaacattatcatcatcttctagt

SEQ ID NO: 2015115 - DNA, 25 bp, Homo sapien
ctgagtagaaataagaccaaaagct

SEQ ID NO: 2015116 - DNA, 25 bp, Homo sapien
tgagtagaaataagaccaaaagctt

SEQ ID NO: 2015117 - DNA, 25 bp, Homo sapien
ataagaccaaaagctttccttccat

SEQ ID NO: 2015118 - DNA, 25 bp, Homo sapien
gatttgtcactctgatctccgtcat

SEQ ID NO: 2015119 - DNA, 25 bp, Homo sapien
tctaatgaaatcacttgtgtgtttt

SEQ ID NO: 2015120 - DNA, 25 bp, Homo sapien
tattgaaagcctggaaaggcatcgt

SEQ ID NO: 2015121 - DNA, 25 bp, Homo sapien
tgtgtgtttttctacacccgtgcaa

SEQ ID NO: 2015122 - DNA, 25 bp, Homo sapien
cactacattctccatcgcctttaag

SEQ ID NO: 2015123 - DNA, 25 bp, Homo sapien
cgcctttaagcatgtaggagtaaat

SEQ ID NO: 2015124 - DNA, 25 bp, Homo sapien
gtcttgcaaacactacattctccat

SEQ ID NO: 2015125 - DNA, 25 bp, Homo sapien
taaacactgtcttgcaaacactaca

SEQ ID NO: 2015126 - DNA, 25 bp, Homo sapien
tgtgaaggagatggtggtttccacc

SEQ ID NO: 2015127 - DNA, 25 bp, Homo sapien
tggtttttaacggatgctgtaacag

SEQ ID NO: 2015128 - DNA, 25 bp, Homo sapien
gactagtggtttttaacggatgctg

SEQ ID NO: 2015129 - DNA, 25 bp, Homo sapien
tatttgagatctggactagtggttt

SEQ ID NO: 2015130 - DNA, 25 bp, Homo sapien
ctggactagtggtttttaacggatg

SEQ ID NO: 2015131 - DNA, 25 bp, Homo sapien
cattttcttcataataacgactgct

SEQ ID NO: 2015132 - DNA, 25 bp, Homo sapien
ctgggccagagcgtgttgtacgttc

SEQ ID NO: 2015133 - DNA, 25 bp, Homo sapien
aacgactgctaacaatgtgctgcaa

SEQ ID NO: 2015134 - DNA, 25 bp, Homo sapien
cgttctatttgcgaaagacagaggc

SEQ ID NO: 2015135 - DNA, 25 bp, Homo sapien
ttgctcattcggtcctagggtgaca

SEQ ID NO: 2015136 - DNA, 25 bp, Homo sapien
cagttgctcaactttgtttaacctt

SEQ ID NO: 2015137 - DNA, 25 bp, Homo sapien
ctcagggggactaagtggcacgatg

SEQ ID NO: 2015138 - DNA, 25 bp, Homo sapien
cattcggtcctagggtgacagtggc

SEQ ID NO: 2015139 - DNA, 25 bp, Homo sapien
cgctgctccacagttgggtccccac

SEQ ID NO: 2015140 - DNA, 25 bp, Homo sapien
gggacgctgctccacagttgggtcc

SEQ ID NO: 2015141 - DNA, 25 bp, Homo sapien
ggacgctgctccacagttgggtccc

SEQ ID NO: 2015142 - DNA, 25 bp, Homo sapien
acgctgctccacagttgggtcccca

SEQ ID NO: 2015143 - DNA, 25 bp, Homo sapien
gctagcagtgggtgtggcaaaagca

SEQ ID NO: 2015144 - DNA, 25 bp, Homo sapien
ttttgctggcatgcctggtaatggc

SEQ ID NO: 2015145 - DNA, 25 bp, Homo sapien
ctgcaaatgcaaagtgtaagtagga

SEQ ID NO: 2015146 - DNA, 25 bp, Homo sapien
tggtaatggctagcagtgggtgtgg

SEQ ID NO: 2015147 - DNA, 25 bp, Homo sapien
ccatcctcacaattacttttcccag

SEQ ID NO: 2015148 - DNA, 25 bp, Homo sapien
ctcacaattacttttcccagatact

SEQ ID NO: 2015149 - DNA, 25 bp, Homo sapien
catcctcacaattacttttcccaga

SEQ ID NO: 2015150 - DNA, 25 bp, Homo sapien
tcctcacaattacttttcccagata

SEQ ID NO: 2015151 - DNA, 25 bp, Homo sapien
tgggcaattagcctatgatgcattg

SEQ ID NO: 2015152 - DNA, 25 bp, Homo sapien
caattagcctatgatgcattgcatc

SEQ ID NO: 2015153 - DNA, 25 bp, Homo sapien
attagcctatgatgcattgcatctg

SEQ ID NO: 2015154 - DNA, 25 bp, Homo sapien
tctgggcaattagcctatgatgcat

SEQ ID NO: 2015155 - DNA, 25 bp, Homo sapien
caatttctggttcccttcagacttt

SEQ ID NO: 2015156 - DNA, 25 bp, Homo sapien
cagtcaataaccccattgttactga

SEQ ID NO: 2015157 - DNA, 25 bp, Homo sapien
tcaatttctggttcccttcagactt

SEQ ID NO: 2015158 - DNA, 25 bp, Homo sapien
gtcaataaccccattgttactgact

SEQ ID NO: 2015159 - DNA, 25 bp, Homo sapien
tagagatcattaagttagccttggc

SEQ ID NO: 2015160 - DNA, 25 bp, Homo sapien
tggttcttcccaacaatgccaagga

SEQ ID NO: 2015161 - DNA, 25 bp, Homo sapien
gatttagcagtgatatccccgcata

SEQ ID NO: 2015162 - DNA, 25 bp, Homo sapien
tagccttggcttaaacggagcaata

SEQ ID NO: 2015163 - DNA, 25 bp, Homo sapien
gtgccactgacgtccaaccaaaaga

SEQ ID NO: 2015164 - DNA, 25 bp, Homo sapien
tatagggtttgcaccgttaggagca

SEQ ID NO: 2015165 - DNA, 25 bp, Homo sapien
tccctgtgttgcatgtggatgtgcc

SEQ ID NO: 2015166 - DNA, 25 bp, Homo sapien
gaggagtcccctgtggcattgtttc

SEQ ID NO: 2015167 - DNA, 25 bp, Homo sapien
tattgatccatactcgtagccagca

SEQ ID NO: 2015168 - DNA, 25 bp, Homo sapien
tccgggctgtaagctctattgatcc

SEQ ID NO: 2015169 - DNA, 25 bp, Homo sapien
ataacctttaaggcagcaaaagtgg

SEQ ID NO: 2015170 - DNA, 25 bp, Homo sapien
tccatattgaatttcagttctttcc

SEQ ID NO: 2015171 - DNA, 25 bp, Homo sapien
ctctggacgaacagtaattgtgcat

SEQ ID NO: 2015172 - DNA, 25 bp, Homo sapien
tctctggacgaacagtaattgtgca

SEQ ID NO: 2015173 - DNA, 25 bp, Homo sapien
acttctctctggacgaacagtaatt

SEQ ID NO: 2015174 - DNA, 25 bp, Homo sapien
tctctctggacgaacagtaattgtg

SEQ ID NO: 2015175 - DNA, 25 bp, Homo sapien
tgtttggtaatatgttttcaatgta

SEQ ID NO: 2015176 - DNA, 25 bp, Homo sapien
aaataaagctgaatgctgacatcca

SEQ ID NO: 2015177 - DNA, 25 bp, Homo sapien
cataatgtaattgggaaagggtgtt

SEQ ID NO: 2015178 - DNA, 25 bp, Homo sapien
tttcaatgtaacaaaataaagctga

SEQ ID NO: 2015179 - DNA, 25 bp, Homo sapien
ctgatatgatatttctgatgaagcc

SEQ ID NO: 2015180 - DNA, 25 bp, Homo sapien
tgatatttctgatgaagccgcaaag

SEQ ID NO: 2015181 - DNA, 25 bp, Homo sapien
tatgatatttctgatgaagccgcaa

SEQ ID NO: 2015182 - DNA, 25 bp, Homo sapien
gatatgatatttctgatgaagccgc

SEQ ID NO: 2015183 - DNA, 25 bp, Homo sapien
ccaagtgctgatgctgcctcttctc

SEQ ID NO: 2015184 - DNA, 25 bp, Homo sapien
cttctccaagtgctgatgctgcctc

SEQ ID NO: 2015185 - DNA, 25 bp, Homo sapien
tctccaagtgctgatgctgcctctt

SEQ ID NO: 2015186 - DNA, 25 bp, Homo sapien
tccaagtgctgatgctgcctcttct

SEQ ID NO: 2015187 - DNA, 25 bp, Homo sapien
atcaaagacttctggcgttcgtctt

SEQ ID NO: 2015188 - DNA, 25 bp, Homo sapien
tggcgttcgtcttctaaaatgccgt

SEQ ID NO: 2015189 - DNA, 25 bp, Homo sapien
tctggcgttcgtcttctaaaatgcc

SEQ ID NO: 2015190 - DNA, 25 bp, Homo sapien
gacttctggcgttcgtcttctaaaa

SEQ ID NO: 2015191 - DNA, 25 bp, Homo sapien
tcaaaaatcgtaatagtaaagctgg

SEQ ID NO: 2015192 - DNA, 25 bp, Homo sapien
ggctggcttggctgtatttagacat

SEQ ID NO: 2015193 - DNA, 25 bp, Homo sapien
aaagctggtcaatggcttcttggag

SEQ ID NO: 2015194 - DNA, 25 bp, Homo sapien
tagacatgaataagagatagactga

SEQ ID NO: 2015195 - DNA, 25 bp, Homo sapien
cagatatcctggtaagctgccatag

SEQ ID NO: 2015196 - DNA, 25 bp, Homo sapien
tctggtaccattgggataattggga

SEQ ID NO: 2015197 - DNA, 25 bp, Homo sapien
ttacactccttaatattctggtacc

SEQ ID NO: 2015198 - DNA, 25 bp, Homo sapien
ggtaagctgccatagcttggctcct

SEQ ID NO: 2015199 - DNA, 25 bp, Homo sapien
ctcctctccagttccatcaaccatc

SEQ ID NO: 2015200 - DNA, 25 bp, Homo sapien
ccagttccatcaaccatcattttta

SEQ ID NO: 2015201 - DNA, 25 bp, Homo sapien
ctccagttccatcaaccatcatttt

SEQ ID NO: 2015202 - DNA, 25 bp, Homo sapien
tccagttccatcaaccatcattttt

SEQ ID NO: 2015203 - DNA, 25 bp, Homo sapien
gccacatagtaagactatttttctg

SEQ ID NO: 2015204 - DNA, 25 bp, Homo sapien
gcctctgccacgatccatgtgtttc

SEQ ID NO: 2015205 - DNA, 25 bp, Homo sapien
ttttctgctccagtggagacgccag

SEQ ID NO: 2015206 - DNA, 25 bp, Homo sapien
gacgccagatctaatccagcctctg

SEQ ID NO: 2015207 - DNA, 25 bp, Homo sapien
ggctccctgtcccaaccaagaatca

SEQ ID NO: 2015208 - DNA, 25 bp, Homo sapien
tggctccctgtcccaaccaagaatc

SEQ ID NO: 2015209 - DNA, 25 bp, Homo sapien
ctggctccctgtcccaaccaagaat

SEQ ID NO: 2015210 - DNA, 25 bp, Homo sapien
gctccctgtcccaaccaagaatcat

SEQ ID NO: 2015211 - DNA, 25 bp, Homo sapien
gggcgggtagggagccatcctgata

SEQ ID NO: 2015212 - DNA, 25 bp, Homo sapien
ggtaagacgtgtgtcctttcaccac

SEQ ID NO: 2015213 - DNA, 25 bp, Homo sapien
ccatcctgatattaatttgtcaaca

SEQ ID NO: 2015214 - DNA, 25 bp, Homo sapien
tacagagtcaattctgaaggtcaaa

SEQ ID NO: 2015215 - DNA, 25 bp, Homo sapien
caagttttaattcagatgtcttatg

SEQ ID NO: 2015216 - DNA, 25 bp, Homo sapien
acattcaagttttaattcagatgtc

SEQ ID NO: 2015217 - DNA, 25 bp, Homo sapien
ttaattcagatgtcttatgtttttc

SEQ ID NO: 2015218 - DNA, 25 bp, Homo sapien
gttttaattcagatgtcttatgttt

SEQ ID NO: 2015219 - DNA, 25 bp, Homo sapien
tgcattctcagcagaaccattgata

SEQ ID NO: 2015220 - DNA, 25 bp, Homo sapien
tcctctccagagcatcagggcatcg

SEQ ID NO: 2015221 - DNA, 25 bp, Homo sapien
gcatcagggcatcggggaatcttat

SEQ ID NO: 2015222 - DNA, 25 bp, Homo sapien
agagcatcagggcatcggggaatct

SEQ ID NO: 2015223 - DNA, 25 bp, Homo sapien
cctctccagagcatcagggcatcgg

SEQ ID NO: 2015224 - DNA, 25 bp, Homo sapien
tgctcactccagtatgctgattaaa

SEQ ID NO: 2015225 - DNA, 25 bp, Homo sapien
ttttattattaaggatgctcactcc

SEQ ID NO: 2015226 - DNA, 25 bp, Homo sapien
ctgattaaagtggatctgacaaagc

SEQ ID NO: 2015227 - DNA, 25 bp, Homo sapien
tatgctgattaaagtggatctgaca

SEQ ID NO: 2015228 - DNA, 25 bp, Homo sapien
cttctcccatgaggcgtcaggcttg

SEQ ID NO: 2015229 - DNA, 25 bp, Homo sapien
tcttctcccatgaggcgtcaggctt

SEQ ID NO: 2015230 - DNA, 25 bp, Homo sapien
aattgactacgcacttctgcttctc

SEQ ID NO: 2015231 - DNA, 25 bp, Homo sapien
tgatataaaaattgactacgcactt

SEQ ID NO: 2015232 - DNA, 25 bp, Homo sapien
tacttaactctgataaggcagaaac

SEQ ID NO: 2015233 - DNA, 25 bp, Homo sapien
tgtccttacgggctcctgttaacaa

SEQ ID NO: 2015234 - DNA, 25 bp, Homo sapien
caaggtacttaactctgataaggca

SEQ ID NO: 2015235 - DNA, 25 bp, Homo sapien
tataacttgataaggctgaaatacc

SEQ ID NO: 2015236 - DNA, 25 bp, Homo sapien
ttatgctgagtcattttcaaaactg

SEQ ID NO: 2015237 - DNA, 25 bp, Homo sapien
ccactccacttgagagcagcagtgt

SEQ ID NO: 2015238 - DNA, 25 bp, Homo sapien
ccacatggtcttgcccactccactt

SEQ ID NO: 2015239 - DNA, 25 bp, Homo sapien
actccacttgagagcagcagtgtcc

SEQ ID NO: 2015240 - DNA, 25 bp, Homo sapien
tcttgcccactccacttgagagcag

SEQ ID NO: 2015241 - DNA, 25 bp, Homo sapien
aatgattggaaacctttgagcatgc

SEQ ID NO: 2015242 - DNA, 25 bp, Homo sapien
gacaacctttgttagtggagtcaac

SEQ ID NO: 2015243 - DNA, 25 bp, Homo sapien
tctttggactatttcccgtgcaatg

SEQ ID NO: 2015244 - DNA, 25 bp, Homo sapien
cagatccagataaggcatgcttgcc

SEQ ID NO: 2015245 - DNA, 25 bp, Homo sapien
gtgccaacacttttcccattgacag

SEQ ID NO: 2015246 - DNA, 25 bp, Homo sapien
gccaacacttttcccattgacaggg

SEQ ID NO: 2015247 - DNA, 25 bp, Homo sapien
ttcccattgacaggggtgtgaccca

SEQ ID NO: 2015248 - DNA, 25 bp, Homo sapien
gtgtgccaacacttttcccattgac

SEQ ID NO: 2015249 - DNA, 25 bp, Homo sapien
gacagtgcgtgtcagaccatttcca

SEQ ID NO: 2015250 - DNA, 25 bp, Homo sapien
cgtcttcatgtgcaaaagggagaca

SEQ ID NO: 2015251 - DNA, 25 bp, Homo sapien
aaagggagacagtgcgtgtcagacc

SEQ ID NO: 2015252 - DNA, 25 bp, Homo sapien
tgcgtgtcagaccatttccaaatga

SEQ ID NO: 2015253 - DNA, 25 bp, Homo sapien
cctcaactctttcactcgccttggg

SEQ ID NO: 2015254 - DNA, 25 bp, Homo sapien
aactctttcactcgccttgggcctt

SEQ ID NO: 2015255 - DNA, 25 bp, Homo sapien
tggtgtgctcccaaactcctcaact

SEQ ID NO: 2015256 - DNA, 25 bp, Homo sapien
cttcataactctgtggcccggttgg

SEQ ID NO: 2015257 - DNA, 25 bp, Homo sapien
cacctcccctaagactttcagactg

SEQ ID NO: 2015258 - DNA, 25 bp, Homo sapien
ttcacctcccctaagactttcagac

SEQ ID NO: 2015259 - DNA, 25 bp, Homo sapien
tttcacctcccctaagactttcaga

SEQ ID NO: 2015260 - DNA, 25 bp, Homo sapien
acctcccctaagactttcagactgc

SEQ ID NO: 2015261 - DNA, 25 bp, Homo sapien
aaggaaaatgagagagcctcctgtt

SEQ ID NO: 2015262 - DNA, 25 bp, Homo sapien
gagagagcctcctgtttcagtgttc

SEQ ID NO: 2015263 - DNA, 25 bp, Homo sapien
gagagcctcctgtttcagtgttcat

SEQ ID NO: 2015264 - DNA, 25 bp, Homo sapien
gaaaatgagagagcctcctgtttca

SEQ ID NO: 2015265 - DNA, 25 bp, Homo sapien
gactggccgatagagatttcgttct

SEQ ID NO: 2015266 - DNA, 25 bp, Homo sapien
aacatctgactggccgatagagatt

SEQ ID NO: 2015267 - DNA, 25 bp, Homo sapien
cgatagagatttcgttctctcacta

SEQ ID NO: 2015268 - DNA, 25 bp, Homo sapien
gagatttcgttctctcactatatga

SEQ ID NO: 2015269 - DNA, 25 bp, Homo sapien
cactgagtgtctgcagcaggttctg

SEQ ID NO: 2015270 - DNA, 25 bp, Homo sapien
tccacttgtacatgtcctctgcttc

SEQ ID NO: 2015271 - DNA, 25 bp, Homo sapien
tgccaaactcgattttcacaaacat

SEQ ID NO: 2015272 - DNA, 25 bp, Homo sapien
ggttctgcaaaatcaattccacttg

SEQ ID NO: 2015273 - DNA, 25 bp, Homo sapien
tgcaaagatggtatttggactccat

SEQ ID NO: 2015274 - DNA, 25 bp, Homo sapien
cttgcaaagatggtatttggactcc

SEQ ID NO: 2015275 - DNA, 25 bp, Homo sapien
ttgcaaagatggtatttggactcca

SEQ ID NO: 2015276 - DNA, 25 bp, Homo sapien
tctgaaactttttcagttgccttga

SEQ ID NO: 2015277 - DNA, 25 bp, Homo sapien
tggaactttgtaagttagaattctc

SEQ ID NO: 2015278 - DNA, 25 bp, Homo sapien
ctggaactttgtaagttagaattct

SEQ ID NO: 2015279 - DNA, 25 bp, Homo sapien
actttttcagttgccttgaaggaca

SEQ ID NO: 2015280 - DNA, 25 bp, Homo sapien
ctttaatggtcagtttcttccggag

SEQ ID NO: 2015281 - DNA, 25 bp, Homo sapien
tatactaaaagtggatggacaattt

SEQ ID NO: 2015282 - DNA, 25 bp, Homo sapien
tgtgttactaagcatgtctagctta

SEQ ID NO: 2015283 - DNA, 25 bp, Homo sapien
tgtaggaaattactcagttatacta

SEQ ID NO: 2015284 - DNA, 25 bp, Homo sapien
taaacctcttatagaattagtctgc

SEQ ID NO: 2015285 - DNA, 25 bp, Homo sapien
atgcatggttttcctaactccaaag

SEQ ID NO: 2015286 - DNA, 25 bp, Homo sapien
ccagaaatatggattgcccaaggtg

SEQ ID NO: 2015287 - DNA, 25 bp, Homo sapien
tgttcaatgaagcatctgtatgagg

SEQ ID NO: 2015288 - DNA, 25 bp, Homo sapien
tatggattgcccaaggtgttcaatg

SEQ ID NO: 2015289 - DNA, 25 bp, Homo sapien
tggcaaactccagaaatatggattg

SEQ ID NO: 2015290 - DNA, 25 bp, Homo sapien
acaatcataagcacttggcctccag

SEQ ID NO: 2015291 - DNA, 25 bp, Homo sapien
cattcaatactcaaattgatgtgga

SEQ ID NO: 2015292 - DNA, 25 bp, Homo sapien
tgtggatcaggagcccccctttatc

SEQ ID NO: 2015293 - DNA, 25 bp, Homo sapien
cccctttatcttgctgtttgacaat

SEQ ID NO: 2015294 - DNA, 25 bp, Homo sapien
tcagttacttctaatcttggtttaa

SEQ ID NO: 2015295 - DNA, 25 bp, Homo sapien
ggttattacatatgacccctgctgc

SEQ ID NO: 2015296 - DNA, 25 bp, Homo sapien
ctggttattacatatgacccctgct

SEQ ID NO: 2015297 - DNA, 25 bp, Homo sapien
ttattacatatgacccctgctgctc

SEQ ID NO: 2015298 - DNA, 25 bp, Homo sapien
acataaatgggtggaatgcgtttga

SEQ ID NO: 2015299 - DNA, 25 bp, Homo sapien
ggaatgcgtttgagaagataatcag

SEQ ID NO: 2015300 - DNA, 25 bp, Homo sapien
aatggtgctgttcaccaagataaaa

SEQ ID NO: 2015301 - DNA, 25 bp, Homo sapien
aaatggtgctgttcaccaagataaa

SEQ ID NO: 2015302 - DNA, 25 bp, Homo sapien
ttcctcttgggactgggaagttcat

SEQ ID NO: 2015303 - DNA, 25 bp, Homo sapien
cattcctcttgggactgggaagttc

SEQ ID NO: 2015304 - DNA, 25 bp, Homo sapien
gtcattcctcttgggactgggaagt

SEQ ID NO: 2015305 - DNA, 25 bp, Homo sapien
aggtcattcctcttgggactgggaa

SEQ ID NO: 2015306 - DNA, 25 bp, Homo sapien
tctgatatcttctctattgcatcag

SEQ ID NO: 2015307 - DNA, 25 bp, Homo sapien
gatatcttctctattgcatcagcca

SEQ ID NO: 2015308 - DNA, 25 bp, Homo sapien
cctctctgatatcttctctattgca

SEQ ID NO: 2015309 - DNA, 25 bp, Homo sapien
ccttgaaagcatcctgctcccccac

SEQ ID NO: 2015310 - DNA, 25 bp, Homo sapien
cccctcagggatgataatcgagcct

SEQ ID NO: 2015311 - DNA, 25 bp, Homo sapien
gatgagagtttctggcaggcgaggc

SEQ ID NO: 2015312 - DNA, 25 bp, Homo sapien
aggcgaggcggtcccctcagggatg

SEQ ID NO: 2015313 - DNA, 25 bp, Homo sapien
gagcctccgaacactcccgatttgt

SEQ ID NO: 2015314 - DNA, 25 bp, Homo sapien
taactggttgtgagttgtcaagccc

SEQ ID NO: 2015315 - DNA, 25 bp, Homo sapien
agctcatctgctgtattcctattca

SEQ ID NO: 2015316 - DNA, 25 bp, Homo sapien
tgtgacttctccttgatctgatctt

SEQ ID NO: 2015317 - DNA, 25 bp, Homo sapien
aatgttactctttggccctttacag

SEQ ID NO: 2015318 - DNA, 25 bp, Homo sapien
ccattgtcaaggtggcgtaattcat

SEQ ID NO: 2015319 - DNA, 25 bp, Homo sapien
cttccattgtcaaggtggcgtaatt

SEQ ID NO: 2015320 - DNA, 25 bp, Homo sapien
gtgacttgaggatagtctggtagcc

SEQ ID NO: 2015321 - DNA, 25 bp, Homo sapien
ctgtgacttgaggatagtctggtag

SEQ ID NO: 2015322 - DNA, 25 bp, Homo sapien
tttcaaaaccgggagtcagcaggcc

SEQ ID NO: 2015323 - DNA, 25 bp, Homo sapien
cctttgtttccaagaagtgcccaga

SEQ ID NO: 2015324 - DNA, 25 bp, Homo sapien
gcttgaacacattctacaggagagg

SEQ ID NO: 2015325 - DNA, 25 bp, Homo sapien
tcagcaggcctgatctttgccacag

SEQ ID NO: 2015326 - DNA, 25 bp, Homo sapien
gggacaaatacagggattacgcaaa

SEQ ID NO: 2015327 - DNA, 25 bp, Homo sapien
gctccagtgggaactgttgctccag

SEQ ID NO: 2015328 - DNA, 25 bp, Homo sapien
ctatgggttttaaggtagaggcctg

SEQ ID NO: 2015329 - DNA, 25 bp, Homo sapien
gtcagctatttagatctcagcaatc

SEQ ID NO: 2015330 - DNA, 25 bp, Homo sapien
agggtagtctcataagcgcaaggtg

SEQ ID NO: 2015331 - DNA, 25 bp, Homo sapien
ttacgtagactcatgaagggtagtc

SEQ ID NO: 2015332 - DNA, 25 bp, Homo sapien
tagactcatgaagggtagtctcata

SEQ ID NO: 2015333 - DNA, 25 bp, Homo sapien
ggtagtctcataagcgcaaggtgaa

SEQ ID NO: 2015334 - DNA, 25 bp, Homo sapien
tctaacatgttagcccggcaatgtt

SEQ ID NO: 2015335 - DNA, 25 bp, Homo sapien
gggttcagtagcaattgtcttacat

SEQ ID NO: 2015336 - DNA, 25 bp, Homo sapien
atgttagcccggcaatgttactgta

SEQ ID NO: 2015337 - DNA, 25 bp, Homo sapien
agcctgttacataatatgggttcag

SEQ ID NO: 2015338 - DNA, 25 bp, Homo sapien
ctgtactttaaccatatgtttccaa

SEQ ID NO: 2015339 - DNA, 25 bp, Homo sapien
tgtactttaaccatatgtttccaac

SEQ ID NO: 2015340 - DNA, 25 bp, Homo sapien
tttagagacaatgcttcagttttcc

SEQ ID NO: 2015341 - DNA, 25 bp, Homo sapien
tttccaacttttagagacaatgctt

SEQ ID NO: 2015342 - DNA, 25 bp, Homo sapien
gtggccagtgtgtggcatcactgaa

SEQ ID NO: 2015343 - DNA, 25 bp, Homo sapien
ctttctccttagtgtgtggccagtg

SEQ ID NO: 2015344 - DNA, 25 bp, Homo sapien
cctttctccttagtgtgtggccagt

SEQ ID NO: 2015345 - DNA, 25 bp, Homo sapien
ggccagtgtgtggcatcactgaagt

SEQ ID NO: 2015346 - DNA, 25 bp, Homo sapien
tcctcagtggtgactttcttcctct

SEQ ID NO: 2015347 - DNA, 25 bp, Homo sapien
acttcctcagtggtgactttcttcc

SEQ ID NO: 2015348 - DNA, 25 bp, Homo sapien
ctcagtggtgactttcttcctcttc

SEQ ID NO: 2015349 - DNA, 25 bp, Homo sapien
ttcctcagtggtgactttcttcctc

SEQ ID NO: 2015350 - DNA, 25 bp, Homo sapien
cattaggtgagaaatcgaaacatac

SEQ ID NO: 2015351 - DNA, 25 bp, Homo sapien
gaaacatactgtactagactgagag

SEQ ID NO: 2015352 - DNA, 25 bp, Homo sapien
ttagtgagaaatgtaagaaccttcc

SEQ ID NO: 2015353 - DNA, 25 bp, Homo sapien
catgaaatatgccaccaaaagtgct

SEQ ID NO: 2015354 - DNA, 25 bp, Homo sapien
ttctcacatagacaggcacagtcaa

SEQ ID NO: 2015355 - DNA, 25 bp, Homo sapien
cagtcaatgtggcaatatctcacat

SEQ ID NO: 2015356 - DNA, 25 bp, Homo sapien
agggccaccttcatagtttcttcaa

SEQ ID NO: 2015357 - DNA, 25 bp, Homo sapien
tcatcttcattctcacatagacagg

SEQ ID NO: 2015358 - DNA, 25 bp, Homo sapien
aaagcggtactcctgtttgacagtc

SEQ ID NO: 2015359 - DNA, 25 bp, Homo sapien
aatgataaagcggtactcctgtttg

SEQ ID NO: 2015360 - DNA, 25 bp, Homo sapien
cttgctaatgataaagcggtactcc

SEQ ID NO: 2015361 - DNA, 25 bp, Homo sapien
gcggtactcctgtttgacagtcttc

SEQ ID NO: 2015362 - DNA, 25 bp, Homo sapien
catatcctatagaaagccctgttcc

SEQ ID NO: 2015363 - DNA, 25 bp, Homo sapien
ggtgtctgccatcaccaaaatagag

SEQ ID NO: 2015364 - DNA, 25 bp, Homo sapien
tagagtgtttcattagggcatagtc

SEQ ID NO: 2015365 - DNA, 25 bp, Homo sapien
agctatttcttctatggtgtctgcc

SEQ ID NO: 2015366 - DNA, 25 bp, Homo sapien
tgagctatttcttctatggtgtctg

SEQ ID NO: 2015367 - DNA, 25 bp, Homo sapien
gtagatacttaatgcagtaagggaa

SEQ ID NO: 2015368 - DNA, 25 bp, Homo sapien
gtttcaaaagtagatacttaatgca

SEQ ID NO: 2015369 - DNA, 25 bp, Homo sapien
gcactgctgattttccgaggagaat

SEQ ID NO: 2015370 - DNA, 25 bp, Homo sapien
cactgctgattttccgaggagaatt

SEQ ID NO: 2015371 - DNA, 25 bp, Homo sapien
gaatacattaacattagagaggaga

SEQ ID NO: 2015372 - DNA, 25 bp, Homo sapien
agcagaaattaaggcagaatacatt

SEQ ID NO: 2015373 - DNA, 25 bp, Homo sapien
gtagataagtgttcatccttcagta

SEQ ID NO: 2015374 - DNA, 25 bp, Homo sapien
ggaggtcaactctataaagcagaaa

SEQ ID NO: 2015375 - DNA, 25 bp, Homo sapien
cagcagagacagtttcagctggaga

SEQ ID NO: 2015376 - DNA, 25 bp, Homo sapien
tccattgctggtcccgaagaggagc

SEQ ID NO: 2015377 - DNA, 25 bp, Homo sapien
ttccattgctggtcccgaagaggag

SEQ ID NO: 2015378 - DNA, 25 bp, Homo sapien
gagcagcagagacagtttcagctgg

SEQ ID NO: 2015379 - DNA, 25 bp, Homo sapien
gcaaaggcaacataaccgaaatgaa

SEQ ID NO: 2015380 - DNA, 25 bp, Homo sapien
aaccgaaatgaatgtctgaattatg

SEQ ID NO: 2015381 - DNA, 25 bp, Homo sapien
ggcaacataaccgaaatgaatgtct

SEQ ID NO: 2015382 - DNA, 25 bp, Homo sapien
gaattatgttcaaaaaggaagtgaa

SEQ ID NO: 2015383 - DNA, 25 bp, Homo sapien
ggtttctccaatcaagactcggttg

SEQ ID NO: 2015384 - DNA, 25 bp, Homo sapien
tcctgataagaggttcaaggtcatc

SEQ ID NO: 2015385 - DNA, 25 bp, Homo sapien
catatttcgattgttgagctaatgc

SEQ ID NO: 2015386 - DNA, 25 bp, Homo sapien
gaaatccaagagttcagaacacctg

SEQ ID NO: 2015387 - DNA, 25 bp, Homo sapien
ttgttaaggtcatgagcagtggctc

SEQ ID NO: 2015388 - DNA, 25 bp, Homo sapien
gctagacaaggcacacagtatcttt

SEQ ID NO: 2015389 - DNA, 25 bp, Homo sapien
tgggtccctatagcatcaagtatgc

SEQ ID NO: 2015390 - DNA, 25 bp, Homo sapien
cacaatttttgctgatagggctgct

SEQ ID NO: 2015391 - DNA, 25 bp, Homo sapien
catttgaccatattgcatttaggca

SEQ ID NO: 2015392 - DNA, 25 bp, Homo sapien
agatgagcacaatccagcatattaa

SEQ ID NO: 2015393 - DNA, 25 bp, Homo sapien
gaatatgtcatcactgctctcagta

SEQ ID NO: 2015394 - DNA, 25 bp, Homo sapien
tcagtgacttggcatctggacgtgc

SEQ ID NO: 2015395 - DNA, 25 bp, Homo sapien
tatagtcatcattcgttcagtgtga

SEQ ID NO: 2015396 - DNA, 25 bp, Homo sapien
tgcaaaggcatttatggagcccagc

SEQ ID NO: 2015397 - DNA, 25 bp, Homo sapien
gatgaggatcactaactcatagtga

SEQ ID NO: 2015398 - DNA, 25 bp, Homo sapien
gccacaagtccagggtatggataag

SEQ ID NO: 2015399 - DNA, 25 bp, Homo sapien
catcagagttaatctttttatccat

SEQ ID NO: 2015400 - DNA, 25 bp, Homo sapien
tttttatccattaataatccatgca

SEQ ID NO: 2015401 - DNA, 25 bp, Homo sapien
atctttttatccattaataatccat

SEQ ID NO: 2015402 - DNA, 25 bp, Homo sapien
taatctttttatccattaataatcc

SEQ ID NO: 2015403 - DNA, 25 bp, Homo sapien
gaggaaggcagacttaacgctcggt

SEQ ID NO: 2015404 - DNA, 25 bp, Homo sapien
catctccttctgggtaagtttaatt

SEQ ID NO: 2015405 - DNA, 25 bp, Homo sapien
ccggcccaggcacccgtggagcatc

SEQ ID NO: 2015406 - DNA, 25 bp, Homo sapien
catcaactggattgccatctccttc

SEQ ID NO: 2015407 - DNA, 25 bp, Homo sapien
gcaagcaaagcgagtcgacattatc

SEQ ID NO: 2015408 - DNA, 25 bp, Homo sapien
agcaagcaaagcgagtcgacattat

SEQ ID NO: 2015409 - DNA, 25 bp, Homo sapien
agcagcaagcaaagcgagtcgacat

SEQ ID NO: 2015410 - DNA, 25 bp, Homo sapien
gcagcaagcaaagcgagtcgacatt

SEQ ID NO: 2015411 - DNA, 25 bp, Homo sapien
gatgaggtaacagatcatggctgct

SEQ ID NO: 2015412 - DNA, 25 bp, Homo sapien
gattagtcatatggtcagatgccac

SEQ ID NO: 2015413 - DNA, 25 bp, Homo sapien
tgctatgttaccaagatcgtggaag

SEQ ID NO: 2015414 - DNA, 25 bp, Homo sapien
cacaacgtggttcctaccttgaggc

SEQ ID NO: 2015415 - DNA, 25 bp, Homo sapien
actcatagtttctgataatccctga

SEQ ID NO: 2015416 - DNA, 25 bp, Homo sapien
cactcatagtttctgataatccctg

SEQ ID NO: 2015417 - DNA, 25 bp, Homo sapien
tcaagcgcttttgttaagcctcttt

SEQ ID NO: 2015418 - DNA, 25 bp, Homo sapien
ttttgttaagcctctttgatgcctg

SEQ ID NO: 2015419 - DNA, 25 bp, Homo sapien
cttttgttaagcctctttgatgcct

SEQ ID NO: 2015420 - DNA, 25 bp, Homo sapien
gcgcttttgttaagcctctttgatg

SEQ ID NO: 2015421 - DNA, 25 bp, Homo sapien
caattggtgggattaggcttgacat

SEQ ID NO: 2015422 - DNA, 25 bp, Homo sapien
ctgagtccaagagtgggcaaaaaat

SEQ ID NO: 2015423 - DNA, 25 bp, Homo sapien
tctgcctatggcacaaattgtaaac

SEQ ID NO: 2015424 - DNA, 25 bp, Homo sapien
tctactttggactaatctatagagg

SEQ ID NO: 2015425 - DNA, 25 bp, Homo sapien
acatccacaaaatatgatcttcgtt

SEQ ID NO: 2015426 - DNA, 25 bp, Homo sapien
tatgatcttcgtttatattctgtga

SEQ ID NO: 2015427 - DNA, 25 bp, Homo sapien
acagctttgtactgtttgccttata

SEQ ID NO: 2015428 - DNA, 25 bp, Homo sapien
caaaatgtgtaggtggtttgtaagt

SEQ ID NO: 2015429 - DNA, 25 bp, Homo sapien
gactgtatggacacttgcatcttaa

SEQ ID NO: 2015430 - DNA, 25 bp, Homo sapien
tgttaatgttcccaatagtcaagct

SEQ ID NO: 2015431 - DNA, 25 bp, Homo sapien
aaaagcttagatgagtacggatacc

SEQ ID NO: 2015432 - DNA, 25 bp, Homo sapien
caaatatgcagtccaaaattcagga

SEQ ID NO: 2015433 - DNA, 25 bp, Homo sapien
tctttgcttgcagtactcctcatat

SEQ ID NO: 2015434 - DNA, 25 bp, Homo sapien
ggaaaataatttgtagccacaccta

SEQ ID NO: 2015435 - DNA, 25 bp, Homo sapien
ggcagatagattaataccccaggat

SEQ ID NO: 2015436 - DNA, 25 bp, Homo sapien
caggtttatcatatgcttattcagc

SEQ ID NO: 2015437 - DNA, 25 bp, Homo sapien
tatgtaaaagatgactacctcttct

SEQ ID NO: 2015438 - DNA, 25 bp, Homo sapien
tgtatttgcctttctatgttctttt

SEQ ID NO: 2015439 - DNA, 25 bp, Homo sapien
gatagagtgaaaattatgtattgta

SEQ ID NO: 2015440 - DNA, 25 bp, Homo sapien
ttatgtattgtaatatacacaccat

SEQ ID NO: 2015441 - DNA, 25 bp, Homo sapien
ccggaaacgcgccccagtgaaccag

SEQ ID NO: 2015442 - DNA, 25 bp, Homo sapien
cagcataactttcaccggtattcac

SEQ ID NO: 2015443 - DNA, 25 bp, Homo sapien
tatgcaaacaggttgaaagaatatt

SEQ ID NO: 2015444 - DNA, 25 bp, Homo sapien
gatgtcccattatgcaaacaggttg

SEQ ID NO: 2015445 - DNA, 25 bp, Homo sapien
aatgcattaaagcttgctgcattta

SEQ ID NO: 2015446 - DNA, 25 bp, Homo sapien
tgcatttaagagatgtcccattatg

SEQ ID NO: 2015447 - DNA, 25 bp, Homo sapien
aactttccaatagctgaatcgagtg

SEQ ID NO: 2015448 - DNA, 25 bp, Homo sapien
aaaactttccaatagctgaatcgag

SEQ ID NO: 2015449 - DNA, 25 bp, Homo sapien
actttccaatagctgaatcgagtgt

SEQ ID NO: 2015450 - DNA, 25 bp, Homo sapien
ctttccaatagctgaatcgagtgtc

SEQ ID NO: 2015451 - DNA, 25 bp, Homo sapien
catgcctgggacttgatcagtattt

SEQ ID NO: 2015452 - DNA, 25 bp, Homo sapien
gccacccatgcctgggacttgatca

SEQ ID NO: 2015453 - DNA, 25 bp, Homo sapien
acccatgcctgggacttgatcagta

SEQ ID NO: 2015454 - DNA, 25 bp, Homo sapien
cccatgcctgggacttgatcagtat

SEQ ID NO: 2015455 - DNA, 25 bp, Homo sapien
tcataccggcaattaagtttcaaca

SEQ ID NO: 2015456 - DNA, 25 bp, Homo sapien
tgactaaatcatgcccaaatggccc

SEQ ID NO: 2015457 - DNA, 25 bp, Homo sapien
tgaaatttgggttacacatttagac

SEQ ID NO: 2015458 - DNA, 25 bp, Homo sapien
tcttaatgttatcataccggcaatt

SEQ ID NO: 2015459 - DNA, 25 bp, Homo sapien
gagtcagcaggtgtggtatctgata

SEQ ID NO: 2015460 - DNA, 25 bp, Homo sapien
cagcaggtgtggtatctgataaggg

SEQ ID NO: 2015461 - DNA, 25 bp, Homo sapien
ttctggaggctgcacataaaggagt

SEQ ID NO: 2015462 - DNA, 25 bp, Homo sapien
gtcagcaggtgtggtatctgataag

SEQ ID NO: 2015463 - DNA, 25 bp, Homo sapien
tggttcccctggtagaggcagtaaa

SEQ ID NO: 2015464 - DNA, 25 bp, Homo sapien
gaagaaacagttacatgggcatgct

SEQ ID NO: 2015465 - DNA, 25 bp, Homo sapien
tcagaagtcaggagagtggttcccc

SEQ ID NO: 2015466 - DNA, 25 bp, Homo sapien
tttttctggatgaagctcacaagct

SEQ ID NO: 2015467 - DNA, 25 bp, Homo sapien
ggggctgatgtggttggctttggct

SEQ ID NO: 2015468 - DNA, 25 bp, Homo sapien
gctgatgtggttggctttggctcca

SEQ ID NO: 2015469 - DNA, 25 bp, Homo sapien
ctgatgtggttggctttggctccat

SEQ ID NO: 2015470 - DNA, 25 bp, Homo sapien
ggctgatgtggttggctttggctcc

SEQ ID NO: 2015471 - DNA, 25 bp, Homo sapien
ctttcacacactttgtcttcatcct

SEQ ID NO: 2015472 - DNA, 25 bp, Homo sapien
ttcacacactttgtcttcatcctgc

SEQ ID NO: 2015473 - DNA, 25 bp, Homo sapien
acacactttgtcttcatcctgccaa

SEQ ID NO: 2015474 - DNA, 25 bp, Homo sapien
cacacactttgtcttcatcctgcca

SEQ ID NO: 2015475 - DNA, 25 bp, Homo sapien
tcaaaactaagattgatgttggaga

SEQ ID NO: 2015476 - DNA, 25 bp, Homo sapien
ctaagattgatgttggagaaaaatt

SEQ ID NO: 2015477 - DNA, 25 bp, Homo sapien
caaaactaagattgatgttggagaa

SEQ ID NO: 2015478 - DNA, 25 bp, Homo sapien
aaactaagattgatgttggagaaaa

SEQ ID NO: 2015479 - DNA, 25 bp, Homo sapien
caaatgcagtggcataccctctggt

SEQ ID NO: 2015480 - DNA, 25 bp, Homo sapien
ggagacacattcagtccgtaacagt

SEQ ID NO: 2015481 - DNA, 25 bp, Homo sapien
gagtacagcggtggaatcacaacac

SEQ ID NO: 2015482 - DNA, 25 bp, Homo sapien
tatctaatcacgtaccaatggctcc

SEQ ID NO: 2015483 - DNA, 25 bp, Homo sapien
cgctcctcgcttacagagaagtggt

SEQ ID NO: 2015484 - DNA, 25 bp, Homo sapien
cctcgcttacagagaagtggtccca

SEQ ID NO: 2015485 - DNA, 25 bp, Homo sapien
tcctcgcttacagagaagtggtccc

SEQ ID NO: 2015486 - DNA, 25 bp, Homo sapien
gaagtggtcccaagatttctccaaa

SEQ ID NO: 2015487 - DNA, 25 bp, Homo sapien
tgagctacgggaggacattcaaacc

SEQ ID NO: 2015488 - DNA, 25 bp, Homo sapien
ttactctgagctacgggaggacatt

SEQ ID NO: 2015489 - DNA, 25 bp, Homo sapien
acagagaagtgcttaaaggagctga

SEQ ID NO: 2015490 - DNA, 25 bp, Homo sapien
aaattactctgagctacgggaggac

SEQ ID NO: 2015491 - DNA, 25 bp, Homo sapien
tttctgatgcaatggaaaaggtggc

SEQ ID NO: 2015492 - DNA, 25 bp, Homo sapien
tctgatgcaatggaaaaggtggcca

SEQ ID NO: 2015493 - DNA, 25 bp, Homo sapien
ctgatgcaatggaaaaggtggccat

SEQ ID NO: 2015494 - DNA, 25 bp, Homo sapien
ttctgatgcaatggaaaaggtggcc

SEQ ID NO: 2015495 - DNA, 25 bp, Homo sapien
tccttttctcatccgtacagttctg

SEQ ID NO: 2015496 - DNA, 25 bp, Homo sapien
ttctcatccgtacagttctggagtc

SEQ ID NO: 2015497 - DNA, 25 bp, Homo sapien
tcagttgcagccacatgtgtaaaca

SEQ ID NO: 2015498 - DNA, 25 bp, Homo sapien
ctcagttgcagccacatgtgtaaac

SEQ ID NO: 2015499 - DNA, 25 bp, Homo sapien
taagagatatgacgacctgagagca

SEQ ID NO: 2015500 - DNA, 25 bp, Homo sapien
cagcataagagatatgacgacctga

SEQ ID NO: 2015501 - DNA, 25 bp, Homo sapien
gatatgacgacctgagagcatttct

SEQ ID NO: 2015502 - DNA, 25 bp, Homo sapien
gacgacctgagagcatttcttgtat

SEQ ID NO: 2015503 - DNA, 25 bp, Homo sapien
tctttgggctgttgtctcacgacct

SEQ ID NO: 2015504 - DNA, 25 bp, Homo sapien
aaaggaaaagtgtggcccaactgat

SEQ ID NO: 2015505 - DNA, 25 bp, Homo sapien
ctgatagaacagtaattcgtctgga

SEQ ID NO: 2015506 - DNA, 25 bp, Homo sapien
gaatatcggaatggatctttgggct

SEQ ID NO: 2015507 - DNA, 25 bp, Homo sapien
atggaaagtcttgacggcaagttgt

SEQ ID NO: 2015508 - DNA, 25 bp, Homo sapien
tggaaagtcttgacggcaagttgtc

SEQ ID NO: 2015509 - DNA, 25 bp, Homo sapien
ggaaagtcttgacggcaagttgtcc

SEQ ID NO: 2015510 - DNA, 25 bp, Homo sapien
ttgtgtcctctctttctcgtccctg

SEQ ID NO: 2015511 - DNA, 25 bp, Homo sapien
gacttctacctcgtctatttaggcc

SEQ ID NO: 2015512 - DNA, 25 bp, Homo sapien
gatgtgttagaacttatatctgcca

SEQ ID NO: 2015513 - DNA, 25 bp, Homo sapien
tgtttggattccacctggctgatat

SEQ ID NO: 2015514 - DNA, 25 bp, Homo sapien
gtgaacaaaatagacatcacttctg

SEQ ID NO: 2015515 - DNA, 25 bp, Homo sapien
ctgctccttgaaagtgaacaaaata

SEQ ID NO: 2015516 - DNA, 25 bp, Homo sapien
gctccttgaaagtgaacaaaataga

SEQ ID NO: 2015517 - DNA, 25 bp, Homo sapien
gaacaaaatagacatcacttctgcc

SEQ ID NO: 2015518 - DNA, 25 bp, Homo sapien
tcagatcctgggtaactttagcttc

SEQ ID NO: 2015519 - DNA, 25 bp, Homo sapien
caggattcttctacgaagccaggaa

SEQ ID NO: 2015520 - DNA, 25 bp, Homo sapien
tgtcgccgcgtgacttaattgatga

SEQ ID NO: 2015521 - DNA, 25 bp, Homo sapien
ttcaagctcccgcaggcgaagttct

SEQ ID NO: 2015522 - DNA, 25 bp, Homo sapien
gagaatcaataaccacaccttgttc

SEQ ID NO: 2015523 - DNA, 25 bp, Homo sapien
caacaccatctagattgggcttcat

SEQ ID NO: 2015524 - DNA, 25 bp, Homo sapien
tccagaaccaccattgttgaataaa

SEQ ID NO: 2015525 - DNA, 25 bp, Homo sapien
tgttgaataaatcaacaccatctag

SEQ ID NO: 2015526 - DNA, 25 bp, Homo sapien
ttcaccgtttccagaaccaccattg

SEQ ID NO: 2015527 - DNA, 25 bp, Homo sapien
aagccgactccagtctctctatttc

SEQ ID NO: 2015528 - DNA, 25 bp, Homo sapien
cacagagacaaagccgactccagtc

SEQ ID NO: 2015529 - DNA, 25 bp, Homo sapien
agagacaaagccgactccagtctct

SEQ ID NO: 2015530 - DNA, 25 bp, Homo sapien
gacaaagccgactccagtctctcta

SEQ ID NO: 2015531 - DNA, 25 bp, Homo sapien
ttttggctttgattctttcagttct

SEQ ID NO: 2015532 - DNA, 25 bp, Homo sapien
ctctttcacattttttggctttgat

SEQ ID NO: 2015533 - DNA, 25 bp, Homo sapien
attttttggctttgattctttcagt

SEQ ID NO: 2015534 - DNA, 25 bp, Homo sapien
ttggctttgattctttcagttcttc

SEQ ID NO: 2015535 - DNA, 25 bp, Homo sapien
tatgtttgtgcacagacgtatacat

SEQ ID NO: 2015536 - DNA, 25 bp, Homo sapien
cgaaatgggaaacgttcatgatggc

SEQ ID NO: 2015537 - DNA, 25 bp, Homo sapien
ttgtgaacgccatacccagagaggt

SEQ ID NO: 2015538 - DNA, 25 bp, Homo sapien
tatacttatattgcacacacaccca

SEQ ID NO: 2015539 - DNA, 25 bp, Homo sapien
taaaattcttgtctgttataaccca

SEQ ID NO: 2015540 - DNA, 25 bp, Homo sapien
ctctcacttactttgctaccaaaag

SEQ ID NO: 2015541 - DNA, 25 bp, Homo sapien
aaatgtatgttaggaatgaaaagac

SEQ ID NO: 2015542 - DNA, 25 bp, Homo sapien
caccttacactgtataatgtcatac

SEQ ID NO: 2015543 - DNA, 25 bp, Homo sapien
tcgtaacactcttcagactccaagt

SEQ ID NO: 2015544 - DNA, 25 bp, Homo sapien
tggtcagctgctctcgtaacactct

SEQ ID NO: 2015545 - DNA, 25 bp, Homo sapien
ccatccctgtggatggtcagctgct

SEQ ID NO: 2015546 - DNA, 25 bp, Homo sapien
atggtcagctgctctcgtaacactc

SEQ ID NO: 2015547 - DNA, 25 bp, Homo sapien
gagttgtttctctcgtgtatcttga

SEQ ID NO: 2015548 - DNA, 25 bp, Homo sapien
acatttaattgctcgatactttcca

SEQ ID NO: 2015549 - DNA, 25 bp, Homo sapien
ctctcgtgtatcttgaaattttctt

SEQ ID NO: 2015550 - DNA, 25 bp, Homo sapien
gggtatttggcaaactcattctaag

SEQ ID NO: 2015551 - DNA, 25 bp, Homo sapien
cattatgttgaccaagaagaatgtc

SEQ ID NO: 2015552 - DNA, 25 bp, Homo sapien
tcttaactcacaaatcactctgtct

SEQ ID NO: 2015553 - DNA, 25 bp, Homo sapien
tatgttgaccaagaagaatgtcaaa

SEQ ID NO: 2015554 - DNA, 25 bp, Homo sapien
tcatcattatgttgaccaagaagaa

SEQ ID NO: 2015555 - DNA, 25 bp, Homo sapien
tcttgaaatcaggactttgagagtt

SEQ ID NO: 2015556 - DNA, 25 bp, Homo sapien
cctcttgtcccactccgaggtattt

SEQ ID NO: 2015557 - DNA, 25 bp, Homo sapien
gagagtttgcacttaatctattttt

SEQ ID NO: 2015558 - DNA, 25 bp, Homo sapien
tcccactccgaggtattttcagctt

SEQ ID NO: 2015559 - DNA, 25 bp, Homo sapien
caggtattagctggcacaaaaggaa

SEQ ID NO: 2015560 - DNA, 25 bp, Homo sapien
gcaaaagagcaaggagtatcaggta

SEQ ID NO: 2015561 - DNA, 25 bp, Homo sapien
aggcgtgtacgagtgaagacagact

SEQ ID NO: 2015562 - DNA, 25 bp, Homo sapien
gacagactctgcgtaggcatcagag

SEQ ID NO: 2015563 - DNA, 25 bp, Homo sapien
ttggaaataagatcattagcttaga

SEQ ID NO: 2015564 - DNA, 25 bp, Homo sapien
tctttattggaaataagatcattag

SEQ ID NO: 2015565 - DNA, 25 bp, Homo sapien
ctgaagatttgtcatattttaacat

SEQ ID NO: 2015566 - DNA, 25 bp, Homo sapien
ttattggaaataagatcattagctt

SEQ ID NO: 2015567 - DNA, 25 bp, Homo sapien
aatatagataccaccagagtagtaa

SEQ ID NO: 2015568 - DNA, 25 bp, Homo sapien
ctattacattggtttatgctttaaa

SEQ ID NO: 2015569 - DNA, 25 bp, Homo sapien
gataccaccagagtagtaattttcc

SEQ ID NO: 2015570 - DNA, 25 bp, Homo sapien
gagtagtaattttccaatctatcct

SEQ ID NO: 2015571 - DNA, 25 bp, Homo sapien
ttatgctgatgccacgggaccatgg

SEQ ID NO: 2015572 - DNA, 25 bp, Homo sapien
ctgagaagagcactcgacactgcca

SEQ ID NO: 2015573 - DNA, 25 bp, Homo sapien
taatgcagacttcatgctgagaaga

SEQ ID NO: 2015574 - DNA, 25 bp, Homo sapien
gacactgccaccgaagctctgtttc

SEQ ID NO: 2015575 - DNA, 25 bp, Homo sapien
tcctatggcttgttactggtcacaa

SEQ ID NO: 2015576 - DNA, 25 bp, Homo sapien
cttcaagcgtgagtgcagcagatgg

SEQ ID NO: 2015577 - DNA, 25 bp, Homo sapien
tgtctccagcacagagcttcaagcg

SEQ ID NO: 2015578 - DNA, 25 bp, Homo sapien
tatatttatctcaatcgctgccctc

SEQ ID NO: 2015579 - DNA, 25 bp, Homo sapien
aagacttctcacattttgctgctcc

SEQ ID NO: 2015580 - DNA, 25 bp, Homo sapien
gaagacttctcacattttgctgctc

SEQ ID NO: 2015581 - DNA, 25 bp, Homo sapien
tctcacattttgctgctccttgcac

SEQ ID NO: 2015582 - DNA, 25 bp, Homo sapien
acttctcacattttgctgctccttg

SEQ ID NO: 2015583 - DNA, 25 bp, Homo sapien
atgtgtccatatgctaccactcctc

SEQ ID NO: 2015584 - DNA, 25 bp, Homo sapien
taatatgggtaaaaagcatctcaac

SEQ ID NO: 2015585 - DNA, 25 bp, Homo sapien
tacccagccagttaatcatgtgtcc

SEQ ID NO: 2015586 - DNA, 25 bp, Homo sapien
tctatctggcataaggcaaggtagg

SEQ ID NO: 2015587 - DNA, 25 bp, Homo sapien
agtgaatgttaaagcggaagtcagg

SEQ ID NO: 2015588 - DNA, 25 bp, Homo sapien
aatgttaaagcggaagtcagggaat

SEQ ID NO: 2015589 - DNA, 25 bp, Homo sapien
gacacagaatcaaccataaccatag

SEQ ID NO: 2015590 - DNA, 25 bp, Homo sapien
cataaccataggaggtaactcaaaa

SEQ ID NO: 2015591 - DNA, 25 bp, Homo sapien
tctgggtacaggtgaggaatgggtt

SEQ ID NO: 2015592 - DNA, 25 bp, Homo sapien
tgggtacaggtgaggaatgggttta

SEQ ID NO: 2015593 - DNA, 25 bp, Homo sapien
ctgggtacaggtgaggaatgggttt

SEQ ID NO: 2015594 - DNA, 25 bp, Homo sapien
ctctgggtacaggtgaggaatgggt

SEQ ID NO: 2015595 - DNA, 25 bp, Homo sapien
cttttctgccgctttgtcatgctct

SEQ ID NO: 2015596 - DNA, 25 bp, Homo sapien
tgccgctttgtcatgctctccagct

SEQ ID NO: 2015597 - DNA, 25 bp, Homo sapien
ttctgccgctttgtcatgctctcca

SEQ ID NO: 2015598 - DNA, 25 bp, Homo sapien
tccagctttccaccctaatttctcc

SEQ ID NO: 2015599 - DNA, 25 bp, Homo sapien
caatagctcattgagcacgtattcc

SEQ ID NO: 2015600 - DNA, 25 bp, Homo sapien
tcaatagctcattgagcacgtattc

SEQ ID NO: 2015601 - DNA, 25 bp, Homo sapien
attgcctctcatcaccacttcagaa

SEQ ID NO: 2015602 - DNA, 25 bp, Homo sapien
gtctccagctgactgactgcattgc

SEQ ID NO: 2015603 - DNA, 25 bp, Homo sapien
tcctcttttttcatggtcgaagaaa

SEQ ID NO: 2015604 - DNA, 25 bp, Homo sapien
ctcctcttttttcatggtcgaagaa

SEQ ID NO: 2015605 - DNA, 25 bp, Homo sapien
taccactgaatagcatgttgaacat

SEQ ID NO: 2015606 - DNA, 25 bp, Homo sapien
aaagggcaccagcttggccgacttg

SEQ ID NO: 2015607 - DNA, 25 bp, Homo sapien
cagaatgttgccagcacagacgata

SEQ ID NO: 2015608 - DNA, 25 bp, Homo sapien
tgaaaatgctttcagtaccactgaa

SEQ ID NO: 2015609 - DNA, 25 bp, Homo sapien
caagagagacaacgtggtagcctgg

SEQ ID NO: 2015610 - DNA, 25 bp, Homo sapien
tctaatgacgagtagagcacccacg

SEQ ID NO: 2015611 - DNA, 25 bp, Homo sapien
tgggacgggatttcctaagcactgg

SEQ ID NO: 2015612 - DNA, 25 bp, Homo sapien
gcgtgggaacaagtgcagatgcaca

SEQ ID NO: 2015613 - DNA, 25 bp, Homo sapien
gcctgccctggccagcatgcccaca

SEQ ID NO: 2015614 - DNA, 25 bp, Homo sapien
ctgccctggccagcatgcccacact

SEQ ID NO: 2015615 - DNA, 25 bp, Homo sapien
ctgcctgccctggccagcatgccca

SEQ ID NO: 2015616 - DNA, 25 bp, Homo sapien
tgccctggccagcatgcccacactg

SEQ ID NO: 2015617 - DNA, 25 bp, Homo sapien
gtgctgctgcatgaccacgacgagt

SEQ ID NO: 2015618 - DNA, 25 bp, Homo sapien
tgctgcatgaccacgacgagtggct

SEQ ID NO: 2015619 - DNA, 25 bp, Homo sapien
gagtggctacatgaggctgcgttcc

SEQ ID NO: 2015620 - DNA, 25 bp, Homo sapien
tgaccacgacgagtggctacatgag

SEQ ID NO: 2015621 - DNA, 25 bp, Homo sapien
tggtgggcagcttttagccaggtct

SEQ ID NO: 2015622 - DNA, 25 bp, Homo sapien
cagcttttagccaggtctgcaaggg

SEQ ID NO: 2015623 - DNA, 25 bp, Homo sapien
ggtctgcaagggcatgaacctcaca

SEQ ID NO: 2015624 - DNA, 25 bp, Homo sapien
gggcatgaacctcacactctggctg

SEQ ID NO: 2015625 - DNA, 25 bp, Homo sapien
tcagaagcggatgcagctctgagtg

SEQ ID NO: 2015626 - DNA, 25 bp, Homo sapien
cagaagcggatgcagctctgagtga

SEQ ID NO: 2015627 - DNA, 25 bp, Homo sapien
gaagcggatgcagctctgagtgaca

SEQ ID NO: 2015628 - DNA, 25 bp, Homo sapien
agcggatgcagctctgagtgacacc

SEQ ID NO: 2015629 - DNA, 25 bp, Homo sapien
gcatgagtcagttctgcaatatttg

SEQ ID NO: 2015630 - DNA, 25 bp, Homo sapien
tatagtaggcatgttgaaggttcag

SEQ ID NO: 2015631 - DNA, 25 bp, Homo sapien
tgattgagtccctgctttagttctt

SEQ ID NO: 2015632 - DNA, 25 bp, Homo sapien
tgatccactcggttgtttgcatgag

SEQ ID NO: 2015633 - DNA, 25 bp, Homo sapien
cattaatgccatatgttaataaggg

SEQ ID NO: 2015634 - DNA, 25 bp, Homo sapien
atttatatcccattaatgccatatg

SEQ ID NO: 2015635 - DNA, 25 bp, Homo sapien
ctaaaatactatttagaagctgtcc

SEQ ID NO: 2015636 - DNA, 25 bp, Homo sapien
taagggagacaatctttagatatgc

SEQ ID NO: 2015637 - DNA, 25 bp, Homo sapien
cagttttgcaagtgcctgagttcag

SEQ ID NO: 2015638 - DNA, 25 bp, Homo sapien
gtgcctgagttcagtctctaagttt

SEQ ID NO: 2015639 - DNA, 25 bp, Homo sapien
ggagcttacggatctgattcaggga

SEQ ID NO: 2015640 - DNA, 25 bp, Homo sapien
agacctctggagcttacggatctga

SEQ ID NO: 2015641 - DNA, 25 bp, Homo sapien
tggaaatgtctttaaggccctaatc

SEQ ID NO: 2015642 - DNA, 25 bp, Homo sapien
tagtttctcagcgatgcttacagcc

SEQ ID NO: 2015643 - DNA, 25 bp, Homo sapien
ctcagagggaaaccacagcttaatt

SEQ ID NO: 2015644 - DNA, 25 bp, Homo sapien
taatgacccagcgtcttgtatggtt

SEQ ID NO: 2015645 - DNA, 25 bp, Homo sapien
tcagtgctgcgttcctattagtcat

SEQ ID NO: 2015646 - DNA, 25 bp, Homo sapien
cagtgcgcacttgaagatcgggcct

SEQ ID NO: 2015647 - DNA, 25 bp, Homo sapien
cgttcctattagtcatacaatcccc

SEQ ID NO: 2015648 - DNA, 25 bp, Homo sapien
tgaagatcgggcctctttgcccctc

SEQ ID NO: 2015649 - DNA, 25 bp, Homo sapien
tgaattgctcagtcagttggttgac

SEQ ID NO: 2015650 - DNA, 25 bp, Homo sapien
aattgctcagtcagttggttgacag

SEQ ID NO: 2015651 - DNA, 25 bp, Homo sapien
ttgctcagtcagttggttgacaggg

SEQ ID NO: 2015652 - DNA, 25 bp, Homo sapien
gatgaattgctcagtcagttggttg

SEQ ID NO: 2015653 - DNA, 25 bp, Homo sapien
tgtatttggatccagagataggcag

SEQ ID NO: 2015654 - DNA, 25 bp, Homo sapien
caaggagtcgtattcccagttccca

SEQ ID NO: 2015655 - DNA, 25 bp, Homo sapien
cctcaaggagtcgtattcccagttc

SEQ ID NO: 2015656 - DNA, 25 bp, Homo sapien
ttggatccagagataggcagtcccc

SEQ ID NO: 2015657 - DNA, 25 bp, Homo sapien
gaagcttggaaggtctgtatcaaga

SEQ ID NO: 2015658 - DNA, 25 bp, Homo sapien
taaaaagtcatagccaaacccaagc

SEQ ID NO: 2015659 - DNA, 25 bp, Homo sapien
cagttatgtctttcacgaattgtgc

SEQ ID NO: 2015660 - DNA, 25 bp, Homo sapien
gtctttggctcattgggttgtgttc

SEQ ID NO: 2015661 - DNA, 25 bp, Homo sapien
ccccatgatagtattatagagagca

SEQ ID NO: 2015662 - DNA, 25 bp, Homo sapien
ctcaccagatggcattacacatatg

SEQ ID NO: 2015663 - DNA, 25 bp, Homo sapien
gattccccgattatcaacatctctc

SEQ ID NO: 2015664 - DNA, 25 bp, Homo sapien
tacactgagagatcattttcatcca

SEQ ID NO: 2015665 - DNA, 25 bp, Homo sapien
taatactaaccatcaagtagactcg

SEQ ID NO: 2015666 - DNA, 25 bp, Homo sapien
caaactatggttctcagccatgaga

SEQ ID NO: 2015667 - DNA, 25 bp, Homo sapien
gaagccatttagatttcctagtcaa

SEQ ID NO: 2015668 - DNA, 25 bp, Homo sapien
catcaagtagactcgagtcccctca

SEQ ID NO: 2015669 - DNA, 25 bp, Homo sapien
gaagtatgtaaatgctttcagggat

SEQ ID NO: 2015670 - DNA, 25 bp, Homo sapien
cagtaaaggaatgtagagctcctga

SEQ ID NO: 2015671 - DNA, 25 bp, Homo sapien
aagtatatcgctgcaaatccagctg

SEQ ID NO: 2015672 - DNA, 25 bp, Homo sapien
ctgaactcgcataatttcccacaag

SEQ ID NO: 2015673 - DNA, 25 bp, Homo sapien
cagtgtttaagtccttctgataaga

SEQ ID NO: 2015674 - DNA, 25 bp, Homo sapien
tgggatgtccacaaactattcctgt

SEQ ID NO: 2015675 - DNA, 25 bp, Homo sapien
ttatctatgggcaaacagtaaatgt

SEQ ID NO: 2015676 - DNA, 25 bp, Homo sapien
agtaactaacatgattgattctgga

SEQ ID NO: 2015677 - DNA, 25 bp, Homo sapien
actttgaagggtgagtcgtatagct

SEQ ID NO: 2015678 - DNA, 25 bp, Homo sapien
ggtgagtcgtatagctgaaggtatc

SEQ ID NO: 2015679 - DNA, 25 bp, Homo sapien
ttgaagggtgagtcgtatagctgaa

SEQ ID NO: 2015680 - DNA, 25 bp, Homo sapien
tgagtcgtatagctgaaggtatcat

SEQ ID NO: 2015681 - DNA, 25 bp, Homo sapien
gagtatcagatctatgccaggagat

SEQ ID NO: 2015682 - DNA, 25 bp, Homo sapien
caaaattgagcatcagacttcccac

SEQ ID NO: 2015683 - DNA, 25 bp, Homo sapien
tatggtagacatggacttgaaagac

SEQ ID NO: 2015684 - DNA, 25 bp, Homo sapien
gaaagacaagaccacaatgttccaa

SEQ ID NO: 2015685 - DNA, 25 bp, Homo sapien
gttttttagcgaataaatgtgttga

SEQ ID NO: 2015686 - DNA, 25 bp, Homo sapien
gcgaacacttcaatccactaagcca

SEQ ID NO: 2015687 - DNA, 25 bp, Homo sapien
tatggcataaagtttccagcgaaca

SEQ ID NO: 2015688 - DNA, 25 bp, Homo sapien
tgtgttgattagtaaaacatatggc

SEQ ID NO: 2015689 - DNA, 25 bp, Homo sapien
catctaggtcacaggactttccact

SEQ ID NO: 2015690 - DNA, 25 bp, Homo sapien
tagtatattcgcaaatatcaacatc

SEQ ID NO: 2015691 - DNA, 25 bp, Homo sapien
tcacaggactttccactcacagttg

SEQ ID NO: 2015692 - DNA, 25 bp, Homo sapien
aaatatcaacatctaggtcacagga

SEQ ID NO: 2015693 - DNA, 25 bp, Homo sapien
cataattcccttaccagatttttgg

SEQ ID NO: 2015694 - DNA, 25 bp, Homo sapien
gaacatgaggcatttgaaacagtta

SEQ ID NO: 2015695 - DNA, 25 bp, Homo sapien
tgaatcggttaagttgtacccaatg

SEQ ID NO: 2015696 - DNA, 25 bp, Homo sapien
gcttagctcctacgaataagtgaga

SEQ ID NO: 2015697 - DNA, 25 bp, Homo sapien
catattcttcttagcatcgttggca

SEQ ID NO: 2015698 - DNA, 25 bp, Homo sapien
tcctctttacttttgcacatattct

SEQ ID NO: 2015699 - DNA, 25 bp, Homo sapien
gaacagatcattctcttcacttaaa

SEQ ID NO: 2015700 - DNA, 25 bp, Homo sapien
tacattacacatctacttgttggtg

SEQ ID NO: 2015701 - DNA, 25 bp, Homo sapien
tctcttcttcgtgtgggcatctgta

SEQ ID NO: 2015702 - DNA, 25 bp, Homo sapien
gcctggcttagctatcactcctgtt

SEQ ID NO: 2015703 - DNA, 25 bp, Homo sapien
ttttgcatcccaccatagaggcagc

SEQ ID NO: 2015704 - DNA, 25 bp, Homo sapien
gaaattgtatccctatctagcaaca

SEQ ID NO: 2015705 - DNA, 25 bp, Homo sapien
tactatacgtgtgcatcacaatgcc

SEQ ID NO: 2015706 - DNA, 25 bp, Homo sapien
gctggtactatacgtgtgcatcaca

SEQ ID NO: 2015707 - DNA, 25 bp, Homo sapien
cctcggtagctggtactatacgtgt

SEQ ID NO: 2015708 - DNA, 25 bp, Homo sapien
ctcctcggtagctggtactatacgt

SEQ ID NO: 2015709 - DNA, 25 bp, Homo sapien
tcatgaaaaattgtgcccagaagca

SEQ ID NO: 2015710 - DNA, 25 bp, Homo sapien
taaagtctggaagacacagactggt

SEQ ID NO: 2015711 - DNA, 25 bp, Homo sapien
tgtatagatatttaaacgctctgct

SEQ ID NO: 2015712 - DNA, 25 bp, Homo sapien
tgcatagcatgaattgccacttttt

SEQ ID NO: 2015713 - DNA, 25 bp, Homo sapien
tgctctcttttccgagaagcctctt

SEQ ID NO: 2015714 - DNA, 25 bp, Homo sapien
gctctcttttccgagaagcctcttc

SEQ ID NO: 2015715 - DNA, 25 bp, Homo sapien
gaaagtaggctggaattgcctgaga

SEQ ID NO: 2015716 - DNA, 25 bp, Homo sapien
tgattctatgtttagtcagaaacgg

SEQ ID NO: 2015717 - DNA, 25 bp, Homo sapien
cctgagaagatgatattgtggttgt

SEQ ID NO: 2015718 - DNA, 25 bp, Homo sapien
tgtggttgtgtcgttctatttttag

SEQ ID NO: 2015719 - DNA, 25 bp, Homo sapien
aggttttgtgataacggagctcccg

SEQ ID NO: 2015720 - DNA, 25 bp, Homo sapien
gacagaggaggttctaccaccacag

SEQ ID NO: 2015721 - DNA, 25 bp, Homo sapien
tgtgtacaccttgctccctggtgga

SEQ ID NO: 2015722 - DNA, 25 bp, Homo sapien
cctcagcaataggtttcaggactgc

SEQ ID NO: 2015723 - DNA, 25 bp, Homo sapien
taactaatatgcctgctacacaata

SEQ ID NO: 2015724 - DNA, 25 bp, Homo sapien
gctacacaatattagagagataaat

SEQ ID NO: 2015725 - DNA, 25 bp, Homo sapien
tatgcctgctacacaatattagaga

SEQ ID NO: 2015726 - DNA, 25 bp, Homo sapien
ttattttcctaactaatatgcctgc

SEQ ID NO: 2015727 - DNA, 25 bp, Homo sapien
gtagacctcacaaacattgaaactg

SEQ ID NO: 2015728 - DNA, 25 bp, Homo sapien
gaaaatcagttgcataaccttagga

SEQ ID NO: 2015729 - DNA, 25 bp, Homo sapien
caaagcctgtggcacattgtgtatg

SEQ ID NO: 2015730 - DNA, 25 bp, Homo sapien
tagaacagattcctgataagtcgtc

SEQ ID NO: 2015731 - DNA, 25 bp, Homo sapien
tgtgcatttaaatatcctccgtgtc

SEQ ID NO: 2015732 - DNA, 25 bp, Homo sapien
tagattcatggcaaaactgaagtac

SEQ ID NO: 2015733 - DNA, 25 bp, Homo sapien
gagagtagtctcattgcccttaaaa

SEQ ID NO: 2015734 - DNA, 25 bp, Homo sapien
agtggtacagttcctgcatttgatg

SEQ ID NO: 2015735 - DNA, 25 bp, Homo sapien
taatggttttcatacgtgtccccac

SEQ ID NO: 2015736 - DNA, 25 bp, Homo sapien
gcaatctaaggcacaattactcagg

SEQ ID NO: 2015737 - DNA, 25 bp, Homo sapien
tactcaggatttagacgccagaaga

SEQ ID NO: 2015738 - DNA, 25 bp, Homo sapien
tgtgcagaaggtgctagctacccct

SEQ ID NO: 2015739 - DNA, 25 bp, Homo sapien
agtcgtaaactacagtctcaagagg

SEQ ID NO: 2015740 - DNA, 25 bp, Homo sapien
agtggtgtttgatcttctggctttt

SEQ ID NO: 2015741 - DNA, 25 bp, Homo sapien
tactcagccagaatgaaccgtaacc

SEQ ID NO: 2015742 - DNA, 25 bp, Homo sapien
ccgagatcttcctggggagtcgtaa

SEQ ID NO: 2015743 - DNA, 25 bp, Homo sapien
gcagggctttgacctgactgtgaga

SEQ ID NO: 2015744 - DNA, 25 bp, Homo sapien
aatgtctgtgacatgcccctggcaa

SEQ ID NO: 2015745 - DNA, 25 bp, Homo sapien
tgcccttggtgttgaacagtcccaa

SEQ ID NO: 2015746 - DNA, 25 bp, Homo sapien
aataacatactgctcttaggcaagc

SEQ ID NO: 2015747 - DNA, 25 bp, Homo sapien
tgtaataaaagtaaggcccatgagg

SEQ ID NO: 2015748 - DNA, 25 bp, Homo sapien
cattttgttactgcggccaaaggca

SEQ ID NO: 2015749 - DNA, 25 bp, Homo sapien
tctgctcttgggctactggtaaata

SEQ ID NO: 2015750 - DNA, 25 bp, Homo sapien
tagagccttctgtaactgatttgcc

SEQ ID NO: 2015751 - DNA, 25 bp, Homo sapien
gactctgagtatattacattccgga

SEQ ID NO: 2015752 - DNA, 25 bp, Homo sapien
cagtgaaaagttcggtggatgccag

SEQ ID NO: 2015753 - DNA, 25 bp, Homo sapien
gtttcacagtacaatagtcgacaca

SEQ ID NO: 2015754 - DNA, 25 bp, Homo sapien
aaaagcaaagctacagaggcagtga

SEQ ID NO: 2015755 - DNA, 25 bp, Homo sapien
gcagccatgggatcacacgctccat

SEQ ID NO: 2015756 - DNA, 25 bp, Homo sapien
agcagccatgggatcacacgctcca

SEQ ID NO: 2015757 - DNA, 25 bp, Homo sapien
gatcagcagccatgggatcacacgc

SEQ ID NO: 2015758 - DNA, 25 bp, Homo sapien
tcagcagccatgggatcacacgctc

SEQ ID NO: 2015759 - DNA, 25 bp, Homo sapien
tggttgagaagctatctgtcactgt

SEQ ID NO: 2015760 - DNA, 25 bp, Homo sapien
agatggttgagaagctatctgtcac

SEQ ID NO: 2015761 - DNA, 25 bp, Homo sapien
cagatggttgagaagctatctgtca

SEQ ID NO: 2015762 - DNA, 25 bp, Homo sapien
gatggttgagaagctatctgtcact

SEQ ID NO: 2015763 - DNA, 25 bp, Homo sapien
cactacaacccatcgccataaataa

SEQ ID NO: 2015764 - DNA, 25 bp, Homo sapien
agtattatagttagttctctcgtca

SEQ ID NO: 2015765 - DNA, 25 bp, Homo sapien
cgttccactacaacccatcgccata

SEQ ID NO: 2015766 - DNA, 25 bp, Homo sapien
gttctctcgtcatctcgttccacta

SEQ ID NO: 2015767 - DNA, 25 bp, Homo sapien
tcaattaactctgggatgaaaggac

SEQ ID NO: 2015768 - DNA, 25 bp, Homo sapien
ctgccgcttaagattttcaattaac

SEQ ID NO: 2015769 - DNA, 25 bp, Homo sapien
gccgcttaagattttcaattaactc

SEQ ID NO: 2015770 - DNA, 25 bp, Homo sapien
gattttcaattaactctgggatgaa

SEQ ID NO: 2015771 - DNA, 25 bp, Homo sapien
ggtctaatgtcccatctccatatca

SEQ ID NO: 2015772 - DNA, 25 bp, Homo sapien
tctgtggtctaatgtcccatctcca

SEQ ID NO: 2015773 - DNA, 25 bp, Homo sapien
tagtctctgtggtctaatgtcccat

SEQ ID NO: 2015774 - DNA, 25 bp, Homo sapien
taatagtctctgtggtctaatgtcc

SEQ ID NO: 2015775 - DNA, 25 bp, Homo sapien
tgttggatttgggccttgactcagg

SEQ ID NO: 2015776 - DNA, 25 bp, Homo sapien
ttttgcccacttgatgtacattttc

SEQ ID NO: 2015777 - DNA, 25 bp, Homo sapien
actcatttccgttgctctggttgac

SEQ ID NO: 2015778 - DNA, 25 bp, Homo sapien
gatgtacattttcgtatttccagtg

SEQ ID NO: 2015779 - DNA, 25 bp, Homo sapien
taggccgtctctgggcatctgaggt

SEQ ID NO: 2015780 - DNA, 25 bp, Homo sapien
tgggcaaaatggtggatactagagc

SEQ ID NO: 2015781 - DNA, 25 bp, Homo sapien
gatactagagcctctttaggccgtc

SEQ ID NO: 2015782 - DNA, 25 bp, Homo sapien
tagagcctctttaggccgtctctgg

SEQ ID NO: 2015783 - DNA, 25 bp, Homo sapien
tgtagcaagccagacgaaaggcctt

SEQ ID NO: 2015784 - DNA, 25 bp, Homo sapien
aaaggccttgcgtcgactcgcagct

SEQ ID NO: 2015785 - DNA, 25 bp, Homo sapien
cactgtttgtatgaggatattcacc

SEQ ID NO: 2015786 - DNA, 25 bp, Homo sapien
gatttctatacctatcccattgcaa

SEQ ID NO: 2015787 - DNA, 25 bp, Homo sapien
tatttttctgagcttgctcctgata

SEQ ID NO: 2015788 - DNA, 25 bp, Homo sapien
cttcctttctatgactacaggtacc

SEQ ID NO: 2015789 - DNA, 25 bp, Homo sapien
ttcctttctatgactacaggtacca

SEQ ID NO: 2015790 - DNA, 25 bp, Homo sapien
gcttgctcctgataattaggtgtca

SEQ ID NO: 2015791 - DNA, 25 bp, Homo sapien
tatgtaagaatggaagcctaggttg

SEQ ID NO: 2015792 - DNA, 25 bp, Homo sapien
tgttgcaatcccctaggaagtttgg

SEQ ID NO: 2015793 - DNA, 25 bp, Homo sapien
gcaaatgtccatgccgttagcagct

SEQ ID NO: 2015794 - DNA, 25 bp, Homo sapien
tgtagcagggttgcatgtgacctca

SEQ ID NO: 2015795 - DNA, 25 bp, Homo sapien
tctagcttgtttcttttgaggttgt

SEQ ID NO: 2015796 - DNA, 25 bp, Homo sapien
tagcttgtttcttttgaggttgtag

SEQ ID NO: 2015797 - DNA, 25 bp, Homo sapien
gagagatgtccaaaatgatcaagtg

SEQ ID NO: 2015798 - DNA, 25 bp, Homo sapien
caaaatgatcaagtgtctagcttgt

SEQ ID NO: 2015799 - DNA, 25 bp, Homo sapien
tcttttgcagttgaatgtttccgta

SEQ ID NO: 2015800 - DNA, 25 bp, Homo sapien
acaggcttagaggacaaatcctccc

SEQ ID NO: 2015801 - DNA, 25 bp, Homo sapien
ccagctcttttgcagttgaatgttt

SEQ ID NO: 2015802 - DNA, 25 bp, Homo sapien
ggctggaacgttgggaagtaggtgc

SEQ ID NO: 2015803 - DNA, 25 bp, Homo sapien
aagccagtatcatccttttgttcct

SEQ ID NO: 2015804 - DNA, 25 bp, Homo sapien
gaaaaagccagtatcatccttttgt

SEQ ID NO: 2015805 - DNA, 25 bp, Homo sapien
agccagtatcatccttttgttcctc

SEQ ID NO: 2015806 - DNA, 25 bp, Homo sapien
gatgcgaaagctgtctctagctgct

SEQ ID NO: 2015807 - DNA, 25 bp, Homo sapien
aaggaacacacttttaggcagtcat

SEQ ID NO: 2015808 - DNA, 25 bp, Homo sapien
acttttaggcagtcatcaagaatgc

SEQ ID NO: 2015809 - DNA, 25 bp, Homo sapien
ccattagcatgagagatgcgaaagc

SEQ ID NO: 2015810 - DNA, 25 bp, Homo sapien
agagaacttaatgcggattttgggc

SEQ ID NO: 2015811 - DNA, 25 bp, Homo sapien
gaacttaatgcggattttgggctgc

SEQ ID NO: 2015812 - DNA, 25 bp, Homo sapien
agagaggagagaacttaatgcggat

SEQ ID NO: 2015813 - DNA, 25 bp, Homo sapien
taatgcggattttgggctgcagcct

SEQ ID NO: 2015814 - DNA, 25 bp, Homo sapien
cctctatattccataagtgggttcg

SEQ ID NO: 2015815 - DNA, 25 bp, Homo sapien
taagtgggttcgatgcaattgtaaa

SEQ ID NO: 2015816 - DNA, 25 bp, Homo sapien
tcgatgcaattgtaaagaaatagcc

SEQ ID NO: 2015817 - DNA, 25 bp, Homo sapien
gcttacagttctacctctatattcc

SEQ ID NO: 2015818 - DNA, 25 bp, Homo sapien
ctaatctgaagttcatgacagagat

SEQ ID NO: 2015819 - DNA, 25 bp, Homo sapien
gcgcacagctggccggagcgcacca

SEQ ID NO: 2015820 - DNA, 25 bp, Homo sapien
cagctggccggagcgcaccaccgcg

SEQ ID NO: 2015821 - DNA, 25 bp, Homo sapien
cggcgcacagctggccggagcgcac

SEQ ID NO: 2015822 - DNA, 25 bp, Homo sapien
gcacagctggccggagcgcaccacc

SEQ ID NO: 2015823 - DNA, 25 bp, Homo sapien
ggggacgcggggtcgcctgcagggc

SEQ ID NO: 2015824 - DNA, 25 bp, Homo sapien
gggacgcggggtcgcctgcagggcc

SEQ ID NO: 2015825 - DNA, 25 bp, Homo sapien
tggggacgcggggtcgcctgcaggg

SEQ ID NO: 2015826 - DNA, 25 bp, Homo sapien
agcgcgatcgggctcctgcgccccg

SEQ ID NO: 2015827 - DNA, 25 bp, Homo sapien
ggtctgcgcgggtctcgcatccagc

SEQ ID NO: 2015828 - DNA, 25 bp, Homo sapien
gctctccggagtcgagagccgccgt

SEQ ID NO: 2015829 - DNA, 25 bp, Homo sapien
cgcgatccgctctccggagtcgaga

SEQ ID NO: 2015830 - DNA, 25 bp, Homo sapien
gactatgtcgttaaagttggaggcc

SEQ ID NO: 2015831 - DNA, 25 bp, Homo sapien
tagccctgcttgactatgtcgttaa

SEQ ID NO: 2015832 - DNA, 25 bp, Homo sapien
cggattttcacgtagccctgcttga

SEQ ID NO: 2015833 - DNA, 25 bp, Homo sapien
caagcttcctgctgcggattttcac

SEQ ID NO: 2015834 - DNA, 25 bp, Homo sapien
gacagacttgagcattccgtcccgg

SEQ ID NO: 2015835 - DNA, 25 bp, Homo sapien
tatgcaggtgactctgtgaacgcag

SEQ ID NO: 2015836 - DNA, 25 bp, Homo sapien
catcgttaggcagaaatggcgttca

SEQ ID NO: 2015837 - DNA, 25 bp, Homo sapien
catccagtcgtaaagcaaagggctt

SEQ ID NO: 2015838 - DNA, 25 bp, Homo sapien
cccaagcagtgggtaagggactgta

SEQ ID NO: 2015839 - DNA, 25 bp, Homo sapien
tcaacaggttgctagcttccccagt

SEQ ID NO: 2015840 - DNA, 25 bp, Homo sapien
taattatctctgatgcaatcggcct

SEQ ID NO: 2015841 - DNA, 25 bp, Homo sapien
ggctgacttgctacctagaggacaa

SEQ ID NO: 2015842 - DNA, 25 bp, Homo sapien
tcctggctagcctgtggaagcatac

SEQ ID NO: 2015843 - DNA, 25 bp, Homo sapien
gactgccagatggattctcaatgca

SEQ ID NO: 2015844 - DNA, 25 bp, Homo sapien
tacaatctattctacaccccaggct

SEQ ID NO: 2015845 - DNA, 25 bp, Homo sapien
gaagcatacagtacctttcctagat

SEQ ID NO: 2015846 - DNA, 25 bp, Homo sapien
aaatgtaggatgctatttttaatac

SEQ ID NO: 2015847 - DNA, 25 bp, Homo sapien
taaatgtaggatgctatttttaata

SEQ ID NO: 2015848 - DNA, 25 bp, Homo sapien
ttaaatgtaggatgctatttttaat

SEQ ID NO: 2015849 - DNA, 25 bp, Homo sapien
gtttctcacattgtatctgccataa

SEQ ID NO: 2015850 - DNA, 25 bp, Homo sapien
ggattatcaattactaaagagagcg

SEQ ID NO: 2015851 - DNA, 25 bp, Homo sapien
agaccacaactaactagactagaag

SEQ ID NO: 2015852 - DNA, 25 bp, Homo sapien
aaagtagacttatcttgcacccaac

SEQ ID NO: 2015853 - DNA, 25 bp, Homo sapien
gaagtaggctagcagcaccaagcct

SEQ ID NO: 2015854 - DNA, 25 bp, Homo sapien
aagtaggctagcagcaccaagcctg

SEQ ID NO: 2015855 - DNA, 25 bp, Homo sapien
ctcgccgatggcgtcctggcctctc

SEQ ID NO: 2015856 - DNA, 25 bp, Homo sapien
acagcagcgtatctccggggcggca

SEQ ID NO: 2015857 - DNA, 25 bp, Homo sapien
atccccacagcagcgtatctccggg

SEQ ID NO: 2015858 - DNA, 25 bp, Homo sapien
tggcgtcctggcctctcgtgtcctg

SEQ ID NO: 2015859 - DNA, 25 bp, Homo sapien
tgccgcgctccatccgcctctggct

SEQ ID NO: 2015860 - DNA, 25 bp, Homo sapien
ggcgcctctgccgcgctccatccgc

SEQ ID NO: 2015861 - DNA, 25 bp, Homo sapien
ggcacaaacagtccttaaaggggca

SEQ ID NO: 2015862 - DNA, 25 bp, Homo sapien
tcctggggaagggtcggcacaaaca

SEQ ID NO: 2015863 - DNA, 25 bp, Homo sapien
ggagatcggacactcggttcaagta

SEQ ID NO: 2015864 - DNA, 25 bp, Homo sapien
cacgatgagataaggttggagccca

SEQ ID NO: 2015865 - DNA, 25 bp, Homo sapien
ttcaagtaggccacgatgagataag

SEQ ID NO: 2015866 - DNA, 25 bp, Homo sapien
ctaaggctggatacccagcgggtag

SEQ ID NO: 2015867 - DNA, 25 bp, Homo sapien
gaagttcacaaaatacagattggtc

SEQ ID NO: 2015868 - DNA, 25 bp, Homo sapien
aagttgaagttgtagtcggtgcgcg

SEQ ID NO: 2015869 - DNA, 25 bp, Homo sapien
gaaagttgaagttgtagtcggtgcg

SEQ ID NO: 2015870 - DNA, 25 bp, Homo sapien
tggaaagttgaagttgtagtcggtg

SEQ ID NO: 2015871 - DNA, 25 bp, Homo sapien
tcgatatttattgattagacgtctc

SEQ ID NO: 2015872 - DNA, 25 bp, Homo sapien
cacccagttgtaacacagcagccag

SEQ ID NO: 2015873 - DNA, 25 bp, Homo sapien
tcagctgtaatatcaccagagcatc

SEQ ID NO: 2015874 - DNA, 25 bp, Homo sapien
tattgattagacgtctctttcagct

SEQ ID NO: 2015875 - DNA, 25 bp, Homo sapien
taaagaaatattaacttgtgtcagc

SEQ ID NO: 2015876 - DNA, 25 bp, Homo sapien
aacagggctttcgatatgcattaga

SEQ ID NO: 2015877 - DNA, 25 bp, Homo sapien
taccaaatcgtgtatggccaaaatt

SEQ ID NO: 2015878 - DNA, 25 bp, Homo sapien
caggcaaatttctgaggtaacctat

SEQ ID NO: 2015879 - DNA, 25 bp, Homo sapien
ctgtaacctcttctgagagtctctg

SEQ ID NO: 2015880 - DNA, 25 bp, Homo sapien
cgcttgggactcttgactgtaacct

SEQ ID NO: 2015881 - DNA, 25 bp, Homo sapien
gtaacctcttctgagagtctctgca

SEQ ID NO: 2015882 - DNA, 25 bp, Homo sapien
ttgaagctctattcgcttgggactc

SEQ ID NO: 2015883 - DNA, 25 bp, Homo sapien
ggaagggctaatactcaggattcct

SEQ ID NO: 2015884 - DNA, 25 bp, Homo sapien
catgcattacatttagtgaacgagc

SEQ ID NO: 2015885 - DNA, 25 bp, Homo sapien
gaatagctgcaatccacataccagt

SEQ ID NO: 2015886 - DNA, 25 bp, Homo sapien
cacactaacgaaatgtgacatctgg

SEQ ID NO: 2015887 - DNA, 25 bp, Homo sapien
cagttttataacaccaagaagcatg

SEQ ID NO: 2015888 - DNA, 25 bp, Homo sapien
gcatgttcatcctttggcaaataca

SEQ ID NO: 2015889 - DNA, 25 bp, Homo sapien
gttacatgcattgacaagaagctaa

SEQ ID NO: 2015890 - DNA, 25 bp, Homo sapien
ggcttcaagtatttacacaaacagg

SEQ ID NO: 2015891 - DNA, 25 bp, Homo sapien
actgatatccgcacatccacgtcat

SEQ ID NO: 2015892 - DNA, 25 bp, Homo sapien
ctattccatgactgatatccgcaca

SEQ ID NO: 2015893 - DNA, 25 bp, Homo sapien
tccatgactgatatccgcacatcca

SEQ ID NO: 2015894 - DNA, 25 bp, Homo sapien
catgactgatatccgcacatccacg

SEQ ID NO: 2015895 - DNA, 25 bp, Homo sapien
ctcattgcatgaacgagtcatgaaa

SEQ ID NO: 2015896 - DNA, 25 bp, Homo sapien
catgaacgagtcatgaaagcttcag

SEQ ID NO: 2015897 - DNA, 25 bp, Homo sapien
tgcatgaacgagtcatgaaagcttc

SEQ ID NO: 2015898 - DNA, 25 bp, Homo sapien
gaacgagtcatgaaagcttcagagg

SEQ ID NO: 2015899 - DNA, 25 bp, Homo sapien
tcctccttctaagacctaaggaatc

SEQ ID NO: 2015900 - DNA, 25 bp, Homo sapien
tctaagacctaaggaatctaaggcc

SEQ ID NO: 2015901 - DNA, 25 bp, Homo sapien
ccttctaagacctaaggaatctaag

SEQ ID NO: 2015902 - DNA, 25 bp, Homo sapien
ctccttctaagacctaaggaatcta

SEQ ID NO: 2015903 - DNA, 25 bp, Homo sapien
gaactaaccccaaaatcatgtggaa

SEQ ID NO: 2015904 - DNA, 25 bp, Homo sapien
tgaaagcatcactaacgcatggata

SEQ ID NO: 2015905 - DNA, 25 bp, Homo sapien
taaatcctttcctcaaattggactg

SEQ ID NO: 2015906 - DNA, 25 bp, Homo sapien
ggtttagtcatcattaccccttcaa

SEQ ID NO: 2015907 - DNA, 25 bp, Homo sapien
tttgctagaagccttcttgaaaacc

SEQ ID NO: 2015908 - DNA, 25 bp, Homo sapien
aagctgccttttcatctggaaattt

SEQ ID NO: 2015909 - DNA, 25 bp, Homo sapien
gaaaaccaaccagcatcgtctgaaa

SEQ ID NO: 2015910 - DNA, 25 bp, Homo sapien
tctgggtcctttgctagaagccttc

SEQ ID NO: 2015911 - DNA, 25 bp, Homo sapien
agaggcaactatgaccaaatttaca

SEQ ID NO: 2015912 - DNA, 25 bp, Homo sapien
gaccaaatttacaacttggccaatg

SEQ ID NO: 2015913 - DNA, 25 bp, Homo sapien
acttggccaatgtacacttctgaag

SEQ ID NO: 2015914 - DNA, 25 bp, Homo sapien
gaggcaactatgaccaaatttacaa

SEQ ID NO: 2015915 - DNA, 25 bp, Homo sapien
gcttgtttcctcgtggccacaaaat

SEQ ID NO: 2015916 - DNA, 25 bp, Homo sapien
aggcttgtttcctcgtggccacaaa

SEQ ID NO: 2015917 - DNA, 25 bp, Homo sapien
caaaatgactgctgcatgtccagcc

SEQ ID NO: 2015918 - DNA, 25 bp, Homo sapien
ttgtttcctcgtggccacaaaatga

SEQ ID NO: 2015919 - DNA, 25 bp, Homo sapien
taatgagaagttgcaaacaatctag

SEQ ID NO: 2015920 - DNA, 25 bp, Homo sapien
taaaatatggtgaaggtaaaccatg

SEQ ID NO: 2015921 - DNA, 25 bp, Homo sapien
aatcttaattacagcactgtttgag

SEQ ID NO: 2015922 - DNA, 25 bp, Homo sapien
gtttctatcactaggagaaatggaa

SEQ ID NO: 2015923 - DNA, 25 bp, Homo sapien
cagtaggtccactcttgcccataat

SEQ ID NO: 2015924 - DNA, 25 bp, Homo sapien
cctggagaagacagccagtaggtcc

SEQ ID NO: 2015925 - DNA, 25 bp, Homo sapien
aaagctcctttatactcctgtggtc

SEQ ID NO: 2015926 - DNA, 25 bp, Homo sapien
taaaattatgaggagtctccgggtc

SEQ ID NO: 2015927 - DNA, 25 bp, Homo sapien
tgagctggtgagctcttcatctgcc

SEQ ID NO: 2015928 - DNA, 25 bp, Homo sapien
tagccagtagggtccggggacatcc

SEQ ID NO: 2015929 - DNA, 25 bp, Homo sapien
ttactgagctggtgagctcttcatc

SEQ ID NO: 2015930 - DNA, 25 bp, Homo sapien
ctccactgggaaactagccagtagg

SEQ ID NO: 2015931 - DNA, 25 bp, Homo sapien
atctatttgagaaccttttccaaag

SEQ ID NO: 2015932 - DNA, 25 bp, Homo sapien
aatgaaaattatgtgtggcttaaga

SEQ ID NO: 2015933 - DNA, 25 bp, Homo sapien
tctaatttcagagccttaggatatc

SEQ ID NO: 2015934 - DNA, 25 bp, Homo sapien
aatggatagcctagcaaaatgcagc

SEQ ID NO: 2015935 - DNA, 25 bp, Homo sapien
tatttttgatattgtgcagttcagt

SEQ ID NO: 2015936 - DNA, 25 bp, Homo sapien
ggcagtctggttatatttttgatat

SEQ ID NO: 2015937 - DNA, 25 bp, Homo sapien
ctctcggggcagtctggttatattt

SEQ ID NO: 2015938 - DNA, 25 bp, Homo sapien
ttttgatattgtgcagttcagttac

SEQ ID NO: 2015939 - DNA, 25 bp, Homo sapien
gactcacaggcaaatgtcttcgatg

SEQ ID NO: 2015940 - DNA, 25 bp, Homo sapien
tgtcttcgatgtttcatcgtgaaag

SEQ ID NO: 2015941 - DNA, 25 bp, Homo sapien
agatgattgccaccgcatgcttctt

SEQ ID NO: 2015942 - DNA, 25 bp, Homo sapien
gtttcatcgtgaaagatgattgcca

SEQ ID NO: 2015943 - DNA, 25 bp, Homo sapien
tgtgtaacgataaggtgctctgact

SEQ ID NO: 2015944 - DNA, 25 bp, Homo sapien
ggagttgggcgctgctctgttatca

SEQ ID NO: 2015945 - DNA, 25 bp, Homo sapien
ttgcacagaaccttgtgtaacgata

SEQ ID NO: 2015946 - DNA, 25 bp, Homo sapien
gttatcacacttcccgtctgaacac

SEQ ID NO: 2015947 - DNA, 25 bp, Homo sapien
aatactcagaaatgggattgccaga

SEQ ID NO: 2015948 - DNA, 25 bp, Homo sapien
acatctttgccgacacttgttgtca

SEQ ID NO: 2015949 - DNA, 25 bp, Homo sapien
gatttgttatgttcagagcaccttt

SEQ ID NO: 2015950 - DNA, 25 bp, Homo sapien
catttccgttactaatacactaggg

SEQ ID NO: 2015951 - DNA, 25 bp, Homo sapien
cctatcgctcagtcttttctgtctc

SEQ ID NO: 2015952 - DNA, 25 bp, Homo sapien
tcctatcgctcagtcttttctgtct

SEQ ID NO: 2015953 - DNA, 25 bp, Homo sapien
ctcctatcgctcagtcttttctgtc

SEQ ID NO: 2015954 - DNA, 25 bp, Homo sapien
ccgtcctctcaaatggttcaatatc

SEQ ID NO: 2015955 - DNA, 25 bp, Homo sapien
gatccgtcctctcaaatggttcaat

SEQ ID NO: 2015956 - DNA, 25 bp, Homo sapien
ccttgatccgtcctctcaaatggtt

SEQ ID NO: 2015957 - DNA, 25 bp, Homo sapien
caggaaatgtgttcatattgatata

SEQ ID NO: 2015958 - DNA, 25 bp, Homo sapien
ggtgctaggtgtatgatcttgtcca

SEQ ID NO: 2015959 - DNA, 25 bp, Homo sapien
ggcaaagccttacggaaatagtcac

SEQ ID NO: 2015960 - DNA, 25 bp, Homo sapien
gctgacactgatagagcacttactg

SEQ ID NO: 2015961 - DNA, 25 bp, Homo sapien
tttaaacctaggcagttggtgctag

SEQ ID NO: 2015962 - DNA, 25 bp, Homo sapien
ttaaatctaattttctgctgacatc

SEQ ID NO: 2015963 - DNA, 25 bp, Homo sapien
gacctgcattaaatctaattttctg

SEQ ID NO: 2015964 - DNA, 25 bp, Homo sapien
ggtgacctgcattaaatctaatttt

SEQ ID NO: 2015965 - DNA, 25 bp, Homo sapien
tgcattaaatctaattttctgctga

SEQ ID NO: 2015966 - DNA, 25 bp, Homo sapien
cattctgcaatttccattcaatacc

SEQ ID NO: 2015967 - DNA, 25 bp, Homo sapien
tgtgtcattctgcaatttccattca

SEQ ID NO: 2015968 - DNA, 25 bp, Homo sapien
gtcattctgcaatttccattcaata

SEQ ID NO: 2015969 - DNA, 25 bp, Homo sapien
ttctgcaatttccattcaatacctt

SEQ ID NO: 2015970 - DNA, 25 bp, Homo sapien
ggcaatactctaaggaatccagcag

SEQ ID NO: 2015971 - DNA, 25 bp, Homo sapien
ggatagcgcttggattttcggacac

SEQ ID NO: 2015972 - DNA, 25 bp, Homo sapien
catactgatcattcctttggcaggg

SEQ ID NO: 2015973 - DNA, 25 bp, Homo sapien
tgggccagctggtcacacgttatct

SEQ ID NO: 2015974 - DNA, 25 bp, Homo sapien
tagcataagaaacaggtgtgcctgg

SEQ ID NO: 2015975 - DNA, 25 bp, Homo sapien
gaactaagagccacagagtgtgtgc

SEQ ID NO: 2015976 - DNA, 25 bp, Homo sapien
gattgtgtcaactggagcccacctg

SEQ ID NO: 2015977 - DNA, 25 bp, Homo sapien
ctaagccccggtgtcaacaggaaag

SEQ ID NO: 2015978 - DNA, 25 bp, Homo sapien
cagcaattagccccttgagcattta

SEQ ID NO: 2015979 - DNA, 25 bp, Homo sapien
aatcagcaattagccccttgagcat

SEQ ID NO: 2015980 - DNA, 25 bp, Homo sapien
gagcatttatcttggataaatgaaa

SEQ ID NO: 2015981 - DNA, 25 bp, Homo sapien
aagaatcagcaattagccccttgag

SEQ ID NO: 2015982 - DNA, 25 bp, Homo sapien
tgacgtgctttcaactagcagttta

SEQ ID NO: 2015983 - DNA, 25 bp, Homo sapien
tcatggacttaaggggtcacctact

SEQ ID NO: 2015984 - DNA, 25 bp, Homo sapien
tcttcatggacttaaggggtcacct

SEQ ID NO: 2015985 - DNA, 25 bp, Homo sapien
aagtgacgtgctttcaactagcagt

SEQ ID NO: 2015986 - DNA, 25 bp, Homo sapien
tttaaccaccgccttgatgaagggc

SEQ ID NO: 2015987 - DNA, 25 bp, Homo sapien
ccaccgccttgatgaagggcattta

SEQ ID NO: 2015988 - DNA, 25 bp, Homo sapien
tattccatatcaagattgttcttaa

SEQ ID NO: 2015989 - DNA, 25 bp, Homo sapien
ggctgcagcatattccatatcaaga

SEQ ID NO: 2015990 - DNA, 25 bp, Homo sapien
ctgatgctgcccgaaaatgtcctgt

SEQ ID NO: 2015991 - DNA, 25 bp, Homo sapien
ggacactagctgaccaaaggccatt

SEQ ID NO: 2015992 - DNA, 25 bp, Homo sapien
tgtaaatgcctatgggagccattgc

SEQ ID NO: 2015993 - DNA, 25 bp, Homo sapien
cttggtaatgaaagaaggacaccct

SEQ ID NO: 2015994 - DNA, 25 bp, Homo sapien
ggctctccttgatggtcaacaccat

SEQ ID NO: 2015995 - DNA, 25 bp, Homo sapien
acaccatcaaatttgggtaatgttt

SEQ ID NO: 2015996 - DNA, 25 bp, Homo sapien
aacactgggctctccttgatggtca

SEQ ID NO: 2015997 - DNA, 25 bp, Homo sapien
caccatcaaatttgggtaatgtttt

SEQ ID NO: 2015998 - DNA, 25 bp, Homo sapien
gcagaggtgcttgcaccactcctcg

SEQ ID NO: 2015999 - DNA, 25 bp, Homo sapien
ttgcaccactcctcggcctccagct

SEQ ID NO: 2016000 - DNA, 25 bp, Homo sapien
tgcttgcaccactcctcggcctcca

SEQ ID NO: 2016001 - DNA, 25 bp, Homo sapien
cagaggtgcttgcaccactcctcgg

SEQ ID NO: 2016002 - DNA, 25 bp, Homo sapien
caaggctgatatcattgagcctggt

SEQ ID NO: 2016003 - DNA, 25 bp, Homo sapien
gctccccaaggctgatatcattgag

SEQ ID NO: 2016004 - DNA, 25 bp, Homo sapien
attctgttcccgctgcactcctgcg

SEQ ID NO: 2016005 - DNA, 25 bp, Homo sapien
tgcggccagaaggtcgggctcccca

SEQ ID NO: 2016006 - DNA, 25 bp, Homo sapien
tgaatgtggcagtgtatcttgtcca

SEQ ID NO: 2016007 - DNA, 25 bp, Homo sapien
tggcagtgtatcttgtccagttgct

SEQ ID NO: 2016008 - DNA, 25 bp, Homo sapien
tgtatcttgtccagttgctgatcca

SEQ ID NO: 2016009 - DNA, 25 bp, Homo sapien
ccagttgctgatccattctccttgt

SEQ ID NO: 2016010 - DNA, 25 bp, Homo sapien
tggagctccttctcacaggcaagag

SEQ ID NO: 2016011 - DNA, 25 bp, Homo sapien
agcttctattttctgcattccacct

SEQ ID NO: 2016012 - DNA, 25 bp, Homo sapien
tctattttctgcattccacctttat

SEQ ID NO: 2016013 - DNA, 25 bp, Homo sapien
tttatcatctttcagctggagctcc

SEQ ID NO: 2016014 - DNA, 25 bp, Homo sapien
catgtgaactccttatacttttagc

SEQ ID NO: 2016015 - DNA, 25 bp, Homo sapien
tatcttcagctaagtaagtacatgt

SEQ ID NO: 2016016 - DNA, 25 bp, Homo sapien
catggaacaaagtattatacctaaa

SEQ ID NO: 2016017 - DNA, 25 bp, Homo sapien
taggttttccacagataggagttaa

SEQ ID NO: 2016018 - DNA, 25 bp, Homo sapien
tgaaccacgttgagtcccgaccgta

SEQ ID NO: 2016019 - DNA, 25 bp, Homo sapien
gaccgtatctcctcagtgagctgag

SEQ ID NO: 2016020 - DNA, 25 bp, Homo sapien
tatccaggtttggtgtaggcataag

SEQ ID NO: 2016021 - DNA, 25 bp, Homo sapien
ttcctgactcaaacgtgaaccacgt

SEQ ID NO: 2016022 - DNA, 25 bp, Homo sapien
ttgtccccagtctcatcaccagtga

SEQ ID NO: 2016023 - DNA, 25 bp, Homo sapien
cagggaacacaatgtcccactttta

SEQ ID NO: 2016024 - DNA, 25 bp, Homo sapien
aatctgccctctaaattgtccccag

SEQ ID NO: 2016025 - DNA, 25 bp, Homo sapien
agacccagggaacacaatgtcccac

SEQ ID NO: 2016026 - DNA, 25 bp, Homo sapien
gctacaaatcgcctgcagactctgg

SEQ ID NO: 2016027 - DNA, 25 bp, Homo sapien
ggactttgagctataatcagtggct

SEQ ID NO: 2016028 - DNA, 25 bp, Homo sapien
acacactgctacaaatcgcctgcag

SEQ ID NO: 2016029 - DNA, 25 bp, Homo sapien
cagtggcttgctggattgctttttg

SEQ ID NO: 2016030 - DNA, 25 bp, Homo sapien
gaatgtggactgagaaacgtgcaac

SEQ ID NO: 2016031 - DNA, 25 bp, Homo sapien
cattttcccaacgtccagttcgaat

SEQ ID NO: 2016032 - DNA, 25 bp, Homo sapien
cagttcgaatatggacaaggaggat

SEQ ID NO: 2016033 - DNA, 25 bp, Homo sapien
aacgtgcaacgcttcaaagagaaca

SEQ ID NO: 2016034 - DNA, 25 bp, Homo sapien
ctctatttgaagggttgattaactc

SEQ ID NO: 2016035 - DNA, 25 bp, Homo sapien
catgcaacagggtgcgtgagatcgc

SEQ ID NO: 2016036 - DNA, 25 bp, Homo sapien
gatcgcgagagctgattgatgcctc

SEQ ID NO: 2016037 - DNA, 25 bp, Homo sapien
ggttaacaatgcactcgactgacag

SEQ ID NO: 2016038 - DNA, 25 bp, Homo sapien
taatggagcatgagtctgccacaca

SEQ ID NO: 2016039 - DNA, 25 bp, Homo sapien
gatctgggacgcagctgctaaaatg

SEQ ID NO: 2016040 - DNA, 25 bp, Homo sapien
tgtatcagtatcttagcctgcttag

SEQ ID NO: 2016041 - DNA, 25 bp, Homo sapien
gcttagcacgattggagaaaatatc

SEQ ID NO: 2016042 - DNA, 25 bp, Homo sapien
cttgatttgaatagatctgggacgc

SEQ ID NO: 2016043 - DNA, 25 bp, Homo sapien
aaaacaactatgagcaactgcagac

SEQ ID NO: 2016044 - DNA, 25 bp, Homo sapien
gcaactgcagacacagtctgagaat

SEQ ID NO: 2016045 - DNA, 25 bp, Homo sapien
tatgagcaactgcagacacagtctg

SEQ ID NO: 2016046 - DNA, 25 bp, Homo sapien
caactatgagcaactgcagacacag

SEQ ID NO: 2016047 - DNA, 25 bp, Homo sapien
ctcatcagctgttggatatggaatc

SEQ ID NO: 2016048 - DNA, 25 bp, Homo sapien
cctcatcagctgttggatatggaat

SEQ ID NO: 2016049 - DNA, 25 bp, Homo sapien
ctcctgttgttagacttcatgattc

SEQ ID NO: 2016050 - DNA, 25 bp, Homo sapien
tcctgttgttagacttcatgattct

SEQ ID NO: 2016051 - DNA, 25 bp, Homo sapien
cctgttgttagacttcatgattcta

SEQ ID NO: 2016052 - DNA, 25 bp, Homo sapien
ctgttgttagacttcatgattctaa

SEQ ID NO: 2016053 - DNA, 25 bp, Homo sapien
tagcttctctgaaagagatcttaat

SEQ ID NO: 2016054 - DNA, 25 bp, Homo sapien
gatcttaataaaattcacacagcgt

SEQ ID NO: 2016055 - DNA, 25 bp, Homo sapien
aattcacacagcgtgaaatggaaag

SEQ ID NO: 2016056 - DNA, 25 bp, Homo sapien
ataaaattcacacagcgtgaaatgg

SEQ ID NO: 2016057 - DNA, 25 bp, Homo sapien
ccacaggagttagtgaggctgattc

SEQ ID NO: 2016058 - DNA, 25 bp, Homo sapien
ctgtgagaatagagatagggaaaga

SEQ ID NO: 2016059 - DNA, 25 bp, Homo sapien
gaaagagatgggtctccatgtgttc

SEQ ID NO: 2016060 - DNA, 25 bp, Homo sapien
tgttcaagtgcataacagttttcca

SEQ ID NO: 2016061 - DNA, 25 bp, Homo sapien
aaaagtgaatagtccttctcctgtg

SEQ ID NO: 2016062 - DNA, 25 bp, Homo sapien
cttcccttgtttgaaaagtgaatag

SEQ ID NO: 2016063 - DNA, 25 bp, Homo sapien
tgtttgaaaagtgaatagtccttct

SEQ ID NO: 2016064 - DNA, 25 bp, Homo sapien
aagtgaatagtccttctcctgtgtc

SEQ ID NO: 2016065 - DNA, 25 bp, Homo sapien
ccttctgttccatttctagcattaa

SEQ ID NO: 2016066 - DNA, 25 bp, Homo sapien
cagtgtcgcagaatgaaccttctga

SEQ ID NO: 2016067 - DNA, 25 bp, Homo sapien
tttcatgttgctcagctatggccag

SEQ ID NO: 2016068 - DNA, 25 bp, Homo sapien
ccatttctagcattaatctttcatg

SEQ ID NO: 2016069 - DNA, 25 bp, Homo sapien
tccaagctgataggttaccaaggaa

SEQ ID NO: 2016070 - DNA, 25 bp, Homo sapien
tttccaagctgataggttaccaagg

SEQ ID NO: 2016071 - DNA, 25 bp, Homo sapien
aagctgataggttaccaaggaaggg

SEQ ID NO: 2016072 - DNA, 25 bp, Homo sapien
caagctgataggttaccaaggaagg

SEQ ID NO: 2016073 - DNA, 25 bp, Homo sapien
cagtttactctgaagaacaaattag

SEQ ID NO: 2016074 - DNA, 25 bp, Homo sapien
catggagtagttcttactagcatta

SEQ ID NO: 2016075 - DNA, 25 bp, Homo sapien
acaaattagccatggagtagttctt

SEQ ID NO: 2016076 - DNA, 25 bp, Homo sapien
gtttactctgaagaacaaattagcc

SEQ ID NO: 2016077 - DNA, 25 bp, Homo sapien
cagttacttttgagtggcaaatgca

SEQ ID NO: 2016078 - DNA, 25 bp, Homo sapien
taacctctccttaatatgttgtcag

SEQ ID NO: 2016079 - DNA, 25 bp, Homo sapien
tgtcttacccatacatacattgagg

SEQ ID NO: 2016080 - DNA, 25 bp, Homo sapien
caaggagtcaaaggacatgcaataa

SEQ ID NO: 2016081 - DNA, 25 bp, Homo sapien
cagtaagtgaattgattaattggga

SEQ ID NO: 2016082 - DNA, 25 bp, Homo sapien
ccccgcccagccaagtgaggttttg

SEQ ID NO: 2016083 - DNA, 25 bp, Homo sapien
tctgaaactgaacaacagtaagtga

SEQ ID NO: 2016084 - DNA, 25 bp, Homo sapien
gcccagccaagtgaggttttgttgt

SEQ ID NO: 2016085 - DNA, 25 bp, Homo sapien
cttgtaagtacttgaaaagatgcac

SEQ ID NO: 2016086 - DNA, 25 bp, Homo sapien
gcacccggccatttgtgcaaatttt

SEQ ID NO: 2016087 - DNA, 25 bp, Homo sapien
acatgcactgagtagtttccgtaca

SEQ ID NO: 2016088 - DNA, 25 bp, Homo sapien
gttttgtagtagagaacatgcactg

SEQ ID NO: 2016089 - DNA, 25 bp, Homo sapien
ccaacgctgttctgacgagtgatgt

SEQ ID NO: 2016090 - DNA, 25 bp, Homo sapien
gagtgatgtgatgccagtacgcgct

SEQ ID NO: 2016091 - DNA, 25 bp, Homo sapien
cattggttcagtcaagcttgtctga

SEQ ID NO: 2016092 - DNA, 25 bp, Homo sapien
agagatattgatttggataatgtca

SEQ ID NO: 2016093 - DNA, 25 bp, Homo sapien
catgatcatgactcaggcaatttga

SEQ ID NO: 2016094 - DNA, 25 bp, Homo sapien
cagtctgaatgtctaactaccagag

SEQ ID NO: 2016095 - DNA, 25 bp, Homo sapien
cagagggtcatacttggtcatactt

SEQ ID NO: 2016096 - DNA, 25 bp, Homo sapien
tcatcccagaaataggcaaggttaa

SEQ ID NO: 2016097 - DNA, 25 bp, Homo sapien
cagtatagtgaaacgtaacttccgt

SEQ ID NO: 2016098 - DNA, 25 bp, Homo sapien
tacagggtggtaaaacgtattgctc

SEQ ID NO: 2016099 - DNA, 25 bp, Homo sapien
caatgttttaggatattccagtgca

SEQ ID NO: 2016100 - DNA, 25 bp, Homo sapien
ctttgctgcaagttaacatcagtga

SEQ ID NO: 2016101 - DNA, 25 bp, Homo sapien
gggctcacatgtgggactagacatg

SEQ ID NO: 2016102 - DNA, 25 bp, Homo sapien
gacatgattccttgatatagaagag

SEQ ID NO: 2016103 - DNA, 25 bp, Homo sapien
gaggaggatgtggtcctgatgtcac

SEQ ID NO: 2016104 - DNA, 25 bp, Homo sapien
ttttctcaggtccaccctcatggag

SEQ ID NO: 2016105 - DNA, 25 bp, Homo sapien
catcctgtccttctgagaaaatgaa

SEQ ID NO: 2016106 - DNA, 25 bp, Homo sapien
tatgtgtccgtgctgacattggtgg

SEQ ID NO: 2016107 - DNA, 25 bp, Homo sapien
cagacaccctttccgtgagcgtcaa

SEQ ID NO: 2016108 - DNA, 25 bp, Homo sapien
ctggtgattaggtatgtgtccgtgc

SEQ ID NO: 2016109 - DNA, 25 bp, Homo sapien
ttccccaagcacagtaagaactctg

SEQ ID NO: 2016110 - DNA, 25 bp, Homo sapien
cccaagcacagtaagaactctgtaa

SEQ ID NO: 2016111 - DNA, 25 bp, Homo sapien
ttcatagtccttagaaccaaacaaa

SEQ ID NO: 2016112 - DNA, 25 bp, Homo sapien
ttttcatagtccttagaaccaaaca

SEQ ID NO: 2016113 - DNA, 25 bp, Homo sapien
gatgtgaaggacatatccaggctta

SEQ ID NO: 2016114 - DNA, 25 bp, Homo sapien
tccaggcttaaatcaacatcaactc

SEQ ID NO: 2016115 - DNA, 25 bp, Homo sapien
ggtgctagaactttcaaagaggttc

SEQ ID NO: 2016116 - DNA, 25 bp, Homo sapien
gaagttcgaagcaacaaatttccag

SEQ ID NO: 2016117 - DNA, 25 bp, Homo sapien
ttcctgttaaatcggagtgccgatt

SEQ ID NO: 2016118 - DNA, 25 bp, Homo sapien
tcggagtgccgattttcatgatttc

SEQ ID NO: 2016119 - DNA, 25 bp, Homo sapien
ttaaatcggagtgccgattttcatg

SEQ ID NO: 2016120 - DNA, 25 bp, Homo sapien
ctttcctgttaaatcggagtgccga

SEQ ID NO: 2016121 - DNA, 25 bp, Homo sapien
aaatatctggtgacccctaactggc

SEQ ID NO: 2016122 - DNA, 25 bp, Homo sapien
tatttgacttgtgcgcatacccatg

SEQ ID NO: 2016123 - DNA, 25 bp, Homo sapien
ctgcttctaggaggacctgagttaa

SEQ ID NO: 2016124 - DNA, 25 bp, Homo sapien
taactggctaactctcgtgcatctc

SEQ ID NO: 2016125 - DNA, 25 bp, Homo sapien
taagtccaggtttgaagggcatcag

SEQ ID NO: 2016126 - DNA, 25 bp, Homo sapien
ccgtgcctagccaatgtttcaaata

SEQ ID NO: 2016127 - DNA, 25 bp, Homo sapien
tctcaaatgtgaaggtaggaccata

SEQ ID NO: 2016128 - DNA, 25 bp, Homo sapien
ttttcaacagcacaaaaatgaggtc

SEQ ID NO: 2016129 - DNA, 25 bp, Homo sapien
tgagtgatgccatacataaccaagg

SEQ ID NO: 2016130 - DNA, 25 bp, Homo sapien
tatccatgaacagatggtgagtgat

SEQ ID NO: 2016131 - DNA, 25 bp, Homo sapien
actttgcatgtagaagtatccatga

SEQ ID NO: 2016132 - DNA, 25 bp, Homo sapien
acataaccaagggtgcattttcttc

SEQ ID NO: 2016133 - DNA, 25 bp, Homo sapien
tctctgcctaatccagtaattggga

SEQ ID NO: 2016134 - DNA, 25 bp, Homo sapien
aacaggagttgctgagatccgtctc

SEQ ID NO: 2016135 - DNA, 25 bp, Homo sapien
tgccgctgcccagataattgctgtg

SEQ ID NO: 2016136 - DNA, 25 bp, Homo sapien
taattgggactctggccacagccag

SEQ ID NO: 2016137 - DNA, 25 bp, Homo sapien
cacagttgtggagattgactgtgcc

SEQ ID NO: 2016138 - DNA, 25 bp, Homo sapien
cttcacagttgtggagattgactgt

SEQ ID NO: 2016139 - DNA, 25 bp, Homo sapien
cagttgtggagattgactgtgcctc

SEQ ID NO: 2016140 - DNA, 25 bp, Homo sapien
agttgtggagattgactgtgcctct

SEQ ID NO: 2016141 - DNA, 25 bp, Homo sapien
tcataaaacctcacaagggccttca

SEQ ID NO: 2016142 - DNA, 25 bp, Homo sapien
ctttcataaaacctcacaagggcct

SEQ ID NO: 2016143 - DNA, 25 bp, Homo sapien
ttctttcataaaacctcacaagggc

SEQ ID NO: 2016144 - DNA, 25 bp, Homo sapien
catctccaccctctataaaaggaca

SEQ ID NO: 2016145 - DNA, 25 bp, Homo sapien
gcatacataatcttagttccaaaaa

SEQ ID NO: 2016146 - DNA, 25 bp, Homo sapien
cacatgtacttcccatatgcataca

SEQ ID NO: 2016147 - DNA, 25 bp, Homo sapien
catgtacttcccatatgcatacata

SEQ ID NO: 2016148 - DNA, 25 bp, Homo sapien
tatgcatacataatcttagttccaa

SEQ ID NO: 2016149 - DNA, 25 bp, Homo sapien
tcaactgtgcatcccctcaagaggt

SEQ ID NO: 2016150 - DNA, 25 bp, Homo sapien
caggtagcgttgtccttcaactgtg

SEQ ID NO: 2016151 - DNA, 25 bp, Homo sapien
gcagcccgtttgttgccattgacaa

SEQ ID NO: 2016152 - DNA, 25 bp, Homo sapien
gtaggttctggtaaggagctgtcca

SEQ ID NO: 2016153 - DNA, 25 bp, Homo sapien
tttcttatctggacactcaaactct

SEQ ID NO: 2016154 - DNA, 25 bp, Homo sapien
ttttttcttatctggacactcaaac

SEQ ID NO: 2016155 - DNA, 25 bp, Homo sapien
tttttttcttatctggacactcaaa

SEQ ID NO: 2016156 - DNA, 25 bp, Homo sapien
ttttcttatctggacactcaaactc

SEQ ID NO: 2016157 - DNA, 25 bp, Homo sapien
ttcctactggtagatattgctgcaa

SEQ ID NO: 2016158 - DNA, 25 bp, Homo sapien
cctactggtagatattgctgcaatt

SEQ ID NO: 2016159 - DNA, 25 bp, Homo sapien
gaccctgttgaagtttttgctgtta

SEQ ID NO: 2016160 - DNA, 25 bp, Homo sapien
tgctgcaatttttgctaagaccctg

SEQ ID NO: 2016161 - DNA, 25 bp, Homo sapien
tttgttagaatctgggggagataaa

SEQ ID NO: 2016162 - DNA, 25 bp, Homo sapien
tgttagaatctgggggagataaaag

SEQ ID NO: 2016163 - DNA, 25 bp, Homo sapien
ttgttagaatctgggggagataaaa

SEQ ID NO: 2016164 - DNA, 25 bp, Homo sapien
atctgggggagataaaagggtactg

SEQ ID NO: 2016165 - DNA, 25 bp, Homo sapien
ctccttcccgaggaattaagaaatg

SEQ ID NO: 2016166 - DNA, 25 bp, Homo sapien
ccttcccgaggaattaagaaatgca

SEQ ID NO: 2016167 - DNA, 25 bp, Homo sapien
cttcccgaggaattaagaaatgcat

SEQ ID NO: 2016168 - DNA, 25 bp, Homo sapien
tccttcccgaggaattaagaaatgc

SEQ ID NO: 2016169 - DNA, 25 bp, Homo sapien
cttttaatctcagctgagtgcatct

SEQ ID NO: 2016170 - DNA, 25 bp, Homo sapien
tgaagcagcctcctcatcaaattct

SEQ ID NO: 2016171 - DNA, 25 bp, Homo sapien
ttcttttaatctcagctgagtgcat

SEQ ID NO: 2016172 - DNA, 25 bp, Homo sapien
tcatcggttcccccagctcttgaag

SEQ ID NO: 2016173 - DNA, 25 bp, Homo sapien
ggtcctgccccgcactcctcctcgc

SEQ ID NO: 2016174 - DNA, 25 bp, Homo sapien
aactttctgccccacggcgcctgga

SEQ ID NO: 2016175 - DNA, 25 bp, Homo sapien
cttcctgctgttgcgcatgtctgca

SEQ ID NO: 2016176 - DNA, 25 bp, Homo sapien
gcgcctggaggctctactagtccct

SEQ ID NO: 2016177 - DNA, 25 bp, Homo sapien
ggagctgtagctgaatccatagctg

SEQ ID NO: 2016178 - DNA, 25 bp, Homo sapien
catctttgacgaaccaaacccatga

SEQ ID NO: 2016179 - DNA, 25 bp, Homo sapien
tgtctgtgcacgagacatctttgac

SEQ ID NO: 2016180 - DNA, 25 bp, Homo sapien
tgctggaccgcgacaacggctgctg

SEQ ID NO: 2016181 - DNA, 25 bp, Homo sapien
cgagtagagctacagggccctgctt

SEQ ID NO: 2016182 - DNA, 25 bp, Homo sapien
ggctagagccgacccatttcaattt

SEQ ID NO: 2016183 - DNA, 25 bp, Homo sapien
gaccctgtgctcagatgggcggact

SEQ ID NO: 2016184 - DNA, 25 bp, Homo sapien
cagagcttgtggagggtcaccatta

SEQ ID NO: 2016185 - DNA, 25 bp, Homo sapien
tctgcactcaagctacagataggga

SEQ ID NO: 2016186 - DNA, 25 bp, Homo sapien
ggttttcatcttgcgtgacctgagc

SEQ ID NO: 2016187 - DNA, 25 bp, Homo sapien
gagataaccatcttaggcacaaagc

SEQ ID NO: 2016188 - DNA, 25 bp, Homo sapien
taaacccaccctagagtatttgaga

SEQ ID NO: 2016189 - DNA, 25 bp, Homo sapien
gatcaggaccctggaactacgagaa

SEQ ID NO: 2016190 - DNA, 25 bp, Homo sapien
tgagatgtgaaccaggacccctgag

SEQ ID NO: 2016191 - DNA, 25 bp, Homo sapien
ttacaaagtgtagaggcatccccag

SEQ ID NO: 2016192 - DNA, 25 bp, Homo sapien
tcaaataatctagggagtagggtcc

SEQ ID NO: 2016193 - DNA, 25 bp, Homo sapien
attatgcaagccagttaagctctct

SEQ ID NO: 2016194 - DNA, 25 bp, Homo sapien
cattatgcaagccagttaagctctc

SEQ ID NO: 2016195 - DNA, 25 bp, Homo sapien
tgcaagccagttaagctctctgaat

SEQ ID NO: 2016196 - DNA, 25 bp, Homo sapien
aagccagttaagctctctgaatatc

SEQ ID NO: 2016197 - DNA, 25 bp, Homo sapien
tccattccatatgacttgctctcgt

SEQ ID NO: 2016198 - DNA, 25 bp, Homo sapien
catatgacttgctctcgtctaggct

SEQ ID NO: 2016199 - DNA, 25 bp, Homo sapien
gttcctgttgctggactccattcca

SEQ ID NO: 2016200 - DNA, 25 bp, Homo sapien
gactccattccatatgacttgctct

SEQ ID NO: 2016201 - DNA, 25 bp, Homo sapien
caacatgtggcaactccagtgggaa

SEQ ID NO: 2016202 - DNA, 25 bp, Homo sapien
cccgatggagtaggcttgcaaaaca

SEQ ID NO: 2016203 - DNA, 25 bp, Homo sapien
tcctgcagaaagcaacaatttgggc

SEQ ID NO: 2016204 - DNA, 25 bp, Homo sapien
tagaattcccaggacacccgatgga

SEQ ID NO: 2016205 - DNA, 25 bp, Homo sapien
tgcaaatagacatgatgtcaccatc

SEQ ID NO: 2016206 - DNA, 25 bp, Homo sapien
taccaaagtgctgtttccccacatt

SEQ ID NO: 2016207 - DNA, 25 bp, Homo sapien
gtttgctaccaaagtgctgtttccc

SEQ ID NO: 2016208 - DNA, 25 bp, Homo sapien
attgctctccccatctggtttgcta

SEQ ID NO: 2016209 - DNA, 25 bp, Homo sapien
tccccatctggtttgctaccaaagt

SEQ ID NO: 2016210 - DNA, 25 bp, Homo sapien
ttagcagctgtcatcactgctccct

SEQ ID NO: 2016211 - DNA, 25 bp, Homo sapien
caatatctttggttatcttcccact

SEQ ID NO: 2016212 - DNA, 25 bp, Homo sapien
tggttttggtaacgtctccagcctg

SEQ ID NO: 2016213 - DNA, 25 bp, Homo sapien
aggctgggttggcatgtcatcttcc

SEQ ID NO: 2016214 - DNA, 25 bp, Homo sapien
ttcaggctgaaccaatgtctagagc

SEQ ID NO: 2016215 - DNA, 25 bp, Homo sapien
gacgggacttatctcaggcttggta

SEQ ID NO: 2016216 - DNA, 25 bp, Homo sapien
gctacagagcgtccttcttcaagag

SEQ ID NO: 2016217 - DNA, 25 bp, Homo sapien
catcacaacagaagctggtgacggt

SEQ ID NO: 2016218 - DNA, 25 bp, Homo sapien
tacatatatgattatgtcatcggca

SEQ ID NO: 2016219 - DNA, 25 bp, Homo sapien
tggatagtttgctgtttgtgtacag

SEQ ID NO: 2016220 - DNA, 25 bp, Homo sapien
tgtatcctgcctcttaactgaattc

SEQ ID NO: 2016221 - DNA, 25 bp, Homo sapien
tttggatagtttgctgtttgtgtac

SEQ ID NO: 2016222 - DNA, 25 bp, Homo sapien
caaagctaccattagttcttgagca

SEQ ID NO: 2016223 - DNA, 25 bp, Homo sapien
tcaggcgggaccatcaaggttcaaa

SEQ ID NO: 2016224 - DNA, 25 bp, Homo sapien
tgtataatcgtcttccaccagtgag

SEQ ID NO: 2016225 - DNA, 25 bp, Homo sapien
catataattgtcaagcaaagctacc

SEQ ID NO: 2016226 - DNA, 25 bp, Homo sapien
cagaattattgttgcgtaggattaa

SEQ ID NO: 2016227 - DNA, 25 bp, Homo sapien
catcttcacatatgtaatgctttac

SEQ ID NO: 2016228 - DNA, 25 bp, Homo sapien
tcctctgacgtataaagaacacaaa

SEQ ID NO: 2016229 - DNA, 25 bp, Homo sapien
gttgcgtaggattaatttgcagaca

SEQ ID NO: 2016230 - DNA, 25 bp, Homo sapien
gtgacattatttcctaaatacttct

SEQ ID NO: 2016231 - DNA, 25 bp, Homo sapien
caaggagacaagtgatttaagataa

SEQ ID NO: 2016232 - DNA, 25 bp, Homo sapien
tacttaaactgactaacaaggagac

SEQ ID NO: 2016233 - DNA, 25 bp, Homo sapien
agataaggccaatccacgaagggcc

SEQ ID NO: 2016234 - DNA, 25 bp, Homo sapien
ccaatccacgaagggcctcatgggt

SEQ ID NO: 2016235 - DNA, 25 bp, Homo sapien
cagatgtgtcacttctatcgaggtt

SEQ ID NO: 2016236 - DNA, 25 bp, Homo sapien
ctatcgaggttgtcactttcttgca

SEQ ID NO: 2016237 - DNA, 25 bp, Homo sapien
tgtcacttctatcgaggttgtcact

SEQ ID NO: 2016238 - DNA, 25 bp, Homo sapien
aatcagatgtgtcacttctatcgag

SEQ ID NO: 2016239 - DNA, 25 bp, Homo sapien
ccatttgcaaatatcggaagtgcat

SEQ ID NO: 2016240 - DNA, 25 bp, Homo sapien
tgcaaatatcggaagtgcattttgt

SEQ ID NO: 2016241 - DNA, 25 bp, Homo sapien
attctgaagcatggtggccatttgc

SEQ ID NO: 2016242 - DNA, 25 bp, Homo sapien
atttgcaaatatcggaagtgcattt

SEQ ID NO: 2016243 - DNA, 25 bp, Homo sapien
tcctgaatgagggcaggccacatcc

SEQ ID NO: 2016244 - DNA, 25 bp, Homo sapien
gatcacctccagagatggcatgcag

SEQ ID NO: 2016245 - DNA, 25 bp, Homo sapien
ttctgggaatgagctcagacaatag

SEQ ID NO: 2016246 - DNA, 25 bp, Homo sapien
acctccagagatggcatgcagcctg

SEQ ID NO: 2016247 - DNA, 25 bp, Homo sapien
ttccatatttctgggaatgagctca

SEQ ID NO: 2016248 - DNA, 25 bp, Homo sapien
tgtgtccgagtagaagtgcctttca

SEQ ID NO: 2016249 - DNA, 25 bp, Homo sapien
cccaagtagaagctatagaatgtct

SEQ ID NO: 2016250 - DNA, 25 bp, Homo sapien
gaatgtcttctcgtatttctgtggc

SEQ ID NO: 2016251 - DNA, 25 bp, Homo sapien
ctttgaaggagcaatcttgggagtc

SEQ ID NO: 2016252 - DNA, 25 bp, Homo sapien
gaagttgtgtgcaccgctttctcca

SEQ ID NO: 2016253 - DNA, 25 bp, Homo sapien
tggacttggtttagcccggcatttg

SEQ ID NO: 2016254 - DNA, 25 bp, Homo sapien
gtagtttgatttttgctggtgcctg

SEQ ID NO: 2016255 - DNA, 25 bp, Homo sapien
ccagtttgttctgtacagtgaccaa

SEQ ID NO: 2016256 - DNA, 25 bp, Homo sapien
aacacacttcactgcccgagagcct

SEQ ID NO: 2016257 - DNA, 25 bp, Homo sapien
gagcctttcccgaccaccaacctga

SEQ ID NO: 2016258 - DNA, 25 bp, Homo sapien
gcttctgcagattccagaacacact

SEQ ID NO: 2016259 - DNA, 25 bp, Homo sapien
tggactgctcgttcacacacctggc

SEQ ID NO: 2016260 - DNA, 25 bp, Homo sapien
tcccctcaatgtatccagctacaat

SEQ ID NO: 2016261 - DNA, 25 bp, Homo sapien
tataaggcaaatgtactcccacccc

SEQ ID NO: 2016262 - DNA, 25 bp, Homo sapien
caggaagtatataaggcaaatgtac

SEQ ID NO: 2016263 - DNA, 25 bp, Homo sapien
caatgtatccagctacaatgattga

SEQ ID NO: 2016264 - DNA, 25 bp, Homo sapien
ggaagcaggacatattgtaggtagc

SEQ ID NO: 2016265 - DNA, 25 bp, Homo sapien
caggacatattgtaggtagcagaaa

SEQ ID NO: 2016266 - DNA, 25 bp, Homo sapien
agcaggacatattgtaggtagcaga

SEQ ID NO: 2016267 - DNA, 25 bp, Homo sapien
ggaaggttctacctgggtggacagc

SEQ ID NO: 2016268 - DNA, 25 bp, Homo sapien
cacacatcaggtgtttttgcataaa

SEQ ID NO: 2016269 - DNA, 25 bp, Homo sapien
tccaagcaagtgtcgaaaggtatca

SEQ ID NO: 2016270 - DNA, 25 bp, Homo sapien
gcatgtgaatagttttccaagcaag

SEQ ID NO: 2016271 - DNA, 25 bp, Homo sapien
ggagactcctcccaatgctcagaaa

SEQ ID NO: 2016272 - DNA, 25 bp, Homo sapien
ctgaggatgctctgtcagagccgca

SEQ ID NO: 2016273 - DNA, 25 bp, Homo sapien
tgctctgtcagagccgcagcatcgt

SEQ ID NO: 2016274 - DNA, 25 bp, Homo sapien
gcacgaaagcgtctgcagtgaaggt

SEQ ID NO: 2016275 - DNA, 25 bp, Homo sapien
tggccaaggaggcacgaaagcgtct

SEQ ID NO: 2016276 - DNA, 25 bp, Homo sapien
aggaaattaagcaagagaaaggcat

SEQ ID NO: 2016277 - DNA, 25 bp, Homo sapien
gcccatgatgcaactttgaactttg

SEQ ID NO: 2016278 - DNA, 25 bp, Homo sapien
gaactttgaggacatcgcagctttt

SEQ ID NO: 2016279 - DNA, 25 bp, Homo sapien
ctgaaacctgatcaatgttggcgaa

SEQ ID NO: 2016280 - DNA, 25 bp, Homo sapien
cttaagacttgtgagtaaaccatat

SEQ ID NO: 2016281 - DNA, 25 bp, Homo sapien
cacttaagacttgtgagtaaaccat

SEQ ID NO: 2016282 - DNA, 25 bp, Homo sapien
ttaagacttgtgagtaaaccatatc

SEQ ID NO: 2016283 - DNA, 25 bp, Homo sapien
acttaagacttgtgagtaaaccata

SEQ ID NO: 2016284 - DNA, 25 bp, Homo sapien
gccttaaatcttttctcggacaaga

SEQ ID NO: 2016285 - DNA, 25 bp, Homo sapien
tatttttctgtggatgcagaagcat

SEQ ID NO: 2016286 - DNA, 25 bp, Homo sapien
gaatgtttgtttctgacaggactac

SEQ ID NO: 2016287 - DNA, 25 bp, Homo sapien
ttttcatagcataagtcccctttta

SEQ ID NO: 2016288 - DNA, 25 bp, Homo sapien
aatgcccgctagtgctcttgtttca

SEQ ID NO: 2016289 - DNA, 25 bp, Homo sapien
tcctgcctgcagtctaaattaatgc

SEQ ID NO: 2016290 - DNA, 25 bp, Homo sapien
tagtgtccctttcatagtgttgtgg

SEQ ID NO: 2016291 - DNA, 25 bp, Homo sapien
tctgcacagtagcataaattcctac

SEQ ID NO: 2016292 - DNA, 25 bp, Homo sapien
tagcaagggcaagtttccgcacatg

SEQ ID NO: 2016293 - DNA, 25 bp, Homo sapien
catgacccgaagcatgaatccaggt

SEQ ID NO: 2016294 - DNA, 25 bp, Homo sapien
gaaacaagctgaaccgtagcaaggg

SEQ ID NO: 2016295 - DNA, 25 bp, Homo sapien
gaatccaggtggttgtcaaggccca

SEQ ID NO: 2016296 - DNA, 25 bp, Homo sapien
acggggcagccaggctcaacattct

SEQ ID NO: 2016297 - DNA, 25 bp, Homo sapien
acaggctgtcacttcatgcttggaa

SEQ ID NO: 2016298 - DNA, 25 bp, Homo sapien
gggcagccaggctcaacattcttaa

SEQ ID NO: 2016299 - DNA, 25 bp, Homo sapien
ctgcagacaggctgtcacttcatgc

SEQ ID NO: 2016300 - DNA, 25 bp, Homo sapien
tcttaggagttccttcagctatatc

SEQ ID NO: 2016301 - DNA, 25 bp, Homo sapien
ttgtaggaacattggctgtcagttt

SEQ ID NO: 2016302 - DNA, 25 bp, Homo sapien
gctatatcccacagcactttgcttg

SEQ ID NO: 2016303 - DNA, 25 bp, Homo sapien
aattaggatgtccattacctctaac

SEQ ID NO: 2016304 - DNA, 25 bp, Homo sapien
catgctgcgacttttgctagtgaaa

SEQ ID NO: 2016305 - DNA, 25 bp, Homo sapien
tacccgattaaagtccatgctgcga

SEQ ID NO: 2016306 - DNA, 25 bp, Homo sapien
cattactagaggaaaccaatgcgtg

SEQ ID NO: 2016307 - DNA, 25 bp, Homo sapien
tactaagtgccgctcagtagtgccc

SEQ ID NO: 2016308 - DNA, 25 bp, Homo sapien
tgttttaccttttcaccagctggaa

SEQ ID NO: 2016309 - DNA, 25 bp, Homo sapien
taagtgcttaggtgagtacttgcta

SEQ ID NO: 2016310 - DNA, 25 bp, Homo sapien
tctgccctgaaacaaataagtgctt

SEQ ID NO: 2016311 - DNA, 25 bp, Homo sapien
aacttacttgcctcacatgtcttgg

SEQ ID NO: 2016312 - DNA, 25 bp, Homo sapien
gcggcagtttaattctccggcggct

SEQ ID NO: 2016313 - DNA, 25 bp, Homo sapien
cagtttaattctccggcggctgcag

SEQ ID NO: 2016314 - DNA, 25 bp, Homo sapien
gcagtggcgcggcagtttaattctc

SEQ ID NO: 2016315 - DNA, 25 bp, Homo sapien
cagattgacgggacgagatggtcct

SEQ ID NO: 2016316 - DNA, 25 bp, Homo sapien
ttgaacttatactgcactcttcatg

SEQ ID NO: 2016317 - DNA, 25 bp, Homo sapien
cttgaacttatactgcactcttcat

SEQ ID NO: 2016318 - DNA, 25 bp, Homo sapien
tgaacttatactgcactcttcatgg

SEQ ID NO: 2016319 - DNA, 25 bp, Homo sapien
tacggttgcatggttcatacgcagc

SEQ ID NO: 2016320 - DNA, 25 bp, Homo sapien
ataacgcccgtttcctagggtgctg

SEQ ID NO: 2016321 - DNA, 25 bp, Homo sapien
tgcacaccgggcttactggattctg

SEQ ID NO: 2016322 - DNA, 25 bp, Homo sapien
aagaggttaaatcacgtgcccaagg

SEQ ID NO: 2016323 - DNA, 25 bp, Homo sapien
ccaaagcagtcagcaggtcaaccat

SEQ ID NO: 2016324 - DNA, 25 bp, Homo sapien
tgaacatattgtgccccaaagcagt

SEQ ID NO: 2016325 - DNA, 25 bp, Homo sapien
catgaacatattgtgccccaaagca

SEQ ID NO: 2016326 - DNA, 25 bp, Homo sapien
ccccaaagcagtcagcaggtcaacc

SEQ ID NO: 2016327 - DNA, 25 bp, Homo sapien
ccagagaaagggctatgacttgggc

SEQ ID NO: 2016328 - DNA, 25 bp, Homo sapien
gtgaattggaaagtagtaggaagca

SEQ ID NO: 2016329 - DNA, 25 bp, Homo sapien
tgggcctgacatgtgcttgctgtgt

SEQ ID NO: 2016330 - DNA, 25 bp, Homo sapien
aaagggctatgacttgggcctgaca

SEQ ID NO: 2016331 - DNA, 25 bp, Homo sapien
tgcaagtctgtagcttggaggcatt

SEQ ID NO: 2016332 - DNA, 25 bp, Homo sapien
taattggagcttacatcttagaacc

SEQ ID NO: 2016333 - DNA, 25 bp, Homo sapien
caagtggatgcgatgcaagtctgta

SEQ ID NO: 2016334 - DNA, 25 bp, Homo sapien
cttttcttcatacggcacgcaagtg

SEQ ID NO: 2016335 - DNA, 25 bp, Homo sapien
tcataccaacgagtaacacgagtct

SEQ ID NO: 2016336 - DNA, 25 bp, Homo sapien
gagtaacacgagtctcaaatttcaa

SEQ ID NO: 2016337 - DNA, 25 bp, Homo sapien
cttctgctctgtcataccaacgagt

SEQ ID NO: 2016338 - DNA, 25 bp, Homo sapien
tgctctgtcataccaacgagtaaca

SEQ ID NO: 2016339 - DNA, 25 bp, Homo sapien
tcagatggggagcagttcagtgcat

SEQ ID NO: 2016340 - DNA, 25 bp, Homo sapien
agatggggagcagttcagtgcatgt

SEQ ID NO: 2016341 - DNA, 25 bp, Homo sapien
cagatggggagcagttcagtgcatg

SEQ ID NO: 2016342 - DNA, 25 bp, Homo sapien
cggaggcggcccggctccgcttcct

SEQ ID NO: 2016343 - DNA, 25 bp, Homo sapien
gcttcctcgcccagcgccggcgcga

SEQ ID NO: 2016344 - DNA, 25 bp, Homo sapien
ggcgcgactgccgcgctcgccttct

SEQ ID NO: 2016345 - DNA, 25 bp, Homo sapien
cgctcgccttctcctctcggcaact

SEQ ID NO: 2016346 - DNA, 25 bp, Homo sapien
cagtctagcagcttgcactagcaat

SEQ ID NO: 2016347 - DNA, 25 bp, Homo sapien
gcttgcactagcaatccttctgaag

SEQ ID NO: 2016348 - DNA, 25 bp, Homo sapien
aatccttctgaaggcgcccattcac

SEQ ID NO: 2016349 - DNA, 25 bp, Homo sapien
ggcgcccattcacttactgctttca

SEQ ID NO: 2016350 - DNA, 25 bp, Homo sapien
gtgcgacctgcagatacacccacat

SEQ ID NO: 2016351 - DNA, 25 bp, Homo sapien
cacatccgccatggggacaacagac

SEQ ID NO: 2016352 - DNA, 25 bp, Homo sapien
accagcgtgcgacctgcagatacac

SEQ ID NO: 2016353 - DNA, 25 bp, Homo sapien
ggtgaccagcgtgcgacctgcagat

SEQ ID NO: 2016354 - DNA, 25 bp, Homo sapien
tgcctgggaaactggcggcatgtga

SEQ ID NO: 2016355 - DNA, 25 bp, Homo sapien
aactggcggcatgtgacttaacagt

SEQ ID NO: 2016356 - DNA, 25 bp, Homo sapien
cagtaacactgaaaaccggacgaca

SEQ ID NO: 2016357 - DNA, 25 bp, Homo sapien
cactgaaaaccggacgacaacggag

SEQ ID NO: 2016358 - DNA, 25 bp, Homo sapien
ccatcattccccaaaaacacaggaa

SEQ ID NO: 2016359 - DNA, 25 bp, Homo sapien
catcattccccaaaaacacaggaac

SEQ ID NO: 2016360 - DNA, 25 bp, Homo sapien
atcattccccaaaaacacaggaacg

SEQ ID NO: 2016361 - DNA, 25 bp, Homo sapien
tcattccccaaaaacacaggaacga

SEQ ID NO: 2016362 - DNA, 25 bp, Homo sapien
taatgataaattgccctgtaaaatc

SEQ ID NO: 2016363 - DNA, 25 bp, Homo sapien
tcaaaactcaatgaataatagtttc

SEQ ID NO: 2016364 - DNA, 25 bp, Homo sapien
ttcttaatgataaattgccctgtaa

SEQ ID NO: 2016365 - DNA, 25 bp, Homo sapien
gtttcttaatgataaattgccctgt

SEQ ID NO: 2016366 - DNA, 25 bp, Homo sapien
cttgaaatgtaccctactagaaaat

SEQ ID NO: 2016367 - DNA, 25 bp, Homo sapien
ctcttgaaatgtaccctactagaaa

SEQ ID NO: 2016368 - DNA, 25 bp, Homo sapien
atctcttgaaatgtaccctactaga

SEQ ID NO: 2016369 - DNA, 25 bp, Homo sapien
aaataaaaccgagaggcggggcatg

SEQ ID NO: 2016370 - DNA, 25 bp, Homo sapien
gcatgtcttctacccaagcataatg

SEQ ID NO: 2016371 - DNA, 25 bp, Homo sapien
ctcagtgtcttagtagcatgtcttc

SEQ ID NO: 2016372 - DNA, 25 bp, Homo sapien
cacgagagactagcaaccacggtaa

SEQ ID NO: 2016373 - DNA, 25 bp, Homo sapien
tataactgccagaatcagtaactga

SEQ ID NO: 2016374 - DNA, 25 bp, Homo sapien
caaggtgattcgcttgacttgagcg

SEQ ID NO: 2016375 - DNA, 25 bp, Homo sapien
tctctgcatatgacttgacaaggtg

SEQ ID NO: 2016376 - DNA, 25 bp, Homo sapien
ggctctagctttgatcccattcatg

SEQ ID NO: 2016377 - DNA, 25 bp, Homo sapien
aaatcagcagtttagcgccactcag

SEQ ID NO: 2016378 - DNA, 25 bp, Homo sapien
tctatctggaatattatccccaaac

SEQ ID NO: 2016379 - DNA, 25 bp, Homo sapien
ctggaatattatccccaaacatctg

SEQ ID NO: 2016380 - DNA, 25 bp, Homo sapien
tatgactagttacctaatccaaggg

SEQ ID NO: 2016381 - DNA, 25 bp, Homo sapien
tatttctatctggaatattatcccc

SEQ ID NO: 2016382 - DNA, 25 bp, Homo sapien
tcaccgttgatatcgcagctggcca

SEQ ID NO: 2016383 - DNA, 25 bp, Homo sapien
tctcctcggagtttgtgggccgcag

SEQ ID NO: 2016384 - DNA, 25 bp, Homo sapien
ctgcggagcgacgtggaccttatcg

SEQ ID NO: 2016385 - DNA, 25 bp, Homo sapien
gaagagtgaaccaaggccttgactc

SEQ ID NO: 2016386 - DNA, 25 bp, Homo sapien
aggtgaagatgcaggtctccattat

SEQ ID NO: 2016387 - DNA, 25 bp, Homo sapien
ccattatgagaagccgagctcttca

SEQ ID NO: 2016388 - DNA, 25 bp, Homo sapien
gatgcaggtctccattatgagaagc

SEQ ID NO: 2016389 - DNA, 25 bp, Homo sapien
tctccattatgagaagccgagctct

SEQ ID NO: 2016390 - DNA, 25 bp, Homo sapien
taacggtcgtcagaactgtcccgaa

SEQ ID NO: 2016391 - DNA, 25 bp, Homo sapien
agagtggagggacatcatcgtgacc

SEQ ID NO: 2016392 - DNA, 25 bp, Homo sapien
tggacgtatgtccttccacatctgg

SEQ ID NO: 2016393 - DNA, 25 bp, Homo sapien
ggtgccaatcaacaagccattcacg

SEQ ID NO: 2016394 - DNA, 25 bp, Homo sapien
gaagatgaaaacgaaggcaacagaa

SEQ ID NO: 2016395 - DNA, 25 bp, Homo sapien
agtgcaagatgcagggttctcaatc

SEQ ID NO: 2016396 - DNA, 25 bp, Homo sapien
gcagatctccgttccattacccaag

SEQ ID NO: 2016397 - DNA, 25 bp, Homo sapien
catgttatgccaatttgtacccgag

SEQ ID NO: 2016398 - DNA, 25 bp, Homo sapien
cataagacgggttcagggcagtcca

SEQ ID NO: 2016399 - DNA, 25 bp, Homo sapien
aaattttctggacagggcaatccca

SEQ ID NO: 2016400 - DNA, 25 bp, Homo sapien
tcaataatcttgacactaagcgggt

SEQ ID NO: 2016401 - DNA, 25 bp, Homo sapien
catgtaaatgcttctggagacacgg

SEQ ID NO: 2016402 - DNA, 25 bp, Homo sapien
aagatggttggttgccccgtgtagc

SEQ ID NO: 2016403 - DNA, 25 bp, Homo sapien
tggctcaagaattacaacgcatact

SEQ ID NO: 2016404 - DNA, 25 bp, Homo sapien
tgtagcactagcagagacattgcat

SEQ ID NO: 2016405 - DNA, 25 bp, Homo sapien
tattaatttcatggcactccaacga

SEQ ID NO: 2016406 - DNA, 25 bp, Homo sapien
ggtgtacgtttgtgaagtctgttct

SEQ ID NO: 2016407 - DNA, 25 bp, Homo sapien
acaattcttgatcccacgataatct

SEQ ID NO: 2016408 - DNA, 25 bp, Homo sapien
tctcatagtatttcgttagcaccat

SEQ ID NO: 2016409 - DNA, 25 bp, Homo sapien
ctggtaatggtgtacgtttgtgaag

SEQ ID NO: 2016410 - DNA, 25 bp, Homo sapien
ttattgaagttctgacgcagggcca

SEQ ID NO: 2016411 - DNA, 25 bp, Homo sapien
tctggcagcctagcagcaggtcttt

SEQ ID NO: 2016412 - DNA, 25 bp, Homo sapien
tcacaggtggcctttcaggaccacg

SEQ ID NO: 2016413 - DNA, 25 bp, Homo sapien
ctgacgcagggccagtattttctgt

SEQ ID NO: 2016414 - DNA, 25 bp, Homo sapien
gaagtttgatgagatttgattgtcc

SEQ ID NO: 2016415 - DNA, 25 bp, Homo sapien
ttgatgagatttgattgtcctttag

SEQ ID NO: 2016416 - DNA, 25 bp, Homo sapien
gagatttgattgtcctttagtttta

SEQ ID NO: 2016417 - DNA, 25 bp, Homo sapien
tcagagagaagtttgatgagatttg

SEQ ID NO: 2016418 - DNA, 25 bp, Homo sapien
actgtttctgaaacgtcatcagctc

SEQ ID NO: 2016419 - DNA, 25 bp, Homo sapien
gtttcccatctaggatggaagaatg

SEQ ID NO: 2016420 - DNA, 25 bp, Homo sapien
tgtttcccatctaggatggaagaat

SEQ ID NO: 2016421 - DNA, 25 bp, Homo sapien
tctgaactttgtcactgtttctgaa

SEQ ID NO: 2016422 - DNA, 25 bp, Homo sapien
gaccctgtacacgtcaggagtggag

SEQ ID NO: 2016423 - DNA, 25 bp, Homo sapien
gtcttacatctattgaatctcatgg

SEQ ID NO: 2016424 - DNA, 25 bp, Homo sapien
tcagtcttacatctattgaatctca

SEQ ID NO: 2016425 - DNA, 25 bp, Homo sapien
tcttacatctattgaatctcatggg

SEQ ID NO: 2016426 - DNA, 25 bp, Homo sapien
tccaccctgtcagatgatacatctg

SEQ ID NO: 2016427 - DNA, 25 bp, Homo sapien
catctccaccctgtcagatgataca

SEQ ID NO: 2016428 - DNA, 25 bp, Homo sapien
tttgaagtcactaagtgtgtgacat

SEQ ID NO: 2016429 - DNA, 25 bp, Homo sapien
ccctgtcagatgatacatctgggtt

SEQ ID NO: 2016430 - DNA, 25 bp, Homo sapien
actgagataccaggttcatctcact

SEQ ID NO: 2016431 - DNA, 25 bp, Homo sapien
atttccaactgagataccaggttca

SEQ ID NO: 2016432 - DNA, 25 bp, Homo sapien
aacttaaagcggaagatggccgaat

SEQ ID NO: 2016433 - DNA, 25 bp, Homo sapien
ggaacagctccagtctacagctccc

SEQ ID NO: 2016434 - DNA, 25 bp, Homo sapien
taaagacaattggtggattccagaa

SEQ ID NO: 2016435 - DNA, 25 bp, Homo sapien
tccctagtaatgatagttgatggct

SEQ ID NO: 2016436 - DNA, 25 bp, Homo sapien
gtaatttttgaagcctcagctggca

SEQ ID NO: 2016437 - DNA, 25 bp, Homo sapien
tcagggtcccactcaaagagttctc

SEQ ID NO: 2016438 - DNA, 25 bp, Homo sapien
agatgactgtcttctcgccatgttt

SEQ ID NO: 2016439 - DNA, 25 bp, Homo sapien
ctgtcttctcgccatgttttcacat

SEQ ID NO: 2016440 - DNA, 25 bp, Homo sapien
tctccttgggttgcagatgactgtc

SEQ ID NO: 2016441 - DNA, 25 bp, Homo sapien
gtgtctggtgaagtctctctccttg

SEQ ID NO: 2016442 - DNA, 25 bp, Homo sapien
cattgtaagcaagacaaaacttgcc

SEQ ID NO: 2016443 - DNA, 25 bp, Homo sapien
aattcagagtgatcatatggtagtc

SEQ ID NO: 2016444 - DNA, 25 bp, Homo sapien
tgctttctatagtgaggctgactct

SEQ ID NO: 2016445 - DNA, 25 bp, Homo sapien
cctattgataccgagaaatgacagg

SEQ ID NO: 2016446 - DNA, 25 bp, Homo sapien
atcaagtcccgcctgcctaagttgg

SEQ ID NO: 2016447 - DNA, 25 bp, Homo sapien
cagggtaatcgtggagcttcctccc

SEQ ID NO: 2016448 - DNA, 25 bp, Homo sapien
gtctggagcactgtaacccatcaag

SEQ ID NO: 2016449 - DNA, 25 bp, Homo sapien
tgatagctctacacactggctgttg

SEQ ID NO: 2016450 - DNA, 25 bp, Homo sapien
atagctgctaatgtctctgtttggc

SEQ ID NO: 2016451 - DNA, 25 bp, Homo sapien
gctgttaaacctatgcaatcaagtt

SEQ ID NO: 2016452 - DNA, 25 bp, Homo sapien
cctaagtattactgaggctcctaat

SEQ ID NO: 2016453 - DNA, 25 bp, Homo sapien
agttgaccaactctgacagtttcag

SEQ ID NO: 2016454 - DNA, 25 bp, Homo sapien
ccaggcactggtatatgatgggaaa

SEQ ID NO: 2016455 - DNA, 25 bp, Homo sapien
tgctaacagcctcagatagaatctg

SEQ ID NO: 2016456 - DNA, 25 bp, Homo sapien
gcctacagcccttggatgctaacag

SEQ ID NO: 2016457 - DNA, 25 bp, Homo sapien
gagtcccgcctatgtttgccaaaca

SEQ ID NO: 2016458 - DNA, 25 bp, Homo sapien
cattggctataaggctggagctaac

SEQ ID NO: 2016459 - DNA, 25 bp, Homo sapien
gggttcccatgaagatcaactgaaa

SEQ ID NO: 2016460 - DNA, 25 bp, Homo sapien
gctaactgcctaacctctgtcctgt

SEQ ID NO: 2016461 - DNA, 25 bp, Homo sapien
tatagcatgtggcagacacgctgag

SEQ ID NO: 2016462 - DNA, 25 bp, Homo sapien
tgcagctctgattgaccaagaagac

SEQ ID NO: 2016463 - DNA, 25 bp, Homo sapien
ggaattccttgttaccccatctgta

SEQ ID NO: 2016464 - DNA, 25 bp, Homo sapien
tgaccagggccttaggtatgcgagt

SEQ ID NO: 2016465 - DNA, 25 bp, Homo sapien
cctgaaaagccaggatgtgctgtgt

SEQ ID NO: 2016466 - DNA, 25 bp, Homo sapien
ccacatatctgaggcaatctgctgc

SEQ ID NO: 2016467 - DNA, 25 bp, Homo sapien
ttggttcccacatatctgaggcaat

SEQ ID NO: 2016468 - DNA, 25 bp, Homo sapien
acatatctgaggcaatctgctgcca

SEQ ID NO: 2016469 - DNA, 25 bp, Homo sapien
ttcccacatatctgaggcaatctgc

SEQ ID NO: 2016470 - DNA, 25 bp, Homo sapien
cctgtcaccaggagcatcgtgtgta

SEQ ID NO: 2016471 - DNA, 25 bp, Homo sapien
tactcaagaaggaagcagcatgtgc

SEQ ID NO: 2016472 - DNA, 25 bp, Homo sapien
gatcatcattgcatagctgaacgca

SEQ ID NO: 2016473 - DNA, 25 bp, Homo sapien
gatgccatgcgctgataaatgcttc

SEQ ID NO: 2016474 - DNA, 25 bp, Homo sapien
gcagaatccaggcttgccttcacag

SEQ ID NO: 2016475 - DNA, 25 bp, Homo sapien
ggcagaatccaggcttgccttcaca

SEQ ID NO: 2016476 - DNA, 25 bp, Homo sapien
aatccaggcttgccttcacagtctc

SEQ ID NO: 2016477 - DNA, 25 bp, Homo sapien
agaatccaggcttgccttcacagtc

SEQ ID NO: 2016478 - DNA, 25 bp, Homo sapien
ttctttctgaaacatcaatgctcac

SEQ ID NO: 2016479 - DNA, 25 bp, Homo sapien
tcatgctgctggaagaatattcttt

SEQ ID NO: 2016480 - DNA, 25 bp, Homo sapien
aatattctttctgaaacatcaatgc

SEQ ID NO: 2016481 - DNA, 25 bp, Homo sapien
ctatccataagctgcccttcatgct

SEQ ID NO: 2016482 - DNA, 25 bp, Homo sapien
gggtcatagcagtgacaatatggct

SEQ ID NO: 2016483 - DNA, 25 bp, Homo sapien
cacccaaaacctccttcagctgaga

SEQ ID NO: 2016484 - DNA, 25 bp, Homo sapien
actgctctaacacaggtgccttctg

SEQ ID NO: 2016485 - DNA, 25 bp, Homo sapien
tgagaccctgcgaagtctttctgcc

SEQ ID NO: 2016486 - DNA, 25 bp, Homo sapien
aattcttcaacacgtgatgccacag

SEQ ID NO: 2016487 - DNA, 25 bp, Homo sapien
tcattttccggtaaggtgactgagg

SEQ ID NO: 2016488 - DNA, 25 bp, Homo sapien
gtcaaccggagatacttacacctgg

SEQ ID NO: 2016489 - DNA, 25 bp, Homo sapien
gaaagacctctgtcactcatacgca

SEQ ID NO: 2016490 - DNA, 25 bp, Homo sapien
tgtttcattcccagtcagggacggg

SEQ ID NO: 2016491 - DNA, 25 bp, Homo sapien
ggttttgttgtagaagccatcccca

SEQ ID NO: 2016492 - DNA, 25 bp, Homo sapien
tcaaaagctgaagcgggtacactgt

SEQ ID NO: 2016493 - DNA, 25 bp, Homo sapien
aaaatgtttacatcccagctggagg

SEQ ID NO: 2016494 - DNA, 25 bp, Homo sapien
ggaaacctcagcggaaaccaccgca

SEQ ID NO: 2016495 - DNA, 25 bp, Homo sapien
cggtccacggccagatccacggccg

SEQ ID NO: 2016496 - DNA, 25 bp, Homo sapien
gcccggtccacggccagatccacgg

SEQ ID NO: 2016497 - DNA, 25 bp, Homo sapien
tccacggccagatccacggccgcga

SEQ ID NO: 2016498 - DNA, 25 bp, Homo sapien
gcagaccgacgtggcaattatagtc

SEQ ID NO: 2016499 - DNA, 25 bp, Homo sapien
tgggtgtccaccccttatccttggc

SEQ ID NO: 2016500 - DNA, 25 bp, Homo sapien
cgtggggatgaagccgaccagcaca

SEQ ID NO: 2016501 - DNA, 25 bp, Homo sapien
ggcccagcttggtaatgggtgtcca

SEQ ID NO: 2016502 - DNA, 25 bp, Homo sapien
taaggtcaaagatggccttggcgca

SEQ ID NO: 2016503 - DNA, 25 bp, Homo sapien
ggagactctgggtcggccttgacca

SEQ ID NO: 2016504 - DNA, 25 bp, Homo sapien
tgtaggtcttagagctgtaaggtca

SEQ ID NO: 2016505 - DNA, 25 bp, Homo sapien
gagactctgggtcggccttgaccag

SEQ ID NO: 2016506 - DNA, 25 bp, Homo sapien
tggctgtcactagcgccatcaccca

SEQ ID NO: 2016507 - DNA, 25 bp, Homo sapien
agtgtggcaacttctgtatctctgc

SEQ ID NO: 2016508 - DNA, 25 bp, Homo sapien
gcatctcaaaggtaatcaaaaacac

SEQ ID NO: 2016509 - DNA, 25 bp, Homo sapien
aacacattcccatctaccagtgtgg

SEQ ID NO: 2016510 - DNA, 25 bp, Homo sapien
tgaccaccgtgggaactgagctgac

SEQ ID NO: 2016511 - DNA, 25 bp, Homo sapien
tgagctgaccggaagaccagtaagg

SEQ ID NO: 2016512 - DNA, 25 bp, Homo sapien
ggttccatttggatgggtcacagag

SEQ ID NO: 2016513 - DNA, 25 bp, Homo sapien
aaaacctgaagtggacgttgaagca

SEQ ID NO: 2016514 - DNA, 25 bp, Homo sapien
aaatcaatgcttccccagcctgtgg

SEQ ID NO: 2016515 - DNA, 25 bp, Homo sapien
gagtttaggcacagatcgtcacaga

SEQ ID NO: 2016516 - DNA, 25 bp, Homo sapien
tggcccagggcatcgaactttaaat

SEQ ID NO: 2016517 - DNA, 25 bp, Homo sapien
gataaatctgctgtatgaagccacc

SEQ ID NO: 2016518 - DNA, 25 bp, Homo sapien
ctacttgctgtgatggagaattctg

SEQ ID NO: 2016519 - DNA, 25 bp, Homo sapien
ctgtctacttgctgtgatggagaat

SEQ ID NO: 2016520 - DNA, 25 bp, Homo sapien
tctggaaggttctcccatccgagga

SEQ ID NO: 2016521 - DNA, 25 bp, Homo sapien
gaggatgccttatcgcactgaggga

SEQ ID NO: 2016522 - DNA, 25 bp, Homo sapien
cataatctctctgtagcactggtca

SEQ ID NO: 2016523 - DNA, 25 bp, Homo sapien
agtttgtaaattgcacgcatttttc

SEQ ID NO: 2016524 - DNA, 25 bp, Homo sapien
cttgattgccatgttccctggatga

SEQ ID NO: 2016525 - DNA, 25 bp, Homo sapien
gcatcttgtcagtcaagtttgtaaa

SEQ ID NO: 2016526 - DNA, 25 bp, Homo sapien
ccacttgcaggaaatcaccatattg

SEQ ID NO: 2016527 - DNA, 25 bp, Homo sapien
gccagacttagcatgggcagccagc

SEQ ID NO: 2016528 - DNA, 25 bp, Homo sapien
catgggcagccagcatagcgcacta

SEQ ID NO: 2016529 - DNA, 25 bp, Homo sapien
caggtggtccccacttgcaggaaat

SEQ ID NO: 2016530 - DNA, 25 bp, Homo sapien
ttttgcatgcaatgtagcctacaga

SEQ ID NO: 2016531 - DNA, 25 bp, Homo sapien
tgtagcctacagaattgtacttgtt

SEQ ID NO: 2016532 - DNA, 25 bp, Homo sapien
ctgctccattttgcatgcaatgtag

SEQ ID NO: 2016533 - DNA, 25 bp, Homo sapien
caatgtagcctacagaattgtactt

SEQ ID NO: 2016534 - DNA, 25 bp, Homo sapien
tggataagttcgtaagtgcagttga

SEQ ID NO: 2016535 - DNA, 25 bp, Homo sapien
ctactgtggataagttcgtaagtgc

SEQ ID NO: 2016536 - DNA, 25 bp, Homo sapien
actgtggataagttcgtaagtgcag

SEQ ID NO: 2016537 - DNA, 25 bp, Homo sapien
gataagttcgtaagtgcagttgaaa

SEQ ID NO: 2016538 - DNA, 25 bp, Homo sapien
ccaagatgtattcaacctgatgaga

SEQ ID NO: 2016539 - DNA, 25 bp, Homo sapien
caggtataacctgcttactacacca

SEQ ID NO: 2016540 - DNA, 25 bp, Homo sapien
tttccaagatgtattcaacctgatg

SEQ ID NO: 2016541 - DNA, 25 bp, Homo sapien
cacactcttcgaaggagcccagcaa

SEQ ID NO: 2016542 - DNA, 25 bp, Homo sapien
agagaaactgcgtctgccttccaca

SEQ ID NO: 2016543 - DNA, 25 bp, Homo sapien
ccacagacagaacattagcaataac

SEQ ID NO: 2016544 - DNA, 25 bp, Homo sapien
tattattgaggatggtgatcagagg

SEQ ID NO: 2016545 - DNA, 25 bp, Homo sapien
accacaagtctgttaggaggtcaca

SEQ ID NO: 2016546 - DNA, 25 bp, Homo sapien
caacaggaaattgtatgctcaagtc

SEQ ID NO: 2016547 - DNA, 25 bp, Homo sapien
taagtcagacatctctataaacaac

SEQ ID NO: 2016548 - DNA, 25 bp, Homo sapien
tgctcaagtctaactaccaccaaaa

SEQ ID NO: 2016549 - DNA, 25 bp, Homo sapien
tgttttctgaaaaacgcagatgcat

SEQ ID NO: 2016550 - DNA, 25 bp, Homo sapien
cgagaatcaatgtctgtgaatgcca

SEQ ID NO: 2016551 - DNA, 25 bp, Homo sapien
gagaatcaatgtctgtgaatgccat

SEQ ID NO: 2016552 - DNA, 25 bp, Homo sapien
gattccatttttccagtcactttca

SEQ ID NO: 2016553 - DNA, 25 bp, Homo sapien
tttgtgatggcttcgagcttcctcc

SEQ ID NO: 2016554 - DNA, 25 bp, Homo sapien
tgaaggctttattcgtttctttcta

SEQ ID NO: 2016555 - DNA, 25 bp, Homo sapien
gacttctctacactgcttatctagt

SEQ ID NO: 2016556 - DNA, 25 bp, Homo sapien
taacaactgaagctctagacttggc

SEQ ID NO: 2016557 - DNA, 25 bp, Homo sapien
tgaaaatgaccaagctccagctgtg

SEQ ID NO: 2016558 - DNA, 25 bp, Homo sapien
tgtgccaacagtttccagccttagt

SEQ ID NO: 2016559 - DNA, 25 bp, Homo sapien
tactttcgcttgctaaggcttcaaa

SEQ ID NO: 2016560 - DNA, 25 bp, Homo sapien
accacgaggactgaagtttggatca

SEQ ID NO: 2016561 - DNA, 25 bp, Homo sapien
aacaccacgaggactgaagtttgga

SEQ ID NO: 2016562 - DNA, 25 bp, Homo sapien
gcaaagcccagaaacaccacgagga

SEQ ID NO: 2016563 - DNA, 25 bp, Homo sapien
gcccagaaacaccacgaggactgaa

SEQ ID NO: 2016564 - DNA, 25 bp, Homo sapien
tcctctgcagccacataaacctggt

SEQ ID NO: 2016565 - DNA, 25 bp, Homo sapien
gaacactgttcatatgtgacagaat

SEQ ID NO: 2016566 - DNA, 25 bp, Homo sapien
cactgttcatatgtgacagaatgac

SEQ ID NO: 2016567 - DNA, 25 bp, Homo sapien
cctggtttctcggatgtgttcaaaa

SEQ ID NO: 2016568 - DNA, 25 bp, Homo sapien
tggagccaatggaacagctgcattc

SEQ ID NO: 2016569 - DNA, 25 bp, Homo sapien
agccaatggaacagctgcattccta

SEQ ID NO: 2016570 - DNA, 25 bp, Homo sapien
ctccatcatcacacgtcagcatgga

SEQ ID NO: 2016571 - DNA, 25 bp, Homo sapien
gctccatcatcacacgtcagcatgg

SEQ ID NO: 2016572 - DNA, 25 bp, Homo sapien
agctcttacatgaatctctggtgac

SEQ ID NO: 2016573 - DNA, 25 bp, Homo sapien
gattctcgcccttgactaatcagaa

SEQ ID NO: 2016574 - DNA, 25 bp, Homo sapien
tcctgaaccagggacagaacagcag

SEQ ID NO: 2016575 - DNA, 25 bp, Homo sapien
aattatgagttctggtgattctcgc

SEQ ID NO: 2016576 - DNA, 25 bp, Homo sapien
gatagatggctgttgcgttgcaggg

SEQ ID NO: 2016577 - DNA, 25 bp, Homo sapien
gttgcaggggagaggtctctagcat

SEQ ID NO: 2016578 - DNA, 25 bp, Homo sapien
gagatagatggctgttgcgttgcag

SEQ ID NO: 2016579 - DNA, 25 bp, Homo sapien
ctgttgcgttgcaggggagaggtct

SEQ ID NO: 2016580 - DNA, 25 bp, Homo sapien
tgagtacaagtacccatgagaggag

SEQ ID NO: 2016581 - DNA, 25 bp, Homo sapien
gaagcatggtgagtacaagtaccca

SEQ ID NO: 2016582 - DNA, 25 bp, Homo sapien
agaaactagaagcatggtgagtaca

SEQ ID NO: 2016583 - DNA, 25 bp, Homo sapien
caagtacccatgagaggagataggg

SEQ ID NO: 2016584 - DNA, 25 bp, Homo sapien
tgatgactgccatcaaagcgtcttg

SEQ ID NO: 2016585 - DNA, 25 bp, Homo sapien
tgagtggctgcatagcagcatttaa

SEQ ID NO: 2016586 - DNA, 25 bp, Homo sapien
tgactgccatcaaagcgtcttgtga

SEQ ID NO: 2016587 - DNA, 25 bp, Homo sapien
tatatttcaatcatttgtcgagtga

SEQ ID NO: 2016588 - DNA, 25 bp, Homo sapien
ctgacctcagctcgtgattgtgcac

SEQ ID NO: 2016589 - DNA, 25 bp, Homo sapien
cgtgattgtgcaccctttaccgcca

SEQ ID NO: 2016590 - DNA, 25 bp, Homo sapien
gctcgtgattgtgcaccctttaccg

SEQ ID NO: 2016591 - DNA, 25 bp, Homo sapien
cctcagctcgtgattgtgcaccctt

SEQ ID NO: 2016592 - DNA, 25 bp, Homo sapien
tccctgtgaggataaccggatcttt

SEQ ID NO: 2016593 - DNA, 25 bp, Homo sapien
ctgtgaggataaccggatctttgca

SEQ ID NO: 2016594 - DNA, 25 bp, Homo sapien
tgaggataaccggatctttgcagca

SEQ ID NO: 2016595 - DNA, 25 bp, Homo sapien
gaggataaccggatctttgcagcaa

SEQ ID NO: 2016596 - DNA, 25 bp, Homo sapien
tcgacttctaattagtggtctctgc

SEQ ID NO: 2016597 - DNA, 25 bp, Homo sapien
tatatatcacttacaagggaagaaa

SEQ ID NO: 2016598 - DNA, 25 bp, Homo sapien
taattagtggtctctgctttcttcc

SEQ ID NO: 2016599 - DNA, 25 bp, Homo sapien
cctccaagatgctcgacttctaatt

SEQ ID NO: 2016600 - DNA, 25 bp, Homo sapien
cactctcaagtgaacgtttttggct

SEQ ID NO: 2016601 - DNA, 25 bp, Homo sapien
ttcaaatgacactctcaagtgaacg

SEQ ID NO: 2016602 - DNA, 25 bp, Homo sapien
aagaatgggtcacagattccattag

SEQ ID NO: 2016603 - DNA, 25 bp, Homo sapien
agaatgggtcacagattccattagc

SEQ ID NO: 2016604 - DNA, 25 bp, Homo sapien
caaagacctttatcgagcgcagctg

SEQ ID NO: 2016605 - DNA, 25 bp, Homo sapien
cctttatcgagcgcagctgccccgg

SEQ ID NO: 2016606 - DNA, 25 bp, Homo sapien
agacctttatcgagcgcagctgccc

SEQ ID NO: 2016607 - DNA, 25 bp, Homo sapien
aaagacctttatcgagcgcagctgc

SEQ ID NO: 2016608 - DNA, 25 bp, Homo sapien
taagacagcagaggaacgaatgttc

SEQ ID NO: 2016609 - DNA, 25 bp, Homo sapien
ggcacaggatcaacaaacaggagta

SEQ ID NO: 2016610 - DNA, 25 bp, Homo sapien
gttcttccggaaagagctctgagca

SEQ ID NO: 2016611 - DNA, 25 bp, Homo sapien
tcttcaggcacaggatcaacaaaca

SEQ ID NO: 2016612 - DNA, 25 bp, Homo sapien
tgtcttcttagtttgtaacatacgg

SEQ ID NO: 2016613 - DNA, 25 bp, Homo sapien
gtgtctttacaaggtagagtgaagt

SEQ ID NO: 2016614 - DNA, 25 bp, Homo sapien
ctttacaaggtagagtgaagtgtgg

SEQ ID NO: 2016615 - DNA, 25 bp, Homo sapien
tagtttgtaacatacggccaccttc

SEQ ID NO: 2016616 - DNA, 25 bp, Homo sapien
agtttgaaaggattcgtgagttctt

SEQ ID NO: 2016617 - DNA, 25 bp, Homo sapien
gtagtctgacttttaggggatatct

SEQ ID NO: 2016618 - DNA, 25 bp, Homo sapien
aaggattcgtgagttcttgaggcat

SEQ ID NO: 2016619 - DNA, 25 bp, Homo sapien
gacttttaggggatatctcagtttg

SEQ ID NO: 2016620 - DNA, 25 bp, Homo sapien
ttcgtccgtattccatttgataaga

SEQ ID NO: 2016621 - DNA, 25 bp, Homo sapien
attaatgcactgatactccacagag

SEQ ID NO: 2016622 - DNA, 25 bp, Homo sapien
gattaatgcactgatactccacaga

SEQ ID NO: 2016623 - DNA, 25 bp, Homo sapien
tggttttcgtccgtattccatttga

SEQ ID NO: 2016624 - DNA, 25 bp, Homo sapien
accatcatcaaacttacagtgtcca

SEQ ID NO: 2016625 - DNA, 25 bp, Homo sapien
catcaaacttacagtgtccagtctc

SEQ ID NO: 2016626 - DNA, 25 bp, Homo sapien
cactgacagaattaaggtcattcac

SEQ ID NO: 2016627 - DNA, 25 bp, Homo sapien
agaattaaggtcattcaccatcatc

SEQ ID NO: 2016628 - DNA, 25 bp, Homo sapien
ggaatccatataaagcagcaaagca

SEQ ID NO: 2016629 - DNA, 25 bp, Homo sapien
gaatccatataaagcagcaaagcag

SEQ ID NO: 2016630 - DNA, 25 bp, Homo sapien
aggaatccatataaagcagcaaagc

SEQ ID NO: 2016631 - DNA, 25 bp, Homo sapien
tcatttgctgtaagagctgcacctg

SEQ ID NO: 2016632 - DNA, 25 bp, Homo sapien
cagatgcaatcctcaactgacagca

SEQ ID NO: 2016633 - DNA, 25 bp, Homo sapien
tcagcagggaatgatacataagccc

SEQ ID NO: 2016634 - DNA, 25 bp, Homo sapien
tcagtgcaggttcaccaggagtcca

SEQ ID NO: 2016635 - DNA, 25 bp, Homo sapien
aagaagaaaatcaggggcaattcca

SEQ ID NO: 2016636 - DNA, 25 bp, Homo sapien
gcaagaagaaaatcaggggcaattc

SEQ ID NO: 2016637 - DNA, 25 bp, Homo sapien
agaaaatcaggggcaattccatcat

SEQ ID NO: 2016638 - DNA, 25 bp, Homo sapien
ctttgcttgcaagaagaaaatcagg

SEQ ID NO: 2016639 - DNA, 25 bp, Homo sapien
tttggctgataaccctggaatctta

SEQ ID NO: 2016640 - DNA, 25 bp, Homo sapien
agctttggctgataaccctggaatc

SEQ ID NO: 2016641 - DNA, 25 bp, Homo sapien
tggaatcttatgatatccagtctgg

SEQ ID NO: 2016642 - DNA, 25 bp, Homo sapien
tgatatccagtctggacccccaggg

SEQ ID NO: 2016643 - DNA, 25 bp, Homo sapien
aggctggtctgcttccgggttccgt

SEQ ID NO: 2016644 - DNA, 25 bp, Homo sapien
ggttctcctggaatccggtcctgct

SEQ ID NO: 2016645 - DNA, 25 bp, Homo sapien
gtcctgcttttgtacctatccaagt

SEQ ID NO: 2016646 - DNA, 25 bp, Homo sapien
gcctcgcgagagcaggcaccagcag

SEQ ID NO: 2016647 - DNA, 25 bp, Homo sapien
gcggcagcatcccagggactgagac

SEQ ID NO: 2016648 - DNA, 25 bp, Homo sapien
tcccagggactgagacggcctgcag

SEQ ID NO: 2016649 - DNA, 25 bp, Homo sapien
gcatcccagggactgagacggcctg

SEQ ID NO: 2016650 - DNA, 25 bp, Homo sapien
cagcatcccagggactgagacggcc

SEQ ID NO: 2016651 - DNA, 25 bp, Homo sapien
gggccaggggaaaatgcaggagtcc

SEQ ID NO: 2016652 - DNA, 25 bp, Homo sapien
gaaaatgcaggagtcctgaggagga

SEQ ID NO: 2016653 - DNA, 25 bp, Homo sapien
gggaaaatgcaggagtcctgaggag

SEQ ID NO: 2016654 - DNA, 25 bp, Homo sapien
ccaggggaaaatgcaggagtcctga

SEQ ID NO: 2016655 - DNA, 25 bp, Homo sapien
gtctcgtttgtctgagttcactggg

SEQ ID NO: 2016656 - DNA, 25 bp, Homo sapien
gcaggagtcccgctgccatttccac

SEQ ID NO: 2016657 - DNA, 25 bp, Homo sapien
tgccaagttctgcaggagtcccgct

SEQ ID NO: 2016658 - DNA, 25 bp, Homo sapien
catttccaccagaaacaggatgcgg

SEQ ID NO: 2016659 - DNA, 25 bp, Homo sapien
ctgtagcaaatggcaaatctcgttc

SEQ ID NO: 2016660 - DNA, 25 bp, Homo sapien
tgtagcaaatggcaaatctcgttct

SEQ ID NO: 2016661 - DNA, 25 bp, Homo sapien
gtagcaaatggcaaatctcgttctt

SEQ ID NO: 2016662 - DNA, 25 bp, Homo sapien
agcaaatggcaaatctcgttcttac

SEQ ID NO: 2016663 - DNA, 25 bp, Homo sapien
gttctctttaccacgagagctgcta

SEQ ID NO: 2016664 - DNA, 25 bp, Homo sapien
aaaagcaatcatcaggcccgggtca

SEQ ID NO: 2016665 - DNA, 25 bp, Homo sapien
cagtaacttgcacttcttgtgacaa

SEQ ID NO: 2016666 - DNA, 25 bp, Homo sapien
taagtgcgtctgataagttacaaat

SEQ ID NO: 2016667 - DNA, 25 bp, Homo sapien
ggatttaaactgaggtgcttgtttc

SEQ ID NO: 2016668 - DNA, 25 bp, Homo sapien
tttaaactgaggtgcttgtttcacc

SEQ ID NO: 2016669 - DNA, 25 bp, Homo sapien
gatttaaactgaggtgcttgtttca

SEQ ID NO: 2016670 - DNA, 25 bp, Homo sapien
taaactgaggtgcttgtttcaccat

SEQ ID NO: 2016671 - DNA, 25 bp, Homo sapien
attgtattcctatagaaaggctctc

SEQ ID NO: 2016672 - DNA, 25 bp, Homo sapien
tgtattcctatagaaaggctctctg

SEQ ID NO: 2016673 - DNA, 25 bp, Homo sapien
attcctatagaaaggctctctggca

SEQ ID NO: 2016674 - DNA, 25 bp, Homo sapien
tattcctatagaaaggctctctggc

SEQ ID NO: 2016675 - DNA, 25 bp, Homo sapien
gtcggcagatatgccccactgaagc

SEQ ID NO: 2016676 - DNA, 25 bp, Homo sapien
caggctggtcggcagatatgcccca

SEQ ID NO: 2016677 - DNA, 25 bp, Homo sapien
ctggtcggcagatatgccccactga

SEQ ID NO: 2016678 - DNA, 25 bp, Homo sapien
cccaggctggtcggcagatatgccc

SEQ ID NO: 2016679 - DNA, 25 bp, Homo sapien
gacccacaaaatatgatgactgaaa

SEQ ID NO: 2016680 - DNA, 25 bp, Homo sapien
ctggacccacaaaatatgatgactg

SEQ ID NO: 2016681 - DNA, 25 bp, Homo sapien
cacaaaatatgatgactgaaaatgc

SEQ ID NO: 2016682 - DNA, 25 bp, Homo sapien
ccacaaaatatgatgactgaaaatg

SEQ ID NO: 2016683 - DNA, 25 bp, Homo sapien
ctgcttttgatctgtgaggatggcc

SEQ ID NO: 2016684 - DNA, 25 bp, Homo sapien
tgttaaatcatctgagggccagcat

SEQ ID NO: 2016685 - DNA, 25 bp, Homo sapien
tgaggtaaaccatctggacgacagg

SEQ ID NO: 2016686 - DNA, 25 bp, Homo sapien
tgcaaactgcgatgtagaccagcgt

SEQ ID NO: 2016687 - DNA, 25 bp, Homo sapien
gcccaattattaaagccacggtgtg

SEQ ID NO: 2016688 - DNA, 25 bp, Homo sapien
tattgggaaagtggaagtaccattc

SEQ ID NO: 2016689 - DNA, 25 bp, Homo sapien
cagcacattcgtcatgaggagccca

SEQ ID NO: 2016690 - DNA, 25 bp, Homo sapien
cacacgggtgtaatgctgcacagca

SEQ ID NO: 2016691 - DNA, 25 bp, Homo sapien
gatcgtgttgctccaaatatgcaaa

SEQ ID NO: 2016692 - DNA, 25 bp, Homo sapien
atgcaaagtagacaagggactccca

SEQ ID NO: 2016693 - DNA, 25 bp, Homo sapien
gggactcccacaaggaatgttcatc

SEQ ID NO: 2016694 - DNA, 25 bp, Homo sapien
tcagactagatcgtgttgctccaaa

SEQ ID NO: 2016695 - DNA, 25 bp, Homo sapien
tgtccatccaaatggcattggaaag

SEQ ID NO: 2016696 - DNA, 25 bp, Homo sapien
gtccatccaaatggcattggaaaga

SEQ ID NO: 2016697 - DNA, 25 bp, Homo sapien
ttcaacattcttatagaatacaatt

SEQ ID NO: 2016698 - DNA, 25 bp, Homo sapien
tatagaatacaattttcaactcaga

SEQ ID NO: 2016699 - DNA, 25 bp, Homo sapien
tgaaataaaaatcgttaagggcagc

SEQ ID NO: 2016700 - DNA, 25 bp, Homo sapien
aactcagaatttcatgtctaggcaa

SEQ ID NO: 2016701 - DNA, 25 bp, Homo sapien
ggattctgactcttctcatggttct

SEQ ID NO: 2016702 - DNA, 25 bp, Homo sapien
gactcttctcatggttctcaggccc

SEQ ID NO: 2016703 - DNA, 25 bp, Homo sapien
tctgactcttctcatggttctcagg

SEQ ID NO: 2016704 - DNA, 25 bp, Homo sapien
caaaaaggattctgactcttctcat

SEQ ID NO: 2016705 - DNA, 25 bp, Homo sapien
gaagcaaacaccataggcgtccact

SEQ ID NO: 2016706 - DNA, 25 bp, Homo sapien
cttgtagctgaccaatgctcttgcc

SEQ ID NO: 2016707 - DNA, 25 bp, Homo sapien
agctgaccaatgctcttgccaaaaa

SEQ ID NO: 2016708 - DNA, 25 bp, Homo sapien
acttccaacactgaaggactagctt

SEQ ID NO: 2016709 - DNA, 25 bp, Homo sapien
gatttgcatcaacgatgatctcaca

SEQ ID NO: 2016710 - DNA, 25 bp, Homo sapien
cacccttgatttgcatcaacgatga

SEQ ID NO: 2016711 - DNA, 25 bp, Homo sapien
tgcatcaacgatgatctcacagatc

SEQ ID NO: 2016712 - DNA, 25 bp, Homo sapien
tgctttccacccttgatttgcatca

SEQ ID NO: 2016713 - DNA, 25 bp, Homo sapien
tgctggccgctccaaaacatgggct

SEQ ID NO: 2016714 - DNA, 25 bp, Homo sapien
cagactcggagaacctgaccagagt

SEQ ID NO: 2016715 - DNA, 25 bp, Homo sapien
gggcttaacagactcggagaacctg

SEQ ID NO: 2016716 - DNA, 25 bp, Homo sapien
tcatgctgtacgatgctggccgctc

SEQ ID NO: 2016717 - DNA, 25 bp, Homo sapien
tggtcaccagcttctatctccaggg

SEQ ID NO: 2016718 - DNA, 25 bp, Homo sapien
tcaatccgattcactctgagctctt

SEQ ID NO: 2016719 - DNA, 25 bp, Homo sapien
ttaaacctttagactcagcttggtc

SEQ ID NO: 2016720 - DNA, 25 bp, Homo sapien
ggcaaagcgcttcccaacaagactc

SEQ ID NO: 2016721 - DNA, 25 bp, Homo sapien
cgttcgtagcagcaccattattttc

SEQ ID NO: 2016722 - DNA, 25 bp, Homo sapien
tcgtagcagcaccattattttctga

SEQ ID NO: 2016723 - DNA, 25 bp, Homo sapien
gcagcaccattattttctgacccca

SEQ ID NO: 2016724 - DNA, 25 bp, Homo sapien
catgccgttcgtagcagcaccatta

SEQ ID NO: 2016725 - DNA, 25 bp, Homo sapien
gtcttcagcatgtgccttgtcaaag

SEQ ID NO: 2016726 - DNA, 25 bp, Homo sapien
aaccctgagaggtgtaccgatttgc

SEQ ID NO: 2016727 - DNA, 25 bp, Homo sapien
catgtgccttgtcaaagtcaaccct

SEQ ID NO: 2016728 - DNA, 25 bp, Homo sapien
tctcatagtccgaatcagtggttgc

SEQ ID NO: 2016729 - DNA, 25 bp, Homo sapien
tacacagcagcggcttcctcatacc

SEQ ID NO: 2016730 - DNA, 25 bp, Homo sapien
cagcagcggcttcctcataccgtac

SEQ ID NO: 2016731 - DNA, 25 bp, Homo sapien
acacagcagcggcttcctcataccg

SEQ ID NO: 2016732 - DNA, 25 bp, Homo sapien
acagcagcggcttcctcataccgta

SEQ ID NO: 2016733 - DNA, 25 bp, Homo sapien
ttcagcattaactcggcgagagtta

SEQ ID NO: 2016734 - DNA, 25 bp, Homo sapien
gtgaataattctcggaataaaactg

SEQ ID NO: 2016735 - DNA, 25 bp, Homo sapien
gaacttgccagtgaataattctcgg

SEQ ID NO: 2016736 - DNA, 25 bp, Homo sapien
gccagtgaataattctcggaataaa

SEQ ID NO: 2016737 - DNA, 25 bp, Homo sapien
ttccaagaacttgccagtgaataat

SEQ ID NO: 2016738 - DNA, 25 bp, Homo sapien
ccaatagctgcttaactaggaccac

SEQ ID NO: 2016739 - DNA, 25 bp, Homo sapien
gcatcttatcccatgagcaacacga

SEQ ID NO: 2016740 - DNA, 25 bp, Homo sapien
gagcaacacgatttcagtttcccca

SEQ ID NO: 2016741 - DNA, 25 bp, Homo sapien
attcaaattgaccaaccaatagctg

SEQ ID NO: 2016742 - DNA, 25 bp, Homo sapien
gctggccaaagagaaggacttaaaa

SEQ ID NO: 2016743 - DNA, 25 bp, Homo sapien
tgatgtgaacaacaccaaacataga

SEQ ID NO: 2016744 - DNA, 25 bp, Homo sapien
gaatatatgaatctcaccaaggaga

SEQ ID NO: 2016745 - DNA, 25 bp, Homo sapien
aggcataaaagggagaagccttcat

SEQ ID NO: 2016746 - DNA, 25 bp, Homo sapien
ggccctctgcttattaatatttacg

SEQ ID NO: 2016747 - DNA, 25 bp, Homo sapien
ctttcccaatccatgctgtcagctc

SEQ ID NO: 2016748 - DNA, 25 bp, Homo sapien
ttccaaggattcagagaacagctct

SEQ ID NO: 2016749 - DNA, 25 bp, Homo sapien
cactgctattaaagatgtaggctga

SEQ ID NO: 2016750 - DNA, 25 bp, Homo sapien
actgctattaaagatgtaggctgag

SEQ ID NO: 2016751 - DNA, 25 bp, Homo sapien
ctgagatagaacgtaaaggggattt

SEQ ID NO: 2016752 - DNA, 25 bp, Homo sapien
gtaaaggggattttcggccagctgc

SEQ ID NO: 2016753 - DNA, 25 bp, Homo sapien
cccaacaccaggccccaggctgagc

SEQ ID NO: 2016754 - DNA, 25 bp, Homo sapien
caacaccaggccccaggctgagctt

SEQ ID NO: 2016755 - DNA, 25 bp, Homo sapien
acgcccaacaccaggccccaggctg

SEQ ID NO: 2016756 - DNA, 25 bp, Homo sapien
tcacgcccaacaccaggccccaggc

SEQ ID NO: 2016757 - DNA, 25 bp, Homo sapien
gcatagcagatgaccaggcataaca

SEQ ID NO: 2016758 - DNA, 25 bp, Homo sapien
tctccaatgcccaacatgaggaagt

SEQ ID NO: 2016759 - DNA, 25 bp, Homo sapien
cccatgagcgtgcagtgaaagtaga

SEQ ID NO: 2016760 - DNA, 25 bp, Homo sapien
taattgtcatagtgaaggtcaaagc

SEQ ID NO: 2016761 - DNA, 25 bp, Homo sapien
tctaatgcatgtctagatgtttacc

SEQ ID NO: 2016762 - DNA, 25 bp, Homo sapien
aagatcctagactttgctgtttatc

SEQ ID NO: 2016763 - DNA, 25 bp, Homo sapien
caacggcctactgttctcacttgga

SEQ ID NO: 2016764 - DNA, 25 bp, Homo sapien
taaaagcacgtatctttcaacggcc

SEQ ID NO: 2016765 - DNA, 25 bp, Homo sapien
gatttcacaagttgtactgctcttc

SEQ ID NO: 2016766 - DNA, 25 bp, Homo sapien
tgtgtcatgtcttccagaatctgaa

SEQ ID NO: 2016767 - DNA, 25 bp, Homo sapien
aatctgaatttgagtgagcacctgg

SEQ ID NO: 2016768 - DNA, 25 bp, Homo sapien
acctggcgcagagatcccgttcctc

SEQ ID NO: 2016769 - DNA, 25 bp, Homo sapien
tttaatagcccgatggtgacagtgc

SEQ ID NO: 2016770 - DNA, 25 bp, Homo sapien
taatagcccgatggtgacagtgcac

SEQ ID NO: 2016771 - DNA, 25 bp, Homo sapien
cccgatttttaatagcccgatggtg

SEQ ID NO: 2016772 - DNA, 25 bp, Homo sapien
agcacagggcccgatttttaatagc

SEQ ID NO: 2016773 - DNA, 25 bp, Homo sapien
gctccacatttgtaagcaatcagat

SEQ ID NO: 2016774 - DNA, 25 bp, Homo sapien
tcagtgggaggtgctccacatttgt

SEQ ID NO: 2016775 - DNA, 25 bp, Homo sapien
aggtgctccacatttgtaagcaatc

SEQ ID NO: 2016776 - DNA, 25 bp, Homo sapien
tgggaggtgctccacatttgtaagc

SEQ ID NO: 2016777 - DNA, 25 bp, Homo sapien
caattagatcttcagcgggaggtgc

SEQ ID NO: 2016778 - DNA, 25 bp, Homo sapien
taagcaattagatcttcagcgggag

SEQ ID NO: 2016779 - DNA, 25 bp, Homo sapien
tcagcgggaggtgctccacacttgt

SEQ ID NO: 2016780 - DNA, 25 bp, Homo sapien
gcaattagatcttcagtgggaggtg

SEQ ID NO: 2016781 - DNA, 25 bp, Homo sapien
catttgatattccaacattcagagt

SEQ ID NO: 2016782 - DNA, 25 bp, Homo sapien
gcatttgatattccaacattcagag

SEQ ID NO: 2016783 - DNA, 25 bp, Homo sapien
ctgtgcatttgatattccaacattc

SEQ ID NO: 2016784 - DNA, 25 bp, Homo sapien
gtgcatttgatattccaacattcag

SEQ ID NO: 2016785 - DNA, 25 bp, Homo sapien
tctttctgttgaagttggcgtacat

SEQ ID NO: 2016786 - DNA, 25 bp, Homo sapien
tcacatcaagatgagcaggtatatt

SEQ ID NO: 2016787 - DNA, 25 bp, Homo sapien
gaagttggcgtacatttgtcaaagt

SEQ ID NO: 2016788 - DNA, 25 bp, Homo sapien
tcaaaccgaggttgttgagagcttt

SEQ ID NO: 2016789 - DNA, 25 bp, Homo sapien
gtgttctttccataggcgaattgaa

SEQ ID NO: 2016790 - DNA, 25 bp, Homo sapien
gaaactcttttccaagagcagggtg

SEQ ID NO: 2016791 - DNA, 25 bp, Homo sapien
attgaaccatagtaaaaaatctcct

SEQ ID NO: 2016792 - DNA, 25 bp, Homo sapien
tttagaagttgcgtggatgcaggcc

SEQ ID NO: 2016793 - DNA, 25 bp, Homo sapien
tctatttggagaatgccaatatcca

SEQ ID NO: 2016794 - DNA, 25 bp, Homo sapien
tctccaggtgttctaacaatggtgc

SEQ ID NO: 2016795 - DNA, 25 bp, Homo sapien
tctctgttgcccttgtcttgtgcca

SEQ ID NO: 2016796 - DNA, 25 bp, Homo sapien
tccctttgaggccatgtgttcccgc

SEQ ID NO: 2016797 - DNA, 25 bp, Homo sapien
tttctagattatgcagcatcctcat

SEQ ID NO: 2016798 - DNA, 25 bp, Homo sapien
ctatttctagattatgcagcatcct

SEQ ID NO: 2016799 - DNA, 25 bp, Homo sapien
tcttactatttctagattatgcagc

SEQ ID NO: 2016800 - DNA, 25 bp, Homo sapien
cactcttactatttctagattatgc

SEQ ID NO: 2016801 - DNA, 25 bp, Homo sapien
ggagccttttgggtatttctgtgta

SEQ ID NO: 2016802 - DNA, 25 bp, Homo sapien
ccttggttatttccacatcgcagtt

SEQ ID NO: 2016803 - DNA, 25 bp, Homo sapien
tggaagagtgtctccacaagggaca

SEQ ID NO: 2016804 - DNA, 25 bp, Homo sapien
ggcagaattaatgagcaaatgctct

SEQ ID NO: 2016805 - DNA, 25 bp, Homo sapien
atgataccatccgctctcctgccat

SEQ ID NO: 2016806 - DNA, 25 bp, Homo sapien
tgtatctgttatgccagatttacta

SEQ ID NO: 2016807 - DNA, 25 bp, Homo sapien
atctgttatgccagatttactaaaa

SEQ ID NO: 2016808 - DNA, 25 bp, Homo sapien
attgtatctgttatgccagatttac

SEQ ID NO: 2016809 - DNA, 25 bp, Homo sapien
tatctgttatgccagatttactaaa

SEQ ID NO: 2016810 - DNA, 25 bp, Homo sapien
cttgggtgcttaatggaaaatgcat

SEQ ID NO: 2016811 - DNA, 25 bp, Homo sapien
tgctcctcagggttgctgttgcttg

SEQ ID NO: 2016812 - DNA, 25 bp, Homo sapien
tgcttgggtgcttaatggaaaatgc

SEQ ID NO: 2016813 - DNA, 25 bp, Homo sapien
gctgttgcttgggtgcttaatggaa

SEQ ID NO: 2016814 - DNA, 25 bp, Homo sapien
gcttgagcagaacgagctatcaaaa

SEQ ID NO: 2016815 - DNA, 25 bp, Homo sapien
tgagcagaacgagctatcaaaaacc

SEQ ID NO: 2016816 - DNA, 25 bp, Homo sapien
caattacaaaggcttcagccaatcc

SEQ ID NO: 2016817 - DNA, 25 bp, Homo sapien
gaagacatcattaacccaattacaa

SEQ ID NO: 2016818 - DNA, 25 bp, Homo sapien
gacaggggctttcagaatgtgagaa

SEQ ID NO: 2016819 - DNA, 25 bp, Homo sapien
caggggctttcagaatgtgagaaaa

SEQ ID NO: 2016820 - DNA, 25 bp, Homo sapien
ctttggacaggggctttcagaatgt

SEQ ID NO: 2016821 - DNA, 25 bp, Homo sapien
ttggacaggggctttcagaatgtga

SEQ ID NO: 2016822 - DNA, 25 bp, Homo sapien
caccagaatgcatgcagtttctccg

SEQ ID NO: 2016823 - DNA, 25 bp, Homo sapien
tgcagtttctccgtgtgccctgtgc

SEQ ID NO: 2016824 - DNA, 25 bp, Homo sapien
ccaagacaccagaatgcatgcagtt

SEQ ID NO: 2016825 - DNA, 25 bp, Homo sapien
agtttctccgtgtgccctgtgcctg

SEQ ID NO: 2016826 - DNA, 25 bp, Homo sapien
ttgttttgtgtcagtaagcaggcaa

SEQ ID NO: 2016827 - DNA, 25 bp, Homo sapien
cgtgaaaaatttccactggattttg

SEQ ID NO: 2016828 - DNA, 25 bp, Homo sapien
ccttcgtgaaaaatttccactggat

SEQ ID NO: 2016829 - DNA, 25 bp, Homo sapien
agcaggcaagcttccaaaaattgcc

SEQ ID NO: 2016830 - DNA, 25 bp, Homo sapien
atcctgttgcatgctgtagctgatg

SEQ ID NO: 2016831 - DNA, 25 bp, Homo sapien
tcctgttgcatgctgtagctgatgt

SEQ ID NO: 2016832 - DNA, 25 bp, Homo sapien
aagaactcctaaagccaacatattt

SEQ ID NO: 2016833 - DNA, 25 bp, Homo sapien
tagcaatggcaatgcaccttgttgg

SEQ ID NO: 2016834 - DNA, 25 bp, Homo sapien
gttggtgggtatctcacaacacaaa

SEQ ID NO: 2016835 - DNA, 25 bp, Homo sapien
caccttgttggtgggtatctcacaa

SEQ ID NO: 2016836 - DNA, 25 bp, Homo sapien
tttgatgccatatgtcaaatctcat

SEQ ID NO: 2016837 - DNA, 25 bp, Homo sapien
gccatatgtcaaatctcatcacttg

SEQ ID NO: 2016838 - DNA, 25 bp, Homo sapien
catcacttgctgtgaggagtgacat

SEQ ID NO: 2016839 - DNA, 25 bp, Homo sapien
ctcttctgcagcaggtgtagtttta

SEQ ID NO: 2016840 - DNA, 25 bp, Homo sapien
ggagaagctcttgggtttatctctt

SEQ ID NO: 2016841 - DNA, 25 bp, Homo sapien
tgggtttatctcttgaacccatacc

SEQ ID NO: 2016842 - DNA, 25 bp, Homo sapien
aaggagaagctcttgggtttatctc

SEQ ID NO: 2016843 - DNA, 25 bp, Homo sapien
ttatctcttgaacccataccttctg

SEQ ID NO: 2016844 - DNA, 25 bp, Homo sapien
tgctctctcaggtcctgtccttccc

SEQ ID NO: 2016845 - DNA, 25 bp, Homo sapien
ttgctctctcaggtcctgtccttcc

SEQ ID NO: 2016846 - DNA, 25 bp, Homo sapien
tgcctcccttcattgctactatgtc

SEQ ID NO: 2016847 - DNA, 25 bp, Homo sapien
tcattggtgattgaacaaagttcca

SEQ ID NO: 2016848 - DNA, 25 bp, Homo sapien
gggccctcacgggtatgcactctgc

SEQ ID NO: 2016849 - DNA, 25 bp, Homo sapien
cattgctactatgtctgttgcaggc

SEQ ID NO: 2016850 - DNA, 25 bp, Homo sapien
cttgctggctctatatttccttgct

SEQ ID NO: 2016851 - DNA, 25 bp, Homo sapien
tgctggctctatatttccttgctgg

SEQ ID NO: 2016852 - DNA, 25 bp, Homo sapien
tccttgctggctctatatttccttg

SEQ ID NO: 2016853 - DNA, 25 bp, Homo sapien
ctggctctatatttccttgctggct

SEQ ID NO: 2016854 - DNA, 25 bp, Homo sapien
agaaatagccatgaccatagtcata

SEQ ID NO: 2016855 - DNA, 25 bp, Homo sapien
tagccatgaccatagtcatatgacc

SEQ ID NO: 2016856 - DNA, 25 bp, Homo sapien
ccatgaccatagtcatatgacctga

SEQ ID NO: 2016857 - DNA, 25 bp, Homo sapien
ttttgtcatgcttctttatcctcat

SEQ ID NO: 2016858 - DNA, 25 bp, Homo sapien
caaatccaagattatgaaactttgg

SEQ ID NO: 2016859 - DNA, 25 bp, Homo sapien
ggttggcgaagactttgtgatttta

SEQ ID NO: 2016860 - DNA, 25 bp, Homo sapien
tgattttattgacagcataatgtag

SEQ ID NO: 2016861 - DNA, 25 bp, Homo sapien
tatgaaactttggttggcgaagact

SEQ ID NO: 2016862 - DNA, 25 bp, Homo sapien
cattggcagcaagcggcctgtagtc

SEQ ID NO: 2016863 - DNA, 25 bp, Homo sapien
gccattggcagcaagcggcctgtag

SEQ ID NO: 2016864 - DNA, 25 bp, Homo sapien
cagccattggcagcaagcggcctgt

SEQ ID NO: 2016865 - DNA, 25 bp, Homo sapien
ccaggctcagccattggcagcaagc

SEQ ID NO: 2016866 - DNA, 25 bp, Homo sapien
catcatttactaaaacctgaattcc

SEQ ID NO: 2016867 - DNA, 25 bp, Homo sapien
aaatcagtttttcatcatttactaa

SEQ ID NO: 2016868 - DNA, 25 bp, Homo sapien
ttttcatcatttactaaaacctgaa

SEQ ID NO: 2016869 - DNA, 25 bp, Homo sapien
ctgtggcttctatcaatttccagtg

SEQ ID NO: 2016870 - DNA, 25 bp, Homo sapien
atggagatcaaacgggcaattctga

SEQ ID NO: 2016871 - DNA, 25 bp, Homo sapien
tgggcatggagatcaaacgggcaat

SEQ ID NO: 2016872 - DNA, 25 bp, Homo sapien
aactcgtgggcatggagatcaaacg

SEQ ID NO: 2016873 - DNA, 25 bp, Homo sapien
actcgtgggcatggagatcaaacgg

SEQ ID NO: 2016874 - DNA, 25 bp, Homo sapien
tacgctgttaaaatctctccctgct

SEQ ID NO: 2016875 - DNA, 25 bp, Homo sapien
cactaataagtgttgtacttggtaa

SEQ ID NO: 2016876 - DNA, 25 bp, Homo sapien
ttaagtatcaaaggcctctgagagt

SEQ ID NO: 2016877 - DNA, 25 bp, Homo sapien
tacttggtaagaatttggagccctg

SEQ ID NO: 2016878 - DNA, 25 bp, Homo sapien
atcattaatagtgggtaaagcaggc

SEQ ID NO: 2016879 - DNA, 25 bp, Homo sapien
tttcatcattaatagtgggtaaagc

SEQ ID NO: 2016880 - DNA, 25 bp, Homo sapien
ttctttcatcattaatagtgggtaa

SEQ ID NO: 2016881 - DNA, 25 bp, Homo sapien
tcatcattaatagtgggtaaagcag

SEQ ID NO: 2016882 - DNA, 25 bp, Homo sapien
tttttgagactatgtggccatgcca

SEQ ID NO: 2016883 - DNA, 25 bp, Homo sapien
tctgacaagggatagttcaaaattc

SEQ ID NO: 2016884 - DNA, 25 bp, Homo sapien
ccttgaataaagtggagtcaggtcc

SEQ ID NO: 2016885 - DNA, 25 bp, Homo sapien
tcagaatgggttggtttgacctgca

SEQ ID NO: 2016886 - DNA, 25 bp, Homo sapien
gaagaggacaggtgtactaactctt

SEQ ID NO: 2016887 - DNA, 25 bp, Homo sapien
cctcctgtagggtccggcgcaccca

SEQ ID NO: 2016888 - DNA, 25 bp, Homo sapien
gggctgctctagcatctcacattgc

SEQ ID NO: 2016889 - DNA, 25 bp, Homo sapien
tgtagggtccggcgcacccacactt

SEQ ID NO: 2016890 - DNA, 25 bp, Homo sapien
cacaccttgatacctcttcagtact

SEQ ID NO: 2016891 - DNA, 25 bp, Homo sapien
ttctcttcacaccttgatacctctt

SEQ ID NO: 2016892 - DNA, 25 bp, Homo sapien
gatacctcttcagtacttcttgcca

SEQ ID NO: 2016893 - DNA, 25 bp, Homo sapien
tcttcagtacttcttgccagaatcc

SEQ ID NO: 2016894 - DNA, 25 bp, Homo sapien
tgaaggggacgacacagaaggaaaa

SEQ ID NO: 2016895 - DNA, 25 bp, Homo sapien
aaagggggcagtcatgaatcctgat

SEQ ID NO: 2016896 - DNA, 25 bp, Homo sapien
tcctgatgggaagataacgcattgc

SEQ ID NO: 2016897 - DNA, 25 bp, Homo sapien
catggagtactgaaggggacgacac

SEQ ID NO: 2016898 - DNA, 25 bp, Homo sapien
aggaagacagttacaacttcagttg

SEQ ID NO: 2016899 - DNA, 25 bp, Homo sapien
caacttcagttgaagcatctttctt

SEQ ID NO: 2016900 - DNA, 25 bp, Homo sapien
agcatctttcttcagtgtcactggg

SEQ ID NO: 2016901 - DNA, 25 bp, Homo sapien
tgtcactggggtgctatcaatcaaa

SEQ ID NO: 2016902 - DNA, 25 bp, Homo sapien
cagaaagctctactgctttctctgc

SEQ ID NO: 2016903 - DNA, 25 bp, Homo sapien
cctccagaaagctctactgctttct

SEQ ID NO: 2016904 - DNA, 25 bp, Homo sapien
gaaagctctactgctttctctgctc

SEQ ID NO: 2016905 - DNA, 25 bp, Homo sapien
tccagaaagctctactgctttctct

SEQ ID NO: 2016906 - DNA, 25 bp, Homo sapien
ctggcagcacatgggttgttgaatg

SEQ ID NO: 2016907 - DNA, 25 bp, Homo sapien
tcaggattccaatgtgtacggaagg

SEQ ID NO: 2016908 - DNA, 25 bp, Homo sapien
attttctggcagcacatgggttgtt

SEQ ID NO: 2016909 - DNA, 25 bp, Homo sapien
tctcaggattccaatgtgtacggaa

SEQ ID NO: 2016910 - DNA, 25 bp, Homo sapien
ctatgaatagggttgttgtagcaca

SEQ ID NO: 2016911 - DNA, 25 bp, Homo sapien
ggaaggatatagcagccaacacttt

SEQ ID NO: 2016912 - DNA, 25 bp, Homo sapien
cacagccatgtggttggaaggatat

SEQ ID NO: 2016913 - DNA, 25 bp, Homo sapien
cactttgtgaagtgatccatagtct

SEQ ID NO: 2016914 - DNA, 25 bp, Homo sapien
ctgctctttctacactatttatctt

SEQ ID NO: 2016915 - DNA, 25 bp, Homo sapien
tctttctacactatttatcttgcag

SEQ ID NO: 2016916 - DNA, 25 bp, Homo sapien
gctctttctacactatttatcttgc

SEQ ID NO: 2016917 - DNA, 25 bp, Homo sapien
tgctctttctacactatttatcttg

SEQ ID NO: 2016918 - DNA, 25 bp, Homo sapien
gctccttcccgttggatgctgtaca

SEQ ID NO: 2016919 - DNA, 25 bp, Homo sapien
ccttcccgttggatgctgtacaaca

SEQ ID NO: 2016920 - DNA, 25 bp, Homo sapien
ttcccgttggatgctgtacaacagc

SEQ ID NO: 2016921 - DNA, 25 bp, Homo sapien
tcccgttggatgctgtacaacagcc

SEQ ID NO: 2016922 - DNA, 25 bp, Homo sapien
ggtccagccctgctaaattgaaaga

SEQ ID NO: 2016923 - DNA, 25 bp, Homo sapien
ctgtgaatcatagggctaccgtgga

SEQ ID NO: 2016924 - DNA, 25 bp, Homo sapien
tcgctggtaccaccagaagttgtga

SEQ ID NO: 2016925 - DNA, 25 bp, Homo sapien
tctgtatcacagcttcgctggtacc

SEQ ID NO: 2016926 - DNA, 25 bp, Homo sapien
cagctgggtatggtttatctacttg

SEQ ID NO: 2016927 - DNA, 25 bp, Homo sapien
cttcagctgggtatggtttatctac

SEQ ID NO: 2016928 - DNA, 25 bp, Homo sapien
tcagctgggtatggtttatctactt

SEQ ID NO: 2016929 - DNA, 25 bp, Homo sapien
gctgggtatggtttatctacttgct

SEQ ID NO: 2016930 - DNA, 25 bp, Homo sapien
tcccccaggagacacaaaattcttc

SEQ ID NO: 2016931 - DNA, 25 bp, Homo sapien
tcgtggaacagacacactgtgctca

SEQ ID NO: 2016932 - DNA, 25 bp, Homo sapien
ttctagacggcaatatatagcaggc

SEQ ID NO: 2016933 - DNA, 25 bp, Homo sapien
actgtgctcatgagtagcgtaacgt

SEQ ID NO: 2016934 - DNA, 25 bp, Homo sapien
gggcacctcacttaaatctgtcact

SEQ ID NO: 2016935 - DNA, 25 bp, Homo sapien
tgcatgggaagtacggggcacctca

SEQ ID NO: 2016936 - DNA, 25 bp, Homo sapien
taatcaacacttcctggcggtgccc

SEQ ID NO: 2016937 - DNA, 25 bp, Homo sapien
ttaaatctgtcactacataatcaac

SEQ ID NO: 2016938 - DNA, 25 bp, Homo sapien
tcaggtagacatctccatggacccc

SEQ ID NO: 2016939 - DNA, 25 bp, Homo sapien
gaagcagcatccatcgctccaattg

SEQ ID NO: 2016940 - DNA, 25 bp, Homo sapien
tccagcattacagcaagagttcctg

SEQ ID NO: 2016941 - DNA, 25 bp, Homo sapien
ggctgtgagttgtgcccgaccacct

SEQ ID NO: 2016942 - DNA, 25 bp, Homo sapien
ggcccaggtattatgaggattagga

SEQ ID NO: 2016943 - DNA, 25 bp, Homo sapien
tccaggcaagatgtgatacctcctt

SEQ ID NO: 2016944 - DNA, 25 bp, Homo sapien
caaggatttgtaataatggcccagg

SEQ ID NO: 2016945 - DNA, 25 bp, Homo sapien
ttactgtgcatttctagtgagccct

SEQ ID NO: 2016946 - DNA, 25 bp, Homo sapien
ttagtcaaacatgggcacagcagca

SEQ ID NO: 2016947 - DNA, 25 bp, Homo sapien
tgcagctcaagttccgcgagtgaca

SEQ ID NO: 2016948 - DNA, 25 bp, Homo sapien
cagtgcagctcaagttccgcgagtg

SEQ ID NO: 2016949 - DNA, 25 bp, Homo sapien
gctcaagttccgcgagtgacagcat

SEQ ID NO: 2016950 - DNA, 25 bp, Homo sapien
gcagctcaagttccgcgagtgacag

SEQ ID NO: 2016951 - DNA, 25 bp, Homo sapien
ttccagacgcatcattctcccaaag

SEQ ID NO: 2016952 - DNA, 25 bp, Homo sapien
gcatgtctgcaataatgtcttttcc

SEQ ID NO: 2016953 - DNA, 25 bp, Homo sapien
cataaattgggttataaatagggag

SEQ ID NO: 2016954 - DNA, 25 bp, Homo sapien
ttaataagtgtcacttttgcatgtc

SEQ ID NO: 2016955 - DNA, 25 bp, Homo sapien
ggttcaagaaggaccagggtcagca

SEQ ID NO: 2016956 - DNA, 25 bp, Homo sapien
ttttctagtgacaagtgaaggtccg

SEQ ID NO: 2016957 - DNA, 25 bp, Homo sapien
tgaaggtccgatactggttgtgaaa

SEQ ID NO: 2016958 - DNA, 25 bp, Homo sapien
caagggagacagatatgatacagct

SEQ ID NO: 2016959 - DNA, 25 bp, Homo sapien
gagtcacctgtagccagctcaaagg

SEQ ID NO: 2016960 - DNA, 25 bp, Homo sapien
ctgaaaggggttcaagcaaggagtc

SEQ ID NO: 2016961 - DNA, 25 bp, Homo sapien
ggggttcaagcaaggagtcacctgt

SEQ ID NO: 2016962 - DNA, 25 bp, Homo sapien
cacctgtagccagctcaaaggccat

SEQ ID NO: 2016963 - DNA, 25 bp, Homo sapien
aagttctgtgatcaatgcaatgtga

SEQ ID NO: 2016964 - DNA, 25 bp, Homo sapien
tgcaatgtgatcttcatcttgagtg

SEQ ID NO: 2016965 - DNA, 25 bp, Homo sapien
gtgatcttcatcttgagtgtgctct

SEQ ID NO: 2016966 - DNA, 25 bp, Homo sapien
aatgcaatgtgatcttcatcttgag

SEQ ID NO: 2016967 - DNA, 25 bp, Homo sapien
tttggtgaaaaattccttggaatgc

SEQ ID NO: 2016968 - DNA, 25 bp, Homo sapien
ttccttggaatgcttccctggcaca

SEQ ID NO: 2016969 - DNA, 25 bp, Homo sapien
ttccctggcacagtgagcttgtgag

SEQ ID NO: 2016970 - DNA, 25 bp, Homo sapien
aaaattccttggaatgcttccctgg

SEQ ID NO: 2016971 - DNA, 25 bp, Homo sapien
aaaaggacgcttgcaatttcaagga

SEQ ID NO: 2016972 - DNA, 25 bp, Homo sapien
aaggacgcttgcaatttcaaggaag

SEQ ID NO: 2016973 - DNA, 25 bp, Homo sapien
taaaaaggacgcttgcaatttcaag

SEQ ID NO: 2016974 - DNA, 25 bp, Homo sapien
tcttaaaaaggacgcttgcaatttc

SEQ ID NO: 2016975 - DNA, 25 bp, Homo sapien
ggtacaggacccacatgaaacttag

SEQ ID NO: 2016976 - DNA, 25 bp, Homo sapien
tctggtgttagtaagaaaattggct

SEQ ID NO: 2016977 - DNA, 25 bp, Homo sapien
aaattggcttgagtattgacatagg

SEQ ID NO: 2016978 - DNA, 25 bp, Homo sapien
ttgacataggagtcagcggcaggct

SEQ ID NO: 2016979 - DNA, 25 bp, Homo sapien
cacacctgaagagtgtattgagagt

SEQ ID NO: 2016980 - DNA, 25 bp, Homo sapien
gtgtattgagagtgtgctctctgtg

SEQ ID NO: 2016981 - DNA, 25 bp, Homo sapien
tccacacctgaagagtgtattgaga

SEQ ID NO: 2016982 - DNA, 25 bp, Homo sapien
tcatccacacctgaagagtgtattg

SEQ ID NO: 2016983 - DNA, 25 bp, Homo sapien
tttcttcttatacacagtttcatag

SEQ ID NO: 2016984 - DNA, 25 bp, Homo sapien
gtggtaggaaatgttcctggctgag

SEQ ID NO: 2016985 - DNA, 25 bp, Homo sapien
ggtaggaaatgttcctggctgagac

SEQ ID NO: 2016986 - DNA, 25 bp, Homo sapien
ttcttcttatacacagtttcataga

SEQ ID NO: 2016987 - DNA, 25 bp, Homo sapien
cttgtctagtatgctttgcagctga

SEQ ID NO: 2016988 - DNA, 25 bp, Homo sapien
ttgtctagtatgctttgcagctgat

SEQ ID NO: 2016989 - DNA, 25 bp, Homo sapien
tggtaattctgatacaattgtgatt

SEQ ID NO: 2016990 - DNA, 25 bp, Homo sapien
taattctgatacaattgtgattgtt

SEQ ID NO: 2016991 - DNA, 25 bp, Homo sapien
ctaggggttgagaggataatgcaga

SEQ ID NO: 2016992 - DNA, 25 bp, Homo sapien
gcagaagtgccaaggagtcctcatg

SEQ ID NO: 2016993 - DNA, 25 bp, Homo sapien
ttgagaggataatgcagaagtgcca

SEQ ID NO: 2016994 - DNA, 25 bp, Homo sapien
tgcagaagtgccaaggagtcctcat

SEQ ID NO: 2016995 - DNA, 25 bp, Homo sapien
caataaagatatcctctaagcacag

SEQ ID NO: 2016996 - DNA, 25 bp, Homo sapien
tgcctttgccttgccaatggactct

SEQ ID NO: 2016997 - DNA, 25 bp, Homo sapien
aattccagattctggatgtgtgcct

SEQ ID NO: 2016998 - DNA, 25 bp, Homo sapien
tcatgttttcacgtctaactgaaca

SEQ ID NO: 2016999 - DNA, 25 bp, Homo sapien
gtgcacttgttataatgagaggcat

SEQ ID NO: 2017000 - DNA, 25 bp, Homo sapien
ttccgctctactgcattattcagtg

SEQ ID NO: 2017001 - DNA, 25 bp, Homo sapien
gaaggccatgaagtcctaaagtttg

SEQ ID NO: 2017002 - DNA, 25 bp, Homo sapien
tgctgttggttttacgaccatgtgc

SEQ ID NO: 2017003 - DNA, 25 bp, Homo sapien
ggtcttagatagacggaacgcttca

SEQ ID NO: 2017004 - DNA, 25 bp, Homo sapien
aggtcctgtgtggtcgagcctccgt

SEQ ID NO: 2017005 - DNA, 25 bp, Homo sapien
tcatcctccttagacaggcatggca

SEQ ID NO: 2017006 - DNA, 25 bp, Homo sapien
aatatgcaataatgctgtcatggcc

SEQ ID NO: 2017007 - DNA, 25 bp, Homo sapien
tggcgcacgatctgcttacaatggt

SEQ ID NO: 2017008 - DNA, 25 bp, Homo sapien
gatctgcttacaatggttctggaca

SEQ ID NO: 2017009 - DNA, 25 bp, Homo sapien
ttccagctacctggcgcacgatctg

SEQ ID NO: 2017010 - DNA, 25 bp, Homo sapien
gcttacaatggttctggacactttc

SEQ ID NO: 2017011 - DNA, 25 bp, Homo sapien
aaattcatgggatagcccataaatg

SEQ ID NO: 2017012 - DNA, 25 bp, Homo sapien
gatagcccataaatgggactacagc

SEQ ID NO: 2017013 - DNA, 25 bp, Homo sapien
tagcccataaatgggactacagcaa

SEQ ID NO: 2017014 - DNA, 25 bp, Homo sapien
catgggatagcccataaatgggact

SEQ ID NO: 2017015 - DNA, 25 bp, Homo sapien
gacgctgttcaattccctcaccatt

SEQ ID NO: 2017016 - DNA, 25 bp, Homo sapien
tcatccacggattctcgtgacgctg

SEQ ID NO: 2017017 - DNA, 25 bp, Homo sapien
ggcccacgatgaaatggatgagcaa

SEQ ID NO: 2017018 - DNA, 25 bp, Homo sapien
gatgagcaaattccaacaggcccga

SEQ ID NO: 2017019 - DNA, 25 bp, Homo sapien
tgttggaaacaggagtactactgct

SEQ ID NO: 2017020 - DNA, 25 bp, Homo sapien
tacaagtgagtcaggtaataaaggc

SEQ ID NO: 2017021 - DNA, 25 bp, Homo sapien
tactactgctttatcgaggagtccg

SEQ ID NO: 2017022 - DNA, 25 bp, Homo sapien
ctgaaagagttcaaatagttcccta

SEQ ID NO: 2017023 - DNA, 25 bp, Homo sapien
ggaagtactccatcttttcggtaga

SEQ ID NO: 2017024 - DNA, 25 bp, Homo sapien
tgcccccggaagagcaaactgtcag

SEQ ID NO: 2017025 - DNA, 25 bp, Homo sapien
cctcttattgaaacaaatagattta

SEQ ID NO: 2017026 - DNA, 25 bp, Homo sapien
tttctaccgaatcttgcataatgat

SEQ ID NO: 2017027 - DNA, 25 bp, Homo sapien
tctactactattgcttggagtggat

SEQ ID NO: 2017028 - DNA, 25 bp, Homo sapien
aattttagtcttgcttgctaccact

SEQ ID NO: 2017029 - DNA, 25 bp, Homo sapien
tgtaatttcatacttgggctaagac

SEQ ID NO: 2017030 - DNA, 25 bp, Homo sapien
tatgtgtatcccatgtaagctaaca

SEQ ID NO: 2017031 - DNA, 25 bp, Homo sapien
tgagagtcactggatgtctcttgta

SEQ ID NO: 2017032 - DNA, 25 bp, Homo sapien
gtgagagtcactggatgtctcttgt

SEQ ID NO: 2017033 - DNA, 25 bp, Homo sapien
gttgccaatcgccagtgaataacta

SEQ ID NO: 2017034 - DNA, 25 bp, Homo sapien
gcctgaaagtttatatcctccaggg

SEQ ID NO: 2017035 - DNA, 25 bp, Homo sapien
taactattgcgggattctaaatcgc

SEQ ID NO: 2017036 - DNA, 25 bp, Homo sapien
gcaaaaaagctgaactgcctgaaag

SEQ ID NO: 2017037 - DNA, 25 bp, Homo sapien
tcatacagccattagtttcagtcat

SEQ ID NO: 2017038 - DNA, 25 bp, Homo sapien
tctcttcctcatacagccattagtt

SEQ ID NO: 2017039 - DNA, 25 bp, Homo sapien
tcttcctcatacagccattagtttc

SEQ ID NO: 2017040 - DNA, 25 bp, Homo sapien
tgttctcttcctcatacagccatta

SEQ ID NO: 2017041 - DNA, 25 bp, Homo sapien
gggcatattctggagtccgtttcta

SEQ ID NO: 2017042 - DNA, 25 bp, Homo sapien
ttgtaccagtattggttgactgcga

SEQ ID NO: 2017043 - DNA, 25 bp, Homo sapien
tctggagtccgtttctatttcttca

SEQ ID NO: 2017044 - DNA, 25 bp, Homo sapien
ggttgactgcgaatcctttaaacat

SEQ ID NO: 2017045 - DNA, 25 bp, Homo sapien
aagaaaagttgaattctcatgacag

SEQ ID NO: 2017046 - DNA, 25 bp, Homo sapien
aattctcatgacaggggttagccac

SEQ ID NO: 2017047 - DNA, 25 bp, Homo sapien
tttatgtttactggcttttttagca

SEQ ID NO: 2017048 - DNA, 25 bp, Homo sapien
gaaaagttgaattctcatgacaggg

SEQ ID NO: 2017049 - DNA, 25 bp, Homo sapien
tacacaatacctcttagtgcctctt

SEQ ID NO: 2017050 - DNA, 25 bp, Homo sapien
actcttacacaatacctcttagtgc

SEQ ID NO: 2017051 - DNA, 25 bp, Homo sapien
caataaacactcttacacaatacct

SEQ ID NO: 2017052 - DNA, 25 bp, Homo sapien
acaatacctcttagtgcctcttcta

SEQ ID NO: 2017053 - DNA, 25 bp, Homo sapien
cctccaaccaatccgatgaaaaacg

SEQ ID NO: 2017054 - DNA, 25 bp, Homo sapien
catagccttgagagtcaccctccaa

SEQ ID NO: 2017055 - DNA, 25 bp, Homo sapien
ccaatccgatgaaaaacgtgcaatc

SEQ ID NO: 2017056 - DNA, 25 bp, Homo sapien
aggccaggtcatagccttgagagtc

SEQ ID NO: 2017057 - DNA, 25 bp, Homo sapien
gtaatgccgaacctcactgacaagc

SEQ ID NO: 2017058 - DNA, 25 bp, Homo sapien
tcaggtaatgccgaacctcactgac

SEQ ID NO: 2017059 - DNA, 25 bp, Homo sapien
ttttcaggtaatgccgaacctcact

SEQ ID NO: 2017060 - DNA, 25 bp, Homo sapien
ctttttcaggtaatgccgaacctca

SEQ ID NO: 2017061 - DNA, 25 bp, Homo sapien
gaagttgcagactatcattgaaagc

SEQ ID NO: 2017062 - DNA, 25 bp, Homo sapien
gatgtaaatggcctcagagtatgca

SEQ ID NO: 2017063 - DNA, 25 bp, Homo sapien
cagtgattccacagtacaaaagaga

SEQ ID NO: 2017064 - DNA, 25 bp, Homo sapien
agggtacttcaaatgttatgtgtgc

SEQ ID NO: 2017065 - DNA, 25 bp, Homo sapien
tcggcatctggcgtgtctgtgcatg

SEQ ID NO: 2017066 - DNA, 25 bp, Homo sapien
cggcaagctcggcatctggcgtgtc

SEQ ID NO: 2017067 - DNA, 25 bp, Homo sapien
catctggcgtgtctgtgcatgtcat

SEQ ID NO: 2017068 - DNA, 25 bp, Homo sapien
ctgtgcatgtcatttcccactgtca

SEQ ID NO: 2017069 - DNA, 25 bp, Homo sapien
tcttctattatcctgaatgtatttg

SEQ ID NO: 2017070 - DNA, 25 bp, Homo sapien
ggaaataaattcctgagattattaa

SEQ ID NO: 2017071 - DNA, 25 bp, Homo sapien
cctgaatgtatttgtcttgaaaata

SEQ ID NO: 2017072 - DNA, 25 bp, Homo sapien
catatgggggactgggtttatcagc

SEQ ID NO: 2017073 - DNA, 25 bp, Homo sapien
aataaataacaggttcaaaatgctg

SEQ ID NO: 2017074 - DNA, 25 bp, Homo sapien
ataaataacaggttcaaaatgctga

SEQ ID NO: 2017075 - DNA, 25 bp, Homo sapien
atcaactgactcagtcccagacagc

SEQ ID NO: 2017076 - DNA, 25 bp, Homo sapien
taataaataacaggttcaaaatgct

SEQ ID NO: 2017077 - DNA, 25 bp, Homo sapien
cagtatttcctgtagcacaccaaaa

SEQ ID NO: 2017078 - DNA, 25 bp, Homo sapien
tttcctgtagcacaccaaaatgcat

SEQ ID NO: 2017079 - DNA, 25 bp, Homo sapien
tcttttctgtcagtatttcctgtag

SEQ ID NO: 2017080 - DNA, 25 bp, Homo sapien
ttttctgtcagtatttcctgtagca

SEQ ID NO: 2017081 - DNA, 25 bp, Homo sapien
catgttaccttcgtatcatcttctc

SEQ ID NO: 2017082 - DNA, 25 bp, Homo sapien
atgttaccttcgtatcatcttctct

SEQ ID NO: 2017083 - DNA, 25 bp, Homo sapien
tcatgttaccttcgtatcatcttct

SEQ ID NO: 2017084 - DNA, 25 bp, Homo sapien
tgctccacaagcatccttcccttga

SEQ ID NO: 2017085 - DNA, 25 bp, Homo sapien
ttcccacatgatttctgctgctcca

SEQ ID NO: 2017086 - DNA, 25 bp, Homo sapien
tctcataatcgggagagcttcagcc

SEQ ID NO: 2017087 - DNA, 25 bp, Homo sapien
tgtgcacagtagctcgccaatgggt

SEQ ID NO: 2017088 - DNA, 25 bp, Homo sapien
ggaggatagcatgccaggacttcat

SEQ ID NO: 2017089 - DNA, 25 bp, Homo sapien
ccacatgctggaggatagcatgcca

SEQ ID NO: 2017090 - DNA, 25 bp, Homo sapien
cctttggttcagcacatacaccaca

SEQ ID NO: 2017091 - DNA, 25 bp, Homo sapien
tttggttcagcacatacaccacatg

SEQ ID NO: 2017092 - DNA, 25 bp, Homo sapien
caccctgcactgttcgtgtccgttt

SEQ ID NO: 2017093 - DNA, 25 bp, Homo sapien
cgtgtccgtttatgctttctaagtc

SEQ ID NO: 2017094 - DNA, 25 bp, Homo sapien
ttctaagtctactctctctctagct

SEQ ID NO: 2017095 - DNA, 25 bp, Homo sapien
gctctttgaatcagtgctagtctca

SEQ ID NO: 2017096 - DNA, 25 bp, Homo sapien
gccttatcaagcatagttgtgccag

SEQ ID NO: 2017097 - DNA, 25 bp, Homo sapien
ttaaaggaacgtggtgtttgctgct

SEQ ID NO: 2017098 - DNA, 25 bp, Homo sapien
gacagaagtggagggccttatcaag

SEQ ID NO: 2017099 - DNA, 25 bp, Homo sapien
gcatagttgtgccagaatcagtggg

SEQ ID NO: 2017100 - DNA, 25 bp, Homo sapien
caaaacatgctggttcagggagcac

SEQ ID NO: 2017101 - DNA, 25 bp, Homo sapien
catgttcatggtatcgagtctccat

SEQ ID NO: 2017102 - DNA, 25 bp, Homo sapien
tgaactccacgtgaagatgcctatg

SEQ ID NO: 2017103 - DNA, 25 bp, Homo sapien
gatgcctatgattgtggagaacaca

SEQ ID NO: 2017104 - DNA, 25 bp, Homo sapien
gccgtccttcccaatagagcattct

SEQ ID NO: 2017105 - DNA, 25 bp, Homo sapien
cattctgcaatgattctccatcact

SEQ ID NO: 2017106 - DNA, 25 bp, Homo sapien
gcattctgcaatgattctccatcac

SEQ ID NO: 2017107 - DNA, 25 bp, Homo sapien
gagcattctgcaatgattctccatc

SEQ ID NO: 2017108 - DNA, 25 bp, Homo sapien
tcactcaagagtatattcatcattt

SEQ ID NO: 2017109 - DNA, 25 bp, Homo sapien
tgaatgacaactttagaaatcttct

SEQ ID NO: 2017110 - DNA, 25 bp, Homo sapien
cactcaagagtatattcatcatttc

SEQ ID NO: 2017111 - DNA, 25 bp, Homo sapien
atgacaactttagaaatcttcttcc

SEQ ID NO: 2017112 - DNA, 25 bp, Homo sapien
tgtttgagtgacagccactttgtag

SEQ ID NO: 2017113 - DNA, 25 bp, Homo sapien
cagagagccactgtttgagtgacag

SEQ ID NO: 2017114 - DNA, 25 bp, Homo sapien
ttgagtgacagccactttgtagcat

SEQ ID NO: 2017115 - DNA, 25 bp, Homo sapien
tgcagagagccactgtttgagtgac

SEQ ID NO: 2017116 - DNA, 25 bp, Homo sapien
tgaccacgaggtgaacaggtatctc

SEQ ID NO: 2017117 - DNA, 25 bp, Homo sapien
tctgtctctcccaatattactgtct

SEQ ID NO: 2017118 - DNA, 25 bp, Homo sapien
ctggtatgttcaagatcaagactaa

SEQ ID NO: 2017119 - DNA, 25 bp, Homo sapien
cataggatgagctagggctatcttc

SEQ ID NO: 2017120 - DNA, 25 bp, Homo sapien
tcagagcaagtgttcaggtgcagca

SEQ ID NO: 2017121 - DNA, 25 bp, Homo sapien
gtgcagcagtgaattcttactaggt

SEQ ID NO: 2017122 - DNA, 25 bp, Homo sapien
gaattcttactaggtagttcttcaa

SEQ ID NO: 2017123 - DNA, 25 bp, Homo sapien
taagttgtacctatactcagagcaa

SEQ ID NO: 2017124 - DNA, 25 bp, Homo sapien
cctcaagcacttttgtcgagaacct

SEQ ID NO: 2017125 - DNA, 25 bp, Homo sapien
tgtcgagaaccttcttagtgagctg

SEQ ID NO: 2017126 - DNA, 25 bp, Homo sapien
cttcttagtgagctgctgtttgtac

SEQ ID NO: 2017127 - DNA, 25 bp, Homo sapien
gtgtcctcccctcaagcacttttgt

SEQ ID NO: 2017128 - DNA, 25 bp, Homo sapien
tcttccgggtgtgaagttttgatct

SEQ ID NO: 2017129 - DNA, 25 bp, Homo sapien
caaatgctcgtcttcgtactccagc

SEQ ID NO: 2017130 - DNA, 25 bp, Homo sapien
tgttgggcctagcacgtattcctgc

SEQ ID NO: 2017131 - DNA, 25 bp, Homo sapien
tgtgaagttttgatcttcctatccc

SEQ ID NO: 2017132 - DNA, 25 bp, Homo sapien
tagcaactgtgtgccctatactctg

SEQ ID NO: 2017133 - DNA, 25 bp, Homo sapien
ctttttgtccaacagtcagcaccct

SEQ ID NO: 2017134 - DNA, 25 bp, Homo sapien
tactacttgcttcgttacctcctgc

SEQ ID NO: 2017135 - DNA, 25 bp, Homo sapien
tgaagcagataacatactacttgct

SEQ ID NO: 2017136 - DNA, 25 bp, Homo sapien
atcagtgcaagttggaacaccttgc

SEQ ID NO: 2017137 - DNA, 25 bp, Homo sapien
ttattcaatcagtgcaagttggaac

SEQ ID NO: 2017138 - DNA, 25 bp, Homo sapien
ttcaatcagtgcaagttggaacacc

SEQ ID NO: 2017139 - DNA, 25 bp, Homo sapien
caatcagtgcaagttggaacacctt

SEQ ID NO: 2017140 - DNA, 25 bp, Homo sapien
caggaatgaccacttattccggagc

SEQ ID NO: 2017141 - DNA, 25 bp, Homo sapien
tcttccgctttcaggaatgaccact

SEQ ID NO: 2017142 - DNA, 25 bp, Homo sapien
acttattccggagcaagtccaggag

SEQ ID NO: 2017143 - DNA, 25 bp, Homo sapien
tattcttccgctttcaggaatgacc

SEQ ID NO: 2017144 - DNA, 25 bp, Homo sapien
aggacctctgttccctcacactgaa

SEQ ID NO: 2017145 - DNA, 25 bp, Homo sapien
tctgttccctcacactgaaatccat

SEQ ID NO: 2017146 - DNA, 25 bp, Homo sapien
gacctctgttccctcacactgaaat

SEQ ID NO: 2017147 - DNA, 25 bp, Homo sapien
tgaggacctctgttccctcacactg

SEQ ID NO: 2017148 - DNA, 25 bp, Homo sapien
agattggacagccatgcaactggag

SEQ ID NO: 2017149 - DNA, 25 bp, Homo sapien
gattggacagccatgcaactggaga

SEQ ID NO: 2017150 - DNA, 25 bp, Homo sapien
aagattggacagccatgcaactgga

SEQ ID NO: 2017151 - DNA, 25 bp, Homo sapien
gaagattggacagccatgcaactgg

SEQ ID NO: 2017152 - DNA, 25 bp, Homo sapien
actcttctgtctcctaacaagttac

SEQ ID NO: 2017153 - DNA, 25 bp, Homo sapien
cctgatacggtgtcgaatgcttctg

SEQ ID NO: 2017154 - DNA, 25 bp, Homo sapien
ccaaagaaaatgcagcactccctga

SEQ ID NO: 2017155 - DNA, 25 bp, Homo sapien
taaatgatttgttatcagttcacat

SEQ ID NO: 2017156 - DNA, 25 bp, Homo sapien
tgaaattctgccagtgcaaccgtca

SEQ ID NO: 2017157 - DNA, 25 bp, Homo sapien
gaaattctgccagtgcaaccgtcat
